United States Patent Application Publication US 2013/0129668 A1 - sequence listing, part 19

SEQ ID NO: 310206 - DNA, 122 bp, Homo sapiens
tctgttctcagtgagacagtactgtgcagctgcaggcagcggctgccccacgagcaccctcgcgggggtcatagccacgagcaccctcgccggagtcatagccacgagcaccctcgccggag

SEQ ID NO: 310207 - DNA, 122 bp, Homo sapiens
ccttggatcattcatggtcttcatttaccttggagcagacattaagactcaagcattggccgggtgcggtggctcacgtctgtaataccagcactttgggaggccgatgtgggtggatcaca

SEQ ID NO: 310208 - DNA, 122 bp, Homo sapiens
gccctgggcggcagccctcaggaaggaggacgggtcagggcctcacctggcaaaactttccggaagagccttttccacacggtcagcttgatgtcagcctggtggaggcctggcttgaagga

SEQ ID NO: 310209 - DNA, 122 bp, Homo sapiens
tgagatcgacgtccccctgcacctggggcgcctcctgatggtgaagctgcgcaaacacaacgtgctgttgagtctcgactggttctgcaagtggatctcagtgcagggcccggggacccaag

SEQ ID NO: 310210 - DNA, 122 bp, Homo sapiens
tccgttcatggcacagggagtagtctgacctgcaagagaaacagattgagactttccagccgcaggacctttggtcttgtggagggagaaatcagtgaaggccggccactcagtcacctgga

SEQ ID NO: 310211 - DNA, 122 bp, Homo sapiens
tgggtcatcttcgatcatcttcctgccccagtagttggattgccattccgcagatgtcaccgcattggctctcacaactagaaggggatgaggctgcaatgaggatgaaggctgatctgcca

SEQ ID NO: 310212 - DNA, 122 bp, Homo sapiens
acaagccataaccctgcatgttaactgtgaacctggtgaaaagagccatcactactaaaacgcatgctaaaaaatgcaaagtcttacctttttaatgacaaggaccaaagcacctgtgagag

SEQ ID NO: 310213 - DNA, 122 bp, Homo sapiens
aagccttgagaactcttggctgctctgcaagactgagccccatgaaggagccacgtgcggcgtggaaagagtgctgagttcaaattgtagccctgccactaatttgctgggccagtcactta

SEQ ID NO: 310214 - DNA, 122 bp, Homo sapiens
aatacccaaggacccgaggaccctgctcacttcccatggattgaggagcccgtggggctgcgttaaactgtttttattatcaatgcccccggagactagcaagagaggtggggagtcaaaca

SEQ ID NO: 310215 - DNA, 122 bp, Homo sapiens
ggcacagggcgagtcccaccagcgtgggcgtccagagctatttctgacaagacccctttgcgcctgcccagggaagagccaagtggccccaggcaagaccgccccgcccggctgccacacct

SEQ ID NO: 310216 - DNA, 122 bp, Homo sapiens
gagagggaacaagctcctggccgggcctaatgggttccaggtgtgctctgtgccctgcagcggctgaaccggcagcagtggtggtggctgtgactgtgcctggctggctgagaagacccagc

SEQ ID NO: 310217 - DNA, 122 bp, Homo sapiens
tctgggggctttgcacccagcagttggcacaggacaggcctgttcaggttttagcacagtcggccatgatccgtgagctgctgacctggatttttcccactggaggccaaatccaagaggaa

SEQ ID NO: 310218 - DNA, 122 bp, Homo sapiens
cacacaatcacaaggccccacaataggccgtctgcaggctgaggaacaaggaagccagtccgagtcccaaaacctcaaaagtaaggaagtggacagttcagccttcagtctgtggctgaagg

SEQ ID NO: 310219 - DNA, 122 bp, Homo sapiens
taggttctagctcattctagcacttttggaaaattgggtcacctctttgggccttaatttcgtcatctataaaacaggaaaaaatcagtcctcagcttacctgatgttgcaatgacttagtg

SEQ ID NO: 310220 - DNA, 122 bp, Homo sapiens
cagaatcagattacagacctaacaaattcttctgaaaactctgaacatggacggaggtgccgagggaaggccaaggacgcaagggacactgagggggcgggaccgactcagagcctcattcc

SEQ ID NO: 310221 - DNA, 122 bp, Homo sapiens
ctgggggtcgtgcgggactccatgtttcagaaccctctcatcgtcaaggtgagcaccccacgcccaccgcgctttcgctgtcgccggctccgggcacctgcgccgccgggggtccccacccg

SEQ ID NO: 310222 - DNA, 122 bp, Homo sapiens
aggcctccctgccgcagggccaaggcaggggcagcaggaagaggctgggacagctagccacggagctgtcagcatgactcagcacttccacatgccagcaggccaggagcactccctgcagc

SEQ ID NO: 310223 - DNA, 122 bp, Homo sapiens
cggaaatgagccctttgggaggtaattatggttagtggggtcatgagggtgtggcccacgcgatggaagtacagcccttataagaaaggatgccagagagcttgctttccctgcactgtgtg

SEQ ID NO: 310224 - DNA, 122 bp, Homo sapiens
cagaaaattgcaggtggtgacgcttctgcaaacagcagagccccgggcacctgtccaaggcggctccggaaggccccgcgagtcccgtgcgcggggacttcccaggggcggggtcgcggggc

SEQ ID NO: 310225 - DNA, 122 bp, Homo sapiens
gtggagtaggggcgtggagttgtgagcggggtctggcctcggccgggggcgaaggtagatcggcggggccgcgagcggagggagggaggcccgcggcggcgcggcggcagcgaaggccagct

SEQ ID NO: 310226 - DNA, 122 bp, Homo sapiens
caccaaaacgtagttaaccgggtgtctgaccacatggctgccaggagcctagtgagtctgcgcacacgcactacctccgccccggcagttcctgagtgggtgcgcaggcgcaagaggagcac

SEQ ID NO: 310227 - DNA, 122 bp, Homo sapiens
aggctgcagttggagagcaaacctggaggagcagccgcggtaaggcccagagtgcgaagacgccgcgtctaagggcagcagaggggacctggaactggagggttggaagaagggtggtcaca

SEQ ID NO: 310228 - DNA, 122 bp, Homo sapiens
aattaggtgtttgtttaacaagaaaccaaagagaggtcagtgtctgagttactggttattcgaggccatttactagctgtgtgacctgtagtgagttgcttaacctttctggacctcagttt

SEQ ID NO: 310229 - DNA, 122 bp, Homo sapiens
tgggggtctcaagctcagttccccctctctgctcatggttacctagtgtggtcctcagctcgagcccctcccaactgccctccatctcatcatccttatttatttatttaattttttaggcg

SEQ ID NO: 310230 - DNA, 122 bp, Homo sapiens
aggaagtcgtgagatgcagcacgaatgtgattttgttaccacgctcccctggaggcacgtcgtgctgttctagaaagcctgtcgttggaggaaaacacttgatgagcctgcggtaaaggcgt

SEQ ID NO: 310231 - DNA, 122 bp, Homo sapiens
attggattcaccgagcctggtgagaatgactcaggagtggttgtccgagggtgtgccctgcggttcctgtccgagtagtgttcacgcgtgcccagtggtggccgatggggtcacggcccctc

SEQ ID NO: 310232 - DNA, 122 bp, Homo sapiens
accacttccagttgctatggttacgagttgcaacctccagaaagaattcgtggtttcacccgggaaaacagctccccggattaaacggataggtttacacatactgatccacccagctattc

SEQ ID NO: 310233 - DNA, 122 bp, Homo sapiens
taaatttaaaaaatcaaaccatcacaaagcacctagagctttatcttccctggtgttttacgaagagcttcaaagtcccttagaaaaagtaaagcagcatctaggttataggtagatcactt

SEQ ID NO: 310234 - DNA, 122 bp, Homo sapiens
ggtgttgctcttttctttcctcagtggcatcctgtaagcttttgctatcttcatttttcccgccaagctgttttctcactgtctcagaggaagtcagaagtcagtatctaccaagcagccaa

SEQ ID NO: 310235 - DNA, 122 bp, Homo sapiens
cctcacttacagttttttgggggaaattcccaccggccttggcccttgccaccaaagtttcgcacccgatggataatctgcagctgctgctcaatggtcgaggtgatgttcacgtcatctgg

SEQ ID NO: 310236 - DNA, 122 bp, Homo sapiens
gcagcaggaagcacacagtcggggatatgcggcactggcgaatgcacgaggaggaggcaccgtgcatgggcccctccctggtcacacacctgcttgtgtggacgccaggcagaccctgccgt

SEQ ID NO: 310237 - DNA, 122 bp, Homo sapiens
tggtacgtctctggaggcaggttttaggtttcgcgggttattaggggccaatgctggtaccgcccctttccaggagggctgccttggcgactaccgcttagaccatgtcgtgcctttgggtt

SEQ ID NO: 310238 - DNA, 122 bp, Homo sapiens
ccgctcctgcttcatctcttggaatagtgtttggcacattatagtatctgcttctactatcgtcttcccaactggaacacgagccccgcggggctggggacaaggtcttaccttgcatccca

SEQ ID NO: 310239 - DNA, 122 bp, Homo sapiens
ctcctgacccctccattcctcgtccccgtagtaatcccctccggttttcctcagtctccacgtacgtccctcaaagcgcgtcctaaaacccggataaccggagcgctccccatggaccacac

SEQ ID NO: 310240 - DNA, 122 bp, Homo sapiens
tctggctctgcacagagctggagccgcggccgcacagaagcccgttcttgtggcttcctccgttggtcaagctctgtgccaagaggcctgccagaatcccctcacccactgcagcctccaca

SEQ ID NO: 310241 - DNA, 122 bp, Homo sapiens
gggccggccccgagggtggagctgccgggagcagacagggcgctccgcagcccacctgagcgcgccgggcccgtctcggccccccggccgtggctggtacttttccgcgtggggccagggcg

SEQ ID NO: 310242 - DNA, 122 bp, Homo sapiens
caggaccagtggtgggtttcatgctccccttccttgggcagtaaggacaacagtcgtggacgggaagctggcttcatgtcatgggtgtgtgtccctttaaaacacaaggtagactaacattt

SEQ ID NO: 310243 - DNA, 122 bp, Homo sapiens
tgcctgatcctcagtgtctggaacaggcaagaagcttatctctgtcctctttctcctgtgcgtcattgactgcgttgggatgcctttatgcatgaagcttttgcttcacagttggaacagct

SEQ ID NO: 310244 - DNA, 122 bp, Homo sapiens
ttcctgcaggaaatattgtgtttgacctctatgcaaatgactctctggactttcagaaatcgctaccgacagtgcatctgatgcctccaacaaagacacagtcccaaattttaacatcaaga

SEQ ID NO: 310245 - DNA, 122 bp, Homo sapiens
gcaggccaaggctgggctgccggtttccacttagtgccgcaactcaggccacctggctctcgcaggtgcaaaataattaaaattaacccagagaaggggagcggcggccttgggtgtacttt

SEQ ID NO: 310246 - DNA, 122 bp, Homo sapiens
ttccagaggcacctgggatgatgcccctctagcggtaggcgaactggggagtgtgggcggcgggggaaggcgaggccctggaggacctgttgtttttcctgttgcaagtgaaaaggaaacaa

SEQ ID NO: 310247 - DNA, 122 bp, Homo sapiens
caccgagttgtgggtgcagcccctgaggggtcaggaggggtcacaggaaaggggccgctgcggaagccctcggcctggggcactggttccccaggatggcagagggtcttggccatcacaga

SEQ ID NO: 310248 - DNA, 122 bp, Homo sapiens
ttcacttagggaagactgtgagggaacaggtttgggaaatataaggagctcagttttggacgtgttaagattgagatgcttaattagactttttattgatttcatggagactattggatatg

SEQ ID NO: 310249 - DNA, 122 bp, Homo sapiens
cccgctggccttctaggccgaggtggagcccaccgccctttctaggacgcggatcgccaccgaagaagacgcggaaaagcaaaaagcgcgtgccactctaccccagagtttcggcggcttcc

SEQ ID NO: 310250 - DNA, 122 bp, Homo sapiens
cggtgggcaggggagcatcagccctgctcaggctgaaggcatgtggccctgggctccagacgtctcgcaccacagtggaaagacatccaaagagcaggtggggacgaccgtccagctcagag

SEQ ID NO: 310251 - DNA, 122 bp, Homo sapiens
tgctttggccattctcacagatgttttctctgtccaatttttaaggctctccagggatggcgattttacctccttctctggtaatctattacaatatttgattacccctacagtctagaaaa

SEQ ID NO: 310252 - DNA, 122 bp, Homo sapiens
gggcggggccgaatacgagtggccaggggcacgacgggagctgtagtccagggcacggcccgacccgcgtgaagaggggaataatccttttcctcggtccggctgtgctgcacactcactct

SEQ ID NO: 310253 - DNA, 122 bp, Homo sapiens
ccgcgcccggccctgagcccagctcttaagcacgcagtccaacacgtttagctggagagacgccgggtcacttcttgggccataccctctcatcacaaactcaggtttctcttagaaatcac

SEQ ID NO: 310254 - DNA, 122 bp, Homo sapiens
tctggagtgcaaactgtgcggccaggtgcttgaagagcccctgtgcacgccgtgcgggcacgtcttctgcgccagctgcctgttgccctgggcggtgcggaggcgccggtgcccgctgcagt

SEQ ID NO: 310255 - DNA, 122 bp, Homo sapiens
gattttgatgacaaaattctatttttagtgcacttaaaaatggattttaactggtgagttcgcttatcaatataacattcagattagttaattaagataaaagccaggtgtggtggctcacg

SEQ ID NO: 310256 - DNA, 122 bp, Homo sapiens
tatgatgggggatgagtaaggaattaagtgaacaggtgagaggatattctagagagagctcgtgagacagaactagattgatttgtttaagcaactaaaaggaattccatatccagtgttac

SEQ ID NO: 310257 - DNA, 122 bp, Homo sapiens
ccgcatacaggagctgctccataaagaccatctgctggcctctcctattgtttaccaaaccggcttccaggaaagagggtgctgttagtcatcgacaccttttgggaatgcatttcattaaa

SEQ ID NO: 310258 - DNA, 122 bp, Homo sapiens
cggcggccccgggacggggcggacactctggggtgcggctggctggtctcacttaaaactcggacctcggagggaagccgcggcgcgtccacggttcgtggtcctcagcgtcccctcgagag

SEQ ID NO: 310259 - DNA, 122 bp, Homo sapiens
tcagaccagccaggactggaagcccacccgcagcctcatcgagcacgtatttgtcaccgacgtcactgccaacctcatcaccgtcacagtgaaggagtctcccaccagcgtgggcttcttca

SEQ ID NO: 310260 - DNA, 122 bp, Homo sapiens
aggtttttacccagcacggctcccccatcagactgcaaatcccagcattcactccttccacgggagccaatgaggaagctactagttcccgcagccaatcacattctgagccagtgtatcac

SEQ ID NO: 310261 - DNA, 122 bp, Homo sapiens
ttgatgtgttcaaaattgtagtgcatttaaaagggttagacttctgtgatatttgtccaacgtcaatcagtactcattgcatttttttacttaggctcttgatgttagtggatactggtatt

SEQ ID NO: 310262 - DNA, 122 bp, Homo sapiens
ctcctcctcctctctgagccttcattcccttatctgcacaatgagggtaataatctacttcgcagcgtgttgtgaggaataaataagctggaaatttattgagcacttataattcactatgc

SEQ ID NO: 310263 - DNA, 122 bp, Homo sapiens
gcatagcaaaaggaaagggccgctgggtgtctgtgggtcctgggcagtcacagaagccaccgcgctggcggggaggagggggaccgatgcggtccatgtcccgggcagccccaccttctctg

SEQ ID NO: 310264 - DNA, 122 bp, Homo sapiens
caggcattcgccgagcggcccgcgcaaaggcaggggcagtccaagcaccggcgggacacgcggcgcccgccacagccagcagtgccccgcaccgcgcagccccagcgacccgcagaggggcc

SEQ ID NO: 310265 - DNA, 122 bp, Homo sapiens
gggcggcgtggtgatggtgggcggcgtggtgcgcgccgtggtggtggccggcgcccatgtcgtccgctccgccgccgcccgcgaagcccgggccgcggaaagcctcgtaggctgcggcggcc

SEQ ID NO: 310266 - DNA, 122 bp, Homo sapiens
gcttccctttgcattagcagctttgctatagttctagaataaatgagcacaggaagaagacgctgtcatacgggaccgatccgtgtccacatgaagtcatcagatcggtatgggtgagtggc

SEQ ID NO: 310267 - DNA, 122 bp, Homo sapiens
ggggtgggggcgactgacggccagcaggagggccgtggtgttctcacctgagaaggcgggcgagcactccttttgctagaagaggctaagagatctctacgattatttccatggatgatgac

SEQ ID NO: 310268 - DNA, 122 bp, Homo sapiens
gggggttggcgggggacgcagaactgatcagatgtcggacgcaggcgtgggggattctcacggcgatgcagacttgaggctgagttgaaaaagggcgtggagaagcccagggtctggtcagg

SEQ ID NO: 310269 - DNA, 122 bp, Homo sapiens
cccagccagccagctccatcctgcccagcgaggctcgggtatggagctgaagtctattttcgtgctcctctcagttccctatctttttctgccttaaaaaaatccccctagagtttctacac

SEQ ID NO: 310270 - DNA, 122 bp, Homo sapiens
cagcctaggcagcatagggagacaccatctctaccaaaaaaaatttttcttaagttagctcggtgtggtggtgtgcacctgtggtcccagctactgcagaggcagaggtggaaggatccctc

SEQ ID NO: 310271 - DNA, 122 bp, Homo sapiens
cgcgtctcatcaccatttaaagaaaccgtggctcctagaggtaaagtacttcggtcacaacgcgaggaggtccagacttgaccccagacctccagactcgagctgggaagtggccgaggctc

SEQ ID NO: 310272 - DNA, 122 bp, Homo sapiens
ggggcagccagaagactccacttttggggagtggggttatagtttcccaaggtccttttccgtgccatcgtcatatccagaatgtaatttttgaagctatcaatacccgctgcctccaatac

SEQ ID NO: 310273 - DNA, 122 bp, Homo sapiens
aagagagagaggcagagagcagggcagcggcttcttgacgtcagggccaagcgaggggatcgcgccagcaaccccagctctccccagagaggggccggccgaccgctggagcggagcctgac

SEQ ID NO: 310274 - DNA, 122 bp, Homo sapiens
ccagcgtgttaagcgccgtgctgatggccagcaggtcggtgcctgagaaggcgggcagcgcggcgggaaaggcccccacgccagccagcccggcggggcccagcaggccggaggcggcggcg

SEQ ID NO: 310275 - DNA, 122 bp, Homo sapiens
catgtaatctaatttttacttgaattttatcttttttctctttttgtccttcatagacctcgagctctgtctagccctcaactgttctcaaatctccattgttttctacaagtgaccctcac

SEQ ID NO: 310276 - DNA, 122 bp, Homo sapiens
cctgggccctgccttgcgggcgtccgtgggatagcaggtcttggggcgctgggccttgtccgggaagaggcactggatggggcgatgctctgtaggtcctgcaggcgccctggcagggatgg

SEQ ID NO: 310277 - DNA, 122 bp, Homo sapiens
agtatagacagagagaaagggatctgatgaccaaagcagggaataaatgtttggagtccacggcatcctgagaacttcttgggaatagagtctaggcccccaatgctgtcactctcacccat

SEQ ID NO: 310278 - DNA, 122 bp, Homo sapiens
aggcgcgtggggcccggcggggcctgggagaactgggctggagggacagcatccctggaccgcggggaatacgccgccggattccgtagccaatcagcggtctcggcctttctgccctcgag

SEQ ID NO: 310279 - DNA, 122 bp, Homo sapiens
aagtggcctgcaggggcccctgcagagcatacagggaggtgcttccttccctctgcccagcgagcaaagggtggagccttggcacccccagcaaccccctccaagggtggagccttggcacc

SEQ ID NO: 310280 - DNA, 122 bp, Homo sapiens
cctggcctgactgtgttgtctgctctttactgcgtgccccccacgacaccctgttccacacgcatgcctgcctatgccataccgctcaatgaccacattgcctggtctcccatctgatgtcc

SEQ ID NO: 310281 - DNA, 122 bp, Homo sapiens
tcactggcaaagtcacagtggaaaagcgttaataaccatccaaatgcaataatattagtacgttatattattttctgtagaatattttgaaaatacaaaagtatatatcacaacgtagtagt

SEQ ID NO: 310282 - DNA, 122 bp, Homo sapiens
cgcctgcctgggccaggcctgacggtgggcactgggctcacgaagaggaggaaacagtcccggcccctgcagtctactgcctggtaggggagacaggcaacaggcggccaccacacaggtgc

SEQ ID NO: 310283 - DNA, 122 bp, Homo sapiens
ccgcgcggcttgcgctctccccggaacgcccacactctcaatcgctacattgttgacattcggcgctgacgtcacccgctccccattcacaataactttacgggagccgggcagcgcacctc

SEQ ID NO: 310284 - DNA, 122 bp, Homo sapiens
gctctttggcccaggacctctgaagagatccattatgtcagaatgaacacaaccagccagcggatgtagacaggtttacgtggctttacagaacagctaaatcctagtgttcacttttctca

SEQ ID NO: 310285 - DNA, 122 bp, Homo sapiens
ccatgtctccggctaccaccacaaggaactttgctcctggctaaccttcgtcctggggggcgctccgggaaactttgaggagccctcggcccccctctgactggtttgcactagggggctcg

SEQ ID NO: 310286 - DNA, 122 bp, Homo sapiens
gtcgtgcacctacctaccccttttaacctttggtggtaagacatcatttgtttctcttgacgtttatggcacggaggcgaactgctccgctacaagttgttctttccccaaagcagcagcaa

SEQ ID NO: 310287 - DNA, 122 bp, Homo sapiens
tatggtggtgactctcagtcttcttgggcagcagcactgcctgaatgttaggcaggactccgccctgggcaatggtcacgccgcccaaaagcttattgagttcctcatcattgcggatcgct

SEQ ID NO: 310288 - DNA, 122 bp, Homo sapiens
acggcgagctcgagtcactcggcagccggcagatccaggattcgaacctgtccaacaggccggacgcctacccccagctcacttaagtgcaagctcgcctgccgccgctggcgcacagacct

SEQ ID NO: 310289 - DNA, 122 bp, Homo sapiens
tagaaacggtctagcctcctcactcctccactccagggcgctgggctccagtcctttccccgccaaactccagcccttcggaaagtctgaaccctaggctctgtccaaggaaaaatgtgggg

SEQ ID NO: 310290 - DNA, 122 bp, Homo sapiens
atttttaaaaactccttggctggctgaggtagctcccgtaatcccagcaccttggcaggccgtagcaggcaggtcgcttgagctcaggagtttgagaccagcctacacaacatggcaaaacc

SEQ ID NO: 310291 - DNA, 122 bp, Homo sapiens
tccgcctggtcagcccagaacccccgactgcgggggctggagctcggaagcaggtacaagcgccactctccgcctgcgccgtggaatgcgcgccgggaccactccgcagcccttcccccagc

SEQ ID NO: 310292 - DNA, 122 bp, Homo sapiens
ccgagccctacttggccctgcacgaagactcccacgcctcagactgtggtgaggaggagacgctcactttcgaagcagccgtggctactagcctgggccgttccaacaccatcggctcagcc

SEQ ID NO: 310293 - DNA, 122 bp, Homo sapiens
ctctttcctttcattaaacaaacaggagatcctgaaacctggaccctgtgcaagctgcagcgccaggaggaggcagcggaggaagcagagcgcgggatgggcgcccagcggcatctgtgatc

SEQ ID NO: 310294 - DNA, 122 bp, Homo sapiens
gtgctcttcttgggcagggaactccctgaattctctaacttcctctttatctctgagcttcggtttgctcatctgctagacggggggtttctgtgagtcccaggaccgccacagggatcacg

SEQ ID NO: 310295 - DNA, 122 bp, Homo sapiens
cccccaagccccgcctcctcggcccgctcgcccgcggcagctccaggccccgccccaccccgccccgcccgacccacggcggccccaaaagccctcccgtccaaactggtggcagcccaaag

SEQ ID NO: 310296 - DNA, 122 bp, Homo sapiens
ctagacacgcagagttccaacagtaaagagcttcaagaagtgaaacaggttgctaagaaccggaagctcttggtgttgagttgccaagtggttttcaggaagtgtgaagtcagggacaatgt

SEQ ID NO: 310297 - DNA, 122 bp, Homo sapiens
gaaatagcggggtgtgaggaaaacaggttgggggcggggagatagtccagtgggcgttaacgccaagactgggcaggtggggaaaaataccagctcgtgggataaaatggagagttgctcga

SEQ ID NO: 310298 - DNA, 122 bp, Homo sapiens
gcagggggtggggtgtgtttggcccctgctgtttcggcatttcctaggcgtcacgaaccccgggctcttggtttcctgtgttgcttggaaacatctcattgttccacctcaggctgctgtga

SEQ ID NO: 310299 - DNA, 122 bp, Homo sapiens
agaccctttccgcccttaccgcggccagacatcttgaaaccacagctgttaaatctgtaacgcaatacgtctggcagagccacgcagcacttttataatagcatgacggacctgtttgaaaa

SEQ ID NO: 310300 - DNA, 122 bp, Homo sapiens
cacttaaaagtgacgagcttcctaacctcctccagttccgaagtttccccgtgagctcatcgctactgcccactgaatgcttcgttttgcaaacagaaacgaagtaggaaaaaaataagttc

SEQ ID NO: 310301 - DNA, 122 bp, Homo sapiens
gttcccctgcccgtcccatccctaagcagggacgtctgtccacctctgtccctcccaagacgatggtaaaaatgcccacaatggttggattaaggttatctttgctgttgtttgagggttcc

SEQ ID NO: 310302 - DNA, 122 bp, Homo sapiens
accatgcagagaagcacccacggctccatgaccaagtctgaccatggagagaagcacccacgggctccgtgtccaagtcacaagtgacaagatgagacgcttcccgtgttcccatgttctgt

SEQ ID NO: 310303 - DNA, 122 bp, Homo sapiens
tatcccattatgtcctgggttctcctctggggaaacagtgaacaaggtagttatgttacccgtccacatggaaactaaaataatagaaaatacttaagacaatagatagctgaaggaattct

SEQ ID NO: 310304 - DNA, 122 bp, Homo sapiens
cacagatcacgggtgtaatgataataaccatcatccatggagtgtttctacattggttggcgttttctacgtactttacctgtatacactcctttagttcctgtaacagcctgattatcacc

SEQ ID NO: 310305 - DNA, 122 bp, Homo sapiens
gcattggtttttgaaccattgtgctttcattctttctagtctgtctaaaaatcactggagcgtttaagatggcagctgactaacataggcctttgaggtcttttggtcttctaaaggaagaa

SEQ ID NO: 310306 - DNA, 122 bp, Homo sapiens
ggccttcaaatggtggttccaaatccctccagcaaagcccatccatctttagagctcacccgtctccagctacaccccccacccctcccggcccagatcaggcagcggggtcgccctctcca

SEQ ID NO: 310307 - DNA, 122 bp, Homo sapiens
acagcggtcctcatttccacactccctcaacggttcggggagagctcgtggtctaagtaacgagaggacttctgactgtaatcctagcacgtcactttgttgaaggcagacacgtggttcag

SEQ ID NO: 310308 - DNA, 122 bp, Homo sapiens
aagatagagagcatctaaaagcagaatatgtttaccaggtaaaaagaaacagggaagagacggtagcaagaggtttgcaatagtggcacatgaaagcattgagccactctaatattctgtat

SEQ ID NO: 310309 - DNA, 122 bp, Homo sapiens
cccagggaaaggagagagggacgggggcgcagagccggccggtgcaggggacgcgtggcccgcccctctctgcagcaacccgcgggaggaaatctgcccccagcccagccccagtccctcag

SEQ ID NO: 310310 - DNA, 122 bp, Homo sapiens
agggctgctggactccacgagagtgcgtgaatgacagcatgagctggtgccaaaactttccgttcggagcctcatgggctttcagccggtgaccgcccagagcggccctgtggcctgtggac

SEQ ID NO: 310311 - DNA, 122 bp, Homo sapiens
caccatcgccagcgcatggctgccatgttgaattgattcggcaggcggtgcaagagaaaccggccaatgagaggagtcggttggtcgccctgtggccagtcacgtaaaggggggggcggggc

SEQ ID NO: 310312 - DNA, 122 bp, Homo sapiens
cggtgctgcctccacgcccggcttccccatggctgctgctgccactggcactgctaagtgcgttgccaaggcctctgttggtcccaggtgactcccagggcaccgcccacaggggccggcca

SEQ ID NO: 310313 - DNA, 122 bp, Homo sapiens
atgatgaggaaggtgctgattttatttgctaaaattatgattaggcagatataatgagctcggagatagtgtttgcagcttgatttttatgagagagggcagaagattggatggaggggtga

SEQ ID NO: 310314 - DNA, 122 bp, Homo sapiens
cccaggttcccggagggccctacgtggctgcccctggagtatcccagagcgctagggctgcgggaaggggcgggtgtgcttctggaaacatgagcgcctgttagtatcagtgcctggatagg

SEQ ID NO: 310315 - DNA, 122 bp, Homo sapiens
cacggggcaaaggaggtgacgatgggcggtgggcctgtgaccccaggtccccgacaccagcgagccgggtgatgggagggttgcgccaggagttacaaggccggtgacccgaagtgggccta

SEQ ID NO: 310316 - DNA, 122 bp, Homo sapiens
actgctcggccttttcaaggctttaaatggagctaaagggtatacgacatgacgttcgcccggtgtttaggaatatggggcgtgactttccaagcaggcggctggagccagggagaccacag

SEQ ID NO: 310317 - DNA, 122 bp, Homo sapiens
aggttagtgggcgggcatcaaggaccattgtgcgctctaattggcaggcgcggattcgctcgttggcgggcctcgctgcttggcgcaagcgcggttatggctaggcgcgcacgggctctgcg

SEQ ID NO: 310318 - DNA, 122 bp, Homo sapiens
agcaaggggcgagcaccccggccccggtgcgcgcggcactgactgagctggtccgggaggcgcggaggatgctcacccagcgcttggagtgaattactgacctgtctgcccttcgattaccg

SEQ ID NO: 310319 - DNA, 122 bp, Homo sapiens
ccagcccagacacgcagaggcgccaggggtcggggaccactgcattccccgtgactggggcgctggaggccgcggcgaggccccgcgacggctgctccgtgcgcccccggccggccgtcgcc

SEQ ID NO: 310320 - DNA, 122 bp, Homo sapiens
tctgtttctgagacccttgggccagccacacaaccagagcccacacaaggagggagacttcggtgatgttgtaacaccaatctcagcattggtgagattctgttttctggggaagtctggct

SEQ ID NO: 310321 - DNA, 122 bp, Homo sapiens
caagaacctgcccaactcactgcggctcttctcgttcttggctgcgattaaccgcagcggcgcggctgccacctccagcaagaagtgctccatgacccagggccctcaccccgagcggccac

SEQ ID NO: 310322 - DNA, 122 bp, Homo sapiens
acaccctccgcagccactggcccgggtactaagtccctcactgcccggggcccgcagggccggccggctgctccgactgccgggcccaccaagcccacgcccacccggaactccagctggcc

SEQ ID NO: 310323 - DNA, 122 bp, Homo sapiens
ctcactcctcttctggactttgtgggtactggtgtagggcctggagcagctgcagccatacgaggggaacagattgaggcaaacaattccccactcccaccaccaactcccaccaaacccaa

SEQ ID NO: 310324 - DNA, 122 bp, Homo sapiens
cggcgtgggaaccacagtcccggcgcgagagccgcagccccagcgtgggaaccacagccccgacgcgagcagctcagcagggcccacttgtttccttattaatttttactttcagccacatg

SEQ ID NO: 310325 - DNA, 122 bp, Homo sapiens
ctgcctctgggcctcacctgacacgccctccctcctttcctactcactccgtcttcacttcgagaaggaagccttccctgatccccagctgaggtcaggttccctatgaaaggctctcaaag

SEQ ID NO: 310326 - DNA, 122 bp, Homo sapiens
cagttgctggcttttaaacgctcactctttggaatgttggcaaccttgcttcctataaatcgttgctggtatttcttagcctttccttgccagcaacgcggaggcctgcaacaccttttccg

SEQ ID NO: 310327 - DNA, 122 bp, Homo sapiens
ggtttggcatccggaggccgctcggctgcctgtcctgcgcccagctcagcccggacccatcggccaccttaagtagccaagggggcaaggaaaatgctgccagggcccgggaattcgagtcg

SEQ ID NO: 310328 - DNA, 122 bp, Homo sapiens
cctgtactgggaaggtgcccgctgctctgtcctctaataagatgccctgtccgtttcaggcggaagcccggctcgctgcaaaacgggcggcccgcgcggaggctcgcgagatccgcatgaag

SEQ ID NO: 310329 - DNA, 122 bp, Homo sapiens
ttccattctctcttcctccatctgccagctggatgtagaaggctctgaggccatagcagacgacacgatcacaagaagaaaaaacctgggtccctgaatcaccatgtggaggaaaattgctc

SEQ ID NO: 310330 - DNA, 122 bp, Homo sapiens
aatcttgtggcatccacccagaccatcttcaactccatcatgaagtgtgacgtggacatccgcaaagacctgtaggccaacacggtgctatctggtggcaacatgtacccaggcatcaccga

SEQ ID NO: 310331 - DNA, 122 bp, Homo sapiens
ccattttatggacggggagactgcagcctggtgagctgggtatggatgggaagcagttcccgcctagggctctgtttttagcccagataaataacctctctgagtgtggtcacctggctcac

SEQ ID NO: 310332 - DNA, 122 bp, Homo sapiens
ttattgagaaaattaccaagaacaaatagaagcctatcactccagagactgctgaaaagccggcccacaacctgaaggctgtcaagtatatggacggtcctgtacccacacagcaagatcta

SEQ ID NO: 310333 - DNA, 122 bp, Homo sapiens
tgtcccaggatcctggagagggagaactcctggccccaggggaaagaggggggggtctcccgtttcctgtgcctgcaccagccctgcccccattgcgtctgcacacccctgcgtgtaactgc

SEQ ID NO: 310334 - DNA, 122 bp, Homo sapiens
gtttacagacgccttcgccctcccccacccccacagactaggggtccaaaaagcagttcccgtgcgcattccccgcctggcccaggccctgggagtaccacaggagccaggtagccctttcg

SEQ ID NO: 310335 - DNA, 122 bp, Homo sapiens
cccgcctcccctacatctctacccaaaatttaaaaagttagctgggcgaagttgcatgggcgcatagtcccagttactcaggaggctgaggcaagaggatcgcttgagcccaggaggtagaa

SEQ ID NO: 310336 - DNA, 122 bp, Homo sapiens
tctgttacagtgcatattgggtacttccagaagtatgaattcagtgatgcaaaggacaggcgggctgcagcagcaaaggtaggacagaatcattccaaagacaagtcattaaaagaccatta

SEQ ID NO: 310337 - DNA, 122 bp, Homo sapiens
ccggagggactcggtgtgtctcggtgttgatttcagaacaggggagatgctgacgtgtcccggtggctctcacagcacagtggaaggcgagtggcagctccgacatcctgctccgctggcgc

SEQ ID NO: 310338 - DNA, 122 bp, Homo sapiens
gaggtgggcgttgcatttgtcagttgtgcagccgcgcaccaccgagtagtctggcggcagcgcgtccgcgttcgattgcgtctggcccgcaggaggcccggtccagcagcccttccgcacca

SEQ ID NO: 310339 - DNA, 122 bp, Homo sapiens
cctgtgaatcccaatctcagctagggatgagcaatccaggctggcccagagcataagcaccgtgaccatgtgagggcctgagtgtgcctggctttggagggtctgcttgctcagtggcctct

SEQ ID NO: 310340 - DNA, 122 bp, Homo sapiens
agctggggctgtgttggaggagaggaagaaagagagacagaggattgcattcatccgttacgttcttgaaatttcctaatagcaagaccagcgaagcggttgcacccttttcaatcttgcaa

SEQ ID NO: 310341 - DNA, 122 bp, Homo sapiens
agctgagtgtgtgcaggggacttgattacgttttgtttctgtgaaagtcttgctccaattcgaggtgcaggctgccacgtcccagcctccagtcctatgcaaaccggccttgacttctgtgt

SEQ ID NO: 310342 - DNA, 122 bp, Homo sapiens
gggcagagggcttttgtagggggtcggcggggcgggccgcgttgccaggcctggagctggcgaccgggcctccctcttcccgtcacaatcaactttggattctgtatttttttataataaaa

SEQ ID NO: 310343 - DNA, 122 bp, Homo sapiens
agagacgggagaggcattcgatcatcgagatcatttctttgccaaggcagaattgatccccggaggatgttatgtctttgcctggtctaatcttccgcatctcgggaaactccaccgcacct

SEQ ID NO: 310344 - DNA, 122 bp, Homo sapiens
tctttttgtctgacttctggtttatagaaaacacagggaagagagcaccaaataaaatgacgccaccgatgacactgccatacaaatccagaatgtgggcatttcgtgagacattgtcctgg

SEQ ID NO: 310345 - DNA, 122 bp, Homo sapiens
agggtactttatctcgtgcacacctatatgttccattatgccatatttacatttgtttaacgcatttaattaagaacattgttaaaaatttaaaaagacttcccctttcacgaaatttggaa

SEQ ID NO: 310346 - DNA, 122 bp, Homo sapiens
gctcctctgggaagcaggcgtgggggtcgggtgtcggaggccccgtgcgtccccccaccccgtaccagagcccacggcgcttacggagctctttaagataaatgagtaaaattaagagactc

SEQ ID NO: 310347 - DNA, 122 bp, Homo sapiens
ccccgaagctgtagcaccagtttgttttctcacggcacaggggcggcttccggggcgcggcgtgctgggggttgtagtccgcgctctgcctcctacttccattacagaaggcgatgggccga

SEQ ID NO: 310348 - DNA, 122 bp, Homo sapiens
ctttgtttgagacaccagaggtgggaagacaggaggatttttctagtcacgcacaacgaacgtttctctaatgctatgcatgagggaatgacagtgcttcatccagcacaacgggttcctct

SEQ ID NO: 310349 - DNA, 122 bp, Homo sapiens
cagaccgtgaccctgacgtgaggctctggaaccgttgtggttttcctcgacttccagggacgatcctaccatcaggacgcatgtgtgtccccggggtgggagagcattgctcttcaacccca

SEQ ID NO: 310350 - DNA, 122 bp, Homo sapiens
attctctctcggggccaggcagtgacgttgagccacggcttccagtcagccacatggtcacgaggcactctgatgccaggggactgaatagccagcattttttggatattgtgtttttgcac

SEQ ID NO: 310351 - DNA, 122 bp, Homo sapiens
ccacaacatcgtttctccggtgctggcgcagggcgctaattagctgggcgaggctggcctcggggccccggatggtccagtgctgcagagctgcgtaggcccgctcgtggtcggctgtgtac

SEQ ID NO: 310352 - DNA, 122 bp, Homo sapiens
ctgaggccaggggaagctgagggccgggcgggtccagcggggtctcgggtctgcagactccggaggcagctgtggggaggcctggggccgccacagccagttccagcccgtttccatcagcc

SEQ ID NO: 310353 - DNA, 122 bp, Homo sapiens
ctggctctgctttgcccctttggactttctgcccgctgtatgaccttgagtcactgtgttcgaatctaagacaagggggcttgttttgttagcagactgtgaagaagctgcttgagcagaag

SEQ ID NO: 310354 - DNA, 122 bp, Homo sapiens
agtccccagcgccgggcgagctccttctccgccgggctgggtgctccggccggcggcgtccgaccagatctgagcaggtgctgtcaccaccaccaggaaggagagggactcagtttctgtcc

SEQ ID NO: 310355 - DNA, 122 bp, Homo sapiens
tccaggagctggacactatcgttatcccagttttgcagaagagagatgaagtgactcgcccgggatcacagcttgaaaatggcaggatcagcttttcagctcgagtctgcctgattcccaag

SEQ ID NO: 310356 - DNA, 122 bp, Homo sapiens
gagacgctctgcggagacgccacagtgactgagtgttaagtggaagggctggcgttctcgcggcagagttcacaggcctggacctaggaactgagacagaagtttttcagggagtctgtctg

SEQ ID NO: 310357 - DNA, 122 bp, Homo sapiens
acatctggactgttgggaggtgcatggattcaaatctccgccgccgtggttgtccagtgccgtgcgcctcaccggtccatgcaggggcagctgaacccagaggcgcttctgtgacagagggc

SEQ ID NO: 310358 - DNA, 122 bp, Homo sapiens
gaatggatggatggaggatgtggttgtgcttaccacgctccctggtcagtgggttaatgtcgtcaggcggggccaggctcgctaacagccgggcggggtcccttcccccgggccccgccccg

SEQ ID NO: 310359 - DNA, 122 bp, Homo sapiens
ttcccgaatcgcatgcacctgtcactgagctgtcagtgtggtcagcttgctgcacccacccgggaagtggagctgggggaaggtcatgttctgcaggagacctggtggctcaggccctcagg

SEQ ID NO: 310360 - DNA, 122 bp, Homo sapiens
cacacacacacacacacacactctctcactcacactcattcacttccctcttcccacccccgacaattctatggatcctagggctgggataagtcctcaaaggttatctatagtttagatac

SEQ ID NO: 310361 - DNA, 122 bp, Homo sapiens
aaccagtcaacaattcagcacaaaggcatccagagtcacgctggcatgttgtgacagaatcgcacaattacatgggatccatcccactctgaaaatgccccgaacagcgaacagcacaggta

SEQ ID NO: 310362 - DNA, 122 bp, Homo sapiens
acgcccccgcccgggccgggagaccggcctcacctttaccccgcatgggtgccccggcatcggtgaagagcatggccatgagcaggtccaggttgcagttgggctcattgttgtcagggtcc

SEQ ID NO: 310363 - DNA, 122 bp, Homo sapiens
gccctcctccaggaggcgcatgggtggtggtagcaagtgggagtcttgggtgccctgtctcgaatctacaaggtgggagcgggtgagaacccagcgactgcgcggctgaatgacagggagta

SEQ ID NO: 310364 - DNA, 122 bp, Homo sapiens
tacgtaacagaatcagaatgagaaacttctgaggcatttactcccagatcatgtagctcacgtaagatgttttaatatctgtgctgtgttagaggtaagagtgttgcaaaacagaagttatg

SEQ ID NO: 310365 - DNA, 122 bp, Homo sapiens
accccctccccccggttatttgggagattagagttcattaattaaatcctgtgcttagatcgaactgtaacattattccaatcacatttatcttgcaggcggcggaggagatggcagcctcg

SEQ ID NO: 310366 - DNA, 122 bp, Homo sapiens
cggctgacttccatccctcggatctggcagggtgtccgctgtgcttctgaaccagtgaggcgcccattgccgctcctgattgggctaaaggcgtaccattgttctgcacggctaagtgccca

SEQ ID NO: 310367 - DNA, 122 bp, Homo sapiens
gtggcggttttaactggcttgggtcttctgggtcctgttctctcctttgtaggatgcgtgcgtcttggtacctggaacacccaggacttgcgtgttctatgcaagtggcatgtctctagctc

SEQ ID NO: 310368 - DNA, 122 bp, Homo sapiens
aggctccgccccagctgaaaggggcccggcctccgaccacgcatgcccaactcacctacccgcccgttttggaacaagtgggcccagttcttcaggccaggatcgagaatgcgcatgctcaa

SEQ ID NO: 310369 - DNA, 122 bp, Homo sapiens
cagaggagcgggatggcttccttctcccgggcgaaaggcggcagaaagagggaagaagggcgccccagacaaagaggcgccgtcaccctctgcaccccaaggacagcagcgatagggggcca

SEQ ID NO: 310370 - DNA, 122 bp, Homo sapiens
gtctgggtgtgcgtgtggctctttctgaggactccagagcaggagttgatcccagtcatccgtgaccccctgagagactcactctgggcccttttttggccctgggaccaatggtgaaccca

SEQ ID NO: 310371 - DNA, 122 bp, Homo sapiens
gcaggtggaaagagaggcagggcccacggacaaacagactgggatggatgcatagacagacggatcgatcgggtggatgggctcacttgcaagtgcgctcgcggccaccggcgtggcagtcg

SEQ ID NO: 310372 - DNA, 122 bp, Homo sapiens
gcactgcccaaggcctacggcacaggctttgtgggctgcttgcgggacgtggtggtgggccggcacccgctgcacctgctggaggacgccgtcaccaagccagagctgcggccctgccccac

SEQ ID NO: 310373 - DNA, 122 bp, Homo sapiens
tctcagtggctggtcaggactcctaccgaggtctctggactttgtggtcttgtgttctttcgactgtatcaacgtgtactgcagctgcctggagatcaaatgcgaaggctgactccgaaggt

SEQ ID NO: 310374 - DNA, 122 bp, Homo sapiens
taagcaaaaccatctcaacgaggctgctttcttcactaaattcaataatagccagcaagtcgctattttgtagtcactatttactaatcttgatttttataggcacaggcctagaataagaa

SEQ ID NO: 310375 - DNA, 122 bp, Homo sapiens
ccaacttcgttgggcttccttgggtaatttatgagcttctccactttggctgttattattcgcctcttgttaatgagcaggcttagggcattcaggatttccttagtcagtgattcctcctt

SEQ ID NO: 310376 - DNA, 122 bp, Homo sapiens
ctgcatgcacctaaacctgtagccatcactcccccttcccacctgtctcagtggaagaggcgccattctccctgtgcaaggatgcactggagtgtgaatctctcctctctcagttatcagtt

SEQ ID NO: 310377 - DNA, 122 bp, Homo sapiens
gggcatggtgagggtgggtggcagcctggggcagggctgcgagggcggcgcagggcgggacgggtggggcctgaccccgccccttggcgcagctgtaaataggtaaatagaaggtgattgtg

SEQ ID NO: 310378 - DNA, 122 bp, Homo sapiens
gaaagcaggtgagtgattgccgcagcttggaggaagaaggaaatgggaaatggctgctaacgggtatagggtttctttgtgggatattgaaaatattccagaagtgagtgctaatgattgca

SEQ ID NO: 310379 - DNA, 122 bp, Homo sapiens
acaaaaatgcgtaggctggcagaagcagatcacagccacggagagccagacaagcagggacgaggccatgagggccggtgaactcgccagcccggggcacgttcaagagcgtattttactac

SEQ ID NO: 310380 - DNA, 122 bp, Homo sapiens
ggaaccacacaccacactcaaaaactcttgatgttttcttgctaaaggggctctctcgctcgcgctctctctcctccctcattccctccctccctccctttcacccccccacccccatctct

SEQ ID NO: 310381 - DNA, 122 bp, Homo sapiens
tctctggagggctgtttgggtgttttctctttctacattcagccagaaaagcctggaggtcgggtaggggtttggagaggtgaatttcagtcctggagctgggactcgggttgctttctttt

SEQ ID NO: 310382 - DNA, 122 bp, Homo sapiens
actgctgcggggcgcaggcgctggtgggagggcaggacttgaaatacggtccctgccaggcgaagtggctcaggtctgtaatcttagcactttgggaggccgaagcgggcggattacctgag

SEQ ID NO: 310383 - DNA, 122 bp, Homo sapiens
ggtctcagtccggcctccttacaggcgccatcgggggtgcaggtgctgatgagtgccacccggagtgcatacatggaggaagaaggcgtcttccacttccacatggagcaccccgtgcccgc

SEQ ID NO: 310384 - DNA, 122 bp, Homo sapiens
gtgggcagtagtccttgggacagagatacagcaaatgagtgatagtggcacgcctatgagcggtgaaggaggtcccagagaccctccggtcctcaacaatcagtctctttctgttcgagccc

SEQ ID NO: 310385 - DNA, 122 bp, Homo sapiens
tggccggcttcgggaggtttcggcaaaccctgctttagccctagtgaaagtggcaaggcacgcccttcccgcttcttattggaagagggtctacagtctccaccggtctctactctttattg

SEQ ID NO: 310386 - DNA, 122 bp, Homo sapiens
actttttaaagacactcaataagaaaagacctatttccttgactttttttgtcagatctacgtttacatgttatcatatattcaaccattttctggatgggtgtgtgtgtgttgggaggagt

SEQ ID NO: 310387 - DNA, 122 bp, Homo sapiens
tgcctactaaaaggccataaggctccatgtgcaggcaaaggaactggcaggaagcccttgcgtgcctcaccaatctgtatttttctgcagaatctttccaccgctgaaaagcctgctcctta

SEQ ID NO: 310388 - DNA, 122 bp, Homo sapiens
acctcattctggggctccccagggcccctgggccccatccaggcagctgcgaggccaggccgggtgctgccacatcagcacacagctgcggccgcttccgtaatggaggctgagagcccgcc

SEQ ID NO: 310389 - DNA, 122 bp, Homo sapiens
ctcctggcccagccacatcctttgctccggctcaggagactgagcgaaggacaaaccatccgtagacacggtgctcacaactaggaagaccttcctgccccagagctgcctctgtctttcca

SEQ ID NO: 310390 - DNA, 122 bp, Homo sapiens
ctgtgctgtatcagtccttcaacgtttcctggggatcagttaattaagttgaggtctctgcgtctggaaatccgcctcagcctgcagggaaaaggcccctagtcttgtttctgccttcagaa

SEQ ID NO: 310391 - DNA, 122 bp, Homo sapiens
ttaggctgccttaggccgcccacctgattctgtcattctgtttcggaacggccctctagacgagctgcagcttcgagggtggctttcgcactctgctgtcagtggctgaacggcttcattgt

SEQ ID NO: 310392 - DNA, 122 bp, Homo sapiens
cgcctcgtctccgggaccgccccgctcgccccgctcgccccgctcctgggcgcaccctcccgggacgcctgctccgcccatctccggaccccgacccgccccgatcccttccggggatcgtc

SEQ ID NO: 310393 - DNA, 122 bp, Homo sapiens
cagcgtctgacgtcttccggaaacgagctccactggccttatgggaaatgtggtctccgacggatggcctacacccgggaggagtccaggaactctaggtggacagttacttccgcacacgc

SEQ ID NO: 310394 - DNA, 122 bp, Homo sapiens
gcctgtgtaagattctaatcgaggatgctctacgcgtgttcctgcctcagagcttttgcacgtgctgtttcctctagtctagcaggagtgcccttctcccagatgtctgtcaggcctactct

SEQ ID NO: 310395 - DNA, 122 bp, Homo sapiens
tcccgaatggatttctgttcaatctgctgtagctccagctcaacttgctttgaatagtgacggagatctacaccctgggagaacataaagatgacaggtcagaaggaagtctcagtaaaggg

SEQ ID NO: 310396 - DNA, 122 bp, Homo sapiens
cctgtccatgcgtcactaacccaagctccatgccgggcacaggctgggcgtcagagccaccgaaacaccaacctctgccccaagtcactgggcgggcgcctgacatcgacatgcaggctgta

SEQ ID NO: 310397 - DNA, 122 bp, Homo sapiens
aaaaaaaaacaaaaaaaaaacaaaaaaaagaaagaactagaaccatattaatgtcctggccggtcaatgcagtcattgaccttgatgctgtggggctcaggtaggcaggtaagaggaaacac

SEQ ID NO: 310398 - DNA, 122 bp, Homo sapiens
gcttcccggaggccaaccgtatcgccagcaagtacggattcatcaacataggacaggtaacgaactacaggctagcccagccctcggccctgaagccactgggggcttcttgtcccctctgc

SEQ ID NO: 310399 - DNA, 122 bp, Homo sapiens
gctgtcacgaccctcgcccggggaaatgcctgtcttctccatttagaaagtgacagctgacggcaggcccgaggcagccaggtagggaggctgcctgtgtgcaacccgctgtggaggctgct

SEQ ID NO: 310400 - DNA, 122 bp, Homo sapiens
gtcctccgaggccaagaagcagagtgtcttggcctagtgtctgaaaatcgcagcgcaggacggaacttccgagagcctatacctccccacttccccctccagtttacagatgggcaaaccgc

SEQ ID NO: 310401 - DNA, 122 bp, Homo sapiens
cttcattagctgctgtcgcacccacagtgccgtctgtccgggaacggagggagcctggcccgagccccatgccagagccccaagagctgcctgccacctgctccagtgatgggcacgccgac

SEQ ID NO: 310402 - DNA, 122 bp, Homo sapiens
aaaaaggggactgcagaatgtggatggacaagtttaaatagagacaggaggctgggcttccgggcagagctgagcgtcatccacagtttgtgatggttcacgtacaggaaccaagtgaactt

SEQ ID NO: 310403 - DNA, 122 bp, Homo sapiens
gacacaatattgaaggatgacaaaagacctggctcctagctctgtgaccttcagcaaggtcgcttcacttctctggggatcttaaaaggatgaggtgctttcgtttgttaaaaccgatcttg

SEQ ID NO: 310404 - DNA, 122 bp, Homo sapiens
agatttacagaaaagttgccgcgatagtctagagagatcccatgtacctcttaacagcttcgcctctgttaacattctgtgtcaccatggtaatttgccacagctaaggaaccagcattagt

SEQ ID NO: 310405 - DNA, 122 bp, Homo sapiens
aggaagaggagccagcctcctttccacaatcagctcctctgtgaactgacatagggtgaacgcacccattactgcaggaaggtgccaagccattcatgagggatctggccccatgacccaac

SEQ ID NO: 310406 - DNA, 122 bp, Homo sapiens
agtaaaggacgttcatataactgtgagccacactgactgcagtcatttatttcaagattacgccaatttatttagatgcaaatgtcacagaccgattaaaaactagtccattgcacatattc

SEQ ID NO: 310407 - DNA, 122 bp, Homo sapiens
ctcccccgcacgcttcttgccaccggctgagaatatgctgagcacccaccagagggcgtccgcactcactgtgcccccggcctgcgctctcacagttgacaagggacacgcgggcacgcgcg

SEQ ID NO: 310408 - DNA, 122 bp, Homo sapiens
gtggagacgtgggctgggccgctccttccctctgtggctccctcctgtgttcattgatcacgcgcaaacagaagcgagcagtgagcccgggttggtcacttgcatgcatctgttcgttcgtc

SEQ ID NO: 310409 - DNA, 122 bp, Homo sapiens
agctgaagcccgatgcccacgacgcccccagtgcggatcctcagcccctgtggctgatagcgggagctccactccagggtgcacaggagaatgggagccccaggttggccacccacgagaag

SEQ ID NO: 310410 - DNA, 122 bp, Homo sapiens
gacgggaaagcaggaactgaagaagcggaggaaggatttcaaaattggacgaaagccggtcggttttactaacggaccggaaggactctagagaacgctctgcactatggctggtcccgtga

SEQ ID NO: 310411 - DNA, 122 bp, Homo sapiens
gtgcaggagaacagcgattccttcgagcctgccgggagacagccacgccaatggtcacaacgggcacagcgctcaggaacgcagcaactcagccagccgccagctctttccctggcgcgggc

SEQ ID NO: 310412 - DNA, 122 bp, Homo sapiens
ccccggttcccgtattcttgaccttcaagaactgcaaaaaagtcaagacccagtgaaagacgaaaagtttgagtggctgctgggctcgcgggcggctcgcctgactccggagcagctggagg

SEQ ID NO: 310413 - DNA, 122 bp, Homo sapiens
aaatgtaatgaaaactatgcaataatattgcttggagaaactgaaaaaaacctaaataaacgttgagatacatcatgtgcagggatcagaagcctcaatattgtaggatatcaattctcccc

SEQ ID NO: 310414 - DNA, 122 bp, Homo sapiens
ttcaatgggtgatccgactgtgacactattagtctttgatgccctcctcccatccccagtcgcctttccttgcagtcaaggccctaagctaccaccagcctgggaactccagctctgagcca

SEQ ID NO: 310415 - DNA, 122 bp, Homo sapiens
cggcctccccagcacctgctggccaggtgtctgtgccgccctggggccccgtccccatcgcgccctgcccctcccaggccaagggcacctcttccgagcctgtgctgaggctgggatgcctt

SEQ ID NO: 310416 - DNA, 122 bp, Homo sapiens
gggcctgggtgttcagttcaacaggttcccctgtgacctctggttgtccattggagacatcgggtttggcacccttgaggacagacagtctctcagaaatactcttgagccgggggaagaga

SEQ ID NO: 310417 - DNA, 122 bp, Homo sapiens
ctaagcatgggcaagaattctccaggtggaggaggaaaaccacataggagaaaggcttaacgaaaaaaggaacggagagagacaagaaactgcatggcctgtttagaggcagcaggtggtta

SEQ ID NO: 310418 - DNA, 122 bp, Homo sapiens
cacagccgctggcctggggagccgtcttgttgcaggcgcggccctgggtgcccacactgccggtcaccgggtcctcctcgcagtagttgggcgacttctcgatgtacaccaggtccgtgtcc

SEQ ID NO: 310419 - DNA, 122 bp, Homo sapiens
agcagagggcgcacacctgtttcccggggatcgaggaacagcttgctgtccaaaggggatcgcagggccagggaactgacaagcacacgctatttgccaacctttgccttaatagaaagaag

SEQ ID NO: 310420 - DNA, 122 bp, Homo sapiens
ctttctttttttttttttttttgcaggggacagggcaggaatgagtatcagaaccaggaacgcctgggagcaccaaacccttagtgtcagttgcagctcagggggatagggaattagccatc

SEQ ID NO: 310421 - DNA, 122 bp, Homo sapiens
tcaaactcgcctctgtaccacctaccggagggactctggggtttgagttctggggacaagcgcgtgcccctgcctccgaatgagctccttttacgtgtgagtcctgggcacaaaaccacagc

SEQ ID NO: 310422 - DNA, 122 bp, Homo sapiens
ccgttcaggttcctcacaaaatgagagtcaggaagatcagggtgcagacctgatttcccacgaagggctgaaagcagacaaccagagggagagcagcacctgggccaatgaggtagaagaca

SEQ ID NO: 310423 - DNA, 122 bp, Homo sapiens
cccagccctccacggcctggctcagcctcctcattttccactagagggggcgcctttttccgccgccccagtcccagcggcatgagcagcgagaagtggggtcaccagaagatctgcaggac

SEQ ID NO: 310424 - DNA, 122 bp, Homo sapiens
atatataggaggctgaggcaggagaatcgcttgaatcaggaggcagaggttgtagtgagccgagattgtgccactgcactccatcgtgggcaagagagggagactctgtctcaaaaaaaaca

SEQ ID NO: 310425 - DNA, 122 bp, Homo sapiens
tagagtgtcccaagatggacccaggagggagaggggtacgagggagcagcctggactgcgcgccccggtctgtcctttgagcccccactgcatccttccgaagaagggcctgactttcccga

SEQ ID NO: 310426 - DNA, 122 bp, Homo sapiens
cgatgcctctgtttctaagactgacaagcactctgggggcactgtgacgcctgcttctagcggcagagttgctgcagctcctgtcctggctgtgaacattgttctctctctggtgtctctat

SEQ ID NO: 310427 - DNA, 122 bp, Homo sapiens
attatccacataaatatatatccacttctgtgtgtgctatgttctatttaggatagtgcccggtcttcctgatgtgaggtcaataggcaggttacacatctatgtagctaagaataaggtgc

SEQ ID NO: 310428 - DNA, 122 bp, Homo sapiens
attttaaatatgtttcttaaacatctgagcaactttttgtttgatacagatgatgtctaccgtagaaaagcctcagaaagacagtatcagagaaggctggaagatgaatgagactgaacttc

SEQ ID NO: 310429 - DNA, 122 bp, Homo sapiens
ctacgggtcggcgttgggctcagtgggctcgaaacaaagggctgtccggtggggattcgtcgcggcgccttctgagtggtcgggtcgaggcttctcggcctagcagtgccctcgctgcgcga

SEQ ID NO: 310430 - DNA, 122 bp, Homo sapiens
aacatcagtctgggccagacagtgaacttataatgttatctcttccaagtgaatgcaaaccgtgtctgagcctcccctctgatggggattggaaagaatgcctttctcccaggccagtgacc

SEQ ID NO: 310431 - DNA, 122 bp, Homo sapiens
gcccggaacgaaggtgtggagcggcaagggacagacgccaatcctaaagtgagcatctagcgcgccacctaaggctctttagggaaggtggtcccagagctgtgttgtcccttccgcttgca

SEQ ID NO: 310432 - DNA, 122 bp, Homo sapiens
aaaaaaaaaaaaaaaaaaaaagccgccccgagaagtccgggaggggtgggcactccgagccgcgggaccgggagatgctaccgcgcgcgacctcgcctcccgcgacctcgcctcccgccgca

SEQ ID NO: 310433 - DNA, 122 bp, Homo sapiens
tgccttcatcgcgcctgcggacgttgagggggtgtcccgggctctgaggtgcctgcagcccgcctggccggtccctgccgcgcactcccaacgccgtgcccggccccgcgcccttcaccaac

SEQ ID NO: 310434 - DNA, 122 bp, Homo sapiens
tgtatttccacacacatgtaaggacaccggggcctaggaaggcagccagttgccaggcagcggactccgacacatctgtcgcttcctcccagtgatgtgactattctctcagtacaactgtt

SEQ ID NO: 310435 - DNA, 122 bp, Homo sapiens
ctattactaaactcagtgctctccaagtgtttcttttgacagatatcattctccaccaatcgctctgctaatttcctctctccttttctgactgggacagagattatgttcaccagcccaga

SEQ ID NO: 310436 - DNA, 122 bp, Homo sapiens
tccggcacgtcgcccgctccgtgggagggggtgggggatttcacttccgggacggtgttccggcccattccggcccatttccacccccggaggtaggtgctgctccttgactggactcgggc

SEQ ID NO: 310437 - DNA, 122 bp, Homo sapiens
agcccagtggagattcaggcataaaggacaaacccagacaggatcctgcaacatcagctacggtgggcgggctgcaggcatccctgacatgcctgtatcatcagcaaaccatctatcacttt

SEQ ID NO: 310438 - DNA, 122 bp, Homo sapiens
tgaccaacataatctgcaagtggactcaataacacatctccagctacctcccttcccaaccgcagccacaggggctgctgttagcgatgctggccctttctgagaccagagttcccttgccc

SEQ ID NO: 310439 - DNA, 122 bp, Homo sapiens
aaggtgaaacagaagcgtacacgtctcacgtagcagcaggcaagagcgagctggggaaaccgccatttatagaaccatcagctctcgtgagaattcactcactatcacgagaacagcttgcg

SEQ ID NO: 310440 - DNA, 122 bp, Homo sapiens
gcttgtagacgttggctttgggtgcttgaggtggagccgggccagttagagaatgagacacgccttagaaagaacatgagcccacccgtcctatgttaggctgcattagactcacctgagaa

SEQ ID NO: 310441 - DNA, 122 bp, Homo sapiens
cctagttaaaagcttagtggaggtaggaagtaggagcaggtagtaccttggccagccccacgtcagtgaggtactatcaggccatcgttgaagccaatgcagagctctggaccactataacc

SEQ ID NO: 310442 - DNA, 122 bp, Homo sapiens
gcgcctgcgcgcggcgggggcgtggcccggggcgagtggggccaaggaggcagccgggagcggcgggcgcaggtgttactggttgcgtcgggtcacgtgggcgcgcaggcgcagcgcggtgc

SEQ ID NO: 310443 - DNA, 122 bp, Homo sapiens
caggagaggggtccgaggaggccctggtccccctaacccagggactcttggctgggtccgcgctgtgacctgggccccagttctggagactgaggaccagaactcaggcccctggtcccaca

SEQ ID NO: 310444 - DNA, 122 bp, Homo sapiens
agtgacgcagtgttgtcgtctcgtaggcttgaaaggtaggtgcccgacattagggactgtcgcagcccggggaattgtccccatctgctggcttaccttgtgggcgtggatcccctctaact

SEQ ID NO: 310445 - DNA, 122 bp, Homo sapiens
acccgggccagggtggctcaagggagccgtgggtgcactgcctgggtcaaacacccttcgcgaatgtgtcccccagcttgtccccagcttgtgtcaccccagctacacaagttccattcttc

SEQ ID NO: 310446 - DNA, 122 bp, Homo sapiens
tctcccgcgcatgccggggcagcctttgtgtgtgcgggtggttggaagccgagggtctggcgaccccgaggccgcgctccctgcggcccctcgcttagctggagaccccgggatgcctggca

SEQ ID NO: 310447 - DNA, 122 bp, Homo sapiens
gccttccaaacccaaggcggagttccgtgcgccaatcatcggtgggagacagggagggggcgtgtccatccccgccccccgcctccgctggcctcgaaagcggagtgcgaagcttcctcaaa

SEQ ID NO: 310448 - DNA, 122 bp, Homo sapiens
tgcaccttgtcaagctggtccccagtgtgtgtgacttcagcctgcactagaccatttgaccgacctaatcattttgttcgtaagagcttcaagaacatctaattgagcattcccagcctttg

SEQ ID NO: 310449 - DNA, 122 bp, Homo sapiens
ccctgcatctggctctatatgggagcacaggcacatgaggggtgatgccccaaaccctaacggccttgaaaaggagagtagatgttcagcactgggtcagcagggagggggctgtgcccaga

SEQ ID NO: 310450 - DNA, 122 bp, Homo sapiens
atcagaccacaccatgaagcatcaatacagaaaagggggaacccgctggcccaatggcagcgtcctacagtgtagcctccgcctcccgattgactggcctgcttggcaaggcaagtagcggc

SEQ ID NO: 310451 - DNA, 122 bp, Homo sapiens
taactccacagcacggagctagcactctgtgtttctctgttctctgccttcctcacacttcggtgaatccttcagtcattcagaatcagatgttgcatgtcacaggttgtgccttctcttgc

SEQ ID NO: 310452 - DNA, 122 bp, Homo sapiens
aaactttccagtcatatgacctcagctgggtcatatgaactcttgtgtcaggttgtcttacgtgcaagaagagaaaaataacagtatttccctcatagcctgttgtgagcattaaatgagtt

SEQ ID NO: 310453 - DNA, 122 bp, Homo sapiens
ctaagaagacggagagccaccataaggccaagggcaagtgaaatgattactagtcaaatccgtcagtgatcccgagtcccagaaaccaaaggctcttttcagagccacccaccttttctgta

SEQ ID NO: 310454 - DNA, 122 bp, Homo sapiens
acagtgaggcagtgtggcactataagtgtggctacatgatcccagcctcaagagtcagaccgactagatttgaattttgattgatccttagcagtgggatttcagcctctgcgaccctcagt

SEQ ID NO: 310455 - DNA, 122 bp, Homo sapiens
ttcttctcaatctcctgacctttggtcaaagcctaacatcaaccctgctttatgaccatccgtgctgagacagtcagtgctaaggggtgagggggcatgaagcctggggaggaccgggcctg

SEQ ID NO: 310456 - DNA, 122 bp, Homo sapiens
gcccggcacccgaggagagggcggcgggcgcccctcggggaagatgaaggcggaggggggcgaccactccatgatcaacctgtcggtgcagcaggtcctgagcctctgggcccacgggacgg

SEQ ID NO: 310457 - DNA, 122 bp, Homo sapiens
ctcttgacagccagatccaaagagataacagagtaaccatccctggacactcacctcttccggagagctgttcccaattcaccaaccaaatcccgatgaggccccacgtctttggagttcca

SEQ ID NO: 310458 - DNA, 122 bp, Homo sapiens
tgcagggtcggccggcctgccccttaccagccgcaggaccagccgggagaaggctggaggcgggtcccactgcctgagggcctgggtgcagcctcactgccccacaagcagaaccaacgcct

SEQ ID NO: 310459 - DNA, 122 bp, Homo sapiens
ggtctgtggcttcactcctgaagtcagcgagaccacgaacccaccagaaggaagaaactccggacatgtccgaacatcagaaggaacaaattccggacccaccgtctttaagaactgtaaca

SEQ ID NO: 310460 - DNA, 122 bp, Homo sapiens
tgccgagccggcactgcaccgggtcctaggaaggctctcggaggggaggggaggccagggcgacccccgaagcaatggcccagtccgctagaacggcactgcgttaaggcacctgggatcag

SEQ ID NO: 310461 - DNA, 122 bp, Homo sapiens
aaccccttaaagctgtaagcccttaaacgggccaggaactctgtcttccttccgggagctcggctcttaagacgcgagtctgccgaagctcccagcggaataaaaaaaactcttccttcttt

SEQ ID NO: 310462 - DNA, 122 bp, Homo sapiens
tggcgaacacaggcaacagtccgtcattcaacaagattttattgagcacctactgcacaccgtgtaaatctcagaagagctgagaaccaaatgtaaccacgtcgatttgaaagagtgggaag

SEQ ID NO: 310463 - DNA, 122 bp, Homo sapiens
ttctcctctgagccttcagcctgtgctcccctccagctccactgcatctcctacacttctcgacctagcaggatggccttgtcctgcccgggctcctctgggacctgctttgggaaggctca

SEQ ID NO: 310464 - DNA, 122 bp, Homo sapiens
cgtttgcaaaacacccaggacctctgagcctcccagccgagaattggccaggggagcacacgcccatcggccctgccgggagaggaaacaatgggagaggcgcgagggagcaagccggcgcc

SEQ ID NO: 310465 - DNA, 122 bp, Homo sapiens
agctggggtgggtggagacgtttcctgcagaaggccgtactccagcttcttcttgcttgacgctttcggtggccaagagcggcacggctcctgaaatagaaaaacgagttagcaccggagaa

SEQ ID NO: 310466 - DNA, 122 bp, Homo sapiens
tctcgagctcttcaactccagtccatccccactcaccgtccgcagtcctaccaagcctcacgtggggctcacacccacaatcctccgcgtgacgctccgccgtaatggcaagcgaactaggc

SEQ ID NO: 310467 - DNA, 122 bp, Homo sapiens
gtgcgggaagagaagatcatcgagcatttcaaacggtgagtgacacgaggcccgcggccgcgctcgctcctcgggcgccgcttcccgccccggcccgttgccggcccctcccggagcgcgga

SEQ ID NO: 310468 - DNA, 122 bp, Homo sapiens
caccagggatagcagtctccctaactcccattccctgattcctcatttttcagctgtagacgaagataatcagcacagcccaagaaatgaaagctgtgggcgaacagaatgaatctatcaga

SEQ ID NO: 310469 - DNA, 122 bp, Homo sapiens
aaaggtagaggaggaagcaagcaaaacgtgatagctctggtggcttatctacgaggtgttcgagcttgtgactgccggcacctttgtggacaggactaggctgcaaacttaccaggtgggaa

SEQ ID NO: 310470 - DNA, 122 bp, Homo sapiens
aatggctaccagctggcagtcacaacactttcataatgtttgcacacaactcatttgggtcgctttcttttctttcctttttttttttttttttttgagagaaacggagagtcttactctct

SEQ ID NO: 310471 - DNA, 122 bp, Homo sapiens
caagcagtttgccctcttgggcggggttatcagtggctggcagggctggcacagcgtgtccgcccactgccacctgtgggttccaggagggcccagcccctgtgctgatgcccaccaccttc

SEQ ID NO: 310472 - DNA, 122 bp, Homo sapiens
tgtatcgcttattcccggaaatgaagcaggctctttgacttccctataggaacagcatggcgcacaggcgtcgcgtgtgaaggcccctcatagccgtgatttgttgatctgttttttttcag

SEQ ID NO: 310473 - DNA, 122 bp, Homo sapiens
tccagcaccaactggaggttttcagtggacgagtagccgcccgagggcagccgcttgagccggcagacagcggccagctggggcagcggcccgaactgctcccgcaacacgtcctccagcac

SEQ ID NO: 310474 - DNA, 122 bp, Homo sapiens
atgggtcaaaaataagtaaaggtgttgactcttctagagggcccacccagcaggtgagcgcgcgggacagagtctccggagagccagcgccgggccctggtggcctcctgctcttcacatct

SEQ ID NO: 310475 - DNA, 122 bp, Homo sapiens
cctagccctgccctccgccgccgcgcgaacgcgcgcgcctccccggctagtcccggcaggcggagccccagttagactgctcgtcaagtgtgggaaaagctccgtggcgtcacaagctacta

SEQ ID NO: 310476 - DNA, 122 bp, Homo sapiens
ccacccccggaaaaccaaactttattctcgagggcaactggacactgtattatgtcctgccgaacccccgcccttacttaggtagaggcgcataagtattctggccatgaaatacaccttct

SEQ ID NO: 310477 - DNA, 122 bp, Homo sapiens
agtaaactaaaaacagggataattagagtgtggggatttggagggaccataaatctgcggcgccttttccactggaatcaggagcctttatggcttgttgttttattttgagagaaatgaga

SEQ ID NO: 310478 - DNA, 122 bp, Homo sapiens
acgaactcctcggcagaggtgcagcgctgtgcggtaccgatcagaaactgggcgacgtgccgctcgctcagccccaacaccgagtgcagctcgtcctgaacccagcgctccagacccgccgg

SEQ ID NO: 310479 - DNA, 122 bp, Homo sapiens
tcccaggaagcactggtttcggcgagtgttaccagatctcctgcaggggagaaacggtcacgaaacatgaactggtctgccctgctcttggagagttacagtggaaactggcatgttagagg

SEQ ID NO: 310480 - DNA, 122 bp, Homo sapiens
gcaacttttggcaggaatcggggttagcgggacctcaagggctcactgcggctaagtgaacgctgactggtcctccagcgtgagctagaacagacgtctctatggtcaagtaaacagagcgt

SEQ ID NO: 310481 - DNA, 122 bp, Homo sapiens
aggtcctggggaggccgcccagctcgggctgcgggggcttcttggagagcgctttgaattcggccggccgcggcctcttgggaagcacgctgacttcgggctctgaggaggtcctggtgagg

SEQ ID NO: 310482 - DNA, 122 bp, Homo sapiens
ttattcataaatttttgattagcttttgagaaggcatttaaaaagcagtagcaagacggacggtggaaagactggacaagaccacctttaagtgtggagaatatccactgtccaaactctgc

SEQ ID NO: 310483 - DNA, 122 bp, Homo sapiens
gagttccatctttctagggtcggctggaacactccgtgcacccaccccgagccccccgcccgcacttgtccaactttctggcccgagattcgcgtccccctcgacgcacgaggccgccggcc

SEQ ID NO: 310484 - DNA, 122 bp, Homo sapiens
ttctcccgccctctcctcccccgggccatgtgcattgtgttttgttgaatgtgttccttccgaaagggcaactggtacagcgcaaaatgttcttcctacagggcaattgttatgttgatttt

SEQ ID NO: 310485 - DNA, 122 bp, Homo sapiens
gcagtaccaggccaaagtggaatggcaggtggagaagcacaagcaagagctgagggagaacgagagtaactgggcatacaaggcgctcctcagagtcaaacacttgatgcttttgcattatg

SEQ ID NO: 310486 - DNA, 122 bp, Homo sapiens
ccatccaaacgtaaccagactggggttttcttctgtccagctccggggaggcgcagtggacggcaaacttacagccggtatcagaccttggaactagaaaaggagtttctctttaatcctta

SEQ ID NO: 310487 - DNA, 122 bp, Homo sapiens
cccaagccaccatagcaagactccagagcatgtttataaaccacagcttcacaacaggagcggccccgaggtttttctatctcttgctcaagtatggaatttaaataatcaaagatgatctt

SEQ ID NO: 310488 - DNA, 122 bp, Homo sapiens
tttatgtattatattatactatgtattctttaagaggaaggagcaggtaacacgaggtgacgctcaaagaatgcctattgaattagtttatgatatgcactggttaaaaaaaagtttccctt

SEQ ID NO: 310489 - DNA, 122 bp, Homo sapiens
ctcgtccaaggtaacttggcttgggtctgagtgtccataatgtgtctaaaaagcagctgccggggggtgttagtgcttctcggtttcaaagagcggctctgctcctggccctgctgtcacag

SEQ ID NO: 310490 - DNA, 122 bp, Homo sapiens
tcattattggtgaggtcaagactaacacctaggatttaaagatcattctttcttttataccgtatttccccctaaatacacagatagtacaataagaatgactgcatacagcacaaaagtgg

SEQ ID NO: 310491 - DNA, 122 bp, Homo sapiens
gtagatgggtggtaagactgggatgtggagaggagccagaggccccagcggctgttctcccgcacctcgcctccacccctggccgctcctgcctggggccttgggaggagccgaaataacaa

SEQ ID NO: 310492 - DNA, 122 bp, Homo sapiens
tgttatttttgttattaatagtaaccatcctaatggatatgaagcagagtctagccctaccgtggttaatgtcaaactgaattcttcttacgttgttgctgaaggtgtggtggcaaaaccta

SEQ ID NO: 310493 - DNA, 122 bp, Homo sapiens
cagcttcttaatgaccttatagctttttttaaggaacaatgaaatacataacaggaacaacggaagaacacttgtatatgctgacatcagcaagcaaaatgcatacagttcagccagtgatt

SEQ ID NO: 310494 - DNA, 122 bp, Homo sapiens
ccccagtgcctaacacaaggtttcacacagtatgtttgttggatttcagacagattatggcgtgagccataccacaaaggatctgtcagggaactgatagggctgtctggtctgcctagagt

SEQ ID NO: 310495 - DNA, 122 bp, Homo sapiens
ctcccctctccacttaagcaagcgcccagactgatggcgatggtgatggcagcagttactcgcacaaccccagttaagctgcgctccgggaggtgagtgggggaagggtggccgctgcctgg

SEQ ID NO: 310496 - DNA, 122 bp, Homo sapiens
ctccccctacaaagtctgggtatatttttgcccatttcttgcctagtgttatcaatacttcgaacaactagtataaagaacttagtgaagagcactggtgcaaagtagtatgttcagtctgt

SEQ ID NO: 310497 - DNA, 122 bp, Homo sapiens
tgctgttctcatgaattccaggccaattgtcttggttaaagacaaggtatgtgggctgggcgtggtggctcatgcctgtaatcccagcactttgggagaccgaggtgggaggatcacgaggt

SEQ ID NO: 310498 - DNA, 122 bp, Homo sapiens
cattttcataatgggagtctcagagcaggctgttccctgggtatccagaccctgctctgccgtgaagagaccacaccaacactgaggaaggcactgaggagaattttattacattttagaga

SEQ ID NO: 310499 - DNA, 122 bp, Homo sapiens
ccagcattggagtggtccttagaggcctattatgaaatcatagaatgtctgcattggaatcgcctcacctccttttaccgctggagaagccgacggacagacgggcagcgacccccgccgtc

SEQ ID NO: 310500 - DNA, 122 bp, Homo sapiens
catcagctgatggggctctctcttagaaatgcaaagtaatgacaatcaagtgaagtgctccgcaggcagctgaaaaggaaattttatgttaattaaatatcgaactgaagactcataatact

SEQ ID NO: 310501 - DNA, 122 bp, Homo sapiens
ggccggggatggagtcgaagctctccatctcgaactggtactgcacgcggctgtaggcctcgctgagtcgcagaactgtccggttgattttgaagtgctgagcgaggttcttccactgacag

SEQ ID NO: 310502 - DNA, 122 bp, Homo sapiens
ctgggtcccaagaggcctctgcccctcagccacctactcaggcagctcctcatcgcgtagcgtgcccccatgtgtgctacaagctgcaggggcctgactggtgcctgagtagggccctgggt

SEQ ID NO: 310503 - DNA, 122 bp, Homo sapiens
acctgggcaattccacctctgagggctgtcctcagaatgaatcttctgatgggctgggcacggtggctcacgcctgtaatcccagaactttgagaggccgaggcgggtagatcactttaggt

SEQ ID NO: 310504 - DNA, 122 bp, Homo sapiens
tagtagcacatccagacatttagctgggctaagtatctgtagttaagactgtaacaaaatcgatcaatgacctgcagtccttccttgcttgtccagtagattaaaatgaggtggggtgaaaa

SEQ ID NO: 310505 - DNA, 122 bp, Homo sapiens
attggacctcaagtcttctattcctactaatagagttctttgtgatggtaactgctgtgtcgtttgttttccacaagttgggatggattcatgtcgatacatccccatgcccttgacctctt

SEQ ID NO: 310506 - DNA, 122 bp, Homo sapiens
aaccaaacgcaggcaatcctcagcggagctcttctccagctggaacaatgagctttgtcccgagaacaaggggggcacgcccaggcctggaagctgcaggatgaatgggacttctcaagtta

SEQ ID NO: 310507 - DNA, 122 bp, Homo sapiens
tgccaggtaggagtggcctggctgtcggtcgcgtagctgacagcagtgcgcgggggtcttcgcggctgcagggctcctcggtcagtgtgtgcgggattccgggcggcctcggcgcccaccag

SEQ ID NO: 310508 - DNA, 122 bp, Homo sapiens
ggctctgtgagtccactgcccccttttggcttggaggcagagtgccccgccagagctacgcgttcccagccaggtaatttttgaagccacgtgcaaaggtttaagcatcgtttgccaaaggt

SEQ ID NO: 310509 - DNA, 122 bp, Homo sapiens
ttaacaatggtcagacaaactggcaccatgtatcccttcatgggagtgctgaggacacaccgccagctaatgagctagcattcctgtccaacattgaactggagtccaatcagcgaacgatc

SEQ ID NO: 310510 - DNA, 122 bp, Homo sapiens
gagtgtggagaactgagtttgacaggaccttggtctgacagattttatagaagtttgggtcgtacctcctagtgggccttgcacactgtggggaaagttcccctctctgtcttttgtacaaa

SEQ ID NO: 310511 - DNA, 122 bp, Homo sapiens
ggaaaacacctcttccttttaattgctctgaggaccgctgccaaagaaacgcagtagatccgctccctcttgggggcggggagaaagaacgggttgtgtccgccatgttggtgaagtcaagc

SEQ ID NO: 310512 - DNA, 122 bp, Homo sapiens
ttcagcatggcttgggaagcctcaggaaacctacaatcatggtgcaaggggaagccaatacgtccttcttcacacggtggcaggaaagagaagcactgagcagcaatggggaaagccccttc

SEQ ID NO: 310513 - DNA, 122 bp, Homo sapiens
gcgccggacgccaggctgcagggtgaatagatttgcagcccgccggctgcaggcggcggccgccgagccctgcaaacaataagtgaattctccgaagcgactgaaaccccccgggctgggcc

SEQ ID NO: 310514 - DNA, 122 bp, Homo sapiens
cgcccatccgcactcagctccagcgtctccgcgccttcctgccgcttctccagaaggctgcgggacagcaagagccagagactcggaagtccaggcccccagccccctcacccccaagacca

SEQ ID NO: 310515 - DNA, 122 bp, Homo sapiens
aatcattaatttgctcctactctcataatctacgaataggtgtgggttctctgcaatccccgggcgtatcggggacgctggagaagtgagaggctccaaaacacaaactagtttttttgaga

SEQ ID NO: 310516 - DNA, 122 bp, Homo sapiens
atatgatccgcactgggggttctgcagggtggggacaaccacagcctgtcacaagctcaccgtcagcctctctggagccattcggcagcatgaagtccctatcacccacataataatgagaa

SEQ ID NO: 310517 - DNA, 122 bp, Homo sapiens
tgaaggagtccaatgacattcttttcctcctgggcagttgggctggtgaggccgtgagtccgggcaccttgctgggggacgtttcccacatgctgtcagactggctcagctttatcatttgg

SEQ ID NO: 310518 - DNA, 122 bp, Homo sapiens
ttgccagcctcgttgccccagatgtcaggcttccagaggaactctgcagtgcgtgacgaacgtattgttgcatcctctgaagagctgagaaacgtcatcagtttgtgatgcctgggccactc

SEQ ID NO: 310519 - DNA, 122 bp, Homo sapiens
tttatggctgcaatccccaagattattcaggccctattcccactttgagagctgcatcttcgattgttccatagaattgaaattttcatccatgtctgtcaccctaaccctggagagcccct

SEQ ID NO: 310520 - DNA, 122 bp, Homo sapiens
accttgtgatccgcccacctcagtctcccaaagtgctgggattacaggcatgagccacctcgcccagcccggcatcttattttcatggcttaagatttctaggtccagataaaaaccaaggg

SEQ ID NO: 310521 - DNA, 122 bp, Homo sapiens
gaaagcagatgtcggtcctcgccccgtgctccagcagcagcctcaccccatccacgtccccggccttcacagcaaggaacaggacctgcatgggcacgcagcacaggttggggtccgcgccc

SEQ ID NO: 310522 - DNA, 122 bp, Homo sapiens
cctgcctgtgctccccgcgcacctcccgccctccctaggcaccggatgctggctcaccaccggcctcacaagcttaggacagcactgaatagaggtgccgttgtctccattttcaaatgaga

SEQ ID NO: 310523 - DNA, 122 bp, Homo sapiens
cgacagtccaggagacgcgccgagggcaaagaaaccactaacggagcatccaagggcgagcgcgcgggacgcctctagatgcttaactgtgaatgcactgtttggggacggggggttgtacg

SEQ ID NO: 310524 - DNA, 122 bp, Homo sapiens
caagctcacagcctccaaagcagtagtctctgtcttagctgcagccttgtgacccgttcccgttccaccacctgacatgggtctcccacacgtgctataatgggagagctctgcctcaatgc

SEQ ID NO: 310525 - DNA, 122 bp, Homo sapiens
aaaaggtttggggcaggggcagagacgacgaggaaggacaaggatgggcattatgggagtcgtctgatatggaaagggttcatgacttaaaaaaaagaattattcgagacgtaggcaacagg

SEQ ID NO: 310526 - DNA, 122 bp, Homo sapiens
aggagatgccttagtcaaactgtatttttaaaatggcatgtttgtagaacagacatgaaacgactgagaaacggcagaatgactcatatgtggggtattagatgtatttcttctctcgccac

SEQ ID NO: 310527 - DNA, 122 bp, Homo sapiens
cgcctctacccgaccctccctcagggaaatcgggactcagcccccaacgcccccacctgccgctctgcccacctcagcgcacaccgccagagcgcccagcccgcgcacgtgcttccggcgcg

SEQ ID NO: 310528 - DNA, 122 bp, Homo sapiens
ctcccaaaccccagccaactaggggtgagctcccgtggccacctgtgacagtcagcccctcgcagtagacgtgccgacgtggctcccgaggtggaggggaagctggaggccctgggggctct

SEQ ID NO: 310529 - DNA, 122 bp, Homo sapiens
aggaggcagtggtgcagtgagccgagatcgagctactgccctttagcctgggcgacagagcgaaactccgcctcaaaaaaaagaaaagataccgaaagctttggggtaaaccagttgtatat

SEQ ID NO: 310530 - DNA, 122 bp, Homo sapiens
gagtgaaacgtggaacacgacttcacatcaaaaatgcacgttgcagaggcatttttccttcggggacgccggaagacttcgccacacgcgcgccctctccgcggacaccaacgtgctgacgc

SEQ ID NO: 310531 - DNA, 122 bp, Homo sapiens
agtaagtaaaaagtaaaaaaagaaagtattctgaacaaagatgccaggctttgtagttggcgctggcaatggaaccgtgtctttcagtagttcccactctggtgaagacaatagacaattgt

SEQ ID NO: 310532 - DNA, 122 bp, Homo sapiens
agtgttatgtaaaggatcaggagaaccaggttttattcttccccctgtctctgatgatctcggtaatgtgtctagcttcaactttctcatctataaaatggggatgataatgtttgtcctgc

SEQ ID NO: 310533 - DNA, 122 bp, Homo sapiens
ctggaggtccccgccctccaagtccctgcccgccagcctcttctcccatcatggcgccgtcgcctgcagcctctctggacactgaacgtcatgttcagcctggacactcacaaatggtctgg

SEQ ID NO: 310534 - DNA, 122 bp, Homo sapiens
gcaattctgaaacattcatgtccagtgcgtccttattttctcatttgagagaagtcagtgcgtggcttatgataaggagatgaggacatggcctgtgctattagggagccacctgaatgtgg

SEQ ID NO: 310535 - DNA, 122 bp, Homo sapiens
gctgctccgggcacgtcgcggagggagtcccatttcttctgactcggcaggagcccgggacgttctggaaggagggacgagccgaggcaggaggggccgggccgacgcgagagaaggcccgt

SEQ ID NO: 310536 - DNA, 122 bp, Homo sapiens
ggattttggaaactcctctcggtgcatatcctaaggctgcacgactagctgcgtgtgaaacgccaagcgtaccctactcggccactcggggtgtgctccagcttcaaaaccccgcgtgggta

SEQ ID NO: 310537 - DNA, 122 bp, Homo sapiens
gcactgtcccaaccaagaaccccagagaggtctaacccagcagatttccaaaggactctccgcttctagcaaggcgggaatccctgcatttatgcgtacttttcagctttgcaaagtgcatt

SEQ ID NO: 310538 - DNA, 122 bp, Homo sapiens
taatgacccttcagttttggggaagggaccagagctcggccagtgagaagcttccagctccgtctggccatatccaggctgctgagggtcctgggctctgtccttaaacctcatcactgaca

SEQ ID NO: 310539 - DNA, 122 bp, Homo sapiens
cgccgacagggtccgggagtcagtatagctgggttctagtcccatcacaggcaaaaactccgcgggagcctggcccgctttttacctgggcctcagtttccccatccgtaaaatagaacggg

SEQ ID NO: 310540 - DNA, 122 bp, Homo sapiens
gctggtgcggcccctggcaacccgggggcgcctagctagggagccggttgctatgggcgccgtaactggggacgctacaggagccgccagggaccaaaagtcacgcaaaatccactcaggct

SEQ ID NO: 310541 - DNA, 122 bp, Homo sapiens
cgggagatgcttcctcgcgcggcgcagcgctgaggccgtgcgtgcgccccggctgcgctgcgcgctccccacatacacaagctctccatgtgagctgacaggcgagtggaaacccctcgagt

SEQ ID NO: 310542 - DNA, 122 bp, Homo sapiens
catgctgtagtgaccagaaggatggaccctccctgcacctgctgtggaggaggaaggtgacgctgcactgtgccaagctctgccaatctcggtttaagtctgggcattgccactaatttgct

SEQ ID NO: 310543 - DNA, 122 bp, Homo sapiens
tttatcaatagcctggttacagattttttatggaggctgaggcaggataatcacttgaaccgaggaggcaaagatagcaatgaatggagatcatgccactgcactctagcctcggtgacaga

SEQ ID NO: 310544 - DNA, 122 bp, Homo sapiens
atttgtgggttagcaaaagggtatactctaaacaacactgatcgttagagagacagtggccgagacgtttggagctggtcactcctctcccgctcacaccccctctgggcctcggtcccctc

SEQ ID NO: 310545 - DNA, 122 bp, Homo sapiens
tgctaatctgtcaaaacacttaggttccgcctgtggttggatgcttggtccatctgcacacgcacagggtatgtgaccttcaacctgggggcagcccatggcaactgaaaaacaactgacaa

SEQ ID NO: 310546 - DNA, 122 bp, Homo sapiens
agtggtgagcattagtgcccacaggagaactaagcatgtatgtggattaattaacagattcgttaagggtacctagtttaaatgtatctatttgtaaattagccaagagggattcaaggtga

SEQ ID NO: 310547 - DNA, 122 bp, Homo sapiens
cctcagaacctcctctcttccccaaaaagcaccatgacttgtggatcttactgtggtggccgcgccttcagctgcatctcggcctgcgggccccggcccggccgctgctgcatcaccgccgc

SEQ ID NO: 310548 - DNA, 122 bp, Homo sapiens
agcagccgcagcctggccgcccgaactttgcgagcctggcgggggagcacagaggcgggccgacctgccccgctagcgctgaggaacgactccctttatgccagctcgctgtccgccttccc

SEQ ID NO: 310549 - DNA, 122 bp, Homo sapiens
ccaggaatgagagggggatgggacacacatcaaaagggcagagcggatgccagaaaagcccgagaaggtgggagctgagagacccctggagccgctaaaatcatgctgcgagctctggagag

SEQ ID NO: 310550 - DNA, 122 bp, Homo sapiens
aggtcatggctgctggctgtctgtggcggaagtccttggttgtttcctctcccctcctcccggctctcaccattctgtccgtctatctcgtcttgtcctcagtttcaaagcaatgtcacgaa

SEQ ID NO: 310551 - DNA, 122 bp, Homo sapiens
gggccctagttgcttgggcaacgggaactgtcagcgacctggcccaatcacctctcggaacgtcactcgggtaggtccagaggcggggtcaacccggcccggccccgcccccccgccggatc

SEQ ID NO: 310552 - DNA, 122 bp, Homo sapiens
gggttgtctcccttctcccaaggccagacagtgagctccccggggcatgaggactgacttcgtgcctgtgggagtgcggggggcggtgggagaagccccccggagcttggccaccctccgcg

SEQ ID NO: 310553 - DNA, 122 bp, Homo sapiens
ggaggctgaggctctagttgaagtggggcaagagcgattttcccttgagcttccatgctgcgagcgcctgtccctccaaagggcgcctgggcagcagcagccgaaggcgctactaggaacgg

SEQ ID NO: 310554 - DNA, 122 bp, Homo sapiens
ctggccacgggcaagggacagcgaccgcctgggccaggacaggtgagagcggcgcagtcccgggcccggcgtgtccgcgctgcgcgggagaggccagcagagggcgccagagagccaggagc

SEQ ID NO: 310555 - DNA, 122 bp, Homo sapiens
gttctcttgtgcagccattttttccatttgaaacccacctccctcacctaccccatcctacggctgttctagaagagtgagcaggtataccgacacctcacacagggcttgcacgctgcagg

SEQ ID NO: 310556 - DNA, 122 bp, Homo sapiens
gtctttctagatcatgaatgtccgggccagagtgcagatgctggccaagttgtaagtagccgggtccgccctgggccaggcccgtgggtgtgcgttgcacggtgaggtgaacctctcgcatg

SEQ ID NO: 310557 - DNA, 122 bp, Homo sapiens
tgtgtgggtggagggaaatgccaaaccacagcaaaagcaagttgatgccgaagtgaaacacgcagctttattaagacaggggcggtagaagaaggtctccatgctgaacagattacattatg

SEQ ID NO: 310558 - DNA, 122 bp, Homo sapiens
gggcagctcggccttgggggcttcggggccccgagacgcggggcgtatgagtggggcgtgcgctccacgcggaagtcggagcctcctcccctggatagggtgtacgagatccctggactgga

SEQ ID NO: 310559 - DNA, 122 bp, Homo sapiens
cctgtgtctccaaatgctcgtctttgtatttggacctgtctcttagcatttaggggcacccgggactgtgggcccatcagccagggtcacttcttccctaagattgccctcttattccagat

SEQ ID NO: 310560 - DNA, 122 bp, Homo sapiens
ctgagggactcagtgggggttcactaggattgagcagtggcccaggaacttccttgaacacggcagagatttggtgatgtgcgtttactgaagatagagtgcgctcctagtccaggtagggt

SEQ ID NO: 310561 - DNA, 122 bp, Homo sapiens
attaaacactattttacggcttccgccctgtctgggacgtgaggagtgtctctgcccgaccgccgccccatctgggaagtgaggagcgcctctgcccggccgccccaccgtctgggaagtga

SEQ ID NO: 310562 - DNA, 122 bp, Homo sapiens
gccctgctcccctgtatggtggaagcagaggatagtgggttgactagatcgccagaagaacggcctgtctcattcacacaaaggaaaaaccaggctgaccatggaaggaattgatggccatc

SEQ ID NO: 310563 - DNA, 122 bp, Homo sapiens
gtcaatcatgctttcaaatgcaagtactgtgggaaagcctttggcacacagattaaccggcggcgacatgagcggcgccatgaagcagggttaaagcggaaacccagccaaacactacagcc

SEQ ID NO: 310564 - DNA, 122 bp, Homo sapiens
gagcactctgcacctcaccgagcaccctgcacctcaccgagcatcctgcatctcacctagcgccctgcatctcaccgagcgccctggatctcaccgagagctcagggttcctctcccttgtc

SEQ ID NO: 310565 - DNA, 122 bp, Homo sapiens
ttgctagccggcgagttgcagtcttctgagctaattaggagacggtcatgaggagcgaggcgggccggggcgctccgcgggccggggcggggctggggcgggcggcgcgcagctcctgggcc

SEQ ID NO: 310566 - DNA, 122 bp, Homo sapiens
cgtcggccaggccggtggccgggggcagcagtaacaggttgcgtgcgggccagtgccaggcggcacccggagggtggcggcgctgcgggctcagccagtagtcgcccaggctgcggcgggcg

SEQ ID NO: 310567 - DNA, 122 bp, Homo sapiens
ctggggagggcaaggttgctcttggtggcagcagccatagggagggagctgggaaatgtgcgctttagccccagacagcggctgtggatggggtagcctgtcctcaggtcccttataaatgc

SEQ ID NO: 310568 - DNA, 122 bp, Homo sapiens
tgaggagctctgttgtgtgttccccagtagatgcgactttcttcttctctttatgggggtcggcaaacctttttgggaaagggccagggagttaatattttcgtcgttgaaggccacgtggt

SEQ ID NO: 310569 - DNA, 122 bp, Homo sapiens
aatacttgaacctgggaggcagagattgccgtgagccgagatggtgtcactgcactccagcgcctgggtgacagagtaagacgctgtctcaaaaaaaaaaaaaaaaaaaaaaaaaaaaccat

SEQ ID NO: 310570 - DNA, 122 bp, Homo sapiens
aggagagctcctcagaaacccggcaggtttttagcgccgcgggtgggggaacgaggtccccgtgtcgcgtgattcaagaggcgaaggaagcattggagccgggactcacggtcagacaaagg

SEQ ID NO: 310571 - DNA, 122 bp, Homo sapiens
ccatcaagacctgaaacaccaggatttcaagcccaattctgtgttaaagcaaagtccccacgcttggtagcccacaagcccctttcacggctcccgtcctttgtcctctgacgcatttgcag

SEQ ID NO: 310572 - DNA, 122 bp, Homo sapiens
aggacactattttccaaatggtgaaatatcctctaaaaatatgttccccaaggccaacttcgcggctggtagccccttccgacgcctttgcctcccagaaaatcacaacaaagcgatcggaa

SEQ ID NO: 310573 - DNA, 122 bp, Homo sapiens
cagcaccttcacagcctggggtccctgccctgcccactctgccggggccagccccttacccgggccaggtccaggtcagcctgcttgcgatgcctccagaagtacacggcggggcctgagtg

SEQ ID NO: 310574 - DNA, 122 bp, Homo sapiens
ctgtgacaggtcttccttttccctggtgagagggtcctgatggccgagtgccaggcttggcgcttcggccttgttcctgcgggtgcgctgcttcctctctcagggcatcagcctctgacggg

SEQ ID NO: 310575 - DNA, 122 bp, Homo sapiens
gacagtgaaaggccttggggtctggaagcaaccaccactgcccaactgccactgcccaaccgctgctgcccaactgccactgcccaactgccactgcccagcctgatggctccacatctcag

SEQ ID NO: 310576 - DNA, 122 bp, Homo sapiens
atgtcccattcctgactctcatccaaaccctcccccacaccctaccaccactccctgttccggaaaaggaagtggagcacagtccccgtaggaccgtctaactctgagccagactaacagaa

SEQ ID NO: 310577 - DNA, 122 bp, Homo sapiens
tctcatcccgccccaagcaggttgacgccacggtacctgcaagccctgccatggcgccgccgccactgtcgccgtctgccgcagcctgcctccacctcagctcgccaccgacgccgcaggaa

SEQ ID NO: 310578 - DNA, 122 bp, Homo sapiens
acaggccgggcgggggtgagtaaggcccagcggacgcaggaggctcagtggcggcggcggcggcggcgatggggaggagggtaattagcagggaggctctcgccacagcacgtccccacaaa

SEQ ID NO: 310579 - DNA, 122 bp, Homo sapiens
tgtagtgtccatatactccttgatggcctgacatgattcctaggtgggaagggaggatagcgtcagggacaccatggccatgtatggacccacccagggcactgaggcactcacctgctggt

SEQ ID NO: 310580 - DNA, 122 bp, Homo sapiens
ctccagagaggctctgcacggggtcaccctgctggcgatcagctgcagaggagccctgcccgtggacccgggatttgtggggggcacttctgccgggcggggggtcggtgtccaggtgctgc

SEQ ID NO: 310581 - DNA, 122 bp, Homo sapiens
ctggggatcaaagaccacggaagaggtgaaggcagaaagcgcccgaggagcgttgcattccgcagaaccccaaccaagccggagaaatccgtgcacagaccagattaaatgtcaggcctcct

SEQ ID NO: 310582 - DNA, 122 bp, Homo sapiens
gcgagggcgaatctataagaagcgtcgttcagcgagttcgctgctcagaagcgccgagagcgcggccgggacggttggagaagaaggcggctcccggaagggggagagacaaactgccgtaa

SEQ ID NO: 310583 - DNA, 122 bp, Homo sapiens
tgattccctcctgtgtctcaaacagagctcacctttgccatcactgctgtcctcaccggccggtgccagaggcccgtgtctgtgtaccctgtgtctgcacctctgggcagggcctggctctg

SEQ ID NO: 310584 - DNA, 122 bp, Homo sapiens
ccatatacacacactgacagagaggcctggctaggggtaagcatttactccctcttcttgcgatattgtgaagggtatcatgcctgctctgggacccaggattattcagacagttgaagaag

SEQ ID NO: 310585 - DNA, 122 bp, Homo sapiens
aaagaaactcgagcgacgggggttgagttccgggggaggttgagttcctgcggtcaaaggcgccgtccgcccagccacgcccaggggccctgttggctctctagggttctccttccaatctc

SEQ ID NO: 310586 - DNA, 122 bp, Homo sapiens
aaggccgctgatcacgtctgtggcttatttgaataatctgtcatggggacccttgtggcccgggtcgcccgcagcctcatcttggcaggatttacgccgccactggccgaaggcaagaagtg

SEQ ID NO: 310587 - DNA, 122 bp, Homo sapiens
ctcaaaacttgctcccttagtcccgcctcctcacttcagtgattggattttccacttccgcgcctctggaattctcttcacccattggtggagactcctgcggggtcaaatacagaatttac

SEQ ID NO: 310588 - DNA, 122 bp, Homo sapiens
gtagaactagctagatgctggagaactcattatgcgccggtaggtaattttaacctgcatcgtctcatctctattctgtcacaatagaggaaactgaggcacgcccggcgtgtgggcgtgtg

SEQ ID NO: 310589 - DNA, 122 bp, Homo sapiens
gaggtggtgctgctggctgcagatttcttcagctctattttcatagactgagtctcagctcgaggctcgaatttggtcagatttcctgctcctggggctgccactactggctttcctgcttt

SEQ ID NO: 310590 - DNA, 122 bp, Homo sapiens
gccctaggagcggtgtgctcaagcgctttcagcaccagccaggaccaactaagaggggagcgcttacctcccagtcaccgcgcagccctacaagaggccaaagcggctggcacagatgcact

SEQ ID NO: 310591 - DNA, 122 bp, Homo sapiens
tgggacgtgaggagtgaggctttgggccaggctgttccccgaggcgcgtggggaagcgggcgtgacctcttctgaaaaggcggtaggctcgctccacccaggccctagagcccacccttaga

SEQ ID NO: 310592 - DNA, 122 bp, Homo sapiens
ggcaccaaggccgtcaccaagtacaccagttccaagtgagcccgcccaccgcggaacgttcggtcagtctcggcccacaccccaaaggctcttttcagagccactcagtcttcccaaagaga

SEQ ID NO: 310593 - DNA, 122 bp, Homo sapiens
ctccaggctgacacaggctggaggacggcatcacccttgcctttggcttctggttgggctcggctaataagaggcactgggagaatttagtccagtatatatatttaaaaaacaaaacaaaa

SEQ ID NO: 310594 - DNA, 122 bp, Homo sapiens
gtggacgcggcgtcgctggcgcccgagctgaggtcgctcttaaggaagctgacacggctgcgctggctacccacggacgtgcgcgactctgcgcgccgcagcttgcccagcagcgcgccccg

SEQ ID NO: 310595 - DNA, 122 bp, Homo sapiens
tgggctgtgggaccccacggggctgggcagcgggctggactgcaactgaacgtcaaagagcggagctttgggcctctcacccaacgcggcttctacgtggccttccaggacacgggggcctg

SEQ ID NO: 310596 - DNA, 122 bp, Homo sapiens
gcaaatacaactaccgtttcattaactggttaagaatctcacacagtgtccctacgcctgcggaggatggaaactgaggtcacgctggttttagggctgtgtccccctccttctccgccttc

SEQ ID NO: 310597 - DNA, 122 bp, Homo sapiens
gagctgccgaccccggggctaggggagtggtcttgcgaggagcctttgcttcccactcgccggccgccccgcggggccctcctgccaccaggtggcgcttctcggccagcccgggccgcagg

SEQ ID NO: 310598 - DNA, 122 bp, Homo sapiens
gactccctacagaaacttttgccgagtgggagcaggttcccaggctacgtggacagggaccggatgggaggggaagtcgatgcttggggtcggggctgaagggactgaggagctcccaaagt

SEQ ID NO: 310599 - DNA, 122 bp, Homo sapiens
ccacgctttactttggtccaaggtggtggccgaggcggggttggtggtggctgaggcggacggggtggtggaggccacgggggagctgttggcgttcttgttcttctcctgggagtacacca

SEQ ID NO: 310600 - DNA, 122 bp, Homo sapiens
cacccggatggcagaggagctggctcagcctgcagcatcgtggtccccgccttcctggttcgtgggggatggcggaggctgccctctgagactcaggcctcaggtggctcctgaccggctcc

SEQ ID NO: 310601 - DNA, 122 bp, Homo sapiens
cctgggtggcggggccctaactgagggaaattggtcacctggtgtctggggaggagtgggcgcttagcaggaggcaccctaaaaggaagaaaagttaaagagaaatgtcgaagaccaaatgc

SEQ ID NO: 310602 - DNA, 122 bp, Homo sapiens
ccggccgggcacagcgacgtcaagcgcttttggaagcggcagaaacatagctcctgagagcgcgggacttggacacggacctcggcgggcgggactgggcggggcggggcatcagaactcag

SEQ ID NO: 310603 - DNA, 122 bp, Homo sapiens
atcaatgctttcagcaactttgttctacttcccctactgtaattacttttgaatcatcaacgcacccagacagccttaaacctcagagaacagaatgctaaaaaaagaaaaaaaaaacccgc

SEQ ID NO: 310604 - DNA, 122 bp, Homo sapiens
atggaaactttatcgttttttcctgatgaacttctctaatctttgactctttctagaagccgtcgcaccctctactcaccattaggtgtccctcatcagaatgtattgccagtaaacacatc

SEQ ID NO: 310605 - DNA, 122 bp, Homo sapiens
agaagacaacaaagaagggcaggtttctggaacctggggggacactgatgtccagcgtgtcgcagcccttcctgtggctctccacagtcacttccagcttatttttgctcttggtggagtcg

SEQ ID NO: 310606 - DNA, 122 bp, Homo sapiens
ttttgtaaatcctgtgaaattataacacaacacaacacctggacaaagttttctccagcacgaacttactgtttggggcttatggctttcatggctttttcaataataatggcatcttcaat

SEQ ID NO: 310607 - DNA, 122 bp, Homo sapiens
gcgggtagtggcaggaaagttgcagggcagagagccagaacccagtcctaggtctcacctcgtggcctaaacacgcgtcagagtggtgagaccgctccctgaggagggccaggagctgccat

SEQ ID NO: 310608 - DNA, 122 bp, Homo sapiens
cggggtcgggggtccggcgagctttaatgcgcgcacaaagcctcatttgcaggtcaatgccgcggcacactcgcctctcccctcgcccggcgccctttgtccggccgcgcccgctcctcgcg

SEQ ID NO: 310609 - DNA, 122 bp, Homo sapiens
ggaggcagaggttgcggtgagctgagattgcaccactgcactccagcctgggcaacagtgcgagactccatcgcaaaaaaaagaaaaataaggggggagtttggagctatagactggccaaa

SEQ ID NO: 310610 - DNA, 122 bp, Homo sapiens
gcctcggcactccaattatactttatcttggcttgggagggtagccgcgtttgccacaggcggacttttgaaggagttagagtcacagggcagcactagctgtgcatcttatcgcaccactt

SEQ ID NO: 310611 - DNA, 122 bp, Homo sapiens
tgattctgtcatgaaaatcatgatctctgtgattctgctttgacttttctaatgttcagacgtactaaacaaacccagaatggagaatattgtccacacattattctctacatctttgtata

SEQ ID NO: 310612 - DNA, 122 bp, Homo sapiens
agccgttgctacgagctcactgtagctgagtgttctggatgctggggagtcatgtgcttccggacctcaaggagcatcttttccagcagttaatatctgttctgttcccaaaagcatataaa

SEQ ID NO: 310613 - DNA, 122 bp, Homo sapiens
catctccgctctgcgcccgcagccgccgcctgtgtgtcccggaacgcgatcagaggcgcgcggaccacccccctcgctgggcccgccgccccgccccgttccgccccgccgcccgcccctgg

SEQ ID NO: 310614 - DNA, 122 bp, Homo sapiens
acggaccgccctacgcaggtaagtctccagcgtgccccggggcttgcctcgatccagcaccgattcagcgccaggcccagcccacggtccgtaagtccggaccaggcttcatccttttagcg

SEQ ID NO: 310615 - DNA, 122 bp, Homo sapiens
gagcacagggaggaaagaggagatggagggtgagcagaaaggccagttggggcccctccccgcctcaccttgggctgcggaggccctgaccgccaccactccgccgtctctagggcccagac

SEQ ID NO: 310616 - DNA, 122 bp, Homo sapiens
taaatacaattttggacattgtagtaatttctacactaagaaatagatcatggccaggcacggtggctcactcccgtaatcccagccctttgggaggtcgaagtgggaagatcacttgaggt

SEQ ID NO: 310617 - DNA, 122 bp, Homo sapiens
gattgcacccatcttagatgctaacgaaatggcctttgagtgcagggatagttaatgttacgtatgtgttcagagttacctaaggaagagcaactccctcccctagtctcaaaccagctaca

SEQ ID NO: 310618 - DNA, 122 bp, Homo sapiens
cgccccaagaggctgtgcgtggcgagcaggtcacgtgacgggagcgcgggctttggaaggcggctgaacgtcaggccacccgccgctaagctgagaagggagagcgagcttaggaccgcctg

SEQ ID NO: 310619 - DNA, 122 bp, Homo sapiens
gttgggtgatggcggccggctccccatcagcttctggtgccttcgtgataaatgcccacacgctcccaccccagcccgattcatcaagctccccgtggcacgttgcatggccagagaccttg

SEQ ID NO: 310620 - DNA, 122 bp, Homo sapiens
ggactgagggcagccaaccgcgtagcccatgctgctaccctctcccacctccttgtcactcgggccaagcacagttgcccgcacagtccaggcccacagacagcaggcagtggccggggttg

SEQ ID NO: 310621 - DNA, 122 bp, Homo sapiens
ggtttttttgagacagagttttgctcttgttgcccaggctggagtgcaatggtgcaatctcggctggctgcaacattcgccccccggttcaagtggttctcctgcctcaacttcccgagtag

SEQ ID NO: 310622 - DNA, 122 bp, Homo sapiens
ggctgcaaggtgccctgcaaagcccttcagaaagtcctggtgaaatcccagtgccagagacgactccgagcgagatactgctttggacttccgtgttccaatcctcaaagtagatttcactt

SEQ ID NO: 310623 - DNA, 122 bp, Homo sapiens
tcatctggaaaggcttcagccgcgcaagggtttcacctgccgcggccttcccgctccggccgtgcgcatctacccccgcccccaacacacaccccgggatcccgggagctggagacgggctc

SEQ ID NO: 310624 - DNA, 122 bp, Homo sapiens
tccaatgcatgtcacaaaattcctgggctgagagaggctgtgaggggtcactcagcccaacgccctgcctttcactagaatcatttctaaaataccctatgttaagagtcttcaagacaacc

SEQ ID NO: 310625 - DNA, 122 bp, Homo sapiens
cgccttcccggactcaagtgaggctggcagaaagccctcatgggacgcgtggccgtcccccgtcctcccaggcaggcatcaccacacggcggggagggggcagctccgtgggggctgcagga

SEQ ID NO: 310626 - DNA, 122 bp, Homo sapiens
tggcgcgtgttcagatttaaatggtggcatattgttcgcggacggtctagctcagaaccgcgagctcgcagctcccgcggcgggccccgcctctgcccacaccggcccctgcggcctcccgg

SEQ ID NO: 310627 - DNA, 122 bp, Homo sapiens
gcatgaaggtctggggtctggctgctgcctgcttcttgctccagcaccatggaatgcctgcgcagtttaccctgcctcctgccccgcgcgatgagacttccccggcggacgctgtgtgccct

SEQ ID NO: 310628 - DNA, 122 bp, Homo sapiens
cagcttgacacccatttcctttggctcgcatcgcggtcgcagagcccaatcgcggggaaacgggccccccagaaaaacaggcaacgacccccagctctttgctacagggatcgggagaggac

SEQ ID NO: 310629 - DNA, 122 bp, Homo sapiens
ggcctctgcggggagctgtgtggcggcctgggcggctgctccccttgtaacagactccaccgacaggaggcgctcctcctgtcaagccacagcttaaaaggacaacagcaccaccgcccccg

SEQ ID NO: 310630 - DNA, 122 bp, Homo sapiens
cgttgcccggaaaggccgtagaatttgggggtgcgggaagggaaggacccgggtgggtgccgatttctgtctctggtaaatcaactttaagttgccgacctctctgggcctcggtacctcag

SEQ ID NO: 310631 - DNA, 122 bp, Homo sapiens
tagcgggggcgggggggggagggggcggaggggggagggggcggggcccttcccgcctcccgcctcccgcccctggccgcgacagcacccacaactccgatcactgctccttctttttctgc

SEQ ID NO: 310632 - DNA, 122 bp, Homo sapiens
gcgccactgcgcctgcgccacagcagcccggggagaggtgggctgggctgcaggtcctggcgttgtgctggatcatcgcgcccgtactctgaagttttctccgtggcgctctttgagagggg

SEQ ID NO: 310633 - DNA, 122 bp, Homo sapiens
attctaaaagggaaaaaatgaccaccattacatagactttagaagtgaatgtaggctgggcgcggtggctcacgcctgtaatcccagcactttgggaggccgaggcgggcagatcacaaggt

SEQ ID NO: 310634 - DNA, 122 bp, Homo sapiens
tttcgagctgctcccgggtcccctctccttgcaccgcccccctccccaccctgaaagaggcgcaccctgacggggcagacacagcgctctcgacacggagcacccttctagcttcttcgtct

SEQ ID NO: 310635 - DNA, 122 bp, Homo sapiens
tcaccctttgagagtgtgtgaataaaaagaacaccaagacagatttgtgaggagaaaacacgtactggtcaggttgaacaagaggggctgtcaaatgatactgagaaaaatagtcatgaaga

SEQ ID NO: 310636 - DNA, 122 bp, Homo sapiens
taccccaccaggaacagcaggcgaccctagggtgatgggcaagctattgtcacactgtatcgctaataattggtcacagctggcaccatgcaacggcagtctcccaatagatagaaacgcct

SEQ ID NO: 310637 - DNA, 122 bp, Homo sapiens
tggcagcttggttgccaggcaatgcagaggcccaacacaggggatggttgtgggtactgacgcgccaggtcctggagcatctatcccaagcactgcctttcctgttccctttgtggtgctgg

SEQ ID NO: 310638 - DNA, 122 bp, Homo sapiens
ccccagatctagaaccgctgcagtgccgagcttccagggacgtgaagccggaaagccaggcgcccttcttgactgcgcctaggtggaactggccctccagcagcttgaacgtagcctctttt

SEQ ID NO: 310639 - DNA, 122 bp, Homo sapiens
ccgtgggtggggcctgacgatttggctttcttgggtgtcccacaaaattgctgctgcggccgcttctgctgctgtctgggttgtctgcctttgagaacccctggtatggacagtgtggtgtg

SEQ ID NO: 310640 - DNA, 122 bp, Homo sapiens
ggcagcctctgctacaaaacacccgcgccaaggaggagctcctaatgccttagactaacacggtgatgctgcagtgactagtccatatgcaagaatgcagcactttatgtttgcacccctga

SEQ ID NO: 310641 - DNA, 122 bp, Homo sapiens
attcctcttgcccttcaagtaaaggcccaaaactacagccagctgtctcatgtgataccacggactctgccattgtgtcagcccacctgggcactgctattctgtatctgttacaaggaaca

SEQ ID NO: 310642 - DNA, 122 bp, Homo sapiens
tcttcacttggcgaactcgcaagccatgttaaaggcattttcaagtctccgggcagagttcgtgcttcctccttcgagctcttacccactcgtgttccttgcagtgtattcgcaattccgag

SEQ ID NO: 310643 - DNA, 122 bp, Homo sapiens
ctagaacgtaaaagggggaacagtccctcctctccagcgtcaatttttggcagccgacgtcgtctgccccgctccttgaactctgacatgcagacacctagaaagtcagacactaaggtaac

SEQ ID NO: 310644 - DNA, 122 bp, Homo sapiens
cactgattttggccacggagatgctctctgtgtagtggttccggcctttctcatacaggacgtagagctggggggcctgctcctctccatccatgctgccctccagggttgccagggatgaa

SEQ ID NO: 310645 - DNA, 122 bp, Homo sapiens
cagaccttggtggcgatggaaccaccacagtgatccgaggattgggtctgaaggctcctccgagtctccaataaaaggggttgttttgaagggctcaggttcttcctgggcttttttgggac

SEQ ID NO: 310646 - DNA, 122 bp, Homo sapiens
aatgctgtctgtgttgctgtttcttccagagctgacctgtcctggacgcagcataactaacgaagctgctgcaggatgagaagatggcagcgcggctgcttgcaccaccaggccctgatagt

SEQ ID NO: 310647 - DNA, 122 bp, Homo sapiens
tactttgaatcacagatctctgtacaggccctgttacaaatgccactcctcagggcatttcgtgtgttttcctttgagggctcttgggacttgtaaattcagttcaattcaccttctgagga

SEQ ID NO: 310648 - DNA, 122 bp, Homo sapiens
cggcagcagcagcagaagcagcagcggcaagagcagagacaagcgcggcatggcttgctccgggacagcggcggcgcctctgcttcgcgctccgctccgcgcccgccgagcagtcaccgctc

SEQ ID NO: 310649 - DNA, 122 bp, Homo sapiens
cgagaaggggccgccgcgggtgctggagccgctgaaggacgtggtgctgatcgaaggcagcgcggccaagctcacttgccgcatttcggctttcccggacccattcatccgctggagtaagg

SEQ ID NO: 310650 - DNA, 122 bp, Homo sapiens
cccggccccacatcctctgggtcacgcccccgaggccgcaaggcgtctgagaagcagccccggctctgacccgccagccctcggaagaagcagaccctggccggtccatggcagtggcccga

SEQ ID NO: 310651 - DNA, 122 bp, Homo sapiens
ggggaggtggctaccagtggatatggggtcccctgctccaggtgcttaggccaggcatcccgtccccccattgagagtcctggaattccaaagaagtgaagcatctgagggttggggctggg

SEQ ID NO: 310652 - DNA, 122 bp, Homo sapiens
acgcagaatcaggagatcaaactttagctgaatttgagcgacctcttcccagtgacacggcggggggttttccaagcccttttaaggaaaggaaagggatctggcgaaccccgagacccacc

SEQ ID NO: 310653 - DNA, 122 bp, Homo sapiens
tccattatagtgttcaaggaattaggaattatccatgtcaatagttttgattaatgtggacggagaacatctatattactagatggcaatatgtgaaagaagaaaacagtattgttgaaaac

SEQ ID NO: 310654 - DNA, 122 bp, Homo sapiens
catcctctttctggggagagaagtcattgcttgctctgtactgacgaccagtgctcgggacgtccttcccatccgagacttcaagatagaaaaacatccctatttcaatccctttgtgtttt

SEQ ID NO: 310655 - DNA, 122 bp, Homo sapiens
gaaacctgagcgtttgaaagcgcgccaaggcggccatgggcgtgtttccggggcggagcgcgctgcgggcccgcccgcgggaaggcctgccggcttctgggagcgcgagcccctccgtgccc

SEQ ID NO: 310656 - DNA, 122 bp, Homo sapiens
ccagggcatctatcacaccagacaccgacgtcagctggagcacgtcagagtacccgtgttcgtgatgcagtgtggaaggctctgaggaactcaggtggcccctactgttatgtcacagtgga

SEQ ID NO: 310657 - DNA, 122 bp, Homo sapiens
gggagtccccaccacacgggccggcgcctgcgtcacgtccgagtccacggtggtgcgcgacgtgttctatgatggtaatcccaaatatgaacaatgcacggttgtgttgcgtgtagcttcca

SEQ ID NO: 310658 - DNA, 122 bp, Homo sapiens
ccaggcttctccgtgtgacccccgccgcctgccctcccgccgctgtcttagccgcacccccggacctcccagggcgctcagcagttccgcctctgtttccagcagcttctccacacctccgt

SEQ ID NO: 310659 - DNA, 122 bp, Homo sapiens
cctcgcacctgccacgtgggtccagccacactgtcccggcagacgctctcaccttagcctcgggctggacttactgcttccaaaagcgctgggcacagccttatatgactgaccccgccccc

SEQ ID NO: 310660 - DNA, 122 bp, Homo sapiens
ctcggtgggggcctgggaaggacgggcctggcgcggccgcaggacgcagggcctggagagcggggccccgccgcgctgggaggggccgggtggggaggggcgcgcggctgcagcccgggctg

SEQ ID NO: 310661 - DNA, 122 bp, Homo sapiens
aacttctctagtaacacactatagaaatgatccctgaaagtatagccttaacggcctcctcgcacacctctgctaggtctacatctgccgcaaacttttaactgatggcgagaaactttcgc

SEQ ID NO: 310662 - DNA, 122 bp, Homo sapiens
tagcccaagggagaccaaagactccaccttgagcatcgccctttggaggcgggcagagtccggccgcaggccacaaagcgatccccacccgaaggactccacaaggacagtcctttccttgc

SEQ ID NO: 310663 - DNA, 122 bp, Homo sapiens
tccgagccatgtgcgggatataatctcctggtgcgccgttttttaagcccgttggaaaagcgcagtatttgggtgagagtgacccgaatttccagtgctgtctgtcacccctttctttgact

SEQ ID NO: 310664 - DNA, 122 bp, Homo sapiens
attgtcgctgggacggcagtcaggcatttggtgtggtcgcctaaggggtgggtccttcggcgggagctccgggaaaccccgtgggcctgcgcggcgttcttccttttcgatccgccatctgc

SEQ ID NO: 310665 - DNA, 122 bp, Homo sapiens
ggcaaccttgttcctcggtggcacctgggacctggagatcctttctccacttacgtttagcgcgcatcctgggacttgtccctgcagctcaccgggttagccgtggcaccgttgggacctcc

SEQ ID NO: 310666 - DNA, 122 bp, Homo sapiens
agccaggctggtgggagtgagaggcagtcgataaacacaagtctcacctcaccccagacacgacactcacgccagtcccttgcacacatttaccaagcacgctctctgggccacgctttgtg

SEQ ID NO: 310667 - DNA, 122 bp, Homo sapiens
gagcctgccccgcagccagatacccagaggcgttctcggaagatgggggaggtggaagtccgtttcctgtcagctccggcatgaaccacggggagggcttatggctggatgaaaccagcgca

SEQ ID NO: 310668 - DNA, 122 bp, Homo sapiens
gcccactctccttctccccccattcccgtcacctccgcccgctatttctctcacagactacggacatgcagggccatctacttgtgctcaggaaaaacaaatcactagagtgatatgagaag

SEQ ID NO: 310669 - DNA, 122 bp, Homo sapiens
atccatgaaaataaaacacctcctgttgtggatggtgagcccctgatgccgcttatttgccgtgagtttggacggcacccctgctggcggatagcaagactctgtggagtttgttcagtggt

SEQ ID NO: 310670 - DNA, 122 bp, Homo sapiens
gggcagcatcttgtctgccagccaccttggccagagtgcccaaagcatggctgggcagcccgggccccagcagggaaccctgcctgcgctcctctggttgcacaaactgctggctcaggtgt

SEQ ID NO: 310671 - DNA, 122 bp, Homo sapiens
aacagcgccccttgtggccagcgggcggcggtcgtgggcggggttgcaggcgaggctcaacgaacgctggttcgggacccgcctccggcgctccctgttgccgggccctgagcaagtggctt

SEQ ID NO: 310672 - DNA, 122 bp, Homo sapiens
cgctcccggcctgggctcccgggggctggtcagggaggtggcggcggctgagcggcggagcgggggcggcagggcgcgacgccgccgggccgccccgccctgggaggcgcccgggccctcat

SEQ ID NO: 310673 - DNA, 122 bp, Homo sapiens
tctgctgctacagggttcggcatcgtctggtgatgggtctggcctcgcagaagaggccctcgggcctggagatgtgaacacaggcagcgaccctgttccagagggcttctgcgagtcctcgt

SEQ ID NO: 310674 - DNA, 122 bp, Homo sapiens
tcctttgccccagcgaggtgcgaggtgctccggaacttgcggggcttagctgcccacacacgtgggacagactgttgggtggctggtccctgtaccggctcctgaaaggacatttgggcact

SEQ ID NO: 310675 - DNA, 122 bp, Homo sapiens
ggaccctaccttagactggggctggaaaccctgggtgcctgacctggggcgtccgattcccgcagcaggaagcagaaacttcgctctggattctgccggtgggaagggtggcagccggggga

SEQ ID NO: 310676 - DNA, 122 bp, Homo sapiens
ggcactgccacctgcacaggggccttttgtgagccgggggccacctgtgggggttcacgccgtcctctgtacggccccgggagcaggtgcagcccagtcggcagaggagcaaacaggctcag

SEQ ID NO: 310677 - DNA, 122 bp, Homo sapiens
attgagcccagcactaggtctttgccccagcattgctctgcagtcctgatcgcagtttcccgaaaatggagccagtgggggagtgggtgctgggaccttgctccagacgactccccctttca

SEQ ID NO: 310678 - DNA, 122 bp, Homo sapiens
ggggccaccacgcacacgcatgcatttgatgcagccattggtgtccccgctggtaagcgtcgggtgtaagagtaagtgaactatacaaagtctgtctacattacaaggaggggtcagccagt

SEQ ID NO: 310679 - DNA, 122 bp, Homo sapiens
ccctacacaagtcttgagcctctgtcctggcttgggtggtctcagcccgggctagggtcacggcctcctcctcaacaggcagtgcctgtccaggctcaggggcatcagcaaagagaacacag

SEQ ID NO: 310680 - DNA, 122 bp, Homo sapiens
ggacagctcagagcagggcagaactggggacactctgggccggccttctgcctgcatggacgctctgaagccaccctgtctctggaggaaccacgagcgagggaagaaggacagggactcgt

SEQ ID NO: 310681 - DNA, 122 bp, Homo sapiens
tcctccccctccctgtcacaagccagcgtttacagaccacccaacctcccgacttccgcccgacgttggccagtcagatctgtctccgccccactcctacaagctcgccccgcccctgcacg

SEQ ID NO: 310682 - DNA, 122 bp, Homo sapiens
tgccggaggctgctgcagacaggacccagctgcctcaaatctgccgcctaacataagctgcggttcgaaaatcctgacagcacagggcttcctgggctctgcagagcaaactggaaagagct

SEQ ID NO: 310683 - DNA, 122 bp, Homo sapiens
aaccctttctgccagggccacccctgcaaatcgcgctcgtcactgagggagcctcgggcacgctgtggcatcacgaagaacccttcaaacgacagagggaagaacccttgggaggcacggac

SEQ ID NO: 310684 - DNA, 122 bp, Homo sapiens
cgccgccgcccccgaagccgcaggctgactccagtgcgggctggggtggaggccgactggcgccgacaccgaggcgctcactgacctggagaggtgcttcaagatttgtttcttgatgatcc

SEQ ID NO: 310685 - DNA, 122 bp, Homo sapiens
cctcttccgcctacacccgctgcgtctcctggtgtctcgttcctttccctttaccggagtcgattgcctcactgcatgtgtattcgtgagttcgcggttgaacaactgttcctttactctgc

SEQ ID NO: 310686 - DNA, 122 bp, Homo sapiens
gtgttggcaggtgcgccccctcggcttctctgctgctgattggcgcccaggttggggagtcgccgccccgcgcttatgtcagagtgcgtgcagtcccggcccacctcgcctttgaacttcgc

SEQ ID NO: 310687 - DNA, 122 bp, Homo sapiens
cataagcttccttctgcctgccctgtgttccctgtgcccacccatccttattcaaatttgcgttacaaattgctgcgagtctccgtctgccttccttggagcacctttctcaagggaatata

SEQ ID NO: 310688 - DNA, 122 bp, Homo sapiens
ttcctgcacccaagttctctctgtgtccccctcgcgggccccgcacctcgcgtcccggatcgctctgattccgcgactccttggccgccgctgcgcatggaaagctctgccaagatggagag

SEQ ID NO: 310689 - DNA, 122 bp, Homo sapiens
cccacatctcagacgatgggtggccgggcagagaggctccgcacttcctagatgtgatggcggccgggaagaggcgctcctcacttcctagatgggatggcggctgggcagagacgctcctc

SEQ ID NO: 310690 - DNA, 122 bp, Homo sapiens
cctaagaatctagtattagatcatctgaggcctaagaagcacactgggtgcctatgctctcggtcctggagatacgcaaccaatttgcccgcctacagaggacacatgcaattctcttgcct

SEQ ID NO: 310691 - DNA, 122 bp, Homo sapiens
gtgggcggtgccacggcgcacgcgcattcctcccacagctagtctatccgggtcctgatccgggactctgagatgaagagctgttggagcagaagagtcctgagagaaaaagacggaaaatc

SEQ ID NO: 310692 - DNA, 122 bp, Homo sapiens
acagctcctgggaagttcagtgcctctccctggagacagttgtgggcatctgcatctgcacgggggaaaggtccaaaaaacgatgtggaggagacacgggcaggaaggcaagcggagcaggc

SEQ ID NO: 310693 - DNA, 122 bp, Homo sapiens
acagaaaaggggccatgttataaaaatgagtagcccaagggcacacggacgagttggctccgtccatcagagaaccctggcccctgccacgggtagggcatgggcgggacgggagcctgctc

SEQ ID NO: 310694 - DNA, 122 bp, Homo sapiens
agactactttccagagaccagacaggatctcttcaagagcagagtcaagagcctggagggcgtttcaagagccgtggagtgcagtgaattagagaaccaaatcagaagcagaagtgggccct

SEQ ID NO: 310695 - DNA, 122 bp, Homo sapiens
ctgcaaattagcatccaacacataaacacacacatatgaattgtttttccagcttttgaccgttttattggggatacacactggccaatgtgggaacatactgcttacatcttgatatttag

SEQ ID NO: 310696 - DNA, 122 bp, Homo sapiens
tgctggcagccaggtgagctgcgccagctcagcccgaatgagcggtgtcaggctatgcaccgtgctcccgcccgccctgcgcccagacctccgcctgccctggaggtgaaggacgcgggctc

SEQ ID NO: 310697 - DNA, 122 bp, Homo sapiens
cgccttctccacgccccgcccctccccgccccgcgcctgccgcgcattgcagacgcccagcggcgccaagaacccggccaagctgacttggcgactcctcgcagcccctgctctggcacgcc

SEQ ID NO: 310698 - DNA, 122 bp, Homo sapiens
tgctgggcagggaggaggaagccgcctcggacttctcttattgcagtcacggccggcgggcggtgatggtggcagggagacagtcacgccctagccccaagccagctccccgcagcgaggag

SEQ ID NO: 310699 - DNA, 122 bp, Homo sapiens
gagaagtggccgcggtctccatagagctgggggcgggcggcccggtatggagagcagccccgagagcctgcagccgctagaacacggggtggcggccgggccagcgtcagggacaggttctt

SEQ ID NO: 310700 - DNA, 122 bp, Homo sapiens
agaggtgtggagctgggatgcgcgggaccctatccccggagtccctatcctgccccaatccggaccagaccttcggtctctacacagcgtccgaggccagagggtcccgacccttttcccgg

SEQ ID NO: 310701 - DNA, 122 bp, Homo sapiens
cccttcccattcccccaacgtgtccctcccataactcctcaaagttcaggatacaccaggcgctgtgattcacaataaagtctgcctttattgatgtgtatcatgtttactatcccgggtaa

SEQ ID NO: 310702 - DNA, 122 bp, Homo sapiens
ctgtggagactgggctttgggagggagaaagagggacctagcgcgggccgcgcaggcgcacggtgggcagctgcaatggcgctgtcgtgtacccttaacaggtatctgctcctcatggcgca

SEQ ID NO: 310703 - DNA, 122 bp, Homo sapiens
tgcctgtgcactcatgcattcttgcagaaacccacagtggcagggattcctgtcctgtgccgcacgtgcctgtggaattcttgtctctgggattgtcaggctgtcacatttgataaatccta

SEQ ID NO: 310704 - DNA, 122 bp, Homo sapiens
atgaccagccagaccgttgggacctgaatggttcttctccagagggggtcctcgaagggccgtctgtgctgaccaggtggccgtgctttgtcgtgggaggcctagggtctgcggatgggcga

SEQ ID NO: 310705 - DNA, 122 bp, Homo sapiens
tgggttacaaattacaggtgtcagtgccttctctcaaatccaccaaatgctggaaaatgccgctctcagacagactatttcctaaaaggggactattcaggatagttttccatttaaacata

SEQ ID NO: 310706 - DNA, 122 bp, Homo sapiens
tcgtaatgtaaacacaggttcccacggcggcaatgggagactcccctaaggggctcttgacgtacagggagacttccagatatggtacacagatgtcacattgctagaacgtctctagacgg

SEQ ID NO: 310707 - DNA, 122 bp, Homo sapiens
ggtctccctactatatgcctgccaccttctctatttatgcaggttctgagttcctcgcagcgggggaacatctggctcggttctatctccccaaggcgctgggttcccagaagtttctagaa

SEQ ID NO: 310708 - DNA, 122 bp, Homo sapiens
catggggctggcctaaagtgaagaccccaggctcagcatggaagtgatacagctaggatgcggactcatgcctggccacactgagtcattctgaagcatgatgctgccttcctgatttggaa

SEQ ID NO: 310709 - DNA, 122 bp, Homo sapiens
attcagtttttaattatgtcagaatgttacagtattaacgccttggatgtcaaggagcttcggattttttaattggaccactcttgcccatgttgtctctagattcaggagaaagtgtctat

SEQ ID NO: 310710 - DNA, 122 bp, Homo sapiens
acatgctctccaaagcaggtacacacttggtgtaataagcagacacataggtggccgtatcgagcttacccaaaattcctgtactctttacaatgtagtgctgagcaacaaagaagcctctt

SEQ ID NO: 310711 - DNA, 122 bp, Homo sapiens
gcctcctcccaatcgcctccctctggggagtcccctgttctgagatattaaactcccagacgggaccacgcgggctgtgccgcaccccctgcctgctgccggccttcccggggtgtcgtgtt

SEQ ID NO: 310712 - DNA, 122 bp, Homo sapiens
caggcgcgggaagggaggccgcgcttccccgggcctgcggggtcagaggaggagcttctgcgggagcttaaaggggccccacagccccctgcaccccttccacgagctctggggaaggcgtt

SEQ ID NO: 310713 - DNA, 122 bp, Homo sapiens
ggaaatctcctccccaatatccttcgatgctcctggccctccttgatgacgtaatcatcgcgaggcgaaagatctcgttttccctgacagctgacttcctctggcgcaattcatccagaggc

SEQ ID NO: 310714 - DNA, 122 bp, Homo sapiens
ccaggcagaggctcgctctgcctggccctggcgttggtgtgcatgggtgacaggggcccacgtggcagtgactggacagggctgccccatgcccccatacgcaggtctctggtgaggcccaa

SEQ ID NO: 310715 - DNA, 122 bp, Homo sapiens
tgcatgttcgtagtacccagttgggccgcaggggggcgctggcaaactgctgtttgagaccgagaagcgtggtgggtggagtcacgtcacgcggcctgtgagcgggaggaagggcagctgcg

SEQ ID NO: 310716 - DNA, 122 bp, Homo sapiens
acacaggtgaccccaattcctcatcagcatctccagcccctggtgggcagagggcacaggcgagatcaagcatctcagctcccaacattgcaccatggggactgagacccagagaagtcaag

SEQ ID NO: 310717 - DNA, 122 bp, Homo sapiens
ggggcccctctgcagagggcctgggatgtcctcctaggccacaaagatccagaatagatacgtggctgcaggttgctgaaacccccaacacccccacccagaaccctcaaatatttacccct

SEQ ID NO: 310718 - DNA, 122 bp, Homo sapiens
gacctgacgttgaggatcacatgggactgtcgtcatcatgatctcgtccccaggctgccccggcggaactgtccggtcagcgtgactgtttggctttctgcagccatcagcaccgcacgggc

SEQ ID NO: 310719 - DNA, 122 bp, Homo sapiens
ttctcttccccctggtttccaccttcaccttcacgtgatggtaaccaccatcctgaaatacgtgtagtgcatggacggattctttgcctccatgcttccctatttcaaggagcagcgacgtt

SEQ ID NO: 310720 - DNA, 122 bp, Homo sapiens
ataaaaatagtcatagtctagagctagttcaaattcatgataaacaaagccaacccttaccgtgacaactgactgtggcattggaaatcactttgccaattcgaagcagctacgggaagaga

SEQ ID NO: 310721 - DNA, 122 bp, Homo sapiens
ccaaaaactacaatgtgtatttaacttgaagccaagtaatgacatgcaaggggaaaacttcgtttttctagagaacattcttgctagttctgaatgagctatacttaatcacagtgtgcctg

SEQ ID NO: 310722 - DNA, 122 bp, Homo sapiens
ttgagcagccaggcacatagatctgagagacggttgcgagggcaccctttggcccgggggcgcgcaggagagggcaggggccaggggtttcctgggcgagggcgcggggacgagcaggaaaa

SEQ ID NO: 310723 - DNA, 122 bp, Homo sapiens
gggcggggactgcgcgctcccggcccactcccggccctgcaggcgccgcccgcggggacacgcccacccgccgggaccgttagctggggatccgccccgcccctcccgccaggccccgcccc

SEQ ID NO: 310724 - DNA, 122 bp, Homo sapiens
gcctagagggagggtgcttgtatagtcttaacagaagggcatttgcagtgaaaaacagatcgggctcagtgggatgacaaatgagagagatttgcatctctagtcttgagaataccatcatt

SEQ ID NO: 310725 - DNA, 122 bp, Homo sapiens
ctcccctccctccctcccctcccctcccctcccccccgggccccgcgccccccccgcccccgccccccccatggacatgctggacccgggtctggatcccgctgcctcggccaccgctgctg

SEQ ID NO: 310726 - DNA, 122 bp, Homo sapiens
gagctctgggtggggctggggtgagtgactcccgtacctgctgttcctccccataggcatcggctatgatttccggcgcccactggcccagctgcgtgaggtccacctgcggcgtttcaacc

SEQ ID NO: 310727 - DNA, 122 bp, Homo sapiens
cctaccgggcttgaactcccagatgagctcatacaaagagtgacaggagtgtgcaccccacgagtggagaccggagatcgtagctgagtgtcagccaccctggattcccacatgccgccgag

SEQ ID NO: 310728 - DNA, 122 bp, Homo sapiens
tggccaacatggcaaaaccccgtctctactaaaaacacaacaattagtcgggtgtggtggcgtgtgcctgtaatcccagctacttgagaggctgaggcaggagaatcacttgaacccaggag

SEQ ID NO: 310729 - DNA, 122 bp, Homo sapiens
tgggttccagatggcacatgtcctgatgggacctgagggaggtgcagtgatggtgagttacgctggacactgccctggcaagccaagagccctggtggaggatgtggtcccaaagatgggtc

SEQ ID NO: 310730 - DNA, 122 bp, Homo sapiens
catctttctaaactgttacttaacaaatgcacctcattagatcccacttactgttccaagcgctgtggatatagcagtgaacaaaactaaatccctgatctaacagagcttatattattgtt

SEQ ID NO: 310731 - DNA, 122 bp, Homo sapiens
gaagcagaatgaaacagaagatcgattccctaggtcctaggagatgaaacgccacctttgcgggttcgcgagtccttaggatcaaagctgggctccccagggccggggccgctcgccccaca

SEQ ID NO: 310732 - DNA, 122 bp, Homo sapiens
gataagatcatttcactcctgagagaggatcttccttctcctaaagcctcctaaacctcacggcccacacccagtctctccgacgtgaagggacgctgtcctaggggcgccggggagcccag

SEQ ID NO: 310733 - DNA, 122 bp, Homo sapiens
tacatttctgactgaagaggtttgttttgctagtttggattcgtctgcctttacaaggctcgtccaaatggctttaaagtccgtgtgcttaaaggagactctatttaggatgcagtaaggca

SEQ ID NO: 310734 - DNA, 122 bp, Homo sapiens
tacctgccagcagagcaggatccctccaccatctcaccacacaccttctcaacatgaacacggacatgcacataaatctaggacattctgaaagaaggggaaatactcagccatgagaaatc

SEQ ID NO: 310735 - DNA, 122 bp, Homo sapiens
tttaagagatgtgtccgtaatgtgcttagcacagcctaaaaacctgactcactttccttccgcatggtgcctccttcttcatttcctttctcatgcacattctgttgttattggaattcctc

SEQ ID NO: 310736 - DNA, 122 bp, Homo sapiens
cctgcgagcctcggggtcctgaccgctgctgggcctgcccgtagatttgcctgactctagcgaacctggctccgcccctcccccactatacgttgaggattttaagacggcgatgaaagggc

SEQ ID NO: 310737 - DNA, 122 bp, Homo sapiens
tgacgcccgtccggagcttcgcgggaggcccggagtcccgagagcttccctgggtgacagcggctctccgcccgggcccctgcaactccactcgcccgtagcccgcgcgctgctgtcctggg

SEQ ID NO: 310738 - DNA, 122 bp, Homo sapiens
tgaactccatctactatttatttatttatttatttttaagagggggagatctcactctgccgccagttggagggcatcagtgtgatcacagctcactgcagcttcagatgcctgggcccaag

SEQ ID NO: 310739 - DNA, 122 bp, Homo sapiens
tgctccgcgaacatggtgtggctgtatcatgtaccacacgtgctccgtgaacatgtacaacgatccctaaaaacttcaaaaatatatttgtaaaacaaatgaatagatctttaattcacttc

SEQ ID NO: 310740 - DNA, 122 bp, Homo sapiens
gcatatctgagttaggtatttgtttgctcagaaacttggagcccaggaaagccaattctccgtggatcatgtggccttttaactgtgtacagggtcctaagaagagcagactgtgcgaactg

SEQ ID NO: 310741 - DNA, 122 bp, Homo sapiens
ccagccttccccctgtccatgtacctggctggttggtggcgcttgggacgcggttgtaggcgccgccgtactggtggtaggagctagcgtagctatagtcggcataagctttggctgggtag

SEQ ID NO: 310742 - DNA, 122 bp, Homo sapiens
aaaaaaatcagcattggtcctataaaggccattaggataaattcttaagcctacaaaagacgccttagtactactgctcccaggctcattattgttaactaaaatctgactccaaagcccag

SEQ ID NO: 310743 - DNA, 122 bp, Homo sapiens
ggggcctcagctacggaccggaagcaatgggcaggccgtcggggaacggattggaagaggcgggcgggccctggtctgggcgaaggcgggggcggggcggggcggaaacggaaggggtgggc

SEQ ID NO: 310744 - DNA, 122 bp, Homo sapiens
cagtacttcaggacagttacatgggcacagcctcctccgtcctggcgcagggtcaggctccgcggacgacgcctggagacagctgccaatgccaatagctttagccctttattcccacttag

SEQ ID NO: 310745 - DNA, 122 bp, Homo sapiens
ggacagaagacatccctgaatgccagttgtctgtatgtatagtagcaatgtgggcaaattcggaaatatctttagctaagtgcctccaaaggtataagatgggacacaaacacaaggacagc

SEQ ID NO: 310746 - DNA, 122 bp, Homo sapiens
tgcctggaaaaacaaaagaggcaatagttccagagcattcaggctctgattcctccgttgcgggggtggctgccgactgctttgccctgcgatgtgatgattgccagttattaagcctgtct

SEQ ID NO: 310747 - DNA, 122 bp, Homo sapiens
tccaagatgaatgagtgaatgaatagtgttggagcaatctggctgcaatctcagaaaccccgtggaccacgatgattgatttggctcatcttactatctgggcaggttcccttttcctacat

SEQ ID NO: 310748 - DNA, 122 bp, Homo sapiens
acttcgtgatctgcccacctcggcctcccaaagtgctgggattacaggcttgagccaccgcgcctggctgcaaactattcttaagattgtatccattgatattaataagggctaattgtctg

SEQ ID NO: 310749 - DNA, 122 bp, Homo sapiens
ctccagccatccccctcctttcgccgcccccttgctcgggtaaaagagaccagcgctttccgttgaaggttctggttcacccctcagctgcagagcccttgacatttagcgagtgctcgcgg

SEQ ID NO: 310750 - DNA, 122 bp, Homo sapiens
taattttcattaatgctgttgactttttctctccttagaacaacattcttgttaatcgtgcggctgcaattagttgtcctgtgtttatctttccggctccacagctaattccagcgtagaac

SEQ ID NO: 310751 - DNA, 122 bp, Homo sapiens
tcccccaggcttgtcagcaggatgcccaggcatagctggacactgcccctgctcttgttccgtagccctgagcccgaggcctgtcagcaactggtatctcctgggagggggactctgacagt

SEQ ID NO: 310752 - DNA, 122 bp, Homo sapiens
gtgcaggggcagattttattaaggcccacattttacatatgagcaaacggaggttcaaaacgctggggccatgctctatgtcctatagacagtaagtagcaaaatcaggacttggggcttca

SEQ ID NO: 310753 - DNA, 122 bp, Homo sapiens
gtgtgcgtgtcgggccactcaccacagttcagctcttccggggtgatggttgccactgagcgtccctggatgcgtctgggatattcacagatggccgctgcctgcgcgttccccgactccgc

SEQ ID NO: 310754 - DNA, 122 bp, Homo sapiens
gactcctcccggtggcaattgcctgtatctgaggattttacatctgtctttcgtcactgtcggtactgccacaaaaacactctcataaaaagggaggcagaactgcatcaggctctaaaaca

SEQ ID NO: 310755 - DNA, 122 bp, Homo sapiens
gccaagccggtggaagtgggccaggaaggctctgtcggaaacaagctccaacaagtctttcgagaataagtaccaggaggttagccaaaaagactcccacgagcagctgaacaacacgtctt

SEQ ID NO: 310756 - DNA, 122 bp, Homo sapiens
ggctgtccgcaacctccgccagcgtcggtccctgggcaggtgtgggtgagactgctcgttcgtttctttaaatttcgatgccattggggagggtggaagggaaatgcaaaaaaaaaaaaaga

SEQ ID NO: 310757 - DNA, 122 bp, Homo sapiens
acgcgcggggagagggcgccgagcaggtgttacggcggggaatgtcagaacgccggtcgccgctgtcccgaggggaggctggcgagaggagcatccttcccgagcgccgcggacccagcacc

SEQ ID NO: 310758 - DNA, 122 bp, Homo sapiens
gcggctggagaatcataacttcccaagaaaatatttagcatacatagcatacacagtcgtcgttgggttagcaactggctagattcgtgacatgttgttacaaaaaaatagttgtataagga

SEQ ID NO: 310759 - DNA, 122 bp, Homo sapiens
ctgagggctaaccccttccctgtctagtcttttccacgctgcctgggttttggagctgggcgccagcggagccccacttctgtcccaggcactttgcatctgacggtaccaaaataggaggg

SEQ ID NO: 310760 - DNA, 122 bp, Homo sapiens
cctgcgggactccatggcaactccggacccagggaggtgcttgccccggaggctgagtcgcgccttccatatatgggatccagctgggccctccttagaagtctgagaataacgatattaat

SEQ ID NO: 310761 - DNA, 122 bp, Homo sapiens
gccttcccctcagactgaggcggctgagggcagggtcctcaggctgatggctgtgggagtcgtgccacgcccctcgtgcccccgggaggcccggccggggctgggtggggggatccggtggt

SEQ ID NO: 310762 - DNA, 122 bp, Homo sapiens
ggccctgagccggctgtgcccggccctcctgaacccatgcaggcccttcccgggtggcagcgtcagcttgtttttacccggctcccaggtcccgctgatagcgcccatcaatcttactacct

SEQ ID NO: 310763 - DNA, 122 bp, Homo sapiens
ggggtgaggggcatgggcctcatcatctactctgactggagaatggagccccctccaggacggcctgccttcaagccacgatgcagttcttgtctcgggcctgacgaggcatccctgcgcga

SEQ ID NO: 310764 - DNA, 122 bp, Homo sapiens
ttagtatttcgatccggtcacacaacctaaatccaacatctgcatcaaatgtctcctttccgaaatactctccctaaaatgacagagaacctggccaggcggacagaacggcccctgcgcat

SEQ ID NO: 310765 - DNA, 122 bp, Homo sapiens
aacggccggaccaggcaaaagccggtccctccctgctcctccacgctgtggggcagtaagcgctccggacccgaggcttagggaatcagaggacacgcagtataagggtcgcaggtcgtggt

SEQ ID NO: 310766 - DNA, 122 bp, Homo sapiens
tagttgttgtgtgtttttcccctcaataaatatctgctacctttcaccttcccactagaacgtaaactgtattaatgtagggatcttttctatcttatgcaggcacttcagtacatagcaca

SEQ ID NO: 310767 - DNA, 122 bp, Homo sapiens
gtacgaagtctctgaaatgtaattaaaagtttttattgagcccccgagctttggcttgcgcgtatttttccggtcgcggacatcccaccgcgcagagcctcgcctccccgctgccctcagcc

SEQ ID NO: 310768 - DNA, 122 bp, Homo sapiens
gcccttaggacagccagcaacgctacttcaccaccctgctccagcggactgcggctgccgcgctgcccacaggaactcaagttccgccacagccaggtcagagagacagacaccccagagag

SEQ ID NO: 310769 - DNA, 122 bp, Homo sapiens
gtgttacagctcttgaggtggcgcttctggagtttgttccttctgacgttcagacgtattcggggtttcttccttctggtgggctcgtggtctcgctggctcaggagtaaagctgcagacct

SEQ ID NO: 310770 - DNA, 122 bp, Homo sapiens
gcgcccaagatcgagaagcagatccagtccaagggcccgggcatcacggagcgcgagaagcgcgagatcatcgagaacgcggagaaggagaagagcccggagcagaacctgttcgagaagta

SEQ ID NO: 310771 - DNA, 122 bp, Homo sapiens
aaagtcttggaaatcggtgtattttgcaggtgtagaagtgcctaataaccatggctagtgcgcgctccccaatggcgagggtatgacagggacagctggctcagttttcagtgtgaaaacac

SEQ ID NO: 310772 - DNA, 122 bp, Homo sapiens
cgctccgatgccctcgcccctgaagccgtacccgccagctccaggatgtgtcgcgctccccgcggacatggcgaccgcttctactcaaccacccgccaactatccgactaccacctctcgtc

SEQ ID NO: 310773 - DNA, 122 bp, Homo sapiens
cctcccgggttcaagcagttctatgcctcagcctcccaagtagctgggattacaggcacccgccaccatgccaggctaatgtttgtattattagtagagacggggtttcacaatcttggcca

SEQ ID NO: 310774 - DNA, 122 bp, Homo sapiens
gaacccagctgaggactgcggatggcgggagaagccctggggccgctctcgctgctggtccggggctgctggcagctctgcgcgctggtcccggaaggctttgttccaagacaagcctgcat

SEQ ID NO: 310775 - DNA, 122 bp, Homo sapiens
cgcttccgccttgggctgcaccacggccgccggcgcgagggggagacaggccggagagggcgttctcggaatgaccaggctggcctgaccccgcccctagacccccttccgctcccagcgtg

SEQ ID NO: 310776 - DNA, 122 bp, Homo sapiens
ctaccatatgaaaaaaaagactaaaagctaccttccaccatcctgatgtaaattagacaccgaaagtatacactttacctccactattattgatttattcatttctgacctcgttcccaaga

SEQ ID NO: 310777 - DNA, 122 bp, Homo sapiens
agaaaatcaggagaggttagaggctgctgagggtgaggggtcgtttggcgagactcagcccggagcctggtggccagaggcacctgcccttcaaggcagctgtcctttccagttagggggtt

SEQ ID NO: 310778 - DNA, 122 bp, Homo sapiens
ccagagaggctccccgcctcgggcagggccaccggtcctaccacactcgtccctgcagggcgtgatcctgggctgcctgttcggccccgcggccctctacatctgggccataggtctcctgg

SEQ ID NO: 310779 - DNA, 122 bp, Homo sapiens
aacgagaacctggcaccaccacacgcaagctttccgctcggccgctgccgccaacgccgccgccaccgccgcccctgccaaacggtttcaaatccttgcgggccgctgggtcgccgccgccc

SEQ ID NO: 310780 - DNA, 122 bp, Homo sapiens
aggtgaatctgaggttcctccaggccatggggcaggctgagagctgatactggcccctctcgccccagccagagcagaggggttcagatgcactgggccaggctatgtggaaaacccctcac

SEQ ID NO: 310781 - DNA, 122 bp, Homo sapiens
gctgcaactcaaccacaaccgcttgcacacattggccgagggcaccttcaccccgctcaccgcgctgtcccacctgcagatcaacgagaaccccttcgactgcacctgcggcatcgtgtggc

SEQ ID NO: 310782 - DNA, 122 bp, Homo sapiens
tttggcagcgtctgggggtctggggcagcttcgttcattcacccgggggagttgggtttccgggaagggtcggaagctcctccctcgcttcctggtgggtaatggggtggtgcctttgactc

SEQ ID NO: 310783 - DNA, 122 bp, Homo sapiens
ccactaaagggcaaatgtatagattactggtgtcaatgaccactcaatgagtgctgcaaacgggaacattttgttcaaatacacacacaaagaaaaagccatcttgtccaagtaccaactta

SEQ ID NO: 310784 - DNA, 122 bp, Homo sapiens
gtgtctgcgtgttgctcatagatctgaaacactcgctccacatggctgctgaccatgtctcgcaccttgaggaggatggctctgcaagaaagagtctgacattaggcaatatcatgagacat

SEQ ID NO: 310785 - DNA, 122 bp, Homo sapiens
gctcctgaaataattttgtgtattaaaacctgaatctgcactttctggggccgaaagcctcgcttaattatggcgggtgtccttgggacggacagtgatccttcactcgccagcccgcgctc

SEQ ID NO: 310786 - DNA, 122 bp, Homo sapiens
tagtttagaagggagagcggaacttagaacccgggttcccctcgggtgatcccgccccctcgactccccagccaatcagcaacattagtctggttagacgctctctttgcttttccccacga

SEQ ID NO: 310787 - DNA, 122 bp, Homo sapiens
tttaactgaaaatccctcaaatgtttgaaaattaaacaatagagacgccggccgagacagcgcagacagaccgaccgactggggtgtttcgtgaatgtgagaggtaagcgccgcggcctgca

SEQ ID NO: 310788 - DNA, 122 bp, Homo sapiens
ctcgcgggaagatgcgtcgttgcctcggtaaccgcgtcgcagtcgccgaagatggcggggcgaagtctgtgtctcacggtcagttcaactccaggctcctggggagcgtctgggttccggcg

SEQ ID NO: 310789 - DNA, 122 bp, Homo sapiens
gcagatatacgacatgatcatgcagcacaagcgggccatgcaggacatgcagcaccagcacggctaccacagcgacgaggaggtggacagcgagctgggcacctggaagcaccagctgcggc

SEQ ID NO: 310790 - DNA, 122 bp, Homo sapiens
gcaggacagcatctcggcgccgcgaaagccgagctggagagtggctggtcaaactctaggcgcggatcagcaggcagcagcgatggctccgaacctcgctcctaaagcggcttgtgtgctct

SEQ ID NO: 310791 - DNA, 122 bp, Homo sapiens
gcaaatcaatcttacagtcaatcattctttaggcagcgggaacatcctccactcagggttcgcctttccacctacggcgtccggggacgcaggaagtaaactaagttgtttctatggcaacg

SEQ ID NO: 310792 - DNA, 122 bp, Homo sapiens
ggagaggagagaccgctgcaggatgctgaagaggcggtggccgtggctaggcctgggctgcgcaacagggtacttctcgtccaagggaagacaggtgaggccgtcaaaagaaggaaagcctc

SEQ ID NO: 310793 - DNA, 122 bp, Homo sapiens
gcctgaatttctaaactagttgatagggacacaagttagggcaagatcattcatcccagacgagtctcgctgagaattctgtattttttacttaaagctttaattttaaaataagaaaaact

SEQ ID NO: 310794 - DNA, 122 bp, Homo sapiens
gtgccgcccggatggcatttgtggcactagcagtcgggaaagcagctgattgaggatttccgcgtttctctttttttgcagatcgtgacgccgccagtaggtgtcagtcatttgccgcacag

SEQ ID NO: 310795 - DNA, 122 bp, Homo sapiens
cagagtctaaccaaggtcttcctgacttcagactggctcttctgactccaggtcctctcccgctcagatccctgccaggctccccacctacctttttccatcttgattgaagctcatcatat

SEQ ID NO: 310796 - DNA, 122 bp, Homo sapiens
ggtttgggccgcgagggccgaggagcagcgaggtgcaggggctgcgagggccgagccgggcgctgagggtccggcagggggcgtggagggggcggggcccggagggggcggggccgtaggaa

SEQ ID NO: 310797 - DNA, 122 bp, Homo sapiens
ttaacatcattaactagtcatcatgcaattgccacaactatcctaggaggaagctattaccgttttgatcattttacaaatgatggaacagagtatcagggagattaagtaatttgcacagg

SEQ ID NO: 310798 - DNA, 122 bp, Homo sapiens
gaagcggaaatgcggacgcaaatgtcacgtattattaccgctgccgccacggtttctaatcgcgttaaacatgggtaatgaagccttctctggccagcgcttgacaaagccatcgctgagca

SEQ ID NO: 310799 - DNA, 122 bp, Homo sapiens
cccagcaaggccggcttgacaggaaccagtagccagcagaggcctgagcagaacagggtccggagctggcagtggggctcggggccactggttcccaagcagacttcccccacctcacaggc

SEQ ID NO: 310800 - DNA, 122 bp, Homo sapiens
atcactcattccgtggatgattctacctcctttttgcatttctctgtatgcctgctatctcgcctttgtgagattgataataagcaataactaatgaacggttattgatatagccttcaaaa

SEQ ID NO: 310801 - DNA, 122 bp, Homo sapiens
ttcagcacaaaggtgtccccaccctaccagtaccgttagggtcctgggtcccaagctggccgtgccaagttcctcagctgaagttgtggccaggacccagtcttgtttccccttttcgtcac

SEQ ID NO: 310802 - DNA, 122 bp, Homo sapiens
ttatccttgaagtagggcacgcaactcaccatccactcgtagatctgggacagagtgagccgtctgtccggggagctctcgatggcgcgggtgatcaggtccgcgtaggacaggtttcccca

SEQ ID NO: 310803 - DNA, 122 bp, Homo sapiens
agagaaggccacagaagacaaggccgccaaggggaagtaaggcagggagaaaggaacatccggaacagccaaagaaactcagaagagtcccggagctcaaggatcagagtaacacaattttc

SEQ ID NO: 310804 - DNA, 122 bp, Homo sapiens
cctcgtgggtcccgctgatccggccgtcggggagcacctggaggtgaaagccgatgcccacgttgcagtagagcctccgctgccgcttgatccccaccaaatagccactttcccagttcacc

SEQ ID NO: 310805 - DNA, 122 bp, Homo sapiens
ccagagtcaccagacccacacccccctgggtgctgatggcaaagcgattccgggtgttgccgcctgtgatctggtagctgatggcactgttggcatcacggtctactgcggtcacgctgacc

SEQ ID NO: 310806 - DNA, 122 bp, Homo sapiens
gctttttgcaagcatttacttggaaggagaacttgggatctttctgggaaccccccgccccggctggattggccgagcaagcctggaaaatggtaaatgatcatttggatcaattacaggct

SEQ ID NO: 310807 - DNA, 122 bp, Homo sapiens
gcgtttcgtttgagcgatgtttactaacggcgcaagggcggggagcgaagcgcagcggggcgcaggggccggaacgggaccgagcgtgggttgcatgggcctcgatgggacgggccggggcg

SEQ ID NO: 310808 - DNA, 122 bp, Homo sapiens
atcacaacttgaataacaaaagacaatcaactgacaccgaaactgagataattcagaaatcgtaattatctgagatggattttaaagccaccatcatttttttttaaatgcttcaacaagcg

SEQ ID NO: 310809 - DNA, 122 bp, Homo sapiens
aacttcctcaaacccatgttctctccagccttcattcattgccctagtttaagccttcctcgtattttgcctgaaatattattgcaagtctccaaatagtcttgaccctaccagttcattct

SEQ ID NO: 310810 - DNA, 122 bp, Homo sapiens
ctggagaagtggggaaggggtgtcccatggcttcatggctcagggttcctgagccccgtgcgtgatggggagagtttggggctgagggtgctgcttccggatagagcctcctgcgcaaggaa

SEQ ID NO: 310811 - DNA, 122 bp, Homo sapiens
acgaaaccccacacgaacgaaaaggaacatgtctgcgctctctgcgcagcgcttgggcggcgcggtcccggcgcgcggggaagcggcgtctccgctaaccgaggcgctggaaggggaaaagc

SEQ ID NO: 310812 - DNA, 122 bp, Homo sapiens
tccacccagaaccctccccaagacaagctccccatggggtgtccatgctatggctttcaccgaccagacgatgctgccaggaagctgggaggaaggggcaggcagggtgagggaccttggat

SEQ ID NO: 310813 - DNA, 122 bp, Homo sapiens
tcattcaccaagtcccctccagccccagccctgtgagccagtcctgcgggtcctgcctttcgctaagagattcccgattccgctccctccggacgcagggaggttgagcaggggacacgcag

SEQ ID NO: 310814 - DNA, 122 bp, Homo sapiens
tgacctcgtgatctgcccagctgggcctcccagagtgctgagattacaggtgtgagccaccgcctctggcctctataatttttagtgtatcagtttggtttccaccaagaaaagtgacagct

SEQ ID NO: 310815 - DNA, 122 bp, Homo sapiens
ccgcggcggtgcttatatagagcggccggcgcgggcggggcgggggcatgctggcgaggccgaggggcgcgagtggcagcgcgcgggggccggagcagcgcccggccccgggcgcccggggg

SEQ ID NO: 310816 - DNA, 122 bp, Homo sapiens
gacaaggtgttaggaaagaaatcaatatttgctcaggatcaagacttctcaagatgactgcgtgaggtagaaggaagagggagaagaagaacttgcccagagttcactgttcatctactatg

SEQ ID NO: 310817 - DNA, 122 bp, Homo sapiens
ctgagaaccactgctttccctgcattgctgggtagtgagtgattaaagtgccattgcaggcgtgggtgccgagatagcagggcaccggacatgtctaagccagccatcaggaatgcacttcc

SEQ ID NO: 310818 - DNA, 122 bp, Homo sapiens
ttgagcccaggaggcgcaggttacagcgatccgagatcgcaccactgcactccagcttcgcgagactctgtctcaacaagtgaaagaaggaaagaaagaagaaaaaaaaataggtgaaactt

SEQ ID NO: 310819 - DNA, 122 bp, Homo sapiens
gccggatcgtgtctgcgcaggcccagcagctaagatcgggtccggcgctccagaacagaacgatccctgaggctcccttgctcgaactgtgggacttaccctactatggtccgagcctaccc

SEQ ID NO: 310820 - DNA, 122 bp, Homo sapiens
agcacccttggtggagggcagtccaggaaactcatcaggggcctgggcctcaggccttcccgaccccagaccttcataagtcaagccatcctgcagactgccttgctcaaactccagatata

SEQ ID NO: 310821 - DNA, 122 bp, Homo sapiens
caacaccttcatcccctcaacccccgtttctgaccttgcagattccctccagagcaagctcgtctaactcgtggcccgcaggccacacggagcccaggaggacttgaatgcggcccaacaca

SEQ ID NO: 310822 - DNA, 122 bp, Homo sapiens
ctgaagaccagtgaagactcgcctgtgtggcaaggctgcctctaacccgcacatctgcaccgacacggctgcacgaacagcaaaaccgcagcatcccccgtcccggcggcccggttcacgga

SEQ ID NO: 310823 - DNA, 122 bp, Homo sapiens
ctatggtaaggagtgcttggttcatctattttcattaaaccatagtctttgtctgctggacgatatgtcgccaggatgttcatttcatcccacttctgggattttttgctcagctgctcgtg

SEQ ID NO: 310824 - DNA, 122 bp, Homo sapiens
gcacttgttttgacaactgtgcggcactgtgccacgggaccctggtctttgaaaccttggcgtgcgcgagaatttcccagtgagtttgttaaaatgcagattcctcgggtctgcgtagacag

SEQ ID NO: 310825 - DNA, 122 bp, Homo sapiens
acctccgtgttgactctgctctccgaaggcgaagagggtcctccaaacccgtttggcgtgcggacaaaaaccccagcatatcgtgtcctcacaccggctggagcactggacgtcgccatgac

SEQ ID NO: 310826 - DNA, 122 bp, Homo sapiens
cgcccctgcttccccatggagcatctgcataagtacttctgggcttcactgagtttggggcgggaaaaggtcaattttcatcaggtatggcccaccaaagggcactgagttcatcaaaaggc

SEQ ID NO: 310827 - DNA, 122 bp, Homo sapiens
gggaagttagagcttggaggaggtcaaatcacttaacgtcttggagttgaaatttaaagccggccgtggatctaaaagtacttagagttatcagcactaagttcaggcgtggggctcttgtt

SEQ ID NO: 310828 - DNA, 122 bp, Homo sapiens
gggtaaagccagcgttgggaaagcctgtgcattaggcagcgctgttctgcctgcagggaacgattgcacaactgataacttgggcctaggctcagctggatttgaggatttgagacttagac

SEQ ID NO: 310829 - DNA, 122 bp, Homo sapiens
aagcacgtgaaaggctcacggtaagtcctgtcaccgccttcacactccccccgagagcctcggagtcaatgggcaaagctactggaaggaaaataaccaagaggagttggagttttagagtg

SEQ ID NO: 310830 - DNA, 122 bp, Homo sapiens
gcacgggcatcctgggtgtgtgtgtatctgtgtgtgtgatgatgtttgaaggcattagctcggtggcatcctggcatggaaggtctgtgcctccattcttgttgctttggtgtaggaaatgc

SEQ ID NO: 310831 - DNA, 122 bp, Homo sapiens
ctgaacttgcctggagctccagagagtagcgtgagtgacttttgaccctaacctttgacccgcattgagtccaaacctccttcaccctcctcacagtaggatctagcttaaccttgttcatc

SEQ ID NO: 310832 - DNA, 122 bp, Homo sapiens
gaggagggcgggactgagcaggcggagacggacaaagtccggggactataaaggccggtccggcagcatctggtcagtcccagctcagagccgcaacctgcacagccatgcccgggcaagaa

SEQ ID NO: 310833 - DNA, 122 bp, Homo sapiens
ttttggagtctgcagctccggatgcgacttactagtgctgtcttttgtggtctgcgcctccgaacccgacttgctagtgctgcctttttgggtctttgcctccgcacccgacttgttggagc

SEQ ID NO: 310834 - DNA, 122 bp, Homo sapiens
tttaaattgagtcattattagcattaaaactttaaagttgtgcaaaacataaacagtgggcgttttgaagattctttttggaacagaccgctttgctattcaatgatctgactggagattgt

SEQ ID NO: 310835 - DNA, 122 bp, Homo sapiens
gccggttacctggctgcgcgctcccgctctgcctcgcgattctccggaatcgtacctcttcgtgggctcgcgccagcgctgtgagcgcacaattagtttaaactatggccccgccccctcgc

SEQ ID NO: 310836 - DNA, 122 bp, Homo sapiens
aggcccgagccccacgcacctccacccacccggggcggcgcacagccagctcctgccgggcgtgagcactcgatcaagggagcaagtggaatgaaaatccagctgggggggtccccatcgac

SEQ ID NO: 310837 - DNA, 122 bp, Homo sapiens
gccgcgtcccctttaaatgcccgggagccggagccggagccggagccgcggccggcgctgcggctgctgcagcagcggagcccaccgcagtccccaacgtcacaagcgactgtccaatcgca

SEQ ID NO: 310838 - DNA, 122 bp, Homo sapiens
gcgtcctgtgcgccgcctagacttcaaaaacgttgaccgctagatgacgaccgatgacaacgcatggaagtgtcagcccggcaccctcccaggagctcccaacaactaatcgaccagagccc

SEQ ID NO: 310839 - DNA, 122 bp, Homo sapiens
tgcgcctcctcccgaggcatgctgggagcctggaggactagcgaggaggagttgagagaacggagcggacgccatggcgaccaacatcgagcagatttttaggtctttcgtggtcagtaaat

SEQ ID NO: 310840 - DNA, 122 bp, Homo sapiens
gttccttcctaaagaagtacacactagggctaagttcatttactgagcccttgaactactcgtaatgacctttgagagatcactcaaggtcaaggccaagccctctttaacatggcttcatg

SEQ ID NO: 310841 - DNA, 122 bp, Homo sapiens
gatgccatctgtgtcaagctgtccctggaaagaaggaacactgagtcctgagggcaaaggcgagaataaacaccgcgcaccctcagccggggccccgtgttcctccgtgatgttccactttt

SEQ ID NO: 310842 - DNA, 122 bp, Homo sapiens
aaaagctacgcattgggaggtcttgacccagtgtgcgcccggctgtaggcatggaacgtgcgccaaaggtctcctggcacccactccgctggactcagcaccattgtcctaagtctccgatt

SEQ ID NO: 310843 - DNA, 122 bp, Homo sapiens
ggtacacgcccccgtcgcggatctgggggcctgtgacgttcatgtggctgatggtggtgccgtccgacatggtgtactggttggtgcggtggctgccatcccgcacgatgggctcatcgtcg

SEQ ID NO: 310844 - DNA, 122 bp, Homo sapiens
gagaaccctatattgtgttgaagagaggtgatgacttaaaattaccatgctcaatgattacgctgaggcccaacctaggtgagaaatttggaggaggatgctgggatcccgagatttccggc

SEQ ID NO: 310845 - DNA, 122 bp, Homo sapiens
cccctggggtagactcaggctctcacacacccaggagagtcatttctaggcacatcttctcgggtgactcatgagcaccaaggcaggcctgtgtgtccaagcgcctgcacaggcagaagcga

SEQ ID NO: 310846 - DNA, 122 bp, Homo sapiens
acacggccacccggaagggctcacaccaccttctgactcccgagggaagctaccgagaaccgcctggacccacgtcccctattcctgccagccacagggcacaattagggcggcggagatac

SEQ ID NO: 310847 - DNA, 122 bp, Homo sapiens
gtgttccagcggtggtgagcatcttccaacgccatcagcggcctcgtccaacgccatcagcggcctcatccaactccatcagtcgcctcacccaacgccatcagcggccccgtccaactcca

SEQ ID NO: 310848 - DNA, 122 bp, Homo sapiens
ggatggagcaggggacggccggcgaaggcgcggggtggaaggggagcggcgacgaaggcgcgaggagctgactgggaatccccaagctacccgaggcaagacactgaacttgagtcgcactt

SEQ ID NO: 310849 - DNA, 122 bp, Homo sapiens
cagtgtggatgttaatcaaaggagtcactcaaaattcttgcaaaaagtatcataaagccacgtgtgtgtctgccctttgatcttggaaactttcattctgaaacttgagtcaaaacacagtc

SEQ ID NO: 310850 - DNA, 122 bp, Homo sapiens
gtctcggggatgacctcctacttccgagagctcacaaaatcctcctatgaatggaaaagtcgaagaaggggtgtgttctgattctaccccgttttcgttttgttttaaggtcctccctcgtt

SEQ ID NO: 310851 - DNA, 122 bp, Homo sapiens
gggtggaggtgaaaagacgttggtcaaagattacgaaatttcagttagactggaggaatacgttcaagagatctcgtgtacaacatggtgactacagttaatgaaaatgtatttttgaaaaa

SEQ ID NO: 310852 - DNA, 122 bp, Homo sapiens
gtagctgtccaaggtcagcactggccatggaggagcccggccacccgccaagctgcacggcgcctccgcctcgggtgccacacagccccccacggagagactcctcatccgccatcctccct

SEQ ID NO: 310853 - DNA, 122 bp, Homo sapiens
ggaggcaagagttcattttggaggtgaggaataaggaggagggcagcccaaggaaagttgcgctttgaaggagcaaaaaggaaccaggaggcagaaggacacaggaagcctagtgctgttgt

SEQ ID NO: 310854 - DNA, 122 bp, Homo sapiens
tgcatccgctgaaactcctcctcagacagagcttgcgccatgttcctccccccacccccccgccagctttctgcgcagacgcagctcgcgcctcctggcagtattaaggtcggaccaaacca

SEQ ID NO: 310855 - DNA, 122 bp, Homo sapiens
cccagtatgtgtgagtgtgtgtgtgtgcatatgtgtgcatgcatgtgtgtgtgtctcgtgcgctctgtctcagccaatgcactgagaagaagaaaagagggagggagggagggagaagtatg

SEQ ID NO: 310856 - DNA, 122 bp, Homo sapiens
cacagaacctgctgccacccaatttgactcatctctccctgtgcctccagcttggactggcgactagtgaaaagacagccccgcctgcacagagcaggtgtcctggaagccaaggctttagg

SEQ ID NO: 310857 - DNA, 122 bp, Homo sapiens
agactttcgtatactgcatgctcgatggtaatctcaccttatcagtgagtggaggccacacgtttaccatgaatagaaaaagtgagtgttcctaaactaaggctatatgttggaatactgta

SEQ ID NO: 310858 - DNA, 122 bp, Homo sapiens
gccctgccccgctgcgccggaggtggacctctaccagggcagtttctctctgaggctgcgcgctaaggcggtgggcggtcccaggcaggcccagaagctgggcagcctctgccgggttccgg

SEQ ID NO: 310859 - DNA, 122 bp, Homo sapiens
gggaaagcctgagtcctggagctgcataggatcgcttgccagtcattagtctctagggaacggggctttgcccagctccccgaacccgacccaaaaggcaggaccaacttagaaaaaccaga

SEQ ID NO: 310860 - DNA, 122 bp, Homo sapiens
ttagttgcttatacagcataaatatattaccttatagttctgcaggtcagaagttcaatgcgggtctcactggtctaaaatcaggtgttggcagagtttggggagaatctctgcctttttca

SEQ ID NO: 310861 - DNA, 122 bp, Homo sapiens
aggtccacagcttcactcctgagccagcgagaccacaaacccaccagaaggaagaaactccgtacacatctgaacatcagaaggaacaaactccggacacgctgcctttgagaactgtaaca

SEQ ID NO: 310862 - DNA, 122 bp, Homo sapiens
taccggcgaagcggatcttcacgaggtcgagcggatgcagcgcaaggttggataagacgccgccgctcacgcccgctatcaggttctcataccggacgtggcggaataccgtgctccacgcc

SEQ ID NO: 310863 - DNA, 122 bp, Homo sapiens
tacaataatagaaaatttcccaagcctgaagacacagtctacataaatcaaatacaatttcgttttcacttgcttctcaacctagtctaataaactaaggtgatgagatatacatcttcttc

SEQ ID NO: 310864 - DNA, 122 bp, Homo sapiens
tctgtgcgtaagtgtgcgtgtgagtgtgtgggggcggtggtaatgggaggatgaacagggcgggacaaggggagctggtgctgccgccctcacctgaccttctcactgtccgtcatctgcca

SEQ ID NO: 310865 - DNA, 122 bp, Homo sapiens
agggatttgggcttggatattttgcggggtcattattcagcctaccacagagggtgaatccggttcctatttctccctcacagctggaagtggaagttctttttttgaatgtgcctgttttt

SEQ ID NO: 310866 - DNA, 122 bp, Homo sapiens
cggccacagcagacgcggctctcccgtcctaggacagacagacacgtctcgcgtgcgcctcgcactcatgcaggacaagggctcgcggggtcctcgggcatcctacccaccctgtggctgca

SEQ ID NO: 310867 - DNA, 122 bp, Homo sapiens
tatccttctgccggcttctgcttgagatctcttggcctttacccttgtcccttgacttttcgtgtttgttttaatctttaagacttgaaatggagtggcctttagaaccggggagatactgt

SEQ ID NO: 310868 - DNA, 122 bp, Homo sapiens
atggaagttccaagggttggtgaagatggttgagttgctgttatgtcctttctcaggagacgattgcctcgagctggagagttccatggctgagagtaggctccgggccccggacctaggtg

SEQ ID NO: 310869 - DNA, 122 bp, Homo sapiens
aggggagaaggtactggatctcctgcaatgatgacacatcatcaggtggttctacgaggacgtctccagatcacagcagcgcctcctaggcagagacacaaagtctgcaggctcctctctcc

SEQ ID NO: 310870 - DNA, 122 bp, Homo sapiens
gtagcagcttctaaccagtccccacataaagcctccaataccatacacatagcgtgtgtgcgtgcacacattcgcacacagcatgtgtagtggtctatggagcatgacagtttttctaggta

SEQ ID NO: 310871 - DNA, 122 bp, Homo sapiens
agtgaccctacttagcctccccggagctccagtctaacgcggaaaggctgagcagagaaccgcatggggtgggtggggtcacgcggtcaaggggctgacaatcaaggaaaacctttggtagg

SEQ ID NO: 310872 - DNA, 122 bp, Homo sapiens
ttgcccggaagggaggcaagcccccttagagttgccagtaacggacatggctgcggcccccggaggaggggacgtgaagtgaggagggggttgggaggggagaggacgcgggcgaggaagac

SEQ ID NO: 310873 - DNA, 122 bp, Homo sapiens
ccatcacacagcaatctaacaaggtaggtactattatctttataggcagcccctgacttacgatggttcagcttaacgatttctggacttcacaatggtgcaaaagctatacacattcaata

SEQ ID NO: 310874 - DNA, 122 bp, Homo sapiens
atcacgagtcactggcgacggtgggtcaggactacacttcccaggaggctgtgcgcgccgcgtggcgcctgggagttgtggtccagagcgcgggcgcggcgggcgcggcaggcgggcgcgtg

SEQ ID NO: 310875 - DNA, 122 bp, Homo sapiens
tgtgaacatccagaggttccagccagagtacgtccggccggaggcggggcgcggaggggacgtcggcgtggggcggggccagtagcagttcccacgccggcgctccaggcgcggcaggctgc

SEQ ID NO: 310876 - DNA, 122 bp, Homo sapiens
cacctacctcatcatctctgtgtacactaagctctcccaagagcactctgtgtgacttaccgtgatgacaggtttttgtgtctgttttaatcgtatttaccatacgcaggtgccaattgttc

SEQ ID NO: 310877 - DNA, 122 bp, Homo sapiens
cctgcgaggcctccgtctggggtaactggatgtgacgccccggatttcctcttctgagtccgaggactgtgacgaccttatctgaggaaggtgcaccctagtcatcagaggaacgagtcgct

SEQ ID NO: 310878 - DNA, 122 bp, Homo sapiens
tacctgtttcagagctgaaggggacctgagcccatgataatccattacctcgtgagaaagcggaaaaactgacttcagcttgcccagatggcgcagagaatgggtttcccgtaaccccgcct

SEQ ID NO: 310879 - DNA, 122 bp, Homo sapiens
ggactagagggtttaatgccaggctgaggattttggaagtttctagtctacagtaggcaccgtaggtttagagaaaggaagactcatgatgtgggcacagggccaccaatctggaggtgggt

SEQ ID NO: 310880 - DNA, 122 bp, Homo sapiens
gtcattgcattgatccagattcgacctgggattgtcgcataaaacagggctgataaaaaccgtcgtgttttcaccctggaaacagagactcagcctccccctctttgcttgaggcattcagc

SEQ ID NO: 310881 - DNA, 122 bp, Homo sapiens
ttctgggactcagcgctgacttcaccgacactccgcggacaaccaatgggctgcggtgcccgccccctcattagcatgcctctggaaccgtccactctggcagcgcccggccagcgggcggt

SEQ ID NO: 310882 - DNA, 122 bp, Homo sapiens
gattagctacgggcagacggacaaacctgaggtcatgagcaatcttctcctccatgaccccgaagccactgacatagcccatcaagcccaggtcgtagaaggtatcgttgtcagggaggcag

SEQ ID NO: 310883 - DNA, 122 bp, Homo sapiens
acaccctgaagcattaacgcttgagcatctgtaccaagttttatatccttggtataagcccgaaggaggtgaggagccagttacctgggcatcagttccatctggcaaaggactgtgggtaa

SEQ ID NO: 310884 - DNA, 122 bp, Homo sapiens
tgcgcttcgttcccggagtggctggcggcggagttttcgctggctactacgaggccggagcgcccttggcctctctgcgtccctggccctcgtgcggtaccggcggcgtcttgtcatacact

SEQ ID NO: 310885 - DNA, 122 bp, Homo sapiens
acgtctctgagccaggaggtcagaactgtgggattgatgacctcccacaactggagcagccgggaacagctctgaccacagtaagtcatcccaaaacctcacattcagatgaaaccatttaa

SEQ ID NO: 310886 - DNA, 122 bp, Homo sapiens
aggaggatctgtccagctgccacctgaagctcagcttccatgatttgtgtggctacttcccggagcttgcttgggaatcttaactctcacccttaaagggataatgtgctatttctggggcc

SEQ ID NO: 310887 - DNA, 122 bp, Homo sapiens
caagctcataaaatccttaaactcccagcataccttcctgcaaaccttcccagatggacacgaggctgctgggctgggagcctggggtacagggccctgggggcatgattagggagcttgtg

SEQ ID NO: 310888 - DNA, 122 bp, Homo sapiens
ctctctctccctcagacacagacatacacgccctcattgagtgtgcgcaggcgcagcttccgctctgccctctgggaattagagtcttccagcctctgtgctggccatcaagccctaggatc

SEQ ID NO: 310889 - DNA, 122 bp, Homo sapiens
taagagtccatgggcgccgccatgttgctgtacggaaaaacgtttccagggcgagttgagcgttcagggcactcctcggcgctcaagctgcccacaggtcttccgacctaactttaggggtc

SEQ ID NO: 310890 - DNA, 122 bp, Homo sapiens
ggtcgcgtgtgtaactcaggacgcggctgcgctgggcgcccgagcgcgttctcaggactgcggcccggagttcactgcgaggactgggatcacccatcaccccgccctggtctacggaaaat

SEQ ID NO: 310891 - DNA, 122 bp, Homo sapiens
ctcgggcggctccaggcacttcttcccttgagtgggtggactactgaggtcccctgggcacggcgtcatggtgcggaacgtggatgacctggatttccacctgccctcgcatgcccaggaca

SEQ ID NO: 310892 - DNA, 122 bp, Homo sapiens
gcaggcctgaccccactgctctacaggaggaaaaggcgctctgcgctttgtggccggatccggggttcagcaagtctcatcctggagctacctccatcagagtcaagctgtgcagaggcccg

SEQ ID NO: 310893 - DNA, 122 bp, Homo sapiens
ctgcctttgtggctctctggtcccctctttcctctgactttctggcctcgcctccgctggcgactcgccctcccagccccgcgtgccagggctcaggtgccaccccatgcccagtcgaggaa

SEQ ID NO: 310894 - DNA, 122 bp, Homo sapiens
ggggtgaggcaggggttagagctagagtgagaagcttggagaagatggagtctatttagacgagagtgtggaccagggagagactgctggaacaccaaccaccaactgcttcctctctcttt

SEQ ID NO: 310895 - DNA, 122 bp, Homo sapiens
ctaaccttacgtatctgtgaatttcaaggatgttacatttttacataaacaactccagtgcggattctctggaatggggggagtaatacccccattctagaatattaaaacattttcccccc

SEQ ID NO: 310896 - DNA, 122 bp, Homo sapiens
ttcccgcctggggagggaaaagctcgtaggacccggcgctggggagctcgtggaccccttcgagtctggagctgggccacgggctcctgcccttgattgcatgacacccttctagcacattc

SEQ ID NO: 310897 - DNA, 122 bp, Homo sapiens
ccgggccgctgcgcgcaccccctggcccccgccccctcgcctgcccctgccccggctgcgcggccgactcctaatcaattagcccattaacgagcccctcgaggagttaagtagggaagagt

SEQ ID NO: 310898 - DNA, 122 bp, Homo sapiens
ggtcagtcggggcctgcagaccgtgactccgtcacgaaccccaaattcgcttctccccaacgctcgggcctgactgctcaggaggggcttatgtaaccttaacctggtccctccgcacagga

SEQ ID NO: 310899 - DNA, 122 bp, Homo sapiens
cccagagaccggtcaggtgacaggctgcacctcacccagcggagttacctcccagtgcaacgctctgtttcctgaggtgaaacacaaagcctgctccagtaaaggagagttgtttttaacag

SEQ ID NO: 310900 - DNA, 122 bp, Homo sapiens
gggtggcttgctgcttcgttctggtagacttgcgattttgccttgtcctccctctgggttcgccggatcctgtgttttccctgtcccagaatgacccattcgggcttcggtgtttggcttca

SEQ ID NO: 310901 - DNA, 122 bp, Homo sapiens
ccagcgtgccgagcgcctctgcgcaggcgcaaagagtttccctcgttgccatgggaacctcgccccttctagagtcctggccgcttgactcagctaagcgcgaaggtgttgtttcttcctga

SEQ ID NO: 310902 - DNA, 122 bp, Homo sapiens
aagcgggccgagacttgggttccccaggtccttggtggggaggtttccaggaggctcgggcgcgcccccgtccacggccccggaagctgacgtcgccgaagcgtacgccgctgcccagcctg

SEQ ID NO: 310903 - DNA, 122 bp, Homo sapiens
aataatgttcagttggataatcgaagagtttaatttccccatcaggaacccaagtgaaaccgagggtttagataaggaaatgttaaagcttgtctttattccgtcatgttttgtaggatcgc

SEQ ID NO: 310904 - DNA, 122 bp, Homo sapiens
gtttgctgctgatgtacggcttatgttctccaactgctataagtacaatcccccagatcacgatgttgtggcaatggcacgaaagctacaggtgagtggaaaggttggagtttgaaaaataa

SEQ ID NO: 310905 - DNA, 122 bp, Homo sapiens
tcgccagcaaagggcggacaatgacccctcccgtcccgcccgggaaggcgatcgaggaaacgcactggccaggcccatttactgatgctcagcagggtttgcaaaaagcccccaacgggagg

SEQ ID NO: 310906 - DNA, 122 bp, Homo sapiens
cgccaggggcagggagatgcggctgggggcgggcgaggccctgcagcctgggcatggggccggcccagggacagggccccctccccgcagggctggatttgctgcgtcgccaaatgccgggg

SEQ ID NO: 310907 - DNA, 122 bp, Homo sapiens
accagagggctccttggtctagcagtaacaccagcgcctgggaagacacctgttacctagcggaccttggtctagtcgtagcgtcagtgcctaggaaaagcacccgctacttagcagactgg

SEQ ID NO: 310908 - DNA, 122 bp, Homo sapiens
gcgcataaacactcacccactgacacacacaacagcaccccccgccccgaagcacaccaacgctgagactgacactgttgcaaaacacagagtgccccagcaccccaaacaaccccgcacac

SEQ ID NO: 310909 - DNA, 122 bp, Homo sapiens
ctgggcaaggcgtccgagaaagcgcctggcgggaggaggtgcgcggctttctgctccaggcggcccgggtgcccgctttatgcggggcgagcgtccggccgacccccgccggggcggagcct

SEQ ID NO: 310910 - DNA, 122 bp, Homo sapiens
aaagcaagcaagtatattgaaaaatgtgttcttttcataagggtaaagttaaatcatacacggaagtctgaaggaagggaagctcagataaggaaaagtggtaaactttataaagtaagcaa

SEQ ID NO: 310911 - DNA, 122 bp, Homo sapiens
gctcacggattaagccgtagcagcgtgacagtgactggaacctgggtattgctacccatgcgcgtggggctgcaagctaccaccttaaccgcaaaggccaagaaacgtggagcggagaaaag

SEQ ID NO: 310912 - DNA, 122 bp, Homo sapiens
ccggccgtgccggggcgctccctcggggatctggggccgccgtcgccgcccccctcctcccgcccgtgccaagccccgctcccggggctctctcctggagaaccccggcttgggtttcagga

SEQ ID NO: 310913 - DNA, 122 bp, Homo sapiens
gtcctgcaccacctcctcacaccccatgcagctagtttttcttcagtcagaataaaatcacgtttgtgcatcctcaacagtggtcaatgagagtgggtttttcctccagtactttcacgtca

SEQ ID NO: 310914 - DNA, 122 bp, Homo sapiens
aagagcagtcgcgacggggctagggacgacacactgcattcactggaagggacaacgcagcgccagtacatagcctgaaacgctccccagaaggtcccacgctcgccgcgcggtcgacaacc

SEQ ID NO: 310915 - DNA, 122 bp, Homo sapiens
gaaatttagcatataggatagaaagcagagaccaaagacctcttgctttgaggctgttggcgtgctacaaggactcgaaagttatttgttcaacggatgacttctgttttctggaggcaaac

SEQ ID NO: 310916 - DNA, 122 bp, Homo sapiens
agaagccgaagggttcccgtgggggctcttctgccaaatgagtcaagagatgtgcggaagcggatgattgaagtaccccgtggagtagcagaaaggggcatcaaaaactgtaacctgaaaat

SEQ ID NO: 310917 - DNA, 122 bp, Homo sapiens
ccagaatgcccaggatcgcgttggtcactgttatttgcctactgctggaagaaggacaaccgctggcaaggtagcgttccccaatctgaatacctgcaggctcccacatgagggagagggca

SEQ ID NO: 310918 - DNA, 122 bp, Homo sapiens
cgctccaggctcacctagctggcgggagccgggcactgggaagttgggctgccccctccccgcgcccccggcccggcagctcggcccgccggcgagcgcaggcggggcgctccctggctgcg

SEQ ID NO: 310919 - DNA, 122 bp, Homo sapiens
tcttcaatcatgatgaatttggagtaattctctaaaactaaagtatgaaaacaaagactacgggctaaaaaagaagttgcacaatgcagacaatatttgataactaagggctcatttacttc

SEQ ID NO: 310920 - DNA, 122 bp, Homo sapiens
aaagaaagttttcattctggtaaaaagtcaagttttgttgccaacttttccccctctgaacgtgcaaaagaatgattttccgaagctgtggaggaaagaaagaactctccttctgaacatct

SEQ ID NO: 310921 - DNA, 122 bp, Homo sapiens
attaatatttaaattataattttatgacgtgaaaatcaacaacgaatgtcaatttcacttcgttttgactgtcatctgtggcctctggagtccctcacttaaatcattggtccttggtttta

SEQ ID NO: 310922 - DNA, 122 bp, Homo sapiens
aaccacagcagagcaagaagagcttcagagagcagccttcccggagcaccaactccgtgtcgggagtgcagaaaccaacaagtgagagggcgccgcgttcccggggcgcagctgcgggcggc

SEQ ID NO: 310923 - DNA, 122 bp, Homo sapiens
accctccccttcccaccgtgctggcctgcgcgcgcggacgtgcgcgctccgccctcgggccgcctgcactgcaattggttggtgtctctgggagggatttgaaacttggcggttaaagctcc

SEQ ID NO: 310924 - DNA, 122 bp, Homo sapiens
aaaaataaaaaaaatagtgacaataccaaatgcctgtgaggatgcagtaaaacaatcactcgcacattgctggtgcaaccactctggaaaacactttgacagtttatttaaaaaactaaaaa

SEQ ID NO: 310925 - DNA, 122 bp, Homo sapiens
ctcctccagggacatttcggctcctcaggggatggtcttacctagacagactggcctggccggtggtggggttagagagaggctgaggccactgtgcccaacatagactcatggacacatgc

SEQ ID NO: 310926 - DNA, 122 bp, Homo sapiens
gcctggccccacctgggccacccttcacttcgctccgcgcctcacccaacggcagagcagcgccgcgcccacagctccggtttgaaaaccttcaccaaccaatcacagagaaatttattcct

SEQ ID NO: 310927 - DNA, 122 bp, Homo sapiens
gtggggacacgctgcttctgtctgctgaagctttgcttacctttatgtctggcaaaatagcgccccagaatgatgagcaagcacagcatggcgaacaccaccaccgccacgacgccaccgat

SEQ ID NO: 310928 - DNA, 122 bp, Homo sapiens
aagagggctgggacgtacgttccgaaatggctgctgtcaggctaggaaagcttggcccgccggtcctcctctgctttctccgcctacttgggtcggcgaacacttccgccttggtgccgcct

SEQ ID NO: 310929 - DNA, 122 bp, Homo sapiens
agggatctttaggcccatcatggtgtccagttcaaaacaaatactaataccagtcattcacgcaaatgattcagctgtgcattttgagaggaaaaatatatgtaaggttgctaaacagtagc

SEQ ID NO: 310930 - DNA, 122 bp, Homo sapiens
acgaaacggcgcgagcgggcagactcctggagtccccgcaaagggagccgaggagctaggcgcgccgagtccaggtccgccctgactctcagcttgggacgttccgtatagtttttttctcc

SEQ ID NO: 310931 - DNA, 122 bp, Homo sapiens
gaaacacttgcagcctagatccccagctggccccgacatctggagttcatttgctcagagcgagccgtcggtctggccgcagagcccattgcttttggacgaacccgtatgttccattttct

SEQ ID NO: 310932 - DNA, 122 bp, Homo sapiens
ggcaggaagtcagcccaggaggctgttgaggaccagcaggacccagtgggatgcgcagggcggggcctacacagacgggggttggggggggactgggagctccacgacatgccggcctcctt

SEQ ID NO: 310933 - DNA, 122 bp, Homo sapiens
gcgcgagcgggaacctgggctgcgcgaggcacttgtgggccccctggagttccgggtgggcgtgggcttggctggcccgcactcggagcagccggccggccctgccggcccgggcaatgagg

SEQ ID NO: 310934 - DNA, 122 bp, Homo sapiens
ttggttccagaacaagcgcgccaagatcaagaaggccacgggcaacaagaacacgctggccgtgcacctcatggcacagggcttgtacaaccactccaccacagccaaggagggcaagtcgg

SEQ ID NO: 310935 - DNA, 122 bp, Homo sapiens
cttggcgctgggagattgacagcaacagcggctgttccaaaggaagcaacagctgagagacgtctcagagagttgttctcagcccagtggaggttgttcaggcagagggaacagcgtgtgca

SEQ ID NO: 310936 - DNA, 122 bp, Homo sapiens
gcacagagcagggatttgatttcaggtgtgtcttgttccaaacttactacactgtgctgccggggcaaaaaaagagcaaaaagaaaaacccaaaaggttcttaactgaagttaaagatgacc

SEQ ID NO: 310937 - DNA, 122 bp, Homo sapiens
cagtcaccaggccactattccacaatttacggcaaagagcctgcctcactgtgtgctccccgaggggaggacttgcaagatggagccacaatccaactgaggaggatccagtcagctgtctt

SEQ ID NO: 310938 - DNA, 122 bp, Homo sapiens
ataatgattgagtacctccaaagagctttgcttatgtgggttatgcatatccacacttatcgcattagaaatcaaaactgagaacatttttaaacaaaagactacagaaatacacatgccac

SEQ ID NO: 310939 - DNA, 122 bp, Homo sapiens
ctgcagcttcactcctgaagccagcgagaccatgaacccaccgggaggaatgaacaactccggacgcgccgcctttatgaactgtaacactcactgcgaaggtctgtggcttcactcctgaa

SEQ ID NO: 310940 - DNA, 122 bp, Homo sapiens
ggacaactctatgaatatactaaaaaccactgaattgtaaactttaaggcatgacttttacggtgtgtgaattatatctcaataaaaaaagtcacatgccaggcagcacagtggctcacacc

SEQ ID NO: 310941 - DNA, 122 bp, Homo sapiens
cacgactgcttcattcaccactgaagcccgagtgcctaccccaggccacctccatgctttcgaggctgtgcttaataaatcactgtcaaagaatgaccagggtgggaaagtggttgggagac

SEQ ID NO: 310942 - DNA, 122 bp, Homo sapiens
gatattgaagaaagaaggcaggacggttgtgcaggctccgaagaggcggagccctcgttccgcagccaccgctgtctttctacccacagcagccgggtttaccaattagtctcccttaaagg

SEQ ID NO: 310943 - DNA, 122 bp, Homo sapiens
ttgggggataggcacctcttctgaaaaagaatgggctaagagatccaggagagagcttttcgccccatatacccacccccttgggctccaggaaccaggaaggagggagaggacagaaagga

SEQ ID NO: 310944 - DNA, 122 bp, Homo sapiens
cccgagccgggtccccagcctgcgccctcctcggccagcgcctaccgccgccgctgctgccgcctctgcatctggctgctgcagaccctcgtccacctcctgcagctcggccaggtctggag

SEQ ID NO: 310945 - DNA, 122 bp, Homo sapiens
ctaaaggcacgaggacctaagtgaatgcagacacctttagtccttcttggtcatggaaggcgaagcagcaagttcagtgtgcatagcacggagtctgtgcatgatggggacgaaacaaggag

SEQ ID NO: 310946 - DNA, 122 bp, Homo sapiens
agaactgcgcccactttcgttggccccgccccctcctcacccggacagccttttgggcagcgtcgctgctgcctgccacaacagtgcgaggtccccccatgccgcagagaccgcgcaggtgg

SEQ ID NO: 310947 - DNA, 122 bp, Homo sapiens
ttttcttcccaaatgtgtctttttctttgggctactgtaccctgcttccagtgctgtccccggcataggtccatctctgcagaagccatttcaggagtacctggaggctcaacggcagaagc

SEQ ID NO: 310948 - DNA, 122 bp, Homo sapiens
aagtgatccacccgcctcagtctcctagagtgctgggattacaggcgtgagccaccatgccggccttgagcgatcttgattgccctccaaaataggacagtttgctgaggcctgggagctcc

SEQ ID NO: 310949 - DNA, 122 bp, Homo sapiens
gcgccacttggccttctctttctaaatattagcataataaatataaatggacccagaacgcgagggggcaggggccacgtgatcgctccacgaaagccacttgtagggacctttagagagtt

SEQ ID NO: 310950 - DNA, 122 bp, Homo sapiens
ccacggacactcgaaactgatcttgaagcccctgccgtcacggatactagaaactgatctcgaagccccttccgccacggacactcgaaactctcccccactgttagacctcagcagccagc

SEQ ID NO: 310951 - DNA, 122 bp, Homo sapiens
aaaacatactcttggagggcttcaatcaaccggagacacggccattttaccagagaatcccggcaacgcccccaacatcctccctgcctgtctctccgtcgtcatctctccccacctaccct

SEQ ID NO: 310952 - DNA, 122 bp, Homo sapiens
aggggcaagctttcaggaggtgccagtgcagggtcagctcctccttaacaattctgcacccggccctgacaccaagtctaaagggtcatgaacctctgagtgaaaacaccaagtgcaggatc

SEQ ID NO: 310953 - DNA, 122 bp, Homo sapiens
gtatacatttatacactctatatatttcagaataaaacattttaaagatactgtttaactcgcaactatccatcagggaaaggtttgtagagagacgtttactataaaagaagccaacactt

SEQ ID NO: 310954 - DNA, 122 bp, Homo sapiens
agagacggggttttaccatgttagccaggatgtcctcgatctcctgacctcgtgatctgccggcctcagcctcccaaagtgctgggattacaggagtgagccactgcgactggccaggactc

SEQ ID NO: 310955 - DNA, 122 bp, Homo sapiens
tccccgcacccccggagccccgagcatactgtgcgtgcttagtcctctcttcgctgccttcgcggaactcctggcttaggcgtgcccactttaatccaaaccattccctttccctgttcctt

SEQ ID NO: 310956 - DNA, 122 bp, Homo sapiens
ggatcagagagaagcgagggcctggttctgaggggtcggcttgagatcggctgagggaagcgggctcagggtctgtgaggaggcaaggtgagaccctgagggaggactgaggaggcccccac

SEQ ID NO: 310957 - DNA, 122 bp, Homo sapiens
tctctgtgctaggcttggctctgcacagggttcattttaaccttctggtgtgtaacgttacgtcaatttataaattgtgcacgcgcgcgcgcacacacacagacacacttgttcacaaatgg

SEQ ID NO: 310958 - DNA, 122 bp, Homo sapiens
ttactgccctgcctttcacaggacctcaagcacgtttacacacagttgctctctgctccccgatactggtgctgtctctatcatgaggggatgtgtgacagtatgtgcatacaattctattt

SEQ ID NO: 310959 - DNA, 122 bp, Homo sapiens
gtagttgtctgaggagggctgctgggggttctgaggccgctgggggcggcgtgacccgtgcggcgcagagcaagtacttcttgcggctgtggggacgcccattgttaaccagcgcgagtggg

SEQ ID NO: 310960 - DNA, 122 bp, Homo sapiens
tggacggggagtatctcagctccagatggagctcccagcatccttctgcagactctgggacggcggggataaatggaaggtgactccaagtatacaagggatggtcaatatctcctgttcac

SEQ ID NO: 310961 - DNA, 122 bp, Homo sapiens
tcataggtaagatggaaataattacaccctctggatggtgtgactgaagattaaatacagcgggtgctctcactcagcacatctggccatgtctgcagacacatttggttgccacaactgga

SEQ ID NO: 310962 - DNA, 122 bp, Homo sapiens
tgtggggctgtggcctctggtgcaggcatcatggcttactgggctttaggatacacaccccgacctcggctaccgcatccacgcttggccccagcagcccgtccggcctggggttctctgtg

SEQ ID NO: 310963 - DNA, 122 bp, Homo sapiens
ttgagattcccatgccagcttgatgcgggaccaagtggagagatgccggccttcaaatctcgagcccgtggggagagtgacctgcctgcaacccctcccccggcaaatagtctctatggggg

SEQ ID NO: 310964 - DNA, 122 bp, Homo sapiens
cccctgtccgcaccctttccctcgggggtggggtcgctgagtcagcaggcaggctgcggtcggctctggtctccgctggggagccgaggcctctcccgcagccgccgctgtggccccagccc

SEQ ID NO: 310965 - DNA, 122 bp, Homo sapiens
acagaggctggtcatttaccccagggccaggaagatgaaagcacgttcacccgccatttgcggctgccctagcgcgttagtaccatctccccgtgcccacagatatccacacacagcaactc

SEQ ID NO: 310966 - DNA, 122 bp, Homo sapiens
atgctgaggccgagctgctccatattgattgatttcccttgctgcacgtgtgctaaggaacggactcttccaccgcaggcttgtttaggcaaagccccctgtgcaagttcccttatcggcac

SEQ ID NO: 310967 - DNA, 122 bp, Homo sapiens
tcctcggggcaggcgggctgggggtggcctcacggccccgtttaaatctcgctgggctgtcgcggcgctaggtcccggggctgcctccagcttcctcgggttacagcctctttcggggcggg

SEQ ID NO: 310968 - DNA, 122 bp, Homo sapiens
agctatcaactgcagtgttaaagaaaaacgcctcagtcctaaggcacttggtcaagaaaacgctgcactactacaaaatgatcaaagcagcattaaactgtggactgttcggtaagtgcgga

SEQ ID NO: 310969 - DNA, 122 bp, Homo sapiens
gggccgtgacgccgagagtgcggggcgcgcggctgggagcctcgcgcccccgcccgggcccgcccccatcccgcccgcatacagcccgcatcccgccggggaagcgagcccagtccagcgct

SEQ ID NO: 310970 - DNA, 122 bp, Homo sapiens
gtaggttttccttaatggtggtgggtgcgggtggggatattccagcagaggtgagaggggcgagtgagaagggagctaatattttgttgcttccatgagtcacatgcttcccttatgggtcc

SEQ ID NO: 310971 - DNA, 122 bp, Homo sapiens
acaggcgggtgcgcggcgccagccagcggaggttgccatggtttccgggggtcacgtgggcgcgctctcctgcgccccctcccgcgcaccgcggcggggcgggggcggggcgcccgggcggg

SEQ ID NO: 310972 - DNA, 122 bp, Homo sapiens
gggcgtctgcgagtcctccgtggtcctctcgtcgaggtgatggttttatagtggcccgcccgctaaagcactttgaaaagtgacagctctgacaatgaagttcaacaaagttctccactcga

SEQ ID NO: 310973 - DNA, 122 bp, Homo sapiens
tcagagaacccgtactgctgacatttgcaaacccatttcagctgtggtgtggagctgtggcgttgtacttctggatgtgaccagaaacagtgtttgggagctcagcaggtggtgctgtcttg

SEQ ID NO: 310974 - DNA, 122 bp, Homo sapiens
agacaccttcagagtgaagaggccacatctcaggcgctctgccagcaacggtgagcatgccgatggtggcgaggctgaggccaaggaagagcagaaaggaaaggacagtctctgggctggag

SEQ ID NO: 310975 - DNA, 122 bp, Homo sapiens
gcaagcatctaacgccagcaagagcaacatcgccgcggccaacagcggcagcaacagcagcggggctacccgggccagtggcaagcacaggtctgcgtcctgctccttctgcatctggctcc

SEQ ID NO: 310976 - DNA, 122 bp, Homo sapiens
taaaatctctccctgggtcagtggttctcagcactcaagaatgggtcagaattaatctaacggcttcttttttaatattcatgtccaactaacaccctagggcttcttattcaattgatcag

SEQ ID NO: 310977 - DNA, 122 bp, Homo sapiens
cagatatggacatggttgtctaatttcagagcccacatgcattaatcactacgccgaaatcggtgcacacgtgactaaatctatgtcatcctctactcagctaactctcagccggtgagaga

SEQ ID NO: 310978 - DNA, 122 bp, Homo sapiens
aagccgggccgcccccttgctctgggcctcccttcaagcctgcagtctggggatgggttccgagtcaccgcggtccgggcctcggtcaggcttggtcgggcacacagggcgtttcagaggcc

SEQ ID NO: 310979 - DNA, 122 bp, Homo sapiens
gaactcggctagcggccccacagcccctgctgactcaaaacaactgtgagtggggttgggcgagtgattgcaaaatgggggtggcggtcgcccggggataggaagggagtgatgatgacccc

SEQ ID NO: 310980 - DNA, 122 bp, Homo sapiens
gagggctacacaaaccatgcctgacttaataaaaatctatgcggagccacatcggatgaacgaccactatgaatgctctagtctgcatctacttgggatggtagtggtgggggatggcaggt

SEQ ID NO: 310981 - DNA, 122 bp, Homo sapiens
tttgccttgggaaatgcctgaatttctatatatcacatgtaaaaatgttaaaatgtgaggcgatagtttgagtttctgaagttgactctatctgattgccttgttagatatccaatccttat

SEQ ID NO: 310982 - DNA, 122 bp, Homo sapiens
gtagttctaagaagcgaggcttgcccgattctgtgcctgtgcgcatgctgaaagcaggggcgggaccggggcggtcttccagcagggaaaatggcgctggccatgctggtcttggtggtttc

SEQ ID NO: 310983 - DNA, 122 bp, Homo sapiens
cctccggcgctgaccgactcgggctacgctgcaaagacgaagagatccggagccacggcgcgtgcagctgctgtgcaaggagccactgcctcagcctcaaggttatcccgctgcgggccgcc

SEQ ID NO: 310984 - DNA, 122 bp, Homo sapiens
agtaaccggggatgcgcgcggcgcttgcgggccagagcgagttctgggtgggcttgggctcggccggccccgccggcccaggcagtgaggaacttagcacttgggccaacaacggctgtcct

SEQ ID NO: 310985 - DNA, 122 bp, Homo sapiens
gagggccccgctggtgggtgccacctacccaccccatgtccacctccgcgggaggcactgcgggaagcagatggtcaggctccgccccacggggaaacctgacgccctccctgccctttgcc

SEQ ID NO: 310986 - DNA, 122 bp, Homo sapiens
tcctccggtacttcatagtcattccatcttggggctccaaattctgataaagaccggcagcgcagctgtgaaggggcagggtggatgttgtggaaggatttgtggatgccccagagggtccg

SEQ ID NO: 310987 - DNA, 122 bp, Homo sapiens
gggttaacgtcgaggcagcgcgaggggctggggaattcagcctccggggtccacaggagccggcggcgggggctggggcgggagtccacgcaggaccaggggcggtctccggcggggcgggg

SEQ ID NO: 310988 - DNA, 122 bp, Homo sapiens
gaagcagggtttcagacaaagggaggaaggaatgtgaggaagggagggccagaggtgaaccgtgccagtgccatggcgacagatcactggacagggcttgagatgaggcttttggatttgac

SEQ ID NO: 310989 - DNA, 122 bp, Homo sapiens
gattggggcctgtctttgagtgacgtcaaggctgtgctatgagggcttctttgttgagtccgggttgaaaaacctaccgcggtcgtctctgcagtcgactgagtagaagaccgctagagatc

SEQ ID NO: 310990 - DNA, 122 bp, Homo sapiens
gtcgtcgctgctggcacttcaggctctggtaagacaggcaatagcttcaggggacggggtcgttgactttgcgttgtgatattttctgctggtccaatgccacttcaagcctgttcactctt

SEQ ID NO: 310991 - DNA, 122 bp, Homo sapiens
cactgggccctggtgactaagcccaagtttgaaaatgacgtggctaaagctgcctgctaacggcagagcttaatcagccgcagatcccctcctatcctcatcggttctcgtactaaaaaggc

SEQ ID NO: 310992 - DNA, 122 bp, Homo sapiens
ctcagcctcattggggctctgatctcttgccttaggtcttgctggagaacacaaatctctcggctacaacctccttgtctcttcgccggcctccagggccagcctcccagtccttatgggga

SEQ ID NO: 310993 - DNA, 122 bp, Homo sapiens
gcactggaggaggcagtggccaacacaggaccttcgcccccctgctggctgctcactttgcggtaaccagtgcctcaagagtgggagcagagacagactgagacagacagcccccctcaacg

SEQ ID NO: 310994 - DNA, 122 bp, Homo sapiens
gatcccagttcaggtggggtcttcctcggttgcgtacctggctggagccgagctggtgggcggccggcagccggcgtttctggtgatgacagccccgaaatgaaagcagcgcggccgccgcc

SEQ ID NO: 310995 - DNA, 122 bp, Homo sapiens
atgtgaacacgggagtaacaccgcgcgtggggaatccactggcacccagagcccggcccgcggcagcagaatcacccaagactgagatcctgtggcctgagtcggggccggggaaaccaagc

SEQ ID NO: 310996 - DNA, 122 bp, Homo sapiens
acagaagattaaaagcagaggaggcagcacagccagaagactctggggttaacaactttgcgatggcaagcaggcgagcgctgattggctgggagggcagtgtccctacagtctgcactatc

SEQ ID NO: 310997 - DNA, 122 bp, Homo sapiens
tttctacagtgagcatgtgggacttccgtcatgaagagaacggaaaggcatgcatgtgcacgtgcagacgcagacggactggaacgcatgctcccacgcaaagcaagacgccaatgtacagt

SEQ ID NO: 310998 - DNA, 122 bp, Homo sapiens
cacacaggtgagaaccatctcaagacctccccacttttgggctcccttaccctgactcatcggtcgtcaagggaccaaaaggggtcagtagagcaaggcccctgccttcaaagaatgcatgc

SEQ ID NO: 310999 - DNA, 122 bp, Homo sapiens
ttaaaatcgcggagttaagtgcgattatccgcaaactggaggaccgcaatgcattgctgtcggaagagaggaatgagctggtgagcgcgggcgggggcttctggctcctgggggtttgtgac

SEQ ID NO: 311000 - DNA, 122 bp, Homo sapiens
agaaggagggaaagaaaagtacttgagggttttgtaaatgttcagaaagggaggggggtgcggtagaattaaatctacccaaagaagagccaaagagctttcacttgctttcccttctagcc

SEQ ID NO: 311001 - DNA, 122 bp, Homo sapiens
tcctcagctgagggacaagaagagtgcagggagccagctctgcagctctgcggggcccaacgtccccacacctggacctagagggcagaactgtccaggatgaaccgaataaaatatttctc

SEQ ID NO: 311002 - DNA, 122 bp, Homo sapiens
tggccccccttgcagcagcattcaggagaagacagaggcagcgtcttctgccagcctcctcggactggaaggagtaacaaggctttgaaggcatgcaggaataacacccacacagagcccca

SEQ ID NO: 311003 - DNA, 122 bp, Homo sapiens
agtcttatttttgttcactgttacgtaacacattttacacattttccgcattccacgccccgcccttcaacaacaaccaccacaaactccgaccgtcctttccaggccctttccctctataa

SEQ ID NO: 311004 - DNA, 122 bp, Homo sapiens
ctgtgcagttcagctttaccgtcttgctgcagcgggaacgtcctgctgtagaagaggcgccgccatcccagacagtgttcataaacaccgacggcaaagtcaggacgggcaggagcgttcta

SEQ ID NO: 311005 - DNA, 122 bp, Homo sapiens
gtggcactgattagagatgatcccagagaccacacagatgtgaacaggactcccctcttccgtggggaacagaagtccatgagaggctgggtctgaagggcagggcgagggtaaaggagaca

SEQ ID NO: 311006 - DNA, 122 bp, Homo sapiens
tcccttcccctggcttcaccagtaggtagctgaatgacctttggcaaccaattacttaaccgccctctctagacaacaattttctcaactacaaaacaaaaaagttaaaccagatgatgtta

SEQ ID NO: 311007 - DNA, 122 bp, Homo sapiens
gtgccggaatcagcaggacgaatcgggtcccaaagatgtgggcaagactgttccgagggtcgaaactctggttcaggataagattagcaggtatttcacagagtcgacttaaggaagctagt

SEQ ID NO: 311008 - DNA, 122 bp, Homo sapiens
ccgacccggccgagcgagcggccgcgcccacgcccctctcgcgccctcccgcgcccgccccgccctcggcccgcgcctgccctcgccgggcactttctcgcccgccctctcctgcgcgccct

SEQ ID NO: 311009 - DNA, 122 bp, Homo sapiens
caccagccccaaggggccccaggggtggcacagactcctcgacattgcgacggggaggcccggacaggggcgggtacggccaaatgggcccccgcttccctcttgtgaccaacaattgggtc

SEQ ID NO: 311010 - DNA, 122 bp, Homo sapiens
ttcaatgaaacacaatcaaaggtattaatggctctgccccgcggcccactcacccgagaacgttcccttgctgagacactcttttatccgattggctttccttacgtgaaaggctttcgtaa

SEQ ID NO: 311011 - DNA, 122 bp, Homo sapiens
agcatactaattttccaaagggcatgtggagatcaaagcatttaaaaatacatcttttcacggaggctaatggaggattttcagtttaaatgagattttaaagtgctgtcgttaagaaaaac

SEQ ID NO: 311012 - DNA, 122 bp, Homo sapiens
catccgtaagtggtctccttgaaataatggaattttcaatgcaaaaaacattaatgccaccgcatccaactttctatgtaggaattcccaaagacaacagcctgtgtgcctccaaaattgac

SEQ ID NO: 311013 - DNA, 122 bp, Homo sapiens
cgcaggctgtgtacacccaccctgtgatattgtccctaatatccaggaaaagagaggatacgactccccatagagcaggagatgtaaacccaccctgagatattgttcctaatatccatgga

SEQ ID NO: 311014 - DNA, 122 bp, Homo sapiens
gcattggagatgcggtgtctacggagatttattgcgcgcggtgaaacactctaagcaccgcgcggaacaactgggttcagctccctcatcccggaccttccccaggaccacacgtcaccctt

SEQ ID NO: 311015 - DNA, 122 bp, Homo sapiens
accttctagaccctcatctccgcagtccatctccagcctcactgtccctggaagaagccccgcaggctccagccccagggcctccatacaccctgcacaggcaattctgttctcccaggtat

SEQ ID NO: 311016 - DNA, 122 bp, Homo sapiens
atgtagtcaaatcacttggagcttttaaaacatactgaccccacaggcttctctctctggcgattttgattcagtagcattggggtgaatccctcctttctgtactgtttaaactgctctgg

SEQ ID NO: 311017 - DNA, 122 bp, Homo sapiens
agagatcagagactcagttgggtccccaagcgcgttccctggggagcttcttggaagagacgacttggggaccaatttggaatgctagtgggaagggatgattctggaatctggcccccacc

SEQ ID NO: 311018 - DNA, 122 bp, Homo sapiens
tgcgccaatcccgccatgctcaggagccaccagcaaagcgcagaaagggttccaaagggccggaaggctagatggggcaccctggacaaagaaattccccaagcaccttcccctccattccc

SEQ ID NO: 311019 - DNA, 122 bp, Homo sapiens
aatagggagaaaggactcataattctaaaagccagactaaagggctgcaaaacagcccttcgatgcatcagacttgtgcctgtgtatatttgttcatggcctgactttgagtcactgttctt

SEQ ID NO: 311020 - DNA, 122 bp, Homo sapiens
cagggacgcagtgagcgcaggtgccagggttccctcaggtgccgcactgaagtgtcgggccgaggcccaggtgcccagcaggcccctctgcaaaaattgctcatttgatgaaagagacataa

SEQ ID NO: 311021 - DNA, 122 bp, Homo sapiens
tgggggcggtcacttttatcaggctctgcgacccccgtgctcccccgtgctcggcctcgtcggtggcacttggcatgactgggagatcaagctcaggtgttccggaaatttaactttatttt

SEQ ID NO: 311022 - DNA, 122 bp, Homo sapiens
cccgctggctcttcctgattttcacacatacacagacctgcaggcggagacgcacggaaacgcccccacgcggaggcacacccgggcaaaatcacccagatgggagctggggacggggaagt

SEQ ID NO: 311023 - DNA, 122 bp, Homo sapiens
caccaagacgggacgggcgtgtgggcgcctcccccgcgctggtcgcgagctcacgttacgcgctgggatctccaaagggcagcagagtcaactccaaatagaaaggatattgttcgcgccgc

SEQ ID NO: 311024 - DNA, 122 bp, Homo sapiens
tgcctccaggttccccgaggttccccgtggtggttttgcacaggctatttaggcacatctcggccgccgtggcggggcacggctcagctgttgcggggcggggccttcgcagagcatggcgg

SEQ ID NO: 311025 - DNA, 122 bp, Homo sapiens
caggaacccaaaacaatgggagtgacgtgctaaaaccagaacccaaaacaatgggagagtcgtgctaaaccaggatccaaagcaatgggagtgacgtgctaaaaccggaacccaaaaccatg

SEQ ID NO: 311026 - DNA, 122 bp, Homo sapiens
cccggacggacacaagacatcggctcgcagctgtgctattcctcagctgcaacagcgtggcgaggggccagctctgcccggcctttgcgacctccccaccccagcccttagtgagcccaaag

SEQ ID NO: 311027 - DNA, 122 bp, Homo sapiens
tctggccccagccgcattgtcgccggcgccgtcctccctccatggctgcttctgccgcagcgtctcgagggcactcaggtgcacctgtgtggtctgtttctgggttttctgcccgtagatgc

SEQ ID NO: 311028 - DNA, 122 bp, Homo sapiens
ttgctaagaccgttggaaaagcgcagtattagggtgggagtgaaccaattttccaggtgccgtctgtcaccgcttcccttggctaggaaagggaattcccggacccctgcacttcccgggtg

SEQ ID NO: 311029 - DNA, 122 bp, Homo sapiens
taataccgtgggtcccgggtctcctcccccagtcttctttggtcaaccgcaagcctcttccgcgtctcgcgtctggcaacacccggcccgcccccgtcagccaatccctgaggctcaggctc

SEQ ID NO: 311030 - DNA, 122 bp, Homo sapiens
aggggactggctcagcatccggagccaaaacaggaatagaactgggagctgagcctggagcggttctgggcttttggttctctgcatcaacacagccagcatgcctatgatttctgtgctgg

SEQ ID NO: 311031 - DNA, 122 bp, Homo sapiens
ccgagttaggaagaatctaaatcgactgaacgccagtctaaaatttcggcgttcccacaccgggagtcgaacccgggccgcctgggtgaaaaccaggaatcctaaccgctagaccatgtggg

SEQ ID NO: 311032 - DNA, 122 bp, Homo sapiens
ttatacgctattaatgccgccgtggcccagtcttaaccgagtcaggcagagctagtttgacggtggagtggagtgaggttgaacagcaggtttggcgtttggtgggtctggtatctagcggc

SEQ ID NO: 311033 - DNA, 122 bp, Homo sapiens
ggctcctgcagtccctgggctcgcgctgtctgagctcctaatccggctggccggaggcagcgtcgcattgctaatcagctcctttgtgtgccagtctcgtcttcctgaccagctcccagctc

SEQ ID NO: 311034 - DNA, 122 bp, Homo sapiens
aactgagcccacgtgtgagggcgaggaccatccgtgccggggcctcctgttgagcagccacgagacatcacctcacccggcacatgggcggccgcttcctcttgggcctggaatcctgacag

SEQ ID NO: 311035 - DNA, 122 bp, Homo sapiens
gcctcttgccttcaaccctggtctttcctcctccccgggaccttgagtccccgaggagagcgagggagaggagcgtcttctgcaggtgtttttgggcgaacctcttcaccttgtgtggttcg

SEQ ID NO: 311036 - DNA, 122 bp, Homo sapiens
agaggagagagtcccaggaaggagctaccccgtgtgcaagcatttcagcagcccaggcctcgtggggtgtagttggcctcccaccagccatccctgtgtgttccacacacctgctgattcct

SEQ ID NO: 311037 - DNA, 122 bp, Homo sapiens
tctgcggacacgtgtgaacacagcctgtgaaccgagccacatctgtattcacgtgacccccggggccccagcactgacccaggaaaactcggcatttggatctgagctgattcacactcccc

SEQ ID NO: 311038 - DNA, 122 bp, Homo sapiens
agaagtcactctgcaaagaacacaggccgtgtctgctcatggccgacgccgcccatgcgccggagggagacacaggtctgaagaacagccagccacacgggtggctcagagcaggtgccacg

SEQ ID NO: 311039 - DNA, 122 bp, Homo sapiens
cgctgttggaatttcctctcccccgcggtttccctcgcggttcagatcgggaccagaacgcgatcagcttcagtgccccgccgcaggcatttttaaatagagtattgcgtcccccattcagc

SEQ ID NO: 311040 - DNA, 122 bp, Homo sapiens
cttcggaatctggatacattactgtcttggagggggtgaaaactgcccagcaaagcaagccggcctctgtgcccctacccagcggcctcccgcggccggccttccctgggagcctcgcagaa

SEQ ID NO: 311041 - DNA, 122 bp, Homo sapiens
gagcttgtttggaggttctagcaggggagcgcagctactcacatacccttgaccaaagtccggtcctcctctatcgggggtggtcgcccccttcgatggagctcacagcttcgggagggaca

SEQ ID NO: 311042 - DNA, 122 bp, Homo sapiens
caacacaaaactcagcacaccccagggctttctgctgcctcttgagtaactgttctctggcgggcaaggtggggctggggggtctgagaccctcctgccaagagcaaggcccaagctgtcag

SEQ ID NO: 311043 - DNA, 122 bp, Homo sapiens
tcacaagtgacctaaactgtgcttgatttgcagcagagtcttaacttgagctacttcttacgaatatctttatattaaaaaaaagccttacgatcaaccaatcagaagtagtcaacaaactt

SEQ ID NO: 311044 - DNA, 122 bp, Homo sapiens
acctgcctttcaggtgaaatatcagagtgttcaacccagaccataccaatggcacccgcgcggagtgcagtcaccagggaaccgccctgcggcgatggccccggcggggagagggtgggtga

SEQ ID NO: 311045 - DNA, 122 bp, Homo sapiens
acactctctccattcatcacagtcacagctaacatgcgcggcacaggcaccgttctagcacgtgtgtgtgtgtctgccaaatatttgtgagtgtgtctcacaacagctctgtgagaacctta

SEQ ID NO: 311046 - DNA, 122 bp, Homo sapiens
tcccattatctatcttaaactacactcccatcgtgcaacggaaaacggacagagctcctgcgtgcaccgaagggacttcgagccaatccattgtcacagctctcagccggcgacctattggc

SEQ ID NO: 311047 - DNA, 122 bp, Homo sapiens
gcggtgagtgtgcaaggccgcggtggccgcgtgacaagcctgcgctaccagtgcgcccgccggccaggagaacggagcttgtgatagatcctttcgtaacaccaagtattgtaccaggacct

SEQ ID NO: 311048 - DNA, 122 bp, Homo sapiens
aaaatttaggcagaaaacctggtaactaacaggcaagtgctaactgactttacagttcagcgaaagataaaactgaagctggccatatggaagcttggaaagaagctgcttgttaccagtaa

SEQ ID NO: 311049 - DNA, 122 bp, Homo sapiens
tgtgtgcatttcctgtaaggatcggtcctttcagtggggaattgtgagaatgacattcgacgatgagctgggaaacaggaaccccaaacccgtgtgcttcctgcgccgagccgtgtgcctcc

SEQ ID NO: 311050 - DNA, 122 bp, Homo sapiens
aacctgactgtctttagccccagcccctattactcaggtctccccttaatttcagaaaaacgaaaaaaaaagtcatcctccaaattggattaaggttctaatcctaaaggacagcacaggct

SEQ ID NO: 311051 - DNA, 122 bp, Homo sapiens
ctagaagtgccatgctgctcccccatgtccaaaaggggatgccgtgtcttgctttccagccgcctagaccaagaagcgtgaggcccaggccctcgccgctcccttgatacccgcttaccaac

SEQ ID NO: 311052 - DNA, 122 bp, Homo sapiens
aaagttctgttcacctagaccttcactttactaattttattaataaattgattatagtctcgtgtatgtttcataacctgttcgattaggaggcatgtcatatagtttgaattagtggagtg

SEQ ID NO: 311053 - DNA, 122 bp, Homo sapiens
tttgtataccaaaccccagtgacacaaaatttacccttgtaacacatttgcacattcccccgaccctaaaataaaagtcaaaaaaggggaaaaaaaatcttctctcaggctcctgggctgcc

SEQ ID NO: 311054 - DNA, 122 bp, Homo sapiens
tcctcatctaagtctcggagctcctggtgagtttacttccaggtgttcaagctttgacgacggtggtgagttgtcgcgggccactgtggcccgggtgactggacgttttctgtttgtatctt

SEQ ID NO: 311055 - DNA, 122 bp, Homo sapiens
gggccgtagatagtagactatttccgttttggctccttgacaaagaagagaaaaattttgcgggcacaaaaacggttgctaggcatctcaaacgtaatacatacaaaaataatacatgctta

SEQ ID NO: 311056 - DNA, 122 bp, Homo sapiens
tggtaatactgaggtcagggctcatgtcccacagtggccaggcaggtagtgggaatgagtcgggggatgctatgtataaggcagcctggaggtggtgggggttgaggtgtctgggaagtggg

SEQ ID NO: 311057 - DNA, 122 bp, Homo sapiens
tggaaactccatggccccatcctcgccagatagcgatccctagtatgtaccgcttgcgcccgcacagacttctgtttgtctgccttgcttaaaatgcatcccgcctggagcacctctcgtac

SEQ ID NO: 311058 - DNA, 122 bp, Homo sapiens
tgaggtcaggtccacaacaggggccactaaaagtcccccaactgaaggatccagcctctacgtggctgcccatcataacagggaggctccaagagtctgcattctaccaggagagacaccag

SEQ ID NO: 311059 - DNA, 122 bp, Homo sapiens
cccatgaccctcagtctaatgttgttccaagggttccttacttagaaatgccttgataaccgcattcattcctgacataccccacccccaacacacacaactgctgagtgccatctgaccca

SEQ ID NO: 311060 - DNA, 122 bp, Homo sapiens
ggaaacttaaaatataaagaataaaagtggaaagggaacagccaggggaagctatagatgcggcttattaggaaagcttgggacagagatggaacaggtgggcctgttccggaagaaacgag

SEQ ID NO: 311061 - DNA, 122 bp, Homo sapiens
ccgccggcgcggaaggacgaggctgaggcgagaaacgaggtaggaacgcctctccggaggcgggcagggtcccacagacccactgccccgcgttccaaggtctcccttaggggagggcctgt

SEQ ID NO: 311062 - DNA, 122 bp, Homo sapiens
cagatgtgacagtaagatattagaacttgaggattctaacccttagttggttgaaaaccacgttggacacttatgtttcaaacttttaactaaacctgcccaatagtaatcctagaaaaatc

SEQ ID NO: 311063 - DNA, 122 bp, Homo sapiens
aggcaatgtaacaactgaactacattaactggattttagaacagaattcccatgggtaagcgtttgttttcataaatgggtacataatcagataaaacaacagcagtcacaggaattggact

SEQ ID NO: 311064 - DNA, 122 bp, Homo sapiens
tgcccaaggttacacaactggtaactggggcctcagatttggagacaggttgtcttcattcgaggtatgtatgtgaaaggttgattctgagagtccctgattcatagttccacctctttcag

SEQ ID NO: 311065 - DNA, 122 bp, Homo sapiens
aggctgggcggcggtgtgggcagaacctttcctcatccttacttgtgaaattggggtcatcgtggtcgcttactctagggaggaatacttaatgaaaaagggatttctattggcaaaaggca

SEQ ID NO: 311066 - DNA, 122 bp, Homo sapiens
cctactccctccccctagttcaacatcctcccatccaacttctgatgtgtatataaggtacggggagcagggagcggtcagggtagctggcttttaataataatgacgatgatgacattaaa

SEQ ID NO: 311067 - DNA, 122 bp, Homo sapiens
cccgcgtcagcccgtccgccggtccctccgccgactcgcggctctgtccgcccggccccgcgcccgccgccgccgcccacagctgcacgtatcccctcagcgccgccgcctccgccgcggcc

SEQ ID NO: 311068 - DNA, 122 bp, Homo sapiens
cacccaaaggcactaggacagagccttagctagcgatttagatccagccctatctgacgccgccagcagcaccacgaagacacttccacgagcacacccagcggggcgccgaggtgccgccc

SEQ ID NO: 311069 - DNA, 122 bp, Homo sapiens
ttatttttaaactcacagccatatcctggaggtctctgctggctatttggcgcgtgggggcggaggggggccgggggaggggggcggggcggggtctggaggtctgtgctggctatctggcg

SEQ ID NO: 311070 - DNA, 122 bp, Homo sapiens
catgagcaccttttaaccacgtttctttcctccagcaaaaaggcattgggatgaacgagccgctggtggactgtgagggctacccccggtcagacgtggacctgtaccaagtccgcaccgcc

SEQ ID NO: 311071 - DNA, 122 bp, Homo sapiens
tggaacaaagtggcacatttttagaagtgggctactgagaaatgaatctagcaggggaggcgtgagtagaaggaatctagaagaaaataagtttaaacacttcgctttggctcacttgcctg

SEQ ID NO: 311072 - DNA, 122 bp, Homo sapiens
cagaactactgaatccaaatctgtattttaacagagtccctggtgtttcaggagcacttccgagtctaagaagcactactcttcagctgctgtccatccttgagcctcaagcttgggacctc

SEQ ID NO: 311073 - DNA, 122 bp, Homo sapiens
cccgccgccgaggccccttttgggatttctcaggctcggcagcctcagcgcaggcaggggcggggctttccctcgcgcagccgctcagctccccgtggccccgcccacatccggccgccggc

SEQ ID NO: 311074 - DNA, 122 bp, Homo sapiens
tttcttggcaaataaatatgatatcataagccctggcaggattccagcctgagtaatggccgtctgccttcctaattccctcagcagcttggaacaggaacattactctttacttcctctct

SEQ ID NO: 311075 - DNA, 122 bp, Homo sapiens
acgctgaacaggtaagactgtgctgcctggggtgcctactggcatcgattcgagggctgccgcgctcccgctgcagagctcggggtgggagacaggcgcggcgaggaaggccagggaaaggg

SEQ ID NO: 311076 - DNA, 122 bp, Homo sapiens
tacagaattccaaattctaccctttatacatatgtcatctgtatctaggctgtcctaattcggaaatgcaaaatctcatttctatatactggataaaagaaagagttttagttattcctgag

SEQ ID NO: 311077 - DNA, 122 bp, Homo sapiens
gaccccgcggtccggccattggccggcgccccccccccgcccgcgcgcccccgccggccgcgcactccatgaagggcccattagcgcggcaggtgcctcccgggctgtaaattcgccccgat

SEQ ID NO: 311078 - DNA, 122 bp, Homo sapiens
gtcactacaggccccgccccagcccattctccgtgggatggggctcacccagctgggccacggtgactgtggaggctgcacagtcttgactccccgggtccctcagaactacaaagagctgg

SEQ ID NO: 311079 - DNA, 122 bp, Homo sapiens
tttcatttaagcgccacaatttttattttaccaaggagcaaaactgagtaagtttcctgacgaaaataatgagtgtctactgttctagggcctttaacaacaacaacaacaaatttacatta

SEQ ID NO: 311080 - DNA, 122 bp, Homo sapiens
ttgattggctgtccctctgaagcagtctcactgcagtgaggcagttgttgattggctggccgtctggtgtgacttagtttttgattgctggatttcactggagtgaagtggtcgtttattgg

SEQ ID NO: 311081 - DNA, 122 bp, Homo sapiens
atcaggtaaatcagccctggataaaatagcaggaacctgttccgccgaaaccaaatgagtcgtcaggtaaatcagcccttgataaaataacagcacttgttgaccagaagccatgggaccag

SEQ ID NO: 311082 - DNA, 122 bp, Homo sapiens
tgaaaacaccaacgccagagccatctctaatggagtatcggatctccccatctcttctggcgtcctcatcatgagccgacaccgtcattaccaatgaaccaacaggtgcatcttctttcact

SEQ ID NO: 311083 - DNA, 122 bp, Homo sapiens
tttggatggataggtgtttttggaactaagacatctccagttaaggcgatgtttgcttcacgcctgcacctgtgtcccatcctcttcccatctgtatatgccaccagtaagctttaggaaac

SEQ ID NO: 311084 - DNA, 122 bp, Homo sapiens
catggtgagaccggtaatcgccaggcgcctgcgcactcgagtggcggcgactcccgctcccgccgcggcccaaaaccgagcccgctcacactccgccctcagtcccgccccacccccgcccc

SEQ ID NO: 311085 - DNA, 122 bp, Homo sapiens
acatcactacttaaaacgtctaccaccacgaaacttcaaaaatacatctattaggccgggcgcggtggctcacgcctgtaatcccagcactttgggaggtcgaggcgggcggatcacgaggt

SEQ ID NO: 311086 - DNA, 122 bp, Homo sapiens
gggtcacaagtttactgtttttctcccttttccatccctacattggtctgctggggaaggcggggctaggcatcactgacacacgcagactccgtggttgaggcattttattggacctttgg

SEQ ID NO: 311087 - DNA, 122 bp, Homo sapiens
ggtgtgggctggggttgatgagaaggattgaacttcatttatgaatcctttcttcagctacgcccataaaaggagagggagattcccctgccgttgaaggtagggtgagcaagcacttcttg

SEQ ID NO: 311088 - DNA, 122 bp, Homo sapiens
accacagctagctgcctctgggaccgcccccgtgagtgcactgcgtcggcgcgaggcaggcgtccaactccaccccgccgcctcccacaccttggcgccggtgcttcgttcccggagtcggc

SEQ ID NO: 311089 - DNA, 122 bp, Homo sapiens
ttttgtagctgaagcccaggttctcaaaggtcctaccaggcctgtactttatttctcctccgcgggcctctaggccaaatgcctggatgaatctgcgctcagggggcgtcctggaattacac

SEQ ID NO: 311090 - DNA, 122 bp, Homo sapiens
actgtgttccacaaacaattcaggtcctgaactgaactctagagcctgcgactagactctcgctttcctaccttagtaagcaacagacatgtaccccaagagggaccccgcaggccacaccc

SEQ ID NO: 311091 - DNA, 122 bp, Homo sapiens
ggtgggctcggagcagccccacagtcaagtcacacacagagcagaggccagggggcaagacgcccaagcgtcaccgaagcaacaaccgcgtcagcatcccagcagctgagctggcatgccgt

SEQ ID NO: 311092 - DNA, 122 bp, Homo sapiens
tcctgatctctgagtttcctgataagtcaacggtggattttcaggtggatgcagtccccacgtgacctaaaatacacctgttcaatagtctgccattcttcttagaaatgggatattagaaa

SEQ ID NO: 311093 - DNA, 122 bp, Homo sapiens
ccggggcccctggcttctcccgagcactttcccccggaccggtccctccagggtggcgggcggcacccagggccggcgctcctcaccaacgcgctgcagctacgggctcaggagggagccgc

SEQ ID NO: 311094 - DNA, 122 bp, Homo sapiens
cctggagtcgggccctagaatttgcacttttaacaggttcccgggtgatgctgatgctgccggtcctgggcgccacactcccagaaccgttgcaatgtacttaacagtttccaggttaagta

SEQ ID NO: 311095 - DNA, 122 bp, Homo sapiens
agaagaccctggattttgagtgtgaaaaatggctgaatctacttcggaaaagaataaaaccgttaccccaggatctcgcaaagcgagaattgactggtaactgccatcacgcttccaaggct

SEQ ID NO: 311096 - DNA, 122 bp, Homo sapiens
aggttcccgcgagtggggaagcgcgaggtcaaatctggggccacgcccccagtcctgtggcgcaactccccgaacacggaaaaaaaaggcgcagtgggggttctgctgtgtttgcaagtgag

SEQ ID NO: 311097 - DNA, 122 bp, Homo sapiens
ctggcagagggtggggagggaatgtctgccagggctagctggggagggaggaggggaatccggtcttgccccccagggatgggagtgacatgtcccctgagctccaggccagtcctcagcag

SEQ ID NO: 311098 - DNA, 122 bp, Homo sapiens
ctgcttaaaaataactcttaaattgcatttgcggctattctaaatatcctcacagggtaacgtcctatatctatatcctgaagcataaatattgaagcatattctcttattttaagaaacaa

SEQ ID NO: 311099 - DNA, 122 bp, Homo sapiens
tttgaccttgagtgagtttcccgagactcagttttttcatctatgaaatgcgggtgatgacgcgcggctgcgagttaggactgcccagtacacgaagaaccctggacaaatgtacttttatt

SEQ ID NO: 311100 - DNA, 122 bp, Homo sapiens
acactcagtctctccctccctgtataattctgattctccccagcctttgaaggtacgatccgagaagtaaatgccacagagacaacacacagaactgctgcaggccaagcctcaccacttct

SEQ ID NO: 311101 - DNA, 122 bp, Homo sapiens
gactggtcagctacttcctcctatacattttggtttctttgagggtcactcattgagacacgcaggcctctgagagggtcttgttctagatttcatattgcacttggagggtaacagctgct

SEQ ID NO: 311102 - DNA, 122 bp, Homo sapiens
actgccatctaatgttaatgaatcgccattacagtttactattcggcaggctagattagccggagatcttgatgcctggcagtttgcagtagttttgcaacccccacgacagcaaggtggag

SEQ ID NO: 311103 - DNA, 122 bp, Homo sapiens
taggtctagagacagctataggagaggcaaggtatcctcagtctactacctccatgacaccggataaacacatatcaactggcttcaatgggatgcatagattgtagaattagaaagacttg

SEQ ID NO: 311104 - DNA, 122 bp, Homo sapiens
aggtgctgatggagtcacttccagcacgagtcacattactagtgattactcatttggctgcggccatagagactggctcataattttaacaacagacaaagacagactagtggcgagactga

SEQ ID NO: 311105 - DNA, 122 bp, Homo sapiens
gagccattatcattgaaagcaccacttagtgaccagatggccccattggaagcaacttgccgaatgtcagggaagaagacatttaatgaagcctaacagcctaacacaagctgagtaggcaa

SEQ ID NO: 311106 - DNA, 122 bp, Homo sapiens
tagtcgccgccacagcacggtaatcagaaggctttcgttcgacttgtgattcggatggtccggggagttcaagtcgatatcttcggcgcctgaggggacgacgaggcctctgagctcacccc

SEQ ID NO: 311107 - DNA, 122 bp, Homo sapiens
cgggcccactccagctagaaggtgcccggcgccacgaccagctggggtagcggcatggggcgaacggggcggggcgcggccggccacgaggggtggggccgcggcgctaacggcttgaggaa

SEQ ID NO: 311108 - DNA, 122 bp, Homo sapiens
caaaggggattttcacgtacagactttgaatttagtaggccctgagcgttcatcttcatccgtccttctcagccggagcaccttgagctggcgcgtgttcaggtgcctctgagtctgtactc

SEQ ID NO: 311109 - DNA, 122 bp, Homo sapiens
cgcgcctccgagtgcccagcgggctcgagccggcacaggtcgcggccccgcgcacgcgcgcgcactcacagctcatccactattgctcaggagcccgtccacgccctaaaagcaaaaccctt

SEQ ID NO: 311110 - DNA, 122 bp, Homo sapiens
tgggtaaggatgggtaagggcgaccaccaccgttaagcaatgacatgcgagctccagcaccgcgtctccccggtaggatgctcactgcgctagcgggaggggaccgttaagtattttccgga

SEQ ID NO: 311111 - DNA, 122 bp, Homo sapiens
cacgagagccctctccaagcgcagaagcgcgactccggaggctcgcccctcctcgcgccccgtcccaccccacgcgtttctggaatggggaccctggggtttcgttggaccccctcgtcgtc

SEQ ID NO: 311112 - DNA, 122 bp, Homo sapiens
tttctggaagaataaaagagctttagttgcagtgacataggaccgtcagtttgaccatatcgagaaaatacaggatcctgtcggaaacgttaggggtgaattattgataaacatacagaaga

SEQ ID NO: 311113 - DNA, 122 bp, Homo sapiens
ggctacagcatagtttccaggcaagaaggcatggtctctcgaactagcgtggtggcggcacgggtagaggaaagtggatgagtttaggctgagtcctggaggcggtgccttgtcgcctacag

SEQ ID NO: 311114 - DNA, 122 bp, Homo sapiens
aaaaaaaaacactcgcagtgtttactcctaacgcgtggaacttgtgtcgacatccacccccggttactgcatactcagtcacacaagccatagcaggaaacagcgagcttgcagcctcaccg

SEQ ID NO: 311115 - DNA, 122 bp, Homo sapiens
caagtgatcctcctgcctcagcctcccaagtagctgggaccacaggcacgtgtcaccacacgtggctaatttttaaaacttatgttagagacagggactccctatgacatcttgtttaatcc

SEQ ID NO: 311116 - DNA, 122 bp, Homo sapiens
gcgagactccgtggggtaggaccctccgagccaggtgcgggatataatctcgtgctgcgccgttttttaagcccgtcggaaaagcgcagtatttgggtgggagtgacccgattttccaggtg

SEQ ID NO: 311117 - DNA, 122 bp, Homo sapiens
ggtaggggttttcttttgggttgtccagttgccctgggtcacacagagtgcctggggaaccggcaggtaggtgggagccaggtggctgaaaacccctcttctggaggttaaagcagtttgcg

SEQ ID NO: 311118 - DNA, 122 bp, Homo sapiens
gcctagggagtccaataccagcttggtacagtcacagagggcatctgccttccttcccctcgtcgccttcctcccactgtgcgagcttcggaaccctaaggccggttcactgcgcattgtcc

SEQ ID NO: 311119 - DNA, 122 bp, Homo sapiens
gccagctttcttgtgtggaaccagaggcagtcggggcctgagccagcagcactacctgatcgaggaacaggtgcactgagaaaacagagaagccactcaagactgttaactttttgtttgaa

SEQ ID NO: 311120 - DNA, 122 bp, Homo sapiens
aaaatcacacaatgtgaaacgacttcaaccctctcatttcacagataaagaaactgaggtcgagagggttaaacgacttgctggagcttaaatggcttagaagcagaaactgtgttccttgt

SEQ ID NO: 311121 - DNA, 122 bp, Homo sapiens
ccaaaatatccgatatacatatttaaagtcacctgtgttgcgctgctcctggcccacaagcgctaagggaccccagcacttaccttactcgtccacgccgcctcactccctttcactttgtg

SEQ ID NO: 311122 - DNA, 122 bp, Homo sapiens
gacgcgccagaggcgggcgcggagcctgccggaagttgtagtagtatgtgggcggggcgccgcttaagggcttgtactgcgcatgcgccaggcttctgccgcacttaccttgaagaaagtga

SEQ ID NO: 311123 - DNA, 122 bp, Homo sapiens
cggcagcgctggggttaagtggcccaagtaaacctagctcggcgatcggcgccggagattcgcgagcccagcgccctgcacggccgccagccggcctcccgccagccagccccgacccgcgg

SEQ ID NO: 311124 - DNA, 122 bp, Homo sapiens
cgaaaactggctcgctggggtcatggacggtcaacaggggcggcgtcttccaggcctggccgcgcgggctagagaggaagcgtgcgcactggcaagccagcacggaacgagcagacggccag

SEQ ID NO: 311125 - DNA, 122 bp, Homo sapiens
gctggtgacggcggggccgggcaggggaccggggccgcggcccgggagcgggccagctgccgggagccctgaatcaccgcctggcccgactccaccatgaacgtcgcgctgcaggagctggg

SEQ ID NO: 311126 - DNA, 122 bp, Homo sapiens
ttatcttagcagttcattctaaagccatttccgagtatgaatagataaaggctccagctccgcaccctttcagagcctgtttcatgatcagaggagaagccccgggctttcatctcctcccg

SEQ ID NO: 311127 - DNA, 122 bp, Homo sapiens
cctgcgcaggtgctgctgagcgagcccgaggaggcggcggctctgtatcggggccttagccgccagcccgcgctgagcgccgcctgcctgggcccggaggtcaccacgcagtacggcggcca

SEQ ID NO: 311128 - DNA, 122 bp, Homo sapiens
ggctgagatggtgggaggggtgtgccggcccagaagacctggactgtgggcggtggctaccgcctgaaccacctcggttcctggggcttctggccgcagcccctcggtgcgctcttacccag

SEQ ID NO: 311129 - DNA, 122 bp, Homo sapiens
tgcgaagaccctgcttctgagccacaggctgaggcatggatggggagcttcctggaataccgtgagctcctcagcagctcccaggcaagctctagagagccgctcacctgggagctgcaggt

SEQ ID NO: 311130 - DNA, 122 bp, Homo sapiens
gcggcgggccgaagggctcctcaagtgccgccaaagtgggaacccaggcagaggaggcgccgagagcaagcgagggctgtgacgactgccagcacgctgtcacctctcaatatgagttaatc

SEQ ID NO: 311131 - DNA, 122 bp, Homo sapiens
tatttattaaaaagggtcctacagctttacagccacagcaccggacacggccctggacagcgacggcgagcccggccaggggccgctttgcaacttcaatgccaagctcacgtctggctgcg

SEQ ID NO: 311132 - DNA, 122 bp, Homo sapiens
atatattaatattaatttgccctctgcaccacatagagttttcttggttcagaaagtctccgagctgacctttcattggcttgttaatttttcctcaactattgctttcccctcccccgaag

SEQ ID NO: 311133 - DNA, 122 bp, Homo sapiens
gagttggggtagccctcactgcaattgcccagatccctgggcagcaaggagactaacaagcgccggcgaagggcagcgggtctagaaccttctgtgcccagtcggacgtgagccaggggagg

SEQ ID NO: 311134 - DNA, 122 bp, Homo sapiens
ggttcctgtgtgtccagacaccaggttgtggtacttggattggcaagcacacaacgccctcgggaaaaagagatgggtagtagtcagctgccatagacctatagctctgcagtttaaggtcc

SEQ ID NO: 311135 - DNA, 122 bp, Homo sapiens
gaggcgggacgcgcctttcctcctcccgggctgaccgtcctagccccccgccagacaaaacgacctcacccagcgggcgccttccactagagagcaccacccaccccgccccaccctgtttt

SEQ ID NO: 311136 - DNA, 122 bp, Homo sapiens
aaggtcaacacggtagctctcgtgataaaaattatgagacactcaccccgtgtggaatcacgagagacgctcagcccgtggggagtcacgagagacgctcagcccgtggggagtcatgagag

SEQ ID NO: 311137 - DNA, 122 bp, Homo sapiens
cagtggtagcatctgaagtattggagtgtttctgccacgaagcaaagctccattcatggccgtcatggaaggttatttattaatgttacataatggtagaatattactagttagagggttgg

SEQ ID NO: 311138 - DNA, 122 bp, Homo sapiens
cggggcggaggcggaggccggcggggcagctagcgcagtgaagtttggcggcggaggggccgggcgtcccggggtcgcgaggaggcggcggcggcgcggggaccggggccatgggggcgggc

SEQ ID NO: 311139 - DNA, 122 bp, Homo sapiens
acagtttctttcttcctgaattccccaaagcgcagagacagacaggatctgccaggacagcgcgcagggcggggcggggacaggcgcgccaggagcggggcgggcttccagccgctggtttt

SEQ ID NO: 311140 - DNA, 122 bp, Homo sapiens
gtgcactggttcaggggaggagggggaagtgcagagatctctatgccactgtgcttacagcgaggcaagattaatcattatctctgcgcattttgttttacttgtctgtgtatatagtgtac

SEQ ID NO: 311141 - DNA, 122 bp, Homo sapiens
cgccggggacctagccgggaccgcagctccggaggccttgtgtctgtgccctctgctgtgcgcgcgtctccaaggtggcgctttcgggcgctctttggagaggctgtttcttttcctctctc

SEQ ID NO: 311142 - DNA, 122 bp, Homo sapiens
acaatggcgcgagcgtgacgtgggccggaggcgccgccgcggcgcggaggaaggggctgccgtgggactgtagagtctgtagagtcttttggaatttatgtgattacaatcttgcagtctgt

SEQ ID NO: 311143 - DNA, 122 bp, Homo sapiens
atgacatcatagttaattcaccttttctaccttctagggagatggacccgtttaaacctccgagatgagctgctcagactctacagcatgacgactacaatttcttttcataaaacttcttc

SEQ ID NO: 311144 - DNA, 122 bp, Homo sapiens
catccagattcaggcctcattttgggtttctagtctatttgacaactttgccaagaaaaacggatggctgtttgtaccactctcctcatgctctctccttgcaattgtgacccatgaggagg

SEQ ID NO: 311145 - DNA, 122 bp, Homo sapiens
tgccccgccttcctccgcctcagtgggcctggagggttacagtgtggttccctgtggccccgggctgtgggaatccggggagccgccctccactccccggaaccttcctctcggcagaccct

SEQ ID NO: 311146 - DNA, 122 bp, Homo sapiens
tcagtgcctgccttggctctgctttctccaaacctgtccccatcggtcagctggggtggacgagtgttttccatcttgcaaagtcattgtgtggggaagatgagatattccacgtgaagccc

SEQ ID NO: 311147 - DNA, 122 bp, Homo sapiens
cagtggctcctgggatcgcgactccggagtcggtgagctccgactctgggcctctgggcgcgcagcggccatcttgtgcccaagccccgcccccaaggccaatgttcgctctgaaagggggt

SEQ ID NO: 311148 - DNA, 122 bp, Homo sapiens
ggaggtcagcagtctgttcttggctgggtcaactctgcttttcccgcaacctggggttgtcgggggagcgctggcccgacgcagtggcactgctgtggctttcagggctggagctggctttg

SEQ ID NO: 311149 - DNA, 122 bp, Homo sapiens
gtttgtggcagcagtagccaaccagagacggaattctgagggttttttatcttctgtccgcggagccccctaccagtccacgagtattaagttatttacactacgattggaactgttgacct

SEQ ID NO: 311150 - DNA, 122 bp, Homo sapiens
agtcaccagcaagacttgcctgaggtgagctccgcacatccgcgttgggacttgcagacacgccttcttctcacacaaaccttacccagccccgccgccgcggcggactccgagggtggtgc

SEQ ID NO: 311151 - DNA, 122 bp, Homo sapiens
actgtgtctgccagcttttcttcttccatttcctcgggagcattgagtgcttcttgtttacggtgatggcctatgaccgcttcactgccatctgttatcctctgcgatacacagtcatcatg

SEQ ID NO: 311152 - DNA, 122 bp, Homo sapiens
ctggaagcccttcctttctcggactctgacttgccacatggctttgctcagatgctcagtcggcgggcagcagatgccttaagcagccactgccgggtggatgtcccatctggaaagatcag

SEQ ID NO: 311153 - DNA, 122 bp, Homo sapiens
gggtgcttggacaaacactagagctccccaggccatggcaaaaacagaggacgatgccagcggcgcgttctcctggaaacggtccgcggcaccgggaaaagcgaaggcttcgtgtgtctcag

SEQ ID NO: 311154 - DNA, 122 bp, Homo sapiens
tttactccagatcagaatacctgggattgcatatcaaagcataataataaatacatgtctcgacatgagttgtacttctaaagcccactgtagatagtgtatattgcttttcacttcagaat

SEQ ID NO: 311155 - DNA, 122 bp, Homo sapiens
cccccactctcgcccgggccccgcgcccttcccacagacgcccccccgcacgcgttacctcggtggtctctattctcacgcagacgtcttcagtgggtttctctcagtcaaatacaaatcat

SEQ ID NO: 311156 - DNA, 122 bp, Homo sapiens
gcggcgcccctggaggcccccttcctgccttggccagaggggcggggcgtaggctgggggcggggccggagagtgggcggggcctggcgcgtgggcggggctccgggcgggccggccgccga

SEQ ID NO: 311157 - DNA, 122 bp, Homo sapiens
gcggcaccacctggagtttgggaagttcctgctctcggaggaggttggtatactcaccctcggtttctgctgtgggcgctggggacgcagcgtccgcaggacggcagggccgtatcctgcgg

SEQ ID NO: 311158 - DNA, 122 bp, Homo sapiens
tggcggtgcggctgtcgcgcccgcaggggacccgcggctcttacggcgccttctgcaagacgctcacgcgcacgctgctcaccttcttcgacctggcctggcggctgcgcaagaacttcttt

SEQ ID NO: 311159 - DNA, 122 bp, Homo sapiens
atcaaagtgaactgtcccaagtaactcttgtctagaagctgggaagaagcttaagcagctcgctttaatgatgatttgtagctcggcgaggggcacggacagcaaacaccccgcaggtgtgt

SEQ ID NO: 311160 - DNA, 122 bp, Homo sapiens
cctcaggccgttcctcaactaccagaggatgtactacgtgttcatccagatgctgtccagcgggcccgcctggctggccatcgtgctgctggtgaccatcagcctccttcccgacgtcctca

SEQ ID NO: 311161 - DNA, 122 bp, Homo sapiens
gtgatttatgtggagtggttcaaaacagaagttaatcactcgggaagcggacgggaggggcggcgctactgcgcatgcccgggagccgcctggagtttggaactccacattctttcagaccc

SEQ ID NO: 311162 - DNA, 122 bp, Homo sapiens
acgccatgaaagagaggccagtagcatgtgcggggcagagagggagccggcttcttagcccgtggagagagaaagcaggaactaaagccagcaccaacgggaagggctgcatctggagagag

SEQ ID NO: 311163 - DNA, 122 bp, Homo sapiens
gtaaacgcgctgcctgcgaggtgcgtggactcgggagctctgacgtaaacgcgctgcctgcggggtgtgtggactcgggaactctgcagcttctttcagctccagtttccttgtggacaaat

SEQ ID NO: 311164 - DNA, 122 bp, Homo sapiens
ttaaaactcgtggatctttctgtgaaactctgaaaactaaatagcattccaggccgggcacggtagctcatgcctgtaatcccagcactttgggaggctgaggcaggcggatcatttgaggt

SEQ ID NO: 311165 - DNA, 122 bp, Homo sapiens
agcacagggtcaaatcccaaggacaatctatgttaggccagcagcaaatgaggatgaagacgcaaatgggagagactaagaggaactgtgcagggaagtcaggggctgcagcagcccagcca

SEQ ID NO: 311166 - DNA, 122 bp, Homo sapiens
gggcatcatcaagatggtgagaacgggccccggacaccgacccctctgcctgccttcgggcgggagtcaggcattgactccaccttccgccagcctgctccatgtcccagatcccctttcct

SEQ ID NO: 311167 - DNA, 122 bp, Homo sapiens
ggcgagggcgggtgccatctttgttgagggccaaagcgggccctagtccgttaatttacgcgggagatggaaatgaatacagccactcaggaatcctcaaagttcctaacctcgtgtttgct

SEQ ID NO: 311168 - DNA, 122 bp, Homo sapiens
ccggaacccgagcgggggagggggaggcggcggcctgttggccccgggacctccacgtcgcgcgcaggccactaacctgtcagcaagaatgtgccagtggtcgcggggctcatcctgcgtgt

SEQ ID NO: 311169 - DNA, 122 bp, Homo sapiens
ccctcctcctcctcgccgcggcccacgtgaggggggcgagtcacgcgatttccgggaacccgtcaggaaggacataaacaaaacaaacccgaggcagcatggagaggggccgtggcccctgc

SEQ ID NO: 311170 - DNA, 122 bp, Homo sapiens
tggctctgactgcccatggtttcgcgcgagtggtgggcacgcttcggtttacctcccccgcgggtgacagcccagtgcttccaccacaaccgatgtcaactctcctagcgcccctccgctca

SEQ ID NO: 311171 - DNA, 122 bp, Homo sapiens
gaatatttattgcctctttgctgctaggaaaaatatctccctggacggggcgtttctactcgctgctggatccctcttatgctaagaacaacatccccatcattgcttctgtgtctgagcat

SEQ ID NO: 311172 - DNA, 122 bp, Homo sapiens
tgccctgcactcacaccttctctcccgctccccgcaggccacggactctgactacgaggacgcgctgcccaagcactccttcgtgaaccactacatgagcgaccccacctactacaactcat

SEQ ID NO: 311173 - DNA, 122 bp, Homo sapiens
cagtgggaggaccggccactacgggaattcctccactacccatcgcagacagagtggcagcggaaggagggactgtgccggaagatcattcactacttcaacaaaggcaaggtatgcatcat

SEQ ID NO: 311174 - DNA, 122 bp, Homo sapiens
gagcaacccacgtgaccgccgacaaccgagcgcgtgacgcaaagcggcgggcccaacgctcgccttgtcttttgggaaacgtagttctgatggcagccaagtcggccaggagaggagggcgt

SEQ ID NO: 311175 - DNA, 122 bp, Homo sapiens
taacgccatttgaccatctctgcttacagcacaatagttcaaatctcagtgtcttgccaacgtcacctcatcaaacccttaacctgcttccttgactctattgctgagttgtttctttttgt

SEQ ID NO: 311176 - DNA, 122 bp, Homo sapiens
tcctggacttcgagcggcaccttgacaggatagcccgaggcagcacggcgttcccgcagacgctgggcctgccgctgggcctcaactcgcttggcttgcagcttgcccagctcccgtgcagg

SEQ ID NO: 311177 - DNA, 122 bp, Homo sapiens
ctgcatgtcactctccacttcgccacggtctgaactcttggccacaagatctaagccttccggatgccccagccagttcaggctgctggtctcttgtccctaagcctttgccgaggtagtcg

SEQ ID NO: 311178 - DNA, 122 bp, Homo sapiens
ggaagaatctgaatcccagggaagaagcacaccatcctaaaccggcaagggatatcgctgcggaaaaccccagactcgagggcctccacgtggcccccgacgtaggtctcagagtccagcac

SEQ ID NO: 311179 - DNA, 122 bp, Homo sapiens
ttggtgacatgcttggaggatgcagcagttatacacctggcacatgtgtatcttggtcgtcggaatgagaatcccattaaaacctcccacgtgatcagaacaagttcagaaaaatgaggatt

SEQ ID NO: 311180 - DNA, 122 bp, Homo sapiens
gtggcctcatcctgggtcaggtaagagagggcaggtaagtcagttgttgggggacctgcccggtcactggatcttgttcctgagggatcaggcacttctgagaccttgtctgtggggtgcag

SEQ ID NO: 311181 - DNA, 122 bp, Homo sapiens
tgtgcgagctgtatcaccagtggcaacttctgcatttgcctcgcttagcttgtgtgttttcgcctgcgcaaatgttctgcctggattcttctagaaaagttcagggcatggagtgctttttt

SEQ ID NO: 311182 - DNA, 122 bp, Homo sapiens
ttcaccagcagcaaccaccgcctgcgtgccttacgccccttcccggccccctggcctccccggcaccaccaccagcagcagcagtagcagcagcagcaacactggtctccggggcgtggagc

SEQ ID NO: 311183 - DNA, 122 bp, Homo sapiens
cgctagtgcactaggattgcaaacgtcagctctgaaataaaaagcaggatatttctgccccgctcctctattccggaagctgggaggttctgtgggagaaaggacctgcacccaataactca

SEQ ID NO: 311184 - DNA, 122 bp, Homo sapiens
aaatttgcatagtcaggctctaaagatgagctcttaattactataatatataggaggcaacgtatccagcttctgtgggaatacctctagagaaggggatgtcaataacacatatacagctc

SEQ ID NO: 311185 - DNA, 122 bp, Homo sapiens
cgcatggaagttggctgggtagtttattctagacacgtgtgtttgtgactcagcctttcacgtgctgggttttaggagtcattattcatctgaagtagcagaaaagggatggcgtttccccc

SEQ ID NO: 311186 - DNA, 122 bp, Homo sapiens
acctgtaagagttcaaattcctactctaacctcagcctaccttccagctttatcctgtggcgctccatggctttgctaatttttcacctcagccacattagatttttcctaccccacaattt

SEQ ID NO: 311187 - DNA, 122 bp, Homo sapiens
cacccttggcaggttggaggttgggagcagggagctggtgccagccgtgatgctgcagaacgggctgcattcccggaagcacagccagctggagacccctgatgctggtgggcctttctcac

SEQ ID NO: 311188 - DNA, 122 bp, Homo sapiens
ttttgttaaaagaaagactttagacaaattaaatttaacagagtttaattgagcaaagaacgacttgtgacttggtcaacccccagaacaagaagaggtacagagcaactccatgctgctgt

SEQ ID NO: 311189 - DNA, 122 bp, Homo sapiens
tatctagcaaatatcccatctcttgaggctagcactaagcgatcccacctagtggtcacccgcagcctccgctccctcttcaggcccagcctggggcctgtttcaatccactgagtgcctgt

SEQ ID NO: 311190 - DNA, 122 bp, Homo sapiens
aagaataccttttgaggaaaacataataaataaagaactaatttgataagctgtttataacgaggtctgaggctccaaagtgcatgtgcagataagaaacggttctgaacttgtctttggaa

SEQ ID NO: 311191 - DNA, 122 bp, Homo sapiens
ctccatgaccaggacaatgtcgttcttagactcgaaggcatcgtacagctggatgaggttcgcgtggtccagctggttcatgacgctgatctcgttcttcacctcctcctgagaagcaggaa

SEQ ID NO: 311192 - DNA, 122 bp, Homo sapiens
tggtcctagctcagcgctcccggaggtggagcttctgcaggctgggtgctgccgggcctacgggcacccaccccctggctcagtgccctgggtattctgactcagtaggtctggggtagggc

SEQ ID NO: 311193 - DNA, 122 bp, Homo sapiens
gttttggtatgcattttttttttattttttcaactttttgcaaagcagcatagcaacaatcgtgattgtagcacttgcctgaggttgtggtcacaaccaacgtagtaaacatcatttgcata

SEQ ID NO: 311194 - DNA, 122 bp, Homo sapiens
cagatcaccgagttccgcctcctttctgacctagcctaagaggccggaaggcgccaagggcgtaggaggtgggtggttgtgagggaacgcccccagccagctcacttccggtgggcttcaca

SEQ ID NO: 311195 - DNA, 122 bp, Homo sapiens
caacactgggaagcctggggatgtcaaaggtggggcagtctttcctccagctcccctccccgtccctcccacctcccgctgcaaggcgtcaggacagcagggcccagcaaccctgtgaagca

SEQ ID NO: 311196 - DNA, 122 bp, Homo sapiens
aaccaccatcaccatccatctccagaaagatttcatcaacacaccatgtttcaaacttctcgattttataaagtgcctctcattcaaatagtaacagctgaagaaaaaaatgcaggtaccat

SEQ ID NO: 311197 - DNA, 122 bp, Homo sapiens
cacacacacacacacacacatgctcaacaaatttatgctatttgataagaggcaatttgacgtcaagagaagaactgtttggcctaggctctatgccaagtcttggttgtgccactaaccgt

SEQ ID NO: 311198 - DNA, 122 bp, Homo sapiens
cattttgggggctgaggcactcacggggcctccccaggtttcactccgtttctacacagtcggagccccatggatctcccatctcccggaggaaccgtgaagccaaacagaagcgcctgcga

SEQ ID NO: 311199 - DNA, 122 bp, Homo sapiens
gtcttggactggacgggctggactcccagctgaaggtggcttggaatttagctgttccttcggggccccgcttacacaccaacacccatgaatgcttttcaacgaagttgctagaatgcagc

SEQ ID NO: 311200 - DNA, 122 bp, Homo sapiens
gctgcattcacaacgtctgcagcatttatctgtttgatctccattgtgctctcctacattcgcatcttctctacagtgctgagaatcccatcagctgagggccggaccaaggtcttctccac

SEQ ID NO: 311201 - DNA, 122 bp, Homo sapiens
tatttttaattaaacagattcaacgtttcctttctctccctctaaagcatcagataacttcgcaaggaaaagtgctattacattatctacttgtttcaaaaatatattcacaccatagtctt

SEQ ID NO: 311202 - DNA, 122 bp, Homo sapiens
ggctgcatccctgaggagaaaacttaccggcgcttcctggagctattcctgggcgagtttcgcggaccgtgcggcggcggcgagccggagccggaacccgaacccgaacccgaacccgaacc

SEQ ID NO: 311203 - DNA, 122 bp, Homo sapiens
ggtcccgtgtctataaaactttggaaaatgcacacccatgtttagtgacagaaagcagctcgggggtttcctggggactggaagaagccctggaaggacagcaggactggggggcttgggcc

SEQ ID NO: 311204 - DNA, 122 bp, Homo sapiens
agaaaaaaggttattaaaaacccaagggggccagacacagcgattcatgcctgtaatacgcgcactttgggtggccaacgcaggaggatggctttaggccaggagtttgagaccagtctggc

SEQ ID NO: 311205 - DNA, 122 bp, Homo sapiens
aggcgctccccacatctcagacgatgggcggccgggctcctcacttcctagatgtgatggcggccgggaagaggcgctcctcacttcctagatgggatggcggctgggcagagacgctcctc

SEQ ID NO: 311206 - DNA, 122 bp, Homo sapiens
tggaggcctcgctgaggaacgacgccgaggaaggtaggcccctctgtgccttggcggccacgcagctgccttggcctctgatcagggtttggaatccaggttctgtgcagtagacgtgtggg

SEQ ID NO: 311207 - DNA, 122 bp, Homo sapiens
ctaatttttgcatttgtagtagagacggggtttcaccatgttggtcaggatggtctcaatcgcttgacctcatgatgaagtctggggtttttaatggataaacaactcattggggtatgaag

SEQ ID NO: 311208 - DNA, 122 bp, Homo sapiens
cttcctgaacaggggagccaggggaggagcatgcacagcaggaccgggttctgctgtgcccgctacagcgcgataaggcaagcagggcggcacatactggcacttcttcctttcagtgcttc

SEQ ID NO: 311209 - DNA, 122 bp, Homo sapiens
gggttcagatcccaggccctcctcctactcactgtgagaccctaggcgagtcccttagctcgggagcctaattccgcttcattaacatgggggtaatttaactacctagctagacggttgca

SEQ ID NO: 311210 - DNA, 122 bp, Homo sapiens
ataaaagaaaaacatgtcacagatctgcaaacattctacacagctttgcgcccattcttccggtttatagtggccctccatacaactgttgggtctcttttcaacatcatttgctcatccta

SEQ ID NO: 311211 - DNA, 122 bp, Homo sapiens
gttaaaatctttctttctttctttttttcccctgtagagaggaggattcatgttcttgcccgggatagtctcgaactcctggactcaagaaatcctcccacctgagcctcctaaagcattgg

SEQ ID NO: 311212 - DNA, 122 bp, Homo sapiens
ttaaagataaagtcatttagggttttactgagtatgtaaagactcaaaaatgaaaatgtccgactaaaaagcagagtgtccgaaccataacttttgatgccaaaactcatgcaactacctca

SEQ ID NO: 311213 - DNA, 122 bp, Homo sapiens
tttatcatccccccaacatccactttcatgaatgcactcacactaaaacatcagaggcatcggagacttagtaagtcaccccacgcaggggtatttgtgtttcaatagaaggtgtaagaaag

SEQ ID NO: 311214 - DNA, 122 bp, Homo sapiens
tcactgcgggctaccgccctgggtgggtttggcaattgtcctgctcgaggtggttcaggccgcccacaaggggcacagccgggcagtcaggaaccggggctgccggctgggctggcctgcaa

SEQ ID NO: 311215 - DNA, 122 bp, Homo sapiens
tggaagtatcttgaacggctctccaaatccaaagattatccatactctttatccctccagcgatgtgtaaaaccagaaagtatgaaacactggaggtggacatctggtttttatttctagga

SEQ ID NO: 311216 - DNA, 122 bp, Homo sapiens
agggggcacaacaagagcgtctgtgagctggtgctgtctggagggatcttggctcctctccggctatctgaccttcctgaagacctgctcgcacactgcatcccttgcagtcagttcctggg

SEQ ID NO: 311217 - DNA, 122 bp, Homo sapiens
tcccattagattattcctggatcccagcacagggcttagcacagaattccaggcctgtcccgcacccagccagctgcccccacttcctctcccacattccacagaactatggccacctgagt

SEQ ID NO: 311218 - DNA, 122 bp, Homo sapiens
tgggacggtcactgtggctgagttagcagttggctgcttgttgttttcttccgtttgtggcgatcctttctttcccagatgacccctgttttgtgacgttcattcttcccatttgtcattga

SEQ ID NO: 311219 - DNA, 122 bp, Homo sapiens
caaaatcctgggctcaagccatctgccctcctcagactcttgaagtgccaggattacaggcgtgagccaccatgcctggccaacccagcagatctttaattcacaatctggaaaaaccatct

SEQ ID NO: 311220 - DNA, 122 bp, Homo sapiens
cccgctgcccatggcttctcttttcacctccaggttttcatgctggcttcagagtttggccgtgctccctcagcgttcctaatttcccactttctgactctcaccatttgccactcttgtct

SEQ ID NO: 311221 - DNA, 122 bp, Homo sapiens
ccaaacattccataaggattatccagctctgcgtcaacactgcctggagcaggaggacagcgaggtgaagagggccgagctctcctattcagatggaccttgtcattttgttttattccccc

SEQ ID NO: 311222 - DNA, 122 bp, Homo sapiens
agtgcagggataacaggcatgaaccactgtggccagacttcaggtctcatttctgaactgcgacatcatatcatacaaggggggggatggagtttgacagcagtggcgtgtttgtgtgcaat

SEQ ID NO: 311223 - DNA, 122 bp, Homo sapiens
ttcagaccccaaacgccccttcgatgtctcagctgggacctgggtcccggctcagcctcacgcggcgtcccagtccctgcccatcagtctgggcctcacggtcaggccctcagtgacagcag

SEQ ID NO: 311224 - DNA, 122 bp, Homo sapiens
ggaggaggtggcacctggcagctcacctggtgtaccttctgtgagacccagccagcccatcggtcaccaaggggtgcatgtcacaccctgacctgcctgacggagggagcccatgaagcaga

SEQ ID NO: 311225 - DNA, 122 bp, Homo sapiens
ggggaaggggaacaggtgtcagaaaccttttgaagatggcaactgctctctggagaaaaacgtgtgcaagtaacggaaatgtgtatgcagcctcaagcgctttgtggagaactgagcacctg

SEQ ID NO: 311226 - DNA, 122 bp, Homo sapiens
actagcacggatttcctttgactcacgggctctgctcgacctgaagggtttatcgacaaccgctttgctgctatgaaacgctctattaggaaaactgtgtcttcaggccacggggaggggaa

SEQ ID NO: 311227 - DNA, 122 bp, Homo sapiens
ctgtagaacacaaggcagctcccaatgctgccagactctctgaaccctggagagtgtaaacgtcatataagagtctatgttccaaaaacctggatttaacaatctgagctttgtcatggtgc

SEQ ID NO: 311228 - DNA, 122 bp, Homo sapiens
ggatccttggagagttattccttcctctcacttttctaggtccatcatttaagggaaaagcgtggcttattcaagcggatgctggtgaaattggctagtgtgggagacagaatttgggtcta

SEQ ID NO: 311229 - DNA, 122 bp, Homo sapiens
aaagggatttgtgttgggctaagcggtactcagtttcccagggtccagtaacctggattgcgtttgtgggttttgtgggaggaggtggccgaaggccaagccctccagggaaccgagtcttc

SEQ ID NO: 311230 - DNA, 122 bp, Homo sapiens
tcactatctcacactggccgtcttgacccagagcagttctttactttctcgggacacaaacgggatgaaagtccagggctgggacttcctccttggaatgtttgacaaggactgacgtactc

SEQ ID NO: 311231 - DNA, 122 bp, Homo sapiens
ggtgggtggatcacctgaggtcaggagtttgagaccaccctggccaacatggcaaaaccccgtctctattaaaaatccaagaattagccaggcatggtggcacgcgcctgtaatctcggcta

SEQ ID NO: 311232 - DNA, 122 bp, Homo sapiens
gagtgacagggccgggaaactgaggcgcagagtggggcgtgcttgcctgcagtcacatagcgactgaggaggaagagctgggacgggagccagctccgtccacctccaggtcctgcctggcg

SEQ ID NO: 311233 - DNA, 122 bp, Homo sapiens
aggttataaagaaaataacagctgttggttcacttttattccctcgctgagagttggtggcggctgggatgctgactgacggttttgattacatgaggaggaggcacggaggcaagctgact

SEQ ID NO: 311234 - DNA, 122 bp, Homo sapiens
tgagcccgatggagtagcagacatctctgtgcttctcatcggagcgcagcttcacctctacgcccacctcctcctttttgcgctcaatgtgctctagagtgtgctgcaccaggtagcccacc

SEQ ID NO: 311235 - DNA, 122 bp, Homo sapiens
agggcccctccatgtctgaactcggaggccgagcctcctgagcagtttcccactctcgcccgagcagctttcggctgcagggggtgctcctgggtacatgacctcgtttagtctgcaccaga

SEQ ID NO: 311236 - DNA, 122 bp, Homo sapiens
gaggtggcgcgcatgtgcgaacacgcacgcagggagaggtgcacaagcgcaggagtgcaccggaagtccgcctcccgggacacccaccgcgggtcccaggacaagtaacggactctatttcc

SEQ ID NO: 311237 - DNA, 122 bp, Homo sapiens
aatgggcgggaggctgtggggatagcgagacacccagcgacgacgaggttgtcatggtgccgcggggccgtgctcgcgcatgcgccacctgacccacaggccggtcgtggagctgcgacccc

SEQ ID NO: 311238 - DNA, 122 bp, Homo sapiens
cgaggcgggggcggggcctcggaacgcgacgccccccgtcccagctttagccactcgtgacgtcattgcccggactccactgcctcctgcgccgcgcttttgccaccctgggcacgtcatcg

SEQ ID NO: 311239 - DNA, 122 bp, Homo sapiens
cgtcagctatctttagtgatcctgtattttaggtgtggcccaagacaattcttcttccaacgtggcccagggaagacaaaagatcggacaccgctgcaccagttgctgggatacatgcctct

SEQ ID NO: 311240 - DNA, 122 bp, Homo sapiens
acttattgaggacatgaaattagtaagaacacagtgaagcaactgattgctttctgagcccggctaatcactggactttagcttcatcataagcaaagtcatatgcaaggtcatcatatgcg

SEQ ID NO: 311241 - DNA, 122 bp, Homo sapiens
aacattcctaaagaattccaattataactgagacaatattatgacattaatacctgacctcgactagtcactcgattgtgttaacaaatcttcagtttgcaatgaggccagattgacataag

SEQ ID NO: 311242 - DNA, 122 bp, Homo sapiens
gttattaatctggtatgtctagtattttttaaaggcatattgtggaaaacattgtttcatcgtaaagtgtggtgacttagtccctgaggtctggagccagctgcctaaattaataaatcttg

SEQ ID NO: 311243 - DNA, 122 bp, Homo sapiens
ctggctccctcgctcgctctcgtgtgcctgttctgcagctcagtcaagtacagccgccctcggaaagtgcaaagcagccacgagacagatcgggctttgttgctaatttcccagggtgaaaa

SEQ ID NO: 311244 - DNA, 122 bp, Homo sapiens
cagtatgaacttggtctagaaccaagcgagcatagtttccattcacttccagggccactgcgtgccactgcccatcattgacctgaatgctctgaacagagacaattccagggccacttcca

SEQ ID NO: 311245 - DNA, 122 bp, Homo sapiens
aagcgggaaggggcgggggcggagcagggggcgtggcggagcgggagcgcggtcacgtgacgtgcgtggcgacgtgtcggccatcttgtgttgttgaggctgaggactgactggggttctga

SEQ ID NO: 311246 - DNA, 122 bp, Homo sapiens
cctctcaccaaaccagaaccaaaaggcgcctaacagaaaaaccagggctctgtcctccagcgccctggaaaagcgggcagtgtcaaagacagggatgccctcgtcagggctgcctccctctc

SEQ ID NO: 311247 - DNA, 122 bp, Homo sapiens
ccacgcaccggggctccgctgtctctgcttggctgccttaacctgcgtgggtctggagaccggagggagaaaggctagatccgcagccttgggctgctccgaacttaatgtctttccccagt

SEQ ID NO: 311248 - DNA, 122 bp, Homo sapiens
cgtgcagcgcctgaccatgaggaacacaagcaaggaacttcagggcgccacgcaccgctacgctccctgcggtgagtgcgccctgagcgcgtcccggccagaaagagctgggtgcgtgcact

SEQ ID NO: 311249 - DNA, 122 bp, Homo sapiens
agcgggagcccgagagagccgcgtcgggagtgcggtctccatggcagtgctgggcgcagccggagagaggtaagacgacccctgcctgccccgtcccctgtgttgcctccctttccccctca

SEQ ID NO: 311250 - DNA, 122 bp, Homo sapiens
tgtgtggacaggacagaaaactgactaattacagctgtacttagtgccaactcccaggcacgcctccaagcaccacaaacttcttgcccccccacaaacttctcaagatgttttacagcttt

SEQ ID NO: 311251 - DNA, 122 bp, Homo sapiens
ttgggctccgtctaatccaaatgacacggggtgtcaggagcattggtaatcgtgtcctgccgacttcaaagcccactgccaaaacatccacagcacagaggtttggcaacttcacataatca

SEQ ID NO: 311252 - DNA, 122 bp, Homo sapiens
acgtggattatgacagtgagccagagaatagatatagtcctaaggttgtacttctgttcccgctagatgaaagtaagctgcttctagtgttctctgctgaatgggaaaaaataacatttggc

SEQ ID NO: 311253 - DNA, 122 bp, Homo sapiens
gaaaccagcatctgcacctaaacccatacccacccgtgtgcgcccacagggggatgtgtccgaatgggcagcttaaaatgtggtcacctgtgggggaaactcttcaggcacctgaagtgaga

SEQ ID NO: 311254 - DNA, 122 bp, Homo sapiens
agacgcttccactgacacgaaatgcccaagagaggcacagccggcgacagaacggggacccgtgtctgccgccccaggagaggctgcaggccggaaactggaggattacagggcgcgagtgt

SEQ ID NO: 311255 - DNA, 122 bp, Homo sapiens
aggtttcttccttccctgcaggaggctgtggcaaaaagccagcattcacagtaagttcttcggtttacaaactatttcttctgtggtgggttatttccactgcattccaaagcaggctctgc

SEQ ID NO: 311256 - DNA, 122 bp, Homo sapiens
ttagttgtggctaattatcagtcacacctgttgttgttctccacatttgctgtgcatcagcgtcacctgggaagttttcaagccctaaccaaattagttatttgagactatctgggggcgtg

SEQ ID NO: 311257 - DNA, 122 bp, Homo sapiens
ccggcacctactgggtttgatcagaggctgggtcctgcgtggatctccgttctctcttcacggggtcgctagccacaatggagagtctccgtctgtttctcctttcttttctttccctcttg

SEQ ID NO: 311258 - DNA, 122 bp, Homo sapiens
taagggagtgtgtgcagagtatgtcccgaggttttctcctcagtcaagcagactacatttcgccaggtgtaaaatcggtagtttcgaattcaccccttttcatggccttgaggagatgcttg

SEQ ID NO: 311259 - DNA, 122 bp, Homo sapiens
acgccaagtcagtggtgtcacatccgggcacccggggattccctcggttgaaagcaggggcgaaaccggattctaccagaatgtagggataggggggtgagggtagggtagatgagggtggg

SEQ ID NO: 311260 - DNA, 122 bp, Homo sapiens
tcatcactgttagactcggggtcgatacccgtcatcactgttagactcggggtcgatacccgtcatcactgttagacttggggttgatacccatcatcgctcttagactcggggttgatact

SEQ ID NO: 311261 - DNA, 122 bp, Homo sapiens
ccagtttggggagtagcaacttagttctatgtacaggccttggaggagatggctgctctccgctgggccccattcgtttttacttaaatgtgtgtgtaatgaggctaactccaggacagtgc

SEQ ID NO: 311262 - DNA, 122 bp, Homo sapiens
gaagctcctttcttttctgtttaaatttcccgcacccttttacctccccgccttctcaaacggtctttactttgagcagcagagacccggaccgctcaatacccggctatccctgggagggt

SEQ ID NO: 311263 - DNA, 122 bp, Homo sapiens
cagttatctgagaaaccccacagcctgtcccccgtccaggaagtctcagcgagctcacgccgcgcagtcgcagttttaatttatctgtaattcccgcgcttttccgttgccacggaaaccaa

SEQ ID NO: 311264 - DNA, 122 bp, Homo sapiens
tcttctcaggactgtgccatctgtagatagaccagggccttagccttccttcttagcaaacgaagtgtatcagttcataggaaaccactctgctgatgacactcaacatctgaacacaggac

SEQ ID NO: 311265 - DNA, 122 bp, Homo sapiens
ttttctgaatttaaattattccagcataataaatcctatagattacacagggaagaaatccggaaagcaaaccaaggaattcaaaatagaaattcaaaggaaaatgtttgggtgtctggtag

SEQ ID NO: 311266 - DNA, 122 bp, Homo sapiens
aatcagggaatgtgaaaagcggtacatgcgaagaggaaaagatactgcagtcctggagttcgacctctgcagaggacatctggaatgctctggtccaacacgaaaaagaagaaataagcgat

SEQ ID NO: 311267 - DNA, 122 bp, Homo sapiens
cccacgaggggcaggccagcccggtgcgccagggaaggagcttgatggtgtgtacggctacgtagtgaacgtggaggtgtgcgcagcggagtcagaggggctagatccccagcatttcccac

SEQ ID NO: 311268 - DNA, 122 bp, Homo sapiens
ggaagcgcgggatcccagagcatcacggacgagcccgcgacgccccgccccgcgcagcgacgccccgccccgcgcagctccgcccccacgaagccccacccacacgccatcgatgggagagg

SEQ ID NO: 311269 - DNA, 122 bp, Homo sapiens
tgagtatgaggcagggagctggacaggaagaggttctgatgaggctctggaccaggggttcgtggttccagagaaataagatgtggctgtttcgaccgaccggagatctccctccttctgcc

SEQ ID NO: 311270 - DNA, 122 bp, Homo sapiens
tgctgcgggttccatgctgtagcagggacaggacccccaccccctgtcccgtctggccaccgacttcagcagaggctcggctgccgtgagggataccagtcatgggaaaactggcctccctg

SEQ ID NO: 311271 - DNA, 122 bp, Homo sapiens
cctcctccttcgtaccaagctagtggtcttaggacttgtgcttagagagacccctgtccccgcgaataaaagggttacatcttggggcgggggctctctgcgggcttggaggcagaggactc

SEQ ID NO: 311272 - DNA, 122 bp, Homo sapiens
tatttcttggacacagctgaacgtatactgtgcgcctgcaactttccggtggtttcggaccggacttcagtgaagccagtgaagtcggtcgacttgcagaacttcctttcagaggggcgtac

SEQ ID NO: 311273 - DNA, 122 bp, Homo sapiens
acccttaaagcgtagtccccgccgagaccgcccccgcctgagtggcaaggggacgaactgcgccctgaacaggcctggaagcccaacccggtgcggaccgccctcagtctcctagtccgggc

SEQ ID NO: 311274 - DNA, 122 bp, Homo sapiens
tgacattatctccacttctaatttcagaaaatgactttacagtatacttctaggttataacgtagacaagtatgtctgtgaaactgctcctgaaggtttccacgtaatagctgcaggtaaac

SEQ ID NO: 311275 - DNA, 122 bp, Homo sapiens
gtccagcccgcagcgcccagctcagcgcactgaggaccaaaaagggcgggagactctctccggccctaaaaggcaattgtgctgagattttaactctaacttgggggttcgcccgattccct

SEQ ID NO: 311276 - DNA, 122 bp, Homo sapiens
tgacccttgacccagccttctaccaccccttcctcaccggtgctcgggggtctgagctggcggctgctccaggcccacctggtgagacgacttcagagacccctacccatggcgggggcgag

SEQ ID NO: 311277 - DNA, 122 bp, Homo sapiens
gccagccagggcagaacaggggatggggacagagggtaggagaaaaggagggcggcagagcgcagtttgtgcagcagcagggatagaggtgaagacagggatctgcatcagcctcacagagg

SEQ ID NO: 311278 - DNA, 122 bp, Homo sapiens
aattcagtacattatgacaattttcctgggggtagaagtgaaatgtcttaaggaagggtacgctttctgtaagagtaaactagacatcaaatagtccttgcgtggattgcaaccttcctgag

SEQ ID NO: 311279 - DNA, 122 bp, Homo sapiens
gccccgttcccacgcctcctggccccggcacaggctcccgctccaggcaggccccgactccggacaggccccgcccccagcctccaggttttgcctcccgagaggccccgccccacgccgcc

SEQ ID NO: 311280 - DNA, 122 bp, Homo sapiens
tgactgcccgaggcccctcctgccgcggcgaggaagctccataaaagccctgtcgcgacccgctctctgcaccccatccgctggctctcacccctcggagacgctcgcccgacagcatagta

SEQ ID NO: 311281 - DNA, 122 bp, Homo sapiens
ctcacttccccaaagaggacccggacccctgactgcctgagccaggtccccagcatggtccgcaacccttctcgactccggcatccacctccaggctgacgtctacccgggagggggctggg

SEQ ID NO: 311282 - DNA, 122 bp, Homo sapiens
tgactcaatgcctttcgaggaccagccaggtctgggtatggaaaattcctaaaattctgtcgacaggtctcagtgtcacgcaagaatcttgaagtaaggatttccttctcaacattgtaggg

SEQ ID NO: 311283 - DNA, 122 bp, Homo sapiens
aagaatatttcctgggaatcttaaaagatacaagaaaatggggaaaaatagaacctcagtcgcctgatggtgagaagttacaaaaagggtcaggtgttttgatggaagtcattgtagaaaaa

SEQ ID NO: 311284 - DNA, 122 bp, Homo sapiens
gcctcgcgcgggtacctggctgcgcttattaatccgttaagctcgctctgtcacgggcgccgtgatgtgctcacgcgcccactccctcaggtttaaaaggcgcgttgcccggcaacagaaga

SEQ ID NO: 311285 - DNA, 122 bp, Homo sapiens
gcttccgggggcgccaaaaaacgacctgcccagaccctcagcgtcgacgctgcgcacaagcgcagtcaactgctggacccggccggtgtgaagtttcacacccaaaaggatgaagggcaccc

SEQ ID NO: 311286 - DNA, 122 bp, Homo sapiens
gatagaggcgttggtgggacgttgggggctcactggagacaaaattcaggtttcttttcacgttatgtcgtcactttgtttgctttacccggttcctctgctctggaagtgcctgcccgcct

SEQ ID NO: 311287 - DNA, 122 bp, Homo sapiens
gcgactgtggcatacaggcggcagcctgagcctgcttctttaagcacagctcattccggtcgtttgtgaggcctgcagatgcaaagccctcgtcttgagacccttcctcctcctgttgcttc

SEQ ID NO: 311288 - DNA, 122 bp, Homo sapiens
agcagtgacttttcattcccagatgtccccaagccaagaggcgatcctcccaccataccacggcttggcttccccggctccccttagggagctacccttgggtattgaggtgttgggagcca

SEQ ID NO: 311289 - DNA, 122 bp, Homo sapiens
ataacttgttcctaggttatccagttctgcttacctgagtacccactttatcccaggaaacgagacctgaacactgtgtcctggtttcatctttccagtgagccaggccttctgaggcatta

SEQ ID NO: 311290 - DNA, 122 bp, Homo sapiens
cctacaaaaggaggccccttagctattatgtcaggaaataactctggcctttgtcctgtccgctgtgtgtttcaggatctcgatttccctcccgtcctagaagggagttggatcaggtgatt

SEQ ID NO: 311291 - DNA, 122 bp, Homo sapiens
ctaggaaggcggtcccatagggcgggcgcagactgggcgcccgggacgggtcaaggagggcggaatgaacctggagagggcggggcggctgggggaggggcgggaaggccctggggactggc

SEQ ID NO: 311292 - DNA, 122 bp, Homo sapiens
gtaagtacaggctaaaatagacccccttcagaattacaagagttcagcaattaagaaagacgcatgacttcatttccaaaggtaccattttatgctgtaattgtttacactcttgatgaagc

SEQ ID NO: 311293 - DNA, 122 bp, Homo sapiens
tccattgttattgttctgttaggttctctcttcccgagtccattttgataactggatttccgttctccaggcgtccatttccccaacccatcgccgccggcgccccgcaggactgcgagcaa

SEQ ID NO: 311294 - DNA, 122 bp, Homo sapiens
atccacctcccagtgtttggtacagaacaagtgagatgcacttcttccaggctatgtgtgcggtgcccagctcacagtgacagctataaaaagccaataagatatggtggagtttccggtgt

SEQ ID NO: 311295 - DNA, 122 bp, Homo sapiens
agacggactggtgtgtgcaaaaaccaggagtggaatttttggcagcgctgagcctgggtccgccagtccggtctttctgcaagctcgcacacaggtggagccgaaagggctaagatccctgc

SEQ ID NO: 311296 - DNA, 122 bp, Homo sapiens
gcgtgtgtctcactagaaatgaaaagaaggtggaaggagaaaagaaaacttcgcgccaatcggcgtggccccgcccccagaccgtcccttcgttgcgacaccaactagctcgccccgcccac

SEQ ID NO: 311297 - DNA, 122 bp, Homo sapiens
tcataaaaatgactgggcctttcttgcaatggctggcacaaagtcggaagggtctggggacgggaggggcctgaagtgatttctgaggagttgggtttttcctgtaaggccctgggagggaa

SEQ ID NO: 311298 - DNA, 122 bp, Homo sapiens
attttcccatttgataaatctgctatctagacggctcgccatgcctagaatattaagagccgagctgcagaaaggccccgtaatggggggatgtgtatgcaccaataagtgcagatcaggca

SEQ ID NO: 311299 - DNA, 122 bp, Homo sapiens
gatttctcgatgcaagtggaagttaagaactccaggctgtgatcccgtcaaaacacctgccggaccctgacgccctcagataggcacttaacctctctgtgcctgtatttcctcaaatccaa

SEQ ID NO: 311300 - DNA, 122 bp, Homo sapiens
tcaaaatgatttgaaatatgcttctctgtctcttccttcacctctttttggtttcattttcgtaagagtacctgtcagcatttgcagaagaattaaaggcagtgtcgttctggagggaaatc

SEQ ID NO: 311301 - DNA, 122 bp, Homo sapiens
ccgaactgagggccatcctacgaaataacccacctgcgttcctcaaaaacgtcaaggccacgaaaagacaaggaagaactgagggaagattccagaggctggacacaagatctggcactgtc

SEQ ID NO: 311302 - DNA, 122 bp, Homo sapiens
aatgttaaaagtgaggctgtctattcatgaaaacaatctttactttggcctaaagttccacggtctccgcggcgtatctagaatccgtaccgcacagcggccgaggggagacgtgaccggcg

SEQ ID NO: 311303 - DNA, 122 bp, Homo sapiens
ctacgtttgaaatgcatgcaggtttaaaagacaagaaacaaaatgatgaaaaagtgtgaccggcctgagagttcagagcctctgaagtgtcaagggatccacagtgcaggtaggatgaagag

SEQ ID NO: 311304 - DNA, 122 bp, Homo sapiens
agcatcattattgaaataatacttggcaattggatcagcctttgggtggtccctcagaaacgtctccagtacaccctgctcctccattctctggcggatagacttgcctttcctcagaatga

SEQ ID NO: 311305 - DNA, 122 bp, Homo sapiens
tgtagggaggggtccagggaggcccctactcaccggcaggcggctgcgccccccgcagggcggggacccagccacccaccagccctgctgccgctccggccctttctggccggctctggctt

SEQ ID NO: 311306 - DNA, 122 bp, Homo sapiens
tcccctgccccgccccccacattcagtgttctttaaaaacttatactctgtttaaattaacgagttgagttttcactaagaactagcaccacgtccttgcttagcctcacggttacaggcag

SEQ ID NO: 311307 - DNA, 122 bp, Homo sapiens
aagaagttgtagaatttcttttcttagatggattgacacttgttctttatcaaagccagtcggaagacaaaagaataaatttaacttgacaataggctaaatgccacagggtaaatgcctca

SEQ ID NO: 311308 - DNA, 122 bp, Homo sapiens
tcttgatctgcagtcaaatgctctaccgctaagctatacccccgtcacacgggaggaaagcgtcactcacgtcttcgtagtcagccgcacgcaagccgcgtacagcactgcagggtccgcgc

SEQ ID NO: 311309 - DNA, 122 bp, Homo sapiens
agagtgtaccagaggttaaaaccaagggctcagactacaggtgtgtgtagcatgtgtacacgtgtgtatacaagcatgggaagggcatgacttgggctacagtaggcagctacccctcagcc

SEQ ID NO: 311310 - DNA, 122 bp, Homo sapiens
ggactcagcggtttctgtcccttgggtagaccttggcttccatctgtctgggtacaggcacgatttccctctcccggttcctggcatccccattgtgagccatccatgtcaaaataagggtc

SEQ ID NO: 311311 - DNA, 122 bp, Homo sapiens
cattcggttcggttcaattccgcaaaaataattgaactgataaacagttcaggcttcggccgggcgcggtggcccaagcctgttatcccagactttgggaggccgaggcgggcggaccgctt

SEQ ID NO: 311312 - DNA, 122 bp, Homo sapiens
attatttgggggcggggaaggggatgtagaggtctttaggacccagcaggcggcggcaggcggcagttgtgtagatcgctgagagactacgagggtccggttcagttttaattctgtctcta

SEQ ID NO: 311313 - DNA, 122 bp, Homo sapiens
ggagagccagacaagcagggacgaggccatgagggccggtgaactcgccagcccggggcacgttcaagagcgtattttactactccatcaccgggtggacgtatcactgtggtcaatgtgtg

SEQ ID NO: 311314 - DNA, 122 bp, Homo sapiens
tagggtggttttatttcagaagtaggaactctttccacgagagcaccaagttgagaagttcggttctcaggccgcgtggacctgacagctctcagaagctccaggcctcgctgggtggggcg

SEQ ID NO: 311315 - DNA, 122 bp, Homo sapiens
gatgccactcacgccatcccagacatgactgcccgtctccctgcctagcacccaccatcccggaaacagggggccccagaggtacggccccgccccacccgcacacctcccatgttgcatct

SEQ ID NO: 311316 - DNA, 122 bp, Homo sapiens
gccatgcccgagtggccatccttcagagtatgatgactccaacagaaagaatcaggtcctcggatcagccagagggtgcatctcctctgccagggaacgagactataataggggtctccaag

SEQ ID NO: 311317 - DNA, 122 bp, Homo sapiens
ctcagtttggctaattttccagagatggctttaaacctggcaggagaatccttccaccaccgccacccccacccggtggccccctctcccccgtctcgctcatttcaaagcgcggaagttca

SEQ ID NO: 311318 - DNA, 122 bp, Homo sapiens
tcaagcctagaattgagaagaaatgccaaagaggaggtaaaggtgagggagtgggcaacacggagcattaaaactgcagaagtggatggcatcacttagagataaagaggagaaaaataaag

SEQ ID NO: 311319 - DNA, 122 bp, Homo sapiens
tgtattggagacaaacagctgtgccggagaggggtcctgagacagcagctccggtggccacgtgaaggtctgaagccccaagcgtgcccagctccaggatggggtaagcagcgggggaggta

SEQ ID NO: 311320 - DNA, 122 bp, Homo sapiens
atcatcctcacaaacgtaaagtgatgcactccaaatagagatcaaggaaaacgaatgccacgcaggtcaccaggcttggaaaatagaaggcacccgaagttgttctacgtggctgtccccag

SEQ ID NO: 311321 - DNA, 122 bp, Homo sapiens
ctggcatcaacccctggaaggggtagttggttcttcagttgacagtttttaccacactctcgtatgctggagcaggagtacaggcagggaaggctaccggctcctcccggcctggtcgcttc

SEQ ID NO: 311322 - DNA, 122 bp, Homo sapiens
tttttgtaaataaagttttataggaacacgcccacacctctggcagctgctttgcaagcacgcagcagggttgagttgttgcaacatagaccacagggcctgccaagcctcaattatctgtg

SEQ ID NO: 311323 - DNA, 122 bp, Homo sapiens
acaccgacgtaatgaccatagtaagaccccatgtacgtggctaatgaggcagtgacccgacgtggctcggaagccctgctggggagatcccgccccgtcaccccagaggcgctctccgacct

SEQ ID NO: 311324 - DNA, 122 bp, Homo sapiens
gtgagcagacggcaggagggagttgccaaggtaacgggtgattcccacccgccgccctttcgctaaggctggggagagggaagcctccgcgtgctgggttagggccaagcccgcgcacatag

SEQ ID NO: 311325 - DNA, 122 bp, Homo sapiens
actggctgggggaggggggcatggagagtgacgtcagttttcccagaaacccatttatcacgataacaaggtctcgagtgcttaggctgctctttcagcttcagaatctggcgtacaattat

SEQ ID NO: 311326 - DNA, 122 bp, Homo sapiens
acatgcatagagggaagacaatgtgcagacacagggggaagccatctacaagccaaggagcgaggctccacgagaaaccaaccatgctgacaccccgatcttggatgtctagtctccagatg

SEQ ID NO: 311327 - DNA, 122 bp, Homo sapiens
ccaacccggctctccggaaaagagaaagtccagtgagaaaggtgaaaactgacaaggcaccgttctccgacttgctgaaaaaaagacaatgcaaatagagcagggtccaaggcggaagaaaa

SEQ ID NO: 311328 - DNA, 122 bp, Homo sapiens
agtgagtcagagaaaaaaaggcagattatgttttcagaaatggaagctgaagatgatatccgagtcagctgtgattcttcctactcaggttaaaacaagattcaggagttcacatgcatgaa

SEQ ID NO: 311329 - DNA, 122 bp, Homo sapiens
ctttctggctgacatttcttgtgcaaaacatgctgaatacgattagcaatccccccgcaccgcggcgggcgcccgcagccaatcccgagccagagtttccgcgcgaccactcccagtttggt

SEQ ID NO: 311330 - DNA, 122 bp, Homo sapiens
gggacaggagggtgtgtgaaacctgcaaatggctcctctccctccttgcttgcatagtcccgggatcagggctctaaagaggctggcagtacctgtgcagccagtgcaggaaaagtatgtca

SEQ ID NO: 311331 - DNA, 122 bp, Homo sapiens
aggtgcgtccgggtaactaatggcaaccgggcggggtgagcccgctctgcaggaactcctcgacggcgaaaaactacgactcccagggtgccccagggcttagcccagctttcccgcccgcc

SEQ ID NO: 311332 - DNA, 122 bp, Homo sapiens
gcgtcttctttccttcagcttctcggcgccccctttggccagcactgacatcttagtcatcgcggtccaaaatttacgcacgcgcctttgagggctcacagagcccgtctctcccggacgaa

SEQ ID NO: 311333 - DNA, 122 bp, Homo sapiens
gggggaagagcaaatgcgaggatggtcccggggtgctctcggcaccaactgcagtgccctcgcccagccgccgggcccgcacggcagggccacggccgcccggcagccccggctccacgtct

SEQ ID NO: 311334 - DNA, 122 bp, Homo sapiens
ccagaattcagtgacctgtccagggcaggaacatccctctttgctgcaatgttacggaaccggagaacaatgtggatacagagaaaaacagcaatggcatcgtagcagtcagctagataaga

SEQ ID NO: 311335 - DNA, 122 bp, Homo sapiens
caccgatgatgcggttgctagcggagcatttccgcggaacttacaggtccacgaactcgccggcgttgttctgcatttcgaggctccgcctgctgccaccacaccgcgcacgcgagagaaag

SEQ ID NO: 311336 - DNA, 122 bp, Homo sapiens
tttccctttgcgctcgccccctcccgcccccacccctcacgggccctcccctcccccgcccgtccctatgtatgtgtcacagcgcgccatgcccgcccgcccgcccacctacctccccgccg

SEQ ID NO: 311337 - DNA, 122 bp, Homo sapiens
gaaatgaaacagcaaaatcctcatggttgattcagtaaacacagactttcctgaaatggccggaacccagctccgaggaattccgctgccactgtgagagaggcacccaaaatgacgagtga

SEQ ID NO: 311338 - DNA, 122 bp, Homo sapiens
cgagacgcttgctgcaagtttctactgagtcagctcgacccctccaactgcctgggtatccggggctttgccgatgcgcactcctgcagcgacctgctcaaggccgcccacaggtacgtgct

SEQ ID NO: 311339 - DNA, 122 bp, Homo sapiens
gccacggagcgcacccctccgaagacccccgcaggctgcgggccccctcctacccctccgcggattcccgacccctgctccggggcaggcgcccttacctggcactgccgaggggcccaggc

SEQ ID NO: 311340 - DNA, 122 bp, Homo sapiens
atgtccagttttgtttacagtaaaggatcaagcctctcttctgtcatggctaataattcccgttagaaatagaagccactgggaaaaagtcacgaaaaagccagcactcttttctgggaact

SEQ ID NO: 311341 - DNA, 122 bp, Homo sapiens
gagcggcggccacgcgggggcgctgggccgggggcgggggccagggctgggggtggggcgcgcccccgggccacctcccccgcccctcccggctcctccccgctcctcctcccatgccccgg

SEQ ID NO: 311342 - DNA, 122 bp, Homo sapiens
accttatccttgtgcaaaaatctgcttcgtatggcagacgtggaaccagtggactcattgcgctgcctactctgaaaagtgtttttatttttatttttttaacccaataattagaagaaagg

SEQ ID NO: 311343 - DNA, 122 bp, Homo sapiens
aaaaaggctttcatcggcactaatgagccattcaggatgcctccccggtggattctctcccgctcccgcctccctgcccgcgccgccccgctatggcccctcttgggattggaggccccttc

SEQ ID NO: 311344 - DNA, 122 bp, Homo sapiens
tcttctagctctgcccttctcaaaaaagtcactgtgtgtctctgcccccataatgctaagcgatcttggcattaatggtaagtatttgtctgcagacaatcaatgtatttttttgttgatgg

SEQ ID NO: 311345 - DNA, 122 bp, Homo sapiens
agccatgctgaactgtgagttaatttacaaattacccagtcttgggcagttctttcatagcggagtgaaaatgaactaacacaagtatctaatttaaaaggctgaactgttgttttagattg

SEQ ID NO: 311346 - DNA, 122 bp, Homo sapiens
aaatgaaagaagatgcagtcgctgagattctttggccgtctgtccgcccgtgggtgccctcgtggcgttcttggaaatgcgcccattctgccggcttggatatggggtgtcgccgcgcccca

SEQ ID NO: 311347 - DNA, 122 bp, Homo sapiens
tacaggcgtgagccactacacccagcccccatgattactcttaaacctagaaactgggaccgttttcctggttggtggagcctattcactagatcaaaagggaggggcataatgagtttcac

SEQ ID NO: 311348 - DNA, 122 bp, Homo sapiens
ggaggcaagataagacatgaggtacctgaaaactttgaaaagtttcgaactggcataatgcgctggcgaattttccccttgatttcactctcatagattaagataatagctggaggctgaaa

SEQ ID NO: 311349 - DNA, 122 bp, Homo sapiens
ggcagaatagcctgcagagaccactgtggcgttgaaaagaggtgtcgtcgcgaccttcggcgccggagaggcgaaacaagagggggtcttcgggccctcaggtatggctcagccgcccaagg

SEQ ID NO: 311350 - DNA, 122 bp, Homo sapiens
tcgtcacttcattttgcagcatggacaacaataggggactacaactcccaaagaggactgcgctcgtccactggctcagaggccaatggacgcctggtacatgaccggcatcgactaatcag

SEQ ID NO: 311351 - DNA, 122 bp, Homo sapiens
gggacgccgacgtgcgctgggagtactgcgcgcgcgccaagcgcggccagacagacacctcgctgccaagttaattcagcaaggaccaggtgtacctgaacggcatcctgtgcattctggga

SEQ ID NO: 311352 - DNA, 122 bp, Homo sapiens
tgtggatttccgggttatggactacatttcccagaggcctctgggtcacggctccatttgcgccgtgtagagttgcatgctgggaaacactgacgggcgcccttccagctgcgtcgaagctt

SEQ ID NO: 311353 - DNA, 122 bp, Homo sapiens
ctgcgtccccgacgcccgtcaccgtatgtccccgcccacccccggcctctgccccgcccgcgcagtccagcctggtgtgggctccctgcaaccccaccccctaagccgggtcccgcccccac

SEQ ID NO: 311354 - DNA, 122 bp, Homo sapiens
agtcgccggccgcggttggattgacttggcccttaactcttgttttttttctttttgagacggagtctcactctgtcgccccggctggagtgcggtggcgcgatctcggctcactgcaacct

SEQ ID NO: 311355 - DNA, 122 bp, Homo sapiens
atgacctccaaccttcccctctgctggcacattgtggggacaaacactaactggaactgccgctctgctagctccttacgacttaccatatgctttccattccagccccatggctgagtttt

SEQ ID NO: 311356 - DNA, 122 bp, Homo sapiens
ttgtatccagtttggagggaacccagcatctctccagaactccactggcattagaggaagcggcagccatggatgctggggacccctcaaggcacactcccagcagagggtcctttcctggg

SEQ ID NO: 311357 - DNA, 122 bp, Homo sapiens
cggggctagggctaggcaggctgtgcggttgggcggggccctgtgccccactgcggagtgcgggtcgggaagcggagagagaagcagctgtgtaatccgctggatgcggaccagggcgctcc

SEQ ID NO: 311358 - DNA, 122 bp, Homo sapiens
taccctatgtctggacacccggccccagctccagccccagcccaggtgggccgcccctggcggggtcgcttaccaacggacacccaccccagatgcatgggccagagggccggcccccggca

SEQ ID NO: 311359 - DNA, 122 bp, Homo sapiens
gcaactaggggcgacggtcctgtgcctgaggtgacaatcaccccccaaaaacctcacttgcgggtgggggggtggtgattgccagttgacccagaattttctagcaactaggcgcgttaaag

SEQ ID NO: 311360 - DNA, 122 bp, Homo sapiens
ctctcagcagctccaacactactttcttgaaacattcacttttcttgagaagcaattcaacgagcagtaaaattccacagttttacaaaattccctcaattttttacagttgtctcattcac

SEQ ID NO: 311361 - DNA, 122 bp, Homo sapiens
tgtagtgccttccatttcccgtagatcactcagggaggttaagtgacttacaggcagtgacgctgctaagtagctatttgagctttcaatttaggtccgtcccagccctatctgtctgattc

SEQ ID NO: 311362 - DNA, 122 bp, Homo sapiens
gctccatattgaccttccgctgcactcgcagagcgttttctccttctaattcactgttagcgcgtaagcctggaccagcacctcacaccacagacgaacgaaggcactgcaagacgccagcg

SEQ ID NO: 311363 - DNA, 122 bp, Homo sapiens
catcatgccctcagcctctcctgaccacctctacgcagtgtttttccaggccgccgttgacggtgcaggggtgatggcaagagaccactcaaattcagaagctgagtcatatcctctgctta

SEQ ID NO: 311364 - DNA, 122 bp, Homo sapiens
ccaagaaacgacgcggaaggaactgaagagactaacacgcgggtcatgggcggagggatacgtttctatgggaacgccacgatctctccagtaaacctgaggccttccccatgctgtcccgc

SEQ ID NO: 311365 - DNA, 122 bp, Homo sapiens
gacccgcgcctggaaccctcccgacgagcgcaggtgagcgcctcctgccaagtggggcggcgccacacgggcgtcctgggtgtccccctgagctccttccgcagctcaggccaacccccgcc

SEQ ID NO: 311366 - DNA, 122 bp, Homo sapiens
agggcaaacaccgacaccccaccactactatcttagcccaccgccttgccccctccaggacgctctccaaactcagtcttcctcagcagctaagctgggagctgtccttcagcaccaagggc

SEQ ID NO: 311367 - DNA, 122 bp, Homo sapiens
actttattctctcacagttctggaggctggaagcttataatcaagaagttggcaaggctgcgctgcccctgaaagttctggaagaatccgttcttagcctcttccagcttctggtggctgta

SEQ ID NO: 311368 - DNA, 122 bp, Homo sapiens
gctgagaaaatacattttggctattcccctacttggacagagggtggaaatcccaggcaccgcgaaatcgaaacttgctaggactaagaagccaacgacgcgcgaaaccgtggggtcctgcg

SEQ ID NO: 311369 - DNA, 122 bp, Homo sapiens
aggggccagtgccctgctgtagccagtgcaaacaggaaccaaggccaagcgaataagggacgctgctggtcacagctctcttcctggagaaaagaaaagtgaaagttaaactatgctctgag

SEQ ID NO: 311370 - DNA, 122 bp, Homo sapiens
cattacggtgaaatgttcactatagttttctttgaacactggtccctacatatggggctccgcttgtccccacaatcagacagaagaatgggggagtggggtgagactgtggctggggtaac

SEQ ID NO: 311371 - DNA, 122 bp, Homo sapiens
tccctcaccgcacccaggaggcacccacacccggcgctcacacctggcacccacacccggcgctcacacccggcacccacacccggcacttaggagacaaggctgagtgacacgctcccttt

SEQ ID NO: 311372 - DNA, 122 bp, Homo sapiens
ctgcgcccttcgccgcctcccgcgctgctgcgccgccaggcaacccccccccccccaccccgccccgagacgcgctctctgcgccgcaccaagtccttggaaatttccacggcggcccggga

SEQ ID NO: 311373 - DNA, 122 bp, Homo sapiens
acctcaagtgatccgctggccttgccctcccaaagtgctgggattacaggcatgagttgccgtgcccagccaaaaatgtctttatcttgagcagaagaaaaacacggagacttaaggttttg

SEQ ID NO: 311374 - DNA, 122 bp, Homo sapiens
gaagtacatggggtgcagacttctgtagacatctgacctcttgccctcatttcccgtccacgcaaggaatgctgtttcttgctcctggttctggttcacggagcttcccaccacgcccacac

SEQ ID NO: 311375 - DNA, 122 bp, Homo sapiens
taaccccattttacagaggatacaactgaggccaggagtagttcagtgacttactcaaaccgatataacttataagtggtagagctgaggcctctgtatcatacctagcagctccatgcaac

SEQ ID NO: 311376 - DNA, 122 bp, Homo sapiens
aggtttctgttgttgtttttttgttttcctttgctttgctttgctttaccttgctttcaacgtcggttaggtttagaatctacatattcaacactgtttagaaaacgtacctggcagctatc

SEQ ID NO: 311377 - DNA, 122 bp, Homo sapiens
ggggtgtccaccctcgtgctgttctgcgccccccatgggtcatcgtgataacacggggtacggtggatggccctgcaaatggccttccaaaaggacgggttcagcgggcagggcttgtggag

SEQ ID NO: 311378 - DNA, 122 bp, Homo sapiens
acagcgccgaccccgccccgccccgccgaccccgccctctcccacctcggccgcctcccccgcctgcatcccgggccacagtccccgttccgccacctcgctcccggcccggcagccgccgc

SEQ ID NO: 311379 - DNA, 122 bp, Homo sapiens
cacaaatacctatacacctgtgtgtatcagcccatgcctgtgcccgggaccatacctgtgcgctagtaagcccccaaagttctgatcatggatccctcatctcctcactctatgatcgctat

SEQ ID NO: 311380 - DNA, 122 bp, Homo sapiens
gcaaacccaaaagcagtttctgttcaggatgctggtcttacctgtgaaggcgttcatgaacgtggagagggaccggttcaacattttgaagaaagggtctctgcacggatatttctgagacc

SEQ ID NO: 311381 - DNA, 122 bp, Homo sapiens
tccttttacccagtgggaaaggtttgtagagaggaaactcgcgctaagcttttgggattccggggacggccagagcacattgccatcctggaggacctaagctctcagcttctaaatcagaa

SEQ ID NO: 311382 - DNA, 122 bp, Homo sapiens
agaaaaggaaagcgaattctctctgacaccaagaccaacgctctagcaaagctcctccggcggatattttgttttcccagcaggttctgccttaacaataaggtcctttgtaggccaaaatg

SEQ ID NO: 311383 - DNA, 122 bp, Homo sapiens
agaccacgtgttgtcttccatggcctgtttctcctgctgtctgggtgagtgagcctgcaacgcaatgcccatgagagtaaatgcctcctgacctaccctgctcagcactgttctagtgtctt

SEQ ID NO: 311384 - DNA, 122 bp, Homo sapiens
ccctctcgcctgcgtccccttcaagcaccagaaacccaagttggaactaattctttctttcggaaggtgcaactcccctcccgcgagctccgcggtgccgggccgagattgccgagaggaag

SEQ ID NO: 311385 - DNA, 122 bp, Homo sapiens
cagtgcccgttgccaacgcagagggaacgggccgagactgcgggcaacaagtggcagagccggcgtgagtccggtgggtctgatcccagagcctcaggttgacgccacttccttggcacggg

SEQ ID NO: 311386 - DNA, 122 bp, Homo sapiens
aggaacagggggagtatgagagtgggcaaagatctaggcagaggaaacagcatttgagaacgtcctaaaagaggaagaaaggaggaaggaatggagcacatttaaggaactgaaaggccagt

SEQ ID NO: 311387 - DNA, 122 bp, Homo sapiens
gatgtggtgcgggccgtggttaatctcacttgagttagtcacccaggacaaacagctaaccgacacaattcctcccaagtccagggggccggaggcggggtcagcacctggcggcaggagac

SEQ ID NO: 311388 - DNA, 122 bp, Homo sapiens
acatcggacctggctggcctgactgtggggtctccctcccaggacatggtgagccatagccggggcagtgcctttcaaagctgctctcatggagcacttagccctaatccagcccttcaggg

SEQ ID NO: 311389 - DNA, 122 bp, Homo sapiens
gcgcggggccgggaggcagcggtggcgggggagccagaggggcggaggaggaaccgccgccgcccctacaagcagttctggtggccgatagcttcgatcgccgcttcttccccatctccaag

SEQ ID NO: 311390 - DNA, 122 bp, Homo sapiens
tcctcggagaggctggcccgcaggagtcctggccggggagcacaggggggttagtggggccggcggggtggccctgggcatccctcctacctcctcggggccctctgtcctcttttttatta

SEQ ID NO: 311391 - DNA, 122 bp, Homo sapiens
gcccgtacgccccaggggccctgcccgctgctctgcctggggaaactgaggcccggcgaccgtgcagacaggactgtacagcgaccaggaaataaaagacgtcctggggccgggcgcggtgg

SEQ ID NO: 311392 - DNA, 122 bp, Homo sapiens
ctttccgactccttggcttcttatgtgaggaaaccacagcgcggccggcatccagagagtcggttagccgcgaagttcccgccggacgaagggaccagccagcgccctgctagacagcgagg

SEQ ID NO: 311393 - DNA, 122 bp, Homo sapiens
taatttccagaagatgtcataacataaataaagcatacctttcttcttccttcctccttccgatcaaaagcacattgctgtttgcactgttcacaggtctgaggtggtccatactttttttc

SEQ ID NO: 311394 - DNA, 122 bp, Homo sapiens
cccggaggggaaggagatagactggagtcgggccgtggcaacaaggccaggaccagtgtgcgaggctgtcaccgcggtgggggccaatcccctggatgcctgctccccggttggcagctcct

SEQ ID NO: 311395 - DNA, 122 bp, Homo sapiens
atgggggctacttgaaggccggagggacaaagcgtgtacacattgcaccgctattcattccggccagctggatcggctgaaaaaaaaaccttgtgaaaagaaacgcctcacaatggacacag

SEQ ID NO: 311396 - DNA, 122 bp, Homo sapiens
gatggggatgggctttgagaaacaccaggcaaaaaagaatgcaactctcaattgttcatgcgtgacagtgagctaaagtgccttgccaatgaccccttcttgtttgagagtctccctttaac

SEQ ID NO: 311397 - DNA, 122 bp, Homo sapiens
atctaggcattagaaagggtaatggggcttttgaattttttcctggcattgtgtcgtctgcgtccagccatgaagctggtggctgagtgtccccaccaggaactgtgaagggcacgtaccac

SEQ ID NO: 311398 - DNA, 122 bp, Homo sapiens
ggtccactttccaagcaagacatctgctcactggaaacggagtgaatgcatagctggtgacggcggcgggcactgctgagtcacgtgaaacacaggttcccccacgttccccccacccccgc

SEQ ID NO: 311399 - DNA, 122 bp, Homo sapiens
ggacacagcgccctctgttggtgagaggcggcggcgcatcagctttcgggccttggggcgcgtagccccagttaattgggtgggtctcgggttcaactcatccgctgccctttgacttggga

SEQ ID NO: 311400 - DNA, 122 bp, Homo sapiens
gagtggtgtgttggcacagcctccatgtagttcatcagctatttccttgatagtgggttgcgttttaccaccaagccaactgactgactcatgagtcagggacttaaaaaataaataaataa

SEQ ID NO: 311401 - DNA, 122 bp, Homo sapiens
tgactgtgggcccagacagatcgggggagcaggtgtgaaagttacctcaaatatgatcagcgcgtagacgcccgcgaggatggccgtcgcgatggtcacctgggtttctacacttccgcgga

SEQ ID NO: 311402 - DNA, 122 bp, Homo sapiens
caagaagtaaactgggtgggtaggaagaggtgaaggctccctcctcagggctgccgggaccgcctcgagggcttgtctgtttaggtcccaattcctcccggatccgtacattcacacgagcg

SEQ ID NO: 311403 - DNA, 122 bp, Homo sapiens
cctcacaccagaggtcctgagagctggcagtggctggaagagaaagattcgactgtgccacgcacacaaggaacagggggcatgctggaatcctaggcttcacccctcctgtgcccccctca

SEQ ID NO: 311404 - DNA, 122 bp, Homo sapiens
tggaaacttgagattctagacaggcctgggcctctggggtcagagggcaccctttccccccgggcagaggccccgccccagccagcctgcattccaggtctcagatccctgcagaccaccct

SEQ ID NO: 311405 - DNA, 122 bp, Homo sapiens
cagcctgcaaattagtggggaggaagagggattacttctcacccagcaaggccactccagcgctggttcagcataagctaacacccacgaccctaggccctgcaggggtggtcagaaaagca

SEQ ID NO: 311406 - DNA, 122 bp, Homo sapiens
agtaatggtcctcctccccaactaaattagaggcttcattctgactggaccaagttagagcgcataaccatccctgggctctgattggccagaacagagtccggcgttccacctgccaggtg

SEQ ID NO: 311407 - DNA, 122 bp, Homo sapiens
accaccaccggatgcccacacttcaggagcatttatataacttcgtggttatgtcagagacgagaaaacccattgacaaccaaacccctaaacccgaacatccggcgcaagccgcacgcagg

SEQ ID NO: 311408 - DNA, 122 bp, Homo sapiens
gccactcttgacacttcagctaacaacacctcagttatctataaaagcacccacactcatcgcaatagtcaccagtcgacatcaattctgaggtgctatctgtggcctatgccacattctca

SEQ ID NO: 311409 - DNA, 122 bp, Homo sapiens
gtaatttacagagaggaaaaccgagtctcccgtggataattgtgtctaattcatttgtcgcggacctggcgcagtcgctctcccccgcagccccgcctcctccccgcgggctcagggcacaa

SEQ ID NO: 311410 - DNA, 122 bp, Homo sapiens
ggctcaaggaggggaagtggtgggaggagaaaacgtgcgtggctgccccagccccgccgccgcctctgcacggcacggtgtcctgtccgtggctccatagccattgtgttctcaaagggact

SEQ ID NO: 311411 - DNA, 122 bp, Homo sapiens
atccaagaatgttgctagcctgctcacccctgagatgaatattgtggggtaagaaaccatcgtgcaaggcaaggtcctgtcacctagcatttgaatccagcttaacctcgtcagaaacagca

SEQ ID NO: 311412 - DNA, 122 bp, Homo sapiens
tttccaggtcacccatccagactgtcaccagggatcactgccctgggcaccaacccaatgcggggacaagtagaaaaagagctctggggaaaataccaaagggaatagtcactcaattttac

SEQ ID NO: 311413 - DNA, 122 bp, Homo sapiens
tctgttggaaccttgggcggagtcttgtctgcatttcgcgtgggcacctgcaaagaagctcgtgacatggtgggaccccagtgacacagagctgcagagtctggactgcaaaggccttcacc

SEQ ID NO: 311414 - DNA, 122 bp, Homo sapiens
ggatggttgataacatcccttctggcactagcatcttattcgaggcacagaaaacttacacgaatttgtattggccctatttgggaggacagaaggcccatggtgtacacacacacacacac

SEQ ID NO: 311415 - DNA, 122 bp, Homo sapiens
tatcatttctttcctgtttattaacattcactccaggctgtatactttggttaccatggtcgcgtggtgtctgatgtcacaggccaaaccatataaaatcacagaggccacaacaggcagga

SEQ ID NO: 311416 - DNA, 122 bp, Homo sapiens
ccactttcagcctcagtgcaaaccctctgcccaaagcctcgctccagtacggaggagctgcgccttcaacacactttctctgttgccaggtaaccacttctccctcagcctagtctccaagg

SEQ ID NO: 311417 - DNA, 122 bp, Homo sapiens
cctcctcacctcaagtgatccacctatctcagcctccaaaactgctgaggagtgagccaccgcacccagcactcaccaaggcctttgatggcaggctttttccaggtgaccactccttgtct

SEQ ID NO: 311418 - DNA, 122 bp, Homo sapiens
tgaagctctttctattttccgctttctcggttgcatctggcgatcgtctgtaaattgctgcgtgttttgcatggactctacggcggctctgcgtgatgctgtctgctccggataaggctgca

SEQ ID NO: 311419 - DNA, 122 bp, Homo sapiens
aaccacacccaagtagctgccctttcctcttctgtcatctcaccgccccaccacagaccgcgttccccgaggaaaccggccgcccacgcccggagcatcctcccctgttgagcgggcgctga

SEQ ID NO: 311420 - DNA, 122 bp, Homo sapiens
atctgttcagtgtcccagaaccagtcagagtcaggaggctgactcgtgctgattacctcacgggagcctgatgtatgaaaaccaggatgctgtttgataatgagaaatagaactatgacacc

SEQ ID NO: 311421 - DNA, 122 bp, Homo sapiens
tttctgtatattttgcccctgcttccaaattaggactaactagagaaagccaaatatgttcgccaaaccactggcatgcgatgctcactttgcatgagccacccccacactggcaacctcca

SEQ ID NO: 311422 - DNA, 122 bp, Homo sapiens
cagggagacagttatcagtgggactaagctattggtgaataattaattgcctgttctcagcgaggctaggagagagaacttctcagcgagcctctgctgggtttaggcaaggtctgcctctg

SEQ ID NO: 311423 - DNA, 122 bp, Homo sapiens
agctgctggtcttgtgacgtgggcacctgtctgccaggcctgggcacgggcccagggtcacgctcatgctggggctcccgtcagctgactattttgggctcttgctgacctgggccaaagtc

SEQ ID NO: 311424 - DNA, 122 bp, Homo sapiens
tggcggcctggggtgatgcgcgcctgtcgggcggatggtggcctggggtaacgcggatggcggcctggggtgacacagatggtagcctggggtgacgcggatggcggcctggggtgacgtgc

SEQ ID NO: 311425 - DNA, 122 bp, Homo sapiens
ccagccccagaactgcagagtgagcacataacgagcacgtgcagaattaacccaggaacgcgagagcagctgctctccggagagggatcccctgtcaggatccagcgcagtctacagggaag

SEQ ID NO: 311426 - DNA, 122 bp, Homo sapiens
ggaaagagactggccccgcgtccgggccgcctcccggctgtaggcgctgggaccgcggggcgcagagaccccgcgcccagccaaccggacacagggaccaaagcgcctagcagacagggcgc

SEQ ID NO: 311427 - DNA, 122 bp, Homo sapiens
aatggtatggtagatagtgtggcctcagggaatggtggtcttcccaggaacagagttctgcgagtcttccttaaatcctgccatgattgataagactgaagaagggagtctcaccaggaagc

SEQ ID NO: 311428 - DNA, 122 bp, Homo sapiens
caaacagttactggagccataagatcgaaggtctgattagggggtttcattccacccacacggaatgaggatcaagtgaggagatagttcttcaaagaggtgctaactagacaaaaaccaag

SEQ ID NO: 311429 - DNA, 122 bp, Homo sapiens
gctttgcccttccgggttctgcggaaggaactcgttagctcctctgctgctgggtgaggtcgtttgtttcttagagctgcctgaatgaaatgccacaaagtgggtagcataaaacaacagaa

SEQ ID NO: 311430 - DNA, 122 bp, Homo sapiens
gagacgggaagaaaacggggacagagagggcactccctgttgggtggggcaccacattcccgccgggctcacccagccccggctcggatcgccttctctttggtctctcacactagcacccc

SEQ ID NO: 311431 - DNA, 122 bp, Homo sapiens
ttataggcgtgagccaccatgcccagcctataccacaaccctcattcagctggtctcccccggggaggcttcatctaacagagccaagactgtcctctccatacacttaggtttgtgtttgc

SEQ ID NO: 311432 - DNA, 122 bp, Homo sapiens
aaaacgattctcatttatttcccctgcatctgtactttcctcttaccatcccctccccttcgttaatgaaattcctgtctaagaggtgaaagattccccatgggcttgcgaataaaaagcca

SEQ ID NO: 311433 - DNA, 122 bp, Homo sapiens
caggtccagcctcagagtgaaacatctacaagatccaagatatattcttgctgataacgacggtcctctttagccaattatgccataggggtcactgcctcttttctctgtcttgccaaaga

SEQ ID NO: 311434 - DNA, 122 bp, Homo sapiens
cagggcggcgggcgcggcgggcgctcaggcgcggcggcagcggcggcggcggcggcggcgcggagctgcagctggctcaggcactcctggcagaaggtgtgcaagcacgccagcagcttggg

SEQ ID NO: 311435 - DNA, 122 bp, Homo sapiens
ctgccgccatccccgcccgccctcagcaacctgtgcggaagcggagttgtccagacttgccggggcaaacttcttaacatcgcacgctggtgtgacacatgaaccatggttaccgctctgct

SEQ ID NO: 311436 - DNA, 122 bp, Homo sapiens
ttctgcccaccttctgtctaggcagagctctgcaaggagaggttgtgtcttcgttctttccgccatcttcgttctttccaacatcttcgttctttctcactgaccgagactcagccggtagg

SEQ ID NO: 311437 - DNA, 122 bp, Homo sapiens
tgggcatccatccagcgctcaggccccagaagcccactttagactaggtggtcacatttccgggcagctcctagcacaggaagcacgtggccagaccagcgcagaagaaatgtctgtccgca

SEQ ID NO: 311438 - DNA, 122 bp, Homo sapiens
tgggtcccccagcaatgccagcccaccagtgctgtgctcgatttctcaatgggccttagccgccttcccgcggggcagggctcgggactgcagcccgccatgcttgagcctcccaccccctc

SEQ ID NO: 311439 - DNA, 122 bp, Homo sapiens
ctccaaagacctccgccagctgcagccctgcccctgagtccccgatgagttccagtgagtcggtgaagagcctgaccgagctggtccagcagccctgtccccccatcgaggcgagcaaggac

SEQ ID NO: 311440 - DNA, 122 bp, Homo sapiens
gtcatgtgactggagtccgcgtaggaggggtcggaggtcttacccaacagattgacgcggcgttagtattggccgtgtacccgaaaaactgattgactgggctggcgttaactgtgcggagg

SEQ ID NO: 311441 - DNA, 122 bp, Homo sapiens
ataaaaagttgctagtgtattcaatctttccaactcacaagctcccactctcagtttacgcggacctgactactacccgaacaacccccaccagtctggaggattttgagcctagacactcc

SEQ ID NO: 311442 - DNA, 122 bp, Homo sapiens
taaagtccatgattaggaatcctgagatagaagttggagaaccccgcgtttaaagagaagcggaccccagaagagatcacagaaataggaggtaaaccaagagcgtgcgagtacaagggagt

SEQ ID NO: 311443 - DNA, 122 bp, Homo sapiens
cggcaagtttgttccgactgtaactccggggatgaggaacggggtctctcgcccctcctccggcttcgcagcccccgaccccaagtgggctccccgcccacagcagtgttcgtcctcctacc

SEQ ID NO: 311444 - DNA, 122 bp, Homo sapiens
actgcctcttcagtgagttttttgttctgttttgtttttccctagttcaccaagtcagagcgttgcccttcagcttgtctggttttcagtctgacatctcattttgctggggccttgaggtt

SEQ ID NO: 311445 - DNA, 122 bp, Homo sapiens
caaccctgaaccgcactgcacggggatgtctgtttgctgactctgctgtgtgtgcaacaacgtgtgcagactgtgtgtgtgtttacaagaactatcacgttctgagtctttaggcatataaa

SEQ ID NO: 311446 - DNA, 122 bp, Homo sapiens
ctgctcctgcaggatgaccgccactccacgtcgtcctcggtgagctgccccatccgcggccgctgcccgccaccggcctgcccacctggggctgcgctcctcattttcgccctccccctccc

SEQ ID NO: 311447 - DNA, 122 bp, Homo sapiens
ataaacgcagtgcagccagtttttcctccagcgttggagtccatcactgttgctgtggatcggcaacaaatgaagtcattggtttgcatttcaggcctctactgtatgaaaaatacaggttg

SEQ ID NO: 311448 - DNA, 122 bp, Homo sapiens
aaggttctgtggttcacatttaacagtcttctgaattacaattcattacacaattgtgtgcgctctgacgatggcaccctatcagggctgctatctgtggctatttccaataaataactggc

SEQ ID NO: 311449 - DNA, 122 bp, Homo sapiens
tgtcctcgcgctcccgggggacccgaggcgggcggtcctccagggcatgcaggccgccctcgcaggggctaaaggacaccctgccagtgccttcactccagacgcctgcctcaggtcgcccc

SEQ ID NO: 311450 - DNA, 122 bp, Homo sapiens
agaagtctccacagtgggattaatgggcccagggacgctgaactgcaggagccaccttcccgaggccaggctgtggcctgctcgctacgtgttgcacaccagcacatctgcaaagggtccca

SEQ ID NO: 311451 - DNA, 122 bp, Homo sapiens
tctcttgcccaccagtgaacccagatggcaccacagggaccagagttgagccatcttaggcgaacacagcctaaattaccaactcccataactatcagcaaatcagtggatgtggttttaag

SEQ ID NO: 311452 - DNA, 122 bp, Homo sapiens
cggggagcgcgcgcaaggcccgcccagcccccacatgccagccccaccctccagtcggtccggacgccgacgcctttttgaccctcgctgtgcccggccctcctcatctggcctgcccaggg

SEQ ID NO: 311453 - DNA, 122 bp, Homo sapiens
ggacgccgggttttctctggacacgaatgctccgggggtaggaggcgaatgacactggcacggcggggctccggagccaagaggtgaccaggctggctgggcagggctgagtggctgggccg

SEQ ID NO: 311454 - DNA, 122 bp, Homo sapiens
tgctgctgccaacggcgacccgggctcgtcgcggtccccgccgcacagtgagtaacacatcgcgcaccgagtgactgaactaagaagagcaaaacaacatgtgactcggcgttacgcaggca

SEQ ID NO: 311455 - DNA, 122 bp, Homo sapiens
ctcctgagctctatcaagggatcctcctgccttggcctcccaaagtgcttggactacaggcgtgagccaccctaccccggcctatttttgcttttaaaagatgtgggacctatgctaactag

SEQ ID NO: 311456 - DNA, 122 bp, Homo sapiens
agaatcgccgagggagaagctccaggggaactggcctgcccgcatccccactgccagtagcgctcagggtcccaggactcgggtcttgccagaccacagtgtcccctgggaccctagggtct

SEQ ID NO: 311457 - DNA, 122 bp, Homo sapiens
tgtccttctcgataacaaccgtttaatttggtttgcaaaattgctctgacgcaaatccaccgtgaacactgacggggtcacattcagcataaaaatcgcattctgtttacaggaaaatctgg

SEQ ID NO: 311458 - DNA, 122 bp, Homo sapiens
catctgggcactcccctggttgattccgttttcctgctcggcatacctgtgtctgctgcccgccaggccgtcggcctttgagtgcttcagcaggacgctggcgggatccacgggctggccct

SEQ ID NO: 311459 - DNA, 122 bp, Homo sapiens
ggtcaaagaggtcacagagggtagccacggctggaaggtgcccatcagggccagcagggtcgggcaaggcatagagcttctcaggctcaaccaccattagatgagacaccagtgcattcact

SEQ ID NO: 311460 - DNA, 122 bp, Homo sapiens
acttcacttgctaaagagacaccgggaaacccaactaatacaaacgcccagtttaagactcgaggcgcacgcgtttcgcactactcctctgggaatggggaacgtctcccgagaactgtgtg

SEQ ID NO: 311461 - DNA, 122 bp, Homo sapiens
aattcttgcaggacaggtccctggatgagcatggctgacccagcttcacaccccgccccccgccttcttgtagttctcaggatagctgtaggatgtgttgggaatgcaacatcttgagataa

SEQ ID NO: 311462 - DNA, 122 bp, Homo sapiens
cctcgcacgcgctggtgctacagctgtggtgcagacgcccttccgctgcgagggtgcggccgtctcggggcgagtgcttcccggcctgcaggaggcgaactcgggcttccccgggaggcgtc

SEQ ID NO: 311463 - DNA, 122 bp, Homo sapiens
cacctcttctaccacccgtgcccgtgcccacctgtgtccaccaggccccaggagccctgccgggtgctggtgaggaaagatctctgtcagcagatggtgacgccctctgtctcccacagaca

SEQ ID NO: 311464 - DNA, 122 bp, Homo sapiens
gacggattgtgaattcagagctgaataaggattccaaagaggggacaccggcatgggggccgttaagtgctgggagacttcggatacgatgttccctcgcaaagcccgtgtgacggaggaac

SEQ ID NO: 311465 - DNA, 122 bp, Homo sapiens
gtggagcgaggagcggctcctgccttgggatgacacgaaggccagatttggaagcgaaaccgcccggtggtgaagggttgtgcaatactccgtttcagtccctggccttttaagcagttaag

SEQ ID NO: 311466 - DNA, 122 bp, Homo sapiens
ccacgtcgaggggccgggggaggcggtgactggggggcggagtggaggctgcacccggaccgcgggcgcccagctcggtttgggccgacggagccctctgccgtcgcgagcccgggcctcgg

SEQ ID NO: 311467 - DNA, 122 bp, Homo sapiens
acgactcgagctctaaggatgggacccggaaggcagaaaaaaataatggattggggcgggcggggagtcaaaaggtgggctgattaaaagaaaattctaaaagagaaaagggcccctggttc

SEQ ID NO: 311468 - DNA, 122 bp, Homo sapiens
tcggcgggtggcccttttctaatgtgtaccctgctgtggggctggctctcagcaaagcagcgctcaccgaaacgaaagtaaaacagaggccggttccctgcggtgctggccacccgctcccg

SEQ ID NO: 311469 - DNA, 122 bp, Homo sapiens
caaccttcccactgacacccagtgtagcggacccggtggggaggggcctgaagcagctaccgctcccagaggccccatctgacactttaatcctctgccacaatggggaggctggtaggcag

SEQ ID NO: 311470 - DNA, 122 bp, Homo sapiens
gcggggcgctgcgccgtgggctcctgcacctgctcctcccggcgccccctcgtccccctccgagacgctcccagacatcctctctggaagcctcttgcaaaccaaggttaaattcaaagtcc

SEQ ID NO: 311471 - DNA, 122 bp, Homo sapiens
ccctggggctcggtccgtccatcagtccacgcggaagacaccccggcgcacgtcccgccccggctcacccaccgtgcaccagtctccgcatgtcctggtagcgagcccataggtgcgcgctg

SEQ ID NO: 311472 - DNA, 122 bp, Homo sapiens
ggacatcatctcggtcctgcaggggccctgtggggtgggtgtcatcaagcccgtgttacacgcctgtattggatgacaaattctaccaagcacacagccgaccgggagttcaaacgtgagtg

SEQ ID NO: 311473 - DNA, 122 bp, Homo sapiens
gcctgcttacacccatgcacatgtcccagtaagaggggctgcctgtgggagatacatacacgatacaccacagtgggatgaattgtatggcccttgcaatgtgtgtacctgcctgctgttgt

SEQ ID NO: 311474 - DNA, 122 bp, Homo sapiens
gcggcgggcgggtttcacgcggcgttcggaggcgggcttctgggggtgggcggagcgtgccgcggcaggaagttggcgatgcgcaggcgcgagggctcgcccggcgctcccagggccggccg

SEQ ID NO: 311475 - DNA, 122 bp, Homo sapiens
tgttcaagttatataatgcaccttgttatcacactatttccacattgccttgttcagccacgttctaaataaaaaatccagttttctcaccattatctgtctaaatccatttaagagtctca

SEQ ID NO: 311476 - DNA, 122 bp, Homo sapiens
gtctagattttcccacttacataggtcttgttaagaaaccagtcctgccttcttgccactcgtgtctttcgatggctcccttcccgaagtcccgctgcctctaagcggagtgttaagcgggg

SEQ ID NO: 311477 - DNA, 122 bp, Homo sapiens
ccgcggcactaccagctggaccagctgccagattattacgacacgccactatgacccagccgagctgtttaacaaataaactaaccacaaaagactgagttgcaagagtctcccaggctcac

SEQ ID NO: 311478 - DNA, 122 bp, Homo sapiens
gagaccttgtctctaaaaaaaccaaaacgaaccaggttcggcctaatgcagaaggaaatccggagcaatccccaaagtcaacgccttggaaaggttcgccctgggtctcagtactccggggc

SEQ ID NO: 311479 - DNA, 122 bp, Homo sapiens
ccccacaggccacccaagctcccaggctaccatttggagatcgttgcttcggaggaatcccgggtcaggctgctggaatctggactcacacttccgaaacctcagtgttctgatcgatgctt

SEQ ID NO: 311480 - DNA, 122 bp, Homo sapiens
cgagatatatttatactaaaattttatttgttgtttctctgaaattcacatttagccaggcgatttgtattttgccaccctgctgggagcacccagtggaggagcccttccatccttggggc

SEQ ID NO: 311481 - DNA, 122 bp, Homo sapiens
ggccggggacccccgcgggcgccggagccgggcgacgcaggacttggacgtggccacgcccggccaccgctcgacaccccagctccccatgcacggcctaggtctacagggaggctagaaag

SEQ ID NO: 311482 - DNA, 122 bp, Homo sapiens
taggcgcctgggccggaggaggggttttcagggtcgtaggacgccgttgggcaccacgctcggagaaggacaggacaatggcggccttagggtccccgtcgcacacttttcgaggacttctg

SEQ ID NO: 311483 - DNA, 122 bp, Homo sapiens
cccagttcccaaacatacgaacccacgtctggacctcagtgtgacttaagaccaagggcccgagatggcaccgggtgcatccgcgtcggcgctgaattcgagccatggttgaaaaagccaag

SEQ ID NO: 311484 - DNA, 122 bp, Homo sapiens
aaccagtcaacacacagacatatttataaggcagccaatgtgggggcaattttggagggccgttgcccaaaagagtactctctctctctctcctttaatgcgaggaaactccggagaccagg

SEQ ID NO: 311485 - DNA, 122 bp, Homo sapiens
agagaaagctggcagtgcacgggacgcaacactagaaatgtgaaaccaggaccctgtcgccgaccctcttagagaaatgtttactgtctggatgcccccagacgccttgcctgagcgccgtc

SEQ ID NO: 311486 - DNA, 122 bp, Homo sapiens
gttttcccttgaattcagtctccaccctgctttctgcttcagtaagttgtcccaaatggacggtatcaatgaaagtcacagtttttattgagaaagtcctctcgccgggcgcggtggctcac

SEQ ID NO: 311487 - DNA, 122 bp, Homo sapiens
ccagcaacgcctccatttcggggtgggagaccccaggacaaggtcctgggatggggcgggcgccaagcggagagaagcagggcgggtgccccgcgggtctcagggtcggcctgaggagtgtg

SEQ ID NO: 311488 - DNA, 122 bp, Homo sapiens
cccccaacactgccccgaggcccggtgacaatgaagcggccggacggccggggtgagcagcggcggcagctagcaaccagcctggcaccacctccccagcccgtcacgccggcccgcctttc

SEQ ID NO: 311489 - DNA, 122 bp, Homo sapiens
gataccagaaacattgctggatataatttaagattagtgttttctctttcatagaaagaacgtacatactgggacatgagtacagttacagcaagtctaggtgtgctaacaaaacagggcac

SEQ ID NO: 311490 - DNA, 122 bp, Homo sapiens
cgccctggtctcctgcactgagctgtggtgagcacatccgggtcctgctggatgcatgcacgaggtgattgatcccctcagttgggtcgatgatgagaaccttatattgttctgaagagagg

SEQ ID NO: 311491 - DNA, 122 bp, Homo sapiens
ggccatggcgggcctgggcctgggctccgccgttcccgtgtggctggccgaggacgacctcggctgcatcatctgccaggggctgctggactggcccgccacgctgccctgcggccacagct

SEQ ID NO: 311492 - DNA, 122 bp, Homo sapiens
aaactgccaattgcgagagtgcagcgtgtccccattccagccctgccggagcaaaacaaacgcaagtcgcgaggggagcagaggcggcccgggggcgtgcgcatgtgtgcgggtgtgcctgt

SEQ ID NO: 311493 - DNA, 122 bp, Homo sapiens
acgcggagcgagggtaggaggccaacgggtgggtgggggtgctgcccgtccaggcgtgcccgccgtgtcttctgccgaatgccagcctctcacaggctggggagactttccaccctggggat

SEQ ID NO: 311494 - DNA, 122 bp, Homo sapiens
ggatgtggacctcaggtcctccatctgtgcaatgagttgttaatataaccaacatctctgcgaaattcatccttctgactcaatcaaaattgtcatcaagaggctccagcaaaagcttggtg

SEQ ID NO: 311495 - DNA, 122 bp, Homo sapiens
ggacgccggggtctgggcccgggggtggggtctgcattccctggctgggcagggggacctcggacgtgggggtccgcgccccggggcaggggtcggcgtcctcgggccggagccgggtctag

SEQ ID NO: 311496 - DNA, 122 bp, Homo sapiens
atcagggctggacagtccgtcacgtgcagagcatcctcccgactggcgaggtggcttccacgtgccccgtcaatcagggctggacagtccatcacgtgcagagcatcctcccgactggcgag

SEQ ID NO: 311497 - DNA, 122 bp, Homo sapiens
gtttgtctgcaacacgctgcagccgggatgcgccaatgtttgctacgacgtcttctcccccgtgtctcacctgcggttctggctgatccagggcgtgtgcgtcctcctcccctccgccgtct

SEQ ID NO: 311498 - DNA, 122 bp, Homo sapiens
tattccataggaggcaaaaataaggcattttcctcctgtggtccttctgagattctaagtcgttgttgtgtaaaacatcacccacaggcattttggtcagcactgtcttacagtctgggagg

SEQ ID NO: 311499 - DNA, 122 bp, Homo sapiens
caaggaaggtgagaagagccccgccctccgcaaataccaagaccaagggacgccgagcgccgcctctcattgatgctgaggcctccaatatgagaagaacccattggaagaagggagcaaaa

SEQ ID NO: 311500 - DNA, 122 bp, Homo sapiens
agcaatctgcctgcctcggcctcctacagtgctgggattacaggcgtgagccaccacacccggccttaaaataatttttgacactgtaaagattaaaacaaatctgagagccagatccagcc

SEQ ID NO: 311501 - DNA, 122 bp, Homo sapiens
aaggcgtgccatttccttgtctggttttcaagcccatctttctaaagcccgggatgcgcccggatgccctcaccgttcctttctcctgaggtgtttgtgtgtgtgtgtgtgtgagacggagt

SEQ ID NO: 311502 - DNA, 122 bp, Homo sapiens
gctgactgtacttgtggggtgatgccaggccagcgagtgggctgttatcctgcccagccacggtgcacacctgaccgcacactatcatcctcctacccgacttccagggcctttttccctca

SEQ ID NO: 311503 - DNA, 122 bp, Homo sapiens
gccttctgttggaatctatttggattgtgtgtaaaacaaagccccatcatttttaggcctcgaagatgaaaggcttccttccaagaaaagcagcaatcaagtgaataggtgctcgtagatac

SEQ ID NO: 311504 - DNA, 122 bp, Homo sapiens
agtagacatcccttattacatcaaaaagtatttattgagtacttgtttttgtgcaaggtacggttttagatgttggggctatagaggaccaagatagtaacgagtttgcattctaatgactt

SEQ ID NO: 311505 - DNA, 122 bp, Homo sapiens
aaatccaaaaggggtcttttgtaaacctttctcctgtcgtcaccaggggaaactggagcacggttaaattcgtgaggctgtttgctgtgtacacaatgctaagcagaaaattgaaacccagg

SEQ ID NO: 311506 - DNA, 122 bp, Homo sapiens
cctagaatggccagctgcggagaggaattgccatgggaaagcggcaggcacctcttacctcggaacaggaggaagcccaggatcacccagcacagctgcatggctcctgcggtgcccatgtc

SEQ ID NO: 311507 - DNA, 122 bp, Homo sapiens
actgggaggtgcagcgcatccaagcagaggctgcctcctgccctccacgcctgctgctctcgcaggcaggggctctgctgcttacagcagtgcggccatctcggcttctctccacatcgtct

SEQ ID NO: 311508 - DNA, 122 bp, Homo sapiens
cctgaccgtgaggctcggcatcgggccctggctgttctgaagataaggacgatctccctccggggtccaggcagcactgcccgtcttgctatccttggagtctgtgccaagtacatcaggaa

SEQ ID NO: 311509 - DNA, 122 bp, Homo sapiens
agttggttattgaagtagaagcctgcttatacgggattagagatgaagggaagagaggggcggaccatagttgagaagcaattagggaggagaggtatttgtattttgccttcaatttttgt

SEQ ID NO: 311510 - DNA, 122 bp, Homo sapiens
agcagggcagctcatgaacgcccgggagtccaggaggcccgggtggggacgcctggatgacgtcactcgaggtgggcaggccccgcgcggggcgtgacgtcacgcgggcggtcccgtcagcc

SEQ ID NO: 311511 - DNA, 122 bp, Homo sapiens
gtcatgaacgacgcctgcctcacagagtcacggcgagaggagcgtgtgttgcagctgctgcgtctgctgaacccctgtttggagaagagaaaggagaccaccaagaggcacttgtttttcac

SEQ ID NO: 311512 - DNA, 122 bp, Homo sapiens
tggctgacgggcgggccgggcatgcgccgcgggcgttttggcgggaagcgcggggcgggccggacaatgagagtgtccgcctcctgagccaataaagctgtactggttttgaatcgcggcgc

SEQ ID NO: 311513 - DNA, 122 bp, Homo sapiens
cgaccggccagttgccagctgctggagagaatgagcttggagccgcagggcttaatcccgcgcggctcagagatgggtttctggactcgcgaagcagctgcaacaaggcatcactcactgta

SEQ ID NO: 311514 - DNA, 122 bp, Homo sapiens
ctgttgctggtggtccgcttgccaactactcagctctctggaccttgaccgcatcagagccggtagaggaggagaaacaacaggcctcagtgtttgctgaaacagagggcagcagaggatgg

SEQ ID NO: 311515 - DNA, 122 bp, Homo sapiens
aacacgtgaagtcatacacagctttctctgaacaaattaattagctttcctgcagccctccgtccatgccatagagagcaatcacacaagtgaatcaagcagccacgcacagccttgctcag

SEQ ID NO: 311516 - DNA, 122 bp, Homo sapiens
aattgccacattcatctctattacagaatcttcaaagataccagtagcagttcctagtaccgtacttctgggcccttcacatgctgccttctctatcaagaaaaccctcctcattggctctg

SEQ ID NO: 311517 - DNA, 122 bp, Homo sapiens
ggaggcatctcaggtgtgaataaccttcccattctgtcccctcagttccgatgcctcaaccgctcagccgccggaatcgcagccactgccggcttcacagacgcctgcctccaaccagccga

SEQ ID NO: 311518 - DNA, 122 bp, Homo sapiens
cttggtgggagaggaggggcacagaggaatgggggtttggctctttgcaggaaatggccacgcctgtgacttctccaagagagcctgccggtttctgcccagaaggcggttgtggggatgat

SEQ ID NO: 311519 - DNA, 122 bp, Homo sapiens
ttcaatttttgggggagagggagggagttaaaaaaatagagggatctgaagggtgaggagcgcggggctccagagcggggatccccccgcggctccctccctccctcccctgcggagccggc

SEQ ID NO: 311520 - DNA, 122 bp, Homo sapiens
ataagaagtcctgacatacactgaggttcaaattcttttccagagttaactgaactgaatcgaagcccaacactcagcatcctaacagaacgacttaataacgttcccccaaattaacactc

SEQ ID NO: 311521 - DNA, 122 bp, Homo sapiens
gcgcagggtggcgggcgagtaggcccatctcccagcagcggcgacagcagcctgaggaagcgcgggggagggtccctccgatgcgccgaggcgcctctcaaccggggcggagacgacggagg

SEQ ID NO: 311522 - DNA, 122 bp, Homo sapiens
ctaactgcacatccgacaggggtctcatgagagattgtagtggatctgaagattccctgtcgcctggtgctgtggtggccatcgtcacgtcaccgtgcagtacgttactcgtgtgtgtatgt

SEQ ID NO: 311523 - DNA, 122 bp, Homo sapiens
gaagccagactgacattcctgagacgggtttgccaagccctacactttatgtgttgtacccgggaaactcaatggaggtatggcccaacgctgacctttggcatggaggcctaagccaccct

SEQ ID NO: 311524 - DNA, 122 bp, Homo sapiens
gtgataaactgatgaaatgaacaggcatttaccctcagcttgctataattccagtggccacgagaaccaccttgggctgtgccttggtgtcataccttaaattgcttcccacaggtggaaca

SEQ ID NO: 311525 - DNA, 122 bp, Homo sapiens
acatccacaggcttaactgtaatgcttggcaaggtataatgagctccatcctcaccctgacgttaaattgtcacccatgattcggtggagtttgagctgcactctccatagaagactctgga

SEQ ID NO: 311526 - DNA, 122 bp, Homo sapiens
gcatttcaattgggttggaaatctgtaatatgatttctaggacttcatgggaaagttgaacgctcaaggggaaattacacaaagaacagctgagaaaaagttgcattctggcacagaatcat

SEQ ID NO: 311527 - DNA, 122 bp, Homo sapiens
agggcaagaggctgacccagaggtgagcagcgaacggcaaacatcagcaagcggggagcacggcacgtgcggggcggtcagtgcagcgcgtgcatgcgtgcggggagggcagcgctggggaa

SEQ ID NO: 311528 - DNA, 122 bp, Homo sapiens
tccctagggggcggtgtccccgggttgcggtgtccgctcatccgcgttcttgcgcccatgcggcctagctcgccagttcctgcctcctggggtctgcagcagttctagctctcactgtcagc

SEQ ID NO: 311529 - DNA, 122 bp, Homo sapiens
ccgtctcaaaaaaaaaaaaaaaatttttttttaaattagccagacatgatggcacacacccgttgtcccaactacccttgttgctgaggcaggaaggtcgcctgagcccaggaactcaaggc

SEQ ID NO: 311530 - DNA, 122 bp, Homo sapiens
tagcatcttctgacacgcaaggcctgagggcgcggtgcctgcactactatccaatcagggcgctggggtgggaactgtccaatcaggcgcgcagccagggaggaaggggcggcttccggaat

SEQ ID NO: 311531 - DNA, 122 bp, Homo sapiens
tcctagcagaccttgaacagacgaggcccagcagcatcctcagaagaggagagggaagctcgcagcgcaggccccaggccacagccttagatgaccttctgtttgctctcgggacacgcaga

SEQ ID NO: 311532 - DNA, 122 bp, Homo sapiens
ttttttttttgagatggagtctcgcactgttgcaggggctggtgtgcagtggcacagtctcggctcactgcaacctccgcctctcgggttcaagtgatgctcctgcctcagcctcctgaata

SEQ ID NO: 311533 - DNA, 122 bp, Homo sapiens
tcgttctgcagacagagggcgtgcgtgtgtctgtgaacgtcctgaacaagcagaagggggcgccgttgctgtttgtggtccgccagaaggaggctgtggtgtccttccaggtgcccctaatc

SEQ ID NO: 311534 - DNA, 122 bp, Homo sapiens
cccgggaagtcggccgggcttgaggccgggccccagacgtcccgcttcgccccgagtcgccgccgatggtccccggagctcctgcccccaggtaggaggtctggcccttgaatagagggcgg

SEQ ID NO: 311535 - DNA, 122 bp, Homo sapiens
atgccttgtcgggagggggcgccgtcagggttccgggaggctctggtagggcgcccccgacgcctgcccagctctgtcctgggactcaccttccagtccgaacttgtaaaattcccccgcca

SEQ ID NO: 311536 - DNA, 122 bp, Homo sapiens
agataacctagcaggaagaatttcacagcatttttctagtgacaacatttccctggcagtcgctacattatcttaaaatgaaggccaggtgtggtggctcacacctgtaatcccagcacttt

SEQ ID NO: 311537 - DNA, 122 bp, Homo sapiens
tcttcactagcatatacacctcaaactgtttttctagtattgtatttatttgccttgtgccgttcacatttttcatgcccaattccattttgatcatgaatatataaaatgttaagctgaaa

SEQ ID NO: 311538 - DNA, 122 bp, Homo sapiens
ggagattaagccaatgcggaatgccctacacacactctagcaccaccactttggggacttcggttctcccgctggctcgggcttggacctcggtctgcagggagagggttggagggactggg

SEQ ID NO: 311539 - DNA, 122 bp, Homo sapiens
ggggtccgcgccggagccgctgcagctcatcgggccggtgggagaggcggcgaacagagccgcttccgcttccgctcgcgccgcgcacaccccggggtgacgtcacgcgcccacgactcgcc

SEQ ID NO: 311540 - DNA, 122 bp, Homo sapiens
cctcctacaccaaccttaaatacttcattcatccaataaatatttatttagcacctcctacgtgctaatcaccttgctggacatgagggatataatggtgaactaagaaagactaaatttag

SEQ ID NO: 311541 - DNA, 122 bp, Homo sapiens
tggaattacaggcatgagccactgcgcccggcccagagacgacatttctgccaggtggagcgacagacatagttacatggagaagatgatgatgatgatgatgatgataatgatgatgattt

SEQ ID NO: 311542 - DNA, 122 bp, Homo sapiens
attggaggggaaactgaggctggggggtgcagcggggagcccaaggtcacgcttcgaggccggagcctcgttgcggagctaaggcgcccgcaagagaacgcggggcgggggccggggagctg

SEQ ID NO: 311543 - DNA, 122 bp, Homo sapiens
gcggcctcgggttttgggaagccaccccggggccgatgggggccgatggacttaccatggcgagcagcggagtcaagaacacaccacgatggcggagaaaggaagaggagggaagctggcgg

SEQ ID NO: 311544 - DNA, 122 bp, Homo sapiens
tttcttcaaattaaattgctacagcaggaaattactgaactgtggctcttctcctacgtccgccttccctatgtcaattcccatttcccttgctttctccaatagttaggactgtaaattct

SEQ ID NO: 311545 - DNA, 122 bp, Homo sapiens
atagataagtaatatataagttttaatacagtataatatattatataatggagctgattacgaagtgttgtagaaacagagatatggattcaactcacatttttaagtctttcaaagtgtca

SEQ ID NO: 311546 - DNA, 122 bp, Homo sapiens
tttcagtgtaggtaggcaccacccacagcatgttgtcattgcaaactggttccttccatacgtcccgaaaggctctccatggtagcttacatctctctatttgacacttgatggctttctta

SEQ ID NO: 311547 - DNA, 122 bp, Homo sapiens
tccctgtgcacacgctcgaccaccacgctatggtgttgccctaaaaaaccagtgtcaccccgtgaccagatggtgccacacaggcccaggctcttggtacaaagaactgggcgagacacaca

SEQ ID NO: 311548 - DNA, 122 bp, Homo sapiens
ggcctctcccggccccttccgtttagtaggagccgcacaatgaggggtggggcgggcttccggcgctcccaccgcgagccgacgggaaatggagtccgctggccctgcgccgccgcctcgct

SEQ ID NO: 311549 - DNA, 122 bp, Homo sapiens
tgtaagaaatgaaaagaagttaaaccaaagtacttagccattcttcagattaagatgcagcgatacttgggaagacacttacagagagaacatagttattctcaggcacttcttagaaatga

SEQ ID NO: 311550 - DNA, 122 bp, Homo sapiens
tagcattatgaacaaatgcagggctgagaaacagcatggtggccttgactaagtttatggcgacagcaggtaagtctggagagaaagctttacaggacatgtgggtggcttggacatgcttc

SEQ ID NO: 311551 - DNA, 122 bp, Homo sapiens
gagctggcgcgaggacagggctaaggacccggaatgagtttccgcgcagttccgctgggccgtgccggcctgtaccgggccgtgccgagccagaactggcaggagtgggggcctgagttgga

SEQ ID NO: 311552 - DNA, 122 bp, Homo sapiens
cgcctgctctcagaactggtgccgctgaaagcttgcagagcccaaacgctgcgaggaggtcgcaccagcaagtgaggaagcagaagggatggcttcctgcgcctcccacacaattttcaact

SEQ ID NO: 311553 - DNA, 122 bp, Homo sapiens
gatccttgaagtcagatgatgtgggtgcaatggccattggcctgagttctaatcatggctcgccatgaactcttgtggcactttaggccagttcaattgctttgctgggcctcagtttcccc

SEQ ID NO: 311554 - DNA, 122 bp, Homo sapiens
caggcctgcctgacagacttctattcagcagctactgctcccctgaaaatcttcctcagacgtttccacggtgcttcccgttcttacaccactacaatcctttattacactactatccgttc

SEQ ID NO: 311555 - DNA, 122 bp, Homo sapiens
gacagagtgtgatacaggtgtgccctgctttatgaaaagccacatcacaatgtgattattcgcttcatgctattttattaaataatgagttcccctgggacatttaaaatatgatttgactt

SEQ ID NO: 311556 - DNA, 122 bp, Homo sapiens
ttgcagcacctcggcaggttcaaactcttctccgggagcgtggcggcgatcgcgaggtcacgtgatgagcatcctgctgcccaacatggcggagttcgacaccatctcggaactggaggagg

SEQ ID NO: 311557 - DNA, 122 bp, Homo sapiens
tggtgggaatgagcactgcctgccggtcgtggcgttggggactcctgggtcctggctggtcgccctgaggggtccacggcgtgccttggcggggccccgggtgccctcagcacctgtctgcc

SEQ ID NO: 311558 - DNA, 122 bp, Homo sapiens
ctgcctgctttgcagacgttgcccacttgtgatctgggcagaagtgttgctctgctgccacgtggctcctctgtcccgggcatctttctcagatggtggagcacaggggatgagagaaggtg

SEQ ID NO: 311559 - DNA, 122 bp, Homo sapiens
attttcttgtccggatgtaataagatctatcatgtctgccttctctcatgattcacacctcggtagcatcttctagaccacgttctcttcctcttcctccacagagggctgttcatgtgatt

SEQ ID NO: 311560 - DNA, 122 bp, Homo sapiens
cataaccccagtgaaggagtagattccttgttccagatgttggcaagtgcctggtctagtcgcagatgcatctggcccttgagttttgcaacaagcctctgtatccttaaaataaaatgcca

SEQ ID NO: 311561 - DNA, 122 bp, Homo sapiens
gggaccccggtgaagggttggggaccccaggagggacgtccccacgtgggctcccagctccgaggtatgggccacctgccacccccaccccgctgttgttgcagctttgtctgggcagtcag

SEQ ID NO: 311562 - DNA, 122 bp, Homo sapiens
aagaaacttgggttggggaaatcctttggtccaccttaaatgctgcagctgtgtagctggcgtccctcctcgacctcgcagctggaagtccctgcctgagggcgccctctgtgcagcccact

SEQ ID NO: 311563 - DNA, 122 bp, Homo sapiens
atgaggctgagctacttgctgaactgaaaaggagagggagggagaaggggcacttccccccggggtttcaagacctgctgagcttcatagccaagaggttctcactccccactcaagtgtca

SEQ ID NO: 311564 - DNA, 122 bp, Homo sapiens
atctcagagctacactcgcagcacgggctgggagggaacaaaggccttcagtgcttgctacgtgctggcagcattgtcgtccagtgtccccaggccccttccacagcctgcgccctgatgat

SEQ ID NO: 311565 - DNA, 122 bp, Homo sapiens
agggtctcatttcacaatgaagatgtatcaaataaggaaatgccccaagcttcagcgagtcgggaaggaccaaacagacctggatgtccgggctctattgcggctggcgtgttactgaattc

SEQ ID NO: 311566 - DNA, 122 bp, Homo sapiens
gcaaaatatgtgaaagacgttaagtctggcacccacaccgaatataactcagtgaatgcccgcatctgaaaaacaagaccagccacacacacggtcacggcgtccccaccggagcacggtca

SEQ ID NO: 311567 - DNA, 122 bp, Homo sapiens
gctttgtaacgattgggggataaaaagatgttcagtcatttttgtttctacctcccagatcggatctgttgcaaactcagcctcaataagccttgtcgttgactttagggactcaatttctc

SEQ ID NO: 311568 - DNA, 122 bp, Homo sapiens
gggcttcctagaccttgagctgcaggggcctgggagaacgagcagggtagtcgcggtcagcgcagccctagagtgggagtgtagttctggggatagcttcctgggtggagtgggactagagg

SEQ ID NO: 311569 - DNA, 122 bp, Homo sapiens
gctgcagtgtgggcagcgtctcctggaaggcgatgcagatgtcgcgccgggccacgcgctcgccaagcagctggccattgtcgcggccataggtgtcgctgctcaccagcacaatgatccag

SEQ ID NO: 311570 - DNA, 122 bp, Homo sapiens
acggtaggggcgggacccaagatggccgcttgtctggggacaggagcggaggccaatacgcgcagagcatgcgcctacgccgggccaattgaaagccatagtgacagtaaccctgattcagg

SEQ ID NO: 311571 - DNA, 122 bp, Homo sapiens
catcccatatgaagaaagaaatcagaacagacatgcaggggcaaaagtagccatggtctgcgtcctggctcaggaggacagtatgtgttgaagagcaaagcctagaatgggctgatgcctgt

SEQ ID NO: 311572 - DNA, 122 bp, Homo sapiens
taaatgcccattttacttagcgtaggtgtagaaattcacacccaagtcccacttagaacacgcttcccgctccggagcataagcccctggcgtggggaggggttgggctctgtctgaactga

SEQ ID NO: 311573 - DNA, 122 bp, Homo sapiens
cagactctgacaatcattaaaccagccgggcctgatttcccagcactgcctgctaagatccgggccaagtggcactgaatatgcaaatcacctggggccaggagcccagtctaaaggccagg

SEQ ID NO: 311574 - DNA, 122 bp, Homo sapiens
gaacgcgatccgttcgcagcttccaggcaggtgatgaggatagctagtcccgcggtcctccgctagctggcggcgggggtcggccaggtgcccggaccctccgagggccccaccgccgcgcg

SEQ ID NO: 311575 - DNA, 122 bp, Homo sapiens
ctgcagcagggagtcctgttagcagctgtgggagggttggagtctgaccagaacattcctcgctcatgtttccacccactccgtgtctgcagggtgaaatgccccattggatgcggtggcca

SEQ ID NO: 311576 - DNA, 122 bp, Homo sapiens
ctgcactatattccaggctattctggtgcagcaccctgtttggcaaatactacaaatcaccgcaagcatgtctcattctgcttctccatgtggaacaggaccaggaccagaggatcattgtc

SEQ ID NO: 311577 - DNA, 122 bp, Homo sapiens
gcatccagatcttcttcagggggttctgtgtcaattcccgtggggacgccatcccggggccgggatgagtcggactgcgccgcttccaacccagcagccgggccacctcgggccacccgagg

SEQ ID NO: 311578 - DNA, 122 bp, Homo sapiens
aactggatatcatagcaataatctggcggcggggaggggtgggtgggtggggatgtcccacgttttcccaacaccaagaggccggcaaaaaggggtgtgtggcaatcatttcactggcagcg

SEQ ID NO: 311579 - DNA, 122 bp, Homo sapiens
ataaatagagcagggctgggtactcacctccacagcaacttccttgatccctgccacgcacgactgaacacagacagcagccgcctcgccatgaagctgctgatggtcctcatgctggcggc

SEQ ID NO: 311580 - DNA, 122 bp, Homo sapiens
ctagaccatggagtgaaattctgtgttgtctgaagagcaggactcctgtctagggcaggacgtagttagagacggagggagaagggtgatgtccccagggggaagatctgccgggagccacc

SEQ ID NO: 311581 - DNA, 122 bp, Homo sapiens
ggcgggcggcgggctcgcgcggcgggaggggcagcggcggcgcgcccgggctctacctcccgggctctgcctcccgggctctgcctctcgggcacttgcctggctcctgcgcgttcctgggc

SEQ ID NO: 311582 - DNA, 122 bp, Homo sapiens
ataggccctgtccccaactacagtcacattggggattagagcttcagcgtctaatattggcggggggggacaccattcagtccatagccccccttcctcagggctccaaccacatcatgcac

SEQ ID NO: 311583 - DNA, 122 bp, Homo sapiens
cgacatctggtcttggggaaagggaggtggcggctcccagggtgagggggtctggtgaagcgggagggatgaaggaccagacccttatggaaggaggagaaatcctaggtgtaagaggaatg

SEQ ID NO: 311584 - DNA, 122 bp, Homo sapiens
ggggcgtgcgcgtggccgggcgtgcgcgcgaccacccggggcgtccaggctgcccgcgcgcgcccaagccctgcttaaaaaagggagccccgagcccgcgccctccgcccggtgcgtcccgc

SEQ ID NO: 311585 - DNA, 122 bp, Homo sapiens
gccacctcttcccgctctgggtaactcgagaatggggctttgggacgcgcgtggcagacgcggagccccgcgggccgcttagggactgggagtccggggcagcttagcgggaccaccagagg

SEQ ID NO: 311586 - DNA, 122 bp, Homo sapiens
gtcacggggtggccccggataaagaagcctccaaagtacacgcggtccaggctgtgcagccgtgcgtggaggcaggccagctgcccaatgtcgttgctgatcatgtgcagcaggctcttcgc

SEQ ID NO: 311587 - DNA, 122 bp, Homo sapiens
gcgctgtgcgcaggtggagcgggctcagcactgcagctgcgaggccggattccacctgagcggcgccgccggcgacagcgtctgccagggtaggcgcgggctccgccaggacactggggaca

SEQ ID NO: 311588 - DNA, 122 bp, Homo sapiens
gcccccaaatgtcatgttgtattaataattcagctcatggcttcatactgcaggtctactcgaggaaaaagttatgtcatgcttgcaatggtcttcaaagtatgccgtccttttctttcctc

SEQ ID NO: 311589 - DNA, 122 bp, Homo sapiens
cactttgggcaccatgcaggtccttgatgatgtgactttgataaacttgtaaaaaaaaatcgtttggtggcaagatttagcattagttactactctttgaaatgtgaatgtgtaggatttct

SEQ ID NO: 311590 - DNA, 122 bp, Homo sapiens
gaggaggtgcccagacctcctcaccagctatgcccctagggagagcccctgccctccaaccggccccatttctgggcccctcaggaatgtctgtctggctctgctcagtcgggaggaggcgc

SEQ ID NO: 311591 - DNA, 122 bp, Homo sapiens
acatatgctaatgagcggcccctcccagcacactgtgttcagcaccagttgcctgcttcacgagaactagtcccagcccacagtcacggatgcccctcgcctaggtctgacccgccgtttgc

SEQ ID NO: 311592 - DNA, 122 bp, Homo sapiens
tcaagcaaaccattcttataagcgcacactctcacgaataaaaggagagtgtctcatggacgatactggcaccctataaaagtgcaattcagccttatctaatctggtgcgtgtttcatcac

SEQ ID NO: 311593 - DNA, 122 bp, Homo sapiens
tagatcaagtgcagacatggatcattgtcctatgagagtgtaagctcctcaagcacagctcgtgcttctgtttgtgcactctggctgctgtagtgtatgcttctctgtgtcctgatatatca

SEQ ID NO: 311594 - DNA, 122 bp, Homo sapiens
ggcctctgcctaggtctgattttctgtctgactctccctcagctcctaagtacctactgccgagatgtcctgccagcagagccagcagcagtgccagccccctcccaagtgcactcccaagt

SEQ ID NO: 311595 - DNA, 122 bp, Homo sapiens
gtctgactcctggatccgggtgcctgttggatccaggctcccactcccgggccctccggtcgaaccaagggtcccgacagggcccgaggcacccgcattcctaggagacaggagctcggcca

SEQ ID NO: 311596 - DNA, 122 bp, Homo sapiens
caggcaccctgtgtgctcagctgcgtcatgagagggagccctgcggatttcgtgggcctccgagctggagaccagatacttgctgtcaatgaaatcaacgtgaaaaaagcatctcatgaaga

SEQ ID NO: 311597 - DNA, 122 bp, Homo sapiens
ttttggtcgcacttggttaccacggagaactgcaagggtctcctggggaaggtgctagcacggctcaggcccggctggagctgccttcgctaccgaagccgtggcgccacacacccagtgat

SEQ ID NO: 311598 - DNA, 122 bp, Homo sapiens
cctggcggccccggcggcgcgccccgtgcgcagttgggagtggtagtcttcgctgggggtcgcgccgggctctgccagccgcctgctgcgattgcaggcggactctcttgtcacgtaatcgt

SEQ ID NO: 311599 - DNA, 122 bp, Homo sapiens
aaaactattcacgctgctcctccagggcatttcaaccttctagaaagattcgacaagattcgaaactgtttataaagagaacgtgcttgtgcccgaatgctgagtgtgagcgcgcagtgatg

SEQ ID NO: 311600 - DNA, 122 bp, Homo sapiens
aaaaaaaaaaaaaaaaagtgttactttgtcaggtgtgatgatggtagtgtggcttcatctcgagtcctctttgagaaacactttctaaaatgctcaaggatggagggtggagggtgtgcagc

SEQ ID NO: 311601 - DNA, 122 bp, Homo sapiens
ctgcatcattccctgactgttgaatgatggcggacgcagaagaaatggattaataaattccggaacatacagtattttatctttatgcggaagatcttctaatggaaataaaaccagaggta

SEQ ID NO: 311602 - DNA, 122 bp, Homo sapiens
ccccgccagccccccgcataggaaagttcctactgcggtacatgtgccgcatctgcccagcgcgtccagaagtagaaaggcatcgggcttcctaaggatatccgcggccagttgaaaggagc

SEQ ID NO: 311603 - DNA, 122 bp, Homo sapiens
tggtgccgagggaaaactgcgttaggcgagggtggaagctctgtcggacccgtgcgagcacgtgggtgcgcgcgggccgcggagtgagcagcagccaggattcctctccagatcgcgccccc

SEQ ID NO: 311604 - DNA, 122 bp, Homo sapiens
tttgccaccgagctgtgcctgctctctgcaacaggaaggggcccagctcccccgggcgaccgttcctatctgagttctcgttcctatctgggttttcgtgcagaaaaacttcatctcttccc

SEQ ID NO: 311605 - DNA, 122 bp, Homo sapiens
ttggctgagcgctctcccctccctcccgcggccccattgggccgctgagcgcaagccggccggcttccgggcactccaggccctctggaccaccgggtgcagagaactttctaggaggtggg

SEQ ID NO: 311606 - DNA, 122 bp, Homo sapiens
gatccacagcgctcccacacccgtgcgcgtgggatccggagctccccgcacacccgtgcgcgtgggatccacagctctccccacacccgggcgtgtgggatccacagcgctcctcacacccg

SEQ ID NO: 311607 - DNA, 122 bp, Homo sapiens
gcaccggtacaaagtcagggctcccagaacaagctgctcctggtgtccttcgacggcttccgctggaactacgaccaggatgtggacacccccaacctggacgccatggcccgagacggggt

SEQ ID NO: 311608 - DNA, 122 bp, Homo sapiens
ttcagtaataagccaacaaccagatggcccctctcactttccttagaagccagcagagagcggtgttgtcatgcacatgtgctcattcgcatccagcctgtctgagctcaagttagccttcc

SEQ ID NO: 311609 - DNA, 122 bp, Homo sapiens
cctgtgtggtggtggatcggcctctgcttctaacctggagcacatctgaagtgacgctgccgggcccttcttgagaaccttgccgcactcccctggtttccatggcgatgtccgtttcccat

SEQ ID NO: 311610 - DNA, 122 bp, Homo sapiens
atcgcttgaacccaggaggcagaggttgcagtgagctgagatcacgccacttaaaagaaacgaaactttgctggtgaccatgtggtgatgaaactgagcgttttggagcgcagcaaggtgac

SEQ ID NO: 311611 - DNA, 122 bp, Homo sapiens
gtgccaggcttgtcggccacctgcccactgctttggggagtgagttctgccgagtcttcccggcccagctgtgcccttgggtgggggccaggcacgtgcctgggttgctattagtctcccag

SEQ ID NO: 311612 - DNA, 122 bp, Homo sapiens
caaaaaccctccttctcaggtggaaagtttaaggggctgggagggaaaggggcctgtccacggtcacacaacacattggaccacagggccaaccctggatcccaggcagcctggccccacga

SEQ ID NO: 311613 - DNA, 122 bp, Homo sapiens
agctgcaggtggatatgtgtgagtgtgtctgcagagcgaggagccctccttccctctcctcggagcggttccacaacccccgtcttctcatccccctcttcagtctaaagggtgtcgcttcc

SEQ ID NO: 311614 - DNA, 122 bp, Homo sapiens
tctgtacaaccccctcacctgggggtcctgggccgagcttcggagtcccagggccggcagcgttgctccacaggcagctggtattaactccgtgtcggcgtaactgacccactgttggacaa

SEQ ID NO: 311615 - DNA, 122 bp, Homo sapiens
agcttcaagataatggactatagcctctggctgtcaatccacaatatagatcatgcacaacgagagcccttaagcagcgacactcttcaagtgtcaatcgacactcaaagactggctcccca

SEQ ID NO: 311616 - DNA, 122 bp, Homo sapiens
accagagcagcaaaggacctatttatagcctcagctgctgctttctctggctcacggtggcgggggcagggtggctcctcagagcaagggaggtagtcgggtcgagggaacctggctctgcc

SEQ ID NO: 311617 - DNA, 122 bp, Homo sapiens
actggaaggccgcaaagcattgtgggagttgcagtttcttagtgcgcaggctgtcgtggccggactttctcaggagcgtgcttcagtattcacggtccagtgcgccagactggaaatgagac

SEQ ID NO: 311618 - DNA, 122 bp, Homo sapiens
cccgctcactggagcgcccattgtctgctaagcagctgccttgctgcaagaaggtgaatgcgaactgatgtgggccacatcctacggagacagacatcaggacatccgtgactcctgcaagc

SEQ ID NO: 311619 - DNA, 122 bp, Homo sapiens
atgagcatggccggggaagtgcgagcatcaggctgcagcggctccccacaccacagggctcgggaatgtgtcattgtccttctcatcacactgaggtcagctttgcagtctcctgtctactc

SEQ ID NO: 311620 - DNA, 122 bp, Homo sapiens
tgcttttagggaggaaaaaaaaaggtaataacaaccttcaagagccccttcatctcaactcggcataaacaaggcaagattctgagagtggccgcccctggaagcagaaattattcttgtgg

SEQ ID NO: 311621 - DNA, 122 bp, Homo sapiens
ctacataccgccaagagtttaccaaaatccacctagtaacgcttattttcaaagcccccacgcgcatccattcctggagaatgctttcaaagtttggaagctccctgcagcctgcccgtgtc

SEQ ID NO: 311622 - DNA, 122 bp, Homo sapiens
caggctccgtgctcagggcactgcccctgggggtccacgcgacagatgcatgggggacagcgcctgaagcagagggagcaaagcagctcgaagcggccgccaaactccgtaaggatggcgtc

SEQ ID NO: 311623 - DNA, 122 bp, Homo sapiens
gcgcggaggggacaccctccccgccccatgctgcccacccgctgaggcgccacccaaccgcgccgggaggggggacagcaggcatcaccaccgccccttccacgccgtcccgcctcgatgta

SEQ ID NO: 311624 - DNA, 122 bp, Homo sapiens
cgggaaaacccgacgggaaagtgggggaggcgcagagaaaggaggtgtagggaggtgaagcgggtactatcttcccactcggagcgccccttcggcagcacagctgcccggtcctccctctg

SEQ ID NO: 311625 - DNA, 122 bp, Homo sapiens
cagggttccaagtagctaaatgaatgatctcagcaagtctctcttgctgctgctgctactcgtttacatttattgattacttacgatgattcaggtactgttgtaagtgctttacatgctgt

SEQ ID NO: 311626 - DNA, 122 bp, Homo sapiens
ttcctccttcccaatccttcatgttcaagtacgcccgcagacgagcaaatcggagcaacccgagtattaaacacagcaaagcagttagagttgagaaatccggctttaaacctaacacagag

SEQ ID NO: 311627 - DNA, 122 bp, Homo sapiens
cggggatgaggaggtacactcagccattgggccctctctgctgccaatcagagggacatccgtcgacggccccggcctcggctcgttgattggagaaactgttcctagggtgtttgcggcgg

SEQ ID NO: 311628 - DNA, 122 bp, Homo sapiens
ttcctgcaatacattgtaacttatttttttctttgtctttcaataacttgagtttcctagcgggcaaacgacgggtcttaatcatctctttgttatccataccttttacaatagctgcttta

SEQ ID NO: 311629 - DNA, 122 bp, Homo sapiens
gcaagatgaggacccaccagagaaagcacgtggctctggaggcccccagggtttgatttccggtgtgtgcttggagagggcaccaggttgggcacccaccacgcccagggcaggctctgcga

SEQ ID NO: 311630 - DNA, 122 bp, Homo sapiens
atattcactgcagtctgaatagcagactgtgaacaacttaaacatcagtcagtaggtgaccggttagttgtgtcattctttttgagaaagggtcagctccgtagcccaggctgaagtgcagt

SEQ ID NO: 311631 - DNA, 122 bp, Homo sapiens
aaagatggatttcacggaatgtgaattatatctcaacaaacttgacttcaaaaaacagatcgagaaaagatgattctattcccaaaaagggggaggggggaagatcattatataggtgagtg

SEQ ID NO: 311632 - DNA, 122 bp, Homo sapiens
ctggcctggcgggggctgaccctcacctccctcccggatggggtggctgccgggcagagacgctcctcacttcccagacggggtggctgccgggcggaggggctcctcacttctcatatggg

SEQ ID NO: 311633 - DNA, 122 bp, Homo sapiens
agccccgcgtgcgacgtcctggcccggaacctgcgagggcgtcggggaatggcccaggcacgtcccgggctgatggagatgaaagaaaataatggctcatcatgtgacccgggtcctgccta

SEQ ID NO: 311634 - DNA, 122 bp, Homo sapiens
cgcctgctctgacaccctcggggaactactttgtcctcgggctccggttacgggctcgtccgcgggaccggcaccgctgcctactggcggcccatcacatcgcccctccctcccacgcctcc

SEQ ID NO: 311635 - DNA, 122 bp, Homo sapiens
tgaaaggtatgttgatgattactgaagaagtcacaaaattgaaaaaaaaatcttagtctccgaccttcaggagctgagaacttggtgggagagatgcacaaacacataaatataagtaaaac

SEQ ID NO: 311636 - DNA, 122 bp, Homo sapiens
gggcctgctggggctgggccaggggctgaggctgaaagcagcagcctgcctagtgggtgacgccaggggccggtgtaacatggcaccgaggttggggccacagcaatgtgtgggacggtggg

SEQ ID NO: 311637 - DNA, 122 bp, Homo sapiens
gggataagggtttcttttcccttgaaaccagaggaaagggagatagacgcgttatagagtcgccttgaaaacactcggatgttaagagagactgggtgttatgagggcgatctatataaggg

SEQ ID NO: 311638 - DNA, 122 bp, Homo sapiens
gttattaaaatttctaatttcctaaaatttctcctgtcctccaccccatccattctgctacgcccctggccttctgccagggtgtctggttttccataattaagatggtggttcatataatc

SEQ ID NO: 311639 - DNA, 122 bp, Homo sapiens
aaatgtgcagccaaggttgaggaccactactctaggggatctgcagtgtgtgcatgtgtgcgtgtgagtgtgcatgtgcgtgtgtgcgcatgtgcgtgtgtgcacccactcgtgtatcccag

SEQ ID NO: 311640 - DNA, 122 bp, Homo sapiens
tcgtctccctgacctgttccttgcgaggcccgggaggagacgcgcctggccggtccttggcggcgaaactgatttgcatctccacgctttacctaaagcccgggctctggggactggatggc

SEQ ID NO: 311641 - DNA, 122 bp, Homo sapiens
cccggggccgaaagcttggggggatgaataactcctccctcctcagacccagtcgcaaggcgcaaggccgcttgcaccagcagcgcgcgtcagcgagaagcagaagcaggaagagggccggc

SEQ ID NO: 311642 - DNA, 122 bp, Homo sapiens
accatcctttcctccctctcatgccagccactaagtcccagcaaaggctgagtctccagacggccactattacgacaaggaagtagggaggggactctgctgtcctctggtgtccacccacc

SEQ ID NO: 311643 - DNA, 122 bp, Homo sapiens
gataagctttggagcacagtgaggggtgcagatggacaggagagaagagaaagggtggttcgggtgcagggcacagactaggaaaaggtctggtaacaggactgaacatgtggtgtctgggg

SEQ ID NO: 311644 - DNA, 122 bp, Homo sapiens
cgccggggccgtcccagtacgtcgccctgtttacgctggctctttctcccagtcttttttcgttttaagatgtgagaagagatgggattcttcaatcaaggccacaagcgggaaatcagtct

SEQ ID NO: 311645 - DNA, 122 bp, Homo sapiens
ataagcacggtaaactctaagaccagaaggtgtttccatgccacgtgattgggataagcacggtaaactctacaaccagaaggtgtttccatgtcactggggctgtggagtgtggccctagc

SEQ ID NO: 311646 - DNA, 122 bp, Homo sapiens
ttaaggaacactgattgtgtgacagttctgaaggtgggagcctagttaagacagttttctcggactctaggagaggagcacataatatataaagatagattgtaggcatttttacattataa

SEQ ID NO: 311647 - DNA, 122 bp, Homo sapiens
gaatggctttggagaaagaggccaggacagacacgtgaccgtctagagcactgatttggtcgtcaggaggtgtcagagttgagaacaaagaagactcagttaaaatgggcgttgtgtggaca

SEQ ID NO: 311648 - DNA, 122 bp, Homo sapiens
cctggctcagagtcggagctgcagattgccctcattgccctcttctctgagatgctctatcggttccccaacatggtggtggcgcaggtgacccgggagagtgtgcagcaggcaatcgccag

SEQ ID NO: 311649 - DNA, 122 bp, Homo sapiens
ggggtgctggcacaggagggcccacggaccaggagccacggccgcctgtgtggtgctggccgaaggcggcccccacccgtcctcttcggatcagtgattggcacctgcagtaatcttgcttg

SEQ ID NO: 311650 - DNA, 122 bp, Homo sapiens
gaccaccttaccagtggggagaatccgagactacagttcccatgagccctcagggcaccacgtggtgcctgcccgtgctaccaacgcgcagcgaggactccatttcccagcgtgcctcagga

SEQ ID NO: 311651 - DNA, 122 bp, Homo sapiens
gccggagttttacatagaatgtcttcataaccatccccgctgcccgggaacccagccccgcgcacccaaagggcgtctaatttagtaagatccgatcagtgcgcagaaaaaggcccttggcg

SEQ ID NO: 311652 - DNA, 122 bp, Homo sapiens
tggcccgaagccccactccctgtcaggcccctgtcgcgggagggaacagtagagaaagggcgtggcataactaaatgcccccaggccagactctgagcttctgctggcggactcctcctggg

SEQ ID NO: 311653 - DNA, 122 bp, Homo sapiens
ggacggggaggttgcagtgagcccagactgcgccgctgcactccagcctgggcaacagggcgagactctgtcttaagaaaaaaaaaggccagacttgtctcacgcctgtaatcccagcactt

SEQ ID NO: 311654 - DNA, 122 bp, Homo sapiens
cacaaaggacagccagcaccatcagtcattaggaaagcgcaaacgcaaacccccataagacgcctggacacacctgcgagagtggctgcaataaaacaaccacagagaagctgatgacagtg

SEQ ID NO: 311655 - DNA, 122 bp, Homo sapiens
tctgaagatttcgattgtcaagttgcagctgactctcttcattgtaccaaaattcaaattcgaataaagattcaaactgttctcttgaaactgcattccttcctggaacccttacggaccag

SEQ ID NO: 311656 - DNA, 122 bp, Homo sapiens
ggagagaaagccgagggcaggtagagtcgccccttgccaagcaagtgtggctggcagggccgggagtcggcggaggggggcccgccctggggtggggttgtcatggggacccgaggtggcgg

SEQ ID NO: 311657 - DNA, 122 bp, Homo sapiens
ctcccgcccgggggctgcggctgggctgagtgtgtctttaaatctgagccccccgcccctcgcggtggggccgggactcgcggtccgggcgggggcgggcgcggtgattggcggccgggtcg

SEQ ID NO: 311658 - DNA, 122 bp, Homo sapiens
gttctcttaggccagtcccacaagtaatgggtgaattattccttctgcttcccctctgagcgcccattggacttgggccttatagctccggaaatgcagatctgtgcttcctgacgggtgga

SEQ ID NO: 311659 - DNA, 122 bp, Homo sapiens
aagaaccataattataataatgcaaaaccggaaactaatcatgaggaacaatcacacaaacgcacactgagggacagacagtctacagaatagctgtcctgtactctgcctaaatgtcagtc

SEQ ID NO: 311660 - DNA, 122 bp, Homo sapiens
aaatagaaacctctaaaatctggtcagccctcgcggcatctggtgcagctgtgaccggcacggccaggtgacctcagacgcgctgcacacacctgggaggctgcagaggggcagctgtgaag

SEQ ID NO: 311661 - DNA, 122 bp, Homo sapiens
gaagatctcggggagagtctcctatacgtgttgctgtgtagcttccgtaccgcaaaatggcgccattctaatcagaagagttgacacaatcaaatagccacacggcacgaagacgcatgcgt

SEQ ID NO: 311662 - DNA, 122 bp, Homo sapiens
agcaaataggtattgacacaatgaggaaagacacacagagcctgatgctgttaggtttaacgaaagcaatttggataaactgatttatgctaagataatagagattctcccagaactatgtt

SEQ ID NO: 311663 - DNA, 122 bp, Homo sapiens
cctgaatgtgacccccaacgtggaggtgaatgtagaatgtcgcatcaacgccgccaacatcgccacagacgatgagcgagacaagttcgccggccgcgtggccttcaaactccgcatcaaca

SEQ ID NO: 311664 - DNA, 122 bp, Homo sapiens
acttggaatctcagctaacctctgagagttactataaagaaaccctaagtgtcccaacagcggagcacattattcaggaacttaaagatatattctcagaacagcacctcagagctcttaaa

SEQ ID NO: 311665 - DNA, 122 bp, Homo sapiens
aggcagaacttaataactatctcaggaactgattcctccatcctgaaacaccttaacaaccggaaaatagccaagaccagacaagtctgctgtggggacaattagataaaaggaggctgcac

SEQ ID NO: 311666 - DNA, 122 bp, Homo sapiens
caacactccccaagtttcagctcaagtcgtctccgaggctgcgtgtgccccagcctcgcacgcctccctgcaacgtggccgcatctggggcgccctcataccctcagggtttcccaaactct

SEQ ID NO: 311667 - DNA, 122 bp, Homo sapiens
gtcccctcccccaatgcagagggacttcccgccaaagctcttccggttttcagtctggtccgcagaggttacccataaaagaaagctgccatcacaggcagcagacctttgttctctgacca

SEQ ID NO: 311668 - DNA, 122 bp, Homo sapiens
tgatggcagaaaaaggagagctgaatgcagtcactaagaaaattttgcaccctgagactccgtaccacgatcctgtaacattagcaattatgaaaattattaaatggttgatatgaatgaag

SEQ ID NO: 311669 - DNA, 122 bp, Homo sapiens
tttagaaaaatcattaatgctcttttacaaaataacccggtgaagcagctgagcccgagccgcccgccagcggccccgcagcagctccaagaaggaactaagagaccaaggccttcctgctg

SEQ ID NO: 311670 - DNA, 122 bp, Homo sapiens
aataacgtgagaagagggggcggggtcaggccggctcctgattgggtgttgacggggtaacgttgtctcggatctcccgccccctcccttctttcgctggccgcgcacgcgtgcaacgcccc

SEQ ID NO: 311671 - DNA, 122 bp, Homo sapiens
aggtgctccaagagtgtgtgttcaatgaattgttactgaatgctgcagaaccctgctccacgctgcttcctcgccctggcgtttgggagcctgatgacagccctgcccgtgaaggccgcacc

SEQ ID NO: 311672 - DNA, 122 bp, Homo sapiens
cttgaactcctggccacaaacagtcttcctgtgtgcctcccaaagcgctgggatcacaggcgtcagccaccatgcccagcctcttttctccatacaagttatttattgaagtatgaatgaat

SEQ ID NO: 311673 - DNA, 122 bp, Homo sapiens
agcccaaagggccgccccggcagatgctgaccccagcaggaagtcaccgtccgcaaggagcgccccgctaggctcaggcttggcacacgacacctcgcttccacttcattttcctaccttcc

SEQ ID NO: 311674 - DNA, 122 bp, Homo sapiens
cttcggtgcagacccagggccaagtcgagggaggctccgggcgcggggcggggtcttgggcgtgggggcggagcctgcgcggggcgtagagatctgacgggtcccagatgcacctgcaccca

SEQ ID NO: 311675 - DNA, 122 bp, Homo sapiens
ttcttggtcccatactttaacctcttgagaaacgtattagactagtacctttctccatcccgaccttctcaacacttttgcttacacagcagttgtcccccagattgtgagctccttgtggg

SEQ ID NO: 311676 - DNA, 122 bp, Homo sapiens
gtaagaaaaagataacccggtagaaaaatgggccgaagatacttcgcaaaagaggaaacacgcaggtccaatttacaatgaaagtgctatgagttactagaggcttacgttaaagaaaagat

SEQ ID NO: 311677 - DNA, 122 bp, Homo sapiens
acgtcgttctgctggtcagtggcctatcggcacgccagagctggggccagtgcgttcctccgccgcgatgtgctcttttggacctccagctgcttctgtctctgtcttgctagggtctcggg

SEQ ID NO: 311678 - DNA, 122 bp, Homo sapiens
tgactggacttaggtcacaagggtagctggaggaactgccgggcccagctctcagattctcggatagcctgtctggtgctctctccctcacccctggccaaactgggaccttttgtcagatg

SEQ ID NO: 311679 - DNA, 122 bp, Homo sapiens
gtcccctagtactctcaaatatggcttttggaaagaattgggtaggtctatgcctgctaacgtggaaagatctccaggcattcttacatgaaaaaagcgagtaagaggccacaatgtatacc

SEQ ID NO: 311680 - DNA, 122 bp, Homo sapiens
caggagccttgggttccactctagaacttggacaaatcccaaaagcattttccaaaagcacggtgacatacttacctttttctttctttctttttttctctaaatcatttctttcggggttg

SEQ ID NO: 311681 - DNA, 122 bp, Homo sapiens
tctatggtcttatggtctaaaatggtggttctcaactggaaggcaatttttgtctccccccgacttctaccccacctggacatctgacagtagctggggacatttttgattattacatctgg

SEQ ID NO: 311682 - DNA, 122 bp, Homo sapiens
tagcaagacaatagccttgcaatctggactattgtgttaaaaattccctcactggctgggcgcggtggctcaagtctgtaatcccaacactttggaagctgaggcggggggatcacctgagg

SEQ ID NO: 311683 - DNA, 122 bp, Homo sapiens
aatccgctgtttctgcccacctgagaggagaacacccttttctccaaccacagtgttgaacgcttgggggaaattccggatcaagaccactgcattggccacttcagccactctctggactt

SEQ ID NO: 311684 - DNA, 122 bp, Homo sapiens
ggacagaaaggggcaagggatgaggaaaaggtgtatctattatggaccaggcactgaggacgtcgtctttcatcctgtcatcaaccctgattaggaggtaggaacatcccatcttacagata

SEQ ID NO: 311685 - DNA, 122 bp, Homo sapiens
atcctcattggaagcccccctgggaaaatgagactccgatttctcacctgtttaaaatcacgccacagcaacgaatcactgcaaaagcaaggttctaacttaaaacaaaaagagaaagtatt

SEQ ID NO: 311686 - DNA, 122 bp, Homo sapiens
ccctggacgctgatgagttccggcagggtctggccaaactcgggctggtgctggaccaggcggaggcagagggtgtgtgcaggaagtgggaccgcaatggcagcgggacgctggatctggag

SEQ ID NO: 311687 - DNA, 122 bp, Homo sapiens
tgtaggctttttcccataaacatacacagtccccagaaaagtgcttgagatagtgcttggcgcttagtaaacactgcataagaatgcttattggccagatgccatgcctatgcctgtcaccc

SEQ ID NO: 311688 - DNA, 122 bp, Homo sapiens
gacaagggcagggccctctgtgaacctgccgccctcagcaatgctcccaaatccccttcccgctgagagccatgctcagcgatgaccaatcacttcaggtccgacttgtgctgcagtggacg

SEQ ID NO: 311689 - DNA, 122 bp, Homo sapiens
ttgaagatgaccgcttcaggctccaccccagcccagcaattagaaaatccagggccagggcggccgggcatggtggctcacgcctgtaatcccagcactttgggaggccgaggcgggcggat

SEQ ID NO: 311690 - DNA, 122 bp, Homo sapiens
atagaacaaaaaggctgaccctcctgtgaataacagggacctcttcttgcctaactgcttcgaactgggacataggccttttccagccttttgacttgaatggaaacatcagctcttcttgg

SEQ ID NO: 311691 - DNA, 122 bp, Homo sapiens
gggtgaagaggttggggcaggccgggggactggagcctgagcctcatccttattggctggcggctagtgtccgacctgagtccggaacccgcgtccgcattcactgtcttcacccctcaatc

SEQ ID NO: 311692 - DNA, 122 bp, Homo sapiens
caggcgctctggtgctgctacccagcgcggttaagcggaagagccggctggcgggtgcagcgggagaatgctgggacgggcagggcaggtccccggccacttgcaggcctactgtctgtcca

SEQ ID NO: 311693 - DNA, 122 bp, Homo sapiens
atcctcttgccgctcacactggccgaggtccgatgcagcaggctccgaagatcatacagacgccattaccactcttggctcccagaaacctctgcgcccagagctagcgcctacgacccgga

SEQ ID NO: 311694 - DNA, 122 bp, Homo sapiens
cctggcttcttggcgcgatggtgaggcactaggggcgaagcgaggcttgggctgctggagcgggaatgagggggcgccaagtggctccggaaactgggggaggttgtactggcctctccgca

SEQ ID NO: 311695 - DNA, 122 bp, Homo sapiens
ccagtcaaatcctgagccttaggagtcagggtattcacgcactgataacctgtagcggaccgggatagctagctactccttcctacaggaagccccgttttcactaaaatttcaggtggttg

SEQ ID NO: 311696 - DNA, 122 bp, Homo sapiens
tgggcgttgtggcccggaactccgcccttgctcagaagggctagggttcgaattcacgctcggtcacgtcaggtctccgtgattgcctcattcacttaaactgttgaagctctttcttcatc

SEQ ID NO: 311697 - DNA, 122 bp, Homo sapiens
cgtctatctcgcctgctacactgtgagttcagacagcacggattgaactcttcatcttttcgtgtcggcgtcctgcacagggccatcccatcactaagcgcgccacaaactcagcccagtat

SEQ ID NO: 311698 - DNA, 122 bp, Homo sapiens
gatggggaaccggaatactctccttgcttacctgagctgacacccctcacaacgcagcaacgcgcggaccaacggggtaccagcgcctgcgcgacctctgactgttggcgtggctccgcccc

SEQ ID NO: 311699 - DNA, 122 bp, Homo sapiens
cacctccggagggaggggactgaagctgccacgcctaccaccagaactctacctgggaatcggcgaggttgggcacctggagagcaaacactcaattcttacacctcttcaccctgggctcc

SEQ ID NO: 311700 - DNA, 122 bp, Homo sapiens
gtagagtggactgtagtttatataattgtgcagggaaatcttggaagatgtaaaaagcaacgtctccaatttataaaagaatcagtgagaatgaggaaataagaaagatgggtgaaaagagg

SEQ ID NO: 311701 - DNA, 122 bp, Homo sapiens
gccgggcgacgcggtccggggggtggagcgttggcgtcgtgcgaggggtcgtcactggcgcggagacgccccctctcccccctcggctcagccgggctgctgcccgagcccggggggtgggg

SEQ ID NO: 311702 - DNA, 122 bp, Homo sapiens
ctctctgaaaaacttttaaatctgggactacaagataagatccagtctgacttatttttccgtcagtcagccattgttattgagagcttgttatttgtaaggcgttgtgctctacatatgga

SEQ ID NO: 311703 - DNA, 122 bp, Homo sapiens
ttccccagaaaacaccaaggctgtgggagagcagccacctcccccggaagcctacaccgacgccccactcagatgctgcctctatttttagcgggggcagaagtggggactgggggtgggct

SEQ ID NO: 311704 - DNA, 122 bp, Homo sapiens
ggggggtgtaggtggggcgtgcatagatgtgcacaaccaagggcttggccctccggagaacgcccaggggcagtggcctccgaggttctggcggccggcagtggcgaccggcgcagggaatc

SEQ ID NO: 311705 - DNA, 122 bp, Homo sapiens
agagctcggggtccagctgtggggtgcagccaggacccaatgccatgtctgatccccacacgggagaccaccagcctgcttcgcaaaggagttcaaaggaagcaagcaccagccaggcgaga

SEQ ID NO: 311706 - DNA, 122 bp, Homo sapiens
aacgaagaagggacagcatgggggtgaccaggggcccgaccgcaggaccgggaggcgagtcggccagaaagaggtgcagtggctgctggtggtaactacgccgacgtgcgagctctgctact

SEQ ID NO: 311707 - DNA, 122 bp, Homo sapiens
tctctaagcctatacgtttctgtggagtaaatattgggattggggggaaagagggagcaacggcccatagccttggggttggacatctctagtgtagctgccacattgatttttctataatc

SEQ ID NO: 311708 - DNA, 122 bp, Homo sapiens
ggggcgcgtgaggcgaacacgggcggattggcctcggggtcccattcgacttcttggtgccgcggggccccggggctccccggaggagagcaagttagggggtcgggggagcggggatggct

SEQ ID NO: 311709 - DNA, 122 bp, Homo sapiens
aggttgcagtgagccaggatcccaccactgcaccccagcttgggcgacagagcgagactccgtctcaacaactatgacaacaacaaacagtttgggacagagaaaaatccctgtaaacttca

SEQ ID NO: 311710 - DNA, 122 bp, Homo sapiens
gatgactctaggggcctcgtgtaggtggaatcacatagcctgtgtccttctgggactggccggtttcacccagctcagcgtcctcaggtccatccatgctgcggcaggtgtcgggacgcgcc

SEQ ID NO: 311711 - DNA, 122 bp, Homo sapiens
tcgggcggggcgggcggagtgatacagctggacgccagttggtggagcccccgcgggaaacgactgagcgcgaggagcgtgcgcgctcccgtcgtggcgacggtggcggcgagcggcgtcag

SEQ ID NO: 311712 - DNA, 122 bp, Homo sapiens
cggatgggagccgtgtgcacgtcgggagctgggagtgagcgtgagttccgtgcccaggcccgcgactcggtccacgaggacagcgctccgggtcgacggggtcctggagccgcgctcgggga

SEQ ID NO: 311713 - DNA, 122 bp, Homo sapiens
gcggtggcggtggaggcggcgggaacccggatatggggcgttcagcgcacgggagcggggcggggcctgcgggggcggggccccgggccgggccaggactgatggagcgagcgagaacggac

SEQ ID NO: 311714 - DNA, 122 bp, Homo sapiens
tgcatacatgaactatgccagagtaatgtttacagatactttgtaaccaatttcaggaggcgtttttagctggatgtgtagttaattagaccaacttatttccaaatggtttgttaacattt

SEQ ID NO: 311715 - DNA, 122 bp, Homo sapiens
tcctgcatgtggctgcctcttcttcccacccccctcgcgacctgtcttttgcgaagccgccgcggctgcttgcgctgcggccaggaagagagtcggggcctgaaatcgggaccccgagtaga

SEQ ID NO: 311716 - DNA, 122 bp, Homo sapiens
agaagccgaaggctgccccagagggagccggggcgctggcacagggcagttccctggagccggggcggcctgcagcaccgagtctccccggagaggccgagcctggcgcgcatgccccggac

SEQ ID NO: 311717 - DNA, 122 bp, Homo sapiens
ctcctgctccttcatggacacagctccggccatattatcggagcctcctgtgactggactcggggatatggtgcagccgccctggcctctgcagtgtcccctcccgacagcttactttgcag

SEQ ID NO: 311718 - DNA, 122 bp, Homo sapiens
cctcccagcctccccaggactggttttcagctgccggctccaccaccttctgtgcaggctcgctcccagcaggggcctgggaacagtggaaaggaggggagcggtcaggcatacacacctcc

SEQ ID NO: 311719 - DNA, 122 bp, Homo sapiens
ggacagacacccggggcggtcgaaatgctccaacagcctcccacccccgttcccctgccgcggcttttgtaaggctgcagatgcacctactgtgggcccctaaacactccaccctgccagcc

SEQ ID NO: 311720 - DNA, 122 bp, Homo sapiens
agcactcaggccacgcccatggccaagcccacattccgccccatggacaggcccacattccgccccatggacacgcctccacaaccatgcatttccggtgatgcttagaaatataaagatcg

SEQ ID NO: 311721 - DNA, 122 bp, Homo sapiens
ttccctttcccatccataaggtgcagtaggagcaagagagggcaagtgttcccaaattgacgccaccataataatcatcaccacaccgtgagcagatctgaaaggcacactttgattttttt

SEQ ID NO: 311722 - DNA, 122 bp, Homo sapiens
agaggagcaaatgctggtcctctgacaacaccagtcctcagggcagagagagagagacctcgatggagagagaaacaatgaaaggccccagtcttggtaggagacgtgcagcctcgtcatca

SEQ ID NO: 311723 - DNA, 122 bp, Homo sapiens
aacattatggaaatatacaattaaatttacattaaaaatttttcctatgcttaagaaacacgaggccaacttctttgagtttagccttaaataggtaaatatgtattttggcagccatgaaa

SEQ ID NO: 311724 - DNA, 122 bp, Homo sapiens
ataggtgtgagccacttcactcagcctttttggaattttctacatgtacaatcatgtctgcgaacagatagagttttcttttatttttatttcccagttttatgacttttatttatttccca

SEQ ID NO: 311725 - DNA, 122 bp, Homo sapiens
cgtgaacgccatggctggggaggaggagcggggagcggcgccgttgccagcggagaaaggcggcgcagggccctctgggtaaaaccattcacttcccccggccacagccgcgaccgccaccg

SEQ ID NO: 311726 - DNA, 122 bp, Homo sapiens
tgtggtatttgcttagtagctcaaacctaccctacgactactgaattgtggctatgggggcggaggggctctggcccgcactgccgggtcggccacagcatctgcagggttccgcggtgtct

SEQ ID NO: 311727 - DNA, 122 bp, Homo sapiens
aaacaggcgccatcttctcggcgcggtcctactccggactgtatttcccagaggcccccgcgagtccagggcagccccttcatttgcctgctggaccctccgcctcaagggtaggggaagtg

SEQ ID NO: 311728 - DNA, 122 bp, Homo sapiens
gccaggcagggacccgggtagatcctctccagttctcaccaggacaccccagccttaccgcgccctcctggactacccagcagccccgagttcgagccctccccaaccccaggccctccccc

SEQ ID NO: 311729 - DNA, 122 bp, Homo sapiens
atgggcttccctcacttcccggagtcggaagcatgacggcagacacctggggcctacattcgaacctgctagttttcaaagaaaagtcatcactgtgtgtcttaagatcaaaagtattagaa

SEQ ID NO: 311730 - DNA, 122 bp, Homo sapiens
tttgtttccacattcttgtaagcctcattatgtatcccagggacagttaatatcgtcatacgaattcacaggtgaggaaatggaatcacagagagattatgtactttgcataaggagagcga

SEQ ID NO: 311731 - DNA, 122 bp, Homo sapiens
tgacgggcgcgggcagccgacattcaaggtctgagcttggcttctcattccagacagttccggaccttccaccaccccacctacggcagctgctacacggtcgatggcgtctggacagctca

SEQ ID NO: 311732 - DNA, 122 bp, Homo sapiens
cacaaggtactcgtgctgtatctacaactgagggagctgggtgctgacaccccaaaaggccgcacttttccccttaagagagtaaacttgtttcgaaggcagaaagaaggcaatggtgtctt

SEQ ID NO: 311733 - DNA, 122 bp, Homo sapiens
ggtgggtgggagggacgcaggctgccggtgctggtcccgggttgtttgtggtgcagccagcggctggtcactcacatgcagactgagctgacgcttaggacaaaatccatgttttttcattt

SEQ ID NO: 311734 - DNA, 122 bp, Homo sapiens
agaaagggaggaaggaagaggggaagggaagggaaaggaaagggaggggaggggaggggacgggaggagaattttatgcctcaaagttccaaaagacacaagagtcacagcatctgtgccta

SEQ ID NO: 311735 - DNA, 122 bp, Homo sapiens
tcgctcccgagtctgctgcccctcaccgcacacacctggggaacaccgacacgcccccaccgcatccccctgaacctgctgcccctcaccgcacacacctggggaacacacacgcctccaca

SEQ ID NO: 311736 - DNA, 122 bp, Homo sapiens
tgcaaaaagagagaaagaaaacagcaggaaccacaacaaaacgccagcagggcgggcgggcgcgcagcagcagcggggcggccgaggcagtagcggcggcagcggcggcggcggcggaggca

SEQ ID NO: 311737 - DNA, 122 bp, Homo sapiens
aaaaggaacttgatgaggggccctaggggtgcaaatgtctttagtcccaaatgtcttcctcgctacacaatgaaccagttcccctccagctcgccgccaacccaggacgcagcccggctcag

SEQ ID NO: 311738 - DNA, 122 bp, Homo sapiens
ggagagtttctttctgaatgtctttgctactatcacgctagctttggtagaggccctgctcgtgaccccaccctctgtggtgacagaatctttgcctaattccacccagcacagctgagacc

SEQ ID NO: 311739 - DNA, 122 bp, Homo sapiens
agacctggaatcgcccaagtccctctactcgcgaggtgagtcaggctgtggggggtggggcgtgggggcggggagacagggagacagggagacagggccaggggaggcgaggggtccccgtc

SEQ ID NO: 311740 - DNA, 122 bp, Homo sapiens
gataactcttagagtgaccagctagcaccctaattcttctccagccctcagcttcctctccggcagcctggggtgaaggcctctgtaggaccaagtgtgtccagctataactccttccagcc

SEQ ID NO: 311741 - DNA, 122 bp, Homo sapiens
agagagaagaacatggcatgagcagggggactggctgctcattcctgggacccctaagcccgcaggagaaaggacagggaagggggagaaggtgcccaggtcttggggagggttggggtgtg

SEQ ID NO: 311742 - DNA, 122 bp, Homo sapiens
tactgcaaatagtgcagaggatgtacacccgtctatgacatagctggtaatctccagaggcggagaagatattactcacaataacataaacacgctgtgtgtccaccgtggatcgtaatatc

SEQ ID NO: 311743 - DNA, 122 bp, Homo sapiens
ataacaataaacactcctaggaacatagattgtattctctaaaaaatgcttctggccgggcgctgtggctcacgaggtcaggagttcaagatcagcctggccaatatggtgaaaccccgtct

SEQ ID NO: 311744 - DNA, 122 bp, Homo sapiens
gaaaaagaaaagaaaaaacaaagttgggctgggcttagtaattacttgatcccaggaggtcgaggctttgtagtgaacctgttcgcgctactgcactccagcctgggcgacagagtgagacc

SEQ ID NO: 311745 - DNA, 122 bp, Homo sapiens
gagtggcgtctcgggcatcgtgggcatggaggtggatgggctgcccttccacaacacccacgccgagatgatccagaagctggtggacgtcaccacggcacaggtgtaaccgtccatgttcc

SEQ ID NO: 311746 - DNA, 122 bp, Homo sapiens
tcctgttgaaagattccacttccgatctgtagcttgaagtgcaggtcctcaaggtaagctcgagggaaaagcagaaaccacctgttgatgatgggcacccgagtcatgagttacagtcagag

SEQ ID NO: 311747 - DNA, 122 bp, Homo sapiens
aaggctgggagtgacagcaattaggagagcctttctgtacgacggcctgcagtcctggtgcggggcagagcgtcacggggactctgtcctaagaacaaatgtttcccactgccagctggcct

SEQ ID NO: 311748 - DNA, 122 bp, Homo sapiens
tctacccagaaacgaatagggccccagttccgggcctaggaagggaaaacccaggtctcccgggcgccctggagctgtgcccccctgcccggagcaccagccccactcgggctttccttctc

SEQ ID NO: 311749 - DNA, 122 bp, Homo sapiens
ggagtctggagctagactgatctgtgttcaatcctgtcttggttactcattggggggcctcgactttcatgtctctgtaatgtccctgacagtatctgcctcacagggttgctgtgagagtc

SEQ ID NO: 311750 - DNA, 122 bp, Homo sapiens
tggggcacagtctaagttggtctggtgtgtggaatgagactggggcctaataaaaaggagcgtctatacaggagctcaaatgggctgaaccttgtagcattctgaggacaggtctgacttct

SEQ ID NO: 311751 - DNA, 122 bp, Homo sapiens
gagctctgcgcgtctcaggcagccaggaccctgggtcgagagaggctgcgatggtcccaccgtcacattcagatctgaccatggccagtggaagaggaagagatgtgtcctcttgggctgtt

SEQ ID NO: 311752 - DNA, 122 bp, Homo sapiens
acgttggactggtccctgcaggggaggtgggcacggtcagcgggcggcgggtgcaccccacgctccggacacgaggctgagctgagccctgatgagctgcattcacacgtgttggaaagggc

SEQ ID NO: 311753 - DNA, 122 bp, Homo sapiens
aggcgcccgccaccacgcccggctaatatttttataattatagtagagacagggtttcaccgtgttagccagaatagtctcaagctcttgacctcgtgatccacccgcctcggcctcccaaa

SEQ ID NO: 311754 - DNA, 122 bp, Homo sapiens
acgcgcgcccgagagaaggcgccgggggaggaagccgcgcggggagaccctggcgtggcccgcgccgcccaggatgactttcctggcaagttctgcagacggtgcccctttcttgggacgat

SEQ ID NO: 311755 - DNA, 122 bp, Homo sapiens
cagctggtatctgctgcagaattgattgctagcttggtgtgtggggaaatattcctacagcggggtctgaaaagcattctgtattgtgagagtacaataggaagaaactaagtttatttttt

SEQ ID NO: 311756 - DNA, 122 bp, Homo sapiens
aatgacacgatagaagctagtacctgtgtctctcaaatttttctaacactttttatcttccgatcaggtttgtgcaggggaaactcagtggagaggaagatatatatccccttaaataaaac

SEQ ID NO: 311757 - DNA, 122 bp, Homo sapiens
tggaattagggtgtaattgagaatggagtgaagctaccaactcacttcacagtcttcacccgtatgatttcaacctcagccgtattggaacatgctctaatcatccaaaccaaacagctgaa

SEQ ID NO: 311758 - DNA, 122 bp, Homo sapiens
atccacgtccaggaatcccagactgtgcagaggttaggggccctggcgagggggcccagtcgtatgcgataagcgccgcttgtcccgcaggcggaagaggcgctgagttggaggtcgcgcaa

SEQ ID NO: 311759 - DNA, 122 bp, Homo sapiens
gggaagctagagccctccagagtccttgcaagtccacccccctggattcatctgctgagccgtaagcccaggcctgccccttgctgccatggagcctgtcaaatagtatcagggtcacatgt

SEQ ID NO: 311760 - DNA, 122 bp, Homo sapiens
gaacaagagtgttctgtgagctggacagaacaggaatgtcaacgtttcctccagggggttcgcctagggcctgtttgcacctgcaggtctgaccctgtggagctaaaccccctacaagcttc

SEQ ID NO: 311761 - DNA, 122 bp, Homo sapiens
tgacagatgggccctgaccctggagacgtctgagaaggtgtttggggtccgagaagagtccgcgtgtgcagtgactggaacctgtccctggtgtgaacttggggatgagtgggtgacggggg

SEQ ID NO: 311762 - DNA, 122 bp, Homo sapiens
ttgtccatgtctcggacagagcctgggaagctgccagtgagatttcagagaccaagagcgcgaaggggcgggcgatgtggcaatccgtctgggatgtgaaaagcgtggagcgcatttagagg

SEQ ID NO: 311763 - DNA, 122 bp, Homo sapiens
gagacactacctctgtctttcaaggatgcactgtatacaaatatcctggaaaagatagtccggaacaaaggacagtacagtgccttacttgcaagatgtgcaagcacacaagacctatgaag

SEQ ID NO: 311764 - DNA, 122 bp, Homo sapiens
taaggttaaatcgtattgaaattgcatttcatgtctgttcccttatgagaccactgaagccgagaaccatgtctaattcaaaagtgcacagcaggtgctcagtgtattaaaatgaatgaata

SEQ ID NO: 311765 - DNA, 122 bp, Homo sapiens
cattagtttgcgatttgatttgcttacgtatccagcctggaaaatcttcatcacagggtccggttcctcgagccagccgggccccaagtcggagggttctccttgaacccagcgagtgggcc

SEQ ID NO: 311766 - DNA, 122 bp, Homo sapiens
agagaaactttagagaaatgaccattaccagcctaactattaagaaagtaatgggccgggcgtggtggcttatgcctgtaatcccagctactcaggaggctgaggcaggagaagcgctggaa

SEQ ID NO: 311767 - DNA, 122 bp, Homo sapiens
cctagttttctgccccagggtcctgtcagttcatccccggcctaaagtcccctcgggagacgaaaaaaacgccaagtatccccgcagagatcggggtaagacgcagttgagtcttgcacacg

SEQ ID NO: 311768 - DNA, 122 bp, Homo sapiens
tgtgagggtacctgactctggctcagagccgagggtgggactgggtgctgctcctactggcgggacttgggtgtcggaggttgggatttttagagtagtggctgagtgtgatatgcccaggg

SEQ ID NO: 311769 - DNA, 122 bp, Homo sapiens
ccccctcctttgtcggatagtgtctgcggcggggaggcggtgacactagtccgagtggggcgtggagaccgaccagcacgaagggcggagttccggcccgcacccctccgccgcctgccgct

SEQ ID NO: 311770 - DNA, 122 bp, Homo sapiens
gatacatcctcaggcaagtgccctgtgattggccatctttaggccgccattagagttgagcgtcgatttcacagagggttgcaaactctaatgtctgtaagagccaaacaggaaccaaagga

SEQ ID NO: 311771 - DNA, 122 bp, Homo sapiens
acaatctcatcaatctgggctgatgcctcatgccgggcattgtaataggcctttcgtagacgacaaacatctctcccaactggggatttacgcccatagtacttctgaagaaagcaaataaa

SEQ ID NO: 311772 - DNA, 122 bp, Homo sapiens
cccggtgcttgcgaagggccagtgaagctgaggtttctaaggggacgactaaggaatccacgcatcactaacgttatagagactcgcgaagtgccgctgtgttggttgtgaaatttccctct

SEQ ID NO: 311773 - DNA, 122 bp, Homo sapiens
gctggtggatttggatcgcggcatgaggaatccgctccataatggaaggaagaaaatctccggcagctatgcctcgcgggttcataaggactggagagttactccttctctctggccccctc

SEQ ID NO: 311774 - DNA, 122 bp, Homo sapiens
ccagttcatcttccgctgtcgaaagcgtttcagaacttaaactctcagattgcctcagtgcgctgctgtagttgtcaattaggcaagagataaaaaagggctttggctaagtggctagatta

SEQ ID NO: 311775 - DNA, 122 bp, Homo sapiens
cgctgcagctggaggggcaggtacggtccggggggctgtccccgcacttaggacggggtgcgctgcggctaggaccccccaggcgcccctcggagcgcgcagagcgctgggccggtttcccc

SEQ ID NO: 311776 - DNA, 122 bp, Homo sapiens
gcgcgaactccgggggctgaagtccacctacgctccacttaaccccatatactcagaatgcgcagtgcggcatctgtccactgggggcgtctttttcctcgaattgcgctagggctccccag

SEQ ID NO: 311777 - DNA, 122 bp, Homo sapiens
gctgcagcggcctgggtccgggcggtgttcgcggctttggcgacggcggtggagctccttcgtgggcccctgaggacgcctggatgggcactcaccctaaggtcaggaggcgcgagaggagc

SEQ ID NO: 311778 - DNA, 122 bp, Homo sapiens
gctggggcagcagggatttcggactctgggagcctgtctgggccgcctgcctcctggaggcgccctttccggcttccttggagtgctcctatggaatatgctagtctatcggctgaccagga

SEQ ID NO: 311779 - DNA, 122 bp, Homo sapiens
cccgccctcggtgatgcggtactcctttagggaagcgagttcctcgtggccagaaaggaccggcccagtgtccgggtgttaaaaagggttgtgaccacgtgaaaatgtcctcagtgctcgaa

SEQ ID NO: 311780 - DNA, 122 bp, Homo sapiens
tccgagccgtcgttcctttcacaggggtcatgcctgggttgcagggaggatgtgctgccccggggagggaggaggtgcggggtgtcggtgggtggggaggaggctgggccctggcctccagg

SEQ ID NO: 311781 - DNA, 122 bp, Homo sapiens
actcgaagctctcgaagtgtgctggatgattccccacacacttttccccaactgggcatgcgttttggcagtgagtcttccgtttaggttctgccatttgattttcagggaattgctacagt

SEQ ID NO: 311782 - DNA, 122 bp, Homo sapiens
ccagaccaaaaggcaaagctcatgttctcttgcctttgctataccacctccctgcagacacgcaaaaactctagtaaagaggtatataatagagaaggtacggaaaggagcaggagcatgga

SEQ ID NO: 311783 - DNA, 122 bp, Homo sapiens
gtgacctggaagcggttcaactgctctggcttctcagaagaggaggggaccgggcggtaacgaggagccaaggggaggagactgctcgcaaaacccggaaaagctttcccgatccactctgc

SEQ ID NO: 311784 - DNA, 122 bp, Homo sapiens
ctcaggtgatccgcccgcctcggcctcccaaagtgctgggattacaggtgtgagccaccgcgcccggcccatggactttttaaatagtaaaacttgaccagaacagtttttttgtttttttt

SEQ ID NO: 311785 - DNA, 122 bp, Homo sapiens
agcgcagcgcgcttcccgggggcggcaggagaccgaagagaccaagggactgcgtgctagcgggcgggcgaaggccgggctggaaaactcctcctctcgcctctttccctccctccttcctg

SEQ ID NO: 311786 - DNA, 122 bp, Homo sapiens
tctgcctggaaagcgcctccttccttcctggcccattgggaaatcgcagtgtcctctggccggtcccagcacccccgggtgggaccccagcgaccctgcacccccccactgcagccgtctcc

SEQ ID NO: 311787 - DNA, 122 bp, Homo sapiens
gcggtggggaggcccggggcgccaagcgcgacggcagaaagcggcagcggcccgtcatggcgcaccgaaaccagcggcagtcgcacggccacctgagtcgccccttcctgctggagccagcg

SEQ ID NO: 311788 - DNA, 122 bp, Homo sapiens
cctccctgtaatcccgaaggaattgaaaactaacaaagaaaaggaaatcacgggctaggtcgcgagtatctcgttgtcaccctgaatttgctactgcgtattgaatcacagcttcttgtttg

SEQ ID NO: 311789 - DNA, 122 bp, Homo sapiens
acttgatggtggtgaacaactggcaggtgtttctggatgcatatcggcgctactcaggcccgtgagtcctcgtctccctgacggcagtgattctccgtgcagcctgggggttccctcacctc

SEQ ID NO: 311790 - DNA, 122 bp, Homo sapiens
tcctattatttactaagtaatttacatagtgagaataagctgaacatactgcccctcatgcgaagtcagaaaacagatctttatgcaaaacaaacggagctaaacgctgtaggcaagaaggt

SEQ ID NO: 311791 - DNA, 122 bp, Homo sapiens
ggctgtattctacagttattctttgagtgttttcgtgtcaactgccggcaatcagttccacgtctgtgttgagccttggggagtttaccgctaagatgttttcatagaaggcattggagatt

SEQ ID NO: 311792 - DNA, 122 bp, Homo sapiens
agggcatcgagcatgacaaccccatctcccgttactatgaccggctggctacggtgcaggcgcggggaacccaagccagccaccaggtagcagtggggccgggccgggggccgagctgccgc

SEQ ID NO: 311793 - DNA, 122 bp, Homo sapiens
aggtcagggagaaaacaggcaagaacttgagcgtcagaattgcacgtccgcgtgtttgtgcggggctggaacttggcagctcccgctgaaattaaagcgcgagtcttgcgccccctcatggc

SEQ ID NO: 311794 - DNA, 122 bp, Homo sapiens
atgcgatgcggacgccggacccgcttggggagcggtggagggtggggctgaactcggtgacgcctccctcacacccagcttcagtggcgccaacgccgcttccccgcaccctcagggcgagg

SEQ ID NO: 311795 - DNA, 122 bp, Homo sapiens
gtgacctgataactccacttctcagttcctatcctagagaaacattgatgtgcacaagaacgtattgccggccgggtgcggtggctcacacctgtaatcccagcactttgggaggccgaggt

SEQ ID NO: 311796 - DNA, 122 bp, Homo sapiens
acacaagcccggtgactcaggggctcacgtgtgcacgacaccgggagctcacagggacagcgccccgggggatgcaaggaactttgcctctctgtccctctctgtagggatggaaagaggag

SEQ ID NO: 311797 - DNA, 122 bp, Homo sapiens
ttacacaagtctgtgaagcttcccacaatgcacgatgtccttagcaaatacaacacagcccgctggtatcgcctcttccttcactacctccacaaccacttgtggcagaggaggagcctcca

SEQ ID NO: 311798 - DNA, 122 bp, Homo sapiens
agatggcatgcggcaccatggtgagcctggcctgctggcaaggggcacagcaccattccacgcatgagagcccggccgggggcacagggtctgggctgagggctctagcccctcagcaggca

SEQ ID NO: 311799 - DNA, 122 bp, Homo sapiens
acttctttccgctttctcgaagcgctccaggacgcaggtggcacgctcaacgcggggaggcgccacctacaggacagaggaagacctgcagcttgggcttgagatttcaacagtctgtggcg

SEQ ID NO: 311800 - DNA, 122 bp, Homo sapiens
tcatttccggtgtcgcgctttcttggaagctataaagagccacgttaggtgttggcagagcggccggtatagtcctcatacccgctctctcatgcttccggacacagtgaggctgtggttgc

SEQ ID NO: 311801 - DNA, 122 bp, Homo sapiens
gagttctggtgtttttcagttctttgtattcatgttgcacgtgagttctgtttcctgttacgtgttgggaaaggacttaggagaggcaggccggcgtggtggtgggtgcaggtcgccgcttg

SEQ ID NO: 311802 - DNA, 122 bp, Homo sapiens
gttgctgggttgtatggttagtgtatgtctaacttttcaagaaactgccacaccatctttcgctttacattcacgccaacaatctatgagggtcagaggactttttattaaacatgtactaa

SEQ ID NO: 311803 - DNA, 122 bp, Homo sapiens
ccgagaagcaactagtggcaagcgggactcagagccgcgcgggaggggagctagtggtgacggaacagagcacagtaagaaaagcagggcaagaagggcgagtgcaagttccggatggctcc

SEQ ID NO: 311804 - DNA, 122 bp, Homo sapiens
tcctcagagcctgcatgcttgtctgtttgcctcttctttcccctcttcatattccttggccgtttccaatgcaaaagataaatcttgcataaagacagaggttttgggatctgagtctgatt

SEQ ID NO: 311805 - DNA, 122 bp, Homo sapiens
gggcgcggagcagagccgacacggctggcgggggaggcggtggaggcggacaagcgaggacgtttctggagaggagaagggaggggaggggaggggatagggggagggggaggaggaggagg

SEQ ID NO: 311806 - DNA, 122 bp, Homo sapiens
ctgttcattgagaggcgtcttagctgagtacaggaaatacacctattttacctgttcctgcggaattggtcttacttccaggttaagaacggaggacttgcctaggtggtgaatctctttca

SEQ ID NO: 311807 - DNA, 122 bp, Homo sapiens
tcatcccacacttgtattttgattgatgaatcacaagtgcgttgggaggcagggtaccttcgacttttccgacgttgaactcaggcttcgttttgttttgctcttggaggaatttccagtgg

SEQ ID NO: 311808 - DNA, 122 bp, Homo sapiens
gcccgcgcgctgtggcccctgcggcgcttctggaggagcacaggcttctggtgagcgctccgcggcctccgggaccccctggccgcacggggagagctcgggcgccccctgactgcgcactg

SEQ ID NO: 311809 - DNA, 122 bp, Homo sapiens
ggggaggcccacctggggtaggcccacctgggagaggaccccctgggagaggcccacccacgagagtcccacgtgggagagtggaattccacccgggagaggcccacctgggagaggacccc

SEQ ID NO: 311810 - DNA, 122 bp, Homo sapiens
cagttgagaaggtgatttgcccactgacctgcagcaaggacacaccagagctgatgaattcgtatcaaggcccaaacccctagcagcccttttctgggcacctgctatgtgccaggccctct

SEQ ID NO: 311811 - DNA, 122 bp, Homo sapiens
ttcctgagccctggggaatcacaggcagcttcctagaggaattatacaaattctaacttgcgacagcagttaagtgtgggaataatttaactggtgtcccaagaataatatatcccagaact

SEQ ID NO: 311812 - DNA, 122 bp, Homo sapiens
tgcccgccccgcctcccgcaggtgagagggggcggggagggcctgaccgacccgtgggagcgaggccaaaccctggcccgcatgagggcgaacgcctgggattacgtcatcggcgcgtgacg

SEQ ID NO: 311813 - DNA, 122 bp, Homo sapiens
agctgtagatgatgtgggtacagaggaagcggtcaagggcatctgggaagcagctcccatcgccttcccggtactgggaccagctggtgtagtagcagaccagtttgtatgcagagcctgaa

SEQ ID NO: 311814 - DNA, 122 bp, Homo sapiens
gggggcagtgccctgagttgggccagccacagtcctccttggaagtttccatctggcttgcggtgagggtggaggtggggcagcttcattgacgtggggtcacacagggccccatgctcacc

SEQ ID NO: 311815 - DNA, 122 bp, Homo sapiens
ggaaggtaaaattggcttttgtgtaatcaaagagctaccgttgtcaacgatgtcacgttacgttatttttgtatgtccctcttgccaacaggtaagcaaagtgaacgcatcttcctaccccg

SEQ ID NO: 311816 - DNA, 122 bp, Homo sapiens
cccacctcccctatcagaaagcccggcctcggaccacttctcctcctcaccatctgggggcgctgccgcgctccccaagccttgtggaatttcgaaaatgtgcgccagggcgacacctcttg

SEQ ID NO: 311817 - DNA, 122 bp, Homo sapiens
tgttgcccaggttggagtactgtgcctcaatctcagttcactgcaacctccgggttcaagcgattctcctacctcagcctcccgagtagccgggattacaggcgtgcaccaccaaacccagc

SEQ ID NO: 311818 - DNA, 122 bp, Homo sapiens
ctgttgtgagcgatttgagagccagggccaaatctgggtccagacggccagctgggccagcgaggggattccagtccccacaggaggaggtggtgagagagggagagggagggcatatctga

SEQ ID NO: 311819 - DNA, 122 bp, Homo sapiens
tgcaaatcaagggatggctttgtccccacttcggcgcaggtgggacagacttggggaagacgcagctgaagagacaaattctcagggtgcgtcagtctcatcactgaccgttgcttttaaac

SEQ ID NO: 311820 - DNA, 122 bp, Homo sapiens
gtggaggtggagcgggcgggctaaggtgggtgcggaagcaggacccaaaccatggtcccacgggactagaatacccaggcaggcgggagagtggccgggcaggcgctcgctcaccgatccgg

SEQ ID NO: 311821 - DNA, 122 bp, Homo sapiens
tggcgctggtatagtaggggcagggggcgtgcctgacccaaggttgggtcctggagcatgcgcagtcttcacagaaggtgacggggagaaaaatgcggaggcagcgattgcgtaggagcagg

SEQ ID NO: 311822 - DNA, 122 bp, Homo sapiens
caggaagttcactatgtgagggcaaggatgtgatttggaggtggggatggatagctccaacggtgagccaatacgtagctcctagctctggagcaccaagagtgtgccgtgactctatgacc

SEQ ID NO: 311823 - DNA, 122 bp, Homo sapiens
agaacaggggcttctgatgaccaaggatgcccagctgaatgctgccctggcccagcagcccgttcctcagagggctttgctaagctttgctccctctcactgcacaccctgcctgtggtcct

SEQ ID NO: 311824 - DNA, 122 bp, Homo sapiens
tgccagtctgtgggatctgggctactgctcacttgggagcccttttggccagcctgttttcgttgactgtcccaggcagcctgcctaggggcctgttttgctggaagaatgagcagtagggg

SEQ ID NO: 311825 - DNA, 122 bp, Homo sapiens
aggtttccccccggccacgcagtcaccattaagatagctgttagagcaaagtagtgtaaacggatagctgctttctgccgttcccccaacgtgactcctccggttgctgcatactatatggc

SEQ ID NO: 311826 - DNA, 122 bp, Homo sapiens
gacatgcttggagaaacttgtctttgcagccagcgcccgctcaccagtctgggctctctgcgctgcctgactctagtaggcatctgaagtgatggctggcaggcagcctcttcgtcagcagt

SEQ ID NO: 311827 - DNA, 122 bp, Homo sapiens
tacgatggaatataatgatgtctgagatgtgatttttttgccatttgaaaacctctcctgcgaactgtcaagggcccttagagtcagtaatttgggtgttgaaccctcagcctgtggcagat

SEQ ID NO: 311828 - DNA, 122 bp, Homo sapiens
acagtattctaacaggactggctggcttcccagagcacacactttcacccagaaagagatcgtattgatcagagtgtggtggggaaaggaaggtcacttgtttttacgtgtggtggggaaag

SEQ ID NO: 311829 - DNA, 122 bp, Homo sapiens
ggtgagaccctgtctcaaaaaaaaaaaagaaaaaagaaaagttttatcaaaggataaaaccgaaatgctatagtatatagtgtgaccataatttcagaagaagagaattagcataatttaaa

SEQ ID NO: 311830 - DNA, 122 bp, Homo sapiens
taagtgcaataccaaggggcaaataagaagccaaactgtggaaaatgaacaggggagcagcggcagttcttggagttggggaaaagagagaaaacgtgttttttaacatgaaaatgtttgtc

SEQ ID NO: 311831 - DNA, 122 bp, Homo sapiens
gacaatccgggcaggatgggcggcaggacgcggaggggcatctgcggagcccgtcgggaacgccctcttggcttccggtgccgggcagcggcgggcgcggcgcccacagcgcccctagcccc

SEQ ID NO: 311832 - DNA, 122 bp, Homo sapiens
ggctagcagagctgggaggcaaaccagaccgtcagcaccagggcggcccacgcctgcttccgcccattggctgcccgcgtttcaagacccgcccccatattggagagcttcttccggtagcc

SEQ ID NO: 311833 - DNA, 122 bp, Homo sapiens
ttgcggaggagggcggcctccgcgtccccaaccgccgaccctcgacctcgtgcgggacaccgtgggcgccaggccccccgcttgcctgggttccctgcgacatcccgacccgcgccccgaga

SEQ ID NO: 311834 - DNA, 122 bp, Homo sapiens
aacatggatcggaagaagcagctctgagctgagaggaccagccgatggagctgaaactcccggccttccaccgaaatggtgacatcagcaaagagctcctcctctagacacagtttcatgat

SEQ ID NO: 311835 - DNA, 122 bp, Homo sapiens
tatcaattccaaaggactgtaaaacaagtacctacatgttgaagagagaaggtatatgcacgttgaagaaagaaaataatttatcaagagtaagtattgaacattgctggtgagattgagtt

SEQ ID NO: 311836 - DNA, 122 bp, Homo sapiens
tggatgtggcgcgccaccgacgtgtaagtctggttggcccgcagtgggtagccgtgagcccgcaggtggcgctccaggtcctgcaccgtgccgcggaaacggctcagctcggccgtcaggtt

SEQ ID NO: 311837 - DNA, 122 bp, Homo sapiens
ccggaagtgttcttttcacaaagcaaaccctccaggggcaagagttcagcctctaggttccgccaatttcctggttgctaaccggcttctgtaccagaccggaagcggtatgtcttcactgc

SEQ ID NO: 311838 - DNA, 122 bp, Homo sapiens
cacagtacagtcaggtcaaagaaagagttggggctaaggaagcatttgatggaagacaaacgacgatggctaaaatctcagtagcctacgatgatgaaatgaaacagcatcgcagagagaga

SEQ ID NO: 311839 - DNA, 122 bp, Homo sapiens
tctgtggtgcctgggataaagtgctttagcaggttctccaggtgccgctcgaagaacatgcgtttccagctgccgccatggtgggccacgtggcacacgggccagcgatgcatgcagcagcg

SEQ ID NO: 311840 - DNA, 122 bp, Homo sapiens
tataaacctgagctgctatgtaagaactctgattacccagcggctgccaggctagccagtcgagagactgtggaaaaagaccatggggaggcacagacgagccaacaccctgttggtccaga

SEQ ID NO: 311841 - DNA, 122 bp, Homo sapiens
tggattatccatcaggacaagaggacccggtgtgccctctgccactcacagaccaacacccggtgtgagaagtgccagaagggtgtccatgccaaatgcttcagggagtaccacatccggtg

SEQ ID NO: 311842 - DNA, 122 bp, Homo sapiens
gtgcagtggtacaatcatggctcactgcagccttgaactcccggcctcaagcaatcctcccgccttgatctacagggatttacaggcatgagttactgtgcctggccagatctcatgaagtt

SEQ ID NO: 311843 - DNA, 122 bp, Homo sapiens
ttacatatcctacctgagcatctttttgaacagacataggagcccagtgatagactgctccgagacacaggagtttctagcatatcctccttctttagtctcacattaagtttctattccat

SEQ ID NO: 311844 - DNA, 122 bp, Homo sapiens
ccgtgttcaccaaccaagagctgcagcaccccacacagacgaaattgcgttcacatgagccgggtgaaccagtacccgagtcgctgggccagcccgccaggagccagggtgaggaaatctcc

SEQ ID NO: 311845 - DNA, 122 bp, Homo sapiens
ggcagatatccctctctgaccagatagccatatcttggaccacgtgataaacagggtggccgtaggtgggataggcaataaaatatgttagagaaaaggagcgaggaaaggacctcgcattt

SEQ ID NO: 311846 - DNA, 122 bp, Homo sapiens
gggcaggcgcggtcagggatggtggggatggcggcagcagctagacccgcgctggtccctcggcggcagctgactcgctggatcccctccggcccgcggtccctcacctcgggccgcgcgcc

SEQ ID NO: 311847 - DNA, 122 bp, Homo sapiens
ctgccggcgcagggccggctcacggccgtggccatggagatggcggcccctagtctagggcgtacaggagaccgtgcgcccgcccgccaccgcagttcaaaggcaggaaggccccaggagga

SEQ ID NO: 311848 - DNA, 122 bp, Homo sapiens
atttagtagactgtttacatttgtcacaaatgaggggaggaatttttaatggtatgccaacgggaaaaatctaagaaaattaaatacaagaaacaaagaaaccaagattagggtatataagg

SEQ ID NO: 311849 - DNA, 122 bp, Homo sapiens
ccgagtaggagctgggcgggcagcggcgtcgggcaggcccttccagccgggctgacaggccgctctgacccagccatctgactccgcttgcgtcctggcagcgcggaccctagggcaacttt

SEQ ID NO: 311850 - DNA, 122 bp, Homo sapiens
tgggagggtgcctctgcagcccctcaaggccgccgcccctgcggggagaactggagaatgcggacacctagatgaggccctggcacccaagctggggcccccggaatctcacgttcccttta

SEQ ID NO: 311851 - DNA, 122 bp, Homo sapiens
tttgagggcaggtacttttttcatatcatggcacacacacggaatctttgaagcacactgcgggaaatggtccagactgagactagtggtctaggactctagctggccaagccctgcctggg

SEQ ID NO: 311852 - DNA, 122 bp, Homo sapiens
gaggggggcacggccactcgacttacttagtacggacatcctggcccaaggacatgtgcacgtatatcctgaggctccccctaaaactgtgttgtgctgaagaaatggtccagggagtgtga

SEQ ID NO: 311853 - DNA, 122 bp, Homo sapiens
ataactcctaggctcaagcaatctacccgccttggcctcccaaagtgttgggattacaggcgtgagccaccgcacctggccatcttgacaggtttttgcgagatgtaggttttcatgcctct

SEQ ID NO: 311854 - DNA, 122 bp, Homo sapiens
gaatctgtatgctgtctgactaacatggccaagtcggctgctcatcactgacttgtcccacgtgcagctggggctccttcgggttcgggccgtgcacctggccagtcagaagtggattccgt

SEQ ID NO: 311855 - DNA, 122 bp, Homo sapiens
ctgggtggttctcctgttacatatgaaatcagcttaaatagctgcatttagctgctatctcgtaggtggtctggaagacccaagaaatttcactcacgtgtttagcacctcattgcttctcc

SEQ ID NO: 311856 - DNA, 122 bp, Homo sapiens
gttcttgaatcattgtttgattgaaatctcaagcctttgttttgggagtggtgtgcttagcgtgagctgtgctatctacctgggcttctgacctagagatgttgggcaggtgtttggacagg

SEQ ID NO: 311857 - DNA, 122 bp, Homo sapiens
atattttggaccatgttatctgtggcacagtcagtgctgtgtttgaggtaaatgcagtaacggttagttttctactttgtcttatagaaggtagaaaccatgtgtatgttatgtttgtctat

SEQ ID NO: 311858 - DNA, 122 bp, Homo sapiens
ttgcaacagtagatgccttttcttctgcctctgtgacaggttttcagaagtggaaaggaccgcatttagacactagccaaaccatgaggtttgtcacctgtatttgccagtgattcccagag

SEQ ID NO: 311859 - DNA, 122 bp, Homo sapiens
gtccctgctgtccacgctgctggaggcggggacagggtcaagggttgccactgctgctcccgtgcgccattggcaggtggcagttgcagctgagcccacaactgaggctgttggggctgctc

SEQ ID NO: 311860 - DNA, 122 bp, Homo sapiens
tcacacaaatccagagatccttgcagagaaaggtgcagttctcgttcaggcagcaggaggcgctgtctctggaggcttagattcattccccgccctccgcccgctcccgcccgcctctggtg

SEQ ID NO: 311861 - DNA, 122 bp, Homo sapiens
ctcgaaacctaaagccaaacacgcatgtaccatacccgaccactcacactgttagaggcccgcgttctatgattatagaacacatttagaaactatgatgtcgtggagctggatgttatgtg

SEQ ID NO: 311862 - DNA, 122 bp, Homo sapiens
ctggcagcatcccccaaattccatgttctaattttggttcccttgccatcttctcatccacgctcttcttttccttcatcgatccttactgtgaaaagtgccatttactttgtttcttccct

SEQ ID NO: 311863 - DNA, 122 bp, Homo sapiens
gccctagacacggtccacgttgaccctgtgatccgcgagagtacccctgatgagctacttcgcccacccgcggagctggccctggagcatcagccaccccaggccgggctccccccactggc

SEQ ID NO: 311864 - DNA, 122 bp, Homo sapiens
cagtcccggcaccgagccagagtgactacaggagggctgacgctgcgggagggctgacctcgcactgacctcgcgctcttgcaggagttggagcagcggtggggagagggctgttggggcag

SEQ ID NO: 311865 - DNA, 122 bp, Homo sapiens
gccttctcggagatcatgagcatggtgtggaagcggctgaatgaccatggcaagaactggcggcatgtgtacaaggcgctgaccctgctggactacctcatcaagacaggctccgaacgtgt

SEQ ID NO: 311866 - DNA, 122 bp, Homo sapiens
atcacttgggacatattgcatttgaggtccttcagggacattcaggtggatatatctaatcgttaattaaaacggatctgaatcaaatttatgctgaagttcatgtagaaaaacaaacatac

SEQ ID NO: 311867 - DNA, 122 bp, Homo sapiens
aacagccccatttcctaaagacagtaagtctaggattgtgctcagctttacaataagtctcgttgactctgcagaacaagtcctggacttgcccaggtaactcaagagccctctgtggggct

SEQ ID NO: 311868 - DNA, 122 bp, Homo sapiens
agctccagggtgacaggcgtcaggtgcttggtggcagcagtcatgacaatcttgcccacacgagggctccctgggcgtggaaggaaaccagagtggccagtcagtgacctggaccaggcagg

SEQ ID NO: 311869 - DNA, 122 bp, Homo sapiens
gaggttcgccaaagaggagggcccgcggcccagaccctccggagcgtgcccgaggcgacacggcaagcttctggggctcccaaattgtgaatggagttcaatgcacaagcatagatagtaga

SEQ ID NO: 311870 - DNA, 122 bp, Homo sapiens
ggcccagccccagccccagccccagtccagcgaagccggcaggcgcagagctgcgtcgggcgttcctggagcgctgcctcagctcgcccgtctccgccgagtctttccccgggggcgccgcc

SEQ ID NO: 311871 - DNA, 122 bp, Homo sapiens
tttggctgtcctcaacacttcctcgtttggcagaattcaggagtggaatttctccagacacggtcggttcctgtggccccgctgcgccgcggcggcaccacctccacttgcgcctgtggctc

SEQ ID NO: 311872 - DNA, 122 bp, Homo sapiens
acttttttccctccagtgacgactacgggcctttgacgcactacggtgacaagcggagggcggggactccagaaagggaatttaggaaggttctctgaggttcgagaatatggttagaaggt

SEQ ID NO: 311873 - DNA, 122 bp, Homo sapiens
tctgtttactgggtttgaaccaaaggattagttacttttggtggagtggcagtgtattagcgaaacagaactaataggtgtgaacccagaaggcaggacaactcaaagcggggagggggctt

SEQ ID NO: 311874 - DNA, 122 bp, Homo sapiens
ctttgtttctagagcccggaaatcactgggttttccctctgtctggagcagagctgggtgcgaatttgaccaacgggtggcaggaacagccggagcaggatattaaggagcgggcgagcttg

SEQ ID NO: 311875 - DNA, 122 bp, Homo sapiens
ttcttagagaagtgggtgggataccccatactggccgagggacaggtgctgtgaccgcctcggggctccccagagcctctgtagttacccccgggatgtgtctgaagatctggcaggggaca

SEQ ID NO: 311876 - DNA, 122 bp, Homo sapiens
aagaggcggcgttgggctaggcccctgcagcccgctcggagcgtcctaggcccggggctgcgctgtgaaagacccagattctcatcccagaggcccagcagtcctgaaaggcctcctctccg

SEQ ID NO: 311877 - DNA, 122 bp, Homo sapiens
gcccctacccccaccaagagaccacagaggccagatgtgatgcggcgctcgcactcacctcgcgcggagcagggttcgtcccgcagaatgcagcgcagcttcctttctccctatgagcccaa

SEQ ID NO: 311878 - DNA, 122 bp, Homo sapiens
tcaaggtccccatctacaggagaaagggatgtgttctgtcgtaaccaagaaggaaatacacgcaggttcaggtcaaggtccccgtccacaggagaaagggatgtgttctaactgtcgtaacc

SEQ ID NO: 311879 - DNA, 122 bp, Homo sapiens
cacgtgggcatgtgttgctctgagggctgtggccatgttgcccacctggccagggacccccgacttgggtgggtgacagccagcctccccgcccccacaaaggttgggaccttgagcccaaa

SEQ ID NO: 311880 - DNA, 122 bp, Homo sapiens
tgccgtttcgctttcgcatcccgcatctgagaggcgcagctgcctccacccgcctagtcccgcccaagggttcaatgagcgcctactgtgtacttttggggcaggagctggggtctcctttt

SEQ ID NO: 311881 - DNA, 122 bp, Homo sapiens
ataagggccacaacaaaagagagagcgaattctctggcttgctgactccttggaaaaaaccggtagggatttttttattaggcaaagcacaggaattgacgtcagaggcaggatgtgctgct

SEQ ID NO: 311882 - DNA, 122 bp, Homo sapiens
cccgggtcaagcaggcggcaggaagctgagctgcaagttcatcatcatgagtgcgatctgcgtaaaaaatgataggggaaggaaggcgggctacggtgccccaggaaaagaagggagctttc

SEQ ID NO: 311883 - DNA, 122 bp, Homo sapiens
acaggttatcctgtctctcccgctagattgatgagatcaggcatcactcgaaaatggcgccgaaagcgctgaggctcctcattcaaattcgttagagccaaccccgccgccccagggaatgc

SEQ ID NO: 311884 - DNA, 122 bp, Homo sapiens
tgccgcggatgagtctccaggtgcgtgggggctgcagttcctgtgccccttccggccgcccgcgcccccaggctgcctcacacctgcatcctgaactaacaggtgatggtggtggcggcgct

SEQ ID NO: 311885 - DNA, 122 bp, Homo sapiens
ctgaggaagcagtctgggaactgaagccgctgtgtatccgctctctggagacctgaggggcggccccgacgccctccagggctgagtacctacactcacacacacggcggcatttcctcacg

SEQ ID NO: 311886 - DNA, 122 bp, Homo sapiens
ctccagccctagcaaccgccaagctgcccgttcatagcaaccgcctagttaacctgaacgcgcggccagagctcccagttgggtccacctccgaataaagaagcttcttcccaggccagtgg

SEQ ID NO: 311887 - DNA, 122 bp, Homo sapiens
gtcacaggcatctcaggacacaggattctaaggaattctaagatttaaaacaaaaacaaacggcaggaaactaaataccacaaaggcagaggggaagtgtttttatctccccagagtctaag

SEQ ID NO: 311888 - DNA, 122 bp, Homo sapiens
ctcggcacagccagaggggctgcagccacagagctcgcggccgactgggctaaaggcaggcggaggccttgacttctgagtcccgcctgctgtccctgcagtggcaccgggcagtgggtgtc

SEQ ID NO: 311889 - DNA, 122 bp, Homo sapiens
ggtacctagacattgtctctgcactctgctggcatattttcccctggaccacgaacccttcgtacctagtaacttgccacctgtgtttataaataccagcaatttgatttacagggtgaatt

SEQ ID NO: 311890 - DNA, 122 bp, Homo sapiens
gcggcggagagcaccgccccctggcggttggagcagcgcaggcctctggctcccacgcagcgcccacgtggctgtacagcctgacagcctggaccctctcacatcccagaccaaaaatcgcg

SEQ ID NO: 311891 - DNA, 122 bp, Homo sapiens
acacggtttcaacggctggctacatttgattggccgaaactcggtgactggcacaggtgtcggctacggtcggttacgcctccacctgttatcgttcacgaggtgcagaaaagcctttaggc

SEQ ID NO: 311892 - DNA, 122 bp, Homo sapiens
cccgtgtgcgtgagcccgtgtgtccctgagacagcaggtatgctcgtgtgcgcgtgagctcgtgtgtccctgagagaccgtttgtgtgagcctctgtgtccctgagaaagcgtgtgtgcctg

SEQ ID NO: 311893 - DNA, 122 bp, Homo sapiens
cagaccaggattcaaacccaggcagtcttctcagccaccctccatctgattttttttttccggccatctccaagtggattctggcctgacaccaaagacagctcagccgggtgccgtggggg

SEQ ID NO: 311894 - DNA, 122 bp, Homo sapiens
catgtcccccaacgtgctctccagcggcgcgcagcaccccagcctccgcgcgtccccgagcgtgcagccttccgtgagggcagccccatgcacagccccccaaaccctcccccacgcctgca

SEQ ID NO: 311895 - DNA, 122 bp, Homo sapiens
ccgttgtctctcagggggacgcacagagaggccccagtcccatccctttcgtgcctggctcgctcatttcacttagcataatgtcttcaaggtgcatctgtgttgaagcgtgtgtcagaatt

SEQ ID NO: 311896 - DNA, 122 bp, Homo sapiens
cggtgagaaactgcccgtcacacagtgaaaggcctggcgcggtgatggtgagaaacttcccggcacacagtgaaaagcctggtgcagttacgtgcttgttgggtggatttggagggaagaaa

SEQ ID NO: 311897 - DNA, 122 bp, Homo sapiens
tttccattttaatttaaatattcttgagaacagtaaaagacagatgaccacggtgtccaacgttcggaaaataggggcaataacatccttgcccatatcacagtattttgataaaagatcca

SEQ ID NO: 311898 - DNA, 122 bp, Homo sapiens
tacacattctagatatgtatgtgtgtatatatatatgtatatatatatttatatatagctcgtatatagaatatatctgtatatatggtagatgtgtgcgtgatactctagatggtgatgtg

SEQ ID NO: 311899 - DNA, 122 bp, Homo sapiens
gctatgcgcccagatcatccgcagctgcgggaggggccgtggccagtgggtgagtggcagcgtctgtgagcagcacagagcagcacaggaaacgactccagcgcggccccacggcccctgca

SEQ ID NO: 311900 - DNA, 122 bp, Homo sapiens
tagagaggaccagccagcaggcctggtcacgtggggtgcgaggacaggggatggctgggacgctgggctcacctcttcacctgtctgccggtagggccacaggctgcgacctttccgtgaaa

SEQ ID NO: 311901 - DNA, 122 bp, Homo sapiens
ctgcgatgctggggagtcatggagcctgagcctggagagctggcgggggtgtggggaccgcgatgttgggaaggctgagcccggagggcgggagattcaggaccaagacgtgggggagtccg

SEQ ID NO: 311902 - DNA, 122 bp, Homo sapiens
tgtagtatttgttgtgccaccacgggaaaccagtgcagcagggaaagccctgtaaataaccgacatatggaggccacgatgccagggccatgcgcccagcagcaactcagcagtgttgtttc

SEQ ID NO: 311903 - DNA, 122 bp, Homo sapiens
gtggtttcgcgcacgcgcgccacgcccatcgaaccctcctaactcactatagacccgaaacggcactcacggggcgacagacctgctagctgactgcccgcgtctactgccttcccacggtg

SEQ ID NO: 311904 - DNA, 122 bp, Homo sapiens
aatatgtagtggcaaatgtatgcgaaacagcacaacatacttgggggactgcaagtagcccgcttttgctggaagatattaacagtactctaaccaagagatggtaagagcctaggcctaag

SEQ ID NO: 311905 - DNA, 122 bp, Homo sapiens
cacactgagcaaagtgagggaaacgctgtgtggcatgaaaaactcacgcgcgcattgacacgcaaacatgcatcaactctcaccccacgaacctcagcaggagagaacggaggaagtaaagt

SEQ ID NO: 311906 - DNA, 122 bp, Homo sapiens
ctcgtggcttggtgctgtccttgcaatagtgagtgagttctccggagctctggttaagtgcgtggcagctcccccttgcttgctttcgctcttgcttctgctgtgtgaactgcctactccca

SEQ ID NO: 311907 - DNA, 122 bp, Homo sapiens
ataagctagagcatgagctcttaaagatggtacatcctagacagggagatgagatgttcacgttacatccattgtgcaggctacgagggtgatcctcagacattcagaagcattgctgaagt

SEQ ID NO: 311908 - DNA, 122 bp, Homo sapiens
acctcgtgatccacatgcctcgacctcccaaagtgctgagattacaggcgtgagccaccgcgcccggcctaatgggcgttttaacagttcatacagtttggtattattattcccgctctaca

SEQ ID NO: 311909 - DNA, 122 bp, Homo sapiens
caaagcaggaataccacatctccatttccttccggtggcttgggatgtcagcattgaagacgatcaccactccatgagcatccttcatcagggccggccagcaggactcaaacctgcgagga

SEQ ID NO: 311910 - DNA, 122 bp, Homo sapiens
tcaccctggctctgcgggaaggcaggaagctttggcatgatcctccacgggcgaggatcacgtagagacgtgtagagacgcgacgaagcacgaagacccgtgtttgacgggttgccaggtgc

SEQ ID NO: 311911 - DNA, 122 bp, Homo sapiens
gggtgccgaggtagcgaggtcaggggtcaagagtggaacaccctcactggcccgggccggcgcgggagggctgtgtgatggcctcggagcgcccggagccggaggtgaggggcgggcgggcg

SEQ ID NO: 311912 - DNA, 122 bp, Homo sapiens
ggtgctcggcctcagaagtaataagggaaccgcaaatggcaatcacaaccatatcatcatcgcacacgcagcacgtccgcagcggaagggcccgtcagtagtgagctggtgacacgtgggca

SEQ ID NO: 311913 - DNA, 122 bp, Homo sapiens
ctatccaatccttccttcctcctctccttcctcaggtatcaggtctgcactgtggtctgacgactcttcctaccttctcctgctcctctgcccattatatcttttgccagtcaaatcctatc

SEQ ID NO: 311914 - DNA, 122 bp, Homo sapiens
ggagaggaacccgccagaccagaaacggaagagagcgcgggggatgtgtttggcgtggggcgcactgttcagttgctctcctggatggctttatgtctccgcggtgtttcctagagtctcgg

SEQ ID NO: 311915 - DNA, 122 bp, Homo sapiens
gtttcttccttccggtgggttcgcagtctcgctgacttcaggaaggaagccacagaccttcgcagttaatgttacagctcttaaaggtggcgcctctggagtcgtttgttcttccctgtggg

SEQ ID NO: 311916 - DNA, 122 bp, Homo sapiens
acgttacttcccgatccaggcaaacacatctcacatcacatacaaacaactccctagagacgcccacttctcccgtgtcgttttcacacacgcccttctcacacgcaaacagccctcgctca

SEQ ID NO: 311917 - DNA, 122 bp, Homo sapiens
ggctgctgcaccgtcaggatctgagactgcttctcagggctcactcagtatatctgagcgcgtctcgccagcgcactggttaaccgagcgattctgcgagattggcagccgcactccaacaa

SEQ ID NO: 311918 - DNA, 122 bp, Homo sapiens
cgcgagctgtgtaagtggccattaaaccccacacacttgaagagagcctgctgccattcccgcaggggacgctgaggcggctgcccctcgggagtgttggaaacagcttctctgagcgactc

SEQ ID NO: 311919 - DNA, 122 bp, Homo sapiens
cacgcactcatttggcagctatcaacggagtattcacagtacgctgctcacagttctaaccgcggaggatagagttgaggcccacacgacagcccctgctctcacagaactgatgtctctag

SEQ ID NO: 311920 - DNA, 122 bp, Homo sapiens
ttcctgacgtattttcactccacccgtgatttccagatcactccagacctgcagaatcatcgtgttcctgtgtggattgttcaacaaggaagataattttggaaatgtacctgttattgctc

SEQ ID NO: 311921 - DNA, 122 bp, Homo sapiens
ttttctcaaggcccatcaccaacatcaggaaaaacaatcagggctgtccaacaaaggattcgactcgccttctctggaagcattcaggcggatatgggggttggccgcctgttgaggaggct

SEQ ID NO: 311922 - DNA, 122 bp, Homo sapiens
gcctgcagggccctgggccagcccccgggtccgggctgtggagagcggtcaggggagatccgcagagcacgggagcaggggagaggctgggatccggagcccgctacatcggcacggcggcg

SEQ ID NO: 311923 - DNA, 122 bp, Homo sapiens
tcccctcccgggtcaccagctttcccttactggagaataagcagggctgtgctgagaccgcggctggccagccagggccagagggaggccccaggtccgaagaaggcgcctccagctgggtg

SEQ ID NO: 311924 - DNA, 122 bp, Homo sapiens
acacatatttcagcataaaaatgagatctcgcattatattgttcctactatctctaccttcgtcaaaagatcataaaaacacctaacattcaggtgttttctttatgatggctcaagatggg

SEQ ID NO: 311925 - DNA, 122 bp, Homo sapiens
aggcccggtggggaaagcagtcttcaatcagacacgcccaccagcgctatgtcaatttaccgttgccatgacggcacccaggcattaccgctcctttccacggcaatgacccagtgattact

SEQ ID NO: 311926 - DNA, 122 bp, Homo sapiens
taaaatcttcaggcttccgaggatttggtagacagatcagaggcacgtttcccacaactgcgaagaggcgctgaggcaattctgcaagaagattttggggttttggaaaagaagctatggaa

SEQ ID NO: 311927 - DNA, 122 bp, Homo sapiens
ctgagagcacgcgccagacacaggttggctcggcccgaagcgaatttgggactctcgtcgcggtgtcctattaattagcttttcccggcgcctcagggactccggggtgaagatggagaggt

SEQ ID NO: 311928 - DNA, 122 bp, Homo sapiens
tcatttaggcccttcatttccctgtctgaaacttctctatgatgtgtcacattccagaagcgaagttatttgattgttcccattaaaccagtctctctgccctgggaatatctcagtccagt

SEQ ID NO: 311929 - DNA, 122 bp, Homo sapiens
cccggctctgggcctgggcccccgccggattcggcccgcctcgggcggggggccccggcccggcccagccaaaccgccaccccgaggatgcgcaggccgcactaggccccaggcgtcctggc

SEQ ID NO: 311930 - DNA, 122 bp, Homo sapiens
cacaccaatgagtgggctgcattcctataaaatgatattgagaaattgcccacaggctggcgtctgctgaccgccagcttcagataaccaacgtttgtcttcttcttgtgccacacatgcaa

SEQ ID NO: 311931 - DNA, 122 bp, Homo sapiens
caaggtctccctatgtttcctaggctgtttttgatattctgcactcaagcaattcactcacgttggcctcccaaactgctgggattacagctgtgagccacccacccatcctggatggcttt

SEQ ID NO: 311932 - DNA, 122 bp, Homo sapiens
cggccctgctcgactaaccggagagggcgaaccaaaagccatgcatgacgatacgcaccgcggggactggagcctctggcctcacgacggagattccctgagagctgcccgtggttgccggt

SEQ ID NO: 311933 - DNA, 122 bp, Homo sapiens
ttgatgtagggcttcaacgtcactactgctttgtccataagaaacacctgttgaaataaacgtaatcaccagaaataattacatcacaaatacatgagaacgataaaacactaatatcattc

SEQ ID NO: 311934 - DNA, 122 bp, Homo sapiens
cttcagaagcagaactggaagctcggatagacttctccgcctctacactcctggaaaacccgcagtggatttcaccaacttcaggatcggagcccaggcaggcgaacgtaccttattgcgca

SEQ ID NO: 311935 - DNA, 122 bp, Homo sapiens
agttttcattgtgcaaacatttaaagtgccttattttgatggcatgtcaagttacaagctcgccagaggtgcccacatgcctggtctggccctggtttcaagtagcaatttgagccagcact

SEQ ID NO: 311936 - DNA, 122 bp, Homo sapiens
acgccaggctgctgaggcctgtggctgacaccagggggcagggcggggcggcggggacagcgtccggaggagggagccgcccagacctagcccgggtggggcgaacgaagagcgggcgtggt

SEQ ID NO: 311937 - DNA, 122 bp, Homo sapiens
cctgcatgcaatgctaatggtttctgacatgtacatagcatataacacagcagtacaatgcggcatatactggggggcagtgtgtggagggggcgttcttaagggtatatgtacagaggaaa

SEQ ID NO: 311938 - DNA, 122 bp, Homo sapiens
gaacaagggcagtgctggtaataggctcacatttgcacaaggcgggtcaaagttccgggccgtgtgtcacctgggggctgggccaaagggggcgcatcttgctgtgacatggtgaaggtggg

SEQ ID NO: 311939 - DNA, 122 bp, Homo sapiens
tgccgtgatgtgacacgcagttacaaagttggggtgtggaagctgcgggagcggggcccacggcacacgtgtcgttgcgggcgataccccgtggtgcgcctgccgccagctgagcgcaggga

SEQ ID NO: 311940 - DNA, 122 bp, Homo sapiens
agcctaatcatgtgcaatttaaatttggtaccttctttaaaagataacccaatacagatgcggtgggtaataagccactttgtactgactccaaccctcacaccctccatcctctccttctg

SEQ ID NO: 311941 - DNA, 122 bp, Homo sapiens
tgaagcatctttttttttcttttcttttcttttcttttctgagacagggccttgctgtgtcgcccaggctggagtacagtggcatgattatagctcactgcagctctgtagccttgaactcc

SEQ ID NO: 311942 - DNA, 122 bp, Homo sapiens
ggaacgtgtggatagcgtgcatatgcttggactctaggacttactttctctggaaaaatccgtctagcttcctcactcactgcctctgcctcccagctccagcctagccatttcatcttatg

SEQ ID NO: 311943 - DNA, 122 bp, Homo sapiens
cctctttcctgccgcgcattctgctcagctgggcggcgaggagctggcccagagcggcaccgcgagctccctcaccgccgtctgcctgccatttgctgccactggggacctgcgactgcttc

SEQ ID NO: 311944 - DNA, 122 bp, Homo sapiens
gaacggcgattcgagggcccaccctaagcgacgcctccgacgcggaggaaaaacgcgattcggcccgccctcattccgagaagcagcacccagaccacgccctcaggggcagcgacaaatag

SEQ ID NO: 311945 - DNA, 122 bp, Homo sapiens
gccgcgtcgctgcggacagagctgcgcttgctcgagatggaagacttggattcggacttgcgaagtttcatgcttccaagaagggagcccctccggaagaggccgcccttcttcttgcccgc

SEQ ID NO: 311946 - DNA, 122 bp, Homo sapiens
tccatgtgtgctccctgaggttgggggcatatgctgttcctccctgtatacccactatcccgcacactaccctgaaacctcatgggtgcatgataagtatttcttgggctggaccaaataga

SEQ ID NO: 311947 - DNA, 122 bp, Homo sapiens
cgtcttcgccccgccttcggaccggaaggagttgttggcgcttccggtggcctgcgaccccgtaattgcctcggtgatgtcgtgggttcaagcagcctccttgatccagggccctggagaca

SEQ ID NO: 311948 - DNA, 122 bp, Homo sapiens
ccgttatcgttggttaaggcctctacacagcttgggcccagccgttgctggagccacccccgccgctcaccgacggggaagggaaaaagggaaggggagggaaggaaggaagagaggaaggg

SEQ ID NO: 311949 - DNA, 122 bp, Homo sapiens
ttcccaacctcgtcatcctcacaaggggaggtggctgccaagtcacctaaatgctgagggcggcaggtagtgggagccgcatttcccaaaacactgcgggggcgggaaaggccccacctagg

SEQ ID NO: 311950 - DNA, 122 bp, Homo sapiens
gcctggtgtgtctcaattcctacagagatttctaagtccctaaagtcaccgaggccaggtcggcacatcccctatcttctgtttgaaagaatataccacggtcacggctggtataagcaaga

SEQ ID NO: 311951 - DNA, 122 bp, Homo sapiens
aggcccctggaccttggctcaccacctaagactgaacaagcactaaaggacagaccagcccgctaacagctcactccaaaaatgagcgggactcccagagaaactatttttattggagcatc

SEQ ID NO: 311952 - DNA, 122 bp, Homo sapiens
aacgccaaccagagatttttttttttctcagacgatgaactcgcacttagaagatcaaggcgggctggaaagcaaatttttaaaaaatgtaaacctctgctcaaaactgagcgataacccga

SEQ ID NO: 311953 - DNA, 122 bp, Homo sapiens
ggacagatggatggacgctcgcgggcaatgaatgggcgctgcgctcaaccaagacactcgcgcaaagttgtggctccacccaaggcacctgctccgcacactttaagcggcgccctggaggc

SEQ ID NO: 311954 - DNA, 122 bp, Homo sapiens
aatcgtggagatgcccctggcccacaagctctccagcctcatcatcctcatgccccatcacgtggagcctctcgagcgccttgaaaagctgctaaccaaagagcagctgaagatctggatgg

SEQ ID NO: 311955 - DNA, 122 bp, Homo sapiens
atgtgcaccgttagcttggccatgctgctgatgccactgctcccatacaacttcatgccacggtccgcagcgaggatttccatctcatagagcttggtctctaggtaatcaagtctaccagt

SEQ ID NO: 311956 - DNA, 122 bp, Homo sapiens
gtagggctggagtttttcctcaacgtgtacaattcaatgtactttcagttttcatttcaacgttcctcagtggtttctgcccagcaactgatgagaaacatcacctctgagccaatcaaaaa

SEQ ID NO: 311957 - DNA, 122 bp, Homo sapiens
agtgcaggacatcgtgtggtgctgggagggggaccaaggaagctggaacccacaaggcctcggagcccagctgggagcaacattctcccagggaagtctccccagaggctttactcagcaga

SEQ ID NO: 311958 - DNA, 122 bp, Homo sapiens
tttatttttttaacataaatcctatctacctggctcttgccctgaccggccggagagaaacggtgacaaacctggaacaacgttggaccaaagacacttcaggaggagcaaaagcgcgttat

SEQ ID NO: 311959 - DNA, 122 bp, Homo sapiens
ggaaccctaacaaccagataggaaaagcagaattcatagggctgctgatgtggcatttctcgtttactggcagcttctggcctgcaggttgagctccccagtctagatttgtggaggccaag

SEQ ID NO: 311960 - DNA, 122 bp, Homo sapiens
gcgtgggactgggaacaggtgaagggaaacagaagagagcctgagaagaccgctctcctccgatcctaattgactgagccaatgagagccaaagaggtcacatgctcaactgggcggggagc

SEQ ID NO: 311961 - DNA, 122 bp, Homo sapiens
gtggaagggcatcaagcctactgtcacgattctctcgagaggaatttccgaccctgcaggcggctggcgaccaggacaaggctgccaaggaaagggagtctgccgaacagtcgtctgggccc

SEQ ID NO: 311962 - DNA, 122 bp, Homo sapiens
cagtcacatccccaccttcccaattcttgtcatctcggttcaggaaggtgaacggtgttccgattccccgcggcgggggcctgtagtgggagctctgccccttccccgcctctgctgcaggc

SEQ ID NO: 311963 - DNA, 122 bp, Homo sapiens
gcacgcccgggacggagactggggttcccagccccggcgggggaaattaactgtgtgcagcgtgcctcggagctgggctaacctatcccttgtccctaactgggctgtcagggacggtttct

SEQ ID NO: 311964 - DNA, 122 bp, Homo sapiens
agaagtgctggcggagggaactgccgacagctgcaggcacctcgcccaacacctccacctcgagcacacccaagtccacagcagtccaggggtctgtcacccagacactgactgcatcgcac

SEQ ID NO: 311965 - DNA, 122 bp, Homo sapiens
cctcccgttctagtctaaagagaactttgctcttgttcttgaaatacattctttatctgccggcttcccttgatttcaagtttggtttcgtgtttatcaaaagaagaggagcaggaacagag

SEQ ID NO: 311966 - DNA, 122 bp, Homo sapiens
aatttcgtgtcacatctgctgcagagatcacaaacactgtcactatgccatctccttcctcgaacctccacaccgcctcctgcagctttattcttggcttttcaaaggtttaatccactcgg

SEQ ID NO: 311967 - DNA, 122 bp, Homo sapiens
agaccgccccctggcactgatgatccccactgcaggacttcagagaggctctccagcaggcgcctgggactcggaccaaaatggcaactccaagcgtgctttgggggaccctgccactccca

SEQ ID NO: 311968 - DNA, 122 bp, Homo sapiens
tgtaattggtcctttactcatttccttggagaagcagcggtcaacttctactaaaactcccggttgataggcggcttccctgccctgtcttccggagcacttacgttaaggggaaatcacta

SEQ ID NO: 311969 - DNA, 122 bp, Homo sapiens
tttattaacaaacttatctgtaggagctcgtccatggacaacatccagttcatacagatgcgtgcgcatttcgcagcagccatacacgcccaaagaggacgagactggatgtgattgagctg

SEQ ID NO: 311970 - DNA, 122 bp, Homo sapiens
ttgggccaccagttttggaaccctggtcagtgctaggcagtccagtttcccaaggctgagcgtgctcctcacatcttccttctactgccctggtacccacagttcaacatctgtgccaacag

SEQ ID NO: 311971 - DNA, 122 bp, Homo sapiens
ggccctagacttcactcgcatgtgcgaaaagggcattttgataccctttcaagaatgccccgcatactcgcggaggcttataccacgatgtgggaaaacgacggaattacagaataaaccag

SEQ ID NO: 311972 - DNA, 122 bp, Homo sapiens
gcaggacactgttcacaacatgctgccaggtaatggggtgggacaaggcccagggacagacgtgggagtacggagcatggtcagcccactttagcgcttcccggtgcagggcacaggtcctg

SEQ ID NO: 311973 - DNA, 122 bp, Homo sapiens
tgttttggggagggatgcacttggaagattcgagctaaggtacaatcctccctaggtatccgcgggtcattgttttcaggacccccacagataccaacatccgccatgctcaagccccttac

SEQ ID NO: 311974 - DNA, 122 bp, Homo sapiens
gtggaagctgggtgccctgctacctgggttccttgcccttggggtggcatgaatgccaagcgatgcaggcagggcgcccgcagactcaaaggccaggccctgtcctcgccagcagccgaatc

SEQ ID NO: 311975 - DNA, 122 bp, Homo sapiens
gcgggagaagtgcgttgtaaaatggccgttgcaagatggcggcgccatcatggccgccggcgtctcggtcccgtatggaggcacagcttacgggcagatgcagcgcccccttccacgacgac

SEQ ID NO: 311976 - DNA, 122 bp, Homo sapiens
ctcacatccctctgagaacagtgaggagctgagggtggggagaatacaaccccatgaattcggtttcatgattaaggtagacaggaaggaggagtcagtgtgaacctcggagggctgtgtgg

SEQ ID NO: 311977 - DNA, 122 bp, Homo sapiens
caactgagagacttaggccgtggagcgttaagtagtgtggagtgtgtcagtggagacaggcggcagagctttggtggcctgtgacaaataaatccggacagctcctcctctccctgtgggtg

SEQ ID NO: 311978 - DNA, 122 bp, Homo sapiens
tactcaaactgcagccacagccgcttaaagagaagtttgacgcaagccttattcagcagacgctttctaattcagaatgttccgaggcagttgatcttgctacttctaaactagtgaagggg

SEQ ID NO: 311979 - DNA, 122 bp, Homo sapiens
acaatgaaattgactatgtatttaaaaagctacccatcctcctacacacagacacagacacgcagacacacacagacacacacgcacacagagagagagagagagagagagagagagaaaca

SEQ ID NO: 311980 - DNA, 122 bp, Homo sapiens
cctgggagccacgtgatcccggtcctggttggtgaccgggccgcggcgtgtttcacaagtcgctcgctcgctcatccactcgggcggcggccgggcctcaggcgctgcgacccttttcccgc

SEQ ID NO: 311981 - DNA, 122 bp, Homo sapiens
gcctgtaacctgcgccgccaggatgtggctgggggctgacgtcgggtccagatgtggccccggccccgcccacccccggggccgggccgcccacacggagccgcggcgcgcacggcagctgt

SEQ ID NO: 311982 - DNA, 122 bp, Homo sapiens
aagacgggtaggcgggaggagacattcgcgttcaaaatctttttgcctctatccgctcgccgtagcgctttagcccgctcgagtttcaatgcgcgttgttgcttaacgaagcagagtcctac

SEQ ID NO: 311983 - DNA, 122 bp, Homo sapiens
tgatttatgataagtaaacatgtttctccattcacccattcactggttttattattaaaccgaccattctcaggaactcctggatggggagatgagctgatgtatctgccagggtccagtta

SEQ ID NO: 311984 - DNA, 122 bp, Homo sapiens
cagcccgaaggcggcccccagtttcaggcagagtttgtaacagctccgggaagccctggtcgaattgtcctgggggcgagggtgggataccccgagagccctacctgcctcccctccccggc

SEQ ID NO: 311985 - DNA, 122 bp, Homo sapiens
gcccgcggcaggtactatttcctttgctgctgcctttgttctaccccacgctgtgtgagccgatccgctactcgattccggaggagctggccaagggctcggtggtggggaacctcgctaag

SEQ ID NO: 311986 - DNA, 122 bp, Homo sapiens
ctctcttggtaaccttttaatttctggaaaaattgtacagaataaattgagcagcacacacggaaacctaatcgattgatctgctctattttgttaaagcaacacccatcacaaactcccct

SEQ ID NO: 311987 - DNA, 122 bp, Homo sapiens
ctaactttttcatgtcttctatcagaccacaattcaaatattttccaaagcagaggacgacggtactaagcagatgatagctcagaagcctgattccctacccaagggacagaggctgtgag

SEQ ID NO: 311988 - DNA, 122 bp, Homo sapiens
gttattggaacaaatgtgcattctaagcttggattgtcagaataatcatgtcaatcctctcgtggctctttccctttggaggtaccagatctgctacactgaaaatattatcattagtcaca

SEQ ID NO: 311989 - DNA, 122 bp, Homo sapiens
accccgggccgagtgacctgctgagcaccaggagggctggggccaacatgccagggaacccggaccttccttcacctgaaggttctcacccatgaggaagtggactttgccgtaccatttca

SEQ ID NO: 311990 - DNA, 122 bp, Homo sapiens
ccccgcctcccgaccgcattggctcataccggcctcggcttcacgtctattggaaggaaccgctgtctatctctatgcctcctcatatcagtggctggaagctgctggcaatctcgtgagag

SEQ ID NO: 311991 - DNA, 122 bp, Homo sapiens
tgtggttgcctagaagcaagaggaagagcaagacgactctggcaggcccagacccactgacggtggcccatgaagcccctgctgggaaactgggaaggggcacccagtgttgggcagaagag

SEQ ID NO: 311992 - DNA, 122 bp, Homo sapiens
cgccagtgtccgggggctaccgcaccgccctgcgcaccttcgagctcgacgtaagtgcgccgtgccagcccatggccagcctcctgcctcctgccgcctgccgcctgccgcctgccgcctgc

SEQ ID NO: 311993 - DNA, 122 bp, Homo sapiens
gaggcgggaaggcaaggccaggggaggggggcacgggctataaacgctcggccgcagcggcgccggcagaggagccgccgagcccagcacagctgccctctggaccctgcggaccccagccg

SEQ ID NO: 311994 - DNA, 122 bp, Homo sapiens
ctgaatcatttaacattcactgttttcaatctatttttgcagagccctaattctagttagcgatgaggaaaccagtgtatctgtgattctatacttttacattttggggtttaaatacaatt

SEQ ID NO: 311995 - DNA, 122 bp, Homo sapiens
tgcctttttcagcttctagaaactgtccatatttcttggttcacaccccacccctttctccgttttcaaagacagataggttgcatctctctgacactttttccattgtcatgtctccctct

SEQ ID NO: 311996 - DNA, 122 bp, Homo sapiens
gtaaaatctgaacctatttacagcatcttcactgaaacatgatggtgcaaattccaaagtcgggtgaccagggacgatcatacaagcaaggcatttacagtaactttccaaagctaaaccaa

SEQ ID NO: 311997 - DNA, 122 bp, Homo sapiens
cgggtcatggtcccggggctggtctgaagtgctgtctacagagggcacttggggaaacatcgtaggtccggaaattcccagggaaagtttttgcaggagttgtggacgccgcagcagcccca

SEQ ID NO: 311998 - DNA, 122 bp, Homo sapiens
cgcctctttctggggcccgtttcatccttttcttttaatccaagaagcgatggtgttgtgcgcctgtagtcccagctacctgggaggcaggctgaggtgggaggatcttttgggtccaggat

SEQ ID NO: 311999 - DNA, 122 bp, Homo sapiens
ggtcaggcacaggctgatgagcctgtcatgatcgaggtcccggaaccctgtggcattgggcgccatgtcgctcagaatcacatctgctctcctgccaggaagcacctcgaggattctctgtg

SEQ ID NO: 312000 - DNA, 122 bp, Homo sapiens
gttttccaacctgcggatcaggaagaatctgtccaaggggaaaggcgccggcggctcccgcgaagatgtactggattcccaggccctgcagaccggggagctggacagcgctcactccctgc

SEQ ID NO: 312001 - DNA, 122 bp, Homo sapiens
ttccgggctcagtccccgctccccagcgccagacgcagactccgggccaagttctccctccgctcgctgctttctgccgcaggacccggatcaataaagggaaggagagccgggaggaaatg

SEQ ID NO: 312002 - DNA, 122 bp, Homo sapiens
gagtcgggagtcagctgacccggaccctttaaagcgcagatgtcacccttaagcccgccccggtctggaggccccgccgcgcttcccggactctaattggtcttcaagtagctcatctcctc

SEQ ID NO: 312003 - DNA, 122 bp, Homo sapiens
tcaggcttcggccgggcgcggtggcccaagcctgttatcccagactttgggaggccgaggcgggcggaccgcttaagcccagaagttcgagaccagcctgggcaacatggcgaaaccccatc

SEQ ID NO: 312004 - DNA, 122 bp, Homo sapiens
ctcgatctcctgacctcgtgatccgcccgcctcggcctcccaaagtgctgggattacaggcgtgagccaccgcgcccggccgctgctaaatcttaaagtctattttcagtacttacattatc

SEQ ID NO: 312005 - DNA, 122 bp, Homo sapiens
cgggaaccatctgggtgagcctagcagggaccagccctcccatgggagagagaggtgacacggagcagctgatgctttcgtaatgattcgaggcagctgccaaaagaggcagagcctttgca

SEQ ID NO: 312006 - DNA, 122 bp, Homo sapiens
atgggcagccagtaatagttgaggtgggggctcttaaagtctttacccagccccgggatgcgaccggagaaaaaaaagaaggacaggacccctgtggaataattctgggggttagtgctgca

SEQ ID NO: 312007 - DNA, 122 bp, Homo sapiens
atggttacagggctagttaatgtcagagctcctcccaccaatttaagtggcttaataattcgtagggtaatgctcaatgctttcgtagatttttatatagctgcatataaatcttcataatt

SEQ ID NO: 312008 - DNA, 122 bp, Homo sapiens
tgcgcaagttacgcgaaagctaacagaatctgcggtgctctgctggcgactggcaggacgcggtgcagagagcggacttccgcgacgcgggtaagccgggcgaaggccggaagcggagggac

SEQ ID NO: 312009 - DNA, 122 bp, Homo sapiens
cttgtttttatgtggttttgtttttacaaccctttaaaaaacatcaaagccattctgacacgagggctgcatgcagccgggcagcttctgccggaggctgtggcttcctggctccttcccta

SEQ ID NO: 312010 - DNA, 122 bp, Homo sapiens
tttctaagagatggagcccgtcctccgcctcgcaggctggcaggtccacagctctaccagcgcgtcgcctacgcatgctctcttagcaaaggctgttttaggcggccttctgctccgccccc

SEQ ID NO: 312011 - DNA, 122 bp, Homo sapiens
gggaccctcctgcctctggctgccgctctccgaggggcggggctgaggcggggcttggggcggaggccccgcctggaactgagggtggggcgggtccgggtccgggaggagtctcagctgga

SEQ ID NO: 312012 - DNA, 122 bp, Homo sapiens
gctctttcatccaagggcacagaaagattccaggtatccttgggccaaggacacagcaaccgcagacgcctgcagagagcccagaacaggctctaaggctgagtgagggacagagaggtgca

SEQ ID NO: 312013 - DNA, 122 bp, Homo sapiens
agactgtggggcatgggaacgttagatcccctcatcgccgttctgaagcccgtagctgttcgccatagaggagcaggccgcggcttctaagatggcgtctttttcctcgtttcagattcttc

SEQ ID NO: 312014 - DNA, 122 bp, Homo sapiens
tgtccatggagtggctggagctgggctgcaagtagatgaagattactgtcccatagaagacggagactgcagtgaagtgagaggcacaggtggacaatgctttttggtgtcccttagctgaa

SEQ ID NO: 312015 - DNA, 122 bp, Homo sapiens
gcagttctccaggctcggagtgagctgagggaggttccagctcttgactccactctgtcccggacccctgggactatctcccaggaccctccacccctggtgtctccaggtctctcttgctc

SEQ ID NO: 312016 - DNA, 122 bp, Homo sapiens
tctttccagagaggagcttagccagggacttctgcccttcctgggcccgggcctcgggggcgattccgggtaggtaaagcggaacgagggcgtggcctctcttgtgagcccgccctccccgt

SEQ ID NO: 312017 - DNA, 122 bp, Homo sapiens
atcttgctgtctctcctagatcacttgctctgagggaggacatctgctgtatcatgaggacgcaaaaccatcccatggagggtgctacatgcagagcagctgaggcctcctgctagttgtca

SEQ ID NO: 312018 - DNA, 122 bp, Homo sapiens
aacaatggctggttatttcattgcacttaaaagttaaaaccataatgactcccaagtcaacggttttgaccaatttcaagactaccttctctttttgttcattctggcatatgtgacacagg

SEQ ID NO: 312019 - DNA, 122 bp, Homo sapiens
gactttatgagaagcagaactgcactctcggttccctgtctccgtgtccctcttgtcttacgtgttgttagaaacaactaggtgtggtgttctcagttccctcttcccggcgccccgcctcc

SEQ ID NO: 312020 - DNA, 122 bp, Homo sapiens
aactgctactgtacttcagcctgggtgacatagcaagaccctgtctcttaaaagaaaaaacgaacaaaaatttcctaagtctgcccactcaaaagtcctagaagcagcgacaacccaataac

SEQ ID NO: 312021 - DNA, 122 bp, Homo sapiens
tggaacagccacacccccgcttaggacacagagataggaaggccgcaccacccctccccccgacctggacacagagatggaaagaccacactccccaagacacagagatggaaagaccatac

SEQ ID NO: 312022 - DNA, 122 bp, Homo sapiens
ttgacaatctgtgagaggagttgaaaccttccagatcatctccgtgggccaatagaagtgcgcagtgttggtgatttctcttgttttttttttttttctggagttgtgtgtgtgataatctc

SEQ ID NO: 312023 - DNA, 122 bp, Homo sapiens
atcaatcccttacaaagactatgtgctgtagactttgcttcttcctatacatttgtcttacggctcagtggtaaggtagctgtagagacacattacggggtaaatggaaaagggaaataaag

SEQ ID NO: 312024 - DNA, 122 bp, Homo sapiens
tgtggtgcctcgggccacctggactcgacacacgggggccagagagaagccggtgaggaccgcagcgcagagcggggcgaccacccccggctggagtccgcctccggacccgctccctgggg

SEQ ID NO: 312025 - DNA, 122 bp, Homo sapiens
tggcggcagtgctcgcagggacaacagaagcaattttcactccaccggaaatagttcagacgttgattcaagaccacaagcatcatgacagatttaccaacacttatcaggccttcaaggca

SEQ ID NO: 312026 - DNA, 122 bp, Homo sapiens
ggcaggaggtccctgccgctgagcaggcctggggtgagaactaggagctgagaacagctacggtgtccaaggggacggagaagcacagggaactcgctacgactctgcgagtagaggggagg

SEQ ID NO: 312027 - DNA, 122 bp, Homo sapiens
caaagtccattgtacgaagatactgtacctttcttttaatgccagtttataatgcatgttcgaacttttaacttcactaagtctatgaaggtaagatatacatagtaagaactaaacctgct

SEQ ID NO: 312028 - DNA, 122 bp, Homo sapiens
actgtctcaaaaaaaaaaaaaaaaaaaaagaaaaagaaaaagaaaatgtaaaagagaacacggggattctacacaagatgttcagaggagactttcagataagatcaactttgtctttgctc

SEQ ID NO: 312029 - DNA, 122 bp, Homo sapiens
cgatggcagagaaacttaaggtggtctctgcagggttgtgaggtccagcgcctcggtccccgcctacagctgcttcagggctattttcaaaaaggtagatcttattgtttcatcctgatttt

SEQ ID NO: 312030 - DNA, 122 bp, Homo sapiens
tctttaagtgcagatgagatgcttaaggaaacgtggaggtaatagcaaatattataactacgtaggaaaagcgcactgaaactgaaatattataagtaggcaggaaagagcactgaaatttt

SEQ ID NO: 312031 - DNA, 122 bp, Homo sapiens
acccctcagcgtgagggtcaggagccccacagtccccacagcagcaggaagcactagctccgggtcccgagaaaggagggccccaactccaggagatgcggcccaggagctgagaacacgtc

SEQ ID NO: 312032 - DNA, 122 bp, Homo sapiens
ccagcaccccgatgccacctgctggactcggctcggcggatggctgggagctgggggacccgaggtgacagcgaactcagcctgggcagggagaaagtcaggtctccccttcccctcctctt

SEQ ID NO: 312033 - DNA, 122 bp, Homo sapiens
cctgacatgcccactgtgtgtgtgcgacatgcccactgtgcgcgtgacatgcccactgtgcgtctgacatgcccactgtgtgcgtgccacatacccactgtgcacctgacatacccactgtg

SEQ ID NO: 312034 - DNA, 122 bp, Homo sapiens
gtgttagggtttttgggctctttccgggacccaagttccagggcaagaaggtctgctcggcggcccgcctcggggccccgcccactttggccagggtcggagccgcccggagcgggagccgg

SEQ ID NO: 312035 - DNA, 122 bp, Homo sapiens
gtttctatgaccttcctcagcacagtccggaatgcacatgtacggtatcagagagcagcccgcctccatgttttcttgggaaggagggtctgtgcagatgtggggtttttttgggggaaatg

SEQ ID NO: 312036 - DNA, 122 bp, Homo sapiens
cttccttcccttaccctttggaggacccagtttcccggtcagtaactatccttgcccgaacggagccgtcaaatgactcctttaatgtctcttcagtggtatcctcagacaggcctttgaca

SEQ ID NO: 312037 - DNA, 122 bp, Homo sapiens
gggctgcggcgcgcccctcgccaaggtggtcttccggaatgcaccggtttaagaagtggacgcagctgttcattgccgctgagggtattcacatgggtcagtttgtgtattgcggcaagaag

SEQ ID NO: 312038 - DNA, 122 bp, Homo sapiens
tgggaagtcctacaggtgcctcttggagacacccggctctggaagcagctccaggcatcacgggggaatctgtgtggcggccgtgtggccccagcccctgatgcaagcgtgccagtgcacag

SEQ ID NO: 312039 - DNA, 122 bp, Homo sapiens
acctgccagcagaagagccactagggtgatgatggggggcttctggagatgtgactcagccgcatttcccagccttcctcccactcctgcaccccaccactggcctttcttgccagcaattt

SEQ ID NO: 312040 - DNA, 122 bp, Homo sapiens
ggaagccagagtggaaaacagccaggaattatctataatttcagtctctgggtggcgtgtcggttttttctttgttttgtaaattttctgtaataaggtatttgttttacagtttaaaaata

SEQ ID NO: 312041 - DNA, 122 bp, Homo sapiens
ccacacggaagagggggcgggggcagggatgcacttttgcgcatgtgcttacagtcctgacgtaggaaggggcggggctttgccgaagggggcggggctctcgctgatgggttggctttcgt

SEQ ID NO: 312042 - DNA, 122 bp, Homo sapiens
cggcgggcgcagggcccggagctttacctgcctttggaatgtgcagagcgggatcggatccggactccgggttgcgatccgctccggaaactgcgcagcaccggaagccggggggcggcggc

SEQ ID NO: 312043 - DNA, 122 bp, Homo sapiens
acctgaagtgtaacataaagaagctttacaaataactctctctttaaaatacggttaaatcgacatggggtatggaattgtgtaaagacacagggaaaataaggaggaaatattgcttataa

SEQ ID NO: 312044 - DNA, 122 bp, Homo sapiens
tgagtttactcttcggcatgggacagtgtaaataagaggggttcctacttctacagcccacgctaggtcacgacctgaactcactgtactggtataaaagagaaagttgtgctggaatctcc

SEQ ID NO: 312045 - DNA, 122 bp, Homo sapiens
aaaacgcgcggccgtgttattgattgaattccagcggcgcgggagcctctgcagagaacgcgagagatgaagatgggcagacggattcatttagagctgcggaacaggacgccctctgatgt

SEQ ID NO: 312046 - DNA, 122 bp, Homo sapiens
cgacgggcggtagcatccggggactgcatctcaggggttcgggttgaggcagccgcgccccgtcccaccttccccacacggggcatgtaatgaaggggcttgtagaagcgcactcgcccgct

SEQ ID NO: 312047 - DNA, 122 bp, Homo sapiens
atatgccttatatgctgatatgaatatgccttaaaataaagtgttccccacccctgcccacgatggttcattctctactcataattctaaacctgcctggtttggtgaaggatagatccaca

SEQ ID NO: 312048 - DNA, 122 bp, Homo sapiens
gtagcaggatggactgggcctgtgggccacaatcggccaatccctggtggtgtgacataacgtgatgagtgttttaacagaggctgatgattctaaaaaagcgatcacattctgcttggaat

SEQ ID NO: 312049 - DNA, 122 bp, Homo sapiens
cttccctgcagttgggagctgacgcctgagggacgatccgctgagggtcaggctctgctgcgcgactgcccgagccgccccatgttcgagacctgtgccaatcccatggacattctcctccc

SEQ ID NO: 312050 - DNA, 122 bp, Homo sapiens
ggtgaaagcttgacctgcgccccccacccctgacgtgctcaccgctccactccctctaggcgggcggcacccgctgaagcctcagtaccacacccacagccaggagccccagtcccgcactc

SEQ ID NO: 312051 - DNA, 122 bp, Homo sapiens
tccctgcgacttgatcttcctttccagcaaccggggagatgggacgtgccacgtcaccaccgccagcttggatggagaatccagccataaagtaaggggccttttcattagactccagggca

SEQ ID NO: 312052 - DNA, 122 bp, Homo sapiens
ttccctgaaccgctcccaatagagacaggttggcgcttcagtgcatctcagatcctctggcgcccgggcgccccctcccggcgacacctcccggctgtgagcgcgcgggaagaggccagagg

SEQ ID NO: 312053 - DNA, 122 bp, Homo sapiens
ggctgttttctttctccaaagttcccgtgctaagggtagtcgtgacccttgctgcctcttcgttttgttttttttgagacggggtctcgctctgtcgcccaggctggagtgcagtggcgcga

SEQ ID NO: 312054 - DNA, 122 bp, Homo sapiens
gaggtgggtggctgcgggctcgggagcgcccagggaaatagggcgaatgcgccggagggtcgagcccttccagagagcgctgggctccagctaaacctgcggtcgagggaagcggagccgcc

SEQ ID NO: 312055 - DNA, 122 bp, Homo sapiens
tcaagtgaccccgcacggcgagacgcgggtggcggcagggcgtcccagggtgcggcaccgcggctccagtccttggaaataattaggcaaattctaaaggtctcaaaaggagcaaagtaaac

SEQ ID NO: 312056 - DNA, 122 bp, Homo sapiens
actatggcagccgctagtccctgacaacttccaccctgattccggaccctgtagattgggcgccaccaccagatccccctcccaggccttcctccctctcccatcagcagccctgtaacaag

SEQ ID NO: 312057 - DNA, 122 bp, Homo sapiens
accttccttccaatggcacacaagtgaccgtgacactgtcttagccgccccctcccaccccgagtgcccggccactgcccccagttcagtgctgagtgtatgtgtggagggaacgctccttt

SEQ ID NO: 312058 - DNA, 122 bp, Homo sapiens
gatgccgacggtaaagacaaaacaggagacgcgcgcaaggagcaggtcagagcccaggctcgctgagagaggaagggctgggctggggcagcccggaggcagagagaccgagagtgcggggc

SEQ ID NO: 312059 - DNA, 122 bp, Homo sapiens
ggccggctcgccggtctcatcctactcgtcggacgagggctcttacgacccgctcagccccgaggagcaggagcttctcgacttcaccaactggttctgaggggctcggcctggtcaggccc

SEQ ID NO: 312060 - DNA, 122 bp, Homo sapiens
tcctcggaaagaggtagaagagggggcggggtgtccctcctgccagggcgccctgtcacgcggggaaggagtcacgggagacatcatctccaggaaacaaggggtagcttcgcgctaatggg

SEQ ID NO: 312061 - DNA, 122 bp, Homo sapiens
gccacgcctcaggcgggccgccccgcccactctcgcccggccccgttttcgctttttttccggggttgcccagcttagtcccgcccttcagtttaagccgactccaagcaagtttgtcggcc

SEQ ID NO: 312062 - DNA, 122 bp, Homo sapiens
attccgcctttggaagtgaacttgattgcagcctattttcgtctggaggcggtggattcccggtaggaggcgccttcagtcctcggctcgatcctgtgacgccagccagctgcctatcggct

SEQ ID NO: 312063 - DNA, 122 bp, Homo sapiens
gccttgccttcgagagggatcacgtcatgggagaactggccctggatctgcctgagagaccgagggcagaggtcagggctggaggcagggactcattgggggtgcatgagcgtagacagggg

SEQ ID NO: 312064 - DNA, 122 bp, Homo sapiens
ctctacgttcagctccccttttgtggatgatcgtgaagctgtttacatgttgtcctcttccgtgaactgatccctgtaaacagtgacaggattttatccaaatatttctgatttctaaggga

SEQ ID NO: 312065 - DNA, 122 bp, Homo sapiens
tacaaatcgaaataatagatatgatgaatttagctgtaatgtgtgacatcatctgctcagcgctcacttggagaaagaggacactccaggagttgaagctgccgtgccacccccatccacgg

SEQ ID NO: 312066 - DNA, 122 bp, Homo sapiens
tcggctgcctcctcagcctccctgcttgttggcggctcacacacccttggccaggtgaggcgggcgtgggcctgcagcctgggcctgctcagctgtggaccttgattgtttcttactagatg

SEQ ID NO: 312067 - DNA, 122 bp, Homo sapiens
cgctgggcccccaggctccgccctcgccccgccccggcgccgcggcgggagacacgcccccgagctccacgccctcgagctccacgcacctccccgtagcagacaccccgcgcaggcgcaga

SEQ ID NO: 312068 - DNA, 122 bp, Homo sapiens
gatctctggctggtgtcctgtcatgcagcacgttcattgctccccaagtctgggggactccgcggagcttccacgggcgggttatttctattcctccctcgcgtgactcatgaaattcttta

SEQ ID NO: 312069 - DNA, 122 bp, Homo sapiens
tgcaatctcggcactttgggaggccaaggcaggctgctgggagatggaggttgtagcaagcggagatcatgccactgcactccagccggggcaccattgagcactgagtgaacaagactccg

SEQ ID NO: 312070 - DNA, 122 bp, Homo sapiens
gtggcagatttgcttacttggggcaggattcaggcattcctcccttgttaggtccattatcgccattaaacttattcacatgcacctcttaataccatgtcaactttatcacaatttctaat

SEQ ID NO: 312071 - DNA, 122 bp, Homo sapiens
catattttcaaaaccataccagatctatatctaaggaacagtttaatatccgagtgagtacgatacaagttgacacaggtacaatcctatgttaaccaaaccaaaaatgcagtaacacagct

SEQ ID NO: 312072 - DNA, 122 bp, Homo sapiens
ctggtactgaatcaccttctccttctcctccttccacacgagccgctcatgctggaagcccgaggacatctggtcatggccttgccgctcctcccgcagctcggcccgcagccgctccagct

SEQ ID NO: 312073 - DNA, 122 bp, Homo sapiens
tgcccctgtcttcctccaaccacatgccccagcaacctggggaccctatggggaaaatgtcgctctatggggctcagcctgcattcaccctggggcctggacctgcaaccggaccagccctc

SEQ ID NO: 312074 - DNA, 122 bp, Homo sapiens
cagaggcgaaaacatattagtctttccctttttctgagaaattctctccctaatgatgcacgaaaggcgccgcaaacaagaactaggcccttcgatttacagagaaacgggaaccgcaccct

SEQ ID NO: 312075 - DNA, 122 bp, Homo sapiens
ccaggacaaagccaggcaggaagacagtgaataggctgggagagtcagtgggacctgaagcgcctctgctgtgttagggagtaccttagcatctttcctgaacttttatttatttatttatt

SEQ ID NO: 312076 - DNA, 122 bp, Homo sapiens
tgaaaactctacctccaggaaacacctaaattgattgctcataaaactatttcctctgcccggctgcccaccatctgggaagtgagaagcacctctgcccggccgctgtgcaaccctccaag

SEQ ID NO: 312077 - DNA, 122 bp, Homo sapiens
gccgcacctccgcgcggccccggcacaagcagccaatgaacacgcggctgcgcccggcctcgcgcctccattggctgcgccccgccacccgctgccccgcaggttcccaagccgggtttaaa

SEQ ID NO: 312078 - DNA, 122 bp, Homo sapiens
tgtgcggaactccatcaaccaggtggtgcagctgcgctacggcgaagacggcctggcaggcgagagcgttgagttccagaacctggctacgcttaagccttccaacaaggcttttgagaaga

SEQ ID NO: 312079 - DNA, 122 bp, Homo sapiens
tgtccgcgggcaccctcctataggacgcgcccctctttctcagggtgaacctctggttcccgatacccgctcccaagaccgagaccctgttacggccacatcaacacaggtccccctccccc

SEQ ID NO: 312080 - DNA, 122 bp, Homo sapiens
agtaaagatgacggcgccttgaggtaagctacaggcaacaccacttccgcgtttctcttgcgccctggtccaagatggcggatgaagccacgcgacgtgttgtgtctgagatcccggtgctg

SEQ ID NO: 312081 - DNA, 122 bp, Homo sapiens
tgagaaaacacaaagccagtgttgtcccctcgaagacactggagcccgggacacagagctcgaaaagcctccttggggtcacgctggaagatcctcaactccgggacatggcgtcgagaaga

SEQ ID NO: 312082 - DNA, 122 bp, Homo sapiens
agctccaccatccgcagggacccaggttccttctgtcttgttgcttcaccaacttcgacacgcggtttccatttctgggtccacgctggtgttcgcgttccagccatcaggaccactttcca

SEQ ID NO: 312083 - DNA, 122 bp, Homo sapiens
tgcccccagacaatggagccccgagcaggaagcatgtcccgtgacagaggtcccacccgccggagctttcaagttgatgggaagcggtgacacttgagcaggacatggctggcctgctggat

SEQ ID NO: 312084 - DNA, 122 bp, Homo sapiens
taacgcgaggtccagggggaaacccagaagagtgaggaggagggagctagagagcgagaacgtttgagccttagagaggaagcaccctacttcggtaggcagcccccttttgagcagtccgg

SEQ ID NO: 312085 - DNA, 122 bp, Homo sapiens
ccattcccctctgtcccatcatactcaagtgctcccaactttcctccctccttatctggccgggtgcatcagctgaggtctccgaggaaatcccattgcctacctccacccaaggtcctgct

SEQ ID NO: 312086 - DNA, 122 bp, Homo sapiens
ttttcaagcttgattgggcaaaactcatgtcactccggggacgtacaacctatgaatagtcggctgccgctcaaagagaacgaagaggcggggctagtgcgtggtgggaaggggcgggattc

SEQ ID NO: 312087 - DNA, 122 bp, Homo sapiens
gagcgcgtgaagctcttgtagcagaactcgcactggtagggccgcacgcccgtgtggatgcgcatgtggttcttgaggtcgtagttgtgcacgaacttggcgttgcagtggatgcacaggta

SEQ ID NO: 312088 - DNA, 122 bp, Homo sapiens
cacactgcgagttgggggtggccctggccgccagcctggtgtccttgcctggaggaaatgcgaggtgtcagatgaccctgcccgccctgcccctcccaggccaccctcgcagaggacgcctc

SEQ ID NO: 312089 - DNA, 122 bp, Homo sapiens
atatgaccaatatttataagctctaccacccttccagagacagtgcttgagatgtaatctcgtttaatcctcataacagcccagtgaggtagatattattattactatatctagtttatcct

SEQ ID NO: 312090 - DNA, 122 bp, Homo sapiens
atctacttcttgcttctctcacgttaatgacattttaataatgtatttatttccttctcacggtagtgcagattaggtagcatagaacttggggtcagtggtgctattgtgaatcacccaaa

SEQ ID NO: 312091 - DNA, 122 bp, Homo sapiens
tgaccaggtcttctacaggtcagtgggcgatcaacagctggacgcgtagcagggggtatccgggtggcctaaaagaattcagcaaggccgactgcaggccgagggtcaccaggaactgacct

SEQ ID NO: 312092 - DNA, 122 bp, Homo sapiens
actggggagggggccgaactagccaagcatccaaaccttgccagggctactcagcacgggcgcagtgggggaaactgaggcagtcaaagagcgtacgtggccgatatggcctcagtgcccta

SEQ ID NO: 312093 - DNA, 122 bp, Homo sapiens
gagaaggccagtgacggtgggacgagcaggcgccgaggaggtggcgtggcccagacgggccgggtacggaagcgcgcaggaacctgcgagttgcgggcagccggcctcggcctcggctgggc

SEQ ID NO: 312094 - DNA, 122 bp, Homo sapiens
gggagggataacgctcattaatctccgccttcttttctccagacccccgccccccaaatccggtgaatcttctgtgggcactgattcctcaccacccccgcttctgaatgccacaggaccga

SEQ ID NO: 312095 - DNA, 122 bp, Homo sapiens
tgcagccaccgcctggagtccccagaacctcgggggagctgcaaggtggcctgcgctgcccggaccctcccagcctccacctggaccaccagaaaataatctaagacagctatggttctgag

SEQ ID NO: 312096 - DNA, 122 bp, Homo sapiens
agcggcggctggcggacgagctgctgacgcggggctgccctgggctgcggggattcttcccgttcccttggcagaaaggggcataattaatccgcagcgctctcctttcattaagccttcac

SEQ ID NO: 312097 - DNA, 122 bp, Homo sapiens
ccgcggcgctctcctgggcaggctctgcggcaccatccatcatccactgtcagaagcatccgcgtccatttcccgggaagttgtttgaggggaaatggacgaaagagaagggagcggccacg

SEQ ID NO: 312098 - DNA, 122 bp, Homo sapiens
gggtgttcctttggaacagccctcaggaactcactggggtatttggtggaaagactgccacgggcattttgcatgttggagctacagatggtgtccttcctgccaggtgtgtgtggaggcca

SEQ ID NO: 312099 - DNA, 122 bp, Homo sapiens
aagggcacagcaagctcttggtctatatgggaaggccatggactacaattcccacaagtccgtgcgacctctccgttctgcgcagcttcgcggtatgaggaagagggtcctgtcaggcgcac

SEQ ID NO: 312100 - DNA, 122 bp, Homo sapiens
ctcattgggagctgttaacagagggcaagtgggctgaaacctgaggcacatgaacagctacgccgggttgggttgggaaagagtcggaaataggggatgctctggtcaggagtgggaatgaa

SEQ ID NO: 312101 - DNA, 122 bp, Homo sapiens
gagtctggaaacgcacggttggaaggctgcactgagcttcacatcggggtctgcgtgaagcgccccatctcctgcccctggtggcgcagctcggtactgcctctgcgtctcctccctggcgg

SEQ ID NO: 312102 - DNA, 122 bp, Homo sapiens
cggtcacagaaagtaattgaaggcaaagcccaacaggctgcagcctgaacttgtttgagccgtaagcccgagcctagcgtcgcacgctgggcgactcccctcaggctctcaggccggcgcct

SEQ ID NO: 312103 - DNA, 122 bp, Homo sapiens
attaagtggatgaaagcatccagtacaaagtagcacatcagttattactatctttgttgtcgttagcacaggggccagcttcagcgtccttcctggagtggaagtggggggtttgagtgtcc

SEQ ID NO: 312104 - DNA, 122 bp, Homo sapiens
acctccatgggtcccctagtctgcgacctgccctcacctaatagtcctgaatgacagggacgagctggggcctgcatccctgggctgggaaggacagccagtacggacagggctgagagtct

SEQ ID NO: 312105 - DNA, 122 bp, Homo sapiens
cctctgactgtgacaagaggcattataggcagaccagggaggatctgcacagcgccaaggcggtgcctctgttgttcttggctctgccacctcattcccagctccagctgccaacgctttcc

SEQ ID NO: 312106 - DNA, 122 bp, Homo sapiens
ctctccccagaaacaaaatcgcatccgtaaccggcatcttgtcctgtgctgggggtgagccgcccaagcctccatgaagggacgctcgtacaaagtgaagtccgggtacaaatggccagacg

SEQ ID NO: 312107 - DNA, 122 bp, Homo sapiens
gaatacagaacggtaggcagatctctaaagaggccatcaggaatgtaaacaaactttgctcggtttttaaatgaaagccagaccatagtactgggatgcattcagtagcaaatctatggtaa

SEQ ID NO: 312108 - DNA, 122 bp, Homo sapiens
cttgatgagacaattcaccctcatctgctttctctagtcccctgtacttcttagtctctccgctcaccccgactgcaacgtctggaaatccctccaaagccagcagccccggagggctcggg

SEQ ID NO: 312109 - DNA, 122 bp, Homo sapiens
caaagtgactggtcactacgtaaaatgtgtctttcttttgtttgtttcccacctgctttccgagcccctttctcggacaggtaagatatcctgtttttttgtggatgacttacatccccaga

SEQ ID NO: 312110 - DNA, 122 bp, Homo sapiens
gcaaatcaaaaccacagtgagacctactgcccgctcagcaggacatctgctatcaaaaaacgaaacgaagcaaaaccgaaaataacgcgtgtgggtgagaacatggagaaaatagggccctg

SEQ ID NO: 312111 - DNA, 122 bp, Homo sapiens
gcgcggcctcgccgcctgcccgggcggctgctcgagcccctcctcttctgccggctgaggcgtttagtcatttagactttgaaggcagcctattctcaccagcagctttcctgcccgcacat

SEQ ID NO: 312112 - DNA, 122 bp, Homo sapiens
aggaagttggccacagtcatgacagactcggagttgtcagggccaatgacagccaccacacgggaaatgtagttactgtagtcctcttggatgggaaggaggttgtcctcgtgtgccaggaa

SEQ ID NO: 312113 - DNA, 122 bp, Homo sapiens
gaatagaaatccaccatggggtttttgagtagaggagtggtatgatattaataagattttcgaaagatcatttgggctacttcatgaaggaacattattagaggccagaagatgagtggaga

SEQ ID NO: 312114 - DNA, 122 bp, Homo sapiens
acggaggttgtgccggtccgtcgctgagacttatctcaggaagcgcacaggcacggtgctcgccctgagagtgagaatcgcttgaacccagggaatgaaaaggttattatccctgacttagg

SEQ ID NO: 312115 - DNA, 122 bp, Homo sapiens
ccggtgcttatttctatcaccccagtgtgggcttccttcaaaggaggagggaaggaaaggcgaccgggaagttgagccgcattaaccccccagggctgccagcaccacttgggctccagagc

SEQ ID NO: 312116 - DNA, 122 bp, Homo sapiens
atatggatcttccattaaaattgtctaaactaaactgttttgatgttctcatttatctagcgtggctttccccctttttttttctttaaagtgtttggagacatttctcacagcacagtgaa

SEQ ID NO: 312117 - DNA, 122 bp, Homo sapiens
ctggccggcgctcacccccttgtcgatggtgtgcgtctggcacagcgtgccctcggcggccgggatgctgttggtgatgcaccggttgctcttgctcagacaccacagctcgctgcagacct

SEQ ID NO: 312118 - DNA, 122 bp, Homo sapiens
tgcatcttcttaaggagatacactgtcttccttaatcctcctaaaagtcctctcaggctccgctgtccaatatgacagccaccacccacattaggctattgagcatttgatatgtggctagt

SEQ ID NO: 312119 - DNA, 122 bp, Homo sapiens
gaggaatggcattagtggtttcaggaggtgttgccctgggactgtagcacagggacaatgcgctgagttcacatgcctgaccctgaagctccaaaggcctcagacacagagcatggccagag

SEQ ID NO: 312120 - DNA, 122 bp, Homo sapiens
aggagacgtcttccaccgaccacatcacatggagctccaaagcacgagcacggcctcccgcggctgtgacctcaaggcggagcccctggtgacctcagggagagtccccacccccgcagccc

SEQ ID NO: 312121 - DNA, 122 bp, Homo sapiens
ggacggggcggctgccaggcgggggctgtcacccacctcctggagggggcggctgctgggcggagacgctcctcacttcccagacggggcagctgccgggtggaggggctcctcacttctca

SEQ ID NO: 312122 - DNA, 122 bp, Homo sapiens
tgggtcctggggcttgtggatccccatctgggctgaatacccagtcgatgtggctctaaccgcaccctccggggcggcggcacagggcagaagtggcccggagtgcccctgggggcccgcac

SEQ ID NO: 312123 - DNA, 122 bp, Homo sapiens
ctactggagcggagaggttccgaggtttcaggggcattttgtcctttcccacttctgggccgtgggctcccccatagacgatcccgcgggcccttcctcctctgacaccctcggatctggtt

SEQ ID NO: 312124 - DNA, 122 bp, Homo sapiens
gccctgggcggcctcaccccacgctgcccactcactgtgacggtcggggtcaagccactgcggcaggatctcccacaccagccccaccccgcacctgctgaatcaggttttacattttaact

SEQ ID NO: 312125 - DNA, 122 bp, Homo sapiens
gggctaggcccacccagggcaccggccatatccaggctcaggctcaggctgctggaggtccggctgctgcccaggtggctccgccttgttccctgcctccgcagccccgcctcactccaggc

SEQ ID NO: 312126 - DNA, 122 bp, Homo sapiens
ggttcaggagaggctcagacacacggttggggaagggccatcttgactgtctcctttgaacgtacctggtccagtgtgtcccttctctggaggctgctacattcctctatcacctgtgcagg

SEQ ID NO: 312127 - DNA, 122 bp, Homo sapiens
gaggcacttcctggtccaggacacggtgtaccccttgctggctctggttgccatcttcttcggcatggccctgtacctgcgctcactcttcctcacgctcatggtgctgctgggggtgctgg

SEQ ID NO: 312128 - DNA, 122 bp, Homo sapiens
ccacctcagaacagctctgccactcactgagctgaaatctgccttctggaaacttccacccggcaccgggctttgcaggcatcccacagcctcctcttcgcaggctggtcctccaagaacgc

SEQ ID NO: 312129 - DNA, 122 bp, Homo sapiens
cagaagccacaagcacaccgagtcctgcccatgccagtcacccacgaacacgctgacatccgcacacctagggaaccccacctgcatatgagatttctcagacaccaaccccacacacaaac

SEQ ID NO: 312130 - DNA, 122 bp, Homo sapiens
cagaggggccctggcgcccatccacctgtgggatggcagcattggcactgattcagccctcgccccaacctggcctcctccctccgttgctggcaaagacggccctgggggacactgttatt

SEQ ID NO: 312131 - DNA, 122 bp, Homo sapiens
gctcaagatggattaagccccactctgaggctcggaggctcggatcccacaggctgggagcgctgtgctgtgcccggtacccaacccaggtcctcgaccccggcccctcactggcagggcgg

SEQ ID NO: 312132 - DNA, 122 bp, Homo sapiens
gcttctccagcacgatggagaagactggatgaggactagattagcttcagagtcgccttgcgtcctgagattgggtactgtgataaggtcactggtagagtcatcagtaaccttccatgcat

SEQ ID NO: 312133 - DNA, 122 bp, Homo sapiens
gagggatgactccgacagcgatttcggagcctctctcggcgtcagtcttgcgccggcacccgccacggccagcgcaaccaacacctgcctgaggactggcccgagctcggcccacgcccagc

SEQ ID NO: 312134 - DNA, 122 bp, Homo sapiens
tggagacgctgctctggagctgggtcttctgcggcagaagccaggcctagccccggcgcccgttctgccccgcagtgctggatgtgaacgacgagacgcccaccttcttcccggccgtgtac

SEQ ID NO: 312135 - DNA, 122 bp, Homo sapiens
tcgttcccctggaaggcgacccggacccgagccccggaaactcctctcctctacccagggcgatcgcccaaggagccctggctgcctgactactgccgacgctcacagggcgctgcgaggcc

SEQ ID NO: 312136 - DNA, 122 bp, Homo sapiens
ggaagctgtgatccgccaagcccctgccgccccgccgcgcgcccgagtcagggggcaggtcgtgcatggcctggatcagcagataataggcctctcgcaactgggtccgcagcctgcctgtc

SEQ ID NO: 312137 - DNA, 122 bp, Homo sapiens
ctcaggaaacctggttttccgagctttggctgtggtgtcctgaggaaatcggtccacctccgtgccacactgtgccggctgagaccagatgagaaaggggaggtggagaaatggaggggctt

SEQ ID NO: 312138 - DNA, 122 bp, Homo sapiens
ggccggagtagcgcgcagtcttccgtggaaactctgacaacactggcgaccggccatttccggaaatcaaaggacagccccagcacccagtaactgcctgtattgcggaggagagggaagaa

SEQ ID NO: 312139 - DNA, 122 bp, Homo sapiens
tgagggggaaataaaccgaaaatagatgccggcagatgcgattatgtcggcagtttggcccggagacaccgaggcccaggcgctgggagcgcggtcccaggcagcagtctccggacccggcc

SEQ ID NO: 312140 - DNA, 122 bp, Homo sapiens
cgttgcgatgagaactgtaaactctttccaaaagagcccagtgtgtggtcattgccgcgacgtgccggctggtggcaccgagcagcctgggcccagagcggttgtcgggccgacagatccgg

SEQ ID NO: 312141 - DNA, 122 bp, Homo sapiens
aaagataatttatcgtgttaggagaagaacgatgatacctacttaacacctcagcatctgcgtcgtgtctctttgtgcttttgtttgtggaaggagacccaaatgcctttactttattctct

SEQ ID NO: 312142 - DNA, 122 bp, Homo sapiens
gatacgagggcggtatacactcaacacgcgcatgaacgattcatcaagccctccgtgtgccgggtctggctcaccaacctcatcctctgagctccgggcttctgcctcccagcccaaggaac

SEQ ID NO: 312143 - DNA, 122 bp, Homo sapiens
tgtgcaggcccggagcgccgtcttctgggcgaggagtgtcattagtaacactttatgttgcggataggtgaaagaaaaactgacgcttcggagatggggttgcccaaagaggaagagagaac

SEQ ID NO: 312144 - DNA, 122 bp, Homo sapiens
acggaggacataatttccagccgacctaaacgaagggaaccggaaatgcgtcatagcgcgcgtctgtttggatgtggaagccgagacctaaagttggggggtgatctctgaggagatggatc

SEQ ID NO: 312145 - DNA, 122 bp, Homo sapiens
ggctttggggactcagtgccctggaaggacggtgcctcctggctggggagctccaggtcacgctggcacgaggccttcaggcggccgtagcgcatgctgcagtggtgcaggctgcggcgctg

SEQ ID NO: 312146 - DNA, 122 bp, Homo sapiens
gacgggcaccagcccgggacccctgacaaggtgttgattagggtgtggctaagccccaggcgggagaaagcgttggcatttataaggccagggtctggcgcggtggcctcattccgtcttga

SEQ ID NO: 312147 - DNA, 122 bp, Homo sapiens
tgaaaggccatgaacatatggagagggaaagtggtcagctgaagccaacctcttaaccatcggcaccaaggaagcagaaatgaatgaagtgggctattagacaagcccagccaccacagcct

SEQ ID NO: 312148 - DNA, 122 bp, Homo sapiens
cgccctcggggtggcagttcccgttaaccttagccacaaagtcaaaggtatttatttccccgtcgcctccctccgagtccctctgcattttgggcggggaggggcggtgcgagggatggacc

SEQ ID NO: 312149 - DNA, 122 bp, Homo sapiens
tggccgcggttagatccctccgcaggcacagactgttgctggtgccagagatgctcctctcggggggcacagtgaagccggcagggaaaccaaacagcctgagcgtctttttcgggggctgg

SEQ ID NO: 312150 - DNA, 122 bp, Homo sapiens
tgtctggccttttcccggacatagtgagtctgtgatccagagtctgacccacgtattcaacggggcctgcctcacttcctgctctaggatgttttacattcactgcacttttggagtgaata

SEQ ID NO: 312151 - DNA, 122 bp, Homo sapiens
ccgtggaaaagatcatgcctgtggtgggctcgtaggtgcgcgcgaggtagtacaggccctcgctgtcctggtacttcttggtcttcagcatctgcgcatactgctccaggcccaccaccagg

SEQ ID NO: 312152 - DNA, 122 bp, Homo sapiens
gagcaggtggggaataacatcttggggcaaagacacactggcaaaatctaccaggtaacccggtcatatgggaatgcggggcgcctagtcagccgcgcagacaggcacacagcgcggcaatc

SEQ ID NO: 312153 - DNA, 122 bp, Homo sapiens
gtcagtcaaaaccacgcggggtgggggagcgctgacaaatgccgaggcttctgagcctcccgcttgcaaatagtgcttggaatggctgcttaattagctttgaatggcttttccttccagct

SEQ ID NO: 312154 - DNA, 122 bp, Homo sapiens
aaggggtcttgggggacgggggtggggttcacagcagtggcctgggcgtgatgaccctggcgaaggacggggtcgcagagcccttaaatcctggaccagtggctgattccaaaagcagcagg

SEQ ID NO: 312155 - DNA, 122 bp, Homo sapiens
ctgtggggaatgcggctctccgcaccactctcgcaagtcaccaggtggggcaaggatcggcgggccaagaaggttggggcggacaatgtcacgaatcataaataacttctgccccgagtccc

SEQ ID NO: 312156 - DNA, 122 bp, Homo sapiens
acagcttgctggaaaccagctgaggaatcactctgaacctctggggttagctgggggagccgatggagggtagggctctgagcctggagcgagccatccttgccccactccccagtcctgag

SEQ ID NO: 312157 - DNA, 122 bp, Homo sapiens
tagcatgaggacgggcttcttttcccgtgctcagttaatctggctgtcagttggtgttaacgctgcagtttaagtgttcggattccaagggaaacagacaaacctcacgaaaggaaggaagc

SEQ ID NO: 312158 - DNA, 122 bp, Homo sapiens
tcaatttcaggctcaaaacatagagggaaccagtgttttaggcacagaatgggacccaaacgttaattcccaccccttcctcataccatagtggggttttttccattaactctttaacaggg

SEQ ID NO: 312159 - DNA, 122 bp, Homo sapiens
ttcaattaaacattccattccacagctgcaccagccacattttaaatgcctcaacagccacgtgtagcaagggctactgtactgaggagcacagacacagaacatttgtatcagtggctgac

SEQ ID NO: 312160 - DNA, 122 bp, Homo sapiens
ccacccagcggtgagtcatggggcagggcccgcgggaagctttgttgagtggggcgctgccgcccggcggggtcccgccccgccactccccggggaggggcttcggggcacggggccgtgca

SEQ ID NO: 312161 - DNA, 122 bp, Homo sapiens
ttccctaggagctctgtttcacagggaatcagccagggagttgacaactgcagttcagtacgatgggggttgtgacagaagcagggtagccgtgaaagaagaacaggaccttggccagtatt

SEQ ID NO: 312162 - DNA, 122 bp, Homo sapiens
gcaaggtaaactgaggggcctggcagcatctgggcctcccttaaaggtcgaaatcaagtgcgctcgccctccttctgtccgccttttccctttaaggtcctcgaggctgcttcgctgcagaa

SEQ ID NO: 312163 - DNA, 122 bp, Homo sapiens
cattgcactccagcctgggtgacaagagtgaaactccgtctcaaaaaaaaagcatggtcacgggggatgtctgggcctctgatggccccacgtcctgttgacctacccggctcctggggtga

SEQ ID NO: 312164 - DNA, 122 bp, Homo sapiens
ggtggggaccaggatatgactcctggtgcccaggccctgggcctgctccttgccaccaaccgaaccgtgaatgtagggcccccagcctcacctctgccccaggaccaacaacaccctggttt

SEQ ID NO: 312165 - DNA, 122 bp, Homo sapiens
ttgccctggaggataattcatcgacctgttggagaggctgcacctcacacccagcacaggcggtcacctggtccctcgaaagacagacacacggctggctagcttttaggagccgcagggtg

SEQ ID NO: 312166 - DNA, 122 bp, Homo sapiens
cctcacagcatcagctttttcttcggcttcatttccctctggaaagcgctttctcacagacgctgcaaagaccgaaggggcagcccctgccctgctaccctccagggagccaccgctctaga

SEQ ID NO: 312167 - DNA, 122 bp, Homo sapiens
ggaagtggctgtccagggattagaaccccaggcaggctgcccccaagccacacacttccccgccactctaggctgtgtcctgtccatgtcctgcagacctgggaagaagggacctgtgcaag

SEQ ID NO: 312168 - DNA, 122 bp, Homo sapiens
accaacaactgtcattggaacaaagaacaaaatggcactcactctttctcaagagacactcggccaagtaaccttgtggctgcggccttgtttaagtgaagaacttttaaaagccattttga

SEQ ID NO: 312169 - DNA, 122 bp, Homo sapiens
acacaccaccctcccgacctcagccctccaactcccgataaccagccgacctcctccaaccgtgcggaagaaaagggttggctatttccgtggcccaagtaatagtcaggccgaaatctcgc

SEQ ID NO: 312170 - DNA, 122 bp, Homo sapiens
cccagttctaggcctggctgcagtcctgcccccggtgcccagagagcccttctcccatcacgggccatctccactgagccatgtgctaagcatcagctcctgggagccacggtgtcccctca

SEQ ID NO: 312171 - DNA, 122 bp, Homo sapiens
tttggccggtgggagcccctcctttcagcaggcgccgggcggtggggttgcggatggctgcgcgcgctgcgggcaccgatcaccggcggcagttgggctccgcggggccgaaaagctgcggg

SEQ ID NO: 312172 - DNA, 122 bp, Homo sapiens
tgcatgggctgactcagaggggcgtgccacaaggcctagtcaccctcacaagagtcccagcgcttaccagccaaggacgagggcccaaggctcagggaggagggagtcgctgtcccgcagcc

SEQ ID NO: 312173 - DNA, 122 bp, Homo sapiens
tgacctggagaaccaggatccatattctcaggtaacagaagatgactatgatcatggggacgaggaagtggaaaaccaccacggcgatggtgtaggcggagctgacggactgggcgaaggtg

SEQ ID NO: 312174 - DNA, 122 bp, Homo sapiens
gagccccagcccctcgtgggccaagggcgcccacagccacgccaccctttccgaaggaaccgagccccagcccctctggggcctgccaattgccagagagccccagtgctccacccactcca

SEQ ID NO: 312175 - DNA, 122 bp, Homo sapiens
gtgtttgttcccagtcaccagttccacctggacaaacattttccaggcagacactcactccgtttgaattccccagcctttcagactgctggagactgccaagtcccagtgattttgtcctt

SEQ ID NO: 312176 - DNA, 122 bp, Homo sapiens
gagtatgttatcgtcagtcttatgctccttaaggatgtaggggtacttctatatcttttgcgggcaatgatggatggaatattgggctgaaccaattagtatgttaattttaaacttctgct

SEQ ID NO: 312177 - DNA, 122 bp, Homo sapiens
gaatgacaaggacccaaagacaaaaggcagccaaggtcagcttgacaatgtgcctgtcaccgctttctgaggaagcccagtggatacacacaagggaaagaatttgacctagacttcatcca

SEQ ID NO: 312178 - DNA, 122 bp, Homo sapiens
gcctgcgtatcctccatacatggcggccgcggctgccgcgttcttctgtagtgtggcgatcgtggctgtagctggagcagcaaatggcacgtaactggccccgtagatcccggcagtaggaa

SEQ ID NO: 312179 - DNA, 122 bp, Homo sapiens
ggttagcttcgatgagccgcaggaggaggccactgggctgcccacctcagtgccacagatcgccgtggagggcgaggaagccgtgccagtagctctcgggcccaccggaagagactgatccc

SEQ ID NO: 312180 - DNA, 122 bp, Homo sapiens
gtatttttcaatgcttcttacctgttatttgtgttttaatttattgctctatttttccatcgatgccactgtttttaattttgttccctataggtcaggttcatctgctcacttctgatgta

SEQ ID NO: 312181 - DNA, 122 bp, Homo sapiens
aaaaagggtcaagagaaagagtcagccttgtattgtgctggaaatattaaatattcacttcgcacatatttatgaagcacttgctgcatgcaaggcactgtgctaggagctgaggaggcagc

SEQ ID NO: 312182 - DNA, 122 bp, Homo sapiens
agctgctctttagagggacagaaatccacaggaccccagtttccacccaaattcatgagccgcagtggccaggctacctcacctcaccctgctgggtctgggcagtccctattctcccatag

SEQ ID NO: 312183 - DNA, 122 bp, Homo sapiens
cccctcctctctgccttccaacctccagaggacgagacctaaagggtgcctgattggctgcggagggcggggctaagacaaggggcggggctgccgagaccttgggcccgcgtgagggaaaa

SEQ ID NO: 312184 - DNA, 122 bp, Homo sapiens
ccaagttcttcaattaactgagccctgggaaaaatgcgcagacatctcgtgcgccttctgcgggcgatcctctgtctgcctaacggggttttctctgaactctcagcggggtaggagcaggg

SEQ ID NO: 312185 - DNA, 122 bp, Homo sapiens
atgcatgttcttcttcttttcctcaagtcatccagactcactgcacgtcattttggagggcgccttcctttccggattccaacctctgcggcgctggcctcaggctccaggtcccggctgct

SEQ ID NO: 312186 - DNA, 122 bp, Homo sapiens
cctgccccgccctaacaggctaacttttccgcgccgggcctggctctttgctgcagctgccgccctcggtgcagagttcccgggagcacttgctggcttcggtttcgcgaacttcctggccg

SEQ ID NO: 312187 - DNA, 122 bp, Homo sapiens
gatggttggaggtcttgaaggttttcttcccagggacgccagcacctctgatcactgaggcgaaaccccctgcctgaagtgcttgttcaacatgcttctgcaacatcacttggtcctcgaaa

SEQ ID NO: 312188 - DNA, 122 bp, Homo sapiens
accaaataggctgtaaatggctttccagccttctcttttcctactgagatggggtgatttcgtggacacagtacagaggacaatgggattgggagagcatttctgcttggggtcaccagttg

SEQ ID NO: 312189 - DNA, 122 bp, Homo sapiens
tggtgcccgccctcgtccctcgcctgaatggatgtttttatcctcctaagaactgtgcctcgggggtgtagctgttgtggactctctttctggaggtggggggcagtgtgtgagctggagta

SEQ ID NO: 312190 - DNA, 122 bp, Homo sapiens
atgtctccgccaccctggtgtcctcacctcggaggctgatggactcatggtccaagccagcggggctacaagctgctgtctttgcaccttggtccttggccaagcctccccttgccacgggg

SEQ ID NO: 312191 - DNA, 122 bp, Homo sapiens
gctggacgagcccggggcccaggggtcccggccgaaatccctgctgtctttcaggtcaaacgtcataatccccgaaccccagaaaggccgaaaggcaaggcaaccctgaaagacgacgaagt

SEQ ID NO: 312192 - DNA, 122 bp, Homo sapiens
gctggagaggatttccccagggtttgcaaaggcgagggaggcttggtgctggctccccaccgcgcgcggcacccctgagaatctggtcttcatcgagcgctctcaggcacggcatgtaagcc

SEQ ID NO: 312193 - DNA, 122 bp, Homo sapiens
tccctccacggacgctgtgcgtgccctgctggagcagcaagtacccacagtgcggtagcacggagaggaccactatctgcactgtcagcactttagccccggcagggctggagcgggaggtg

SEQ ID NO: 312194 - DNA, 122 bp, Homo sapiens
ctgccaaaatagaataatgttggtcctctcctcatgtgccgtggaactggggtaaaactgcgtagtggctgcagctgcctgtccataccggaatcgagtataacacggtgcctggcttagca

SEQ ID NO: 312195 - DNA, 122 bp, Homo sapiens
caagtttcagtttctcctaaagccaccagctgctcagaatccctggctcaggcttgctcacgtggctagaatttcctaacatgaactggccttccggttgggccccttctctggaaagagga

SEQ ID NO: 312196 - DNA, 122 bp, Homo sapiens
ccccgcgctgggtcccgacggctctgcgctcttcgatatggtgccgcgcgctgcagagcccggctacctggtgaccaaggtagtggccgtggacgcagactcaggacacaacgcctggctgt

SEQ ID NO: 312197 - DNA, 122 bp, Homo sapiens
ttggacaagaaaatgccccttgggactcagattagctttagggtgtgggccagacatccacgcagaggaggatcagcagatgagtcagaagcatccagatggacttggacagagacaattcc

SEQ ID NO: 312198 - DNA, 122 bp, Homo sapiens
ctcagtgtcgacgcgcagtatctaaccagaactctctcttcactttcaggaaatttgccccgcgatgttctgtgtgcaaggagcctattatgccagccccgggccaggaggagactgtccgt

SEQ ID NO: 312199 - DNA, 122 bp, Homo sapiens
accatgaagagatactccctcttctgggccgggtcctcaggtcgctggtgaaccgagttccgatctacgttggagaccaaaccagttgactttggcttgactcctagtgaagaagccacgct

SEQ ID NO: 312200 - DNA, 122 bp, Homo sapiens
tggccacagtccagcgtgcggcgcacaatgaggttggaccgctgggggacgctgaggttccgagttggcattgtgggcattgcccagccactcctgcccggccaggtcctctgtgaggaaag

SEQ ID NO: 312201 - DNA, 122 bp, Homo sapiens
catcctgtgcttttgagtcgaacacattaagctcaccaggggagactggctctgacatagcgctgtgtccctcttcctgaaacgaaagccgtctgtctgacgaggacattgaggacccgtaa

SEQ ID NO: 312202 - DNA, 122 bp, Homo sapiens
gcgcacacggcccccaacacacacagccccagcgcacacggccaacacacacagtcccagcgtgcacggccccacacacacagccccagcgtacacggccccccgcactcagccccagcgtg

SEQ ID NO: 312203 - DNA, 122 bp, Homo sapiens
cgagtccgtgccctgcgccaggtttaggagacgccggctcccctcccgccctccatcttgcgtttccgagcccacacctagcgtgtctggaaggtgtgggtggattccgtccacgggcagcg

SEQ ID NO: 312204 - DNA, 122 bp, Homo sapiens
cggttgtcaatctatggagataaatagctatacactgacattgtgttttgaagttatctacgaaacaaacaaaatagtagctgacataatagatgctaaatacaatacagggtaattgaata

SEQ ID NO: 312205 - DNA, 122 bp, Homo sapiens
ttggttggttttggtttgctttttaaaaattgtggtaaaatacataacaaaagtaactatcgtaacctgagcagttctgtgacatgaagtgaattcactgctttgtgtgaccttggccacca

SEQ ID NO: 312206 - DNA, 122 bp, Homo sapiens
agaaaacgagcgagccccatgcaactcttcattcctgcagggagaacaaggaggtgtgcccgccagggaagggacgcacccccaccggcgctcgctgccttaacttccccatccccgcgcca

SEQ ID NO: 312207 - DNA, 122 bp, Homo sapiens
gccggcctcaccgccggccgggggcgccgtcccggcctccacacgccccgcccctccgcacgccccgcccccgaccctccagccgctctccgctcctcagctgggacggccccgcccccggc

SEQ ID NO: 312208 - DNA, 122 bp, Homo sapiens
gcagaatgtccccgatgtcttgcttccctcggcctcccgggacccccccgctacccccaccggggtctccgccaccgggaggctcgccagggcccccaggctccccactcaccaatcccagg

SEQ ID NO: 312209 - DNA, 122 bp, Homo sapiens
tcctcccaatttccaaactcctaatagaatagagaatagatcaattgtagcaattcgtttcgaagcaaagacaacgcatggtggcgctgcaggctaaggcttcaaaaaaaggaaaaggaaaa

SEQ ID NO: 312210 - DNA, 122 bp, Homo sapiens
aaagcttccggtctctgaaatccctagaatcctgaaggatgagacttgtttcagaaattccgggcgggagggagggggagtggtagggagaaggattgcagaaagcgaaacaaaaagacgaa

SEQ ID NO: 312211 - DNA, 122 bp, Homo sapiens
acagctcccctgtgagttcagacttctcaaggacgcttgcatagccaacattgttgagaacgagtaaccccttatcacagcacacgtctgtcgtgccatgaagcaatttcccatccctgtgg

SEQ ID NO: 312212 - DNA, 122 bp, Homo sapiens
ttagccaagtgcctggcactcagaatgtttcccatgtgttggttctcagagggggagttgcggaaactaccatcatacttcagagggaattgggaggaatcagcagcagccaaaccaggacc

SEQ ID NO: 312213 - DNA, 122 bp, Homo sapiens
ggctgggtggagggaagggtggggaggagagggatgggcagggccatgtcggcctggtttcggggagcttttggagctgtaactaatatttcagttactagaaagagccctggactggcagc

SEQ ID NO: 312214 - DNA, 122 bp, Homo sapiens
gtgggaggggcagaacggcatggcccggaaacctctgaaaaataggtgcgggttctactgcggaaacgcaaaatgatgtcttgttgggtacccaggtctcagtgtctcgtgacttcttattg

SEQ ID NO: 312215 - DNA, 122 bp, Homo sapiens
ggcttacagcgcgggaattcgggaacccagcgcgggctgcagaggccccagcaggagccccgcctcccggctcgtcgacggattcgttcttggccctgccaatctgattctcagctcccaga

SEQ ID NO: 312216 - DNA, 122 bp, Homo sapiens
agggggaatatgcgccacctcccagctccctcctgggaaatagcaaccatccatcacgaccggcagagcccatcacacccacaggcagagccatcaatttcagggacactgtggttgctggt

SEQ ID NO: 312217 - DNA, 122 bp, Homo sapiens
agactggagctttgctggagtctttataagccttcttgcacctccttagggaagtgttatcgccaatttacaggtaaggaaatgaaggctcagaaccagcccgaggtcacacagcttagatg

SEQ ID NO: 312218 - DNA, 122 bp, Homo sapiens
gcctggagagccggggactttcctgggcccgggcgggggccttaatgatcccaggggagccggttgaagccggagacggggagcttgtgttggaggtggggggagaggcgtggaaggatcgg

SEQ ID NO: 312219 - DNA, 122 bp, Homo sapiens
gcgtgctaggtggagtgcattttaacaagacattagggttttaacacatggctggagtggcgaccaaaagggaaaactcagtttccagtccaagcctcctagagacattcctgccaacctcc

SEQ ID NO: 312220 - DNA, 122 bp, Homo sapiens
gagattgggggaaggaggcagcgggccagggtgagctcaccccgcatgaatgcggctgggcggagaacaatgtacgttcacattctttgactacaacgggcctccgcaggacctggctcggt

SEQ ID NO: 312221 - DNA, 122 bp, Homo sapiens
cacttcccctgcctctcctcttgaccctgcactgtaatctggacactcctggagccaagccgtgggagaggcagccatgctcagtctccctggataaagccagggttcccttggcaacggga

SEQ ID NO: 312222 - DNA, 122 bp, Homo sapiens
ggttgcaattaaattgagtagttcaggaaggcttcaatatggatgtgatatttgagagaccggtggaagtcaaggagcaagttgtgaggctatttaaaggtattcttggcttacagaacaat

SEQ ID NO: 312223 - DNA, 122 bp, Homo sapiens
gacagaggcagcataacagataacaaggacgctgacgtcagcctacctgtgatcgaatcccgactcagccattaagttacctctgtgacttaaatagcccaggcaagctatttaatctatct

SEQ ID NO: 312224 - DNA, 122 bp, Homo sapiens
aattgtgcagtaacttctaaaaactctactgggacaggaggcaacaaaactccggatcagcgagagctctgtttatccgagggtgctgagcctcaggccccacggagattcccttttcggca

SEQ ID NO: 312225 - DNA, 122 bp, Homo sapiens
gcgtggcgtcccaaagaccctgaggtcctgggtttgcgctgccggagctgctgggccccgcggggtgccgcccaaaccggcagggaggcttgaaagaggagatccaggcaccggtggaatga

SEQ ID NO: 312226 - DNA, 122 bp, Homo sapiens
ctcccgagctggaggcgcgccgtccttggggacgtcacagcgctggaatccgaggaatgccgggctgcaggagctccttctgcaggcccggagaagtcgcacacttttaatggggtagtttt

SEQ ID NO: 312227 - DNA, 122 bp, Homo sapiens
taagaatggttctcggacacacctctgaaaggaaaatacaactcggcaccgcagttgactcggccaaaggaaaaaaacttaagctgaaagctgaggcctgcccgaaggagcctttcctgtgg

SEQ ID NO: 312228 - DNA, 122 bp, Homo sapiens
acctgcgtgacttttaacatccccttcatatcctcccactgggcgcattttaagcgccagcgctcaccacatccggctgccccaccgcccgcgcccggagccccaacattcccagtcctctc

SEQ ID NO: 312229 - DNA, 122 bp, Homo sapiens
tcatccacggctaaattaacagccccagttgtggcacaaaggaagctttgaaggctgcaccggcttggtcctccagttgccaactggaggtaggtttaatgtaacatattcttgctgcttaa

SEQ ID NO: 312230 - DNA, 122 bp, Homo sapiens
cttctggcctcctctagccaatttggcctgacacaatggaattgagtgcctctgacactgcgatggcagctggcatggctggcttctgctctgacctctccatccagaagttgttggtgcta

SEQ ID NO: 312231 - DNA, 122 bp, Homo sapiens
aagaacgaaggaggggcaaactgcgcaagaccgggctggggaatcggtgatttctagggccgaggaggggcggggtcagggggactagggctgtccttgaagatctcacgtcgtggaacttt

SEQ ID NO: 312232 - DNA, 122 bp, Homo sapiens
tttgaaagaggaggagactgaggcgcagagagggcccgccactggcccaaggtcacacagcgcggcggcgggccggggtccccaacagtggccgttcggaggtcccgccccggtccccgcgc

SEQ ID NO: 312233 - DNA, 122 bp, Homo sapiens
catgacccagcgggccctgaccgtgttgatggtggtgagcggcgcggtgctggtgtacttcgtggtcaggacggtcaggtgaggcaaagcctcggtggggcacccccgtgggcctgagatac

SEQ ID NO: 312234 - DNA, 122 bp, Homo sapiens
tccggctggaaatgagaccaggctccgagaacttgaaatgggttattttgtttgtctgttcgttgcttggttggttttcatgttatcttttcatctgcttcactctctcactggggctcttc

SEQ ID NO: 312235 - DNA, 122 bp, Homo sapiens
gggaggggggcggccggggcaggagtcgcggggacgaggaccccgggcgcccgctccccgcggcgggaccctcgacgctacgccccccacccccgggacccggtgcccccaactcccccccg

SEQ ID NO: 312236 - DNA, 122 bp, Homo sapiens
gagcgcaggggcagcgacagggaccagccggctgcgggacgcgctccgcccgggcggctgcggctgaatggatccaatatggccacttcctggaaactccccttggcggcggcggcgggaga

SEQ ID NO: 312237 - DNA, 122 bp, Homo sapiens
agaatattaggaggtgagactgattttgagaactatatattttgtcaaatatataacctgcgtttaaatctttgagtgtgataaaatacccaataaaagcaggtgttttttttggtttgttt

SEQ ID NO: 312238 - DNA, 122 bp, Homo sapiens
agcaggggagagagtggctccgtttgcctccccgctttggtgatgctgtgcgagcggcttcgggggccctggagacgtccgagtcactgagggtgggctgggactcggggcccgcgtcccat

SEQ ID NO: 312239 - DNA, 122 bp, Homo sapiens
tttatttgtatctgcttttgacctattgaagaaaccatgtcagctttctcacctcacacccgggacagacagacgttaaaaaatgaccaaacctacagaaaatatttccagataatgaaatt

SEQ ID NO: 312240 - DNA, 122 bp, Homo sapiens
tgcctggaagatgaccttcgaggggggcaccatttgcccgtgcacgctatcgaacaggagcggggttgggatggcgcctgcccctggaagatggcgttcaaggggggcaccctctgcccgtg

SEQ ID NO: 312241 - DNA, 122 bp, Homo sapiens
gtgtcgcagcgctggccccctgaggggtgcctcctcctttgcgggcatctgtttcctctccgtggtgtgaggggctggaggcctgggacgtgtctgtttcaactcttttcctgccatagtcc

SEQ ID NO: 312242 - DNA, 122 bp, Homo sapiens
aaagtctgcaaggtaggccaagaggctctggatccaagaaggagtcaacgttatagctcacgcctgaggtttgcctgctggtaatattccctcttctcggggagaagtcagttttttcttct

SEQ ID NO: 312243 - DNA, 122 bp, Homo sapiens
gggtactctatggttttcgtggccgactactctaattctagttccggtctctatggcggccggcggaggcaggaacggttgtaggtcgactgaattagccgccaaaggtccaatgagaatgg

SEQ ID NO: 312244 - DNA, 122 bp, Homo sapiens
ccgggcaggtgtgcgctgggcgggcgcgcggactcgcctttgcccggcccgcggctcccccgtgtggcctgagtaggtagtgatgcgaataacatgctttgagaagtcagaaggctggcgtc

SEQ ID NO: 312245 - DNA, 122 bp, Homo sapiens
gcatctgcacccagcaccatacctaaagagatcaggtacagattttaattcattgttccacggttcttttttttaaagagtgttctttaaaaaaacggttcgtctttttaaaccaatgatgc

SEQ ID NO: 312246 - DNA, 122 bp, Homo sapiens
ccacagggatctgatagtgggggccggcctagagaagggcgtttgctttggtttcatggccggttttatcagcagttactggacaggaccagcagtcgcagcgttcacggcttgagctttag

SEQ ID NO: 312247 - DNA, 122 bp, Homo sapiens
gaaaaattattggataatctgaggggcagccgaccatgagggggaagaaaaagttggccacgatgctttggggatgttgggccaggctccccacaacctcctcccgaggccagacccacccc

SEQ ID NO: 312248 - DNA, 122 bp, Homo sapiens
aactgtgtggtggtttatcttcttcaaccgcattactcaccttcaggtcccgatggaccacgcccatctgatggcagtgtagcacagcctccaggatctgctgaatgcaatgactgcatgca

SEQ ID NO: 312249 - DNA, 122 bp, Homo sapiens
cgccgtggccccgctgcgccctcccttccagtcccgggcgaggtgccgcccgcccgcgcccgctctagctctcaccctgcgcggcctaacgggcaccgcggcccagccaggggaggcggcgc

SEQ ID NO: 312250 - DNA, 122 bp, Homo sapiens
tcccaccatcagaaatgtgcagccacaaaggaaaagtccagaatttcagcacttgtgagccgtgccactgtcagagttggaaaagtactagccagcagaaagcctcctcctccccccccagg

SEQ ID NO: 312251 - DNA, 122 bp, Homo sapiens
acaagaccaaacaactcaatcactttacaaatagtttatttccaccttcacaaattcatgcgcctctgaccattatgcaaggcaacatgaattaaatacttatgtcagaacatatttgtctt

SEQ ID NO: 312252 - DNA, 122 bp, Homo sapiens
cattgctccacacaccatctctcattcatcctcacctcaccctgctcggaccagttctaacggcagtggtttatggagcacctagacatcaaatcgagtgccaggcatcagatggaggcttc

SEQ ID NO: 312253 - DNA, 122 bp, Homo sapiens
cttccctctaaacttcccggcaccccgatccggggctccagctccggctggacaatagctcggggacccagtccccctcgagtgtcgcccccccagccagcccagccgaccaaccaaaccac

SEQ ID NO: 312254 - DNA, 122 bp, Homo sapiens
caaacgcgactgtgcacctgtgtcctgcgcgcagcccccgtggctcgctcacccctagcacggcctgcaccagcggcgtcttgccctcatcctccgcgtccgcccagttgacctcggccccg

SEQ ID NO: 312255 - DNA, 122 bp, Homo sapiens
ccccagactaacccagatcaagcccctgggtggaactgcagtttccaggatacaacatcccggggtcagtaaaacccggaggggtcgctccgtgggagccggagccgcgaggagacagtcat

SEQ ID NO: 312256 - DNA, 122 bp, Homo sapiens
atgcatcgcattcccggttgtttgcagaaaatttacagctgagtaataaaagtttacgatcgactcacaagttggattggccacaagaagtcatgtggattccatccatgaacgtgaacttt

SEQ ID NO: 312257 - DNA, 122 bp, Homo sapiens
gagagcatgatatgacattgaatatcgcagtaggtgtacacccacccggtgatattgatccgaatatcatctccaggggatggcatatgacgttactcccaagatagcagtgggtgtgcatc

SEQ ID NO: 312258 - DNA, 122 bp, Homo sapiens
gcactaattgcgagtgcagtggccacaggctcccgggcaaagtggtcaggagcccattcccgccacctccgtccgcgcgccccgccctgtcctccagcaagttggtgcacgcgcgtcctccc

SEQ ID NO: 312259 - DNA, 122 bp, Homo sapiens
gggagaggtctgcgaggtgagggtcccgtagctgacgaggtggtctgccgcaggaagtctcgtccctgcagcggacggggtgggtccctgaggggcgggctggtccctggggcccttctggg

SEQ ID NO: 312260 - DNA, 122 bp, Homo sapiens
gggtgaagacgtagaacagggagaagagcccaaagaggagcatctgaatccttgggccaacgggaaatcccagtaggaggaactctctgatggatgttatattgtctcccatatccctatga

SEQ ID NO: 312261 - DNA, 122 bp, Homo sapiens
aaggatcccagacctcagggtcctcacggagatcacacctgcaaaggccctggggccgggcgggttctgtccacaggtttgggggaatcaggacgtgggcatctctagagcattatcctgcc

SEQ ID NO: 312262 - DNA, 122 bp, Homo sapiens
tagtgctcttaaagtcaaagcagcatgagagaaaagaggagtgaacaaaaagtcgaaccccgggagtgagctatggtttagcccagttaccatggagaccggtagtaacaccagttgtaaac

SEQ ID NO: 312263 - DNA, 122 bp, Homo sapiens
ttccacctctcacccaccactcacgacccacccacacatgggcccaacagtgtaaactcacgccttgagcttccagtcgtgaggaggctgcctccagagaagcggctggctccatcgtttga

SEQ ID NO: 312264 - DNA, 122 bp, Homo sapiens
gtaaaaaccataggcatgggtgagattatctaacaattatgttagtgaaataatagtaaacgtctaataagagtgttttctatgtgccagacactagttacaaatccttaatatattaactc

SEQ ID NO: 312265 - DNA, 122 bp, Homo sapiens
atgtgagatctgatctttttatattttccttggtttatttcatgacaagagtagaacattcgatgtatggcaccaaactcaggagaagttgtaggcaggagacttacatcaaaatcctagag

SEQ ID NO: 312266 - DNA, 122 bp, Homo sapiens
ccctcagacacaaaaacaccattgctgactgataccccaggtcttcagggttaaaggaaccgtgtgttggcagcgcaattgtgcagacgctgtaaggccaaaacgaggatttgtgttgtgag

SEQ ID NO: 312267 - DNA, 122 bp, Homo sapiens
gcgcaagagctctccggggcgctgcctttatagccagtagggatctcgcgagagtcggaacggacgggggtgccggaggaggagagagaggagggggatgtggcccgagccccgcccggcgc

SEQ ID NO: 312268 - DNA, 122 bp, Homo sapiens
ggggcccggggcgtggaggacgagggctccagggcgctcttcttccgccacttggtcctgcggttctggaaccacacctgcgatgagaaagaatgtgaagggcacaggggcacagcgcgcac

SEQ ID NO: 312269 - DNA, 122 bp, Homo sapiens
aattgaatgtagcaattccaatcaataccaaaatgtacagtcatggttgcctgacagcatcgacctacacatatgatttaggaccagctgtataaaatgacaagttcagtactgctgaccaa

SEQ ID NO: 312270 - DNA, 122 bp, Homo sapiens
aggggtcagggagttccctttccgagtcaaagaaaggggtgacggacgcacctggaaaatcgggtcactcccacccgaatattgcgattttcagaccggcttaaaaaacggcgcaccacgag

SEQ ID NO: 312271 - DNA, 122 bp, Homo sapiens
gtcccttaggcaggaggggtgggtcactcagtctccaggctcgggaggcccccagcaaatcggacgctgtgggctaggccgccaccgcgagcccactcgcccgatacgcgccttggggtccg

SEQ ID NO: 312272 - DNA, 122 bp, Homo sapiens
tgcaggagacactgagtgctggctgtggcccgtggctgccgggttataatcaggatgtggcgggaaattgaggaggcaaagccaatgctgaacagagaagaacacgctaattgtcttaacca

SEQ ID NO: 312273 - DNA, 122 bp, Homo sapiens
agggccagacagagcatgtgcaaagctgccaatgcagttcgcattcggctgtgcttttggcggagtgagaactgcatttgggtcatgtgagcagagagtgccatctcaatggaataggatgt

SEQ ID NO: 312274 - DNA, 122 bp, Homo sapiens
agcctgggagtgagttttctccgaggcgtgtgtgagaggcggcgggggtgttttcctgcgcgaggggcgggtgaagttcattgcccccacttttcccgcgacctttttcggacccgattttg

SEQ ID NO: 312275 - DNA, 122 bp, Homo sapiens
agcgtcacaggaaatgtgcaagttggctgatgagcactcaaaagagtgccccgcacccgccgtgcttctgcccttttcctgccctgcctggggaacggttgcacttccaagttcaaggatta

SEQ ID NO: 312276 - DNA, 122 bp, Homo sapiens
gagcccagggtataaaactccttcccttcttcgggtggcctcttcctccctgatctacagcgggctccttccaggcgtctttatgtgcaggttgggagaaggaaagagatggatgaattctt

SEQ ID NO: 312277 - DNA, 122 bp, Homo sapiens
gcgccagctcagtgctggccacaggcgaaaggcagccggaatgcaccgtcccgtgtgggccggacaccccgtgaggctgagcagttgctaagttctgtgacccgggccagggtggctggaca

SEQ ID NO: 312278 - DNA, 122 bp, Homo sapiens
gttttcatggcgaccaggacgctctgcatccccagtagcaggctgagccgagggaggctgcgtatgcccgcccctctggctgtcggagccgcacctcttcctcttccggcccccgtagcaat

SEQ ID NO: 312279 - DNA, 122 bp, Homo sapiens
ggccacccgcggcggcgcgggcgcaggaagaggaggccggccggggcccgcttccgccgtcgcatggctccccctgcgctgggaggaccgaactgcagcccagggctactgggtgtgatcgg

SEQ ID NO: 312280 - DNA, 122 bp, Homo sapiens
accccaggctgcggaggagcgcgggcatgacgcccgcgggctgccctcggatttggggaacgagaggaagaaaggactcaggcttggcgttgcctccaccaaactttgctcgcgagttgcga

SEQ ID NO: 312281 - DNA, 122 bp, Homo sapiens
aaaataaaagcatagtatcaatctttccgcaaatgaattcatggtgcaatcttacattttcgttctcatgaagtaaagcaagagtggtagaattaagtggaaagagtctatctctagtgtag

SEQ ID NO: 312282 - DNA, 122 bp, Homo sapiens
cccttgcccttattaattgcacctggagactcctgagaaaatggggcttccctccctccccgccgctgctctctgacttaattacttctcctcctggctgtaatgaatgtttctgagcccct

SEQ ID NO: 312283 - DNA, 122 bp, Homo sapiens
tctgcctccaagcgccacgtgggggcgctgcctcaccactgcctgacctgcgcacgtgtccgggagagcgctgacctccgggccaaggccactgtgtactggccatttgccaaagcggagct

SEQ ID NO: 312284 - DNA, 122 bp, Homo sapiens
tgcctgtggggcgggggcagcggtcagctccgctggccaggggtgaggggccggtcaccccggtgaaatgggtggtggtggcagtggcaactcctacctgaccacgtccacggcgccagctc

SEQ ID NO: 312285 - DNA, 122 bp, Homo sapiens
agctgtggttgaaggggacctccgggtcgtgatgtgagactgtagagactccagatcaggcgcctgcaggacctgatgcaaagccctgtccaatcccagaccccggcccccagcgcccactg

SEQ ID NO: 312286 - DNA, 122 bp, Homo sapiens
gtcagggaaggtttgggaggatgctgaggcctgagatctcatcaacctcgccttctgccccggcggtttccccgtcgtcgggagaaacccgctcacctcagggtccccgctacaatttcgga

SEQ ID NO: 312287 - DNA, 122 bp, Homo sapiens
cagttgtaacttggccactgtagaaatcattagtgctataataatatattgaaatacttccgattatcttccttctaagcacacagtaggattccatttccccaggcttttggagttaggtg

SEQ ID NO: 312288 - DNA, 122 bp, Homo sapiens
ttcctcaaggtctaagtggcaaagaggtcactgaaggaagctaagtcccctcttcctcagcggttctaaaggccccactggctatgcccgctggtcttcctaagtcataagctatggcctcg

SEQ ID NO: 312289 - DNA, 122 bp, Homo sapiens
gcccgcgctggtcctcagcaccaggtgagtccaggatcctgagtgacctgagcccaggggcggtgtccgggtaaggtgggtcctactgcgaaccaccaggggtcaaaggcactcagtgaact

SEQ ID NO: 312290 - DNA, 122 bp, Homo sapiens
tcagctgttagtagtgttcccaaagtgttttcagcaatactgccatcttagccatatgtccgtattctcctatgcaaaaatttctgggttatcttggtcccttacatggatatatatacaca

SEQ ID NO: 312291 - DNA, 122 bp, Homo sapiens
gcaatgtggggcaaaacccatagcccagggctcccactcagagcctgagtctcgactctgcgtgatcgagacatgggtgccctttggatgagatcatggccaggtcggttttgcccatctgt

SEQ ID NO: 312292 - DNA, 122 bp, Homo sapiens
gtgtttacttaagaccgatagcaggtgaactcgaagcccacaatcctcgtctgaatcatccgaggcaaagagaaaagccacggaccgttgcacaaaaaggaaagtttgggaagggatgggag

SEQ ID NO: 312293 - DNA, 122 bp, Homo sapiens
gataaaactctttttaaaaaaaagtttttaatgttaacgtgtttttaaaaacagatgtcacgtgggttatgaagaagtctgaagaacgccttcatttcatgcaaatctataagctcctgctt

SEQ ID NO: 312294 - DNA, 122 bp, Homo sapiens
gtcccttctagagagtctctttccaaaccaaaccaaacatgcccttgacttgatccctggcgttatcttttgtggttttctttttctttttctttttcttttttttctgacacaagttcttg

SEQ ID NO: 312295 - DNA, 122 bp, Homo sapiens
ctggggtcagaatctcatctgggtcacttcaataggctctgaactagtctcctctacagtcgggatttctggcccatcctgcacattatggagatctatctgtcaccagctcaatatcacta

SEQ ID NO: 312296 - DNA, 122 bp, Homo sapiens
tctcagcggcggccgcagagcgcagaggtagggagagaaaaaggaggcgtcggcggggcgcgagcgaccagggcgctaagtgccgcctcacagtcctgccagagacaggagacgccgggccg

SEQ ID NO: 312297 - DNA, 122 bp, Homo sapiens
gactcagcatgttcctgctttgctgaccttgctgttcttcccacacaccaagctcattgccgctcatttacatttgctgtctcatctgcttggagcattgcctccagggtctttgcaggttt

SEQ ID NO: 312298 - DNA, 122 bp, Homo sapiens
gccggcgcactcctcccgccctgtctgcagttggaaaacttttccccaagtttggggcggcggagttccgggggagaaggggccgggggagccgcggagggaggcgccgggcccgcgcgtgt

SEQ ID NO: 312299 - DNA, 122 bp, Homo sapiens
gcagcgctcgggccggacgtggcgaggccaagcgggcagcgctgctctggtgccggctcccggattgcaggcctaatcgatgcatttttctgagtgagtcggtgactcccccacccacctcg

SEQ ID NO: 312300 - DNA, 122 bp, Homo sapiens
agggcttgttataagggctctgcaaattttagtcatgcgggtgatgatgaagaagaaatgcgagtgctctaaaggctccccaaggtgttatccttggcttcgctgctgcctagaatttgcag

SEQ ID NO: 312301 - DNA, 122 bp, Homo sapiens
taaaatgggtgtaattttcctaatacaggtatgtaacaacaaaagaagttgcctgcatgccggtccaaattgttctgtataaagatgctcttaaaagacacaagagttatcctagaacctta

SEQ ID NO: 312302 - DNA, 122 bp, Homo sapiens
cctggacatcggtttgcttttctttgagccattcacaaactagttcctcgttcctgggaccgtccctagtgtggataaaagccaacttcccacagtctttgtcggtcttttcaacttttctc

SEQ ID NO: 312303 - DNA, 122 bp, Homo sapiens
gccgtccactttgttcatgagaacagttttcctataacgcccacccggccctttgcatcccgcaatcccgcgggcgtcggagcgggtcttggcgcgaaccaggcggcctcggcggggtcctg

SEQ ID NO: 312304 - DNA, 122 bp, Homo sapiens
ggatggggaggaaaaaaatgaagcccaacccagtgcctctctctgtcttctttgaaagcacgcggaaatggacgcaggaagccgggcggcctgcgcgccgagcgccgcgggccccggcctta

SEQ ID NO: 312305 - DNA, 122 bp, Homo sapiens
actagacgtccttctgaccagaagctcaccttagcaaatcccaactgatgcctcgcacgacgtcccctagagacctactgtcctctcacacgcagttctccaaaaggcctcataccccaacc

SEQ ID NO: 312306 - DNA, 122 bp, Homo sapiens
gagctgctctacctgggcaccgagagtggcaacgtgtttgtggtgcagctgccagcttttcgtgcgctggaggaccggaccatcagctcggacgcggtgctgcagcggtgagcccagagccc

SEQ ID NO: 312307 - DNA, 122 bp, Homo sapiens
gtgagaagctccttttgccgacgccctgggagggggtggaaccggcttaggtcacccattcgttttccagcagccgctgggttacttcccaccagctttgcaaagacgcctgcgatttcctt

SEQ ID NO: 312308 - DNA, 122 bp, Homo sapiens
gagccacgggcttgccccacccgtggcctcggcatccggccatcccggccccaccggccccggcccggccccaccctcgtggaactcagcatcgcgacctcccagtctccctcgagcccctc

SEQ ID NO: 312309 - DNA, 122 bp, Homo sapiens
tctcagccagagcgagccgggttcaccacgtggctgggagggcttagagccaggagcccccgcaggcaagcacaggctcggaggccggggccgcacccgacaggacgtagtcggcactcggc

SEQ ID NO: 312310 - DNA, 122 bp, Homo sapiens
actttggtttctcatcaggaagagacggctatcaatctccctttcttagggatgatatcacgagacagagaacattcattccttcaataaatatatactgtgcatcttctcccactcagata

SEQ ID NO: 312311 - DNA, 122 bp, Homo sapiens
gagggctgcccgtgctgcctaaatgggttcagaatgaaggccgccctcccaacttcaacccggggcaggccacggagcctctcgccgcccctacccctcgttccccgcatccccgcgcaccc

SEQ ID NO: 312312 - DNA, 122 bp, Homo sapiens
ctgatagagctgcagcactcgccatgggaaggttagagactgtggaagtgctggcttctgcgagcacacagcgatttgcaagtgaatgcgaggggagggcgcatccgagaggagggctttgc

SEQ ID NO: 312313 - DNA, 122 bp, Homo sapiens
gacggggcgcgggcgcggggtgggctgggggcgcggatcagtgggacggagttcggggttcggctccgagcgggcgggctggaagtgggggatccctcagccgcctccacgggccggccccg

SEQ ID NO: 312314 - DNA, 122 bp, Homo sapiens
atcagcttggcgttcatcacaggcctgtgaataaaaccctggtcaaaagctctgtcacatcgcgctggcaagacgcttaatcaaagtgagcggccccgcgcgccgcgcggcccggctcctcc

SEQ ID NO: 312315 - DNA, 122 bp, Homo sapiens
gccacaccttccaccattgtcattgtggtgggctatgagagcctcaagaaactcagcctccgacctgagctggtggactcgagacactggtaaccagtggtggggagagaagcctgctgttt

SEQ ID NO: 312316 - DNA, 122 bp, Homo sapiens
ctccaagtctcacccctccttccaacagctccaaagctctcatagagggctcaacctggccggataagccgtcccctgacagaagcagctgtctggaattataccacagttgctcgccctgg

SEQ ID NO: 312317 - DNA, 122 bp, Homo sapiens
aacagacactcctaatgtgcccagaaaaatgccaggcgcacgctaaacatctgtaaaccacggtgacagctctaagcgttcatgattaagcccaaatatttattaggcactggtgtgcaagc

SEQ ID NO: 312318 - DNA, 122 bp, Homo sapiens
aacagcctaaaagtaatatttataccgagaaaccctggctgcagtccccagctgctctcccgcagccctgcgcctccggctcatgcagcgctctccccccggagccggcaggtgcccaggtg

SEQ ID NO: 312319 - DNA, 122 bp, Homo sapiens
acgacctgtgccaccaactcgcactcagactctgaactcagacctgaaatcttctcttcacgggaggcttggcagtttttcttagtaagttgcgtggatgggccacactgtctgaggccaga

SEQ ID NO: 312320 - DNA, 122 bp, Homo sapiens
ggcacacagctgctgtgtacatgtcctgttttccccaaatctcacccctttgggacgcctcggaaggtcttggcatgggggatgtaactcttagttgcaaacagaggtaggagtttgttctg

SEQ ID NO: 312321 - DNA, 122 bp, Homo sapiens
gttgtgactggcatcgctgaggctgtttctttgtgtataaaatcgaataaggacacatcacgtgctagcaatccaccagcatagggcgaaggctcagcaaagagaagttctctcctcctctg

SEQ ID NO: 312322 - DNA, 122 bp, Homo sapiens
gccggccaggcctcgccgcggcgtccatcttggatactggcagtgggtcacgtggtgctgcgtgcgcacggaggcgcagggcggcccggtcactgagtgcgcaggcgccgtgggcctcgccc

SEQ ID NO: 312323 - DNA, 122 bp, Homo sapiens
gcctgaacctggctgaactgaggagaccaccacaccagcaccaaagagcaactaggagaccgtgatattcacgtggacactctcagcttgcagcctctgctctctctaggggcactgtccca

SEQ ID NO: 312324 - DNA, 122 bp, Homo sapiens
caccggccatcagcgacccaggccccgccccaacgccggccgccggcccactgccccagtcgcgctctcctcagcacctaggaccaccccgcattcgtcaggagcccggggcgaggggactc

SEQ ID NO: 312325 - DNA, 122 bp, Homo sapiens
tccctctactccgagaaactgccccctctccttcagtagcacgtgctgccacctgctgcccggccaggctctggcacccacagcactgccacgcttttgcaccggccagtccctctgcctgg

SEQ ID NO: 312326 - DNA, 122 bp, Homo sapiens
aagtcgggtcctgccaggcagggggcctgtgttctgtgccccttgggagacaggaactggcgagttcaggtggggtggggacagcacagactgttccaccgttgtgcatattgttgcttctg

SEQ ID NO: 312327 - DNA, 122 bp, Homo sapiens
tcaccccgaccgccccgcctgcagcgccgcggccgctccgggacacgctccgggcagagacgaagcggctcctctgaaccccgggatgtacagtcagaaggcggctcgcccggcgctggagg

SEQ ID NO: 312328 - DNA, 122 bp, Homo sapiens
actctaggcttagagagatgggttcgcagactctatcaagtctgtttcccgtctgccggacgaaggaaaataagcgtccctgtatgagcctaccctaactacaaagaaaatgctactgaact

SEQ ID NO: 312329 - DNA, 122 bp, Homo sapiens
tgtataaacacacacccaggagttatttacccagaaatcagcgaaacggacacttgttaacgttgcgggtttcacttgcgtgctggtgggcctggaaattgaggcacagttccaacaccagg

SEQ ID NO: 312330 - DNA, 122 bp, Homo sapiens
gggagaggtaggcacccatggcggcggctggccggcggcctcaggtgcaggaaagctgggcgcgacccgtgccggagccgaagccccgggggtgcgcgcggcaggagcaggccccgcggcgc

SEQ ID NO: 312331 - DNA, 122 bp, Homo sapiens
aactcagaacattgacaggaacctgctcttcaatctttcacctcccctttctccatgaaacgaacgtcaacattcacacagcagcccatccccagcctacagggcggcccctgccagatcat

SEQ ID NO: 312332 - DNA, 122 bp, Homo sapiens
cttcatccaggcggtggccgccacgctggccacgccaccggaccacgtggtggtcttcaacgtacagcgggacaccgacgcccccgggggccacatcctcaacgtgagcctgtcggtgggcc

SEQ ID NO: 312333 - DNA, 122 bp, Homo sapiens
cagtgaccgcgcacagggaggtgaagaatgcgaccacggtgatacgtccaacctggaaaacgggcctgagaaccaaagggccaacttctggccatgcataacgaagcagagcagtctcaggg

SEQ ID NO: 312334 - DNA, 122 bp, Homo sapiens
cgcagcacaattaccgcaggggcgatcagcttccaccatccattccaggatgttgggagtcgtcaatttggaaatgtatcaattaagcggcccccagagcctctcgcatctcttgcccggcc

SEQ ID NO: 312335 - DNA, 122 bp, Homo sapiens
tcccttacccatccccaactcccggccacactcttcccaacccggcttcgcccagggccccggtcacttatgttaaagttcacaggcgttaaattaaaatgtcagagttataaactggtcga

SEQ ID NO: 312336 - DNA, 122 bp, Homo sapiens
ttgagaaatctggttccatctggattaacccactcttgtcataacctgcccccttccccacggctccaccacccaaggacccaggtgcccaaccttccaggtagcaagtgccctgtgctctc

SEQ ID NO: 312337 - DNA, 122 bp, Homo sapiens
cacgctgcctgccacgaagcccgtagaggttcatcttatacttccggtcgggatccaggccggggacagtaacctcattctcatcccccgcaacaggcactgcctggggctgcccctgtgca

SEQ ID NO: 312338 - DNA, 122 bp, Homo sapiens
cagagctgctgctcctgcaagcaaatgcgctgcgctgacatttctgtgacctctgctccgcgctggggggcgttgtagggacaaggggcccatcttcccaattctgcttttcaatgagaaaa

SEQ ID NO: 312339 - DNA, 122 bp, Homo sapiens
tatcaaattatattctgaactcaaaagatcctatactttaaacagtggttggagtcacttcgtactccttccaagtcatcctaagtctcaactgaaatgtcattttcccagagaagtttttt

SEQ ID NO: 312340 - DNA, 122 bp, Homo sapiens
tgtgtacaaataactttaatgagaacattatttaatacaaatatgtaaacagacttcatacgtttctgttccttgtagtatctactgttagttctcagttttgtcattcatttgacaaatta

SEQ ID NO: 312341 - DNA, 122 bp, Homo sapiens
caaaataaataaataaatataaataaataaagttgagagagaagttgtgtcgctagcaaccggcccaaaggtaataatctgaaaagctaaaaatgggtcacccacagagtgacagcagttgc

SEQ ID NO: 312342 - DNA, 122 bp, Homo sapiens
tcactgaatcacagtcactgcttgtgctgttgataatcaaaactaggctgcacagagtgacgtagtcacatatttggcttgggtgtacagatgtttcccttcaagcatcttggatgtcttgc

SEQ ID NO: 312343 - DNA, 122 bp, Homo sapiens
ctggggagatgaggtgaggatggcaaagaacccaaaggcagcaggaaagagaactgttcacggatgcatgatcacctgccactgtgttgagagcagggaggggattaaggagatggaggaga

SEQ ID NO: 312344 - DNA, 122 bp, Homo sapiens
gtagccctgcagctgcctggccccataggcagaggccagcttgtggaagcacttgactgacgacagggtgatgtcaatccttcgggagtagaagtacctggggagaaagaaggagagcagat

SEQ ID NO: 312345 - DNA, 122 bp, Homo sapiens
ccccatcatcattttcattcatcctaagaaaggcggctccctgtgtggaggtggtggccgcgaacattttggctgaactgagcagtcaaccttctcatttttgctggaaggatttgagagaa

SEQ ID NO: 312346 - DNA, 122 bp, Homo sapiens
ctctctacatcatgcatgggtagttttcttaccccatctttttttttcctcaataattaacgcagagaaaccattgtttgaaaagaatatgaaaacttgctacagaaacacccggtgaaaga

SEQ ID NO: 312347 - DNA, 122 bp, Homo sapiens
cttaccacatagagagaaaacccaaaagtaagctgcctgtgaatgctcatcacgtccaggcgctcttgcaaacatccgtcttcgtgcagacccctgccctgtgaagtgctgaatcccccaca

SEQ ID NO: 312348 - DNA, 122 bp, Homo sapiens
cccatcgtctgagatgtggggagcgcctctgccccgctgctccgtctgggatgtgaggagcgcctctgcctggccgcgaccccatctgggatctgaggagtgtctctgcccgaccgccaccc

SEQ ID NO: 312349 - DNA, 122 bp, Homo sapiens
caggactttcaggattattctaaaacagcactgcccaatagaaatataatgtgagccacacgtaatataaaattttctatcagttgcattgaaaaagtaaaaagaaaaggtgaagctaaatt

SEQ ID NO: 312350 - DNA, 122 bp, Homo sapiens
gcggcgcaggacgcagctgggtctgcgcggcagccggcggctggccctttaagaactgtccgcggcggcagcggaatgtaacaaaccccacatttgattcacaacattcgaagcggcggggt

SEQ ID NO: 312351 - DNA, 122 bp, Homo sapiens
agatgcaaggacctaagccaaggcgcaaagtccctcagattgcggccgctccagaggagtcgaccagcagcctggagtcggggttgaggtggagaggagcaggggccacggcgttgcccggt

SEQ ID NO: 312352 - DNA, 122 bp, Homo sapiens
tctgaggcgacatcaaaggggcagaatttttatatttcccatatggctttgggagagcgccgagaagccgccatcccgcacctcagcgctggccagtactctgggggctggcggggtggatc

SEQ ID NO: 312353 - DNA, 122 bp, Homo sapiens
agtggccagtgaggaggaggagaacgaagggagtagactctattatttcaagaaagatggcgtggataaactgttagatgctgctcagaaacacaatagaacatggacagagaagtgacttg

SEQ ID NO: 312354 - DNA, 122 bp, Homo sapiens
agaggagctgccagcgcagggaccgcagggcacagaggtgcagcacagacaggtggccctcggcgcgctcggcccgggcctccgcacgcatgtcctccagctcggcctccatgtccgtgtgg

SEQ ID NO: 312355 - DNA, 122 bp, Homo sapiens
cgacgcccgactccgctcccgctcggccccgctcccggccccggccagcacagcgctctccgcgcccccagcaccagcccgctccgctccactccgcgccgagaacgctctgcgccgccccg

SEQ ID NO: 312356 - DNA, 122 bp, Homo sapiens
agggtccaggagggctttaaccattggggccccattcctctccgagggcagaagccctggcgagggctccagggtctgcatcccctgaccaggggcctcaagaagctaagcccccttgcaac

SEQ ID NO: 312357 - DNA, 122 bp, Homo sapiens
gcgagcactgatttgaatatgcgtttgctgtctaaccctaactctcttttccttgccgtgcgtggctaacctcaccacttactgcagcatgttttctgtcggcctctattctccttgctcct

SEQ ID NO: 312358 - DNA, 122 bp, Homo sapiens
gttgcttgagcgaggagcctcagaataatccttgactttttaccaatacagatctgttagcgtaacggcctgcttttataatcttttatttaatcattgccagtaagaagtctaaatttctg

SEQ ID NO: 312359 - DNA, 122 bp, Homo sapiens
gcaaattgagacctcaactgaattctgccttgaagatcttttgtgatgtttactggtccacgaagacaggagagtgagggtaggaaggtgcaaggacagatagttgctgccaaaatgaattt

SEQ ID NO: 312360 - DNA, 122 bp, Homo sapiens
tgcttttctttgggataatttgattgctgggtgatttctgtgtgacaggagtatatcaggcgacagctagaagaggagcagcggcacttggaagtccttcagcagcagctgctccaggagca

SEQ ID NO: 312361 - DNA, 122 bp, Homo sapiens
ggggccgctggcgggaggaagagaagtggggctggagctggttggtcccatttgctgcggcgcctacatggagaaaaaggaaaacattaggccccaaagctttcgtgtatgttattctttcc

SEQ ID NO: 312362 - DNA, 122 bp, Homo sapiens
ttcccaggaaacatgggttgctatggaaactgcatcagtcaggtccgaattagtaacttccgctggaaggggtgtctgccactttaatcttcttgtgatactgccgaagcttatctctcaga

SEQ ID NO: 312363 - DNA, 122 bp, Homo sapiens
tcagcccctgggtgtcagtcaagactcagagggagactttgctcaaaaagccagccctcccggaaagaaatacagagcaactgtagtcaggaatttttccctttccttttttctgtgggcgg

SEQ ID NO: 312364 - DNA, 122 bp, Homo sapiens
aggtcttgcactgggccctgacactcagccctgcagccttcagcgtctgggaagtcccttcgaggagcagcaccccagactctgatgttctggacttcactttgccattcccttgggtcctc

SEQ ID NO: 312365 - DNA, 122 bp, Homo sapiens
aggagcaaaggatgctggtgtggcatcctagcccagcctggggccatttcagtgatggagcgattggcacatagttggcttttagcaatggagggtgcccttaggccctggcttccagttct

SEQ ID NO: 312366 - DNA, 122 bp, Homo sapiens
ggatcccggcgctctctcccacaggcggggcgtccagactctcgctttaaggatggggaccggcagggaggaggaacgcggggtccagcccctcccgctgagcagcgcaggaccgggcagcg

SEQ ID NO: 312367 - DNA, 122 bp, Homo sapiens
ctgcccccgagtgctgtgtatttacccttcagagcaggcaggagaatttgtgtcccctcccggtaaaacgcccaagtagagcctgtctttccctgtgaagggccatcagataaccagacaca

SEQ ID NO: 312368 - DNA, 122 bp, Homo sapiens
ctatagcagttctcctgtcttgatacattagctgtatctgggcagtgggcaaggcgaacccgttgggccatttcactataacgtctttctagaaaagatttctctcacagacatcagtagct

SEQ ID NO: 312369 - DNA, 122 bp, Homo sapiens
ggacacacttcgggtttcacgactccgggtttctccaggggatgggccggccggtagaggcgcgtgagggagacgaagggacttccgtttccttcacctaggctggggccaagccgcagagc

SEQ ID NO: 312370 - DNA, 122 bp, Homo sapiens
ccatgtgccgtgaccttgagccctgacagcccactcttaatcatgcctgccagacaaacacggcaggctggagttcccgcagtcagccccggcgacgcatctccctcggagaatggaccgcg

SEQ ID NO: 312371 - DNA, 122 bp, Homo sapiens
ctctgaaacgcactcagcccctcaggagggggcgtcgggagtctcggatgatgatgtgaccgagtcctgggtgaaaggttggcactgggaaaggagctgactccaaagacagatgggagcag

SEQ ID NO: 312372 - DNA, 122 bp, Homo sapiens
ctctggactaagcagtatctctatttactttttcaatacttagttatcaaattatatcttcgtgtggtattctggaaatttgcatatgctggtgagatgccttctcataagattcagcatag

SEQ ID NO: 312373 - DNA, 122 bp, Homo sapiens
tgcccagccagagtcagagaggaatggggtctctgtggcctaaggggtctcccagctccccgtcttaagtggatcaggattcactcacagagacaggagcagagtgtggtagggaagtacta

SEQ ID NO: 312374 - DNA, 122 bp, Homo sapiens
tgaaaaaggaatatctaaaatatcgcctctgttccacacgcacatacacatttacaaagacggcagcatcgttccaccctggagccctagctccttggaggtaaagaaaggtggtaaaagag

SEQ ID NO: 312375 - DNA, 122 bp, Homo sapiens
cattcccacgctggctcactccgttcctgccggtccctcgaacgctttcacggctgcccacgcggttcctcacacagtccccagcgtcgccccaggcagcttcacacgtggcgcgctccgcg

SEQ ID NO: 312376 - DNA, 122 bp, Homo sapiens
ccccaagcacaagcccagggccagctggcccacaggtccccctggtgcccagcatccccccgtccccctcccatggggtggggctcgcatccaatgcctggttccaagtgtcctcctcatct

SEQ ID NO: 312377 - DNA, 122 bp, Homo sapiens
gaggaagaaggcaaagctgtgtagacttctgtgagctcatgatgtctgggctgaagaacacgtcaaggatgttagtgtccacatgggaaagaaggtggtccattgggagatggtcagtgcca

SEQ ID NO: 312378 - DNA, 122 bp, Homo sapiens
aagtagctggtactacaggcgtgcactaccaggctaattttttttcttttttggtagaaacgtggtctgactatgttgttgctggtctcaagcaatcctcccacctcggcctcccaaagtgc

SEQ ID NO: 312379 - DNA, 122 bp, Homo sapiens
aaatatagtagtttactgaaatacccaggcccttctacagatcatgggcaggtagacagacggaattcttatttcagctcctttaataatggaatattggactatttaaataaaatctatta

SEQ ID NO: 312380 - DNA, 122 bp, Homo sapiens
ggggttctgaagattcccacagcctctctggagttgttgccccactttggggtctttgtccgagtaacttcaagtagattggcccacgggcaggggttgtttgctgagagatcaccaagcgc

SEQ ID NO: 312381 - DNA, 122 bp, Homo sapiens
cgcagccagccaggggactctcaaggctgccttgtgccaagctgctccatgctcacaccgcgttgcaaccctgcctgtgaaattcacagaaaaggcttttccctctttccttgtgctgccag

SEQ ID NO: 312382 - DNA, 122 bp, Homo sapiens
tgtgctgagaaaccgtttgagaattttccactcgtcttagggaaaaagctatccagagagcggagaaagggtattgacagagggcaggatcattgtcgtagcatttgtcagcttgtgggaga

SEQ ID NO: 312383 - DNA, 122 bp, Homo sapiens
cagggacacatccgggggatgaaggccctagtctgtgatctcactctagagaggcgatgccgggagaattccagagaaggcagtgaaattttgaaagaatgctggtaaatgttctgaaaact

SEQ ID NO: 312384 - DNA, 122 bp, Homo sapiens
tggcattatgcaattcaattcaaccttacgcaagaccactacagcagaaacagttgtaaacgactcagactcagactcattgtagagaaaatgtccacttccctgacaagaccatgaattcc

SEQ ID NO: 312385 - DNA, 122 bp, Homo sapiens
ctgtggctccaccagatcccaaaaagcaaggcccgtttcctacaacccccgaaggagggtcgtcctcactccgccgccaacctactagcaccatcaccagaccctcgagggcggtgccgtgg

SEQ ID NO: 312386 - DNA, 122 bp, Homo sapiens
tcagtgaggggagaagtggaaccaggctctaatggtgcccttcttgaaatactgtttacacgctttcatagttgtggggtcccagcagggcagggattgtgttttacaatcttgaggtctcc

SEQ ID NO: 312387 - DNA, 122 bp, Homo sapiens
tctcctaagcaggtcgtctgaattttggggttggtctgaagcaaactgacataatcttcacgatggcctcatgatacttgcctaaatatttaactgaaaaatgattgacttgttaaaagtaa

SEQ ID NO: 312388 - DNA, 122 bp, Homo sapiens
ctgagagccagatacctgccaggcactgccctgggctccagggacacatcagtcaacgaacggaagggccctgctctcaagcagtgcgaaaagcagattataaacaagtcaacaaacgggat

SEQ ID NO: 312389 - DNA, 122 bp, Homo sapiens
ctttcttgtttgtctgcatgggccatgcatgcgtgctgggccaggagccgagtttggagacggtttaagtgaaagtgtgtgcctcctcagctgattgtgcgtgagggtgatgtggctcggtc

SEQ ID NO: 312390 - DNA, 122 bp, Homo sapiens
agggaaatccagtactactagaaatcggctccaaacacttgtttcacagtcttggttcagcgtaccaagtgtgtgatttggggtttcactgaaatcgtttgccacaaaagtaatttccacag

SEQ ID NO: 312391 - DNA, 122 bp, Homo sapiens
ctggtagggctacagttcttgagtaagatctgggcctatcctgtgcaacctctcttgtcacgctcccctccagttccatcagacaagactgacaagcccctccttattttagcagatgggca

SEQ ID NO: 312392 - DNA, 122 bp, Homo sapiens
accacacccacgctcaccgtaactccagccgcccaggcagcagtaactgaaaaggggaggcgggagggtccactggcgggtttctcacgctgctgaacctcggtaaacacagccccgagggc

SEQ ID NO: 312393 - DNA, 122 bp, Homo sapiens
ccacggacgttttgacaaatcgagagatgggtccgcagctctgctccatgtctacctgcccgggacaccaggaatttgctttgaatgaaaccaggtgaggttggaaataaaatatttggacg

SEQ ID NO: 312394 - DNA, 122 bp, Homo sapiens
gaacgagaagccaggtgagcccgtaaacagtcaggggcagaacgagaagccggggggtcccgtatacagtcagggccagaacgagaagccgggggatcccgtgtagagtcagggccagaacg

SEQ ID NO: 312395 - DNA, 122 bp, Homo sapiens
tcaaaaccatttaaggtgatgaaaccctcgtcccggacggtcagcgtccacggcaaaaggcgcccactctggaggccgcggtggcggtggctcccgcccctcccaccccaccctgcggcggt

SEQ ID NO: 312396 - DNA, 122 bp, Homo sapiens
gcgcgccttcacgcccgggtgcctggcggcgttttagaaaagctgtatttgaaaagcaaccgattggggtgaaggcgggggagcggaatcctgattacactgtcccaatttcagttgaggtg

SEQ ID NO: 312397 - DNA, 122 bp, Homo sapiens
acagatgcccactctcaccctgcaccctcagcccccacgtcgccctgcttctcacacacacgtgctcactctcacatgctggccagctcccagcttctctggctcaggctctgaacagaatg

SEQ ID NO: 312398 - DNA, 122 bp, Homo sapiens
ttcactgtaatatgggatcctcacccttggccagccagctctgatcccccaccttctcaccgcctgtaactgtgagcatcaggtgaggtactgcatcagagaaggcttcctggaggaggtac

SEQ ID NO: 312399 - DNA, 122 bp, Homo sapiens
tcacctctgcgggagagcgcactcatggacatctccgacatggtgaaaaacctcacaggccgcctgacgcccaagtcctccacgccctccacagtttcagagaagtccgatgctgatggcag

SEQ ID NO: 312400 - DNA, 122 bp, Homo sapiens
tgatacacgagtcggaatttgagcttctacaagtacattccttcctaggccaaacactgacgctaagaaatacgagaacagatcatcgctaaacagcagctgaaggtcaggcgaactgactc

SEQ ID NO: 312401 - DNA, 122 bp, Homo sapiens
cacccctggcttgtacctttctggagcccgcctcacccctgctgtggttccctgggctggcgagtatccacagggcagagcagcagcttcatggcagcctgcaagtgggcacaggcgccatt

SEQ ID NO: 312402 - DNA, 122 bp, Homo sapiens
gggggcggggcctgggcgggaggcgggcggtgggcgtgtccggggcggggctgtaccgggcgctgggcggaggagccttggctggggactgcctggaaacgggctgggcctgcctcggacgc

SEQ ID NO: 312403 - DNA, 122 bp, Homo sapiens
tggcatcaccgcgtcgggaatccctggggatggtgttctccaccgtcaagacctttgagccgcctgagcgactaactcctgcgcccctgagggtaaggagcatggggtcaaggaggggcttc

SEQ ID NO: 312404 - DNA, 122 bp, Homo sapiens
gcagtgcgcctggagccggcggcgcggagggtcccggaggtcccggccctctggggtccccggcccagcccgcgcgcgccgctgctcttacttgccaatatcctcgtagagctggtactcgt

SEQ ID NO: 312405 - DNA, 122 bp, Homo sapiens
aattaaattaaatttagtgagggctcatcactaccctcataaaatggttcagagagtaagcgaagaatatagtgtgagcttacagcaagtggagaccatctcttctcctccaatgtcccaca

SEQ ID NO: 312406 - DNA, 122 bp, Homo sapiens
tggagcacgagggtcaccctccaggaagtgacctgcaagagaatggagagagtcatggaccggcatggcgtggtaatgcatggtgcgtgtctcttagcagtaagaccttgagaaggagccag

SEQ ID NO: 312407 - DNA, 122 bp, Homo sapiens
agttattttcaaaagtccccgttccaggcttcccaggaataggagctgagctactgcggccgcagcggcagagcctccgcctgacctcaccagggtgtgggggggctgctgagggagggggg

SEQ ID NO: 312408 - DNA, 122 bp, Homo sapiens
gctgtgtattatatgtaggtaaattgtgtgtgcctgtgtgcacaggtgtgtatgtgtgcacgtgtatatgtgtgtacatgtgtggagcttaaccctgtgattgtgcacatgcatgtgtatgt

SEQ ID NO: 312409 - DNA, 122 bp, Homo sapiens
caggctccgcagcgtgtactccacattctcgcttgccttgcgggacatagggcaggggcccggggctgcccggggggacgcggctccgcgggccggcagtctcggcgagctagacagcccga

SEQ ID NO: 312410 - DNA, 122 bp, Homo sapiens
cgctcccgccgcgtcccgcccgggccgctccgctggcggcggcgactgggctgcaggtagcgagccagccggcctcggtccggtaacccatggcaaccgccctggtaacccatggcaactgc

SEQ ID NO: 312411 - DNA, 122 bp, Homo sapiens
aaaactgaaggttagccaggtatggtggcataggcctgtagtcctagctgcttgggaggccgaagtagtgtgatcacttgagcccaggagattgaggctgctgtgagccatgatcatggtac

SEQ ID NO: 312412 - DNA, 122 bp, Homo sapiens
ccgaatactgcgcttttccgactggcttaaaaaacggcgcaccaccacgagattatatctcgcacctggctcggagggtcctacgcctagggagtctcactgattgctagcacagcagtctg

SEQ ID NO: 312413 - DNA, 122 bp, Homo sapiens
gcaggcagtgggccaggtctctctcagccgggctgaggaccctggacagagctcagattccggatacagttcctccacagagtggggtgggaatccgggtgggccccacccactgaggctca

SEQ ID NO: 312414 - DNA, 122 bp, Homo sapiens
gaaagtcatggcagggctggtgctcccggccctgggagggtgctccctctgtgttctttccgccattcctgaactctggaactgggagaattgaaccaaaggatgattagagcaatgtggaa

SEQ ID NO: 312415 - DNA, 122 bp, Homo sapiens
gctggtgccttccaggtcggtctttctccaccagactccacctggaactttcttccttttcgtcctgtgctggcctaacccctgctcggcctcggccctcagctgccggctctaacaaagcc

SEQ ID NO: 312416 - DNA, 122 bp, Homo sapiens
tttttcaccatctttccctcaatctccaggagccaatgcgagactttggctccgattaagcgacggcccgagactcggggtgcgcgaggaggatcgacagagtggtgaggggacctaggagg

SEQ ID NO: 312417 - DNA, 122 bp, Homo sapiens
acctcgtgatctgcccacctcggcctcccaaagtgctgggattacaggcgcgggccaccgcgcccggccttctctggatactcttgtcgaggttcatggccctcctggactgtcagcccttg

SEQ ID NO: 312418 - DNA, 122 bp, Homo sapiens
ccgaggcggaaggggcggggtccccgggcaccctgagaggtggccgcagggcgcctgacgcgctgggcataacctccgcagaccctgaacatctaccagaacctgaaccggcggcagcacga

SEQ ID NO: 312419 - DNA, 122 bp, Homo sapiens
cacaagcaaacagaaaagaagtcctctagagtgcaaggtttcccaggagcgtgggctctccggcaccctctccacggaggcggcgggccagctgcatgtctcggggcataattgtgacgcgc

SEQ ID NO: 312420 - DNA, 122 bp, Homo sapiens
ctgcctgggctggcgggcggtgggaagcggagagctcggggcacgcgctgccgtctggaccgtggctctgctcgctgtgcagcagccttgtaccactacctgtttgttccttctgagggtca

SEQ ID NO: 312421 - DNA, 122 bp, Homo sapiens
gtccgggcgccggggccgggagagcagggggcgccggtgattgtccgatgaaacgctacgcgggcccgaatcaacagtatccggcgcccagcaccccaagccccctccctcagcgtccccaa

SEQ ID NO: 312422 - DNA, 122 bp, Homo sapiens
acagctgtgcggtccggagccgccccccacccccgacgcgccgctcccagccccagcgggcgagactaatgccgggccacccctcaggacccccgcacctcccccagaccccacacggtcct

SEQ ID NO: 312423 - DNA, 122 bp, Homo sapiens
gctgtttctggcagactaaggtctgaatcctggctccacccctgcctggctgtggtagcccgggaaagtaacccaactctgtaactctgaggccaggttcctggattgcgaaactggagcaa

SEQ ID NO: 312424 - DNA, 122 bp, Homo sapiens
gggagaaacaatgctctatcttgtacattttatgaatgttataatcgcctcctctcccatcgtaagactattattacctttttgtttatacacccaagcattgtttggcttatcacaataag

SEQ ID NO: 312425 - DNA, 122 bp, Homo sapiens
ggagtggcctcggcagctccagattctttgtgtgcggagctgagccttgaaggcaggttccgcggggggggtggagtggggtgccgtcagcttggaggggcaccgtctgcccggggatgacc

SEQ ID NO: 312426 - DNA, 122 bp, Homo sapiens
tctcatccttcctgtagcagctgtgaggccatttggctctctacaaggcagcagcctgtccgccagggtccagcacttcccactgcagctctgaccttccccttatggcctctgggctggct

SEQ ID NO: 312427 - DNA, 122 bp, Homo sapiens
ctttcccagacttccggtcttgactcattgctgacgggaaagctccggacctctgcgagccgtggggcggggcgcggcgagaggaggggcggggctcacgagtgacgaagggcagaagggcg

SEQ ID NO: 312428 - DNA, 122 bp, Homo sapiens
tctttgtgcctttctgcctcccttggttgccggctgccggctcccgccctgcccgcggcccgagctcgccctctccgcgctcaggacaagcggtaacaagtgtagtgagcagcgggcgctga

SEQ ID NO: 312429 - DNA, 122 bp, Homo sapiens
ctggcctctaaggcagccagatagcagaggccaggggactgtcctttcctgggaagccagcgaggtcatcaggtcagagatatgcttctctgcaggacatcatggagttctggctttaaaag

SEQ ID NO: 312430 - DNA, 122 bp, Homo sapiens
cctttacgaactctggttttctcatcccagaaacgcaggttggcgtgaggatttagtgagcgcatgcatgtagctgtggttagtaaaccgccaagcagcagggcggcccaggggatggttag

SEQ ID NO: 312431 - DNA, 122 bp, Homo sapiens
gcttctgaggggccgatgcagtgacttctctgctgcaggtcaggagttctggaactggggcgtggctggggaggggttgcagggaagggtgggaggaaggaagaaaagaacaagtgattgga

SEQ ID NO: 312432 - DNA, 122 bp, Homo sapiens
cgttggcaattagtaggttggtgcggcccaggacgatgacatctgtggagatgggcttcccgtctggggaaggagagggagacgcgctggaggggacgctagggactgcccttcccttcagt

SEQ ID NO: 312433 - DNA, 122 bp, Homo sapiens
gcctcgccagcaggcaccggggccccacttggcgtttgcggatttcagctgaatgggaggcgacacaatgagacaagagcaaaccgtttctcagcgttcttgcccagggccttcccgtctcg

SEQ ID NO: 312434 - DNA, 122 bp, Homo sapiens
ggagttggtttgatatttctgcttgaagccaaaattagcaggcaaattattgtgtaataacgactgcatgcagtattattgcacaaagtgagttggttggtatttatgttaaattcaagtac

SEQ ID NO: 312435 - DNA, 122 bp, Homo sapiens
ctggtgtgtgtctctgagggtgtctgtgtgcgtacgtgcatgtgtgtgcacacgtacacacgtgcacctgcctctgggaggtagtcacgtggagattctcatggcctgagggatcaggctct

SEQ ID NO: 312436 - DNA, 122 bp, Homo sapiens
cccagctttcccacaggccctacatgtctgtgggttccctgcatgaccaggtgatctacccggactcagtggaggacatgcgaaggaacggctactcggagcaggacctggaagccatcctg

SEQ ID NO: 312437 - DNA, 122 bp, Homo sapiens
gtttgtatgattggtggagcttccagcttatgaatgacatgtatgggaaaaatctaattacggaggattctggaaccctaactaatattttgttttattatgcttcgacattcctgaagcta

SEQ ID NO: 312438 - DNA, 122 bp, Homo sapiens
agcggctttagcagtgaactcaaataagtctttgctttggaatacttttgttcctattcccgttaatgaggaattagaaatggcctctattctaagcagtgctgggagaggcgttatttttt

SEQ ID NO: 312439 - DNA, 122 bp, Homo sapiens
tagtatatttcatctaggaagtgatgacagtgtgacaaattccccacacctacacaatgtcgggtattagttcaagagtgaaataaattggaacgtatgtgacaaaatatttaaatgaaatg

SEQ ID NO: 312440 - DNA, 122 bp, Homo sapiens
cacggggcgcttttgcgtggggtcgcgcaggagccgcggagggccggatcgctgagggagcgtcagccgcgcgccgctgcgggaccgcgggtgggcgggctgaggggcggaggagcctccgg

SEQ ID NO: 312441 - DNA, 122 bp, Homo sapiens
tcatcgctacgccgcctgcaatgccgttcagccttccgctgtgtaatctccagcacactccggggagactgtgaatttcagacactctcccagggaccctggctccacaaagcatgaaatga

SEQ ID NO: 312442 - DNA, 122 bp, Homo sapiens
ttttatgaactatttgcatgtgtacaaaaacctggagaggagataaaagaatgggctaggcggtaatagcctaaaagcctcgacagcctttgcgacctgctattctcaccggatcttgtatc

SEQ ID NO: 312443 - DNA, 122 bp, Homo sapiens
ctaagcaaccggccggaagtcggccccacctcctcctgatgtcacggaaatgaagggcttcgcagaggatgtcccgcccgctcccttcagacgggcgtagctggcaccttcctgagatatgc

SEQ ID NO: 312444 - DNA, 122 bp, Homo sapiens
ctgccgctgccgctgccgcctccgcctcccggctctcccgctcgcggctcacctcggccgcggtccccgcgcagtacccacctctgcgccgccgtgttggcgtccagcaccccggcgccctg

SEQ ID NO: 312445 - DNA, 122 bp, Homo sapiens
ggctgagggggaaagatggtgtgaattgggtgggcagagacaactgaaagccacaggacccggttggcacctttttggccgcctgcgcctttgcctgcagccccgctccctgggtcacccga

SEQ ID NO: 312446 - DNA, 122 bp, Homo sapiens
aaaaacaccataaatcaggctaaactccctgccctcatggagctcacattctaatcaacccgtagacagaaatgtgtgttgaatgtgttcaactgggacttaacactctttcctacttcatt

SEQ ID NO: 312447 - DNA, 122 bp, Homo sapiens
gcgcggaaggccggctgcgccgggccgaatctgggccaggcttggagcctacggaggctccggccgccagaggagagaggatcagggcgggaaacacagctcaaatcctacctgcatggccg

SEQ ID NO: 312448 - DNA, 122 bp, Homo sapiens
ttcacttaccctcagggctaccaaccctcatttgaagactgtggccttagaagaactagccggctactgaaacctccaagaccctgcctccgcccttgctgcctctcctccctccctcccag

SEQ ID NO: 312449 - DNA, 122 bp, Homo sapiens
gatttaggaggaaagattaaaggagctaaatccgtggcgcttggctcagcggtgactaagcgtggacaggataatagcttacaaatgtgtggaaggtgtaaataccaaacggggggagggga

SEQ ID NO: 312450 - DNA, 122 bp, Homo sapiens
cggggaccccaggagcgcagggcggaggagcagcgccacaggaggcgagggcgcaggcggcgcggccgggaaggaacgcgggaggggacagaaggaagaggaagaggaggagagggaggcca

SEQ ID NO: 312451 - DNA, 122 bp, Homo sapiens
tggtagctgatataataatgcactcttcattaatttccttcccagtctcatttttaccctcgttttctatgaccaccttccggatagaatacttacacttaaattcttgtcacaggtttcta

SEQ ID NO: 312452 - DNA, 122 bp, Homo sapiens
gtccttcgcgaccaagggcaggacagctggacggcgcacagcttcctgggagatgtagtccggctgctcgcgggcgcgcgagttcgaccgacgcgttagaaggaggtgccttgcgaagccgg

SEQ ID NO: 312453 - DNA, 122 bp, Homo sapiens
ggcgaggaggagagacgttccagggatgtcttcccaccgagttagtaccagtaccatgttcgctaatccaggttttcctgagaaaaccctgccccgctgcagcgagaggaagggaccgggcc

SEQ ID NO: 312454 - DNA, 122 bp, Homo sapiens
ccgagcgagaccctcctccactgccgatgccaccctagtcaggcctcaccagcccccgggcgtccacttcccgcgagtcctagtcagttacgcggtaggtggcgtgttacttggagcttctc

SEQ ID NO: 312455 - DNA, 122 bp, Homo sapiens
tcccagcccactgccccaaactcgggaaagtccgggaaagcctattggaaggacaggtggcgagcgcacagtaggtcgtctccggcacgtgtcaggcgctttcctgaaaatgccccgcggga

SEQ ID NO: 312456 - DNA, 122 bp, Homo sapiens
cttttttaccccaactcttttggttagtatagttttaaaattattagctttattttttgtcgtttatgttgttgaaaacaataggcttttaggttacttgagacccagtgagcagctctgtt

SEQ ID NO: 312457 - DNA, 122 bp, Homo sapiens
aattattaacaactatctagaaagttactgctttatcccccactgtaaactatactaccacgacccgggatccttgttcgactcctagccaaggggttcccactgcgtttctgttgggttat

SEQ ID NO: 312458 - DNA, 122 bp, Homo sapiens
ttgtctttcccctttaagatggtaagactattaccaacaactttcagtggcttataacaacgaacatttatttcttgctcacagttctgtgggtccctgggaaaaaggggagctcttcaaac

SEQ ID NO: 312459 - DNA, 122 bp, Homo sapiens
gatctccccccacctccaacccccttttctcccgggtccacaccgcagttcccaccgctccgggtgtcctccccagtgcgccgcgatttttgtgtccaagccccagagtccctctgagacca

SEQ ID NO: 312460 - DNA, 122 bp, Homo sapiens
gtcagatgaacccaggtgggcggccagggccaggccagcaggaggctcaggccaggggcacgaaagggggggtgaggtaggcagaagctggaggcactaagggggtgccctgggcaggagga

SEQ ID NO: 312461 - DNA, 122 bp, Homo sapiens
aactgtaagtccaattaaacttctttttcttcccagtcttgggtatgtctttatcagcagcgtgaaaacagactaatacatgcagtaattgagaaagctcactggggtgagggcactcgagc

SEQ ID NO: 312462 - DNA, 122 bp, Homo sapiens
gtctttctcttagatcacgccggtcatccctctcacggcgacggtcatccctatccctatcgtcccggcgacttgagtctctccagcttgaagattcctcagctggtcctcttctccagcca

SEQ ID NO: 312463 - DNA, 122 bp, Homo sapiens
aagccgctccacaggagggggctcaaggagaggggatctcctccctccagactccggccccgccagagtagctctagggtatcttcccagaaactgccccgcacgcactggcgagctgggag

SEQ ID NO: 312464 - DNA, 122 bp, Homo sapiens
tatgcgatgatgtttgtttgcccttgacgcacttactcatggatggtacttcttcagcctcgttagacagcctggtgatggaggatgaagaaaccatgtgcttttcattcagttctggactt

SEQ ID NO: 312465 - DNA, 122 bp, Homo sapiens
cagagcaagaacctatcttttttttttctaaaaaaaaaaattggaatatggaaagttgatcggataaacgttgttttatctttgttaaaagataaatggtaaatattaaatttcccaaagtt

SEQ ID NO: 312466 - DNA, 122 bp, Homo sapiens
gctggagcctgatgagactccaattcattatttatttcctcatgcggcgcctcctccacacgcttttaaagcagtgctgactgaacggggaaagtgactgaacagttcctgggcacttaggg

SEQ ID NO: 312467 - DNA, 122 bp, Homo sapiens
cgctggcactgcgggcagggaaagcagctgactggagactggagccatattggtgatcgccgcccctcccccgcaggaagcaggaactcggtcttcttaggcagtttctagctgagtgcact

SEQ ID NO: 312468 - DNA, 122 bp, Homo sapiens
tgcctgccttcagccccctactcccacgccgtggctccacgtgccaccgaatcgctccagcgccagcaactcacagctactgctcaacttttgattgggacttccgcttccggcggcaaacc

SEQ ID NO: 312469 - DNA, 122 bp, Homo sapiens
agggggctgggggctgccgtcagtggacctggacagcctggccgtgctggtgaggggtggcgccggcgccctctgctgtgccctgatgactggggagggggccgaactagccaagcatccaa

SEQ ID NO: 312470 - DNA, 122 bp, Homo sapiens
tgctaagtccctcattgcccggggccagcagggccggccggctgctccgagagcggggcccgcaaagcccacgcccacccagaactccagctggcccgcaagcgcagcgtgcagccccggtt

SEQ ID NO: 312471 - DNA, 122 bp, Homo sapiens
actgtgtgatctcttaggctcactagccaaggatgttccttgggactctcctctgcactgcggttatttacatatatacattaaacataaaaatatttctgaaatagtgttataactagtca

SEQ ID NO: 312472 - DNA, 122 bp, Homo sapiens
tgtgggattggacctgtctgtggggtctccctcacagagagaccatggtaaatgggaacccgggtataagtcacctagcttgtgctgggtacacagcgttggtgcttggcaagaggaatgtc

SEQ ID NO: 312473 - DNA, 122 bp, Homo sapiens
ttctcaaggcctggctgcattgatcagcccactggatttactgcctgaaacaaagcttagcgtgatacttgatcgatctctcctcatttcatgtcactcagaatggctcctgctggaaggta

SEQ ID NO: 312474 - DNA, 122 bp, Homo sapiens
cttacttttcttatccctgctcaactgtaagctccttatgggtatttctagtacttaacacggtgccttgattgattcgattcttaaaaaatttttattaaatgaataaatggttctggatg

SEQ ID NO: 312475 - DNA, 122 bp, Homo sapiens
gctgccaggccattgaccgacgaaacgacgtggagtttggtcgggatggtgggaggagaccgcagccgctgcccgccccgactacaggggaaaaccaccttcccactgcatgctccataccg

SEQ ID NO: 312476 - DNA, 122 bp, Homo sapiens
cagggcggaggcgggggaggtgcagattccagcgcggggaataactgtcggtggcggccgcggccagggaaccgagctccgcagggcaagagtcctccgcgcagaggcagcagcgggggcgg

SEQ ID NO: 312477 - DNA, 122 bp, Homo sapiens
tgattggggcatggagcagatggcaaggggtgcacaatgagttttgacatgcgtgcattacggagatgcatagaaattctagttacttttaaatttggagggaagaagtctggtaccagatg

SEQ ID NO: 312478 - DNA, 122 bp, Homo sapiens
ccagtccccctcccccgcctgcgccatgggcagctcacccggcgggtgaccgtggggtcccgcagcgccttccccatgagatggcccagcagcgtgttggtacgcaggaagcgcaggcggac

SEQ ID NO: 312479 - DNA, 122 bp, Homo sapiens
ccgaagtcagcccgacccctcaggcattcgcctccttggcttcccctcctggctccactccggccccatggatgcgtcttgcaattctgccggcccaggattctctggcctcagggcctttg

SEQ ID NO: 312480 - DNA, 122 bp, Homo sapiens
tccacgtccacattggacggtgggcgagaacagatggaaacagtccacgtccacattggacggtgggcgagaacagaaggaaactgagtccacgtccacattggacagtgggcaagaacaga

SEQ ID NO: 312481 - DNA, 122 bp, Homo sapiens
aagtactcgggctttggagtctgtctgacttggtcttgaatcgttggctctgtcattagccggatgtataaccttgggccagacactcaatcttcaattccctcaactaggaaatgaggtta

SEQ ID NO: 312482 - DNA, 122 bp, Homo sapiens
aggcgaaggccgccccgggagagcggggtcccgggagagcggggtcccggctgtgggggacgcgggccgaggctgtcgcgaagccgctgacggccgaggcgctcccggttttcgcggcgcac

SEQ ID NO: 312483 - DNA, 122 bp, Homo sapiens
tgccaggctgggtttgccgggtcgagtcactttgctcgccaatccccgcccccattccaccgtttcattctggccccaggacccgcctcacaggaaaattctaaataatatatctaaatacc

SEQ ID NO: 312484 - DNA, 122 bp, Homo sapiens
ctgatgtcagagagcggccccttgagacaggtgggacatgtcatttctcacatgaggtcccggcgagaaggacctgcttccatcagattcacacttgggagaggggcccggcctccaggagc

SEQ ID NO: 312485 - DNA, 122 bp, Homo sapiens
ccgccccgccccgttccgccccgccgcccgcccctggcgcccctctttcccgcacccgcccggagacgggaggaaaccgaggcccctgaaaacgcagctcccctacacccgaaaagacgcga

SEQ ID NO: 312486 - DNA, 122 bp, Homo sapiens
tatctaggggccagcgaaagacacgcgctcgacttagcaagataggggctagacaaaccacggtgaggaaaacggcacctacaagtcttcccagacagctgtctgcagttgaaattgaagtg

SEQ ID NO: 312487 - DNA, 122 bp, Homo sapiens
caccagactatttggtctcctttttccccacatttgtaactttttatattctttttaagacgtgctcttgctcttttgctcagagttgagtgcagtcgtgaatcatagctcatcgtggcctt

SEQ ID NO: 312488 - DNA, 122 bp, Homo sapiens
tgtagctgaaaaacaaagataaatcaacgtgtacagcctgctgaaagaggagctagttttcgtactactttcctgaaaggaaatatcagaaatggcaatggaagaaacatccttcttaggtc

SEQ ID NO: 312489 - DNA, 122 bp, Homo sapiens
agagaggagacagaagagtgggcaagggccctctccacccataactactggccgcacttccggaggagctgatctaggaagctaaatacgctgaaaaacagaaggaaagggctgggaagaca

SEQ ID NO: 312490 - DNA, 122 bp, Homo sapiens
tcctgcattctcacggcggcacctcccaccccgggtttctcacagagatgtcaattctgacggcaaaatcttgtcttagtgcccgcgatacagtagaaccaccgctgtacgagtcttttcgg

SEQ ID NO: 312491 - DNA, 122 bp, Homo sapiens
gcccccacacacctgtttttgtagatcctccagtatatacagtacttaaataggaaactccgagttaagatgtcataatctacccccatgctcccgggggcagttggagagtcagattgctc

SEQ ID NO: 312492 - DNA, 122 bp, Homo sapiens
agtctcccttccggcttccgggaccgaagggtgaagggcaaggggagctcagggaatgaacgagtgctcccgactaatgtttaacccacgactccgagactccgactggtcacagtcctgca

SEQ ID NO: 312493 - DNA, 122 bp, Homo sapiens
cggcgtggtgcactgccacgcggtcgaactggtagaggccgccggagtggtcgaagtgcacgtgggtggccacggcaagcagtggccggcgcgccgcgtcctctttggcctctcggtcctgc

SEQ ID NO: 312494 - DNA, 122 bp, Homo sapiens
gacctgaggaatgtagttctccttgaagtagttcttcagcctcgggttggcattgcgtagcgaggccatggcccaaggcctgacggagaagctgcgatagtaccctccccgcgctgggacta

SEQ ID NO: 312495 - DNA, 122 bp, Homo sapiens
cgccttccccttctccttattttgcatcctggggttccagggacaaggtccctcccgggccgcctcccaccctacgcacttctgagcctcaagggcacccggtcccgggtcccgggtctaga

SEQ ID NO: 312496 - DNA, 122 bp, Homo sapiens
tctttaggtccaaaatgaccctgaaggagagtccagaatgcccagtggccgcgtctgcaacggagtcttctttctccaattgccttctgccccatcaccatgggccccacctgcgccacctg

SEQ ID NO: 312497 - DNA, 122 bp, Homo sapiens
aatgttttaattaccttttccccaaactttcacagctgacatagtttggatacttgtcctcgcccaaatctcatgttaaattgtaatccccaatggtggaagtgggacctggtgggagatgt

SEQ ID NO: 312498 - DNA, 122 bp, Homo sapiens
gccctgcccggcgcaggcagccagcgccccgagcttccactcctgctgctgcgctctgagcggcctcctgccctgggcgcctcttctggggaagcagtgaagtcacactgggccggatccgc

SEQ ID NO: 312499 - DNA, 122 bp, Homo sapiens
tgactggactttggtcccagcaccgtgttcactcggatgctttctgtgaccagatcagttcgctgtgggtcgcctccggatgcctgggcattcggtctttgttctcagcaggactactggca

SEQ ID NO: 312500 - DNA, 122 bp, Homo sapiens
ccccctgggaggctcacctgaactgcctgtctggagcctggtgttttcatccttcagtgccgctgccccatgctcacagtaggttctactgtgctcagtcaggaggttctcagaacagcccc

SEQ ID NO: 312501 - DNA, 122 bp, Homo sapiens
ggggctgagcagggatcggtgctggggctccagattaggggccatcctcactcagtgaggcgcgcacccttgtttggtgaccaatgcgcgtccccacagaactccaaggcagcaggaaaacg

SEQ ID NO: 312502 - DNA, 122 bp, Homo sapiens
gagcagtgagagccggaaatgagtggctagcgaggcacccaggagcgccctgtccggcggcgctctagccctcgcgcactgtctctatgctccccagcgtctagtctatttattgtcgcggg

SEQ ID NO: 312503 - DNA, 122 bp, Homo sapiens
ggggagaggagggggaccgaggtgctctcctgcatctggttcctagatcctggtgaacaccgcgccggagccagggaaggctcaacccaggcttcgttcaccccaaggcgccccacgccgcc

SEQ ID NO: 312504 - DNA, 122 bp, Homo sapiens
aatcaacctaactaggcttaagatgtactgcattaaacttcttacacgctcctcacctttcgtattcctctgatatataaggaacacattctggtatagtcttttagacaaagatttaaaaa

SEQ ID NO: 312505 - DNA, 122 bp, Homo sapiens
atatacttagccccctaagctctactcctctaatcatttgactcatactaagagagagtacgctactataaaatcttaaaaatacatatctgttgattaaggacaggacagggcccagttga

SEQ ID NO: 312506 - DNA, 122 bp, Homo sapiens
gccgcagtgcgcaaagccatattcgcgaagtctctgaggctgagccagtggcgtaaggggcgccgagcgctgtcgagatgagggttgcgtgcgtaaagccggagagcccttttgagtctgcg

SEQ ID NO: 312507 - DNA, 122 bp, Homo sapiens
atgcctgctacataggagacatgtagcaaatggtatctattataaatattatatacgtgtcggtttttattatgcttgtagcaagcattattggttcctaccagaggatatcgttcctactg

SEQ ID NO: 312508 - DNA, 122 bp, Homo sapiens
caaaaccatccaagtccacatacctcagaatttttgccagtgatctgtaaatccttggttcgtaacagtgatatccccactgacccaaaaactgtagggagggtcttttaacaattttgtca

SEQ ID NO: 312509 - DNA, 122 bp, Homo sapiens
ggaggcggaaaaagctgcaactttccctggagcggggaggagctggactcttaaaggggccgcacagcgccccgggctccttagcagggggccactcagcccaaaagggagctctgggaccc

SEQ ID NO: 312510 - DNA, 122 bp, Homo sapiens
cgacagcaccatgtctcccacttggaaccaggaggttgcggggcgtggcggacggcagtgcgcaggcgcggagcctgggaagtacccgaggcagcggcgcctgcgccggcggcagcgacgcc

SEQ ID NO: 312511 - DNA, 122 bp, Homo sapiens
cagctgaggcaggaggattgggcctgggaggtcgaggctacagtgaaccatgtgatcaaccgctgcatttcagtctgggtgacaaaacgagagttcgtcctccaaaaaaaccaaaacctatc

SEQ ID NO: 312512 - DNA, 122 bp, Homo sapiens
cggatattcaatttctctcaggcctagagctaacgtcatgtgtctggctgctaaaagctccggctccttttattaccacagtaaaggaagataacaggcgagaggtctgctgtagacattta

SEQ ID NO: 312513 - DNA, 122 bp, Homo sapiens
ggccatgcagccagccggtggggaagcaacaaccagaacccggctttcttgagatccgaccggaggcccccaggagaacacccagccagttgctccgtgctgaccaggctgtgttcccgctg

SEQ ID NO: 312514 - DNA, 122 bp, Homo sapiens
ttccccaactcttccctacaatggaagtctcatgaatacaaacgttccttaaaactgaaacgagaagtcaggcgcagtggctcacgcctgcaatcccagcactttgggaggccgaggcaggc

SEQ ID NO: 312515 - DNA, 122 bp, Homo sapiens
tctctccgtctctccctctaactcaaatctctcattcccgagtccaaactaagagagactcgcgccccaggagtcagccagcggcgcgggcgccttccccgcacgcctctgccgtctggagg

SEQ ID NO: 312516 - DNA, 122 bp, Homo sapiens
aatggcagcttccaacaccatctgattttctgaatttcaaatctggacacggaattgagccggaaaactctgaatgctgccagattctcatttcagatgcacacacatactcttacatgtct

SEQ ID NO: 312517 - DNA, 122 bp, Homo sapiens
catgctggccgccgctgaggggacgcaattttctgacggaggggaggaggacgaggaagacgagggcgagaaattgtcctatttgaactcactagccgcagcagacggccacggggattcag

SEQ ID NO: 312518 - DNA, 122 bp, Homo sapiens
tctgccgcgtcgccccctccttccccttgggatgtgccaggcgggcgacagataagggggcgcggcgcggggtcagccaccgagccagagggcggcgcccggttgcagcgctccacagccgc

SEQ ID NO: 312519 - DNA, 122 bp, Homo sapiens
aggctcgcctccagagtagtgtagtttctcccgccgtgggcacccggccccttgctaccccgcaaaatctcgcgaccatttactctggccatccgaaggcgcgtgcctgggttgcactcccg

SEQ ID NO: 312520 - DNA, 122 bp, Homo sapiens
atggccaaacttcttggggaaaatgccaccatgctgtctagaaaaggcccggagaagttccgcagtggagagacaggtttaactgtgctgggcatgccatccatccctcacacttctccacc

SEQ ID NO: 312521 - DNA, 122 bp, Homo sapiens
acttggcgctctctcttttctgcatgtcaagttctgagcgcggacatgtttaccagcacacggctcttcttcccacggcactttctgatgtaacaatcgagtgtgtgttttcccaactgcag

SEQ ID NO: 312522 - DNA, 122 bp, Homo sapiens
catcaggagatcttgtgggctgtatctttgaaatatatctagaatccggctgtcacctcacgctatccactgctacgaccctggtccgaaccctcctcatctcctccctgtaacattgcaac

SEQ ID NO: 312523 - DNA, 122 bp, Homo sapiens
ccctccctggcccccttgttacactttacatcctgaggcagcgctggtcccagcccgacccgcttcagttctggcagttttcacatcacatattttgaagcactttttggtgaatacacttt

SEQ ID NO: 312524 - DNA, 122 bp, Homo sapiens
acttgtcatcatccctagtggttgtatatcctctggttatttccagctcttgagcctgtgcggtggaagtgctaacggcaggctgccggctgcctgtcccatcgcgccgaaatcattcacag

SEQ ID NO: 312525 - DNA, 122 bp, Homo sapiens
cgtaaggtgctccgggataacatccagggcattacaaaaccggctattcgccgtttggctcggcgcggtggcgtcaagcgcatttccggtcttatctatgaggagactcgaggtgtgcttaa

SEQ ID NO: 312526 - DNA, 122 bp, Homo sapiens
ttaaattacttgattgtaatttctaaatacttatgttagtttattaggaaaaaacataatcgcacatcaaatccaagactctgcagacactgcttagggtgaagctaatgtgggcagcacct

SEQ ID NO: 312527 - DNA, 122 bp, Homo sapiens
cttagcatcgtgctggtcctaaacagaggctcagaaggctgtccccaacctctgctgtcccggagccccttccctctgggtgtctgtgcatctaggccaggccttgctcgaggagggtgcag

SEQ ID NO: 312528 - DNA, 122 bp, Homo sapiens
acgtagtaggtgctcagcgaacggaaacggggagactagttatcactctccaggcaagcccgcaaagaggcctcaggtgaaaagagaaaggaggatttttttttccggccctggctctgcgc

SEQ ID NO: 312529 - DNA, 122 bp, Homo sapiens
gtttttttcggtttcagttctttgtgggtaggctgtcttgtgtattgttgggtgtttagccgcatccctggcctgtatccactaggtggcagtagaacgccatggtttgtgcaaccagccac

SEQ ID NO: 312530 - DNA, 122 bp, Homo sapiens
cggcaagtgaaatccaggcagtgtgaaagtcactgaccagaccggcggggactctggccccgctgccggccgtgtaagggaagaggcctcccggtgtccaggcctgcgcgccctcccgctgc

SEQ ID NO: 312531 - DNA, 122 bp, Homo sapiens
agatttccttaatttgggggagcgaaaattgggccgcctccacgtccagccattctccagcggccgggtttttcaaaacgctgcgcccagcgtctcgcgaggaccctccccccgggtccccc

SEQ ID NO: 312532 - DNA, 122 bp, Homo sapiens
tctgaggtgaaggtgggactgccctgtggagcccaccctttccgttatgcgcccgcgcggcgcaatgacgtaacacaggcccgcccactgcccctgttgggttcctgagtcgtgctgcgtcg

SEQ ID NO: 312533 - DNA, 122 bp, Homo sapiens
gcaccggagggaactggggctgcaagctgtgcttgcaggccagcgtgagttccgggtgggcgtgggctcagcgggccccccactcggagcagcccgccggccccgccagcccctggcagtga

SEQ ID NO: 312534 - DNA, 122 bp, Homo sapiens
ggaaagatgtacagatttttgccagtgaagggagggaattaggtgaaaatatttcagacgcggaacagcagtgtgttcttgagaagctgtgatcagctttgtgtggctgcagcagtatgcaa

SEQ ID NO: 312535 - DNA, 122 bp, Homo sapiens
ggagggtctccactggtgcgatggaagcataaaggaggaacatcaaactcagacctagaacggaactgggggcaagaaagaataggcagagagggacctgaagatgccctcaatgtcctctc

SEQ ID NO: 312536 - DNA, 122 bp, Homo sapiens
tggacatggagaggaaaaaagaaatgaaaccaggaaggaaccgccaagaagcacacaacgcgtttatgctgccttaaccacacgcttgactctaaatgggtttaaaaattcttacttgtgtt

SEQ ID NO: 312537 - DNA, 122 bp, Homo sapiens
tgaaccctggaggcggaggttgcagtgagctgagattgcaccactggactccagcctgggcgacagagtgatactctgtagaaagaaaggaagaaaggaaggaaggaagggagggagggaag

SEQ ID NO: 312538 - DNA, 122 bp, Homo sapiens
cagacccgtcgcctgctctgcacgggccgcggcgcggaggacttcccccggctgtgccctcggaccaagctgactgcgggagtggccgccaacttcacagcctacaaccccctccggatcat

SEQ ID NO: 312539 - DNA, 122 bp, Homo sapiens
ctaagctcacgttgcttcagaatgtgagaatatttgtcatatgttctccagaaatgaatccgtagagatacgtaagtaaagaatgtaaatggtggcatccacagctttcctttggaattcct

SEQ ID NO: 312540 - DNA, 122 bp, Homo sapiens
cggaggctgtaggcgcgacagggccgctccccgccagtccccgcagctccgccgcgcccgcgaccccggtgccgcgctcaccatcttcgacacggctcggcctcttgtttctgcggctccgg

SEQ ID NO: 312541 - DNA, 122 bp, Homo sapiens
gaagagcactcagacagatgctggcaggccattgacccgcggaaggaggcggagtttggacggggcagtctgaggagagcctaggccgccaggtggcccagctccacaaggaaaaccatctc

SEQ ID NO: 312542 - DNA, 122 bp, Homo sapiens
acctactagagaattagccatgcaaatttttggtgttcttaaggagctaaagactcaccacgtgcatacctatgggttgataatgggtggcagtaacggatctgctgaagcacagaaacttg

SEQ ID NO: 312543 - DNA, 122 bp, Homo sapiens
tgtaaaatgggcaagaggcaatcagtcatttatatgaaagcggcctgcagtgcctggcaccgaggcgggcacggatgggcatttggtaaggcagggaggaggagcgcggcgcctggaggctc

SEQ ID NO: 312544 - DNA, 122 bp, Homo sapiens
ggctcgttagagtgattcaatttcggtgaactgccacctccagctccacgcgtgtttttccggtaaccttcaaagccatagctgctgcacggcttcctgaccgacttgttcctcggcgagag

SEQ ID NO: 312545 - DNA, 122 bp, Homo sapiens
aggcgcaaccggcaggattgagctggaagccgagcagcctctggaactcggagatgagcacgtccttgtcggtggtgcccaggcagctgaacttctgcatcagctccgggtccaggtctacg

SEQ ID NO: 312546 - DNA, 122 bp, Homo sapiens
gtgcgtgggagccccgcctcgaaatccgcctccaaaggggaggagcgtttccagggggcccggcgccttcctcgatggcattggcctggggaccctggcgcccaattttgaaaagaaccaat

SEQ ID NO: 312547 - DNA, 122 bp, Homo sapiens
ctggaaactgagaaactccaccacctgctctccgcaggctagagagccaggaaagccagtcggggaattgagtctgagcttgaaggctggagaagtgtaactgcccaatgggctcaccttgc

SEQ ID NO: 312548 - DNA, 122 bp, Homo sapiens
agggaactggactcaaaaaatataaaacataatactttaaagtacaactttaaatgacaccgcagaattaaggaaacaatcaaagcagcagatctgcttccctatcagataggagaagctca

SEQ ID NO: 312549 - DNA, 122 bp, Homo sapiens
tatgcgtatactacgtacacacaaatagacacacacatttgaaataatctactgaatagacgtttgagtggttttctatttttcactatcccaaaaaaatccttcaacaggcatttcttcac

SEQ ID NO: 312550 - DNA, 122 bp, Homo sapiens
atccgtgtgaggaaggagaattgttgttgcatactttgctagtagaaggaagagaagatccgtgactgagtcttgctgagacatgttgatgttgaaatgataatgataagttctagaactgg

SEQ ID NO: 312551 - DNA, 122 bp, Homo sapiens
gaccgtgattgatggggaggactgcgcagaccctggcgagggtgagcccctccccggaggcgcctgtggaatgtccagggctctggtccgctcctcgggatggggggtgcctaatcctagag

SEQ ID NO: 312552 - DNA, 122 bp, Homo sapiens
ccacactcgccctcaccccatccccagacgccatggccgcactcgccctcaccccgtccccggatgccgtggccgcactcgccctcaccccgtccccagacaccgcggcctcactcgccctc

SEQ ID NO: 312553 - DNA, 122 bp, Homo sapiens
gggcgtgggggatgctggtaagagcggcctgggatttcttggacctagcgcatgccctaacggcagtgagtcacttacatagatgtgtgtaacatgccccagagacctcagtgcatgcctgg

SEQ ID NO: 312554 - DNA, 122 bp, Homo sapiens
acccacttgggctttcacagcaaagctgccaaatcccagaattgaggcctcggtgaaaagcgcgctgagacttgggtaggaggcccggtgggacccgcgagctttctctcccagcccgatgc

SEQ ID NO: 312555 - DNA, 122 bp, Homo sapiens
cggggaaactgctgacaacccttaaggcatttaagtttacaggaaattgcgcttttattgcgtcttctgtttctcacgcagtcctgagaagccggcagggcccggcttgtactttccttgcc

SEQ ID NO: 312556 - DNA, 122 bp, Homo sapiens
agtgggtccctcccccttttctagaggacctggaaggggtctgggctggggaccttccttcgctgatgcctgtctgtctgtcctcccctgtcttccctgtccacatcttctgtttcattgcc

SEQ ID NO: 312557 - DNA, 122 bp, Homo sapiens
cgtcttccccactctgcagcccaaggcaaagagtctgagagaccacatttcctaggatgccgtgcggtgcgtctagctgcacttcctccttaggcggaggggaggattcagggaagcttggt

SEQ ID NO: 312558 - DNA, 122 bp, Homo sapiens
ccaggccaggcctcggccactgcttccactacaggcagcagggaggcccagggcactggccgaggccctgccaagtcaatagctgcaaggtccagtgctgcccggagctcagggaccaagtg

SEQ ID NO: 312559 - DNA, 122 bp, Homo sapiens
ttgaagtctttcgcaccccctttctccattctctggggagggggatagaagggaatccttcgataagatggaatgcatatggcctttaggattattcaggaggttttagaatttgcaaatgg

SEQ ID NO: 312560 - DNA, 122 bp, Homo sapiens
aaaaaggaaaagaaggcacgatggaaacagaggctgtgcaggagcgtccgtctgcctcgccgttatctctggggcaaggtgcattggctccctggggttctatgaccacaataactgacttt

SEQ ID NO: 312561 - DNA, 122 bp, Homo sapiens
gggtggctaaaaaaggaaaagtctcggatccagcctttcccccctagccagagcagggggcgggggcaggacgcagagaaaaactttcttctcgaatttttcttccaaagggtggaggagat

SEQ ID NO: 312562 - DNA, 122 bp, Homo sapiens
atgcacatggaggcaggaggcgggaggctcaggtccccttcccgatgaaccggacaacctcggggacagtcactcaactgcaagtctttgcagtcatcaaattcgaaatacgggtgataata

SEQ ID NO: 312563 - DNA, 122 bp, Homo sapiens
tgctgccacatgacaggcacggtgggcaccgatccacagtgggccccgccttccccagctcgcctccctgcctgtgctggcctggccttgcctgctggcaccattggagtaggagggggtgg

SEQ ID NO: 312564 - DNA, 122 bp, Homo sapiens
caaatgcagacttctgggaatgcagcctgggtccaggatgagtggccctgctggaggatacgcccaggaaggggagcggggtagagtggcaggaggctaagaggcatggaggtctcactgtg

SEQ ID NO: 312565 - DNA, 122 bp, Homo sapiens
cccatctttgccgtctacttaggtctctgcttcaaagttactttttcagggcgggcttcccgcctgaattcccaatcaccaccggacttgggtcagtccccgcgctgggcactcactgcccc

SEQ ID NO: 312566 - DNA, 122 bp, Homo sapiens
cacagaggtagctaacgatctcgtccctttgctgctccagctcatccacactgctcagcacgaaggccttgttctcaggggcctgcttctcgatgaggcggatctgcttgaggttggcatgg

SEQ ID NO: 312567 - DNA, 122 bp, Homo sapiens
gctgcgccgctcagccgggcctgccacctgagttttagcgggagcagtcatgtcgcctaccgtattgcgacttgcagacaggcagggagggagctgccggggcggggagggggggggaatgc

SEQ ID NO: 312568 - DNA, 122 bp, Homo sapiens
agtaaaaaacgcagcgtctgggactgcggcacccgggttgagtcgggtgcaagtttctgccgaaagagggcgtcggtctgagactaaaagaaatttgtggacacggacgcctagtcaaatga

SEQ ID NO: 312569 - DNA, 122 bp, Homo sapiens
ccacttttaattatatgctaattaagaggtggattattcagaacattctggaaaaggggccgagagcgtccagaaccatatatggtaacttccaggccattgctatggcccattgccatggc

SEQ ID NO: 312570 - DNA, 122 bp, Homo sapiens
agacgcggtccctttaaggccctggaaagggtctaagtgttggtttctgtggggaggccacgccccatcacgtgaccgcagccccagcgcggcggggccggcgtctcctggctgccgtcact

SEQ ID NO: 312571 - DNA, 122 bp, Homo sapiens
gtcaggcacttgtaaccgcgagtgacgccttctccctgtaaggccaggacgttctggactcgccgccgcctccggctacagaacccccagctttaccctacagacgcctctagggtcgctgc

SEQ ID NO: 312572 - DNA, 122 bp, Homo sapiens
atgattttatttaatcctcatgataagcctgtgaagaaggcatgttatctccactgtggacgagagaactgaaacacaaacatttaaatgatttgtccagtgtcacgtaactagcaaggagt

SEQ ID NO: 312573 - DNA, 122 bp, Homo sapiens
tgcattcattactaccattttatttattacagctcagaggagagtcatttactagacattcggttgttattaaacactaaaaattaggcagagactggaggggataaggataagagaacagg

SEQ ID NO: 312574 - DNA, 122 bp, Homo sapiens
aggtagactctgcctttaaatgtggagttcccacacatgctaaggaattcagatatcacacggcgaggaagagtgatgaatgcctgccacggtgcgagataaatagattttgtggggtatac

SEQ ID NO: 312575 - DNA, 122 bp, Homo sapiens
cctctgggatccccacccgagagtcctgaaggcagggcacaggccgccctgggaaatctccgaaatccagccccggtccggggatgtcttaccctccagttccagctgcacggggggcggct

SEQ ID NO: 312576 - DNA, 122 bp, Homo sapiens
ttgggacgatcaacgtagatgggcaaaccacaccatcttaaatagccttgcggtgtctcccgggcccaggccggtgcctgaaatggaagggactgctttggctggcggtgatacccaagtgt

SEQ ID NO: 312577 - DNA, 122 bp, Homo sapiens
cccgcctcagcctcccaaagtgctgggattacagtcgtgagccaccacgcccagcctgcccggctaatttttaagattttttttgtagagatggagtcttggtatattgcccaaactggtct

SEQ ID NO: 312578 - DNA, 122 bp, Homo sapiens
cagccatgggcgtaggagcccaggtggtggctctgaggccaacgggctggccctggtgtccggctttaagcggctgccacggcaggacgtgcagatgaagcctgtgaagtcagtgctggtga

SEQ ID NO: 312579 - DNA, 122 bp, Homo sapiens
tatataacagatacatataatatgcatctgtgcattcataatagaaacagagtaggatgacgggactttagagttggaagggaaatcatgccgtttagtttcaccattctttacagatgagg

SEQ ID NO: 312580 - DNA, 122 bp, Homo sapiens
tcaaggggtggggagccctggggtgcacactaggggcaggcatcctgcatacagacttggcgctggggtctccagatcctcctcccaggagcttgtcctgggtcctggggcaggggacttct

SEQ ID NO: 312581 - DNA, 122 bp, Homo sapiens
tggctgctgtttgactccaactttccctctaaatctaaaaggatgcacacttccatcagacggaacgtcgcgattccccggcgaagaaaaaggcgtcgcccattcctcttccaaaacgctac

SEQ ID NO: 312582 - DNA, 122 bp, Homo sapiens
taaggcaaaatagttcattaaggagccttctttacaatctcaaagcaaaagaaacacatacgcttattttaggaaggctccttctgttaaagatataaccttcttaaagcagccctttgtcc

SEQ ID NO: 312583 - DNA, 122 bp, Homo sapiens
ccttcgcttcccctgtgggcccatcagggtctgtggccggtgagggctgaggtcaccagacgcaacccggctcagctcagcagttcggaaccaagaaccacacgtttcttagttgcaagcag

SEQ ID NO: 312584 - DNA, 122 bp, Homo sapiens
ctgcagtgaacatgctccacctgcatggctggcaaaccatggtgggccccagctgtggtgcgtgctggggtagaggcaaggaagtgatgggaccgcagagatgagacccccagggatgagat

SEQ ID NO: 312585 - DNA, 122 bp, Homo sapiens
catcagtataattatttattctatcctataatataccccaaatagtttcagattgtgacacgagttctagtattgaattgttattaatactatttcagttagttttctatgcccttcatgat

SEQ ID NO: 312586 - DNA, 122 bp, Homo sapiens
gcagagcactgctagccggccaggccggttgtcatggagaccctgtcctcgctaggcgggcgcgcgcacagcggcgcgctcttggcctagcgcgtgcacaagggcgctctctttttctttct

SEQ ID NO: 312587 - DNA, 122 bp, Homo sapiens
tgggacgcacctgcctgttcagtcccgcaggcagaggggctgcgcctgggcctacgctcgcgatacccagaatccactcgcacctgcgaaggcgcccctgccctgtgtgaatccagcgggct

SEQ ID NO: 312588 - DNA, 122 bp, Homo sapiens
tgccatggagtgacaccaaaactcaatctcattggttcctggctcctgccacagggtgtccggttcttaaatgggtcccagctcctcagtccgagcacttaggttccacttcgtggttgcat

SEQ ID NO: 312589 - DNA, 122 bp, Homo sapiens
aggaactccttctccagctccagggtctggtagcggctgtaggtctgtcggcctcgcctgcgtccggcggctgctgggaatgggggaaagggcgagacagaggggaggggagggtgggggag

SEQ ID NO: 312590 - DNA, 122 bp, Homo sapiens
cctgctcggcgccccacccttcccggggccggggaagcggcgtgactaggaaagtcacttcggaacacagccggactctgcgccaccagctggagctcgccgggaccccaccccgcgggctg

SEQ ID NO: 312591 - DNA, 122 bp, Homo sapiens
ccatttccgggtgaagagtgagtttccggtgtccccttttctacgtcctccttttgccggcgaaagactggcaaggggggcgcaggcgcaaagaggtcgctacgcgcacgcgctgttgtttt

SEQ ID NO: 312592 - DNA, 122 bp, Homo sapiens
tcctcaggtttgaataccagctcagccctcgcacgagttgtgaccttgaacaggtcacctcgcctctctgattcaacatatatgcatcgaaccttacatggtatcaggtacagtcctagtcc

SEQ ID NO: 312593 - DNA, 122 bp, Homo sapiens
atatattttgtttgcgacttgtatgtcccagtttaactagcctgtgagtgcacagagtatcgtattaaaattaacacctacattttatcaatccctgagtacttagtctaaaatgtccacaa

SEQ ID NO: 312594 - DNA, 122 bp, Homo sapiens
gcagaagaaactagctgcttaagagtaacgggagcactgaagaaggattcctgcagaaagcgagccgccgaacatgctgtttattgcacttaaggcacctgagcatgttggtgtggacgcgc

SEQ ID NO: 312595 - DNA, 122 bp, Homo sapiens
tcttttcagggacgctaacactgtgggaaccagggagaggcaggtgggggccccccaccccgaggccagcttgatcccccaacactgacctagttgccactttggtgcaaaaaaaaaaaaaa

SEQ ID NO: 312596 - DNA, 122 bp, Homo sapiens
accacgggaaagccgccgacctgtgactcgcttgagatgggaaagcggcgccacagaccccgggtctccttggctgtctgtgggccgcccctggccaccttgtcctggctcgcagggtgcag

SEQ ID NO: 312597 - DNA, 122 bp, Homo sapiens
aacttttacgctcctccctgcgcgcacagcccccacctcacgctgccacccctcacgccccgccttcaaagtaggaggcaccattgtcattggacactgcttctctcactcctattccagaa

SEQ ID NO: 312598 - DNA, 122 bp, Homo sapiens
ttagttcactaatgttagccttatttaggacaaagtcagccagacaccttgtactgggcacgcgtcagactgcagccagtccgtttcctttctttagccagccatcctggtactgtagttta

SEQ ID NO: 312599 - DNA, 122 bp, Homo sapiens
ctattgagatctcatttttacatctaagaaatcgctgcaaaaccccagccgggtttatagcggcgcattccaaatatgcaaattggccggccccggacgggtttacgaccacattgtcacag

SEQ ID NO: 312600 - DNA, 122 bp, Homo sapiens
ggccgcgtcctcagctggtcctagacatgcgtggcgtcggggctgtggcacggtcgggtccggggtgagtgaccccttcaagtaactacgtttttgttctgcccttttgttttgtttttgag

SEQ ID NO: 312601 - DNA, 122 bp, Homo sapiens
tcgctagagtggcaggtgggggatcagggctcaggtagcttgccttcggtgtgcattactcgtggttagtagtgttgccaatttcttctgacatagagttgattatcttcatgctgtttttc

SEQ ID NO: 312602 - DNA, 122 bp, Homo sapiens
cgtccggcgttgtcgtcacctcgtcctgcgttccggccgtccctgcttcctggcttcccgcgtgcccctcagcagccctgcggggcctaccgcctgccgcacgcactcccgccggcgcgcgc

SEQ ID NO: 312603 - DNA, 122 bp, Homo sapiens
aagcaaacgtctattggctgtggacttaacaggctcgcccacaggtaccttccgagcatgcgtggggaagtagcacgcaggcgcggcacgccccgcgcatgcctggtgcacagagtctgcag

SEQ ID NO: 312604 - DNA, 122 bp, Homo sapiens
ggttttggactttactggtgttatggaggcgttttggaggatggttatcctttgctttggcgtgccacagttcggtatcactgcagtactcgtgtaagagtgaggactctctgtggttggac

SEQ ID NO: 312605 - DNA, 122 bp, Homo sapiens
aggacatttatgtaaataaaatttaggtagtgttcatcaaactgtgaaaatctgtggagacgcgtggtggcgctgcaggataatatcaagaaaaaaattaccctggaggatgttgtagaccc

SEQ ID NO: 312606 - DNA, 122 bp, Homo sapiens
agtccccgaccgggccgcgaccccgccccggccgcccccggagacggatcccgcggcccccgccctgccgccggcctcacctcctcagcgtgcttgcgcagcgccttctcccgctcgtactg

SEQ ID NO: 312607 - DNA, 122 bp, Homo sapiens
gctcttccttttactgccgggtgacctgtgtgcctgcaggcctggcctgaccccaagcctcgctcatagttccctcctttcacctgcctggccggctgggctgcagtgcctgcagggtgcaa

SEQ ID NO: 312608 - DNA, 122 bp, Homo sapiens
taataccacactatcttgattactgttgatttatagtaattcttgaagttgggttgtatccgtcctctgacttatttgttcaatattgtgttggctcttctgggtcttttgcctttccacat

SEQ ID NO: 312609 - DNA, 122 bp, Homo sapiens
cagtttgcgagcaaggggccaagacacatgagcactcactgcgtgggcagggatgagggccgggcaccccaagccagatcctgccacctggggaggtgctggcctgtgcttcccagagcccc

SEQ ID NO: 312610 - DNA, 122 bp, Homo sapiens
tgagtcctgcattctgatacagtgactatcgctgtgacctgtgtgctgggatagtaactgcggggcacagagtctggagcgaagcgaagccttctcagcgacttgctatttagcagagggac

SEQ ID NO: 312611 - DNA, 122 bp, Homo sapiens
gtgggcacagagacgaggggtggcgagtgggcacagacgggtggcgagtgggcacagagacgaggggtggcgagtgggcacagagacgaggggtggcgagtgggcacggagaggcgaggggt

SEQ ID NO: 312612 - DNA, 122 bp, Homo sapiens
gcggggctgcgcttgcgaagaccagggttctgatgcctggcgccggctgccaggtaggggcgcgcatcctgcgcagttgccgcgcgcggcctcctccagcttcaggccgggccaatcaggag

SEQ ID NO: 312613 - DNA, 122 bp, Homo sapiens
gcaaaagggcacctgtgtcgcctgctctgtccagccggagaagccacgggtgcaagatggcggcattcgccacagcccctcgccctcctgcagagagcgcccgagccggcgcaccaccaccc

SEQ ID NO: 312614 - DNA, 122 bp, Homo sapiens
gcgggtcgaggacctgtttgaatacgagggctgcaaagttggccgaggcacttatggtcacgtctacaaagccaagaggaaagatgggtgagtgtgtgtgtctgggccggtgtccgcgctgg

SEQ ID NO: 312615 - DNA, 122 bp, Homo sapiens
tcaccggaggacagggacacattgttcagggccatattcaaacactgcccgcagtacttgcgttacgtccctttgtgaaggcaggcccttcgcggctccccagatcagtccagcctgtgtcg

SEQ ID NO: 312616 - DNA, 122 bp, Homo sapiens
gagtccacccgggcagtcagcgactgaggaagagcgcccgcgagtggaggccgtcagtcacggagtccacccaggcctggcatgtggctgtgtccacctctatgcgtagggccggagtgctg

SEQ ID NO: 312617 - DNA, 122 bp, Homo sapiens
cccgcagagcggggtggtgttcgcgcagcgcgccttcgaccacgagcagctgcgcgccttcgagctcacactgcaggccagggaccagggctcccccgcgctcagcgccaacgtgagcctgc

SEQ ID NO: 312618 - DNA, 122 bp, Homo sapiens
gggtcctcctggtgaggggcggcggtgagtggacggaggggtccccctggcgaggggcggcggtgagtggacggaggggtcctcctggtgaggggcggcggtgagtggacggaggggtcctc

SEQ ID NO: 312619 - DNA, 122 bp, Homo sapiens
ggtacccatttgacccttgaaaacaaaaccagctctggtaacctcatttgcttctttccccgcctctgtccctcaaatattagaaacaagacaaatccaagatcacaaatggatattgtggt

SEQ ID NO: 312620 - DNA, 122 bp, Homo sapiens
ctgccaggtcacaagagccctgtgaggtcttcctatcgccgggacactgggaggcaggcgcggggcgggtccgccgggcgacgcgctgtgattgggcgccgtggggcccgccccctcatctc

SEQ ID NO: 312621 - DNA, 122 bp, Homo sapiens
taattctgggcagcttcttcgatcaagctgacattatgggatttgtggtccttggattcacgacacacaaaacagaggaacttcccatcatcctcgcagaaatagtggaacatctcctggtg

SEQ ID NO: 312622 - DNA, 122 bp, Homo sapiens
ctttttactaggagctgctgataaaagacaatcaggttgccattctcactcagacacacacgccggcactgaccccaaccgacactgccagcctcctcccagcccctctcagggtggcagag

SEQ ID NO: 312623 - DNA, 122 bp, Homo sapiens
ctgacgacgggcacctgcaggagccaatcggaaggcgcaggcagggtgtggggcgcggcccggtgccctgggtacccagctcagggccccggtctggtcaacccggctgttgctggggtgag

SEQ ID NO: 312624 - DNA, 122 bp, Homo sapiens
tctctctgccttctccctggctctcatctggtaacatcctctcgcagtgctcgaggtcatcgttaaaacatgagagagaacaacacgacgatgaactagtttgcttggatgcaagtatttga

SEQ ID NO: 312625 - DNA, 122 bp, Homo sapiens
cactctcttctccaagtgccagagtggaaattactagatcaagtcatgtgctcagccttacgtttgtctgaccttaatatggtcctaccatttataggtgcatacatattatcctgggaaca

SEQ ID NO: 312626 - DNA, 122 bp, Homo sapiens
agattttgctgaagagttttagtcctggaagagactgaagagccgggggatccagtgtggcgcagtcatctcataggtcctgtaactacccttaattggggcctgcggacagcatgctctgc

SEQ ID NO: 312627 - DNA, 122 bp, Homo sapiens
ctcatccttgcacagaactgaatttgatgtgtcaagaaaagaaaggcaaccggtcaaccccggagtgagccacctactagcctatttgaaattgagatgctttaaacaacacagctggaagg

SEQ ID NO: 312628 - DNA, 122 bp, Homo sapiens
gtgctgcgccctgcgaacctgcgcggcccgatggttccatgttcttctcacaggaggagacgcgtttcgcgcgcctctggatcctcacctggtcggtgctgtgctgcgcttccaccttcttc

SEQ ID NO: 312629 - DNA, 122 bp, Homo sapiens
tcatctccagggcgtggagtatgacgttactcccaatatagcactgggtgtgcatgcacccggtgattttgctcctaatattcacggaagaagagaatgctattactcccagtatcgcagga

SEQ ID NO: 312630 - DNA, 122 bp, Homo sapiens
cctgtacgcgcagccacagcactcgcccgcgtccgcattccacaccctaccccgcgcgcacgtccatgcctagcgcctgcatccccatcccgcacctgcgcgggccctggggatgtggacgc

SEQ ID NO: 312631 - DNA, 122 bp, Homo sapiens
tcccagctgggacgcgcgcggcagccgagcgctgctgccggctctcgctcagcccgggcgcgcaaccggccccgcccccaggccctctgccaccgccgcgaccaatgaggtgagagggaggt

SEQ ID NO: 312632 - DNA, 122 bp, Homo sapiens
gcaacgtagccggaagctggtggcggctggtgggcgaccgggcgcatcctcattgcagtgcggcggccctacctcggccctggcctgaccccggcggccctgcccgcccctccctccaggta

SEQ ID NO: 312633 - DNA, 122 bp, Homo sapiens
cagggctcagcctcatcctgacgagagctgcagccataacctgggtcacctttgctgtctcgggcttctaaatttggcagcgagaacagactcgcttcctttgagcaattgatctgaatagc

SEQ ID NO: 312634 - DNA, 122 bp, Homo sapiens
agttccttccccggcaaagcctcctcgggccctagccaggttaattaaggctctcttctgcgcaccttcagggcatactcggtccagcttaccacgttgtacaggaattgtcttgctgataa

SEQ ID NO: 312635 - DNA, 122 bp, Homo sapiens
tggcagtgggtgggccttggccctgccacgccagccaggccactgttcatgaaggtccaacgctctgaacctctctttttccttagaaggggggtctggggtgaggggctgccaagggactc

SEQ ID NO: 312636 - DNA, 122 bp, Homo sapiens
ccctgcgccgccactgcgcaagcgcaggaggagcagcgtggcgcaaccttaaggcgcatgcgcggccggcgcagacttgcggaaggctccgttcccctcgcgtgaatccgccgatccgggct

SEQ ID NO: 312637 - DNA, 122 bp, Homo sapiens
ccacatggagcaaaggcacagccagccacgcctatcacagcgtgtcacggatggtttcatcggcgcgtttaactctctcacatacatgatgtcctttcatcatgagattagtagaacgtgat

SEQ ID NO: 312638 - DNA, 122 bp, Homo sapiens
ctgccagcagcaggtggtccacacccgagacactgccgcctctcaacagcccaaagcgctcggtcccaatgacatgacatctgaaggtcactcccagccctgctgcctcccgtgttctaacc

SEQ ID NO: 312639 - DNA, 122 bp, Homo sapiens
ggacgcgtctccctggcggagagctccttgcctctcctaccgagaagcgcaggctttggacgggaaggggcattcgacgacatcccgcgcagcgtacacgttttacagatggggaaactgag

SEQ ID NO: 312640 - DNA, 122 bp, Homo sapiens
gtggggtccatgcccacatgcacctgtcacagcccacttctgcctactcctggcacgtgacggagacccctgggtgactctgggtctcagcacacatccggccagaaagaaggagcgatggc

SEQ ID NO: 312641 - DNA, 122 bp, Homo sapiens
tccacttttgccttcttctgccccaggtcaaagatgagaatgatggtatcagggacacctcggcagaactgaggctttgggtacggcttgttcttacaataccggtaacaacggacggggcg

SEQ ID NO: 312642 - DNA, 122 bp, Homo sapiens
cgggcgggggcgggtggtcgggggcggtgatgcgggcgcaacgggggcgggacgcaggggcggggactgccgcggggcggggcctgaggcggctataaaggtggccgccgccggacgccggg

SEQ ID NO: 312643 - DNA, 122 bp, Homo sapiens
ccaggggaacaatgagaacaggaaatgttcgtgtgccaggaatgtgtggaggaaatgacacgagcatgagattggtgatcaagaactttaaatattctgataggcagtggggaaccgtcttg

SEQ ID NO: 312644 - DNA, 122 bp, Homo sapiens
agaaccgcacttttagcttggtttttaaagtacacgtgaagtttacacagagaaaaactgcggacactctaacacatgcttattaccatgatattacacagggccaggactaaggtgatgga

SEQ ID NO: 312645 - DNA, 122 bp, Homo sapiens
ccttcccagttcccgctttgtgcccctctgcccatcacccactggcttggtcggcgaaggcggcacagaggcaggcggcctcctcggtcacccaccgctccagggacttcttgcccaggccc

SEQ ID NO: 312646 - DNA, 122 bp, Homo sapiens
atgccttcttgagcgcaaccaaagacatacctactcgttcctgtgacactgaaagggcctcggtgatcaacttggacacagagaggttcggcactttgcgacttgcacttatcaagccagcc

SEQ ID NO: 312647 - DNA, 122 bp, Homo sapiens
gcagccctgcagagggttctcaaatccagatttcattctgcagtcccggcagtgttttgacgactgcctcactaaaggaagctaaaagctgtgctgatgcctcccagacgagcctcgttgga

SEQ ID NO: 312648 - DNA, 122 bp, Homo sapiens
cgtgctgtgaggaaggaaagggagagattaaagatggcctggaggtgatgctcagcgtgccgaagcgagccaatgatgccatgcacctcagcatgctggaaggtaaaggaccctccataccc

SEQ ID NO: 312649 - DNA, 122 bp, Homo sapiens
aaacggtgtccgttttgccgagccctgtttaaagcaaagtcggccttagaaagccacattcgctctcggcactggaatgaaggaaagcaggcaggttacagcttgccaccaagccctttaat

SEQ ID NO: 312650 - DNA, 122 bp, Homo sapiens
acacacagtcacaaaggaaaggtggtcctcagtgccacccaggcactccgctcggccagccggggggacccagctggagccataaaaggactgctcccaggtcaacacgaaggcctgcccaa

SEQ ID NO: 312651 - DNA, 122 bp, Homo sapiens
acctcaggtgatccacccgcctccgcctcccaaagtgttggaattacagatgtgagccaccgcgcccggcctgaacttgccttattttgagttttaaacccaagttcagcaaaagtaaagaa

SEQ ID NO: 312652 - DNA, 122 bp, Homo sapiens
ttccaaaaacacccaggctagggaagtagagctggtgataatgggagagggaggaggaggcgctgaagaccaagccagtagaaacaacaatcagggccagcgatcaggaggggagctcgggt

SEQ ID NO: 312653 - DNA, 122 bp, Homo sapiens
cctgggccttcatattaagctctcttctttttctctttcccagtagcctcctgtctggctcgctcagttgtttctccagtaatcttttctcctggaggagctgggcctgtacttcccgtgtc

SEQ ID NO: 312654 - DNA, 122 bp, Homo sapiens
atgacacctggctctgactaagccatggggcccccgccggggtctttcccgccacaacaccgtcagtctgcaggcaccatcatccgtggtccggctccagccgggatgagcctgagtctggc

SEQ ID NO: 312655 - DNA, 122 bp, Homo sapiens
ccaagcgccttagccccgtcccagcgctttctgaaagacgggccacctcgcgcggagccgcgacaaggactccagggtccgcagtgaagctggtcaaatctgccccgcacacggtcaacgct

SEQ ID NO: 312656 - DNA, 122 bp, Homo sapiens
ttaaccatccggagcgttgctgtcagcactcgattttgacatgacgcctgcccgctgcttcgtctttttctatttgtaccctatttttttgatggcactcgctacctctcacacactgtgca

SEQ ID NO: 312657 - DNA, 122 bp, Homo sapiens
tttgcagatggattttgcaaagctgtggttaacgattagaaatcctttatcacctcagcccgtggccccttgtacttcgctcccctccctcaggatccctttctccctctccaggggcatct

SEQ ID NO: 312658 - DNA, 122 bp, Homo sapiens
ctgcagacaaggaggaagcggtttgtggctggagagttggacacccccacccccactcggcggtgctctcagtgaggcagccccgggtgagagctgcccacaacccttgttccccgcaggat

SEQ ID NO: 312659 - DNA, 122 bp, Homo sapiens
cctcacttgggaagcgcaaggggtcagggagttccctttctgagtcaaagaaaggggtgacggatgcacctagaaaatccggtcactcccacccgaatattgcgcttttcagaccgccttaa

SEQ ID NO: 312660 - DNA, 122 bp, Homo sapiens
aagggcacacggctccagcgttaacaaagctctttgttagctgggaaatgcccccctccccgactcatctgcttatcatctgcatagaattatgtactcaaaagcaggaaaattattgagaa

SEQ ID NO: 312661 - DNA, 122 bp, Homo sapiens
gatgacggggcggaggggagaaatcacggtaaagtcatagtgataacaatgacagcgagccgcattgctccaacttcatatgccgcaggcactgtgctaaacatgttgtttactccgcacat

SEQ ID NO: 312662 - DNA, 122 bp, Homo sapiens
gctggaaggcgctaggcaaacacatatgtgatgaggcggtcacgcggggcacttggggtacgtcccccgacctgtggagtttgtcatcgaagagacctcgaggccccccaaaacggtccctc

SEQ ID NO: 312663 - DNA, 122 bp, Homo sapiens
cgtgatccacccaccttggcctcccaaagtgctgggattatagacatgagccaccgtgcccggcctgtatgagcttattagtatgaaccagcattgcctaccagttgaggaccacactctag

SEQ ID NO: 312664 - DNA, 122 bp, Homo sapiens
tggcatctgacctaagccggaagggaagtgtgcacggcccgtcacccatgcgagtgctcacggagcccaccctcgtggaggccgccccctcttgggttaaacctcttccccagcacaccccc

SEQ ID NO: 312665 - DNA, 122 bp, Homo sapiens
ggggatacaaaggtttctcagtggctggcaggctggctctgggagcctcctccccctcctcgcctgccccctcctcccccggcctcccccgcgcggccggcggcgcgggaggccccgccccc

SEQ ID NO: 312666 - DNA, 122 bp, Homo sapiens
gtctggatggtttacacagacacggtgagagacgttacccggacgcaaaagagtacacagcgtgtgataccgttccatgtacagtcatacgttgcttaacgacgggctgtgttctgagaaat

SEQ ID NO: 312667 - DNA, 122 bp, Homo sapiens
tataatttgcaacttttgccagactcattaaattcattaacacattcagtcttctcttcacgggcattttcaagagctttagatcttgtgcttaactttgtattgagctggtcagcaccttc

SEQ ID NO: 312668 - DNA, 122 bp, Homo sapiens
tcactctttctgggtcagtagacaggatgggttggaagtcttgtgccagcattatttttacgtggaactcttataatctagaagacacaaaccttgccaagaggtaaaacaagcaagggcaa

SEQ ID NO: 312669 - DNA, 122 bp, Homo sapiens
agcagggacaagatgacctcaggaatcccaggctgcgggggtgcctgcgtcctcccctcccgagctccactccgcaggcgagacccccaacactgctccccgacactctccgaggcacccct

SEQ ID NO: 312670 - DNA, 122 bp, Homo sapiens
ggctgcaacagcactagcctcccacaggcactgtaggtcagctcattcattcctccatggcgagtaaagagatgtgggaattatccaactcctcgaatcctgcccaggcagattcagtgtcc

SEQ ID NO: 312671 - DNA, 122 bp, Homo sapiens
aggcagaagtgaggcagccccacccagtcacgaggaccctgcagaactcgagcctttaagcgctcctctaggctcacatgacccagacccacagggcaaaaagtgcgtcgtcgtgtcccaac

SEQ ID NO: 312672 - DNA, 122 bp, Homo sapiens
agaattctggcaaatgtcttcaaacacacaaaattctggcaatgggcacatttcccctcccgctttgctcttctggatgcatccattctctcccaaagcatagtcattttcttccactccac

SEQ ID NO: 312673 - DNA, 122 bp, Homo sapiens
atgcactggaatcatcccaaaaccattcccctccccagtccgtggaaaaactgtcttctacggagccggtccctagtgccaaagagattggggaccgccggcttaaacaaagaggtcttttt

SEQ ID NO: 312674 - DNA, 122 bp, Homo sapiens
cagtatctcacaggtggcgccatgattgccgctgtcccaaaaccaggatgaaaacgaagtcgatttctcattggccaaacccaggcacagttccgcagtaagacacgtgtcaattggtactc

SEQ ID NO: 312675 - DNA, 122 bp, Homo sapiens
cactggaagttcttctatttctgggaccatgtcatatttttctctatgtgtccagcacatcgtacaaagttgttaagtgtttatggttagagtagctactcaacagacagctggcatcaagg

SEQ ID NO: 312676 - DNA, 122 bp, Homo sapiens
caaaatcgctcagtagctccaagcctgcctgcagagggttggcaccattaaatgaggtaacgagtcaaaagtccctaccctgggtcctagcctgtcaggggctccgaaaacccaggctcagg

SEQ ID NO: 312677 - DNA, 122 bp, Homo sapiens
agagataggacgggttctatctacacagggagaacaagaaggctggagtggccttgctaacgcgccattatcacttgaaaaatatccatgagagcctatctccccaggccacgccgccgctc

SEQ ID NO: 312678 - DNA, 122 bp, Homo sapiens
gagttgcagtctgatttatcctccagggctgtaaacaggcggggacactcgcagccttgccgggagtcacttttttttgctcttaaacttgccctgcagcttcctggctgccaccttgaaga

SEQ ID NO: 312679 - DNA, 122 bp, Homo sapiens
cctgccctctttctcactcactccagccccactggcctccctgcagttcctccagcacaccgggcaggctcccacctcagggccccagtccgagctgttccctctacttggaatgctgttct

SEQ ID NO: 312680 - DNA, 122 bp, Homo sapiens
acctcctgatgtcctcacatgtgcagcgagggggacagttgtctctcccatctcacagggcggaagtgaggatcaaatgcagtaatttgtgagaaagaaaaaacataaaacagtccataaat

SEQ ID NO: 312681 - DNA, 122 bp, Homo sapiens
ggctagggatgggcgggacaggttaattccccagctgtcgaaaccagcctgacaggtccccgagcccgggctaggggcgggtgcggggcgggagtggggggtgggggtgggaacgggaatat

SEQ ID NO: 312682 - DNA, 122 bp, Homo sapiens
cgtttttcctcttttcttccatccgtgtctccagcttctaaactgcaggcgaataaacctcgaatgagtaaatgaacccacccagtcgctagttatttctgcatttccaatgttgtgccagc

SEQ ID NO: 312683 - DNA, 122 bp, Homo sapiens
tgcccaccggccaggtcccgggtggatgaagcactccctgaccctccgtgaatgccacatcgcccggctccggaaagagcatggctggtggattcttcccgggcctcaactcgcagcctctg

SEQ ID NO: 312684 - DNA, 122 bp, Homo sapiens
ttaatttataagcattttacacattgaactgtatagctcaatggctgctgttacaccgcgcgcgtggggagggtcccaccccgggacgcttcctgctcggggtcagccgccgccgcagcctg

SEQ ID NO: 312685 - DNA, 122 bp, Homo sapiens
tcagggagcccatcaccagggacgccaggaacagcttccaacagggcccaggggaggccgcgggagaggaccccttccctctcagagagactcgtcaggaaacaattccagactctgacctg

SEQ ID NO: 312686 - DNA, 122 bp, Homo sapiens
ccgaagcagctagctccgttcgtgatccgggagcctggtgccagcgagacctggaatttccggtctggttggtctggggccccgcggagccaggttgataccctcacctcccaaccccaggc

SEQ ID NO: 312687 - DNA, 122 bp, Homo sapiens
acgtatagaaacaggcctgttggcttgggcaatacataaatgagccagtcacacatttctcggatggctggcaaaagttttgttgtcaaagcaacgcccccatcgagcttgctttgcttacg

SEQ ID NO: 312688 - DNA, 122 bp, Homo sapiens
cagccatggcgaccccgcgctgccccgcggcgctccgcgccggcgcccatatggaatcggcgtacgggcccgccccctcaccgcccttcgccgcccttcgccgcctgcccttccagggccca

SEQ ID NO: 312689 - DNA, 122 bp, Homo sapiens
agcctctcgcggaaagccccgcaacgccgcttcctgcctgggggcggcacttggggcccgcgccggggtttcagaaacctgttcgagccgttcctttatggcggaacgttcttatttagtaa

SEQ ID NO: 312690 - DNA, 122 bp, Homo sapiens
gcctgagaggactcagcccccactgccccaaactcacagggttccctttggggccatcatcgcctgtggggcctttaggccctggtggccctggctctcctggctgccccgactctcctttc

SEQ ID NO: 312691 - DNA, 122 bp, Homo sapiens
acagggcaaggcatgccccccattttgtttcctgatttcttatctaccttttcttgcaaccgtttccctcttccacacactattcatcactgcagattctctccaccacgtgattctctccc

SEQ ID NO: 312692 - DNA, 122 bp, Homo sapiens
ccacagccccctcacattgcctgttacatctgtttatgcttatagaagtgacatccacttcgtagacagagaatgccaatttcttgggaaaggacccagaatttggtgatgcttaaaggaaa

SEQ ID NO: 312693 - DNA, 122 bp, Homo sapiens
caggggtcacagcccccgacagctgcgcaagtctattcctcccccggccttttcagcggccgtccagagctcagcatcagcgctcctggcacagaccccactgctgactccattcactcccc

SEQ ID NO: 312694 - DNA, 122 bp, Homo sapiens
acggcggtaccagctctctgtgatagcagtgcagagcacggagctcgggccgcagcacagcgagcccgcccacctctacatcatcacctgtgagtgccgtgggccctgcgcgtgggcggggc

SEQ ID NO: 312695 - DNA, 122 bp, Homo sapiens
cctgccaggctctccgccctttacatggtcccaggagaggcggggcggcggtgactgcagcgaagtgcaggaagctgggcggcggccggcagtgaggaggaggagcgagcagacttgggtgg

SEQ ID NO: 312696 - DNA, 122 bp, Homo sapiens
gtcttgcaactaagtggcagattaagatttaaaaccatatcagaatctgggttttaatcacgaggagatacgtatctgggtttatatatcatactgctctataagtggtagggaacattttc

SEQ ID NO: 312697 - DNA, 122 bp, Homo sapiens
aagtgagtgccaggaagggagagtcgtgagcagccattttggaggttgtccactacaccacggaactcaaggactttatcttcaagagtcaaggggcagccaggcgcagtggttcacgcctg

SEQ ID NO: 312698 - DNA, 122 bp, Homo sapiens
taaaatatgctgtttcccatttcaccttgtttccacagagaccagggctgacaaagagcccgtcaccaacagttaccgccctttgtctgccctggatgctgaaggctgcatgagcagagaat

SEQ ID NO: 312699 - DNA, 122 bp, Homo sapiens
cattcaggattcccgcattttctcctacgggagctaacgcctgtgcctgggtcctggcagcgctctggactccacactctcctcctgggtttcacctttgtaacaggatccctgcagaccac

SEQ ID NO: 312700 - DNA, 122 bp, Homo sapiens
gccgccgtgggagaggccgccccctgccgcccggaggccgtcagcctcccggccccgccccggaggcctccggtcgcctggctccggccccaccccgccatcccctggccctggctgactcg

SEQ ID NO: 312701 - DNA, 122 bp, Homo sapiens
agttactaaatccgctctgccggttcccgaatcactcttccgctggggccggccatgtcacgtcaggcttttcatgcaggacggcagatggatagacgctgggaccaagtcatccttgggcc

SEQ ID NO: 312702 - DNA, 122 bp, Homo sapiens
gcgtggtgaggtggggcctcaggggcaggtgggaggtgctcgggttaaccgtccgaggcccggagacccgcccgtctagggcgcctgagggaatcccgttcgggcagcggcctcttgttacc

SEQ ID NO: 312703 - DNA, 122 bp, Homo sapiens
ttctttgcggggcattttctcttgctggtgtattacgtgtcatttctcacggggcattgccggccgcttttctgcaactgtcctttcggatttggtgatctggtccggcacagaggctctcc

SEQ ID NO: 312704 - DNA, 122 bp, Homo sapiens
gcatatggaagggatattccacatagtagagtggtacttaggaggctggaaatccttagtcgtgatgcatgaggtcatctactgagaagaaagtgcatataattttagggagaaataatgat

SEQ ID NO: 312705 - DNA, 122 bp, Homo sapiens
actacagaaagagggggcacagccatgcccggccctacagaaagggggcacagccatgcccggccctacagaaagagagggcacagccatgcccggccctacagaaagagggggcacagcct

SEQ ID NO: 312706 - DNA, 122 bp, Homo sapiens
ggaggagaaggtcccggcagacgaagcgagccccctggtggaagccagcagaaccaggtgcgtggcggcggaggcggggcggcccgctgggaaaccgaggaggggtcggattagttgagggg

SEQ ID NO: 312707 - DNA, 122 bp, Homo sapiens
cagaatgacgtctgaaaatggacctcttagggcgagcgcggacggggccagatgccaaggcggtcccggcccggtgacttcagcactgcgagccctgggcctgggggccccgagtattttga

SEQ ID NO: 312708 - DNA, 122 bp, Homo sapiens
gctggcggcctcctactacctgcagaatcaacacacctacttcagcctcaccttgctgttcgtgctcctgccctcgctggtcgtgcagttactgagcttccgctggttcgtctacgactact

SEQ ID NO: 312709 - DNA, 122 bp, Homo sapiens
gggaactgtaaggcatcttatagggatcctacagggggcatccactgccggccgacgacacgtggtggaaaagtagctattatttacatgcgtgttgcagtttttgataatgcgattgctgc

SEQ ID NO: 312710 - DNA, 122 bp, Homo sapiens
tggactgcagctgcccagtgtgggcctgtgtgccgagctcaccgtaagtacagaactctccgctgtgccggtcccgctccaacacatactggtagcctcggtagcctgggtactggtaggcc

SEQ ID NO: 312711 - DNA, 122 bp, Homo sapiens
atcccggaagccgtcctgtccgctccagctgcgtgcctgattggacgggtcccagccccgcgtccctgattggataatgtttagggcgccaccccctaatgccctgagtgacagaatatgtg

SEQ ID NO: 312712 - DNA, 122 bp, Homo sapiens
ccccgcccacccccgggtcattcctcgccgcccgtttttgcggcgagagcaccatttgggcggttaggagcccctgcaaggccggctggcgttctgccaccctccactctgtggtgtctagg

SEQ ID NO: 312713 - DNA, 122 bp, Homo sapiens
gggaaccggggctgcgagcggtgcttgcgggccagcgtgagttcccagtgggtgtgggctcggtgggcacgcacttggagcagccggcaggccccgccggccatgggcagtgagaggcttag

SEQ ID NO: 312714 - DNA, 122 bp, Homo sapiens
gacaggaacgtggaacatcactacatacctgaatagtgtttactttgtggtatgaataaacgtatctgtgagatgctccaaaaaaagaaaagaaacagcaagtaatcaggagagaccaagga

SEQ ID NO: 312715 - DNA, 122 bp, Homo sapiens
cggaattcaactcacgctcagactgtacaatgccaaacagcgcttctgaaacgcgaagagcgtccagcagagtcaggtacttaattaccaaagtaaacaactcgaccacaagggtctgcaag

SEQ ID NO: 312716 - DNA, 122 bp, Homo sapiens
cagctgcgccgtcaggcagggtggtggcagccgggcccgtgcgcttcttcagccagttcacgatgtcatcagcctctctgccagctaaccccaaacaaatgtaggttctactctcaaacagg

SEQ ID NO: 312717 - DNA, 122 bp, Homo sapiens
agtgtccttcagcccatcctgcctacctcacaggggagcggagccatgcaacactattttcgtgtaagctaccaccagaagcgtaaagtctttgaggtctcaagtcaaatggcctatatttg

SEQ ID NO: 312718 - DNA, 122 bp, Homo sapiens
caggaggaagttccacggcaggtggtgcgttcccacgcaggcaccaagtggaagcttgcacggtgggccacggccgtggcgggtgccctgtgggtgaggctgggtgatgacctgaggaccag

SEQ ID NO: 312719 - DNA, 122 bp, Homo sapiens
gggagcgataggacctctagggagacttggggtccgagttgggccgagccccctgggaggcgggccgttctttgctagccgctgtcagggcaccctgccctcgccctgtgaaatgtggaacg

SEQ ID NO: 312720 - DNA, 122 bp, Homo sapiens
taaaaccaactgccagtcagacacaactcaagaaaatggaaagacgtcgtcgaagtttcccggtgaagcagaaggacaaaaagaccaaaaatgtgaatgaaaagggttaagaaactcaaagg

SEQ ID NO: 312721 - DNA, 122 bp, Homo sapiens
ggggtgatgggacagattcagctcccaacgtgagaccaactgcacaggtgcacattggggcgactctgcctgccatgcagctccgtgcacatccgaatgactgcgttatttccttgcacaga

SEQ ID NO: 312722 - DNA, 122 bp, Homo sapiens
ccacccatccatgctgatggcagcagctcctgggcactcggggcctcaagggccagagggcgggaccttcttcaggtagcaggtgagacaaacgttttagaaacaataatgaccaagggcca

SEQ ID NO: 312723 - DNA, 122 bp, Homo sapiens
aacgcgtcacactcttgtgtgaacgcgtcatacgcttgtgaaagactgtgcgtgtgcacacgcgtgtacgtgcatgtgaatgcgtcagggtgcctgaggatgcacacatgcacgtgtgagtg

SEQ ID NO: 312724 - DNA, 122 bp, Homo sapiens
ttactttcttattcctggtaaatccgcagtttttttgcacttaggtcctagggtagtaaacgttgattgaaacaaaagaacccttggatcaattcgccgtcttctaaagaaaagtctctaaa

SEQ ID NO: 312725 - DNA, 122 bp, Homo sapiens
cgaactcgcccaaaccgcgggccgccccctgccccccgctgggctgtaacctgaaccgcccgcccccggagcccgcctgggccctgccagtgcccgcacctgcccaagccggacccccctct

SEQ ID NO: 312726 - DNA, 122 bp, Homo sapiens
ctcttcagctaagccgttagcgccgagcccgcccgggagcgggtcgccggccgcggcgggcgcccctgccagtgagcccctgtccgaagtgagccacggcattgactcggggctgcccgggg

SEQ ID NO: 312727 - DNA, 122 bp, Homo sapiens
cctgtcctggtgcccgtccgcgtcgtcgccctcttcactggccctcatcacttctcaccgcgccctccagcttcacccgtacaggtagccccgccgccgcgcacctgccttcgctcccgcac

SEQ ID NO: 312728 - DNA, 122 bp, Homo sapiens
ggctagaaggggtgtggacagatccccaaggaacactgagggtgctgcatgggtcagaagcgaagagcacgtgggaacaggcaggagctgggccgctggggctgggcctgccccaggggcgt

SEQ ID NO: 312729 - DNA, 122 bp, Homo sapiens
tcttgggtgcattggagccttgccttgctgctctacctccaccatgccaaggtaagcggtcgtgccctgctggcgccgcgggccgctgcgagcgcctctcccggctggggacgtgcgtgcga

SEQ ID NO: 312730 - DNA, 122 bp, Homo sapiens
gttgtttcattagaggagttacagtgcatgtgtgtaaattatttacacacacaacctgaccgtatgtggcaaagaagacatgagaagtctcctgaatcagtttgctgtccatgcttgtccac

SEQ ID NO: 312731 - DNA, 122 bp, Homo sapiens
ccaggggctccggatgtcgccggcccggagcatgctgggagctgtagttcaacccaatggcgacccgcgctccggagcatcgcgcggccaagcgttcagtggccgtgctgggagtagtcagc

SEQ ID NO: 312732 - DNA, 122 bp, Homo sapiens
aaacaaaaaagctggctgcagacaaggacagcttctgcttagctaagacaacagacaagccgccaactacggaattggacaatctctacccaaaactatgcaatgagattaattttgatgct

SEQ ID NO: 312733 - DNA, 122 bp, Homo sapiens
caaaggcgctgcgtcctggcggctctgcgggggtttcgtcgaggcccagcaggcttgggtcgggagacccgggtgccggcgggggccgggctgggagacgccacggccgccatcagtcaccg

SEQ ID NO: 312734 - DNA, 122 bp, Homo sapiens
catctccaccttgtggactctgggtggggaccagacacgtctgctggacgggggcgtggccgcactcgcttcgtcgccgctgcccccgcccactccgggagactctctcttggacggcaagg

SEQ ID NO: 312735 - DNA, 122 bp, Homo sapiens
gctgtagccgcccagcgacctgtgcgcggcgtctgagcgagctgcagccggaagaacattcggttgttgatattgcctcagccttttggagcattcttttgcgctgcttgtagagtgaattg

SEQ ID NO: 312736 - DNA, 122 bp, Homo sapiens
attccagtctcctgtgtgtggggtgtccagcgactcatcgcacgtctctgggctcctctgcgtgtgagttgcttacttgttctttgcccatctctgtcctgggaagactgacttttccttat

SEQ ID NO: 312737 - DNA, 122 bp, Homo sapiens
ctcggcgcaggaagtactggtggccctggtaattgggacgctcatagagcatccagcagccgctgtctactcggatggagttgcagcggctgaagtagacccgcaggttggggcagtcactg

SEQ ID NO: 312738 - DNA, 122 bp, Homo sapiens
tgtggaaccaatcactgacttactgatgttttaaaaatcagttaatgagacaaaaggaaacgaaaggtcaataaatcaagagaaagcaaaaagggcattaaattttcactgaaactggcagg

SEQ ID NO: 312739 - DNA, 122 bp, Homo sapiens
ggcacgcaggacagccagccctgtgggcagagcgcaggtttcacggtgggcaaaagtcgacgcccccagccgcctctgggtggacgagggctgcctggcatcagcacagctgagcatctact

SEQ ID NO: 312740 - DNA, 122 bp, Homo sapiens
acttcctaagggtagatattgagccttatttattttctgccctaagtatctagcagtcagcgggaactccatagatgcttgtggaataagtgaatggtggaatatacagtaaagaatggtta

SEQ ID NO: 312741 - DNA, 122 bp, Homo sapiens
actttctatgtgataaaggtggcacaactacctagccacatggaaaagaataaggctactcgtctgcctccttgcgcgcgtgccagcacgcacagacacccgtttgatcaaaaagttaagaa

SEQ ID NO: 312742 - DNA, 122 bp, Homo sapiens
gccccacccccgctcaaccccacatctggacagacacatggcaaatatggaactgaagcccggctgggctggagcacatctggttgttgttgggttggagtcgtcttgcaggtgtcccaagg

SEQ ID NO: 312743 - DNA, 122 bp, Homo sapiens
ccgccgcccgccccttggcgatcccacagcggcaggcagagcaaaatacgcaggcgcaggcgcttcctctctcttctagcggcccgccctccctcctccctctccctcccctccccactccc

SEQ ID NO: 312744 - DNA, 122 bp, Homo sapiens
agtccctgggacacgcagggcctggagccgagcgggacaggaagcggaggccaagcgggccgggcggaagagaaggcctgcagggaggcccggcacgcgcccggcccggctcaccttgaagt

SEQ ID NO: 312745 - DNA, 122 bp, Homo sapiens
cgggcgggtggggctagggtcctgagcgaagtgacaggtgcagttccctcttgtgaggctcggaggcagagggtcgttgcgagcgtccatcagacgcaaaaaatgaaaaataaaaatacaaa

SEQ ID NO: 312746 - DNA, 122 bp, Homo sapiens
cagggcatcgcggggacctggattcagaaaaatgggtcacaattcttagctttagccacacgatgtaggagagttgctgaactggtctgagctgcagtttctttagccttcaaatggacaca

SEQ ID NO: 312747 - DNA, 122 bp, Homo sapiens
ccacttgccaaacccgactgaatcactccttcttgccatgacaggtttattgtcttagttcgggtccccatcctccctcccccaagagcctaatgctctgtgacctttcacaaataactcaa

SEQ ID NO: 312748 - DNA, 122 bp, Homo sapiens
cattcccaggcaagttaatcactgcctgtatcttgcttttctttggctccacagataggtcgttgcctttaccattaaattctaaaaatctctgaacttgaaaaacctaagatacttaattt

SEQ ID NO: 312749 - DNA, 122 bp, Homo sapiens
caaaccttttctgtgaggggccagagatagtaaatattttaggtttggcgggcctcaaggcggtatgtaggtacttacataagagaggtgataaatatctacaaattttttattaatgaaat

SEQ ID NO: 312750 - DNA, 122 bp, Homo sapiens
gattttatcagtaagaaaaaaccagtcacctctgccagcccatgcaccatgttgtcctgccgctccactgtcccactcctccaccagtcgcaatggaagaagagattgccgtactggtgatt

SEQ ID NO: 312751 - DNA, 122 bp, Homo sapiens
agcctgctcgcttcccaccttgggaaaccaagcccaaggtctaggccccccagcttccagcgaggggtgggagagcgaaaatccccactttacagatgaatgaaatgagactcagagctgaa

SEQ ID NO: 312752 - DNA, 122 bp, Homo sapiens
gaagtacggaaaacgaagacgaaatagggaagagaagtgagagggaggacatggtaacctcgatatccctctgagggaccaagagagcgcccccaggaagaagactctcggtctcctgtgct

SEQ ID NO: 312753 - DNA, 122 bp, Homo sapiens
ccccttcctaattgctctccaaactgcgggcgcgctaagccgcgttacagtgcagggagccgggcttcccgcaaagccaaaaacttacataagcagctgcagccgcctcccctgccccgggc

SEQ ID NO: 312754 - DNA, 122 bp, Homo sapiens
aaggagcgacagacagcacctggaaaatcgggtcactcccacccaaatactgcgcttttccgacggccttaaaaatggcacaccaggagattatatcccgcacatgacttcgaggatcctac

SEQ ID NO: 312755 - DNA, 122 bp, Homo sapiens
acactcaaggcaggtgtggaaatgcttagggtctctctgccccacccatacatgggtttacgtatttattgtgaggagctggctctcgcggtgacaggcgctgagaggtctcgggatctgcc

SEQ ID NO: 312756 - DNA, 122 bp, Homo sapiens
agtggagcctggcagcaggaacaaactacagactcccagccttctgctggtactcactctcgcccttgaacttcctccttcagtcacttcccatgggtgaaagagactaaaagaggaaggag

SEQ ID NO: 312757 - DNA, 122 bp, Homo sapiens
ggaatccattcttttaagccagggtttaaaactcttcaagcaagtcatctgcaaaggtaccgcttctaccattttaaagataggattatgttccctaggacaactggatgagccctaggaac

SEQ ID NO: 312758 - DNA, 122 bp, Homo sapiens
cgactcacaagctgtcacacgtcagtgtgataaccctgcaggacgtttttctagctcacacgcccatctaaggactacgtctgctgggtggaggctgaacatggtgcaaactactcccagac

SEQ ID NO: 312759 - DNA, 122 bp, Homo sapiens
tgagtgatcatagatgtcctaatactgaacaagcctagagtttacacctggtctctatcacgtcactgtgttgctaggatttttgtaacaatgtttaggaatgagattggacttttgttttt

SEQ ID NO: 312760 - DNA, 122 bp, Homo sapiens
ggaaagcggagcacgccagccagaagggggaggaggcccgccagagagccgagaggacgccgccaaaacagggcagtgtggaggagcacacccaccagaagtggagagcatgtccagaaaga

SEQ ID NO: 312761 - DNA, 122 bp, Homo sapiens
tttcattttcttaattttgcagccagtagtgaaatataaggcaaacagtgtagatttctacggggtgagttccaggagccctgagttcaggtcccgttccagtacccactatgaccctggtc

SEQ ID NO: 312762 - DNA, 122 bp, Homo sapiens
cagctctacctggcctggcaggctggcatggacatgtgcagcgccggctggctggccgaccgcagcgtgcgctaccccatctccaaggcccggcccaactgcggtggcaacctcctgggcgt

SEQ ID NO: 312763 - DNA, 122 bp, Homo sapiens
gcccagtcgttcggacaccgctgaagcccaacccggattccttacacccgggacagctgccgccctaagtcccaagtcacggcgcgcatctggcctcccaaactggatctcaggtttataca

SEQ ID NO: 312764 - DNA, 122 bp, Homo sapiens
gggggggattccggactccagcgtgctgagggctggcccgctgtcccggctgagaaatggcgccctacgcggcgagccccagaggatatccaagctgagtgttgaagggaatggaggcgccc

SEQ ID NO: 312765 - DNA, 122 bp, Homo sapiens
ccctgtctggggacggaggctgcccatgcacccggctgtccaccttcttcccaaaggcggcgtcctgggctccctcccatgcggacccgggatccacttgcccagccttggggaggacagat

SEQ ID NO: 312766 - DNA, 122 bp, Homo sapiens
taccccgtgtccactcctccaatgatgaacggtgtctcaatggtaccccgtgtccactcccgcaatgatgaatagtgcttcagtagtaccccgtgttcactcctccaatgatgaatagtgcc

SEQ ID NO: 312767 - DNA, 122 bp, Homo sapiens
ataaccaagccacgatacctctaaattgaggcagtaagcaacctatgcacctcatcctaacgacctactgcctacccaatccagaaaggtttttacatcctgactccattgggaactgtaca

SEQ ID NO: 312768 - DNA, 122 bp, Homo sapiens
tcagcccttcgcagcccgacgctaggggcctggcagggggcagcaagagaccgcggtgagcgcggggtattgaacgccaaagaaggggtttggagggtggggtggggcctgggactcccagt

SEQ ID NO: 312769 - DNA, 122 bp, Homo sapiens
tattcctcaggctcttctctttgtaacaatctcatcaggggtggcactactggaccatcgcgatggcaactaccaattcacattttcagcactaatctctcatgtgcttcagacccacagat

SEQ ID NO: 312770 - DNA, 122 bp, Homo sapiens
atgattgagaaaattcgaagcccagtgcaacaatcccatgcgatggtgccaggggtgagccgggagctctgcagctgctctctgcagggatgctctacaatcctgccgggtcgggccctcat

SEQ ID NO: 312771 - DNA, 122 bp, Homo sapiens
ttagaaggaattaaattttaaaaagcacaccgttccaggcacacagaaggagcccccgaacgtttgttttataaacgcaggttggttgctgaggctttgttttggagcctacgtttaggaga

SEQ ID NO: 312772 - DNA, 122 bp, Homo sapiens
ggaaaagggcgccagacaacccgatgcagtgcctgtgaagacttcggggggatcaaagtccggccggggtgggcggagaccctcgggcagctgcacagggcatcttgtgctcactccattgt

SEQ ID NO: 312773 - DNA, 122 bp, Homo sapiens
tgttagtttcttccagtggttcagcggacaattttgaactgaatccagcagagaactcatcggaggttttttgttttttgttttaagtagtagtgataccatttcatccgattccaatgcta

SEQ ID NO: 312774 - DNA, 122 bp, Homo sapiens
aactgggaacccgccgggcgccagaggtctgcgaagctgggcttggatgaagtggatctgcggagttgatagttgtatttacacgcgtccggagctgcgccccgaggtgggggcgggggctc

SEQ ID NO: 312775 - DNA, 122 bp, Homo sapiens
tggctccagtgcttcaggcgtgaaagtgcaccctccagggagtccccgttagtaccaggacggttgggagggaagggctgctgaggacaagttccacttgtctgatgaggctacagccgaca

SEQ ID NO: 312776 - DNA, 122 bp, Homo sapiens
tcagatgcccagcactgcgactgctgcacagccacgaggctgagccgctgcggatgcatgcgtgacttaggaatgtgtgctggtgtgtttgccacagcaacaggatgaggaaagcacagctc

SEQ ID NO: 312777 - DNA, 122 bp, Homo sapiens
aaggaatcaagcccccaagatggcggcagcggcggaggagcggatggcagaggaaggaggcggcggccaaggcgacggcggttcctctttggcctccggctctacccagcgacagcctccac

SEQ ID NO: 312778 - DNA, 122 bp, Homo sapiens
gctggcgctgcacaatgggcgcctgggggactcgcccagtcctcaggtgctggaattcgccgagttcatcgacagcctcttcaacctggacagcaagagcagctccttccaagacctctact

SEQ ID NO: 312779 - DNA, 122 bp, Homo sapiens
caggccaccgacgccttggtctacacagcgcagcctccagtgagcccgcggcatgccgcgcggcctccccacacacgatggcgatgtcgcaaccacagtagaaagagtggcgctctctactg

SEQ ID NO: 312780 - DNA, 122 bp, Homo sapiens
cgtctgctccctgattcttagagaatcagctctttttctgaagcttgagtggagcttttccgtgcagggtttgcagggtttgagtatggtgaagggctgcgtggatgccaggttcacaggga

SEQ ID NO: 312781 - DNA, 122 bp, Homo sapiens
gtgtgcattctcagcgacacttatgtcctcaatttattgctacgttcactcggtcagagtcgccttaaagaatttggaaaggcccgggggtgggggtgcttcctggcataaatagaagacca

SEQ ID NO: 312782 - DNA, 122 bp, Homo sapiens
tgcaggccaagcaaacggctctgggctggaatagccctacctgagtgccctgtttgactccgccactatctgccatgtgagttgggcaaattgttgaccacctctgagccttgaaaaagtag

SEQ ID NO: 312783 - DNA, 122 bp, Homo sapiens
acagtggctccacaggggccgtgtcagtgccatagaatgaccggaggccgcgctgcagggcgtgtggcgaaaacagctggtgagatttggagatccaggcacagtgaatatgggcaaggctt

SEQ ID NO: 312784 - DNA, 122 bp, Homo sapiens
cgctcgtggccccgcccacccaagcctaggccggccttcgtggacacgcatttccggcgacgcctcggtactgacctctgcagagccgggtggagcccattgacgtccagcgaagcgaggag

SEQ ID NO: 312785 - DNA, 122 bp, Homo sapiens
agggcggggcggatcacatgacttcatctttccagtctctaaactggcagtagtggccatcgtgaattgtgttatgcgttctcgtggccactaggccacttttctgggccattgagcgaact

SEQ ID NO: 312786 - DNA, 122 bp, Homo sapiens
taaacacatactgcattcagacaacacgatgacatctcaccagcaggccaacaggatattcgaacagcggttattttccacatttatcaaacccttgggcactcaagcttctgaagggggaa

SEQ ID NO: 312787 - DNA, 122 bp, Homo sapiens
ttttttatttgctaaagcttgcaaaatataatgcggtgatgcacttactgtgatgtaatgcggtagagtttctaaatgtcctgagtgttttcaaggcatacgttttaaaaatttaaatctaa

SEQ ID NO: 312788 - DNA, 122 bp, Homo sapiens
tcagtttcgagttacctaatggatcttcactgtgtgccaattagtcgatttctgtgaaaacgccccggtttctgccaaagggcaggagtcgctgctcttgtgccgggtgctgctggttgtgt

SEQ ID NO: 312789 - DNA, 122 bp, Homo sapiens
tagagaggaaagtaatttttccagtttcctgatttaaaaatttctttctttacgataaaacgtgatagcaccagagagcctttggcatggcattatgcactgtgtagacctgataccctgaa

SEQ ID NO: 312790 - DNA, 122 bp, Homo sapiens
gtcccgggaacgtggtggggcagggcctccgagcgtggttggactttgaaggggatcggccgccgtgagtgtggggcctgcagcctactctccccgagtcccctgcccggcctgcctcgctc

SEQ ID NO: 312791 - DNA, 122 bp, Homo sapiens
ccagtctgggtaatagagcgagactccgtctcaaaaaaaaaaaaaaaaaaaaagaagtgtcgggttaaggagaggcaactcatcttctagtgaacaagtgagttttaattttggttctcccc

SEQ ID NO: 312792 - DNA, 122 bp, Homo sapiens
cacgactgccaagataaagtgccacgaagaaaagaacccagcatgtgttcaggtttgctgcgggtcaagagctgggtcagcctccagacttattggaaacccagggccacacagggggttta

SEQ ID NO: 312793 - DNA, 122 bp, Homo sapiens
tgcctcccgctctaggacccggatttaaagagacaggcgctccaaccgtcgtgggctgcccgcggcctgtaatgagcaagttccgaggcctacggtgagcgccggagccggagaggcaggtg

SEQ ID NO: 312794 - DNA, 122 bp, Homo sapiens
atttaccccatgccaagaacgtaagtaggctctactgaccaggaagttaagtaatatgcccgaggtacgttttcaatggaagaggctgactgagggtcacccaacttatatctcgaaatttc

SEQ ID NO: 312795 - DNA, 122 bp, Homo sapiens
ggcagcgggaggagttgaagggtaagggagggaaaatcttaccaaagcgaccggctcactcgactgctgattctttcgcttggcatcgcgtcaggggagttagctttccttcagccgggtct

SEQ ID NO: 312796 - DNA, 122 bp, Homo sapiens
acaactctgccagaaagcactcttcatgagccctatgctatggatggagaaaccaaggcccgggtctccctcacacagccaagaagtggccgaagctgaattccagcagtccgggggaagca

SEQ ID NO: 312797 - DNA, 122 bp, Homo sapiens
aaaaataaaaagcataataaacacccagactgttttgtatacatatataacaaacaaaaccggaagagaaaaagggggcgatcatgagatctcgttcatactgtggtggtgtttcgtttttg

SEQ ID NO: 312798 - DNA, 122 bp, Homo sapiens
ccattttacctggttctcggggcgccagaagctggagggtgggtagcagagctacagggccgccccgtctccgacgggtggcagagccagggctagcggtgtctgccgcctcgcgcctctct

SEQ ID NO: 312799 - DNA, 122 bp, Homo sapiens
gttctctctggctggaatgcccatttcattccctgccctcccacacaaaacaaacaaaaccgaacaaacccaagcctggttgactcctgtttatccattgggtctcaatttggatatcattg

SEQ ID NO: 312800 - DNA, 122 bp, Homo sapiens
aagggccatttcctcccacttaaagttgtttcctttttaatcctctgccagccattcttacgtggccagtggtagtggtgctgattaaaataacacaagtctgccagcagtcccagacagac

SEQ ID NO: 312801 - DNA, 122 bp, Homo sapiens
ctgtgttccccccttgggttgctatcggtgagttcctacttcacccccagcccgccatcccggtctctctagagcctgggccatcagagggcaggctccttggagttccagcacgggtcggg

SEQ ID NO: 312802 - DNA, 122 bp, Homo sapiens
ccaggcagtcggcctcatctcacgtctgttgggcttctcgggaagccaaatggtatcgcacgtgttaaaggcgggtgtctggaagccgaaagtcctgactaactgagaatgttgactaatcc

SEQ ID NO: 312803 - DNA, 122 bp, Homo sapiens
aagcacatggtggaaatttagtctgtgacatcagcaagctggttctgcctagactctggtcggccatcttggttccagctgatttcagccagttcttatatctcataagcagagggagtttc

SEQ ID NO: 312804 - DNA, 122 bp, Homo sapiens
acaagaacgaaactccgtctcaaaaaaaaaaaaaatagccatttgtgctttcaatctctccgcttccggcctccacccggcgggaaaaaactcccgcacgtgggcctccacgattccttggc

SEQ ID NO: 312805 - DNA, 122 bp, Homo sapiens
ggcctccgcccccagcggcgctcatcccaaggctgggcggtctaagcctgcacggggctgcggcagcaggaccactgactgtcctgccggcctccccctggtttccctgccttcgtggtcca

SEQ ID NO: 312806 - DNA, 122 bp, Homo sapiens
atctgacggtatcttttttctccagacaatgattgaagctcacgttgatgtcaagactaccgatggttacttgcttcgtctgttctgtgttggttttactaaaaaacgcaacaatcagatac

SEQ ID NO: 312807 - DNA, 122 bp, Homo sapiens
tgtcaagttatttgctcttctaaaaaatctgagttcacaaagaaggctggcttctcttttcggtacatttagaagattccttgccatttggctggagaaaggaggttctgaggttatcaggc

SEQ ID NO: 312808 - DNA, 122 bp, Homo sapiens
tgttattgaagcccagctacctgaactggagcccaggagcctgcaagcgcaggctgctgtcggagtccccgtggcttcgtctgccccagacttcactactaatgttgcccctgccatcaacg

SEQ ID NO: 312809 - DNA, 122 bp, Homo sapiens
tgtaatcctgtcttctcctctcttccccacgaaagcgcactcgattttgttaggaatgaacggaagtttaaaaattcttgtgcccacccccgccctccacccattcctgttaaaagttctct

SEQ ID NO: 312810 - DNA, 122 bp, Homo sapiens
cccttctcccccatctctgtgctgacaaacacctcggggtggcgcctgacaatctttccgcgaaaagatttagcagcccacgccaccagactcggtagttaggacggaatagggcatctggt

SEQ ID NO: 312811 - DNA, 122 bp, Homo sapiens
catcactttgcttgtggctgtttccagccaatacgtccacctcctttctaaacacacacacgtctatgtttaaaacatgacgcgccacctgcaaacacggtgccacagcctcagggagacgc

SEQ ID NO: 312812 - DNA, 122 bp, Homo sapiens
ccagccaaccctcgatggatccaaatgtgcccacgtcgtgagggagcctcagcaccgggtcgcggctcccagctccaccgtcatagaacacgaatagcttttgtcttttctcaaaatgagcc

SEQ ID NO: 312813 - DNA, 122 bp, Homo sapiens
ttccctgaaaccttgcaggggtaacagaggtccaggcaagagagggttctttcaacccaacgcagtgcagatcctagctgagacttggtgcacaggtgagtcctggaggactgcccaggcca

SEQ ID NO: 312814 - DNA, 122 bp, Homo sapiens
cgctcccttacctctgtccagggtgagcggctggaccactgtcaatgtcgccatgtctgccgtgggagccgaagtgacgctcggcttcagcatcagcaaccgctcgtagtgagaaaaaaagg

SEQ ID NO: 312815 - DNA, 122 bp, Homo sapiens
ctgtgcacctggccccctgaagacccacgtgcgtctgggggcacattgcgggggaaggaacgtgatcttcacacagaaagggacagttttaaccgttttctgttttcatgttctcatttaac

SEQ ID NO: 312816 - DNA, 122 bp, Homo sapiens
cagctcccttccctggccagcctgaggggagcggcagtggcccgtatggggtgggggtggcggtggagtgcgtcctggcgcagagctggcacacagcacaaacaaacgccttggcgggagtg

SEQ ID NO: 312817 - DNA, 122 bp, Homo sapiens
ctctcccacctccagtctttcccctgtgatgagcagatgaccaccgccctccagggtcagcgtttggctgtttgtgtgcctgcccacccgcctccctgtgcctgggcctgccctgtgcctgc

SEQ ID NO: 312818 - DNA, 122 bp, Homo sapiens
gaggggcaatatgacagcacaactgttcatctcactcgctccacatccttagaagtaacacgatttttagattggcttcatgaaaattagctcagagactaaagtagcaatacagaggaata

SEQ ID NO: 312819 - DNA, 122 bp, Homo sapiens
atacagagcctagagatcctcttaccatgtttttcaggagccacaaacaagaacatttgtcgcagcagtcctgttaatcacaggaatgaaaactgactgaaatgtctatgttcggaagaaca

SEQ ID NO: 312820 - DNA, 122 bp, Homo sapiens
gagatgcggtgcggaaagttcaatgaaaagccttggctctaaccctgtggacacaccttccgtatctgctttcatcctgccttacccacctgcgagttcaccaccggacgggggaccctttc

SEQ ID NO: 312821 - DNA, 122 bp, Homo sapiens
tcttgcttgttttgttgccaaggaaggtgaatgggttgaaaatagttttaaagccctttacgtgcgaagtcatgaatctaaagaggataaacaggttaggtttgttatcccagaagctagag

SEQ ID NO: 312822 - DNA, 122 bp, Homo sapiens
agctcgatttctgcacccctttctactgcatcccccacttctgcaggcagccagtgcgcccggctttgtctcttgctcgctcctagtgcctcacccttggctgggctcaggcggccgctcgc

SEQ ID NO: 312823 - DNA, 122 bp, Homo sapiens
gcggtctccgccttctagaggtggcggcctactgcccttcgggtgttgtgtgcaaagccccgtttcctgctccctgcgcttgtatcctgctgccttccctcctgctggtgaagctcgtgctg

SEQ ID NO: 312824 - DNA, 122 bp, Homo sapiens
cctgactacatcttttttaaacctcaacccctgctggccttggcctcaggaccttccatccgagccctgacctaaccatattctggcctggtatggtcctcaacccctgttttgtcccccta

SEQ ID NO: 312825 - DNA, 122 bp, Homo sapiens
ccacacttcccctctctctctctctggaaattacctggattccctctcttggcctccagacgggtcaatatttccctgcttttgcacatacccttacctctgatatcgtgcccttcccacct

SEQ ID NO: 312826 - DNA, 122 bp, Homo sapiens
cgccgccgccgctgtctggttcaggaagcggccccggcggctgcgtgtgtcgtagagcaacgcccctccggaccagtcaaaggccccgacggcgccgagcagcacctgccgctgaaggggac

SEQ ID NO: 312827 - DNA, 122 bp, Homo sapiens
ggatactcccagactcctcagcagacatgctcgttaacaattgaggaggtaacgaaacctcggctgaggaacttggctcaccgagagcagagaaaaactggccagagagcagcggcaagtca

SEQ ID NO: 312828 - DNA, 122 bp, Homo sapiens
ggtacaagggtagagcaagactgcacagaaatgacagaggccagaggagccccttacatccgctgaggagactgcacttcagtagactactgagtcagggaagccacagtaaagctttagag

SEQ ID NO: 312829 - DNA, 122 bp, Homo sapiens
cggcacaagccacattcattcacgtgaacactcccctttccctaccccatgtccaggtttcgctgagctcacacccggcaacactgctgctaggagttcccttcggctactatttattattt

SEQ ID NO: 312830 - DNA, 122 bp, Homo sapiens
cctagcctatagtagatccttaataactgtggccaggttcttaatctgctgtcactggtacgcaattgtatgcatatctcatgtgagtttgttctccagggatgatcagagcaccatgccta

SEQ ID NO: 312831 - DNA, 122 bp, Homo sapiens
tgcttggggcacagctggcagagtgtgagtcacccagcgccagcaccacacggtggtggtcgggggtagcacccggggctccaggcgcagggagcccagctgcagtgcgggtgctgctgaga

SEQ ID NO: 312832 - DNA, 122 bp, Homo sapiens
cggggtcccaggcgctcccagcccccgcgctggctccggaccagctgcctcaaaacaacacgcttgtggcgctgcccatcgtagccatcgagaacatcctcagctttatgtcctacgacgaa

SEQ ID NO: 312833 - DNA, 122 bp, Homo sapiens
gcctgtgtcctcaaattcacgctcccttctgaggtaacgtgacgcctccccaccaccccacggtctggcagtgtaaacagttttcacccttgctcatttgaagagcgtaggagccttctctc

SEQ ID NO: 312834 - DNA, 122 bp, Homo sapiens
atcctcctgcactccctgaatgtacatatgcagacatacccagcatcaacgggaaagctgcgggacaggatgtcagaggtgtgcatgaagtgaggtgctattggcatgcactgagtgaagtt

SEQ ID NO: 312835 - DNA, 122 bp, Homo sapiens
gtagtaatagcactgctggtaaatagaaaacaatgaatgtgattatgtacccctggccgtcgtcgccatcatcatcatcatcatcatcatcatcatttgagccctttaaaaattcctattgt

SEQ ID NO: 312836 - DNA, 122 bp, Homo sapiens
ttactcaacaaagctatgatcagttaggaacagccaaactgaatgggacttgccctgggccggaaggtcagtaaaccttagcagtttgtgtttctgagaatcaagaggctcttcgtcccgga

SEQ ID NO: 312837 - DNA, 122 bp, Homo sapiens
acatgcagtttctgtctttaggggtctcctattctgagaacatgcaaacaacagaacaggcgagcagagacagtcagccagagcctctgcagcatgcggctggccaggggctgtgctggtcc

SEQ ID NO: 312838 - DNA, 122 bp, Homo sapiens
atataatctcctggtgtgccgttttaagcctgttggaaaagtgcagtattagggtgggagcgacccgattttccaggtgccgtctgtcaccactttctttgactagaaaagggaattccctg

SEQ ID NO: 312839 - DNA, 122 bp, Homo sapiens
tgatgctctcattatatatgtttgtctttcacatccacattggagccagtatttttccttcgatgcccccagaactgtaacagaaataaaaataaggaatggaccccattattacacaaata

SEQ ID NO: 312840 - DNA, 122 bp, Homo sapiens
agaaggagctggggatgatctgagcgcctctcttcttcccccacctccttcaccagactgcgcacttgagtaacggagtcagggctccgcatctaaggggtgcacacccaggtccaagtcga

SEQ ID NO: 312841 - DNA, 122 bp, Homo sapiens
ccaatcacacaggtggcaaggggttctcctggccacggctctgggtgcagcctctcacctcgtggtgaccgggatggtggtcggcgcggccagctcggcgtggggggcaggcccctcaggct

SEQ ID NO: 312842 - DNA, 122 bp, Homo sapiens
gcctgttgttgtggctgctgctgttcaggatgtcccgggtgggaacttggaggcgtcccccgcagcctctacccaggcctgccaggctccaaaatactggcaaacatgtgaacaatgctact

SEQ ID NO: 312843 - DNA, 122 bp, Homo sapiens
cgtggctcctctttcccaggccgaaagcggccgggccctctgctccgctgcgccctggcgcggccgcacccactgcgcgtttgtgagctggccatcggtcacactgggatactcgaggagga

SEQ ID NO: 312844 - DNA, 122 bp, Homo sapiens
gagggggcggcgggcggggtgggcggcgcgaggaggcgggaggcctcagggccgggcgcacgtcgagggctgcggccgccgcagcgggcacggccaacgagctgcgggcccgggatcgcggc

SEQ ID NO: 312845 - DNA, 122 bp, Homo sapiens
tccagctgcccgggcatgagtcatgggccagccctgggcgctgctgcggattcagaagctcgagccgtttcctgcagataagcgacaagcgccagggaaacctggcgggggtggccgccctg

SEQ ID NO: 312846 - DNA, 122 bp, Homo sapiens
taggaggctggttggctgcgcagctactccagagtgtgcggtagccgagggctgcgtccgcgtaaagcccagagctgtaatgatgtcaacttgttatttactttccaaatctgaatgactga

SEQ ID NO: 312847 - DNA, 122 bp, Homo sapiens
tacacaacgccgagggtaaaacggccctgtgcccccttcttggggtgtaatagcctcaagcggatttcccggcttctgcgggcgcagcacattgttttatttgttttgaaggctcagagttt

SEQ ID NO: 312848 - DNA, 122 bp, Homo sapiens
caaaaagccccggggagggcgggggcagccgtggccttgggggacagtgcgaaggcggcgcggggccagcgggactgacttccggctgtgggaaggcgccgtcccgggcggccagaggcggc

SEQ ID NO: 312849 - DNA, 122 bp, Homo sapiens
agccgaggcaggcaaaggtggaggcgctcacaggagcaagggaacgcccctgggcaaaatcgcccggcctccagcctgggcttgggcgtctccaggtcggcgggaagggctgaaacgcaagt

SEQ ID NO: 312850 - DNA, 122 bp, Homo sapiens
cgtgaaggaaactgacgaagccttcccgaaggctgatttctaactgcctgatgcttccaacgaggtggagctgtgggcacagactcccctgaaaagctgaagacacgcgcggagagtgggca

SEQ ID NO: 312851 - DNA, 122 bp, Homo sapiens
ttatcctcgctgatgctcttgcgagaagcccatggaaacaggactaaagtgttatctgctcgtgtcgtggttataacctcacctctccatagctgcgtgtggtcagcacgccggctggcgtg

SEQ ID NO: 312852 - DNA, 122 bp, Homo sapiens
cgcgcttagccgggtgggcagcatgttccgctccaagcgcaagaagctgcacatcactagcgaggacccaacttacaccgtgctctacctgggcaatgccaccaccatccaggcgcgcggcg

SEQ ID NO: 312853 - DNA, 122 bp, Homo sapiens
aagttttcattttttaaggtaagagaaattaaaacacgtttatatgttgatgtgagcaaacgtttaaaaggattaaaaaactgatgatgcaagaaagagaattactagaacaatgccttcca

SEQ ID NO: 312854 - DNA, 122 bp, Homo sapiens
cagccaacttatgtaaattctatcccaattttgggcatctattttgagcacagagagaagcggtatgaatcttgccctaaaattgtgctcaacagaaggggtgacgccatatggatgccatg

SEQ ID NO: 312855 - DNA, 122 bp, Homo sapiens
gatctaattactggtgcatgcagcccccagtcacgtacccactgtttgctcaatcgatcacgaccctctcaggtgcacccccttagagttgtgagcccttaaaaaggacaggaattgctcac

SEQ ID NO: 312856 - DNA, 122 bp, Homo sapiens
acactaactagcccaagtcattggcagggtgaagcagggagggaatccaattctttaattcggggtggccatctgagggaatgaaagccctagccaggacagtccctctcaggaagcattcc

SEQ ID NO: 312857 - DNA, 122 bp, Homo sapiens
cataatcaaaatggcttccagctggtcctcggtgggaacgatgaggctcgaggctttagacgtaagccataggccagggaaggcagacttactagaggaggaaggggattcctaaatcaaag

SEQ ID NO: 312858 - DNA, 122 bp, Homo sapiens
cccactttgagaagccagggatgtatgtgcccagggccagactgcccagctgggccatgccgggtttgacagccttaggtcttgctgccttttccatcgggatacactggcctcatcgccag

SEQ ID NO: 312859 - DNA, 122 bp, Homo sapiens
tataaataatgaaatttttatgcagtgtggtgtaggggcaaaaacaatagattcgaacaccgagattctagttttggctctgtgcttgcagctagttacatggcatccaggacaaaagtttg

SEQ ID NO: 312860 - DNA, 122 bp, Homo sapiens
gatccaggagcaaagtcaggcagagcccggtcgctgtcgcagcccagccaggtgtgcacacgctcagggcactgctgacacaccagccccctgccgtcccggccccttctggatttggggcg

SEQ ID NO: 312861 - DNA, 122 bp, Homo sapiens
atcaggcacaacactccctgtacctgactgagcttgcaattctagctctgtgatgagcgtcgctgttctagctctaagtgttggcctgggggcagcatcctgtgtctgtcagggggcaatgt

SEQ ID NO: 312862 - DNA, 122 bp, Homo sapiens
gaaggccgggacgggaccctctgcagaggccatgcgggactggggccacagtgggggccccggtgagggccgctgccgacaggggaatggcaggggtgcccgaagcacaagatggcagggac

SEQ ID NO: 312863 - DNA, 122 bp, Homo sapiens
gcatcatcagggttagttctcaggtctcctgactcctagcttctctagtttagtgattcacgttagcctttcaacagtttaccactcactttaatggtttttcctagctgtcttgacatgct

SEQ ID NO: 312864 - DNA, 122 bp, Homo sapiens
caggtgctaacaggctacacaagaattaagaatcaccccaaagaggtttgtaaccaaactcggaagacctaaggcacttgcagtaattgaaaacctgtggtcatccatgtatccaggagcca

SEQ ID NO: 312865 - DNA, 122 bp, Homo sapiens
atcagaaaggccatgagatcattcatttgtttattcaataaatgtgaatttatatacctacgttgggttagatactctactgagtgctaggtctatagaagtagtaaaacattgccctagtc

SEQ ID NO: 312866 - DNA, 122 bp, Homo sapiens
tggctgccctgccaacttcactaacttttctctcgccaggtgcccagtagtgaagctggacgggctgggggctccaggagagcccgcgcctgactctccagggctttccatggctgggagct

SEQ ID NO: 312867 - DNA, 122 bp, Homo sapiens
tgaggaggaagaggggagtgctagtacccggggctagtggaagagggtagggtgtgggcccggctcgttgtggggcagctgtttacttcactgcagcctgcagccctcccatttccctacag

SEQ ID NO: 312868 - DNA, 122 bp, Homo sapiens
gcctgaagctttgtcttaatgttagtgaaacgttggaggtagctagaaaccccagtccttcggtgagatagggaaagcagctttcctctgagcagaatttggcttccttctgtatttgagct

SEQ ID NO: 312869 - DNA, 122 bp, Homo sapiens
atagtttcatgccatgctcttgctttcccatgcaactgtaacgtttggagattcagacaacgaatgctcagaaggccagaacccctgtctctgcagcagtaagatttaagataactcagatt

SEQ ID NO: 312870 - DNA, 122 bp, Homo sapiens
ggaggaactcattggctcctggagagctgtcgttcatcgctggaggagcgctgataggctcgccctgtggaggaaggcgggatcttttgggcctaccgctgcccatactaatagagcaactg

SEQ ID NO: 312871 - DNA, 122 bp, Homo sapiens
tccccgggacaggatggccagccacagctggggccagtgtagccgggaaagcacacgcaacgaccacggacacagcgaccctgatcattgcagtcatctgggcaggaccccgaggctgaggg

SEQ ID NO: 312872 - DNA, 122 bp, Homo sapiens
tatgcagcatccaaggctggagtgattgggctgacccagaccgcagcccgggagcttggacggttggtcagatgcttgagggtgctggggagcacctggggggtctgagggaggtaccagca

SEQ ID NO: 312873 - DNA, 122 bp, Homo sapiens
cctgcatgcacagataataatccattgtcggtctccggcttcaaagacaaaaggcagccgcggagggaggagtcagcagagcctggagataacaggaccactttgcaaccggggagagtgca

SEQ ID NO: 312874 - DNA, 122 bp, Homo sapiens
cagcgacagagagggtcacgctgggaacagacagcagccttcctgaggccatcgaacatccgcagattttacacagacacgtgatcgtgggagcacagcgccaagagttccccggggtctcg

SEQ ID NO: 312875 - DNA, 122 bp, Homo sapiens
ggagtaggcttgatgctctgatgactcaaaaggccagagtgcatggaggatagtggccagcgaaagctgcagaggtagtcaggaagtgaagggcatgcagttcgaggtaggagtttgggttt

SEQ ID NO: 312876 - DNA, 122 bp, Homo sapiens
gtgcacttgatgctggtcgggacccaaagcgcccagccctccctgagacattgtgtgagtcgggctgggcctcaaacacggcccccactgccccaccccagccagggtggtgcttgtgtggg

SEQ ID NO: 312877 - DNA, 122 bp, Homo sapiens
gccagacctcagccccgccttccaggctagtccccgcccctcggacacacccacagacttcggccccgcgtcccagcactaggccccgcctgacacagccacggactgggccttgcctccca

SEQ ID NO: 312878 - DNA, 122 bp, Homo sapiens
ctggccccgccccgcttagcccgaggggcggggccagacgaagggaaccccagacagaggcggctgaaaggaggcaccagcagaaagggcagccccggctctgccagctgctgcggtgggag

SEQ ID NO: 312879 - DNA, 122 bp, Homo sapiens
cttacgaggcggcggtaccctgccgcgctccccgcccctgctcacttagggctgttcgggcgctacgcagctgcctgtgagcgcgagcctctttcggctttccagtttgtctcggtcctttg

SEQ ID NO: 312880 - DNA, 122 bp, Homo sapiens
cataggatttttttttttttttggaaatgaaatttctattgcttttaaaaaaatacaaatcgatttgtggtggttctgcgatgatcccacacaaagggatattctacatttcttttccctta

SEQ ID NO: 312881 - DNA, 122 bp, Homo sapiens
gccagaccccagacccacttctcccacgaggtgtaaagaaggacccctgagggtcttccacgtcaccttgtggagcctcgtggagtatggcagaaggaggagggcaatttgaggtcctgcag

SEQ ID NO: 312882 - DNA, 122 bp, Homo sapiens
ccccagcgccacacgccacgcggcactccaccccgtctgtctagccccagcaccacgcaccgagaccgagaccatgcaccatgcaggctggccggtgcccccatgcatgtctggtcccggga

SEQ ID NO: 312883 - DNA, 122 bp, Homo sapiens
ggcctagaagcctaggtggagttcttaggattttgtatgtagactatgaagttttggaaacgtttgagctggagagaagacattctgatcaaaggtggctttcaggaaaggctggtgcgaca

SEQ ID NO: 312884 - DNA, 122 bp, Homo sapiens
ggagcatcttcacctcgaatcagacatttctttacttctcctagccaataaagtatagagcgccagcaggatcttataagtttctcagcacgagagagaacgcatttactttataaggcagg

SEQ ID NO: 312885 - DNA, 122 bp, Homo sapiens
aatagcacactggccagtacacagcatccactcgggagtgacgcgcgtgtgaataacacacgggccagtacacagcatccactcaggagtgacgcaagtcacttttgcttatagagcaagtc

SEQ ID NO: 312886 - DNA, 122 bp, Homo sapiens
catttccaaagtgagggaatgtgagtcgttgaacctaaacttccatacaataaattgctgcgtgcgttagtttctagctcttaaccttaagtttctatgttgaaagaggaagtcgaatacgt

SEQ ID NO: 312887 - DNA, 122 bp, Homo sapiens
tgcggtgggctgcgcggtggatcagcctcagcagcccctgctccagcctgtagggtgaaccggccgctttcccagcaaaggagcaatcgagctgagggtagcgcctcctccgcaggaggggg

SEQ ID NO: 312888 - DNA, 122 bp, Homo sapiens
tacagatagagaaatggaagaagtaagatgtggtaaaagttagtagatgaagaagacacacgaactcctggctctccagaactcctggtagagtgagatgctatttggacagcttaatgaat

SEQ ID NO: 312889 - DNA, 122 bp, Homo sapiens
gggtggagacttgacatgcacaatcctaggcgcccaactgcacgttgtgagtgtgtgagtcgtgagtgggggtgggtgagatcccgggctgcaggcacatgtcgaggcatgtggcacctgga

SEQ ID NO: 312890 - DNA, 122 bp, Homo sapiens
aaaatgaaaccatccagccatcctcccccattttcattttcacaccaaagaatcccaccgcggcagaggaccaccgtctctgtttagacaatcggtgaagaatggatgacctcactttcccc

SEQ ID NO: 312891 - DNA, 122 bp, Homo sapiens
ctgcttggggtcatgaggggagccagcgtgggcaagggaggcctgcagtagggcacagcccgggggtcttgcctgagcccaggatcctgccggccctgtccttccatggttcggtggctggg

SEQ ID NO: 312892 - DNA, 122 bp, Homo sapiens
caggtcctcgccccacacggccacatcctcgcccagccccgcctccgcttagctccgccccgtcgcggctccgccccgcggtaaccacgcccacacaaccgtatccccgcccacagctggct

SEQ ID NO: 312893 - DNA, 122 bp, Homo sapiens
caaaataccccaattagtggtgtcatcctctctattccaagaattttctcttaagactcccgctctgtgcgtttgcttgggaatgcagagccctgttcctcatctccccatctatgctttct

SEQ ID NO: 312894 - DNA, 122 bp, Homo sapiens
ggcgggtggctcagtgcccagtggctcagtgctggtgcacggtgagggagacccagggttcggtgcctctcagcggggacccgcggctctcaccagtggtctcgcgtcactgcgcagcgcag

SEQ ID NO: 312895 - DNA, 122 bp, Homo sapiens
tggtactgttccttctcacatgaagaggctcactcacccaggtccatgacgctctctgggcggtaaaaccacacaggaaggctgtgcccggcctcgcactacccctgtctggggaggaagtg

SEQ ID NO: 312896 - DNA, 122 bp, Homo sapiens
ggtgtccggcccagggtctctccacccttgagtccctgatctgtgcagcctggcgcttgtcggctccactcagtgtggcgcaaccacatcccattcagccagaacgggacagagaatgggag

SEQ ID NO: 312897 - DNA, 122 bp, Homo sapiens
aggtgatctgcctgccttggcctctcaaagtgctgggattacaggcgtgagccactgcaccgagcccataatgacttttatatactataggtgttagtgatttgaatgtccccagttcattt

SEQ ID NO: 312898 - DNA, 122 bp, Homo sapiens
agcgcggacccctctacctgggccaccgccgctgagaggagccgggcgcgtcgccgccgccgccacctttataggcccggacctgctctggccccgcccccgacgcaggctccgcccggcct

SEQ ID NO: 312899 - DNA, 122 bp, Homo sapiens
aggagggagaatttgtgagtgggtgaatagagcagaaggtgactttactaacgtctttcgcgcattcattagccctcagcatgcttaaaggtgaagtttaaggatgattaaaggtgaggttt

SEQ ID NO: 312900 - DNA, 122 bp, Homo sapiens
cctcccctctgcctcagtgtgccaggcatcagcactcactcacagaggcaggctggatggcgggtgggacaacagcttccgcagcccctcctgttcccactttgcagggagaaaagaacacc

SEQ ID NO: 312901 - DNA, 122 bp, Homo sapiens
aattaatttagcttagctggagaactattaagaagtgtgaagacacaaataagaaacgaacgacttcattccataaatataagtaaaggaaattccagtgatggcttttgctgcacgaagag

SEQ ID NO: 312902 - DNA, 122 bp, Homo sapiens
aaggggctcaggccggggaggctgagtggtgcccggacttccccaggccagtcagggcagcgctgagcccgacgccctctcctccgccccctcctcactgcgaggcggctccaggctcgggc

SEQ ID NO: 312903 - DNA, 122 bp, Homo sapiens
agctgagtgtatctgctctggtggtggcggaggggagccccaaggcccagagagtgcggccgcacgccgtcgcggcgccccgatgcctccgccagccccgttgaagcggaagtggcgttcag

SEQ ID NO: 312904 - DNA, 122 bp, Homo sapiens
tcctggactcacacagaaactcagggctatggaatgaaggtaaatttaaaatactacaagcgggagtcacagatacattgtctgggaaagtgaaacttaggagctttgtgattcctgttgta

SEQ ID NO: 312905 - DNA, 122 bp, Homo sapiens
attgcactccagcctgggcaacaagagcgaaactccatctagaaaaaagcaaaacaaaaccggaaaccctggtccaagataagatgtgaattttgctgagaaaaactggaaaggttgaatgg

SEQ ID NO: 312906 - DNA, 122 bp, Homo sapiens
ccactcgtccctttaaattgagggcgcatgtagagtaagcaatctcatctgaacgccacccgcttggcaggcttttcctcacccccttattgtaaggcaccttttgctttactatttccccg

SEQ ID NO: 312907 - DNA, 122 bp, Homo sapiens
gaagggaggaagtggctggctgatggaagcgggggaggtgggaagggctcagcgatcacccgaaaatgccaattgtgataccggtggaggatgcttctcacaaggtgggagattaggaaaga

SEQ ID NO: 312908 - DNA, 122 bp, Homo sapiens
tgagcggcaacagggcagggctgcggccctctcatctttccctgccgcggccccggtcagcgccctcacctgctgcagggccagggctgtggtgctcctgacgctgtcgaacagaggcaggc

SEQ ID NO: 312909 - DNA, 122 bp, Homo sapiens
ccgccgatggggtcttagggcctgtctgtctgggctagagccggcccgggagcctgtttgcggggagtgcgggtcagcaaagctgtcacagaaaatcctcctccaaaggaaggaaaaaactg

SEQ ID NO: 312910 - DNA, 122 bp, Homo sapiens
ccctgcggctctgcgtgccctcagggaacagcaaggtccgagccggtgtcgtcgagggggcgacgggacggagggaggagcctgaggggtcccggtcgagggaggggaggagtgggcggggc

SEQ ID NO: 312911 - DNA, 122 bp, Homo sapiens
agcagaagccatgccgctaatggcagtcacctcggtggaagtagagcgggcctgtggcggcgtgaggcttttctgctctgcttctgtggaagtgattatccaataactagtaggaatcgggc

SEQ ID NO: 312912 - DNA, 122 bp, Homo sapiens
atgccccgcatgtccatgagctcgttgtcgtagccgtgccatccacgctgccaaccttcccgcctgccggtgctgttcatccaaaacggaagcatctctcgattctgaaaccaagcaaggca

SEQ ID NO: 312913 - DNA, 122 bp, Homo sapiens
gcacaagagagagctgacgctgccgaaggaggcagaaaagcagcccctgcagtcctgcgtcgaggccggagcagaccagcacctttgacagcctgaggagctgaaaacgctacctggtgggc

SEQ ID NO: 312914 - DNA, 122 bp, Homo sapiens
caggcctcactctgcatgtacacgcacacacacgtgcgtacatacacaccccttgcacgacgccagggcgagcagtgaacacacgtggagaggcagtgtagaaccccccagcctggctctat

SEQ ID NO: 312915 - DNA, 122 bp, Homo sapiens
atgaggagatggggcaggggccgggggaccaggccattactgagccttgaactcccaccccggggacacggggacattaaagctgcataggaagagggggcaggcggctgacgcaaggccgg

SEQ ID NO: 312916 - DNA, 122 bp, Homo sapiens
aattaaggatccgctaacatttgtgagtctacctccctgcattccccccacccccacccccgcccccttggcagaagggataaagatggtacctaaaaacaatgtgaagcggctgctaaatc

SEQ ID NO: 312917 - DNA, 122 bp, Homo sapiens
cccagtgcattaatcaccctttttatttagaagctgtaaaacagcacaacaggttccaggcgtaaatggtgttgatgtggaagagattgagtgatggtggtacccgcaggaagcaagtcctt

SEQ ID NO: 312918 - DNA, 122 bp, Homo sapiens
ttatgaaaaaagcaggggaagggcggaatggaattatgtggccttcgttatttatccccccggtcacgcgtggtcacttgcttgacctcagtgtgtcctcgataactttggatctgattcat

SEQ ID NO: 312919 - DNA, 122 bp, Homo sapiens
gcccccgaggccccgccccgggttaggttgaggccgccccactgcgccgagggccgccatcgctattgcggcattctccctcggctccggaggtaggggcaactcttctcttcctgtctggg

SEQ ID NO: 312920 - DNA, 122 bp, Homo sapiens
agaatggcagacaacatgtctttttagatcactggttttcaaataaaaaacaacaatactcgaggaattataactgaggaacaacacctgaagaatctaatccgtatgtggaccttattaag

SEQ ID NO: 312921 - DNA, 122 bp, Homo sapiens
ggcatgtactcttaacagtcactgtgccattgctccagtattcttgcttagtggcacaatcgccctctgggatccaggagatatgcgcagctggcttccctgcaactgccttgcatactgca

SEQ ID NO: 312922 - DNA, 122 bp, Homo sapiens
tcaaaccaccagaaggacctcaggtagctcttgagttatgttcactgctgtttgcatctccgtcacctctgacccctgcattccacccacagcacacacagatcaatacagctggccggaga

SEQ ID NO: 312923 - DNA, 122 bp, Homo sapiens
atctgaaggcttagctaaggctgaaggatctgctttaaagcttacacatgtggatgttagcgggtcttattttttagtcacatgggcctctccacagggctgctcacaatatggcagctagc

SEQ ID NO: 312924 - DNA, 122 bp, Homo sapiens
gcttcgatgccgcgcaggtgagccgggggctgaagccccgcccctgcctgggtaccgccccgcctctagcccagcccccagccccgcagtatgcccttctggacccccttgggccgccgggg

SEQ ID NO: 312925 - DNA, 122 bp, Homo sapiens
gaatgcagcagcggtagggaggggagcggccgctgcaatcagaggggggctgggtgacaccgagaagcctgctgcctgcagttttgctacccaaatgccataggaccatctctccttaccca

SEQ ID NO: 312926 - DNA, 122 bp, Homo sapiens
acgagaagggtactcaccatcgggcggggcggtggagctggcgtgcggatttcaggcaaacgtttacctttttgctgtctattgcaaccgcgccgggctgacttaagaagcaattctgtgct

SEQ ID NO: 312927 - DNA, 122 bp, Homo sapiens
aagtcccctcatataaccattgtaaagaaatgcacttgctttatatttatatagctgatgcggctaactttgctaaacctaaactggttgtgttgcaaaacagtgtaacatgactgagtcat

SEQ ID NO: 312928 - DNA, 122 bp, Homo sapiens
aggtcggacagctggagacagatcctcatcctgctgcccggaagcagcccctctgggcctcgctttcctgaccataaagtcgggatgatttcaaaatgtagaatcagggtttgcaccgtcag

SEQ ID NO: 312929 - DNA, 122 bp, Homo sapiens
tctgatgaggaagttagcaacattgagtctcacctcccgtggagcttataactacagtaacgttctaagaatattaccgttattatcaaacaaactcttttctgtttaagtaccaagtgtga

SEQ ID NO: 312930 - DNA, 122 bp, Homo sapiens
ggattacaggcgtgagccaccgcacccggccagcaacagctaactcttgagaggttaatacgttccacgctttgggctaagcaaattacatccattactttatgtaaacctcacaaagtctc

SEQ ID NO: 312931 - DNA, 122 bp, Homo sapiens
ggagacaaatgctggctcagccagcctgactccattccctggggggccgagagggatgtacgatgggtcttgtgagggtggagggtgcctgcctcgcccgagggatgctgtgcccatgcccc

SEQ ID NO: 312932 - DNA, 122 bp, Homo sapiens
aggatgaaaaccaggaaggacagcacgagagccagagctgggcgcggccggcaccaagaacgcctttggctctgctcattccaggcccgttctttgcacgaggccaagcagagcagatccag

SEQ ID NO: 312933 - DNA, 122 bp, Homo sapiens
gaaagtcggccacatgtcgggcacagtcgtagcaggggctccaggaggtgaaccaggtgacgcggtagcagcggccagggtctaggtcccagtccgagatgtagcggaggaagagcaattcc

SEQ ID NO: 312934 - DNA, 122 bp, Homo sapiens
atctcgatccctgttgcgtggccaatctttatcagcatctcggtcccattctctctgcctcgtatctctcctctctctctcgcgctctctgtcgtgttcatatcgatctcgttcttgaagcc

SEQ ID NO: 312935 - DNA, 122 bp, Homo sapiens
gaacggggggccgagggccgaggacggtaggagggccctggggcgccgtggtgcgctggtcggatccgtctgctctgctctgtccccgctcccggtctgggaaagatgctcgccaactgcgg

SEQ ID NO: 312936 - DNA, 122 bp, Homo sapiens
aaaagcaaacgtgtcagaaaggaaaactgggacgctactgccctctgctggacacacaggcgaagggcgattcctgcaccgtctttaccgcacctgggaggagttctgggcatagctgcgtg

SEQ ID NO: 312937 - DNA, 122 bp, Homo sapiens
cgggggacgacggcgcccacgcggcgggggcgtagggtacgcagcgcgtgtgcgcaggtccggtgcctcagtcccaggaaggcgccgcgctcacatagacccacagacacacacatcacccc

SEQ ID NO: 312938 - DNA, 122 bp, Homo sapiens
attttcaaagcgggctgccagccccgggccactgccacggccgccccgggcccccacccccggacccctcgtttatgcgctcggattacagcgcctgttgacgcactgtagcggccgcctgc

SEQ ID NO: 312939 - DNA, 122 bp, Homo sapiens
gccccgtcccctgggtcgcgtgtccagaccgagtgcgtcccgtgcccacgcaccatttcccgggtcacctgctcagaccaagtatgtcccaagcccgcgcccattccccggggtcacctgct

SEQ ID NO: 312940 - DNA, 122 bp, Homo sapiens
ggaattagatattctaattcagccagtttgggagggcccagggatgtggattttagcaaccggcctaagtgtttccatcataagtggcctctaaattaaacttttagagaagctgaaaggtt

SEQ ID NO: 312941 - DNA, 122 bp, Homo sapiens
aaaggccgtcagaattcaccccagccgcgggacagaagcgccttacgttttgggggcaggcgctattccctactcaagccagttatttccacccctacccagtgtgcagccagacccaagct

SEQ ID NO: 312942 - DNA, 122 bp, Homo sapiens
ctgcaagctgagccccactaatcctcaaccggtgtgatttctgattaggttctataaagacgccacccaataggttcaagccacaggagttaatgacaacacacatacacaagggctttagg

SEQ ID NO: 312943 - DNA, 122 bp, Homo sapiens
gcggcttgccactagtgtcaacaatcaaaacagtcgcaatgaataaatgatgagccacagcgttccaaccaccctcatccagcttggtctttccaaaaggcataggaaatcagcaagtttcc

SEQ ID NO: 312944 - DNA, 122 bp, Homo sapiens
ggggcgccccgtgctcgcctgggcaccccgggaacacgggacccgggagggggcggcccccgccttgctgggctggggtcccccgcctgtgccccctgcctcagggtttggaggagtgaaag

SEQ ID NO: 312945 - DNA, 122 bp, Homo sapiens
gcaaggcacccaatgagtattgctgagttacctttgttaaaaacctatctaggagccgggcgcggtggctcacgcctgtaatcccagcactttgggaggccgaggcgggcggatcacttgag

SEQ ID NO: 312946 - DNA, 122 bp, Homo sapiens
gtggggcagttgggtcaggccagctcgcatccccaggtcttcagaggagcagctgagccgcgcctaccgcctgctgatagcacagctgacccaggagcacgccgagatccgtctctcagcct

SEQ ID NO: 312947 - DNA, 122 bp, Homo sapiens
cgcaaagtgggcgagcagctcaaccttgtcgtccccttccaggtcaggggagcggggtcacgggccgggggtccgctctcgccgcaagccccctttttgcgggtggagccccgctgacccca

SEQ ID NO: 312948 - DNA, 122 bp, Homo sapiens
cagaaaagtggactaggaagcacaacacagaagcagcttcagcactggaaaatattcagtcgtaagaatcaccatgcattccctcagtgcttggcagccactttctcacttgagccccatac

SEQ ID NO: 312949 - DNA, 122 bp, Homo sapiens
aaccgccgggcgaagtgctgaggaggtgcgatgagaaaccaccaagtcagaaatcgtcagcgatgtggatgactcgggaaacttctctgtctgggtctgggagtatgaagatctataagaac

SEQ ID NO: 312950 - DNA, 122 bp, Homo sapiens
gatgagctaatgctttactgacttaaccatggcgcagcgggcagtgtggctcataagccacgaaccgggaactccactttgtggcaccgtgagattctccaggtaaatgcaaatctgaatcc

SEQ ID NO: 312951 - DNA, 122 bp, Homo sapiens
cgcccccacgctgtacagagtgcatgaggagccgccggaccaccggggaccgactgcctgcgtccagccgcgccccatccccgaggccgcctgtggccaccatgtcggccctctttccacca

SEQ ID NO: 312952 - DNA, 122 bp, Homo sapiens
tcggggtctcggagaaggggcgcaggtggccgccatcttggattgcgaactgggtcgctacgcttcacgccaggggcggagtggcggcccttctgttacccgccacacacgtcgccgctggg

SEQ ID NO: 312953 - DNA, 122 bp, Homo sapiens
cgtctgcggccgctgccagcggttctgacactgcaggaatgcgcggtctggggaaggctccgcactctggggaggggcacgagcggggtcgggggtaagtttttagggacaaagatgatctt

SEQ ID NO: 312954 - DNA, 122 bp, Homo sapiens
ctgttgggcgaggcccggtcccgtctctttcccaggcctgagattctcgcccggcacggccgccctgagcgccccggccacccccagccccggctcgcccctcaggccccgggcctcccctc

SEQ ID NO: 312955 - DNA, 122 bp, Homo sapiens
caggaggccaaacacatctcagtatgccccttacttactgacttttaaccagaattccttcgtaaggagtaagcagatttggaaaacaagaaacagacgactcattcctttattaccttcag

SEQ ID NO: 312956 - DNA, 122 bp, Homo sapiens
gggccacccaggcccagccccactgcccctcctggctctgcgtgggccttgttgggcctccggaaacaggagttgttggcaggaaaccacaggccacccgtcacaggggcaaagataaagct

SEQ ID NO: 312957 - DNA, 122 bp, Homo sapiens
ccccagtgtgcccaagaacagagcaggcctgaagatactcaaacagaaacaaacatgtgccgtgtcactgataattctgtgtagacacacacctgccagacactgctcatggcactccctag

SEQ ID NO: 312958 - DNA, 122 bp, Homo sapiens
gcaaagaagcagccattctgaaccttccttcaacagcttctgtccctgaagtgaggagttcgggaaggcatctggtcttaggatgtggattccaagtgggaaggtgaatggtgagcccctgc

SEQ ID NO: 312959 - DNA, 122 bp, Homo sapiens
tgactccgaggcgcctgcttaatggtccactttaaggaccagggatgcacttggcattttcgttacttcattcggaatgagctgggaatcgctcttcctccttattcccttccgtgggaggg

SEQ ID NO: 312960 - DNA, 122 bp, Homo sapiens
cgtcttgaccacctgtaacagggcaatgaacttggacaagcccttcagagaaagcagagccggggccttgcccagcccctagcaggtgtgagtcccggcacctggggaagctaaggcacagc

SEQ ID NO: 312961 - DNA, 122 bp, Homo sapiens
ttccttcctctcatggccagcaatgctagttttccattgaagacagcaatgcgccgggcacggtggctcacacctgtaatcccagcactttgggaggcagaggcgggcagatcacctgaagt

SEQ ID NO: 312962 - DNA, 122 bp, Homo sapiens
tgtgtggcttacaatcatagagagggcgcgctgcaaatgaaaattaccagcgcccgctctcgccgcaatccttcctcggtgcagtccaacctgctactgctgaatttttcttgacaaatatt

SEQ ID NO: 312963 - DNA, 122 bp, Homo sapiens
gttatggagggtgccaatgggtttctgggcagctcacttaaaagggcatccaggggcaggcgggcctgggcagcaggaggtgaagccctcattccagggtgcctgagaggcacttcctcctc

SEQ ID NO: 312964 - DNA, 122 bp, Homo sapiens
ccgggggcttcgggcaaaaatggagagcaggcagaggtcacatcctcctcctcttcctcacgctcccgggctgcgtgcccacaggggcacagccctgtgcgcggtgccaccgggggccatca

SEQ ID NO: 312965 - DNA, 122 bp, Homo sapiens
agtcaagtacagacatgtcccaggaaagcagaaccagaggagaagcagaccccgggcactcgcaggactatttgactcactggagaattcccttctgccagggcaggcttggctcactgctc

SEQ ID NO: 312966 - DNA, 122 bp, Homo sapiens
atccagtaacagagattaaagctcaaagcttcaggtgtggagacctgcatgagtatcaaccggaagcattttagaaatgcaaattcctgggctccccctaaaacttactgaatcagaaagtc

SEQ ID NO: 312967 - DNA, 122 bp, Homo sapiens
ctttccgaagctcccactgtctctctccgtccctctgtgtctctacctgcccacacgccccggtcctgatggctccagtctcccctgcaggtcctagagcagctccagcaggatggcggctc

SEQ ID NO: 312968 - DNA, 122 bp, Homo sapiens
gcccaggagcctccatccgaaatccaaagaccgcggaggaggacggtttaaggaacaggacgaatgtgataatattggcatctaaccttctagtgtttgagtaattcgttgcttagctactt

SEQ ID NO: 312969 - DNA, 122 bp, Homo sapiens
gatcagaggcggtggcagcggcggcggcggcgtccagccagagccctgtggaagcggcggcgacacttgggctgggcagtgtctctgatgcctcccagcgccagcgactgctcttattcccg

SEQ ID NO: 312970 - DNA, 122 bp, Homo sapiens
aaaacagaaacgtgtggtcttgcctttggtttttccgcccaaactgccttttggctttgccgtgtggggaccgggcacctcgactgtcctctgtgtcctgtgatggggcaggttacgccatg

SEQ ID NO: 312971 - DNA, 122 bp, Homo sapiens
gacttagtttcttgagctgatgctaaataaaatgagatcaataggaatattccaggaggtcgtgagaagtttttagaaaggatggcatctacatatatatggagctctgaaaactgttggag

SEQ ID NO: 312972 - DNA, 122 bp, Homo sapiens
ccaccttttggaatcagagtatagatatctgcagatggccagtggaatggtgcagggtcccgggccctgcatttatacattgcatgtgataactctttattttcctgaatctttcctctaaa

SEQ ID NO: 312973 - DNA, 122 bp, Homo sapiens
agatgctgaaaaagccagagcttgactctgaagcttgtcctctgcagtgttgcatcaacccgaaggaaggagcactttgtaaaatttgttctcccagagaccaagactgccccgtattctgg

SEQ ID NO: 312974 - DNA, 122 bp, Homo sapiens
aagtatgtttgaggtactcatctggccttttcattttacagatgaggaaatacccacaggcggttgagcaaattcctgaagagcatacaacttgtaagatgatgacttcaaagctctttgag

SEQ ID NO: 312975 - DNA, 122 bp, Homo sapiens
attgggtatattaaaccctgttgggaacgtttcggctccttggccgccagcgaaatgagacggggatggaagttggagttgagacctgggaagtcaacgtgggaaggatctcagcattaatc

SEQ ID NO: 312976 - DNA, 122 bp, Homo sapiens
aactgtcctgggggaccaagcaggagcttaagatgggcaagacctggggccctgggcagacgcatcaaagcaggcagaagcaggcatggtgagcaggccgccgtgcatgcctggggcaggcg

SEQ ID NO: 312977 - DNA, 122 bp, Homo sapiens
ggaggtcaaggctgtagtcagtgtgccactgcactcccagcctgggtgagagcaagaccccgtctccaaaaaaaatcaggaccacgtgtcactaaattctgagtaccagtcaagaggctcaa

SEQ ID NO: 312978 - DNA, 122 bp, Homo sapiens
gctcttcgaatcggccgacgcggacggcaacggggccatcaccttcgaggagctccgggacgagctgcagcgcttccccggagtcatggagaacctgaccatcaggtacggccgggtctcgg

SEQ ID NO: 312979 - DNA, 122 bp, Homo sapiens
gctcccgccagccgtgggattaggcttcgccggctacgattgcggtgagacgctggccagcggccggggctcgcgggcaggagcgggctgggctggggccgatctggcacaaacgacagacc

SEQ ID NO: 312980 - DNA, 122 bp, Homo sapiens
aagagttcttaggggaaagatctaaagtcctgtaaattacatctttaactactcactaggcgcaggtggaaaagcagtaagagctaaaattgttaagttaatgttcatgcatttacatggat

SEQ ID NO: 312981 - DNA, 122 bp, Homo sapiens
ttggaacgaagacggagaatagaggagacagtggctgagggcaaaggtatgtctggcccgcggacaggtagaagaggttgcaaatcaagcacagtctcttcgctgtacagattcgaaaaata

SEQ ID NO: 312982 - DNA, 122 bp, Homo sapiens
gatccagtaaactgctgtccacttcggctcctcaacggcctctaagcttaagagggagcacgcaagccaagcaaaggcggcagggaagacggagaagaaaccacccgtgggccctggctctg

SEQ ID NO: 312983 - DNA, 122 bp, Homo sapiens
tagagaaatcaagcagtgagctggccacttgtagtgcttgctgttgccaaggcagtctttcgtgtctttactcagtaaacacatatcaggcatagggaatacaaaaacaaataatatatgtc

SEQ ID NO: 312984 - DNA, 122 bp, Homo sapiens
tgcgccccctcagctttgcgctgaaggtcgctttaccggaccccacttcgccctaccaggcgcaggatgagcgtctctgttcttttaatgtggcgtcccccacaggccaccgtaccaggccg

SEQ ID NO: 312985 - DNA, 122 bp, Homo sapiens
cacatccttgctggagcagaggcggctgtgtgggagccgaggcgagtgcgacacatgggccgtggcccactcagcttcccctcagccaggaggccaggaggcggggacagaagcacacacac

SEQ ID NO: 312986 - DNA, 122 bp, Homo sapiens
tatgaaaaaaagaaaaaaagacatgatatagttctatgccatcgtaggctgcactgtcaccgttctagaccggctgactgtaggtcacatgggagtgtccttacagaaattagtgacttacc

SEQ ID NO: 312987 - DNA, 122 bp, Homo sapiens
tgaccgtgcttatcccgttgtcctgcccatcagaacggagatggcgggagttttcccttccgcccccggtctgctaagacactgttagaggttacaagtaaccccgcctcttcttctccctc

SEQ ID NO: 312988 - DNA, 122 bp, Homo sapiens
tttaagccactagaagctcaccgtgagtccattcacagggccagagttccaagtgtgcggcgtgggcggggcctgcagaaagggacggggcctgcagaaagggacggggctggcaaaggcct

SEQ ID NO: 312989 - DNA, 122 bp, Homo sapiens
gagagccgccgactgccctccttcactcgctgggaagaggaaagtgccgctcggcgtccccgaaaccctcgattacccccatcaggccgacccggcgcactcgccctccctcgcacacacgc

SEQ ID NO: 312990 - DNA, 122 bp, Homo sapiens
cgtgaccacaaccacagagacgagacccacgggagcagtgaccacagacacagggagtcccggcaccgttcccgggacgtggatcgagagcaggaccacaacgagtgcaacaagcagcgcag

SEQ ID NO: 312991 - DNA, 122 bp, Homo sapiens
ctcagccccggctgctcccagggcctgagagtggagctacagtagggatcggccttcacccggtcccgggcggctccgcggggaaggcgcagcccagggcgtgttcttccagtcttgggcgg

SEQ ID NO: 312992 - DNA, 122 bp, Homo sapiens
tccaagagacaggggtggaactcacttcaaggattcagggcggcgaggatcctctcccaccggcgaagcggacaccgcggtggggctgcgagtacccagttgttgtttttttctccttccct

SEQ ID NO: 312993 - DNA, 122 bp, Homo sapiens
agcgatttcacggggccgacacgccgtccacgcgcagttctcagtgacagacgcagcgctcggccagggctgtgcttccccacacctgcaggcagcacggggttgcattaaacagacatcac

SEQ ID NO: 312994 - DNA, 122 bp, Homo sapiens
gtctgactcagaccttcaggagccatgaaattttcctgttgggatgagaggaagcgctggcggtcgtttcggcagcttaatgaaaccagaaatagataagcacgagtgaggggtgatgtccg

SEQ ID NO: 312995 - DNA, 122 bp, Homo sapiens
gtgcgaaggcatttacctccctggcactttgatccaagttccctattttcccctactggtcgatcgaggttgggaacagttgctctaacctgggaagcacccgccacgatccagcagggcgc

SEQ ID NO: 312996 - DNA, 122 bp, Homo sapiens
gccctttaaagcgacttggctcgtctccagatctaaaggtgggcgagtctgctggacggacgctgggaccgtcttgcaggggatgtggaatagctgcccccacccccgaccacctggcctcg

SEQ ID NO: 312997 - DNA, 122 bp, Homo sapiens
ctagtttgcaaaaggccacaggcctagaccggccccacgtgagtgcagtggcagaaggcccgaggcagtatcccgggcccgagtgtggacattttcctgcctgttggccctagtgggctgac

SEQ ID NO: 312998 - DNA, 122 bp, Homo sapiens
catcctggtgcatggaagatgctcactatacatgcttttttctttctttttttctttattcggataatataacttctttctttaaagtttcgcttagtattttgttgtggtaaaatgcacat

SEQ ID NO: 312999 - DNA, 122 bp, Homo sapiens
ctccgagtggctggtctcccagagctgacagctcttcgcttggggaataattaattccaccgcccaaaaacccagggctgcaagttgccatgttacttgcgagattaatacaagcagctaat

SEQ ID NO: 313000 - DNA, 122 bp, Homo sapiens
tcaggaagaagaaacggtcttgacgtgtgtttttactacctgtggagacttctcccaaaccgctcacttcttcggaaggacataaaactcagaatacgcctggttccccagcacagcctgtc

SEQ ID NO: 313001 - DNA, 122 bp, Homo sapiens
tctcactcttagtcactctctgcctctttttctcaagtccttttgtttctcgcacatgcccgtgctctccctctcaggctcattttctctcttccttcccctcttcctctcctggcttttgg

SEQ ID NO: 313002 - DNA, 122 bp, Homo sapiens
gagccaccgggcccagccctgcttatttatatcaatatgcacccatgggtattgattttccggctgctcggattgttccagcgttgaccgtcattgctctttcaggtgtttcctgagccttt

SEQ ID NO: 313003 - DNA, 122 bp, Homo sapiens
gaactgcataaaaggccaccattttgacagaagaactgaaaacgtcaaattatttcgagacgtacttgttacataatctgtttctcccaactaccaagtgtgacgcaaagacacacttttaa

SEQ ID NO: 313004 - DNA, 122 bp, Homo sapiens
ggtccaagtctgtctgtctttctcttgccatggtttcagaagaagcagatcttggccggacgtggtagctcacacctgtaatcccagcactttgggaggctgagacgggaggattgctcgag

SEQ ID NO: 313005 - DNA, 122 bp, Homo sapiens
cagctcttatttgtaaatagggcaggtcccctgtataaagctggtgttattattcacacccgtagaacaaacacctccacccccctgttgttgtcttaaaaaactccagctgctcatgaata

SEQ ID NO: 313006 - DNA, 122 bp, Homo sapiens
cccttaattttaacagctagggaaaatgagaattagaggagtgaagtgactttgccaaaacgatacagctagtgagggatggagctaaggatcaatcaatcatgaatcttctgatcaaaatt

SEQ ID NO: 313007 - DNA, 122 bp, Homo sapiens
tatcctcacgtttccggagattgacgttgctcttgtgttctcgcgagaggcgggaaagggcgcagggtttgaaacatggcggacgacgtagaccaggtaagtgtattttaaggaggtcgctc

SEQ ID NO: 313008 - DNA, 122 bp, Homo sapiens
agaggctctcagaaatacctcattttttaaaaaatcaatcaacagaacaaaataaaaacccgtgtaactctgcatttccatttgaccctggaatttatacctcctgttttttcctgaatatt

SEQ ID NO: 313009 - DNA, 122 bp, Homo sapiens
ctcgggcacgtagctggtgccgctgctgatcaggtagtctgccaggctgccgtgacaccccgcgacccgacataaacacccgagtggccacctgccgcaggcacactgccactgcgggccgg

SEQ ID NO: 313010 - DNA, 122 bp, Homo sapiens
tacttcatttacactgattcactgaagtaacaacctcaaaacttcattaccatccataggcgtagcctcagatgatgttgccagggctctttaccaacatctcctgactgtttttccatttt

SEQ ID NO: 313011 - DNA, 122 bp, Homo sapiens
ccgcaccaccctgccctgggctcaggcctaccgttgggtgcggggtacgtgaggggcaggcgggtctgaggcacctcaccaggctcctcagagccactcagcccgggcacctcacgcagcgg

SEQ ID NO: 313012 - DNA, 122 bp, Homo sapiens
tcctgtctcttaggcaaggttggttccaagaatatgctggttacacaacagcatcaaatccgtgttacttctggttctcagctctaatttttgaagggactcctagaattttaagaggtaat

SEQ ID NO: 313013 - DNA, 122 bp, Homo sapiens
acccactcattagctccaaatggcacaggctctgagtctgacctggattacagttggtcccgccactttcttgcagtttaacattggtcaagtaacttaacctctccaagccagggtctcct

SEQ ID NO: 313014 - DNA, 122 bp, Homo sapiens
ccgtccactgaagtcacctccaccctcttattcctggcattggggtaatttttctgtggacgtttaatttgcagcaacatcagaagcagagccaggtacctctctggctgctgctgagctcc

SEQ ID NO: 313015 - DNA, 122 bp, Homo sapiens
agtaaaagcctttgatcaattggaaggaatcggcttcgtctatgcacctcctttttcccccggggggaaggaaaaagaggaagtgccgaaacccgggatcgaaccagggacctttagatctt

SEQ ID NO: 313016 - DNA, 122 bp, Homo sapiens
ggatccatgggtggggtgacagcttgggggcatccttgaaaggacttgagtatttgagaccgtgaaagagactcgtggggggtggagggcgtgtagggagtggttcccacagcccaactcgg

SEQ ID NO: 313017 - DNA, 122 bp, Homo sapiens
aactattctccacagtttaatgatacaacacataccagcaagtgtttcttggaaaataaccggtactgtaactctaaagatttaaatttctactcccagcttttccacaaaaccagtttaga

SEQ ID NO: 313018 - DNA, 122 bp, Homo sapiens
cctatttaaagatggaaaaactaaggcagaaaagttaatagtttgccaaaatgaaggatacgttcccttgtgaggagtggaagtaccctcatccagtcaggctagtgagcatgtggtataaa

SEQ ID NO: 313019 - DNA, 122 bp, Homo sapiens
ccagcacctagctcattatctggcacagagattaaaaaactcattgcaggacgggacccacgtgatggcgcaaaatgtcagagggttgccagaatacccaggcatcaagataaatgtcattt

SEQ ID NO: 313020 - DNA, 122 bp, Homo sapiens
caaaacagatcatcgccgcacaagcagggggcgagggcgggcgggctcagcctggcctgccgtgctcagttgatctggcgacaggcctcgaaggtccacttggtggcccctccgtagatctc

SEQ ID NO: 313021 - DNA, 122 bp, Homo sapiens
acgtgagaccagggcacgccgggaaatgtagttctagttgccgctaatcacgtgtggcgtcgaagcatgccggaaactgtagtctctgggtttaaagccgctttcgttctatcgcgcgattc

SEQ ID NO: 313022 - DNA, 122 bp, Homo sapiens
atattcataccgccagcccgggccactccacactcccccgtggcacctggtactgaccaccggaggcagatggcgcactctatggatgcagattttgctggctgcctgctttcctctgctgt

SEQ ID NO: 313023 - DNA, 122 bp, Homo sapiens
actgactactaaatgaggctgtactgccaaaacacaattccaagagagaaggaatctgcgcgtggaaagcccaggccccttgcccactgcgaggagccagaacgtccctccacagccgcgcc

SEQ ID NO: 313024 - DNA, 122 bp, Homo sapiens
ccgaccgacagtgcacgccgcggccgccggaagtgacagcgcctgtcgttggggagctcccgccccttccgcctcggcgccccgcccaggcctcgcccctaggtgttcccgcccctccccct

SEQ ID NO: 313025 - DNA, 122 bp, Homo sapiens
cggagggtgcgccccgtccccgcactcaccgtgaaggtctgcagcttcactcctcagcggcgagaccacgaacccaccaggaggatcccaactccagacgtgccgccttaagagctgtgaca

SEQ ID NO: 313026 - DNA, 122 bp, Homo sapiens
atggacatcctgagactgcaggcagcccccacaggaagtgagaggcagccacacacacctcggcttgcattctgggttgcgaaagaaaccatgtggggactgtggagacctcactcaccctc

SEQ ID NO: 313027 - DNA, 122 bp, Homo sapiens
gtgtctgctttgatccatgcatttagatggaaacataaatatagccatcacttattctcccggccgccaggatgggtgtcctgctgcatcactccgcttcccacccagccaggctaatgcat

SEQ ID NO: 313028 - DNA, 122 bp, Homo sapiens
caggacgcccaccccatagttctggagcggtgcgtaccttggccactacacggaattcaccggcccacggccacttcccgtttcttttcccggaggaaaagaagagcggatgtctagtctcc

SEQ ID NO: 313029 - DNA, 122 bp, Homo sapiens
gcgcggacagttttgggactagccgctcatctgctctcgatgtgctgaaatctgcgcctccggtggctccgcagagcagcttcccaggtcgccacagcctatgagacactcccagcagctcc

SEQ ID NO: 313030 - DNA, 122 bp, Homo sapiens
atggcatcagttatttatgccaaatgttataggcctcaggagaatgtgatcttcctgcagcgaaagactgcccgtccattttattaataaggcctaaggggcattaaatattgtaagcaatc

SEQ ID NO: 313031 - DNA, 122 bp, Homo sapiens
ccccgctccccgcttagccccacagtgctccgtttggcatcactgatcagccgcagggctcgcccgaagtctgcactgacaccggggctcaccccaggtgtgccacgtgggttctggtgcac

SEQ ID NO: 313032 - DNA, 122 bp, Homo sapiens
agcgctggctccctgacccagagcacacttgaactgaatgttccaggtctgagcctcagccgagcgtggctgggcgaaatggaagcctttctctcctgctgcctctcctgctgcattttacc

SEQ ID NO: 313033 - DNA, 122 bp, Homo sapiens
ggaggacacgcccgcctctgagccggcagcggccttgcccaggaagagcgggagggcagccgccaccaggagccggattccccgccccattggcctccgcatgcccatgcctgttgcagccc

SEQ ID NO: 313034 - DNA, 122 bp, Homo sapiens
tctaggccaacaacggtgatgggagtgtccctttcaggccagccatctcgtagttagaaacgtctctctaggtagctggagactcgcgggggaggctaaacccgagtggagaaggagacctg

SEQ ID NO: 313035 - DNA, 122 bp, Homo sapiens
gataattcacaagatggatcatgcagagttggccgtatttaacaaaagtccttgaagctccggactatgttcccaaaatgatttcaagtagccaatggccaacctcctctctgcatctaaat

SEQ ID NO: 313036 - DNA, 122 bp, Homo sapiens
ccagggccccgggagggaggggctcggacgggccttagaaactcaccaagaactaacacgcgcagcccggcagtcccgctgcccactgcggcggcgagcatggacgcggtgttgctggagca

SEQ ID NO: 313037 - DNA, 122 bp, Homo sapiens
gctccgggccacctgtctgggcagacggagctggaaggttcgcgacttatgggcttgtcccggggcggaccccgcgcgggctcgggaacgtgcatgcgagggtgcatgtgttaggagtgtag

SEQ ID NO: 313038 - DNA, 122 bp, Homo sapiens
ctctctcaaagacctcattctctgctttcagtatgtggagaacaacaagaatgctgacaacgattggttccgactggagtccaacaaggaaggaactcggtaggtagaccctcttgggaggt

SEQ ID NO: 313039 - DNA, 122 bp, Homo sapiens
ccttcagcggcgcgagcccaagccttctccacctcctcttctctcctccccctccctccccgcccgcacggccaccaaccgccgccaaagcagccgccgccagcacccccaccctacactcc

SEQ ID NO: 313040 - DNA, 122 bp, Homo sapiens
cgagggtccgcctgcccagggccgggcctcgctgcaggcagctgtgggcgccactgtgtgcgcatacctgccccgacagccggacggtcggccgagcccagaccgcggcagccagggtcagg

SEQ ID NO: 313041 - DNA, 122 bp, Homo sapiens
cttctgctctgcatcactggagctgggaggctgcaagctcctttcccactctcctctgcccgttggcttccagtgaggctcctgcagcgatggcgttggtgggagatgccaggcgaggaatt

SEQ ID NO: 313042 - DNA, 122 bp, Homo sapiens
cttgaacagatttctttcacaccagtgccctggtattactggaaaaaagtacattaattacgggagtaaagcacaataagaaaacatttacaaggagtccagccctcatccatcatgccttt

SEQ ID NO: 313043 - DNA, 122 bp, Homo sapiens
ggcggagggcgtgcggcgcgctgggttagttacctggcgctgggcggggcaagcgggaggcgggggcggggccggggtgacatctcaggctgtgattgggccgcgccgcgcctgtctccatg

SEQ ID NO: 313044 - DNA, 122 bp, Homo sapiens
gatgactgtgggcctctttcgggcattgtagcaggcccccatttcatttcatgatgacctcggggtgctgggacaggaatgtgattgcgggtccacgtgcttctgcaactcctcagactgac

SEQ ID NO: 313045 - DNA, 122 bp, Homo sapiens
ggctcagagtcgttctttgtattccgcagtccaacctggaaagcatatgctgcacctctgcgccggttaaaatcacccccagacagattcgagctgccgcctcttcgcctttcattctgtcg

SEQ ID NO: 313046 - DNA, 122 bp, Homo sapiens
tttgactcagcgagctcaaagtgggagggcaggagagctcgctttttaaaagatcgacagcgccatctaccggtaagagcgcccaactcccttgctaaggatgatatcattatgctagggtg

SEQ ID NO: 313047 - DNA, 122 bp, Homo sapiens
gtccccagcctgtgaccaggtggggaatgtctaggtactgagaacttctatagacaagtacgctagactcagagtccaaagtaacatctcactctcttcctagccctcatctattcccaatg

SEQ ID NO: 313048 - DNA, 122 bp, Homo sapiens
actggaaaagatgcctgcccctgctgccacatatgaaagagtagtttacaaaaacccttccgagtaccactacatgaaagtctgcctgtaagtttagtttcctaagttctattttagattac

SEQ ID NO: 313049 - DNA, 122 bp, Homo sapiens
gcgtcgtcactaacttgttcacggtcacttcagatcacaatcagtgcaagttacttcaatcgatcatgcaaggttactagttcagtcacctccattcattatccctactggtccttatgaca

SEQ ID NO: 313050 - DNA, 122 bp, Homo sapiens
tcccacaaccatattcccacctattccctaacgacaacaaacttttaaggtccaggttaccgccgcgtctccctagcaaccgtgccctttaatggttgccggaagaggctataatcacgtgc

SEQ ID NO: 313051 - DNA, 122 bp, Homo sapiens
cgagtctcttaaagctgctcagagacctgtaagctcgccggcttcggggcaagttccttccgtttgaccggccaacagtgacattcgtggacccaaaggaccctggacagacccctgaggga

SEQ ID NO: 313052 - DNA, 122 bp, Homo sapiens
ttttttaagaaaaacctatagatgaaaaattactaatgaaactgtgtgtacgtgtctgtgcgtgcaacataaaaatacagtagcacctaaggagcttgaatcttggttcctgtaaaatttca

SEQ ID NO: 313053 - DNA, 122 bp, Homo sapiens
caagagcatcgagctagagtcggtgcgcggcaccaaggagtccctggagcggcagctcagcgacatcgaggagcgccacaaccacgacctcagcagctaccaggtaggaaccgcggctgcgc

SEQ ID NO: 313054 - DNA, 122 bp, Homo sapiens
taccacaccactgaagcgccacacaaaatcaccactgctgtgttttaccatgcatgatggcggatactactattttactattcattacctgaggtactgatcagtttaatgtggatgttttt

SEQ ID NO: 313055 - DNA, 122 bp, Homo sapiens
gggctaaaggatttcactcttatccctttgtaccagatcctgccttgaggtaacctgagacggctggcttttcaaatcctgtgtgttctttcctagctggaagtttgttcttcctttgtttt

SEQ ID NO: 313056 - DNA, 122 bp, Homo sapiens
gcgactcggtggcctggcagatcaagtgactcattttgtacaagttatttttgagtgcctcgaaggctggtgaggaagctgcctgacagcagcggtaattagcctccctgcacagtgcgccc

SEQ ID NO: 313057 - DNA, 122 bp, Homo sapiens
ctgcccacgctctccatccgtcctcccggccttatcagacctccgttctcccgcactcttcgggcagggtccctaataagctcaggctgaaagaacgtttgccacctcccccaccctcgttg

SEQ ID NO: 313058 - DNA, 122 bp, Homo sapiens
ccaggagtgcactctgacagctgtgcacgacgcaagccttgaggacttgatcttcccaagcgaaattgtgggcaagagaattcacgtgaactggatggcagccggctcataaaggttcgttt

SEQ ID NO: 313059 - DNA, 122 bp, Homo sapiens
ccttcgactacccagaactcctgggcttcctagccatggggtccaaagctgggactgccccgaccccagtggagggtcccagaacaatttggatgacgtcagaatgaggccatgggactagg

SEQ ID NO: 313060 - DNA, 122 bp, Homo sapiens
aatggggccagagggctcccgggctgggcaggtaaggagcgctggtattgggggcgcaggcgccggggtgagaggcctgatagcagacggctgcagctgtgcgggcccaggctccctaggga

SEQ ID NO: 313061 - DNA, 122 bp, Homo sapiens
tgagaaggagcgtgtaacacaagctgacaggagaatcgaaccggctcaggctgagtttctcggtcctcatgggatgggcgaagcgcccccggccaggttagagccctcctagctccgtccgc

SEQ ID NO: 313062 - DNA, 122 bp, Homo sapiens
ttcttccactcacaagtggtcaagctggtacacatggtcctgctggcagaggtggcagttcgagctcagccctggtgagaacacagaaagagcacggataggtacgggacaattcagtgtct

SEQ ID NO: 313063 - DNA, 122 bp, Homo sapiens
ttcccaaaggcagtggtggagctgacagagtagcatggagcctcgtcctgatgtattgtgcggaagtggcagcagttcacattcattcagtttgtcagcataggatcagttccttcttgact

SEQ ID NO: 313064 - DNA, 122 bp, Homo sapiens
cgcggctgctgctgcggcggcggcggcggtggtggcggcggtggggtggcgggagcggagcggcatggccacggcggcttctaacccctacctgccggggaacagcctgctcgcggccggct

SEQ ID NO: 313065 - DNA, 122 bp, Homo sapiens
taaagctgctggcacagaggaggtggcgcctgctgagaccttttccctgaagagtctgggcggttcggcgaggcccccagcatgccttttctccgcagaacggccttggccaggtcccggtg

SEQ ID NO: 313066 - DNA, 122 bp, Homo sapiens
gacggcaactagccggcgcccgcgcgggcgaccccagcccggagccaccaccgccgcggccgaagcgagcgccacctcctcacactcaccacggcgctccatcccgcgtcccggacgcggac

SEQ ID NO: 313067 - DNA, 122 bp, Homo sapiens
actgcctggcaagcccagtatcacttgtttgggccctagcgggactccaaggcagccacacgcccctcctggaagggtgtgtgcgtgtgagtgtgtgcgagtgtgtgggctggtgtgtgaat

SEQ ID NO: 313068 - DNA, 122 bp, Homo sapiens
tggaaactctccagatcccccagcttagagccaagattctgatcccacttcctggcgagtcgggtagcagtggacacctctatgagaagtaaactttctttgtaaaggcaggagggattaca

SEQ ID NO: 313069 - DNA, 122 bp, Homo sapiens
tagctggccgcccccagccctgccaaggcaccaacgcaagaaagccgggggagcctcggtcgcattgctggaagatcgtctaaacatccccgctgctcggccgctaggccggcaggtgttcg

SEQ ID NO: 313070 - DNA, 122 bp, Homo sapiens
taagtaacatagttgggatgcaatcccagagagtctgcctccacggtctttgcttttgatcgctatgctatataggggataagtgctctgaaaggattacctagaggctgctgtgagggcac

SEQ ID NO: 313071 - DNA, 122 bp, Homo sapiens
ggacagggccaccagagggctccttagtctagcggtgacgccagcgtctgggaagacgcccgtcaccaagcggatcatggtccagcagtagcaaaaggtgtcaagaaacaacacccgctact

SEQ ID NO: 313072 - DNA, 122 bp, Homo sapiens
agccctcactgcctgaccctcccctcgccctgcagacagaggctaaaaataccctccccacgtggccaccagaccagccctgccccgccctgcaggcctccgtgtcccctggctgccggcta

SEQ ID NO: 313073 - DNA, 122 bp, Homo sapiens
ggctgcctagcacctggaagctggggccacggttcctgggctgctcacggccccggaggccgagctgttgcctctggagaagaaaacctttgtggcgcggcccgtccccttttccgacccgc

SEQ ID NO: 313074 - DNA, 122 bp, Homo sapiens
gctcgccacctctcacggttcagtacccacgcttcgaacgagggatgggagcaggcgccacggccggcaccccagagccctgctgccccttagttcgagcggccatcctcctgtggggcttg

SEQ ID NO: 313075 - DNA, 122 bp, Homo sapiens
cctgcctattcctaaacatctgtccccacctcaatcatctaggagtcccacgtgccttaccggaacagcaaactgacctacctgctgcagaactctctgggtggtagtgctaagatgtgagt

SEQ ID NO: 313076 - DNA, 122 bp, Homo sapiens
cccacgtcgccccacaaggctcggcttccacccgcctcggctgccgccttctcctcctcacgaccctcccaagatgctacctggtttacgagaggttccgggaccaccaacacaccggctac

SEQ ID NO: 313077 - DNA, 122 bp, Homo sapiens
gataccagcgggtgacagcattgtgacaagcgcgtggagccatttcctgattgttttagtcgatacagacttagggaggaaaccaacactgacacaaaccaattgtgccctgatcgggaaac

SEQ ID NO: 313078 - DNA, 122 bp, Homo sapiens
cgcggcgggaggttcgattgacccggtcttggcgggtcggtgagtcttggcggctgttaacgcgcgctttgggaacaggaaggttgagagagaggtgctggggtctgcgtctatctctgtcg

SEQ ID NO: 313079 - DNA, 122 bp, Homo sapiens
agatcttggtactcattctgcatcagcagcacccagacctgctgctgtttcagaggttctcgtggggaataggaggccttcgagtgctttgccaccttggctgtacatttggaatcatttag

SEQ ID NO: 313080 - DNA, 122 bp, Homo sapiens
gagttgtggagggagaggcgctggagggaaccagggctgcgcgtggcacttgcgggccagcgcgaattccacgtgggagtgggctcagcgggccccgcactcggagcggccagccggccccg

SEQ ID NO: 313081 - DNA, 122 bp, Homo sapiens
ggagtcaaatggagaaagacaaggaccttggagaaatttccccaagagtgggtttctctgcgtgcaattgcctagagaggttgacctgaagcaccagagctcccagcctgacagaggttccc

SEQ ID NO: 313082 - DNA, 122 bp, Homo sapiens
agtctggtttattccatgggtggaagaggaagccaagttggctgagtgtgaagggaatggcgtcagtgtgacttcacgccacatcgtcccgaatgccagctccacactgcggtggcacgaac

SEQ ID NO: 313083 - DNA, 122 bp, Homo sapiens
catctcagaaaaaccaattttagacttgtgacatccagaattataagataacacatattacgttgagtcactgaattcatggtttaggccaggcatggtggctcatgcctgtaatcccagca

SEQ ID NO: 313084 - DNA, 122 bp, Homo sapiens
aggagcggtcaaatgcacgtcttcaggctcaggcccttccgattggctgctgggacacaacgtggcctgtcattggctacggcaccggcgcagggccttcggagaggaagtgtggaagtccc

SEQ ID NO: 313085 - DNA, 122 bp, Homo sapiens
ttaactagggtcacagagcttattagatccctaacgctgagtcctagaatcgcaaacacccgtccgttgaacaatcccacatcacttctctccagtcgtcaaagtctacagctttcaaaatg

SEQ ID NO: 313086 - DNA, 122 bp, Homo sapiens
catgtctgcttgcaagagcctaacagcttttagaagcggagcaggtcactgctctttcaacggaggagggaggcagagggctcactgattagtgaactttcagctgacaccacggcttcagg

SEQ ID NO: 313087 - DNA, 122 bp, Homo sapiens
actcaaacccgaatagaaccaccctacctcaaagttctggctgacagcaggattacccttcggagccgcgagcgctggatggggactcagaatccgcagcacgttgacagcaggattaccct

SEQ ID NO: 313088 - DNA, 122 bp, Homo sapiens
agaaaagaactcgctctcatcagttaattcagcggcgcgccgcagccttccgctgcgccccggacttcgcagacaaacgcccggggattggtggaaatcaaggtctccccctccctccccca

SEQ ID NO: 313089 - DNA, 122 bp, Homo sapiens
gttcttcccccgccgcgcgccggcgccccagcccttcttccctccctccgccccccgcggcgctcggttccccgacgctcccggccgcactctgttgtcattgtgacgtcacaaagggacgg

SEQ ID NO: 313090 - DNA, 122 bp, Homo sapiens
gggagactgcgcccgggataataggagcgcttggcctctgagactacccggcagaagggacgtccccaaatgacactcggaggccgcctccctgggctccggtgctcggtgccgggaggagc

SEQ ID NO: 313091 - DNA, 122 bp, Homo sapiens
tttacccataaagacttagaactgtggcttccctagaggaacgtggtgggaggtggatcccgacactgacccagcctccccccacaagtcagtcacccctccacggggttcacacctctcca

SEQ ID NO: 313092 - DNA, 122 bp, Homo sapiens
ctgaacttccagtcagcctggagtgcagatagaaggacctgcttatgcccaaccagcatccgatgacatcagcccctttcttcctgatcccctttgtccggagcagagtgatggcttttcac

SEQ ID NO: 313093 - DNA, 122 bp, Homo sapiens
aaaatggcagcttaggctagaaagccgctcatattcgcaggtacaagggctgggtaagaacgccccgcctggctgactaacttgagttccgcgctctggacaggaattatgcacagggcgtc

SEQ ID NO: 313094 - DNA, 122 bp, Homo sapiens
cagtgagaactgctccccggggttgaccaccttctcgctgaaggacgagacgatgcggggcgtgccatctgcagggagcgagaagcccccttcagggtcaccaagccatggagagacggtcc

SEQ ID NO: 313095 - DNA, 122 bp, Homo sapiens
gtgggtctgcttcctttggctaaggcaacctcatatttggagctttagtcgtaattcttccgattctgaactgtgaaacgtttcagtttttatttatttttatttgatttttttttccttaa

SEQ ID NO: 313096 - DNA, 122 bp, Homo sapiens
tcacatcccagacggggcggcagggcagaggcggtccccacatctcagaggatgggcggccgggcagagacgctcctcacttcctagatgtgatggcggctgggaagaggcgctcctcactt

SEQ ID NO: 313097 - DNA, 122 bp, Homo sapiens
gggaatgggcacggagcctgtggaccgcactagaatcttctaattcttaggaatgcagatcgccctgtgtaaggggccgctcagagcgcccgaggagcgccggtggcctcccttggatgctt

SEQ ID NO: 313098 - DNA, 122 bp, Homo sapiens
ctctggtggaacgggctcgagaatctgcatgtttttataagcggtctagatggttcttaacgtgccatgaagtttgagaaccacttttgtggcactaaggaaggtggcacgttagatgggac

SEQ ID NO: 313099 - DNA, 122 bp, Homo sapiens
ggggctgaaggggggcaggcagtcctcgggcgcgagtgtgcagcgccctctgggcgtggacgcggagcgcgctccaggtgcgcaggactcctagctctcttggggaacgctttctggggcag

SEQ ID NO: 313100 - DNA, 122 bp, Homo sapiens
tctgaccccttctcgggccactcacctgcagcaggctcagtgtgatccacaaggccaacccggctccatggctcagcattgcgctcagtagttaagatccagaggagaccgagggggctgga

SEQ ID NO: 313101 - DNA, 122 bp, Homo sapiens
gccctccccgtgggattccttcccccactctccaggcccctcctgctacgttgggggcagcgccatcccggccactttgtaactattgctctaggtgtcccggctccagtctccccaaaatc

SEQ ID NO: 313102 - DNA, 122 bp, Homo sapiens
cattgtatttctatcaggtgcgtccctctagaccccagccggggtaacatgaccgaggaacgagcccagttcagagccgccgtcgagtgtcacgtctggggaggagaggggagcgccgtgct

SEQ ID NO: 313103 - DNA, 122 bp, Homo sapiens
tgatacagaaagcatgggcttggcttttcttttactgacagtgcacaagcctattttctacgggtaaagcacattttgagttgaattaataaattccgctaagaaaatgcaaacatttaaaa

SEQ ID NO: 313104 - DNA, 122 bp, Homo sapiens
cgcaagtgggtaaggcggtaggctggctagcctcctccggtgggttaagggggcctaatgcggaagacctgatggttcatgctgagagaaaagcaggtctatgcccgcccctctgcgcctgt

SEQ ID NO: 313105 - DNA, 122 bp, Homo sapiens
agttcctcaaagagcggtcccacaacctttgttctcagtgcctggcttcccctgaggacgcgcgtggggcgcctcagcactgcgtgcacgtggttttccccagtgacaagaagcagctcaga

SEQ ID NO: 313106 - DNA, 122 bp, Homo sapiens
tttgtgttaaccggcgggcttctcgcggtccccgccgcagaggtcacacccggcgggtaacggcgtggatacaccgaagggtgactttggacaccttccccacaccacagactaacgcttct

SEQ ID NO: 313107 - DNA, 122 bp, Homo sapiens
aggggcagggccagggtgaccagctggactgttcatggaaatcacctgcctgcacctttccggccggacacactcgccccaggaggcagcatctcccctcgtgggcgcttacctcggagaac

SEQ ID NO: 313108 - DNA, 122 bp, Homo sapiens
cagtctccgacctaatcggcaactaggcagtatggtggaaattgccaagcagctccaggccgtcaagcggaagatccgggatgagagcctctgcccccaacaccatgaggccctcagccttt

SEQ ID NO: 313109 - DNA, 122 bp, Homo sapiens
gtctggtcgggccgacggaaaggaccctaaagggatctggagggcgtgccgggcgtggggcggggtgttggggttcctagctgaggccccagagggcgtgatgaggggggtggggttttggg

SEQ ID NO: 313110 - DNA, 122 bp, Homo sapiens
ctcaggtccggagttcagatgacactcacaagggccccattgaagaactgggatgtcattcgatcaggggccattgtccagccccctaggcctggggaaggatggggacatctgatccgaga

SEQ ID NO: 313111 - DNA, 122 bp, Homo sapiens
aacattacctaattgtttagtaatgttgtcatgcattgtccaaaattggcctggaacaagcgtacagccaaggagaggaacataaacagatcttgcactgggatgagcaatctcatttctag

SEQ ID NO: 313112 - DNA, 122 bp, Homo sapiens
ccaggcctccaggtgacccctctggcttcctgggcctgcagaggcgccgaaacgtgcaggcgccggcgtccatgaggcgtggggcgcgccgggcgagtccctgcttgcaggaggcgcccgag

SEQ ID NO: 313113 - DNA, 122 bp, Homo sapiens
caatcctctcacctcagcctttcaagcagctagaactacaggcaaacagcactgcacctacgttttaaaatttttttggcagagacatggtctatgttgtccaggctggtctcaaactcctg

SEQ ID NO: 313114 - DNA, 122 bp, Homo sapiens
caggaccatgctccttctggtccagttcataggtgtgtgatgggccccaggccccacgcacgcggcacggcccgaacggcagggagatctccgcccaagagcgagaaaacctccagggcttc

SEQ ID NO: 313115 - DNA, 122 bp, Homo sapiens
tgggacagacctggagccacagccaagcacggtcactacccacagccagcacaagaaggccgtttgcccttgaccttcatatttggtagactcaaggtacaaacgatgggcttcagactaca

SEQ ID NO: 313116 - DNA, 122 bp, Homo sapiens
attctgagggtgacgccttcacctgggctctcttaaaatcctgctgtttgtgtgcaaatgcgagttcaaatttctccctgaaacactggtgggggacactatgcaccctcagctttaaatgt

SEQ ID NO: 313117 - DNA, 122 bp, Homo sapiens
gtctgtgtcccacgggagaggagcgcaccagccccgtgggtggccggctgctcccgcacccgccccgtgggtgcccggctgctcctgcgcatcaaggcccgctcccttgttttccttcccaa

SEQ ID NO: 313118 - DNA, 122 bp, Homo sapiens
gggcggacagcagcgcctattctggaggaactggactgagatgtgaccccgaagtgttaccgcttccaaacgaaatgagggtcacctttcacaccgccccccccccggggttggaaaagcca

SEQ ID NO: 313119 - DNA, 122 bp, Homo sapiens
gcacaaaccgggagccgccccggccccagcgccttcttccccgcccaggcagacgcgacccgccgaggcaaagccttaggaaaaagccccgccctctggcaggctaccctccggaccccaag

SEQ ID NO: 313120 - DNA, 122 bp, Homo sapiens
agacactgttctcccttcaagttcctttggtgagtttatggacacgcatgaggtaagctgcgccgttcatgttctactgcgcgtgactttgtactgcccctgagtggaaaaggtatttggga

SEQ ID NO: 313121 - DNA, 122 bp, Homo sapiens
ccacagtggccggcgtacatgtgaagcagcagtgggaccagcaggtcggtgtcacgtgaccgtctcttccgggcccgcgcgcgcggcgtcgacctggggcctctcgtggtctctgcccgctc

SEQ ID NO: 313122 - DNA, 122 bp, Homo sapiens
acactttcaggccccttcaaataaggaatatttcctaggtccttgcctgttcttctcagccgaattcacctcaaccttctgaaagttcgtccaaacctaccactgtcacctagtctttgcaa

SEQ ID NO: 313123 - DNA, 122 bp, Homo sapiens
cgtaaacacagtgggcgttccgtaaacacagtgggtgttccgtaaacacagtgggcgttccgtaaacatttgtggaatgagtccgttctggccggattctccatagttcttccccaaggatt

SEQ ID NO: 313124 - DNA, 122 bp, Homo sapiens
aaccgctcccgtgctgagaatgcacagcaggtgaagccactctcatcttcattggcttcccggaacactgaaataggacggaatctaagcaaaaaaaagagagaatcacaggcaaagaatgt

SEQ ID NO: 313125 - DNA, 122 bp, Homo sapiens
tgttacattgaattcctaaacaatcagggcagcaagttaataattgggaaaaaattccatcgggattagacattgaaaaagtgaaaattaggaactcagcataacagatgttagttcattat

SEQ ID NO: 313126 - DNA, 122 bp, Homo sapiens
ctcccttctttctcctttgcagctgccttgaggtgcagtgttggggatccagagccatgtcggacctgctactactgggcctgattgggggcctgactctcttactgctgctgacgctgctg

SEQ ID NO: 313127 - DNA, 122 bp, Homo sapiens
cactgctccccacttcctgcagcctcggtgtccgccgggggcgtgtgtgaggggcggggccgcatggggaggagggatttaaaaaaaaaaaaaaaaagcgaggtaattagcattctccgatt

SEQ ID NO: 313128 - DNA, 122 bp, Homo sapiens
ttgaacgcccattctgtaagacagataacgcgttggcccttaagaaagatggcatctttccgccttctctgcccccttccaagatggctgccctaatgtacacttgggaccttgcctggcgc

SEQ ID NO: 313129 - DNA, 122 bp, Homo sapiens
ggccaggcgcctgcgccacccagagaccctggggctgggaggggagtgactgagtgttcccgagagctctactagagctccactctccaggagggcaggggtcctgcgaaggcgcctctccc

SEQ ID NO: 313130 - DNA, 122 bp, Homo sapiens
caagcgcccgaaagaaggcgtttccgggctggggcgagccaggtgggtgcgggacgtccccggggaacctccagggcgccgagaatctcgtcgtgcccagggctccccgcagcctgtgtatg

SEQ ID NO: 313131 - DNA, 122 bp, Homo sapiens
gaagcccggcgggggaggagtgctgcagccagctgccgagggagcgctctgcggcgaggccgtttccctgagtcacggagagggcgggaggctgcgcccgtctgcccccgccacgtcctcct

SEQ ID NO: 313132 - DNA, 122 bp, Homo sapiens
ttcacccctttttttgcataacaacatacacccagggtggctccagtatactcagaactacggaactgaagaagcatcacatcacatctttcccaagtgatgctgggtggggtccccagtgt

SEQ ID NO: 313133 - DNA, 122 bp, Homo sapiens
acctggaggaaaagtttgaagtgccagcacagccctaccaaattgtttacccacctgtttcgagtcaacttcagagcctgatgattcatgaatatatgaatactggttgtgtcttacattgc

SEQ ID NO: 313134 - DNA, 122 bp, Homo sapiens
tgcggccaagaagcagaagctgagcagtgacgagaacagcaatccagacctctctggagacgagaatgtaagtgcagcttctggcagttacgagactgcggagtgaaagttttaaattcttt

SEQ ID NO: 313135 - DNA, 122 bp, Homo sapiens
ccttggagggggacgtgggaatccattccaagggacgggggattctttcaaagagcatctcgcctgcttataaaggaggctggctctgaagccgtcatctggagtctgtagtgaaggcctct

SEQ ID NO: 313136 - DNA, 122 bp, Homo sapiens
caagtagagaggaattgtgactgcctgtcatgcaaacctgaatctggggagtgctcctcccgtggggatgcaatcaccctgatttgttccaggaaggctgtctataggtgcatcaatgctgc

SEQ ID NO: 313137 - DNA, 122 bp, Homo sapiens
taccaaagagaactttagacagctgtaattccccaggagcactgtgtccatagtgtcctccgaggggcacaaacaggccctccagacccaaaatattcctctcgccaaatacgcctgggagg

SEQ ID NO: 313138 - DNA, 122 bp, Homo sapiens
gctgggtaagtctcctcccttcctggaaaggatagcgccccgctgagcagtgggatccgccgccaagccccggcctcacagttggccaggtagtgggtcacatcctcaatgcgttcttggct

SEQ ID NO: 313139 - DNA, 122 bp, Homo sapiens
caactgcttttctagccttttctctcacaatctcatcccaaaccttcactccagctagaacgtttgtatcatactggccaccagttatcatgtatgtgaaacccaccaaccgactttgagtg

SEQ ID NO: 313140 - DNA, 122 bp, Homo sapiens
tttgctgtgtggccttgggcaagtcactctgcgtatctgggtttcacttccttcccaatccgaaaacgggattgggttccttgcagcccgggcattcctgaggtctcctttaccccttctcc

SEQ ID NO: 313141 - DNA, 122 bp, Homo sapiens
ggcgggggccgcttgtcatccctcccactcccatggggtctttggcactgaggtgtggcccggctctgcagcccggccacatccagctcactctcgctgaggtcgtgggcgccgctcagggt

SEQ ID NO: 313142 - DNA, 122 bp, Homo sapiens
gactggtttttgtattttttggtggagatggggtttcgctgtgttggccgggctggtctccggctcctgaccttgagtgatctgcctgcctcggcctcccgaggtgcccggattgcagacag

SEQ ID NO: 313143 - DNA, 122 bp, Homo sapiens
gcctgagcttggggctctgctacgccacccacgcccaccttggcggagggcggggccccacggctctcaaacttgcgcgccaaagacggagccacctggcgtactggtggaaagcgcagact

SEQ ID NO: 313144 - DNA, 122 bp, Homo sapiens
ggcgaggctgctgaggggagggcgtgtgagggtgaatgcggacggtgcaggcgcagctctcggtccagcgccaggacatgggacagcatttacccaagtcagcactgctcctcttggcacct

SEQ ID NO: 313145 - DNA, 122 bp, Homo sapiens
tcttcaacagaccaaaaacaaatgttcacagtccctgctttatttccatttgttcacacacgctttaaaaaaaaaaaaaaaaacacatgcactcacacaatacccaaacatcagaattagaa

SEQ ID NO: 313146 - DNA, 122 bp, Homo sapiens
gccacatgtaggtacaatggtcaacagccccggctgaactcaacagccagcactagcatgcgaatgagccttctcaggcatcagcccagtggatccttaaccacaaccctgccaacctctga

SEQ ID NO: 313147 - DNA, 122 bp, Homo sapiens
aagccgggcagggtggatagaagtgggtctcttgctgcctgtggccctgaaacccagccacggggcggggcctgacttcttagcgcagtccccctgccgcgtggaggaccctgctctccggc

SEQ ID NO: 313148 - DNA, 122 bp, Homo sapiens
cctgggaaaaggggtagaagcaggggaagcaaccaggaaaaatgacagcccaaaaagatacgggcaattaggctttggcctgtgtagtgtagtggtggggatatatattaggtaaaacctgg

SEQ ID NO: 313149 - DNA, 122 bp, Homo sapiens
ttgggtttccataagtgtttcttttcagagagagcctatgtcttgtagcttttgcagctgcgatccactgttatactggagctctgttggtgcagaggcaaggtgcagggggaggaataata

SEQ ID NO: 313150 - DNA, 122 bp, Homo sapiens
ttctctgggccaatcagaacccagtcagcatctctctgatgcaactgttcccttataaaacgattaaacgtggaccagctatttttattcggtcctataaaaatagctgccgtcagtcagtc

SEQ ID NO: 313151 - DNA, 122 bp, Homo sapiens
actataatgttaaacaaaactaaattattttaatttacttaatttaaggaaccaaactaccggctcacccaactcagaagtggccgcagaagacattcaagcgctcccgggggcccggccag

SEQ ID NO: 313152 - DNA, 122 bp, Homo sapiens
gcagccccagcggacactccccagaccccacccagcccctgcccaggctccccaccgttccgggacacgtccagctccaccagctgcatgaagttggccacctcgggaggcaaccgctggat

SEQ ID NO: 313153 - DNA, 122 bp, Homo sapiens
aacaagatcatccaggttcttaaagtcctccccacttccaccgcttgctgcgagaaaggccgcaatgccctccagcgagttcgcaaaaaccaccgctcccgcctgaccctggagcagcttag

SEQ ID NO: 313154 - DNA, 122 bp, Homo sapiens
tagactaggggtggagcgggaccaccgctcccctccccctctccccctggcgcggagccccggcgcagctgggagtcttggaaacctgactcccgcccaatcagcagggaggggaggagcag

SEQ ID NO: 313155 - DNA, 122 bp, Homo sapiens
atggctcatgcgtatgtgtgtgctatcttgactcctgcttggattaagacctagtataagcgagcgtgtctgtgttcacatattttaactgtgactcattttcttatatacttgtattttgt

SEQ ID NO: 313156 - DNA, 122 bp, Homo sapiens
aataaattgcgaaaataacaaaaacaaaatccatctactggctagctctttaaaatcctgcgggggagcccagtggcccaacggcgaagtttagcccatcttgccctttctggtcagtgtac

SEQ ID NO: 313157 - DNA, 122 bp, Homo sapiens
gccccgggccgcggaaggatatttcactttgtttacctccccggccgggcgagggagctgcgaggccggtgctggcgcccccggcacggagctgcaatggcagcggcgcggggagccgcccg

SEQ ID NO: 313158 - DNA, 122 bp, Homo sapiens
ccatggtttgtcattttgggtactgtttgccagaatgccgtccctgggtagcagcatccacgtcacctaagaatttgttagaaatgcatactctcaggtcccaccccaggttgaaagaatgg

SEQ ID NO: 313159 - DNA, 122 bp, Homo sapiens
ctgcatacccacaaaactacccatgccagctgatccgaagggcccagcaaaaagccagctcgttaaaaaaaataataataatgatttcaccctccttactctgaccaatcgatgacctcaaa

SEQ ID NO: 313160 - DNA, 122 bp, Homo sapiens
aattctggcacccagatttacggaagtgcaggaacaagcacaaccgctactcaaagccaccggctgtttttaggtcatgaagtcaacttcctggaatttctagggaaaatagttgaaagggg

SEQ ID NO: 313161 - DNA, 122 bp, Homo sapiens
tctgctaacgcgacgctcgttctcccgccctgccgtcccccctacatggccgccagcactcgagtttggggtcttcactcaaatatgagggtctccttgattaccctatttagaagtggaag

SEQ ID NO: 313162 - DNA, 122 bp, Homo sapiens
ttctctctttctagttccagttcctcccaaatcggtgacttctctaatgatgaataaagacggcttcctgggaggcatgtctgtcaacaccggcgaggtgttttgctccgtcccaggccgtt

SEQ ID NO: 313163 - DNA, 122 bp, Homo sapiens
cagcgagcgatgacctcagcgccgccaaggctgcgagggcgggggctggggtggcgggggcggggaaaagcgccggagcggggccgagcggagcggctccgggccccgcccccatcctctgg

SEQ ID NO: 313164 - DNA, 122 bp, Homo sapiens
gcctccatttgctgtttgttcatttggtgatagcgcaacacttaaaaaaatattttaagccgcttctgaagtaatcacttcagtgacttttaatggaggagtatttgttatgggaaattcac

SEQ ID NO: 313165 - DNA, 122 bp, Homo sapiens
cagctccgcaggacagggtttctgtcgcttctgctcacagctgcctcccagtgctcagagcgaggccgggcacacagtaggtgcttgataaatagctgcggaacgaatgtgttccctttagg

SEQ ID NO: 313166 - DNA, 122 bp, Homo sapiens
gagtatctcccggacgcgggctggacaggaatgcccaagaaggcacaatgtccattaagccggtgaatggcagggagagttcctgcagcccaaagtccttataatgacttttaaaaattact

SEQ ID NO: 313167 - DNA, 122 bp, Homo sapiens
ctgggggcactcctttattctctgtgtctttatctctagcaatatctctggctctctatgcgtctctgtgcttctgtgggtggatgcgtgtctgtctgtctgtctgactacacacgtgcctg

SEQ ID NO: 313168 - DNA, 122 bp, Homo sapiens
ggtgaggaagggaaagcaggtgtcccaggacccgcgtggggcagggcgggttccgcggagcggcggggcggggcagcaggcggaggaacctgagggcaggtcggggcaggccacccccctcg

SEQ ID NO: 313169 - DNA, 122 bp, Homo sapiens
gaagagggaggaaggggccttggggcgtgaagttgcctttgggacatcagccagagcctgcgacgcaagcgcggcccaaatgactgggaagccggaaccttcgctccttcgttccgaacctt

SEQ ID NO: 313170 - DNA, 122 bp, Homo sapiens
atgcaggcctctggccctagagtggggtggggctgtggatgctgacagttgggggcccatcggagacagtcccaagcagcatggctgggtgtctgtggttccctcctatcaagaaggaacct

SEQ ID NO: 313171 - DNA, 122 bp, Homo sapiens
caaatttctgtttcatttattttggtctctttttcatgtgttaatctttactctaacattcggtgtttctctgctgccagcagacattcaaggaaattcattaaaaagaaactggagtgtat

SEQ ID NO: 313172 - DNA, 122 bp, Homo sapiens
cttgttttttttgagatggagttttgctctgtcacctaggttggcgtggtggcgcgatctcggttcactgcaacctccgcctcctgggttcaagcgattctactgtctcagcctcccaagta

SEQ ID NO: 313173 - DNA, 122 bp, Homo sapiens
gttcagcgcctccccacggcacagcacctcctcactgcccagcgcctcctcactgcacagcgcctcctcactgcccagcgcctccccacggcacagcacctcctcactgcacagcgcctcct

SEQ ID NO: 313174 - DNA, 122 bp, Homo sapiens
ttcggaagtaactctcgagccttctctgtaacaggggaacgaccaaggagctacctctcgcgttgtgaggacaaagcgctcgctacatgcccggcacacgaccacaattccactgaaagcat

SEQ ID NO: 313175 - DNA, 122 bp, Homo sapiens
ctgaggacacgtgccagtggtccgccaggacagtactttacagtttacaacaccccgtcgcgttccattgcctcacctgatccagggaggcaagggttaatggttatgcagtgtggatgggg

SEQ ID NO: 313176 - DNA, 122 bp, Homo sapiens
acggggagaagggctgcggggttagcgacaggcaggacgatggctccggaggcgtcgaggcggggcgtcgggcaccgcaggccccagcaggtccggtcccaagcggacccaagtcctgaagt

SEQ ID NO: 313177 - DNA, 122 bp, Homo sapiens
agtggagacgcacggctgtccggctccgcagcgccacctggaggcttctaggtcctagctcggtgagcgtctttgctccgatcccagggtcgtggtcttcaatgattgtctggaggacgcat

SEQ ID NO: 313178 - DNA, 122 bp, Homo sapiens
gggccatcctagtatagtgggatggggcagggggtgatgttggtaagaggggtgtggtgtcgatctgttgttagcccagctaaacaggagagacacacagtgggaggtgggcaaggaggaaa

SEQ ID NO: 313179 - DNA, 122 bp, Homo sapiens
gggcactcatcgtccagcacaacaattgcaacaacacctgggcgttctctgcccatgtagcgaggtcaaggtcctgggagccgaactctcccttgatgttcaatctttttaaatctttccca

SEQ ID NO: 313180 - DNA, 122 bp, Homo sapiens
gagacaggcctctgaggaggtggtgagggtgggtcctggatggcctggcgcacacgggcacgcaggcaggtttccaccttctatgcaaacagttctcaggttccaggtttgcccagaggatg

SEQ ID NO: 313181 - DNA, 122 bp, Homo sapiens
tcccgaaggggctctaccgggccagctagcccggagcagtccgcgttttagacttagaggcgcgcgactgcgcgcacccggctggagctgcggagaggaccaatgagcgggcgctctctccg

SEQ ID NO: 313182 - DNA, 122 bp, Homo sapiens
accagattctcacaagcctttgactgtgtggactcagccacagactctgcctctagctgacgtcaaagtccctgtcacatggccagatgaaagccaagagatcattggttgtcgtagcaacc

SEQ ID NO: 313183 - DNA, 122 bp, Homo sapiens
ccgatgccaagtgtgtggttccagttgcgacggccccctgtgaagtggcttccggatgtgcgaatgaaccaggcagcgtttcactggccaaatagaccccagcaaaactgaagttaactccc

SEQ ID NO: 313184 - DNA, 122 bp, Homo sapiens
atctccgcgggccatcgccgccgcaaccgccgcgccagcgccttctcccacgcgcgggggcgcccctgcccaccgctcccggcagggcttttggtggccatgggggataaggggcgttgact

SEQ ID NO: 313185 - DNA, 122 bp, Homo sapiens
tcgctccatcgggtctggcggggctggcagcggcgaggacccgggtctggcgctgtgggccgggagccgtggggcggcatggaggggctggttgtcgccgccggcggggacgtctccctgca

SEQ ID NO: 313186 - DNA, 122 bp, Homo sapiens
ctccgcggctgggtcccccggtggcctcaccagcctccagcagcagaagcagcgcctgatcgagtccctccggaactcacactccaggtgactggtcgctgcctctccaccggaggaaaaag

SEQ ID NO: 313187 - DNA, 122 bp, Homo sapiens
gaaggtttattcactggattcattcttacattttattggctacaattgagtaaaatgggccgggcacggtggctcacgcgtgtaatcccagcactttgggaggccgaggcaggtggatcacg

SEQ ID NO: 313188 - DNA, 122 bp, Homo sapiens
aagcatctcctgttttcaaggtgatgacactgggctggaatgccgcggggccaaccagtccgtcctgccagacaagtttctggtccagtgagcctccgacccgccgcgcgtgtcaagctgac

SEQ ID NO: 313189 - DNA, 122 bp, Homo sapiens
tcacccaacgagttcaagagggcggtgcgttcctaaccacaccttctgcaacccaagtgccgcccctctgactttctcctttttccttttttccggaacgccggaacgtaagacgtgggtca

SEQ ID NO: 313190 - DNA, 122 bp, Homo sapiens
ttcaggtgatccactggcctcggcctcccaaagtgctgggattacagatgtgagccaccacggctggccgcaagcacattttccactgacttgctgcaaccttgattgagcaaggcatgttt

SEQ ID NO: 313191 - DNA, 122 bp, Homo sapiens
tctgctgcgggcgagttgcgctgtgtgtggggttggtctttggaagtgatgaagatgaatcgctcttgggcaggcacctacctgcttccagagatcttttgcctaggttttcaaaagcctca

SEQ ID NO: 313192 - DNA, 122 bp, Homo sapiens
aggaagatgcagcctctgagcaagttgatggctatctcaaaacctcgaaacctgtctctacgtgaacaaagagaggttctgagagcagatatgtcttggcagcaggaaaccaaccccgtcgt

SEQ ID NO: 313193 - DNA, 122 bp, Homo sapiens
aaccgagaggctgcagagctactgaagagccggggcaggatttgaatcctggctgtgcttcgtccttagcccggcagcccggggaaccggaaggaaggctcagggttctaagcccaagtcgc

SEQ ID NO: 313194 - DNA, 122 bp, Homo sapiens
gattatgcaattggtaaagggaatgaaaaggcctttgcacccaagaaagtagaagaaaggcgcctgaatctctttatgataggtggtatgttaaatctaggtattttcgtatttcaacatat

SEQ ID NO: 313195 - DNA, 122 bp, Homo sapiens
acacccactatgcttctgcatggggctggaggtgcagcctgtgaaagctgcagggcctcacgtaggtgtggaatgagactcagagcatcaaagccagaggagcagagggccatagggatggc

SEQ ID NO: 313196 - DNA, 122 bp, Homo sapiens
acgaccccgggggggaacgaacaactccagacgtgccgccttaagagctgtaacactcaccgcgaaggtccgcagcttcactcctgagccggggagaccatgaaccccaccagaaggaagaa

SEQ ID NO: 313197 - DNA, 122 bp, Homo sapiens
tgcttcagccccttgggcagaatgagttcctgtttcctgaaggcatctgggctttctgtgcgttctgtagctcaaacgtttgcatagtttaataagcaggtgtgtaccggaccagtggatgt

SEQ ID NO: 313198 - DNA, 122 bp, Homo sapiens
cccctccagcctggtgctgggctcctcggctggcggcggggacgtgttcatccagatgcccgcgtccagggaggaaggagggggccggggcgaggggggcgcctaccaccaccgccagcccc

SEQ ID NO: 313199 - DNA, 122 bp, Homo sapiens
acatggaatgcgttctctttcaatgaagaatcaagttcttgcccctaaaagtgactctcacgtcacatctcctggtgctggaatttgagcttatgtccctttaccccttgcccaacccctcc

SEQ ID NO: 313200 - DNA, 122 bp, Homo sapiens
taatgtgagtggtcttcttctatttcagcagcattataaatgaagttaaaagttcaacatcgattttaaaatgccatatacggcatacacacacacacacacacacggcaaacacacacaca

SEQ ID NO: 313201 - DNA, 122 bp, Homo sapiens
tggcgggcggcatcgatgagcagttcgatgcggtccgcgccctcgaagttcacgcagccgcgacacacggcctcgctgaagtcccacaccatggcccacggcatcttgggcaggtcgcacag

SEQ ID NO: 313202 - DNA, 122 bp, Homo sapiens
caatcccggcatcaaaggctcgctacgcagcatcgggttctttccagccgcgagcggaggcgagctgccagggccagagcgctcctgactgttttctattatcttcatttattattttttaa

SEQ ID NO: 313203 - DNA, 122 bp, Homo sapiens
aggagcgggagaatgttcccagcatgcctcgatttgtagttcccggggacttcctgccaccgcagcagcgggcgccctggaggtagctcgggccaggctaggactccgggacaggaggaaag

SEQ ID NO: 313204 - DNA, 122 bp, Homo sapiens
gcccctttggttctctgcctttggatggatggatttatgctggcattgtctggagggagccgggtgtcccccaataatcacagaacaaagacaattaggtcgggggaggaataaggataaaa

SEQ ID NO: 313205 - DNA, 122 bp, Homo sapiens
gtgccgccgatgccctgagtgccgtccaccccccggagtgccgcccgcctcgctgagtgccgcccatccccctgagtgccacccaccccgccgagtgccgcccacccagccgagtgccgtcc

SEQ ID NO: 313206 - DNA, 122 bp, Homo sapiens
ctcagacctccaagtaggactacaaaacagaggtttctgggggaaggaagtgacgatcggcgcaaagcatgctggtctcaggcggtctccgctcaacgatccttcctcaaagcatggttgct

SEQ ID NO: 313207 - DNA, 122 bp, Homo sapiens
gagtcatccctttttccttccccttaaggtttccaaatgttgtgaagaagtaagagattacgttgaagaacgatctggcgaggatccactggtaaagggcatcccagaggacaaaaatccct

SEQ ID NO: 313208 - DNA, 122 bp, Homo sapiens
gtgtcccaggatgagacactgtgtgtcatactctcagctgttccactgggtttccttcatcgtctctttgccttttttcctgtggatcagtttgtacttaataagtttccttttgaaaattc

SEQ ID NO: 313209 - DNA, 122 bp, Homo sapiens
aaatgtgttatatatactcggttcagcatttcccctactacaaagcacttgcaggtattccgggctggggagaattcatcctgggccacagtctgtggtctaagaaagtctgctgctcaaac

SEQ ID NO: 313210 - DNA, 122 bp, Homo sapiens
gtgaccaaccagcgagaggagcggactttgcggggtggagccctgaagccctctcccaatcgcacaagtgtaggggcggggcattctttggggggcccaatgaggaacgcggccgaagctgg

SEQ ID NO: 313211 - DNA, 122 bp, Homo sapiens
tacttaaaaagacagagcagaatcacattcattttcttaatagtatcactgtaaacatagcgaattttggcgcttttagattgctctgaaaatttctgaagagttgaccatagcagcctggt

SEQ ID NO: 313212 - DNA, 122 bp, Homo sapiens
actttgagatttttactgatccagatgggaaaaatgtagtccctgtatcctcaatcattccggtgagctgatgtcatctgaaccaagaaaagctcaagaggttgctacataacagtttgcat

SEQ ID NO: 313213 - DNA, 122 bp, Homo sapiens
atcctttgaatttgctacttaacaggaactaaggccagagagcctcaagtcagggcttttcgctgacctggaggcagaatccagtttggggttttgcttgtaactggtattttatgcatgcg

SEQ ID NO: 313214 - DNA, 122 bp, Homo sapiens
tcgctggtgcctctttctctgccactggggcaataaacccaaagatgtctacattatctccgaaacagaagggaagattagtaaatgcagggttttctgggatgagcttcaggctttctctt

SEQ ID NO: 313215 - DNA, 122 bp, Homo sapiens
cctcccagagacaccgtggcattggagcagggtgcagctgcattctggggtgggccagctcggcaccatcggccgatcttcctggacgagccagggctcgctggtaggccgtggaaccttct

SEQ ID NO: 313216 - DNA, 122 bp, Homo sapiens
ttatgagaagcagtatggaaaccccacaaggtggcagttatgcattgcagaggacaccagcgagcttccaccttgctgggtttggggaattcccacgctgactcagaggctcgaaaagcagc

SEQ ID NO: 313217 - DNA, 122 bp, Homo sapiens
gatatctggcccctgccatccatgtcttgacagtgcctcatgagtctctcctcctgctgccgcctgggggcgcccccagctgggtctcaggctgctgccagcactgctgttgttatcattag

SEQ ID NO: 313218 - DNA, 122 bp, Homo sapiens
gtttgaatctgggttctgtggttactggctgtgtagccctatatgacccagcctccctctcggacctgaaagttcaatgggctggtgtctggggaacagtgtgctcctgcctagcgcagcac

SEQ ID NO: 313219 - DNA, 122 bp, Homo sapiens
ctgagcggtaaggccaggccgaactcatgccacggacgccccgtgcctcccggcctgggccggcagcgctgaactattaccttatattaaacacgggctcgtggattaccatgaacactaaa

SEQ ID NO: 313220 - DNA, 122 bp, Homo sapiens
taaataatacatttactcttgaaaggggaattttgcagtgcagtaattcacataaagatgcggctgagagataacgacaattctttgaggcaggtgatagtctccttcagtgcccagcacct

SEQ ID NO: 313221 - DNA, 122 bp, Homo sapiens
cggcaccccaggagctttggtgtcccctcaggttggatgaagatggcaaagtcctgaccccggaggagctgctctaccgggtaagggggcctcctctgccagaccctagagacctctctggg

SEQ ID NO: 313222 - DNA, 122 bp, Homo sapiens
tcctacgagttccctgcccttccacccgtggctagtacttggagacaagggcataggcggcggcgcagatgggtggacagggcaccagtcgcagcgccacgtggcccaaggcctcagggaag

SEQ ID NO: 313223 - DNA, 122 bp, Homo sapiens
agaaaacacctcaactccagagccctctctaacagttgtcccaggtgggaaccacaatagcgtccactgcaggtgccttgaactttgacacaaatcccatccctgctggccagccaggccac

SEQ ID NO: 313224 - DNA, 122 bp, Homo sapiens
tcaagtacgtccgcgtgactgacatcgacaacagcgccgagtctgccatcaacatgctcccgttcttcatcggcgactggatgcgctgcctctacggcgaggcctaccctgcctgcagccct

SEQ ID NO: 313225 - DNA, 122 bp, Homo sapiens
aaatatgagaaaacttgaagttttatgttcttagccacatcatgtgctctacaaatgttgcgacagtctttcctaaggaaggtccagttaaaccgcagcctcctctcagttctctctaaatc

SEQ ID NO: 313226 - DNA, 122 bp, Homo sapiens
ctagctcagcaggcggcagcggcggcctgagcttcagggcagccagctccctcccggtctcgccttccctcgcggtcagcatgaaagccttcagtcccgtgaggtccgttaggaaaaacagc

SEQ ID NO: 313227 - DNA, 122 bp, Homo sapiens
agatcatgattcctgacaacatccgtggggtgggggctcccctgaggcccctgaggctgccgctcactggggaagggccttgaggatggcgttcacctcctcagccacggctgtcagcgcga

SEQ ID NO: 313228 - DNA, 122 bp, Homo sapiens
gatggggtttcaccattttggccaggctggtcttgaactcctgacctcatgtgatccacccgccttggcctccctaggattacaggtgtgaaccaccaagcctggctgagagtcgccttttt

SEQ ID NO: 313229 - DNA, 122 bp, Homo sapiens
ccagggctgggggtgaggcctgggcatcagtgcagccttcctgacctttcaggaagcttgcgcaggtggggatgggttggtggaagatgtgctactactctccagtcaggggcacccagatc

SEQ ID NO: 313230 - DNA, 122 bp, Homo sapiens
ccaggtctttctctccatctgtctctttctgtctgtctgtttttctgtctcacatacacacgcacacacacacacaccatgaacacatgggcaccccaggtctctctccctcactcagtgtc

SEQ ID NO: 313231 - DNA, 122 bp, Homo sapiens
tgacgccgcgggagctgctccggccgcaccatgcgggagctggccattgagatcggggtgcgagccctgctcttcggagtcttcgtgtaagtagtggcgcaccgcgggcagggcgcactgac

SEQ ID NO: 313232 - DNA, 122 bp, Homo sapiens
tagaaggtagaagatgaggtggagaagtgggaaaatctcccttccctttagcactggaggcgaaagggctagaagacgagagactgaatgattctttcagtcacatcactcttttcaagcac

SEQ ID NO: 313233 - DNA, 122 bp, Homo sapiens
ctgcagccgcgctgggacccctgtctcttgcccctcctcccccttgccccgggcagaggtcgggctgaggagaccagcttagagcagccctcggccacccaccgccagttcccacgtcgcgg

SEQ ID NO: 313234 - DNA, 122 bp, Homo sapiens
gccctctgcgtccagggcgtgtactgagcccaggctagctgagcgaggctgcagcccctgcgatggcccgggaagaggcaagtgccgcggggccagagcgaggagggaccagcagggcggcc

SEQ ID NO: 313235 - DNA, 122 bp, Homo sapiens
tctggagaatgattctgaatattctctatatgttttctgtgaaaatgtcagcctagtattcgtttctagtagatgtgctttcagcaaaacttgctcttaatgtctctggtgtgcagtcatct

SEQ ID NO: 313236 - DNA, 122 bp, Homo sapiens
gggcgcgcggggtcctactcggcccgggctgcgcgcaggggctgggttgggcgggccgggcgggcttggggtgccctcctgcaaggtccccaccgacagcccccgagctctgcctcaggctg

SEQ ID NO: 313237 - DNA, 122 bp, Homo sapiens
gcggtcaggggagaaggtggccatcaagaagctgagccgaccctttcagtccgagatcttcgccaagcgcgcctaccgggagctgctgctgctgaagcacatgcagcatgagaacgtaggtg

SEQ ID NO: 313238 - DNA, 122 bp, Homo sapiens
ataagataaaccttttaataaccatttcttataggcactgagtagtttgtaggtgggcatcgaatttccaatgtggaaattatgctgaaaaaactgtctcccagcaggggtatttattttct

SEQ ID NO: 313239 - DNA, 122 bp, Homo sapiens
cacccaggaggctgagcactcgctccatgaacaccctgtgtgctgccagtatctgcaccacgggaaggggctcatccagggacagggacaggcctagcctagggacacccatcctggggccc

SEQ ID NO: 313240 - DNA, 122 bp, Homo sapiens
aatcaaaacattccggctgcgcgcccccgccccgccggcggcgccccttcctccgttacccgccgcgagctcacttagggctccgcaggcacccctgggcaaggccagacacggggcctggg

SEQ ID NO: 313241 - DNA, 122 bp, Homo sapiens
actcccaggtcctcgccccacacggccacatcctcgcccagccccgcctccgcttagctccgccccgtcgcggctccgccccgcggtaaccacgcccacacaaccgtatccccgcccacagc

SEQ ID NO: 313242 - DNA, 122 bp, Homo sapiens
tgtcataatgttgcttctccttttatacctgactctgccatctgattgccctgaaaattacggccccgggttctagcctccactaagagtgctgccaggacttgacctcaggagttccttgg

SEQ ID NO: 313243 - DNA, 122 bp, Homo sapiens
tagtaggcttccctgttatggttgcactcaggactctgtccccaccggctgccgtcccctcgccagcccactgccctttggctggtggagtccacttggtgaggagaggagtgtgggtggac

SEQ ID NO: 313244 - DNA, 122 bp, Homo sapiens
cctttatttttgtaccatggggtgggccccgggcctgagaaggaagaagcaccctctccccggcctcctctgtctgcacccgtggggctgtgacttactcctgcctccaggggcggggcggg

SEQ ID NO: 313245 - DNA, 122 bp, Homo sapiens
aaacaaattaagtgaagacatatgcactgcgcatgaaagaagaaacccagagagaattttcgggaaagagaatggggctttgaaaccaatcagaactggcttacatcccacctccgccacta

SEQ ID NO: 313246 - DNA, 122 bp, Homo sapiens
acctcggaaagagcagggactgggcccccagccttgcaagatccctgtgaagactggggccgacgatccaaaaactaagagccggggcaaggtgacccctccgcaagggtgcccaagctggg

SEQ ID NO: 313247 - DNA, 122 bp, Homo sapiens
ggaaggtaatggtttcaagctgcccgggctgggttccgaatctctaggacgccatggctgcgatctcctcgctttcctggacatcttacctccggatgtactccagtctcagtgcccctcaa

SEQ ID NO: 313248 - DNA, 122 bp, Homo sapiens
tacagagtaagagctttcatttcaaataaaaccattttatagaccaggtatcaacatttacggcggtcagacacattgcagatagcaaaataaaatatttatgcttggttcttacttttctt

SEQ ID NO: 313249 - DNA, 122 bp, Homo sapiens
aaatgaagccgttggggaagtatccgcaaactcttacagtgagtatgtgataatgacacacgcgtggcccttctaagacctccgctaggcattatcagtgactgtgctcgtgagcgctgacc

SEQ ID NO: 313250 - DNA, 122 bp, Homo sapiens
ttgggaacgcaggcgcgcttacgcatttagtgagggtttggcggtctccatagttaccgccgccgcgcgtgacgtcatagtggagcgctgagggcttggtggcgtggggtgggggctgtcct

SEQ ID NO: 313251 - DNA, 122 bp, Homo sapiens
ggacattcactcgtggggtgaatccagactggccatgagggctgcatggagggggtgctgcgcgggggcagaggaagccctgcaacggtgagcacgtgggggaggagtggcctcttgggcct

SEQ ID NO: 313252 - DNA, 122 bp, Homo sapiens
ggaagcacaaagacactgggagagctgctagatacaggcacagagctccccagagctatccgctgcctctacagccgctgctgctttgggatctggaacctgacccaagaccgggcacaggt

SEQ ID NO: 313253 - DNA, 122 bp, Homo sapiens
gctttgacacagccccttaagatgttttaagggctatcccataaagccgggaaggcacaacgggtggagctggcggccgccgggggcaggcacttttgagctaaggaggaagcgggggaggg

SEQ ID NO: 313254 - DNA, 122 bp, Homo sapiens
tgtctccctctgactgtccccaaatccagtgacctgagctcctgcagccagagcctctcccgacccgttccttatcccagcagctctcagctggtgtggactcacaggccaaccaccacagg

SEQ ID NO: 313255 - DNA, 122 bp, Homo sapiens
caggcagggggagcgcagtggggagggggcaggaagcgcaggcagagccaggcgagcacgcggctcccggcccagctccccgcgtccgctccggctcctgccgcgttccagcagccgtcact

SEQ ID NO: 313256 - DNA, 122 bp, Homo sapiens
gagcgatggagaagctgctggcctcggtggaggagcggcaacggcacctcgcagggctggcggtgggccgcaggccccctcaggaatgctgctctccagagctgggccggcgactggcagag

SEQ ID NO: 313257 - DNA, 122 bp, Homo sapiens
gagctacgaagagctggagcgggcgctgcgggagcagcgtgtggggaacggctcgggagtcgctgctggtaaccccggcccagccgcccgcagctgggctcgcagccggctcgcagccgaca

SEQ ID NO: 313258 - DNA, 122 bp, Homo sapiens
cacctcagaaaacaaatctaggatcagtgggtggacaccactggaaagtgggtttcaattcgatggtaggaatttcttcagagtcagggatattagtgctcaaagtcacacaacaagctgaa

SEQ ID NO: 313259 - DNA, 122 bp, Homo sapiens
ttcgcacttaatatgcgatcattaaaatcagttccttccctcctgtcctgagggtaggggcgggcagattttattacttctcttttcctgatagcagaactgaggcggggttgtggaggagc

SEQ ID NO: 313260 - DNA, 122 bp, Homo sapiens
tttccactcaaggactaggaactgaatctctgcacccttaaaaccactctcttagccgggcgcggtggctcatacctgtaatcccagcactttgggaggccaaggcaggtggatcacgaggt

SEQ ID NO: 313261 - DNA, 122 bp, Homo sapiens
tcgtgcccaccctgtagctgaggcaggaggggccggagaaggtgctcaggagcaggtgcccgttgaggagcaggatgcccacccagagtcccccggccacccgggcagctgcccccacggaa

SEQ ID NO: 313262 - DNA, 122 bp, Homo sapiens
acaggcccgccctgctcgcgcccccgcccgcccggacgcccaacaggtgcttcccgggcccgcccgcagccacagtatccttgggtggccacaaagtaaccgcccgcgcagctgcagccagg

SEQ ID NO: 313263 - DNA, 122 bp, Homo sapiens
ccatagatcagggaaacttatgtcttggtgaaatggaagaccatgtttctaaacacctgtcgccaggttggttcaccttgctgtggtactgttcttaatcctgcctcagtgatactgtattt

SEQ ID NO: 313264 - DNA, 122 bp, Homo sapiens
cggaagctgctgaccgtcgtggtggatgccttctacgtggaggatggccgactctgcctgcgggttgaccacagccgcttcgagggtaggtgcctggctggtccccagggccaggccgtaga

SEQ ID NO: 313265 - DNA, 122 bp, Homo sapiens
agaatcctcgaccagtagggagtcactgctgtgatggacaattcaccccttggttagttacggacataattttctccaggaaatttttgcaattatagcaatacaagagtgcaatgcagaaa

SEQ ID NO: 313266 - DNA, 122 bp, Homo sapiens
aggaggcttaaactggagtgagctgagatattggcactacactccagcctcctaatggtgcgatctctgctcactgcaacctccgcctcccgggttcaagcgattctcctgcttcagcctcc

SEQ ID NO: 313267 - DNA, 122 bp, Homo sapiens
gttcattataggattttttctttctttcttcccttactaaattgagaactttcaccttttcgcttaaagaaaacactttactagctgggcatggtggctcatgcctgtaatcccagcacttt

SEQ ID NO: 313268 - DNA, 122 bp, Homo sapiens
tgacctcgtgatccgcccacctcggcctcccaaagtgctgggattacaggcgtgagccaccgtgcccggccacgattgtcaggatttttgagaccttactacaacccctgacacctgaccca

SEQ ID NO: 313269 - DNA, 122 bp, Homo sapiens
ggcatggccactgagaccttgaggattcagtctggtcctgaagggtttggggggagactgcgaccagaagatgtttccatgtcctaattaatgggtgatggtggttgttagtctgactgttg

SEQ ID NO: 313270 - DNA, 122 bp, Homo sapiens
agagactgtgtacttgtcctctcccttatcagactacgagctgcttgagggcaggaaacacgatttgttcagcactagatgttgtgtctggcccaatgtttgacacagaggaggtccactat

SEQ ID NO: 313271 - DNA, 122 bp, Homo sapiens
caccggggaggggagggttggagtttagccccaagcccttcggacgccttcttcggctcccgcgtgggttgagacggcggcacggccaccagactcagctaaagggcggagtcgcgaggaga

SEQ ID NO: 313272 - DNA, 122 bp, Homo sapiens
ggaatctgcacacaagaaagaaattccaccttacaaataccaggccccagatccaggccccgtgtttgatgaatttattgattccacatagctgaaggcctgttctgtgccaagtatactgc

SEQ ID NO: 313273 - DNA, 122 bp, Homo sapiens
aggcgggtggatcacctgaggttgggaattcgagtctagcttggccaatatcatgaaacccggtctctactgaaaatacaaaaattagccaggcgtggtggcatgcacctgtaatcccagct

SEQ ID NO: 313274 - DNA, 122 bp, Homo sapiens
ttaaatatattactttcctgctccttaggcaggtgctatgggacgtttatgatgatgttgcgcagtcatgtagttctgaatttgcttacggttttagttacgtcattttaaacgatcatgaa

SEQ ID NO: 313275 - DNA, 122 bp, Homo sapiens
ccccgcagatgtaattgtttattcctgatagtaaagtcatttgttgcagccataagttgacgattgatagttttggtgttatatatcaaatgatccccagtggccaaaagtagcagatgagt

SEQ ID NO: 313276 - DNA, 122 bp, Homo sapiens
gcccccgacatctctcccctgaagtccctgcccctccctgcactccccgccggatgaactcgtcctccacatgaaagtacatgcagtgtgtgctggtcactcgctcgtttcctctctggccc

SEQ ID NO: 313277 - DNA, 122 bp, Homo sapiens
ttgcgtctttcccagcatccattcttttttgtgcctccatctagaatcatgtaatgtcagcgctagaagagaccaaagacagccatcctttacagcagtagttttcagatttcttttacagc

SEQ ID NO: 313278 - DNA, 122 bp, Homo sapiens
gctgattaaaacataaatgctgcttttaggttaaccacaaaggaacaactcaggatcagtcgtgattgctaaagtattcacttttatcttttaggtaagagaaaagaaaaagataaggaaag

SEQ ID NO: 313279 - DNA, 122 bp, Homo sapiens
ccagcgtccatacagagtggcgaccagcccggcctggcgggggattgtaggttcccgtcacgacggccatggaaaccagcttcccgtggtcagcccaggtgtccgccttcgtatttcagacg

SEQ ID NO: 313280 - DNA, 122 bp, Homo sapiens
cgtggtcccgaccgaaggacctggtgcgtccaggttaacggagctggggcgctccaagtccgggggacgagggagcggcatggaggggagcaggggcaactgggcctggttcccttttttcc

SEQ ID NO: 313281 - DNA, 122 bp, Homo sapiens
catgtgagtgagccattttcatcatccagtccagtcaagcctttaagtgcttcctgtcctcgatgctatctgactgcaactacatgactacactaaagtgagatagggccagctcagtccag

SEQ ID NO: 313282 - DNA, 122 bp, Homo sapiens
acctcagatacagctcgacacgtgcattgcttgggaaaggtctaccctgtgctcccggcacgtggccggagccccccaggactcgaaggcggtggagtttgttcctgcaacaggcccttccc

SEQ ID NO: 313283 - DNA, 122 bp, Homo sapiens
acaggccactgtccctcctgctgcaatgaaaggggccccacagggagtctcaaaggagcccgtacgttattcaccagagagtcaacctcaggtgtctgccagggcctgcgagcacaaagcct

SEQ ID NO: 313284 - DNA, 122 bp, Homo sapiens
ccgcgggcggccagcggcccccgggccatgctctgaggaggttggagcaaagcccggcggcgcggctttatggggccccgcccaccacaggacacacccaccacatgacacgcccacagaac

SEQ ID NO: 313285 - DNA, 122 bp, Homo sapiens
tgtgcttttggtgcgtctgggcctttctggtgcatcacaatcccccatcctcaatttccccgcctgtaaaatgggggtaataatctccactttgcactattgtgaggattgagagaaatgaa

SEQ ID NO: 313286 - DNA, 122 bp, Homo sapiens
tttagagaaacttaagtaacttgccccaggtcatagagtaagtgtccaagtcctcaagcccgggcagtcctgctgcatctgcatggcacatgcgcttggcctggtctgctcagtgtgtctcc

SEQ ID NO: 313287 - DNA, 122 bp, Homo sapiens
cccctactaccggacggccgacaaaggctggcaggtgaagccgagtccccagggccggatcgcctctgaaggcccttagaacatggaactcacaggcatattgcttcccttaaaacagaaga

SEQ ID NO: 313288 - DNA, 122 bp, Homo sapiens
gactggccagttataggagaggcgggagctgtcaggccaggagggaaacccgtcgggcggcggttactatggacgcgctcacgcttagtaaccgaggctccccgccctccgggagacctcct

SEQ ID NO: 313289 - DNA, 122 bp, Homo sapiens
ggacctgtgtcttgaagaatgattaagcgtctgtgggtgcagcaccctgaaaggacaacacgcaggagatggttgggagcgagggcagagctctgcgaatgttcagaggtgggagacggctg

SEQ ID NO: 313290 - DNA, 122 bp, Homo sapiens
gttccctccccatgtactatactaagtgttgtagaattttaggatccttgggcctgaattcgagagaaagactggaactaccatagcctggaatacaaaaacctggaaatactaacacgagc

SEQ ID NO: 313291 - DNA, 122 bp, Homo sapiens
ctaagggaccaggcgtgatgccttctggttctagcctctgagtgccccccacaactcagtcgtccccctcagctgctgcttcagagctctggggtctcagctgcctcttacattcctgccct

SEQ ID NO: 313292 - DNA, 122 bp, Homo sapiens
aggtagggccactagactcacctgtgtcgtgtctatttgtatatctgtttacagccagttcggccaccctcggcctgcccagcagtgccctggatgtgtcttgctttccccgggagccaatc

SEQ ID NO: 313293 - DNA, 122 bp, Homo sapiens
ttttttttaatcgaatacttttgatttctttttctcttttagccatggatagccctgcttcgctaagcgcgtgcgatgcagcacagcccttcacctggcaagcccggaagcctcaggttgac

SEQ ID NO: 313294 - DNA, 122 bp, Homo sapiens
cgccgccgctgctggagtcactgggaccctgtagtctgcgtgtgttagttgtaatcccgccgccctcctgtcagccctccgctccgccggccctccttccttccgccgccgcagccagcccg

SEQ ID NO: 313295 - DNA, 122 bp, Homo sapiens
tttgcttttttttcccccttgccctttcctgggtcactgcaggtcacgtgatgactgtcacgtgactcggtcaaaggatcttttcctcttacagccttgcaaaaaaaaaaaaagccgttctc

SEQ ID NO: 313296 - DNA, 122 bp, Homo sapiens
agaagctgggagagaggtttaaatacccgaacaccagacacacactctggtatggaactccgcagcccctgtcagcgcggggagacctcgctgcgctcccgcgctggagagggcaggagagt

SEQ ID NO: 313297 - DNA, 122 bp, Homo sapiens
gctatgcccaaaccacttagcctctcccatcatccatttgcagtgtgctgacaataacaacgtctcctttatagctgcatactaaatttttactgggctaagctgttaacataaagtggagc

SEQ ID NO: 313298 - DNA, 122 bp, Homo sapiens
gcctggtaagtggagctgggattccggcgccgtacgggaggagagagtaggccagcgaggcgatcctctgtccgggcatagccccaccccctcgaattctgtcgcagcagggggcacaactg

SEQ ID NO: 313299 - DNA, 122 bp, Homo sapiens
gcggggcgtgcgggccctttaaggccacgtgggggcgtgtcaggaagtgagtccagggcccgcctcccggggagtcggcctcggatgtccggaggctcctgggctgagccggcgacagagcc

SEQ ID NO: 313300 - DNA, 122 bp, Homo sapiens
cacttttgcttgctggggcagtaatcctgctgcgttcctcttagagcattctaatttggacgtgacgttcatcctgggttagtttactgggctgagattggctacaggcctgtgtgcttggg

SEQ ID NO: 313301 - DNA, 122 bp, Homo sapiens
acatgcacccaagaacaggtgtggacggggcggcacagaagtccacgggagggggcgacacgggtgctctttcacgggaatcttgttgggacagcattccttggggagcgccgggtcggcgt

SEQ ID NO: 313302 - DNA, 122 bp, Homo sapiens
gccaggaagaagcagtgggatctgcagcagcaccaggctgtcctccagaaagcctgtggacgacccacgcagccaccccacaaggagagcagggctccaaaaccaccacagccggtcagttt

SEQ ID NO: 313303 - DNA, 122 bp, Homo sapiens
ctgccccacgttccaggcctggccccagtgcctgcctttgcccaggctgctctgaggggccggtggtgctggtcacctgggacactttcaggactacaggttgccggcatctctttctaagc

SEQ ID NO: 313304 - DNA, 122 bp, Homo sapiens
cccagtcccaggaggaagacccgggagtaggttgtgaaacggagtctagagggaacaagacgctcacctgggccacagaacaatagaaggggaggtgggggcctcccctgggaccgggtccc

SEQ ID NO: 313305 - DNA, 122 bp, Homo sapiens
tggggtggggggagcaaaagccaacggctcgggtgaatcccagaggccaaaggcaccctccggagactccaggaatcctgttattatccaggactccggattgctaggtttgcggaagccca

SEQ ID NO: 313306 - DNA, 122 bp, Homo sapiens
aaagaggtgatgacagacacacagtggaaaccccacatcgtctcatggcaaaccgaagaacgggatgtgggaagctcagcttcatttgactgcaaagtcccagggttttgttgcacatttgc

SEQ ID NO: 313307 - DNA, 122 bp, Homo sapiens
ggtcttcgcggggtctgagtgggcggcattgccggatccggaaccccgcctgagggtcttcgcggggtctgagtgggcgccattgccggatccggaaccccgcctgagggtcttcacggggt

SEQ ID NO: 313308 - DNA, 122 bp, Homo sapiens
gatccggccgccttaacctcccaaagatctgggattacaggctacaggcgtaagccaccacgcccggcctttttttttttttttttgagacagagtctcgctgtgttgccaaggttggagtg

SEQ ID NO: 313309 - DNA, 122 bp, Homo sapiens
cgacattggacacccatcgagaggaaagcacctccgaggttcctagagaggccggcttggcgacttggggagccggaagcccatcccgaggcacttcctgtccggtcattgttctcgtgccg

SEQ ID NO: 313310 - DNA, 122 bp, Homo sapiens
cactgattcatttttggacacgattacatagccaaatatagaaagctaatctgaaatacccgcttaaaaaaaaacccgaataatctatggtgaatgtttttatgcattttatgaaattacct

SEQ ID NO: 313311 - DNA, 122 bp, Homo sapiens
gtgccggatataatctcgtggtgcgccgttttttaagccggtcggaaaagtgcagtattccggtgggagtgacccgattttccaggtgagtccgtcacccctttctttgactcagaaaggga

SEQ ID NO: 313312 - DNA, 122 bp, Homo sapiens
acaactttgcaaactgatttactcacagactgctttctccttgcccccggttaagtatctcgtgaattttgtgtttcccagaacacattttgggaaacagtgtttcagaaaattcaattctg

SEQ ID NO: 313313 - DNA, 122 bp, Homo sapiens
cgtggcccttcctccgctgcaggatgaagtatgggttggccctctcggtgatccacagcgcgttggccagcaacacctcctccgggttcacccacatggtcctggctgccgcgggcgggcgc

SEQ ID NO: 313314 - DNA, 122 bp, Homo sapiens
gcgcccttctgagggcccgtgctgctgctgattgtaaagaagcgcctgacaatgcagacacggctgagtgcatcctgtgtaaccggcgcatgcgcgcccagaggcgccccacacgctcttca

SEQ ID NO: 313315 - DNA, 122 bp, Homo sapiens
aggcatggagttgcaaagtgtctttctggatgcagagagatgtgaactaacctgactcatcgtctcatcccaaaccaacagtctggcttcccatgagttgaagcagctatgccttggcccac

SEQ ID NO: 313316 - DNA, 122 bp, Homo sapiens
ggctatggggcctgggagggggccttcaccgcgctgagcgacaggaggccgggtccccaccgcctaatctctgtcatccacctgggcaggtctgaggcccagagaaagggccgccgcctgcc

SEQ ID NO: 313317 - DNA, 122 bp, Homo sapiens
gctcttctccagccagagctgggactgttcaggctattggaggcgggatgtgggcctgagcgcttggttgcagaaacttcggggtcaacaaatgccggcgggagctgagccaaaagagcttg

SEQ ID NO: 313318 - DNA, 122 bp, Homo sapiens
ctcagcctgcgccacgcgctcccagttccacttcctatctcctgctggacggacgtagagcgtccacgcccgcccagcactgccggctgccaggactacaagcggcacgccaacgtctaagt

SEQ ID NO: 313319 - DNA, 122 bp, Homo sapiens
tttaggagggctgagaagagagggacgtggccggctccggaagaacctcgacagggtcttcgaggctttggaacagggtctcaagctttagaaatgtccccaaaagtatgttcccagagagc

SEQ ID NO: 313320 - DNA, 122 bp, Homo sapiens
ctctggctcttccgcgctccgaattctggcgccacaagctccgcgccagcggccgcagcgcgcgcgcccagaatccctccgccgtctgtcccgcccacgccaccaccgtagaacagcaggct

SEQ ID NO: 313321 - DNA, 122 bp, Homo sapiens
actctgcgctgtgcggagcgggattcttgggcggaggggaccatctttgagtcagcgacgcgtgtattcaagtcctcctcctcgttttttattacaaacaaataagaattattttaggaata

SEQ ID NO: 313322 - DNA, 122 bp, Homo sapiens
ctgtgggaagagggggtgattatggctggtgctgtagatacaaagatatcagccttgatccgtgttctccagagagggagaggagacagacacatgaaaatgcttacctgggtggcataaga

SEQ ID NO: 313323 - DNA, 122 bp, Homo sapiens
ggtacgcgttgcagccactggactacgaggagctggagctgctgcagttctaggtgagagcgcgcgacgcgggcatgccgcctctgagcagcaatgtgacgctgccaggtattagtgctgga

SEQ ID NO: 313324 - DNA, 122 bp, Homo sapiens
aagagcaaaagaacctcttgccttgaccgggaattgaacccgggtgtcccgcgtgtgaggcgagaattctaccactgaaccaccagtgcctctccccagcaacccttggagaattatcggaa

SEQ ID NO: 313325 - DNA, 122 bp, Homo sapiens
cactgctgccgaggccgaatccggttctgtagagcatgtactcagaacacttctcctccccgggccctccagcccctgcctcccaccccagccatcaatatcacatcagggcaaaggctcga

SEQ ID NO: 313326 - DNA, 122 bp, Homo sapiens
aaaaggcccagcgtggtcgcgtgtgtaactcaggacgcggctgcgctgggcgcccgagcgcgttctcaggactgcggcccggagttcactgcgaggactgggatcacccatcaccccgccct

SEQ ID NO: 313327 - DNA, 122 bp, Homo sapiens
cgacgcgctcaatacatcgtaactcaggctttcaaaagaggcccgtacgccccactaggccgcgaaattgggtcgcccggggcggtggcagccccgcgtagcagccgcggccagggcccgcc

SEQ ID NO: 313328 - DNA, 122 bp, Homo sapiens
agaacctacactgagatgcatgttatcaacaggcatgtccccagggtgaggctccccacccgggacccaacttggtcagttacaaaacagggacgaaggcgggaggaagcccagtgtcacca

SEQ ID NO: 313329 - DNA, 122 bp, Homo sapiens
ccgggcttccatataaagtaggggccctagtggaggccgcagcagtagcaccagcggctgcggcggcggagctcctccgaggtccgggtcaccagtctctgctcttcccagcctctccggcg

SEQ ID NO: 313330 - DNA, 122 bp, Homo sapiens
tatctctgcgttatgcccttatagcgccgggagtgggtgccttccgccggctgtacagagcgccggcaggtggcgcccagcggcgagcttgttccagcttggtttgggccaggtggactgga

SEQ ID NO: 313331 - DNA, 122 bp, Homo sapiens
tccgtgcttgctagcagtcctgggcggagcagcagccagtgaatccgcaggtggcttccccgcagcgcccctcccggctccttctcctcccaggctcccaaagagccaggaggcagctctgt

SEQ ID NO: 313332 - DNA, 122 bp, Homo sapiens
cagagaaccccaacagcaagagagccccaggtgatgctggctctccacgtgcatccggcacgtttcactgcagccatcatcaacttggcaaagtaggcaagctcagcttgtggtttccattt

SEQ ID NO: 313333 - DNA, 122 bp, Homo sapiens
gtgtctctccgcggaaactccgagaggagcagaggtctgtagaggtagagacgtaggcttcggatcttttagaattctgctggaagtctccaagtcaaggtaagttataccttctgtttaag

SEQ ID NO: 313334 - DNA, 122 bp, Homo sapiens
gggattacaggcatgagcctccgtgcccggtgcatccctaatcttgagcatgatctcagtcggcaaatgaggccatctgttttcagcctgtttgaaaataagatgtggggaggccatgatgg

SEQ ID NO: 313335 - DNA, 122 bp, Homo sapiens
gccttctgttatgcccggacaggtccatcagagggctccttggtctagcggtagtgttagcgtcaaggaaaaacacccgctacttagcggaccgggaaagggagtctccctttccctggggg

SEQ ID NO: 313336 - DNA, 122 bp, Homo sapiens
cacgcccgagccacccgaggagtacgtgtacccggactaccgtggcaagggctgcgtggacgagagcggcttcgtgtacgcgatcggggagaagttcgcgccgggcccctcggcctgcccgt

SEQ ID NO: 313337 - DNA, 122 bp, Homo sapiens
ccacctggagagccgcaggctccaaagtcttccccattctcggggaccaggttccggggtcgcgctgagggcccctgaaccctcttggactgcctggcagcggcttcttcctaccaccacgg

SEQ ID NO: 313338 - DNA, 122 bp, Homo sapiens
cactgttccccacttgccctttagccctgccccgagaccagaattctcacccggccccaccgggggtgggggcagaatctcaagaccatggatccctgcagatccctggagagtgtggtgtc

SEQ ID NO: 313339 - DNA, 122 bp, Homo sapiens
cactgttgctgggacgcgtgcctgtgctggtgtcttagagcaagagcctccctgagctttcggagtggaaggtaaggaagggggtccaggggtcaccttttctctgccgggggtcgccaccg

SEQ ID NO: 313340 - DNA, 122 bp, Homo sapiens
cactgcctgggctgagagcccgaccctcggggctttgccacacgaaagccccaggcctggcgaggctcagggaggccgtttcaaccgtgaaaacttgggtttctgccccaccccagccctgg

SEQ ID NO: 313341 - DNA, 122 bp, Homo sapiens
cccacctcagcctcctaaagtgctgggattacaggtgtgagccactgcacccggtgttttcggctttagagacaggttgttttgtcacctaggctggattgtaatggtacaatcatagttca

SEQ ID NO: 313342 - DNA, 122 bp, Homo sapiens
tctgtgtggagaagctgggggccggctccgtccctcggtggagcatggtcattcccaaagcgtccccttcctaagggggaaaaagaggcggtcagggcttgattcgcgtgtcccccggaggg

SEQ ID NO: 313343 - DNA, 122 bp, Homo sapiens
gacagagaagtgcaatattgtgtttgttcctttcacaagagtcctgttgaacattaatgccgtgcagtgccagagttcaaggtggtgagtcactgctcactctgtaaataaccactgcactt

SEQ ID NO: 313344 - DNA, 122 bp, Homo sapiens
tccctggcaaaccaagacgacctgatcacgtagttagaacccagagaaagcattactgggcgtgagccggtcggggctccggtatttgcccttcgcccaggtgttgttttggctacagactt

SEQ ID NO: 313345 - DNA, 122 bp, Homo sapiens
attaaccagatagtttatatttcctgtttaaactgtgttattggatcctgaaggtgccttcgcttttctgtctcattgttgtcttaacctttggtggaaatagtgctgaagaaaccctcttc

SEQ ID NO: 313346 - DNA, 122 bp, Homo sapiens
ctcccacctctcgtcccgccgtcacgcgccgcgcctggtctctgctgtcactctgctgggcgccggggactagcttggtgccaggtccaccgtggccgcctgttctcacccgaactctgagc

SEQ ID NO: 313347 - DNA, 122 bp, Homo sapiens
tggtctcagcgcctagagcgagatgcgaaattagtagccgcccacccccttctcagttcccgcccccagggaattataatttcctgggaaagtgtctggttctcggagaatccttggggcgg

SEQ ID NO: 313348 - DNA, 122 bp, Homo sapiens
cggccgctcctctcacacgcctgggcctatctctggtttcctgcagggagagggaaagcccgtggctgggggtgcaggcgctgttacatcctctgtgtcttattctccgtttaaaatctggt

SEQ ID NO: 313349 - DNA, 122 bp, Homo sapiens
ggccagcacggacatgcagcactgaggcgtgtgctagcgcccagtgcgtcgacccaggcacggacttgtttggagcatacaggacagctctgcgttaagacctgtaagccattaaagaagta

SEQ ID NO: 313350 - DNA, 122 bp, Homo sapiens
caaatccaggcaccccagacccacccacggcccgttgcctagcaacagcctccccacccccgcctccgcgccttttcccgccgactgcccagtgcgcacgctcagagccttcctccacaccc

SEQ ID NO: 313351 - DNA, 122 bp, Homo sapiens
ccgcgcctcagccccgcctgccccgctgggagaggtaaatggaccgcacttggtttacgccggttagagtctcagatgctttgttacaggggcacaaactaccctacccctactgtgcgtgg

SEQ ID NO: 313352 - DNA, 122 bp, Homo sapiens
aaacttcctgttgaagtggcccccttgaagtggccacagcaggaggattagagatgggggcggctccacatgcttttaaacaaccagagaactcagtatcatgagaacagcaggggggaaaa

SEQ ID NO: 313353 - DNA, 122 bp, Homo sapiens
cgaaactgacacaaagtagcgggccgaggccccgggggagcggggccgcagctgggggggcgggagcccgtggggagccgagccgagcgccccccgccccagcccccggcatgggcagtacg

SEQ ID NO: 313354 - DNA, 122 bp, Homo sapiens
agcttttgtagccgcgggtagggacagcctgggctccctgaaccaagcgcgcgtgggcggcgaccccgtccctgtgcaccgacccgccagcgcgcagcctggtgagagcacttgtgcgcctt

SEQ ID NO: 313355 - DNA, 122 bp, Homo sapiens
ggtgggccgaggggttggaggtggggccccaggaggacctcgggctgtgggccgggagagcggagtcggggagtggggcgggggagcgaggtggcgccggggagcctgggatatggcgcggc

SEQ ID NO: 313356 - DNA, 122 bp, Homo sapiens
cctgtgcagcttcccaacagcgtgctgctgcctggcaaatcagcagcctcactcacacaccgagcagttccacgacgcacaggaatccaagcgtaagattcttctgtgagagtagcaggtgg

SEQ ID NO: 313357 - DNA, 122 bp, Homo sapiens
agtctgggccacggtcgggacccagtggagggccggactggtcagggttcaggcgggatccggcgtccgagttctggtgggcaggcctggggcaggatctggctctggctgcgggtcctggc

SEQ ID NO: 313358 - DNA, 122 bp, Homo sapiens
cttgggagctctagaggcctgattcatcctttctctaagcccttcatatgaaactatgtccggcaaagtctcagactcacccaacccttcccatgtccacattcacagctaacaggagccac

SEQ ID NO: 313359 - DNA, 122 bp, Homo sapiens
tgcaagccacacgtctcattattcataaaactcttgatttgcggccaacacggcccccgccgccttcccaggggctaacctgacaacaggcactgctcagacaagttcagctcacaaggcag

SEQ ID NO: 313360 - DNA, 122 bp, Homo sapiens
cggagatgtcatttactatctttctgcacagtatgttcaaaatgaagctcaaatctggcccggcaatccccttaaaatgccaggaaacctctcatgggtgttaatggtctggatttcccaaa

SEQ ID NO: 313361 - DNA, 122 bp, Homo sapiens
ctcaggtgatccacctgccttggcctcccaaagtgctgagattacagatgtgagcaagcacgcccggcctacttatcattattgatccctgacatatacgaaggggttggatatattaatta

SEQ ID NO: 313362 - DNA, 122 bp, Homo sapiens
ctggttcagtgttgacggaagctgaagacagacggaagctccactacaacatgttcagggcggccctcgaggacagcgtggagaagaaatcctccctgtgggtataactcggatcagttagc

SEQ ID NO: 313363 - DNA, 122 bp, Homo sapiens
gaaagatgtcctagtgggcagcgcatcatggcgccagctggatacctgattgagttcatgcgtttctttttgctttcaatttttttttttttttttgagatggagtctcgctctgttgccca

SEQ ID NO: 313364 - DNA, 122 bp, Homo sapiens
tgggagccggtagaggaaagacaccctgaatccccgaggtcaagcaaagccctggggaggcgccgtgggatccctgcctcgggcctgcctagacagtatgtgaatgagtatcccagagattc

SEQ ID NO: 313365 - DNA, 122 bp, Homo sapiens
gcctgaaaaagcaagctgccctggccacaagcaggatgggcccatgggagaagctggggccgtgactttgcagcaaaccagtgatggccttgggtggtggcagtggagagtggagagggaaa

SEQ ID NO: 313366 - DNA, 122 bp, Homo sapiens
ttcagtacaaatgcaaccaccatttttccctcaaatattttgactgtggctggttgaattcgtgaatgtggaacccacagataaggagggcccactgtattttgctcagctagctttccttc

SEQ ID NO: 313367 - DNA, 122 bp, Homo sapiens
ggcaaggtgctcatgacatcgctaccgagctgtggagaagaaacagctttgtcatgatgccgacctcgggcaggtgtctcagctcccagaggtgcagccctgagccatcaatcctcccagac

SEQ ID NO: 313368 - DNA, 122 bp, Homo sapiens
tttgctttatcgtagttttaggaagcgactgtcaggccatgttgcctatccatttctaaacgactggctttttaggatcccgttttcacccttctatggcggtgggttgggggtggggtgtg

SEQ ID NO: 313369 - DNA, 122 bp, Homo sapiens
atattataaatccctgtggctggtttggtttccgtgccatgtgcatctgtgcatgttgcacgctcatgtgatcatggggacgtgaggcaggtggattgggcctggtgcacagactattcatc

SEQ ID NO: 313370 - DNA, 122 bp, Homo sapiens
tgttacagagcactttcccaccattaactcgtgcctctgggagatgcgcaaatgccagctcgatttgggtggtggaaggtgggtggggaaccatctgaagcttaggcctgacagatgcagaa

SEQ ID NO: 313371 - DNA, 122 bp, Homo sapiens
atggccaaaacaactgattccccacacacacccccaaacatgcttctccctaacctttcccgtctcagtgaacggcagcactgactgcccagtggcttaataaaaaaatctaggtgtactct

SEQ ID NO: 313372 - DNA, 122 bp, Homo sapiens
gactgagaaggggggcagtccgggagaggagagaggaaatgatgagccccatcatccccacgaccatgtaagaattacacgcgacagtaactcgggctgttgtctcagccccagcaactaac

SEQ ID NO: 313373 - DNA, 122 bp, Homo sapiens
actatatgaaactcttagcagagagcccagcactggtggactaagttatttacaatagcccgtctcgagacctgaggtttccctccacagaaaggttaccttccacaccactgtcaatgtca

SEQ ID NO: 313374 - DNA, 122 bp, Homo sapiens
gtgccacaaggtgcgggtgctggagacacagctgagcctggaaatgagagtgggcatcgccgtggtcatcatgactcctctgcggcgtggtcaccatgttggttcactgtgttgggctctta

SEQ ID NO: 313375 - DNA, 122 bp, Homo sapiens
tccctcagaaacaagcaacagggctgaccagtcacagctttattaatgaccagggtaacccgttcagctagggagctcctcaatgagagttcttggggcaggtggcacggggcctccccaaa

SEQ ID NO: 313376 - DNA, 122 bp, Homo sapiens
cttggcaggagagatgagaccccttgaatattgaagaggctgccgctcttcactcagaggcggcgggatctgattaaacatgcttacaggaacgactgtctccaatggctttcctccagcca

SEQ ID NO: 313377 - DNA, 122 bp, Homo sapiens
aaaagggttgttacaaaaccaaaccaaatgctcctacctccataccccaataaaaatcagcgaggtagaaaactaggagaaatgcatcttggaaggcacaggaagagacgagttggaaagga

SEQ ID NO: 313378 - DNA, 122 bp, Homo sapiens
aaacacggcccctcccccctctccaaaaacaaaaacaaaaacttcaaggccatgccgccgcggccatcagtagctccggctcagaatttgaccgttaaaaaaaggaaactaggctgagctag

SEQ ID NO: 313379 - DNA, 122 bp, Homo sapiens
cggtgtgtggggggactcgccgcagacacaacactcactgttccttgatcttgttcgcagcggtccttccgacctccttcgtgtgggcctgggctttgcatccgtgccacaggtagatgagg

SEQ ID NO: 313380 - DNA, 122 bp, Homo sapiens
gccattctccattcaagggagggcgatattccagtgctgatcccattttcctcccctcctcgtgggaggccatcccgggagatctataggagatggggaaggctccccactgcccctggtac

SEQ ID NO: 313381 - DNA, 122 bp, Homo sapiens
tccctgtgtctctgtctctctctttctctgtgtctctgtctccctttgtgttcttctccacgacgttctctttgtctgactttctgctcctgccgcgtgcgcagaggggcgaggaggaagca

SEQ ID NO: 313382 - DNA, 122 bp, Homo sapiens
ggctttacgccgtgtcccgtgcgtagctgctgtgccgcctcactgtacatcctgcacccccgtgctgaagttcaggcttgcttctcgcacatcatgttcgagggatctgcttcatgaatcgt

SEQ ID NO: 313383 - DNA, 122 bp, Homo sapiens
ggtagggggtgtgtgtttgcctgaaccagtagacccccttcagtatgtatgggatggagtcgtgtgggaatagaagcagcaagactactagcaagggctctgcatttgtactcttgcccctg

SEQ ID NO: 313384 - DNA, 122 bp, Homo sapiens
ttgccctgggcctgggaggccggtggcgggagcctcccctacagtgaggtgggtggggggcgccacacggcgtctcagggagaggggagaggcggcttctgttccgggaagagggaacggtg

SEQ ID NO: 313385 - DNA, 122 bp, Homo sapiens
gtccgttgtctgatgctgcgagacactatccgtttgttacagcgaattgggggccgatgacgctggaggtggaagaagccgcggttctgtttcttaatggcgaattagcctgcggacgtcct

SEQ ID NO: 313386 - DNA, 122 bp, Homo sapiens
aaaaaaaaaaaaaaaaaatcactgcctatccttgggccaaaaggtttctacaggaagctgcgccctcttgaggacaggaagtaacaagatgctgtaaggaagaggtgattctcagggttttg

SEQ ID NO: 313387 - DNA, 122 bp, Homo sapiens
gttttcacgtggtgactaatacttttattgacttatttttattgatacataatatttgtacgtattgatggggtacatgtgctattttgttacatgtgcagaatgtgtgatatcgagttggg

SEQ ID NO: 313388 - DNA, 122 bp, Homo sapiens
cagccgtctttatctcctgcgccctcccagttccctagttcaatcccgtccgcggcgggtcggtgcctccagcactccgtgcgcccgctgatgtgagaaccccacctcccatgtcgtcccct

SEQ ID NO: 313389 - DNA, 122 bp, Homo sapiens
ttccagcactttgggaggccgaggctggcggataactaggtcaggagattaagaccgtcccggctaacacggtgaaaccccgtctctactaaaaaatagaaaaaaattatccgggcgtggtg

SEQ ID NO: 313390 - DNA, 122 bp, Homo sapiens
ggccgggcagcagcttgggcctggcaacatggaaggcgcccacctcgtctgggcgagtaccggaatcccaggcccaggaacactgtggcagccgccggctcctactcctactcccccctccc

SEQ ID NO: 313391 - DNA, 122 bp, Homo sapiens
gatcatggtggggctgttgatcagcatatgccttttcttctaaccaagtgggtcaacacccggtctaagatagtccttttacttttctcctgtggaattttaatcttgagtggaatgactta

SEQ ID NO: 313392 - DNA, 122 bp, Homo sapiens
attcttttataaccaccttatgcaaattagggctccgaaagtcgttcatttccattggtccgtgtgcggaccttgcgttttcagcaatgcgtacgtaacaacaccgactcttgacttgattg

SEQ ID NO: 313393 - DNA, 122 bp, Homo sapiens
cagcgcccgccatgcaggaccctgggtctcacccattgcacccaccgtgcgggacccctgcgcctcacccggaacatccacagtgtgggactgctgcgtctcacccactgcacctgccgtgc

SEQ ID NO: 313394 - DNA, 122 bp, Homo sapiens
taccgccttttggccaagagtttagccgcgtcctaggggagcagcagggacggtcggggtcgcggccccgggcggggctctgaagtgccgcgtgcgccagggacccaggggacaatgttgga

SEQ ID NO: 313395 - DNA, 122 bp, Homo sapiens
ggcccctctgggaggggaatgaactggagctgcccggagcggggccaagtgggcggggcacgggagggttgagcgtgggccgaggctgccacctgctggacaagccgaacccaggcgcagag

SEQ ID NO: 313396 - DNA, 122 bp, Homo sapiens
gcgcgtcacaaaggcggccggagcttggcatttagcttgggccagagcaaggcgcagacccggggcgcccatggagttggcgtcggagcaacagctgcgcgggcggagcaggtaggcgcgct

SEQ ID NO: 313397 - DNA, 122 bp, Homo sapiens
tctaaatccctttccagcagatggggcgggtgggagcagagagccacggtcttgtgactccgtgaaggccctcacatccctgttcccggtaccagggaaaaccgttccctgagctgcgccca

SEQ ID NO: 313398 - DNA, 122 bp, Homo sapiens
cgggcctcgcgggcaggctgggcagccctcagggaacaggtccgtgcggcccacgtgggtcgcctgtgagcttctgccaagggtgggggcccacgcggaggcgatccgctcgttcctcccag

SEQ ID NO: 313399 - DNA, 122 bp, Homo sapiens
gcggccgcggcgaggagagcaggtccggggtgcggcggggagagctcggggcaggcgagtcgccccggccccgttcccgctcccgctccgagcccgcggcggcggcgcgcacctgccgcggg

SEQ ID NO: 313400 - DNA, 122 bp, Homo sapiens
cattcccctcagttgattaccattattgcagcatacccttgttgtccaatctcatttctacgtgactgtccatttgtcagcaaacctaagcataagaatacccagcttttcctgggtctttg

SEQ ID NO: 313401 - DNA, 122 bp, Homo sapiens
ctgcagtctcagggtccatgtccacaaatcaaagaatagttctggcactatttctaaagtcgaacataatccagagccacatcgcattccaagacatactttctttcaaccagaatcaggaa

SEQ ID NO: 313402 - DNA, 122 bp, Homo sapiens
ctgccctcgaaccaggctcccttggcgcgtggggctctcccggcgcttggtcccgacccgcgccgcagtcaggataccacggcaatctggggtcgctttgtaaggagctccgacctccgggc

SEQ ID NO: 313403 - DNA, 122 bp, Homo sapiens
cgatggcctgccagcctgccagcatccgccggtgcgctcttactcaggtaggtgcctctacgtccagccgcttgtgtcttcttccggtggtgtgttcttctccacgtccagctgcttgtacc

SEQ ID NO: 313404 - DNA, 122 bp, Homo sapiens
agagaaggctcagtgctggtgtgttcctgctggcagtagcagaagggaagtgctatgtgacgctcctgaaatctaattgctccaggtgcatcaacacaggtgctccattatgctgatgcatt

SEQ ID NO: 313405 - DNA, 122 bp, Homo sapiens
ccaggcgcccggcaagagtggcgggcgcggaccctttaagaaggccggggggcgtggcctcggggcgtggcccggggcgtggcatcggggcgaggcttcgggggcggagcccaggcagcgcc

SEQ ID NO: 313406 - DNA, 122 bp, Homo sapiens
ggaaatttaccaacgcggaaatttacccacttctgtcagaaaactgatcagccatgtcttcgccacacgtgatgccaggattcttaaacaggcccaagaccggagaccaagatgtcgacgga

SEQ ID NO: 313407 - DNA, 122 bp, Homo sapiens
cggaggaggtgggcggccagaggcgtggagatgcgcgcaggccgggctccaggccaccggcgcccgcccacccggagcttaagatctagagagagcacggggtcccgcctttgccacctctc

SEQ ID NO: 313408 - DNA, 122 bp, Homo sapiens
gctgtgctccggccccggctgccacatcggacagtgcagcctgggcgagctccagagcagcgcacgtgagggcttgcaaggcctgtgggaacaagtgcacctgccctgccacccacacgtgc

SEQ ID NO: 313409 - DNA, 122 bp, Homo sapiens
gcacctaaaccgcttaaaccacccagagaggtcgcatacattaccaaacaccaagacaaacggaagagatttttccatcttatgtcattatttcactatatctatctacatgcacagcagcc

SEQ ID NO: 313410 - DNA, 122 bp, Homo sapiens
aaccagagcaaatatttattataaaagttcaaaagaaagtgtatagtcctctaacttcttcgaacttttaggaagctcagtgatggtgtcactggttctttccacaaacaaggcatacaggg

SEQ ID NO: 313411 - DNA, 122 bp, Homo sapiens
cagcccgagtgttggacaagcttgctgcagaggctcccctagatagggctgcaggggtggcgtccggcagctctagctggagaagcaggaggaggggcaggaaggaatcctgttcggagctc

SEQ ID NO: 313412 - DNA, 122 bp, Homo sapiens
cacacctttgtgcagtccggatctcacttggcggcaagggagaaggcaaatctgtgaggccggggccctgcacctgtgcagcgaagcttagcgttcatccgtgtaacccgctcatcactgga

SEQ ID NO: 313413 - DNA, 122 bp, Homo sapiens
tgcggagtggaggtgtgaccctgccttagcccggggaggcacctcgggaggctggccctgcgctcaagtcctccggtcccctcgtgtccctatgggagtcctggcgtctgcgctctgctggc

SEQ ID NO: 313414 - DNA, 122 bp, Homo sapiens
aggcttacattaagttgtttcaaaccaggagctgtttttgcagccagaatgcaggaggctcgggcgtctgctctttgattagcagggccctgtctccagagcgactgtggtctctgtctgac

SEQ ID NO: 313415 - DNA, 122 bp, Homo sapiens
tgggagactagagcagctccatggtccagcagcattgctactcgcctgctctgcagggaacgcgcagaacggattggaggcaaaaaacaaaacagggagggggacatcaaggagagaaattg

SEQ ID NO: 313416 - DNA, 122 bp, Homo sapiens
ggcaaaggaaaagaaggggcggcgggccgacgtcggcggcgaggaaggacggaggagcgccggagccgctttgctgccctccgcgtggtcccgtgcctccccgacaccatggccctggctga

SEQ ID NO: 313417 - DNA, 122 bp, Homo sapiens
ctttcttacccacagacaggaggcgccacgagacggcgggagtggcaaagcaggcaaacacgtcgtcggtgcaggagaagtgggtgaggtgcgggaggatcacggactgaccccggcactgg

SEQ ID NO: 313418 - DNA, 122 bp, Homo sapiens
tggggcacccagactccccagagcaatgaaaaaagtgcctagagcatcagtagagcacggcgctgaaagttttagagatcgtcgccccctcgccccttgcagctctatcccctccattctct

SEQ ID NO: 313419 - DNA, 122 bp, Homo sapiens
acgtctgacgtcgatataatacggcactgcttgcggacttacgccacgattgacaagacacgggacgcggaggccttagttggccaagtactagtgaaaccatacatagacgaggtctgtgt

SEQ ID NO: 313420 - DNA, 122 bp, Homo sapiens
ggagcacttggagcggatgctggggcaggctggggagcgccgggctgatgtgtacgtgggcgtggatgtgtttgctcgagggaacgtggtcggaggccgattcgacacagacaaggtgggtg

SEQ ID NO: 313421 - DNA, 122 bp, Homo sapiens
aaatgtggccttactcaaaaccccagggtgatttagggtagaagagcgaatattcagaggcgggaagtggtgagttatattgttacattccctttcgatggaactaaatgcggttatctgcg

SEQ ID NO: 313422 - DNA, 122 bp, Homo sapiens
tttaactcagagttcttaaccttttctgcgccgtgggccccttggcaagcaagtgaagttcgtggactcctacaataatgctataaatgcatagaagaaaagacacaggactgtgaaagaaa

SEQ ID NO: 313423 - DNA, 122 bp, Homo sapiens
cccctcggctcccctacccagccctgctgctgcaggcagaggtgaggtgggctaggtccacgtggccttgctgctgtgcctggcaccaggtggcagcatatacaggtcttaccctgccagct

SEQ ID NO: 313424 - DNA, 122 bp, Homo sapiens
ggagctgtcctggggcctggggagtgaggacccgtgccagcagcacagactctgccaggccgggcccgctcaggtgggagcccaggccgggtgaagctgtgacccggccctcaccccaactc

SEQ ID NO: 313425 - DNA, 122 bp, Homo sapiens
ccccttccggaattgctggcggaacctctaactcgcccggccactccagcttctccgccccgtccacaaagaaaatcaaaacaacccgaaaacaaaacattgcctggtggtggggaaccacg

SEQ ID NO: 313426 - DNA, 122 bp, Homo sapiens
agaggggctggcggatccggaagtcagaacgggacaccgcctttcactgtatcagcgagccgtgcgcctgcgagagtctccgagctgtaaaaagttcaagcacctcttccagcagctcccag

SEQ ID NO: 313427 - DNA, 122 bp, Homo sapiens
agggatcacagaaagaccatcgaggtccaggagctacctgcaagcggagatccctctggacgccccgtgcctcacccagcaaagccggctcacaaccctgcgctctcaaacctctaaaaggg

SEQ ID NO: 313428 - DNA, 122 bp, Homo sapiens
ctgactcttgaagcccaaaacttcctgaaattagccttttgctcaacttctgtctactgtcggactctacaggccagcctctgcctcacagtggaccctccagacccagatggtgtctcact

SEQ ID NO: 313429 - DNA, 122 bp, Homo sapiens
attagagaatggtgggaatttcagacaagttggtgagggtgagaagtaagggaagagaaacgttatggaacctctcacataaaaagtgcacagtggcctacccctatatggatgtgagactg

SEQ ID NO: 313430 - DNA, 122 bp, Homo sapiens
tttgtgacatgtgagaacattctcctgacagaagcagctcccggtaatagtaacagcttccgggccctcgacaggctgcagcccatcaccttcagcgtcctgccaagctcagcagcagcgtg

SEQ ID NO: 313431 - DNA, 122 bp, Homo sapiens
ctttttctttctgaccaatacatgctcaagaaatcaaatatctgagatacacaaattgaacgcggtagggtgggggaggaagtagggagataaagcctatgctgctgattcctcaattatag

SEQ ID NO: 313432 - DNA, 122 bp, Homo sapiens
ctgaggcccagcagaactcacaggcatggaagtgctttaagaagccttcactgtgagctgcgcaggggtattacttatgagggcattctcagggctctgttcctggaagtttcatccctgga

SEQ ID NO: 313433 - DNA, 122 bp, Homo sapiens
gggttgtatcatgcccatttgatggaagagaaaactaagattccattagaattgatgtgacgtatcctaaatcacacagctgcagcaggactaggatttgaatgcgggtcaatctgcctcca

SEQ ID NO: 313434 - DNA, 122 bp, Homo sapiens
gtcgtcctgctggtcgctcgtccagagcgtgaggttgtcgcggaggagctgcatgatgagcgtggagtccttgtaggagtcctcgttgagggtgtcaagctcggcgatggcgtcgtcgaacg

SEQ ID NO: 313435 - DNA, 122 bp, Homo sapiens
cgagtcaagggggaagacggttgggaagagaggaagccactgggtgcaggggtcccggggcggcgacagacctcggcccccatccaggagccctcaccacgcaaacgagcagaaggcagcgc

SEQ ID NO: 313436 - DNA, 122 bp, Homo sapiens
ctaattagaaaagcaataataatcggtgtaattgctctaaattaccctcctaacagagaacggcgctcggagccgggaacgcagctgccgccgcccagccctgagccccgcgcttcgcgccc

SEQ ID NO: 313437 - DNA, 122 bp, Homo sapiens
gcagccccctcctcgccggctccgctcctgacagatggcgcaactgcaacgacgcgccgccgccaccagcgcggctgctcgctgctactcttgctgatgctctgcccctccagctccggagg

SEQ ID NO: 313438 - DNA, 122 bp, Homo sapiens
cattagcttgattgtcatcatttcacaatgtagacatatatcaaatcattacattgtacacgttaaatgtagaaagtttttatttgtcaattataccacaccaaatctggggaaaatgtttt

SEQ ID NO: 313439 - DNA, 122 bp, Homo sapiens
caagcctgcccttaagcccgggctgcaggccggagcagccccttctctcctgccggctgccgccccctcaagcctgcaggtgtctctccggagatgctgggcatggggcagggtttgaggta

SEQ ID NO: 313440 - DNA, 122 bp, Homo sapiens
gctgctgccctctgcccggcagccaccatctgttcacctatcgctcattccctgaggactcgggccaccaactttcactaggtcacagcgcaggttgtggacaagagaaccgtgatgcaaag

SEQ ID NO: 313441 - DNA, 122 bp, Homo sapiens
ctctcgccggctccactcccgcagtcacttcctgcttccctcccgcacacgtggccctcccgcctccgggccccgcccccttggccgcaactggcaactcccgcctgaagaatagattctct

SEQ ID NO: 313442 - DNA, 122 bp, Homo sapiens
gtgcactttgattctggcttagttggtgggtaacgggtatgtgggttgagtttggttgttcgcttgatttgagtgttagtaaagaggcatcgtaccctgtactttacaagcggcatgttcag

SEQ ID NO: 313443 - DNA, 122 bp, Homo sapiens
agcaacccaggcatctctgagtctccgcccaagaccgggatgccccccaggggaggtgtccgggagcccagcctttcccagatagcacgctccgccagtcccaagggtgcgcaaccggctgc

SEQ ID NO: 313444 - DNA, 122 bp, Homo sapiens
tcgatggtggcccactgctcagacctcttccatgtctgggcgagctcctcatttctggtccgcacggcctccagcagcaagctgatgctgtcctacaagaagccaaaaggaaggttcctctt

SEQ ID NO: 313445 - DNA, 122 bp, Homo sapiens
ccctgccccgcagcagggggatcgggtgttggccgcggaactgcaggcttggggcctcggcgtccctgtcttgagcgatcccgttaggccaaacacgagtgggtagggggaacgagacagag

SEQ ID NO: 313446 - DNA, 122 bp, Homo sapiens
ttgtcccattttacaaatggcgagttctctgtttctagtcagtaaataatcaagaggagccgggatcaagaacccagtccacctagctccagaggcaatgttcttatggcttcagtgacatg

SEQ ID NO: 313447 - DNA, 122 bp, Homo sapiens
aagtcccagcggcctggcagaggctcttggggcgcgggttttgtgcaagccacaatggtccgtggggctctccccttgggcggagtggggcgcggtggggaacacagcttggacgcctaggc

SEQ ID NO: 313448 - DNA, 122 bp, Homo sapiens
cctatggatcccctaggaaacctgcagcatagtctcgccaggaagaactaaatgggccttcggtgacctccccttacaggctcaagattggccttagcttggagtcactggcctaaggcctc

SEQ ID NO: 313449 - DNA, 122 bp, Homo sapiens
tttacgcttcaccacagagaaggaacttttcagacgctcccttggccgcgcacccgggatcggaacagcgctgtcacttgcgacaaaatccctaggccagaggaagaagagcgcaggcctgg

SEQ ID NO: 313450 - DNA, 122 bp, Homo sapiens
ctgccgtacttcttccttttagcccttatttattgtcggtctgcccatgggactgggagccgcccacttttgtcctcaataaagtttctaaagtatccacgtgtctagctaagtgtccaaac

SEQ ID NO: 313451 - DNA, 122 bp, Homo sapiens
gagccaggcgggagagaggggaaccaccgaggcctcggtcttcccgcgtcccagagcggccgggcgagtctcacttccggcctgtgacccgctgacctgtccttgtcccaccagtcgggcgg

SEQ ID NO: 313452 - DNA, 122 bp, Homo sapiens
gggtcatcgcgctggggtctgtagtctgagcgctacccggttgctgctgcccaaggaccgcggagtcggacgcaggtaggagagcggccgcgcagacctctcgcctgctcctgcccaggggc

SEQ ID NO: 313453 - DNA, 122 bp, Homo sapiens
ccaactactcacaacagaaagctcgaaactctccctctacctcccctgccggaaatgacccgtctctgttcaaaaatagaaaaagaacgatcggaataattgttcgcagaggtgccgggaga

SEQ ID NO: 313454 - DNA, 122 bp, Homo sapiens
tctacagttagggaaatctgagtttcaaaaatctgggtctctccccctccaaaattcttacgacagcaatatatgaacacaaatacgttgaaacaaggagaaggcacctcaagagccagatt

SEQ ID NO: 313455 - DNA, 122 bp, Homo sapiens
atcagtcatctctcggggtccgcccttgcttcctgcccacgagtgaggcctctggttgcccgcaacctaaggggcatcgcagccccgagcaacaccgcccccaccagccttagctgagtgct

SEQ ID NO: 313456 - DNA, 122 bp, Homo sapiens
aatttctacaaaaacttttgagtacttgtgggggaccaaactcccattaccagactctgccgacctctcaccccacacttaaaggcttccttagcaacacccctaaaccagccaataggatt

SEQ ID NO: 313457 - DNA, 122 bp, Homo sapiens
ccggaaactgctgccgtgtcacccagcactcgctctggtggaaccgtcgcacgagcctcacgcctcgtcccctctgatgccaacgtcaggacaccccacttcagggtggaggccgcgacctc

SEQ ID NO: 313458 - DNA, 122 bp, Homo sapiens
gtgcgtgtcccacggcctgggcaggatctcgctgtgatgccggcctggaaagacactggccgcggccgctgcccttcccattggaaccagacaccaaatggtgtctgctttgctcggtgcct

SEQ ID NO: 313459 - DNA, 122 bp, Homo sapiens
cagagactggcaaacggtggtggttgtggaggtggtacagaaacatcaacagaacccaatcgaggccacagcccaggctgaacatggcacactggcctggctattggttctttctctccagg

SEQ ID NO: 313460 - DNA, 122 bp, Homo sapiens
agccaggtctctggcacctcatccaggaatctttatggcattgtacttccacccatttggcgtccccattttcctgagttccctcctactttggtaaaatgggcatttcataattttgagga

SEQ ID NO: 313461 - DNA, 122 bp, Homo sapiens
ccctcccaccatccccggcttctccctgagactccgcaccaacgtgggtagggaaggccccggcagcaccaactaaggagaaacagacgcacgcccagacccagactggggaaagaagacta

SEQ ID NO: 313462 - DNA, 122 bp, Homo sapiens
ccaccgggcccggagggtccgagccgagagcggagcctgcaccctccacctcccgcccttcgggaaatatcagaactgagccaggaggcaggtgcaccgggaaaatgtgtctgagtcctgct

SEQ ID NO: 313463 - DNA, 122 bp, Homo sapiens
atgctctgggattaaaggcttgggaagttgctggtatttaggtccttgggcaggccacttcgcctctctgtgcctcagtttcttcaggcgcaaactgggttgtgtgaggaagagatgagtta

SEQ ID NO: 313464 - DNA, 122 bp, Homo sapiens
tgcccgaggaccaggccggcgcagccatggtgagggagcaaggcctgccctagccgcagccgcccgccaccctagcccccgcccgtcgcgctggcccctgcggtcttgcccctccctgtctc

SEQ ID NO: 313465 - DNA, 122 bp, Homo sapiens
ggcagggagtgaaccggcttcttcaccatcccgctcctctaacacaccgtgtgcccgtcacggcagcacctttgacttgccatggaattacgggtcttactcaacagctgaaacaggcattg

SEQ ID NO: 313466 - DNA, 122 bp, Homo sapiens
tcttcaagtggaattcagttagttccaggctttcccgatgaataagaggttgtgggcaaccggcggtagcccagatttttctaaagtctgacccagtttccccgccagtaaaaggatggggg

SEQ ID NO: 313467 - DNA, 122 bp, Homo sapiens
gggaatgggccatactcaggttcgtggaggggtcgccgaggcccagttaggacaaggttgcgggcaggtctgaggcagccttgggtccggagcgcgctggcgagcggtccctcggcaggtgg

SEQ ID NO: 313468 - DNA, 122 bp, Homo sapiens
atattccatgtgatgatgcaattttgccaatcaaaggtcgcagcagcaggactcccctgacgtataggagaagtagccagagctcttcatcccctgccaggagagcatagtagctcacattt

SEQ ID NO: 313469 - DNA, 122 bp, Homo sapiens
cgtttgaatttgtggtggtgtccctcactgggcagacgtggcacttcgaggcttcaacggcggaggagcgggagctgtgggttcagagtgtgcaggcccagatccttgccagcctgcaaggc

SEQ ID NO: 313470 - DNA, 122 bp, Homo sapiens
ttgagccctgagtgttggaattgtctcagtctctgacttgtaacctccaggcacaggagacgatggactcactggccatggtggagggtgtcagcagctgccaggacctctaccgcaagcac

SEQ ID NO: 313471 - DNA, 122 bp, Homo sapiens
cctagaaggtgatgttgattgtaattagagcctcctctctgggcggacgagggggcggggcggagggggggtggttgtctcaaatcccagtcccgcaaatgcagctggtggctgggaagctg

SEQ ID NO: 313472 - DNA, 122 bp, Homo sapiens
tcttgacagttggaaagttatgaaaataaaattctaacgaatccatgttttgtctgaaaacgtggaaaaactgttaccttaaatggtggtgctgcatgcagctgtgccctacatagagctgt

SEQ ID NO: 313473 - DNA, 122 bp, Homo sapiens
cgcatctggctgtctctggtcttcatcttccgcgtgctggtgtacctggtgacggccgagcgtgtgtggagtgatgaccacaaggacttcgactgcaatactcgccagcccggctgctccaa

SEQ ID NO: 313474 - DNA, 122 bp, Homo sapiens
agatctttctgggagacaaaaagatgccactattccttccttcctccctcagggcatgatcgtgtctcactacatgacactcttggcttcagctggagaacaaacggaccacctaacccggc

SEQ ID NO: 313475 - DNA, 122 bp, Homo sapiens
aataattcagcccctccaacatccccctgcccctcaacttcccgctaccaaaccaaaactcgtgcttcagttatacaagtaattactgtacaaggtgtccatgccacagttctccactgact

SEQ ID NO: 313476 - DNA, 122 bp, Homo sapiens
acctgcccctacccccgcccctggtgggactccggttggcacgtcctcttccagctgtggcggaaatgtgggtgcagttctcacaaacctgcccggtgcctgccccactcctaagggtggta

SEQ ID NO: 313477 - DNA, 122 bp, Homo sapiens
ccccacaggcagcacagggaggcccctccgagagctccaagcatttggaatccaggtgcccgaggtgtccggtgcttgtggggggcgggctggggacacgccttggccaccagccgcccgca

SEQ ID NO: 313478 - DNA, 122 bp, Homo sapiens
gtaacagaaaccatagcaaaatggaggatgaggaggtggggttttctatttgattagagtcgaatcttaaatttccacagcaagaaaatattgaatgtagtgtaatggttgctggattttct

SEQ ID NO: 313479 - DNA, 122 bp, Homo sapiens
gtgtgatctttcccaccacagtgaacagagggattctttgtccaaggcaggcttgcagctcggtccagcttgagcatttgatcaggatttgatgcttcaaagatgacccactctctgtaaac

SEQ ID NO: 313480 - DNA, 122 bp, Homo sapiens
agggcgttgcgtgcatgggctcccttgtttgcagccccgaggcctccctgtgggacaggccggttgcagtgctcgcggtcgcccccttgtgtccgtctttgccctggcttcctcacgacacc

SEQ ID NO: 313481 - DNA, 122 bp, Homo sapiens
aggaggagtaagaacccctccaagtctctcttaccccatcctcctcccctctccccaccacgaagggcttctccaagaagcactgctctgccagtaagcagaaaagtgttttgacctcaaga

SEQ ID NO: 313482 - DNA, 122 bp, Homo sapiens
aggctcctcacctgcttcgcacctgagcaggctccacatcaaagtagggtctgaggatgtcgatgttggcgtacaagctgaaggccctggaggcttgtcttttcccagcctgccacatctga

SEQ ID NO: 313483 - DNA, 122 bp, Homo sapiens
ctgaaagactttaaattgctattgcacagatgccttgagccccagcaggtcccgaggggccgagtgcccctggaggcccagcaccccactcttgcacctgcaccagctctcctggcggggag

SEQ ID NO: 313484 - DNA, 122 bp, Homo sapiens
ctggcagccggcgccgcgatggaggaagagctgaagtgtcccgtgtgcggctctctgtttcgggagcctatcatcctgccctgttcccacaatgtctgcctgccttgcgctcgcaccatcgc

SEQ ID NO: 313485 - DNA, 122 bp, Homo sapiens
gtgtggggcccttgcggtcgaagctcacgcggtaagccgctgcacgtgtgctacggcgggcggagggccgaaagtccagtatgtgggtccagggtcactcttctagagcttccgcaacggaa

SEQ ID NO: 313486 - DNA, 122 bp, Homo sapiens
aacaaagtgagaccatctttacacaaaattaaagaattagctgagcatgttggcacatgccggtagtcccagctactcgggaggctgaagtgggaagagagcttgaggccaggaagttgagg

SEQ ID NO: 313487 - DNA, 122 bp, Homo sapiens
cgcgagactatacctagctgcccacccgttactgtttccatggaaacagcctgaattcgccgtagccggaaattagtgttccatagtcccctgcatctttattcactgcacttctgaaatcc

SEQ ID NO: 313488 - DNA, 122 bp, Homo sapiens
agagagagcatggccctgctaatagattgatttggggtttgtggcctccagaactatgagcgaataaatttgttgtttcaagccaccaagcctgtagtaatctgcagcagccctaggcacta

SEQ ID NO: 313489 - DNA, 122 bp, Homo sapiens
gaggcggcgaaccagggcgaggcgatcagccgtctctcctccagggtaatgtttgtgggccggaaacagggccccagggaactgccgttgggccacatggctccggagccctgagggatcag

SEQ ID NO: 313490 - DNA, 122 bp, Homo sapiens
ttctattccctggcctgttctgaccaataggtctcccttcttattgggtgttgacattgccgacaggcagtgtgtaaattaagaaggaattaagagtatgtaaattaagcattctgaagcat

SEQ ID NO: 313491 - DNA, 122 bp, Homo sapiens
ttaaaaagccactcatgctttggcttaaactgtaattaatttattttatgtacaataaatcgcatttgaaaaagagcagatgtctaacttcgtctctattgaaacgttaactttctgccgtt

SEQ ID NO: 313492 - DNA, 122 bp, Homo sapiens
gtcactataaaccccactgctgctgctggatgagagaccccaggagttgcagagggtggtcgcaggccttggagagcagcctaagtcacataatcctctgacgccagccttggcgtgagtcc

SEQ ID NO: 313493 - DNA, 122 bp, Homo sapiens
cagcgggctgaactgggctgagaaacactgccccatggcccgatacgtcctcaagacggacgatgatgtgtatgtcaacgtccctgaactggtatcagagctggtcttgcgagggggccgtt

SEQ ID NO: 313494 - DNA, 122 bp, Homo sapiens
gtcctaggatgggcaggatgtggcattatctgagaaatgctgtggaggtgggggtcttgtcgtttaggctcttccaagagtagactgtggactgggaacacaaaagcagttcctttcaaaca

SEQ ID NO: 313495 - DNA, 122 bp, Homo sapiens
cctaattctggcccgcctgggggaacttgtccaagctgatcccagtcgtgcctgtaattacgcctgaacccattcccaactctaacagagaggtgtaagttaaaaacaacgctttccctaac

SEQ ID NO: 313496 - DNA, 122 bp, Homo sapiens
gatggaatcattgtaatcctgccacaaaagccttggcaaatgaaacccctccgtctgctacggccaagcaaggctctcctagagaggctctccgggtatgtgcccaggagacggggacaaca

SEQ ID NO: 313497 - DNA, 122 bp, Homo sapiens
atggtttctgcccgctgagaagtatccatctggagctgagatttaagcccctccactcaacggcagcaggagtctctccccacgctggtgtgacccacatgcagggcacccacacatgtgag

SEQ ID NO: 313498 - DNA, 122 bp, Homo sapiens
acagcgagtagtcgcggtcggtgtgccgcctgtctggcttcaagttgcggctctgtcggccggaaccctccagcatgttcacgatctcgccacggtcaatgctctgcagggctgtgtacaga

SEQ ID NO: 313499 - DNA, 122 bp, Homo sapiens
gcggtgcctgagcgcaccacagcaggccccgcccctaggcccgcccccgggcccgcgctgcggagcaggcctcagacgcctgtcccggaggcccctgcaccgtctgcctcgggcgcaggtgg

SEQ ID NO: 313500 - DNA, 122 bp, Homo sapiens
cgggaaccctcaccggcctagaaagagggcgctaagcgcaactagcagcaagaccaacagcgcggagaagaacagaggcatttaggtccgggtccggcccggcttggccccggcccccgcca

SEQ ID NO: 313501 - DNA, 122 bp, Homo sapiens
agggcgccagtgacaggtggccggaccccgcaggagtggaacctgcccatctgcgcttgacgaaaatgcctccaaaacaaaccagacgccgccccggcagaggaaactgagaatgaggagaa

SEQ ID NO: 313502 - DNA, 122 bp, Homo sapiens
catccacttcctcacagagcccgcggagccggcgggagccgcgcgcgccgcccagccgtgcgtcatgggcaacatccagaagaagctgactggcaaagccgaaggcggcaagcggccggcaa

SEQ ID NO: 313503 - DNA, 122 bp, Homo sapiens
tatttggtccatggatgctctgttgatcaggcttgttcatttatgagcaagtgctgaaaccgtctggaacctggggaagtcccagataagagaactgtattatcagagtcaggctgttttgg

SEQ ID NO: 313504 - DNA, 122 bp, Homo sapiens
ccaggtgtgcacaggacacacccgggtgcaggggcgcgcagcttctaatgacgcggcactcgagcactgtctaattaatcccgtgttttcacacagcgtaactgcggagccggggctgagtt

SEQ ID NO: 313505 - DNA, 122 bp, Homo sapiens
gacaggaacaattaacacggtaacagatccgataatgcagaccatcaggcctaaagaacacggagggactgtgttctacctccttatagaaaagcaattagtgcctttttagctttggaacc

SEQ ID NO: 313506 - DNA, 122 bp, Homo sapiens
cgagaaggggagggggcccagccctgctttgggcaatccttgctctgaccactcagacaccgtgtcctcttgcctgggagaggggaagcagatctgaggacatctctgtgccaggccagaaa

SEQ ID NO: 313507 - DNA, 122 bp, Homo sapiens
gctgtatttccgagaactgcagtattttcacttcccacaaaaagtgacctgcagttagtgcgaatccctcaagttctcgagggagcctgaaatcactgggttttccaccccgatgcgtccct

SEQ ID NO: 313508 - DNA, 122 bp, Homo sapiens
acgtgggattgaatgggtctgtcggtcgcctgcggcgtaaggagtgtgtcccacctcgctcgcaggtcctggagcgcaccggcagacctcgaggcggagcgggtacgctcgcaatagctcca

SEQ ID NO: 313509 - DNA, 122 bp, Homo sapiens
gaggccaccctcagttggttgtcatgtggccctctccatattctaactcacaagatgctccgacctcccgcctgtgcgccccagtggcgcgaaccggagtgcgcctgcgcgcgggccacaaa

SEQ ID NO: 313510 - DNA, 122 bp, Homo sapiens
gattttcttaaatgtgaccaagtcctggtcaagttccaaagaagtcaaagggcagctgtccgtcaacacagacagtagctgtgttactgaagaatgctgtgtatattcaagccttgcaaata

SEQ ID NO: 313511 - DNA, 122 bp, Homo sapiens
ccagggccctggggagggcgggggagtggggaaggcgggcgagggggcggagaggcggggcggcaactccagggcaacagccgccccccggccaatccggtttctcgcgccgctgattggca

SEQ ID NO: 313512 - DNA, 122 bp, Homo sapiens
acccctgcgcagtcaggacccaggcaggggccttctcctctctgagcagaggctggtccccgtccccaggcccctcccgctgcgcacatctggaaagaatctgagggcggttgggggcgggg

SEQ ID NO: 313513 - DNA, 122 bp, Homo sapiens
tgctgcttcctcttgcgaagttttttcccttcctaaccgagatgctgttgcgcccttccgcgtcacccccatccatttgcgactgacatccagtctgtgttagtggggaaaacgtaaggctg

SEQ ID NO: 313514 - DNA, 122 bp, Homo sapiens
ttgcattctgttgagtctttgatcagccttttactaaatacacaattttcaagtagggggcgagtaaatagtcactcatgcctttgtctggcatgaatctgcatttttacataatcagatat

SEQ ID NO: 313515 - DNA, 122 bp, Homo sapiens
cttctgggacggcagctcctcccaggccttctctacacacccccatcatcaagagcctggcgtgagcacttggacccaagggatgaaagtgtctgtcctgaggttgcaaagctggggaaagc

SEQ ID NO: 313516 - DNA, 122 bp, Homo sapiens
gcgctgaatttcctgccatactaggattattgatttcagtaatatggcaagtttgagggacggaaagtacaatatgattataattgggataagggtggagaggtaggcatggctatttagag

SEQ ID NO: 313517 - DNA, 122 bp, Homo sapiens
gtcttgcctggcacactagaaactcccctgctgattggacacaaatccccccgggtggcccgagctcacctaaaaggccatgtgtgtcgcataacttcacatcagctcctcctgcttccatc

SEQ ID NO: 313518 - DNA, 122 bp, Homo sapiens
ctattggtgtggactgaaggggaatcattctgctgaagtaaaacatgactttgacctggacgtcagagcaaagcaaaggtgggacaccacagcatggggggtgcccagatggcagaggccag

SEQ ID NO: 313519 - DNA, 122 bp, Homo sapiens
ttcaaattgtcgccaagcccattaggctacctgaactgtctcagaaagtgcgggtggctgcgtcgaacggtggtggctcagaggaagagattggggccggcagcgacctaggtacctcactc

SEQ ID NO: 313520 - DNA, 122 bp, Homo sapiens
gcgcgggagctgagaccccgggggccgagagcagcccgctgccccttacggcgctctccccgcggcgcttcgtggtgctcctgatcttcagcctgtactcgctggtcaacgcctttcagtgg

SEQ ID NO: 313521 - DNA, 122 bp, Homo sapiens
tcgccccgccctcccgcagccggccccgccctcccgcagccggccccgccctcccgctcgcggccccgcccccaggagcttggccctccgccaaccacaccgtctggccccgcccgggcgga

SEQ ID NO: 313522 - DNA, 122 bp, Homo sapiens
cgcgccttccgccacgcccaggtccgcaggtcttcgctcggggcggaaaagaatcctccccgcgcactcccagccaggaggaacgccagaggccccgcccaatccctgtcgcttcattggct

SEQ ID NO: 313523 - DNA, 122 bp, Homo sapiens
gaggtatatgctactcctactctgttactttaacctacatcataatattgaactttacaccgctaaggaaatgtgataattcttgtatgctcagcttggtgaaagaatttgtaattgtttca

SEQ ID NO: 313524 - DNA, 122 bp, Homo sapiens
catagcactgacagcctgaaaagaattacaatttgcagtctcccactctttctgccctcccgctggcattctgtaggcatatttcttaaaagggtgaggtaaaacagaatctgcattaataa

SEQ ID NO: 313525 - DNA, 122 bp, Homo sapiens
gcatttacccagatttgtgccagctaaacgtcaagtgtccggctgataaagcaccatgtccgggtgttgaatgccacagtctgctcaggtaattgcagctggccagctgctctgcattaaca

SEQ ID NO: 313526 - DNA, 122 bp, Homo sapiens
gaggaccgccaggaaccccacttaccagcagcagctccctggggtgcaaaaagggcagtgcggatcaggaacagcaggactaggctcatctccatggcccagactttgctttcctcgcagtg

SEQ ID NO: 313527 - DNA, 122 bp, Homo sapiens
acagggactctctccagggacaaatgccccgcagctgagagaggccgcccagctatccagcggccgcgcagccagccaagatttcaacacaggtctgccctatttggtcaccatccccgaca

SEQ ID NO: 313528 - DNA, 122 bp, Homo sapiens
ccagaggaggaatacccgtctggccgccggctggctccgcaggcaggatgtctctgcagacgtgcttgctcggggaccaggtgtgcagtgtgcagcctttccaggtccacatacctctgacc

SEQ ID NO: 313529 - DNA, 122 bp, Homo sapiens
attcagacatttcggggccctgcgctccctccccttgtagagatccccacattccaaattcgctgtcttgggaaggcaccccattcccgcttaaggatgcttcctcacacctcccctttcag

SEQ ID NO: 313530 - DNA, 122 bp, Homo sapiens
cggtggtgttcccgggaggagagggcggagggcggagggaacttgcaccgaagcatcactcgagaccccaaacctccaggtcagtagccccctgagggagtgagggcgggggcggaatgacg

SEQ ID NO: 313531 - DNA, 122 bp, Homo sapiens
ccttgcccagtgaggtcagcaacgggaaatcgatggtctggcgatgtcgcagaatgcgcacgatgccgtccaggtacacctggtccttgctgaaacaacctgggagggcaggagggcggtga

SEQ ID NO: 313532 - DNA, 122 bp, Homo sapiens
ttcctgagaagccgtcgccagagttacgtcgcggttttcttaactttagagcctgggggccggagaccctgattgcactcgacctggctctgccctactctctgcgtgacttccagtaaggt

SEQ ID NO: 313533 - DNA, 122 bp, Homo sapiens
cacacggccacgcgctcagacgtggacacgcgtcgcacgaacgtgcacagcgcgggcagccgagcacacgccgaggagcctcccgctcgcccgcagacacacaccccagcccgtgcgccccg

SEQ ID NO: 313534 - DNA, 122 bp, Homo sapiens
tttccgctaacgtactcagggcgacgggcgtaagatggcggccgcgcaggcgcaaaatgtcgcagccgtagggaggctccgcctctgacgcttgccttgcatcacgtggtaatggccgctca

SEQ ID NO: 313535 - DNA, 122 bp, Homo sapiens
cctgatccccgcggcccgggaccggggagggcggtatctcccagttccacgtgttagtgacggcgcccccaatgtccccaggtccggacaggccgagatgacgccgagccccctgttgctgc

SEQ ID NO: 313536 - DNA, 122 bp, Homo sapiens
ggccccagccgtctttatctcctgcgccctcccagttccctagttcaatcccgtccgcggcgggtcggtgcctccagcactccgtgcgcccgctgatgtgagaaccccacctcccatgtcgt

SEQ ID NO: 313537 - DNA, 122 bp, Homo sapiens
ccccgcccccgagacgtcccattggccggcgccctagcctggtcccgcccaagtggaccccgcccccgccccgaggcaccccattggccggcgtccccgccccagcgaacccggccccgccc

SEQ ID NO: 313538 - DNA, 122 bp, Homo sapiens
ggcacccgccacggccagcgcaaccaacacctgcctgaggactggcccgagctcggcccacgcccagcccagcctgcgaagtggtgccggctgctctcgggctgccctccctccccgaggcg

SEQ ID NO: 313539 - DNA, 122 bp, Homo sapiens
cctggtctgacaggagcctgagtggtagcattccagaatgtctactcaattgctgttaatcgggtctcatgttatctctcatcagcatgctaacccagtgccccagagtgtattctggggag

SEQ ID NO: 313540 - DNA, 122 bp, Homo sapiens
gcctcgacctcccccgggactcacccagcacgaagtagggcagctccgtgttctccaggtcgtccaccacgaccatttctcccgggaagtcgttgcgcaccgagaagaggagcttgggctcc

SEQ ID NO: 313541 - DNA, 122 bp, Homo sapiens
cctgaagccggaggaacgggccagtcagactgcgcccgacaggtgatggggagcggcggccgggctgggcagccgccgggtgggcgagctggcgcggggtacctgttgacttgggaagggcc

SEQ ID NO: 313542 - DNA, 122 bp, Homo sapiens
tggccaaaaggctggtctacttgacgtagaagacgagcagcagcttgatgatctgcaccgcgtggaggagcggcgagaaagagcacccccagccaggtcagagtcggcccgtaaatcagctc

SEQ ID NO: 313543 - DNA, 122 bp, Homo sapiens
gagatcactccacatgtgacattgctttcttttaattggagtgaggacaaaacctgatcccgttcagagatgaacagaatcatctaggtcgttaagaacagtcttatctttctggttaacca

SEQ ID NO: 313544 - DNA, 122 bp, Homo sapiens
ctgtggcttttgtattcctgagcgcgaaggttaatgacggatccgtggggttgagcttgtcggtacagacgccagacagcccgatttacgggaacagccgattagaggattcgggagagcgg

SEQ ID NO: 313545 - DNA, 122 bp, Homo sapiens
cagtagatagcccagcactacagcagtttcagcaatgcagcattagaattacaccatgcacgttctgatttatttttgtggccaattattagtaagcattaaaaagtattttatgatctgcc

SEQ ID NO: 313546 - DNA, 122 bp, Homo sapiens
acagggcttctcttaaaatggcggcccccaggcaaccggcgttctcaatatggtcccttccgccctcttctggtctcaaaatggctgcccctgccctaaccaagccggggcccgcgccctgc

SEQ ID NO: 313547 - DNA, 122 bp, Homo sapiens
acgtcctgcacggctcccgggagctgggagaaacaggtgcctttctccgacgtccgcgggcgacgcctgccgcaccttgcccgctgccgcgcccctcccgggcacccctcgccctcggcgcc

SEQ ID NO: 313548 - DNA, 122 bp, Homo sapiens
gtgctgagacagaaagggacagagaggagcagtggacccagggaaggagagggcctcattcggagcatgttaggctgcagctaccacccagtagtgaggcgcaggccccccgaccagggcga

SEQ ID NO: 313549 - DNA, 122 bp, Homo sapiens
gccgccgtcgccgagcgcccccctctccgccctcgcgctcgcgctccctcgcgccggcgccggctccccagcccaagccgggcagggccgggctttattaatatgctaattgtcctgctagt

SEQ ID NO: 313550 - DNA, 122 bp, Homo sapiens
agtctagcacctaatctatcagttgttttgaggaatgcgaataaataacaaaaataaacgcgttatgattaacagagactttgttcctgatcctgaaaatgagcagtatattgtataaagca

SEQ ID NO: 313551 - DNA, 122 bp, Homo sapiens
gaaggaagtgacgcaacgtagaggcgggaaccagctggttgttagggcaactgacctctgcgacctaatggaggccggaaatcgggtctggtttgccctctagagcgggaatgaagcggtgc

SEQ ID NO: 313552 - DNA, 122 bp, Homo sapiens
ccagatcacacagtgggacctggcagtggagcgggaccctgaggcgggcgacgtggaggccgaccccggactggccgacctcccgcagcagctgctgttcgtgcaccagggcgagaccgagc

SEQ ID NO: 313553 - DNA, 122 bp, Homo sapiens
aaggtccctattaattagacaaaggatgtgcaagcaaagaaaacattttaatgaaggcttcgttggcaatgccagatgggtcaactatggtctaatccaaacaggaaccctcacccttttat

SEQ ID NO: 313554 - DNA, 122 bp, Homo sapiens
agcctcccctcccaggcccgcgcagaggcccagcaagcaccagtctggaggcaacaagcacgcaggggtgcctttgcggccacgcacactgcatcgcagtgaaaaaggctcccgttctcaag

SEQ ID NO: 313555 - DNA, 122 bp, Homo sapiens
tgatcccagagagaggggagagtggagtccaggtggcacccactgcccgagcatcatgttcggtggctaccctgagtcattgactgaagccccagagcttctctgcaggcatccaaggggcg

SEQ ID NO: 313556 - DNA, 122 bp, Homo sapiens
gctgccgcctggtggtccagcccgggccgttgcagtgcagccacacggggagggacacggcgcgccgagtgctccgggcggccgcacgttggttccgcccgggccgttccactgcaggcaga

SEQ ID NO: 313557 - DNA, 122 bp, Homo sapiens
ctgtctgtaccgaccctgagctgcctgcctgggtgtcgtggggctcccgctccttccccccggcccccccaaacccagatggatggtgtgtacctgggttctgtgcctcctgcctgcgtccg

SEQ ID NO: 313558 - DNA, 122 bp, Homo sapiens
gttgtagttgtgggaggctgcttcagggggaggtgtctggaacaaggggctcttctgctccgctaagctttggagcaccaagttcaggctttgtgtagataagctcaaggatttttcaacag

SEQ ID NO: 313559 - DNA, 122 bp, Homo sapiens
acggagcccggccctccagccggcgcccgccctgattggcgcccgaggccggcctcccgccggctcacctgccactcccagccaatcggggccaccagaattggggctgtcgccgggggggt

SEQ ID NO: 313560 - DNA, 122 bp, Homo sapiens
aaccacctggggcacttcaaaaaatcctgacgctcaggttgcatccagtgcaaattaaaccggaatgtctagggtaaccgtatttttaaaagatccccaggtgattcattgtgaacaaagct

SEQ ID NO: 313561 - DNA, 122 bp, Homo sapiens
tgcggagcacgacggcatcgattcgctccgcatcacggcggaatccgtgtggctccctgacgtggtgctactgaacaagtaggagaacttccaaagcccgggaggtggcgcggggcctcggg

SEQ ID NO: 313562 - DNA, 122 bp, Homo sapiens
tgacaggtagttctttccccgaaatcttacacacattgacacacacttcagtctcttgtgcgttagtgaggataaagtgatgagcaaacagacaggatccctgtcctcaggaaactaatagt

SEQ ID NO: 313563 - DNA, 122 bp, Homo sapiens
agttgcatcacggagagcctttgggaaccgtctggggtcttggcggagacatttgtgtttcgggggcagcgccccttcctacatccaggaggccgcgttgcccgggttaccgaaggccgccg

SEQ ID NO: 313564 - DNA, 122 bp, Homo sapiens
ctctgggctgcgctgggagaccgcggagttcctgcctcactcacgtctgatcagaagccccggctcccactccaggaagagtccagtcggggcaactcaagcccctttccccagaaacttcc

SEQ ID NO: 313565 - DNA, 122 bp, Homo sapiens
attggtgtgaagcacatggccgaccacgtgttgtatctgaatctaggtcgacccactgtgcgattaaacaccaaagtagcgtattatggagaaaaagtgaaattctctccctcctttatccc

SEQ ID NO: 313566 - DNA, 122 bp, Homo sapiens
cccatccggagaggagcacttgtttttacattctcccttcccgaaccctccaagaacaaccgaggctgatccagatgtccttaaatggcttccgggtaaataaatatgcataaatgcctcac

SEQ ID NO: 313567 - DNA, 122 bp, Homo sapiens
ggggcagaggacaggagggacagccagaccttggccagcgggacctccctgaggaaggtgcggaagaacggggcgggtgcggctgggcggaggacgagtcccgaggctgcggcggagcctga

SEQ ID NO: 313568 - DNA, 122 bp, Homo sapiens
cccggagccggcctccgttagccgggcgggtaggcggctattggcgccaggattggccggcgccgcccgcgcccccgcggcctcgggtggagcctcccgcccggccgccccctgcggcaccc

SEQ ID NO: 313569 - DNA, 122 bp, Homo sapiens
cccaagcactcaggctattatgtcccacacctcctcgctggcctgcttctgtcaactctacgctggtagaagatctcggcattagctgtctggggaagctaacttcctacagtgggttttag

SEQ ID NO: 313570 - DNA, 122 bp, Homo sapiens
agtgatgatctctgatgtaggtccaggctggctgcataacagtttattcattgactgtctcgttgagcatctttggtcagagaggaagtgaatttctctgggaaatccagcttgtattgtaa

SEQ ID NO: 313571 - DNA, 122 bp, Homo sapiens
tttctgcgcgggacgaactcggtgtcaccgggtccctcccggagggttacttcctgcccccgacagtgtaatgaggcaagaaactaggaaggcgaccagatttcaaatttttctttcttttt

SEQ ID NO: 313572 - DNA, 122 bp, Homo sapiens
aaagaaggtggcggggggtgggaggtttggcgggggcggggggccacagccgggtcaatgcgcagagaccaaaagagagggagagacagaaacacagtgtcagaaaggcaggcagggaagtc

SEQ ID NO: 313573 - DNA, 122 bp, Homo sapiens
aacagcacttctctcacaagaacccccaagggatctacactgcctctcccaccaaacccccgcaagattggtgctgtggatagcatctcctcagattccaaggcatctcctactctaaccag

SEQ ID NO: 313574 - DNA, 122 bp, Homo sapiens
tgctcttctcaggctgtgtaagggaggctacctcggaccccgggggtgacgaagacgattcggcaggaacttctgggaggcctggagggacaggaaatgagtgtctgctcttggtcataaaa

SEQ ID NO: 313575 - DNA, 122 bp, Homo sapiens
ccaaactctgctctcttcctcccgcccctcgagtcacgtgatccgcttcaccttgtcgcgcgcccatcctaaacccgcgcgccccgcctcggctgcaacgttgctgacaggctggcgtgtcc

SEQ ID NO: 313576 - DNA, 122 bp, Homo sapiens
agcactgccagggagaggaaactggcctggatatagctagaacgttggcatggggtgccacgggcactggtctaaaagcagccaggtcattggctcagggttcagtctagcatgccaatgga

SEQ ID NO: 313577 - DNA, 122 bp, Homo sapiens
cccaacagcccctcactgtgtaaggaaacctctgcgtccactatatctgacttccctccccgtgtcaggcccgcctgtggtcatctctctgcttccaatgccagaccctgggtcaggagtca

SEQ ID NO: 313578 - DNA, 122 bp, Homo sapiens
cacaaggggtgcggagcgattcggtgcgcgcgggccgggtgcgcgccacgctcttcctgccgccaggacctggacccttcctagggatcattggcatctttggtaatggagggagcctgttg

SEQ ID NO: 313579 - DNA, 122 bp, Homo sapiens
gccgaggggtggggtgattggagtccgatctggaccaatgggcagccggcgggacgggggcggcgacgacaaccgcggccgcaagaatcaacgccgcgccgggccaatccgcagccggggcg

SEQ ID NO: 313580 - DNA, 122 bp, Homo sapiens
agcagatagtcactaatatttacaaatgttaattgatgacaacacggagggcgatgcccacgtttgaggcgactgcatatcatttccggggatggcttgagtgagtgtcagagctgtacctt

SEQ ID NO: 313581 - DNA, 122 bp, Homo sapiens
tgagaggtaacaacgtgctagcagccctggctcgctctcggcacctcctcaacctggcggcgctcctcgatctggccgcgctcgaggagcccttcagcccgctgctgtgctgtgggggccca

SEQ ID NO: 313582 - DNA, 122 bp, Homo sapiens
tatatacggccagttggatgatccactgtgcttttattttaaatcatgatggacagattgcgtgaaaaacaaggaattccaaagaatttcctgctctgggaagagaagttaaatctatattt

SEQ ID NO: 313583 - DNA, 122 bp, Homo sapiens
ccacaggtagagcaggtggcagaatacacctggcccctgccccatgaggccttccagaaacgcagaccataagcgggaaaggcactgcgcgtctcgggagggctgcaggggcgctcaccatc

SEQ ID NO: 313584 - DNA, 122 bp, Homo sapiens
acttcacgcctgtctgaccacgttccacggggtcgtgattgatgaagcctagggtgagtccgcccaccgtcggcaatgctggcccgaagcaggctgtgcaggcctctgtcctgagacctacc

SEQ ID NO: 313585 - DNA, 122 bp, Homo sapiens
ctctttctccagcctagggcggtgccagcccagggagcctgcgcttagcggccccaggcccgcccctgacactgaacgccgcttgtcccctccggcttgccgtcctcgcagccatggcggcc

SEQ ID NO: 313586 - DNA, 122 bp, Homo sapiens
ctctctatttgaaacatagagacagcagaaagaggagagaactaaaggaatagagaggcacgcatcagagtggtggcatagatcttttggtctgggtcttaggactcatatcaagtccctac

SEQ ID NO: 313587 - DNA, 122 bp, Homo sapiens
atcacataggcagcagggtcagcatagatgtcctcactgcgaggtggcagccgctcaaaacgggcactgggtgagcggacaggggagtaaatgcgggcacggctgtaggagccctggctggg

SEQ ID NO: 313588 - DNA, 122 bp, Homo sapiens
tgtgagtcagctcttttactacgctttgtgctgcctgtataaatgacctaatctatccgccgggcgtttcaagggggaaaaggaaagggtttatgaaacccaggttgaaatggagacaccga

SEQ ID NO: 313589 - DNA, 122 bp, Homo sapiens
atgactaaccttgccaggcaacgctgtgaggtttggaaacccacctctttgacctaggcccggtcaacaccgataaaccctctgaatcaacgctggcgctcccaagcccactcacacgccgt

SEQ ID NO: 313590 - DNA, 122 bp, Homo sapiens
tgggggcagtcttgtgggactgatcccttaacccgtgggatcatactcttaccttcaggtcgataatgtcagaattgaattgaattacaggatatgcagttggcgtaggctagagaatggtt

SEQ ID NO: 313591 - DNA, 122 bp, Homo sapiens
acaggagcgagtcccgggactggcagctgaaaggggttcgcgtgtggttgcctgttgcagcgcttatttatccggcgctttagagtttccgaagagctgttttcacctgtgaccctggccac

SEQ ID NO: 313592 - DNA, 122 bp, Homo sapiens
gagagagctgctagggcggtttctccgcctcgggcctgttgggcggggccggctaaggtgcgcgtgctcgctggtcctaacggttctgttgggcgtttctgctgagaggcgggaggggctga

SEQ ID NO: 313593 - DNA, 122 bp, Homo sapiens
aactcacggagcagcaaggccagcggcaggagcaaggcggtcactggtaaggccatgacgcgctccccaggacgctgcttggctcgaagctcgggcgcgaggggaggcgcgcgggagccggt

SEQ ID NO: 313594 - DNA, 122 bp, Homo sapiens
cctctctgcgcggagggagataagcgtctgagccagggaaagcgcgggctaaacccgcctcgccggggcccctgcccgccctccgtgccccgcccgggcggtgcagctggcccgggtgctca

SEQ ID NO: 313595 - DNA, 122 bp, Homo sapiens
cgcgagggatcctgtcatcccgggtccggaattgtggctggctaggtggggacttgaggccgcagtgagaccgtggctgctgagatctcagggggcagtcccacctcccacccactaagggc

SEQ ID NO: 313596 - DNA, 122 bp, Homo sapiens
acatgttagcctgtgatgtgggcattcctcccttctgggagtcctgtaccaatcattgtccgtttcagttatttggggcactcagatgctacatagtattaccctttaaaaaaaagataatg

SEQ ID NO: 313597 - DNA, 122 bp, Homo sapiens
tgacttcagtgtagactttaagaacctaaactaacgcttctcgcgagaggaaagattgaccgctcgcaagcgtacatcagctggtgccccgccttccctgggccccacccactgcctgtcct

SEQ ID NO: 313598 - DNA, 122 bp, Homo sapiens
ccccaactttccacgtttcactcctctcccttttcctcctcagctccggctccgccgccacgattggccagccgaccacccggcctcggccaataagcgccgccctctcgcccccgtgttac

SEQ ID NO: 313599 - DNA, 122 bp, Homo sapiens
gtattatcaatcagttgcgcactttcccattcgattggtgctttctgggcaagagctggacgtcttccaagtccgcgatctgtttgggaaaggtgttctgagtgcaatcagagaggcggagt

SEQ ID NO: 313600 - DNA, 122 bp, Homo sapiens
gtcttgcgttttccatcactggtgcagaaagaacttccccaggaatggccagtggcctttcgcccgtaacaaggccgcacgctcagagcagtcttcctcctgggctgggtggacgcggaggc

SEQ ID NO: 313601 - DNA, 122 bp, Homo sapiens
tgcatcaagcaccggcatccactggaccatgattgctctggggaggggcacccaaccagccgggcagggtaatggcagccaagtcctccacttgcttttgggaagcattcttttggaactga

SEQ ID NO: 313602 - DNA, 122 bp, Homo sapiens
gacagagcctgagacctcaaagcagcttagtgtgttccagaaggtggaagcgggctggcccggctggagcatcgttatgggtgtcggggtgggtagaattggacgtggtggattgtggaaaa

SEQ ID NO: 313603 - DNA, 122 bp, Homo sapiens
ctctgccggctgacatgagttggcggctgaggctgtcgtggccgctgaggctgttgtggccgttcgtctgggtcctcccagccttgctttcttcgcggagcctgcggagaagccccgtcact

SEQ ID NO: 313604 - DNA, 122 bp, Homo sapiens
catcaacatagatggatctcaggaacatatgtccagcataaaagcaagtcacagaaaatacgtgcaagcagaataccatgacattgagttctgaaatgagcagactaaatttttacaaatac

SEQ ID NO: 313605 - DNA, 122 bp, Homo sapiens
agccccaggtagggctgaggggtagcaccgggctcctccatagcgcgaaggctgctctggcggtcaccacagtaacactggccacaacaaacggtggagaacacgcagccttgggtctggaa

SEQ ID NO: 313606 - DNA, 122 bp, Homo sapiens
ccccacctcaggagcgtgagatgccaggtcgcacagagggcagcagcagcggccgtcccgcggcctctgggccccccagtgccctgcccactccatcaaggccctatgtggcccacctggca

SEQ ID NO: 313607 - DNA, 122 bp, Homo sapiens
accatggcaaccccgggggtggggcctcgcttccggtagccgagagttttgttagaaccgcgtccccgccccagttccctgtccgtgagccgatttatctgcccagggtcggcgcgcgcggc

SEQ ID NO: 313608 - DNA, 122 bp, Homo sapiens
atctcacttgtttccgccatcccatccgcatccccgacttctccctaaccgcggaccagccggtactccaggtctgtctcagatccctcagggtccggactgcccaaggccccgcccccacg

SEQ ID NO: 313609 - DNA, 122 bp, Homo sapiens
aaggtctggctctgtcacccaggctgcagtgcagtgttgcagtcttggcccatgccccaccgcagcctctggaatagctgtctgcaggccaggcacggtagctcaggcatgtcgtctcagca

SEQ ID NO: 313610 - DNA, 122 bp, Homo sapiens
cgggagggagacgctgagcgagcgacaacagcggcagctcgggaatgggggctcggagcgcggcggccaagttttatgttatgtatattttacaagtaaaaaaattttttcacctcagcctg

SEQ ID NO: 313611 - DNA, 122 bp, Homo sapiens
gcttggtctcgatggccaggacgcgcaagagctgagtgatgaggtcatggggcatcaggtcgatcttggagggaaggaaatgaaacaaagcatccagttttaaggaaaagacccgaagtcgc

SEQ ID NO: 313612 - DNA, 122 bp, Homo sapiens
gaattaagcattggctctatctccttgtggtcatcatagcccatttggccctggtcaagtcgggtcctgaatgaccatttcaatcaatttccacattgactttcgaatttctgactccctaa

SEQ ID NO: 313613 - DNA, 122 bp, Homo sapiens
ctggaggtggagccggctggaagaaaaaaagaataaaggaaaacaccaggaaacggaattcgattacccgagattaaccttctttggcatttttataacaaatttgggagactttttttttt

SEQ ID NO: 313614 - DNA, 122 bp, Homo sapiens
catggtggtctctgtgggaacttgcacggggaggggcggagcttacctaaaacaaacccacggttacagaaacaagagaagcggagctttgtgcttgcctaaagacgtacccacaactacat

SEQ ID NO: 313615 - DNA, 122 bp, Homo sapiens
cagccgcatccccacggctggggcaagatccgtacctttgagcagctggccctggactcccgcaagagctgtggcaccatcttgctttttggccctcgaaagggcccatagggacactggca

SEQ ID NO: 313616 - DNA, 122 bp, Homo sapiens
caggggcctctcaggggccagccacaactcactccgcctgtcactgctggacgcccgctgcggcctgacggagccgctccttcacctgtccacatgcatttcccacacagcacattgtcttg

SEQ ID NO: 313617 - DNA, 122 bp, Homo sapiens
gcgtgagccaccgtgcccagcctgattactagttctcatcacactgtcaacaatctcattcggctttcaatgtctgttctcaattattctcccacctcagaggtaggaaaccattttctctc

SEQ ID NO: 313618 - DNA, 122 bp, Homo sapiens
ctgctttgtcacagtgtttggtccaggtctctttcagtacagcccagtaactctcatcttcggattctccaaagatgatacagaaaacacgaatacttttactgagctccaagagtatcact

SEQ ID NO: 313619 - DNA, 122 bp, Homo sapiens
acacccattccctatgcagaccagagggacaacaacgtcagacctttccactgacctctccgttcggcctggggctactccggacagttaggagggggtggtgctgccttatctggggtgtg

SEQ ID NO: 313620 - DNA, 122 bp, Homo sapiens
cgctggcgccctcgcggcctgtctgggaggaggaggaagaggagggggagggaggggacgcgaaagtgggtcaggaatgtaactggatgctgcataccccccacgcacacccccgctgtggc

SEQ ID NO: 313621 - DNA, 122 bp, Homo sapiens
ctctccagtggcacaatctctgatttgccatcctggttgcaaccttcattactaagtaaacgcttacgtaaaccttaataatgagattcgggcaatatgattaaatattggtttatttgagt

SEQ ID NO: 313622 - DNA, 122 bp, Homo sapiens
cccaagcctgcttgggctgctgggaaacaggcatgttgtctcagagggcaccgcgctcggcgaagactcagcgagactggacgctgaccatggttctgaacacactgtgctgcgggacctgg

SEQ ID NO: 313623 - DNA, 122 bp, Homo sapiens
agtactcaggaaacattcactgggtacacgtggatgtaacacagatcccgagggacctgacgcacgacaataatttccatgcagagtgtcttcctttcagtccaaggcaaggggggtgacac

SEQ ID NO: 313624 - DNA, 122 bp, Homo sapiens
agcgctccgcggtggcccgagagcaggtgctggcgtgcgggaggcgcacgtggagccctgcggtctgttccacctgcagaggcacaattgcccagcgtggggtggaaggcaggctgggagct

SEQ ID NO: 313625 - DNA, 122 bp, Homo sapiens
cccaagaataaacagctgaagcggccgtcggggggccgggaggggggctgaggtctgcatcggctcagtgtggtgttgtcaagcgagatgtcactaattgtctgaaggaacaggctgaggca

SEQ ID NO: 313626 - DNA, 122 bp, Homo sapiens
ggaatgagagaagcttcccatctccctccagacccctgatagcatccctctgtgggaccccgtcatatatggcctttcacagtacaccaatgggcagcacccagatggaggctgctcaaaac

SEQ ID NO: 313627 - DNA, 122 bp, Homo sapiens
tgggcccttcctgtatggacctcttcaccaggtctgtcctcttggggcagatggcgtcaccgtatgtgcatctcaggatggccaaggagcagtttgaggggaagtgggtagagcttagacat

SEQ ID NO: 313628 - DNA, 122 bp, Homo sapiens
gaatggggctccctttgccttcatgaaagctacttcccccaacactaagactcagctgtacgtttgcttagctcagtcacatttacattcttctgggtgaactgtaccttttgagtacctgc

SEQ ID NO: 313629 - DNA, 122 bp, Homo sapiens
gtcgcaggatgtgtacaccccctctgtgatctcgttgctaacatccaggtttcgggaggacgacattactgccaatatcgcaggggaagcacacgcccctgtgaccttgttagtcatttcct

SEQ ID NO: 313630 - DNA, 122 bp, Homo sapiens
caccccaaccggctgttgtgacaatcaaacgtgtctaagaaaattcagccaatgagagtgcgagagtgcatcttgtgttggccaatgagaacagcgacccgtgcgcagggccgcccaatggg

SEQ ID NO: 313631 - DNA, 122 bp, Homo sapiens
accgctggtgccgcaggtgagcgaggcaggtgtgtgcccccgggctgtgagcggcttagccgaggagcaggagataaactcccaggacgcaaggaagtcagcaaacagctgtgcaggcgtga

SEQ ID NO: 313632 - DNA, 122 bp, Homo sapiens
gagaacgcagggagttgcctagcaacagcgtcctaggctgaggatgggccccacggtggtcgcctcagcccccgccccagagtactttttttctgttttcagagcacattccctcctcccta

SEQ ID NO: 313633 - DNA, 122 bp, Homo sapiens
atgtgagcctgggctgagcaggaccgtgtgggtgaggggcggcccactgcctgcgggggtcgtcccggccctgttgaagtgggtgcccagctacagggagttccccctgctctgtcattggc

SEQ ID NO: 313634 - DNA, 122 bp, Homo sapiens
gctgcccggcggggtaacggtagcttccagggtccttgggcgagcgccgggattgcgctgcggctcgctgcctagggggcccgacctgtctctcgcacccggagcgccggaaaaaggaaacc

SEQ ID NO: 313635 - DNA, 122 bp, Homo sapiens
ggggcggtggccgggggccgccgcggggccctggagagagctgcttggaccgtggctgtgcgcaccgaggcggtgatgcggcgccactgcaggacgctgcgccaggtgtgcgtccctgagtg

SEQ ID NO: 313636 - DNA, 122 bp, Homo sapiens
ttgatggtagtaacatcaatacgtggcttccaaggtttccctagggatcatctccacccccgtcagcccaaagggagaaagatcatgaagaaaattgcctggaatgtttttatgacatcact

SEQ ID NO: 313637 - DNA, 122 bp, Homo sapiens
ggtgatcgccttcctgggcgagtgggggcccttccagcgcctcatcttcttcctgctcagcgccagcatcatccccaatggcttcaatggtatgtcagtcgtgttcctggcggggaccccgg

SEQ ID NO: 313638 - DNA, 122 bp, Homo sapiens
tggaacaagtggtgatggaagcctctgatcattttctcttcttgtcctgtacaagacctgcgtgtgtcggggtacctgaatctggctgctgacttggcacacaacttcactgatggtctggc

SEQ ID NO: 313639 - DNA, 122 bp, Homo sapiens
ggaacgccccgggggtgcgaagtcgggtccggctgggaccccggcgccgcccccggcccgcgtctacactagccccgcgcccgccccgggaactcggttaccgccgcctccgccgcggcccc

SEQ ID NO: 313640 - DNA, 122 bp, Homo sapiens
aggctcaaggtgagaaagggatggctagggaatatcccggggccccagggagcctcacctcgtgacaatcttgcaggaaatgctgctgctcccggttgtcccgaagacggcccagaaattgc

SEQ ID NO: 313641 - DNA, 122 bp, Homo sapiens
agccggttaggatcctggggtggcgtctgaatcttcggggaggtgttaggacacttggggcggagttagcctcgctcagggcgcggctaaggcgcccagatggcctgcgggcgccaccacgt

SEQ ID NO: 313642 - DNA, 122 bp, Homo sapiens
cagcttttgcggccacaacacatcagtgtcatttgggtgttttggcaactcaggggccttcggatgatcttaaacctttgtgttcagccagagcccctgtgccctggtaggcgttggggtta

SEQ ID NO: 313643 - DNA, 122 bp, Homo sapiens
acagctgtcatcctcatctggccaaggagggagccagggctcagcgatctggtgttgctacgtcccagggctctacgcccccatggtgcaggagcagtctctgcatttggccacaggccacc

SEQ ID NO: 313644 - DNA, 122 bp, Homo sapiens
atgctcaattcgtagtagaaaaagaaagggtcctgataggatgaagccaccattccagtacgaactggtgcagggtaagagcagcctgggacattctgaaaaggtcagtggacaaaacacag

SEQ ID NO: 313645 - DNA, 122 bp, Homo sapiens
tggcctctggttttgtggattgcacctgccgtgggagtcactggtcggggggcgggagggcgcttgctgctgtgctgctgggtttctgaacccgtgtctctcgcacagagctcccgtcctcc

SEQ ID NO: 313646 - DNA, 122 bp, Homo sapiens
caatagggtaatcagctgttattgtgagtctgagagtctctgtcgaaacagagagtgagccgcatcagggagggagggagaaatggatgaggtgatgcaaaagtgctcccatttcccaaccc

SEQ ID NO: 313647 - DNA, 122 bp, Homo sapiens
gcacctggtatgagccagtcaggaatcggtggatgagcgatgacttcccactcctggcatcgcccagcacaccctgagggcaaggttgtggagcagaaattgtgggatataagagaaggcag

SEQ ID NO: 313648 - DNA, 122 bp, Homo sapiens
aaatgggaaaggacatggcaggatgggaaattccaacatgagctaatatgagtgtgagaacgatcatttgcaggagagtgaaaatctcccgcaaaggtagataaagagccactttgtgtgtc

SEQ ID NO: 313649 - DNA, 122 bp, Homo sapiens
gctatgcggtttcagccggtacaaggtctaccccggacacgggaggcgctacgccaggaccgacaggaaagttttccagtttcttaatgcaaaatgcgaatcggcgtacttttccaggggga

SEQ ID NO: 313650 - DNA, 122 bp, Homo sapiens
gggtccacagacacgtgccatcatgcccggttatcttttatttttatttttttgaatagacgatgtatcaccatgttgcccaggcttctcacaaactccccccgagtgatccgcccgccttg

SEQ ID NO: 313651 - DNA, 122 bp, Homo sapiens
agctcacagtcacagcatgcacctaagatcacatttttgctttgcatggtgctaccctcccgaagttaacagtggactaaggaatgtagtggggtgggtgagaatttgtcactgggcccagg

SEQ ID NO: 313652 - DNA, 122 bp, Homo sapiens
acatttgttagcaggagactcatttggtgaaataaaattctcagccggcgcggtggctcacgcctataatctcaacactttgggaggccgttgcgggcggatcacctgatatcaggaattga

SEQ ID NO: 313653 - DNA, 122 bp, Homo sapiens
ttttaaaattctaattagagcggtgcagtgggaattcaaatataatacttactgagtcctcgacgcaagatgctgagtacaccaatgttggaaatacaagggttctcgcctcaagtggctca

SEQ ID NO: 313654 - DNA, 122 bp, Homo sapiens
gtcgggagccagtaggcgaactggagagaggacgcgagacctttgcgcctctggacgcttcggcctggctgttctcggtgtacgcgctcctgtctagacccaactacccacgctcccgcagc

SEQ ID NO: 313655 - DNA, 122 bp, Homo sapiens
cagccctctgattgcaaaacctgaggcccagaggagtgcagtgacttggccagcttcgcacggcaggttagtggcagagctgagcagtgtctcccatgccctgattctgtggcttcttgagg

SEQ ID NO: 313656 - DNA, 122 bp, Homo sapiens
tcctatttccttccctttaattaggcggcacgttagcctttaacagaggcgggccactggcggcgtggtttcaggtaagtcgctgaacctctttagccatctccttcccatccctgaagaag

SEQ ID NO: 313657 - DNA, 122 bp, Homo sapiens
gccatcagttaccttaaaaactgcagcttttttgccagtgactcatcagtcaccacaaaccgaaaggtcatgtgccctgccacagcacaaagcaacccttggtaacacacagtcaagtgctc

SEQ ID NO: 313658 - DNA, 122 bp, Homo sapiens
gtccatggcggacacccacacatcttatccactggatacacctccacattgtgtccatggcggacacccacacatcttatccactggatacacctccacatcgtatccatggcggacaccca

SEQ ID NO: 313659 - DNA, 122 bp, Homo sapiens
aagtcacgccacccggctagggggcgaggagcctcctactgcccatcttcccgtccaccacgcgcagttactcacctttgtctccggcctggattaaggatccagcctttcgcctccatccc

SEQ ID NO: 313660 - DNA, 122 bp, Homo sapiens
tgaacccaggcgtgggagactggagcagggaagggaggaaggaaaaccaggcggggaggccggcctcggggagaatgatatcatctgcagctttatcgctaggcaacctaagaatgcttttc

SEQ ID NO: 313661 - DNA, 122 bp, Homo sapiens
ccacgagccccagggcctggggaggagacacctgctcctgctcccacgaggtacgaggtacgcagaggaaggagcaagatgatgccttcagacaagggagcaaatgagcttcccggacctcc

SEQ ID NO: 313662 - DNA, 122 bp, Homo sapiens
ctgagctgtaccccttgagttaggagatggaggctggaagagaaaaaagtagcccctggacgaagaggggcctcttgggactctccccaaagtcctagtgcccagtgagtggttcgctaaat

SEQ ID NO: 313663 - DNA, 122 bp, Homo sapiens
ggctcaggcccttccgattggctgctgggacacaacgtggcctgtcattggctacggcaccggcgcagggccttcggagaggaagtgtggaagtcccgcgcctctaaagcccgcctttcgtg

SEQ ID NO: 313664 - DNA, 122 bp, Homo sapiens
cggcacgctgctggctttgcagcaatggtagcccagggccatgacctgctggtgtgtccccgaggactgtgcctctgtgctcaccgggccgctccaccgtgaggacactgaggaccaggagc

SEQ ID NO: 313665 - DNA, 122 bp, Homo sapiens
gccggggagaccccaagaggacatgggcagctggagctcaggactagcggagcggccagacgtcctgcccatgcaggctgcatctgtgccctggctgcccacccaccaacgtcctgcccacg

SEQ ID NO: 313666 - DNA, 122 bp, Homo sapiens
tgcaacccaagtgccgcccctctgactttctcctttttccttttttccggaacgccggaacgtaagacgtgggtcacgcaacaagagcaactagtcccggaagcaaaaagcaaagaggcgga

SEQ ID NO: 313667 - DNA, 122 bp, Homo sapiens
cagtcccaggctccacagagtcagatcacggcttcacaccagtcgttctggtcacttaggcgttcgcgtgagcgctcaaccccttaccgccacctcatcgtcactctacaccattctgagcg

SEQ ID NO: 313668 - DNA, 122 bp, Homo sapiens
ttaattgtagccttcaaggtgcagcatggtctggtttctaccatttctccagcctcatttcgaaccatcccccttttgcactctgcatcttaatcaccctgtgtatatcaatccgctatatt

SEQ ID NO: 313669 - DNA, 122 bp, Homo sapiens
attatcccacaaagagctgtacctttgatcagagaggctgatgttaatgatcattatctgcgtaagagcactggagcatcccaggtgttttcctcctctcctgtagaaaataagggatccag

SEQ ID NO: 313670 - DNA, 122 bp, Homo sapiens
ttcagctctgccaggagctgagaaaagacgcaaacctcgccctcccccgagcccgggcggcgctagggatatttatttattaaaagaatgatcaattttccagacatagtagatagaggtgg

SEQ ID NO: 313671 - DNA, 122 bp, Homo sapiens
ccagaggaagcccggtagccagaggggaagggctggagcacagccaggtaggaggcaacacggcccggccttcagcagccgctctcctggcaggagccctctagggtaaaacaagggaggac

SEQ ID NO: 313672 - DNA, 122 bp, Homo sapiens
aaccaggaagtaaccgcaagaatcgggccaccttaacagtagagtaatggtttggcctcgcgccaagtcccacctctgttccagctcctgctcctcccctctctcttcccgcactgcttggg

SEQ ID NO: 313673 - DNA, 122 bp, Homo sapiens
ctcgcctcgcgttgctgcaaaagccgcagcaagtgcagctgcaggctggcggctgggaaccggcccgagcaagccccaggcagctacactgggcatgctcagtagagcctgcggcttgggga

SEQ ID NO: 313674 - DNA, 122 bp, Homo sapiens
cctttgccccggggacggggagaggttgccggggcaacgcgtttgcgtcagcgaacctggcgcggcgcccgggctcagagggcgagggaggcggggcccgggctctggaccagtaggactcc

SEQ ID NO: 313675 - DNA, 122 bp, Homo sapiens
gctcccagggagagaggctggaggcggagcaggcaccttgtggcccggggtgggcctgcgcgggacatcctccctgccacctgctaggccggggtctcagcgaccgacgcttctcaggagtg

SEQ ID NO: 313676 - DNA, 122 bp, Homo sapiens
tcctgtttctcagggaactccctggggttggccggtaccatggaggaagattgtcttcagcgtgcagggccagcgtcctacggcagtttcactctgagcctgtgtctggatcacggagacgc

SEQ ID NO: 313677 - DNA, 122 bp, Homo sapiens
gccgcaggtgccaggccattgcgattgtagggcggaaaggcagttgctctgcaaaggaaacggcggcactctactgcagggcattcaagtcaaacatcactgactccgctgagagggagcca

SEQ ID NO: 313678 - DNA, 122 bp, Homo sapiens
gacacgtgggcgggatgggcgcagggtttcggtagccttggaactctcgccaaagaaaatcgcgggcgccggtgcctcagccgtcctgcctgagagactcgcctccgagaggaggaagggac

SEQ ID NO: 313679 - DNA, 122 bp, Homo sapiens
aagaaggtggcagtcctggtcatgggcaggatgaagcgtgagatcaccacgctggtgagccgggtgggccatgagcccaagaagtggcccatctcgggtgtcctgccgcactccggccagct

SEQ ID NO: 313680 - DNA, 122 bp, Homo sapiens
acctagcgacagaaggaggaaacacaccagaccagaactaaagcggatagcggttagaaacgcccagtaagggtgccagaaaccactttcaggtatgtggagaaggaagtcaagggagaaaa

SEQ ID NO: 313681 - DNA, 122 bp, Homo sapiens
tcacacctgcccatcacaggactcgggcgacagggtggtgaagtcaggctgtggccccagcggcgccacgaggccgaaaacaggcgctcagcctcatccccgtggctgcagagtgccaagcg

SEQ ID NO: 313682 - DNA, 122 bp, Homo sapiens
ggagaagcccgggttggggctggtttccggcctatgctgccctcccagggggctccacagcggcctctcagcaccttctcccctgcccccaaggccacactgatcctaaactccataggcag

SEQ ID NO: 313683 - DNA, 122 bp, Homo sapiens
tgctaatagaaactattatgccttctatttctgttacaactattaccagggaaaagtacacggaagtttcattaacagatttataacatattgttaataagaacaaaattcccaaactttct

SEQ ID NO: 313684 - DNA, 122 bp, Homo sapiens
ggcgcagccaggctcgcgatgggaggtgggggggccggcagccccgtggggctgcggaggcgggacctgcaggatcctggttagggtcttgagtacacacggctcctattggcctcggcagc

SEQ ID NO: 313685 - DNA, 122 bp, Homo sapiens
gtgagtgacgggggtgggcggggacaggctgccccttcctgggatgcactcaccttgcaccgcggtgcaggcgcttggggagggtgacaggtacggctctgcctggtgcggggactctgggg

SEQ ID NO: 313686 - DNA, 122 bp, Homo sapiens
cacgccggtgaagcgcttccggtctccctgctggtgggactgaggagaacgccgtgctgccgttccggccacaccagagaagtgcttctggtccccgtgctggtggggattgaggagaacac

SEQ ID NO: 313687 - DNA, 122 bp, Homo sapiens
cagagcgatggatgcgaccgccttcgcgccccggcccgtcccaagcagcacggatggctgcggcagagaagctccagcgaggcaggcggccaccgcacttaagtacagaggccaagcagtgt

SEQ ID NO: 313688 - DNA, 122 bp, Homo sapiens
gtgttgtgttgagttgtgctgtgtcatgtgctgtgtcactgttcctgcagactccctgtccgggagctctagggccctgacctctaagaagccccagccccgagccagcctcaggcaaggtc

SEQ ID NO: 313689 - DNA, 122 bp, Homo sapiens
ctattttggtcccaacactgaaccaaggaaattgcgcccaaggttgaagcacacgcaatccgtccgtcatgcagacaaatgctctttcaggggtcctaattaagtgtggaggcctgactttc

SEQ ID NO: 313690 - DNA, 122 bp, Homo sapiens
tcccgcgaggagaatgtgggggtggagatggtgcggtttctgctgctgcggcccgggacacgcttggaaaggggcggggtgggggactgagagtgtggagtgtagaaagggaaaaggtgact

SEQ ID NO: 313691 - DNA, 122 bp, Homo sapiens
ccgcgggaggcctccagccctcactcaccggtcctggcctccacagggactgggccgtggcgtttcccattctggagtccaaagagcaggaacttgtacttgcgggccgggtccagccccga

SEQ ID NO: 313692 - DNA, 122 bp, Homo sapiens
aaaggtgaacgttttacagttcctggcttggcctctgaatgtgggaaaaattcgttcctccgcttcccatcgaattctcgtcgaaaacaactttgtggtcgcgtgcacggtattgaactctc

SEQ ID NO: 313693 - DNA, 122 bp, Homo sapiens
ggccctcacccctggttccactgcaggagacctgttaaaggtcatccgtggaccgaaatgcgcgcccgaagcaaccaagagcagaggcgggcgaacgcgggaggctggccgccccagtgtgt

SEQ ID NO: 313694 - DNA, 122 bp, Homo sapiens
tggaggccgagctgctggagctgcagcagatgaagcaggccaagacctacctactgggtccggacgaccacctggccgaggccctgctcgcacccctcacgcaggcccctgaggccgacgat

SEQ ID NO: 313695 - DNA, 122 bp, Homo sapiens
ctcccggacaggaggggaggaatctgcacagacaagggccagggttcagacagaagacaacgcccacaccagccacttggatccggaagattcctgtacacacttgcatgggtgtaaaatta

SEQ ID NO: 313696 - DNA, 122 bp, Homo sapiens
atgaactcaagccattggaaaagcagctcagattagtgagaaagcaaagacccaagcttgcgggcctgttctgaatggcctgttcccagcaggttgtgtagcagtagaccgatgcccacaac

SEQ ID NO: 313697 - DNA, 122 bp, Homo sapiens
cctggcatcttgttcccttcctttaggggctttcgtgttgctttgagatgcccccttgggcgtgacccgcagctgggtgcaaggcagaagctccaccactcgcctggcccggagcagggtct

SEQ ID NO: 313698 - DNA, 122 bp, Homo sapiens
taatatttctgccctctagtggttagccttttttgctaaattattttttaaaaaatgcaccgtactgctagttacagaatcaaatctcaaggttgaaagggacttaaaggtcagcgagtccc

SEQ ID NO: 313699 - DNA, 122 bp, Homo sapiens
aatttaacaacaaaaaaactttaggcttctttggagagagacatgcccttaactccaccccgccctagaacagagacccagcccatccaagtcagcctccccaggtcctccaccttcaaaac

SEQ ID NO: 313700 - DNA, 122 bp, Homo sapiens
gcaggacgttcccacgctggggcggccccgagaaaggctgtggggcgggccgggggcgggcgcccgcactcaggtccctccgcagcgggttctcagttgctcgctgggcagacccaggtcgc

SEQ ID NO: 313701 - DNA, 122 bp, Homo sapiens
cgccctctgggcgttttcctgcttcatctcactcactcacatcctcctgatggcccgtctcgttttctgcggcagccatgaggtgcctcactacttctgcgacctcactcccatcctccgac

SEQ ID NO: 313702 - DNA, 122 bp, Homo sapiens
aagttaatccttggtgtcagaggtcaaggcggtgacttctctcactggggaggtgatggacggggcatgagagctcccaaggtcctgaggtgtcctgtctctgatggtgcgggtgcaggtgc

SEQ ID NO: 313703 - DNA, 122 bp, Homo sapiens
caggtcccagctgctggagtgatgggattttctgatttccatctcttcctgatagccagtcgagttctcttatatctcttccacgccatgcgcaaatatcatgacaaggcctggctcttgca

SEQ ID NO: 313704 - DNA, 122 bp, Homo sapiens
gattgcagacggagtctcgttcactcagtgctcaatggtgcccaggctggagtgcagtggcgtgatctcggctcgctacaacctacgcctcccagccgcctgccttggcctcccaaagtgcc

SEQ ID NO: 313705 - DNA, 122 bp, Homo sapiens
gcagcctctgcttgcccttatcggcgctgcgctgggagggcgggcgcgcgggcggcgccgcggatttggctcctgatttcgggccgtcttgccttgcagattaagtacacgggcttcaggga

SEQ ID NO: 313706 - DNA, 122 bp, Homo sapiens
gctagtcagctgtgggttgctaaactgtcagattatatagattagacgtgggcactgcagcgcctattgtgggccaaggacaagcagagggagctggtctacagatctggaagaacgggact

SEQ ID NO: 313707 - DNA, 122 bp, Homo sapiens
caccaacctttcttttcctgggaatgggctcgtcgaagagcaggttgctggcctccgcctcgtcgatgccgtcgtctggctgcgcggggctgcggaagggcttgaagctgtcagccgagagc

SEQ ID NO: 313708 - DNA, 122 bp, Homo sapiens
aaaaggaatggacaaaagcactttacagcctccttaggagcatcagacacagtactgaaacggtggccaagtcaacatggatgtcgatggaaaacacggggctgtggcactacagactgtgt

SEQ ID NO: 313709 - DNA, 122 bp, Homo sapiens
cgtgcccggcccaggtattcctagaagacataggaccccatgaatccttgcaggagagcacgtaaactggactcctaagcccgccccagagccccggcgctagtgctcgaggctgggacact

SEQ ID NO: 313710 - DNA, 122 bp, Homo sapiens
ccagaggaggggcggggggccccagggtggggagttcgcccccaaagtttccagggggagcgtcgggggcctggcaaggagcgatgagcccgggaggggtgcgcggggcaatttcccccggc

SEQ ID NO: 313711 - DNA, 122 bp, Homo sapiens
aacagcttttagccaatcacaaagcagacaaacaggtaaggactcaactgctccagataccggtgaggcctaagcttcttctttttttcttttttttatgtattgtcacaagagaaaacaac

SEQ ID NO: 313712 - DNA, 122 bp, Homo sapiens
ctgctggacgcacccggtactgcagccggtgccgccgccccctcacgtgcaggtccttcgcgttaaggtcgttgaaactgcactcgcacagcttgcagtggaagcgaagcactcgcccttcg

SEQ ID NO: 313713 - DNA, 122 bp, Homo sapiens
ctctttccacagattcatctctagtctctgtaaaatgccagccctcttctgggttaacagcgcctaaccgacatgcgccactagttcttccttgtttcaaagtgttctctaaacacagagtt

SEQ ID NO: 313714 - DNA, 122 bp, Homo sapiens
tcctttacttcatttgagtttctactcagatattccctctgcagagaggccttccctaatcgctctctaaaagagcaccctaagttgggcacagtggttcatgcctgtaatcccagcatttt

SEQ ID NO: 313715 - DNA, 122 bp, Homo sapiens
gcacttcaaacctatcaactgtatttgtgtaggtctatttctaggttctttgttttaatccgttcattcagctgtccattcctcctccaataccacacagccttgattactgtagctacatc

SEQ ID NO: 313716 - DNA, 122 bp, Homo sapiens
ggttgcggtgagccaagatcctgccattgcactccagcctggagaacaagagtgaaactacgtctcaaaaaaaaagagaatagagagccatgcagtccacgcgggattgtgagctgtggtgt

SEQ ID NO: 313717 - DNA, 122 bp, Homo sapiens
ttgcaaaacaaagtaattgccccaaatcactatgaaaccctaagtcaggcataaaactcacgatttctgacccttcttcatggcctattgcctcctattacctttactttttcaagtaaaga

SEQ ID NO: 313718 - DNA, 122 bp, Homo sapiens
agttaccttctaacttatcttaagatccataaacaattgaaaaataattcctggtctttacgaaatgaaaaaaaggggggaaaaagcattacatagatgattaataggatgaacaaaaagtt

SEQ ID NO: 313719 - DNA, 122 bp, Homo sapiens
ggtgggcggatcacctgaggtcaggagtttgagaccagcctggccaacatggcaaaaccccgtctctacaaaaatacaaaagaaattagccagacatgatggcgggtgcctctaatcccagc

SEQ ID NO: 313720 - DNA, 122 bp, Homo sapiens
aacagaggaaacgcgacccggccagagccaggaagatgctgcgggacaagcagtcaggggcgagcctcgcaggtgtggggcagacagaaaccccggagggcacagaatccgcggcacacaca

SEQ ID NO: 313721 - DNA, 122 bp, Homo sapiens
cactattattatgagaaatggctaagcttccttctcaatgacaatgtctctactgcagagcgtgcctgtgacagcaccctggagaaatcaccttttaataccacattatccccttattctaa

SEQ ID NO: 313722 - DNA, 122 bp, Homo sapiens
gtgggaagcaaagaaaagtaagtgagaggaagtggcctctgtgtggcttgtccaaccctacgtcattccatccaagtactactgcttcagggcagaagagtctggacctgaacagagataca

SEQ ID NO: 313723 - DNA, 122 bp, Homo sapiens
atggcaaacagccgaaccttgtcagcaatccaagaaatgagctttaggacagcaaggagacgccattctcatgtcacgtttcagcgtttactactgatatgataagaagggtccctgccgtg

SEQ ID NO: 313724 - DNA, 122 bp, Homo sapiens
agattgctcatagtatggtgcagctagctggtgcctgggaaacaagcttacgagacataacgaaattgtgcaccacacataatgtgaaagagaccagtttcttgggaatgttcttactttta

SEQ ID NO: 313725 - DNA, 122 bp, Homo sapiens
gacctctacgaccgtcctggagatttgcgggggtcaaggaggggcgctccgagcaggtggcgccaaacccactcctctggcctctggccagtaccgccagggagggactcaggagagcaagc

SEQ ID NO: 313726 - DNA, 122 bp, Homo sapiens
tgaggaagacagatggatcggcaaatcgtgggctggagacaggaactcgggccccacctccggcctgtcaattccaagcccctcagagtctttgttgtacatcgctgccatggcgactgctg

SEQ ID NO: 313727 - DNA, 122 bp, Homo sapiens
gccgggatgagtgaggatgagtgccaggatgagtgccgggatgagtgccgggatgagtgccgggatggagtgctgggatgagtgctagggcgctcgtttctgcttcagggcacattctcaaa

SEQ ID NO: 313728 - DNA, 122 bp, Homo sapiens
ccagagcttcagggaataagattgcccaggattcctcggggggcaagcagagcacccttgcgtggaaatctgattgattcaccgtatgcatattttttgccaggctttttaaacccttcact

SEQ ID NO: 313729 - DNA, 122 bp, Homo sapiens
tctgggaggacatcttttgtgctggccacatgcttctgacacacacccatccatcatttccggtacaaggcctcaggtctcacccacactttgttggggtgatcagacccaacaccaggtca

SEQ ID NO: 313730 - DNA, 122 bp, Homo sapiens
agaagaaacggaaagaagggcctcactctaattagtggtggatctgcctggcatcaccctcgctcctggcccaaggtggaagggaggggctcatctccagaggacccctcctctgtgctgtc

SEQ ID NO: 313731 - DNA, 122 bp, Homo sapiens
cagtcagggaggcggtggcgttgggggcggcataggggaaggcaacggagtcggttgtgccgggtctgaatcgctgctccactccgggtcttcgtcaaactttgtctctctgtttccgtttc

SEQ ID NO: 313732 - DNA, 122 bp, Homo sapiens
aaggtaggtgggctcaccaacatcctctacacaattagtacagactgtgatctgaggtggcgtcctagagctagaggctaagaagtctcatgcctgaagcagatctaggcatttaacacgca

SEQ ID NO: 313733 - DNA, 122 bp, Homo sapiens
ccgagtgtctgggatgcgccagggccgtactggggctacgttgctaagtaaactcggtgccgacctcagccctcagggagtttctggtctgtgctaccacatcctcgcagtggtgtctcttc

SEQ ID NO: 313734 - DNA, 122 bp, Homo sapiens
atcccctgttttctcttgcagatttgctaaatgaccgcgcagtctgtcatctgcggtgttcgcgtgaccctcagcgccctccccacccggcaggccctttcccgccgaatgggtgcggctgg

SEQ ID NO: 313735 - DNA, 122 bp, Homo sapiens
gtccctccattgtgtttaagtagaagcacgaaatcagcattctgatttatcctaaagaagcgttccaaattgtctttaagataacatgtttgagtttttcgtgttcattcataaattatttt

SEQ ID NO: 313736 - DNA, 122 bp, Homo sapiens
acagtatggatataatagaaaaattatgtcaaacacacttggagatgatagacttcgacacgtcagggagggagacctggaacagatacttccctcgcagtcttcagatgaaaacaacattg

SEQ ID NO: 313737 - DNA, 122 bp, Homo sapiens
cataatacttcaatactgcagtgagctcatcagccgacgccccctgggctccctactgcacgtcacagcttgaacttggcagtggagttacagaaaaaatggatgtaaaccctgctgctgag

SEQ ID NO: 313738 - DNA, 122 bp, Homo sapiens
ggcggccgaggccaggcctgcttgggggccaggccgcggggcctcctgggttttcccagccgcactcaggaggatgccgggcccggcgcaaggggtggctgggaaggggcgctcagtgtcca

SEQ ID NO: 313739 - DNA, 122 bp, Homo sapiens
cgccggggccgggcccgggacagggggcgggagcccgggtagggcggcttccttggcgggcgcgggcgccggcccggcaggctgcagcgcggcgcccccccggcggctgcccaggctggagc

SEQ ID NO: 313740 - DNA, 122 bp, Homo sapiens
ctgtcgggggagggatgctgggacagctgctcccgcacacggctcgcggtctcggcgccgcggagatgcccggccagggtccggggtccgactggacggagcgtagctcttctgcagagccg

SEQ ID NO: 313741 - DNA, 122 bp, Homo sapiens
gaggaggagccacgtgacccggcatctgatgaagtcacaccaaggacagggtaggtagcccgcaccatcctctcttgggcgccccttggcttgtgaccaatcctggatgctccccttctcct

SEQ ID NO: 313742 - DNA, 122 bp, Homo sapiens
cgaggcttctcaaaccatccgctgagatgccttgagggcggagaatggacgcgacccctgcgcacttggggagctgccacaagagcccttttcctattttatcttcagttctgaaaaaataa

SEQ ID NO: 313743 - DNA, 122 bp, Homo sapiens
gggcaacgctctggcttgacaaggggcggcactgctggtcagcagcccagccagccgcagcggccacttgtgttcccagctgtggcttgtgatctatggtcgactgagctgttactctcctc

SEQ ID NO: 313744 - DNA, 122 bp, Homo sapiens
agcgcgcgccccagcgccgcgcgtgacaagtacactggcctgtcacgtcctcgcactgcccgtgtgggtggcagctacacagctccttgcagtcggggccccagaactggcgcgggcactct

SEQ ID NO: 313745 - DNA, 122 bp, Homo sapiens
cacctagaggccctggagcaggagggtggaagatctcgcctcagtcacgcggccgcgctgcgcagcgcaggggtctccaaagcccgctgtgctaagactacagggcttcccgcttctcccag

SEQ ID NO: 313746 - DNA, 122 bp, Homo sapiens
ccggccagggcctgactgtgactggagcaagagccgagggactggacggacggcaggtggcgccacctgatctgtgcagggacaggcagggacaggcaggcagagaaagagcccagctggag

SEQ ID NO: 313747 - DNA, 122 bp, Homo sapiens
cagcccctggtcttctgagcaagaggatgggtaccactgggcaggaagagcgagtgtctacgctctccagaggacacaggagcaaggagaccagagcattctcaccaaccaggccagttccc

SEQ ID NO: 313748 - DNA, 122 bp, Homo sapiens
tctcttcctatcaatttgtgtaccacttaaaaatgcttacagctggctttggaggaagagcggttaaaatcaaacgtactcactctgagacattcaaatatccaggatatagccactgagca

SEQ ID NO: 313749 - DNA, 122 bp, Homo sapiens
ttcttcaaaggctagcgagcctttgaacgtttttgagcccatgcgttggaaaaattcctccggaaaagagagaaggtgagggaggggagggcagggtctgagagttgaggagtctgcagcag

SEQ ID NO: 313750 - DNA, 122 bp, Homo sapiens
aagttatttcatattacactaaaaaatgtcatggaaagagtacgccccgtgtacccaccacgcaactgaacagtaacacggcacggggagcgtgggaggctccggcttgtttctccgcccct

SEQ ID NO: 313751 - DNA, 122 bp, Homo sapiens
gcctgttgcctcccacatctgtgggaggaggagaccactgctgaatgaaacgaagggaaacggagctctccccaaagcccggccagctctctttgtttgggaacactgtaggaaatcccttc

SEQ ID NO: 313752 - DNA, 122 bp, Homo sapiens
tgacctttaagaatgaaggacagggtgtcaggtctttgctctgcaaggtgtggctgaatccgcacatagtttccttgcaaggtggtgacagactgctgcacagagttggttgcatgtcagag

SEQ ID NO: 313753 - DNA, 122 bp, Homo sapiens
ggctccgggggcccatggccagaagagactcaggaatggcagtctgtcacggttgtgagccgccccttggttagcacacacctcacggacctcggtagggggaaaaaaaccacccatgctcc

SEQ ID NO: 313754 - DNA, 122 bp, Homo sapiens
gagactgagaccatcctggttaacacggtgaaacctcgtatctactaaaaattagccgggcgtggtggcgggcgcctgtagtcccagctactcgggaggctgaggcaggagaatgactgaac

SEQ ID NO: 313755 - DNA, 122 bp, Homo sapiens
tgaagtgagcatgccagccactgcaggaacgccccgggacaggaatgcccatttgtgcaacgaaccctgactccttcctcaccctgacttctccccctccctacccgcgcgcaggccaagtt

SEQ ID NO: 313756 - DNA, 122 bp, Homo sapiens
tattctcattttgcttgtttgaaaatagtcaaggtatttagacaatataagacatcacttcgatttaggaggaatttgattagatgcccatcttggctgcatgggggctgtgtgaccttgtg

SEQ ID NO: 313757 - DNA, 122 bp, Homo sapiens
cccctgaggccacttccaggtcttgcgaccggaggagagttaccaaggagacgctcctcccgaggcctcgcgcgtcggaagcttctgtcccctggattccggttgacggacgcgtcccccga

SEQ ID NO: 313758 - DNA, 122 bp, Homo sapiens
aggcacacattctctcggcagtagggcagcctgatggacaggagcctggatagtgtgctccgggctttccacaggtggaagtagccgtccaaggacaccgctcccagctcctggttcttgcc

SEQ ID NO: 313759 - DNA, 122 bp, Homo sapiens
accatttttcaggcgccccagatctcatcctgagacccctctttttacagccacaactgccgcaggggagcttggaccatctctcagctctggtctctttggagggccctttcattggcaga

SEQ ID NO: 313760 - DNA, 122 bp, Homo sapiens
gaaggttctggcggacagcgagcgatatacgtggatcgtgctgtgagggccaggccgccccggacactgactccaactacctccgtggcctgggaccggcccccttcctggggtggcctctt

SEQ ID NO: 313761 - DNA, 122 bp, Homo sapiens
cggcgtggaacccccagtccccgcgccggtgcctcccgcgcgcccccggcccgaggccgtcgccgccctccacttggcattcgggtttttgacccacttctgctggttccccgccgaaagaa

SEQ ID NO: 313762 - DNA, 122 bp, Homo sapiens
gaacttggcaccctggtcctatgcacagaagaggagctttccgaaggctccgggagagaacgctggggagtcaaggccagtccgagcacagcagctggggccagattggagacagggacttt

SEQ ID NO: 313763 - DNA, 122 bp, Homo sapiens
tctgtttcccaagccacccctatccccctgcagccaaagggagagcaaaactgccttatccggagaagccccggagccgaaacagaggagcatttctcgcctctcacgtctcctcgtccgtt

SEQ ID NO: 313764 - DNA, 122 bp, Homo sapiens
tggattcctgtgtcagtggttgcaagccccagagcccacagggctaaggcaggtaatgcacgtgagtgaggtaggctgggtgttgcacattaggtcttttctcccagctcatcaggtgtttt

SEQ ID NO: 313765 - DNA, 122 bp, Homo sapiens
aaggggaaggggtgccctgaactgagtcagacacctgcccagagactgagggaagtgtaccgccacccccccacaactttgctatggggtggagggcagaggttaaaggtctcagccagacc

SEQ ID NO: 313766 - DNA, 122 bp, Homo sapiens
ggcagtaccctccacagccggagctcgaactgtcgcgagaatagcggtcggcttggaagtcgcccggcgcgggagcgcgaactctcgcgagaatgccgccagctccggaggcgactgcggca

SEQ ID NO: 313767 - DNA, 122 bp, Homo sapiens
ccccggtcgccacacacacacaggcccgcgtagacccgcccgcgcttcctctccgcctcccgccggcccgcaccacctcagggggccagggatgacagtggccatcttgctccccgggtcct

SEQ ID NO: 313768 - DNA, 122 bp, Homo sapiens
aaaggcattctgctgcctttctgaggcatgaacatttgggtgtcttctcaagaccaaccccgggcaagcaggtggcgcctgtgaaatggaaaacattcggaaaacagcagcccctcttcagc

SEQ ID NO: 313769 - DNA, 122 bp, Homo sapiens
gggcggaggtggggccgggccgggccgggccacggggggccagttccgccccaaggactacggaggagggtcccgccccgtcccagttaaaggagacccaaaaaagcgggggaagggcgggc

SEQ ID NO: 313770 - DNA, 122 bp, Homo sapiens
tcccgccgctgggcctcccagcacccgctgccagcgccgccaccgccgccgccccctccacggtgtcctcgggccctccagccacgcccgtggcgcctgccccctccgcagacgggagcgcc

SEQ ID NO: 313771 - DNA, 122 bp, Homo sapiens
cctgctctctcctacctccccttcccgggctaaacgctggggtcggtctggcagctattccgggaatctgagcgcggattctgacaaaggagacgtcttccaccgaccacatcacatggagc

SEQ ID NO: 313772 - DNA, 122 bp, Homo sapiens
gggtgctgccctgagggtgccccgacacgctctcctggggccctgagcggctgccacgtgcgtccagggttctggccacagggtgggcaggggccctgtgctcctcactggaggcccctgag

SEQ ID NO: 313773 - DNA, 122 bp, Homo sapiens
ggcccgaggccgctgagtgcctggtgtgctccgagctggcgctgctggtgctgttctcgccgtgccagcaccgcaccgtgtgtgagggtgagtggggggccccggggtggggaggcccggct

SEQ ID NO: 313774 - DNA, 122 bp, Homo sapiens
tgatggaattaaacaattccagcacttgttaaataggcacatacttaatttgcaaaacgccgtgcaagaacccgtagcgcacctggagaaaactgtctggaggcggctcaggcactccgggt

SEQ ID NO: 313775 - DNA, 122 bp, Homo sapiens
ttttttttttgagacagagtcttactctgttgcccaggctggagtgcagtggcacgatctcggctcactacagcctctgcccccgggttcaagcaattatcctgcctcagcctcccgagtag

SEQ ID NO: 313776 - DNA, 122 bp, Homo sapiens
ggagcttctagggacatctacctccctcgtgggcttgcagatgtggtgggcgatgcctaacgtaagatctctggcattcagactccctggttttggggccactcggaccctctgacatcctg

SEQ ID NO: 313777 - DNA, 122 bp, Homo sapiens
cacacggacggtggaatgagtatcagccacgccggactgattgaaggaagcactctccctcgtattcccaaaacaggcgagcagagctgagcacggaaatggatgcatgcttctagagggag

SEQ ID NO: 313778 - DNA, 122 bp, Homo sapiens
gtgctgggggtgtagacacatccaaattcccgtcttattctcactcatcgcgtgtccaggcgtgcagatacatccaaattcccatcttattctcactcatcgcgtgtccgggcgtgctgggg

SEQ ID NO: 313779 - DNA, 122 bp, Homo sapiens
ccagtcagtgagaaagaatgaagaggacaggaggaccacctctcagggcagagctctgagcgcagacagcagacagcagacagcagacagcaaggcacatgcgcaataatggacatgcccag

SEQ ID NO: 313780 - DNA, 122 bp, Homo sapiens
ctaaatgacaatataactcattatgaaaatatactgaaaagtacaagagctgatgtaaaacggtaatcaaggttccaggcatcatgggattagggtaactgaagaataaacccagccaggct

SEQ ID NO: 313781 - DNA, 122 bp, Homo sapiens
acacctccgtgaatccggaagtatgctgtcaaaacaaccaaaccacggggctgggggaggcggggcctcagtaggcgtctgcacgctagctgaaatagagcaaaatgcccgacttttggggg

SEQ ID NO: 313782 - DNA, 122 bp, Homo sapiens
cctggtgaggtagacaccgcctccgcctggtgaggtctcccggcgttcaggtcgcggctccgcccacggccgccccagggtgggcttcctacacgtctctttaaagggcagcctgagcggcc

SEQ ID NO: 313783 - DNA, 122 bp, Homo sapiens
aacttaaaggacagccttgatgtggcaaagccggcggacgccaagaatggcaattccatccgcttggctttgacagtgtcagaagcatgatgcctgacgattgcgcatgagggtcggcccct

SEQ ID NO: 313784 - DNA, 122 bp, Homo sapiens
aatgtcacttctctgctggtatttatctgatagagcgccctcctagggccgccacaagaccgctcaaaaacagacttggagagggataggccagcgggaccccacttaccgaaaacactgca

SEQ ID NO: 313785 - DNA, 122 bp, Homo sapiens
cagggccaggcccccgacggcttcctcaggaggactcacggttctgggggattccggaaccgctaccccgtcgcgagaaaggaggtctacttacgcgcgcaatctcgagcgagcggcctttt

SEQ ID NO: 313786 - DNA, 122 bp, Homo sapiens
ccaagggaaggccagtcctgctgtccctagaggaagacgacacatctcaaattagcagagcgtgctgctgcgcacctgtagttgcagctactggggaggatgaggtgggaggatcacttgag

SEQ ID NO: 313787 - DNA, 122 bp, Homo sapiens
tcagctcatgttaacaagctgatgatcatgaaataaagatgaccatttcaataggatactcggggctgagggactgaagtgaaatcatttggacttctacagaggtcatggttgaattatca

SEQ ID NO: 313788 - DNA, 122 bp, Homo sapiens
tgttatctcacagtctggggtactgatcccgcacagcagagacacaacgtgtgaaaggctcggcagagcccattcctgttcctggaaaaataaccagaagcacacatctgcctgaccatgag

SEQ ID NO: 313789 - DNA, 122 bp, Homo sapiens
tcgagattgcggcgcccgaagcgcagcgctcgcctctggagctgaggctgagcgccgggacgtggtgggctggtgctggggctgcaagactttgactctttaattataaaggcaaagattga

SEQ ID NO: 313790 - DNA, 122 bp, Homo sapiens
catcccagtctgatctgtgaagggtagggccagcaggcagcaccaaagttcccgtatgcgcgttttcagtcttcatttaggtccgaattcccggcatataagaatactaccgtcgcttgttt

SEQ ID NO: 313791 - DNA, 122 bp, Homo sapiens
tttggtctaaaatttttttccttacgcattttcaatgttatttgattttgattttcacatcgtcctaattcttctttctttctttctttttttttttttttttggcgacagagtctcattct

SEQ ID NO: 313792 - DNA, 122 bp, Homo sapiens
ggttctttgcatgaacagggaatcttctactttggcccacggtggccaggcatgagccaccgggcctggccatactgttgctttttaaagttcctgcatctgtggctgaatatgtcttatta

SEQ ID NO: 313793 - DNA, 122 bp, Homo sapiens
cctgcacagttgggtcctcctgaccactccaagatataaaatcattattatgcctcagcccggtttttgtctccagctctggtcttcaaagtaagtttttttgcagttcatctcaaagatgc

SEQ ID NO: 313794 - DNA, 122 bp, Homo sapiens
ggattgctgtcctaggtcattagctttgaacccggtgcagagacccgagatgtttatcatcggtgcccagcccgtgtgcagtcagcttcccgggctctcccctggccagaggaagctgtgcc

SEQ ID NO: 313795 - DNA, 122 bp, Homo sapiens
gaatatgactggatccaggaggacatcaatgtcctacactaaaatttaaatgcgactgaccgtccccactctgttaagccctttactacgcgcttactcgctgctatgcccccagtcggagc

SEQ ID NO: 313796 - DNA, 122 bp, Homo sapiens
gagggagagagacctgggcggtggctcccgagcctgagcgagacgctgtccacctcgctgcgctgcagtcgcagcaaggccacagccggctgaggaccggcaacgcccccttgtggccattc

SEQ ID NO: 313797 - DNA, 122 bp, Homo sapiens
gcccatggagccccacccaggggggtccacaggagggcaaggagagggtctggctctctacggagttcctagcccccgtccgcctttcgcagggcaggacccggcagtgcaaggcgggcgta

SEQ ID NO: 313798 - DNA, 122 bp, Homo sapiens
gcacccctgcagcatcctcagccctctctccagtgacagcaggctccctgtgggaaggcgcgacacccagaagctgggacctaggaaccccagaagtcttccaggtttgcccctacccccat

SEQ ID NO: 313799 - DNA, 122 bp, Homo sapiens
tctcctggcttccccgggcagcttttatggagcaactcaacgccaaacacttgatgtcatcgtgcggggagggggtgggggaggagaacgccctgcccaccggagggctggcgccccagatc

SEQ ID NO: 313800 - DNA, 122 bp, Homo sapiens
ggcctcccctcctaccctggggcgccctcggggtctcactgccgcggaggaagaaggcagcgccgccctcgcctgcagaaacctcattcccgagaaagtgcgggacgagcgtcttgggatgt

SEQ ID NO: 313801 - DNA, 122 bp, Homo sapiens
aagctccgggttcagtttcccgcgctggaactttttcaatagtaaacgagcaaagctccgcgcgcccaggtggcgcgagcactaggatctgtcggttggggtcctacttttacataacgccc

SEQ ID NO: 313802 - DNA, 122 bp, Homo sapiens
ctcttccaacttctattttagggtgtggcctttggttcctggcaacctcttctctaactccggagaggtctaaggagcacacccgcccagccagacctccccctcctccgggggctccacag

SEQ ID NO: 313803 - DNA, 122 bp, Homo sapiens
aggggctgcgcccttgtttacacagcggcaaatgagccaattaggggctgggggcgggggcgggccaccaaggccagggtgtggccaggtttgtggccacctggtgaacgctgcgctcctcc

SEQ ID NO: 313804 - DNA, 122 bp, Homo sapiens
gaccccaaaacgacttgaggaaactgtttccacggtcctgctgcagaggggaagcacagtcgtcaagaagagagtggggtcaggatcaaaacacatttagtgtgacttagggaaagaaaaca

SEQ ID NO: 313805 - DNA, 122 bp, Homo sapiens
ctggcctgcgggctgggatgggagacaggagaggagaaaagacagaggctgggccctgctcgctaaataaatcaggtgcccacgggagcccctgggcgtcttcccgcgctggcgttctgcat

SEQ ID NO: 313806 - DNA, 122 bp, Homo sapiens
aaatgggctacaaaaaagagagagctgctttttaagcctgtatgtgtcatttacctgtgacgaacagcagtaagcgcgatggtaggcccgactctctccattgctcattctgtctctgctct

SEQ ID NO: 313807 - DNA, 122 bp, Homo sapiens
aggaaaaacaaacacacagaagaaaaccaaaccaaccaaagtatctctttcaaaaggaaacgacagtctccttaaaggcaacccgagacaaatttcagcaaagccgtgggacacatggcctt

SEQ ID NO: 313808 - DNA, 122 bp, Homo sapiens
gccacacctcacagaccctgcgccgcacctcacagaccctgcgccctacgtcacagacgccgcgtagcacctcacacaccctgcgccgcatctcacagacgccgcgccccacctcacagatt

SEQ ID NO: 313809 - DNA, 122 bp, Homo sapiens
ttagccaagtttaaggtcgcgtgcgatgcattcttccctagccaaggggcagtcaccacgcgcccttctgcctgtgagggattccaaggcaagactgaagcctactcctggttttattttag

SEQ ID NO: 313810 - DNA, 122 bp, Homo sapiens
tccgggcccggcgagagggcgcgagcacagccgaggccatggaggtgacggcggaccagccgcgctgggtgagccaccaccaccccgccgtgctcaacgggcagcacccggacacgcaccac

SEQ ID NO: 313811 - DNA, 122 bp, Homo sapiens
taagatgaaataaaaattctgatgctgcctccacagtgactcattgtctctttctgatatcgtccacagtgcccctctattaaagaaagggaactttgtgttataaaataagatgcaaaaga

SEQ ID NO: 313812 - DNA, 122 bp, Homo sapiens
aatggagggacacgggcaatactatcagtgattgccccaagtcacttcactttgctaaaacgcacataaccattcccagcagcaaaaacttgaacgatgtaaaggaattcaacttaaagata

SEQ ID NO: 313813 - DNA, 122 bp, Homo sapiens
gcccccgcgctgtctggggcgcgcctggccctcccgggcttactctctcccccacagctgcgcacttttgcagcgcgctcggtctttgatgtctctttacattatggcagagcagccacacg

SEQ ID NO: 313814 - DNA, 122 bp, Homo sapiens
gtgcaagtggaagatgagaagcggtaactcagcccctcctgacacgcggtgacccccgagcgagggctctttgtcaaaggcctgatggaagctcctagatcctgccggccctcaatcatgcc

SEQ ID NO: 313815 - DNA, 122 bp, Homo sapiens
gtccgccgccattttgggaaggtcgacgcccggctgccagcccaagcctccgctggtagacgccccgcggacgccatgacaaagaggtcgcagagggtcaaatacagcctctggattgaagc

SEQ ID NO: 313816 - DNA, 122 bp, Homo sapiens
aatccagtgcacgggcgggatgccgagtgtgtcgccaaactccaccactttagtcgggggcgtggtggtggctgcgctatctgcttcccactcactggcatcctagccgtgtggggtgtgtg

SEQ ID NO: 313817 - DNA, 122 bp, Homo sapiens
cggggaggccgagttctctgcctgtcctgggatcctacaaaccccacccttgtcttaaggcgccgtcgccccccacgtccctcctcatgccgggccctgctgctccccaggtctcccatccg

SEQ ID NO: 313818 - DNA, 122 bp, Homo sapiens
agctggcggtaacgcagggagcactacagctggcggtaatgcagggagcacggcggctggcggtaatgagtgcttgagccggaatcagaactgcacctgcagaaagctcagtgcttgttcac

SEQ ID NO: 313819 - DNA, 122 bp, Homo sapiens
gggagagaaggacgcgctgctggcaaaaagaagggcgccttccatggactggaggagcggcgagggagcctggtatgtgtgttttggatttgaaggaggcaaaccgcatcggagagtgcaag

SEQ ID NO: 313820 - DNA, 122 bp, Homo sapiens
acaaaacggggacatcccaagagaaaagattttaaacctcctgctttttctagtattggtcgagtttcttctgggaaaaactcatattcttcagagaacatcttgtgactcatgtccaaggg

SEQ ID NO: 313821 - DNA, 122 bp, Homo sapiens
gcgggggagacggagggcggggcccggacacgggcttttcccagcggccagcacccctcccgcaggacctcgggttccaccccagcagcctctgtttggtggggggcagagaagggtgcccc

SEQ ID NO: 313822 - DNA, 122 bp, Homo sapiens
gtgacacgcttgcgccccggtcgaacaggcgaagaggccgaggcccagagcggcgcagggcgagcctggaggctgcgccccagacctggaccagccacggacgccgctcccgccgctccctc

SEQ ID NO: 313823 - DNA, 122 bp, Homo sapiens
ctttccctcattctgatatctgcgttcagacctgcttcttcagagggctttctccaacctcgttactcagaggctccctgctcccttccaatggggtattcctgctggtcccaggctcgaca

SEQ ID NO: 313824 - DNA, 122 bp, Homo sapiens
gggacgatcggggtttggaggcccagggtccgggctgctgcccaagtggcgtctggttgtcgttgctttgccagtgtgttgcaaggaaaatgttgtccctgtgaattgttagcgcactgggt

SEQ ID NO: 313825 - DNA, 122 bp, Homo sapiens
acctcttcccttaatcttcacctagagacctaagctgggggttgggaagggtaggggcggcgggacttggaagagccagtttgcagccagccggtcgcctctcgggtccaaacccgaggctg

SEQ ID NO: 313826 - DNA, 122 bp, Homo sapiens
ctctgttctaattctgcacttggccagacatagctatgcaaactgcagcgagtctcttcccgctctgggcgccacctgactgacccgcgtaaggagggactgtgactggtccccaggcaaac

SEQ ID NO: 313827 - DNA, 122 bp, Homo sapiens
tgtgtgcacctaatctcagctggttcccccgagaccccctgagcaccaaccctagtcccccgcgcagccccttatccgctgcgacaagatgaaagaaacaatcatgaaccaggaaaaactcg

SEQ ID NO: 313828 - DNA, 122 bp, Homo sapiens
gagccgccgccgccgccgccgccccctttcctccctcctccctcagtgcgtccctcccaccgaggcccgcctcgtatttcctagatccggtctgagcgagagcttggcaagcaagctctggc

SEQ ID NO: 313829 - DNA, 122 bp, Homo sapiens
tgaaacacaacatcgggcagcgggtgtttgggcattacgtgctggggctgtcgcagggctcggtcagcgagatcctagcccggcccaagccctggcgcaagctcacggtgaagggcaaggag

SEQ ID NO: 313830 - DNA, 122 bp, Homo sapiens
ggagacgcgagcgccgcgtggacgctgacctcggtccgcgcctgcgccttggtttcttcccggcgattggttcccatctctgagggagacgcctcacttcagttttcactttctttttttgc

SEQ ID NO: 313831 - DNA, 122 bp, Homo sapiens
aggcgaatctcagcaggggcaccccgccaacacacccggcctcttctgagctgtccaggtcgtcaaaagcaaaacggcccagcccagaggccccgggagacagacgctgaggaacgcggtcc

SEQ ID NO: 313832 - DNA, 122 bp, Homo sapiens
cagacccccattcttcatgctggaaatgggattgctggacttggcagctttctttcccctcgtctttgactaggaaccggactcttaatttcctcaggacagactagctggcacattatccc

SEQ ID NO: 313833 - DNA, 122 bp, Homo sapiens
ctgagagagctcgtgggggactcaggccctttcagagtcacccgtgtggctcggccactgcgccaggtcttggaacatctaaggcagaaacaggaccaacacccgcaagcctccaacagccc

SEQ ID NO: 313834 - DNA, 122 bp, Homo sapiens
agggtcccgcgcagctctaggattggagagcttactccagggcgctctctgcatctgcctcgaatagcaccgcacggagcaacctctctcgcacctccacagtgcgtgggtgtgaagtgtat

SEQ ID NO: 313835 - DNA, 122 bp, Homo sapiens
taaaacaagttaatcttaaccaaatatcttgcctactgcctactgcctactgcaccacctcgttgaatgtgtcaatcctgtgaacatggccagcttcatgggccctgcactcacgagggccg

SEQ ID NO: 313836 - DNA, 122 bp, Homo sapiens
gtcctggggcagcacagggtcctccctggcccaggcgcccggtggccgagagcctgcccgcgagctcaacgctgctcaacggtctctgtccttggctgtggctcctgcgctctggctgagcc

SEQ ID NO: 313837 - DNA, 122 bp, Homo sapiens
aagtgtacagcattcaaagctattccttccagctctgaaatttctttgggtgaaagctgtcgactttccttagaggaaaaagaaagccatttcatcagggcactgacctcattcctgtaagc

SEQ ID NO: 313838 - DNA, 122 bp, Homo sapiens
agggctcggggttcgggggcggggtgttcacggtgagaccaaaagtcaggtaggagcctccggggtccctgctgtgtcacccggacaggccgtgggggcgggcaggggggcggggccgggcc

SEQ ID NO: 313839 - DNA, 122 bp, Homo sapiens
cctgccttttattggtcaatactcttcgggccgggcaatgtggctccccgaggctgcctgcgattggtgaacgcgtcgcggctcggggcggacctgcggactgaagatccttatgcgattgg

SEQ ID NO: 313840 - DNA, 122 bp, Homo sapiens
agcctaaaggcggggcattgcccaggagcttaatgaacaggaccttcctgtgggtcaagccgctccctccgccctcccctttcctctcgggatatccgggccacgctttcggccgttcaagc

SEQ ID NO: 313841 - DNA, 122 bp, Homo sapiens
cagagttaatcatattgagttttacagtcattgtcactcttctgtttcgtttctttcatccggtgtattaccctaacataggtcccctccttaatccatgtccttaaatttgcatgtagcaa

SEQ ID NO: 313842 - DNA, 122 bp, Homo sapiens
gtgtgacccgagggcacgtgggtggctgtctatgcccagggactctgcagccatgctgggcgtcagcctcagcccccagggcttaggagccggctctccctccctctctccccgcccccagc

SEQ ID NO: 313843 - DNA, 122 bp, Homo sapiens
agtgatccacctgcctcaacctcccaaagtgttgggattacaggcgtgagccaccatgcccggccagcaggagcttttcaagttcttttgatattggacaatgttcttggccacccggaacc

SEQ ID NO: 313844 - DNA, 122 bp, Homo sapiens
ttcctccctgccgctgcagcagagccgggctggggcgcagagccagtggcagaggagcggcggcggcggcggctgcgtcctgggcggcgtctgcgcggctgcggccccactggcggctgcgg

SEQ ID NO: 313845 - DNA, 122 bp, Homo sapiens
aaacacttgctgcatttcctgcaggcaggcaacagagcaagggcattgaaaacatgaattcggcttcaatgaatttatctggaatggtgcaatcggaacatctagaaagagactgttttcat

SEQ ID NO: 313846 - DNA, 122 bp, Homo sapiens
ggagtgcgagccggacggggcgcagcgaggggaccggttggtgaggtcctggaggctccccgccaccgaggggcgccctgcactccctctcttctcccatgctcctcgccgcgcagacgtcc

SEQ ID NO: 313847 - DNA, 122 bp, Homo sapiens
cggtagaggatctctcagttctacctcagtgccgcgcccacatccggggctggttctcaccgcccctgagcctaccctataggtagagaggacgccaatctggattcagaggtcccttttcc

SEQ ID NO: 313848 - DNA, 122 bp, Homo sapiens
ttcctctttcccacccttctcagaggggcatcaaagtgctggtgagcttctgcaggatctcgtagcattgggatagcacatatggttctcatctggtaactgtccatgcagcgaccagctgt

SEQ ID NO: 313849 - DNA, 122 bp, Homo sapiens
ggagaggccatgcagggggcagatgcaaatggatctaattctgcctgtaatggtagttagcgcccctctttcctcacaaagtgttgtattcattcctgtaagcaatctcttctcaatgtatc

SEQ ID NO: 313850 - DNA, 122 bp, Homo sapiens
gggggcgcgcttgcgcggtgggtggggccgcgagacttggtacctagccagcgggcggagcgcggagggggtttcgcttcgggctaagggactgtagttgtgacagccaggaaaccgagaac

SEQ ID NO: 313851 - DNA, 122 bp, Homo sapiens
cgcagtgttcccgaatgtcatcatcattcagaagccgcaggctgcaaatgtctcacagcacgcccccttccccacagaggaccccccccccgcctcaccgggagacactgggcgtcctcccg

SEQ ID NO: 313852 - DNA, 122 bp, Homo sapiens
tgaacttgagttgattctttctagaggcatttattgcacacctattagatgcaagtataccgacctccacagattccatgaggaggattcagatgaatcaggcacatctctggccatcagtc

SEQ ID NO: 313853 - DNA, 122 bp, Homo sapiens
tcctcaggaaaggaccaccagccctcttgaaaagtaaagtaacaaagaactgaaacttaccggatcaccccaggtcatctcaaccagttaatgagatgccagtccagtccgcttattcaaca

SEQ ID NO: 313854 - DNA, 122 bp, Homo sapiens
taaaattcatttagataaaattgccacaaacatttaaatgggaagattagttccccctcacgccttattgcactcgctcaatggttccgttaagaacattttacacgttggaaattccgtct

SEQ ID NO: 313855 - DNA, 122 bp, Homo sapiens
agggccgggagccgggccgctgggtttgggcctggcccgctcgccgcaatattgatggcccgtcagtgcagccctgattcctgtgctttcagttaaaaggtttctgttgttgtagcttatgc

SEQ ID NO: 313856 - DNA, 122 bp, Homo sapiens
caggtctaaaatacaaatctgattctaccacagcataattttttttccccactaaatccccgcaacttttggaattaagttaaagttattaacttggttcacaagacaatcattgatttggc

SEQ ID NO: 313857 - DNA, 122 bp, Homo sapiens
actgcaaaggccgactggaggtcaagttctgggcctgaagaggctgccaaaagtcaaaagcgggacctgggaaggccgctgagagccatgagctgggctgggctgaaagaggccactgggag

SEQ ID NO: 313858 - DNA, 122 bp, Homo sapiens
cagggcacggagcattcgcttttgtctcgacatccggccttcagaggatgaccagcctggcgacgcactggacaaggaggtgtagagtggggatgcacactaggcggtcggaaatcattatg

SEQ ID NO: 313859 - DNA, 122 bp, Homo sapiens
accttatacaaaaattaactcaagatggattaaagatgctctcaagtcactccagcacagcgttggtgctgcctgggtatcagaaagcaagctcacattgctctccagtacgtgtaagcctt

SEQ ID NO: 313860 - DNA, 122 bp, Homo sapiens
ccacctccccgggctgggtgactgtcaggccgcatctgctccaaatttatggctcctcctcgggccgccgccggcctctccacggcctctttaccaactgcagccccagctgagacccctcc

SEQ ID NO: 313861 - DNA, 122 bp, Homo sapiens
tcaggtaggagcccactcgcggccctgtacacacccccgtggggcccaccctggctccaacgggacagttgatgcacgtgggaacagcttggctccactgctgcctgtgtaaccacggctca

SEQ ID NO: 313862 - DNA, 122 bp, Homo sapiens
gcgtcttattttcagcccccaaacggctacaaatcatccgccttattttcagcctccaaacggctacaaatcatcctgtttaaacaaagcggtctgtctaaaaggaggggcataacagggcc

SEQ ID NO: 313863 - DNA, 122 bp, Homo sapiens
cagctccatcaggtggcatccatcctctcttacggtaacgtttgtttaccagtcatttcccgtttaaccaaactggaaattcccaaaggtggattctgtgtccttaaaacctaacagagtgc

SEQ ID NO: 313864 - DNA, 122 bp, Homo sapiens
aggcttaccttcttgaaatagtcagcaaggctgtcggggtcccagcccaggacctctgagcgaaagggcacattcctcagtgccatggctgctctcccgggaagaagctcacaagctgagca

SEQ ID NO: 313865 - DNA, 122 bp, Homo sapiens
cgcgtcggtgcaggggttggccggggccttcggggctgagcctgcaccagtggcgggccccgggcgctcaggggagccgtgtggctgtggcctccgggaggcggtggacggcgtgcgcttca

SEQ ID NO: 313866 - DNA, 122 bp, Homo sapiens
atccagggattgggtgtcagtggcctgttgcacattgtcacttctacaagtgactaacaccgtcaggataatctaaaactacgaatactacctgactccacaagggtacggtgtattctcca

SEQ ID NO: 313867 - DNA, 122 bp, Homo sapiens
gtgtcaataatgctgcaagtgcagcattgtcgttcattgtgggggtgacaaccaaccacacgtttttgttctcttcacttgcaaaggctaatttttagcagtaggtatggctaacagaagac

SEQ ID NO: 313868 - DNA, 122 bp, Homo sapiens
caggtgctttaggaaaaggtccggtctgcgaggcctgtgaaaaccgtgatgaactacacccgcagcaagccagtgtgtacttggtaaggcaactcatgcttctgtttccaagtgcaagcatc

SEQ ID NO: 313869 - DNA, 122 bp, Homo sapiens
gcctgcacacgtgcacagggaggcctagtgagcccggtgcccgtgaacctgggataggtacgtaaacagcagcgcgcgcgtaagacacaatccacggagaagctaagacaagggcaccggag

SEQ ID NO: 313870 - DNA, 122 bp, Homo sapiens
gattctcatgcctcagcctccctggtagctaggattataggcacctgccaccatgcccagcgaatttttgtatttttattagagacggggtttcatcatgtaggccgggatggtctcgaact

SEQ ID NO: 313871 - DNA, 122 bp, Homo sapiens
tcgttctgcgtactgtgcagtgcctgtgtttttctgtcttctgctctctttccccattttcgtcttgtcccttttttccgccttttcttcctgtatcctgccatatgtaattgcagagtgta

SEQ ID NO: 313872 - DNA, 122 bp, Homo sapiens
ggcgtggcactgtacagagagctcaggtgccccggggaacagataagctctcccaggggccggggaggcttcctggatgggctgacccttgagcagggagggaagggtctgcggtcactggc

SEQ ID NO: 313873 - DNA, 122 bp, Homo sapiens
ggcctactgcacctacagcctcacccgcgacgctcacggcagctgcctgcacgcctccaccgccaatggttccatcctcgcaggcctctgagccagccccgcccactgccagggacgccgag

SEQ ID NO: 313874 - DNA, 122 bp, Homo sapiens
ctgtctgtacacacacgcatttcaccaggcgcagtgcagactgtctcatgcccatgtgggcgctgggatgcttcctgtacagatgtctcatgccttcagttacacataggtgttcctgttta

SEQ ID NO: 313875 - DNA, 122 bp, Homo sapiens
agcctcaggaccccaagtgcctgactgcctcgtggtccacccagaggtcctcaggggcttcggcaccaccagtaactaccttagcctccagcctgagccaggacagccacgaagcctgcacc

SEQ ID NO: 313876 - DNA, 122 bp, Homo sapiens
cgctgtcactgttctacccggctctcctgcgattgggcccagcggtcggtgccccagcggcgattggtccacccggacgtcactctcccctggagagtggctagtggatcgtgcacccaccc

SEQ ID NO: 313877 - DNA, 122 bp, Homo sapiens
gcagggggatcgccggggagggccaggggcttaggaaggtcgggggcctgggggtccacccgggaccggagattgcggatgaggtcagcgctgccccccccaacacccttccctgctgcata

SEQ ID NO: 313878 - DNA, 122 bp, Homo sapiens
catccattgtaatcatgtgtaccatgcaattcacagtgcctgacaaagctgatggggaggcgagttggaatgaatagtatcagcatcagaaaaaatacaagtgcatcctcataagattattt

SEQ ID NO: 313879 - DNA, 122 bp, Homo sapiens
gtcgtccaggtacacgccccagaatattggtcatagcggtccacccgggactgcgcgacccggaatccttggaaggacttctcggaaggactcctctctgacaggtggggcgagcctatggt

SEQ ID NO: 313880 - DNA, 122 bp, Homo sapiens
gactccccgcgtgtttgcacaaatcttagccgagttgatttgtaaaacacccaaacactgcgggcgcatggctgcagggggaaaggaagccaagtaacacagtaggacccagcatccgcgtc

SEQ ID NO: 313881 - DNA, 122 bp, Homo sapiens
ggccggggctccacgcgggcggagtggaggccgggccagggacgcgcacactagaagagccgcggaagaaggcggtccagcccgcgtggttgccatggcgccctagaggcgttactgctgct

SEQ ID NO: 313882 - DNA, 122 bp, Homo sapiens
tattactcctccacttctagtacgagaggcttgttcacgtcctaagttgctctgtgttcccggcaacgtacccggcactgagttctcaggactggtgcaggtcagcggctccgcaggggtga

SEQ ID NO: 313883 - DNA, 122 bp, Homo sapiens
gtgagatgaggagccagtaccctggacaccggtctcatctggcgaaagactgtgggtaaccgaagcatttctggggatggaagcaaaaagatcatcagaactaccacccgtggtgcgctgca

SEQ ID NO: 313884 - DNA, 122 bp, Homo sapiens
atggaaggtgggggcactcagggagtcacataagggttaatggaggacatgcctcagaatcggagacacgaggaatatccaaaggagggtccggcggagacttgggagtccggagcgccgag

SEQ ID NO: 313885 - DNA, 122 bp, Homo sapiens
aatatactgaaggatgactatgtattcttagttagcagccagacctctaatgagagccagcgactcatgtagcataagagctcttgaaataaactcttgcccctactcacagggcagctccc

SEQ ID NO: 313886 - DNA, 122 bp, Homo sapiens
cctgcccttcagcgagtgcctgctgtaagcttggccctgcacgccagggcgaatgtgatgcgctctttgctagggtgactcaatcctggcttcccaggggcgtgggactttcaatgttaaaa

SEQ ID NO: 313887 - DNA, 122 bp, Homo sapiens
accgtgcggctcccggaaccgtctgcccagagcggcagcgcctcccggtcactacaacaacggcggcccagtcaaaccccgcgctccaggcatggccagccgagccccgagacaccgccagc

SEQ ID NO: 313888 - DNA, 122 bp, Homo sapiens
agtgtggattgagggcctgcgcagttacctcctggactggtggaacttcctggatatggtcgtcctgtccctgtacctggcagccttcgcactgcgcctcctcctggctgggcttgccccca

SEQ ID NO: 313889 - DNA, 122 bp, Homo sapiens
tcctcctcagagtgcagtaggaagttcctttaagactgtgtcagcctgcagtatgcaagccggaaaagacctctcagtcctctgatgcagacactggagacgtaacagtatagagaacaagt

SEQ ID NO: 313890 - DNA, 122 bp, Homo sapiens
cccacccgaggagctgcccacggaggaggtgctgggcaggggcgcagggtctccagcgtccggtgcctcgggcctctgcggctcctgtggagggtgcagtgttcaatggccgagggcagggg

SEQ ID NO: 313891 - DNA, 122 bp, Homo sapiens
gcgtctgcgaaccctcggggtcgcgggggaggtggggccccgcgcgggggctggggtcgccgctccttacctacatctgcattgcaaaacgcctgttgcgggtgcaccggggagcagctgca

SEQ ID NO: 313892 - DNA, 122 bp, Homo sapiens
atcctgctccattttacttattttgataataacacacaactgaaccccaaatgtttactgcggggagtccaggccacttcacaacgaaccccatctacttagcttcagtttaccccctcgat

SEQ ID NO: 313893 - DNA, 122 bp, Homo sapiens
cttgagcatggccacgatgagcgtgtgcagggccgtgaagttgacggcgcccacctctggcgtgccgatggagaggtccgccagctcccggagggagaccgtggtcgcgggcggcatcgtgg

SEQ ID NO: 313894 - DNA, 122 bp, Homo sapiens
agttttttttttgttttcaagtttccttctgatgttactcccatgcttccgggcacattacgagctcagtgcctgccggaaatctcccacctggtggcaacctacccttgcatacaccccac

SEQ ID NO: 313895 - DNA, 122 bp, Homo sapiens
ggccaggttacagggcagggcaggcaaatcctcctccttgcccagatgcagtgggagacacggtcccacaaagctaagaagtcacaggtcaggggaacacccagttttccatccacaccaaa

SEQ ID NO: 313896 - DNA, 122 bp, Homo sapiens
taacaagccctgcagggaacctgacgcatgaccaaatcttagaaccttgcaaagtacacccgttgggtaaaggtgtacctgccttctcaaggccacctccccaccccaccccaaacccctcc

SEQ ID NO: 313897 - DNA, 122 bp, Homo sapiens
ggctgtccccgccgggcacaacaagtggtccaaagtcaggcacatcaagggtccgaaggacgtcgaaaggagtcgcatcttctccaaactctgtttgaacatccgcctggcagtgaaaggtg

SEQ ID NO: 313898 - DNA, 122 bp, Homo sapiens
tgtgtgggacagtcaggtcggcaggagtgcatgagaacggtgtgggcacacgtaagtgcacgatcacacatacaagtgagcttgagagtgtgtattcctgtgcactgtgtgcacacctgtga

SEQ ID NO: 313899 - DNA, 122 bp, Homo sapiens
ccagggctattctctcgccagtgagtcccacttcggaagcacacattgcacagtcttttgcgagcgctctgagtatccttggacatggcaactccaagcctcagtttacccatctgaaatat

SEQ ID NO: 313900 - DNA, 122 bp, Homo sapiens
caaagagagccaacaggaggcacaggagaactagggaggcaagaagaacaaggagggcaacggtcagaatggaaatactaggcatctgcacatggagtccaggagaaatccggggctctctg

SEQ ID NO: 313901 - DNA, 122 bp, Homo sapiens
cggctgtagcggcgccatcttgagccccaggcccctgcggcgccagggctgtccacggcgcgcctgaccaaaaaagccccgcggggcccgctattactcatttgcatattatttcctttcgt

SEQ ID NO: 313902 - DNA, 122 bp, Homo sapiens
actccaagatgggagtaaggaggccttaaaaatagaaaactgggcctggcacatggctcacgcttataatcctagcactttgggaggccgaggcaggcggatcacaaggtcaggagttcaag

SEQ ID NO: 313903 - DNA, 122 bp, Homo sapiens
tgcctctccccttctccgccaggtgggactccaggaccccatggtctttgtcccattccacggccaccttgtccccactgtctgacagggtcaggtagccctttttcaggtaactgaaccag

SEQ ID NO: 313904 - DNA, 122 bp, Homo sapiens
tagcttggtctgatacagccctgcctcaaaatggagtggatcaagaggcgtaccagggcccgggagccatggctgtaagtgccactcactccctaaaggagttcaccaatgccaagattaac

SEQ ID NO: 313905 - DNA, 122 bp, Homo sapiens
ggcggggcagggcggacagggctgggggcggaggtccgggggtgggtccggcggcgagtccgggtcggggcggacagagcagggggcgggggtccgggaggagggggccggggtccgggagg

SEQ ID NO: 313906 - DNA, 122 bp, Homo sapiens
aagcctctctgggcggccaagtcgcctgtttgtctatggtttcagtaaatacgtctgttgcggcatctagcggctatgggtggcaacgcggctgataaatttcgggctggtgtagagttagc

SEQ ID NO: 313907 - DNA, 122 bp, Homo sapiens
cccacaatgacaggacttatttctttaaggaccagctgtactggcgctacgatgaccacacgaggcacatggaccccggctaccccgcccagagccccctgtggaggggtgtccccagcacg

SEQ ID NO: 313908 - DNA, 122 bp, Homo sapiens
aagtagccatccctctgtccagctggctttgacgaggctctgccgccgcagcttcttgcccgtggctctgtgatggggaaaaaaggaaggaaaaatgcgttccatgcagggcctgtcactgc

SEQ ID NO: 313909 - DNA, 122 bp, Homo sapiens
gcagggaatgcacagggcacctggagcctcagggacatggcgcgtgcacctcaggcatggcgacagcagtggccgcaagcctgcatggtcatatgcagcaataccggcaggtggcaggagcg

SEQ ID NO: 313910 - DNA, 122 bp, Homo sapiens
ggcttgcccaattggatacaattattttaaatcatcttgttggagactctgcagcagaaccggcaaccacttgtgatactatgtaccatattaaagggaaagggcagactacatgatggagt

SEQ ID NO: 313911 - DNA, 122 bp, Homo sapiens
ggctggagggcagggctggccacaggcttgtctgtggaggcgctctgctgaaagcacgagcgctctgtgtggccgaggtcattgtacccccggcttcctgctgggtggttctgtgatgggga

SEQ ID NO: 313912 - DNA, 122 bp, Homo sapiens
ttttttcactaaagagggggtttcaccatgttgtccagagaatacaagcatgagccactgcgcagccatcaacaccttttactgcatggaaattattctggcactggtatagaacctcacat

SEQ ID NO: 313913 - DNA, 122 bp, Homo sapiens
gcgggtccagcgcgctgccctcggccgccgccctgagcggttatttataaccgcgggtcgcgttacctcctgaccttaagctggggcgggcgatccgcagcgattagcatctatctcctccc

SEQ ID NO: 313914 - DNA, 122 bp, Homo sapiens
gagtgcccttcccccttcagtctggagctcagagtttgtgcgtccctgggggtgaaggggcgtccacgctgtgatggtcgcctctgctcagtcctgggggccaagccagggtcggggtgatc

SEQ ID NO: 313915 - DNA, 122 bp, Homo sapiens
cccgggtcgcccgcgctctccgggtgacccgggcccggcagcaggcgcgcgcgggggcggcggcgcccaagcccaacttggcctccgcctcgccctctgcccagcccgccggtgtcccctcc

SEQ ID NO: 313916 - DNA, 122 bp, Homo sapiens
tatcagctcttgcacttattagctgtgtgatttggggaaagtcacttctcctccagcacccggttcctcacttataaaatagggcaagtcatggctgcctcatagattggtgtggggatcaa

SEQ ID NO: 313917 - DNA, 122 bp, Homo sapiens
caatgggcttggagcattaaggccacgcccctattccgcattctactggggccctggttacgcctcctctggctcactcacacagctgcctggtaggtgactggaggccttgattggttctc

SEQ ID NO: 313918 - DNA, 122 bp, Homo sapiens
aagttaaaaaaataggaacaggagcactagggtagctagctcatcccagttggcccagaacgttcctggtgttaccactcaaagtcctgtgttcccaggagaaacaggaggatgagtcaccc

SEQ ID NO: 313919 - DNA, 122 bp, Homo sapiens
gctctgacggggtaagccacactactggttacaatttgctatggcaaagttcaaaatactcgcaaaataagtcaactgtatgaactatcagcttctggagaaagccagtggaggatagtaac

SEQ ID NO: 313920 - DNA, 122 bp, Homo sapiens
ctctgctgtgacttcaggccagaggtgtctgcccccgcagtgccctgacagctgagtggtcggaaggccccggctgggaaggattcatttggaatctttcttcttcttctttttcactagcg

SEQ ID NO: 313921 - DNA, 122 bp, Homo sapiens
cccttctggacttctgggtcaaggagggctggctcaggaagcccagggtgtcagggaaggcggtggcacagtgtcttgcatctgggtccaggttgtccaggagtgccaagtccgagcttctc

SEQ ID NO: 313922 - DNA, 122 bp, Homo sapiens
gtgggcacctgtctgccaggcctgggcacgggcccagggtcacgctcatgctggggctcccgtcagctgactattttgggctcttgctgacctgggccaaagtcaggtccagtcaagagggc

SEQ ID NO: 313923 - DNA, 122 bp, Homo sapiens
gccgggagcccagagttcggaacctagagttcggagccggctagggagccggcgttgtcgcggcgaggaggtgggcgcgctggagcaggagcggggccggaactggagccgaggcgcaggtg

SEQ ID NO: 313924 - DNA, 122 bp, Homo sapiens
cctttaaaatgcattgtttttcagctttatttcaaatgctgtgtagcataagaacctagccgtcagacatcattttttagctatgaaaaatatgaaacaaggcatattctaaagtgctgaag

SEQ ID NO: 313925 - DNA, 122 bp, Homo sapiens
actcctctgtgattcacccatttcctattcactgagtggtgccatgtggttgggtcaatgcgaacctggggagatgaatgcccaagaacaccagatttcaagaatcccaatattgtaatggt

SEQ ID NO: 313926 - DNA, 122 bp, Homo sapiens
cgccgccgaggcagttgtatttcgaacgctgcctctggctagcagccaggcgccttggctcggcggtccgcctggcctccctcctcctcatacttttcttcctgcgcaaccccctccccttt

SEQ ID NO: 313927 - DNA, 122 bp, Homo sapiens
ggacaagaagctgggaggcgcgcagaaccatcgtcagtccccgaggctctctgcagtccgcgtgagtcctggccaaggtctggcctcggaagctacgagctacaatcttccttcatcctacc

SEQ ID NO: 313928 - DNA, 122 bp, Homo sapiens
attatatttgttttcctcaaataattattagctatatataaataataaactttactccctcgctactggaaaatgatgtttgacattaaggaaaggtcaggtattgtgagtgggaaaccaca

SEQ ID NO: 313929 - DNA, 122 bp, Homo sapiens
ttaacactgaaaactcggtcacatcgtattttcaaggagtcaagggcagattccacgtgccgtcttctgtattgcaatcaccgaaggtgtttggcggggagcccatggctctgtgtcttcct

SEQ ID NO: 313930 - DNA, 122 bp, Homo sapiens
taagagataaggagatcccagctgacatctggtacaccaaatatgtaaaccaggtttagtcggacgatcatctaacagagcgctggtcctgcaaactctgctccatctatcagagagatgaa

SEQ ID NO: 313931 - DNA, 122 bp, Homo sapiens
ccgcggccctctacatctgggccataggtctcctggcggctgggcagagctccaccatgacgggcacctacgcgggacagttcgtgatggaggtagggcagggggcgggcccaggagggcaa

SEQ ID NO: 313932 - DNA, 122 bp, Homo sapiens
ctgcatcctgacgccactactgtaaggattaatcaaggacagcatgtaaaacttcaacgccgtgcgcggctctctctttccttccccttctctctttccagtgaaggggacggctccttccc

SEQ ID NO: 313933 - DNA, 122 bp, Homo sapiens
tccgggcctcctcccgcgcaagttcccgagaagagcaggtccggcccgcgcagacgtgcacggtccccagccattaggaggagcagacggtccccacccccacaatcagtcatctctcgggg

SEQ ID NO: 313934 - DNA, 122 bp, Homo sapiens
ccccacctgcggcacaggtggccaagctcttgctctgtacaaataacggctcccctgaaccgagcgctcgggaagacccaggcgccaccccagtttgcaaggcctgccgcgtcccaagggga

SEQ ID NO: 313935 - DNA, 122 bp, Homo sapiens
tagttgaatttccaggaggagagtctgcctccccaacctttatagccagctgcagaagaacggacagtgagcaggcaaacatagatgctttggggttcagggaaactaacctcgaaagggtg

SEQ ID NO: 313936 - DNA, 122 bp, Homo sapiens
atgagctgccgcgagttccattcgcggccagatcttgtctccccagcagcccactttaggcgtcttcgtgccgttgcctcagtcgtgcttgtatctaaaagtaggacgtgtttgtcacttga

SEQ ID NO: 313937 - DNA, 122 bp, Homo sapiens
gccccgaagctggcaggaccagtcgcggggcacctgactgagtgtccagggctgcggctccgcggcgcggagcaagcacacaagcagcttctaggggaccctccctccggcccctcccccct

SEQ ID NO: 313938 - DNA, 122 bp, Homo sapiens
tggccctttgcgggggctgctcaaatgcaaattgggaaactggccagaaccttccaaagtcgtgactgtccctcggggaagtcggccggggaaccgcagagggaggcctacaccgatctttg

SEQ ID NO: 313939 - DNA, 122 bp, Homo sapiens
ctgtaatcccagcactgtaatcccaggttgaggtgggcggatcaactgaggtcaggagttcgagaccagtctggccaacatggtgaaaacccatctgtactaaaaatttttttaaaaatggc

SEQ ID NO: 313940 - DNA, 122 bp, Homo sapiens
agacaatgaaaaggggttgtgcgagggtctcacccacacgcttttccagcttgcccactgcgcaggcgtgccccgaaagaccagcttgaacaatgaagaggacctcggcgttaggtgggacc

SEQ ID NO: 313941 - DNA, 122 bp, Homo sapiens
cagtctttactctcacagaacacttctgatgcaggatgggaaagtggctctccttccccacgtcacacgatgctccggcggacactgagcatcctataatatcctggcatatgccctgccac

SEQ ID NO: 313942 - DNA, 122 bp, Homo sapiens
aaactgtgccagaccccgtgctgggcacttggcattcagaacagcggtgctggagagccccgggttgtgcgcaggggttgctggtggtggtgctttggctccgaaacaatagatgtgcgggg

SEQ ID NO: 313943 - DNA, 122 bp, Homo sapiens
ctgccggctggggactcaactgtgagcagaaatcttggaagctggtaaaattcattctcccggcctaactcccagggaaaacctggaggtgttttctgaaaccaaactagacctctggcccc

SEQ ID NO: 313944 - DNA, 122 bp, Homo sapiens
agaaacccaagagcttggtgactcgcttttgaggccgggtcaccccaggctggagctgcccgagctcagagccaatccaggctggagctgtcccaagctcctgtcatctcgggctcaagact

SEQ ID NO: 313945 - DNA, 122 bp, Homo sapiens
gtatctggagttgaggggaacaggatcagtgtgcatgatattgacagttgtggtgctggacgagatcaccttcaaaggaagcgtacagatgagagcagcccaacaactcgtattgagacatc

SEQ ID NO: 313946 - DNA, 122 bp, Homo sapiens
ttggaaagccagggccacctgctagtgggtgagtcatgggcacaggctcgcacctgccaccgcagacgccacacaggctgctgagcctttccaagcgaaatgccccacgtgcgccaacggcc

SEQ ID NO: 313947 - DNA, 122 bp, Homo sapiens
tgtgagggccttctgcgtgagacacaggcacacggatgcaaagcctggagacttacagcccgcccaggagaggccggggggcttctgaaatgggagaggccttttgcagaggctaccagcat

SEQ ID NO: 313948 - DNA, 122 bp, Homo sapiens
tattacctgaaagcttgacctagcaaggatgaacaacaaaatacgagcccataaaacttgcgggtttttatcaaattgattgtaacttgtgagctgcaatatttgggacagaactgtctgag

SEQ ID NO: 313949 - DNA, 122 bp, Homo sapiens
agctcagaacgagcagctttgatacttgtttcctcttcctcagcttcagccacctcaagtcggcttcgagttttggctttagaatgtggtagctgtaacattgttggtggggaggagtggca

SEQ ID NO: 313950 - DNA, 122 bp, Homo sapiens
tagacggggtggcagccgggcagaggcgctcaattcccagacgagtcagccgggcagaggcgctcctcacttcccagtcaattgggcagccggggagaggccctcctcacttcccagtcaat

SEQ ID NO: 313951 - DNA, 122 bp, Homo sapiens
ctgtgttgtttccaatgaaagtggacgatgtttttagcccctggggtgggatgtcacagacggctgtttttgttatcggggagccagtcaaagtagctgttcttattttgaatgttgaacat

SEQ ID NO: 313952 - DNA, 122 bp, Homo sapiens
aggctagtccccatttcctataatcttacagacctaggagaacaatattttcccttctgtcgttttgataattacatcctctgtgctcagtggtggcctattaactcacatgaataccatgg

SEQ ID NO: 313953 - DNA, 122 bp, Homo sapiens
ggcttaggttgcacgacacaaagtcacttccatgtagtccattcacagctatggaaaacacggatttgcacaagcagtgttttgcaggtatcaaagtcaagacaaggcagttgtctctggtt

SEQ ID NO: 313954 - DNA, 122 bp, Homo sapiens
gcacttttaaagatgacatcagagttttctgggcttatgttctcctaatgacttccagaccgagcgtgctccatgtgcagcccagaggatgaagcctccagatgctgctaaggagcccacct

SEQ ID NO: 313955 - DNA, 122 bp, Homo sapiens
tgcctgcccctgtaccactcggcaggtactacggcctgggtagggaatggtgggtgggggcgggggaccccttaccaaggccaccctctgcaggaaacatcatcggcgtggggcagtgtctc

SEQ ID NO: 313956 - DNA, 122 bp, Homo sapiens
atatcaaatataaagtgtagtacatacacacatacattgtgaatattttctgtttccatccgtgcaggtcttattaagagtcctgtgaagtggagggaattgggggtcagacaggacttgtt

SEQ ID NO: 313957 - DNA, 122 bp, Homo sapiens
gggcagtgtgggagcagaggcccagcccctcaccggtcaggcctggggaggggtggtgaccgcacccttggagggacaagaaggtccgaggacatgggcccctgataccacgtgatcgtgtc

SEQ ID NO: 313958 - DNA, 122 bp, Homo sapiens
tggcggtggccgtgcccccgggtcgggccgcaggctcaggctgggcctggaggccagtggcgcgggacgcgcttttggctagagctttccattcatgcaccgaactgcggggacggttctat

SEQ ID NO: 313959 - DNA, 122 bp, Homo sapiens
tctgccgggacggcccaggccgagggcgatggtttctggtgggaaggcccaggccgagggcgatggtttctgccgggacggccgaggccgagggcggtggtttctgccgggacggcccagac

SEQ ID NO: 313960 - DNA, 122 bp, Homo sapiens
tcccatttttacaaaaggagaattcttccccagaggccatttccttggagcccacataagcgggtgggctgtgttgttcttccatagtcctgcggggccggatggtggggcatttaggcaat

SEQ ID NO: 313961 - DNA, 122 bp, Homo sapiens
tgggctgtcccggcccttttccaggcccaactgggtttgttaaagcgacaggcctctcggcgagccggtgccccatcgggtaccgcacggctgccgcggcggccttaccctgccgcgagcgc

SEQ ID NO: 313962 - DNA, 122 bp, Homo sapiens
aaggtaggaaacctgagcgtttgaaagcgcgccaaggcggccatgggcgtgtttccggggcggagcgcgctgcgggcccgcccgcgggaaggcctgccggcttctgggagcgcgagcccctc

SEQ ID NO: 313963 - DNA, 122 bp, Homo sapiens
ccccacagctgtgtgcacacgggtgagtcttcaggggacaccaaaacgaccatcacaccgcgtttgctgtgctgtgagatgctcactgggagccccccacagctgtgcgcacacgggtgagt

SEQ ID NO: 313964 - DNA, 122 bp, Homo sapiens
tgtgcggagaggggtgcgccggtgtacgtggagggcgctgggtgtgtgtgccgaggaccgcgcccacgtgtgtggagagtatgccgggtgcgtgtggagaggaccgcgcccgcgtgtgtgga

SEQ ID NO: 313965 - DNA, 122 bp, Homo sapiens
tagaaacagtgacgaattggacaacaagttggcatcaaaacaagaggaagaaggcactgccgatgagcagaacctgttatgatctttgaggagaaagtatttcccatgctccaagagcaggg

SEQ ID NO: 313966 - DNA, 122 bp, Homo sapiens
taggaccctccgagccacgtgtggggtataatctcatggtgcgccgtttcctaagcccgtcggaaaagcgcagtattggggtgggagaggcccgattttccaggtgccgtctgtcacccctt

SEQ ID NO: 313967 - DNA, 122 bp, Homo sapiens
ttaatggtccaaatcgcagggaaagcgagcactccctgttctgaaggttttccctaaacacggagacaacactaaaaagctgtgccgcgtgagggctgaaagtcctgttttctccctagctt

SEQ ID NO: 313968 - DNA, 122 bp, Homo sapiens
acacctgtagtcccaggtgctacggcggctgaagcaggggaatcgcttgaacccaggaggcggaggttgtgtaacggcctaagggcttcatcttgcctagacagagatgattcatcaagaca

SEQ ID NO: 313969 - DNA, 122 bp, Homo sapiens
caccaagccaggctttttgcacttgctgttccatctatctgtgctgcctagtgagtttggcgagctcatgcttcccaagcagcactttcttcagagggcctgccctgactacaaccaaaaaa

SEQ ID NO: 313970 - DNA, 122 bp, Homo sapiens
ctcctttctgctgtctcccaatgtcgtgggccgccagaggtgagatgaggcgcctatgggcgcgctcgcctgcaccgcacccttgcctagcggcgtccctggggaccctccctccgtggtgg

SEQ ID NO: 313971 - DNA, 122 bp, Homo sapiens
tcttttttataataaaatttttgatgatgttacatagggatccaacattattcttttccacgtggatatccagttagttgtcccagcgtatttgtgtaagagatctatcagtttcttttttt

SEQ ID NO: 313972 - DNA, 122 bp, Homo sapiens
ttgaaaacttggacacagtaattgtaccatatggtgagcatttatcctttctgaaatgcacgctaacagtcacttacatgcacactgctttgttttacagttgttattctctctaccatatt

SEQ ID NO: 313973 - DNA, 122 bp, Homo sapiens
gagagattgcggacagggaagcttctgctcagaccgtgacctctgcttccctttccaccgcgctgctccgagggccagtgctgggtgcccggtatgcctgagcaataaccgttgctcccggt

SEQ ID NO: 313974 - DNA, 122 bp, Homo sapiens
cgcagcagcgagaatttcgacgagctgctcaaggcactgggtaagctggtgcagagggcgcgccccgacggggagatgcggcccggaggtgccctggtcccggaagtgccccggtcctggag

SEQ ID NO: 313975 - DNA, 122 bp, Homo sapiens
aaggaagtaggcagcactcttcttagaccagatggtcatccttcagcccacagtagtgatcggccaatagaatctaggggtttagcattgatttaaggggctctctagaagagaaaagttag

SEQ ID NO: 313976 - DNA, 122 bp, Homo sapiens
gcagagtccaattatgtgttttctgataaaagcatatgttcattgaaaacactggaagagcggcatactggaatactggtttatctggtgtatttcgggagtttacagatcacgaaagttgc

SEQ ID NO: 313977 - DNA, 122 bp, Homo sapiens
ggacggcagcgcagcctactgaggcggggcgacggcagcaggccgcagctctgggggtggcggcggctgtcctgagccccggaactgagagacggcaagccgctggcagtgcctccactcac

SEQ ID NO: 313978 - DNA, 122 bp, Homo sapiens
tctcctaaaggctcctccctcttctggatccagtcttgttgctcacctgtggactggcagcgggcacctcctctctggggaatcagggcttctcttggcggctgtggctcaggtctcctagg

SEQ ID NO: 313979 - DNA, 122 bp, Homo sapiens
caatgctaagaacagaatacagacataaataagtcacggcccatgaccttgaagagcttacggccttataaagaggttcactgtaattgtcttcaccagggcgtccttctcaaagatgccca

SEQ ID NO: 313980 - DNA, 122 bp, Homo sapiens
gaaaattttagcctctagcaaaacactgtgaagcagctccagcctgtggtggaagatgtgcgaaagggatgggggaacgctgtggaccggtgtggagtctaggacgacaggtggtgggctct

SEQ ID NO: 313981 - DNA, 122 bp, Homo sapiens
gtcgccgccgccgcagctgcgttattagagctccacggcggatctcggggctcttctgctcgctttttttcctcttcagaaattaaagcagaggagcatctgaaagtggaaaggtccccctt

SEQ ID NO: 313982 - DNA, 122 bp, Homo sapiens
cttcaggtaaaccaattccaactctatgtaagctagccttcagccatgtgaaactgttaacggcatctcttcctctctctgaactgcacccccgagccctgccaatccctaacacatgcata

SEQ ID NO: 313983 - DNA, 122 bp, Homo sapiens
gtgagaagacacctgaggcgtggcctcgggcaggtgagaagacacctgaggccgtggcctcgggcaggtgagaagacaccttcaggcgtggcctcgggcaggtgagaagacacctgaggcgt

SEQ ID NO: 313984 - DNA, 122 bp, Homo sapiens
gggacctttcctctgcaccaaacaaaacctccctgccaaggcccgttccccatgcggccgcgagatggcggcatgactcaatggacgggttccaggcgacccctgcacaaagccgccgccgt

SEQ ID NO: 313985 - DNA, 122 bp, Homo sapiens
acatgcctgtgagagagcagagagggccgaggatgccgtgcagcataggctttgcctgcacgtggcacctgggtttgcacacaatcttttagccgagcatcggtctcctcgcctatctaggt

SEQ ID NO: 313986 - DNA, 122 bp, Homo sapiens
gattatgtgccagtaaatgacttagacagagaattgactaaaatttgaaccaaagcactccgacttaagaacccacactcttcgccaccaaccatacgtttcctaagcaggaaaatcaatca

SEQ ID NO: 313987 - DNA, 122 bp, Homo sapiens
cccttgtgaccgtcacgggcggacaccggccaacgccgggttggggtgaggccgccgccgcggtccctccatcaccctcctggcccggcagaggaacccactgctccgggcggccggggaca

SEQ ID NO: 313988 - DNA, 122 bp, Homo sapiens
agaagagctgggagcagccagccctcccagtcctggatttgaccatggtgcccttcttgccgtcttctccagggtgggacaggcagcgatggctcttccactggcctctgggtccttcagaa

SEQ ID NO: 313989 - DNA, 122 bp, Homo sapiens
agagccggtacctgcccaccgtggtggagtaccccaactctggtaaggcaggcgagcggccgggggcactcctgggggccaagcagcccctgtggactaggggagggggctgagatacaaag

SEQ ID NO: 313990 - DNA, 122 bp, Homo sapiens
ccacagaagcatgggcaccggccgggcagagggttgggaaagtctgtctcaccaaaagcccgacttatctccaagaaggagggcaggaagctgctactcagatgagacctgcaagaatcaga

SEQ ID NO: 313991 - DNA, 122 bp, Homo sapiens
cagcgggtaagcagtgacccggacctggatcgcagaagtaggaactggaagtgacagcggcgcaggcagagcagcagcagcagcagcagcagcagcagcagccctggtagctgtggcagcag

SEQ ID NO: 313992 - DNA, 122 bp, Homo sapiens
gagacagaaggccaggaaaaggtcaaagagactagttctcctttagttcaaagcactcagcgccaaacctcatgaggtggggtattgttttctaagccccaacaacacccctggggtctctt

SEQ ID NO: 313993 - DNA, 122 bp, Homo sapiens
actacattgaacagttgcaactttgaggtgaataaagcctgtactgactcctggttgtaacgtacctggttgcaaagtacacagtgtgctactttgtattgaggagatatcctggactcaca

SEQ ID NO: 313994 - DNA, 122 bp, Homo sapiens
tatgtgtcacttgaatatctagggaagaatataccaggcaggactgctagtataaaggatcggaagactaagagtgcttgggggtgtttgacaagcacaccaaggtgactggagaaaacaaa

SEQ ID NO: 313995 - DNA, 122 bp, Homo sapiens
tattttagtagttttatttgtggcaaagatctcctcccccgggtggcctctgccctccggcgctgggaagtccgggcggcgaggcagcctctcccggggcgttcgggctcctccggctctgc

SEQ ID NO: 313996 - DNA, 122 bp, Homo sapiens
gggcagtgggggagagtctcaggctcagtcatggagggggtggccctcccacccagttgccggctcccggcaggcccacctggtagttggacttgccggccttagacacgaaacgctcgtcg

SEQ ID NO: 313997 - DNA, 122 bp, Homo sapiens
cataagcttaacccaatccacagcacgttaatatacccaatgaagcagtcttaagaataacgctatagtgtgacacatggggaattaccaaagaacaacttaaagtatactgacacagggag

SEQ ID NO: 313998 - DNA, 122 bp, Homo sapiens
catccatgcatcgtttccactgtagtaaaattcacatcccatgcaattcacttttttggccggatgcagtggctcatacctgtaatcccggcactttgggaggctgaggcgggtggatcact

SEQ ID NO: 313999 - DNA, 122 bp, Homo sapiens
tctctgtggcggagacagccaggttggcagctgacgggacagccggggtctattttgttgcgggttttcagcaaatccagggctggtctggaggcgcgaagtaggttccggagtccgagacc

SEQ ID NO: 314000 - DNA, 122 bp, Homo sapiens
gcagcccaggcagggggcacactagtgccaaggtgcaggggcatgaagctgcaggtcacacggcctccctcggagcccccaggtactgggggtgggttcaaatctcacagggttggcgggcg

SEQ ID NO: 314001 - DNA, 122 bp, Homo sapiens
ccagtagtactaagaacagctgccatttatttgggcctactctaagccaagccctgtgcccggggtccccagcccccatttcccggaaccctgatacagccttgtagggaaggctgggaaac

SEQ ID NO: 314002 - DNA, 122 bp, Homo sapiens
tgtgccgcagatgatttacatggacgatggagtgtcatcttttgtccagatcagaggctccgttccgctgttctgggaacagccagggcttcaggtaggtcatgaaaaaacttaaatgtccc

SEQ ID NO: 314003 - DNA, 122 bp, Homo sapiens
ggtttctgccaaagggcaggagtcgctgctcttgtgccgggtgctgctggttgtgtagggcgctgttgcttttttaaggacgctctgcactgaattaggcttcctcgtgggtcatgatcagt

SEQ ID NO: 314004 - DNA, 122 bp, Homo sapiens
actttgtaaggctgaggcaggcagatcacttgagctcacaagttcgagcctgggcaacatcgtgagaccccggctctacaaaaaatacaaaaaatcagctgggcatggtgatgcatgcctat

SEQ ID NO: 314005 - DNA, 122 bp, Homo sapiens
gctgggccaggcgggtggcggtgtgttgagaagctgggtacacgtgctccagacgatggccgtgtccccgtgcccccgaggcaggagggcctgtctgatgtcgaggtggctgcaaggtgtgc

SEQ ID NO: 314006 - DNA, 122 bp, Homo sapiens
ttgccttggttttcgaagaatgtgacctggagggctggtgggcggtgcggcgcgccgcggcgcatgcgcgttccggtctgttttccctgagttaaagcgcgcgggtgccagccgggaggtgc

SEQ ID NO: 314007 - DNA, 122 bp, Homo sapiens
cagcccaacaccgaggaaccagggcctgggacttctggagtccctcccaggactaattcccgctctgatgcccagcacaaatttatcataactgcctgactctctcagtgtggtgtggtggt

SEQ ID NO: 314008 - DNA, 122 bp, Homo sapiens
tgatgaagaacaaacaagtaagtagatgaatggcattttctcagctgaaaatagaatctacggtaactgttttcaagtcctagcttgcctcctaactacctgagtgcagaaatgctttcccc

SEQ ID NO: 314009 - DNA, 122 bp, Homo sapiens
ttcagaagatccaggagtcctgggaatcgtgtatgactcagttgctttccctgagcaggacgggagcccccctggcctcagagtgactgtgaggaggaggaaactttgcctagtggcatttc

SEQ ID NO: 314010 - DNA, 122 bp, Homo sapiens
gagttgcgatttggtttgaaacctcttagttcaaaagtctataaaaagggcctggcacggcggcttatgcctgtaatcccagcactttgggaggccgaggcgggcgaatcacgaggtcagga

SEQ ID NO: 314011 - DNA, 122 bp, Homo sapiens
gggagaaacgggatgggagaagcagctgagcttcttgcagggaggaggaagccggatccccggtgctgggcaggaggcccaggagacaccccttgagaaatgctaccctgagctgcagactg

SEQ ID NO: 314012 - DNA, 122 bp, Homo sapiens
acctcgtgatccacctgcctcggcctcccaaagtgctgggattacaggcgtgagccaccacgcctagccttgtttttgttttttagagacggaatcttgctttgtgcctaggctggagtgca

SEQ ID NO: 314013 - DNA, 122 bp, Homo sapiens
tgaagccctcctgggccggacgacgtgggaaatgactgcaccccggaggccaggagctcgcgctcacctcccaatgacttcaaaatgtgtggctgcatcttgaggaagagcagatcctgcct

SEQ ID NO: 314014 - DNA, 122 bp, Homo sapiens
ccttccctttccctgcctcctccccctcaatcctccctctcgccccagcctccttggccgcggagtcctctgtgagatggaggagctcagttggctccgctcggctccactcggctgggctc

SEQ ID NO: 314015 - DNA, 122 bp, Homo sapiens
ttcatctgagttgctgtgtgtacagcagttactgaaaatggcactatatcacatacagtacggatacatattgttttgtatttcaacaataatatgctatatataacagtctatgccagata

SEQ ID NO: 314016 - DNA, 122 bp, Homo sapiens
cagagccctagggctgctgcaggtgggtgtgtgtgcagccatgtgcagccatgtgcagtgcgtgtgcagtgatctcgtgggtgggtatcctggctgcaggccggacgattgtgtgagcccat

SEQ ID NO: 314017 - DNA, 122 bp, Homo sapiens
atcccggtgtgattgtttcgcacgcgtgatgggtagaaaggatgaagtgtgaaggcccctcgccccctgcatcctgccttagattatgttctgaaaccctcgggtggagaaagcgctatttt

SEQ ID NO: 314018 - DNA, 122 bp, Homo sapiens
agtgaaggagggccctggctagctttcccccatcgcaccaggtttgccaggtggtcagaacgtggaccctgctgcacgtggatggtggggcctggagggcccttgcagatcatctggttggt

SEQ ID NO: 314019 - DNA, 122 bp, Homo sapiens
ctgttaactcggactacacaaggagaaggctcaggcggaaactgtttctcaatgtataaccgcagggcggcagcagagagcagcaataaagatgcactattttctcagcgattttgaagctg

SEQ ID NO: 314020 - DNA, 122 bp, Homo sapiens
aaaagttgttaaaattgtgacttataaattcaattaaactcagaaagtgtttttccttcccgctctccttcctctctttcttcctttctttctgcatactcccctcctgcatcttccaacct

SEQ ID NO: 314021 - DNA, 122 bp, Homo sapiens
cgctgggcagtgcttctgggccctctgctgctcctgcttgtcggttgctaggcgctgggacgcgcctcccgaagggtgcggggcacaggtggcctcttcggggtggaccgcgcctggccggg

SEQ ID NO: 314022 - DNA, 122 bp, Homo sapiens
atgcattttaagatacattttactcccaaatataagctttgcttttccagtatttgtttacgtatttgtttaataagaacaaagtttaatttgtcaagttaaacaaaatttaacataacttt

SEQ ID NO: 314023 - DNA, 122 bp, Homo sapiens
cctgcagacaggggcggggccctgcagacaggggcggggccctgcagacaggggcggggccgtcggcttcgggccccgcccccgatccgcgccggccggccggccccgccctctcagcgaag

SEQ ID NO: 314024 - DNA, 122 bp, Homo sapiens
ggttggcatcagtaagtggcaggggctgcagtgtgcctgtgctccccaggtcaccccgagcgcctctgcactctgcgccagggtgagagccggcagagagacgtccctgggggctggtggcg

SEQ ID NO: 314025 - DNA, 122 bp, Homo sapiens
cggtaaacgtaatctgtagtttgaaccaaggaaagcccaccgtgcctcaaaggaatgacacgagtatccattccaatgccaagccttggcgtaacggctcccagaaactgctcatcttcttg

SEQ ID NO: 314026 - DNA, 122 bp, Homo sapiens
ttcaaaccagcaaccaggcctcatttaaggattgccatggtgtacctcagagaaagggtccgtgaggccagatttgcatgggggatgggagaaaatggtttaaaaaataggtcgtatctgct

SEQ ID NO: 314027 - DNA, 122 bp, Homo sapiens
ctctgacctggcgggaggctgggtgtccaccctttcccctgcagtcctgaaagtccggtccgagcgcggacggggcggggaggggctgggcgggccaggccagctccattggcgccaggcgg

SEQ ID NO: 314028 - DNA, 122 bp, Homo sapiens
gaggtcccggggctgctgggtgcgggcggtgggctgcgcgttgtccgctggactgggtcccggtcacgccccgccaagccccgcccctcaggccggggcgcgaccgcggatccgcagttccc

SEQ ID NO: 314029 - DNA, 122 bp, Homo sapiens
ggtaagagctaagaatttcctaaattgacaaaagatgttagttaatggattctcaatgaacgaatgaatgaaaactcattgttcaatgagtccataatggcatgataaagtagccagctatc

SEQ ID NO: 314030 - DNA, 122 bp, Homo sapiens
cagccgaggccttcctccaggtaaatcgccgggcctgcgggggcttcccacacgcgcgggcgggagacgcgttgcctcctacctcagtttacccgccttaggagccggtaccttcggcaaac

SEQ ID NO: 314031 - DNA, 122 bp, Homo sapiens
cctctgataattcaggcatttctgcccctacagtgagtctgtgccatttgtcccaaagggcgtcccagtagtgacagggcccagactctccccgtgcacgctgggtgaccctcatcagctga

SEQ ID NO: 314032 - DNA, 122 bp, Homo sapiens
agcagctcggccggcgcctccatcgcgccgcggccgccgagtgccggccagctgcgaccccgagggatcccgccgcgccccgtcctttgttaatgaattttatgagttctttatatgttctg

SEQ ID NO: 314033 - DNA, 122 bp, Homo sapiens
ccgcccctcccaccgcgcaccgcctcctcgcccgcgccctctcagtgcgcaggcgcctctcggaacaggtgatgcccgcggcccacgcccaccccatcctgcgtcgctccggatccttcctc

SEQ ID NO: 314034 - DNA, 122 bp, Homo sapiens
taatttgatttcaagtatatacctggccacttcctatctcctccaatggattgctttgaacgtgtgaaattaaataattcaaacttaaagctgttggaacttgaaagtattctgagccttga

SEQ ID NO: 314035 - DNA, 122 bp, Homo sapiens
ctgggctgcggggctggcaggtgcccccacccccggcgaatttcccagaatgcaccggggcggggggtcatttggggcctccctgaccttggccccgccctgggcctgtcctgggagctggg

SEQ ID NO: 314036 - DNA, 122 bp, Homo sapiens
cctcagtgcaggtcagggcgccctgtaacccacacgccagtggccccatctcccggctgtcgaggctcagtggccaggctggagcctaagtccccgtccaggccataccacgcacagacgcc

SEQ ID NO: 314037 - DNA, 122 bp, Homo sapiens
tgagacagatttttgttagtgtcccctccttccttccttctatcacattatgtgttctttcgcctaagaacttccaaaggctgattcttgctgatcctggagattcctgattactaaatcca

SEQ ID NO: 314038 - DNA, 122 bp, Homo sapiens
aggagatggttttcccttggagtcaggccgctcagtgaccccgctcttctctgatggctccggtcaaactgtggttagggtcaaactctgcatcattccaccagtcgatggcctgccgacat

SEQ ID NO: 314039 - DNA, 122 bp, Homo sapiens
gactccggtgcagcccgggaagcctcgaatccggattccggagctttcttgctgcgctgccgagtccgctgtccgaagctgtttaattccctctagtggccgcttacccactttccacctgc

SEQ ID NO: 314040 - DNA, 122 bp, Homo sapiens
cgcggggccgtgccggggacgtctgcagccgcggcggtggccatctgccagctgtgcgaccgcaccccgccagagccagcagccacgctctgcgagcagtgcgacgtcctctactgctctgc

SEQ ID NO: 314041 - DNA, 122 bp, Homo sapiens
tggaatgcatgatcagttaaagccaatcactctgcacttagtagacataacacccagagccgacccggcgatttaggtgcagagtgaaaggtaacagcatcgcattcatttcctcatttagg

SEQ ID NO: 314042 - DNA, 122 bp, Homo sapiens
tagggaaaaggtcaccgatgtgtcagctgctgcctgttctgggatcgctggtgctccgggcggcatccccacctcagggtcgtcttcatacccccatcactctcctcctccccaagtcctag

SEQ ID NO: 314043 - DNA, 122 bp, Homo sapiens
gaagagggtggtaagtgctgttgctaagcaaccagccctgagcttcctggggtagcaagacgactgcagacagaggaacttgtatttgcccccacctcacctctccaccccatcatctgggt

SEQ ID NO: 314044 - DNA, 122 bp, Homo sapiens
agggtccggaaggaaccagcccttccagcaccttggtttggacttccgacctgcaggctgcgggagcgacatttgcgtggtttaaaccactgtgtttgtggcaatttgttgcagccacccca

SEQ ID NO: 314045 - DNA, 122 bp, Homo sapiens
gcgcagcgtccagagaccgattacatcgcgcagccacgcccccagcgtgcgcgcggccgccgtgtacgacccggcgcatgctcccggcacgctccacgcgctcctcccatccaggccgcgcc

SEQ ID NO: 314046 - DNA, 122 bp, Homo sapiens
gactacgtcttatttccaggaagaaccacaccacacactcacacaccagggaatgctctgcgtgaggctcaaggagtggccgcaggctgtggcagccaccacgggaactgcggcttcacacc

SEQ ID NO: 314047 - DNA, 122 bp, Homo sapiens
gctgggctgcaggtcctggcgttgtgctggatcatcgcgcccgtactctgaagttttctccgtggcgctctttgagaggggttcctcctgcatcttgagaatattttgcatttcggctccct

SEQ ID NO: 314048 - DNA, 122 bp, Homo sapiens
ggccacaaaacagaacacacccacctacaaagcacgtggcccagagatgtcctcgtctcccggccgctggctgaccagctaagtcctggcactgcagggcctgcccaggccgaattggggct

SEQ ID NO: 314049 - DNA, 122 bp, Homo sapiens
gattacaggcgtgagccaccgcgcccggcctccttttccttttttaactaatggaataaacggcaatgtgccaagcatacagcaatgcccattccccggccttcagaaagcctcgggcgcag

SEQ ID NO: 314050 - DNA, 122 bp, Homo sapiens
ctggaacgtgaagtccccggcacgccccaacaacaggaccattggccacgcccctaggggcggggcactgcatggaaagccccgccttcgccctaaggctccgcctctgacctctgcgcagg

SEQ ID NO: 314051 - DNA, 122 bp, Homo sapiens
tcaaaacagctgttagtgggatccttttaatatgtaaatcagactagtcaactgttcagacgtcctcgcagtggtatacttgcaccctttcttgctatactattgccacactgacctcttta

SEQ ID NO: 314052 - DNA, 122 bp, Homo sapiens
aggtgagccttgagcaaaaggtaatttcactgcccaactctgcaaagagcaccagggagtcgaggttgccagccacactcaccgctggtagggatgcatggaagccgacttgatgttggttt

SEQ ID NO: 314053 - DNA, 122 bp, Homo sapiens
gcagtgaggccacgcctcttaaaggagccaaggcctcagcgccttttcttggcctctggccgcccttggacgcagatggctccctagggaggttctggtggaccaaacccactctcctccta

SEQ ID NO: 314054 - DNA, 122 bp, Homo sapiens
atgtgggtggccgtggctgtagggacgatcgccgctgcgcagggtaaggaaagagggtgtcgcggttcgtgttctgatttgggaccactgaaaccctaagactggggaggcgaggggagtgt

SEQ ID NO: 314055 - DNA, 122 bp, Homo sapiens
gggcccgccgctgggctgagccccggcagtggctgcggcggcggcggcggcgggcggcagcggaggcagctgccgcctctgtcctcggatccgctccgctctgctccctggtgtgttgattc

SEQ ID NO: 314056 - DNA, 122 bp, Homo sapiens
ggcgcgctccaggtgggggcgcgcttccccggggtggcgtgttgacttgagacgccggcccgctcgctggctgctggctcgccagccgcttgtccctgccatgaattgagaccgcgggccag

SEQ ID NO: 314057 - DNA, 122 bp, Homo sapiens
tgatgtttctgcctcaagggccacattttgagaaacgcggcctagacaagggtctagagacgagtattcaagatccccagtaaacggcattgtgcagaaaggagtttgctgactcttagaac

SEQ ID NO: 314058 - DNA, 122 bp, Homo sapiens
ttctccagcgccaagcgggagaagacggagcctgggagctgggactggaggagcgggaagcgcagtatcgggaccacggctctgggaccaggaaaaacgcagactctccagagtcaatgtct

SEQ ID NO: 314059 - DNA, 122 bp, Homo sapiens
ggccaggagcggggcggctgtggctgcgccctccgccctactccgctaatcccggggccgcgcagtccctgcgtccggtgatcaccgcgctgctcctggcgcactagtagggtctgtagcgt

SEQ ID NO: 314060 - DNA, 122 bp, Homo sapiens
cctgaggcctggtgtgtgtgtcattgcagtgtatgaacccagggcactgtggggacagggcgacgtgtgtccaggcgtttgccggtaaggaatgcgttttgaataaggaatgcgcgcgcgct

SEQ ID NO: 314061 - DNA, 122 bp, Homo sapiens
cttgatactcccagtgcgtgaggtcagcccccacgccctgttgagacacacatgcctaagcgctccgcctgcaacacgctcttgcttaggtatgtgcgtggtgttgtgcctactgcaagctg

SEQ ID NO: 314062 - DNA, 122 bp, Homo sapiens
tcctgcaagcagcatgagagaaatagttcattcagtaagttggaactccaaaaagattaacggccgacttgtaattagagaaaacggagaccaaaaggcagtaggatgatatattctaagtg

SEQ ID NO: 314063 - DNA, 122 bp, Homo sapiens
gggcctgagggacgacaagttgacgctcctttcgtcatcacctggtctaggagggacgcccggggagaccgtacgtcactgctctgcgccggaagaccctattttcaggttctcttccctcc

SEQ ID NO: 314064 - DNA, 122 bp, Homo sapiens
acgtgcaaggcgattggcgaatgcaggcgagaggcggtcgctattggtccgcggcgctgtcggctcggcgggcggtgcccggacgcaggtgccggccggagcggagctagtggcgccgacgg

SEQ ID NO: 314065 - DNA, 122 bp, Homo sapiens
gtccaaaaatagaaaatgagacatgatgatggattgagagtaggaagaagggagggatctcggggtgagtgtttaagtcaacacaatggaattccaccagcaaaggcttgctgcataaatca

SEQ ID NO: 314066 - DNA, 122 bp, Homo sapiens
aggctgtggactgcctgatgtcacacgactggtggggcggcgggcgggtctgtccccaggcgattgtcctcgaggcacacggcggggcagagcttggaagcggccgaggtgggggtccctgg

SEQ ID NO: 314067 - DNA, 122 bp, Homo sapiens
ctccttcacttctagatggccggttcttgctgtatcttcacatggggttttatctgtagacgtgcatccctggtacccctctgtggtctgtgctaatgttcttttcttatgaggacaggtgt

SEQ ID NO: 314068 - DNA, 122 bp, Homo sapiens
aaacaagcccaggttggatctgaagcattcttacgacggtgggtcacagggcctgccccgcgccagcgagccctgctcccccaagagctgcggggtgcacccggaggcctccggcgctcccc

SEQ ID NO: 314069 - DNA, 122 bp, Homo sapiens
tctgttattgtccaaatcttaactgactctgacttggcctataaggcaggttcacccacccggtagagccatgctagtggctcctagcagcccaagagcccagcctgtaaccattcatccct

SEQ ID NO: 314070 - DNA, 122 bp, Homo sapiens
atttaagttttaaagatgtgagatgttacgtgaaatctccacattttatctctcactagccgtttgacagatagtggagtgtttaccattgccaggcattatactagacactcactgttact

SEQ ID NO: 314071 - DNA, 122 bp, Homo sapiens
agcaaccgctccgggttgaggtgagcgcaggctgccagagtgggcgcagcctttccaccccgtgggagggcttggggtcgccctctggggcctgaacggctcctgctgtcggcgccctggag

SEQ ID NO: 314072 - DNA, 122 bp, Homo sapiens
tataaagctgcttaaaaaatggtagctgctattattgtggtaccttctaactagcattctcggtaatactagtgattatattagaaatcattataaagccagtattatagctagtgtttatt

SEQ ID NO: 314073 - DNA, 122 bp, Homo sapiens
tgcttcaggttgcatgataccagggggcgcatggctcactcgtggtcctacttctagtgacgcaaggatcccattgcgtttcgttgtgaagtttgccagccccctgtcccttaatggcatta

SEQ ID NO: 314074 - DNA, 122 bp, Homo sapiens
gccaaagtgggcagatcacctgaggtcaggagtttgagaccaggaaactgaccaacatgacgaaacccagtctctactaacaatacaataattagtcagctgtggcagcacgcacctgtaat

SEQ ID NO: 314075 - DNA, 122 bp, Homo sapiens
tcactagggagtgccagacagtgggcgcacgacagtgggtgcagcgcaacgtgtgccagccgaagcagggcaaggcattgcctcactcgggaagcgcaaggggtcagggagctccctttcct

SEQ ID NO: 314076 - DNA, 122 bp, Homo sapiens
ctgcctggccgccaggccacgtatccactgaagaggcagagggtcaggatgggaagactccggggaccacctagcccaagacccgcaatcaggcggctctgcaaggctaaccgggtaactta

SEQ ID NO: 314077 - DNA, 122 bp, Homo sapiens
atctgccacatttcctccttcccagttgattttaacatttttcatctttcctgaaattggcggcgaccctaaactcatcatttccccagtggcttcttggagagatgctttttaccaaacac

SEQ ID NO: 314078 - DNA, 122 bp, Homo sapiens
gcctttgctccttcagcatcattagagagtctgagctctctgaagattagctcttcctgtcgccacagcaactgcccaggccctgtgggcatccgtggtaacaggcgcagggctttgagagc

SEQ ID NO: 314079 - DNA, 122 bp, Homo sapiens
tctgaacaaaagcaatgatttattggtaatggcaatgaatgaaacattgacagtctctggcgagaatcaagcaattatccaggagctgtagatctgattgcaatatggttgtccagtgtctt

SEQ ID NO: 314080 - DNA, 122 bp, Homo sapiens
ttgggtttatgcagactactgcagggggcagaacatgggcacgaatacgtaagattcagccgggcagccctccagcgtcaacgaagacattcttagaaggaaagtactttgtttgggacgga

SEQ ID NO: 314081 - DNA, 122 bp, Homo sapiens
taaaagcgctttgactcaaacacacatgtggcgtcatcctgagctccgtttgcgtggggccggaacaccggactaggaaacctctccctgctttagcaactgagtgtggctagattgaggga

SEQ ID NO: 314082 - DNA, 122 bp, Homo sapiens
tgttcaaatggctatttctcatccaaggtgttagacagttctctcatttccagggagtttcgtgaaaccatggtttgcctggcttctgttttttgttgttgttgttgttgtttgtgggtttg

SEQ ID NO: 314083 - DNA, 122 bp, Homo sapiens
cttcctccaggagtgttgacctcctatgtgaggagcagccaccagggtgcctgctagatacggtgaaaccaaaatttcaaagggcaagaaaagagggttcggccaaggggcagactccagcg

SEQ ID NO: 314084 - DNA, 122 bp, Homo sapiens
ccactggcttctcaacctgtgactctggaggaatcagatactggacctcctctgtgctgacggctactttatctggctggagccacctcttgaaatgttccaaggtgctatgaaagggcaga

SEQ ID NO: 314085 - DNA, 122 bp, Homo sapiens
ccgggggcgcgccttctcctggtctcctgggcctggcacccagcggaaattgggaagtgacgggcacaagccggatcatgaagcggggaagatttctccacttccccacttcctctccagac

SEQ ID NO: 314086 - DNA, 122 bp, Homo sapiens
aatggggtcagccagcaaagcgagggaaagcggactccggaagagcaggttaaaccaggacgcagcaagtcagagattcggcacagaagcaaatgctgaccacactgaccacacaggctaat

SEQ ID NO: 314087 - DNA, 122 bp, Homo sapiens
agctcatggtggcgggcaacacaacatccgacgacgccggcttctgctgctctgaacatccgacgctgcgatagctgctgctaaccacagggtcccctccacacacacccgagccccgcctc

SEQ ID NO: 314088 - DNA, 122 bp, Homo sapiens
cagaccctgcccttgagatgagtaactgcgtctcttctctggggtctcggcgtctaacagcgtcaggtccaaagcgcttgttgaacgaatgaaccaaggaacgagtgaatgaacgaatgaat

SEQ ID NO: 314089 - DNA, 122 bp, Homo sapiens
gggcgggagctgagtccaaagaccttattggaaggccagagtctggcctggagacgcagccgggaggaagagctgggcccggagaggacgccgggaggctgcaggtgggtctggagaggccg

SEQ ID NO: 314090 - DNA, 122 bp, Homo sapiens
agctcctatgctgcagagcccactggcagtcctcagcctgctcgccctgccttgcctggccgttaccatggaaaccacaataaaggctcttgctggtgtttccagcctctctccctccccct

SEQ ID NO: 314091 - DNA, 122 bp, Homo sapiens
agatgatggaaggcgcgaaagtggcatggcttcctcctggcgcagagcagggggtccttccgcaaagactgccaggccaaggaaccctctgagcaagcagatgtactccgcccggtggcctg

SEQ ID NO: 314092 - DNA, 122 bp, Homo sapiens
tttcaagtgtgtgtatgtgtgtgtctgttttaaggcataacaaagtccagagattaaggccgagttaaaaaacaaatgaggacaaaccaatgaggacaaaccagtccgctgaggtgcggcca

SEQ ID NO: 314093 - DNA, 122 bp, Homo sapiens
cggtcccctctcccagagtatacggagcctgaacctccccacttcccccaactctgttcgcggatagggtctagttgcctgctctcggacatccgttcagcagacactacctcttcgtcacc

SEQ ID NO: 314094 - DNA, 122 bp, Homo sapiens
atcttcatatggccaaggtccttgtttgtcttcttcacctctgtattcttagccttagcccggggcatgacacatagtagaaatgcaataaatatttgctgtgtaggccgggcgtggtggct

SEQ ID NO: 314095 - DNA, 122 bp, Homo sapiens
ttataaagcacttgctaatgtctgttaaataaattatattatccacacaccaatccaaggcgactataaggtagcaagaaccactccaagtcacataagaaaatgaattcctttcgttttag

SEQ ID NO: 314096 - DNA, 122 bp, Homo sapiens
agcccttctccaaagcagaggtagaatgttcaggtttcaccatggattttctacttatttcgtttttggaatcagcttacagattccaggtcccttttgtatatattctttattcttttgct

SEQ ID NO: 314097 - DNA, 122 bp, Homo sapiens
tggccaatggacgcagagggggcggggcctcgggcgctgttcaactgcagggcgtattcccggagggcagttggggagcgcagatcccgaagcagcgctgggagcgtaagtgcgggcagagc

SEQ ID NO: 314098 - DNA, 122 bp, Homo sapiens
cgccgccagcttctcactgagtttctggttcgccagctccaggtggcggcccttcttacgcgcctgccgcaaggacctcttgaccttcttcactcgctcccggagctgccggttgcgcttct

SEQ ID NO: 314099 - DNA, 122 bp, Homo sapiens
ccggatactgaaggctctgccagccctccagagcgctggcagtgaaggacagaacggctccgcagaaaggtactgggtagtgtctgggggagcctggcctacgaattccacccactcacata

SEQ ID NO: 314100 - DNA, 122 bp, Homo sapiens
gtctgcctgggctcagacgctgctagggggcatccctgtcggtgagaccagactcagacacgagggggcctgggctattacaaacctcagggtaacttacaggaatatacacaaatacacaa

SEQ ID NO: 314101 - DNA, 122 bp, Homo sapiens
ccagtttaatattccaataccctagaagaaaacccgagggacagcagattccacaggacacgaaggctgcccctgtaaggtttcaatgcatacaataaaagagctttatccctaacttctgt

SEQ ID NO: 314102 - DNA, 122 bp, Homo sapiens
tcatctggaaaaggggggcttggactagatactgcatcaggtccctctcagatctaatagcgtgtgattctgccttactaaatgtggaggcttcagaatgctgatatatatacatggagaag

SEQ ID NO: 314103 - DNA, 122 bp, Homo sapiens
tgtgctgacctggccatgtctgcttagatctgcagcctcatgagagggggcattgctgagcgagggggcgtccgtgtgggccaccgcatcatcgagatcaacgggcagagcgtggtggccac

SEQ ID NO: 314104 - DNA, 122 bp, Homo sapiens
tgtggtctttcctgcgtgtcctaacctccccttcttataaggacaccaattatattgcatcggggcccatatcagtgagctcattttaatttaagtgcctttctaaagaccccatctccaaa

SEQ ID NO: 314105 - DNA, 122 bp, Homo sapiens
cctgtggcagggggtgggctgggggcagcacagtgcccagagccctggccagatgctaggcgggcccccacctgttgtatgattgaagtggttgtttggtctctgtttctccatatgttcat

SEQ ID NO: 314106 - DNA, 122 bp, Homo sapiens
tgctctccaagggccaggggcgtgcagagtctgagaagtctcagccctggtgagccgtggcgccgtggccgggcctgcgtgctggggtccacaccatgaaccgaatcccgaatcgcttcgag

SEQ ID NO: 314107 - DNA, 122 bp, Homo sapiens
accagtgtacttttgccaagaatataaggcaaccttggaggctcaaggcgctggtgctcccgcttggttatttttccacacttgaaaagccatctcaagcttctgggagttggaagctgctt

SEQ ID NO: 314108 - DNA, 122 bp, Homo sapiens
cgaccaaatgccgttgtgctgagggctgccggccgccccgctaggctgctgcaccctccccgcgctgccccacaccttgcacagagctcaggcagcattctagcaccatcagacaaattctt

SEQ ID NO: 314109 - DNA, 122 bp, Homo sapiens
ccgaacatcgtgaactacctaccgtgcaaggagaaccctggccccagctatgcccgtaggcgtgtgagcctgggcatcgacatttgccatcctgacacctttagctaccccatcgagcgggg

SEQ ID NO: 314110 - DNA, 122 bp, Homo sapiens
gatggccggcgggcgtggtcaggaccacccaagcccagatgcttttctcgcccccagatccgaggacccgggagacatgtggctaggaacatgtttcatgtgtcgtcaaaacactttcctcg

SEQ ID NO: 314111 - DNA, 122 bp, Homo sapiens
accggacagacatacttgaggtgcacaccaagcaggggtgtggacgcaccgagcacgccacggtggctgtgcgcaatgaactcaagatgcgtgcagccgcccggacgatctgataaacatgg

SEQ ID NO: 314112 - DNA, 122 bp, Homo sapiens
gtggagggacgagcagcttcgggggcacgtcctcgtgtatcctgtggaggaccctgaccccgcaccccaccctcgaggccagaaatcagttgcctctggggacctgagaggcgagaccactc

SEQ ID NO: 314113 - DNA, 122 bp, Homo sapiens
agcaaggagagggaggagttgggctacccagacctgagagtccaagtctaatcttctcagcggcagctgaatattgatgggaatctaatcaataagtgctttgcctcagcaacctgtggctt

SEQ ID NO: 314114 - DNA, 122 bp, Homo sapiens
ggtccctcttccaacttattctacttaatgcagccatgcactcactacatgcatttctagcgcagactatgagctgaaaactattaaccaaagtcttatttcttcatgctaaaaaggctctg

SEQ ID NO: 314115 - DNA, 122 bp, Homo sapiens
aatggggccacagttgggcaaaacgcccatcactttaaaaccacctctcggctggaagtacgtaatttttagcgagtcacagaaaaatagggaaacttatgcggcgtttccttggccacttc

SEQ ID NO: 314116 - DNA, 122 bp, Homo sapiens
tctagacttcagcccttccattggtcgtccgtcacagtgccacagtgcgccatgctcacacgacggccagcagccaatcagcgcggctcatcttcgcccagccaggacacgcaggatcgcgt

SEQ ID NO: 314117 - DNA, 122 bp, Homo sapiens
ggagcccctcttccctgtccgggctcgcctgccccagtccctgcttctgacccctgagtccggcctcccgagcctctgcctgcaccctgagcatccccaggacggctgggagggccaggtct

SEQ ID NO: 314118 - DNA, 122 bp, Homo sapiens
tgtgtatggcgtgtgtcatccgccctgctcctctttgctcgatgctgggaagaacagcctcgtgtcacacgcctgggtaagaccccagcagcgaggtgcaggggaagtttgccaaaagaatc

SEQ ID NO: 314119 - DNA, 122 bp, Homo sapiens
ccggggtccgcgtcccaaactctgggaagtacctcccaccagccctcataccagaaaaagcgaaattcaagaaaagctgtccttgtccacgtggccttgtcgctgagaaatacctgggaaag

SEQ ID NO: 314120 - DNA, 122 bp, Homo sapiens
ggggagccggcggggactggggtggggtccccggagagggcggctcttccttaatgtttgcgaggggcagcgggagcccttcttcctcctgctcggccttcaggggcggcgggggcggtggc

SEQ ID NO: 314121 - DNA, 122 bp, Homo sapiens
acatgttctaaagatttcaacaaagcttcagacaaagcttctcaagataccctgtggacccgacagagaaatatgaattgggtgatagctagtactctaggtagatatttctaactctgagt

SEQ ID NO: 314122 - DNA, 122 bp, Homo sapiens
tgaacttacatacacccactgtaaaattagactaagtccccagttaaatagctaagactacggcattttcctgccagacatgtgaaattgccacatttttgtcatgccactgccctcttata

SEQ ID NO: 314123 - DNA, 122 bp, Homo sapiens
atcgcgtggcccggcccggaaaactgagggtcgcccccgctgccccttcctggctgggcgcgcagcgctcccggcttacgaccccggcctcccccgcccgcagccccgcccccgccacggag

SEQ ID NO: 314124 - DNA, 122 bp, Homo sapiens
aaagctcaggttgccaggtctgtttcattaaagggattttgttgaggctgaaaaaaaaatcgacgtggaggaaaagctaacttgtgccaagcaaaggtgagtcagtggcatggacttacaat

SEQ ID NO: 314125 - DNA, 122 bp, Homo sapiens
ggcccaccccgcggcctcctcgtcattcactgggacctactggttccctttcccaagcctcgcccctctcagccctgcaagttgcgtggttgtgtttacaaattctgccacaattgcaaagg

SEQ ID NO: 314126 - DNA, 122 bp, Homo sapiens
ccagcacacaatgttgccgtcagacctgcaggtgtgatccctagcacagccaccttaggccgggagagcgaggatgggactcagaagctgcaagatgaccatgcagagaagcacccacggct

SEQ ID NO: 314127 - DNA, 122 bp, Homo sapiens
tcgccgccgagggctgagagaatagggcctgtgcggcgaatggcaacctgggctcaggcgcgcgggcctggggagcgcaagaccggccccctcggccgccgccgccgcctcagcgtcccggg

SEQ ID NO: 314128 - DNA, 122 bp, Homo sapiens
acctacatgtctgtgtttgtgggtgcgttgcatgtactcctgctgtgtgtacaagtgcaccgacacaggcatagaaacacaaacataggcatagaaacacaaacacacatctggaatgtgta

SEQ ID NO: 314129 - DNA, 122 bp, Homo sapiens
gcttgccagcaggggtcactgtttccttctgtacctcctgatccctccctccacccacaccgcactgcagcagctctggggaaaaagtggaatcagcttagaagtttttgggaggaagacac

SEQ ID NO: 314130 - DNA, 122 bp, Homo sapiens
gggctgcaggctggtagactcctccagatggatgaggccagacccctgcaacagccatcccgagcaaggctcaagcctccctgagagtccagggcgccaagtcagccctgcacctggcccgg

SEQ ID NO: 314131 - DNA, 122 bp, Homo sapiens
cagtttgaatttttgctggcttcatttggcaggataaatgccaaaataaaagaatgtgggcgttttcaggagatctggtcatctattttgcatcctttccgaaatatgttacttcctgcata

SEQ ID NO: 314132 - DNA, 122 bp, Homo sapiens
ggcggtctcagatatcatagctcagacctgtgcatcagccattagacgtgtcagatgggacgacccagcatgtgtctaaagcagtgattcatcccttgacaagcccaaagcctcctcttcag

SEQ ID NO: 314133 - DNA, 122 bp, Homo sapiens
ttctacccagtgactcaaagcactaaaagtcagcataatcggaactgaagtcagtagcatcgcccatttgccattcactgcagtagcaaaagtagtactctgtggtgggttaatcggtttga

SEQ ID NO: 314134 - DNA, 122 bp, Homo sapiens
gcggtttcggtcagacccgcccgcgggctggtttcgattagggccagtaggagggcggagcggccgggacgccaggagggaactagcctaagtggggacggtccccgtgcaggagacaaaga

SEQ ID NO: 314135 - DNA, 122 bp, Homo sapiens
ctctttttgttagcaaagatgatagtttaattgctccagcaaggaacaccaccagtgtaacgctctggtttttatttccttgtttaatgtattgcctagttgcctgctgattaaaaaatatc

SEQ ID NO: 314136 - DNA, 122 bp, Homo sapiens
aggtacgtgtcactctgaatcctctcatcatcttgggttttcacactgataaatgctgaacgactaggctaaggaacagtcctctgtaaccatttcttttcaaattccagtgtgaattttta

SEQ ID NO: 314137 - DNA, 122 bp, Homo sapiens
gcccgcccgcactagcgtcgtccgcctctgttcccagggcagccgtcgccagcactgcgccgccctcccgctgctccttgtagtttggcgtctgagaccttgaggccccaggcggtcgcgcg

SEQ ID NO: 314138 - DNA, 122 bp, Homo sapiens
gccaccaaaataaatgccgttgtccttgatcagatttttacagaggaggaacccaaggctcggaaacagtagctgctgctgtcacagctcccgggtcccggcccgctgctgtcgggtcagag

SEQ ID NO: 314139 - DNA, 122 bp, Homo sapiens
cagacaagggcagaaagtagagggtggggagggggcagagatgggggtgaggaggggaaacggacagacaaagagccccagagctccacagccagagaaggggagagggacggagaggaagc

SEQ ID NO: 314140 - DNA, 122 bp, Homo sapiens
caggccgacttcgcagaactactgctccctggagcagccaggccagggcggcagcaccagcgccttcgagcagctgcagaggtcccggtgagtatccgggatgcgacgcgcacccaaccctg

SEQ ID NO: 314141 - DNA, 122 bp, Homo sapiens
ccaaggtttaccaagactgttgtagttgcaagagtgggcttccggctccacgtaacgatgcgattgggctgtacctctgtctgtctcctgcgcgatgtcccgccccgggaggtgtcacggaa

SEQ ID NO: 314142 - DNA, 122 bp, Homo sapiens
ttcctgggagtttcagtggtggccagagagtttaaatgaagccctactttggggcaggagcgggaggaaactagatgaggtcagctgtctccactttctgatcctgacgtgacatctaaggg

SEQ ID NO: 314143 - DNA, 122 bp, Homo sapiens
gcctagcattccatgattgttattattggccttggaagaattagctctaaggaggcagaccgaggggaacttgactcagcatcttgaatgaaattacaatttgaaaactttggtgaatgtga

SEQ ID NO: 314144 - DNA, 122 bp, Homo sapiens
cttcctgatttttattggccctgagatctgaagctagttttttttcttccgttgagtacgcgggattgtagggcagatctggctgtggaaaggagactgtgggtaataagtttagaggcatg

SEQ ID NO: 314145 - DNA, 122 bp, Homo sapiens
acagtcaggcttcacagtccatctgctgtgctttaaacgctggtaaagttaccagtcatacgaatgatggcccaacacgttaacatgtagcttcaaaaaacaattactgtctactcatcaat

SEQ ID NO: 314146 - DNA, 122 bp, Homo sapiens
atagagtccctttcctagaaaagtgccaggctatcaatttacatacttaaatggggagtgcgtcctctctctgggtatcttcaaggacaacaaaaacaccagagaggaaggtaaaggaaagg

SEQ ID NO: 314147 - DNA, 122 bp, Homo sapiens
gaggcgctgcggcaaggtgcccacgtccctctggtgatctggagacacggtgaacaatgtcgacattgaatatgttgccaggagtgcttagcggaaggttgatacagcacctcgggtctgaa

SEQ ID NO: 314148 - DNA, 122 bp, Homo sapiens
ccaggggggcccccaaagggcttcagggcagagccaggttcatacatggaaaaggcctggcgatccctgcggtgtgtgctcccgcctggcgccatgggtgtgtgttccgcccgttcactggg

SEQ ID NO: 314149 - DNA, 122 bp, Homo sapiens
tgctcctcggctggggtgagctccgatcccgtcccccgcccaacccagcgcgcctctcctcggctcccccaactgccctgctggttggcctctgcgggtctcctcccgtctctaggcttctg

SEQ ID NO: 314150 - DNA, 122 bp, Homo sapiens
ctttaacccacacggcccaagcctggagaaacgacttggtttcccacactatagacagagcgctggggtaaaaaaacctgcaacttttgagagcaaaattgattagcaatttgctaattcca

SEQ ID NO: 314151 - DNA, 122 bp, Homo sapiens
cgctcagcctgcaggtccgtggtggtgaccggggccccacgggctgagctgtccctgagccggcctccccatcctcctccttccccgccctgtcttggcttcgtctcctcccccctctccag

SEQ ID NO: 314152 - DNA, 122 bp, Homo sapiens
cttcttagacagattcatggacagagatggttattcgggagggcaggggacacaggctggcgcttgtcccagggttcagatcccagccctgcagccctagagctagagaatttcccagtggg

SEQ ID NO: 314153 - DNA, 122 bp, Homo sapiens
cagcacacggtgactacatcccagatccagagctgcggaactctggggccacgtctccagcgccgcattcggcggcacacggaggcctgagaaggcgggaggggtcagtctctggcttcgag

SEQ ID NO: 314154 - DNA, 122 bp, Homo sapiens
ctgtataagtgtttaatgggttaatcaaccaatcaactccacattaaaggagcgccgtcacgtgcatgggtataggaggaaaggtcatgcaacagtctgttcccacatggaggttgtgtcct

SEQ ID NO: 314155 - DNA, 122 bp, Homo sapiens
tgtttttcagattgactccacacacacattgatgtgaagaaggaatgcgaagcccatgcacgctgaccctgttcggtccccttgttttgcagatcaggaaaccaaagtccagagaagaacag

SEQ ID NO: 314156 - DNA, 122 bp, Homo sapiens
tgcccccacccgcggggtgccaggccaagccccgccgagtaactgctccgcctcccagcccggtcccccaggtccctgccccacctgactggtcgccgctgtaatattccgagtccatggca

SEQ ID NO: 314157 - DNA, 122 bp, Homo sapiens
ccacagccatagtagccaccatttattgagcgcttactctgtgccaggtgctgtgttaagcgctttgcaggcaacaaccctcggaggtaagtaccattatcatccctattttgcaggaaacc

SEQ ID NO: 314158 - DNA, 122 bp, Homo sapiens
agacctgatacttttagcatggggcatgctctggttttgagggtttgcctcattacaagccgcaggctctttgaaatcagaggaagaaagcacacagacccattacattttactcctgagct

SEQ ID NO: 314159 - DNA, 122 bp, Homo sapiens
cttcatccacgtcttcctcatcatccacgtcttcctcatcctccccgtcaccgtcgtcctcgtcaaactggaagctctggtggccaaggggagacaacagcgacctggtggaattgctgcag

SEQ ID NO: 314160 - DNA, 122 bp, Homo sapiens
aattccctaagtaaaattgtagctggcatgaaactttgtcatgaatctaccttgaagctacgcacaaccccaaagaaggttcaactttatatgtatgatttaatgtttttatgtagaaatat

SEQ ID NO: 314161 - DNA, 122 bp, Homo sapiens
tctgtgaagagaaaaagaacagttcctacaccgtggaaacggacccccgcaggttgccgacgctggctcaggtggagtgcttttattctcttatccggccccacccacatcctactgattgg

SEQ ID NO: 314162 - DNA, 122 bp, Homo sapiens
ccagtcagtttggaatgggaagtgcagaggggcggtaggggctggaccagtagaggcatccgtgggggccttgaatgcccaactgaggagattggacttcatgttgggtatagctggggccg

SEQ ID NO: 314163 - DNA, 122 bp, Homo sapiens
caagcgattctcccccacctcagcctctcgagtagctgggaccacaggcgtgtgccaccacgcccagctacttttttaaaattttggtagagactgggtttcgccatgttgcctaggctgat

SEQ ID NO: 314164 - DNA, 122 bp, Homo sapiens
aggtgaacgagtcccctgactacgagtggaacgattagcggccatgcggctgttcgccttcgttctaccagaccttcatgtggaagagagaaatggtaaaatggcctggcacatgtggtcct

SEQ ID NO: 314165 - DNA, 122 bp, Homo sapiens
taacagtgccattcctctgtttcctccaaaaaacaccctaatataagggaatatctcagccggactgcattctgtttctgggcctgggttctcagggagtctctatgaagtcaggacactgg

SEQ ID NO: 314166 - DNA, 122 bp, Homo sapiens
ctccgtgttaataacccgcgtgttaatgacctgcgtgaagctggaggccaaaggatgaggcgggaggacttggcaagagaagtccccagaaactttcgcttagggagtgtctccccccaccc

SEQ ID NO: 314167 - DNA, 122 bp, Homo sapiens
tcatgctggtgtcctcaccccttgcagctccatccaatggataggctgagcaaactgccacgcacagcaacagtaggattggaagactcttcatttccactggctttacttagctctatgtt

SEQ ID NO: 314168 - DNA, 122 bp, Homo sapiens
gaccacaccagtgaaggccaagagggtcagcaccttccaggagtttgagagcaataccagcgatgcctgggacgctggggaggacgacgatgagctcctggccatggcggcggagagcctga

SEQ ID NO: 314169 - DNA, 122 bp, Homo sapiens
tgagatcagacagaataaatccagtgcctgaactcttaatcactattatgtacatgaatgcgcatgttatatgctctgttcaagacttccaaatttctcaccagctaccctgtccaggcacc

SEQ ID NO: 314170 - DNA, 122 bp, Homo sapiens
tcggggagtggggcctctttccccgcagggagttgggatgggggttgcaggaagacgatgcgggaccccatcccccaggagtgggtcgaagtcacgggtgtgtccagaagcagccctggtac

SEQ ID NO: 314171 - DNA, 122 bp, Homo sapiens
gttagctttgttgcactccaaataaaaatttggcattgggtggtagttatgcatactctacgcatcgacaattctctaaggactccaaagtgcatgtcctggaaattccaacatatttgcac

SEQ ID NO: 314172 - DNA, 122 bp, Homo sapiens
ctgagacagggcagcaggtaggtctctgcaccttaagttacataaaagcactcgcgggctcgctcactccaccccacgcgcacctgctgagctgcacaagctgcaatttaacaacccactcc

SEQ ID NO: 314173 - DNA, 122 bp, Homo sapiens
ataactgtctcatcacccgatcataaaataagttactgtaaaatgcatagactccttacacgtaaagaatttgtgcatcacagtcatgtgttcaacagttttacacaataaaaataaagcca

SEQ ID NO: 314174 - DNA, 122 bp, Homo sapiens
cggctctgcgctttcatgtccatctccatccagtggctcacggagtcgcttgctggctttcgcctccgattcttgtccatgttgattttcatgccctgaaagacaagagtccactcgtgagc

SEQ ID NO: 314175 - DNA, 122 bp, Homo sapiens
agtttcaccatgttgaccaggatggtctcaaactcctaaccttaagtgatccgcccgcctcggtctccctaagttctgggatggcaggcatgagccaccaccgcacccggcctatatacatt

SEQ ID NO: 314176 - DNA, 122 bp, Homo sapiens
tggtggtgggaataggtaagagcaagcagaattgctttagaaatcatcaaagagcagatccgcaaggtccctaaattaggttctcttgtcccatttccaccactgctaatgagtaattactg

SEQ ID NO: 314177 - DNA, 122 bp, Homo sapiens
ggtccttaatattccaagcggagaggatgatcttactcccaatactgcagaaagtgtacacgaccccagtgatatggtgcccatgatccaggacagaagaggatgatgttactttcaatatc

SEQ ID NO: 314178 - DNA, 122 bp, Homo sapiens
gtgaaggatgcgcacagcatccatggcaccaaccctcaatatctggtggagaagatcattcgaacgcgaatctatgagtccaagtactggaaagaggagtgctttggacttacaggtaagtg

SEQ ID NO: 314179 - DNA, 122 bp, Homo sapiens
ccaagctgcagtcgccctctgtgtgcaggcagcagctgcctggcaacccccgagcccgctcgcgctcccagcatcgcagaaccagggccaggtatcccagtggctgcgatcaagccagtcat

SEQ ID NO: 314180 - DNA, 122 bp, Homo sapiens
tgcctgttttggctgaaactctttcaacccccacaagttgagaatttgcactaactaagtcgaatttgcagttaggaagccttcctgggttcctgggacagcgccgagtgctgcgagcaaag

SEQ ID NO: 314181 - DNA, 122 bp, Homo sapiens
cgctgcgggtgggacaggcagggcccctgtggggtggcttgactggcctggagttggggacgaagtccccgggcttggtcccccgagggcttggttgggcgtcccggggtaggtggctgccg

SEQ ID NO: 314182 - DNA, 122 bp, Homo sapiens
atgtcccgcctctaggcgccgtgatgtgggtggctggaagagcggagagccagcgaccgccgatctgttagctcgtgcgacccagcggcgggggtcctccactgttcatttctctacaactg

SEQ ID NO: 314183 - DNA, 122 bp, Homo sapiens
aaactcgccctcggggaccgtccagcgcaggagcaaggagtcggaggtcctgtctgtcaccgtcagctcacccaggcgtggtgggcctgaggacttcccaggcttctcctcatccttgtctg

SEQ ID NO: 314184 - DNA, 122 bp, Homo sapiens
ttgggtgtgtgtgtgaaaccgtgatccacctggaaggggttccaaaccctggactaacatcgcatactggctgcaaaagacacatgcgtgttgcttctctgctctttccctcttctgtctga

SEQ ID NO: 314185 - DNA, 122 bp, Homo sapiens
aacgggcggatgacctccttccggacgcagatgagggacgggtggatgattccttcaggacgcagatgagggacgggtggatgattccttccagacgcagatgagggacgggcagatgactt

SEQ ID NO: 314186 - DNA, 122 bp, Homo sapiens
tggggggctgctactccggagcggcgaactggcgggcgggggtgcgcctgtgagtgtgagcgcgcgtgtgcgtgtgtgcgcgcgctctcgtggccttccggcagctggcagctgtcccggcc

SEQ ID NO: 314187 - DNA, 122 bp, Homo sapiens
ccccaggggggccagttcaagggcaatgagctgctccccttgggcctgccaggagacccccggaaagtggcccaggcacattcgctcactcattcattgaaatacgtatcaggctactacct

SEQ ID NO: 314188 - DNA, 122 bp, Homo sapiens
cagacggggcggccgggcggaagcgctccccacctcccagacggagcggccgggcagaggcgccccccacctcccagacggagcggcctggcagaggcgcccctcacctcccagacggggcg

SEQ ID NO: 314189 - DNA, 122 bp, Homo sapiens
attgttcggccccggggggagccggctcggaggtgcgcgccgagaggatcgctatggagacgcgagggcgcggccgggacggggactggggccctactccccggaggcctccccacccagcc

SEQ ID NO: 314190 - DNA, 122 bp, Homo sapiens
ggtatattttttagcctcggcactccaattatactttatcttggcttgggagggtagccgcgtttgccacaggcggacttttgaaggagttagagtcacagggcagcactagctgtgcatct

SEQ ID NO: 314191 - DNA, 122 bp, Homo sapiens
gttgatttgttctgtctttaatgtgttaaggattggatggggaagtgttgtagcttctcccgtatcaatggggtgtatatttttccagctcatcttagtgcccagccccaaatgtactggag

SEQ ID NO: 314192 - DNA, 122 bp, Homo sapiens
ctttagggatgaattgaaactggaaagagagtagtaccaatgagagtgagaaagggaagacgaggatgcagcctggtccagaacctctggagcccggggggaaacaggttggcatcacatcc

SEQ ID NO: 314193 - DNA, 122 bp, Homo sapiens
ccaggagacagagcccagccagcgtaaaggccggaagtaaaagggacagctatgacacggcggtcctgggtgaactgatgtctagcgctacagtgaacccccaacccgaattcgtctaaagc

SEQ ID NO: 314194 - DNA, 122 bp, Homo sapiens
tgctatccctgacttcccctcttcctccctccactcccagcaggttcctttccagggcctcgcagagaagcacaggcctgcatgcagccccactccaccaagactcctcagtgattgctgga

SEQ ID NO: 314195 - DNA, 122 bp, Homo sapiens
cttagtgcatctcaaataaaccatgctttcagagtatgcaaaacgcactgcaagttaaaccgattgcaaaagaaaaagcccacaggtactccgtgcgctcaaagccatcatcctcacaaacg

SEQ ID NO: 314196 - DNA, 122 bp, Homo sapiens
ctaactccccgaccccttgtgcttcccgagtgaggcaatgcctcaccctgcttcggctggcgcacggtgcgctgcacccactctcctgcgcccactgtctgacactccctagtgagatgaac

SEQ ID NO: 314197 - DNA, 122 bp, Homo sapiens
ccagcatgtaaagtcttctgtctctcctcggagttggcggaggcggcaactttccattctcgccgccgggggccgggcagcagcgggcgcgcgggtcagcgctcagcacggcgggcagcgcc

SEQ ID NO: 314198 - DNA, 122 bp, Homo sapiens
ggaaccctgaaagggtggggcaaggctgatgcggtagtgggcggggccaggtgggctaagcgggacgggcggtgtgggcgggacctgtttggtgggcggggcctgttattcgctctgccttc

SEQ ID NO: 314199 - DNA, 122 bp, Homo sapiens
ggccagtgcgacggcggcccggggagctgggtgagggcactgcagccccagagcggcagccgccggcggagcctgcctctggcatcccaggccgcgccgcaccccgctcgcctcgccaggct

SEQ ID NO: 314200 - DNA, 122 bp, Homo sapiens
gctgagggggcaggggagggggaacagggctgggaaactgccgtcagcgggtcccggccccgcctcccgaacgcaacgtccaggaaacctcagaactttctattgtctgagaagcttcactg

SEQ ID NO: 314201 - DNA, 122 bp, Homo sapiens
tggtacaatcatttccgaaaaggacccaccaattgtctttctttatccgggtcctccacacggatggattcgtggcagggccttttgcaacatttagggcaaaccacttggctgagctgtca

SEQ ID NO: 314202 - DNA, 122 bp, Homo sapiens
tgtttggaggcgagctgccatcatccaccgcctttgtctggaagcgcagggcctcacacgcgggatccatcggaagcccgagcattgtcaagctctgctgctgcacctgggtcagcaaggtg

SEQ ID NO: 314203 - DNA, 122 bp, Homo sapiens
ttggtaacaattccaagaatgtgtgagcaccagggaaagctatgccagcagttgaaacaccgagagcaacagcagacttttttatatgaaagtaacatgcaaataactgaagggtctcaggt

SEQ ID NO: 314204 - DNA, 122 bp, Homo sapiens
tgccgtgagggccccaggatttggccgaagtggcggccacagcctgagccccgaagagaacgaatttgcggaggaggagccggtgctggtactgagccctgaggagcccgggcctggcccag

SEQ ID NO: 314205 - DNA, 122 bp, Homo sapiens
ggcccacagcttccccttcgtgtccacggatctagtgctgaaagacaaaccctttgactccgccggggcagttggtccagggtccattttcatttctcaccgtttttgttttacatgagttt

SEQ ID NO: 314206 - DNA, 122 bp, Homo sapiens
gggatcagggggattaaagggcacagcatgtgtgggcaggccgagggtgcggccaggggccgggctgggccggcgggggaggaggggcagggaccccctccgggccccgctcaccggaggca

SEQ ID NO: 314207 - DNA, 122 bp, Homo sapiens
acacctgattgcccggagaaatgccttattcctgacagcctcttggttcttttccgtctccggttaggtgagaaggtcaatctggccctgcgggttatgttgggggttacatgagaacctca

SEQ ID NO: 314208 - DNA, 122 bp, Homo sapiens
aacgccccccctcccaagaagatcacgtcctggtttctctccaaggggcagggaaagacgcgggacgactctgcggactacatcccccatgacatttacgtgatcggcacccaagaggaccc

SEQ ID NO: 314209 - DNA, 122 bp, Homo sapiens
ttattctgcgtggtgctaagtttctatgatgacccacttctctgaactttgagcatggatcgtgagtgcctttaccaccaaccactctgggctgccttaggaaagggagatggggtggacga

SEQ ID NO: 314210 - DNA, 122 bp, Homo sapiens
aaaggcatattgaagggaatgagaagcaggagaagactgtccgctgagcaacatagaaaccgtcatgagcccaagcgagtctctgagcagcaagggacacaggtcccacaggccaccatacc

SEQ ID NO: 314211 - DNA, 122 bp, Homo sapiens
ctggagctgtcctttcactgctgctatgcaaagaacccttgcttcctgtagagcgcagttcgaaaatcactgatgcagaattggcacatgaggttgaagctaggaggcttctagtgctggct

SEQ ID NO: 314212 - DNA, 122 bp, Homo sapiens
tgcagggtccagccagctccccacctccactggatgccactgtgttagcttgggctgccacgacagagaccacagagtgggtggcttaacagaagtgtatttgctcagtttgtagaagttga

SEQ ID NO: 314213 - DNA, 122 bp, Homo sapiens
ggggccgctgcggctgcgaggcaagcctcggagccgaggcacggccgagggcggtggggacgcgggccgactttgcaaagtttgggaggaggacgaggcctcggggcggcggggcggcgggg

SEQ ID NO: 314214 - DNA, 122 bp, Homo sapiens
cgtcccttgtcttctctcctccttgggcagggagactatcggggtgcaacctggctggggcggggaggaggtgcagggcctggccagagcgggcctggccacgggcaagggacagcgaccgc

SEQ ID NO: 314215 - DNA, 122 bp, Homo sapiens
cgcgcccgtccgcacactccaccgaaggagctggcgactgagaacctcgaattttaacttcgcgtgcccgcccgcgcgcgcccgcccgcgcccacccctaaatcctgcggccgccgccagcg

SEQ ID NO: 314216 - DNA, 122 bp, Homo sapiens
gatacggcagcgaggccgcaaatgcaatcaggcggcgctgagggcagcccgggggcggggcgaacggggcgggggccggggtctggtaaggccccgccggctgagatatccagcggcgcacc

SEQ ID NO: 314217 - DNA, 122 bp, Homo sapiens
ctgaaattctgagacagacgcagacacaggggacccaggaacaaagcagggcagccagcccggttccacacatctgcaggcagagggggatcgggtcatgcacacacttgcacacatgcaca

SEQ ID NO: 314218 - DNA, 122 bp, Homo sapiens
ctctggctgcccatgatgggggtctgctggggggcgcttggagccgccccgggctcgcgccgcaggggatagtacggcggggtcggcccggccggcggaggggtggggctggcgcccgaggg

SEQ ID NO: 314219 - DNA, 122 bp, Homo sapiens
aaagaagctattacaggtatgcgtttctaccacaagcaaaaaaacaaacaaaaacccactcgtgaactttaaaacatgtttgtgaggtgttcaggtagagatttagcatctatttttactct

SEQ ID NO: 314220 - DNA, 122 bp, Homo sapiens
aggatgactccagggacacccagcaaagagcaggctcactcccactcccagtcagagaagcgtcccctagaagatgggcggggaccggaagggaccgggccttgactgattgatgttccacc

SEQ ID NO: 314221 - DNA, 122 bp, Homo sapiens
acttagagaagcctagggttggcattcctggatggaaaaaaagaatcctaccccagagtccgaagtgaatgtctggaattcatttcctgagaagccttccaactctgtgattttccatagct

SEQ ID NO: 314222 - DNA, 122 bp, Homo sapiens
gcgggcgctgcgccgcacctgctgccgtcccgggggctccgagggccgagcggcctggggcgccctctcgcgacgcatcggggccctctcggacccggctctgtcccctgcaggggtccccc

SEQ ID NO: 314223 - DNA, 122 bp, Homo sapiens
taggtaaaatttcacattcattgtaaaccaaaatatatggagaagaaaactaaattgttgcggtaacacacacccgtggaggcacaaattggtcctagactgtcatggacccaccctgactt

SEQ ID NO: 314224 - DNA, 122 bp, Homo sapiens
atctggctaatcccctgatatcgcctcaggcagagccaggccacattccccccgaacccccggacccagtgcttcagcaacgacacacgaagctgaagatatggctccctgaagctgggctc

SEQ ID NO: 314225 - DNA, 122 bp, Homo sapiens
tgtttgttttgagacggagtcccgctctgtagcccaggctggagtgtagtggcgcgatctcggctcactgcaagccccgcctcccgattcaagcgattctcatgcctcagtgtctggagtag

SEQ ID NO: 314226 - DNA, 122 bp, Homo sapiens
cgctcctcctgcctcgaggacgaggcatcattttcggagcctgctgcagggctgcttccgcggccgccgcactctgcccatcgcgccccgcccagggcagagccagacgttctgcgaccagg

SEQ ID NO: 314227 - DNA, 122 bp, Homo sapiens
gcagaagggctggctccctctccatgccagaggatgggcaattactgcgaggcattttttcgggcaaaatagaaggcagagaaatagcaagtaggagccccaattatctggagtcattctca

SEQ ID NO: 314228 - DNA, 122 bp, Homo sapiens
gccccgcccccgcctcccgcggcaccgcccgcccgcgcagaccccgagcgcggccgcggacgaagatggcgaccgccatgtacttggagcactatctggacagtaagcgcgccccacgggcc

SEQ ID NO: 314229 - DNA, 122 bp, Homo sapiens
gggaaactgcaagctctccctttgtcctactgtttgatatttagctattatcccatcagtcgaggtctcagtcttctgaacagtcatcattttacaccattcccaaatggatattctgataa

SEQ ID NO: 314230 - DNA, 122 bp, Homo sapiens
gcccgagtccggccagcgggccccttcgggacccggtacccggggtccgcggagaaggggcggctgggaacatgactccaaggagcagcgactaggacagcgagggatctggccgtcaggtt

SEQ ID NO: 314231 - DNA, 122 bp, Homo sapiens
ctgccactgaaattgagcctaattgagctttttttttttttttttaattagtttgcaggtcgaagtaagaaggaaaccaaatattctcttaaggctgtcgaagacatgttggaaacattgca

SEQ ID NO: 314232 - DNA, 122 bp, Homo sapiens
ggaatcacgttttaactagtactgctttctcggtggggtttgctttgaccaattgggggccggagcttgttaaagtcgaaggaagagctttgctaactgtgcgtgggtgggctgaggctagc

SEQ ID NO: 314233 - DNA, 122 bp, Homo sapiens
tttgccctcattaaattatcaggaaaatgcaagtaatttattatgtgtaatcacatcattcgcggtagcacttcgcccagagaaacctagcccaatatggtaacatcagaacaatgcttcac

SEQ ID NO: 314234 - DNA, 122 bp, Homo sapiens
atataatacagggtttagaatggcacactctggagttgtacagtgcacaatctgcacagccgtatgtgtagccttggtccttgggcacttttaaaaatcagtctttgcctctttttcttctt

SEQ ID NO: 314235 - DNA, 122 bp, Homo sapiens
ctgcgcactgaaaagccggcctgcggagtctttccttacgaagttaaaccacctagggcgcgcggccctgttcgcccagacctcgggctttcctgccaggctgggtttgccgggtcgagtca

SEQ ID NO: 314236 - DNA, 122 bp, Homo sapiens
cacctggaccgtcctgggcgcgcggggcactcggagccgctgcctggaccggcctgggcgcgcagggcactcggagcctctgccgcttggcgcagtaccagctgttttgggaaggagggctg

SEQ ID NO: 314237 - DNA, 122 bp, Homo sapiens
gcttccgaactgcgtcttataacctcggctcaggcccaggcccagaccgctccccgcccccgccacccataaactacatctcccaggaggccccacggtgcccgattgtccgcttttcgccc

SEQ ID NO: 314238 - DNA, 122 bp, Homo sapiens
ttacctcatcctttaagtatttgaggaactggtgaacaagttaactactttgatagtaaacgaggaaatttctttatagagaaaagcaaaatgtggcccagcaggtatgtgaaaaatggctg

SEQ ID NO: 314239 - DNA, 122 bp, Homo sapiens
gatgggaagtgcaggaagtggttataaaatttttagttttgtggggagggagtatggtagcgtgctagagtgttatgtttgagagcatgaagtttggagtcagatctcagttcgaatcccaa

SEQ ID NO: 314240 - DNA, 122 bp, Homo sapiens
ggtcactttgttgttcaggatggttcaaaggtgagctaagggtttggctaccagctgtcccggtttgcctgggacagaaggatgtctgggacggaacaccacatggtgctcaaagaggtact

SEQ ID NO: 314241 - DNA, 122 bp, Homo sapiens
tgtctcctgattaggctggagttgattgtatatcaacagaaatgggttaaaacaacaaagcgaggagtccctggttgggctcggaccaccagcctttctgttaacagccaaacgcgctgatt

SEQ ID NO: 314242 - DNA, 122 bp, Homo sapiens
cagcaagtgctgcccagaagcctggtgggggaagggagagggcctccctgcaggcaggaacgtgcattacataccacaccacatgccacgctgtcacagatcagacagcggccctggcagac

SEQ ID NO: 314243 - DNA, 122 bp, Homo sapiens
ccatcagaagggagccttggcagccaataggagcacagaaaatgaggcagcccagaggcacgctttcctgtggaatatctggactgcattatgggcttctgtcagttgtgaacaagaacaca

SEQ ID NO: 314244 - DNA, 122 bp, Homo sapiens
ccgagttcagagacttgctataggcctgcgtgacccggacgctctcctttacccaacgggcgtccagagaagaggccgtgcgtacgactcgctgacacctcccatttcaccttcctggcatg

SEQ ID NO: 314245 - DNA, 122 bp, Homo sapiens
atagaggtatttcctttgatttaagccagaaagtcctgagagcggatcggggagcatttgcggatcggtcactttttcctcctttctgagtctcttatcccctaccacagggacggcccagg

SEQ ID NO: 314246 - DNA, 122 bp, Homo sapiens
agctagtcaaggctcaggacccggaacagccaaatacatagaggctgtcttctacagccacgagtctggatacaggtccattccagaagcttcccgaacccaccccgtccggcaggaggcta

SEQ ID NO: 314247 - DNA, 122 bp, Homo sapiens
cagacccctctctagagccgagatgctcccggcagtgcaggcccctctctagagccgagacgctcccggccgtgtaggcccctctagagccaagacgctgcagggttaatcagggctgccca

SEQ ID NO: 314248 - DNA, 122 bp, Homo sapiens
agtctgttttgacgttaatgctggtccgaattccaaagggaggaggagggtctagtgaggcgggtcccacccggcctttcccatcagagcccgaactcgcggttcaggttccctctaggacg

SEQ ID NO: 314249 - DNA, 122 bp, Homo sapiens
ggatagagcactgcaccctttcttgattctcattgttcccgggagcgagcgccttggctgcgctgggcatacccaccctggcgccattcacaggcagtgcctgccctggccctgtgctcacc

SEQ ID NO: 314250 - DNA, 122 bp, Homo sapiens
agcccagggacagaaattaaaatcggtgagatgattccgtgcctacttctgagactctctcgggaacagaactcgtccccatccgctgccagcttgggtagagacaaatccgattgtccacg

SEQ ID NO: 314251 - DNA, 122 bp, Homo sapiens
ttgggggactgggagaaaactcagttccgttgtatggcggtgtcgtggaatgaggctccccgggactggtaaactttcaggcaaggactcaaccttgtatatttcaactggcccgaaaccgc

SEQ ID NO: 314252 - DNA, 122 bp, Homo sapiens
gccgctgggagctgtgcctaccgagcccgctgcctgagctctctgcagccagcaacacgccggaacctgcagccgccttgctccgtcccgccttcgcagccctggactggaggcggggcccg

SEQ ID NO: 314253 - DNA, 122 bp, Homo sapiens
aaaaactgaggtccagataagtgttatccaaaaaaactacataaaaattcaagctttaatcgaggattataagaagagactattctatgaaaaggagagatctataatctccaattggcata

SEQ ID NO: 314254 - DNA, 122 bp, Homo sapiens
caatttatcggctgccgagaatgatgcaaccaatgcaatttcctccggctgaggcgtgggcgaagactacggttgattggtagagcgtgctcctatcgcagaggctgttattccttgggtct

SEQ ID NO: 314255 - DNA, 122 bp, Homo sapiens
agcgagccccgggggcggggcctccaatgcaaatgaggggcgtgggcaggcggggcggggcgggcggggcgctgacctgacgtcaggctcgcggcccgggcagttggctcggcggcagcgga

SEQ ID NO: 314256 - DNA, 122 bp, Homo sapiens
cgctccgagtgtggggcccgccaagcccatgcccatctggaactctagctggcccataagcgccgcgcgcagcccaggttcctgcccgcacctttccctccacacctccctgcaagctgagg

SEQ ID NO: 314257 - DNA, 122 bp, Homo sapiens
caggatttttattgacctgatacagctcccgtagccttggtggcaccaccatacggttcccgatagccacccaggtgtcctgtctccacggtaactgctgctttgcgaccttcggtttgcag

SEQ ID NO: 314258 - DNA, 122 bp, Homo sapiens
acagcataacaggcccaagacagtgagccagccttgccgaccaaaggaccactcacttagcgtccaggatcatcatacaggctgatctcaaatttgaaatctggaagctctttgggcagagt

SEQ ID NO: 314259 - DNA, 122 bp, Homo sapiens
gcggcggccagcaatgggagacgtgcggaaggccaaggaggcactggccgaggtgagccccgtcggaagtgggggctgcctcccggagccgcagctgcccctcccccaagacgcggacgccc

SEQ ID NO: 314260 - DNA, 122 bp, Homo sapiens
tcacgcacagcagcttcccgtcgtcctcacagtagtagtgcagcttctctcggtgtcgctcgcacaactttgcatcctgctgctcccgggtcacctctcccggctgcctgcccttgtccacc

SEQ ID NO: 314261 - DNA, 122 bp, Homo sapiens
ctccacgtgccggttgcagcgccacagcgggatgcacttgagcatggtgcgggtgggcggcgcgggctccggcggcggcgctcggcgggctcggggccggggggcggggctcagtccgcatg

SEQ ID NO: 314262 - DNA, 122 bp, Homo sapiens
agcgggcacctttgtctgtgcctagttccctggacccgggccgagcgatgcgggtgggggcgcggttcgggcgggtcccggcgctgcccgggggaagcgcgcggcgacggcggcccggcttg

SEQ ID NO: 314263 - DNA, 122 bp, Homo sapiens
cgctgaacgtgccatgctccattgccccgtgagtaactccatgctcttgccggtttcacacggcctctcagagctggagcctttgttcaggagccctgggcagctttcaggaagctcttggg

SEQ ID NO: 314264 - DNA, 122 bp, Homo sapiens
ggcccacaggctgggaaactcctccttgaagctgggaagcagagggttgggtctcacaggcgaagctcacaggcaaaaaggaacattgagggcggagctgtgaacccttccaaagctctccc

SEQ ID NO: 314265 - DNA, 122 bp, Homo sapiens
acaggggatagacgggtgtggagggcaggcagacacggatcctgaaaggtacacacagaccgaacctgcagtgggaggggtcgccaacaggaccgactggccggggcggagggcagggcgcg

SEQ ID NO: 314266 - DNA, 122 bp, Homo sapiens
actccatgagtccttaactaacagccttaagttttgtttcaaaagttcttaagtccattgcgtagaactcagaatgtaacttcctacacacaaaagccaatttaactcacttttatctgaag

SEQ ID NO: 314267 - DNA, 122 bp, Homo sapiens
gctcactcatcttgaggacaaatgggaaaagccagaagccagaggggcacaaggatgtcacgggatatttcacctgcctgggatggtggaggtagtatggggttttcaatctcaaagcgtcc

SEQ ID NO: 314268 - DNA, 122 bp, Homo sapiens
aacaatgcatttctcagaatgtatccccaacattaagagacccaagactgtacttaagctcgctgcatactacagagaagtttggcaaagtggtcagtgagaatgtatgcagggtgactcac

SEQ ID NO: 314269 - DNA, 122 bp, Homo sapiens
gagaccactctatagccagagagagaatctttattcctgttccatctgtatggcatactccgttattgttaacagggtttttttttttttttttttttaacaaatcagattgctaataggca

SEQ ID NO: 314270 - DNA, 122 bp, Homo sapiens
agaacaagagttgttccttagggtggtgtccctaaacttgaaagtggacttggtcctgctcgcaggtgggcttgcacgcgccaggcttcgtgtggtggctcgcgcgcgctggcccccgagcg

SEQ ID NO: 314271 - DNA, 122 bp, Homo sapiens
tctgccagagtcccaggttgagtaccttgaggcacggcagctgcgtgatgcgctccaggccgcgcttggtgattcgggtgcagccgtacaggtctatgccggtgagttggctcaggtgctca

SEQ ID NO: 314272 - DNA, 122 bp, Homo sapiens
ccagggtcatgttgttgaaatccaccaagtgacagcagcccctgaccctgctactgaatccgaacacattttacaggtacagctgttgtcagaaaattacagaagccaaaggcaaaaaaaag

SEQ ID NO: 314273 - DNA, 122 bp, Homo sapiens
ggctcctcccggctttctgaacgcaagccagcaagtgggcgggacctggggcgggcggagcggcgaaagcatctgctcctgcgctttgtggtctcctgcctccggcttctccgcctgcgacg

SEQ ID NO: 314274 - DNA, 122 bp, Homo sapiens
caaggcagagtcctcctgtgatttgttaggctggtttataataatgagtccatgtgtagacggcaagagtgacagtctgtttgccgataactaactatgtgaggtttgagaaggcccaaaat

SEQ ID NO: 314275 - DNA, 122 bp, Homo sapiens
gtaagtgaagttactcttgccttgagctgagtgtgggagcaccgcgattgcaagatggggcgaggtgatcaaagatcccgcctattttcaaccccggaacctcctccgctcgctgctagccc

SEQ ID NO: 314276 - DNA, 122 bp, Homo sapiens
ggggcactgggggcacagtgaggctcagccccaggatctgaaccaggtggtttccgacttcgtcgagcagatctggttgacgatgaagttctggaagccccccgggagaaccatgagcccaa

SEQ ID NO: 314277 - DNA, 122 bp, Homo sapiens
agggtctcagaagcacaatggtttcttcagagagactgtgaaatttacagtcagcttggccgacccctccagctcctcgggtgatctgtccatttggggcccgagatgtgagagtccctggg

SEQ ID NO: 314278 - DNA, 122 bp, Homo sapiens
ttcaaggggtatttgtgtccgtagctgctcgtgcagcatctcagcctgcggtgtcagactcgaacccagagctgtgtcaaatgagtcaggactcccctctgctgcccttgtgcactggcagg

SEQ ID NO: 314279 - DNA, 122 bp, Homo sapiens
ttccgccagccccgtctgctctctacccgcggccccgcggcggcgaccgtgaacactcggcggcccctacagcccgctctcggcccttcgtccctcgcgggccccgactctccctccttgca

SEQ ID NO: 314280 - DNA, 122 bp, Homo sapiens
gttgggggcctgcgttacggactttcactcaggcaaggccagttgtcgcagcggggcgtgcgtttgcatgggctcttggactccagttaaaatgccctggtagcgaaaccctcctgagaagg

SEQ ID NO: 314281 - DNA, 122 bp, Homo sapiens
tccactttgtacataagttaaagtcctaattggatttgtaccgtcctcccattttgttctcggaagattaaatgctacatgtgtaagtctgcctaaataggtagcttaaacttatgtcaaaa

SEQ ID NO: 314282 - DNA, 122 bp, Homo sapiens
cccatgtccaggttctatgaatttgaatgctgtgtgtgtcgcgggggccctgagaaagtccggagactacagcttcgctggtgagctggattgggcatgacctcagtgtaactccacaccac

SEQ ID NO: 314283 - DNA, 122 bp, Homo sapiens
cttggctgaggcaagtgtttggggtgtacattgctcacataaggaaatgggctggagggacgcaagtgactaacccaggatgccacagcttgcaagtggcatggcggggctggtctgacgcc

SEQ ID NO: 314284 - DNA, 122 bp, Homo sapiens
tctctgggcctttgcactggctgttctttctggttgaaattctcttctccaagactccaccgcttgtgccttcctaccattcaggtcttgattcaaaggctgcctgttccaagaggccccga

SEQ ID NO: 314285 - DNA, 122 bp, Homo sapiens
tgcagcttagtttcagcttttctagtttttcatggctcccagagggaatattttctatgccgtatagcctgttttcacatgaagccattttggggtgttatagtaacagctggtgacttgat

SEQ ID NO: 314286 - DNA, 122 bp, Homo sapiens
ggcgcccatgactgcagccagcccgggcaggtcccccgccgcccctggccgcagcgccagcgccagctctaccagtcccctcagtgcggctgcgcgctcctccagcggccccgagcagccca

SEQ ID NO: 314287 - DNA, 122 bp, Homo sapiens
gtcacattcagacacttatttctggcttctatccggtggttgcacaccctcccaacatcgcgaatcttggagacactaaccaggatgtgctgccacccgctctgttccctgtgcagagtggc

SEQ ID NO: 314288 - DNA, 122 bp, Homo sapiens
ttgagaaaggggctgcgtccaatgagtggagcggtgagtacagcgcgtcgacggcggaggcgggaagggggcggaggccgaccgaaggcggctagggactggctgaagagggttagcgaaac

SEQ ID NO: 314289 - DNA, 122 bp, Homo sapiens
ttggccctgtgttcagggtctctctcccacttctaagagggtagtctatctcagccgctgcggggtcaccaacagagcctggacacaggaggcatctggcaaatacgcgctgcatgaatcaa

SEQ ID NO: 314290 - DNA, 122 bp, Homo sapiens
ggaaccctcggtgtgtcggacgtgagcttaggcaaagtgcacgtgctgaggccgccagaacgcctctgccatgcacaccagaaacccgtacctgcctgtgccatggactcccaatgacacgg

SEQ ID NO: 314291 - DNA, 122 bp, Homo sapiens
gacaggaatcaggagcgggacctgaggttgtgggtgaggcccaggaggcagggcctggggcgaggttggggtctaggaggcggagccagttccttgaggttagggccggaggcaaagcgggt

SEQ ID NO: 314292 - DNA, 122 bp, Homo sapiens
gttgcttctcctccagctcaaagttgacgacggggcgaagcaggctgctggacggcgtgccgccgcagagaaggaaatcgtggggagaagggggagaagagggcgccgctcgtcggtggaca

SEQ ID NO: 314293 - DNA, 122 bp, Homo sapiens
gcgcaggaaagcgcctttccagcaaggggctgctgccgtctggtcacctttccagaactccgactaagaaagtgaggatagaaatgggaccgtagacggagaggatcccagaggaaagagaa

SEQ ID NO: 314294 - DNA, 122 bp, Homo sapiens
cgcgccgcccggcgaggagtgggctggcggcggtagctgtcgcccgcttggttgcgtgaccgcggggtccgcgtccgctccctccacccttcgcccttcgcccttcgcctcgttccggcctc

SEQ ID NO: 314295 - DNA, 122 bp, Homo sapiens
gatcaaagtcactttcactgcagaaggatgacccctctaggtgaatgtagtcactgtggtcggacacaaccccgtcctggtcgctgtcggaaaactccacgtgtgctcggggctgctcatcg

SEQ ID NO: 314296 - DNA, 122 bp, Homo sapiens
gccgcagcctcccagggaaccggctccgcggcgcccctaaaccccggcgaggagccggagcggactcactcacccgcgcttctcctgagcagggaaagggccaaagcccggcccggatccac

SEQ ID NO: 314297 - DNA, 122 bp, Homo sapiens
ccacatgctgccggctcagctgaacaggctctgggacgtgactgcgctgggaggctggaccgagctggctcccgaggaggtccgcttaggcgcgggagggtgcgagggaggagcgggtgcag

SEQ ID NO: 314298 - DNA, 122 bp, Homo sapiens
attcttggagggtggcttgcggtctcataggcctcgcgcccggggaggagaggaggtggccgaccagaccgtgggctcccgggtctcccggctccctcaggtcctaaatctctcccattaga

SEQ ID NO: 314299 - DNA, 122 bp, Homo sapiens
acacaattcatacagacagccggacatttgaacgcgaagcactccgcatatttatggatgcgtcctgagcagtgcaagccgcccggctcggctgctgcttgtgagcaggagatgccctttag

SEQ ID NO: 314300 - DNA, 122 bp, Homo sapiens
cttctggtgggagggtggctccatcagtctcgggcccgaaatgaacttacctgggaaactcgcctttggggagagtgggttctaggagccccgtctctctttttcctctctgaaggaaactt

SEQ ID NO: 314301 - DNA, 122 bp, Homo sapiens
ttcctaattgggaaactctgttttaccttctctagagaatagacatgcaagtttatgctgcggtaggagagggacagttacccagaggtgcagagagagaagggaatctaggaatccacctg

SEQ ID NO: 314302 - DNA, 122 bp, Homo sapiens
tgactcccaccctctgctgcccccatacacacaccctagtctctcctcccagacccccttcgcaggggtctctgggctccaggactctccaggcttcgcaatgccagaaacttcgctttcag

SEQ ID NO: 314303 - DNA, 122 bp, Homo sapiens
gacccagaaacgcagcggggagagggggtggaaggcatcgaagcaggcagccttgcagcccggctgctgggtgtgacacacgaattcactctgctcatcaccatagactccaggcccactgg

SEQ ID NO: 314304 - DNA, 122 bp, Homo sapiens
tgggaacggcgttcgggatgtgtttggccccccaaggccaaggcacgaaggggtcccaggcgggtcgccagcggcgcggcttacaatggccggttcgacccagaacggtcgccgccgcaagg

SEQ ID NO: 314305 - DNA, 122 bp, Homo sapiens
ttttccaagagtgggttttcacgtttctaagatttcccaagcagacagcccgtgctgctccgatttctcgaacaaaaaagcaaaacgtgtggctgtcttgggagcaagtcgcaggactgcaa

SEQ ID NO: 314306 - DNA, 122 bp, Homo sapiens
tcatcaacctactggagcaacacgcagcctaggcctctgctgggaaaattctggaggtctcgagcccacgcctccccgaagatggtggggaagttcttgaacccttggggaagcccggtcca

SEQ ID NO: 314307 - DNA, 122 bp, Homo sapiens
gctcggccgggtccacgggggtcagcgccggcttgaggcaggcggcaggcagctcgccttcgcccagctccaggctggcctgcttgctgctgaaggagtcccgcaggctgagcagctgctcc

SEQ ID NO: 314308 - DNA, 122 bp, Homo sapiens
aaggaggaaactcggcgtggcagggcagcgggctggaagtgcaccttcccggggccgaggcgcccgctccctggactaatgacgccgcgtggggatcacgccccgggcgccctggggtgagg

SEQ ID NO: 314309 - DNA, 122 bp, Homo sapiens
atggttagaagctgcagacagtctttattgaccaccatcttggagggatggactttgcgacgtccaatgccaaattactgcccaaaagataaggaaagaatgagaatgcaaaacctggggtg

SEQ ID NO: 314310 - DNA, 122 bp, Homo sapiens
aggcaggccagctgcaggactgccagtgacaggaggaagtaggagaggaaatgatgcatgcgatagctaagaaacactataaatggctacatatctgtggtttctccagcaaaaatgcatgt

SEQ ID NO: 314311 - DNA, 122 bp, Homo sapiens
cagttaaaaactataatgtgttgtcttttgactggaccctggctgataacggaccctaagcgagccctcagggctactgacaatcctaaatctctcccccaagggactatttccctttcttg

SEQ ID NO: 314312 - DNA, 122 bp, Homo sapiens
ccaatgaatggcaccagcggaggaaaatcctcagacggaggcaagcagttatcggagatgcgaaaatcacaggggaggacgtggcacagaatagcgtggaacccacgtcacagcttgcgccc

SEQ ID NO: 314313 - DNA, 122 bp, Homo sapiens
gagcactaaacaatttgggcactcagcaagttataattcaaataaatataaaacacatggcgccaactttttcagatgactgatgctcaggaacagttgatgcctcctgactggatagataa

SEQ ID NO: 314314 - DNA, 122 bp, Homo sapiens
ccccgggccatggctctgcagcccaggaggagaggggcggctggtgggcagacggagggacggatgggtgggcagatgaatggacaagaagatgcacagagtcacaggtaattggacagatg

SEQ ID NO: 314315 - DNA, 122 bp, Homo sapiens
tcggccacgagccggtgtgggcaggacacacacctgcaggaccacaggcagcaccagctccgggaagccgatgcagtgtgcctggctgtgcaggtactccagggtgaggtcgtacagctgct

SEQ ID NO: 314316 - DNA, 122 bp, Homo sapiens
ggtgcgggctgtgtctgggtgtctcctcccctcctgcctcctttcctacaagtggggagtcgagtaggactgtcagccctaacttgcaacatctcggggtggtttgtgtgtgggggggtgct

SEQ ID NO: 314317 - DNA, 122 bp, Homo sapiens
gccttaacgtgaaggccaccatgtatgagatgtactccgtgtcctacgacatccggtgcacgggactcaagggcctgctgaggtaacacactccaggggtcacctccgggggtctgcagact

SEQ ID NO: 314318 - DNA, 122 bp, Homo sapiens
tgggaccacagatgtgtggcaccacgtcaggctaattttcttatatgtttgatagagacacggtttcgttatgttgcctaggctggtcccgaactcctgaaggagctcaggccatctgcctg

SEQ ID NO: 314319 - DNA, 122 bp, Homo sapiens
tgtaattccttcggaggggtatgtaccatttcattctcttctgttttccaaagctttgcccgcatggtttatgagcttcttcaaagaggacttgggcttcctacacaatctataaggtacag

SEQ ID NO: 314320 - DNA, 122 bp, Homo sapiens
ctgtattcggctctcactgcacccctggggagactgactctgcgtcagccgggttcccggcggcacaggctgcagcaccaaggttcctgggtggggtggctgatgccaatgcccagccaggt

SEQ ID NO: 314321 - DNA, 122 bp, Homo sapiens
gtagatggcagctggagaggtaaggatgcttcgggcagggccagggtgaccttggctgcccggtggtaaggcccaccccaccaggctgtgtgggttactgcccctctgggagccgggaagct

SEQ ID NO: 314322 - DNA, 122 bp, Homo sapiens
tgaactgtggggctcaagcagtcctcccatctcagcctcccaaagtgctgggattacaggcgtgagccactgtggccagcctagacctctctagctttgttagctttattgctcactgctgt

SEQ ID NO: 314323 - DNA, 122 bp, Homo sapiens
catcagcatcagcagcaagcgttaagcacggtagacagcatcaccagggtcaactcaggccgagtggagccgctcaacacggctgcacccagcccacaagcgctagaagccaggcacgcagt

SEQ ID NO: 314324 - DNA, 122 bp, Homo sapiens
ctgggccaatgaacggcggcgggaggtgaaatccggttctaaccggtccggggctcccagcgctataaaaactttataaaccccccggagcccgagcagtgtgaagaagaggcgagaacgac

SEQ ID NO: 314325 - DNA, 122 bp, Homo sapiens
agagccccgtgaaggctccgcagagcgatctaccccgcgctcttgtccgtgcccagaaagcgggttccacttggcagggattattttaaactgctaccagcaattcattcacctgacacccg

SEQ ID NO: 314326 - DNA, 122 bp, Homo sapiens
gagctcggtcgcgcatgctcagcgcaacggcggggaagactccagccgccagggggagcgcgtgccgttcttgcctctctggcctgcgcctcctgagccgagtagatatcccggagttccgc

SEQ ID NO: 314327 - DNA, 122 bp, Homo sapiens
accacacactccatcactccgagccgacccgacgctgctgctcctggtccccgttcctgacgaggatgcacagggtctcagcggtcccgcacttgaagctggctgacctcgctgcctacttc

SEQ ID NO: 314328 - DNA, 122 bp, Homo sapiens
gtccattctgagtctgtaagaaggtggagaggggcagccccagctgggtgttaggctttgcggagcctctgctgtctgatgtttggctccagcatcttcaaagcaggggcttttctcctctg

SEQ ID NO: 314329 - DNA, 122 bp, Homo sapiens
ccccagagggagtgcggctgtcggctggggggcgggacctgcccttcattggctgaaccgcgcagtattttggcacctgtgcgctggactcgagcgctccgattggagttagggcctgcttg

SEQ ID NO: 314330 - DNA, 122 bp, Homo sapiens
actcaatgtgcaggactcccagccaggggtcaggtcgggtgcggggcacagctctgaccccggggtgggagagaatccccccaagaggctggcatctgtctcccagacccttggagctgtcc

SEQ ID NO: 314331 - DNA, 122 bp, Homo sapiens
acgcgcggaggcggggactggggggcctgccgggcggcggtggcggctccgctcggcggccgcaggaggccattttagttaaggggccgctgaagggccctgaggcctccacgtccctacac

SEQ ID NO: 314332 - DNA, 122 bp, Homo sapiens
gagtcaatcaactgctggacgaggtctgtgctctttgttgctggcttttatccctccccgcggcgccccctcgcgcagcctccagactgttcagccggtgtccgcgggcgctcgctctctgc

SEQ ID NO: 314333 - DNA, 122 bp, Homo sapiens
cgagggagcggcagccgcgaccgcgggcaccgcgggagccccagcggcagcagccgccgccgagatgtcccggcgaaagcaaagcaaaccccggcagatcaaacgtaagtttgcgcgcgggg

SEQ ID NO: 314334 - DNA, 122 bp, Homo sapiens
gtgggaaaggggccagttatgcagacttgcgtgcgttcacaggaattggagatttctatccgagtgtgtcctgactggagtctgtgtgtatgtgtgtatgtgggggtgtctgtgggtgctct

SEQ ID NO: 314335 - DNA, 122 bp, Homo sapiens
aataaataaataaataaaataaaataaaaaactttctggagaggaagaactgcggagggtcggatgatccagtgacatacatttgggtatggcccaagtttctgcttccccattcgccaggg

SEQ ID NO: 314336 - DNA, 122 bp, Homo sapiens
gtggcccggcgttgggattgggtcaggcggtgagtgatatatgggatcccgccgtgcggccgagtgatccccgggtctgggctgcggggctgactgatgttcagggctttgctgatgggggt

SEQ ID NO: 314337 - DNA, 122 bp, Homo sapiens
ccaatagcaaaaccgggtgatggatccgggagcacggctggaggcttgggccaggaggcccgggaggcccgcggcgtggcagtggcggctcccagcgcggagggaaccattgggcgctgttc

SEQ ID NO: 314338 - DNA, 122 bp, Homo sapiens
ctttcaatgcaacagagctgtcaaatacaacatgatactttgaaagcctgggtcggagagcgtctcagggaagaaaagcaatacggattggcaagatcacctgaggaagtttcaaggcattc

SEQ ID NO: 314339 - DNA, 122 bp, Homo sapiens
gacatcacttctgatctgtgaaaggaatttttttaaaatgaaactttctatggcctacagcgatctaaccaggatcacagacacacattagtggagccccccatctccgttttcccgccctc

SEQ ID NO: 314340 - DNA, 122 bp, Homo sapiens
gcgagaaaggggtgagccagacgctccagtggtgcagcgcccagatatcgggcgtgcagtcgaggtgcgcgcacagccgcaggaaatggcgcgggtcccgggcgcaagcgggcgcagcaggc

SEQ ID NO: 314341 - DNA, 122 bp, Homo sapiens
agtgtagtctggcagcggtgccccggtggtggcggcggcggtgctgctgttgctggtgatcgtgtggtggtgttagcggcgatagtgctttccactgggctttggcttggtagccgctgaaa

SEQ ID NO: 314342 - DNA, 122 bp, Homo sapiens
gaatatcacgtgtcgttagcctggcgaatgagagcacattatagcagagagatccgacttcgaatcttgatcccagttctaccagctctgtgatttctgtcaagttatttagcctctctgag

SEQ ID NO: 314343 - DNA, 122 bp, Homo sapiens
tcgtgtcttgaggacagtctcgcccacctgccctttctttgcgtccaacttgctatgtatcgctttccctgtctctgtccctgtttctgcctgtgtctccgtttctgcctgtgtctccccct

SEQ ID NO: 314344 - DNA, 122 bp, Homo sapiens
gtttctggactctgctctgtccgtcatcccatttgcatgccggtacgattgcaactgccacgtcctatgccaaggcctgagaccggctcgtgtaaaccctccagcttgttattccaggcggc

SEQ ID NO: 314345 - DNA, 122 bp, Homo sapiens
gatccacacctccagcttcgtctttgacttagtgagattgcacacattgatgtatgtgcacgaaagggaccctgaagtctacagggttaaggacttctcacacactgaagtcccaaaccaca

SEQ ID NO: 314346 - DNA, 122 bp, Homo sapiens
gcagtgttgagtagtatataggtttgccactccaggctcagcagttcctcatgtacagtccgtatggacaaaaggaaacgtcagccaggctgctggagcagcccctttggtgcctaagtttc

SEQ ID NO: 314347 - DNA, 122 bp, Homo sapiens
tccccacccccagctgctgctccgccgccagactccccacccctctacctcacaagccgacgccctgctgctcctactggtcagtggggactggaacaccacagccggtcgggtcacgcact

SEQ ID NO: 314348 - DNA, 122 bp, Homo sapiens
atgctgctcgctaggagtaaatagaagttcatgtttcctcttcggcctcttctcccttctcgggacggaccccctcagctggtagttgggaagcagtgggcctctagccgcctggatttggg

SEQ ID NO: 314349 - DNA, 122 bp, Homo sapiens
agtaaacaggcaccttggacgggggagagcgtgtgtgtgatgggaaaatccggacccacgcgtgtgctgaaggcgtacggtgcttgccagattttcaacttgagcataaattggttgccatt

SEQ ID NO: 314350 - DNA, 122 bp, Homo sapiens
cttcaaagataaatacaagcagatcttcctgggtggtgtggacaaaagactcagtttgggcgctactttgcagggaatctggcatcaggaggtgccgctggggccacatacttgtgttttgt

SEQ ID NO: 314351 - DNA, 122 bp, Homo sapiens
gagcagtgcttggattcagcctcctgctgggtccttctgctggatacaggcaccaagaggcggtcgtggagcagggagctgcgccttcctggggtgcccggtggtgtgtagagaaaagctgc

SEQ ID NO: 314352 - DNA, 122 bp, Homo sapiens
gctcacaccaggggcgggatgggccggggctgcggcaggtgagctgagggcttggcactgcgcccatgtcacctgacaggcacccggaacatcagaaacagggaagcgggcccgctggcgca

SEQ ID NO: 314353 - DNA, 122 bp, Homo sapiens
aagtgcctactatgtgtgcagtatagaaagaagtgccctggagaaccaggtcgcgggaggcggagccagtcaacagggcttcaccgagggggcgaattctgtacacggttgtgaaggagggt

SEQ ID NO: 314354 - DNA, 122 bp, Homo sapiens
caggggaggccgggaccatcgcagtgacaatttattttcctgcagcagcggcagcagggacggttgctgcaggttcggggtcggccggcctgcgcgtgggcttgcgaggacgctgttcgtcc

SEQ ID NO: 314355 - DNA, 122 bp, Homo sapiens
tgaactcctgacctcaggtgatccacccatcttggcctcccaaagtgctgggattataggcgtgagctaccgcacctggcctgatgttgcagttttaagtaaggtagtcaggaacatattca

SEQ ID NO: 314356 - DNA, 122 bp, Homo sapiens
acctttgcttgggatgcggggagctgtagtctcttatctgcacccagcttgttagttgtacgcctgcaggactacaatctcagcacaaagcaggattgtagggcggtgcggatccctggagg

SEQ ID NO: 314357 - DNA, 122 bp, Homo sapiens
acgactctcactctcttagctcctctcctcaactcctcctcggccctatcttcacttgcccgggtcacagtgctgtcctcattcctaattatgaatcaaggctgtgggtcccttcccagact

SEQ ID NO: 314358 - DNA, 122 bp, Homo sapiens
atctgcttattttactcattccttgactcaagtaacttaacgtctctgtaatgcagtttccgtagcagtaaatggagatgaaaataattgggctttattcatatggtagttaatgcacacaa

SEQ ID NO: 314359 - DNA, 122 bp, Homo sapiens
gggtgctgcggacccggtccagggccctgactcgtccatgcctgcccagctggccccaggcgttcccctgcccagcccccaggacctgatgggccgtatcctggtgaagaacaagaagcggc

SEQ ID NO: 314360 - DNA, 122 bp, Homo sapiens
aaatacgtgtagtgcatggacggattctttgcctccatgcttccctatttcaaggagcagcgacgtttgctatttatctcccgctggccacgacggggcaccagagaaaaacacaggctccc

SEQ ID NO: 314361 - DNA, 122 bp, Homo sapiens
cccacggggcagctcagccatggcctccggggaacccgctctcggtgacagcgctctgaccgcggtctggagctgggctgaaactcaacatgtgtccagactgctgcagttcagaaccagct

SEQ ID NO: 314362 - DNA, 122 bp, Homo sapiens
agactttattgtctcaattgattaaagcttctttcctcttttttttctctttttttgagacggagtcttgctctgtcgcacaggctggagtgcagtggtgcgatcttggctcactgcagcct

SEQ ID NO: 314363 - DNA, 122 bp, Homo sapiens
gaagatccagtcccaatatgtcacctgtgcttcatctttggactatatctcaggtgtttacgtgtcaactaatgggagcttactgggttagaagtcaggacactgagtttcaatcctcactt

SEQ ID NO: 314364 - DNA, 122 bp, Homo sapiens
tggacaggggcacactcacactcactctggacaggggcacacccacacccacattggggccgggcacactcacacccacctagggcagggacacaactcactctggacagggtacagtcaca

SEQ ID NO: 314365 - DNA, 122 bp, Homo sapiens
ctggggttgtagcggaacttgctcactgcagtaggggacaggctactgctatgcctgcagcgcctggggagctaccccacgtcacccaccgcccggccccaactcactctcgatttcccgga

SEQ ID NO: 314366 - DNA, 122 bp, Homo sapiens
ggaagcggaaacggcgccgctccagaccccgcccggcctgcgcggcggggccaggcgctgcgggcagtcatttccttagcaactcgccccgcccgcagggacaacggcccgcccaacggccg

SEQ ID NO: 314367 - DNA, 122 bp, Homo sapiens
atgtttctttttactttcaaaaaggtactgtaccccacgctatagtgagtttgaagagctcgagcggaaatactggaaaaatcttacattcaatcctccaatctatggtgcagatgtgaatg

SEQ ID NO: 314368 - DNA, 122 bp, Homo sapiens
ggggcagccaggagcagccaccagtcggaagcaaataaacaattcaggtgccagaggagccgctgacctaaaaaaacccgccacagggtatttctgggagattgtatgagaatttaattttg

SEQ ID NO: 314369 - DNA, 122 bp, Homo sapiens
ttaatccatttaccctcatatttccagactagatcctcccgtcctcttttgctcctggcccggctgacaccctggcatggcctctgagctctctctcacagacgcccttacctctcaccccg

SEQ ID NO: 314370 - DNA, 122 bp, Homo sapiens
tatcttttcgtttctgtgtggccacagcaggacttggtttcctgtcctggaagaggacttcgagctcactctgcttcctacagtccctcccagtctctctcctgaaatttctgggaagaggc

SEQ ID NO: 314371 - DNA, 122 bp, Homo sapiens
ggattccatctcggcccagggacacccccgggcctggaacagagctgctctgggaaaacacgggtggagggggatagggaagctgtgcattgcggcctctgcagactccactcctccctgag

SEQ ID NO: 314372 - DNA, 122 bp, Homo sapiens
gtcctgatatggagagagagggcgggctggtgtgtgtctcagtgagcgaggctgggggaacgcgcctgggctggctcctccccgaacttgcatcaccagtgccccctctctccacccgcctt

SEQ ID NO: 314373 - DNA, 122 bp, Homo sapiens
tgttagtcactggaacttttcattgtggtcgaggttcccaatgcagtgtttttctggaaacgcagtttagtgtacttgttggaaggaaagattgttgagcatctcttgtggacctggtgtgt

SEQ ID NO: 314374 - DNA, 122 bp, Homo sapiens
aaggtgaagaagttccggacccatgtggaggagggggacattgtgtaccgcctctacatgcggcagaccatcatcaaggtgatcaagttcatcctcatcatctgctacaccgtctactacgt

SEQ ID NO: 314375 - DNA, 122 bp, Homo sapiens
aaaaaaaaggagggggggcagccccttcgggaagagccaatcaggggcgagcgtctctggcgtcagcgccaggcccggcgcggattggcggcgcgcgtctcccacttcccctcggaggaaag

SEQ ID NO: 314376 - DNA, 122 bp, Homo sapiens
cccatccccacaactctcctcacgcgctcagctccgcagactgccaaacccccacccctgcggagcaactcggggaactcggccccctacgtccaggcctgccctcccactgggcctgttgc

SEQ ID NO: 314377 - DNA, 122 bp, Homo sapiens
ctgtctcaaaaaaaaaagcagattattaggaaacggtagaaatgcccagaggaactaaagcggacctatgtttgctggctttgaattcactgctgggaacatgtggaaactgcttcagcaaa

SEQ ID NO: 314378 - DNA, 122 bp, Homo sapiens
tcagctgaacaggacctgcagctctgtgttggggggtgccctccaagtcagcgactctctcgatcagagcgcaatcgtcggggagctataaccattgatactgccagacggctgtgcaagga

SEQ ID NO: 314379 - DNA, 122 bp, Homo sapiens
caacttcagctttgttcagggtagttttaggattctatgtaactttgttccccctttttgcgaattaggaatgtagtccttctatgtttgtatacttaaggacttttatttaataaacagaa

SEQ ID NO: 314380 - DNA, 122 bp, Homo sapiens
cttaggattcagcttggggtggtccattgacttctccagggagctcctagcgtttgcggccgcgtcacatctccaacctttgcctcgccctgcctgtcatcccggttttctttcttgcccgc

SEQ ID NO: 314381 - DNA, 122 bp, Homo sapiens
tgcccgagggcgggcggggtgctgctctggcgggctcctggaggcctgggtggcgcagcccgggggagcggagggaggaggcggccctgagaccgagccgcgcggcgggtgggctcccctga

SEQ ID NO: 314382 - DNA, 122 bp, Homo sapiens
ggcgagaaactgcagggcgctggggctagggtttgggggttccctacctaagaggtgctgcggaagggctgttctgccctgcgggcacctcctcctgcacccgcccccgaggtggccttgcg

SEQ ID NO: 314383 - DNA, 122 bp, Homo sapiens
tgggaggaggccctcgctgtgccaagtcattttcctgccgcaccctaccctgagcatcaccggcacccactcgccaggggcccagctctgcccggatgcagcaccctgccagctgacatgag

SEQ ID NO: 314384 - DNA, 122 bp, Homo sapiens
agccttgcacgtggtaggtgctcggcattcgttgactggatcaagtagggcgagggagcgcggcccgttccggtttgaaactgctctggacgccgaattagtgtttggcagcgcctggtggt

SEQ ID NO: 314385 - DNA, 122 bp, Homo sapiens
ccagcataaagttgaccccactgtgaggaccagcagacctcacaagaatgaccccatccacgcctactggggctccacctgcccatgactcaccacacccaagcctctgagcccagtggact

SEQ ID NO: 314386 - DNA, 122 bp, Homo sapiens
cctcacaccaactaaattagattggggtgaagaggcctgggcatcactgccaaggtaaatcgaatgtgcagccagtgttaagaactactgatcttactttatgtgctcctttcccgtgtctt

SEQ ID NO: 314387 - DNA, 122 bp, Homo sapiens
tcgccctgggccgtgctggtgccccattcgggacggagcggtggcccgtcagcacttccacggcctcctcagcaggccagatgggcagggccggcctggtgtctccccgcctggccgcgcgc

SEQ ID NO: 314388 - DNA, 122 bp, Homo sapiens
ctaccgtttccagtcgagcctctgcttcatccttcacgatgtagccagagtcatcagacacgagtctgactatatcacctgtactaatggttctcctctatctgtaacagagacttgagagt

SEQ ID NO: 314389 - DNA, 122 bp, Homo sapiens
agagaagcactggctccacccagtacctgcctcctcatgccaccctctcaagccaaaagccgggggaagcccaggcaccttgaccatgaccgcccgagactcacacttcttctttctcatca

SEQ ID NO: 314390 - DNA, 122 bp, Homo sapiens
caatacacaccctgtatacccacatgcatctatacaacacgcaccctctacctacacatacgtctatacaacatgcaccctctacccccacatacgtttatacaacacacaccctttacccc

SEQ ID NO: 314391 - DNA, 122 bp, Homo sapiens
agtgaggagtgcctctgcccacccaccccgtctgggaactgaggagcgcctctgcccggccgccccgtctgagaaatgaagagcacctctgcacagccgccccatctgggaactgaggagcg

SEQ ID NO: 314392 - DNA, 122 bp, Homo sapiens
agcttctgggtaggtcgcgggcgcggcgccccctggggacctggcagcggtgcctttgcgcgtgggtgtgtgtttcattagtagccacagtcacttatggagagctccttttgccaggcgtg

SEQ ID NO: 314393 - DNA, 122 bp, Homo sapiens
cctccgcccgggagggtgtgtaggagaaggccaggcgtgccgtccagaagaacttgtactcgccaggaatggggtggatggcgcacaccagcatctccaggctgatgtacaggatgcgctcg

SEQ ID NO: 314394 - DNA, 122 bp, Homo sapiens
gagaactcagacctcaaacctaagtctcttgacagccaacctgatactctctctaccattcggagagaatctaacctttgttcttcttctaaatgaatctaaagtttttaaattaaatgcct

SEQ ID NO: 314395 - DNA, 122 bp, Homo sapiens
ctgggcggcagagtcgctctcgccgggactccgtcccgcgctgcgccttccctgcgcaggcgcagtcgtttcgcgtcagcaggccccacatcctttgtaaggtctcccagggcgccggagcg

SEQ ID NO: 314396 - DNA, 122 bp, Homo sapiens
caacagctcgcagcagagccggtttttcactccgggtcccgacccgaaggagggagttcccgacccaggctccgcaatgagggtgcacataccaggcctctggccctcatcgcagacaaggt

SEQ ID NO: 314397 - DNA, 122 bp, Homo sapiens
cgtcgtctctatggtggcggcggatttggagggaccctacgaaccaggagtcaggcgagccgatctggggctgcaggtgttacctctgatctaggccgggggcttcagggatccgagccgag

SEQ ID NO: 314398 - DNA, 122 bp, Homo sapiens
tttcatttggtcttagccaaaaggccgagaagcgatggttatcattttcgaatgtggatacggtgcagagaggcaaagcgccctacccaagaccccagaggcgagtcctttaggcttaacct

SEQ ID NO: 314399 - DNA, 122 bp, Homo sapiens
ggctgaacaagcaccttcagtgagctctggattacaacacagctatgaaaagaagccagccggtgctctccctacccatatggagagattgccaggcagattccaaagtggaaaagtcagag

SEQ ID NO: 314400 - DNA, 122 bp, Homo sapiens
tgggctccgggacgccgccgccgggggaaaggggacatctgggctgtcagagcggggctgcgcctagcttgggacaacacttctgttccaatttagggagaggaagtctctatccggaggaa

SEQ ID NO: 314401 - DNA, 122 bp, Homo sapiens
gacacattagactcaaggtctgcacagaacaaaaaccccttcaagtggaagcagcactcacgcttccttcccttaccctttggaggacccagtttcccggtcagtaactatccttgcccgaa

SEQ ID NO: 314402 - DNA, 122 bp, Homo sapiens
agccccatgctgtttcctgcctgtctgccctgctgcccttcatggtggcatcttcactcacgcacgatggctgaggcctcacctctgtgttccaggtggaaaaaagggaaagaagctggggg

SEQ ID NO: 314403 - DNA, 122 bp, Homo sapiens
ctaagtgcgcaggctcctggaaagttgtcttcacttccgggccgcggtctagggcggctacgtgtgttgccatagcgaccattttgcattaactggttggtagcttctatcctgggggctga

SEQ ID NO: 314404 - DNA, 122 bp, Homo sapiens
tgagataaaggcgggctcagggaaaacaaagccctagaccacaacaaggcaacaccttctcgcaccccattttcaccttccaggcgcgttccttcctgctatccgggcccgctctcccgccc

SEQ ID NO: 314405 - DNA, 122 bp, Homo sapiens
tttgaatgagggtgggtgggtagaaggataacaaaattactgttagtgtttctttccttacggaaaaagatgtgaatcccagccttatttcagggaagcctttgaagctatgatggacataa

SEQ ID NO: 314406 - DNA, 122 bp, Homo sapiens
agagtagaaaaatagtcacaaacgcactgataatttataaaacatcctgtctctgtctctcgctgtgtgactctggacaagtcatttaacctctctgggcttcagttttttccatctgcaaa

SEQ ID NO: 314407 - DNA, 122 bp, Homo sapiens
gtacagcggccctgcggctggcgcggcggacgggatgaggcgctgcagtctctgcgctttcggtaacttccgggccctggcgtctcgtctccttaccctggggctacccttgccccgtccta

SEQ ID NO: 314408 - DNA, 122 bp, Homo sapiens
ctttcaagccttgaaagtcaaggaggaaatgtattgaaaaatagtttactgtaatgtgaacgaagagaaatgtctggaattcttactgaaaaattgaccctgagacaatacacagatgtgat

SEQ ID NO: 314409 - DNA, 122 bp, Homo sapiens
ggggggtagaagggcggggtgggaagcagaggtgggaggggtcgaggttggagcacctgtcgtctgcatgacgtggacggctggttctggttgtattttaaatgaaatctcatcccagcgta

SEQ ID NO: 314410 - DNA, 122 bp, Homo sapiens
cctctggccgccctggacgagtcttcacaggttatgctgggtggcagtgagttatgaaggcgtatcctaatctctaaagtaaaactaaacacgatcactaagcagagtataggttaaaaagc

SEQ ID NO: 314411 - DNA, 122 bp, Homo sapiens
gccgtgcagcccctgcctcctcactggtgggaccctgccctgctgtgcagtggggtccttcgtgctgggatctttgtggtccccgttcttggagagatgcccggggcggcagacaggaaggg

SEQ ID NO: 314412 - DNA, 122 bp, Homo sapiens
tgttttcacttccgagtgagccgaagatgctgttggacagggagcaggcaaatcagggaccgtcccgagttatccggtggtcggaaggcatctcgtccttaacaggtaccgaccgccgtgcg

SEQ ID NO: 314413 - DNA, 122 bp, Homo sapiens
gaaaacatggaggattgccagaatctcttgaagccatgtagcttatgtgagaaaagaccacgagacgggaacattattcatggaaggacgggccatcttgtcacttgttttcactgtgccag

SEQ ID NO: 314414 - DNA, 122 bp, Homo sapiens
ttttctcctcctccagccacactttgtcaccaactgctgccaactcgccaccactgctgccgacctcgcaaccactgctttgtctctgaagtaggttctctttaagggacaccctagatggg

SEQ ID NO: 314415 - DNA, 122 bp, Homo sapiens
ctgcccccctgtggggactggggtgagtgctcttggccagagggtgggtggcagacccttcgtgcagcccgttggcctgggctctgtacccgagctccaagcctgccaggatggtgggggat

SEQ ID NO: 314416 - DNA, 122 bp, Homo sapiens
tccatctcctctgcctcccaagtcacagagccccaggtgccacaatggctgtggagtctgcggtgcaacctcattgcaaatatttgtatgctcggaagaaaaacacgagtacaatgtcctat

SEQ ID NO: 314417 - DNA, 122 bp, Homo sapiens
ggcgttccaccggtcacctctgacacagcactgcctggggcccgaggcccggtggccccgcggtttctcgcgccaccaccccggggactgacacagcccgtgaaggctgggccaggctgggg

SEQ ID NO: 314418 - DNA, 122 bp, Homo sapiens
caaaaaaaaaaaaaataccatcgatataatgcaccctatcaacaggctacagaagaaatacgacgtggtcaaaccaactgatgcagggggcatgtgacgaagttcaagacccacgcgtggta

SEQ ID NO: 314419 - DNA, 122 bp, Homo sapiens
agttgatgtgaaatgcggattccctatgagacggaggacattgcatgtctcatcccatcacgaccgtgtgggtctcgttatttcataagagagggggaaaatgtgaattggaattttatttc

SEQ ID NO: 314420 - DNA, 122 bp, Homo sapiens
ggagggcgtgtggagggacgagatctgtgtcagaacgtgcgtgtgagcggatacaaaacccgagagaggcgtgagcagcgctgtgtttgcgagcgggagcgaggggcgccggctggggtgtg

SEQ ID NO: 314421 - DNA, 122 bp, Homo sapiens
gagcgtcgcaggcaccgccgcgcggagatgcgatcgccgtccctgcgaggccccggggcccgcgctcgccgccagccacgcctgctccaaggctcctcctcgccagtctggccctggaacgg

SEQ ID NO: 314422 - DNA, 122 bp, Homo sapiens
gtcaaaggggacccctgatcagtattctagggactgtcttcccctccatttcctcagagacgtcattccttaattgtctagagagaagagggggccctcagaggaaactcaggaaaactcat

SEQ ID NO: 314423 - DNA, 122 bp, Homo sapiens
agcattgcgtaactccctgtttggttctgttctgatcaccggtgcatgcggccccagttacgtagcccccacttgcacaatgtatcacggccctttcacatggaccccttagagttgtaagc

SEQ ID NO: 314424 - DNA, 122 bp, Homo sapiens
ggcaggggcaggcgccagtgacgcaatgactgcaacatgccgccagggtgcagcagagcccgaccccgggttgttccatccgcagcaaacaattcctaactcgctccaggtcttccttctta

SEQ ID NO: 314425 - DNA, 122 bp, Homo sapiens
ttggagtcaggccctggaggggcgagccttgctcacagggtggggatacagccgattacccgccctgtgctttccgatggcttctgcggggcgagcggggcctggccggggggtgcgggcgg

SEQ ID NO: 314426 - DNA, 122 bp, Homo sapiens
cgcaggaaggggcatgggtggctaccgggacggtcattttattgagatgattcaaggagccgcagacgcggggcaggaaactccgggggagccgtgctcgggttctgcagggaaacctcggg

SEQ ID NO: 314427 - DNA, 122 bp, Homo sapiens
ggaccacgagcccgtcccttccctgagaggccctcctaccaccgccgtcccatgcccccgcgacgacccccaggccgaaccccaggccccgggccggcccacagccccgggcctcgcggctg

SEQ ID NO: 314428 - DNA, 122 bp, Homo sapiens
cctgaccggctttttgtccgctgtaggggagggacagagtttgcagaggtggggccgacacgtgtgtgctctccaggcctgcagaccctggatcatcctcggagtttgctgcattctgcccc

SEQ ID NO: 314429 - DNA, 122 bp, Homo sapiens
ggaatttatagcttctctggctgaggcctaggcccctccctctaggagcagctgtcagcacggactacataggggcctccaaagtactgagaggagccatctagactattccccctcatatg

SEQ ID NO: 314430 - DNA, 122 bp, Homo sapiens
gctgcagagctggttccggatggtgctggagcgtcggcacttcctgcagatgaagcgggccgccgtcaccatccaggcctgctggcggtcctaccgggtccggagggcgctggagaggacgc

SEQ ID NO: 314431 - DNA, 122 bp, Homo sapiens
ccgagaccccctcggggtgtgagagcatcacagtgatccaaagcaggagcagtccccacccggcggtggtcagcttggagtggtcagacggtgcccgagttgtcctctgtcctctgtcctcg

SEQ ID NO: 314432 - DNA, 122 bp, Homo sapiens
ttatatgggggcatggattcagcagaagcggaagagccaaggatccttcgagtcgttctgcgctgagggtcagggaggtcaggagacaaggcaggaagtcttaaatgagcaacgaacggcca

SEQ ID NO: 314433 - DNA, 122 bp, Homo sapiens
tatcggcagaaggcaacatctgcctaccctgacatcaacaatggtaggccatttaggctgcggccccctccccggagctgcagacaacagctccctgtattatattttctcactcaattagc

SEQ ID NO: 314434 - DNA, 122 bp, Homo sapiens
gggaagaaaacatcggcgactaagaaagttcaagttgtacaggacccgggtttttggggtcggggtcacttctgctctgcgtgactttgaagaggaagacctgcggttttttccagtggatt

SEQ ID NO: 314435 - DNA, 122 bp, Homo sapiens
caccgcccggccaagagtgcgtgggcggcggcgcgcgggtgcgatcgcggagctgtgaggcgcaggcagggctctggggcacctagagaccggggccggagacgtggcagccgccctgcccg

SEQ ID NO: 314436 - DNA, 122 bp, Homo sapiens
gccacccccgcagagcccgggggatgcagccaggtccagcggcggcttgctggagtaccacgtgcttaggaggcggtccacctgctcccggctggagattgcgcgcaggtgggccttcccac

SEQ ID NO: 314437 - DNA, 122 bp, Homo sapiens
gaatccaggtgagggctggtccctggtggctcatatgtcactgagtgccctgagagaacccggagtcctgatgagaaactccctgtttttggttaccttggctatcttaaataaaaatgata

SEQ ID NO: 314438 - DNA, 122 bp, Homo sapiens
cgatcagcttctgaacaaaaaagctgactccctagccaggtgttcagccctcttatgatacgctcctaattcatctttcatgctgcatctccctctgcaggcctccaaataatttatccaca

SEQ ID NO: 314439 - DNA, 122 bp, Homo sapiens
atcctgctacatttcttggttccctgaccgggaagcgaggtaattgacggacggtcgaggcggccccttaggcggcttaggcctgccctgtggagcatccctgcgggggactgtggccagct

SEQ ID NO: 314440 - DNA, 122 bp, Homo sapiens
aaaaagtttgctcccccttgtagacaatttcttatcttccagttcacaaattctctcttccgtctttattccgctgctaacattgtccactgagtttttcatattggttattgcatttttta

SEQ ID NO: 314441 - DNA, 122 bp, Homo sapiens
aagcgtggctttatttggaagacggttgaatttcttttgcttcctcgacccagttagtaacgacaagaaagatactgaatatcgccctccgaaaatcgggcgcatttgaactcggtgaaaag

SEQ ID NO: 314442 - DNA, 122 bp, Homo sapiens
tgacctcgtgatccacctgcctcggcctcccaaagtgctgggattacaggcatgagccaccgtgcccgtcccttgacgatcttttaaaaaggccaatttgaccatgttggttccctccttcg

SEQ ID NO: 314443 - DNA, 122 bp, Homo sapiens
actcctgcgggtgcgaggggcgacgtcagccccgcgccgttctgtcctgggaacccctttcgatcccctaccctgtagggccactcacttctgtgaattccgtggagccaatgagcccaaac

SEQ ID NO: 314444 - DNA, 122 bp, Homo sapiens
gaagcagaaaggagggaggaccccacttttaacagagcagtgattctgaagccacggacccgataaggacctcagcagagccgagggaggggggaactcagctgtggcctagacgagcaccg

SEQ ID NO: 314445 - DNA, 122 bp, Homo sapiens
aacctgagctgctccaggcccagcagatggaaataacctccaagaataaccggcccgcaccgcacgcctctcctgccaccgcggcggggcctgcacttccttcctaaactccccgggacagc

SEQ ID NO: 314446 - DNA, 122 bp, Homo sapiens
aaacaggaagtgggcgctcagagctcgggggcggcgctcaggtaggttcctctggggactcggggcttccggggtgggggtcccttgttaggagcgggagtcctcttgtggaagtgtgttag

SEQ ID NO: 314447 - DNA, 122 bp, Homo sapiens
atgtgtggggctgggcaactagctaagtcgaagcgtaaataaaatgtgaatacacgtttgcgggttacatacagtgcactttcactagtattcagaaaaaattgtgagtcagtgaactagga

SEQ ID NO: 314448 - DNA, 122 bp, Homo sapiens
acctctcaacatagcattgccacacggtaacatccgtccatttacaatgtgcttggttcacggcagaggttgaatgaaaaagcttgcatttttcttttagtacagaaagtgcagccaatcaa

SEQ ID NO: 314449 - DNA, 122 bp, Homo sapiens
tggagcggtccgtatagaggctgccaagccgagcggccatgggaggtgagctgttgtcggcgttttgagcaatctgcgggcggacgcggggatcactcacccgcgatgacgaatttggccat

SEQ ID NO: 314450 - DNA, 122 bp, Homo sapiens
ttcggtgacgttgcaggggccgcggagctgactatccccttcgctggctgtgattgcactcgctccctccatcccgcccttcgcatttcattcattcgctgcaagcagctggagcttggcaa

SEQ ID NO: 314451 - DNA, 122 bp, Homo sapiens
tctggcaggcgtgtagccccgccgcgggacgcagcagacccacccaaatacgtgcttgtgcgggtggaggattatcaggtaacacaagaagtgttgcagacctcctgggccaagggtcgcat

SEQ ID NO: 314452 - DNA, 122 bp, Homo sapiens
aattctgggaagtggagtccatttgctctgtggagtcgtgggaactttggctcaggcaggcggattcgggggattctgggaagtgtagtccagacgcctgtggcatcatcgacacttccggt

SEQ ID NO: 314453 - DNA, 122 bp, Homo sapiens
tgcccagctgtcctccccatgtcgtgccggagcaggcagtgaccttaaagagacagcgcccgccgcccctggcgcccggctctgggagcggcgtgccgggcgcagggcagaaggccctggcg

SEQ ID NO: 314454 - DNA, 122 bp, Homo sapiens
ctcacccctgtggcggaggcctgcatgtgaccctgggccagctaagctggtccttagacgcgtgcctctgcgtctctcacttcctctctttgttggagggggagggacggagaagaggagtg

SEQ ID NO: 314455 - DNA, 122 bp, Homo sapiens
gatggcggaggggcgccccgaggcctccgggagagcagcttggggagcggcagcagggcacgccgggaaaggcgcgaggcactctgggaaggcaacctaggaagggtggggccctggggcct

SEQ ID NO: 314456 - DNA, 122 bp, Homo sapiens
caatataggaaaatcaacttaggaacaaagataatgagagcgtcggcaagcccagacattcgcttttaactaaagatactgtttggggtacatccttctatatcttcatgatggatgttaaa

SEQ ID NO: 314457 - DNA, 122 bp, Homo sapiens
gggaggttccacatcactgttttggctgagctgtcattggtaatttcccagataatggaacgcatgttaattgcttaagtggaatgacaaagcattcaagtttgctctctcccaaggagccc

SEQ ID NO: 314458 - DNA, 122 bp, Homo sapiens
gtatgagccgctctctccagcaggccatgagctccttgaaggtaaggatcatgctttgttcgtgaatcattccacatatgattcatatgattcatagctggctccacacactgtgctagggc

SEQ ID NO: 314459 - DNA, 122 bp, Homo sapiens
tctcccgcgcccggttctccctcgcagcacctcgaagtgcgcccctcgccctcctgctcgcgccccgccgccatggctgcctcccccgcgcggcctgctgtcctggccctgaccgggctggc

SEQ ID NO: 314460 - DNA, 122 bp, Homo sapiens
acatttacatattcagtgtcagcagctgctccctagcacagagaggacagatctggaggacgaagtaagggaaggagtacaggtcaactgagaggcggaggtgggcctcccaagcgaaggaa

SEQ ID NO: 314461 - DNA, 122 bp, Homo sapiens
gggcggggccgcgacgcgaggagcggagcaggaaggggcgaggcagccccgcccccggggcggtctcccgggacggccccgccccttgcccgcttccgcgtcagtgcctcaccaccacctgc

SEQ ID NO: 314462 - DNA, 122 bp, Homo sapiens
gccactcccgcttaaacttggcaggagaggagacggaggtctctaggtggtccagaaagccggcctagaagtttgtgtcccgatccctctactaaccggcctgtctgtaggcatcttccttt

SEQ ID NO: 314463 - DNA, 122 bp, Homo sapiens
tgggaggaagtgaacaggttctcagtggagttaataacccaggtgcctccagaggcaggtcgtctccccctcttagctccctgcaaggtgccagggtcttctcccaaatccttggccccagt

SEQ ID NO: 314464 - DNA, 122 bp, Homo sapiens
tccatgtaaacatggatatacttaactttgtgagttaaatcactcaaattatccaccaagcgctacaggcgggaaattgccagggatggaaagcagctgaggctccatttggcttcgcggct

SEQ ID NO: 314465 - DNA, 122 bp, Homo sapiens
aggcacctgctgggtgctcactggctccagacgtggatctgcagctgggaatcaagtgatcgagaccttcaattctggcgggggtggggatgggtggcgacagtaaccaaattcacaagata

SEQ ID NO: 314466 - DNA, 122 bp, Homo sapiens
aggcccatccgtgggtgcggcgttttgcggccaggggcccccatgttttgggaggctttgcgcaggaagatgcacctaagtaatagtttcgccaccgctgggttgatgtagttcattcaaac

SEQ ID NO: 314467 - DNA, 122 bp, Homo sapiens
tgtcccaatggccagggaacagggatggtggatagccagagaaagtggagcagttgggtccgaaatgcccagtgtctgggttcattcagccagagcattgccaagtttgcaggaggcaaaca

SEQ ID NO: 314468 - DNA, 122 bp, Homo sapiens
agggagcagactatgagcctcagacgccggggtcccagggaggtcagaggctgcgggcagcgacagctgtcagcggcccagctccatgcagcaaggcgccgtcggggctcccggcactgctc

SEQ ID NO: 314469 - DNA, 122 bp, Homo sapiens
tggggaggtgccggagcccggtgcccccgggagcatctcctctacctgagcgccacatggcgaccacgcgcagttttcccaccttgcggatggagagatttgtctcagccagagagatccag

SEQ ID NO: 314470 - DNA, 122 bp, Homo sapiens
gggtcccgcacagcccggggtcggggcgcgctggggcagggcatggggcggaggcgggcgcggcctcagggagccttcgcaggccctgccaccgcctgctccccgccggccagcgctctcgg

SEQ ID NO: 314471 - DNA, 122 bp, Homo sapiens
ggccttcaggtgcggcgtgagaggtaggattgcatccgcgctgccacggggctgtttctccggggcatttctaggcactttgttcggcttaccctgcagcacagaattagtactcctgtcag

SEQ ID NO: 314472 - DNA, 122 bp, Homo sapiens
tcttggcctcctggagcaggaggaaggacagggtcgggggctgccgctgtctgcgtccaacgggccccagtcaagcttccccggctgcccagacgaaatgggagcccggcctcccagctgcc

SEQ ID NO: 314473 - DNA, 122 bp, Homo sapiens
gtaactcgggctgtcgggcccgagaggctgaggagcggagaactgacccgccccgggaggcgcgtctgttccgctgactctcagccccgggggaagcatagctctgctttggatcttttctg

SEQ ID NO: 314474 - DNA, 122 bp, Homo sapiens
gccggggtgcggcctggatgagcggagatctccgcgccttgggctcaaaggtgcggggtgcgctctgctgccgagcccctgctcgctcaggaacactggccacgccgtcacgccagccgccc

SEQ ID NO: 314475 - DNA, 122 bp, Homo sapiens
tgcacgctcctctccgggaggctgagcagcaaatgcttgcggatctgcgtggggagcagacgccgcgggggcaggggcctcgagaacctctggaatcaggggtcagcctcgcagggccgtgg

SEQ ID NO: 314476 - DNA, 122 bp, Homo sapiens
gccatcacctcttctcccccgagacattcccattcacgcgcatggctgatcacgtgcacccgggtgctctcgggtgagccaagtcagctgccgaatggttcaattctttataacagaaacaa

SEQ ID NO: 314477 - DNA, 122 bp, Homo sapiens
aacgggaatctctcgggagatgtattcttggtaacaggctcacaccatgtagagcgcttccgtttagaatcacgttcttaaagaaggaaacgcattcggatagggatgaggagatgcagacc

SEQ ID NO: 314478 - DNA, 122 bp, Homo sapiens
ccttgcggaaaatgctgatctcagtcgcaatgctgggcgcaggggctggcgtgggctacgcgctcctcgttatcgtgaccccgggagagcggcggaagcaggaaatgctaaaggtagaagca

SEQ ID NO: 314479 - DNA, 122 bp, Homo sapiens
gatgcgcctggaggctccttgacttgccctcacacttaatcctgtgcaaactttttaccccgcctgtcggggtgggggagtgggggagattagaaacaaggggtagaaattcctcgaaaggg

SEQ ID NO: 314480 - DNA, 122 bp, Homo sapiens
ggccccaaggagcaggggcgaacgtgggcgcctcgtgccctgattggccgacggggcgcgcgcggcctggaggggcggggcggacgcagagccgcgtttagtctatcgctgcggttgcgagc

SEQ ID NO: 314481 - DNA, 122 bp, Homo sapiens
tctctttgtcagaacacaaagcattcatacactcccgagcagggagagctggaccaggagcgcccctccgcgctgcccttgccagaacgccagtggagctggcagccgagtgtgccgctccc

SEQ ID NO: 314482 - DNA, 122 bp, Homo sapiens
tcactgcatccaggactctgtcagctctgctgcccacatgcacccctggcctcagcatcccggttcccccagacaagagagggcaagtcagccaggaactgcctcctccctgctctacagct

SEQ ID NO: 314483 - DNA, 122 bp, Homo sapiens
agtctgcgacccgaaggggaaccccaggctgggaagtcgctgggagccacgcccatgccgcgaagaggctggccgcggcctttcctgaggctacaaaagtctcgaagtttctaactctccag

SEQ ID NO: 314484 - DNA, 122 bp, Homo sapiens
caggcttccgctccctgcctgctcccctttccagcctcccgccccagaaacgatctcgagcgttgccagtttgattccagagccccactcgggtgggttcttttgtttctttgttttaatga

SEQ ID NO: 314485 - DNA, 122 bp, Homo sapiens
ctgagaaagtaaaacacacgagtgagcccaggcatcctctggggtttggtcagtatccttcgagctgctgggcgtctgtgcaccgcgggttcccctgggccccctaatgggaagcgttctcc

SEQ ID NO: 314486 - DNA, 122 bp, Homo sapiens
cttagttatatgcaaacatgtatcactgccccaattcaccaaacttccagtttgaggatccgggtctcatcaagacaatatgtaaactgtattcatttctttcttggtagtggtgcaaatgt

SEQ ID NO: 314487 - DNA, 122 bp, Homo sapiens
aagggtggccggttctttttcttgggtaggtgacagggcgccatatgccaccccccagggcgcacacgggagctccggcccagggagtcttcgaacaaagggaagagagggcccgggcgctc

SEQ ID NO: 314488 - DNA, 122 bp, Homo sapiens
gccggcgtccacgctaaacggcgccacagtgttacacgtgggcagggctgccggcgtccacgctaaacggtgccacagttttactctcttggaactgtcccacatgggtttctctttctttg

SEQ ID NO: 314489 - DNA, 122 bp, Homo sapiens
acctgcctgcctcggcctcccaaagtgctgggattacaggcttgtgtcatcgtgcctggccggaaggcttagaaattttgccagtcgcttttaaacacaggcatttttgaaaattaagacat

SEQ ID NO: 314490 - DNA, 122 bp, Homo sapiens
gccacatggtgcacgtggatgcgcttgttccgaacacacgcacggccctctcggcctcaccgtcacatgcacatgcatagaaagtcagcaaaagcaacaggaagtaaagggagagcctttga

SEQ ID NO: 314491 - DNA, 122 bp, Homo sapiens
ccaactcgagtcgccgccctcctcttatcaggggaaggctgagaggcccctaagtgatcccgagaaccagtcagctcagtctggtagtgactgtcccttatctgagggcctcaggcccttcc

SEQ ID NO: 314492 - DNA, 122 bp, Homo sapiens
cggcccagcggcaacagcagcagtggtggcaaaaacgggcagggggagcctgccagggtccgctgctcgcacctgctggtgaagcacagccagtcacggcggccctcgtcctggcggcagga

SEQ ID NO: 314493 - DNA, 122 bp, Homo sapiens
tgggcaccacacgtgaggagagagcaaagatcccgacctgggaggcccagcgaggccagccgtccccgctggactcgtcagctgctcggccccgcccacaggctggctgccccgccccgcct

SEQ ID NO: 314494 - DNA, 122 bp, Homo sapiens
tatacaggagcctcttggttatgtctgggcttccttatctgtagaagccccccaggaaaacgattctgagcaaaagaaatcaatctattgcccacctgtaaactctgctgactccactaata

SEQ ID NO: 314495 - DNA, 122 bp, Homo sapiens
gcttcaggagtgctgtcttggtcacgacctggcccttttcatttgtctgtaggggaaccccggtggcatgtcaaggggatttccacacaccctctcccaccctagcttggagatgctcagga

SEQ ID NO: 314496 - DNA, 122 bp, Homo sapiens
cttttttcttcaattactaattgtaacactagaaaaattacaacctaggctgcacacaaacgcgactcaaatgggcagtttactaaatgtctgtcataagaaagccatctagtgttaacgtt

SEQ ID NO: 314497 - DNA, 122 bp, Homo sapiens
ggcctttgtctccagcctgccttttcacttgacccgcagagtcgccagtgccatggggagcggggaaccctgctcccacagacaaagtcaggggatgtttttctttcctccggtcaagggac

SEQ ID NO: 314498 - DNA, 122 bp, Homo sapiens
acttgataatgttaacctctgccaaagttgatgcggtagttgtgagtggtgggacgcaagcgtgttgatttattcttggagacagcagaaacagcaccaccttcaactgttttgtcatgatc

SEQ ID NO: 314499 - DNA, 122 bp, Homo sapiens
ccacctgcgcgtgcgccccctcttcccggcacaggctagagatgcgcagaatcctaactacggccaccgtttcctgcctcaacgagccatgccctaaaagaaacaaatgcatcgccccagaa

SEQ ID NO: 314500 - DNA, 122 bp, Homo sapiens
atggctgggtgtgtggtaaggggaaaacccgctccttaaggcagcttcctgcgtgcccaccgtgttcgggcccccgtgggacttgtctctgcccacgtataagttttcattcacaaaaccag

SEQ ID NO: 314501 - DNA, 122 bp, Homo sapiens
acttccgaggctctcatcaatctacgcttcctttggagcgtgcagccaccaggtggcagccgaggccacgggcagacagaaaagctcccgaaactgaaggactgccaggcagcagagttccg

SEQ ID NO: 314502 - DNA, 122 bp, Homo sapiens
tggttatgtggagaaggagcaatcccttctccctcctcctcctccccccgctactatccgcggcccagagaactgccgcttgccgccattgacacgcacagatagaacccaaagaaaggcaa

SEQ ID NO: 314503 - DNA, 122 bp, Homo sapiens
tgcctggcgtggagaaggggccctgcagaggcgcaggtccgcaccgtgcccccaacccggcgcctgcagcccaggggcaacaaggtgtggggtttttgagtttttccctctgggccttatta

SEQ ID NO: 314504 - DNA, 122 bp, Homo sapiens
agacccacagggcaaaaagtgcgtcgtcgtgtcccaacctcctggtcccagaaacctggccgcatcaagtcagcgcttcccatgctggaagaagcaagcagccccagggtggaatcttaaaa

SEQ ID NO: 314505 - DNA, 122 bp, Homo sapiens
ccatgctcttcagcttcttctcgttctctttggcctgggccaggatctcctcacgagaggcgcgggtgtcatccagctcgcgcatgcagtccttcatctgggcctggggtggggacagaggc

SEQ ID NO: 314506 - DNA, 122 bp, Homo sapiens
atccaaacgccatcggccttgcgcggttttcttccagttccagagtgtcagtcctctggccgatctaaaagccctggggctccaagctgcccacggctgtggagcctgggctggagcccaca

SEQ ID NO: 314507 - DNA, 122 bp, Homo sapiens
cttagagcagaagggagatctgaacgctgacctgagcttagagcagaagggagatctgaacgctgacctgagcttagagcagaagggagagctgaacgctgacctgagcttagagcagaagg

SEQ ID NO: 314508 - DNA, 122 bp, Homo sapiens
cccagctggcttcacctagtggatcctgcactggcagcaggcggagctgcccgccagtctcgcgcgccctgcgccggcaatcctcagcccttgggcggtggacggaaccgggcgccgcggag

SEQ ID NO: 314509 - DNA, 122 bp, Homo sapiens
tagcataggaggaatgtgattgtcatgtgggaggttgctcagtactgcaatgtgaaaactcgacagtctaaaggctttgggtatattccctagtcatcagatgttatattcgagtgattttc

SEQ ID NO: 314510 - DNA, 122 bp, Homo sapiens
taatgatatgttgctgggctcagcaccttgctgaggctgtgattcttcaccggctggggccgcatgatggatcgcggtaggaagctgatggtgcaatcactcaccggccgtcagcgacacct

SEQ ID NO: 314511 - DNA, 122 bp, Homo sapiens
caagaagctaccctacttgcctgaccttggctggaaccagctcaggtcaggggcactagacggaattagttcagatctgatggggagagtgggaggttctgaggctgagactgagcttagag

SEQ ID NO: 314512 - DNA, 122 bp, Homo sapiens
cagttgaatagaaggttgtgaacacagcctcccaactaaaacaagacacgagaaagcaatcgctaaacgtagtttgtcttcaaaacaccttcaatgtttccagttggtgggcagacagtttt

SEQ ID NO: 314513 - DNA, 122 bp, Homo sapiens
tggggtcttctattatggggtggccctggggttttctattatcgaggtgaccctggctcccgtggcaaatgctgtccccagtagcacgtggggctcttcagcttatctgagtgccgcgtctc

SEQ ID NO: 314514 - DNA, 122 bp, Homo sapiens
agcagctgctggcccgggtgctaagcccctcactgcccggggccggtggggtcggccggccgctttgatcgcggggtccgccgagcccacgcccacccggaactcaccctggcccgcaagca

SEQ ID NO: 314515 - DNA, 122 bp, Homo sapiens
ttcagaacccttgatcagcaggcggtccaccccattctaaattcagagcttacagggacgcgagggagccccgaccacagcttggacttgcttattgtgcattatgcctgcatgtttgtggc

SEQ ID NO: 314516 - DNA, 122 bp, Homo sapiens
ttggcttctgctgatcctcaaaacctttaactcatgacactgaatcatccaccataagcacgtggctccagtggctctgttataaagattgttatcatgcttcattgatgactaacacaaat

SEQ ID NO: 314517 - DNA, 122 bp, Homo sapiens
agcccaggagcctggattcaggctgccctgaacgcacactgatgagcagcgcctccagggcgattttggaaagcagaaagggggtcagagaggcggatggaaagctgtttgtcaggaattct

SEQ ID NO: 314518 - DNA, 122 bp, Homo sapiens
ctgagtgacatcatcttggcgatggttttgatttgcatttccctgacagcttgtgtgttccgtcttttctcacctggatgttgaccaacacgtgtgtaaatgttcaagacccacatatttta

SEQ ID NO: 314519 - DNA, 122 bp, Homo sapiens
tggccctggggactgggtgacgtcagggatgagcctcttgtgattggctccatcaccctgcgtaagatcaaagggaagaaaggatgggcccgacaaccggagccattgtggctccggccgat

SEQ ID NO: 314520 - DNA, 122 bp, Homo sapiens
ccctttgagccggaacaggatgactgggttgaccgatgctgggcagctgagcggaccaatcggccccctagactgagacgttggcgtttgaaatcagccaatggcaggtctacactggagct

SEQ ID NO: 314521 - DNA, 122 bp, Homo sapiens
gggccgcagccgagccccgccgggcccgccccgcgccctcagccccgcgacctcgggctccgcgcctcctgcccggcctctaggcaaggggaagccagggtctcagcctacaggtcactccg

SEQ ID NO: 314522 - DNA, 122 bp, Homo sapiens
ctgccgcccggctgggtgccgtctccaccaacagaaaggcagaatttccagggccgttctcggcagccaatgagcgcggcggtgggcgggcctctcccgtccattgttctcggtgccccacg

SEQ ID NO: 314523 - DNA, 122 bp, Homo sapiens
ctataaaaggaaaagatgaaggcacgtgatattattcggtcccacaatccttaagaaaaacggtattttgcaagtttgtgtgtgtgtgtgctcgcatacatgaaacgcgagtccaaggggcc

SEQ ID NO: 314524 - DNA, 122 bp, Homo sapiens
tctcagcctctcgactggctaggaccacagcctcgagccatcatgtctggctaatttttacgtttttttgtagagatgggggtctcgctgtgttgtccaggctggtcttaaactccttgctt

SEQ ID NO: 314525 - DNA, 122 bp, Homo sapiens
gcaactcccagctttcctatatgtccaagggcggcgagggctcaaaagtcctggataatccgcagatagaacacacacacccttttccgaattctgctgagcatttgcgttgtgtcaggaag

SEQ ID NO: 314526 - DNA, 122 bp, Homo sapiens
gagatgttacttaacttgaaggcctctttgtggaagaaagatttgtcttccaacattttgcgtcagcagtgctgaagtgccactctgtggaagttgcttcttatggccttcctgccacaaaa

SEQ ID NO: 314527 - DNA, 122 bp, Homo sapiens
gcgcccgtccggccccacgtcgcagccgtacatgctctggagggtgtgagaccctggccccggccccgcggtcagcccagtcccccgagccccgccccgccccgaccaacccgcggggattt

SEQ ID NO: 314528 - DNA, 122 bp, Homo sapiens
tttccctccctctcagctttctcccttgtgcgcctgcatgcacaccagatggtgtgaagccgcaggttggagggagacaataaacccagaaactattgcaatattaggttataaaatgactg

SEQ ID NO: 314529 - DNA, 122 bp, Homo sapiens
gacccgcctcccactgattgctttggtttagcaaaacatctgtgagttgccggctgcccccgcactgctgtgtggttggcagagttccataccggccgctgagtcagctcatagcaggatcc

SEQ ID NO: 314530 - DNA, 122 bp, Homo sapiens
ccactgctgctgctggagtctcgcctttctcctcccgcctgccttcttgccgtgtagtagcgctgcggaccgtgttcggaaagagtcacttactgtccgttctagtcacagttttgatgccc

SEQ ID NO: 314531 - DNA, 122 bp, Homo sapiens
cctctgcaggccccgaacttgacctccagtcggcctctgcaggcctggcctcctgcctcccgaaagcttgcacaggcccagcctgtgcctcacagcggaccctccacgcccagctcgctctc

SEQ ID NO: 314532 - DNA, 122 bp, Homo sapiens
ggtccccaggaacctcagctcagcctctcaggccactcgccagaagatgcgggagtgccacgggctggtggacgccctggtcacctctatcaaccacgccctggacgcgggcaaatgcgagg

SEQ ID NO: 314533 - DNA, 122 bp, Homo sapiens
agactcccaaatttcaaactcgccagcacctcctccacctgggggagaagagcataataacgtcatttcctgccctgaaagcagcctcgagggccaacaacacctgctgtccgtgtccatgc

SEQ ID NO: 314534 - DNA, 122 bp, Homo sapiens
ggcgggtggcggcctagggcgcggagggcggaccgggaatggcgcgccgtgcgccgccggcgtaactgcggcgcttgcgtgcccgcggcggggaaccggacggggtcggggaggcgggccct

SEQ ID NO: 314535 - DNA, 122 bp, Homo sapiens
tcgagagggcttcctgctacaactccgcgttgggctgctgctctgatgggaagacgccctcgctggacgcagagggctccaactgccccggtgagtggacggctgggcgaggggagtgtgag

SEQ ID NO: 314536 - DNA, 122 bp, Homo sapiens
ggggccccgcggctggggccagacccggcagaaggcggagcagactagggtgtccgtcaccgtcctcggtgtgaaccgccacggatgcacgcgggtgctggctggggggcctccccggttga

SEQ ID NO: 314537 - DNA, 122 bp, Homo sapiens
ttttaaagaaaaatatagattcaaatcaatcagaatttgcctcgctaggccttttcgttacgtatgtttttgaggcctagttcgacgactgttacgaaaatgacaaaaacaaactcgaaaga

SEQ ID NO: 314538 - DNA, 122 bp, Homo sapiens
agatgcccctgcaacatggctctgccaatgggctggcacacctgaaccctccttccatggcgttaaacaagatttaaggatatcgggggctgggtgcagtagctcatgcctataatcccagc

SEQ ID NO: 314539 - DNA, 122 bp, Homo sapiens
taggattcaccccttagaggtagcctctgtgcatgtgttaggaagttgcctagaaacctccgaaccaagactaggtttgggtatatggagttctcaggtgtcagtttctggggaagcgaact

SEQ ID NO: 314540 - DNA, 122 bp, Homo sapiens
aggccggaaaccgcagaggagcgaagcctggcgggatgcagtgattggagccaaaggaaccgtcccggcctgtccaacgcgggggggccttcggcccggtggccctgagcgaaccgatgcac

SEQ ID NO: 314541 - DNA, 122 bp, Homo sapiens
aaaggaagccacttattactcctccacataaataaagtcaattgcactatgactttatgccgtatacttcagtaagcagatatacacccaaaagcctagtataataagaaaaacaacaactt

SEQ ID NO: 314542 - DNA, 122 bp, Homo sapiens
cgacggccccaggcctagatctgcaggaagcatcccgagttctcctagcgtggagaggagcggggccgggccaggctagggggcggctgcgcgagccgtcggcgggtggaggcggagggaga

SEQ ID NO: 314543 - DNA, 122 bp, Homo sapiens
ctgaaagattagaactaaacatcaacagtaatttctagataggttagaaaaccacataaacgtttcattcactaaaatactttcattagtgctcatttattatttatgtagaaaagtttaaa

SEQ ID NO: 314544 - DNA, 122 bp, Homo sapiens
cgcagcctcccaaaggaaactccgcggtttccaatctctccctccgggttaccaagcaagcgatcccgctagacacaagtgcgcatgcgcacctcagatggcaaggtccacgcgcgtgcgca

SEQ ID NO: 314545 - DNA, 122 bp, Homo sapiens
aggaaaaagaacagcactcacaaggccatctatctgcacttgcttcacggctgaatctcccgagccgcctttgcctttgcctttccctgctgcgccggcggtggagctggaagaggtggcag

SEQ ID NO: 314546 - DNA, 122 bp, Homo sapiens
atattcactctcttaactatagagatggtgtcacaggtatatatgtcaaaacttatcagccgggagcagtggctcatgcctgtaatcccagcactttgggaggccgaggtgggtggatcaca

SEQ ID NO: 314547 - DNA, 122 bp, Homo sapiens
agaggcgcgaggtagctctagtacgcagccttcactgcttcgcgggcgagccccgctctgcggaaaggacgacgctgccacctgatgttactgaactataagcagctccactaaagtcacaa

SEQ ID NO: 314548 - DNA, 122 bp, Homo sapiens
ggtcaaggccaatgagagtgtgtgtggccaagcccgctggtttcctgaaccgaaattctccggggagggagagaagaggagggtgcgggagacggacttggaggcgagaggtggcggcagtt

SEQ ID NO: 314549 - DNA, 122 bp, Homo sapiens
ggagccaagagagaaaactgtccctgaaaaaggtatcatcttctaacgcaagtgtggggtcgtttttggacagccattttggacaagctctggcctcttgttaaatgtgacatactgagtca

SEQ ID NO: 314550 - DNA, 122 bp, Homo sapiens
tctcctcctcagcttcctgcgtgggttcctggtaagtgagtcgaacccgccggatgcgcgcgcgcctgcgcctccgcccaaaaggatcagtttccggctgtggactacatttcccagaagcc

SEQ ID NO: 314551 - DNA, 122 bp, Homo sapiens
cccagcagatcacccccgcgagaggcatcgatccaggcacctggggcgcaggcacagctgcgcacagatattgaattgcggggttgctgtaggaaccgctgctattgccgcaggaggagatg

SEQ ID NO: 314552 - DNA, 122 bp, Homo sapiens
ccggcgacagcacttggtgacatccgcagggagatgagcgaggcggcgcaggcacaggcccgggcctcaggtcccctccgcacccgccggggtagggtccggcagtgacctgggcaggggcc

SEQ ID NO: 314553 - DNA, 122 bp, Homo sapiens
ggggaagaggggagtttggggttgcttggccgtatttgcctgtgcgccaagtgcaggtagcggctacagttctgacaggcacggatggcgggtcccgtttagagggcttcaaggttcctgag

SEQ ID NO: 314554 - DNA, 122 bp, Homo sapiens
gagaaaaaaaaatcaacggcagcaccaggggtctggcctgagaacggagagatccggaatcggggccaaggtgtatccttgaccgcacgacaaggagtaatgggcggacctgaacccgcgac

SEQ ID NO: 314555 - DNA, 122 bp, Homo sapiens
caccccttccagatgtagggggggtgggggatcccctccgcgataggccgcgagggttgacgcggtcccacgaccccctcccacgatccccagaggtgcagcgggcacacccctccttccag

SEQ ID NO: 314556 - DNA, 122 bp, Homo sapiens
tggttactagcttatttacttcgggcagctcagcgacattttgacagcaaacacatacaccgccagggcagaattagagaggggctaacgatgatataagtgctcctgttcgttccgcttta

SEQ ID NO: 314557 - DNA, 122 bp, Homo sapiens
ctcgggcctagctcctgagagcggcgccgttggcttacgtagcagcacgtgattggccaccgctccctggcaggccgggattggtggaagacgggccgaccccgcccctcgcccccgcctcc

SEQ ID NO: 314558 - DNA, 122 bp, Homo sapiens
cagaatgtcgaatgtttagagattacaaagtgaaaaatgggctggagttcccacacaagccgggattagagcgtttgtggactctaacctgggaatataaggcgctccaagagggacagggc

SEQ ID NO: 314559 - DNA, 122 bp, Homo sapiens
cggtcccgtcgagaaagggtgggaaatggagccaggcgctcctgctggccgcgcaccgggcgcctcacaccagccacaacggccttgaccctgggccccggcactctgtctggcagatgagg

SEQ ID NO: 314560 - DNA, 122 bp, Homo sapiens
tagtccttcgcttgagactcaaaggccacatggccagataggtctttcacctctgcaaaccgttaaacatccttccagtaagacataatcgttaagcccacggtgttaaagaaacccagtga

SEQ ID NO: 314561 - DNA, 122 bp, Homo sapiens
gggttaacgacttttccttttatagaaggcggatccagggtggcacctcctcttttctaacgtcccttctctccctcaggatcccccttcctgagttaccactacccaccccctccaaagcc

SEQ ID NO: 314562 - DNA, 122 bp, Homo sapiens
tatggaaactaccgctcaaattggcagaattaccggcaagcatacagtcctcgtcgaggccgttcaagatcccggtccccaaagagaaggtccccttcaccaaggtccaggagccattctag

SEQ ID NO: 314563 - DNA, 122 bp, Homo sapiens
tcccgggatatgagctggaagaggcatcacctgatcccggagacctttggagttaagaggcggcggaagcgagggcctgtggagtcggatcctcttcggggtgagccaggtaaccatggcaa

SEQ ID NO: 314564 - DNA, 122 bp, Homo sapiens
ggaagaagcttggtatatttggaaaacagaaagaccaatggtactggagtccaacagacacggtagaggatactgggacacttaagtcagaacagaaggcaggtaccaggccacattggtcc

SEQ ID NO: 314565 - DNA, 122 bp, Homo sapiens
tattacatgttaaggacttatttttatgaaaataagtatatttttcaaacagcatcgtgacgagtgatattgttttacacttttgtcaatagatttgtaaaaatttgcaactctgtcatatc

SEQ ID NO: 314566 - DNA, 122 bp, Homo sapiens
gtgtcccttcccttcccctcggggcccccgaggccgctgccagcgctggcactgcggggccggctcaccagttggtcatgtccaggaagaaggcgcaaccggcaggattgagctggaagccg

SEQ ID NO: 314567 - DNA, 122 bp, Homo sapiens
gccgccgcgacgctcaccggggggcgctgtgaagccggcaccgggcggacagaggtgagtcggctcggaggcggtggctcccgttcctgcccgcgcgccgaggggcgaatcccaggcagcga

SEQ ID NO: 314568 - DNA, 122 bp, Homo sapiens
tatgagctagggatttctcttttaggaggaccgatattcacttctaagtaaacactggcacgtgtgtgtgccaaaaagatacatcaagacagacatataaaagatgtttagtgcaacattat

SEQ ID NO: 314569 - DNA, 122 bp, Homo sapiens
gacggctttcagacgctttcctccctgtcttcctgtgtttcccatgtttatcaatgtaaacggtctctccgcagaaaatatcgagatggtgtttgtgtctgtaaggacacacagtgaatata

SEQ ID NO: 314570 - DNA, 122 bp, Homo sapiens
gccgtccccagagtgaacggatggatgaggccgtccccagagggaacggatggatgaggccgtccccagagggaacggatggatgaggccgtccccagagggaacggatggatgaggccgtc

SEQ ID NO: 314571 - DNA, 122 bp, Homo sapiens
cagaggccagcggccgcaaaaggacgcgtgcgtgtgcgcggcgggtggggcagtgcagagcgggtcctggattggctgggccggtgagtgctggcccactaccccggctctagcgtactggc

SEQ ID NO: 314572 - DNA, 122 bp, Homo sapiens
tggccttgaaagaatgaacacgggtgagcagggacctcggagactcagcctctcaggggccggcgttccaggcgggaagctggctccagggctacactgcgcttgtggtgagggccacacag

SEQ ID NO: 314573 - DNA, 122 bp, Homo sapiens
cacgtggccaataccacctcaagaaagaggcagataacccctgctggcctggtgatggagcggccaaatgcttcacagcccctccctgcaaaagtcaggtagggacggaacgtgcacacatt

SEQ ID NO: 314574 - DNA, 122 bp, Homo sapiens
cagcataccggctgctctcagagtaccccttactgcctcaatgttccctagggacccaggcgggctggctggcggcgcctccgcgcgtgcagatacttaggggactgagtccataaggactc

SEQ ID NO: 314575 - DNA, 122 bp, Homo sapiens
ggactttatttgagtctatttgtgaacaggtggatgcctgatggaacacagcccctgacccggggctggctgctccctgcgcctctctgcagggggctgcgggaattagcctcctccagggg

SEQ ID NO: 314576 - DNA, 122 bp, Homo sapiens
tgataattaaatggcagtccttagttttaacccagttatggctggctgtaagttccatcccgtcatgaccattatgtttcctcaacttttctattttcctacttcctttgctctgctctcag

SEQ ID NO: 314577 - DNA, 122 bp, Homo sapiens
gtagaatttaggcttcccccgtctgaatcgcgctggtgtatctggaatttaggcttcccccgtctgaattgtgctggtgtatctggaatttaggcttcccccgtctgaagtgtgctggtgtg

SEQ ID NO: 314578 - DNA, 122 bp, Homo sapiens
tgtgattttccagtgcccattttccagtaattatgacatgtcagtgaatgtttactattccggcagccttctgagggaaagaagcaaaattagtagcacaaaaaaaaatagagagaaatgga

SEQ ID NO: 314579 - DNA, 122 bp, Homo sapiens
atgtttaatcagataggatcgtccgatggggctctggtggcgtgatctgcgcgccccaggcgtcaagcacccacaccctagaaggtttccgcagcgacgtcgaggcgctcatggttgcaggc

SEQ ID NO: 314580 - DNA, 122 bp, Homo sapiens
agcccgaagcctcggcgtcttgatgacgccggacagccagtcatggcgactgccaggtctcgggttcccgctcaactacagccggctcacagctccatcagccaatccacaggcgtgacgtc

SEQ ID NO: 314581 - DNA, 122 bp, Homo sapiens
ggtgccttctcggagttaaatgagtcaccgcttactaggcagaagcgcgggccgcgagcgcgggcgagaggcgggggctaccggtgggggagggggccgcagcctcgtggccatctccacta

SEQ ID NO: 314582 - DNA, 122 bp, Homo sapiens
caccgtccgcgcagcctcctgaagcagccgtaaactccgccccttgcgcgcaggacggcgcgaaaacccaattgacaagaattccctccgaagctctgtggtccgatctgcggtccgcttgc

SEQ ID NO: 314583 - DNA, 122 bp, Homo sapiens
cctatttctccacagcctggtcagcttctactgtttcttgattttttaataactgccatccgactggtgttagatggtatctcattgtagttttgatttgcatttctcaaataatcagtgat

SEQ ID NO: 314584 - DNA, 122 bp, Homo sapiens
ttaccccgccctcgccatgaacgcctcgatgtccaggtgagtcccggggctggggctgtccgcatgtttgtcttagcaaccacgccatttctgaccacgaaacagctttttcttgccagtta

SEQ ID NO: 314585 - DNA, 122 bp, Homo sapiens
ggagtaacactgggccacccagttgagacagactgccttcaggctggacgcggtggcttgcgcctgcagtcctagcactttgggaggccaaggggggaagatcgcttgagtccagaagttgg

SEQ ID NO: 314586 - DNA, 122 bp, Homo sapiens
aatgcttgtgtaaaaagttaaataattcgcggcctataggaaccgcaaacttccccaacacgtgtgtgcccatcaggactgctgcattttcaagatagctaggcttaaaaattacccgagga

SEQ ID NO: 314587 - DNA, 122 bp, Homo sapiens
aacgtctttcgcctagtgagcagtagccaacatgtcagggtgggagtcatattacaaaaccgagggcgatgaagaagcagaggaagaacaagaagagaaccttgaagcaagtggtaagtgac

SEQ ID NO: 314588 - DNA, 122 bp, Homo sapiens
catctgtctcagtgccggcatatagcaggctcctggtaaatattcattttgtccctttcacgtccttttcagggttctattctgatgagcctaggaaaagagagaatgcatgaaaccattag

SEQ ID NO: 314589 - DNA, 122 bp, Homo sapiens
acaggggagtgcctcgtttactcaggccgctgctctcaattccttgcaggagtgagcgtgcgagcagacaaggcgggaactggagtgcacgagcgctggaaccggatggccactttgatgcc

SEQ ID NO: 314590 - DNA, 122 bp, Homo sapiens
actccggctccggcggctggttcaggatcggtggctttctgctgtccggccggaaacaggcgccagtttccggccggagcgggttggtggtgacacccaggccgcccccgggcctcctcccg

SEQ ID NO: 314591 - DNA, 122 bp, Homo sapiens
aacccgcggctcttcccggcgcggagggatccggaggcgagccgagcgcggtggtgaggccgcctcagcgaaaaaaatgtccgcctgaagagacccacaagttctattcggggggaccgaca

SEQ ID NO: 314592 - DNA, 122 bp, Homo sapiens
gttctgattctccccatgatgactgtttttaataacagaaatgatcaaattctggcggggcgtggtggctcacgcctgtaatcctagcactttgagaaaccgaggtgggtggatcacctgag

SEQ ID NO: 314593 - DNA, 122 bp, Homo sapiens
gcatgggcttggggaagaggggccaaagaggcagcttggctggcattaagtgttgaaggccgtagaccagacacacactaaatccttgtgacttacacttggtgcagtccagctatccagat

SEQ ID NO: 314594 - DNA, 122 bp, Homo sapiens
tgtcatcttttatgcatggccacctctgccgcgctgctcggccggttgctatgcaaccaacgacagcgccgcgggggcctgacattagtgaaagcaaattgaccagaggagccttcatcctg

SEQ ID NO: 314595 - DNA, 122 bp, Homo sapiens
gattttgttcctcaggagataaagcctaggcaaagctttaaaccctcctctgtggtcaaacgttctacagccccttttaatggtattacaagtcatcgccttgattatatacctcatcagct

SEQ ID NO: 314596 - DNA, 122 bp, Homo sapiens
acacctcgcgcgcggggctgcagggacaggaacgggcatcccggcgcgcgcagcccacaacgttcgtcagtcactgtcttcgtccccgggggaggcctccgtcaagtcctcgggcccccccg

SEQ ID NO: 314597 - DNA, 122 bp, Homo sapiens
ttttggccagcagctattccaggcattgcacctacattaaaacacttaatggtgaaaccccgtctctactaaaaatacaaaaattagccgggcgtagtggcgtgtgtgtgttacttaggagg

SEQ ID NO: 314598 - DNA, 122 bp, Homo sapiens
gagtgaattcgccctaggatagggaaggagtagccgcgtgaggttgagtatgcccatttccgtgatttctctcgattcagcgagtcatacgttggaaacgtttagattcacaaactatcgtt

SEQ ID NO: 314599 - DNA, 122 bp, Homo sapiens
ttggagaaatgggctgggagcaaactggctgagccatgtccgggctgagtgggcagctcccgtagccaccccggtgggaccccaccccgttcacaggcccggcccacgagaggccaatgggg

SEQ ID NO: 314600 - DNA, 122 bp, Homo sapiens
accaggccccctccccggacaccaaggaatggagcccttcgccgacccgcaccccagccacggcgctcgccctttgcctggcaacgcccctcaccccgcctgcctctccgctccaccgagcc

SEQ ID NO: 314601 - DNA, 122 bp, Homo sapiens
gcttcctgcctgcgctgtccggccccacctagaggatatttacatttcatcttgtgactgcggttatgtttatttataaataataaatatatgttattcaccaatggaaagaagaaaataaa

SEQ ID NO: 314602 - DNA, 122 bp, Homo sapiens
aatctgtcatccactataccacagcagggagatttaaaggcagctcagggcattcaataacgttctatctgtcaaatcagccacttctgtgcctatcccttttcctcagatcccctgttggt

SEQ ID NO: 314603 - DNA, 122 bp, Homo sapiens
ctctttgcacttccgattggcgagaggatgcccccctttttcttgtccctacttcgaccgcggattggttccgaattagttggtacggccccctggcctgtagcgacaggtgattggctgag

SEQ ID NO: 314604 - DNA, 122 bp, Homo sapiens
aatggccccctctgtgcagggttcgaggggaagggaaggggaacatgcccagcgactccacgtggggaagttgcatttccacaccattcacaggggatccagtgttttcggaattgtctggg

SEQ ID NO: 314605 - DNA, 122 bp, Homo sapiens
gttgaagctttgtaaaccatgggtaccatccaggcagttgctgtgatcaggacctggcagcgggcaggagctgctcccccttctgacgggaagcatccagagggaaagccgggcccagaaca

SEQ ID NO: 314606 - DNA, 122 bp, Homo sapiens
taaaaatgggtgaaactttagatgtatgaagcagagattcatacatctaatgtgttgagacggatgaaaacacatgtaagattgataaattgtcagatacctgttaccctgatggttgctcc

SEQ ID NO: 314607 - DNA, 122 bp, Homo sapiens
gagggaaggaggcactccaggttatcagctcactgagggatggaagggttttccaaggggcgtggggggaacaaaatagaaactttgtaacttaaaggaaattgaaatatctgaaagggaaa

SEQ ID NO: 314608 - DNA, 122 bp, Homo sapiens
ggctcagggtactactggctggctgggcggcggcaggcgggacaggacagtcccttgcatcgaagaccctaagtttaccctgccctgtcctgccatccgcttcttctccatgttagaagcag

SEQ ID NO: 314609 - DNA, 122 bp, Homo sapiens
aggaagcccttccccgaagccacgctacccagtcaatcaagacacgtccgcgtcgggtcccgccctctgggggaggattgacaaggtctgtgcttccagcctcccagacagctcctgcatcc

SEQ ID NO: 314610 - DNA, 122 bp, Homo sapiens
gcttccccgggccccagccccgacctagaacccgcccgctgcctgccacgctgccactgccgcttcctctataaagggacctgagcgtccgggcccaggggctccgcacagcaggtgaggct

SEQ ID NO: 314611 - DNA, 122 bp, Homo sapiens
cccccacctcccagacggggcagatgctgggcagaggcgccccccacctcccagatggggcggatgctgggcagaggcgcccccccacctcccagacggggcggatgccaggcagaggcgct

SEQ ID NO: 314612 - DNA, 122 bp, Homo sapiens
ctgcaggaaccctctgttctaggcagccacaacttaacttctgttagcctgccattccttcgacctccaacaagccccttcctcatcccagctttcatcaagtctggcatcctttcacccac

SEQ ID NO: 314613 - DNA, 122 bp, Homo sapiens
tgcaggatcccaggaccaggcagaggcgcggcctccccgggactggggctgcggcgctaacgctccagtagctgactagggcgaggttaggggacggtaaaatcctgcacccacttcgcaga

SEQ ID NO: 314614 - DNA, 122 bp, Homo sapiens
tcgaacctgcgcggggagaccccaatggatttctagtccatcgccttaaccactcggccacgactactggctgtgtgaatttttgcggtgagagtgcatgtagactctgcataagcgtctgc

SEQ ID NO: 314615 - DNA, 122 bp, Homo sapiens
gaaccaaagactgggggaatccatgcccaagatgattgcaagcgacatcacagaagggtccgtcaaacttccttctaggtgaagccaccaccaggggctatttcaaacctggctctcagggt

SEQ ID NO: 314616 - DNA, 122 bp, Homo sapiens
ctctgcccggactccagccactagagtttcattttaacggcgcggaggggacaccctccccgccccatgctgcccacccgctgaggcgccacccaaccgcgccgggaggggggacagcaggc

SEQ ID NO: 314617 - DNA, 122 bp, Homo sapiens
ccttgggtggtcgatgggactgggcgcatggagcagggggcggtgctcgtcggggaggttcgggctgcacaggagcccacagaggcgggggaaggctcaggcatggcgggctacagtcctga

SEQ ID NO: 314618 - DNA, 122 bp, Homo sapiens
gagcgggacttgtgaggcgtggccgggtggaggaggcgcttgcgggggcgtggggctccccggcaggcgggaggcacggagcaagtcgcactggacaatgacctgggcagctcggcgctgcg

SEQ ID NO: 314619 - DNA, 122 bp, Homo sapiens
gtaattttcttctgtttctgtatgatcaggtctgtccttcgcttttgctttccattacttcgtcctagccctggcctgaatcccacaactggcgccccaccttgtgcacccgcacccgccct

SEQ ID NO: 314620 - DNA, 122 bp, Homo sapiens
tcccggacctacttcccggccaccttctgcctactttaccccagcgctcaagtcccaacccgtgctaagcccctgagtcgcctgtagatcccgtctattccgttcttcaattcttccctttc

SEQ ID NO: 314621 - DNA, 122 bp, Homo sapiens
gggcaactcgccaataatccggtcccgtagtgtcactccatttgtagtcctgccctgcgccgtacctccctattctgcagacgaacccatatggtctccctccgccgcccatttcagcaact

SEQ ID NO: 314622 - DNA, 122 bp, Homo sapiens
ccaaaccgtctcattccaagcccaaggaccgggctttcaaggggacacgaaaggaacgcccgggaggtgagcgccaggagatcgggagaggtgcctttcccggcatgctctgcagcacaccg

SEQ ID NO: 314623 - DNA, 122 bp, Homo sapiens
gcatttgtaaaaatgtgaaagtgccagttcagaggtgttgtagcttgccaccttggaaggcgtgtgtgtggccgtagctctgtgaacacacgtgtgaacccggcgttaggacacccgggccc

SEQ ID NO: 314624 - DNA, 122 bp, Homo sapiens
agcgtccctaagaatagaatcccaccaagtacacattctgagcaggctctgtttctgaaacgtaactgtttactcgaaggtcttctacatctttccaagtagcctttttccatcccccacag

SEQ ID NO: 314625 - DNA, 122 bp, Homo sapiens
ggcacccgatggctattcgagctctcgatctcggagactggagcgggccattcagaggcgcggggccgggcccggcggacgcttgttgttgtccggccgggggaggcggaggtcgctcgctc

SEQ ID NO: 314626 - DNA, 122 bp, Homo sapiens
cccctcgcggggcccctccctcaggaccccgggaagggcggccccctcccccaccgcagccgggacacacccagatacgcacacccacctcctggcagctccccgcccgccgccgcctggag

SEQ ID NO: 314627 - DNA, 122 bp, Homo sapiens
ttgcatctctttatctgcacaatgcggataatatttaacacaggattatgataaagattacgtgaaaagtgacgtctgtaaaatgtccagctctaattgaccttcacaaatgatagcaaacc

SEQ ID NO: 314628 - DNA, 122 bp, Homo sapiens
aagacccccttcctgccatgcccagtgctgtgcccatctccaggcccaagcatcccgttccgggaatcagaaccagctgtgctgggcaggacccagagtcttggtcccagtcccaaggggct

SEQ ID NO: 314629 - DNA, 122 bp, Homo sapiens
gttaaataaggtcacacaagaactgctaagataaacatcaaattcatgtcatttggtaaacgagaaagccatctgtgcaattcactgtgggtaaactgcagactgactggggctagacattt

SEQ ID NO: 314630 - DNA, 122 bp, Homo sapiens
caggtggtgcatgcggggcgaagggagggtagtgtcccatgtgtccgtgtcctggccaggcgtggctcactgtgtaccgtgacctcagtgccggcggtggctcactctgtgtgtcagctttg

SEQ ID NO: 314631 - DNA, 122 bp, Homo sapiens
cgacctccgcaccaatcaggtggtggtcattagggcagtggacccggaggaggccgaggacgcccagcaggagaaccctgcgctcagctgtgctacagccccgagtcaccgctgctcttgct

SEQ ID NO: 314632 - DNA, 122 bp, Homo sapiens
ggtgagtctatttgatagttgccccccggtgatttctaggtaaaccctgcctgtgtttcccggggctgctctctccccggagggacttcctggtggagcagaaccgggttgcctcagaatgt

SEQ ID NO: 314633 - DNA, 122 bp, Homo sapiens
tctgtgcccacttatcctttgcatcctaaggggactgggtctttgtgcaccagcagcagccgtagaggttgggcttgggaatcaggggctcccttatcaaagctgggaaacttagaacaaca

SEQ ID NO: 314634 - DNA, 122 bp, Homo sapiens
ttacatttaaacataggtgcctagctacgatgatacatttgccagtagggcagcgttgcacggtgaaaggcaaaaacccctctaagcctcctcctgtggcgacaaagctctcggccaacgct

SEQ ID NO: 314635 - DNA, 122 bp, Homo sapiens
gccgaaccggagagaagcaggaagtagcggcggccgcggggagggcggcggtggctgcagcggctggagcggggtagagaccgccgggtctcggcccgcaccaggagcggaacaagtaagcg

SEQ ID NO: 314636 - DNA, 122 bp, Homo sapiens
attctggatgcccagagcttccatgagggccaatagtcacgcaggactgaataaaggccacgattagcactatgatttcatgcactcaggtataagcaggctcagaccacatcaggggacaa

SEQ ID NO: 314637 - DNA, 122 bp, Homo sapiens
ttcttgagtggaatggaacctaagctactccattccttggttttctgatctgtaagatgacggcaataataccaactgtaccagattgttttgaggatttaaggagatgactacgatgcaca

SEQ ID NO: 314638 - DNA, 122 bp, Homo sapiens
catgcgcagtatggggcggggcggggcagggctggtgagcaagcccgcggggagcgagcgcggaggcgggcgttgctacggcaacggtgggcggccagggagttgcctgagggaaaaggggc

SEQ ID NO: 314639 - DNA, 122 bp, Homo sapiens
gctcgtgcccttcccggtgttatgcaacccaagcccgcagggggttagggggcggcgggccgcgctgctcacccgggccggccagtgtgggtagcccttcatcttggcgaacaccaggtccc

SEQ ID NO: 314640 - DNA, 122 bp, Homo sapiens
ccgtcgccgccgcgcgcctcctgcgcacacccccagtcaatcagcatcacaaacgcacctcgccccgccccctccacgccgcgcctcggcgaggagactacaagtcccagcgggccgctcgc

SEQ ID NO: 314641 - DNA, 122 bp, Homo sapiens
cgtatttcagctcctgtctctccttgtcagaggccgtgtgaggtgcgtattgcggaccgccggccgcgctgtgaggggtgtacatgtggagccgtgacaatcgtgggaagttctgtttccag

SEQ ID NO: 314642 - DNA, 122 bp, Homo sapiens
cttatcagctgaggatttcctaggacctttgacagataccaatactaaaatcattgttcacgtgtcaatttaaaagaccattaaagcagcttattttggttttaattggaacctcctccctt

SEQ ID NO: 314643 - DNA, 122 bp, Homo sapiens
aaccaggcatcttgtctaccacgcctcacctggactccaccccagccctagggtggccggcgcctggccatccaggggaccaggcttgttgccacctccaggctcgccttgcccttcccaga

SEQ ID NO: 314644 - DNA, 122 bp, Homo sapiens
tgtctgtccctcttccatattctcttccatggctacctttcttcagtagaatctggtacacggaattaatcaaaagctcaattagatgttggaaaaactgggggtttttttttttttttttt

SEQ ID NO: 314645 - DNA, 122 bp, Homo sapiens
gcagtttttcatatgccgtcttttgtggagttcctgttcaagtcatttctgttcaagttccggttcaagtcattcaagttgctgttcaagcccatttctgtattgtttttcttattgagtgg

SEQ ID NO: 314646 - DNA, 122 bp, Homo sapiens
gtcacctcccccagcgctgacctaatcactcccaaggaggttcccgccccaaagtaggcacgctccaaatatggtggtgcccaaactctgcaagacccaagcactaggcatgcctaggccct

SEQ ID NO: 314647 - DNA, 122 bp, Homo sapiens
acaagatggattactgactgccttgctgtgaatggcacaactcacaccttaatgtagcttcgcatacagcttgggaagaacataggaggcaaagttgctcactgcagtaatgtccctgactg

SEQ ID NO: 314648 - DNA, 122 bp, Homo sapiens
cagaaaccctgcaggagattccttcttcccattttatagaagggaggctgaggctcggcacgttgaaatggcttgaccaaggtcccacaggcaaaaaaatggtacagcaagatattgtaacc

SEQ ID NO: 314649 - DNA, 122 bp, Homo sapiens
atctatggcagaaaagactgaggaatgcaaccacacctggttgactttttcacaagataacgtctgcctctgtggctcatttgaattccaaaaagaatcatttacaagttaatctctgtctc

SEQ ID NO: 314650 - DNA, 122 bp, Homo sapiens
caacggcagaccgtgcagagcgcaccagcgcgagcggggcttcctcgagtctccaaggcccgggcttcaacttcccgggtctagacgtcagccctgaaccgccaacagcaccgggttgggga

SEQ ID NO: 314651 - DNA, 122 bp, Homo sapiens
tcatcacatatataagaattatgctgattacaatgtaattacatggttaaaaagtgatttcgtactgcaatataggtagtgtgactgggtaattgagcaggggtttaaagttgcaggattgt

SEQ ID NO: 314652 - DNA, 122 bp, Homo sapiens
acgcacagtgggcctgctgcatgattcacacccagtccctgccacagaccgtctcagacacgcacagtgggcctgctgcatgcgtgttacctggcttttggctccacgctcactcatagcca

SEQ ID NO: 314653 - DNA, 122 bp, Homo sapiens
cgggacccgcagagagtgcccgcctgtgttggggcagcagcgcctggaaggaggcggccccggccgcccgcagagctccgcctcccaggccgcgctctgtgtctttgtccaggctgggaggg

SEQ ID NO: 314654 - DNA, 122 bp, Homo sapiens
ctgagtgtgtgtttagttccttttgatcagcactgccatagctctccttctagaactaaccggataaaccatctggtgcagaacgcttacttcctcaatcagtggaatttcacagctgtagt

SEQ ID NO: 314655 - DNA, 122 bp, Homo sapiens
cccgcagtcacttacccgccggctgcgcggtctcggccgcggtggcggcggcgacggcggcgacccccgcctgggtcatgatcccaggaggggaaggcaggagtgtctgaccgtctgggcga

SEQ ID NO: 314656 - DNA, 122 bp, Homo sapiens
gcgccgactcgggagcggaggggctgggcccgccttccggctgatttgcagtgaggccagcgggtcccatagagttaagtaaaaagtacagttttttaaatggtcccagtccctacccacta

SEQ ID NO: 314657 - DNA, 122 bp, Homo sapiens
atgccaccttgggcatttcttcagagccctctcaggcccaggaactggactgggctggtccgccttgcaatgccctctgtggcctggccccaccctccatgcacacgccctttgcacctcat

SEQ ID NO: 314658 - DNA, 122 bp, Homo sapiens
agtgttgggattacaggcgtgagctaccgcgccccgcatggctgctctttagtgagcaaccgtggcaattagagccgataaacaccatgtggaatgagtggccagcctttcagctaaccaga

SEQ ID NO: 314659 - DNA, 122 bp, Homo sapiens
tttgaatccagcactgccccaggcctgagctgcaggagcccacagcttctatgggactaccgagggctggggtggagtgaggggtgagggcagagacactccatgaaaaagggatctgtcca

SEQ ID NO: 314660 - DNA, 122 bp, Homo sapiens
ctggcggcaagttctgctcagcggagtttctgcctgcgaggagagcgctgggcgtgaggccgaacgcactgggccgagcgacggaggcgcgcgcagagggagggtcccgcgcactagcggaa

SEQ ID NO: 314661 - DNA, 122 bp, Homo sapiens
ctggagttcgcaaaacgtgacccggaaattggtcacgagcaggcgccgtgggcttgtggacgcctaacttgcgcgctgagatttccggcgtgggagcagaggtctgagtcttgcgtgggtcc

SEQ ID NO: 314662 - DNA, 122 bp, Homo sapiens
gcttccagaataaagaggccgagctaggttaagactctttctcagggtgacaatgatttccgccttaacgccctccctcccatgaatgtgggaatttcgtgggttccacagtacataaaata

SEQ ID NO: 314663 - DNA, 122 bp, Homo sapiens
gtgcctagaaatacgtacatgggagcgctcagctcaaagccccagggtttctgggactcgcgtgtccggggtcggggtcccaggtgggtacaggtgggagggcgaacctgcgggtagggtgg

SEQ ID NO: 314664 - DNA, 122 bp, Homo sapiens
agcagcagcagtaatagttgttggatggtgttactccagcttgaacattccagatacatccgtcttacattctgtttctgacattggacaaatagtgtaatgttggggctgtccagcaggag

SEQ ID NO: 314665 - DNA, 122 bp, Homo sapiens
tgtgcctgtaatcccagctactcgggaggccgaggcttgagaattgcttgactcgggaggcggcagaggttgccgtgagcagaaatcgcgccattgcacccagcctgggcaacagagtgaga

SEQ ID NO: 314666 - DNA, 122 bp, Homo sapiens
catccacactgcgccgcacctcagccaccttctcctgggcgccggcgggcaggccccgcacgctggactccagagcctctaccgtgccctgcagctcctgggtcaggctgcgggacagcacc

SEQ ID NO: 314667 - DNA, 122 bp, Homo sapiens
cttgcttgcctcagagacattggagccgcctggtgataagacgactggtgggatgcgaggcgatcggacgcctgcccgggccgcaggagcaatgcggcgcacatcagggtgccggtcacgtc

SEQ ID NO: 314668 - DNA, 122 bp, Homo sapiens
tgaaaacaggcactcatagaaaaagcatgcaggtttagagctgttactgtagaggaagatcgctttctgccactagatgacgctgcaggcattgctgcagccctgacacagagctgattatc

SEQ ID NO: 314669 - DNA, 122 bp, Homo sapiens
tctttgtcttgtatctttatttctacactctctcgtcgccgcacacagggagagacccaccgaccctatggggctggtcactacactatccctgctccatggggcctgattccatatcccct

SEQ ID NO: 314670 - DNA, 122 bp, Homo sapiens
ctggaaatgggtcactaaaggatcctcccagggtcccacctcagatgtggaaatggaggacgactggcaaaggggaccctctcagagggcagaaccagggttgtcagatcggctggtcaagg

SEQ ID NO: 314671 - DNA, 122 bp, Homo sapiens
agacagatcgctctgagcctcgatgtcttcgtccacaaaacaggggcaatgacaagtacccggcagggctgggtgaggatcagatgggccttctgataccctagaggcactgggcaatgcgg

SEQ ID NO: 314672 - DNA, 122 bp, Homo sapiens
agacaggagactcctctggcgtccggccaactgggattcccccttgccttccggggccgccgggtgcctgggttctggccagctggatttgggacacaacagttgaggtacagagacagcgt

SEQ ID NO: 314673 - DNA, 122 bp, Homo sapiens
agtgatagtccattcatttaattcattcatcaagcatttattgagcactagatgctactacgtgctgagagctgcatttaataaagataagtgacatatcatccaagacctcattacttttc

SEQ ID NO: 314674 - DNA, 122 bp, Homo sapiens
agagtgaccagtggcaccgcagaaagttcattaacactcccatttgtggcgtctgattcacggctgctgccgctggtgggaagctgggagctgctgctgcgagagcaaatcagcttgggcta

SEQ ID NO: 314675 - DNA, 122 bp, Homo sapiens
gactcaccacgagcctcttgttccaccggccttggggacgaaggagtttgactgcctactcgctggcccagggctttctcctggtgaccaggagggtcccattcggcggcctccctctggtc

SEQ ID NO: 314676 - DNA, 122 bp, Homo sapiens
aacaatccttccctcggttgctagggacattgcggagttgcgggactacgtttcccacgtcgccccacgccacgcccccttggcctcgccggaaagacgtcccaggagcctctgggcgtaga

SEQ ID NO: 314677 - DNA, 122 bp, Homo sapiens
aagtccgaacctatcagatcgcgctcactgcctcctcctcctcctcctcctcctcctcctcgtacttcggtgaacacttttgcacaacttacccagctgatcactcgcgccccctcgctttt

SEQ ID NO: 314678 - DNA, 122 bp, Homo sapiens
ataaatatttaaaagatgtttttaaatgtcagccagctgagtgagagtatagaaaagtaacgcactcgccacacactgctggaagctgtagatatggcacacttttgaaaaacaatttggca

SEQ ID NO: 314679 - DNA, 122 bp, Homo sapiens
gcctgcggccacagcggtgccacgaactccatcccctcggcggtcgccgcccgcgatccccgcgagccgctccccgaggtcccgcctcccgtcccaccatcccgggccctgactccccgggg

SEQ ID NO: 314680 - DNA, 122 bp, Homo sapiens
atttaaatgaaaagacataggagcaaacttggaatacttttagtgctctggctgtgcactcgaaaatacaaaattctaatgcaagagagccgaatcaagaatacaccaatctactcccaaat

SEQ ID NO: 314681 - DNA, 122 bp, Homo sapiens
gaactagagcaaaaaacatacattccattaatttggcttctcattcccccgaaaggccttcgtagacttgcgattttcactatacatttcctctcccagatctttaattaaaaatatgagct

SEQ ID NO: 314682 - DNA, 122 bp, Homo sapiens
ccagagaaacggaggcactagccaggaatgacacagttaagattagcaccctggagcctgcggggtggctcacgcctgtaatcccagagacgcaggagtctgaggcaggaggatgacttgag

SEQ ID NO: 314683 - DNA, 122 bp, Homo sapiens
gcggccagagggttgagaaggaaatggggtctgaactggatgaggggcgcttgcttgctccgtccccaaagacttaccggtggcccagaggttgcctcgcgagtgcactcggatcttgctgg

SEQ ID NO: 314684 - DNA, 122 bp, Homo sapiens
cccttccctgcgtgctaatggcccggtggcaggcggctccgtggctgtttccgggggaggcgggtttgcagccaggggagatgttggagcggtttgaggaagaagaattatacatacataaa

SEQ ID NO: 314685 - DNA, 122 bp, Homo sapiens
gctccagagaggagctggagttctgggaccggcatttagtggaggacaccccagagcccacgaggagggaactggagggagaattcagccagtgctagccataacatcactcagccacagtg

SEQ ID NO: 314686 - DNA, 122 bp, Homo sapiens
actgcagccggccaggccgggagcgctcccgagggcatttgttcaggggttccacttggccgagcacagcggaggcgccggaggcggctgctctcccaggacccggccaagagggtgcaatc

SEQ ID NO: 314687 - DNA, 122 bp, Homo sapiens
gttatccctcacaccagtttcctaatcatcactaagccctggggaaacacaatggatcagcgaggccccaaatgcagatgtgattagcacactggtcagtcagcccgcaaaacactttcacc

SEQ ID NO: 314688 - DNA, 122 bp, Homo sapiens
ggtgatccgcccacctcggcctcccaaagtgctgggattacaggcatgagccactgtgcccggcctgtttttgttttttgatacagggtctcgctctgttactaaggctggagtgcagtgat

SEQ ID NO: 314689 - DNA, 122 bp, Homo sapiens
caggaagcggagagaaattataaaaggcagcatggaggaccacctccagtggcccagcttcgagtgcactgtggatgctgagatacaatcacagataactcagaacccgagggaggtgctgc

SEQ ID NO: 314690 - DNA, 122 bp, Homo sapiens
cctccggggccacctgggtccttttaaagtgtccggggtgcgggccccgggcgggagcgccgaacacggaatgttttcttaaagggccagttccgagctgcgctgaaaagggggggggggag

SEQ ID NO: 314691 - DNA, 122 bp, Homo sapiens
aattggtccaggatttgcaatattgccctgctcttcccagcgggggttgctgcgcacctgcggtgacagttaaatgaaaaggtaaggcataagaatttcatgcacaagcacctgtgacatct

SEQ ID NO: 314692 - DNA, 122 bp, Homo sapiens
ctgcctgtattctttggtcccttccttctggaagcaaatgcaattggtgggtggggagtgcgagtctgacaaaaaccttcttaaactctggaaatccagatctttaccgccccctctttttt

SEQ ID NO: 314693 - DNA, 122 bp, Homo sapiens
cccagggatccgcagggaggggaaggcctccgaacagaagtcagggcgccacctggcggccgcagcccacagcccacagcccacagcccacagcccgcagcccgcagccctcagagcccaga

SEQ ID NO: 314694 - DNA, 122 bp, Homo sapiens
ggcaagaagggtagaggcatcactcctggctaaagtgtctaaggtttctggaagacaacccggggtggccaggctctggatgtgagaaggccgatttggacagggtgctccatgttgcttct

SEQ ID NO: 314695 - DNA, 122 bp, Homo sapiens
gggagaggggacgatgaaggagccggggacggaggcaggaatcctcttctgattaaactccgaacagcaaatgcattttccgaaaagctgctggataaatgaaggcaggacgcgcctggccc

SEQ ID NO: 314696 - DNA, 122 bp, Homo sapiens
ccggccgggacagcagcgcccggcctcggcgcagccggcctgggccccgggccacagccgcgacagcgcgcacagcgccatccacagggtcctcatggccagggctccggcggcgcctgcga

SEQ ID NO: 314697 - DNA, 122 bp, Homo sapiens
cgcaatctatggaagcttaatgagcgccgtggggagcagctacctccgcctccaaccctgcgacgctgtgctctaaatcatcgcttctgagatcacccacttccagaccagcctggacagct

SEQ ID NO: 314698 - DNA, 122 bp, Homo sapiens
aacttcagtagcaccaatgcccaacagtctgcacctgaaaaagttaaaaaagaccgtgggcggggcccaaatgggaaggaaagaaaacctaagcacaacaaaagggctaaatggcctgcaat

SEQ ID NO: 314699 - DNA, 122 bp, Homo sapiens
ggaacaaatcctgcaaaggagagcgcctgtgtgcggcccactgtctaactaggtcagcctcgggcacagctccttttgacagtttgctccccagggcggaaggtgacccgcaggtgccggct

SEQ ID NO: 314700 - DNA, 122 bp, Homo sapiens
tctgttcagtggctcctgcctttgtagtggattcccttgctgtgctgtaattaagtcagccggcaggagttcctgttttgagggggcctctcccggctggagaagtaccactgcctttgtgt

SEQ ID NO: 314701 - DNA, 122 bp, Homo sapiens
cgaccgcgagcgcatcctcagcctgcggaccggccggggccgggcggtgctgggcgtcctcgtactgcccagcctctaccaggggggccgctcagggctccccaggggccctcgtggcgagg

SEQ ID NO: 314702 - DNA, 122 bp, Homo sapiens
attaaactttatcataggtacgtaggtataggaaaaaaccagccaggaggccccgcacttcggtgttttctactagctctgcctacctccgtctgcgccgtctccctgactagtttgaccct

SEQ ID NO: 314703 - DNA, 122 bp, Homo sapiens
ccgggagcaggcggccggaaggagcccttccctcccttctccggtgattcccagaacttccgtctctacccgtcacctgctcccaatcaaaggagcttaatagacggcgacgttttcgactg

SEQ ID NO: 314704 - DNA, 122 bp, Homo sapiens
tcgaggtttccctcatttggggttacatcccggttccatcaacaactccctgaatgacaccgggcagggagtgttccctcagggcctcgatctcttcatctggggaaggggcatggtgaccc

SEQ ID NO: 314705 - DNA, 122 bp, Homo sapiens
gctcctcccgaggcctcgcgcgtcggaagcttctgtcccctggattccggttgacggacgcgtcccccgagcaggttctcggtagcagccgacacgccccaccccgggcacagcgaggtctg

SEQ ID NO: 314706 - DNA, 122 bp, Homo sapiens
ccgagaaggggtgggagaataagcacggcatggaaaaaggagctgggagtcccccacgtccgcagtgagaccccacagatgtttcatggctgtgactgtttgcctcccactcaagaagtaca

SEQ ID NO: 314707 - DNA, 122 bp, Homo sapiens
ttggcagacaccctgatagggaatgttttatcttctaataggcaaatgtctttcagagcccggaatctacaaaaaaagctaagtctcattttcatctctgttgaaatccagatagtctctaa

SEQ ID NO: 314708 - DNA, 122 bp, Homo sapiens
catccttgcagtgcaaaagcagctatagatagtaggtaaataaatggttttactgtgttccgataaaactatttataagagtaggcagatgaatggatttggtttacaggcatagttttctg

SEQ ID NO: 314709 - DNA, 122 bp, Homo sapiens
gggggctgtggacaagaggtcaggccatttgccaaagtcctccactcaatctataggtagcggggctgggttcctaaggatgtctgattctgaagcctggtccttgatctctgtgctccatg

SEQ ID NO: 314710 - DNA, 122 bp, Homo sapiens
tttatccctttcaaaaatgattaactgtatgcaaaataagatatcaactaacgagagggccggcaagggttaacgcggaaacagatccccgagctgaaaaaacaaaaacaaactggggagcc

SEQ ID NO: 314711 - DNA, 122 bp, Homo sapiens
tgggaactgatcaagtggcatctagttatgagataccccatttggtgagagggttgagtgcgtggaccagtgactgagacacaaaatggagatgcagttgtctcttgttttgagggcattct

SEQ ID NO: 314712 - DNA, 122 bp, Homo sapiens
accacaaagcaggaacagccctgtcgtttttaccttagcaatgcagattctgtgcttgggcgcagcacctgcgcagagctgctttctcatcctcaagtgaactgaaccaaatgtgagagaaa

SEQ ID NO: 314713 - DNA, 122 bp, Homo sapiens
cggccactgggtttcggcctcttcccagcagcggctctaagaagcgcagcggaactcgaccggatccaacccagttagttacttcctgtctagagttgtagcttccacctggtaagtttaga

SEQ ID NO: 314714 - DNA, 122 bp, Homo sapiens
gacatttgttttattaaaacataagcaaggtgcttgctttggcagcacatatactaatatcggaataatagagaaaacattagcatggcccctggtcaaggatgccatacaaattcatgaag

SEQ ID NO: 314715 - DNA, 122 bp, Homo sapiens
ggacgtcaggcggggctgacgtcttgcggcagcaagtcgagtgggcggtgcaggaccagccggtggccccccgcgtctgggaggctcccacaccaccagtctccacccaggggcagtagagg

SEQ ID NO: 314716 - DNA, 122 bp, Homo sapiens
ttggcagaattcatgcagggctatcaagtggtgttctagggtaacagtgtccataattaacgcttagtcatagagtcaaaaacatttaagactgattgggttgaagtttataataaattata

SEQ ID NO: 314717 - DNA, 122 bp, Homo sapiens
agaaggcggccacctggctgatattagaggaaaacagctgcgaacagcacgggcctgagccgcaaaatgctgttttggtaaaaatcctaccacatccatggcagtcatttcctgtcttctgc

SEQ ID NO: 314718 - DNA, 122 bp, Homo sapiens
ataattatcgaccaggtttgtaactgtccgtggcagaaggcgggcggggacggaaagcaacgaaaatagtctgggcattacgctctaaatagaggtgcacatctcctggggaaaagttgcga

SEQ ID NO: 314719 - DNA, 122 bp, Homo sapiens
cccaaagacagcgagaagagcgccatgggggtgtgagcaccacaggcaccctggatggcccggccccggggcccgtacacaggcggggccagcacagtagtgaaggcggtctcctggacccc

SEQ ID NO: 314720 - DNA, 122 bp, Homo sapiens
atggtaatgagcagacatctggccgagcggcacactttcgtttttggcagctccggagcccgccaagtgactattccctaatgttcaccacatcccagcccctgctattcccaatcaggctt

SEQ ID NO: 314721 - DNA, 122 bp, Homo sapiens
gtggttgccatagctgtatggtctcacttcagcaccttccctttggaagtgtacatccggcggctcaggaacatccgtcgagcagtggttcggctcctcgatcgaagcccaaagaccgtggt

SEQ ID NO: 314722 - DNA, 122 bp, Homo sapiens
ccaacacggcaaaaccccatctccaccaaaaaatacaaaaatcagtcaggcgtggcggcgcgtgcctgcaatcccaggcactcggcaggctgaggcaggagaatcaggcagggaggttgcag

SEQ ID NO: 314723 - DNA, 122 bp, Homo sapiens
gttagtaaagagatggtgttgatgaaggaggaagtggaggaaggaggggaggatgcactccgaataaagatttgtagaatccagctcctatgatgccccatctcgctgaataatcttgggca

SEQ ID NO: 314724 - DNA, 122 bp, Homo sapiens
tctataagcctctgtgtgaaaacaagcgcctttttctccaagtcgtttcctccaactgttcgttccgtatggactctgggtgccctgtgtgggctcacatctgtctgcccagcaacgagccg

SEQ ID NO: 314725 - DNA, 122 bp, Homo sapiens
taattccacatgagttttggtagggacattgacaaaaaccgtattattctgtccttgacccgatgaatctcatgtccttctcacattgcaaaatacaaacatgtcttgccagcagtctccca

SEQ ID NO: 314726 - DNA, 122 bp, Homo sapiens
catccagctggctctgataggcttcgcggaattcgtcctgcatttaaatagactcaaccccgagatgttacagatcgctcaggtaacctgctttgaacagccagatcctctcctcgtgacat

SEQ ID NO: 314727 - DNA, 122 bp, Homo sapiens
tcgttaaaggtgaagatggaggccaaagccctcgggagcaagactggaattttaaatgagcgcctccagtctccgcggcggcaagtcttaaagctaccttaagaacgcaaaagttccagggg

SEQ ID NO: 314728 - DNA, 122 bp, Homo sapiens
ctcctcggagccacccagtggggatgtgtgggtgcctcggggccggccccctgcagcggccgcagaggtgttggtgtgctggaccgggggcagctgggtgtggcgtgagtggggccgcccag

SEQ ID NO: 314729 - DNA, 122 bp, Homo sapiens
ccgaagtctctccaaaagtgcctcttcctacgtaactgctgagacggcagaaaccctacacgtagattgctggtgtgactgcactgcccgttctctcaatacatggaactaacgggcagaca

SEQ ID NO: 314730 - DNA, 122 bp, Homo sapiens
cagaatgccgcgagtgcgccctggttaggttggagtcccttggccatcaaccttttcacccggtagagctggttgcctgtcgggatgccaggatacgcagttaattactatacggtgactga

SEQ ID NO: 314731 - DNA, 122 bp, Homo sapiens
tttgagactttgagttaaggtggcacgttactggagattccttaagcctcattcctcctacgctcctttcttttccactttacttatggccaggttccaccactcaccctaggaacatgaag

SEQ ID NO: 314732 - DNA, 122 bp, Homo sapiens
ggctggaggtgatctcaaagggcacaagggttggaactgaaccagccatgccaggggacgcgggtttggtcggagccctgtgggaagggaaggcccctctgctccaggccctccaggatctc

SEQ ID NO: 314733 - DNA, 122 bp, Homo sapiens
gagggaatagcaggtagaagggctccagagtgtgagtaggtgagattgagggagtagacacgaaagcagtaaaagtctcttgaaggctatgtgaggcagtggtgctttcttagcatgaggaa

SEQ ID NO: 314734 - DNA, 122 bp, Homo sapiens
gtgtacggcagtggcgagaaggtggctggccgggtgatagtggaggtgtgtgaagttactcgtgtcaaagccgttaggatcctggcttgcggagtggctaaagtgctttggatgcagggatc

SEQ ID NO: 314735 - DNA, 122 bp, Homo sapiens
gtcggcaccccagtctcccagttatcaaatacagcagctgatgaataggagccctgcaaccgggcagaacgtgaacatcaccctgcagagcgtgggccctgtcgtcgggggaaaccagcaga

SEQ ID NO: 314736 - DNA, 122 bp, Homo sapiens
agctggcaaaatcccacaagagctgagcgctgggactctggaggcctacctgggcttgagcgctgatcctcatccttctgtaaaatggttacttgagtataataggtacctgatgtacatac

SEQ ID NO: 314737 - DNA, 122 bp, Homo sapiens
tgtcgggaccaaacgagctcatcttagcacacatctgcccaaagacagacttggtgccgtcggggccggccagcccgcctttgctccttgatcgtttgacctggagaggaggaagcaagcaa

SEQ ID NO: 314738 - DNA, 122 bp, Homo sapiens
tgtgaggtgggatgggaatgggactagtggatgggagccaggctggccatgccactgtgccggagggtggcggagcagaatgcctggatgtcaagaccctcttcccttccaacctcctcttc

SEQ ID NO: 314739 - DNA, 122 bp, Homo sapiens
gcctctggggacacgttctccaggcccgcacggcgccccggcctaggccgcaacgccccccgcccagaggagttgcctcagaagatgggcaggggacacactagagggcagggaaaaatcgc

SEQ ID NO: 314740 - DNA, 122 bp, Homo sapiens
tcagctctgagtggaaacccagggccatgtcctctgggcaggtgtaggctttctctcttgcgtttgtcctctgtagattatgatgctagcattgaagtctttcttgttgcgcctggctgtgg

SEQ ID NO: 314741 - DNA, 122 bp, Homo sapiens
tgctgcagcccgggcgaggctgcgccccattggccaactgcaatgaggtcattgcgggggcgggggccggcggcggcgcaggggcggggctttacggacgcaagcacgtcgaagcgctgctc

SEQ ID NO: 314742 - DNA, 122 bp, Homo sapiens
cccgccaattcggccttctgaccttcgccttctgaccccgagagctactcttccgtcttccgtagcacaggaatgcgttctggggcttcaagaagctgctgtttttgaaaatgagtcctacc

SEQ ID NO: 314743 - DNA, 122 bp, Homo sapiens
gaagaaggacaacgtggccctgactccatcgagcacgtctaggatcgtggtggagaaggacgggtcccttctcatcagccagacgtggtcaggcgacatcggtgactacagctgcgagattg

SEQ ID NO: 314744 - DNA, 122 bp, Homo sapiens
gggggcgaagcaccggccacaactgaaggcggacgcggcctcttcgccccaggggctcggcggacgtagatgcatccagcgtgcgactatcccagcgcctaacggcagctggacttcgctcc

SEQ ID NO: 314745 - DNA, 122 bp, Homo sapiens
atggcgtacgcctatctcttcaagtacatcataatcggcgacacaggtgagggccccgggcgcggccgggcgggtgtcggcggcctccggacccgggctgaggggcaaacggcgtctggcgg

SEQ ID NO: 314746 - DNA, 122 bp, Homo sapiens
cctccagctcacaagcggaagtatcttcctagctaaagccagcctctctgcgtttgctctcgatctctcccctcccaccatttggccccccttaggggacagaacagatcatgactgatgca

SEQ ID NO: 314747 - DNA, 122 bp, Homo sapiens
tggagacgggacaactaggttctgggaagccatggcagaaatcacgcagactctgattcccgccgagaaccagcctaaagaaccactcatggcaagacgggggcccaccggcctgctggctc

SEQ ID NO: 314748 - DNA, 122 bp, Homo sapiens
aagggcgccggctggagctgccgctcggggtccggaggtgcctgctccatggctgcagttcggcgcggcgaacccagtgcgcctgcgccgccgccgcgcccgcggccaaccagtctctcagc

SEQ ID NO: 314749 - DNA, 122 bp, Homo sapiens
ccgccaccgccgccaccgccaccgccgccaccccggctggagagcgctgggcgcaagctgcgcgcgcagaccgggccactcggtcgccagaaaagatttttttaaaaatggaacagaatatt

SEQ ID NO: 314750 - DNA, 122 bp, Homo sapiens
cgcgccgcgtgctcacctggggagtgtggcaatcctggcggcgccgagtgttgcccgggccggagcagcggagcgcgcgacagtggcggcgacggctccggcagcggctcccgcggcggcgg

SEQ ID NO: 314751 - DNA, 122 bp, Homo sapiens
ctggttaaatgaatgtcctacagaaatgtgcatagggttaaggcaactacaaagggatgtcgaggcacccaagagccagcaacagagggagctctcacacccctaaacatgaaggggtcagg

SEQ ID NO: 314752 - DNA, 122 bp, Homo sapiens
agggcagagctgtgttggggatgtggtgcagggaatctgacacgccagggagcaggcagtcgggaggaaggaaaagaacacacatgctggcctcccagtcagggcttccgccccagtgatgc

SEQ ID NO: 314753 - DNA, 122 bp, Homo sapiens
ccacccgctggcttctgcgtcagcacgttgccaaggagaacgtcagtgtctctgggctcccgggtgtgagggctgcagtgagtgcagggcagcacctcagagcagggaaggcagatttccgg

SEQ ID NO: 314754 - DNA, 122 bp, Homo sapiens
ggcggggaggggctgggcgggccaggccagctccattggcgccaggcgggtgggggaatgcgctgagaggacccgtccagcttgcttaaaagccatcagttttctgaccccgcatcggttcc

SEQ ID NO: 314755 - DNA, 122 bp, Homo sapiens
agcaaacaaggactttcagctctgcttcattttgtttcgtttgttttgttattttggagacgagttctcactctgttgcgcaggctgctttgaaactcctgggctctagtgatcttcctgcc

SEQ ID NO: 314756 - DNA, 122 bp, Homo sapiens
tcaacagtactagaaaacccaaaacctgccctatgaccctcacccttaccattagtaaaacgtaaatttgatcaatcataacctataaagtcatataacaaagggaagactaaagactgatc

SEQ ID NO: 314757 - DNA, 122 bp, Homo sapiens
gggggcacttaggtaccatatgccccattcccaaagggcacatttctggatagaagcgatcgtatctccaagtccctctcacaggacatgctttgtgccatcactgagcatactcagatcga

SEQ ID NO: 314758 - DNA, 122 bp, Homo sapiens
tttttttttttttttttgagatggtatttcgctcttgtttcccaggttggagtgcaatgacgcgatctcggctcattgcaacctctgcttcctgggttcaagcgattttcctgcctcagtct

SEQ ID NO: 314759 - DNA, 122 bp, Homo sapiens
gaagtattgaggaggtggggatggcattagggaagggttgtgccctgagctgggtaggcccgttggttggtaaacctttgttgtctttgaggaggccaaagaagccttgcatggacgcctca

SEQ ID NO: 314760 - DNA, 122 bp, Homo sapiens
tttcgttaccttagttaaggcaccccctccccgtgcagggtcagggttggaaaactaccgcgctgagcccaaattaccgcgaagatcgtcggaaatgtgcgcaactcagctaaagcggagat

SEQ ID NO: 314761 - DNA, 122 bp, Homo sapiens
caagcacagtcctgacactcagagctcccgcggtcttacagacaagggaatgaatccccacgtgtctcctgcaaccatctctgttccagcttctcttccagactcctccagtctctctactc

SEQ ID NO: 314762 - DNA, 122 bp, Homo sapiens
cgggattttggcaggcagaggacgtgctgctctgcgaacaaccacgactcgcacggaggccgcccccagcctgtccctaaggcacgtggtcctctagagggcttcgcgggagagttctggct

SEQ ID NO: 314763 - DNA, 122 bp, Homo sapiens
acattcaccctcatttcacagataaggaaactgaggcccaagatggcacagtggcctcgacgcccaggttttccactttcaaagaccctccctcacatctcattacctgataatgcaacaca

SEQ ID NO: 314764 - DNA, 122 bp, Homo sapiens
caccaccagatgaaccgaggcgaattaaaccattttgaacgttaacgccgctgcacaaagcggtatgaaagggttctctgcctttctgaaacgccgggcaaaagtccctcagcaagtttcaa

SEQ ID NO: 314765 - DNA, 122 bp, Homo sapiens
tctgggctagggtggggagcacggtgtttaattcctgcatttctgaggccaaccctcccacggagccctggttctgaccaaaccaacccaggccctaggctccatgctctggcataaactcg

SEQ ID NO: 314766 - DNA, 122 bp, Homo sapiens
gagagcaggcgtccagtgagagcaggcgtccagtgagagcaggtgtccagtgagaacaggcgtccagtgagagcaggcgtccagtgagagcaggcgtccagtgagagcaggcgtccagtgag

SEQ ID NO: 314767 - DNA, 122 bp, Homo sapiens
gaaccgcgtccccgccccagttccctgtccgtgagccgatttatctgcccagggtcggcgcgcgcggctgtctcagaactcatgcagctgttcccgcgaggcctgtttgaggacgcgctgcc

SEQ ID NO: 314768 - DNA, 122 bp, Homo sapiens
ggggcgccctgacaaagttaaggtcaagttagtgtcttatcttgggtgactcaaaatcaccgcatcgcgtcctggcgctgtgcggaaagctctttctcgcggagcggctggctgcgccccga

SEQ ID NO: 314769 - DNA, 122 bp, Homo sapiens
ctcaagtgattctcctgccttgggttcccaaagcgttgggacggcagatgtcagccaccgcgcctggccttattcttataaactcaaaattatctgaattcaagcaaggtaatgtatttcac

SEQ ID NO: 314770 - DNA, 122 bp, Homo sapiens
ccgccaggggtctcagcagctcggagggtggaggggcggcagcgccaggcaccgcgcacgcgcctttccggagccagaatgcccaagaggaaggtcagctctgctgaaggggccgccacagg

SEQ ID NO: 314771 - DNA, 122 bp, Homo sapiens
tgccctcagggagctcatggtctaacggagagagagacatgtgaacaactacaacgtctgcggtctaagaaaacactaaattggagacgtgttcaaagcagtgcaggggagggagcggagtg

SEQ ID NO: 314772 - DNA, 122 bp, Homo sapiens
cgcagctaatgcacaggcaggaaaaggggtcagaaatcccgaagtcaggaaggaagctgtcgtcagcagcatcagataccagaggctaagaaactgaggactgagaacagcccctcggcaag

SEQ ID NO: 314773 - DNA, 122 bp, Homo sapiens
tgagctctgccttcccttcagccttagcctcagcgtggacccgggactcctgcatcctcccgtcctgccccgcctgggcacaccacggccgagagcctcctgttggcatcagcctctcccca

SEQ ID NO: 314774 - DNA, 122 bp, Homo sapiens
ggtggagggagcccccgctttatcctcggccactcccgagttcttgtcctccctcccgcacgcctggcccccagagccctgctcaaagtttggaaatgtcctgggggttgtaaaagttccaa

SEQ ID NO: 314775 - DNA, 122 bp, Homo sapiens
tcacacggttaccctcgaaaatcagcacatagacaagagcacaagtgcatactcacctgtcgcaatacacaccgtcccagcactgccctgtcactcacagtcacactatcaccatcaacctc

SEQ ID NO: 314776 - DNA, 122 bp, Homo sapiens
cacgtgtcacgtgagccagcgccgctgcccagtgggagattacgccgcaggcacgtgatgcggcgcaaccgccctttggcagagcttttcgcgaaggcagttgtggctctgagcgcataggc

SEQ ID NO: 314777 - DNA, 122 bp, Homo sapiens
aaaaaccccaaaccaacaaaaattagcctggaatgggctaatgtccgacactaaaatgtccgggcgtggtggcacgcacctgtagtctcagctacttgctaggctgaggtgggaggatcaac

SEQ ID NO: 314778 - DNA, 122 bp, Homo sapiens
agcccgcgtgcagctgggcctgagcactccaggggagggtgtgttttttttttttctaaacgattcttcgtgcttggttgttcctgcgcagtagcccaccagtgccccgtagtgaaagagct

SEQ ID NO: 314779 - DNA, 122 bp, Homo sapiens
ggcacctctcagggccccatccgccccgtggctaacagagctgttggtagctattacccacgcctgcctcctctgctgagtgtgctcacagttgctccagacacattcccaggcttttccaa

SEQ ID NO: 314780 - DNA, 122 bp, Homo sapiens
ttttttgtgagcatattctaacctaggcgaaatttctaagcacaatagagatttttatagcgtgggcgagaagagtgcattccagcgaaagcaggacacgtgatccctccaacgggtgagat

SEQ ID NO: 314781 - DNA, 122 bp, Homo sapiens
agacacatggtcacgtgggcagcccttctgagactggaacagctgagaccctgccttgatcgcaagacacaggcactgagggtctccttccccacccaacttcacacacacacacacacaca

SEQ ID NO: 314782 - DNA, 122 bp, Homo sapiens
gtatgactcatccatctcagccaagatgggaattactgttaatgccacactgtcacggaacgctacaactggaagggaccacaggaatcacccagacagcccctcttgttttgcaaataagg

SEQ ID NO: 314783 - DNA, 122 bp, Homo sapiens
actggtggccagaaatgaaatatttttaaaataaaatatatggagattgaattgctgaagcgctggcttgttctgcggcttcctgggatgtgagctagagggaaggcttattggacagagcc

SEQ ID NO: 314784 - DNA, 122 bp, Homo sapiens
gatgatgtcaccctggggaggtttgggtatgcgctgtgccgctggagagaccgctagaatcgcctgctctcagacatgggtctgtgcataaaatggtaccagatgttttagtgtaacgttaa

SEQ ID NO: 314785 - DNA, 122 bp, Homo sapiens
cccgaagagacagtaacgcctgagcgctttctatgctaggttggatgaggacacagaggtcgtggggaagcatgacaggacaaggggtgagctgagggtggtcggtgggaaccacggcaagg

SEQ ID NO: 314786 - DNA, 122 bp, Homo sapiens
gttggcttgataatacgtaaaacaaaaagttgggagaaaagccattgtggtgctatcaaccggagtctctgatatctactagaaaatatcagcctatccaaggccgggagcagaagccaaag

SEQ ID NO: 314787 - DNA, 122 bp, Homo sapiens
cttcagtaggcttttctgggttgcagggacccggaaaagcagcggcttccactcggggggcgggtcccaagggtcttgctgctgctctggggccgtttggactcctggtgttgggggagggg

SEQ ID NO: 314788 - DNA, 122 bp, Homo sapiens
acctctcgcctcacctcccccgcgctcctttcttgcttcataaactttcaccactgccatcgaccaaaaagcaaacagagacttggaaaccccgtgtacaacacgtacactgcgctctcgtt

SEQ ID NO: 314789 - DNA, 122 bp, Homo sapiens
acatggccggggagcccgggggagcggcgggcgaggtctcctggtgggctgatgggcaggcgcgtcgacgggagcgctgcgggggctcaggcgtccgggtggctccggggggctccaggcgg

SEQ ID NO: 314790 - DNA, 122 bp, Homo sapiens
gctgcactctctgtagctgggatgctgtcagtggggggctgaaggtctaactttgcttcccgaacttctatgagtgtgaggggtcactcccacagcccccatctggaatgaccctaccatag

SEQ ID NO: 314791 - DNA, 122 bp, Homo sapiens
acctcaggtgatccgcctgcctcggcctcccaaagtgctaggattataggcgtgagccaccgggcccggcctggcgaccttatttctgcatacagcagtgccccttatccatggggagatac

SEQ ID NO: 314792 - DNA, 122 bp, Homo sapiens
cagttagaagggttcagtgtggaaaacaggaaaccaaaagcccctctgaatcctgcccaccgaggttctccccagccaaggtgaggcggccacagtgcgagatccacaccgcagcctcggaa

SEQ ID NO: 314793 - DNA, 122 bp, Homo sapiens
ccggccggtgacagagtccagcggagttgtgggggccgggggcgccatgggagccactggcgacgccgagcagccgcggggacctagcggggccgagaggggcggcttggagctgggggatg

SEQ ID NO: 314794 - DNA, 122 bp, Homo sapiens
gggaactaagtaatctttgtggatgagatttttctttaaaattggctacatctgcaagagcggatgcctgaggcagcagtggaatgaggtcagtcgagtctacaagcagccagctatctgat

SEQ ID NO: 314795 - DNA, 122 bp, Homo sapiens
ggagggcagtggtctgtctcctcagtatctcagcacccagtgcctctgggcttttctgaacgtgctgccaccagcgtccccgtactccacccccagggcgcagggtcatgagaggggagcat

SEQ ID NO: 314796 - DNA, 122 bp, Homo sapiens
tggtagaatacctgccctcaccccccaccctcttttttttgagacagagtcttgccccatcgccaaggctgttagagtacactggtgatcacagctcaccacaaccttgaactcctgggctc

SEQ ID NO: 314797 - DNA, 122 bp, Homo sapiens
ggcttgcgcagggagcaaagggaccgcggcgccacctgcgcgcaccacgcgtgaaacgtgcggacaggacgcccccagaaagttctgccttccgcgcgcactgctctagccatccttacgtc

SEQ ID NO: 314798 - DNA, 122 bp, Homo sapiens
ggccgggctggggtgcgtgtcggggctccagctgcagtagcagatgctttgcggcggaagcggggagtcacgggttgacctggggagggagggacccacatatgagcataggtgggtgaagg

SEQ ID NO: 314799 - DNA, 122 bp, Homo sapiens
aggctcactggggaagactgccgggatccaggtctccggggtccgctttggccagaggcgcggaaggaagcagtgcccggcgacactgcacccatcccggctgcttttgctgcgccctctca

SEQ ID NO: 314800 - DNA, 122 bp, Homo sapiens
gcaaaatggatctctgctaattatgtttcatgcatatttcagaactttccacagggataccggaagatggtgttcatagaattttacaagcaggttcacttgcatttggctcaagactagca

SEQ ID NO: 314801 - DNA, 122 bp, Homo sapiens
ccctgcgcgcaacgagccccttctcccggtactgcctcctgtacggccagggaagggagtcggcaaccgcacgcacagcctctgcctgagaccctgggagaggttctgggctagcagaggcg

SEQ ID NO: 314802 - DNA, 122 bp, Homo sapiens
accaccccctgctccacggcgcccagtcccatcgaccacccaagggctgaggaatgcgagcgcagggcgcatgactggcagacagctccacctgcagccctggtgccggatccactaggtga

SEQ ID NO: 314803 - DNA, 122 bp, Homo sapiens
ttgggccaagcactgtgatcagaacttagtggcctctgacgccccaggggaagagggaaccggcattctaaaatcaaaaaggactcaggcagctgatcatcagcctatcttgaaaacagtta

SEQ ID NO: 314804 - DNA, 122 bp, Homo sapiens
cacgacagcggagatggcggtgttatagagagtctctgggatccactctagttccacggccgccatcttccttccctcctcctccgcctcctccgcctcctcctcccgaaggcccccacctc

SEQ ID NO: 314805 - DNA, 122 bp, Homo sapiens
aggaaggcccggcttccagctgaaagcggttggaaaggcagacttgcagctgtgacctggcgcagggagggccggcccaggatgggtctttctaggtggatgcctgtgaggtgcggcccctg

SEQ ID NO: 314806 - DNA, 122 bp, Homo sapiens
cagtgcgggcacccttggtacagctggggagactgagccctcgagggcggcggacgctagcgcaggatccctctactgttggggaaagagcatgtgcttgagcggggaggtccttgggcttt

SEQ ID NO: 314807 - DNA, 122 bp, Homo sapiens
gcagccagctcccactcacatgggcagtggccgagtctcagccgccgtgcatgaaggagccgtgtgtaagcccccgtccccggcccagctctgcaagtgtttaacaagaaataacaagaaaa

SEQ ID NO: 314808 - DNA, 122 bp, Homo sapiens
cgcgcgggcccggcagggccgggcaggggccagggggctgcgggcagactgcgctcagcccgcgctgcggctcgggcggccggcgacgcgcgggcactcggcgcgcgctgccaccatggtga

SEQ ID NO: 314809 - DNA, 122 bp, Homo sapiens
caacagaaaacactgtggagggtgccccaaggttccgctgcagttagtcttcctaagattcgcttcaactacagcacacgcagggatccggggaaaacgctgcctcttaatttgtaaatgtt

SEQ ID NO: 314810 - DNA, 122 bp, Homo sapiens
acagctctggggtccagagatccaaactcggtacccctgagcctaagtccaggagtcagccgggccgggcttccttctcccggccaggacctttcccggcctaagtccaggagtcagccggg

SEQ ID NO: 314811 - DNA, 122 bp, Homo sapiens
ggggaaggggcgccggggcagtgtcctccttggggtttgttggtccagctctgggcagctcgatgaccccgcctccgggacccagtgtgcttagtgactcagtttacactttttcctcgtcg

SEQ ID NO: 314812 - DNA, 122 bp, Homo sapiens
ctactgcagccaacccatctcctggaagggcgctcccgcccacccccgctactgcgcagccgcactgaactctggtcccacttagcgggagaaactcgggccacgtgactgtctgaccacgt

SEQ ID NO: 314813 - DNA, 122 bp, Homo sapiens
ggccctatttcggggagatgttgggcaccaactttttttaaagccccgtgggtggttctccgggatctcccagaccgagagggcctgaacgtccagacctcagggaatggggtcgaaggggc

SEQ ID NO: 314814 - DNA, 122 bp, Homo sapiens
agcagccagagaagcagtggcccggggcagttccgagggcagtgcctgcagtcaagtggccgggtcaggcgtggtgatctcttcttgcctcgtgatgtcagggttagggagctgccagtttc

SEQ ID NO: 314815 - DNA, 122 bp, Homo sapiens
tgtaaaatacaaagagagctggctttgttaaacagcaatggtagaacaacccaggtgacccggaagttcattatcccctctcattggtagctcgaggagcctgagttagcttaaggaaagaa

SEQ ID NO: 314816 - DNA, 122 bp, Homo sapiens
ctcgccggcctcggcggagattccaggccctatagaaaccaggacgtcccttagcgccaccgcctcacatgccagtgctgccgggaacccagcgatatccgcaccaggcaagagaactgcgc

SEQ ID NO: 314817 - DNA, 122 bp, Homo sapiens
ctccgtctgcaaggagagcagagggtccccgccgggagcgcgcccggctgcggccccaggcggccctgcccgcagccgccacctgagcttgggcgcggctcctatctcccacccgcgcgtcg

SEQ ID NO: 314818 - DNA, 122 bp, Homo sapiens
cgatcgctttcaagcccttcattgtcaattttgctagaatgagccactcgtggggtaggacgtggttgttgatgttactgttgtagctcttactattgtaacatttttgttgctgttttaac

SEQ ID NO: 314819 - DNA, 122 bp, Homo sapiens
agttttttaaccagcatttgtcgtatcacgaagcgttcacaaacaccttaccttcacgggcggctgcaatagttttcattaagcactggtaaacacacccagcgggatgcgagcagcccagg

SEQ ID NO: 314820 - DNA, 122 bp, Homo sapiens
gaagctcatgccacttgttttggaggcagagttgatttctgaggttgcctttcacagagccgagaagggatcttagagttcattttattagtcatattttacaggtgacaaaatgaagtcta

SEQ ID NO: 314821 - DNA, 122 bp, Homo sapiens
tcatgcaggaatttgggtcttgacataaaataaagcacaaagtccagatttgctgcttatcggcagtgtaatcttcgacaagtcatttaaactctagcttcagtttgctcacctaccaaatg

SEQ ID NO: 314822 - DNA, 122 bp, Homo sapiens
tgctgtacgtgtaacttgttcattggcccggcccatctctctcccctggagcttgagagccgcacgtgcaggaacccagccttgttaaccactgtctcctcccaccctgtccacacccagtg

SEQ ID NO: 314823 - DNA, 122 bp, Homo sapiens
tgagtgaaagcatacaaaccaccaccgtgcggctctctacactagcaagtttccgaagttcgccccagccggtttccctgaacaagttcccaaccgcatcacgtttagtttatctcgttatt

SEQ ID NO: 314824 - DNA, 122 bp, Homo sapiens
acccccctgtggcaattccctgcctcaagctgtgactagttactggatgtttccttcattcgtactgagacaggcagggggtagtgggctggtcacaggcagctgaggctttgaatgtagtt

SEQ ID NO: 314825 - DNA, 122 bp, Homo sapiens
agccgcacacggagcgggccaggtgaagacgtgtggctcacagaaggcaggtgggccaggcgcgcgcttcccgggggccgctgggcgcgtccggtcagtaacgtggcttttctgtcgccagg

SEQ ID NO: 314826 - DNA, 122 bp, Homo sapiens
tagaatgagcagctgattcaacactgttgagttggggtttggttttgctttttttaaaggcgactcagaaagtagcccctggagaacttcaagaaggcagcaggctacaggctgtggaggtc

SEQ ID NO: 314827 - DNA, 122 bp, Homo sapiens
ccagcgccctctgaggtggagttatttggcagcttagtggttttcttgtttttactgttccgtttggtttctatgatagatgttcctgggaaagtttgggaaaacaaattaagagaattggg

SEQ ID NO: 314828 - DNA, 122 bp, Homo sapiens
cggaaagttatttcaaaaggcagatgtgttgcaaccctctctgcagcaaactacagtacgcggattcccgaacccttccccgcccccacccagcccgggcgaccagagcccgccgcgggaga

SEQ ID NO: 314829 - DNA, 122 bp, Homo sapiens
atcacgatgcgctgggagcggggaccggtgtcaggggcgaagccggctacaccagcctcccgggattccctggaggccccctggctctcaccttgggcacaggcactgcatcctggccggac

SEQ ID NO: 314830 - DNA, 122 bp, Homo sapiens
ccctctggagttttagcactagtcccgcccactcccttctacttccaggtcgggggggggcgggtccaatagaaaggcggaagccagtgtcccaggcgttctcacgcccgcaacaattcctg

SEQ ID NO: 314831 - DNA, 122 bp, Homo sapiens
cgcccaagggaccacagctggcatcccaggggttaatttcggagcagcccaggtggaggtcgagcccccagccccgtcggcacctccaggcttccgaggccaccggaacggaggaggcttcg

SEQ ID NO: 314832 - DNA, 122 bp, Homo sapiens
tcttatccttcagctgtcagctcaaatcaaacatcagcttccaagagaggccccccaacccgcaccgtctaaaggggccacctaccaggctctctctgagtcattatcttcggagcactcag

SEQ ID NO: 314833 - DNA, 122 bp, Homo sapiens
gcccaggcgggacggatgcgccctccagggcccaggcgaggccgcgcggtgcagaaccgccgggatttctccaacccgggtatgcgcacccacagcagcggcctttggaggccgcggcgcca

SEQ ID NO: 314834 - DNA, 122 bp, Homo sapiens
cactcttcccgcaagcatctttgaagcgggcccagcttttgcgcttggcacaatcgcccccgccccccttggggcccaggcactcggaccctggcgcctgtagctttgcgtggtctggcacc

SEQ ID NO: 314835 - DNA, 122 bp, Homo sapiens
cctcgagctccctttagaaaacctttccttccagctcacagtatccaccatgtccaccttcgcctcccggcactgagccttagaggggcggtgctccataaacatttgctacatgaatgaac

SEQ ID NO: 314836 - DNA, 122 bp, Homo sapiens
aggtatatttgggctgctgtgtcttaaaacagaagctatatggcactcacaaaaatccaccgtgagggacccaaccaaggggttacttccgagagatgttagggagattcttcagagcagct

SEQ ID NO: 314837 - DNA, 122 bp, Homo sapiens
tctctctttctctctctctctccgtttggggctcagcgcgaggaacatctggattttgtacgtatttttgttattgttaaattaacttctcgagaagagaaagggggggaagctgctaggtg

SEQ ID NO: 314838 - DNA, 122 bp, Homo sapiens
gaggcggccgcagggtggactgtgctgaggaaccctgggcccagcaggggtggcagcccgcgcagtgccacgtttggcctctggccgctcgccaggcatcctccaccccgtggtcccctctg

SEQ ID NO: 314839 - DNA, 122 bp, Homo sapiens
gctaggtttcgggatcagagaactgctgcttctccagacttcagaacaatgggcaggacccggagagcagctaggatgccccatcccgccttttggtccccctattctgggacttcccactg

SEQ ID NO: 314840 - DNA, 122 bp, Homo sapiens
tttttcttctttttcttcaagttatggctgtgtctcctgcttttcccatttcttcccaggcgtgtctttcacaaagaaatacaacaaaagttggaatatctaatccattaaaagaaaaaaga

SEQ ID NO: 314841 - DNA, 122 bp, Homo sapiens
atctcacattatgtttagctgtcatgtctcttttgcctcctctggtctgtgacagtttctcgaactttccttgtttttgatgatcttgccagttttgaggagtactggtcagcagtgttgta

SEQ ID NO: 314842 - DNA, 122 bp, Homo sapiens
tcccagagggagcattttctctctgggacaggatgttcatcttcagaacagacctgtacacggacaggcctttgcttgtggcttcatctctgtggaaatagaaacctccgcattggatcgtc

SEQ ID NO: 314843 - DNA, 122 bp, Homo sapiens
gccggactgaggctcttacagtggtccctgctggcccttggtgacgggtcgcctcagttccgacccggacccgtacgctgctgcgctgacgtggctcccggaagtagggctggcgtagggcc

SEQ ID NO: 314844 - DNA, 122 bp, Homo sapiens
gcaaacggaggaggaatttcttctcgccacggggtttctgtttccctgccccaaaccagacgtccttgctctcagatggatgagggcttttgtttgtttgtttgtttgtttttaaataatcc

SEQ ID NO: 314845 - DNA, 122 bp, Homo sapiens
ccaggcaggccagccggtcctctgagagataaggctcacactttggactccacacagcgacggggccccctgcccctccagctggcaggcgggctccctgcctgcttaggggtctaggccga

SEQ ID NO: 314846 - DNA, 122 bp, Homo sapiens
tcttgctccagccgggggagcggttcgggggctccgggcagtagaccatgccctggagctcggggggcctccgggatgttcgccaataggggtcctccccagctccaagcgtcctgaagcgc

SEQ ID NO: 314847 - DNA, 122 bp, Homo sapiens
ccttttgctgctcccacctgtggctgtgtttatttcatgatcactttagtcctctcactgcgaaagacaccgtcaggagcttgcttctgtcaacactgttgtctttcttaaagtgccatgtt

SEQ ID NO: 314848 - DNA, 122 bp, Homo sapiens
tggaaaggaggaccgggagagttatggcatttatgaatgaagaagagaaagagaatcactcggatgggaaaagttaactggattgttcccacctgcatggatcaccgggtaactgcagtggg

SEQ ID NO: 314849 - DNA, 122 bp, Homo sapiens
ttgacacacattgccagacacacggaatctctcggggaacaccgatgggcccacaaaacacgcggaggccgcggtcgctgacgatgtgagcaaattcggttcacggtgtctggggtacagcc

SEQ ID NO: 314850 - DNA, 122 bp, Homo sapiens
tctgcaaagaagcacttgaaatggacattcagactctatagttttttaaagcagtggcagcgttgcttctttctccagccagaccccagataccagtgcctaccaaagtgtcctctctcaca

SEQ ID NO: 314851 - DNA, 122 bp, Homo sapiens
cgaggcaactttccaaccttggagataactctgaaggacatcgtccagaccgtccgcagtcggctggaggaggcaggcatcaaagtgcacgacgtccggctgaatggctccgcagctggcca

SEQ ID NO: 314852 - DNA, 122 bp, Homo sapiens
cgtcgtggcggcacggccgtcccttcacaaccggggatggattacccagaagtcagcaggcgccagttctggtcccaactatgtctcttaggagtttgtggcataaaagagttatttcagct

SEQ ID NO: 314853 - DNA, 122 bp, Homo sapiens
caccccaaggagacttccgtagaaatcacagtattattcaggattgccagaacatctcaacgtgggcctcctcctgactgggggcaccattactctccattactccattactctccatttgg

SEQ ID NO: 314854 - DNA, 122 bp, Homo sapiens
acctcatgatctgctcgcctcggcctcccaaagtgctgggattacaggtgtgaaccaccgcgcccagccacatgtgtgtttaaaccgctaggtttgtggtcatttgtgacagcagccataga

SEQ ID NO: 314855 - DNA, 122 bp, Homo sapiens
gcctcgggacagtgaaacactgcggcctcgggactgtgaaacactgcggcctcgggactgcgatacactgcggcctcgggactgcgatacactgcggcctcgggactgcgaaacactgcggc

SEQ ID NO: 314856 - DNA, 122 bp, Homo sapiens
ggggtcgcgcaggatcctcacacgcaggggccgggctctgttagtgcgatccagagaggccgtgggcgtcggtgagctccttcagacccgcaggagccggagcccggcgttgaaggggccgt

SEQ ID NO: 314857 - DNA, 122 bp, Homo sapiens
tgtgaccgcgtgattgccagtgcacacggggggaacacacaactgcgctttgggaaggaccgactggtcgaggggaggaaccatgaatggtcatttaaaaccattttaaacctttttattaa

SEQ ID NO: 314858 - DNA, 122 bp, Homo sapiens
ggtggccagatcacttgtggtcaggagttcgagaccagcctggccaacatggggagaccccgtctctactaacaatacaaaaattagccaggtatgatggcgcacgattgtaataccatcta

SEQ ID NO: 314859 - DNA, 122 bp, Homo sapiens
atattttcaatccacagttgtttgaatccatggatgtggaacccatggatgtggagcccacgaatacagagagctgactattacagacagtgattagtacatgataaagatgactgtaatag

SEQ ID NO: 314860 - DNA, 122 bp, Homo sapiens
cagcagagtttattctgaggagacaaattcagaattatgataaatctcagcacctgcatacgcacttgtgtttgtgtatacaagtacatgcatctagagagaaatgaaaagtgaaggaccac

SEQ ID NO: 314861 - DNA, 122 bp, Homo sapiens
gcacgacgtgaaaacccctctggggccgggccaggatccccagggcgagggcccaaatcccgatcactcatgtgccgagtttctccatagcctgaccctcacggggttcacacccaagaacc

SEQ ID NO: 314862 - DNA, 122 bp, Homo sapiens
acagatttttctgtgtccttctaaagcaaggaagtcttcccctggaagctccaacagatacggcctcatggctttgctagaaatgggtcatctcactcctgtcattggcaaagcaagtaaga

SEQ ID NO: 314863 - DNA, 122 bp, Homo sapiens
gacttgctacttcctgctggaggacaggcaggcgggcaggtgctatgggtgactagagtccgaccccccattttatagtctggcagacatcaggccctatagtctgtggcacaaaggggaag

SEQ ID NO: 314864 - DNA, 122 bp, Homo sapiens
atatataagacttcaggtcttgtttaaatcctatggaagatgttgacatttttgttttggcgggcacttgacctggttaagttcaggcctcacatttcaacccaccttctctgagctgcaat

SEQ ID NO: 314865 - DNA, 122 bp, Homo sapiens
cagagggggatgctgtaagatgagacttaaaagccgcaggggagtttggggggggtctctcgcattcctgaggtccctttgactataggtaataaaggttaacagaaggtggaaggctggtt

SEQ ID NO: 314866 - DNA, 122 bp, Homo sapiens
cgcacacaggctccagcccatcctcaggtctctgcctcctgctccggctctggcttcctccgcatgttggattcgtatgggttggtccccagctgccctgtgaggcaaggcaggccttgatg

SEQ ID NO: 314867 - DNA, 122 bp, Homo sapiens
ggccagtgaagggctccgtgcttaaacatcattcgttacagaagtattgcggccatcacacggcattttaaaaacacgaatgatgataaataactttaacactgcttccaattctgcctcca

SEQ ID NO: 314868 - DNA, 122 bp, Homo sapiens
gcccctctgcctggctgcccagtctgggaagtgaggagcgcctcttcccggccaccatcccgtccaagaagtgaggagcgtctctgcccagccgcccatcgtctgagatgtggggagcgcct

SEQ ID NO: 314869 - DNA, 122 bp, Homo sapiens
ccccacttccacagcacctcacaggttaagactcactgtcttggaatctcagccagccgacggcagtgggttggagtccacctgagatggacctgagttcctgcagggagaggtgggtgcca

SEQ ID NO: 314870 - DNA, 122 bp, Homo sapiens
cctccgcccctccgctggccgaggggctgcgagggccgggcggcgaagatgcgtggggcgcggaaggggccgagcccctctttggactgcaagtcccgtctccctggcaacggcctcggcct

SEQ ID NO: 314871 - DNA, 122 bp, Homo sapiens
aagctctccaaggcctcggagggacaggatctgggcgcacctcaccggttgccatggtaacgcagcgccccagcccctcgcgctccgcggtggagggaggcgcagccaatcggaagcggcgg

SEQ ID NO: 314872 - DNA, 122 bp, Homo sapiens
agggcctggttagcatttgggcagctgaatccttcccttggcgaactccatacgtgccctcggcgacacacagaggactcccagagttgaagaagggggtggatgtgtgtgtgcgcactcgc

SEQ ID NO: 314873 - DNA, 122 bp, Homo sapiens
agttcccggccggccgctggagctgcgggaagcggaagtgctcgttgggggtgcacaaggcgcgttcgagcagcggcgaccgacgcggcgaaggagcgcgccatggagcatgtgacagaggg

SEQ ID NO: 314874 - DNA, 122 bp, Homo sapiens
aggagccgcagggccgggtgcacggtgtggagtctgcggaggggcaggtggtgggaggcgcggggtgagggctccggccctgcactcacagtgatgctgtgggaccagctgctggactctgg

SEQ ID NO: 314875 - DNA, 122 bp, Homo sapiens
aacatggtatgagtgggtattatacatatgatgcaatataaatatgatacagaaaagatccggaagcatggcagatgtgactcttgagtggtagattatataataccattagatctgttaac

SEQ ID NO: 314876 - DNA, 122 bp, Homo sapiens
gttcttggagggtggcctgttgcttgctagttcctgttttgatgttggctttgtcaattgcgctgaatgactgtcaatcatgttacttcaactgcggtacttggggacttcctggagctgtt

SEQ ID NO: 314877 - DNA, 122 bp, Homo sapiens
gagcagcgatgtgcagggccgtgttccccttctgaaacacatgggggaagggaacagaggcggtttcccactgggcccgctacgggaccagcaaaggtctgtggacaggtgctgcttgaggg

SEQ ID NO: 314878 - DNA, 122 bp, Homo sapiens
aaaggaaggctgggaactaagaagctattggttggtgatccctggaccaatcggaggagccgtgatttggcgggagtcttgaccgccgccgggctcttggtacctcagcgcgagcgccaggc

SEQ ID NO: 314879 - DNA, 122 bp, Homo sapiens
catgccagcttccaggtgacacactcgccctggaaggcaccctgctgcccactccagactcgagtggttaatcggcgctcccgcccctctgtccgtgttcctagtgactgcgacgcccctgc

SEQ ID NO: 314880 - DNA, 122 bp, Homo sapiens
agttgctaccccaggttagagatcaggcggtcctggattaagcctccccgaactgaaaaccgaacagaaaccgcaaagctgcattgttttgtttgtcccttggttgggctccgggcaaccag

SEQ ID NO: 314881 - DNA, 122 bp, Homo sapiens
agtcgaagcgtgggctccttaaggacaggggctgtgtccgactcggctctgaatccccagcgcctacacaagctctgacacagcgtatactcagtaaacatggagtgaatcagttcattcaa

SEQ ID NO: 314882 - DNA, 122 bp, Homo sapiens
caaaagtgccccatctccacttctcagttgtggtatggccttctgcttgactgctggcttcggtctcttcagcttctccatacattgttggagagtagtgtgtatatatagacatatgacca

SEQ ID NO: 314883 - DNA, 122 bp, Homo sapiens
cctcactccagccctagtcctggtgcctggatatgtgcactccctgtgcgctctgatccccgcagacacaagtccccagcccctccaggacagcaataagggtcttacaaggccagaaggca

SEQ ID NO: 314884 - DNA, 122 bp, Homo sapiens
ctgtgaagcaaagccgttttgcaggctgggttcatccccgttccaggcccgcactagtggcgcctggttatcaggtgtggtgaggagctttgctgccctggagcgtcgctttgtgggcagaa

SEQ ID NO: 314885 - DNA, 122 bp, Homo sapiens
cttaaggaagattatgagagagaccagcacacacacacacagtgcaagctaaagcaaccccgtcttggatgctaatccaccaagttgatgtgttttgttggttttttggttttgttttgaga

SEQ ID NO: 314886 - DNA, 122 bp, Homo sapiens
caacatccaccgtcagggctcaagtggtctttccacctcagcttcctgggactgcaggcacgtgctaccaccacgcctggctaatttttagtttttttacagaagcgggcttttgccatgtt

SEQ ID NO: 314887 - DNA, 122 bp, Homo sapiens
ctcgcagtgggctgcgggcctgtccgtcaagcgtggtcccgcccctaactcgtcccgccccgctgaggtcgtggcgaagtcatcagggaccagttttgtgctttccatggttggattgtcat

SEQ ID NO: 314888 - DNA, 122 bp, Homo sapiens
cgcggccgtgcccgcaccgggagccgcggggggctgggcccggctattgtcgcctgtcagcggccgcccaggcccattcgtcccggccttcatggtccgcgctccgaattacagacccatcc

SEQ ID NO: 314889 - DNA, 122 bp, Homo sapiens
caggcccatccaggcccacactcaccgtcagtgcagcttctcccttctcgcctcgaggaccggcaggccctggccgcccctatgtgcaacagatgggaccaggctgtgacctctgacctcag

SEQ ID NO: 314890 - DNA, 122 bp, Homo sapiens
ccgtgagtcctgcaggcaggacgggttggaggtctgcaaacaggaccctctctgggaagccgcgacagcggctgagctcggggtttgggggcgcaggtcgggctagaaccaccccccttctc

SEQ ID NO: 314891 - DNA, 122 bp, Homo sapiens
ctggcccgcctcactcaccgtcttctttgcggccaccatcttcctgccttaggagcgggacggcccccaacctagaagagacagagaacaggacaggaattttaggatccggagttacaaat

SEQ ID NO: 314892 - DNA, 122 bp, Homo sapiens
ccctgcctagactggaggcctcgtggtgtggggaggtccaaaagccttggccaggccccccgctgaccctgactcactgctccctctctgacgttccgggctcccaggcagccccccagaca

SEQ ID NO: 314893 - DNA, 122 bp, Homo sapiens
tgtttagtgtgtaacttaacctgtatgttgaacattgctcatgcaacaacaacaaaataccgattgatatatttgtattgcagtttttaggccataaagtgctttgcagtatgtttcctcat

SEQ ID NO: 314894 - DNA, 122 bp, Homo sapiens
ctccctgcgcacacccttggagatcgagtttgcccacatgtataatgtgagtgccgtccacgtgcacactctgatgccagcagaaacgcgtgtgcgcgaattctgtcccactcctcagccac

SEQ ID NO: 314895 - DNA, 122 bp, Homo sapiens
tgccagccaggcagggctgggcaccaagggtgagtttcctggaactcttaccaccccacccgggaggcaggggcatgtctgaaaagccctctcttgtacatctcacccttcccacccaatac

SEQ ID NO: 314896 - DNA, 122 bp, Homo sapiens
cgggaccatggatgaaaggttcaacaagtggctgctgacgccggtgctcactctcctcttcgtggtcatcatgtaccagtacgtgtccccctcctgcaccagctcctgcaccaacttcgggg

SEQ ID NO: 314897 - DNA, 122 bp, Homo sapiens
gcccttacccccgaggacgccggcatgtcggtgacatgccgcccgcaggagcatcaggtgcgccctggccgcaggtgccccggaggtgtcgaaccgcagatttcttcagacgttttttgcac

SEQ ID NO: 314898 - DNA, 122 bp, Homo sapiens
ccctactctagccagcaccatgagaacacagccttgggatgtagaatcctgtggcacacccgggacaggccccagagctaaggagaggaaactcactgagtcactacttgaaagcaaccagc

SEQ ID NO: 314899 - DNA, 122 bp, Homo sapiens
gggcttggctgccagctccgcggcccgggcaaaaggctgggactttactccgggtggcggcgaggacgagtctgtgctccatcagctgccgcacccgccgcctcccgcccccaaaccccatc

SEQ ID NO: 314900 - DNA, 122 bp, Homo sapiens
ggcctgacttccaaggcccagggagagttagagacttgcccaaggtccacagcaagtgagcggcctgcccactcgagtcccttctttgatggtcaacagagcctgaggctcctgtgccccac

SEQ ID NO: 314901 - DNA, 122 bp, Homo sapiens
atcaacgtgaaagggatttctcaggtttaaacgtgtttctcctcttagtttctcatttctcgtgggctcagctgatctagggtgtagatggggctggctgctcaggtctgcccttttgtagg

SEQ ID NO: 314902 - DNA, 122 bp, Homo sapiens
ggggcgctcacctgtgaaggtgaggctgggtcttccgggccttgcgggaggcgcgccccacggagctggggagctgggtcgtcggtttgagtctgaaccccacttcctctgtcctcagccat

SEQ ID NO: 314903 - DNA, 122 bp, Homo sapiens
agcaggtcttaaggcagaagaatcacatcaacatcccaagttctattcctcactgcctcacgaatggtctgctagccacctgcagttgttgttgttgttgttgtcgtgttttgtaggtaaag

SEQ ID NO: 314904 - DNA, 122 bp, Homo sapiens
gttcatttcagcattgcgctcttcacccgcctttgtaaaaccgctgcagagtggcgaagacgtctggcgggcggagaaaccagcaccaattaggaacagaggagctaagcagtgggggggcg

SEQ ID NO: 314905 - DNA, 122 bp, Homo sapiens
aatgagattatgcttattaggccaaggcctcgcaaccttttgcaaagaacacagtgtatccgccggattatgctctggaaacacactttctgctcccagcctccgagccattgctccgcgcc

SEQ ID NO: 314906 - DNA, 122 bp, Homo sapiens
tctttgctgaatgctaaagctgtgttagcttggggagggccctgtggatctttgtatgtgcggttgcttctttaatctttgggctggtgatagcttggcagagaggccttgctttcccttgc

SEQ ID NO: 314907 - DNA, 122 bp, Homo sapiens
aaaatgctgtaagtcctttagaacttacagatatttttggcccagatggtttacttttcacgttaatttagctgtgagcacctacagatgcagaaagagaaggaggtagaggaacaaaagct

SEQ ID NO: 314908 - DNA, 122 bp, Homo sapiens
actccatattgcgggtctcgctgcccaggaaggcaccctggaagagctggtccttgcccacgatctgctggtgcacaatggcactgtcggagcacacgccgctgggccggccctggcagctc

SEQ ID NO: 314909 - DNA, 122 bp, Homo sapiens
ccgaggacagaaggaagcggtgtgtcccagcacgcccactcggtatcacgtcgctctcagcgcagagctgtgacagcctgggaaaatgctgcttgcagcctcactccctcttcccctgacct

SEQ ID NO: 314910 - DNA, 122 bp, Homo sapiens
tccgggggactgggcgggccatggcggaggacggcgaggaggcggagttccacttcgcggcgctctatataagtgggcagtggccgcgactgcgcgcagacactgaccttcagcgcctcggc

SEQ ID NO: 314911 - DNA, 122 bp, Homo sapiens
acctgccctacctaaggtgcccgagcactctgtcaaacttctcgctttcttcacctgtctcgccggaaatctctttaccgaaaaccacacgtgctaagcaaaaacaccaacggtcaggagct

SEQ ID NO: 314912 - DNA, 122 bp, Homo sapiens
gaggctgtgaacagtgattgtttcatttgctcggggctggcaaaaaagggatgtacaacccgttctcaccacaccagtgagttaaaaagcactgcagactatgaataccttttgccagttgg

SEQ ID NO: 314913 - DNA, 122 bp, Homo sapiens
gacagctcctgggccaagactcagggagacactgagacagaacgcttggcacaagagtagcggggtcagggcgaagtcccagggcctcaagcgtggctctcagggtctcaggccccacaggc

SEQ ID NO: 314914 - DNA, 122 bp, Homo sapiens
gtgtacgtactggagggagatggtcagactgggccgggaatccacctcacagccaggcgccggccgcggctggaccggccgagcggcccgggcggaggagtcgagcgggcagagacggtggg

SEQ ID NO: 314915 - DNA, 122 bp, Homo sapiens
atgctaatgctgtgatgctccctagaaagatggatcttaacctgctgtgatgtctgaccacgtaaaggtgaagtggggtggggctggagaagagaggttcacatgaaacaaagcccaagaca

SEQ ID NO: 314916 - DNA, 122 bp, Homo sapiens
actttccaacagaggacggactgatccttggccggcacacctccggtcactagaagtgtccgtgctagattggacacacatggttgtggggaggtgattctggaaaggagatcacgagttaa

SEQ ID NO: 314917 - DNA, 122 bp, Homo sapiens
ctgagcagggtttgttggcgtcacatgccgaaggagtcttctaatgtctctccctctctgcgtgtctgctctcacacccgtgcaggcatgacgagtgttctgatgtcagccattggactccc

SEQ ID NO: 314918 - DNA, 122 bp, Homo sapiens
aggtctctagcttcactcctgaaccagcgagatcacgaccctaccagaaggaagaaactccgaacacatctgaacatcagaaggagcaaactccagatacgccgcctttaggaactgtaaca

SEQ ID NO: 314919 - DNA, 122 bp, Homo sapiens
aggccagtaccttggcaggtcatttaacttcttaactctatttcctcctttgtgaaatgacgatggttctcacttatttgtcccaaacccctcatcacccgtcaatgagctattcttccatg

SEQ ID NO: 314920 - DNA, 122 bp, Homo sapiens
gtgactctcctctctcaggatgacgaggacctgtgccttcaacaagcaaaatgctgctcacggttgtcctgcttgcagccagtcactgtgtaaagcctctctgatgtgcacttaagagtggg

SEQ ID NO: 314921 - DNA, 122 bp, Homo sapiens
tcactgcacctgctcggcgaggacgtgtctcagcccatggccggtctgggagctccgtcgcggcctctcccggcggcgcctcaccggccggcctgtcactgcgcccaccttacgcaggggcc

SEQ ID NO: 314922 - DNA, 122 bp, Homo sapiens
ttcttaactccggtgtttacatgcaaatgagatagttccatatgttagttgtggaagggacgattctggcaaaattgtaaaataaggtgatttttgatgctcttggtttctcttggtgatgc

SEQ ID NO: 314923 - DNA, 122 bp, Homo sapiens
gctggttcttggtaaaacgacttagctagtgtcctttgctaaaactggattttacaaggacgtgcacaaacaggcctagcaggagattcagaagcctgactaaaatttggccaaggaaaaaa

SEQ ID NO: 314924 - DNA, 122 bp, Homo sapiens
cccaggccccgcctgcccttccccgagccccctgccccacggtccgtggccccggcccagcgtccgccccgcccggcccggccgctcctcagtcagcaaagcacctgcttggatttggcctg

SEQ ID NO: 314925 - DNA, 122 bp, Homo sapiens
tgcctctgtgtaagacctcatttaagagcagcaggagctgagtgggggacagttctcaagcggttctttggaattagcatttttgcaaggaagctttcttacccaccccaactagagaaacc

SEQ ID NO: 314926 - DNA, 122 bp, Homo sapiens
aactcgaggtagtgggtgaatgtgtcccaagaatccagcgaaacagggtctcccaggaggcgggactggaagggtccggagaggggccacaggctcctggcctttctaagcacaccaagtgc

SEQ ID NO: 314927 - DNA, 122 bp, Homo sapiens
gagcaactgaaataactttggcttttattcaagtcagttattgaagagtttttagcagtgcggtggtatgatttgatgcattgttttacaatgtcattcagtatgcagtattgacaacagac

SEQ ID NO: 314928 - DNA, 122 bp, Homo sapiens
gatcaacacagacctacttttagtgtcatctcctgccactctcctgtactaccctaccctcgcttctcacagaaaggctgagaaggctggcagaccccttgtatataccctgctcctttcgt

SEQ ID NO: 314929 - DNA, 122 bp, Homo sapiens
gtgctctccgatggcccaatcactaaggctggacgatgctgcactgtgaatggccaggcccgagtcatgtgcccggagagggcggggctgggcccttccgctcgccgcgtctggcgatcgcg

SEQ ID NO: 314930 - DNA, 122 bp, Homo sapiens
gcagactcgggagggggcggggccgcagccacggtcgctttttatgaatgggggagcgggcggtgcgaggccttattactatgccgcgcaacgcgcgctgcgccccagcgcgccgcgcccat

SEQ ID NO: 314931 - DNA, 122 bp, Homo sapiens
tgaggaaactgaggtgcaaagacgcgagcgtttgccccactaaccacagggtgtctgtcccgccaggggcgcggcatcggccacctctggctgtcgttagattctaagacccagtccctgct

SEQ ID NO: 314932 - DNA, 122 bp, Homo sapiens
taaatgtgcaagtaccataccacccggcagctgcactcctggacatttatcttggctaaacgaaaatttatattaacactaaaaccagtatgcaaatgtttatggtagctttatttgtaaaa

SEQ ID NO: 314933 - DNA, 122 bp, Homo sapiens
caagcgtctgttgcctccttccgcacctcccggggacagggagacttgagcggaggaggtcgggggaagcccagctcctctgtgtgatttggtgtaactctgtcaacctcccagcgtcagtg

SEQ ID NO: 314934 - DNA, 122 bp, Homo sapiens
cgcccactcccctctcagtctagatccaggtgccgtggcgggggtgagaccagaggaccccggctcggagcccggacgccccagggaggctgcgggccccggagctgcttacctggggccgc

SEQ ID NO: 314935 - DNA, 122 bp, Homo sapiens
ttttttttttttttttttttctggtctaattgttgcctaatcatgttatcctggatcaggcgcactttcttttgactaagaaagctttgaactttgctttgcacttcctgcaagaggaggat

SEQ ID NO: 314936 - DNA, 122 bp, Homo sapiens
caaggggggcccggactcatcgatgtcactgtggcctgtccggatcccattgcttctcctcgcgtcttccctgacgcagtcccctctctcaccccctgggtgcacggtgtagtagagctcca

SEQ ID NO: 314937 - DNA, 122 bp, Homo sapiens
agctcggctccaataggctctctactgaccttccctgatcgcggggcacagggccggggccgtatataggtatttgattgatggagcctgggaagccgagcggtcgatggaacccgaggatt

SEQ ID NO: 314938 - DNA, 122 bp, Homo sapiens
ccgccaggcggcgccttggtgcctggtgccagaggccgcaggaccagcagtggccaaggccggcgcttacagtcccagggatcagaggggacggtagagtcgcggttggtggggacccaagc

SEQ ID NO: 314939 - DNA, 122 bp, Homo sapiens
tgtgcttcacttatattgagctataaattgtcattttttccaggggaaaaaatcatttcacgaatgctctgttgaataaaaccaggcagcatttttttgagtgaaaatgttcactttataaa

SEQ ID NO: 314940 - DNA, 122 bp, Homo sapiens
agtcggctgagcccaaatggcacttgcgccctggtggtggaggcatctgactcaccgacccgccacttgggtggaccgatggcagggaagtgcccgcacgggactttgagtgtggaggaatc

SEQ ID NO: 314941 - DNA, 122 bp, Homo sapiens
tagctgggattacaggcacccaccaccacacctcactaattatcatatttttagtacagacggggtttcggcatgttggccaggctggtctcaaacttctgacctcaagtaatccacccacc

SEQ ID NO: 314942 - DNA, 122 bp, Homo sapiens
tgaagaaccttcgcaggcaagctgcttttataccttcccagcagctatcaatcactgtcacgagggccaaaaatagcctgctcggaaggctgtcttaggaaaacagcttggtgggcggggcc

SEQ ID NO: 314943 - DNA, 122 bp, Homo sapiens
aacctctagaactgggaggacacgcccccgaaagggtgtccctgagccaacgtgggaccgcgagtgccagcccgttagcgtcggtcacacgtctgggttcagttcaacccagggaagcgcgt

SEQ ID NO: 314944 - DNA, 122 bp, Homo sapiens
agccaactagagaggctcatgcagcatgggcaagaggtgagcttgtgccatgtgaagctacgggatgtgggcttgtttgccatggcagcctggccaggccccgcctgcctgaccgatacagt

SEQ ID NO: 314945 - DNA, 122 bp, Homo sapiens
ccctctcaccacaggaagtgcactgaccactggaggcataaaagaggtcctcaaagagcccgatcctcactctccttgcacagctcagcaggacctcagccatgagacttctcatcctggcc

SEQ ID NO: 314946 - DNA, 122 bp, Homo sapiens
cggaaagtggtttccttgtaccggacccgcccctcccccaccatcccggcagccccagggcgggtgagggcgactgcagtgtggtcacctcaggctttccgtccctagctcataaaggccca

SEQ ID NO: 314947 - DNA, 122 bp, Homo sapiens
ctgctccggtgggttccggggcagtcgaaagaattacttccgctgggtcagagccgctttcggcgacgcgcgggagatccgtacctggtgaggcgaggacgcagagtgtgtcgctcacttcc

SEQ ID NO: 314948 - DNA, 122 bp, Homo sapiens
gggcaggcttgagtgtcctgagtgccgcctacctgcgggggctttctccttctttattgccgagctaacccagaatctctttcacttccaggtggcaagacagggcagggccctggctcccg

SEQ ID NO: 314949 - DNA, 122 bp, Homo sapiens
agttccgtaaggtccctccgctgcttggctctgcggctgtagcgtgaaggcagacaccgacgatgcctccaggaaggacgtggccttgctccaaaaagactttcttatggaagccagtgacg

SEQ ID NO: 314950 - DNA, 122 bp, Homo sapiens
actgagaagctactgtattcggtaatgtaaatgtatctcttactatctgaatttgggaaccgattgatctgaatagtgggggatgcttgtaatttataatgacctttggaaatgaggatatt

SEQ ID NO: 314951 - DNA, 122 bp, Homo sapiens
tgttgatgaggatgtaagtgttgctcttgggttcaagttccaccagcttatacccgaagacgtactggaggcgctcggcggcccgtttgaagaggtcggggaagatgtccttgtagtccccg

SEQ ID NO: 314952 - DNA, 122 bp, Homo sapiens
cgctagtgctgggcgaaaaggaggcgcaggagaagcagacagcgcggccgcagcagctcccggactgtcccataaacaaagtttggagcaaactcccacccccaggaaagaggcgggcccga

SEQ ID NO: 314953 - DNA, 122 bp, Homo sapiens
ggattaaatttctcttaaaatatacatcaatttgaaaattaaaggggaaagcgtctgagacgagacatgtttggatttctgtcaaactcagggcctttggaaagcagctcagaagccaggat

SEQ ID NO: 314954 - DNA, 122 bp, Homo sapiens
aaataaaaataaaataaagggtttagtgtctatccctctccacaccgcagattcctaggccgcactccctttcccccgcttcccagttaccccgcctcccccttaccccgccttccccgcct

SEQ ID NO: 314955 - DNA, 122 bp, Homo sapiens
gcactcaaggcacggacccccctcctccagcatcctgaacctctgaactctggagacccgcgctgcagccccaagatccagctccaaatacctggagccgaaggtgccaaggacagcaaaaa

SEQ ID NO: 314956 - DNA, 122 bp, Homo sapiens
tgcaaaaagcattccttttgccccttcccagtccatatgctgtcagaggtaaccactgttcggagtttttaaagttttgtttctgactgcagaatcttacattttaattttatttggtaaaa

SEQ ID NO: 314957 - DNA, 122 bp, Homo sapiens
gctgttccctacacataaccgggaaacaggtttaatccaaaatgtaaccaggagaccccccgtccccgccccgcacacgcctgaggtgtgacggctcggcttctagagtggcctggtgtctg

SEQ ID NO: 314958 - DNA, 122 bp, Homo sapiens
cccatcgtctgagatgtggggagcgcctctgccccaccgccccgtctgggacgtgaggagcgcctctgcccggccacgaccctgtctgggaggtgaggagagtctctgcctggctgccctgt

SEQ ID NO: 314959 - DNA, 122 bp, Homo sapiens
ttcgatttcttgaccttgtgatctgcccgccttggcctcccgaagtgctgggattacaggcgtgaaccactgcgcccagccctgcctcacgtcttcttaacatgagcctccccggaccgccc

SEQ ID NO: 314960 - DNA, 122 bp, Homo sapiens
cctggccgtgttaggcttcgctggcgtaaagtccccgggagctttgcccctcacggagaacgttagttgaccctgatggggacccgtagggtaaaggttttgtttttgtttttttttacgga

SEQ ID NO: 314961 - DNA, 122 bp, Homo sapiens
ctaccggcaggcccggggccagcggcacggccgtcacaaggcctgggcggggagacctcgcggtccactgagggcctctgtgaggagaaagatgagacagcacttcagtcctggggagggtc

SEQ ID NO: 314962 - DNA, 122 bp, Homo sapiens
cagaatgtgagtttttaagtgacaagggagagggagggggagggagagaaaattctgaagcgcccagtcttggaggatgagggaggagggcaattccctaatgtccattggaattcggaagg

SEQ ID NO: 314963 - DNA, 122 bp, Homo sapiens
tcctggggtgagcatgccccgcagccagcagccctgcgacgctgggcccggcccggccggcgtctcccgaggctgcagcgctgcctgccgtacgcacaccagttgctaggcgcccggggcct

SEQ ID NO: 314964 - DNA, 122 bp, Homo sapiens
taaaaacccggttctcaacttaacagcatgtggcccagcacccgcttttgccttttattccgcactctgatttttggggggatcgtttgttcccgctcattttctacaaacattacggtatc

SEQ ID NO: 314965 - DNA, 122 bp, Homo sapiens
agagtgggcggggccacgtgccgttgtcagagttcgcaactcgagcgcccagagggctcgcgaaaagtcccagcctgcaagccaacctcgctcagcggacgactggccggatcccaacgcgc

SEQ ID NO: 314966 - DNA, 122 bp, Homo sapiens
aagcttcaccattttatctttcaaagaagaaacacgtcagggtaaaaacaagaagcctagcggttaaagataaacggaaagaaaacacacaattgctcttagtctgtcatttcccccacaga

SEQ ID NO: 314967 - DNA, 122 bp, Homo sapiens
agtcacgttggcattttatccacctgagaagccccttgctgtgacttgatcttaagtctccgttccctcagcaccctaatggattctccaggcttatcatgttagggtgtgacaagagcgaa

SEQ ID NO: 314968 - DNA, 122 bp, Homo sapiens
ggtggttttacctaaaaggtcagcctcagccctgtcacaggaggctggcatcataggaagcgtctactgtattatattgcacatcaatattaacatgtgttctaagactgttatgtgaatgt

SEQ ID NO: 314969 - DNA, 122 bp, Homo sapiens
agctccagccccgcttctcccactttaacccgcttcctcccagcccggactgtccagcttcgagccgcacctgcacctccaacctgagcgtagctctggcgccttggctccggcctggttcc

SEQ ID NO: 314970 - DNA, 122 bp, Homo sapiens
agtcgctctcccccgcagccccgcctcctccccgcgggctcagggcacaaaaagcgcacacgcacacatcaaacgccatgcgcacgcgcacaacaaacgtcacacgctacgcacgcgcgtgc

SEQ ID NO: 314971 - DNA, 122 bp, Homo sapiens
tccggcgcaggcggaagatactgactgagcatagagctgccggggtgagtgcgatcgctgcggggaaaggtcacagtgacatcctgaggcgggaaactggacctttagagagtcgcacattg

SEQ ID NO: 314972 - DNA, 122 bp, Homo sapiens
agcttccagcctgccccgccagggagctacggtgagtgtagaaacagccatatcagcaaacgaaggggtgagaatacaaatggcatactcggggtagagatgatcaaatcagctgcgctcaa

SEQ ID NO: 314973 - DNA, 122 bp, Homo sapiens
gataattggcaggagatgagcatattgaattagatacagatgtaaaataaaggaaaacatcgtgcgttgtttattgaacaataggcttgcctgttgaacactaggcttgcctgtttttcatt

SEQ ID NO: 314974 - DNA, 122 bp, Homo sapiens
cttgcttccccagtcctggcccccttggttttgaccattaaggtgtgtgtgagcctgagccgtgagcacttggcagtggttcgcctgtgagaccaggtatggagtggagcgtcccctcctcc

SEQ ID NO: 314975 - DNA, 122 bp, Homo sapiens
cagagaatcaatcatgggccgtgtgtgtttgcaaaaggacgtgtgtggcagtgacagcagcgggagccccggggggggccccccggggacacgtgtccaccacctgggctcccgtgcccgct

SEQ ID NO: 314976 - DNA, 122 bp, Homo sapiens
ggcagttatgggaatctgagctgtctgtacaaacagggggccgactgagagggacattatcgtggggatttgcatctttagtgatgagaaagcctatgatgcaaatgacatgaattttgtag

SEQ ID NO: 314977 - DNA, 122 bp, Homo sapiens
tcccgtgaagaggtctacgttttcagcccgtttgtggacattctcactgcctgacaaagccgcactcagtctcagcatctcaggctgagggctacactgtggagacggaggtggggtgcgtc

SEQ ID NO: 314978 - DNA, 122 bp, Homo sapiens
cctagacctagttcagtttttccaacttcatccttacttacgcctcctggcaagagtggccgccccgagttgtcccggcagcccggagaggggagggaggtcaagactcgggagttcgtgca

SEQ ID NO: 314979 - DNA, 122 bp, Homo sapiens
gcagacagcttgaggacaggcaagggcacctggagatctggagggtccccgtcaaagctgcgcaccttgatagggtagaagctattcagctacagattgaggagagaaggttagtggaagtg

SEQ ID NO: 314980 - DNA, 122 bp, Homo sapiens
cccttctgagaagtgtcctcctcgctctcttataaaaacaggacttgttgccgaggtcagcgcgcgcatcgagtgtgccaggcgtgtgcgtggtttctgctgtgtcattgctttcacggaag

SEQ ID NO: 314981 - DNA, 122 bp, Homo sapiens
gcgccggttccttgcggtcaagatgctgcaaaacgtgactccccacaataagtacgtttccgcgagccgcgtgtgggaaggggatgttgcagggcggcggcacaggggtgtggggcgccgtg

SEQ ID NO: 314982 - DNA, 122 bp, Homo sapiens
gccgtgcgtggtgctgaatccagctcggggccagatcccgaggcccctggaagacagttccgccggggggctgtcctttctgctccggatgtcgtggctctctcgccctgacccttgctccc

SEQ ID NO: 314983 - DNA, 122 bp, Homo sapiens
ggaatacacagtgggggggtggggggcggggcacatcgactacttcaaggcacactcccacggttcagaaaaccgattggctaaaactgggaaagtcccgcccacaacgctcactggccaat

SEQ ID NO: 314984 - DNA, 122 bp, Homo sapiens
ctccaattcaaagagccaccatctttggtccccacctcagtgggttcccttgtggcccgacgtctccctgtgtcttcatacctaaactcggagcggggcgccaggtaaggatgagtattaca

SEQ ID NO: 314985 - DNA, 122 bp, Homo sapiens
atgggcaaattataaagaggaaagggcgggtctagcctccgcgggtctccttaaaaggggcgggctttgtcccttttgcaccactcacaaaggggttgagcccagagctttcctgctctgaa

SEQ ID NO: 314986 - DNA, 122 bp, Homo sapiens
ttcatgtacaacctggatttctttggaatctgcggagtttcacattttcccaagtgttcacggtgaagctcctggcttcgagctggctgtcttcaagggtgttttcttgagctacccctctc

SEQ ID NO: 314987 - DNA, 122 bp, Homo sapiens
caggtcttttgttacttaggcaaggaaaaccacatgtctgacctggttcagcatgtaatccgagcactttgggaggctgaggcaggcggatcacttgaggtcagcagtttgagacgagcctg

SEQ ID NO: 314988 - DNA, 122 bp, Homo sapiens
tgtgtggcagtggaggggctgtggtcacagaggagccaaccaggagagctgaaggccgcccgtagccatggagacagggcccccgggccagccaggcccgggctggtcagtgaatgaataaa

SEQ ID NO: 314989 - DNA, 122 bp, Homo sapiens
agccgcccggggactccccgccacaggaagcatggctgggactggggtcccagcagggggcgaacgcagctgtgcgtgtgccccgatacaggtgcctggccggccgggccgcgcggcgcgcc

SEQ ID NO: 314990 - DNA, 122 bp, Homo sapiens
agagtgtcagctctaggaaggcagggtttgggttcatcgccgtatccccagtgcctagcacggggccgggcacagaggaggcacgggggctgatattgatgatataatcaaccagcgcagca

SEQ ID NO: 314991 - DNA, 122 bp, Homo sapiens
ccgcgagccccggggcccttagctgacgaccgccctcacctcttctctcttcgcctgccgcggccttttacaaacggggccaaactgttcgctgtaacgacaatcgttattggtcagagccg

SEQ ID NO: 314992 - DNA, 122 bp, Homo sapiens
aacatgttcacaaggaaactccagaagaacagagcagtggtgatggacctcctgtctgtccgtgaggctgtagaacacaaggcagctcccaatgctgccagactctctgaaccctggagagt

SEQ ID NO: 314993 - DNA, 122 bp, Homo sapiens
gcccctccgcgggacgcgccgactccacggccagccgcgcagccctccccgcagccggtccgaattgcctgaccgggagcccccccgctttgcacttacacagccggtggccccgggcccgg

SEQ ID NO: 314994 - DNA, 122 bp, Homo sapiens
agcgcgcctggcgctggactgagcgctccctttctccgccgcgcccgggctgggctctcacgcccgtctctgctcgcgcccgcagccgcctggtgcactatcctcagaggcggcaccgcggg

SEQ ID NO: 314995 - DNA, 122 bp, Homo sapiens
ccactctccagttaggactgagggcaatttatttttaacttctccaagcctctgtttactcgtttatgtaactcaggctaataacgtagtgtctatttcatagggtggctttgactattaag

SEQ ID NO: 314996 - DNA, 122 bp, Homo sapiens
tccagcctccctaccttggccaaagttgaggtcttgtcgtgtgagcgtggtcatccttcccgctacctgagtgttggggcaagggcagagggtagttccagagacccaggagcccagaaccc

SEQ ID NO: 314997 - DNA, 122 bp, Homo sapiens
tttattgcaaaaatatcttacttgcaataaaattgaaggaggacctaatagtgttgtcaacgatcagattcttaaaaatatttttggtgaaggattaccactgtaatttttcctaacttcga

SEQ ID NO: 314998 - DNA, 122 bp, Homo sapiens
gggcattcctggcacggtcaggtgtctacggacagcaatcttagttaattctcaaaaccccggaagatccagaaatggggtgctgacagggacctaacctgtccaccacccctcggtcggtg

SEQ ID NO: 314999 - DNA, 122 bp, Homo sapiens
gaggcacagcgaacggggcagctgcagggactccctgtcctgcaggcgactgggctcccgcgaggcagcaggtgccgaggactagcagcagatctggtgtgcagaaccctggattcgagtcc

SEQ ID NO: 315000 - DNA, 122 bp, Homo sapiens
aggcctatcatagtgcccgagaattcgtgggtgctcaagaggatgggtgtggcctggcagcgcaggcgcactagaggcctgtagggtcggggcgcctgcgcagtcgctcttcctcaggcggc

SEQ ID NO: 315001 - DNA, 122 bp, Homo sapiens
ttcaccccttccttgcctgggcccagcgaggagcaggaggaccccaacttgggaagggggcgtgaagctcccatgaaaaagcagcgcagtcctgggccagacccaccgctctctggcctcag

SEQ ID NO: 315002 - DNA, 122 bp, Homo sapiens
caaagtctgagcaggggatggaaaactctggcgtccccactcaacagcagggcggtgctgcggcgatccagtgcacgcccttgccgccggcgatggcgggaggctcttggaggccggaaagc

SEQ ID NO: 315003 - DNA, 122 bp, Homo sapiens
cccgcagctgtgaatccagtgtatacatggccatcctttttgcttccctcctacccaacacgctcatgtgcctcagacccaggactcctcctcaggtggaagtggagcttgattaagccagt

SEQ ID NO: 315004 - DNA, 122 bp, Homo sapiens
acggcaaaactaaaagagcacatggtagcacatgcccactgcggcttccggagctgtcaacgtccaccccgagacgtggggcgggagccccgcagcctgcccgtctgtatgcccctctagag

SEQ ID NO: 315005 - DNA, 122 bp, Homo sapiens
taaatcgaatggccaaatttatatttgaaatttgtccttacttcaaaatattgcaaaagacgagaacactttgaagaaaataaacctgggcagaaagtaggttgaggccaacaaagtggcgc

SEQ ID NO: 315006 - DNA, 122 bp, Homo sapiens
tctcggacggccgctcgacaaccacctatcggggtttataagggagccgtcctgcctggccgccccccagagaaaggtctgtgatggggtgattctgcttggaaaggttgccaggaaaccgc

SEQ ID NO: 315007 - DNA, 122 bp, Homo sapiens
tagggggagggggggtggttaaacaaaatcatcaatgccaaataataggccctcagcctgcggggactgacctgggcacatttgtgataggaaaagtaaagccagcctttgtggagaaccaa

SEQ ID NO: 315008 - DNA, 122 bp, Homo sapiens
tggtcatgctgcagtctctgttaccaccaccaccagccacagtgaggcaagccactgggccgcaggctctagcctccagcagctgggcagggagcagctcttgctgatggcggcctgctacc

SEQ ID NO: 315009 - DNA, 122 bp, Homo sapiens
gcgcgcccgcctcccgcagcgccccctcccaaacttccctttgcattgatcagcacgttacgtcagtattgataagtttgcaaaaagccaaagtcaagtgcaatcgcgcggcacaccgaccc

SEQ ID NO: 315010 - DNA, 122 bp, Homo sapiens
ctaagatttaaaggattcagaattttaaaatcacagaaactgtacacatgggcacgtatccgcccagttcaggcctctagctcccaagggctaggctttcaggcgtgaattctccagcgcaa

SEQ ID NO: 315011 - DNA, 122 bp, Homo sapiens
gaaaaaaccctctcgaggcgggcagtggggcgagtggcgccccttgacctggggcgggggcggcagcgaggactgtgagtgcgtggatctagctggggccgggctccgccaccgtctcgcgt

SEQ ID NO: 315012 - DNA, 122 bp, Homo sapiens
cccaccagaaggaagaaactccaaacacatctgaacatcagaaggggcagactccagacgcgccaccttaagagctgtataacactcaccgcgagggtccgcggcttcattcttgaagtcag

SEQ ID NO: 315013 - DNA, 122 bp, Homo sapiens
gtgtttaacagatctcttccatgcttcatttcctgccgctcacctcctttacaatgcaatcggagttcattcgcatatctggatcagcactcttaaccacagcatcagccccacagccgcag

SEQ ID NO: 315014 - DNA, 122 bp, Homo sapiens
aaacttgggggaaatgagttgagggaggcacttggggagttgacgcctcccggggtcgcgcgcttggctgtgaacagggtcttgaggttcagagtccgctttccaggcgcgtcttgatcttc

SEQ ID NO: 315015 - DNA, 122 bp, Homo sapiens
gcccggccgcgcgcgcgccgtggagaaccagtactccttctactagcccgcggcgccgcccgggtgggacacgccaagctcttcagtgaagacacgatgttattaaaagcctgttttaggga

SEQ ID NO: 315016 - DNA, 122 bp, Homo sapiens
ctggggtccggcccctgcggcgacgattgtttgtacctaagtgaaggaggctccgagacccgcggcccacgtcctgccggagacgcttgtctgcagggctgcattgcatccccgggcgcacg

SEQ ID NO: 315017 - DNA, 122 bp, Homo sapiens
ctagaaaggaagactgctctactaaggtgtgtgagtgttactctgtgggcgataagtcaacgaagtttctagagagggaaacaactacactgcatgtgaagacaaagctggtgacaaaattg

SEQ ID NO: 315018 - DNA, 122 bp, Homo sapiens
aggggcgcgccgggctgcgcttccatcgaggaacctccgcacatgcaatcacggttgtctcgtcttctggcaaccctggatctccacaaactgatcttcagggtgcttctctcttcagcagt

SEQ ID NO: 315019 - DNA, 122 bp, Homo sapiens
tcaatgttaagatctttgacaattcttcctgcggagagttcagatctgatagcgacgctgcgcttgaagtcccactatttatacttcctaacggcggcctcttgttttgagtaaattacctc

SEQ ID NO: 315020 - DNA, 122 bp, Homo sapiens
ggaggcctctaccgctttcccgcagaagctggagctgtgaactcaccggtgtagacaaagcgcccaggagcacctttgcagaactgcttggatttgtaggagagggtcacttcgacgacgcc

SEQ ID NO: 315021 - DNA, 122 bp, Homo sapiens
ggcacaggcagcggtaggagaggccctcgctcacacactggaactcacagccatggtccacgccattgcaaaggtcccggactgaaaggagagacaggtcaggatgagtcaggatggacccc

SEQ ID NO: 315022 - DNA, 122 bp, Homo sapiens
tgaaatggaaccttagcttcaattgctcagtctgcccataacagagtagaaggacctgatcgcttttccctttagccggcctcaaggccggcagcaggctgcttggcaggaggaagcgattt

SEQ ID NO: 315023 - DNA, 122 bp, Homo sapiens
aaatcatctctcgctcttccaccttcagctgtaacttccattaggagctggcaagtggcacgcaaggtaggctctctgataagagggaaagagacatttgtcaagaactcttaccccaggtc

SEQ ID NO: 315024 - DNA, 122 bp, Homo sapiens
tcaccgggtccagcaggaagcctgtggctgcctgtgcctccagcagcaggcgggccacctcggcactcagcagccctttcttgagagcctggtagatgctcagtgtctgcctggaaccgggc

SEQ ID NO: 315025 - DNA, 122 bp, Homo sapiens
cctgcaccccgggctgacctgccagagcctgaagtcaccagcttcccgtcactgctcaagcgaagtgggggtctgaattcacagcttcgccatcagctattgggggacccgcacgagtcatt

SEQ ID NO: 315026 - DNA, 122 bp, Homo sapiens
caagtagaaatgtgacaagtccctgaaggctgactcgtaaccaggctcccatttgtttggcgttggccaggagaatacatcagtcatggcaagggcctttagtcatattttgactggatttc

SEQ ID NO: 315027 - DNA, 122 bp, Homo sapiens
tactcaggactcctctccgcagttcctgtcccttctcttaatttaatcttttttatgtgccgtgttattgtattaggtgtcatttccattatttatattagtttagccaaaggataagtgtc

SEQ ID NO: 315028 - DNA, 122 bp, Homo sapiens
cagccgcattctctacctctgcctcttgtctagtgaagctggctcccgaggcttcggggccgctccacagggacctgaggacgtctccccggagaccctgactcaagctgctcgccggcaca

SEQ ID NO: 315029 - DNA, 122 bp, Homo sapiens
ccaggcctcaggccccttgccgcggccgggcccgccggccggctcctcccgctgtccccgcgacgcagccctggccccagcccaggcctcgacctcgacctcaaccccgaccccgaccccga

SEQ ID NO: 315030 - DNA, 122 bp, Homo sapiens
tgcagttgagaaaactgaggctgagtgatattttgttatctaccttctctctatatcatgcggtctttgtgtatgtatgttaccaggcaatcgctgtaatccaggcctcttctagtatgcca

SEQ ID NO: 315031 - DNA, 122 bp, Homo sapiens
ccaaggggctgaaagctggaagttgtatgaaggtgttcttttctcacaccccagctactccgccccagtcgaagaggctaattccgggcctcttataaaaataagaaagaaaaggtaaagaa

SEQ ID NO: 315032 - DNA, 122 bp, Homo sapiens
ctctcagtctgtgatttggggagttaacccctccgctgccctctgctggtgaacgttccgcgtgccgcttgctgcctgaagccgcggaatccactggggagaagagagttaaggccaccacc

SEQ ID NO: 315033 - DNA, 122 bp, Homo sapiens
gggagtagaagtagtggagggaagggagaagaggttgcgtttgggagctccaagttcctgcgcttccggtgtggtgttgtgaataagcatcttgcggaactctttaaaatgctttttttttt

SEQ ID NO: 315034 - DNA, 122 bp, Homo sapiens
aggaggataaagactggagtagaaagaagataggagattatttcagtaattcaggagcaccgttcatgctgttaaaactggggagcatgagaaatgtgcagatggggaatatttccaaagat

SEQ ID NO: 315035 - DNA, 122 bp, Homo sapiens
cgcggggaccggggaggtttgtccaggaggacgctggtcacaccgcgtttctgaagctttcgattcctcttcggctctgctctctgcagccgccctgccttccctctgcgcgtctgagccga

SEQ ID NO: 315036 - DNA, 122 bp, Homo sapiens
gagccagttcttatttgcataccaccctcatcgtttcaagggcccccttatgcaaatacacgctcggttcttccgaggaggcggggcctgcatgtaaatgagggggcttgaggtggggctca

SEQ ID NO: 315037 - DNA, 122 bp, Homo sapiens
agtacagaaaagtcactcttatgcactcactatgaaaatgactgaacaactttctggagccgtgttgacataataggatactcactcgggttacaccttatacaagggttataccccttgat

SEQ ID NO: 315038 - DNA, 122 bp, Homo sapiens
ttattccaaatcttaagcctgccagagttttctgcccctgccaaatcttcggagacgacccgatggccatagaccctgtcagctgtcattctggcctctcttgcggagtatttgtgcagcga

SEQ ID NO: 315039 - DNA, 122 bp, Homo sapiens
tgaatggcgacttctgcttcaaactgaggtctggcagctaagtgtgggcttttaactctccgctgcaaaatggccatcaaatggggttctcccttaatatctctccacctgtggattctccc

SEQ ID NO: 315040 - DNA, 122 bp, Homo sapiens
taaatcaaggtgagatgaatcgtggaaagtggcagtcacagtttgataactggaattaaacgcagaaatccaagttagagaaggcagtaacagctcctactgaccagcaggggtcacccaat

SEQ ID NO: 315041 - DNA, 122 bp, Homo sapiens
cagcatttcagaggaagccaggagcgagaactcgtgcatccgaacccttctctgacttggcgggttattggattagctactctcagaagacccaaaaggcataggggagagaagagataaat

SEQ ID NO: 315042 - DNA, 122 bp, Homo sapiens
ggcggcgcctgctagaaggcttagcactgcagggctctgggcgggaaggctaacctggtgcggagccagcctgggtctcagccccgcgtacggcctttcacgagtcttcaagccttcaggtg

SEQ ID NO: 315043 - DNA, 122 bp, Homo sapiens
cggtttggttttttttcacgggggcggtggcgagcagcggaaggcggggcctgctgggggcggggctggcagtctcggctcgcaccgcctcagctcctccgggccctctcggggtgctgctc

SEQ ID NO: 315044 - DNA, 122 bp, Homo sapiens
ctcgtctttggtttcggggactccagaacttgctaatggctttgattggggtgcaggtctcgggtggggggtaggaggcaccaggagctcggggggaacggcagcaactgcagagtccacgg

SEQ ID NO: 315045 - DNA, 122 bp, Homo sapiens
cgtccctcttcttctctcttgctctgctgcattgttctgcccttgctggtctgctggtctcgacttccagctacttgtgtgtgtgctcgctataaaggtcttgggtttatatgggcacagga

SEQ ID NO: 315046 - DNA, 122 bp, Homo sapiens
cccagaaccacacacgctttaccacgagtctccttggtagctggaggaaagcaaggccatcgaaggtggagcctggggtgcctccatccaagccctcatcttgcagacaggcggctctcctg

SEQ ID NO: 315047 - DNA, 122 bp, Homo sapiens
aatcatatccaaggtcaaacagccaggagcagctggaatgcaggcctaagcagtctgactcgaaaccttgctgctaaacgctaacccagaaaacgtcagcttctaactcatctctccattgg

SEQ ID NO: 315048 - DNA, 122 bp, Homo sapiens
cagaaagttggagtttgcgaagacaaacgaagaagatgtcaactgtttttgagaatgcttcggcgtgcacaaagccttttaatgaagaaaatcactttgttttttggtttggttgtctttgt

SEQ ID NO: 315049 - DNA, 122 bp, Homo sapiens
ccagacgaagggccactcctttcccagcccacctgccgggggctgagctagggtcccttgcgtcctcctcataactgaacttcccagggctgtctgcgtcccagggaaggatgagggggatc

SEQ ID NO: 315050 - DNA, 122 bp, Homo sapiens
agcgagtttccgtagtgtagtggttatcacgtttgcctaacacgcgaaaggtccccggttcgaaaccgggcagaaacagagcgtagtttcgtttttttggttgttttttttttttttttttt

SEQ ID NO: 315051 - DNA, 122 bp, Homo sapiens
cctctcccaattggccactgacgagctctggcctgagcggattcggcagaaggcaacatccgggtgagggacaggcggagcgacttgcggtgcctgggattggatcacgggcttgccagttc

SEQ ID NO: 315052 - DNA, 122 bp, Homo sapiens
gggcacgcggacgcgggtcctcctttacttctctgcggcccttccaacctcgtccccccacgccaacattccaatccccgcggcgcgcgccgccacccacgtggccgtcacttctggagctg

SEQ ID NO: 315053 - DNA, 122 bp, Homo sapiens
cgcccaccatgtgacaggccccaccctcctccgccattttgaattgtggcgagaaatttgcgttctgagaattgtgggaaccttcgctttcccattttgaaaactgaaggacgtcacggtct

SEQ ID NO: 315054 - DNA, 122 bp, Homo sapiens
tctcacacaccatgctctttctagcctcctggcctttgcaccacctgtgctgatctgacacgcttcaccttctctctaaagctgtcaccaagctaaggcctgcctggcctcagatcctgact

SEQ ID NO: 315055 - DNA, 122 bp, Homo sapiens
cgtccccgcaccccacgtccccacgtctgcgcccgcacctgaagacgcctcccacgtccccgcaccccaagtccccacgtctgcgcccacacctgaagacgcctcccacgtcccgtctgcgt

SEQ ID NO: 315056 - DNA, 122 bp, Homo sapiens
ttccaattcttcacagactacgtgtgaacagttcatggaccagtgctggtttgcaaagtgcgctttgagtagcactagtataaataaagcacgggctctggagccaaactgtgagcctcacc

SEQ ID NO: 315057 - DNA, 122 bp, Homo sapiens
ctgggccgcggcatacttccggcctgagtccggcaccgcgggtgagagaccgaggccgagcgtgctcagtaaaggaggcagagccagcgtttcgtttgagcgatgtttactaacggcgcaag

SEQ ID NO: 315058 - DNA, 122 bp, Homo sapiens
gaggagagaggaagccatcggagccacactgcagagagggccgtgtccccaggagagattcggaccccaggacgaggctaagctcaacgggaaacaggatgggaggcgcccgccgtcgaggg

SEQ ID NO: 315059 - DNA, 122 bp, Homo sapiens
ctgaataattttcatactttcaaatagaagccagtatactttcctctctcctcccgcatgcgtgtgcgtggtgtgtgtgtgtgtgtgtgtgtgtgtgtgtgtgtgtgtgttgcagggctctt

SEQ ID NO: 315060 - DNA, 122 bp, Homo sapiens
attgtcaagggaagtaacaatcgcggccagcaaccctgctctcccaaagccaccccctcgcgcgacagcgtccccagcaccagttcttactgcttacacagcgcaattccacctgtttgcac

SEQ ID NO: 315061 - DNA, 122 bp, Homo sapiens
ttcccagatagcacgctccgccagtcccaagggtgcgcaaccggctgcactcccctcccgcgacccagggcccgggagcagcccccatgacccacacgcacgtctgcagcagccccgctcac

SEQ ID NO: 315062 - DNA, 122 bp, Homo sapiens
gaacctcctcgctcctcggggttgggagtgaaatcaaaaccaggacttggccgcagcgcgcgcgtcccaggccggctcctgtcgccggagggcggggggtggagacccgtgggagaggaccc

SEQ ID NO: 315063 - DNA, 122 bp, Homo sapiens
ctccgccccggcctgccgggtctctggggaccccgtcttcctccagcgggctctgggatgcggcccgctcacctctgaccctggccggatctcgcgcgtctaagccaccgcgttgccagtcg

SEQ ID NO: 315064 - DNA, 122 bp, Homo sapiens
ggggaaagccagcattgtctaaaaacgtttaaaacgaggcctctaggaggttcctggcagcgttacagtgatctcagccacccccatgctggctgggcacagctcgccctgagccttcgtta

SEQ ID NO: 315065 - DNA, 122 bp, Homo sapiens
ccagcgggaaggccccggccctcagccctcaggccttgaaacacgtatgggtacgcacggcgctcatcgagaaagttctggacaaggtcgtgcaatacctggcggaaaactgcaggtgaccg

SEQ ID NO: 315066 - DNA, 122 bp, Homo sapiens
ctaacaatagctaccaagtaattatgccatgcgtttcttctaaccttcgcaatatcactacgaggtagttcttactatcctcattttacagataaggaaactgaggctaagtgacgctggca

SEQ ID NO: 315067 - DNA, 122 bp, Homo sapiens
atgccctgagagccctcatttgagtgtgtctatctgtgcatctcctgctgtctgcgctggcggcagaagtcccaaccttttcgcttcccttgcgaatgctttcccagacaaagtgaccgggc

SEQ ID NO: 315068 - DNA, 122 bp, Homo sapiens
ccctgggcaacattggaagaagaattgcctggggccacacataaaatacactaacactaacgatagctggtaagctaaaaagaaaaatcgccaaaaaatctgatagtgttttaagaaagttt

SEQ ID NO: 315069 - DNA, 122 bp, Homo sapiens
ccagccatcctcacagcagcagcagccctggtagaaattgatgtgggcaccctctcgacccgcccctgtacttgtctttgtcccagctctgcggactgagcctacctctcttccttggggta

SEQ ID NO: 315070 - DNA, 122 bp, Homo sapiens
ttttgttttgttttttgtttttgttttttcccaaaaaggattttgagggcttcacagaaacgaaagagcaggcaggagggggtggaggaacagtcaattatgcatttgtcttatgctcagta

SEQ ID NO: 315071 - DNA, 122 bp, Homo sapiens
gctttaaccattttccttctggttcatgttcaaccgggctacattacccgcccctctctccgcagcgtggttttgcgatggggtatgtgtaaaattcgtaggacattttctggaaagtatca

SEQ ID NO: 315072 - DNA, 122 bp, Homo sapiens
aattcatgcaacaaatatttattgagtgcctactctgggtcaggcagcctcggcctaagtcgctgaacaagacaaagatctctcattacagagcttgttctctggtatgtgtgcatgtgggg

SEQ ID NO: 315073 - DNA, 122 bp, Homo sapiens
ggaaggccccaaaactgccaacaaaaaatcactaaaaaacagaggaaaccaatgtgaggtcggcgtcaaaactggcaggttgttcagcagactctaagctcagctaagtgtgaaggaatgag

SEQ ID NO: 315074 - DNA, 122 bp, Homo sapiens
cggacgtgggacgcaggggaggggtaggtttcaccgtccgggctgatgactcgtggcctccggggctcctggaacctttactctgaagtcacttgggctggagattaaggcgcgagtagggg

SEQ ID NO: 315075 - DNA, 122 bp, Homo sapiens
cgttgctttttaaaggattttccggaagccttggcgggaacttcctgccaagcgtgagaacgctgcgaacttcccggaggccaaaagttgagggggctgagcggagcgtgattggggagggg

SEQ ID NO: 315076 - DNA, 122 bp, Homo sapiens
cagcctctccggtaggggaatgggtctccccctccggcctcccgggttgacaaaggaacgcgggcccagatccccgtatggcgcttcaccgccggggcctctagcctagaaggaggcacgga

SEQ ID NO: 315077 - DNA, 122 bp, Homo sapiens
tgctaacgtggtcggagaaatatgacctcagcgcaggtgaagcgtgggcagctgacgccacggtgatgtgtgcagatccggtggggactctgacgcagccccagggcaaaaccaacctgctt

SEQ ID NO: 315078 - DNA, 122 bp, Homo sapiens
tctttttatttacatttttaactgatcatcagcagagcggggacggcggtgtcagggaagcgaagggctttcatttgctcccgaggcagcaataaccatccatgcatcggtcatttaacacg

SEQ ID NO: 315079 - DNA, 122 bp, Homo sapiens
atccattctgtaaagaaatactgttaattcccctagagtttaaaactttagggctgggcacgggcctgtaatcctagcactttgggaggccgaggtgggtggatcacttgaggtcaggagtt

SEQ ID NO: 315080 - DNA, 122 bp, Homo sapiens
cacctaccttctctgctcaccgctgtgtgctagcaatcggaggacccttggcacacggagcgacaggggcctcccccacagacacctcattttgggaaagaagtgagcaatttattgagtct

SEQ ID NO: 315081 - DNA, 122 bp, Homo sapiens
gcgggctgcacaggaggcatggtgtcggcatctgctcctggagaggcctcaggaaactggcggtcatggcgagggcaaagcaggagccagcacttcacgtggcgagagcaggagaaagagag

SEQ ID NO: 315082 - DNA, 122 bp, Homo sapiens
aagaaagaaagaaaaaaaagaagcagaaaaaggaaggtatgcccttgagtaaaatgaacacgaagaaagctggacatgaactaaattgagctttgtttgctattaactatatgactatgatt

SEQ ID NO: 315083 - DNA, 122 bp, Homo sapiens
gagagacacaggatgagtaccgggggcagccctgtgatcaacaactgctgcaagaggggccgtttgttcgactcactagtcttctgtggctctatgcggtactaaagagcagaagacagaag

SEQ ID NO: 315084 - DNA, 122 bp, Homo sapiens
tggtgctggttggcagccacagtccagggctgagttaacccgagcaaggatcctgatgcccgcccactggatgcttgccttggctgggatgcaccctgtggggatgactctgctattatacc

SEQ ID NO: 315085 - DNA, 122 bp, Homo sapiens
tgtaaggcttttaaagtgcggtgggaatgtggctccgggttattctcatcgaatgttccacggtgtcagaagacattcacagaggggcaggttgcacaaaacgaggtccttaaacacagagc

SEQ ID NO: 315086 - DNA, 122 bp, Homo sapiens
cttctttaaagaacttcttgcaaatagatgtcccgatgcaggcattgcatttatcaagaccgaggaaagtccttccaaaattgtagctggttctgacttggggcaccagagaagaaagggaa

SEQ ID NO: 315087 - DNA, 122 bp, Homo sapiens
tcttgtgtctgggctctgggccgctggctgcactggcccctggcccaggaaggctgggtccggcaacacctggctagctctagttgatgtagtacaccttggcggcatcataatgggcgtgg

SEQ ID NO: 315088 - DNA, 122 bp, Homo sapiens
gttgagctctcacacagctagacttgttaagggagagcggtgcgggggagataaaaaatccggcacatctggcagcttgtgcctgttccactgaatgcgagagcctgttggctccactttac

SEQ ID NO: 315089 - DNA, 122 bp, Homo sapiens
cttttctccaaacacaacatcatctgaccaaggtttgcatgcataagcattgctaattaacgataagtctccacgatgtcctcctctcagtaagtttgacacacagacctcagcgaagctgt

SEQ ID NO: 315090 - DNA, 122 bp, Homo sapiens
cggttgtgtgatgtgcagccaggcgttgtcacggagaagaactgggccctttttgttgaccgacgccggctgcaggtgttgcagttttcgctgcatctcatcgatctgctgagcatacttct

SEQ ID NO: 315091 - DNA, 122 bp, Homo sapiens
actcaggtgctctcctggcacctgggggcggtggggaaagggggcgcggccgccggagcacgccccctgctgggctgagccgccgcccgtcccgttccccaccctcggagcccctcggcccg

SEQ ID NO: 315092 - DNA, 122 bp, Homo sapiens
ttctactttttttttgagacagggtctcgttctgtggaaccaggctgaggtgcagtggtgcgatcacagctcattgaggcctcgacctccgggctcaatcgaccctcccgcctcagccaccc

SEQ ID NO: 315093 - DNA, 122 bp, Homo sapiens
tggcccaaccctgtcgatgttaaaaaaaacacacccaatatttctacagtgctcttctaacgtattttctttatttcaggtcacaagtctagggttttcatgggtcatgtagcaagtggttt

SEQ ID NO: 315094 - DNA, 122 bp, Homo sapiens
aagaggccgtgcgtacgactcgctgacacctcccatttcaccttcctggcatggaaattgcgagagcgagagattcttgctcccggtgtcgctttttatcagacctcttgatggtttctctg

SEQ ID NO: 315095 - DNA, 122 bp, Homo sapiens
gcagcaatgaagggatgtatctttctgatcctgattgaagtgggttaggggaagagaggtcgagcccatcctctgactcttggcacatttacgagagagagagagagagagagagagagaga

SEQ ID NO: 315096 - DNA, 122 bp, Homo sapiens
ccaaggactctgcccttggtccccagttgcctcccaaagcctgactaaggccaggctggacgctggatggtggcagagcacactcaggttccactgccccagctctattgccaactagatga

SEQ ID NO: 315097 - DNA, 122 bp, Homo sapiens
ccgcgagcggccacgccgccccgctgaccggtctccacagagaagctgcgaagagcaccccgccaccctcagggtcggcctatactggcgcgcatccatttactatcattgactgcatgtaa

SEQ ID NO: 315098 - DNA, 122 bp, Homo sapiens
aggtgctattcagacaataaataattcaatcatcttatttagcatatgagctaggaaccacgatcatccccattttacaggtaaggaaaggaatagtgaggcttactagcccaaggtcacac

SEQ ID NO: 315099 - DNA, 122 bp, Homo sapiens
ggaaaagatgtaaaaaggggaaaaagatgaacaaaaggggaagaatttgctaatggttgccggttaaatgtactgtttaattaaagagtttcttaaaatgagcgtgacaactattttccctg

SEQ ID NO: 315100 - DNA, 122 bp, Homo sapiens
ttaaatgatagggcttgtcactcttcagcagtttgctgagttttaaccctttcactatggcgttctctccattattacagagaaaggcagatgggagcctctcccagcgaaaagactacagc

SEQ ID NO: 315101 - DNA, 122 bp, Homo sapiens
ttatgaatgacggccggcgcgagtattttccacataaggtggctgtcgtttttctcctggcgtctgtggaggcgagtggtctgcgggcagcagctcccagaggcagccttggaattccagct

SEQ ID NO: 315102 - DNA, 122 bp, Homo sapiens
ggggccacgtgcgtgatgaaaggggttttgctctggttcaccgtgtcatacatattcacccgacgcttgcagatctccatgttctggaaacatgatttgacgctgttcatgcaaaaggcaga

SEQ ID NO: 315103 - DNA, 122 bp, Homo sapiens
gtttcttccagtaaattcagccggtgagctcagaggagcaaagagaattctccagtgtggcgctcacaaagtcctcagccctgcgttttagcattgaataccaccaggccatcagtgtggct

SEQ ID NO: 315104 - DNA, 122 bp, Homo sapiens
acagaagtggcacgcacagtaggtgggccccggcttccgctggcggtgccgaggcagggtcgcaggttcacctgggttttccgttgacagcctcgccacacacatttggctctgccaaatgc

SEQ ID NO: 315105 - DNA, 122 bp, Homo sapiens
ccggcacgggatctgggtgggcacgagctcggagggcccgcacttggcacagccagctggcgcctgctggacttgatagggggacgagctccctctgggctgcggagtgcctgggctaggtg

SEQ ID NO: 315106 - DNA, 122 bp, Homo sapiens
ccgccatgcctgagccttcccccgcctccgtgggttcctgtgcagcccgagcctcccggacgaataccaccccctgctccacggcgccgagtcccatcgaccacccaagggctgaggagtac

SEQ ID NO: 315107 - DNA, 122 bp, Homo sapiens
acatttccaaaggcggtgtgttgcaaacacaacgcgattttgcagagcgtgggtgggaaacgtgggaagggtatggatgattttttttttcctcatctgggaatctccatcgtggatagcaa

SEQ ID NO: 315108 - DNA, 122 bp, Homo sapiens
cagcagggccggccggcgagagaggcgccgggggcaagtctcctcccccggcgaagtggtcgcctcccagtgagtcccccagtggcccggccaggccctgctgctcctgctgcaggaggaag

SEQ ID NO: 315109 - DNA, 122 bp, Homo sapiens
tgcatggtccccttgtgggggggtgcccgtcacctgcgtccccgtgcgtcacggcgttgccgcacaccattaacacatcaaaacggaaaaggaaatgtaagcagtgtttgccgtccaaagtt

SEQ ID NO: 315110 - DNA, 122 bp, Homo sapiens
accaaggaggagacgatgaatttttttaccttgatgactactaggtagtcgacatgggtccggcaaaacatgcctcactctccagcatccaacccaaggagcatactcatgatggaatccaa

SEQ ID NO: 315111 - DNA, 122 bp, Homo sapiens
gggaaagaggtagcagtgacggggaaggggagctggatggcagctctcagccccactgctcgggacccctggcttgcccgacgcggcagaaatggtatctgcccccaacaccagggagggtg

SEQ ID NO: 315112 - DNA, 122 bp, Homo sapiens
aaagaaagctggaatctgcctttcaataagcaagaaatagtcctctcatccaggtcatgtcgtccacattccattggcaggtattgtcatatctgcatcctacattgtgaggtcaccaaggc

SEQ ID NO: 315113 - DNA, 122 bp, Homo sapiens
gggggttgaatggcatggcccttgtgacctatgtgtttgcctgcctttctcaagcacacccgtgttgcctctgtacttcctaggtggtgtgggcatggaaggaaggccagtggagacaatgg

SEQ ID NO: 315114 - DNA, 122 bp, Homo sapiens
cgcctcctccaatccaggtcccgccctccagcttcggatccccgcggcccccgcccggcccgggcgcctgttattgttgggccctcagcccaaactgatcccgcagaggcggcagccagctc

SEQ ID NO: 315115 - DNA, 122 bp, Homo sapiens
ccgctggggttcagcgacatgtccgaatgtcccgaggcctctgaggttgttttcttttgccgcagaacaaatcaccacgaacagcgttttaagacaacaccaactctttttttttttttttt

SEQ ID NO: 315116 - DNA, 122 bp, Homo sapiens
ggttcaccagctccgtgtcgaagggcaccgcctggaagtggtcggagctgtgcaggccctcgcgccggcccacggagaaggcggcgtaggcacgtcggcacgcggcgcccggcggccccacc

SEQ ID NO: 315117 - DNA, 122 bp, Homo sapiens
ccctccaagaagggcgaatggccctcatgcccagaagcgcggggtcctgtctgagaagcacgttcccggagccaccagtgtctccacgcctgtccccagccgacagccactcaccgacgctc

SEQ ID NO: 315118 - DNA, 122 bp, Homo sapiens
tggacggcgctgcccggccagttcgtcaacagcaagggagcgctcttcacggccgtggtgcgcggtgacaccgtctatacggtcaaccgcatgttcacgctgctctacgccatcgagggcgg

SEQ ID NO: 315119 - DNA, 122 bp, Homo sapiens
ggattacaggcttgagccaccgcgcccggccttctctgccacagtttttttgtctctaagcgacagtcaaaaatagaacctaagggggtgtgttaagatcacaatagttggcccggcgcggt

SEQ ID NO: 315120 - DNA, 122 bp, Homo sapiens
gcccacacccccagctcgggagggagactccatcctactccaccccacgctcccgctgtccgagtcgcccccagcacctggcgccggcaatccccggctgatgcagccaaaagcgggcctgg

SEQ ID NO: 315121 - DNA, 122 bp, Homo sapiens
gactggccgcggcgagcaggggcgggcggggggctgcgcgtcattatcatgcacagcgctcgcagcttcaggctccaactctactcacttgctaatccgtgagagctgagcgggagacaggc

SEQ ID NO: 315122 - DNA, 122 bp, Homo sapiens
atgtggctgaatgaagacagtggatatatccttggaattctagcaatacagaacaagacacgtgaaaaagacacacgcacacacacacctcaggtccaaaagcaaggctgaatgcatttcca

SEQ ID NO: 315123 - DNA, 122 bp, Homo sapiens
attgcaactcactggtcaaagcgtcccttgcaggccctgccagggaatgtctggctggaccgagcactgtccagggtcctgaaggcggcagggctcaggctgccgcggcgagagcaacccgg

SEQ ID NO: 315124 - DNA, 122 bp, Homo sapiens
aacctgaaaaatgaaatgaatgccaatcgctaccagggatatttgaataacacaggcaagcggcaggcggcacggtcccgtccctactccttctgggtggggaggagggaggggaggaggtg

SEQ ID NO: 315125 - DNA, 122 bp, Homo sapiens
tagaacctgcagcacagctcagtccagaaagcgctggcaggccttcttccaccggcaggccgtgcaccactggtcccggtgctcgatgccatacaccttgcggcacttcttagcctcccctc

SEQ ID NO: 315126 - DNA, 122 bp, Homo sapiens
ctctttgactgcttacctctacccttcgccatttgtttgttttgaggattacaaacataacgtgatgctctgtgaccttgggggaagtgactaaacttctctgaacttcagtttccccacct

SEQ ID NO: 315127 - DNA, 122 bp, Homo sapiens
agggaaaacccccgcggagcctggcggggaggaacacgcgaccttcgcactcacctggcgcggccaggtctccctggccccagaaaaaggccaacattgatgatgaccttacctttaaaaga

SEQ ID NO: 315128 - DNA, 122 bp, Homo sapiens
tgcctggcaagctggggctcggggaaaagtccagcagcgagagggccgcgtgtcccgggacggttccaggggagcccgcgcggaaacgcggaccaggcgcttcggcccggatgccggatcca

SEQ ID NO: 315129 - DNA, 122 bp, Homo sapiens
tgggggccccagacccgggcaggtcgctccttgccgccgggcgcgctggccttctcagcacggccttgtccagcagtacccgcagcagtcagcaagaacgccagacccacttttgaaacttc

SEQ ID NO: 315130 - DNA, 122 bp, Homo sapiens
gttggtggtgagcacaggaaggccattatagtcccaatccttgaggcaatggttgaagtccggcggggcgaagccgctgcacgaggggtcggtactggtggcgacacggctggcggcgctgg

SEQ ID NO: 315131 - DNA, 122 bp, Homo sapiens
tgggtgggctgggaagtatgatcccctgggtgaaggtggatatgaatgtgatttaaacaccgtgaaactctgtgcatatgtacagagttattgctgttactgcagatgctgggaagagctgc

SEQ ID NO: 315132 - DNA, 122 bp, Homo sapiens
ccgggtaccgccgagtcctcccctactggcggctgggggagggaacgagggcggggctctcggaaagtcccaggaacaggctgatcctgcgctggcgagaagctcagccatttaggggaaag

SEQ ID NO: 315133 - DNA, 122 bp, Homo sapiens
aggagctctgagtggtgggtggccaaggcttcctctggatagagggtgcagggatcccttcgtcccatgggtccctaaggacccctctacagggtgcccccccatgcctcggacaaatgtgt

SEQ ID NO: 315134 - DNA, 122 bp, Homo sapiens
gaagcaaaggcgctctgcacacaggtgaggtcaacagctgttagtgatggagactggcgccgtctgggtcatcagtgctccggaatcaggctgctcacgggtttgaatctcacttccacttt

SEQ ID NO: 315135 - DNA, 122 bp, Homo sapiens
gagtcagaggaacagagcgctttggggacagctttctccacctgtctcagtggatgggctcgtacccgcctccaatctgctcacctgttcgttccaaccgtgcagctggctgtagcgcaccc

SEQ ID NO: 315136 - DNA, 122 bp, Homo sapiens
gacaacccccgggtggaagggcccgagcggtggtcagccgaggcaggggcagcgggctgccggggtgggtgccgttcccagccccttaccttctgctcagttgccgcctgggtctcggttgg

SEQ ID NO: 315137 - DNA, 122 bp, Homo sapiens
acttaaaaatgaattcagagttactgaaccggctccccagactcaagaacttaagcgcaacgggctgggaaaaggagggggagaggagcgcaaacgccgctgacctgggaactcggaggaaa

SEQ ID NO: 315138 - DNA, 122 bp, Homo sapiens
tgaggtcgtggatgctgcatcaggggtgcacaagggaggcctgagcacgtgacagtcggccgcagtgatttcccatctgattgcatctgtgcacggcagcgcaattgccaatcagtcctgga

SEQ ID NO: 315139 - DNA, 122 bp, Homo sapiens
acccgctgccgggctggattgtcctccacttgtgcttatctggtcctcgatgccgcgctccgacgtcttatctgagggagccttccgttaatgaaggctctataaacatctgacaaacacac

SEQ ID NO: 315140 - DNA, 122 bp, Homo sapiens
gaacacaggacttgactctgggcagacacgtgggccgcttctccacgcgtcgctcctccgcgcgccactagcagtatgcgccgcgcccgcctccgcacgcctctttaaccagcgcccggcgc

SEQ ID NO: 315141 - DNA, 122 bp, Homo sapiens
cgggcgggagaactagtgcatgctggctggggatggcggacgcaaagccggaggcaaggccgcgcacgcgcaaacgcgggcgcgccgccgggccgtgctagtgcgcggaagacgcatgcgct

SEQ ID NO: 315142 - DNA, 122 bp, Homo sapiens
cgggcctagcagtagcggcaggctctggggtccgggctcggccaggtgcattttcctggacgtgggtggctcaggtcctggtggcatctcccgaagctctccgggggtgtccagggagggca

SEQ ID NO: 315143 - DNA, 122 bp, Homo sapiens
cctgcgggtcgctgcttggctgtgggttagcagcaccctgagcggagcggaagagctgcccgccgccgcgtaaccccgaggccgagactcctggcctggcctccttgggcccacgacgcctg

SEQ ID NO: 315144 - DNA, 122 bp, Homo sapiens
cctcttaagctagaaccctgcttgcctcttcagtgtggctgcatcaacaatccctggccacgggccctgtttcatcttcaaagccctttataagcttcctccttgctcctgcccctcccact

SEQ ID NO: 315145 - DNA, 122 bp, Homo sapiens
cacatataagcacacatccaggcagcagcggctgcatgaaggtgttaactttgaatgatccgccacgctttgccctaaaagggaagcttgcagagaaatgcgcgctttgaacgccggcgagg

SEQ ID NO: 315146 - DNA, 122 bp, Homo sapiens
gacctggagggggacagaaggctctctgggcaggcagggccggtcttttggcaagaggcgcgctctctctcccttccccttccatcgagggctgggtgtgaaggtgagagcaatcagaaaag

SEQ ID NO: 315147 - DNA, 122 bp, Homo sapiens
aaatcctttttaaaggcactttgacatccattatctcatttaagtctaaaacacgaatttcgacctccgcgctgctttctggttccacctggcggcagctgcacaaagtgtttctcttcgaa

SEQ ID NO: 315148 - DNA, 122 bp, Homo sapiens
agagacaccagaaagtgggggtcctcgctttccttggccctttccccttaatctgctgcacgtgtgtttcttttccctgctgaggacttctggccctcagccgttctaatttcttcaactgc

SEQ ID NO: 315149 - DNA, 122 bp, Homo sapiens
gggttcccaggggagtgacctggcctcggagtcagcagcccagggggatatcttgcaggccgccttccaggactcctaccgcaacctcaccctaaagaccctcagcgggctgaactgggctg

SEQ ID NO: 315150 - DNA, 122 bp, Homo sapiens
agttggaatttccaactaactgcctctttcagagcaccacaggccattttctttaaaaaccgatgagaggtggaggttctccaaaccttccatctttaatatagcatttatctaggaaggat

SEQ ID NO: 315151 - DNA, 122 bp, Homo sapiens
tacaaacttgagttcttttctaggtgaggtagacctggaaatgttagcgattccacaaggcggcactagagttccacctgtctccctccgccgagaaaagccggagccaactaagtcttgcc

SEQ ID NO: 315152 - DNA, 122 bp, Homo sapiens
atctctcggatcgtgttcctggctctgtcgaagctgctgagtcccgcgattcgggaaatccggcacttgtttctcaccctacaccatcacgtggaaatcattgaaaatgggaaccctggtgg

SEQ ID NO: 315153 - DNA, 122 bp, Homo sapiens
tcagctccaagacccagcatagggggcaaacacgcataacacagagtttaagtcgaggaacgaaaatgcaaaacaaccatagccggaattgtctacattcttcgtccaataagtaataaagt

SEQ ID NO: 315154 - DNA, 122 bp, Homo sapiens
tattttgtttactatgcatggtatcgctttgcccaggaggatccagcaggacagttgtgccgtggttcattaaaccttcttccccctgcagttggcagcttaggttgttttccattcttgcc

SEQ ID NO: 315155 - DNA, 122 bp, Homo sapiens
cgttcttagctgggacgtcgagttctcccaggataattatcgaccaggtttgtaactgtccgtggcagaaggcgggcggggacggaaagcaacgaaaatagtctgggcattacgctctaaat

SEQ ID NO: 315156 - DNA, 122 bp, Homo sapiens
gagtagaagaggggatggggaggaatccgtttccatcccccgcgaccccctcacctagggcggaggcgcaagctctgctgggtgctctccgcccccttgatcgccgctctcggttttcagca

SEQ ID NO: 315157 - DNA, 122 bp, Homo sapiens
gacttttggtggtggccaattagagcagaccccccacagagcttcatcatagggtagccacgtcaatgtcaataccctcctccgtgcaacaatccttgtgattaatgtaattaccataatta

SEQ ID NO: 315158 - DNA, 122 bp, Homo sapiens
gctcgggcgctggagggcggctgtggagtgaggggcacacgggcgcgtggaggcagttagcgacagacacacgtgcgccggcacatgcacacagaggcgggcacacacagacacgtgggcac

SEQ ID NO: 315159 - DNA, 122 bp, Homo sapiens
tcaagggatcctgcgcgtgtagctcacgtcgggcacttcacacaagttaagggatcatgtcgggcacttcacgtgggttaagggatcgtgtcagacacttcacgcgagttaagggatcgtgt

SEQ ID NO: 315160 - DNA, 122 bp, Homo sapiens
aaagcaacagaaaatagcaggtcctgagcaggaagccgtatgggtggggcggagaataaccggggttgcagagctccacactgtcaccagcaaatcatcagaagagctgatcccacccagag

SEQ ID NO: 315161 - DNA, 122 bp, Homo sapiens
tgtacgaagaaaatgtgagcacatcagtgcaaatcttacccttttcacagaaataaccagcgttaacatttggtaaacctctttgaaaatgctctctatatgctcttttatattctttccat

SEQ ID NO: 315162 - DNA, 122 bp, Homo sapiens
cagcaggctcggcgcagcacatctccccaccccacccccacacacccccgtggggtgcgtcgatcctgtagctcagagggagaagctacttagaacttcgtgaagcacagaggatctggagc

SEQ ID NO: 315163 - DNA, 122 bp, Homo sapiens
gctggttccccacttctgtaggtcttatgctggacgtaaagcctacatttgctgtacagccgccactctctctgtgtcttttctttaaccctcgccttccctccaaaacctaacagttacga

SEQ ID NO: 315164 - DNA, 122 bp, Homo sapiens
aagctgcgttcctgattcatttgcagtcgggtggggcattctttttccaatagagagcctcgttcgtacttagccatcctcctaaggtgaggactgggtgctgataaccattcaggaaaccc

SEQ ID NO: 315165 - DNA, 122 bp, Homo sapiens
gggctggatggcactgaagctggtagccctgatctacctagcactgcagctgggctgcatcgccctcaccaacttctcactgggcttcctgctggccaccaccatggtgcccactgctgcgc

SEQ ID NO: 315166 - DNA, 122 bp, Homo sapiens
atccttaggaatgttacataacctaacaaagaaggtggcacagagtctgcagtgagggctcgtggggcgcttgctcaggtggagtgaggcaggaggctgtgcaccgggctgaaacttggagg

SEQ ID NO: 315167 - DNA, 122 bp, Homo sapiens
gtcccagggattttccggcttaatttaggagggctgagaagagagggacgtggccggctccggaagaacctcgacagggtcttcgaggctttggaacagggtctcaagctttagaaatgtcc

SEQ ID NO: 315168 - DNA, 122 bp, Homo sapiens
gctctgtgacctgcgggtattggatgattcgtagctaagactctacgacatccctgaagccgggaaatggtgagtgtgccgggcagggcgtccggaggcgacgtggcggggaggccttatcg

SEQ ID NO: 315169 - DNA, 122 bp, Homo sapiens
tcgtggcgcctcctcacggccatctgaagattcctccggcacagccgatcgcccccgctccggcctcccacacagatggctgtcaaggtcgccataaggcaacctagtccttatggcgatag

SEQ ID NO: 315170 - DNA, 122 bp, Homo sapiens
gtgctagccgcctacagccagttcttccactcactcttcacccagaacaagcagctgcagcgtgtggagctgtccctggaggcactggcacctggtggcctgcagcagatcctcaacttcat

SEQ ID NO: 315171 - DNA, 122 bp, Homo sapiens
cttaaatgtggaagaaggaggcataagaggaggtcagattaatgcaatatgagaagaactcgacttcctgttgctgactatgaagatgggaaaatatagaagggctatgagacaaggaatat

SEQ ID NO: 315172 - DNA, 122 bp, Homo sapiens
agttaaaatgtgtaaatgaatgaccgggacactgagcaacctcagatgcagacttccatccggacactggtgtggcttcagtaccgaggctgctaaagctgccagtcacaacccagcatgtc

SEQ ID NO: 315173 - DNA, 122 bp, Homo sapiens
ccggcccagctaggggagccccaggcagggccggcattacctggtggggaaggctagccccggcatctctggcgattgtttccgtcgcagagccgcacctctccctgcccaaccgggtaccc

SEQ ID NO: 315174 - DNA, 122 bp, Homo sapiens
ccatcggctacggccccatggccaggggacgcacacccggatacgtattaccatcggctacggccccatggccaggggacgcacatgcagatacatgttaccatcgggtacagccccatggc

SEQ ID NO: 315175 - DNA, 122 bp, Homo sapiens
tttttgtttcccatagcttttatacatattgtgattgtcaattcacttgtcagattcccccgttagactgttggctctgtgtggaaaggacggtttgccttactcattcctgtattctcagc

SEQ ID NO: 315176 - DNA, 122 bp, Homo sapiens
ctacagaagaattaaaatggtatagaagaatattaactttaacaaatatttactggatgccggctatgtgccaagtattctatgttagcgctgtccattgtaaccactacatgtggccctga

SEQ ID NO: 315177 - DNA, 122 bp, Homo sapiens
gatcttggcatcaccgatagccggttaattcccccaccccgcccccgccagtgggtcgcacgcggattgccgagggcttgcaggcactcaggcagacgcagacagaaacccacatcgacccc

SEQ ID NO: 315178 - DNA, 122 bp, Homo sapiens
tcatgaagggtgcatttgcctgaggggtagcaaatggctgctgtgctttgaacaaatgagcgtgatccaaatagataggggtgagattaaatattttaattagtccctctttacaataaata

SEQ ID NO: 315179 - DNA, 122 bp, Homo sapiens
ccgaggtgcttctgagactgcacagtgaagaccgccgcaccggaggtcagcgctccgccgcggactcccggctgactctgccactctcccaggaggaggcgctgtgcacctctgggtggttt

SEQ ID NO: 315180 - DNA, 122 bp, Homo sapiens
ggggggaaaggtgaagaattgaaatttaaccaatgagttacttatatttctggagagccccggtgttatcctattaaatactttacaatgggatcgcatcgcagactgtaaatgaagaggaa

SEQ ID NO: 315181 - DNA, 122 bp, Homo sapiens
cgactacaaccaacagcagccgagggacgaacagcaccttagccaagatcacaacctcagcgaagaccacgatgaagcccccaacagccacgcccacgactgcccggacgaggccgaccaca

SEQ ID NO: 315182 - DNA, 122 bp, Homo sapiens
ggctaggccggtccatacaggactgaacggcgtcgtgggcgttcattcacattccctctccggtccccacacactataggatttatcttgatttgctgcctttgaattgagtcaactctttt

SEQ ID NO: 315183 - DNA, 122 bp, Homo sapiens
ctccctgctgcagtgttcacaaaacctgcagcaccacccatccctcctgggcaggtgctccggtaacaggaagtcccaagacaaggcctcataggcagggtctggaataggctccacccaga

SEQ ID NO: 315184 - DNA, 122 bp, Homo sapiens
tgtcaagggccctgacccagagttgtggtctccaaggaggcagcagaactaagtctgaaccgccaagatgctaaattgcaatggaagcttaactttagtttatttctaagcattttttatat

SEQ ID NO: 315185 - DNA, 122 bp, Homo sapiens
atttttttttcaatccttcccacagccaggtcactcagcagtggggtgactgacccgaagcgcagtgggaagggcttacagtcatctctcaactccccgaacttgcagggcaggggagcgca

SEQ ID NO: 315186 - DNA, 122 bp, Homo sapiens
gtaggatgcgtttcacaaaaccgctcgactagaggctgcaggaaaggcttgttaaacttgcggtggtaactcttcttctcccgtccttgaaaggtacaagttgcttaaccaagaagaaggtg

SEQ ID NO: 315187 - DNA, 122 bp, Homo sapiens
ctgcgtggggcggggggacatgcaataagacaagagaccgcacggaaatagctccgtgcccgtctgctgcactgtccttctcacgtgccttcggacaaggggactttcactctctcccctcc

SEQ ID NO: 315188 - DNA, 122 bp, Homo sapiens
gagccgaaccgcgggagggcgctgtgcggagccggtggtggcctgctcgacggaggtggccgccgtcaccctactggtcctgtgatacgtgcccaaggactgcccgggagccagacctgcca

SEQ ID NO: 315189 - DNA, 122 bp, Homo sapiens
ctgggcttctagggacagtttgtgacacggaacctcactgtccaggtggcgaggggacttcggtcacccacaggccacctcgaagataaaagggctccgtgtcatttctcacgctagctcat

SEQ ID NO: 315190 - DNA, 122 bp, Homo sapiens
accggcgggagacggcggcttgggagctggctgtgctgcaggtgttgggtcgggtcgggtcgggacgggcgggagaggacgagacgggtcgggataggttggggcggggcggggcggcacta

SEQ ID NO: 315191 - DNA, 122 bp, Homo sapiens
gcaagaagggccaggcgtgttccaggcagggtcttgagggtgctgcggtaggtttcgtgccgggtgcccccgacattgaggatcaccctctcgttgttctcgatcttgcccatctctgtgac

SEQ ID NO: 315192 - DNA, 122 bp, Homo sapiens
tcaggggagcatgtgcaggtttgttatataggtaaacttgtgtcatgtgtgtttgatgtacggattattttgtcactcagggactaagcctagtgcccaatagttattttttctgctcttct

SEQ ID NO: 315193 - DNA, 122 bp, Homo sapiens
tatgggctggtggtcccctcgctcctaccctctgctcctgcccccctctaagtgatggcacgcaggaccggtcaagcccaacaatccctgggccttcataaactcactatttttcatgtata

SEQ ID NO: 315194 - DNA, 122 bp, Homo sapiens
agaagaagaaacaggagaagtggtggacctttcagcagccacatagatagaagagtgaaccgacacagtgtgttatcatagaggagacaaaaatggtagtgaagcttgtggttatgtatctt

SEQ ID NO: 315195 - DNA, 122 bp, Homo sapiens
gaccccgggtgggcgcagacttcgctccggacagttcattcttccaagctgattttcgggcgagagtcccccgccagccgcgcctcagtttgagcgggccgctaacggcgccgtgggttctc

SEQ ID NO: 315196 - DNA, 122 bp, Homo sapiens
actgaagttggaacttaagacgcaaactgccctggacacagagatacagagctgtccgtgcgcacaccccccacaaagggccggggccggggtgggagtcggcttacagggcacagcgcggc

SEQ ID NO: 315197 - DNA, 122 bp, Homo sapiens
ggcctgcccggggtctctgtggtgaaattagtagcaaattctacaaagacactgaaatcacggcccctgtgctggaagcaggtgcgtctgcctttgactagaaagcctcttcccagtgagtt

SEQ ID NO: 315198 - DNA, 122 bp, Homo sapiens
aggaaactgaggcaaaattaagttaataagtgctgaagctggaatgcaaacccagacagccgtaacccagagcctatgttcttaatgagaactgcttcccacataacatggttagcacaata

SEQ ID NO: 315199 - DNA, 122 bp, Homo sapiens
ttccagggctttcactcagtaactccaagtggagttactggaaatctaccacaagaggcccggcgggaactccagccgatcccaaacccggcccggggttgcccagcccgcttccaccacta

SEQ ID NO: 315200 - DNA, 122 bp, Homo sapiens
gaatccggcttgagtgttaaaggctaagcgtgtctagctggacccgtggccccgaagaagcgagacaaggcgacgcggagctgtccctgacaccccgaggaccgagggacagcgaagggccg

SEQ ID NO: 315201 - DNA, 122 bp, Homo sapiens
tgatttagcactgactggtggctgcttaaagcttgccttattccattttagcaggccccccggcaaaataccccaattagtggtgtcatcctctctattccaagaattttctcttaagactc

SEQ ID NO: 315202 - DNA, 122 bp, Homo sapiens
ttgcagtttgcttggtgcagggaaggcgggcgcggaggttctatctgtttcttcctccttcgtgagcagcatggacgtgctagcggaggagtttgggaacctgactccggagcagctggcgg

SEQ ID NO: 315203 - DNA, 122 bp, Homo sapiens
ctgccacaagacagaccccactgtgctgaggctaccttcttggtatctgcctgccctggccggcatgctgactgagcacacagactgcatcctgtttattactgagtcatcgcaccaggcac

SEQ ID NO: 315204 - DNA, 122 bp, Homo sapiens
aggaggaggaggaggaaggcaggctccggggaagctggtggcagcgggtcctgggtctggcggaccctgacgcgaaggagggtctaggaagctctccggggagccggttctcccgccggtgg

SEQ ID NO: 315205 - DNA, 122 bp, Homo sapiens
gagaggcgcaggggtggggagggagttcggcacccttcgacccctccggggtcccctttccgattttcagcagggacagccagatttccaaactcctgggaaactacagaaaaggcgcctgc

SEQ ID NO: 315206 - DNA, 122 bp, Homo sapiens
gggttggcacccaggggcgcctagaagtggtccattcattgggacggggttggcataaaccgttcctgggtgctacagcctagcccgtcccggggtcagggttgcggaataagtgaacttca

SEQ ID NO: 315207 - DNA, 122 bp, Homo sapiens
ttaactctgggacttatcttgagagtattttcaaaagtaaaacggcaagtttacatttatcgatggaagtgatcgaatatagcagccctgtggagcgcacgttcccaatcacggttgtctgt

SEQ ID NO: 315208 - DNA, 122 bp, Homo sapiens
cctgggtgacaaagcgagactccgtctaaaaaaaaaaaaattattagccgggcatggcagcgcacacctgtaattcaatctgcttgggaggctgaggcaagagagtctcttgagcccaggga

SEQ ID NO: 315209 - DNA, 122 bp, Homo sapiens
gggattgtgtgcataatttgacaagttgattctaaaattcttgtggaaaagttaaggacccgaaagaaccaagacaacttggaagaagaaaaaaggtgggcaaacatgatcagatttctaga

SEQ ID NO: 315210 - DNA, 122 bp, Homo sapiens
gaggaggtgagagcgaggactcggcagaagcgagatccgccgaagggaagtccgagcagtcggggagctcaggggggccctcccggggagagggtcgcgggctccttctgccgcttacctgt

SEQ ID NO: 315211 - DNA, 122 bp, Homo sapiens
caattcagcaagaccccttctctacaaaaactgcaaaacttagccaggtttggtggcacacgcctgtagtcatagctactgggaagactgaggtggaagaggaggatctcttgaggcccaga

SEQ ID NO: 315212 - DNA, 122 bp, Homo sapiens
ctaatcccagagtaaacagatgacctcgtggtgcctttctcccggaggtggggttcctagcgcagcaccccaactgtgcaaacagaccctggagggctcgatgcgcctgcgggggcgtggct

SEQ ID NO: 315213 - DNA, 122 bp, Homo sapiens
tgggctcttgccaaagctgtcttcccctactgttaaccttgtttgtcacacggtcgagttcgtattggttctcggctacttcctggagcttctgccgcctcctgtggaagataatctagctt

SEQ ID NO: 315214 - DNA, 122 bp, Homo sapiens
gtccctagcacctaccagagcgcgtatgagggagccgaggctgcagtgccaggttggcagcgagctccctggagacccatgcagcgggtcaggtgccagctgcggccaggtctgggcgcgga

SEQ ID NO: 315215 - DNA, 122 bp, Homo sapiens
ggaggctggagtgaggaggtggggtcaggagcgcgtctatgctgcactttccgctttccgcgctggacacagacagaggctccacaaagcggccaaagaaccaaactttgtccttgcggaag

SEQ ID NO: 315216 - DNA, 122 bp, Homo sapiens
ggtggcagtacaggcttctttataaggatgaatgaagatgaaaagcaagacaaatagaagcgaatgagacactgctttatgtgattcatgatagcttgccgtaagcctgttagcctctgcct

SEQ ID NO: 315217 - DNA, 122 bp, Homo sapiens
cccggcaggctgcgcgccgcgcggtgacgcacttcacccagtcctgcttctttcttctggcgccgccagtggcccgcggtgcgcattctaatccgtttcacacacggtgctgctacctcgtt

SEQ ID NO: 315218 - DNA, 122 bp, Homo sapiens
tactgaggacggtacactccaaacagcactctggggcagctgcaaggactaagccacatccgcgattgcatctgctgttgtcttcctttttatgagttctcttcgggtgcttgcagagcaaa

SEQ ID NO: 315219 - DNA, 122 bp, Homo sapiens
tgcacggagcaagatgcgtttaactgaccccattccttttaacaaccgagcatgacagcgcggccatcaccgctctgcctcattactcactgtttcaggacggtgcttgaatccaatatgca

SEQ ID NO: 315220 - DNA, 122 bp, Homo sapiens
aatgagtcgagtaccaccaaaaatcaaaagtgggagcttactcgtcctccaggtctgacccgcctccagcccgaggccaccaaaagacacacctcccttcccccaacccgccacagccggct

SEQ ID NO: 315221 - DNA, 122 bp, Homo sapiens
tcctgggtgcatagcacagaaaagactgccaggctgtgtcaatctttttaatcatgcttacgcatataggttaaccacagttatgtaagcaggttctgagaaaaggtgagaaagagaatgga

SEQ ID NO: 315222 - DNA, 122 bp, Homo sapiens
aggagttccctctcctactcccctctgttgctaataacttttggtgcctgtaaaaagtcccgagctgagcaggagaaatcctgaccccgaagctctaggatggaggggagaatttctaggag

SEQ ID NO: 315223 - DNA, 122 bp, Homo sapiens
aggggaaaggggaggggaagggaaggggcggaggagaaagagggacgatccttccaaaggcgggtgttgagtttcagctcaggaccctcgggtccaactgcctgtggtaccccccacacccc

SEQ ID NO: 315224 - DNA, 122 bp, Homo sapiens
ggggagccccttccacccccagccagggctggtttgagcatagacaccagggtgctgttccgccaacgcgtcctccactatcggtgggtggaaggcctgagtgtttcctggtctgctgaggg

SEQ ID NO: 315225 - DNA, 122 bp, Homo sapiens
gaaccaggcaggaggcggaagagaccgccccgtgggcggaagtgacgcaaggcctactgtcggctgggaggggaggtgtagccggtctttgggggtaggcggtagtggcggaagaggttcgg

SEQ ID NO: 315226 - DNA, 122 bp, Homo sapiens
gtcacctccactcgctctggcatgccaggaatgagactctagtgggacccacttttgtaccgtgaagaaggaaaggaaacggagaagaaaagtcccgtttcgtactgccatctctctctctg

SEQ ID NO: 315227 - DNA, 122 bp, Homo sapiens
aaaagaccctgatacatctctccggatctgcttaaagtggtccctcgtgggcaattatttcgcatgtctttgagttttataatttaatgtaaagctgtaacctgtatctcccttttctcctc

SEQ ID NO: 315228 - DNA, 122 bp, Homo sapiens
ggcggcccggagccccgcgaactggcgccggcttcctcagctctgggcggtgcgacgccgcgcctctcaggcagttgccttccgcgtggggacactgggaaaggccttgccgcagaacagca

SEQ ID NO: 315229 - DNA, 122 bp, Homo sapiens
tataactgccatacactatactgacactagatgtcagggtataactgagaaccaaataaccgtatatttgcaaggttgcactgcccttggaagtcacttggatttttaaaatatcctacaag

SEQ ID NO: 315230 - DNA, 122 bp, Homo sapiens
gcggatcggagggtggttcgtgtcgcgcaacggcagacggtatgggctgtcgccggcagacggtcctgccctcctggccccgcgtcgcccgagccacggcttgcctcagccaacaacccgca

SEQ ID NO: 315231 - DNA, 122 bp, Homo sapiens
aagcccagcaggcaggaagcatgtctgcctacatccatgtcttgtccagagctgagcacacgctaggtccatgctgtgtggctgtcattgtggttatggttcttgtgacaaaagtacacgcc

SEQ ID NO: 315232 - DNA, 122 bp, Homo sapiens
cgcagattgccagcccttttcccgacccctacggaaagacgagtccaggggccgtcctggcgaggtcaaaacatttagtctggtcttttcaggtgaggacttccccatccaggcacagtgcc

SEQ ID NO: 315233 - DNA, 122 bp, Homo sapiens
aagatgagacaaattgtttattatcaccttgaattcaattgagtgatttagtctacaatccggaaaactaagtatagatactaccattttcatggatttggatctttcttcatcttggcctc

SEQ ID NO: 315234 - DNA, 122 bp, Homo sapiens
gccacctcccacgtccccgccccacattctgcctgagacccgcactctcagccgcataaacgccgcaccacctcaccagtgggcagtccacagcgacctcagactccgctcactgacaattc

SEQ ID NO: 315235 - DNA, 122 bp, Homo sapiens
gcttagtgtggctactgcctctgtgctacttgaggctctcctacggcttttcgatgccttcgatgaacctctacctaagcacttcttccctttcaccgcgaactcctaccttctcgggtttc

SEQ ID NO: 315236 - DNA, 122 bp, Homo sapiens
ggttttaaaggcctggattcaaaggcatctctgagaacctcggagcagcacgcacacccccgcccggcggccagcagaagatgtggaccgatgctgcagggcccgtgggcacccaggagggt

SEQ ID NO: 315237 - DNA, 122 bp, Homo sapiens
ggatcctttatcacgaaatgcaggttacaggggaagacagcagatccatacacaaagaaacgcagtctcaaactggataagttgtgtaactgggtaggttgttgtgaaattaaataatggaa

SEQ ID NO: 315238 - DNA, 122 bp, Homo sapiens
tcattagggcagttagagtgctatcagggttctgaggatggagggccagactaattataacgaggaaatcagggaaacagctgtaagaggtaacatgagaagggccttgaaggatgggaagg

SEQ ID NO: 315239 - DNA, 122 bp, Homo sapiens
gtaggaaagtgggtgaatgaaagcggagggggttgctggactctgggggaagcggagagccgggtttctttttaccgggtatttttgaggctcgagatttattaagcactgactgagccctg

SEQ ID NO: 315240 - DNA, 122 bp, Homo sapiens
gtccctgcattaagatgaagtttgaagccaagaagagtgtgagagagggaaatgttgagtcgtgtgcattattaacgaggatgtttcaaccctgacccaaaccgtcgcagaggcgggttctg

SEQ ID NO: 315241 - DNA, 122 bp, Homo sapiens
cctaaaaaaggaaggaaacactgatgcacgctacaacatggatgaaccttgaggacatcacgctcggcgacgcaaaccagtcctcaaaggacagatactgtgtgattccacttatctgaggt

SEQ ID NO: 315242 - DNA, 122 bp, Homo sapiens
ccagagaggttggggctgggggcttggacagctagaggttccgggggtggggggcgatgacgcacagatttgcgcaaagagaatccatcagagagctgggtccggtgaagggagaccagccg

SEQ ID NO: 315243 - DNA, 122 bp, Homo sapiens
cagaatctgagtgactcccacagtaagcaatctgagagattactgtgggctgggggcggccgggagactgctggaaatagatttgtagcctatttgaaagttacatttaaggtgggattgtc

SEQ ID NO: 315244 - DNA, 122 bp, Homo sapiens
tctatgtgtctcattttcctaatctatcaagtggggataataatggcacagtttctatctcgtagagttgatgaagagatatgatggttataattcagagtctgtcagataaaaagcattta

SEQ ID NO: 315245 - DNA, 122 bp, Homo sapiens
atggtgcgccgcatgacatgggaggcgatggggacgatggacagagacagagcgtgcacacgtagagtggctagtgaaggacgcctttttgactcttcttggtctcagcatgttgactggga

SEQ ID NO: 315246 - DNA, 122 bp, Homo sapiens
aggcaaaaaataaaaaataaagaaaccgggcggtactctaattcctcttatcaagcatctcgagtgctaatatgcacttgaacagctgctattatcctggggagcccactgccttcagctgc

SEQ ID NO: 315247 - DNA, 122 bp, Homo sapiens
cgcggccacaataaaggcatcttattgggacaggaaatcgggattttccgagtccggtttcgaaattgaggccttgtagacgcttcacctttcctgcccggctacgtgctgggctccggagg

SEQ ID NO: 315248 - DNA, 122 bp, Homo sapiens
gtgagagaaactgagtcagccctgggctaagcactctgctcttgcggtcatctgattccccgaccctggtgctttgagagggatggctcatgagctgagccctgccctgtggcctgccaaac

SEQ ID NO: 315249 - DNA, 122 bp, Homo sapiens
atgaagctttagcagtcttctgggagaggcaagtaagtatattttatatacatacactcccgtgaacagtgaaaaatgagacaagttagcctaccatggtttcactgatgctgttagaagac

SEQ ID NO: 315250 - DNA, 122 bp, Homo sapiens
atcgccgctatatttgtgtctcggtgcatactctcattggccctacctgcagtcgctctacgtaaggggcgttccagagtcagccactgggagtcgctggattcgggttttaaaaaacgccg

SEQ ID NO: 315251 - DNA, 122 bp, Homo sapiens
cagtattgtggctcttccagcagcaggcggggagccagcagggcacacggacccagccatcgtgacctagattctgggttcaggggtagagacttgtttgctagtgggtcgcactgagtcag

SEQ ID NO: 315252 - DNA, 122 bp, Homo sapiens
tatggtttaggagtcatgcagctggaggctacaagtttccgaccctccccaaattggtcccgagaataatatcgctattgtaagacctaaaattagtacttgagatattttgtagaccctgc

SEQ ID NO: 315253 - DNA, 122 bp, Homo sapiens
tgccggtagtcccagctattctggaaactgaggtgggccaatgtcttgagcatgggaggccggggctgcagtgagccaagattgggccactgccctccagcctgggtgacagagcaagtaag

SEQ ID NO: 315254 - DNA, 122 bp, Homo sapiens
ggccagctgcaagtggcgcgggatgatgcgggtctttttgttgtcgcgggctgcgttgcccgccagctccaggatctcggcagttaggtactccagcaccgccgccaggtaaaccggcgcgc

SEQ ID NO: 315255 - DNA, 122 bp, Homo sapiens
gcagtgaggggcaagttgggtcacagggcggacagcgcttctccccaaggcttctgtccccgctggtttggagggggggtagctgcgcggccctggggctcggccctgcccaccctcccgcc

SEQ ID NO: 315256 - DNA, 122 bp, Homo sapiens
aaaatgatgctctgacaaagatctattccccttcctgctcttctacctttcattcacgaacgctgaggtttctgacatcccctagaatctgctcagacacgccttcactcccaggacagcag

SEQ ID NO: 315257 - DNA, 122 bp, Homo sapiens
ggctgtgctggcagccggctgtatttttctatcacatccatcggcagggctcaaatattccgtgccgtgtcggatcaaaacacacggcgcctgcaggcccatctcgaggctggttggacagc

SEQ ID NO: 315258 - DNA, 122 bp, Homo sapiens
agcagaagtcaccgactgtctccgggaccctcgcacggagcagaagtcaccgactgtctccgggaccctcgcacggagcagaagtcaccaactgtctccgggaccctcgcatggagcagaag

SEQ ID NO: 315259 - DNA, 122 bp, Homo sapiens
cagcgagcggacttgcttctagaggcagctgtaagcatttccctactgagcaaccacacacgtcggatgtgagtggcatatgtatgtgtgtgtttttccttccggttgctgtgaggtgatgt

SEQ ID NO: 315260 - DNA, 122 bp, Homo sapiens
ccttatgataactgagaccacttgggccttcctctgtaggtttaactgacgctgctgcaccggataccccaccccggtgccgggcacataggtgcagcctgagagtaagcagacccgggttg

SEQ ID NO: 315261 - DNA, 122 bp, Homo sapiens
agagtcccctggaacaggagggcctcagggaaatttgccaggggcaccacacagagagcacgccagggaggcgttgctcaatctctcacccacgtgggccccagggaaagcccgcagcccag

SEQ ID NO: 315262 - DNA, 122 bp, Homo sapiens
aacaggaggctgggctggcggatctctgaacgtcatttctagctctgcgtcagtgaactccgtgccgctgtattggtttgcagttattttgctttcttttcaaactctacttcagaaaaatg

SEQ ID NO: 315263 - DNA, 122 bp, Homo sapiens
agcacctgactgtgcgtctccttctgggagcttggtaaataccggactctggtgtcccatcgcagtcatcacctgcctcttacttgcacataccacatcccccctcctctgatgagtctctc

SEQ ID NO: 315264 - DNA, 122 bp, Homo sapiens
ggcaggcagaagaagagcagcgcggtggtctgcactaccatgttgtagagggcccgtgggcggaccagcatgcaaacagctgagtctggcactgggccccggcagggcacgtgcagctgccg

SEQ ID NO: 315265 - DNA, 122 bp, Homo sapiens
caagttggagggagagatgcaaataccaggtgagacggcggcgcccctgataaaacggggcggggggcggggtggagcgcgcggggagcggggcggacgccggggagggccgggccaagaca

SEQ ID NO: 315266 - DNA, 122 bp, Homo sapiens
aagttgaacaacaatggtgagaccaggaaggctctccgttcacaggaaatactgtgtcaccgctcggccgcaggctgtgtgaggtcacgggcgacgctcgggtcacgtgtggcggctcctgt

SEQ ID NO: 315267 - DNA, 122 bp, Homo sapiens
ggaggagcagagagcagacccggtggccgaggcacctggatgttgggcgggtcgttcactcggtcattcactgtgcattcattgagcaccggctgtgtggcgataacagtaaagaaacaaaa

SEQ ID NO: 315268 - DNA, 122 bp, Homo sapiens
catgtctggctgattttttctgtttttcagtttcgccatgttgctgaaacttgaactcctcgtcttaagtgatccatgcaccctggcctcccaaagtgctggaattactggcatgagccacc

SEQ ID NO: 315269 - DNA, 122 bp, Homo sapiens
cgtctagttgtcattacatcgcccactacaggcatcagcaccaaaggcctgaaggtaagccgggattgagccactgctatctgaggggccctgggcactccgctagactctggggaagggaa

SEQ ID NO: 315270 - DNA, 122 bp, Homo sapiens
agatagaccacgcccccggacatctggtccccgccggaacacccgggccctctggtgacacgccccctttccggcaggctactgggctccgcccacacacctcccggcctggttcctaaacg

SEQ ID NO: 315271 - DNA, 122 bp, Homo sapiens
ggggccaggaagcctgggtgtcaggcagacccgagccaggctctgcacagcagggcattacgcgccccacgcatcctcttccatccccaggcacagatcaaaggcgcagcccaggaggcggg

SEQ ID NO: 315272 - DNA, 122 bp, Homo sapiens
cacgagctgcgagggcgcctggagcggctggagcaggtgagccaagcctgctgggtggggcgaggccagacgtcactgtcaataccctgaggcatctcttcctttctagtgggccggtcagg

SEQ ID NO: 315273 - DNA, 122 bp, Homo sapiens
gtgctgaagctcaggcccttcctggcaccctcagctcctgcactgagctggggttacatccgggttccactgtttgcatgcaaagggaggggtgtaccctgggttgggctgatgatgagaac

SEQ ID NO: 315274 - DNA, 122 bp, Homo sapiens
ccagtactggggaccccattctgcctgccccgcacgcgaaggtccgcctcggaaaccacacgggccggggctgggcacccaaaggccaccctgataccatttaggtacacaggggctgtgag

SEQ ID NO: 315275 - DNA, 122 bp, Homo sapiens
aatccagatgtatttaatgtttatggcacaaacttcagactctaggctgaccatatacaacgtgagagaatgaaactatagatcaaaggaatgtggaggagtcttcatccacagctctgtta

SEQ ID NO: 315276 - DNA, 122 bp, Homo sapiens
aggaattggcttgtgtaagataataatgggctctaaaatgtatcattagataattactgtcgtcattccaaattagagtaagggcaagctgccctaatgagcgccgtgtgtgagacaggtct

SEQ ID NO: 315277 - DNA, 122 bp, Homo sapiens
acgcctggacccagcctccttcactctctgccctcgggcgcaggtttgctggctgcagtgcgcggcctccgagccgtgccgggcggtcttcagggaggctgaagtgaccttggaggcgggag

SEQ ID NO: 315278 - DNA, 122 bp, Homo sapiens
atgaggcccgaccctatggaaatctctaggggagcttgaggagtgcattaaagtaagacacgcccatgctggtcagtagaacccaccctcaggtttagaaagtgactgtaatcagcaagaga

SEQ ID NO: 315279 - DNA, 122 bp, Homo sapiens
ttttgggaccacaaccagatcgctgagatctctgagccaatgcttttttttccccccaggcgaaagcctacagttgaggatgcaagcaaatacacagaaataaaccaaccatgtgcctcctt

SEQ ID NO: 315280 - DNA, 122 bp, Homo sapiens
gcgcgcggggctgggagtgggggtgtgggcgcggcggtgacttacacatctcgaccaccgcgggcctagagcctccagggaccggaggcgggcggtctagacacggccctcgctctctgccc

SEQ ID NO: 315281 - DNA, 122 bp, Homo sapiens
atttatctacctcatcccacatggatagctgattgggtcagagaggacatcagatcctctcggggaaaaccaaatttcttctttggagaatgtggaattgggataaagagccagacagctag

SEQ ID NO: 315282 - DNA, 122 bp, Homo sapiens
cagagggtcgcgccacccgtctctccttcccccacccgcctcagggactcgactctggctcgggccccgccccacctaggggcctgcggaacccgcccgctccccgcacagcccctccccgc

SEQ ID NO: 315283 - DNA, 122 bp, Homo sapiens
gagagaaaaaggaagaccgctgtggtgtgccgggccagactcacagagccggcgtggttccggggccgccccgctcctcaagggattctggccaccactgccctccagttccaccgggagcc

SEQ ID NO: 315284 - DNA, 122 bp, Homo sapiens
actctttgctccgggtgaattgcccaggaagaattgtgcacagcctgctgtctgcctatgcgtcaagaatgtagcagccaacctgcagttgtaaggaaaccttccacaaaacaaagaagcta

SEQ ID NO: 315285 - DNA, 122 bp, Homo sapiens
tcacagctctttctgagagggagtgggcggccctgaaaagggccattggaagaaaactgacgaaaagattaaccgccgaagccgtacagagtgcgtccttgacgcttgagcgcgtaaaccac

SEQ ID NO: 315286 - DNA, 122 bp, Homo sapiens
aggaggggagctcatgacaattttcatctgctgctgcttttttggccatcttaacttcatcggtgaagcttattccagattcaaaggtcaactgcttccaactaaacctttgaattcatcat

SEQ ID NO: 315287 - DNA, 122 bp, Homo sapiens
attctgcttttggatctcacattgtttcttcctgtaaagcccttggcaaaaagtgctatccgactgtatgttgtcataccaagactttcatcacacagtgttttgccaacatcagactgtgc

SEQ ID NO: 315288 - DNA, 122 bp, Homo sapiens
gtcacccgcttcaagaggaaactaggataattatgaccaaaggggaacttgttcattcgccggatattaaaggtgcctacttaagtgcgaagaacaggaggcatagcggtgaccaaacacct

SEQ ID NO: 315289 - DNA, 122 bp, Homo sapiens
ttacggtggacatcgattctgatagtgggcgcaagcagagaggaaaacgagagcagtaagcgtgtattcacagtggagtctgtaattaccaaatgcaaagtcatagggcttcagggcaaagc

SEQ ID NO: 315290 - DNA, 122 bp, Homo sapiens
ctcccggattcaagtgattctcctgcctcagcttccccagtagctgggattataggcacgcgccaccacgcccagctaatttttgtgttttcaatagagacggagttttaccgtgttggcca

SEQ ID NO: 315291 - DNA, 122 bp, Homo sapiens
tagatgtgacagtcatcgcctagggacccaggctcttttcctaacagaagctgtactgcccgttcattagaagtgggagaggggaggtgggaccaggtggcactgggaaaactctcagccac

SEQ ID NO: 315292 - DNA, 122 bp, Homo sapiens
aaaggagagaaataaaccataaacacaaagaaattagtaaaacacagatgtcctgttgtgcggggaatatcaaagcagagacagtgaatagcaatcgctgggagaggtactgctttttcttg

SEQ ID NO: 315293 - DNA, 122 bp, Homo sapiens
ggagaaagtgtaaattggaagattgcctgtggcaaagctatgcaagtttccctgcccccacgactcacatgcataaatgctcccctcgcccacccatggagctgcaggagaactagcagcta

SEQ ID NO: 315294 - DNA, 122 bp, Homo sapiens
aagagggttattggggcaaattaaaagttcataaatcacaattttgccccgggagcagagcgaccagcatgtgaaaatgagaagtgttcctatgtcatgtgtttctcaggagaagtgccaga

SEQ ID NO: 315295 - DNA, 122 bp, Homo sapiens
ggacattcactgccactagtgcttgctgatgggggtggaactggagccccaggaccctctcgcagcccctctgtttgaaaagaaggttgaccctttgttgtcagtaaccacattgagagcat

SEQ ID NO: 315296 - DNA, 122 bp, Homo sapiens
caaatggaaggaacaaccccaagttccagagcctaggtagggctagggaaggggttgtaacgaggatactggcatctcaggtgctctgccagttttcccaaaataaaactattcaaacaata

SEQ ID NO: 315297 - DNA, 122 bp, Homo sapiens
aggcagcatgagccaaagctccgggcaaggccctctgtccccagagccggggcgccgccgcgctactcacgaagcgggaggagttgtcattcttcacggtcttggcgttcccgaaggcctcc

SEQ ID NO: 315298 - DNA, 122 bp, Homo sapiens
aggcctcagcagctgaggggtggctgaactcaaacatccacctcagtgcagcactaagaccgcgtcaaatttgacttttatctgatgctaaatcactttcccttgcctcacggtttttgagt

SEQ ID NO: 315299 - DNA, 122 bp, Homo sapiens
ctccctgcaccaccggcagcagcgaggccatcaccagcctcgtggccagctctgcgtctgcggtcaccaccaaggtaagatgtggtgtcatctctgagcaggagccggacagaggggccctg

SEQ ID NO: 315300 - DNA, 122 bp, Homo sapiens
gacactcagcaggactggcaaagcagaatatctgtgtcagtgtacgttttattcgcctgtcgtttgggtcagggtccatgggcagacccccgcagctaatgccctcaagggtgaggagcaat

SEQ ID NO: 315301 - DNA, 122 bp, Homo sapiens
ctggtggagcccgggctgcaggggccccggggttggcagcggcggctgcagaggaggcagcgtcatcggcggctgctgcggtagcgggggcggcggttcagtgcctggttcgccagctggcg

SEQ ID NO: 315302 - DNA, 122 bp, Homo sapiens
atatgcagcagcctactggctgggagcagcctggcagttacctggaggtcatgggcacaacgctataggtcctcagctgcagggccctctggctgcaggcggagtcttgggccaggatccca

SEQ ID NO: 315303 - DNA, 122 bp, Homo sapiens
cctggcccaccccgggctctcctgtctcagggcctcccttcctagggctggggatgggggcggcgggggcatcttcttttggccaaaataagcttgtcagagactgtggctgccggaggtca

SEQ ID NO: 315304 - DNA, 122 bp, Homo sapiens
ttcattttgcaactttccccagcaacaacagcaagtaatgaccctgaggatctgcaaagtcgctgatcagcagcccagcctcccatactcctgactcatccactgccctggctcagcccctt

SEQ ID NO: 315305 - DNA, 122 bp, Homo sapiens
taggaacccctcgagttcagggtctgaaaccaccctgcagctggcggggtggagtctgagcgcttttcagtacccccactgccccaccctggtctgagccaccttcatctcctgcctgggct

SEQ ID NO: 315306 - DNA, 122 bp, Homo sapiens
agtttatttgttgaagacagcagggtgtttgccttagagagctgtcagcaatctaagtttcgctgattgcatcaccatggaattgaccaatgttcctccatccatggtgttttctgtaaatt

SEQ ID NO: 315307 - DNA, 122 bp, Homo sapiens
actcgggaagtgcaaggggtcagggagttccctttcctagtcaaagaaaggggtgacagacggcacctggaaaatcgggtcactcccacccacatactgtgcttttccgacagacttaaaaa

SEQ ID NO: 315308 - DNA, 122 bp, Homo sapiens
cactgtggaaagactgagagagcaactgagagaaagtgggcccctgaatgaaagtgatttcgcaaattttaggcagatgccaccatcagaaactgatattttctgacgtctttctcaccttc

SEQ ID NO: 315309 - DNA, 122 bp, Homo sapiens
ggggcgcgtggaaggtggtggcaggcaccggcctgggcagcttccaggcctggctggccacgaccacggcccgagggggagcccgccaggccacgccgcactgagccacagccccgggggcc

SEQ ID NO: 315310 - DNA, 122 bp, Homo sapiens
acccgagtcccgtgctcgcgggcaggacttttccgaactggggctgtgtgcctagaaatacgtacatgggagcgctcagctcaaagccccagggtttctgggactcgcgtgtccggggtcgg

SEQ ID NO: 315311 - DNA, 122 bp, Homo sapiens
gcaaaatgaaagaatttaaaacaagcaacagctaaaagattcctggccaagaaattgcttcggcagcatcttgatttctcaactcatttttttagacctttctctgcagttgtgttctggca

SEQ ID NO: 315312 - DNA, 122 bp, Homo sapiens
aatatagacatagggaccaaactttggcttgtcaagtacccttcctactcatgtgtggtccgggaaccagcaacctgggcctcagaggggaacttgttagaaattcagaatctcaagtccca

SEQ ID NO: 315313 - DNA, 122 bp, Homo sapiens
agaaagaagcaagttgcaggatcagtggcaggtggagctgaagagagaacagaggggtggcgtgtgctggggtggggagaaccttcaaaggaccagggatgccctcccctcacccaaggcta

SEQ ID NO: 315314 - DNA, 122 bp, Homo sapiens
gcagccagctgagcaccttgctgtggccgcggctcgccgcgaagtgcgtggcggtggcgccgtctttgtcctgctccgacaggctcacgtcggtgcagctcacctgggcgggaggggcgggg

SEQ ID NO: 315315 - DNA, 122 bp, Homo sapiens
cagcggcagagctgcatgaaaaggttcttgctaggtcctcgctccagccgcctggtggtgcgttccggggggaatgaagtagcaagtgtttatgagccagccgtgctgaaggtttaattggg

SEQ ID NO: 315316 - DNA, 122 bp, Homo sapiens
cgaaagccgggaaggggagaaccgatactcacctgtaggcttctggggacccgccctcggcgcggcctcctgctacagacctggcgcgtctgggccgctctcccggcagaaagtctaaagag

SEQ ID NO: 315317 - DNA, 122 bp, Homo sapiens
tccaatggaagcctaacgtgccacctcttccaagggcagtgcattttaactcagacccaacgccccaaccaaatgaaagatctctaatctggaattttcaacaatggggctggtgggtcagg

SEQ ID NO: 315318 - DNA, 122 bp, Homo sapiens
ttcactcctgagccagcgagaccacagaacccaccagaaggaagaaactccgaacacatccgaacatcagaaggaacaaactccagacgcagatgcgccacctgaagagctgtaacactcac

SEQ ID NO: 315319 - DNA, 122 bp, Homo sapiens
ctccttaaccgcagcttttcgcctcctccctcagcagcgagaagcctcacgtgacacccccgccccaaaagcagctgctccccgcctcagccagtctctgcccgggcccaagatccctgctg

SEQ ID NO: 315320 - DNA, 122 bp, Homo sapiens
accttgtggtccgcctgcctcggcctcccaaagtgctgggattacaggcgtgagccactgcgcctggccaataataggaatgtctatccagctgtctgaggctcttatttgtagggtacaag

SEQ ID NO: 315321 - DNA, 122 bp, Homo sapiens
cctcaagaggacctggatgtgaccaggatggactaccacggcgtggcaccgccaggccttcgcacttgctggttcacctccctagggtgtcacaggcccgagcttcatggggttggctgctt

SEQ ID NO: 315322 - DNA, 122 bp, Homo sapiens
tcgacttgtcctccacgccgatgtcgctcagcttcagggggcccgatttggtgtccttgtcgcccgcagcaccgccgccggcaccgcccgcgccgcccccgttggaggcaaccgaggagagt

SEQ ID NO: 315323 - DNA, 122 bp, Homo sapiens
gcgcagcaggaaagagcctgctggggatcagagtctctgggctgtcagggccgggctgggcgggctccgttgttaatggcttcccctcatcttgcaggagccatgtggctagaaatcctcct

SEQ ID NO: 315324 - DNA, 122 bp, Homo sapiens
gagggtgatcaaattaagaacatctgagctgtattggtgggcggtatcgctaaacgcctccggggagcggtttccaagtgatttgcagtaatcccccaccttcatgatacatgggtgacgat

SEQ ID NO: 315325 - DNA, 122 bp, Homo sapiens
tttccgcagacctgatgccgatcagatttactccctgctgaattcaccccccagtcaggccggttttccttgtttcaccgtgttctctgaatacactgaattactccgagcatctatagttg

SEQ ID NO: 315326 - DNA, 122 bp, Homo sapiens
gcgattctcttaccaacaggtacaggaaaacgggggtcgggctgggctggggcaggacggcgtcgagtttctggacagaaaagtacccggcagcccccggcggcttctcatcggcaccccgc

SEQ ID NO: 315327 - DNA, 122 bp, Homo sapiens
gcttggcagaggcgggagtggaggctgtcaccatcaggatgaaggacaggggtggcccggcgtggagaagctaagaagagatggcgataggtcaacgcgattgcgcctttaaggtggaagaa

SEQ ID NO: 315328 - DNA, 122 bp, Homo sapiens
gtgccaacctcagcctggctggagtcagagcctggctccgcctcggaggggagcgggacgcgaggtgccaaaaagtcgtctttatgatcaataaggtctcgaccccgagccccactggatga

SEQ ID NO: 315329 - DNA, 122 bp, Homo sapiens
gctgaacatccgccagtgcacgggaacctttggctacggctacgagtacatgggcctgaacggcaggctggtcatcacgcccctcaccgatcggatttacctgacgctcacccaggtgactg

SEQ ID NO: 315330 - DNA, 122 bp, Homo sapiens
ctccccctcaatacccacaaggattcaggactcccccgctctcccggcgagtttgctgaacgcccttcggccgacgtgtcccgagcatcgccagtatttacgttctaggcaccctgttaagc

SEQ ID NO: 315331 - DNA, 122 bp, Homo sapiens
ttcatgtcttaggaaatgttctagtaactcattttcccttctctgtgaaagtcattgaatcgaatcgtgctctcaatgaaactctcttaaaatccattaatgaaaatgttagcaccttaaca

SEQ ID NO: 315332 - DNA, 122 bp, Homo sapiens
cagcagtgaaaattcattttcagccttaacaattgggaagatagagttgaaaggaggaaacgctgctaagatttaaaagccgtttacccaacctcacaagtgtctggagcttcaatgtacat

SEQ ID NO: 315333 - DNA, 122 bp, Homo sapiens
cacgtagtcataggagaagccctggcgatggaacagattccggaaaagctgccgcaggtacgagtagtcaggcttgtcgtcaaaacgcaaggaacggcagaaattcaggtatgtggcaaatt

SEQ ID NO: 315334 - DNA, 122 bp, Homo sapiens
atcaaaacagacagccaagcccacagggaagacagcaaaccttaactcaaggacacaaaacgacccagcaagggcaacatgaatgcactggccctagcatttgtagtggctctgtctggggg

SEQ ID NO: 315335 - DNA, 122 bp, Homo sapiens
gaggctttacagcccgcccaggataccaccatggtggcttctgggaagggagcgacctctcgggttggctatcagctttacctgcggtgtcgccgcttctcccatcggcttgcctcaacgtc

SEQ ID NO: 315336 - DNA, 122 bp, Homo sapiens
ctgggggaaagaagaagggttagtggcagcaggagcatgccaacgaacctcggtattcctcggcgctctctcccctgcatcctccccgggcagcccctcaccgttgctaggcagcggacgcc

SEQ ID NO: 315337 - DNA, 122 bp, Homo sapiens
tcagttgccaatgatgaggttttttgtttccttttgtgcaggcacaattgtgatattcaacgagagtagtgcgaagtgccactttacagccaaacattcaattcctcctaattcacaaggga

SEQ ID NO: 315338 - DNA, 122 bp, Homo sapiens
gaagttgaatactcagtgattgactgtgcagatgaaatagagaaaaaggtgagactaatccgaattaaatggagcaataaaatgagaatctggttgaaagaacttgtttcttgcatgccaaa

SEQ ID NO: 315339 - DNA, 122 bp, Homo sapiens
gattttatttatttatttacttatttattcactgaggcagagtctcactcagtctgtcaccgaggctagagtgcagtggcatgatctccattcattgctatctttgcctccttggttcaagt

SEQ ID NO: 315340 - DNA, 122 bp, Homo sapiens
catgcacacagccctccccaagccaaacatcctctccctcacagagtgtgggatttgagccgcaggagccagaagaggaaaaggtagtggtgtcactaaacacctggtcacaatggttaaga

SEQ ID NO: 315341 - DNA, 122 bp, Homo sapiens
tgggggaatgcgctgagaggacccgtccagcttgcttaaaagccatcagttttctgaccccgcatcggttccaggaagaatacacctatgtgacaagctaagttctgcctcattttgcattt

SEQ ID NO: 315342 - DNA, 122 bp, Homo sapiens
gaagacgatagaaatcggcaactctctgcctcagggagccggcagtcccaccctgggccgcgttccacaccaggtccagggcaggggcataggtcctctcaccagggatgcgcacctgtgtc

SEQ ID NO: 315343 - DNA, 122 bp, Homo sapiens
tgaaggtgctttccggtagccgacttgggaggttgcccactgggtgggtaataggtctctcgagtaggtctcagccctgtcgctggttcggttcagtggtaattgtcaaactaaatgagttc

SEQ ID NO: 315344 - DNA, 122 bp, Homo sapiens
ccacgtgcctcgcccagctcactcactcctgatgctgcagtggtgacctggggctacaggcgtggaggacacggctctgcataaccgggacctgccgggcccccaccccgcgcgctgtctgg

SEQ ID NO: 315345 - DNA, 122 bp, Homo sapiens
tcaagcaatcagctcacctcagcctcccacagtgctaggatttacaggtatgagccactgcgcctggagtaatttacatgtctttaatgtacaaataaatgttgcgttaatccagaatccag

SEQ ID NO: 315346 - DNA, 122 bp, Homo sapiens
tgtgtgcgcatgtgccacacagagggcatcacattcagctctccccggaaccaccatttccgtcaaggattggagactctgtctgttggaccaatttgatgcctgtgcacgctcagggctct

SEQ ID NO: 315347 - DNA, 122 bp, Homo sapiens
cccacaggagctcatttagatgtcagctccacagggaggcctcccctaaacaaggtaaaacgcggtgccccacctgccctacatccctcattgctgttccctgtttcattttctcagtggca

SEQ ID NO: 315348 - DNA, 122 bp, Homo sapiens
taacccaggcccagctcaagaacggctccccgtcccacacccaccgctccgtcttcttcacggccaaggagaagaagcccaaggactcctcctgcaggacctgctgtcccgcggcaccgagt

SEQ ID NO: 315349 - DNA, 122 bp, Homo sapiens
ctcaggtgatccgcctgcctcggcccccctaagtgctgggattacagatgtgagccacctcgcccggcctgtccacggctaattttttaaaaatcttttgtagagacagggtcacactatgt

SEQ ID NO: 315350 - DNA, 122 bp, Homo sapiens
aggtggcacctggtcctccgacacgcggaagcatcacggatgagcgtcacgaacacagagcggccaatcacgcgccgccttcgcccagatccctccgcacgaggcagccccgcagccgcagg

SEQ ID NO: 315351 - DNA, 122 bp, Homo sapiens
aaatcctatttacttccacaacccctggccgtattccaggcccccatgaagcatttacttcgctctgttccatgacctggattacactagtttccagcacagagcttcagggctggggactc

SEQ ID NO: 315352 - DNA, 122 bp, Homo sapiens
tgggttgaaagccacggcttcggccttcggcgctcccgccagctcacagcccgcctttggcggctccactgctgtcttcttcggtgcagccaccagctccggctttggagccaccacccaga

SEQ ID NO: 315353 - DNA, 122 bp, Homo sapiens
aataaaatagacaaaagtttggttggctacacctttttaggtgaaatatactgagagatgcggactcttcctcattggagaaatgtaagttatttagacattaataaaagttctgcgttcac

SEQ ID NO: 315354 - DNA, 122 bp, Homo sapiens
ttatgtgctgagtcccggtggcagagagtttgtgatcatggatggcgcctggaacttgaccgcatttcatttaatgcaacggaaatttcagttacaatttagtttattgatttttttctact

SEQ ID NO: 315355 - DNA, 122 bp, Homo sapiens
ggaatgtgagagtttcaggttccccctcgggatcaaagcgaaccacaaataacctctcagcgcaccgccctcctccgccctccgccttctcccgctccctcctcccggcccccgccttcctc

SEQ ID NO: 315356 - DNA, 122 bp, Homo sapiens
cgcaggtcttccgccttggccatcagcttggagatgttgaggctctcggcctccagcttccgggcttccatcttgacttccctccggagcggggagcccccgccagccccctccttgttctt

SEQ ID NO: 315357 - DNA, 122 bp, Homo sapiens
tggtaaaggatgggcaggaaaggccagtagtgctcccccgcccagtctcgctgggtctggcgagccaagcccctcgggcgctggcgaggtcctcagccatctgcccctcgagagccaagcgc

SEQ ID NO: 315358 - DNA, 122 bp, Homo sapiens
atgactgtgatactcaagtacagaattgtggtgcagccagaagtggttcaagagccctcccgcaaatcatgacttgcactctggcttttaagtgaagacgagggaatctcaaggcagatggg

SEQ ID NO: 315359 - DNA, 122 bp, Homo sapiens
acacgatattttatttacgttacagctctattcaaagctccaggcttctttttgtagaatcgtttccatctgctggaatccagcatcgcccccaccccccgccccatttctagggggatgcc

SEQ ID NO: 315360 - DNA, 122 bp, Homo sapiens
agatcagagaacccaggtttctttttcagtgattccatttctcagagccctattctcctccgttgaagagtcacatctttagaaatcgatccaaaatatctttatgatattttatgagactt

SEQ ID NO: 315361 - DNA, 122 bp, Homo sapiens
caaagacaactcggtcaggaccaggaagaatcctgggcaagtcgagagtcacaacccagacgacaaacctgatacaaatacagccttgtctctctgccctgctaaggatctgcagctaaggt

SEQ ID NO: 315362 - DNA, 122 bp, Homo sapiens
atgcaaactcttgccacccacttggagaatgtgttgctgtctttcaatctttcagatgcacgtaaccttttccctaacaagttcacctttaaaaactgttgctaccgactcccatatgtact

SEQ ID NO: 315363 - DNA, 122 bp, Homo sapiens
caccgctccgggagagcgggtgtggggttggattcaggtctcggcctggcgaagcgtgagcgcctccctgcacggaggggaggccccagcggtgggcgcctgtccccaaggccgcgcggagg

SEQ ID NO: 315364 - DNA, 122 bp, Homo sapiens
tcggccctcaccttgtgccagcggccaggccgggagcgctggcggctctgggcgcggagccgagtcccgaggccttccatctgtgcaacgaagtggccattgctcaggaagagcgccaggga

SEQ ID NO: 315365 - DNA, 122 bp, Homo sapiens
ggatgagggtggtggagaaagagctcaggactgctctcccaccactcttcccaaaggctccggatatattcagacaagagacacaagacacagacatctacaattcacagatacctgataat

SEQ ID NO: 315366 - DNA, 122 bp, Homo sapiens
cggccgctcccgggggctcctcctgcgtccccagcgcccacgccccgccccacctggctccgctgcacccgcagccacagcgcccgcccgggacacctgcccctccacggccgcgcgggcgg

SEQ ID NO: 315367 - DNA, 122 bp, Homo sapiens
ggggtcagggcgaagtcccagggcctcaagcgtggctctcagggtctcaggccccacaggcggtgtatgggttggggaggccccgcgttggggattctctcctccttctcctaacctgtgtc

SEQ ID NO: 315368 - DNA, 122 bp, Homo sapiens
ccccgcccggcagcagcgggggtgggacgggggcggcgggagccggcgagggggtctgcccgtccgagctttcctgggcgccggctccgcccctcgacccttggggcccaggtggggcgcag

SEQ ID NO: 315369 - DNA, 122 bp, Homo sapiens
actccactttccacttgggctacaaacctgaaacgaaatctttgcaaccagtacagcctgcgcggggcgcggcccagtccatcccccttcggatgcgcagaagcagaggtcaccacgccgga

SEQ ID NO: 315370 - DNA, 122 bp, Homo sapiens
gaatgctctgcgtgaggctcaaggagtggccgcaggctgtggcagccaccacgggaactgcggcttcacacccggagagccctgggctgtgagaaggcggccaccaaggaggcatttccgac

SEQ ID NO: 315371 - DNA, 122 bp, Homo sapiens
aatcaaccccctcagactttccactgcgaagcgaaaccgtaagccctggggtgcggggggcgggccgggaggaggggaagtggggaaggtggagggaaggccgggcacaggggtgaaggccc

SEQ ID NO: 315372 - DNA, 122 bp, Homo sapiens
caacagacccatcatgatcttatgatgtattacaacagaggcactatttccaccaagcaacggcttcctggtctccctaaagaccaccagaggagaaaagccacggttaggtcacaaaagct

SEQ ID NO: 315373 - DNA, 122 bp, Homo sapiens
ccttcctcggggccctggcctgtgtgcggctgccccaaccccccaccccacccgccccgccgtcctctgctgcacccatagcgtcttggcagcatcattcttggccctggagaggcctgagt

SEQ ID NO: 315374 - DNA, 122 bp, Homo sapiens
tggccactcggaccctctccgaaagttcactcagtggccgccccgcgtcccgtcccgtcccgtcccggctccccatcgccgtgccggcgtctctgtctcggctgctttctgttttcctcggc

SEQ ID NO: 315375 - DNA, 122 bp, Homo sapiens
cactggtcactctgtcagtgccttgagctcctggcctggctggccctgctgccctgtctgcgctggtgccagcactatgctgggtcactggggaagtcgggctggcaacatacccagatgca

SEQ ID NO: 315376 - DNA, 122 bp, Homo sapiens
acctacctacccttcttcattgatggattggagctatacttacctgggcaggcatgacctcggcattagtccccgcaatcttgactccagcatacaagcaggcccggtaatgggcctccacg

SEQ ID NO: 315377 - DNA, 122 bp, Homo sapiens
tctgacacagactcttccttggattgcaacttctctactttggggtggaaacggcttctccgttttgaaacgctagcggggaaaaaatgggggagaaagttgagtttaaacttttaaaagtt

SEQ ID NO: 315378 - DNA, 122 bp, Homo sapiens
ctgaacctacagttaagcccaagccaggggccgcttttccctaatgaacatgcctttcttcggtggacctgaccctgttacaggaaagccgcgctttgatgaaaccagttctttaaaatgaa

SEQ ID NO: 315379 - DNA, 122 bp, Homo sapiens
ggggctcctcacttctcagacggggcagttgtcaggcggagggtctcttcacttctcagacggggcggctgggcagagacgctcctcacctcccagacggggtcgcggctgggccgaggcgc

SEQ ID NO: 315380 - DNA, 122 bp, Homo sapiens
ggctggggaggacaggcactcgggctgcggggaagggtgccaagggagggtgctcgcggccgcggagggaggagccggggaaaggtggagcgcgaacgggtgggggggtggcggggaggagt

SEQ ID NO: 315381 - DNA, 122 bp, Homo sapiens
catgtttgagagccaacataaacttgtccgaaccccttacaatcgatgaccgcagggagccgctgaagagctccgaggcggtcgatagcctccgcgagctttgcgtgcgcgtgccccgagag

SEQ ID NO: 315382 - DNA, 122 bp, Homo sapiens
ggggcgagctgagctcgggcagagcctgcgcggctcagggacggtcactgtgtcctcacacgggcagaacgggctctgaaaacagccattaccagccattggctccattttccctggcgctg

SEQ ID NO: 315383 - DNA, 122 bp, Homo sapiens
ttctttcctcaggaggcccaggggcgcgggtgaggtgtcggttgctttgcacccaggccacgctgcttccaggggccttgtggctggcagagtggacctgacgtttcccagacgccgttgcg

SEQ ID NO: 315384 - DNA, 122 bp, Homo sapiens
tggcggatgcgcagtgcccggcggccgggctgaggggtgaacgcgggggtcagggggccccgggctgagggtttgcgtgcgggccgggtgcctgggggccccgggctgagggtgagcgcgcc

SEQ ID NO: 315385 - DNA, 122 bp, Homo sapiens
cctgaccgcatgttccctggagggctcgctgtcttcagagccaggcttgtctcctgctgccgcctccactgctctcctagtcactctataacccactccctctgcctgcggcccccaccacg

SEQ ID NO: 315386 - DNA, 122 bp, Homo sapiens
gaggctgctccttggaagaaacgtcttcttcctgccaaaacagacacgcactggctgtctcggcggcactgaacggctggctcacgcatgtgcgtagctgattcactctgaaaagcaaaaac

SEQ ID NO: 315387 - DNA, 122 bp, Homo sapiens
gacagagatgagggggattgggtgtctcttggtgaaggaagttgcccataaaccagagagcgagaggaacaagcatcctccatgccacctcctcatgtaacccaactccgtaaatctctgct

SEQ ID NO: 315388 - DNA, 122 bp, Homo sapiens
agttggaggaacaccaaactgttagagaaattattctgaaactatatctgggcttaggaacggaaaagtgccatgatgaacaaggccgagtcttaggaaggcagggtgccaggtatgcggtg

SEQ ID NO: 315389 - DNA, 122 bp, Homo sapiens
ggatgcatacagtaaaagagggcacctgaacaaacaagcattgaatttggagaatgcctacgagtctgtgctgggctacgttcccaagacagactcagaagttacctgccctgccaggtacc

SEQ ID NO: 315390 - DNA, 122 bp, Homo sapiens
gccctcccagacgctcagctcgcatcgccccacagtggaacagtcccccggccccgacgccggactccctgggaagcccccgacccccaagtgccaccaccaagtgcccactctccagagca

SEQ ID NO: 315391 - DNA, 122 bp, Homo sapiens
gagccctgcagggatcagatgggggctaggggaatctggtcaggcccagagccgggttcccgaccccagctccgaagcagctttctggctacggccgcgcaagccgcggagccaactgcggg

SEQ ID NO: 315392 - DNA, 122 bp, Homo sapiens
aacagttggacaaacaaagcagtttctattttgtaagtataaataaattcccccccaccccgctgcgtctcttcgttggatttaaaaagaaaggtatttttgcacagacacaaagctagaga

SEQ ID NO: 315393 - DNA, 122 bp, Homo sapiens
tcaccagttgaattcatcatagtcattgtggacttcccaccagaagtaaagccaggtgagcgtgaggccaaaggtgaaggtgaggagcaggaaccagaggcgctcccactggaagagcagag

SEQ ID NO: 315394 - DNA, 122 bp, Homo sapiens
atctcgaaaagggaccagtaggagtggcggcccaggtctgagctgcgctgccattgggcgcggcgacgagagggggcggggagcccgtgaggctggttacgccgagggaagccccgactccg

SEQ ID NO: 315395 - DNA, 122 bp, Homo sapiens
catttatgggagtgagcgtgtccagggacgcgtgggtgcgtcggggcagggaaggccgggcgtggccctagacagggcacaggggcatgaaaggcgctggggaggaacaggaccagcctcgg

SEQ ID NO: 315396 - DNA, 122 bp, Homo sapiens
cagagacctggaccgaggcgtcccctcccctatccagctctggcctcggcctggcaaacccgggcaggagccccctcacctggttcacagcccctgagctgtgggagcacatggcggacacc

SEQ ID NO: 315397 - DNA, 122 bp, Homo sapiens
tgggaaagagcagaggcagttgccaaaagcacagcagcagggaaatgggcgggagacgcgcgcgcgcgcacacacacatacacacgcacgcgcacacacacgcacgcgcacacacacacaca

SEQ ID NO: 315398 - DNA, 122 bp, Homo sapiens
ggcctgaagaatgcttcttctgtttacaacacacccaataggaatctggggtcattgtgacggggggcacaaaacttgtgacctctctatgaacaaatgccccacatgtgaaaaaaagaaat

SEQ ID NO: 315399 - DNA, 122 bp, Homo sapiens
aaccctaaaaagtgacatgttaaatctaaggatgctcttggtgacactgtcctgtttttgcgaagtcatgagtgaaaacaaaattgctttagttgcaaaaccgggaaaaatgtgctattcct

SEQ ID NO: 315400 - DNA, 122 bp, Homo sapiens
ctccatatatgattatgacatgactggaaagttctatagcctgtgtctcaacctgaggtacggtgtgtggataggggtaggcattaaaaaaagatacctttttctggtgtgtcagttgcgca

SEQ ID NO: 315401 - DNA, 122 bp, Homo sapiens
ttcaacctgggtagaagacacgagggaactctgtcactaaatcacggcagagttcaaggccgcttgtagactatttcgtgttatagaaggtggcctttagctactaagcaaaggcctctgtt

SEQ ID NO: 315402 - DNA, 122 bp, Homo sapiens
atggctcagagccacccagcgtgccaggcctcccagaccaggtaatgtcggggtgctggacgtcccagtggccatctgcagagctgctcgtctcgcactccatccatcgagaaagcgtaggg

SEQ ID NO: 315403 - DNA, 122 bp, Homo sapiens
aattctcagaccttggtctcgagttcccggctaatttgggggcaaagccgaccgaccccacgtccacgcccacccccttacgggaaaagccggggtttccactgggctaggtgtcagagttg

SEQ ID NO: 315404 - DNA, 122 bp, Homo sapiens
cccatccttgccccctcggtcctgggctggtggggtcatcctcttgctctcactgccgaccgcgttcctctgcctgctcacagcgcctccttggtgccctcagtggcaggcttgctggaaag

SEQ ID NO: 315405 - DNA, 122 bp, Homo sapiens
cccatctccgggaagtgacgccatggggacgagcggcaccagagccggggccagtcggagcggggcgcgcgccgcatggcggaagcggaagggagttctctgctcttgttgccgccgccgcc

SEQ ID NO: 315406 - DNA, 122 bp, Homo sapiens
cttttcccgcctccgttttgactttgcaaccaaactacctgtactggtgaccgacagggacgtgtgaccaatagaaagcccagatgtccaggaagagtccgcctatcagccaatgaagagac

SEQ ID NO: 315407 - DNA, 122 bp, Homo sapiens
aaggaaagggagcattttagacaactgttaggcgtagggttacctgaggcaggcctcccccgtccccatactcccttatccccggagctgggatttccagcctttggtttctcccttctcag

SEQ ID NO: 315408 - DNA, 122 bp, Homo sapiens
ggtgccaaggaaggatcaggctctggttcgtacaaaagaacaaggaacagagtgcatgctcggcttgtagaagtcacagttgattgagatcaggtgcacagcgagtgactgcctctcagctc

SEQ ID NO: 315409 - DNA, 122 bp, Homo sapiens
tgtgcttcctgtctgcttttcattccagaccaggctaggagctccccaaggctgtagccccggtgcagggacctgcagccatttgctggccggtagagaggctgcaggaagccacagcggct

SEQ ID NO: 315410 - DNA, 122 bp, Homo sapiens
attatttaatatcatagctccaatatgtcatcatgtgggcaagagatacaccacagtaagcgaattcacaagagggtgatttataagtcatgttattatttatagtgagaattgcataagtt

SEQ ID NO: 315411 - DNA, 122 bp, Homo sapiens
ggcggcgccccaggacggcaggcgggtggggccgcctggagggcggagctcggcagtcgccgcccccgggaagccttgcacgccgcgccccggccaatcccccggtgcccccggacacgcgg

SEQ ID NO: 315412 - DNA, 122 bp, Homo sapiens
aagtccatcatgtccaccatgattatggtccaagactgcggctggcgggaaacccacggacgactgaaactgtgcgccccgcgggtgtctatggggcagatttctcggcaccaatcagcgaa

SEQ ID NO: 315413 - DNA, 122 bp, Homo sapiens
cctgctgaactattgggtgcggggcgggtggtggcgcagcctgcgcatgtgcataggggtcgactgccgctgcggtgcatgagggcgcatgcgcagcggggccgtgggtgtacgcggcgcag

SEQ ID NO: 315414 - DNA, 122 bp, Homo sapiens
aaggggaagccgaaggcggaagctgagccctggggcctgatgcatgaaatgagcttcagacgctgagctcacagaactcctttgccttcccccacactctccggcccaccttgcccagttgt

SEQ ID NO: 315415 - DNA, 122 bp, Homo sapiens
tagccactgagtccttcagcgacccaggaaataacaacactgttggcaggtgggggagggcgcccgggaagatatccaatagtggcgtcaggcaagaggacagaaatgctcctttcattcac

SEQ ID NO: 315416 - DNA, 122 bp, Homo sapiens
tgccgccccgcctccagcccgtgccacggcggccgccattggcgcgggcccatcccagaacggcgcccattggcccggtgcgaagccattcacccagcgcattccgccgcccgcaggcttgc

SEQ ID NO: 315417 - DNA, 122 bp, Homo sapiens
ggatggcaccggccctcgcacgctcaactcctgctcctcctcttcgcaatgagtaaacgacgcagtaggtcctacccagcctattttgctttaccaaagggctttgctttcttagggatgct

SEQ ID NO: 315418 - DNA, 122 bp, Homo sapiens
gtctttggtctggagaagggtccagcctggggtcgttgggggtgtgaagggaccaatgagcggtctgtccgctcagaagggtccagagagagagccaactggaactacacccccgctccccc

SEQ ID NO: 315419 - DNA, 122 bp, Homo sapiens
ccccgttcgccattgggtgcgggtgacgtcgctcatttgcatggaggggcggggccaagccgccgacgcccgcccggccgccgttgccccggcgacgcgcggtaaacgccacaacagcgcgc

SEQ ID NO: 315420 - DNA, 122 bp, Homo sapiens
ggcaggacgcctctcttcgtgctgccccagggcccatccacgtcgactcccggcgtgaagcgtgtgggctgcctcacagcctggcagctccaggactgctgggggctccccccgcggccccg

SEQ ID NO: 315421 - DNA, 122 bp, Homo sapiens
acaaatttcacacataaggaattcctgtggctttttccttgttctgttttttggcattctcgatcagacatcacgggggcctccaggttctgccgcaagtcagggtgtcggcctgagggaga

SEQ ID NO: 315422 - DNA, 122 bp, Homo sapiens
caaaaatataacaaaacatctgtggaagttgcacagcatcctggctcataaaatcaggatcggaaaccatcagtctccttcccgtttctgtttcctttcttgtctgtaaagaccaaatattt

SEQ ID NO: 315423 - DNA, 122 bp, Homo sapiens
acagagcaggttggcctaatagaactctccaacaatagtccccctacaggaacactaaatcgaacaactatccacacaagaaagcacttttatgagaaccaaaaatcaagtgagtgatcaca

SEQ ID NO: 315424 - DNA, 122 bp, Homo sapiens
ttgtaatgggcaaattcaaagagccaaagtcaggcatgtgtaacctagagctgttcaggtcgcatacttttctggggtgggccatagattgtgtgtagcctcaattcctgtaacctctcctg

SEQ ID NO: 315425 - DNA, 122 bp, Homo sapiens
gaagagcttaccagtcgtggaagtagtcaatacaaacagggaacagactccctagctactcgggagtctgaggcacgagaatcgcttgaacccaggaggtggagattgcagtgagccaagat

SEQ ID NO: 315426 - DNA, 122 bp, Homo sapiens
tcccgcccccaggcctcggaaaatgaactggtgtcagctgctgcccagaaggttacccagcgtgttctctctctcagggtccttcccttaaattctcaagtttgacatggaatagaagaatg

SEQ ID NO: 315427 - DNA, 122 bp, Homo sapiens
tgagcaactacaagtctcaagctatcctgggacctgtagtttgtcggcttacacaattaacggaaaccatactgtacatcttcagtctgacttagggtactgggcagctatagcaaagaccc

SEQ ID NO: 315428 - DNA, 122 bp, Homo sapiens
ctacctgcaggccgttggggtatgcgtcgccctcggagagcgagtccaccaggtcctcctcgtccagcgtggcccgcttgtacgtcgacatctgcaaggccaaatgcagcacggactccctc

SEQ ID NO: 315429 - DNA, 122 bp, Homo sapiens
tctatttgaggtctttgtttccataacatttttagtatttttttctatttatatggagaacgtaattgttattttaagagagattatattaaatctatagatagctgttatatggtcatttt

SEQ ID NO: 315430 - DNA, 122 bp, Homo sapiens
aagaagcttgtgttaatcttatctctctacaaacttgacaccattaatgcacttgtgcatcgtaccaacctgtactttcacgtttaaaagctctgcagaactaaatagacttttccaaaaac

SEQ ID NO: 315431 - DNA, 122 bp, Homo sapiens
ggttgcgggctgtggccccgggggctgagggcggcgcgggtgcggcggaagcagggaagccgcgaaccggccttctggctggccacagcgccctgcacggacgatcagtgaatggagattac

SEQ ID NO: 315432 - DNA, 122 bp, Homo sapiens
tgtgacagtattatggcactttggcctaagctgttaaagagacgatgtaatgaacagctgcggatttctgaggcacaattgtgtgacacaggaagcccaagtgttggccatcctcaacgaag

SEQ ID NO: 315433 - DNA, 122 bp, Homo sapiens
acacccacactggacaggaagagcctcaggcagctcaggcaatgctcaggccaggccctgcggcgcagggaacctgccatcaaatgcccgggccaggccctgcggtgcagggagcctgtcat

SEQ ID NO: 315434 - DNA, 122 bp, Homo sapiens
gaggaggtgcgagaggcgttgctgggaagcttgttccgggtgctcctccaggtgcgcacgcgcagtacccgtccacgcttgttcatacgtcgcctgtctcactagcgtcttcaacgccaggg

SEQ ID NO: 315435 - DNA, 122 bp, Homo sapiens
caggggccgggtcccgtcccgccccagcccgcgtctctccctggacccgacgtccggctgcgcgcgtggaccaggacacctaggctttcaccagcgcccgtttcctccggacgcggccgtct

SEQ ID NO: 315436 - DNA, 122 bp, Homo sapiens
aaagggctgaggaaaaaatgatgagcctcagtccacctgcgtcatgctctagtgaattatcgtgtgatgtgtcacagttattttcctcccaagtggctttgggagaacccactccaaaggtg

SEQ ID NO: 315437 - DNA, 122 bp, Homo sapiens
tgtaaggttgtgtgtggagccctaatggcaaagcccgtgacgggtcccggagcccaagaccgctctccccgccgaatgtgcccgtgtcgcggccgtgactgtggtcgctgtcactcgagctg

SEQ ID NO: 315438 - DNA, 122 bp, Homo sapiens
caaatgtagattcctatttaaaagatctacggcggagactccacatttctaagaagctcccggctcgtgccgacggggctgctccgcggaccacttagagaatcccgttcagggtggctcat

SEQ ID NO: 315439 - DNA, 122 bp, Homo sapiens
gcctggcttatcccaatctcaactatgctgcaaaacctggctcacttcctgtctcctgcacggggcttcctccaacactccaacctcacaggatttctccccatgaatcgcccagatgcttc

SEQ ID NO: 315440 - DNA, 122 bp, Homo sapiens
ggccgcgcagggccgggcctgggtgggaaggctgggctctgggaaggatgtcggggcacccggcagtgcccaaagccaccatctcaagcgtgatagtgggaaaatggatgctgcacctgctc

SEQ ID NO: 315441 - DNA, 122 bp, Homo sapiens
gggggactaggaaacaagagcccctccccctagctgacctccaggtgtgcccccacctcccgcagtggaaacagaacaagaacaccctgctagaaaatagccagcgtgtcaccactgccctg

SEQ ID NO: 315442 - DNA, 122 bp, Homo sapiens
ggccctcccggaacggccggctgcaacgcgtgtctcccctggacacagctccgcccttcccgggaacaaaagcagctgcccgcgcctaagctcccacccggagcccagccccggaaatggga

SEQ ID NO: 315443 - DNA, 122 bp, Homo sapiens
ccgggggtgagttgagttccccaccctcaggcgggagattatcgggtttggccggagggccgaggggccctgtggcgtcgggggtctttccctgcagggtgggtgggggctgtcaccacgtg

SEQ ID NO: 315444 - DNA, 122 bp, Homo sapiens
gccccagatgtgaacctggaatgccccggcccacctcctccttcttggggtccccagattcgcttcccgaggacctcgaagggttcacattctcaccataagcaggcgctcacaccgggggc

SEQ ID NO: 315445 - DNA, 122 bp, Homo sapiens
ttctcacttggcctccgctgtcgccacagggtacctccttcccttcagtaagagcatctgcgagttcgattacttgcggaagaggagaaaatcccagactttgagtccggtcaccagcagct

SEQ ID NO: 315446 - DNA, 122 bp, Homo sapiens
caggtcgtagctggcgcttactaaaatcattttccacgtaaatgcggctcagggtgttcccgcgacagggggagtactcggcgcggcggccgctctctggctgagccaaaaagcagctacct

SEQ ID NO: 315447 - DNA, 122 bp, Homo sapiens
agtagggcagtgcaggttcttgtcttcaaagcataagagaatctgaaaatgagacccaagcgaaagtatagacattttattgtggagcaaaaccaacgacaccctcaagggaggagtgcagg

SEQ ID NO: 315448 - DNA, 122 bp, Homo sapiens
tattcaacattcactgagcgcttctgtatgccagacgcatgcaagccggctcgcacaaggcggagggtctcactcatatatcctcaggtgcaaatagctcacaaaacacccagacctacagc

SEQ ID NO: 315449 - DNA, 122 bp, Homo sapiens
accatgagtctggacttaatgtttaaaactctttgttttagggccatgcgtggtggctcacgtctataatcccagcactttgggaggcccaggcaggtggatcacctaaggtcaagggtttg

SEQ ID NO: 315450 - DNA, 122 bp, Homo sapiens
aataggactgagctggtaaattttttaatgcttaggatttggtgctgcttgtgagcttttcgacagcttactatgtgccagtcttgctggcagcctcgcagctgtgagaaacttggtgagtc

SEQ ID NO: 315451 - DNA, 122 bp, Homo sapiens
aagacagtgctttctcgttcacagaagaggcttttctagcggcacgaaagaatttggaagcggcagtgttacggtaaaaaaccgacaaggtgcctgatgaagaggatttttatttccactag

SEQ ID NO: 315452 - DNA, 122 bp, Homo sapiens
aggaaggaagaaatgtggtcgcggttggtgtggctgggccttcgggcccctctgggcgggcgccagggcttcacctccaaggcggatcctcaggtaaaggccagggccatctaggcgggtgg

SEQ ID NO: 315453 - DNA, 122 bp, Homo sapiens
ctcgtctcccacctcccgcaggtgcctggcaaacaccatgctgcgacgggtctgtggaaacggcgacggctcggctgagaacacgcccgcccgccacgcagccctcccggagcgggttctcc

SEQ ID NO: 315454 - DNA, 122 bp, Homo sapiens
ccacagtagaggttgagtccgattaccgcgtttcttttgaggccaaacattgccagtcgccgccgccgcctggctgagaaaactggggaagaccccgactccttactggaaggaagcggaag

SEQ ID NO: 315455 - DNA, 122 bp, Homo sapiens
agacccaagcagctcagtaaagtatgtctgggggtcaggggcaccccatctgggccagggcgctgctcaggcaggagagcaggggacgaaatccaagcgcagctggaatgctctggagacaa

SEQ ID NO: 315456 - DNA, 122 bp, Homo sapiens
ttgttcccaggcaataatcctctctctctgggtgactcttgggctctatctaggttcagacgaggacagtgaggagtacaggatccaattgggattccagtcccctccccacacccgtcaga

SEQ ID NO: 315457 - DNA, 122 bp, Homo sapiens
aggtcctggcctccttcacaccactccaggataccgcagcatctcccccagcgcagcagacggagggcgcttcacatgcccccggacctaagcccactctccccttcaagatctggactcca

SEQ ID NO: 315458 - DNA, 122 bp, Homo sapiens
acctctctctttggatctcctgcccctgggtccctgcttgccctgcattctccatactcacggagaatcaggacctccagaacagcccagcgtgggcttggtcaggaatgatccaggctctg

SEQ ID NO: 315459 - DNA, 122 bp, Homo sapiens
cctcggcctcccaaagtgctgggattacaggcgtgagccactgtgcctggcctgtaataccggttaacattggataagtatttaagaaaaaatctaccttgtggcaatttatgtataaataa

SEQ ID NO: 315460 - DNA, 122 bp, Homo sapiens
agaaatgtctggattctagagaaacttagaagttaaaactaatagtagattgtggggtagcgagagtgaggaaagagctgaggatcactatgtgcaactgcatggatggcagtggcagacac

SEQ ID NO: 315461 - DNA, 122 bp, Homo sapiens
gcacatgggaaaaagacagaacacaccccatttccgtgggtccctgggggaaggagcagccgtaattggggaagtttcagaacatggaaaccccttaatcttgcccaatgagggcattcatc

SEQ ID NO: 315462 - DNA, 122 bp, Homo sapiens
taaagtctttttgttggatcttgatatgttaacattgtttttattaccactgtcaccacacgtcacaacttgtttttcttttctttttacgttaacatatcttactagccgtctacttagta

SEQ ID NO: 315463 - DNA, 122 bp, Homo sapiens
gtgtgtgagggcccagggggccatggggatgagggtggagggggtgcaggggtctccagacgacttcagtatttgctgtgagtgacatggggcaccaggagtcatttgagcagggggtgacg

SEQ ID NO: 315464 - DNA, 122 bp, Homo sapiens
agaggagggggagcaggtgctgtttgtggtttcctactccatgcttctcgagttactgggcgcctacccctaatagggcacttgcacactgcgctaaaaacgccccattcgatcatttaaca

SEQ ID NO: 315465 - DNA, 122 bp, Homo sapiens
cactggggtcctctctggacctcgccgtgcttaccgtatggggggtggccctggaaacgtcggggatttgagccctacgtccgcctttgctaaggaggaaacgcttgagtttggtagccagg

SEQ ID NO: 315466 - DNA, 122 bp, Homo sapiens
cccctgccaaccacccggagccacccacccacccacccaccgctgtttgaagcagggactcggttctcaaagtgccggggtcagaggtcaccagaggctgctgaaatcagggttggagggct

SEQ ID NO: 315467 - DNA, 122 bp, Homo sapiens
atccacaaatcctaaaatatgcgtgccttaagtcggcacaaaatagattaatattctgcgcgtctgtaagattggctgcggctagaaactccttcccagacgattaaatccactaaataaaa

SEQ ID NO: 315468 - DNA, 122 bp, Homo sapiens
gccatactctcattgtccactaaagataagggccaggtgtggcttaggggcccgagctcccgggcttcttcactgcacagcaccacaggtgcggcatgggagtcccaccagcagccaaacca

SEQ ID NO: 315469 - DNA, 122 bp, Homo sapiens
actggagaggcgatcaagcataggttatggagcaccctgttctggcatctgtgtacttaacggttgagctggctggagtgggaggccagaagatgaaaggccttgaatgctatgctgaggag

SEQ ID NO: 315470 - DNA, 122 bp, Homo sapiens
gggacagggacagaggtagagggaccaaggcctggagccgctggcctatgcagatgcactcgcttgtccagcgacagtcgggcagggcctggcctgggcagtgtgctctggggtgcacggaa

SEQ ID NO: 315471 - DNA, 122 bp, Homo sapiens
ctgtgtgacagcacatcaatgagatcacagcagctctgctgttacaagacaaagacttggcggtactgagtgggtaatcacttgcagacacatacatacacgccctggtttcaatggcattt

SEQ ID NO: 315472 - DNA, 122 bp, Homo sapiens
cttagtctttgtcttttgtaacgttaacacttttgaataatttatgggcccgtcatctagcgatgtctacctcaaacgcaactcgtgctttttttgcatgaatactacattatgctgcgtcc

SEQ ID NO: 315473 - DNA, 122 bp, Homo sapiens
gtgcagtggccatctggcatgtcccagaggctcccggcctgggtggtgacaggttcccctcgcccctcatggcccacgctcaggatgggctggtcctgcatccttgggccccgtgtgaacgt

SEQ ID NO: 315474 - DNA, 122 bp, Homo sapiens
tactgtgaatctctcaaatcgtatcatgagttcctcagactgttgatgtactaattaatacgtaaactactgacactgaaaaggatactgatttgtttctgaatcatgacgtttcactgatt

SEQ ID NO: 315475 - DNA, 122 bp, Homo sapiens
ggcagcgcgcggtgcccgtgggtttcccggtggtgcggacctgcgggcgtgcggaagtaacgacctccttccccagtgcccatgcaaggaaattagtgttatgtgcttgctttttttttttt

SEQ ID NO: 315476 - DNA, 122 bp, Homo sapiens
agtgccattctagaggcagagaaagtgactcattgtaatctgatataggtgcttcagggacgtggggttaattctcttggtcctagttaaaagcatgggctctggagtcacatagagccaag

SEQ ID NO: 315477 - DNA, 122 bp, Homo sapiens
ggggggcggtggccgaggcgggcgggcgcgcgcgcgaggcttcccctcgtttggcggcggcggcggcttctttgtttcgtgaagagaagcgagacgcccattctgcccccggccccgcgcgg

SEQ ID NO: 315478 - DNA, 122 bp, Homo sapiens
tgctggcagccacgaggcctgaggcgcctcaggcgtatcgaggactttgaactttgaggacgcatgcgcgcgcgcggccgctgatcgcagccccgttgtgcccgcaacgcctcctgaagaac

SEQ ID NO: 315479 - DNA, 122 bp, Homo sapiens
agggaggtaatcaatcaagtgatcaacagggatatttatcatcgctatataggactacttcgccctgcacaggcggggtgggggtggggctgggggagcgagaggagggtggagacacgcgc

SEQ ID NO: 315480 - DNA, 122 bp, Homo sapiens
ggccagtgcgttgcccacgaaaccagtgagcagcatggtgatcgggaaggccacggacaccgatccgcaatcctcgccagaccctggagggcgcgtgaggttgccccgcgcctcggcggaac

SEQ ID NO: 315481 - DNA, 122 bp, Homo sapiens
gggggtgggaggttttgttattgtttttacctgacttttcggatgacatgcctgcggtctcgctgggacagggtccctgcagccggagtgggggtcctcggccggtgctggagtctgggtgc

SEQ ID NO: 315482 - DNA, 122 bp, Homo sapiens
tgttccctttgaacaaagcgctgtggaggcattatggggtgaccagagtggctcacagaccggtccctgaatggcctctgcctcttggtggctgtgtgaccttaactcaacttttggtgata

SEQ ID NO: 315483 - DNA, 122 bp, Homo sapiens
ttacctcctgctgtgcggcccggttcctaacaggccatggactcgtaccagttggtggcccggggattggggacccctgatatagaaaatttattatttacccctgatatagagaatttact

SEQ ID NO: 315484 - DNA, 122 bp, Homo sapiens
tggctgcgcgctcccgctctgcctcgcgattctccggaatcgtacctcttcgtgggctcgcgccagcgctgtgagcgcacaattagtttaaactatggccccgccccctcgcgctgccctct

SEQ ID NO: 315485 - DNA, 122 bp, Homo sapiens
gcaggtaagtgggtgaccagctggcatccctgtggctggagtcaccggcaatgctgcacccggccttcaagcgttccccaaaggcctctgtggagcccttcactgagcgctgagggataaag

SEQ ID NO: 315486 - DNA, 122 bp, Homo sapiens
ccccaccaggattaaagatcaggggtccgctgagccctaggaagcagtgacagacacctgcgccaaggcggagcgagaagagcctggaatggctccgggctttgcgtcacgcagctccgccc

SEQ ID NO: 315487 - DNA, 122 bp, Homo sapiens
cctcaggggactcggaatcagaaccttggtctgagggaagcagacaccatcagcagagtacggagctccaggctctgccagatctcaaagtgagaaccttgagggatgactgaaccgctcct

SEQ ID NO: 315488 - DNA, 122 bp, Homo sapiens
tttgtcagtttcctttttaagtgcatactgaggtttatcttcaaaacattctcatcttttcggcttacagtaagacttttttttttttctaaccaaaatgtgtctgcctttcattaagataa

SEQ ID NO: 315489 - DNA, 122 bp, Homo sapiens
tttatactgtcctgatggagagcagggaggaaccctgcccctcggagagggggagccggccgcccgtgccccagccaatcagagctgcctggcccggcccccaatttgggagttggaatgga

SEQ ID NO: 315490 - DNA, 122 bp, Homo sapiens
atccttcatcgacttcatgactagagagacggctgacaccgacactgccgagcaggtcatcgcctccttccggatcctggcttctgataaggtctgcattgacagatttccttctgctttag

SEQ ID NO: 315491 - DNA, 122 bp, Homo sapiens
ccctcttagggccccacagcctgacatgctgtagggcctgagaagcggcgtcgtggaggacgagatgtgtgagggcagcaaagagtgctatgtgtccagcagagggccctgcccggcctgtg

SEQ ID NO: 315492 - DNA, 122 bp, Homo sapiens
gattgcagacggagtctggttcactcagtgctcaatgctgcccaggctgcagtgcagtggcgtgatctcggctcgctacaacctccacctcccagccgcctgccttggcctcccaaagtgcc

SEQ ID NO: 315493 - DNA, 122 bp, Homo sapiens
tggggcctggactggatactgttggctgctcccagcctctcatcacctccttaccccgttcggtagttctcagctccaggctggggctccagtcgctccagtggccaggcaggggccagcgg

SEQ ID NO: 315494 - DNA, 122 bp, Homo sapiens
agactggccttttgagatagcttttctgtttgttttgcatgtctgacactcatggctccccgtggatcgccagcgcccccactcttgtggccccacccagaagcaatttagtcctcaggaag

SEQ ID NO: 315495 - DNA, 122 bp, Homo sapiens
ggtgatccacctgcctcagcctcccaaagtgctgggattacaggtgtgagccactgcacccggcctggcaaaataaactttctaaattaactgagacctgtctcagatgtttggggttcaca

SEQ ID NO: 315496 - DNA, 122 bp, Homo sapiens
ccaatgcaagggctcagaagccgccagtccagcggctccacaggcccactccctccctcgcgcgggacccaggcgtcccggccccagcacccgcgctcctcccagcctctcgaggttctcgg

SEQ ID NO: 315497 - DNA, 122 bp, Homo sapiens
atcgcctccccagtagctgagaatacgctgagtttttatggtttcacattcagactaagccgcccgcgaccttgtaggtaaagatgaatccgaatgggtcggcgcgcctgtttcctagggta

SEQ ID NO: 315498 - DNA, 122 bp, Homo sapiens
gggctcgatcccgctccgcccccggccgccgctgcctgcaaagtcccggccacttttacgcgccaaatcctttttgccgcgaaagagccacgagccgccgagcgccgccacaattggctgcc

SEQ ID NO: 315499 - DNA, 122 bp, Homo sapiens
ccacaggaggaaggctggcagagaggattcattccgtattcattcccctagtgagccacacgcttcggaaggatcacattaaagagatgaatcacacactgactcaaagagagggggtggca

SEQ ID NO: 315500 - DNA, 122 bp, Homo sapiens
attgtacattgagtttgtggcagagttgacgctcaaactcgagccctctgctctttccaccgcacacgcagacctctcacctgggcccttctagaccctctctgcaattattttttcccctc

SEQ ID NO: 315501 - DNA, 122 bp, Homo sapiens
ctgtgcaccggggctgtgctgtgggctttgtgctgagccaaaggtggggcttctcctgtccgcccggtcctggactcccggcagcggccggcagaggcggtgctgatgctgtaggagggtca

SEQ ID NO: 315502 - DNA, 122 bp, Homo sapiens
ccaagaaggacagtcatcacgttttaaagctccaaaataatccccttagacttcatgtcccgcaccctggtatgatgggtgggctcccaaggccttgggcagacccacccctgtggctttgc

SEQ ID NO: 315503 - DNA, 122 bp, Homo sapiens
atctaacagggtgcccgtttgcacacacgtgggagcgtacggtgagcaggtcctagacttcggctggcccactggtctcaggagaagggcccgacgctcctgctgcggttgcagtcgccccc

SEQ ID NO: 315504 - DNA, 122 bp, Homo sapiens
cttgtgcaggagtccaggacgtagccgaggagtcctccaatgtcagagtccagggctctgcggggccgggttcccccatgccagagtgtagggcgcgttcaggtgagggtcttggcgtgcag

SEQ ID NO: 315505 - DNA, 122 bp, Homo sapiens
cacagcctcaccctatcagggcagcgagggctggggcggacaggggagccgtagacagcccgtccctgggtgggcctggccttcccggccctgactcagcgtgaaggggcagacagggcgcg

SEQ ID NO: 315506 - DNA, 122 bp, Homo sapiens
cttgccatctctcaggggaagcccaccctgcgcctgtacctggggggtagaccaaggccacgtggtcgccgtcctgaaggtggcccctctccatcagcatcacggcgatcttctcagctctc

SEQ ID NO: 315507 - DNA, 122 bp, Homo sapiens
ttatatcttcatcacatctgttccacagcatgatgaatcagtaagtgtaggggcagggtccggctgtctcttctagggtcaccatgagcaagtcccttttccttctgaacatcatcattcac

SEQ ID NO: 315508 - DNA, 122 bp, Homo sapiens
ctgtaaaaagaggtacgcggggtcctccgtcttagtcctcaggttaagtggctttgtacgcgccacacggcgtttcctacttgttgcaacatgccccagggagggattctttccattctgtg

SEQ ID NO: 315509 - DNA, 122 bp, Homo sapiens
aattagctatttgggtacggaaacggatgtattaaagtataaaaattgaaacccaccaaacgtgtatcaagtaggggaaaatctgcctgcgcccctagtgcccaaaacacttaaccctgaag

SEQ ID NO: 315510 - DNA, 122 bp, Homo sapiens
tgaccccacctgctggggcaagaagcctgcatagcacagctaaacagccatgtgggacaacggctgagcaatgacagtggaacccagtgtcccatgcaaagtgctcaagaagtggacgggat

SEQ ID NO: 315511 - DNA, 122 bp, Homo sapiens
cagtaagcaagggctcgtaatccataaagcacctccttgcctaatcctggcaagcattaccgggagcgggaatggcagtgccaccaggaccccgagactccgagccatgggggctgcagcac

SEQ ID NO: 315512 - DNA, 122 bp, Homo sapiens
cgtaggcagctgcacacaccagggctgagtcccagcacacgtgttctacctgtgtgactccgagccttacttttctcatctgtacacagtctctgtctcaaggctattggaatgagtcaatg

SEQ ID NO: 315513 - DNA, 122 bp, Homo sapiens
ccccgtctccacgcctcctgcggtcaccgcacaccccttcttcccaggccgtcagctccccgtgggcatgtgtccctgccggcacccatgctgcaactgccggacaggccctccctgcggca

SEQ ID NO: 315514 - DNA, 122 bp, Homo sapiens
tggaaagaatgttgttacacagaccttcctattgctaataacagtgtagatgatgatgatcgtggtggtggtaataatgtcacttattataagctggatcccattccaagtgctttattttg

SEQ ID NO: 315515 - DNA, 122 bp, Homo sapiens
cagacagagctggagatggcagacctgaacttctttaccctgaagtacaaacatgtcgaacgggagcaaaaggtaagcaactctggttttcggcttccctggtgctgcttgcgaaggcgctg

SEQ ID NO: 315516 - DNA, 122 bp, Homo sapiens
ggaatctgactccctcctggggtctcaaggacgccttggccgggcgatgggcctcccccacgcattgtgtccaggaggttctgttcagagcgtgtgcttcgaagctcacgctgaggctaagg

SEQ ID NO: 315517 - DNA, 122 bp, Homo sapiens
aaaagggccttgtagcagcaaaacatgaaactattagtggggagtgttactattaagcaacgaagttaccatcatctccagatctgtgcaaaactgagttagctggaggggaagaggtccag

SEQ ID NO: 315518 - DNA, 122 bp, Homo sapiens
ttcccctcccccaccggggcgggacttcccgccgacttctttcaggttctcagttcggtccgccaactgtcgtataaaggcgctgcctcaggccagaggcctcacaaagcgttgggtgagac

SEQ ID NO: 315519 - DNA, 122 bp, Homo sapiens
catgtctccctctctcctctaccttggcttgctccctgcacacggcccaaaccctgacagcgagtgtgaacttgtgtgcatgcagaagcaggcagcttgactctgtgggaatgggagaaggc

SEQ ID NO: 315520 - DNA, 122 bp, Homo sapiens
cgggtgttagggtttttgggctctttccgggacccaagttccagggcaagaaggtctgctcggcggcccgcctcggggccccgcccactttggccagggtcggagccgcccggagcgggagc

SEQ ID NO: 315521 - DNA, 122 bp, Homo sapiens
tcgatggggaggcggctcaacctttttccttctcaggcagaagcccctgagtaaggccgccgctgccacccactgcccctgaaaggacatctgagcacagtgattccggtggtgccaggact

SEQ ID NO: 315522 - DNA, 122 bp, Homo sapiens
cgaactgcagcccagggctactgggtgtgatcggcgttcctcggaccccgctggggtcatcgcctcctcccctcttctcctactcagccctagaaaagctggaggggaagctgggcacggtg

SEQ ID NO: 315523 - DNA, 122 bp, Homo sapiens
tctgcttcactttctcctactgctcaagggggtgttacactttgacgactgactaaacctcgagggccagaaacaaaccaaagcaaaattctgcctccaaggtgagtaatggaggggcggat

SEQ ID NO: 315524 - DNA, 122 bp, Homo sapiens
cgccctctccgctcgtgattggccctaagttccgggccccagtttcattggatgagcggtcgggggaccgggccaggtgactaagtttccgcggcgccttctccccggccactgcttgagcc

SEQ ID NO: 315525 - DNA, 122 bp, Homo sapiens
tgatcggattaagaaacttttatttcacttttctagaactaccaactgttggaaaaaatgcgtgactaattggtccttactgtctaatagggataggagatcgcttaatcaaccaatacaca

SEQ ID NO: 315526 - DNA, 122 bp, Homo sapiens
agtgtggccccatcaaagactggagcgacgttcactgaaatgatacaagaccagcaggggcgcagggcgctgcggccctcagaatgcggtgacagcgccgcctcgcgtcccttccccgacct

SEQ ID NO: 315527 - DNA, 122 bp, Homo sapiens
ccctgaggcattgacgagcagagctcccgttttgcagaggacagtggctttgatccacaacggtgtccccaaggctgtcacaactccgagggcacatgcaaaactgaacactccggccatgc

SEQ ID NO: 315528 - DNA, 122 bp, Homo sapiens
gataactcatcagccacattcttctctgctgagtcaaagaccccgagcctgggcggtgaacgcttgtgattttaggggccgtgcagctgaggggagcagagtaagagggttaaaaacgcagc

SEQ ID NO: 315529 - DNA, 122 bp, Homo sapiens
agatgtcatcctgtgcccatgagcctactctgggggtctggggggcagcaatggcggctgcgtggtaacggtgggcaccacctgcggctggctttgccgtgtttgtgcacgctgtcttcggg

SEQ ID NO: 315530 - DNA, 122 bp, Homo sapiens
agcggcgggttgaagggctcctcaaggtggccagaatggaagcccaggaagcactgagagcgagcacgggtcaccagcacgttgtcacctctcagtctcatactaaatttgttttcactgag

SEQ ID NO: 315531 - DNA, 122 bp, Homo sapiens
tggctggcgacttcgtgaagaaggccaccgccttcctgcagaggccttctcgggccggctcgctgggccccgagacacccagcagggtgggcatgaaggtccccacgatcagcgtgacctcc

SEQ ID NO: 315532 - DNA, 122 bp, Homo sapiens
ccctgggctgactcctcaggctatgatgtgggcacacaggcagccctggctcctgtgccgcggatcctcagttcagacttgggaatgaacacttcaaagccagtacaagagccatctctgta

SEQ ID NO: 315533 - DNA, 122 bp, Homo sapiens
tagaggcttcggaggtaaaggggctaagactcatgccacctgtgttcttggtcattaggccgcattccttaggacataggcatttggtgagatcgatgcatgtttgccaaagctgttaaggc

SEQ ID NO: 315534 - DNA, 122 bp, Homo sapiens
tgaagaccacgtgtgccttgctggggtcccattcagacaagtcccgggtcgttcgctcatcgccctccacgcgaccagggggcgcccgcggtatcggcccggctagttcgcaggcgtgcgcc

SEQ ID NO: 315535 - DNA, 122 bp, Homo sapiens
tgcccaggctccaggagggccatctcttcctcaccgacatggaagggccatggcctcgtgcgctttcactctctttccatttccccgcagcctgagtcaccctcaaggaggtaactccctgt

SEQ ID NO: 315536 - DNA, 122 bp, Homo sapiens
ttctgggtttcaggttttctcagtcagaatcctgaacttagaaaacagatctgtcttggccgagcctttaaacatctctgcaactcttcaactccttcaaatattgtatttgttgctcagtt

SEQ ID NO: 315537 - DNA, 122 bp, Homo sapiens
tcccacctatgtgagcccatgcttgctagggaaagcccctcatttatacttcccgttgaccgaataccctcagtcatgtctcagtgtccagagccctttcttcaaccctctgagagccaggg

SEQ ID NO: 315538 - DNA, 122 bp, Homo sapiens
caggcacggccctcccctccccacacaggcagccggagacaccggccctgcagggggggtcgctgccctccccacgctcctgcgcccagcgctctgcagtgggccctcgacggcctccacgg

SEQ ID NO: 315539 - DNA, 122 bp, Homo sapiens
ctgctgctttaacaaattgcctataaattttacttgaattaaacctattccttgtacattcgtagtaaggttaggttaataatacatgaggtttcattacatgcaccttccttaataatgtt

SEQ ID NO: 315540 - DNA, 122 bp, Homo sapiens
cgggctggtggatgctgcctctccgcctccagtgtgctctttggctgagggactggtgggcgctggaaatattagaggcgccggtgcctgtgatgtcgccgcctctgtgacgtccccgccgc

SEQ ID NO: 315541 - DNA, 122 bp, Homo sapiens
ttcttccctccgcccctctccctcgcctccttttctttggaggcaggccgggcttccctgcgcctttgctaccctctggtggccaacaggagaaggacagaccaagaaggagggcacggaag

SEQ ID NO: 315542 - DNA, 122 bp, Homo sapiens
cttcctgcggcgaaggaggctcatctattataaatgcacattcggggctgacatcagcgacgagcggcgggcgagcgccgacgagcggtccctgcgcgctgcccgcccggagcgcagccccc

SEQ ID NO: 315543 - DNA, 122 bp, Homo sapiens
ctggctcagggacaagaccaagtgtctggacagtgatctggcgctctgagggggtgccctcgtccaccctgggagacccggtaggcagggggccgtcctcacagagcctcggactgcacttc

SEQ ID NO: 315544 - DNA, 122 bp, Homo sapiens
acccaattcctgcccacattagccatcctgtttcacttaagtgggggaagaaccttgaagcggttgtgaagttcacactccaggggcataagctcactaaaatactgaggtctactcacagg

SEQ ID NO: 315545 - DNA, 122 bp, Homo sapiens
tgctgaacagcagttttgaggatgaccccttcttctcgtgagttacgggagccaggagtccggggtcgcgcgggaattaaggtatcgaggggagctattttaagggaaaagagcgagtttta

SEQ ID NO: 315546 - DNA, 122 bp, Homo sapiens
agggtaggctgtgggcggcggcggggcgcggaggggtagccaggagcgcaggctgggctccgcacctccctgccccaaaacccattgatgcagcggccactgcggctgccgagcggcgtctt

SEQ ID NO: 315547 - DNA, 122 bp, Homo sapiens
ctgcgagcaggcagagggcgcctggagcttgggccctcaggcggcggagcatggcctgggcggcctctggatcgcgagtgcacctggcctgagagcctgccaggccctgcccccgctcggct

SEQ ID NO: 315548 - DNA, 122 bp, Homo sapiens
gcctaattttagttcagccttgagaagggggaattgttttcctcaccatatgcatagcaccgcaacagcagcaaagcaggtggggctttgccaagcacttgtttactttcttgtttttttat

SEQ ID NO: 315549 - DNA, 122 bp, Homo sapiens
cgggtgtgcgcatgcacatcgctggctgtgcgcggtcttgcagcgtgcttaggcaaacctcgcccccacctgggtccggggcctcagcatggtgaaactgatgctgtgcgaacacgtgtttg

SEQ ID NO: 315550 - DNA, 122 bp, Homo sapiens
cagtaggacgggcagggcggaggctcactaaggcaggggcctccacaggaggcaaaggctcggtccatctctccaaagggagccgagggtcaggagtgcttgataaggcaaagagaggccag

SEQ ID NO: 315551 - DNA, 122 bp, Homo sapiens
acaacactagggttgttgcgtcacttccactgccgtacagagttccacggcgagctgggccgggctttatgaaagcagttctctcagatgtccagggatgccacgccacatgaatcaccaag

SEQ ID NO: 315552 - DNA, 122 bp, Homo sapiens
ctcccaggccttggtgcctcgtggatctatgcgtgtgacagtgaaaataaattaaaacgccgtgagacggaacctaagaagaactgcctgcgccggggcgggcgggttggccgtggccgcgc

SEQ ID NO: 315553 - DNA, 122 bp, Homo sapiens
gccaccgtgcccggccctctacactgtttttatagcaagacttgagaagcaggccaggcacgtggctcacacctgtaatcccagtgctttgggaggccaaagcaggtagattgtttgagccc

SEQ ID NO: 315554 - DNA, 122 bp, Homo sapiens
gtccggcgggtcgccgccctgggcaccctcgcgacggaagggccggggtggggacaccgacgagcgcttttcatctcgtcccagttactttgaaaccgaaagcgcctgctggcgtccggccg

SEQ ID NO: 315555 - DNA, 122 bp, Homo sapiens
tcccgtctaactggtagacagtttctgcctcttcttgtttggggattggagagggaagtgcgtctggatgactactaaggtaaatatggaatgggcaccgcgtcttccctttcttctctccc

SEQ ID NO: 315556 - DNA, 122 bp, Homo sapiens
cccctcacacaccctgagatgggagccagggattccacgtcccccttcccccacccggtccggcgcagggcctgttgaaaaggcactagcttccaggggaggaccccagcctcctctatggc

SEQ ID NO: 315557 - DNA, 122 bp, Homo sapiens
accaggcagccttatcttaggtgagaccgtttcggcttggaaacaaacaaagctctctctcgatgaactgggttcatttcatatttgtgtaataccctggaagaaattaggtttcaataaag

SEQ ID NO: 315558 - DNA, 122 bp, Homo sapiens
ccgtgccccggaacgggccagcgtccgagcgcatgcgcaacagctcccgtttcctctgcgcgtccgagtgtttcatgttttgagtcccgcccgagtgacccaagccagtaccggggtgggcg

SEQ ID NO: 315559 - DNA, 122 bp, Homo sapiens
aggattgctttagaggctcttgctgggttgtttattattgttttcagcatttttgccatacgccctgaaatagcatcaactcctgggtagacttcaggatcattcagttttgtaggcattct

SEQ ID NO: 315560 - DNA, 122 bp, Homo sapiens
gggaggacagcacctgccggccacttgcgggtgagctacagacatgaaagccaaaggctgcgcttttctttggtttttcaatagatggcatttttatcatgctagaaagactaacatgaatt

SEQ ID NO: 315561 - DNA, 122 bp, Homo sapiens
gtggatttcatcttgatatgaaaggtctggaatgcatggtacattaaactttgaggacagcgctttccaagcactctgaggagcagccctagagaaggaggagctgcagggactccgggggc

SEQ ID NO: 315562 - DNA, 122 bp, Homo sapiens
cggcgcgcggcccagggaagcagaggcgcgggctggtgacctcggggtttcgcggggcagcgaacccggcaagctgactggccggcgaggcggggacgcggggaaggagggaagggtggcag

SEQ ID NO: 315563 - DNA, 122 bp, Homo sapiens
tgggagagccgataacgcttaacccccagctcactctcaccaatcgctataaagattgtccggatgtgatttaatgagcagtttatctaaccaattgtcatggatctgatatccggccctta

SEQ ID NO: 315564 - DNA, 122 bp, Homo sapiens
aaggccaatgagcgcgtggagctctttctcttacagcaccccctggagataaagttaagccgtacgtggctgaatggggaaaagcatgcttttctatttaatgaataacgcattgaggaaga

SEQ ID NO: 315565 - DNA, 122 bp, Homo sapiens
ctcttgccatgtttaaacaaaccccaagaatgactgggtaacaccctgagaattggcactcggtggtacgccaacagcttggctatccggaacgcttctgtctgactgcttttccaaattca

SEQ ID NO: 315566 - DNA, 122 bp, Homo sapiens
cagctcaggagggcactggccagtacgcgcagggccagctcaggagggcactggccagcacgtgccacctgctgctacggccagggcggtgcctggatgcccatcagacgctgcccacagct

SEQ ID NO: 315567 - DNA, 122 bp, Homo sapiens
gctgcaacccccgactctccaggctggtccacacagagggatgtttatcgagaacagtggcgggaaatcttctgcctgggaaccccatgcgacctgcgtgagccgctctgagaaggcaaccc

SEQ ID NO: 315568 - DNA, 122 bp, Homo sapiens
ctcctttttctcgccatggaaaattgggagatggtgatcacctgaccaactcccctatcccgcgacgccccctcccgcccccctgcacctaccctgctgggcctccaccggggagaggagca

SEQ ID NO: 315569 - DNA, 122 bp, Homo sapiens
agccctggggatggggccaacagccttggttttaacagccctccaggtgactctgacgctcgctgaagtctgaagtttgagaaccgctggtccagactacagcagtgtttctcagacttcaa

SEQ ID NO: 315570 - DNA, 122 bp, Homo sapiens
agcaatccaacttttatttattgaacttctcctcatacaaggccttgggctgggtgttgacggatgggaaggttccactttctctactcagagaattcattgcgcccagctctgtgccaatt

SEQ ID NO: 315571 - DNA, 122 bp, Homo sapiens
gcagggttgggtggcattaggagtggtggctggctttactttggtaaacgtgtcctaggccgtatgtgatcctagaccttatcttacctccatgatgactgagacccagctggaagctctgg

SEQ ID NO: 315572 - DNA, 122 bp, Homo sapiens
gcccccgcccccagggccagctctcgggaggggcaccagctcgggctggcgggaaaagcccgggcactccccgcgaggggagccgaagaggagaggggaggcggctcccagaggggcacaga

SEQ ID NO: 315573 - DNA, 122 bp, Homo sapiens
aagtctaagaaagactcttgtcagctttacaacatgggaatgctttacgggtctgggagccgtctctttgatataaaaacatcaaggaagacagcgtccctacttcctggtcatcatgagag

SEQ ID NO: 315574 - DNA, 122 bp, Homo sapiens
gcattaggggaagtttgcatctgtaggccattttggaggagtgacctagtgactgcaaaacgcttagaacagtgcctagcacgtaataaacactcagcaaatgtggctgctgttataattac

SEQ ID NO: 315575 - DNA, 122 bp, Homo sapiens
ttcattttctctctggcagggtgattgacaccgtatcacatttcccctgcagccagagcgcgcgttctattatatcatcaattacatacggacacacatctgggttcttgggttcttgcagc

SEQ ID NO: 315576 - DNA, 122 bp, Homo sapiens
gctccgccatccaggacaactgctctgccaacgaggtcccgcgagaatcgagagatctcgcgatacaaacccactcgcatctcgcgagcttccactagacccaacatggcggtacagaaaaa

SEQ ID NO: 315577 - DNA, 122 bp, Homo sapiens
cactcgggagaaggtgtggagctgagggcacagggagggacgcatcaccagaatgagcctcgtggatggagggtgcgggggactggccttgtgcctgcaaactgccgggctggctaatgacc

SEQ ID NO: 315578 - DNA, 122 bp, Homo sapiens
gcagagctatgcttttcatgacccctttctggaaccaatttcatggttacaaattatgcacgaacatctccagttggtttcctacattaaaaatactgcctcagttttaaattttacctgaa

SEQ ID NO: 315579 - DNA, 122 bp, Homo sapiens
ttctttaaggtaattttctgagtgattcttttgctaaccgagcaagaaaagcagttttcccgcattgaattagttataccatatttgtgacagctgaagaaatatattcaaatagcctcttt

SEQ ID NO: 315580 - DNA, 122 bp, Homo sapiens
atttctcagccggccgacacttaaggaaaataaaaagaacctacgttgaaatattgggggcggattcccctgatagatttttgtgaaaaaatcatcttggttgtatgtctgtagttaacgaa

SEQ ID NO: 315581 - DNA, 122 bp, Homo sapiens
cagtcgccctctggtggtagtctcagggatgtcacagctgtgggttggtctttagaatcacggcaacctatagaaaggagagttccaactccttcgtagtgaccaaggtcaacaaactttct

SEQ ID NO: 315582 - DNA, 122 bp, Homo sapiens
accaaaacaaagaaataaacaaaacaaccaatgtcaaatcaagatccggttctcgggcctcgagtttgtaaagatccagaaagccaccccagcagacggcggttggtctgccagcttcccgc

SEQ ID NO: 315583 - DNA, 122 bp, Homo sapiens
ctagctaggggtagagatattcacgtgctgatttcctacactgaacagctttgtaacccccgcagagtgaaggcgcactgtgtttctgagtctctattatgtcagatgaatgccacagttag

SEQ ID NO: 315584 - DNA, 122 bp, Homo sapiens
gagtgtggtcctggtgtgttggattggcttaaatgtaactctgcaggtacctatttagcacgtctcatgttcccggcactgtgctagcttctaaaaatacaagatgaatagccaatactcag

SEQ ID NO: 315585 - DNA, 122 bp, Homo sapiens
aacaaaggcaaaaacgcggacgttggttatgaagggtgtggtctccctggtggagtacgtcggtgggttgggatggggagcggctggacagaccggtctcactccgtttggtgccactccac

SEQ ID NO: 315586 - DNA, 122 bp, Homo sapiens
ccagcatggtggcaaatgcctgtgatccgccttagattacagcactttggcaggccaaggcgagcaaatcagtttgagctcaggaattcgagaacaacctggccaacatggtgaaagtctgt

SEQ ID NO: 315587 - DNA, 122 bp, Homo sapiens
ccgctctccactaaccatcctccctctaactgccgtctacaattgggtgctcgccgccatcgcttttgcagtcaggcgttggattgggtgacgctcctgtcctcaacttttcctcttcgtcc

SEQ ID NO: 315588 - DNA, 122 bp, Homo sapiens
agacgccggctctgggaccctcgccgggtcctcgtcccgcagcctcttctcggcctcccgcgatcctgcctgcgccctctgcccaggactcgtctctcacgtcggctccccgccagtctcgg

SEQ ID NO: 315589 - DNA, 122 bp, Homo sapiens
ctcagaggggctgcccattcggcgtctctaggacgctgttgcccgagagacgacggcagtcgctgactggagaatgagcctacgcgcctggcaagaagctgagctgtgattggtcaattgga

SEQ ID NO: 315590 - DNA, 122 bp, Homo sapiens
aagaaagaatgactcagtccaaaatgccaaagtggagaaacctattctaagttagccctgcgaaaaccgggaagcaaaccaggagcaagtcctgcctggccctatccagtcatggagtctcc

SEQ ID NO: 315591 - DNA, 122 bp, Homo sapiens
agctcttgtccgcactggtacacctgcgtgcacgcgtgggtacacagcaggcccgagcttcgcgcttgtgccgctcatattctacccctaagaacttcgcttgaactctgacctgcccttat

SEQ ID NO: 315592 - DNA, 122 bp, Homo sapiens
ctgtagtgacctagagcagacaggcacccagtaatgtcaggagtggaaatatcatccgaacgtagttggaattactgaatgtcatcacccagtccagaattctcatttcacagatgtgaaaa

SEQ ID NO: 315593 - DNA, 122 bp, Homo sapiens
agtcgtccccaggcagggtatcacaatgaaagaggcaaaagtgtctgaaaaacactgtgacgcatatttccagcccggcatggaggacgtctgccaaaagcatccggtaaaggtcaactggg

SEQ ID NO: 315594 - DNA, 122 bp, Homo sapiens
gactcacttccgggaaggggcggaagaggtgggctggtggaggcggggtcgagatggcggcgcctttgaggattcagagcgactgggcgcaagccctcaggtgaatccaggcccagaacaga

SEQ ID NO: 315595 - DNA, 122 bp, Homo sapiens
cgaagcctccccccagtgcccccagcactcgccagaaccagtagcccaggaagcaggtgccgctggccaccaggagcccaagtaccctccccgcaccagtcacacagagacccgctgccagg

SEQ ID NO: 315596 - DNA, 122 bp, Homo sapiens
cgcagccgctggtctgggtgctaagcccctcattgcccggggcctgcagggccggccggccgctctgagtgccgcccgccaagcccacgcccatccggaactccagctgtcccgcaagcgcg

SEQ ID NO: 315597 - DNA, 122 bp, Homo sapiens
ctagatccaacaacaagatataccttctgaaagaagtacacagtaataccgagaacaggtcgtatttcaaggtgatgaaatacacagagagaacatccaatatggttacactgagtctgact

SEQ ID NO: 315598 - DNA, 122 bp, Homo sapiens
gcatttgtctagctgggcgggaggcggcggagcgggaagtgccacagattgaggggcgcacggcggtggagggaggggcgcccagtggagagggggctcacggtgacagaggaagtggcgcc

SEQ ID NO: 315599 - DNA, 122 bp, Homo sapiens
cctccaaccctccccactcctgctctccgggggttggcggagaagcttccaagggctgtgcgcaaaggcaggaagtccaagatccttttaatgagtttactcagcctttggaatatcaagta

SEQ ID NO: 315600 - DNA, 122 bp, Homo sapiens
gtgtaggaataaaacgaggctttggaggttatctgtgggtttattttttcctgactgtagcgtgttaactggtccattaaaatctttaaaaagctttccacactgctatccctgttttttgt

SEQ ID NO: 315601 - DNA, 122 bp, Homo sapiens
cgctgagctacggtatgtttgaaaacaagcggaacgccgtccacgtgaaggggcccttctcggtggaggccgacccatccaggtaaggaaaccccggcccagatgggcttgcgtagggtggc

SEQ ID NO: 315602 - DNA, 122 bp, Homo sapiens
tggtggcctgctccctggcagccctggcccgggcttgctccagtaagatctgcaagaggccgatggggacatccagcgataggacaatgcgcgagccagggtggcgggtggggctgcagtgg

SEQ ID NO: 315603 - DNA, 122 bp, Homo sapiens
acatacactagctctaacctgccttggatacaattaagtctcctcaacacactattttatcgccaaacttacattctggcttttataatcattttgcaacacctggtacagtatacacctat

SEQ ID NO: 315604 - DNA, 122 bp, Homo sapiens
cagggtggtatgtgtattcagatctgtctcctggcccaggcccctgtggagctgcacaggcgtgtgtgtgtgtgtgtgtgtgtgtgtgagagagagagagagagagacaccctcgtgggcct

SEQ ID NO: 315605 - DNA, 122 bp, Homo sapiens
tcctgagtccttggggaagcacacgcaccatccacttagcactggagcctggctgttctccgggcactcctaccccatcttcctggcggggcttagatgctcctgcctcttccaccagctcc

SEQ ID NO: 315606 - DNA, 122 bp, Homo sapiens
agcgtggtgggcgggtcccgggcacctgtggtttggtgagtcctccaggtaactgtgatgcgggggtcagcgggagaggcacccggaagctcccggcgtctgcaccccggcagcgcgaggaa

SEQ ID NO: 315607 - DNA, 122 bp, Homo sapiens
ggacggggccagaggcccgagttccagggagttgctgattccagtggagaaccgagacaccgcgtcctttctaattaataagcacgccaccccctacctccaacccccccccccgccccgcc

SEQ ID NO: 315608 - DNA, 122 bp, Homo sapiens
gaagggaattcctgtaagagtggcactgcgttgtcgccctctggtccccaaagagattagcgagggctgccagatgtgcctttccttcgtgcccggggagactcaggtggtggttggtactg

SEQ ID NO: 315609 - DNA, 122 bp, Homo sapiens
tcgcgagctcaggggcggagtcgtggccctcccgtcccggctccctcggtaggctgcctgcgcccccaaagccgcgcccacggcccgcccacccgccgcctgcccctcccctccccggtccg

SEQ ID NO: 315610 - DNA, 122 bp, Homo sapiens
gtgcccagggcagcgggacagacctgagcctgcccatgagaacttgagtgtgcaaacctgcgcacaggtgtgagaacagactccagggcgagtgtttaaggagaagacacagacacacataa

SEQ ID NO: 315611 - DNA, 122 bp, Homo sapiens
tctcaagcgatttacagctcggtgcttaactcggtcaccggccgaggggcagccctctggcgccaaagccccgcctctctatgacgtcacacgaggagccctgaagtggcggtcaagcttga

SEQ ID NO: 315612 - DNA, 122 bp, Homo sapiens
gctggttgacggccgggactccattttgttcgccgttactctgcgcgtaagtcgcttgtccgtggcttctctgagaagaaaagttgaaaaagggtaaaagttttcaggaatattcgggctct

SEQ ID NO: 315613 - DNA, 122 bp, Homo sapiens
gattgtcctcggcgttctagtgaggatcagcgcccctgaggaattctggtagaaatatgccgtcttgctagacaacttctgaacagcaattttaaaaatctatggaaataaaactcaccctt

SEQ ID NO: 315614 - DNA, 122 bp, Homo sapiens
tgccttccacacctttctgcccacctatgactcctaacacctcaccccaccagtgacttacgtgcctgtagaatctactgccacagcccggaccccaccacgatgacagagaatctttgcca

SEQ ID NO: 315615 - DNA, 122 bp, Homo sapiens
tatacacttcactcatagaacgcctttaccatgagactacacactgtaagcaattcaagccgggtgatctggctgtaaacccacatcagaccagaagctaaaatcctagaaagaatcaatag

SEQ ID NO: 315616 - DNA, 122 bp, Homo sapiens
cttaacctggggtccaggaacccactttcctatgacactgcgtgaagaagtgatgttacacgcacacatgacttcactacaggacattggatattaatattcatcagatcagctagaggccc

SEQ ID NO: 315617 - DNA, 122 bp, Homo sapiens
ttttttttttttacattgaacagacaggatctctgtcctttccgtttaaacaggctggaccggttcaagttcccagccagaccaggggtgggggtggcgagtgtgcgcgcgcggaggagggc

SEQ ID NO: 315618 - DNA, 122 bp, Homo sapiens
cattggccctacatgcattttttgcatggatatccagaaacatctgcccacacaaaactgcggggaaaaaaaatgaacactgaaatagttatttgctgttgcttccaacttgtagtgccagt

SEQ ID NO: 315619 - DNA, 122 bp, Homo sapiens
catgcgcacacgcacacgccgcccgcccaccaggcagacacccacacacctgtgcacgcacgcgcacgccaagccagcgggccctgcccctgccccggagccctcagtgtcagaaccaggct

SEQ ID NO: 315620 - DNA, 122 bp, Homo sapiens
ggcagtgagtatggctgtggcaggatgtctttctctctctcttccttgagtgtgttggagcgggtgaagggaaaacgggtccaccaccctctcccctccctgctcgctccagcccgggaggg

SEQ ID NO: 315621 - DNA, 122 bp, Homo sapiens
ttttctcttataagtgcagaacgtgaggaggtaagaagtttataaatgaatattaattaccgttggtcacagctcatcagcaccatagtggatctgttatatagatgtcaattaacaagaga

SEQ ID NO: 315622 - DNA, 122 bp, Homo sapiens
aattctggttactgtgagtagtttaagatgctataatgcttttccactataaggtgaattcggtgtggaactcattgcttattgctgcacacttgcctagttttagagtaacaatacattat

SEQ ID NO: 315623 - DNA, 122 bp, Homo sapiens
cgtgaccgccgccatcctgatggccaggtcctctctcagggagctgcagaacgcacccgacgccatccctgagagcggcgtggagcccccagccctggacacggcctgggtggaggccacgc

SEQ ID NO: 315624 - DNA, 122 bp, Homo sapiens
ctcaccacacagtgttgggttggagaatgggcctgggtgcagagcttcggagccaaacaccgtgctggtttcagagaaacaaacagccctgatgtagctgtggcccttggaggtgtccgaat

SEQ ID NO: 315625 - DNA, 122 bp, Homo sapiens
cccgtttgtgtctaaacggaggctcggccacaacgccactggattggtggtagggcggggcgggccacagtctccagcctgaagcggaagtggaggaaagatggaggtgtggggacaggagc

SEQ ID NO: 315626 - DNA, 122 bp, Homo sapiens
gcacagcccagcctgacacaggcttggaggtctaaactcaggccactggagggcttgaagcgggaggcagagggtacggtgtggctgccagcaggagcacttaggaggcaggagcactcggg

SEQ ID NO: 315627 - DNA, 122 bp, Homo sapiens
tgaagcgtgggctctggacggaaacagaaggtcagggccgtggttcacgccgtgggaaaccgcagccagtgataagctgggaagccacaggggctggcagctgcagtcggaacgaagcggct

SEQ ID NO: 315628 - DNA, 122 bp, Homo sapiens
ctttttaatctgggttggtttcttagtctttcatgaccttggctttggcctgggcctgggcgttaaaaagtacagaccaattattttgtacagtgtcctttgatgtgggattgtctgatgtt

SEQ ID NO: 315629 - DNA, 122 bp, Homo sapiens
agagcatctaaccgcatgttcccggaacctgggatgcgcgcgcgcaaaggagcgcccaagcgtgcaacccagagtttggacgcgccgccctttacagcccccgccccggggccgggcgagct

SEQ ID NO: 315630 - DNA, 122 bp, Homo sapiens
cgctgggcggggccgcccttctccgagagcgtcagcccgctaggtccttgtccgcgcgggcggcacctcctctgcaggtaagggaggggtcctggcaccgcaaagttttggggagacggcct

SEQ ID NO: 315631 - DNA, 122 bp, Homo sapiens
ctaaaatccaagctataagttcagggtcacaggtctgttttctcctcgaaggaagtacagcgaatgcaggcctgaacattccttagagggtttcaggactttaattactcattttcaggaaa

SEQ ID NO: 315632 - DNA, 122 bp, Homo sapiens
tggcttgctcccggttctctcctcgccacccccgccccgcgcctggcacggcgcccggcgcgccccagccgcccaatcccggctcgcagccctgacttcctgcccgccgggctccctcggca

SEQ ID NO: 315633 - DNA, 122 bp, Homo sapiens
gaacatagcgctgggggagggtaataatctgcagctcaaaaaaaccgcgggtggagaagacgaccccggcccccgaacgcctgcttctaagacaaagctcagcaccgccaacctcgacaaac

SEQ ID NO: 315634 - DNA, 122 bp, Homo sapiens
ccctggtctgcccactgctctctggcatggaaagtgcttccctgcctgccttccacgtctcgctgagcacgcctatcccacttctgcggaagcgctggccctcctagtcctgccttccctcg

SEQ ID NO: 315635 - DNA, 122 bp, Homo sapiens
cgaccccagagtgccaagggccggctccatgtctcttctccccggcgcctgcaagtcctgcgccccgtccccgctctcatgaagccgtgacagagccggccgtctccaccccgctgtagccg

SEQ ID NO: 315636 - DNA, 122 bp, Homo sapiens
tcggtcagagaagctggtttcccgctactagccggccaaccctcaggcactggcgctctccgtcctccacaccggctgtccccccggcttcggtgccagcatctgggaggctcggcgggcgg

SEQ ID NO: 315637 - DNA, 122 bp, Homo sapiens
tccctttatgtctaacttctaattatctataaacacatgcctttatgaaatggaggtcatcgtttgatatatgatatcagacgtttagctagtcaaagccttacttgactaccagcttactg

SEQ ID NO: 315638 - DNA, 122 bp, Homo sapiens
acacgcacctgttgtagtcccagctactcgggaggctgaggcacgaggatcacttgagcccgggagatccaggctccagtaggccgagatcataccactgcactccaccctgggtgacagat

SEQ ID NO: 315639 - DNA, 122 bp, Homo sapiens
aagtaattgtataagcaaataaaccatagtcctggaggtaccgcgtgaaaatgtgtctcacgatggaggttttaatgtagtaccactgtgtgtaagttccaggcagcccaggacatgcagag

SEQ ID NO: 315640 - DNA, 122 bp, Homo sapiens
atactaaccaacagaatctctgagaatgcgatgaggaatctgcgttttgtttaaacttagcgcaggggattcggaagcacaaccaagtttggaactgttaaatacttctaggcattttacaa

SEQ ID NO: 315641 - DNA, 122 bp, Homo sapiens
caccgaggtggaggggacctgcacagggaagtgagtgtcgagctcaccgcaccgccagatcgttcgatgcgcacacggggcgctatacctgcaacccctccccaactcctactcgtcctgcc

SEQ ID NO: 315642 - DNA, 122 bp, Homo sapiens
ctgcataactacgaattgtgtgcaaatgggcccatctcctatttttgcatgcacagatttcggtattctatcctagtggatggttgacacagagtgcaatttcatagtttttattcagtgga

SEQ ID NO: 315643 - DNA, 122 bp, Homo sapiens
cccacttcctcctcgactcctactcgcggtgatgaatcacgcgccctcctcgccccgtcgcgcaccgtccccaggaaaggtaagggttcgacacccaggagtcacccaagaagcccgagggc

SEQ ID NO: 315644 - DNA, 122 bp, Homo sapiens
aatccttttgaatgatgttttcttatggagtaacccactgagcatctttgtggtgctatccgtgaactatgggaatccaaccacaaaccagtttatttttgcttggatgacaagaatggaat

SEQ ID NO: 315645 - DNA, 122 bp, Homo sapiens
ccgccccagagagttctataaagttcctctttcccacctcgcactctcagtttcaccgctcgatcttgggacccaccgctgccctcagctccgagtccagggcgaggtaagggctggagtcg

SEQ ID NO: 315646 - DNA, 122 bp, Homo sapiens
cgcgacgaccccgaggaaacgctgtcaggtcgcctttggttggcaaggcgtggttgtcctcgctgtcccgcgccttggcggaatgggcacctcactagccctggcactagctagcatcgctc

SEQ ID NO: 315647 - DNA, 122 bp, Homo sapiens
cagtttgcccctggctcctcctggtgggtcaggttctgcctcctggaggtgcagtgggcacgcccagcactggaagggctcacactgggagatcataatatcatgggatgggccatgcctgc

SEQ ID NO: 315648 - DNA, 122 bp, Homo sapiens
gcttgggctgcccaggcccggcgaggccgggctttctcctagacactgaagtctgttctccgacccaagggacacaagaaaagttgagtaaataccatatcgcttttctgttgatagatgtt

SEQ ID NO: 315649 - DNA, 122 bp, Homo sapiens
ctctgctcatgtccttccatgcatgatgctttcagactgacaaaactcttcaagtattaacgtaatttttaatgtttacagattcaagaaattaagcatacggtcacgagagtgcaaagttc

SEQ ID NO: 315650 - DNA, 122 bp, Homo sapiens
aggggtctctggcctccctagtctcccaggggcccctgagggtcagcagcacccagaccccgccagcactgtgcacccaaggcaggctgcacaagggccaggctgggagaaaccaagatgag

SEQ ID NO: 315651 - DNA, 122 bp, Homo sapiens
gggacccgcctgggatgtgaggcgcaggtgagtcgatgaacgccccctcctggtgtgagccgcccgctccccaaacgacgtccccagggccccgcccgtgctgacctctcctgttttccagg

SEQ ID NO: 315652 - DNA, 122 bp, Homo sapiens
ggatacacatttactcactgagctccagttccaatactaaattagacagtatcatatagacggaaaatgaaatgctagaactgccgttctttggatcgccactctatgggggtctgtctttt

SEQ ID NO: 315653 - DNA, 122 bp, Homo sapiens
tttccggggagaagagggttgcggcgaggttccgaggtccggcagaggtggagcggctcccgggcgtggggaccaggccagcgccaagcccgagcccccgaaccccgacccacggcccagcc

SEQ ID NO: 315654 - DNA, 122 bp, Homo sapiens
gcgggcaccggcggacgccatcggacggggcgctggggcagcgggggccgcccgagcccgcgggccatggccctggtgagtgaggcgccctgcacccaggtcacagaaaaccccttctttcc

SEQ ID NO: 315655 - DNA, 122 bp, Homo sapiens
aggccaccctgccactcacccagcacacggcaaaatgcagaggactacctttccctggtccgccccctggccgccccttggggaatgcaaacttcgtgttctgctgcggagccagacgcctg

SEQ ID NO: 315656 - DNA, 122 bp, Homo sapiens
ttttttttttttttaggcagaagggagtaatttcattacattagggcatccaatccattacgagctcttaccgtcatgtcactgaaacaatttcattaagctaaaggcctgtaaatcattgg

SEQ ID NO: 315657 - DNA, 122 bp, Homo sapiens
tccaggcttttccaagaatcagggacactgtagcctgttggtctcagtgtatgacagacacggaggaagcacatctttagctgatacttaaacagagaccctgagcgcacatacacccgcgc

SEQ ID NO: 315658 - DNA, 122 bp, Homo sapiens
ttccattttctagggcaacatcaggggtcaccctgctttcctcctctgtcctcagttttacgttctcagccttttctttccaagatgatgacagtatatgcttgaggatccccaagaacaag

SEQ ID NO: 315659 - DNA, 122 bp, Homo sapiens
cgctaccccataagaggctttcgcatggagtttctggacatggtccactcccttctcctccgcatctatcacaacgaccacatcctgatcaggatgcgtggcggccgcctgatgcggaggcg

SEQ ID NO: 315660 - DNA, 122 bp, Homo sapiens
agtactgatgggcgctactttcacagtaatttgccttcttttcaccttaaccttgctaagcgttatgctaagtgcattgtattttatatctattcttctcaactattctgcaacctgagtgt

SEQ ID NO: 315661 - DNA, 122 bp, Homo sapiens
attcttttagaaagggattagaattttactctgctagttacaagttttaaagtcacgctacggcattatcaccctggcaggtaggttttgttattgttttacattttgtgaaaaaaagtttt

SEQ ID NO: 315662 - DNA, 122 bp, Homo sapiens
ccatctgtgtccagcggccccggctccagcccagccagcactctgcagggtcacacgcaccgtgtccccacccaggacagcagacacccgccagagtgtgcgcgcccagtgactgcaccccg

SEQ ID NO: 315663 - DNA, 122 bp, Homo sapiens
ctgagccctccatgacgctcagccggtcgccgtgctccacggcgtcccgcccctcctcctcggttgtcgccaccgccagcctcacttcccacaacctggcgcactaggagccctccgaccgg

SEQ ID NO: 315664 - DNA, 122 bp, Homo sapiens
caccgtgctaggtaagaagggggctccaggtgggagagagggtgagcagcccagcctgcacgaccccagaaccctgttcttaggggagtggacactgggcaatccagggccctcctcgaggg

SEQ ID NO: 315665 - DNA, 122 bp, Homo sapiens
cgccctcggaaggcgccgcccggcggccgcggcccttcgccgcagccagagtgctttgtccgagctcaaaaaagccgtctccatggaagcggcccttccgctcggagcccggcggcctggag

SEQ ID NO: 315666 - DNA, 122 bp, Homo sapiens
attacaaattcgtcaccttgaatcaatttctgttcacaagttcaaaaggcaccctgagctcggggctatctggaacattctacatgtggagaggattaacatttggtcgaatgcctccttct

SEQ ID NO: 315667 - DNA, 122 bp, Homo sapiens
cgagagtgactgggcaggctctgtccatgggccgagcgtcattctggaacctggagggggcgggggcgggggaaggaagggaagtggaagtttgagaggggcaccttcaggctccccaaact

SEQ ID NO: 315668 - DNA, 122 bp, Homo sapiens
gcagatactacaacattgtggcattttagactcgttgagtttcttgggcactcccaagggcgttggggtcataaggagactataactctacagattgtgaatatatttattttcaagttgca

SEQ ID NO: 315669 - DNA, 122 bp, Homo sapiens
gcaaaagagacaccagggcgttggagcccacggcgcgtgggctggaggaggcaggggacccgctatggaagagcaactgcgacagccgcgcagcgtctcctccgcttgcctctcccagggaa

SEQ ID NO: 315670 - DNA, 122 bp, Homo sapiens
tggtagaatcagtaaggagaccccgcttttccaactcagagcccagagcttttgagatagcgatctcccatcattcaaaatatgaagaaaaaaaaagactttcaatggcattttgacaagga

SEQ ID NO: 315671 - DNA, 122 bp, Homo sapiens
cagggcacgacggcccagccctggccccggctgcggtctcagcccgggggccctggatcgcgcagaaacgcactgaatgggcccctgccatcgggctccagaaactacctgggctcggccga

SEQ ID NO: 315672 - DNA, 122 bp, Homo sapiens
tgacaggggtgccctgtttactcagcatgccatgctcagcccctcacaggaggaagcatgcgggtgaacaagtgcaggaactggctgagcacttctgagctggtaggagcaaactccattta

SEQ ID NO: 315673 - DNA, 122 bp, Homo sapiens
accttaggtgatctgacagcttcgtcctctcaaagtactgggattacaggcatgagccaccgagcccggcctctcactacatttaagtgatgccatggctcatgcctgtaatcctagcactt

SEQ ID NO: 315674 - DNA, 122 bp, Homo sapiens
ggcagccgcgggtaaaggcctagcgggcttgataacccctgcgccctggctgggaggccgcgctgagcggggggcagggcgggccgggggaggaggctgtgcaagggccgcggggagatccc

SEQ ID NO: 315675 - DNA, 122 bp, Homo sapiens
aagccctttacaaaggagggttggagattgcaggcagcttttacttatctatgctgcccacgcttaacatggaaaactgaaagctgaccttgtgttcctttaaaaaatctccaaggaagtcg

SEQ ID NO: 315676 - DNA, 122 bp, Homo sapiens
acgggctcctgcccgccgccccgcctggaacctcgcccggcccgcggggctgggtttccgcggcaggtgcactgcacttcccgcggccgggcctccgcccaccttgtcccgcaggtcctgga

SEQ ID NO: 315677 - DNA, 122 bp, Homo sapiens
aagggaggaggcctcccctcggagccccttggccatggccttccgcatctgtgcctgaaccgcagccagttgatcatggttcaaccggaatggggccagggtctcctccagcaggcgccggt

SEQ ID NO: 315678 - DNA, 122 bp, Homo sapiens
tctggggcgggcgggtgtgggggcggggcggggcggggcgggggctgcgctctgccctgtcgcgggtttatataccctttgggcacttaaccgactgtgccagcccagtcccatacctgtca

SEQ ID NO: 315679 - DNA, 122 bp, Homo sapiens
tttccttgggtgcgaactcgagtccaggaccggcagggttctcgccttaatctgtaccaccgtcccgtaaatctgtcgctcagcccatagccggcctttgatctccaagcggagcagctgga

SEQ ID NO: 315680 - DNA, 122 bp, Homo sapiens
acccgcacccgcgccgggggtcgtgcctgcccgcagcccaccaccaggtgcgctggcgcgcggacggcccttccctggagaagctgcctgtgcacatgggcctggtgatcaccgaggtggag

SEQ ID NO: 315681 - DNA, 122 bp, Homo sapiens
ccagccgggtgccagtggctgggaccaggttctgaccactgtgcccactcactgtggaatcgcgtgagcaggccagaccctgcgtcgtaaggacagagcaggacacgtcctgtcatggggca

SEQ ID NO: 315682 - DNA, 122 bp, Homo sapiens
tactttacaaattttacaattatttggcagtaattttctgattatgacatgactgctgtgcgattcagcaatttcccagatgcaggcaatagctggtgtttgtgtcctattctcacagtaac

SEQ ID NO: 315683 - DNA, 122 bp, Homo sapiens
cttctgggaggtgaggcccagcagtcaggcagctaccaggcagaaggtgaaaggcggctgcggaaatgcctccgtttttcaaatgaggtccagtaggtttcacaagaccaattaaagggtta

SEQ ID NO: 315684 - DNA, 122 bp, Homo sapiens
ggctgggtgagctctgagtcacttagcgggagcctgaagtggcagggctgcttaagcacccgggcctgcctgactccatgctgtggggctggaggcggcacactgggcaagcttctttagga

SEQ ID NO: 315685 - DNA, 122 bp, Homo sapiens
taccgttccccacatggtctgttttgtgggaggctccttctcaggtgtctccggtttaagcgcttcgccatcctctgggtggagtcagcctcccgtttgctgttagcgccgcgtttgcgaat

SEQ ID NO: 315686 - DNA, 122 bp, Homo sapiens
aataatattggtttcatttcctcccctgccgcactctgatgggtagagaacacctgtcttcgcaaccagtatcgctgcagcaacgggaactgtatcaacagcatttggtggtgtgactttga

SEQ ID NO: 315687 - DNA, 122 bp, Homo sapiens
ttgtcataatgatgctgcccttgttcacacttgaaatgttttcaaagggcctccaggccccggccagctgtctgctgtcatcccccacacattctgaggcagctccctttcccctcaacaca

SEQ ID NO: 315688 - DNA, 122 bp, Homo sapiens
tctccgtgctcttggcagacatcctcctctcccaaacccagtgtggacaccagctggaggcgctcaatgttctccaccacgttagccagctgccagttgggccggaagctcccaggacggaa

SEQ ID NO: 315689 - DNA, 122 bp, Homo sapiens
ctcacaaaacgctaggtaacatctcatggttccactggggctcgaacccaggaccttctgcgtgtaaagcagacgtgataaccactacactatggaaccccacacgactaaaacgttcctcc

SEQ ID NO: 315690 - DNA, 122 bp, Homo sapiens
agcataacagccccgtgtgtggttgccaggacccactagcaacgggtcacctgagcggcacgtgcggctctgctgcccatgcgtgatctcttcaccggcctggattcgaggcccttgctgtg

SEQ ID NO: 315691 - DNA, 122 bp, Homo sapiens
tgatgaaacccttccctgagccccgcatcagggattctgagctcagggcagatgcgtcgtcgtcacggtctttgctgcagtcacgactccttccaccttggggaccaatcagtggtggtttc

SEQ ID NO: 315692 - DNA, 122 bp, Homo sapiens
aaccaccaccgccgccgccgccgccgccgccgcccgcaacccgcctctccctacgggtcccgactgggcaccacttccggtccgacacggccacgtgttacatctaaatggcaccgtccccc

SEQ ID NO: 315693 - DNA, 122 bp, Homo sapiens
tcctcctctcctccccgcctcttgactgagcctctgcagccagacgactccggagggggacgagggaggcgcaacgtcacaggcgggagctgacaccacaatgctactgacactatcgctgg

SEQ ID NO: 315694 - DNA, 122 bp, Homo sapiens
gcagaaggacagacattatcaggagaagcatcttggcttcttgatgcaacagagatgatgcggaagccctttgggctcgtcattgggtttgctagaggagagctctgatgtgggggagaagc

SEQ ID NO: 315695 - DNA, 122 bp, Homo sapiens
actctaagaaggagttcatcctattatagtccatgcgtcaaggccgcaggagggtcggcccgtttgggggagacaccctcttgccctacaacctttcggcagtatgtcacagcgctggggct

SEQ ID NO: 315696 - DNA, 122 bp, Homo sapiens
agttcagcgtgtatccatcctgactcctccaataaatgcagaaacttgtatgtctctccccgacaactggattatcatatacattattcaagcataggctttagactcagacatatctacat

SEQ ID NO: 315697 - DNA, 122 bp, Homo sapiens
ccctgcagctgattctctacacagcagtcaaggcgatcctttaaaatttaagtcagagcacgtcgttcctttactggaaatcctacactagcactccatttcatccaagggaaagttaaagg

SEQ ID NO: 315698 - DNA, 122 bp, Homo sapiens
cagggttgatttcacgaagctgcctctggctgcagtgttggcacctggctgggatgggggcgggagaggcagcaggaagaccagggaggaggctggggcaggaggtgtccagctgggagggg

SEQ ID NO: 315699 - DNA, 122 bp, Homo sapiens
tgagctgcaccgagacctgcagcaccgccacatcgtgcgtttttcgcaccactttgaggacgctgacaacatctacattttcttggagctctgcagccgaaaggtgaaagatggtgattccc

SEQ ID NO: 315700 - DNA, 122 bp, Homo sapiens
taaaggaaaacacctactaaccaacgattctcccatgcacatttatgacaaaaaggttgtcgccatgactaaatgggaggactagcactgtttttcatgagatatcaacaaaaccatgtctt

SEQ ID NO: 315701 - DNA, 122 bp, Homo sapiens
cattagctttcccccgaagctctttgaggcttctctggagccagcttctcttggcaccgccgggctggaggaagcttctcccatagcgcttgtctggcaagcctcacagattcactctgtct

SEQ ID NO: 315702 - DNA, 122 bp, Homo sapiens
aagcttcagctgcaggttctggatcccacctgcaagttgggaattttcaaactgcaaagacgctttctcagtttggagatgtttgatttgtcctgtgagctcttcattcattgatttttttt

SEQ ID NO: 315703 - DNA, 122 bp, Homo sapiens
tccacgttggcctggcgcagtggctcacacccataatcccagcactttgggaggccaaggcggacagacctggagtcaggagttcgagaccttcctggccaacatggagaaaccccgcctct

SEQ ID NO: 315704 - DNA, 122 bp, Homo sapiens
cctccagtacgcagagccccagggcgggcacggagtcctccagcacacaacaccccagggcgggcacggagtcctccagcacacaacaccccagggcgggcacggggtcctccagcacacaa

SEQ ID NO: 315705 - DNA, 122 bp, Homo sapiens
agactctacacagatgtgattgtgacaacactttttgcccgcctaagcgagccatagagccgtctccagagctgccggtgcctttaagaagactcggtctttcgggtcttctttttccccaa

SEQ ID NO: 315706 - DNA, 122 bp, Homo sapiens
gccggccccagaggaaggggaacccgtcgagcggtttggtgcgtgtgaagcgcgacatggcgaggaagcggacaagcccgggtggcccggcgtgtagagggaagggggcggggctagacgcg

SEQ ID NO: 315707 - DNA, 122 bp, Homo sapiens
tggacactccaaaaggacccagtccccatctgcacagaggccttggacagggcagctcagcgtctcttctctaaccaacccccaagatgccggggggtgccacggcccagaggaggctggag

SEQ ID NO: 315708 - DNA, 122 bp, Homo sapiens
aggggcgggccgggggaggcggggtaaggaggagggaggggccgccgagggcgaggccggcgctcagcgtcggtctcccgcacggtctcctggatgccaaacccggtctagggagcccagga

SEQ ID NO: 315709 - DNA, 122 bp, Homo sapiens
tgtcaaggtccaacaattaagccatctgttgccgctccctgggactgggagaggtgaggtcgagtttcttggcgagtttcctgcgtgcagcccccacaccacaaaagcccccggtgcgagcc

SEQ ID NO: 315710 - DNA, 122 bp, Homo sapiens
aaggattacaaaacacgtacttggaaaaatgtttaaattccaacaaatattgaaacctaccggggaaaaaaatgtgatgaaaagaaacctaaagatgaaaactgcagctggtgctgtgagcc

SEQ ID NO: 315711 - DNA, 122 bp, Homo sapiens
gggggggtcactgtcttagtgacttgctggtgtgcgggggttcactgtcttagtgacttgcgagtgtgcggggggttcactgtcttagcagtgacttgcgggtacatggatagtcactgtat

SEQ ID NO: 315712 - DNA, 122 bp, Homo sapiens
tttgaaatgacaccaaaaatgaagggtattatttcagttagggaaataaggaagtaccaccgatttaacattatatgggtatagaaaatggttttaaggccttttgcaggggagaaatctta

SEQ ID NO: 315713 - DNA, 122 bp, Homo sapiens
cctcggctgtgtgaggactagaggcggccgaggcccgggccggttcccccgaggcggcgacggagacggctcccggcacttccccgcgccatcttaactgagcccaagcgctgagggcgcct

SEQ ID NO: 315714 - DNA, 122 bp, Homo sapiens
cctttcctatagagttctcacttatgcaacactgcaagtatagcctttgttgacttgtatcggagttgccatctatacatgttaatgtatttgatacaaaatcatgcaccatgatataatgt

SEQ ID NO: 315715 - DNA, 122 bp, Homo sapiens
gttacttcgctatattctggttcctcctcgtcctcagtgtgaaaaagttccaaggtggaacgaaccagaccccatacctgtcccattgttaccctgacacttccgagccccccttcttattc

SEQ ID NO: 315716 - DNA, 122 bp, Homo sapiens
gccgccgccgccgccgccgccgccgccgctgccgggggaggggcggccgccgcccgcctgcgctcagagactcacgcagccccagtcccgccagtccgccaacacagtagtgccggcccccc

SEQ ID NO: 315717 - DNA, 122 bp, Homo sapiens
cgttgctgtgaagtgaaaaaaatctccagagaaaccaaaaagcaccgccgagacctcttccgaaccaaaggagtttgtgtttgcttttagggaagaagaaagatcattcattcggaggaata

SEQ ID NO: 315718 - DNA, 122 bp, Homo sapiens
tccctctccccagggccgtgctcgtcaaagacggacaggcagtggctacacatgaagccacgaatgccttgaactcggctctggacctgatttcttatttaactgaaggacaaagaagaaaa

SEQ ID NO: 315719 - DNA, 122 bp, Homo sapiens
tctttctttccttctttctttctctctctctctttattttttttcagggtctcattctgtcgcccaggctggagtgcagtggcacacaatctcggttcactgcaatctccacctcccaggct

SEQ ID NO: 315720 - DNA, 122 bp, Homo sapiens
gagcacgcgggggcggccggtgtgtgtgggatcttggagcccctggtggaaggggcagcccgtgtgtccgcgtgtgtgttcgtgcccatgctcgtgtctcctgtgtgtcggtgccatgtgca

SEQ ID NO: 315721 - DNA, 122 bp, Homo sapiens
acaacaaagactctcaggaggtgatggattcgcaaggcaggaagggttcctggctcccctcgccccttctcccagcacccccaggctcccacatccaccctgcaggaagaggcctgtagggg

SEQ ID NO: 315722 - DNA, 122 bp, Homo sapiens
atctgactctcggaagtcttgcagaatcggctggggctcccacttcctctaaaacacacacgtctctttgcagagagagtgaagtctgcggaacaaacttgtttgggtaaaaatgaagtgtc

SEQ ID NO: 315723 - DNA, 122 bp, Homo sapiens
gctgggcggaggcagcggctcggggactgggcgagggccctgggcctgaggaggcgcggccgccactgcgcccagcgcctgcgcgacgcctggctgctgggccccggggcagttcagcccgc

SEQ ID NO: 315724 - DNA, 122 bp, Homo sapiens
cttcaggttggccaagaggccgcggaagggcggctcgtacttgacggtgctcagcgtaagcgccgagaggcgcacgtcgggcgggatgccgcccacgaacaggtcgctggccacctgcatct

SEQ ID NO: 315725 - DNA, 122 bp, Homo sapiens
gtccctcacacccctgcccgcgtaccccgccacccagaaggtcctccaggatccgcagtccggggagtactttgtcttcgacttgccactccaggtgaaaatcaagaccttctatgacccag

SEQ ID NO: 315726 - DNA, 122 bp, Homo sapiens
tccgtcgccaccgccccggaagcactcgccgcaggcccggaaaaagaatccgcctcgcagcgtcctcttcaggcacccccgggtggccttgttgtctgtttcctggccgagtttgtgttttg

SEQ ID NO: 315727 - DNA, 122 bp, Homo sapiens
gagagggcagaccccggcagctagcccagggcccagcacccgtgagcgcacattacgtgccggtggactgggagcctcactccaatgcacctggggtccctgtctcatcctgcccccgcctt

SEQ ID NO: 315728 - DNA, 122 bp, Homo sapiens
gagtgcatcttgtgttggccaatgagaacagcgacccgtgcgcagggccgcccaatggggcgcaagcgacgcggtatttgaatcctggaacaaggctacagcgtcgaagatccccagcgctg

SEQ ID NO: 315729 - DNA, 122 bp, Homo sapiens
ctatctacaccgccgcctgcagcttttactgggagcgctgagcgccagcctggaggtgcacgtgttgcagtgaggagccctgaaacatgcgtgttttactgcacaagatgtgcccttgaatg

SEQ ID NO: 315730 - DNA, 122 bp, Homo sapiens
cctgaggtgtcttccatttcctggcagggatcacatcacgtggctggctgcgtgctcccccgtctctctgtgcgccatgctaggtggcctccgtgagcctggtgtgcccgggacgctgccag

SEQ ID NO: 315731 - DNA, 122 bp, Homo sapiens
ccaccggctccagttcccacctggactggggtcttccgctgctgcagcctcctccagacgcgccgccgcctccggttgctgcacccagctcggagcccgcagttttcaccggggatggagga

SEQ ID NO: 315732 - DNA, 122 bp, Homo sapiens
atggaacgctcctcacgtcaccaggtcgctccagtagttgctcgccctctattggccgatcggcctcggcgcctccgccccggccgcccctatcccgaactgccattggttttgcctaacgc

SEQ ID NO: 315733 - DNA, 122 bp, Homo sapiens
taaatcgtcccctgcacttgtaggaactgttccacatttattactagtgagaaacaagctcgggcagggttgttgatttccttgcattgggttgtgttatatttagcacatctaaagatttg

SEQ ID NO: 315734 - DNA, 122 bp, Homo sapiens
ttcccctcgcaccctccctcgcttggtccgtccagcgcggaaagcagcgtcctctgcgggcgccgccgcacgctcctcagggcccgaccaccgccagactcctcccccgggagccgcgccgc

SEQ ID NO: 315735 - DNA, 122 bp, Homo sapiens
actataccctgtcatccagttccctgcctcggagataaagattccagctacatgggcaaacgcctggatcagccacaaatgtacccccagtacacttactactatcctcattatctccaaac

SEQ ID NO: 315736 - DNA, 122 bp, Homo sapiens
agggctcaggcaacaggacccggcccgggggccctcctccttcacgaggatctgcagtggcgaggcctgcagggtcagctgcgtcagaggtgatgtcaccatctcaccaaaggtgtccccgg

SEQ ID NO: 315737 - DNA, 122 bp, Homo sapiens
ggggcggggcgggaggggagatgaccagaaagggtggcgtggggtctcctccccacagtccgccgatcctcctcctcctgcgggcctcgcttccttcttctccactggacgctccacccgcc

SEQ ID NO: 315738 - DNA, 122 bp, Homo sapiens
tttcatggcacaagtaaactcacttcgatgcctggtgtcaccgagtggcagtggcagagacgcctcatcaccagcgtcaccacgagcagtgttgggatggaaggggagcgtgcccggctcac

SEQ ID NO: 315739 - DNA, 122 bp, Homo sapiens
tggagacccgacgccgccggactgcctgtcagctgcagctcggtagcctggggcccgccccgttcgcccggtctgtcttccgcgggccatgctacccaagctgactccgactggagtcactg

SEQ ID NO: 315740 - DNA, 122 bp, Homo sapiens
tctgctctcccccttccggccctaggacccggacgccggctctctctcgcctgggttcggcggataacaaaaaggaaactcaagtgcaaagtaactcaaacagttgcttgtgtggttgcagt

SEQ ID NO: 315741 - DNA, 122 bp, Homo sapiens
ttccataaaaaataagcctttcttgtcacgtattagtgagcaaggtgtctctatataaaacggatgcacgtgacacaagaaaaggcaattcgaagagtgggggaagctgcggttgtccctgc

SEQ ID NO: 315742 - DNA, 122 bp, Homo sapiens
cagatgatccacacaggcgagcgtccttacccctgcactgactgcagtaagagcttcatgcgcaaggagcacctgctgaaccaccggcggctgcacacaggcgagcggcccttcagttgtcc

SEQ ID NO: 315743 - DNA, 122 bp, Homo sapiens
gtgtgagtcaggcaggcctggtccaacatcccatcagccagtgctccccagctgcttccccggaatgcctggctgaaccccaacaaggccagcccctgcaggcagatggctctgagactctt

SEQ ID NO: 315744 - DNA, 122 bp, Homo sapiens
gaactggaagaagtcctaacacatgaattccttagacttttgtggtccctgcttctgtcacgctgggttcacacaggttcatttcagagcatggtgaagatcaggacaagtgtacagttttc

SEQ ID NO: 315745 - DNA, 122 bp, Homo sapiens
tgcctgcaccgtggaccacagccgagccactgggcagccggtgatggtcccacgcaggagcgctgtggaccccgctctctgggcagccctgtcctaggcctggacacctgcagagcctggga

SEQ ID NO: 315746 - DNA, 122 bp, Homo sapiens
aagaggagctgcagccggtgtagcctgtgggtagcctgtggacagcctggggccgtgattcgtggttggccgggtagttggcaagggcgccaaccgggcaggtgagcacaagcagggctttg

SEQ ID NO: 315747 - DNA, 122 bp, Homo sapiens
gagccgcttgtcattggatgcctcaggcaccgcctaccttttttcaacaactacttccgtcgccttatgagaacgttcaggaagtgctatttaaccttattagagtcttctgctagctctgc

SEQ ID NO: 315748 - DNA, 122 bp, Homo sapiens
gaagaaagaggatctggctgaaagacccgcaactttcacttgttgagaacctttagccagcgccggcgtgcatgtgttttagttttattctttttcccttgcccccaaagccgtggagtacc

SEQ ID NO: 315749 - DNA, 122 bp, Homo sapiens
cttcctgtactctatactattgtagattcatatcttcatatgccttgtaacattttcatgcggtctcaaaagggagagaatcacatgtgatctgttatcctctttattcagaatatcttgtt

SEQ ID NO: 315750 - DNA, 122 bp, Homo sapiens
cgggtttgtgctgagcacttcacctgtgttacctcatttcctccccacatcaaccctgtccgggtcttgttaccatacctcctctgaatgggaaattcaggttcacagaggttagggaactt

SEQ ID NO: 315751 - DNA, 122 bp, Homo sapiens
ggagactaggtggcaggtgaggacgtccccgcgcacggccggggtggagcacgggagtggcgagcttcaggtccaccggctgccaccgaaagatgggacctgaagacaggagaggtcgctca

SEQ ID NO: 315752 - DNA, 122 bp, Homo sapiens
gcacgagagcgtcacccgcatcaaaagattctcggggtctcgggacttgggagccggaggcggcacgagagcgtcacccgcatcaaaagattctcggggtctcgggacttgggagccggagg

SEQ ID NO: 315753 - DNA, 122 bp, Homo sapiens
agctcatgggaaaggtcataagagcctacacttgctatgggaaaggatgtgagaagtccacgggagacaaaaagtagaggcagcagtctgtgacacaccatgggatgctgatttgtcaaaca

SEQ ID NO: 315754 - DNA, 122 bp, Homo sapiens
cagggaagaaagggagagatgcagctgtttgcagaggacggagcctccagccccgggggtcgtggggaagggcccagaccaccgggttcgactcagttttctgtgtaagagggttcgggccg

SEQ ID NO: 315755 - DNA, 122 bp, Homo sapiens
gggcgcagcgggtccgaggagcggcgggggcggccggcaaagttaacttggcaccaccggcgcttcaaagcggtgcagctgtggctagcagagccggcgccgctttcttctcgccgcttcct

SEQ ID NO: 315756 - DNA, 122 bp, Homo sapiens
tgacaaaatgggaaggattaaaaaggaaaagagtacaagagcatcagaggaaaataaaaacggattagttaaataatctttgctattttagggacttagatagtaagataacttaggccagg

SEQ ID NO: 315757 - DNA, 122 bp, Homo sapiens
ccgggtggagcagcggctttgggggccaccactcaggggaccttggttcgaggccgacttcggcgcttggctttcaagactgagggttttcggagttggccccccaaatccgcagctctgat

SEQ ID NO: 315758 - DNA, 122 bp, Homo sapiens
cccaccaaaaagttgtcctttaattggagttttataggcttgtggtcagagaatacagcccgagcaacttttctgatgttttgaaatgtgtgaccaagaagttgatcaattttttaaagtgt

SEQ ID NO: 315759 - DNA, 122 bp, Homo sapiens
cgggtgaagagcctaggtgtttttgatctgtgccttctctgttcctcagagatatgcgggcgtccttctagaagcccatctcgctcacctgtgtggtcacccttgtcccgcccttcctccga

SEQ ID NO: 315760 - DNA, 122 bp, Homo sapiens
gaaaatgcagcagagtagtgtggtagacagtgactgggagcatgggggtggatggagaggcgcggggctacttgtgataaagtggtcaggaaagaaaccttttgagaagtgagacctgggtg

SEQ ID NO: 315761 - DNA, 122 bp, Homo sapiens
gcagagttgtgtgtatttagcaatacatactctgatatcctatggccttgggatgagtcccgcatattagctatatgatcttgggtaaagttaaatttttaaattatttaatttcaatatct

SEQ ID NO: 315762 - DNA, 122 bp, Homo sapiens
tgtcaggttgggggagaggcccaggttcctcacctggcctctgtgaacacttgagggagccgtgctccttgttattgctaggtgtggatgggggttcaggcttcccactaggtctctgctga

SEQ ID NO: 315763 - DNA, 122 bp, Homo sapiens
aggagcattgaagaactaaacagctctcatctcaacttcctcccaacctcactcttggctcgtcctcctctgaggagcagctgtttttcagctgatgtttaagctcacacactctaagttaa

SEQ ID NO: 315764 - DNA, 122 bp, Homo sapiens
ctcctccacccgctcaggaggggaaacaggagagccgggagcacaacagcctcgcgcgcccgccgccgcctcagccttaggggaggccactacgcctctggttacatttcttgatcatggta

SEQ ID NO: 315765 - DNA, 122 bp, Homo sapiens
cccgcccctcccacctccagcgggcagttgccttgtgctggtggcttaggaaccggagcccgtcgctccaaccgttgcagctccacgctccagcccaaccgcggctctgaaggattgacccg

SEQ ID NO: 315766 - DNA, 122 bp, Homo sapiens
cccggtcttatctcggagcattctgggctttgcttgttcagtgcagcggactggtgagcgcggtgctgcgcggctggcggtttattacccccacgtaagctctataccatcacccagaacac

SEQ ID NO: 315767 - DNA, 122 bp, Homo sapiens
ggtcgagccgcggcgagggaacggatcggagacgctgcgcctgctcagaaggtagcgcagcggggaaaggcgggagagcgttaacttctgagcctgcgcggtgggagttgctcaagcaggtg

SEQ ID NO: 315768 - DNA, 122 bp, Homo sapiens
tggagttgcgcgccctagaaactccatgcagctccggcctcctccccagctcctccccagcggatcccccagggccttgccgccgacagcaccacactcctcgctctgccggcgcccgcgtt

SEQ ID NO: 315769 - DNA, 122 bp, Homo sapiens
atgtggtcacccagtaattcacctcttcaaagcacatgaaaattcttaaggaataaaagacgtaacttggaagatgatgaggaatagtaactgcaaagtatacaagttgtatgacttggcag

SEQ ID NO: 315770 - DNA, 122 bp, Homo sapiens
tttccgaagctccgctccctcggctcggggcccgcccggctcgtcccaacagctgccccgcggccgtaggccccgcgctctgtgcaccagggaaaagcagctcccgagtttgtgccggacgc

SEQ ID NO: 315771 - DNA, 122 bp, Homo sapiens
cagcggggctgcgggctacggctgttggtgagagcgctgagcgaggagctgagggcatcgcgtgggtgtgaggctcagtgttaatcattgttaaccccgaaaactaaggcattcctacttgg

SEQ ID NO: 315772 - DNA, 122 bp, Homo sapiens
tccgggaggaagtgacgctcccagccagcttccggtccaggagactcggccccgcctctgcgccgggcagcttaaagggaccacgacccccaggaggattgaaggagaccggtggggacggg

SEQ ID NO: 315773 - DNA, 122 bp, Homo sapiens
actccttaagcgaccctgaactgctattctgctccagctgggagtgcctgctctctgccccggaaggaggcattataccaactcatagtatttccctgtttgggggtcaaagtaacagttca

SEQ ID NO: 315774 - DNA, 122 bp, Homo sapiens
gtccgagaaggttggggtcgcctcttccgaggtgagcctggggcagggctggtgtggactcgccggtctctgtgctgtcaaacggagacgagaaatgttttgctcacaatcttttgagaatt

SEQ ID NO: 315775 - DNA, 122 bp, Homo sapiens
acagaggcctgacgaggctgcaggggccaggtcacaggtccctacaccccctgaagtgctcggcgagaggcggccccccagctgctgggtctttattccctctcctctgcgcccactggacc

SEQ ID NO: 315776 - DNA, 122 bp, Homo sapiens
ctcctcccctccagaggcggcggcggctccggcggcagcagcggcaggcagcaacgtaagcgggatgctctccaggctgcttttctgctcggtcagcaaatggctgagctggtacatctcgc

SEQ ID NO: 315777 - DNA, 122 bp, Homo sapiens
gggccctgggcggacactgagtagggaccggtgatgaaaggtgcgcagagctgacgttctcgtagggcagagagaggcaaaattaagcaacagctccggcttctgggcattttgtcgtgttt

SEQ ID NO: 315778 - DNA, 122 bp, Homo sapiens
ctttcctttgcctgctctgatttgactgtgtgccctgaagttcgtgtgttgtgccttaatcgccaatgcaacagtgttgagaggtggaggctttagggagtgattaggtcaggagggctctg

SEQ ID NO: 315779 - DNA, 122 bp, Homo sapiens
gcgcgacgggtggagggaggtggggtttggttctgtgccccccctcccccgctcccgctccgctgccaggggagaacagggtcctaagaggctggcaagccttacattcctctcgggacgcc

SEQ ID NO: 315780 - DNA, 122 bp, Homo sapiens
acccacgatgtttcagacagtccccgacacgtcgtcttacatcaaggtaagacatggcagcgtctttaaacaggtgatgacccccagcttctaccccacccgggcctatggtcccttttccc

SEQ ID NO: 315781 - DNA, 122 bp, Homo sapiens
aatagacgcgaacagagtcgtgattgttccctgttgcgggacattctgcgcctgaatgagcgggggctgctgtgtcgacgcggatttgccatatggttgcgcggagccaggaagaatgggcc

SEQ ID NO: 315782 - DNA, 122 bp, Homo sapiens
ttgggacgagatcctgcaagctcagcctaggcttgccggcagctgtttgaaggagtcactcgcatggaccagtaaagcaaaggcagcgatgacgcctcgcggtgagggccagaacccaagtc

SEQ ID NO: 315783 - DNA, 122 bp, Homo sapiens
agggagggttcccggcctgcaggtgctctttcctcttggtcccaagcatctgtgcagggtcgtgggagccacactgagagacttgtgtgggccagacaagcttcattctgatgcgctagtcc

SEQ ID NO: 315784 - DNA, 122 bp, Homo sapiens
taaacacatatacaggcggcttgctgtttaatttttctgttcttgccgttggcatttgttcgaatctcaccggatttatttgtttaatacttgaccagattcgcttttatgttaaccattag

SEQ ID NO: 315785 - DNA, 122 bp, Homo sapiens
tcccgagatgccatatacaattacctacattaataactgtagcactatgccttttgagcccgagagagggaattagtgactctaagtgaaggtcactgacacagagaagcagtatgtgtctg

SEQ ID NO: 315786 - DNA, 122 bp, Homo sapiens
cacagtgcttgctatctgatttccctttagctaagtatgctttcccgaaggcaccttgcccgatggccttaatcacatcgtacttatccatggtctccaatgggctgagtttcctggaatta

SEQ ID NO: 315787 - DNA, 122 bp, Homo sapiens
cccttcccccatgtggtgcgagctggcgccatcttcgtgcccattcacctggtgaaggagcggctcttccctcggctgccacccgcttctgtggaccatgtgctgcaggagcatcgtgtgga

SEQ ID NO: 315788 - DNA, 122 bp, Homo sapiens
gtctccccctccttgctgggggatccatgccctgacagctaggggactcattcattcactcgctcattcactcgttcattggttgctgcatagccactcagctcatattacgtgcaaggcgc

SEQ ID NO: 315789 - DNA, 122 bp, Homo sapiens
ccgagacaggtccgcgaccccccacacccgcaggccggggttggggaactcccttacgcgcgtcccctggggaagcccatctcgatgagactctcaagagccgtcagctccgccatggcgcc

SEQ ID NO: 315790 - DNA, 122 bp, Homo sapiens
gccctccgcgtgcgtccagttcccaggccccgggttccacctcaatctctataatcgatgcgacggcctaaagtatctagggaaccccatcactcttaagtaccgactccagtcctggctgc

SEQ ID NO: 315791 - DNA, 122 bp, Homo sapiens
aagaaggcaagagtttcagggtaatgggttaaatgagctgaggaggacaaagggtgagaacgagaatagagtactgaatatggcaaggaaacagaatgacctttcatgagaatggtgttagt

SEQ ID NO: 315792 - DNA, 122 bp, Homo sapiens
ctcaggcaagtcagaagtcacttttcctccacgggactcactccttttatctgtgaaatgcggagatggcaagcagctccatactccacggctgaggacgagctagggtcccgcacagactc

SEQ ID NO: 315793 - DNA, 122 bp, Homo sapiens
ctcactagggagtgccagatagtgggcgcaggccagtgggtgcgcgcacagtgcacgaaccgaagcagggcgaggcattgcctcacctgggaagcgcaaggggtcagggagttccctttccc

SEQ ID NO: 315794 - DNA, 122 bp, Homo sapiens
aggggtggggcctgccagggagtgccttgctgggaagggagggcaaagggccatgtctttcgcttgctccacccagctgccaagagtcccagtcaccaggccaccctaagtcccagcccttg

SEQ ID NO: 315795 - DNA, 122 bp, Homo sapiens
tcgctcaccaggcaggtcctaggtccagctctgggtggggctatgcccaccatgttcacacgacagaattgatgggatgtgggtttgaaatgagggagaagaggcaggtttttgcctcctca

SEQ ID NO: 315796 - DNA, 122 bp, Homo sapiens
cagtgctcatggggcaggcggagaggagcttgcagcattgagcggaaccggacttgagcccgtgatgtccggcaccaaattggaggactcccccccttgtcgcaactggtcatctgcttcgg

SEQ ID NO: 315797 - DNA, 122 bp, Homo sapiens
tacctgggacccgaggacaccgggaccgcctctccttacaatcgctgctcttaaagggggcgcgaccacttaggcaagaggagctcaactcgcggcactacaaccttcccgcccccgctgcg

SEQ ID NO: 315798 - DNA, 122 bp, Homo sapiens
ttcaagcaattctcctgtctcagtctcccgagcagctgggactataggcgcctgccagcacgcccggctaatttttgtatttttagtaaagactgagtttcaccttgttggtcaagctggtc

SEQ ID NO: 315799 - DNA, 122 bp, Homo sapiens
gagggaaactgagtccacgtccacattggatggtgggagagaacagggaaactgagtccacgtccacatttgagggtgggagggaacagagggaaactgagtccaggtccacatttgatggt

SEQ ID NO: 315800 - DNA, 122 bp, Homo sapiens
aggagaacacacttgcattttccttactgtgtcccacttcctggaacagtgtctccagcacgagccgttgtcagatcaatacatttacactacttcgtgaagcaccactaaaatgatagtaa

SEQ ID NO: 315801 - DNA, 122 bp, Homo sapiens
tccgattctgtaactctgtgtgatcttgaactagtcaagtcacttccttctctgaactcacgtacaaaatggggaagggcacaggagatgggttgtggaataaacaatacctaagatccctc

SEQ ID NO: 315802 - DNA, 122 bp, Homo sapiens
gcttttaacctgtgggagaacccggcgagctaagccaaacggagggcgggagagaggaagcggcagctggcgcctctcggcaactctaaccctctgatagagatcgccaaggtaaccgagat

SEQ ID NO: 315803 - DNA, 122 bp, Homo sapiens
cctgcgcgtcctgcctcctgcgggcagcagctcggagcctgcgggagggagcaggctgggcgcgtggtggggggcgcgcgatgcggagggggcggcggcgcagccaatccgagaggcggccg

SEQ ID NO: 315804 - DNA, 122 bp, Homo sapiens
agagggatggagaggtgggggggggggtccccgcggcgacgggaaggggcggagggtaggcgcgcggccccagctcgtccctttcaggggggactcatgcatcaaacttcaattttccggac

SEQ ID NO: 315805 - DNA, 122 bp, Homo sapiens
caaggcagcatcctggaagcagagagcagctctcaccagacacaaaatctataggtgtctcgatcttggacttcccaacccatagaactgtaggcaatgaatgtctgttgtttataaattag

SEQ ID NO: 315806 - DNA, 122 bp, Homo sapiens
cgaaccagcgaagaaagctatcgatcgtaaaacaaaataaacaccaaacaatgttgccgccgcttaaaaaaaaaaaagtggggcggggagagaaggaagggtaattgggaagtggcaatctg

SEQ ID NO: 315807 - DNA, 122 bp, Homo sapiens
acgtcctgggtgtagcccacgttacactcgcagcggtagctggaaggcgtgggcaggcagcggccattcagacacaggttggtgaagtgtcggcagatgtcaatggtctggttcagggtagc

SEQ ID NO: 315808 - DNA, 122 bp, Homo sapiens
ccgcccccaaaagcttccctcctttaggtttaacctgcgcccccgcgctctgcatcagcgcggtccccgaccccgtgcagttggaaacactgggcgcctccctgccgggccccttcccgccc

SEQ ID NO: 315809 - DNA, 122 bp, Homo sapiens
aaatgccccttccagtccacagagaaaaagctttctccttttctaagagtccatgggcgccgccatgttgctgtacggaaaaacgtttccagggcgagttgagcgttcagggcactcctcgg

SEQ ID NO: 315810 - DNA, 122 bp, Homo sapiens
ggggacgagggcggagttggcgagtttggctgtcagcggccggtgttcctgcaccgccctcgctgcagcgccgcgcgccattggccgccgcgcgccgcccccgcccccgccgccgccagctc

SEQ ID NO: 315811 - DNA, 122 bp, Homo sapiens
cgtgcagagaaacgccccttcgcacttatgacttccggcctgggactctggctcctcacacgcctttgatacaaagttcgaaggctgagccttagccatgccacgcccagcgtgctccggac

SEQ ID NO: 315812 - DNA, 122 bp, Homo sapiens
accacgcgggccagcgcgctgcgcatcgccatctgggccagggtgcagggcccgcggtcccgggggaagggcagcaactcggcgcccccctcagcgcctcgcactacctcctcctctgggga

SEQ ID NO: 315813 - DNA, 122 bp, Homo sapiens
tgcccctagccaatgaacctggagcgcgctgccccctctcagcttgcggcccgaaaggcgcgccagttcctttgttctcattggcccgcaccaagcgctgcctgcgcagagcctgctaggag

SEQ ID NO: 315814 - DNA, 122 bp, Homo sapiens
tgattcagtaggtccaacaaactcccaggtaaatgcccatgctgctgggctaggacgacacgtggagaacaattgctctaaaaattgagcagatcaacactctctttcaagtctgcacctgg

SEQ ID NO: 315815 - DNA, 122 bp, Homo sapiens
tgctgtgctctccctgatgctttttggtggtcatgtggctgtgactagaccctatgagttcgggttaagtcctgggttcttcagactgataaaaggtttcttctcatgtcttcctctaagaa

SEQ ID NO: 315816 - DNA, 122 bp, Homo sapiens
cggcgggggcggtcgggggcctcgaacccggggatgctcgcggggagggtcccgagcccgcgccggcctggcccccccgtccccggctgggcctctccgggacactccccgccccgctgctg

SEQ ID NO: 315817 - DNA, 122 bp, Homo sapiens
gccatggaacccccgaccgtcccctcggaaaggagcctgtctctgtcactgcccgggccccgggagggccaggccaccctgaagcctcccccgcagcacctgtggcggcagcctcggacccc

SEQ ID NO: 315818 - DNA, 122 bp, Homo sapiens
gctggactgaaggggtcccgagtgggacggggggctcggcgggaagtttacctggtgccgcgggcggcccacgatggacgggaagacagcgcggggcgcgtcatcgcccgcaaagccggcct

SEQ ID NO: 315819 - DNA, 122 bp, Homo sapiens
gagccctgcggcggggtcgttcctgggccccgcgtgccatcctggggttgtgcatggtggcggcgaaggcacccagcgctgggaccccagcgaggcgacccggggccaccgggcaggcccaa

SEQ ID NO: 315820 - DNA, 122 bp, Homo sapiens
atgctcctttccccacagccctcagggaaggggcccagcagccaagaagtttcccaacatcgctgccaccttcaccatacctgttcctggcccaagtggaggccccagtgggaaatgtgtgt

SEQ ID NO: 315821 - DNA, 122 bp, Homo sapiens
tcaggagagcccatcagctgctcactaatgtgaagtcacagtcaagtgtggggactgagtcggatgaggctgacttctaggcagcttgtctgacaacaggttatgcagtgtatctaaggaca

SEQ ID NO: 315822 - DNA, 122 bp, Homo sapiens
tgtcatgtttgagactttgctctgcataatcaggcaccagtaggtttttataaaggaacccggctgtcacgtgcagaggagaaataaacagaaagtttcccatcctcagggagccacctgac

SEQ ID NO: 315823 - DNA, 122 bp, Homo sapiens
taaatgaacatcgtatttgattttcaagaacataacactggacttccacttctgaagctgcggcaacaacagggaccaggtgtgtcatccagcttgaaacaattaagaaaccaaaaagtaca

SEQ ID NO: 315824 - DNA, 122 bp, Homo sapiens
tggagggaggaagaagggaaagagagagagtggagagattatataatatggtaaataagacgttgcattttgaggagtaaatgaaacaacaaaacacagtgctaaaaggaaacaattattga

SEQ ID NO: 315825 - DNA, 122 bp, Homo sapiens
ggttaattcaatttgcagaattttggatgaaaaatactggctcagtcactctccacagcccggcccccaaacaacacgtagcaactccaaatgtaattgcttactggccctggcgagaaacc

SEQ ID NO: 315826 - DNA, 122 bp, Homo sapiens
ggttcaggaaagctcggggaggagggggtggccgcagagaaggaaaaggaccctcacttccggttgcgttcagtgcagaccagctgagcacccactgcccgagcctgctgtgggtcagccct

SEQ ID NO: 315827 - DNA, 122 bp, Homo sapiens
cggcgagagaccagtgttgttagaacagtcagtcgggggtgcggggctccagtgagagaccggcgctgttagaacagtcagtcgggggtgcggggctccggcgagagaccagtgttgttaga

SEQ ID NO: 315828 - DNA, 122 bp, Homo sapiens
tctggtgggaacctatttggggcagggggaggggcggaggagcgagacccaatctagctccggagcccttggagaaagtttgcgcaacacgtctctgtccagccatccaggcaggcaggcag

SEQ ID NO: 315829 - DNA, 122 bp, Homo sapiens
ccgagctgatttaagacgtggatttcaggtttttcccttgtcaaagcagtaaaggaagagcgggccttggcgactgtatttagattccgattacttcaaattagaagggggtggagggagcg

SEQ ID NO: 315830 - DNA, 122 bp, Homo sapiens
ccgcgtgggctgtggtcaaacgacacccagatgaaaactgcagctgatggcctggcctttcgggtcagtagctgctgtgcacagctctctccctgcctcctgaagttcaaatgccagcctga

SEQ ID NO: 315831 - DNA, 122 bp, Homo sapiens
acttctgtgtgaagcacttgccgcagatgccgcacgagtgtgacttgacaccacgatgcacgttcatgtggcggttgaggttgctgctgtggttgaactgcttgccacagcgagggcacatg

SEQ ID NO: 315832 - DNA, 122 bp, Homo sapiens
tttaccttggctgcccgagtggcagttttacagatattaaataccgacccgaggctgagccggggctccttcgctccccgcccccgccggggggctgcgctgggcacgccgaggcccgggat

SEQ ID NO: 315833 - DNA, 122 bp, Homo sapiens
tgggcgcgccctatgcaaatgagcgggcggggccctcgtgttgctgaacgagggcgggttcgcgatgtaaataagcccagaggtggggtctttggagagcacttagggcccgggtaggggat

SEQ ID NO: 315834 - DNA, 122 bp, Homo sapiens
ctcctcgacgaggccttgtgcgttttccttttggcaccctggaacacctgcattcctggccgcaagctggatccgggacgcgggtcgggcccacgcgccctcaggggtggccctgggccgcc

SEQ ID NO: 315835 - DNA, 122 bp, Homo sapiens
tgtgccgccctccctggtgcaggatgaagctctgcccacggtcctggtcggcgtgttcatcgaacagcccacgccgtttgtgtccctgttcttccagcggctcctgcggctccactaccccc

SEQ ID NO: 315836 - DNA, 122 bp, Homo sapiens
cttcccttcctgccgggaattctgcctcagctgccctgggctctcgctgcgttcgctcaccgctgtcacctgcacggtgtggctggcagcctacggactcttcaccctctgcgagaacagca

SEQ ID NO: 315837 - DNA, 122 bp, Homo sapiens
ccgcagtacccggttcctgccagtgacagggcgtcgcaagcacagccatggcgtcaccaacgctcgacccgtgcttccgccctggagggagccgagcgcggggacgggggcgtggcgggagg

SEQ ID NO: 315838 - DNA, 122 bp, Homo sapiens
cagccacacccaggacccaaggcccgggtgagatccggaggctgtaggaacgctaaggggcggtgctggtggtccaaggacgtcccccgcagagtggaccaggaagaacgtgtcagaggatc

SEQ ID NO: 315839 - DNA, 122 bp, Homo sapiens
ccagccgcctactgctgctgctgctgctgccgctgccgccgccgccgccgccgctgcctccgccggctctgcgaacccgggacttttcatgcaccacactctccgcctgcttccctccgtgt

SEQ ID NO: 315840 - DNA, 122 bp, Homo sapiens
tgggaggctgggaagactgggagcagtctcttaaacaaaagcaaaagaataagcttcgggcgctgtagtacctgccagctttcgccacaggaggtaagtggatactgggagctgggggaact

SEQ ID NO: 315841 - DNA, 122 bp, Homo sapiens
agctgaacggggtcatgcccatcgccatgagcatcaaggcaggcacggtggatgaggactcgtcaggctccgagtgagtgtggccgggtgggcgggacggggtgcagcccctcggaggcctc

SEQ ID NO: 315842 - DNA, 122 bp, Homo sapiens
gtggggggtcccccaagccccagccattttgtggctcgtaggggttgtcgcttcccaagccgtgaatggcccaaacccgccccccgccccaggtcggactcctgccccgcgcccctctgggt

SEQ ID NO: 315843 - DNA, 122 bp, Homo sapiens
atagattctacccctagcctaggtgtatgttgggctacaccggctatgtacacgtctctccgtgatgttcgcacaatgatgaaatggcctaaggatgcatttctcggaacgtatccccgtcg

SEQ ID NO: 315844 - DNA, 122 bp, Homo sapiens
aaagagacaggatgactgacttactgtatatttgactcattttcctagaaagtgcagactcgctataaaatgtgttaggtggtgagaacgctgatggttcaccgttttcctccactttcagc

SEQ ID NO: 315845 - DNA, 122 bp, Homo sapiens
gagctgttaggtgggagggaattggtctgtatgtctccctatagtgttgcaacacttcggcgctgggctccctgtcccagactcaccttccatactcaagccagaggcctacgaaagccggg

SEQ ID NO: 315846 - DNA, 122 bp, Homo sapiens
ccctatgtgctgggggctaggacccccgtaatccagggctggaggaatgtgctctggccccgcagggctggccctgtattagggctggcactcaaagtggggatggggggacagattgcagc

SEQ ID NO: 315847 - DNA, 122 bp, Homo sapiens
cctgcagtcctgggccaagcctgaagcttgcacatcctggtctgatgggtttcaggaaaacgttcttatctttttatctaagctagctttggttggatttctgtcacttgcaacctaaagag

SEQ ID NO: 315848 - DNA, 122 bp, Homo sapiens
cagtgctctgcgctagcccaggtgctgaggtcggagaaacactgcagttacagcggaagtcggggtgaccccacgggctcttggtagcacctggctgaacacacaagggaatgatgttgacg

SEQ ID NO: 315849 - DNA, 122 bp, Homo sapiens
tcccctgcagggctgtggctctgggaccacttcctctttcttcactctgaagccaagagccgaccttctgagccctcaagaaagatcagaacagattcatgggtgatttagcctatctgtcc

SEQ ID NO: 315850 - DNA, 122 bp, Homo sapiens
gcgaggcaccttggcggcctcgcgctgctcacgagcccgcgcggcttcaagacggcgcggcgagagaaagagcgctcggctcaggcgaagcctcttctgccgtccccaggcctccgtctcct

SEQ ID NO: 315851 - DNA, 122 bp, Homo sapiens
ccactgaggaccaatctgcttgggccggggcggggctgcggcgggtgggtgcagaggggccgcaccgcggacttcgcagccgggagagagcccggcgcgggcggcgcgcacgggactctgct

SEQ ID NO: 315852 - DNA, 122 bp, Homo sapiens
aaactgctcccctgcacctcagctttacttgcccttgtcttatgtggcttccctttgaaacgggtcgctctcatcacagcacgtagcatgctgccagccgccacatggctatttggcagcta

SEQ ID NO: 315853 - DNA, 122 bp, Homo sapiens
ttcaggtgtggaaataataatggatgttgctattgcacaaagaaaataaaatggagattccggttattttaccggtgattcttatctttggtccctcgaggtgagcctttgaaatataatca

SEQ ID NO: 315854 - DNA, 122 bp, Homo sapiens
cgcgccgagtgtaaggcagacgcagggattgcattatggcaggagaggggctggcacagccgcacgctcggccccgtaatcctgttagccagcaatctccattccgaaagagcttcatttct

SEQ ID NO: 315855 - DNA, 122 bp, Homo sapiens
tgagcccagcggccccttccccactgggagcccgtggcttcagtggcagcctgagtggagcgcaagagactgggggaagggcaggaggcagggaagtgtggttggcagccagcccgtatgtc

SEQ ID NO: 315856 - DNA, 122 bp, Homo sapiens
aagaacgttccagaacccggataaacatcattgaaagagagaaggccaagcccgcagagccgggtgtataaacaggccagtgtgtgctgccgcgatgggaactccagcatcctgctggctgg

SEQ ID NO: 315857 - DNA, 122 bp, Homo sapiens
ggactttccctttcgtccggcgaaggtctggtgagtccaatgggggagtggaattcgttccggtgatcctctcggtcgctcccgtcgtacgaactgctacagctgctcaagctgtcaacagg

SEQ ID NO: 315858 - DNA, 122 bp, Homo sapiens
tccttcccccggcaggtagagtgactacaagtcccgggatgcgcagcgctcggagtcgggcgggggccgggcggacctctacggtgacgtcaccgtcccggggcgggccaggggagggcggg

SEQ ID NO: 315859 - DNA, 122 bp, Homo sapiens
cacggccgggactccgtccgactgcacacactgtgtttaacaagctttataaggagccatcgggctttattatggctctgcctgactccaacaaaaactgagcctggaggcccggggacacg

SEQ ID NO: 315860 - DNA, 122 bp, Homo sapiens
gacacctcagtgttcattaggaagcacttagaggcgcgtgttcggtcagatcattgggctcgccacatgccctgggtctaattttgcacatggaagacctcacgctgcggaatgcaccgctc

SEQ ID NO: 315861 - DNA, 122 bp, Homo sapiens
cgtgcgtgtgggatctggagctccccgcgcacctgtgcgtgtgggatcgagttctcactgcgtgtgtctttctttgaaccctaaaagtttcatctggactgctgggtatagaaattcctgct

SEQ ID NO: 315862 - DNA, 122 bp, Homo sapiens
acaaaagcgcacaggcttggccagatgacggatctaagccggcctccaagactactcacccgcatcaggtgcagctcccggaatttgcgcagtctctgttcgcgcttctgagcggccagctc

SEQ ID NO: 315863 - DNA, 122 bp, Homo sapiens
gtgtgcatgtgtgtgcacatggatatatatagacacatgcttgtgtgtgtctcctagagacgattgctggatcaatgtggggattatgtggtgtccccatcaccctgtgtctgcctatgcaa

SEQ ID NO: 315864 - DNA, 122 bp, Homo sapiens
cttaatctctgcctgaggctgccgcacctggatggaacgcgcatgcgcaaggctgtctctcgcagccccgccttccctcagcttgaaacacctgctgcttcgcggcggtggctttgtgccac

SEQ ID NO: 315865 - DNA, 122 bp, Homo sapiens
agcaccccagaggccgcaaaaagcaccttacccagctcgccatggagcacagccccaggacgctccccatctccacaacgtcacaagagcagcggatacagacaagatggagacagcttctt

SEQ ID NO: 315866 - DNA, 122 bp, Homo sapiens
tatcttccaggaaggaaaatggcagaagggacagaggcagatgaaggggcgcagggtacacgtgggctgaatcttaagtaaggttttcagaacttctcattgtcttagtcatatgaccatac

SEQ ID NO: 315867 - DNA, 122 bp, Homo sapiens
aatcgattgcaacttctgcaaagtctcgtacaatccaaagcacgcaaggcaaaaccagagcgaatctgagaaccagccagcccgggttggatcgctttcaaaagagagagtgagagcgagcg

SEQ ID NO: 315868 - DNA, 122 bp, Homo sapiens
atataaggaaattttgagaggacattgaaacccacagataaaacatccttaagtctaaggcgaattgcgcatcgctgtttcattttcattgggaataaaccttgtttttcagtctggcttgt

SEQ ID NO: 315869 - DNA, 122 bp, Homo sapiens
ggaaggagcgcgccttggcgcgcaaaggcttaagggagctgtagtctgacttccagtcctcgcgctatgttctttttctaggacttggggggaatttagagcctcgaggcctggggtgggga

SEQ ID NO: 315870 - DNA, 122 bp, Homo sapiens
catattaaacggaaatgaaatgtgctactcattcccagcgttgcagaaccaggtgaggcccgagacaaaggcgcgggatggccgggacgccagcccggggcggaggggctggcggcgggagc

SEQ ID NO: 315871 - DNA, 122 bp, Homo sapiens
aaatatacttataaaattttaccatcttaaccatttatttatatcaattgaggcggctctcgtggaggcagctagcgcgaggctggggagcgctgagccgtgcgtcgtgccctgctgctgcc

SEQ ID NO: 315872 - DNA, 122 bp, Homo sapiens
gccgccgcggagcctcatgggggttggagtccccaaggtttcctttgtgcgcagtattggcggggccttggactaccactcccacaaggcaccgcgcccgcctcccgcgccacgccccctcg

SEQ ID NO: 315873 - DNA, 122 bp, Homo sapiens
aggggaatgactgccccgccactcagggctgcggcgctcacccagcgggaagccgcacggcggtccccgcaggtcccgattcaaggtgagccccagacctgctgcgtgcggccggcagactc

SEQ ID NO: 315874 - DNA, 122 bp, Homo sapiens
attgcttgagctcaggaatttgagactagcctgggcaacacagtgagacccccatctctacgaacaagtaaaacaattagctgagtgtggtggtgctctctatagtaccagctacttgggag

SEQ ID NO: 315875 - DNA, 122 bp, Homo sapiens
gaggagcggaagtagtcagatttgactgagagccgtaaagcgcggctggctctcgttttccggataacgactacagctccgactgtcagtgccggccttcctcgtgtgaggggatctgccgg

SEQ ID NO: 315876 - DNA, 122 bp, Homo sapiens
cgccgcggaggagccggtggctctagtgcggtggagccaggcgtggaagtcggtccggcgcggggcggggggcgggcgggagctacaagcggcggcggcggcggcgaccgtgaccgtgacgc

SEQ ID NO: 315877 - DNA, 122 bp, Homo sapiens
cgagctcaccgtgttcagcgagttctggctgccctgcggagtgcgcttctcttctgtcagcgaggccggctggttgctactgtgatgagaggaggctggcgagggcacctcgttctcggttt

SEQ ID NO: 315878 - DNA, 122 bp, Homo sapiens
tcccctccggaaggactgggcgtgcccggcgtgctgtgcgtctcctccggaaggactgggcgtgcccggcgtgctgtgcgtcccctccggaaggactgggcgtgcccggcgtgctgtgcgtc

SEQ ID NO: 315879 - DNA, 122 bp, Homo sapiens
tgctaccttgtatgtttacataatgctttagcccaaggacacatcaccaacccatggactcgcagacaccggggctgggtttctctttcctctttttggagaaaaggaacagggcagtggaa

SEQ ID NO: 315880 - DNA, 122 bp, Homo sapiens
ataccgttagtagtctaaagggatacatgttgctttcacctaaggcactaacacttttcacgggatatgcttccagcgcaggcccagcccacaccgcgcagttcccacctgctgtgcacgtg

SEQ ID NO: 315881 - DNA, 122 bp, Homo sapiens
accctatgccatttgcttagaacagatctgatcgttcatatgcaatgcttatgtcctcaacgaggctataaactccatgaggagaacccctttaccataaatccacatgcctcccaccccca

SEQ ID NO: 315882 - DNA, 122 bp, Homo sapiens
gcgaaactggtcctctgggggcctccgagggcccctgctgggagagtggggtctggtggtcgggagggatgaagggagcaggggtgggagggagaggggagcagctgcccgcccgcccgccc

SEQ ID NO: 315883 - DNA, 122 bp, Homo sapiens
cacttgcttacttatctttagaggatgaaaaagtcccccggactcctaggaaaagacggacggttctacagccatggtaaataccagaactgattttacagatggctaattggtcggtgaca

SEQ ID NO: 315884 - DNA, 122 bp, Homo sapiens
tgactgcgcctgaggacggtgatgccatggaccaggagcgcttcccggagcgggagcaggcgctcgctggctggagctcccccactgtgtctgacgcctcattccctggatgttcagggttc

SEQ ID NO: 315885 - DNA, 122 bp, Homo sapiens
acatttttttttaatacagattttaaattctttacagtgcacttcagaaggagatcacaacgcgttatcaactggatccaaaatttatcacgagtattttggtatgattttttaataagtga

SEQ ID NO: 315886 - DNA, 122 bp, Homo sapiens
gacaggagcatgcgttggtgatgccttcgttttcattgctaaaccgtaacccattgttcccgctgttaactcatggacatgccgcgtttcatccacgctgaacggtaacccgttgttactac

SEQ ID NO: 315887 - DNA, 122 bp, Homo sapiens
gcacacagaccgctagccaggctggctgtttcccctacacattgatactgagtccagaaccgacctagcccctactgtctccacagcaagctcagagactttcctcagttcttgggacgaat

SEQ ID NO: 315888 - DNA, 122 bp, Homo sapiens
ctctgggaagccgctgtgagtgtgtgtggccctcaggcctgttctgtcctgggtgcgctgcgttccccaggcggcaccatctctctgcctctgtacccttgaattccctctgcctgcacccg

SEQ ID NO: 315889 - DNA, 122 bp, Homo sapiens
gtcccgcgcatttgccggcggagctccgtgcggcggatactcacagcttgctgaggctgtcgagccctgagaaggcgccgctcgtgtcctctattgtgcccgaaatctcgttatggtccaga

SEQ ID NO: 315890 - DNA, 122 bp, Homo sapiens
gcgattgtcctccccttttccccactgtttctcacagaggtgaccgcagtgacttcctgacgctctctgatagggaagctcctccacctcctcaccaggctgcctggcgcgctcagcccatc

SEQ ID NO: 315891 - DNA, 122 bp, Homo sapiens
gatacatacctcgattactgcctgtttgctgcttttgcgagcttctttcccactcggctgcgggctgagcaatggtagggacctggcttgattcctatttaagtagccagagtccagcacaa

SEQ ID NO: 315892 - DNA, 122 bp, Homo sapiens
cagcagcggcatcctccccaccctacagcgaggaggtggacgttgccccgaggggaggagcgtgtcagggtggcttccaggtgcaggttctcgcgcaggcctcagccttcataggtgcattc

SEQ ID NO: 315893 - DNA, 122 bp, Homo sapiens
tgcccagcctggtgccatccataatctccgttctcaagcttttaatactgtctcaaaaaccgtggaggttcaaactcactgggaatttacttttcagtcaattgacaacccattcaggatct

SEQ ID NO: 315894 - DNA, 122 bp, Homo sapiens
cttcccctccccactgccttcggcaagtcggagagcgcggggaggttgggttcccgggaacgtgggtgggaggactggggtgatgtgaagggggggcggggaggaagggggatgggctgtgg

SEQ ID NO: 315895 - DNA, 122 bp, Homo sapiens
ctgtgatttggtccgggcacagcttggcgtgtctctgtgctcctccctctggagaagccccgcctacattgaagggcacgtgggccggtgccgtaacttgctccacccagacctgccgatgg

SEQ ID NO: 315896 - DNA, 122 bp, Homo sapiens
ggtttccgagggtccagttctctcaccagaaagccgcgttcagccccaggcaccacagagcgctcctagctggccgctcccacaccagggctgcctgcacccgactcagcagaggctcgtaa

SEQ ID NO: 315897 - DNA, 122 bp, Homo sapiens
atgagccaccgcgcccagccaggtaaggctttttaatgtcagtactagcattaaactctacgtcattactaatcactgccttggccatatcattaccgtggcattgaaaataacattcaaaa

SEQ ID NO: 315898 - DNA, 122 bp, Homo sapiens
caggacaccgggttaaccgagcggggctgcagtgggcgtcaggagggactgcctgggggccgccatctgcctgctcttctagggccccggggcttcagtcagcctcccactctgtggccatc

SEQ ID NO: 315899 - DNA, 122 bp, Homo sapiens
aggtttgctagctggttagctttctctggggaaatgtgtcctgtcccagcggggatggtgcggtccctcgggtggttctgcgcagggaaggaaagctgggtttgtgcatgtcacggctaccg

SEQ ID NO: 315900 - DNA, 122 bp, Homo sapiens
tacggcgccatcctgggcctgcacctgctcattcagagcctttttgccttcctggagcaccggcgcatgcgacgtgccggccaggccctgaagctgccctccccgcggcggggctcggtggc

SEQ ID NO: 315901 - DNA, 122 bp, Homo sapiens
agcccattcaccgggctggagcgagacctcgcccctcctccgctcccgcctccccgccgccgcctcctctaatgagcatctctgccttgctttcaatgggccggtgctgctgtcgctgctgc

SEQ ID NO: 315902 - DNA, 122 bp, Homo sapiens
cctccctctttggtccttgacgccgagagtcttctctgtttctccgtacccttaggtcatcgtccagggcagaggttaatttagacatcttgactgcaacaactgataacacttacatacat

SEQ ID NO: 315903 - DNA, 122 bp, Homo sapiens
tcaccgctgcgctctgagccgctgggaaccaaggctggttgctaaggacgctgtgggagtcgctctgagacagacgttgctcttttacggtctcgtgaccagggcttagccaatcaggactt

SEQ ID NO: 315904 - DNA, 122 bp, Homo sapiens
accctcaaacccctgacccaattctcaaggccattccagtgggccgcctctcctgttatacggtgttggaaacctaggactcttttgacagttactaagagaggggggaatatcatccatag

SEQ ID NO: 315905 - DNA, 122 bp, Homo sapiens
agcgactgtgagcccacggctcacaccgtcggctccagtgacttccctgaaggagatgggcgatgggaaggtagagggcaagcgtcctgtgtgtaccctatatcagagaagtaaagttggga

SEQ ID NO: 315906 - DNA, 122 bp, Homo sapiens
ttgcggttcacggcgtagcctcagtttttttcctgggggaagttccagaactacaaatcccgtgagccagtgggctttcgcctgcgcacggagaagccgattctccttggcccctcagcctg

SEQ ID NO: 315907 - DNA, 122 bp, Homo sapiens
cggccagcacgggccaggaaggccgagccccagcggatttgaatcagaccccgcccccagcgccacgtggaccaccacagcctcgcccactgcagcctggctgccgtgaaatcggggcccag

SEQ ID NO: 315908 - DNA, 122 bp, Homo sapiens
ccgccatggggaagcgacagcaccaaaaggacaaaatgtaagttgagccgcagtcgggagcggcgctccactctgcctcagtgaaccgcctgtcccgcactgcgcgccgctcgccttccctc

SEQ ID NO: 315909 - DNA, 122 bp, Homo sapiens
tttttcagaagcatgccttgtttctctctgctccctccagcattgagggagggctgacctcggcttgtccccttgaagccactccccagccaccactgtctcatcgcagtcctttgcctctg

SEQ ID NO: 315910 - DNA, 122 bp, Homo sapiens
gatcagtgatatccagtcctctggccggcaggcagtgtgccctctctgcttggcatttaccgcggcctcgcctgctgtcttctgtgcgtgccgcgtcttctcaccccattcacacctagaac

SEQ ID NO: 315911 - DNA, 122 bp, Homo sapiens
gatgatcttgagattttgtaatagcaataatgaaagcccagaagacaacagatcaatcagcgctttcaaaattctaaaggaaaaattatttccaatctagatagtaccaattaagtgcaaga

SEQ ID NO: 315912 - DNA, 122 bp, Homo sapiens
ggcgggagcgatagtgtgggtgtcctcataaatgtcaccatgagtgactgacagagtaggcgggtggtaattccagtgggtgactatctcggcgacactgcgatgggtggggagccagagtg

SEQ ID NO: 315913 - DNA, 122 bp, Homo sapiens
acgtgtgtgggggagggcgtgtccgcagaccgtgggcaccagctggccttggagagcgctcggccggtcacctccctccttctcccttcttctaggaaatcagcagtgccagggagtggaag

SEQ ID NO: 315914 - DNA, 122 bp, Homo sapiens
aaccaggttgggataaagaaattgacctgagataatgtctacaacacttaagacaattatcggcagcgccgtggctcacgcttgtaatcccagcactttgggaggccgaggtgggcggatca

SEQ ID NO: 315915 - DNA, 122 bp, Homo sapiens
ccacccagccagacagcagcatctgcaggtgcggtgccctggacctgccccagggtgagccggaggcggggccagggaggggagggaggtcgccccgcccaccccagctccttcctccctct

SEQ ID NO: 315916 - DNA, 122 bp, Homo sapiens
cttgttgttgttgttgcaccacacacactgtctgaaatgcaaatcggcagcaaatcgcctcgaaggccggcgagagcagcgagaactctcagcctccgagccctgtcaagtgcagttcacgc

SEQ ID NO: 315917 - DNA, 122 bp, Homo sapiens
gtctgcagacaatgggctttgtctgttgcggctgagccctggggctgtgggcttgcaaggcgcttcctcagggtgtgagcttgttttgctgcaagttctgttttgaacacctctcttcctgt

SEQ ID NO: 315918 - DNA, 122 bp, Homo sapiens
gctcttcctcatagtcttcttcctcgtcctcccaggatccctgtcgggctgggggcgtgccgccccctgcagggtctccaagccctggcccctctgaggggtcagtctccatgtccacacat

SEQ ID NO: 315919 - DNA, 122 bp, Homo sapiens
gtcgcaccccacacccccggcgcacgctcccgccgccaccctccccgactcgatgacacacgcacacaaagacccccaggccctgcccccacgctcacgttcacgcccgcccgggtcccgca

SEQ ID NO: 315920 - DNA, 122 bp, Homo sapiens
gagcttagaatggacttcaagatgccattcttgcagcaatgtgatgagtatggagattcacgctcatgaagagcatcagctgtaagactggtatctgacaggaatttgatagagactagaca

SEQ ID NO: 315921 - DNA, 122 bp, Homo sapiens
tcgcgcccgtgcccgcgcaacctagcctgctggccggggggcggggcgagcgagccgcggcgcttccgctttacacgccccagccggcgaccggttccatctggctcgggccactctgacac

SEQ ID NO: 315922 - DNA, 122 bp, Homo sapiens
tccacactcacacctgctcacccaggctgcctggaccctgtccacacctgccacactggccgcacagcatggctgctgccgactgcggggccctgaccccagaggagctctggtggaacccg

SEQ ID NO: 315923 - DNA, 122 bp, Homo sapiens
agcgcgtgtccctggagcagcagctgcgtgagcttatccagaaagatgacatcactgcctcgctggtcaccacagaccactcagagatgaaggtgggctgggtgagcagggtagaggggctc

SEQ ID NO: 315924 - DNA, 122 bp, Homo sapiens
ggacgctgaggaggcgtcctttttcccagttctccctgttcagcctctggggagctagagcgagtggacagcccctccctccactgagtcttgccctcctgacgtgcggcgcggggcacgca

SEQ ID NO: 315925 - DNA, 122 bp, Homo sapiens
tgacccccagtctatcagagagcagatgccataatcagaggaccacaattccatctccagcgagacagatgcgaggaagggaagagggatgccctgtgtgcatctgcccgcactgcgagtcc

SEQ ID NO: 315926 - DNA, 122 bp, Homo sapiens
gtgtttgttcagggaaagggctggtaccatctttgtttcaaagttaaactataggccgggcgtggtggctcacacctgtaatcccagcacgttggaaggccgaggcaggcagatcatttgag

SEQ ID NO: 315927 - DNA, 122 bp, Homo sapiens
taaagaggcagttgggatcaccaaccttaatattaaaattctgtgattgcacagaactagcgccagattcaggtaggatgtcttcactgttatatcacaaccctcatgatatttaggtgttt

SEQ ID NO: 315928 - DNA, 122 bp, Homo sapiens
gcggcaggagcactcggccgctgcggcggagaacgggtctttgcgcgtctcgcgtagcggcgacccgtcttggctgcccatctccgacgacgacgatggcagccgctgcagccgtgcagact

SEQ ID NO: 315929 - DNA, 122 bp, Homo sapiens
cgaggagactgcttccggctcagggacgccaagtgcagcagccgacgctgcagaggctctcgcggacagggccaggggtgcccgccccatcaggacagcacctgagttatggatgacgatcc

SEQ ID NO: 315930 - DNA, 122 bp, Homo sapiens
gcttgtggggccaggcctccttggtggaggtcaccaccacttgtcaccctcatcatccagcgtgacccaccagatatcagatgaacagagacataggaaggaaggacttaccactgtgggag

SEQ ID NO: 315931 - DNA, 122 bp, Homo sapiens
cttcaaaggggggggcaaacagggaacgcgcaggtataggagcgctggctggaggctcctcgagagctccccagacacgcccccgtgcgtacgcccccgtgcgtacgcccccgctgccgcca

SEQ ID NO: 315932 - DNA, 122 bp, Homo sapiens
aggccatgacatttcatccaaagtaaataaataaacaaataaatttattgtattttgaatcgcctaccactaagaaggaagcagaaacttggcgggtctctttgggttctggaagtagcata

SEQ ID NO: 315933 - DNA, 122 bp, Homo sapiens
ttgccgaaatccgaaacgcagcgctcgcagctgcagtgacgcgacctgctcataagtccccgtgctcacagcatcccggcaacttacgagctagtgcttccgggtcaccccggcccaggaag

SEQ ID NO: 315934 - DNA, 122 bp, Homo sapiens
tcagctttggctactacacagtaaggacagccgctggagcgctacggtctgacgaacgagcgagcgctcggttcaccccaggacctgggctcacaggccgcgggccgggggaagtcgtgcaa

SEQ ID NO: 315935 - DNA, 122 bp, Homo sapiens
cagccaaagttgtagatgagatcgaggtgacgtcgctcctgtaacctgatgcccacatctcggaaggcatcctgagccatgagctggagctgctgtcgggggaggccaaggctgtgtcgggc

SEQ ID NO: 315936 - DNA, 122 bp, Homo sapiens
ggtcctgggatggggtccagggccaggcagggagggtgagggtgaggggagatgtggtgacgggagatggggtgtgggcaacgctcactgttctgtgttcctcagattcttccctctcctgg

SEQ ID NO: 315937 - DNA, 122 bp, Homo sapiens
aaacgaccttttcccttgcagcggcgggagagggcgaagtggaggactgctgctcggttccgtatccaaaagagacccaaggctccaggcaaaatagattggacattttcactttctcaagc

SEQ ID NO: 315938 - DNA, 122 bp, Homo sapiens
gcacgtcggcgcgcacggcgggacgggcgccggagtggtcgggcctggcggctggacgggcgcccctcgctgccccgcgcgctccccgccgccccccatgagcgcagccccgcgcggcccgg

SEQ ID NO: 315939 - DNA, 122 bp, Homo sapiens
gttgcccttgaaattattgaccgcacaaggaacaattaaaaatacggcattctggccgggcgcagtagctcatgcctgtaacctaagcactttgggaggccaagatgggctgatcacctgag

SEQ ID NO: 315940 - DNA, 122 bp, Homo sapiens
agatcatcttggccagacccatgaccctggaatcccagacgggcagggcagggtagggcgcgcgacctcttcccctggtgggaaggtcctcccggcggggcctcctcttcccctccccgggg

SEQ ID NO: 315941 - DNA, 122 bp, Homo sapiens
gcggcgggcggactgagcccgcggagcacgttcactgacggaccagggaggggtccgcgccgagacccgcctccgaaccaggccccacctcctgagccaggcccccgcccccgattctgact

SEQ ID NO: 315942 - DNA, 122 bp, Homo sapiens
gaaggaaaagaagaagttttgagtgccaaatccaagtagctccaaaggaactattcaaaccgtccatgtatccttttcctggaagccaggtgctctcagttaagtgtaaacatgttaccttt

SEQ ID NO: 315943 - DNA, 122 bp, Homo sapiens
aattattgatttacattattgctcttatcttctgttgtaggcaagaggtaagttcactaacgaatctcaaggaagatgtaaatggccaatgatcatgctcagaggcctgaaatctctccagg

SEQ ID NO: 315944 - DNA, 122 bp, Homo sapiens
cggcgggttgggagtctggtggagtgcgagggcagaggccccagggcgtcaggttgatggcgggcggagatctaatcaggccacctcacaacagctgaattgttaaaaaagagaaacgcaat

SEQ ID NO: 315945 - DNA, 122 bp, Homo sapiens
caggtaaaggtcacatttcagaccttttttgtaaacagtaaattataatagtaagttacacgtgaagacactgtccttacaacacatcatatcatgaccagtacagcctaagggtcctccga

SEQ ID NO: 315946 - DNA, 122 bp, Homo sapiens
ggactcagaagaaaccaacactgcagataccttgatgatgggcttccagcctctagggatcgtgagaaataaatgtctattgttgcagctccccagtctgtggtgttgtcacggtgccccac

SEQ ID NO: 315947 - DNA, 122 bp, Homo sapiens
cgctccctgctcgctcctcgcctaccagccccgcgcgcgccccagagaagttgtcaccagcgcggctggctctccggctgctcacacgccccctggcacaattgctactttcttccacccca

SEQ ID NO: 315948 - DNA, 122 bp, Homo sapiens
ggagctggtgcacacgtggcagcgcagggtaagggctggcggggagggagtccggctcagcgggcccaacagaggcctcctggtgactcagcagggcctgctcccccacctgcagagacccc

SEQ ID NO: 315949 - DNA, 122 bp, Homo sapiens
ccgcctgcgccaggtggtgcgcggggcgccggcggagcagcagcgccttctgcgggagctcgaagacttcgccttccgcggctgccctcacgtcctaggttacgaagggcccggcgaccccg

SEQ ID NO: 315950 - DNA, 122 bp, Homo sapiens
ggtataaattactctccctcttaaaatctgcagtcaaaaataaggctgggccgggcacagcggctcacgcctgtaatcccagcactttgggaggctgaggtgggtggatcacttgaggtcag

SEQ ID NO: 315951 - DNA, 122 bp, Homo sapiens
ggtatggaagaggttaaggggggcagtccggagcgggtccggtaggggccgcctactgggcgggggcggggccgcgccgagcgagcgctgggattggccgtcgggcaggcgctacgctagga

SEQ ID NO: 315952 - DNA, 122 bp, Homo sapiens
agccagcaacccagcccagccctggccacccccctcacaccctccagttcgcctctcacacggttccaaatgctctccagagccaggcaggaaacacctgtctggtggcttcctgtgacaca

SEQ ID NO: 315953 - DNA, 122 bp, Homo sapiens
tttctcagaaccccgacccacagcgttgacggaatggagtgcccttcccattggcccgagcgtcattccccgaggtggcactgcccgcctgattggctggccactccagaccccccgcccac

SEQ ID NO: 315954 - DNA, 122 bp, Homo sapiens
aggagcgtggagtgggtagtcacttgggctgcgtccctgttggcgctccaggttcccctccgcaccaactcaccagccgcggcggggagaccgcagctccggggacttctgcttcagcgctg

SEQ ID NO: 315955 - DNA, 122 bp, Homo sapiens
gaatcagacatctacagcagggacccttagcccccagatgccacatcctacatgtagggccggtcactgccctggcagttaggaggggacgggtgagagctgctgccgaaaagaggagcagc

SEQ ID NO: 315956 - DNA, 122 bp, Homo sapiens
gcattttagtgtccgagaggataattgctaagggagcagagacctcttcacaccttcatgcgcttagacctgcctagaggctcagatggctcagtggcactgctcacagagaacacaggctg

SEQ ID NO: 315957 - DNA, 122 bp, Homo sapiens
ccccactccgctactcagagtgtgtcagactttaccctgtccattcaactccagaaaaaccgggaggtctagattcggaagattaaatttacctttgaattaggacatgtaaaataggaagt

SEQ ID NO: 315958 - DNA, 122 bp, Homo sapiens
tccagatgccaaactggttttccagtctgaaaatggatctgggacatctccatcctcaaacgtctgctacccttatttttaaattgcataatctttccacctagacctaaaaccctctttag

SEQ ID NO: 315959 - DNA, 122 bp, Homo sapiens
cagcctgagaaggctctgagggatctgttctcccagggtctgcccttcccagattgaaatcgttctgcccaccgtcatcacaaacagcactgagacactcgactccttaaagttctcagatg

SEQ ID NO: 315960 - DNA, 122 bp, Homo sapiens
attcagatttaaaatagtcgaaaaaatactaaccttatcttaaagtgagtagactctaatcgagtgatattcaaataaaactggctttccagggttttgtagtgccagaatttttgttaaaa

SEQ ID NO: 315961 - DNA, 122 bp, Homo sapiens
cgaaggtcactgaaatgacacaagatcagcgaggcccagggcgctgccgctcacagaatgcggagacacggctgcctcgcgtcccttccctgacctgccccaggcggacgcggtgacgtgtg

SEQ ID NO: 315962 - DNA, 122 bp, Homo sapiens
atatctaccataccccacctggacttctcataatacttagcctagtgacttgctggatgtcgtaggctgccaatggcctccaaaattaagcccatgtcctaatccaggaaatgtgtgaatgc

SEQ ID NO: 315963 - DNA, 122 bp, Homo sapiens
aagtcggagcaagagccttctctgtgtttgcgccccttggccgctggggggcgccagagacgcggcgccctttcgcgttctggaacgtgactcctcccctccatgggcagcccggcgctaga

SEQ ID NO: 315964 - DNA, 122 bp, Homo sapiens
tgaagggcgacggcccagtgcagggcatcatcaatttcgagcagaaggcaagggctgggacggaggcttgtttgcgaggccgctcccacccgctcgtccccccgcgcacctttgctaggagc

SEQ ID NO: 315965 - DNA, 122 bp, Homo sapiens
cctttttccctcacttccttttcacactttcctgccaagtggcattatagcatcagcgaacggatcacattgagcgaggcccaagatgcttctccagcctcgatgtctcaaccctgagaatg

SEQ ID NO: 315966 - DNA, 122 bp, Homo sapiens
gagctaagatgctgcgtcaaccttggatcagctgagaatctcggatctctccagaggtgacggacaaccatgctgagaacacggattctggagcccagctgccttggttcaaatcttggctt

SEQ ID NO: 315967 - DNA, 122 bp, Homo sapiens
cgggtgcagagcaggtagcacatgtgcggtggaaatgtctgctgcaggcctcagcactctcgagagtgcatgtgcaataggcaagcactctgctccccagagaattgtcatctcaaagggag

SEQ ID NO: 315968 - DNA, 122 bp, Homo sapiens
taatatgtctatgtgtgtaaaacgtgcaagccatacaccgcaggagatgtgtgaaggacgcgagatgctttcttgtggtgtattagaacgtgcttggaaacagttctgatcccagacacgca

SEQ ID NO: 315969 - DNA, 122 bp, Homo sapiens
agtattttttctaatttaaaatctaattctatctgtctgtctgtctgtccttacacacagcgacagaaatcacaggctcttatgtgacagagaactgctctttctctgggttgctcctgtat

SEQ ID NO: 315970 - DNA, 122 bp, Homo sapiens
aaaatacagcagagagctgggcactgggccaagcttacatttcacttcggaacacactttcgcatcactccttggcagaacatccacggtggtgtctatttggggagtaagttagagaagtg

SEQ ID NO: 315971 - DNA, 122 bp, Homo sapiens
aagctttgttgtttcagtctttgcaataaatcttgctgctgttcaccctttgggtttgtgcggcttttatgagctgtaacactccccgagaaggtctgcagttccactcctgaagccagcga

SEQ ID NO: 315972 - DNA, 122 bp, Homo sapiens
gttttatatgacctagggaataaaattgatgctcaaagaagagtcctgtttgtcttgtggcgagccctgctggccacatatcctagtatgagaagctcaacactaccctgtgctgggtgttc

SEQ ID NO: 315973 - DNA, 122 bp, Homo sapiens
gctgcagtgtttattgatttgtgctgctgtgccaagggaaacacacacccctctgcctggcgtgagagttaaaaaaaaagagagacagcccgagggatcgagacctgaacatgtggtggtgg

SEQ ID NO: 315974 - DNA, 122 bp, Homo sapiens
ctgggtgctttgctaagggaatgctgtgggcgacactctccccattcctagtccttgccacgtgagatctggagtcccagatgcaccacttaattatgaagaccaatgtagatgatgtaaca

SEQ ID NO: 315975 - DNA, 122 bp, Homo sapiens
ttaaccactactttagaactgagccaaccattagtaaattgtcttatttaagaatgttatcgcatttctaagtttaagaagaacagtattaggccggagctgtggctcatgcctgtaatcct

SEQ ID NO: 315976 - DNA, 122 bp, Homo sapiens
tccaggaaagccctctggcctttgaggccctcattctcagcctggagccggctgatgttccggttcatctcggagatcttagtctttgtgcaccgcaggttatccccatgcttcccagccag

SEQ ID NO: 315977 - DNA, 122 bp, Homo sapiens
acataaacaaaatgttatcaaataatgacattcagcaaagatgatcacattcaaaatgcccgcatcccaacaaaaatggaggatctgtcacttttctcctcctctgcattcttcctttccat

SEQ ID NO: 315978 - DNA, 122 bp, Homo sapiens
ctgccgcagcctgcaggaggaggtagggggacaccctgcaccccggcgcgaccctgctgtcgtctgcccccaggcctttgtactagctggtccatctccctggaactcctttcccctcttcc

SEQ ID NO: 315979 - DNA, 122 bp, Homo sapiens
tgactgatgagtcggtcaatctgtggagaacagaaccaggtcaaacacgcaaggacatcccggctactgggagcagcggaagcaccgcctgagaagggccatggtcacctgcagtccccacc

SEQ ID NO: 315980 - DNA, 122 bp, Homo sapiens
actggccgcggccgctgcccttcccattggaaccagacaccaaatggtgtctgctttgctcggtgcctgttattttgaggagtggccctaacagctctcctgaggggtggccttgttagcct

SEQ ID NO: 315981 - DNA, 122 bp, Homo sapiens
ccttgctgccgatgccgggggcgatccccacgcaggtcagtggctgtggcgggttggggccggcctgggcctcacctctcaggccctctggggcccactgcttgtgatggcaccgggagagc

SEQ ID NO: 315982 - DNA, 122 bp, Homo sapiens
tacattggtaaagacacagatatgcactaccacaaaacatctagaatatttctttttttacgtcttcaaattctatataaatttgtaaatagagcattgccacattcctctccattgtcact

SEQ ID NO: 315983 - DNA, 122 bp, Homo sapiens
tccttttcccatggaggaagagacgcctcttttccttccgctttgcttgtcttttggccccggcgactcaccatcgtcagtgcgcaaccgttcgctaactgaaatgatggcgactggaacgc

SEQ ID NO: 315984 - DNA, 122 bp, Homo sapiens
ttcaggtgcccacaatcctccacagacccggggattgtgtctgtttgccttttaggtttgcggactgtagtgagggaaattcttgccatgtaaatgcccaggcaagggctccaggtcgggca

SEQ ID NO: 315985 - DNA, 122 bp, Homo sapiens
ggtctccgccgctggtggtctatgtctcatcaccaggctcaccgccggggctcttgcgtccgcctggcacgtgtcagctgtgggtccgggatgaagcccgggtggaagtcgagggtgttgat

SEQ ID NO: 315986 - DNA, 122 bp, Homo sapiens
tattcgacccaaattccagggaggaaacagctctcctgaggggcatcttttttaccacaacgatgatgttttgctgtcagggcctgcggtcatcctggtcatggtctccgggtgctcaccct

SEQ ID NO: 315987 - DNA, 122 bp, Homo sapiens
taatcatcgtcagcaacccacccccacggcaccacacggcagaccccagagccctggctgcgcctctctgctcagccagcaggttgccatggcaacgagccagtataagcatctccatcaat

SEQ ID NO: 315988 - DNA, 122 bp, Homo sapiens
aaatctggacatgggtgtacgccacaggaccatcaccacaattgagacagcaggcacatccgtcacccccagaaggcttctcgctcccgtcgctggcccctcctccgctgctcctggctccg

SEQ ID NO: 315989 - DNA, 122 bp, Homo sapiens
caaggttgacaaagaggcttgctgggaggcctacaacctggcgcgagatgacggcttggccgtcatctgggtgacttttaaatatgacggctccaccatcgtccgtatcgggcaaggagtgg

SEQ ID NO: 315990 - DNA, 122 bp, Homo sapiens
tttgggtctcctttcattcttgtcaggagggaatcattcccattttacagagaagggaaacgggttcagaaagatgatcatctgttccggggttagaactcagtcccctgcgtcctttccgt

SEQ ID NO: 315991 - DNA, 122 bp, Homo sapiens
cgtcatgtgctaatgatgcatcttgtaaaggactcagcaaacactgcctcatttctaaaccgctttcttaggcctgggaccaactccgtcctgtccaaacatcttgtgttaatacaagccac

SEQ ID NO: 315992 - DNA, 122 bp, Homo sapiens
gtcttgctttgtgcaaatttctttttatcccagccttctgggagagcagttggttctggccgcctcctgtctaaactcccgtggagggtggggatgtgagctttctgcgcgccagccctctg

SEQ ID NO: 315993 - DNA, 122 bp, Homo sapiens
tgtccctgatctttgggtgccaaacattgtggcgaagggctccgccggcccctacagacgcgaacttggtgccgtagtctcgagtgccctctgccgtaacttgggaaaccagcgcttcttta

SEQ ID NO: 315994 - DNA, 122 bp, Homo sapiens
gccccgccgccgagcatgctcagtgcgagccgccgccgaaagttttctggaacaaacacccgcatctggggcttggcgggccaggaggtgccggacgggcgtgggagggggagagcgagttg

SEQ ID NO: 315995 - DNA, 122 bp, Homo sapiens
gagctcaactcaaaggtttccagcctcacactcgcctcacattcccccacagtcacattgcgctctgtgattctgaggaatacagtgtgccagcatccgatccagtctcctttcacctgcag

SEQ ID NO: 315996 - DNA, 122 bp, Homo sapiens
gagtggagcgttttgtctgcggtggtgcccatttgtttggtcttttacaaaccaagtgaccggcctgggcctcgcggcccgggacagccgcattggcaaacttctatctctcaaagccagag

SEQ ID NO: 315997 - DNA, 122 bp, Homo sapiens
aaaaaaaaaaaaaaaaaatcctcccgggactgtgctcacgtgcctaacagtcccaatggtcgccctcgccttgatttttattcccctcattcagctaccattatttcctggtggccaggact

SEQ ID NO: 315998 - DNA, 122 bp, Homo sapiens
gagtagcttcgctcccagaaggcctcaaagcgcgaccaaagagcgtgacagagcgctttacgacagttgctttgaggcagtaccggaggagaaagatggcggctaccttactagctgctcgg

SEQ ID NO: 315999 - DNA, 122 bp, Homo sapiens
taggtgaaagaaaaactgacgcttcggagatggggttgcccaaagaggaagagagaacagcgattagggccttaaacctcacacccgaacaaattcggccggagttactgagcggcaggctc

SEQ ID NO: 316000 - DNA, 122 bp, Homo sapiens
accggcccagccacgccctccatgtgaccccgacccatcccttgggtgtcgcacctggcgcgcccaccgaggccactaagctctgctagctgcaccagcagcaggacctgccggcgtggcgg

SEQ ID NO: 316001 - DNA, 122 bp, Homo sapiens
actttccgtggcctccccaggacgaagcaggttttaaagacaggacttgcacgttggggccgcctgtgaagcgattggctggttgtcctcctttcccactccacggcaatgtctaagatctg

SEQ ID NO: 316002 - DNA, 122 bp, Homo sapiens
aaaaaaaaaaaaaaagcaaagcggttgcgtctttgttccgtattcagtggtttgttctcgcggttatctagcggaaaacagcctttcaggaacaaggagctgtcccttggggatcagtagaa

SEQ ID NO: 316003 - DNA, 122 bp, Homo sapiens
acgactccttggccacttacgcctatgaaggcactggctccgtggcggattccctgagctcgctggagtcagtgaccacggatgcagatcaagactatgattaccttagtgactggggacct

SEQ ID NO: 316004 - DNA, 122 bp, Homo sapiens
aggagctgacatcctttccattctttccccagagactcaaaccaacatcctacccctgggcggtgtccccatttgaccccgtttggcctgcctcttacctaccttggctgttggcaggaact

SEQ ID NO: 316005 - DNA, 122 bp, Homo sapiens
acagtcacaagaaagggaccctgtgtcctgcctgacatctggacaggtatataaagagcccgggctcagggagctccacacctgcacctccctctcacctgctcctctacctgatccaccct

SEQ ID NO: 316006 - DNA, 122 bp, Homo sapiens
acagcaccctgaagaatgagggctgcctgggggcagcaggaaggcgtccaggcggaaagccggagcagaggccctgtggcagggtgctccgcagaaatcctttcctgatgcccacctatgct

SEQ ID NO: 316007 - DNA, 122 bp, Homo sapiens
ctgggatccaaactaatcacacaagactagatgatggagagctgccaagaaaccatggggcggtggcggggacggaggggaagcgttttgagcccatcaaggcaggtgacaggaaagaagca

SEQ ID NO: 316008 - DNA, 122 bp, Homo sapiens
gtgaatgataagaaaaaaaatttaagcctccagtcactaaggacaaaatcattcctagcacgcaaaacaaacctgaatcttaacaccggtgccctttaaagcatagaaaagaaaaagcaaac

SEQ ID NO: 316009 - DNA, 122 bp, Homo sapiens
caccggggtgaggacccacccccacccaggtcggggtgcatgtgcgtgttttccaggggccgctgacacggggatggaggtgagggctggagaggtctgaagagggttcctaaagtccaagg

SEQ ID NO: 316010 - DNA, 122 bp, Homo sapiens
aggctcaatattatcactgactactactatactgccagtctttcagagaagctcttgctacgcgcctctaaaacgtaggtaacacgctaaatgtattctcgtaattttcttttaccgtggcc

SEQ ID NO: 316011 - DNA, 122 bp, Homo sapiens
agccgtccattgctcctcggtgctttccagaccctttaaacaccctggcggagccttgctcggcccttctgggtccacttggtagccgagggtccgagctgacctcatgctttccgcactgt

SEQ ID NO: 316012 - DNA, 122 bp, Homo sapiens
agcagagcttccttctggagcttcttcctcccactcttcccctccctcctctcccgggtccgggtccttcacctaaggaccaagggctgatcagttctagggaccaatggcccacagtcctg

SEQ ID NO: 316013 - DNA, 122 bp, Homo sapiens
taaatcaagtctgcattccgaattgtagttttcttctggctttttaataaaattatctatcgctgctttcgcttttgtttgcattgccttgccgctaaaatttttgagtaatgattctaatt

SEQ ID NO: 316014 - DNA, 122 bp, Homo sapiens
taaatttacgatgaggaaacagatttgtggaagttagctgggaagtgtcagatccagggtcgaaggccagcttgtccatcaccaaagccaatgctgaagatatattgtaatgagcaacagta

SEQ ID NO: 316015 - DNA, 122 bp, Homo sapiens
aaacaaatctcaaacctgaaacacttctggtcccaagcattttggataagagatattcttcggcttctatgctggacctaaattctttttattgtattttaaatgtatagatcgattcagca

SEQ ID NO: 316016 - DNA, 122 bp, Homo sapiens
cctctgtgtctcatcgtgatactttccaaacccaaactggccagcctgctctaatatctgcggtgtcctcagatagttaagctgtagaggggaagaactcaggactaggagattggacactt

SEQ ID NO: 316017 - DNA, 122 bp, Homo sapiens
ctgaggggccgctcggaccgggcggagaggagtaagggcagcgctgcctaagtgaggcagcgagagcccgcgagagggaagcagggcccgggagagaagggtcactgccgtggccagggagg

SEQ ID NO: 316018 - DNA, 122 bp, Homo sapiens
ctccgacaatggccctacgaggctgcctggcttcactgagacggcggcctgcatgcccaccgggctggcaccagagcaggaggcacagatggttcaggcagccttccgctgttgcctgggct

SEQ ID NO: 316019 - DNA, 122 bp, Homo sapiens
tcactaattttgcgactatgcagatgtaagtcattaactgctgtaaagcttcagtttccccgtatataaaatggagataaccatactaaagactcttcagaaacttcatgagaattgaaatc

SEQ ID NO: 316020 - DNA, 122 bp, Homo sapiens
aatcagatattaccaattttgcttaccctttcttgtgaccaaaaaaagtatgattcaggccgggtgcagtggctcaagcctgtaatcccagcactttggaaggcagaggaggaaggatcact

SEQ ID NO: 316021 - DNA, 122 bp, Homo sapiens
tggggtcccagctctggcacaggccaatggcaggagagttcagggatgggcacacctggccggctgaggggagcctacagccaggctggcctccccagcctcttcaagtgcagggcctggcg

SEQ ID NO: 316022 - DNA, 122 bp, Homo sapiens
ggtctctatctcctggaacccgcccaatggtccagccgccaggcagatgcttgatggctacgcggtcacctacgtctcctccgacggctcctaccgccgcacagactttgtggacaggaccc

SEQ ID NO: 316023 - DNA, 122 bp, Homo sapiens
caggcggcaggagaggatgaggcaggggctgccggtgcttgggaggagggcggtgataagcggccagcagattctcacaaatcaaagccccaagacttaaggagatagagcgccacttcatg

SEQ ID NO: 316024 - DNA, 122 bp, Homo sapiens
tttggcttattttgtgtactggggatcactatgtctccttgcaaaccattgcactgggcgcggtggctcacacttctcacacttgtaatcccagcactttgggaggccaaggcaggcagatc

SEQ ID NO: 316025 - DNA, 122 bp, Homo sapiens
tgcaaaccaccgccccgggggcccagcctgagcccacaaggacattcctgcctggggagccgcctccctgcagccccaggagcctggaggagcccgggctgctctcaggggccagggaggcc

SEQ ID NO: 316026 - DNA, 122 bp, Homo sapiens
gggagttgtagtttagaagggagagcggaacttagaacccgggttcccctcgggtgatcccgccccctcgactccccagccaatcagcaacattagtctggttagacgctctctttgctttt

SEQ ID NO: 316027 - DNA, 122 bp, Homo sapiens
tgtttcagcaattgctgtcagagagattgggctagtgctgtaggtgaatgcagtgttgggcgagagtatgatttgctgcaagtaagaagagaaaggcattgtataattccagctgggatcaa

SEQ ID NO: 316028 - DNA, 122 bp, Homo sapiens
agcgaagaatgcctgttggaagattccagacgttttcggaccaggagggtttgggctgcccggagagaactcatgggtcctccgtgcccaaggagagcctgagcagacaggacagctcagaa

SEQ ID NO: 316029 - DNA, 122 bp, Homo sapiens
agtcttggccccaccggtcacgaccccgctcacggagtctgcgcaggcgccgtcgcggggcgtggagaagctgctcccttgggataaggcccgcggggaatacttggaaccttgacaccgct

SEQ ID NO: 316030 - DNA, 122 bp, Homo sapiens
gctgacccaaaggacagccattgtgctccaagcagcatgagcagggctcaggggcaccatcggagcaaggataggatcggagggtgtggaacccgagagtttcccaggaatggggtgaagga

SEQ ID NO: 316031 - DNA, 122 bp, Homo sapiens
ctgcagactctcagggctaaggtcctctgttgctttttggttccaccttagaagaggctccgcttgactaagagtagcttgaaggtaagccagtggggaggagggctccagggccagcggcg

SEQ ID NO: 316032 - DNA, 122 bp, Homo sapiens
tacgacacggacgcaggcccagtgttcgtcaaagtcaaccgcaggacgcaggtgctggcccgtgcgcaggcgggggctctgcgggtctctgcggggcctgggaaggcggaggggtcgggggc

SEQ ID NO: 316033 - DNA, 122 bp, Homo sapiens
aggagcccctcaccgcaggaggcccacaacccctcccagctgcatatcggctcacattcacgcggctgccacacaagtgcgtcggaaactccacttggctgaacgtgattgtgctgctgtct

SEQ ID NO: 316034 - DNA, 122 bp, Homo sapiens
gctcgtctgtgtcctggaacatatttataagcctatgttaatttctggactccggaatggcgcctcttccaatcccagccctcggtcagtctctccggatagacttgggaagtcaggtcgtt

SEQ ID NO: 316035 - DNA, 122 bp, Homo sapiens
atagcccagagcctgcccaaattatttgaaatagccaatcctacactgtttctcctgccccgccttgtttttcccaaggcaaccgcaataaacgctgtggcctgggctttcttctcaccact

SEQ ID NO: 316036 - DNA, 122 bp, Homo sapiens
gccatttttattccacaccatctggataggcctctagttgacttggacttctgtgctcttcgatctagtttgtgtaagtacttcaccatcctgcccaccaggacggagcttattgctgcaaa

SEQ ID NO: 316037 - DNA, 122 bp, Homo sapiens
gtgtcacgagatgccggcgagtggagacagaacactggaaggagcagccagccaagagaacgaggccccgaggaagggagagagcaggcacgcagcggcgcggggaggagcggcatggaccg

SEQ ID NO: 316038 - DNA, 122 bp, Homo sapiens
ttatggggcaagagggggagttcgaagaccagccgcatgccggggggttgcagggggcgccggggaatgtgggatctttaaatatgggcggggcttgcggggtcgtcgaaggcggtgccaac

SEQ ID NO: 316039 - DNA, 122 bp, Homo sapiens
ataggttggatagattaaatcagaatgatccttgctgatatttgtaaacgtggagtcatacgtggtgcataagaactgtaggtccagaattcaagtctcacacttctgcaatgggatccaca

SEQ ID NO: 316040 - DNA, 122 bp, Homo sapiens
cccctcctttctgctgacggccggccgcgccaataattcattttttagctcattagctaacggaggctgtgaacggtgatcctcccggggattggaatgaggggaggtgatctactgccggc

SEQ ID NO: 316041 - DNA, 122 bp, Homo sapiens
gattgcagcctctgcctggccgccaccccgtctaggaagtgaggagcatctctgccccgccgccctgtctgagatgtgaagagcgcctccgcccgaccgcgacccaatctgggaactcagga

SEQ ID NO: 316042 - DNA, 122 bp, Homo sapiens
gaccacatggtgttgtgtctgggataagtgtgtgggggcagggaggttggaagaatgacacgggctcaggacacagagtgaggactcatgtctaatgagcaccggccaaaacttccatcttc

SEQ ID NO: 316043 - DNA, 122 bp, Homo sapiens
caatccccccacctcaccctcccaaagtgctgggatgctgggattacaggcgtgagccaccgcacccggtctgtagcctttaataatggattttaaatgtgtgtaacattttaaaatgtgct

SEQ ID NO: 316044 - DNA, 122 bp, Homo sapiens
tgggaattgaatttacaaaatacattgtgtggtgatgcaatagaaagctcataattggaacgagattgagatggtatattcccggagaggaagtctgggatcccggctcctgctgctctggc

SEQ ID NO: 316045 - DNA, 122 bp, Homo sapiens
gtggaggctgaaaacccgggtgttggccttggcgtcaaagtttgctggttgagtgacctacgcaagttaagccctctgatctttatgtgacttacatgttaaatgagaaccagtcctgctct

SEQ ID NO: 316046 - DNA, 122 bp, Homo sapiens
aatacgagaacgtattttattaacggaaagaatgcagatttgaggacccgcccgcgcgctcggagcgccccactcggggaagagtcccggcccgcgtcccagtcgcgactgctccgccgccc

SEQ ID NO: 316047 - DNA, 122 bp, Homo sapiens
cattattgttctgcctccaatactgagaagacttaaacagagaagaattgaaaatattagcgacaggatgtaattagtcagacaagggaggactatagttgaaaagtttgtctgaaaatgtc

SEQ ID NO: 316048 - DNA, 122 bp, Homo sapiens
ccaggagttcacttaagctctccacctaccttgctatatctctcctccctgactgggtaccgcctgccggcggggcgagcgagccttttcattggtcttgccctcagggccccctctctctt

SEQ ID NO: 316049 - DNA, 122 bp, Homo sapiens
tagcagctttcttcggagcccgggtaccccaagtggcaacttaggaactgggagaaggaacgtgccaccaccgaccacctatcctggtgggaggaggtactgctcccccctactcctccctt

SEQ ID NO: 316050 - DNA, 122 bp, Homo sapiens
ccgcgccccctgcgctgccaacccgcgagcccgcatcatggatgtcgagctcccctatttcgcattgctagccctggaattcgagaccccagacgaggaccaggattcatgaaatcagtcgc

SEQ ID NO: 316051 - DNA, 122 bp, Homo sapiens
acgccaacggaagcaggaaggcggttccggcaagccaagggggcgttgtcgtgatgattccgcggccagcggatcgctgcgagtggccttgaaggcagctgctgcaggtgaagagtaggcgg

SEQ ID NO: 316052 - DNA, 122 bp, Homo sapiens
aagctttgatttagattgagtaagatttacccagaatgtcagattcctttccctttagcacgtttaaagttctgtgtatttaattgtaaactgtactagtctgtgtgggactgtacacactt

SEQ ID NO: 316053 - DNA, 122 bp, Homo sapiens
gcattctggggtgtgcagtctctttggttagggacagtgtgtgagggttgggggaagaagcgatgccatgggaacctgtgctttaaaacagctctttgggaggccgaggcgggcggatcacc

SEQ ID NO: 316054 - DNA, 122 bp, Homo sapiens
atctgcttggatcatattgctcagagcctcgtccacctgcttcttggccgttttcaggtccgcaatttcctgtaagagcttaaggcgctctgtgtcaaacagtttccgggcctcctcccggg

SEQ ID NO: 316055 - DNA, 122 bp, Homo sapiens
ctgctcgctggccatggaggcaggacacctctggatggaaaatgagcctgtctcggagagcgacccctggtggatggggagctttcctgcacttcacaaacatcactaaaggtgaatcccat

SEQ ID NO: 316056 - DNA, 122 bp, Homo sapiens
tccgttaagcgccgcccagccagtcctccccgtcacagggggcgctgtccgccttcctctcgcctacacaaagaccccgctctcgaatctggggtgacaggaaggagccggtccaggctccg

SEQ ID NO: 316057 - DNA, 122 bp, Homo sapiens
tatcatgagtcaataatattactgaggaatttttttgttttgtttttagagatggggtctcgctctatcacccagggtggagtgcaacggcacgatgatagcttactgcagccttgacctcc

SEQ ID NO: 316058 - DNA, 122 bp, Homo sapiens
aaagtggtgggattacaggcctgagccacggcaacttgcctcttcctatattttcttttacgcttaaataaattacttaaacatattgcttgaatcccgttattaaagttgacattagttaa

SEQ ID NO: 316059 - DNA, 122 bp, Homo sapiens
gcagtccaggcccagcctccttgctgctgcacttagaggagcagccgcagaccagacatccgggtccctctcatccaacccacctgcctcacatcctcaggattcaaggtctgctgtgtcag

SEQ ID NO: 316060 - DNA, 122 bp, Homo sapiens
gatgaggccgcccaggaacagcatgttggtgtccttcatgtactggacacacacctggagcgtggcacgaaggcctcatcaggactgtcccttgccacacactagagccacccagtccccag

SEQ ID NO: 316061 - DNA, 122 bp, Homo sapiens
gggctcccgggtccctaaatgaaaccaccaacctgccctcccgcgattatataaaggagtcgcctccaccccgctgcgctaggggcgtcagcgggggaaggggttggcgaggggcggggagg

SEQ ID NO: 316062 - DNA, 122 bp, Homo sapiens
gggcgaggactgggaggccaggggttctcggcgaggcggtcccaggaggcggcgcggagccgctgcgaggccgcagggccgggtcgcaagatggccgggccggcctcccgcgcgggtcgcgc

SEQ ID NO: 316063 - DNA, 122 bp, Homo sapiens
tcagggaaagcttgggccggaccctttgggtttagggctttgctgggcgggcctagtctccgctgcgagtaggcccagcgccgtcggttcaagaggtaggaccacaggccaggaatactcct

SEQ ID NO: 316064 - DNA, 122 bp, Homo sapiens
tctttctttctttctttttctttcctccttctctctttcaacagagcctcactcagtcatcgaggctggagcgcagtgctacaatcatagcttactgtgcctcaaactcctgggcccaagca

SEQ ID NO: 316065 - DNA, 122 bp, Homo sapiens
ggttcttgtctgtgttgcgggtaattgttaccgcaggattgtccacgccactgattggatcgattgtcacttggccacccccatctgccgtccctgcctctgaactgtctgctatcttgcaa

SEQ ID NO: 316066 - DNA, 122 bp, Homo sapiens
aaagctagagccaaggctgaaacccaggcaggctggctccagcatgctcatctctatcatcggcctccatcttcttccagcctttgcaagggtggggctggctgcggggaacccctggggag

SEQ ID NO: 316067 - DNA, 122 bp, Homo sapiens
cccctcaagagtctgccccagctcccgaagacccctcctcctccacacactcacagtctccgaagacacctggaaggcctggtgatgggaagccaagagggctgatcccagcccaatgcaat

SEQ ID NO: 316068 - DNA, 122 bp, Homo sapiens
atgagagtgcgagagtgcatcttgtgttggccaatgagaacagcgacccgtgcgcagggccgcccaatggggcgcaagcgacgcggtatttgaatcctggaacaaggctacagcgtcgaaga

SEQ ID NO: 316069 - DNA, 122 bp, Homo sapiens
gggaagatttcgttgcagcgaagacgcacaaagtctcccacgtggatttctttccagaatcggttcacgtatttcttttcttccctagaaaacagattttgattaacaaaactcacgagaca

SEQ ID NO: 316070 - DNA, 122 bp, Homo sapiens
cgccccgccccgccccgcgcccgcgcccgcgcccgggttcccacggcgcccgcccccgcgcgcccggcgcctccctcacgcccgccctccttgccgcccagccggtccaggcctctggcgaa

SEQ ID NO: 316071 - DNA, 122 bp, Homo sapiens
aatctattaactcatgtggaaatggttatatggcccacatcagcctttcattgaagacaccgtcttgattttatgcttaaaagatatacagatagtagcagatttggacagcagaaatatat

SEQ ID NO: 316072 - DNA, 122 bp, Homo sapiens
gctctgcagaacaccggcaaagaccctgcccttgctcaaatcaatgatagaggcaggactcggcactgccctgttctttcttactgctgccaaggccttgaatcgtacaggccacctccagg

SEQ ID NO: 316073 - DNA, 122 bp, Homo sapiens
caggaatgaaggcttccagccattggactcaggagaggaagttagagcagaatagattcccggagagtagcttttcctggcaagtcccagagtctccacagggtgtttccttctctatataa

SEQ ID NO: 316074 - DNA, 122 bp, Homo sapiens
aggttgcctgcagagacacagcaagaggtggggtgcgtgactcacatgtgctatggtgtgcggcttgggcagagggtgcaacccacagcaggagctccaaaacaccatgagggtgccgagtt

SEQ ID NO: 316075 - DNA, 122 bp, Homo sapiens
gatgcgggaggcagataataaaaagccaaatgggcgccaggtggaggagtgagctccgcacgttccatcaggtggcccgggccgcgcgctcgggcggcggcagagtctctggggcactcggg

SEQ ID NO: 316076 - DNA, 122 bp, Homo sapiens
cggcaggggccaggcagagggctgggagctggcagacgtcctcctggcatcacccacactcgcggtttctgcatttgcacgcccccgccctctccatctgcatacttctagacatgtctgct

SEQ ID NO: 316077 - DNA, 122 bp, Homo sapiens
agtctttgggtcttcatttctgaagactctcatgtcacagaaaactttaattaaataaatcgttatgcttttctcttgctaacctttttctacaggcatgtcagctgtgatccttatgatgg

SEQ ID NO: 316078 - DNA, 122 bp, Homo sapiens
aagctggctactctatcaactatacagttgagatttaggagatgctcgttttcaggcagccgtcaaccagcagtgcagactgtgcttcctgagagagaagaaacttaggagataaactccca

SEQ ID NO: 316079 - DNA, 122 bp, Homo sapiens
cgccaacgtgggcgccagccacgccagcagggtcaccgtccttcccaaggacagacagctcgctagccactcctgtggagagggcgtggttaagccatatattttgccaactatcccagaag

SEQ ID NO: 316080 - DNA, 122 bp, Homo sapiens
ggagacagagccaaatgccggggcaggcagggcggagctcagagggcggtatcagaggcacggggaaggacagttagaggcggagcctagctgagctcggggcgggcttggaccccgggggt

SEQ ID NO: 316081 - DNA, 122 bp, Homo sapiens
acacgcgatagcttaggatccatgcacagcctgtgcagtgcctcatgtggggctggcacacgcctgggatcccggagcattggtgctggggaaagcctgccctgaccacgtctgcaccctgg

SEQ ID NO: 316082 - DNA, 122 bp, Homo sapiens
tctggttgaactccagcttcgtctgcaacatactgtgtgacttgggcaaattatttcccccgccccgttcctgccagctttaaaacggtcatcagtggggggtgctgcgtatcccctttcac

SEQ ID NO: 316083 - DNA, 122 bp, Homo sapiens
ggatgtagtgcagttcctcctgctccgccgcgccgccgccggctcgcggcccctgactggcgctaggccccggactcgagtccccgcaacccccggactcgctcccaaagtccgagttgatg

SEQ ID NO: 316084 - DNA, 122 bp, Homo sapiens
tggcggcgaataaggttcctcctgctgctctcggtttagtccaagatcagcgatatcacgcgtcccccggagcatcgcgtgcaggagccatggcgcgggagctataccacgaagagttcgcc

SEQ ID NO: 316085 - DNA, 122 bp, Homo sapiens
ggaagcaggctcggagcgccgccagcgcatgcgtattggggatctgaggccagcgtcttgcgccgccattgcggggaggctgtcctcagagcaggtctggcgcgccggtggctggaccggcc

SEQ ID NO: 316086 - DNA, 122 bp, Homo sapiens
acttaacatatcctgcggggaggaggagccccaggggtgctagtctggactgctgggactcgggcccctggggcctcagagggaccccggctgccactgacatatgaagattatggttctgc

SEQ ID NO: 316087 - DNA, 122 bp, Homo sapiens
gtgctttgttttcaagtaattggctaagcactgagtaaaatcagagacttggccagaatacgactgcatggcacctccctcttgaggtgacatactaatcttgagggacatagtccttagag

SEQ ID NO: 316088 - DNA, 122 bp, Homo sapiens
aaaatagccaaattaggtatggcccttcccctctggccttagttcttctgcctttgtgcacgttcacttacttgagatgacttagttgagtcatctcaagtaagtgaacaaatgctgggcca

SEQ ID NO: 316089 - DNA, 122 bp, Homo sapiens
ccaaacgctttaaaaccaccagatctcatgagaactcccctcgtgatcaggacaacagcccgggggaaaccgccccatgatccagtcgcctcccaccaggtccctccctcgacacgtgggga

SEQ ID NO: 316090 - DNA, 122 bp, Homo sapiens
ttccgacgcccctgaccccgcatccggaggcggccggaagtgtcgccggcctcctcccggcgcagcctccgggcctccagtgcaatcactacgccctggggcccggaaaccgttttccggtc

SEQ ID NO: 316091 - DNA, 122 bp, Homo sapiens
agaatcccctgtcctcatttcctccagcccgagccaggactgcaaacaagggggacagtacggaaacccaacactctagcgcccaccccatagtggtcctggacacagcgagagttggggtc

SEQ ID NO: 316092 - DNA, 122 bp, Homo sapiens
tcccatcctcctgatctctgggcatagaaagccctctcgggaagaacaccgcaaatcttccggtcctgcagcctcacagctgcgtctactccgctggggggctcggggaaagaggagagtcc

SEQ ID NO: 316093 - DNA, 122 bp, Homo sapiens
agccgggtcaccgcaagacggatcccgccaggcctctccagcgatgttctgcctccctcccgcatctgagcctctgcacatcccgcaggcagcaaggcagagagccccgacgcgccggggca

SEQ ID NO: 316094 - DNA, 122 bp, Homo sapiens
agtcggagcccgagctgatcgagcggcagcggctggagctgcggcagcaggagctgcgggcgcgctacaacctcagccagggcggctacgaggagctggagcgcgtcgtgctgcgcctcaag

SEQ ID NO: 316095 - DNA, 122 bp, Homo sapiens
tattactcccatccagaaccagacacctgatttgcagggtccagtgcaaactaaaaaaagcgtggccccttgttcatacatgtattaagaatttcaagccgggcatggtggctcaggcctgt

SEQ ID NO: 316096 - DNA, 122 bp, Homo sapiens
gcacaaggtcagggaggatcttgcattcctccctccgtccctgttccctggggcagctcacgtgaatgggcacccatcctccaacctgatagcgctcctcggcagccctcggttcatccccc

SEQ ID NO: 316097 - DNA, 122 bp, Homo sapiens
tttgtgaaattcatccagactgtcacaggcagctgtagattgcttccatgcgttgctatacggtattgtgttgcatgaatacaccacaatttatttattcattctactgttgatgggctttt

SEQ ID NO: 316098 - DNA, 122 bp, Homo sapiens
gttgctgggtcaccagtgggggttgcttgaaacacaaacagtgcacctctaggcctgccacggagaggaacggtgcctttgaagcacaaaaaaaaaaaaaaaacaggaagggagggcggagc

SEQ ID NO: 316099 - DNA, 122 bp, Homo sapiens
ctctctctaggctgaacctgagctccggttgctaggaggcgggtgtggcccgtgggctcccgagcgcgcgcgcctgggaccgctccgggggacccgccaggtttgtctttagtgctgcaggg

SEQ ID NO: 316100 - DNA, 122 bp, Homo sapiens
ggggaccgctcagctccctgagggcgcagccccccctggtcgggggggaataaacttccgcggttttcagtgacccagtttgtggcacggcacaggttgaaaagttaaaatctgagcgcgtt

SEQ ID NO: 316101 - DNA, 122 bp, Homo sapiens
gggcgccggcggggacactgctcccccgcaggtgagtagctccgactgcagagggggactcgggccgctgcacctccggggccccgcggagagcctggggggcagcgggtccggctctcccc

SEQ ID NO: 316102 - DNA, 122 bp, Homo sapiens
tctgaatccaaatgcaaaggagtttgttcctggggtgaagtacggaaatatttgagtagacggggccctcttttggtggatgtagcacaatttccacactgtgaaggcagtattagaagact

SEQ ID NO: 316103 - DNA, 122 bp, Homo sapiens
ctccaaaaaaaaaaagagctctgggagggtgacaccagccagaggggaaaggaaggcttccggaaggtgataatgcctatgagcggtgactttgaggacaactaggaatgaagagtatccca

SEQ ID NO: 316104 - DNA, 122 bp, Homo sapiens
cggtgccgccccagaggcgtcctcggcccgcgagttctgctgggagcggggaggccccggcgtctcaggtgagtccccggttccctagaccggccggacacccgaaggccgcactcacctgg

SEQ ID NO: 316105 - DNA, 122 bp, Homo sapiens
acaggaaacgtaacatttttccttaactgcgcctctcttcttaggccttaaaggggtccccgtgtctctccagtctagagcctaagttcaaacgaggcgtataggcgaggacagcaggaagg

SEQ ID NO: 316106 - DNA, 122 bp, Homo sapiens
cagtgcactttgttggaagcgaaagcagccagaccacagcctccatgctttcaattaaaacgagcatcatcgatacaataagttatttagcagtttcgagtgcgttaatatttacttacgac

SEQ ID NO: 316107 - DNA, 122 bp, Homo sapiens
cttccttctcactctctcggcccttgacttctacaagcccatggaacatttctggaaagacgttcttgatccagcagggtaggcttgttttgatttctctctctgtagctttagcattttga

SEQ ID NO: 316108 - DNA, 122 bp, Homo sapiens
cggcgcaggggcggaccctcgctgacttctgccccggaagtttttctctcagttgaagcgcgcacattgagtcggcttttctactgcttcggctagggtaccttgtgaccatgtcttccaag

SEQ ID NO: 316109 - DNA, 122 bp, Homo sapiens
tcttgggagtcaagacatccaggttcctgtgccagcggccagatggggccctgtatggatcggtgagtttccaggaccctcctcaccacccaccatgctcctcctatatgtcgccctcacag

SEQ ID NO: 316110 - DNA, 122 bp, Homo sapiens
gtgcgctaaagcagcccgaactctctgatgggctacacctctgattggaggtgatactggcgctcctcaatcccaagagccttagatagaacccataagcctgaaagaattgccatccctac

SEQ ID NO: 316111 - DNA, 122 bp, Homo sapiens
tggtgatttttattttagggacaaaagaaagctactgaaatattttaagcaagaggatgacgtgatccaatttatgcttggaaaagatctctttggttgcagtgaggtatacagattggagt

SEQ ID NO: 316112 - DNA, 122 bp, Homo sapiens
cgacagaaccagcaagccagaaaggtatgtcctgttttgcatggctgatggtgtgtcttgcggctcacaatcaggccgccttgctcccggctcctccacttcctgcttctctttctctttcc

SEQ ID NO: 316113 - DNA, 122 bp, Homo sapiens
gacagcctgcatggatccgcagatgtgctgggcgcttagatgcctgcggctatgcagagacgcagtccagagaggtgaccccagatcctggtgggggctggatcccagggccccgacatccc

SEQ ID NO: 316114 - DNA, 122 bp, Homo sapiens
gtccggagcttcgcgggaggcccggagtcccgagagcttccctgggtgacagcggctctccgcccgggcccctgcaactccactcgcccgtagcccgcgcgctgctgtcctgggctgcgcgg

SEQ ID NO: 316115 - DNA, 122 bp, Homo sapiens
tctatctatcccaaaactattttcattctcctaccccttcagccgcgctgcaatctccatcgccaccaccaaccgcagcaaggcgagttgcgccgcagtgctcaacaggaaagtacggaaac

SEQ ID NO: 316116 - DNA, 122 bp, Homo sapiens
atattaacaagtatatcaacactaaatccaatcacttttcactcctctcctgccaccacccgagagccaccctctcaagaactgtaaaccagaagggctttccagctgggctgcctgctgcc

SEQ ID NO: 316117 - DNA, 122 bp, Homo sapiens
cccgccctttgcggcccagcccagacccggaggcaccggagtcctctccccaccctagggcgtaagaccaaaaaaacgccaatgccagaaagaagacactgcacatgcgcagaacgtttccc

SEQ ID NO: 316118 - DNA, 122 bp, Homo sapiens
ctgagtgtgtgccaggagtgtgctgcctgcctgccggtggctttgggcagccctctgcaccgtggctggaactcatcgtcactgcattgggacgttttcatgacgacgtcagaacgaggaaa

SEQ ID NO: 316119 - DNA, 122 bp, Homo sapiens
taatgtacagttactctgtaccacgtcctgggctgggcactgcagttcctgggaaaatgacgcagtccaggccctttaggggaagcctgggaagagggaactcagggggattgggaggatgg

SEQ ID NO: 316120 - DNA, 122 bp, Homo sapiens
aaattacccagattaatcaatagagaacaggccagcagaacagagagtaggagagaaaaacgctattcttctaactgtggctgtgcaataatattgcttattattgagcatgatatccaaac

SEQ ID NO: 316121 - DNA, 122 bp, Homo sapiens
agatgggggtctcactgagcaccgtggctcacgtctgtaatccccaggactttgggaggccgaggcgaggggatagcttgagcccaggactcgagacgagcctggacgacatagcaagactt

SEQ ID NO: 316122 - DNA, 122 bp, Homo sapiens
tcaaaggtgatctcattcggaaacaggtctttgttgatctcataatggtaaggatggggacgaggccatcctggatttgaggggcctcaagtccagtgagagtgtccttgtaagagacagaa

SEQ ID NO: 316123 - DNA, 122 bp, Homo sapiens
agctgtaggttccaagaacaggcaggaggggggagaagggggggggggttgcagaaaaggcgcctggtcggttatgagtcacaagtgagttataaaagggtcgcacgttcgcaggcgcgggc

SEQ ID NO: 316124 - DNA, 122 bp, Homo sapiens
aatcaagtcacagtgcttccttaacccaacctctctgttggggtcagccacagcctaaaccgcctgccgttcagcctgagaggctgctgctagcctgctcacgcatgcagcccgggctgcag

SEQ ID NO: 316125 - DNA, 122 bp, Homo sapiens
gcaggggtggaggggaggctgcccaaaggatggcgcccggagactcgaaggccgcgaggccgcgtcatcccgcacaggcggccggggcagatgctcagtgccagccaccccaagctctacgg

SEQ ID NO: 316126 - DNA, 122 bp, Homo sapiens
caacatgacttacagcctgaaccctttgcactcaacctccccacctaccactgtcccctccggcatcaaggctcctaactggaggaagaaaccactgggacctaaagccggccgagggtggg

SEQ ID NO: 316127 - DNA, 122 bp, Homo sapiens
agtcccacgctgagaggacctctcctgtgtgctggggtcatttggagcaagaggtgtgggcggtcgcgccgagacggtcacctctctttcccccgggagtctcggcgttgcacctgagcgtg

SEQ ID NO: 316128 - DNA, 122 bp, Homo sapiens
gcgctccctggcaagtggggcacagccagcagggcataagggacctcgcatggatgtagccggggaagggggaggagatggagccacgtggggtttagtgcttggagacgccccaggcgggc

SEQ ID NO: 316129 - DNA, 122 bp, Homo sapiens
tgccccggctggtctcaaaatcctggtctcaagttatcctcctgccttggcatcccaaaacgctgggattacagacttgaaccaccatgtctggccctctccaaaatttattctccagtttc

SEQ ID NO: 316130 - DNA, 122 bp, Homo sapiens
ggttccagcgtcctccaggtggcggcggcggacgcggacgagggcaccaacgcggacatccgctatcgcctgcaggacgaggggacccccttccaaatggaccctgagacgggacttatcac

SEQ ID NO: 316131 - DNA, 122 bp, Homo sapiens
tttagatataaaaagacgttattaatacattgcacagttttcaaaatttaaaaacaaaaccgaacgctgctctgcggcagccgccgccggttgctgctacatgaacggtcccagccgaggcc

SEQ ID NO: 316132 - DNA, 122 bp, Homo sapiens
ttgtggagacagggtctccctgtgtgttgcccaggctggactcaaaaccctgagctcaagcgagcctcccaaagtactgggattgcaggcaggagttactgtgcctggccaccatttaattc

SEQ ID NO: 316133 - DNA, 122 bp, Homo sapiens
actttgtaagttgtgaaacactccacagatacttatttttgtgattgttttgtctggagccggtgtgattagcttccccagacctcagaaaacctgtccagtgggcgtgagaaggcattagg

SEQ ID NO: 316134 - DNA, 122 bp, Homo sapiens
ctgaccaagatgctgggtacacgagctaaaggaatccaattcactatcccagggttgcatcgcagtggatttcatacaggccaagaaaaaacaaaaacgtttttaagcctccatcctcagat

SEQ ID NO: 316135 - DNA, 122 bp, Homo sapiens
acacaactggtttgtttttgctcacctaacagcgctctttggttgaacgcgctaatgaaacggaccccttcctactctttcagcagttaagcgggcccgagactctaccaacttcaaaaact

SEQ ID NO: 316136 - DNA, 122 bp, Homo sapiens
gctttagtttcttccaggcgagttcgtccctctcctgtatcttcagatcagcgtggagctcggccagcctcacgggaggaagatgcagctgcgaacgaaggggaggagcctgtgagccacga

SEQ ID NO: 316137 - DNA, 122 bp, Homo sapiens
tatgctttcttattacccaacaagaatgttctcgggagtgttgttgcgatgactcgcttgcgagtgatctgacggaaggaagggcggctgaggaggagaggaggagggagcagagcttgcct

SEQ ID NO: 316138 - DNA, 122 bp, Homo sapiens
tcaggtgcaagcgatccttccacttcagcttccctagtagttgggactacaagtaggtcccgccacactcgactacttcattcatatatatatatatttgtgtgtgtgtgtgtgtgtgtgtg

SEQ ID NO: 316139 - DNA, 122 bp, Homo sapiens
gcatttagcacagtgcctggcatatagtaagcacacaataaatacttataataagaaatccgagagaggttaacagtttccacagctagggatagagcagggattcatccccaggcctgtct

SEQ ID NO: 316140 - DNA, 122 bp, Homo sapiens
agcttgaacttggatgttccccagaggcagcacagggtcagatgagcttttcaagataggcgtgattggtctttcccagggttgggcccataacgaaaggcagttatagattaatgggtaat

SEQ ID NO: 316141 - DNA, 122 bp, Homo sapiens
gtcctttacgcatatgtttgtctgtcccactgtctctaaccaggggccttccttgcacctcggagcaaagcagctcggatagcgccacacgtctgcgcgctgcgtgggaagggcagggctga

SEQ ID NO: 316142 - DNA, 122 bp, Homo sapiens
ctgcacaggcagaatcatctggcttctgcaaagcagtcgcgcagcgctgtagggtgaggccggcgtgggaatctagggaaggctggaggcaaacaccgcaggaggaggggaggggaggggag

SEQ ID NO: 316143 - DNA, 122 bp, Homo sapiens
gaacacactagcacacacagacacaaacctgcctgcctgagcacacatgaagacacacaccgcgtagccatacaaaagaacaaaattatgtgctttgcagcaacatggatgcggctggtggc

SEQ ID NO: 316144 - DNA, 122 bp, Homo sapiens
ccctggctcccaatctgtgatggatccgaggatggcactgcctctccaacagccccagcccgcagcactgacttcatcaggtaatcaaaattattttcttaccccccagctaagcagcttga

SEQ ID NO: 316145 - DNA, 122 bp, Homo sapiens
aggtttcttgcacttttctcctttcgcttcatccttctctggctgcttccctcatgggaacgttggtttcctcttagcaatggctgtttcagtagaaacccctgacccagactcctttacag

SEQ ID NO: 316146 - DNA, 122 bp, Homo sapiens
ccccagccattcacagacccatcgctgatgaacttccactttaactcatcccctgggatgcgcagctcgctggaccagtcggaccactctcggcctgcgggaggaaagcgcaccccggggtt

SEQ ID NO: 316147 - DNA, 122 bp, Homo sapiens
tgcaagtccctaccctggttcctcataggctgagtactatggggttacagtcttccccaacgttgcctaagtttcattatccccttataaggttacatcttgtctccttccccactttaagt

SEQ ID NO: 316148 - DNA, 122 bp, Homo sapiens
ctcgctgccgccgaggctccccccgcccggcgcgcgcgcaggcaccgcacccggcgctgccggccctcctaactcccgggtgatgggaactaggaattagttaatgggggtcagaatcccgg

SEQ ID NO: 316149 - DNA, 122 bp, Homo sapiens
cctaggtctctgctgagcagaacgcagctccgccctcgcggtgccctgggcccgcccgcccgggtctgtgctgaggagtactctgctccaccttcgcagtacccccgaagtctgtgcagagg

SEQ ID NO: 316150 - DNA, 122 bp, Homo sapiens
gcgcactcagatttttagaagaagaaatctggagaggacgtaagagagagaaacagcgcgcgctcagatttttagaagaaatctggagaggacataagagggagaaacagcgcgcactcaga

SEQ ID NO: 316151 - DNA, 122 bp, Homo sapiens
gatgaggggaaggctgtctacctgaagctggacttgctggtggatggtgtgctggccctgcgctgcctggaggaattctcagccactgcggcgagttccctcgggccccagctccgcctctg

SEQ ID NO: 316152 - DNA, 122 bp, Homo sapiens
acaagagtgtgagccctctgtcacgcccggacagggccaccagaggggtccctggtctagcggtagcgctagcgcctggcaaggcaccagttacttagcagacggggaaagggagtctcctt

SEQ ID NO: 316153 - DNA, 122 bp, Homo sapiens
acatcagaaggaatgagaagtctgattggtcgcaggcctggccaactccttgccctcccccgggcaccactgtctaacccaagccccagttcagacagcctccaccagagtccccacctttc

SEQ ID NO: 316154 - DNA, 122 bp, Homo sapiens
ttcagaccattcccagtgccttcctctccctcccagccctgggccctcccagccgccctccgcgcaggcagcctggagccacctccaggagggctggccgccactgtaattacaggcgcctc

SEQ ID NO: 316155 - DNA, 122 bp, Homo sapiens
cgcgaccggatacctggcaggggtctaggaaagacccctctggctgctgcggggccagtgcgtgcgaggctcgaccccactccattgcgtgggggggctgagctaggtccgtgaagcggggc

SEQ ID NO: 316156 - DNA, 122 bp, Homo sapiens
gctgagtggccccccaggacctccccgggagcaacagcaagtgtcccagccccaggacatcggccctgacctgacctagagaggggggcagctgcctctcctggatctgcagtggacaggca

SEQ ID NO: 316157 - DNA, 122 bp, Homo sapiens
actcattttataaaagggaacttgctctcaaggcactgaaggtgacattggtgtgggggacgcgggagccaggcaagagtgatgtcacgttcggacctccgtcctgacactccatcctcaca

SEQ ID NO: 316158 - DNA, 122 bp, Homo sapiens
agactggcattgattgaaagaatgctggaaaagcatcacaagccagggcagcaacatcttcgaggtcgtccttgctccgatgatgtcacacctcttcgtctgtctggaagacatttccccaa

SEQ ID NO: 316159 - DNA, 122 bp, Homo sapiens
aggatgctcggtgaggggtggtggagccgtagagcaaacatccttcgagagccaaatgtgcgtgacctttgacctttccccttcaggagtgtacagtgagggaatactcgggtaagcacaga

SEQ ID NO: 316160 - DNA, 122 bp, Homo sapiens
attcattctccttgtcattccatacacatcgggaagctgtgttcatggcactgaggcccccgcaaggaagaagacagacacaggtctcttctcgtgtagcatgtattctagtgtgggaagaa

SEQ ID NO: 316161 - DNA, 122 bp, Homo sapiens
gcgcgggtcgggggccggacgccgagcgggcaatgcggctgacggagagtgaaagtgcggcggtgggaggcgcgcgccgggcgctttagaggggagagccaggcggggcggggcggggcgcg

SEQ ID NO: 316162 - DNA, 122 bp, Homo sapiens
tcccccagctcaccctcaacgttgcgggggctgggagcagagtgcggctgcctcccctgccgctagcttcggaagagtggcctcactgaagtgcctctcatcattactgaacgaaagtggtc

SEQ ID NO: 316163 - DNA, 122 bp, Homo sapiens
ggataggaatgccacctgcacacagaggaggatttggaatgtgtttctaaagcagtgtcccgaggacctggggtctaaccataaaaactaatgaaagccatttggctgagctgggatgttgg

SEQ ID NO: 316164 - DNA, 122 bp, Homo sapiens
ttccaggttaaatttctttttaaggtgatcagttgagttttaaagtcacttttggagcaccgtgaagagcaagagactctttagaaatgatatttcttacctgctcacaggttgtaggtata

SEQ ID NO: 316165 - DNA, 122 bp, Homo sapiens
ctcccagaataagcaacagctttacttccacacaggtgcacccacctgtggatcccctggcgctgaacatctgttggaaagctcaggtgtccttgcgtggtcctttccacgttggggaaagc

SEQ ID NO: 316166 - DNA, 122 bp, Homo sapiens
cgtgattgtaaatattgggaagctctatgtctggggaagacagccctgatctgcagtgtgcgctgacttccgtggtgttaatacccccaccctggctcatttcaagctgctgacatgacgtc

SEQ ID NO: 316167 - DNA, 122 bp, Homo sapiens
tccgaggcctcaggctgcttcctccccgggggagacagcgaagggcctggggcattgggccgggcggcgggaggggaccccggctgtgcggacccttttcctggacaaatgtttactcccac

SEQ ID NO: 316168 - DNA, 122 bp, Homo sapiens
tttatgagtcaactcctccaccagaagcgctgtttgggagttgaaacgaaataatgagctcgggtcacaagcttttccacgaacctttcatcctggagaaaaaggaaagtgctcagggagcc

SEQ ID NO: 316169 - DNA, 122 bp, Homo sapiens
ttctatattaaactcaaacgtgaaccagactttacagtggacctaaggcactctctggaccgtcaactgacctctgagggaggccacatatttgaaaaaaaatcagtttttccaaatcactg

SEQ ID NO: 316170 - DNA, 122 bp, Homo sapiens
gaggggaagctgatgcccgtggctggaggacctcgtgtcgtacctagagtcccttcaggacggccgactgccagccatgggccacccgggagctcaccccacagccccgcctcggtgcccac

SEQ ID NO: 316171 - DNA, 122 bp, Homo sapiens
ctatgagtaataatccatcatagatgtacacctgtcaagcagtgctggacacacactgatcggggaccctgttcttcagagtgataaatcaaacagccagttactctcttttgatgaaatgg

SEQ ID NO: 316172 - DNA, 122 bp, Homo sapiens
ccaactagggacgttgggctgggaactgtccaatcaggcacacagctggactggacaaagcggcttccgggatatggcggggcctttgtctctcgctgtcgccggagtcccaggtctgtctt

SEQ ID NO: 316173 - DNA, 122 bp, Homo sapiens
cccaccccccggccggcctcgcgtgccttcccgcagcactgccgtccccgggatgctgagcgcccaccgtctccccgcagccccctcatgcccggctgcgagctgcccgtgggcacctgccc

SEQ ID NO: 316174 - DNA, 122 bp, Homo sapiens
acctggataccctcgtaagaaacgtgggatggagtagcctgaggggtgcaaaagagcttgcggcacaactacgtactgataagtttattctctgctgcttctcaaagtcgagttggggcctt

SEQ ID NO: 316175 - DNA, 122 bp, Homo sapiens
gtgttgggatgctgtgctctgtactccccggggtgactgtgagcactgggcttttctccacggtgactgagctgagctccaggcttgccggaggaagactatgggaaggcattagaacctac

SEQ ID NO: 316176 - DNA, 122 bp, Homo sapiens
caggctcgggcgcagactgcgagccgccgggcaggttttcgtagtagtcggcgtcgtagtcgtcttcgtccttgtcgtcttcctcctcctctccgctgtcctcggagccctccggggagtgc

SEQ ID NO: 316177 - DNA, 122 bp, Homo sapiens
acaagtccagccctcgcgcctggagatgatgacagagaaaccgagtcagcccccacgtgtcgagcttggagtgagccagagactccttcccacagatccccacgtaaacattggaaaactca

SEQ ID NO: 316178 - DNA, 122 bp, Homo sapiens
ttccacgattcccgctgttgttattcgggttctgcgcagacggaaagttcccattgttggcgtccccctcccccgggccccagtttgtggccagcttcggccaaggcgagagaccggacttc

SEQ ID NO: 316179 - DNA, 122 bp, Homo sapiens
atggacaccgcccatccagcccactgcggctcggctgcagccatctccacagggaataatcgagggggccacaaaaaagaaaacacagctccctggagcagggaagcctgcactctgctgta

SEQ ID NO: 316180 - DNA, 122 bp, Homo sapiens
ggggatggggagggggccgggaggaggcgtgcggctctgggggcgcgcactgcgggagcgcgcggtggcgaggatagggcgggccggggttcgcggggcgaaggcgcgcggtgcccggggga

SEQ ID NO: 316181 - DNA, 122 bp, Homo sapiens
cgggcggggccgaacgtggtataaaaggggcgggaggccaggctcgtgccgttttgcagacgccaccgccgaggaaaaccgtgtactattagccatggtcaaccccaccgtgttcttcgaca

SEQ ID NO: 316182 - DNA, 122 bp, Homo sapiens
gggaggtgaggggcgcctctgccgggccgccccgtctgggaagtgaggagcccctctgcccggccgccaccccgtctgggaggtgtacccaacagctcattaagagcgggccatgatgacga

SEQ ID NO: 316183 - DNA, 122 bp, Homo sapiens
gagatgccatctcaaaaaaaaaaaaaaaaaaaaggatgagaacattgcccgcctcacaggcggttatgagcatgaaatgagggagggagcacagttacattcttagagcaggttcttggcac

SEQ ID NO: 316184 - DNA, 122 bp, Homo sapiens
gaagagatcctcttgctttggcctctcaaattgtaaggggatcgcaggcctgagccatcacgcccaccctcccccaaattaaaaaatgtgaacatatgcagtgttgaaaaggtgaggaaaca

SEQ ID NO: 316185 - DNA, 122 bp, Homo sapiens
tccgggccaatcccgaacacatttactttgagcgggaaaagctcagaagcggcgagagagcgtggtccgctaaccgccccttcctctccttgtctctggggggtaacggagcctggagtggt

SEQ ID NO: 316186 - DNA, 122 bp, Homo sapiens
ctgcataggaagcggagcctccagacagaacccggaacctgataccagcgaggctaagaccgagctcggctccccggctcctgagagaatgaaagtcaagaagcacgaatctgagacgctca

SEQ ID NO: 316187 - DNA, 122 bp, Homo sapiens
caacctactctacagatgggactcccaagacactacggggatcccctgtgtgccaagtcccgggggaagctgctagagaaggctgggacgtccttgctcacctctggcagggacagatcaga

SEQ ID NO: 316188 - DNA, 122 bp, Homo sapiens
aagggtgcatgtggagctcaaatgaaaaccccaccccagggggatctgctctctgaagcccggcaggaaacatagggaaacgggtcttcaccatcacctggagctggggcaccccatcgggt

SEQ ID NO: 316189 - DNA, 122 bp, Homo sapiens
tccctgaagccccaggactgatgtcaaagccagaaggccactctgaaaacgatgcaggcccgattctgcctcatttacatttcagcccgcctgccttctgacttgtgcagaggaatgcatcc

SEQ ID NO: 316190 - DNA, 122 bp, Homo sapiens
catacacatcagctaaaagaaaaactccccaaagcagtactcactcttaccttgtgtaatcgtgctgatattttccattctgttctgagccatgacatgccattgaattaaataaatggtag

SEQ ID NO: 316191 - DNA, 122 bp, Homo sapiens
ctatgaggaagaggccaaatttagaaaccaaggaaaggagagcttggctggagctgatggcggctcatgggattgtgaagagattaaaaataacactcgtgcatgtgaaatagcagaaacaa

SEQ ID NO: 316192 - DNA, 122 bp, Homo sapiens
ggtgcgtcccctgggtggaggtgcaaccgtttccaccccgccagtccatgctctggatgccggtcactgcgcggggtgggaggccgggcgcccactccgagtcctggagaacggcggtgcca

SEQ ID NO: 316193 - DNA, 122 bp, Homo sapiens
ttcccagagtgtaggggggccgggcagaggcactcctcgcttcccagagtgtaggggggccgggcagaggcactcctcgcttcgcagacgggacggtggctgggcagaggcgctcctcactt

SEQ ID NO: 316194 - DNA, 122 bp, Homo sapiens
gaaaaatggaggctggtctagtggaggcaaggccccaaatgagtttacctggtcgtagtccggagcccagcggtcatagaaatggagcttttgggccaggtcggggatgccatgcgcggccc

SEQ ID NO: 316195 - DNA, 122 bp, Homo sapiens
gggccgccctcagaggaggctgtcgctgtgggtctgagtcccgcagcccttctgaaccaccgtgttgcgtggcctgtggggatgctgtggcgccttctatgtcatccgtaagaatgcgaaac

SEQ ID NO: 316196 - DNA, 122 bp, Homo sapiens
gggccgccggggctgccgcagcgtggagcgagcgggatggggcgtgggccgggcctcaggcgcaggcggccgttggcggttggagaagggggaagggtgagggacaggaacctggggggagg

SEQ ID NO: 316197 - DNA, 122 bp, Homo sapiens
cttaaatgcattagcttttcttccaaacctcttccttgttctcctgtattaatgtatatccgtataccaagtaactgggactagaaatctaggaaccatccttaactcttttttctcatatc

SEQ ID NO: 316198 - DNA, 122 bp, Homo sapiens
cctcatgcccctacacgctcttgccggtctagcctttcattgcctgaagcacggcgagaacgcctggagagctcgtccaagcaagtgcaacccgctggtgactgcaaatgagcacatggaac

SEQ ID NO: 316199 - DNA, 122 bp, Homo sapiens
tactgtttgtgaatatgcacgtgcctgtgtggacgagggtgtcactgctctagggctggccgagtggtcactctgtggctgtctttccgggagctgctcaattcttcccatagttgctgccc

SEQ ID NO: 316200 - DNA, 122 bp, Homo sapiens
agccggcaggattccggctcccgcggctgcaggcgcgcggctagagtgcctggcgggctccggcttccgcgtccgccccggccccggtccagacttagtcttcagctccgcgcccgctccgc

SEQ ID NO: 316201 - DNA, 122 bp, Homo sapiens
aatgaaacatgctcggaggaactaaagaaagctccaagtacaaaactctttagaagtctccggggttgcatggcaggcctatttacaagagggattagttgttttgaggaagaacaaaggcc

SEQ ID NO: 316202 - DNA, 122 bp, Homo sapiens
ttgggtaaatactcccatttcaaaagggagaaattggccaaaagtaaggggctacgggcccgatgcaagtctgaaagccagtagggaagttattaagtcttaaagcttaacaatctcctttg

SEQ ID NO: 316203 - DNA, 122 bp, Homo sapiens
gctaagtaccagtgacattgcgaagaaatccggcttctccggggaccctggcctgcctgtcgggcctcttgccctcagcctggcttcgttatgaaatcagacacactcgcagctgccacaga

SEQ ID NO: 316204 - DNA, 122 bp, Homo sapiens
tgtggaccggccttcgcctccggctctgcctctgcctcacgcctcgtcctgcgagtctcacgccagctgctctgtggctatgatgatggctgagcatatggacgcactggtcaaatatttgg

SEQ ID NO: 316205 - DNA, 122 bp, Homo sapiens
caggatttcgtctctgagtgacagaatcaggcagcattctcaatgacccctaaccttcgtcgtactgtagatgatctagctttgtatctgcacatctttgctcctccttttatccttctttt

SEQ ID NO: 316206 - DNA, 122 bp, Homo sapiens
ttcctctgagtgaggtaagagctattagggctctgagtagaggaagatcatgatctgaatcgagttctaacaggctcccacagggtcagatgttaccatttattaaatatttactgagtgcc

SEQ ID NO: 316207 - DNA, 122 bp, Homo sapiens
cagaatttactccctataacccctctcttattctaatcccatccctttccccgtttgtcccgcaaaccccatctccaaagccgatttcacgttgagctcaagttggcctttacaaactgact

SEQ ID NO: 316208 - DNA, 122 bp, Homo sapiens
cagctccggcccggggctagtgcgtgttgacgtcatgctgcgtgcgggccggtgcggaatcgctccttcaactccgcggggcagtaggagttagttagcaaagagccgaggccgggcgcgcg

SEQ ID NO: 316209 - DNA, 122 bp, Homo sapiens
attttttccacaaatggtagtggagcggaaatcatgaaaagccttgtaaagatggcaaaccgatctagtgtagctttgacaattctgtgactgctgttacaaggggaaataatagagttaaa

SEQ ID NO: 316210 - DNA, 122 bp, Homo sapiens
taaacaggatgagaccctcttcccggtgggctggagtgattagacaactttacaggggtgcggagtaatacttcaaggtgtgtgctagagagagcatgtctggggtggcatttcagaagtta

SEQ ID NO: 316211 - DNA, 122 bp, Homo sapiens
tcgagcgtggaaaaggggctggggtcagcactggggccctctgccgggaagagagactggcggccagcacacgcgtctccccaggctgaaatggggcaccctctcgcggcccttccctccct

SEQ ID NO: 316212 - DNA, 122 bp, Homo sapiens
ttggaatccggtggcatcttaaaggacggaattgagggcaaggagaagattattaatccccgaagcccgctctgtctatatataactgctcagtggttacagttggcgatcgcagggtgggg

SEQ ID NO: 316213 - DNA, 122 bp, Homo sapiens
tttttaaatttttggtcgtgcacctggcttgtccccgagcgtaatattcttcaatggaaacggatctaataggtgtgagtgtgtgtgtgtcctatgctcgcgtgtgtgatgggaggtataaa

SEQ ID NO: 316214 - DNA, 122 bp, Homo sapiens
caggcctagagccccttgctcacctgcaggttgagcttctgtaaggacaagtgaggccagcgccttggcagctgctggtgcctgccatcccacccacagccagcaccagggcctaggtccca

SEQ ID NO: 316215 - DNA, 122 bp, Homo sapiens
acggccggcttaaaattgattttaatagcaggaaatttcctggatctaatcctcaactgacgttgctttgctccggcaggatcccagtttgcagagggctgagctgctccagcctcactgcc

SEQ ID NO: 316216 - DNA, 122 bp, Homo sapiens
tgtggcaaggtgagatgacagatttccaggcaagggctgccctggtggcctgcacctgcacgtgtgggcttcaatgtgcaatgtccactccccatttgcatcctccacccacaaaacttcat

SEQ ID NO: 316217 - DNA, 122 bp, Homo sapiens
aagattctttaactgaggtggttaaatggccctgaaaagagcctttggagacaaagcagccggcgacccgcggagggagggagggagggagcgagcgagcgccaggtcccggcagggactca

SEQ ID NO: 316218 - DNA, 122 bp, Homo sapiens
tggtcctgcttgacacatgggtgggagtggcctctggttgtcccacagccagttgttcttcggggacacccctcctgcagctccgtggctgctccagggctgaggagccaggactcacagga

SEQ ID NO: 316219 - DNA, 122 bp, Homo sapiens
cgtcacccttctctattttcacaggccctaaagagctgaagggttacgccctgctgccaacgtgcttaaaaaaagaccgtttctgactctgtgccctgtccctgagctcgtgggagaagatg

SEQ ID NO: 316220 - DNA, 122 bp, Homo sapiens
ctccatgaagggacgcttgcacaaagtgaagcccaggtacaaagagcccgacgggaaacgcggccgcgctcgctccgctgcactcgcagcgcgggcaggaagccttttcctcaccttcgcct

SEQ ID NO: 316221 - DNA, 122 bp, Homo sapiens
ggcgcccggaggctaagccgctcggaacctagctgcgccacgcagggtaggcgacgcagacgctcccgcgtgacgcacttccggtgcttgccctgcccatccccgtggcgggggcgtggcca

SEQ ID NO: 316222 - DNA, 122 bp, Homo sapiens
gaattcagaggattcaggcaaatatcttaggcagaatcatggccgtcctccgagccctaacggcatttgagatgtgtccagtgggagtaatgttcccccagctcggcctccacgcaaggagc

SEQ ID NO: 316223 - DNA, 122 bp, Homo sapiens
caaaactctccaacagagttgagaaaaaacagcccaagagagctgccagagacaatacagcgattccatcccaggcatgattggaagggctggggcagggaagctacgaagaccccagaagc

SEQ ID NO: 316224 - DNA, 122 bp, Homo sapiens
gaggctgtggggctgggcccacgtagctgcctcccaccgctgaggcaggggctcgagccgcgatttgccaaggatgacacatttctcatggaaccggacgtggttctgcgtgacttgcaggt

SEQ ID NO: 316225 - DNA, 122 bp, Homo sapiens
tgctcagaggggccagggcagcaggaatctaggaagctacaggtccagtactggccaggacgtaggactgtctgctccatggctccatgttatggcccatgacagagcatggcccagctagc

SEQ ID NO: 316226 - DNA, 122 bp, Homo sapiens
gagtctggggacaataatgtctcactgttgtcaaatgtccaagccccatgcccagcctctcgccttccctgactggcaaagggctttgcaaaaagtgcctggaagtgaagggttgacagtaa

SEQ ID NO: 316227 - DNA, 122 bp, Homo sapiens
ttgcttctttgtcagggtgccaatggaaacatgtggtgctggtcctgtgggagaagggctcgcacaaaggtgggagaactgaggatgggtgtgttcttgctctacgttttgaaaagcccggg

SEQ ID NO: 316228 - DNA, 122 bp, Homo sapiens
tatttatttcaaaatgacattataggctccttgattgcgaaattcacccacaatccatcacggtcagctacctatttactttccagtgtgttgggggaaaaatatgaggaagatttctttcc

SEQ ID NO: 316229 - DNA, 122 bp, Homo sapiens
cgcccgccctagtcgggtccccgccccaaccccgcacctccacccggccggcgcccttcgcgcttcaggtgccagatcaaaggcgacgctgctttggaccctatttgcttcccctttaaaaa

SEQ ID NO: 316230 - DNA, 122 bp, Homo sapiens
caggtttccggctgtgagctggctgcttctttctgacttcccccttcttcctcccaccctcgccctggtaggcttagatttcttagggttctaaaatcagtcaccacttactcatttgcttt

SEQ ID NO: 316231 - DNA, 122 bp, Homo sapiens
tactaccccagggctcggtccttttgccggaagaaagggaggggtctgtccgtctgtgggcgaggcctggagccacaaacccaatcactggactgaatcaccccgcggagaagaaaagaagg

SEQ ID NO: 316232 - DNA, 122 bp, Homo sapiens
ccctgctgcaaaacaagagaactggattcagggctgctgggtccatccaggcctgagattcggtgagctcagaggagcacagcttggtggagaagacacactggagctggtttctaaaactg

SEQ ID NO: 316233 - DNA, 122 bp, Homo sapiens
gcgcggccgcgggctggcgggcaggggcgggcgctgttgtttccgcgagcccaacttgggcgcaggttccgcgccgcggcgccggagcctgggccgcagcccgcggggccggccggggggcg

SEQ ID NO: 316234 - DNA, 122 bp, Homo sapiens
ttcctgatttttggggggcatccaagagtctctctagttgcatcctcacttcccccaacccggagttcaagggtcaaggtttgcaaggcactattcctggagacagggacagctctctgagc

SEQ ID NO: 316235 - DNA, 122 bp, Homo sapiens
gcctctctggagccagttccaggtaattctcttagcccatttcctcaggatgacctccaccgacaggccactcttcttccgccccgctgacgccccaggtggagggagcatggccacctccc

SEQ ID NO: 316236 - DNA, 122 bp, Homo sapiens
atctttacgacagcttacaggctggtaatgctcatgtccagcgtgttttctcacggttagcgtccaatggaccagaaaggagcaagtgaagctctccacactggcgcaagtgtaggtggtgc

SEQ ID NO: 316237 - DNA, 122 bp, Homo sapiens
ttcgtacacctacacaacccatgcgatttcccttgaaccatgactaaccagctgtctggacgacatccagggcgagtcacaagaggcttgggaatcctgggaggctgttttcaggttagctg

SEQ ID NO: 316238 - DNA, 122 bp, Homo sapiens
gccggggggactggggcagaggggtctggctcgtcatcctgcccactggccgctccactgcgcagccctgccacatgcagatcacttgggccagcggaagtgcccctggctgcccgccccta

SEQ ID NO: 316239 - DNA, 122 bp, Homo sapiens
tgcatcctgggttagcatccagggtcctgcctgctagctctgcaggggccgccgccttgccgcccgcatcctgcatgagtgacttctctttgccgaatgctggaggtgcaagggatgttcat

SEQ ID NO: 316240 - DNA, 122 bp, Homo sapiens
gcgcgggcccgggctggggctggggagcacgggccggcgggagcgcgggcgcgaggggggcggaggggggttcttgggcggcgcagcgggccggggcgcgctgcaggccaggcagcaggagg

SEQ ID NO: 316241 - DNA, 122 bp, Homo sapiens
ggctactttcagtttccaagaataacatcttattgcattctcggacagggatgaatactgcgtcctcacatggtgaaagggatagaaaggataaatttgccctctcaggtccttttagaggg

SEQ ID NO: 316242 - DNA, 122 bp, Homo sapiens
caggcctcagctgcctccagtttactgcatatgactgcaattgtctttgtctcctttatccgcttcactgtgtctcattttcctaaagtatctggcacccacttttccacaacattgttcct

SEQ ID NO: 316243 - DNA, 122 bp, Homo sapiens
taatgctcttagggcatccatgagttgagaattagaaaatgaaggtaagttaggagaaggcgaggaccccagcagtaaatgctgaggcagagcagctgtcagttaatgttctatacctgttg

SEQ ID NO: 316244 - DNA, 122 bp, Homo sapiens
cccccacctctgggccctctcccccggcaacccacataagaagccagcaaatgcacctctcgttgttgaccagaaggggtcactgcagagcaagtagcgctctcaggcactcaaataagcgg

SEQ ID NO: 316245 - DNA, 122 bp, Homo sapiens
ttctgtgtaaatcattattgcttattcttttgttcatcttgctgatgttactacaagatacgtctgcaaagatgagttctgaagactaaatatggagggaggcacagcccctgggtctctta

SEQ ID NO: 316246 - DNA, 122 bp, Homo sapiens
tggacagtccacataaggcgactccacaactgtaactgtaaccaagttctgaatttggttcgcttccttatgccccttacaaaagcctttgctccaagcacccacaaaccatgactgggcgc

SEQ ID NO: 316247 - DNA, 122 bp, Homo sapiens
gggagagatccagagagggggagaggtgggggagaggagcaatggagcagaacctgagaccggagaggcaagccaggaccgctatgatccttcttaaaactagttttgaaaatgttcaaact

SEQ ID NO: 316248 - DNA, 122 bp, Homo sapiens
tcccaagccctgggaaattatcccagtattgtctgcctcatgtccctggcaaggagaaaacgtttctttatcttatacccaaaccagaaatggggaggcttcccacgttcttctctttgctg

SEQ ID NO: 316249 - DNA, 122 bp, Homo sapiens
tgagtaaatatggttgaataaatttaagcagtttagaaaaacaaagttccttacaaatgtcgggtattagtattaaatccccacccacggtatctaataatgggttttgcatttacttgctg

SEQ ID NO: 316250 - DNA, 122 bp, Homo sapiens
gcatcagcagctcctgggaacttgctagaaatgccaattctcaggcccaccccagaaactcggagtcagaaactctggggatgggactccgccatttgtgttttaacgagccctctgggtga

SEQ ID NO: 316251 - DNA, 122 bp, Homo sapiens
cgcgggcccgtaggtgtggagcggggcgcggagggatccgtgggagccgcagtgcggcggcgcgcgggccgggtggggcggggccgagcgaggcggggcgcgcgcggcggccgttgagggac

SEQ ID NO: 316252 - DNA, 122 bp, Homo sapiens
gcactgactcttggaaagaagaggggggcctgggagatccaggttggaaggatcttgtttcgctctcccattggcccccaacactggcctcatggcccccttactggctccaggcatccccc

SEQ ID NO: 316253 - DNA, 122 bp, Homo sapiens
ttaagccggtctgaaaagcgcaatattcgggtgggagtgccccgattttccaggtgcgtccgtcacccctttctttgactcggaaagggaactccctgaccccttgcgcttcccaggtgagg

SEQ ID NO: 316254 - DNA, 122 bp, Homo sapiens
aaattaggccctgtcgtgccattatgggggtggtcataccctgtacccaggaaacaggcacggtagggctgagacagaagtcctgcttgtttccgcttatttatttgaaacaccgctcattt

SEQ ID NO: 316255 - DNA, 122 bp, Homo sapiens
ggccccctgcgtgagcgcttctgtgggatgtttaagctctgccatagccacgtggtgaaccggaagggaagccgacacgtgcagtagcctacagtcagttacccagccatgggacccataca

SEQ ID NO: 316256 - DNA, 122 bp, Homo sapiens
aaaataataattaaaactccctcaacttttaaggccgagcaacataatctattaattggtcgctattaacatgcagttttattgaccatagcacacagaagtctgattgtgagggaggagtg

SEQ ID NO: 316257 - DNA, 122 bp, Homo sapiens
acacacaggtgagagaccttttaagtgcgaaaactgtgggaaaggattcgccgacagctccgccctcattaagcaccaacgaatccacaccggagaaagaccctacaaatgtggagagtgtg

SEQ ID NO: 316258 - DNA, 122 bp, Homo sapiens
cagtatttattatgctcctactatgtgccaggcactggttgtaactgccatctgattggacgatccgtaaacgctgaggcccagtctgtgcggttcacttgcgttcctccacgcgcccccca

SEQ ID NO: 316259 - DNA, 122 bp, Homo sapiens
atgagcctggtgcagtggctcacagctgttattctggcactttgggaggccaaggtgagacggttgcttgaggccaggaatctgaaaccatatgggcaatatagcaagattctatctctaca

SEQ ID NO: 316260 - DNA, 122 bp, Homo sapiens
catatgttccttcccttagtgacagacactaggcttaaccttacttttcagctgcagctgcgtccctggtgtgggtatgacctagtcccaaatacagatccacagtacaacgcaatcttaaa

SEQ ID NO: 316261 - DNA, 122 bp, Homo sapiens
aggatccggtttattctgccttggcagggtggtcctgagagtggtgggtgccaccctgtccggggcggagagagggcccgagggccagttaaggccaatggcgggagaagcagggggctgca

SEQ ID NO: 316262 - DNA, 122 bp, Homo sapiens
ccacctcggacagtgacctccttgatcttcttggttttctcactgatccacttctcccggcgggctttctcggtggcgctcattaattctttgagttttttaatctcctacgagcagaacag

SEQ ID NO: 316263 - DNA, 122 bp, Homo sapiens
ggaccttcatgccaaagctgtctcacagcctctgacactgccatggcatggatctgttgccggaacacaaccttatagataggaaaggtcagaaaagtagacataaagttggaaacggcccc

SEQ ID NO: 316264 - DNA, 122 bp, Homo sapiens
atggcgaccgagttggagtacgagtctgtgctgtgtgtgaagccagacgtcagcgtctaccggattccgccccgggcctccaaccgcggttacaggtactaaccccgaggcgctgccgcaca

SEQ ID NO: 316265 - DNA, 122 bp, Homo sapiens
cgacagcgttaacctgtcagctatgggaggaggcggtgcgaggcgcgggctggtcggagccgcgtaccacgccccccggcccgggtggaacgaggacaggtgctgccctcccgcggccgctt

SEQ ID NO: 316266 - DNA, 122 bp, Homo sapiens
gatgattaaggctcccttctgacccccactgcaggagttgtaggtctgaactcaagaagacgggtgggctaagaaagcgaatggaacccctgcgtcctttccccagccgaaagaaacaggga

SEQ ID NO: 316267 - DNA, 122 bp, Homo sapiens
taccctacccgggagttcaggcgctgcgcctggccctctggggcgtgtttgaccataactcgcaccgcttgctcttttcccatttcagcaaagtcttgagcctgtattctagtaccttttat

SEQ ID NO: 316268 - DNA, 122 bp, Homo sapiens
ggaatgtctctactatttcctgggatttctgctcctggctgcaagattgccacttgatgccgccaaacgtgagtaacccttaatttctatgtttaacccattctctggccattggctgaaat

SEQ ID NO: 316269 - DNA, 122 bp, Homo sapiens
ggatcaaggtactggggatgccgctagggtcaggcccgcgagcgcggagaagacagagcgcggcgcaaaagggaaagtggcggggccgccacgcgcggccgggcggcggatgtgcgcaggcg

SEQ ID NO: 316270 - DNA, 122 bp, Homo sapiens
catgtgcctccagggagccacagcaccctctaaagagagcaacaccaaatcagtgataaccgatcgtttccttcaaccagagttaaatgtctgcagaatgcccaccaggcatggtattacag

SEQ ID NO: 316271 - DNA, 122 bp, Homo sapiens
tgtaagtgcccaggcatgatggtggctcggcggcgggttcctctacggattgcagcgggccgcgccgagccaagagcgcctgcttcagctcttcccacaagatggccgggccaagatggaag

SEQ ID NO: 316272 - DNA, 122 bp, Homo sapiens
agaccccaaaccccaaaaaacaaagaaaccgccagaaactgaagcttccacagcccgccacgtcccccggctacggctacgctcctgattggatagttagtacggcccctagtgcccctgat

SEQ ID NO: 316273 - DNA, 122 bp, Homo sapiens
cagaatagtacatcacacacacacacacacacacacacacacacacacacacacacacctcgttatataaggcagcatgttctgacttctgaggcagaatattcattggtttaaacaaatga

SEQ ID NO: 316274 - DNA, 122 bp, Homo sapiens
tccagaaaaggccagagctggggactgagttgctgagctcacaagtgaccccacccctgccggatgtgcaggaatcagcaggaagatgcatcgatcgccattggcagctgggccacgtggac

SEQ ID NO: 316275 - DNA, 122 bp, Homo sapiens
tggcagggcgtttgggatgaggtttgaaatcccgctgggtcctttcccttctcaggagaccgcttgggccttgacctggccaggagacccctccccacgctcatggacccgaccacccacag

SEQ ID NO: 316276 - DNA, 122 bp, Homo sapiens
tctcgatctcctgacctcgtgatccccccgcctggcctcccaaagtgctgggattacaggcgtgagccagcgtgcccggcggacaccttgaattcttaaaccatttgagtcttgaaagatct

SEQ ID NO: 316277 - DNA, 122 bp, Homo sapiens
ctcaaaatgggcaactcattaagcgtattttgttcctggttccgccgcaggtcctggccacgccatcggcaacctgctcgtcttgtccgtgaggccttcccagctggccgggctcaccccgc

SEQ ID NO: 316278 - DNA, 122 bp, Homo sapiens
tgtttccacagagtccttgttctgctaaggcactggtggaggggtaactgtggaggactccgtctgagctctgtgtgccacgtcatcataccaaagtggagctagaatggggcagacacatg

SEQ ID NO: 316279 - DNA, 122 bp, Homo sapiens
ttcagttgtcctcactgtggcaagagcttcatccgcaagcaccacctaatgaaacaccagcgcatccacaccggggagcggccctacccctgctcctactgtggcaggagcttccgctacaa

SEQ ID NO: 316280 - DNA, 122 bp, Homo sapiens
catttttagtagagatggggtttctgcattttggtcaggctggtctggaacttccgacttcggatgatcctctcgccttggcctcccaaagtgctgggattacaggcgtgagccaccgcacc

SEQ ID NO: 316281 - DNA, 122 bp, Homo sapiens
cgggaggagccttaacaagcgcacggagccctcaaggtagtaacgcccctggtgcctcagcgctcagcgggtcgcgcgtcgcgtcgccgctttgcggggccggccgcaggcggacgcgggga

SEQ ID NO: 316282 - DNA, 122 bp, Homo sapiens
ccttcccgcggccctcctagggcctgggtgcttggaggctcgaggccccaagatccatgtcgcccggaatcccggtgcctaggccttgtcgcgggccctgggaccaactcgcgggggtcagg

SEQ ID NO: 316283 - DNA, 122 bp, Homo sapiens
aacccaaacccttatcccacatactgaaaaatcaatggtttttgcaaacgagtcttgatgcgtatagctgactgcatgttcatgtggatggatgattaagcatcaattgcaggttaggtttt

SEQ ID NO: 316284 - DNA, 122 bp, Homo sapiens
tctgcagacacagtccttgtttatgcaaaggacacactggagcactggggctggcggggccggggtcaccaggttctctgcgctgggtcagttgagctttgccctgtgcattcaatttttct

SEQ ID NO: 316285 - DNA, 122 bp, Homo sapiens
ctgtggtagttctattcccctacattctgcctgtctcctctagccaacatacctgggtgtcggtctgtgccagcaattgagtcaccaatgtgattgctgtttgactgtgttgttcctgcaag

SEQ ID NO: 316286 - DNA, 122 bp, Homo sapiens
tacacgaaacaggaagggtgactgaagatacgcgcaacagcgaatacaattttgcaaaaccggcttctaggtatggtaggatcatttaaatccgtcagtgatgtggagaaagaacatggagg

SEQ ID NO: 316287 - DNA, 122 bp, Homo sapiens
tccagctgggagggggagggtcactggatgtggagggaggggttcagccacagggccagccgggccctgccttccagagctcctggagcggcctgtcccccgggacaccgggacccacctgc

SEQ ID NO: 316288 - DNA, 122 bp, Homo sapiens
cctgggccagtcttagggccctgagtacagacagcctggctacccgttaaccattctcagcgtgtggctgctttttacacacatgtgtacatatgcacggacacacacacacacacagaggc

SEQ ID NO: 316289 - DNA, 122 bp, Homo sapiens
tgcttccgcggcggttggggtggtggggccccgggcggcgttgaccatgacccagcagggcgcggcgctgcagaactacaacaacgagctggtcaagtgtgagcggcgcagccgggacgggg

SEQ ID NO: 316290 - DNA, 122 bp, Homo sapiens
acacagtgatgaagagagaggcctgtggagcctcactgtgccagcctctagttagttatccgagtcttcccagtatcaactgccggatatttaaataattatagttgacccttgaacaacat

SEQ ID NO: 316291 - DNA, 122 bp, Homo sapiens
agcagtggaggagcaaggagatcctgaaggcacatgtgaagctggagtgcatggaattgccgctggaatggccccagggttttgtgggtgatcagggatgactctggggtttgggtctgagc

SEQ ID NO: 316292 - DNA, 122 bp, Homo sapiens
tggggaaaagcatggattttagagaaagattaaggtctgagatcctgctttactacttgccggctggggaacattgtttgggcaaatgtctcaactaaatagattaacttctctgaccctca

SEQ ID NO: 316293 - DNA, 122 bp, Homo sapiens
ctctttcctcactacccaaactaatccttaaggctccattttccctggcgactcttcgagcgcccctctgcttctgtagaggggtcgagccatgtcaaggtagaccctgtgtcggcccgtct

SEQ ID NO: 316294 - DNA, 122 bp, Homo sapiens
tccgccccgcctggagggagggcccaaccacagcacagccgcgctcactcctcacccggacgtgacctagttctcacagaggcccggcctcttccgccacaactccggcccgcggtcccgcc

SEQ ID NO: 316295 - DNA, 122 bp, Homo sapiens
ctgttctataaacagcagagcctgggggttacaggaaatgtgtgtggagtcagactgctccgtactgtgtgtcctctggcttgtgttttcacctctctgagccttggtttcctcatctttca

SEQ ID NO: 316296 - DNA, 122 bp, Homo sapiens
cactccatgaaaagcaacaaggaagccccaaggtcagcagaggcagaagcgcagtgagggcgcacggggcatgtagtcagtgccctgcactctctagtgttgggagcagtcagcagaacggc

SEQ ID NO: 316297 - DNA, 122 bp, Homo sapiens
ctttttcttttcatttaatcagtggtaggaaagcgtggcaccctggctatcctgttttagcgagtggcagctgtgggacctgcaaatgcttgtaaggataagctttggaaatggttttcatg

SEQ ID NO: 316298 - DNA, 122 bp, Homo sapiens
gatcttcctgcgttacagactgtcctggcggtgtctgcaagtcggtaaccccccgggtttcgatcccttcgctcgcgtttctcttctagttctcgggagccgggagccccggagcccagttc

SEQ ID NO: 316299 - DNA, 122 bp, Homo sapiens
tgaagaatatttcagccagagtatgcagcaacccatttttctaggtccagtagttgacaccgtagacttgtcaagggaaagccaaatgcacacatcactgtgaacattggaaatactatctc

SEQ ID NO: 316300 - DNA, 122 bp, Homo sapiens
tcaacaaagctagattcaaaattgctcctttgaacacatgcaatttgtgtgcatcagtttcgatcgctggggttcttgaggagactaacaaattgcaaagtgtactttcagaggaagggcct

SEQ ID NO: 316301 - DNA, 122 bp, Homo sapiens
tatttatattagaatgagaacaatttatgcttcaaaaagcaggaggttttgccgacaccccgctccgcaggcgacaggccctacctcgtcgaacagtgaaaacatgtcttccagcaagtcag

SEQ ID NO: 316302 - DNA, 122 bp, Homo sapiens
acgaggcccggggagctggcccgccgggctctgcgctacccgcaccggaggctccaggcccgggcaccgccagccccgtcgtgccacccacagaagacttcctgccgctgcccaccggcttc

SEQ ID NO: 316303 - DNA, 122 bp, Homo sapiens
tctttcccgctgaggctgccagacactcccctccccagccaaacagacaacagggaatgccggtgaggccccccaatggactcagacagatgagatgagtaggagtggatgagggcttgatg

SEQ ID NO: 316304 - DNA, 122 bp, Homo sapiens
cctttctcgaggttgtgggtgtcgtttatgtttatggaatgaaacggtgagctgccgccccgccgagtgctcctctgggacccaccagggtgggacagggaatggctgccgggcacaggttc

SEQ ID NO: 316305 - DNA, 122 bp, Homo sapiens
ggcgcctttccctttcccgggaagtcggtgtcaccgcccgtttgctgtgaaatcaaatggcgcccttccttttcccgggacttcggcgtcaccgtccagctggcgtcggggcagcaccccgg

SEQ ID NO: 316306 - DNA, 122 bp, Homo sapiens
ggtatctctggcaagacagggtgagagtctggggcaggtggggaaatgaatgtgatccagcgaggaaggggaattctgaggagagccaatgcaggcccatctggtgcagaacctacaccact

SEQ ID NO: 316307 - DNA, 122 bp, Homo sapiens
gggagagggagagagggaacgcgagtccctttaatttccacccaggagcaatgaaatttccgttgctgcgcaaagcgctgaaagaaaggacggttcgccaacaaaaggccgacgtggtcccc

SEQ ID NO: 316308 - DNA, 122 bp, Homo sapiens
ggccccagagctgctccaaggccctggccagctgaggccccgtgagtaaatacagcccaacgcagagccaggctagcacaggcagggctgttttctctcttgcatgaggtaatctgctgcgg

SEQ ID NO: 316309 - DNA, 122 bp, Homo sapiens
ggctggaggccgctcctggccggcaccgccctccgcctcccgcggtccctccctcccgcacgccggcgctcccaggccgcgcttcctgcgtccccaacccggtccctgagagggcagtgcgc

SEQ ID NO: 316310 - DNA, 122 bp, Homo sapiens
gcaaggaagttcagttggaaaattagttccttgaacacctgccagagtctttttagtgtccgttaggaaaagatgagctcggtctgcttctcctgtatttttttattttattttttttaagg

SEQ ID NO: 316311 - DNA, 122 bp, Homo sapiens
tttctcttaaaaaaatttttttttagcttattgtcttcggagatgataacaccctcgttgcgtgggagtaaaattttaaaggtaaaacaaacaggaaacgagcgtcggcggcgaatctgctg

SEQ ID NO: 316312 - DNA, 122 bp, Homo sapiens
aatctattcctgacatgtctcctctcttctccaggagctcactgacccaaagatttgcaccgtgtgggtctgacctcatcatgtggagtgcagagggccctgatgacatgtgtgtgatgagg

SEQ ID NO: 316313 - DNA, 122 bp, Homo sapiens
gggctttcggctccctctctccccagcagcccccgcccgccgcctctccgggggctggggcggccgctgccaatgaggctcggctgatgcgctgttccggcccagtcattgtatcgggaggg

SEQ ID NO: 316314 - DNA, 122 bp, Homo sapiens
aagtcatcatactgaagtgacctggatttccctatacgtgaacctcatgacgtgggagcccggggtagggagggacagataacatgagaatcaatagaaagaactgcaaggtctgaagacaa

SEQ ID NO: 316315 - DNA, 122 bp, Homo sapiens
caggaggtccaaccgttcaccactgctttttacacaggggaccggggccctggggagacacggggcagggcctggtcacaggggccagaacagttcacggcaaagacttggccctggggctc

SEQ ID NO: 316316 - DNA, 122 bp, Homo sapiens
cagaattaaaatgcataggtttactctgggcactaacctatttatttggtttgtagtctccgacaggaaagagaatcttcaaatttcgggctcccccgaagaggtgccttcaggtcggtgct

SEQ ID NO: 316317 - DNA, 122 bp, Homo sapiens
atccgcgagatggcagtgttaggaacaaaggtgagctgcccactgcaggtcaaacgctgccggctaccagctgcagctgggagtgaaagactagaatacagaaaggcgcaggcagtcacgta

SEQ ID NO: 316318 - DNA, 122 bp, Homo sapiens
tagtggaaaactatagttatagtattcgaatataagactgtctcataccagccacactggcgttgcagtaatttttcaaaaaccaaaaagaaaaggcctccataaaatacttgaattatagt

SEQ ID NO: 316319 - DNA, 122 bp, Homo sapiens
gcgttccaggactccccgaacccttggggccgccccgctctgggctgcctgtgccccacccgcctcactggttgatctcacccacttgagatgccctcgccaggccttttttggcaaatctg

SEQ ID NO: 316320 - DNA, 122 bp, Homo sapiens
acaaggtggcctgcactcgaggttccagggatcccaggcatctttgcggctgcagggagccggtgtcctgtgcaagggtctggtctaggactctgcccggtatagactcagcagcagcctag

SEQ ID NO: 316321 - DNA, 122 bp, Homo sapiens
tctcaccgcggagactcccgagttctcgttgcctgggcccgagctgcgccccagggtcatcgctgatggcgcgagaccacgcattccccgcgaaccccgacttctgaacagttcagaaagtt

SEQ ID NO: 316322 - DNA, 122 bp, Homo sapiens
ccagcagcagctcacagtccagactgaaagggggcactgagactctccacacctgacactcgtcttcagttgataccacgggtttgactccgtcctgtctcgggcgacgcccgtaagacagg

SEQ ID NO: 316323 - DNA, 122 bp, Homo sapiens
gctgagccggaaaggaaatttcaaccccatcagttgtggggaaggcctggcccgcgtgcccggcgcccggcccgccccgcccccttcggcgttgtgctgggaacgctcagggctggcgccag

SEQ ID NO: 316324 - DNA, 122 bp, Homo sapiens
ccacgatctagacacctccgggcggacaggcagccacgcggggacagcgcccatcggccacgatctagacacctccgggcggacaggcagccatgtgaggacagtgcttcccagggaggaaa

SEQ ID NO: 316325 - DNA, 122 bp, Homo sapiens
atggctttgctggaaagtccgagagcagctggaaatccgcgtcctggcccgacccctccacgtgactgcaggctggctgcacacgcctgtctcctagtctataacatggagtgctttgcaga

SEQ ID NO: 316326 - DNA, 122 bp, Homo sapiens
agtcacaccaccccgacccaaacaccatgggcggggccagccaccgggacagggctctctcggtgactgccaccgtaggggaaaccaaagggaaggaccctgccccagcccagcctccccca

SEQ ID NO: 316327 - DNA, 122 bp, Homo sapiens
acaacgcggtggttcataggcgagcctgcatagaaagtgcttgcaggaccgccagggacccggccagtggcagcgtcctccccccagttcctcacgctgtccgtgagttccctgctcacaca

SEQ ID NO: 316328 - DNA, 122 bp, Homo sapiens
cacagtgctcaggctgtggctacactcaaccttgtttacaggaaaccgtgccataatcgtcgcttgctgtttcctttctcttgtatcacctccttctagtatctgcgttgacacccaagaac

SEQ ID NO: 316329 - DNA, 122 bp, Homo sapiens
taccccctcacccggtgcacacccacgcggtcccccacccccttgcccggtgcacacccacgcggtcccccaacccctcgcctggtgcacacccacgcggtcccccaccccctcgcccggtg

SEQ ID NO: 316330 - DNA, 122 bp, Homo sapiens
ggctcaggcatggtgagctgcaggtccagagtcctgccccgcagggagaccgctgagacccggcgagaattccagcacagcactggcgggccggcactgctgggggaatggcacaccctccg

SEQ ID NO: 316331 - DNA, 122 bp, Homo sapiens
gtgctgcgcttgtaggagcagcaacttgaatcctgtgtggggcaagctgggcccaatccgcggatcccaaccagcccctcccgctgggccgtgggtctcgtcatttaccttgcccaggattc

SEQ ID NO: 316332 - DNA, 122 bp, Homo sapiens
acgaccctgaaacgccgtccttccgctcgtcgggcccgggacactgaggccgggtggccgcggggagccgagccagtctgctcacctgcgctgcgtccttcgtctccgccatccgaccgttg

SEQ ID NO: 316333 - DNA, 122 bp, Homo sapiens
gatgggtgtccagccctgcctgggccaactccatgcagtggggttttccaattccctggccgtctgtggccacagcagagggcacctgagactttaaactggggactcaccttggggatccc

SEQ ID NO: 316334 - DNA, 122 bp, Homo sapiens
gaggtcggggcgccagccacctgggggcagcgcccgcttaacctgtccacgtcagtgccccggacgaagcccggtttctccagctctacgccctttggccgtccaggtttctcctttcgtgc

SEQ ID NO: 316335 - DNA, 122 bp, Homo sapiens
ccctagggaccctgcgtagcccggcgatccttggagggtccctcaggtggtaatggagttcgttttggggtctcagggtccctcaccagccgtgtgactgactgcagctctttcagttagga

SEQ ID NO: 316336 - DNA, 122 bp, Homo sapiens
gggcagccaatccaaaagaacagcctttctgactctgtcaccgaagtctgtgcctttacccgctggaacgcaggcggaatgcaaaaagtgtccttcccatttcccatcttcaatcattttca

SEQ ID NO: 316337 - DNA, 122 bp, Homo sapiens
ctcaaggctcaaaaagggctgccaagtgcgagcacttgtcatcctgtttttcccacttcacggaggtgaagctgagactgggagagatgagaagtcacttcgattagcaagcggtgcagtga

SEQ ID NO: 316338 - DNA, 122 bp, Homo sapiens
ggagggaaaatccaaagttggtcttatttgagtcaagagggggaagtccgggttgggtttcggttaaaactggggtcggttgggactgcaggtcccaagaggttcttctcttaaagggaccg

SEQ ID NO: 316339 - DNA, 122 bp, Homo sapiens
ggagttaatggagaaagaaaatctctaaggaagactagaaataattgggttagggattctcgagaagtaaattaaattccccaaatgtggtattctctgagaagataattttgaagaagcaa

SEQ ID NO: 316340 - DNA, 122 bp, Homo sapiens
cccaatgcatcgcttcccgggcccccggggtgctaaagctgcgctgctcttctcccaacgcggacctgcttgaatgtgggggagggagcctgtctcctgtcatctgttacgcgtgggtaagc

SEQ ID NO: 316341 - DNA, 122 bp, Homo sapiens
ggaatgggagttgggagagctgtcaggtgccaggtgggaactgccatggggtcggggtatcggatggctagcctgccaaccccgcctggccttgatagcaaccacctccctccaggaacatt

SEQ ID NO: 316342 - DNA, 122 bp, Homo sapiens
ggttggtgagttctttcgttgttttaatttgagtgactttctgggaaaaactgtggatttcggccaatatgctgatgataatagcattgctttgaaggtcttgttctgtagaaaatcatttc

SEQ ID NO: 316343 - DNA, 122 bp, Homo sapiens
tagatgacctccaaagtcatgccatgcttcctctagaactgtgttgtcctatgtggtagccgctagcccacatgtggctcttgagcacttgaaatatgagtagtccaaactcagatgtacta

SEQ ID NO: 316344 - DNA, 122 bp, Homo sapiens
cagtcagcggcagcgggggcgcccctgagctccccaaaggggacgtgcccagtgggtcctcgaagaaggcaggacagaaggcggccacgccccagtctgcatcctccgctcctccctccgcc

SEQ ID NO: 316345 - DNA, 122 bp, Homo sapiens
gttaagattacaggtgtgatccaccacgccaaggcaattttactttattgagacagttctcgctattgaccatgttggagtccagtggtacaatcacagctcattgcagcctctatttcctg

SEQ ID NO: 316346 - DNA, 122 bp, Homo sapiens
cttcctggaaagtggtcagaaagacttagacttaagccacgggagttaggccaagctgatcgtttgccctttcaaagatggcaaaatactgttggatgaagaggtagcccaggatccagaac

SEQ ID NO: 316347 - DNA, 122 bp, Homo sapiens
gcagtgagctgcccccgcgggactcttgccaaggccccccatctgccagtcgcttaccaccgcagcgccccgccgcgggacccagcagcgagcagtaaatctcctccagcctctctacgtgt

SEQ ID NO: 316348 - DNA, 122 bp, Homo sapiens
cttaagtcaagctgagccaaatggaaaaacgcaatttctacaaaacatattttaagaaaacggccagtcctccagagggcgctcacgtgctgttgctttcattgtggttcaggttcaagagc

SEQ ID NO: 316349 - DNA, 122 bp, Homo sapiens
ctttgtttcatagtcgtatccctggagttacttagagttggtcgctttcgcctctggtatcgtgcatatgatggaaaagttttaatctcctgacacttgtgatgtcttcaaaggaaccactg

SEQ ID NO: 316350 - DNA, 122 bp, Homo sapiens
cggtcccctcgactgctcggtgtggctgggccggtagccgggacaccaggcgtcctgtctcgtctctgcgcggcgactgcggttccagagccctctatgggcagctccgcgcccgcagccac

SEQ ID NO: 316351 - DNA, 122 bp, Homo sapiens
ctcgggtgtcccagcccaaccagagccatcaggtggggccggaaaagggaggggcagtgccggggtgtccaccccctacccaccgcgcccaggactccggagtcccagaagcctggggcgcc

SEQ ID NO: 316352 - DNA, 122 bp, Homo sapiens
tatttgcattatcaccaccttagggaaggccactgtcatctctcaccctgatgactgaaacgacttcctcactgtccgttgcctatctgtggttttcctccattcattctccatgatactac

SEQ ID NO: 316353 - DNA, 122 bp, Homo sapiens
tttatagtagcaactccaattttattttcctctggcagtaaagtattattaaaagttgttcgatttgattttttgcacatctaaatgtttctacaaatggtcatttaagatctctgtttagt

SEQ ID NO: 316354 - DNA, 122 bp, Homo sapiens
ttattgggaggcagagacaaagttcattagaccctgtagaggcaaacatggtaaaagccccgtggcattgtgctgtgcagggaacttgcaggctctgacatctagagagccattgccagacc

SEQ ID NO: 316355 - DNA, 122 bp, Homo sapiens
ttacagaaggagatcagttggaagctttccttggactaagagcatccttagctatgaaggcgaatggatcttgaggctgcaaggtattcaacaaatattggtatgatggggtcatattgttg

SEQ ID NO: 316356 - DNA, 122 bp, Homo sapiens
agggttgaggtagccactgtgtttcaggccaagatagttgttaatgggatatcaggaacgcgactgggcttgacgggaagcaaggctggagttacaggctgggcttggcgggaaacaaagct

SEQ ID NO: 316357 - DNA, 122 bp, Homo sapiens
ccaacgggaggcgtcaaaagacccgggccttgtgtggcaggctcgcctggcgctggctggcgtggcccttggccgtcgtcacctgtggagagcacgtcttctctgccgcgccctctgcgcaa

SEQ ID NO: 316358 - DNA, 122 bp, Homo sapiens
atctgtaattcaactccccacctcacccttcaatgcagtcagaaggccccctcagacttacggggctcctgggagctgtaggatccgtagagccccttgccacacacgctgggtcccgggcc

SEQ ID NO: 316359 - DNA, 122 bp, Homo sapiens
ttgcttaagaccaaaatgaggtactatttttcctgtaatctacgtgtagtccaaaaaaggcgggctgttttgtaaatatttgtctctatgtaaggaaatcaaaactgaaagcggagtaacac

SEQ ID NO: 316360 - DNA, 122 bp, Homo sapiens
ttcgcagggtcccgtcccgggccgcagagagcagccacctccggtcctggctccagcacacggcattcactgccccgtcgtgacctaacaggaatgaccacagaaggttactatttctacta

SEQ ID NO: 316361 - DNA, 122 bp, Homo sapiens
ggaacacgcgctcctggaagttgacgcggaaggtgtagaggtggcgcatgtcctccacagcgtagaaggacacggctcccacctccaggtccagggccacccgcacgcgcgacaggtgcccg

SEQ ID NO: 316362 - DNA, 122 bp, Homo sapiens
cttctagaaagtcaaaggatacattaccctcccactggctgaactggaaagtgtaactatcgacccaaatctatcaggtaagcttgctcttcagtttccagaaaaataataaagtatgcaaa

SEQ ID NO: 316363 - DNA, 122 bp, Homo sapiens
acagcagatttcacagcctgtcttctggaagggagagctgcgtcctcgggataagacaggcgcatagagcctggattccccgcttcccaaccagtggctcgcatttttttctgagttgtttt

SEQ ID NO: 316364 - DNA, 122 bp, Homo sapiens
gtgcacaccctgtggacactgatgagtgccaggaggcggtggaggagtggacggactcggcgggcccgcacccccacggccacgaggctgaaggcagccaggactacccagacggccaactg

SEQ ID NO: 316365 - DNA, 122 bp, Homo sapiens
agtccaatttttctccttttacttcttgtctatcctcctcactccttgctcagccccgcccgcttttctaggcccgcccctccagggccccaccctcaggccgctcctccagtctaggcccc

SEQ ID NO: 316366 - DNA, 122 bp, Homo sapiens
gatgtggaaaccgaggcccctcagtgaagagctgccagggtggtcgccttagagcaaaggcgttcctcattccgcctgcgcagctgcccctccgcccggctgccgccccagcccgcttcccc

SEQ ID NO: 316367 - DNA, 122 bp, Homo sapiens
cttacagtcacgggtcaataggatactgcagctaggatagcagtccacacagggccagggcggggcactaaggagatgacagtcatttctcctagagagtcatagatgaagtcatatgtcag

SEQ ID NO: 316368 - DNA, 122 bp, Homo sapiens
tcttcaacctgccttccagccgaacctcttaggccagagctgggaccaggccgggttgggcgtcgcgcttgtcaatcatctagaaccgggtgtgattgagcgagttgggatcccactgccga

SEQ ID NO: 316369 - DNA, 122 bp, Homo sapiens
aaattctgcccctgccaataagacttcagcgcgtgcactccatctgtgcctcagcttcctcgcctgtgaaataggtcgcctcgcagcctcactcacagggagtgtcggcagggttagatgag

SEQ ID NO: 316370 - DNA, 122 bp, Homo sapiens
gtgcagtttctttctctcgggcccggggcggggccatggctcctcctctaggaagccgcgcgagcgcagtcccacggcagccatttccctagcgcgcatgcactgggtcccaggaccacgtg

SEQ ID NO: 316371 - DNA, 122 bp, Homo sapiens
ctcctccctccccctttggcggagtttgaatgtcgagttcaaatagagaacactgcgaatcgaaaagacctataaattatagcttttgcttttaagaaggacgggggaaaaaaaaggaaaaa

SEQ ID NO: 316372 - DNA, 122 bp, Homo sapiens
cagcccaatgaagctttttttttctttcaagatttttgggatagacactactgtgtagtccgttaccactgtgaagtaataaaaatgtctgtttctttgtgaaaagcagccgtggtcaacca

SEQ ID NO: 316373 - DNA, 122 bp, Homo sapiens
agggcactcgtgttctatgagcaccgtccagaatgaggccacagcccagctcactggaaacgtgccctggagtgtgatggcctgggtagtgatgtgagcacttaacccaggctctgctcaga

SEQ ID NO: 316374 - DNA, 122 bp, Homo sapiens
aagaatttaaagacgtgtcccaattctagtggcctatttaaagaggtattttctttctcccgtccttaggagtatttggggagaatgtgacgggagctgcccgatgttcccggggatcgatg

SEQ ID NO: 316375 - DNA, 122 bp, Homo sapiens
tgtgaggagggaggagagaagcagcagccgggaacctacagccaagactcaaagtgacaccgcagtgccaccgcaatcaacgtacatgaaaaggacaagcacctcatatccccgtcacgcaa

SEQ ID NO: 316376 - DNA, 122 bp, Homo sapiens
aataggtcaaaaggtggtttagaacccaagcagcggaaataacacagttgaggactctgtcgaccataggcaccctgatggacctaaataaattactcaacttttcacgagaatattttacc

SEQ ID NO: 316377 - DNA, 122 bp, Homo sapiens
tttcggagaagaggtagccaaggctctgagaggtcacgacacatgcatgagatcacacagcgcgtctggaattccatttcaagcctgtctgaggagggcgctctcgctgcttctttacctgg

SEQ ID NO: 316378 - DNA, 122 bp, Homo sapiens
cattctggaagtgcctttgctgtgtttactagccccatccccgcctgctgcacccggagacgtctgaagtctctaatcgctcagcgaaaagttggtttcgggaagggcagcgccggggtgcg

SEQ ID NO: 316379 - DNA, 122 bp, Homo sapiens
tcccaacagcaatcccattttctgcctctgtgggtcccacgtgcccctctatggctccagcgcgtaattgtatacaatgcatggaatgtgggatctaaatctgatattttctgcttcctgtt

SEQ ID NO: 316380 - DNA, 122 bp, Homo sapiens
gatgtcaaggatgtctgccatagcaggaggcattatgaaactgaagcacattcataaccacggggccctagaaatcagtaattaaaacatagcaaaacaaccatcagccaaattttatacca

SEQ ID NO: 316381 - DNA, 122 bp, Homo sapiens
ccatcttcagttgcgtgcacacattcagaaactatggaaagtcatttttacctctctccccgcaatcatgggactctgggactcacggtccctgtggcctgggacacagcccttcaactcct

SEQ ID NO: 316382 - DNA, 122 bp, Homo sapiens
actgagctcctccttgctcgaggttttgggtcctcattgtccacatgacctcctgctgggcgaattctgggatgaccctgtgtcctgggcacatggctggcagggtcccgggggctctctgg

SEQ ID NO: 316383 - DNA, 122 bp, Homo sapiens
gaggtggcggggctctcctcgcccgccccggccccggcccccagaccccgccgcccccagcgcacccacagccggtaggcccccagcagcaccagagccaccagcgccacgttcagcagcat

SEQ ID NO: 316384 - DNA, 122 bp, Homo sapiens
gagccgggtgaagaggtcccctccccgcaggaagtccaggatcaggtagagctttccttccgtctgaaaggctgtgggggacagagacccgcattttgacagcttgtcgaatgtcctgtggc

SEQ ID NO: 316385 - DNA, 122 bp, Homo sapiens
atcaggttaaattattgcatagcaattttaagagatcaaaattcaaaattctgtgatattcgtgaggcttagaagattaatgctgctctgaaaacctagattttggaggtattcaaattaag

SEQ ID NO: 316386 - DNA, 122 bp, Homo sapiens
gggcctcgcaaccggccaggaggcagctccaggcagcccgtctgcccactcctcttagcccggacagctcctagctggacttgattttttgtcttgctcagcccgtcgaggactggagggca

SEQ ID NO: 316387 - DNA, 122 bp, Homo sapiens
cccaagggaagctgaacgccccgacggctctcatggtaggtagctctttctgtttttttgcgccgccttcaggcaatcatctactccgcttgctatcccctcactcaactcggcttcagtag

SEQ ID NO: 316388 - DNA, 122 bp, Homo sapiens
tcctgcagatctcagtgggtgggggtgccttatggggactggggattgagaaccgtgtcacggacaccctgggtttgcacatgaggctggcaccattgcccccacctggaaagcttcatctt

SEQ ID NO: 316389 - DNA, 122 bp, Homo sapiens
cagaattctggaaaaatggaaatggaacacatattttcttttctttttttttttttgggacgaagtctcgctctgttgccatggctggagtccagtggcgcgatcttggctcactgcaacct

SEQ ID NO: 316390 - DNA, 122 bp, Homo sapiens
gaggttgcagtgagccgagatcacaccattgctctccagaccaggcaagagtgcaagactcggtctcaaaaaacaaaaaaaagtggtttggccattcctcccccaaaacatttcatatgaat

SEQ ID NO: 316391 - DNA, 122 bp, Homo sapiens
aaaaggtgcttttggttaagcctcagaggaaaatgagggacatgttattgagttattgggcgctggaggaaagctgatccttgttataaaggaacttggcccaggtgtggtggctcacgcct

SEQ ID NO: 316392 - DNA, 122 bp, Homo sapiens
ggagccccccggtgcggcccggcatcagagcgcgcagcgactttgtcactgcaggcttgccgggtgggttgcagaagagagaagagacccacccatcctcaaggcactcatttgggcaagaa

SEQ ID NO: 316393 - DNA, 122 bp, Homo sapiens
gctgcaggagatttccgcgtcgggcagatgaaagcgctctgcaagcccgggtgttatctgcgggccgggtccgcggcttctctggtggcactaggaccgcggcggcgcggccctcgcagcca

SEQ ID NO: 316394 - DNA, 122 bp, Homo sapiens
ttccttgaaagacaagaggctagagagttctgaaaatatgatggctttagccttgagaagcgattcacgtcaggaagtcagagtgggtatttaaataattctattaaattttgatttttgcc

SEQ ID NO: 316395 - DNA, 122 bp, Homo sapiens
tcggtggcgtaagccacacaggcgatgccagagaagacgatggcggcgatggcgtggtcgcgggaacggccgtgggacaggaactgcaagtaggtggtggggtagatgatggaggccgagag

SEQ ID NO: 316396 - DNA, 122 bp, Homo sapiens
aaagggggaagagcaaggaaaagggaaagggcagaaaaaaatccgtgctcaagagcccagcgggcccaaactgagggccaggaggcctaggcagcttagaaactgggactgggacattaata

SEQ ID NO: 316397 - DNA, 122 bp, Homo sapiens
tcccgcaggtcccgccccagagtgagtaggctccgccccagctgaaaggggcccggcctccgaccacgcatgcccaactcacctacccgcccgttttggaacaagtgggcccagttcttcag

SEQ ID NO: 316398 - DNA, 122 bp, Homo sapiens
ccagcactaatccctcagcctgcctacgtggggcctgacaatttacaaaagccttttccccgaatattatctcatgtgccgcggcagcctcaccaccagcgctgtgagggaagtaggacaga

SEQ ID NO: 316399 - DNA, 122 bp, Homo sapiens
gcggggctatggagtgagataagcactacctgcggcgtcaggaacgatggacctgaactccgccttcgccgatgatcagcaacggctggggatgagacgccagctctgcgtgtgctggcctc

SEQ ID NO: 316400 - DNA, 122 bp, Homo sapiens
aaaaactgggacacagagctggagagacccagagccccggagccaaggcgggaggtgcagcgatgtcaggctgaggggatcgcagagttcccccttgccctgccactcaccagttaaccctt

SEQ ID NO: 316401 - DNA, 122 bp, Homo sapiens
ccctcacctgacctgtcctccggccagctccatcgcgtggccaccacattcctcgcattgcggtcggcaccgtagtacaggtggctagcccctgtgaacacgaccatctgctaagtaccagt

SEQ ID NO: 316402 - DNA, 122 bp, Homo sapiens
agtatcaggaaggcactatgatagcagtattctagaaagttcctgatgtccttatcgtttcgtgactctaaagtttcgtcatgaaactcagtgtttgctttttctccttctcctcagcacct

SEQ ID NO: 316403 - DNA, 122 bp, Homo sapiens
aggctccgccccgtcacaggaggctccacggggcagcaagttaccttttcacactcctctcgtactcagtccgctggcggcacagctcggccctgagctcagtgaccagcccctgtaaggcc

SEQ ID NO: 316404 - DNA, 122 bp, Homo sapiens
gggaaaggcaagcaccaccaaatatagtctccacagtaagtggcggattatttatgagaccggaagtttaaggacagttttttggagtatgatcttctgtttgagttgatgctagagaagct

SEQ ID NO: 316405 - DNA, 122 bp, Homo sapiens
gccatggcaccgcggactggagaaggcgcgcaggctgcggcgagtggccccgggcgggcgcgccacccatcttataggcggcctaccggccccgccccggcccgcccccgccccgccgcccg

SEQ ID NO: 316406 - DNA, 122 bp, Homo sapiens
agggcgctggccaaggtgctgaccgaggtggcggacacaggaaaccagccggtcccccagcgctccctctgtgggccttgggcctgctcccactgcacagacaggtggggaggtggaggccc

SEQ ID NO: 316407 - DNA, 122 bp, Homo sapiens
aggcctgcagcctgcgagccgttctcacccagcccattgtgcacggccgtcttcttcccccggagctccttcaccaccctgaccttcagccgactccggagaacaacagctgcgttccctga

SEQ ID NO: 316408 - DNA, 122 bp, Homo sapiens
ttccaacttcggttttccgccgggcgctcagacacgagttgctgcgcttcctgcctcttgcgtcgggctgctgctctgctgactgggccgctgccttttcattcaagagaggccgaagcggt

SEQ ID NO: 316409 - DNA, 122 bp, Homo sapiens
aaagtaaaaaaaaaaaaatttccgaggtttcccgcccctgaactgaggaccatttgtgcccggcgttccggggggaccgggagggggctgtgcttggggggcggcggggcgggggactggaa

SEQ ID NO: 316410 - DNA, 122 bp, Homo sapiens
gagagccagaactcatctttttatcaggaagccacttctgagataactaacacactctttcgataatcacattaattcattcataagggcatagccctcatgagctaatcacctcttaaagg

SEQ ID NO: 316411 - DNA, 122 bp, Homo sapiens
tataaaataccctacaaatataaatgcctttgtgaaagtaatgctgatgtcattccccagcgtggacttcttactagtgttaggtattacccaaaactataaggagttttcactcttttcag

SEQ ID NO: 316412 - DNA, 122 bp, Homo sapiens
ggcatgttcagctctgtcagttaatctccatcatcacaaagaatattctgagaatgcttccgtttgctttttatatgaagttccttcctatactaccgtaggcctcaaagcagtccaaatct

SEQ ID NO: 316413 - DNA, 122 bp, Homo sapiens
gatccacagctaagacgccaggaccccctggaagcctagaagtggtgagagtgacgggtccgacatcccgagagagagggagggggctggttggaaccggtaggaagtggctgtggcgggac

SEQ ID NO: 316414 - DNA, 122 bp, Homo sapiens
tccctaaattttttttttactgggtccaaacccaccaacttacccctgaatcctggttctcgcatttccattcttagtctcagtccttgcacccagcacctctgtcttcagtcctataaaca

SEQ ID NO: 316415 - DNA, 122 bp, Homo sapiens
catctcattcgcaccgcagcctaggaagtaggcacgtgagttatctccattttgtggaaacggaggtctagagacatcatcactcctccagggtcacccagccagcatgttgtaaagctgag

SEQ ID NO: 316416 - DNA, 122 bp, Homo sapiens
tgtctggggccacaatgtaacgttttttaaaggtgtcttccttaagcccggaaattggctcggccagcgggaggtctcgcggcgtggagggcgggcgcccgcaccgggggccggcctggggg

SEQ ID NO: 316417 - DNA, 122 bp, Homo sapiens
tgctgtcgccagtgacgacaaaagctgctctgttccaaagagagcctggttctcccctgccgacccctccactgccgcctgctccatgctagaccagctttccgggtctcagtttccctatg

SEQ ID NO: 316418 - DNA, 122 bp, Homo sapiens
tggggagcccggacgaggagttcttccacaaggtaaggggctggggtctccgcctggattcgcgagggtgtaggaggacccgaggagtagcgtggtctggagtaccccatatctctttcagc

SEQ ID NO: 316419 - DNA, 122 bp, Homo sapiens
gtgtgtagatggcgacagcctcctacacgccagggctccacccggatcctggcgccactgcgggagggcctgcccttggctcagcgtcagagtttgtcctctggggcccaacgcagggagcc

SEQ ID NO: 316420 - DNA, 122 bp, Homo sapiens
caaacctgagatgcgtcatcgcgtcaagtgggcggaggtgggaaggggcgggggaggacgcggagggcagcccaaaacgggggagtccaaccacaggtccacgcccggcacgcaggcgcagg

SEQ ID NO: 316421 - DNA, 122 bp, Homo sapiens
tgtcggccgttcttcgtccagagatgaacatgccggaagcggccgttcccagcttttctccgcaggcctctccaaccgagcttctattgtaaagcaccctatgccgcgcaaagcgtcatggg

SEQ ID NO: 316422 - DNA, 122 bp, Homo sapiens
ggagcgcggggcgcgggacccgagggaactttgggcgggcctgggctagggcgggtgccgcgcgggcctggggacaggccggggttcccaaggcctggaagagccgcccgctccggctctct

SEQ ID NO: 316423 - DNA, 122 bp, Homo sapiens
cagtggttgaaggagtcagagctttaagatttccaaggagggagaggtcacagcaccgggcggctcaggaaggacttcctggggaagatggcatttgcgctgtcttgccgaatgagaacaga

SEQ ID NO: 316424 - DNA, 122 bp, Homo sapiens
ggtggagggggaccaggggcagatgtgcatcaacatggagtggggggcctttggggacaacgggtgtctggatgatatcaggacacactacgacagactggtggacgaatattccctaaatg

SEQ ID NO: 316425 - DNA, 122 bp, Homo sapiens
tgcacaagaaatatctgttgactgaatgaattatcataaaacactattttcattgtgactcgtaaatcatgtatttatacaccattatatttctagacattacgaagacattgcttgagcta

SEQ ID NO: 316426 - DNA, 122 bp, Homo sapiens
ggggacgcggcaggggctaggagcagcggggacggggagcggcggggaccggagtgccggcgccctccgctgccccgcggccgcccagcagcagcccagccgtccgcgctcctcgcggcttc

SEQ ID NO: 316427 - DNA, 122 bp, Homo sapiens
cacaaacacacacactcacactcacacaagcaccgccttacaatcctccacctccagtcccgggctctcaggagtagtcgcggtgacttccacttacttcataaataagtgtattcctccac

SEQ ID NO: 316428 - DNA, 122 bp, Homo sapiens
acgaggagtttgtccgtgtgctggtgtccaagtgaggccggcgcccaccatgctcctgggcgcccacgcggcccacagggcaagaacccggggcctcccgcctcctcccccatccccctgcc

SEQ ID NO: 316429 - DNA, 122 bp, Homo sapiens
ctttctttttaagcttgtaagtaaagacaggaataacttaagagtaccttattgcatgaccgtgtagcaaaatatttaaagtctggacttctacattgaaacagatttgtgtttaaattcta

SEQ ID NO: 316430 - DNA, 122 bp, Homo sapiens
ctgctcagaaaacatcagagctgaactatgcaaaaaaccatgtcagaatgacaagctaaacgctgaactggtgcaagatgtttaggtgaaggaaagctggcagcagggtctctgcagggagt

SEQ ID NO: 316431 - DNA, 122 bp, Homo sapiens
ttgccggggagtcccgggcggccgcaaggccgtagggctcgtttgagccccgccgctccgcggccccagcaaagtgccgacattacgcacgccgctccaggccaccccaccggcccgcgcct

SEQ ID NO: 316432 - DNA, 122 bp, Homo sapiens
gcagcacagcacttgaaggcagcctccacagcaccaatggcggtgacctcagtgggatcacggcttagtggcgctgcccgacgtagctcctcaaacagctgccggtggtacactgcggcctc

SEQ ID NO: 316433 - DNA, 122 bp, Homo sapiens
acagaaaagcgcaaaagcagtcccccactaccacaagttatgcagccgagttttctcattcggggaaatcgcgggagcaaacacatagtaaaaaccctcccccaagaaaaacactttatcag

SEQ ID NO: 316434 - DNA, 122 bp, Homo sapiens
gcggcggcggcggcggtgaaaagccccactcctccgcgtggaccgggatcctcaggggtgcggcgccaccccacgtgctgacgtatggcccagaagccgcctcatcgcaccgccccaccagc

SEQ ID NO: 316435 - DNA, 122 bp, Homo sapiens
tctaagaggcagatattattatcccactttatgcgtgagggcccagaaccctggcaagggcggcacactcagtacgctcttcaagcatctgggcacacccggtccactacagtcctacaaag

SEQ ID NO: 316436 - DNA, 122 bp, Homo sapiens
cagccccggctgctccagaccttgcctgcagcttcccgccccagcctccggctatcgcggcgtttcttctcagaggccgccggctttggttcctcccggcactgctgggcttggggctgcca

SEQ ID NO: 316437 - DNA, 122 bp, Homo sapiens
catgctttgcagcctgtatatttttatttactcagttaatttctctccatgagtgttccccgttaactgggtttactaagtatacagtaccgaaagagttggttagcagaaataattgcttt

SEQ ID NO: 316438 - DNA, 122 bp, Homo sapiens
cgaggttgggataaggaaacgaggctttcctgtcaaactaaacctggccgccccggaccccgaagaagcagccaagagttaagacgcaatctgcatgactgacgcacgctccgagtctccct

SEQ ID NO: 316439 - DNA, 122 bp, Homo sapiens
gcagctgtccgaggtgctccagttggaggctgaggttcccgggctctgtagctgagtgggcggcggcaccggcggagatgcctgggaagaaggcgcgcaagaacgctcaaccgagccccgcg

SEQ ID NO: 316440 - DNA, 122 bp, Homo sapiens
ccccatgtgcttatggaaacaggcttggagaggtgacatgatgtgccctgtccaagatcccggggttagtaagcggcagagaattcccccaatgcaagttcatctgcctctggcccccctgc

SEQ ID NO: 316441 - DNA, 122 bp, Homo sapiens
cctcactggaggtcacctctcctgtgcatggtcacattctgcctgtctgttgagaggctccgttcttcgctgcgttctgcttacctggttaagccacaaaaggttctatgcttagactagac

SEQ ID NO: 316442 - DNA, 122 bp, Homo sapiens
gacttcggaaatggccccctgagaggtgaattcttggaaagaatatgagggcggttaaggcgtctctgtctcaaactctccggattttttgcagctaccagggactgcgagggtctgcgtcc

SEQ ID NO: 316443 - DNA, 122 bp, Homo sapiens
gggtggaaggaaggtgtaataaccgggtgctggggaggacgtaagaattggggggtgcggcgagggtcaaggctagggtaaaacaaggggggctactcaatggctccggtaatgggagaggg

SEQ ID NO: 316444 - DNA, 122 bp, Homo sapiens
acaagggcttagacttcacaagcaccctggcacttcagctgcatggtggggaccctctgccggcagggctgaggccaaggcccactggcttctcaaagcctctgctcctgctctccgtgaag

SEQ ID NO: 316445 - DNA, 122 bp, Homo sapiens
cggccgccgcggctgtcagagaggctgctgccgactccgccataaaggggagtcgcacctcgcctccgccgacacaaatcgactgcgcctggagcttaaaggggaggcgcgcggaggcggga

SEQ ID NO: 316446 - DNA, 122 bp, Homo sapiens
gggccgggggtaggaggagccggctggaattagcctgcctaatgcgcctgtcagtccgggcgctgcgctgcgttcggcccgagctgtttgtaaattacattagctgctcctttattgcaccc

SEQ ID NO: 316447 - DNA, 122 bp, Homo sapiens
aatgccacacgggtgaactgtgcttgtgtggaacaaggctgcgaccccctaccacaccctcggctggctgttcccaggatgctgctcaccccaaccccacctccatttctgcccttctctgc

SEQ ID NO: 316448 - DNA, 122 bp, Homo sapiens
ggaaggccccgggggaaggcgtgtccccgcgccccgccccgccccgcctcggaaagcccccgcggtcccgcccaccccaggggctcgctcagcctccggagacttttttctttgagcgcagc

SEQ ID NO: 316449 - DNA, 122 bp, Homo sapiens
tcggttgggggggcccggaaccttgggctggtttcacgcaaatccgtttggggcgagcctcggtttcccggcagcggtgggaaagggcgcgagcggccagccatggcgcgcggacccttccc

SEQ ID NO: 316450 - DNA, 122 bp, Homo sapiens
gcacgtacctcggaggcggtgtgtccagcggagatccacccgcagcaagttggaggaaagcggcggcaagtttccccgcccagcgctcggcggcggcgagctccggcagctgctgcgccgcg

SEQ ID NO: 316451 - DNA, 122 bp, Homo sapiens
atcaaggaggagttgggataaggaacacatccagaagaagaagctgggagaaaaggtactcgggacatggcttggaagaccccttcccactgatgacccaataaagagaaatatagcctcag

SEQ ID NO: 316452 - DNA, 122 bp, Homo sapiens
acttgaccccattgggctctcccttaactgcagcttattttatatgaggctgtgctcctccgggaaaagaaactcccttatcgacgacagtctcccaaagcttagagcttcaagaatatgtg

SEQ ID NO: 316453 - DNA, 122 bp, Homo sapiens
atttgaggcaaagagaagtcttgctgaaaggattccagttccaagcagtcaaaactcaaccgttagtggcactattttgacctggtagattttgcttctctttggtcagaaaagggtattca

SEQ ID NO: 316454 - DNA, 122 bp, Homo sapiens
tgagcagggtctgggcgacctcagacatgacactgatggcatcccccgtgcgcttccggtcgatgaagatgactcctgccagccagcaggccagcccggcagagccagcccacagtagctcg

SEQ ID NO: 316455 - DNA, 122 bp, Homo sapiens
cgcccaccttggcctcccaaaatgctgggattacaggcatgagccacagcgcccggcctccgatcactttctgagccatggcagacccagccctggaatcaccggcttagtatgtgggccaa

SEQ ID NO: 316456 - DNA, 122 bp, Homo sapiens
cgctggctgtgacgaggacgctgtcaggggacttgccaatggagttggggacaggctcttcggtaaactcggggtcaaagtgccgtaggtcgttgggcccactctgtgacgggaagggaaaa

SEQ ID NO: 316457 - DNA, 122 bp, Homo sapiens
gaaaagaggtgtaatgtgtatgtaggagaagaggcactaaaccactgtgcagctgaggtccgcgtgggaaaggtttcttctcatggatatttgggtagtcgccttgatagccagtggactgt

SEQ ID NO: 316458 - DNA, 122 bp, Homo sapiens
actcccggccccgcacactcaccatttctcggcttacggaggctccaggagtcctccctacggatccctcactacctgcaggtcccagtgagacaaagcatacgcagagccacagacagtcc

SEQ ID NO: 316459 - DNA, 122 bp, Homo sapiens
ggaaccgcaggtgttgatttaaggctcggaacaggcgggccttctgcccacatcctgcggcgcccgcgacccgggccgggcgatccggcgccgggttttgttatccgcccgcacctagaggc

SEQ ID NO: 316460 - DNA, 122 bp, Homo sapiens
cccaaccgatgctcttgcttcagcctcccaaagcaccgggattacacgtatgaaccaccacgccctgctgagtccctgagttttgagagtcatgaatatggtggcaacaccagtgatttcca

SEQ ID NO: 316461 - DNA, 122 bp, Homo sapiens
gacctggggaggaagtgctttggtgtggctcatctttcagtgaatttcaggccatatgctcgagaggatgaggagagtctgccatgatcagtggcatcagggggctggggaaggggagcagc

SEQ ID NO: 316462 - DNA, 122 bp, Homo sapiens
atggggcggctgggcagagacgctcctcacctcccagatggggtcgcgaccgggcagaggcgctcctcacatcccaaacggggcggtggcgcaaaggcactccccacatctcagacgatggg

SEQ ID NO: 316463 - DNA, 122 bp, Homo sapiens
cccccgcgtggctcccagactgccctatcattacctagggcagggcaccgccccctctgtcgctcgccaccaaacatttaggtgaaagctacccggcttcgcggggcacctcccctccccta

SEQ ID NO: 316464 - DNA, 122 bp, Homo sapiens
ggtaggaggaattcctagaaatggcgggaaaggagaggcatggcgcaggcttcgcccgttcgcagctgaagtagagagaaaggtcagaggctctaagaggactctttctagtccgcagtgtg

SEQ ID NO: 316465 - DNA, 122 bp, Homo sapiens
tcacaggtgggaggctggaactatcaggtggggttacggcgcgaggaaaatggcggcggccgggggatctcagaggtgcaggaaggggagctgcagcccgggcttttcctcctgagccatgg

SEQ ID NO: 316466 - DNA, 122 bp, Homo sapiens
atgtcccaggtgagccctccgcgggcaggtgtgctgagggttggagacgggggtcctccccggggctgacagtcgaggggctgacgtgctgctccacctctgggcctgcaaaggagagggaa

SEQ ID NO: 316467 - DNA, 122 bp, Homo sapiens
caccggcaaggttcctggcagcaactgtgtgaagatgttaccctctgagggatcagaccccgggcaaggcgggcatgactctgtgctcttgccagggtggatttcccgggtgagcttcggga

SEQ ID NO: 316468 - DNA, 122 bp, Homo sapiens
attccatacactctggggcttatccgggtggaaacatcaccctggcacctcagcccaactcgtggggaagctgccagagaggcccctttcccgggtcctcccaggggaaccattttcaaagc

SEQ ID NO: 316469 - DNA, 122 bp, Homo sapiens
tattgtttttgagacggagtcttgctttgttgcccagtctggagtacggtggtgcgatctcggctcattgcaacctctgcctcccaggttcaagcaattctggtgcctcagcctcctgagta

SEQ ID NO: 316470 - DNA, 122 bp, Homo sapiens
gctaccttttaactcataagctcaaaagctggtagtctaactggctgccctaattagctacgattttcacactacagacaacatgatgagctaatcgaaatttgcaaaataatgacgtacct

SEQ ID NO: 316471 - DNA, 122 bp, Homo sapiens
aaagaaagaaaagaaaaatatattttaaaacaaatcttaggcaaagcatttttgcttttccgctcactgtcacataattaaaaagtccaccaggccaggtgtgttggctcatgcctataatt

SEQ ID NO: 316472 - DNA, 122 bp, Homo sapiens
ggttaggctggacgtgtctgtgagggttccggatgagcctggcattgggatgagccaggccggctgcggtttgactcagtgagggaagaggcctggcttgggacaggaggaagctgcgttcc

SEQ ID NO: 316473 - DNA, 122 bp, Homo sapiens
ggcagagctgggagccatcctggttgtctgcctcgaaagaccacactctttgcactgcatcgcggcacttcctgcggggtggggggcacaatgggagaagcatctgcgtctaatgctgcttt

SEQ ID NO: 316474 - DNA, 122 bp, Homo sapiens
ctcagcggccaagtccggccggggagggccgagggctctgtttgaggtcaccctggagaccggcctcagagtccagggagagtgcgcgggcggccgccggctgaatgaagcctgggacgcgg

SEQ ID NO: 316475 - DNA, 122 bp, Homo sapiens
gggaactggagtttcttgggttaacctcccggggctaacctacacataggggtgaaaaaccgggcagacaccctgccctgcccactcctccctcagggtggggagatggaagtgaaaccagg

SEQ ID NO: 316476 - DNA, 122 bp, Homo sapiens
aggggccacggcccccctacaacacacactgctgggtgggggtctgccggctgcctgtctcgggatggtgagctgcccactgtgtggtcacactccgctgttctgacaccctggctggctct

SEQ ID NO: 316477 - DNA, 122 bp, Homo sapiens
cgtagcacagacggggcgcaagcgtattggaaagggagcgggtgccagacgcgagaactacgcatgcgtctcagcgctttcccgccagcacacccttagtgggtgggggggggcgattgaat

SEQ ID NO: 316478 - DNA, 122 bp, Homo sapiens
taattttttttttttggaaatggagtctcactctggcacccagactggagtgtgcagtggcgtgaccttggctagctacaacctccgcctgctggattcaagcaattctcctgcctcagcct

SEQ ID NO: 316479 - DNA, 122 bp, Homo sapiens
gcctccagccccacctgctccttccaagcccggtctcagcccggtcagcgccgccccctccgccctgaggaggaacctggcccttcggaagtcttccactgtgttctctggggaaaccacgg

SEQ ID NO: 316480 - DNA, 122 bp, Homo sapiens
cccagccccaggaatatcagtaacaaggcacagctgagtttgtcagtggccgctgtcagccggctgcttttcctgctttcctggtttgcggtttttttctaccactaacaaaatatgatgct

SEQ ID NO: 316481 - DNA, 122 bp, Homo sapiens
agttgactccccccggggaagttgcacggcgactgacggccccagtgacgcgtgcgctcccggcccgagttgggatggcctgccggctgcacctaatgtgatgctaagctgaggtctctcac

SEQ ID NO: 316482 - DNA, 122 bp, Homo sapiens
ccgtgtctgcctcccgcttccccgcctcgcgacttgagccccgcccgtacctgcttagggcgctgccctcgcccgcttgctccggatcccagcccaggtacccggcctcgcccgcgggtcgg

SEQ ID NO: 316483 - DNA, 122 bp, Homo sapiens
gagagaaagaagcaaaggactaggaattcagagacctttgctcgagtcctggctcaaccacgagaaagccatgaaacatttcataaatcatttaacatttctgaacttcacctggaacacag

SEQ ID NO: 316484 - DNA, 122 bp, Homo sapiens
gtgtcaccctggagagaagtcctctctatagttgccttcaaaggtgttatctagcctgggcgcagtggctcacgcctgtaatcccagcactttgggaggctgaggcgggcggatcacgaagt

SEQ ID NO: 316485 - DNA, 122 bp, Homo sapiens
cctgcctctgcccggggctcaggatacggtcacctgtattcgctgtggcttcaacatcaacgttcggggtgagaggcttgtacgcaggggtcctggcggagggcgcagggtcggaagcttgg

SEQ ID NO: 316486 - DNA, 122 bp, Homo sapiens
gagtaagttttgggcccggagatgacgtcctgggacaggagttgggcctggagaggccaacgtgaggcatgagctggatgtagagaggccagtgtgaggcaagacctgggcctgtctaggct

SEQ ID NO: 316487 - DNA, 122 bp, Homo sapiens
ccgtgtgcattttgtttcttattaatcttacacattgacagtctttgttaaatcacaaggcgcgcccttcactagccgacattttcatatttgttagacgcactgacctgaagttcacctcg

SEQ ID NO: 316488 - DNA, 122 bp, Homo sapiens
atcccggagggggaaaggcgagcagctggcagagagcccagtgccggccaaccgcgcgagcgcctcagaacggcccgcccaccctgatttctcattggcgcctcctacctcctcctcggatt

SEQ ID NO: 316489 - DNA, 122 bp, Homo sapiens
ctcctatttcaaaagcaatcacctagtttctgggcttgccaaatcttatggtcattaagtcgccttggccctggcatatcttgatcatgaatagaagacagactttattttcttgtattttt

SEQ ID NO: 316490 - DNA, 122 bp, Homo sapiens
gcctggggtggcgcccgcctcggccgcctcgcctgctcagtggctgcgtggaacacaaagcgctgtctccgagcagaagcgtcttctcagctgaaccagacccaccaaagaggagaatctgc

SEQ ID NO: 316491 - DNA, 122 bp, Homo sapiens
gttccgccgccttcttcccaggtgccctggcttctcggctgcccggccccagaagtgagacgaagagccaagtgcagggaatggggtgtcaaggtagagaggctccccacaggaaggtcaga

SEQ ID NO: 316492 - DNA, 122 bp, Homo sapiens
tgcagagagagaaaaggatcctaaagccatgttcccgatactgcagacttggcgagatggcggcgggctcctcccacctctgcggcagcgtcacaatcaataatgcagggctctgcggcaga

SEQ ID NO: 316493 - DNA, 122 bp, Homo sapiens
tgccccgtgggaaaggctggggtatgtgcctgcctggtgacggtggcagccgcggaggctcgcggatcctgtcccctttgccggccacatgcttctgactcatcagaggaagaatgtggtct

SEQ ID NO: 316494 - DNA, 122 bp, Homo sapiens
cggatctcagagctgatggagctgaggtcactctgaaaagctcccaacatctgctccattcgctgtagggagggtagatgttgccggagtgctatagggtttgtaggggataagtgggccac

SEQ ID NO: 316495 - DNA, 122 bp, Homo sapiens
ccaggtcgccaatcaccagcaacttgtacaggtgctccttgtgcggggcctgcatcctggcggccggccagacgtgccgtgcctgaccagggaagcgcagcctgggctctgcgcacgagaga

SEQ ID NO: 316496 - DNA, 122 bp, Homo sapiens
tcgtaagtttagctaatttcgttttcataacggctgtgtttggcaacccacttccgcgagcggtaacagcagtgccggccaccacgggcggtcatggaattggagaggatcaggcggccttg

SEQ ID NO: 316497 - DNA, 122 bp, Homo sapiens
gaacgcccacgtcccgggaggggacaggggccggagacaggggcgaagacaccttcgaaacgccgccccactgggccttccagggaggtagaagaggtgcctggcaccctcagctgctggta

SEQ ID NO: 316498 - DNA, 122 bp, Homo sapiens
tctcactctctgggtctctggcatctgtcccgtctccagcacaaacaacatctgggcaatcgatcatcctggacacaggaggtgcaggggggccacgaggaagagatcagagaagcagctct

SEQ ID NO: 316499 - DNA, 122 bp, Homo sapiens
cttggctggagaccacgttcaggtagtgaagaagacacaggagacccttgggggccagcccgcttcgggagaaccgagcctctgccctgccgtcccggggctggacacattccctctgcaga

SEQ ID NO: 316500 - DNA, 122 bp, Homo sapiens
tgggggaaagacaaggcacactggatgtgaacccggccaaggggccatgtgagtcaggtgcgcaactcctgccacctcctgggccccttaagccccagagcatcctgaggatatgctccagg

SEQ ID NO: 316501 - DNA, 122 bp, Homo sapiens
gctgtggtaattgccaggttatctgcctctcccattacagttccttcctcacagggaccgcgtttaaaccacggcggtatccctaccgcgcaggatgggccgagccccgcacgccccgaggc

SEQ ID NO: 316502 - DNA, 122 bp, Homo sapiens
agggaggacggcaactggccaatcaggaggcgaggccgagccaggcttcccctcgtcgctcgtgagctgcaaacagtggaaagttgggaacctcagtcgctggcccaggcggagagcagcgg

SEQ ID NO: 316503 - DNA, 122 bp, Homo sapiens
gaccgcttaccttcgtgagtcttggcgatcttcgccattttgtccactcgaacacacagacggaactggcgctcccaagaacttccgctcgtcgccgccgccacggagaaaaatagctgggg

SEQ ID NO: 316504 - DNA, 122 bp, Homo sapiens
caagctccaactcgtcccagaggcctccctggcaatactgtgctcttgtagggaccccatcgtcctctaggtaaatagttcacactggccctcaccccactgctggctgctggcagggagca

SEQ ID NO: 316505 - DNA, 122 bp, Homo sapiens
tagatgcagaataagggttgaaagccgcctgaagaacttgtcacatttatcacatttgtacggtttctctgaagtgtgaattctctggtgaagcatcaggggtgaaatcctattaaataatt

SEQ ID NO: 316506 - DNA, 122 bp, Homo sapiens
ctggggaacactggtccggccccccgggatcccccgggcccacgggttcctcttcgccctcgcaccgacccgcagggacatagaaccaagccccaggctggcccagctacaagaccgcctct

SEQ ID NO: 316507 - DNA, 122 bp, Homo sapiens
agccgctttgataaccgtcctgcgaagtcgccttcatcacgtccttgcttttcagagtcccgagccttgctctgagtgagcatctccgtgttgcctttcggccgtttccagagaaatgtacc

SEQ ID NO: 316508 - DNA, 122 bp, Homo sapiens
tacctgccagtcactgtacccacagccaggacagagccactggggtggaagccggctgagcgggcagggtcctgagaagggagagagaagaggcagggctcagagctggggtcccatgtcca

SEQ ID NO: 316509 - DNA, 122 bp, Homo sapiens
aaacggccacagtgacagcagtgggtaacggcagagctgcaactactctgacaggggtgacgacttatttggacgacagttggtgaaacattgtaaactctcagaagctgccgtttccagac

SEQ ID NO: 316510 - DNA, 122 bp, Homo sapiens
ccagccgaggtccctgtcgcaaaccagagtcctagaaaaggaactgggctagagcacaggcgaccacagactcgctgggtaatcttgggccagtctctgagcctcagtttccccactggtaa

SEQ ID NO: 316511 - DNA, 122 bp, Homo sapiens
ctcaatgaacaagcagatctgtttgtcacaggggcttacatcacccagcacccagtttgtcgaaggggcttacctcacccagcactcatggaagcttagtcaaaactcaagagaaccttaca

SEQ ID NO: 316512 - DNA, 122 bp, Homo sapiens
agggacaggacagagaggagacagtgtttgctgttcagggctaggacatcaatgcatcaccgttcctggagatcacagctcaggaatactacagagataaaaatggacttgaatgttgactg

SEQ ID NO: 316513 - DNA, 122 bp, Homo sapiens
aaatgattaggtttctttgatgtgttaggattgatgagtgccacgggaagactgccgagtcggaagagacgcatggcctgccccgggtcggaagagacgcgtggcctgccccgggtcggaag

SEQ ID NO: 316514 - DNA, 122 bp, Homo sapiens
ccccccacctccctcccggaaggggtggctgctgggtggagaccctcctcacttcccagacggggtggcagcggggcggaggggctcctcacttctcagacggggcagttgccaggcagagg

SEQ ID NO: 316515 - DNA, 122 bp, Homo sapiens
tcacaggcatggaaatccagattgtgcaaagaggtcaagaacctgaataattattccactcgtaaccaaacagtaatagacactccctttgaaattgtggaaattctcatttccacactaaa

SEQ ID NO: 316516 - DNA, 122 bp, Homo sapiens
tttatgatgggtgaacaatgtggaagacatggaggttaaatatacagcccaaagcctgggcgacatagcaagacccccgtctctacaaaaaaaaaaaaaattttaattagctgggtgtggtg

SEQ ID NO: 316517 - DNA, 122 bp, Homo sapiens
tgaacttccctcccctcttcccccctagatgaagatagctcagcccctgggcacttcactcgacaggtgctaggctagtgtcaggttcagatgatgccacttaaaacctcagacattccgaa

SEQ ID NO: 316518 - DNA, 122 bp, Homo sapiens
tcttaatgaagtaaaggtaaagaaaaataaataaaagtaggatttatctttacttttcaacggcagctgactggccatcaggaaatctatttcatgtttattgggggataaaatctacactc

SEQ ID NO: 316519 - DNA, 122 bp, Homo sapiens
gaaagttcaatttattgggaaaaaaagagccctttggaaacaaggaggaagaagaagtgtcggcaaagaagcattaggaggttcagggtcaaagaagacaaggaaagctttggcaagaaggg

SEQ ID NO: 316520 - DNA, 122 bp, Homo sapiens
gtgactgttgggtctgattcaagggaccttgccttctgtggggctcacagtgggaagcaacgtctatttttagatcagatcctgtccctatccctctccgggcccagcgtgccgcaggtaat

SEQ ID NO: 316521 - DNA, 122 bp, Homo sapiens
ctgtttctcaggctcttctgcggtgatgttcccccagcagggcctgtgccggcacagacgcgtcctccggccctccccacgttggcagcacgttgactgtgtctgaagcttaatcccgatgt

SEQ ID NO: 316522 - DNA, 122 bp, Homo sapiens
catgggcttatgtgacaggcctgtggggcaggcagggcaggcattattctacacattgtacggatgaggaagctgaggcacagaagttatgtgccttgcccaaggtcatatagctaggaagt

SEQ ID NO: 316523 - DNA, 122 bp, Homo sapiens
tgcgttcggcggcgcccggaaaatcagtcctgctggatgcgcccgagcgggcgcgggagacgccgattccgcgccggcccgcccccgccagtttacaaagcaaactttccccagagaagttc

SEQ ID NO: 316524 - DNA, 122 bp, Homo sapiens
aactggtccgggccacttgggtcacagccgcggttcccgggagaaagcgctccctagccccggaacagccaatcctcggccctagccaggtatgagctcccaggcgagccttccaaacccaa

SEQ ID NO: 316525 - DNA, 122 bp, Homo sapiens
ggtgagagctgtctggagggctgggcacttggtggcaggggttggcggtgcaggggacaccgccgggacagggctggggtgccctggagcgggggagccgagggagtgggagcgggggcgca

SEQ ID NO: 316526 - DNA, 122 bp, Homo sapiens
aaaaaagaaaccatcttgggctgttaatcatgttgactgttgagaagctaagagggaagccgatctgtcattaggtaagaccaagccaaaatttatggatttcataccttagtggaaaacac

SEQ ID NO: 316527 - DNA, 122 bp, Homo sapiens
aacatcgcttaatcaggacacactgtggccccaaggcttataagtgaccctttcactggacgtcaccagaacacctgtgtgcagggtggggacacgtgctggaggtttgtgctgctgtgtca

SEQ ID NO: 316528 - DNA, 122 bp, Homo sapiens
ggcggcgaagccagtttccatcagaactgcccagaggcgggcgctgccttcctggggtgacgcagcagcaggaagagtttccggatcctggaatccgtgggcggcccgtgggaggggctgag

SEQ ID NO: 316529 - DNA, 122 bp, Homo sapiens
gggagtcaggaaagcgggaatgcggcctccccttccccggatggacagttggcaggaccccgccccagcgcccctgattggatgaggctccagtccccgtcccatcggtcctgagtgacagc

SEQ ID NO: 316530 - DNA, 122 bp, Homo sapiens
aaggagatgacctgccctaaaatgtcactcgcgcccatcaaagccacagtcaccggctgccgtagctgcaagcttttttctgaaatccaggtacgctaatctaaagtcagacatcacagctc

SEQ ID NO: 316531 - DNA, 122 bp, Homo sapiens
ctcccccgcccctccccctccgctctccgccccagcccggcggctccgccccctaggtgacgtcactggccaggccagccggcgccattttgaaagtggagtcgcctgcccctgccgctgcc

SEQ ID NO: 316532 - DNA, 122 bp, Homo sapiens
gatagtgaagcaatgacaggtacagtgcgtacttgaggaagtttattcctttaggagcgtcgtgaagaacaaaatataagactcttgtgttagggagtaggaggtaagaaagggtctggact

SEQ ID NO: 316533 - DNA, 122 bp, Homo sapiens
cgcccacgtcccgggaggggacaggggccggagacaggggcgaagacaccttcgaaacgccgccccactgggccttccagggaggtagaagaggtgcctggcaccctcagctgctggtagat

SEQ ID NO: 316534 - DNA, 122 bp, Homo sapiens
tgcaggcgggaaccggggctgcgcggcaggcacttgaaggccagtgcgagttccggtgggcgtgggcttggtgggcccgcactgggagcggcaggccggccccgccaccccgggcagtgagg

SEQ ID NO: 316535 - DNA, 122 bp, Homo sapiens
gcggcccagagcggggcctgcccttccacaccagtccgcattgcctctccctgcagcgagcggggaaaggacgcagtgctgctgagtgtcttcatttttgttcgtttttgtcgtcattcctc

SEQ ID NO: 316536 - DNA, 122 bp, Homo sapiens
atcaaaaacacacggaagaagcgttacaagcagtgcaggtttaccaacggcttggggcagcgatatactaaacaaatttaatattaaaagcaactgtgtgacgattcctccaagcaagaaat

SEQ ID NO: 316537 - DNA, 122 bp, Homo sapiens
ttcctggactcaaacaaaagcactgaggtaataacgcaacatctaggcttatggagttcacgaggctacttcaatggagcccaagcggtgggaacaggtcatttgggggcagacacaccaga

SEQ ID NO: 316538 - DNA, 122 bp, Homo sapiens
gaaaatcagcgaaatgctgagcgttgcttcttccctctctccagggctttgatgagaaaacgtgctgctttgtgcgggcgcatccatcggcggggataccccgcccccacctccttcgaagg

SEQ ID NO: 316539 - DNA, 122 bp, Homo sapiens
aaaaagaacattacaagtattaactcattaatcctaagtgatagttgctattcttattcccgctattgagatgaggacactgagatccagagaggttaagtgacttgcccagaggcacacag

SEQ ID NO: 316540 - DNA, 122 bp, Homo sapiens
tcttaccattttcagaaatctgtttgagaattgtcagcattttagcttgtctcaggatgccggcatgaaccacatctttgcaggtgctccgctaggaccattttttgtaaagccaattaata

SEQ ID NO: 316541 - DNA, 122 bp, Homo sapiens
acggaaccgtcgaccccaatagtagagcgaagctgctcctcacctttgttctccttgatgcgctgcagcacgggggccagggtggctgtgcacaggctggcggagtgtgtggacacgatctg

SEQ ID NO: 316542 - DNA, 122 bp, Homo sapiens
agccccgccgcgccgagcctcccgggcgtccgcaggcctggcgcacaccgaagcggggggcgcagtactgctctcccgccccccggagccgagcctcttcgcgttcgcaccgtgaaaggagg

SEQ ID NO: 316543 - DNA, 122 bp, Homo sapiens
atgcagccaagacagacaagtcccagctcttattattcacaggaagtgcacaaacacacacgagcttcccaaacctgggaggcccatggctccccagcttctcctcatcaagatttcagcat

SEQ ID NO: 316544 - DNA, 122 bp, Homo sapiens
ggggaacaggaggatatgtccgtagaagacttcgtggactggggaaagccacgccgggatcgggacgccggagagggtcgcccctccctaggctttttcccgtcgcggcgcccacgtgaccg

SEQ ID NO: 316545 - DNA, 122 bp, Homo sapiens
tggcggaggaagattaagagaaatcgcgagcagggctcggctgccattggtgtgtgcaaacgccgaggaggaagggagagggagagtgagagtgaggaaggggggagagaagggggaaaaac

SEQ ID NO: 316546 - DNA, 122 bp, Homo sapiens
ttatttttacaatcatcaagaaatacagtcatgtattataaaactggaacaagccaggcacggtgggtcactcctgtaatcccagcactttgggaggccaaggcgggcagatcacctgagct

SEQ ID NO: 316547 - DNA, 122 bp, Homo sapiens
ttccggcgccgccgggtgtggggcggaggtgtggggcggcttccggagaacccagcggcgcgggactggggcgggacttccggcgacaccggaagtgcattagcgccaggttggggttgtgg

SEQ ID NO: 316548 - DNA, 122 bp, Homo sapiens
atacaatgatatcaaagcctatacattgataggcatccattcatccaggataactaagtccgagagtaggtggcaaaaggcatttctgggttccagtaatctaccaggtaatggaaatgtca

SEQ ID NO: 316549 - DNA, 122 bp, Homo sapiens
gtgatcttcatgaggtcagggcagtctgctctccacttggttaaagtatatttccaaagccgagggacttcatttccttagtgggatgttttcaggatttgtattttcaagtgaaaagtgtc

SEQ ID NO: 316550 - DNA, 122 bp, Homo sapiens
ggggactctcttattaactgtattttcatttacttctccagatgctggttaacctccacacgcttgattttcaagcatctgatctttgataacttccatattaagagacttcatttcaccat

SEQ ID NO: 316551 - DNA, 122 bp, Homo sapiens
tgggttccaggaattacgtggttacgtccataacagcccatctgacaagtggcaaatacccgtggaaaaccaattaactgtgctcctcggtttaccctggaggatggtggcggatgacgcga

SEQ ID NO: 316552 - DNA, 122 bp, Homo sapiens
ggaaaacggacgctaatggctggaaaagggccaggaagctgctgggcgcagcccccggggcgcaggcagcgactggtaacagcactagggctgtgcggtgtctggccccagctctacgggac

SEQ ID NO: 316553 - DNA, 122 bp, Homo sapiens
cagtgctgctgatgctgcggcggtagctgcggttcagccagttgcccaccacgccgaggccgtagtgccgcttcttccgatcaaaggcaaagtgcttcaccttggaggcgatgcgcttgccg

SEQ ID NO: 316554 - DNA, 122 bp, Homo sapiens
cgggccgagccgccgccgccgccgccgcccggcccggcggcgaggccgctccaccgcacacgcacacacagaccccggcagcgggaacgcagatgacacgcccgtaacatggaagccgccgc

SEQ ID NO: 316555 - DNA, 122 bp, Homo sapiens
ccatctgccggtttccccctggtccccggcccgccctcaccaggcgctgtggctgcagtgcgtcagcgacaaagcgtagccactctcccagggctccttggcctcctccgcggtgacctagg

SEQ ID NO: 316556 - DNA, 122 bp, Homo sapiens
cggttcccctaaccgagctgagaccttccgtagaactccgcaggggcagctcttcctaatcgccttttattgctttataggtgcctgtagcttggataagctggggcacagcaggccgttat

SEQ ID NO: 316557 - DNA, 122 bp, Homo sapiens
ctggcaccgtggagccctggtcgggtcaggctgcacgcctgcacaccgacgccgtgaaaacgcagacccagcacacgctcagctccagccaggcgacctcccactgcagccaagcacagcaa

SEQ ID NO: 316558 - DNA, 122 bp, Homo sapiens
cagagcatgcggggcactcacgctcctgcacagaaacacacatccttccactgcccccaacgtagcactgtcaaacgctgtggacacaggtctcttgcatacagaccagatacactccactc

SEQ ID NO: 316559 - DNA, 122 bp, Homo sapiens
gtgattaagtgacacatgactgtatatgaatatattcttattgtaaaatattcaaacatccgaatagtacagacacatagagtataagcaaaacccaggcatgagcccctcctcatctcacc

SEQ ID NO: 316560 - DNA, 122 bp, Homo sapiens
ccaactggacatggtgctagaggttgggtggtcagacactgtgatcccgggtgctgtgcccgcactacgggaaggggaagcagcgcgtgggtctcgcatcaggaggcaaggccaggacccgc

SEQ ID NO: 316561 - DNA, 122 bp, Homo sapiens
tgacacacactcactcgctgacacacgctcgtgctgacgggcacagcagcactcacgagccggcggccctcatgccatccccagagccccttacctgggcaagcacagtgccccccgggcgg

SEQ ID NO: 316562 - DNA, 122 bp, Homo sapiens
tactagcgtcagggccccaagtaaatgcacctatatcattttgagatctttgaatttcttcggccaacccactgtctggagtttcctccatgatcaggttacacaaggaaagactttctgaa

SEQ ID NO: 316563 - DNA, 122 bp, Homo sapiens
cctggcacgggggacgaagcactttccagaaggctctgaaactaggtcccctggtcccctcgcgctgcgcgacacgccaggacccactttcagccccggtcccatcccggatgggaggaggc

SEQ ID NO: 316564 - DNA, 122 bp, Homo sapiens
cggggattaacatggagctttgctggtatccaggcaagtgatgatgtgggtcttatcacacggtagacattgtgaccttcagaagtttacataagtgatgatgatacctctaacatttgtgt

SEQ ID NO: 316565 - DNA, 122 bp, Homo sapiens
ggaagaagaggccatagctgctccagccggggctccggggcggcagcagagctggcacaccgattctgggaagccccgcgaatgatggcttttgaattaatgaggcagtgaatgttttgtgt

SEQ ID NO: 316566 - DNA, 122 bp, Homo sapiens
tccggtcgaaggtgtggtgggggtaacaacagcaggctcatggatacctgggcagtgctccgaggtccctcctgtgttcccactgagcagcagcctgctgtgcccggagtggaggtgagaaa

SEQ ID NO: 316567 - DNA, 122 bp, Homo sapiens
cctgaacggtaggcgagcgggcagcatgaggaagtagctccaaaggggcggagccaccagcgcgcacgcgcactagggtccgaggcgcgcatttgacccgagacgaaagcgcgtgggtactt

SEQ ID NO: 316568 - DNA, 122 bp, Homo sapiens
agagatgttgccccctcctcccctgccatcttgttgagccagaagaacccctccaactcccgcctcttcagccagagtgctgggaggctggaaacatctccacaatgtccttaaaaggggaa

SEQ ID NO: 316569 - DNA, 122 bp, Homo sapiens
tgggccagcagcttcaatcgcctccgccacccgcgcccaccgcccaccaagctgccaaagcgagctgagcagaattcgaggttggaaagaatctgccagtagttgccaggacaaatgacgca

SEQ ID NO: 316570 - DNA, 122 bp, Homo sapiens
ggtgtggccctcaagcatggtccatccctcccccaagagcggaagcaagccccttccacccggagggactccgctgaaccttccagcagccgctctgttcctgtggcccaccctgggcctcc

SEQ ID NO: 316571 - DNA, 122 bp, Homo sapiens
aaggtacacattattttagcagtcttccttggggaggacgtggggcaagcacaagcgtagcgttaggcctgagactccaccccagccgtctctgagcccagttcagcacgcacgcgtcaggc

SEQ ID NO: 316572 - DNA, 122 bp, Homo sapiens
ttgggctgggcacagtggcttgagcctgtagtctcagcgacgagggaggccaagactactcgagcccaggagtttgaggccagcccgggtagcatggcaagaggctgtctcacaaaaccaaa

SEQ ID NO: 316573 - DNA, 122 bp, Homo sapiens
gctgttgacagaggctgcacataaacgtctgcgcccaacagctcatctttggtcgtgacgcgctgagtccacctcatttcaaatgttacgctcgccccaaggtgaacacagatgttacaggt

SEQ ID NO: 316574 - DNA, 122 bp, Homo sapiens
tcctcagagaacacctgccctattccagggccaggaccccagccccgccccgccccgccccgccccgccccgtaggatgcaaggccccgccccagccccgtcgggtcccagagaaactgccc

SEQ ID NO: 316575 - DNA, 122 bp, Homo sapiens
ggcagatatgatgaggatggcaaacccttcaatcaaagatctttgcttttggggcatgagcgaattctcacaagagcaaagtcttatgaatgcagtgaatgtggaaaagtcattaggcgtaa

SEQ ID NO: 316576 - DNA, 122 bp, Homo sapiens
gttttccccacacctctcctattagcagatcaacattacattgtgaataacagatggagacgtgcaggttttccaccctcccctgaagctcctggccttggcctaagactagatggcagcag

SEQ ID NO: 316577 - DNA, 122 bp, Homo sapiens
tacctaaggtcctggacaggcagatacataacttctgcctttggcaacgttagatgtcatcgttccagagtaaaatacctataaaaacctgccgatgcgcggggagcctggccttggtctgg

SEQ ID NO: 316578 - DNA, 122 bp, Homo sapiens
caggcggggagcgggtttgccttcgggggcccaggggaccctgagaagtctggccgtgcccgggcggtgagcgcggaggcggcccgccctgtgtccccgcggggcggagccgggttcggggc

SEQ ID NO: 316579 - DNA, 122 bp, Homo sapiens
tgtagcggtgggtctcgtccttccagggcctgcgggctctggaacgggaagtctccccagcgggcagcacttgctgtggactggctgcccataggcgatttgtggcagccgattatttgggt

SEQ ID NO: 316580 - DNA, 122 bp, Homo sapiens
cccctaaagcggcggagaggagtgtcgggctgagtttccggctgagagtccttctagcggcgccggtgagtccgcgtgtggaagtctgtgaggcgcagaggtggggcaggccgtctgactag

SEQ ID NO: 316581 - DNA, 122 bp, Homo sapiens
tccgtagtgtgcagccgcagctgtgctgctgtccacaccataaaaactcctggccacagacgtgccacagtcggcaggataagaatgcccagctggatcttggggtgcacagccccagctgt

SEQ ID NO: 316582 - DNA, 122 bp, Homo sapiens
ggtgaatatcacacattgtcattatcattaccattgacattgctgttgtcctctctgccacgctgctttcagaccaaggaccccagaggatggaggcctctcggtggtggctgctggtcact

SEQ ID NO: 316583 - DNA, 122 bp, Homo sapiens
ttcccttgatgtaagttcaaagaccataaggaacaatttagggaacactcagttgctcagcgggagtcccttgtggcttatcagtgtcactaagagcaccagatgcatttataatcccatcc

SEQ ID NO: 316584 - DNA, 122 bp, Homo sapiens
gggggtgtccgggagtcggatgggcctcactctcctggcctccactgggtccaggagtggcgatctgtgagccaatggccgtggctgggggcagcctggggtgttgagaggccctgggcagc

SEQ ID NO: 316585 - DNA, 122 bp, Homo sapiens
ggaaggatgtctcctggccccactgcctccaggacggctgctgaaaacataccagccaggcggcatgcagggacccaggcctggcatcctacccgatgtgctgcaagtcagaacttgcaccc

SEQ ID NO: 316586 - DNA, 122 bp, Homo sapiens
tgaacgttagcgtcctgacctttgcaggaagcagtagtgacagccccctgtaaatcatcccgactagcttaccaggctctccctagataaggcagctgctcgggcctttgttctggtaaaca

SEQ ID NO: 316587 - DNA, 122 bp, Homo sapiens
cacgcgaggatgctcacagcagccaaatgctgggaacaacctgtgtgggtacaagcaagacgtggtgtgtccctcgacggagcacgactcagcgacaacaggagcaaagggtgggggtagga

SEQ ID NO: 316588 - DNA, 122 bp, Homo sapiens
ggcgcgggcggctggtggctgcggctccgctgccggccgagtggagcgctgcgcagctcccgccctcgagaaaccccgccgtgtcatttgaccatataaggagatgcacgcctcggctcgct

SEQ ID NO: 316589 - DNA, 122 bp, Homo sapiens
tgacgctgcggtggtggacgcgggagggctggcacttgacactgctcgtgttgcagcagccggtgcagcgtttcacctccacgcacgggggccagatcaggaagttggcggacgtggggtcg

SEQ ID NO: 316590 - DNA, 122 bp, Homo sapiens
gggagaggtgcccgcagaggccgaggtgcgcgcacagccgcgcacacgcgcgggcaccgacgcgaagccgagaggatgcagatcccccgcctggctctggattatctgctctgtgtttactg

SEQ ID NO: 316591 - DNA, 122 bp, Homo sapiens
catgagcattatgaatatgagcattagccaagacttaagagaaattcagggcatggatagcgggaagaatttaagattagagagcaaaataaaactgttaaggggaaaaaactgtaaggaga

SEQ ID NO: 316592 - DNA, 122 bp, Homo sapiens
gtatgagattcctctatttggttctgaatcagaatcggtggctctaacttgaacaacagacgttccaattacagatgcctcagacagggtcaccgcataagactgctgagcaaacacaggag

SEQ ID NO: 316593 - DNA, 122 bp, Homo sapiens
atacggacacgggaggaatacggacacggagggaacagcgacacggggggaacagcgacacggggggaacagcgacacggggggaacagcgacacggggggaacagcgacacggggggaaca

SEQ ID NO: 316594 - DNA, 122 bp, Homo sapiens
actcttctaggccacccattgtgatacgacattattacatccccgtttcatgggtggactcgtcgctagggaagtctttgccgacagaaaatcacccttccgcggtattcctttaatgagaa

SEQ ID NO: 316595 - DNA, 122 bp, Homo sapiens
ctgagagctgggcttgggcgggagaagcttgacagggacagacacgggcatgaccataggcgtgaggctttctgcctcgggagggagctgtggtggcggcggaggcggaggcggaggcggca

SEQ ID NO: 316596 - DNA, 122 bp, Homo sapiens
tctgggctgtggccctctggtagccctccatccaatggggaggccagcgagtaaacaattcggtggaacatcatgccacaatgacacagcgcagtgagtgccatcctgcggtgagcaaggga

SEQ ID NO: 316597 - DNA, 122 bp, Homo sapiens
ttaggtttcacccttgggaatgttcaggagctaggttatccagtagcaacaaacaacacccgtacctcaggtggcttaaaacaacaatttattgcctactggagtcatatgttattttagtt

SEQ ID NO: 316598 - DNA, 122 bp, Homo sapiens
agctccaagatgggtgcagcttctctgtactctctacctacaagccaagtaaagcaagatcgggctatggcccctgccttaaagcccatcctgcatctccaccaagaaacatgcagcacccg

SEQ ID NO: 316599 - DNA, 122 bp, Homo sapiens
aactcctgacctcgtgatctgcccgccttggccctgcaaagtgctgggactacaggtgcccgctgccatgcctgactaatttttttgtgtgtatgttttagtagagacggggtttcattgta

SEQ ID NO: 316600 - DNA, 122 bp, Homo sapiens
cttgcaaataactcctagcccacccacaccgtctcgtccgcactttccgagagccaggcacggatatattgcaactcactctagggcagggggcaggggtacaagtcgaactggctctgcct

SEQ ID NO: 316601 - DNA, 122 bp, Homo sapiens
ttgttatgaaagtgaagagtccaatgaaattcagaattttgggctgggtgcggtggctcacgcctgtaatcccagcactttgggaggccgaggtgggtggatcacctgaggtcaggggttcg

SEQ ID NO: 316602 - DNA, 122 bp, Homo sapiens
cttaactatactgaagtccctttgtttttcagtagagaaagtgctggagcaagaaccccacgtggttcacgtggttttaccgaagatatcttacatgcccacaggacgtgacctgtgggaga

SEQ ID NO: 316603 - DNA, 122 bp, Homo sapiens
cttgctctggtgtgttgctgtaggggaggggaaaggcatgtgggattacagctaggcccccgggaatgtcacataatcactagctcagcttatctgtgctcagcctcttgtgcatgctgtta

SEQ ID NO: 316604 - DNA, 122 bp, Homo sapiens
ctgcaaacccggcggcccccccagaggagggcagccccccgcagttgcggcagtggtgggcgcaaggtgctgacccccttgcctgacccgctggggctggaggagctgaaggacacaggggc

SEQ ID NO: 316605 - DNA, 122 bp, Homo sapiens
cacataacgccctccaggcggtgccaggatccccagaactgctgtcccctcaagaacacacgtcccctacgtgggaggccgcgaccagcgactccgcccacttctcccagccggctgttacg

SEQ ID NO: 316606 - DNA, 122 bp, Homo sapiens
agccagcccctcccacctctggctcttaggactcacattgcaagtgggggaggcatcctccgcgaggcgcggactgagagccagcccctcttccccccctggctctagggacccccatcgca

SEQ ID NO: 316607 - DNA, 122 bp, Homo sapiens
caggaggccagagtgaaggggtccgttctgtccctcacactgtgacctgaccagccccaccggcccatcctggtcatgttactgcatttgtggccggcctcccctggatcatgtcattcaat

SEQ ID NO: 316608 - DNA, 122 bp, Homo sapiens
ttcttagcctgtaaaaagcctagggccagagaagcagatcttccctatgttctggaactgcgccaaagtgacacgtgtacatcccgggaagaaccttgggctggacgcggcctcctagggga

SEQ ID NO: 316609 - DNA, 122 bp, Homo sapiens
tccctgtctttgtagtcagccgccggccatcccggctgtcggatccccgccagccggctccgcacatccctccggctccgtgccgcccaccgcccgccagctccagtcgctgccccgcccgc

SEQ ID NO: 316610 - DNA, 122 bp, Homo sapiens
tcgtcctttaagccccagtccctcccaaggaggggaagtcggtggttgtggcagctccgccggtttctgacacctgagacttggtcttcggagggccctgcctgacactacattccatgtct

SEQ ID NO: 316611 - DNA, 122 bp, Homo sapiens
cgccagcggtggcagcagtcgccgacaggggtggggcgcatgcgcacagttgctaggcaacggcggccgggcgccgcggcgataaccgcgccggggctgtgtgtgtaggcagaggcgccaga

SEQ ID NO: 316612 - DNA, 122 bp, Homo sapiens
tactcatggcaaccaagcttcagatttttcaggtaagttaatttcattgcattgcaccatcggccccataaggacaacctccacaatttgacattttaaaaatatggtccatgtggtagaca

SEQ ID NO: 316613 - DNA, 122 bp, Homo sapiens
aaggaccctgtgggggagtcacactgcccaggggcccacattcaaacccttgccacattccgttctaagcgcattacacaggtcatctaatttatccacaacctacaaagttctacaagtga

SEQ ID NO: 316614 - DNA, 122 bp, Homo sapiens
ggggaatgctcacctccggggccacgaaattggccgtgtagcagggtgtcatgagcagcccgttccccgcgcgcagctgcttggcaaagccgaagtcgcagactcggatggattctgggctc

SEQ ID NO: 316615 - DNA, 122 bp, Homo sapiens
ttaagaacagaagccatgtctcaggcggccatgagatggtggatcactgcacggttaccccgcagacccagggcttatatactatagggaatttgcctaagggcaggatttatggtaagtgt

SEQ ID NO: 316616 - DNA, 122 bp, Homo sapiens
acgccaagcagaagctgcagcagacgctgcagaaagcggagaccttgcccgagatagaggcgcagctggcgcagcgcgtggcggcgctcaacaaggtgcggggaggactcgggtcggggcct

SEQ ID NO: 316617 - DNA, 122 bp, Homo sapiens
aaggaccgctgctgggaccggtgttttgggtgggcgcggcgagtgacagctgcagagaaacgaataattagcgattgcaacccctgataatgagtagctccatgatccttcttggagccatt

SEQ ID NO: 316618 - DNA, 122 bp, Homo sapiens
gagatttgaggggtcaaggggataatgatacagttgggatgtcccctccaaatctcttgtcgaaatgtaatccccagtgttgaaggaggggcctgcaaggaggtgtttaggtcatgggggcg

SEQ ID NO: 316619 - DNA, 122 bp, Homo sapiens
ttgttagttgtaaagctcaataaaggctgtgctgatttgcatacagaggagggcatctgccgtgggagaggaacagagggccctcccgagatgttccttcctccctgcggccagcgtcccca

SEQ ID NO: 316620 - DNA, 122 bp, Homo sapiens
aacaacctttgttgttccccctgttcattagctagccaaatactttgctctttttcacttcgctccccagactactttctaatatggttatatttatgaacacctcactacatggtttctag

SEQ ID NO: 316621 - DNA, 122 bp, Homo sapiens
tgcaaaccaaactacagggtacactcttagtgagccagccaaactgcagggtagactgcccgccaggtctcccatcttagcccctgagcttgatcacagtgggaggctaaacatggaggaaa

SEQ ID NO: 316622 - DNA, 122 bp, Homo sapiens
ggcccaaggctgtgttcgtggctcgtttgcctcgtgagaggcggtgaatcatcggcgaagcgactttggaagcaatttggccattggtgcctttgggctcttccggtctcctcccctatggc

SEQ ID NO: 316623 - DNA, 122 bp, Homo sapiens
tcagggagcaggggacttcaaggacctgtttctcctctgcaggccagcaccctgattctccggaacacccttgttgccctaaagggggagccttagagtagccagagctcagccagacccta

SEQ ID NO: 316624 - DNA, 122 bp, Homo sapiens
gcttggaggcggcggctgggcgagcgctccggtgcgtctccgcagcccgtgcgctcatcacgttatatatagcgtcccggcaacaggaagtatcgcctgcctttgatcagtcatttttctat

SEQ ID NO: 316625 - DNA, 122 bp, Homo sapiens
aggctggggaagatggtgcacatgcgttgtaatgcgcacgtgttactggcacatgactcccggtcccttgtgagccgaaacttggatcctaatgacgttgataatgggttactaggcactca

SEQ ID NO: 316626 - DNA, 122 bp, Homo sapiens
cctcccacgactcctgggtgggcctcgaagggctgcgtgcccggtgcttgtcttccagagcgttctgtagcccttcctgggtggccacgtgcctgcactcacagctggtggcagctgtggct

SEQ ID NO: 316627 - DNA, 122 bp, Homo sapiens
ccaggagcatgtgtgttgggcaggagctgcccagccctcctggagccgcactatgggcaccgtcattttagacgcaggtgcctgatattaacgatgacaatcaaccatgccaccctgaatta

SEQ ID NO: 316628 - DNA, 122 bp, Homo sapiens
tggagccgagcccgggacgctgtcggcctaaatggaacgccggccccggggcccgctccccggcgggttcccgagctaaatcctccaactgttccatgacgtcatcgggccccctccccctg

SEQ ID NO: 316629 - DNA, 122 bp, Homo sapiens
tggaattctgaaaggaatgcttcagaaatgacttcctttgaatgcaaatagctatcctgacgaagaacacatttaaattgcatatgaatttctctggggccttgccctttgactggaagaag

SEQ ID NO: 316630 - DNA, 122 bp, Homo sapiens
gccccgccggctgggtgggcgagcaatgccagcactgcgggggccgcttcaggtgagtggcgggtggtgtcggagggtcgggtccaaccagaggctggggctgaggggcgttcgagacggct

SEQ ID NO: 316631 - DNA, 122 bp, Homo sapiens
tcagctgtcaagacacaacttggtttttgctcttaactgggccttgacagcgtcagctcccgtagaatacaaggactgccaacagcaggagcactcatccacactgcggcctgttggcatgc

SEQ ID NO: 316632 - DNA, 122 bp, Homo sapiens
ggcggggtctccagggcaggggcggggcctccgggggaggctggaggcgatccagaccctcgcagtgcagccctcgagcggcccggaccgtccgctgcctcccgcagccgcgcgcccgccct

SEQ ID NO: 316633 - DNA, 122 bp, Homo sapiens
gcagctgccggccgcggtgcgcggggtgactgcttgggcgagaagccggacccgaaacgccgcactctccctggaaagcccacggccgaagtgaagaaaggagaagggcccgctgagccggc

SEQ ID NO: 316634 - DNA, 122 bp, Homo sapiens
aggcctggcctctcactgtccttatgcagagggggggtcccagcttgagccccacctcctcgcaccccagcagggtggcacggggcatcttcagagcactgagggacctcctggcgggttcc

SEQ ID NO: 316635 - DNA, 122 bp, Homo sapiens
gcggtcctggggctacgacccttcggaaacacctgcctacgccatcagcgcaagcttttccgacacccctgccccgcacttcttggtgcagaaaatggtggtcagcttgcggggcggggcgg

SEQ ID NO: 316636 - DNA, 122 bp, Homo sapiens
aagaagagagtcctccccacctatcccccaaccctgcagctcaccactgtggaggcatctcggagcatcaagttctttatggaggacttcactgtgatgttggcccggacaatcacttccag

SEQ ID NO: 316637 - DNA, 122 bp, Homo sapiens
agatatatgaccaggatgggacactacagcactttattgatggtggggaacctagtaagtcgagctggatgaggtatatccgatgtgcaaggcactgcggagaacagaatctaacagtagtt

SEQ ID NO: 316638 - DNA, 122 bp, Homo sapiens
ttgataagtaaagcgccggagtgcgggcgaagcatgtgtggggctccgggtccctgtctccgccgccgccgcccgcgcctcccgccgctggcccgccccggccccggcccgcgcccccgcgc

SEQ ID NO: 316639 - DNA, 122 bp, Homo sapiens
ctgccagattgcagacagccctgatgccagcctaaggagtgtgggtttctcctccaggcccgcaggtccccaacctcactcctctgaagactcttctggagatcctctgtgatgcacagatc

SEQ ID NO: 316640 - DNA, 122 bp, Homo sapiens
ggagcagccttaggagcagagcggaagtctcgcgagagtgactgctgcaggcagtggcggcgcgggcgcgcgcagagacggcctcgggcgcgcgcgcgcgcgcgcgcgctccccgcccccag

SEQ ID NO: 316641 - DNA, 122 bp, Homo sapiens
agccgcccacgaattgaactgtctgcaccgcctacgcgtgtcttagccctgaacccaaagcgcatccagttggaaaccacagttcagtggttaaagacatcaggctgccccttccgaggaga

SEQ ID NO: 316642 - DNA, 122 bp, Homo sapiens
cccgaaggtctaaacttaggaaaaagtcaggggagggatgagtttgtcattctttggagtcgttatatttgggtgagtgctggcactatgggtaggatattatttagaagctgagttgtgtg

SEQ ID NO: 316643 - DNA, 122 bp, Homo sapiens
gcttcagaagttgacatgggctgcctgagggaaggtgtgggcccgaatgctgtgcaagtgcgacatcaacttccactaataagggtcacaaccgcccttcaacgtagaagcaaccatctcgg

SEQ ID NO: 316644 - DNA, 122 bp, Homo sapiens
agtttctggcgagcaggagtgtggcgatcttggagagcttgcgcaccgacggcccatgcgcgtagggcatgacttcgcgcagcccgtccatggctaggttcaggtcgtgcatccgcttgcgt

SEQ ID NO: 316645 - DNA, 122 bp, Homo sapiens
actttaaaggctcctgtggtgattccaatgtgcaaccgagtttgggaagcacctgctctccgtgttctccggagccagcccacaggccagcccagtcggctctgagagggggccccgcccca

SEQ ID NO: 316646 - DNA, 122 bp, Homo sapiens
gccgcctgcctcacgtgacgtccgtggagtctcgtcacgtaccggggagagagctgagagcgcctgcctactaggcgcccctccacagtgccacagtcccgccctcgtcacgtgacgaatgg

SEQ ID NO: 316647 - DNA, 122 bp, Homo sapiens
agacagagcaagacaccaactcaaaaaagaaagaaagagagaaagagagagaatgcctcacgttgatgagcatggaagagaccaagattgctactcaatggcatcttagaccctgaccccaa

SEQ ID NO: 316648 - DNA, 122 bp, Homo sapiens
tgcttctgtattgtgggggctgccctgagcctggtaggatgcccaccctgacctctcctccgcgatgacagcgcatgcccctgtcctatattgtgacatggaaattcaaatgaatcctggaa

SEQ ID NO: 316649 - DNA, 122 bp, Homo sapiens
ctcttcccatcccacattgttcctcaaaggcccttctaccataaggattcaaaaaattgccgccctccccccgaatccccatatacccaccaacacttcacccacccatccaccaccagctc

SEQ ID NO: 316650 - DNA, 122 bp, Homo sapiens
tggggttgtctgagtcattttatcaacatgattctctaagtaatcttagctgtgttggtacgtaatgacagatggaaatgctttggctttgttggtactgagttcacaccagggaaacatac

SEQ ID NO: 316651 - DNA, 122 bp, Homo sapiens
cgaagttgaacatatcatcgatgcccgactccttcttgacgtaggcaaagttggacatgccgaagatggagtagatgaacatgaccaggaagaggaggaggccgatgttgaagagggcaggc

SEQ ID NO: 316652 - DNA, 122 bp, Homo sapiens
ggctaacgtggtgaaacccccgtctctactaaaaatacaaaaattagccgggcgtggtggcgcacgcctataatccagctattcaggaagcggaagcaggagagtcgcttgaacccgggagg

SEQ ID NO: 316653 - DNA, 122 bp, Homo sapiens
gacacagccgcaaatagacctggtgccttcctgagtcagcccctttgaggcgagggtgaccgtgggctcctcctccctctcagagcctccccatggggtctccctccctccttcagcccgtc

SEQ ID NO: 316654 - DNA, 122 bp, Homo sapiens
gagacatttcaggtaaaggaagctgcatgagcaaaaatgggcattgaagcatatttcaggcgacttcaaatgctgttgggattttagactttattcagtagtcaatagtgtcactgaaagcc

SEQ ID NO: 316655 - DNA, 122 bp, Homo sapiens
gtaaacaaggagatccagccaggtgctgaactggcagcctgggactggggcttggggtttcgacgggatgtcacacctatggggggtggggggtcactagtccattaattcgagtgctaaac

SEQ ID NO: 316656 - DNA, 122 bp, Homo sapiens
aatcacggcatgaagagaaataccaaaggctctttggcatgttttgagagattttctcctcgtgttgttttactgttcctgtggaaagttatttacaaatgaaataaggaaaagaatgagat

SEQ ID NO: 316657 - DNA, 122 bp, Homo sapiens
ctttcttgcagtaacctcagttgactgaaggcatgaacactgtcctcatatggcagacagcgcaaatctgcttcctgcaatctctggtataagggcattaattgcattcttgaggatgacgc

SEQ ID NO: 316658 - DNA, 122 bp, Homo sapiens
aagcacatgttagcttcccttttgtggccagtgagctgaatggagcgataccacaccccacgaggtgctgccctctgcctgtgacacagcagcacagccacccaggccaaacagtctgagga

SEQ ID NO: 316659 - DNA, 122 bp, Homo sapiens
catatttcaagtcttccctgctctcacagcaaatctgtaaattactaaactgtagtcagtcgtccacatttggatgtttggttgaataccaaaggtgattttttttttttggcaagcttata

SEQ ID NO: 316660 - DNA, 122 bp, Homo sapiens
tgtgccgccgccccccactctctccaaccccagccgcaaaaacggaatgaatgcctcgttcggcctaacttccctctgccgggagggcctgcaatgaattacatgtgattggccacatacaa

SEQ ID NO: 316661 - DNA, 122 bp, Homo sapiens
aaacagcaaaccgcaggggatgcggcctctcgaaaaacaggctttgaataataactgctgcgaattatgcctggcaaggggtaaggggagctaatttggcaccagacgagctgggacgcccc

SEQ ID NO: 316662 - DNA, 122 bp, Homo sapiens
ctcttctatggggagaggcctgaggagctggaggtgtccacgggatcacggctatggctccgacgtcgccctcaaatgcgccccctaccaggcaggtaggagggagcacccagcagtcctag

SEQ ID NO: 316663 - DNA, 122 bp, Homo sapiens
cctactactcctctaccccaagcagcttcttttctgctataaagttattagttcagaaaccgtgcaaataggttaacacagtatatcctttttgtagtaaaattaaaacttcctttaaagta

SEQ ID NO: 316664 - DNA, 122 bp, Homo sapiens
gatcgctcgctggtgatcctccaggcccgcgcaacgctttctcactttcatggtacaccccgcctgccctggcatttcgccccgggaagaggtctgtcggtcatttttctgggtcttacact

SEQ ID NO: 316665 - DNA, 122 bp, Homo sapiens
tcactgcccggggccagcgcggccggccggtggctccaagtgcggggactgcccagcccacgcccacccggaactcgcactggcccgcaaacaccttgcgcagcccaggttcccgcccgcgc

SEQ ID NO: 316666 - DNA, 122 bp, Homo sapiens
ctactaaaaatacaaaaattaggccgggcgcagtggctcacacttgtcattccagcacctcgggaggccgaggcgggtagaccacctgaggtcaggagtttgagaccatcctgatcaacatg

SEQ ID NO: 316667 - DNA, 122 bp, Homo sapiens
gtgctcacacgtgtccctgaatctgcagcaaaaggccctaggaccctcccccgggcctgacgctccgcctgcccagccgggacttacttggcagatcagcctccgaccgcccagccaggcca

SEQ ID NO: 316668 - DNA, 122 bp, Homo sapiens
ctcagctgagcgttttcttctcctgtgtcccagggatggtgtgaagtgtctacaggcatccgagtgaacccaaagggagagtttggctggcacacggggagacgggccaaggcgcggcgggc

SEQ ID NO: 316669 - DNA, 122 bp, Homo sapiens
cctcccccatccagaccccgcggcgcaaagggcagtggcttttctggccagagcaggtggcgcgggcgtcgcaaagggtggtccccgaggccgcagcggtgtggggggagggcgcggtcccc

SEQ ID NO: 316670 - DNA, 122 bp, Homo sapiens
gcaaggaacaggtgagagggagcacagtggcaaatctgagagcccctctcttgagcgaagcgggcagcctgctgtgctccagctggtgggggccagggattgggtgcactggagtggctgat

SEQ ID NO: 316671 - DNA, 122 bp, Homo sapiens
ggagccctgcccccggcctgcggcggccctagacgctgcaccgcgtcgccccacggcgcccgaagagcccccagaaacacgatggtttctgctcgaggatcacattctatccctccagagaa

SEQ ID NO: 316672 - DNA, 122 bp, Homo sapiens
gtgaataccttttatcgaatgcctttaactatgggtcctctcactgtgtagggaactttacgtccatttcacagataagaaaacgggctcttaagagaatgaaggtctaaggtcacacagct

SEQ ID NO: 316673 - DNA, 122 bp, Homo sapiens
cccattgctttcctttttggctcagtggagtgaaaagttgtgccttcaaatccattaattcggagcagactgacagatgcggagtaaagagtttaggcaaaatacctctcgcactcagctct

SEQ ID NO: 316674 - DNA, 122 bp, Homo sapiens
atgcagaatctcaggctccacgccagatctactgaaccagagtcagtattttaacaagatcgtcaagtgtgccggatgcatattaaagtttgagaagcactggtattccacactcgctacta

SEQ ID NO: 316675 - DNA, 122 bp, Homo sapiens
tttttaagcctctggaagtcctggctgttcagaattccaggcttgaattgctagtgttcccgggactgggaaacagcccggatgtgtggagtaagaggcagctcttggattgctgtgaacgt

SEQ ID NO: 316676 - DNA, 122 bp, Homo sapiens
attaaaccaatatcctctttttttcttatctctgtcctattaactctagaaacactagaacgctggtatatgctatgtgatagtaacaaatttgaaagataccaggttttcctgacactatt

SEQ ID NO: 316677 - DNA, 122 bp, Homo sapiens
ccaagtgccggtggccaggagggcacacgagcgcccagtcatcatgttggtgtacctgagcgggtaactgatggccaggtagcgatcataggacatgactgtgtagaggaaacactcggtgc

SEQ ID NO: 316678 - DNA, 122 bp, Homo sapiens
atctttatgaaaaatctataagaaagtgagaaaaaatacatgcagaatgctaatccaccacgtttagcaggaggtcttcccatgctgtttgtattgccccacaccaccatggtctctgtcct

SEQ ID NO: 316679 - DNA, 122 bp, Homo sapiens
caacatctccccgcgccccccaacaagttgcccctcctcgtgcacacagcgaggtgacagcgcagggcaccaaactgctgagggaaggagatgcctgcagccatctcagcggggctggcgga

SEQ ID NO: 316680 - DNA, 122 bp, Homo sapiens
atcctttggagcaaaaagctgatacttttataaggggagggggctagtgagcaagggcagcggtccccctgctagcctggtgtcttatctaccagatagttgagctggcaccttcctgggca

SEQ ID NO: 316681 - DNA, 122 bp, Homo sapiens
ggtatgtatcctcactttacagaccgggaaactgaggctcatagaggtgcagtgacttgccgaagtttctttatccagtcattcagcattcaacctcagcatctacgtattgagcagaggcc

SEQ ID NO: 316682 - DNA, 122 bp, Homo sapiens
gatggcggtactgtggcggaagatgagagataacttccagagcaaggagttccgggaatacgtgagcagcactcacttctggggtcccgcgttcagctggggccttccgctggctgccttta

SEQ ID NO: 316683 - DNA, 122 bp, Homo sapiens
cggcgggcttttgttggggggttcccgcttgtccctggctcctgccgtctctgtggagcgcggcaccgccttggatccagctccacctcctccccgtgccctccccacgaggcctgggagcg

SEQ ID NO: 316684 - DNA, 122 bp, Homo sapiens
ggaaaggagaggtaccccgcgttagcaaaaacagatattgactcagggttgcattgcggccgctcagctcttgccttctccctcatttcttcaggtgggtgagaaatgggcgactggagttt

SEQ ID NO: 316685 - DNA, 122 bp, Homo sapiens
tgtgcatgcacttagttaagtggacgtggtgtctttccaggaagggcaggcacttgctctcggggggtgcatctgggcactgagaatggggaagaggggcttgcctggctgggggtgagctt

SEQ ID NO: 316686 - DNA, 122 bp, Homo sapiens
gggggggttgcagaaaaggcgcctggtcggttatgagtcacaagtgagttataaaagggtcgcacgttcgcaggcgcgggcttcctgtgcgcggccgagcccgggcccagcgccgcctgcag

SEQ ID NO: 316687 - DNA, 122 bp, Homo sapiens
ttgtatggccccatcaccggggcaattcagaaaggctgtttctataaacaaatccttaaacgtctggtaagaaatgagtccgcgacggaacgagagcagatcgtggttcgcgtgtttactgc

SEQ ID NO: 316688 - DNA, 122 bp, Homo sapiens
ccggggcctccttcgagcttccggtgaatttcgggcgatttccgcgggtgtcgggggtcccgggaggaggcagtcacagatccacccctgcagccagcctcctaggcgccggctccggcacg

SEQ ID NO: 316689 - DNA, 122 bp, Homo sapiens
cagaagtccagttttgctcctgctattttttataaattgccttctaactagtgcaagacacgtctacatttgggaagccattctgtgtacagacttagagcaacagatgcacatatgtcaga

SEQ ID NO: 316690 - DNA, 122 bp, Homo sapiens
cagtggtgccacaaacaccagtttacttccacttttcaccccccgggtctgttttgtctgcgtgcagctctcctcgtgtcggagacgctgagtcagttctctactggtcttgccctcttccg

SEQ ID NO: 316691 - DNA, 122 bp, Homo sapiens
ataacggaaggaacattggacttaacagagaaagtacctaatccttcaggtgtgacatagcgtctccgggtagtctctcatcagtaaaatgagaatataaatatctgccttcacaacaaagt

SEQ ID NO: 316692 - DNA, 122 bp, Homo sapiens
tgtacttaacaatttcctgccctgtgtcaatgaagctgtacttgcttccacggcgggcaacgagctgtgaagtgtgtgggttggccactcattgattaattgatcagtcctgagcagtacca

SEQ ID NO: 316693 - DNA, 122 bp, Homo sapiens
tggagaaagcctccagaactgacttggagaaggggtgcattttttccctctaatcaggaccggtctttagtaagtttgcataatcttacttaagagtttttttgaaagttcaaagggataaa

SEQ ID NO: 316694 - DNA, 122 bp, Homo sapiens
acctgcgcagtaggaggaaggggaggaaacccccccccgagggctggcactgcaaccggccgtgtggggcagggagaccttatttacactttattgacagacacaacacgtatgtatgtgcg

SEQ ID NO: 316695 - DNA, 122 bp, Homo sapiens
cgccggaacctcagaggcgggtcgcagcggcgcagaggaggtcagctgcgggagcgtttccggggacggtgccgccatgagattgaccccgcgcgcgctgtgcagcgccgcccaggccgcct

SEQ ID NO: 316696 - DNA, 122 bp, Homo sapiens
gtgccactcatttctttgtacttttagttttcatatccctgagggcagagcccagcccagcgttgcctcctacacagcaggatgtccctcgcacccctcgccctgggtaccacaccacacac

SEQ ID NO: 316697 - DNA, 122 bp, Homo sapiens
gtcaagagaattgcctgtacctgggtaggggagattgcagtgagcagagattgtgctgggcgatgcagagagactccatctcaagaaaagaaaagaattcagagcaggattttacagatagg

SEQ ID NO: 316698 - DNA, 122 bp, Homo sapiens
cccctatcttctcttccatcaaatacaaaggcggcagggcctggggctgggccgttccaccggcaggtcaggaccgccaggccagcctttctgtccactgggccgaagggtgtggcccggtt

SEQ ID NO: 316699 - DNA, 122 bp, Homo sapiens
gctcggggcggaaaagaatcctccccgcgcactcccagccaggaggaacgccagaggccccgcccaatccctgtcgcttcattggctctggtgaccggcctcccgaaagtcggcttcctatt

SEQ ID NO: 316700 - DNA, 122 bp, Homo sapiens
tcatcctgcaatggagtccgcctatgacaacgtagaagctctctgggaggaaaagggaagcggtttgggagtttctagaagtctacctctgcagcaacatttggccaaccaaagaaaggttt

SEQ ID NO: 316701 - DNA, 122 bp, Homo sapiens
gctcacggctgtttggaagcagcgctgtccctcccaggcagccctgcagcgcatgccccgcgcctgctgctgcagatgtgggacctggaggcctccaacaacggaggccaccgacaggacag

SEQ ID NO: 316702 - DNA, 122 bp, Homo sapiens
tgactggaacgccgccatggagagacgcaggctccccccacctgggaggagtgcgtcacgcggtgtttccacctgtttggagcatgtccgacctgccgggaactcagagcttagtaacattc

SEQ ID NO: 316703 - DNA, 122 bp, Homo sapiens
agtggtttaacaagccccttgggtcaagtttgaaaaccaggggtctgggctgctaagtggcggcatgggaatggaaggttctggaaggtgagcagtgaggttggggcgcaggcctgggaagg

SEQ ID NO: 316704 - DNA, 122 bp, Homo sapiens
gggtctccatcataggcgccccaggcaaggttggagaaaaactaaacagaaagccccttccgcctacgttggcaagaacgggaacccagctccacttggtttccgcccaaagtctttagaac

SEQ ID NO: 316705 - DNA, 122 bp, Homo sapiens
gtctgcgcctcggggatgtagatctcgatgctctcggcgctctcggtggccgagttctggcggacggacgcggcgcgcttggcggccatcaggcgcttgcgggcctcctggcgctgcgagct

SEQ ID NO: 316706 - DNA, 122 bp, Homo sapiens
ccagggaggatggcttgctggtgtgtcccccccaggggaggactaccaacgaaggggacccgggagatggcgggtgggggcccccgggaggacagtgggcgagggagggggtccttgccagg

SEQ ID NO: 316707 - DNA, 122 bp, Homo sapiens
agaaacctcccttctcccgaggcaggggcagatgcccgagcgccagggtccgggtgggggcggccccagcgttcgccatcaagttcaagccacttagagggacgcgcacagaccccagctct

SEQ ID NO: 316708 - DNA, 122 bp, Homo sapiens
ccgcgtggagttgcagaaagtccgggagaaggagtggcccatatgtgcagccgcgcctggcgcaggaggcttccagggccggctccctgcactgaaggcagcctccgaggggcctgggcgcg

SEQ ID NO: 316709 - DNA, 122 bp, Homo sapiens
ctggtttcatctttgtaccctgattcccccccaagaccagaagagttaaatggctcaaagcgggtgcccataaaaacatttgcctagtgaaggaataaacaatggagtggctcccagtcccc

SEQ ID NO: 316710 - DNA, 122 bp, Homo sapiens
ggttaccgtgaggggcatttcaacccagggcacagcgggtgtgtctgtagagtgcacttccggtgtggctgcagttaaatcatgctcggctgtcatggtctagcaagggtcacggtgacgag

SEQ ID NO: 316711 - DNA, 122 bp, Homo sapiens
tgcctgtgttttgaaatgcataccatgttgccgtttgtttgattgattgatcttggaccacgaaagaaaattatactgacagcttccagggtagggggcagttgtagctttctgcagatgtt

SEQ ID NO: 316712 - DNA, 122 bp, Homo sapiens
aaaagtttgggccaagcattcccggaatgtgcttcctgctggcgcggggcggggggcgggcggggaggcccgggcggggcggggagggcgcggggcggcgcggccggagcccggggcgcgca

SEQ ID NO: 316713 - DNA, 122 bp, Homo sapiens
atccgcgtgctcatgctcctgtactcctctgagaagaaaatcttcatcggcctcatcctccgtgaccagggcaacttcctcaacggcatacggcaagtcattgcctaccagcagcaggtcct

SEQ ID NO: 316714 - DNA, 122 bp, Homo sapiens
ccccggccccgcgccggccgagccgtccgcggcgggacgggcggaggcggcgggagagcgcgccctgaagccgctccgagtgcccaggtccctctcgccgccgccccggagccccgtgctgc

SEQ ID NO: 316715 - DNA, 122 bp, Homo sapiens
tacccctgcctctgccgcctcccgcaccgctagcgcggcccccacctacgacgacccccgcgtagatgctcctgcccacacccgccccagccccggcccctgcccctagccgcgcccgcgcc

SEQ ID NO: 316716 - DNA, 122 bp, Homo sapiens
agcatcctgtctcatcagtaagaaaaccaggcccctctctcaaattggatgtatccctcccgctactacacagataggacccagttcaatcacaacccctgcccaggccccacagagctgta

SEQ ID NO: 316717 - DNA, 122 bp, Homo sapiens
cccaccccaccatatccaaacctcagcagatatggcagactgtacctgcaaactatatctcgaatccacagacttctctcctctaccaccacgctagtgcagaaccccacctgctccctgta

SEQ ID NO: 316718 - DNA, 122 bp, Homo sapiens
agatacttgcaaagcaacgtgaatgaagaatccttccagattgtaacatcctttttcctccgtacttaagaattatctcacctttttacctgttcagcggcattttttagcagcttgcctta

SEQ ID NO: 316719 - DNA, 122 bp, Homo sapiens
ttgcagcgcttacctgtcgccgtcctccggctcctctctgtaggtccacgtgtgtcccaacgccaggagcagcagcagcggacccaggctcctgcccagctggcccctggcagctcctcccc

SEQ ID NO: 316720 - DNA, 122 bp, Homo sapiens
gtagggcaagcccaggtggcactggtgagtaaccgcctccattacatggtccgttcctgacgtgtacaccagcctctcagagaaaactccatccctacactcggtagtctcagaattgcgct

SEQ ID NO: 316721 - DNA, 122 bp, Homo sapiens
aggctgaggcaggagaatggcttgaacccaggaggcggcggttgcagtgacccgagttcgcgccaatgcactccagcctgggcgacggtgagacttcgtctcaaaaaaagaaaaaaaagtaa

SEQ ID NO: 316722 - DNA, 122 bp, Homo sapiens
gcaaggtcatcaaggaggtgggcaacgtctggccgccctggctcctgcccttcggccatgcggcctcgcaaaaccacatctcctgtttgagccccgttcccccgccactgagaggaaggttt

SEQ ID NO: 316723 - DNA, 122 bp, Homo sapiens
ctgctgggagccagagggaggtggcttgctactgtgtttgctatcattttgtaaaccttccgttgccatttaaataggtatttgtctgtacttttagaatagaagtgtcttgaaggcaataa

SEQ ID NO: 316724 - DNA, 122 bp, Homo sapiens
ccttgtcccatgaggtcagctgagaccagatcaagagatctgtagagacttttgtgacttcgtgtactacaaaagacaaatctattaggaggtcatttgttctcagtaactttttcttgctg

SEQ ID NO: 316725 - DNA, 122 bp, Homo sapiens
ataaattcccccaaaatgtaggtcataaagatcacactctcggctgggtgtggtggctcacgcctgtaatcccaacactttgggaggccaaggcaggcagatcacctgaggtcaggagttcg

SEQ ID NO: 316726 - DNA, 122 bp, Homo sapiens
tccggagattgttcgttcagatgtgtccagagtttcttccttccagtgggtttgtgctctcgctgacttcaggagtgaagccgcagaccttcacagtgttacggctcttaaaggtggcgcgt

SEQ ID NO: 316727 - DNA, 122 bp, Homo sapiens
taaataaaatgaaattgggatctgtttgttaacagagatgctggttgctggacacacaggcgcaatcgtaaggtgcaagtgtgttttcatcaatctgttagcaaatgttctcttttggtaga

SEQ ID NO: 316728 - DNA, 122 bp, Homo sapiens
gggcacgtgcctccttataggcggggcttcgcgggacgggacggggcctcttaaaggaaccgaacctttatctccttttctgaggggcgttccagcgctacccgtggaacacgtggtggaca

SEQ ID NO: 316729 - DNA, 122 bp, Homo sapiens
tgttgatgtcaatgttctatgggattctcctggtgttagatgattacagtatcacggaaacgtgaggctgcatctgctaagtaacgtttcactcctgtgtatcacagaggttcttctctaag

SEQ ID NO: 316730 - DNA, 122 bp, Homo sapiens
ccccccaactcgctctgagcccggggggtgccggcctaggctacaggtggggaggactcccggtggcctggtggaaaagctgccctctctcacccaggcacgccacggacaccagcaccgca

SEQ ID NO: 316731 - DNA, 122 bp, Homo sapiens
ctgtcactgcaagaggcaagcagacgagccttggcacatggccccatcaggcagaaccttcgagaggatccatgatttgaagagaggctatgaaacagccctgccaggtcccacccacctct

SEQ ID NO: 316732 - DNA, 122 bp, Homo sapiens
ctgctctccttatactagactctaagttctcacacttagaatccagtttgaagatcaccacgagtatatatttgcctatggaagaataactgcattatttgacctaatttacaccattcttg

SEQ ID NO: 316733 - DNA, 122 bp, Homo sapiens
aatgcaaacccacccttcttcacttaccagcacaactactctcttccccagaacacagagcgggatcaactgtgccagcaggtgttgggcacatctgtgtagactccacatgcatctctctc

SEQ ID NO: 316734 - DNA, 122 bp, Homo sapiens
tggaagcgcgacgctttccaaggcgcggacccctctctccaggcgaacccaattccagggcgccctgcccttcacaaggagaaaagaactctccccggggcttccattggcttctctgggat

SEQ ID NO: 316735 - DNA, 122 bp, Homo sapiens
ttttttttttcttggatacgggaaccagaaccacgaaatcctgcaagctttgaaggccggcgaaagggctcccccgtcggtggcgccggagggagaagcgtttagtcactgtttcattaggc

SEQ ID NO: 316736 - DNA, 122 bp, Homo sapiens
ctccttttttttttttgagacgcagtatcgctctgtcgcccaggctggagtgcagtggcgcgatcttggctcagtgcaacctcggcctgccggattcaagcaattctcctgcctcaggctcc

SEQ ID NO: 316737 - DNA, 122 bp, Homo sapiens
gacaggcacatgaaagggaattgaagctcaacagaaaagtgactgcttcctgcacggtgtcggctccctgcctgactcagattcagccaactctgaggagggaaggcaagggacgtttctgg

SEQ ID NO: 316738 - DNA, 122 bp, Homo sapiens
agtcgggggcgggactttggcggcgctgtgcatggggattggcttttcgcaccgcccctccgctcgagtgggccaatcggagacggccccacctcctgccccgccgcgcgtattccagcagg

SEQ ID NO: 316739 - DNA, 122 bp, Homo sapiens
ctggcctgctcgaggcacacacgctggggccagtgggggacgtgggcttggcctctgccccgggggggctctctgtggccagtgcaggctcgagggtgggaatgggcttccccagtttggcg

SEQ ID NO: 316740 - DNA, 122 bp, Homo sapiens
cttgccactgccagccccatcaccatcctgggaaggaggctctctagtcagccctataaacgcacctcctgaatatccatgaaaaaatcagcaagaaggcatttctgggaagttcagctgag

SEQ ID NO: 316741 - DNA, 122 bp, Homo sapiens
cccgagcgagtgtagggggtgcggcgtctggtcagccaggggtgaattctcaggactggtcggcagtcaaggtgaggaccctgagtgtaaactgaagagaccacccccacctgtaacaaaga

SEQ ID NO: 316742 - DNA, 122 bp, Homo sapiens
ctaaacagacgcctcccgcacggggccccacggaagcctgagcaggcggggcaggaggggcggtatctgctgctttggcagcaaattgggggactcagtctgggtggaaggtatccaatcca

SEQ ID NO: 316743 - DNA, 122 bp, Homo sapiens
caacatggtcaggccccatctctactaaaaatacaaaaattagccgggcatggtggcacacgcctgagtagcccagctactccggaggctgaggcaggatgatcctttgaacccaagaggcg

SEQ ID NO: 316744 - DNA, 122 bp, Homo sapiens
cttaatttgtgcgtcggtctttagcgtccggcgagaaactagagcacgtcggaaacatggcggttcctattcgcggcactagctccgccttccgctgcttccgtcaggaggacgcggagact

SEQ ID NO: 316745 - DNA, 122 bp, Homo sapiens
agacctggcccggccccggattcccacgacatactgagctcaacaacaggctctgtgccgcgccgctccgcacagccttcagctcagcgtgctaccctcactccgaaccgccaccgcaccag

SEQ ID NO: 316746 - DNA, 122 bp, Homo sapiens
tataatttattattttttaataatacagacagggtctctctatgttgcccaggctggtcgcgtactcctgggctcaagcaatcctcccacctcggcctcccaaagtgctgggattacaggca

SEQ ID NO: 316747 - DNA, 122 bp, Homo sapiens
ctgcgcttttcctggaacccaaagctctgacttcgtcaaacttacacaattaaaggcaggcggaagaacgcgggctgggaagcaagcgggaagattctagaatggaagggagcccgccgagc

SEQ ID NO: 316748 - DNA, 122 bp, Homo sapiens
cggggagaactggagaatgcggacacctagatgaggccctggcacccaagctggggcccccggaatctcacgttccctttactcgccaggcatttcggggcaaaacgaagcggagcccccca

SEQ ID NO: 316749 - DNA, 122 bp, Homo sapiens
gcgggcagcagagcaggaacaggaggatgcccaggaagatgtccatgtgcctgcaggccgcgccgggggccccgcggcccaggaacacgcagaagtagttgtgcaggcaggtgaccaggagg

SEQ ID NO: 316750 - DNA, 122 bp, Homo sapiens
gcggggctcgggtaggtgtggccggggcgctgggggtcccgggaggaatgggcggtcacgcggcgctgggcggcgcgggccgcacaggagtgcgctggggcgggcgcgggccgggagcgctg

SEQ ID NO: 316751 - DNA, 122 bp, Homo sapiens
accccagccggaagtagactcccaggatgcagcggaggcgcgaaggcatgcgccggtggacgctctgattggttcctcctgctgtttttaaagggagggggcgggacagagctgttgccgtg

SEQ ID NO: 316752 - DNA, 122 bp, Homo sapiens
aatggaagaaaaagtaagtatacattaacaggaagttgcagcgatagtgcagagaggcatcgtgtgcctgccccaagtttctccactggttacatcttatcaatgaaagaaatttatgagtt

SEQ ID NO: 316753 - DNA, 122 bp, Homo sapiens
cggcttgcgcctcgcatcttccacccggggccaccgaggcgctgacaaggagtgggggaccgaagaaggaagaggcagaggaaaagctagagcggcgctactgtttaacctgaaagtctgac

SEQ ID NO: 316754 - DNA, 122 bp, Homo sapiens
tcaactattttcttagtggttgaaggagctattataagacctggaatcaatagaaagaagcgtctaggttaaggcgttgtggagaccagcgttcttattatgtagatgacgtctcatatgcc

SEQ ID NO: 316755 - DNA, 122 bp, Homo sapiens
gtttgtctgagctcaggcaggtagtggcagggttgatttggaacacaagtagtgccctggcgcctgagtgaccagggctaattcagtccctttatgtgacttccatgttgctgcagccctgg

SEQ ID NO: 316756 - DNA, 122 bp, Homo sapiens
ctcccatggcttaagtcgcatagctgaaaggattttgctcattttttccaaaacacttcacgtctgggtagtagccaatcatggaaagtttcaagcaaatgttacatttgggagagggatga

SEQ ID NO: 316757 - DNA, 122 bp, Homo sapiens
cgggccctggcgggaaggccgggccagagcctgggggcgggatgcggacgtccgcagggtcgccgcttcggttccagaggccacacggccgggcggggcgtgagggacagcccgaggactac

SEQ ID NO: 316758 - DNA, 122 bp, Homo sapiens
gttcagggtggcgggcccaggcgggtgagaaagggcaatggagaaggaaggagaggagaccgtgcagacactgcaagtgccagaaacccgatccacactggcttcagagggtggaggggagg

SEQ ID NO: 316759 - DNA, 122 bp, Homo sapiens
ctcctttgctgcttccggcatgagctacccaggagcctaaggcgctccttcccgcaactccggtccccgcgccccgggactgcaaatcctttaaacagaggccccagagctaggggttttcc

SEQ ID NO: 316760 - DNA, 122 bp, Homo sapiens
cgagcgcagagcgggctttgccagtttatggtcctttccactttgcctctctctttccctcgctcagtctcttttccctctaagacttaacaaagccctcataaaacccaagcagaagggtg

SEQ ID NO: 316761 - DNA, 122 bp, Homo sapiens
cataaaactggatgctccttgcaatgccatccattgattacgtctatctataaaccaatgcgactgagttttaataggatctatccttcttaaattatccaaacaaaacagacacattttaa

SEQ ID NO: 316762 - DNA, 122 bp, Homo sapiens
aaaacattataaagtttactgaggctaccatttatcgagcagttatcatgtgcctgatcacgtactagtgtactaattgcatgcattattttattattttatttatttacttattcatttat

SEQ ID NO: 316763 - DNA, 122 bp, Homo sapiens
cctcctgcagaaggaccctgcgcccggggaaggggaggaatctcttcccctctgggcgcccgccctcctcgccatggcccggcctccacatccgcccacatctggccgcagcggggcgcccg

SEQ ID NO: 316764 - DNA, 122 bp, Homo sapiens
tgtatccggaattggttccctctgaagagttcctggtcccggtcctgccgcggaccttcacggcattatagttcttaaacatggtgtgtccggagtttgttccttcaaatgttcaggtgtgt

SEQ ID NO: 316765 - DNA, 122 bp, Homo sapiens
gaaagtagcccaactggcactgtttaggaacaaggagttcctgagagtgttggcaccccacggtgttgatgtccggtagttccctgctgtgaaccctgtctctgccccacttcaatccaagg

SEQ ID NO: 316766 - DNA, 122 bp, Homo sapiens
cagagaggcccgaaaccagtgcccgctgtgcgcggggttggggaagctgcagtgggtggccggcgagccgggaacaatgcccaaattttggggaacgcaaggcagagttctttctgccttgc

SEQ ID NO: 316767 - DNA, 122 bp, Homo sapiens
agactcaggcgagtgggccgtggggcggtgctggtcttgggtccccaccgcccgggcgcacgcaggcagcagggagggtccagcgcccaaggcagggccacctcagcttcctccctgcacca

SEQ ID NO: 316768 - DNA, 122 bp, Homo sapiens
cagtcaccctgaacgccctcctctgaactcccacgtgtctccattctcctaagctcaggtcgtcaaaggcaaacggagaagcccctttaggtcggagagtggtcagtattgcccacccagag

SEQ ID NO: 316769 - DNA, 122 bp, Homo sapiens
agtatgatagaagcaaacaaaaggctgagatgagctctaactccactttatttactaaaccgatgataaaacagtgtatgaaagacttgcctggatgaatctcattttttccagtgttttct

SEQ ID NO: 316770 - DNA, 122 bp, Homo sapiens
ggcaacatagcaagacctcatctttacaaataattaaaacattagccaggcatggtgatgcgcaactgtggtcccagctacagttgctgaggtggggggattgcttgagcctgggtagtcaa

SEQ ID NO: 316771 - DNA, 122 bp, Homo sapiens
agaagaggacacggttcccgtaccgaagggttcagtaccagcagcccgaccatcacgcggcgggatgtctgtggttggcattgacctcggctttctcaactgctacattgctgtcgcgagaa

SEQ ID NO: 316772 - DNA, 122 bp, Homo sapiens
gcgtgagtgcagtcaacacagacggcccatggcactgagagcccagtgaggccctggacacgtgacgcttaactaacgtggagatctgcactccagggatttaactgtgcagcttagcttta

SEQ ID NO: 316773 - DNA, 122 bp, Homo sapiens
ccaagcaggggaggggtgcacagcaaaccctcacgcatgtggccccacaggtggtgactgcggcagctcggctgggcgggggcggttaccatgcgtcacctcagagggagtggcagaggtgg

SEQ ID NO: 316774 - DNA, 122 bp, Homo sapiens
tgtgagaattaagtaaaatatgcaaataaagtgcctggcatacagtaggcactgagcaaacggtagctcttttttccaggctggggcaagggatgcatataaatgtctggatctgaagtttg

SEQ ID NO: 316775 - DNA, 122 bp, Homo sapiens
tggcgcgggggggggcggggaggcgggctcagtgcaggcgtggcccctccctgtcacctgcgcagtcccctccccaccgggcagcgtccatcacccgcccccatggaccacggaggcccggt

SEQ ID NO: 316776 - DNA, 122 bp, Homo sapiens
cttctggtttatatacaataatttaatcagttgtatatatttaacacctaaaaaaattcacgatcaaagtccttcatgcattttatgaggaagttctggattaaaatcatggtcaaccagat

SEQ ID NO: 316777 - DNA, 122 bp, Homo sapiens
cagttttaatttatctgtaattcccgcgcttttccgttgccacggaaaccaaggggctaccgctaagcagcagcctctcagaatacgaaatcaaggtacaatcagaggatgggagggacaga

SEQ ID NO: 316778 - DNA, 122 bp, Homo sapiens
ccagagggggagaggggagcctgccaggagtcgggggaggagaggggggggaggcctgaacggcaggagccctaatggcttccagaagtgagtgtgagtgagtgactgtgcgtcactctgtg

SEQ ID NO: 316779 - DNA, 122 bp, Homo sapiens
ccaggcctccagggcgcccccaccacccgcacccctcccgcaccgaggtgtccaggcccgcgcagccgggtgacggcaccaggactggacccccgatccgaagcccaccatccccctctacc

SEQ ID NO: 316780 - DNA, 122 bp, Homo sapiens
ttcgtaagaaatttgacggctggttttctgcttgggaggtcagaaaccaaagtatcttcccggtcttcccccgggagagataacatctcctgaggagaaacaaccacgcaagaggcagctgt

SEQ ID NO: 316781 - DNA, 122 bp, Homo sapiens
acaaaaattgagtccctggctgggaggtcccccgagtgttccgctgtgggctggaggtggcgtttctgtcgtgatttatgtggagtggttcaaaacagaagttaatcactcgggaagcggac

SEQ ID NO: 316782 - DNA, 122 bp, Homo sapiens
cggcactcgctcccggaagtggatgttgccaagagcaacagtgaagcagagttaaagagccgccagctcaagctcagaacccgagtgggggaggctggggtgcaccgaggcccagcaatcca

SEQ ID NO: 316783 - DNA, 122 bp, Homo sapiens
gacacgggaggtgagtcccgagctcacggcgtcccccaccgccacagcttaccgcatccacgtgaacttgagcactgtggggattctccgtgctctggactcgggctaccaggtggagctgc

SEQ ID NO: 316784 - DNA, 122 bp, Homo sapiens
ttggaggcaaaggacctggctggcctttgcctggaaagttctgaaaacctcagcagtgaccgcagactaagactgagtggaaaggttcccgctagcgtttgtggctctaagtggcaggagga

SEQ ID NO: 316785 - DNA, 122 bp, Homo sapiens
gtctcagtgaagaggacgcagtcccgggtcctgggcgctctttgccgggcgagacagctgcgtaggcagatcctgttcctctagtgggcggcctcggcccctgcccctgccccgaggcgcgt

SEQ ID NO: 316786 - DNA, 122 bp, Homo sapiens
atgttctcggcagctgacaggatgggcctcatcatcagcacagagcaacttgatcttacacgacagtgactcagcaacttgccgaatccaattagcagctttgtagctacttattcagaatg

SEQ ID NO: 316787 - DNA, 122 bp, Homo sapiens
tcaaaacagaagttaatcactcgggaagcggacgggaggggcggcgctactgcgcatgcccgggagccgcctggagtttggaactccacattctttcagacccggcccgctgcggggcgttc

SEQ ID NO: 316788 - DNA, 122 bp, Homo sapiens
cgccgtcccagcggctgatggcctcggtctctccccaaaacccccggcgcccgatttcgccgcgccttcccaggcaggaactttgcgaccccaccccctgggcccgccaccagttcaggcct

SEQ ID NO: 316789 - DNA, 122 bp, Homo sapiens
aacagagctatctctgaatcactctttttacttatcctcaccatccaaactgtcaccagacgctggtattatacattaagtctaagaagccacagatttgaagattcaccaatattttatgt

SEQ ID NO: 316790 - DNA, 122 bp, Homo sapiens
ggccacagccctggaactgtctcgggattcccagcctgtgggcgcttccatgctggccagcggaaggggacgcttttttcttcagaacagctccaacggatacctcttattttagaccgcct

SEQ ID NO: 316791 - DNA, 122 bp, Homo sapiens
tctagcatggtgggaacacctggggtaaaacaggttaaagcagaagtaagcagtctacagcgtgtccaaggcctttgctattaagaaacatgtcagatgctgaacacgcatctagagtatta

SEQ ID NO: 316792 - DNA, 122 bp, Homo sapiens
acctaagcagatgtaacagaaaatggatagtctgtctacttggggcttctaaacgttgttcggcactgaaggttgactttggagactgggtcatgaagcttgacctcttaattactgacctt

SEQ ID NO: 316793 - DNA, 122 bp, Homo sapiens
aacctttaatgttttgtaacttgatgaaaaggtcattttgtgctgaggatgcagttgttccggaattgttcagctaacggggtgaattccaaccaaatccagaattatttaatgggatccaa

SEQ ID NO: 316794 - DNA, 122 bp, Homo sapiens
gtctcctccgtcctccctctagaccagaatggaaacgaccttcggacccgccttttcagccgtcaccaccatcacaaaaggtgagcccttaagccaaggccagcccaggctgggaataaccg

SEQ ID NO: 316795 - DNA, 122 bp, Homo sapiens
cattgcatttatgagagcctgctctatactcagccagactgaaagtcgatcgagggcaaacgtatgactggtgtttctttgcaacagcctctaatcaccctctctcctgggtaaattgccct

SEQ ID NO: 316796 - DNA, 122 bp, Homo sapiens
aaatgcctgttcaaagggagaggcttcggagcatggcctgggaaagtccatcccaaatggcgctgtcccaggagcccaggcaagcaggggctcccccttagcaccgggaccagcatgtggtg

SEQ ID NO: 316797 - DNA, 122 bp, Homo sapiens
gagcatgcaaatgtttgtcattactacttggcctcatctagttctcaaaccaaactcatacgagtaggtagcatatccattatttttcccgtaagtaaattgaggctggctcagaaaagtta

SEQ ID NO: 316798 - DNA, 122 bp, Homo sapiens
tgcgccgggcaggctgtgcctgggcagttcattctgtggcagctggaggcactactcggccgccgcggtgcgaactgcgggcactgtggggcggagacctaggggcgggtcaacaaaggtcg

SEQ ID NO: 316799 - DNA, 122 bp, Homo sapiens
aaagtgggttgcgcgttgcagtcgtggctggaggctgcagtttggagaacagcccgtaggcgtggcagttcactcctgttgcattggaatttcatttccttttgatttggtttgtagtagaa

SEQ ID NO: 316800 - DNA, 122 bp, Homo sapiens
cctctcttgcccctaccactccagactggcctttaagtgctaagggaacaagtgtcccctcgggcctcagggcctctgttcatactgacccttgacccctgccgcccttccccactccccag

SEQ ID NO: 316801 - DNA, 122 bp, Homo sapiens
cagatctgaatgccttaactgactgtggaggctcttcatggcctttgcctcatctgccttcgctgacttgcccccggccacatttcccttcacacactccagacttcccactgctctaggct

SEQ ID NO: 316802 - DNA, 122 bp, Homo sapiens
cgggctacaggggtgcggctctgcctgttactgtcgagtgggtcgggccgtgggtatgagcgcttgtgtgcgctggggccaggtcgtgggtgcccccacccttcccccatcctcctcccttc

SEQ ID NO: 316803 - DNA, 122 bp, Homo sapiens
tgtaaggcagagagaagaccgcgaggaacggaaagcgcatgcgtcctagtggtgctgcagcgcccggggagtcgcggaggggaggggtgaaaatgggcttgcgggactgacgcacgcgcatt

SEQ ID NO: 316804 - DNA, 122 bp, Homo sapiens
tccacggctccatctttgttctgcgcgagtgcgcacgcgcaggctccgaaagcgggccgtcgcacagagggaccacaactcccagagtgctccgcgtccttgctttcgcctctacttgtgct

SEQ ID NO: 316805 - DNA, 122 bp, Homo sapiens
gggtttttcccaactacaatgagggaactttgctttattcctgcaatctgtatgttccctcggattctagaaaaagaagatttaattttctcaccatgacaccagaaacagtccccccacaa

SEQ ID NO: 316806 - DNA, 122 bp, Homo sapiens
caagtctatcattgatggacatttgggttggctccaagtctttgctattgagaaaagtgccgcaataaacatacatgtgtgtgtgtctttatagaggcatgatttagaatcctttgggtata

SEQ ID NO: 316807 - DNA, 122 bp, Homo sapiens
cacatttccctcacctccaagtcccgcctttcgcgcatcgcctgctgctctcccactcagcgccacctcagtcccacaaaggccgggctgggatcctgtggcctccgtgctgaccaacgtca

SEQ ID NO: 316808 - DNA, 122 bp, Homo sapiens
tccttgcggaaggggcttaggacaccccgcagtccgcgccccgaggtggcgaggcccgcacgaatcgcctgctcagccattgtcctagcgagtgatctcgaggagctgtgctggatggagtg

SEQ ID NO: 316809 - DNA, 122 bp, Homo sapiens
caatggttgctaaaacctgcgtgccagaagccagaggtggggaggcgccatttgctaaaccggaactggttaaaatctcagggtggagaccattcccagtcagcaagggcttgggaagtgca

SEQ ID NO: 316810 - DNA, 122 bp, Homo sapiens
ccctgcgtccctggtgcccatcctggcctcccagcctggaatccggaaggtggccttctgcggagccccggaggtaccttcgggacaggggtcgtggcggaacgcggctgggggccgcaagg

SEQ ID NO: 316811 - DNA, 122 bp, Homo sapiens
atcatttgagcataggggtttgagaccagcttaggcaacattaccaagaccccatctttacgagaaagatttaaaaattaacctggtgtggtggcacatgcctgtagtcccagctactccag

SEQ ID NO: 316812 - DNA, 122 bp, Homo sapiens
tatctttccattgcgtaaatcatatcatgtcccattcacctttaatcttttgcttgtttccgactgcttttagaccactgttcagatccctgattgttataacctctggggtcctgcacctt

SEQ ID NO: 316813 - DNA, 122 bp, Homo sapiens
cctcagcgcggagcacgcacccagggatgcgagggaggcaggcccagcccgtcctgggttcgctccccattgaacctttcggacagccaagtatctgctacctgatcccagggggaaaccca

SEQ ID NO: 316814 - DNA, 122 bp, Homo sapiens
tgcttcaactcatccctaggctgacataacctggcatataatcaacacagaacggagcaacgctcctcatttagatccttcattcgttttataccatggaaatcattagtgaaagcaattgt

SEQ ID NO: 316815 - DNA, 122 bp, Homo sapiens
atcaagtctgccatgctcccaagtcagtgcaccatggtattttctccaacagtgcatactcgtaacctaacaaatcttgaggtgggtcctataaaacatatagaacctagctgctgaaaaga

SEQ ID NO: 316816 - DNA, 122 bp, Homo sapiens
cctgccgtgacggcgcacacacacacctgccgtgacggcgcacacatacacctgccgtgacggcgcacacacacacctgccgtgatggcgcgcacacacacctgccgtgacggcacacacac

SEQ ID NO: 316817 - DNA, 122 bp, Homo sapiens
gcctggtgggcaaaggggagcaaaatgcggcacgcgctcttttccgtcctttctttccatcggtaaaatctagactaaacaagaaagcaatccttgtaaaaatagtatgttacatctttgaa

SEQ ID NO: 316818 - DNA, 122 bp, Homo sapiens
aagctggctactaagggaacttgggaggatcccacctcagccttcgtgactagtgaggtgcgcaaacgcccgagttttccctggtgcgcgggttccgcctttgcagtgccctccacccttcc

SEQ ID NO: 316819 - DNA, 122 bp, Homo sapiens
ggtcccggagccgcgtggcgcgccctgtcgtccggcctgcattccgcgagatggaattctcggctggggctgataataagcaggtattgattgctgccgtggtcattatcaagatttattta

SEQ ID NO: 316820 - DNA, 122 bp, Homo sapiens
ccgacgggggtgcggctccaggaaacggcgcgctcccagctccgcgctcgccacccgacgcgccccaggcgaccccgcagactcagccagaccaccctgcgggccccagcggcggcagcgga

SEQ ID NO: 316821 - DNA, 122 bp, Homo sapiens
gccagtcgggagttccctcagcgggcagagggagcgccccggcacgccgcggacccctcccgccctgcatgcaaaagcggctccccgccctgtgcatgcctccgcaggcccctagggacccc

SEQ ID NO: 316822 - DNA, 122 bp, Homo sapiens
acatctgtcccctccccatcagaatgcagcagggaggagcagagcttgcctaccaatgggcgggatgctggtgtcagggtttgtgttcttgccacttcttcgcagaacccgcatgaagatcc

SEQ ID NO: 316823 - DNA, 122 bp, Homo sapiens
tgtgatgatggtcaacaacctgggtggcctgtcattcctggaactgggcatcatagccgacgctaccgtccgctccctgggtgagccatgcactgggaaggggatcctacagccctttggaa

SEQ ID NO: 316824 - DNA, 122 bp, Homo sapiens
tggcctctcctgggctgcggtctgatgggggtgctgataggcacaggaaatgtgtctcgccggcggctgctgagccgggaggcgagggcgcatcgcggcgccaccccccactcgggaccctg

SEQ ID NO: 316825 - DNA, 122 bp, Homo sapiens
agaacttggtcttgctgtctcttccactgacagaggcactagaagcttcactgaaggacccgcatgtcagttctgatggaaacacctggtgtttacaaattatctgtcaccacagactctgg

SEQ ID NO: 316826 - DNA, 122 bp, Homo sapiens
caccaggttctcttgaggaaaattgcacctgtccctgtcctctcccatctgtctgccacccgcgcccgcttgtccttctctccacccgacattcagttcccacaggaaccgcatttgagccc

SEQ ID NO: 316827 - DNA, 122 bp, Homo sapiens
cggacggagggatcacaccgggaggctgaggcaggagaatctgaagctctttctattttccgctttctcggttgcatctggcgatcgtctgtaaattgctgcgtgttttgcatggactctac

SEQ ID NO: 316828 - DNA, 122 bp, Homo sapiens
gtgtgtcatccacgcagtgtgctctcgctgccgtgttcaggtcactgcgagggtgagccccgctttatctaccccttctgctgttgatgggcactcgtctggggctagaagggataaggttg

SEQ ID NO: 316829 - DNA, 122 bp, Homo sapiens
cactcacagtgccaaatggcctgattaaacacagataaatgtttcttccaaaatatattacgcacaagtagtcaaggtgcacagccatttgagaagtctgctgttttaaaacctgtttgtgg

SEQ ID NO: 316830 - DNA, 122 bp, Homo sapiens
tggctggcggcagcccgggcggccttcagtccgtgtggggcgcccgcgtggccttctcctcgtaggactccccaaactcgttcactctgcgtttatccacaggataaagcctgcaatgacac

SEQ ID NO: 316831 - DNA, 122 bp, Homo sapiens
agcaatgccggccggccactctgagtgcggcccgcggagcctgtgcccacctgaaacttgcgctggcccacaagcgctacgtgcaccccggttcccaccggcacctctccctccacccctcc

SEQ ID NO: 316832 - DNA, 122 bp, Homo sapiens
gctccgggttcagtttcccgcgctggaactttttcaatagtaaacgagcaaagctccgcgcgcccaggtggcgcgagcactaggatctgtcggttggggtcctacttttacataacgccccc

SEQ ID NO: 316833 - DNA, 122 bp, Homo sapiens
tcgtccgttcccaagctggtttgaaactaggggtcgggctcggccgtcgtcgttgtttgtcgccgcatccccgcttccgggttaggccgttcctgcccgccccctcctctcctcccttcgga

SEQ ID NO: 316834 - DNA, 122 bp, Homo sapiens
tgccgctcccgaacgggctaaaggcttgccattgttcctgcacagctaagtgcccgggttcgtcctaatggagctgaacactagttactgggttacgcggttctcttccgtgacccacggct

SEQ ID NO: 316835 - DNA, 122 bp, Homo sapiens
tccctaccttcccaggcgcttcgcaggtgagccgggtgctgccgcctctctgcagagagacgtctccgggggctttctctggaggttgtcttcctttctctttactgttcccactctctttt

SEQ ID NO: 316836 - DNA, 122 bp, Homo sapiens
gccgctgtctcgcggcgtccacgagggccggcttctaaagctcggttcccaaggtgagaacgtgagactggcctgaagacttaagaaaagctctgagatcgccccaaagtgcagtctgcgtg

SEQ ID NO: 316837 - DNA, 122 bp, Homo sapiens
ctcgcctggcgcctcgccttacctcaagcagccgcctgccctgacgcccagcagcaaccccgccgcctcggcaggcctgcactccagcatgtcctcctactcgctggagcagagctacttgc

SEQ ID NO: 316838 - DNA, 122 bp, Homo sapiens
gccttccaaaacaggagaggcaacttggcctgctttttcctcagaagagcccactttttgcgtggaggtgacctgccatttgtccggttgggggtccccaatcgtcttcgagctactgatat

SEQ ID NO: 316839 - DNA, 122 bp, Homo sapiens
cccaaaggtcacacgctagctctggtaagggtgatccactctctgcttaatagagttttgcggggtctagatttagccgggagcaaacggccccaccctttacggacttgatgcctttctcg

SEQ ID NO: 316840 - DNA, 122 bp, Homo sapiens
tcagcctggcccgactcccactcagctctcttttctcagaaccccgacccacagcgttgacggaatggagtgcccttcccattggcccgagcgtcattccccgaggtggcactgcccgcctg

SEQ ID NO: 316841 - DNA, 122 bp, Homo sapiens
cgatcacgacacgcaggaattgtgactgtccggctctgcctttgtaccccctccagggaccggccccacctccagggcagggcctagggctgatgccccctcctcggtgcccagcgccaggc

SEQ ID NO: 316842 - DNA, 122 bp, Homo sapiens
gttattattttacttgtatcgccaaggaaaggaccagttttttattttaaaaacggtggtcgcagggggcttggatgggttataacacccatcagattggtcatttcctgggctacgtacct

SEQ ID NO: 316843 - DNA, 122 bp, Homo sapiens
accgcctcagggaagaggaaggaggccgcggcttcgcgtcccgcctctcgcctggctggccgtggggggcctggacgcagtggcctcccgaatctcccaggaccctaatatcgcccgaggat

SEQ ID NO: 316844 - DNA, 122 bp, Homo sapiens
gctgttgtaaatgcgcaaaatgcggcatttgttgacagtacctagagccactcattcattcgttcaacagtgtttattgagcagctgagctggaatgagaggctatgtttgtcgtttttgac

SEQ ID NO: 316845 - DNA, 122 bp, Homo sapiens
tctgcaagcctgcatgtccagttaccagccatatcacacctatgccccaaggtttacttccggcttgtccagcaactgcggactggctctgacctagcaaaacagcacatttctctaccacc

SEQ ID NO: 316846 - DNA, 122 bp, Homo sapiens
ctgagcagactctgctttgtgactgtgtccacagccctgagcttggtttcacctggtgttcgtcagcctctttctcttggggaagacagcctgggggcaggccgagaggtcaagatttggtc

SEQ ID NO: 316847 - DNA, 122 bp, Homo sapiens
ctttttttttttttaatacttcctaggtgattctgacgcaggcgctccacggaaaccctccgagaattctgggggccgtggggccgcccagctcagtccggagctccggaactcggggaaga

SEQ ID NO: 316848 - DNA, 122 bp, Homo sapiens
caggtcctggccaatgctcagagttgcgtgtggcctatgagcctcacgttgcggcgggcgcgcgtccccgcacatctgcaggacggcgccatcctcctccttaacccgcccagctctgggat

SEQ ID NO: 316849 - DNA, 122 bp, Homo sapiens
gagtgggccttacgcagccccaagggcaacaatactgagagatttagggtaccagaccaccggccccaggaaaaggaccgcaagatgggcgccgccatcttggtagcggcacgaagggaatg

SEQ ID NO: 316850 - DNA, 122 bp, Homo sapiens
ggccccgaggtgggcaggcgcaggcacattagagtacccaaggggggcctgcaggtggggcgggagtgggggtggggctggatggtggtttacactggccttgcaggcatgctcagcagttc

SEQ ID NO: 316851 - DNA, 122 bp, Homo sapiens
ccctgggcggctttacaatggataggccaatacgtcgccacggcttttaagactgggaaacggggcaccaggctgggctttagaaatcgctggagaagcctgggtgcggccgcagcccgcgc

SEQ ID NO: 316852 - DNA, 122 bp, Homo sapiens
gtcccagctcccggctggccggctcctgcatggacaaaggggtcctttgtgggctgaccgcggctggcggggcggcggggcgctggctccgcattgctgatgaaacggagccctttgttgtc

SEQ ID NO: 316853 - DNA, 122 bp, Homo sapiens
ggcggttcctggttcctggagccacttctgcagttgtacccattcacctgatggatgctgcgctgagctgtgaatagcacccaaaacattcaggcaacagctgcaggtgcagcaggctccta

SEQ ID NO: 316854 - DNA, 122 bp, Homo sapiens
gggacacacgcctgaggcccctgacctgatgtctggccacagactcctcagaaaggctcccgagagggtgacacccaccccctctggccatgagcccctttctgccccactcctaccctcca

SEQ ID NO: 316855 - DNA, 122 bp, Homo sapiens
agccttggccataacaggcccgaggcagatgtcctagtttccaggccagggtgtctaggacgtgactggttatcagctcagagcagcacttggaactcacaagggacccgggctaaggagat

SEQ ID NO: 316856 - DNA, 122 bp, Homo sapiens
cctgattggatagtgcgacagatcccgccccctgacgactgagttacagaagcgatctcacgctggggagtggagactgatgaacgagttcttgacacagcccttggcagggcgggcttctt

SEQ ID NO: 316857 - DNA, 122 bp, Homo sapiens
accccctgcgatattgggagtcatatccgctcccacccaggatattaggaacaagatgaccgaagggatgtacacccactgcgctattttcaataatgtcatcctctaccccccggctatta

SEQ ID NO: 316858 - DNA, 122 bp, Homo sapiens
atctttcccctcccctcctgagccatgctggcttcacagctgagtcacagctgtggggggcggtggggggtgattccagggaatggctggagggaaaggagcacgtgttttggactagaggt

SEQ ID NO: 316859 - DNA, 122 bp, Homo sapiens
ggatggtcccccaagaacagaggaggaagcccagcctccggcaggcagtatccacatccacgcccacctgctcaggcctgcagcctccagacctctagcgacaggtctccagagccggccac

SEQ ID NO: 316860 - DNA, 122 bp, Homo sapiens
cggagagacttggcaggtgtgcaggcttctgcactgtggccctgagagggtgggctaggtcgaggctggggcttctgaagtggccgagcctggtgcttcttgcagctctgaacccacaaggg

SEQ ID NO: 316861 - DNA, 122 bp, Homo sapiens
gcgggctgcggagacgcgggtccttccgtggccttggggtctccgcgacctcgaggcgaccgaggtcccctaggcctagtccccgccttgccggcatctagtgcgcctgcatcggaaccgag

SEQ ID NO: 316862 - DNA, 122 bp, Homo sapiens
catccacaattaaacaactttctcagaagcagactaatcgtaatggatcttatacaagtacgtgaataatgataatgattttgctgatctatcttcattgccttagcagagaattaggccca

SEQ ID NO: 316863 - DNA, 122 bp, Homo sapiens
aacaacaggaatgaatctcagaataattatgctgagtgaaagaaactagacaaaaaagtacggtttcatttatgcaaaattctagaaatgaaaaggagtctatagtgacaggaagcagatca

SEQ ID NO: 316864 - DNA, 122 bp, Homo sapiens
gaggcccccgtccggcccgggatcccccgcccaggatcccctgcccctgcatccccgccccgagattccccgcctgtcccgggacccccccacgcctcccgagagccccactcgactttcca

SEQ ID NO: 316865 - DNA, 122 bp, Homo sapiens
aggcagatggcttcagtccaggagattgagaccagcctggacaacatggcaaaaccccggcgctacaaaaaacacaaaatttagcagggtgtggtggcacatgcctgtagtcccagctacta

SEQ ID NO: 316866 - DNA, 122 bp, Homo sapiens
aactcagcagggggatccttaaacaatatatctatagataagaatgtcccctgcagtgatcggctgggaagacttcctggcagttcagcaattgacctagaagacagaggcacagagaaggc

SEQ ID NO: 316867 - DNA, 122 bp, Homo sapiens
caaattcacccaggatgccctttcttggggcacatatgctgcagtgaaaggagagcaggccgggcttgctggctgtgtgggtgcagcttcagtgcctggcccaatcctttcctccacgccat

SEQ ID NO: 316868 - DNA, 122 bp, Homo sapiens
gatccaaaggaatttccatttccttccagagggaatacaaggttatgataaccgagagagcgagaggaaaaaaggcgcacagctcgacccgaactcaacctgctttctttctcctggctctc

SEQ ID NO: 316869 - DNA, 122 bp, Homo sapiens
gacaaagccactagagaagtgcagaatccaactgggtgtcattaaatagctgagagttgtcgtcccattagacaggaaggatatatggggatgggatacacttgcagggaattctgaacaga

SEQ ID NO: 316870 - DNA, 122 bp, Homo sapiens
ggacgtccgacctgcgttgtctccaagtgtcccctaactagggttggagatgcccgtgggcgcctgtactcaccgctcgcagggagggcgcggcgcagctgggatccgggccagcgcgcgcc

SEQ ID NO: 316871 - DNA, 122 bp, Homo sapiens
cagctgtcaggcagcgaagcgaacagcgagctttggggacggctggatgtgggtgtagaccggggtctgggggcggaggtttcaggaggggtgacctcagcgggaaggtggccgaagattgg

SEQ ID NO: 316872 - DNA, 122 bp, Homo sapiens
cgaaggcgcggagaagcccggccgcccggtgggcggcagaaggctcagccgaggcggcggcgccgactccgttccactctcggcccggatccaggcctccgggttcccaggcgctcacctcc

SEQ ID NO: 316873 - DNA, 122 bp, Homo sapiens
ttgtgacaattctgtgaaattgagattagtcaagtgagagtaaatcactttccaggtgagcgcagctgctctgcagccagtgtacctcagtactgctgtactagttggtaaaatagtgaagt

SEQ ID NO: 316874 - DNA, 122 bp, Homo sapiens
agcagcagcaagaaatccaaagagcaaaaggcgctgcggcttaacatcaatgcccgagagcgccggcggatgcacgacctgaacgacgcgctggacgagctgcgcgcggtgatcccctacgc

SEQ ID NO: 316875 - DNA, 122 bp, Homo sapiens
tggaaggaccatcctgaccactttctccacaggaaagcactagatcttgatatgtgcccacgccccagagcaaaggcgagacagaatcctaaccctttgactccgtgcagtgcaggaccagc

SEQ ID NO: 316876 - DNA, 122 bp, Homo sapiens
atggtattacagtctttgttgtgttattgtggaaatctccggcgtctctcctgatgttgccgccctgcacggccgttggagagtacttgcaggcagccccgctccacaccacttttatcatc

SEQ ID NO: 316877 - DNA, 122 bp, Homo sapiens
cagtggcaccaggtgtccccacgaggagccagcaccttgatggtgagcctgagtgctggccgctctgtgggtggcagccggaggtgacatccctgaagggtacagggggccctgtgccccac

SEQ ID NO: 316878 - DNA, 122 bp, Homo sapiens
gcaggcgggggcgggcctctgcgtggtgcggccaatggggaccgagcctgcaggccgaggcgtggcggcccaggcgcgacgccccgagtggcggttgtttcaagatggcggacgtggcgggc

SEQ ID NO: 316879 - DNA, 122 bp, Homo sapiens
tgaagtcagtctgggacgtggcccctcgctagcctttcacctggagggagccagtaggaccgcggctaaatgaaaaggtcaaagagcccagaagcgaaagaggtcctcacgccgcaggccca

SEQ ID NO: 316880 - DNA, 122 bp, Homo sapiens
ccaccatgcccagtcaggctgtagaattcttaagagcaagaggccaggtgtggtggctcacgcctgtaatcccagcactttgggaggctaaggcgggtggatcacctgaggtcaggagttca

SEQ ID NO: 316881 - DNA, 122 bp, Homo sapiens
aagcagtgagacaatcgccgagtggtgagaccgtcgcctatcgccgagtagtgagacaatcgccaatcgccaagcagtgagtagcatcagacccctttcgcttgctattctgtcctattttt

SEQ ID NO: 316882 - DNA, 122 bp, Homo sapiens
cctggccctgtgtgaggtgaggcatggttgccaggtgactgtgcctgggcagccactcgccgtcagaagcactctgcttgctgtgctcacccctcagctgtggccaccctggtgccactcct

SEQ ID NO: 316883 - DNA, 122 bp, Homo sapiens
actgatctcctggcataaacatgtggctaacaagggtctcacaatgccaggagggtgttacgtttttataacctgttctatttgagggtctccaaaattacatatttgaagttaatattagc

SEQ ID NO: 316884 - DNA, 122 bp, Homo sapiens
gcagtacaatgtcaggccctgctccaagcttgctctctcagatgcactctgtggaggccccgatgagctcacggacagttgctccagggtgcacaaagcacagttttgtccagatgtgaagg

SEQ ID NO: 316885 - DNA, 122 bp, Homo sapiens
accactgtactcagtacctagttcagtgactagcacagttgaatgaatgaattctacccccgccccattcctttttttctgaacaatgtcagaccgagatgactgagtcatggcctgagact

SEQ ID NO: 316886 - DNA, 122 bp, Homo sapiens
gcgagacaccaggtgggcacactgaggattaaagagggcctcgcggttccgcactgcggccgggagacaaaccagtagccactatcaccagccccgggcagaccactaagaactgtggaggt

SEQ ID NO: 316887 - DNA, 122 bp, Homo sapiens
attttttctgatacccccaagaatgtctcaatgctttgaatatgcgggaaaggactaggacgtatccttgtttttcggaggtccctacttaggtccagttagaaactctcccagccatcaaa

SEQ ID NO: 316888 - DNA, 122 bp, Homo sapiens
tctcccgggccctgcctctcggtcctctgcagcggggaggacttcagcagctccccgggacgcccgttgcgaggacaccctgggcctgtgccctcctactagcaccgccctcctcgtctgca

SEQ ID NO: 316889 - DNA, 122 bp, Homo sapiens
gcgcggacgagggcggggttgggttcaggtctggtcacatgacctggcctgaggtgctcgcggcccccaccccaccagtgggcgtcccccccacgcgtggtcgaccatcattggtcggtggt

SEQ ID NO: 316890 - DNA, 122 bp, Homo sapiens
gtttgattaaaaaaaatggagcaatgtgcttgagaagatgaaaaaggtagaatctaaagccgtaaacaacagtaggttaagaatgatgtagacacgatgacaaagttgtgaaggcgggaaca

SEQ ID NO: 316891 - DNA, 122 bp, Homo sapiens
cccaacggctgcgcgcactgtaaccaccatgtgtcatctgcaaaccagatagtttctgtgcgggaaagaccagccagctttcttggccaagctgctgccataaaacacactagtgatttggt

SEQ ID NO: 316892 - DNA, 122 bp, Homo sapiens
tcacccccacccgagagcagcccaggaggctactgggaggtgatagctgccattccaggccgtggccagcaggagtcagcagagcagcttgagagggtagcctctgcgcagcggcctggcca

SEQ ID NO: 316893 - DNA, 122 bp, Homo sapiens
ttgtccccgcccctccacaggtcacctccctccacgcccctctctcttggcccgggcagccggcaggcagggaagtgtcgtaaagccaggcccaggaaactttacccggcctaacagctgag

SEQ ID NO: 316894 - DNA, 122 bp, Homo sapiens
cagaccccggctgaccaggcccacagcagacacgaacctgaccggcctcctttaatctaacgtccaataactggactctcaatgtctccctcgggggcatctggctaacaagctctcaacaa

SEQ ID NO: 316895 - DNA, 122 bp, Homo sapiens
agtggcctgcagactgtacgtgagccccagagctaagtagcctttggccttgaactctgacgttttctctcccacatcaacgacagttttggcaaacttttcagcctcttccaactgaaaaa

SEQ ID NO: 316896 - DNA, 122 bp, Homo sapiens
ttgcacagggggtgtcagctgatgggggcagcatgggtgcccatggagccctttaggggtcgttggttgtgtgcagagaggccacagcaggcgaggcaggcagtgtctaccacccccaagga

SEQ ID NO: 316897 - DNA, 122 bp, Homo sapiens
tgaaggaggagaggaggcaggctgcccacgggcctccggggccccacagcgacagccactcgctgagggacacagccgagccaggggccatggaggaactaccttgttctgcactagttcga

SEQ ID NO: 316898 - DNA, 122 bp, Homo sapiens
cacgccacctctggtactgcacctctgacggacaggagggcaaccaactgccttaaacaacgggaaggaagaggcggtctaaattcgtccacttcccgggagaggtgagaatgtaaacacgc

SEQ ID NO: 316899 - DNA, 122 bp, Homo sapiens
agccttctcccagtacctctttccttcgctccactcagcgtcgtccacgtggagaaaccgcgatgcagacaagaaaggcagccagacccagctgcaagccctgctctgcggaacaaggctgc

SEQ ID NO: 316900 - DNA, 122 bp, Homo sapiens
ttcactgatacttttactgagaaactttggcccctcttctacccaggcatccgggctggacggaagaatgctgcaccacttaccatcaggcccccaacagattgggagtgacaggttgggat

SEQ ID NO: 316901 - DNA, 122 bp, Homo sapiens
gcctattgtctgggatgtgaggagcccctctgcccggtgcccagtctgggaagtgaggagcgcctcttcccggccgccatcccgtctaggaagtgaggaacatctctgcctggccgcccatc

SEQ ID NO: 316902 - DNA, 122 bp, Homo sapiens
gaggatgggcagggagtgaggacctgtaggctctgccggagaacttgggcgtgggcggagcggggcatccaggaagaagcccccaccccagccttggatagggtagtatacgatagggggcg

SEQ ID NO: 316903 - DNA, 122 bp, Homo sapiens
cctcaccaaggctgttctgctcccgaggggcccgggccgggcctacggggcaaatccaggcgggtgtccttctcggggcccagatccgcctccctggggctcccggcccctctggccccagc

SEQ ID NO: 316904 - DNA, 122 bp, Homo sapiens
actgattacactcatagggcttctcaccagtatgagtcctctggtgcctaatgaggccagcgatattcctgaaaagtttctgacactggttgcagccatagggcttctcgccagtatgaatc

SEQ ID NO: 316905 - DNA, 122 bp, Homo sapiens
agttctttttttcttcttccatctcatctactcaataacggagccgctgcagccgctgcacgctgcacacacacggcacagtccctgggtccgggagccagagcagcgccactcggagacgg

SEQ ID NO: 316906 - DNA, 122 bp, Homo sapiens
cacggccacagtgtcacacaaccaaaaccacgcacacaccttggagacatgaatcacaaccgcacacccgcagtggtcacacagtcacaactgtactcacaccccaggaacagggcgaacag

SEQ ID NO: 316907 - DNA, 122 bp, Homo sapiens
agactggcacagtggagacggcgaagtcctagggagagcgaagggaggtattcaggggcgcgggaggggtgatggggtatcttcaaacataggctgctctctgcctctcatttcctcagcgg

SEQ ID NO: 316908 - DNA, 122 bp, Homo sapiens
cgtcccagaggccgcttctagtggcaggtgcccctcctcacagggccctcgcagccccgccggcccccgcccggctccttctcagcatgatacaaccgcgtcggccctggacagcgcatgcg

SEQ ID NO: 316909 - DNA, 122 bp, Homo sapiens
gccgaggccgccatggacggggcggagctggacggacgcgagctgcgggtgcaggtggcgcgctatggccgccgggacctgccccgcagccgccagggagagccacgcggcaggtccagagg

SEQ ID NO: 316910 - DNA, 122 bp, Homo sapiens
tgatggagcccttccaggaagcagggcgaggctcaagcacccagaaaaacctgtggctgccgaggtcccccgccagcagcgggcagcggagcgcaggggcggggctggggactggcgaactc

SEQ ID NO: 316911 - DNA, 122 bp, Homo sapiens
ggctgaggcggttccggaggttctagtgtcggagttgggtgcaggcaggtgccatgggcccgcttgaggcacactgaggggacgcggggctgggccatggccggcgctcgggccgccgccgc

SEQ ID NO: 316912 - DNA, 122 bp, Homo sapiens
gcagagaaagtcggggagactcggctgccgtggcagcctcacactgtgttgtggacccagcgattcctcagaggcaccaagggaagtggttaaaacaggaagacccgctgcacgctctcacc

SEQ ID NO: 316913 - DNA, 122 bp, Homo sapiens
gtcctggtctggccaaggacttcccagaaaactgtgcttagctgtggcgggaggcacggccggtcacgcagccttcctcccgccctggagtgggcaggcctgcttgtgttgtgcagcggcag

SEQ ID NO: 316914 - DNA, 122 bp, Homo sapiens
ggctcttcttcagggacccccatacgtattacggttgtgcgtggggtactcttacactcacgggggtgccgggcccctggaacctgcaactcacgcaggatgctcttttaacttactctatt

SEQ ID NO: 316915 - DNA, 122 bp, Homo sapiens
acagtttaatttccattatccgacttcgggatcctagcgccagccgccggggcaacgtggcgctaatgcagaaatcttggctcctgcctgcattattcatttcggggacgtggggatgggat

SEQ ID NO: 316916 - DNA, 122 bp, Homo sapiens
tcaacatgatgttattttagatggtcacccagttgtaccaatcccatttgttgaatagtccgtcttttacttaatacgttaacatacaacctttatcacatacaaaattctcatatgcactt

SEQ ID NO: 316917 - DNA, 122 bp, Homo sapiens
agtgctaggactggagttacctcttaaactcgatcctgatcttaagatcactgatcccaccgtggtgggaggtctgctgcccgctccaggtggttccttagtgagtggcacagtcaggattt

SEQ ID NO: 316918 - DNA, 122 bp, Homo sapiens
aaatctgccatgctcaaagactggaataatccagcgctcacgcggggaacgcagagcaggcggaggaggcaacagagcctctaggagttcccagaactagcatctccaggttaactggagtc

SEQ ID NO: 316919 - DNA, 122 bp, Homo sapiens
gaactccacagcggcagctaaaatccctgaacgctttaaagtccttctcctcaagatactcggctgcgtctggccccgcccctcactgagttccgccccgggcgcaacctcatcttatggca

SEQ ID NO: 316920 - DNA, 122 bp, Homo sapiens
gatgtttcctcctcttgtttcatccatccagactgtggacctgaagaatttctgcctcgtcgtgagtagtagttttgtacatctgctggcaaagtctttctcacggcccagctggatgcaga

SEQ ID NO: 316921 - DNA, 122 bp, Homo sapiens
tagctgggattacaggggtgcactaccatgcccagcaacgttttatattcttaatagagacggggtttcaccatgttggccaggctggtctcaaactcttgacctcaattgatctgcccacc

SEQ ID NO: 316922 - DNA, 122 bp, Homo sapiens
ccgcagccagtggagttaggaaaggagcaccggagctcagggtgtgagagtcgcaatccccgccctctcaaacccgcccgcctgccctagaaccacttccgggtcgcggggcgggaaagcgg

SEQ ID NO: 316923 - DNA, 122 bp, Homo sapiens
ctgctccacgccggggcaggtgacaccccctgccctgacggaggcctccatctggttagacgaaattcccggaagagcaggaagcaaggcaaggccgggtgagagagaggccagcaactaga

SEQ ID NO: 316924 - DNA, 122 bp, Homo sapiens
ccttcagatggctaaggggatgttttcctttggctcatacaaatagctctaagtcatactcggagaacagatttttgtacccttgagagcagactgccaacgtgggtcatactagccttata

SEQ ID NO: 316925 - DNA, 122 bp, Homo sapiens
aggagagccagcatgggaggcacatttgtgttccatttggaatgtgttctctcttggcaccggaagaaagggtgaccccagatggataccatgtttggaattggaatccaagaggtactggc

SEQ ID NO: 316926 - DNA, 122 bp, Homo sapiens
tctgtgagactgagctggttcaacagcccctcctgccaatcaccaagagtgaagcttctccgtcagtctggaatcaactactaagtttcaataacatcttaaaagttgggacagggaggaga

SEQ ID NO: 316927 - DNA, 122 bp, Homo sapiens
acgccagcgctggccggtacggacgccagccgccagggccccacggtgctgcgaggcagccggcacccacagccccagggcctcgaagtcactggggacagaaggtacacgcccgcccttgt

SEQ ID NO: 316928 - DNA, 122 bp, Homo sapiens
taaagagggtggaaagaactctaatactgaaacctagtcataggtcaaggctgcagaattcgccccatttccattttgctgattcatatcagtcagatatgactatgccacttgattttgtc

SEQ ID NO: 316929 - DNA, 122 bp, Homo sapiens
gacgctgaaaaaaggttggagaagcatctgaactgtaacccctacccctgatgccagtcccgagactgtcccacgaagatggcgaccggcgtgcgctgctcagaagcctctcaaaagggcgt

SEQ ID NO: 316930 - DNA, 122 bp, Homo sapiens
ttacattccaggaatcctcatgcttaacaggcaccccatgattctgaggcaggtggtcctcgaatcactaccctggaggctgcagattgagggcacaccccctgcgggagtcctctggcctg

SEQ ID NO: 316931 - DNA, 122 bp, Homo sapiens
gggcgcagaggcacggacaggccaggatgtgcctggtagggtcactactgcagcaaaagccgaaagccaagctccgtgtccatcgcgaaggcactgggcatgtggctatgcagccgtgacaa

SEQ ID NO: 316932 - DNA, 122 bp, Homo sapiens
agagatggtctcgtttccttgccgagcatgcgccttagttctctcttctggggctgtgaccgtggggtcgaagcgcgcgtgcgcggcggcggctggcggcggcggtggggcggggcctgggc

SEQ ID NO: 316933 - DNA, 122 bp, Homo sapiens
tccttgagaacgccatccaaataaacaggatcagctttatagactcctctctgagacgcccgtgtttcagttggcagccggcctgtttcttttaagcccgccctaatttatttttggtccca

SEQ ID NO: 316934 - DNA, 122 bp, Homo sapiens
gggccagccggctgctccaagtgctgggtccgcggagcccacgcccacccggaactcgcacgggcccgcaagcaccgggtgcaacccctgttcccgcccgcgcctctccctccacacctccc

SEQ ID NO: 316935 - DNA, 122 bp, Homo sapiens
tgggaggattgtagatgcactgctccaatctctgccttcattgtcacctggcattctttccgtgtctcttttctttgagacagtgtctccctctgtcacccaggctgaaatgcagtggcatg

SEQ ID NO: 316936 - DNA, 122 bp, Homo sapiens
ggcagggccggctctgaggcgggagccctgattggctgaggggtctgaggcgacagattccggaaaggggaagagcagccaacatggcggcggaacgcggcgcggggcagcaacagtcgcag

SEQ ID NO: 316937 - DNA, 122 bp, Homo sapiens
attatacactcagaaaaataacaacagctcacggctgctggccccttgcgggtccctacccgggtttcatctgatacctgtgggaacctggtgcggccagcctggcattcacctccactcct

SEQ ID NO: 316938 - DNA, 122 bp, Homo sapiens
cccgggcaggtttgcttttttacaacttggtgggtaaatctgagaatgttttccaaggcacggagcagctgggaatgcagccagtgtttgttgggcttcagggaggacaggcacagcgggct

SEQ ID NO: 316939 - DNA, 122 bp, Homo sapiens
tgaatatatataaacacgtatcaggagttcgagaccagtttccgcaacatggtgaaaccccgtctgtactaaaaatacaaaaaaaaattagccaggcatggtggcgggtgcctgaaatccca

SEQ ID NO: 316940 - DNA, 122 bp, Homo sapiens
aagcctcaggaaggaagggctgacacgaaataaggaataccatggcattcatgagatgtgcgtctgaatcctctctcttgcctgagaagctttagcttccaccttgagacacaaaacatgtg

SEQ ID NO: 316941 - DNA, 122 bp, Homo sapiens
aaatgttccataccttggtggtacttacacgggtgtacacattgaactgtacaattaagacgggttcactctactgtatataaatgatatcttaataaaaagtttttaaaaataataaatat

SEQ ID NO: 316942 - DNA, 122 bp, Homo sapiens
ctctttggccttccttttttgtttctcagcagtctaccaagctacgaagaacctgaaaatcggaggtcgtgtaccttattttttctgagagcttaagctgagagcacagcctccccaggaga

SEQ ID NO: 316943 - DNA, 122 bp, Homo sapiens
ttgcctggcaacccggcagacccgcgggtggacaagctcaaggggcagccaggtgccacccgccccacccccgagcacacgctgcggaattctgacggcacgaagcagagtcacgagcgcag

SEQ ID NO: 316944 - DNA, 122 bp, Homo sapiens
ttggttggatgctgcgctagaatgagtcggacatcttctgctcttcgttggaaggtgcggcgctgcttgaaggtcttctccgaccgcatggtgcggggatctggcccgcgctggcagcaacc

SEQ ID NO: 316945 - DNA, 122 bp, Homo sapiens
cggagctgccccgagacgccaagagggctgcgaagagctgcctttgtactcagagccagacgcggcctacgggacgggaccgccacgtctggggcttgcgggctgcagggcggcgcggcacg

SEQ ID NO: 316946 - DNA, 122 bp, Homo sapiens
tcagcggctccggattctgggctgctctggactgcggccaggcggtcttctgcgggaatccgggcaggcagggcgggctgcgctcccctccccggctctcccggtgccccttgtctttttgt

SEQ ID NO: 316947 - DNA, 122 bp, Homo sapiens
taatgcattcccgggtcgaatccgtctactgccttcccctcctcgaccgactccgaatctcggctcttatagacagaaatacagcctcagcgttaggggttaaaatccccctcttaaacggt

SEQ ID NO: 316948 - DNA, 122 bp, Homo sapiens
tttcaggaaaggtattcctgaaaaattgcaggagagaccatgctgtaggtctctttctagcgatctaggagttaatgccacagtgtgttcaaagccctttgatgcgatcagataatcagtaa

SEQ ID NO: 316949 - DNA, 122 bp, Homo sapiens
ccatagaaacagggaagatggaatctttttctttttctttcttgagaattactgctataacgagcctctcttactgaagagagtgtattgtacctttcaagggtattaggaccaagtaaagt

SEQ ID NO: 316950 - DNA, 122 bp, Homo sapiens
ggatacctggcccaccttcccctgaccccagagagttgtggggcctctgtcaggaggcaccggctctaacaagagctgtgggtgtgctctgggctttctgcttggcactgctgctcagtgat

SEQ ID NO: 316951 - DNA, 122 bp, Homo sapiens
ccgctgcgcaaggcagacgcacatcagatggagagccggtacagctgctcttgatgaaaacggcagtggctctgaaaagagcctttagatcgaccacttaaaaatataccttaggcccgctc

SEQ ID NO: 316952 - DNA, 122 bp, Homo sapiens
agcgattctcctgcctcagcctcccaaagtgctgggattacaggtgtgagccaccatacccggcccagataggttgatcttataacaatccagaaacaaatgtcatagtcaagatttggtag

SEQ ID NO: 316953 - DNA, 122 bp, Homo sapiens
tactttagggatctttaatgtagctcccaatctggcaactaagcttttgtgaactttatgcgcttgtctccattttaccaatgttgaagctaagagtttgcccaggcatcctgcaggaagtc

SEQ ID NO: 316954 - DNA, 122 bp, Homo sapiens
ccaactctattataaagatgttatgaatatttttaaagattggccaggcgcagtggcccacgcctattaccccagcactctgtcaggccaaggtgggcaaatcccttgaggtcaggagtttg

SEQ ID NO: 316955 - DNA, 122 bp, Homo sapiens
ctggcaggctgcgctccctctggaggctctaggggagaatccatgtcttccagcctctgacggctgcagcgtttcttggctgtggtcgcagtctctgcccccgtggtcacatcaccttctcc

SEQ ID NO: 316956 - DNA, 122 bp, Homo sapiens
acctcaggtgatctgcccgcctcggcttcccaaagtgctaggattacaggcgtgagccaccgtgctggcctggtaacaattattcttgaagttaactagaataggaaagagtttcacactcc

SEQ ID NO: 316957 - DNA, 122 bp, Homo sapiens
ctgattggacgatccgtaaacgctgaggcccagtctgtgcggttcacttgcgttcctccacgcgccccccagcacagtgggaagcacacagtaggtgctccgctctgctcctgtgccccgcc

SEQ ID NO: 316958 - DNA, 122 bp, Homo sapiens
aacatcataaataagataaacattatctgaagtgatcacaatgttcttgaacatctgagccggacagaatcaagcctgcgtcatcttccttctgattttccaaatgagcacacaggagaggc

SEQ ID NO: 316959 - DNA, 122 bp, Homo sapiens
gccccagaccctggagtttccgggtgcgcagacccttgccatcagcagaggctgccgctgcgcgtcccctaggcgcggaagaggcggctggtggtccctgacggcaaggtgaagtcgaggca

SEQ ID NO: 316960 - DNA, 122 bp, Homo sapiens
ctggccggcccgctgcagggctggcggcggagaccccgccagctgtggctccgggtgccgcgcgccccctagtggccatggcaggttttgcagcacatctggcggaagtaggctcggctgca

SEQ ID NO: 316961 - DNA, 122 bp, Homo sapiens
tttaggagaaactctggtgtgggttttcagtcctggaaggtgagccctggggtaggcacgcgtgggcgctcagaaaagggaaggcagaggcgcctccccggctgggcctgcggagggatgac

SEQ ID NO: 316962 - DNA, 122 bp, Homo sapiens
gccaccgcggccagtggctcccttccgctccccctgttttaaacgtcagaagccgacaggcgcctgatcctgctgcaactgctaccactgcccgggagactctgagggcccccggccgccca

SEQ ID NO: 316963 - DNA, 122 bp, Homo sapiens
gtacagtacagcattcaaaaattaaagatctgaaaaacacaagacatctcagtgtgcttccgggctggaggctctgctaaacaacagaagcagagaccggactaattgtcccccatgtctct

SEQ ID NO: 316964 - DNA, 122 bp, Homo sapiens
cccgtggactccccgaggagggcagaggtgctggtcctctctgttggtccctccaggacccgggcacctcctccaggctgacacaggctggaggacggcatcacccttgcctttggcttctg

SEQ ID NO: 316965 - DNA, 122 bp, Homo sapiens
gcctctgggcctcaccctaaatacatcaattatgacctgagcaaaaagttctgttccaatcgttgctctccgacatttccattgtttgctctggaaggagctgaattatctatgctcttccc

SEQ ID NO: 316966 - DNA, 122 bp, Homo sapiens
aagagccagagacaaacctcatcacgcctgtgtgccactgctcctgggaggcacagctcacgcactacgaggggaaacacactctgaagccaacacacgcaaaggcaaacgtcgacactcgc

SEQ ID NO: 316967 - DNA, 122 bp, Homo sapiens
ctccgtgcccaggtcactggggttggctgaatggtttactctcattctttctggtaggttcgggttgttctaattcactaaagctgttgttgccatcaaaatgaatagagtacacttttagt

SEQ ID NO: 316968 - DNA, 122 bp, Homo sapiens
cttgacagtcctgcttccgagatatctatctttagactgttgcttcttgtcctttctcgtcgcctctttatgaggctattgaaataacattcccactggccttcctataatgattgagcacc

SEQ ID NO: 316969 - DNA, 122 bp, Homo sapiens
gctcctttactcccgtgctcccacacttaggaaatgatagtgtgtgtttggtccacggggcgggcgtccccgggggtcggaagcagctgcctgagcgcgggccttgggaatggcagggaggt

SEQ ID NO: 316970 - DNA, 122 bp, Homo sapiens
tgtggatgttcctgggtcccctagaacactcgaaatctccccaaaaataccagagagtagcggtgggtgccctgccccttgctgtacccctctgtccgcagccgtgttgtggagggaaaggg

SEQ ID NO: 316971 - DNA, 122 bp, Homo sapiens
agagctgaatctgtccattgtccatctacacattcctctctgtgccaacacactccacttcgagtccaggaaaggaaaggattttcctgaagctccttgattttactccctccctcacccct

SEQ ID NO: 316972 - DNA, 122 bp, Homo sapiens
aagaatttctgcctcgtcgtgagtagtagttttgtacatctgctggcaaagtctttctcacggcccagctggatgcagatgtccatccagatctatctgctggtgtatcaaatgagaactcc

SEQ ID NO: 316973 - DNA, 122 bp, Homo sapiens
gggcccagccgccgcgccctggggacggtgtcccagaggcctctcctcgtgggcgcacggcgaggccgttcattgtgtttcctctctgggatgggacttttcacccagcagggccaggctgc

SEQ ID NO: 316974 - DNA, 122 bp, Homo sapiens
ctcccagcccgtgatgaatggcaaatccaagctgaactccagcgtgctggtgccctatggcgccgagtcctctgaggactctgacgaggagtcaaaggggctgggcaaggagaatgggattg

SEQ ID NO: 316975 - DNA, 122 bp, Homo sapiens
agagattctttatttgattttcatcacctttcaatgaaagagtgggtcctgtcagcactacgtaaaatatatatcttaagagcattaatttctttttaaatgaaagacagtgaagaaagtct

SEQ ID NO: 316976 - DNA, 122 bp, Homo sapiens
ggagaccatgacgtcacagaggcttcgcgctctgagaggtgggacgggactcttttgagccggctatggggacaccaagattctaggggatttaggatatcaggtcctcaggttctgggagc

SEQ ID NO: 316977 - DNA, 122 bp, Homo sapiens
gcgggaaagagatgggggaaagtgtgtgtgtgtgagtgtgtgcttgtgtgcatgtgtgtgcgtgtgtgtgtcaaggaaaaaagctcgcagtccagcagcccgggcctgggaggcttgtgagc

SEQ ID NO: 316978 - DNA, 122 bp, Homo sapiens
agccacagagccagtgagcagcagggaccgggcgccctgtccccaggctgctgttagtgacggtgtctgcatcctctgggggtccagcgtgttttcggctctgttccttttgggcagtttag

SEQ ID NO: 316979 - DNA, 122 bp, Homo sapiens
ggaaggccaagaaggcctctgaaatgcctcacctggagggcacctggtaggtcatcatgacgcgctggtcagcattggccatgagcagccaaatgggatcctggagcacgtacttaatcacc

SEQ ID NO: 316980 - DNA, 122 bp, Homo sapiens
tttgggttttccagaagctttactgttataaagcaccatgctttgtaacagcatcggggtcgttgcaggaccccctgattacaataaagcgagaaagaagaactcctgacttaaaaacatga

SEQ ID NO: 316981 - DNA, 122 bp, Homo sapiens
ggagcagagattcattggtgtgtgtgtgtgtgtgtgtgtgtgtgtgtgcgcgcgcgcgcgcgtgcgcgcacatgcactcaggccctgggaggagcttcattccaaaggaaaaaacaactgct

SEQ ID NO: 316982 - DNA, 122 bp, Homo sapiens
agccgctcctgcgcctgcgcagcgtgtagcgcctgggccctttcgggccgcacgcgcctgcgcagcccctgccgggggcgtcttcctcagtgcctgatggtctggacccctgggtctctagt

SEQ ID NO: 316983 - DNA, 122 bp, Homo sapiens
actttctggcgcagctggagcgggggctggcggggcggagaaggttggggtgaagcagagcgccccgacctgtttgccgtgccgcgcccgctaccctggacacccaaatccggagcagaggg

SEQ ID NO: 316984 - DNA, 122 bp, Homo sapiens
gggatctgatagttggtcatgggtttcctgaaggaataaatcttctggaggataaactctcggatcttcgtcactgcctagatgtggggaaccaaacacagggcatgaagctgcaacccttt

SEQ ID NO: 316985 - DNA, 122 bp, Homo sapiens
tattgggaaatgtagtcttgagggggcactgcatgacgtgtggttttcatcttccgcaggcgtggcggtgtttactggcgccttgatctatgccattcacgccgaggagatcctggagaagc

SEQ ID NO: 316986 - DNA, 122 bp, Homo sapiens
tcagaaagtgaccaatggaaggtgccggcagagcaccctgcagtaacagaaggtgaaagccggagcctggtggctgttgctgcaaacaaccacccaaaacttagtggcttaaaatcaccaca

SEQ ID NO: 316987 - DNA, 122 bp, Homo sapiens
tggggcagttctgctgaggacaccttaggggcctctgcactgcacccccccaccccgctccggccgcctagcaggcctccccagggaccttcacgggcttcaccccctctccactgccacct

SEQ ID NO: 316988 - DNA, 122 bp, Homo sapiens
agataacgtctgtagcaaagtacttacttttgcattctgaaactatgtttctttcacattcgcataatatccaagaaggcttagaactcccagtgttataaaatagtataactacctttctg

SEQ ID NO: 316989 - DNA, 122 bp, Homo sapiens
aggctccccgcctttgcgttgccctgagcagcgaggcgcggtcacgtgctaccttttgcacgtatcctgtcgcccctctgtccgcccgggacgcctagccccacccactgttcccgcccctt

SEQ ID NO: 316990 - DNA, 122 bp, Homo sapiens
ttccctccctatggccagctgcccatagagggcagtggtgctggagtgaagacctctcagcgcatccctcttcatctgtaggatgtgcatggcttccaatgctgtctgttctgctcctgaga

SEQ ID NO: 316991 - DNA, 122 bp, Homo sapiens
tcccgaatgaggaaggtccacagctttgggttggtcagggccaaggcaggggataaaagacgtgggaagttcaataagcaggaagcagtcagcctaaaggaacacatggaatgagagcaact

SEQ ID NO: 316992 - DNA, 122 bp, Homo sapiens
tcactctactggacactcactctaccacagtacaggccaggcctctacaacaggatatgccgggcaccgacaccccccacccttcttaaattaccatggtctccccacctccctctgtgcaa

SEQ ID NO: 316993 - DNA, 122 bp, Homo sapiens
ccttgcagagtaccccaaactccctccctctgccctttatggggcaactagaaggaaacacgcccccgagccccctccacgcttccttgaaaatcctgaggcctgtggtctggaaagaggaa

SEQ ID NO: 316994 - DNA, 122 bp, Homo sapiens
ctccccctcgccgctccctgctcccccgcgggcccgggaagcttgcactaccgggctcagcgcagccagccccaccgcctccggactcgaccccaccatagccccgccgtccgaatcgtctc

SEQ ID NO: 316995 - DNA, 122 bp, Homo sapiens
ctccacttttcagatgggaagactaagggtcagggagatgaagggagacatctcggaagccggcattgccagactttgcatgggcctgcctcccctggaaatgatcactcgggaagaggcaa

SEQ ID NO: 316996 - DNA, 122 bp, Homo sapiens
atgaccactgccatgattctactactattaataacatcagaaccatcaccagccctacagcgaaggaagtgccatattcatgactacaagaacattcttgccagatgatcaagatcactgtt

SEQ ID NO: 316997 - DNA, 122 bp, Homo sapiens
ggaggaataatctgcttctctccagctcctcaggagacccgcgtgggaggtcctgcgtcacgggctactgaggcacatgctgagtcccctcccatgggcctcagcacacctactatggctta

SEQ ID NO: 316998 - DNA, 122 bp, Homo sapiens
ccaagcaagccacagccagcatgtcagaaagcaagattcaagtcagggtccccttggcttcgactggctctactggatcaaacagctccagcggggacagaggcagcaggaaagagcttcct

SEQ ID NO: 316999 - DNA, 122 bp, Homo sapiens
agctttttcttttgcactcttgggatctgtcatgagaaaagcacactctctgtgctattccgccttcagcctaggcctcacagtgaagacatgtgggacagactagatagagcccaactgca

SEQ ID NO: 317000 - DNA, 122 bp, Homo sapiens
gggaagggcggcacgggaggaagcgccccgaggagggtcagcggaacacaaagtccctctcgcgcggctgccgcctgaggcgcgtgtccgccgccgccccgcccccccgctggtctagcggc

SEQ ID NO: 317001 - DNA, 122 bp, Homo sapiens
ttgccaagatctttctgaggcagcataatacagggcttaagagtgagacctgccgggcaccgcggtggctcaggcccaacacttggggagacctagacgggtacatcacttgaggtcagccg

SEQ ID NO: 317002 - DNA, 122 bp, Homo sapiens
tagcaggatcatgaaacttaatgagcctcttcagaactctgtggaaagaagtgccggtggcggttggctaagacataaatctgggctacaccaatgttgtccctgaagtcatctactataga

SEQ ID NO: 317003 - DNA, 122 bp, Homo sapiens
atatttctgttcctgcagcttctccacggatggagattgtctttgggaataacacagggtcgtgcagtccgcccggcggcgttttcgggcgagggtctggtgctggggagcgagcgcggagc

SEQ ID NO: 317004 - DNA, 122 bp, Homo sapiens
aagttttaggctgtacacagccagccttgggaatctcgttgagcgttcggcgtggatccacggggccaggccaccctgcgggagcgccacacgcatccacttcggattcagtgggtgaagac

SEQ ID NO: 317005 - DNA, 122 bp, Homo sapiens
aaggtgagagaagatagcattatcagtaaaggggaagagacatctgagcacacatatttacgaaaagcacatcagacttgggaactgccggatgtgctctctggggacctaactgggaacca

SEQ ID NO: 317006 - DNA, 122 bp, Homo sapiens
gttgttcacatcttaatgatagcatagctaaaacctttggtagtgttatttttaggctctcgaaagtgtttgagttatttttgatgtcagtgtttttgcagggtgtgaacatctcttgaatt

SEQ ID NO: 317007 - DNA, 122 bp, Homo sapiens
gccagcactacacacagtttctacacgatggaatgtcctttacactcctgatgaaatgggcgcaaaatttgctctcaacgtaggaggttgtgtttcctgaatctagaggatgccaataggag

SEQ ID NO: 317008 - DNA, 122 bp, Homo sapiens
caggatgtttttcagagagaagtgtggatgctggacaggaagaaccacagataccagatacgggtactgttgtaactctgttctccatgaaaagtaatttgcttttgcttgatactaatctt

SEQ ID NO: 317009 - DNA, 122 bp, Homo sapiens
gatattcagatcaatcagctggagtgacaggaaacacgttcgctcccattggaaacagcacgtgctccagcagagctcaggtgttgttgaagcccgttagaactggcatgcgtggagtctgc

SEQ ID NO: 317010 - DNA, 122 bp, Homo sapiens
gggcggggccggcgcctaattgggccgcgggcgcctcgaggtgggcggggcataagggggcggggccgcggagaccccgggcgggagcagggagaggaaagaagagactgagtacgcggaga

SEQ ID NO: 317011 - DNA, 122 bp, Homo sapiens
ctggttctccctcaatgcaggggagcaggccttcaaagctggtgcctggaaactcacactcgtttccaaggtgctgcttccttcccaggacatgtagggaacagcccttttgcatttaaaaa

SEQ ID NO: 317012 - DNA, 122 bp, Homo sapiens
gcccggggctcctgcccgccgtccagtccgcgcagggaccccgagcagcctcgccgtgcacggccccgccgggctcagttctgggctcgcacttccaccgcccccgcctggctcccagtttc

SEQ ID NO: 317013 - DNA, 122 bp, Homo sapiens
caaataaagctcagttctgaagagcacttctttggcctttgatggaggtgcttaggggcccgtgcacaggtatgaggatgcgccttccatgtacgtcttctgtcccccttcctctgtatgcc

SEQ ID NO: 317014 - DNA, 122 bp, Homo sapiens
atgcagatcgccattctagactgaggcattcattctctagctgctgggagtgttgcctgccgtgtagctcaaaactgagcccctccccaggaactgccctcagttgaagagaaatccccctt

SEQ ID NO: 317015 - DNA, 122 bp, Homo sapiens
atacaaggaacacatgaaattttgccatgggccacccgcggagccagagagtctagccggcgggtcccggggcggcggtcatgttgcgcttgctcaggcgctgctttttgtctgtgccacct

SEQ ID NO: 317016 - DNA, 122 bp, Homo sapiens
cgcctgctccaggatgtccttctggctgttccagtactcagcgtcaggccgccccagctccgtcaccgcccggaactcccccacgtcgctgtcgaagcgcacggactcctcctggttataga

SEQ ID NO: 317017 - DNA, 122 bp, Homo sapiens
tggatttcagacgtgggcaggtgtgtctgtgtgcggtgcggggaggagagaggaagccatcggagccacactgcagagagggccgtgtccccaggagagattcggaccccaggacgaggcta

SEQ ID NO: 317018 - DNA, 122 bp, Homo sapiens
tctctgtctaagtttatataatcagtacttcataattcagaaactttgcctctcagaggtcgatcagcaagctcagtgagttcctataaaccagtttgaaaggaattactgtctggaggcat

SEQ ID NO: 317019 - DNA, 122 bp, Homo sapiens
atttttatttttattttgtagagactgggtcccgctctcctggtctctcaaagtgcgatccgcccgcctcgggctcccaaagtgcgtgagccgccgcacccggccataaatcttaaacctaa

SEQ ID NO: 317020 - DNA, 122 bp, Homo sapiens
tcgcatcggcatgtctcagccggcaccgggcagcagagggcagcagagatcaggaaatggcgtcccggcaggcggcttctcccactgctgaaatgagttctctcaactgtcgctcagcactc

SEQ ID NO: 317021 - DNA, 122 bp, Homo sapiens
gggcgtgtgcggatacaagggcatgaatgcaggttggtcgcttgtcttcacacaggcatacgtggtgctcacagaggcccccacccatcctccagtggccaccctgaggagaccagaggcct

SEQ ID NO: 317022 - DNA, 122 bp, Homo sapiens
gagtcacagcctggggcatcagacggtgtcccatcccacgttactggccactgcacaccccgtgtgagtgatgggaagacactatgagatcattgtacttttcaggtgggtgtcatggaaga

SEQ ID NO: 317023 - DNA, 122 bp, Homo sapiens
aacattccaacctaatgggaagaatggtggggacagaaaaccaaaacaaaataatacatacggcatggtgaagaactaacattaacagagatctgaagaaagcaagggaatgagtcacagat

SEQ ID NO: 317024 - DNA, 122 bp, Homo sapiens
gagccgcttcctggaaggcggatttcagccgaagtgctaatgtcgccaggacttcctggccgcggacctgcagaaggagctcccagaacagtgcaggccacggggctttaatgctgctcctc

SEQ ID NO: 317025 - DNA, 122 bp, Homo sapiens
ctctcccggttgaaattgaaacttaaaatcctttgagtaacgatttaactattcagccaacgaaagaaaaatgcatgtttaaactgcattaacctgtcactggcatccaaacaaatttaaac

SEQ ID NO: 317026 - DNA, 122 bp, Homo sapiens
ccggccacctggacgtggtgcggagcctgctgcgccgcggggcctcggtgaaccgcaccacgcgcaccaactccacgcctctccgcgccgcctgcttcgacggccacctggaggtggtgcgc

SEQ ID NO: 317027 - DNA, 122 bp, Homo sapiens
tatcccctaactggacctctccattagataattctaatccattgggtaattttagtattacgcacttagaaaatgttttgttttgatattaccaaagggttttgggagaaagcatgtggcca

SEQ ID NO: 317028 - DNA, 122 bp, Homo sapiens
acctcacccgcccgagtcctgctccacaggattctccgggtaagctagggaaggaagaggcgcggcctcctgagcccgcatctcagagcgccacgtccctcctggctcagcctcccaccagg

SEQ ID NO: 317029 - DNA, 122 bp, Homo sapiens
ggtgacttaccttacctgagcttcagacttctcatctgtaaaatctagcctggcacatagcgaacattccaaaaaatgtacctactgattttatcgcagaaatcagcatctcttcccagcct

SEQ ID NO: 317030 - DNA, 122 bp, Homo sapiens
ctgagtttagcacaccttttcttccccatcatccaagtttgcgaatttcgggctctttctcgcactggagtcccagcaaccccagagattactaaagatgcaaccataaaagcagtatattg

SEQ ID NO: 317031 - DNA, 122 bp, Homo sapiens
cccccagacctccatccctaaacccgggcttgcgtgtctggcaacccagggccagcacttcgttcttacactcagctgagtggtagtcctgccaccattgctgtggctctgggactatagcc

SEQ ID NO: 317032 - DNA, 122 bp, Homo sapiens
ccaccttcggcgcagacacatccaccgaggcctcgatggacttgcctggggcagacaccccgaatgacggcatcttgaacttgggaattttgaacctgctgtctttggtagtcacatccttg

SEQ ID NO: 317033 - DNA, 122 bp, Homo sapiens
attccattaacaaaacactgacaagacacctcagggcgagctgtacattgacaacagcatcgtcaagcagaatgcacttcagggaaaacataataaggcctctcacccgactttccttgctt

SEQ ID NO: 317034 - DNA, 122 bp, Homo sapiens
gtatccatccccgagagggacctggtacctctacccaggtttctatcgctctgtctcctgcgctgtgcccttctgtagtcacaggagctgtagagaggaccccaggacatctgaaagccagg

SEQ ID NO: 317035 - DNA, 122 bp, Homo sapiens
ctgaggtaagtgtatgatcttagggaactttgatacaaatgggaattcactcactggaatcgtggctcccaaaaagatgctttaattgtgtggtgcttttatagtttagctccaaaacaaac

SEQ ID NO: 317036 - DNA, 122 bp, Homo sapiens
ttagtacatttggccaactgaccacctgtaacagggaggtctcatgtttgttagtagatacgcaggtaaggaaacttgaattcatcctctcctcggctcaggtctttgcttttcttttaata

SEQ ID NO: 317037 - DNA, 122 bp, Homo sapiens
ttgggggctttcggctcagaactgtgcgttcatcaccgcagttgattttagcccgttttccgtgactccacagagaaatccttcgccattctgtcatcactcctcaacccccttgtccgcct

SEQ ID NO: 317038 - DNA, 122 bp, Homo sapiens
ttttaaaattgtattttaaacgaaagtttccatttgagagaaagcatgaaaaagaggcctcgccaagggctgacacttgaatgtttgtaaactttatgattagttagcttcttttaaaaata

SEQ ID NO: 317039 - DNA, 122 bp, Homo sapiens
gagctgccagctgccacgctgatggagatgctcttgttgctgcccaggttgtagaggctgcgactgccaaagctgcctgctccgctcctgaagccacaggcccctccaccagctcccccaga

SEQ ID NO: 317040 - DNA, 122 bp, Homo sapiens
cagggagagaagccaggagagtgtccacggaactgagtcctgtcctctactcacagaccacgaggacgcggagccaacggatctggggacaggagcagcgtggaccagtcgccctccagagg

SEQ ID NO: 317041 - DNA, 122 bp, Homo sapiens
aatgagaaacctggaggcttcagggaggaaatgccgggagaggaacagagcctggaacagcgaaagaaacacttaaatgtcagaaatcaagccgggcagaaaatgactggggaaaggacggg

SEQ ID NO: 317042 - DNA, 122 bp, Homo sapiens
ccccacgccgatgcctggccttgctcggttggtcctgttccggtgcctagctcaggcgggcgctgcaagaggaagtgaaaatcgtccagtaattaattttcctgctgccggggggtggtggt

SEQ ID NO: 317043 - DNA, 122 bp, Homo sapiens
gcggccggggctctgcggagtgaggcggaggctgcagccgccagacagaggcggcgggggcggcgggcgcggggtcaccggcgggggggcgcccggcggccggaggggggcgggcgggcgct

SEQ ID NO: 317044 - DNA, 122 bp, Homo sapiens
agaacttgatcgcgctccttcctcgctgctagtggaagcgatgctgcacggcacagctagcgcttccccggctctccttcaagctgaaggttaccgacccgcgcagccagccccagcactgt

SEQ ID NO: 317045 - DNA, 122 bp, Homo sapiens
cagccttcgccaccggcaggacctcatttccttctgcagtctttgaactgccccaagcatcgcgcctagagaagtgtgaagctttataaaaatttaaacgcgtccgtggtggcggcagcagt

SEQ ID NO: 317046 - DNA, 122 bp, Homo sapiens
cagcggggaggggaaggggcagccctaggcagctgaagggcctggaagaggccacgaggccgcggggacgcgcttcggggacccccgcgcgcccctatttccgcgtgccccatttcccgtgc

SEQ ID NO: 317047 - DNA, 122 bp, Homo sapiens
atctgcagcctcaggatgaagatctgcagcctcaggatgaagatctgcagcctcaggcgacgctcttcagtgcgacaaggaggaagcaacttccatattccccacacggagtaagaacgcaa

SEQ ID NO: 317048 - DNA, 122 bp, Homo sapiens
tcacgcgcggtgccccgctacccaatcgaaaggcgtggctgagggaaacgcggtgggaaccgcccccgactccaggcgactccttggccgggcgggggagagcgtccccgtcagctgagagc

SEQ ID NO: 317049 - DNA, 122 bp, Homo sapiens
aatggagacacttgctgcctgggaagactcgaggtggcccctccaagctgggggcgtgggcgacttgtttcctgttgggggagggggagaagagtacattcctccctccccgccctcccaca

SEQ ID NO: 317050 - DNA, 122 bp, Homo sapiens
ggaagctggttagacacctggagaccctggggggcggggtcagaagtgagctgcaccgcccgcccaggccgacaacgactcccggcatgcagtgctttgcgccgggcacgctctgcgcctgc

SEQ ID NO: 317051 - DNA, 122 bp, Homo sapiens
ataaactgaggcacacatacaaaaactgacagagctataacattctcgctcatgcatattcgctgcccctctctgcatctgccccatacacagtgtgcccacactgcctctaatttgtgttg

SEQ ID NO: 317052 - DNA, 122 bp, Homo sapiens
attcccggatgagccccaggtcagacactggctgggctggacccatgagtcagggctctgcggcagactgaatcaacagagaagacaggcctggcccagccagtggcccaaacagaaaggga

SEQ ID NO: 317053 - DNA, 122 bp, Homo sapiens
tgtgggagaccatgattctgatcaggaccttatcttgagtccccatgcccattatggagtcgtacagccggtcagcgaaatacaggggcttgttctgaatacactggaccaggttcaggaaa

SEQ ID NO: 317054 - DNA, 122 bp, Homo sapiens
gtgacagcctgtctgttgcttagcaacagacaggaagtggggctccactcaccccaggatcgctgggaaaagtcttggactgaggagctccaaaaaggaagctgtggcgctgcgtagggaag

SEQ ID NO: 317055 - DNA, 122 bp, Homo sapiens
attgggttctcaaatctcataactagattagtcaatcttggtctaatggtctttcctttacggcatactatcaccttgatggaattcataaggagcaggaggtgagaagaaaaatcatccta

SEQ ID NO: 317056 - DNA, 122 bp, Homo sapiens
tggctggtgaccgcggcgcagaaccaggggtcgctaaccagcttagccacaggattctcccgcaggatgggataaagagagcacagcccccaccccacacccctgccactggaacgcggtcc

SEQ ID NO: 317057 - DNA, 122 bp, Homo sapiens
gactagaaactcacgatcgattgggaaaccagaacctacgaagcagaggcttggggcgagcgacgggagagtcgcgatcttcccgaagaaggggtggggagcagcggggtggggtggggggg

SEQ ID NO: 317058 - DNA, 122 bp, Homo sapiens
ccctggattgctatttcatatacatggtcttacatcgcagtatccactttaaaaggtatccgaagacaaattgctgtctgaacataaggccaagaatacagttctttttctaagcaaccaaa

SEQ ID NO: 317059 - DNA, 122 bp, Homo sapiens
gaaaagaaatgcaatcctttcaaatcagcagaagaaatgcagaaagcttgatcaatccaacggaaggtgagaaagaagaaaaaagaagcaaagaaaaaggacgtaaacatatatgacaaaat

SEQ ID NO: 317060 - DNA, 122 bp, Homo sapiens
cgctagggtaaggacaaccgcggggtttgaacggcagagaaggcggtggagccagcgtagcgcccgcagagcaacgcaaagaggaagaacagagaaacggctatgagaaaaagggccgaaga

SEQ ID NO: 317061 - DNA, 122 bp, Homo sapiens
accatgaagctccaggccttagcaactgaactaggccagagcaaccgaactaggcagaatcgaacagaatttggcgcggtcgggctggccaggctgctcaagagtcaaagtgggccaacatg

SEQ ID NO: 317062 - DNA, 122 bp, Homo sapiens
ctggcggctcccaggagccacaagtgggcgcagcgggcgcggtcccaagccggggcacatcggacacacccacccgcggccacactcacgcgccccccaccgataacacacacagacaccca

SEQ ID NO: 317063 - DNA, 122 bp, Homo sapiens
tgtccttaaaacctggtgtctggccccacaatctgcttttctggatctaagtgaccaccacgttccagctaaccagcccagattccagcaggcttcccatctgaccaggctacacccactct

SEQ ID NO: 317064 - DNA, 122 bp, Homo sapiens
tgtcgattgggtggtaccgcatgccccgcagctccatggcttcgtccagtgcccctaccacgtagagggcatcatggcgctctgtggagtaatgacagcctgcgtaagcttccccataatgc

SEQ ID NO: 317065 - DNA, 122 bp, Homo sapiens
cggaatttgcaagtgggatttcaagcgctttgaggccaacggtagaaaaggaaatatcttcgtttcaaaactagacagaatcattcccacaaactgcgttgtgatgtgtgcgttcacctcac

SEQ ID NO: 317066 - DNA, 122 bp, Homo sapiens
ctcgtcaatattcagactcccccttgttctgctgcagccagagtggtgtgctttcccctgcgatgttagcctcagtcctccccacccccatctcttcctcctgactttgcagccccaccgca

SEQ ID NO: 317067 - DNA, 122 bp, Homo sapiens
gacgagagggaggaaccagcgtgaggacccacaggcggccctggcagagcttggctagggcgtagcggggacccgccccacctgcgccgcgggatggtgcccagaggggacccctcccactg

SEQ ID NO: 317068 - DNA, 122 bp, Homo sapiens
tgcccgctcgcccgccggagggggaggaaggcgctgggcgcggtggccggtgagccagcgcgggggatggcttgatttgccctcgtctgctttacgggttcaaatagaatatatttttttaa

SEQ ID NO: 317069 - DNA, 122 bp, Homo sapiens
caaaacgcagccctgcgaccacaccaaggggctggaatgcaacttcggcgccagctccaccgctctgaaggggatctgcagaggtaagatgcttgtggtttggcccctttaaaaaaaatact

SEQ ID NO: 317070 - DNA, 122 bp, Homo sapiens
cgacacgggctgatgtgggagaccctcctctctgaccctcctagacactccaccactgtgcgtggccttgaggaaatgaccaagagtgagtttaaaccatatagttctctttctcaaaaact

SEQ ID NO: 317071 - DNA, 122 bp, Homo sapiens
agttattcaaactagtccatactaaatcctgccttgctttgcctgcagaactccagtaaacgctctgtcctagactttcctctgcctccttcttctgcctcctgaccaaagcttggtgcttc

SEQ ID NO: 317072 - DNA, 122 bp, Homo sapiens
tgcagcgtgtccagcatcagagcagctgcgggtggcggatgctcaccgcggggggagggccggggaaccggttgctctgtgtgcacatgcacgcgcctcggtctccccaggagcacacgtgc

SEQ ID NO: 317073 - DNA, 122 bp, Homo sapiens
gttggatgccatattttttattcaaatgactgaactccactcaaatttctaaaacaggctcggggagctatcctgtggggactgaacaagagtgtatccgtgaggctcatgaaatatcttta

SEQ ID NO: 317074 - DNA, 122 bp, Homo sapiens
gctggctctggccgctcagctcacccgatgccccgtgagccagccccgcgccagaagccgcggtggcaggaaggtttgatcaaacattaaataacgtaatgtttgcgacaaggcttatctca

SEQ ID NO: 317075 - DNA, 122 bp, Homo sapiens
cgggaggccccgggcgcggggtccggacaaggagtggcggggaggcagcccttagaccgccgattcccaaacccagccctcggtctcccgcggacccgacccggggcaggcagggcggggcg

SEQ ID NO: 317076 - DNA, 122 bp, Homo sapiens
ctcccagggccatcaccacacaaagtgaaggctggtgaatccgaggcttctagcccttgccgggccaggcccgcagcactccgctccccaacccagccgctgctttgtcgcaggaacctcag

SEQ ID NO: 317077 - DNA, 122 bp, Homo sapiens
tctgaagaaaggcagacaaacgcaaacccacatgcggcaggcaggcagttatgacaggcccgcccagcagctgtcactgagaacgtggcttctggaccctgctgacaaatggctgtagagga

SEQ ID NO: 317078 - DNA, 122 bp, Homo sapiens
cagaggcgggactcagagcccttcctcaagtctcattggtcaagttgaacgaacaagtgtcgctggcgagccggagagagagagagagcgagagcgagagagcgagcgagagagagcgagag

SEQ ID NO: 317079 - DNA, 122 bp, Homo sapiens
tcagagagggtaaggggcttgcccagggccacagagctacatggtggagcaggaagcacacgtggcagtgggggcaggcagccctggatgtgaatcctgtgcaaatcctgaccccaccattg

SEQ ID NO: 317080 - DNA, 122 bp, Homo sapiens
gaaggacgtggctctgaagacggacagccctgaggaaccgcggggcgcccagatggaactcgttagcgccccgagtgcagacaatcccggagggggaaaggcgagcagctggcagagagccc

SEQ ID NO: 317081 - DNA, 122 bp, Homo sapiens
aacccagtggacaccaggactcaagggagctgctgatataccatgtaggtcagcctcctgcgacagagcagagtggagaaggctgaggaggcacaagacagctgcccatagggtaaggtgag

SEQ ID NO: 317082 - DNA, 122 bp, Homo sapiens
ctaggggaaagaggagttagacggagggaacagtgtgtgcaaagactgaggtgggaacctcgttggagcctggtctccaagcttatcatgattagtggcagtgaaaaccttaaagaaggccc

SEQ ID NO: 317083 - DNA, 122 bp, Homo sapiens
cttgatcctcccgcctcagcctcccaaagtgctgggattacaggtgtgagccactgcgcccggccaatcatgcttgttctttttaaatggtaggtgttggtttgataggaatgctaaataat

SEQ ID NO: 317084 - DNA, 122 bp, Homo sapiens
tgccccccgcccacatgacaaatacatggcggacatggatgagctcttctctcaggtggacgagaagaggaagaagtacgacatccccaaatacctgtgctgtaagatcagttttgagctga

SEQ ID NO: 317085 - DNA, 122 bp, Homo sapiens
ggcggggggatcacctgaggccaggagttcgagaccagcctggccaacatggtgaaaccccgtctctgctaaaaatacaaggatgtggtggtgcatgtctgtaatcccagctactcgggagg

SEQ ID NO: 317086 - DNA, 122 bp, Homo sapiens
ttttttcctgtggtggaacacctccttgagggagatgccggctctgattggctgaaaggacgctacgctagcctgggataggcattgggccaaggatgcgcccggcccactcgtgggggagg

SEQ ID NO: 317087 - DNA, 122 bp, Homo sapiens
cagggggggtgttgtgtgcttggtggagggactgggttctgcaggctgggacggccttcccggtcctggacccccagtcagtgtttttctgcccgcctgtgcctctaggtcccagccgtcgg

SEQ ID NO: 317088 - DNA, 122 bp, Homo sapiens
tatatctgaaggatatgaacgctttgtgatacaggttacagattttggggtttttttctccgcttgctgtgagccttttgggtttgtttcctagctccaaatcttaacttggtgtcaagttt

SEQ ID NO: 317089 - DNA, 122 bp, Homo sapiens
tcctcccttcctcctatattagaatgcaaataagtagcattatttaaacacagcaacccacgtggagaagaaaaaaatcattattttaaaaagtatatgcaaataaggatattagtgataat

SEQ ID NO: 317090 - DNA, 122 bp, Homo sapiens
tctgggggtgtgggttgcatggggtcccggctgccatgggggggatcattgaaggccatccgctcccggggcaggtgggagacgagcagctggagcgagtgttcgcgcacctgcggagaggg

SEQ ID NO: 317091 - DNA, 122 bp, Homo sapiens
agggtccagggttcaagtccctgttcgggcggcatgtctttgcttttgggtaccgcacttcgcataaaatggtaacaaaaatagttactagtttttaaagctaggtgatacagaaacttgat

SEQ ID NO: 317092 - DNA, 122 bp, Homo sapiens
cctttttctgtgccaacacctttctgaaccctcctgaataaaagctgaaatccctgaaaacgtcgtacagaaccaatattgtttgcatagtctcattctttagtgccaaaggatttttctgc

SEQ ID NO: 317093 - DNA, 122 bp, Homo sapiens
tcggagggagcagcggaatgcggcgaagactctggacagcgagggcacagggtcccaaaccgaggccgcgccaagatggcagaggatggaggctccttcatcaacaagcgaccctcgtctaa

SEQ ID NO: 317094 - DNA, 122 bp, Homo sapiens
gactcagccatggtgggggtgacctggaaaaggtggcgctgaggacgggaagccacacagcgtatgagccgttcatgaaaccgccagacagttgaggctgcccggggctggggaggggtccg

SEQ ID NO: 317095 - DNA, 122 bp, Homo sapiens
tccggagacgccattttcccccttgatatctctctccataaatcggtggcgcggcggaggcggcagagtcgggcgggaagcgcggggccggccggggcgcccgccgctcgccgccgcctccg

SEQ ID NO: 317096 - DNA, 122 bp, Homo sapiens
gttcaggagtcgtctcgtgtactgtgaaccacgcacgctatcactggcgggaaagccgggcgcaaccccagggctgcctggagaacacagctctccctgctctgagcagtgcgtgtggcatg

SEQ ID NO: 317097 - DNA, 122 bp, Homo sapiens
tcaggggggtggtggggtcaccaggcactcacaggctgtcctggctcaccatcctcgcctcggtcacccttagcaccatcctggccctgcagaagtgaagcaaggtcagaggtgggccccca

SEQ ID NO: 317098 - DNA, 122 bp, Homo sapiens
tcctgcagctggggccggaccacctgaattagccgctgggcggcctctggccctggagtccgcctggctggtgtaaaagcatggtctggagttgccatcaagtctgctccgcgcgccatgtg

SEQ ID NO: 317099 - DNA, 122 bp, Homo sapiens
ttcaagcagtccccccacctcagcctcctgagtagctgggactgcatatgtgcactgccacgccccgctaattattgtattgtttatagagacaggctgggcaactgctgggctcgaacagt

SEQ ID NO: 317100 - DNA, 122 bp, Homo sapiens
cttccctgagagtcacttagccgctggggcccctttgaaagtgtccatcctgggcaatttcgcgctcttccttctgtgatgctgtcagtggctaaagaaagctgttggggaggcatgtgagt

SEQ ID NO: 317101 - DNA, 122 bp, Homo sapiens
tcccagtgccctctggaggcctaaggaagtggcagctctttaaatccccagtggccactccgcccccagagggccaagtttcagtttctcctaaagccaccagctgctcagaatccctggct

SEQ ID NO: 317102 - DNA, 122 bp, Homo sapiens
gcgcgcctggcagagctccctcctctgctccaacagcagagcccagagcatcccttggcccgacgcacaagtcccacaatagcctctcccaacgggaacgacttagccctaattacatgagc

SEQ ID NO: 317103 - DNA, 122 bp, Homo sapiens
cgaccgcagccaccctacggcacatcagttccggcgtcacaaaggttccgccaggggcggcgggattacctaaatcactgacttggcgagagactcagtggatttaagtgaaaagaggaaga

SEQ ID NO: 317104 - DNA, 122 bp, Homo sapiens
tgcgcttgggcgtaacacatgccggtctccctgctttcccactttaaaacgggaaatgtacgttatttatttgcagcgcaggcatggggagacgctcatgaatcagcatggggattttctcc

SEQ ID NO: 317105 - DNA, 122 bp, Homo sapiens
gctggagcgcgttgtggctcaggtcgaggtccgcagtagcggcaggtaactcggctggcacgtcctgcagccctaggccagtgcagcttagcaggtcggcagcgcagatacatttgtagggg

SEQ ID NO: 317106 - DNA, 122 bp, Homo sapiens
ccacaaagtcccttcaaaggctcaacaggttttgaggcatagcctccctcctccagaccccgctggccggccgtgtggaatgagagctgagggtgtctggtctctcaggggcatcggggagg

SEQ ID NO: 317107 - DNA, 122 bp, Homo sapiens
caggtccacttataggtggatgttttccaaccaacggcgcacacagaaacttagcatcctcggggtgtgaaacgcacttgtgcgggaggcccgctttctcaacccacagcttccaccggccg

SEQ ID NO: 317108 - DNA, 122 bp, Homo sapiens
ctttaccttcggcctatccacagatttcttctgccctggagaccacagaacttaccctatcgaatctaggattggcgccgaagctactcccgccctttgacgtccccgggcaccccgccccc

SEQ ID NO: 317109 - DNA, 122 bp, Homo sapiens
ttagatgtagggagacgcatggcacagaacagcaagaagccgactggcctgcacaagccccgccctcagcccacggcccgtctgggaacccacccttgatcaatgatggtaaattatccatt

SEQ ID NO: 317110 - DNA, 122 bp, Homo sapiens
aggggaacagggtcgtgccaggccagctggggctgggttgtggggagcatttgagaggtccgcactccgtggacaggcccgtcacccttccccttggcttcggaagtctccccacctccccc

SEQ ID NO: 317111 - DNA, 122 bp, Homo sapiens
cgcgcgtcgtgcgtaatgacgtcagcgccggcggagaatttcaaattcgaacggctttggcgggccgaggaaggacctggtgttttgatgaccgctgtcctgtctagcagatacttgcacgg

SEQ ID NO: 317112 - DNA, 122 bp, Homo sapiens
ttgacacattacacaaggacagtttttttctaattgcttaatttttcatcatcttccatccgatttactgaaccatccttaactttaggatgaatcctttcatttaacaaatgtgttttgaa

SEQ ID NO: 317113 - DNA, 122 bp, Homo sapiens
acactacacaggcgtggaccctccaacgagtgttcctttcctgtgggttaagagtaggagcgtctgggcaaaagctgggagctttcagttgccaggacccttgggaaagcacgtatttagat

SEQ ID NO: 317114 - DNA, 122 bp, Homo sapiens
cgtggaaggttgccaaggtgaggtgaccttgagtgaatgcgtgtaggtggaaaaaggttccggggaatgcttgcatcgttctgcatccgagcgtccaacagagaaaagatcctgtttccaga

SEQ ID NO: 317115 - DNA, 122 bp, Homo sapiens
cttgcagttcagatggaggaaggccactgtctcctgcttgcccctgggaactcaatgtctcggtgtaaagcccgatcgttcatttgttcaactctgagctcggagaaaagctgccctgtggc

SEQ ID NO: 317116 - DNA, 122 bp, Homo sapiens
gtcaggcccgggcggcggcggcggcgaagttttgacagctgctccagtggcggcgctgggcgccgggccgcggctcgctcctcacactcgctctctcacacacgctcgctcgctctcccgga

SEQ ID NO: 317117 - DNA, 122 bp, Homo sapiens
ccggcggagcctgtggaaaacaggccaagggcccaggattcgggccacaaaagcacaagtcggtgctggaccattgttagatcgttcccagcgctgggaacacggcgacgagggaggcgtta

SEQ ID NO: 317118 - DNA, 122 bp, Homo sapiens
gccttggccgctctgctcccgcctcccactgcccctcaggccagctcaggagccatggggcgctgggcctgggtccccagcccctggcccccaccggggctgggccccttcctcctcctcct

SEQ ID NO: 317119 - DNA, 122 bp, Homo sapiens
ctcgtcactttatattttgagtcctactagagactttgatgaattgcactcaagaagacgcggcccccactacgcagtggctacgggagatggcttccagggcaactgttctccaagttcat

SEQ ID NO: 317120 - DNA, 122 bp, Homo sapiens
gggaggcccacggtaccactgctgctccagccccagctgccggggtctcctcaggccaggcgctggacaccagagtggagaggcctccacaaggactctgtgctcagccatgtctgctgcac

SEQ ID NO: 317121 - DNA, 122 bp, Homo sapiens
cgcggctgcctggctccgagagacactcggcccggctctgaagggaaaacattaaagcaccgaaacagtggaaaaagagcatcaaagatgatgtctgcgaggcgcggccacggcgaggaagc

SEQ ID NO: 317122 - DNA, 122 bp, Homo sapiens
atcgtgggagtaggacctatttgccaatctcctggtaacactatcacaactggccacttccgcccaacgcccggtagtctgagagcctccaaggtcctcccccgcacccctgaggtcctgca

SEQ ID NO: 317123 - DNA, 122 bp, Homo sapiens
ggtgaggtctcattattttggggcgaaaatgtgggttgctattaatactcctgcaatgggcgtgtgaatgtgttcccagaaatgagtggggaattccacccccaaaaagcagctgcagggcc

SEQ ID NO: 317124 - DNA, 122 bp, Homo sapiens
aatcactgcagccaggaccacggaacattctggctgactcacgggatgccttgtccagggcggggaggactcagagttctcgctggacctttaatgacgtgtgagggagaagagaaacacga

SEQ ID NO: 317125 - DNA, 122 bp, Homo sapiens
gaggacgatccgccagtgagcgcggagactgcttccacttcgggcgggggagcgccggaccgaatcggctctctaggccgtggagcttgccgtcccacctccgtccaaatcgacctttcctt

SEQ ID NO: 317126 - DNA, 122 bp, Homo sapiens
ccgaggcggcagggcgggcgggcgcggttccgggggtgggcgggctgggcggggcggaggcggggccgcagcactggcttcacccagcctctcccgcccgcagccagagcgagccgagccgc

SEQ ID NO: 317127 - DNA, 122 bp, Homo sapiens
ggaggtgtgggtgcttggcagctgctagatgagattcatttcagagacgggatggagagacggccctgctgtgtgattgaagtcacagtgtgcttcttcctactgactgcaagcaatagctt

SEQ ID NO: 317128 - DNA, 122 bp, Homo sapiens
gcacaaaaaccaatctacctgatgaaaactccgttcccttctcgccagaaacataaaatgcgatggagctacggccaccgctgccgagacaaaatggcgccgacaagctggtttagcgcaag

SEQ ID NO: 317129 - DNA, 122 bp, Homo sapiens
taaactcccggcctcaagcagtcctcccacttcggcctcctgaagtgttaggattacaggcgtgagcctgcgcctggctgtaattactatacccagtttttacagataaaggatctgagaca

SEQ ID NO: 317130 - DNA, 122 bp, Homo sapiens
agaggaaatccggcagcaaaacattgaagaaaacatgaatatagcgatagaagaggcccccgagagttttggacaagtgacgatgctctacattaactgcaaagtgaatgggcatcctttga

SEQ ID NO: 317131 - DNA, 122 bp, Homo sapiens
cttggcacgaggtgctcatcagcagcatcgcccttgctttgggctggcctgttagtaattcgtttttagtggaatcgaatacaacacttgagcctcggaggctcaggtcgtcggagcaacta

SEQ ID NO: 317132 - DNA, 122 bp, Homo sapiens
agaggtggccatgccgtcacggagaggtggccgtgccgtcacaggtggccgtggctcgtacgtgagcaacacagtgaaggtgcctgatgctctgctgccaagagcagacgaggccactgagg

SEQ ID NO: 317133 - DNA, 122 bp, Homo sapiens
aatttccaattgtggtaaatgctatggacaaaaaatatgggtatctttaaaagagtataacggggcattggatctagttgatgaggtctgggaaggtttcctattccttaggtaaaattaag

SEQ ID NO: 317134 - DNA, 122 bp, Homo sapiens
gatgctgggaggcggaccgggagctcccagtctgcggcccccgccgggttggagcggctccggctcctccaaggctcgggctaagcggctctcaaccgattcccaccccgccctggagaaat

SEQ ID NO: 317135 - DNA, 122 bp, Homo sapiens
accccagttctattcaaccattattttaaatgggatcagaatatgacacctcaggccaggcgcagtcttcagcttaaaattatctttatataaaagtggcttgtaatctcagcactttggga

SEQ ID NO: 317136 - DNA, 122 bp, Homo sapiens
cagaggtgatacaagggtctcttggcccgaagtatccccacctctcctcgctggaaaggacgctgcctaagcctcatcccgagctgggggcggaggaccaagggtgagagccaccgcctccg

SEQ ID NO: 317137 - DNA, 122 bp, Homo sapiens
gtggtcaaaccaacctatcagcctccagcatgctccgtgtgggagcggggttcccgggggcggggcttggtttgtgtgcccttccggcgtttcgcccctgcgttctctgagatgctcccacg

SEQ ID NO: 317138 - DNA, 122 bp, Homo sapiens
gaagcgccgaattcaagcgtcctttcctacggaaccctcgtaggcaaatcagtcaaagcccgtcccggttctggtgtctccccgggttactcgtggctgaggtctcccgctgggtgacaaag

SEQ ID NO: 317139 - DNA, 122 bp, Homo sapiens
accttgtgagctgcccgcctcggcctcccaaagtgctgggattacaggcgtgagccaccacgcctggctgaacagcttattaattaaagacaaatactcatagcctgtgaaagaataccaca

SEQ ID NO: 317140 - DNA, 122 bp, Homo sapiens
cgcgggcggcgggcggcgcttcctgcgccccgggactcaattaaacccgcccggagaccacgccgggcccagcgcgtctgccttcttgactcattcttatttccggggttggggcggggcgg

SEQ ID NO: 317141 - DNA, 122 bp, Homo sapiens
acaccaaagaaatattagagatgggtgttttgccaagatttttccttccagaccagagcacgaagtgcttccacctcaaaatagcctttgtgttgtgggtttataaattctaacatgcattg

SEQ ID NO: 317142 - DNA, 122 bp, Homo sapiens
cggcgatctgatttatcagtatgaatgtccatcaaaagaaactgaaccctcaaaggcagccgggcccgtcactccggcagggaagcagctggttaagaataaaggggtaggactcgtgagga

SEQ ID NO: 317143 - DNA, 122 bp, Homo sapiens
ggacttttaactgcccgtcgggatgctttgcaggtgagtcccgataagcggaaaccgcaacgctccttcagcaccagtgcaggttcacggtttcatggggggaacgtcaattcagtaagacg

SEQ ID NO: 317144 - DNA, 122 bp, Homo sapiens
atggttctcattcctcctttctcatcccaatcacaggtctcctatatgatgcggacacgccgcacactaacccagaacacccagtacaatgatgcagaggatgagggtggccccaattccta

SEQ ID NO: 317145 - DNA, 122 bp, Homo sapiens
agtggggatagtgctggaaacatgctgacagggcctggattgagcccacacagcaaggggcgggagcaggactctaactcccaatgttgggtttccctctatcgtgctctagccccactgca

SEQ ID NO: 317146 - DNA, 122 bp, Homo sapiens
tgccccagaagcctctgcctgctccttcgggatgctgcagaaagtgctgactgcggatgccgatttaccgcttcccattagccaggcctctaacagcctctgagagcctgtgccggacacag

SEQ ID NO: 317147 - DNA, 122 bp, Homo sapiens
gaccgctgtcttctctcttgtcccctgaccgctgtcttctctcttgtcttgcagcaggaacgtcggagcaggaggagtcagtggagccatcaggacacccaggcccatggggcaggaggcct

SEQ ID NO: 317148 - DNA, 122 bp, Homo sapiens
gagaggtcgacagccctccaatcaagtgtcgagggagcagaaaacggcagaacattctgccggtcaagttcagcagttttaggtaacatctgcgagaactgccacacactggtattttcaga

SEQ ID NO: 317149 - DNA, 122 bp, Homo sapiens
ccctcccccgccagcctggcgcattgcgggcctcgggctcattgctgagagggggcactgcgcctggcacctctgttaagcaatttaggggctacaacctgagcaagacagatgagcccggc

SEQ ID NO: 317150 - DNA, 122 bp, Homo sapiens
aggaggaggtgggatgggctgagggaggaatgaacagggctgcggcccctcagggagctccggatgggtcctgagccaggaccagccctgacctctgggcgaagcctgccaacagccgggca

SEQ ID NO: 317151 - DNA, 122 bp, Homo sapiens
ctggtgctcctctcctgaggtacagagtgtctgcctctgtgcagaggtggcagcctcagccgtattcggatctcaccagaaactggaagcagcccacatacccctcagttggggaaaggata

SEQ ID NO: 317152 - DNA, 122 bp, Homo sapiens
gaaaactagccctacaaaacactgaaatgtttaaaatgcaaatatcccagcgtagtaggccgatcaacgtaacatagaacctataaataggtgcttttacatgtagaatttattttgataaa

SEQ ID NO: 317153 - DNA, 122 bp, Homo sapiens
agtactgcctgggcggtggcgggagtctggagcttggctgaaggcgcgagctgccgacgccgtctcctagcaaccaagcggcggtcacgtgacccgctccagcccgtttcacgtggtcttga

SEQ ID NO: 317154 - DNA, 122 bp, Homo sapiens
gggaatgtctgtcagcacatcacacatctgcagcagccattctcttcagggagccctcagcgccaatggttagggatctgggagtgagaagagcctgtgtggggagccacagctgtgcgctg

SEQ ID NO: 317155 - DNA, 122 bp, Homo sapiens
aataagggccattaaaagctcttgcgtgtaccagggaattacgtgcatgcccagcgtgggcggagtgctcagaaaaggcctgagaagacctcaagcctccacttctggctgaccttcaagat

SEQ ID NO: 317156 - DNA, 122 bp, Homo sapiens
ttcccgtgggcagctctgcgtcgaggccgccttcagcttgtggttcccagactgcaggtgcgtgtcggctgcagcggcctgagaggcctttcatcgtccgtcccgttgacactggatgccgg

SEQ ID NO: 317157 - DNA, 122 bp, Homo sapiens
cctatacaaaagacagggaatgaaaaggctctgacagttatggatgaatctctgaagaggcgcacagcgaccgtatttcgaaattcaagtcttttaaaaactggttagaagaatgagaacag

SEQ ID NO: 317158 - DNA, 122 bp, Homo sapiens
cggcggagtagcaagtggccatggggagcctcagcggtctgcgcctggcagcaggtgagacgccggtcgggatatgggaggtaggggagctggcccggccgctgcgggtgggggaatcctga

SEQ ID NO: 317159 - DNA, 122 bp, Homo sapiens
cagggaaaagcactgtgtcttccagcaccacttggaaaccgctcagcacttctttcttgccgttgctcccttcagtctgcagctccgcgggacagcaggagaccacggtggtggtgaactga

SEQ ID NO: 317160 - DNA, 122 bp, Homo sapiens
tgtaaggcacccagtttgtggtacattgttacagcagccctagcatacagatacgcccaacgttcaggctttctctgggcgtatctgtgtgctagggctgccatagcacagacaccccacac

SEQ ID NO: 317161 - DNA, 122 bp, Homo sapiens
atatatgttgactaaaagatatacctaagaatgttcataataaccctaaatgggaaactacgtaaactctcatactcttattaagagttgaacaggtacctgaattgtgggatggtcatata

SEQ ID NO: 317162 - DNA, 122 bp, Homo sapiens
tgtcctggaaactcagcagggtagggcctggttagtactgtccttaagtgctcatcctctcgatgacagaggctccctgaacctcagtttccccagctagaagttaggaatgataacacctg

SEQ ID NO: 317163 - DNA, 122 bp, Homo sapiens
cgccttctgacccctgggagatgcctcctttctccgagcagcagccgggggcctggccggcgccgccagccgggccccgcccccccggctcccgcccgctcattggccctggcagcggtgac

SEQ ID NO: 317164 - DNA, 122 bp, Homo sapiens
acacagaactgccagctcagcagccggttacatctcgcccggcaacccataggcagcgtccgctcatgcgcgctcctggaagacccagcagccccgccatgagttccgattggctccgcgtg

SEQ ID NO: 317165 - DNA, 122 bp, Homo sapiens
aagtggggcgggcggcccgggggcggtccccggggtaggggggcgcgggccccgggcaagcgcagcctcacggtgactaagcatgcgcccgccgctaggcaagacccaggaggatgcccaga

SEQ ID NO: 317166 - DNA, 122 bp, Homo sapiens
gccggccgctccaagtgtggggtccgcggagcccacgcccacccagaactcgcgctggcccgcaagcacggtgtgcagccccggttcccaccgacgcctctccatccacacctccccaaaag

SEQ ID NO: 317167 - DNA, 122 bp, Homo sapiens
tataataatcagggtcacaaatggaactaaacatcctgtatgatattcgttttcatgaatcgtttctttagccaaggctaagtgctgactgcgagccaaaggagcatttcccaaggtgcagt

SEQ ID NO: 317168 - DNA, 122 bp, Homo sapiens
tcagggctctggaccagagcagtgtgtggctggtggtacctgtggctggcgtgggtctggcgggtctggtggtgcctgtggctggcgtgggtctggcgggtctggtggtgcctgtggctggc

SEQ ID NO: 317169 - DNA, 122 bp, Homo sapiens
tattttgccaggagcttcggcagactcacgtctcaacgtccgggagcttcggcagactagcgcctcaagaacccagctctctgaagaatttatttggccaggagcttcatcagactcacgtc

SEQ ID NO: 317170 - DNA, 122 bp, Homo sapiens
cacctcaatctttggatcccacaagtctgccctacagtacaggggaagagatgtggagttcgaagccggaagagaaggattctgtggacaagagtaacaacaccagggaatatggtcggcca

SEQ ID NO: 317171 - DNA, 122 bp, Homo sapiens
aactggatcagggtgaaggaaaaagaaaagggggggggtcctttgtgccatgtgtctgaccgcttcctggagatgtttttcttgccagttctcttgtgcaaagtagacgtcttaaccgcatc

SEQ ID NO: 317172 - DNA, 122 bp, Homo sapiens
ctggctgcacccgccttcggggcggggcttgcggttgggcggctccggcgggtagggcgtcgcgggccagagaaacggcaacctgggagaaacccccctattgatccgttgggcggcccggc

SEQ ID NO: 317173 - DNA, 122 bp, Homo sapiens
gtgttagggttgcgtggctttcttgccgctgtccttccatagcagccaaggcctagttttcggtgtagaatgggggttgacctccgagcggttagaggtggcaccacaaagccacttccaca

SEQ ID NO: 317174 - DNA, 122 bp, Homo sapiens
cttccctgtcgccaccagactggttaaggccccaaatccattcgctagcaaatccatgctcgctctccaagggtaaagatttttcgtctccccctcccatttcacatacacacctacgtctg

SEQ ID NO: 317175 - DNA, 122 bp, Homo sapiens
gggaggagcgggcaacggactgggaggaggggtgcccagggctccccggccaaggctggacgcgcagctcagcctgatttctaagcagacctaaggctgctgcagggccggccggtcccggt

SEQ ID NO: 317176 - DNA, 122 bp, Homo sapiens
gccatttcttctccattcccatgatatccagtacagagtgaccatgcagtgttgattgatcgaacagcaaccaccacatacatgtcctgccccaccacaaaaggaaggaaggaataaaagaa

SEQ ID NO: 317177 - DNA, 122 bp, Homo sapiens
gaattcagatgcatgggctgggactgtgggagctgagagatgctagagtggtgagcagcccgctgggcagaaccttgcctggctggtgagagattgatgttccctggttccaaatggagact

SEQ ID NO: 317178 - DNA, 122 bp, Homo sapiens
ataactttacatgtattccttttaggttatgtttctcttattttcttagtctcctacatacgtgattgctatgtaatggcttgtgccttagcttatgtgattccgtctgtcacttacttgtt

SEQ ID NO: 317179 - DNA, 122 bp, Homo sapiens
gagttaacgcttctgtctcctgaccctgtgctcctccctagctcaccagcgcagtgtagccggccgagtcgggctgacttgggtcctcggccttctggattaaatgcttcactcggcccagg

SEQ ID NO: 317180 - DNA, 122 bp, Homo sapiens
taccacagcttctttgctcccagctctgtccagctacctaacctcaaggaagccaacaggcgatggaaaagttggcataaaaatgagaatgtaggctggacgtaatcccacctgtaataaca

SEQ ID NO: 317181 - DNA, 122 bp, Homo sapiens
aggaccgcggccaggggctttgggagctgcggctgcgctcgggggcgcggggctggctggcgggcgtctctccggcacacacagcccgtgcgccctggccctgggcgcctccccgagtctag

SEQ ID NO: 317182 - DNA, 122 bp, Homo sapiens
ccaaggagtcacagtcactcagccactttatgggggagcacatcggttgagcccagtaaccggagcgacttgcgaggcggctgggaaccccgagaagacacgcacgaagagggcgcacccgc

SEQ ID NO: 317183 - DNA, 122 bp, Homo sapiens
gggcctggcctgggaagcgcggggctgagggcgatgcccggccgctatcccgagtcggtgcgtgcctatgctgcaggagggccaccaggagctctgcttctccgctgcacccggctcggagc

SEQ ID NO: 317184 - DNA, 122 bp, Homo sapiens
tcactgtacagagttttggtagtatagatgtaccggggatatctaagcattcgcaatacccggctgcactgggcttcatactccaccacaccacgtttgtgcacttgataactcaccaggtt

SEQ ID NO: 317185 - DNA, 122 bp, Homo sapiens
acggaaccttcgttggccgcatcgcgcaggacctagggctggagctggcggagctggtgccgcgcctgttccgggtggcgtccaagggccgcggggaccttctggaggtaaatctgcagaat

SEQ ID NO: 317186 - DNA, 122 bp, Homo sapiens
acattccagatgctgaggtgtggagaagaggtagggggtggaggttcaggggtgaggatacggagtgggaacaggaactgcggccaggcaattgggaaactactgcaactctccacggaaga

SEQ ID NO: 317187 - DNA, 122 bp, Homo sapiens
cagggccacagagggaccgcgcggcaggcggcggcggagtgctgcgcctttgttggggcgcgctcctcccagcctcggctccagagcccgcagccgaggcgacgccgcttgctcggaagggg

SEQ ID NO: 317188 - DNA, 122 bp, Homo sapiens
tattcctgcagcgttggaaatgagttaaaaaacacagctagttcacggaaatgttgtgagcggtactcatgcctgtaactgcagtgtcactggttactaaataaacgaaggcctcattcaac

SEQ ID NO: 317189 - DNA, 122 bp, Homo sapiens
ctgcccgggagaactgtgtgtgtggtttgctctcccggctctgtgggctttctctgggtgcgctgttttcccccatgccccaaagctgtgcacgccagggtgttgctgtgtctgacctgtcc

SEQ ID NO: 317190 - DNA, 122 bp, Homo sapiens
atgatcatttactcctgctctctagcaggtggactatttgcgtgtgtttgcagtgattcacgaaaagtttgtcttgggaactcccaactcctagtttgtctgcattccaccttctttcacta

SEQ ID NO: 317191 - DNA, 122 bp, Homo sapiens
aagccccgattttatatttgtgactataaaaaagcgccacccggtttcctcgccttcggccgccgcggtgtggccggcagagccggggccggcgggccgcaaaattgcgcgattgttcgctg

SEQ ID NO: 317192 - DNA, 122 bp, Homo sapiens
caggtgctacagacccacagtccaaggagacattagggacagcccaagcagctgacagagcgatacactatcacaaaaaaaaaaaaaaaaaaaaaaaaaaaattgctgtctgggtgtggtgg

SEQ ID NO: 317193 - DNA, 122 bp, Homo sapiens
aatggggagctccagggcaccagggaccatacctttcatgggaagagagtagaatgggcacgtcttagagacgttcctcaggtcctcagggaataagcaacttttctactggtatgtgtgca

SEQ ID NO: 317194 - DNA, 122 bp, Homo sapiens
ctgggaagtacagttccgtgatgccggtggcgccagactgagccaaggagcaggtgttctcgggcccagaggcgctaagtagctaaagagggctgggacgtacgttccgaaatggctgctgt

SEQ ID NO: 317195 - DNA, 122 bp, Homo sapiens
tggcggggcggggttagtatcttgggagccttggagcgggtgctggggttcttagacgggcgggttcgaatccctaggagtgggatttgggatcctttggagactggggtaggacgctgggc

SEQ ID NO: 317196 - DNA, 122 bp, Homo sapiens
gggtagggcatggctgcttacaggtccccagccctgcccggctgggtggcagtggaggcccgtcgagaatttgagcatggcacgggcaggccggctgtgctgggggacctggcgcccccctc

SEQ ID NO: 317197 - DNA, 122 bp, Homo sapiens
ttgccgtggggggggccctgggcaacaggcccttccgtgccttcgtggtgacagacaccacgcttacccacctggctgtgcaccgggtgactggggaggtgttcgtgggcgcagtgaaccga

SEQ ID NO: 317198 - DNA, 122 bp, Homo sapiens
attcatatactaattagtttaacatttttctcctctgcaagaccctaagctccatgcaggcgggtgctgtatctgtcttgcttgtcactttattaccagtagtatccagcacaacatttggc

SEQ ID NO: 317199 - DNA, 122 bp, Homo sapiens
gtgagaaactgccccgcggtgtgtgagaaactgccccgcggtgtgtgagaaactgccccacggtgtgtgagaaactgccccttggcgtgtgtgtgagaaactgccccttggcgtgtgtgtga

SEQ ID NO: 317200 - DNA, 122 bp, Homo sapiens
ggcactttgaatttttccatcctgcaaaatccaaataattcctgtcgtaaaataggcaaacggtctgaggtgcctgacgtccaggcattcttttacacatcagtcccttcctagtctctgtg

SEQ ID NO: 317201 - DNA, 122 bp, Homo sapiens
gatggcacagatgagcaatctgacctctctcctctcttgtgttggtctttcagctgtggtcgccaggacccccccagagccaagaccttctccagaaggtgacccttcccccccaccaccac

SEQ ID NO: 317202 - DNA, 122 bp, Homo sapiens
cccattccaggccagattaggagtggcctctccaagcccacagccctctgagcagagcaccggctagggggctcagaggggcctcaattcacccccacctccaacccagctgttggaggcca

SEQ ID NO: 317203 - DNA, 122 bp, Homo sapiens
cgacttccagatctgggcagtagagaaacacatgtcagagcccagcactgtctccaccaccgggtgctccgttccttcttcctttgtctgataattcaacaaacattcactgggagcccact

SEQ ID NO: 317204 - DNA, 122 bp, Homo sapiens
gggactgataagactggatgtgggtgtaggtccccttgctgggagagagcaggaagctgacggagcttctagctggtgatttcaattttattcatcaagtaggaagtgaagtcatccacttg

SEQ ID NO: 317205 - DNA, 122 bp, Homo sapiens
ttgtttttggtcgggtaaggcgatgctgtagaggctggcgatctccagtcttcacgaatccgcacgtctctccattatccaccgcgcccgcccactgggccccggggcggccggcggccggg

SEQ ID NO: 317206 - DNA, 122 bp, Homo sapiens
gagtataataaatttgaactgtgccaatgctgggagaaaaaatttaaaagaagaacggagcgaacagtagcttcctgctccgctgactagaaacagtaggacgacactctcccgactggagg

SEQ ID NO: 317207 - DNA, 122 bp, Homo sapiens
ggaagagtagtttaattcaagtagtttaattgaacatattagtcattggtctgtctgggacgtgcagtgttcatagtagcaatgtatgtaccatttattttatctggttgtgtgtgatgtgt

SEQ ID NO: 317208 - DNA, 122 bp, Homo sapiens
tagatcaacgttctgggcaccacagcatccagagatgagatgatggagaaggagagatcacgaaacactctgtagatcctgctaaggagtttgccttttattctggaggcaaagaggtaatt

SEQ ID NO: 317209 - DNA, 122 bp, Homo sapiens
gatcaattgtctcatttttcttttttatagaataagaaagccttgagttttgtgaaaaaccggagaagagaaactaaaaggacagtagaaaaggcttttccagtttgcataatgtaagttct

SEQ ID NO: 317210 - DNA, 122 bp, Homo sapiens
gaccttagctgtcatttcacctgcgtcgtcccggacgccatttggctgttgacgtggttccgagccagcaaataacgccagcagccctcccagatccacgccggcccgtctctccgccggcc

SEQ ID NO: 317211 - DNA, 122 bp, Homo sapiens
tgctgctggattgagtatcttcggtcctcctaatcatactctactggagcagagcacccacggactcctggcctcagttgcctttctgtgcccctgcaccccatttaaggggtggggtcggc

SEQ ID NO: 317212 - DNA, 122 bp, Homo sapiens
cggctacttcctcttcctctttgccctccccatcctggtggccggcctggccctggtgggcgtgctgcagttcgcccggtggttcacgtctctggagctcaccaagatcgcagtcaccgtgg

SEQ ID NO: 317213 - DNA, 122 bp, Homo sapiens
ttagcaaaccttaggcagatttccgtaggtgggaggtacttctgatagggttatctgtagcgataattgactgaactgagtgatctaagaaatgtgctatgtttccagtggggatttagtaa

SEQ ID NO: 317214 - DNA, 122 bp, Homo sapiens
gaggcctgggagcaggaacctgtaggcagcgcttgagggtagcgggatagcagctgcaagcgcgcgtgggaggcgggggctctgggcggaacaaaaatcacaggatgtcagaggatgtttcc

SEQ ID NO: 317215 - DNA, 122 bp, Homo sapiens
cttctctgacgcttgctttaggttggtggatttgtgaccctgcccacacattttctctttcgtgccaaaagagcccgttcccaggttggagtgtttccagattggaaacggtctccgtcgct

SEQ ID NO: 317216 - DNA, 122 bp, Homo sapiens
gcagatctgggggtccggggcgggggttcttccctgatacccaccgggcacgcgagttcacgccagcgacagtggaaagccctcccctcgcagcgcgctccgccactagccgcaccccgccg

SEQ ID NO: 317217 - DNA, 122 bp, Homo sapiens
gcagtccaggctgttcttcgagctgacaccaagcgattgaagctgctggaagaggagcggcggcttcagggacagctggaacaaggggatgacacagctgctgagaggctagagaaggtaga

SEQ ID NO: 317218 - DNA, 122 bp, Homo sapiens
gaaccataaaatttttataattattatacatgaattactgaatttatcaacaaataatgtcgaattgcatgaagagaaagtgggcccttcctggaccaatgatgacaaataccggcgtatga

SEQ ID NO: 317219 - DNA, 122 bp, Homo sapiens
gcgcgcactcagatttttagaagaagaaatctggagaggacgtgagagagagaaacagcgcgcactcagatttttagaagaagaaatctggagaggatgtgtgagagagaaacagcgtgcac

SEQ ID NO: 317220 - DNA, 122 bp, Homo sapiens
ggctacacatgagcccagccacaagccagggggtggagctgggcagggaagctgggcctccgggggggtaggtagggggtctgggtcagagacactgcaggggaaacaggcagaggaccaga

SEQ ID NO: 317221 - DNA, 122 bp, Homo sapiens
gcgccaccaagctggagcaggtcaagtttgagatctgtgtgagcagcaagggcagctcagcgcagcactctcccagttccctgcggcgggacctgctagcggagcagcagcctcaccacctg

SEQ ID NO: 317222 - DNA, 122 bp, Homo sapiens
cctctcaggaattaacacccggaagggtgactttcatgattacaaacctctttggcgggacgcaggaacccagcgcccgctagcccactagtccgtcactctgcctccaggagggaggggca

SEQ ID NO: 317223 - DNA, 122 bp, Homo sapiens
gacaccttcaggctgctcgagagggttccagctgccaggtcaggagcagagcacagccaccgcgccctccaaggacaccaaggcacgtcccgctgtccccccagcgcgtggccagttccccg

SEQ ID NO: 317224 - DNA, 122 bp, Homo sapiens
ctcaagaaacacggtgctccttatggctgctcgtcaatcctctcagcggccagcagatggcgcacacttctcagaaacatcaaaacgtggcgtgggaaaacccgattccgtggggaaggcgg

SEQ ID NO: 317225 - DNA, 122 bp, Homo sapiens
tgggtgttcacagcagggcactgtcagcctctttgctcattccaaaaccaagtttgcatacgtctagacccatcctagagttgtcacctgtgacatttgcacagtcagctggagccatctgg

SEQ ID NO: 317226 - DNA, 122 bp, Homo sapiens
cacggatgtctcgggcgctctgtaaaaccccaggctttggagcatcgtgcctgtgtttctcgcagaagacccccacaagtgaaaacggggccgtagggtggcttgagcggctgcagaaactc

SEQ ID NO: 317227 - DNA, 122 bp, Homo sapiens
ctgcaatgtgtattctataagcaagaagaaaaaataagtggtagaaatttcttcctccagcgaagtgcaaagagagactctattcccaccaggtgctcattaggaaaagcatccttctctca

SEQ ID NO: 317228 - DNA, 122 bp, Homo sapiens
gagcccctccctgccctgctggctcctagtgtgcgaagccggccccttccaggcccactccggttgcaggaagggcctccctggtgcagcaccgcctcctcacaccgctaggtggcagcact

SEQ ID NO: 317229 - DNA, 122 bp, Homo sapiens
aattcacctgttggtcttgcttgttgttctgttctccaaatgggttgatcttcacttagacgccagtgcaacacacaattcggccctgaattggctccttagtttcagtccgtgtttccatc

SEQ ID NO: 317230 - DNA, 122 bp, Homo sapiens
gtctcagactcagatccaacacagtccgtcacttacctaaactgcacttggaaagttctgcgatcaaacctgcccctggttcccttcttactagcccccctcctattatcacctggtggttt

SEQ ID NO: 317231 - DNA, 122 bp, Homo sapiens
ccgccccgccgatgccacgccccaatgaagacccgcgctacggaggccctgccctcggggcgggccgcccttcacagtcaagctgccaggccagcagccgctccagctccctgtcacatgct

SEQ ID NO: 317232 - DNA, 122 bp, Homo sapiens
ttaattttccataatttgcctctacctttatccttccaggagattctacttccaagcagacgcggtcggccggctgcaggaaagggaagcacaagcggaagaagctgccggagccgccagac

SEQ ID NO: 317233 - DNA, 122 bp, Homo sapiens
atcctgaccccgccctgcagggccctgattgacagaagctgtgttcctgcctgggacaggcggcccgaaggacgtgtgtttggctggctcagccctttgcttcagggcttccttgcggtgct

SEQ ID NO: 317234 - DNA, 122 bp, Homo sapiens
gactcacctggggcggcgcggagctgcgggcaggagacgccaccaggcgggggctgggagcgtgggccaggattaaagtcgggaatcagattgttctggccatcaggaaagcgctgcgtatt

SEQ ID NO: 317235 - DNA, 122 bp, Homo sapiens
ctggccctcagggagtcccagggcgagcgccaggccaaaggggtccaggggtggctgattcgcgggccgcgaggggccgcggagaggtttccagccgccgcgctctcccagcgcccccacgc

SEQ ID NO: 317236 - DNA, 122 bp, Homo sapiens
ccatcacttggggttgcgcctgtgatctttatttaaactccaccagcctttgtctcgacccggcagccccggcgacgctctcccgcggtcttttctcctggggtcccttggccgctggctcc

SEQ ID NO: 317237 - DNA, 122 bp, Homo sapiens
ccctaagtatcgttcatgtttcctgacccttttctgcctcctcatctcttgaatcagctgcggatactcccagttctgtggcccctggaatggcttcaaaaatttcctcctccctgatcgta

SEQ ID NO: 317238 - DNA, 122 bp, Homo sapiens
cagcctctgccctttgctgatgtgtgacctcgggcaagttacttcactttcctgagcctccgtttatttctctatgaaattaatcctctcataagtttgctacgcaggtaaagcactcatca

SEQ ID NO: 317239 - DNA, 122 bp, Homo sapiens
ggaagacaagcgattcagatcgggaagtaccgtggatcagaaaacagaaaaggggggtcccgagcggaaaataaagccctgagagaaagacaacgaggagcttcggagcagccgctggagcc

SEQ ID NO: 317240 - DNA, 122 bp, Homo sapiens
catctgggccactgtcaggaccacctttgggagtgtcatccttacaaaccacagcatgcccggctcctcccagaaccagtcccagcctgggaggatcaaggcctggatcccgggccgttatc

SEQ ID NO: 317241 - DNA, 122 bp, Homo sapiens
gagtagtacattccctccaacggatataacacatatgctgaggacacactaaatgaaattcgatgagaaattcacttctctacattttcagtatcttttttgaaatgcaaatatccaggaaa

SEQ ID NO: 317242 - DNA, 122 bp, Homo sapiens
tggactggctgatagactggactggctgatggacaggactgtggatgatactcaggcttccggcttgagtggatcatgaacaaagagggaaatctatgtgcttggggtgggggtggggagct

SEQ ID NO: 317243 - DNA, 122 bp, Homo sapiens
ggggtcgttcaggttgaaagactggtcgaaattacgcgggcatgagtcagcgcatccctacgcgccctccgccccttgagggtgggtcgcttatagggaggggagtagagtagggcaggaga

SEQ ID NO: 317244 - DNA, 122 bp, Homo sapiens
gggtgctgagggcctcggatgccctccctggctggacgttgtggctgtgctgatactgagcggtaaccctaggaaggagagtcccctgggctcagctacccgggacaaggtcaacagggaca

SEQ ID NO: 317245 - DNA, 122 bp, Homo sapiens
aaaggtcaagtgaagctgctcctcacgttttggcgtgcctgcgctctctgcaggcagaagcgaacaaagacccagcaagagaaggcagaggctaagacccatcccgtatctgctctcctgaa

SEQ ID NO: 317246 - DNA, 122 bp, Homo sapiens
cacgaaaccattcactgagacctttgcgggtgggggaggagggatgtaaacaaaagccaacgctctctttagttcacaatggctcgcgaccccaagacttccaagctctttggtgagggcca

SEQ ID NO: 317247 - DNA, 122 bp, Homo sapiens
agcagcgaccttttcccatgggtgtcaggtcatcactcagcacagaaaacaagggaccagcgcctttctagggcatccctccttctccaaccttggggcccgcttttcctttagacgactgt

SEQ ID NO: 317248 - DNA, 122 bp, Homo sapiens
ggggcgctggtgacacccccccccaccttggagactgtggagcccctcccctgggtgactcgatccccgcccagccctgggggtgcccactctgctgtggtccccacctcaccctcagcgcc

SEQ ID NO: 317249 - DNA, 122 bp, Homo sapiens
gcaagccaagacaccagtaaggggccattgagatagtccaggcaaggcccaagagggtgccgctgagccagtgccagcaggaatgccgtggagggaacagattaccaggagggagggaaaga

SEQ ID NO: 317250 - DNA, 122 bp, Homo sapiens
agtagctggaattacaggcacgtgccaccaggttaggctagctagtggcctagctagtctcgaaatcctgacctaaagtgatccacccacctcagcctcccaaagtgtgtggattacttgtg

SEQ ID NO: 317251 - DNA, 122 bp, Homo sapiens
agcaagatggtgagggaattaaattctttgcacggatgcgctggttttcggaaacaatgccgccaccatccccgtttccaaatctgcccagaactgtaaatccaaatgaagattcaacagaa

SEQ ID NO: 317252 - DNA, 122 bp, Homo sapiens
tttacggccccctcacggaggcttttggcctgcgtgtttccgttccagctgagtgagattcgttgacttcgcaaaccccctcacctggaggattgacttccggatgctgttgagtcatcctg

SEQ ID NO: 317253 - DNA, 122 bp, Homo sapiens
gccccctcacctgcttgctatggaggtggccaggaatcggctgccgccccgcaccaccaacgtctgcccgcacaacgccagtcccacagagcccgccatgtacccgcccgcctcaccgccat

SEQ ID NO: 317254 - DNA, 122 bp, Homo sapiens
ctggctattgggggctggcatgagtgctgccccctggcctggttggcaggggttggcacccgggcaaggaactgtggtatgtgagtgggtttggggtgaggctatggggagggcggggtgcc

SEQ ID NO: 317255 - DNA, 122 bp, Homo sapiens
gggagccgcccgagtgtccctgcagagagtactctgggccctggcaggcactggcagccccggtcctgcccaggcccaatgccgagccaggcttcccgggactgaattattcatgttttgca

SEQ ID NO: 317256 - DNA, 122 bp, Homo sapiens
gggacaccccgacactctcgccctagatggcctcctacactggaaggaagatgccagtctcgcctcggatacctacatgctgagatggcctacttttaaaaggaattaaagtcctgttaaga

SEQ ID NO: 317257 - DNA, 122 bp, Homo sapiens
gtagcacagagcggggaggcctgactgccactgcccgcggctccgcagactcaacttctgcgttccacactcgcgcagggaagccgcccccgggtcctaaaccactcccgattgcgacggcc

SEQ ID NO: 317258 - DNA, 122 bp, Homo sapiens
cgccccagcccgcaaggactccgacaccccagactttccactacgtctgcaaatgtggaccgcgtgattgactccagtgggattgttgcctccagggtggcggagtctcctttcaggcagtg

SEQ ID NO: 317259 - DNA, 122 bp, Homo sapiens
aagtacagcacagaataaagagaccatccatctattcataagaaatatccaagaggctcacgttgtaaacagatatgcagaaatttccctgcactgtttgttacttgtttttcttttacatg

SEQ ID NO: 317260 - DNA, 122 bp, Homo sapiens
tgtaacacacgagggagaaatgttcagtgactttctgtaatctttgtcgttgaaacccttcgcttcaggagagattctttttgttgtttatttggaaggcactgataatgaacaaaaggttc

SEQ ID NO: 317261 - DNA, 122 bp, Homo sapiens
tgacctcatgatccacccgcctcagcctcccaaagaggtgggattacaggcgtgagccatcgcgcccagctataattcctaaacaactctaatagctaacttggaggccatttccctatagt

SEQ ID NO: 317262 - DNA, 122 bp, Homo sapiens
tcacctcccagacggggtgccagtggggcagagacactcctcaattcccagacggggtcgcggccgggtagaggcgctcttcacatctcagatggggcggcggggcagaggcgctccccaca

SEQ ID NO: 317263 - DNA, 122 bp, Homo sapiens
agggaagaatgacacactgaaggtcatcaggtggaggctggctggcatccgtggctgtttcgtgtagtaattacacgttgctcattgaagttgagttacaagcacaggctctccatgtatca

SEQ ID NO: 317264 - DNA, 122 bp, Homo sapiens
atcacactgtaggtgaaagataggcttgcccaggtaattttaataagttagcataagcatcgtcaaacacagtagtgatcagccaaagtccagatgcttcatgcagagcacagaatacgagt

SEQ ID NO: 317265 - DNA, 122 bp, Homo sapiens
ctggcgcgtgtagatttctttgcctgcagatgtttgaccactggttgggctgggaacaagcggggctcccaagccggacagacactttctgttggtcattttcaatcagtctttgtgatttc

SEQ ID NO: 317266 - DNA, 122 bp, Homo sapiens
caaaaaaaaacaacaaaaaaaaaacgtgaacgtcagcatcctctggggctcccaggacgccgtgacttcctggccgcggtgcttaccaggtatgggccttcggaaggttgtctgtgttcgcg

SEQ ID NO: 317267 - DNA, 122 bp, Homo sapiens
aatttagcagcagtgggaaggttgggggaaggactgtatgggacatatggttaaaagacacgagtggaaagaggctcacaaaagactaagtaaaagaatccccatataccctcaaaatggag

SEQ ID NO: 317268 - DNA, 122 bp, Homo sapiens
tactccaatatgactagcgtccttataagaagaggaaatgtggatgtggacacagccacacgctgagggaagacccatgtgaagacacagagagaaggcagccatctgcaagccaaggagag

SEQ ID NO: 317269 - DNA, 122 bp, Homo sapiens
ctcagccagggccacctctgcacctcagtctcattgggaagggaaactgagcttcacggccggaagtgacgcaactctgcttgcccgtcattggccagaacccatcacttggcctgcttgcc

SEQ ID NO: 317270 - DNA, 122 bp, Homo sapiens
ttcctggcctccctccaggagctgctgtgtgcgggtgaaatgcaaagacccctgtgaaagcgttgcccactgtgcggcgtgcggcacccagcgcggaaccgtcctaatgggacgctgagacc

SEQ ID NO: 317271 - DNA, 122 bp, Homo sapiens
gaactataatctgcaattctctatgacacagctttaaccttcttctctggccaggacagtcgcaatctttgttttaagtttcacatggccatggagaatgtgcccaagaagaaaaagaattt

SEQ ID NO: 317272 - DNA, 122 bp, Homo sapiens
cccctccccgccgggtcggcagctagctgggccgaccaggtgcacagaaggcgtggcttgcggtcagcccccaccgcaggagctcagcactttcagccaaaagtcccattttgctccttcca

SEQ ID NO: 317273 - DNA, 122 bp, Homo sapiens
atgccgagaaaaagatgtctgagagggcagtgggcaagaagaacagttgtggccgactagcgaggggatcacaggcagaaacatcaaccctttaagatgccatgagcattgctgcctgaagg

SEQ ID NO: 317274 - DNA, 122 bp, Homo sapiens
tccaaatgctcattactgcaggttattgtggcaaagcaaaattagcatgttacaacttagcgaaatgtcctgaagacattggcattccccagaataccaatacatggtggggtggggagaag

SEQ ID NO: 317275 - DNA, 122 bp, Homo sapiens
aacagaggaccaagctgacaggaggcctctctccattccctactgaattcgctcagaagacgggtgttcccaaacacacacagccctgagtattccacatagtattacattcagtaaatcgc

SEQ ID NO: 317276 - DNA, 122 bp, Homo sapiens
cagggccagaacagccaccacacctgcgctggccagggcctgcacgtagcccgacaccgccgatgccagggcgcccgtggcctcatccgccacttccaggaaacctgccagggagggagaaa

SEQ ID NO: 317277 - DNA, 122 bp, Homo sapiens
cttctctgggcctggccacccagccaaaaggcaggccaagagcaggagagacacagagtccggcattggtcccaggcagcagttagcccgccgcccgcctgtgtgtccccagagccatggag

SEQ ID NO: 317278 - DNA, 122 bp, Homo sapiens
ctcctttctagactgagctgcgaggtgcctcctgcgtaactgcaacaatgatggttataccggccccgtatccagatgagagaatggagtagattttccgtcaggtgctcagtgttgaaagt

SEQ ID NO: 317279 - DNA, 122 bp, Homo sapiens
gcacatggtgcgctccagccgcagtggcaacccacggccctgccggcgccaccagcagcgcggaccccagggccagactctgtgaagacgcccagtttaggcggcccccactcccgcatctg

SEQ ID NO: 317280 - DNA, 122 bp, Homo sapiens
agacgcctggcctggccagtctcgacatggactcggggagggcgcccgaggccaggccaccgtgaggccaggggagcccagagtgatgagagagaggcacctcagcccaagacaggtgagag

SEQ ID NO: 317281 - DNA, 122 bp, Homo sapiens
gcgagagtgagggagtgagtgcgaggggatctagaggagtcagggcgagaaagcgagggccggaggacccacgatagagacagagtgaccatggctgtctccgcatctccagtgatctctgc

SEQ ID NO: 317282 - DNA, 122 bp, Homo sapiens
agaagagggagtactgtccaaaggattagcagacacgcactatgatcactagaaagcaatcgtggtctgtatgtaaggcaatccccaaaataatttgaaaattgctgccacagcctcccaca

SEQ ID NO: 317283 - DNA, 122 bp, Homo sapiens
tccgctcgctggaggacaaagttttctccaggagcatttgcatttcttccggcatctaaacggagccccacgggtgcttagcattcctcgggcccggcgctgaaatgagcacttgtttaact

SEQ ID NO: 317284 - DNA, 122 bp, Homo sapiens
tgaatggctcccagttctcctggaagtcggtcaggacggaaggcatgtcctgctccacggcggggtgtaacggctagggccacgtcagcagcagcttcctcacacaccgcaggcagttcctg

SEQ ID NO: 317285 - DNA, 122 bp, Homo sapiens
aacactggagtgcagtggcaagatctcaactcgctgcaaccttggcctcccaggttcaagcgattctcagccaaccaagtagctgggattacagatgcaccatgcccagctaatttttgtat

SEQ ID NO: 317286 - DNA, 122 bp, Homo sapiens
acatggccgctaatcttccacagggctgggcaagtggagatagtgtgatctgaggcaatccgcctgaaaactggttctttcctctaaatctcgcagaggttccagaggacagggtggggcag

SEQ ID NO: 317287 - DNA, 122 bp, Homo sapiens
ccggcgccatgtagcgccccgccgattggaggctgccccgccgcgggaaatgaagggacgcggctgctgggacacggcctccgtgcgctccttctgcagctccggctgcctgaataaattta

SEQ ID NO: 317288 - DNA, 122 bp, Homo sapiens
gaatctgcgcatgctcggccggaatctgcgcgagctcggcgggaatctgcgcaagctcggcgggaatctgcgcatgctcagagttccggggcacggtttccccgcccctttcaggcctagca

SEQ ID NO: 317289 - DNA, 122 bp, Homo sapiens
atttcagcgctcctcttgtggctttttcttgaggagcccaagggtcagggtcccaccccgcgatatgaggccagtggcactgccccctagcaggcgcgagatgccagagccctaggatgtct

SEQ ID NO: 317290 - DNA, 122 bp, Homo sapiens
gccggccggctaaccccgggctggcggccttgcagcgtgcgtggcaacagcagctgggcccgcaagactcagcacgggacgtcctcgtccaagtctgggccaagagcagcggcccagggggc

SEQ ID NO: 317291 - DNA, 122 bp, Homo sapiens
ggcccaaatgatctgcccacctcagcctcctaaagtgctaggattacaggtgtgagccaccgtgcccacccaactgcccggttttatagaggagaaaactgaggtccagaaacccaatgtgc

SEQ ID NO: 317292 - DNA, 122 bp, Homo sapiens
catcgggtcgccccgcccccgggtgcctttggtgttttccgccgtcggccgcaggcgcctcgtctcagataaagtggatccagccctgcggctccggagctccgccactgcccgggtgctcg

SEQ ID NO: 317293 - DNA, 122 bp, Homo sapiens
ccaggtagggcctcctgctggggccttctggggctgcgcaggcctcggggagagccccaccgggggtctgtggcctgtgtccacggctgccctgctgaggacccccactggcctctgggtgc

SEQ ID NO: 317294 - DNA, 122 bp, Homo sapiens
tgcacacactcttgcctctctcaggcatttgttgtgcagttcctctttgtctgctgggcacgaggggcaacagcatctgcctttccctccctgtgcacacacccaccacccacccccttcac

SEQ ID NO: 317295 - DNA, 122 bp, Homo sapiens
cccttgacgtccagaagttccccccagcgccggtcataagcactcccgccgcctgggccccgccctgcctgccaggcgccctccagcctcagctcccggacgcccggcgtggccgctttctc

SEQ ID NO: 317296 - DNA, 122 bp, Homo sapiens
ccccgagggccggctgctgcggggtcgcgggaaggcgaaggcagttccggacgcggagggcgaggggcggctgcccgcggcccgggatggcgctgccgccgcggccggagctcgcttgccgg

SEQ ID NO: 317297 - DNA, 122 bp, Homo sapiens
cttccttcttgttgctttttccctgttccttcggcagcagcagccgagagacacgggattcgagaacgctccgacgtcatcttcggaacgttccgacattgagtgttctgaaagggggaggg

SEQ ID NO: 317298 - DNA, 122 bp, Homo sapiens
ccaaggtccccaacttgtcgccaagaccccgcctgggctcccagcaccgcccctcgcgctcggggtctcccgccccacgccaagtcagcaaatgcaccccaggttctgcctctcgcgctgcc

SEQ ID NO: 317299 - DNA, 122 bp, Homo sapiens
ccacaggattcggaccccacggaggccaacctggagagcgcggaccccgagctgtgcatccggctgctccagatgccctctgtggtcaactactccggcctgcgcaagcgcctggagggcag

SEQ ID NO: 317300 - DNA, 122 bp, Homo sapiens
atgcccgaattgtctgacagcatctacttacctggttgtacagtcgggcaccatcatctccgtccttgtgaggcctggagcctaggcagtggtctctgcctccagtgatggtcctgtccttc

SEQ ID NO: 317301 - DNA, 122 bp, Homo sapiens
cttcagctggtgcatttggaagcgaaaaggacggtgtgagtttccgagatcaatgttgtccgccagtgctaggccatttccctgggacttgtggaggcttctctgccctcacacaatcccgt

SEQ ID NO: 317302 - DNA, 122 bp, Homo sapiens
ggggtgggagtagcctgagcgactgagagtcgggagtgggagcgaggctattcatactcccgccaggcgggcgggaagaggggcgggacccaggccttaaccccttagaggtcagagagtgg

SEQ ID NO: 317303 - DNA, 122 bp, Homo sapiens
gaatgaacactagggttggagcgagaaagccaaggttttggtcacagctgtgtttcctaccgccatgtgacccttggccacttgagccagtcacaacctctcggagccgcatctctaaaagt

SEQ ID NO: 317304 - DNA, 122 bp, Homo sapiens
aaatattttctttcttctcttatgcagatcagtggtgaagcacaagagctcttctctgttcgacatggcccaattcgagcggctagaatcttgcctgctccacagtttggtgagtgtagtcc

SEQ ID NO: 317305 - DNA, 122 bp, Homo sapiens
tcaagttgtcctacctttctggaccaaaccaatgtatacgtcacatgtattgattaacatcgtaagtctctctaaaacatgtaaaaccaagctgtaacccaaccactttgccacatgttccc

SEQ ID NO: 317306 - DNA, 122 bp, Homo sapiens
ggtcactcttctagagcttccgcaacggaaagtgtgaggtcagtagtagtttttgtggtacgtgcagtggtggccgcttcaaggactattttcgtcgctgcttgcgttttaagtctccaatc

SEQ ID NO: 317307 - DNA, 122 bp, Homo sapiens
acggcacgccgcttcacaggcccacacgtcacacacggcacgtgccagtctcataagcagcggatccacaaagcgctttcatcagcagtccagtttcacactggagagaagaaacgggagag

SEQ ID NO: 317308 - DNA, 122 bp, Homo sapiens
gaggactaaacatctctctccctccatctctgcttggttactctggtttgtttcgaacaccggctgcttcttcccacttcttgactccctgcacccctacccgcccccccagcaatcacatt

SEQ ID NO: 317309 - DNA, 122 bp, Homo sapiens
gtccaggctgcatttgcatccgggggtgccttctctgggagctgattccggccaataaaacgcaagttgcctgaacttcaaaacacaagggaacttgtttctttgaaaagtagcggtcaaaa

SEQ ID NO: 317310 - DNA, 122 bp, Homo sapiens
cacacctgctcgcagcccagtgctgcccagggtctgtgaccccgggggcctgacacagtccgcagacagctggggcctcagagccccgggtacctcatcgccggcacggcttcgggaaacag

SEQ ID NO: 317311 - DNA, 122 bp, Homo sapiens
cagacaaaccagccgaggtttacaccccgagagggaatgccggcctctgcatagcgtcagcgggagccgtgctatcagcaaggagtcatcgcctatgccaggccttctggctcgaggcgttt

SEQ ID NO: 317312 - DNA, 122 bp, Homo sapiens
ttctgagttgtcatgcaaaggctgtgggcctaaggcctggttccaccatgtctggctgtgcgactcggccacgtggatttggcgttctgggcctcagattccttttctgtaagctgagggtg

SEQ ID NO: 317313 - DNA, 122 bp, Homo sapiens
acagaacaagaggggagatgatatctcttgccatagtgggcatcaatccagtttttctgccgagctgcttcccagtctgttgtcagccatcctgccacaccctcatggtgcatccctgcacc

SEQ ID NO: 317314 - DNA, 122 bp, Homo sapiens
gccttgaattgtgacaattcaaggccacatcatcctcacttttttgcctgagttccactccgtccatgattccacagacctgccaacttttgggtgcagtttatgcttagcggcttttgtta

SEQ ID NO: 317315 - DNA, 122 bp, Homo sapiens
atacccaaaggaatataaatcattctattacaaagatacacgcacacgtatattcattgccgcactattcacaatagcaaagacgtggcatcaacccaaatgcccatcagtgataacattaa

SEQ ID NO: 317316 - DNA, 122 bp, Homo sapiens
tcctcctccttccaggaacttgtcctctaacttggggcggcagcgaggcctctaatctttcggatctcgtttaccggcattggcctctcacttcctgttgctaggcctggaccgaggcacgg

SEQ ID NO: 317317 - DNA, 122 bp, Homo sapiens
ccataggggagctcctaggagaggctgcacccattgcacgtaagaagcggtaaaaatgtacgcggccatcttaccaggctgccggagacaaagaaagctcagctttgatgtctgggcgccac

SEQ ID NO: 317318 - DNA, 122 bp, Homo sapiens
accacgccccgggagtgcgcggagcggtcgcagttctgttagccagggttgcgttcccaccgcgaaggcccgggcgcgcgctgctgtggatcgagtctggggctccggccaccaggtggcgc

SEQ ID NO: 317319 - DNA, 122 bp, Homo sapiens
cagggcccagacccaagaggagagggtggtccgcagacaccccgggatgtcagcatcccccgacctgccttctggcggcacctcccgggtgctgtgttgagtcagcaggcatggggtgagag

SEQ ID NO: 317320 - DNA, 122 bp, Homo sapiens
ctgcgagggaaactttggctttaaaacgaggggtgattacctgctctaaggtcgacaccacgcttgcttgatagttgaccgtgccttagttttcccgtcagtcaagtgggaagagcagccca

SEQ ID NO: 317321 - DNA, 122 bp, Homo sapiens
caacaacagcaacagaaatgaagggacagaaggaaaccgtgggagaagacgagtgtctaccgcctcgatgtgctgatggcgtcccggtgtctgcacaaatccacacttgctgaactgtaagg

SEQ ID NO: 317322 - DNA, 122 bp, Homo sapiens
cgttgtttgattaagagattctaattacagaccaaatggtattaattgaggtgacagtcccggccaggactaattttttaaaaagatctgctaccagtaattccacccctgagtatatccta

SEQ ID NO: 317323 - DNA, 122 bp, Homo sapiens
ttgttcttactcctatttataaaggcaaagtccttctgattggtccgaatcttccagtttcgcgccctgaattatgtagtgtgataggacttgtgatcagctactaggtctcattttagaaa

SEQ ID NO: 317324 - DNA, 122 bp, Homo sapiens
aagacacaaaacccatcacgtgtaagtggaggtgcaagagctgtcattttcctttcaaaccgagggcggttttgtcacttccccagtcgatgctgctggtggcagcgtggggtgctggttga

SEQ ID NO: 317325 - DNA, 122 bp, Homo sapiens
acagataaatgcccagatcttaggcgtgctgcttgatgagttttaacaaaccctgtccgccgggcgcagtggcttacgcctgtaatcccagcactttgggaggccgtgggcaggtggatgac

SEQ ID NO: 317326 - DNA, 122 bp, Homo sapiens
tcagagagggaggaccccatgttacctccgcgtggtgccacatatgtttagcaaacaagccgaggaaatggtaacattccaagcctaggtcacactggccacagaataagcgacaggatgag

SEQ ID NO: 317327 - DNA, 122 bp, Homo sapiens
atgtccacctcctgatggtgtccagggaaaaccccgtgtccacctcctgacggcgcgggacgactgggacagaggctgctcctgccccagtggcacccagacctgctgtggcccgggcctgc

SEQ ID NO: 317328 - DNA, 122 bp, Homo sapiens
catcttctcctgcccttgaactgggactgacaccatcagtgctcctggttctcagaccttcggacagcagacttggggccttctcggcctccattattgtgtaagccaattccttataataa

SEQ ID NO: 317329 - DNA, 122 bp, Homo sapiens
gaatgtcattccccaggctaccggtctttagcgctaagttgcatgggctggtgtgccagtcggtcagcgaatagcggcagaacgcctggccgggccggcgttttccgggacactcgtttcgg

SEQ ID NO: 317330 - DNA, 122 bp, Homo sapiens
aaaccaccagagaaattatacaaaagttcctttcacagcctcttcgcaaaatggacttgacgctattaggtgatatgtttaccgagactcttaactgggaaggggttttactagattttgta

SEQ ID NO: 317331 - DNA, 122 bp, Homo sapiens
tccctagagggtcactaggcctgtgtgttgggggaggctacttggtagcaggggagggggcgatgctagtgtcatgctttggtacaagaagcagtgaggttggtctttcggcacaggccctg

SEQ ID NO: 317332 - DNA, 122 bp, Homo sapiens
gtttggacacctggactccagagcgtcacagctgcgcaatgaatgggagtcagtgttacccgcttactatctttgttcatttattcacccacccatctactcacccacaaatgcattctttc

SEQ ID NO: 317333 - DNA, 122 bp, Homo sapiens
cggcgtgcagctcggcggatgctgccaggtcaggcgactccgccgcccctggagcgcgagcgcgcttcagcttgtagcgatgattctggaaccagatcttgacctgcgtgggcgtgaggcga

SEQ ID NO: 317334 - DNA, 122 bp, Homo sapiens
tactcagccctgaaaattctggttgccttggcttcccccaacttataactcagtctctgccgcagcaagaccccgccttatctgggtaccccctctcaggctctggcctggagctcctctcc

SEQ ID NO: 317335 - DNA, 122 bp, Homo sapiens
ttgaaaactgagggattaaaaagggtctgcagagttagtgacagagcattagctgttcctcgtagtaacagagttacagaaaatatttagcaacagaaggtttgtggctgaatctataacag

SEQ ID NO: 317336 - DNA, 122 bp, Homo sapiens
tgtactcaacgaatattaaagcaggatgccgctttgtgtcaagtactagattacgatgaacggtgtcacgaagaacactccactcttgataccgtatatgtgaccttgagcaagaaatgtgt

SEQ ID NO: 317337 - DNA, 122 bp, Homo sapiens
gtcccggcctgcgtggtgtgggcttgtgggtctttgagacccgaaaattgagagcgttttcgcactccagcggctgctcctggcggctctgcggccgtcaccatggtaaggaggatgcctcg

SEQ ID NO: 317338 - DNA, 122 bp, Homo sapiens
tctggacccagtttataaagactgcctggctggccaggaaatcccccagaggcctccttccgtgtccccgggccaaatctgtgaagagaaaacggaaggctaccatgtcacgaaaaactatg

SEQ ID NO: 317339 - DNA, 122 bp, Homo sapiens
cagccccgggcaatgggctgtctggaggggcccagtggggagctctggacacagaagggacggcggcagccgaagaggaggaggaggagggggctgcggtggcggcagaagcggaggacctg

SEQ ID NO: 317340 - DNA, 122 bp, Homo sapiens
ccagcaccccactcttgcacctgcaccagctctcctggcggggagcaggtcccgaggggccgagtgcacctggaggcccagcaccccagtcctctgcctgcaccagctctcctgggggggag

SEQ ID NO: 317341 - DNA, 122 bp, Homo sapiens
aagcccagcccagaaaaccggcgtctggggatttcagcctccgctccccggtccccagcccggtggctctgtgagaagaagctcaactcggtgcacttgttcactctttcttcatgagagga

SEQ ID NO: 317342 - DNA, 122 bp, Homo sapiens
ggcagttttaaggctcctgatggttgtgagggtctgttccctgccgaggggcccgtgttgcgtatttacccgggcttgtgtttttgtcactctggaagcctcgtttcactgtgttttctggc

SEQ ID NO: 317343 - DNA, 122 bp, Homo sapiens
ggctgccctggagatgcttcaacgcaggcgagacaccaggtcctgggacaagcatactcacggcggctccggggcggcggcgttacttggggccggggctcggacgggatccgcttctctcc

SEQ ID NO: 317344 - DNA, 122 bp, Homo sapiens
aagagctgcaaaaggctgtcaggtaaggtctggatttctctctgacagctctggccgtgacgcagtggccacgataccgggttgctgctcaacggggttcggaagtgtgacgcattctttgc

SEQ ID NO: 317345 - DNA, 122 bp, Homo sapiens
atgctctctgggatcgccatttgaggtgggcgtggctattaggacgctcagagagcccagcgcggtgaggaaagcgacgaacttaggagccctggtctgggtccagccaccccttactacct

SEQ ID NO: 317346 - DNA, 122 bp, Homo sapiens
ttactcaaaagacccacgtatacccttgacaggcatctcattggtgagaggtacatcatgcggccacttctagttatctgcacaaattgaagttccatattactgaagtcaaacaggcaagg

SEQ ID NO: 317347 - DNA, 122 bp, Homo sapiens
agtgccatgcattatctgaagagattttcccccaaaacagatgtattatgtctgtccttgcgggggttctggtccctgtgtcagtcttaactctcatgaatatagaggtagtgttaagaggc

SEQ ID NO: 317348 - DNA, 122 bp, Homo sapiens
tacctgccaagttgcgctgtgcagtgccatgtgggccatgcccgccgggaagccctggcccgcttcgctcgtgcctttagcacccccaagggccagaccttgcctctgggcttcatggtcaa

SEQ ID NO: 317349 - DNA, 122 bp, Homo sapiens
ctaagctgaaaccgcaaaccgcagccatggcagaggaacctcagcttaaatagtgtggagcggccactggtttccgcggctcgtagtcgcgcccgcgaggaaacgccagggaggcttcctgc

SEQ ID NO: 317350 - DNA, 122 bp, Homo sapiens
acgctacgcgaaaccacagcgccagattcccacactggaaaatccctgagcaaagactcacgtgactcctcctcagccgctttcccaaaacaaaacacatcaatcaaacgaacccgatgaaa

SEQ ID NO: 317351 - DNA, 122 bp, Homo sapiens
caaagcagtcagtcattcacacttcagtatgaatgagtctccgggtactttgctcagtaacggactggaccagcgcggcctccacgccagggactggggcaagggtggagtttggagtaaag

SEQ ID NO: 317352 - DNA, 122 bp, Homo sapiens
tctcgatcaaggccaccgagaacccagagcagaaaaccagggctcccaggcagaggcaaacggtgggtctcatgaccatagagtagcgcagggggtggcagatggccacatagcggtcataa

SEQ ID NO: 317353 - DNA, 122 bp, Homo sapiens
ctgacgtctcccgcgagcgactgctctgcccccacttgggaagtccagggaggcgcaaggcggccacctccgccgctccccccagcagcaggagcagccgcagctccgccgcacgccgaagt

SEQ ID NO: 317354 - DNA, 122 bp, Homo sapiens
gcgagggcccagtgagaaagctacacatgttttattgtggaagagaacaaaatcagtaaacggcaccacgagacatcaaaccaatcctgcagacaacactgcctatgatttctgctcttaac

SEQ ID NO: 317355 - DNA, 122 bp, Homo sapiens
tcggaggcgcgctgagccgggtggtggagtcccgcccggctggctgtggggccgcgggggcgtcccgtgggcgggctgggcgtggcgcctccgcgggtggcttccccgggccgcggcggagg

SEQ ID NO: 317356 - DNA, 122 bp, Homo sapiens
cgtttgccaccatggggatgtaccaagtgagaccgagtagggggaacgagtggtgattgacgcgccaggttactggccactgctcacctaggcgctagcaaacttctgccaagatcggaact

SEQ ID NO: 317357 - DNA, 122 bp, Homo sapiens
cacacaccacatttcctccgctctgtctgctgcagagcctgctccagggtgaacacaggccgtcctgaatcagccgctgacgcctcccccggcatctccacgtgcagcccctgccctgcgcg

SEQ ID NO: 317358 - DNA, 122 bp, Homo sapiens
ccattttctcagagggcagcatagtattaatggaaatgacccgttgcattttacttcttgcgtgctgttaccaccactgccttttactctcctttgaaataattaaaagcactgggaaggga

SEQ ID NO: 317359 - DNA, 122 bp, Homo sapiens
agatttttcacatgcaaacagagtaggtagaaaaaaaaggaggcatacagagtaatcagtcggaaacaaacaatttttaggctataggtggatggaaagatatttaattcactaactcacca

SEQ ID NO: 317360 - DNA, 122 bp, Homo sapiens
cagtagttagacctggacaatggtggtgcttttattatttcaagccttttttttccccaccggtcttgctggaatcacactcactttctcccaagttgaaggaccacagtcggatgtgcagg

SEQ ID NO: 317361 - DNA, 122 bp, Homo sapiens
cgggagattccttgatgttccttgctgttcatgctccatgtttctgttcagtggagcatccgattaccgatgtggaccaggctctgttcggctccctcctcacactttattgctcatgattt

SEQ ID NO: 317362 - DNA, 122 bp, Homo sapiens
gagctaaaggtttctggcaagcagggaaaggacacgactcattgactgagaagcaggaggcgtccaacacaaaggcctcttgggaacccgctggggtttggcgggcgtcacctttctgcatc

SEQ ID NO: 317363 - DNA, 122 bp, Homo sapiens
gctttttgcccttcgccgctgccgcggcttttttcccgaccaggctttttgccccaccgccgacacagctttttgcaccctcgccgccatggctttttgccgccgcggctttttgcccgccg

SEQ ID NO: 317364 - DNA, 122 bp, Homo sapiens
cggaggcggccggttccttctcctcccgggaggcaggaccccccgacgccgaccgccggacgccccccgccccaaagcttattggaaaattcacttttgtaaagcaaatgtatttccagagc

SEQ ID NO: 317365 - DNA, 122 bp, Homo sapiens
agtggcggaaagagccgcctgtaggacagacgagacacatgggcacctggggtgtcccggcgggaggcgacaccgttccctccctctcacctgctggctggagcggctactccttccacggc

SEQ ID NO: 317366 - DNA, 122 bp, Homo sapiens
caacaactgcaaccatcaacctgacactgctgggcggggacgtttaacaatacgtgtacccgcctggcacctgcctacaacacccgacagccagaggaccctacaaacctagcaggaagaca

SEQ ID NO: 317367 - DNA, 122 bp, Homo sapiens
atatgcgtctgtcttcagagaagctcaaagtgctttgtatattattgcatatttttccctcgtaacatccttgagattcctaggggtgcttattatcataccattttacagctgggaaaaga

SEQ ID NO: 317368 - DNA, 122 bp, Homo sapiens
ttggctatggcaattgaaatgttaattgcaagtacctagatcagtgctctgtctaaaaagcgggttgtcagtcagtgccaccaactccagaacgatccttctggactagtatgaataatgaa

SEQ ID NO: 317369 - DNA, 122 bp, Homo sapiens
ctatatcctagtgtgcggcgggacacttgagagttttgaaagaaccctcaaacaagttcacgttccgtaaactacttttccctctgttccagagcccccagggcgcccaggcaaggccgcca

SEQ ID NO: 317370 - DNA, 122 bp, Homo sapiens
ccaaggaaaagcacccaaccctggggtgagacagagctcccaaggtcagctgggtgccctcgtggctgacacaagagttccccgagtcccaccacaggctcagagaatccaaggaacagcac

SEQ ID NO: 317371 - DNA, 122 bp, Homo sapiens
atcagcccccctccggagcacaggtgggccaggcaagccgcaggtcctggccgcagtggtcgcgccgcgggagtgggtcgtaggtgcaacaggcggcccggagcgcggtgtccctgttggga

SEQ ID NO: 317372 - DNA, 122 bp, Homo sapiens
agaaaggaaatgggataagtgtcatgtcatactaaatatttattttctgcagactgacttcggagtaattcttgagccaggaggggagaggttagtgttcaaattgctgagatcttaggtca

SEQ ID NO: 317373 - DNA, 122 bp, Homo sapiens
cactctcgccacattccgtggagtatgtggttgcaacttctgtcactcaaggtctgatggcggggagattggagccgtatccaatcagcgcactggagtgaaaactgcccaatcaggcacgc

SEQ ID NO: 317374 - DNA, 122 bp, Homo sapiens
attttcttgttgatggatacatgaagtgtttctagtttttggctattccgaataaggctgcgatgaatattcttgtccaagtctttggtgaagtttgtttttgtttcccttggataagcacc

SEQ ID NO: 317375 - DNA, 122 bp, Homo sapiens
tctgggaaaggagatgatcgaactgattggcaagcaggaagccccagccagaagtctggccgagcagcaggtgcaactgggttttctgtttctaattatagacagtgtgtgtgagatagcat

SEQ ID NO: 317376 - DNA, 122 bp, Homo sapiens
aggcccgaaccgaccaccgccaaccttccctgacacgcctttgccccacccgaccccgcccgcccccacgtgacgcccacgccccgcccactggcgcccacgtgacccacggtcgtccccgc

SEQ ID NO: 317377 - DNA, 122 bp, Homo sapiens
tgtgctgggccccgggatgagagctggactttaaaaacaatactgtgagtggatgagccgcggcctgtgccctcaggagcccctggtctcggggaggcatggatctgtgttgctcatgagga

SEQ ID NO: 317378 - DNA, 122 bp, Homo sapiens
ctctggtggactcggaaatacagcgctgaggtgggtgggctttagtcggagccacctccccgacattcctgccccaggcttctctcccaggctttccttcctggccctgccattctgcattc

SEQ ID NO: 317379 - DNA, 122 bp, Homo sapiens
gtgacacatacccaggaaaggaaggaggaagggagggtgatgtaagacaaagacattaggcggcgagaaagccagcctttggtcagaagcagcttctggcgcccctggctggactctgtgcg

SEQ ID NO: 317380 - DNA, 122 bp, Homo sapiens
ctgtgtgcaggctttggggggcggcttggcctgagggggccatgaggcgccctgggctggcggccgacttgtctgccaggagctgctgcctttgggcgtggtggccgttttgggaatgaagc

SEQ ID NO: 317381 - DNA, 122 bp, Homo sapiens
ggaaccaaagcagtaaacatgtcaagtaaccattgtagtgcccagtggctagaacacacccgacccatagtagacactcaatgtttcattaaagaaagaataaatgcatgggcttctctatt

SEQ ID NO: 317382 - DNA, 122 bp, Homo sapiens
gcatcacaggtgggctacaaggcaggggctggtcagttggcactgtgatcactcctggagcggctgacccacagtgggtctgcacgtgtggactagaaatctgtttttgtttttttatttcc

SEQ ID NO: 317383 - DNA, 122 bp, Homo sapiens
tgcccgcagccatgatgatccgattggggatggggattactggggcatcttctcactctgcgacggcgcccgcggtgggcagggggtggtgcccagggggagcaaaaaagtaaattgcaggg

SEQ ID NO: 317384 - DNA, 122 bp, Homo sapiens
gttccataaaagagggacaccacaatcatgtgggacccacatgtcccaaatgctttttgccgtccttctgctgacctgatttttaatactgcttgagctatgaagccataggagatgaggat

SEQ ID NO: 317385 - DNA, 122 bp, Homo sapiens
ctccgcggcggcagcggcgggggctgcggtgttaccggtgaagaagccgaaaatggagcacgtccaggctgaccacgagcttttcctccaggcctttgagagtgagtgtgtgcgaggctttg

SEQ ID NO: 317386 - DNA, 122 bp, Homo sapiens
accaggatgccccgcctacgcgcccgtttcagcccggaactgaccaggatgccccgcctacgcggcccgtttcagcccggaactgaccaggatgccccgcctacgtggcccgtttcagccct

SEQ ID NO: 317387 - DNA, 122 bp, Homo sapiens
gggggtagagatcaaaggcggctccttccgacttctccaagagggccaggcactggagtacgtgtgtccttctggcttctacccgtaccctgtgcagacacgtacctgcagatctacggggt

SEQ ID NO: 317388 - DNA, 122 bp, Homo sapiens
tggtggccgtgcaggacaatgccccgatggtcgtaaagcacatgaaaatcatcagggtgacgggacatgaggctggcagccggctctcaggtgaatgagggagaccactttttggactaaac

SEQ ID NO: 317389 - DNA, 122 bp, Homo sapiens
tcctttggttaataaaactgtctagatttcaaacttagaagccaagtcattttctatgttcggatatcatctgtcactattggaacaggagtgaacaaataccagaaaataatttgacagct

SEQ ID NO: 317390 - DNA, 122 bp, Homo sapiens
acaggtcacgcctgggaagcgggtggggtgtcccggagcggtgctgaggcgctgcaggcccggcttctggctgcgggggagctgtaccctgaagcctcgccggaactcgcgtctggggccag

SEQ ID NO: 317391 - DNA, 122 bp, Homo sapiens
gacatccgccccgcgcgcggcgtgctatagaccgcgcccacgcacgcacgctcgcgtgcccgcccctgccccacctcgagccgcggccttcggctcctgcagccgctgtcttttctcccctc

SEQ ID NO: 317392 - DNA, 122 bp, Homo sapiens
aatgttaggcagatggccagaaacaagcaagcaggggagccctgggaaaagtcctggaggcgctgcctgctgaccgtctgcaagaaggcaatgactacacagtaggcttttgttcattataa

SEQ ID NO: 317393 - DNA, 122 bp, Homo sapiens
gtctctttggtgactatgaagctttagtcagtcttggtttagccattgtaaaggggtcagcgattgtgatggggtttcatgcccagaagttgatgccacagcaactctagtcccctcttggc

SEQ ID NO: 317394 - DNA, 122 bp, Homo sapiens
tatcggaacccctccttgaagctgatggtgaatgtgtgcggacacactctgtgagttgggcggcagtggattccctgggggagagacgcgctgggtgggaggagaggaccgggagatgctag

SEQ ID NO: 317395 - DNA, 122 bp, Homo sapiens
tagctgccttcccgcggggcaggcctcgggactgcagcccgccatgcctgagccttcccccgcctccatggattcctgtgcagcccgagcctcccagatgagcgccaccccgtgctccacag

SEQ ID NO: 317396 - DNA, 122 bp, Homo sapiens
ttgagagtcaagggcctttataatcaatccagcctcaaattgccctttagttttaaatctcgttactgatctataaaatttataagacattgtgctaggtgatgagaggactacgtgagctg

SEQ ID NO: 317397 - DNA, 122 bp, Homo sapiens
gatgaacaactcccatcaaacttagagtatcttgagaggaaagacactagaacaattttgcgataaggcaaagatcaggaagtggaaggcatgataagaatgcagagaaggcacctggccag

SEQ ID NO: 317398 - DNA, 122 bp, Homo sapiens
gaaagatacattgtgcaggaaatttctcttgcttctccctacacataaatcactgtctctcgcgggcgctctgcagggatggagattgagagaggccagggacccggctcccttgggaaaac

SEQ ID NO: 317399 - DNA, 122 bp, Homo sapiens
gggggagggcggcgcgtgcagccccacatccgcccgagtcccacgcgggcttccccggcacggggaggaggaagtgctgtcagtgaccacagtgatcccgggaataacccggagcccgggcc

SEQ ID NO: 317400 - DNA, 122 bp, Homo sapiens
cctcgaggtggtgtccttggcccccagcactgactccggagctctgtgtttgcagactgccggctgcacatctgcctgtactaccgggaaatcctcgtgaaggagctgaccacgtccagccc

SEQ ID NO: 317401 - DNA, 122 bp, Homo sapiens
gcccgccttgtcgaggaatctgcaactgcagtttctgccggcagcgagatggacggtgtgcgactggggtccttgtgtatttagccaaatatcatggctttgggaatgtgcatgcctacttg

SEQ ID NO: 317402 - DNA, 122 bp, Homo sapiens
ccgccacgccccttcggcgcatgcgcagaacgaggcctccaagccccgcccttcctgggccgcttgacctgcccccaaccgaagcatcttggttcgcgagtgctgcgcttgcgcagagcgag

SEQ ID NO: 317403 - DNA, 122 bp, Homo sapiens
agtcgtttccctggagagcgctaaggacagcatgggccgccacttttggagtcaggacagcggggaaagacatcgcaatcccccgacccagtaacctctctgttgctttactgaaggaaaaa

SEQ ID NO: 317404 - DNA, 122 bp, Homo sapiens
gagacaggcgcagagcgggggcgggccagttgccttgcaagcttcgcagacccagcggcccgcaggcccctaggtgtagaactgctaggggtatagcgattcagccactgcccttaacaact

SEQ ID NO: 317405 - DNA, 122 bp, Homo sapiens
ctgccctggggtgccactcgcccggctcgtcctacagggctggctcggcgagcgcagatacgaccccgcagctgttcagaggggcagaaatgccctaggtgcccatccatgcctcgattcat

SEQ ID NO: 317406 - DNA, 122 bp, Homo sapiens
aagttcatgtatctgttgacgaggcaacacacttctgtagacgatttttaggtaacagagcgaggaatgtgtgtattaccttggtgtatgacatgctcatgaggcagtgtcagaccttaaaa

SEQ ID NO: 317407 - DNA, 122 bp, Homo sapiens
cagttgttgcagctgacagcaaggtggggtagactgtaacacaatgaaatgcaaagtgcccgcatggaggtagaaggtgttgtgcaaagaaaggggagcccacctcctcctgggctatggag

SEQ ID NO: 317408 - DNA, 122 bp, Homo sapiens
ggagggtctggcacgccccaccaatagtaaatccccctgcctatattataatggatcatgcgatatcaggatggggaatgtatgacatggtttaaaaagaactcattataaaaaaaaaaaaa

SEQ ID NO: 317409 - DNA, 122 bp, Homo sapiens
ctgagcgagtcggagccccaagagctagggtcgagggggtggggcagcaggcgcctctgccgaggctgcaggtaggcacttccccacccccgcggccccctccttcctccttcctcgcagct

SEQ ID NO: 317410 - DNA, 122 bp, Homo sapiens
tcatatcttcaggcagcacagtgtattcatgcagtttcttcctgtagtccaggtcactggcgagagtttgggccttcttagcatgcctgatgtttaccatatccatgggcaggtgaaaccgg

SEQ ID NO: 317411 - DNA, 122 bp, Homo sapiens
cgggaacccggaggttggcaggtggggggcgggaacaaaacaaagttgttaccctagcaacggagagacgccacgctctgcacagtctattttcggagcctagccagagacgggaaaactga

SEQ ID NO: 317412 - DNA, 122 bp, Homo sapiens
gtcgcgctttcgggggcgggagacacgcgagcaacaggccccttgcagagggcgaaggagcgtggaacccggaatcacggttcactcggcccgagtgtgactcccgtgtggacgggcctgtc

SEQ ID NO: 317413 - DNA, 122 bp, Homo sapiens
tatttttaaacgagagaaaaataaacatttaaaagtccttaagaggctgaggatggagggcgccttggacgggggcccccacgtggttacagaggcgcattgcctttcagattcctgggctg

SEQ ID NO: 317414 - DNA, 122 bp, Homo sapiens
gccactggctgacagctttgctcagcgactgtcctccccaccctcagcttgctatggcatcgttcaggtgccaacgggaccctggttctgccggaaatgtgaatctcaggagcgagcagcca

SEQ ID NO: 317415 - DNA, 122 bp, Homo sapiens
atgtgggccgaagaactccaaacaaatcttctataaatctgtctccccacttcaaccttccgacttattgccaagacttttctattctaccttcctattcatccattctcaaatgattgcca

SEQ ID NO: 317416 - DNA, 122 bp, Homo sapiens
ctttcagtcttccgccaagcagccacttacgaagagtgaacacaactgcagcgcattcaacgcagctgatccaaaaaggacttcgaagcctgaattcccttcccctgtgactaaatggcagt

SEQ ID NO: 317417 - DNA, 122 bp, Homo sapiens
cgtacatctctagttgtgctgcaatatgccagcagctcaacatcgagaacgagcgagtaacgaatccaggcatggagggtgctgtcctccacttggctgctaagctcggccctccgcatgat

SEQ ID NO: 317418 - DNA, 122 bp, Homo sapiens
aaaactgcctgggcctggccttgctacattgtctccaggccgtccagggcccggggccaccgtcactgctgcatgctcaggcatatctcaagggaaggccgggctgcccagagcccctgctg

SEQ ID NO: 317419 - DNA, 122 bp, Homo sapiens
gcggccttcctgcccggacacgttggcctgcgggcgggcggacaccaggtgtcggcgctgcgggaacagaggcttctgagccccgcccagggacctggcgccccaccctgcccaccccacgc

SEQ ID NO: 317420 - DNA, 122 bp, Homo sapiens
acacctgaacgctgctgccagccgatgccccagccctgcacgccacccactatcccggcacgctccctctgcagatggtcgccgcacctacaagccctggccgcacccaacctgtgttgttg

SEQ ID NO: 317421 - DNA, 122 bp, Homo sapiens
aggcttcctctccaacatcagtacacccatccacactccctcctctgcgcacccagcacccgcattcaaatgctaaccacaacagtgggattcagtgacccagaaggaaaagccgcagagtg

SEQ ID NO: 317422 - DNA, 122 bp, Homo sapiens
accccggccctgtttgcctcctacaggcagtcggagcagtggctccaaccgtagcggcagcgatcggaggaaggagaaggacccgaaggccggggactccaagtccgggggcagcggcagcg

SEQ ID NO: 317423 - DNA, 122 bp, Homo sapiens
tgcagatactatcaaagtggacaacagttagcaatctatgcttgctgacttacatctgtccgtcctttctctcacctgctttaccttctagcacactgatttatttttgtgttttatccctt

SEQ ID NO: 317424 - DNA, 122 bp, Homo sapiens
cagccccagggggcgagcggggtccatggtgcagggggtcgggcggcccgctgggcaaggcgtccgagaaagcgcctggcgggaggaggtgcgcggctttctgctccaggcggcccgggtgc

SEQ ID NO: 317425 - DNA, 122 bp, Homo sapiens
cagtgatgacacagaaaacaaacaatcccaggaaaacaaagcagcagcgacagccacaaacgcctgccaccccggttgctctcaatctttgtttaactcattctgaaaaagataaaattttg

SEQ ID NO: 317426 - DNA, 122 bp, Homo sapiens
tccccaccttgtcttccagattattctgaattccatgcacagataccagccccgcttccacgtggtctatgtggacccacgcaaagatagcgagaaatatgccgaggagaacttcaaaacct

SEQ ID NO: 317427 - DNA, 122 bp, Homo sapiens
tctgagccgccgagtggacagtggctgattatggagagcagaggcccactggctacctcgcgcctgctgctgttgctgctgttgctactactgcgtcacacccgccagggatgggccctgag

SEQ ID NO: 317428 - DNA, 122 bp, Homo sapiens
cccatgccaggacctctggccaggtggccttacttgccttcaggtgtctggctgcgaacccgtctgtctgacctggtggagaatggggccttccattaatccccagatgctcctgcctactg

SEQ ID NO: 317429 - DNA, 122 bp, Homo sapiens
tggacagaaaaaaaggcctttaaaccagccctttctctctactccctaccaatagcgtgacgtccccgcctttcgcagcccggcgttaagcggaacttctctctccagctgtgtctcttagc

SEQ ID NO: 317430 - DNA, 122 bp, Homo sapiens
acacagcgaaaccccgtttccaccaaaaaaatacgaaaaccagtcaggcgtggtggcgcacgcctgcaatcgcaggcactcggcaggctgaggcaggagaatcaggcagggaggttgcagtg

SEQ ID NO: 317431 - DNA, 122 bp, Homo sapiens
tggaaggtgctgtttcctggtacctgtccagccctctgagcttttctctcagcttccaaacgctgcagttgagaactagcagatcctattggtagtgccctgtggcccacactccttggtaa

SEQ ID NO: 317432 - DNA, 122 bp, Homo sapiens
acaattagttccgctttcccagctagtcgaatcactggtgcacctccggaatccgaggttcgcattgctctcggacagagttctgcctccccagtactcccaaactcccagtcctgtgcacc

SEQ ID NO: 317433 - DNA, 122 bp, Homo sapiens
tcactgggctggagtgggcggggcgcccggaactcagaactctaagcgctggtgtggtagcgtcgtggccggggtccacccagctccaccgtggctcaagagctggaagtttcagaattgcg

SEQ ID NO: 317434 - DNA, 122 bp, Homo sapiens
cccgtgtttctgactcagtcctggagtcgggccctagaatttgcacttttaacaggttcccgggtgatgctgatgctgccggtcctgggcgccacactcccagaaccgttgcaatgtactta

SEQ ID NO: 317435 - DNA, 122 bp, Homo sapiens
agtcctaccagagccccaacgggttactaattacggatttcccggtggaggacggagggacgctcctcgcagcgcagattcccgcccaggtgcccaccgcctcggacagcaggacggtacat

SEQ ID NO: 317436 - DNA, 122 bp, Homo sapiens
cccgctttggaggggaggaaaccaaggctcagagaggaaatgggcgctcctggtgtcccccgctgggagtagaactcaagcctggaggctccaagcagcctgtggcctgctctggtgaggtt

SEQ ID NO: 317437 - DNA, 122 bp, Homo sapiens
tggcgccagaagcctcatcgagttgtttggacaagtagaagttttggttgttgagttcagcgttgtcctcggtcagctggtttagctgctcctccaggtctgtgattacctaaaagaggaaa

SEQ ID NO: 317438 - DNA, 122 bp, Homo sapiens
ctgctgtgaagtgagacagccctggggtggtcactagaaatctccttcagaggctgggtgcggtggctcacgcctgtaatcccagcactttgggaggccaaggcgggcaggtacctgaggtc

SEQ ID NO: 317439 - DNA, 122 bp, Homo sapiens
gcagatctagcaaacctgcagccagcagaacgaacccggcaccagcagatctcaattccacgtttgctctgtggactcaagggggagcctcagctccactgtctccctccagggacctctgt

SEQ ID NO: 317440 - DNA, 122 bp, Homo sapiens
gtgtgtacacacatagcatgtgtgtatagcatgtgcatatgcaaagagtttgcatgtacacggaatgtatgcagagaatgtgtatccacctacacgtgtgtatgggtgtgtgtatgtgtgtg

SEQ ID NO: 317441 - DNA, 122 bp, Homo sapiens
ggaggtgccaagcacagaggggcataggtataagggaaagctgcagccaggatgagggtccgcctggagggatttcaacaggcagaagggggcacctggaacagcaagctgagcttggggct

SEQ ID NO: 317442 - DNA, 122 bp, Homo sapiens
ttgaggaattacaaagcgaaccccagggtcaccacctcccaggttgacacacattgtgaccgctccattctttccacttaaaccttccccaccaacatcccagggcccgatttttatggtaa

SEQ ID NO: 317443 - DNA, 122 bp, Homo sapiens
accatcacatgggagatgaggcttcaatatataaatttgggggggacacaacaatcagtccgtagcaagttccatgaatgaattaattacatcttgcgtatcttctatgtgcaaaacatggg

SEQ ID NO: 317444 - DNA, 122 bp, Homo sapiens
ggaggaggccagagagggcaggagtttaagatcctggaatcgccctggcgaggtcctgggcgcgagtagtagaggagagctgaccgcggggtgcgtgggccgcaaaaatccccgacccagga

SEQ ID NO: 317445 - DNA, 122 bp, Homo sapiens
gatgtctggggatgaggtgaggcggggaagggggaacatcgctgcatggttacgagcacacgcgaatacaggaacctttagggaagctccaggccaaagagcatccgtgggctctcggagcg

SEQ ID NO: 317446 - DNA, 122 bp, Homo sapiens
cagcagctgggggagggaaaggagactgctcccctcacgccttcggagggagtctggtcccgccagcacctgattacaaactccagaactgtaggagaagacatttctgctgctttcatccc

SEQ ID NO: 317447 - DNA, 122 bp, Homo sapiens
cctctgagagctgggttgcccttgtagtcagcacttcccggaaatcggcaaactgagccacgtcctgctggcggcactccagctggtattggtaggccacacattcctttgtcactttgaaa

SEQ ID NO: 317448 - DNA, 122 bp, Homo sapiens
gccgagaaggtttgtgtctgccctgagccgagggacctggcagctgggtggcgaagagaccgggtgggcggtccccggacacttgcggagactggaaaggggggctgtaccgactctaaacg

SEQ ID NO: 317449 - DNA, 122 bp, Homo sapiens
cggacctctccgatccttcagagcccgcgccgggcaaagtagaggtcaagtcaacacacacgaccgcagggcagccctcccactctcccgtgcggtccgcagctcggcttcggaacgaccac

SEQ ID NO: 317450 - DNA, 122 bp, Homo sapiens
attagtgagatgctcccctcgaagaatagtcttgtttcttctaaggactgattctcaccccggctttggctctcctaattttagagggtaggtacgggtctccagatatactgcctaccacg

SEQ ID NO: 317451 - DNA, 122 bp, Homo sapiens
agattctccccggactctccgtcatgggcgtgtgcttgttgattccaggactggctactgcgtacatccacaggttcactaacgggggcaaggtaagccggcttcggcccgggggccgactc

SEQ ID NO: 317452 - DNA, 122 bp, Homo sapiens
ctttggagcgcccgtccccaggtcccctcggccgaagcagaccctgtggccccactgccacgcagccgccccggcctccaccgtcctcacgtgcaggggctttccttgtcttgcgtcctgtt

SEQ ID NO: 317453 - DNA, 122 bp, Homo sapiens
acaggctatcagaaccacctatctagggactgttcaggaagtgaataaatactgcatccccgtattaaacacaggtctccaggaaaggccaggcaaggaggaccaccagctctctgggttac

SEQ ID NO: 317454 - DNA, 122 bp, Homo sapiens
aaataataaatgaatgatgaacacatgccacctccttgacgggcagttcaggcaatcagacgtcctgtgcgtgatcagacgcctagcgcttcagaagcacgactggtgagaactgggcagcc

SEQ ID NO: 317455 - DNA, 122 bp, Homo sapiens
gcctggtgtgtctgtgctctgggacacgggtggcaaaggttcctcggctctacgcagacccgacgggcccgggcacggaggcggatcgcccgggacaaaccgacacagagcatgggagaccc

SEQ ID NO: 317456 - DNA, 122 bp, Homo sapiens
cgcgggccccgagcccagcggggacccctctgccagttaggggtcactctctccattcaacgctttattagccccctcaagtctcagggcgaagtcctgctgctttgagacgtttacagctt

SEQ ID NO: 317457 - DNA, 122 bp, Homo sapiens
ggaacgtgcgtcgcgcccccagtgtccgtcgcgtccgccgcgccccgggcggggatggggcggccagactgagcgccgcacccgccatccagacccgccggccctagccgcagtccctccag

SEQ ID NO: 317458 - DNA, 122 bp, Homo sapiens
ccaggatgctgaaagggcgactgccatcaaggtgctgatggctgggggtggggttggggccgacttgagagaggaccatttctcgaccccattccacaggtgggagcatccctaaacatctc

SEQ ID NO: 317459 - DNA, 122 bp, Homo sapiens
tatctggaaataaatacaatacaaatgatgtgtgtggccccaaaccacacacagttacagcgactcacacatacacatatcaataatacattcccttttgtctggagagacacatgtggtgc

SEQ ID NO: 317460 - DNA, 122 bp, Homo sapiens
tatcatcctctccccgctggatataagaaacaatatgacaggcggggtgaacaccccccgcggtatggggagtcatgtcccgccctggttattaggatccacggtggacacaccacatgttt

SEQ ID NO: 317461 - DNA, 122 bp, Homo sapiens
tggctgtgaaccccgaggagggtcaggaaggttgtgggatgtgtcagatgcctgcagctgcgtggaaacaccttgagtcccctgtggcctctggctcagggccctgccctcccctctggaag

SEQ ID NO: 317462 - DNA, 122 bp, Homo sapiens
ctacgcatttcctgatgcataatttttgccctagcacttccagttggacttcagagacttcgccagcttggaattgtagtgtctgcttttttagagcaccagtctgaaaaaaaaatagtgaa

SEQ ID NO: 317463 - DNA, 122 bp, Homo sapiens
aaccccgagtttgaagcccgacaaaaagctgatagcaatcacagcttttgctccttgactcgatgggatcgcgggacatttgggtttccccggagcggcgcaggctgttaactgcgcagcgc

SEQ ID NO: 317464 - DNA, 122 bp, Homo sapiens
ggggcctccgtccaggctgcggtggtccatccctctgcaagccgctgtttctgggctccacgctctggcttcggaagtgggagcgagtgttgaaatccagccaccttcgggggaaggccagt

SEQ ID NO: 317465 - DNA, 122 bp, Homo sapiens
caaaaagacgctggcacggaactcgcggctctcctgcccgttggatcccgaagcaccagtcggggccccagacacgaggccccacttccgcttacgcgccccacttccgcttccggccccgg

SEQ ID NO: 317466 - DNA, 122 bp, Homo sapiens
tttaccaacatgtggctgtgttggagtctctctgagcctactctggatccataggttacccgatttgcaaatcatgatttgctcatttaaactgttaaatttaatttttctaaagttttctt

SEQ ID NO: 317467 - DNA, 122 bp, Homo sapiens
aaagggagggacgtggctttgttttctagcagactccagtatctagaatagtgctcagcacgctgcaggcactcaagaactatctgttggccggattaatgtaaaacagaaatgtaaaactg

SEQ ID NO: 317468 - DNA, 122 bp, Homo sapiens
aagggagctgaatgctgaggtcagtggtcttgaggtccccctgcatggaggggaggctcacgtcggcctccgccttcggcgcagacacatccaccgaggcctggatggacttgcctggggca

SEQ ID NO: 317469 - DNA, 122 bp, Homo sapiens
ggcggggccagcgacgccatcgtgacagctccttaaagggccagtgcccagcacagggttcggccgagacggggtggaagggaagggatcggaacccagcgagcaggagtggaaggatcgct

SEQ ID NO: 317470 - DNA, 122 bp, Homo sapiens
tggggatgaggggggtgggcgagctgtgggtgacccggcctatcctccctgcaggaagtgcgagcgcaccacgtgccatgacttcctggagtgccagaactcgccagcgcgcatcacgcact

SEQ ID NO: 317471 - DNA, 122 bp, Homo sapiens
accagggagaaagtgttgttggagctgaggacaaatcaagcagcccgcccggacggtggccgcatttgctgaacatttggaattccaggaaagggccgggggcctggaggaggacccaggtg

SEQ ID NO: 317472 - DNA, 122 bp, Homo sapiens
tccctttaccagtagaagagagaagcagcagagtgtcattcctccccattaccccctccccgccccgccggcccccagtcaaatgactccacccacaaggcaggcacgggatgaatggtccc

SEQ ID NO: 317473 - DNA, 122 bp, Homo sapiens
agcgcaagcttctgaataggggaagagaagtactgagagagcgcgcaggagtgcgtacgccggtcctctcaaagactgtgcaacatttagcgagtgcatgcaactctcaaggcttccttctc

SEQ ID NO: 317474 - DNA, 122 bp, Homo sapiens
ctggcaccactgccgcctgcgccgcagcctgggcgaggagcaacgccagctcccggagcgcgccttccgggccctgccctccggctccggcccgggcgaggtccccaccagccgcggcttgt

SEQ ID NO: 317475 - DNA, 122 bp, Homo sapiens
gtgacctcggagcataatttaacctccgagcaacctatgctaagactaaacaagtttaagcgaattactatacatatattgacccaataatttgatcaacggaacaagttaccctagggata

SEQ ID NO: 317476 - DNA, 122 bp, Homo sapiens
cgctgctcctggcgcactagtagggtctgtagcgtatcccgaggatcattccgactttcccgccccgtacgtgaggggccgccttgaagcctcttccgccacggacactcgaaactgatctt

SEQ ID NO: 317477 - DNA, 122 bp, Homo sapiens
gataaagtttggttttcctgtgactgactggctgtgcccacagaaacagaggcctcctcccgcagccccagcagttgcggtcagggaacctcgtgctgtgttagtggctgtgctactctttg

SEQ ID NO: 317478 - DNA, 122 bp, Homo sapiens
tcgacctcatcgagtgcccttcggagagcgccttcttgtcagggtagttgatgctgccagcgctcccgaacgtcgccatcctccgcttctcagggctctcgatcctcccccgggtgaggggg

SEQ ID NO: 317479 - DNA, 122 bp, Homo sapiens
agtgggggcgggcccgggctgcaatcgagaggcgttgagccgtaaatcagcaccacttcccgcccagggcgttctgggtccccgcccaccggcaagtcacatgagccaccaaaatggtggtg

SEQ ID NO: 317480 - DNA, 122 bp, Homo sapiens
gcccaaggtataaaatagataaaagtccatactgataacataaatgatagaataaataaacgaagaagggacaaatctcccatgcagagtaattccagtttattcatgtagagactccgtct

SEQ ID NO: 317481 - DNA, 122 bp, Homo sapiens
gggtcccagagtcgccgccatctttcccaccaacgacccttcatcaaaagcccgccccgtcgcccaacccattggcccgaagagccatctgccctgcgtcctattggctttcgtcaagcccc

SEQ ID NO: 317482 - DNA, 122 bp, Homo sapiens
ccacgacccctagcacttgccccctcaacctcactctctctcgataacagattttctgctcgctgctcaggagaccgttacaaagcctggccccaacaagcacttccgcttcgggaccgact

SEQ ID NO: 317483 - DNA, 122 bp, Homo sapiens
aggcccctgctgagacagacctgctgatcgtcgtcgtccacgtcctgttatttcaatgctcgtcgctcaccctgccccagcccaccgaaactcccgcatttccccaccagtcaagctctcgt

SEQ ID NO: 317484 - DNA, 122 bp, Homo sapiens
ttcttatagtaatgatgtctagttatttattttttattttttatttttgagatggagtctcgctgtcacccagagcagtgggcgacctcggctcactgcagcctctgcctcccgggttcaag

SEQ ID NO: 317485 - DNA, 122 bp, Homo sapiens
ccgacagggacgcccaccccagcccactccctctgcagccacccagcctccttcccatcacgagcactggcgctcacatggggtactcggacccatagggacatttggtgagacctgggcag

SEQ ID NO: 317486 - DNA, 122 bp, Homo sapiens
aacagtgcaacaccgtgctactggcaaccacgggtgtcaggcttggcctcaggcggcatccgggaatggtgcatcaggaggggttgcctaccctcagtttgtgacttccaagatcaccacga

SEQ ID NO: 317487 - DNA, 122 bp, Homo sapiens
ggctgcagggcggcggagcctgtgctgctggcctgcatttctctggctggacagatactgcgcccatatccctggtctttcaaagggctctgtggctggtggagggcagcaatgccccaagg

SEQ ID NO: 317488 - DNA, 122 bp, Homo sapiens
tgaacagagcatggcactgcctgcgcgggtcacccgtgatgtcgggagctcacatgtgaacgagccgcctgctaaactcggaaacagtttcacaaaatgaagcttgagcaacagagcgacat

SEQ ID NO: 317489 - DNA, 122 bp, Homo sapiens
gaccaggccgctctgtcggaggcgcttgcgggatgaaatgagacaccgtgagatcgatctcggaggtgctgtcaccgggcatgcctcggagtagccgggacgcgtggccaaacccacatttt

SEQ ID NO: 317490 - DNA, 122 bp, Homo sapiens
cacaaggcttgaactccagcctcctgttcacacaatgggaggggctgtgttcctgaaccacggcaatggcgggacagcagattaggccactgatttgtcttgtacatctgcaaaaaagagtc

SEQ ID NO: 317491 - DNA, 122 bp, Homo sapiens
ataactagccaatcctctccctctgttttcatctctgaagccaggatgtatggtagtattcgttttattgagattcccattttcattgcctctagggagccttacagtaagctatcatgaaa

SEQ ID NO: 317492 - DNA, 122 bp, Homo sapiens
ggttgtcttgcaggggaaatggctctggcaccgagtctctggttgcagcagagtgcaaggcggattctgctctgggtgctgaaaatgcctcgtgctgtttctggtctctaggtttttcagag

SEQ ID NO: 317493 - DNA, 122 bp, Homo sapiens
ctcctgctgggaaggggccggcaggcagggtcagcacggcacgagtttccccctccccgacgcccgcacctgccctgtccccccaagggtccccgagtccgaggagaacctcatgcagggcc

SEQ ID NO: 317494 - DNA, 122 bp, Homo sapiens
tgaagaatacagtggataccactcagcaagagaggaacaaaccacgaccacacagagacacgaatctcaaaataactgcggaactcaagaagccggaccaaaagaacacattccacgtgacc

SEQ ID NO: 317495 - DNA, 122 bp, Homo sapiens
tgcagtagaaaccaccttgaaaccacacctaagcagttgcaggtcactgcgcatagaaaacgattcaaaaatccttaaatactcgtggaagtacctcgaataaagtgccaacctactatccc

SEQ ID NO: 317496 - DNA, 122 bp, Homo sapiens
gcctcactctacctgcccatctcactgtttcttaaagactttaaatatctgcttctaggtcgggcgcggtggctcacgcctgtaatcccagcactttgggaggccaagcgggcagatcagct

SEQ ID NO: 317497 - DNA, 122 bp, Homo sapiens
agatgaatggctacacaccctcagcgtgctgaaggactaccgactgccacacaatacaaacgaacaaaccattgatgcgtgactcaacacacaccctcagcgtgctgaaggactaccgactg

SEQ ID NO: 317498 - DNA, 122 bp, Homo sapiens
aagagagctttcactggagtgatctttgttctttgtcctgtgaataaatagaagtctcgacgtcctagggattgtaagcccctcactataccactcaagagtatttatgtatgcgtgcattt

SEQ ID NO: 317499 - DNA, 122 bp, Homo sapiens
gcttctctaacagctttgacaggagtgaatccccaaggctaaacccaaatccttatttgccgcctactcacgcctttgtgaggactacgattcccagacggcaacgctcccttcactcaact

SEQ ID NO: 317500 - DNA, 122 bp, Homo sapiens
ggggtggggcagaaactaaatgtatgaaagcaatctttaaatagtcggattctcaaaatccggagaaagagtattaaaaggtaagaaagcaacagttttgccaatgcaaaagggaaagtgtg

SEQ ID NO: 317501 - DNA, 122 bp, Homo sapiens
accgccaggcctggggaaacccgggatgtccagggctgacctgaggaggcagcagggcaccgaggggaggctgtgggcccagcgctctcaggtctactgcaggaacactcgggtctgtccct

SEQ ID NO: 317502 - DNA, 122 bp, Homo sapiens
ctggtctacccagtgccatgtagattcggggaatcttcctggaggtgacaccaacatcggcgaagattcggcagttctgttttgattttttttgtttgttttttgatcagtgctaatcttcg

SEQ ID NO: 317503 - DNA, 122 bp, Homo sapiens
ggattgaagcaactgctatggtggatgcattatgtaacctctaaccagcttaccatgatgcgggaggggcgtggaggggggtgttgggggtgggaaagacaggaagggacttccactggtgc

SEQ ID NO: 317504 - DNA, 122 bp, Homo sapiens
ggctgctcccagggccccagcccgcgccgcgcctcccctctcctcccccaggatcgacgccgccgcagaccaatcgctgcctggagtcggccactaggccccacctccgatcccgcccccct

SEQ ID NO: 317505 - DNA, 122 bp, Homo sapiens
tatcctgcaagcccgctccggccaaacctgcttggagacagcctagtccgccctgatccccggactgcccgggaagcaagaaccccgggacccgcgagctgacccttctaaaaaccaccctt

SEQ ID NO: 317506 - DNA, 122 bp, Homo sapiens
ctgccgagctgacggcgtcccggatcacatggagcccccgccccaccccagcccgccccccgccgccaacgccggtggcccttccagtcgcgttactacccagagattcatttgtaccaggg

SEQ ID NO: 317507 - DNA, 122 bp, Homo sapiens
gctcttcagacagggccagccctgctcaggaagtctctggctgtcttcatgtggggaagccgggcttgagttgcccataggcccctgccctgcaccatcctgtccagtgccctgcgcactcc

SEQ ID NO: 317508 - DNA, 122 bp, Homo sapiens
cggggtcgcggaccttgtagatggggtggcagagcggcagctggcgcagcgtggccatggcgaaggcctcgcacagcaaatgcgtgcacagaaagtgcgtgttgttttcgtgcaccaggaac

SEQ ID NO: 317509 - DNA, 122 bp, Homo sapiens
gtctttaccccacgttcacagcagcgttatttataataaatgaaaaagggaagcgtcccccgctgtccctgcccatcgatggatacgtgcataagcaaatgtgggccatgcacactgtggaa

SEQ ID NO: 317510 - DNA, 122 bp, Homo sapiens
ttactgagccttttggaaaatcaaccaaaagtcttcgctgcttggagtctgattgagaagcgacagccagtgagggtgaagacgcagaaaccttcacagtagctcctcctcttagggtttta

SEQ ID NO: 317511 - DNA, 122 bp, Homo sapiens
tcactagccctctgtttttcaatcctctgacagtcattcttccattctctgatcatactccggcaataagctaggacgggaggtgttcacacctggagtttgtttctaagacaatgtgatga

SEQ ID NO: 317512 - DNA, 122 bp, Homo sapiens
gtccggagtgcaaactacaagccccagaaggcaatgcgccagcagtgatgggagtgggcgcggaggcgcgggctccccgactacgcctgcgcagcggggctgagttggagaacgtcttagac

SEQ ID NO: 317513 - DNA, 122 bp, Homo sapiens
gaaccctctagagtctggatcaggacccctttttggtaagaacattgctttatgtaacttcgtgtgtgtgtgtgtgtgtgtgtgtgtgtgtgtgtgtgtgtgtgtgtgtatgtcatacattg

SEQ ID NO: 317514 - DNA, 122 bp, Homo sapiens
ctgagctctgcctcttccagtaacattgaggattactgtgttttgtgagagctcgctaggcgccctaagcaacagaggtaaccactttatatccttgtttctcaacctcgttattcctacct

SEQ ID NO: 317515 - DNA, 122 bp, Homo sapiens
tggaacattttctaaaagggacagagagcaccctgctacatttcctaatcaagaagttggcgtgcagctgggagagctagactaagttggtcatgatgcagaagctactcaaatgcagtcgg

SEQ ID NO: 317516 - DNA, 122 bp, Homo sapiens
gtcttctccccgccgcggcgcccgttatatgcgcccggcccctttcgaggctggcgaactcgcccaaaccgcgggccgccccctgccccccgctgggctgtaacctgaaccgcccgcccccg

SEQ ID NO: 317517 - DNA, 122 bp, Homo sapiens
ggtccctccctgttgcacacttggatagtttatttttttagacaaggtttacttcagtctcgcaggatagagtgctgtgatgggatcatagctcattgcagccttgaaccttggggttcaag

SEQ ID NO: 317518 - DNA, 122 bp, Homo sapiens
gttagcagatgtgggaggagcgggccgtgctggggccgtagtgaagcgatctgtggtgctcggggagcgttgggaaggctgaggtggcccatcagctggggacacccggcacattacgggga

SEQ ID NO: 317519 - DNA, 122 bp, Homo sapiens
gtggaggcgggtttcaccatgttggacaggctcgtctagatctcccaacctcaagcgatccgcccaactcggcctcccacagcactgagattacaagtgtgtgcccctgtgcctagcctacc

SEQ ID NO: 317520 - DNA, 122 bp, Homo sapiens
ggcctccggaattcagagctcatgagactacatgcaaatagggcaacaagaaacagcagacgtgctgattgtgtgtaacttctcttttcacacacatgcttccttgttctactagactttat

SEQ ID NO: 317521 - DNA, 122 bp, Homo sapiens
tcactctttcccctcttatttaaatgactttccagctagtctaaaagcaaacaagtgctccgggtgctgtggctcacgcctgtaatcccagcacttcgggaggccgaagtgggcggatcaca

SEQ ID NO: 317522 - DNA, 122 bp, Homo sapiens
catctgcttagccacacgagaggagcattgcctctcatatgctcttctcagtgttgttgacgggttatctgatggaagtagtatagagtcatcattaaaagtagagactttgcaattaggca

SEQ ID NO: 317523 - DNA, 122 bp, Homo sapiens
ccatgtgcagagccaggcctagcacagagagaaagccctgactctaagtgcctggaggcacgagtctgtcactcttgcctcaattagtatactgtgttttcgcaatttctgtcactcaaagc

SEQ ID NO: 317524 - DNA, 122 bp, Homo sapiens
ccccggcccgcgccgcgcgtattgctgccgcctgggggcgaggagggcgcgcggcccggccgatccctgcccgcactcaccgttcacaggcgcgactgcccccggggccagggccggggccg

SEQ ID NO: 317525 - DNA, 122 bp, Homo sapiens
agggaccgccgggctgcagcccctggccccggagatgacggctggtgcccgtgcttgaggcgtcaggccagctcgcggtgccagcactgccaggctcggctggccacaggaaactgtcccac

SEQ ID NO: 317526 - DNA, 122 bp, Homo sapiens
gagaccccagcctctcgcgtcaccaccgccggatggccgcggatagctgccgggagtttccgtcttggtctccttggttaccgcgttacctcggtacccatagcaaccagaaagctgggttc

SEQ ID NO: 317527 - DNA, 122 bp, Homo sapiens
tcatggagtataaaaagacagtcttggtaatttaacactatccagtttttctgggccggacgatcatctctagacaagcctgctgtattcctatccctaccaaaattcccatggttttccgg

SEQ ID NO: 317528 - DNA, 122 bp, Homo sapiens
gggactgtatcacacagccagacaggcctctggagctgagaattttagacttcgctgctccgggaagcaagaggactacatacaattccctatttatttttcttcactttaatctgacatcc

SEQ ID NO: 317529 - DNA, 122 bp, Homo sapiens
aatctaagcgagaggctgcacctaggggtctgcggagccgcaggcctggaagcatgcgaccgtgatttcaggctctggggtgaaggcccagggaggccgcgcggaggaggccgcgggcgaag

SEQ ID NO: 317530 - DNA, 122 bp, Homo sapiens
agtttgggagagatgcgcaagtggaattggagctgccacctcactttccacgatctaacccggtgtaaggtggcggaaggggcatggggaggcacgttcaggagtcgcgctttgcgtttcca

SEQ ID NO: 317531 - DNA, 122 bp, Homo sapiens
tgtacctgaccttacctgcctcagagaacatggagaaacattgctagtgattaatctaaacgtggttaaattaacaggctgtccaaagtggaggatccgaataacatttgtagggggtttaa

SEQ ID NO: 317532 - DNA, 122 bp, Homo sapiens
ggtgggatccgagaggacttctaatcctggagcctgtgtgctttctcccctgcggctgaacgtgaccttaggcgtgttacttcactttctgaacctcagtttcctcttgtgaagtgggggat

SEQ ID NO: 317533 - DNA, 122 bp, Homo sapiens
tttgcagagtggagcttcaaccctgagaatgattaagttaactgaagactcaacagggaacgcctgagctgcttcacgatgtggcatcccagtttctgtgtcacccctgtggtaaatttata

SEQ ID NO: 317534 - DNA, 122 bp, Homo sapiens
tcttctaagatatttgctcatcgacgtgaaagatttttataaaacaatcctaacacatttcgctgacaaaatttttcatcatgatgagttgaaaaagatgtaagtcctagtgtgttctcaat

SEQ ID NO: 317535 - DNA, 122 bp, Homo sapiens
ttctcagtaaacagccagtgtgtaaagctgtttaatctttcatgagaactggagccagaacgtgatggtttgcgggaggctctccacgctgtatctgcctggaaacattttgcaattagcgc

SEQ ID NO: 317536 - DNA, 122 bp, Homo sapiens
tttctgagcaagtgacattgggttgagattgaagggtcagcaggacgcagccttgccaagcgctggcagggaaccctgccagaaagggaatctcacagcaaacactgcttcccagatcatgc

SEQ ID NO: 317537 - DNA, 122 bp, Homo sapiens
gaaatgacaaacgagggagataatcagcaaaacatccatcactagacccacaggaagccccgtctggcctttatccaagttactccaagtgtgctgggcagagggtgcggcaaggctcacac

SEQ ID NO: 317538 - DNA, 122 bp, Homo sapiens
ggtgatccgccctcctcagcctcccaaagttttgggattacaagcttgagccaccgtgcccggccaccttgtttgctttttaaagataatgatgtcactaaaagagttctgactgaggccgg

SEQ ID NO: 317539 - DNA, 122 bp, Homo sapiens
gactggggagaggaagtgggtcagctctttggtaaccttgcttcccatcccttaaggtatcgcacaaccaaggacatcatccttcccttccgggtgatcccgctagtgcgagaagtgggacg

SEQ ID NO: 317540 - DNA, 122 bp, Homo sapiens
gcccaactcacccagagtggccacccacggccacacagcggctggtgttgacgctccaggcgcaataggggtcccgggcgaggacacagtctgcacaggagcgatacttcatgcagtcggcc

SEQ ID NO: 317541 - DNA, 122 bp, Homo sapiens
ctctgctcagttcaacttcgaagtacaaagtaactgtgggagaagttcagagacggctgtcgccccctgaatgcctcaatgcatctctcctcggcggagtcctcagaaggtaaccccaccac

SEQ ID NO: 317542 - DNA, 122 bp, Homo sapiens
taagcattccagaaaacaccaaggtagaaaagaatacagcctctgacctcaaggagtttacggtctaggaaagtttataagcatatatgctgtgtgaaaaacaaaacctggctgcctcatca

SEQ ID NO: 317543 - DNA, 122 bp, Homo sapiens
gaagggacatgcaaatatgtttcaggtgttttatatgcgctcaaacgaacccagggaattcgagatccatctataagacaaaatattgtcagcaaccctggatttgctgcagtttgcgctag

SEQ ID NO: 317544 - DNA, 122 bp, Homo sapiens
cacactttcgttcaaaggacaagcctcttaattacttccaggccaacaaagtgcccctgacgggctggacaggcctagtgcgcgccatccttcaacactgtcctggacataatcatctaaca

SEQ ID NO: 317545 - DNA, 122 bp, Homo sapiens
gctgcttgaactccatgccacaaggcaacactgtaaagaagctgaaagcagagagaatatcgaatattgcaagtcgagcattttacctgcagttatgtgcaaggatgctcagaccttttcct

SEQ ID NO: 317546 - DNA, 122 bp, Homo sapiens
tgctatccaaagtcagacacgccaagggcatgtgttctgtcattctgtgttggaagggcccgctggtggcattaacctttgtttcctggccccacccacaccggctctcactcaagtacttg

SEQ ID NO: 317547 - DNA, 122 bp, Homo sapiens
tctgaaaggtctctttgaacaagtgttgttataaccttaactgcttcagacaagcaccagcgtgttttgaaaagagctctcttgaaagcaagaattcattgattcagcaaaacttactgagg

SEQ ID NO: 317548 - DNA, 122 bp, Homo sapiens
cttgaagttcagctgggccaaatgaggggaacagggaacccagagctctcagcctcccagcgcccagacctggcatttgtacagctgtgtctgacatgtaattctttcgacataacttctta

SEQ ID NO: 317549 - DNA, 122 bp, Homo sapiens
gctcactttcttctgtccttagaggcactttgagaaaggatgcaccaaggccaggcttaccgatggtctgtcaggtacccgagagcaatgggggccctcttgcaaatgcacactatttaaag

SEQ ID NO: 317550 - DNA, 122 bp, Homo sapiens
ggggtccggcccctgcggcgacgattgtttgtacctaagtgaaggaggctccgagacccgcggcccacgtcctgccggagacgcttgtctgcagggctgcattgcatccccgggcgcacgtg

SEQ ID NO: 317551 - DNA, 122 bp, Homo sapiens
cagggcagaatggttacactataaatagatgttcactgaccaaatactcctactagttctcgcaaaccaactgtctttcccatactctgaaacaatcatttcttcccatacaacagaagact

SEQ ID NO: 317552 - DNA, 122 bp, Homo sapiens
gaggtgatgatatttatagttcggcatcatcaaaaagcaattccttgcttatgtgggattcgaagcccagccaggtctcccttgtgactcattcggcattcatccggggatctatgcttgcc

SEQ ID NO: 317553 - DNA, 122 bp, Homo sapiens
agaaagggaaacaatggcttgtagttttaccgatttgtttccgatacataacaacgctgacgttctttaaccatcttctaagtttagttctcaagctctaggttagggtaccactaacgaag

SEQ ID NO: 317554 - DNA, 122 bp, Homo sapiens
tcaagtttccctctcacacttcacaggatattaatcgctcagagctcttgccctccctttcgcaatgttcctgattttcatacttccgattgagaaactaccacatacacactgaggatatc

SEQ ID NO: 317555 - DNA, 122 bp, Homo sapiens
atggacaaaataattcatgaggatttgtaatagactgggggtggggaggagccaaaccagcgaagaagaggaggaaatgagtgacataaaaattgggggcttgggaagacaatgatagggtg

SEQ ID NO: 317556 - DNA, 122 bp, Homo sapiens
ggtttgggtgggggcagatccgccatttgtgtgggaccctcagtctgaacgtcaggagcccgggcccgatggttttctgtaattggaacttgtgctctgagagcccagccctgagcactgac

SEQ ID NO: 317557 - DNA, 122 bp, Homo sapiens
aaggagcatgagcgtcgtaaccgcccgcctggggttgacttctcttggggtgatcagccacgtgaccctagccacccgcctcctttacactacgccccaggatccccggcggcagagataaa

SEQ ID NO: 317558 - DNA, 122 bp, Homo sapiens
gattcacacacctcaaatgcaagagggaagccaagagtgggaggtgagtggcatccagtgcgggcaggaggtaaaggacagtagggatttttgtctgtgtgcagtttgtagagcccacacat

SEQ ID NO: 317559 - DNA, 122 bp, Homo sapiens
actgtgtgttcttggccaaagatacttcagtccctacccttcatatctccatctacaaaacgcatataaggacatctcctgttaacgcaaaaaactgttaagaggtttggtcaaaagctaag

SEQ ID NO: 317560 - DNA, 122 bp, Homo sapiens
gcagccgcccaactcctggcgcgggatctgctgaggggtcacggtgagtctctgtgggtgcgggtcggagggatgcccaggtgcctcgtcgccccacggcccgggcggaggcgggtccggaa

SEQ ID NO: 317561 - DNA, 122 bp, Homo sapiens
ggctgcaggggaggctgtgggggtcctggcagccaggaggccccaggtggttttgaggctcgctcttgcgcggtgcctgagaagagggtgaaggagctggggcaggccccatcctgggcatt

SEQ ID NO: 317562 - DNA, 122 bp, Homo sapiens
gcctgcccagcttctaagagacgggcctgcggggacctgggtacaaggctgggtggggtccgggcaggcgcgagggtgcgtgatgaccccagctgacgccgtccctctttccccagggccgg

SEQ ID NO: 317563 - DNA, 122 bp, Homo sapiens
gctggagccagccccctctgctctgtgccagggaggccgagagagccctgctggcagaggcgggagggggtgcgagaggaagggacagcaggcgggcctcccctcccagctctgggctggca

SEQ ID NO: 317564 - DNA, 122 bp, Homo sapiens
atgaggaaggagatgtcaaacagcagggcccggacggaggccggtttggctgtggaaggacgggaaggctgagctcccagacgagggcaggggggagcccgtgtctgggttgacagggatcg

SEQ ID NO: 317565 - DNA, 122 bp, Homo sapiens
ccgcacgcgcagccaacccttggcaagcgcggcgggacacggggctcctcccagcgtcggcgaggcagcaggctccggcacctcgactcctctcggggagtacccctccctactttgctggg

SEQ ID NO: 317566 - DNA, 122 bp, Homo sapiens
cagaagagggccttgatgtacacacgtcggtactcaaggttagcttcttccaaccgtgttcgggaacacttgtcagaactacaattgacaagtgtttccaatatggctggtctcgcctggat

SEQ ID NO: 317567 - DNA, 122 bp, Homo sapiens
gatgtccctccctctcgcccctgcaagtttactgtccgcggggcaagcctcacagcaccacgtccctaagagttcaggacctggggaggggtctgtccacacactcgggcgctccgcttcta

SEQ ID NO: 317568 - DNA, 122 bp, Homo sapiens
aatagtctaattatctttgtcccaggttttaggttacttgggcacattatttatgtgcatcgcaataatgtgatttcagtctatctctgtctccattctgcatagagaggtgtgacaaattt

SEQ ID NO: 317569 - DNA, 122 bp, Homo sapiens
cggatggaaacggacacactgcgctgccccagcggctcagactcgcgcgcgctcgtggggcgagacatctcttggcatctcggatccagccctggccattcgcttaactatccatccctcca

SEQ ID NO: 317570 - DNA, 122 bp, Homo sapiens
cctaacaagagtgtcataatgggagctggtacgtgccagctttagtccccaggcattcagcgggtgcttaatagatgatggttgaatgaggaggaaaggatgcagagagtgttggtcagcta

SEQ ID NO: 317571 - DNA, 122 bp, Homo sapiens
tcataacttcttcacttataaaatatctcataagtttgggcttagcccagtgccttcacacgactgacagctgtcgtaattccagggcttaaggactagggtccaaagtcacatctcccaac

SEQ ID NO: 317572 - DNA, 122 bp, Homo sapiens
ggaaatccaagttacccttttccccctcactgcaggcattccccaggtttcaggaatcaacgcctgcatttgctttcatcctttctcttagccagtggtcccctcaaccacggctatctctg

SEQ ID NO: 317573 - DNA, 122 bp, Homo sapiens
tgagaagcagattcctttcgggagaggagtctccttaggtgagtatctctactcttcttccgatagacctgtttctccccgctctgcaggcagcctaggagaggttggcatcccttcccgtt

SEQ ID NO: 317574 - DNA, 122 bp, Homo sapiens
gcaaaccctccaggggcaagagttcagcctctaggttccgccaatttcctggttgctaaccggcttctgtaccagaccggaagcggtatgtcttcactgcaagaggaattttattttgctcc

SEQ ID NO: 317575 - DNA, 122 bp, Homo sapiens
gtccttaaaagagaaatcctcccaagtggcaaacacgcaatcctagagagcatgggctaccgcaccaccctgtgtgaaggccggcgtgagcctcaggccaggggccaagaaggatgttagag

SEQ ID NO: 317576 - DNA, 122 bp, Homo sapiens
taccctcttccgcccctctccgaggggctgctgcaccagccaatcgggaaccccgatgcgcgtctgttggctgccactcagctgtcaaccgtcagtcaacagtctgctggccacgggccccc

SEQ ID NO: 317577 - DNA, 122 bp, Homo sapiens
cctctcgccttctcctcgagacccgggttaagtgggcagagggctccgagggtcctctcccgccgtgggattgcacagagggctgggtccgcaggctggctaaaaggacctagcccaggatt

SEQ ID NO: 317578 - DNA, 122 bp, Homo sapiens
gccattccctttctacattacctctcagtgctgcctctcaatctgtattttgttgattttcgtcatgattgccgtaaataacggagggaacaagtgtgaagacaggaaaatgctgaatactg

SEQ ID NO: 317579 - DNA, 122 bp, Homo sapiens
gtgagtcattcagccatgctgccagctgtgaacaattcagtctggggaaatacaaagagacgtggtccctctcagagtttccattcccacatggaaagctggtgctgggaagtggctgggca

SEQ ID NO: 317580 - DNA, 122 bp, Homo sapiens
acctccaacaaaatgtattccatgtattagaaaaaaggaggtatgcctaacattgtgtcacgttccaaaggtgaattttgcaggtcaacgatatgacagttcaaggaagcatacattttatt

SEQ ID NO: 317581 - DNA, 122 bp, Homo sapiens
ttgctgcttggcacccactgggggccagggatgtgaacaaacctcatctaagctggctgccgggtcctaatgggcaggtccggtccgccctctaggagaggtgctgtccggtgaggcataaa

SEQ ID NO: 317582 - DNA, 122 bp, Homo sapiens
ttggctgcaccggtgtgtggcccgctctcacccaggcacagccccgccaccatggatctccgtgtacactatcaataaaagtgggtttgttacaaagccgtgtccttgcccatgtgtatttt

SEQ ID NO: 317583 - DNA, 122 bp, Homo sapiens
aatcttaacatactgcttaatagcctacttttaagctatctaagctattcattttgtttccgtgttttttttttttttttttttttttttgagatggagtcttgctctgtcacccaggctgg

SEQ ID NO: 317584 - DNA, 122 bp, Homo sapiens
ttcagttaaggaaaggcatcttcagatgttcagaccagaaacccttaacccattgaaatccgtactctaggggccgggcgctgtggctcacgtctctaattccagcactttgggaggccaag

SEQ ID NO: 317585 - DNA, 122 bp, Homo sapiens
tccgggacaatcggtttctgaccttgtctctaaatccttgtggtcccccagtggagcccacgtgcagggatcgtgagtcagggaccggactgggcatgctctgttcagcttgctagcagatg

SEQ ID NO: 317586 - DNA, 122 bp, Homo sapiens
aaggcacgcgcacgacaacgcctgcgcaccacggaacagggcaaaagggtgacaaacatgcgccactgagttttatcgagcagccgatgcccagaaaacaggcatccgcacacagactcagt

SEQ ID NO: 317587 - DNA, 122 bp, Homo sapiens
gccttcagggaacatgagaaggaggtgcagaaccggaagagaggcaagaggccgagaggccggccaaggaagctcactgccatgtcctcctgcagccggcgctccaagctcaaggtgggtgg

SEQ ID NO: 317588 - DNA, 122 bp, Homo sapiens
ctaagaggccctgggtagtttataggcacactcgccaaacactgccatctgtacttgttacgacatacaatgcaatgcatcagttaacaagtatatacaaatgtttggccttccatattttg

SEQ ID NO: 317589 - DNA, 122 bp, Homo sapiens
ccgcgccgtccgcgggtgcattggccgggtgcctctagcttcccggacacccggagcttccgcctatccagcctccctcggccaaattgctgcggagcccgtcgtcagggggcgccaaggag

SEQ ID NO: 317590 - DNA, 122 bp, Homo sapiens
cgacccgagcgggccctggggtgaccgaggcacctatttttagccaagcctgagggcccccgggagggaaggcggattaccgcctcctcggccggtggacggaggcagcgcgtctccggcgg

SEQ ID NO: 317591 - DNA, 122 bp, Homo sapiens
agcacaaaggccacaatgagcagcggcggcatcacctgggagatggtgtccccctcgatgcggcagcacgacccgttgtacatggcggggacagagcaagtgtccgggtgcagagcagccca

SEQ ID NO: 317592 - DNA, 122 bp, Homo sapiens
tatgattatgtactagaaagacagaagcgcaagtaagtactagaggaattgggaagaagacgggtgtctgtgtagctgggaaaatattatatttggtagtagcactggagcttggacagaga

SEQ ID NO: 317593 - DNA, 122 bp, Homo sapiens
ctcacgtacccagctccaggagctccttcacgatggcttttccgatgcccgtggccccgccggtgacgatggccacttggccctgcagcaaaccaggcgccaggtagctcctgcccttagcc

SEQ ID NO: 317594 - DNA, 122 bp, Homo sapiens
cactcccactgtcgccactgtcacctctgctgggagcctccttagatgactccggacgtgcggtccagtcctcctgcatggtgcctaatgggcactttaaaatcctctgaccacccctctcg

SEQ ID NO: 317595 - DNA, 122 bp, Homo sapiens
atcacatactcagataaaaaattcaagtgtctctggggccaaacaagtaaagtaaatgcacggaaaggctcagttttaagattttttatagaggtgtggctctcaaccttggctgcacacag

SEQ ID NO: 317596 - DNA, 122 bp, Homo sapiens
acccccatggacgtgatcaagtcgagactgcaggcagacgggcagggccagaggcgctaccggggtctcctgcactgtatggtgaccagcgttcgagaggagggaccccgggtccttttcaa

SEQ ID NO: 317597 - DNA, 122 bp, Homo sapiens
agtaatattctcactcaattaagagaaactcactttttaaaatgcgttattacaagcaatcgctttagtaataaaatgttggctgccactgttaagaaaataatttggggaggaagaaaaga

SEQ ID NO: 317598 - DNA, 122 bp, Homo sapiens
gtatctacaagaagtatgaaattgctagatagtattatcagtgatgaggtacggaaatatcgggcatgagactatctgactctggcagtaaaaagactgtaactctgtgactttgcctcctt

SEQ ID NO: 317599 - DNA, 122 bp, Homo sapiens
tctatcggacagaattacgcatctgtctgcaaaacagctcaatccattctttagtgacaacgatccagaaacaagagcataaggacgcgcacagacaccgtgaggacggagcagggacacgg

SEQ ID NO: 317600 - DNA, 122 bp, Homo sapiens
agagatggcagctgggcttctcttaaatcagagtcggcttctgctctcagtctctcctgccgcctctggaaaactccactgaacactcgggaaagaatgagagtgaaaaagcaaatggcgtc

SEQ ID NO: 317601 - DNA, 122 bp, Homo sapiens
gggagggagaggccgggccggagaccgggggaggcgggaggagagagcggcgcacggcggcggccacttgttgcttagatcccaggaacttggcgcttcctgcccttgtccccactttacag

SEQ ID NO: 317602 - DNA, 122 bp, Homo sapiens
ccgctctggcagccgccgtgatggggccaggccgagttgcctgctggcagaagagcagtgcggtcggacgtgaaggggtgggcagagagggaacccaaggcggagctgggcctggggcggtg

SEQ ID NO: 317603 - DNA, 122 bp, Homo sapiens
cccggccacaaccccagtgctctggtgaggacttagaggtacccaaaagcccaagcccaccgctggctgagcggcgtcgtcatggcaacccggccgggagaggcgcgggttccgcatttcag

SEQ ID NO: 317604 - DNA, 122 bp, Homo sapiens
ggatggctcagcggccccagccaggcagccaagtcctcctcaaggtcaggctgtgtttagcgtgttccccaagtgtgggaggccaggagcaggggtgggttgtggaatccgggatgccacgg

SEQ ID NO: 317605 - DNA, 122 bp, Homo sapiens
gtcagcacacggtgaacctggatttcatgaattcgtcgttcaaccaccgccaacgtgcaccgtcccatcaggcattatgcaaagggcatctttcccaccaagagcttgccacccagactggg

SEQ ID NO: 317606 - DNA, 122 bp, Homo sapiens
gactgcgctaacaagggggctggcacagagtaggtacaccttgagattggccccctccctcgacggggcgggtggacgtggagccacagttcctcctttgctggggggtataaatccgggta

SEQ ID NO: 317607 - DNA, 122 bp, Homo sapiens
ccggctggaatgttctttgtctctctggtaaatgtctattcatcattcaagaccacccttcgcccctccccttaattacttcctcccctgtgcgccctcaaattcttgtactcattcaagca

SEQ ID NO: 317608 - DNA, 122 bp, Homo sapiens
cctcccgtcacccctctacggacaagaacgtcctctctcttggaaaagatgcaggttttacgtttaatgagaaggtgcccacagttcaggcttgcaactaagaagtttggtatcagtcttaa

SEQ ID NO: 317609 - DNA, 122 bp, Homo sapiens
ggcaaataatgagcagcctccttccgttcacacccattttactggtattgattcaaggttcggctggatgctaggtggcaggaaggagggaaagtactagctattgcttcaggacagagcta

SEQ ID NO: 317610 - DNA, 122 bp, Homo sapiens
gaaaaaaccaccaccaggtcctcctagacattggtagttgtgtacgtctctgcagggagacggggatgaaaacactgcgttacttaggattacagctggtctttttttttcttctgaaaatt

SEQ ID NO: 317611 - DNA, 122 bp, Homo sapiens
catatagctcaatcccttaaccggcctgcactctgcaattgctcattaaatgaacaattgcgggtataaaatgccttttatgttcaaggtctggatataagataagcattctaggactctaa

SEQ ID NO: 317612 - DNA, 122 bp, Homo sapiens
cccttcgtttcatgctttaaattatagctcggcccagaggcctcagtgccgtggtgtgaacgtgcttccttccacggatccttcttcctcctcgcggcctcccaaagcacctggctgagctt

SEQ ID NO: 317613 - DNA, 122 bp, Homo sapiens
gacccgcgccggccctgcccagcgttcctcctgcacgcagccccatcgtcgccgccgccgcgggactcgccgcctccccccggccttaactccggccgggccataccattccgcgcggccgg

SEQ ID NO: 317614 - DNA, 122 bp, Homo sapiens
ctgggtatgtggagggaaagggcgggagagacacgtcgaggagggctccgcacccaggcccgcacgcacacccgccacccttacctggcacagcggcaccatcccgcctaggacagcgggac

SEQ ID NO: 317615 - DNA, 122 bp, Homo sapiens
tcggcttcttccctggcccttacattgccaatgtgcacctcagtcaccaaaggcaggcttcgcctcagcttcccaggatggccgtgcccctgagatgatggcaccagccttgccagggagcc

SEQ ID NO: 317616 - DNA, 122 bp, Homo sapiens
cacagtacaggaagagagtgagacaggtaaaaagagattgcagaacagcgtggtaggggacgaaagagaagtggttcaagtactacaggctgtactcagaaagaataagggagaaactttta

SEQ ID NO: 317617 - DNA, 122 bp, Homo sapiens
taaacccctttcaaaaaacaagggaaagcttgagccctcaatatagggcgacacacggagcgggtgaccgtgcaggtacaggtactgtactgatttaaagtcaagcactagagatagtggat

SEQ ID NO: 317618 - DNA, 122 bp, Homo sapiens
tacaaaccactgggagccaggaatcacatcttgtatttctgtattcaccacaactaagcacgtttggttgtatggagaagggggaaagataaatgctttaagatgaatattaacagcatatc

SEQ ID NO: 317619 - DNA, 122 bp, Homo sapiens
caagaagctggcagaagggaaggggcgggacatcagttcaggatctcaaaccgcattggtcgtctgcctcggctgagagaggcgatgcttgaagttcattggtctttgtgagacagggtaag

SEQ ID NO: 317620 - DNA, 122 bp, Homo sapiens
gaaccggggacctcttgatctgcagtcaaatgctctaccactgagctataccccctctgccggcaaaccgaccgcacgtagtcgtttagtggtattgctgcgcaggcgctgtgtggcgttcc

SEQ ID NO: 317621 - DNA, 122 bp, Homo sapiens
aatactagtcagagctcagagcccctggaaggtgcttaagttagctggctaagaagacaacgtttaccaggccggccctagcttgggctggggtggggaatgccaagaagggggtaggcatt

SEQ ID NO: 317622 - DNA, 122 bp, Homo sapiens
ggcgcatgggagtgacccaaatgcccactcctgccccgtcaccctctctcctggcacctgcggcttccaggagacccccacagccagctgccgaggcctgggcccggcttacagtggccccc

SEQ ID NO: 317623 - DNA, 122 bp, Homo sapiens
acagtccttactttgttagaaactcaccacacactgttttccacacccttcgcgccatgtcgcatccccacgggcactggatgagatttccaggtgctgcagtcaggccagcgtgtggggtg

SEQ ID NO: 317624 - DNA, 122 bp, Homo sapiens
tatcaaacagcttctgactcctttagcttccatttaaacacacaaacacacaaacacgcacggccttcacaaatagaacttctccaagaaagtggcaaaggaactagtgatagcattctcca

SEQ ID NO: 317625 - DNA, 122 bp, Homo sapiens
agatccaggaagaaagtaaccatgtgaggtgcatgcatggggccacctttgcaacataaccgaaagaataaatgttttgttctgtagcctcgtgcctgtcacacacattactaagggctttg

SEQ ID NO: 317626 - DNA, 122 bp, Homo sapiens
ggtgggagtgtggtgacagcggcggggtgggtggcatggagggcgcagactaaaagctcacggcttccagcatccagtgggagtggaggaggaggaagccgcccggatggtgtgtggctgtt

SEQ ID NO: 317627 - DNA, 122 bp, Homo sapiens
attaatacgtggatgaaatttatagtgctcattaatacttctgaaagacaacattccaggcgttgtctacctcttccctctgcaaatgtggatgggattcaaaacgtgtgtctggctcgcga

SEQ ID NO: 317628 - DNA, 122 bp, Homo sapiens
gcacagaatctgtttcattaatctgctattaatgttttttccccaactcatgttactagacgcaggcgtttaactaccatgttttgttattgaaaactttttctacttgaaggctttttttt

SEQ ID NO: 317629 - DNA, 122 bp, Homo sapiens
taacctcttttttcatttcaaatctctctaatctggaaaaggccctgtctccccagaggccggggacccggcagcggcctcgccacccgctctttcccagggatcgaaccccgccggccccg

SEQ ID NO: 317630 - DNA, 122 bp, Homo sapiens
tactctgtggatattacacagaaagtactaattttttctttctttttattattttaaagacggggtctcacttcttgtccatgctgaggtgcagtggctatttataggcatgattatagtat

SEQ ID NO: 317631 - DNA, 122 bp, Homo sapiens
ctttgacaaagatgaacgggagaaactgtgtcggatagtcataattgatgactctttgtacgaggaggaggaaaccttccatgtccttctgagcatgcccatggggggaagaatcggatcag

SEQ ID NO: 317632 - DNA, 122 bp, Homo sapiens
cagaacgtaacttagtgaatatattaaaactaaactttctttgaatgggagtaatttctacggattaatctgtaatctcttagaccacacctaaggtaatgtagaggttgttgtatcatagg

SEQ ID NO: 317633 - DNA, 122 bp, Homo sapiens
cccaaccatctccatgggagggcattaatctattcaagaagaatctgccctcaggaaccacgcacctcccactaggccctatgtctcaacactgccacattggggatcaaagtgagaaaaca

SEQ ID NO: 317634 - DNA, 122 bp, Homo sapiens
ggaggacgacttggtgacagtctggtcctttgtagactgccgagtaatagccagaggccacgggcacaagtcctgggtcagtgttgtagcgtttgacccttataccactagtgtagaagaag

SEQ ID NO: 317635 - DNA, 122 bp, Homo sapiens
gcgcgatgaccctcaccccccgctaacgccgcatagtaggttttctccgtctccctgcttcgcctgtgatgtgggctaattaaatattttattgttgttcttcaggcaccgcatcagcctgc

SEQ ID NO: 317636 - DNA, 122 bp, Homo sapiens
gcttccggtccttgagcccgatgtaggcgtgggagccgtcgtggtactccaccacggccacgcggacccacttctgggagatgcgcagccgctccatcatgtccaccacaaaggccttcagc

SEQ ID NO: 317637 - DNA, 122 bp, Homo sapiens
cccctttcccagatcaaaaaccatgtcagcagacacggtcaaaagtggcgcttcctacttcgtgaggagacattttaaagggcagattttttagctatgagtggaggagacagagtgtgctt

SEQ ID NO: 317638 - DNA, 122 bp, Homo sapiens
agggcccctcctagccaccctcttccaatcccacctcagcgctcacctgggcggggctggcgctatccggtgcccacttggcctctgcccggccgcccaggatccctgccttccaccaggcc

SEQ ID NO: 317639 - DNA, 122 bp, Homo sapiens
tcaaactcatgagtcctggaggcaggtagaggcacttgtaggctgaggacccgtagagcccggtgtgccctgcccaagccccacctgggaatggagttatctctgtaaagatcttgctgcct

SEQ ID NO: 317640 - DNA, 122 bp, Homo sapiens
ccgagaggctgttgtagcgcagggacaagcccagcaggccggacaggttgtggggcgcctcggtgaggttgagcgcctcgcagtacagcagccgcccctcgcaccggcacagctgcgggcac

SEQ ID NO: 317641 - DNA, 122 bp, Homo sapiens
caggtcccatggggcagccctgccagcccagcccaggctggcccagcttagccacacatgcgccatgaagtaccctttgatgccgctggtgaacgacctcacattttctttcctggttttct

SEQ ID NO: 317642 - DNA, 122 bp, Homo sapiens
ttacttacattcagcctccggttatgctacacactttctcataccctgttcaatagtccccgccccacgttcccttctttaagagccatattctctgttgaagaaatgataaatgaatataa

SEQ ID NO: 317643 - DNA, 122 bp, Homo sapiens
atgacgaggcccaaacaccaccgggaaggcagctgtgaggacgtgggtgtgaacccagcacgtgcactgctccacactccggggacagaaggaaggagctggtggggcagcgagggaggcgc

SEQ ID NO: 317644 - DNA, 122 bp, Homo sapiens
gggaagcgcctcttgccccgacaccctgacctcaccctgccgccgagggcatacgggcagcgaccagctcaggcaccttccttatccagaaagagccgagctgggaagccccaggaccctgt

SEQ ID NO: 317645 - DNA, 122 bp, Homo sapiens
gagtgaaagactagcactgcaggcaagcaacgtccccagaaccaggattagaaatggtgccggaggccagacacggtggctcatgcctgtaatcccaacttctgggaggctgaggcggacgg

SEQ ID NO: 317646 - DNA, 122 bp, Homo sapiens
aagcagctctctcggctttcggctcggaggaggccaaggtgcaactttcttcggtcgtctcgaatccgggttcatccgacaccagccgcctccaccatgccgccgaagttccaccccaatga

SEQ ID NO: 317647 - DNA, 122 bp, Homo sapiens
ggcacatatttctttccacccatccccaagatcgcaagcgcaaaacctcgcacagcctcacgtttcccaccagctcagacatgcacgctggcggactttcagcggctcacccgtgtgcacac

SEQ ID NO: 317648 - DNA, 122 bp, Homo sapiens
ttaaaaacactgagtttcaagtgttttgcttaaaagaaaatgagtagtgtgaattgagtacgtgctgttgttgttctatcgcttacaatatggagccagcatcttttagatgccttctcaag

SEQ ID NO: 317649 - DNA, 122 bp, Homo sapiens
gagatgctaccagccggcgagatcggcgcctctcctgcagccccggtgagacggccctggcgtccctgggaggggacattggtggcccattgaggtggcacagacctcccgggggagatagt

SEQ ID NO: 317650 - DNA, 122 bp, Homo sapiens
tgtgtgcagagcatgacttcgatgagctcacacacggcgtttggaggcactaattaactccgtcaccctcatagcgccatctccgggaggccaaaagcgagtagcatcttttcacatccttt

SEQ ID NO: 317651 - DNA, 122 bp, Homo sapiens
ctcctcgcgtggtcctggccgacgcatgtccggcagtgacgagtgtcggcctggtggctacggccaccatctttcttgggtttggtcctgttctgtaattttgtgctgtgaaagggtcgtgg

SEQ ID NO: 317652 - DNA, 122 bp, Homo sapiens
cacacgaagtccggaactggtcttctgtgattttcattcgccctggtctctgttccctttcgtactcaaagctcgtgcatccagggaggggaaaccggagatagggtcttcgggccccgggc

SEQ ID NO: 317653 - DNA, 122 bp, Homo sapiens
tgtgtccacgtgcaggacggagcatagtcacaggctcggtgaccgcagacccggctcccacgtgcagaatggagcctcagtgactgtgggtagcactcaggccagtggccggctgggaagat

SEQ ID NO: 317654 - DNA, 122 bp, Homo sapiens
aaatgttgttaaacacttaaagagctgattctgatctatttttataagagatatcactttcgccaaaatctcggatattaacttagagcaaagatttaatagttttaaaaaatcagccataa

SEQ ID NO: 317655 - DNA, 122 bp, Homo sapiens
cggcgcaggtgccctcggcctgagtcgggatggagctgcctgctgtgaacctgaaggtggcgacgggctggggggagggtcccctttgcgggaggaagtgggacatttgcattttcccggaa

SEQ ID NO: 317656 - DNA, 122 bp, Homo sapiens
actgaatctgttgggtaggtgagaggggaatgagaaaagctctgggggaaatactctatacgtacattgtctaatagggtagccactaaccacatgtggcttttgagctcttgaatgtgaca

SEQ ID NO: 317657 - DNA, 122 bp, Homo sapiens
acggccaccgtcacattcccaacatcgccaagggacctgcgtttccgagatggcctggaacgacagtaggacatgtatgatgacaccatcaccatcattttttttaaaaaagtgacactgga

SEQ ID NO: 317658 - DNA, 122 bp, Homo sapiens
gaaggggaggagaacttgaacttgtagtcacagaagggtgctgagaactaaccagcaggacggctcagccctgggaactgcagaggggtgaggctggggagagaggaggctggagcagcact

SEQ ID NO: 317659 - DNA, 122 bp, Homo sapiens
cacaaagaagctgattttgctcaaactaaggaagcgctttttggaagtcagggcagccagcgctggaagggcttttccggaggcgccgagggccccgtcagcggccgtgagagtaggagttg

SEQ ID NO: 317660 - DNA, 122 bp, Homo sapiens
tctcttggccaaagggttaagtctcaggggagttggagaggagcgggctcccggctaccacgcccgcgccttgcagggcacctgtgcccgtcgacctccacctcagctcgggaaacgggctg

SEQ ID NO: 317661 - DNA, 122 bp, Homo sapiens
atcccgcgggccgcgccgcgctcagactccccagctgactcctcctctccagtcgccctccgcaccacccactttgggccacccctgctcaagaacctacaatggctcccgagctctcagct

SEQ ID NO: 317662 - DNA, 122 bp, Homo sapiens
cagcggcgcgtcatctgcagggcagggctctgggctccatccgcaggctgcagctgtgctcgcccgggcgctcggtgtgaggagcacccgctcccggtcgtgcccgaaaggggtggcccagc

SEQ ID NO: 317663 - DNA, 122 bp, Homo sapiens
ctggtgcccctgctgggtgtccacgaggtggtgtttgctcccgtgacagaggaacaggcccggggcgccctgcgcttcgccaagctcggctttgagatcttcctcagctccttccaggtgct

SEQ ID NO: 317664 - DNA, 122 bp, Homo sapiens
ggggtgaggcctgataatctgcatttctaataagcacctagatgatgcccatgtggctgacgcttagaggagtaagaacataagtcaaacctcttacctcaggcacatggacgccatctttg

SEQ ID NO: 317665 - DNA, 122 bp, Homo sapiens
tggagaagaccccagcacccgccccctgaggtcttaagggctttggtgtatccttggtcacgagcgctgggccaggaagcagagttcctgagagccaagtctagtggttgagagaggaccct

SEQ ID NO: 317666 - DNA, 122 bp, Homo sapiens
gacccggggtgctctgagaccgccttcggctgggtgggccatttgcagctgtttggagaccggtcgtctttatcccctatatgctaggcctgcgtctcaggtgaccgtgactcctgaagctt

SEQ ID NO: 317667 - DNA, 122 bp, Homo sapiens
tccaccagcgtcccctccaatttccaaattcaacatccccatccccctcccagccatttccgccccacattacagacgcagagtccgcaggccaatgggagctcccagaggcttcaagggcc

SEQ ID NO: 317668 - DNA, 122 bp, Homo sapiens
acttttggcagcaggtcacagaaattcctgactcaactggcttacatagtcagggcaagccgttatttcacataacaagaagtcccagtgcagagtcttgcaggagtgagaaagctgtaagc

SEQ ID NO: 317669 - DNA, 122 bp, Homo sapiens
ctgcattgggtgaatttctggccagcctttatgaagacagaaaatttcctgtgtttttaacgactgtggtaggatctgtgagaaataagttggaatgtatcttgaaaagggaattcaagttt

SEQ ID NO: 317670 - DNA, 122 bp, Homo sapiens
tttcttttatggagaaattcacagtttgaaataatggggttattggcaatgctcttttggcgagatggatgtgaaccacacacccattccaatgccataggccttggcatcttagaggcatt

SEQ ID NO: 317671 - DNA, 122 bp, Homo sapiens
tcgaatcccccaaattcccttcacccagttcctcgcacccagggtagctgccctttggggcgaagggcacaggggaaggggccttagtaggttaattattaatcctttgcgcctcagggcac

SEQ ID NO: 317672 - DNA, 122 bp, Homo sapiens
tgatcagcctggaggacctcaaggtacaaataggaacaaattggcttggagaatgagtcccgcttcttgttctccctgggtgggcctccatgctagggagaacagagatcccaaagtggagg

SEQ ID NO: 317673 - DNA, 122 bp, Homo sapiens
ctggccctgcccaggggtacccgcaccgactgagcgtccccggcgtgtaatgaccgtgtgcgcctgggataatcccttttaggagaaagcaacttctccagcagcctcctcattccgatccc

SEQ ID NO: 317674 - DNA, 122 bp, Homo sapiens
gtcaaagtttcaaggtgtgaactccttggtacaatgatgaggttctgctacatgctgctacgtaaacaaaataccgaaaaggtcttaattttttgctacatggagtaattgtgttcataacc

SEQ ID NO: 317675 - DNA, 122 bp, Homo sapiens
tcccggcccccaacacctggtacccaggcctcagccaggctgcttggcggcccggggctgcgctgaagtctgggaagcaatgtgttgtacgtcacaccgggaagaagggcactctacctctc

SEQ ID NO: 317676 - DNA, 122 bp, Homo sapiens
gctgcttggcgtggggtccgcgaacagaagggtcggcactagcagagaccagcaggcagacgcggagcccgctcaaggctaaagcggccgcacctgctgcctcggaaaggggtaccggagcg

SEQ ID NO: 317677 - DNA, 122 bp, Homo sapiens
cccggccacgctagagcccgtacctagacccgtaggtcgggaggcctgcgcccggcactgcgcagacgcagcgtgctgtgcccagaactcttctgttcccaggagaatcaggggagtcggcg

SEQ ID NO: 317678 - DNA, 122 bp, Homo sapiens
aagagggccggcaaggacctccagtatcagcgaggactatcaggacgtccagctaataaacgactttttcactgtccacactttaattggtttacagccttttttgtttatttatccataag

SEQ ID NO: 317679 - DNA, 122 bp, Homo sapiens
caactgcgcctgagaccttgtttcacctcctgatgtgctgggtgtggttaggcctcgagccgggagctatttgcctcccaggaggaagccagggcagggttccgcggggaatggcggtgagg

SEQ ID NO: 317680 - DNA, 122 bp, Homo sapiens
catcgtcctcctccacaaccaccaccaccaccaataactggcaccgaacacagggcattacgtaatgcggacaaaaatgcttgtaaatgagttcatgtcacagacactcagaagtttgcccc

SEQ ID NO: 317681 - DNA, 122 bp, Homo sapiens
cttgctcagtaagaattttcgtcaaccttctgtaccagcttactgacagcaggcaactgtcgctgagaacagagtaagacgcaaattacgacatcattgcaagcaaaataaccccatataaa

SEQ ID NO: 317682 - DNA, 122 bp, Homo sapiens
gggccgcgctccgggagggaaaagggactgcagaccccctgtccgtgctccctgctgagacgccagccttcttctggaggccccttgtttcgcgtccctaccctaggctggatgggtaaaga

SEQ ID NO: 317683 - DNA, 122 bp, Homo sapiens
cccacagactcagaccttggagaacagacacctggacacacacactcagatacagacacacgcagcaccctcatagaaacacacaacggaaccggggtgcacctggacacacagatgtggac

SEQ ID NO: 317684 - DNA, 122 bp, Homo sapiens
agcttttccgtgaaccggcagctgtgtcccttgacgtgctgagagggcctggctgtgagccgcatggtacgaaccttctgaatgcaagtggccaagccggcattctggctgggctcgctggc

SEQ ID NO: 317685 - DNA, 122 bp, Homo sapiens
tcatgggctctgcgaagtactgcaggcacacggggcaggtggtctcctgctgcaggcactcggccacactcccggaggccatggcgccggcctgcgggggcgcacgggcatgggccccggcg

SEQ ID NO: 317686 - DNA, 122 bp, Homo sapiens
gcggtttcccagcgcactgctggaagtgtgctccagtagacagggtgtgggcaagatgcgcgggcagacagtccgcactcgccacatgtgctggggtgcgagatctagatctgcgccatctc

SEQ ID NO: 317687 - DNA, 122 bp, Homo sapiens
tgaggcacagtgcgtactccagggccagtgcctttggggagccccgggccaggggcagcacgatgctgccgtcaatggagcgccactcgcactgccggcctgcgggcagcacctagggttag

SEQ ID NO: 317688 - DNA, 122 bp, Homo sapiens
tgagcgaggaagagctgccctactacgtggagcttccagacaggacggcccacggcgccccggacagcagcgagcacaccgagtctgcagatacaagctcctgccacacggacagcgagaac

SEQ ID NO: 317689 - DNA, 122 bp, Homo sapiens
cattttacctatgatggtggtaagcttatggcatcaatacccaccttacctaattgttcacgtgagctgctgaacacttagctaccctgtgacaataatttggctccaatgagcctaaattg

SEQ ID NO: 317690 - DNA, 122 bp, Homo sapiens
tctttccagcgtctcggacctgtgcgccccgccccgcgctggactccgccccggggtccccgcctgcctcctagtccaggccaagggtggatgcccagctcccccaccccaccgcgtgctct

SEQ ID NO: 317691 - DNA, 122 bp, Homo sapiens
ccacctggttcctgcgtgctacggccctgtgggcctgggagctgcctctgaggaacacgccgcaggtatggggggctccggggcaggcggggcgtggactggccgagcaggctgctgtctgc

SEQ ID NO: 317692 - DNA, 122 bp, Homo sapiens
ccgcgccggcgccctcgctccacaccgcggcgtccggccctgggctcccgccgatgtccgcgtgggacttttaggggatttgtttatttttgtacgttaaccacactagaaacggccccaga

SEQ ID NO: 317693 - DNA, 122 bp, Homo sapiens
gcctcacggctcgcttgttctggctgatgtcctttttgtgtttcctcttgaactcctccacgaagtggctcacaagcctgttgtcaaagtcctccccacccaggtgagtgtccccagcagtg

SEQ ID NO: 317694 - DNA, 122 bp, Homo sapiens
ccaggcctgtactttatttctcctccgcgggcctctaggccaaatgcctggatgaatctgcgctcagggggcgtcctggaattacacttgggagagaataagaaaggaggaggccgatgtgc

SEQ ID NO: 317695 - DNA, 122 bp, Homo sapiens
aaagaactggggcctcaccggctgctgggttcttcccagtggaagtcgactggccagctccggaagtcaaagttgtagttggcaagctgcctctgcagtgggcacgagaggcaaaggggtac

SEQ ID NO: 317696 - DNA, 122 bp, Homo sapiens
cagctgtctcccagcccacctcctcagcgctcactgccagagagcggggcggccagccagcgcctgttactccaggaagccactgcccaatccccagcctgctgggctgtgctgctgacacc

SEQ ID NO: 317697 - DNA, 122 bp, Homo sapiens
ccccttcctgggctcccgaggctgcgccccgggcctcgcagacgaccccgcctgcagacccgggccgcagtgacgcagcctcgactacagccaacccgctggcccgaccctgcccccagccc

SEQ ID NO: 317698 - DNA, 122 bp, Homo sapiens
agtctttggactgacctttgtggctgaggcaagcagggccggtggctgcggcggtggcggcggcggcggcggccggcagaagtgcggttttcttggccgccttcttctccttcatccagggg

SEQ ID NO: 317699 - DNA, 122 bp, Homo sapiens
gcagctcgcctcggaatgacctctgacggaagaaataaaacggggcctgggacgcttgcacgaaagaacccgacaaaaaccagagcccgcactcactctcgtactggggaggtggacttcag

SEQ ID NO: 317700 - DNA, 122 bp, Homo sapiens
ggggacgaccggtggtggggaggtggggggaaggtcaggaactgagatagaatttatcagcgtgctggctccgagtctgcagctaggatgccctttagccacaaacagctataaaagaataa

SEQ ID NO: 317701 - DNA, 122 bp, Homo sapiens
gagaccggttagagcggaccctggggccaggaaatcggggactgggaggcaagctgcctgcgggatttggaatccaagctgcaccaccacccttacccccgggcaggttatgtaatctcagt

SEQ ID NO: 317702 - DNA, 122 bp, Homo sapiens
gcccttggcgagcagggatcacatctgattcccctctctgagaaccggcaggtggggagtcggtcctcgtgaaatgaggaggattaattaacggaagctgggggtgcgggacaccaggcggc

SEQ ID NO: 317703 - DNA, 122 bp, Homo sapiens
gcggtggtgccgcccagcccacctccccccaccggagtcaaatgggctcgtgtctcctggcgacaagactggattcccagagcaggcctggagggctctcacggcacttgttaggacaggct

SEQ ID NO: 317704 - DNA, 122 bp, Homo sapiens
gctgctgctcttgaggcggctgcagcgtttttcagaagagccgcggccataatcacaaggcgtccgcctcccggcccgggagcccatcagttattatctgcagcacaaacacctaccacttt

SEQ ID NO: 317705 - DNA, 122 bp, Homo sapiens
tccaacctctcagacagcggctctgtgaagcggggcgaaaaggacctgcgcctgggggaccgcgtgctggtgagtgcgggcagtactgggctctgggcccagcttcccttccctcccctgct

SEQ ID NO: 317706 - DNA, 122 bp, Homo sapiens
ctctgacactacctttgccattcacctgtcccgtctccaacattaaagcttttgggtaggcgtgtcatttgtgtttatgactctcagtgtgcttatagaattaacagcttaaaaagtccttt

SEQ ID NO: 317707 - DNA, 122 bp, Homo sapiens
ctttaatcaattcccaaatgattcgtgtcatttcatctccttgcatctctaccacagaaccgccactgatttttttggacattttgacttcaataaacctaaaaagaaaaaaaaaatacatg

SEQ ID NO: 317708 - DNA, 122 bp, Homo sapiens
gtgctacggcaccccaggatcaagcctgctgagggggctcgggctggtggccagcaggctcggctgaccagcaagtgggtggtcccgaggcggccaggcagcctgacccaaggcagcacgac

SEQ ID NO: 317709 - DNA, 122 bp, Homo sapiens
agcagtctcctcaggagcgccgccatgtgggatggaatagcacacgtgggcttctccctgcgtcacttccggggactgcttccagccaatcggcctccgccacagccagcgcagccttgccc

SEQ ID NO: 317710 - DNA, 122 bp, Homo sapiens
gcgtgggggcacgggcctgctgggaaggagtcactgcttggagctggacgtgtgggccgacgtctcttgcctgagctctgcgaagtgacttcatctgcttctggttcaattgctagatagtt

SEQ ID NO: 317711 - DNA, 122 bp, Homo sapiens
gatgcggcggcggcggcggcggcggcggctccgggcggggacccgcgccacgcctcctggcggccaagctgagcaccacgcacccggcgccccccgccccacgctgccccccgccggcgtcc

SEQ ID NO: 317712 - DNA, 122 bp, Homo sapiens
aaaccagaagggacagccaggcagctgctcacagtcaggcctctggccccaaggcaaggccgaagcaggtccgcactgcggccaaggccgcgttcctcgcccgctggagctcccggggactc

SEQ ID NO: 317713 - DNA, 122 bp, Homo sapiens
gtgtgacaaggtagagttcgacctaaatttaaggtaacaggattaaagcacagcgcttttcgcacagcaatacagctgttatgagcatttgctgaaataaaacagcttgatattctcctgac

SEQ ID NO: 317714 - DNA, 122 bp, Homo sapiens
attgtttcaatctgcaaacacatccatttcatccatttaaccatataaacacagatagaacgtggccacctagagcccccaccatccagctacatcagctgcctatcctaaggataggcttt

SEQ ID NO: 317715 - DNA, 122 bp, Homo sapiens
tgaaaaataaaatgttaaactttttcttgtctgttaatatgtgaagataatggatatttgcggagggatagtgtctgaataccatctatctttatagtctgaaaagaacagtactgctgaag

SEQ ID NO: 317716 - DNA, 122 bp, Homo sapiens
gaactccgcctctcgcttcttttgcccaatcctgcagcgtctttctcaccagaaaactcacgaactccgctccctatcagtatggttcggccctcacctggttcatgcccgcattgacaaaa

SEQ ID NO: 317717 - DNA, 122 bp, Homo sapiens
agtctttcctttctgctcagtctctgatgggggtgccattgagcagcaaaatgaggcaagcggtggctctctgaagggccagggagaggatggagcaagataaatataaatgtggataaaaa

SEQ ID NO: 317718 - DNA, 122 bp, Homo sapiens
attatctggaggttggtggctagatgaagcatgtgccccccatgtaaccatggtcattaccgtctcttgttactttacaccctgcctgcatctctcatttgggggacctgtcttgtctgtga

SEQ ID NO: 317719 - DNA, 122 bp, Homo sapiens
tgtcccgaaggggcctagtgttcccagcactgtgcctgctctcaagagcacttactgcctcgcaaataataaaaatttctagccagtcatgctttgctcctgtgtgacggttctttccccct

SEQ ID NO: 317720 - DNA, 122 bp, Homo sapiens
ggcacccagggccctttgtcctactacaacgtcccggccacgccgcgcgcccctgtgggccgagtccccgcccgcactcactcacccacggtggccagcgtgtcaaagtcctgcaggctgta

SEQ ID NO: 317721 - DNA, 122 bp, Homo sapiens
ccgcggccgtgcccgccccgcccccgccttggggagcgcgtcccgcggctcctcactccacgcctgcggccctgcttggagcataccgcccaccgtgaggtctgctgcagcttgcgaccctc

SEQ ID NO: 317722 - DNA, 122 bp, Homo sapiens
aggacacacaggtgcacacacagtcacagacaagtgcacacacactcaaatacagtcacacgcaggtgcacacaaacacacccatatacagtcacgcacagatgcagccaaacacactgaca

SEQ ID NO: 317723 - DNA, 122 bp, Homo sapiens
gcgctgaagacattgctagctgctgtaacagataagtctctacaacttatttctcactcccgaaaaatccaaaatgggtttccatgattggctggtgtttcttgtccacatagtgattcatg

SEQ ID NO: 317724 - DNA, 122 bp, Homo sapiens
ctcggggggccgagaaccgcaggtccggggccatggtagggtgcgggtggagaaatgaagcgatttgtggggaaaaccttaccttgtttataagagctttgaagcagtcacggaaagggaga

SEQ ID NO: 317725 - DNA, 122 bp, Homo sapiens
gtatgctgtatgactacaggcaaattgcataacttctctacgcctcaactttctcacctgcgacatggggattttgattataaaacagactttttgtaaagattaacgggataatgtatata

SEQ ID NO: 317726 - DNA, 122 bp, Homo sapiens
cccccggcaagccccgctcctcacccaagccgcgggggaggagccctcttctttcccgcccggccccggcccccagcaggacccctcccgctcagctgctacagtgggcacgaagaggggca

SEQ ID NO: 317727 - DNA, 122 bp, Homo sapiens
gcccaaggtcacacagtcaagctgggatttgaacccaggaccgtatgattctgtattcttcgcggagaggctctctcaagcacatccctggcccgccgcgatcccgcagcccgggggtggca

SEQ ID NO: 317728 - DNA, 122 bp, Homo sapiens
gaaggggggtggggggtgagagggtgccgtagaccgcggagggtgcacggaggggcaggccgaggtcaggactgccgagaaacagcggggactcatcaggggagaggtggtgtttacagcca

SEQ ID NO: 317729 - DNA, 122 bp, Homo sapiens
tcttttctaacgaagcacaaagagcgttcacaggccagggaatcggctcctgactccagccgccctgcgcgcccagacagagccagagaactctgtagctgcgaggaaagtcggcttgctgg

SEQ ID NO: 317730 - DNA, 122 bp, Homo sapiens
tggttgattttctctctgtagcagaactcctggcacatggctgcaggtgtgtaggtaacccgaagatatctgactcagtgatcactgttttttgggaaatggagaaaaagagctcttagctg

SEQ ID NO: 317731 - DNA, 122 bp, Homo sapiens
ttaccctgggtacctctgaggggccagggcgcagccaccacggtaagggtgactgcagatcgaggggcaggccatgttgctggacaccaccctggctggcgtccctctcggcagggtgctct

SEQ ID NO: 317732 - DNA, 122 bp, Homo sapiens
ccggcaccggggagctgaacgcctgcaggcggaggagctggcattctgtgccggggcacacgtattggaggacgatcacggcaaataggaagagcatcaccaaagctagcagcagcttgttg

SEQ ID NO: 317733 - DNA, 122 bp, Homo sapiens
gtctgtcggtcggtctgtgcatcctggcactgtcagtggcgggtgacccgctgatggcctcgggagggggcgccgtggctgggcggagagcacgagcggcagcactgggtgcggacggtggg

SEQ ID NO: 317734 - DNA, 122 bp, Homo sapiens
agagcacgctgctttccttccttgcccggcggggatcggagccatcgcgggaggcgcccgcgggggttgtaactaattaattaggtgaaatgcaagtatctgctaaccaaggggggtatact

SEQ ID NO: 317735 - DNA, 122 bp, Homo sapiens
gggaggggcagaggaaattcggtcgaaaaagagataaagctgaaggaaataaaattggcacggagtctgggaaagtagtttccctaaaggagtcttagaaatagggttggtctggaacctaa

SEQ ID NO: 317736 - DNA, 122 bp, Homo sapiens
agggcagccgcagcagggacagtgcgagctcccagtgctgggcttccccatttgcatttccgctgtgctagatttctggctgtcccggatgacagggctccttcctctggtgtggggggtgg

SEQ ID NO: 317737 - DNA, 122 bp, Homo sapiens
tgcgttgagggtgtgcagccgctgtgggtacagcgctctgctgtgtctgtcagagctatgcgggttactgtgttgttcaagttctctgtttctttacgtgttctccctagttgctttttcat

SEQ ID NO: 317738 - DNA, 122 bp, Homo sapiens
caggccccacacgcccaggcctgcgctggtcggggaaggaacaccggcgggaggacggggcgagggaaccaagacaggggatgtgaggccccagccctgctcagcgcccatgagcagccggg

SEQ ID NO: 317739 - DNA, 122 bp, Homo sapiens
tgcacacggggatgggccttgccaggccagctgcgacaccacaggcttgctgaaaatagccggtgtttgtttacatggcctgggctgagagcctgatcgccctcaaagaggggtcccctggg

SEQ ID NO: 317740 - DNA, 122 bp, Homo sapiens
gcctctgcctgttcggacccgagccgggcctccacgacacagtccccttgggcggcgaaacggccacatctagctttaggtttgaaaggaaaacaaaatagggggaaaaaagtgggtttaca

SEQ ID NO: 317741 - DNA, 122 bp, Homo sapiens
caatggcaactctgaagagcgagtgtcaggcagcagctctctaaggaggccaccacagtccgcaggagggattggatgggggatagggtgtgaggcagctggtgagtgaaagaccacctcca

SEQ ID NO: 317742 - DNA, 122 bp, Homo sapiens
aagttaaacacggaaaaggtacgttaagggcaccgggccagaagtaacctggcagcggggcgccggggaaggaggtgggggagtgccaggttaactaagtcccggcacaccctactgcacct

SEQ ID NO: 317743 - DNA, 122 bp, Homo sapiens
ggacagcagcgcctccatcacagggaagtgtccctgcgggaggccctggccctgattgggcgccggggcggagcggcctttgctctttgcgtggtcgcgggggtataacagcggcgcgcgtg

SEQ ID NO: 317744 - DNA, 122 bp, Homo sapiens
cgggaggcaaccgggatgtggaaactctcgcgggaagatgcgtcgttgcctcggtaaccgcgtcgcagtcgccgaagatggcggggcgaagtctgtgtctcacggtcagttcaactccaggc

SEQ ID NO: 317745 - DNA, 122 bp, Homo sapiens
tgtggtaggcggcgtcccgccaggcggtgcacacctgcgccgcgcgccccttgtcccggacgtccaggtagccgaagatcatggccagcagctccgggaacaggcatgagatgtgggtctcc

SEQ ID NO: 317746 - DNA, 122 bp, Homo sapiens
ttcctcccagaacttctgcctgggccgccatgactccatactctcctggtttttgtcaggcggtctctcacactggcaggcttccattctttggtcttaattttcgccctcctgcaagctcc

SEQ ID NO: 317747 - DNA, 122 bp, Homo sapiens
cctggggaggcctgggaggcggcgagccaaccttcccatcccggtctcccttattttctacggccttttgaggggagcccttgtgtgaccactatcacaaccctacgcacgcttggagcctg

SEQ ID NO: 317748 - DNA, 122 bp, Homo sapiens
aagtgttagtcattataatgatcattaattgtggcttttagcatagatgaagactggcagcgtacccagatcatacagctggtaaagggctaagtaaaaatttgaagccaaattggattcca

SEQ ID NO: 317749 - DNA, 122 bp, Homo sapiens
cccaagggcaaggctgtcacaggcgaaagacgggttccccttcctctacacccaagccctcggaagcacgctgcaggcccctggaggtgccacagtgctcccagctcccccagaggctgagt

SEQ ID NO: 317750 - DNA, 122 bp, Homo sapiens
acaggcgtgagccaccgcgcctggcatcagtgcatactttttgaagtgattccaagttatcgcccgcttttttcgtgtaacatataaatacatctctgtatctagaaatatccaatgcataa

SEQ ID NO: 317751 - DNA, 122 bp, Homo sapiens
gtttgttgcttacttagtaaaattttggtgtatctacatgtttttcagacattcaatccacgtcaaggaagagccagtgattgcagaggatgaagactgcccaatgtccttagtgacaacag

SEQ ID NO: 317752 - DNA, 122 bp, Homo sapiens
acctactccctctgtcaccgaaaatatcgtgatcaacaggcttagattgtggcaagtgtccgagctcatagctaacatttatcgagtactttctaaggacaagtcactgtggtaatacaagt

SEQ ID NO: 317753 - DNA, 122 bp, Homo sapiens
gattcatctgagagatgaaaggaacggaatgccacaggacaaccctaggggaggagtgcacgacactaggggcttcggaggcacgaggatgcgacatgaacaagcccactcgccgtcagagt

SEQ ID NO: 317754 - DNA, 122 bp, Homo sapiens
cctactcctgtcatggcctttacacggagcaattccaagggtttcctttataaataacgtcgtatctccctaataggaagacgtctgagtaaggtcacttttggtgagacatttacagtctc

SEQ ID NO: 317755 - DNA, 122 bp, Homo sapiens
ctggagaaattgaagtcactccactagtaagagccaggcattggactcaattctgtctaacgccttgtagatcactgggattgctcatttcacctgaaggtggggatgcctcttgttccccc

SEQ ID NO: 317756 - DNA, 122 bp, Homo sapiens
tgagcgacttcatcacacctgcatgaggtcacaagcagtcactagcgcaggggggtgaggcgagttctgggtgaaagaaacggggcggggctgaggccaaggaagaggttggactgtgtctc

SEQ ID NO: 317757 - DNA, 122 bp, Homo sapiens
ttgtcaaataggtgagggcacaggtacggaagcgtcccgcattccctccagattttatcacgctgagacacaaagagaaaaatagctcctggcgaccgcatgaaaaccccgatttcaaaaca

SEQ ID NO: 317758 - DNA, 122 bp, Homo sapiens
atgcgagctccagcaccgcgtctccccggtaggatgctcactgcgctagcgggaggggaccgttaagtattttccggaaccgtttatcagctcggccttggacatatgtccttttacccttc

SEQ ID NO: 317759 - DNA, 122 bp, Homo sapiens
ccctaggtccaggtccccctaggagagctaggagcacatttccagcctggagcaggagcccggcaccggaaagtcagagcagcgcactgcggcgccccagccactgcggagcccctggccaa

SEQ ID NO: 317760 - DNA, 122 bp, Homo sapiens
tgaatcactgtctctgagggcaacaatgcaaattgccaagaaatgcataacaaacaaccacggcacaagactagccttgttgcatgtcactgtgcaccatgaggcatctgatgtttctgcct

SEQ ID NO: 317761 - DNA, 122 bp, Homo sapiens
agactgacttgtgccacagctgcgggagacagcgctgctgcagggcttggctgaggtggccgcgagcggagctgcacgcgcgctcctggggggcgtggttgggatcggcttctgggagcccc

SEQ ID NO: 317762 - DNA, 122 bp, Homo sapiens
tgggggacagagcaaaactcagtctcaaaaaaacaaaaacaacaaaaaaaatgattctgacgcatgctcaattttgagacctgctgctctagctgatggttgttatatctaagattgcagga

SEQ ID NO: 317763 - DNA, 122 bp, Homo sapiens
gcgagaggcttttgtagccagttgcttcccgggtgctttgccaccggtcgatttgccggtcgatttgcgggcagtcggctttctacgagccgtggtatagagacctccttacttaccccgct

SEQ ID NO: 317764 - DNA, 122 bp, Homo sapiens
cgcaccggcagagcgaagttgggaagttggcttcggtttccagacttgggcctttggattcggcgtccctctcctgcgcccccgatccgcagcactgtccaggatccacagctcggaagcac

SEQ ID NO: 317765 - DNA, 122 bp, Homo sapiens
cggcccgcgcggcgtggcttgcactgcggcgggctggggatagtgtctgtcctagtctgacgcccaggcccctagccccggcccgcttagtcgcgggggccgctgtcctcccatccagcagt

SEQ ID NO: 317766 - DNA, 122 bp, Homo sapiens
gctcaaggggctgcaggaagagccggtcgagggattccgcgtgacactggtggacgagggcgatctatacaactgggaggtggccatcttcgggccccccaacacctactacgagggcggct

SEQ ID NO: 317767 - DNA, 122 bp, Homo sapiens
ttgtggagggtcctggatgtttaacagcacagtgccggccccaagggtcccagggcctgccgaccaccagcccttcccagggccaggcagcagccctgcccagagcccagcagggtgtgtct

SEQ ID NO: 317768 - DNA, 122 bp, Homo sapiens
gtctactctatttgaagtttccactcccactccgttttctgttctttttttagaagatctcgaccgtttctttttcatacatgaggcctgaatattagaatcttctacccacctctgaagcc

SEQ ID NO: 317769 - DNA, 122 bp, Homo sapiens
gttgctcaagactgtggtgcggcagaacaagaaccactacctgctggagtacaagaagggcgacgggatcgccctgctcagcgaggagcgggtcaggctccggggccagctgtggaccaagg

SEQ ID NO: 317770 - DNA, 122 bp, Homo sapiens
attactcccaagatcacaggaagtgtacacccccctgtgatattgtacctaatatccagacggagggagaatgatattactcccaatatcgcaggggctgtacacaccctgtgatattgttc

SEQ ID NO: 317771 - DNA, 122 bp, Homo sapiens
aaccactgtattccctagacttagcatgaggcggtttctaaaaatcaaagccacacttagcgtggtaatgtggctttgtaccatgtcaacctagctaagcgggaactacgtttcccagaatt

SEQ ID NO: 317772 - DNA, 122 bp, Homo sapiens
tgggcacggccacgcactgacccagtgttcacgaagggtttgcactggacaaggctcagacgctcatagagtctagaatttcctctgctgtacctacattcaacaagttcaccctgggtcac

SEQ ID NO: 317773 - DNA, 122 bp, Homo sapiens
tgaagtgggaattcaacaggacgccctccagaaacacaatcaatagagagcagagcagctcgactcttccctcaaacttagcataaagccagaccaggcggcgagggcagcccgcgaccgcc

SEQ ID NO: 317774 - DNA, 122 bp, Homo sapiens
gccagccgcacccctccacccccaacctgcccacgtgacccggcctagtttctccaggcccgtccctacgtctcactcgggaagccccgccccacgctgagcgctccgcctgcgaccctccg

SEQ ID NO: 317775 - DNA, 122 bp, Homo sapiens
ccgggcgcaggccagggctcgaaggtggggccgcagcggcacggggcggggtctggggcccgccctcccgacacgtggccggggaccgggtatataaggcccttcggggccggccacccttt

SEQ ID NO: 317776 - DNA, 122 bp, Homo sapiens
tgcgcctcgggtttccatggcagggtttctgtccggcgatccttcggagggcaggcgtaccgtaggcttccctgggaagtttttgagaagggactagaaaagaatagcttcatccaagccta

SEQ ID NO: 317777 - DNA, 122 bp, Homo sapiens
aacgaccaaagactctccactgctctcagagccacagggtgtttggacggagtctcggggcgtgcaccgccggggaaggaaggagcttcctctgccttcacaacgctatctaggtgagacgg

SEQ ID NO: 317778 - DNA, 122 bp, Homo sapiens
caccctcacaccgggccgtggggacagtcctgcgctctgcagcctgcagtgtctgggacacgtcctggccccactctggggcacagggggagctcaccctcctcgcccctagatgctcagag

SEQ ID NO: 317779 - DNA, 122 bp, Homo sapiens
ttgtaaaggtgagcagcagcgagtcatgaactgcaagctcttggtaggttttggacgggacgtggctggctgagcttcctcttggctgtgtggagcctcagcagggcgttgtgtttgacggc

SEQ ID NO: 317780 - DNA, 122 bp, Homo sapiens
agcttccctggggggaagaggtgttcccccaaacactccttcctcccaagttttaacaagcgggtgcaggggcacggctcctcaaatccaagcccaatccctcttcctcttcagaatgttaa

SEQ ID NO: 317781 - DNA, 122 bp, Homo sapiens
ttcctcatcactgtcctcttcctcttcctcgctctcctcctcagaaacatcattgctcatcgtaactggtggacacacaagcagtagaaggatggggtgttaagaccagaccgtttcacacc

SEQ ID NO: 317782 - DNA, 122 bp, Homo sapiens
gagatttgatcatttgtcacttgaggtaacggttttgggacaagaaagagaacaaagacgcgtgtgactcaggatgcagtctcctggggcagatttccaaaactcttgcttagttttctctt

SEQ ID NO: 317783 - DNA, 122 bp, Homo sapiens
atctcctcggctcacacaacccagccaccggctcccaccgcgctggaacccctctggcagcgagggtttgtcccagtgcgggtgacgcccggaaaggaaccagtcccaacagcgcaggagac

SEQ ID NO: 317784 - DNA, 122 bp, Homo sapiens
cgagcgtgcggtaacgcgtggtcgggctgctgctagcagtactggaaaggcgttctaaggcggcggcgtcgcgcggctgtggagcagccctgcgagcggcgggttatagcggcaccccgggg

SEQ ID NO: 317785 - DNA, 122 bp, Homo sapiens
acccttcgccccgcccactctagctggctgtgcctgactggctgggctgccgcatattcgcgctgccattggtccataatcagctgggggtgggcgtagggagacctacttcagcaggtcct

SEQ ID NO: 317786 - DNA, 122 bp, Homo sapiens
actgtggggccaggcactttgctaagcactttatatgcattatctcatttatcttcataacgaattaatgaagtaaatgaaaaagacttagagcagttaaataatttgccatagtaagtggt

SEQ ID NO: 317787 - DNA, 122 bp, Homo sapiens
agggaagattggggaacctggttagagggggcgcccattgcctatcccctcggtctgccccgtttgcccaccctctccggtgtgtctgtcggttgcagtgttggaggtcggcgccggccccc

SEQ ID NO: 317788 - DNA, 122 bp, Homo sapiens
taaaacaagtcttgtgccaagtgacactacatttttaaaacagtaagatgtatcaggcttcgcaagagtgaaagattaaacctgtagaaaatctatagtcaaataatttatggtttatcaga

SEQ ID NO: 317789 - DNA, 122 bp, Homo sapiens
ccaaaggacaggaatgaactcagtttgaaacctgagtaacttgtaaccacttcgtgtccacgcacaagtctcaagctaaaaatgtggggagagtttgactgaagtagagttctgaagtatag

SEQ ID NO: 317790 - DNA, 122 bp, Homo sapiens
caggtccttcaggtctcagcttagatctgaagcaagcttcttggggaagggttctttggacgccccctctctccatgggttagttaccatggatgtgtgcttccatatacttttcacattct

SEQ ID NO: 317791 - DNA, 122 bp, Homo sapiens
aggctctgaccctcataatggaggaagcttttagaaaggagccagtgagacgatgatgaacggtaaggacgccctggaataagctctatcagtcagctctggcagcgctaccattcacccag

SEQ ID NO: 317792 - DNA, 122 bp, Homo sapiens
atgagcggctgtattttctaccccttccctctcccaggaactttcccacactttgacacgcgccacggctctgtgcattggaggaagcaggctcccgtggatcctggcaagcttgcagaggc

SEQ ID NO: 317793 - DNA, 122 bp, Homo sapiens
gccccttcattccgtctctctccgccctttgtagagggtcaccatgaagttcaatcccttcgttacctcggaccgcagtaaaaaccgcaaacgtcacttcaatgccccctcacacgtgcgca

SEQ ID NO: 317794 - DNA, 122 bp, Homo sapiens
ctcccagacctgtcattttttctcagcaagagtacaaacacggagaaattcccatataaacgagacaagagccttgcagccaatgaaggccccctctaaagatgccgactttaggccagctg

SEQ ID NO: 317795 - DNA, 122 bp, Homo sapiens
ccttgattttcatccaacctatatattagattctgcatcaccatcctgcgctacactccacgatgtaagccccatggagggcaggaatttttgttcatttgttcactgctgttttcccagtg

SEQ ID NO: 317796 - DNA, 122 bp, Homo sapiens
ccagcaggagggtgagtagcgggggcgggagccgccgccgtcccgttcccccatcccggccgccccctctagaggggactagggatgggaaagctcgggagccagcacctggccccgacgcc

SEQ ID NO: 317797 - DNA, 122 bp, Homo sapiens
gcctactcgcctactcccttattattggctgggacctgttcctttccaaagtgtgatgcccggtgtcctaccctaggccacgcggagctctctcccggcgtgtcgggccctgcgcccctgcc

SEQ ID NO: 317798 - DNA, 122 bp, Homo sapiens
ggcgcttctcccaccaccccgagggaagaggctgcggtctgtgtttctaacagcaaacaccgtcactgtcaacactgatgagtcctgcttaacacaaagacaggtgtgtcgacccaccctga

SEQ ID NO: 317799 - DNA, 122 bp, Homo sapiens
gttaaatggctcagcttgagacaaaagggcacgtaaccccaagtgtcctcacagcaaacgcgcagcaatttcacaccaggacagggacgttttttcacctcacattttctaaatcataaata

SEQ ID NO: 317800 - DNA, 122 bp, Homo sapiens
gtaccacacatgatgcttacggagcataacacggcagggggcggtaacgggaagagcgtccgcaggcccagccctgggataccattctggcaggagaaacaggcaatacagacacagacaaa

SEQ ID NO: 317801 - DNA, 122 bp, Homo sapiens
agatatgagaaccagatttgcattttggaaaactaggacacagtgtgaaaggtgctttcacgaattctatattaaatatcatcatggtcaacgcttgatctggtttaaaaattgagtcactg

SEQ ID NO: 317802 - DNA, 122 bp, Homo sapiens
tttggtgtcatgtgtgtgcatttttgtgctttttcttggtgatttcactgtttataatggcgtctcagcatagtgcagaaatgcaagaaggctgagatgcactttacagagaaaacacacat

SEQ ID NO: 317803 - DNA, 122 bp, Homo sapiens
gggcctgggcgcgaggtctggctttcggggtgttaggctccagggacctcctgcggagctcgcaccctagctctgccgccactgccgcctcctcggccccggaccgccgagggttaacaaaa

SEQ ID NO: 317804 - DNA, 122 bp, Homo sapiens
ccaggtggcttcagtcggaaatgtctgccctcttccaacctcccgatcccggctgcctcgcggatcaggtacgcagcgccccagccgcaggtctggacatgccggacacctggacccacccc

SEQ ID NO: 317805 - DNA, 122 bp, Homo sapiens
ggtccgcagctcggagctccggcagccaggtggggactgaacaccaacgccgcggggaggcgtcgcacatgcgcgctcctaggcggagccccgcctcccacgccctggatcgtcacttccgg

SEQ ID NO: 317806 - DNA, 122 bp, Homo sapiens
atatagaatgcatgcatcagaccctgggataagccctgtatacaaaatgactttcttggccgggtgcggtggctcacgcctgtaatctcagctctcagggaggcaagaggcgggaggatagc

SEQ ID NO: 317807 - DNA, 122 bp, Homo sapiens
tgaactcctcccgagtggctgtcagggcgccatcgaggtctgcagctttgaatcttctctcgtcacgcggcagcatctttttaaaggtgtaatgatctgaagaatcatgaaactccgcgggg

SEQ ID NO: 317808 - DNA, 122 bp, Homo sapiens
ccgtggccgtgcccgagggccccccggcggcggcggcggcggcggcagcggccgcgcccgcgccgagctggttctgcttgtgtaaatcctccagggccttgacgaagccctcggcgaactcc

SEQ ID NO: 317809 - DNA, 122 bp, Homo sapiens
gcgctgtgcgtgccaccgggtacctggacctggatgcccagtgtgtatgcatgcctgtggcgctgcgtgagttatcggggctctgatagcgtccggagcgggttcgagggtctcctccagga

SEQ ID NO: 317810 - DNA, 122 bp, Homo sapiens
cccttatggcgcggtgggcgtggacctggccttcgagcagctgctgtgccgcatcttcggcgaggacttcatcgccaccttcaaaaggcaacggccggcagcctgggtagatctgaccatcg

SEQ ID NO: 317811 - DNA, 122 bp, Homo sapiens
gaggaaaaggtgccagggcgaggctcgtgggcgggtgctgagcttccaccccctctccagcgaccccaggaacctccacgtgctcagctgtcctgagctccatttacgttctctttacaaca

SEQ ID NO: 317812 - DNA, 122 bp, Homo sapiens
agacagaggcgcctgcggaaagttccctctctcaaaaacgccttcagtgtcctgctgtatcgctggcgcctacgacgctgtcattgtcatctcatcattttgcttccttccgggtgatttat

SEQ ID NO: 317813 - DNA, 122 bp, Homo sapiens
gccccggacaccgcgcggattctgcctcccggaggtcggactgcatcctcccgtcccgggcgaggcacatccaggaggagacaaggaggcgaagccccctaggataggtgaagacgacaggc

SEQ ID NO: 317814 - DNA, 122 bp, Homo sapiens
ttctcacctctcctcaggtgagggagcgccctgtggccttggaggctgagctggccctgacgctgaaggtcctggaggccgctgctggcccagccctggaggacgtcctagaccagcccctt

SEQ ID NO: 317815 - DNA, 122 bp, Homo sapiens
caaggggtaggagcaagttgaatatagaattcagccctgctctagagaatggcgtgaacccgggaggcggagcttgcagtgagcagagattgcaccactgcactccagcctggacgacagag

SEQ ID NO: 317816 - DNA, 122 bp, Homo sapiens
gtccagggcttccaaggctggggaagcgtagccgggcggccgggagggccaccgcagtgccgcgccaggctggggccaagggcgccccggccccgggagggcggagccggaggcagcaggaa

SEQ ID NO: 317817 - DNA, 122 bp, Homo sapiens
atttttggtagagatggggtttcaccatgttggccattatggtctcgatcgtgatccgcccgcctctgccttccatagtgctgggattataggcatgagccaccgcgcctggcctgacctga

SEQ ID NO: 317818 - DNA, 122 bp, Homo sapiens
tcgctaggtcccgggtgcaccggagtcgcgcagcgaacgcgccatgcaggagggcgacatcggcctggaggggctgccccccagggaagtccccacagtcggtgagtatccagggcggcacg

SEQ ID NO: 317819 - DNA, 122 bp, Homo sapiens
tgcctgacatgaaacttgacctgagatatgaaaaataaatagatgtcaattggtgataaacggggttgggcccacagttccggtaagaggaagggcatgagtatcattgacttcatgatgca

SEQ ID NO: 317820 - DNA, 122 bp, Homo sapiens
ggacactggaattcactacatggatgaagtgtagtgctcatcatacacccctttacttttcggatgagaatgggaagatcgtgaaactcttccaaggcccagtgtcctgtttgcctcatcac

SEQ ID NO: 317821 - DNA, 122 bp, Homo sapiens
gtggcggggcggctgcgctcaccgccacggccacggccgcgggcggggacttctgcttcacgcctttactcccaggggccttgttggctgtccttggcctttgctcctccttgcaagtgctc

SEQ ID NO: 317822 - DNA, 122 bp, Homo sapiens
caccccgcgcgcctgcagcctccccccttcgtcgctgtgcgggtccgggggacggctccacgtgcgaccctcctagctgcccgggctgcgcctctgggctctggcctctgccacctccgccg

SEQ ID NO: 317823 - DNA, 122 bp, Homo sapiens
ttctacatctcctacatgcaaaacaacaggagcaagttgaggaattctcaagaaactggtcgagaagagagagcgcttagctatggaaaagagaaagaaggaagggagggcttcctggagga

SEQ ID NO: 317824 - DNA, 122 bp, Homo sapiens
attcaattcagagaaaaactgaagatgtataaaaattcagggagttgctcagtcttgaaccgtccagattgctttgttttcctgaatgatggtaaacagatctggagagtttgtcatgggtg

SEQ ID NO: 317825 - DNA, 122 bp, Homo sapiens
gtcacctctgggagcggagtgggggcggagcgagacggaagcagctcaggagacttgaggcgtaggctgcggtccccaaggtgaccgcgccctatgtgggactcgccctaatgcctctgaac

SEQ ID NO: 317826 - DNA, 122 bp, Homo sapiens
gtaaatggatgatcacacaaaggcagaggcatcgcagaaggatgctaactagatgtcatgcgtcaaggatactacagaaggatctctttgctgacaaggagggtacctctaaggttccttca

SEQ ID NO: 317827 - DNA, 122 bp, Homo sapiens
tggcgcgtgcgcgatcgccgaggcgcgctgtccgggtggtgggagctcaacccgcgaccgcggctacgattctcttggctcctgccctcgccttagtcgctctgcggggttggttcggtccc

SEQ ID NO: 317828 - DNA, 122 bp, Homo sapiens
agacctcgcacaaggcgcaggtgctgcaggctgaggcaggcctggtttactccccacctccgcatctggacgccagcgggtgtcccggaaaggggctggcagccgcgtctcggcagagcccc

SEQ ID NO: 317829 - DNA, 122 bp, Homo sapiens
cttgggtggggttttgaactgtgcagctggaagcagtgttttccgagaggcagagtggcacgggtttctttggagttagtcagatcgaggtctgagtcttgactttttaactgactaccctg

SEQ ID NO: 317830 - DNA, 122 bp, Homo sapiens
gtcattccagggagggtcaagatgtccattcacatcaagctgggcttttcttatctccatcgctcatgtcttgtccttcactttcatagtcctccaagaacaaaacccggaatagacactcc

SEQ ID NO: 317831 - DNA, 122 bp, Homo sapiens
caatgtgtggcccaatgtgtggcccacagccaaagtctgtgtgcacagactttgcagtcacgtaagcacatacttcattaaaattgggttggttacttttttcccccacagagaccatgtcc

SEQ ID NO: 317832 - DNA, 122 bp, Homo sapiens
gttagcacgcggagacctgacgagagtgtggctgtgcctagaaccagctccgatgctcctcgttcgaaacacccacccctgtgtgcacagcaccttgttctttcgtgcattttaccctacat

SEQ ID NO: 317833 - DNA, 122 bp, Homo sapiens
caccgcggcctcagtggagcccgttctcttcccttgaagtcctgcttgcgcactcctgggcgtttctggctagcacctttttggcttttagggacgggttagtgtcccttcctcagatggcc

SEQ ID NO: 317834 - DNA, 122 bp, Homo sapiens
ctccaccgctccctcccggaacttggccaagatccactgcctgctcagaaggatgccaggcgtctaagcaccactccagagcactggagcaaggggttttgtgttttaaaagattgctcaaa

SEQ ID NO: 317835 - DNA, 122 bp, Homo sapiens
cgcgcccgccctccccgcgcccctcggcggccccgccgccatccatcccgcggcgccccgcggtcacacttaccggacaattgctggtggccgggatcccagagcggcccccgagacccgag

SEQ ID NO: 317836 - DNA, 122 bp, Homo sapiens
cgggacaacgcagaaggtaacgggccgtccaggaggactaagggcgcgaagcctccgccccgagactgagcttctgcacgcctccgtctccagggtcctctgcaggcccccacattccccat

SEQ ID NO: 317837 - DNA, 122 bp, Homo sapiens
cgcggggggcaggaggagcggctgcggccggcacagcgccagggcgagtgaggcgggtggcgcgggggaggcggcggagtaaagagaggccgccggctgggtccgcgggtcactccgaggcg

SEQ ID NO: 317838 - DNA, 122 bp, Homo sapiens
tctcagcgtgcgcttctagcggagcgcaggtgcccctcccctggcacgccccagcctcctcgcccgccctgcggcagggggatgcccattcgaccccacctccgactcctcttcaggcacca

SEQ ID NO: 317839 - DNA, 122 bp, Homo sapiens
ttgctatgttacccaggctggtcttgaattcctgtcctcaagaaatcctcccgcctctgccgcccagtgtcatgattaaaggcgtgagccaccacacccaactttcaactcccaacccgctc

SEQ ID NO: 317840 - DNA, 122 bp, Homo sapiens
ggtcactaaacaggtaagctctccagagaaccagatcagccacgggtcgggggcctcctccgcgggcgccttccctggacacgtatttactgagtggtgaacggcatcgtgcggcctcactt

SEQ ID NO: 317841 - DNA, 122 bp, Homo sapiens
tgccaagaagtcaaccatctttcccggggctggcactgccttcgcgatttgggacgatgtcgcaagagtctgccgtgcgcctccagtgcctgaacaggcagctgcaagtccgtgggcctgag

SEQ ID NO: 317842 - DNA, 122 bp, Homo sapiens
ggcgcgcgccgggggcggagcggccgctgggcgcgcagaggcggggcaggggtcggggggcgccgcgcgccggggtctctctcgagccctctcaccccctcgcgcgctctcgccaccgcccc

SEQ ID NO: 317843 - DNA, 122 bp, Homo sapiens
acatagtccttccagcagtggcagtaataggtcgccaggtggtgctgtggagcagagctccggagctcagtgagaaaaaaggcgcggccgctcaagggagcacgtgacctcggcctctggcg

SEQ ID NO: 317844 - DNA, 122 bp, Homo sapiens
ttcctgcgagcccctgtcccctggggagctggccgcatactcgctgctgcagtgactgcccgtgtctgggatgctgaacccctcagaatccacggaagtgctgccgtgccccgagtccttct

SEQ ID NO: 317845 - DNA, 122 bp, Homo sapiens
ggaggcggccgggcctgggggccccactgctagggcccgactcagagggcagcccggagtcgctgggccgcaccaccacgaagacccgcctgtgcagaagcccgccgggccgctcggagtag

SEQ ID NO: 317846 - DNA, 122 bp, Homo sapiens
agtgaaaaggcagcttccactcgggacccgcgctgctgcccactcgtcgcgtggctccagcgctgctcctgacctttctgagcaatcagtgtcttcttacaacgttagagcgggaggactcc

SEQ ID NO: 317847 - DNA, 122 bp, Homo sapiens
cgcctcacaatcttcacaaaggcacccatgctgccagtgaagcgcgtcctggcggcacagcggataccatttggagacaggtgcaggggctccaggacaccactgcggcacaggaggccctg

SEQ ID NO: 317848 - DNA, 122 bp, Homo sapiens
caggaaactgtccagtcaccattgctggatgttctacaagtcacggaacccaccgcccagcgtgagccgggacccacacggctcataaacagccccgctggtgaaggaacaggggagtggcg

SEQ ID NO: 317849 - DNA, 122 bp, Homo sapiens
acgcgcggtcacgtgcgaccccggccccgagaccccggtcccgcctgggcccggcctccgcgaccccgggctctgcgttccagccccaggacctcaacccagaccccgcgcctcggccccgg

SEQ ID NO: 317850 - DNA, 122 bp, Homo sapiens
gcaggaaagctcagcaggccgcggaaaaagaaggccctggccctgcatacggggcacacacgaacgaccaccagcgcaaatgaacacatgaagctggctgggtactttgtccccaccagcag

SEQ ID NO: 317851 - DNA, 122 bp, Homo sapiens
cagacagtgaggggcagactagggaggtgtggggcaggagctcaaaactcacagcagcttcggggtttagaagctaaatctattgggcatatccaaagataaaagggccaagtaagggaaag

SEQ ID NO: 317852 - DNA, 122 bp, Homo sapiens
agctccgcccggcagggcagggctaggggttggcctttgccttgcgcccgcctcggagctcgcctgtttcttgccctccagccccgctcctgcatagactcggcccccgtgattccggcgtt

SEQ ID NO: 317853 - DNA, 122 bp, Homo sapiens
ggtgtgcggaaaggctttccgggtgagttcccacctggttcagcaccacagtgtccacagcggagagaggccctatggctgcaatgagtgtgggaagaacttcggtcgccattcgcatctga

SEQ ID NO: 317854 - DNA, 122 bp, Homo sapiens
tgattttcttctggttatttctctgtgttttccaatgtatttataacgaatacatgttggcgttactagtaatagggatcacctaatttctatttgaatcagtgtttgaaaaagtttatgaa

SEQ ID NO: 317855 - DNA, 122 bp, Homo sapiens
aagcctcgtccttgtcggcccctggggcgcagcgccgcagccgccattcgggaggggccgcgtcctctgcctggtctggggattctgcagaccccacccctgatctgcctgccgccgtagtc

SEQ ID NO: 317856 - DNA, 122 bp, Homo sapiens
aggtgcggatataatctcctggtgcgccgttttttaagccggtaggaaaagcgcagtcttcgggtgggagtcactcgattttccaggtgccgtccatcacccctttctttgactaggaaagg

SEQ ID NO: 317857 - DNA, 122 bp, Homo sapiens
cacccacagccccatccccagataagcggggagttccctggcgcggtgccagtttctagccgctgagtgggcgtgtgcgcggctccaagtgcgcctgcgtactgctcactccccagctccgc

SEQ ID NO: 317858 - DNA, 122 bp, Homo sapiens
gaccttacagaaaatccccattcccaggcagcaggtagggatttaacgttcttagcggcccgggtgtggtggcacacacctgtaatcccagtactttgggaggccaaggtctgaggacagct

SEQ ID NO: 317859 - DNA, 122 bp, Homo sapiens
ctttaatgtaactggagtttatccttatgcatgtatgagctggggtctaacttctctgcccgatggagcgccagttatgtcaacaccatttgttaaacaaactgccccaacagaatttaaat

SEQ ID NO: 317860 - DNA, 122 bp, Homo sapiens
ttagaaatctgctgacaacagactaatctgttcctcctgtagctttgccagttctggagacgtgttcttaggggcataggacatgaggttcgtctctttgttttgggaaactgaatctccta

SEQ ID NO: 317861 - DNA, 122 bp, Homo sapiens
ggagccgccgcctgttgcgcaagcagtcgtaggggcgcggccgggaggggcatcggggcccgggttgtgggtcggctctgcagtcccctccgagtccagggcctcggcctgtgcagcgggcg

SEQ ID NO: 317862 - DNA, 122 bp, Homo sapiens
tccactgcaccgtgacttctgcatgttgggctccagttccctgtttacaattgtacacttcgggattttgtgacacatttcaacactggaccgatcagacctctcccttagccattggtctg

SEQ ID NO: 317863 - DNA, 122 bp, Homo sapiens
agattctcctaagtagagcgcacgttggatccctcgcatgcgcagttcacaataggttcacgctcctgtgataatctgctccctcgcctgcccacccacccgccagtacccctggtctagag

SEQ ID NO: 317864 - DNA, 122 bp, Homo sapiens
ccagtctgggaagtgaggagcgccttttcccggctgccatcccgtctaggaagtgaggagcgtctcggcccggccacccatcgtctgagatgaggggagcgcctctgccccgccgccccgtc

SEQ ID NO: 317865 - DNA, 122 bp, Homo sapiens
tcatgatatggggtggggcataggccatgctaaggtcaggtcaggctggagctgctgaaacgtaccaaggtgactcacttccctgataacactgctgagaaaaatgcaggcttcttcttgcc

SEQ ID NO: 317866 - DNA, 122 bp, Homo sapiens
gtcccggtaactacttaggtcccgaacttttttaagtatgcagaagaaccttagaaaacgcgttaggaagggtgaggactaacttgaccttgatctgcttcccgactcaacagaacctagta

SEQ ID NO: 317867 - DNA, 122 bp, Homo sapiens
aaaatatactatttccaacttgttctcagttaacagtaaattctgggcaccttcccttctcgtgaatagaaagattccctgttcttttgatgactgcatagtgcactgtgctgtaagttctt

SEQ ID NO: 317868 - DNA, 122 bp, Homo sapiens
actcttgactccattcactcctttggcctctcataaaggaaatctctgcgaatagccgaacgaggcttgttactgtgataaaacagggaaataagcccagaaaacagagtaacttgcctgca

SEQ ID NO: 317869 - DNA, 122 bp, Homo sapiens
ccccttctcgcccggccccacccctcccaccgcctacagcccggccccgcccctgccgtccgcacccgtccgggagagttggcctggcccccgaggctgtccacaccccagctggtgctggg

SEQ ID NO: 317870 - DNA, 122 bp, Homo sapiens
gtcgaggggtcctgaccagcctgcccgcggggtggggcgggcctggggcagcctgagagccgctccgcctggcgacccagtgggcctccccgggcccgcccagaggcctgggcgggttccag

SEQ ID NO: 317871 - DNA, 122 bp, Homo sapiens
aagaagaggcgccagaggagccgccttctgcctcagaacggcgtgactcggaggtgagagcgcgggcactccctccgcgaaaggcgggggacaccgagccgtcccaaccccgtcccgccccg

SEQ ID NO: 317872 - DNA, 122 bp, Homo sapiens
aggaaggtctcggactacatgaatgcctgaagttatggctctctcaaaagaagccctggccgcagcacccaccccacacctggccggctcatgggaggggagggcccacctcggacagtgac

SEQ ID NO: 317873 - DNA, 122 bp, Homo sapiens
ctggggactatctgctatccccgaaccccccaaccccctccccccacctgtacctctctccgtcaagtttccagggctcctaggaagatctgcctcaggtggagggcccttgagtgtggagg

SEQ ID NO: 317874 - DNA, 122 bp, Homo sapiens
cgaaagcctcgccaggcctgcatccgccttggcttgggagcaatcaggagagacagggctcggggaaggcgagcgctgcccgcgggaggcgattcccagaggcggggaggtctcaggggtct

SEQ ID NO: 317875 - DNA, 122 bp, Homo sapiens
cccattggcttctgctgaacgggagggtgggccctggggcgctccgcttactgattggttcgatgccagattggcaggtccccgccggcagtgcgtgtggtgaggcaggacatggcggaggc

SEQ ID NO: 317876 - DNA, 122 bp, Homo sapiens
gcagctaatgcatatttttgcctcatgcatatttttgcctcacctgtccttcactagtgtcgtgaaactggttggtggtgtctacttacagatacatactgagagagagggtgccttaagag

SEQ ID NO: 317877 - DNA, 122 bp, Homo sapiens
ctcacatctcctccaaggcaaagctaaagttcaaatcaggcctctgtactatgctgagctcgtttttcactcccacgaatgaggattcatttggaagtaaagctttcctctaggtgtcaaaa

SEQ ID NO: 317878 - DNA, 122 bp, Homo sapiens
gttgcctgtagccccagggtgaaggtgagtacagcctcctacaaccccctgactctgagacgcgggctctgttctcccgggccagaggagaagacatgaagagggtgggtgttaggggcgcg

SEQ ID NO: 317879 - DNA, 122 bp, Homo sapiens
ctcatgctcttgttgtgcagagtccttgagacctgcatgtatggtgcacttggagcatctcggtctgggccgggtcctcgtggactgggcgctctccactctgcttctcaggctctgctgca

SEQ ID NO: 317880 - DNA, 122 bp, Homo sapiens
atagctcagcgactgaagggcctgggggcgtttgtcattgacagtgaccacctgggtcatcgggcctatgccccaggtggccctgcctaccagcctgtggtggaggcctttggaacaggtaa

SEQ ID NO: 317881 - DNA, 122 bp, Homo sapiens
cgaggaggaggacagcgagcgcagcagtgacggcgaggaggccgaggtctgtggctggggcgctgggggagacattgcgtctggggacaggactccgggcagaaaggcccctgtgggaggct

SEQ ID NO: 317882 - DNA, 122 bp, Homo sapiens
gatgtgctgtcaaggcagatttatactcaggagtgcgggaggcctggtggcgctccttcccgccctggatcagtgagacacagcctccagtttctgcttccttccgtccatgggcttggatt

SEQ ID NO: 317883 - DNA, 122 bp, Homo sapiens
tggaggagagtcgatgtcggatttagggcggggctgaaccaagcccagggccgcgggggccgtggcttcagcaccgcggagagcgccatctccgggggcggggctggcggggtgggggcggg

SEQ ID NO: 317884 - DNA, 122 bp, Homo sapiens
ggtctgcagcttcactcctgaagccagcgagaccacgaaccctccagaaggaagaaactccgaacacgtccgaacatcagaggaacaaactccggacacaccacctttaagaactgtaacac

SEQ ID NO: 317885 - DNA, 122 bp, Homo sapiens
ttccagtctcttactcttcaattaagtaaatgggaatgattcagccaacaaagttcatgacgataaggtacaagatggtgctagcaaagagaaagaagcaaagtctcactccaaggagatgc

SEQ ID NO: 317886 - DNA, 122 bp, Homo sapiens
acgggcttaaaaaacggcgcaccacgagattatatccggcccctggctcgcagggtcctacgcccacggagtctcgctggttgctagcacggcagtctgagatcaaactgcaaggcggcagc

SEQ ID NO: 317887 - DNA, 122 bp, Homo sapiens
gcctggggagggggtcagcagcctggggctcacctacctggcttcaaatcctggctctaccgcttactcgctttgcgaccctcataattgacaaaagccctctcggtctcggtttccttatc

SEQ ID NO: 317888 - DNA, 122 bp, Homo sapiens
cttagtctgattaagaaggctggttggcagcttcaaagctattggtcatcccagcccacacgttgtccctcattcatcttgcttatgatgagtgttgacctgacactcatcctaccaaagat

SEQ ID NO: 317889 - DNA, 122 bp, Homo sapiens
cgcccagcggttgtagccccggaagaggtgtttgaagagccggtcctcagtctcggtatgcgagcctccctgcggcaatgccgtgggactgggagaggagagtgggtctccaggagccctgg

SEQ ID NO: 317890 - DNA, 122 bp, Homo sapiens
acgcttcatcctgggctgtgaacaaggcctcaccaaaggccgccttgagcgcaagcatggcgtgcaacagtgtcagctgtgctgtgcctagcagccgtaccagctgcggcttgaagagtgcc

SEQ ID NO: 317891 - DNA, 122 bp, Homo sapiens
agaggctcccaggcccaagctctgtgtgacccagagaaataaagatgcctcagtgtggcccgcatgtggcttgtgtgatagctgcaggttctgccataaccggggccctggtagggccccca

SEQ ID NO: 317892 - DNA, 122 bp, Homo sapiens
ccaaccgttccaggaggcaaaacggcttcctcgggaccctctctctgtcatctacactctcgtctctgcagctaagcccttccttaagcagaaaagagcagggtctctcgtccagcaccctc

SEQ ID NO: 317893 - DNA, 122 bp, Homo sapiens
tttacagattcaatgcattaagtcaatttatttgactgaatttatttatgtatttattttcgctatcacaagtagaaaaagcctgtaagttgctatgccaaaatcctgcctctagatggcaa

SEQ ID NO: 317894 - DNA, 122 bp, Homo sapiens
caggaccacaacctgtggccccggcctgcgccgggccggagctccgcagaaggaagccagcgggaggcctcctgcctttgactgccgtgcgtccagcctgcagcgggcctcagggggccgcc

SEQ ID NO: 317895 - DNA, 122 bp, Homo sapiens
tcacgtcggcgctcacgtcccgcgtgtgcgagtgccgggactcggacttcctgtggtgagcgacgggctcctggccacgaggcctcaggcgctgcttgagcatcctcacagcatggcggcca

SEQ ID NO: 317896 - DNA, 122 bp, Homo sapiens
gcggccaggccccggccctccttccctctcgctcgttcccggttcccggccggctctccgcggggccagctgggcggacccggacctcaccttccgcagcttgtactcctcctccacctggc

SEQ ID NO: 317897 - DNA, 122 bp, Homo sapiens
gggagggatggggtggtacactgaccttgaccttggagtccaggcgatagggctggatgacggggacgcccaggggtgtgacccactccaccacagagcccatgtgggagatgaggcgggca

SEQ ID NO: 317898 - DNA, 122 bp, Homo sapiens
ccccgggcaccccccacccaccggcgccacagtccccccagcgccccccgcccctggagccgcctggaaactgggccaggtccagctggacaggctgtgtcaactccagctggggggcttcg

SEQ ID NO: 317899 - DNA, 122 bp, Homo sapiens
tttatgacatgctcaccaaagaggaagcacagttgagcacgcgatggaatgatcgtgtgacggccttcagatacttttatgtactgtggggtgtcacaaaaccaagcgtactcgctgccaag

SEQ ID NO: 317900 - DNA, 122 bp, Homo sapiens
catggcgtccaggtgatttccgttctcttctggccagtaattgggctctgcggctcctcgcgattttaccagttcccatccgtttagcaaacgcctttagcaaacgcccgtttagcaaacgc

SEQ ID NO: 317901 - DNA, 122 bp, Homo sapiens
ctgctctctcttcagtgccccgactcggcttgcaagcaggacctgctggcctacctgcaacgcatcgccctctactgccaccagctgaacatctgcagcaaggtcaaggccgaggtgcagaa

SEQ ID NO: 317902 - DNA, 122 bp, Homo sapiens
gcgcgaacaacaagcactgcctccccgggcgggcttcgcacctgtagtgccgtcgggacacgggagggtaaacccagcgtgtcctgtgtgcctgtgagccgcagaatcatccacggacgtcg

SEQ ID NO: 317903 - DNA, 122 bp, Homo sapiens
tccctccgggcgtggcagcccggggcgtggctcctggcaaggatccggagcagctgtcatcggagtcaatttcaggactccagctccaagctttggggtttccaaaattctgggggcttgtc

SEQ ID NO: 317904 - DNA, 122 bp, Homo sapiens
ggaggccgcggggctgcccagcgagtggagtgcccaagaattggccggggtggaaaggtccgcgggagacgatccccgacctccgggaacaggcctgcggtcggccgccttggcacccaggc

SEQ ID NO: 317905 - DNA, 122 bp, Homo sapiens
gagggaagggcctatctcagcgaggggcataggcggggaaggtgcggggcgaggcggccgcgggtccctggcatccctctccgtacacccaggctaagctggcggtgctgctggtgacgctg

SEQ ID NO: 317906 - DNA, 122 bp, Homo sapiens
tgctgcacagtattataatttatttgtttatatgcctgccagtttcctgcagtcaaggagcgtaaggtaaactgtattgtctggatctagcgtaacatccaacaaatagtagactctctaaa

SEQ ID NO: 317907 - DNA, 122 bp, Homo sapiens
gttgcagcgccacagcgggatgcacttgagcatggtgcgggtgggcggcgcgggctccggcggcggcgctcggcgggctcggggccggggggcggggctcagtccgcatgggcgccgcgcat

SEQ ID NO: 317908 - DNA, 122 bp, Homo sapiens
ggagcccggctggtcggggttgggaacgcagaagtgctcgcagaggtcgttgcaggactgcgtcgcggatgcggtgcaggagcgcccgtctgcctgcagggcggcgccggctgggcactggc

SEQ ID NO: 317909 - DNA, 122 bp, Homo sapiens
agtggcggcccctaggtttaagaacccagacgctgcggggacgattgaagcgcacctccccggctcaacaggaaagccacaacatgtccaagggacctgaggcgacttggaggctgagcaaa

SEQ ID NO: 317910 - DNA, 122 bp, Homo sapiens
aggagccctggggagagtggtccctgcccttccgcgcctcgagccatcgctaccgcccttcggaaccagtgcagcggccgatcagtaaacacagagactggggtctgtagagaaggggcggg

SEQ ID NO: 317911 - DNA, 122 bp, Homo sapiens
gtcctccacgtggctatttcactgaatatacggtggagatggctctgcaacactcatggacggcttccgtccgtctgctgtgcctcctgcaggcgaacctgacctgtttgcgcagccctcgc

SEQ ID NO: 317912 - DNA, 122 bp, Homo sapiens
ccctgggcagccagtccgtcgggcctcggacaagcagccaatgggaggcgtcaacgtcatcgcggggcgccgcggcgccgggcggggagcggcggacggtctaggcggggctggaggcggtg

SEQ ID NO: 317913 - DNA, 122 bp, Homo sapiens
atgacaggcagaaaggagagatacagcggtctgggatctttcttcttgggtaggaatgcacgccgcctgattgattgaggggaatgaagtgataggtccaggtgaggctatggagtggtgtg

SEQ ID NO: 317914 - DNA, 122 bp, Homo sapiens
ggacagcgccacactggacgccctcctggccgccctgcgccgcatccagcgagccgacctcgtggagagtctgtgcagtgagtccactgccacatccccggtgtgagcccaaccggggagcc

SEQ ID NO: 317915 - DNA, 122 bp, Homo sapiens
ggatttttttcaggacccattggatcctcaaaactccccgaattttgatactttcccagccgggcgctgattcgtcacggcgaagagggccgaggaggcccgacctaacacagaataggcct

SEQ ID NO: 317916 - DNA, 122 bp, Homo sapiens
aacgagaagtcctgaggaacatagattcccctcccccgtacattttcccggatggaagcccgaagtttgagggagaaacttgtgaggaaataaaggaagttaggctgaggggcagagagcga

SEQ ID NO: 317917 - DNA, 122 bp, Homo sapiens
cagggacgacaggaggtcagtctcccttcccttctctttaaaatttcccgccagtatggccggctcgcagcacgagttacgccctcttcaggagtccctccccttctgctctcgcccgcctc

SEQ ID NO: 317918 - DNA, 122 bp, Homo sapiens
accctaggaatttagggacatgaatggaaagctgtgaaggctgattattcactgaaagatcgagatgctattgctcaaagaagacagaagggatgtcggaccggcaaaaactataattgttt

SEQ ID NO: 317919 - DNA, 122 bp, Homo sapiens
ccctaccccttgaataggtggctctggtatatgaagtccatcccatgtaaagaggcaaggcgtacctttctgccaaagggaagaacactgttctttgaaaccaaaagccacttccagtctgg

SEQ ID NO: 317920 - DNA, 122 bp, Homo sapiens
gtggaaggaatgaaggccagctgaatggtgaaacaaatacacccattgaaggaaaccaggcgggtgatgcagctgcctctgccaggagtctaccaaatgaagaaatagtgcagaagatagag

SEQ ID NO: 317921 - DNA, 122 bp, Homo sapiens
caagttggcaggggtgtcaagaagagccagaagagtgggctgctacaaaggcctgtcccacgctaacacccctccttgccaaatcattgtctttactcccgggatttggcacagtctctttc

SEQ ID NO: 317922 - DNA, 122 bp, Homo sapiens
ccgcgctctttgggcggtgcccacggcagcagaggctactgtttcagcctaggtctcagccgcgcgttcagcctcctgggcagaggcagctgcgggataccgcggccagggaaagcgcgtgg

SEQ ID NO: 317923 - DNA, 122 bp, Homo sapiens
ggccaagggcaggagctgaggaagccacaaggatggacattttctgcagagttgctgaaccggtagcaaccagggcctgagaaagtcctctcttgtggaagaataagagccaagcaggaaag

SEQ ID NO: 317924 - DNA, 122 bp, Homo sapiens
tctgtccgaaggggactcccggccttacctggatgccagcgtgactacacaggtagaagtcgaactcggtggggtgggtgattttcgtgtccacagtcgtgcctgctggaatgtttccactt

SEQ ID NO: 317925 - DNA, 122 bp, Homo sapiens
agtctgcgcttgcctattgagcgtcctttgcccgtcacagttacccttttcagtagccctcgttggaattttccttctggtggtttcttaacctccacttacttccccttttcgtttcgtca

SEQ ID NO: 317926 - DNA, 122 bp, Homo sapiens
ggccgcggggtcggggctgcaggcacagctcgagcgctttccgcggggtttggctcctgtcgcttcccgtctcgccgaaccggcatcgccgccgccggagccgcagcgagtcctcagagcct

SEQ ID NO: 317927 - DNA, 122 bp, Homo sapiens
tgtctcggagtgcagaggttcccatggttactgttgaagcattgggaggttcggcgtctccgagtagctcagccttctctccttggctgtcggcccgaggcttcgaggtcacccaggccgtg

SEQ ID NO: 317928 - DNA, 122 bp, Homo sapiens
atcttgtacaccagtctgtaatttttaattagaattagctaaaagacattgtacctttcgcgtgtatgactgagcataacagtgcttaacagtgtctttattaagtgaatgcctgaaagtat

SEQ ID NO: 317929 - DNA, 122 bp, Homo sapiens
gagctgctgttccacagacagaggcctgatgactctccccgttcttaccctaagaagaggcggcgggcaacagcccccactttcaaggactgcgtgccggcccctcctctgctggccccaca

SEQ ID NO: 317930 - DNA, 122 bp, Homo sapiens
tcctttaaaataaaaagtagggacgataccataacacattatgttactcttcacgagtggcggtgctgcatattcattgagtctcagaaccccacagtattcaaagcggcagcatatgcgaa

SEQ ID NO: 317931 - DNA, 122 bp, Homo sapiens
ggcgcggccccgggagagtgcgtccgcggcgccagcggctgcagggtgacctgtttcgggcggggacactcaccagaagaacacgcgtgagcagaggttcgcgtcctgcagcgggttgggct

SEQ ID NO: 317932 - DNA, 122 bp, Homo sapiens
cggtgcaggcctctgcgtctcctggaagtgggcacctggagccaggggactgctgggatccgggtccagtcccctggcaaggccgggggctcgcagagggagccacgcactgtctggtggta

SEQ ID NO: 317933 - DNA, 122 bp, Homo sapiens
tggcgcacccccctccactcccgcaaaactccaacatgcactaggaatagcctgagtctgcgtggacgctcgcggcccacctggctgacaccggcagcggtacgctcgtcaccagacacccc

SEQ ID NO: 317934 - DNA, 122 bp, Homo sapiens
gaggtccggagcgcggatctcggggtcaggagtctggcggttgtgccaggcctctgctagcgcgaccctagacccgcggcatgtggggccgccgagctgggcgtgcaaggagagttctgggt

SEQ ID NO: 317935 - DNA, 122 bp, Homo sapiens
aacacattttaaaaaatgcagagctacagagccggctgcattagtgagaaacagccccgtcggcccctttggggtcagaagtcagaattggaggcagggcctgggcccagttgctcttgcca

SEQ ID NO: 317936 - DNA, 122 bp, Homo sapiens
ggaggtgatgctggtatgtgcgtcgccaccgcccctcccagcactgacgggcctgagggacgacaagttgacgctcctttcgtcatcacctggtctaggagggacgcccggggagaccgtac

SEQ ID NO: 317937 - DNA, 122 bp, Homo sapiens
cgagggcatcaacatctctggcaatttctacagaaacaagttgaagaatctggctttcctcggcaagcggatgaacaccaacccttttcgaagcgcctaccacttccgggcccccagccgca

SEQ ID NO: 317938 - DNA, 122 bp, Homo sapiens
cccccagacccctcctgattagctcaggtggggctgccgtggagaccacaccagcatcatcgcctgaggctccatgtccaatttccccggggctgctggagactgagcactgccccagcccc

SEQ ID NO: 317939 - DNA, 122 bp, Homo sapiens
ctatatattgggagtccgtgagtactcaatactaagcgatagcagaagatcgaatatccacgattgaaaggtggaaaccagtgagggataaatattgtggtcctttggagacattttttttt

SEQ ID NO: 317940 - DNA, 122 bp, Homo sapiens
aaaagcaaagctaacctctaacacaggtagctggcgatttagaggctattctagagaatgcgccgccaactctgaactgactctgccaagtgttcaccttcccagggaatgtgcaccacccg

SEQ ID NO: 317941 - DNA, 122 bp, Homo sapiens
ggagaactggagggctgacacgcgtggctggcgggcaggcaggccaaggagcagagggcacgggcctacgagagggcggggcggcccagccgccggcagtggggcccgaagccactgtcgcc

SEQ ID NO: 317942 - DNA, 122 bp, Homo sapiens
gctgctgggactcactctctccagtctcagccagtgcatcaacccacaaacagcacacctcgcttatttcccacactagcttctggagggggatgaggacagtgggccaaaaaacactgtgc

SEQ ID NO: 317943 - DNA, 122 bp, Homo sapiens
gcggcgcgggctccgggcttccctgccctgcaatgtggaagctgctctctaggaggggcccgaggctgggcccacggacgcgggcgcgccgggaggatatttaacattgaagagcggaaggt

SEQ ID NO: 317944 - DNA, 122 bp, Homo sapiens
cccccagagccgggcaccgtgggaattgaggagggcctgaccttccctgggagccggggacggcaccaggccagccagttcagccgcatcccgacgcccaggggtcgcagggggaggtgggg

SEQ ID NO: 317945 - DNA, 122 bp, Homo sapiens
acctgccaatttccaactgcacaccaaatccccgaacatatgcttgaggcccctgcctttcggtttcataaataaaaccctgtcctgactacctccaggattggatggaaactcggatgagt

SEQ ID NO: 317946 - DNA, 122 bp, Homo sapiens
gtctttttgttgctgagttgtagtaactttctacttaattcaagtccaggaggacacaagcgccatgctgccatggatttaacttctgaaccacctggagtgactggaacattccacccatc

SEQ ID NO: 317947 - DNA, 122 bp, Homo sapiens
agcaaacagagcccaaagaggctgatcattggctctcattgtcccctgatactgtagccccgcccctttggcttgtgctgactagctgtttatattttagtaagggccaccctttaactcgg

SEQ ID NO: 317948 - DNA, 122 bp, Homo sapiens
gttgctacgggccgcccttataaataaccgggctcaggagaaactttagcgagtcagagccgcgcacgggactgggaaggggacccacccgagggtccagccaccagccccctcactaatag

SEQ ID NO: 317949 - DNA, 122 bp, Homo sapiens
tagtaaatgctaaatatccttactgtcttcctgggaaagtgcatcactcacagcagcacccgtggtccctgcatggtcagctagagcaccgttctggggccagccccacctgtctgaacagc

SEQ ID NO: 317950 - DNA, 122 bp, Homo sapiens
tccagatcctcgcagttctgcgggcgaaggaggcgaacggaatcggcccccagtggggagcgcaacaagccacagtagccaaaccccgcgctcctgcccgggctcccagacgaacgcagccg

SEQ ID NO: 317951 - DNA, 122 bp, Homo sapiens
cagggccagtgtgtgtcctctgtccccatgaaccactctgtctcaggaaaatgaattccacgtgggatgagtggtgtgttggtgattttccacgagggttgagtggcgtgttggtgattttc

SEQ ID NO: 317952 - DNA, 122 bp, Homo sapiens
aaaccactagatgcacaggcggccagtgtccggccagcaaggcccagctatggggcaggacggtgcgggagctgcccctctcccagcaccctccgcccacgccggcactgtccttgagggca

SEQ ID NO: 317953 - DNA, 122 bp, Homo sapiens
ctggggtaacactccacagccctggatggcgctggggtaatgccctacagccctggatggcgctggggtaacactccacagccctggctgaccctgttggttgctccccagtagccatgccc

SEQ ID NO: 317954 - DNA, 122 bp, Homo sapiens
tcattgtgcggtgaagccatagagtccgcgctgaaacccggggcgcccgcctcctgtccgcgcaggcgctgcacgctgtcgccggggcagcttcactcagcttcagcctctccatctgcaga

SEQ ID NO: 317955 - DNA, 122 bp, Homo sapiens
caggtacccggacgtcgctcactagacccctccgcaccgtcccctgcccggcccctcttccggggtcccagcgggtcgggctcatgattccccggccccgcattcaccctcacccggtaacc

SEQ ID NO: 317956 - DNA, 122 bp, Homo sapiens
ctacagttcccgtgaccctttgtgtgtttgacgggactacaactcccagaagacctagcgcgccaggcaggcacttccttttctctttatccccaacttccttccaggtcgcaaggtcacgt

SEQ ID NO: 317957 - DNA, 122 bp, Homo sapiens
cctgaccaaaaatatgtatttctattgttatttttctgatcttaccacatgggccaggaccgcatttcctatgttgtaaaatagcagtaataccagacattctccccaagtttattcagaaa

SEQ ID NO: 317958 - DNA, 122 bp, Homo sapiens
caacagaagaaggtggatttgtttgtccattgagcaacctgccattgccctgcctgtgcccgcctgtctccctttaaacattaacaatctcttaaaacatttgggttttgtgcccaaggccg

SEQ ID NO: 317959 - DNA, 122 bp, Homo sapiens
ctgtgcccaccctcacacatgagcaggatttctgtggctttgaggaaggacctaaggaaacgctcctagggttaatactaatacaaaccagagtctgcagatgctcaagttcctcttcccca

SEQ ID NO: 317960 - DNA, 122 bp, Homo sapiens
gcttcaaacacagccactctgccttcatctgttgtacagattaggcttctctaagagatccgggaagaaaataaaaatggtgccactgctcaaatattttgtaagccattggagtagtggga

SEQ ID NO: 317961 - DNA, 122 bp, Homo sapiens
tacgcactctgatatacagcatgcttgccctgtggatcttttctacaaattctacccagccgtgtaaaatcggctttctcaggggttacaggccagaatcagtatagtagggctgctaaaat

SEQ ID NO: 317962 - DNA, 122 bp, Homo sapiens
ggtggaggcgagggcttacttctcagaggctaagatcattttggacagcatggggtccaccggcagctctgccatctttcgaccagactaaggagaagagagagagagttgagcccagtcct

SEQ ID NO: 317963 - DNA, 122 bp, Homo sapiens
ctagggaggtggtgatgaaggaataggaattctcacccaggtctcaaacggctttttacccgacttggcaatgactatggaatgcctacgctgtgaaatggagaaattacgtggaataaagg

SEQ ID NO: 317964 - DNA, 122 bp, Homo sapiens
aacacctattatccttcccttttctcagcgtaattcttctttactaatgtgacataatttcgaaggcaatttaatgcaaaagctaagtaaaaaatcctgagtttatggttggtatccatttt

SEQ ID NO: 317965 - DNA, 122 bp, Homo sapiens
ggaggggcggtggtgtggagggcggtgaatgcctggacctctgggtctccaggctgccagcggcctgaccaggctcccggtgtcctcctccaacctcagtttccttacctgtcccagaggag

SEQ ID NO: 317966 - DNA, 122 bp, Homo sapiens
aacctcaagaggcaagaatgatatgaaacaaaggatatccctggatttcctctggggctgcgaaagggagtctccacctggctctggaaggctatgtcttgtttccatccactccatttaac

SEQ ID NO: 317967 - DNA, 122 bp, Homo sapiens
gcgacgggtaccccccgggcccccgggtcctctgccgccctctccgctcccgggtccgcccgccctaccctgcgcctctggatgcttctgaccccagatcctccgctcctccccctagtcct

SEQ ID NO: 317968 - DNA, 122 bp, Homo sapiens
caatggctggagacatgtttggttgtcacaacttgcaggagtgggagggaggctgctccccgcccctggtgggtagggccagggtgctgctaagcacccaccatgcacagggcagcccccac

SEQ ID NO: 317969 - DNA, 122 bp, Homo sapiens
tcctgggcgtagggggctgtggtcgcttgaaaagaaccagcctgggggtccgagttccaccggaattgggttcgagcgcgggtgaaaagagggacccgacagcacccaccctccaagtagag

SEQ ID NO: 317970 - DNA, 122 bp, Homo sapiens
tcctagatagattcattctatctagttgtggggatggagaaatctttaatggtatattttcggttattgccttatttttgatacagtattctgtcagtaatttattagacctggcagctttg

SEQ ID NO: 317971 - DNA, 122 bp, Homo sapiens
tctcagagaggatttaagtgcccctcgaagagcaggcagggatttatcctcctgtccctccgctccctctctgtcgttagggcggaagtgggcctccctggcgagtggcatggctgtgaaat

SEQ ID NO: 317972 - DNA, 122 bp, Homo sapiens
tgggagatgaaaagcaaagccacactgctgtccccactcggctttgcggaggcagagacgcgtgctccccatctcccggctcccagcccccgcacggaacgcatcgtaattttctctaatta

SEQ ID NO: 317973 - DNA, 122 bp, Homo sapiens
cttacagaataaacaaacagtaaagaaaggagaccaaacttcggtgaggaggaagaggaacgatctcaaggtggaggaaaggcacaaaaaccaccagtaagtgccagaagcgcattccttac

SEQ ID NO: 317974 - DNA, 122 bp, Homo sapiens
gaggaggagccagggcagctgggagcggggacaccatcctcctggataagaggcagaggccgggaggaaccccgtcagccgggcgggcaggaagctctgggagtagcctcatggaagagaag

SEQ ID NO: 317975 - DNA, 122 bp, Homo sapiens
ggctggtcgggaccagaagacctaccgggcacgaggaagctttcctccctgagcatcaaccgcagcctagacgcccgtccagccgtccctgaagtgtccagcatccctttccagctttatgt

SEQ ID NO: 317976 - DNA, 122 bp, Homo sapiens
tccacaccaaatccagtgcggggttgggctggactagcacttcctctcagcctcgcagctcggctcgtgggtttgcgcccaggactttgcctctgggcctgttcacaaagcgtttaaaagtt

SEQ ID NO: 317977 - DNA, 122 bp, Homo sapiens
ccgaacctgggagctacggacagtgtctaaactttagtcactcacaggagtacaaagatccggggctgctcctaactcctactccaaagctttcctggcctgctgggcgcacagggaagagg

SEQ ID NO: 317978 - DNA, 122 bp, Homo sapiens
gacacagcgcttctctatctcctgcatgacctttgctgagctgctcgccctgcgttctgtcgtttgttcatcattcattcatccgaaatgctcgggactggaagcacagtggaaacactgcc

SEQ ID NO: 317979 - DNA, 122 bp, Homo sapiens
gacccaaggtggacccttctctggcaacagtaacgagataagaatacgaagcaggttctgcgactgcattgcaatgtgattggaatgagtaatcgtttttcattctgtatagcatctttctc

SEQ ID NO: 317980 - DNA, 122 bp, Homo sapiens
gggcatcttcccagatgctggcgttaccgctagaccaaggagccctctggtggccctgtccgggcataacagaaggcttgcactcgttttctggtcagttctcactatgtcccctcagctcc

SEQ ID NO: 317981 - DNA, 122 bp, Homo sapiens
tttatttgttctgaaggctgtatgtgactataccattatttatttctttttttattctcccgtcgatggacagtcaggctgtcttctggtcttctgctattgcaaacagtgctgtgtggctg

SEQ ID NO: 317982 - DNA, 122 bp, Homo sapiens
acctccgggcctgggccttcccaggggattttctgggaggccaaggcccagcgagagcctcgtcctcgccccgccctgagtagggagcagggccctgcgcgcctggaagcccctgtcggggt

SEQ ID NO: 317983 - DNA, 122 bp, Homo sapiens
tgtctggagagatcaggaaaacggcctgtttttctctctccctccataccggttctttcccgcaggaaaagtgatccggtgtttcccatccggaagcattgaagcgtttactatcttaaaca

SEQ ID NO: 317984 - DNA, 122 bp, Homo sapiens
atgtaagagtgctaatcgggaagctctacccactgagaaaacaagaaaaaaaattcttggcgctgaaagaggaccaagaaggattgctttctgagataggtgcggacagacacacgcagacc

SEQ ID NO: 317985 - DNA, 122 bp, Homo sapiens
gacaccccgcaagccggctatttcgggctcttccactactgcatcggcaacggcttctcccgggagctgacctgcaggggcagcttcacggacttctccacgctgccctcgggcgccttcaa

SEQ ID NO: 317986 - DNA, 122 bp, Homo sapiens
cctacttggtgccttgcacagctgggaggctcctttggaacgcatgcctggggcacctcccgagtccgcgttttcacaagatcattttcaatctgcaggtgctctgctcacacttgaatttt

SEQ ID NO: 317987 - DNA, 122 bp, Homo sapiens
ccgaggcaaagcggccccggcggggaggaagccgacttgggagcgggcgcgccccgcggccggggcagttacagctcccacccgccctttctgccgcggagaacctggcgctcggcccttgc

SEQ ID NO: 317988 - DNA, 122 bp, Homo sapiens
acatcgagagcacatcaaagtgcagcagctcatggccaagggcagtgacaagcgtcggggcggtcctccaggccctcccatcagtgagttccaagctgggattgagaagggagcagtgaagg

SEQ ID NO: 317989 - DNA, 122 bp, Homo sapiens
cagaaatcatgttgtaaaaacttgctactgaactttaacctggcatatgtgtgtgcacgccgtagcattaatatgcagccactgcatccattccagtgtcagccaagccagcatcatagtca

SEQ ID NO: 317990 - DNA, 122 bp, Homo sapiens
tgtccagagatgtgggagctcgttctggatacgaaggtctcactggtaaaatcactgcaacgcttgacctgggatgctcagaattgggagacccatgttcctacccttgctccgttaataac

SEQ ID NO: 317991 - DNA, 122 bp, Homo sapiens
gctgggtgccgcagcgggggcagccggaggcagctgggggcgcccagggccgcctccggccgggccgccccgtgctcatgcccgtttggacctccgcactccttaccgccctcccgctgccg

SEQ ID NO: 317992 - DNA, 122 bp, Homo sapiens
aataaactaaacaaaggcaacccatgcaaaaccggagcaatgaaaaccaggctacataaacgaagggaagtttataagaactctttgggaggaaaaaaagagaaaaggcaccgggcacggag

SEQ ID NO: 317993 - DNA, 122 bp, Homo sapiens
agaattccttgaacccaggaggcggaagttgcagtgagccgagatcgcgccactgcactccggtctgtgagaaagagtgagtgagactccgtctcaaaaaatattactaataggccgggcgc

SEQ ID NO: 317994 - DNA, 122 bp, Homo sapiens
tagtgctcacgagagaggaaaactaccaagaccctccaaacagaaaacaagcgtgggtgacggcgtggagcaactgaaactttgtgccttgctgctgggaatgtaaaatggcacagccgtga

SEQ ID NO: 317995 - DNA, 122 bp, Homo sapiens
tctccctgccaagcgactctctttccttcataaccaacaaacactgtggaggagacaccgcgggaccagatccttttcctcctcaatctcacccactaattctggcatccgctggtgggtcc

SEQ ID NO: 317996 - DNA, 122 bp, Homo sapiens
ggggactcggcgaggggacgcggcggctcctcagcccaagtaggcgctggggtcacgtgacgcgcgggcggaaccaaggggcggggaggaggcactttggcttcggagtcccctgcggggtc

SEQ ID NO: 317997 - DNA, 122 bp, Homo sapiens
agcccgccatgcctgagcctcccactccctccatgggctcctgtgcggccggagcctccccgacaagcaccgccctctgctccacggcgcccagtcccatcgaccgcccaagggctgaggag

SEQ ID NO: 317998 - DNA, 122 bp, Homo sapiens
taggactctgcagagggcagcctcagcaggcaagccaggcccccagcttctggggccggtcgcacccattatggccccgaaacggctgggtggtggtctgcagcctgcccagggccggctgg

SEQ ID NO: 317999 - DNA, 122 bp, Homo sapiens
gaaaaaaaagcactgtataagcaagacctttcccagaaaggatattgaaaacaaagtctgcggcctctgcttgcaggttcgtaagctttaagtaagcaagacttgatgacctatatattgaa

SEQ ID NO: 318000 - DNA, 122 bp, Homo sapiens
aaagctgagggggactgggaattccacagcctctctcctagcaggacactccaggtttctcgtccataacccacgtggtgctgtggagccttggcctacaggacagaaggggctcctgggat

SEQ ID NO: 318001 - DNA, 122 bp, Homo sapiens
caatccctgcacgctcacgccgggaaaagactgcacaaggggcctgccaaggcagacaagcgatcgccacccagctggcttccgagggtccccgccctccaccggaggcctgttaccacggc

SEQ ID NO: 318002 - DNA, 122 bp, Homo sapiens
gcagcacagagaagtgattacaatataaatggaattctaagaaatgcatatattttataccgtccttggcttaatcatgaaaatgttaggcaaaagttgctatctacaaaattagcataagg

SEQ ID NO: 318003 - DNA, 122 bp, Homo sapiens
acagtcccccgttccttcgggacgcacccctgcaccgaaatcgggccgttctcgcgtgcccgggttgctctcaagtggaaaacagatgctcccctagctgcacagctgcaagctttagcgtc

SEQ ID NO: 318004 - DNA, 122 bp, Homo sapiens
ctcaagtgatccgcccacctcggcctcccaaagtgttgggattacaggcgtgagtcacagcgcccggctgcttttttatacattaagtgtgcttgcagaggactgcgacctctggccctcgg

SEQ ID NO: 318005 - DNA, 122 bp, Homo sapiens
gagcgcagccgatgccacatcctcagcggcaagctgaagaaacctgtctcctctctggggcgaccaaacgatacgtcgatgccggaaccgacccgacgccggagccgtcggctccgtcctta

SEQ ID NO: 318006 - DNA, 122 bp, Homo sapiens
ttcaatagaaaatgtgactaccagaatggtttctgaatctaggatctgctcaggcacaggcggaaaagaacagctgttaaagaactaaatattatagaaataatcggaaaatcgtgctcaat

SEQ ID NO: 318007 - DNA, 122 bp, Homo sapiens
ttgttttccactgagagaaactaatctcttggcttagatccaccttggtattagcctcagcgctttctctccctcctttcctctaaatcattattaagtttattacttcttttttcttttgc

SEQ ID NO: 318008 - DNA, 122 bp, Homo sapiens
tattgtgaagggagcttccccctcccgcgctttcaggggaatggggaagctgggccgggacgcgcggcagggactttgcaaactctgcaaaagtcccgagtagaccgcagaggctcgcggcc

SEQ ID NO: 318009 - DNA, 122 bp, Homo sapiens
ctcgggcacaagggcagctgcgcccagtctcttgatgatgctgactttagacaaggactccggcttcctctcaagcccagaccgtgaggaaagcgccaggcgccgcagtgtcggggcagcag

SEQ ID NO: 318010 - DNA, 122 bp, Homo sapiens
ccgtctcgagagagtatttctgcaggccctcggtcacccggactggctcctcaccccctgcgactgtcccagaagttctctggaagtcaaaactaattgatacaagatggggctgaggcaag

SEQ ID NO: 318011 - DNA, 122 bp, Homo sapiens
caacgagagaagtcatttccgattggcgaatctagcgggagcaatgcgctgtctgtcaggcgtgtgttgggtacagagtttactgcaccggaccacctgaattccctgggctgaggctccat

SEQ ID NO: 318012 - DNA, 122 bp, Homo sapiens
ccagactgctctgaacgcttaacttggagagtgctgccttggaacattttatctgcaacgcggcattctggttttgagagtgtgtatgtgcccttttgtgcctgtatgttgtttcatctgtc

SEQ ID NO: 318013 - DNA, 122 bp, Homo sapiens
catggacctcctgtcctacttcaaacaaccggtagcagccaccaggacagttgttcgggccgcagattatatgcatgtggctttggggctgcttgaagagaagttacaaccccagcggtccg

SEQ ID NO: 318014 - DNA, 122 bp, Homo sapiens
caccactactagggtcctgtggggtgcgggggtcccgaggaaaagaggtgaaaaggacgacgtggagctggggatagtgttgatggaaataatgcttccaggcaaccacaagagctggcggg

SEQ ID NO: 318015 - DNA, 122 bp, Homo sapiens
aaggggaggcttcatctcacatatgagcagcaaattgattttctcttcatggcactgtatcgatagggttaagtattttgatagaagaccatgctatttaatataagtagattttcaagaaa

SEQ ID NO: 318016 - DNA, 122 bp, Homo sapiens
aggaaggccaggaaaagagcaagagagagatcctgaagtgcaccaaaagcgcgtgggctccgctggatgagtggctgccccctgaccctgaggaggaaagccagagtctcaccatccccatg

SEQ ID NO: 318017 - DNA, 122 bp, Homo sapiens
ctagcccgggcaggcccctctgccctgtgccccgtggagctgcagccctgtgcgtcttcccgcctggaaggcttcaccagacacaagggcccagccccagctgtgtgtgtgctgggcccagc

SEQ ID NO: 318018 - DNA, 122 bp, Homo sapiens
aggggctgccacactcctgaatgccttaacatttcttccatggccccacaccatggcatccgggggtcttcgggaacccgggaaatggaataaagatgtttttggggtctgttcctgcactc

SEQ ID NO: 318019 - DNA, 122 bp, Homo sapiens
ccggcccgccgctttgtgtgtgtcctggatttgggaaggagctcgccgcggcggcggcggcgctgagggaggaggcggcggcgagcggagccaggaggaggaggaggagggggagccgctca

SEQ ID NO: 318020 - DNA, 122 bp, Homo sapiens
gagcaagctgctgtaggatacaaaaacaaaaacaaaaccctagggcatggtggtttgcctcgcagctactcaggaggctgagacgggaggctggcttgagcccaggggtttgcagttacagt

SEQ ID NO: 318021 - DNA, 122 bp, Homo sapiens
tgttccaatgatttccataagaacataaattataaccttcagagccttcaatatttctttcggtactttattaagtgttgttgcagaggctatttatgaagtgagtgattcaacttttaatc

SEQ ID NO: 318022 - DNA, 122 bp, Homo sapiens
cattaaaaaaaaaaaaaaggcttagcctgcctgcgatttccaacttctctttccacggatcgaccgcggccttggcaaggacttgagtctgcgttccagccccttccgctcccagcgcgcac

SEQ ID NO: 318023 - DNA, 122 bp, Homo sapiens
ggctcttgtctctggaggtctcgaagtcgctgaactcgctgtcgctggcgttgctgctgtcgtacgtgcccacgaccagccggggcggaggagtcaccatctgctgcactctcctcctcact

SEQ ID NO: 318024 - DNA, 122 bp, Homo sapiens
cattcacttgagatcgtcaaaaggcatcctggctttgtaatttgctcttttgcagactttcgacttaataagagattccaaaattagtaaaaaaaaatataataaagtaaaataaagccaat

SEQ ID NO: 318025 - DNA, 122 bp, Homo sapiens
gtgtgagtgcgtatgaaagtgtgtgtctgctggggcagctgtgcccctgaatcatgggcacggagggccgcccgccacgccccgcgctcaactgctcccgtggaagattaaagggctgaatc

SEQ ID NO: 318026 - DNA, 122 bp, Homo sapiens
tattttgaccacctgagcgctggtacgctccgcgttgtagcctctttttctgccggattgcggtgagtcaggctgcccatcttctccgcctgaagggaattcaggagatttaaaggagaagg

SEQ ID NO: 318027 - DNA, 122 bp, Homo sapiens
gagggcgacctggaccacacacgtgaactgacgctcagccgcagagtcctggggccatcacggcagccccgcaagggctctcaaggtcctggtttcccaatggtcacaccgaggcagagaaa

SEQ ID NO: 318028 - DNA, 122 bp, Homo sapiens
acaaaactccctattttccccaccccatagtagctcagcacccgcaatgtgcacttacgtcgggtgtccccagacaaagccagtggggagctcagcaccatcagtgtcactgtcagcgctgt

SEQ ID NO: 318029 - DNA, 122 bp, Homo sapiens
gaaggggcgtggtctaggcgggcggaagcgggggcggggcctgagctgattctcattgctcgtggaggaggggagcgcggcatagggcggagcggagccctccaggttcgattggattgctc

SEQ ID NO: 318030 - DNA, 122 bp, Homo sapiens
agacctgaccagcgtcatgcgcctgctcagcaagcaccgggcgttcgaggacgagatgagcggccgcagtggccactttgagcaggccatcaaggaaggcgaagacatgatcgcggaggagc

SEQ ID NO: 318031 - DNA, 122 bp, Homo sapiens
ccgcacggtgggcggagtcgggcgccgccggcctgggatccggaagtcggagcctagctgcgcgagagtttctgctcgctcaaccgagttgtcgtgttgccctcgcttctcagatccccgcc

SEQ ID NO: 318032 - DNA, 122 bp, Homo sapiens
ccagtagagggcgcactcttgtgagcggcttttgtacccagttgcttcctggctgctttacggtcgatttgcaggcagtccgctttgtacaagccatggtatagaggcttccttatttacct

SEQ ID NO: 318033 - DNA, 122 bp, Homo sapiens
cccttcccagagctcggacgggccatgcttggacactgtcactccaaggatggagtcatgcggtcccaccagcaggccccgggtggatgcggagggagggcccatgagctggatctctcctg

SEQ ID NO: 318034 - DNA, 122 bp, Homo sapiens
gataaaattgtaaaatgataattaattggtcttctataaaaccatgctgttgaccgggcgcggtggcttatgcctgtaatcccagcacttcgggaggccgaggcaggcaggtcacgaggtca

SEQ ID NO: 318035 - DNA, 122 bp, Homo sapiens
gctttcaattcttgaacaaattcatcaatgcttgggatggtcagtcttgtaaatttcagccgttctaacaggcatggaatggtgtcttcttgtggtttaaactagcattttcctaatgacta

SEQ ID NO: 318036 - DNA, 122 bp, Homo sapiens
gtttgtgaacccgctgcctccacaagccaaggtgtccccagttatacaaagtgtacgggacgtgcagtccactcccttccttcctcagcctggcaagggtgacagtgccggccaggtgggca

SEQ ID NO: 318037 - DNA, 122 bp, Homo sapiens
gcctttggagtgtcccaccgcgtgctcttgcaacctgcagatctctgatctgggcctcaacgtaaactgccaggagcgaaagatcgagagcatcgctgaactgcagcccaagccctacaatc

SEQ ID NO: 318038 - DNA, 122 bp, Homo sapiens
taccattatgtcttgggtttaccaattatcttcatgctatttaaattaattttctacttacgcctttagaaatgtaagggccagatatgtgttgctttctattttgtttccagactttagca

SEQ ID NO: 318039 - DNA, 122 bp, Homo sapiens
tcagccgccgcaccgcctcgcagccgccgcggagggacacggccgcgggaacgccccacacgcatgcccgaccgcacccgcggaccggacctactttccttaaagggcccggggctccgcgc

SEQ ID NO: 318040 - DNA, 122 bp, Homo sapiens
cccagcctggggaactgaagtccctgccccctcagctgtgttccctgccctcatagacggcgctaggcccagtggcccgacttccccacagatgctgggctccccacagtcccagcaaggcc

SEQ ID NO: 318041 - DNA, 122 bp, Homo sapiens
tggacaccaggcagtagaagtctgtgcgggcactgtagtttcgcgagccgagatccgagacgtccacttcgctgctccggctctctcccagcgagaccccactggtgtgcggtggagctgat

SEQ ID NO: 318042 - DNA, 122 bp, Homo sapiens
cgcgcctggcatggatggcacacaggttggtgtcttcaaagagttgcaccaggtaggcctcgctggcctcctgcagggcgccaatggccgcgctctggaagcgcaggtccgggctgatggcc

SEQ ID NO: 318043 - DNA, 122 bp, Homo sapiens
cactgggctcacgaagcacatgatcttcggctacccatctatcccagcttcagttccaaccgttacaacggatcagctattctgggatctttctgcctttttcgcctttcccaacaataaca

SEQ ID NO: 318044 - DNA, 122 bp, Homo sapiens
gggacagtgggccttgttgacctgaggggggcgagggcggttggcgcgcgcgcgcgttgacggaaactaacggacgcctaaccgatcggcgattctgtcgagtttacttcgcggggaaggcg

SEQ ID NO: 318045 - DNA, 122 bp, Homo sapiens
ccggcagcgggcccggagccgaggccaatggcagcccgctgccgccgctcgcgcagaccccgcctcccgaccacgggccaatcccagcccagcagcacccccggaccgcacgccgaccccgc

SEQ ID NO: 318046 - DNA, 122 bp, Homo sapiens
caaaagaatcgcgcacagaagtatcccggtatcacacacactacacacccagacgcaccacggcacctttctaggacacttggaagcgctcaaaccaaagaacacacactttcaaggacacg

SEQ ID NO: 318047 - DNA, 122 bp, Homo sapiens
cgctcctctggggccagcctggggaggcagcatggcagcagtgcctgtcagggacccaggcgggggcaaggtcgctttctgagctgacaacttcaggttccagctggcagccagacctgggg

SEQ ID NO: 318048 - DNA, 122 bp, Homo sapiens
gagcgagaatctcccggaccgttccagcgcctcgcgtgagccccgcccaccgccgtcctgcgccgccgggcacagatgacaagtcctccaggaagccagagcgaccgtttccgctacgcgac

SEQ ID NO: 318049 - DNA, 122 bp, Homo sapiens
ggcctttcacaggcctttggtttgcaacctacctggagtgagcgttgaagccgagatacacgggaagttggagtgactcagggaagagtggacgtctcaggtgtctggatttttgcagctgc

SEQ ID NO: 318050 - DNA, 122 bp, Homo sapiens
agacaactgcttggtatagagataatccaatactgcttgcattgatatcttgtttatgttcgggagatacacctgaaatgttatacaaaaagctaaattctgctgcagaaagcagggagtgg

SEQ ID NO: 318051 - DNA, 122 bp, Homo sapiens
ggccgtagtggccagaggtgcccaggccctgctgcgtgattatggtttccttcctgagctcggccacgactgtcgcgcccagaaccgcacccaccgcggcgagagtctgcataggtgagtgg

SEQ ID NO: 318052 - DNA, 122 bp, Homo sapiens
cccggggggaggacccgggaggggctgtgagctcccgcctccccaggcgccctccatggccgaggggttcccaccgccgttctcagcccccgcgttaggattttcacccggaggggacagca

SEQ ID NO: 318053 - DNA, 122 bp, Homo sapiens
tgaccactccagggtatgcttaggtatcccaaatcttgctctccgaagagattcagatagcgagagacacccttaactgtctcccgaggccgggattggccagagcggaagcggagacgcac

SEQ ID NO: 318054 - DNA, 122 bp, Homo sapiens
agtccgagttactatccctttaaatacaggcgtttcggcctagctgccgccggtccaatccgcagcgcttccgtgccccactttcccgcgtcagcctggctccggcctccaccagggggtgc

SEQ ID NO: 318055 - DNA, 122 bp, Homo sapiens
acgctgcatcttcagggaaagcctcgcggcccctgacagcagccgctggagcggtgggcccgcccagctctccccgcgccccctcggagttccgcccggtcacctccacgcggccgagctgc

SEQ ID NO: 318056 - DNA, 122 bp, Homo sapiens
gaaaagatgaatgcagtcatcagcaggccatggcgctgggatgcagcgatgccagcttggcgcctaaggtgttttctcttcccactggcacagctgcgcccaccctcaggcctcagacacac

SEQ ID NO: 318057 - DNA, 122 bp, Homo sapiens
tgtgacaccccaactttacaaaaaagaaaaaaacaacaattaagcagagaccaacaacggcgatacaggaaaggggctaatgggaaagaatgtagtcagagcatacatatacatcttgtgtt

SEQ ID NO: 318058 - DNA, 122 bp, Homo sapiens
caccgtgactcaggcccggaggaggggcgcgcggtgacacgaggcgccccaaactcaggccgcctcagaggatcgccagggccagcggccagaccaggatccgacctcacacactaaacgtt

SEQ ID NO: 318059 - DNA, 122 bp, Homo sapiens
gtggcgttaaatttccccttgaagtagaaatggcatactatgtcaaccaaactccagctccgtacttggatatttgttaattgataactcttcaagtttgttctttgtactttctcttgtag

SEQ ID NO: 318060 - DNA, 122 bp, Homo sapiens
ccccaccttccatccagtgccctggaccctcggctgggtagcgccaccagagcgaccaaacgtcccgcgccttccaggccgcactccagagccaaaagagctccatggcggcggcggccaag

SEQ ID NO: 318061 - DNA, 122 bp, Homo sapiens
ctttagacagaccagatttgaaacactctttttgtggaattttcaagtggagatttcaatcgctttgaggccaattgtaggaaaggaaatatcttcttataaaaactagacaaaatcattct

SEQ ID NO: 318062 - DNA, 122 bp, Homo sapiens
cgcggggccctttggaaatagaatagccaatgtaatctgacacttcaacttgctcggctccgggcgagttgattcacttactcaccccctaacgccgagttccttttcactgtctgtggaca

SEQ ID NO: 318063 - DNA, 122 bp, Homo sapiens
tgtaaattaacttaattttgctgacttgactcctgtggcttctggacccctcctctgccccgcaggaggaagttccacggcaggtggtgcgttcccacgcaggcaccaagtggaagcttgca

SEQ ID NO: 318064 - DNA, 122 bp, Homo sapiens
ggccgagccggagggcatttctggaatgcgttttaagtgtcagttgcggtgtagactcttcgggaaacctctccggagcgtagcctccaccccccactcgcagtccccaaggtactctccta

SEQ ID NO: 318065 - DNA, 122 bp, Homo sapiens
tgcaaacccgcctcggctggggccgcgggcggcccggagctataaaaggcctgggtggggcgggcgcggcggcaggacagccgagttcaggtgagcggttgctcgtcgtcggggcggccggc

SEQ ID NO: 318066 - DNA, 122 bp, Homo sapiens
ggcctgtctccgtcaaacccagcgagggtcagactcacagccggaggcagcacggcggcacgggggaacacagcaaagcctcagcagcctcagctgggccaccatggccaacgtgggcagga

SEQ ID NO: 318067 - DNA, 122 bp, Homo sapiens
tttaagttaagtatttgtacaccaatgtttacagcagctttatttaaaatagtcaaaaggcggaaacaacccaaaagtccatcagcagatgaagggataaacaaaatgtggtaaatactgcc

SEQ ID NO: 318068 - DNA, 122 bp, Homo sapiens
aacgttcggaaaagccctttatagattaagagactgaggctggctgggaggacgccacggcgccgctcccaagaccaccgcggcggggcctgagctccggtgtcacgcaaagcttcccttcc

SEQ ID NO: 318069 - DNA, 122 bp, Homo sapiens
tccatgcaggaatgtctacactcacacgctctttccaagtgggagagtctgtgacattaacgggatcttctaacgtgaggatatgagtctcagtcaaccccaaaccactgtccaaaaccttg

SEQ ID NO: 318070 - DNA, 122 bp, Homo sapiens
gggggaccactgccaccaaagcgcggagacagacaggtagtggccccgagtgcctggaggcgctgctatttattgtagtcaaggcaagggggcagggtaaggagtgccagtcatctccaatg

SEQ ID NO: 318071 - DNA, 122 bp, Homo sapiens
gccagcaggcgtggtggtggggctgcgagggagggcacccttcccccacggggcccgcaacgctacctggactccccgccggagccaaacaactgggcggggggttgggggggcggcgacgg

SEQ ID NO: 318072 - DNA, 122 bp, Homo sapiens
gcatcaaccacccacaaagttcaaaggaatcccgtcaccctacccccgagccatccgctccgagccgcaggtcccccaacaccaggatgccagcaggaatccaggagtcaacaactcgggtg

SEQ ID NO: 318073 - DNA, 122 bp, Homo sapiens
atcccagctacttgggagactgaggcaggagaatcgcttgaacccgggaggtggaggttgcgatgagccaagatcgtgccattgcactgcagcctaggcgacagacagagtgagactccatt

SEQ ID NO: 318074 - DNA, 122 bp, Homo sapiens
gcgtactcccacagactttgctttggggacctctgttttctgcaagttttgttgcagtcccggacacagggaatgtaggtctgaggtcagaatcatccaggcagggggtaggatttaggggc

SEQ ID NO: 318075 - DNA, 122 bp, Homo sapiens
ctagaagccgacgcacagggtttccagagccgccctgaccgccgggcacccagaggctcccgagtttgtgccacagggctgctgcgggcagtgccgctgcataactgacaacgaaggcggta

SEQ ID NO: 318076 - DNA, 122 bp, Homo sapiens
caattttgcacacaacaggagtcattcagcagtggctaacactctcctgacctgtgtcggcgctgggctccaaggtgtacctccgcacgcatggggttaactacgcccccatgaccattccc

SEQ ID NO: 318077 - DNA, 122 bp, Homo sapiens
tggctgagacgttgatcaaggcagtgatgcccaaggcatccagcatgtccttgcgggaagcgtgatacgcactgcccaggtacagaaagggcaggatttccaccgggccaccctgaaatcca

SEQ ID NO: 318078 - DNA, 122 bp, Homo sapiens
tcccgcagcaggaaccccccactcacagccgtcccccacaaaactccgagagctccatagcgtcaggtccccaacacccagcgctagaggctctgtaacgccacgcccctttgacctccacc

SEQ ID NO: 318079 - DNA, 122 bp, Homo sapiens
gaggagccggcaggtgtctgcggtgctggaaagaccacggtgtgggcggggattccgatccgccggcaagggtggcctgcacccggccaggcccgcgggttttctcctctccggggctggcc

SEQ ID NO: 318080 - DNA, 122 bp, Homo sapiens
ggaccctgggaacgttcatgagggggcgggtcttggggggtgtgttaggggggttcttcacggcggaagttgtctgtatcccaccgcctggccttgggagccttctgggactgctttgtggg

SEQ ID NO: 318081 - DNA, 122 bp, Homo sapiens
cttgtggctttgctgggcaatgccaccattctgctagtcatcaaggtagaacagactctccgggagcccatgttctacttcctggccattctttccactattgatttggccctttctacaac

SEQ ID NO: 318082 - DNA, 122 bp, Homo sapiens
tgtacttagatgtcacaacagtattatgtgcgattatgtcagatccagccttctccatctcggagtgttggcaggtaggagggttgttggcaagaggaggggtgttaacctcaggatcctgg

SEQ ID NO: 318083 - DNA, 122 bp, Homo sapiens
caccgtcttctcccgcgaacccgagctcctgtctcctagcactgtcctctcccgctgctgcgagagagcgtttgttgcacttgagggtctaaactttgtctccagttctcctcagggcagaa

SEQ ID NO: 318084 - DNA, 122 bp, Homo sapiens
aagaattctacctgagttcgccgtaaagcgcccgccctctcgcctctacgcttccagttgcggcttattacgtcacagtaattgctgtaccaaggtcagaatcgccacctgaggcctgaata

SEQ ID NO: 318085 - DNA, 122 bp, Homo sapiens
ccagctggaggaaatgggccgaagcgggattcgaaccggcggattcgtttctctgcagcccggagccgcgtagccccgccccggtctccctagaaacaggcacccgtgtctccatagcaacc

SEQ ID NO: 318086 - DNA, 122 bp, Homo sapiens
agagtgaaagggagaggccaacatcaaacaccttttggccacacctgcgcacagacagtccgggccgcagaaatcaatcagtcactccaaaggggtggaagccctgggccactgccaaccca

SEQ ID NO: 318087 - DNA, 122 bp, Homo sapiens
ggggaacctcgttcattccaaactctggaaggccggctgtccttcggttactgataaggacgcgagctcttggtaaaagatttgaacaatgcccggaaagaaatagctggacctaagaaaca

SEQ ID NO: 318088 - DNA, 122 bp, Homo sapiens
agagctatctggggagggggagaggaggccgagcagaatacaccccagagttagggtttgcgactccgcctccctgggacctggattgggtcagatgcctgtccttggaggggacaaggttg

SEQ ID NO: 318089 - DNA, 122 bp, Homo sapiens
cttagatttccacctgggagcactttgtcctctcagctcccactgcaccactttatggatcgcgtggtgactcgtttcattttatttatgtgtgttcctggaaaggacgctctatttccttc

SEQ ID NO: 318090 - DNA, 122 bp, Homo sapiens
tcagcgtctgcagcacccgctgggctctgagctagagtcccaagtatttttagaaacccgcgagatagaggagaaaggctcatcctccagttggccaggcttcctaagacgctcccccgcgt

SEQ ID NO: 318091 - DNA, 122 bp, Homo sapiens
gtttgggaggtgggagtcgcttaggaatgggtctagtcttaagaatgccctaaaagacatcgaaagtcctgcggggggatttccagaagcacttctaggtgttcgacgtaaaaaccacccag

SEQ ID NO: 318092 - DNA, 122 bp, Homo sapiens
ggtcgggggtgtccccggcggggcggcggtaggagtgaagctgaagtactgccgctactacgctaaggataagacttgcttctacggggaggagtgtcagttcctgcatgaggaccctgccg

SEQ ID NO: 318093 - DNA, 122 bp, Homo sapiens
gcgcctcttgcagtggagggtttgctcttcaggaacggacagagaacctccagactccctcggctgcacgctgggggcgagcccaggcagccacaggagtcctccaagccagatgagcccgc

SEQ ID NO: 318094 - DNA, 122 bp, Homo sapiens
gttgctttgcagagacaataaccgtcctccatattgttatcaagtttcagagtcctctggcgccagaggccgggagggtcttaaattccgtggctggccttcctatatggcgccgccagccc

SEQ ID NO: 318095 - DNA, 122 bp, Homo sapiens
tccacattttcacctgtttcagaatcaaaaccctgaaaagtcatgtgtgaaaggctcccccgcccctgcctgcgtccactctcattggccacacgccagggaggaaagtttatttgattctt

SEQ ID NO: 318096 - DNA, 122 bp, Homo sapiens
ggggagcccgccttccgcagcacagagcgcatctcctgggggacagggcgcagaggtcagcgacttggagggattgttagtatatccatgatctagagtaggaaacagaggtccagggactt

SEQ ID NO: 318097 - DNA, 122 bp, Homo sapiens
taggataatgtggttccacttaacataaggacagaataatccctcctgatgagtcagacccgtgggagggaatttgtgttggatttgaaaaaactcctttggagtttctgccaagcagcatc

SEQ ID NO: 318098 - DNA, 122 bp, Homo sapiens
caaaagctcatttcactcacacctcagggggccaacctctgggatttagggtgcgggtagcggtcgaggcttcgaggaccggaaggggcggggcggggccggtcactcaccactccgccgag

SEQ ID NO: 318099 - DNA, 122 bp, Homo sapiens
gtaccgcggagcccggaaggggctgtactttttcggcctctaagcactacggtggccgagcgagttcaaacctcgcggaaccatacctgaaaactcggggtaattcttttttcttcatttcg

SEQ ID NO: 318100 - DNA, 122 bp, Homo sapiens
tcaacctgccaggctggagaagaccgctcagagcttttccttgactggggagaggggagccggagcagcgccccacgtctcacggttcacccctgccgtctctcggggccttccttcaggct

SEQ ID NO: 318101 - DNA, 122 bp, Homo sapiens
tggcgcggccaggggcgaggcgctcattggccaatagggctgagtgacacgagtcggccccgagccgccctccgcgcgcccaggctccgggctctgaatcttactacccgcgggaccgctgg

SEQ ID NO: 318102 - DNA, 122 bp, Homo sapiens
ctgagactggtgtgactgctttgagccttgtccactgatgcagcacctgcagggtgccgccggccccagcaaggacacaccagtggttggtgggatgtgagcgggactggagtgaggccagc

SEQ ID NO: 318103 - DNA, 122 bp, Homo sapiens
aggttggcaagaagtcacgtggggtgtaaaatggctagcattctaggctcttctcacaaacgcagtatttgcacatttccctcgtctcaggttttgtgtttcagatgactggcccaattgaa

SEQ ID NO: 318104 - DNA, 122 bp, Homo sapiens
ggcctagtatacgcttgcgattgggccctggagtcgccagtctgatccctttgtcccacccgccctcaaaattaataaaactaaacaagaggctattgtgtagttctatgttctaccccagc

SEQ ID NO: 318105 - DNA, 122 bp, Homo sapiens
ttctggctcccagaggggcagaaaaccctgaaacccgagcagaagctgtcctcggtgccacgcctggagatgggcattaatagcagcctccctcaggcccctgacgcgtctgggcagctgct

SEQ ID NO: 318106 - DNA, 122 bp, Homo sapiens
ccagtctgagggccgtgccgctggatacccggtggggagctgaagttccagtctgagggccgtgcagctggatacccggtggggagctgaagttccagtttgagggccgtgaagctggagac

SEQ ID NO: 318107 - DNA, 122 bp, Homo sapiens
aacgatgacgatgtgtatagggcgcccccagttgaccgttccatccttcccactgctccacgggctgctagggaacccattatcgaccggagcggtcttcccaaatcgccaccctacactgc

SEQ ID NO: 318108 - DNA, 122 bp, Homo sapiens
ccccggggctgagagcgacagtgggggtacacctggtctcgtcattcgtcgctctgtgaccgaggaggcgggcaagaaggcagagagaagggaagggacgagaggcgaagggacgagaggcg

SEQ ID NO: 318109 - DNA, 122 bp, Homo sapiens
ccgtccaaacaaaaggttgactaactggcgttcccgtgttgcaggtggatggaagtgatccgcagtgccaccagctctgcctcgcgaccccacgtgttgagtcacaaagagtctcttgtgta

SEQ ID NO: 318110 - DNA, 122 bp, Homo sapiens
tcctcagcccttgggcggtcgatgggactgggcgccctggagcagggggcggtgctcgttcgggatgcttgggccgcacaggagcccatggagggggtgggaggctcgggcatggcgggctg

SEQ ID NO: 318111 - DNA, 122 bp, Homo sapiens
agtgctgggattacaggcgtgagccaccgcgcccggccaccgacttctgtttctaacctgcgtggccacgtcaagctatcattgaacttaagacttgaatgcgagtgggcttcgattatccc

SEQ ID NO: 318112 - DNA, 122 bp, Homo sapiens
gtatggccgctgtcatgtcgtccagaccattcagactgtcttctgtgggtccttgtgtttcgggtattttctctgccaccaactctgatggcacataggcggaatgtgctcatatcgtgggt

SEQ ID NO: 318113 - DNA, 122 bp, Homo sapiens
ggatcagcttcgatgattgctttctgttggttgctgtcggcttctgatggcccgccactacgctcctcatcttcaaggctctcgtctcctttgcaaaacttcttgaaccaccactgcactgt

SEQ ID NO: 318114 - DNA, 122 bp, Homo sapiens
tatctacctaaggcaagctaactaactcctttcaatattactattgtaaaacctaagggccgggcgcggtggctcatgcctgtaatcccagcactttgggaggccgaggcgggtggatcaca

SEQ ID NO: 318115 - DNA, 122 bp, Homo sapiens
cgcttgcgcccaccttccagatgtggaggcgcgtgctcccagatgttgccggggtggcttcgtgagtgccctgatgcacgcgtgcgctgggggagaggggaaaggcaggctaagatggggag

SEQ ID NO: 318116 - DNA, 122 bp, Homo sapiens
taagtgttgtgagagctcacagctcacctacccactgagctatcccagatcagaaacaaccgccatgcaaatcgcccccacgtttatttctatttgcctgaccaatatctgagtgcttattt

SEQ ID NO: 318117 - DNA, 122 bp, Homo sapiens
cacgccgaccaatgggcgctggtttgcggcgcctgcgcgttctcttgtttacaggaggcacgtggggcgcgcagggtagggagagcgggaggctgctggcctgaggctaaagctagtcactg

SEQ ID NO: 318118 - DNA, 122 bp, Homo sapiens
ttaatacagtgtcccctcaccgtccacaccacacgggcacgcccgcttattcctgaggaccgggctgggatgtcgcctcctttgtgtagccttcctaccctgacttcgcagactgctcccac

SEQ ID NO: 318119 - DNA, 122 bp, Homo sapiens
aagtcggctcaaggaggtcctgaagacaggactcctgagggtttggccctaggtcaccggcggacccctctcctacgctgccgctactggatcccggatccagccgcggccgaggttacagc

SEQ ID NO: 318120 - DNA, 122 bp, Homo sapiens
cgaaaggcggtgacgccacacaaaagatttctataggctccagggaggttacggccgaggcggcggcggcggcgagcccgggggcgaggcgcggacgggaacaggaaaagcctccggcagcc

SEQ ID NO: 318121 - DNA, 122 bp, Homo sapiens
gagcccctccgcccggcagccgccccgtctgggaagtgaggagcgtctccgcccagcagccgccccttccaggaggtggggggcagcccccacctggccagccgccccgtctgggagggagg

SEQ ID NO: 318122 - DNA, 122 bp, Homo sapiens
agcagtcagggaacagcatagacggtggcgtgtcactctgcacagggccccgggtggaagcgaatttgagcagtgaacaagcaccctccctccacatgggcaaggacacttcctctgcagcc

SEQ ID NO: 318123 - DNA, 122 bp, Homo sapiens
agaaccactgtagaactcctaaaccccacagaacaaacagtacattctggaatgatacgccggccaatccggctggcagccgattgacctgacccaggcgagggttgctgcaccgagtattt

SEQ ID NO: 318124 - DNA, 122 bp, Homo sapiens
ggaggagaagtgagggcagcctttaaactagtcataggccccagttgagacaattattgccgggaaagaagctgaaatgcttgactagcactgatgctgtgggggattttccctctttcttc

SEQ ID NO: 318125 - DNA, 122 bp, Homo sapiens
tcagcggcgcccgtccctcgccaagagacaagtcttctgctccgtgtactgcgtggagagcgacctgcccgaggcccccgcctcggagcagctctcgccgcccgcgtcgccacctggggctc

SEQ ID NO: 318126 - DNA, 122 bp, Homo sapiens
gctccctgaggcggagctaaggcattgacatcagaaccacaacataatcctgcctgcactcgcctgtcttttactgcatgcatttgtactcaagtcacttcttaccgcattcatgtagttta

SEQ ID NO: 318127 - DNA, 122 bp, Homo sapiens
ccagtacgcagggttccacatagagagcctggctgcatgatcttgaggtcacctaactcccgggcctcccttgtgtgtctggacagggagagaggggaggattggcttcaggagaggcgaga

SEQ ID NO: 318128 - DNA, 122 bp, Homo sapiens
tccgcccacttctcaaagccaatcagcaaattgaaaagaatgagtcaatttctctccccgcggccgctcttgattggtcacagcgggggcctgctgattccgcagaacctaggcagcctgct

SEQ ID NO: 318129 - DNA, 122 bp, Homo sapiens
gtgagaagaatggggggtggaggtgggggagactcgtcacgaagggagaccttggagcttcgagggtgggaatgttcttattagattcttcatctctgttgacacaaacatgtaggagaagc

SEQ ID NO: 318130 - DNA, 122 bp, Homo sapiens
cggggtttctatggtaacggtcttccctggcctacccgggagactcctctagggctgtgtcgaggagggcagcccccaggagtctccacgccgccagctgttgtgtcttcctgttttgtcac

SEQ ID NO: 318131 - DNA, 122 bp, Homo sapiens
tcctctgatcatctccctctggcccctccctctggccctctagaatttgatggccagcatcgagagagcccgtggcttcctggagagaaaacttcccgacattcagacaacctttgccgtag

SEQ ID NO: 318132 - DNA, 122 bp, Homo sapiens
tcagaacttcatgttccgggtgaggggcttcagggtgcccgtgtccttgccggggggctccggtctccagtctcctcagcatttccctctggtctccctccagagaggacagatctactcac

SEQ ID NO: 318133 - DNA, 122 bp, Homo sapiens
gctcaagtcctttatataagatggtgcagtgtttacatataacatacatacacatcctcccgtatactttacattacctctagattacttataatccctaatacaatgtaagtgccatgtaa

SEQ ID NO: 318134 - DNA, 122 bp, Homo sapiens
gtgaggaggcgggtggctgggtgccaatcatgctgaggagagatttccagtggttccccgcggggctcatattcacattccctaagaggacgttctggactctcgggcagagctttgtgaga

SEQ ID NO: 318135 - DNA, 122 bp, Homo sapiens
gctactaggacaaagaacaccgccccctgagatatacatgcctggacgatgaatcctgtgcgtctacacaacatttctgaatgttctgaaaaggaaaaataataataaacaaatgtgtgagg

SEQ ID NO: 318136 - DNA, 122 bp, Homo sapiens
tccaaggaagatgtggaggcaatccctcacaagtagtttcaaaacagtcacagcatggggcggaaggtagaagtatcaagcacccacctcttcaaatgctaggcctccagagggtcaaccct

SEQ ID NO: 318137 - DNA, 122 bp, Homo sapiens
cggcggctgtggaagacgatgcccaccttgtgcaggtggtagtcggcctcggtggctccccgggtgacccaggaggcccggcgcaggcggactttgcccttgacgagcagcgagtgggcagg

SEQ ID NO: 318138 - DNA, 122 bp, Homo sapiens
gaggcagatgtaatatgggtggtatccgggaaatagagttgtaccatcgggccacaaactcgggatgctgaggactgcatggggaagagttgagagaaaaaaataatgcttggacagtaaaa

SEQ ID NO: 318139 - DNA, 122 bp, Homo sapiens
tgggattggtggctttataaaaagaggaagaaagtgttgagctcacttgctgagcctcatcgccctgctttgccctgtgctgccttgggactctgcagagtccccaccagcaagaaggcctt

SEQ ID NO: 318140 - DNA, 122 bp, Homo sapiens
gaggcacgctctgccccgtgtttgacgagacctgctgcttccacgtgagtcagggatggtcggctgggtgggcctggacggctggatgggcctgggctgggtgggcctgggcagctgggtgg

SEQ ID NO: 318141 - DNA, 122 bp, Homo sapiens
gcgcagcgacggccggggccgggagcgggtcctgggcggcccaggagaagcagttcccgccggcgctgctgagtttcttcatctacaatccgcgcttcaggctgcgcaaaggagagggggaa

SEQ ID NO: 318142 - DNA, 122 bp, Homo sapiens
acaaggtttcactaacttttcagctactgtatgaggattcttctccttggcacataaatacgcaaattgatacgatgcttgtaataaagtatcctcatgagatgcaactccaaatgctttca

SEQ ID NO: 318143 - DNA, 122 bp, Homo sapiens
ctccatcagccaatccacaggcgtgacgtcagcagagggggatgggacctgcttcttgctcggatgtgtgggcatttttaaatgcagtccttcagcaagccaatataatggaaacttttggc

SEQ ID NO: 318144 - DNA, 122 bp, Homo sapiens
tatgaaacatttagtaggtgagcaagaaaagtggagtgattctgatgccagaaatagcaccgagctaatacagtttgatctatttgttatttagaatacaccagtgattctctaagggtgca

SEQ ID NO: 318145 - DNA, 122 bp, Homo sapiens
ggggaagggcgcggaggcggagcactgggcgggtacccgctggcggctctcgcgcggcggcgctgctccaccttaagcgactgtacccccttaagggcgggcgctcaagcagcgagccccgg

SEQ ID NO: 318146 - DNA, 122 bp, Homo sapiens
ggaagtcacaggcagtgaacacagcctcctggggagagagtcccagcaccacaggccagccgaagggcttcaagtcccgggaggagtgttttgttggttttggctgcctctgtcttacctgc

SEQ ID NO: 318147 - DNA, 122 bp, Homo sapiens
agggagggaggtagtggggagcccaggccaggggcaacagtcaccgggacactcgctgtgcgcagagtccttgccccaaacttccagtcgggagcccgggagagacgctgggcatcaagacg

SEQ ID NO: 318148 - DNA, 122 bp, Homo sapiens
ttgagggaaaggcaggagtctgttgggaccagatccaggggggcctccagggcagctgggcgtttagaaggacttctccaggggtatgtgggagcgaggtggggacggcagttgcatatagg

SEQ ID NO: 318149 - DNA, 122 bp, Homo sapiens
aatggcagaaatatttctcaggatattgtgtctgtttctccaccttctctttcacacactcggtagataaaaatcaagttgtgaagatctgtatatgctggcttttgtatttggtatgtgga

SEQ ID NO: 318150 - DNA, 122 bp, Homo sapiens
tgggatgatttgccgcctgccactaagtagcacatttcaattgcatttttaacaaccctacgaagtcgcctcgggaaagaaagtatttttaaaaaaatgcattttcatttaaaaaaaatctt

SEQ ID NO: 318151 - DNA, 122 bp, Homo sapiens
aacttggtcatcatggcagtggtaatcttctctgtgctttttacaccctatcacgtcatgcggaatgtgaggatcgcttcacgcctggggagttggaagcagtatcagtgcactcaggtcgt

SEQ ID NO: 318152 - DNA, 122 bp, Homo sapiens
gagttaaaccctccaggtttcaggcaggggcctctcctgaggtatgcaggaatgtgaggccggaggatcaaggcctgtgccctcagaggcaggggggagctgaacacaatatgttgaagtgg

SEQ ID NO: 318153 - DNA, 122 bp, Homo sapiens
taaaatactcctcccacctcttaaagttatgaacattaaatcacgcatgacaagctctagcggaacatgtagtaagagctcagtaaatgctttaccattgctgttaggcaaagactgcattt

SEQ ID NO: 318154 - DNA, 122 bp, Homo sapiens
tgctcaagatgctttgcttttcaacacctcaaaaaatctttggttggctgggcatagtggcgcatacttttaattccagcacttcgggaggctgaggcaggtggattgtttgagctcagggg

SEQ ID NO: 318155 - DNA, 122 bp, Homo sapiens
accgaatcacggccgcaaaggcgcaggcgcgggctcacccggagcgcaggcgtaacccgacggcgctcagcccccgcctgcgcctgcacggagcatgcgcacaaccagctccgccccgcgcc

SEQ ID NO: 318156 - DNA, 122 bp, Homo sapiens
ttgccagacacggactacttgaagtggctgttccccacctccatgcggtctaacctctatcggatctgctatagcccctggggccaggaattctccatctgcaactactggcatggtgagtg

SEQ ID NO: 318157 - DNA, 122 bp, Homo sapiens
ggcccctcttcaggcagcaggatgtaagttgtgggtgtggagcacagagtctccatggcccggactggaggggagggacagttcacaccgtgccctgaggctggactatggccttgctgggg

SEQ ID NO: 318158 - DNA, 122 bp, Homo sapiens
gtactggggctcatgcaacatgagaaaaacaaccattaccaaggcatcaagttggtaggtcgagtccttccacatgtgaaggtgcagtaagtagggctgggagtaaatgaacaataaaatgc

SEQ ID NO: 318159 - DNA, 122 bp, Homo sapiens
gcccagagttgttctttcctcccagtgggttcgctgacttcaggagtgaagccagaccttcgcacggagtgttacaactcttaaaagcggcacgtctggaattgtttgttcctccccatggg

SEQ ID NO: 318160 - DNA, 122 bp, Homo sapiens
ttttcgggtatttgctaccggctctcggtagggctggtcacctttgcttgctgagcttcgcgccctgcgtcctttggtccccagcaacttgcagggcagccgtccctcatgaggccctccag

SEQ ID NO: 318161 - DNA, 122 bp, Homo sapiens
gggtcccgggggacaccctcccgggtgagggcccactacctggatgaactggatggtcagcgcgctcttgcccacgccgccgccgcccacgaccaccagcttgtgtgtctcgctgggcgggg

SEQ ID NO: 318162 - DNA, 122 bp, Homo sapiens
aaggcagaattcaccttgacatcagtggacaggaagcaaggaggactcagagcaacatgacgtacatgaagtactgttggcttggcaggttgtgccagcagggagttcagagtccacacaga

SEQ ID NO: 318163 - DNA, 122 bp, Homo sapiens
cccctaaatcaactcaaatcaaatcaaatcaaatcctgagctcaagcgatcctcccgcctcggcctcccacacaagtactgggatgccaggcatgagccactgcacctggccaaaaaaaata

SEQ ID NO: 318164 - DNA, 122 bp, Homo sapiens
ccctgcaggccgggaggctggaccggggccgggtgggggctgggcgggggcgcgggcgtccgcagggtccgagcggccggcgcgcgtgtgaaggttaccgcttcccggcggggcgggggccg

SEQ ID NO: 318165 - DNA, 122 bp, Homo sapiens
ctgtgcaagatacattatgacattatcctgaatgcatttaaatgaaagttacttccttagcgcagctgccacttgatccatgaatttatgatcataagtagatcaacttggactctctggac

SEQ ID NO: 318166 - DNA, 122 bp, Homo sapiens
gcttgggggccattttaaagagtgaattcaccaataaaaagcacaaaaatgcaaaaaacacggcagtaaatatactgtgaaaataacacggcttacggtatgagagctgaaacaaggcagca

SEQ ID NO: 318167 - DNA, 122 bp, Homo sapiens
tctttttccccaaactgaaaccgtatacccattaaaaaatagactgggtgtggtggctcacgcctgtaatcccagcactttgggaggccgaggcagtggatcacctgaggtcgggagttcga

SEQ ID NO: 318168 - DNA, 122 bp, Homo sapiens
tctcagggttcactacactccgcgtagcctcaagcatcggccatgcgggccgcgcggtggcgccagagcgcgcggccggtcccactcacccagcactcacagggtcacctggcactgggcga

SEQ ID NO: 318169 - DNA, 122 bp, Homo sapiens
atgactgatcacagctctcagtacatgtttgtgggcagatttttgcttgcacacatagtacgaacgtctttgatcaagaccagctgagaatactggcctaaataggtagacttggcagaatt

SEQ ID NO: 318170 - DNA, 122 bp, Homo sapiens
tgcactcgtcctacaggaaattggagcccagctctagaggagcgggttttggccttggcgcgagccttgccgccctgcttgccacgtccagacatggtaaaacgacctgtggcctaagtcag

SEQ ID NO: 318171 - DNA, 122 bp, Homo sapiens
aaaagataccaacacacacaacacacatcaccaaacatcatacgcgtttataaatgggggcgataggaaagggtccagaaaggatttgaaatgacttatgagtttcaataattttttttttt

SEQ ID NO: 318172 - DNA, 122 bp, Homo sapiens
cacttcaacagcctactcccatgaccacaccctggactttgttctgaagcttgatagtcacgtactttatttttccttttagacccctccctttatgccctacactttaacctctgaggact

SEQ ID NO: 318173 - DNA, 122 bp, Homo sapiens
gcagtgcctcacgctcgcctgccccgcccgctccccgcgggcctgcgcgtgactttagcgcgcgcggctccgcccggaaggtcacctccttcatcacggattctatttgcatccggaatcgc

SEQ ID NO: 318174 - DNA, 122 bp, Homo sapiens
ctcacgctctggacaccctcctggtccctgtccctctcctccccctccagctgctcggcccgtgcagccatctccttgccgtgctcctccaggatctgctgcaggaagagccagggcacccc

SEQ ID NO: 318175 - DNA, 122 bp, Homo sapiens
aaccccagactcaccatgatcctccccggcttgaagcccttcacggctccctagtgccctcgggacaagtccaaactccctcaagtggccaaacaactggcctctgctcgttcctcacccct

SEQ ID NO: 318176 - DNA, 122 bp, Homo sapiens
gaaggaaggtcaggtgggtctagaatagaggaagtgagagaggatggatgattcaacaggcggcttagaaaactctggaactgttacttagggtatgaggggcagcttggcattgcaagaaa

SEQ ID NO: 318177 - DNA, 122 bp, Homo sapiens
ccccctcctcctcctcctcctcctcgtcctcctcctcctcctccttccacccctccccctcgtcccttagggatggtctagtaggaaaagtcactcaggaatggcaccacgtactttcagga

SEQ ID NO: 318178 - DNA, 122 bp, Homo sapiens
agttaaatctcaggaggaaaagaaaatacgaggacaacaaagagaggaagtggcctgggccggcctacccggtgggtcttgtcctgccccccaactaccctggctggccccacaggggccgc

SEQ ID NO: 318179 - DNA, 122 bp, Homo sapiens
tggagagagacctaaatggaagttcaggagggacaacggactagcactcttgtccttgttcgctggaaggaaccatcaagttgatggggatggacattgggatagattttgagagcaagaga

SEQ ID NO: 318180 - DNA, 122 bp, Homo sapiens
ttaaggactcacgaaggacaaggcagccatcttggttctccatgagtccatgcttaacatcggacttatgtcctcttgggtgccagttgtttctccaaattgggcacatagcatggataact

SEQ ID NO: 318181 - DNA, 122 bp, Homo sapiens
tgagagtcacccatcaccatccatctggtggaaacattacaggagcaagtggataaaagacgattttgctgtaagatcagaacggaaaaagacgagcccacaaagaaaatctagagggagga

SEQ ID NO: 318182 - DNA, 122 bp, Homo sapiens
gcctggtgggaagaggagcgatcacgccccagctcctcgcgatgttccgttgtatttgtacggaatgtagatggtaccaaaaaaatcgctccaaggccagagttggcctccagttaccacct

SEQ ID NO: 318183 - DNA, 122 bp, Homo sapiens
ggcctctccgttcgcgcgcagccgcctgcagacccggaagtggatggcgtggagatatggcgcaactgcggcgcgtgagttttcctttgtttagattaagtgttcgcttagcggtgccctca

SEQ ID NO: 318184 - DNA, 122 bp, Homo sapiens
acgcgcggattcgttttccgtttggtaactgacaggaagcggaagccgtgcgtgggaggccgattctagtgcgcctgcgtggccgcgaatcaccagccagcctctgggtctgtagcaaccgc

SEQ ID NO: 318185 - DNA, 122 bp, Homo sapiens
atttatactagtttcagtctctttaaagtcatctgtctagtcactacagagtttcttcctcgccgtgtggtcttatcactaactcagccctgggagggcagatttgaggaattgcttcattt

SEQ ID NO: 318186 - DNA, 122 bp, Homo sapiens
atcaacagaggtacttacccctcccgagggaagctgaggtcttattagggtagtgaacaccgtgccagatgttttgagagtgccgattgagagaaggtacagacacgggaaacgttagcatt

SEQ ID NO: 318187 - DNA, 122 bp, Homo sapiens
cttgttcaaggaaggacaattacatgcagttagaaagtggaggtgatgaaagagatgtggcggacagtgaggttggaaagcagagacacgatcctggagatcaagtgaaaaatagaactaga

SEQ ID NO: 318188 - DNA, 122 bp, Homo sapiens
caagtcaatgaggcttttccctccgcgatcatggtgaatcagcaaagcgctgcagagcagcggcacctccacgagcagaaattaagatgctgggggaacggcacgagtggagtgtggcaggg

SEQ ID NO: 318189 - DNA, 122 bp, Homo sapiens
acttgactttctcttgcatattcagaaatgtttaacagtggctgtagacagtcaacccatcgaaccagagaaatgtttaaaagaaaaacataaaactcaaacaaaaccttgtgaacagaaca

SEQ ID NO: 318190 - DNA, 122 bp, Homo sapiens
aagccgagctgtgacctgaggcccaagggccgctggggcatttccacagggcagtcacaccgtccttcagagaagggggctggcctttgtgcctcctcaacagttagcctctggctgcagta

SEQ ID NO: 318191 - DNA, 122 bp, Homo sapiens
cacgatgcctgtcaccacagtcgtggatggctgaactgaaactcaggaaacctggttttccgagctttggctgtggtgtcctgaggaaatcggtccacctccgtgccacactgtgccggctg

SEQ ID NO: 318192 - DNA, 122 bp, Homo sapiens
acacaccacagaccatggcttgaaagctacttgcagctacttaataaacttaatttcagccgggcacaaggtgctcgcctgtaatcccagcggtgctgcagtgagctggccaccagaaatca

SEQ ID NO: 318193 - DNA, 122 bp, Homo sapiens
gctggcgcctctgcccttctacatccttgcagccttcagtacagctgctccgtcatgtgtcgggacagcagtgctgacgtcgccagctatgatttgggtttgtctattttttccttcagttg

SEQ ID NO: 318194 - DNA, 122 bp, Homo sapiens
cgtgttcccccctttgtgacagggagcgtttccgggcctgcgggtcctggcgggggcggccgtgccccgcctgcgagtgcgcgcccgccgtgtccgacactgccccgggggccgcgcggctc

SEQ ID NO: 318195 - DNA, 122 bp, Homo sapiens
agaaacagcaataataagtcttgagaagaaatctagggtagatgctgtggaagcaggagccgtccagggatggcatcatgttaggtctttagatggcagacagcaaggctcctgcagcaagg

SEQ ID NO: 318196 - DNA, 122 bp, Homo sapiens
atcttggtcccttacttagtcactttcttaaataccctcagttccctgatttgtcgcatccgcctggcaacatcccagtcttgaatcggtccaactgtccgccttttccatgcctgcgccca

SEQ ID NO: 318197 - DNA, 122 bp, Homo sapiens
ctcaacccctctggacttcagcctctggcaaatagagtcaggctgggggtgcccactggccggcactgtgccaggggtgtctgcgccctgctccccactgtggccttcagcagcctcttctc

SEQ ID NO: 318198 - DNA, 122 bp, Homo sapiens
tgaccacgccctccaggcggatgatattggggtgctcgaactggcccatgatggaggcctcgctcagaaactcacgccgctgccgctccgtgtagccacccttcagggtcttgattgccaca

SEQ ID NO: 318199 - DNA, 122 bp, Homo sapiens
gaaagggaaacaacattattgagtccttattgtattttagggctttaacatgcaacttctcgttgcatcctcacagcaccctttagagttagatctattgtccccattttaaagataaaaaa

SEQ ID NO: 318200 - DNA, 122 bp, Homo sapiens
ggtgactcaccacgaggcccaggggaaggaatgaggcccaacaaggccctggggaccgggcgaaggaacgagccctgggagaaggaatggcagcagccctcttcacctgcctggtgactcac

SEQ ID NO: 318201 - DNA, 122 bp, Homo sapiens
agagcgcccgtgtgaagacgaagacagccgcggtcatgctggggacacgcggagggagcgcgcccgtgtgaagacgaagacagccgcagtcatgctggggacacgcggagggagagcgcccg

SEQ ID NO: 318202 - DNA, 122 bp, Homo sapiens
aaaaaaacaaaagcaaacaaaaaaaccaaatgcatcccttgtgtaatttttaggtcaccgcgccatgggaacacgctaccaggggaagggagctgtgagacgcgcagggaggctccagacag

SEQ ID NO: 318203 - DNA, 122 bp, Homo sapiens
cggacctcatgcccccagagccttgtaaggaccggctaatgagggcaggcgagtgggaaacgaatcgtctgaacaatgatcagtcattctttcgggcttgcaaagagggtaaaaaaggttgg

SEQ ID NO: 318204 - DNA, 122 bp, Homo sapiens
gtgagcgagtgccccacccagcccgaggaccaagaccccaccccatcccaccacccgcctcgagggaggtaccccagagagcttttggtctcaggcctgctatctccaggccctacgtgagg

SEQ ID NO: 318205 - DNA, 122 bp, Homo sapiens
gacgacagggtggtgtggccggggcctgtgggactcatcttccctgggcagtgctggggccgccttggctgcgtcctcgtgtggatcactgtgtttttatgtgacacggctttgagcgtcgt

SEQ ID NO: 318206 - DNA, 122 bp, Homo sapiens
accccttctcctcagtgaggacggggttgtggaccaagcaggacacagactctgcagaggcgttcctgaccaccagggtggcttccgcatagaacaggccatctttatcttggatgcgatgc

SEQ ID NO: 318207 - DNA, 122 bp, Homo sapiens
gcaggtgacccccgcccaggtcaccgccccaggcgcacgccccatcggacatttaaaagccggtggtctctattgggcatggttttggagaaggaccaggcaagaaatgatcttggggcccc

SEQ ID NO: 318208 - DNA, 122 bp, Homo sapiens
cctccagaagccctgtctccatgatcagccctgcacctaccaggctagagacccaggagtcggccttgtacctgcttccttctcacttccacctcctgtcatccagagctgtcagttcttcc

SEQ ID NO: 318209 - DNA, 122 bp, Homo sapiens
aagccacccgtctaccaatctccctctttctgcctaggaaccatggcgcggacggaaaaacgaagccatggtgactaatcctcaggctccaggaggtgactggggtgagtgaaggcgacttg

SEQ ID NO: 318210 - DNA, 122 bp, Homo sapiens
taaatctaaaccaagacgcttgactccgtagctgctgcttcgtgaatattaatgaggcttcgttttagggggacgtcctcgcatgccgccatttgtgcggcattgaccaaactgcttttcta

SEQ ID NO: 318211 - DNA, 122 bp, Homo sapiens
gatctggtaattgatcaactgagtgccacttagcccccgaaaacagagaccctttgtgcccgcctcgcacccgctctgctaggtagcaaccgaacccccagagacatcggagcgggcgctgc

SEQ ID NO: 318212 - DNA, 122 bp, Homo sapiens
tatgagctgtaacactcaccgcgaaggtctgcagcttcactcctgaagccagtgagaccacgagcccgctgggaggaatgaacaactccagacgcaccaccttaagagctgtaacactcacc

SEQ ID NO: 318213 - DNA, 122 bp, Homo sapiens
gctccctggatttgaagttgcgggtcttggggcgaggcttagctggtctgggggtccttgcgtgtccacagccccggatacgcacccgcgaaacgttcgacatcgccgcttttttgttttgt

SEQ ID NO: 318214 - DNA, 122 bp, Homo sapiens
gaggcccactcaggacgctcgccagcgccaaggccagcgccaggcgggcgcgcacggcggcgccgacccctgcccacccgggggccatggtgtgcagggccccgctcctggaggaggctgcc

SEQ ID NO: 318215 - DNA, 122 bp, Homo sapiens
gttggtggctgcaccgagattctaatccatgcggatctcatctggcccctgttgtgaagccgcttccgtgatttgcttaaaaggctccttagaaacagtgaggaaaattcgattctacttga

SEQ ID NO: 318216 - DNA, 122 bp, Homo sapiens
cacagaggagcgtttctggaacgcgctcgcagcacgacaccgcggtgtgtgcaagcggaacgccgccctgtccttgagccttttggctgagattgggagggcagaggaagcaggaaggtggg

SEQ ID NO: 318217 - DNA, 122 bp, Homo sapiens
actccaggcttgtcttggctccaaatggatcccaactgctcctgcaccacaggtaagggacgcctggctctgggccttgagatgcccattcccggccactgtacacagtgtccctgggttag

SEQ ID NO: 318218 - DNA, 122 bp, Homo sapiens
gggaattacttaatctggctccagaaggggtgagttgtggggaagtagtgattctcagttcgtttgctcagcccagtcagtgcctgacactcagggtgcatctgctgactgaccgtacagga

SEQ ID NO: 318219 - DNA, 122 bp, Homo sapiens
ttagccgccaggtgctggatgggggggccatgggggcgggaactgggccgcagctccaggcggtagcacaataacacactcgctcaaaactccgagctccagcgcgcaaaagcaactctgtg

SEQ ID NO: 318220 - DNA, 122 bp, Homo sapiens
ctcttactgtttagatttggtaaatatttcttccttccctcttctgaccctccattttgccgatctttccttcttataacacatacttactaggtacctgctacttcccgggtgggcctatg

SEQ ID NO: 318221 - DNA, 122 bp, Homo sapiens
taccttgatccctttcccgactggagaggcattccaaggctcactccctcccaggtaacacgcaacccgagtagctctgtctgagaaccgccattcgccttgccgtggtccctgctgtgctg

SEQ ID NO: 318222 - DNA, 122 bp, Homo sapiens
cggagccgcaggccgcccctcccacccccacccccacccccacccccccaagtccccggccgcccgttccggctaacacctgtaggggcttccgcactgccccagtcgtccaaatccttctc

SEQ ID NO: 318223 - DNA, 122 bp, Homo sapiens
gtctcaggggcagcagctgtgcaaggtgcgcgggctggggcggcggccgggaactggggacgcaggaggcgcggcccggagctccagattctgtggggacgcccggcggggtccccggagca

SEQ ID NO: 318224 - DNA, 122 bp, Homo sapiens
aactaggcactagcagcaggggcactagcagcagggacactccctatctcgcctgtcacccgcgtccagcaaaatctgatgccctgtcggcccagcagggggcggtgctgctttagttttgg

SEQ ID NO: 318225 - DNA, 122 bp, Homo sapiens
accatgaccaagtaaaggataaattcaaaaaatagcctcatgagacttggcatacacactcgtgggattccagttattatggagtgcttccatccctctccaccccttccccccaaaaggtt

SEQ ID NO: 318226 - DNA, 122 bp, Homo sapiens
cgccggctcaggagcgaagctgcggactttcgcggtgagtgttacagctagctcttaaggcggcgcatctggagttgttcgttgctcccggtgggttcgtgttctcgctggcttcaggagtg

SEQ ID NO: 318227 - DNA, 122 bp, Homo sapiens
tattggagcgctgatgactctggatgaatctctctctactcaaccaacagatacaatatgcggtacaggataatggaggcaggaagtgagcctgaaagaaaaaaatatatacctatagctga

SEQ ID NO: 318228 - DNA, 122 bp, Homo sapiens
tgagccagtgtaaacacaacaggggacttccttatagggatccagggggcccttagggaacgtgaggaccagatgtagtcagtgctcgggaagggatgggacaagacagggaccagaaagcc

SEQ ID NO: 318229 - DNA, 122 bp, Homo sapiens
gcactcacagtacttgatgaccgcgatgttgaccggcgctgtacaagtgactgccgccagcggcttctccgaggccatggtcccaccgcgcagtgaccccagctccacagccacttacggcc

SEQ ID NO: 318230 - DNA, 122 bp, Homo sapiens
caccgaacgcctccgtcgttcccgacccctccgccctggctgaagccaggggagctggagcgcagcgcgtccgctgcagctcatgacagagatagagatgtagataaacgagactcatctgt

SEQ ID NO: 318231 - DNA, 122 bp, Homo sapiens
ccagaaccacgatgaccacaagtttttatgaagggagcagccacgaacgccggcgctgggcgaactggtgtaatatgagtaagaaaacggcagctagcattgattgagctttatgacaagcc

SEQ ID NO: 318232 - DNA, 122 bp, Homo sapiens
gtcacggatgcttctgaagcacgcgagcgtgattttggatggaggccggccagcagggaccgactttgtctagctgctgccggttcctgtaagggacatttttttctgagtaaatggcgatt

SEQ ID NO: 318233 - DNA, 122 bp, Homo sapiens
acttccccgtgaggaggaaggtttgggtcatcagggcccacccgagacgagcctggccagcgaggaggtagtcagcgccgcaggtgcgagcccgggatggggacgccagggcggatcccgca

SEQ ID NO: 318234 - DNA, 122 bp, Homo sapiens
tgctgactttgggctggcccgcggcgtccaccacattgactactataagaaaaccagcaacgtgagggagatggggcagaactggatgggggtggaggggcactgggcccggggtggcaggc

SEQ ID NO: 318235 - DNA, 122 bp, Homo sapiens
agaaactgctttgttttcctgaagtcatttgaaacagcgtgcagagacatttaaactcggcgggaaataggagaagcccaccttgacccttctaattctctggccccaggtgccttattaac

SEQ ID NO: 318236 - DNA, 122 bp, Homo sapiens
gatccggtcgaaatagaaaacaggtaaaccagtgaggctccggcttggcactccatcaggcgcccagtcatttgggcagctggaccccttctccgggatcccttgggagtggccggagcggg

SEQ ID NO: 318237 - DNA, 122 bp, Homo sapiens
gcctcgggtttctccaggaagtttccatgagttcccgagcagcctgtggacgtctccgtccgtcactgggtgctcagaaaacgctgcacgaatgagcactttccagacctgactttatgcac

SEQ ID NO: 318238 - DNA, 122 bp, Homo sapiens
tcagcacccaggtctccgggagccagtgaaggaaccaagtgttggatactgagcaagtcgcgtaacatctgagtagtcgtgaaattgaaatttcaacggtataaaggacacgacgttgtctt

SEQ ID NO: 318239 - DNA, 122 bp, Homo sapiens
ccagacccgcactgggagatggcagctggaggggcccccgcagcaggcctgccgtctctccgcagggggaaaggcgaggcccgggccaggctgaagcggtcgcagagcttcggcgtggccag

SEQ ID NO: 318240 - DNA, 122 bp, Homo sapiens
tctgtggtacttccttgcggcagccagggggaatcacacatccctctgcgctggtgcacccggattccaagaaaaagctgctgacgtccagaccacacagcctgctctcgggcaaatgccag

SEQ ID NO: 318241 - DNA, 122 bp, Homo sapiens
tgggcacgccttatcccctttgggtgaatctgtcattttgtccctttcgtgaaccaccgtcggggccaaagacgtctgctgccacctggtggcgggacctggaatgacaagtctctgatccc

SEQ ID NO: 318242 - DNA, 122 bp, Homo sapiens
gcggcaagggttgtctgtccccacccgcctgggacttcaagactcgtctctcccttgcctcgtccactctgcccctcacagacaggactgcagttgggaggaagggatcacctctaccctct

SEQ ID NO: 318243 - DNA, 122 bp, Homo sapiens
cactttaggagatacagagacccatgatacttgtagataaagcgaaacctttagcctcatcgactaattaatggcctcaaagtaaaataatgaggtgtgtggagatagggattcagttactg

SEQ ID NO: 318244 - DNA, 122 bp, Homo sapiens
gcagtacaaggaggagaaaccgctctcacgggaggcgctgcggccactgagggagacggccgccgcgggtcacagacggatgcttccgtttccggttccggggcggctgggagctgaaaagt

SEQ ID NO: 318245 - DNA, 122 bp, Homo sapiens
ggggtcttgggtgggagttgggggccccttcatttcccaggtctggatcgattcacttgccgggagagactttttacaactcatctgcagctccgggtgcggttgggggagatagcgaaggg

SEQ ID NO: 318246 - DNA, 122 bp, Homo sapiens
ttctggagagtatatgaacacaactaacttatacagttgtaacgaaggctaaatgatgtgcgtgaatcatgcgcaagaatcggtgggcagaacaccgaataaataccagttcttacatgaca

SEQ ID NO: 318247 - DNA, 122 bp, Homo sapiens
tgtctctaatccattcctggcctctgagcttcagcaacatctattcaattgcccacttaacgtctccatttggatgtttcccaagcatatctaacattttacacacaaaattaaaggttata

SEQ ID NO: 318248 - DNA, 122 bp, Homo sapiens
ggctaggcttatatagttcacgcattcaccagttcattcataaaacaaatgtttgttgagcgcccatcatatgccaatcacagtgacaagtgctgggtgagcaatactggagagataacgct

SEQ ID NO: 318249 - DNA, 122 bp, Homo sapiens
aggaaacgtcagagttgcggtgatgatgattctctgacagctatccgggtgacagttgcccgaaaaattcctaatcggttatctcttgcgtgcttcagagactctgaggcgctcctttccgt

SEQ ID NO: 318250 - DNA, 122 bp, Homo sapiens
ggatgagacaggcccactctcccttaacaaagatggcgacaacggcgctgtctatggggccgcgacgtcgtctccgctgcgcgtcggccctcacccacgatggcggccagtctcccgaagcg

SEQ ID NO: 318251 - DNA, 122 bp, Homo sapiens
taagctgtttattaattttattgccaacaattttgttttcctatttatcaaaatttttcacgtttcccccaagcatttaagaagaaattgaagagtgttgcaagatgtcttctttcctaggt

SEQ ID NO: 318252 - DNA, 122 bp, Homo sapiens
cagacctaaggagcggggacctcaggccggaccccggggcggtgcagcccctagacaggacggctccaggtcgacccgagatcatggcaccggtatttttgcatctcactcctaccctctta

SEQ ID NO: 318253 - DNA, 122 bp, Homo sapiens
ggaccccagatcccagtgccgctggcgagcactcggcgtgcagatgtctggggggctgtgcgcgggagaggaagtctgcccaacgaggtggacggacactgggcccgcggggacccatctga

SEQ ID NO: 318254 - DNA, 122 bp, Homo sapiens
gaaaaggcagctgggcccgggggaccgctaccaccaatgcgcggagaccggtagtggccccgaatgtcgggctgcactattatttattggatacaaggcagaaggggcagggtaaagaatgt

SEQ ID NO: 318255 - DNA, 122 bp, Homo sapiens
aagagacctgacagccaagccacgcccctcgccacctcgaagctccgcccctgggggagacgcccaccctctggtgcgagctcactggctatctcgcctgactgtcccgtggaggggcggag

SEQ ID NO: 318256 - DNA, 122 bp, Homo sapiens
ggtgtagtctgtctgtgtcaggaacctgggtccctcacccactacccctccccacccacacgtttcctctgtcatagcttccggtggaaagaaccttataaaccagggctttacagagggtg

SEQ ID NO: 318257 - DNA, 122 bp, Homo sapiens
tggggacaaacaccccaggaccctagcagccactgaccctgcctcccatgcatctgccctcgcaggtcctcatctggaacctggatgtgggtgagccggtgaagatgattgactgccacacg

SEQ ID NO: 318258 - DNA, 122 bp, Homo sapiens
cagcgggttttcctagtccctccctgccaaatcacgttgggactgagacaagaggcactgcgggtctcttacctatagttacgaagcaatggactcccttattacttcgtttcccaaatagg

SEQ ID NO: 318259 - DNA, 122 bp, Homo sapiens
gctcacctttgagacagaacaaagggcatctggttatacgccctctgcaaggagcttctgcgtgtgttccttcttcccaggtgaaaagaacaagtggacaaatcttgtttcttagctgagct

SEQ ID NO: 318260 - DNA, 122 bp, Homo sapiens
aactgtctttggttgctcacagggcacactgtagctttagacagtgacaaactatttgaccggccaacaccaaaaaagtattttgagcttatggaaagttagtatgagatcatgcactgcta

SEQ ID NO: 318261 - DNA, 122 bp, Homo sapiens
tgctcactaaacagtcaaatagaattgactgattatttgccacatgctaccaagagatagcgcatgtgatagactacagaataggaatgctacttaacgtgaattttattacttctcagcac

SEQ ID NO: 318262 - DNA, 122 bp, Homo sapiens
tgtgcatctcccttacctacagcttgttcaccagagccctgagcaggttgtttaccaggtcgggagtgttgactcagaagacagatgactttcagcacatgcaaaccgagtattgcaaaagc

SEQ ID NO: 318263 - DNA, 122 bp, Homo sapiens
gaaggatcacagtgagggataaggtccaaattcatcccgcttgtggatatcctagtatctcgcaactacgctactcctcccaggactaaaagtcaaataagaaaaagcgcccatgcagagga

SEQ ID NO: 318264 - DNA, 122 bp, Homo sapiens
tgagagcccactcctggatggagagtggggtcagattagaagtttagaggaacatgcaggcggtaggcgtaactccctctgcccgtgttgtgtgctaatctttgcctgttctgggtcttccc

SEQ ID NO: 318265 - DNA, 122 bp, Homo sapiens
caatgtagtggtcagttttctcttgcagtcgtcagcctgaacataacatccttgggattacgctccctcaaggagataagtgatggagatgtgataatttcaggaaacaaaaatttgtgcta

SEQ ID NO: 318266 - DNA, 122 bp, Homo sapiens
cccagtaaccgtgcccaagaggaacaatgatcaccggttccccagcccgagagagaagtgcggatgtgatagatacattttatttccaccgaggtcccctgcccatcggcccccacatgcag

SEQ ID NO: 318267 - DNA, 122 bp, Homo sapiens
caaatgaacattttaaaacctaagttggatgtcatttcccttctcaaaactttccaatagcgtctgttccattcactgtctttatacaaggtcctgttgtatctggctttctattgcctctc

SEQ ID NO: 318268 - DNA, 122 bp, Homo sapiens
ggattcgtagaatattcgacgggggcgggggatcgactctgataagataattctgcactgcgtggggtgcaggagagggaggagactgcacgttcggctccggcctcctccgcgccgggctc

SEQ ID NO: 318269 - DNA, 122 bp, Homo sapiens
ccagcctttgcctgtgcagcggtcgccctaaactcgcttccggtttcctcttccccaatgcgagcaccccaataatcagggctcatagccttcgcacgggctgtgccctcttttgtattcct

SEQ ID NO: 318270 - DNA, 122 bp, Homo sapiens
gccggggtggggacccggagccccgtgtgctcactgggggcgcctggcctgccgagcccccgcatggcccctttgtgctctgtgagttggataatgggcggcattctcagacgtccagtcat

SEQ ID NO: 318271 - DNA, 122 bp, Homo sapiens
gcgccgcccgggaacaggaatagcgaggccttctcatgtttcctgactgccggtcccagccggcgaacatcctgcgggcgcggtatccacgttcccgggcgggtggagaggaagcgtccgcg

SEQ ID NO: 318272 - DNA, 122 bp, Homo sapiens
ggacagaagcccccagcagaacccaggccggagccccgcgcacctcggataagggggtggcggaatgcacccacctggtccctgagggcagcacccttagattgcccaggctgccgcggagg

SEQ ID NO: 318273 - DNA, 122 bp, Homo sapiens
gtctctgataaatacgctttatatgcagaattggatgaaacgagaaagcccggagaaacccgggctccagattctctaccccggacgcctgggaggcaaagaggttctagatacgccctcag

SEQ ID NO: 318274 - DNA, 122 bp, Homo sapiens
tctccgctgtagtgttctgagttcaagttgcctcggaagtcccagttggggatacgctctcgcgcaccaggtacgcctggtgtttctttgtggtttttcggattctttttggggagtgcggg

SEQ ID NO: 318275 - DNA, 122 bp, Homo sapiens
acttcagttctttctctctgattcatatcctgaggaaatcaacatgataaaaaatggctgcgttcaattaaaaaatgtctccaacccacactttaaaaacataagctcttttcaatccagat

SEQ ID NO: 318276 - DNA, 122 bp, Homo sapiens
ttttcactcttttacttgtgcgcagtagtaagtgcttcagttcacaaaagtggccaaagccgccgtcacaacacctcagcgcggtggtgtgtcttttaacccacgtgtttgggtgggaatgc

SEQ ID NO: 318277 - DNA, 122 bp, Homo sapiens
tgtgacatctggaagcattaacactttgttgccagcatgtaggctagttgaatgccgatgcgtaggtgcctggtgttttctggtctgctacatgaataggcgtcaaaagttggtggtgagga

SEQ ID NO: 318278 - DNA, 122 bp, Homo sapiens
acaaggtgaaccttgtaaaagtggagcgttccttcacatcagcagcagccagcgtggaaacggtcccactccagtcccacaggccgggagcagcaagggcgcagcctgcctggggctctgcg

SEQ ID NO: 318279 - DNA, 122 bp, Homo sapiens
aaatatcatgccctatttaaatgacagttaagcttttggctggatcaggaatcagcacatcgtttcattcagttaggtaaatgccaggctgcaatgacatactgtaattacttagggcttgg

SEQ ID NO: 318280 - DNA, 122 bp, Homo sapiens
ggctttggctgaacttgtcctctaggaagtgtgtgtggcagggcactcctatctcagccacggcagccacttcagagagctgagctcatccgccattccagtgttcagaggccctgtgggcg

SEQ ID NO: 318281 - DNA, 122 bp, Homo sapiens
aagacttgcagaaagaacctggaagacagaggctggaggtgagctataaaaacatagttccgaacagttaaaatagaggtatgtgagagacagagctgccttgggttactagcagtgtgggc

SEQ ID NO: 318282 - DNA, 122 bp, Homo sapiens
atggtattataatcttgtgggtccaccatcttatatgtggcccatcattgacctaaacttcgttatgcagtgcacgactgtagtttcagcagaaagcagccaggatggaatgaaggcacaat

SEQ ID NO: 318283 - DNA, 122 bp, Homo sapiens
cagctccagcgcctacaccgggagaggggcaccacacgtgggtgagcacacggcgtttgacgtcatcagctcgggacggctacgctgcgccctcccggcctcagcccctcagcggcggaaac

SEQ ID NO: 318284 - DNA, 122 bp, Homo sapiens
cctgggttcccgctgcgtgggccgcgtcatcacatcctcccacctcaggcaccggtgcaacgtttctgcagccaggccgcctgtcaccccactgtgcgcgccccagcggccccggcccagag

SEQ ID NO: 318285 - DNA, 122 bp, Homo sapiens
cgcggtgggttcattagcgggcgcgccgggcccgcgcagcgctgtctgcagccgcgtcgccgcatccatcatcattacatcagcgcggggaagtccacgccgagttctcccggccccggcgc

SEQ ID NO: 318286 - DNA, 122 bp, Homo sapiens
tgcagtattcctgtgttgctgtttgagctgccccctctctgtgtgtctttctttcaccctcgccttcacttcaaaacctaacaatcttacctcatcatttttgctgttggagtcacaggggc

SEQ ID NO: 318287 - DNA, 122 bp, Homo sapiens
atcagattcaaggagacagaggcgcaggcacagccctttcatcagctgaccaggagtgctcggcccggcctgccaggaacctcttatcaaactccaccggctgcctgcatctacaattcaag

SEQ ID NO: 318288 - DNA, 122 bp, Homo sapiens
gagagcctccgaacagcgagagcttccgaacagggacagcctctgaacagggacggcctccggaacagggagagcctccgaacagggagagcctccgaacagggacggcctccgaacaggga

SEQ ID NO: 318289 - DNA, 122 bp, Homo sapiens
atgactgaccatctcaattgtgagctaagaagccttagctgggttgggcgcagtggctcacgcctgtaatcccagcactttgggaggccggggtgggcggattacctgaggtcagcagtttg

SEQ ID NO: 318290 - DNA, 122 bp, Homo sapiens
gtcccccacatcctcctccatggggggctccttctcctccccgtcccgcaggctgccctccgaaagcaccagcgacaaaccctgtggcagacactcatgagctgggccggctttcggcagtg

SEQ ID NO: 318291 - DNA, 122 bp, Homo sapiens
gaatgaagaattgctcgccctatttacttgcacaaacaatgcattagtgctcaatttctgcgtggaaagttctgactgccactccacagggcttacaggggtctgcaggccctctgcatgct

SEQ ID NO: 318292 - DNA, 122 bp, Homo sapiens
gtggaggcgggtggcggaggaagtggtagaggaggagaggccaggagctccctgagccagcgctcccacagaaggaagttcatcagaaaatcacagagggcctgggacccaaggtcccccat

SEQ ID NO: 318293 - DNA, 122 bp, Homo sapiens
agttccctgatttgtcgcatccgcctggcaacatcccagtcttgaatcggtccaactgtccgccttttccatgcctgcgcccaggcagctaaacattgctggggaaaactattcaacttcac

SEQ ID NO: 318294 - DNA, 122 bp, Homo sapiens
aaacgttctgttgtgttcagcgcttccagcggtgcagcagccgagaaaacactgagtctccgctattggcgaaagtgctgatgcgaaactgctggctcgacataggcacagagccgcggaag

SEQ ID NO: 318295 - DNA, 122 bp, Homo sapiens
attaggactgaggagttctgagcactgaagagctggggagggggtggttgcagtgtatagcgtgtgatctgcttgtaacagtttcgttgcattatactaagggttactctacctagaaaagg

SEQ ID NO: 318296 - DNA, 122 bp, Homo sapiens
gtcgctaggagacagaagacggaagcggaaatgcctttcacgacaacttccggaagaggtcgccatggcttcccgggaggaggtactcgccttacaagctgaagttgcccaacgtgaggagg

SEQ ID NO: 318297 - DNA, 122 bp, Homo sapiens
cggctactctctactgcacacatagtgtggcatctggcatctggctggctcttgggatggcgtagcctgtgttctacattaggtgggaggcaccctgtgctatttgtagcagttacaaccct

SEQ ID NO: 318298 - DNA, 122 bp, Homo sapiens
ctacaagttcctgcagttcgcttacttcaaggcaagtccgcctcgccccgtcccaggccccggccccgcccctgacccagcctccaggccctagccccgcccctgcgcccggggccgcgttg

SEQ ID NO: 318299 - DNA, 122 bp, Homo sapiens
ctacctggctcaagcaatcctccagcctcagcctcccatgtatacagctgggactacaggcgggagtcaccacgcccagctcatttttgtatttttctgtagagatgggtttttgccacgtt

SEQ ID NO: 318300 - DNA, 122 bp, Homo sapiens
agcggctcccggccagcggggacgtggaggtgacatttctctgacccacaggactgtgggcgccctgccgagcgtcgcgcggtcttggggcgacctgcagtggggcccctgcggcgcagcgc

SEQ ID NO: 318301 - DNA, 122 bp, Homo sapiens
ggagagaccagcagagtcccctgcaggaattcacgaaaggtttcccagaagcgggcagcacgtgagcatggtccttgggtagaaacgattgggaagggccttccaggccaggggaacagcat

SEQ ID NO: 318302 - DNA, 122 bp, Homo sapiens
aaaatctctcccggcaccactgtagtcagcgaggccagtgggtgcagggggctcctcgcacgcgctgtcagcagcagcagtgaggaagccagcagcacagtctgggaaggaaggaggtgcct

SEQ ID NO: 318303 - DNA, 122 bp, Homo sapiens
tgacacgatggctgaatagttctccacatacacatgtacaccacattttctttatccatgcgtctgttgatggacacttagattgcttgcagatcttggctactttgaatagtgctgcaata

SEQ ID NO: 318304 - DNA, 122 bp, Homo sapiens
gggcacctggcctagttcggcaccctctgggacccctcgaaggatgacgtgggagaaatgcggctgaggatccccaggattggctctggaacccaaccctgtcacttctaccagcagctggg

SEQ ID NO: 318305 - DNA, 122 bp, Homo sapiens
gtatgttgtcagagcaattccatgcttcatttttgtatttggaggttttaatttttccagcgtattttcagctggagttaacagcatattaattttttggtggagaacactggctttattac

SEQ ID NO: 318306 - DNA, 122 bp, Homo sapiens
gctgatgaagtgctcctcatgtggcaggcattgtgctaataagcaggaccaggaagaggacgaagagggtaaaagcttagccgacaaattgtaaggagatctcaaggtcgtgcaagtcgaaa

SEQ ID NO: 318307 - DNA, 122 bp, Homo sapiens
ccctaaattcacttatcaaaggcagcaagaataactgggactcttctctcttgcttttcacgatttccagcagggcacaaaggcctacagtccccacctgaaaaaaacagacttgactggag

SEQ ID NO: 318308 - DNA, 122 bp, Homo sapiens
gaagttggcctgggtggtctggagcacagatcagctctggagttggaacttataaatcaccgtttctgtcccatcctatgggctcagtcacaccctcggcactctccttcccagacttgctt

SEQ ID NO: 318309 - DNA, 122 bp, Homo sapiens
aggaaccctggaacccgctggccctgaggccacggaccgagacgtggtgctgagcccctgcgcggtttctggtgcgtagagactgtaaatcgctgcgcttctcagtcatcatcatcccagct

SEQ ID NO: 318310 - DNA, 122 bp, Homo sapiens
ctggaccaaggcaacaggaagtgagtacctctattccggaaactagttatgaaccctccccgccccccgtcgccaacattccttcgttcccctaaatcagcctcttgccccattgctctttg

SEQ ID NO: 318311 - DNA, 122 bp, Homo sapiens
ttttccttccccttccttcagtttcaaggaggcattttaacctcctggctgagcggggagcgagcgcaggagcacacatcccagcggagaggcctggcagccagacacctgacccaagttgg

SEQ ID NO: 318312 - DNA, 122 bp, Homo sapiens
actctctgccggagccacccctcaccacacacaagacggggtttgttgtttttctcgctgcgatgccaaactataaaaccagcgtggcagggtgcctccctcagtcatctgcacatcattcc

SEQ ID NO: 318313 - DNA, 122 bp, Homo sapiens
ctgttctaagtaccgtgcaactattagttcatttaatccttacaactccactatgacttccgtggttagctaataatgtgttacctccatttgcagatgaggaaaatgaggccagaggggtt

SEQ ID NO: 318314 - DNA, 122 bp, Homo sapiens
cagggttctgacatccattttctaactatgcatctaggtttttttttttttttacctctgcgtctaagttgcctgcctaaatcgccttcagtccattgaaatccatccaatcaatatttact

SEQ ID NO: 318315 - DNA, 122 bp, Homo sapiens
cagggattccccacatcagcactgactaaatgtccacttccatgagctagaggaaggtggcgcctcttatttggcctggagcagggagctagggctcctgcagcctccagatcccttactgg

SEQ ID NO: 318316 - DNA, 122 bp, Homo sapiens
catgcaatctgggagtgctttctggagtctgataagaacatactggcacattgcctgtgacgtgtgggacccaggcattttcagtgctgaggtgagtccttgattgtaactgatggggactg

SEQ ID NO: 318317 - DNA, 122 bp, Homo sapiens
ctgcctacttaatcaaatggctatccaggttgtaaatgcttatgaggtagtacaaacacacgcacaaggtaaggatatctttgtttgagttataaacatccaccctcaattaaatatgcatt

SEQ ID NO: 318318 - DNA, 122 bp, Homo sapiens
atctgaattccccgctggtgggtccttgggaacctctggctgccggctgagctctgttcccgggaccgagacaccggccctgtcgcggctgtggggctggctgatggctgggaccaccgttc

SEQ ID NO: 318319 - DNA, 122 bp, Homo sapiens
tagggcagacgttactgcgtcgcctgtttctccacgatcatttcccttgatggtcccgatcgccacaaagacgtcagggattagggtcgcaggcgccttgtttaatggccttttggcttgga

SEQ ID NO: 318320 - DNA, 122 bp, Homo sapiens
gagaggcgcgggtctgcggagagagcagcaccggccaacttgggaggctgcctcctggggcgaggggtggcttggagccgccgatcaagctttattccgcggaaacgctgaaagctagcagt

SEQ ID NO: 318321 - DNA, 122 bp, Homo sapiens
gagagggcgcagtctctgaatctttccacggggtccatcctagggcccctccaggttcaacggtctcctaacctgtagtcacccacaagagcgtgccctttctgcccgcccttcctagcgtt

SEQ ID NO: 318322 - DNA, 122 bp, Homo sapiens
agcgctcaggctgtgtggctgccgcaagtgcccctgagccccctgagccccagtggctggcgacagccccgctccatgtcgccttcatccaagatctgcgccgcggggcggccgccatctgg

SEQ ID NO: 318323 - DNA, 122 bp, Homo sapiens
ctctccgccaggccccgcccccaggcccgagctgccgctcgcggatctaaggccgaggggcgtccccgggaccccgccctgggctgggaccagcgccctccaggccccgccgcagtcgcccg

SEQ ID NO: 318324 - DNA, 122 bp, Homo sapiens
cagccccggcacagtgctgggtcttccgtgtggcatccacatcaccccgaaatgagtgcacgggtggacgcatgagcagaaaatgactacgggagtgtcacccctaaaaatcagactagtga

SEQ ID NO: 318325 - DNA, 122 bp, Homo sapiens
gagctgcccaaacacagaggtggagaggagcctgtccggacacagggacacaggcagctccggcagtgaccacttgggcctcagagaaactcacaggtggccactactcctgtttggagctg

SEQ ID NO: 318326 - DNA, 122 bp, Homo sapiens
catgatggcatccctgggtcctttggtgagctctaatcagcacagcatccagagcagctgcggctatccccactccctgttagaggtacacaggaagtccagtccctctggtctgtctgcca

SEQ ID NO: 318327 - DNA, 122 bp, Homo sapiens
cttagagggtgcgccaatggacaaagagctatcacttcaaatcttaccaaatggtctgttcgggagcacagatacggagcaggcttcctccccaaaaatgctggtttgtaggcggagcttgg

SEQ ID NO: 318328 - DNA, 122 bp, Homo sapiens
ccaaggtgacaggcctggaacaagagcccttcattttcaccaacaggaccaggcaagagacgggaagcccttccaccgaccatggccctctgtgcctctctgcaccctcccaccccacccac

SEQ ID NO: 318329 - DNA, 122 bp, Homo sapiens
ctcacaggcagcagatcagatggggattacccgccggacgcaaggccgatcactcagtcccgcgccgcccatcccggccgaggaaggaagtgacccgcgcgctgcgaatacccgcgcgtccg

SEQ ID NO: 318330 - DNA, 122 bp, Homo sapiens
gggtgacacggagaagagggtgtgagccatggggttcttcaagtgtggctccgaacatggcgacaaaagctgactcgaaaatactcattaccacgaacacagggttacattcccaaccgcaa

SEQ ID NO: 318331 - DNA, 122 bp, Homo sapiens
cccgccgggccgttgttcccgagacgttgttgagtcccctgtgtcctcttctgggtgaggcgtccggccacttaagggaagggaagggaagggtcggccttgactgcatccccaaggctgcc

SEQ ID NO: 318332 - DNA, 122 bp, Homo sapiens
aaaaaaaaaaaaaagagagagagagaaaagaacattttgatcttcaaaacgtatgtgcctcgggaaccattttgtcttcctagaagtggcataatatggcccagtcacatccacaaaaagaa

SEQ ID NO: 318333 - DNA, 122 bp, Homo sapiens
agctgcgctctcccgggggctaatcccggggcaggacggggaggcttgggccaatcagcgcgctggggcggggcctaagtggcgcgcgccgggcggggagagactggagaaggaggatttaa

SEQ ID NO: 318334 - DNA, 122 bp, Homo sapiens
acataaaggcctggaaaaggttgctgtacatcattttgttggaactcctgggctcgtggacggcctgagttgaaagggacgaaggtctttatttgcaacatatggtctactgggagtccagc

SEQ ID NO: 318335 - DNA, 122 bp, Homo sapiens
agcctgagccgcttcccgccccggcgaggaccgtcgccagcccgctgctctagcaggaggcggttccacagcgcacccggcagcccagccaccgtcagcaccgcgcctcgggcgggcttttc

SEQ ID NO: 318336 - DNA, 122 bp, Homo sapiens
gagctcttgtctggcaatatgaggcaccccaatgaccaaaagcaacactcaggggtgacccgagttataatatcctcaagccccacccttttcctccaccaccacttaccaaacatcagcta

SEQ ID NO: 318337 - DNA, 122 bp, Homo sapiens
tagctcgggttcatgacgctctcgatattcctgtgcagaaacctggaccacgtctacaaccggctcgctcgataccgttaggccccgccctccccaaagtcccgccccgcccccgtcacgtg

SEQ ID NO: 318338 - DNA, 122 bp, Homo sapiens
gcagctccgatcctgatgaagaattgtagctgctgtgcctcaagacagataagcacaggtcgtcccagaggggatgccaccttggggactgtgaacctccgctgaggccaggccatgccctg

SEQ ID NO: 318339 - DNA, 122 bp, Homo sapiens
aggcctcttgcctccttaggccttgggagatttcctttcactgaaagggccagatcctggcgatggtgacaggaacggtaccccgcacggtaagggtcaggcaggaagggcctcccaccgcg

SEQ ID NO: 318340 - DNA, 122 bp, Homo sapiens
aatttgagaaagtttagaagtagaatcccatgcagaaggctcctccagtattaggcattccgtttactttctgttctgtgccaggatcccagaagctaatttaaaaggggagggaaggtgct

SEQ ID NO: 318341 - DNA, 122 bp, Homo sapiens
cacacgcccgaaaatcctgagcacgtggctctaccgagggactggaagcgctccaggcctcgttttcccgctggagcgattacaccctgggggcggggcccgcttcacgggagggatttttg

SEQ ID NO: 318342 - DNA, 122 bp, Homo sapiens
cgggccccgaggaaggaggggtgctggagggtccatgcagtccggggcgtggagcgggggcggacacctgggtcaggctggagccatggctgccatggctctgacgagttggtgggggtggc

SEQ ID NO: 318343 - DNA, 122 bp, Homo sapiens
acttggtacctacctatatttgtctgttctttctttgctattaagaactacctgatactgcgtaatttatttttttaaaaaagaggtttacttggctcatggttccaaggctttacaggaag

SEQ ID NO: 318344 - DNA, 122 bp, Homo sapiens
cccggattccacagcctgtgagggtcccttgagcagagcgggacgaggccactggcactacgtcgtgacttcaccaacagcctgcagtactcgttaacgagatttcgccaggccccttggac

SEQ ID NO: 318345 - DNA, 122 bp, Homo sapiens
aagagttctctccatctgcaccttgagagaggggtcagatgccaggtacttgtgaacaaacggtgtgtgctctaccataagctctaactcaggtggaaaggcaacccagaaactgagagctc

SEQ ID NO: 318346 - DNA, 122 bp, Homo sapiens
tctgtaaccaaacactctgacatttctctgtggtcccaagtgccagtcactcaatcccatcggctccaaggttagtgtgtgcatgtgagtgagtggggactggagggaaggaagtggggaag

SEQ ID NO: 318347 - DNA, 122 bp, Homo sapiens
ttgctattacgttttgcctttcttggaatctccatggaatttctggccaggcccctgaagcgctcaggctgtctgggaggtctccaccctatgtgttgagccatagcaggaggataccctga

SEQ ID NO: 318348 - DNA, 122 bp, Homo sapiens
gcagaacgaagcttcgtgaccctccaagttcagtgaagacacccaaagcctggggcaaaacgaggcggcagccttcggggaaatcgggcagaaccagaacgatctccgagatggagagtgac

SEQ ID NO: 318349 - DNA, 122 bp, Homo sapiens
gaccttaacttggatgattagtccaggtactcacttaacgctagatgatcagcctagatacgaggaaaaaggtaaaggaagaactccacctggcgccagcccagggaaggggcagggaaggg

SEQ ID NO: 318350 - DNA, 122 bp, Homo sapiens
agaaattcattaaaacgacttttcaatgcattccagcaaccctggcctagcaagaacccacgtctggcaacaatggaggaattaacctggatgttatggggagtggatcttaacaatttgag

SEQ ID NO: 318351 - DNA, 122 bp, Homo sapiens
cttcggggcaatcagcctcatctatttactttcatgaagaaacccaagtgaaccctgctgcggaccagaaaaccggagcacttctgcatttaatgtcaccttactgtgacatcttaatttcc

SEQ ID NO: 318352 - DNA, 122 bp, Homo sapiens
aaacggcgtctgtggggagtagctaggggcctgcccggcgggggcgcaggaacccggttgcggtgccgggaggagggtcgggagggtctcagccccctccttgctcccaggcttccactcct

SEQ ID NO: 318353 - DNA, 122 bp, Homo sapiens
gagactgagggcgggttcggccgccaggaagcgctcccgcccggggcagcaatcctcctccgccctcctctgcaacctccaacccgggagggccctacggggcctcctcctccacacagtgg

SEQ ID NO: 318354 - DNA, 122 bp, Homo sapiens
gcctctgtttacttatctgaaaatgatgacattagtaagatctaacccacaggactactgcgaggattaaatgacacaatgtaaataacatacttagcaggtgccaggcacacagggagtgt

SEQ ID NO: 318355 - DNA, 122 bp, Homo sapiens
ttgttcaaagaacatccgcacgtgcaaatgtctgagaccagaggctgcaagcctccctgtcgctcttagggcttcggtagccacattgccacagctctccacgccctcaggtaacgcccctc

SEQ ID NO: 318356 - DNA, 122 bp, Homo sapiens
aaaaaaaaaaaattcacgaccttgaagaagatacacgggctatgacttcgctgttgtcaccgagcgccccgcccaccgcgttctccgacccgcggccggcagggggctcgcggcctccgcca

SEQ ID NO: 318357 - DNA, 122 bp, Homo sapiens
aaaaaaaccaacaacccaaaaggacatgccgtctttgtccagacagaacacatacacacacgtgcacctctgttccatctttccctcacaaatacctaactagacataggcagaatttacat

SEQ ID NO: 318358 - DNA, 122 bp, Homo sapiens
gaggtagagatgcacaccgaaatggtggcattgcacaggagccaggcagctttgcaaggtcgtaatgacagtcgcgcgtggctgctgacaggaattacagtggaattcacattctgagtaat

SEQ ID NO: 318359 - DNA, 122 bp, Homo sapiens
gctctccctcgcatcctctcctcccaggggggccaaagctggggaggggcagggccagcacgaggtggctcccacccagctttgaagatctgggttctggctgagacttcactttcatcttc

SEQ ID NO: 318360 - DNA, 122 bp, Homo sapiens
gctgcgggctcgggtggtgggggggcttgacatgatgggcatccgcaggagcaaatagagcgctagcgcaggcattcgcgtaggccaatggagagccggcggaggcggggcgccgcgctccg

SEQ ID NO: 318361 - DNA, 122 bp, Homo sapiens
cagggaaccagagacaggaacacagctgggaactaggaggagaaaccaccacagctggagcgcaaagtggccaggtcagaaaagcctcatggaatcctggttaactgaatgtttctattgac

SEQ ID NO: 318362 - DNA, 122 bp, Homo sapiens
atgagcgtcacgaacacagagcggccaatcacgcgccgccttcgcccagatccctccgcacgaggcagccccgcagccgcaggtggccccggcgagtacttccaccttcccttcccgtgatg

SEQ ID NO: 318363 - DNA, 122 bp, Homo sapiens
tgacctcgtgatccgcctgcctcggcctcccaaagtgctgggattacaggtgtgagccaccgtgcccagccaaagactgctcttaaagcacctttttgacagtgaacatggtctaaaaaagg

SEQ ID NO: 318364 - DNA, 122 bp, Homo sapiens
ccccccattgcctccaggaacatgctaagctctgcctggctcaaagccaagtttggatggcgtccacgaggccactgagcaagcggctttgaaagatcatgctgtcgcactggcagtcagga

SEQ ID NO: 318365 - DNA, 122 bp, Homo sapiens
gtcatgcaagccgcagacatttattgagcaccagctgtgtgctaggtcatgtgctgggttcgaggaaacagtagggacaagacgccctccagtgggggccaggggagacatcagggtgggct

SEQ ID NO: 318366 - DNA, 122 bp, Homo sapiens
cccgggaaatgcctcgtcttccctccacccttaacccacagcagctccagtgcaatgccccggcctcagcgcctgcccagcggtggcccaggtgcaagagacaacacctcgccccgttccca

SEQ ID NO: 318367 - DNA, 122 bp, Homo sapiens
aggggatgtaaactcccagggccacgcagttggcaaagatggtcagcaggatgaggatgtcgaagggcctcaggtggacacagtcaaggaccctggcagagtggcattggaacccccctact

SEQ ID NO: 318368 - DNA, 122 bp, Homo sapiens
cagattcgggcgacgaatccgagtccagtctcttcgtgcccaggacgcctgtccgcaagtcgcaagctgggaaagcagggctgataactgaactggagaccatggactcacgagagaactga

SEQ ID NO: 318369 - DNA, 122 bp, Homo sapiens
gagtaaccacagagaggaagatggtaagtaaagtcagtgtggaaaaggaagggagcttgtcgtgggaagtagggaggcaaggagtgaggctcttatgtttcaagtattctctccattcattg

SEQ ID NO: 318370 - DNA, 122 bp, Homo sapiens
ttgccaccgggacacttcgatagtccaggagacaaatctgcttcctctctggggctctcccggttgagaggtcggcggagttagccgtcatctttccctgtaggttctgagtctatcaaggt

SEQ ID NO: 318371 - DNA, 122 bp, Homo sapiens
ccgggggcgggaccgcggcgtccagggggcgtggccgcgctgtgccgggcggaccctacccgttcattggcgggaggctggagtccgcctctgcggagcttcccactcaatcagttgtgcgg

SEQ ID NO: 318372 - DNA, 122 bp, Homo sapiens
cgagcctccagtccctgcagatactctttcttctttctccgggactggcaggctgactcccggttcttgatcattcgctgctgccgcttcagcagctttgcctaggcacccggaaggtcaaa

SEQ ID NO: 318373 - DNA, 122 bp, Homo sapiens
gtggcgggcaggaacccacaattccaaatacaaacggtcggcgcgagaagcgcttctgggcgcaggcgcctggctgtagcgactggttgcgggaggctggactctggtgactgtgtatggtt

SEQ ID NO: 318374 - DNA, 122 bp, Homo sapiens
ctggtccctctgggccaggctgaccatcatggtgctctcctgcacagagacatcgggaaacggctcgaggtgcggaagaccgtgaccgcgtgcctgggcgagcccaaccacatcactcggct

SEQ ID NO: 318375 - DNA, 122 bp, Homo sapiens
tcttttgttacatcaatagagtaatgaaggtttttaacagtcttgagtgctttatcagtacgtattccataaggaaaagagaagtccttctaggtacttcaaacagaggatattgaatacag

SEQ ID NO: 318376 - DNA, 122 bp, Homo sapiens
tcaagcaccagccttgtctagatcaccacctctgctctcagtcaccccgtgaccggcactcgtgatgcctgtccgtcacttcactggccccacccactgctcctctggctccacccccaccc

SEQ ID NO: 318377 - DNA, 122 bp, Homo sapiens
tcgcgcggagagtctacatttaattttgtggagacctgtcatgctgtcttccgtagtaaccgcaccgtcttaccctcccgcttcttttcctctctgacgtacgcacttccctccaggcaagg

SEQ ID NO: 318378 - DNA, 122 bp, Homo sapiens
cagaattctcaatcagccagtaagaattttagtgtctacaatgtgcaaagcattttcctacgtgttctagaaccaaaagggaatatcagccaagggccctgaaaaatctcatgctgaaaact

SEQ ID NO: 318379 - DNA, 122 bp, Homo sapiens
gctgggaccgcatcacttcctcctgctctatcagaagaaggggcagtggtacgagatctacgacaagtaccaggtggtgcagactctggactgcctgcgctactggaaggccacgcaccgga

SEQ ID NO: 318380 - DNA, 122 bp, Homo sapiens
cggtggtgaggccgcctcagcgaaaaaaatgtccgcctgaagagacccacaagttctattcggggggaccgacagcccgccccgggaggaaggggcggccaggcccgaaagccgcctccccc

SEQ ID NO: 318381 - DNA, 122 bp, Homo sapiens
tccaggggcactcgtgaccccacagtgcagggaggccccggcccccagtcgggctggagccgccaggcaggagccagtagtgaacttttcagttttaaaagcttgtcattagatacaaacat

SEQ ID NO: 318382 - DNA, 122 bp, Homo sapiens
gcagcaagatcgggtcccgaccgggtggacaaccaaattaacagacggaggtggggactccgcttccggctcgccccgccccaccccactctcccagggagggagctccagctccgggaaga

SEQ ID NO: 318383 - DNA, 122 bp, Homo sapiens
gcgcttgggcccgccctcctcacagccccggagcgcggcctgccggggaggtggatctcgcgctccccacacagtcacactccgcgcactcacacacttggaagcgcctccccacgtccctc

SEQ ID NO: 318384 - DNA, 122 bp, Homo sapiens
cttgaactttgcatttgcatagacctgagtgaaatccctggctttgtcactacacagtcacgtgatcttgagcaactctccttaactcttggatgctcagttgttccatctgaaaagacaaa

SEQ ID NO: 318385 - DNA, 122 bp, Homo sapiens
cgcttcccgctccccctgcaggtggcgcgggcctcgggaggagccccggctgcaggagcccgctaaattcaccagggggcgctgcctcccgagactgccgcccagctccgcttccgacagtg

SEQ ID NO: 318386 - DNA, 122 bp, Homo sapiens
ttgtttgcaaaagctaatcgtttccacagtgaagcagggagagcctggtgcgctcaccgccgccagcccctccctggaagccaagctgcgggaagactctgggactcagttgcccctcccca

SEQ ID NO: 318387 - DNA, 122 bp, Homo sapiens
accctgtgagggagcagatggtgaatatcgtgcggccccaggcctccctccaacgagcagcgctgtgtgctgggagcaggccctgcgggggccagcaaacccgctcacacagcccacggggc

SEQ ID NO: 318388 - DNA, 122 bp, Homo sapiens
gccccgcccggcactccctgcttcgcccacgacacgcccctccccgcccggcaaactgcccggagccaaggccccgcccccagagagaacctgccccgcctccctggcccgggccccgcctc

SEQ ID NO: 318389 - DNA, 122 bp, Homo sapiens
ataattatttcttacatcatgcttgattcctacattttgttgggtctcaacattggctcacgaatgctgttaatatttattctgtattgataaaaagtctgtcttgccactacaagtaaatc

SEQ ID NO: 318390 - DNA, 122 bp, Homo sapiens
cccgcgccccgcgcagaccggacgccggccttgcccgatcctcggcatccttcggcggggcggccagtcccagggcgctcgctgagggccacaccctggccccagagtttagcaccgccgcg

SEQ ID NO: 318391 - DNA, 122 bp, Homo sapiens
tgtcgtcaggcaggaggcagttctccaaggtgatgagcaccccggagtacagcctgtccccgatcagcaccccctgcgaccctgagggtgcgcccccagatcccggggcgccggccgctgcc

SEQ ID NO: 318392 - DNA, 122 bp, Homo sapiens
tcacctcaaaataggaatgacagcaataacaacaaactataataaaaaatacgtactttgcgcccgggcgctgtggctcatgcctgtaatcccagcacttttgggaggccgaggcgggcgga

SEQ ID NO: 318393 - DNA, 122 bp, Homo sapiens
aaaagactagtttccaaatgttcaacagagctctgtggggctgcagggttaaactctgagcgtaaatagacctcagtgagcaccaggactcggttttaatttttttgttctgatcatgtggt

SEQ ID NO: 318394 - DNA, 122 bp, Homo sapiens
aggcaccacccgcatcagcgccagcccttcagcgtgacttacagcggatgcaaagtggggcgcaagtgctggcttcccctctgcagtcacgtcacagcagccgtgacttctgcggctcccac

SEQ ID NO: 318395 - DNA, 122 bp, Homo sapiens
atgaaaggcttatttccccagctcctggaagagctgagacagacctcggctgccagcctccgtccatgattgacttggctgaagagagttgaagttaggccctttccagggaaacagacatc

SEQ ID NO: 318396 - DNA, 122 bp, Homo sapiens
atcttttctaatgggctgcatgttgttctgacttttcttcttcttgaaaccacacacaaccgccttttctcttgcaaaaacaaaaaccccacatttaacagtgctgaaacaaataatagcac

SEQ ID NO: 318397 - DNA, 122 bp, Homo sapiens
tctgccggcccagacacctgctgcaggtatcaataacagcaagcaacttgcagcaagggtcggggtaaatgagggagtccctaggatccctgtgcccaggctatgtggaccctcccaacatc

SEQ ID NO: 318398 - DNA, 122 bp, Homo sapiens
ccgcgcctgcgccaccgcgggaggcctgggtgggcgcagctgtgggagccggtcggagtccgagcgctccgtcgcggggcccggccgcttggcgagcctgctccgggccccagcacttagcc

SEQ ID NO: 318399 - DNA, 122 bp, Homo sapiens
ggcggcccagcttctgggttctgctgacattctgcatcctccctgcatacagccagccctcgccctcgagaaagaagcagcttcctgctgtggctaatctctgaattgccttcccatgtctt

SEQ ID NO: 318400 - DNA, 122 bp, Homo sapiens
ctcacggcggagcgatccgaaccccggagtccgcgtgcaggagggggacccaggccccgccgccctcgccccgcccgcagccccccgtctgctatggctgtgctcctgagtgcgggcccgac

SEQ ID NO: 318401 - DNA, 122 bp, Homo sapiens
acagtcagcagaggacgtccccagcccctcaacccgagccccatggcagacgcaggctggcgtctccccgcagaggtcttcgggccgtggctcccaccctcagccaacggccggaaaggggg

SEQ ID NO: 318402 - DNA, 122 bp, Homo sapiens
aggtcagcggtcagcactagaggtgtgcaaagggacagcagtacagctggtgtgcacacgcgtgcacacccaccaccattcgtgctccaacactcacatctaacactactacccaggaaagt

SEQ ID NO: 318403 - DNA, 122 bp, Homo sapiens
gaagcccaacctgacgcggcaccggcgcaaccacacaggcgagcggccctacctgtgtcccgcctgcggccgcggcttcagccagaagcagcacctgctcaagcaccagcgcgtgcaccgcg

SEQ ID NO: 318404 - DNA, 122 bp, Homo sapiens
cccgtgtcacagccagccagggctgctttgccccagcctcactcataccaagtggctacacgaaaccacaccgtgtgccaagggaaagggcacacctcagctttccacactaccctcccatc

SEQ ID NO: 318405 - DNA, 122 bp, Homo sapiens
gagctggttcccagaggattgtctaccctgaagtccatcaggttttctgttgcacaaggacgggtcaggaaggaaggagaggcttttccagaaacaaaaaatctgtgagggtctgacttgct

SEQ ID NO: 318406 - DNA, 122 bp, Homo sapiens
tggggagagcaatggaggccacggccgactgagaggcgggtgcgctgctggtgctgctgccgcggcggctgctgatgcggaggctgccgcgcgcagtgccgccgagtccgccgcccgcccgg

SEQ ID NO: 318407 - DNA, 122 bp, Homo sapiens
cgcagccatggaggatttcatcgtgatctcggacgacagcggctctgagagctccgggggcgcccgcccgggccggtcgcggaggccgcgccgggccctgtcgcgaacctccggcgcgctgc

SEQ ID NO: 318408 - DNA, 122 bp, Homo sapiens
ggacggggatgtgaggatccccagggcctcagaagttgttatcaatgttccagacatccccgctaagcgcattggctgccccttgcagcgtccaggtgagcagggctagctgacgccggaaa

SEQ ID NO: 318409 - DNA, 122 bp, Homo sapiens
ccttccagttcgccagtcgaactccctcgtgcggttgttatgactttccctctcgggatccgcgccccgaccaagttcgagttgcacttccggggtcttcaggagattgatacgtcattacg

SEQ ID NO: 318410 - DNA, 122 bp, Homo sapiens
ggtccccgcgcctggctttctaaaccccttttcccaaaggcccaggccctttcggggggacggttcccttttgcagagaaggaaggagggatccttctagaaaatgccccaaaggaagattc

SEQ ID NO: 318411 - DNA, 122 bp, Homo sapiens
aaagcgatctcagactggctgaggtttgcagtgggcgcgcagacagtgctttccccctcgcgccacttccctccggcgcggagactgggtggggcgggggagcgagtgtggggcggggccga

SEQ ID NO: 318412 - DNA, 122 bp, Homo sapiens
ccccccggcgggcggagcccggcgccgcggccaggatttcccacctcgctcccgcgactccgctgcgggtctgcacacccgaggactcggtttgaaacgcccgcttatttattttcttgtcg

SEQ ID NO: 318413 - DNA, 122 bp, Homo sapiens
tacaccacttagttttcacatacgatttcacacctgatcctcattacaaacacgtgaatacgcaaaagatttcacacctgatcctcattacaaacacgtgaatacgcatgttatatcagttt

SEQ ID NO: 318414 - DNA, 122 bp, Homo sapiens
actcgagccccgggcgcactgaggtcttggccatggggctgcggaggctgctgttgctggcgtgagaaggggcgacggagttgtcgcgctcgggggtccccagctgcctgcatggatgtctt

SEQ ID NO: 318415 - DNA, 122 bp, Homo sapiens
cccgggcctggactgcactgactgtgccagccgcgtggtgcagccagcagggctctggcccgtcatgctgagagcaaaccaaggtgcagggaggtgacacctgcttgcaacattttcgtcct

SEQ ID NO: 318416 - DNA, 122 bp, Homo sapiens
ccttgcaccttttccttgtggctacgctggtcacgtgttagcagaagtcttataaacttccgggctgtcctatcaggctaagatatacgggggtgcgcctggagcctcccagaacctacttt

SEQ ID NO: 318417 - DNA, 122 bp, Homo sapiens
cccagtacagtgcaagtgatgggctggggcccctccgccctccttgtcaagcagtgtccacggataagggcgtcccggggcgggggggggacgtgggcgaggagatggtggagctgggggaa

SEQ ID NO: 318418 - DNA, 122 bp, Homo sapiens
agaaggagcaatgacttattcattagcccagatagaaggccagtctttttcaggctgcggcgcagagacgccaggctcaaagggcaggagggccgtctgcaggcagcgccgccgcggctacc

SEQ ID NO: 318419 - DNA, 122 bp, Homo sapiens
aaggccctcgagagagtggagggcaacagtggccacggttcctctgtacttcgtttcttccgtaagaaatgatcttcttgtccttcttaagtataaatggagcgatccatttccttttaccc

SEQ ID NO: 318420 - DNA, 122 bp, Homo sapiens
cttgtccttggcctgccgtttcatcttgtaccggtggttctggaaccagatcttgacctgcgtgggcgtcaggtggatcatgctggccaggtgctcgcgctcgggcgccgacaggtacttct

SEQ ID NO: 318421 - DNA, 122 bp, Homo sapiens
gctacccgagaggcaagcgggagactcccagcgcgaccaataggagggccgccaatggagcggtccgcccgcggggggagaagggggacttctgggtgggctctccctgcggaacgcgcgaa

SEQ ID NO: 318422 - DNA, 122 bp, Homo sapiens
ggcctgaggtgctgaggatacctgaaagcgggctgagagtgtgctggaggaggcgggtcccgcgggggcggagctaggctgcctgggcggggccggaatcctgacaggcggagttagagcgg

SEQ ID NO: 318423 - DNA, 122 bp, Homo sapiens
cttgaaaaccacttctggccccgtgggggactcaagtcgccaagcgagggttcccctgagcgccggagctcacaggtctcgccttgtcccgaaagccccgcaatcgaggcggaggcgaccga

SEQ ID NO: 318424 - DNA, 122 bp, Homo sapiens
ctttaactagagtcaaaactaaagtcaatatttaagaaataaacaccacatagtctcccacgctttctctgggtgacatttacagcgggtgaccaaggagaggctgagtcatcttttccacc

SEQ ID NO: 318425 - DNA, 122 bp, Homo sapiens
ctcccttcccatttaccacgggcttcccttctttaacccctccctgtcctattaatatttcgccatccggtcacgtccacgtgctgatttggcacttgcagtcctcctggggcgtgtttcag

SEQ ID NO: 318426 - DNA, 122 bp, Homo sapiens
agcgatgactcctaggaacttcccaaggaccagagcgatgcaggctccgacacgcgagggcggggggcgggggtgaggggtgcgatggacgggggagcggaagggaaagagagagagagggg

SEQ ID NO: 318427 - DNA, 122 bp, Homo sapiens
ttggcaacttcttcctccgtctccgccgtaaccccccagggatctaactcgaggtgctcgcggacacgttctgtggcttgccgcgataagtgtatcacaaacacactgacaaacgcgtccct

SEQ ID NO: 318428 - DNA, 122 bp, Homo sapiens
ggttggaaaggggggaaataaatgggcggggcctagcaggtcctgtgcggggcttagggccggggcggggcccaggaagactcagcagcgggtgggtgagggtctaaaggcggcaattccgg

SEQ ID NO: 318429 - DNA, 122 bp, Homo sapiens
tcatgtaaatacattttactgcattctaaaatctagcaggaaaagatgtggcctaactaccgtcaagatctgggtacatttcattggaaatacaagcacattggacatgggaaaatactggg

SEQ ID NO: 318430 - DNA, 122 bp, Homo sapiens
tgatgtgtgaccgaacaggtcacatatctaaaatacttagctttctcaaatttctctggtcggcagcactgagtcactaatgccacagtcacaatgtttcagactagattgacctctttcta

SEQ ID NO: 318431 - DNA, 122 bp, Homo sapiens
gtctctggcggagggggcggcaacggtgctgttggtgaacccctgagagctgggcttgggcgggagaagcttgacagggacagacacgggcatgaccataggcgtgaggctttctgcctcgg

SEQ ID NO: 318432 - DNA, 122 bp, Homo sapiens
cgtgattggcgtaaggggaaatgatggaacgctcacggcccctggagtcccgaggaggcgcgttcggccttcacggtgctccacgccgattggctcaaggactgacggactgtgagcaactg

SEQ ID NO: 318433 - DNA, 122 bp, Homo sapiens
aataaaatttgaatgaaacaatctcaagcagaatctgccaagtcttcaaatccaacttctcgtaaaagtttgtgaaattgtaccctttgaaaggcagtatggctttcagagaaagatttata

SEQ ID NO: 318434 - DNA, 122 bp, Homo sapiens
taaccttgccaccttggcacagctgccactccagagagatggctatgccggtccgcgtggcgcgcagggccggatggtttggcgctctctgcgaggcccgcaaggctgcacttgggagggct

SEQ ID NO: 318435 - DNA, 122 bp, Homo sapiens
tggcgaggctggtaccagagcttgctcgacaggacattcacagccgaaagttggaacaaacgtgtccacgtccaaaaggcccggatgctccaggcaactttcagcgcggctcgaggcggctt

SEQ ID NO: 318436 - DNA, 122 bp, Homo sapiens
agggaggccgtccatccggccacgctgagggccgggtcgcagcccaagccatggctgccccgacgggccctgcacacacagtcatacctgcgctcctgcactcagtgaaggcctgggcctgc

SEQ ID NO: 318437 - DNA, 122 bp, Homo sapiens
gcctgcgctggcgctgtgcgcctttgcgagggcggagctgcgttctcctcaacacagacccggattgcatcgtgagggcgagctgagttctcctctgcacagacttcagagatacagcgaag

SEQ ID NO: 318438 - DNA, 122 bp, Homo sapiens
gtgcgcggcgcgggactgcgctcgagactgtgtagaccggagcccagcgtggcgctggaacggagcggcggggcccaaaggcgctcaaggcccggcactagctgtccggagctcgtcggctc

SEQ ID NO: 318439 - DNA, 122 bp, Homo sapiens
gtgtggtgggagcgctcttggtagaggatgcgatgagccccagctgagagcgaccagcctcggcggcacctttcctctttctggcttttttcaggtcatccgcgcacccctgcgtggcaagg

SEQ ID NO: 318440 - DNA, 122 bp, Homo sapiens
caaagctgagtgactctgttagcaccaatgagaccgcgtcaactttaagacaatgagcatcgctagagagaaaaagggactgctgtctgtgctttgtgggtcacctccatcacaaaccatga

SEQ ID NO: 318441 - DNA, 122 bp, Homo sapiens
ggaccccaggagagtctctccagcagggtcttggctcccctatcctcttccctgccaagtcggccctatgttcctaccaggacccagaactccgatccagccacgtcctttcccctgggctt

SEQ ID NO: 318442 - DNA, 122 bp, Homo sapiens
tttcaggaaaatattgtctcagcagtttgcagcacccgtggaccatggtcacccctgacccgttttacagacctcactgactgtgaggggatgagtgtgatctgaactaggaagtgtgggtg

SEQ ID NO: 318443 - DNA, 122 bp, Homo sapiens
gactgggtggcccgaaacctctactggaccgacacgggcacggaccgcatcgaggtgacgcgcctcaacggcacctcccgcaagatcctggtgtcggaggacctggacgagccccgagccat

SEQ ID NO: 318444 - DNA, 122 bp, Homo sapiens
ttcggcggggaagatggcggatgacaaggtgagtggccgtgggggtgatctgcagccgggcgtggtcttcactctccttgacctttttagttccggggagaagcgactctggagcggctcag

SEQ ID NO: 318445 - DNA, 122 bp, Homo sapiens
gcaccatcaagattggcgtcccccttttattcctcccgaatagtttctgtctggcgcttccgtttgccatgcaggcaggacaggggctgctctcggtggtaaggtgcactatgtgccagcgt

SEQ ID NO: 318446 - DNA, 122 bp, Homo sapiens
ggtgaaagctcaatcttcagagcttcactggagtctagtataattaactctctaaaggagcgtgccagccttcaccaagaaggggtgcccgagtcaggaaggagagctgggcaaaccttgaa

SEQ ID NO: 318447 - DNA, 122 bp, Homo sapiens
tgccttctatttttgaggcctttgctgaaactccagagacaataggaagaacccagttaacgtaccgtccctgttgtctgtcatcaattcaagaaatttttatgagacttctgatgaagatg

SEQ ID NO: 318448 - DNA, 122 bp, Homo sapiens
cttgtgagtaaattcctttaagatggctttagattggcattctcttctgtgtgaccacaccggggtacaggaaacattggtacattttctgttcccacagactgatcctagaggccatttgc

SEQ ID NO: 318449 - DNA, 122 bp, Homo sapiens
aggatcatgtgagtttccttccagatatggtcactccctttccaggccagagctcagctccgtgacctccatcctgctgtttagcaatacttggtttctctacctaccagtatcagccctct

SEQ ID NO: 318450 - DNA, 122 bp, Homo sapiens
cagacaggcgggtgtgtattgaaaggcttccaggactggtgctgactgactgcaacaccgcgcccagtctctcatcatctccccctagacacagaccggtcaaccttaggtctgacaacaag

SEQ ID NO: 318451 - DNA, 122 bp, Homo sapiens
cttcctgctccctcttcaggggagccttgggatccaggctccaagtgagcctcatgccctcggctggcacctcctctctctagtcctaacatttcctccaggctctgacagcagcctggcac

SEQ ID NO: 318452 - DNA, 122 bp, Homo sapiens
ccctgggggagagcgtggctccagccctcacctgcctcggccctcacctgccccgacctccgttgtccttgcgaagtggcaggtgcgccgtttcctgacgttcagtaacagcacatggatgt

SEQ ID NO: 318453 - DNA, 122 bp, Homo sapiens
acctcccccactgtctgctcccccagctctaacaatgcaaccatgatttctaagactgtacgagtttaaaataaggattcttggcagatctgacgaccacaaaccttctgtcattgatgatg

SEQ ID NO: 318454 - DNA, 122 bp, Homo sapiens
ggttccgacgtgcctgcgtcccagtactcagggagcccgggtcaccatctgtcactgtgccgcttgttctgcgccaaggaaaaggaacgtcaaagaggagatgctggtccgagggcaggagg

SEQ ID NO: 318455 - DNA, 122 bp, Homo sapiens
gcgaggcatggacgctttcatgggtggttacgcgacagttgccaggaccgagggcgaaaccggctgcaaggcattgtgggacattggaggacttggaatatgcgctagaaggctcaatccaa

SEQ ID NO: 318456 - DNA, 122 bp, Homo sapiens
cggggtcgccgcggctgcggcctgctgtggttggtgggttcctctgagattttgttgtttcggtcctacagataaaactcagggaggaaggctttgagtctgtcctaaaaggctgttgcgag

SEQ ID NO: 318457 - DNA, 122 bp, Homo sapiens
cgtcggacgtgactcgcagcgcatccaagacaaggggcctgctcttggtggctcagaagacgagggcggcagcaagaccctcgggggaacccttagggaagtcaccgggttgtccttttaaa

SEQ ID NO: 318458 - DNA, 122 bp, Homo sapiens
aggcagcgtgctgaaaaggatgaaccgggcagctggagttgtccaggggcacgtagcctgcggggcgcacggaggggcctcgagcgcgtggccctgcgcgtcccggggggcgcccgctgtcc

SEQ ID NO: 318459 - DNA, 122 bp, Homo sapiens
ctgatgagctcgctgtgtgtcccgctgcctgtgcaatcctacaccacccccacctctgagcgtcgggaagtgcacacggctgaacgacaattcccctgtaagacttatccccacgcaggacc

SEQ ID NO: 318460 - DNA, 122 bp, Homo sapiens
agagagctggagcccggcccagagttgcagccaggcgtggcactacagccatgactagtgcgtattccagggccacatccagtagctcttcccaacccatgtgagatctaaggcaaattgtt

SEQ ID NO: 318461 - DNA, 122 bp, Homo sapiens
actgaggccccaagaagttgagtgacaggggcaaagtggggtcagccaacacacacgttgcgaagtttcatttttctccaagaactaaaattctggcctttccatgaggttctttagttcac

SEQ ID NO: 318462 - DNA, 122 bp, Homo sapiens
atattcactaactttgtgagtatggatttccctgagagaattatggtggtcccttcaccccggatctccacccctctctgtcttcctcctcctcctcctgtgagactccatgaactgggctg

SEQ ID NO: 318463 - DNA, 122 bp, Homo sapiens
gtccggaccctgttctcctgctagcaagtcccattaagccgccgggcgcttgtgttttctcggcttctttagttccactcgctcgcggcactctggtaactttgttttgagatcaccttacc

SEQ ID NO: 318464 - DNA, 122 bp, Homo sapiens
ttgctagcgggacaagcttgggtgagttgagcatctgactccgtccttcctcctgagacacgtgcagcgagggcacccactgtgcagcgagggctcccgccgtgcagtgagcataccccctg

SEQ ID NO: 318465 - DNA, 122 bp, Homo sapiens
aggcgacccgtcagtgtctctcccagtgctgacctgctttgcggctcgtcacatgcaacacgaggtggccaatacagggatgtggcagcaaatgagcagcgatttgcagagggcaacactta

SEQ ID NO: 318466 - DNA, 122 bp, Homo sapiens
tggctacaaatgcctttttatactggtatcaaagagccaggccaccagcgatgccacatccgccggtctacccccaccgacccgcgaagcaccctcacagctcacggccctccctccaggcc

SEQ ID NO: 318467 - DNA, 122 bp, Homo sapiens
tgcctttttcaatggtgtctccctcccattgtgcagaagagcttttgttggcttctctcccgagcttgtgcctgattctgtggcccaaaacaatcattgttaacatcttcatgtgtttcatt

SEQ ID NO: 318468 - DNA, 122 bp, Homo sapiens
gtggaccgctcgcagtgcttgaatgtcctccttgttaaccccagctgggataagcacctccgcctcataagatcaaagctctttcattcctgctttaactttgccagttccctttacttcgg

SEQ ID NO: 318469 - DNA, 122 bp, Homo sapiens
gctggagctgcggcctgggccctcatcctcactgctctcagggctggaggggccactggacgggctctccccccacggcccccccggccggccccggctactcggccctgcccccgcccggc

SEQ ID NO: 318470 - DNA, 122 bp, Homo sapiens
tgtaagatttcagccttgttttctccgtagtcttcgggctggagccagccacttgacgtccggcgcctcagctccccacctgtataatgggtgtgaactcatcccgaggtctaggggtggta

SEQ ID NO: 318471 - DNA, 122 bp, Homo sapiens
aggcccctcacaatgtccggcgaccccagactgtgtgacagggagattggagaagagcagcggcagggatcttcttataatcccatgggtgtcctagattaggcattagggtcagctgcccc

SEQ ID NO: 318472 - DNA, 122 bp, Homo sapiens
ggcaaggggggcctcccagagcagacattcttctagctgcatattcagcaaatacctgtgcggggcctcccaggtacaggtgctgggctcagcagggacttcagtggagaccaaaaccaggt

SEQ ID NO: 318473 - DNA, 122 bp, Homo sapiens
tgcacactgccctaccgtgcatccactgcctggccaacacctgccttctggggagccaatcgtgctttatgtattcaagggttgtgctacaaaaatcatacaacagtctttacacacatggt

SEQ ID NO: 318474 - DNA, 122 bp, Homo sapiens
ccctgctgcagctcctggacgcggcggcggttgcgggcagagagctgcttgaggccaccacgctgcaggaagtgcagcttctgggcccggcgccgctgcttcaggatctgctgcttggtctt

SEQ ID NO: 318475 - DNA, 122 bp, Homo sapiens
tgggcgtaatgaatacctacctcatagggtgcttgtgatgataacatgagactgtgcatgcgaaagaactaggtatggttcctgatacctggggtgggggtgtgtgtgcaggggtcagtggg

SEQ ID NO: 318476 - DNA, 122 bp, Homo sapiens
tgcgacgcaggcccgaggaggtggctttcgcctcaacttggaaggctggggcgttgagggcgcggacgccagcagcctcaccagggaattgaaaaccaaaaatctccctcctgcttttcctc

SEQ ID NO: 318477 - DNA, 122 bp, Homo sapiens
cgtcgaagcagtaggtcgtcttggtgtcgggaaggcgacgctcaggtccaaggtgagcggcgagtgcagcaccaccgcggcggactcgtagcgcgaggccaggtccacggtgggcaccgtgc

SEQ ID NO: 318478 - DNA, 122 bp, Homo sapiens
gtgagagtgggtggtggccgttggaattcaaaagtggcgggtgtggcgcggggctggtagcggccggagccgtgcgagttctctaccctgcttcgcgagcgggcgagagaacgcgagtccca

SEQ ID NO: 318479 - DNA, 122 bp, Homo sapiens
gccttcgaggcccctgtcccctcaaatccggggacccctggccttccgccccttctgcggcgctgacagcccgcgattcgcctcctcaagattcgtctcaagtgccagcgtgcacctgcacc

SEQ ID NO: 318480 - DNA, 122 bp, Homo sapiens
atcccgttttcccccagccaaagggactccggagccgcattcacctgacttggctgccagcgcccgccttcctcgagttctcagggcaaggggctgtggtgcattttctggggatggtttgt

SEQ ID NO: 318481 - DNA, 122 bp, Homo sapiens
gaggacacagccagcaaaactggaacaaccaaggactgcctccagcaaggctctcttagccggaaagttagtgggatcaccctggggatacctggggtaggaatgtgggtggtgggcattct

SEQ ID NO: 318482 - DNA, 122 bp, Homo sapiens
gcgcccgcccagactcctggaagtgagcggcctagcgagcgagctcccaggcgcaaagcacgccggaagctgtagttccgccatcggacggaagccgaccggggcgtgcggagggatgtggc

SEQ ID NO: 318483 - DNA, 122 bp, Homo sapiens
gggcaacaaggagatgaagctgtccgatggctcctacttcgggggtgagcttgaggggggcgcgcctggagggggagggggcacgcgacccccgcggtgtgcagagccagggggccggggcc

SEQ ID NO: 318484 - DNA, 122 bp, Homo sapiens
cgtaattacagctgaaatcaggaagcagaggaacaaaatgctgagattatgaaccagaggcgaggacagactggggtccaatgaagaccaccaggacttgcttttgtgatgtaagagtaaga

SEQ ID NO: 318485 - DNA, 122 bp, Homo sapiens
cccaccttgtctcttggacctattttctatgtcgcctggaggagtccggcaccccctccccggccatttgtgacaaaatatgaataaactactgcaaatatgtgggccccggttctgctcct

SEQ ID NO: 318486 - DNA, 122 bp, Homo sapiens
ccaccttctgcggagcctcgtgggcttcgccgccgtcgcacctccgccgcctgcgctctgcggccccagagtaagccccatccggtgacgagccgcagtctggtcaccccagtcccaccagg

SEQ ID NO: 318487 - DNA, 122 bp, Homo sapiens
gcctggcgtagaccgggtgggggcggtgcagacaggaccctggagaacagggctgcggtgcgcagcagggggtggccccggtcacacagtgtcccccatggaggggcctcgatggccgggct

SEQ ID NO: 318488 - DNA, 122 bp, Homo sapiens
ttcacgttgtcgtgcatctcaaactgcatcttgctggccctgaggaggtggcgttggggacggcagaagtggctgtggcaacagtggcagagtctgtccaagggacgctggatactggggag

SEQ ID NO: 318489 - DNA, 122 bp, Homo sapiens
tcccttccatgttctgaccttcctggatgctctggcctggatgggtgtcattaatagctgcgaagttatagcagtcattgacctggcacttccttttgccatcctcttgggattcaccaaca

SEQ ID NO: 318490 - DNA, 122 bp, Homo sapiens
gggagaataaagagagaagtgttaggtataactccctgctgtctggttttctggatggatcgatgatggtgccagtaactcagtaaacaggaaattctgaaaaaggagttttggtaggagaa

SEQ ID NO: 318491 - DNA, 122 bp, Homo sapiens
gctcctcctcctactcgcgccgggccggggctgcgcccggggccgcgcgggggaggggcgcgcgcagtgcgcaggatccccaagcaccgccccccgcccgcgcacctgttcgtcccccggcc

SEQ ID NO: 318492 - DNA, 122 bp, Homo sapiens
gcctcccgggggcctcggggagcgcgtcaagttgaggcagcaactcgccgtcaagagtcgcgaagaccattgttggactctgctcttcgggaaacaagttttgtgggtttctgttaattcgc

SEQ ID NO: 318493 - DNA, 122 bp, Homo sapiens
cggagactaggttccgtaagaggggacagattacggaaaagatcacgaccagccgtcaaccgcaaccccagaatgagcagagtccccagcggagcacctcggggtaccccctccaggaggtg

SEQ ID NO: 318494 - DNA, 122 bp, Homo sapiens
gagtgcagccagcagccgactacagacctggagagccacaggctgcaggcgggctgaggtcggaacccagaaccactagcatcaccagcccagcggcgagcgccctgcttccagctgcgaga

SEQ ID NO: 318495 - DNA, 122 bp, Homo sapiens
ggcccacagcagaaggtgcctggcccaccccgtctctgtcccgcagcacggctcagtgaccggctccggagaatcacgttcctcggcaattgtgcctttgtgcttaacttcattttttccta

SEQ ID NO: 318496 - DNA, 122 bp, Homo sapiens
ctatgcatttcggcatctttcagttgtttaaggcagttctctacagaagagcccatttgccgttgtgcttcctgagtgcagaaggcaccctcctgtcttcctcctctgatacctgctttctt

SEQ ID NO: 318497 - DNA, 122 bp, Homo sapiens
gccggtgagtggccgtagaagccggaggatttgaaaatgctggacgtggaacccaactgccggagggagggaggaaggaaggggatgcggtgcgaagaccttgctgtctgtagggggaggag

SEQ ID NO: 318498 - DNA, 122 bp, Homo sapiens
gcgtaccagtgaaaatcagcaaagcagtggagacgggaaactggtctgctggagtgagcccgggaccagcatggggaacagccactgtgctgggaaggaagcccagaggccgcggagcacaa

SEQ ID NO: 318499 - DNA, 122 bp, Homo sapiens
ataaaccatggctgccctaaagagaagaggccagtctgtctccccaggtcccctggtccccgctgcttgtcattgggcagggactcctggcttgaatccacaacacagctgccccacccagg

SEQ ID NO: 318500 - DNA, 122 bp, Homo sapiens
gacgtcccaaggccaatgagactggtgtcattccagaaaagggccactctgtgggtgggtcggtgggaaggcacctgagggtggggtcaagggaggccccaaaacagtctacacagcaggag

SEQ ID NO: 318501 - DNA, 122 bp, Homo sapiens
agaggttgttgtgaaagcagagaggacaggcggcgtcctcccaacaggggcagcaggacccgctggctggggccctgggcacggctccacaccagccatatttgaaaaggtccacaggcgag

SEQ ID NO: 318502 - DNA, 122 bp, Homo sapiens
gctgcaccgccgtggagaccagggatcgactgccgctttgggaacgaggttccaggaatgcgcatgcgcaaaagccacgcgggcgaacacggcttcgcctcgctaagcatgcgcgccgtttt

SEQ ID NO: 318503 - DNA, 122 bp, Homo sapiens
acacttgaatgtgtttgactgtgtgcttaggaaagggcggccagtgcataccaaccataccgacaaacacgttacaccttgggccctttttggagctattcaggaaagtcaatgggagcttt

SEQ ID NO: 318504 - DNA, 122 bp, Homo sapiens
acacaggacagtttctaaagaaaagaaacattttccttgttcaaactagaatttaactctcggctgttctgtggttaagatctacaacgtagaaacatttcaacagtaactaacacatgtgg

SEQ ID NO: 318505 - DNA, 122 bp, Homo sapiens
acacgcacatgccaagcacccacgtgcaactgaaaaccatgcagtcagggttcccttcaccgtcgcccagcccagccgggtgcctctcagtaagccagtcccagccccccgccggatgcccc

SEQ ID NO: 318506 - DNA, 122 bp, Homo sapiens
ggggaaaaagtttcataaggtggaatagaaaaggcaccaggaaacttgggactgagcatgcgccctgcaacataacggtgtcaacaagctcgctacctgtccgaccggttccggcggccggg

SEQ ID NO: 318507 - DNA, 122 bp, Homo sapiens
agccctctccagcccccagtggagtgggaaacattaagtccttctacaaggagagtcaaccggggtaaacacctcacagggcacacacctttgacttgggcactgcatggggagcaccaggg

SEQ ID NO: 318508 - DNA, 122 bp, Homo sapiens
acagcctccttctgcttaggaacaccagacagcactccagcactctgcttggggggcattcgaaacagcaaaatcactcataaaaggcaaaaaattgcaaaaaaaaatagtaataaccagca

SEQ ID NO: 318509 - DNA, 122 bp, Homo sapiens
agatggagagctgggctctggggatggaaatggagagaagcgaaaaagagcctggagaaacggctgtcatatttgctcagaagaaccgccaaatcagagagcacagaagatttcattggagg

SEQ ID NO: 318510 - DNA, 122 bp, Homo sapiens
ttccaccaaaaagattttagtggagctgatgatacaatgagagtggtaaattctgggagacgattgaaagaacagctgtttgcaatagaaagccacattgggtacttacacagcccctcccc

SEQ ID NO: 318511 - DNA, 122 bp, Homo sapiens
gcccgggaaattccccggcgcgggcagggagcggctggctgtcagctgagccgcgctgggcggggtcgccaggccgcgcatcagccctaggcaccccagtcccggctgccccctccgccacc

SEQ ID NO: 318512 - DNA, 122 bp, Homo sapiens
tggacctctctgctgtgggggctggacaccccacccacacatgcagggtgtggaaccccccgcactccacccggctgtctgcctctgagccttctgccttgtggagccgctgcacagcctgg

SEQ ID NO: 318513 - DNA, 122 bp, Homo sapiens
cgttctaccccgaggagatctcgtccatggtgctgagcaagatgaaggagacggccgaggcgtacctgggccagcccgtgaagcacgcagtgatcaccgtgcccgcctatttcaatgactcg

SEQ ID NO: 318514 - DNA, 122 bp, Homo sapiens
aagggcaggcacggcgtgtactctgcccccagagggcactggagggctgcggcctggaggcggtcgggtgggtgccaggagccaccttccctcctcctccttcctctggagcagaaatctcc

SEQ ID NO: 318515 - DNA, 122 bp, Homo sapiens
tggaactgcagcgcttagagagctcggtggaagctgctaaaggcggaggcggggctctggcgagttctccttccaccttcccccacccttctctgccaaccgctgtttcagcccctagctgg

SEQ ID NO: 318516 - DNA, 122 bp, Homo sapiens
gagataaccttgtaacacatacattttaatgagtacattacttttaccacctgctgaagtcgacttggagtgactactgacctgaagtgaatgcctgtgttcaatattaatatggcatgtct

SEQ ID NO: 318517 - DNA, 122 bp, Homo sapiens
aacggctggggcacggcaacggctggtgcatgttgccggcggaggcatttaggtagtgcacgacggctgggcgccgggcctgtttggctgtgacgcccacccccggctttcatccgcctatg

SEQ ID NO: 318518 - DNA, 122 bp, Homo sapiens
ggatactgcttcccctaaaatgaaaactcagcagcgggccagcagtgggtgtgcgcgcgtcgatgccagaggatgcgtgcgtggaatccggcggacgcagtgggccgggcaccgccctccaa

SEQ ID NO: 318519 - DNA, 122 bp, Homo sapiens
tgtgccagccgcgagctccttgtcccatggagggtcaaggaccaccaactcaggagaccccgccatttttcgtcggaactgtgggcggggcactctgggagcggaaaagcgggttcacactg

SEQ ID NO: 318520 - DNA, 122 bp, Homo sapiens
cactcagactgaggtccaggaagggaaaagcaagtggtgacttctggcccactgagcttccgttcatcaataagtggtctgagaattgagtaaaaattccagaaagccactggtcttcagtc

SEQ ID NO: 318521 - DNA, 122 bp, Homo sapiens
aagcatagagacttccccttatatacagggaagaaattgggcttggtcttctagagtcagcggagatgcagtgcctgtcaagggtttggcttgcctgcagccatacaagatttttacgagcc

SEQ ID NO: 318522 - DNA, 122 bp, Homo sapiens
aacaataatgcttgccacgaaaccatctaaaaatccatcgtctttgcagtagccttcaaccggaactactgatagctgttcctgcagtgccgttgttctcattggagcatactacagaaacc

SEQ ID NO: 318523 - DNA, 122 bp, Homo sapiens
ctgagatagcacagccccgagggtcggcagggcactgagggccacctgccctgcctgccccgccagggcgagcatctgaatccacattctcctgggccgcagctcatctgcgagtcggagcc

SEQ ID NO: 318524 - DNA, 122 bp, Homo sapiens
gagcaacacgtttcttttcctcgctgtagccttctctccttttgcttttatgccgaggtgcgtgttctctgtccccatctctgtaattctctgcagacgcgcaaccatggactgcgccgcgt

SEQ ID NO: 318525 - DNA, 122 bp, Homo sapiens
gaggtggtgcatcaatcagcagtggcatgtgtctgaaacgcatgctagctgaaccctcctcgctttcaccatcctttgccaagcttccacagaaatccccctccacacaccaggctccccaa

SEQ ID NO: 318526 - DNA, 122 bp, Homo sapiens
tgattttattgtcatcccccagggattgtttctgttctcccgcgttcccagagctttcggcgcattgctcaacacacggtgtgcgtacttgttgattttaatgtatgtgtgtttgcatatgt

SEQ ID NO: 318527 - DNA, 122 bp, Homo sapiens
ggcccgtcccctgagctgagagccgagagctgaggtggccgcccgcctaggcgaataagccggctggtcaggtggctcctggggaatgtcagatggggcacagggtcagaggcccccgtgtc

SEQ ID NO: 318528 - DNA, 122 bp, Homo sapiens
caggacaaaaggaaccctcctcccttcttagtacttaggcccaaggtcgggtgtgggagccggcgcgctgctttctaggcaggcactgaagctacggcagccacgcaaataggtatcagccg

SEQ ID NO: 318529 - DNA, 122 bp, Homo sapiens
ggttccagggtcctgtgcttggattgtggggaacagactccccggggggtgctgcaagagcgtttccaagtcctgaaccccacctggagtgctgaggcccatggcctggctcctgatggtga

SEQ ID NO: 318530 - DNA, 122 bp, Homo sapiens
cacagaacctgcaggcactggcaccacgacgctctcttagaaaaatgggtcctcagttctcgcgagagcagctgccctggctatccacgctcctctctgattggtcagctaagtgcgcatgc

SEQ ID NO: 318531 - DNA, 122 bp, Homo sapiens
cggcgggcctccgctgcgtccactgcggacaggggtcggtgagaggccccaggtccagcgcgacttgcttttgttaaaacctccttgtgttaggtgtgctcccagctttggagccaggcttt

SEQ ID NO: 318532 - DNA, 122 bp, Homo sapiens
tccttcaagctcaagtcaggatggatcagggttagggtcttccagaggttcccaaaagtccggccagtccttttggattattaactcattaacaatgaacttcatccatacatacaaaacat

SEQ ID NO: 318533 - DNA, 122 bp, Homo sapiens
aagcaggagctgtgcagaattgtacagttgcgaaaccatgtcgctggcagctggtgctggcggtggagacttccctgtgcggtgctcagtgcagctgcacccgtgggggagggagctctttc

SEQ ID NO: 318534 - DNA, 122 bp, Homo sapiens
atgctgaatcggtgggtgagatccccatagcaacggctccgatgccagaacccaggattacgacaccggatcagccagagacgcgctggaggggcccaggaggggctgcagcgcgccgcaaa

SEQ ID NO: 318535 - DNA, 122 bp, Homo sapiens
agccaggggtttgagcccaggctctgggctctgaccgccgggggccaaatcccagctcaccgtgaactgtctgaacagccatgggcaagccgtttctgctctctgagcctcagtctctcatc

SEQ ID NO: 318536 - DNA, 122 bp, Homo sapiens
aagctgggcaaacagtcctctataaaaggcgaggtagccttcttcctggaacaccaggcgcgccgtctggacaaaagacttgtacttggtgccctcttcccggagcctcgtccttataactt

SEQ ID NO: 318537 - DNA, 122 bp, Homo sapiens
gccagcagtgcccaccaggacagggagttcacaccaggccagaagccgggggatctcactcggcctgtggcttctctgccccatccagcctcttgggtagacccaaagggtgatagacccaa

SEQ ID NO: 318538 - DNA, 122 bp, Homo sapiens
aagcagacacacttgttttaaacaaatatcttgggagaggcaagtcagaatgtcagatttcgacttcaacgtatctgtgacactcttagatggtcatcctgtttttaaaatgcatcccttag

SEQ ID NO: 318539 - DNA, 122 bp, Homo sapiens
gcttctcctcactccctgatttttatgctgtttttctgagggcctggagaacattgtgcacgcctccatcttaccatatacaactgctgcacaatctgcctttgtacctgagactgggcaag

SEQ ID NO: 318540 - DNA, 122 bp, Homo sapiens
gccctagagataatgtgaaattgttccctatagtaatgtctgcaaggctttatccagactcgtctgaaatggatacccagaaaaatgcactgttctaatagccccctttatttttggcttga

SEQ ID NO: 318541 - DNA, 122 bp, Homo sapiens
taagaccattaccacatatccaagtacaaacatgaagaaattggttgaatatataaatctcgaaaaggccttatctggaaacagcaatgtagatgacatccaacatttacaaattattcaaa

SEQ ID NO: 318542 - DNA, 122 bp, Homo sapiens
agctcagcatagaggaaggaaggacagcagagacaacagtcacagtaaccctgtctagagcgttcctggagcccaagctcctctccacagaggaggacagagcaggcagcagagaccatggg

SEQ ID NO: 318543 - DNA, 122 bp, Homo sapiens
aagttcctggccgaaccacagctcccacgatgcacccaggttttagagcggtcagaggggcggcttccggtttaggacagcgcggctgcgcacggcgtgtggtcttattggctcgaaccgcc

SEQ ID NO: 318544 - DNA, 122 bp, Homo sapiens
ggactgtggaaaagccttccgccagagctcccacctcatcagacatcagaggactcacaccggggagcgcccatatgcatgcaacaaatgtggaaaggccttcacccagagctcacacctta

SEQ ID NO: 318545 - DNA, 122 bp, Homo sapiens
tcattgagagcccccgtccgcagtctcgctccagcgcgcagcggacaccgggcctgccttcggccagagccgtagaatctgaagacgtgtcattgatgataaagattctgttttctgtaaat

SEQ ID NO: 318546 - DNA, 122 bp, Homo sapiens
gctggagacaagccccagcagagcgaaatatcctgaagtagctttctttgccccaatttgcgcgccccctcacccggaatacacacacggtattcaatacaaccgcctcgaacatcccagac

SEQ ID NO: 318547 - DNA, 122 bp, Homo sapiens
cttataaaacgttgagctgtaacattagttcttcatggcctctcatttgtattaatgtgacgttcttgatcataacctttgaagataaaattcatttggggggcagctaagattctccctac

SEQ ID NO: 318548 - DNA, 122 bp, Homo sapiens
aaccgcttccgcctttacgtgggccggcagggggcgggcttcccaggggcgcatgcgtctcgcatctctccgctccctgctctctcctcctttttcccccgcctccattttgttcgcggacg

SEQ ID NO: 318549 - DNA, 122 bp, Homo sapiens
tacatatcatttgtttaccaaatcagttcgtattttcttagcccagggttcaggattttgcgtttgtggattaattgcccagtacccaaagggcaggacagtcagaggagccacctgatgca

SEQ ID NO: 318550 - DNA, 122 bp, Homo sapiens
ggttacacgtttacatgggatagagctggggattcaaatgaaggcacgtcagctctaggtcgtgaacgtaactatggctgctccatgtcctcattgagttgcttgctgcacaaaggtgccta

SEQ ID NO: 318551 - DNA, 122 bp, Homo sapiens
tgggaagaagggggatgagaggccagcagggcaagcccttcactgcctccacatcaaatgcggcagaaacctgcctgcatgaacaaagaacacctaagggattttagggggcaaagcttggt

SEQ ID NO: 318552 - DNA, 122 bp, Homo sapiens
attctgatgtttatcccacttgcccacaactatacctgacatgtggaaggtctcaataaacgtccaaaatttaaggccttttttatatttcaaaagtacaaattgaaaagagtgaattgcat

SEQ ID NO: 318553 - DNA, 122 bp, Homo sapiens
taattcctttcacatgaacttgctcactgtgtctccatgctctggtggtaacctcaggcccgatacaagcatgggttattatatcttttaaaccctttgcagagattagaaggctgcagaaa

SEQ ID NO: 318554 - DNA, 122 bp, Homo sapiens
tgtgcttcagatcgtgaaggggctgacggccctggacatccacccccaggcggacctgatcgcatggtaggcgccacccacctccctggcctgcaccgctcacccgcctcgggcctctgtgc

SEQ ID NO: 318555 - DNA, 122 bp, Homo sapiens
cacggtgaaaccccgtctctactaaaaatacaaaaaaaattagccgggcgtggtggcaggcgccgctagtcccactactgagtcccaggctgaagcaggagaatggtgtgaacccaggaggc

SEQ ID NO: 318556 - DNA, 122 bp, Homo sapiens
cagtgctgcctttcggggttctttgtccttcgcttctgctggtaggtgaggtttaacagacggaaagacgccgggagcgcacgtgggctgccttgagccgctgcggacgagcaccttgtctc

SEQ ID NO: 318557 - DNA, 122 bp, Homo sapiens
gggaagtcagggggtaaattacaacccacatcaggcagctatgaagggaaggacaaaggacgaatatgtgggagacaagttcaggtcccagcatgacctctaacttgccaggtgacctgagc

SEQ ID NO: 318558 - DNA, 122 bp, Homo sapiens
ggggggaagacggagactcttataccgcgggagactaacctgtgagcaacagaagcaccacgctacaaagagcatgacgagttcttccaggcttgggaaagcacgggtaaatgcccgcggtc

SEQ ID NO: 318559 - DNA, 122 bp, Homo sapiens
cggggagccaacaccgagcggcccttttgagagggtcccagcccctgagatgcgggagcccgcaagagggaacctcttgtctgaagaggttgctgcgctctggagtcgtgctctgggacaga

SEQ ID NO: 318560 - DNA, 122 bp, Homo sapiens
tgttcattttactagtggcatcgccatgcagttttccgtgtattacagtcagtttccttgcgtgcgtgtttggcttttcacttgttttccccttgcactgtaaacctctcaagggcaggaca

SEQ ID NO: 318561 - DNA, 122 bp, Homo sapiens
gggagggtaatcacaagcctattgactaccttaacccacctaagtaaatgtggaaacatccgatataaatctcatagttaatggcataattagaaagctaatcattttcttaagcatagagt

SEQ ID NO: 318562 - DNA, 122 bp, Homo sapiens
ttcagtggaattctgatcatggttttaatattccgtgcagctctgccccctctgatttcacgctcacacattaacgagagctgacactggagattagacgcagacagctggaatgccaggtc

SEQ ID NO: 318563 - DNA, 122 bp, Homo sapiens
agagcccatcacgcaaattgttatctgctggaaatctacgccctaggctgtggacactggcggccgaaatctgatcccggcttgccaagacaccctcagagcacgcggcgctgccaagagcc

SEQ ID NO: 318564 - DNA, 122 bp, Homo sapiens
cctagtaggaacctctttttagcctttttaagggcaaacggcagctgataaagccactcccgtggaggcagaaacatttaagctctagccacagacaggtgataggaatgtcaacctcacct

SEQ ID NO: 318565 - DNA, 122 bp, Homo sapiens
agttaacaatgtataattatggtgtgtgtcgtttccaaggcaacatgcatctgtcactcccgctgaggctgggaagattgaaaggggccatggagaggctgcagtcacaatgaggcctccag

SEQ ID NO: 318566 - DNA, 122 bp, Homo sapiens
cttccacgggtccaagctatctgcttcaagagggcatcgaaaggtaactcatagacttaccgcccccgccccccgacttttgcaggagggagcgctctcccctcctctgggaggctggagac

SEQ ID NO: 318567 - DNA, 122 bp, Homo sapiens
atagaaataaaagatgaactaaagaaaaagaagaatctcaaccgatctggtaagcgtggccggccttcgggaaccaccaaatcagcaggataccggaccagcacaggcagacccctgggaac

SEQ ID NO: 318568 - DNA, 122 bp, Homo sapiens
ttcactctggcatcggagccctacccggcccggctctgggcgccttggcccggcctcgtgcgtccgcggtccctactacccagcgccttcccccggcgtgccccgggctgcttgcgctgtta

SEQ ID NO: 318569 - DNA, 122 bp, Homo sapiens
ctgatgctgaggggaggctcatactggctgatgcgctctgttacgcacacacgtttaacccgaaggtcatcctcaatgccgccaccttaacaggtcagaccgcgcacttgccttgattttgt

SEQ ID NO: 318570 - DNA, 122 bp, Homo sapiens
tcccgcttcctgggggtaaggctgtgaactgcacccctcagacaggggcgcctctaggggcgcaatctcccaccctgggcggttgtcccgtctctgggccacggattcagcaccatggccag

SEQ ID NO: 318571 - DNA, 122 bp, Homo sapiens
atgctccaagcgcagagctcggtgtgacactgaccaaattgttacctcagatattaattacggacagatattaattacggaacaataaaacggtgagaaagcacggctgatccgaattccgc

SEQ ID NO: 318572 - DNA, 122 bp, Homo sapiens
ccggtgcactcctgcgcgtgtgcacctctctctgtgtgcgtgttcgcgcatgcgcgccgccgctgcactgccctcgcttcctgtgcgtcctcaggtcaccgcttgctctagttcccaggctt

SEQ ID NO: 318573 - DNA, 122 bp, Homo sapiens
tgcacgggcagaataagaagtataagaactgcagcacaggtgcaggtccagccccttcctcgcgtgtcccacgatgccactcagccaaaacatagcgttcgttctctcgtggatctgccggg

SEQ ID NO: 318574 - DNA, 122 bp, Homo sapiens
ggtggggcaggggcagagggtgtccccgtccagcccggactggttgagacagggggatcccgtgtctcttgcctgcctgtggcacctcctagaaggcagcaccttccagctcaactccagcg

SEQ ID NO: 318575 - DNA, 122 bp, Homo sapiens
ttggacttgaggcagatgggacatggtctgctctgcgtagttgtatgcagaagccgctgccgccgctgctactgcctcataagagcggacccggtatcgcttatagtagtcgagtgctccat

SEQ ID NO: 318576 - DNA, 122 bp, Homo sapiens
cagccccgggccagccccctccccggacccgcctcgtctccgggaccgccccgctcgccccgctcgccccgctcctgggcgcaccctcccgggacgcctgctccgcccatctccggaccccg

SEQ ID NO: 318577 - DNA, 122 bp, Homo sapiens
caggcccagtcagtcggccaatagacccggaacctgagggatcggaatcctggtccactccgcagaggcccgagcgggctcgcgagggaacgggttctccgagtctggccgggtaagccctt

SEQ ID NO: 318578 - DNA, 122 bp, Homo sapiens
agcaaaagcccccaggcacactggaaggtatgcgccaagggcatatcaccagaggagccccgcacaggcactcctacacggccggaagaaagggcccggactaaaccaccacacagaaacac

SEQ ID NO: 318579 - DNA, 122 bp, Homo sapiens
gggtgttggggtttcatgctgacaacctactttcataggttcagggaaacatatttgtaccgtgcctgcaattcttctgtaaatttgatgtttcaagataataaaaacaaaaaggaaactga

SEQ ID NO: 318580 - DNA, 122 bp, Homo sapiens
gctttgttccttgggtacagcaatcctgccagaaaggactacagctggcgaaggagaacccgcaacgtacagaggaaatggtccaggatttcagaaggggcctgagcgccgtggtcagccag

SEQ ID NO: 318581 - DNA, 122 bp, Homo sapiens
aggaggaggaggggaaaagcagcatactgtctcaggctgggtaccttgtagttagttgtacgttcgaaacctgtcgccgtcacttgcgcgtttggcattatccattgtcaccgcggaggaac

SEQ ID NO: 318582 - DNA, 122 bp, Homo sapiens
cacccctccggctgccacccctccggcctgctcgtaactcatctggccaagtgacagccacggccccgggcctgggcgataccatctgtcccctcaggccctgggagaccacggggtgaggt

SEQ ID NO: 318583 - DNA, 122 bp, Homo sapiens
agtcatagaaccccatcagtgatcaccctgaccaggagagagctgctgacttctttatatcggtagagtctaatttgcaagatgtaaatgcagaaaatagacatttcagcagtaatggttta

SEQ ID NO: 318584 - DNA, 122 bp, Homo sapiens
gctggctccctcaggcagccccacgtggcgaaccaggccacttccatcttcaggctggagcgctgaggatgacaaaccttaagcccattgctcaggttaaccaccgggaagtgactaacctg

SEQ ID NO: 318585 - DNA, 122 bp, Homo sapiens
tcacttgggagcttctcttaacctgtgaccatcgcctgagttagctggccgacttcccagcggtcctttgtgaggtaggatcaggaatggcttccctctgtccctgcgtgagtctgggagtg

SEQ ID NO: 318586 - DNA, 122 bp, Homo sapiens
gagtttaactggaagctccacatgttgaccagcgtagctaagcgggactggccgtgtgggcgggtgaggagagctgccctgctctgccctagtgacggtacacggctctgcctggacaccag

SEQ ID NO: 318587 - DNA, 122 bp, Homo sapiens
tgaaatagtgtcatatcttggtcactgatttaaagcatggaccacgggtaaagtgctggccgcgaagggcgcgcgaggagccgccacccgctcagcgtgggctttggtgtcggggtcgttgt

SEQ ID NO: 318588 - DNA, 122 bp, Homo sapiens
actggagccagcatcaggatgtcctctccaatggctgtgctactgcatggactgtatactcgatttcatgtgtatgtcgcagtaaacaaaaccaaacctctttctgtttagttgcctggggg

SEQ ID NO: 318589 - DNA, 122 bp, Homo sapiens
ctatgcctgccccactggacctgctctggcgccaggtagtgtcgcgggcgcttcctagtgcgggcactcatcctgccgctctccggtcggccatttattgtcttgtggggaagggctttcgc

SEQ ID NO: 318590 - DNA, 122 bp, Homo sapiens
atcccaaaggaagaagactggaaaacagcttgaattctattattgttacacttgtctttccgtggcttggaattttctcttctatcatagaatcacatagatgctggacacctctttccaga

SEQ ID NO: 318591 - DNA, 122 bp, Homo sapiens
agcaacctcggctgtatttattgatacaaggaagatcacccgagagtcaggacgtggcggcgaggggccctggaaatctccagataccaaagctggaagggcgtggagtcttctccagttct

SEQ ID NO: 318592 - DNA, 122 bp, Homo sapiens
caagaaaatgtggtacatatacaccatggaatactatgcagccataaaaaggaaggaaatcgtgtcctttccagagatatagatgaagctggaagccatcatcctcagcgaactaacaaggg

SEQ ID NO: 318593 - DNA, 122 bp, Homo sapiens
gaccaagccctcctgtgctgagcatggcctctgtgtcctgggaggtccgtggtgaggcagcgcacctgctgtggacttgggctgtctttcacaccaggcagggaaagcgccagtgtccggcg

SEQ ID NO: 318594 - DNA, 122 bp, Homo sapiens
tgtcagcaggcaacatggccgagaggccggggcctccgggcggcgccgtgtccgcgaccgcgtaccctgacacccccgcggaattccctccgcacctccaggcgggtgcgatgcggcgccgc

SEQ ID NO: 318595 - DNA, 122 bp, Homo sapiens
ggacaggatggagctgccgtacgtgtccaccacctcctggcactcttccgacagggacttcggcagcttcgagcacattttgtcaaaagcgtcgagtatttctttctgaaacacacgagagg

SEQ ID NO: 318596 - DNA, 122 bp, Homo sapiens
cccatcattgaaggtttaaaaggacaatgatgagacatttgccatgaggacctgaggagccgcaggcctgttagtcacaggcgatgagtcaccctgcattgtttgtgctggtgatccttcgc

SEQ ID NO: 318597 - DNA, 122 bp, Homo sapiens
ctgggagtccaggtcactgagggcacagtggagcccaccccaggaaggtctacctcgggacgttttcacaagctgggagtccaggtcactgagggcacagtggagcccaccccaggaaggtc

SEQ ID NO: 318598 - DNA, 122 bp, Homo sapiens
gggcagccacaacccaggccctaacagagttcatggtaaggatggtgaaggcgtgacccacggtggaaagttggttattttgggtaatccagcgattttctgattgaacttcgaatgcggaa

SEQ ID NO: 318599 - DNA, 122 bp, Homo sapiens
caaacagggtctggtcgtttctgctgctggatctgctgcagggcagtcaggtgtctgtgccggaggaggctggaatccaggcagcctgagcttgcctccctctcttcccagcctgtgtggag

SEQ ID NO: 318600 - DNA, 122 bp, Homo sapiens
tctcctgccccggcctccctgcccccacgcccggtcctctcgcctcgccgcgttcctgcccgggcagacgccccgcgtctgcattgaatcaacccgaggtttccttgccgcccgcggcgcgg

SEQ ID NO: 318601 - DNA, 122 bp, Homo sapiens
aaaagccaactcagtgggaagcgccctcaaagccaaaggtgtggcgctcggagctgtggccgccctcgcccgggagtcggggccaggagaacgggccctggaggcagggcagggcacggcga

SEQ ID NO: 318602 - DNA, 122 bp, Homo sapiens
tcttggaggggaagcgaaatcctcagtctgacacccgctctgcctatggaaacagcgccgcgcacagaaaaggaaacttcattccgtctgttaagggcagggccgggctagtggcaggagaa

SEQ ID NO: 318603 - DNA, 122 bp, Homo sapiens
atgctcctttgtaatgagctcctttgtaatgagctttgtaatgagctcctttgtaatgagcgtggtatcttgagtggaaagtagatggaactttttcatttttgtcattcctctcatcccag

SEQ ID NO: 318604 - DNA, 122 bp, Homo sapiens
ttgcataaccaagactgcggaaggcgcaggactttaccctgggactgaggctgtgaagaccgcaagttggggcagatggcttccgactgcttgctgttgcgtccccgagtatttatatttcc

SEQ ID NO: 318605 - DNA, 122 bp, Homo sapiens
caatatgtgcaaaagcaatattgaatgaaaataaagcatgttgcagcatgaaagcagttacgtaaactagaaaaaccacagaaagaaattctgtaggttttttatggaaacataaatatagt

SEQ ID NO: 318606 - DNA, 122 bp, Homo sapiens
gggtggggagccagcgtgcgtcccagcgagtcagctccacttgatcggcagtttaaagcccgttctaccgtcccccagtccttttggagagaaattattattgctgcgcagcctaagaagta

SEQ ID NO: 318607 - DNA, 122 bp, Homo sapiens
aaaggccagctcgttcggccacccagaggtcccagtgcgtgtgcggtacagccgaagccccgcccactgaccaatgaggagagcagctaggagaaagggcggagccaagaggagactgatac

SEQ ID NO: 318608 - DNA, 122 bp, Homo sapiens
ccgacctgggtgcacacagctgccagggagtggggggagcctccacaactgcctcacccgcgcacctccccagcctctgctggaactgctcctggctcctggcgcaccgcgctcctgttgtt

SEQ ID NO: 318609 - DNA, 122 bp, Homo sapiens
aggagatgtggccatccctcctgctagccataaagacagctaatttcgtggctgtggacacggtgagagttgggaaacaaggagggcaggtggttgtgaaggggctggtgctagaggcctgt

SEQ ID NO: 318610 - DNA, 122 bp, Homo sapiens
tctgtctcaaaaaaaaaaaaaagccagactccatactttgattgctagattggcttctgccgtttttgagaaattcccgggtattttgtgggccttgaagtttgtttgtttgtttggggtta

SEQ ID NO: 318611 - DNA, 122 bp, Homo sapiens
gcagcgaacaccagctgggtgtactccaattccattctgacacaatctacctggagatagcgtcatatcccacaagctgaggactaggtttcacaagactgttcccaggcccttcagacacc

SEQ ID NO: 318612 - DNA, 122 bp, Homo sapiens
atttatggctccgtgttttttgcggcctatctgaggccatgattgaaaggaaaatacagacgtctgggtgttcacaccacgtctgcccccagatctgttccctcagccaccacaaacggggg

SEQ ID NO: 318613 - DNA, 122 bp, Homo sapiens
cgtcgaaggctcccaggctggttgctccactggctgcttgaggtcccctctttccagacccgccgaactggcggccggtgctgtggccgatcccgcgccgctgcctcgggccttggggggca

SEQ ID NO: 318614 - DNA, 122 bp, Homo sapiens
actcccggccttagtcgggtgcgcgcgtgcagggctgtttccggcttagactcagtggaccggaatctggccagcgggtgtacctggctgagtctctgtggccgcggaggcgcggagctaag

SEQ ID NO: 318615 - DNA, 122 bp, Homo sapiens
ccccgtccgccagtgccaccttgcggctgatgaagtccctgaacactgagaagtctggctcggggctcggcggcccctgcggcagcgagtggcgctcggagggcaggtgggcctgcgggggg

SEQ ID NO: 318616 - DNA, 122 bp, Homo sapiens
ggcaggcctgtatgtgcgcggcggccgcgtgctgtacagtgtgagggaacgtgtaccaaacgctcgcgggatacctgtgcccgtctagccaagagtgcacccgtgtgcgcgagcgggcttct

SEQ ID NO: 318617 - DNA, 122 bp, Homo sapiens
aatctaattaaacctaattttgagaacccaggaggtgctcgcattgccttttaattacgacgcccaagagggaggtaattttaaaggggaatccaaatttatcatcgaagttctcgagtttc

SEQ ID NO: 318618 - DNA, 122 bp, Homo sapiens
cggggcctgaactactgggaggacgtgcctgcgtgcaacgcgctggggggcggggcgctgcgagggggcggatctgtgcccatcgaagcggcccgaggcagctcgagttctgagatctcgct

SEQ ID NO: 318619 - DNA, 122 bp, Homo sapiens
ctaataccatctgttcattactcaactttggattttaatccatttcctgaattttaatcacggaagataatatgtcttcagtgagaatttccaaaataaacacatgaataattggcattcaa

SEQ ID NO: 318620 - DNA, 122 bp, Homo sapiens
gacacgtttgggtaagtggtggcccccacaagtccctattttctaaacccagacattttacgcatttatgtgactccacctctgaatgtgtcatgcctgaatagaaccttggagaagcaagt

SEQ ID NO: 318621 - DNA, 122 bp, Homo sapiens
ggcggaggcgaaggggcgacgggacctgggcctggcccgtgtgtgtcctcagaggcctggcgccggccgtcgctgtacggtgagccccagggaggcggatctgggccccgagaaggacaccc

SEQ ID NO: 318622 - DNA, 122 bp, Homo sapiens
cgttggggcgtcctggctggcgctggggtgtcctggctggtgttggagtgtcctggctggcgttggggtgtcctggctggtgttggggtgtcctggctgggaggctgaactcctagggctcc

SEQ ID NO: 318623 - DNA, 122 bp, Homo sapiens
agggctgtggtcggctgatccgcggcattcccgggatggcggcggcgtggatggctccggcgcaggtgagtggacgaggtttcggccttgctgctgctgtgctatttctagaggcctcgtgg

SEQ ID NO: 318624 - DNA, 122 bp, Homo sapiens
gggtggccctgggaccgcaccccctctcgtcctggctgtgtgggccccgctttcccccagcgctggagactccgagcccggccggtcccacattccacgcgagctgaattcccgcccgcatc

SEQ ID NO: 318625 - DNA, 122 bp, Homo sapiens
cccgcctctgtttttagttcctgggccgtcactgagtgacatggtcctgccacacaatcccggtatgcggcttgctcaccacggggttcagaacatccaaaatgccacgttcagtgggacga

SEQ ID NO: 318626 - DNA, 122 bp, Homo sapiens
aaccgcagccatggcagaggaacctcagcttaaatagtgtggagcggccactggtttccgcggctcgtagtcgcgcccgcgaggaaacgccagggaggcttcctgccccgcccagcggtggc

SEQ ID NO: 318627 - DNA, 122 bp, Homo sapiens
ccttcttgccccgctttgacttcctgcggggcttgtgcttgttctccgcctccggctcctcgggctccacctccagctgtctgctgatatggactctgacacgggagcaaggcaggtgtgaa

SEQ ID NO: 318628 - DNA, 122 bp, Homo sapiens
cggccagccggactgcggggaccccaggagcgcagggcggaggagcagcgccacaggaggcgagggcgcaggcggcgcggccgggaaggaacgcgggaggggacagaaggaagaggaagagg

SEQ ID NO: 318629 - DNA, 122 bp, Homo sapiens
ggggctggaaggggccagaggggaggccttggccactgtggacggacacgagtttctactcgttcgtttctttctgggtatttttatcgtaaccagttccccaaatagcaaaacgtccccac

SEQ ID NO: 318630 - DNA, 122 bp, Homo sapiens
cgggaaagcagagctctatggtgtatgtgtgcatgtgtctaacccaagccagccccacaccggagcggccgccggagcgaaaagggcctgacttttccacaagtgtctccaactcctcaggc

SEQ ID NO: 318631 - DNA, 122 bp, Homo sapiens
actttgccaatttgctgaccttcgtagtgtcctcgtacaacctgaacttcatcgtcctttcggatgggcatggatcgctcgttgtacttctgtctcagctctttggaaagaagggaagacat

SEQ ID NO: 318632 - DNA, 122 bp, Homo sapiens
gtccagagaaaaagaatctactgcactgaaaagctctcaagttagagtctaagagctactcgctggaaagaggaggagaagctgctctaaggttccagaagattggttcgaaaggaggcgcc

SEQ ID NO: 318633 - DNA, 122 bp, Homo sapiens
gaagaaccctgattgtcccagcgtgggtgagatgtcaagctctggaccatccccacgaaacggaaggggagcgggagaggtgttatcgcagacctattacacactaatttccgtttatttat

SEQ ID NO: 318634 - DNA, 122 bp, Homo sapiens
cacaccgctccggggcagccgagctggacccacaggtgtgactacagcgcaagccagggccgcccctcccagctcccgggccgtttttagggcgccgtggctgcagcggggcggctggctct

SEQ ID NO: 318635 - DNA, 122 bp, Homo sapiens
agggtggggcgagcagcagccagggctgccgggatgggagcggccacagacacaggcccccgggtgtctgtcttgagatacaggtggagaagccgcccaagaaattccagcaagatgggagc

SEQ ID NO: 318636 - DNA, 122 bp, Homo sapiens
ccgcgccggaattagcgagtggcagcaggagggtgaggtcatggtgaaaatcccctacaccggacactgtgatgtaggctcttcccaacaaggaagcagatacacaaacacaacgaggaatg

SEQ ID NO: 318637 - DNA, 122 bp, Homo sapiens
aaggctgaattggtaggcaacaattcagggattggattgaaaaataaggggacagagcagcgggatttcaggtcattcacttacactggagttgaggtatgttgggtcatttctaagcatct

SEQ ID NO: 318638 - DNA, 122 bp, Homo sapiens
gaaataaacagccgcgttgctcacacaaagcctgtttggtggtctcttcacacggacgcgcgtgaaacagaatgtgaggtcccgttccagccaatggaaaccagacacagcagtagggtgga

SEQ ID NO: 318639 - DNA, 122 bp, Homo sapiens
cgaccggagcgcggccggggccctgggcatcgtccccagggagcccaccctaccccgggacgctcggggaccgccctgcaggcccggcccaaggtgcccactcccacctggccgagtcccgg

SEQ ID NO: 318640 - DNA, 122 bp, Homo sapiens
actaacaccaaggaagtgaaaatactaacctcaaactcccatgtaagcatttgggggatacgtgtagtgataagtacaaaatacacagtttaataagagccacccaaatagcaatctttata

SEQ ID NO: 318641 - DNA, 122 bp, Homo sapiens
tcccctctcttccccctcaagattaacgatctggagggaattctggtgagttcgagttctcgtaacttgttagggactaaccagaagcccggcgagcagccagtaacacaatctctgggtat

SEQ ID NO: 318642 - DNA, 122 bp, Homo sapiens
tcaaatacttctaataggatcgttcctgtactctcttgttcaataatgtacatcaacagccgcccccaaaattctatcctctgacctagtcattccactttggaaaatttgatctaagaaat

SEQ ID NO: 318643 - DNA, 122 bp, Homo sapiens
gccaggagagcatatgtacacacctcccccgtctccccacacaccaggtggatttaaggccgtttaagaggaggtggcttcaatttagcaataaaaagccagtatcatcgcttacaaactgt

SEQ ID NO: 318644 - DNA, 122 bp, Homo sapiens
ttcttggtgaattagaatccagagacaagcagacagaaagaaaaaaataataattccggccggttgccgcctgattggaaaaagcaagcgttgcacctttaaattctgctcctccattcccc

SEQ ID NO: 318645 - DNA, 122 bp, Homo sapiens
cggggtggcagggtcgtggccagggtcagaggcactaaggcagtgagtgcgctgtgcctgcggggccggagaaaagtcacctgatcagtctcgcttgcagctcgcactagccggggggcgac

SEQ ID NO: 318646 - DNA, 122 bp, Homo sapiens
cctccagccctggtgttccctcccactgcgaggccttctagaatacaagcctccagcggacgctgggccacagcctgggcccaccccgcagaggccccgggcgggaaacgggcaggcccaga

SEQ ID NO: 318647 - DNA, 122 bp, Homo sapiens
aagactccaaatcagtcagggagaggagtggaaggagccaaaacgtccctgcgaggcctgcgctcaccagcccccttacccaaagtcccgggcccctggcgccaggagcaggctcctggagc

SEQ ID NO: 318648 - DNA, 122 bp, Homo sapiens
ctggtttgaaataaattaggaaaacagtccatctcccgaccccaccccaggacagttctccgcagaggccgggagcccagcagggctgtgtctctcccgtctccttcctcggggcctggttt

SEQ ID NO: 318649 - DNA, 122 bp, Homo sapiens
taagatggtaattttatctaatgaatacatatctaagacataatattaggaatatcactccgtaatactgtagtagatctggaaatgatgataatttaaatcgggcaatttcaggtctagca

SEQ ID NO: 318650 - DNA, 122 bp, Homo sapiens
aaggggccctgttatagtgtgcatcgcctgatgggagatgtagtccgcctcggtcagactcgccctattactgcgtgaacgactgggtttttttttttttaacctccagaaacggaagcctc

SEQ ID NO: 318651 - DNA, 122 bp, Homo sapiens
gggggaaggtgggatttggggggcgctggtgggcacccctggatctggcggctgcggcctcgcggggggaggctgatcggtgacaggggcagggggctattttgggggtagaaggcagtgag

SEQ ID NO: 318652 - DNA, 122 bp, Homo sapiens
cagtcaggcactaatgaattttcaaaattgcgtgttccagattggggcctggcagccccacgctcccctcatgccctgcatcagacctcatcctctttccacagcagcctccacctttctct

SEQ ID NO: 318653 - DNA, 122 bp, Homo sapiens
gacggaatgtgctgccggctgagagggggaggcagcctcgatctgagggccccggcgctgcggccacgcccatcgcctccagcccggctcgcccattggctaaccaggctccggtgcgttcg

SEQ ID NO: 318654 - DNA, 122 bp, Homo sapiens
ctggggctcctcagacccggtcaccgaacagcagagacgtgctctttcacattctggaggcgggaagtccaaggtccagggtgggctggctcttccaaggcctcaaggaagccctgccccaa

SEQ ID NO: 318655 - DNA, 122 bp, Homo sapiens
cgagtctgacatccccagagagggggaggggctggtcggaaccgtgagaagtggccgtggcggacttaggtctcccggcagtcagctccacaatctgcgcccggaattctccttgcccagct

SEQ ID NO: 318656 - DNA, 122 bp, Homo sapiens
ggtgcgtttgccggaggcatccccgagagtagggtgccctggccccttgcctctatgctccgctcaggggcagccgcggccacgttatgaggtggcaagcaggccctcgtcaggcaggtgtg

SEQ ID NO: 318657 - DNA, 122 bp, Homo sapiens
aacagcggccaagacaccgaagaggcgggggtgccagacaggctgacgtcatgggcagcccgaaatgacacagctaaccggccaatcccaagtttggattccgggagaagcacgatctattg

SEQ ID NO: 318658 - DNA, 122 bp, Homo sapiens
gggtccgcccacccgtcatctcccgggagccccccgacgtgtgccattaagcataaggcgcgttaagcgctgccacaaagtcccgaaaaggcgaattaaaaaggatcacttctccctcagga

SEQ ID NO: 318659 - DNA, 122 bp, Homo sapiens
ctggattcttccaaaatccaacttggtgataagctgagtcatgcgtggtaacaaatgccccgacaagtataattgcttaaacacgaagatgtatttcttgttcactctgaatgtccatcgtc

SEQ ID NO: 318660 - DNA, 122 bp, Homo sapiens
gcgctcctctctggtctcgagtcaccaggaccagatcgaggatgcggccgaccccctgcccgatgtggaaagcgaagtctccacctcgtgattgggtctctgctgtcagagagcttcacgag

SEQ ID NO: 318661 - DNA, 122 bp, Homo sapiens
ctctgaagtattgccccaaacggcactgctgggatcataattagattggacagcgggttgcgattaagggctacgcggtgaataaaacagctcttaaaagttgcataggaagtcctcacagg

SEQ ID NO: 318662 - DNA, 122 bp, Homo sapiens
caggccggcagcgcccgggaagcaggagcgcggagaggcgccgaggcccggctcgccccgcgagaccgacttccggagctcccggcccgactccagccctgccggtcctgcagccctcccgg

SEQ ID NO: 318663 - DNA, 122 bp, Homo sapiens
gttgtcatgattgccgtgtgggctgaagtgacagaataaatgacctcactggcacagtgccgctctccaggagccaggatgcacagaaaagcaggggaattttagggtaattcgagcgatat

SEQ ID NO: 318664 - DNA, 122 bp, Homo sapiens
gagctcatcagccccacgcagcccggggaccgcagccagcgccatgtggcggggcaggtgcgcgtccagctccccgagatgacacacgcctcacatctgggttttcttcccaaaaacccaca

SEQ ID NO: 318665 - DNA, 122 bp, Homo sapiens
gacgcaggcggtggcgccggtttctcactcaaccgcaggttccagcatccccgatacggccgacgtcattaccctgcgaccgctcaggacacttctgaggactcttttgacagctagtaatc

SEQ ID NO: 318666 - DNA, 122 bp, Homo sapiens
ggtgacaagacccctgcaaactgcctctcagggacccccacaagcccgggaaaagaggagcggcccatgggactcaccatttccctgcaggaagatcaggcctatgaccatgcagagggggt

SEQ ID NO: 318667 - DNA, 122 bp, Homo sapiens
ccacctccctcctccctccctgcaccacggctaaaaggaaccacagagcagctcaaaaaccgagaagggagtgaagaacagcctcgaaaaagtcaggacgctgaattatcctatggtaattt

SEQ ID NO: 318668 - DNA, 122 bp, Homo sapiens
gcgctgggagccgagccggagggaaggcggtggagagatgattgcagagttggtgagcagcgctctggggctcgccttgtatctcaacaccctgagtgcggatttctgctatgatgacaggt

SEQ ID NO: 318669 - DNA, 122 bp, Homo sapiens
tgagccttccacctctgacctctcactgttcatgccggacctgtggatctcctgggactccgagcaaggcctgcacgagagagggctgaaaggctgctggggctgccacctcgctattcccg

SEQ ID NO: 318670 - DNA, 122 bp, Homo sapiens
cttcccctagcaacccggcggggcggggccgcggcgctccaggggcggggccgggcggggcgagcgctccaggcctcctcccgaccctgcgccgtgcccagcccctctgccctcctgttacc

SEQ ID NO: 318671 - DNA, 122 bp, Homo sapiens
tttactcagtgcttatctgatgccagccactttgctaagcctatgaatgcattatttccccgttgctacagatgagagaattgaggttcagacaggttgaaatcattgctcccaaagtcaca

SEQ ID NO: 318672 - DNA, 122 bp, Homo sapiens
tagctgggactacaggcgcatgccaccacgtccggttaatttttgtatttttagtagaaacggggcttcaccagctctactgaagaggtggccagtctagtctcgaactcatcttttgacca

SEQ ID NO: 318673 - DNA, 122 bp, Homo sapiens
gatttagaagggtgttgtttcaggcccggaataattagagtgtccctgaggacagaggctcggcctagcaggagctgctgcatagtggggagggtgagatgggggggcaggggcggctcgga

SEQ ID NO: 318674 - DNA, 122 bp, Homo sapiens
actccagctgtgctttttttcctaacgtgctgctttgatctgctctcaatcagtttcccacgtggcctccggaaatgagctttatccaggtgtttccagcagggaggacatgggagtctttc

SEQ ID NO: 318675 - DNA, 122 bp, Homo sapiens
accactgagtctcagggcgaaagagtggcgcctgtctctttaaattatgcaaatagactgcgggtggcgtaagggggggaacataaaaaggagcctagtcttcggctggaccaatcagcgcg

SEQ ID NO: 318676 - DNA, 122 bp, Homo sapiens
cgtcgcgatcccagtggggcggggtctcagaggaatcggagggtgactcatcacgtgactcgctccggccgcagccccctcggaagctgctaggcggaagtagaagttcagaagagggctag

SEQ ID NO: 318677 - DNA, 122 bp, Homo sapiens
ccggtggcccgccctgggcgtgacgttgttctagtgttgttgccagcagctgcacgtggtcggctgagtccgcctcagactcagagctgcgctcctcgacctcaacgccaggcggttacttt

SEQ ID NO: 318678 - DNA, 122 bp, Homo sapiens
agtgttcttgtagttgaaatgcaatgatgttttttcatatcattggtcacggttgtagtccgtgcgagaataatgacatatgctttatttttatggagtgtgggtttagtaatggggtttgt

SEQ ID NO: 318679 - DNA, 122 bp, Homo sapiens
tccctctccctctccctctccctctccctctccctccacggtctccctctgatgccgagccgaggctggacggtactgctgccatctcggctcgctgcagcctccctgcctgattctcctgc

SEQ ID NO: 318680 - DNA, 122 bp, Homo sapiens
ccatgaaggaccagcagggatgcccaccttccaggtgagaagatgtaggcacaaagctgccgagtggctggccaaggcggtacaggcagtggggatggcgcgggggcaggaattcgagtctg

SEQ ID NO: 318681 - DNA, 122 bp, Homo sapiens
gtgagactccacggccgccgccccacacggggcctccggggaaaagccaccgcccccacccgccatatttccctgaaaggcgcccgcgctacagctcccggtcttcgctctctcccatgtgg

SEQ ID NO: 318682 - DNA, 122 bp, Homo sapiens
tgggcgggggtcaggaggtgcggggcggaggcggagcgtgggccgcggagatccggcgttcgcaggaggcttggtgcgcggcggggctgcacggggccacttccggagtagtactgcgagca

SEQ ID NO: 318683 - DNA, 122 bp, Homo sapiens
gagaaaagttgctggattcggcaaacccctgtactttgcaaaacctcaccgtggtgtctgcgtggctgggtgtcagcagaagcaccgtggccccgctctcccgcctccccgtgcgcctgggc

SEQ ID NO: 318684 - DNA, 122 bp, Homo sapiens
ctccggaccgaaaaccagcggcttcgtcaggagaaccagatgtggaaccgagagggctgccgctgtgatgaggagccgggtacctaggggtgcctcccagcctggtggacccaaggagaagg

SEQ ID NO: 318685 - DNA, 122 bp, Homo sapiens
gatgattcttttcttttcgatgaaatggtgagataaaagatgaagtgtatttcaaaaggacgatgagctgtgcatgttgcctttgaggcagttgcagaacctattttattgcactagatctc

SEQ ID NO: 318686 - DNA, 122 bp, Homo sapiens
aggacactgaggaggcgtcgaggggctgagtgagggttggacctggtccccgtgcttgtccggcaggactcccaggccgcacagtggccgaggaggcagctccaggaatgggcaagggaaag

SEQ ID NO: 318687 - DNA, 122 bp, Homo sapiens
ctggcctgtgccctgttcttttttcttcacacaatccatctccctatgtatcctcttccacgccctggaatttaacacactacacgtattgctgctgccaacataaatacctgaagccctgg

SEQ ID NO: 318688 - DNA, 122 bp, Homo sapiens
cgggctgcgcgaggcccgggggctcagggtacagacgctattcttgctgggagagccgaacgcacagcaccccgtgtggggttcccaggggagtgacctggcctcggagtcagcagcccagg

SEQ ID NO: 318689 - DNA, 122 bp, Homo sapiens
cacgttgtagaaggagacctcaccagcatcatagtccaagaaaatccccacccgctggagcggggtccgcaggggtagggcagtcattggggaggtaagagcccaatattctttcccatacc

SEQ ID NO: 318690 - DNA, 122 bp, Homo sapiens
gcccatgaggaagtcagtacagtggggccatgaacaataaacagacaattaattatccttcgcggagctgcgcgggggcagctctcccaaagcagtcagtcattcacacttcagtatgaatg

SEQ ID NO: 318691 - DNA, 122 bp, Homo sapiens
atgccagcctttcccaggcacctgccacatgcagggcaggtggacagaccagcaatgacacggtacagtgaggcaagtctttccacccaatcccacaaaacataagccaatgctgggaccct

SEQ ID NO: 318692 - DNA, 122 bp, Homo sapiens
gccactgccagaatgacttccatgctacgtgctcaggtctaggtgcagcctcagggccatcgtgatgtttcgaaggtacctggtttggggcaggcagtggctccctttatgcattaaacata

SEQ ID NO: 318693 - DNA, 122 bp, Homo sapiens
cccgcccgggcgcctcgggtcagcggggtctaccccggccccacctaacctctcggtgcccggccttctaagcccccgtggggggcgtgtgcataaactcacctcagaacccacctcgcctg

SEQ ID NO: 318694 - DNA, 122 bp, Homo sapiens
gacgcaactgtcaggtgacgcttccggcgcagaaaaatggcagccgccgctccggactcacgtgtgagtgaggaagaaaacctgaaaaagaccccaaagaagaagatgaaaatggtaactgg

SEQ ID NO: 318695 - DNA, 122 bp, Homo sapiens
cccaggagcctcgcagcggggcgctggcctgcggaaaggccacgggggagcacagggctccgcgccgccctcctgggagggtccggagtccagcgcaccccgagccctggtgggtgagcccg

SEQ ID NO: 318696 - DNA, 122 bp, Homo sapiens
tttccttttcttgcttgtttcggctactctcttccatccggctttgccttactttcatatcggtcccaaacaacttttctcctagactttaaggaggcctctcccaacgatggtttggagga

SEQ ID NO: 318697 - DNA, 122 bp, Homo sapiens
ccgtgtgagctcagggcacgtccaatggacaattgggacattaagtgccagatctgccctcggcaggaaacaatggaaatgatacaaaccacagtctttccatgtatccatattaatagtga

SEQ ID NO: 318698 - DNA, 122 bp, Homo sapiens
gatctgaaaactccaggtcctcctcccaggagcccacggcctcagatggggcccaggacgcgcccgcgctggggaagcgccccctccacctgagcccgaaattgtccctaacaaacccaaca

SEQ ID NO: 318699 - DNA, 122 bp, Homo sapiens
ctccattttcctgacttttttttgtacaacaaacacaggcgagttccatggagacaaggacggctcaatagtgtttgcttgtagtaaatcattaacaatttaaattaaagcctccaatttgt

SEQ ID NO: 318700 - DNA, 122 bp, Homo sapiens
ttaggagagtccagaggctgagaaggcccaggtgaggagaaatggtgggctgagtctcatcggaaagcactgtttcctgggactcagtcccattcagagtctgtctccctggacctgtgcct

SEQ ID NO: 318701 - DNA, 122 bp, Homo sapiens
cactcttatttcctgtttgccagctccatgtcagcttcccatgtgtgctcccttcctcctcgtctggagtgcttggcatctgccgttacttaaatcattgcagggagatacagggtactctg

SEQ ID NO: 318702 - DNA, 122 bp, Homo sapiens
tgtgtcctgcgtcactttcccttctgtaaacggtggtcttccctttgtgtcgtgtttgatcgtttctaaattgctttcccatgcattactttacccagccatcactgtaacccacaagatgg

SEQ ID NO: 318703 - DNA, 122 bp, Homo sapiens
gcgcctgtaatcccagctactcggcaggctgaggcaggagaattgcttgaacctgggaggcgaaggttctggcacatattgagcacttgctgagaggcaaagttcaggccttctgccccagg

SEQ ID NO: 318704 - DNA, 122 bp, Homo sapiens
cagacgcacggacggaggaaacaggccacagacgcacggacggaggaaacaggccacagacgcacggacggaggaaacgtcacagacgcacggacggaggaaacgtcacagacgcaccgacg

SEQ ID NO: 318705 - DNA, 122 bp, Homo sapiens
tcgcggcgcctggggcggtggccgccggaccaaagctggcctctcccggctcctcctcctcgctccccaaggcctttcccaccgcgtcattgtctcggtttatctgcagatacgtctaccta

SEQ ID NO: 318706 - DNA, 122 bp, Homo sapiens
aagcatgtacacaatgctatagtggctgagtcagacacatacaatgcttagagccatccccgccccaggagaggctgtcaccagttcaaactcctgaattcctcatctctcatttcagtgaa

SEQ ID NO: 318707 - DNA, 122 bp, Homo sapiens
aggatggtcagagtcaaaactaagccaggtactgaccattgctgtgtccgagatggatgacggcattgtaagggttctgactcataacatcgagccgcccagctcgagcattcagagctgcc

SEQ ID NO: 318708 - DNA, 122 bp, Homo sapiens
cagatcagacagacttaggtttgaatcttatttctgcccctggctacatggagcaagtcacgcagcctcccagagtctgcttcttcatttgtaaagtgaagacaagatttccataggtcaag

SEQ ID NO: 318709 - DNA, 122 bp, Homo sapiens
tccagagcaaatgttctctggatttgcagtgactgctgctgaatcctgttggttttaatgcgcttcttggtttgtgtatactactcagcaattgatttctagaaacttatcccaaatcatct

SEQ ID NO: 318710 - DNA, 122 bp, Homo sapiens
gaggccgcgggactcacccgcggcgctgaagccgaagccggcggggacaggcgagtgttccgcgagctccaatcggataacaaccagtgacacactcatagggcaggcgctggccggcgcgg

SEQ ID NO: 318711 - DNA, 122 bp, Homo sapiens
ccctccctcccgcagaagggggttttaggggcctgggctggggggatggggagggcacatcgtgactgtgtttttcataacttatgtttttatatggttgcatttacgccaataaatcctca

SEQ ID NO: 318712 - DNA, 122 bp, Homo sapiens
ggccataacgaacctggatgaaaccttccccaggagtctgctcctgacctcgtacttgctcggtgaccaggttgtctgtgttttgttgggaggccatattattgctgaagggattgaagaat

SEQ ID NO: 318713 - DNA, 122 bp, Homo sapiens
cttgcggccttttgtgttccccgatgtctgggctgtgtccctgccgggattcccagccttcggggtcagccgtcgagccacttgctttgctcagttctgtgtttcagccacatttccacggt

SEQ ID NO: 318714 - DNA, 122 bp, Homo sapiens
ggcctaagtgggagtatgaggccatgtggtccccaggctgcttgggatttcagccagctacgtgggaactggtcagccacaccctccggagcctgttgagctcggaaggggaggtagaattt

SEQ ID NO: 318715 - DNA, 122 bp, Homo sapiens
agggtacagggacactcaaagagtgatttgcttctctcagctcttgcattggcaggagctcggaaggacaacctctgagttcctcctcccaaaactagagtccttgaatctgacaacttgac

SEQ ID NO: 318716 - DNA, 122 bp, Homo sapiens
cagccgccataagaaaacaatttgacgtctgaggccctcggggggaaggggacgccccagcgcagggtaccccccaccaagcctgagcctagccttggtgaggcgaagagagggtggcctct

SEQ ID NO: 318717 - DNA, 122 bp, Homo sapiens
agtgggtactgatgagcaaattagcacatcaaaaccttggatgaaagttcctgagaatagcgggccggggagaaacctgggaaaagaaaaataaactggaatttacagcttattttgatatg

SEQ ID NO: 318718 - DNA, 122 bp, Homo sapiens
ctgcccaagctctgggctcagaaggtaatgggggctttgcaagccacccccaatgccccacgtgcaccacttccttctcatccttggccccctcattccttgtacttccgtcgcaacaacct

SEQ ID NO: 318719 - DNA, 122 bp, Homo sapiens
atcacaggccggaaggggcgggacctcccacgccgaggatagattgagcgcagaactaaccgcgctctgaaaggttctaaatgtctgcggggctcagagccggatgtcacgtcgtcctcctc

SEQ ID NO: 318720 - DNA, 122 bp, Homo sapiens
tttactcaaggcaattctgcccctcaacaatgtaagtatttggctcatcttctacaagcccgacacctgcagctttggggtcactgaaggcaatatggttttggacatttcctgggcggctg

SEQ ID NO: 318721 - DNA, 122 bp, Homo sapiens
tgcctgtaatcccagcatattggaaggctgcgatgtgcggatcacctgaggtcaggagttcgaaaacagcctggccagcatagtgaaaccctgcctctacttaaaatacaaaattagccagg

SEQ ID NO: 318722 - DNA, 122 bp, Homo sapiens
cagaggtcggggcgctggactggtagcgggcggagacctgcctttgggccgcggttaccgcgtgagggtggaataggcagtcccacacgccattaatgttgttttggtggagaaggtgggct

SEQ ID NO: 318723 - DNA, 122 bp, Homo sapiens
ggcgcccagcgtaggggcaggaatgagatccccctccccggggacccaggaacaggcacccgaagtgtcacggccacgcacagccgacctgggtacagggacccaagcccggcggcgggcgg

SEQ ID NO: 318724 - DNA, 122 bp, Homo sapiens
agatgtggaagatgagcagctggcccagctgcaccaagccaagaaggtccagcaggagcacgagcatcctgatgatcacgactatcagagtctgcacctgcaccgggaacagggggaggaac

SEQ ID NO: 318725 - DNA, 122 bp, Homo sapiens
ttgtttagaaatatatcccttgttttacctcagatcaaatactgcttttggaataagatccgaacttcttagtggggcattcagagccttttcaagctctggtttttttttttgtttgtttg

SEQ ID NO: 318726 - DNA, 122 bp, Homo sapiens
tttagcctttcattaatgaaatcccggacgtccgtgttatctggagctgtaggagtcctccgaggaataaataacgtttctggaataatatctcgccggagctttttttcctcaatggctgc

SEQ ID NO: 318727 - DNA, 122 bp, Homo sapiens
ggccgcactcaaccgcggctccgctcgtgcctcgcctttcctccgcaagtccctgtgagccgcctacaggaacgagtgaatcagagaatgaatgagtggggaggaaaatcccagtgctgccc

SEQ ID NO: 318728 - DNA, 122 bp, Homo sapiens
ccgcgaggcctggcacgaaggagggctcacagtccggctcccagagccctgcaagtcgggcgcgctcagcccacctgctccctgcattggtggtggcgggcggcccgcactccccgcgcccc

SEQ ID NO: 318729 - DNA, 122 bp, Homo sapiens
tgatgcctttttttccctctgaaaagagcagcatttggggagagagcgggccctcgccggcggcattggcggaacccaggatgggagcctgccatgccagacgccagacaccccagggttcc

SEQ ID NO: 318730 - DNA, 122 bp, Homo sapiens
tcgttgccttagcagccgccccgaggccggcgctttcagaggaggcttaccgggcggtgtcgccagacaaggttgagatttgtggcctagtagtagtaatttaggaaaaacgcaactcaagt

SEQ ID NO: 318731 - DNA, 122 bp, Homo sapiens
ccttcaaagaagaactcccaccgtggcccagggttatttctgtctttttttctggacttgcgttagaatgtaggatgtttcttgtgttggacaaatcataatgggttattggtgggtgacag

SEQ ID NO: 318732 - DNA, 122 bp, Homo sapiens
tcttcctgccaaatgcaggtctttttcttcacatatttactaatctctctattagaaagccgctttgtcttgcagaggtcacgtagttcatgtggtttacattgtaaggatggtaaaacatc

SEQ ID NO: 318733 - DNA, 122 bp, Homo sapiens
gggagaggtcgggcgcgggctcacgcccgtaatcccagcactttgggaggccgaggcgggcgctgcgcatctcctgtgtccaggagatcgtgaccagcctgggcaacatggtgaaacctcgt

SEQ ID NO: 318734 - DNA, 122 bp, Homo sapiens
ttcattttgacattcagagcactgggcagaaatcactttgcaacaccccccgagggccttcgcgatgctttgtttaaacagttggattcccctggtgcacacagttctataagtcggctgct

SEQ ID NO: 318735 - DNA, 122 bp, Homo sapiens
gacacctggccacaggtatttttgccaacacttcacattgcgactccccagtagcaggcgcggaggtggtcctgacacccacttgagactccgattttcaccctcagctgccaaccgccgag

SEQ ID NO: 318736 - DNA, 122 bp, Homo sapiens
cggccgcgtcgggggcggtgtcgcccggaaccgcagcccccctgtttcctccccgcctcgcggcccctcagtcgcccctatttccggcgcgggacccccaccccggtacctgcacacctcat

SEQ ID NO: 318737 - DNA, 122 bp, Homo sapiens
ctcctctgagcctgtttcctcatctgcaacgtagactagctaatactacccattggaaagcgttgtttcttagctaatgcatgcaaggcttaaaacctagatgacgggttgataggtgcagc

SEQ ID NO: 318738 - DNA, 122 bp, Homo sapiens
ttcaagcgattctcctgcctcagcctcccaagtagctgggattataggcatgtgccaccacgcctggctaattttttgtatttagtagagatcacctgagtggatcacctgagatcttcttt

SEQ ID NO: 318739 - DNA, 122 bp, Homo sapiens
atcttggtatccgacttgctgtccctgtaacatctgacacttctgatgacctcttgaccccgcccctcctgctcaacaatgctctattcccaaggcacccaccatgctgcctgccctcccac

SEQ ID NO: 318740 - DNA, 122 bp, Homo sapiens
ggacagagatgagccccatctctctcatgcccccacacacacaacacacgcacagggctgcgcaggagccagagaggtaaacagagagcagacagcggaaccaggtccctccagctcctcca

SEQ ID NO: 318741 - DNA, 122 bp, Homo sapiens
ttgttttgaccagtggattgcaagcagaagtgatgtgcacgtctcccctacctggatgatcgatgcttgtgttgagattggagatgccacaggcacccaagatgcagtgtggaatgctccac

SEQ ID NO: 318742 - DNA, 122 bp, Homo sapiens
agtaatggagtgttcactccagaggcagccagtagtggtcagagatcatattctgggtgtcgggatgtctatttctctcatcagctctgcttctttggccgaacttacaggtatcaaagtga

SEQ ID NO: 318743 - DNA, 122 bp, Homo sapiens
tcattggtgcttgcttcccatatttcaggcaaagagccactgcatagtgactacagcccccggacagatgtaggctgtttcttaccctaagcaaggcacagggggtctggttatatagttca

SEQ ID NO: 318744 - DNA, 122 bp, Homo sapiens
actcaccgggtgaacgggggcattgcgaggcatcccctccctgggtttggctcctgcccacggggctgacagtagaaatcacaggctgtgagacagctggagcccagctctgcttgaaccta

SEQ ID NO: 318745 - DNA, 122 bp, Homo sapiens
gctgctgaggagttcctggacgtgctcctgacgctcactgcaagtcgtatgacaattggtcgctaaccgagagaaccttcctttttataagactgaaaaccaagcccatgtgacgaaatgac

SEQ ID NO: 318746 - DNA, 122 bp, Homo sapiens
ccagacccgcccgctaagccgggagagcctgactcagcagggggagcctggcctgccttccgcccccttcgcgtcctcccccggggcagaggagagtgttgtggggagaatgcgtttctgtc

SEQ ID NO: 318747 - DNA, 122 bp, Homo sapiens
gcagccgcactggcttttctcttgcatgtgtgcttgtgccttttgccacctggaagacaccgcagaggaggacgcggaaggtaagggcccgtccctgccgccggaggtgcaggaccctggct

SEQ ID NO: 318748 - DNA, 122 bp, Homo sapiens
ggcccttggccacggggattccgtcccagactccggaggccatcggggaccatgaaatcacgctgacctcgggaggccggagacaagcagccatgtgacctaggcaagttcatgcactctct

SEQ ID NO: 318749 - DNA, 122 bp, Homo sapiens
gcaggtcttgacaagcatcatattcctgatgactgacctgaaccatttccggaggggagccgctggatagctggaaatcttgctgagcagtttcaggaaatacagcgtcatcatctttcaga

SEQ ID NO: 318750 - DNA, 122 bp, Homo sapiens
ggagtgtggagggtgggtggaccagctcctgtgcacctccagcggcagccacgcagaatacgaattggctgcagttaccgtcctcatcagcccgcagtctggatagtatcagcaacaggaaa

SEQ ID NO: 318751 - DNA, 122 bp, Homo sapiens
gcctccgcgcggggccgaggcgcctgggtgggaccgaggaggcggggccttcccggcggacggatgatggacagcctgactctccaatcgcgtccttaaaagggtgcgggcaggccaatgag

SEQ ID NO: 318752 - DNA, 122 bp, Homo sapiens
gcggtccggagagggtctggccccactgctggggcaagggctctaggcgcccggaccccacgcccgcagcctgcggagaacgtgccgacaaggacctgtagggccccactccccctcctccc

SEQ ID NO: 318753 - DNA, 122 bp, Homo sapiens
gataattatagattcacaggaagttgccaagaaagtccagagaggttgcaggtacccttccgccaggtttcccccactggttccaccttctgtagccaaaaaaagccagggaccgaccttgg

SEQ ID NO: 318754 - DNA, 122 bp, Homo sapiens
ggcctgatccgtgggctcgacagctggcaggcgcaggatgccgccgtggatttgtgccttcgcagggagctggccgccggggccccctgacgagtagacgtggggtcagcacccaccaagcc

SEQ ID NO: 318755 - DNA, 122 bp, Homo sapiens
ccatacccccaaatctagagaagaggaaaacctctgcctgccccactcgatcctcttccccgcaagcacctcgcttggccagcaaggtgtgaaggagaagtctccgtaagaggcaaaggcag

SEQ ID NO: 318756 - DNA, 122 bp, Homo sapiens
cccctcggcgcaactggaaggcgggtaggcgccgggcgcacaggggcgcggcgcccgcggcgacttggggaaggttgcgctcgagttccctggttctgcctggagttgttcggggtaacgcg

SEQ ID NO: 318757 - DNA, 122 bp, Homo sapiens
cctgagagcgagcagagaacagcgcgtgcaggcagcctccagagccggcggccccgcggacgacaacctcttccacggttcctatgcctatggcactgccccggcgtccgaatctactcgca

SEQ ID NO: 318758 - DNA, 122 bp, Homo sapiens
tagcctgcggacgtcctgtcattcccttgccttttagcgtcccaacttagcaaaactccgcgtttagggtgttctgagtaggctttgtctaccctgaaacgctttgtgtcgacattccacca

SEQ ID NO: 318759 - DNA, 122 bp, Homo sapiens
gggggtggcggtgggaaggaggaggggttgggggagggcggcggaggtgttgggtccggccggctcacgagggagctgcagaagagctggctcagaccttaatcagagctgtcgccggctcc

SEQ ID NO: 318760 - DNA, 122 bp, Homo sapiens
gcgaggccgaccgtcccccgaagcccccgcaagtccagactgggggacctcggagatccacgagattgccagagaaggaaattgaggcccaagaagctgcatgacttagccaagttcacgga

SEQ ID NO: 318761 - DNA, 122 bp, Homo sapiens
tggaccaaaatcttacaaatcaccactaaagaacctactcatgcagggcaaggtggctcacgcctgtaatcccagaactttgggatgccaaggggggcagatcactcgaggtcaggagtttg

SEQ ID NO: 318762 - DNA, 122 bp, Homo sapiens
ctggccttgtggtgtatacgttctagatgcaagcttgtccaacctgcagctctcgggctgcgtgtggcccgggacagctttgaatgtaagaagtttttttgcttatctgtggtagcaaatat

SEQ ID NO: 318763 - DNA, 122 bp, Homo sapiens
tctctccacagagcttctttcttccccagttcttctccctcttcttctgtgtttccactacgttcattcattgaccatttataaagcatcacttgtgccaagctctgtgtgagtacctaggg

SEQ ID NO: 318764 - DNA, 122 bp, Homo sapiens
agaggtcgggacacgggcttgctctgcctaagccccacgcggtctctgaatcaggacacacgtcctcattaccctggcttcacgagcccccagccgccgcacccgcctcacttgagcacttg

SEQ ID NO: 318765 - DNA, 122 bp, Homo sapiens
taatggctgtgaatactatgggaggtttcatcacagatgcttgccatttacttttagggacgtcgcatacgacgtccgtaaattactggctcgggttttgagctttacctggctctcgtccc

SEQ ID NO: 318766 - DNA, 122 bp, Homo sapiens
aaatcagtagatacttgtaatgcaatcagtgctgaattattactcaacaagctgagtcttcgagggcaccagcaaaacagcaggaatgactaagaaaagtttaactttgatgaatttatgta

SEQ ID NO: 318767 - DNA, 122 bp, Homo sapiens
cgccgccgacccccgcacccgccgcccctagccccgcaaagctccgcgggtacctgtcggcgccgaaaggtcagggtttgggcccctcagaggggccaggcacaggatttgtccaccacaca

SEQ ID NO: 318768 - DNA, 122 bp, Homo sapiens
aggtaaataactgctttattattttaggggactgcacaatattccactgtagggatggaccgtaattcatgtaaccagcccctactgagggacactgaggttgatgccaaccttttgatatt

SEQ ID NO: 318769 - DNA, 122 bp, Homo sapiens
tggaagtcccaactgcacagagccctgccccagtttcaggagccagcagcctcggagaggcggatcctgacctctgctctgctcttgggatagcctttcccttcccagcagggttgagatac

SEQ ID NO: 318770 - DNA, 122 bp, Homo sapiens
actaggacacacagaactgcttggctgatgatcatgggcactaggacactcagaactgcccggctgatgatgaggggcactaggacactcagagctgctcggctgatgataatgggcactag

SEQ ID NO: 318771 - DNA, 122 bp, Homo sapiens
tggcgcggaaactgtgggcggtggtggtgacatttcccacgactcagtggcgcccccgggcggctcccaccctccctccggccggcgcgtctacgcagccccaagtgctggctgcgaccctc

SEQ ID NO: 318772 - DNA, 122 bp, Homo sapiens
gtccactacccccaagcggtctctttttgaaggcgccgcacaaaatgtggtctctaccagcgcttggcctccaaggatcttcagtgagagacattattcttggaatatccaattaattccac

SEQ ID NO: 318773 - DNA, 122 bp, Homo sapiens
acatgccaggcactcaggaaatagtaaaaattggacatgcgatattctgcccttgtgtagcgcacactagagtgggaaagaaagtgcacttttaactggacaactaccaacatgaagagggg

SEQ ID NO: 318774 - DNA, 122 bp, Homo sapiens
ttgactcaagtgcaagccctgcatgacacggtgtgtgcaggctccaggtgcacatgtgagcgtggacgtgagtgttagcaggaaacacagtcctgtcccgagcacagggggcccttcttgta

SEQ ID NO: 318775 - DNA, 122 bp, Homo sapiens
gctggttcccgtttcctcccagagccggcagggggggcaccaggcaaagtttgcaagacgcgcctccctcccacccctcccccttcctcgcccaacttcccatagccgcggcctcaactaaa

SEQ ID NO: 318776 - DNA, 122 bp, Homo sapiens
agcgaggcggaaacggtcgccggtttcagtggtggccccactggaagccgagttcaggagcggctaagcggtcgccggggaaagcaccggggcttcccagggtcccctccgagttcccactc

SEQ ID NO: 318777 - DNA, 122 bp, Homo sapiens
aggagatggagcaaaaagcaaaagctccggggattttcctccctgcctctcacctggggccgtctgtggagcgatagctttgcggagggagaggcataagaaccacgttagattaataatag

SEQ ID NO: 318778 - DNA, 122 bp, Homo sapiens
cagctctgccctctgccctcaccccattgttccccaggctctgcctttcaggtcgttttacgttttcacctgatccctgtgatgctgcaaagcattcccaggccactgagcagccctgccac

SEQ ID NO: 318779 - DNA, 122 bp, Homo sapiens
tctccctgactcacagattgcgattcctggaaaatcgcatttgacatcctccatccatcacgccttctaggtcctgtaactccatgagcaggaggagccaaacaatttcatgttctgtgtta

SEQ ID NO: 318780 - DNA, 122 bp, Homo sapiens
tgatgggtttgggggagggggcagcgcatttattgtgtgtgcggaagggagaaagctgcacgtgatttcaattttgaagcacaaagaaataacatgcaatgcagaaaataggtttatgaatg

SEQ ID NO: 318781 - DNA, 122 bp, Homo sapiens
ctaggcattttagcaaccaagggggtgtggctaagcgagagagcggcttccctggtggcccgggcgcgcggtcttgtcatcttgttgctccttgtgagcgctgggtagagaaagtgaggggg

SEQ ID NO: 318782 - DNA, 122 bp, Homo sapiens
tctatcgcatgggaattcaatgatgtagctggtttgtctgaatttctctggtgtgcacaccggaaactcaaagcacgactctatactgtacttttgtaatgtacaatgattgccgtggagag

SEQ ID NO: 318783 - DNA, 122 bp, Homo sapiens
acgtcaagagaagaactgtttggcctaggctctatgccaagtcttggttgtgccactaaccgtgaaacataccctctctgaccttcagttttctggctgcagacctattttcccaggggtgc

SEQ ID NO: 318784 - DNA, 122 bp, Homo sapiens
cggcctccacaaggtcagaactaagatgtcctcagagatccccagttacgaagcaaagcgcgggcctacttcgggacctacgcgtccgggcgctgtgcgcggggaccgctcccgggcccagc

SEQ ID NO: 318785 - DNA, 122 bp, Homo sapiens
aaaagaaattcccgggcgatgatgaggcaccaggggtgaagcggacatgggctgctggagcgggaatgagggggcgccagtggctccggaaacgggttgaggttgtctgcactggccgctcc

SEQ ID NO: 318786 - DNA, 122 bp, Homo sapiens
ctgtgagttatgctgtcattgtgtctaataaatcctcctccaaagggcccagcctggcctcggtaatacaggtgtttctgtttctgtccactcacctctgagtcaaagcattaaatgcagag

SEQ ID NO: 318787 - DNA, 122 bp, Homo sapiens
ggagggatcgagccttcaagaggaatccggtaatgtaggagaagaatctgagcagggaaccgtctgtttcctggagccccatgttaggaccccagtaaataccttttgaagaaataaatgca

SEQ ID NO: 318788 - DNA, 122 bp, Homo sapiens
gcaaggaggcaaggctgggttccaggggacagggtcagctttgggtggggcccagagccccgggtcgcagtgacggccgccgcaggggtctccccccgcgtaccttcgcttctgttgaaggc

SEQ ID NO: 318789 - DNA, 122 bp, Homo sapiens
gccaaaaatataactcaattctaaacacatttctggctcacctgctaggtgccagaaatgcggatcttgaggaatatacaagatctgcttcactcttttagaatccctgcattagagaggat

SEQ ID NO: 318790 - DNA, 122 bp, Homo sapiens
gcagggcgggcagggcctaggggtagggcataaagcttggagtggcggggttggccacgacgagccacagcaccggacttccaacgacccagtactggaaggacccttctccccccagtgga

SEQ ID NO: 318791 - DNA, 122 bp, Homo sapiens
ctcctgctcctgggcccatttccttccctctaagcccaaggttgcaaacaaagacaccttcgggcaatatctggccaccagatgtgttttggacagcccacacataatattcttctctaaat

SEQ ID NO: 318792 - DNA, 122 bp, Homo sapiens
agtttgagaaccactacttcaagatttcctacatcccggatgacgaggtgagctgcccttcgccccctcagcgagcccagcgtggggaccactcttcctgggagcaaggccaagcccctggg

SEQ ID NO: 318793 - DNA, 122 bp, Homo sapiens
gaacccgggaggcagcagctgcagtgagctgagagcacaccactcgcacttcagcctgggcgacagagtgagactccgtctcaaaaaaaataaaataaaataaaaaagagccaaaagagcgc

SEQ ID NO: 318794 - DNA, 122 bp, Homo sapiens
gcccgtagccccggatgaaaggatgacattgagttcgcgacgctgcgctcctcgggaacacgaaccacacctggaagcagcctgcccctgtggccccaaggttcccgggtcccttcagcggc

SEQ ID NO: 318795 - DNA, 122 bp, Homo sapiens
caatcagggcctcatagaaagctcgggctgcagccccatccagggtggactctggcttctcgggctgtggctgctgctgcccatccttccagaggtcgctggggtcagtggctggggtgaag

SEQ ID NO: 318796 - DNA, 122 bp, Homo sapiens
ggcttgcttccccaaggatcaacagcttagctgcaagcctctgcttctgcctgctggggccggctggctcgccctttccattccgcttgcactctgattcttgtggtgtcccaagaaggccg

SEQ ID NO: 318797 - DNA, 122 bp, Homo sapiens
tctaggggaaggaaaggtcgtgtcctggcgtgcagctgggggcgctcttcatagttgggtcgagtggcggtgaggccgtggtcagaggtctggagggcgccccccatccaccccgtcttggg

SEQ ID NO: 318798 - DNA, 122 bp, Homo sapiens
acctttggtagctgcccagaccccagcttccaattcttccctcttctttgcacaggcagccgtccgccccacagccccaccagcgtccagaagagaccacttttagcaaatccggcagggct

SEQ ID NO: 318799 - DNA, 122 bp, Homo sapiens
acctgtgaatacaacctggtttagatgggaggtctttgcagagggaatgaagttaagatgcggccacaacggattaggggttggtgtccttacgaggagagagacacacaggagagaagcca

SEQ ID NO: 318800 - DNA, 122 bp, Homo sapiens
taggatcctttctgattgcagacgtggtccagagccaaagcggcttggctgggaaggctccgtgagacgccggggcttgattgctaggaggtgaaaaactttcgagaactcagagcaatcca

SEQ ID NO: 318801 - DNA, 122 bp, Homo sapiens
caaacaacagaaagacagatataaactgcccccccaccaccgggcgctcattctgagccgcgacgccccctcaacaggctcccggcaccgcagagccagaggccacgcggtgagaaccccag

SEQ ID NO: 318802 - DNA, 122 bp, Homo sapiens
ggagggtccacagcgaaatgcctgagccggtgagaggcaggtgccccttctgaggtagcccggccctagcttaaggctgtgatgaaacgccctcccttctagtccttccctccctagaagct

SEQ ID NO: 318803 - DNA, 122 bp, Homo sapiens
ggaggccgacccggtgagagtgcaaggtctcgcgaccaccgacgacagcagacagcgagtcgggccttcccatctgaggccagcttcagtacaggcctccaagcccgggcttgttttggccg

SEQ ID NO: 318804 - DNA, 122 bp, Homo sapiens
aagcctagcactgggctttaaggacatacacatgatagctgagaagactagcaagtaaaccgatgaccattgtacagtggaaaacatgccaagagcacagtgggagcatgagtcagtgagca

SEQ ID NO: 318805 - DNA, 122 bp, Homo sapiens
ctggaagagcccggctggggagcgggtcacattcttggccagcgctagggctgaggcggacgcacggcaacaaacagcgcggggggcggggccggcgcggggcggagcgggcggcgcggggc

SEQ ID NO: 318806 - DNA, 122 bp, Homo sapiens
cccgtggccgactgatggccgccttgtgtaggtttcccagggtccaccctctggacaaaccgcagatgctcagaactcgtggtctggttccccaccgatgacaaacagctcctaattttgct

SEQ ID NO: 318807 - DNA, 122 bp, Homo sapiens
tgtacatgaagtattacagataaacaggactctctggcctctcctgtgtttatttggtaacgaatagtagataatctctatgatgggaaacgctgaatgacacgtgataatttcattcattc

SEQ ID NO: 318808 - DNA, 122 bp, Homo sapiens
gaaatgactttgtacatcgtggacccttgggactgggagaacggatggcagcagagtcttcgaaagcagaaaccgaggtggccgggggcacgggtcagtagctgagggtggagtcatcccac

SEQ ID NO: 318809 - DNA, 122 bp, Homo sapiens
gccaagagttaagacgcaatctgcatgactgacgcacgctccgagtctccctcagcagttcgccaggttcttggcgccaacaccagacctaggatccgtcccctgctggaactattcagacg

SEQ ID NO: 318810 - DNA, 122 bp, Homo sapiens
ttcctgtgtgggccccttggtttcctgagccactgtcatttaccgaaagtcagggccctgcgggagctgggggcggggaggcgggcaaggaggggcagaaagttccggaagcctctgcatca

SEQ ID NO: 318811 - DNA, 122 bp, Homo sapiens
ttggggatggtcaggagcttgattctggatacttcatcagacctgaagagcatgggtgcacgtataaaaaaataaataaataagcatgggttcacgggcaagggcgggctgagagatgaaca

SEQ ID NO: 318812 - DNA, 122 bp, Homo sapiens
ggtagaggaaagcgttaggttaagcaggaaccaaaagccatcaatcactttggtcaaccacgatgaaaaaaagaggaaaaaattcgattatacccatgggaattgtcctcacttctctagtc

SEQ ID NO: 318813 - DNA, 122 bp, Homo sapiens
aagcggacaggagatgcggccgcaggggacaggcagggaagccggaggaggcttcgacaccgaatcacagacatgacacctcgtgactctgggcccagcagatgaaaaaaaaaaaatcctag

SEQ ID NO: 318814 - DNA, 122 bp, Homo sapiens
ggtcgcggggcttcgcagcgccccctcccgccgccgccccgcaactcaccccggcggccccgaagtctcagcctcggccacccgatccccgcctccccgcgtcgggccccaagtcaggggct

SEQ ID NO: 318815 - DNA, 122 bp, Homo sapiens
gcagccaggagggaactacaacgcccagcagccccggcgggtgtaaacactcccaacttccgaggcggtgctcaccatcggccatcagcgccagtgccactcgcgccctcaagaagccgcac

SEQ ID NO: 318816 - DNA, 122 bp, Homo sapiens
atccagccactgtctgcggctttcctacagagaagagggacggaccgccacgaccccccccgtccccaacttgcctgtgtcttcactgctgaatcagctgagcccaagtcctcggcggctgg

SEQ ID NO: 318817 - DNA, 122 bp, Homo sapiens
ttctcgcacagcgtttccgcgagaacgttccctgatcatctagagttagggaagtagaaccgtgccctgcacatgataagcacatggagactctaatcaatgagagctactatgattgctgc

SEQ ID NO: 318818 - DNA, 122 bp, Homo sapiens
tgtgattgaggcaaggctccctgggtatggctccttcagcagagctccttgagtacctaccgttcctctagatgggaagtgctgtgaactaaagagacaaactgatcccccaccacccaccc

SEQ ID NO: 318819 - DNA, 122 bp, Homo sapiens
tggttaaaatattcaaaatggcggacggaggagcagcgagtcaagatgagagttcagccgcggcggcagcagcagcaggtaatcattacagcattttacatattcatattcatactcaaccc

SEQ ID NO: 318820 - DNA, 122 bp, Homo sapiens
gttcctaaactttcccaaggtcacagttgttgatggaagagccagggtttgaacccagcccgttgagtctgtgcttttttaaccaccacgttcctcacgttggtgttgacaaaaaatattac

SEQ ID NO: 318821 - DNA, 122 bp, Homo sapiens
actctgaggaatcttctcacctttcattagactctaagttccttggagagtcagtactcacgggtcagtatccaagagtgccagctttggaatcagatataatctaggctagaatcctgaac

SEQ ID NO: 318822 - DNA, 122 bp, Homo sapiens
aaaaagtagaaaaaacagagcccttcaaactcagtttaaatctcctctctccttggccaccgggcttggttgttctgcctcttactgtctgagccatcaattttacacgtatcatgcaggtc

SEQ ID NO: 318823 - DNA, 122 bp, Homo sapiens
cctcccaggctcctcctgggcctacctgcaaggcagacgggagctcggtttgcagtccagcgaacgggctgagccacagggaaaaagaaagaggagacaggaataaaggaaggggtccgttc

SEQ ID NO: 318824 - DNA, 122 bp, Homo sapiens
cttatgggcaggacccccgtatggggagaacgaggatgtgatatgtagaagggaaggccgcggtgtgccagaaatcagaggagattgcaagatggcaggaaaagaatcaggaaaatgggggc

SEQ ID NO: 318825 - DNA, 122 bp, Homo sapiens
tagagctccaggttgatctggcggttgatggcggcctctgagtcttggtggtagttctggcgcacctgcgaggtagacgcggtcgtcatgccggcgactaaggagaggcggcggcagcggca

SEQ ID NO: 318826 - DNA, 122 bp, Homo sapiens
acttacaccctgaacaatacccatcattctctgcaagccctgaaagtgacagtgacctctcgcgcctccaactcagctgtgcccccagccactgtggaagcctttgtggaaagagacagcct

SEQ ID NO: 318827 - DNA, 122 bp, Homo sapiens
ggcaacactcaaaacagcagccctcagccttcacccagggcctgttaaactgcatgaccacgaagcaagagccagcataggcaactcctgcatctttagcttctcatgcctctttctccaaa

SEQ ID NO: 318828 - DNA, 122 bp, Homo sapiens
ccttctctcgccccactcggcaccgccccgccccgccccgtcccgctccacggacgcgcccggacgctactggttcgcctttgcgcatgtgcaattgccctcgtaccgaactccgcaggacg

SEQ ID NO: 318829 - DNA, 122 bp, Homo sapiens
cattatactgattaagtcaggattaatttgatttcaaagctgagaacagtggtaaaaactcgtttacagaaatgcattttggaagagaaaaatactgtaaaacgtgtcgtgaatgtttcttc

SEQ ID NO: 318830 - DNA, 122 bp, Homo sapiens
cggctcagccccgaggtgtttgcagcagctctttatgaaagtccagccatctgttacctgcgttgcttcctggggagggatagtccacctggaggcattcggagacccagtgattgtgctcc

SEQ ID NO: 318831 - DNA, 122 bp, Homo sapiens
ctcctggaaaatggactggaggccttttagaacagtctcaccatcagctttggcgccgagcgtgaagtcgagcatgctgtgccgtgctgctgccatagtgaggcgaggccctgtgccatgcc

SEQ ID NO: 318832 - DNA, 122 bp, Homo sapiens
gggcgcaggcggcctctgcagctctgcgggacttgagagaggcgcaaggcgcgcaggcctcgccccctcccgggagctccgggcccggcaacgcgctgcactgtaagatcccttttctgcga

SEQ ID NO: 318833 - DNA, 122 bp, Homo sapiens
aacactcattaaaaatactaggttgtatttcttgtgtgttacgagagaagacagatgtaacgtgcctaacaccttgcttggcacaaaggagccctaaataaatgttaacattgatttatgat

SEQ ID NO: 318834 - DNA, 122 bp, Homo sapiens
tcccagcagaaagaagcgtcaaatgacatgcacacctcaaaagcaccgagtgaaggaagccggaaacagagaacacgcggagcactccatttccagcagccccccattatctgcggctcacg

SEQ ID NO: 318835 - DNA, 122 bp, Homo sapiens
ttgaaaaggcgcctattaatttatcacaggtgatgtgtgcctccttgtgctcagaggaggcgtctgcacccatgtacctcactaatgacaggttatgggatggagaggagataataggatct

SEQ ID NO: 318836 - DNA, 122 bp, Homo sapiens
acttattagacttatgtgcgcagcactgctctagtcctgtgggtgcagcagcatcaggatcgttaaagaaaacaaacaatgctgagaaaaaaactcacacccctgagacatccgggtgtgaa

SEQ ID NO: 318837 - DNA, 122 bp, Homo sapiens
cagagttggctgatccatcctctgtgagccatggcacttttcccaattcaattttcacttcgaaaactcaaagtgagataattgcctaggcaaaactttctcctgagagtaaagaactatat

SEQ ID NO: 318838 - DNA, 122 bp, Homo sapiens
catctgtaaagtggaagtaaggattaaaaatcagcaacaaagggcaggcacagtggcccacgcccataatcccagcactttgggatgccaaggtagatggattgctcaagcccaggagtttg

SEQ ID NO: 318839 - DNA, 122 bp, Homo sapiens
cgctaggagtgggtgtggcctctgcctccacattggaacaaggtgaggcagagggtgtcgcgtggtcttctgggaaatgtagttcgtctgccaggccggaaccaccgctcaaccggctcgcg

SEQ ID NO: 318840 - DNA, 122 bp, Homo sapiens
ttccaattaataaccttaaagactagagccagatccacctgcattacaaaagcaggcattcgaggaactaaactttgcttttgttcatgctcttacctgccgttttaaatgggtttctaatg

SEQ ID NO: 318841 - DNA, 122 bp, Homo sapiens
attcataagaatacactaatttctcattcagatttcaaattgaatccatttaatgactgccgatagcaaagcaatagaaatgcacagaatagtcatgcaatcgacaattacccaaagttcct

SEQ ID NO: 318842 - DNA, 122 bp, Homo sapiens
tggcagcagccaggtggtgagtcggcacagtcgatgcctggcttaatttgcagcaggaagcggggctggggacagtctgcttcctctgcctctctttgtccccagcagagccctgcctcctg

SEQ ID NO: 318843 - DNA, 122 bp, Homo sapiens
ccacttcctacagaagatttaaaaactggtagtgccaacagaaattatttagcctagtcccgccaagaaggtgatgtggtaataaagtccaagattctgccacataagtcgggtcagcaagt

SEQ ID NO: 318844 - DNA, 122 bp, Homo sapiens
tcattctaaaaggggctgtcgaatgggaccccaggcttaaattactaacggccatgaaggcgcattaagtccccaggagataacactggccaggaaactttaaataaccttaatagggagga

SEQ ID NO: 318845 - DNA, 122 bp, Homo sapiens
ccgctgaaggcatatgtctcacttggatcagttaagtgcctgctccctaaagtgaaatctcgttggaaatgccatgcacatgttgattcagtctgataagatttcaaccaaccttctccttt

SEQ ID NO: 318846 - DNA, 122 bp, Homo sapiens
ttactcccgaaagctcactttgcttttagtcctggccgtcggctgagcgagctgcgcatgcgccacgtgcccccgtggcgtagggcctcgtccggtcacgactatccgctgggcggggtcgg

SEQ ID NO: 318847 - DNA, 122 bp, Homo sapiens
aagagtagcacctgcctgggagctggtggtctgcggtctctatttggcagatgaggaagccgacttggagagaaccctggatgtgtccacagtcactcctccgcccagtggagcgatccagg

SEQ ID NO: 318848 - DNA, 122 bp, Homo sapiens
gatggaagggctaggaatgtcccgcatggggtgagcacagatgcagacaggaagacggtgcgctcaggacatcagtagcccagcttaggcgatggggaaggtgacatcgtctcctgcaggga

SEQ ID NO: 318849 - DNA, 122 bp, Homo sapiens
tgtagccgatcttcttgatgtaggcgctgacttccttgacgatctcgtcgtagcgcttctcgctgtaggccggctctgtggagtccattttgttcacgcccacgatgagctgcttcacaccc

SEQ ID NO: 318850 - DNA, 122 bp, Homo sapiens
tggctctcaatgcctggttcacagagaggactcagcttgaggaggtcactcgttcacagccgctcctcccattatatttttccccttattgcagaactgctgtatgtatacagtgactgaaa

SEQ ID NO: 318851 - DNA, 122 bp, Homo sapiens
tgactggccaggtttgggaacttttgttccagtcttcttgtccccaggggctgtggctagcggctttgtcaggttaccctttccaagcagtggcaaatgcaccttccttagaaactaaggct

SEQ ID NO: 318852 - DNA, 122 bp, Homo sapiens
gcggcccggcgcgctgtcgttcggcgtcaccacgtgcgaccccggcacgctgcggccggccgacctgcctttcagccctgaggccctggtggaccgcaaggaattctgggccgtgtgccgcg

SEQ ID NO: 318853 - DNA, 122 bp, Homo sapiens
aatattttccacgtgcaatgatctgtaaccctctttttctttttttttgagaccgagtctcgctctgttgcccaggcgggagtgcagtggcacaatctctgctcactgcaagctttgcctcc

SEQ ID NO: 318854 - DNA, 122 bp, Homo sapiens
cccctgggtgcccagcctggtccctccggggtccggggctgcgcaccgccgtgcgccctccgcagaggctctgccgatgtcgcaccgccccgcaccgcgacaaaagcccttcccggttccaa

SEQ ID NO: 318855 - DNA, 122 bp, Homo sapiens
actgacaaaacatgagcagcagggatgccctaggccagctccgcagaagcacagcagtgtcgtcagtaaaagaaatcgcggtcactagacggggcccctcgccaagcctgtgcagacccctg

SEQ ID NO: 318856 - DNA, 122 bp, Homo sapiens
agcatttacaacacgcctgtacgaaggccaggtcccgttctacttaaaaggcttggagcccgggcgccactgggctaaggcagcttcagggccctggcccgggagtgcatttgcggggactc

SEQ ID NO: 318857 - DNA, 122 bp, Homo sapiens
gcacacccaggagtggagtttccgggaaacagacgtttccctcgcgtggccgcaccaggtcgcactctgcactgtgtttctgcctccagttatgtggggttttctgcacccacagccactct

SEQ ID NO: 318858 - DNA, 122 bp, Homo sapiens
tgggactgaggcaaaagctgcttctcctcttcaccagctattcaactgggaacaacacaacgtcgctttatttcaatagactagaagcacacgtttattttcatgatcgattccaactttaa

SEQ ID NO: 318859 - DNA, 122 bp, Homo sapiens
tctgaagaagttagagggtagtttatactctggcctaagaaaggcttcactgttagtaggcgtgaggtcgtagtgaggtagtttaactgctttagaactttgtgcttggaacattcttagcc

SEQ ID NO: 318860 - DNA, 122 bp, Homo sapiens
catcttttgtaatgactttaaaaatatcaccaaagcagctgcaataactgatttatctagcgtcaggggaaatgaatctttccagcatacttgaattttttgggtatcagaagcttacagtt

SEQ ID NO: 318861 - DNA, 122 bp, Homo sapiens
tgtagagttttcaagctggaaattgaccttttcaaagacagcagagggacagagaggaggcgggtgaggaacaaacatcgcttgctgccttaaaacgcacagggacgctccccaagtcgtcc

SEQ ID NO: 318862 - DNA, 122 bp, Homo sapiens
agccttgtccgcgcattccagcggcagaaacggaatgtctgggcgaggcggccagcggcgcggtggtcacctcccgcccctgccctaagccccgagccggctgcaactgggtgggctcggct

SEQ ID NO: 318863 - DNA, 122 bp, Homo sapiens
aagcaacatttattaatagtactagcaaaattgaaatggcctcagccttttacatccgtgcgccacgttttaaaaatgacgattactggattccaaggcatggttgtcagaaacattctgcg

SEQ ID NO: 318864 - DNA, 122 bp, Homo sapiens
ccccacgtgcaacaaggacaaccggctgccgcctccagcttccagcagggctagaagatgcgctgcccggggcggccagagccctgcagaacaaaccgccgcacggaattaggggccgccgt

SEQ ID NO: 318865 - DNA, 122 bp, Homo sapiens
tgtcaggcaaaactagccaataaacatgtagtttgggcaaggtgggtccgtcccctaactcggaccttataaagcgcgcccgctgctcccacaaagccgggctgtcccaggctgaggcggtt

SEQ ID NO: 318866 - DNA, 122 bp, Homo sapiens
gaaagtttggtctgtttggcatgcagaatgggagaatatgccaggacttcgggatgctgtcgcagctgaatgggagagaaagaaagagaagcttcagagatataagagtgaagagggcatga

SEQ ID NO: 318867 - DNA, 122 bp, Homo sapiens
gcgggtcccggtggggagggggagccaaggtcgcctcgagcaccttgggacttgtagtcccggagggacaggacgtagcccaagacgatcccatttggattcacccagagtccatttcacag

SEQ ID NO: 318868 - DNA, 122 bp, Homo sapiens
cgccgccgcagcctgtggactcctgggccctcctctgagagcctgcgctgtgcctggccccgggcggaactttgaacgaggctcctgtcttaactcgactgcttgtgcttgggggagataaa

SEQ ID NO: 318869 - DNA, 122 bp, Homo sapiens
cccttccctcgaggccacctcaccccgcagctgggaggagggagtggtcagcgtggttgccgagacactgggtggcctttatgctgtcaacggtggcctcagaggccttctggcaggagccc

SEQ ID NO: 318870 - DNA, 122 bp, Homo sapiens
ttggcgggagggagctccccggaactgccccgcggggcaacaggcctggccagccgcctccgcccagccgtccccatggcaaccggctggcctggtccagggttcacggacaaccggatcct

SEQ ID NO: 318871 - DNA, 122 bp, Homo sapiens
gatggggcctgcaaattgggtgaaggtggttcacggggatgccaaagccctagtcctcttcggcctccctcacgcgacagatctagtctgagcctgggcggggcaccgggaactcgatgcag

SEQ ID NO: 318872 - DNA, 122 bp, Homo sapiens
aagttacaagcacttcaccagatggtacagcctaggtagagcctttgtaaaacaaatgcccgcccactgcttcaccctcctcatttccacctcagcaaagcattttagcagaaaagctgacc

SEQ ID NO: 318873 - DNA, 122 bp, Homo sapiens
ctattttttagagagggtagtgctgcatcatcccggctgggccagccctggagggaggtacgtgggctggctgtagaattaattgaatttcacaacttgcctcacattcctgctgacacaaa

SEQ ID NO: 318874 - DNA, 122 bp, Homo sapiens
ggtttctttacgctctgtgtggctgtgattggggctgtcttgatgagggatcgggctattcgcaatctttctaggctctgtaaagaggataagagtgtctgtctaaaatgaaaacccaagca

SEQ ID NO: 318875 - DNA, 122 bp, Homo sapiens
gtaaataaacccttgggtccagctacgttctgcgcgctctctgccagcacagaggagcagcgagtcagggtacggagcgggtagcgttggggaagaggtggccgcgaagcgagacaggccag

SEQ ID NO: 318876 - DNA, 122 bp, Homo sapiens
ccttacaccccgcccctctctcttaaagccctaggaagattactggagtttggcgccaaccgtgtttttttttttcccttccaaaggcgggaactagttgtgggcgctgcgacgtgctttgc

SEQ ID NO: 318877 - DNA, 122 bp, Homo sapiens
gggtggatgggtgggggcctctcgccggctcctctgcctcccacccccactggcaccccacgcctgtcctagaaggttctttctgcctgttttctccgtgagtgactggacaggcagaggcc

SEQ ID NO: 318878 - DNA, 122 bp, Homo sapiens
ccacgtgctcccctcaagggaggctgccctgtctgcgaggtcagtgcgccccaggatccccgcccgcctgctgacacctgcaatgctttcctttcagttccccccgaggagccccagctctc

SEQ ID NO: 318879 - DNA, 122 bp, Homo sapiens
gtacgagctgtaggccaggcctgagggcgagggtggtccccacaaatcttctttcgccggcgtgacggtcagcgcttgcaggaccgctagtgcaacttcaccccagctggcgggaagttgga

SEQ ID NO: 318880 - DNA, 122 bp, Homo sapiens
tttgcataaatgtacctcctttggggagaagggggaatgtggatgaggttgaaggtgagtcgctgcctgaagctggcagagctcagcccatcccattgtgtctcccggggcactgagatagg

SEQ ID NO: 318881 - DNA, 122 bp, Homo sapiens
agtacccctaagagtagaattgttgagtcaaaggacatgaaaactgttgtagatcctgtccgctcatgattctatcaggaataggaacaccaatgattacattagccacgaggtgattaggt

SEQ ID NO: 318882 - DNA, 122 bp, Homo sapiens
aaccgggagccctggaaccctggcccgactgctgagcgccccgtgggtcctacgctcccgcgccttctagggaagcccctaaagttggtgagtcccctagaaagcagttcctctgtggctac

SEQ ID NO: 318883 - DNA, 122 bp, Homo sapiens
cccgggatcgcgagttcagactgcgggcgccgctctatgaggtcacagggctgcgcccatcgcagcgtttctgacaggagcggccataatggctgtgggaatcactcttagtcacctcagtg

SEQ ID NO: 318884 - DNA, 122 bp, Homo sapiens
ggtggagaccccagcctcagatgccacctctggctcctcaggggagccagaaattgcagccgcaggagagccgaacacccccgtagcgcacacaggctggcacgcttccccgcaccctcacg

SEQ ID NO: 318885 - DNA, 122 bp, Homo sapiens
gctctcattggtcagtggcctccggaactccgccttcttcctagttctgagccctagccacgccccttagaggctggtcctgaccctcccaccagctgacaggtgtgagcgtggctggatgt

SEQ ID NO: 318886 - DNA, 122 bp, Homo sapiens
aagtcagctttcctggccctaggtcaccaggcttgcttggtcactagcccgtgattcccccggggaaaatcccaaaggcctttatttgggatacgaggccctcagatgccaagacaccactt

SEQ ID NO: 318887 - DNA, 122 bp, Homo sapiens
ccccttagctccgggttcctcacctgagaaatgagtttcttataaaatgcgatttattggcgagaacatttgtgaaatactcaggaagatgacaatgttctaagagttctcccacacatcgg

SEQ ID NO: 318888 - DNA, 122 bp, Homo sapiens
aaaacagaagaagaaaaaaattagttgggtgtggtgatgtgccctgtagtgccagccactcgggaggctgaggtgggatgcttgagcccaggtcaaggctgcagtgagctgtgatcgcacca

SEQ ID NO: 318889 - DNA, 122 bp, Homo sapiens
cggcagggggtctactagtgggaaacaagaggggcagtttgcttttggtctttctcttgtcgcagggtaagatgcaaatgcaaacaaatgcttctgctgcatcacctgtgagtctgaatgtc

SEQ ID NO: 318890 - DNA, 122 bp, Homo sapiens
ctggcggaagtcacgcagagatgggctagacgctcaaccccggtctcttccccgaaaccgcggtgctcccacttcctgcagtccgaggttccgactcgacgccagctccgcgagcaatggtt

SEQ ID NO: 318891 - DNA, 122 bp, Homo sapiens
cccaaaactgttaaatccgtactgctctagctttaaacataccttctagatacagcaacccgtgccgagctgtaagtgactgcacatgcgcacacgctaagcccagctcagacggaggccag

SEQ ID NO: 318892 - DNA, 122 bp, Homo sapiens
tacagtctggtccctcaatgaccccacaccccccacaattatttacaaaattccatttgacgtaaactggagtcaagaggggggtccagtcgcggctgtggtttacccagtgacatgtagat

SEQ ID NO: 318893 - DNA, 122 bp, Homo sapiens
gatgctgagcagctccatccagcagagccacaaccggctcctgaagctggaaggagacagcgtctggctccacaccctgctcatcaaccagagtgaccagcaacgtctgcaggcaaggtccc

SEQ ID NO: 318894 - DNA, 122 bp, Homo sapiens
tcatccaagatgagcagtccctagtcatgtgctcaaaatatgattgctatggtttgaatgcgtcccccagagttcatgtgctgggaacttaatcccaaatgctacactgttgagaggtagga

SEQ ID NO: 318895 - DNA, 122 bp, Homo sapiens
gtcaaatttcacgggcatgcccgaggcggggaagggcgaggtgagcaccgcagtgaaggccggtgtggcatgggcagacagctcgcccagcccaaactgtggcttgccccccttgcccagca

SEQ ID NO: 318896 - DNA, 122 bp, Homo sapiens
gaatatttattagaagtgtgactgcacgagcattgggtgagggcagagggaggtagctcccgaatcctccaaatggcttttagatggattgcagggaggctgggcagatggatgagtggcag

SEQ ID NO: 318897 - DNA, 122 bp, Homo sapiens
tgtctggaacccgggtcttgggactcttgcttccttctcagagtgtcagagcctcagggccgcggagaggccaacccgcgaggggtgcttaaaaaccgaagtatccgtggtcttggtgtgtg

SEQ ID NO: 318898 - DNA, 122 bp, Homo sapiens
tttctttctttctttttttttttttgagacagctatgtcgcccaggctgcagtgcagtggcgccctcttggctcactgcagcctccgcctcccgggttcgagtggtcatcccacctcagcct

SEQ ID NO: 318899 - DNA, 122 bp, Homo sapiens
cagcagcccagggaggggcggcgtgagctcaggacggtgactcgggagtacgcaccggcccgcgcacgtccagggactcgcaggaggtttctgcccacctgggtggggcttgcagggtgtcc

SEQ ID NO: 318900 - DNA, 122 bp, Homo sapiens
cgccgccgattcgctgccgcgcccagtgcctgggcggccggatgaggtcagagcggaaggcgcggcccgggctcctggcagtggggcctgattcccacccccgcccccaacccaccccggca

SEQ ID NO: 318901 - DNA, 122 bp, Homo sapiens
aggggtcttgaggaggaggcgccggagagagacctggagaaaaccatcaggatgaggagacgcgtgggtcccctcgctgcctgcgtctgccccggccccagccggccataccaaggagggca

SEQ ID NO: 318902 - DNA, 122 bp, Homo sapiens
ttttttttgtttccccgagacggagtttcgctcttgttgcccaggctttgagtgcagtggcgggatctcggttcaccacaacctccgcctcccgggttcaaccattctcctgccttagcctc

SEQ ID NO: 318903 - DNA, 122 bp, Homo sapiens
caacgctccccgctgcgtgggccggatccagtgggggaagctgcaggtgcggctggccagcgactgagagacccgggcgctaccaaaaggggagcggggtggcggggcagttcctaaggctt

SEQ ID NO: 318904 - DNA, 122 bp, Homo sapiens
cattgaggggacacacagacagagcacttctgaaaagctgttcctcactccgccactcgccgctgcgcagcacacatctcagcgtgttgatgaataagattcccagcacgacagcggcaatg

SEQ ID NO: 318905 - DNA, 122 bp, Homo sapiens
gagccgcgccccgcgcccgcccccaggagggcctccgcgagccggctgcacaccccgaggcggtcccggctgcacaacttggagcgagttgctccgtttcctcattttgggggcgaagaagg

SEQ ID NO: 318906 - DNA, 122 bp, Homo sapiens
gaaagcgaagaaggagcggcagtccagcagcaggcattgcgccgctcgctcccccagcagcgcccgcaggcctccagcgtccagggtgcccacttccatgaccatggccggcctcagcgccc

SEQ ID NO: 318907 - DNA, 122 bp, Homo sapiens
gcaaaatgtttgactgcactaagccttagtttatcgtcataaaataggccatgaaaattgcgtgagaaaatgtatataacagttcaacaaataatattggctgggtgtggtggctcatgcct

SEQ ID NO: 318908 - DNA, 122 bp, Homo sapiens
atgtagattgggtctgaaagccggagcaaccagccctccatgaaccccggccaaatgggacgagtaaaaggggcagcctcagaaagtgatgccacgatgcccccacttgcgggcatggagcc

SEQ ID NO: 318909 - DNA, 122 bp, Homo sapiens
gcgcgtgagaggttttccggaagtgtagccaaagagcgagtacccggctttccccaagatcgttgattggccagggcagccttgagtaaatcaccgttccggaagtactttctaggaacttg

SEQ ID NO: 318910 - DNA, 122 bp, Homo sapiens
gcgaggagcggggctgaaggtccctgtcagggccctctcccactgtgggctgcccatccccgaggtactcaaggtgggaggcactgaccctttacccagacccctgtggccagagacacata

SEQ ID NO: 318911 - DNA, 122 bp, Homo sapiens
tggggcagggccagggtggggagctgggaccactggacattcacagcacccctgccaagacgcttgggtcctgggctcttctgcctccattggagcaaggagacagaggattgggttgcttc

SEQ ID NO: 318912 - DNA, 122 bp, Homo sapiens
cctgaggctgccaggcagcctggaggctggaaaaaaaatgtaaaacatgttcctctaaaacgagggcgtccttagcggggatgctataaatacgcccaagtaagaagagacgcgagaacgtc

SEQ ID NO: 318913 - DNA, 122 bp, Homo sapiens
agatcctgcctccttgataagagaacctcagacttattaatacagacctaacagtttcctcggactctattcagtacaggccttaaccacaactggtaataattctttcgttataaaattcg

SEQ ID NO: 318914 - DNA, 122 bp, Homo sapiens
gcccttatgtgtgattggcgtttggagaggcagtgggctctgggcagggggtctccagggcggggaggcgctcaaggcagagactggccctgttcagcctcaccaccctcctccccagccac

SEQ ID NO: 318915 - DNA, 122 bp, Homo sapiens
tctttaatcagagcagcagccttccgaacaagagtttgttcaccttggaactgccatttacgtgctaaacagctcttgttacaggagagctgctatcaggcgctgtagaatttagcagctct

SEQ ID NO: 318916 - DNA, 122 bp, Homo sapiens
gccaggagaagtgagacgtggacaaaaggcgggactgggaagggatctctcgcttcgacccgcctccgacccgcggagttgccccctgaggactaccagtcccagtgtgcactgcttcttcc

SEQ ID NO: 318917 - DNA, 122 bp, Homo sapiens
agatagattttattcatgctactatatattatatttacaacaacatcattttataacggccgtacttacaacatcttttataaaggcttctaaatattttgtttatacattaatatgttact

SEQ ID NO: 318918 - DNA, 122 bp, Homo sapiens
cccgccccaccagcctaccgggccaggctccgcccccaccaggattcaccacgctgggcccggcaccttcctcaggtttttccagggccccgcccatgctcacctggagcgcagaccgtttc

SEQ ID NO: 318919 - DNA, 122 bp, Homo sapiens
agagtgtcttagattggccctgagccaagcagagacgaccatccctttacccacagagggcgccaattcaccttagcctttagttagccacaaaccaaatgcttcatccagataaggggtaa

SEQ ID NO: 318920 - DNA, 122 bp, Homo sapiens
tggagggtccagccctacggggcttggcgggtgttctccccgtgtgtggagacgagagaccggaagaaataaatacacaagacaaagagatagagagaaaacagctgtgcccggggaaccac

SEQ ID NO: 318921 - DNA, 122 bp, Homo sapiens
caatttggcacagggggctagccatgtgcagttcctgtgcctcctgcagttttgcacaagcgcgcgcattgtgtgcggcccctaagccccctgagatgtttagcacgagcgcccgtgccgtt

SEQ ID NO: 318922 - DNA, 122 bp, Homo sapiens
gcaggaggctgcggtgtccgggagaagcctgggcgcaggggggtgggtgcggaggggaggcgggctgcagggatgcccacccgcttgctgaccacctcgacaatgcccggggggaagtagcc

SEQ ID NO: 318923 - DNA, 122 bp, Homo sapiens
cctcccctctcctcccacccaagccacaggacgcgtccaggccagggcaaccccgcgggccgctgccagggtggaggctctcgcgccaatggtcaccaagctcctccactccccaacaaagg

SEQ ID NO: 318924 - DNA, 122 bp, Homo sapiens
tggatttatcagctcctcccacaatagtcatctgaggctaacacctcttggaacctagatcgaaagtcctttggtaatgatgtgtcatacattctagtcatcaaagacaccattttctgggc

SEQ ID NO: 318925 - DNA, 122 bp, Homo sapiens
gcttgcaaggcgcgatccaagagggatttaagcagcccagagctccagagaaaaagagagcgagagagaaccacacacagagacggcttaagcgtttacccgaattaaatatatatttttaa

SEQ ID NO: 318926 - DNA, 122 bp, Homo sapiens
gttaactcatctaacttaattgcaataaatggtgaccctggtcactgatcttgggccatgcgaaattttctgttgcagttccttttctcatgctctctttggaagcatatatactaaaatta

SEQ ID NO: 318927 - DNA, 122 bp, Homo sapiens
ataacctcgtctcaaaaaaaaaaaaagaaaaaacaacaacaaaacgggaataacaacagtcgctaagtcctaagactgttgtgagaattgaataagataatccactaaactatatcagtgct

SEQ ID NO: 318928 - DNA, 122 bp, Homo sapiens
acacctgcctggaagctctcaggccctggagtaacctcaggacactcctggccctgtctgcgggtaaccagttcttctctcagatgtgcggtctgtgctgttcctccccatctgccagtaca

SEQ ID NO: 318929 - DNA, 122 bp, Homo sapiens
gtcctgggagatccgcgcccggcccggccaggttttcgacccacggcgctccggtgaggacgccacgctgcttagtccttcaccccgggcgacctttgatcccgacacccgactgcgggccg

SEQ ID NO: 318930 - DNA, 122 bp, Homo sapiens
cctgtacctggcgtgccaggagggccacctggaggtgacccagtacctggtgcaggaatgcggcgcagacccgcacgcgcgcgcccacgacggcatgaccccgctgcacgccgcggcgcaga

SEQ ID NO: 318931 - DNA, 122 bp, Homo sapiens
ctctcaggcacggagtccctcgccggcacccggaatgggagttcacacgcgaattcctgccgtgtcctcaggacagctgctcggcccacccaacagtctgcgtgcggccaccacggactgcg

SEQ ID NO: 318932 - DNA, 122 bp, Homo sapiens
gaatcccaaccgagcactcatcaaggcagtggccagctccagggacacacccagcgcatccgtccctggtcatcgtttgacatgctgggcctttcgacaaaggcaatcttgagagatttttc

SEQ ID NO: 318933 - DNA, 122 bp, Homo sapiens
ttctgcctcacccattccttcctgcagaaataataataaaagctctggcctgcagttccccggtctccctggccctcctgatccaccttggtgcttccctatggtgtgtggtgtgtccctcc

SEQ ID NO: 318934 - DNA, 122 bp, Homo sapiens
cttgggttagttcctgttaggccccggccgggggagtaggttgaagtctcctaagatgcccggtgggctggggcaccgggagctgtgaagggaacgtgagggggcggcgtagtggagaccca

SEQ ID NO: 318935 - DNA, 122 bp, Homo sapiens
cccaccactcctccagtgcccacaaacaggctgatcgcagcagcaccttccttatgcggccggatgttacatcggagaggctgactgtcctgcctctgaatcacccagacctcttgtttctc

SEQ ID NO: 318936 - DNA, 122 bp, Homo sapiens
gagggtcctaggacaggtttgagaggcccctctgcctatttcccctccagcgcctgggggcgccctctagccccagagacccgcctcttagctcttcttttcctaaaacccagccccgcagc

SEQ ID NO: 318937 - DNA, 122 bp, Homo sapiens
cagtggcttcactccaaccttcactcaggcagaaccttttacaaaagtgcagaatcattccgctgggaaaggtgccattcactaatggatgttttcacatcctcttctcctcttagttaaca

SEQ ID NO: 318938 - DNA, 122 bp, Homo sapiens
gggccagtgtctaaagtaaagagaaagcaaaggaaaaatgacgcagcaccgcagcccaaacgcccccccacggcggccacctctgctcctccgaggaaccccgtgtgctgctgggaaaacaa

SEQ ID NO: 318939 - DNA, 122 bp, Homo sapiens
cagattgaaaccttgcaaggaagacacccattctcaaagtcacaggcttggtaatctgagcggcaaaggtgaatgatctcgtgctccccctaatccccactactcccctcgccactgctgcc

SEQ ID NO: 318940 - DNA, 122 bp, Homo sapiens
taactgactccttttcccatttctctttcttagagctggtatctggtctgcaggcagttccggcagcatttgctttttgtggggaacagtggctaaggaagtgatttgctactggcttcaga

SEQ ID NO: 318941 - DNA, 122 bp, Homo sapiens
cagggatccggggaagctgcggcagggagcgggcgccggcttcgtggctctgaggtgtaacgggggtgggctccctccctcggaggacatcgtctgtgtccaggtcagaaagtggcccagga

SEQ ID NO: 318942 - DNA, 122 bp, Homo sapiens
gatgaaaagataaatcactactaagttttgcaaatcatatacctaataaaggacttctatcgagaaaatattttaaaaatccaagtaacaacaatttttttttcttctgagacagggtccta

SEQ ID NO: 318943 - DNA, 122 bp, Homo sapiens
gttctgcggctctgcagaacaccgggtgaatttggttacagcatttttggtgcttaccttcgcgatgtaattttccgagaaaggtggggtgatggcttagtaattatgcagaatattgatag

SEQ ID NO: 318944 - DNA, 122 bp, Homo sapiens
ccaggcctgtacgaccggacacactttgacccaggcctgcctgtatgaccggacacgctgcggcccaggtggtggcttccatgataatttgcattttaaaacttcagagcagcaaaggaggg

SEQ ID NO: 318945 - DNA, 122 bp, Homo sapiens
ctccgctttttgcccgccgcggctttttgccccccaagcgccaaggctttttgaccaccgcggctttttgaccttcgcctctgcgaattttgccgccgtggctttttgcccgccgcggcttt

SEQ ID NO: 318946 - DNA, 122 bp, Homo sapiens
gaaaaacattaaaaagttcattccttaacacaatgtttcaagttaaaccttttgtgtcaccgcccccaccaaccaccacctcctaaatcctgacagcactgtttgcttcccagctagacctg

SEQ ID NO: 318947 - DNA, 122 bp, Homo sapiens
ccagacccgtacacgaagtgggctgaaggaggcactgaggtcaggactgtcagggtcctgcgctgctggtctcacgcagccttcttccccgggccgcagccagcacggcctccaccgttttc

SEQ ID NO: 318948 - DNA, 122 bp, Homo sapiens
ctcggcttcgcgtttgccattggttgcgcgattcagaaaaggctccaggataaatgaggccgggggcgggcttggccactggtgggggaggggagtgcaggggcggaggtttctggctaggg

SEQ ID NO: 318949 - DNA, 122 bp, Homo sapiens
caggcgtaaggcatcacgtcaggcgtaaggcgtcacgtcaggcgtaaggtgtcacaagctcggtgaacgtcaggggtgtgccttgtgttctctgttcgttgctttcagaagcagcagcatgt

SEQ ID NO: 318950 - DNA, 122 bp, Homo sapiens
tatgttgagtgaaagaagccagacaaaatcaagtacatatgggatgattccatttatggacgactctagaaaatgcaaactaaaacagatcagtgtttgggctgcggatgagtggagttggg

SEQ ID NO: 318951 - DNA, 122 bp, Homo sapiens
tcccaaagaggactgcgctcgtccactggctcagaggccaatggacgcctggtacatgaccggcatcgactaatcagggccaggctcgatgaggctttgtctccctaccgcgcgcggggccg

SEQ ID NO: 318952 - DNA, 122 bp, Homo sapiens
ccgcctccggttggttgcggttaacccttgggtgtcgcggctcggctgagggagcgcgcccgctgattggtcgaatttgaaaaccttttgcccggggagaaaaggcgaggaggaggggtagc

SEQ ID NO: 318953 - DNA, 122 bp, Homo sapiens
ctttcccacatttccctatgactcacagtatggctgtgttgtatgtcagatgtgattcctcgggccacgtgaaatgaatcagcccttggaagagaaagctctgcagctttcagggactccca

SEQ ID NO: 318954 - DNA, 122 bp, Homo sapiens
actgcaaatggcatcagactgagggcggctcctcctgcccctttacacacatcttcccctcgggctacacctgcttcccccagcaccggcggcattgccaagtcgcatttgcctttccacac

SEQ ID NO: 318955 - DNA, 122 bp, Homo sapiens
ggtagagatgcttccaaaggccattcttttctttcattagtacccagatctaaaatacctcgctttcattgtctgcatatggcacaaaatatcaaaataacatcacaccctctgcctttact

SEQ ID NO: 318956 - DNA, 122 bp, Homo sapiens
tcgggggtctcgggggtctcggggcctgtctaggcagggatggggtcggatttgggtgcccggggctcacacggccgtgtggcggcgctcggagaagacacgcagagtgaagtcagcctcgt

SEQ ID NO: 318957 - DNA, 122 bp, Homo sapiens
ggcaccttgctggctgtaactctccaggcacagggagacagatctcctacaaggtcatcccggagcttaacgaggtgtctctgctaaaaagcactccaggcgcttggagatctgcccagagc

SEQ ID NO: 318958 - DNA, 122 bp, Homo sapiens
gcggccttcgttcctctcttccgtttgccttcactcttccttctgcgcatgtgctcagttcgctatccggctgcttgtacctggttcaggaggttcaggcagaggttgcacccactacgcct

SEQ ID NO: 318959 - DNA, 122 bp, Homo sapiens
gcaagtgtcccctaaaaggaccttcttgtctccccctctgctgaggaaagcatgcaggaacgagaccttctatgttaaggagtactcagcctccagtcccagatgacttgattgactgatga

SEQ ID NO: 318960 - DNA, 122 bp, Homo sapiens
ggcctctctgcgggggggacgcccagcctcccccggcctgccaccccaacccccctcctccgctccccccacagacacgtctaaacagcccaggatctccggttaaacaaagagagtggtat

SEQ ID NO: 318961 - DNA, 122 bp, Homo sapiens
caatcaccgtccgagagcggcggccctcgccgctccgggccccgccgccctccagagtgacgccactaagcatccaataagttttggaaattccacatcttcgccagtccactcacgcgggg

SEQ ID NO: 318962 - DNA, 122 bp, Homo sapiens
gggagggtggccgattggcggagcgcactcctgctgtttctcccaccatctcgtggatgtcgtccctcgggtggtgagagaactttgcagtgggctggagcgccctttgcggagaagcacac

SEQ ID NO: 318963 - DNA, 122 bp, Homo sapiens
taactccaccaggctcctcggaaagacatcggggctaataggtgaagtcacagctgctcgcgctgacttctcggagcgcccggctggccgcgggcaccctcgcgccctcttcttgtagcgcc

SEQ ID NO: 318964 - DNA, 122 bp, Homo sapiens
caataagattgtctagtaatgaaccaatcagtctggtcactcttcagccaatgattttatcgcgcgggacttttgaaatattacaggaccaatcagaatgtttctcactatatttaaaggcc

SEQ ID NO: 318965 - DNA, 122 bp, Homo sapiens
ggtcagagggcggagatcgccccggcatcaatgccctctcatcccccactttatttccaccgcctagctgctaaaatccggacccggaaacgtctccaatgggaacttgttcccctcgcccc

SEQ ID NO: 318966 - DNA, 122 bp, Homo sapiens
aaacacgacaggaggagtgcgagggggggtcggcggggaaggggtgaggagaagttgggccggggagaattttctgggagaactctcctgcatggggtctgtgagttccaggctgactaccg

SEQ ID NO: 318967 - DNA, 122 bp, Homo sapiens
tgggcggctcctgtgggcttcaggactggccggctccagccgcaagggcgatgctgtggacgtttgtgtggatggtgcagtgttcttggaatctgtagaccagatcggtggaggtatagaag

SEQ ID NO: 318968 - DNA, 122 bp, Homo sapiens
cttggggaagactcgggcagacccgacccacgacggggtggggtgtggggcgggggggcgcgctctcctcccgttcctctccgccgggatcgcggtatcctaggggagggaggaactgcgcg

SEQ ID NO: 318969 - DNA, 122 bp, Homo sapiens
ggaaggctgtgcgtggcaggagatgacactgcccttgggctgtgtggtttctctctgttccgagccctgttcctccaccttagcggaatagcgcctctccatccagttctcatctttgagaa

SEQ ID NO: 318970 - DNA, 122 bp, Homo sapiens
ccagtgccaagtgcatgcataggaacaaatctttcatgaatcttgctattttgaaagggccgttcagctgtcagtccaagcccaaataaatacaactgtctcagtcagaagccctgaagaaa

SEQ ID NO: 318971 - DNA, 122 bp, Homo sapiens
agcaaatccccaactgccgttcccctccatgggtaattcttagggtctgggaggtgagctcgcccgccgaggcagaactaagcgagtcgcctggagaggcgtgaagggagcctgcacgtgtc

SEQ ID NO: 318972 - DNA, 122 bp, Homo sapiens
tgtttgttttttagcacactttggagtcctaaaatgacaacctcaggtgctgaaacagagcgtagagagaaagaacgccaggactggtgactttcctcttctcttagcaactcgcctgtcca

SEQ ID NO: 318973 - DNA, 122 bp, Homo sapiens
aagactcaagtaaatcacaaatatagctgagaggcaagtggagtctccccgctggaggcccggcgttgcaggcgcccctggcacgtctggaagccaggactctggcggctcccatggccctg

SEQ ID NO: 318974 - DNA, 122 bp, Homo sapiens
gcggcatcgtgaaaggatgatttaactcgaagcctcctttgagggaagtgttggcttttacgttttggaagagaattggatctctctcttcaataggcgatgtgcacaaatcattgcatgga

SEQ ID NO: 318975 - DNA, 122 bp, Homo sapiens
ggggacccaaaggacttcagctctgtcaggttgttctgcaaatgacagacgggatgggtccgatgggagtttggaccgggtcctcggtgatgccccgaagaagccgccatgagtgtgtcacc

SEQ ID NO: 318976 - DNA, 122 bp, Homo sapiens
gaatttcctgagtttctctttctgagtctggttaataaccgtgagaacacgtccaatttgcggacgactcaaatcttagagagcttggaggccgcgccgcctgtcactttggcgacgtgcag

SEQ ID NO: 318977 - DNA, 122 bp, Homo sapiens
ccgtccactggcctcgggggaggaccagggctgtaccggcagcgtctgaaattccagctccgcggccccggcgcctccaggtgaactctgggtgtggtacgggggtctccgtttccatgaaa

SEQ ID NO: 318978 - DNA, 122 bp, Homo sapiens
ggcgccgggtgctctgcagtttggcgcggaacgggtgtaggatggccacgtagcgctccacgctgacggtggtgatgctgaggatggaggcgaagcacacggtctcaaagagggccgtcttg

SEQ ID NO: 318979 - DNA, 122 bp, Homo sapiens
atatatttgtttcttgaatatataatttgtttcttgaatgattcactaaatggcaagtgccggaaaagtctattcccactggattgtaaactctggtttagagtagtgcctgtgtgtgctta

SEQ ID NO: 318980 - DNA, 122 bp, Homo sapiens
tggctgactcctagaagaccagttgaggtggcctggttctgctctgcactccctgcctatcgttggaacattgtccaacaaaattgacacatccagggtgacgataaccacaggaacaagca

SEQ ID NO: 318981 - DNA, 122 bp, Homo sapiens
actaccaggtttctaaaacgaagtcttcacccaaatggacgcatagatttttatttttatcgcataacccagggctggaatataacctcccaaatcaaactaaaaataatcacatctacctg

SEQ ID NO: 318982 - DNA, 122 bp, Homo sapiens
acttcgatcttaggcaccacatgtggaggtgcatgtgcctgaagggcagggaaggccagccggacaccctgaagggccagaaaactgtgctgacaggctcccgggctgagcttccaggctaa

SEQ ID NO: 318983 - DNA, 122 bp, Homo sapiens
cccgactccaaatatttgtgcagttcccaagaaagcctcattcagctaagtacctgatcgcgtcaacctgctctctggttccaacatctcagaatatccaagcgaggaatatgcaaatgcta

SEQ ID NO: 318984 - DNA, 122 bp, Homo sapiens
ggcccggccgcgattagcataatgtagtattttcagtttcaacaacaccacggcgattggcggccgccccgctgccccgccccgccgcggcccggcccccgcgcaccgcccattggccgcgc

SEQ ID NO: 318985 - DNA, 122 bp, Homo sapiens
ttgctggagaggggtccagttggtggctcagaggcagggagttccagtgtctggggtgcccgtgggcctgcactacctcagggggccggcgggcagcggcggccagggctgctcggccagct

SEQ ID NO: 318986 - DNA, 122 bp, Homo sapiens
gtctcacagccagagcaagtcactttcctaagcgacggaagctcccgaattttaagatcccgtcaaaggcgggaaaagccctaatgcttcacaaaattcttgaaagcggaatgaatgattta

SEQ ID NO: 318987 - DNA, 122 bp, Homo sapiens
gtcctgctgtctcctccctgaatggtggaccctcagcccctcctgtacaagatggtcaagcggtgcctcatgcatttgttcattcgacctgtcctgagagtttgtgacatgctggcacgggg

SEQ ID NO: 318988 - DNA, 122 bp, Homo sapiens
cattttgactaatgtcaacggtttttcggttttttttgtttttttttgcggtgccctttccggaagtcattcaggatgccatattgactaagggcaagtggtacttcctgaatgcgaattat

SEQ ID NO: 318989 - DNA, 122 bp, Homo sapiens
ggaggctgcactgcgggtgcgccccgtctgagtgcagatgcaggtggcttggggctgagtcggggggtccttgctggttgttgcggctgagggggcccctgggctcgggcggggcgcgcagc

SEQ ID NO: 318990 - DNA, 122 bp, Homo sapiens
ccgagggacagacacctgctgttccagcatctgcacccgctccaacgcagcatcccgggccgtcctggaggccgccagctcctgcttcacttcggcacagtcatttattttctcttccaact

SEQ ID NO: 318991 - DNA, 122 bp, Homo sapiens
cctggtgtcctcgtgtccttgaacctcacagcaaggtgaaaagcagcagaacccactgagcgctggccctgagccaggcactgccgcttgcaccccacactgctcacctcttcagcctcacc

SEQ ID NO: 318992 - DNA, 122 bp, Homo sapiens
gcaggcgaacaacaggaacgcccttactgaaagtgagtcacctgcctctttcaaggtctccgtgtgaggggtggggggcatcaagcccctcagagccccgcttcacaatcgccttcctgtag

SEQ ID NO: 318993 - DNA, 122 bp, Homo sapiens
agctgcccatccgtaccggaagtgtgcgcagtaccagggatggccaccaggggtcagcagcggccggggctttggaggactgggacttgccgtcgtctcagggcacttacctgggctgggag

SEQ ID NO: 318994 - DNA, 122 bp, Homo sapiens
cacgctcgtccttgttaccctctctgtggtggagctgggttgcacactggaacttatcctcgccggggtcagtgatcctggaggtcggttgcctccatattgagcccctaaagcacctggcc

SEQ ID NO: 318995 - DNA, 122 bp, Homo sapiens
acccagacacctgggaaggacccccgcggtggtggtctgcgagttgtgggggctggggcccgaagtattccggggcgcgcgggtccccgctgggagagccagtgtactgcgccctcgtctcg

SEQ ID NO: 318996 - DNA, 122 bp, Homo sapiens
tccatatccccaattccccagcaacagtgcatggccagggaggctgggactggccaggttcgcacctcaggctgaaatattggcccctggggaacaaaaggcctattcccgccatgggccag

SEQ ID NO: 318997 - DNA, 122 bp, Homo sapiens
cagcaaccgggacagcctctgccaggccgtgcgcaccctcctgggctacggctacaacatcgagcctcctgaccaggagcccagtgagtgctcacccctggccctggccctgactcctaccc

SEQ ID NO: 318998 - DNA, 122 bp, Homo sapiens
tgaggaaaatcgaccccaaggacgaggctctggccaagctgggtatcaacggtgcccactcgtccccgccggtgagcaccccagcctgtctcccccagagtgtgtgctgctgcactggggag

SEQ ID NO: 318999 - DNA, 122 bp, Homo sapiens
agttgtgttagccataaaagtgaaagagttgtattggagctcagtgctgtaaaacacccgcgacaacaagccttaagtctctcaatgcaatggtgagggtctggggagggaggaagcccagg

SEQ ID NO: 319000 - DNA, 122 bp, Homo sapiens
ccatttgggaactgtgtcctccagggcccaggttgggggaagctcctccaccaacctgtacgtgagccatgcccctccagtccatctgctcccactcaaggggggaccacccttcaagagac

SEQ ID NO: 319001 - DNA, 122 bp, Homo sapiens
agcaattctcctgcctcagtctcccgagtagctgggattacaggtgtccaccaccacggccggctagtttttatatttttagtacagacagggtttgaccatgttggccaggctggtcttga

SEQ ID NO: 319002 - DNA, 122 bp, Homo sapiens
caccgtgcgtgctccggatggcctcgatgaggaagcccgactcctcctggatgcgctcctcgatgcctcgcttgcccaccccgaagtccctcagggtggcgatggcaaagcgcaggagctgc

SEQ ID NO: 319003 - DNA, 122 bp, Homo sapiens
ctcccaggccgcccccggcggcgccccctgcaggcggaacgcgaggcccgccagcccctgcggcgccctcgcacacacgtggccgctcgcacaactggccgcctaacagccagacccaccca

SEQ ID NO: 319004 - DNA, 122 bp, Homo sapiens
ctatctctcctcgccctctccgtcttttttgttggaatctgctttcctctgccagtttctcgctgtgcctctgggtcctgtctccggtccgtcctcctcctcatcctccttttcctcaccct

SEQ ID NO: 319005 - DNA, 122 bp, Homo sapiens
aaggtcaagtgctggagggagcgggtggagaacctggcctagggaccctgctgctgggtgcgtttctgcagggagcaagggtagaagaattgggaggtggagtagagaggaaaagttagggt

SEQ ID NO: 319006 - DNA, 122 bp, Homo sapiens
tatcactgtgcatgagccaaaatagatatttactaggtaaacactattcctttaattgggcgattcttaaaaaaaaaaaaaaaaaaaaaagaaggcactcagatctctgttcggtgtgttcg

SEQ ID NO: 319007 - DNA, 122 bp, Homo sapiens
gtttcccattccggacaaatatccacccaagagaaccaatcataacactggatgtattaacgcatgtcaagactctcacttctctgtagaaatgagaaataaatgtcgattgttggttttct

SEQ ID NO: 319008 - DNA, 122 bp, Homo sapiens
aggcggtgtatgtgcggcaataacatgtcaaccccgctgcccaccatcgtgcccgccccccggaaggccaccactgaggtgattttcctgcatggattgggagatactgggcacggatgggc

SEQ ID NO: 319009 - DNA, 122 bp, Homo sapiens
tgtaattagggagtcacccagtgtcagaccccaaggaataaggtccaggcatgggaccctcgcccccgaatgccgtccttccccaccgggggggggggcgggaacataaaatggacccaagt

SEQ ID NO: 319010 - DNA, 122 bp, Homo sapiens
acacgggaacagactgaggactagttaaagcagggccggcaaaagcagctttctatcagacgcgcccaccggtgtgccacgtcaatttaccattgccatggcaacacctgggcgttaccgcc

SEQ ID NO: 319011 - DNA, 122 bp, Homo sapiens
gccctggggcctcctccgggctttagcggaattaatccatgcacgagagacctagcctcacgttgacggagtttgtgcaaaatcaatagtcatgcatcgtgtaatgaccaggatgtgttctg

SEQ ID NO: 319012 - DNA, 122 bp, Homo sapiens
ctgatctcagcagctccattttttgtcctcttccttatccccgtggagtcgaactctccccggcatcgctctctacttcagatcttgctcagttttgcttccggtgggctcctgggagatgc

SEQ ID NO: 319013 - DNA, 122 bp, Homo sapiens
cttcttgcgcaaccccgcccctccacccaagcacctccatggactgcagctaaggacccgcgggcgcccacctgcccagagggatgcgctggtaccgcccctcttggaaagcacccagcttt

SEQ ID NO: 319014 - DNA, 122 bp, Homo sapiens
ggcggcccaggacagtccgggctcacggcctcagggagccaccccgatgggctctggcctcgggaactgcgaggcagtttctgttgtgtgaagctccccagtctgtggaccttgttcctgca

SEQ ID NO: 319015 - DNA, 122 bp, Homo sapiens
acagagccctaggtctagtcccccaggagctgaaaactagaaagccgaaaactgggcaagcgttgttctaactctgttcagggaagatgggctttggcctcaagcagagctgggttccttag

SEQ ID NO: 319016 - DNA, 122 bp, Homo sapiens
gaaaaaaatacgggtacatcagcaactaccatatactttttataggaagctaagtacaagcgtcatgcacgtatcatgtgtgactacacaaagccatatgtttatccggcagcacacataag

SEQ ID NO: 319017 - DNA, 122 bp, Homo sapiens
tcctgcttccccgatagcgtcgcgcgtggccaccgaggccacgcctacttccggctaccccggctactcctgctcagcatggctgctttagggactgttctcttcagtgagtgggtatagat

SEQ ID NO: 319018 - DNA, 122 bp, Homo sapiens
gagcatcttcataggttctttggggacatccattgctggaagtctccctcgatgtgggcacgtgcttctgctaatcactttgcctttatctgacagccccctgggtatattgtggtacacct

SEQ ID NO: 319019 - DNA, 122 bp, Homo sapiens
gcagctgcctctgtgaactgtgcctggcagggagggagccacaccgggagtgaccctagacgctggctccccaggggtgactggaggcagtgtctcccgcccatgtgggcctccggcttggg

SEQ ID NO: 319020 - DNA, 122 bp, Homo sapiens
gaaggacatcggcttcaacgtcgccgtccttctgacaaacctctctgagcacatgcccaacgatacccgacttcagacttttctggaattagcagagagcgtcctgaattatttccagccct

SEQ ID NO: 319021 - DNA, 122 bp, Homo sapiens
cctagtgggagcaactcgctgaagccgagggcagaactggcggaagtgacattatcaacgcgcgccaggggttcagtgaggtcgggcaggttcgctgtggcgggcgcctgggccgccggctg

SEQ ID NO: 319022 - DNA, 122 bp, Homo sapiens
cttcccctggcttcagggcgctgcccaggctcttgccctcagctgcctccccgccgtgcccgttggtggtcttggcatccttgccgtcagccttggtgccattctccaggctgccactgggg

SEQ ID NO: 319023 - DNA, 122 bp, Homo sapiens
aggagtgtgtgatttgaatctataatgatttctttgtctgattaattccccccagccatccggtaaaggccaaaatgaatgaaacggctgttacacagagggctgagcacaaggacagtaat

SEQ ID NO: 319024 - DNA, 122 bp, Homo sapiens
ggccgagctgggcgccgggcggtctgacttgcgcgtcgtgcgggtgcccgcagacctgggcgccgaggctggcttgcagcccgctgcttggggccttgcgtcagctccccaggaccgaggag

SEQ ID NO: 319025 - DNA, 122 bp, Homo sapiens
ctgcgggagcgcttcctgcagccgctgatggccctgctgtaccctgactgtggcgggggccggctcgacagccaccgggcctttgtggtcaaatacgcaccgggccaggacctggagctggg

SEQ ID NO: 319026 - DNA, 122 bp, Homo sapiens
tgcattctactgaggacagagggagagaaaagaatgggtctgcagtccaagctctgtgcacggatcccaaacactcccatggggactggagttgggagggagaaagaggagaaggggagagt

SEQ ID NO: 319027 - DNA, 122 bp, Homo sapiens
tatgtttttcgtaaccagggcaggttgggcttcccttcatcacacaccaacagatgcacacggagccccgcgcggcccattcctgagggcggattccccagggcagggcgagaaaggccctc

SEQ ID NO: 319028 - DNA, 122 bp, Homo sapiens
tgccccaccatgccccagccttttactgcagccccctatatgtgaaggatggtagccctccgggtgcataccaccttcaatgccaggcctatagctgtaatcccatgcaacagaaacagatg

SEQ ID NO: 319029 - DNA, 122 bp, Homo sapiens
ggtgctgacccttcgggcccggatcccggcttcgaggcttccccggcccgcccggcggggcggcagagctgctgctctggctcccaagccgcccagccttccgacgcacagcattctagcac

SEQ ID NO: 319030 - DNA, 122 bp, Homo sapiens
ctgccccgggcgcccctcacccaccgcccctgcgcgccgctccagggccagccccacccacgtcccgaaccctcacctgccccgtccgtaacctcggcgctagccctccttccagccccgaa

SEQ ID NO: 319031 - DNA, 122 bp, Homo sapiens
cgctggaagcccagaccacagcacccgggtttaaacaggagcggaggcgccgggaagggccgggggggccggctagggccggccagcttggaagccgcaccctcgcggccccagacgccggc

SEQ ID NO: 319032 - DNA, 122 bp, Homo sapiens
ggcgcaaaggcctcaccaggtgtgcagcatccaaagagccccaccgtggccacccccagacgccccgctcagcaggaagggctgcgagccagagcgcatcctccagcacagcgcctttttga

SEQ ID NO: 319033 - DNA, 122 bp, Homo sapiens
atgcttcaaaaagcaggaggttttgccgacaccccgctccgcaggcgacaggccctacctcgtcgaacagtgaaaacatgtcttccagcaagtcagaaacggggacttccagggaggcggca

SEQ ID NO: 319034 - DNA, 122 bp, Homo sapiens
gctaagaaatgctgggccggcgtcaggagaaggtgtgcccagcggcctcgtgcgggtttacgctctggccacaagcagccagccctacgctctcactcaaccgtgcaattctttctgtccta

SEQ ID NO: 319035 - DNA, 122 bp, Homo sapiens
ggccggggcttccctcgcggaggcgccgccagcaactccccgggggctgctgcacggaagcgctgaggagcgagtcaacagcccctctgctgcctcccgtagatgatccgagccgcgccgcc

SEQ ID NO: 319036 - DNA, 122 bp, Homo sapiens
agtgtgcacagcctccgggctgtgcagatcgcggagggagaggcccagtggggcgtcagccgggccaaaggtcagctctgcagggagacaggctggtcccactgcagcctggctcttgtcca

SEQ ID NO: 319037 - DNA, 122 bp, Homo sapiens
ttggatcccaaaggtagttattgaattaaattaatgtttgggtctaattcatccaaacgtcgaacggtgagaaaatgagccaatgactgaaattttttgagggggtaatcctttttgtttca

SEQ ID NO: 319038 - DNA, 122 bp, Homo sapiens
tcagccggctcagtccaggcctccccccacttctccagctgctgtcaagaccgggctgcgcgagcccagctgcgcccacccctcgcccctggagacccgggtcccccacgcgttcgccccca

SEQ ID NO: 319039 - DNA, 122 bp, Homo sapiens
gagggcgacatccttcgaggccggttcaagagcttccagaggaggaatatgatccagcctcgacagagagccaagttcaaacccaggtacaaggtgaagctgggggagaagcgggcgttccg

SEQ ID NO: 319040 - DNA, 122 bp, Homo sapiens
ttaaaactcatggaatttttttaaagaacatcatggcattcttgccacatcattcctcagcgtttacgacggggaggggttgttgatctgaaaaaaaagggaaaagacaaaatttaaaaata

SEQ ID NO: 319041 - DNA, 122 bp, Homo sapiens
catcaccatcaccgtcaccgacttggggacacccaggctgaaaaccgagcacaacataaccgtgctggtctccgacgtcaatgacaacgctcccgccttcacccaaacctcctacaccctgt

SEQ ID NO: 319042 - DNA, 122 bp, Homo sapiens
tccccactgcggccggggacggcgtggggtgggagccgacccgggacatccaggtgggatcggccaccgctcaggcgctgtcccaggcgaacgccgccaggggcaggctcagcaccgcccag

SEQ ID NO: 319043 - DNA, 122 bp, Homo sapiens
ttagtgagcgccgtggactgaagccgggacggtcttaggagaaccacttcccttcttggccgcctgaaaccccctacagggttctgcttctggaactgcattcgaggtcagagtttctagta

SEQ ID NO: 319044 - DNA, 122 bp, Homo sapiens
tgaacccttaccctcaacaccagtgcactcctgtgggtggcctgtagtcacctttcttgtcgaagtcctcaaagttagggacagactctcatccagtttctggagggtggaagcttcactca

SEQ ID NO: 319045 - DNA, 122 bp, Homo sapiens
tccatcttctccattcccctttcttctaccccagtactggtaaagttgtttataaatcaccgagattttccgatactttgtatccttcacacagcccagcactttgttacctacttagtagc

SEQ ID NO: 319046 - DNA, 122 bp, Homo sapiens
ctaaaattgcgtcatttagaacccaattgggtccagatgttatgggcatcgacgagttaccgtctcggaaactctcaatcacgcaagcgaaaggagaggaggcggctaattaaatattgagc

SEQ ID NO: 319047 - DNA, 122 bp, Homo sapiens
ttgcgcccctctctctgggcctcgtgaaggaacagagcaattacagcgctgggccggccacgtagtcctggggctaggtgggcccaatgctccgggccgcggggctggagcgcggaggctgg

SEQ ID NO: 319048 - DNA, 122 bp, Homo sapiens
ggctctatccgctctagccggctcgccgtctcagtcccgtgatctcgttcctgaccttttcgatgttcagtaggctggtccctggagctaaggctggggaaaaagcaaacgatttatgagac

SEQ ID NO: 319049 - DNA, 122 bp, Homo sapiens
gtggacgtgagagtgggccagttccagtccactttggttatgaactgggacaatcaggggcgctgggagtatctcagggtccaggaatagggcgggcttgggccggggctgctggggagaag

SEQ ID NO: 319050 - DNA, 122 bp, Homo sapiens
gcgatccaaagaacgctcccgggtaggaaattgccccggtggaatgccttgccagagcagcgcatagcaggcccctgcagaggattaacacggtggctgaacaccggaaagaactggcactt

SEQ ID NO: 319051 - DNA, 122 bp, Homo sapiens
cagggctgccagcgcgttcccagaaccctggcgtccacccccaccctgtcctgtcaccaccgcctgcctcccccaccgactgccccacgcgaccccagagtgccaagggccggctccatgtc

SEQ ID NO: 319052 - DNA, 122 bp, Homo sapiens
cgggcgcggctcgcagggcggtgggacccccaagacctcacgaggatccccggagggagacgtgactccggggtcttagaggggtttaggtcggatgggtgacttgctttgacgcctggcct

SEQ ID NO: 319053 - DNA, 122 bp, Homo sapiens
agcctggctggtatgtgggccactggtttgttcctggatttgctgtccaaccgtgtaggtcgcttctctctgatcaagacacaagagcctcattctggaagaaaagagaaaacatccttcct

SEQ ID NO: 319054 - DNA, 122 bp, Homo sapiens
gatacagtctcctgatgctcgggaaccaggcgtttctgatctgaatggatggctgggccccgtaattaacgagccgtgatatatcactgctttgctcatgaagattaacggtcatccctggg

SEQ ID NO: 319055 - DNA, 122 bp, Homo sapiens
tggtgccccctcgggcttctgtttcttcactggaaaaaaagtgaagtcgtcgaacaaaaccgagcccttatcgtgtgccaggttttgtgactagtgttctgtattgttacctcatggaacgc

SEQ ID NO: 319056 - DNA, 122 bp, Homo sapiens
ggcggtcgccagggtcccctccccagccagtcccaggcgcccggtgcactatgcggggcacgtgcgccccccagctctaatctgcgcgctgacaggagcatgatctgtgcccaggccagggc

SEQ ID NO: 319057 - DNA, 122 bp, Homo sapiens
ttattgattgaggaagatccactcaaaaaacacacctcacactgcaactgagagacgcagcgccaccacctcgggcttccttctcttttccacgcaggaggcggggccaatgtccctcattc

SEQ ID NO: 319058 - DNA, 122 bp, Homo sapiens
gtacgggatgcggggtctttgactgaaggggtaggccaagtggaggtatcagggacgtcgcgcggcacagaagaggaccagcctggacgccggggacgctgtcatgtacggcgcgagcgggg

SEQ ID NO: 319059 - DNA, 122 bp, Homo sapiens
tggggagggaagggcgtccccagcgggcgagagtggggtgcgggcggcggagcccctgggcgccagctgcttctcccagaggcccgactttcggtctccggtcctccacgccgcccttctgg

SEQ ID NO: 319060 - DNA, 122 bp, Homo sapiens
tcccccaaagggagaagaggttcaaaaatgttgtgatttatgaaaaagtcgaacactacccgctctcacattaacccgaccaagtcttccggagtttccctggcacccgcgcaggccctaac

SEQ ID NO: 319061 - DNA, 122 bp, Homo sapiens
atctagtgatctgcctgccttggcctcccaaagtgctgggattacaggcatgagccactgcgcccggtcctaaatggcccttttttcaagaacacaatgaggagtggtgaggactggggcaa

SEQ ID NO: 319062 - DNA, 122 bp, Homo sapiens
acctctttccacacagacacggcaaccatccgatttctcaatcttttccccaccttttcccgctttctagtccacaaaaccaccattgtcatcgtggcccgttctcaatgagctgttgggca

SEQ ID NO: 319063 - DNA, 122 bp, Homo sapiens
tggcacgtgaaagggagaaaaggggcaaaccagaggagaggcagggaggggcggcgggggcgcactgaacatttaggaagcaagatgtctagcaggctgggccttgagagaacagtaactgt

SEQ ID NO: 319064 - DNA, 122 bp, Homo sapiens
caccctttcttttcatttcattccaattctttcccctgaagagctttctttcaagtgatccgtgttccaactgcattttgaatcccaggctgtcttggggggcgtgcggtggggagggtgtt

SEQ ID NO: 319065 - DNA, 122 bp, Homo sapiens
gcccacccatgatgcctgtgaagtgggtaccagtgcttttgcccaggtgaggaggaacagcgtgataaaaaagggtcttgggttccaaactccagtggattcttctcagagctccactctac

SEQ ID NO: 319066 - DNA, 122 bp, Homo sapiens
atggtcagaggcataatcccaagtcgtttcaataattccaatgtaataatgcttttctttcgcccaggctggggtactacataaaaacagaaaaataccaagtatcaaaatcttcatttttt

SEQ ID NO: 319067 - DNA, 122 bp, Homo sapiens
ctcccgcgccaccagacgcaggctgcttctacaccggagctgtgctgcggcaccctggctcgctggcttctttcagcacctgtggaggtggcctggtaagcgccttctttccctagctctcc

SEQ ID NO: 319068 - DNA, 122 bp, Homo sapiens
gaaccctgtgccccacatcggcaataaccagcatccaccagagaaccacgtgccccacagcggcgataactggcatccaccacagaacaaagtgtcctacagtggtgataatcatcatcagg

SEQ ID NO: 319069 - DNA, 122 bp, Homo sapiens
tattggataaaattaaactctgtggtttagctttaaacaccctacacaaactgtgacacccggatctttctggtactcggcttcccttaacacattctacttctctgtcataccagaaaaca

SEQ ID NO: 319070 - DNA, 122 bp, Homo sapiens
gagaagagctctatctgcagtcatccctcacacctacctccaccctaagatcatggtatacgttgtaaggtcctacgtgtctgtactagatcacacatttgcactgcctctgccctggttct

SEQ ID NO: 319071 - DNA, 122 bp, Homo sapiens
cggcctatcgctagccaacttcctcatatcttcaccagcatcggagaggactatgatgagcgtgtgctgccgtccatcactaccaaatcaagtcagtggtggcacgctttgatgctggagaa

SEQ ID NO: 319072 - DNA, 122 bp, Homo sapiens
gagcggggcgtggcaggagccagcagggtgcatggaggccccgttccaaagccctctaatcgccagcgccaccaccgctgccacaagtccgatcactggcctcacaccgaggctttctcggt

SEQ ID NO: 319073 - DNA, 122 bp, Homo sapiens
gtatattttggtaacactgttatttggatttgaatggcacaaggatggggaccacctgttcgggatgttactgaaatctgtttcttacgtttttagaggcttcgtgacggagttatcagaga

SEQ ID NO: 319074 - DNA, 122 bp, Homo sapiens
gacatgggtttctcctcagtgacttgtcccaaaatgctgctctaccttatggggctgagccgactcatctcctacaaagactgtgtctgccagcttttcttcttccatttcctcgggagcat

SEQ ID NO: 319075 - DNA, 122 bp, Homo sapiens
tatatatctaattgtccttccctttttaaaaatcttacaatggcatgacatctcaattcacgataaggaaattggttcttcacattccctgtgcactgtacacatcgcctgcaattgccctt

SEQ ID NO: 319076 - DNA, 122 bp, Homo sapiens
tgtgttacttttacttgtctccatgcagctaagggcacgccagtgcacgcctaatgcaggcggggtgacacctgcacagttccatctgctgcttcacgacgtgttgctaactcagtcgccga

SEQ ID NO: 319077 - DNA, 122 bp, Homo sapiens
cgcctgtaatcccagcactttgggaggacaaggtgggtggatcatttgaggtcaggagttcgagacctgcctggccaacatggtgagacctcccccgcgccgacccgccatctctactaaaa

SEQ ID NO: 319078 - DNA, 122 bp, Homo sapiens
gtcatgtcttctgagatttgggccagatttgaaaatatgccagaggatactgtggagagccgatgccaggtttgtctagtctgaaacctgtgagttttccccagaattaagttctatccact

SEQ ID NO: 319079 - DNA, 122 bp, Homo sapiens
ccatagcggatgcctggatggtaggaataggatgtggcaaaaatccttcccgaagcctagcggtcattattttgaatgtcatccccaccatacctcgtgtctgagtgtgcgatgttttgatt

SEQ ID NO: 319080 - DNA, 122 bp, Homo sapiens
tgagactccatgggcgtaggaccctctgagccaggtgcggcatataatctcgtggtgggccgttttttaagcctgtccgaaaagcgcaatattcgggtgggagtgacccgattttccacgtg

SEQ ID NO: 319081 - DNA, 122 bp, Homo sapiens
aagggcttgatgacggccgtttggttggggttttctttcttgttgatgtggatggacaggcgctgccacaggtgctgcccccggctgctcttctcattctgggcccacgtgacggattttcc

SEQ ID NO: 319082 - DNA, 122 bp, Homo sapiens
cccagaggacggcggaccatggtcaaggtcctctttccggcctttcacaactccaagccccgccccacaaaaccccctgcagtcctaccaagtcactcccatggcgtcgggccaggaaggtg

SEQ ID NO: 319083 - DNA, 122 bp, Homo sapiens
ggtctgtggagggcatgtattgagcgggtgagcgcgcgctgagcgcctctgtgctgcagccgtggctgggggccggggctctccacccgcctcccgcgtggttcgaggctgacttcccaccg

SEQ ID NO: 319084 - DNA, 122 bp, Homo sapiens
ctgggcgggaggggaaatgatgttacaggacgaacaggcctgtgcagtgtgcgcgtggggcgggggagggagggataggggtgagatcccaagatgtggatgagcagggagaagctgggggc

SEQ ID NO: 319085 - DNA, 122 bp, Homo sapiens
caggccactcagaagtcccgagacccgatgctttcgccagcgtctcggtctccaaggaaacgcgacgccgcctaccgagcgcctaaagggactaacctctcaaggcaaaatctagttcggcc

SEQ ID NO: 319086 - DNA, 122 bp, Homo sapiens
ggttccccccactcctttaaatcacagatttcacttcagtttatctgtgtcgctgtcacacgtggggtggctcccagtcagctggtttggcaaagtttctggatgattacggaataacatgt

SEQ ID NO: 319087 - DNA, 122 bp, Homo sapiens
ttggctgtgaggcaggaggggcaggtaggctgtggtgccagagacgttttctacgaggtccgtatcccagggagaagcaatggtgtgggcttcagagtggcatggcaatgccccaagtaggg

SEQ ID NO: 319088 - DNA, 122 bp, Homo sapiens
caaatccaggatttaaaccattaaatttccccgagatttcttcaccagattagccacagccgtggccttttaaaaaattatggtcagggccgaatcaggatgccacctggcttgggagagga

SEQ ID NO: 319089 - DNA, 122 bp, Homo sapiens
gcacaggggtaaatattaatgcctcacgattctcccccaagctgcccttacaggggaaggcggcacagagagatgcagaccccgctgaggcaagtcgaggtcccccagggtatccccaaacc

SEQ ID NO: 319090 - DNA, 122 bp, Homo sapiens
gcccagggaggggcaggcaagtggtcggctcacagtgcagaacggggccgccgggcagcccgcttgctcccagctctggggtcccaccatgcgggtgctgcccagccctgctgcctgtgctt

SEQ ID NO: 319091 - DNA, 122 bp, Homo sapiens
acatggcaaaaccccatctctactaaaaaaaaaaaaaaaaaaaggatttgaagtcctggccggagcaattaggcaagggataaaaaggcacctaaggcccttttgcaataagaagccagatg

SEQ ID NO: 319092 - DNA, 122 bp, Homo sapiens
ggatgctttgctgagaggagagactgtgattccctgaagaaaatgattaccagaggcactcgtgtgaatcttcagacaccaacgtgtacttagtgaagatctcaaaagttgacttcaaagaa

SEQ ID NO: 319093 - DNA, 122 bp, Homo sapiens
cagatgatgacatgaggatgtgggggtagaaaggtagcagtgcatcaagcgtagctgtgacggtttagcatatgctctgctacttgaggtaagggagaatagattcttctaattcaagatac

SEQ ID NO: 319094 - DNA, 122 bp, Homo sapiens
cctttcccccgcccctcctagacgccgctaccggaaaccgttaaccctttccttcgggggcggagtcagcagccccacccaccctgttgtcgctcccaggcgtcatttccctcgctccgtcc

SEQ ID NO: 319095 - DNA, 122 bp, Homo sapiens
tgaaagaactgcacctctgagcaggtgaagagagaagctaaggaggggtgatggcagaggcgatgggacaggctttctaacgatgaggggctggggatcaacgctctcacggaagctaaaag

SEQ ID NO: 319096 - DNA, 122 bp, Homo sapiens
gagtgtggcaaggcagaaccttcacaggcctgtgtccccagatgtggcagggggccactgcgcccatccctgcggaggctctgaggagcacggacggcgactctgggtctgaggatctggtc

SEQ ID NO: 319097 - DNA, 122 bp, Homo sapiens
ctcgatctcctgaactcgtgatgcgcctgcctcggcctcccaaagtgctgggattacaggcgtgagccactgcgcccggccacttgtgtttcttttcaagaatggaccccatggcagacatc

SEQ ID NO: 319098 - DNA, 122 bp, Homo sapiens
caactagtcaatgggtaaccaacatgattcaaaccgatactatgattttaacagtaaaaacgtgaggttttttaactacctccatgatctgggggaagggtatactgcagttccctgaacta

SEQ ID NO: 319099 - DNA, 122 bp, Homo sapiens
cgccagagaccagctccgcctcgcctcccggcggatacaggcccacaacccatagccccgcgcctcccagacccccagacccccagaccctccctggccgccagcccaggggcggacggctc

SEQ ID NO: 319100 - DNA, 122 bp, Homo sapiens
atggattcattcaacaagtcctaatcctgcgccctggtgtgtgccagaccctgctccccgcgaggggatccacgagcgaccctcaccactatccctgccctggtggaccctccgtgcgggac

SEQ ID NO: 319101 - DNA, 122 bp, Homo sapiens
ctggaggggcaggacaggggtcagtcactgaagcacaggcaggagaccgcagttccgaggcggcagccactacacgaaggcctcctggttggacgagccgttgattttgaggaagagtttgt

SEQ ID NO: 319102 - DNA, 122 bp, Homo sapiens
ggcagtggaacatgcaaggcactgactgagcatgcaggatcagctccatctcattatgtacgtagatagaggtggagacaggaaaaagactaagccagacgtggtggctcacacctgtaatc

SEQ ID NO: 319103 - DNA, 122 bp, Homo sapiens
gggagcagagcagctgccggctgtgtgcccatggggagcccagcccccaccccccacctccgacagcaaacagcaactgactgcaggtgctggcatgatggaggtggtgcaccttggacacg

SEQ ID NO: 319104 - DNA, 122 bp, Homo sapiens
cttgggctgttctgctctgctttttatgtccgccgataaggtcggagagtctctccccggcgctcctatgcacatcttgttaagtttcttcttagagcttctgttgctgctgggaaagggat

SEQ ID NO: 319105 - DNA, 122 bp, Homo sapiens
ctcccaggtagagaatgaaagttgacattgatattgccaccctggtgccctggcctccaccgctgcttggatcactgctgaggtcactggaccttgcctgcatgacacacaagattgcacaa

SEQ ID NO: 319106 - DNA, 122 bp, Homo sapiens
gctgcaagggaggctcctgtggacaggccaggcaggtgggcctcaggaggtgcctccaggcggccagtgggcctgaggccccagcaagggctagggtccatctccagtcccaggacacagca

SEQ ID NO: 319107 - DNA, 122 bp, Homo sapiens
cccaggcccttgggcttgggctcaggcccagtcgttcctctgcaacaaatccaatggaaccgcgccctccctgaatcccacgtctaggaagaggaggaggagcccctcttgcttgggggaag

SEQ ID NO: 319108 - DNA, 122 bp, Homo sapiens
agcgtgtatttttttcccatccagacaacctagagaaacccaaaaaagagggaagccaagcgcctttccatgcgtagattgcccgccacttccgttaaggcatctattttactgatgaaaag

SEQ ID NO: 319109 - DNA, 122 bp, Homo sapiens
ctgtctaaccaaagttctgctcaaatcttctgcttcttagccagctttttatttagcaagcgttccaatggaacagcagcaccaaggttgaactcaccactttgggcttctcttctctctga

SEQ ID NO: 319110 - DNA, 122 bp, Homo sapiens
tgcttacagtgcctggctgcgtgtgtgcgggcagaggccccacgcgagaggctggggctgcggtgggcggcgtgtctgtggcgcacccctctctcctgcacacacggctcttgttcgcgtgc

SEQ ID NO: 319111 - DNA, 122 bp, Homo sapiens
cgatcccatcaccctgctttcctctgtagctgttttgggggatgcagcacagacagcaagcgtccagctgcttcaggggacggcagccttgggaccaccttgttgcgtctggcaggtgggtg

SEQ ID NO: 319112 - DNA, 122 bp, Homo sapiens
gccgcacatcccggacctcggggctcactctgactgtcagaggtacggggttttcagagacgtgcaggaccctgagcagcagccggccggcatctcccacgtcctgctcctccccatcacca

SEQ ID NO: 319113 - DNA, 122 bp, Homo sapiens
gggaggccaggaagcccaatagaggcaggaatagaagccagcatagtagggcataattttcgactaacaactagcaaactggagggggcactaaatagatcccactgaacaggtttcagtct

SEQ ID NO: 319114 - DNA, 122 bp, Homo sapiens
gaagcctgggcctgacggtgatatttccactgcctggctgatgacctggcacgagggactcgcactgaggctgaagttagcaactgtgcattggctgcatggctgattggcaaggggaaggc

SEQ ID NO: 319115 - DNA, 122 bp, Homo sapiens
aaaatacacactgaagtttttcggggcacaggggcatgatatatgcaacctattttcaaacggttcaggaagcacacagggacaggaggacaggaaggaaggggactgataaagcacatact

SEQ ID NO: 319116 - DNA, 122 bp, Homo sapiens
ggtcccgacgcggcccgcgggagctcggggtgccctcgcccgccgctgccatcttgccgccgagggttctcttagcgaccagcaacgcccgcttccattggtctttgtcgcaagggggggtg

SEQ ID NO: 319117 - DNA, 122 bp, Homo sapiens
agaactaccctctaagattggagatgaccaatcatgcttcctactcccctgctgtagccccgggcaaagctgtgtaagatacatttatgcccacagcttcttagcaagacctgagcctcaca

SEQ ID NO: 319118 - DNA, 122 bp, Homo sapiens
cacacccatcaggatggggcagacgggacagcaatgtgagcacgctgagatgctcgacatcgcacactgcagccacgacgagacagcaccacacacccatcaggatggggcagacgggacag

SEQ ID NO: 319119 - DNA, 122 bp, Homo sapiens
ttttccatccgtaataataattgccactttaggaaagccaactcttgccccagcagattccgtgaaagtatttttaactaaataatcaatggcatcccctaaagggaaaagaaacatgttca

SEQ ID NO: 319120 - DNA, 122 bp, Homo sapiens
gcagtgtggggcatgtggcgtgcagggacgccgtgggcgtggtgtggggcacgtggcgtgcggggacgccgtgggcgtggtgtgaggtatgtggcgtgcggggacgccgtgggcgtggtgtg

SEQ ID NO: 319121 - DNA, 122 bp, Homo sapiens
cggctctaccaatcagcaggatgtgggtggggccagataagagaataaaaggaggctgcccgagccagcattggcaacccgctcgggtccccttccacactgtgaaagctttgttctttcgc

SEQ ID NO: 319122 - DNA, 122 bp, Homo sapiens
gcagcaacagaagagccatgatgcatgctccgtgctctggggtccctctagctgaggcctcggcccccctgctccccatttgcccttggcatcagggaccctcagccctttcttcagggccc

SEQ ID NO: 319123 - DNA, 122 bp, Homo sapiens
actaaaaggctgtcagggtaaatatagtgtctattctgatattcaggaacacatgctggccgggtctgatttcagggctcttgccaaagctctcctggcttgcctgagtattagaggtttcc

SEQ ID NO: 319124 - DNA, 122 bp, Homo sapiens
acgctcagagctggcttgggggacactctcacgctcaggagagggacagagcgacagaggcgctcgcagcagcgcgctgtacaggtgcaacagcttaggcatttctatccctatttttacag

SEQ ID NO: 319125 - DNA, 122 bp, Homo sapiens
atgctgttctgattccttatcaggagaggcgaggccagtaagagaagaaatccacgtgagcggtgtgaagcttgttttttggagggctgctgggtgggctccctgactccggtaatcaccct

SEQ ID NO: 319126 - DNA, 122 bp, Homo sapiens
aggggccctctagaaatagatgagatgaggtgaccacgacaccaatgtgtcagggccgggcgtacaaagcaatgctccaagtcatctatgaaacactggaccctgaacctaagaagcacggg

SEQ ID NO: 319127 - DNA, 122 bp, Homo sapiens
ccctcaggtcatctccatgtcagaggggtggtggaagtctcttcaggtggaagattcctccgaagtaactttgtgcattacactctggatggagcagtagttaactgtgcaggccctccagc

SEQ ID NO: 319128 - DNA, 122 bp, Homo sapiens
ccgtgtcccttcatctcactcttctcctggctcgctcttgtgttagggtgttgagctccacgatgtccccaaatgtgcccggacgcagcgtgtgccagcccccagagtggaggcaggtggga

SEQ ID NO: 319129 - DNA, 122 bp, Homo sapiens
aagaggtggtgtctgagcactcacctggacttctgcaaggtcagcaaacacaggagcagtcgctgagcagcggtgcaaacacaccagctctccaacgggtgcttcactgcacttccctgcag

SEQ ID NO: 319130 - DNA, 122 bp, Homo sapiens
cggagcggcgcggggcggggacggcctggcagctcccagcagcgaggggcgatccccgcccgcgcagcagaccccgagctgcccaggcccttcctgcgccacgtgtacccagagctccgccc

SEQ ID NO: 319131 - DNA, 122 bp, Homo sapiens
ggctttccagcttccggcccgggaactactatttggagtagggatcgcctgcagggaaggcggggcggattctcggctggcggcggcctcgcagggttcccggaagcgctagccagccggag

SEQ ID NO: 319132 - DNA, 122 bp, Homo sapiens
cacttgattactgtagatgtcagagcattaagaattcctgccgatggacaggagccctttcgctcgcgagcccgtgcgtgcagcagccagagcctgtgaacttcgtggaatgctgtcgacgt

SEQ ID NO: 319133 - DNA, 122 bp, Homo sapiens
gcattttcttcaggcttgctagggcaatgctggcaaccaaagtctattctttctttggctcgtaatgcccaatagccagcatagacggtgtttacctcaaagggaaagtctgatatgaatga

SEQ ID NO: 319134 - DNA, 122 bp, Homo sapiens
agggggaaaaataaatcgcgatggggccaagggacagctgctgcggcaacttttacccagcggagcccacctacagcctcagcctccgggtctcaggtctccgccgtttcttctcaaggagt

SEQ ID NO: 319135 - DNA, 122 bp, Homo sapiens
cctggaagggaccggcgcgctcagagcgcgttccaggcccagggagccgcgcgcctcggccgtgtacaaaacggcagatcccttagttctgctttgagctcgaccatcctaaaaacaaacct

SEQ ID NO: 319136 - DNA, 122 bp, Homo sapiens
tgttcctcggcgagagcgaacagtagtgagtaaggagcaggagcctgcggatcacagagccgcagcacctaccaccgcgacttcctcaaagagcggccatttataatttgtaaaaggacaca

SEQ ID NO: 319137 - DNA, 122 bp, Homo sapiens
tgtaatgaaggggcttgtagaagcgcactcgcccgctcccccgagggtagtcgcctttcccgcgggttgccagggtccttgtcagaaggctgggcttagaagcctgcatctcacagatcaag

SEQ ID NO: 319138 - DNA, 122 bp, Homo sapiens
atttcatactttttgtatatcagaaaggatttctttttggaaagaaacagtagctcaagacgcgatttttcaaggttctgtggccagtctcagtcactcggcaacatctgagccaaggcaga

SEQ ID NO: 319139 - DNA, 122 bp, Homo sapiens
caggttctcttccaaaagaggtcagtcacatgaactggtagggtctttcttgtcagaacccgtaattcttcaggaatcagaagctctctagccatctatagcagtttcagtttcagtcaaaa

SEQ ID NO: 319140 - DNA, 122 bp, Homo sapiens
cctcccggagctctgcagacagtgtgtgttccacctgctgagggctgtgtcaactctgtccggcaccattttccgcacgccatgtgcactctgtgtccctgtgccccattttgggaactgta

SEQ ID NO: 319141 - DNA, 122 bp, Homo sapiens
ggtttctatggagaccctgcttgatgtcaatggcggctccggagcgcagggaaacctaagcgtttgtatttaaatgagggaaagtgggggaaggggaagtaaaagaggaagggaacagaaga

SEQ ID NO: 319142 - DNA, 122 bp, Homo sapiens
ggaagccaggccgggggacagctgggtgcagtggggcaggtggccgaccagggctgtgcccgtgtcctcgtgtttcccgccactttaggttctccctgtgggggctgaggaggccccgttcc

SEQ ID NO: 319143 - DNA, 122 bp, Homo sapiens
cccaggccctgcagcgccatgaggtcggactcctgggcgtgtcctgggttctgacccacccgcgacgccagctgcccgcgcccggagcggatgggcctggcccggctccaccccgcggggct

SEQ ID NO: 319144 - DNA, 122 bp, Homo sapiens
ggtacccgaggccggtgcggagagtccctcctcctgggaaaccgggtgcggccggaaaggcggccgcccctcacccgtcatgcaacggcacgttcgtggggaacctgacattaaactgttcg

SEQ ID NO: 319145 - DNA, 122 bp, Homo sapiens
aaaaggacttccctccccaaaatcccatgaaggtttatgagttttactctactaagttctcgagggctaatctaaacatgcagatgagtcaaggacccagcttaggaaagcatctctcagct

SEQ ID NO: 319146 - DNA, 122 bp, Homo sapiens
gcggggcgcggggcaggctcagctgccctcagagtctgggctggggagagccggggcccacgaggcgtggcaaggcggggagagagaagctagacctccctgctgcgcttctgcagcgaaaa

SEQ ID NO: 319147 - DNA, 122 bp, Homo sapiens
tgagttctggctgctcttgtggcaggtgaagggacccaggtgggccgactgaggcccttccgaggaggacagggtcccaaggctgtccacactgtgcaggtcgtggtggggcatctcgtcat

SEQ ID NO: 319148 - DNA, 122 bp, Homo sapiens
cctgcgactgtgagccgagcttactgccttcagctgggctgcctggtcttccacttccggcgcgaacgttgacgtcacgtcgtggcgcacctcagtggcgtcagagcggcgtcgggcctggc

SEQ ID NO: 319149 - DNA, 122 bp, Homo sapiens
ggcataactgtaaagggactctgattagattgagagcaaacttcacaactgcagcaatcacgaccacacacagtggaacagtatattccaagtgctgatgaaaataatcatcaaaatggaat

SEQ ID NO: 319150 - DNA, 122 bp, Homo sapiens
ctggtgccacagtcagcttacctgtgatttgggagaacccctcctcacagtgactgagtgcggctgtgtaagttgagtacctgccacagtagctggcacatgtcctcttgtctagggaacag

SEQ ID NO: 319151 - DNA, 122 bp, Homo sapiens
gggattttaaggtagtgaaactcttgcagggcaggggagccccaaaactgggacaccgtccgggaaggctcttggcttcgtccaggaaggaattcaagggtgagctagaggaggaagaaaaa

SEQ ID NO: 319152 - DNA, 122 bp, Homo sapiens
tgagccgccgtgcccggccgtctttcttttctttcttttttttttttttagatggggtctcgctatgttgcccggctggactgaaacccctaggcttaagcatcccatttcaacctccccag

SEQ ID NO: 319153 - DNA, 122 bp, Homo sapiens
cggccgctacagggcgagctagggccagtgctgggcaggggtccgagaggcccggggctgcgggcgggcgggcggttatcctccagagatcgcgcatcagcacagaacatctggactgatgt

SEQ ID NO: 319154 - DNA, 122 bp, Homo sapiens
tacgcaccaatcaaacttgcccacttggtcttcgtagaccgcggccgcaggaatcagcagcgtagcccaaagccagaaacgagaagcccactcagccgccatgatgcgagcgcatgcaccac

SEQ ID NO: 319155 - DNA, 122 bp, Homo sapiens
gagtgctactggcatcaaatgggtagaggccagagatgctgctaaatatcctacaatgcacgggacagccccccatgacaaggaatgagctggcctaaagtgtcaacagtgctgagggtgag

SEQ ID NO: 319156 - DNA, 122 bp, Homo sapiens
caggaaccgcagcagcagccggagcacccgcacccagggtcgctcagccccgggacgcctcggctccaacgttgggtcgagacccagctcggtgcacagaaagccaaggtcaaccagagcat

SEQ ID NO: 319157 - DNA, 122 bp, Homo sapiens
aagccccagttctcacgagcacggattgttgcctgtggctcttaaccacattccaagccccgcacagacccacagaacctgagtgacaggcaacacatgaagtcttgtcataagacacccca

SEQ ID NO: 319158 - DNA, 122 bp, Homo sapiens
ccgacactcctcgggcatgcgagaattcggctttccttagtggggcccatcaatgttgtccgggaggtaaagaaagtgatcggccaacggcctcagcgtgggttttctccttccctcgttcc

SEQ ID NO: 319159 - DNA, 122 bp, Homo sapiens
gcactttcattaggagaaggaacttttctgtagtaatacagctcccagaatacctttcaccgaagcaattcctaaaggggtgtgtcttatggtgcaagattgctgaaagtcccggaattgaa

SEQ ID NO: 319160 - DNA, 122 bp, Homo sapiens
tccttgcgcgcctccagcgctcgcccgcgcggctggttcctttgggatgcggaggtgcgacggctcctccgcgcgcgcccgctgcaccccagcccgcccgccgcccctcccggccctccgca

SEQ ID NO: 319161 - DNA, 122 bp, Homo sapiens
atctaatgagaaggcaactctaatgcccatcaggagattcactaggacattttaaaaggacgtctttaaggaaaaagttttgtttgtagatgttgcctctgattcctccctgcggctccagt

SEQ ID NO: 319162 - DNA, 122 bp, Homo sapiens
agagcaagttggaacataaaacatagcatttggaaaataaaaaggggactgtatctttagcgctgattaaagagaaaggggaccacgtcagcctagagatcctctatattacactgactcca

SEQ ID NO: 319163 - DNA, 122 bp, Homo sapiens
gctgggttcttggattgctgtccagtgtgagcttgggcagtccagggatttatttgatggcggtgtgctcagcttttgaaattaagtaatagaagtaggatttaaaataacttttttaacat

SEQ ID NO: 319164 - DNA, 122 bp, Homo sapiens
ccaccccgctcccctccagcctggagctgcggagcccgagcagaccaacaggccgagctgcggcaggcaaaccccctgtccgtgtccccatgcacccccacggaaggccgtacgccccaaca

SEQ ID NO: 319165 - DNA, 122 bp, Homo sapiens
tcagggccggcccctggtggggtgaatggcagtcacacatcctccaggctgtcatggggccgaggctccgtgctcagcaatgcggttcctctgggtggtttatgctcccggtgcaaagcctt

SEQ ID NO: 319166 - DNA, 122 bp, Homo sapiens
gagtggccttaaggagcttgcggctacggaaatagacctcagacaagggggcagcacatgcgctatggtgtgtcactgctgactataatggtcaataggtctatcttgtcagatagacaaga

SEQ ID NO: 319167 - DNA, 122 bp, Homo sapiens
cccaccccgcctagtttctagccaccagggagctacgggggaatccacggtccattttggcgccaaacagcccgggcacgcgcgaccggaagtgccaccctgcccgcgccaactgccgctgc

SEQ ID NO: 319168 - DNA, 122 bp, Homo sapiens
gtaccagccgccgtggaaggcgctcagcgagtttgccctccagagcgacctggaccaacccgccttccaacagctggtgaggccctgccctacccgccccgacctcgggactctgcgggttg

SEQ ID NO: 319169 - DNA, 122 bp, Homo sapiens
gtcctagataaaatatggccagcaattccattaacaaaacactgacaagacacctcagggcgagctgtacattgacaacagcatcgtcaagcagaatgcacttcagggaaaacataataagg

SEQ ID NO: 319170 - DNA, 122 bp, Homo sapiens
cccgaaggcgactttgcgatcccctagcgctaatgtcttgatggatagtgctgagctccccgcccctttcccgactcttccctcctccctcctcttgcggctgccgggcgcgcagattcttc

SEQ ID NO: 319171 - DNA, 122 bp, Homo sapiens
gctaatcatcacaacatcctgcaaactgggtgttattttacagaggcggaaactgtaacacgtttacgcaggtagtgtcagagcctaacaattcgtggttgtaattcgcagtatcattgcgt

SEQ ID NO: 319172 - DNA, 122 bp, Homo sapiens
cattgaggaggcgaaacgatcccttcacgatgctttgtgtgtcatccggaacctcatccgcgataatcgtgtggtgtatggaggaggggctgctgagatatcctgtgccctggcagttagcc

SEQ ID NO: 319173 - DNA, 122 bp, Homo sapiens
ttccccgcgcctgtgagggtgccaggagttcgtctccaggtcccgcccctgtgggcggggcgaggcagcgtcgccgcgaggccacccggaagaccaagccgggtaggcgctgtctccgtcgc

SEQ ID NO: 319174 - DNA, 122 bp, Homo sapiens
aaggccgagggttcccccctctaggtggacattgggttcctgttgcccgccgcttggcaccgagagggcctcagggaatcacatgtccgcctggcctggcctggtaccaaatgtttatagac

SEQ ID NO: 319175 - DNA, 122 bp, Homo sapiens
ctcccagtgggagatgggttgagatgcccccgccaggggggatgcccggcaccgtgcgtccgcggaggccaagatgcagcggccaggggccggcagcctgcgaggggaggcagcttccgccg

SEQ ID NO: 319176 - DNA, 122 bp, Homo sapiens
cgagaaggccggggacggcactccagagcagacaaagggcgccgccatgttagagtcgggcggaaccgacctcgcaggcttcccggctgcaacttccggcgcatgcgcagcgtcctcgctag

SEQ ID NO: 319177 - DNA, 122 bp, Homo sapiens
ccctgagcgaacggccttgaactttgaaacaaatgctcccatggccagatgtcgcctctccggctcctgccagcacccgcgccccagtcctgccgagccattcagacttggtttaaagtgtc

SEQ ID NO: 319178 - DNA, 122 bp, Homo sapiens
cggatcccagccgaggaggtgcgcggtgctgagaggccgtgggagcgaccatagagaacgcgcgggcggagcgagcggccggatgcggtcaccatagagacgggtgactgacaggcagcgga

SEQ ID NO: 319179 - DNA, 122 bp, Homo sapiens
tttcctgtcacctcttagcatcgattgttctagtgctttgtggctgctggaatcaaatggcgccatctctagaggggtaatcacagtcgtttcgggcatttgtgaaatagcgtgtagaaact

SEQ ID NO: 319180 - DNA, 122 bp, Homo sapiens
tgccccatttatcatgaagatgaacgctggtaacactgctacctacgagctgagcttgcacgcacattcctggtgtgtacatgcatgcgtgcacgctcacgcaatgtgctaagtgcacagga

SEQ ID NO: 319181 - DNA, 122 bp, Homo sapiens
ctttttctgggcttctcaaggcctacatcctgggagtgagtaaagctggtggggcggctacgctgtttgggcctgatgccagcaacatggtggagtctgtcacactcctttgatgttcacag

SEQ ID NO: 319182 - DNA, 122 bp, Homo sapiens
ctatgggatttcgtctcccaccacccctttcttagccaggattcgggtattcccttccctcgctcggactccccgtcttcattcaccgacccactcgcggagcgagcaggcccagctctgcg

SEQ ID NO: 319183 - DNA, 122 bp, Homo sapiens
cagcgctgccaccgcggctgctctgggctctctcgggctcacgctgcctcccatcggctacgagcacagagcatcatcatcatcagcctgccagccggccccgccgccgcctcgcgccctgc

SEQ ID NO: 319184 - DNA, 122 bp, Homo sapiens
ctcccttcctcagcgccgcgcccgggacaggcgcgagactgggcttttattaggaaggcacgatcctgggaaccgctccttgtgcccaatgtaaaacttctcaacagttctattaaggaata

SEQ ID NO: 319185 - DNA, 122 bp, Homo sapiens
ccctaacactttaatccaggcagggcttaaatttcacgccccggaatcccgggccgaacccgtggagaggtctctccgtctcacaaacacacgcacgcgcgcgcagacacacacacgcgcac

SEQ ID NO: 319186 - DNA, 122 bp, Homo sapiens
accgggttcatctcactagggagcgccagacagtgggcgcaggccagtgtgtgcgcgcaccgtgcgcgagccgaagcagggcgaggcattgcctcacctgggaagcgcaagggatcagggag

SEQ ID NO: 319187 - DNA, 122 bp, Homo sapiens
cagccggcttccggcctgggtgtgggtactgggctggcccctaatgatgggaacagcagccgccaccaagagcttcaacctgtccagtgccccaaggtcccaagcagtcggcagggtctgtg

SEQ ID NO: 319188 - DNA, 122 bp, Homo sapiens
caaagcaattcctacactagatcatcagggccattcagctctctgccctgatggatctcccgctttatcgtacagcaaacatgtatttaccattaggaaagtcattaactttacaaggagaa

SEQ ID NO: 319189 - DNA, 122 bp, Homo sapiens
ttcctcacacgctcaaaacgtagggccttgagtttctgcttctgctactgtgcacgcttacgttatcctgtccttacttacatctggcccaggtggttgtgttagacactgaaaatctggag

SEQ ID NO: 319190 - DNA, 122 bp, Homo sapiens
tggtgccttaataacaagatcagcaacagctacaatgcctgctcctcctgctaacagttacgcagggctttgctcataccaaagctttgcctctcacgacctctttcggtcctcaggacaat

SEQ ID NO: 319191 - DNA, 122 bp, Homo sapiens
aaaccggttcgacaggtaacaaataggtgggttgtcaccgttatttcccaacgcatgcgccgtcgctccccgggccaccccaagctaattagatcagatcaccgccccccacccccaccccc

SEQ ID NO: 319192 - DNA, 122 bp, Homo sapiens
ctgctgccgacagccatggaggacgagcagcctgacagcctggagggctgggtgccggtccgggagggcctcttcgccgagcccgagaggcaccggctgcgcttcctggtggcctggaacgg

SEQ ID NO: 319193 - DNA, 122 bp, Homo sapiens
acaacgagtatacttgggatgcgatcgcatgcctggagcatctggtgggcaggattcactcgtcctttcctttttgagattgcaattaagtagataatatgagagagaactgacaattgggt

SEQ ID NO: 319194 - DNA, 122 bp, Homo sapiens
tgcctttaccccggaggatgcagaggtaccttctctcaggccgatgacctcaggcctccacggtccctggagctctaggaaaggcgagcgcgatctcgcgcccacacccagtgctctgggtc

SEQ ID NO: 319195 - DNA, 122 bp, Homo sapiens
gggcggctgccgggcggaggggctcctcacctcccagacggggtcgcggccgggcagaggcgctcctcacatcccagacagggcggtggggccgaggcgctccccacatctcagacgatggg

SEQ ID NO: 319196 - DNA, 122 bp, Homo sapiens
ggccttgacacagacagctagtgtgaatccccgcccacagaggggcggcacgttggttgccgtacaacgtggtggttccctgcatctctgcccacgtcggagaggtgcgtcggcttccgtac

SEQ ID NO: 319197 - DNA, 122 bp, Homo sapiens
cgtccctgagagaaattagtaagcctcctcatgcggctctggtttcggtctttactcctgcgccttactcgaaaggggcagggtttctgctgtcggtcggagggaggatgacgcgccgggtc

SEQ ID NO: 319198 - DNA, 122 bp, Homo sapiens
gggcgaactctgtgcagcccctccccttttccctgaggcggaggttcggtccctccggaccggacctttgattgacaacttcgataaataatccagtcacacttccgggccctttggttggg

SEQ ID NO: 319199 - DNA, 122 bp, Homo sapiens
tgcttgtgtaactgaccagagtgtcaggtgaggccattgttggcagaaaggtgccttcctcgggagaaggtgggttacacagcttttctttgcagatgaatggtgagagccaaacccgaaga

SEQ ID NO: 319200 - DNA, 122 bp, Homo sapiens
aaagtgttctgtgagactgtttgcagcagccttattcccagtagcctcaaagggaaacaacgcaaatgcccttcaacagtggaatgcataaattgtgccatactcataaaaaggaataatat

SEQ ID NO: 319201 - DNA, 122 bp, Homo sapiens
ccagcgcagcctaggctggaagtcggggcgctgggcactacagagcccgggaatggggcgcgcggagagcggccgcccgaggacggcgctgcggcggctgcagcccgggacttattgcccca

SEQ ID NO: 319202 - DNA, 122 bp, Homo sapiens
catgagagctgcaggattttttccagaagtagttctgtagactcagtcccaagcatgcgccgatggcttcccaaactcgggtcccccgactcttagtacatgggcaactgcgggtgattgaa

SEQ ID NO: 319203 - DNA, 122 bp, Homo sapiens
ttgtttggcagagggtgatcaagtagcaaaagttctggaactcagatacctaactcaaaacgaaacatcaaaaatgaaaaaaaaaaaatctagacagtggagcaaccaggagtatcatggta

SEQ ID NO: 319204 - DNA, 122 bp, Homo sapiens
cttgtccacttccctgaggacacacgctgcaggagagcagcctcgagtcttttctgccttcgaggtctcaggagcttttgtccccaagcccagaggacaggggtggccctgactcaggcgcc

SEQ ID NO: 319205 - DNA, 122 bp, Homo sapiens
gctgtgttcttaccagctacaaacaagcattattaaccatatgaccatatttatatcagccgtgggtgagcgtttctgatgacccatcctggcagcccacagagacgtccagtgcctgggac

SEQ ID NO: 319206 - DNA, 122 bp, Homo sapiens
ttctggtagagacaaaggagacacgttttatccgtggacccaaaactccggcgccagtcacggactgggaaggcagccttcccttggtgtttaatcagtgcagggacgcctctctgattata

SEQ ID NO: 319207 - DNA, 122 bp, Homo sapiens
cactgccctgaatgcctacagccggctggcaatgccgccccagagcagagcggcgggtgccgcctcgccttcttataggctcgcagcacttccagtcgcgcgcgaggcctcctgggaagtga

SEQ ID NO: 319208 - DNA, 122 bp, Homo sapiens
tacctttggctagcccattcccaagatgagatgggtgtatcaggccatataggccttatacgattaacattctattacactatctcccctcattctgattccatgctcactaggcaactttc

SEQ ID NO: 319209 - DNA, 122 bp, Homo sapiens
cgaaaatgaagtgacgatgacgtaccaaagaggaaaatagttgaatatgttgtgtgagcgcgtcgtttgcagaagccccagtggcctaatggataaggcattggcctcctaagccagggatt

SEQ ID NO: 319210 - DNA, 122 bp, Homo sapiens
acacgctgtcaggcaggctacactcactccagccaataaaggggcaacggcagcaaggaacgaccccacaaccccattttcatcgctcctctttccctcccagtttttactggctgccagca

SEQ ID NO: 319211 - DNA, 122 bp, Homo sapiens
acccctcatggggctgttgggatgacgaggtgagacggcatctgtcagctcttacagagacgcaggcgaacagtggggcccggcagcccttgctcttcgctccccaggccggggggtggctg

SEQ ID NO: 319212 - DNA, 122 bp, Homo sapiens
gaggctcctgatgactaagccccgtctcctcaccgggctgcctgccttgcacgcgggggccgtgtgtccaggctgggcacagccaaaccaaccagactcggctgttttacatttccctctca

SEQ ID NO: 319213 - DNA, 122 bp, Homo sapiens
tcctgggggcttcagaggagggtggtcctgcccacacctcacttttggacttctactctccggaactttgaaagaacacatttctgtggttttcagccacctggtttgtgggaatttgttat

SEQ ID NO: 319214 - DNA, 122 bp, Homo sapiens
ggaaaaatatgatgtgggaatagaggtggtggggacacatcagaagcatgatgagtgagacggcccaggagacatgcaatttgcgccaaggagcatggaggaaaattctattcccaggttgc

SEQ ID NO: 319215 - DNA, 122 bp, Homo sapiens
accggaaccgagggagccagacagctgcgatattgggaaggcctccggagccgcgaagagcgcacgcgcgagcgcgcgcccgcgttctcctggcgggcttggtatttggcgcctgcgcgctg

SEQ ID NO: 319216 - DNA, 122 bp, Homo sapiens
gacggcgacagcacactttccctggtgatcttaggttctcataagcacacgggacaacaccgggtgacagagaaggaggtgtcctgtgaatggaactgcagccctcacccaaccatccttgg

SEQ ID NO: 319217 - DNA, 122 bp, Homo sapiens
acctcagcaatatacattggataatctgtccacataggtttagagaggatctaagggcaacgacctacaaaacaaatagtggttcagagggaaaggtggaagggctcatgtcagctgagagc

SEQ ID NO: 319218 - DNA, 122 bp, Homo sapiens
agaatcatcaaaaataaaaattgaggcatataacaaaaccagaaagtacattcataactccgtatgtcaaactagagagaggaaagtgaaaaagatgagaaaaaatattttgagaaaagttg

SEQ ID NO: 319219 - DNA, 122 bp, Homo sapiens
tcggatgtgaatggttttgctgataagcaacagcctccggaaccaaagcctcaaaatagtcgtctcccccgcccctcgcagaagcggcgagtggtatctgccaaacagatgacaaagtacct

SEQ ID NO: 319220 - DNA, 122 bp, Homo sapiens
gaagccaggagtccccgtctgtccctgggtcgcctgggcgctgctggcctgtagaggcgccgcttcgatgcccgggattccgcaagggtcaaccctgcgcgctcctgcctcctggtgttctg

SEQ ID NO: 319221 - DNA, 122 bp, Homo sapiens
cctgcccacgtcctggcatctgtcggtgtgatcttccgccggcgtgctcgcctcgacgtccgctcaaagtccagttgctggtcttcttccgctgatgtgttccactcgtagtccagcagcta

SEQ ID NO: 319222 - DNA, 122 bp, Homo sapiens
ggggtggcagagggatgggcaggaccatgcttgggctccctgttccaccgcctccaaagacgacatccccattccccatgagaatgtttcctatgaagccaggctggcccttgacctctgca

SEQ ID NO: 319223 - DNA, 122 bp, Homo sapiens
gctgagcccacgtccctccctgttcggggccttacttcctgctgggggcctcagtctctgcgcccaggccgtcctgtgcaaatctgcctgctgccagagccggaccccgagcgccttggggt

SEQ ID NO: 319224 - DNA, 122 bp, Homo sapiens
cacctgtcttccatagagtcttctcttctatacggggagttccttattgtgatctccatgcggtgatctctcagctccccctcctcaagggaatcccgcttggaatcccggtcatcagacta

SEQ ID NO: 319225 - DNA, 122 bp, Homo sapiens
gaatgggcggagcccagaggaattttatgacagggaagcgcctctgtgtgatgctgtcatcgtgggcacatgtgtggtgctgtcaccgtgggcacgtgtaatgctgtcaccgtgggcacatg

SEQ ID NO: 319226 - DNA, 122 bp, Homo sapiens
agcccctcggcctcgcttctatccttgccttgtgtgtttatgacgaaccctccgggcttgcgggcccagacgtgagagagctttccgctgaagatgacgggcctgctttccagggcggcttg

SEQ ID NO: 319227 - DNA, 122 bp, Homo sapiens
tcctccaccccagccagccccagatccaagggaacaggataaacgcccccagtccgatcccgccagcccgctcccacaattaagacaaaacgaaaaaacagcaatagaagcaaacacaaaaa

SEQ ID NO: 319228 - DNA, 122 bp, Homo sapiens
taagccttctcatgctttactccactagctcgccggtattcaccggggatttgtgggccccggacaggacaggatgagttgaagggggctgagtgtgtatgttccatgcaatattggaggca

SEQ ID NO: 319229 - DNA, 122 bp, Homo sapiens
tatttctcacacttaggtgtgcaggggccatgagtaaagcacagaaggcaaggcacgctgcgggagaattcagagggcgtccgtgtgggagctgtctaaacggtgtgacttttggatcttct

SEQ ID NO: 319230 - DNA, 122 bp, Homo sapiens
cgccccgaacgcagcagctccggatacagtaaggcaatcagctgcccagccattcaactccgccctccgctgctcgccgcagcgtcttttcctgctgaccgaagtgcgagccctgctgatcc

SEQ ID NO: 319231 - DNA, 122 bp, Homo sapiens
accgtcctcacgggacttctggatgaaggcctccacaccgctctcaccatagctgccctccgaggccactgtggacacatagttccacttgagggcacggacgatgtccaccatggcctggg

SEQ ID NO: 319232 - DNA, 122 bp, Homo sapiens
ggctgcaggaatcttcctccaaaagctaccgtcagaaggcaaactgacaaatgtccatgccgctggtccaagaaaccacagctaagagccatgaggcattcatttgtacattgagctctctc

SEQ ID NO: 319233 - DNA, 122 bp, Homo sapiens
acgagtgagaaagttaaagaaatacagagctaggtacctccaaaaccaggctggaaaatgcgtccccctcctcccttccctccctcccctccaaacccagggctctgccaaacaggaacctc

SEQ ID NO: 319234 - DNA, 122 bp, Homo sapiens
tcctgagctaccccgaccatcctaacagtttcagtggcaaaatctccccaagttgggccgcgcaaagctctccttgtcaagaacttttctgagagctggtgtcgtgcagcccgggaaacagg

SEQ ID NO: 319235 - DNA, 122 bp, Homo sapiens
tgcatgtgtgagaagagaggcgcaaagcagtgaaaggagtgatttggcatccagagggcccgggagccccacggataccccagggaagccactgactcacaccgctgcagaggctcctgggc

SEQ ID NO: 319236 - DNA, 122 bp, Homo sapiens
ttccagggccaagctttcttttctgatactgtttgtccctcgcgaggcaccgttgggtcgcgcagtaggcgtgactaggggcgggaagtggggcgggagcagggccgcggagcctgggctgc

SEQ ID NO: 319237 - DNA, 122 bp, Homo sapiens
ttgtgcctttgttttattccttgtatatgttcttttccttatccctctttgttcttccctcgtactttaaaaagaaaaaaaaaagataaactatcaagtttctaagtatgtgaagaaaggca

SEQ ID NO: 319238 - DNA, 122 bp, Homo sapiens
gaagtgtttagtttggaaagccagggccacctgctagtgggtgagtcatgggcacaggctcgcacctgccaccgcagacgccacacaggctgctgagcctttccaagcgaaatgccccacgt

SEQ ID NO: 319239 - DNA, 122 bp, Homo sapiens
ttctgcattaatctttctatctactcgacatgcgcagatcaggatgtgagcttcataccacgaatgtagtatgtgtatgtgcttgtcctttcttcatgtttctcctgagagccttacaaaca

SEQ ID NO: 319240 - DNA, 122 bp, Homo sapiens
tccttctggtgggtttgtgatctcgctggcttcattcaagagtgaagccgcagacctccgcggtgagcgttaggactcttaaggcggtgcgtctggtgttgtttgtccctcccatccggagt

SEQ ID NO: 319241 - DNA, 122 bp, Homo sapiens
gaggcttttccttctgcagggcatcctgaggcttctgtggggggacctgggtgtgtacggcgcggcagtgacctcggtgggccggggctgaggggactgggcgttaaaagggccagacttgg

SEQ ID NO: 319242 - DNA, 122 bp, Homo sapiens
catactaaacacacagaccagacaagctcctacgaaaagccaacgctccacgcccattttcgtcagggaatatgtacccatcggctttagataaataaggaaacagcaggctgaaccagaac

SEQ ID NO: 319243 - DNA, 122 bp, Homo sapiens
gccccgttaaacattgtttcccaagtccatgtgatcccaggtaaaagattcggtatcggccgggcgcggtggctcacacctgtaatcccagcactttgggaggccgaggcgggtggatcaca

SEQ ID NO: 319244 - DNA, 122 bp, Homo sapiens
cgaggactgcagcaaaacgcagccctgcgaccacaccaaggggctggaatgcaacttcggcgccagctccaccgctctgaaggggatctgcagaggtaagatgcttgtggtttggccccttt

SEQ ID NO: 319245 - DNA, 122 bp, Homo sapiens
ccaccgcggggcgggaagtgcggcatggggcggtaccgctcacagccagccggctcccgccgcggcttcccaccccgggcggggtcccacttgcccaaacgcccccgaacgcccccgtgcac

SEQ ID NO: 319246 - DNA, 122 bp, Homo sapiens
cagggctgtcctgggcatactgtaaagccccaggctttgtagcagggttttcttgtctgtcgtggaagaccccgatgtacaaaaacggggccgcagtgtggtgtgggagagccacagggact

SEQ ID NO: 319247 - DNA, 122 bp, Homo sapiens
gggaagtagaagacggtgatcccatcaaaggctacacggcctgggcgctcccggcgagcccgcttcaggatagacagggctagaaagcaggcaaagatgggctggggattagttttcagtga

SEQ ID NO: 319248 - DNA, 122 bp, Homo sapiens
gtagtagttcccgcctaggtgattgggccaacgcgcttcctcacgagggcttggttggtccggaggaggaggaggaccagggaggtacttccgccttaaatcgcgggtggttgctagggacg

SEQ ID NO: 319249 - DNA, 122 bp, Homo sapiens
caaggtgcctggaccagatggatctggtgggatggatgtgaacaactcgcaactcgacagcgaggattactgccgtcgggagaagacagattgagcttttctttcccaggaaatgaaaggga

SEQ ID NO: 319250 - DNA, 122 bp, Homo sapiens
gccctccatgtgtccttccttaacttttgtgccctggctccattttacagattcccacctcgggttgggagaggaccacggtggccaaaattcttagcttcttcctttccctcatgcagccc

SEQ ID NO: 319251 - DNA, 122 bp, Homo sapiens
ggtaggcgctcgcaggcggcgtggcgaagccaagagtggccaggaagccggctttcctcccgcgccgccactgccagcgccggtgttcacgctccgttcggggccaggccggctcggcttgc

SEQ ID NO: 319252 - DNA, 122 bp, Homo sapiens
tggagaaaagtctcccttgaatctgtgaatttcaggttttttcagagttggatcccagcccggagcagggaagagcgtgaggtaaaattgttcgagtcgtccagaaatgcacatttcctgca

SEQ ID NO: 319253 - DNA, 122 bp, Homo sapiens
cttagctcgtttttcttttttatattctcatctcctgcagtcgactttccacgcagcagtcggagtgacccttttaaacataagccagatcacgctgctgcgctgctcagaaccgtccgtgg

SEQ ID NO: 319254 - DNA, 122 bp, Homo sapiens
gccggaatccaggatggggtgtgaggggcaagcccctgcttcttggggccctggtccacacggaggcagggaataatgctaggtgccgaccacctgccaggcacagggctgagcattgtata

SEQ ID NO: 319255 - DNA, 122 bp, Homo sapiens
ctgtccacagctgctggccctggtgctaagcccctcactgcctggggccggtggggcagccggccgctccgagtgtggggcccgctgagcccacgcccacctggaactcgcgctgtcccgca

SEQ ID NO: 319256 - DNA, 122 bp, Homo sapiens
ctttctgacgcagatgaacaattaaggggaaaagcttcccttttccctctgtggcagttacgattttgacttcagtcctgagaaaaacttcaggttttgaaaatcagatgatgtcttctcct

SEQ ID NO: 319257 - DNA, 122 bp, Homo sapiens
ccctctttctgggtttacactgaagatatattattacaaaacaaatgatgaaatatgagacgtgttcaactggttgtttgggcaacatgacatccactggctagtgtggcccatctgcgaag

SEQ ID NO: 319258 - DNA, 122 bp, Homo sapiens
ctccccgcagcctctggccctccttccccctcccccagtcagggcgcacccttgcgcctgcgctgtgtgtgttcctggtctgcggcagccatgctgaactcgtatggagaggcgagtggggg

SEQ ID NO: 319259 - DNA, 122 bp, Homo sapiens
cacaaactgaacccttcaagcctttcctcatcagttttgtggttctgaatctaaaagctgcgtgtggcaaggttctccttacaggcaggtgttaataaaaggctctggggtctgaaaggtca

SEQ ID NO: 319260 - DNA, 122 bp, Homo sapiens
gagaatcctccctgaaaaatctgtgggaaaaccatggccgcaaagtctcaccaccccgcacggcaccataaaaatacacctagggtatttttcaacgtgaatgaatcagaagtggtccctgc

SEQ ID NO: 319261 - DNA, 122 bp, Homo sapiens
agttgtaagtaagcatcagtcagcctgcactttgacccacttccttgtaaccaacagtgacgtagcactaggtaacatttgcatccccgttgttcctatagatacaatttctgaccttagaa

SEQ ID NO: 319262 - DNA, 122 bp, Homo sapiens
ggaggggctgggggcgggtttcccgatgaaggggcggccatggcagctgcgcagaggcaacgcaggctgctacggagcgcgcgcccggctttgaatgagcggggctgggagtgagcgggcgg

SEQ ID NO: 319263 - DNA, 122 bp, Homo sapiens
cacatggcagggagctgtcgctgccagatcaatgattaggcatgaatcaggctgtggcctcgctgcgctcctgcagggctttcttttgaaactgggagcagggaaaggctcctcttgtaaag

SEQ ID NO: 319264 - DNA, 122 bp, Homo sapiens
ccactgctctctccaaccccagaacacacggcgctgtgagtgccacgcaggctacgtaggcgatggactgcagtgtctggaggagtcggaaccacctgtggaccgctgcttgggccagccac

SEQ ID NO: 319265 - DNA, 122 bp, Homo sapiens
tcttccagaagttgatttccgctaataacccacagtggatctatgaataccagagttgtacgtgattttccaagtgaataggcgccattgttttggttttaaataccctttccagtaatgac

SEQ ID NO: 319266 - DNA, 122 bp, Homo sapiens
ccttacctggagctgagtcaatttagagagctgcgtgaaatacaggggtagaggaagcagcggcaaaatccctctgggctcgctgggtcccctgccacgccatttctgcctggcctcacagg

SEQ ID NO: 319267 - DNA, 122 bp, Homo sapiens
cagagcctggctcccatgagcactcaacgacccttgaaaattgaccggaatcccggacagcgccgaggtagcgcggggaacgggagcgtgatctgctgccctctcctggcaatgtgaagcat

SEQ ID NO: 319268 - DNA, 122 bp, Homo sapiens
tgacctcgtgatccgcccgcctcggcctcccaaagtgctgggattacaggcgtgagccaccgcgcccggccggctaatttgttttgtatgctggggatgacatctagatgagcctttcatca

SEQ ID NO: 319269 - DNA, 122 bp, Homo sapiens
ggcagctccacctgcggcccctgtgcaagatccactaggtcggcagcttcactcccgagccggcgagaccatgaaccatcagaaggaacaaactccggacacactgcttttaagaaccgtaa

SEQ ID NO: 319270 - DNA, 122 bp, Homo sapiens
cctttactaggcgaccagccctgaaacagaagttggacattttttaaaggttcttgcgctcggcaaggggagcagatagatgctcaggagcgaaagacgcagagaattggatctggcgcctc

SEQ ID NO: 319271 - DNA, 122 bp, Homo sapiens
aatagagccaatgaaaggggtcaccagactcacactgacttctggggagcaagacctccacggttgccattgggtcggagatacagatctcgaggaagttctcgtcctgacagatctccagc

SEQ ID NO: 319272 - DNA, 122 bp, Homo sapiens
agactagaatcaatcaaattttctatgtaaattattttatgtgtggggagagagagcagccggggacaatcagattttaagagtggaaaggagaggtgaaaacctttaaacctttaacacaa

SEQ ID NO: 319273 - DNA, 122 bp, Homo sapiens
ccgcctcccacagcctggccaagagcctctagtgcgcctgtgcctgcccccatggcctgccgggagttggagttccactcccgcgtacaaaagctagccagaggccaaaagccaaggaggga

SEQ ID NO: 319274 - DNA, 122 bp, Homo sapiens
gctggcgggcagggcgattctcctgcaaatccagcaagtcaaaagagtcgctggacagcacgctgtcatcgctgatgacactggaagggcggctgtagctccgggagaggccctcggcaggg

SEQ ID NO: 319275 - DNA, 122 bp, Homo sapiens
tagataaatggggaattgtgatgtcatccatttcttaggtctgccatgagcattaaatgacgtagattatataaattgctaagcacacactgtctggcactttcagttatgcactaaatctt

SEQ ID NO: 319276 - DNA, 122 bp, Homo sapiens
tttgcccctggaatagggggtggggtgcggagggcaccgtctgaggctggtaagcctcggcgaaagaagcggcgggaacgggagtagggtcccgtgggtcccccgacgagggggtggcggcc

SEQ ID NO: 319277 - DNA, 122 bp, Homo sapiens
tctgagcattgtcacctatctccagaggctggcagcagcctgagggatcaaatatgcagccggctgggtggtcacctgaggacctctggccgggacctggggccacaatagacgtgggttca

SEQ ID NO: 319278 - DNA, 122 bp, Homo sapiens
gccgagccgtcgagagacaccgtgggcccgtacctgctggccctgagctccctgagcctgcgtgctcgttgctctgagcgcacacaaggattcgatggcagataaactactgccgcatgggg

SEQ ID NO: 319279 - DNA, 122 bp, Homo sapiens
ccagtgttgcctggctgcagcctctctgcccatagaactcagagcttactctggctttgccgagatggggctgccccagccagggctgtggctgaagaggctctgggtgctcttggaggtgg

SEQ ID NO: 319280 - DNA, 122 bp, Homo sapiens
ccacctcgctctgctgcttctgttctcccgtggccttcacgacgggctcgtggggctgggcgtgcacagcaacatgctctggtgcatctccaaatgccaggaagaagacaggaggacaggag

SEQ ID NO: 319281 - DNA, 122 bp, Homo sapiens
caggtgaccccacgctcaccaggtgcccagcggggctgcctgtcctcctgagggcaccggcgtcccccagtggatgctgagaggagctcctgttgtgcagctgcacgaaggggacacagatg

SEQ ID NO: 319282 - DNA, 122 bp, Homo sapiens
tttccctacaggtgatcttggggagagactgttcccaggcaaccctggagtctggctcagcgcacaaatctgtccagggcagatggccgggcccccgtgggcttggccttcgcctccttatg

SEQ ID NO: 319283 - DNA, 122 bp, Homo sapiens
cttacccgagttgtggcagacccacagactagccaagaaaccaagcagtggttactttgccgggttgggggggaggtaggggctatcaaacctcatgattggccgcacacaaaggtgtgagt

SEQ ID NO: 319284 - DNA, 122 bp, Homo sapiens
ggcccaacccatagagacctgggaggagcgggcgttctttcaggaggcgtttctgccccgcggtgtcccaagtcaccactccccccagggagtctctctgtggttcaccaagccccgcatcc

SEQ ID NO: 319285 - DNA, 122 bp, Homo sapiens
aatatttaagtcagcactggtatgacactggtatgatcaatggtgtcatttttctccaaccgactttgatttctccctgtcttcctcctccctttctctcccactccatgcactactgatga

SEQ ID NO: 319286 - DNA, 122 bp, Homo sapiens
gggctgcggggaatcgtggactctggaagcacagacagagatgggatgggaggatggccacgcaggaagagccttgcgtggcctgagaagccttcttcccggggtctcagccaggatgggga

SEQ ID NO: 319287 - DNA, 122 bp, Homo sapiens
attttaaattggcagttgctcagccaacagtcagtaatctcagttagcaagtgtttggcacgcctgttttaacctgcacaggttcagttcacacaaagaaagggagggttgggttatgtgat

SEQ ID NO: 319288 - DNA, 122 bp, Homo sapiens
ctgtggagtcgggtagagtagaccaagtgcaacaggcacctggctgcagccaggaaggaccgcacgccctttcgcgcaggagagtggaaggagggagctgtttgccagcaccgaggtcttgc

SEQ ID NO: 319289 - DNA, 122 bp, Homo sapiens
agggcagagctgggtgaagggtggtgttagtgctcgagggtcacgcgcgggtggctttgccgcggtggtggcagcggtggcagaggcgacaccgctggaggcggcggagggacgggcccacc

SEQ ID NO: 319290 - DNA, 122 bp, Homo sapiens
caaaggcagagagggaggacggcaccgagcggctccctctgaccaggactgaggatgatgcgacctgataccgccggagggaagcctgggcccggtttgtaaggggcctttattctgcagac

SEQ ID NO: 319291 - DNA, 122 bp, Homo sapiens
ttgggacgcatggagcccgtgctgtacgaaacagtcgtagaaaactacaaacaggctacacgagggggaggcctcgagctgcaaagtggtggctgtggaccacgttaaaccgtctctacccg

SEQ ID NO: 319292 - DNA, 122 bp, Homo sapiens
atcttaacgcagacatcttccagctgcaaccgctcaatggggctgaggtcataggtggaccggggtgtgctggccagccagctgtagtccacaccggtgcagacctttctgaccgcattgct

SEQ ID NO: 319293 - DNA, 122 bp, Homo sapiens
ctcaaactcctgaccttgtgatccacccgcctcggcctcccaaagtgctgggattacaggcgtaagccaccgcgcccggcaaaacaactattaaattcgcaattagtggagacccttcaact

SEQ ID NO: 319294 - DNA, 122 bp, Homo sapiens
tccgcactcacaaatgcacacaagcgtgtggacacctgggcgtgtgtgtcagcagggaatcgcttgttttgacaataataggatccccaccacacattcctccgcagctgtttactaaccgt

SEQ ID NO: 319295 - DNA, 122 bp, Homo sapiens
aaaagtccagacccacagacgcattcattagggggatcccgggggcaaaagaaagagtcacgaaacctaggctatggttccaatgatgccactcagtaccttgggccttcggggctcattaa

SEQ ID NO: 319296 - DNA, 122 bp, Homo sapiens
agctaagcaaacacatctgctttcggagttgggccttcgttaattagctgaacaaagggccgttttgctttttaccttttgctggggagagtgtgttatttcaggagtgttgcgggccctcc

SEQ ID NO: 319297 - DNA, 122 bp, Homo sapiens
tctgtttagagaaaagaggaagcagtgtgggatcctgaaatgactgaaacaatcttaaatcgactgaaaatattttggtgcttgagataaatttatgtttgagaaaccacctagaaacattg

SEQ ID NO: 319298 - DNA, 122 bp, Homo sapiens
catagggaacagtggagatcggcagaatttaagccctgcttcatctccttatctccagctcgttactacactataccacacaaaaacgcaggcagaatggtttggtgctcttttttgcaaag

SEQ ID NO: 319299 - DNA, 122 bp, Homo sapiens
tttcattattgatagttaagtgaagtttcctttttacaactcactattagtcatgcatgccgggaagcaatccctatgttggtggagatgcgtcaaacgtgcggcctcacgcacagatgaat

SEQ ID NO: 319300 - DNA, 122 bp, Homo sapiens
cgagcccgcactcctcagcccttgggcggtcaatggggcgcggcgctgtgaagcagggggcggcgcctgtcagggaggctccggcggcgccggagggagtgggggtttgctcaggcatgccg

SEQ ID NO: 319301 - DNA, 122 bp, Homo sapiens
ccctctgcccacagtagtgtttgatcgtggcactcttgccataattggaaattatcaattcgacaaaacttaaaacactgttgtttaatgtttttgcttgaacacttcttaagtaagttttt

SEQ ID NO: 319302 - DNA, 122 bp, Homo sapiens
catccccgcaggcatcagcaacatggctgtcggggacatgagctccatgctcaccagcctcgccgaggagagcaagttcctgaacatgatgacctagaggcccgagcgcctggtgctgagtg

SEQ ID NO: 319303 - DNA, 122 bp, Homo sapiens
tgtgaaaaatctgtggagtctatgcccagaagcagccgaggctgcgcaccttactacacacggaccagggaggctgctcttctgaaacttccgtatttattcccggggacaaaagccttttt

SEQ ID NO: 319304 - DNA, 122 bp, Homo sapiens
ttagagtctgggcgtggacgcgcccctcataggggtcattggggcatagaggcatagagccggcttctccagcttgggtgagcgtcctttccaggcggccgcagacgcgccatcctaggggt

SEQ ID NO: 319305 - DNA, 122 bp, Homo sapiens
aatgtgaattagctacttgtaccccccgcgagccgggggtggcgggcggggacgtctgctcgtcagagtcattcaatgaagatatagccgtgttcgccaaacaggtcagcaaaatagatgtt

SEQ ID NO: 319306 - DNA, 122 bp, Homo sapiens
gtagtgcagtggtgtaatcacagctcactatgaggcaggagaacagggaatcagggtaaccgggggttaagacataagcaaatgaaggggtgcagccagttctaggcagcatacaggccaca

SEQ ID NO: 319307 - DNA, 122 bp, Homo sapiens
tttaatttcagataaattataaatacttttttcatagaagtatgtcccaaatattacttacgtgagaaaagcatttatggtttatctgaaatttgaatttaacttggtttctcctattgcca

SEQ ID NO: 319308 - DNA, 122 bp, Homo sapiens
atcctggggcactctggacactgagctccggaccccgtgcaggcggtagtcgcctctgcgcggagtaggagctttgtgggcctcccacccagcatcaggagaatcagggcccacgtggcggg

SEQ ID NO: 319309 - DNA, 122 bp, Homo sapiens
ccctccaccccacccccgccccctccgcgcaccagcccgcgggggtcccagcggggacagcgctgcccaccttacctgccacattttttacaggggaaagtgttctcctgattctgggtctt

SEQ ID NO: 319310 - DNA, 122 bp, Homo sapiens
aaggaaagtcaatgtttctgtaatgcagacttgagtaggtgcatccaggacaggctggtgcggtagtgtggtggcggtggggtgctcagtgatggtgtctgggttcaatcccagctctaaca

SEQ ID NO: 319311 - DNA, 122 bp, Homo sapiens
cagctttccagaccaagttttaggggatcttgcccatatgcgttgcggcttctgcggctccggctgaatttcttctaaaagataggagatccacgctcaggtttattggcgtgtgctccctg

SEQ ID NO: 319312 - DNA, 122 bp, Homo sapiens
caaagtcacgagcgagactggcgttttaaaccagcatgttagaaaagcggctttgggaagcgatcatttctttcacttttaatccaacatcggcagcacccgaagtggtccccgctcccccg

SEQ ID NO: 319313 - DNA, 122 bp, Homo sapiens
cactcccagcaaaacacaaggattttagggcacactaagagccacagagagcaccgctcccgccccacaggtacaggaccccaaaggcacttagatctcccgtttccgccaccgacttgttg

SEQ ID NO: 319314 - DNA, 122 bp, Homo sapiens
ggtggttcccatcctaaattagaatctccccagtttgcgtttcagagcccttttcatcgccgtggtgagatgatgtgtgctctctcagagcactttgtggtctgttacagcattgcacagat

SEQ ID NO: 319315 - DNA, 122 bp, Homo sapiens
gaggctgaggcaggagaatcgcgtgagccctggagcttgagagcagccctggcaacatagcgagactaaataaataaataaatattagctgggtgtcgcaccacatgcctgtagtcccagct

SEQ ID NO: 319316 - DNA, 122 bp, Homo sapiens
aacttcccaaccaacaggcactggggagagaatgatgaacgtggtgcgggagctgggcgccgggttgtgtacacagcctgtatcggtttgaactaacgaagtttattaaccaggcaacccag

SEQ ID NO: 319317 - DNA, 122 bp, Homo sapiens
tgcccattttccagaaacagccctttcctcagttctacatgtttaacttggatctacctccgtgctacaacaactcccactccctggctctaagttggatcactcaaaacaccaagttgaac

SEQ ID NO: 319318 - DNA, 122 bp, Homo sapiens
cgccatcgctaccattttccgcaggtttctggctgcctagaaggacccctaagctaggggcgtccactccagagcctgatccaaaacagaacgctaacggccgttgcccttacatctctcat

SEQ ID NO: 319319 - DNA, 122 bp, Homo sapiens
gtgacgtcacacagggcctctcgaagtgggcttgtgaatggctagattgggaagcaccggcggggtgtcgggaagggtggtgacgcaacatagagactccgcccccttccttggagcgccgc

SEQ ID NO: 319320 - DNA, 122 bp, Homo sapiens
agcacagccctggagggaacgggaaaagcagcccaagaaattccccttcccccaaccacgcgctctggcctgtttccacaggatgagcccacacatagcatatggggaaactgcgaccccag

SEQ ID NO: 319321 - DNA, 122 bp, Homo sapiens
gacgtgctgctgcgggtgagacgggaggagggtagtcacgggcttagggctggaggctggcgggctagggctgagtgcagcgcctgcttagagaccttcgggagaacttctgccggaacccc

SEQ ID NO: 319322 - DNA, 122 bp, Homo sapiens
ttcgggccacagggcggtgctagcttgacacagtcagcatgcttcccagagggagcaggccggaaccacagggccagagggagctggaacccgaggggccggggaagctgccagcccagaac

SEQ ID NO: 319323 - DNA, 122 bp, Homo sapiens
agtaactcgcttgggatcacacagcgggcaggggacagagtagagttcggggtcgcgccgcgcggctccagtttccgtgccttccgctgcagccgacctggcggaactgtgcgggcagacgt

SEQ ID NO: 319324 - DNA, 122 bp, Homo sapiens
agctgattgagggagggcaaggggatcaggaatccattctctcaacagatagcccttcagcgatttttctgagccaccctcggaatcgcagctgccagcagcagatgtggatgtaatacagt

SEQ ID NO: 319325 - DNA, 122 bp, Homo sapiens
cggcgccggggaaggggccgttactttcccagagcggcggggcgacgtcaggcggaagggcgcggggcgcgcacgctttaaatggcattcgctgtcatccgagctcagagccgtgtgggcag

SEQ ID NO: 319326 - DNA, 122 bp, Homo sapiens
acgcttccgaaaccgccccatttattcacttctcaagtggcccccgcttggatgcgccctcgggagagtgggctcagcacagcctagagcaccaggtctgaggtatctgcaaccacgtggga

SEQ ID NO: 319327 - DNA, 122 bp, Homo sapiens
tattggacatctctactcacatgtcttacaggcacctcaaactcagcatgaactcatctccgtagcccctaaatcggtttctccttgggaaggtaaatggctcagtaaatgacaccagcatt

SEQ ID NO: 319328 - DNA, 122 bp, Homo sapiens
ctcaatttccacttaacagtatgataaagcaagcataatcttagtttcagctctgccgtacgatagcttactgggctttaacaagtgtctggacctaagtttcttcatttgtttactgagag

SEQ ID NO: 319329 - DNA, 122 bp, Homo sapiens
gatgccgcgctctgtgggcgcctctgctcctcgctggttttcatgcagccacactgggtacgcgacatggggctgacatgtcactggaaatcgcctgtgagtcattaagaggtgggagaggc

SEQ ID NO: 319330 - DNA, 122 bp, Homo sapiens
ggccgccccctccccgccctgcgcgccataaggcactcgcacgtctccagtccacagctgcgttaaggcggggagggggtagacaaaaaggatcttgttttcaaaagtctcactcaggtttg

SEQ ID NO: 319331 - DNA, 122 bp, Homo sapiens
gtctggggtcacacagcttgtaaacggcagagctgggactcaaacccagtctgtatgttccgaaacctgtgctctgttcacttcccccaggctgcctggcaaaataaataaaaagcacctgt

SEQ ID NO: 319332 - DNA, 122 bp, Homo sapiens
aatatggtagagaataaaacaggtaccaactatggttttgccctcattgagtttataatccggtgagctctagaatctatactactatactggtggttttaaaattggttacatgaagtact

SEQ ID NO: 319333 - DNA, 122 bp, Homo sapiens
tcagtgcttcctgtttccttcaggataaacgccagatgccttccttgatctggcctctctcgcctctgtttgctcaccttctcctttgctcggtagactctaacctttgcacttgctcccca

SEQ ID NO: 319334 - DNA, 122 bp, Homo sapiens
tgtgtaccgtgtgggccacaagggcaaggtggacctcaagtgtgtgggcgaggcagcgggcggcttctactacaaggaccacctcccaaggctcggtatgaggctgtcacactgactccatc

SEQ ID NO: 319335 - DNA, 122 bp, Homo sapiens
cctcgctctgactcctattgcggtgggatgtggtctctgagtctccgtttaccgattttacggaatggaacttataatgaacactagccaacacaagcagaggtttgccttgagtgacttct

SEQ ID NO: 319336 - DNA, 122 bp, Homo sapiens
gatggcctcctgctccctcagaagcctggctgagtggcattgccagtcctccagccgggccgtggagaacacgtgtgtgctgaggagccggccagtgctggacgtgagtgccaagagggaag

SEQ ID NO: 319337 - DNA, 122 bp, Homo sapiens
aagcgagctccctccctgcgtcttgctctttgggtatttgcatttcagccaaatttgctccgaattgctagagggggtaccgttgtcttcctcactcaatgggctgtccctgctcctttgtc

SEQ ID NO: 319338 - DNA, 122 bp, Homo sapiens
cgggcccgcccccgcgttcttcccacctcccgattggcaggccccgaaccggcacgcccccgtgagcccgccctcgaaatcactcttaaagggtccgctcctggctcgcgactccccagttc

SEQ ID NO: 319339 - DNA, 122 bp, Homo sapiens
aaggcagcgcgcgcacgtccgcagggccggcgcggcaacgggctgagcgcgcaggcgcggcgctctggcgcgcccagggacacagtccggctggaaacaagctccccccaatttcagggccg

SEQ ID NO: 319340 - DNA, 122 bp, Homo sapiens
ccactggggtgagagggatagagtgaagctcagagtaactaaggctcaagcatcatttaacgcctgactgtcataggcacttactaaacatgtgctgttctgttttccagttgtccaggctg

SEQ ID NO: 319341 - DNA, 122 bp, Homo sapiens
agccttgtggaatttcgaaaatgtgcgccagggcgacacctcttgatggtaagaagacgccggcggaggggagcgtgcagtgcggtcctcccgcgggcagggggcagtgcggcaaggcgccc

SEQ ID NO: 319342 - DNA, 122 bp, Homo sapiens
ccccagtgcatatcagcagctctccctcaggctccagcccctccctccacattcatctcccgtccctgatctggaggcttcactctgtacttgccaccccgactgtggcctcctcagctgtg

SEQ ID NO: 319343 - DNA, 122 bp, Homo sapiens
gcgccattacctacatgaaaccagcaccgccggtcaccaggacccgcttcgcaaagccgccgggaagaccccacggttcctcccaacacgccgccgacatctcccagctcagcagtgcctag

SEQ ID NO: 319344 - DNA, 122 bp, Homo sapiens
gtggcctagcaattcctttcctagttatatacccaagaaaattgaaaacatatggccacacgaaatcttatatacaaatgttcatagcagcattactcataatagccaaaattggaagtatt

SEQ ID NO: 319345 - DNA, 122 bp, Homo sapiens
cctcgggcttgctggtcaccgtgaggcaggggaccagggcttcgagggcctccgctgccacgctgtgaccagctctggccccgcacctggccctggacatcctggcctccttcagctcctct

SEQ ID NO: 319346 - DNA, 122 bp, Homo sapiens
atcttcataagcgcccccaaaagaaaccctgtactcattagcagtgaatctccatttcctcgcaatcctcctcccagtcctaggcaagtactcatctactttctctctctcaaacagatttg

SEQ ID NO: 319347 - DNA, 122 bp, Homo sapiens
atttcctgcctgccagacccctcccctccgcccgcccggctcatcccttcagaaggccctcgtggctgcccacctttctcgccaatcgtgggggcctcacctcccgggacagtcccgaggca

SEQ ID NO: 319348 - DNA, 122 bp, Homo sapiens
gaggtccagaggaagtgtgtggacagcgcggccttcctggccggtgagtcggccccgggtcgtggccggtgaggggaccctgagcttcacctgggctagcgcggggagtgacaggtgcgcga

SEQ ID NO: 319349 - DNA, 122 bp, Homo sapiens
gcggggcaattgaaaaagagccggcgaggagttccccgaaacttgttggaactccgggctcgcgcggaggccaggagctgagcggcggcggctgccggacgatgggagcgtgagcaggacgg

SEQ ID NO: 319350 - DNA, 122 bp, Homo sapiens
ggcccctgggctgggggagggagcaggagctttggaccccagccccccagctttggttcccgctgggaattcaggccctgtcaggctgtaggtcctctcgggagccctctgcctgccctact

SEQ ID NO: 319351 - DNA, 122 bp, Homo sapiens
ctagctggggcaagtgatggcttggaggtggggccgccagtgactcaccctcgagaccaacgcagaggcccaagatgacagcaggacatgccgaaccctaacggaagtgatccagatttgcc

SEQ ID NO: 319352 - DNA, 122 bp, Homo sapiens
gagcgacgcagcttgagggaagcatccctagctgttggcgcagaggggcgaggctgaagccgagtggcccgaggtgtctgaggggctggggcaaaggtgaaagaggtgtgtgtgtgtgtgag

SEQ ID NO: 319353 - DNA, 122 bp, Homo sapiens
tggctgggcccttttgtctgggctgcgttgctccccctttgtgtccgtgcatggagtctccgccacgggggagcctgttcccccggtccccaacagggactgctccctggggatccggttac

SEQ ID NO: 319354 - DNA, 122 bp, Homo sapiens
taatctaaaaccgctccttgctgggccaatctgggcaaaggctctccaacttgcccaaaacgtatcatccaccctgctgttcggaccttcccagcccatttctgtcaccttccagatgatgg

SEQ ID NO: 319355 - DNA, 122 bp, Homo sapiens
gatgaggacactgaggctgctgtggaattaagaccagcgacagagtttgacattgagaagcgttggtcctcagtgagtactgccttagaggaaggcaggagaacatgccccagagagggacc

SEQ ID NO: 319356 - DNA, 122 bp, Homo sapiens
ctagggggcacccagctcgctctccccacccaggccgggggaatccaaagcgttttaaatcgctcccagctcgcaagtcgcctgcattcgctcagcacggccgtcttgacgcaagagacgca

SEQ ID NO: 319357 - DNA, 122 bp, Homo sapiens
gaagggcaaggacatgccgtcggggcctaggctgggctctgggtgctcgcatcagccacccgccctcagctgtagccttcgcgtcagccagctgccctctgctgtagccttgggtgagtgtc

SEQ ID NO: 319358 - DNA, 122 bp, Homo sapiens
ctcctcccaaaaactcttctccatcagcagctccagttcgttcagctgctccatcctggacgcggggatcgcaaactgtagacagaaaagacagcggaaccgggggtaacacagaaagctta

SEQ ID NO: 319359 - DNA, 122 bp, Homo sapiens
tccactggcgtgcgtcgtctctatggttcccgccggaaggacgcgtctgcgtctctgcggcgagcgcggttgctatgacgcccaggtctccgtaggcacctgcagctagcagctgagcgcgt

SEQ ID NO: 319360 - DNA, 122 bp, Homo sapiens
cttctcagcactagttgtccagtaataagacagtatattccttgttgtctcacattttcacggtgataatttacagttctgactgacaggacaggcaaagggagtatagatcacaagaaacg

SEQ ID NO: 319361 - DNA, 122 bp, Homo sapiens
tcagggacggccggggccggggctgcggcgggccggccagggcggtgctcctgggcctgtcgctggttggcctcttactgtacctcgtgccggctgcggctgcactggcctggctgaccgtg

SEQ ID NO: 319362 - DNA, 122 bp, Homo sapiens
ttcattgactcattcattcattcactcactcattcattcactcagtgaatgttgcagtcacgatccaaatatttatggcctctgtgtgccaggcactagctggaggggctggggctagagcc

SEQ ID NO: 319363 - DNA, 122 bp, Homo sapiens
cccgagggggtcctggcccaggggttttctgaagccagtattttctcctctgtcttaggacggaggctgcccagggagtgctcggacagcggccggtaaaagcttccaccacctgtggcccc

SEQ ID NO: 319364 - DNA, 122 bp, Homo sapiens
aatgtagcaggcaccattaagagtcactcacatgcgttaatatgtgtaggcgcatagaaccgtgcctggcccagagcgaggctgttttatatttgctctccttatccttatggatcctatga

SEQ ID NO: 319365 - DNA, 122 bp, Homo sapiens
ggcccgtgggaggagtaaaggcggccctggctggcaggccgagggtgtgacgcgccggcccgccctcctcgcgcagcctccggctaggcggcgaggccgcaggccgcgcccgctccttcagc

SEQ ID NO: 319366 - DNA, 122 bp, Homo sapiens
agcatggaaggtactgtgagtacacagtcagatcggcacaggaaatgagcacctttgaggcgtccactctgtaggggctcgtcaacagtagactggggttcaggagacctgggttctctccc

SEQ ID NO: 319367 - DNA, 122 bp, Homo sapiens
gtgggttggagcacaccaaggtgacagtgccaggctgcacatcaccctggcctgagtcggcgatggtaactgtggcggtgggctgttctgtagtcggggaggccagaatggacacagggagg

SEQ ID NO: 319368 - DNA, 122 bp, Homo sapiens
ggaaggaaagcttcacagccagaagaatctgcacagacaggccttgagggtttccagcctcgatctgttaccattagatcataccctctgtccaatcacatttctatacagttatccgtttt

SEQ ID NO: 319369 - DNA, 122 bp, Homo sapiens
gcagccgctggaccacgaggagctagagctgctgcagtttcaggtgaccgctcgcgatgccggcgtgccacctctgggcagcaacgtgacgctgcaggtgttcgtgctggacgaaaacgaca

SEQ ID NO: 319370 - DNA, 122 bp, Homo sapiens
tagcatctcttcaaggcgccgctggtgccgccgggcagcccggtggtcagtgcgcttttccgccagctcagctgcatcgagaacatccacagggcctgtgtggggcttccgccacagaacca

SEQ ID NO: 319371 - DNA, 122 bp, Homo sapiens
ggtctttattttccctttgtccttgagaactgttctcactggttgacagctgctttctctcggcaccttaaagatatgctttctctttctccttccgctgctgctgttgagaagtcagcttc

SEQ ID NO: 319372 - DNA, 122 bp, Homo sapiens
ctctccctgcgcccagcctctccccagcatgtaaagtcttctgtctctcctcggagttggcggaggcggcaactttccattctcgccgccgggggccgggcagcagcgggcgcgcgggtcag

SEQ ID NO: 319373 - DNA, 122 bp, Homo sapiens
ctcgcctgcctgagacgcagccccctggtgaagagcggtccccgaccagggctgtgttgccggaccggcacccactccattaccagcgtctgacctttgtgttcctccgacttcactctcga

SEQ ID NO: 319374 - DNA, 122 bp, Homo sapiens
attcccgtctttaccaaaaaaaaaaaaaaaaaaaaattaaattagccgggcgtggtggcgcgcttctgtggaccctcctactcaggaggcttaggcaggaggacggcttgagcccaggaggt

SEQ ID NO: 319375 - DNA, 122 bp, Homo sapiens
cctcagactccaggcctgggagagggtccaggacatgccaagttctcactttggtctgggcgcagccaggcttcaagtcctgatctccttcctccaaacacagcccttccccgagggcacct

SEQ ID NO: 319376 - DNA, 122 bp, Homo sapiens
tgccaaaaggtcagtatccttcggtaccagtcacagtgcagatacttccgtgcctgttaccgccttccacccgtgaacggtcctgtgagctggaagaagggctagcgtcagaatcttcattt

SEQ ID NO: 319377 - DNA, 122 bp, Homo sapiens
gtacgtgaaaggtgcctagggttttgagctcttagatgaaatgacaagcatcagatagaacgtttctgttttttatgttttacggtacttttaggcttctcaaacaaaataaaataagctac

SEQ ID NO: 319378 - DNA, 122 bp, Homo sapiens
cccgtgagctggagacaggaggccggtgacagcagaacagcgtggtcccaggctcaccgccgacaccacatccgaggagacaccgaggtgctccgtggaccctctgcctcccccgtggaccg

SEQ ID NO: 319379 - DNA, 122 bp, Homo sapiens
caccgtgctctccaccacaggtagggtatcctgcgcgccccctggccgccccggccacctcgcccacaacccacacaccccggccccggcgccccgggcccctctaaccctcccaccccacc

SEQ ID NO: 319380 - DNA, 122 bp, Homo sapiens
gagagggaagggatggggagtcaagacaggagaacgctctcgatttcccgacccacctcccgtcatatctcatgtcatatctaccgggtgttctacccggtcctgttactttttttcttccg

SEQ ID NO: 319381 - DNA, 122 bp, Homo sapiens
tgctgggcatgaagatgggacacgatgatggggtggatctgggcataatgactctgggcacgatgacgctgagcacagtgacgctgggcacgatgacggtggatctaggtatgacgatgctg

SEQ ID NO: 319382 - DNA, 122 bp, Homo sapiens
gcactgttctaagagctcaaagtcctagcctgggagagtgtggacccaaggaagtgtggccgggctggtggggcctccccgaaggcctgcttctccttcaccctcacagagtcagccccact

SEQ ID NO: 319383 - DNA, 122 bp, Homo sapiens
gcacaggcatggtgagggggagaggaaggagctgtctgtaacactgcttaacctctggcacgtggagtctgattgcctgggtcagctgctatctgtgtcttgtttagcatcctttctcctgt

SEQ ID NO: 319384 - DNA, 122 bp, Homo sapiens
tacattttacatgtgaaaggagtgggtagcgaaacagtgaattatgcatagtgctcagtgcgtctgcatttttgcataagataaagtaaacatagaggaggtgctcaaatatgcattcctct

SEQ ID NO: 319385 - DNA, 122 bp, Homo sapiens
tctgcatcccggatgtctcatgggtgcctatggggctcgccatcacctgctgagtgaaggcggtgtggatggaagatgagcgagccagcatggacagccggtggtctgtggggactgaggaa

SEQ ID NO: 319386 - DNA, 122 bp, Homo sapiens
tgggagttgtagtttgctcgccccggcgttgtccgcgcgtcacctccccagccctacgcgcgtgtccatcccgagcccgcgaagcgagaaccgccagaggctttcctccgagcggaagaagc

SEQ ID NO: 319387 - DNA, 122 bp, Homo sapiens
cattttaatgatgttaagtgtataattcagtggcattaagtacattcactgctatcaccacgatccattttcagaatttttttttgagacggagtctcgctgtgtcgcccaggttggagtgc

SEQ ID NO: 319388 - DNA, 122 bp, Homo sapiens
gcagagggattcccgaggtttgcggagcggatcggtaagggtgagccccgaacctgtcttcgctcagttccatagtcgacagcctccttacctactgcaagtgtccagaaaaacccgtttag

SEQ ID NO: 319389 - DNA, 122 bp, Homo sapiens
gcaacctagtggcaggatgaagtctcctgactcctggtctagcattctttccaataatcccgggctgtgataattaaagtaaatcagcctggcagttttcctagcatctagaattcctggac

SEQ ID NO: 319390 - DNA, 122 bp, Homo sapiens
aggacacagccattcacgccccctgccaggaaaagctgcagctgacacaggctcctacagcgtcggcgggccacgtgcgggaggaggggccgccttctggttggcgcccggtgtccgttcct

SEQ ID NO: 319391 - DNA, 122 bp, Homo sapiens
ggcggggcggcgcgggggtggcggggggcgcggcggggcggcaatctcggccccgcggagcgctgcccttttatggaaatgaaggacccggctcaggaattgaatccaacatccgggctcta

SEQ ID NO: 319392 - DNA, 122 bp, Homo sapiens
cagactctccatttcatgcctggttaatccccaggaaccacttttgacaggggaatcctacgtttctctctactgagctgtagaggctgctgcccatgggcattttcagcagagacctcagt

SEQ ID NO: 319393 - DNA, 122 bp, Homo sapiens
tattaaacgcagtgcttccgctcacccttgaactgtgtttctggagggggcaggctgggtcgctgtgcttggcgggcttttctgtggcggaagaggcggaaggaaggggtcttcctccaccc

SEQ ID NO: 319394 - DNA, 122 bp, Homo sapiens
ccccgtcccctgcccagccaggaggaaatcccccgctccggtgggtttcgttggtgtgatcgtggtgcgttcatgctgcataatcggcttccttgagtaaactgagacacgccgatgaccaa

SEQ ID NO: 319395 - DNA, 122 bp, Homo sapiens
ctaactcccagcctcaggtgatatgcatgtcttggactcccaaagtgctgggactacaggcgggggccactgcgctggccctcagttctttcaggaagtcccaaaacctgtgaaattaacca

SEQ ID NO: 319396 - DNA, 122 bp, Homo sapiens
gtctcggcgattggctgtgacgcagtttccggcgtgagcggcgaaagccgggagggcgagcgagagagcaagcaggcagcaggctgccggcgggcgggcggacggcacagagggagggagcg

SEQ ID NO: 319397 - DNA, 122 bp, Homo sapiens
ccaactttgaatatgcctcatttacactgatcaaccaaaagcctcctggaaatggtaacacggcctatttatcctgggctttactgggagggtgggggatgaagagggtttataggaattaa

SEQ ID NO: 319398 - DNA, 122 bp, Homo sapiens
ttcaggataaaagagccttatcaccaattttccctgcctgagaaaggctgtatgggcagacgcttgggcctgaagtcagaagatgctgactgtagtccttaccagtcaccagttaactcacc

SEQ ID NO: 319399 - DNA, 122 bp, Homo sapiens
agggaggccgcggcgctgccaaggcaaacaaaggctcattgctgccgcggaacatgcctgcgcctttcagggccgggttcgcagagcgcgccgcctccagcccgcgccgaggtaacacctgg

SEQ ID NO: 319400 - DNA, 122 bp, Homo sapiens
cctcccgggctgggtacgccccggctgacttccctccttggcccctccctctcctcactccgctggtccaagcagtctcctggagtccctcaacttaatctcggccgattctcagacctcct

SEQ ID NO: 319401 - DNA, 122 bp, Homo sapiens
gctggggcgggggtggctgaaagttttgagcggtgatccaggctcctccctccggctcggcgaagcagggaaggggagagaagcaggagtcgggagactgcacaggccagaaagtctgcgga

SEQ ID NO: 319402 - DNA, 122 bp, Homo sapiens
gaagggagccacgagcgacgtttatgctgagaagcggcatccgtgcacctcacctccgcccgtccacgccgacctgcagcactccccaagcaactccgccagcaagctgccagatccacaag

SEQ ID NO: 319403 - DNA, 122 bp, Homo sapiens
cggcttttgagcggagtgcctgtgtttatcgcggaagtcccccacaagcaaaaacggggccgcagggtggcgtgttgcatggcagggactcaggggtacatggaggcaggaagagctgagaa

SEQ ID NO: 319404 - DNA, 122 bp, Homo sapiens
tgtttctctgctttctaagccattcacctgagaagaaaatcactccataaactatgcagacgtactgtctttgcgttttcttcctgactacttgttccaaactctgagtcagatctaaagtc

SEQ ID NO: 319405 - DNA, 122 bp, Homo sapiens
cccacgccggccggctgatgtcaaactgcagctcggctggtgtagctcttaaagggcccgcgggcgccgggggccgaggccgcccgcggggcgaggagggagaggctgcttccttgcccgcc

SEQ ID NO: 319406 - DNA, 122 bp, Homo sapiens
ataccacacagcaggtcaatgttccagatctgaacctaggggctctgatctgaacctatgcgttgtgagtgcactgtaaggagctccggaaacgtgatgtggggctctacattatctttatc

SEQ ID NO: 319407 - DNA, 122 bp, Homo sapiens
tcatgaaggtccttgtaggactgtcatgaggactgtgatgaggactgcattctgcaagtacgatgggtagcctttgggtagttttaaataggggagggacataattcaatttatatttttaa

SEQ ID NO: 319408 - DNA, 122 bp, Homo sapiens
aaatgtttccagagagctagcagaatttgttttcagcgttagatccctctgctaaacaaacgggtgctaatagaatcactttgctaaataaatgggagctaacaggattgaatatgagttcc

SEQ ID NO: 319409 - DNA, 122 bp, Homo sapiens
agaaaagaacaaccccatgaaaacatccctggggttttaacaaaggaatccctgacaaaacgtgactgataactaggacagaactgaaaagtggaagtaaagtcaatcccgaccccccagga

SEQ ID NO: 319410 - DNA, 122 bp, Homo sapiens
gatggattcgggcaaacctgtccctattataaccacatcaaactctgtgggaagattgtccgccattttaggaagtaacagcgtctggtgacaactgctgatgaaagaaatgaggtgtgatt

SEQ ID NO: 319411 - DNA, 122 bp, Homo sapiens
agggtcaggtctgcagcagcagcagcgtctgaccgacagcccaactcccacctgagcggacgtggccccacagcagaggactgctcggtctccttgtgtgcagtcctggctgctcgggatca

SEQ ID NO: 319412 - DNA, 122 bp, Homo sapiens
ttcgaggcctccagggctgggcccaagcacccgtcgacggcaccctgggcccagagcactcgcgggcctcatctccaatgattcagaactcacattcgtcactgctgcaaccccaagatgtc

SEQ ID NO: 319413 - DNA, 122 bp, Homo sapiens
actgcccgcccagcctttgggtcaggtggcccccaactgacgactgacgtgggggcagcccgccctggcccccagcccccccaaagggcggggcttgggctgaatggaggtgtgtgtgccct

SEQ ID NO: 319414 - DNA, 122 bp, Homo sapiens
ctctttgaagagctcttttgtctttcaatgactctttcctgtttgagccacatcacccttcgttgtatgaaggcttaagtggcttccgtggtgagaatcttactctgtgtcataccctaatt

SEQ ID NO: 319415 - DNA, 122 bp, Homo sapiens
tgcgagatacgggcagcacgggaggctcgcccagcttctgggcggcgtgcacaatggagccggcatccacatcagccccgtagcgcatctccaggatggtcttcttgacgttgacagacttc

SEQ ID NO: 319416 - DNA, 122 bp, Homo sapiens
agatggttgctggggggccttcgaattttatttttggtttacaagccttcccatcagctgcgccagggtcagcaaaccacagtccatgggcccaatctggcctgccacctgctttttgtaaa

SEQ ID NO: 319417 - DNA, 122 bp, Homo sapiens
ctcttaggtgtctattaaaaaatgtgactgccttcatgaatttggagataagtaacacatcgagtgttttcccacccacaggaagcccctctaggatgcgacaggtcacgggggcgaccctc

SEQ ID NO: 319418 - DNA, 122 bp, Homo sapiens
ctgcgccctctgcaggcggcgggggggcggtgcaggtgctttaagaattaccgcgggactcggtagggggagcgtaggcgcttctcgccaagatagaagcgttcagactacaactcccagca

SEQ ID NO: 319419 - DNA, 122 bp, Homo sapiens
agctcctttcccctctggcccgcgcctctccagattctcctctagagctgcccagcctcgcgcccctctgaggggaccccgcaccgcgccacctccgcggtgtccccactccctaattttcc

SEQ ID NO: 319420 - DNA, 122 bp, Homo sapiens
catttctttgaaccctaatttgacatgcaaataagccactaactagaactcagcttcaatcggcagtgtttaaacagaaatccccatagctattcagaaacctgtgcataaaaggaagttag

SEQ ID NO: 319421 - DNA, 122 bp, Homo sapiens
taatgagtttgcatggaaagacacaaccagccgaaaattttagacttcataaagcacagccggtgcctcaggtatactggatgtggtctggagccagacatgaaaggaggggggattttgca

SEQ ID NO: 319422 - DNA, 122 bp, Homo sapiens
ctacgcattttcctgggcgggaacagcaaaatggcgccagaactagtggcgggctgaggacgccgtacccctcggaaggcagccctgcggtccctttgccgcccgttccctcccggacatgg

SEQ ID NO: 319423 - DNA, 122 bp, Homo sapiens
gctgttgtcatctttctctggatgtgttcactgaaaagtctacatacttgcctttagttccgttcattgtttttgttaagaaagattttttttgaatcccattcttttatgtcagaataatt

SEQ ID NO: 319424 - DNA, 122 bp, Homo sapiens
ctcctcctccagcatctgcccctggggccacccccacctttccgccatctctcgggcccgcgtggcaccctgctctgtttttaacggggataaacttgacttgcttctccaaagagcgggaa

SEQ ID NO: 319425 - DNA, 122 bp, Homo sapiens
tgcacagaggagcagcaatttttttttctcaactaatttttattccaagacctcacaaagcgtgaggagaataacttcctgagtagagaaagcattcgagtgtctgcatctgaagatacaca

SEQ ID NO: 319426 - DNA, 122 bp, Homo sapiens
cagaatccagagtaattattccgtgtgcatgtgaggttagtggctggaatagatttttaacgcttcttctggcaattacggtttttggtttttggagcgttagtggaggaggctctgtgtgg

SEQ ID NO: 319427 - DNA, 122 bp, Homo sapiens
caattcagtgtggaacacatcaaccttctgcatgttgtttgatttagatttttctaataacgaatttgtactgtctgtatttatgaaagtgccattattgttgtggtactttttttcaccca

SEQ ID NO: 319428 - DNA, 122 bp, Homo sapiens
gtgccagggcgcgccagagcccagccaccgcctcccctgcgcgcggccctccccttcctccgcccagtgcccgcccctcccgactctgcgcctccgttcggccccgcccaccccaacttggc

SEQ ID NO: 319429 - DNA, 122 bp, Homo sapiens
gggaagccctccctgtccacgtcctgagggcgcgcggccgacccaagtgtgtttgggcaacgctagagagaaatttcccaaatccgagttgctctggggacttcgtaggagacagagaggcc

SEQ ID NO: 319430 - DNA, 122 bp, Homo sapiens
gggagctggggacgtcccctggggcaccccagggcatgggtggcattgctttggcggctccgccgagcctggcagatccaagggggcatagttgacagcaggcatcagcgtaggcgccgctg

SEQ ID NO: 319431 - DNA, 122 bp, Homo sapiens
tagtattcctagtagtattactattactttataagcaggcacaacttcttgcaaaagacccgcgtcagacccggagaaggtgaggcccgcatctcccctgcgcaggctctccgtgataagca

SEQ ID NO: 319432 - DNA, 122 bp, Homo sapiens
gtgatgggctactgttgcgcgttgtgggtgctgccggggcgcgcctagctcctggcagggcgggagctgagtgagagggtagagggtgtgcactttacccgagtttagacccctcttccctg

SEQ ID NO: 319433 - DNA, 122 bp, Homo sapiens
gctcctgagaaacagggaggaaggggcggagcacctggacgtctcccagaagcccctccacgtttgaaaatgcgcctcctcctcggagacagacgcatcggtgccacctagtggctggtggg

SEQ ID NO: 319434 - DNA, 122 bp, Homo sapiens
tggggcatctgaaaagaaagcagttctagggtgtgtcctggacacaaagccactggcagacgcttccccaggagtctgcctaccttgcgcgtgccctggtggcacggacctggggagctgaa

SEQ ID NO: 319435 - DNA, 122 bp, Homo sapiens
cgcccgagccgggaccctgcgcgggaacgcgcctgggggggtggggctgggactgaggagcgccgggggcggggcgggcgggaaaccaccgccccccgacttccgcctcccgccccgcgggc

SEQ ID NO: 319436 - DNA, 122 bp, Homo sapiens
ggaacggaacgggacggggcgggccagcgggatggagcggggccggagagcaggactgggcggagcagcgggacggggcggagcagcggaacggggcgaggcgggggagcgggatggggcgg

SEQ ID NO: 319437 - DNA, 122 bp, Homo sapiens
tctccagacatcagaatcatgagctaaataaaccttttttctttataaattatgcaacctcgggtattcctttgtagcagcatgaaagagactgagacttctcattgttcccttcccccatt

SEQ ID NO: 319438 - DNA, 122 bp, Homo sapiens
gaactcagggaagtcctacctacgtagcgaggtggagtcctctagtgaggggacgtcaggcgagccagcactaggccggtaagcatgggcagccaggccgagggcagcttgcgccgctgaag

SEQ ID NO: 319439 - DNA, 122 bp, Homo sapiens
ctgttgccatgtgtttcccagcaggatgactgagctgtaagacccactcctttacctgagcgcaaaactgaagaacctctcgtcttccctcattcaatcaacacgaaagtttcataatacct

SEQ ID NO: 319440 - DNA, 122 bp, Homo sapiens
acaggcgtgagccaccgtgcctggccccaagttgtttgttaacagacacctgccaaaagacgaggacttcctctgaacccttatcaggtcaaaacatggtagatattctactaaaattggtc

SEQ ID NO: 319441 - DNA, 122 bp, Homo sapiens
gtgactatatacttacctttccctgtgaacttttttttttgagacagagtctcgctctgtcgcccaggctggagggcagtgtccatgatctcggctcgctgcaagctctgcctcccgggttc

SEQ ID NO: 319442 - DNA, 122 bp, Homo sapiens
cctttctctcttcccacttccggcaacaagatagagcacttccgtcaaccttcagacaaacgggccgatacgtacgaatgggctaccataagccccgccccttccgggaggtctccggaagt

SEQ ID NO: 319443 - DNA, 122 bp, Homo sapiens
tacataggacctactcactgggccatgctccctgtctccctgttccctgcaggtcagtttcgccagcttccacccttggacagttctggctctctcaacaactctccttcccattccagcag

SEQ ID NO: 319444 - DNA, 122 bp, Homo sapiens
ggcagagctgggactagaatttgattctcctgactttagttcagtgcttcctccccccaccgctttcttatagcttcatgctttctctgatgcctatagtccacggcataacttactggcag

SEQ ID NO: 319445 - DNA, 122 bp, Homo sapiens
cagctgggaggaggtggcccagtgagtgttcctcgctgcagcctagatgaagtcactgcacgctcaaagttcaagatggtcacagaaaaacccctttttaaaaagtctgaactcttgtactt

SEQ ID NO: 319446 - DNA, 122 bp, Homo sapiens
gaagccgaggccagcgcccaggtgagactagaagtgtacccacggggcccctggaagctgcgctccagccaacctgttggactcggggtgaggaggtgggggtgggagggaagagcaagtga

SEQ ID NO: 319447 - DNA, 122 bp, Homo sapiens
agcagaaaattgttagtttcaaattagagtgttcaacactgcttccctctcattcatacacgtcttcattaagaagaagtactctttgtctacagccctagtccaacttttgcatgcaaaag

SEQ ID NO: 319448 - DNA, 122 bp, Homo sapiens
cttgccaattaacttgccaataaatttacttgccaattaaaggagttaataaaaacctgtcgaatctggtttttgttcattggaactataaaaagaccattcaaccaagtcctcactctgag

SEQ ID NO: 319449 - DNA, 122 bp, Homo sapiens
tgggagggagccaggacattgatgctgaagggatgcaaccttggtgccaagctcaagcttcgagggaaaggagaagtcgccattacaggggcaacacaagagtttgaggtggaaaagagttt

SEQ ID NO: 319450 - DNA, 122 bp, Homo sapiens
agtgagcagcctccgcagagaaattgacaatttaaccagggacctgcggcagagacaaggcggagacactcccttgcccaggaaagccgccagagtccggcttgtacctggggaagaatcct

SEQ ID NO: 319451 - DNA, 122 bp, Homo sapiens
gcctcaaggcttgcgacgtttcttgctcatggggagagggaagggagagaaaaaaaagagcgagcaggaaggcgcccagcgtcccacacaggggactcgcagccctgcccccaagagcgctg

SEQ ID NO: 319452 - DNA, 122 bp, Homo sapiens
agactggccgagggaccggcttaggcaaaggcctggaggcacgactgcgccaggaggattcggaacacagggacatcttgtgtccactgagaacaaagtatgagtcggagttatttcctcag

SEQ ID NO: 319453 - DNA, 122 bp, Homo sapiens
cagcccaagccagaggggaactgcccattcagctgttggaacttgagttcccacaagcctcgccaccatgggctaaagtgctatggggcccaaaatgaacttgaaaggcagtccaggccaca

SEQ ID NO: 319454 - DNA, 122 bp, Homo sapiens
accgcgttgcaatggctgcactaaccactcagagcgtccttggggttctggcctgcagggcgcggcgtgcgcggccgggcttgctaggttagggacccgctgccccaggactccggccgtgg

SEQ ID NO: 319455 - DNA, 122 bp, Homo sapiens
gtcacccaggctggagtgcagtgggacgatcactgctctacaggtgcacgccatcacactcggctaatttttgtattttttgtagagatggggtttcaccatgttgcccaggctggtcttga

SEQ ID NO: 319456 - DNA, 122 bp, Homo sapiens
agttggaatcccgtgtaagttccccctgtgaagggctccagcctggcaagcccaacttgtcgttcttgggacacgaaagcagggggaccccagccctcttccagagaacttcctgcttccct

SEQ ID NO: 319457 - DNA, 122 bp, Homo sapiens
cacacacacacacaacacacacacacacacacacacacacacacacacaaaactccctaccgggttcccagttcaatcctgaccccctgatctgattcgtgtcccttatgggcccagagcgc

SEQ ID NO: 319458 - DNA, 122 bp, Homo sapiens
aggcttcagagcccaccacctgggctggatgcccagctcggcttggaggtgactttggggcgaggcctgacacttccctgagcatctctgtggaatgcagtcagtgccacccgcacctaaca

SEQ ID NO: 319459 - DNA, 122 bp, Homo sapiens
cctggttcctgtccccgccgcaggggagggagcggggtggctgcacgcctcacgtgctcccgggcgccccctccaccagcttgggtccccttggcgacccgtgcccctttcccggactcccg

SEQ ID NO: 319460 - DNA, 122 bp, Homo sapiens
gagcaggaacctggagttttcaggtgagaggctcacctgtgagcaggatacctgcctgctcgcctattggtctccagattgactagttacctagctaacatctttcctagtacctgtttact

SEQ ID NO: 319461 - DNA, 122 bp, Homo sapiens
taccagccaagtctgtgcaagcaaactccatgtttacataatgaaatcgcccatttggaacgtacccccatgactaacgcctggccgcactgatttctaattccccacacggagccgatctc

SEQ ID NO: 319462 - DNA, 122 bp, Homo sapiens
agaacaccttctggaggagatgagaagccttccttaggcagatgacatctgagtgactctcggaaaacgaaaaacagctttcgaaataggacaggcagggcatacagggcataacagaaaga

SEQ ID NO: 319463 - DNA, 122 bp, Homo sapiens
ggtggggcactcggctcctgctcctgggacgagctccggggggccctggtggcattggcccggacagagatatggtcccagcctccctggaaggagagagctgtgtcaccaggggactcggg

SEQ ID NO: 319464 - DNA, 122 bp, Homo sapiens
acgtaaactggatttcctgatatctccttaaacaggccttccgtagccaggggggcatgtcgagcccgagtgtcggtgtatcttaagtttgtctgggcctccgtttccttaactctaaagtg

SEQ ID NO: 319465 - DNA, 122 bp, Homo sapiens
tgtgcgggtctcagagctggctaggggcgtctgcgctcggcctcgggtctcgcagcccgccggctccgtgctcacctcctccaggttccgctgaaaattctcgcgccagcgccgctgccgga

SEQ ID NO: 319466 - DNA, 122 bp, Homo sapiens
ggggactggacaggcgggcaggcagagcccacaggcaaatagcagcccacccggggagcccgagggcaggtgcctgcctcagcagttgtccctagcaactctgtgagaagcagacagagctg

SEQ ID NO: 319467 - DNA, 122 bp, Homo sapiens
gactgaggcagagaccagctctgtcctttaccagctggtgacctcagctaagtcatttaacgcactcaacctttagtttttcatctgcagaatggatataatggaaactaaacccacaggat

SEQ ID NO: 319468 - DNA, 122 bp, Homo sapiens
agagggggcggggacagaaaggtcaggggcgtggcgaaggtcgctgctttcctgctacaacgggcctactttagctaaaacagaaacgtaaggccaggacgggtcaccctttgtgggcccct

SEQ ID NO: 319469 - DNA, 122 bp, Homo sapiens
tcccaggactaggggctctctgcacccgacccggtcccggtgcacggccgggcagcccgtcgggacctggcagaacttttaaaccacgtgatgcatgtgttccatccccaaagatgatttaa

SEQ ID NO: 319470 - DNA, 122 bp, Homo sapiens
tcgccccggggtcttgggcgggagggccgtgcgggctgcggagacaccgaggaggggaggcgcctctcctgagctcttggcgcagcgaccccagggcgccgactcatcgcggaagggctcgg

SEQ ID NO: 319471 - DNA, 122 bp, Homo sapiens
cggggccctgagaaccggacactcgagtcctgtggacactctggagtgaatagggctgcgcggagaaggacacgtggacgaggaggtaccggatgcctggggcccacccagggcctgggcta

SEQ ID NO: 319472 - DNA, 122 bp, Homo sapiens
cctgtaggactacaactcccagaaggccaagcgagacatgcctgtttcccttcctgcagccgcactttaaatcaatttgttatagataattatgtcaaaggttgtgaagagtgcaaaggaat

SEQ ID NO: 319473 - DNA, 122 bp, Homo sapiens
ggccctgccggtgtcgcagctgccggtgttcgcgcctctagccgccgctgccgtcgccgccgagccgctgccccccaaggaactgtgcctcggcgccacctccggccccgggcccgtcaagt

SEQ ID NO: 319474 - DNA, 122 bp, Homo sapiens
caaagtagttagctatagtacgcctcaggagtttctcgtggaagtgccaaataatgataccgaagggaggaaatgctgaaacatgaaatgtgtgagtaagtgggttagtcactaaagttgtc

SEQ ID NO: 319475 - DNA, 122 bp, Homo sapiens
ccgcacccggaaggctcaaggaggcgccctgggcagggaacttccggttgcggggaagggcggcgtcctctcctagggacttgtcgcacgcggcttctcgtcgcgttccgtcttgcacgcct

SEQ ID NO: 319476 - DNA, 122 bp, Homo sapiens
catcagtaacaaatggagcgtcagcacgtggtccaatgtgagcgaaccgtgaaaaccttacgctcagcgaaagatgccagatgccagagaccactcgccgctgagcccatctccctgcaaca

SEQ ID NO: 319477 - DNA, 122 bp, Homo sapiens
ggggtagggtgggagtagagcaattatttttcgccaactccaaccactgcaggaagacgccggctacagaggtcacgtttctcttgtttactggccgtggacatttctgttgcgtagttctt

SEQ ID NO: 319478 - DNA, 122 bp, Homo sapiens
tccattttcagactgcatttcatcctcctatttctgaaagtctcacttgtaatgcatcctcggatgtcagtagtgtgctcattgtttgtcaaaaggtgcatcgttgtgaaatcatgcatttc

SEQ ID NO: 319479 - DNA, 122 bp, Homo sapiens
ctctctgagtttaagatctttatctaaagagatgtttaggttgatcttaaagatcaaggccggcctatgtaaaagtcacattgtccaggtaaaaaggggcttataattcaatatccatacat

SEQ ID NO: 319480 - DNA, 122 bp, Homo sapiens
aacaaggtcttgcatttactgagtctctgccacaggcctgggcctgacctggaggttctgcggacaccaactaacaggccccgtcctcccacccctcctcactcggcaaattcatactcatg

SEQ ID NO: 319481 - DNA, 122 bp, Homo sapiens
tgcatttttatttcaattcttggaactggtaggctattctttttaaaagggggtaaacttcgccctaaggctggtagaatgtatgttcacattatagtagacaggatttcatttgccttata

SEQ ID NO: 319482 - DNA, 122 bp, Homo sapiens
tcccagaagcaaagtcccgcaacttcttagtcttccctagagacaggaaaggaaacccagcgggactacaccttccgacgacctttgcgaatcttgcggaacgcaggcgccctgaaacggcg

SEQ ID NO: 319483 - DNA, 122 bp, Homo sapiens
tggttagttatgtatcatatgtgcgcgcgcgctctcgctgggtggctcatctcatcagtgcgggagcattttgccagggttataaaaaatgccattttctctgcgagccctttccactcagt

SEQ ID NO: 319484 - DNA, 122 bp, Homo sapiens
gacgaggagcgtgcctgggcgctggacgtggccgagcttcaccgtgcactgggccaggcgcgtgaccactgccgccctcgtgcgctctgtgtcatcaaccctggcaaccccaccggtgcgtt

SEQ ID NO: 319485 - DNA, 122 bp, Homo sapiens
cctgcaccggggattctccagaaacacaggcgtgcctgggtgtgcgctcaacttcccgggcgagggacgtttctgcacttgccctcggcttctgaactttgtactttgcgagtgtactttgt

SEQ ID NO: 319486 - DNA, 122 bp, Homo sapiens
ggcgggaagaagggctagcgaagcacccccgaccgggcccaggcgccggacgccggggggcgcctcgctgcaacttctctttggaagccccgacacgagccccggcccgcgcgcgcgctccc

SEQ ID NO: 319487 - DNA, 122 bp, Homo sapiens
gaagaccggagtggaccctttgaaaagggcctcttctgtgaagaggcctgggcgccagagcggagggatggggcgcagctgcctcccagggacagggttcagagcctccgatggcctgtgag

SEQ ID NO: 319488 - DNA, 122 bp, Homo sapiens
cctcccagaaggggtggtggctgggcagaggcgcccctcacatcccagacgatgggcagccgggcagaggcgccccccacctccctgatggggcagccgggcagaaacgccccccacctccc

SEQ ID NO: 319489 - DNA, 122 bp, Homo sapiens
cccgtcgccattcaccacagagaaatgagggacgagcgcccgaagtgcggtagcggccggcgccgactcaccctcgccgcctcagcgtcacctccagccggggtcctcttcccccaatccca

SEQ ID NO: 319490 - DNA, 122 bp, Homo sapiens
tcgacgcccacggtaacattctcctcagcaccctggaaatccggaatgagacgagtggctcggaagtgctcacgagcgtgagcgaccccaaggccaccatgtactcctatgacagcgccagc

SEQ ID NO: 319491 - DNA, 122 bp, Homo sapiens
ttcggcctaatgcagaaggaaatccggagcaatccccaaagtcaacgccttggaaaggttcgccctgggtctcagtactccggggcatgcgcgtcctgccgctcgctctcggggagctccca

SEQ ID NO: 319492 - DNA, 122 bp, Homo sapiens
acctgagcaccacctggatgggcgtttccggcccctctggcccttgctccaggctccgcgcgagatccctgtgggcagcaatgcgacttatcatacctgcacctagcggctgttcaggactc

SEQ ID NO: 319493 - DNA, 122 bp, Homo sapiens
tcaaagtgctgagtgcctggaccctctttccggaggaaacagtcccctctggacctcgttcggcctctctccatcagacaccccaaggttccatccgaagcaggcggagcaccgaacgcacc

SEQ ID NO: 319494 - DNA, 122 bp, Homo sapiens
aataaagcctgaatgagtggaccaagcccccggatgcccctgactggcctgacagagagacgcgagtgcccagctgtctgctcatccagcaccaggcttctctgccatcttccacctgaggc

SEQ ID NO: 319495 - DNA, 122 bp, Homo sapiens
aattaaatgaaaactagatcaacagttctcaaagtgtgatctcaggacccctggggagcccgaagaccttcttaggaggcgcccacaaggtcaaaactattttaatactaaggtatcatttg

SEQ ID NO: 319496 - DNA, 122 bp, Homo sapiens
cccccacccctggggctcccttcctgatgtaggtcatgaggatggggtggctgtggctgacgggctgtcagagcccagcaggagttcccatcccccatacttaccctctccattgcccctcc

SEQ ID NO: 319497 - DNA, 122 bp, Homo sapiens
agccgggcctggaggccggccggggccaggcgtgcgcagtggttcttgggagtggcgaagcgggtcctgccccgctgtcagctgcggcccccggcgccgggcgggggtggccgcgaccattg

SEQ ID NO: 319498 - DNA, 122 bp, Homo sapiens
atctcggctcactgcaacttctaccacctaggttcaagcgattcttgtgccccaaacttccgagtagctgggactacaggcatgagtcaccacacctggctgattttgtatttttagtagag

SEQ ID NO: 319499 - DNA, 122 bp, Homo sapiens
gtcacccatgctcaggtggatgctgaaaggcgctgagcatgcagaagagtgagcaggtgtcgctttgggcgtttgtgaattcctgtgtgtatgcagagctccaccatctgggtgagccagtg

SEQ ID NO: 319500 - DNA, 122 bp, Homo sapiens
cccagcctgaagggcagagtgtgtttgctctgggccaggtgggcatggggcgcgggtgcccgcgtgaaattcacaaatccgtgcagctgggtgtggtgttcgtactgttacgggatatgcgg

SEQ ID NO: 319501 - DNA, 122 bp, Homo sapiens
ggagcagcatctcctgtgaacacagaggagcacctgtttgctgttaaaatcgatctccctcggcaccctgagcaatggatataatatttggcaggaataggaaagaacagctggagcctgtg

SEQ ID NO: 319502 - DNA, 122 bp, Homo sapiens
tggctcgcggtgcgcggggcacacgccctgcgggaccggcgacggcgggtgcaggcgccgcgccatctcggccatcttagcaagcgggcggttgggccgcaggttcctctgcggggacagct

SEQ ID NO: 319503 - DNA, 122 bp, Homo sapiens
cagcgctgcatactcactgtgactcaccggctgctccgagatgcctcccggttttctcatcgcagtctggctgctctgagccccgagggcgtttttcattagggtgattaccctgccgtcat

SEQ ID NO: 319504 - DNA, 122 bp, Homo sapiens
aataggggatgttttgtgtagagatgggccttctctcttccagtccaactctgaagtaaccgccccttacccaagctttctttaaactggaataacgccagcagaagaatgtagtaggtgtg

SEQ ID NO: 319505 - DNA, 122 bp, Homo sapiens
ggacgcgcttagcctaggtctggcctcattcatttcactcgcgcgggcttctgggccaggcggcctaaggttctggtcccggcgctgccccttactccgtgtgaggttttgggcagattgtc

SEQ ID NO: 319506 - DNA, 122 bp, Homo sapiens
gcgctggcttcagcggctccgccccggcgccgtgccagggggccggacactccagtcgcgcggcacaggcctgaggccgctgagggccaccccgtcccctgcccgcccgccggcctgctggg

SEQ ID NO: 319507 - DNA, 122 bp, Homo sapiens
tagattataaacacagtaagcaaattgtaccttagaagttgatcagtgctcttcaaaaggcgaggaatagagcccgatctggggatctggaatgatggcagtgcaggtaggaatttttaaat

SEQ ID NO: 319508 - DNA, 122 bp, Homo sapiens
tcggaggcagggggcgtaggggccgggctgtccggcgctttagcttagcaggcgacgttgcgggccctgggcgccaggagagcttcccggagtcgaccttcctgctggctgctctgtgaccg

SEQ ID NO: 319509 - DNA, 122 bp, Homo sapiens
tttattttttaatctgcgaactaaaggatgagtccaaattaacctagaaacgatggaaatcgtatcctaaaatgtgggatgcaccccatttgggaaaaatgaatggctctaagggtgcatga

SEQ ID NO: 319510 - DNA, 122 bp, Homo sapiens
tgaaacgttaacgcttgtttttcgtactgcgtcgtggaacaagccgcctgcagtacagtgcgaggcgggtgatttgcacttgtttagtcaagtcacctcacatcctttttctctttatcaaa

SEQ ID NO: 319511 - DNA, 122 bp, Homo sapiens
ggtcacaggttaaatctatttcactggattgctcacagcttgctgcattccaaggaaactcgctttaactttccacaaggaggagtaatcgtcttgaggggcctcatctatggtaccagtca

SEQ ID NO: 319512 - DNA, 122 bp, Homo sapiens
tccaatctcccggtgttaacacacatctatttcaaaaaacgaacacatcactgctttattcgcaatgcatgtgggaattcaatgcagccaaagaatttccattgtcttgttccttctctttt

SEQ ID NO: 319513 - DNA, 122 bp, Homo sapiens
ctgccagtcctgcgccgttcgcctgcactcctcagcccttgggcggtggatgggatttggcgccgtggagtgaagggggcggcactcatcggggagactcaggccgggcaggagcccacggc

SEQ ID NO: 319514 - DNA, 122 bp, Homo sapiens
gttaggcccgggtgagtgagcaggacgagagggcacggctggcgacggagcccctcccagcgctgcggcgggagagggggctcagctcgagtcgccacccggactcgccggacccagagctc

SEQ ID NO: 319515 - DNA, 122 bp, Homo sapiens
atcagtgtgcaaccaaccccacaaagcaggacttcaccacagagcacagccgagcagaagcgaggtcactggtcaggacttggctgctcattataatcccctgggaagttttaagaaagtct

SEQ ID NO: 319516 - DNA, 122 bp, Homo sapiens
cctacacagagaatcgtcagaatgggcaaccgtacatagcccaaatgtaacgttcatatccgcagtacattttcccttatgcaggaaagcaattctcagtatcctgtagctagatcttccta

SEQ ID NO: 319517 - DNA, 122 bp, Homo sapiens
gaatgaagaggagggctcaaactagctcatctgctagaggaaagaccggggtccacactgcgtgtgtgccaggatgtttcaccacatggtccctctggtactgaaagccctgttactaacag

SEQ ID NO: 319518 - DNA, 122 bp, Homo sapiens
cgcagccaccgccaccgccgccaccgccaccgccgctaccgggtccccagggcgcctgcgcgccgcgcgcccagctcactccgcaaccagtggcctgccccgccccgttccgtctagcagca

SEQ ID NO: 319519 - DNA, 122 bp, Homo sapiens
cgcccgacgcctcccaggaaccaaaccggaccgggccgcggggggagggggcggtcaacccggggggggtcaccccagctactgcaccccgactttgaagattctgaatcagcccgtgaact

SEQ ID NO: 319520 - DNA, 122 bp, Homo sapiens
ctctttctccgccgtgagctcgcttggtcagcaaactaagtactgggtaaactctcctcccgaaactactgaccacccacagttctactaactatattacctgtcctttgatttgcccttag

SEQ ID NO: 319521 - DNA, 122 bp, Homo sapiens
cttttttgtgttcttgaacttgggcgttcacttcgtttgttgacctggaaggagccatctcggcgcctgctgtttgaaccttgggtattttaatgaagtggtttgatgtcctgataccacca

SEQ ID NO: 319522 - DNA, 122 bp, Homo sapiens
ttctcaaaatgttctgtgtaattacaatctgaatattttttatctttatgctgtattgtacgcaagagttcaaagaaagcgtttaaattggaagatgtttttgtttttatactaggaaaaac

SEQ ID NO: 319523 - DNA, 122 bp, Homo sapiens
cagccagagtacttctcagagaggataccacgtggatgcaaataagagcagagaaagcaccgagtagttacaatggtccttgctgggtgtttggagaagctaattatttgagagagaaacaa

SEQ ID NO: 319524 - DNA, 122 bp, Homo sapiens
acaaataccattcatcttctggctaccctatttaactcctgaaaactggaacagggatgtcgacagtcagaggaggagaagggcagaagtgtgcactagaacaccagatgtttgaggctgaa

SEQ ID NO: 319525 - DNA, 122 bp, Homo sapiens
ctcagtcttggccaagcccagtctggaggagcatgcaccgcctgtgagcggtctgggcagcgcttcccaggttgcccatcagatgagcccgtcccaggtgtcgaggaggagatctcctgagc

SEQ ID NO: 319526 - DNA, 122 bp, Homo sapiens
ggtggaactaacagatatggggacaccaccaaaaataaaacacaacgcaaaacaaaacagcgcggaccccggccatcccttgcacctcccctgtgaaacacgtcaacgtcagttacgctctc

SEQ ID NO: 319527 - DNA, 122 bp, Homo sapiens
aggcctgtcgttccctggtgcttcaaaacgacctcttatgatttggcctttgaaggaccacggagaagggcaaagctgcattttaattttcttccgcatcctggttttgtttcttatgcgct

SEQ ID NO: 319528 - DNA, 122 bp, Homo sapiens
ctgtcaaggggcaggcgggcgctgggcaggcagcaggctgggtggcaaaacgggcgggggcggaggggccggtgttgggcttacatctcctgcttccctgagcgcctgcacggcagcttgcc

SEQ ID NO: 319529 - DNA, 122 bp, Homo sapiens
ggcttgtccgatttgcacggtgacttgattacactctctcattcatggtcacttccgaagcgctttagtgccttccgtccctaaaccgccaacagccagaacggcttctccccgcggtttgt

SEQ ID NO: 319530 - DNA, 122 bp, Homo sapiens
ctttggctgactggctctgaccgcgctgccgccagtccctgcgcacatcagtccacctgccgtccatcagcccgagcaggtccgcccgccgtgcagtccatctccccattccacgcgtggaa

SEQ ID NO: 319531 - DNA, 122 bp, Homo sapiens
ccgctcgcccattcgcacatggcttctcaaggatcgctgttgtcatcctcggggcggggtcggggagcctctgatgccctattggctggcgctctgccccgccctctcccgccgctgatcca

SEQ ID NO: 319532 - DNA, 122 bp, Homo sapiens
atcagtcctgcttcacatgtctcccggctggccagccccggatgtccggccactgtgagccgatagcttttctgctgtttgttttctacctgtgtgcaggtgagcagaagtaggagcaaagc

SEQ ID NO: 319533 - DNA, 122 bp, Homo sapiens
acttccagaattctggcaatctgaaagcatggattctcatcccaagacaatgaaaacccacggttaaggaacagacaacagttttagcatactctcaaacaatccttgactaatagaagact

SEQ ID NO: 319534 - DNA, 122 bp, Homo sapiens
ctgcacgctcgtccccaaccctgcaggcacctgtgcgagtgagaacgtgagggctgtgtgcgagagctggtcagagaggctggggcagggcttccttctcgcagtcacctgcaccgaaagca

SEQ ID NO: 319535 - DNA, 122 bp, Homo sapiens
aagagggtggtggccgatagctggtcctctttctccaacacctagcctgagacttggcggcgcggctgctatcctgaactagcttggtaagtgttgtgtcccgaaccagcgtagagagacct

SEQ ID NO: 319536 - DNA, 122 bp, Homo sapiens
aaacagaactctcccatgctggcagtgggagcacaccctggcccagcccacctgcagggacgtggccgtgcatactgacactgaagatgtgcacactctattgcccagaaatgaccctgcca

SEQ ID NO: 319537 - DNA, 122 bp, Homo sapiens
ccagggagtcgggttggggcagattccgtttgcaggggcctgcaagtgcctgggtggggacgcccccaaggctgctggagagggggtccggggcacagggtcgcagagctgggcagggagga

SEQ ID NO: 319538 - DNA, 122 bp, Homo sapiens
tcctgcaaatctccagtaaagcaccacagattgacgaatattccagccatttccctctcccgtacgctagctccatttcccacttctatccatcttctcgagcttcctcagctcctccacct

SEQ ID NO: 319539 - DNA, 122 bp, Homo sapiens
cggtggcccggtgactgggttatcgagtggagccagggcagcccagagatgctggggtcccgcgagcctaggttgggtttccagggctgggggctcggcggcggctcctgggcgccccctgg

SEQ ID NO: 319540 - DNA, 122 bp, Homo sapiens
actggagtgggaggctgggaggctggcggaaggcagtgccgggccggctcactgctctgtcggtaggaaggttcttgggttcggacggcagcaggttcctgaggccagggaagtacagggtc

SEQ ID NO: 319541 - DNA, 122 bp, Homo sapiens
ctttagtctccttccggttaaactgacaagtatcacaatcctttctcccctatcttcgggcggttccggctgggaacaataccctcagggtcaggaggacaggatctgagtgcaggccagcc

SEQ ID NO: 319542 - DNA, 122 bp, Homo sapiens
ccccgacagcagtggcgatttgtcaaggtcacacagtgagttaccggcggagaagggacccgaactcccaaacaaactacacctgcaagcgtttggtgtttagactttctccccgatgtata

SEQ ID NO: 319543 - DNA, 122 bp, Homo sapiens
gcgaaacacctacaggaaaataccaaaatgtaaacagcggctgcttcggacgcatgggatcgtggaggctgctgttctgcaaggacaacgtatcacttttatgaaagtcagcttctgaaaac

SEQ ID NO: 319544 - DNA, 122 bp, Homo sapiens
aggtgaggaaagagccttgaggcagggtagaggacccgagttagtgccctctccctaccccgagggtcagccctgggcaggacgggccacggccccttggggcacctgttgcctgtgccctt

SEQ ID NO: 319545 - DNA, 122 bp, Homo sapiens
cagagtatagggcccaggttcccagagcaagcgtcccagggccccggcggtcgtaactaccgctgcatgggctctgatgctcagccgcggaaaagcaagtaaccgggaatgaaggaagtggg

SEQ ID NO: 319546 - DNA, 122 bp, Homo sapiens
caaatgaaactctctgcagcttaaccggcccatgacttgcagtgtgccagggacaagccccgctcccgtgcggtcccatgaaacactcacacccgagccggctaacttgctaatgcgaatgt

SEQ ID NO: 319547 - DNA, 122 bp, Homo sapiens
ccatcatgaagtgagtatccaagattgctcatggaaagttttaccccggtggataattcacgtttttcacttccacactgcagagagcaatatgggttctctgactatacacatcactacat

SEQ ID NO: 319548 - DNA, 122 bp, Homo sapiens
ggattagagctggccacggcttccccagaaacctgcagttactggagtaggaagaggcctcggagaatccctggaagcatctacctaaaagacgcgaggaaacccccaaaggccacaggcac

SEQ ID NO: 319549 - DNA, 122 bp, Homo sapiens
tggtgctgggagggggtgctgaagggcgtgtgtgaatgtgtgtcgatgtgggcttgcttgcgtaggggtaccggggtatcagataaaccgtaactccaagtcgtgcgaaaggcgctcagctc

SEQ ID NO: 319550 - DNA, 122 bp, Homo sapiens
ccacaaagactatgaaaatcaccttggagtgtatgaaccagcgtcctggccccgccaggtcggggctggggcgggcgcgggccgggagcgcttaccccgcggcaggagcgattcagcgccac

SEQ ID NO: 319551 - DNA, 122 bp, Homo sapiens
gatccctcgcatgcgcagttcacaataggggggttgcgctcctatgagaatctaacgccgcggctgatctaacaggaggtgcagctcaggcgataatgctccctcgcctgtcactcacctcc

SEQ ID NO: 319552 - DNA, 122 bp, Homo sapiens
agagactctttgccatgtacctgttgaattttttttctgctaggttgctgcctccttcttcggcactagagggcaacataagtccaggttttcctcagctccaataaaggatcagagtgggg

SEQ ID NO: 319553 - DNA, 122 bp, Homo sapiens
ggcgggaaacgtaccatccgggattctctgttcctcccctccctccgcctcactcactgacgagcaaactgaccaatagggctgagaggaggctcacagaggctggtcattgagcagctgga

SEQ ID NO: 319554 - DNA, 122 bp, Homo sapiens
cccttccccgcggcgaggaactgcctctgcgtctcgtaaaaggggtctgggcctggggggcggcggcctccgtcgccatggaaaccggggcggggaggcggcggcccggagagccccatgca

SEQ ID NO: 319555 - DNA, 122 bp, Homo sapiens
accctattgccctcgctgcgccctttcttctgtgcctccggaagttactctttcagtaggcgtttgggggcggcactggtcaattttgttctcggttgcttggttgggctagatttcggttc

SEQ ID NO: 319556 - DNA, 122 bp, Homo sapiens
cctcttcccgcggctctttctccagaatggtatctggctcctgctccgtaagacaaataacgcgggcggtgagagaaaatgaacagtgctgtccaaactccccagtcaatattttttccacg

SEQ ID NO: 319557 - DNA, 122 bp, Homo sapiens
tttaaagagcagaacattactctatctgccaattgctgggagttttattataagaacttacggctaggcaaccacagccaagtttattattttttctggatcaggttcaacaacctcatcca

SEQ ID NO: 319558 - DNA, 122 bp, Homo sapiens
gatatgggtagggcaatcagcacagttcccggcatagagtaggttcttaacagcaatgttcgcagattctgaatttgttcaaactcttacacacaaaatgcagaagccttgggatgtgacag

SEQ ID NO: 319559 - DNA, 122 bp, Homo sapiens
ggtgaatgcgccctggggttgaggcgtctgcgggcgttcggacgatgccgtgacgcggcacggcgacactgttggcaatatgagcgcacccctgtagagggagcccttcggtcctggaggcg

SEQ ID NO: 319560 - DNA, 122 bp, Homo sapiens
catgaagctggaaggggctgggctgggatgcttaggtgatgggagaagagggattctggacggttgcagagctgggtgctggagaaagtgagcttcccagaggacaccagagcgtttggcct

SEQ ID NO: 319561 - DNA, 122 bp, Homo sapiens
tgtactttggatgtggcgacagtttgactctttgttctctttctctttcttgatggtgtacgtgcaggctgttagcatctcacgaaaggattattccatcaggtgtcttcttccttcaattc

SEQ ID NO: 319562 - DNA, 122 bp, Homo sapiens
agcactgggatctttctgcccagaaaggggaaagttgcacatttatatcctagagggaagcgacagcagtgcttctccctgtgctgaggtacaggtaaggagggtggtttgtaaagttcact

SEQ ID NO: 319563 - DNA, 122 bp, Homo sapiens
ggggactgaaacgagacaacatctctccaccaccgtccccagcctcttgtttgtttggtacgtcaatgccgtgggcatgtttttgctaatttcgtagctgcctttatcaaatggggattcac

SEQ ID NO: 319564 - DNA, 122 bp, Homo sapiens
aggggtttgcagagcaggtcagtccctggtgcaccaagtaacaagtcctgtgcttaaatgcgtgctcagatgaaaagcggggcagtcgcggcccgtagacagcgggcggctgggtcagaccg

SEQ ID NO: 319565 - DNA, 122 bp, Homo sapiens
acagcgggtgcagccaatggacgggaggcgcccgtcctcctcgcgctgccgccccgtccacgtcctccacagtacacaatggccccagaggaaggcccgctcgcagcacgtcagaaaggaat

SEQ ID NO: 319566 - DNA, 122 bp, Homo sapiens
cctgggggatgtgctctgcccagccgccctcggggagagcagcgccgcctcccatggggccgtggggctgctgttctcactgcactggctgaagcaacccgccagcctccgtgccccacccc

SEQ ID NO: 319567 - DNA, 122 bp, Homo sapiens
ttttcctctccggaccacgtgaccccgcccacgtgacgtcccctccgccaatggccgggccgtctccccacggctcccggtaatgtggaaaaaattgtgtggcgttggatttataaaatatg

SEQ ID NO: 319568 - DNA, 122 bp, Homo sapiens
agcggggaggggcttgggaaagtttgtgtttgttgctggcaaagcgccggatgggaggcgcgggcgggcgctgcggttcttcccttctgctttcgggaagcggtcggggctgcacactcgga

SEQ ID NO: 319569 - DNA, 122 bp, Homo sapiens
cccgggacgtggggcgtgagcgctgcacccttacttacgtcggctgctggggccccacagcggaaactcagacccgcccacccaggcccccgctgtggcgctgaacactgcacttctctggt

SEQ ID NO: 319570 - DNA, 122 bp, Homo sapiens
ttgtaaatgctgagaccaaaccccgacttatggatcctgagccacggccgtcactggccccgctaagcctcatcaccacacggccaggccagaccagcacccgcggacgccagctccacccc

SEQ ID NO: 319571 - DNA, 122 bp, Homo sapiens
attagttatttcaaatcattgattaactttctctaagccaatcagattcctacctgatgtcgaaaagaaaagcaaaaggtagactgtttcaacactttcagacgcttgggtaaaagatgcac

SEQ ID NO: 319572 - DNA, 122 bp, Homo sapiens
cacataatacgttttgattttcttttttcatttcagcacagtgaaattataatctggacacgagttcctaattattgctttagtagctggtaatgcacttaggaaagttagaaatgagtaaa

SEQ ID NO: 319573 - DNA, 122 bp, Homo sapiens
agcggaagcgctgcccgcagtggtaggtagtgcgcgtgcgtgaggctagagcagtgggtgcggtcacgtgggccggcggtccacggccggaatggcagcaagctcaggtaacgagtttccag

SEQ ID NO: 319574 - DNA, 122 bp, Homo sapiens
tccgcgctctccccagcgcctgggcctcccctataagtgctctctgcggagcctcacggccgaccacgtgggacatctcacccagagacgcatgtacagcacagctcccgcgggggcgcggc

SEQ ID NO: 319575 - DNA, 122 bp, Homo sapiens
acagctcccaccgaggaaagtggtggccgtgagtcctcccggtcttttgggtgtatttggcggctctgacgtcccccaacacctgagttcaggcctagcaggacttcgcaagcaccaatcct

SEQ ID NO: 319576 - DNA, 122 bp, Homo sapiens
gccactccagtgagttacatcggcccaggcccgggaaaggaagctggctttacgctgatccgtaacacccgcccgctccaggcggcccggcaggaggctgattccattcatttttcctggct

SEQ ID NO: 319577 - DNA, 122 bp, Homo sapiens
gcacggcccgcacactccctcgggcgccttcctgcaccctgtacttcgcagtgacaaccccgcctccgcatggctgccctggtggatttctcatggcactcgcccccagtcggggtctagtt

SEQ ID NO: 319578 - DNA, 122 bp, Homo sapiens
aaataaataaataaataaataaaattttaagtaaatgtttagatacagaaaggaccttggcgattatctggtgcatatttcttaagctgtggttcaaagaccctcttctgtgaatgagcttt

SEQ ID NO: 319579 - DNA, 122 bp, Homo sapiens
tcaggaaggggtgctgaccaaggggcatcctgatgctcatgaacatcatgggggaagacgcgacagacaactggcaaagagtttggagttggatctgtcatactacatagaaagcaagcaaa

SEQ ID NO: 319580 - DNA, 122 bp, Homo sapiens
aagaaactgtcaagtttaccgggccgcgagggtgcaggctgcgcagatggtgtggtcctgcgccccgagggccgcagcagctcatccggcagctcccaccccaacaacctggaagggggcgg

SEQ ID NO: 319581 - DNA, 122 bp, Homo sapiens
cgcttgcttgagaagccagagctgggaacagggtctgaagtcaaatacagatctatggggcgctgagcttcctgtgcccccagcaggaggagaggatggggggcttccatgcagggcctggc

SEQ ID NO: 319582 - DNA, 122 bp, Homo sapiens
tagagttattatgaagaagaagtgagtgaactcctatcaaatgcttaaaacggtgtctgtcgtatagctacctgaacatgagaacaaggttggtcatgtagtcattcaatgttagtgattat

SEQ ID NO: 319583 - DNA, 122 bp, Homo sapiens
attagggcaggtcgggatggggtgacggctggcattgtagccaggtggccacagaggggacgtctgagaaggaagagagctggggaggctggcaaagctggtgcagtgggcgggtactgagc

SEQ ID NO: 319584 - DNA, 122 bp, Homo sapiens
gccgacacatagttcgggtcggggccttgggtggtcctgcatggcccgggactcatctcacggaccctccgttctgcattaagccccaggttctcttctggctttgaaagggcccgagtgct

SEQ ID NO: 319585 - DNA, 122 bp, Homo sapiens
agggcaggattgtggattgtttctgccgccttggttgcccatactgggcatctctgcaggcgcgtcggctccctccacccctgctgagatgatgcactgcgaaaacattcgctctccccggg

SEQ ID NO: 319586 - DNA, 122 bp, Homo sapiens
aatcagcaagggggcgcctgctgggaactctttcctctcctggaagttaccagggatacacgggcttggccctgaaggggcttctgatcaaattgcagagaccagacagcttatcgaacagc

SEQ ID NO: 319587 - DNA, 122 bp, Homo sapiens
cggggggcggggcgcccccgctgcggggagaggtgcgggggcggggtgaggaccggagggcgcccccactcccgcccccgctgcctattaggtcctctgccggggaggaaggggcttcgcgg

SEQ ID NO: 319588 - DNA, 122 bp, Homo sapiens
acgcggtctccgggcggggcgaagcgcagggaaggcggcgagggggtccccacacccgcacggggcaccgggtttgtccatgtgggtgacactgccttcaaggcccaggcccgatggggccc

SEQ ID NO: 319589 - DNA, 122 bp, Homo sapiens
aagcaattgtaatggacacgtagggagtgcagtcctgtttggagcacattcgcctgagaacggagaagagtagctggagggggaaatggcaaagaccaggctggcataaccagtagcggtgt

SEQ ID NO: 319590 - DNA, 122 bp, Homo sapiens
tgccacttagcagctgtgtggccctggagagtccctaacctcactgaacctcagtttctccgtttgtgaaatggagataatacaaagagaactttccttctcaggctgttgtgatgggtaag

SEQ ID NO: 319591 - DNA, 122 bp, Homo sapiens
tctgattcatacttcaaaggagctcggaaactctccgggtgcgccggggagtcctggttccggtgtcctgggactcctgggcagggtaacgaaaccacttttaaaaactttgccgggcccgg

SEQ ID NO: 319592 - DNA, 122 bp, Homo sapiens
ttagactggctcagtacgcagcctgaattttgatccagttaatctgactttcaatcctgtcgtccacaacctgtgtttgtcccaaatacacatgagtatacaaaatacacataagtattttt

SEQ ID NO: 319593 - DNA, 122 bp, Homo sapiens
gggtgggtggggggaccttgggctccagccccacaagggcgtcttctttggctggccaggcggacgggacgggggacgggggcggggactggcgggaggggggcgggacaggctcgctctcc

SEQ ID NO: 319594 - DNA, 122 bp, Homo sapiens
atctcctgcagaaacctttgactgatgggagccaaaagttccatttttctcccttcttctcgcactgttccaaaacagagtggtctccactatggaggcatcgtgagagactgagcagccag

SEQ ID NO: 319595 - DNA, 122 bp, Homo sapiens
gcggttcctcacttacctttcttatgtaaaagagggagcgacgcccgcagctttttctctcggtaaactacccgtggctggaaatcctccgggcgcctggccctgccctcttccctagaaat

SEQ ID NO: 319596 - DNA, 122 bp, Homo sapiens
gggcggaagggacgtgccgtgattgaaaggtgccacctgtcagatcttccacgggaaatccgagcctcccagtctagggtaaagtgttgtaccaacaggccagtaaacaatgctcttcaggc

SEQ ID NO: 319597 - DNA, 122 bp, Homo sapiens
aggaacgaccgccttcccgaagcaccgcagggttcgccgcacaacgccgctggtgaggaccgagcgcatctgcccacagcgccccagccgcgcctggagcctcccgctccccagggagaacg

SEQ ID NO: 319598 - DNA, 122 bp, Homo sapiens
cccgtccttagcatcttctgtggaactccctcgccctgcgcgatcgcgcatcaaactcatcgtggaggggtcaaaaggcaactgagtaacataagaggggctgcctccccttcctccttccc

SEQ ID NO: 319599 - DNA, 122 bp, Homo sapiens
cacgcgcaggggcccgggaaagggtcagaggcttcctaacgcagactcgagtgcgaagcgcgcagtcgccgggtgggtctctccccagcgacgatttgggtggtgagcgactgcgccttggc

SEQ ID NO: 319600 - DNA, 122 bp, Homo sapiens
ggccacaggatcacttgagtcatgagtcataagtctcgatggggtgagtctgaaatataccgcaaaaaagcagtcttagattctatagtaatgatgttatctataggagcaattggggaagt

SEQ ID NO: 319601 - DNA, 122 bp, Homo sapiens
gtgtgggaaaaggtcacaccatcatcaccacacccggcgtcatgtgacaggaatacagtacgtgtcaggggtatcactgtgtgggaaaaggtcacgccatcatcaccacgcccggcgtcatg

SEQ ID NO: 319602 - DNA, 122 bp, Homo sapiens
aaccagcacgagatgagccacgtttcatacagttgagcctttgctcactgtggtagaacacgccccgtaagtctccaaagtagcacattgcagagaagctgttaaagaccacagaagggttt

SEQ ID NO: 319603 - DNA, 122 bp, Homo sapiens
ggaatccctggcacaaaatcaccgccgcgctccagccttctccgccctctatggagaagccggagtaacggcctcagaaccgcagtgccgcatcacaccccacccctcgccgcccgccagcg

SEQ ID NO: 319604 - DNA, 122 bp, Homo sapiens
aaatctaaagtaaatattctcacctcactgtacagataaaaaaaaactgagccacagagacgggagagtaagtgtaaagccacacagctagtaattgccaaaggattgaaccctggtctgat

SEQ ID NO: 319605 - DNA, 122 bp, Homo sapiens
gggcggggctggggcggggccagtgctggggcggagccggagctgggggcggagccaagacgcggcaggggcggagccagcagctgcggcacagcggggcctgtgcggcccaagtcgtccct

SEQ ID NO: 319606 - DNA, 122 bp, Homo sapiens
agagcggatcatttataaagctcaaggccacacggcagcggaagagcagtcctccaggcgcgcacagacgccgggagctcgggaggtcagaaagagccgagtggttgaaaacacagcccctg

SEQ ID NO: 319607 - DNA, 122 bp, Homo sapiens
ccctcctttctcatactccttctttctctctctcttagactagtactagtctcctgtgtccgtcgtccttgtatgtggcgccctccgtgtgtgtgtgtgtgtgtgtgtgtgtgtgtatgtcc

SEQ ID NO: 319608 - DNA, 122 bp, Homo sapiens
ccggagctccgtttccgccccagcccgagactcactcgtcagtcccgcagccaccgcagccgggtccccgcgtactgccacagcccctatcccagggccgcccccccacccccagctgcctg

SEQ ID NO: 319609 - DNA, 122 bp, Homo sapiens
cagcgcgagggtgtgcgtggcaggggccgcggcggcgtgtgccgtgcgtggggtggggtgcgggctgggcggcctcgccttcgggccccgcgccgccggggcgcggcccccagctccatctt

SEQ ID NO: 319610 - DNA, 122 bp, Homo sapiens
cagataaattcctagtgtccaccaaattcctcagcgctcgctcaccctcctctacggccacgactctgggagtggggaaacagagagccggttcctctgctgcagaagtcctcggggttcct

SEQ ID NO: 319611 - DNA, 122 bp, Homo sapiens
tcgctgggctccagggttaaccggtctctaacccattctttactggacctgccaacttcgcgcagggttggtaacctagcaaccaagcaacacgagcagtgacttccggtacccggacttgg

SEQ ID NO: 319612 - DNA, 122 bp, Homo sapiens
ttggaggaagagctgatgccaggttttgggagtgagggagagagattcctagggctacttcggtggtggttgggtccccaagctccaagactgagtccagaccagggccccgttggtggtga

SEQ ID NO: 319613 - DNA, 122 bp, Homo sapiens
gcctgtgactagggggtgctggccacattccaggtcatggacagtttggtgactctccaccgggattttgtgccagcccagccacatcatgaatcagggcccataggatgggggccgagggg

SEQ ID NO: 319614 - DNA, 122 bp, Homo sapiens
gctccgctgtgacagtcaccacatattctacgcctggcatcaggtcagtcagcagcgtcccgtctgcttcagggggcacttccagcctcaccctctggttgccggcactgacgtaggacacc

SEQ ID NO: 319615 - DNA, 122 bp, Homo sapiens
taaggctgtcgatatcctcctcacagaattccccaaagtacattgtatttgctcccttaccgacctgattctcccactattcagttcattccttgatgctgttttaagcaacccctgctctg

SEQ ID NO: 319616 - DNA, 122 bp, Homo sapiens
atttttttcaggttgttttattttagtgggtaatttgggaatttaggttgatttcatagacgactgaaatgcttgaggcaggaagcagtgaataccactcattggtattacatagagcttga

SEQ ID NO: 319617 - DNA, 122 bp, Homo sapiens
ttaagagctgtaacactcaccgcgaaggtcctcagcttcgctcccgagccagcgagaccacgaacccaccagaaggaagaaactcctaacacaactgaacatcagaaggaacaaactccgga

SEQ ID NO: 319618 - DNA, 122 bp, Homo sapiens
ggggtcaggggtcggggagaggggtgagaccgtctcttccctttctggcctcactgcccccgactgtaaaacgaactgcttggttttgataggttgtggtttcaccaccactgcgagcctca

SEQ ID NO: 319619 - DNA, 122 bp, Homo sapiens
aggaaagaaaactctcatgctgattaaggatcacgcatttatttggtcagtgtatttaatcgttgacataattaacaccttttaaaatgagcggggatttgtattttttctcataaagctga

SEQ ID NO: 319620 - DNA, 122 bp, Homo sapiens
ccaaagtgctgtgattacaggcatgagccaactcacccagcctctaattgcttttagatgcgaatccttgggatcgcttattttcctttttttttttttttttgagatagagtcttgctctg

SEQ ID NO: 319621 - DNA, 122 bp, Homo sapiens
catgacattgaaggtagagtcggcatggcaaggggtgggctgtttaatcctagacaaccccgggcacttgatgccagtctcacggtcactcttacatgaggattatttattactgaccaccc

SEQ ID NO: 319622 - DNA, 122 bp, Homo sapiens
tgggatccgcgagggcctttgggaaatgtagtctttaatctggcccgtgacagatgcttgcggaggggcgcgttcaaactcagaccgtgaccccgctaggaataaggggatttacacaatga

SEQ ID NO: 319623 - DNA, 122 bp, Homo sapiens
agacctggcccagtggagcagagcctggaggttcaggagccgggtctggaaggctccttccggtggaagaggggcccggagccagccggcgcctggcacaaggcgtctcagaggccgcccac

SEQ ID NO: 319624 - DNA, 122 bp, Homo sapiens
gagggaaccgtgctctccccctgaggaaggccctttggagtaactgcagcaatgagtgcccgggctgtgcttggagtaccagtgctcgcccggggctatactgaatgagtaagcagccccgt

SEQ ID NO: 319625 - DNA, 122 bp, Homo sapiens
ggaggagagggtgccgagatccgacggcaggcccaccgcgggcaggctgcgggtggcgggcgtctccgggactctgaagccgttctccagaggctgcccccagttagcccccggcacggcag

SEQ ID NO: 319626 - DNA, 122 bp, Homo sapiens
tggggaatttgtttgcgctgcggaaaaccagcccgaactgtggggatacgcggaacagcgcgtctggggcagggtcgggcctccctcacttatgctcagcccgaaagggagggaggcgatgc

SEQ ID NO: 319627 - DNA, 122 bp, Homo sapiens
ccccagttagcaaatggggcaagtggggcccagaggtgagaagagatttactcaaggtctcggaaccaatctgatcctgagccagactgcctagctctaaagtccagttctttgctctcagg

SEQ ID NO: 319628 - DNA, 122 bp, Homo sapiens
ggtcctcctccaggtccgagatggcgccgggggcgccaaggtagagcaggagctcctggccgacctgcagccggccgccgacgtccttctgctgcacctgggcgcagaagtactccatgctg

SEQ ID NO: 319629 - DNA, 122 bp, Homo sapiens
cccaccacgtggtcgtctccagtgccccatccctcggggcgcacccagttcacactgacccgcctggctgctccagcaagaatgaggaagtggctttgtattgaaaagacccacgctgagaa

SEQ ID NO: 319630 - DNA, 122 bp, Homo sapiens
cctatgggatataacatcagaaaagatagcgcttgtacaccacaactctaaagttggtggcgggggaaacggggagacctagcacccttctagaagattaatccaccaacatttcaaaatct

SEQ ID NO: 319631 - DNA, 122 bp, Homo sapiens
ctaccccatctccattattttgcccccatccgccgcggctttttcccccccaccccgcctcggctttttgcccgccacggatttctgtcccccgccgccgcgactttttgcccgccgcggct

SEQ ID NO: 319632 - DNA, 122 bp, Homo sapiens
tgtgggacaggcaggtataggtctgtctctgcaggagcttgaacagcatcaccccttcaccgccacgccacgccccgaggagcctgagccgccgccgccgccgccgccgcctcagcgagccg

SEQ ID NO: 319633 - DNA, 122 bp, Homo sapiens
gccagctcctggcgggtggaggtgctgggtgggagcagtttccttcctggcttctttctccggcgctcactgcagcagcttcaagggtgagagttggaggccacagagccggggcccatccg

SEQ ID NO: 319634 - DNA, 122 bp, Homo sapiens
aatgttcagggaatttcaattggcattgctgtcccgttccagccaactggctaacggtgccgagtttgaatcagtgacccgcctcctggtccctcctccttagccggcctctctccctccct

SEQ ID NO: 319635 - DNA, 122 bp, Homo sapiens
agacaagcaggcatgacaagatgggcgttaggcctgttgccgccaggttttgccggctgccgtccttcccaaggctttcccttctccatccatcctcccccggtccctcgacacagcactag

SEQ ID NO: 319636 - DNA, 122 bp, Homo sapiens
gcagttaactctgagcattcggaacattcgccgagtggaacgtgtgtgtcgtcatcccctcgaaggcttggctgattgagccagtaaacaaaaagtgcattcaacacaggcttgtctgctgg

SEQ ID NO: 319637 - DNA, 122 bp, Homo sapiens
tccaacacatgagtgaggccttcttggatctctagctctcgtcaagccttcccaacaccacgaggaacaaaaatgagccatccaaatgagctttacccaaattcctgacccacggtgtcaag

SEQ ID NO: 319638 - DNA, 122 bp, Homo sapiens
catgtcattatgatatttaaaaagctctatgtctctggacctcaggccagggcttagaaacggtttcatggtagcaaactaagcattccttgtaacaggatgtgaactgcaacagaatgctc

SEQ ID NO: 319639 - DNA, 122 bp, Homo sapiens
ttgtgggggtgtcgaaggcgggggtgagggaggggggtgagctggggctggacagtgagccgaggctccagcagatgcggctgaaggaacaaactttaagggaagaggctgtgaaccaggca

SEQ ID NO: 319640 - DNA, 122 bp, Homo sapiens
caatggcagtgatctcctcccgctgcttcctgagctcttcctcatccacctgggaaggggcgagaggcagggacaggtggtcaccgtcatctgcaaggatcacccctgccctccactgccca

SEQ ID NO: 319641 - DNA, 122 bp, Homo sapiens
gccgtcccgttgcaccgccgctctgtggccttccgctagtgggcgccgctgagcggacttcggcgcttctgcctcagcactccagagccccacagcctgcgtcaatttccaatcctgactga

SEQ ID NO: 319642 - DNA, 122 bp, Homo sapiens
acctgaaagggaagcagcccccgctcttgaaagagcagcgagggagggcgagcgaacgaacgccccggaccttacccgcgccccggcccagacccgcgccccggcccagacccgaacccgcg

SEQ ID NO: 319643 - DNA, 122 bp, Homo sapiens
gaggagcaacgttttgggaagttgagtcagactgggccaggggatgggagaggagggcagcgaccaagagaaaagagggaaactgggagcactgaggggggccctccctctaggcctggtga

SEQ ID NO: 319644 - DNA, 122 bp, Homo sapiens
agcataacaaacatgtttagcgtctagtagaattctgtgtaagctacaagtactaccacacggttctgcttaaatatacacacatcctcacgtataacatcaaggttttttttttcctgcaa

SEQ ID NO: 319645 - DNA, 122 bp, Homo sapiens
ttgcgaaagctggaagtaaattgcttccgaatgtttcgcttgtgtaatagccgctccactcgccagaagttgctaccctgagcccgtctccacaatgtgcctctgagggaccttgtggggca

SEQ ID NO: 319646 - DNA, 122 bp, Homo sapiens
gggagatttctcttgctgtcacccctcccccctcggccgctccccggcggcccgggctcccgcgcgcagctcccgggcgccacttttccaagctactcaaatgtctcggggaggccctgagc

SEQ ID NO: 319647 - DNA, 122 bp, Homo sapiens
atcgttcgtgagcgtcgccccacgtcgctcccgcctgcccctgcccatacgactcgcccgcgcccgtgggttaaggctgtctcccgcccagcctacttggttgattcaatccttttccccat

SEQ ID NO: 319648 - DNA, 122 bp, Homo sapiens
tcagaagggcggtgtcacgtgaagtgcagctggtgcgggtggtggagaggccaagcctttcgcaaaccacctacaactcttaccacctgaatgaagcttctgagaaggggtactgcatcttg

SEQ ID NO: 319649 - DNA, 122 bp, Homo sapiens
tcatcatttcatcccccctctccgtggagtttaagaacaacaccgcagagttggtgtacacgcactgcgatactgagagtaatgtcatcctcctccccctgaatattaaaaacaatatcacc

SEQ ID NO: 319650 - DNA, 122 bp, Homo sapiens
acctggaggccatcctggcggctgtgccggcccgcaggcagacactgctgttcagcgccacgctgaccgacacactccgggagctgcagggtctggccaccaaccagcccttcttctgggaa

SEQ ID NO: 319651 - DNA, 122 bp, Homo sapiens
ggagggaagattatccgcgctgcagagactagctggcctccggaagccgcctcctgaccccgcgtcaagcaccgcggtggatggcgcaacccagctttgggaattaattacccaaggcgcgt

SEQ ID NO: 319652 - DNA, 122 bp, Homo sapiens
agccgcccggatcccaaggcccaggggacctcatttcctctcgggttaatcggaatcttccgagccctcaagcccttcctcctccactcccccgccgctgctgtggagaaccggagccaccg

SEQ ID NO: 319653 - DNA, 122 bp, Homo sapiens
tagcctctgtaagcccaggtgcaccccagctggccaggggttcacctgcatttgctccagcggtttgcgtgacttcccaggcctctgcaggcagccttggagtgggttcctgccccctcggg

SEQ ID NO: 319654 - DNA, 122 bp, Homo sapiens
aaaaggcaaagcacaattcgggtgggaagggcagtgtgcagcgttctccgttgtctgttccgcccccaaaagcttccctcctttaggtttaacctgcgcccccgcgctctgcatcagcgcgg

SEQ ID NO: 319655 - DNA, 122 bp, Homo sapiens
atgccgcggggcgggtggcgaaggcagggtctgcccgccagtggattcccgggtgtcccgcgtggagcaggcttgcccagctgggaagcccatcaaacctcagtcttggcccacagtgggag

SEQ ID NO: 319656 - DNA, 122 bp, Homo sapiens
ttcctgtatctgagaacggagtcgttgggggtggtggagggggttggaattggggacctacggaaggtgaggatcagcctccaggcacaacaggggagaggacgttcagtgggcttcaactt

SEQ ID NO: 319657 - DNA, 122 bp, Homo sapiens
agagccaagcaacgctgttggaatagagacacaccctgggctagatgcagtgagacctggcgctttggggtagcaagggtctgggggctgggtcctgtccctctggagtgcctgctgtgtgc

SEQ ID NO: 319658 - DNA, 122 bp, Homo sapiens
aaaagacaaatccacaagcatttgggcaaaccctgtgccaggagtcaaatacaccaaactcgatggaaagaagcactaacagcaacctaattaataaatataacaagtgtaactaattatga

SEQ ID NO: 319659 - DNA, 122 bp, Homo sapiens
cccattctccagtgaggtggaccgaggcaacccctcaagtcctgtccctccccatagtgacggctctgtagccgctgctggccaccagaggggactctcagctgccgcctgctgtactggta

SEQ ID NO: 319660 - DNA, 122 bp, Homo sapiens
gacccatttctctgtggcatgatactgaacaggcagcttcagccgtgaggatattttggccggaggaaaatgtagcttaagaaaagtcccagctggttcaagtgacttaagcccagctattc

SEQ ID NO: 319661 - DNA, 122 bp, Homo sapiens
gaatgaggattcagggacaccaatggagcatggaaatgcagttacaaaagccatcaatgacgctgtaagaagctgtacatcaccctggtgaggggtgactggttagtcagagggtcagagcc

SEQ ID NO: 319662 - DNA, 122 bp, Homo sapiens
tatgtaactccctactgctgtgtggttgagaccagctactatatgactcattttgtgtcccggtgatattgtaggtgtctagtgtagggacatctgttgtggtatggtgaactggttgtgaa

SEQ ID NO: 319663 - DNA, 122 bp, Homo sapiens
ggagggagaagaagatgtcacacatgacggtcgggcagctcaccccagactcagtgatggcgtggaagacgcggtccacatactgccgtaggttctcctgcaacgggacacggcactgggac

SEQ ID NO: 319664 - DNA, 122 bp, Homo sapiens
aggcgaaatggcactgaccatgcggagccagcgccggaaaagatggcgattgtgcgctgacgtcacttccgctccgagcctcgggccgggcggggctcctgggttcgagtttcagccacata

SEQ ID NO: 319665 - DNA, 122 bp, Homo sapiens
aggccgcctcaacagcctcgcaccggcccatcaaggggatcctgaagaacaggacttctacgactctctatggttgcgtcggcagaagaagagctgagaaaaaatcccggaagtgggatgaa

SEQ ID NO: 319666 - DNA, 122 bp, Homo sapiens
tccgggcagccccgcctgcagcggaggaggcagggagggaggcccctgccttccttcccccgggcagtgggaaaaaggccattgcctaaattctggctcttcctagtccctctgtgctgatt

SEQ ID NO: 319667 - DNA, 122 bp, Homo sapiens
aaggggcccccactacctctgcccccaggccgacccctgcaaagcccccagcgtgttccacggaaccctccctgctacccgctcccagcgctcctgtcgccctggcctgtgcttttgagtcc

SEQ ID NO: 319668 - DNA, 122 bp, Homo sapiens
aggatagccacctggaaacgtcaactccaaatgaagggggcccgtgttcccaagtagagacgttaaggtttcacacacagggaaagacagagaagctttaccagaatcacattttccattca

SEQ ID NO: 319669 - DNA, 122 bp, Homo sapiens
ttccaggtagaacgcccggcagccctcgtccttgagcttcttgagcagcagcccgagcaccgactcgccgcccgtattctcgttccagtcgctgctgctctcgtcgtagagcaccactgtgt

SEQ ID NO: 319670 - DNA, 122 bp, Homo sapiens
cagtttcttttccaccctaagtggtaggaaatgataactcgacatgccatgggtgacctgcgctaagcctttaacttcttgtcttgtgtttttagagaaaaatctgtaaaattgcttctggg

SEQ ID NO: 319671 - DNA, 122 bp, Homo sapiens
gctgggtggagggaagatgggcctccagccatgttgggggagggggtggctggctggactcggcgtctgtccccaggatgaagacaagcctgaggacgagatggcccaaaagcgggccagcc

SEQ ID NO: 319672 - DNA, 122 bp, Homo sapiens
ctgctggcaacgcagaggaataatatcttcccaagacgaaccggacattctgctcctcaccgtccaggacccagagctgaagaggaggacacacctagacacctttctgaggacaactggac

SEQ ID NO: 319673 - DNA, 122 bp, Homo sapiens
gctggagaatggttaggacacaggccttggaaggttttttgagtgtgaaatattactcagcgttttctgcagacctcgcgggcaatgccgcttctaattttatccaggccttcttctgtagg

SEQ ID NO: 319674 - DNA, 122 bp, Homo sapiens
ggctgatgcagccaaaagcgggcctggtccccggaagcgccctgagagccacttccgggccgctctaggaaggcagcaatgaccgccccactgtggtccgctggcccgaggggcggagccga

SEQ ID NO: 319675 - DNA, 122 bp, Homo sapiens
ctcttgtccagctcttctctcaaaaggactctgcagagctggacagcggctgcggaaaggcgaagttgttgtacccgagcgagttagagaaatgccacactttgagacgaatttaagagtcc

SEQ ID NO: 319676 - DNA, 122 bp, Homo sapiens
gccccgcgcagccgcccgcgcccacgaggagcctcccggcctgctggcaccgcccgcccgcgccctgggccttgacccgcgccgtgactatgccactgccgtgccccggctcctgcacggcc

SEQ ID NO: 319677 - DNA, 122 bp, Homo sapiens
actacggtaagaaagcggagaccttttgcttcgaggcggttggtggccagtagtcttgatcgacaagctcaggcctctgaactaagcagccgctgtttatgcacgtacagccaatggaaagg

SEQ ID NO: 319678 - DNA, 122 bp, Homo sapiens
ctcggccccaccggtcccgcgcccggaccctgagccctgcccctgggaacccgagggccccgactccgactgaccctgacctgggacggcgcccccgcctccgccctgcagaaggggcgcag

SEQ ID NO: 319679 - DNA, 122 bp, Homo sapiens
cagccacacccagcacccacaggcgctccagagcaccccggctcctcctgagggcccagccggccccacaagtcctcaggcccactggggcccatctgagcacttagcgcccgcactatggg

SEQ ID NO: 319680 - DNA, 122 bp, Homo sapiens
tctcactatgcggcctctaccctctcactatgttggaattcgaggctggtcttgaattcccgggatgcctctgcgcttcagttttctcctgtctgaaatgcaggtcatccccagctcctacc

SEQ ID NO: 319681 - DNA, 122 bp, Homo sapiens
ggcaagggcgtggagtctgttctatagtcgctgcctgccaggcaccgaactgcttacccccgtctttgaactcctcgcgcaggtagacccagcgctgggcgcacgttcccagggtgcaggtc

SEQ ID NO: 319682 - DNA, 122 bp, Homo sapiens
caaatcccagttgggctcttctctcaaactgtgactgcagcctgagttagacttctgcaacgtcccgtgaggtgggatcaggaatggcttccctccattcttgctggaatctgggtctgcac

SEQ ID NO: 319683 - DNA, 122 bp, Homo sapiens
cgtagcaccagagtcgcgggtcctgcagtgccccagaagccgcacgtataactccctcggcgtaagtgctaggaatgccgctggcctcgcggggaaacgcattctttctatctatagctcgc

SEQ ID NO: 319684 - DNA, 122 bp, Homo sapiens
tcagaaggggaggtaggctgctatggtgagggtctgggttcagaaacaaactgtatttcacgtcccagttctatcaattatttgctataggactttcaacaaattgcctaatctaatccagc

SEQ ID NO: 319685 - DNA, 122 bp, Homo sapiens
tgattaggtgtcctggctcctggtttcccccctgtctaggacagttcttcaggctctcctcgtctctctcggcctgggtgccttgaagccttctgtcagtcactcggaagcacgcccctctg

SEQ ID NO: 319686 - DNA, 122 bp, Homo sapiens
tggagccatgcgtctacaagtcaagcattgctggagccacagaagctggaagaggagaagcgtcctcccctaagggctctggagggaccacagccctgctcacaccttggttgtgtactttt

SEQ ID NO: 319687 - DNA, 122 bp, Homo sapiens
ctagaaaaccatctctcctctgcttaagccaaacaaaccaaaaatacctcttgtggctcacggttcccaagcttcctggcatggctccgcacaaagctgccttcggttcgcccggcaggctt

SEQ ID NO: 319688 - DNA, 122 bp, Homo sapiens
cccaaaactccggcgccagtcacagactcgggaaggcagccttcccttggtgtttaatcacgtggggatacctgcctgattattcacacacatttcaggtgtgtctgaccacgcggggacgc

SEQ ID NO: 319689 - DNA, 122 bp, Homo sapiens
gggtagtgcagcttccccgtgcggtagaagttgagcacgcagcggaacacctcggggtcccggtcgaagaagtactccttggtgtcctcgttgaagaagaactccttctccgtgctgcccag

SEQ ID NO: 319690 - DNA, 122 bp, Homo sapiens
cttcctgtaacatgcggacgggggcttccgcacaggcaggttgtcagggtgaaactgagccgaagagtgctccagaaccccctgaagtcctcacagaggttggggtgaatgaaggaaggaag

SEQ ID NO: 319691 - DNA, 122 bp, Homo sapiens
cacaggggtcctgctgggtgccccacacggctggttcccagggtccctgggcccagtggccgtggtgaggaacttggggagccggagggagggagaggccaggcgtggatcgtggcctgacc

SEQ ID NO: 319692 - DNA, 122 bp, Homo sapiens
tgatcatttgcctctcaagcagcctctggtcatctatctgcctttgagccatcaagatgccgatgtcttctcttccagcagctattttgtctcacatgacagctattaacaatgtgcctcct

SEQ ID NO: 319693 - DNA, 122 bp, Homo sapiens
gtcctctgtggagagtcacatcctgtctggccaggctccctggtgacaggggctaagactcggggaagggacttcatcctcagatgctggagaaagcagccagagagtcacagaggcagccc

SEQ ID NO: 319694 - DNA, 122 bp, Homo sapiens
tttctgatgccggcaacgaacgtgccagacgccagagtgcttggatccgcggcgagcccccgagctctggagccctggagccctggctaagttccagctctggcacctgtgagtcagggcga

SEQ ID NO: 319695 - DNA, 122 bp, Homo sapiens
gtgttactccacgtgttccttctaagagggacagggctctgcttgccatcggaaaggtcacgtgggaggctggacgcagtggctcatcccagagctttgggaggccaaggcaggaggatcgc

SEQ ID NO: 319696 - DNA, 122 bp, Homo sapiens
cttaaactggaccaagaaatcctctgcggagaatcacggcgggtcagtcaggccccagcacggccctagccccagcccccagccggaccgcacccttcagccgctgccctgacccggccagc

SEQ ID NO: 319697 - DNA, 122 bp, Homo sapiens
tgtgcccggccattccacagctatttacataattaactgttcagttacaattctggcaagcgtgctgaagaaataacaggtcctaaataattacagctagtattacaaagcaagcgctgcat

SEQ ID NO: 319698 - DNA, 122 bp, Homo sapiens
cgccatccacctcccttttggttccagccacagaggcgtgccttccacagaggcgtgctccgcagcgccgccctccagcactccgcgcatcggcccagggtgctgcctggctcccaggcgcc

SEQ ID NO: 319699 - DNA, 122 bp, Homo sapiens
actgaaagaaaaacaaaaactattatctctctctcaaagacaaatgcgtgcaaagtcacacgtgtgggtgtgagcacacacacaaacacacacaaagacacacagagggaaaaaagaaaacg

SEQ ID NO: 319700 - DNA, 122 bp, Homo sapiens
ccaagctttgcgttataacaagccagggaaggacctagggaggttcccttccctctggaacggaaatggaactttctctgagcttaggatttgtaaggcactgaaattaactacagctgggg

SEQ ID NO: 319701 - DNA, 122 bp, Homo sapiens
cgcttacttcactgccgacagcctgaaacctcaggggcggatgacaacagccagtgtgaacgaagcgccaccctccgggtcagccgagcatttccgcttcccacagccccctgggaacgtga

SEQ ID NO: 319702 - DNA, 122 bp, Homo sapiens
cagggcatgtgggtgcactggcagtggttgtctttataagcagagcagtgaactctagaccgtagggcaaatattgtggagtaaaagaaggctggcatcttgaagcaaggcatcaggaaaaa

SEQ ID NO: 319703 - DNA, 122 bp, Homo sapiens
ccaccccccaaccctccgtggggaggggcaggcgggtgtgggatccatcacgcccgcccacgtggatggcttcaaagtgaacagttggcattcctgcggggtggccctcgctcctgcaatag

SEQ ID NO: 319704 - DNA, 122 bp, Homo sapiens
ctcaagaagtccaaagaagactgattttgctccagcattaatacaaactagttctgtggtcgagtaccagataaaagctgtggttgtaccaaagaatactagcaggtagaattgaattcatg

SEQ ID NO: 319705 - DNA, 122 bp, Homo sapiens
actccacagagtcttggggccccggtacggctcacctctctcagcattcttgaatttgatcgttctccgcctgggtagccagggactggcagccacctcagccaggaacccggagctgcaga

SEQ ID NO: 319706 - DNA, 122 bp, Homo sapiens
agcagtgggtctgacggagtcagagcggttagcctgatccagccggggtcccaggaccaccgccccagaggactatgcaatgttctttatgtgtgtgtgtgagtgtatttgtgtttccaatt

SEQ ID NO: 319707 - DNA, 122 bp, Homo sapiens
gggcgccactgggctcatcagactgagctcacggtgccccctggtgggcgatgccagtggcgccagtgcagcttggagcccgcaatacaaggtgtggcttctagaaggtaccctggtttgag

SEQ ID NO: 319708 - DNA, 122 bp, Homo sapiens
catgacgcagactcagttctcattcccaatgggtgtcgggtttctagagaagccaatcagcgtcgccacgactcccgactataaagtccccatccggactcaagaagttctcaggactcaga

SEQ ID NO: 319709 - DNA, 122 bp, Homo sapiens
gccggggcagcgaaaggttctctctccagggctggacttaataactttgaaactgtccaccggtgtcacgtcctgaacatgagcctcctcctctccttctacctgctggggttgcttgtcag

SEQ ID NO: 319710 - DNA, 122 bp, Homo sapiens
ggctccgacagaaaacagccagagcgcaccactcacctgagtgccaggtaaacacctgggcgcgacagggacaggaaacaagggtagggtgcggaggctggggaggaagaggttggaaaggg

SEQ ID NO: 319711 - DNA, 122 bp, Homo sapiens
ggcggtcctgcctgctgctgccttctctgcctgctgggtgtgagcaaatgagcgagctggcgcttcttggagccacagggaagtacacgtgggtctacctttatgagcacggcagccagtgg

SEQ ID NO: 319712 - DNA, 122 bp, Homo sapiens
gttgagtttctcaagtgtcccttacctggtttccttataaagatataggtatctagattacgtatgttgttatacagattctctatctatctgtctacctccattttaggaagtcaccacct

SEQ ID NO: 319713 - DNA, 122 bp, Homo sapiens
caacacgcacaccaagtctcaattgctggcaggctgcacccgccactccaggtctggtcacgttcagacccgtgtctgtattcgaacccaaaattggagccgaattgatgagactaatttct

SEQ ID NO: 319714 - DNA, 122 bp, Homo sapiens
aatgttatatttaattacaaaagtgagaattaactttcagttgtatcctctgtgtttctccgagggttgcagcttgctgctttttgtagctcatgtctatgtgtgattcactattgagaata

SEQ ID NO: 319715 - DNA, 122 bp, Homo sapiens
agcatagccacacaggcatgggtcgcctggaaatcagccaggagcaggcagcagaagcagcgattctctgctgggcatgtgtttttttggatgatggatgggaggtaacaaaaaaaaaaaaa

SEQ ID NO: 319716 - DNA, 122 bp, Homo sapiens
cttatagctaagtgcgagaatgcaggggagcatttagtgcagggcctgccgcacacagctcgctcaataaatgcggcgatcactgtcatcctggagagagcccgggtttgctggggacttga

SEQ ID NO: 319717 - DNA, 122 bp, Homo sapiens
gagcgctgtgcggtcagggcggggctcctgtgccctgtcggtggcgcagggagctggacgcggcccgttaccgccacacttcagccctgcttccccgtcacttttcagtcctcctcgggatc

SEQ ID NO: 319718 - DNA, 122 bp, Homo sapiens
tttatcactgagtgacagcggagcaggaaggggcgtggttgagctggcctggcttcagtccggcttgtccccgccaggacgtttgcgtttaaaccgaatgtgttctttgcctcccatccatt

SEQ ID NO: 319719 - DNA, 122 bp, Homo sapiens
ctgtcgggggtcagcctttcttccttttcatggctaaatcgtgttccatcgtgtgggtaccggaggctccatcctgctcagggccagggccgtctccctggcacggccggtactgccctgtg

SEQ ID NO: 319720 - DNA, 122 bp, Homo sapiens
tgcaaccccgaggtcacccacttcaaatggcctctctgtgtctctcccatggggcagactcggggttcaaaagccttctctctgatctttggccggcccggttccatctcccctctcccctc

SEQ ID NO: 319721 - DNA, 122 bp, Homo sapiens
gctactagatggttggattagtcttttgcccctatacccagatcagatgaccgatttgcacgtcaggaccactacagacccccaccagagtttcctctcgcttcgccctgcccaggcatagt

SEQ ID NO: 319722 - DNA, 122 bp, Homo sapiens
agaaactattttgtgatgtgtgcattcaactcacacaatttaacctttctattcatagagcggttttgaaacactctgtttgtaaagtctgcacgtggatatttggacctctttgtggccct

SEQ ID NO: 319723 - DNA, 122 bp, Homo sapiens
cattttattgctgggtagttggggtagatcgccgacacattctgccgacaagtcagactgcggttctgacctgaaggcctcggtgaacataagcaagggcacctgggcgcggggagagccgt

SEQ ID NO: 319724 - DNA, 122 bp, Homo sapiens
gcttcctgaagctgctggtccagggaccacactttcagaaccactgcaatggaaatggggcgatacaggcaagttccctaattagtgagatggggaaagcatggtgacgtgggccccagtcc

SEQ ID NO: 319725 - DNA, 122 bp, Homo sapiens
gttatgtgagctgtcacggggtgacctggcataccatgacaggccggagggagggtggggcgggtcccaacctcccaggggcagcaggtactgggcagctgtgccgtgtgttcccgagacct

SEQ ID NO: 319726 - DNA, 122 bp, Homo sapiens
ccctgttccgagcgggccggatgtggcaggatcccgggagctcgggagccacgggaaggccgcgggcgagcggctcgagggtccacgatccgagccccgcggccctgggcgggcggtgacag

SEQ ID NO: 319727 - DNA, 122 bp, Homo sapiens
tcgcagcacaacgaactcactaggacaagcggctccgcatggggctgggggctggacgcccgccgccagggactgagaaggcaacgatcaaagccgccacaagggtttgttagctggccctc

SEQ ID NO: 319728 - DNA, 122 bp, Homo sapiens
tgcagcccctgcccggccgccaccccgtctggaaagaagtgaggagcatctctgcccggccgcccatcgtctgagatgtggggtgcacctctgccccgccaccccgtctgggatgtgaggag

SEQ ID NO: 319729 - DNA, 122 bp, Homo sapiens
gccctgcctccatcccgcagggcacagagaagcctcttctgcccctgccagatgtatggccggcagcttccccctctcatggtaggccagggactgggctttctccccactaagggcaaggc

SEQ ID NO: 319730 - DNA, 122 bp, Homo sapiens
cagaaaaaggcttctgcgtctccggggccacagtttttcttcctggatgaagaaaactgccgtccgggggcccagcctgtccctggccgcgctgccttgacctcggcagcggcctggaaaga

SEQ ID NO: 319731 - DNA, 122 bp, Homo sapiens
ccccccacaccctccccagcgcctgcagcctccggtgcgcgcaggccccaagcccacatgcgcagtcctcaccttgcgcgcagccccatgtacagccccggacgggctcccagccccactgg

SEQ ID NO: 319732 - DNA, 122 bp, Homo sapiens
tctacccgggaggcagaggctgcagtgagccgagatcatgccaccgcactccagtctgggcgacagagcaagaccaagaaagaaaaaaagaaaggaaagaaagaaagcaaagaaagaaagag

SEQ ID NO: 319733 - DNA, 122 bp, Homo sapiens
ttctttttttttttttacatttttttgagaaaagagattactaggccacaccacacagagcgatccttcttgaggtgaatgtcgggggttgtttatgaagctcaggcttagtcacaagttca

SEQ ID NO: 319734 - DNA, 122 bp, Homo sapiens
gttccatgtcctccatcatgaggcctttttaccagtttaattagttagtaaaggacagcacgctttcctctccaccttttatcaagaattctaaaggctttagagaaaaaatgactcaggag

SEQ ID NO: 319735 - DNA, 122 bp, Homo sapiens
caattgcgttacaaaaagaaaaaaatcacacaaaaagacacaatgttttaagaaagtttacgaatcgtgtgccggaccgcgggttgaacaagcttcatctaaaacttccaggaatctctaga

SEQ ID NO: 319736 - DNA, 122 bp, Homo sapiens
agtgccagggtcccccaggaccttaggcagccagtggctgtaggtgatgtgctgcagctccgcgcccacgatcttcctggcttcctggtaaaccgtgtttccctcccagtgggggttcaggg

SEQ ID NO: 319737 - DNA, 122 bp, Homo sapiens
cgggggcgggctccagggccgcgggaggccatcggcggctgaggctgggtccaaggggcccgtgggcgcggacaccacccgccggcggtccgggctggcgtggggggtgagcgggaagtcgc

SEQ ID NO: 319738 - DNA, 122 bp, Homo sapiens
cttggggagccatctgaggccaagatattgacgggggggattcctgggtcccattttcagcgcccagggtcacagatccacagtgggaagttctgtgggacacattggcactgagccacaaa

SEQ ID NO: 319739 - DNA, 122 bp, Homo sapiens
gcaaacatagcacctgatgctgggtgagccttagttgttcgttcgatgcagcaacatgtacgtacctactgtgtgccaggcaccgcctaggtgttcatgcatgtttgtctcatcctcagagc

SEQ ID NO: 319740 - DNA, 122 bp, Homo sapiens
cccggctcgccaactcggctgctctgggggattcgtgcgcggtaagaagctgcgcggtagcgcggtgaggtgaggttctcagccaccaaagctgcagggtctcgtcgttcgttccctctggc

SEQ ID NO: 319741 - DNA, 122 bp, Homo sapiens
agcctgccctcttgttgccgggggcagctccctgcagaatcccgggccccacccacgcggcgtgccctgcactcaccacaacaaccatgtcccagagctccttcagtaggcggacctcccgg

SEQ ID NO: 319742 - DNA, 122 bp, Homo sapiens
tctgccatttgtggggggtccttgtgtgctgtgtttgcaggcaccatgggtctccctggacggggttcggttccaccccagcgcccttgtcttgtttcatcgcccgtgtccgggctgtgtaa

SEQ ID NO: 319743 - DNA, 122 bp, Homo sapiens
tatgcttctcagcaaaatccatctaatagtaaacattagagtctttcaagttattaaatacgcataggttgttaagtaaattttaaagtatttgttaaatcaatcaatgagcaagaatgcaa

SEQ ID NO: 319744 - DNA, 122 bp, Homo sapiens
taggcagagggagcggggctgaccgccagagaaccggtaccaaccaccgcaagcaatcgccgagcctcccaccccagctttcaagacaggatttacgggtacacggtgtgaacaagacaacg

SEQ ID NO: 319745 - DNA, 122 bp, Homo sapiens
agggccgcgcccccgaggcagccaatcacaaagaggcgctgaggtcacgtccgagagagacgctctgtcgtccccacccttaagcgcgagatgtaacgtcagcgcgcgcctgcgcccgtctc

SEQ ID NO: 319746 - DNA, 122 bp, Homo sapiens
ggatttgggagcatctgcagggggcaggagggagaaaatgccttttttatgttatgtaatcgtgaaagaaaagtaaaacacaaagcaggaggaaagatcttaaaaggttgagtttgaacaat

SEQ ID NO: 319747 - DNA, 122 bp, Homo sapiens
gcccgcagcggacccagccaggtagcgaagggcttcccacgccttcccctctggcgcatgcgtgtagagacatcctgcgtcctagaacatccatttatcagtgattcatcttttaatttata

SEQ ID NO: 319748 - DNA, 122 bp, Homo sapiens
gccggggaggttgtcccacatatgttctaccaaggcccctctggcactgagatcaaaccccggaagacccgctcagtctctcctcccgtcttttcaacacgttagcgcccccaggtggctaa

SEQ ID NO: 319749 - DNA, 122 bp, Homo sapiens
caaatgagggatggtcaaccaagggcacagccactgggcacagggtcagggtgggaggcacgggagggctctgaaaacacagccacacacccttttaggcccatccttcccattctgtactc

SEQ ID NO: 319750 - DNA, 122 bp, Homo sapiens
tgcggccgctgcagatgtggcgatgaaggcggcggctccctcgagggccagggacgggcccgaacccggggatgcgcgcgcggatggccgggccccggggtggcctgcgggcggcaggggat

SEQ ID NO: 319751 - DNA, 122 bp, Homo sapiens
ctgatgccttgattcatttcttgaagtgagggacttgagggggtgtgtctgcagcactaccgaggtttagcactaagatacggcttcagagctgtcactcaaataattccctacgactggag

SEQ ID NO: 319752 - DNA, 122 bp, Homo sapiens
tcttatcagcattttatggaattttttatagccataatttgttcttttcctccttaccggcgctcaaccaccatggcaaccaccaaacccctagtgaggaggaagcttggggtttgagtttc

SEQ ID NO: 319753 - DNA, 122 bp, Homo sapiens
tgggggctgagccaggggagagggaaaacagccatcagcgtcgcgggctccttggtgaggcggacactcacccgccagtgaaggcatctggagcaggttccaggcccgatcgcagtagcctg

SEQ ID NO: 319754 - DNA, 122 bp, Homo sapiens
gaaagagcgtcccaggccttcctcctcgcgcagccaggccggcgcccactccgcaggctgcgaggcgaggcccccagcacccgcacacccccgccccggattggccagccccgcagtcactc

SEQ ID NO: 319755 - DNA, 122 bp, Homo sapiens
tgctttcgtattcattattttctgttagttttggtctattcgctacatgactcttgtattcgttttcccttcatatatttatcttcacagattggcctcctcaaacacctacgaagcaacat

SEQ ID NO: 319756 - DNA, 122 bp, Homo sapiens
tttcctctttaattacttacacctccctctgggcgccgacattttgggcagcgggggcagcgtcacttccacccggggggcccctcgacttccgcctcagctcccttcccccgccgtactcc

SEQ ID NO: 319757 - DNA, 122 bp, Homo sapiens
gtggggatgggcgtgggaccctcgttcggggcatcaggctggaccagaagaggagggagacgcaggaagagatgacaaagagagaaagaagcaaagacacgagcgaggacagggacccagga

SEQ ID NO: 319758 - DNA, 122 bp, Homo sapiens
gcccacgggtcgtcgggtggcctgcgcggggaaagcaagtcgccgtgcaggtccctagggcggtgttcgccccgcggctggagctgcaggccgggcggaggcgggaggtcgcccggggagaa

SEQ ID NO: 319759 - DNA, 122 bp, Homo sapiens
gacgagaagtgaggcggatgatgcaggcatcgtgacatagcacttggctattattggcctcgagctcaagccctctgctacttgacagttgacctgataaccaagccaggtactaagtgact

SEQ ID NO: 319760 - DNA, 122 bp, Homo sapiens
tactctatctccccttatagcagacctaccatcatttccctcttggcccactttcacgtacgggaggacccgtgcacactcaccttgctttcaaaactcactgccctccctgcgcaaactcc

SEQ ID NO: 319761 - DNA, 122 bp, Homo sapiens
ctcggtgccgcggcttcacacggtcagtgcacagacatgaacgctggactgagaagccgccgcgtgcacctggcccgccaagttgccagggaggcaagggtggtgttgacgtggatcaccga

SEQ ID NO: 319762 - DNA, 122 bp, Homo sapiens
ccgcggtggaaccaccagccccaaccgctgccatgttggcatctgcccggcccgtcccctcggcaacagaaaaaccacttccgcgttcgtcacttccgctgccgggccacctgagtgaaggt

SEQ ID NO: 319763 - DNA, 122 bp, Homo sapiens
cactggggccagcactatttccgtgcttggagatacctctactcatatttacagtcatagcgcctgggacacacctgaccagagcatccgtagcagcacagggccagccccatatctgtgct

SEQ ID NO: 319764 - DNA, 122 bp, Homo sapiens
gaagatctgtgtctgtgagacatgtcctcctgaaagagcacacatgagctgacatagccacggcgccggattgccctcaccctgattgtcccatcagtgtagcttgtctcaagaggtttaca

SEQ ID NO: 319765 - DNA, 122 bp, Homo sapiens
gccctttgcaccagagggtggtttctcccacgtcagcctttcctgtggtcagcctctccccgggtctctacctgggttgtgtggcccgttggcagacgttttcccggcggttccagtttggg

SEQ ID NO: 319766 - DNA, 122 bp, Homo sapiens
tgtctccctgtgatagtgaagacaccactatccagtgtttcccaaactctgccttcacctcggcatctaacaaatcgccaagattctacttcctaaataactctgaagtctgtccacttcct

SEQ ID NO: 319767 - DNA, 122 bp, Homo sapiens
tcttgatgcctcacagtggccttgctcatcagggtgagcggggagggcaacagagaccagcgacaaaccaccaaaacacccaggtgttaatcaccgaaaggcgaaactctgtacatctggaa

SEQ ID NO: 319768 - DNA, 122 bp, Homo sapiens
gttcctgcccaggctcttcgaaccaggaccagtgcgggtaatgtgaattgacacttgttccggttcagggctgccccacccctggttgccccaaaccctgcggcctggtgggcttgggcaag

SEQ ID NO: 319769 - DNA, 122 bp, Homo sapiens
agggcgagcggcttttggtttctgtttaaacagcgtcctgtcgctccctcctctcctgtgcggattggcgctgcggcttctgtgttgagagggaaacttgaaaccctgagctatgtatggct

SEQ ID NO: 319770 - DNA, 122 bp, Homo sapiens
cagtccttacattgttggtgttggcccatattttcaatacagctaaagaaatttaatgaccgttatactgaaacatctggtttactacattaacttcatattcttcttctgaaattggaatg

SEQ ID NO: 319771 - DNA, 122 bp, Homo sapiens
aagtgatggctggtgtcctctgctcagcccctcctcctctctcactcgcccctccactgtcgcacactcataataagacagaaaaagagcccgacgttgactcagcaccttagggggctgaa

SEQ ID NO: 319772 - DNA, 122 bp, Homo sapiens
agctgggacttagactcggtctccagcctgggcttcggggaggctcagaaatcgcccaagcggctcaaggactccccgccccactccccggcccatcctactcctcctccttctcctccagc

SEQ ID NO: 319773 - DNA, 122 bp, Homo sapiens
agccaccccaactcccaggagaatctggcaactgctggtcccccaaccagaagaggcacccgccctgccttcctcctagaagctggctcagacacctgcctcaatgccagagctggccaggg

SEQ ID NO: 319774 - DNA, 122 bp, Homo sapiens
gccatggtgtaattttaacagctcatgaggaatttccttgtgggcaaaatatgggggaggcgtgtagcttttcatcttgtagccgtattatttaggaaccagaagggggaggcaggtttctg

SEQ ID NO: 319775 - DNA, 122 bp, Homo sapiens
ttgatcccaccaggaagcaaggacaaacgatgaagaaactggtaaaagtgtggagacgcccggcctgcggctgcagggctcaagaccaaatccctctaaacgcactgtgggatggagccacc

SEQ ID NO: 319776 - DNA, 122 bp, Homo sapiens
aaaccccccgggtccaaaacgtcaaacctaaatacacacaatgtgcactggggcgctgctcggtcacctccctgactccccgctcccccaaccccgtgagccaggagggatttctcagccaa

SEQ ID NO: 319777 - DNA, 122 bp, Homo sapiens
tcctagagccagacgcttgcaggagtcgacccaaactcagagttcaccttgagcaagagacggccacagcaacacagaaaagctttgtcgacggatgtcagggcaggctaggggcgggtgca

SEQ ID NO: 319778 - DNA, 122 bp, Homo sapiens
tctgagaagttcagccactctgtgaaaatgctgactgaggctgaggtgggctaacaggggcgacctgcctgtctgcaggcctgtgaaacccaatcagtataccccctagagagagttgcaaa

SEQ ID NO: 319779 - DNA, 122 bp, Homo sapiens
ctagatctgtgacaagcaggcattaactcacaaaaatatccctggaatcgaggttgctgccggaagcctctgtaggtatctagtctcagaatcatcactttgaatatttaagctatcagtga

SEQ ID NO: 319780 - DNA, 122 bp, Homo sapiens
ccctctcttcctctaccccttgcccaccagttcggggctcagagctctggcgggtgctggcgcctggctcccgagtctggcctgcaacctgtctctccaaggtctgatgccatttaggggtt

SEQ ID NO: 319781 - DNA, 122 bp, Homo sapiens
tccaaacgagggaaaacagacctctccactcctctgggggagcttaaagagcagtgaaagcgatggccaaaaaccaaacacacaagagcttagacagcaatgagaaatatcagaagtgtggc

SEQ ID NO: 319782 - DNA, 122 bp, Homo sapiens
ttgagctgtgggctcgccttcctggaggtgcgcccgaccgcatctgctggtgggtctgagcgtgcttggggtgtcccaggagaactgagagaacggctcccacgtgcaaagttccaaagcat

SEQ ID NO: 319783 - DNA, 122 bp, Homo sapiens
caggctgggggctccctgggctgggcctgccgggggctgagactagctcccctgggcccccgtctgcacactgcgaggtctcaataagaagagccggctttctccatcgcccactatgggct

SEQ ID NO: 319784 - DNA, 122 bp, Homo sapiens
taataaggagaggcccggacttgggcatatctgcagaaaaacccttccccactaggcaggcgcgggggagggcgtggaggggcggggtggtgccgcccccggggcgggcccagtgcgtggca

SEQ ID NO: 319785 - DNA, 122 bp, Homo sapiens
gccagcatcccagtttcagggacagtcaccgccaagcccgaccctgcaaagggtcgtaaccggacttcggggcaaacttcaggtcccccgcctgctagcccgccaaccccctccgccaggca

SEQ ID NO: 319786 - DNA, 122 bp, Homo sapiens
gagcctgctggttcactttgggtagagccgtgcctcttgggcaggctcccatagtgaccacgtccccacgaatgggaaagcacgttagtgggagggacgtaggacacgtgtggaccgccagg

SEQ ID NO: 319787 - DNA, 122 bp, Homo sapiens
tatctccaccacctcaggaaagctattctgatcaaatttcttcatggcttgtattgaaaacgtgtaagtacaaaaccgagtacaactgtttaattttgaaggcaaagtcagtttgaattgct

SEQ ID NO: 319788 - DNA, 122 bp, Homo sapiens
gcagcaatttgccagcagacgtgtcattttgtaaggcgcagtgagggaaggaagtcgtctcgcctacctgggttttccacttgctacgcgattttggtgtgcaacccaaaggaaataatcgt

SEQ ID NO: 319789 - DNA, 122 bp, Homo sapiens
cgctgtgtgtccacagtggctgctaacatgcagggagggaagggggttgatattactctgcgcatcagcggagggtgtccacgcccctgagatgtggctcctaatatccatggggaaggggg

SEQ ID NO: 319790 - DNA, 122 bp, Homo sapiens
ggttctatataataaaaattgatggtaaactggaaagattttgttttgttttttattccacggttagattgatgaatggattattatcttttatgtccagagcaagactaggaagaaaaaag

SEQ ID NO: 319791 - DNA, 122 bp, Homo sapiens
gtgaggcattatcacaggcaataactatggctccaccttgaggtaaagcccaccactgcacgggaaggctgatctctagaccccacaagaagacccaggttctcttccagggaagctaggaa

SEQ ID NO: 319792 - DNA, 122 bp, Homo sapiens
agccccgcaccacttgggcccggcagaggcagggcagatgcctcacgttatagtccagtccgctcaggacacgggctgcggccgggtccgcgcgttctacggagccgccatcgacgcggtgc

SEQ ID NO: 319793 - DNA, 122 bp, Homo sapiens
atggtcctgtggactcctctggcctgttttgttggctctttctctgtaattccgtgttttcgctttttcctccctgcccctctctccctctgcccctctctcctctccgcttctctccccct

SEQ ID NO: 319794 - DNA, 122 bp, Homo sapiens
aaaaaacagttaaattttagatcagacacacttctctgttgtttctcagcaagcctctctcgggctgtggtgaggatggttggaaatgtgcataatagaatcacctgaatttggtatttgca

SEQ ID NO: 319795 - DNA, 122 bp, Homo sapiens
ctttttgatgttgtagtgaacagcagagaatttcaaaggaccttgctaatatctgtaagacggcagctacagcaggcatcattggctgggtgtatgggggaataccagcttttattcatgct

SEQ ID NO: 319796 - DNA, 122 bp, Homo sapiens
ggcacaagtttctcaggagaggaaatggccttagaatgagcactgctcggtgctgacctccgccaggcctggaatccccgctgctgcgcttcccgccgcagacagctcccggccggccccgc

SEQ ID NO: 319797 - DNA, 122 bp, Homo sapiens
attcacaaacaccacagtcacaactcaccatctcgcttctgcggccgagaccagaaagaccggaagagaaggcacttccgctatatcacgctcagaagcttccgcccagggaagcacttcct

SEQ ID NO: 319798 - DNA, 122 bp, Homo sapiens
gagaagaagaggagatggaggggccaggagccacgactcccgggagagcgcagggaggggcgtgggtgccccttcgcccacctccgcccccgtcacctcgacagctgtcccgctcttggaat

SEQ ID NO: 319799 - DNA, 122 bp, Homo sapiens
tgtagtccagctcattcaagcaaagctatctccaatagggagtttaccctgtacagaacacgtgcatttccacctgttctcagactgaccctttgctcatcacaatagtgaaaaaaaacaca

SEQ ID NO: 319800 - DNA, 122 bp, Homo sapiens
aaaggcaagaccataagagtgagaattataagaaacaccaccaaatatacggctgggcgccgtggctcacacctgtaatcccagcacttttggaggccgaggcaggcctgaggttaggaatt

SEQ ID NO: 319801 - DNA, 122 bp, Homo sapiens
gcggagggtctcaagctttccccggtgtcggcggcaggtggaatttccacgctttatctgcgcctgcgccgcgcgggattcgcggtccgagctgaagaggttcgcggtccgggtaactgatt

SEQ ID NO: 319802 - DNA, 122 bp, Homo sapiens
aattgctcacatctcaaaggtctttaggaaatgctgggaaagactctgacatctttacaacgctcactgcggtttccccagcccgcggcccgtcccgggaggtgctgcaggagcaggggagt

SEQ ID NO: 319803 - DNA, 122 bp, Homo sapiens
gagccccccggacgcgcccaggcgaccaccgcatggcaccctgcccttcttggcaggagtcgcagaaggccttcgcttccgaggtggaagtacctgttgtgtctcccaattccggagtttgc

SEQ ID NO: 319804 - DNA, 122 bp, Homo sapiens
tcctccacgctgcaggtcaggaacttgttgcaagcaatgtccaggaggggcaggcggtcgcggcagaagcggtcccccagggagcctttgggcgccagcaccaggatggcgtagtggtaggc

SEQ ID NO: 319805 - DNA, 122 bp, Homo sapiens
cctgcggtttgcatcccagagccagcctaacctcgagaggcagaagttcagtgttgtcgtcgggagagtgacagcaagaaagaacatctgagtgcacggggctgggaaggaggaggggcaag

SEQ ID NO: 319806 - DNA, 122 bp, Homo sapiens
agaaccccctattaaaaatccagcatcactgattcaaagtgcctattcttttctaagagccggaaaaaattattttgtgtaaaatgtattttaaacttcacttttcttaagagagtcaaggc

SEQ ID NO: 319807 - DNA, 122 bp, Homo sapiens
atcgggaggcgcgggcactctctagcaggtggccgcagccatggaggagatctctgccgccgctgtcaaggtcgtgccgggcccggagcgcccgagccctttcagccagctagtctatacca

SEQ ID NO: 319808 - DNA, 122 bp, Homo sapiens
agcacgcatgcgcgcaccgctgcgtacctagcactccgacagatgtacgcatgcgcacaacgctctgttctcgagatccccgacagaagcacacatgcgcacaccgctgtgtgccaaggtcg

SEQ ID NO: 319809 - DNA, 122 bp, Homo sapiens
aggagacactggctctcttactggccttcctactatttgagcaatgtgatggagtaaaatcggccctctccaaagcaggacccgatgccaagcacgttaaatccagttcttttgggtccagc

SEQ ID NO: 319810 - DNA, 122 bp, Homo sapiens
tccgtgtgtgtgtgtcccagcgagtctctggaacactcattgacgaagtgtgtgctccagcgtcaaggaccccggtccccggtgctgttatttcctgaccctgtgtgtgtcccttacttaca

SEQ ID NO: 319811 - DNA, 122 bp, Homo sapiens
tgccgagtcctacaggacactggctgacggattaacaggacatttcaatgatcgttgcctcgtaggagcaaatgtggtccggtgcgatgcgaggaaactacgtcctaatttctctatcaggg

SEQ ID NO: 319812 - DNA, 122 bp, Homo sapiens
attgttattcattttgtaaaatactagtctttattttcattttttgtaaaatttaaacatcgtatgcgcataaagaaaaaggaaacaagaattaggggaaaataacattttccaaataatta

SEQ ID NO: 319813 - DNA, 122 bp, Homo sapiens
ttatacaccgcatgcagcgtccctggcagggcaaggtacacagtactccaggtagtgattcgattccttcatttcccttccccttatgagagtccaggaagaggcttgctcatcctcagctt

SEQ ID NO: 319814 - DNA, 122 bp, Homo sapiens
tcttccactcacaccacctcacaataacaccaagtgcctggcgttaggctgtgttgacagcgaggttaggaaccagagccaggtataaagaacaaggcgatggaggtgtgcggctgcgtaga

SEQ ID NO: 319815 - DNA, 122 bp, Homo sapiens
ctattctgattttcccgggtgagatctgagaaccatgcttgagacttcgggtttaacgcccgagtcagggaagaatttgcggcgttgagttctctccggcccagattacgctataaaatgtg

SEQ ID NO: 319816 - DNA, 122 bp, Homo sapiens
ccggcactgctggcgactcaggctggcagcgcgggaggcgcagttaacaagctagtaccgcggtcggtgggtgcgggccacgtggtggcgaaggtgcgcgcagtggatgcggactcaggcta

SEQ ID NO: 319817 - DNA, 122 bp, Homo sapiens
ttaccgcaaacagcagatggctctgaacaatctgaacgcaggcccccctctccttacagccggcaccccagcccacccccggtaagtaaataaacaagcaagaaactccagaaccaggcaga

SEQ ID NO: 319818 - DNA, 122 bp, Homo sapiens
aaaaaccaaaacccaatgatacacacaaatcagcattctttaattggtataggcttgacacgaggggctgtgatttgtcaatttattttacaatatttgcatttttatttcttaattctgtt

SEQ ID NO: 319819 - DNA, 122 bp, Homo sapiens
ccaggaaagacgggaactcgcgtagacacgcccggaagcccttgtcatgtaaatagctgtcggggactggtgtattgtcgccgccccagccggcgggacctggggcgaatccacacccattg

SEQ ID NO: 319820 - DNA, 122 bp, Homo sapiens
tattacatatatacgatccttcactagtaagtgaggctttttaatgaaaattcacgcccacgagttgtgaaaatcttaagtgtaagtcacctctttcagaggtctcagagccacctgttctg

SEQ ID NO: 319821 - DNA, 122 bp, Homo sapiens
cgccaccctcctcgtcccctctcatcacccacctcgttccatgctgtgtgtgcgcattcccgtcgacagagccgtcctgtttacctattgtgttttacaggccgagacagcggctaacagga

SEQ ID NO: 319822 - DNA, 122 bp, Homo sapiens
ggtgtgggatatagtctcgtggtgcgccgttttttaagccggtatgaaaagcgcaatattcgggtgggagtgacccaattttccaggtgcgtccatcacccctttctttgactcggaaaggg

SEQ ID NO: 319823 - DNA, 122 bp, Homo sapiens
tccaaccacatttgacgacaagcaacttgaggacagacatggtgttttctgcaagatacacgttcacatgaaccctatgatactatccaaatgtctccactgagtagcttggcccctggaat

SEQ ID NO: 319824 - DNA, 122 bp, Homo sapiens
gtggcaacagctgcccctagagctgggagttgtcatgaggatggggccgggccatggggacgctgggtctcatccgtggtgactattttgctcacgcctcaccctcttcctgtccagcaagg

SEQ ID NO: 319825 - DNA, 122 bp, Homo sapiens
agacgggctcctgggcgagggctgcgtcttagtcgccctgcttcttagctctcgaggtcccgcgtgttacgtgttagcaccgcccgggggcgtcagcatgacccgaggctgcaggaaccgtg

SEQ ID NO: 319826 - DNA, 122 bp, Homo sapiens
ggtagcagaaaccttatcaccaaggtgcaggagctgacttcttccaaagagttgtggttccgggcagcggtcattgccgtgcccattgctggagggctgattttagtgttgcttattatgtt

SEQ ID NO: 319827 - DNA, 122 bp, Homo sapiens
aggccgcttcgccattgcggtattctttgcggtattcttgtccccgtcccccagaaggctcgcctctccccgtggaccctgttaatcccaataaaattctgagcaagttcagagtgccgctt

SEQ ID NO: 319828 - DNA, 122 bp, Homo sapiens
gctgggctccgccaggtcttcagggctcccagaaccaatgcgcatgcgtgtgccttggtacgcggagggcccgtgcggtctgcgctcatttgctgccgggcttcggagacagcgcgctgacg

SEQ ID NO: 319829 - DNA, 122 bp, Homo sapiens
atgtataataaacaagaggtcggaggccccgggccgctcccgcccacctccgcggacgagcgcccccctccgaccccattccctgcggtctgggcgttcaggcccttcggtctgggcgatcc

SEQ ID NO: 319830 - DNA, 122 bp, Homo sapiens
attcattcattcaacacatatttattgagcatctactgagatcctgtccttagtttactgcgtggagacagaccacaagcaggtaaacaagcaaatatgtaagtcccaggtcagataaattt

SEQ ID NO: 319831 - DNA, 122 bp, Homo sapiens
ctcttcccaccttaaaaccagctgcatcagcagaagagattatgccaggtattaaaagcccgccagggggcgggggtggggtggggtaggattgccaggccagcatgctagaggcccaggca

SEQ ID NO: 319832 - DNA, 122 bp, Homo sapiens
agggctctttgtgtcacttctgtgcataactccgccccaagttaaaaggctcgctgctctcgacaggtcctcctcctcctcccgctaggtcctcctcctcctcccgccaggtcctcctcctc

SEQ ID NO: 319833 - DNA, 122 bp, Homo sapiens
aacctgggtttgaatctggaacttactggatggcttaggccaatttcttctctgagcatccgttttcccatggattttttttttttttgacagggtctggctctatcacccagcctggagta

SEQ ID NO: 319834 - DNA, 122 bp, Homo sapiens
gactcagacccacagcacagatttgatcaagggcacagctcataaaaatagcaacaatttcgaattctcctatccaacgtttaggaaacaatccaatggcaagaaatgagaggagttcaatg

SEQ ID NO: 319835 - DNA, 122 bp, Homo sapiens
gcgcgctccgcgggcgctgcgggcaggtgcgcgccggcgaggctcggtccagtcccgccgcggcggctgctccactcccggccccgctccccactcgccgcccgctcccgctcccgccgccg

SEQ ID NO: 319836 - DNA, 122 bp, Homo sapiens
acgtggcctaccgtgtgctcggtaagtttggcggcagtaacaggaagatgctgaaggagtcgcagaagctgcactacgttgtgaccgaggttcagggccccagcatcactgtggagttttcc

SEQ ID NO: 319837 - DNA, 122 bp, Homo sapiens
ccactcagccaatatctgcacaggtggcggttgcccggtcaagggcgggctcacaatctgcggggcggggagagggaaggagccagggagaaaagggagagaaagagggggcagtgtggcag

SEQ ID NO: 319838 - DNA, 122 bp, Homo sapiens
gcgaagccacctatacgcgccgcgccgcttgggtctcctgcgcatgcgcagacggacctgcgctggaggcttcatctttgccgccgctgccgtcgccttcctgggattggagtctcgagctt

SEQ ID NO: 319839 - DNA, 122 bp, Homo sapiens
aaggaagcaatgctcccctgaggagcagaaaggaaaagcggaccaaactcaaccgaagcccgcccacggagagcattaaaaccagccctggccagaggggaatcgccgatcccagaggtccg

SEQ ID NO: 319840 - DNA, 122 bp, Homo sapiens
ttgtacaagggatgagcttcacaatggaagacagatgtttgcaagagtggtgccttaatccgtattgtgttgctgtaaaagaatacctgagactgggtcatttataaagagaagaggtttat

SEQ ID NO: 319841 - DNA, 122 bp, Homo sapiens
gtaccagtgtacagtggctattaatctcattagacagctatcgtatctcataggcacccacggcagaagtcagggggaagaaaacggagttaagggttagagactggagctgtgaccactgc

SEQ ID NO: 319842 - DNA, 122 bp, Homo sapiens
acattatatcatttccaaaataaatctgaaacaaaaccattggactaattttggactcagcgtagaacttttatgagtcttccaagcactctccacccaacagccctgctgggcagtcccga

SEQ ID NO: 319843 - DNA, 122 bp, Homo sapiens
ctccacccactccatgccaggagctcccctttcgtgacagccacaggtgtcctcagacctcgcccagggtcccctgggggcagaatcacctcttgattgagaatcctggccttaaaggggga

SEQ ID NO: 319844 - DNA, 122 bp, Homo sapiens
tcaaataaggaatccagaagaaactgttcttgagttaagccaagtacacactggcaatttcgagaaaggagaactctacacattaacaaaagaacacacaagctcaaatgcaagtttatatg

SEQ ID NO: 319845 - DNA, 122 bp, Homo sapiens
ttaatggcaactctgggattaaggcccaggtgaggctaagctcttatttaccagtcttgccgctgctatagccattattgtaaaaggccgactgcttatactctttttcccctcctttcctg

SEQ ID NO: 319846 - DNA, 122 bp, Homo sapiens
ttctcaactccggttatctgctgcttattccccccaactattcttaaggaccccttttcccgtacccattcaattctaaacatttatcaagcatctacctaccatatgacaagcattaagtt

SEQ ID NO: 319847 - DNA, 122 bp, Homo sapiens
aggggcgccctccaggcaaccggctgtggcgggcagaagcaagctcggatgggagacccccgagctgcgtgcccagcgccggctcaacagacttgcccgcgcagcgcccgcgggccccctcg

SEQ ID NO: 319848 - DNA, 122 bp, Homo sapiens
agcccccggggagaggcggagggggtccctggcctgggcggagaggctgagctgagtgcgcgtgagaaagagggctgcaccgctgctcggcgcggactctgccagccccagcttcagccccg

SEQ ID NO: 319849 - DNA, 122 bp, Homo sapiens
tctccaaatggactgggtacttcttccaactgtctactccacaatcacatgagcagtagccgcccccactgagtgctagctcagcacacccgggtgtctgattgccagtgattcttatagta

SEQ ID NO: 319850 - DNA, 122 bp, Homo sapiens
tcaaggtcactgttgcctaagctgatgtgctgtggtgccatcatagctcattgcagcctccgactcctagggtcaatggctcctcccacctcagcttcctgagtagctaggactacaggcac

SEQ ID NO: 319851 - DNA, 122 bp, Homo sapiens
cagtggggaattttcaacaaatcggggttgtcctacgatgaacccatctgcattgccacacgtcagtgaaaacagctaggcagaggctgagagacaatcttttggaagaatttagaatgagg

SEQ ID NO: 319852 - DNA, 122 bp, Homo sapiens
cgccagaactccgcagccacgggcgcgcggcgcggaggggcgtgcgcccggagaagctcccgcagccctgcccaagcagcgcagaggccgcaagcaactagtgtctgcagctggcggttccg

SEQ ID NO: 319853 - DNA, 122 bp, Homo sapiens
cagaccccggagaccctgggttgcgggggaggtgaggccggacccaggagtggcgaccggcggggctgtggctggtcccttaacgatgatggccacctcacaactgggccttgttagaagaa

SEQ ID NO: 319854 - DNA, 122 bp, Homo sapiens
actggaacacagatctgctggccccaaagcccgtgtcccttttatttcctcagcagtcagcgaatgaaaggaagtaatgcatatgcttcagaactgtgcctgacacacagagggactcactt

SEQ ID NO: 319855 - DNA, 122 bp, Homo sapiens
taatctatataaaagatgcctatgtagccgcggttcacacaggggcacccacagacctcgcgcttcatgtacccccccccccccagcgtctcctgcacccgggagacccgagaactcagcga

SEQ ID NO: 319856 - DNA, 122 bp, Homo sapiens
gaggctcctccgggaaagctccttctgctccaggtgacagcggagagagatgccaccgcgcggcgaccggcagggccgcgtcccctctgcgtcctagcacagcgacgccccgcccgccaccc

SEQ ID NO: 319857 - DNA, 122 bp, Homo sapiens
aatggacctgcctgggcatagacttccttaaggtaagtccattttaaaccaacgatttctcgatgacattatttctccgtcgatgttggcagaaatgccagcattgggaaggtaaactaaag

SEQ ID NO: 319858 - DNA, 122 bp, Homo sapiens
tccgactccgggttcactgggcggctgcaggctggttcctaagaaacccagttttcgtggcgggttattcacagcccccgttcccacccccagccctcgcaccggggcctcagcttttctgc

SEQ ID NO: 319859 - DNA, 122 bp, Homo sapiens
agggcacgtgaaaccggtcactgtggaccggccttcgcctccggctctgcctctgcctcacgcctcgtcctgcgagtctcacgccagctgctctgtggctatgatgatggctgagcatatgg

SEQ ID NO: 319860 - DNA, 122 bp, Homo sapiens
gctgatgtgactgttctgattggctgccccggggcagatatgtgaaagccccaggagccccggtcattggcaccaggctgagtgggtcctgatcccagctctgcatctgttagctacatgtg

SEQ ID NO: 319861 - DNA, 122 bp, Homo sapiens
agtggggaatgagcccgtgaaggtcacagccagccatgaaacagctgcactgccccagcacgccgcccacgcttggtcggcaacacagagattccatttcttcctgggattaggaagcacga

SEQ ID NO: 319862 - DNA, 122 bp, Homo sapiens
taacattgatttctctaggacctagccctgtgtccagcacatgtttgtggactgaatcaacgaaccagcaaaatcactctttactgggagtggatgtttatggcctgagactcctggcctct

SEQ ID NO: 319863 - DNA, 122 bp, Homo sapiens
gccgcgaagcgccccaccccctgcccgcgcgcccgcgcgcccgccgcccattggccgcggcgcgcccacatgcaaatgtatcgccgtcgcgctctcccattggccagcgaggtgccgcgctc

SEQ ID NO: 319864 - DNA, 122 bp, Homo sapiens
gtgcctgtgaaaacgccgagaccctagtggtctagctggacgtggagaggaacgctgcggcgtaaggacacgccaacagatgctggcaggccagcaggccattaactggcagaacgacgcga

SEQ ID NO: 319865 - DNA, 122 bp, Homo sapiens
aagaaaaaaatgcattgatctatattagaacttcaagttaaacagtgaggccctggtagacggggttacgtctctacttctgtatctcaagagcttcgcccggagtctagcttcaagtgggt

SEQ ID NO: 319866 - DNA, 122 bp, Homo sapiens
gttccacaccactcactcgaagcatgagagacacacactagtggtgaaccaagaggactgcggggcagcctccaaggccacaggcgttactcctgcctctacagagctggcgcggtggcttg

SEQ ID NO: 319867 - DNA, 122 bp, Homo sapiens
attatcatatgattcacgcttcttggtaaggttatgctcacaggcattgttgctcttaggcgggaggaggctgaaccgcagtatgtatttcacaaccagcttttccaaactaggtcccagga

SEQ ID NO: 319868 - DNA, 122 bp, Homo sapiens
gagacggacagagggcttggggaatggggttgctatggcaaccgaaaggagcacacatgacgtcaaagcccagagaggtctagggagggggatgagggggaaacagaaagaggaagcgtcta

SEQ ID NO: 319869 - DNA, 122 bp, Homo sapiens
tatgaccttatgacttcagtgatgtcgcaagcaggttccagtccctgtgcctccccttcccgctcccaggaacccatccagcctcaggaactgcccccagccatcgagccttggctacttaa

SEQ ID NO: 319870 - DNA, 122 bp, Homo sapiens
ggccacccaggccgggcctcagccgacaggggctccacagagacccccatggacaggacacgccaggctcccccagcctcaggctcccgtgtccagagctgtccccagcaccggctccctca

SEQ ID NO: 319871 - DNA, 122 bp, Homo sapiens
gatcccgctgcgctccaacgtgtacgaggtctacgccacggacaaggatgagggcctcaacggggcggtgcgctacagcttcctgaagactgcgggcaaccgggactgggagttcttcatca

SEQ ID NO: 319872 - DNA, 122 bp, Homo sapiens
gtttcatacccaggaagagtctcatttttatgaacctctccgatgactgcagaaaacagacgactctcagaatctaaaactacgttgtatttctagggtgctttttatggtctctgcattgc

SEQ ID NO: 319873 - DNA, 122 bp, Homo sapiens
ataaccactgccatatttaaagcactgtacaccggccctcggagccagaattctttccctcgaggttgccccaggaatccctttgacctctgccattggacgtcacagaaggcgcgactaat

SEQ ID NO: 319874 - DNA, 122 bp, Homo sapiens
gttcctgcaattgatctctttgatgacattctcattcatagaaagcgtttgatttatgagcgtaggacgaatcgcatccaggagctgcgcagccctggccgctgccgggacgccctgctccg

SEQ ID NO: 319875 - DNA, 122 bp, Homo sapiens
acctgtgtgtccttgagaaaggtaattgaactgaggacatttgactccgctggagtgattcgttaatcatgggagtgattcaaatgcagaaggagaatactttctgtttcagcagagaaagt

SEQ ID NO: 319876 - DNA, 122 bp, Homo sapiens
aaactcgacaaagcccgataccaggaagaaatgatgaattatgttggcaagaggaagaaacggagaaagcgggatccccaggaacccagacggcctccatcatccttcctactcttctgcca

SEQ ID NO: 319877 - DNA, 122 bp, Homo sapiens
ccagagagattaaatgactggctggaattcacacatctagttaacgtgagagctaaattacgcaccttactgtcttttctccagtgctctctccacccaactatactatctccctaagcaat

SEQ ID NO: 319878 - DNA, 122 bp, Homo sapiens
tggctcccgtggctggggctgtgcttctgggcggcagggaccgcggctgcccgaggtaagcgctgggcggagcgggcagctgggggcgagggcgcaggggcgccagcctgacggagcgggac

SEQ ID NO: 319879 - DNA, 122 bp, Homo sapiens
gcagtatgggggcggagaagacttttaaaacaaaacacaaaacaagatcttttgcgagagcggtgtccgagggagccggagcgctgacaggtgtgcaggaggcgccccctacagcctgctgc

SEQ ID NO: 319880 - DNA, 122 bp, Homo sapiens
gggagaggcagaaccgctgaccctttaacaagttatccctcacagaacaggtgtctcccccgactctcggtggagagggatggctggatacttagtgacatcagccacgagccaatgggaag

SEQ ID NO: 319881 - DNA, 122 bp, Homo sapiens
gctttagaaattttgattcatttccctatgttctttcaagaagctctctgtggctatctacgatctcattcttcttcattccactccaaaagaatgaagattccaacgtatctcacagataa

SEQ ID NO: 319882 - DNA, 122 bp, Homo sapiens
tgccccaccccctgcaaacgccactgattaacttaaaacaaactcggctgcgtgtttgtgcgccgttgggtagcaggaggtagagcctaggcgagagcctggtgcgcccacgggtttcgccg

SEQ ID NO: 319883 - DNA, 122 bp, Homo sapiens
caggacaatgcgggggtgtacacaaggcaagcatttctcttcctgtacctcccatggagacgctgaggcccagggctgctggtgagtcataagctgacccaagagtcaagagccatgctctt

SEQ ID NO: 319884 - DNA, 122 bp, Homo sapiens
atccttcagactgtctgttttataaaggttgagtaagtaatttagcttaccacacaacctcgcattagcatatcgatttaggtaatttgttatgactgtcttagtatacatagagtagtttg

SEQ ID NO: 319885 - DNA, 122 bp, Homo sapiens
cctaccgtacacgggcgtcttgccgggcaggatgaccaccaccagctgcaggcccgcatacgtgttcttcaggtgccggaacatgggctccacgctgtccgccccctgcgcgtatttgcaga

SEQ ID NO: 319886 - DNA, 122 bp, Homo sapiens
ggctcatccctgtaatcccagcactttgggaaactgagatgggtggattactggaggccacgagttcgacagcagcctagacaacgtggtgaaaccccgtctctactaaaatacaaaaatta

SEQ ID NO: 319887 - DNA, 122 bp, Homo sapiens
atgctgtctgaatttttctaatggagttgtacttgtctttgtattgagtttctcctcttccgttttggttttcttggtcctttcttctttatgaggcaagaatatcctctagactccaacta

SEQ ID NO: 319888 - DNA, 122 bp, Homo sapiens
gagtggccggtatgatggacaaggcagctgacgtggatggcaccaggggtcctgggggaccggagaggacggactgggtcacttgatcacagtgtcaccggagccccagggcagcagcagga

SEQ ID NO: 319889 - DNA, 122 bp, Homo sapiens
acaaaacactaatttcactaactaaaagcatagagtggaggcaacccttgggtctgcttgcggttcctccacaggacagtgatcccagattctcccgaagaaaagggcggtttcgatttctc

SEQ ID NO: 319890 - DNA, 122 bp, Homo sapiens
ctctcctttcatgcttgtttaacgtggtcattatttaaaggtttttaaactcacaataatcgctctctaaaaacaacaccagccgcccagagggcttgcttttctcttggtacatccaggac

SEQ ID NO: 319891 - DNA, 122 bp, Homo sapiens
ctcatatcagctttgccaactgtttattggacatcaccgcctgagtatccctgagggacacggtatgtaaaaaccctgtaccacaaattgatttcaaaagcccatgtaccccaaattgattt

SEQ ID NO: 319892 - DNA, 122 bp, Homo sapiens
cagctgtgattcatatgcccttctgtggatctcattcctgtgtgacctcacaatacagtacggattttaactgagacacatggaaacatcaggtgagcccccctctcagagcagcatctcag

SEQ ID NO: 319893 - DNA, 122 bp, Homo sapiens
gagattaccttctggcaaaggagcgcgggagagcggccgcggccgaggcggcacccagaccgcggctttgtattcattaaacacacattggagcttatcagaagtaaaagccttgtcaggat

SEQ ID NO: 319894 - DNA, 122 bp, Homo sapiens
gaacccaggggtggagagtggggggcgggcttcccgggcgccgccgggtcgagtcacttccggtgccctgacctttataggagtaaacagacccccgccatccccgcctcccctcctgccca

SEQ ID NO: 319895 - DNA, 122 bp, Homo sapiens
ggtaggaggaggcaagaggggtccaggcagggctgatcctggcctctgacctgtccagggcgacccctgaagcccctgctgcctctgggcattgctgggagaggccaaggcaggactcacgt

SEQ ID NO: 319896 - DNA, 122 bp, Homo sapiens
tcccgcccgcgcccccctcgccgggccccgccccgcgccccccgccccgcccgcgccccccgccgggccgcgccccccgccccccatgcaccacctcctggagcagtcggcggacatggcga

SEQ ID NO: 319897 - DNA, 122 bp, Homo sapiens
atctgcaggcctggtggtctgagaggtaccttgctctcttagttatagtgcctctttctgcgtgtgtcacgagaaagtgttcagaagaaccaatgtattttcccaagaaaaagaaatcagga

SEQ ID NO: 319898 - DNA, 122 bp, Homo sapiens
accaccacctggtggcgccacttccccccacgcctgtttcacccattcagccctctctttcgaatacctttgtccaattccataagggcagagttggcatccagttcctgttcgccatagcc

SEQ ID NO: 319899 - DNA, 122 bp, Homo sapiens
tggaaatgagttcatggaccagagagcaaagcaaaacattgctcttaaaagcaagctcaacggacacacatgatgaaactcacagttgaacactcttacatcccaaagtcaccttccataac

SEQ ID NO: 319900 - DNA, 122 bp, Homo sapiens
tgtgttgtgagcagccttgtggaggggcccatggatgaggaactgaagcctccagctgaccgacagctagcaaggaacagaggcaggcctgccggcaaccccctgaaagagcttgaaaatgc

SEQ ID NO: 319901 - DNA, 122 bp, Homo sapiens
catgaacctgcagctccctgtggggtgaagggcctcgtagctgctccccggcctccacctcgagcctttgcactgcacagatgaacttctgtactgggctgcctggcggcccggaagctgag

SEQ ID NO: 319902 - DNA, 122 bp, Homo sapiens
tccatctcaatccacaaatatttactgggcacccgcggttcttggcagcgtgctaggcgccgagggcgagaggagtgggcgccgtgccgctccgcgcactggggtcctctctggacctcgcc

SEQ ID NO: 319903 - DNA, 122 bp, Homo sapiens
agaggctgagtggtgagaactgcttgaacgcaggaggtggaggttgcagtgagccaagatcgcaccactgcacgccaggctgggcaagagtgagaccctttcacaaaaaagtaaaatatata

SEQ ID NO: 319904 - DNA, 122 bp, Homo sapiens
agccctgcccaggtgcccgcagagagcagccgggctgccagcggtgagtgctatctttcgcggcgacggcggggtgggtgaggtcgggccccaagactcggggtttgccgggcgcctcagtt

SEQ ID NO: 319905 - DNA, 122 bp, Homo sapiens
ggctccctgactctggatgggggctgaatcacctgcttccccgctccctccccagcactccggcagcatcctgactctgacagtgacactgcctttgtcatgacccctcaaaggcagccatg

SEQ ID NO: 319906 - DNA, 122 bp, Homo sapiens
tggctttcccagcccttcccattcttttccaggtcccgacactaagctgatgcaaaacagcggcagaacaaagttcaaaagaacgagtatcgatcgcctaatgaataccctggtgctctggg

SEQ ID NO: 319907 - DNA, 122 bp, Homo sapiens
tgtatatgtgccacattttcttaatccagtctatcattgttggacatttgggttgagaaccggttgagattcttaaggagtttacccactgatgggaaggaggcagtagaaaaagggaggta

SEQ ID NO: 319908 - DNA, 122 bp, Homo sapiens
aacagtggtgggagatggggcctaataagagatgattgggtcataaggtcagagccctcacgaatggcttaatgttttctcagtagcaggttagttatctcgatagtgggttgttataaagc

SEQ ID NO: 319909 - DNA, 122 bp, Homo sapiens
tcttcacatcaccttctcctctatgtgtttgtctcttctcttctgtttcttataaggacacgtgttatcagttttggggtccacctggataatctaggataatctcattttgagatccttac

SEQ ID NO: 319910 - DNA, 122 bp, Homo sapiens
ggctgcggcagggccgcagatcaaagtggtaactggggatctgagttcggcagtgacgcgcgtccctcacgtgaccaggagcctctatgtgcccaagtccctctcgtcccggtctttttttt

SEQ ID NO: 319911 - DNA, 122 bp, Homo sapiens
ccggtgtcattggcctggaggtctcgaatgcccagggtcccattggcataggggaagaagcgttcgtcctgaagcactgttgtcccatcctcgtccagcctggagggagcagggcgggcctg

SEQ ID NO: 319912 - DNA, 122 bp, Homo sapiens
tcccagtcctcgcacacatttgcacactcacatccatacatggacacacatcctcatgctcgctcactcacatgcatttgcaaacactgatacacatcctcacacgcacactcgcacactca

SEQ ID NO: 319913 - DNA, 122 bp, Homo sapiens
agagggagcccaaacagagcctgagggcctgcccagctcaggagatggagtgtgggcttccgggaggccaagggagctagaatttgcagggcagagatctgcagaagaaggagccacagaga

SEQ ID NO: 319914 - DNA, 122 bp, Homo sapiens
cagcccaccagcgctgcgcttgatttctcgccaggccttaactgccttcaggagcctccccgacaagcgccgcccccagctccacagcgcccagtcccatggatcacccaagggttgaggag

SEQ ID NO: 319915 - DNA, 122 bp, Homo sapiens
gttctttgaagtgatgagctagcgcaaccacaaaccatacattccttttgtagaaaaacccgtgcctcgaatgaggcgagactcagagaggacccaggcgcggggcggacccctccaattcc

SEQ ID NO: 319916 - DNA, 122 bp, Homo sapiens
cagtcagcctgcaagtcccagcatgcccgagtcaatcgtggggtggggagtctctccatccgtgttaaccccttaggccctggggtacactgggcttcctataccagaaaggttttctaatg

SEQ ID NO: 319917 - DNA, 122 bp, Homo sapiens
gcaggtcagtgggtgcgcacaccgtgggcaagccgaagcagggtgaggcattgcctcactcgggaagcgcaaggggtcagggagttccctttcctagtcaaagaaaggggtgacagacagca

SEQ ID NO: 319918 - DNA, 122 bp, Homo sapiens
tcgccagttacgggtttcacgcgtgcggctccgggcatcctggtgcagttctgcagccagcggggcctcttggcagacgggttcagaggtggaaattgcttagtcatttgcaaactgggacc

SEQ ID NO: 319919 - DNA, 122 bp, Homo sapiens
gggtgatggcagcaatccacttagtgcttccgggaaggagaggctgaggtgaggtgttgccggaacacagggctggtgggactgaggaaggctagacccagggacctcacaaagggggacca

SEQ ID NO: 319920 - DNA, 122 bp, Homo sapiens
caaataaatatgtatacatttaagttggagagtattttgacataaatgactgtgtgtgtgcgggcttgtttcaatatcttatatttttcaggtgccacttgaagaatggatgatgatgattt

SEQ ID NO: 319921 - DNA, 122 bp, Homo sapiens
tcccccataccagctggactcccaggggcgcctggtgctggctgaggcccaggtgggcgacgagcgagactacgtgtgcgtggtgagggcaggggcggcaggcactgctgaggccactgcgc

SEQ ID NO: 319922 - DNA, 122 bp, Homo sapiens
atccccccggacgcctgctcactggacagtgactactcagagcctgagcacaaactgcagcgcacctcatcctactccaccgacgggctgggcctgggcggggtgagccgggaaacgggcgg

SEQ ID NO: 319923 - DNA, 122 bp, Homo sapiens
agatggacagatgggcccatgctgaaggcagtcagtcacctgtgcctgcagatgagaaaccgccgcctaacctttctgaacctcatgcggaaaaaatgtttgcaccactagcctccagcaca

SEQ ID NO: 319924 - DNA, 122 bp, Homo sapiens
ggtgttgggagaagggggcggtgatttccacaggggtcacctccttcttaacctcacaggcgtccgacctgtggaaatctaacaagcataggggaaagcaaaggcagcatcttaggtaagtg

SEQ ID NO: 319925 - DNA, 122 bp, Homo sapiens
gctgaacatggcaggagcggccatctctctcgccctgcatttcaaggctctgtaaccgcccgcctgccctgcttcaccgacttcgggagaaacccccatacctcacgggcgctgtctcccca

SEQ ID NO: 319926 - DNA, 122 bp, Homo sapiens
aaacttgggactgtccatcaccattatttatttttaaagctgctgaaaagtgtaagccaccgcttgattttgcctttcaaaaaaggggaaagaacccaaattcaatgtaaatatggaaagac

SEQ ID NO: 319927 - DNA, 122 bp, Homo sapiens
ctcctctctagctcctctatttccacactcaggcttctcaggactcaggagtgaaatagtcgccatgtgccctgaaagggccaccagggcctctgggccttggtgacacttctagccttctc

SEQ ID NO: 319928 - DNA, 122 bp, Homo sapiens
cggtgaagtcactgaggctgtcaactggatcacagcacctttctgtgaacacttagcacacggtatggaggaatgaagaagtgcttgtgactctgagccaccctagcaaatgggcagtgccc

SEQ ID NO: 319929 - DNA, 122 bp, Homo sapiens
cagatccgtgcgctccaggcttgcctttggaaaatgcctgtctgaaatttgttttaaaaccgtttctaacttcactgctaccgccagtaacaaaagatataaaggaaactaacgtctccccc

SEQ ID NO: 319930 - DNA, 122 bp, Homo sapiens
tttactcggattagcggcccctgcacgtggctgggccttcagggagcggtcacgtgggatcggattgctgctgacttctgccagttgctggtgttgcctggcacatgggttagctggtatta

SEQ ID NO: 319931 - DNA, 122 bp, Homo sapiens
actgcgctcagttctctcctctcggaagctgcagccatgatggaagtttgagagttgagccgctgtgaggcgaggccgggctcaggcgagggagatgagagacggcggcggccgcggcccgg

SEQ ID NO: 319932 - DNA, 122 bp, Homo sapiens
aggaaaccgtattaggacatattgcttggctgagctgcagccagaggaggtagaaaggaacggaaaagtgctccaggtgtgtatctcagcttcctgtgctctgttcctttccaaaatgcaaa

SEQ ID NO: 319933 - DNA, 122 bp, Homo sapiens
acttgctccttcaccaccaacattaaggaagaatccaattgctgcatgtattctgataagcgcaacaaactcatttcggccgaggtcccttcgtaccagaggctggtccctgagtcttgtcc

SEQ ID NO: 319934 - DNA, 122 bp, Homo sapiens
aggagagtcagacgccagatggttccgaaggtcctgcaggctctcggggcaccctacagccgacacgccaacaaaagcttcggagccgccaaccccaaaacggaaacaccggagccacaagc

SEQ ID NO: 319935 - DNA, 122 bp, Homo sapiens
tggggagcgcctctgccccgccgccccgtctgagatatgaagagtgcctctgcccggccgcgaccccgtctgggaactgaggagtatctctgccccgccgccaccccgtctgggaggtgagg

SEQ ID NO: 319936 - DNA, 122 bp, Homo sapiens
gcggaagtcacgcactacatatcccagggtgggtcgcggcgaggtgggtgaaatggacgtcgctcacgcattttgggggaattctgggcattgtagttcctcattgagggaggctctagcgc

SEQ ID NO: 319937 - DNA, 122 bp, Homo sapiens
ctcctcgtccaggtggggagccatgcgaacccagatggagggctggggccacacccctatcggagggcaaacacgggggaagggggtcctttccttccagggaagaatttgcgggagaacat

SEQ ID NO: 319938 - DNA, 122 bp, Homo sapiens
cccgtggccaccggtcagccagtttccccgagcacaagtgtgctccggagggacagaacacgtaggaggtaaacggtgtcctgaccttcgttctgtggtggtgtggaattgtgaagtggaat

SEQ ID NO: 319939 - DNA, 122 bp, Homo sapiens
catccacctgcagcccttaccattcagacctgagctagcagaggaaaaccttcctcccaacggttttggcaacaggacgcgatggctgggacttcccactcatgtaaggaaaaagcgttaac

SEQ ID NO: 319940 - DNA, 122 bp, Homo sapiens
gctgggcaaggccatctgaatggaaactgcagatacagcactgccttagaccatcctgcacgcacccgcgctcaccacacacacacgtcgtgaatataaacatccatatactggtacaggtg

SEQ ID NO: 319941 - DNA, 122 bp, Homo sapiens
aggggaccatatgtcgaactgtttacatggatgttgctctaagtgaatgtttcgggatgccgaaatgatgaaatcacagccatagcagggatggctttccaggttggggtttcaattgacta

SEQ ID NO: 319942 - DNA, 122 bp, Homo sapiens
catacatgcaaggtagaggtaatgccaactcattcatctaacactaaaagacaagtgggccgaggtgggcagatcgcctaaggtgaggagttcaagaccagtctggccaacatggtgaaacc

SEQ ID NO: 319943 - DNA, 122 bp, Homo sapiens
gttttagagacgcacacagctttgagcatgacagcctgaatgccagtgtgcagggaataacgtgtgtccctatgggcgggcagatgggtgtatgaaactgctggaggctaatgtttatggag

SEQ ID NO: 319944 - DNA, 122 bp, Homo sapiens
gccttcgaacagctcagtttcaatacagggtcgaggcttcccattttaaaacaacgccgacggaaggccttcgccattttagtaaaggccctttgctgttaaaactaaccctccgccccaat

SEQ ID NO: 319945 - DNA, 122 bp, Homo sapiens
gtccggccatcaggatgtccttagagacagccttctttgccctgttttcctgctgctgaccggaaagcggatgtgaccgcggagcaccagcagtcaccttggaccatgaggcagaagcccca

SEQ ID NO: 319946 - DNA, 122 bp, Homo sapiens
cggggaacaatgtcgtcaagggctcccggttcccgggtttatatggctcgaaccttacatcgccagccggatccacctcaactcagccgtcacttcccctaagacgtcctcttagaaccagg

SEQ ID NO: 319947 - DNA, 122 bp, Homo sapiens
cagccacagccacaggcaccaccaccactgcagccgccaccgcccctgcagctaccgccacggccgcaccgcccgcccgccagccccgccccctggagcccagcccattggcccgcgctccc

SEQ ID NO: 319948 - DNA, 122 bp, Homo sapiens
tccaagaatggactccaaagtccacgctgttaactgctgctctaacctgtctcttaactccgtggcatagtaaattgttggtagggtggctttggggtaggggtcggaccccctctacattc

SEQ ID NO: 319949 - DNA, 122 bp, Homo sapiens
ccctactgcattcctggtgttgcccatgctcccttccacctgttcccggtctacagcagtcggagctaaaataagaggcccggccacccttcattcagagccctccagactcccactcactc

SEQ ID NO: 319950 - DNA, 122 bp, Homo sapiens
tccatctctagtagagctgaactcactcaaatttcagtagttttgatgtgacagtaacatcggggatgaaataaaagttatgtatttattttaattatgcacatacactagaaagacccact

SEQ ID NO: 319951 - DNA, 122 bp, Homo sapiens
agaagcagcagcaccttgaggacggcccaggccactgaagccatgctctcttcagccaggcgccctgagacccgggcaaggcgacggccgctctgcgtcgttcctgctctcactcccgctct

SEQ ID NO: 319952 - DNA, 122 bp, Homo sapiens
gaatggctgacatttcccaggaatgaattggacacagagccagcccttgaggtactcccccggtcccacagctaaaagaccaaccaggtaacgagccctccagcatctccttccataggtgg

SEQ ID NO: 319953 - DNA, 122 bp, Homo sapiens
aactctgttctggtgagtggctctcagctcacctgcttgtcgcagctctttcctcttgtccgtttctgagcctgcatggtccctaaaagcttagtcttttcaccacgtctctctggatagca

SEQ ID NO: 319954 - DNA, 122 bp, Homo sapiens
cccgcccaatctccttgcctcgctccgccccgaatcgccccacccctcctttgctgcgtacgcccagctctcagcctcagctttgcaggcatccggagactccctcctgataacccccgccg

SEQ ID NO: 319955 - DNA, 122 bp, Homo sapiens
gtgtggccagatctctgagagagagagagaaaatgcaaatttcctagcatggaggttctccgtcaatgagtaagcccagaccctgggagagcaggagggattccaaaggatacacaaattcg

SEQ ID NO: 319956 - DNA, 122 bp, Homo sapiens
atcctccagggatgtgtggccaagtggccgttctgtggaggcacggaggggtctgagcagcgcgtccagccacagccctgagggttctggacacagtgaccgatgtgggaccccaggagtga

SEQ ID NO: 319957 - DNA, 122 bp, Homo sapiens
ggtcagagacataacttgtgaagtgggttctgtggtggctggggcccactgtcccctccccgtcccttgctgatgtggaaggaccagtgtgtgctgacctatggtgttccttcctgatccaa

SEQ ID NO: 319958 - DNA, 122 bp, Homo sapiens
agataaaatgaaaacaaagggcaaaatctcctctctggttggtgatggaaatgggaagtgcgtgtttcttctaccaagggaaggaggctcaaatcttccagcatgaggctttttcatttcac

SEQ ID NO: 319959 - DNA, 122 bp, Homo sapiens
caactgccatcttccccatcgtagttatctctttcaaatgcaggaccacagtaaacgatgcggggaagcatccaggcctccttctccctgccacaccctggcacattctccagctagtctgg

SEQ ID NO: 319960 - DNA, 122 bp, Homo sapiens
ttatagctaagctttttttgaaatagttcacaatttttgccttatgcttaaattttccctcgctgtttgtttacctccaatctgaattccgcttccacctctccactgggtatgctcccaag

SEQ ID NO: 319961 - DNA, 122 bp, Homo sapiens
tgggctctcagtaaaatggtggagctgctgagtcgacccaccccaaggcctgcccttcgtcgcttacacttccttattggttgagatcttgcatttgctcctccctttggttctttgacacc

SEQ ID NO: 319962 - DNA, 122 bp, Homo sapiens
aattctggtcatttcctggaggaggagagacaggatgttttaatagccagttatttcctgcgccggagttggttgggtcttcagacaccagctgaatgcttagggattctttcatttcctaa

SEQ ID NO: 319963 - DNA, 122 bp, Homo sapiens
gccaggtccccagcctttgtcacacagcaaaaataaacacccttcgaggagttaattaggcggtcagcagccacctcagtgtcctaggagggctgcccgcagaccttttacacacacacaca

SEQ ID NO: 319964 - DNA, 122 bp, Homo sapiens
gcgcaccactgcggctgctcagtaagccaagctagggcactctggtgtacagccagtccccgccgcggaggtgccggtggagcctgggaccgggcgagtctccgccccgcttttgcagctag

SEQ ID NO: 319965 - DNA, 122 bp, Homo sapiens
ccgccgggcctcgcgcggcgtccctagcaacgcgcgcgcggtcttccggccccgcccaggcgggcggcactgcgcctaagctgggccacaaccgccagtcagggctctccccttcccctccc

SEQ ID NO: 319966 - DNA, 122 bp, Homo sapiens
tgttgttgatgccattaagtagaatgagtcactgtatatattaagcactaagaccagcagcgacataagtctatgaattcaatgatcatgccagctttaagtagaaaaggagcttttttttt

SEQ ID NO: 319967 - DNA, 122 bp, Homo sapiens
cagcagtgtgaccctcttgaactgccagatggattggaagtgccccggtgccatcaggcacgttgacatcagccccgtgctccactaggaccttcagggtgtccaggaatccagtgcgggct

SEQ ID NO: 319968 - DNA, 122 bp, Homo sapiens
acctggacgtgcctccgcagggtctgcagccagcttccggtcagaccccaggtcctccagcggctgcggccttcagcgtcatctccacggcagcccctgtgtactgggggctggggggcctg

SEQ ID NO: 319969 - DNA, 122 bp, Homo sapiens
aacatggtcaaaccccgtctttactaaaaatataaaaaattcgctgggcgtggtggcaggcgcctgtagtcccagataatcaggaggccgaggcaggagaacggcgtgaacacgggaggcgg

SEQ ID NO: 319970 - DNA, 122 bp, Homo sapiens
gtggcggccctggggaagccccggggatgacctgaactgaaggcgctccctatttggtctcgcgacacagggactattttcagcacgcccacagtgactgccaggaccccccagtcgtccgt

SEQ ID NO: 319971 - DNA, 122 bp, Homo sapiens
tattaaagtataaaaattgaaacccaccaaacgtgtatcaagtaggggaaaatctgcctgcgcccctagtgcccaaaacacttaaccctgaagtaccaggtgtccccaaccgcgggcaaacc

SEQ ID NO: 319972 - DNA, 122 bp, Homo sapiens
agcggcagtcatcccaaatacaaactacatgttccaggatgctttgggcggcagatctcgcggaagccgcgaggagagcccggccccgtctcgcgcgcctgcttccgcctccctgtggcggc

SEQ ID NO: 319973 - DNA, 122 bp, Homo sapiens
gaaacgtacacagtctggcgggtctgggagcagccaagtggcgtccgcctctccaggcagcgatcccttgtgcccactgccccccatcaggcccaccagcaccaccaaaaaacaaaaacaga

SEQ ID NO: 319974 - DNA, 122 bp, Homo sapiens
ggatgcgggtgaaattttctgtgcacaatttctcctccttttggttctgtcctggggattcgtttaaactgcaagcgaaaaaaaaaaaaccgggggcggaggagattattttaagaatccat

SEQ ID NO: 319975 - DNA, 122 bp, Homo sapiens
acccgcgaaaccgtcctcacggccgtgccgcgtccctgcccggagccgggtccccgtgtgcgtccgaaagttcaggatcttctgtcctcccgtggggtttctggcccccgtttcgctaggag

SEQ ID NO: 319976 - DNA, 122 bp, Homo sapiens
aaaccgaggaacgagccagacgactggaggcaggttccaggcggggggcgtggcctcgggcgactgccggatgtcctcttccagaaccgggccgtgccccggaagcagttgttgttggttgg

SEQ ID NO: 319977 - DNA, 122 bp, Homo sapiens
agtttgaattttggtttgtagcagtaggaacactgtagagtttggaggatgggcttagaccggaaaaaatctggcagcacaacctcaagtaatggagggaaggattaaaattatccactgtt

SEQ ID NO: 319978 - DNA, 122 bp, Homo sapiens
aaaacggtgtcacggatgtcaagagcacttttgtggcgtaaaccgtgcagtcacgagctacgagttctattctgggtctttgtcccagggccagcaggaacgctagacgcctcccaaaagac

SEQ ID NO: 319979 - DNA, 122 bp, Homo sapiens
tttccggcggcccgaaactaggaagaaacttggagctgttcaggcgatccagcctccaatcgctgctgctcttgtactcggttggcccgggcggcgctgaactgtcgggagcctaggccatg

SEQ ID NO: 319980 - DNA, 122 bp, Homo sapiens
ggggtccccctcatctcccactcactccctccattcagcccccactggccccatccttcccgaactcaccagccacactccaaccttagggcttttgctatagttgtttcttctagaacagg

SEQ ID NO: 319981 - DNA, 122 bp, Homo sapiens
ccgtgccgcccggcgccccggccttgaccccgggcccgcgccctacccgttgacgccggccgctctgcgcccaggcaccagcccgcaccccggacgcgaggtctgacccatgaccccgggga

SEQ ID NO: 319982 - DNA, 122 bp, Homo sapiens
cctgcatgatgctgccgctgaccaggctgtggccgctacttcggtgggggacagcagcggcggcgggaggggcagcagccgggggaagtcccaccactaccaccacggaggaggaggaggag

SEQ ID NO: 319983 - DNA, 122 bp, Homo sapiens
cacatcgtcgcttaggccaaaaaacacaacagatgccaaaaaacagatggctggtcccttcggtgagttctccttcacatacccaacacgcatgcacgcgcacatgcgcacacagacacacc

SEQ ID NO: 319984 - DNA, 122 bp, Homo sapiens
ctcgcctccaaaacccaaaaacagaggcggtgggagggaggctgagagacgcacagatcccgccccagcccagccccgccccgccctctgccggtactaaagggcaaggtctctccgcctct

SEQ ID NO: 319985 - DNA, 122 bp, Homo sapiens
aacaaacaaaaaattaagtaaaatgttgaaacctgttcaaccaccctatttcagatagaacgcactttttaaccacattaggaaagcgaaactcgccgtgggtggggtggaaacgctgccag

SEQ ID NO: 319986 - DNA, 122 bp, Homo sapiens
ggttgctcacgagccgggcacagtgcactctccctttagttgtgtttgggggacgagtatcgcgggggaggggagggagtcaccatgcccgccggaaaccccccgctgagtcgtccgccctg

SEQ ID NO: 319987 - DNA, 122 bp, Homo sapiens
gtggcagcctctctgcataggcaacgagtgccggccgggggtgagcgtcccaggcggttccgctcaacagacgctgctgtggctgcgccgggctgcgacactgcagttgtctacgcggccgg

SEQ ID NO: 319988 - DNA, 122 bp, Homo sapiens
atgctgagtgaggtggccaattccagggaacctataagggaccgaggctcttccatctatcgctcctcttcaagccctcggatttctgctctactggacaacaaagataaggtgcagtttgg

SEQ ID NO: 319989 - DNA, 122 bp, Homo sapiens
cagcatcagctggctgccttcacgggcccttgtgtggcacagctgctttgcagatggagacgccgaggctcagggcagcctgctgcggctggcttgctggtgggtagttgaatctggttggt

SEQ ID NO: 319990 - DNA, 122 bp, Homo sapiens
ttcacctaacacctcatttccttccatttggacgacaagctctctagtgacgatgcggtgcggagggttttagctggagagaagggagaagtgaaaggccgggcctcactgacctcaagatc

SEQ ID NO: 319991 - DNA, 122 bp, Homo sapiens
agcgcaggcccttctgggtctcagggacattcgaggcgggcgggcggacagggcggtgctcgagcccacgtgaccaccagaaccccgcaccctccccggcccggccccgccccgcccgccgg

SEQ ID NO: 319992 - DNA, 122 bp, Homo sapiens
ttgtttaccgcgggctttgcggaatgcccccgcttccgtttccgcccggctccgaacccccgaaccccttctacccgcaactccgccccggattcccagaaaggggcgacctgggccacagc

SEQ ID NO: 319993 - DNA, 122 bp, Homo sapiens
tcgactattcctgcctgttacggaaggttgttctctacaccctaggtctgagctctgacccggaagtagacgccgctgggagcgaaatcggtcgtgacgtacgaggtccagcattaaagggg

SEQ ID NO: 319994 - DNA, 122 bp, Homo sapiens
gaggtaggccgaggtagttacggtgttgtgtatgaagcagtcatcagaaagacctctgcacgggtggcagtgaagaaaattcgatgtcacgcacctgaaaatgttgaactagcccttcgtga

SEQ ID NO: 319995 - DNA, 122 bp, Homo sapiens
agggggctgatacaaattggattgaacctaattgagatgccctgtagtgtcagctggtcccggggaaagaggctatacaggtgcaggcacgttccctgagggtgggagatagccgcggccga

SEQ ID NO: 319996 - DNA, 122 bp, Homo sapiens
actgaaatgtcatatatcctttctctacttaaaattggttatttactgtgagttcatttccgatgtgttcttggttgttgctgttttctgcctgaagacgtgtatcataaagagctacatgg

SEQ ID NO: 319997 - DNA, 122 bp, Homo sapiens
gcttcggcctcccaaagtgctgggattacaggtgtgagccaccacaccagttgagattagcgtttgaatatttcaaaagaaaaaaacagaagtcgctgaaacaacagcaacggaatgttgat

SEQ ID NO: 319998 - DNA, 122 bp, Homo sapiens
tggggtcagcgggctgttgactccccgcctgggtgaaaccggagcttccgagtcacgtggcgcgcgaagacaaacctggctgctcagggtttcccggagctttctcccagcttcccggcgat

SEQ ID NO: 319999 - DNA, 122 bp, Homo sapiens
gcaatcccagctgtgaatcccacggagcacctacctgctcaccaaattctggtggcagaacgaagcctccggttgacgtccccaggggagatcccccgtcgctcctgagaacacctttgccg

SEQ ID NO: 320000 - DNA, 122 bp, Homo sapiens
ccctttctgccgcggcagtcagcgcagcgcccgctccgcccccgtcccgccccggcctcgcgttccgccgccagtcccagctatccaggtctccgtcgcaaaaccccagctccctccacatc

SEQ ID NO: 320001 - DNA, 122 bp, Homo sapiens
agaggtgagagtcctggagaccgggccagtgtggcggttccttatctccagctctgggatcgataaactgtagggaccctcagaacccaggtgccggctggctaccccggatcccggcagcg

SEQ ID NO: 320002 - DNA, 122 bp, Homo sapiens
cagctcccacgcgtgcagagccccgagggaccacacgggcctccgcgaggttcctgcgcccggaggccttagaaacaaacggaagactttggctcctttatgatttacacacctggcgtaag

SEQ ID NO: 320003 - DNA, 122 bp, Homo sapiens
acctgggccggctgggccgcggctcctcagggatgtgaatgaccatgctgttgcggtttccggcgagggatgccctctcttcagcatcccgccgctcatcctcactgttcatggtcaagaac

SEQ ID NO: 320004 - DNA, 122 bp, Homo sapiens
ttcccctcgccccgcccgaggctgcgaggacccctgggctcgggggtggtgagggagcttcgtcccggctgggcccgggctggggactcggcctccctgggcgggggccgcacggctgcagg

SEQ ID NO: 320005 - DNA, 122 bp, Homo sapiens
gaaagaatataagagcttgagagaaacaggaaagacctgaataagaccctgaattggctgcggtgctcctgggtctcttcaggtggagatgtgtcccctggagacacacaggacatgggcac

SEQ ID NO: 320006 - DNA, 122 bp, Homo sapiens
tcatggtattgagcagaccggcagtagttgaaaaggaaaacagaatcaaggagaggatttcgcaagtgagagacaattaaacttgtctgagtgctgagcaggaggactcggaggaggcagga

SEQ ID NO: 320007 - DNA, 122 bp, Homo sapiens
caggactgtccagcatccaaacctggccacggttacatcatcctaatggtctcaccaggacgtggctgaacgcgagcccagtgctgagccagtccacactgcaccccaggaagctgtcagac

SEQ ID NO: 320008 - DNA, 122 bp, Homo sapiens
ggtgtgtggttttcttttctcgtagtttgactacatgtcaacctgtccacatttcatagacgacaagtgtggcttcccagagagcgtggagaatggggactttgtgcactgtgaggagtctg

SEQ ID NO: 320009 - DNA, 122 bp, Homo sapiens
atggtcccaaagtggctcacaatgtgtacatgcagaatctttaagtaaaacactgcatgtcgaactgaatcctaaaaaagggctgacagttcaccaaattaataaaagattgacaacctaat

SEQ ID NO: 320010 - DNA, 122 bp, Homo sapiens
tgtgactcagacttaacgccgcccctctgactggtagaggccaggcccaggataaggtggcggcaggcaggtctctaagcagtggcagctcagacccgaggtcccagggtcatgcgtgtttg

SEQ ID NO: 320011 - DNA, 122 bp, Homo sapiens
tcgaaatgcaaagcttaaccttggggtcaaacctgtgagtgtcactcttgccaaagaagacggtggggtggggagaacagttgcttccgtgagaagaaatttaaaaggacactgggcaaggc

SEQ ID NO: 320012 - DNA, 122 bp, Homo sapiens
aatcaaatgggctcacggatttgcgtcagaaacgttgcttccccgataattggtcaacgtcggtgtaactatgattaaaatgtcagtattcaaacaagggctccaacactaccgtggcccaa

SEQ ID NO: 320013 - DNA, 122 bp, Homo sapiens
tggacccaatcagctcgaggtgttccaggaagggcaggttcttcagcagagaccagaacacggaggagggctgggggcacgcctggcccgagaaggggctgggacaggactgcacgcccaca

SEQ ID NO: 320014 - DNA, 122 bp, Homo sapiens
ccggcgcgtcgagtttccggcgtccggaaggaccgagctcttctcgcggatccagtgttccgtttccagcccccaatctcagagcggagccgacagagagcagggaaccggcatggccaaag

SEQ ID NO: 320015 - DNA, 122 bp, Homo sapiens
tcttctggtgctcggctagggccaggctgaagtggaaggtcttccagcagccctgacaggcgtagcgcttccggccgccatggctgctgtggtgctccatcaggtgcgagagccacgcgaag

SEQ ID NO: 320016 - DNA, 122 bp, Homo sapiens
cgggccggcgcgggagggctgtgtgatggcctcggagcgcccggagccggaggtgaggggcgggcgggcgcagcactgggccccgagatccgagggggagggtccggcgggcaggcgtggcg

SEQ ID NO: 320017 - DNA, 122 bp, Homo sapiens
actagctgaaacaggtgtgcaaactgccgggcatctatgcggtactgctcagcatagggccggctggggtcgtggcgtgaggccatgggcctgggctgctcccagtaacagctcatcatatg

SEQ ID NO: 320018 - DNA, 122 bp, Homo sapiens
ggaactaaacctaaagttgtgcccccaccctggaatcaacacgagttattgcatgacatccgtcttttcagctcggtgataaattatggtgtgctgaggggataaactgtatcttaaaaaag

SEQ ID NO: 320019 - DNA, 122 bp, Homo sapiens
cggcctcccaaagtgttggattacaggcgtgagtcacagagcccggcctccacattttctcgacagggtccgtaagacctggttcccagaaaggtggccgtagaatggctttgggagttcag

SEQ ID NO: 320020 - DNA, 122 bp, Homo sapiens
caatgcttccaaggatgttatagaataataataagcaaaaaaacaaattcagcagtttatcggatccaaagagccatgtagaatgtcttgtggctgagaatgaatgaagaaagaaatgaatg

SEQ ID NO: 320021 - DNA, 122 bp, Homo sapiens
gttgcgtttttcacaactcttgtcctctgaagatgcctgctcagagcccatgcagcgccacgctggaggggctgaggatatggggggccctgttctcagagcccgtgaggcaccgtgctgga

SEQ ID NO: 320022 - DNA, 122 bp, Homo sapiens
cccgagcgcccgcgccccgctgccccagccggggagggactggaggtgaagtcgcaggtgcgctccccagggaatatccgggctcgcagaccacgcggcaccgcccccgcctcgccccgctg

SEQ ID NO: 320023 - DNA, 122 bp, Homo sapiens
agccccaaagcgggggggatgggaccctgggaggggcgggggtgggggtgggggccttcccggtgttgcttggtgaccacgctctccgcccagaccgttccatttcttcagcagggggcgcc

SEQ ID NO: 320024 - DNA, 122 bp, Homo sapiens
gccttcatttcttgagctctcaatgcagacatttaaatggctgcaatcagtagagtgacccgcggatggcataaatgcacctccttttcttggccttggatctatgggtctgggattgtggt

SEQ ID NO: 320025 - DNA, 122 bp, Homo sapiens
gggaggcggtcctgtcagcgatgggttacgagagctggagccggggggcgggactgggaccgagttaacgaagtggaaatgaattcaggaccggcccagtggccctgcaggcagcgccgaag

SEQ ID NO: 320026 - DNA, 122 bp, Homo sapiens
ctatttggataagagtctcggcggtcaggaatcgcattcctcttctcaccgactgaaacacgtggagaagagacggagacatgcatcctgctccacctggcagctcgccccagcgtggcgag

SEQ ID NO: 320027 - DNA, 122 bp, Homo sapiens
cctggagtttattccttctgatgttcacacgtgtccagagtttcttccttttggttggttcgtggtctcgctgacttcagtaatgaagctgcagacctttgcggtgagtgttacagttcata

SEQ ID NO: 320028 - DNA, 122 bp, Homo sapiens
ccacgaagggctgcaatagcagcatttctcacttcccaatctgtgtcttgcagaagtggccgatgcgatctcgtctctatgctggaggcctggggtactccgatcttgactccaccacagcc

SEQ ID NO: 320029 - DNA, 122 bp, Homo sapiens
tctatggcctgcagattagggggtccaatgtcacctaatctactacagctccatggggagcgggtacagatactatacacatccacacactgaacccagcctggtctccaacacacacatgc

SEQ ID NO: 320030 - DNA, 122 bp, Homo sapiens
ccacttgttcttgtagccttaaattaatttgagttaattcttaactgtttcccttctgtacgtgtgtcatttaatggttttcctttatctgattttccccaattcttcctgtgcatttgtgg

SEQ ID NO: 320031 - DNA, 122 bp, Homo sapiens
gaacgctcccggcttggcctcggctgatgggccctcacgcctgaagcgggcaggaagctccgggatggatttcgggtctttggagaccgtggtggccaactctgccttcatcgccgcccgag

SEQ ID NO: 320032 - DNA, 122 bp, Homo sapiens
atgaagccgggctaatcatattgtctttcctggaaatgtggagatttgtgttcagaggaccggcacctgagggtcctggagctgagccacagagcatcctaaagggaaagtccagatattcc

SEQ ID NO: 320033 - DNA, 122 bp, Homo sapiens
gcccagccggagagagattcgcggacacaggcggaggcgagggaggacggggatgggacgcggaggtccgcccgtgagcttctgaagcggctgagagaccctgacaatctgggcgctgggcg

SEQ ID NO: 320034 - DNA, 122 bp, Homo sapiens
gggatctgctgagcggcaggtgcaggcagtggaagcagtagctgctgtccagtcggtagccgacttgcggatccagcaagagccagcggctgcgcttcggctgctgcaggtaacggcagcgg

SEQ ID NO: 320035 - DNA, 122 bp, Homo sapiens
ggtggacaggcactcctcacaggcgggtcgggtcccatggacactggctgaaggtcgtggcgcgtgactggtttcttcgctctggggtgcttgtgtgtggttctttggtactttctgtgcct

SEQ ID NO: 320036 - DNA, 122 bp, Homo sapiens
aatcccccagagccgcctgaccccgcccccaggctccgccccttccccccacttcccccccgtcgcagtgccctgctcccattggccttttcgtacattgcccgccctgtcattggctaatc

SEQ ID NO: 320037 - DNA, 122 bp, Homo sapiens
gcgagtccacccggagcgagtcaggtgagcaggtcgccatggcgatgcggccccggagagcgcacgcctgccgcggtcggcatggaaacgctcccgctaggtccgggggcgccgctgattgg

SEQ ID NO: 320038 - DNA, 122 bp, Homo sapiens
tccaaaggcctcccaagcttccctgatagcaagccaacactttaggcaaattcattcagacgaataaattcttccctctctcttccttctgccttactcagcacgtatttccataatggtct

SEQ ID NO: 320039 - DNA, 122 bp, Homo sapiens
tatcgaggggccctcggctctcgccccttctgttttccccacctcctctagtacttctaacgcaaattgctctcgggcctgcacccagagccgagctctgagaaaataacttcaaggtcagc

SEQ ID NO: 320040 - DNA, 122 bp, Homo sapiens
gagcgcgtcccgcggctcctcactccacgcctgcggccctgcttggagcataccgcccaccgtgaggtctgctgcagcttgcgaccctcagcttcagtgctgtggctgctttcgctctccca

SEQ ID NO: 320041 - DNA, 122 bp, Homo sapiens
gggtgcttccagagcagctttgcccctaacagcagatccatttgctggccccctaacctccggtcttacccaaaaactgggctcaaggtctccttataccatgctctgtggccacagggact

SEQ ID NO: 320042 - DNA, 122 bp, Homo sapiens
ggggtcaggcgccttgcgccgctatgttaagacaggctttcccgtctctacagctccttccggtcttttcttagcaggctctttagtccaccacgtcgcaaatgggacgctgcttcctttgg

SEQ ID NO: 320043 - DNA, 122 bp, Homo sapiens
gcagacggaacatcatgtcgtccgcggccgagcctccgccacccccgcctcccgagagcgcgccttccaagcccgcagcctcgatcgccagcggcgggagcaacagcagcaacaaaggcggc

SEQ ID NO: 320044 - DNA, 122 bp, Homo sapiens
ggcctgacctagcgcaggtctggtgcgcgcagagaacaactccaagcgcaccgacgcccgcgagctccttccaaacaccgaacgggatccagagcccgagcccacaggcggcggccggggga

SEQ ID NO: 320045 - DNA, 122 bp, Homo sapiens
taattgaaggagacttttgctacctgtggctctgctggagtccacccgcgccgcggcgggcgctgcgtcttaattcaatgttccggcttcagagcagccgtggaagccgggccctgaagtgt

SEQ ID NO: 320046 - DNA, 122 bp, Homo sapiens
tctttcgggggagagctcagctctaggctttcatggtcaaaatactaaaggtcagctccgcgtgtgtgccccaactgtcctggaagcttcaattggaaaactccaaactttaagttttgctt

SEQ ID NO: 320047 - DNA, 122 bp, Homo sapiens
ctggttcattttcacctcgggtttcctcaaagacaaaacctacaggtgccgcagaggcagcgaccgggagcaggagtgcaggggccacagctgcaactggaactgctcagcagtggattcag

SEQ ID NO: 320048 - DNA, 122 bp, Homo sapiens
caccgtggagaatgaggtatccatcccctctagcctttatcctttgagttacaaaccaatcgtggctctcttttgtttcttttcttttctgctaaagcacagtcccaaagacaaggccaagg

SEQ ID NO: 320049 - DNA, 122 bp, Homo sapiens
agcagctggcccctcgaacggactgtgcacaccactgtgtgtctcacaactcaggcaactcggcacgccgcaggacataacggcagagtgtgagtaattttccattttatatacacatatgc

SEQ ID NO: 320050 - DNA, 122 bp, Homo sapiens
tttgtgtgtgtgtgcgtgtgtgtgtgtgtgtgtatcttttgccgctaaaagtaatattgccgtcatatgggaaactgggagagggagaaacaggtccccctggttacataagaactgacaga

SEQ ID NO: 320051 - DNA, 122 bp, Homo sapiens
gatgttaacttaaatgttcagggtgccccagtctgttcagcatggctgaaatccacactccgtattcttccttgaagaaactgttatctttactcaatggcttcgtggctgtaagtatgtca

SEQ ID NO: 320052 - DNA, 122 bp, Homo sapiens
ttcccttctgggcttatactcctttgggggtgtgggattagttaaataattaaacaaatgcgttgttacaaactgattaaaagtataaaaataaataacagagagttgtgaccgtattttaa

SEQ ID NO: 320053 - DNA, 122 bp, Homo sapiens
tccgtcggctttcctctttaattacttacacctccctctgggcgccgacattttgggcagcgggggcagcgtcacttccacccggggggcccctcgacttccgcctcagctcccttcccccg

SEQ ID NO: 320054 - DNA, 122 bp, Homo sapiens
ctggcaaattgtctatggttaaatgatgcttttaatttctgtgtcaacacagaccctcttcgttggtgtctccaaattagtattctcttcctctagtgtgtcattacagtcccttttggctt

SEQ ID NO: 320055 - DNA, 122 bp, Homo sapiens
ggcccctcccctccgcgggaacttcccgagagcagcccgcggggcccgggctcaccgcggcggaagggctccagcagcacatccgaccgcttgcacagacgccgcagcacggcggctccccg

SEQ ID NO: 320056 - DNA, 122 bp, Homo sapiens
ctacctgttgctttgtatttattcttcaaaactctgccgtcttccctgaccttccggagccggtgtttgtggcgcctcctgctggtcactgggttcaggcagtttggagctgggtggaagga

SEQ ID NO: 320057 - DNA, 122 bp, Homo sapiens
gcaggcactgctgccccgggtccccacggatgagattgaggcccagacgctggccacggccgacctagacctcatgaagagtaagtgctgggccttggccaagcccggcactggtgggcaaa

SEQ ID NO: 320058 - DNA, 122 bp, Homo sapiens
actggcatgagaaggggcagaccagtgtgagctgtggaaggaggcctctttctggaggagcgtgacccccagtaagcttcaggtggggcagttcctaagggtggggatctgaaattttgggg

SEQ ID NO: 320059 - DNA, 122 bp, Homo sapiens
tatttttcagtcctgttggcttcgaggctggatggcgatgtgaagccaacgtaatgcccacgccgagtggccggagccacgaggggacccccgagtgcccgacagcgcccatggcttgggtg

SEQ ID NO: 320060 - DNA, 122 bp, Homo sapiens
tgtttccctacagagaaatgtccagtggttctatcttcaatctctcttctttaaatagcacgaagatgtcaattcaaaatattaatccaaagtaataaaaatgtcagaaacaactcacgtaa

SEQ ID NO: 320061 - DNA, 122 bp, Homo sapiens
gacccgaccgtcaacggacgcggttgcgggtgggtggcggcggcaggattggccgggccacgcgccggtcaccgagaagcagcgactccagccccttccgcaaaccaagacccgccacctag

SEQ ID NO: 320062 - DNA, 122 bp, Homo sapiens
gcagataggcagttaaaacttgaattaattagcctttcaaaagcagccccagagcgcctacgacgtcctggaatcacaaaattttattatagaaaggattccagagattgttagccaaaact

SEQ ID NO: 320063 - DNA, 122 bp, Homo sapiens
gggcctccgggctgattgtcccggccagcacttggtccaacagctgctggtcaatgataccggcctccaggagctggtggacggtgacccggctccgcagtgcgggcagcatgatgtccgcc

SEQ ID NO: 320064 - DNA, 122 bp, Homo sapiens
ttaggcacagcagcaacagaggtgaaaaccacaaaccgaatcctaaaacccctacccaggcgggaaaataaataaacttgagtgcagcagcagcagcacgagcagcccaggaggaattgaaa

SEQ ID NO: 320065 - DNA, 122 bp, Homo sapiens
ctccggggcgagttcagcactgcggggtgcgactagggctgcgctgccagggtcacttcccgcctcctccttttgccccctccccctccttctgtcccctccctttctttcctggcttgagg

SEQ ID NO: 320066 - DNA, 122 bp, Homo sapiens
agaaaaggagggcagggatccagctgaggtgaggacagacaagtagcaagggcagccaagcgattaacactgtcacaaggatgagacacacatgggaatgggagacagagctgaacagcaat

SEQ ID NO: 320067 - DNA, 122 bp, Homo sapiens
gctggctgggtggctgtgtctggtttctcggcgccaattcaccgtcttgggcctaggttccgtctctaaggaagagaaggagggaaaaagagaaagagctctcgtgggtagttaatgacagg

SEQ ID NO: 320068 - DNA, 122 bp, Homo sapiens
gcagatttggtgcctggtaaggactggttcacagccagagccttctcagagtcttcttcacgtgataaaggggacgaacaaacactctggggtccctttgaaaagcactattaatcccattc

SEQ ID NO: 320069 - DNA, 122 bp, Homo sapiens
ctgccgaagagcagggagccccagagtaggacaatagctattgtcgttggggagtgttttcgaggttgggagcgttgggcggatgtaaggctggactttctttaaagcaaacggtgcctctg

SEQ ID NO: 320070 - DNA, 122 bp, Homo sapiens
cggacgggcgcggggcgcctcctgccatcttagcgtctgccgggatccttcccgcgccttcgctgcccgaaccagctcggtcttgggacgtttcccccaaatcctcacaagtcaaatcgaac

SEQ ID NO: 320071 - DNA, 122 bp, Homo sapiens
aaaaggaggccctgcccccttaaaaaatactaacaccttactgcaaagaactagcagctacggcttgcgcctgcgccccttgttccctgccgcaccttttcttgtagttaagaaatctattt

SEQ ID NO: 320072 - DNA, 122 bp, Homo sapiens
gggagggcggtggggtggctcgggcactgacctcttcccgtgtttgtccttcccggaaggcgggggcagggcccccatggggtcagggcaaagggtgaacttctgaggcctcaggatgccca

SEQ ID NO: 320073 - DNA, 122 bp, Homo sapiens
tcggcgcgctctgggggcgcaccggtgctgtgtgcctggccggagcgttttgaaattttccggggccgctcggcggcgctgcgattggccgcgttcgggtaacctctatgcaaatgaggccg

SEQ ID NO: 320074 - DNA, 122 bp, Homo sapiens
tctttccccgacacgctatttgtcagtgtcgttttccaccacagagccaggtatttgccccgccggccacggtgaggcgcgcgaggcgtgtgctgccagcttctctcttccttccccggtcc

SEQ ID NO: 320075 - DNA, 122 bp, Homo sapiens
atcataacctacccaggactccaggcgtgagttggatggggacgagtcccgaactctgtacgcacccccccacctcgagtccctgatccccgcacctcgagctcccagtctcggactcctgg

SEQ ID NO: 320076 - DNA, 122 bp, Homo sapiens
cgggagccttagcagcagtggcgactgctatgccggctgagcatgtggccgtgcaggtcccggccccagagccaacacccgggcctgtgaggatcctgcggaccgctcaggatctcagcagc

SEQ ID NO: 320077 - DNA, 122 bp, Homo sapiens
ggagatttcctcttgttgcccaggctggtggctcccctccattgtgcaatgatgcaatctcggctcactacaaccttcacctctaggcttcaagcaattctcctgcctcagcctcctaagta

SEQ ID NO: 320078 - DNA, 122 bp, Homo sapiens
gtggggacacggcatagttccagggcccttcggcgtggcctccatgtgagcaaggggtagcgagtgcatgtgggccctgggcctggggcctcctgggctgggacctgtcattctcgccaagt

SEQ ID NO: 320079 - DNA, 122 bp, Homo sapiens
ctcgctaggaatggccgcggaggaggactggtcacgtggcgtggcttccggcctctggcgcgttcctattcgggaaggttttaaatgcggagtcatctcttgatttgtcagcgaggctttga

SEQ ID NO: 320080 - DNA, 122 bp, Homo sapiens
agacgagtagggctgacgagctggctggggattggctggccccggctgggagggatttgtcggaaggaagggctgcagcttacagcaacagagtttagactgtctttgcttcatcatctgaa

SEQ ID NO: 320081 - DNA, 122 bp, Homo sapiens
attttttcaaatatcagatagtatactttgcttcagaattgaataggtgaaagaataatgcgaggtaattggatctatactgtgaagacttgaatgccaggcctgaaagcttgagcaaagaa

SEQ ID NO: 320082 - DNA, 122 bp, Homo sapiens
tagcctccccctaacaatcctagactgagacgcagtcaggcgcacgcccgcaagaggcggcgaggtgacaagtttggagtgcgcccccttcagtactgcgcgttctaagacttttggcggag

SEQ ID NO: 320083 - DNA, 122 bp, Homo sapiens
aactggtgggatgattatctctatcagggactgtttagagagagatactctgacctgaaccgctgtaactattaattgaccagtttgatgcgcaacactttctggtgcagctttatttacca

SEQ ID NO: 320084 - DNA, 122 bp, Homo sapiens
actcacgagggttccacggagcaaaagtaggataatttctgggcagacctgccgtccgaacggctgggagctgcgggccccccggcgctccctgtgtcttctgagcagagaccaggctcagc

SEQ ID NO: 320085 - DNA, 122 bp, Homo sapiens
aagaggatcaagctacagctctgggacacggcgggacaggagcggttcaggtagggaccccggggaccttgggcaccgcgccgccccctcagcccgcccggacgccccttccccaggcgtcc

SEQ ID NO: 320086 - DNA, 122 bp, Homo sapiens
gcgcggggctcttggcgggctgggggcggcgtgcgccgagctgggcgcgagtggaggggccggcggctttgtgcgcccccgccagtgcccgcccgcagccccgccgcagcgtttaaccttga

SEQ ID NO: 320087 - DNA, 122 bp, Homo sapiens
tagaaaccacatttcccatgagcctaagcacgcgcttccgtcactcggcggccgcgggggcgaagcgcgaggccccacacagagcatgcgcatcccccttgacgtttgctgccaccccacgg

SEQ ID NO: 320088 - DNA, 122 bp, Homo sapiens
ggtcagtgtgacggtgaatgttgcaggtggtgttgccaccatgttggtgagaccgtgtcacgtgaggacatgacggagctgcttaatgcgccgatgacttttgtttgtttgtttttagagac

SEQ ID NO: 320089 - DNA, 122 bp, Homo sapiens
tcatagcgtgcacaagaactgcgaagtagggcctagaggataataaataatgcaaggaggcggaggcccaggggcacccccaggaggctgttttttggtaatgactttcgagaggaaagagg

SEQ ID NO: 320090 - DNA, 122 bp, Homo sapiens
cgtgcggtgggcggagaggcagaattaggggagtctccaggaggcgtggtgattggccgccgccgggcggaagggggcgtggggagggaaaggccgagcagcgcggtgacgtctcgctggcg

SEQ ID NO: 320091 - DNA, 122 bp, Homo sapiens
ccgaggccgaggctccgagcctggggtgggggccccctctgctttgttgccctggtcccacgccggcccacgcttccccgagaagacgggccccacgcatggcggctctaaccgacgcgacc

SEQ ID NO: 320092 - DNA, 122 bp, Homo sapiens
gcaggaagacaacaacagagccccggcaggtggatcctgaaaaccgacggcctccacccccgggcttcctgactcaaatcacagccgctcactaaccggggctcagcttcagctgtgctgta

SEQ ID NO: 320093 - DNA, 122 bp, Homo sapiens
tttgtagagagcgcagagcttggcgtcgctcgcccctttgggggcggtggggggctggggcgtctgcgctgcgggggccgccgtcggggcggccgggggcgccgcgggcggcggcggcgggg

SEQ ID NO: 320094 - DNA, 122 bp, Homo sapiens
tagaatcaaagtccgattagaggtgaatttacaaacattcttccccttcttctagtcaagcggactattccaagtcttaaatagttagttagaaaagttaggttttatttgggaggaagtaa

SEQ ID NO: 320095 - DNA, 122 bp, Homo sapiens
ttctacaggagttaagtttaattacagtttaaattgtcttcaggtcacagtatgatttggcgttaaaaagtgcacagaggcgtgaggacagtgtgtgcgacacccacatcaacgtctgtgtc

SEQ ID NO: 320096 - DNA, 122 bp, Homo sapiens
ttacgaaaatccactgacgctcaagtcccttaaagtcaaccttccgtatcacagattgtgcgtcaacagatgcagaaccaggagatatggaggactgactgtattatacttttctaaaatta

SEQ ID NO: 320097 - DNA, 122 bp, Homo sapiens
tggggacctgatctgtctcaatcactgctgagtccccagcaccaaggacagggcctggtacgcagcaggtgctcaggaaatactgcagaagtgaaagggagaataaatgaactctctgattc

SEQ ID NO: 320098 - DNA, 122 bp, Homo sapiens
tcctgcgtggacggccgatgctgcacgccccagctgaccaggactgtgaagatgcggttccgctgcgaagatggggagacattttccaagaacgtcatgatgatccagtcctgcaaatgcaa

SEQ ID NO: 320099 - DNA, 122 bp, Homo sapiens
gagggaggacgggcaccgacgggcaacgggaatttgggatcaggatggtatcatcgcatgcgagagctcctgcaaccttatatgtaagtcagtcacagccgtccacttactgactccaattc

SEQ ID NO: 320100 - DNA, 122 bp, Homo sapiens
gtccagtttgaactgaacaccggaagtgaaggggcagggccagggccgtgcactgagccccgggccattgtccatctccgaccagggcagtagccacccccactagccagccgtctttatct

SEQ ID NO: 320101 - DNA, 122 bp, Homo sapiens
ccggggggcggggcgaggctgcagtatcgggggcggggccgcgttctggaggcggggctccgggcgaggggcgtggcctgcgggcacccggtgggtggggaggcctgggttgggttgggctg

SEQ ID NO: 320102 - DNA, 122 bp, Homo sapiens
agcgctatttcaggcacatcattggaatacaggaagtagccctgcacctgccagtgagctcgccattcactgattggaagagtgacctggcatcttggaaatcattgtgtgtcttcaggaga

SEQ ID NO: 320103 - DNA, 122 bp, Homo sapiens
tttctcagtgaccagggcctgtgcttaggcatagacgggcaagtggagccaacatgccagcggcccagagctgggtttgttgccaaacttatgtgaccctgcagagacccttcgagaaacct

SEQ ID NO: 320104 - DNA, 122 bp, Homo sapiens
cctggacatacacgaagacacatggacgtgggggtctgacctggacattcacaacggaaacgtctacaacagaaggcgcccaggacccacctttctggcgcataaatgaagatttttggctc

SEQ ID NO: 320105 - DNA, 122 bp, Homo sapiens
cgtgagtcaccgccctcccagtgcctgggcacctgttggggcagctggagaggctggcgccgaacacctgcctgtcggctgcgcccctggcagctgccccatgctggccctcctggcttgcc

SEQ ID NO: 320106 - DNA, 122 bp, Homo sapiens
atagagtggggtgtgcgtgcgaggcagccaccggacgcccgaggcatagagtggggagtgcgtgcgaggcagccaccggacgcctgaggcatagagtggggtgtgcgtgcgaggcagccact

SEQ ID NO: 320107 - DNA, 122 bp, Homo sapiens
ccacattccaaatactggctccttcctgggcctggggaggggactgcgatcgcggttacccggcacttctgtgttcatgtgtgtacaaggtggtatgtagcccacgcatgtagccaggccta

SEQ ID NO: 320108 - DNA, 122 bp, Homo sapiens
tttcattggaaacaaagcctccaggtaaggtaagggtccactggcttatttttaggcattcggagcagttagggaaggtgtactggaaatggaaaatttccaggcctccctcccctgccaca

SEQ ID NO: 320109 - DNA, 122 bp, Homo sapiens
ccgtccctttggactcgcttcgtccaacgcccccacgagtttcggtggcccttcgccccacgctataagagcagtcacttccggaactgctgcccttcgcctttgccgcgaaaagtgcctga

SEQ ID NO: 320110 - DNA, 122 bp, Homo sapiens
cggcaggggcggggtgagccttggccccgctcccgtgcaggtgtcgcgggtaagctgccgcggttactgtgaagcagggccaaggccagccctccgcctcgaggccactggtgcttgggggt

SEQ ID NO: 320111 - DNA, 122 bp, Homo sapiens
cttgaaaaagtcggtgccactgtgcttttctttgtttgcaggtcagtgccatcttgtggccgaagtcatacccggctggagagctcgagcgccagcccaaaccaggaatcaaagggctcgct

SEQ ID NO: 320112 - DNA, 122 bp, Homo sapiens
gcctggaaaaggctgaccgcccagattgacgttgctaggcaactccggaggcgggcccagcgccaaaagaacagggcgaggcgtcgtccccgcatcccattggccgttctctgcggggcccc

SEQ ID NO: 320113 - DNA, 122 bp, Homo sapiens
accgaccaagtgggctgcggcggccgggaaagaaaccacgtgcgctgatgtcctcagaaacgcagggagatgttccacccacggaaaccatttgggttctgctaaagaagggggtcaggggt

SEQ ID NO: 320114 - DNA, 122 bp, Homo sapiens
acagagagaggctgaggcccggagcgaagctggcgcgggctgtgggggcggaagagcaggcggcccggctgcctcgccctggccatgactcaggctctaccaccccgtggtctcctagacag

SEQ ID NO: 320115 - DNA, 122 bp, Homo sapiens
gctcacccttcacagtggctgtgctgcatcatctgtgacgctgctcggctcctgaggccacgtgtgaattggcgcggttctccccagctgcccacagcgcaccttggtaatccgtgtcccgt

SEQ ID NO: 320116 - DNA, 122 bp, Homo sapiens
cgccacctctttggtattgatctcttccatctgccctgaattacttccattgctgacctgcgcgccggtcaccgaagggttgggctcccgggctgtgcccaggagttgcccgtggccctggg

SEQ ID NO: 320117 - DNA, 122 bp, Homo sapiens
ctaaagcgccacgacatcagtggagtctaaacaccgcgccggatgatggcgtcaccacggcgctcattggagccctgggaagaaggttgaaaggcattctgggaaatgtagttcaccaacgc

SEQ ID NO: 320118 - DNA, 122 bp, Homo sapiens
tcaaaacagggaaggaggcgaaaacggggccacccaagggttatgaggatgaaatcacgacgacagcaacactgttgagtgctcagtgtacgctggacacctgcattagctcattgactctg

SEQ ID NO: 320119 - DNA, 122 bp, Homo sapiens
ggggcagaaccagggggcggggcctgcgtggtgcgtgcgtgcgcgttctggaggaggcgccgccgccgctcccgaggcccctgccgccgccgctcccgctgctgtcgccgcgcagagccgga

SEQ ID NO: 320120 - DNA, 122 bp, Homo sapiens
gcttcgggctcgctgacttccggcttagggccgagggtggggaactgccgggcgcggaagcgatgggcatatctgtggcttattttcagcactgtcgcgcagacagtggcgcgatctcagct

SEQ ID NO: 320121 - DNA, 122 bp, Homo sapiens
ctgacttagaatttttgaaagctttcgggcctctctgagaaagccgttccaaatccaccccgtatcaatttgccttctagaagcggcaggataagcacacgggtttgggcagtgctcacatt

SEQ ID NO: 320122 - DNA, 122 bp, Homo sapiens
gcacctgccacccaggctccgagggccggccgagagggcgtgtgagccccgtttcctgtccgcaggacccctgcgtggagaataaccctgtactcatcggcttggcctcagtccacgtcttc

SEQ ID NO: 320123 - DNA, 122 bp, Homo sapiens
gtgccccctcacaggcaggctggagacaaggacacactgctaggagcatcagcaacataacgttagaacctacacttgttctattttattaaaaattaatcttctatggtgctttatgacaa

SEQ ID NO: 320124 - DNA, 122 bp, Homo sapiens
tcaggaataggcagaggcagacatcctggccagagtgactcagcaagtttagcacacaggcgcataactccacttgttaaatagcctgtttgtgtaagcttgtacttggctcagagccacta

SEQ ID NO: 320125 - DNA, 122 bp, Homo sapiens
agaatgcccctggactgatggcagcgacgaggcccaatgtgccacatttcatcctacaggcgccaatccacatccccccaccgcagagaggtggctcttcctgcaatccggccgcgatgcgc

SEQ ID NO: 320126 - DNA, 122 bp, Homo sapiens
ggtgggaggctcgactccttctcttcatccacctgttttcaaagcagtgagtgcatccagcgtcctccaacgtggaccagtgagcttggttttatgatcttatgaatttaagattcgcacgt

SEQ ID NO: 320127 - DNA, 122 bp, Homo sapiens
ccggggcatccacccatcaggcctcgccgtaaacttcctcctaacagccgctcctgcagccggaagatattgactcgaaggagaaacaatggcaggaataaaataaaaataaaaaagttaat

SEQ ID NO: 320128 - DNA, 122 bp, Homo sapiens
ccgagccctcaggattggctgagcttctccttctacctaatccagcaggcaggaggtacccggctccgagtcgctgaacgcggcgctctcctggcgaggctggaggtcgggaaccctgcagt

SEQ ID NO: 320129 - DNA, 122 bp, Homo sapiens
cggttgccagggctacggccaagcggaggtagggcctcggcactatgggcggggcctgggcggggttatataagccagcggcgggcggaaggcggggcgtgggggtctgtggctgctgggct

SEQ ID NO: 320130 - DNA, 122 bp, Homo sapiens
ttttgtaagccatattttgacacgtcttttccattaaggagcagaactgtctggtgacaacggctatccctgtgctgaaagcccccatggtttgtacatcgtcctgtggtgacaggctgctg

SEQ ID NO: 320131 - DNA, 122 bp, Homo sapiens
tgtaatgttactgtttctctgtggagcagaatccctctgagtccagctgtctgaatcgggcgtcgttattctaggtaggccacccacagccttccagtaagctccaccagaaacccaaacaa

SEQ ID NO: 320132 - DNA, 122 bp, Homo sapiens
ttgtttgtaggaagccagacacaaacgaaatcactgcagggacttcagggagcaaattcccgaaggcacaagctgttcttttcccctttccactcctatccccacatatcagacagtagatg

SEQ ID NO: 320133 - DNA, 122 bp, Homo sapiens
catgctagagttccatgagagtccagcagcactcagtgatacattgctcaggccagaggccgcctgcggagactctagaaaggggatgtaggcatgctgaagcccagtgggagggacacatt

SEQ ID NO: 320134 - DNA, 122 bp, Homo sapiens
tttctcccttcactctaaacaggccaaacgtaccaagaaagtcgggatcgtcggtaaatacgggacccgctatggggcctccctccggaaaatggtgaagaaaattgaaatcagccagcacg

SEQ ID NO: 320135 - DNA, 122 bp, Homo sapiens
aaaaatgggttcaaatgaccaagagtaggagctatttccctccttccggtaaacaaactacgtgtagtctcagtcatctgtccccagtacagacacgttccccaccacccaagtgaattagt

SEQ ID NO: 320136 - DNA, 122 bp, Homo sapiens
accgaatcaaagttcagcaaccacatgcaaaacaaaccctccgtgagggcagcaagtctccgtgaggacggctgggattggctgcacagcaaagccaggagaggctccatgaggagaacagc

SEQ ID NO: 320137 - DNA, 122 bp, Homo sapiens
cgtcggggaaatcccgaaaagcctgcggggaagaagctgaacgggggcgggacccgggcgcggtgagcccattcattccccgagggctgggaaagtctccaccaggagacggaatccctggg

SEQ ID NO: 320138 - DNA, 122 bp, Homo sapiens
agaggcccacgtgtgggcattggcccgcgatctgaaaggggctgtcctgttcctcatgggcgctgccagcgccacgcactcctctttctgcctggccggccactcccgtctgctgtgacgcg

SEQ ID NO: 320139 - DNA, 122 bp, Homo sapiens
gagaagccccacgcgtgctgcgagtgtggcaagaccttctactggcgcgagcacctggtgcgccaccgcaagacgcactcgggagcgcggccctttgcctgctgggagtgtggcaagggctt

SEQ ID NO: 320140 - DNA, 122 bp, Homo sapiens
gtcttccctgcacccccagggatgatgagtctgggaggggctggtcagccatgaaagcttcggggaggggccggtggccaggccgggcaccccagagctccacaggcagacatggtgtgggg

SEQ ID NO: 320141 - DNA, 122 bp, Homo sapiens
ctgcctcctcactgctaagtttatggtcaaaaggaacccaaagggcaaagaaagccacctcgccatatttgcaggggatgcctctactgagcaaggggtaagcaccttacacagaatgtgtc

SEQ ID NO: 320142 - DNA, 122 bp, Homo sapiens
cagtccccattcccaactagacactggacttcacgcccttaacttccgccacgcacccagcgcccaccctcagacccgaccttctcaacctggacatcgttcgtccaggtgtcccagctccc

SEQ ID NO: 320143 - DNA, 122 bp, Homo sapiens
tgcacgccaccacccggctcatgctccaggcgctgcgcacaccccagtggccgcccaggacgtgcggtcactggagagcccccagccacgcccctagatgctgctgggcggcctgcaggagt

SEQ ID NO: 320144 - DNA, 122 bp, Homo sapiens
ttcctagggtttatcgtgtgagcacaccatatatttacagtaggaatagacgtagacacacgagcatatttcacctccgctaccataatcatcgctatccccaccggcgtcaaagtatttag

SEQ ID NO: 320145 - DNA, 122 bp, Homo sapiens
tagtactctttggttaacgtttattagtagcaagctatttttgtctcactcttctatcctcgtaaccaaatttggttgggcttccaaaaatgatactccagggtcttgtttctggagctgtc

SEQ ID NO: 320146 - DNA, 122 bp, Homo sapiens
taatatgcctccttaccctgggacctcccctccaaccctgctcactggctagaggcctgccgggctgtcatctccttggggacaggactgtgatcatttgcccccttgttggacgtcattgt

SEQ ID NO: 320147 - DNA, 122 bp, Homo sapiens
cctgaggattagtaaacaaatgtgtgatgtttaatgggagcataacagcctacttccactcgaatgcccagagaagaaaagcagggcagtggtacttccagcctctctcttcaaagaaaaag

SEQ ID NO: 320148 - DNA, 122 bp, Homo sapiens
ccgagcaggttctatggctccccctaccaagggtaactctctgggtttcctctccccggacgtcgtgggcacgcgcccgacagactttcgcccctaggccggttcccagtccagctccggag

SEQ ID NO: 320149 - DNA, 122 bp, Homo sapiens
ggaagtgctgcagcacagaaagcagagcataggggcctgcaggccgcgtgcaaaactggacgtgccgtgtgtcggttccacacatgaggggcctgcaggccacgtgcaggccgtgtgtcggc

SEQ ID NO: 320150 - DNA, 122 bp, Homo sapiens
gtcctgctctctgaggaggacacgggctcggagccctcaggctcactgtcggccaaagagcggtggagcaagcgggctcggccgcagcaggacctggcgcggctggtgatggagaagaggca

SEQ ID NO: 320151 - DNA, 122 bp, Homo sapiens
ctggcctcaggagacagatcagttggaggaagaaaaagcagagctggagtcggagatcgccgagctccaaaaggagaaggaacgtctggagtttgtgctggtggcccacaaaccgggctgca

SEQ ID NO: 320152 - DNA, 122 bp, Homo sapiens
caggttctacaaccttctttttttctggcacatgggttatatttttcctgtttctttgtgcgttttgttattaactggacatttaaaataacaggtatccaaccttttggcttccctgggcc

SEQ ID NO: 320153 - DNA, 122 bp, Homo sapiens
gtggagtctgggcacaagggcctaccctcacctgttggggggtggtattgtgtggcgagacgggtgaacctgcgtggaagttataactctaccacttactagcagtgagacctgcagccatg

SEQ ID NO: 320154 - DNA, 122 bp, Homo sapiens
atgagagagggagaaggaggaaaagagagctggagagcaaacctaccgctcggcggccgccgcagagagcaggcccagggcttctcagccgggggatctggctccacctacaggaatcagaa

SEQ ID NO: 320155 - DNA, 122 bp, Homo sapiens
aattaatgtggaaaaagaatccactatataggatcggcttccacaatgcacgaacaaaggcgtgaggagggaattttttttttcaaatttactgcaggaagatttaataatagaaccgaaca

SEQ ID NO: 320156 - DNA, 122 bp, Homo sapiens
tggctcagaacttccaagaaaactcagtgggaggggaggaaaaacaacgcaatgacatgacgccttgcagggcccgccttggccttactgaatcgcccagagattgcattccagctgcactg

SEQ ID NO: 320157 - DNA, 122 bp, Homo sapiens
atctggccttatcaaagagaataccagaatgtctaagctgaaaagacccttgcaaatcatcgccctccgcacccctcagctcaccagggtgcagagaggggaggaggcctgcctaagtgtgc

SEQ ID NO: 320158 - DNA, 122 bp, Homo sapiens
ctgacgcaggaggaggggcggcccccgtcgcacaagaaccaatcacgactgtcgcttctacgtggctagcattgaccaataggagaccgtagtgatagcgacggggaaattcaaacgtgttt

SEQ ID NO: 320159 - DNA, 122 bp, Homo sapiens
tcacctacagcaaaggaggctccgatgcgcccacccgggcagcgactcgcggttggtgggcgttcctcgtcctcgccccctcggtggctgtggaatccaccccgcgccgcacacgccaggac

SEQ ID NO: 320160 - DNA, 122 bp, Homo sapiens
tcctcatccccaaagcgaggcagccactgtctgaaaaccaccactccccctgcgagaggccgcccagcatcccctgtctggggccagcacaagctgctggccctgggctgggagctctgggc

SEQ ID NO: 320161 - DNA, 122 bp, Homo sapiens
ttttgattactaggagtggaggcataaggctctaagggctctgctttgcccggctgccctcgtctttgccttgccatcggagcctcatgaaaataaatagttggcttgtcagggttgactga

SEQ ID NO: 320162 - DNA, 122 bp, Homo sapiens
tcctcgccggatggcttcctgtgacagaggtgatacacagtttccagaactgtctgggggcgggagcgggagcgggagccgagcccgctcggagctcctcgccgccgctgccgctcccatct

SEQ ID NO: 320163 - DNA, 122 bp, Homo sapiens
ccgtcccccacagcaaggtcaacactactacgccttagccacccgtcaccctgctgactgcgacttccctctgcagcacagggcaggcagccacctatgccccacaagacggaacccgggag

SEQ ID NO: 320164 - DNA, 122 bp, Homo sapiens
acgtacaattcaacataatgaattgaactgaaattgaacacctgcttgcgtaaacctagtcggctcgagttgttctggttctggattggtcagtctagagttccaggggtgtggccaaaagt

SEQ ID NO: 320165 - DNA, 122 bp, Homo sapiens
cgcggcgcttttgatgcaggcggtccacggtaaagttagagaaatgctgccctgctgctgcgctgcagattgaactctggggaagaagaaatgagcacgaccgggagcggtccatctaaacc

SEQ ID NO: 320166 - DNA, 122 bp, Homo sapiens
ccaccgagttccgcttgcgtcaggcgccttcgcccctatagcggggcggccagccgcgcacgggcgagttcatctccaagtcactttttgtaaacgccccgcacagcctggaccggcctgcc

SEQ ID NO: 320167 - DNA, 122 bp, Homo sapiens
tgaccttgtgatccgcctgccgaggcctcccaaagtgctggaattacagtcgtgagccaccgcaccggccacgtgtattacttttataaccgggggaaaaagtaaaaacattcaaaagggaa

SEQ ID NO: 320168 - DNA, 122 bp, Homo sapiens
cccagcgcgggcggaacggaggaggggcccggggcggggcgggccccagtgcgccccccgcggggctccgcgccctctgaccccagtcccagcccccgcccccacccagagggagccccgcg

SEQ ID NO: 320169 - DNA, 122 bp, Homo sapiens
ccatatgcatcaatgtgagcctggagaaatgtggaaaaggtcctaccccagggtccagaccgggcttctccgaaggatgggaatggaggtggcagagaagattaacactttctatactgctt

SEQ ID NO: 320170 - DNA, 122 bp, Homo sapiens
gccaaaaaatggtaggtattttctctacattgagaaaagtgttcgccttgctgaagcatacgggcaagatcttggagttagagtatgagaatcagcaagttttttagtagaatccagagaat

SEQ ID NO: 320171 - DNA, 122 bp, Homo sapiens
acctcaagtgatccacccaccttggtatcccaaaatgctgggatgacaggcatgagccaccgtgcccagctgagaatttgttttataaagcaggaggccccatcctctgggggccgtggacc

SEQ ID NO: 320172 - DNA, 122 bp, Homo sapiens
aattaacccaatgctaataaacattcccccatgcagccatctattttgccttttttgttccgatatccacaagatgcctttacatacgttcctccaattcttgtcagtgcatatttgatatt

SEQ ID NO: 320173 - DNA, 122 bp, Homo sapiens
tttatagcctagaagatgaatgccgccttaaacgaatgagtcaggaagcccctttctgtccggcccctccactccccaccacacgggttgttcctttttcccttggaagagcccactggact

SEQ ID NO: 320174 - DNA, 122 bp, Homo sapiens
agcgatttctgcagttcccgtagctgccagcctgtgcagtcctctgtgatgcttggggaccggctcctcggtcacaccccagtcctgctctgaaggttgccgttttccaaacagaaggatgg

SEQ ID NO: 320175 - DNA, 122 bp, Homo sapiens
gcccggggctccggggaggggccgctccccgcccacaccgccgccccgcctgggacagcgcgggcacctcctgcctgcccgccctccgcggaagaaagcacagctcagcggggacccgtgca

SEQ ID NO: 320176 - DNA, 122 bp, Homo sapiens
acacacgcacctggcgaggccgtcgagctgcagggtggcagcactgccaggcagcgtgggcgcccggccaaactgcagacgaaggggctgcttgggctgcaggcggctaaccaggccgtcgc

SEQ ID NO: 320177 - DNA, 122 bp, Homo sapiens
ctgcagctggcctggatagaaataaatgaagctaaggacagaagttgaagtagctgcttacggaccccacagctctgggacagtctgaaaccaggagaaaaagagaatgtttggggccagag

SEQ ID NO: 320178 - DNA, 122 bp, Homo sapiens
gtttattacccactttctgccttttctgcactgaattacttgccatgtactaatgcacaacgggcttaggtatgtgtatgtcctacaatctatctttcacaaaatttttacatgtattggtt

SEQ ID NO: 320179 - DNA, 122 bp, Homo sapiens
cgcgcgccctccactccccgccccgccccgcgtccctccccctccgcgccccgccccccgcgccctccgcgccccgcccccgtcgccgccccgcccccaacctgaggcgctcgcgcggggcg

SEQ ID NO: 320180 - DNA, 122 bp, Homo sapiens
cacgacccggaccggagagaggtcccaggagctgaggggttcgggctgggccgcgacgcccgctctctgggatcagcctgggggcgagggtcggcgggggcggctgagtcatcgctttccag

SEQ ID NO: 320181 - DNA, 122 bp, Homo sapiens
agctctcgctgacgtaactcaggcagtagcccagctagtaccgtaatctcctgctgctaccgtattactctacggcaacaggcacaagtgcgtatacagctgtaatgttttcctctggccta

SEQ ID NO: 320182 - DNA, 122 bp, Homo sapiens
cgcctcccttggaagagaaatactgaccaacaacaagttgtgaatgaaatgtctgcagatcggcccccctcgcccagcctgagaactttccagacggaaaggcgcacacgtgcacacagcac

SEQ ID NO: 320183 - DNA, 122 bp, Homo sapiens
ctgccaatctatttaagatccctgaaatctaaaaactgtcctctgttctgacgttgttagcgaggggaatgggagccttagcttcgttttcctgaggaaactgagtgccggctttctggaca

SEQ ID NO: 320184 - DNA, 122 bp, Homo sapiens
aaaacccaaggcccccactgagcaaggctcccaaacttccagtgagaagagaagaggcatcgccctggccccaggctcccagacctgcctatttcacctgtaagtggagcccccgaagactc

SEQ ID NO: 320185 - DNA, 122 bp, Homo sapiens
gactaacagtcaatagaggcaaagtgtgggcctctatgcaacagttacctggccaagggccgcgtgctaattaccaattcattcgcgtgacaagttcatgaagcagctcccattgctatctc

SEQ ID NO: 320186 - DNA, 122 bp, Homo sapiens
taggctgtgggccattccctcttcttcagaattctcattatttttagtcatcgggtcaagcggacacagggatgtgtttccagactttccgaacaatggagattaaaaaggcacagcaatca

SEQ ID NO: 320187 - DNA, 122 bp, Homo sapiens
tggcatcgtccctcgagccccccggagccctagcgcacagcccacctatcctttccccgccgtcaggtcccctcttgcattcgccgggacgacctcttcaggacagtcctccgagatgcccc

SEQ ID NO: 320188 - DNA, 122 bp, Homo sapiens
agtgccgtggaaaatgatgcccaaagtgccgagcgtgtctgtctgaagagcgggggctgtcgggtctgctgtgcccgcgttctggctggcacattcctgcccggaagcggggcggggtactt

SEQ ID NO: 320189 - DNA, 122 bp, Homo sapiens
atcagagggtgggaccctctggaccactcccttaagagtgacctgctggctatgggacatcggggccaggcctaccttcccgcaaagtcacagggatgtttcccacaactgagagggtttgg

SEQ ID NO: 320190 - DNA, 122 bp, Homo sapiens
caatgcgcacttgcttcaggtttcctcttaacatcatcttactgagttcgcctcggacaccggatacaggcctagatttatagacagtgtgtctatatatatgtatacgtctctacataaac

SEQ ID NO: 320191 - DNA, 122 bp, Homo sapiens
gagcgccctcctgggaagagcccctcctctgcaaggacctgccgcagcttaaccagcctgcgctgctgtcgccagcgccagttttaaatagccaaaccctactcacttcatccagcaacgca

SEQ ID NO: 320192 - DNA, 122 bp, Homo sapiens
agctctccgcagccatcagaataagaacggcttggtacttcttaggcgcgataaggagtccgagagggcagaggcgctaagatacggaggtgacaagatggctgcgctgcctcaggctttcg

SEQ ID NO: 320193 - DNA, 122 bp, Homo sapiens
gttttatggttcaaggtttgtagactcaataagattcagcattatttccaagaacttttacgaaatttcatcattactcttacataaaacactgagttattacttttaatcatcaatcacac

SEQ ID NO: 320194 - DNA, 122 bp, Homo sapiens
ttgagaatcaatcttctaaattatgttgctttagctgccttgactgattcattatagactcggatatcactgtcctaggatagtggtatcaagcagcatctggggcattctttgttttcaat

SEQ ID NO: 320195 - DNA, 122 bp, Homo sapiens
tgggagtgaattccagcaagacagtgaccaaaaactgaatgctggatttagctaggtgcccggagatatcagcgcacaccaaggagctaataatgtctttccacagaactctgtttagaaca

SEQ ID NO: 320196 - DNA, 122 bp, Homo sapiens
cagaactaatgaccagccagaccgttgggacctgaatggttcttctccagagggggtcctcgaagggccgtctgtgctgaccaggtggccgtgctttgtcgtgggaggcctagggtctgcgg

SEQ ID NO: 320197 - DNA, 122 bp, Homo sapiens
aacgccaggggccggaaatgcggccagcgcgatgcccctctgttctgggcaccgtttattcgaataccccgtcaggtatcatcaggtgtcactcaggaaggagacacgccctgcctggactg

SEQ ID NO: 320198 - DNA, 122 bp, Homo sapiens
gaacgacaacgcgccgcgtttcagccagccggtctacgacgtgtatgtgactgaaaacaacgtgcctggcgcctacatctacgcggtgagcgccaccgaccgggatgagggcgccaacgccc

SEQ ID NO: 320199 - DNA, 122 bp, Homo sapiens
tcttctggatggtaacaaagagaagatgtcaccgataatgcagggccatggaaatccggccgttctttatctgtgctctgctgtttgttgggcggggtggggaaaagtatgagaattctagt

SEQ ID NO: 320200 - DNA, 122 bp, Homo sapiens
tcgcagaaggggcgggggccgcttccgagggccgggggaggtcgggactcaggtgcggagcggggtcggcccggagtaggttccccacccgcgccccgcgcgcccaggacgcgactcccgct

SEQ ID NO: 320201 - DNA, 122 bp, Homo sapiens
ccgcatttctgacagccggagacggacactgcggcgcgtcccgcccgcctgtccccgcggcgattccaacccgccctgatccttttaagaagttggcatttggctttttaaaaagcaataat

SEQ ID NO: 320202 - DNA, 122 bp, Homo sapiens
aagaactttcaaaaacaaacaaagatatcaagccacagattcaaagtgctataaactccacgcatgattagttctcactcataggtgggaattgaacaatgagaacacatggacacaggaag

SEQ ID NO: 320203 - DNA, 122 bp, Homo sapiens
gaggcgccgctgcagctcgttcatctgggtgtagtcccggaccgtggagcctcagagggacgccacattctctataagtagtaccttgcaccgcagggagcccaggctcacaggctccccgc

SEQ ID NO: 320204 - DNA, 122 bp, Homo sapiens
cgcggcggggctgggtggggacggccggggaggcgtgcgcggccgcgggtgggacgccggcgccgctcccgctccagggcatgattctggagctacacccgagcaactctgaagtcgcggct

SEQ ID NO: 320205 - DNA, 122 bp, Homo sapiens
gggcggtgtctgccagcaagcccctccaatgagccccaagcttggtttccctccactccacgctgtcccagtgcagagcgtctgacctcagaggcagacacactgtcccagaggtggtctat

SEQ ID NO: 320206 - DNA, 122 bp, Homo sapiens
aaaatgactgcgggggcagtgagctgcgaatgttcatgtgggagttagagccgcctggatcgtgaggtcccaggcaagaaggtggaggtaactcagcgagaaagccacacagcctcatctat

SEQ ID NO: 320207 - DNA, 122 bp, Homo sapiens
cacatgtgtgctggagggtgtgcacgtatgcgtgcatgtgtgtgtgcagatgagtgtgcccgtgtacaaatatgtgtgcatgcctgtgtgtgtgcatgttcttctgcacaggtgacctgccc

SEQ ID NO: 320208 - DNA, 122 bp, Homo sapiens
agtgttttaccaattttgttttaaaaaaatgaacttgctgcagttttttggcctgcctttcgtatttggtgatgacatatcccagagtgttgacctcattcccataattattctcctgtgtg

SEQ ID NO: 320209 - DNA, 122 bp, Homo sapiens
agctcgagaggctcgtgccaggtcggggggcgaaggcgaggccagcccaccaagcaggggcgtcaccaagggaaagccaatcaccattatttctgaagcccaagggggcgggacgagaagtc

SEQ ID NO: 320210 - DNA, 122 bp, Homo sapiens
ctctccattctgaaggcctatcccctgccaccttcaccaaatgtccaagttctcattcctcgtggcccagcatgaactcccagggcctccgtgaatcttccataaacatctttttccttctc

SEQ ID NO: 320211 - DNA, 122 bp, Homo sapiens
ccccagagttgctacagtatattatctaaaatgtccagtttccaacaagaaattgtgagacgtacaaagaaacaggaaaatatgacacatacactggaaaaaagctggcagcagcaactgcc

SEQ ID NO: 320212 - DNA, 122 bp, Homo sapiens
ttcctcacccagagcacgctggggccaaattgacttaaagcttaaggctacccagtgagtcgatgctggcaccaggactgcagccctcagtgctcaatgcagggggagtgtggtggagggcg

SEQ ID NO: 320213 - DNA, 122 bp, Homo sapiens
actgcccgccctgggcccgctgtcgcaggtgcaccagaacaaccatctcagctgcgaggtcgccatcaacatcaaggtcaccctggagctccacgcctcctatgtgtacctgtccatggcct

SEQ ID NO: 320214 - DNA, 122 bp, Homo sapiens
caggcccagccgccccgtccactgccaccaccaacgccgccgccatcttacactggccagcggccgccaccaccaccgcctccgctctctgcgcttgcgcctgcgctgccacgctttccggc

SEQ ID NO: 320215 - DNA, 122 bp, Homo sapiens
ctacctctaggggaagttggagttcagaggcaggagttctgaatcccacagttacagcctcgttgtttcttctccagggcctccttcagtctctctttgttcacaaattttcacagcctata

SEQ ID NO: 320216 - DNA, 122 bp, Homo sapiens
taccaccattggtttttctttagatgtcaaagcacttacacataatctcttttcagcttccgagactggaaactttacagatgaaataatagctcaggtcttttctctcaaattcactgtcc

SEQ ID NO: 320217 - DNA, 122 bp, Homo sapiens
tcattccctagagattgtgaagctaagtgctgtgagggaaaccagaggcagctgagatgtcgtggaagtaacagcgaatgaagccaggatgctggattctgaccttggaactgttctgagta

SEQ ID NO: 320218 - DNA, 122 bp, Homo sapiens
tcaaaactaattcacctcctcttcttctctttcctgtctctctcttcctagactggcctgcgcagttctagatccccagtgaatccttgggttgacatacaagggacgaagaacctatagga

SEQ ID NO: 320219 - DNA, 122 bp, Homo sapiens
atgggcaccagagaggcacgtaccccaggacaatgatagggcaggcggggcaccgggaatcgcgctcagggaaaactcaacaagtctagaaggcaaagagatggatgaatgactgccaagag

SEQ ID NO: 320220 - DNA, 122 bp, Homo sapiens
ccttctccagggtccaggtttttggggtccgttctggaccgaacgactcaggggaggcaccgtgaactcattcccaagccttcccactcaagatcctgcaaacggagtcgtctgagtgccac

SEQ ID NO: 320221 - DNA, 122 bp, Homo sapiens
cctagagcagaagatgctactcaagccacaggggaacaatctgcatgcacatcagccaggcggaactgagcatggaggtcagtgtattcattcaaaggcatctattgctgtggcagttaatc

SEQ ID NO: 320222 - DNA, 122 bp, Homo sapiens
cacccaggaaactcgacgagctgctgccatcaacatcgcaggaggttccttcacaggcatcgcgcgtccggcttcgtggcgggtctcccgttgtttccttggaggctgcgggtctccctggg

SEQ ID NO: 320223 - DNA, 122 bp, Homo sapiens
tacagggtttctccacgggaactgccaaaaacatctaagctccttcccgcagttgggaatcgctgccctgcaaatgaaaaaggagactaaacaagagcagggaggcggtgcaggcccccgac

SEQ ID NO: 320224 - DNA, 122 bp, Homo sapiens
cacgtggccccggccgcctcacgtgacccggtgcagcgcgcgcccgggacgctacccagccgagcatcccgcaccgccccggccccggccccggccgaaaccctgctcttcgggccctacaa

SEQ ID NO: 320225 - DNA, 122 bp, Homo sapiens
acttaagagccttcggggcctcgggagagaagatgcaaacgccacggccggctgctgagacgcaactaggctgctgctgccgtcgattctgtaacaggagaaagccccatccgcgcccggat

SEQ ID NO: 320226 - DNA, 122 bp, Homo sapiens
acgctcgcagccacgtttccgcacacctgtcccctttccacgcacctgtgtccggcagcccgcacatctgtgggagcgctgcctcctcgccagctgtccgggaagttcagcgccgctctccc

SEQ ID NO: 320227 - DNA, 122 bp, Homo sapiens
tgccgggtctcgcctctatccaccttgtccctcgtccgtgcccccgctcactccggcgcccggctgctgccccacccgcttcggtgcttgtgccctcacctaccctggcgccaggaccgcct

SEQ ID NO: 320228 - DNA, 122 bp, Homo sapiens
cctcccctcgcactccttcccccctcccaccatccaccgcagccacttccgcccgtcctccggaagtgggccccggcaacgcagcgttccacatcccgcccatttttctacccaacgtcccc

SEQ ID NO: 320229 - DNA, 122 bp, Homo sapiens
ctcgctcgctccctctagctctcccctccccccaaatatctacactccaggatctggcgccgagccgcggcttcttgaatccagatataccattccccgctggaacctcttctccgctccgc

SEQ ID NO: 320230 - DNA, 122 bp, Homo sapiens
cattatcctacattatttgagagctgctaaaacaaagtccccacaggctgggggcttcaacgacagaaatgcattctctcgcagacttcctggagaggggaagtctgagatccaggtgtggg

SEQ ID NO: 320231 - DNA, 122 bp, Homo sapiens
tggcaactgcaagccaggaacacaatgtcctgtgcaggggattgcccatgcagcccagctcgtgagatcgcgggatggcggggcagtgagccggtgccgctctgggagcctgagccagggcg

SEQ ID NO: 320232 - DNA, 122 bp, Homo sapiens
actcgcggactggaagctccaggctgcacaaccaccaactggtgtgtgtgtatttaggggcggggggaggtacaaaaccaccaactcgtgtgtgtgtgtgtgtgtgtgtgtgtgtgtgtgtg

SEQ ID NO: 320233 - DNA, 122 bp, Homo sapiens
gtccagttaagtgatctgtgaaaccgttttccagaagtccaacttctgatggcatcttcacgtagcacctccaatcactttctttgacgagaagaataggattgctttttgtttgcacacac

SEQ ID NO: 320234 - DNA, 122 bp, Homo sapiens
aggcttacttgtccagcctattgtttgagacaacagatataagttgcgatgggagaggagcgtcggatttggtgtgtatcccccatttccaattatagatggatcattacagacagcggagt

SEQ ID NO: 320235 - DNA, 122 bp, Homo sapiens
ccctcaccagaggaaccactgtttccatgggatatattagattgatttatatgaaattgccggtgtttgactatgatgatttcatgtggttcagcctaatatcagtgaaaaaacagagtcct

SEQ ID NO: 320236 - DNA, 122 bp, Homo sapiens
gttaaattactgccttaaatatctaatgcatgtcaagaaatccatctaattactaagtaccgaaattataatactttcaaatgaattcacaaagcaaaacagctgaactaatgatctgtaag

SEQ ID NO: 320237 - DNA, 122 bp, Homo sapiens
ggccaggtggagcggggtccggcctgcgtggtccctgaggagggggcaagggcgtcggcgcgggggtggaccactgaccagaaccccgccctgccccaccccgtcctgccgcccacccagcg

SEQ ID NO: 320238 - DNA, 122 bp, Homo sapiens
cactgggacatttctatttgccttcacaggaagggaaaggggaaggcatattggagccagcgctcacagggcagaaccagacgagcctcactggaggcaaactgggaggtaggcgtgcgctg

SEQ ID NO: 320239 - DNA, 122 bp, Homo sapiens
gggctgcccgccccggaagcatcctctcaccgccggaagctgaactgactcgtccgcggccgctctaccccaacaggccgccaccagcgagagtgcggccataaccatcacgtgaccgccca

SEQ ID NO: 320240 - DNA, 122 bp, Homo sapiens
aaattctggaatctgttgagaatttggcaataagtttttaaccactaaatatgtcaacaacgcatcgcctctacttttaccaaaaaataggcgcacgaaactccgctgtttgcgcccgcgga

SEQ ID NO: 320241 - DNA, 122 bp, Homo sapiens
ctcaggatggaattgtcagtgaacatgaatcctgtatccttagcttctggtctctaggttcgacaggtcccacccctgtgcccacagctgcataactgcatgtgtgctgtgcacgtgctctg

SEQ ID NO: 320242 - DNA, 122 bp, Homo sapiens
ggccaccgcgaaagttgctgctgcccactcgggagaagctcgaggagctgatgcgggaaccgggcccactcgtgtaggagcggctgctgaaggcccgggggccagaggtggacaccttgtag

SEQ ID NO: 320243 - DNA, 122 bp, Homo sapiens
tgttggagggtggggtcgggggaggaagagcattagaaaaagtagctaatgcatggggggcgtaatacctaggtgatgggttgatggtacagcaaaccaccatggcacatgtttatgtaaca

SEQ ID NO: 320244 - DNA, 122 bp, Homo sapiens
ctgtgctagacatcaaaaccaaataagccttggcttagtttctctatgatcaaggcagatcgagcagtaaggaagccacacacacctgctgcccagccatgagagatgtaaagtctcctgtt

SEQ ID NO: 320245 - DNA, 122 bp, Homo sapiens
ctcaagagagacggctcctgtaatggcgcctgcgtcagacactaacatggcggacatagtcgtgcgcggcgcaaacgtcagcacctctaccccagccgctcagaaacagcagaggagagcag

SEQ ID NO: 320246 - DNA, 122 bp, Homo sapiens
atggatggagaggagtgagtcaagtgacgggagcacaggagcatcctgagggggtgcacccgcactgagaggatggtttggcgtgtgcacacgcctctgagagtctgggatttctagaaggt

SEQ ID NO: 320247 - DNA, 122 bp, Homo sapiens
aagagcccccttcaagatcctgaggagtgtaggacggattctatgaccctcccaggcgcacgagttgcctgggaactctgggcttcccagcctggtggtccccaccccgcacactgagactg

SEQ ID NO: 320248 - DNA, 122 bp, Homo sapiens
gcgctaaagcgcagttgcccggcttctgccactgccaggaaagcgctccgggcggagacgcgctaggcgcgcctacctctggcttccgaccgttgccaaaaacttgtatgctgaaagccggc

SEQ ID NO: 320249 - DNA, 122 bp, Homo sapiens
tgcagcctctgccacaaccgcgcgtcctcagagccagccgggaggagctagaaccttccccgcgtttctttcagcagccctgagtcagaggcgggctggcctggcatagccgcccagcctct

SEQ ID NO: 320250 - DNA, 122 bp, Homo sapiens
tgttgagttttttcagcgcctcagtgtccatgtgggggatatccatggccttggcctcgtcgcagtgctactggtccgccagaacacacacagagaacttggggcggggagtggacttaagc

SEQ ID NO: 320251 - DNA, 122 bp, Homo sapiens
aagcagccttctgtgggttgtggtttcagtgtcagctcccagttcccctttcaaagccttcgctgtgctgtttgaacctgccccacgtgtgtgccccgcaccccaccccggtctcccctgag

SEQ ID NO: 320252 - DNA, 122 bp, Homo sapiens
ttcaggcgggtagcggggactcggtactgccccctcccaagctgggagcagggcgcgtgacgtctcagacatttgttgttgggatttgggcctcattaattattcattaggtacttgaaagc

SEQ ID NO: 320253 - DNA, 122 bp, Homo sapiens
ccttcaatgcgtggagaaatgcaccgagctgaaaccagcgcgcagcctggcctggaacaacgtggttacactgctcacgacccaggtagtgcagcccaagccgaggcagttggaagagacgc

SEQ ID NO: 320254 - DNA, 122 bp, Homo sapiens
cgtgggctggccgcgtagcttccaggtgtttcttcttccagtggggttggcagaacacggcgtgaagctctgctgtgaagatgccgaaaacagcgcccctctctgctgaagggctcgttatc

SEQ ID NO: 320255 - DNA, 122 bp, Homo sapiens
gcattacattctgtatatattactttttaaactcattcatgttttaacagcatcctgtaacgtggcaaccatctaaagagggggaccgattaattggacgtgttattcttaacaagagaaca

SEQ ID NO: 320256 - DNA, 122 bp, Homo sapiens
ccaagagccccaggagatgtggcacaacgtccatgttgcgattcgcagagggagggtggccgggtcgggtaacccccaaggatactgctcttgccctcaaccccagtgcccaaccaacgggg

SEQ ID NO: 320257 - DNA, 122 bp, Homo sapiens
aggaggctaaacatggcaacttcgtgggccgcatcgcgcaggacctggggctggagctggcggagctggtgccgcgcctgttccgggcggtgtgcaaattccgtggggatcttctggaggta

SEQ ID NO: 320258 - DNA, 122 bp, Homo sapiens
ttcaacagttaggacaatgtgaactgtagctcagctctgctaggtaccttcacaagacctcgaatgctgccccttactatgcctcggttttcttatctataaaaacggcatttttatcttgt

SEQ ID NO: 320259 - DNA, 122 bp, Homo sapiens
ctggtgaaccgggggttcccagtcccagtttccttagagtcagctttgtcagggctctggcgactgtggaaggatttgtggctagaggctgagcccagggcctggtggactgaccgaaccag

SEQ ID NO: 320260 - DNA, 122 bp, Homo sapiens
ggatcccctgtgtcaaacaccaggctgagaactggggacaggtgtgccctgagaagacaacgcgggccatgcttcattgcaagatgactctgcttaacataggcatggatcatagtcctcac

SEQ ID NO: 320261 - DNA, 122 bp, Homo sapiens
gtcgttgtccagctggccaagggctcctgggattagaggcgggaagtgggatctcaaggccgcactggcttgtgatgtcactttgcaagaactgcttttttttccacagtccatcccatctt

SEQ ID NO: 320262 - DNA, 122 bp, Homo sapiens
tggtactagcacgtcacctagaaggaagaatcctggaatggcacgggtccaaactagaggcggcctctcagcatggacccgcttcaacctcatctgcatggcaggcgttttgcaaggcgtca

SEQ ID NO: 320263 - DNA, 122 bp, Homo sapiens
gcggagttggggagggccgggccagaagggaggggtcggagtggtggggaaaagagatcacgatgcttccggggtagggtaaggcctttccagggtgggttggaatctttgaagactgtggc

SEQ ID NO: 320264 - DNA, 122 bp, Homo sapiens
ttgccatataaaatgtaaaacaccctcacttgcggacgacgacctgcctcgtcgcgcacacgccctgcagccgccccgcagaaatgcttcttccgttacccacagtctttccccagatgaga

SEQ ID NO: 320265 - DNA, 122 bp, Homo sapiens
cggagccatcagtgtgggcgcctgtcgcagggcgggcacagccttgttggcgctccacgccgtatgggacagtgtagactcggtgttttagatttgggtctgaatacctaagtttcacgaca

SEQ ID NO: 320266 - DNA, 122 bp, Homo sapiens
gcctccgctgcccacgaccaccccggcggctgccccggagcctcctcccccgtagcgggccggcatctcgtctccgaagcgggccattctgcaaagagcaaagggctccgggttacgctgcg

SEQ ID NO: 320267 - DNA, 122 bp, Homo sapiens
ttaccgccttggaactgtcttggaacctgaggaaactacataacccagaaatctctgcgtcgaatgacagcgcgtcagagccaatgagggctcaaaataaaggcgtttccgcggaaacagta

SEQ ID NO: 320268 - DNA, 122 bp, Homo sapiens
tggaatggcagaaacattggtagctgagcagatagaagtatttcagtattccacatgcctcggaaagggaaaagtctgaatgcaagtacatggcagacatctgtacaattttgagagggagt

SEQ ID NO: 320269 - DNA, 122 bp, Homo sapiens
catccagctccatcctcccactgctgcttgaacaatatgcttaacacgtagtgccgcagtcgctgcttgggtaagtcctttgacagggcactccctccttcccttttccctccccgcagaat

SEQ ID NO: 320270 - DNA, 122 bp, Homo sapiens
tgctcgagcccgcgggagcgccacatcgccagccgcacccctccacccccaacctgcccacgtgacccggcctagtttctccaggcccgtccctacgtctcactcgggaagccccgccccac

SEQ ID NO: 320271 - DNA, 122 bp, Homo sapiens
atacctgctgctaaaggcggccttggcctgtcctgcagcaggtgtgatgattaagatccacgtgcaggccttctctccctttacaaggggaaaacaagtacatggcagaaggggcagggggc

SEQ ID NO: 320272 - DNA, 122 bp, Homo sapiens
tcgcgggtgaggacttgaaaaagtgcggggcaggatgaggggtcagtacagggtttcgaacggaaaaatttaaggaaagaacatgtctacatgacctgaaggcagaaacaccggcgacggaa

SEQ ID NO: 320273 - DNA, 122 bp, Homo sapiens
ggtggaacaggaattggttgcaggtcagtctctgccgcacggtttgcacagggcctggcacggtaggagtgcagtagatgtttgctgctgctgcagctgctgttacatctcattggctaggg

SEQ ID NO: 320274 - DNA, 122 bp, Homo sapiens
cctttccctgccccactttctggcctccagcattctgcagggactctcacaagagacattcgctatggcctaacccatggtgagtcttcctcatagctcccagaggaacttccatcttctca

SEQ ID NO: 320275 - DNA, 122 bp, Homo sapiens
tgatggtgctctgtaggagcgcagacgctgaaaggcgcgctgctgtggctgggagaagagcggagccaggagtttgttcccaatatcttagtgctatggcaaaagaagggggaggagtaatt

SEQ ID NO: 320276 - DNA, 122 bp, Homo sapiens
gaggaaactgagtcttaaggaaattaagacttcttaatttcctccgctcttaatttcctccgcctgttggtcatacatctaataagtggctgaggtgggattcacactcatgcattgcttct

SEQ ID NO: 320277 - DNA, 122 bp, Homo sapiens
ccccatctcacagcgaccagtgcatgtacatttctcacttctttcatagtcttgtccccacgctcaagaattactttatgttcatcttgattgttctgttgtcttcctgtgagtttttcatt

SEQ ID NO: 320278 - DNA, 122 bp, Homo sapiens
aatggtggcatccaaaaaagatatatccaactcctaatgcctggtacctatgaatatgaccgtatttggaaatagggtctttacagttattaaagtgagatggccctggacctaaatccaac

SEQ ID NO: 320279 - DNA, 122 bp, Homo sapiens
agatatgcaggggctacattccccaagtgtagattattagtcctgggcccaggctgggcacggtggctgacacctgtaatcccagaattttgggaggcctaggcaggtggattgcttgaggc

SEQ ID NO: 320280 - DNA, 122 bp, Homo sapiens
gccattctgcaaagagcaaagggctccgggttacgctgcggcgaacgatgcggaagacgccgccgccgccgccgccgccgctgatgctgaggctgccggggctgggagcgcggcggctggag

SEQ ID NO: 320281 - DNA, 122 bp, Homo sapiens
tggagaagcacggcttgagcccgctagaggtggtgctgcaccgggtgagcttccgggccgcggggcggggcggggcggggccgggccggggccggggccggggccggggccggggccggggc

SEQ ID NO: 320282 - DNA, 122 bp, Homo sapiens
gctatctgcatggagagagaggaaaccccaaacacaccctggagtcttgcttcttcactacgaagccagtattgttttgacttgctgattgaattgcaggtggaaactaaatacatcgtacc

SEQ ID NO: 320283 - DNA, 122 bp, Homo sapiens
cactcgctctctccctctgtgtatagaggatgtgctgaatggtgcgctttgaggcggcggcggcggaggagcagaatccgccgcgactggcagcctcggctgaccggctcggcttctcttcg

SEQ ID NO: 320284 - DNA, 122 bp, Homo sapiens
tctgtgactggctcccgacaggaatgttgcgtttctgcctctttggggtgaaatctctttcgtcttgcatggctttcatttcttatcataatatttatttattaaggcctcgggtttccaat

SEQ ID NO: 320285 - DNA, 122 bp, Homo sapiens
gaccaatcagcggccgcagagtgtgggaactgtcgccatggcagccaggaggcgggcgcgcgcggcgggaggaggggcagagcggagcggtgggccgggggctggaggacaggtttgtgcgc

SEQ ID NO: 320286 - DNA, 122 bp, Homo sapiens
aaatcttactcgcggcgccttcatttccgggtccgccattttgttgcctctgtttctccacgagggggggttaaaggcccccaaaacatgcacacatgaaaagggcaaaaagtaaccgtcct

SEQ ID NO: 320287 - DNA, 122 bp, Homo sapiens
gtcgatccccgcagcatattgtctggaaatctgttttctttctcagagcccagtggccgccgggcttctcttcccttctgagatgatgtcaccccaaagaagactggggtaggagtagggag

SEQ ID NO: 320288 - DNA, 122 bp, Homo sapiens
cgccaccgtccaggaacagaaagccgaggggttactaaggcaaccaggagcccgacggcccgagtgcgcctgcgcggccgccacccggtggctgacgaagcagggccttgcgtgcgcacgca

SEQ ID NO: 320289 - DNA, 122 bp, Homo sapiens
cggtgagtgtgagtcagtaaggccgtcgccatgggcacagtgacgcgtgtggtgagtgtgcgtgagtctggaacgccgtcgccatgggcagtgacgctgcggtgtgtgtgagtcaggctagc

SEQ ID NO: 320290 - DNA, 122 bp, Homo sapiens
aaacttcataaccctgacttcctcaggcaagaaacccagggaccagcgtggtgtgtgcagcgggtgccactcagcaatggtgaaaacagcagacatcaggcgctgcgactcctaaaacacac

SEQ ID NO: 320291 - DNA, 122 bp, Homo sapiens
gaagcggtgagaacgcaggctataaagcttcaggctttggaccagcgggcgtatgtttctcgcagaatatcaccacaagtgaaaaaagggccccacagtggcatgggtgggccgcagggtgg

SEQ ID NO: 320292 - DNA, 122 bp, Homo sapiens
ccacatacacgtgtgcaccacattttctttctccattcgtctgttgatggacacttaggtcgcttgcagatcttggctattttgaatagtgctgcaataaacatggaaaagtagatagctct

SEQ ID NO: 320293 - DNA, 122 bp, Homo sapiens
caagaaagaatcaatcagttattaaaaccaaaaaccaaaaatcagctggccaaaaatcagcggatcaatctagagaaacgagggaaatttagtaaactggggtatagcatggattagaaacc

SEQ ID NO: 320294 - DNA, 122 bp, Homo sapiens
agagccggcccctccgtgagtcttctgtcagtcattggctccctgcggtttccttggggacgtggcgccgccgccggccgggccctccttccggctgggcaaggggccgcggggagcagctc

SEQ ID NO: 320295 - DNA, 122 bp, Homo sapiens
cgacagtttagtcaaaggcttggcggtgagaactccgcgtctggcaggaaatcgggcagccgggagatttcagtgcctcacagtcaagaacgcaaagtcacagtgtccggaggcctgctaag

SEQ ID NO: 320296 - DNA, 122 bp, Homo sapiens
gcacccggccggggcccttcttctacattggaggcagcaacggggccacaatgtgagtagcggccctgggcgcccgtggtcccactgaatacccaccgcctgctcccggggcccagcccggc

SEQ ID NO: 320297 - DNA, 122 bp, Homo sapiens
acttctaccaagtattccttctagtcttcttttctaccagttccttccattttcctccctcggttcaggcagcagctagttcaatgtctattttaggcttgcaagaaagaaaagaaaaactg

SEQ ID NO: 320298 - DNA, 122 bp, Homo sapiens
cacgcctgtgtgtgagtctgtgtacttgcgtaaccatgctcttactgcattctccacaagcgctttgccacgtgcacccataccattgcgttagtcaccttctttttaataagttgactgcg

SEQ ID NO: 320299 - DNA, 122 bp, Homo sapiens
aagatgttatccttgacacctccttccacccactggatctgagccggtccatcaccagcccggtggctctgcctgtctcccatcagccaccgcccggtccctgcctccatcacctttcacca

SEQ ID NO: 320300 - DNA, 122 bp, Homo sapiens
cccgccgcggccttccgccctgtcagcccgctcggccttctgtcttcagtcagcctgccccgaacctccttcgggccttcaggctgcgccccctcggctttgtcatcctgccgcctttcaaa

SEQ ID NO: 320301 - DNA, 122 bp, Homo sapiens
tagagatggggcttggccatgttggccaggctggtctctaactcctgacctcaggtgatccgcctgcctggcctcccaaattacaggtgtgagctgctactcctggcccgtgtcttttgatt

SEQ ID NO: 320302 - DNA, 122 bp, Homo sapiens
actgattatgctcctggaatgacaaacattttctctctttttttcaagacaaacagtgaccgagaccttgaagtgttaatatacaactcagcactttctttaaataggagaataaagatgga

SEQ ID NO: 320303 - DNA, 122 bp, Homo sapiens
gtggcgggaccctaagaggctttttcctggccccttagttgtgggttttcctgcgggcggcgcagccggtttccatcagaaccgcccagaggcggacgctgccttcctggggtgacggagca

SEQ ID NO: 320304 - DNA, 122 bp, Homo sapiens
acacacacacaaggaagccttcgggcaggcctagagtttactgctggtgactcaacatggcgggggtctttgcagggcaggggcccaggctccagtgtccaggcagggcattctctccatag

SEQ ID NO: 320305 - DNA, 122 bp, Homo sapiens
cctcctcccggtaggaaactccgggaccctgcaagggatgactcaccccagtgattcaaccgcgccaccgagcgcggagctgccctggaggacgcaggcgggtctagttgcccgggtccccc

SEQ ID NO: 320306 - DNA, 122 bp, Homo sapiens
ccactgggccctgctgctgtttcccatgtgcaccgctgtggctgtcaccgggacctgccacggtcgtgcctgtgacaagtcgttaggatctgccatggagatccaccaccgtatccctaagt

SEQ ID NO: 320307 - DNA, 122 bp, Homo sapiens
aactaacccactcccatgctagtgacattaaaccattaataagggctctgccctcatgatcgaattacctgttattaggccccatctcctaacactgttgcattggaaattaaatgtctaat

SEQ ID NO: 320308 - DNA, 122 bp, Homo sapiens
ctcctttcacccgtgagacttggagcggcccctggggtcttgggtgtgcagcacggatcacgcgagacccctgaggtaaccgcacggtgtgggggcttcgaggcggacgacttgggagggag

SEQ ID NO: 320309 - DNA, 122 bp, Homo sapiens
ggctggcggtgggctgtgctccaggccttgcccggttgaccgtgtcttcggggtgagtgacgctccgcagacgccgcatggaatgcggggccggctccactccttccgtaatgtggtttttt

SEQ ID NO: 320310 - DNA, 122 bp, Homo sapiens
tgtgaactggggaagttacataatcctggcagcttcaggattctgatctgtgccatgcagcgattacctcctacttcagagcattaaaggaaagagacccacacagcctggtgcctcgagag

SEQ ID NO: 320311 - DNA, 122 bp, Homo sapiens
tgtgtgcatagaaaaaagccagcaacagacccaaaaaacaaccttgctgcagtaataattcggtgtggtttggaaatagttggtgaaatcgatttttgatgccatctgaattagcttaaaaa

SEQ ID NO: 320312 - DNA, 122 bp, Homo sapiens
atctcagctttggcccggatttcctccttcccagcaaggctccaaagactggcaacgaggcgagaacaagaagaggaggctcattcctggctgcatccctgctgggcagggtgacccggcct

SEQ ID NO: 320313 - DNA, 122 bp, Homo sapiens
cctaaagtgatctgcccccctcagcctcccaaagtgctgggattacaggcgtggccaccgcgcccggccagagtgcaattttactatgtgtctggaagagaggggaaccagaatacttatga

SEQ ID NO: 320314 - DNA, 122 bp, Homo sapiens
agatgcccccacccagcgtcgtacacaagcacatccttcctcctccacacccacctctctcgagaccctgccgtctaccccctgacgcttcaggactctatggaggaagactttgatctcat

SEQ ID NO: 320315 - DNA, 122 bp, Homo sapiens
gacccggcccggacccccgtccccgccgccccagccccgccgccggcgcggacccggccccggccccctgcggtccctgagcctcggctcgggcgccccacccccaccccgctcccactccc

SEQ ID NO: 320316 - DNA, 122 bp, Homo sapiens
tggccctccctttctatttcttcaagacctttttctgatccctcctgcgcaggacctaaacgggcggtgcccttacccactggtccctccctgcctgctgtcttcggagccctagctcaccc

SEQ ID NO: 320317 - DNA, 122 bp, Homo sapiens
ggtgaagagtctggaaagggagaacatctggaagacacagggtctcatgttctggtgcagcgccagctgttgtgaggacagccaggcattcacccagcaggtgcaccagtgcatcgagtgct

SEQ ID NO: 320318 - DNA, 122 bp, Homo sapiens
gatgaccctcgtggcaggccaccccgcgccctacggggacctgctgatgcagagcgggggcgctgccagcgcaccccatctccacgactacctcaaccccgtggacggtgagtgctggcccc

SEQ ID NO: 320319 - DNA, 122 bp, Homo sapiens
gaccgaattatgaacatgggagagatgtaaaaaggcacagaaagacagtgagagagaatccgccagagacagagggctttgctttcgcccgcagcgattctgatgttatctatttccagctg

SEQ ID NO: 320320 - DNA, 122 bp, Homo sapiens
cctcacagcacggtatgtctgtgatggactctcctcaaaccaagacactgggaatcatgtcgcaaataattttggcatgatctcatcaatctgatgcaagactttcctatattaaaaccaga

SEQ ID NO: 320321 - DNA, 122 bp, Homo sapiens
ccccttgcctccccacagcccttcttctctctccctttctttctgggctgtggaaagaatcgattaagctcctgtccacatttgcagcagacctttttctctttcctgagacttgttcagct

SEQ ID NO: 320322 - DNA, 122 bp, Homo sapiens
gccccgtccacggtggactctgctttccctccccgtgcgttagggctagctctgtgcgctcgtctcctgtttctctgcaatgtgccagcaccactgccccatccacggtggactccgctttc

SEQ ID NO: 320323 - DNA, 122 bp, Homo sapiens
gggtggagcaggaggggctggagtattgggaccaggagacacggaacgccaagggccacgcgcagatttaccgagtgaacctgcggaccctgctccgctattacaaccagagcgaggccggt

SEQ ID NO: 320324 - DNA, 122 bp, Homo sapiens
tctaaccaattccagcttggctcggagaccgagggtcctgctgcaggctgagactggcgccggtcaccgggtctcccagggtcttgggatcagaggcaggaggggaggacccctagtcctct

SEQ ID NO: 320325 - DNA, 122 bp, Homo sapiens
aaccctgcttctgctgctctcgggggccctggtcctgacccagacctgggcaggtgagtgcggggtcgggagggaaacggcgtctgtggggagtagctaggggcctgcccggcgggggcgca

SEQ ID NO: 320326 - DNA, 122 bp, Homo sapiens
cttggtgcacagttaccccggcctgtgcccggcccctgagaacttggtgcacagttaccccggcctgtgcccgtcccctgagaacttgatgcacagttaccccggcctgtgcccgtcccctg

SEQ ID NO: 320327 - DNA, 122 bp, Homo sapiens
aaaatcttcaccacaatctgggtaatgaaaatacctgtcactccaaaagtttcctagtgtcgctttgtaatcctcccttctgctccactccccatccgcagataatcactggttttgactaa

SEQ ID NO: 320328 - DNA, 122 bp, Homo sapiens
tatgagctgtcacactcaccgtgaaaatctgcagcttcatttctgagcccagccagaccacgagcccaccgggaggaacgaacaattccacaagcgctgcgttaagagctgtaacactcaac

SEQ ID NO: 320329 - DNA, 122 bp, Homo sapiens
aagagggctcccccggcgatggcaacacggcccttggcaatggggttgctgtctcccacccgcgtacacttcatgccaactacgctgaggaccatggccacgaagcccaggagcacggccac

SEQ ID NO: 320330 - DNA, 122 bp, Homo sapiens
aacccgcctcggctggggccgcgggcggcccggagctataaaaggcctgggtggggcgggcgcggcggcaggacagccgagttcaggtgagcggttgctcgtcgtcggggcggccggcagcg

SEQ ID NO: 320331 - DNA, 122 bp, Homo sapiens
atcctgaggttatggcaaaggtaaaagtgctgtttgtacgcaaccttgccaatactgtaacggaagagattttagaaaaggcatttagtcagtttgggaaactggaatgagtgaagaagtta

SEQ ID NO: 320332 - DNA, 122 bp, Homo sapiens
tctcggttcctctttcctcgctcaagatggcgctgctcgcgaagcgttcttggcgttgggcggccgcagcggctgctttcgaaaagcgccagcacaatgagataccatctcacaccagctag

SEQ ID NO: 320333 - DNA, 122 bp, Homo sapiens
ggaaggaggcttgtgcctccagtgtcctcctgcagtctgggtttctgggcacgtggcctgcgcgtggcgccattgtggagtgtcccgcgcccatgtccttcgtgccttccaagcgcccagag

SEQ ID NO: 320334 - DNA, 122 bp, Homo sapiens
cagatcaggtgagcggaacgagggtggccctctgaatgtggggtcccttccctggagttacggacatatcgccgccccttgggggttccgggacgcctcacctcagggtgctgaatgaaacg

SEQ ID NO: 320335 - DNA, 122 bp, Homo sapiens
atttcccataaagcccccgagtcaccaatcaactggctgtcttcataccgctttcaaagtcggcgggcgccttgcccaatagcaaagaacatatcgcccccatttcgaagattgatggaaag

SEQ ID NO: 320336 - DNA, 122 bp, Homo sapiens
aaacccccagccccagttacccagcccccaacccgccgccaggctccttcctccgccagccgcactccagctggcgccatcgcgcaccctctcaggttcatcgtccccgccccctttctact

SEQ ID NO: 320337 - DNA, 122 bp, Homo sapiens
gaggttccttggccgggggttgggcaggggcctggggggcttccctggggggcttgtcgccggggccgcctgggctttcaggtcttccgaggtgaggacggtgctctgtggggagcttgcaa

SEQ ID NO: 320338 - DNA, 122 bp, Homo sapiens
ggataataagtgttgccttgtgggtaaccactcttacccggtggataccaagtattgcctcgtgggtaaccactgttacccaatggataagtactgcctcgtgggtaaccactgttaccctg

SEQ ID NO: 320339 - DNA, 122 bp, Homo sapiens
agcaggaaagttaaggagagctcagtttgtggggggcctgaatgccatccctaagtctgtcgattgaggccatcctgctcattctttggtccctgtcctgattggtaacaccgagggtgtag

SEQ ID NO: 320340 - DNA, 122 bp, Homo sapiens
agctgccgctccttaccggacccacgagtgaggagccccgaggtcatcaccgagcatgaacgcgggaacgtctgggaaggaaatctgaggccctgctctgacggtcataacaaaggccttcg

SEQ ID NO: 320341 - DNA, 122 bp, Homo sapiens
gtgctctcgcgatacgtaggcggagcttccggccggtgctgggcaaccaagctcatgcgccgtagctcttcagctcgggaaggctatatttagcaggtttccggaagttgccggactggctg

SEQ ID NO: 320342 - DNA, 122 bp, Homo sapiens
gggcgcgaggaggaggcggtggcctggaggaggagccgggtaaggctgaagctggcgctgcggtaaagccactctgcgtgtccctatctgctccaggagcacagtgttccggaaaaataatg

SEQ ID NO: 320343 - DNA, 122 bp, Homo sapiens
tatcagtaacaggatcacacctgtttttcagtaacaccaggatgaatacatctgtccctacgccggtctccagcatgtgaagtggagctaatagctagggcaggaaacctgaataagctcct

SEQ ID NO: 320344 - DNA, 122 bp, Homo sapiens
acacctggggccacaggacacagtaaagggtgagacagcacctgcgtcagcacaactgaccgttccttgtcgccaggaagtagctgtcaggactaaatgccagcattcctatgccgattttc

SEQ ID NO: 320345 - DNA, 122 bp, Homo sapiens
gatcctgaaggtacctgaatccttgtttgttttggtgatgaattttttttttttccccaccgaaggggcctggtccatgtcctggaggagaaataggagtagtatcattagatataggtgtt

SEQ ID NO: 320346 - DNA, 122 bp, Homo sapiens
tcacagatacgctccatggcggaattggcaaagccgtagttgctctgtcccgcattgccacgcccgcagctcacagaggagaagaccacaaagtagtccagctcagggcacgcctctcgggt

SEQ ID NO: 320347 - DNA, 122 bp, Homo sapiens
ggctccagggtccttctatcccctgtatattcccaattttatccccgatgtatatcagttcgctttacactggcaggagagttcatgttccacttagaccaggaggagaggatatgaaaagg

SEQ ID NO: 320348 - DNA, 122 bp, Homo sapiens
gtacaaggagacgaaatgaagggacacgagctgggggcgcgcgaggccgaagtgaaagaccgggtcgcgcgcgccaaggggggagaggatgaggtgaagaaggagcgcgaggcgggggcgcg

SEQ ID NO: 320349 - DNA, 122 bp, Homo sapiens
cacccgttctcagcacccagaagcagaggccaggagcggggcggctgtggctgcgccctccgccctactccgctaatcccggggccgcgcagtccctgcgtccggtgatcaccgcgctgctc

SEQ ID NO: 320350 - DNA, 122 bp, Homo sapiens
tgtggcgatgggtgagggtcatggggtgtgagcatccctgagccatcgatccgggagggccgcgggttcccttgctttgccgccgggagcggcgcacgcagccccgcactcgcctacccggc

SEQ ID NO: 320351 - DNA, 122 bp, Homo sapiens
ctgtcccacagccaagtggcagagaaagaaaagtgtcagatgagcaggaagcaatgaggccggggggttggacacccttcccggccacaggcctctgcacaccggtgctctctgcttgttta

SEQ ID NO: 320352 - DNA, 122 bp, Homo sapiens
agcctagaattgcattacatgactttaaagtcttaaaagtgttcctccattgtgctaacacgacatggcctgaacagtctaattcattctgttacatttcacaaagaattttctggtacttc

SEQ ID NO: 320353 - DNA, 122 bp, Homo sapiens
aggacagcagtttccaggttgtttttcttttcgttcttgttatagcatacgtagcgactacgcagtatcctcgctgcatctgcactgttttcccaaatacaagcatgggctgcatgaggccc

SEQ ID NO: 320354 - DNA, 122 bp, Homo sapiens
gttgccgtaagccacaatggtgcagtcgtccgacaggatcaggcgctggtgggctgtgcccgggtccagggttagggcggctggcactgtgggggttggaggagggagagaagatgagtggg

SEQ ID NO: 320355 - DNA, 122 bp, Homo sapiens
tgcaagctaagaacctcccctcaacccatgtaatatccttgttttatggcaaggcatgaccgtgaccagctattctttaggactctaaatgctttgaatcaaaaccaacatttctactgact

SEQ ID NO: 320356 - DNA, 122 bp, Homo sapiens
acactgtatttttatctgtgaccctttctctggactccccaaggacagagctccaagagtcgtttctctctgttgcctcatcttcataatactctggaaatgaataaatgaataatccttgt

SEQ ID NO: 320357 - DNA, 122 bp, Homo sapiens
gtgggagtctgcactcttcaaggggcctgggctgctgctcacgggtattaaagaactccgcgttgttcatggctgaggcgatgcattaggaagatcctggacctagagaacaagtcccccga

SEQ ID NO: 320358 - DNA, 122 bp, Homo sapiens
tattgggaagggaacttaccagcctcacagaatgtcagatggggaggcctctggggtactcggtcacccggcccatggaacagatggggctgttgaggcctgggactgggcccagcctgtgc

SEQ ID NO: 320359 - DNA, 122 bp, Homo sapiens
atgcaagacaatcagggaacagagtccggggaacgggatgggtgcccttataacagagtccgggggaacgggatggctgcccttgtaacagagtccgggggaacgggatgggtgcccttata

SEQ ID NO: 320360 - DNA, 122 bp, Homo sapiens
tttgcacaataatgaaatcacctaatgatgcacttcgcagaatgtatccccatcattaagcgaagcttgaatgtacatgatgtaaatgatgttacaggttttggtagcggcctcaacaaata

SEQ ID NO: 320361 - DNA, 122 bp, Homo sapiens
agagtcaatgtagtttttactccaacactctaccttgtatggctcccaaccataagagaacggaagtgcttacgagtcaattggtgagcaagagagaaaaaggaaagaaagacatttcatag

SEQ ID NO: 320362 - DNA, 122 bp, Homo sapiens
cagggcaaaggccagacacaattaagagcactgaaaggtagaatcagccatggtgatgctcgtagcacagcaaagctgcctggggtaggactcttccctgctacacagaactctgatgcccc

SEQ ID NO: 320363 - DNA, 122 bp, Homo sapiens
cgcagtgccaaaaccgccctccattgaggaattcagcatagtgaagcccattagccggggcgccttcgggaaagtgtatctggggcagaaaggcggcaaattgtatgcagtaaaggtaggaa

SEQ ID NO: 320364 - DNA, 122 bp, Homo sapiens
atcatcctggagatgcctggactgctgttcacaggcctggtttaattcagaatctcctaccggaggctctcgtttctttgccatcccctgaccttgtgggcactcctaggcaagagggagca

SEQ ID NO: 320365 - DNA, 122 bp, Homo sapiens
gcctcagccggcccctccaccctcacctggacacagcctcacctgtacacgtagggcccgcgctcccgcacctgcggcttctcgcccttcaggatctcgctggggttcatgacgtcaaagaa

SEQ ID NO: 320366 - DNA, 122 bp, Homo sapiens
gccctgtacactgtgttagaatcaaggcagaaattttatatctgaacttgagacgatcaacgaggatggagaatgtctagaagtctaaagcaccatgcaaagtcacacatgattaagaagat

SEQ ID NO: 320367 - DNA, 122 bp, Homo sapiens
gcccacgagcgtcccagggcaacgggaagacacaaggaccaggaaggaggcaagagaacacggtcaagatgggaaaggtctgcagtagaggtgacacttctgagggtaccgtcaggatgaag

SEQ ID NO: 320368 - DNA, 122 bp, Homo sapiens
ctgtcagttagaagttatctggcactagcaattatctggcacatagccttcaagtctgagcgttattgactttatatctggattctgggagaatggacagtgggagttgtagaagtctgtta

SEQ ID NO: 320369 - DNA, 122 bp, Homo sapiens
aatagatttctgcgtggccttgacacagacagctagtgtgaatccccgcccacagaggggcggcacgttggttgccgtacaacgtggtggttccctgcatctctgcccacgtcggagaggtg

SEQ ID NO: 320370 - DNA, 122 bp, Homo sapiens
agtctgacaccagagaactcacagccatgtcaaacttatgaaaaattattttaggtgcttcgaaaaataggttttacaggccaatcaaatataattgtataaaattaagtttaggccagggg

SEQ ID NO: 320371 - DNA, 122 bp, Homo sapiens
cacgaacccaccagaaggaagaaactccgaacacatccgaacatcagaatgaacaaactccggacacgccccctttaggaactgtaacactcaatgcgagggtccgcagcttcattgttgaa

SEQ ID NO: 320372 - DNA, 122 bp, Homo sapiens
aacttcttctttgtggcatttacatctgtactcttcaccgctacatcccaggttgacccacggtagccacattcgaaaagaaagaagcccctgttctctgggagggagtgctggaggcagga

SEQ ID NO: 320373 - DNA, 122 bp, Homo sapiens
aagaaaacaacacggtctgaacttgcctctgagaacccgcagggccgtaaacctgaattccgcgggagagaacggcgtccgtttctctcgcgacacttcatggataacgtagatgcttcaag

SEQ ID NO: 320374 - DNA, 122 bp, Homo sapiens
tacctctgagaccatagtagcttccaatgtgacaggtctacaaggacactctacacgtctcgcatgacatcatcctctcttcctcccctgtttctctttccgtggtgccttctgatttcccc

SEQ ID NO: 320375 - DNA, 122 bp, Homo sapiens
atttaaaatgcatttggggtgtgctctctagaagcagagccactggtatttgatgtatgccgttctttgtacttaatggaataacttacgtgtgagtcagtgtgtgagagtagctgggggaa

SEQ ID NO: 320376 - DNA, 122 bp, Homo sapiens
gggttggcttgatgtggaggtctttctctgcatttattttatataccattgttatcctgccgcctgttcaaaaacaccactgggtcctcactaacacagagcctgtcttgtgtggaactgac

SEQ ID NO: 320377 - DNA, 122 bp, Homo sapiens
cgggttaaagggcagcccagcctcagggctgacagtttgctccccaggcaccaccactcccgcctcccaccttaaccttgcatgagtttaccttgagatgagattgacagctccctcagcag

SEQ ID NO: 320378 - DNA, 122 bp, Homo sapiens
cacggagccagggctgttcggcgtgtgggcgcacaatgcactgacaggctgctgagcgagcgtgacacagccaagcacaggctgatggtcctggtcaaggacaatggcgagcctccgcgctc

SEQ ID NO: 320379 - DNA, 122 bp, Homo sapiens
acctcagccgctgggaagtgggagccggaggagggggcggcggtcagtgccgggcggcttcgggcgtcccctagaccagagtggtcatccccagctgtggggacattgtacaagaaagggtt

SEQ ID NO: 320380 - DNA, 122 bp, Homo sapiens
ccgtcggcccgtttcttgagctcagtggcccaagcctggatggcatcgaagcgaagattccgggatttagagcccgaaacgtaaccttcctgagcttcagtttcatctgtaaaatgaaggga

SEQ ID NO: 320381 - DNA, 122 bp, Homo sapiens
tggtgtccggcgtgcagcatcagtccaccctggagctcagcgaggtcggcgtggaggcggcggcggccaccagcattgccatgtcccgcatgtccctgtcctccttcagcgtgaaccgcccc

SEQ ID NO: 320382 - DNA, 122 bp, Homo sapiens
acccagcgtccatcacaaatccgaaggtggggtgtagctgagtgagagtagatgggggcacgaccacaggagtcagaggagggagctgatgacattgtcaaccatgccacccaccctactct

SEQ ID NO: 320383 - DNA, 122 bp, Homo sapiens
cacagctgccgctatgaaaatgcagacctgtggggcaggaattccgagtccggggtggagcgcgatgtggaatctgactcgcttgaaacagcaccgcggtggattcggatccgggtgagtag

SEQ ID NO: 320384 - DNA, 122 bp, Homo sapiens
aagtaacttcacccctctgatttgagattgtggtgaggatataaatagcttcacatcggccgggcatggtggctcacacctgtaatgccagcactttgggaggccgaggcgggcggatcacc

SEQ ID NO: 320385 - DNA, 122 bp, Homo sapiens
ctactagaatgtcagctccaggtgggcggggatttttgtcttgttctctgttgctatcgccgagaacagcaattggctcagggacaccctcagtgaataattgttgaatgaatgaatccagg

SEQ ID NO: 320386 - DNA, 122 bp, Homo sapiens
tggcatcagggctaaccgcgtgttccctgcagaaggctatgaccccagcaccctggaagccgtccaactggaagatggctccactgcctacattcaccaccctgtggctgtgccatcggaga

SEQ ID NO: 320387 - DNA, 122 bp, Homo sapiens
ttttctgatctttccctcaatcagcaaaggctgaagatttcgtttctctttttaaagttgcgttttgtataaattctacaatagtggtttcagtatcagttacttgaattacaagctgcttc

SEQ ID NO: 320388 - DNA, 122 bp, Homo sapiens
cacgttgcccacctcgcaagtatgcagcccaatcagtccccagggtctcggttcccgttgcgcccttccccatggccactgcgctcattcatgagcctagggtgatcaggcctccggcctat

SEQ ID NO: 320389 - DNA, 122 bp, Homo sapiens
gggttcacattggcaggggtagttgcctgagattgtggctcccttaatgcccaggaggcacgcttggaggcacagacctggccatgcccgtgagtggagagtcactgggggatccctttggg

SEQ ID NO: 320390 - DNA, 122 bp, Homo sapiens
gttaagttggctgctatagtctggatgctccttcacccatttacagaagttccttctgttcgttcttcaattttaaatgcacctcttgttctactcagaggacacatggcatctatgtaata

SEQ ID NO: 320391 - DNA, 122 bp, Homo sapiens
cgttttccctgttgcaatagtctttctttctaatggaagtctccctatcttatctaaattcggatttgtttctgtttgacgttaatgtgtagctaagagtgatcccaggtgagtctgagccc

SEQ ID NO: 320392 - DNA, 122 bp, Homo sapiens
ggggaggcacggagaggctgggtcaggccgagggtgaggggcgggtggcccaggcggagtcggagtataggaggtgccttccgccccaccccccacaccaggtaattttcctacgacgcggt

SEQ ID NO: 320393 - DNA, 122 bp, Homo sapiens
gggggcggggccgggtttgtttctgtttctaaaacgcggggctcagtcgaccaggaggggcgaggtccggggagtcccggcctttcggcgtcctctgccggatcccgggtttatggtcacct

SEQ ID NO: 320394 - DNA, 122 bp, Homo sapiens
atgggcgggcaattcccggaatcggggtgccacccttttcttgactaaagatggttaatccggaactgtcatggcgtcaggtgcatgatgggagtgggaatttccccatggaagttttatga

SEQ ID NO: 320395 - DNA, 122 bp, Homo sapiens
gtgtttagaaaccgatgagtttgtgaggcctccgggaggctcccgagggcgcggggactacgtttcccaggaggcctcgcgcggacgcccgggcggggctgtgcgaggggtggggctgcggg

SEQ ID NO: 320396 - DNA, 122 bp, Homo sapiens
taagccttggccagggccgaagtttaggcccctgtcttgttcatgtagccgaggggcaggcgggggacctctacacctctgctgtgggcacggggctgctgagggtctgtggaactccagca

SEQ ID NO: 320397 - DNA, 122 bp, Homo sapiens
caggagggagccgggggacctggcctctgggggcaccagggaccgcaggctgctggggggcggctggccggccgactcgtgggcgtggggggagtccccgcaggcctcttcctccggggggg

SEQ ID NO: 320398 - DNA, 122 bp, Homo sapiens
aagtgtcagaatcgggatgtgaagtgtcagaatcgggatgtgaatgcagttacaaaacctcgagcagatggcagtgtgtttcagctgaaatgtaacttccctcaaggaagctttctctcaat

SEQ ID NO: 320399 - DNA, 122 bp, Homo sapiens
attcaagaactggcccttcttggagggctgcgcctgcaccccggagcgggtgagactgcccggcctcctggggtcccccacgcccgccttgccctgtccctagcgaggccactgtgactggg

SEQ ID NO: 320400 - DNA, 122 bp, Homo sapiens
ggagcgcgcccggcagactacgctcagaattcagcactgcggacagttccatgatcagcacgtcgggcagcgcccggatccagccccctcgaccagcattccaccttctgttggccacactg

SEQ ID NO: 320401 - DNA, 122 bp, Homo sapiens
aaaggcccttataagtcaggcgtttgcaaggacaggggcgtggtttagaggccagggaggcgggacttcacttatagttgtcttaagcgtgcccgaggagcaggggacacattgaagttctt

SEQ ID NO: 320402 - DNA, 122 bp, Homo sapiens
gccactcgccctgtccctctagcgtggcctctgtttgggggtctggggtggaggtcgtcccggcccgggtggttccggacgccggctttccgcacctggctcggtgacggcctcggcgcccc

SEQ ID NO: 320403 - DNA, 122 bp, Homo sapiens
cgagatttgggtgttcagtctcgaggtctctgaatcttcccgctgctggagagaaatgcgcgctgtggagttgtctggacatttaggaatgtctctcgaacttgttccatttaatagagctc

SEQ ID NO: 320404 - DNA, 122 bp, Homo sapiens
atatggttgtaaaacatcccttgagccaacctaagtagaaaccctacagggaatggaatccgaggaatgtggttcccacccagccacaagccccaggcctgccttgtgccttttcacctcca

SEQ ID NO: 320405 - DNA, 122 bp, Homo sapiens
catgtggcagtcgccccgttacaggttagaaacctgtggcccgtggggtggagccgctcccgtggttcccgtggtctccttggctcccttggccggcgggtggtggggccaacccagggcac

SEQ ID NO: 320406 - DNA, 122 bp, Homo sapiens
cccgcactgcccgctgccaccccctaggcgcggtcacacgtccgagccggccgtggtcctcgcacccttgcctctggtgccgactagcacccaacaccccggtccacttgtgcgagtgagag

SEQ ID NO: 320407 - DNA, 122 bp, Homo sapiens
gatgttatattcttccacccttggatatagtgatactacaagaaacatgatgtgggttcccgtttatcatcttgtttttatttatttgacactggcttataaaaagatacccagtgtttgct

SEQ ID NO: 320408 - DNA, 122 bp, Homo sapiens
gttcacagattactttgaaatacttgattttcatcagtctctgtttcttactatggctgtcgtgtgctgtgtcctgtgataggaagtttcacatctcatattgcagtgaccaccctttgtgg

SEQ ID NO: 320409 - DNA, 122 bp, Homo sapiens
ggcccagccagtcccttctgggcatgggtgcggcgggcagtgcagacagaccaccaggatcgcaccgggggacggcgtcgggtctgggcgcgggttgggaccccgggcgcagcgaggtttgg

SEQ ID NO: 320410 - DNA, 122 bp, Homo sapiens
gcgtgttttcccggcactgcctgtgcgcatcgcgttctccagccaaatcaaaacatgctccgggcccagggtcctgatttgcgctttgtacccgcatccctagcaacatgcaaggcgcacag

SEQ ID NO: 320411 - DNA, 122 bp, Homo sapiens
aggtcctccggccccgctctgcgcggcgctctggtcttggggctccggactctgtcatgccgggcaggggccagtccgatccttgcacccttgcctggcaccgtccctggagccttggcgtc

SEQ ID NO: 320412 - DNA, 122 bp, Homo sapiens
ccatgtcacacatagctgtgccccgagtcatcatgctgagcggtgaaccgatcccatggccgtcgtgacagtttctggagaaagcaggcgcatgctgattcattctcagcctcctcttccca

SEQ ID NO: 320413 - DNA, 122 bp, Homo sapiens
tctccctgagggctgggactgagatctgttgtgtgtactgccatattcccaaaacctaaacgatgccttgcatggaacaggggatcagtggtgatttgttgaaggaaagactcctgtctgtc

SEQ ID NO: 320414 - DNA, 122 bp, Homo sapiens
cgtacgatggaggcctacctctcgtttctgcccagccctctgtggccaggagccctggcccgcaagagggacagagcccgggagagactcgctcactcccatgttgggtttgagacagacac

SEQ ID NO: 320415 - DNA, 122 bp, Homo sapiens
tcagcccccagcccccgacccccgacccccggcccccgacccccgacccccggcccccagcgcccggcgccccgcctccagcgctcagcagttaaccaggcaactcgcgcgcagacgccaag

SEQ ID NO: 320416 - DNA, 122 bp, Homo sapiens
aaaggtgtgtgaagcgccgctttagaaggcccagtacattcacaaacatcagcttctgggcgaggctgcttggcctcttctattcaaaactttgtgttgcccttttaaggtttctattcccc

SEQ ID NO: 320417 - DNA, 122 bp, Homo sapiens
ctcattggctaccgcacgcagtgagggggcggggaaagtagcggcgaggccccgccctcacgcaggagccaatcctgagcaggctaggagacgaacccggaagtgagatgcaaggcggcgat

SEQ ID NO: 320418 - DNA, 122 bp, Homo sapiens
tccttcctctgagcagtcatctcattcatttgcaacccatttcgggtaccccggtcctggcgttggaagggcacaggttaaaccccagattgtccagaaccactccggaggtcagggctgaa

SEQ ID NO: 320419 - DNA, 122 bp, Homo sapiens
gtttctttacttttaattaacagttcacatttctctggtttctcatcttgaaataaatgacgttcacaatcccttgaaccgcttcacccagacttcagcccccaggtacacatgagatccag

SEQ ID NO: 320420 - DNA, 122 bp, Homo sapiens
acactgatattagggagtgaatcattagccatgaaatcatgtcgactttcccgactgcagcgttcttgacatgacagcaatcgcaacctgcctttcattagagccccaataagttctttact

SEQ ID NO: 320421 - DNA, 122 bp, Homo sapiens
gaaacatttctctttaatcctgaaggttactttcttacttttagctctctgggaaaagcccgtctgggactgagggcctgagcaagctggcacgggaagaggacagggcctctcgtgtcccc

SEQ ID NO: 320422 - DNA, 122 bp, Homo sapiens
tcacctgcacaggaagggtgcacggaaacacgtcatttagaacatcccgggcccgaacatcgcgggccctaacatccaggtatccgtgccacttctccgtaccggtccaaggaggccgcggt

SEQ ID NO: 320423 - DNA, 122 bp, Homo sapiens
gggcaccaaaggcctcgcctcggacgggggggcaggggcacgaaaacaaaacatgacatgcgtctggctcggccacgctctggataacaggcaagctcttttgcactggactttcccttcca

SEQ ID NO: 320424 - DNA, 122 bp, Homo sapiens
tcttctctgtcttcagctgctccgtattcatattgttcttttctgtgttttacatttaatcgtgcatacacacacagaataatattcatggacaagttttaggttctcttttcctaacttta

SEQ ID NO: 320425 - DNA, 122 bp, Homo sapiens
tctgcactatccgatcctcatcaacagagggcagcattgtgttggtcaatgttcccttggcgagcaattgaaacttgtttaggccctagggttgagcaattttaaggttgagactccaagtc

SEQ ID NO: 320426 - DNA, 122 bp, Homo sapiens
tgagcgcatgcgcctgagggcttttacccctcccttctctccctgcttccaaccggcgcgcggctggaggctgggaaccagctcctgggtcttagtcagaggttcacatccaccaactatct

SEQ ID NO: 320427 - DNA, 122 bp, Homo sapiens
cctggggcaggtaacgcacatttcatgtgtggtatgggaaggagaagttcacaagtgtgtcggctagatttccaccagctcattatttgtttagctcagatattaatagagtttatgtaaca

SEQ ID NO: 320428 - DNA, 122 bp, Homo sapiens
gtggggtttcctactcttactgctggcgtgcagaagtgtcctttcattgctggcttgaagcgggctcacagaagagacggtgattgtgatctgctactaggaaaaagttctgggatagttcg

SEQ ID NO: 320429 - DNA, 122 bp, Homo sapiens
tggcaggggctcggatgggcaaccggagcctccggagccatgtgtgcaagctggccctaccgctggctccagcccgggctctggaccatgccaagccggggagcgggtggggaggtgaggag

SEQ ID NO: 320430 - DNA, 122 bp, Homo sapiens
aaaatggagattgttattctatttccccagtaagtttccctcagtttttagaaagcataccgactgggattgcaaaatgccagcatgattacaatgcttattaacagcaatatgcaaaacag

SEQ ID NO: 320431 - DNA, 122 bp, Homo sapiens
acttggccaacaagaacaaggtacaatgtcagtgtgaaccagaagcaagagaatgatgagcgtctaagccactgaatgagccagccagacttaccatgttttctgtctccaagattggacct

SEQ ID NO: 320432 - DNA, 122 bp, Homo sapiens
atgtaacagatgagtgtcacctggtttcctagtttcagccctgaacacgtctccgagtcacgctggaggcgtaaacaatggatagggcaggcaggtgaaacccatcttcccgccgagcttta

SEQ ID NO: 320433 - DNA, 122 bp, Homo sapiens
catttatcctttttaaagggaaacaggttgcttggaggccaagtgggttagtaaaaggaacggaataattttcagtttggcttgagtgaaggttattctgaagagcaatgactgttttttca

SEQ ID NO: 320434 - DNA, 122 bp, Homo sapiens
gatcattgtttacaacaactcagctctaatagatcagggcctcttttttccttctagcttcgttcatttatctcattagttttctctttttttttcttcctccctcccttctcacctgcttt

SEQ ID NO: 320435 - DNA, 122 bp, Homo sapiens
cgctgcgtggactaggttccagacgcgctctgaggaggcgcctcccggctagttcctgagcgcgctcgagaggagcgtgccccgcaggtgcaggcgccgggactagccagggcagagctagc

SEQ ID NO: 320436 - DNA, 122 bp, Homo sapiens
taattttattgtttgtttagagactagtgtcgcagtgttacccaggctggagtgcactggcgccatctgggctcatgcagctggcaccaatgggctggggcgctccttcagcctcagcctcc

SEQ ID NO: 320437 - DNA, 122 bp, Homo sapiens
ctacagaaagaagcagaagcgtttgcttattatcgccggacacacactgccaatgagcggcggcggcgtggtgaaatgagggatctctttgagaaattaaagatcacattgggattacttca

SEQ ID NO: 320438 - DNA, 122 bp, Homo sapiens
agcattgagtagtctgcattaggtaggggtttatgcctgtttgtaaaggatcctgggagccgttacacatctctacaaattctacctttcttggttcttgcttaagtgaaaccattctaaga

SEQ ID NO: 320439 - DNA, 122 bp, Homo sapiens
gcgggacttagtgttgcctgatccacgccgattggacaacagcagtgtcgggggacgggccgctcgagcgggctagcaaccccccctcgatgggcggggagaagcgtgggctgcgcttgcgc

SEQ ID NO: 320440 - DNA, 122 bp, Homo sapiens
caagaagccagcggagcgccccgaacaagcactgtctccagtgcattcttttcacagggtcggagccatgggaaaacttcctctttgccctctgaaggttctctgaaaatcactgacaagag

SEQ ID NO: 320441 - DNA, 122 bp, Homo sapiens
ctggtcgctccagccgcggcgggggctgggcctgggggtcggcgctgaggcgggaggggccgcccgggatggagacgttgcggccggtggccacagaaacttgagccgcggcagagaaacct

SEQ ID NO: 320442 - DNA, 122 bp, Homo sapiens
gaacgggttttcctgagcggaagagcctcaaagacctggcccgggcccagagagctctaccggtcagcccgctcagggctcttgttcctcagggcaatgggcccctcacccacccacccggc

SEQ ID NO: 320443 - DNA, 122 bp, Homo sapiens
tcaccttgaacccgataccgcccttcttacagcacaggcaggccagcatgaggacgatgacggcgaagagcccggagaaagacacagccaccacggcgagggaggatggccaggacagctcg

SEQ ID NO: 320444 - DNA, 122 bp, Homo sapiens
tgacgtggaggctgtgaacaggaggcggcccctccgaggcaggcatttgagtgtgctcagcggagctgttgcagaaggctgcagcaagcatcttccattaacgttacgaccgtgaaatatga

SEQ ID NO: 320445 - DNA, 122 bp, Homo sapiens
aaaaaagcatgcattagccttctattcattagttgtgttattctgtctccttcctgctcccggcccctctctccctagttctttgaggacaccgatcgactcgaactcatttttgggtcccc

SEQ ID NO: 320446 - DNA, 122 bp, Homo sapiens
gaattaaataaggggaaggtgagcaaaaggggtgaggggaagaaagatgagaagccaggtcgggtaggaaaagaaaagtacaccgaactgggaatcaggagcctgcattccagtctggctct

SEQ ID NO: 320447 - DNA, 122 bp, Homo sapiens
cctatattagagccccaggttctgtgcccttttcctatcatcgcaaaactcatgatgctccggctgctcagttccctcctccttgtggccgttggtaagaccccaacctgtgtgtgtgctcc

SEQ ID NO: 320448 - DNA, 122 bp, Homo sapiens
actccccgccttataaccgcgcggacggcgcccgcctcgcctcgcctgcccccccgcccccggccaggccccggcccccaaggctggctgaccccccgcgtccgctccaatccaggcgcggg

SEQ ID NO: 320449 - DNA, 122 bp, Homo sapiens
cccccagcctgtaattggtcagaggccgcgcacagctccgctcgttccaggtgagtaaagcgcctggactcagacgtaattgattctgactgatatccaggttggggtgtaattagcagtct

SEQ ID NO: 320450 - DNA, 122 bp, Homo sapiens
agtaatcataaaacaggacaatgctaacaatatatgttaatgaaactgatgtgcattgcccgtctggctcggcctccttctctgcggctgcgcgggaaaccccacggcttcccctctacgtg

SEQ ID NO: 320451 - DNA, 122 bp, Homo sapiens
cactttgggggcaaaaggtaggggttgtgccttcaggatctctcctctctgtcccctgagcggcccgcagcctccccagccgagatggccgtgcttttggggatgggtgggaaggttctcag

SEQ ID NO: 320452 - DNA, 122 bp, Homo sapiens
ctccccaatctttagatcgtcctcaatctccatagatttctgcctcttctcccatctatgcgcctcctctgctctccctgttaaattctctcttctctgttataaccccctggacccaatct

SEQ ID NO: 320453 - DNA, 122 bp, Homo sapiens
cttcaagcccaagcagcacacggtcatctgctccgagcacttccggccagagtgcttcagcgcctttggaaaccgcaagaacctaaagcacaatgccgtgcccacggtgttcgcctttcagg

SEQ ID NO: 320454 - DNA, 122 bp, Homo sapiens
gccggcgccggctattgattggctgaggcgggagcaggcggctggccggcagcagttactcggggtttccggtgcgaggccagaggtggggaagccatcggacgtcggcggtgaggtacgtg

SEQ ID NO: 320455 - DNA, 122 bp, Homo sapiens
gcgggagtgggagggtgccgcgtgggcagccggagcaacaggcgtgggagcagcgctcctcgcacttcctggctccagaaggctcggtcgcgtccctcttaccttccgcgaagccagcccgg

SEQ ID NO: 320456 - DNA, 122 bp, Homo sapiens
cgccggcgagtgagggaggaggcgcggcggcgggggaggaggcagggcgagcggcggcggcggcggctgcaatcccagcagcagcagcagcaacagcaacagcagcagcagaagcagcgcgg

SEQ ID NO: 320457 - DNA, 122 bp, Homo sapiens
aaccgctgctggcagttttgccaggtgtttgttaccttggtaagaaaatttagaaccgttcgctgtcactgtgttcagactttctatgttgccttggctattggttttataatgtagcagtg

SEQ ID NO: 320458 - DNA, 122 bp, Homo sapiens
tcacgacccggggttcgccccacccaacaccctgcgactaagaagcgcttaaacaggaaacgggagcccttccaaaacagcttgaggctggttggaagccaggaagagtcccagcccctccc

SEQ ID NO: 320459 - DNA, 122 bp, Homo sapiens
ctccatttccagaaaagagagggtttctctcgtctgttgcccagaaaagaagtcagtttacgtatgcatcttccctgggtcaggctaagaagtagccccagcactggcatgctagacttgga

SEQ ID NO: 320460 - DNA, 122 bp, Homo sapiens
aaggaggacgcaattagcagacagccttggattgaccccaaccctctcactctcaaggaacgaggcggcctgcctcgccacccatcaggtcccacgctcaccccggacaagccgcgctggga

SEQ ID NO: 320461 - DNA, 122 bp, Homo sapiens
gttgtctgtcatttggatgcgtctcttggcagtgactggggggaaatcctcactgcagcccgcgtcccttgcatgattgttgtaagaaagccccagctcagctgcgtggagacagggtcctc

SEQ ID NO: 320462 - DNA, 122 bp, Homo sapiens
ccaggggcttgaaccgaaatcatcggttactcgacgcttccagccgtggcctttccgcggcgctgggcttctggtgctatcagacccaatttcgccttttgccttccagatctaacagactc

SEQ ID NO: 320463 - DNA, 122 bp, Homo sapiens
tgggtggcagtgtcgacagcgcggcagccgtggagaggaagggctgactcccgctggctccgctgcccccgactcccccagccgcaggccctgagatgctcctagggaacctttctctccac

SEQ ID NO: 320464 - DNA, 122 bp, Homo sapiens
agcctctttggcctaatgcagcctggctgggtggagccagctacctgagaatgctagctgcggggccggtgggagaagcccactgcttagagatcttcgtgcactactcacttgggctgtaa

SEQ ID NO: 320465 - DNA, 122 bp, Homo sapiens
tctcaattaggatgttgacattcacacaatccattcatcgcgattagatttccccagtttcgcatgtacttatttgtgtgtgtgtatgtgtgagcatcaagttatatacaactttatcacat

SEQ ID NO: 320466 - DNA, 122 bp, Homo sapiens
agtgaaacagcacccccctggaggagtttcagatgacagcccaggacagctggactgtcccgctaaggtggcacttgggacttctcagcattacgaccagtacttcttccccagatctgggc

SEQ ID NO: 320467 - DNA, 122 bp, Homo sapiens
tcctgccttctctatcatgcgcaggcccctggcagctcgtggttggcaagagcacgaacccgtggtcagatgcaacgtcctgcctcatgcattttcctcttggtgctttggtcagaacttcc

SEQ ID NO: 320468 - DNA, 122 bp, Homo sapiens
gctttaagaaattggttttggagactctggcttgaaaaggagccatgcccacttgtctcacgtcccagtcgctggctccagggggccgtggtagaacatatattgtacttcagctgcctttc

SEQ ID NO: 320469 - DNA, 122 bp, Homo sapiens
ccagctgcccctacccacaacagcccaggtctgcaccacataggcagtgacacatatggccgcttatttctaggcacaaccataaataacccacattgccccagcccctggcacagctgggg

SEQ ID NO: 320470 - DNA, 122 bp, Homo sapiens
cctcccggaagtgccgaagctggctactaagggaacttgggaggatcccacctcagccttcgtgactagtgaggtgcgcaaacgcccgagttttccctggtgcgcgggttccgcctttgcag

SEQ ID NO: 320471 - DNA, 122 bp, Homo sapiens
tactccagaggctgaggcacgagaatcacttgatcccgggaggcacaggttgctgtgagccgagattgcgccactgcattccagcctgggcgacagagtgagactgtgtctcaaaaaaagat

SEQ ID NO: 320472 - DNA, 122 bp, Homo sapiens
caacttcaagttacacctgtgaaactcatgggtccttccacagccttcaaaaactaagggcgtcccctgtcctctccccagatgtcccttccccatcgccggtagcgagtgggagacagctc

SEQ ID NO: 320473 - DNA, 122 bp, Homo sapiens
ggaaatgttataagagatggaaatgtccaggccatctggctgagagagcccatggcgtctcgggcctaaagagaggtggaatttcaagacctcacaagcgtcccacttggcctggttggaaa

SEQ ID NO: 320474 - DNA, 122 bp, Homo sapiens
cgcttgctaaatgcagactaagatgtcttccactccggagcaagcagatatgtgactgaccgcctcatggagccatgagaaacgtcccacagagatgcagacatggcctagaccgagcctcc

SEQ ID NO: 320475 - DNA, 122 bp, Homo sapiens
gtaaaagagctacacagcaaattaaattcgctgtgcagcgcaaaggcaccctacacactgcgtgaacgcttcggctcctggagcgccggcgactgcgaagccaggacgcaggcagcggggag

SEQ ID NO: 320476 - DNA, 122 bp, Homo sapiens
tgagctgcaagttcatcatcatgagtgcgatctgcgtaaaaaatgataggggaaggaaggcgggctacggtgccccaggaaaagaagggagctttctcccaaatggtgttcttctgcaaaga

SEQ ID NO: 320477 - DNA, 122 bp, Homo sapiens
cctgcctgaatcctacctggggaacgtggccttgacctttgccttttgtgtattctgagacgggggctgggcaaggtgcagttggaggacacagcaggacactccttggatgcccccacctc

SEQ ID NO: 320478 - DNA, 122 bp, Homo sapiens
ggtggaaagaaagaaggaaggaaggagaaagtgatatttgaaagcagacattgtcaaggacgtggcaaggtagccagagactgacactcagagaacaaggcctcccatcctgaaggcagggg

SEQ ID NO: 320479 - DNA, 122 bp, Homo sapiens
ggccgggcgcggggggccggaggatggcggcctgggggccctgcgggggctgtcggtggccgccagctgcctggtggtgctggagaacttgctggtgctggcggccatcaccagccacatgc

SEQ ID NO: 320480 - DNA, 122 bp, Homo sapiens
gagttccgccgcagcctggcctgtctttcgccctagttagtctttaagctcctgaatgcccgccgcacgcccagggctttgcacacggtgggcacacggtgccttttgagcgcgggagaggg

SEQ ID NO: 320481 - DNA, 122 bp, Homo sapiens
tgaatttaccagggtgatcccaacatcacgaatcctttaacaacttaacatgaagcagcacgtagcagttacctgcatgggttctggaattagactgcttagattcaaatctcggttctgcc

SEQ ID NO: 320482 - DNA, 122 bp, Homo sapiens
caatcatgtcctgccggctctcctgtggggtctctctgctgtccagcatgctggggtccccgtgtgggcagccgtatccagctccagaattgcgtggcatctgcctcgggcttccactgaag

SEQ ID NO: 320483 - DNA, 122 bp, Homo sapiens
ttatttattgctgtttaggctaaatgtctgcaggttaattaaatagaaaagtgtcccccccgggaatgtagtaggtccctagtggtccaataaggtaataaaaccatggtgaaactgaaagc

SEQ ID NO: 320484 - DNA, 122 bp, Homo sapiens
ccgctgcctgagcgccgcgcccgctctcgctcgcgcctaagccacgcccaccgccgctatcgccagccaacccgtgtattgcaccgcctacagacacgccccttcatctccgtcagccaacc

SEQ ID NO: 320485 - DNA, 122 bp, Homo sapiens
cgcccggtttcgaaccggggacctttcgcgtgttaggcgaacgtgataaccactacactacggaaacagatgcggagaggttactctatgacttttataagtgttatagtcaacatccaggt

SEQ ID NO: 320486 - DNA, 122 bp, Homo sapiens
attaaatattggggccaaaagatcagaggtcattttattcaagtttactcctggaatgaacgcatctagaacacatgatctttatcttcctactaaagaactacttaattatcctaggtcca

SEQ ID NO: 320487 - DNA, 122 bp, Homo sapiens
ggactcatcagggtctgctgggaggaggcgctggtgggagtggcctgggccaggaggcaccgttcctgggcccctccccctgccagggctgcctgctgccccagatgtggctggcttccctg

SEQ ID NO: 320488 - DNA, 122 bp, Homo sapiens
caatttctatatatgctaccctgacaggcttatttcaattttagtcataaacaaaatttacgttttgacttgaagtgggtcaaaatcagtgtcagcattttgttttgtaatatgcccttcac

SEQ ID NO: 320489 - DNA, 122 bp, Homo sapiens
acacctccaaacgcaggcacccgcagcctggcctgaagggaggtagggtgggactggagacgcggggtgggtgagagcaacacctccaaatgcaggcacccgcagcctggcctgaagggagg

SEQ ID NO: 320490 - DNA, 122 bp, Homo sapiens
tgtctctgaaccgcagcgtggagatccacccgtctctgaaccgcagcgtggagatccacccgtctctgaaccgcagcgtggagatccacccctgtctctgaaccgcagcgtggagatccacc

SEQ ID NO: 320491 - DNA, 122 bp, Homo sapiens
gcgtctgtgctcgggacgggagtgttcgtccaggacgtgcagctccggagcctgcgcgggcgaccttgaccacctttgtcggctgtttccccctgagggaagtatacctgtcctgccagcct

SEQ ID NO: 320492 - DNA, 122 bp, Homo sapiens
ccggcgcgaagagtttagacgggcgagttagccttcactagaggttggggagtcagcttgcggggacgggactccgggaatctccgtctagacacaagcatcagcaagaggagggtcgcggg

SEQ ID NO: 320493 - DNA, 122 bp, Homo sapiens
ggggcggggcgggagggcggggagggcggggtgtggggggcgggggagggcgggggcgcgcggaggtaacccccggctcgcgcagccattgcccggctccctgtcactcagcccgcgcgggg

SEQ ID NO: 320494 - DNA, 122 bp, Homo sapiens
gaggagccctctgtgaccctgagagaagccccgagatctgcgggggtcccagcgctcctgcgccccctctcccctgggctgctgtgaggctggagacaggctgcagtaaactccacctttgt

SEQ ID NO: 320495 - DNA, 122 bp, Homo sapiens
ataggcgcgtgcacccagaagagcagaaggcgggccgctgctctgcctttaccccagagacgcagttgctgcacacacggagctgcttgttctgaaacacggtgctcagaacccaacgctca

SEQ ID NO: 320496 - DNA, 122 bp, Homo sapiens
caccctgggcttcccagctttgcagccttctctctgcaaagaaaagcaagtggcttttggcgcgaaagccttggcgcctcccctgatttttatggaaatcaggagggcggggtaaagccgct

SEQ ID NO: 320497 - DNA, 122 bp, Homo sapiens
gcaacagcattggcttgactctaaaggaggaccagaatgtgtctctacttccactgctaacgcccctctgcagaaaatgttcagtgtgcgtggcatcgtgctagtcccacctggatatacta

SEQ ID NO: 320498 - DNA, 122 bp, Homo sapiens
atccgcctggctccccggctcggccgtactagaggggagccgctgatgggaaactggagtcggatcgcccccctgcctggctgaaaacctcctgtggctccgctggcagctgcaggaaccca

SEQ ID NO: 320499 - DNA, 122 bp, Homo sapiens
tctcgttctctttggcctgggccaggatctcctcacgagaggcgcgggtgtcatccagctcgcgcatgcagtccttcatctgggcctggggtggggacagaggcttggcaccccacccagct

SEQ ID NO: 320500 - DNA, 122 bp, Homo sapiens
cattcttttgagtctttgttcagcctttcgctgactgcacaatttattatgcatgtgagacgcgggtagaggaatagtcgcttatgctttagtctggcttactgaatcttcatttctacgta

SEQ ID NO: 320501 - DNA, 122 bp, Homo sapiens
cgcccacctggggctgcagtcgggcaggtcctgttcgcagtggaagcctccgtagcctggcgggcaggtgcaggtgaaggaggccacgtggtcggtacaggtgcccgggccgcaggggttgc

SEQ ID NO: 320502 - DNA, 122 bp, Homo sapiens
gactggattctttccgggccacagagggcgggtgcttacagctggggtcaggcacacttccgttctgcctggaggacaggacagggtggtggcttctccagatccagtgctggccgctcaga

SEQ ID NO: 320503 - DNA, 122 bp, Homo sapiens
ccatctgtgccacatgcaccatcccaggtatctctcttttgttgggctgaagggtacatacgggagaccctcccactaaagaggtgggggttcccattgtatctctgcagtctgtggtaact

SEQ ID NO: 320504 - DNA, 122 bp, Homo sapiens
gacgatccactacatggtcccgggacagagcagcgcgcccaactttgagggaactttgtgcgcctctctgaggccctagctttccaaggcaccgccgtccgttcttctttccctagaccgaa

SEQ ID NO: 320505 - DNA, 122 bp, Homo sapiens
agcgttctggaaggcggggtctttgtgatgggcggggttgtctgtaggccccgccccctccgtcctttttttcccttcccaggacttagactccaccaagtttttattgcctccgtagctgg

SEQ ID NO: 320506 - DNA, 122 bp, Homo sapiens
gtcagacccctgttgggtttcataggagctggctgctgaatgtaagagtgcaggctaccccgggactttgatcccctacagatgtgacctatcaaatgaagaggacatcctctccatgttct

SEQ ID NO: 320507 - DNA, 122 bp, Homo sapiens
gccgaggcccagttaggacaaggttgcgggcaggtctgaggcagccttgggtccggagcgcgctggcgagcggtccctcggcaggtgggacaaagatttggtgctgggtgggggggagggga

SEQ ID NO: 320508 - DNA, 122 bp, Homo sapiens
tgcgcgaagctggggcttgggtcacgtgtcaaggctggccgcttgtctaaagctacgactcgcccacgtgactctcgccggcggggaggggcgtggacccaagaagtccctgtgcgcttgcg

SEQ ID NO: 320509 - DNA, 122 bp, Homo sapiens
tgaaagatttctgctgaggacccccattcctgctgggttccaggctgcgtctctggaaaccgtggcgccctcaggtcagccagctcccgagtggatgtggggttgggagcggctcttaacag

SEQ ID NO: 320510 - DNA, 122 bp, Homo sapiens
cgtgtgcggcgtcatgacgtaagcgcacgccggcgcgccggaggggaggaatgcggcaggcggaaaacttaggaagagctggatgcctcccacggagagcgtcccttccaagcggccccgga

SEQ ID NO: 320511 - DNA, 122 bp, Homo sapiens
cgggcgcgaggccgggaaaccaggttccggccccaccaacggctcgacgcatgcgcagggcggcgccgctgacccgcccccgccatccctgcaactggaggaggggattttggaaagttgcg

SEQ ID NO: 320512 - DNA, 122 bp, Homo sapiens
ttccccgggggaaggggggcggctagcactgctgatggcatcgcctgacatcacttgttccggaggataggagagcgtgggcctgcgtggcccacctcatccgtggcctgactgcgttaacc

SEQ ID NO: 320513 - DNA, 122 bp, Homo sapiens
cccccaaaatgaaattattgcaagatctgcctggttctgctgtttgttgcctgggactcccgcccactcgcccaggacccagcaactgcctgtggcgcctcgtcctccgagcgctcgctcgc

SEQ ID NO: 320514 - DNA, 122 bp, Homo sapiens
agcaccagaggccctcctagagctggcccaggctgcctgggactgtggggacgttgctaacggtggtggtcatcattgcacacccagaactgatttcctgcctggccctgtgccaagtactt

SEQ ID NO: 320515 - DNA, 122 bp, Homo sapiens
ggagcagcaggaatggatgggcctgctgggaagaatccctttgctgtgagctacctaagacgcctggctcctgaattgaaccagcaggtcccttctctgtatcttgcttgctttcctttaaa

SEQ ID NO: 320516 - DNA, 122 bp, Homo sapiens
agctggcgagggcagcgcgggtcccccggaacgccccccgaggcgagcgctaacgaggtccggcaccatgtgctaggtcactcccagtgcaaggccacacttgggccatccgagcaacccct

SEQ ID NO: 320517 - DNA, 122 bp, Homo sapiens
acgggtcgaggacagttccgtgtagaagtggaggcacacagtgaaggctttgagaggcttcgttaacggtgctttgagggatacataggaagtatccgactctttgggaaacacaaaagcct

SEQ ID NO: 320518 - DNA, 122 bp, Homo sapiens
ggatgtcatcaacagggcctcagagatgcaaaggactcacctaaggccaaagggaacattcgtcttgattctacctccagatccctattagatccaggtctgaagtcaaacaaggaaagccc

SEQ ID NO: 320519 - DNA, 122 bp, Homo sapiens
gcctgcaggaccgaggtgcagctgggacgagcggaaagctctgcgcgtgggcggggagcccggagcctcgccggggcaatgtcatctaggtgctcggcgctccactgatccggcccccgggg

SEQ ID NO: 320520 - DNA, 122 bp, Homo sapiens
ccgcgggcggggggcgcgcgcgggcggggccggcagggaggggcggggaggagcggggtgcgggctcgcgttgccccgccccgccgcggccccaccctcccgcatcagcaccggctgggtgg

SEQ ID NO: 320521 - DNA, 122 bp, Homo sapiens
tacgtgctctctttcaaaatgccctgggctaactggacttggcagcacaggttgctagagcgtgtaccaccctgagtcaagaggctcactgtccccaccctacacaagtcacttaacctctc

SEQ ID NO: 320522 - DNA, 122 bp, Homo sapiens
gtgaaagttgcccagttccaaaatggccaccaccgcactttcctggcgtcggagcgactacgtagtgacagaaggaccatcagcaggtgggtgctcacagggactgtgccagttgccaaact

SEQ ID NO: 320523 - DNA, 122 bp, Homo sapiens
gggactggggttggcaccagcactgcatacggagcctggagccggcctcgggatgctctgcggctacagagtgggcgcccaccaggaggcccccaagggcccaggacctggcttcttccaca

SEQ ID NO: 320524 - DNA, 122 bp, Homo sapiens
ccagagcaggggcagcagcagcagcagcagcagcatgtctgggtttgaaggcgccagggccgccagggaacgtctgttcctcagggttcttctctcagaaactgaggtctcaagacttaggg

SEQ ID NO: 320525 - DNA, 122 bp, Homo sapiens
ctgtagaagaatggcaaccatcaaatcaagaaattggcccaaagccctacagtctgcaaacgtaagtgataaaactaggattttagcagctaatagtcttaaccactcctcattctgaatcc

SEQ ID NO: 320526 - DNA, 122 bp, Homo sapiens
ctctttccttccttgtttcccctaatgacccgggcacttattctagcccagctctggcctcgcgtcactacgctctgcaataggaggacggtagggtccttggccatgctggctcgcctggt

SEQ ID NO: 320527 - DNA, 122 bp, Homo sapiens
gggagtttcagggacttcttgggagcctaccggaggaaggcccggctttgctccaagccgcgtccctacctgaggtctccacgggaggagcggtttggacgcgccccaccggatgggaggag

SEQ ID NO: 320528 - DNA, 122 bp, Homo sapiens
caagatggccgaataggaagagctcccgtctgcagctcccagcgtgagtgacgcagaagacgggtgatttctgcatttccatctgaggtaccgggttcatctcactagggagtgccagacag

SEQ ID NO: 320529 - DNA, 122 bp, Homo sapiens
ttcctcagcaaagctggtgcttatctgagcagcgggcgatttttctgaagtgacctccgccgagcgggagatttatggtggcgtttgctttcattatgtgtggaggctgcctcgtgagctcg

SEQ ID NO: 320530 - DNA, 122 bp, Homo sapiens
agggttgggggtggaggatgtttgcatagttgaagccttgggcgggggtgtaggaaacggcgagtacagaggccatagaaaaagctaagactcagtttgacgtcgtcagccggcttggtctt

SEQ ID NO: 320531 - DNA, 122 bp, Homo sapiens
ggtgtgcagctcgcggctgttgtcgcggaaaacgtcccagaggcgcgcgcggccctcgggcgcgcccccggtctgctgccggtcctccaggcactgcagcgcccagctcaggcggcacggcc

SEQ ID NO: 320532 - DNA, 122 bp, Homo sapiens
cagcctaaagttatttttttaattagagaaggaatactagcagatttcattgtagcaaatcgaacaataccaagcagttacctaggtgaactaagtaaacccccatagcactaagtcctggt

SEQ ID NO: 320533 - DNA, 122 bp, Homo sapiens
gccggtgctcaagttggggaccgaagccaggcaggcgctgacaagtccaccaagcctagacgcgttcgacgcccattggactcgctgggtgtccgtcatctcgccactgccagtgggctgag

SEQ ID NO: 320534 - DNA, 122 bp, Homo sapiens
aatataaaagcttcaccgccgtttccagctcattggaaatgcacgtgagtgggcgttgtgcgcagacactgagcgtggctgggggagacgccacagaaacagaggacgcaccccgacgtggg

SEQ ID NO: 320535 - DNA, 122 bp, Homo sapiens
caggacacggccgtagccccaggacagagcaggctgctcccaggtccatctccagcagtgcgattttcagtgtggagtgcagcgtggaaagtgctatttggtgggatggggccattagcatt

SEQ ID NO: 320536 - DNA, 122 bp, Homo sapiens
aaatgtgcacataatgtctcttttcctatagatgttcctgtttcccccttattccttccacggccacctgggatttttccaggcgggctccgcctcctgtccccgccccctcccgcctctgc

SEQ ID NO: 320537 - DNA, 122 bp, Homo sapiens
gcggggcaggaggagcaggagctgcgggagcgggccttcttctcgtgggccgagttcagccgcttcttcgacgcgtggtgccagcagcggctggcgctcttcttcgtcaagagctccatgca

SEQ ID NO: 320538 - DNA, 122 bp, Homo sapiens
gcctccagctctgggcataccccactgcggcccctccccaatgacctcccctgcccctcgcggaccagcccatcctcaagatagtacaactttccgggccaccccacgtctcctctcgcccc

SEQ ID NO: 320539 - DNA, 122 bp, Homo sapiens
tttttgcttctgcctcatttttctctggccgccgccatataagacgtgactttggcctcccgttatgattctgagacctccccagccatggagaactgtaagtccaatgaaacctctttttt

SEQ ID NO: 320540 - DNA, 122 bp, Homo sapiens
gggaccagaacgagtcgaagggcaaggacacgccactctgcatccccagctcagcccccacgctttggagccccatccccagggtcactaggtccccactgacgtgtgctcccaggagacga

SEQ ID NO: 320541 - DNA, 122 bp, Homo sapiens
ggttctgcagcctggtcttggccaggtcgatgggaaacacgcaggtgacaccgatcagcccggcgatgccgccattgatgagcttggctggcaggctgtgtggacaggggtgtcaggaccgg

SEQ ID NO: 320542 - DNA, 122 bp, Homo sapiens
ttgagcacctagcctgtaccagaccttgcactagatacgggcagagatcacagaggtaaacgcagttcctgataggaaatctagaatcaagtgaggaagataacagacatgccactatgtta

SEQ ID NO: 320543 - DNA, 122 bp, Homo sapiens
taagatgataacagatggagaaacaggtgaagcatcctgggcaaagaaaaaagcaggtgccgagacacaacagagagaaatcacagtgactatttgtgggaagaaatagggcctgattaatt

SEQ ID NO: 320544 - DNA, 122 bp, Homo sapiens
ctccagtgcccggttctgcaagcccaccttggtccatgcggccgacggtggtgtactgagcggccaggtcggctcgggctgccggggtgttggggacgaagtaaggcacctggggcaggcgg

SEQ ID NO: 320545 - DNA, 122 bp, Homo sapiens
gtctatggatttgtgagtgtgcgtgtgcatgcctgcaagagaattggtgcatttgtgaatcggtgcaagggtgggtatgtatatacacttgtgaatgttacgcagttgtatatatgtgagtc

SEQ ID NO: 320546 - DNA, 122 bp, Homo sapiens
gactccgagtttaacttccaacacacactttcaacctccaagagacgcccccacctgtgtcgccccaatagcgacttttctcaccgtggtcgccgcggaacttcaagggtccttcctacccg

SEQ ID NO: 320547 - DNA, 122 bp, Homo sapiens
caggctgtggtacactggtgcaatgacaaatcactgcagccttgaacttccaggctccagcgatcctcctgcaaatgcaggcccgtgccaccacacccagcctctctggcctcttaaagaca

SEQ ID NO: 320548 - DNA, 122 bp, Homo sapiens
aacgtgtatttaaagtcttcgacgaaaccatgaaacttcctatgctggtactaagagtcacgtattcccctgctcaagttactagtaaattctttgttagtattgttcttcagtgggttctc

SEQ ID NO: 320549 - DNA, 122 bp, Homo sapiens
gtgccccaccccgggcacacgaggcctccactgcggttgcgcagcctgccgaagagcgtgcggcttctactgcggctgcgcaagctcgacgcgcgcactcttgtctgcttacgagggctcct

SEQ ID NO: 320550 - DNA, 122 bp, Homo sapiens
ggacgcaggtgctgtagtcgaagcgctcaggctggctggctcgccgctgggccagaagcccgcactgcaccaccgtgttgcccttggagagctccaggagtgggtgggcagtggcagggtcc

SEQ ID NO: 320551 - DNA, 122 bp, Homo sapiens
gaggcccgggctcggggacctttcgcactcgggtcaggggtaaagcagcctgtcgcttgccgggcagctggtgagtcggtgacctggcctgtgaggtacgtctggcagcccaggggccgtag

SEQ ID NO: 320552 - DNA, 122 bp, Homo sapiens
agttcgaccttccccatacacagtgatttggccagagggcatcttcaccaccccagactgcgggcctgcggggaagggcgaagcggggcgggaccgggggcgggagcagcgcggggcgggac

SEQ ID NO: 320553 - DNA, 122 bp, Homo sapiens
agcccagcgtgtttggtctgagtccaaagaaggaggtggtgtgtgtgctgcgtagacctgcgcctgtggggtgagcagcctcatagcccccagagccggccaacttctccgtgctaggctgc

SEQ ID NO: 320554 - DNA, 122 bp, Homo sapiens
aagaaaccaagccttgcaaagaaataattataaaacagttacagacatttgtacaaagtgcgtaacgagcactgggaaaggaaatttttaaagggctatttgctcatttgttttcatataag

SEQ ID NO: 320555 - DNA, 122 bp, Homo sapiens
ggtgaccctcaaagccatctcagcccactttgatgactcgagcgcgtcctcgctgaagaacgtgtacttcctgctcttcgacagcgagagcatcggcatctacgtgcaggagatggccaagc

SEQ ID NO: 320556 - DNA, 122 bp, Homo sapiens
gagccgtcgtagtggacagctcaggcagatacctcagtgtcctcggagttttgggcagggcgttggggtggggagtggctaggaagaacttctcctagccggagcaggttgttggggctagg

SEQ ID NO: 320557 - DNA, 122 bp, Homo sapiens
ggggttaacaattttatatccactctggcaagagatggctcgttccttgtgcactgtctacgtatttccctatttcatccctggagagtttaaatgtccagaaaggtttcttccttcccaga

SEQ ID NO: 320558 - DNA, 122 bp, Homo sapiens
agcttgtaggccggctccggggacagttattgagcacgcgcagaggcggggcgtcgggtgcgcgcgagcgggcgggcgggccgacccggaggcgggcttcgggaaggggcggggccggactg

SEQ ID NO: 320559 - DNA, 122 bp, Homo sapiens
gggagggttgtgagcagggtttgggggacttgctgttgaaacaagtttggcgtgggaggacggacttcaggggcaaggctggaggccagagacctagaagacgctgatgtcccatcctgagc

SEQ ID NO: 320560 - DNA, 122 bp, Homo sapiens
cgttgttctgcatttcgaggctccgcctgctgccaccacaccgcgcacgcgagagaaagccgagggtttgtcctcttatgccaagttagggcagccctcaaagcagatctcgaagggaagac

SEQ ID NO: 320561 - DNA, 122 bp, Homo sapiens
cgcagagggtgcccacctgtgtgccagcgcctgtccggcgcctgcctgccgcctccgtggcgaaggggacacaggtagggactatccagctcatcgggggtctctgggccagagaaatgtgg

SEQ ID NO: 320562 - DNA, 122 bp, Homo sapiens
cctaaataaaatccctgatccaacggcatcatcttgggtaccagatttcttgaaaaatgacggccaggactccgtgacagtttagaccatcaattctctgcgggggaggggaaactggggag

SEQ ID NO: 320563 - DNA, 122 bp, Homo sapiens
tctccctctccccatttcttaaggttgaatggtcactggttagtattcatttttttcttccgacagacccatgggccatgctaaaataggttctttatatcaagatactagctgtcacatag

SEQ ID NO: 320564 - DNA, 122 bp, Homo sapiens
agggccgggggctgcattctccgagtgggctgggtccgggaaacacccctcccttccccgcgggccatccctggtggagactgcccaggaacttcccagcgcctgccgcccccagccctggc

SEQ ID NO: 320565 - DNA, 122 bp, Homo sapiens
acgtcacgaagacactgactttgcgttttctactcagcactgcatcactggtgtctgacacgaagcctgggacatgtaggctcccaagtggacctgtcctgggtaaatgaccattaatgaga

SEQ ID NO: 320566 - DNA, 122 bp, Homo sapiens
ctcagggagccggaaccacatgcctggaaaccctgagcccctgcccgccgccgtccaagccggccggctgcagcgcagtttgtttgccgaggtttgcatgcacatattcagttgcccttttt

SEQ ID NO: 320567 - DNA, 122 bp, Homo sapiens
ccggaaacggctataatcatttaatagcctttgccggctgcactgacttagcagagtgggcggtaggcaggctccagagtgctgtctggcaagatagtccccggctttaatcaaaatgatgg

SEQ ID NO: 320568 - DNA, 122 bp, Homo sapiens
ggagcctcgtggctcatgatggctggaaaacatcgcggccccattgttattgatactcaccgtctctatggcattattcgtcgcagggcaaagtctgtagcatcctaagagggttgaaaatg

SEQ ID NO: 320569 - DNA, 122 bp, Homo sapiens
taagcagtgcatcgtgggagcagtgggagcagcgacagcagctccgcacagcattatctgcgggctggtagctctttgtcaatagatgactcaactcacagagcaacttgacagtatccctg

SEQ ID NO: 320570 - DNA, 122 bp, Homo sapiens
gaagctcgggacccccgctctggcgaaacgaggaatatgacatacagcaaaacaccccttcgcggccgctgcactgccgcgacacacccggcgcctgcctctacagcaagccggcgaggggc

SEQ ID NO: 320571 - DNA, 122 bp, Homo sapiens
aaagttgtaggcgaattgggaagtggcatgatgatcacacaggaggcccctcagacccatcgatctcatgtctgtcctgttgcaggtgcatcaccatctacaggagaagaagaatggacttg

SEQ ID NO: 320572 - DNA, 122 bp, Homo sapiens
ccctcccgcccccctatcgccacccctttctctcgggattaaagcgtctccaattttcatcgccgtctttttagtgccgtgggttgttttgcttggaaacagtagccttggaaaaagatctg

SEQ ID NO: 320573 - DNA, 122 bp, Homo sapiens
gcctggaaggtgtttttggcttgctccataaggcaaggaggtccagcccacgcaagcccccgccctgttcgaggaaggaaaggcccagaacttgcacacagcaggcaggcccagcggctggg

SEQ ID NO: 320574 - DNA, 122 bp, Homo sapiens
agagtccttatttgtgcaccgtggggcacagttaaggagcaggaagaagacaaaggaggccgttatttatgtgccgtcctattatcaaaactttccgtggtggggcagggtgcgtggctatt

SEQ ID NO: 320575 - DNA, 122 bp, Homo sapiens
ccacctggcgtagctgaccaggcagagcagcggtgtctccagcagctgcaccaccaggagcggcccggacacctgcaggagcggcacctgcggggagagaagtcagctccgcgctcggccca

SEQ ID NO: 320576 - DNA, 122 bp, Homo sapiens
tattttatcgttttgacccacaaaaacagcaggattccgggattgaacccacagcctctccgtagtggcactgctgatgcttcggaccagggaggtccctgttgtgggggatggggacagtc

SEQ ID NO: 320577 - DNA, 122 bp, Homo sapiens
cgtagctgcccttggtgttgacgcagccctggtcacagctcccgttgctcatgctgcactcgtccacatctggaagcacagcgggcgtaagggcagaggggaggctggcggctggcggctgg

SEQ ID NO: 320578 - DNA, 122 bp, Homo sapiens
acttcgtgatccacctgcctcggcctcccaaagtgctgggattacaggcgtgagccaccgcgccagaccggaggccccttgagtataagaatcatgcatttccttgactggatgccctgtac

SEQ ID NO: 320579 - DNA, 122 bp, Homo sapiens
taattttctcactgttaaaatttttgcaaaggcgattgcagcgccccttgtccacacctgcgcgctccccaaggggtccctacccaccccgcccctggctgggggccgtaggctggccctgc

SEQ ID NO: 320580 - DNA, 122 bp, Homo sapiens
cgctcagctccgaggcccgcaggaggctttaaaaatggcctcctgacgacacttcctgctcggcgcggacggtaggagccctcggaggaggcatccttcataacgctgggggcggggagcgc

SEQ ID NO: 320581 - DNA, 122 bp, Homo sapiens
tctttgcgcacagacatctctccaaggtgacccatttggcacagctgaaataaataaccccgctcatgcccagagagcgggggaactgtcagaaacatttacgctagaatatcttgaaattg

SEQ ID NO: 320582 - DNA, 122 bp, Homo sapiens
gaccctcctccaccaagcactcactgttgatgttctgccgctggtgctcctcagccttcacggtgcctggcgggctggctgccagaggccgctcaccaccgtcggctgcccggccagcctcg

SEQ ID NO: 320583 - DNA, 122 bp, Homo sapiens
gaaaactgacacaggcttcagccaaccgaattgttttttaactctcttctccacagcgtgcgtggggaggcctccgtgaactctgaccttagctttccgtagcgcccgcgtctgccgccccc

SEQ ID NO: 320584 - DNA, 122 bp, Homo sapiens
gccacggcatccaggcatcggatgggaagggcgctgtggatgtcacggctctggctgtgccggtcatcggtaccagccccggctggggtcacggtccagaaaggagatccctccagatttcg

SEQ ID NO: 320585 - DNA, 122 bp, Homo sapiens
ccagcccgcagcgagtcggtaccttcaggatgtctgactcgtagctgttgttgttcagcacgccgtccagacacttgtcacccaggttgagctctgccgagatgaaggggcaatgttacctg

SEQ ID NO: 320586 - DNA, 122 bp, Homo sapiens
gtgtcaaccaaacacccacagagatgcatatagggtcacatatcaaatcacataacctcacggagaatgggcctaacctcacggagaatggggccatcagatacaccaaagcagacgctcgg

SEQ ID NO: 320587 - DNA, 122 bp, Homo sapiens
gcagcttcttcaccagggggagcaggacgtggccgccttggcgttcgtgggaaccctgggcggtgaccgcgccccctcacagacttggcaccgcccagagcccagccccttccctctccccg

SEQ ID NO: 320588 - DNA, 122 bp, Homo sapiens
ggggggtggggggggagaccaagaagtacagttgggagcgagggagcttcacccccggggcggtggttgtttcttttttctttctttcttttttcttttcctttttttttttttttctaatt

SEQ ID NO: 320589 - DNA, 122 bp, Homo sapiens
gggtagccgggcaaagccctggtgctcttgggaggggcttctttccctgctgacccctcccgtttctccctggcaggtctgggtgggcagccgagggctggggcagggaacacccaagggga

SEQ ID NO: 320590 - DNA, 122 bp, Homo sapiens
cagcctcggtctcagggcctcagtctccctgtctgggaggacaaccgcagctcctggtggcgaatctgacggccgtagctgcagcaaacaggaaggctgggcaggtctcaaacggagaagtg

SEQ ID NO: 320591 - DNA, 122 bp, Homo sapiens
gaggccccgctccccgaaacgtgaccatgtggattcaacagcttttaggactcaggtgagcgacccggccggcgccgggtgcgtgtgggcgcgtgggtgccaggctgggcggaagcggcgct

SEQ ID NO: 320592 - DNA, 122 bp, Homo sapiens
ttgtatgtttgtcctttcccagcctggagtgatgggaataaggccactatgttgacttagcggaaggaagggctgactcactgttcaccttccctgtacgttaccagctcgaggtctcagga

SEQ ID NO: 320593 - DNA, 122 bp, Homo sapiens
tggtggatggaggcagtgaggtcagggccaaaagttctggttcatctgtaacaaccagcacggactctgaggcacctgtatatgcatgagaagaacctgctgtactatagggaaataaatgc

SEQ ID NO: 320594 - DNA, 122 bp, Homo sapiens
gggtgggctgggagcccaccatctctccatttctctctctcacacacacacgcacacacacgcacgcggctgcaggcagtcacacacacgcacatcgacacagccacactgacacacgcacc

SEQ ID NO: 320595 - DNA, 122 bp, Homo sapiens
ccagatattcttgtgttaatgtacaactaatagctgctgaaaagaaacccttttgaatgccggtttagattagctgtgctctgactctcatctattgctggaaataatcagaaatttgcaga

SEQ ID NO: 320596 - DNA, 122 bp, Homo sapiens
cgagacaggggctgcctaagccccccgctcagtgagggttgcctgtacctggagccggggcggacgcaccgccgcccccgggtagctggggccaggcctggccagccaggcgggcgctgacg

SEQ ID NO: 320597 - DNA, 122 bp, Homo sapiens
aatttgtagcagtcttgaaaaactggactgagagatgtggatggtgggaagcatcttgtacggaggcaccagaggaaaagagggctttctgaagatcagtcctgagttggtacacaggatga

SEQ ID NO: 320598 - DNA, 122 bp, Homo sapiens
cctccgagggaaagctgcagccccggccgaaacgccccacccccgccgccgtccccagttcgcagatgggaacactgaggcccacagcagggaagccactggcccagaggcgcacagctgca

SEQ ID NO: 320599 - DNA, 122 bp, Homo sapiens
cgcggattggagcagagttgtggagctgggctgggctggggggcagcggcccccggccctcggcccccgaaacgggcataatagggaggggaccaagaggccgcgctttccagcgtggagac

SEQ ID NO: 320600 - DNA, 122 bp, Homo sapiens
aagaaggtgccgccaaggctggtccttcagtcacagcaaaggccctgtggccagcctaggcgaccccttcctgtggctaaccctccgcgatctgcaggcagaagtgtttctaggtgccccac

SEQ ID NO: 320601 - DNA, 122 bp, Homo sapiens
actcggaaggctgaggcagaaggatcacctgagcctggggaggtcgaggctgcagtgagccgtaatcgcaccaccgcactccagcgtgggcgagagtgagactctgtctcaaaaaacaaaac

SEQ ID NO: 320602 - DNA, 122 bp, Homo sapiens
tagattgaggacggtttctggcagtccctcctcgccgttgctgcaatgcagggtatttgccgctcatcttgcggcatggggggaggggaggagagaatggttttgtaacaggctctgcaggc

SEQ ID NO: 320603 - DNA, 122 bp, Homo sapiens
aggcctcggtgagacctggagtcagtgttactaccccaggatcccgtgaacccagctgtgcgtgcctgatgacagagcacaggctatgaatgcagctatttctacccctgccttctttggca

SEQ ID NO: 320604 - DNA, 122 bp, Homo sapiens
cttggccttgatttattgcactcacatgcagatgtcagagtgtgtttttaataatttcctcgaaacctctgcctggcttcccagcatgtttaagatgaagtctggcgatctgcctgtggcct

SEQ ID NO: 320605 - DNA, 122 bp, Homo sapiens
tgaatgcgcagactggaccccacctcttcgatttcaaagcacttaaaaatagtactctggcgtgcgagcggcttctaggacacggtgatttcctcctgttcctcgccctcctcttcctcctc

SEQ ID NO: 320606 - DNA, 122 bp, Homo sapiens
cctacgaagaggtagggcttggcaaggacccacggggcgtgtcctaggactcggtgagggcgtgacctcgggccaggggcggggagagaaccagagggcgaagtgggagggcacaggggaga

SEQ ID NO: 320607 - DNA, 122 bp, Homo sapiens
tgaggcgctctggggggagagcgctgtccgaagtgctgatcagacttcggatccacccaccgctcaggccgcctcccaggggctgaagggcggcagccgaaccggagagacgtgccggcggc

SEQ ID NO: 320608 - DNA, 122 bp, Homo sapiens
ggcgagctggagggggacaaatgaaacacttacatgaaatcactgcttttagctctatagcgggggcactgtggagaggtacacaatttgttttcttttattaaacaaacaaacaaacaaaa

SEQ ID NO: 320609 - DNA, 122 bp, Homo sapiens
aagttcaggtgggcctgtggcagggctgcccatggcccctggtgagcatgtgcggccagccgggccatgggggtgaggccggcttggtggcttggattgcctactcctctgcagggtcccaa

SEQ ID NO: 320610 - DNA, 122 bp, Homo sapiens
atggatgggtgagtgaactcatgaagggatgctccattagatgaacgcttggataaagggcgttagtggagggacagaattgcagctccgtcctcccagggggcgctgcaggcacgtctgct

SEQ ID NO: 320611 - DNA, 122 bp, Homo sapiens
tgacaggttatgtgaccacatgattcatcaacttcacaaccaggcttgggtggcacctggcggagcagcaatgcaaccttaaagtgggtgagtaggaaagagtaatttgcattatttcataa

SEQ ID NO: 320612 - DNA, 122 bp, Homo sapiens
tccacttctgctttctccaggaaatgagcagagacccagctccagtgattcagagtgaaacggcgctgaggactgacgatgtggggccgggtcctcttcccccgagcctgaggggctgcagc

SEQ ID NO: 320613 - DNA, 122 bp, Homo sapiens
cgcggtgaaagctactgccttctcccaagtaggggcctccagtactgccacagcaggggccgcattcctggcgcctcttcattcgaaaaacctctttccaggagacttcgctgattctgaac

SEQ ID NO: 320614 - DNA, 122 bp, Homo sapiens
gaaaagaaacataaggacctccgttcttcggtctccgtcccctccccttcccccgcgtgccgtccccacaacgggccaggactgaacccaactctcgaccaactcccggcagcaaaactaag

SEQ ID NO: 320615 - DNA, 122 bp, Homo sapiens
ccgggcgtgaagagcgcgatggccttgaggcagccatactcggccgagtcgacctgcaggcggcccagcttgtccacctgctcctggaaggcgcgcacctggtccatgaaagccacggcgcg

SEQ ID NO: 320616 - DNA, 122 bp, Homo sapiens
ggccggctcgcccgctagcgccagcctcccccgggcagcgcgcggagcagcggcgcgcatcgcctgctcccgaggcaatctccgcgtccgccgcctcctgacacttacgcccggcgaggggt

SEQ ID NO: 320617 - DNA, 122 bp, Homo sapiens
ccatctttcccaccaacgacccttcatcaaaagcccgccccgtcgcccaacccattggcccgaagagccatctgccctgcgtcctattggctttcgtcaagcccccgcccctgcaggtgact

SEQ ID NO: 320618 - DNA, 122 bp, Homo sapiens
ccatcggaaccccgcccggaggaagctgagggccgagaaaggatgaattccggaccgggtcgcccagccacaagtggaaacctgggctctctggaaaacgttctgatctcgatctggctatc

SEQ ID NO: 320619 - DNA, 122 bp, Homo sapiens
acgcggcgatggagccgggcaggacccagataaagcttgaccccaggtaagtgagggcggcgggccctgggccagtcgctgggcagcggtggcccctatcccgcggcctgtcctctctccct

SEQ ID NO: 320620 - DNA, 122 bp, Homo sapiens
gctcaccggggggcgctgtgaagccggcaccgggcggacagaggtgagtcggctcggaggcggtggctcccgttcctgcccgcgcgccgaggggcgaatcccaggcagcgaggtcgccgccc

SEQ ID NO: 320621 - DNA, 122 bp, Homo sapiens
ccccggacgtgcacctcaccattcaggaggagggggcagacgatgagctggaggagacctcggagacgcccctcaacgagagcagcgaagggtcctcggagaacatccatcagaattcctag

SEQ ID NO: 320622 - DNA, 122 bp, Homo sapiens
gaaaagggacggaaatgtcttgtggagacacagtatgaatgatagagcaagactgcttcacgaaaatgtaaatgatcaagttattttttcccaaggtttaggaatccctgaagggtctgaac

SEQ ID NO: 320623 - DNA, 122 bp, Homo sapiens
ttgtggcttagctttctctgtagatataaaaggcaaataaagcctgggtttgggtcctagcgctgctaccagacaaatgtggaacagtagaaaagtcctacaatctcctttagcttccgttt

SEQ ID NO: 320624 - DNA, 122 bp, Homo sapiens
aaacaaaatgaaaacaaaaagccagggctgcctctgctcaataatgttctatctttgttccgcctcttctctggggtctcacttcttgggagcctgtgtgaaggtgaattcctctgaaagct

SEQ ID NO: 320625 - DNA, 122 bp, Homo sapiens
catgtaccatttatatttagttgctggtcaaattagattttgaatgtgatcattatcctccggaatttgggcttcattggtgattaactccttaagccattgaagtatcttatagatttata

SEQ ID NO: 320626 - DNA, 122 bp, Homo sapiens
aaatttatcattttaccactttagtgaacacactgaacacctgggggagggctgtacattcggcgggaggattctctggggatgctgtgtggctactgaaggatctaggatgccccactctg

SEQ ID NO: 320627 - DNA, 122 bp, Homo sapiens
agaatgcctgcgaggaggctgtgggtcctaccctatcgccgcttacgcagtcccagcctccgcggcgcccccaaatgccgcactgttgagtcatctcagcgctgcctcctccgcgctgcgct

SEQ ID NO: 320628 - DNA, 122 bp, Homo sapiens
tgtctgtgtgaatctgtaaagtgggtgcagttctgggtcttgctgagccttgggctgggtcgtgctagggcagagtgctctgggcaggggctggggtccgggagtcagcccactcctctgcc

SEQ ID NO: 320629 - DNA, 122 bp, Homo sapiens
acctgttttgtctccttagtaactggtctcttagatttccctcttgtatttgcatgcaggcgagcatagcaaattgactgggggaagggaagaggttcacagcatacagaatgtgctctggg

SEQ ID NO: 320630 - DNA, 122 bp, Homo sapiens
ctcccccggagctctgggctccatatagctgtgacccacagagctctcaggaagggctcacgtgggacccccggccactcaaatcaggcagggagccctccctcttgaaaggtgccaggatt

SEQ ID NO: 320631 - DNA, 122 bp, Homo sapiens
gaggaaggcgaggaggaggaggagggcgaggaggaggaggaggagggcaaggaggaggagcgggctcagcaccgccccggagctctaggtccccgcccgccgccctcctcctagccaggcgc

SEQ ID NO: 320632 - DNA, 122 bp, Homo sapiens
tccagagcctcaggttgcaggccctctgcagaagcgggagtgtttcgtgtgctgggcgggcgctgtggacttggcttagttcccgccttcccttgctcgtcatcaccttctcttacccaccc

SEQ ID NO: 320633 - DNA, 122 bp, Homo sapiens
gattgcttttccactccctggggcttagagaacaaagagcccggttcacaggcagagactcgggggtgctcagcagcagcccagatttaggggacatttgagggactcttggggccgcagcc

SEQ ID NO: 320634 - DNA, 122 bp, Homo sapiens
atgttgttcttcacgcagagccctggagaggccgttcagttcccctctagggtccaactgcggctgagggccggttactcgagtccagccgcgcccattaagagacctctcctcacttgtaa

SEQ ID NO: 320635 - DNA, 122 bp, Homo sapiens
cggccggctccaagctccaccgcctcagtgagcaccctccagatcccgccctctaacccccgcctacagccccacccctggaacccccgcgtcctcagcgctccgccctctacttcaagttc

SEQ ID NO: 320636 - DNA, 122 bp, Homo sapiens
gaccggccgggggagggggtgactccagtagggaagacccacccacgccccgcccgccgccgcggaggccccgcccaccccgcctgcccacccctaccgcacccgcacgcccccccgccaac

SEQ ID NO: 320637 - DNA, 122 bp, Homo sapiens
ctgtttcctccctcatgatttttgctaaatctatgtgccaccttactattagtaaataatcgcacatttttaacttaaatgtcatactaaggcatctttagcaactgcaaatggaaacagta

SEQ ID NO: 320638 - DNA, 122 bp, Homo sapiens
gggggaacgggaaattaaagttccatttccggccatgaggaaggacgttgcccttccgcacgtccgggaaaggctttgcgtctttacttccgaccttctttaaaggtgaaactaacttgagg

SEQ ID NO: 320639 - DNA, 122 bp, Homo sapiens
acggctgcagctcgaggccagggtggtggaggccgagcggagcggaagggccgtggggtccgcggggcgcggcggggacccagctccgtggatcccgaggcgggtggatcctacagccccgc

SEQ ID NO: 320640 - DNA, 122 bp, Homo sapiens
ccctcacacccatttcccagcagcttcctgcgtcgagaggtgtttctcccagataccccgcgctgtcatccttacctacgactttgggtagtttctgcctccggagcgggatccggggcagc

SEQ ID NO: 320641 - DNA, 122 bp, Homo sapiens
ggggcctcaacaaggaccaggggtcctcgggtcagatttcacctcagccagcagtgtgaacgtgggcaatttatttgaactttgggaccactgactcaccttacgtggggataatatgacct

SEQ ID NO: 320642 - DNA, 122 bp, Homo sapiens
attggagcaactgtgtccacaccctctgtgatagaaatggaaaaaatatccccagaagatcgtggtgagaatattgggaaacacaaagtgttacccgcagtggtagacattgagaaaataca

SEQ ID NO: 320643 - DNA, 122 bp, Homo sapiens
aagacaagtttcatgtctgcggtctggaggcgacttggcaaacgaaggctctgccacttgcgcctgccctgcgcccctttattcagggctttgccccgccctgttgcccaatagacacccct

SEQ ID NO: 320644 - DNA, 122 bp, Homo sapiens
cccccaaccagtgccagcatactcagcgtggccggtgagtgggcaggagtacgggccacccgagggactcgggacgggcgtccgggctcgggtagtggtcacactcttggtctcctttgtcc

SEQ ID NO: 320645 - DNA, 122 bp, Homo sapiens
gagtgcagaaccacagacggcttcggctgtgcctagggcaacagccaacctaggagccagcgggctttcggggaaaaaaaagaaaaagacatctaaaataaaatgtttaaactgtttcaaaa

SEQ ID NO: 320646 - DNA, 122 bp, Homo sapiens
atacagaaaaccagccaccggcaatgcttgtctaagtgtgaagctttctgagaatgtgttcgctcaaacccactgtccagataacacatgaaaggtggccttggccgaaacgctgggcggtg

SEQ ID NO: 320647 - DNA, 122 bp, Homo sapiens
aacccaggaacgcgatagaccctggctgagtgagcaggcagcgtcatcagggccgccccgcgtgagccctacctgatgtgtctaagccaggctctgtgctgacttcgccagagatgactcca

SEQ ID NO: 320648 - DNA, 122 bp, Homo sapiens
tataattttattttaaaaaagactagactggttcttgaccatctaaatggattttgttaccgaataataagattaataaatagcagtgatgttctgatgtcatctgggggaccagaaaaatc

SEQ ID NO: 320649 - DNA, 122 bp, Homo sapiens
gaggactcacacgggagagaagcccttcaaatgcggggagtgcgggaaagcctttaactgcggctccaatctcctgaaacatcagaagacgcacaccggggagaagccctacgaatgcacgc

SEQ ID NO: 320650 - DNA, 122 bp, Homo sapiens
aaaagaagcctcatttattgatcactaagcattctttcacacgtgtaagaatctcttatccgagatcacaccattgcactccagcctgggctacaagagtaaaactccatctcaaaaacaaa

SEQ ID NO: 320651 - DNA, 122 bp, Homo sapiens
cttttctttaaattaagccatgcaagtaatttataccaatctccttttcagaggcagaaacgaagtctgtttttgtatttaaagattacctcagcatagctgacaatcctgggcagttatgg

SEQ ID NO: 320652 - DNA, 122 bp, Homo sapiens
acctacgatattaaaaaaaagacagatgcacattgtgaagctattaaaataaatcaccgtcggtttaccaacaacaggggcatttcctctagtgtaggaatgggacagttgatttaaggaaa

SEQ ID NO: 320653 - DNA, 122 bp, Homo sapiens
gagcacagataggcgaggctggttaggagcagaccacgcccatggcaggggtctccccctcgggcacgcgtgaggaactggaggtctgaatggcttctgtcccctgcagagcagctgtctga

SEQ ID NO: 320654 - DNA, 122 bp, Homo sapiens
caatacatgatcgttatgttaattactttcaggggttagtgtcaatgtctttctaactttcggcctcaatgtagacatagctcagctgtgtctacacagctgggcaagtcctcctagcaccc

SEQ ID NO: 320655 - DNA, 122 bp, Homo sapiens
aatcatttagctcccacttagaagtgagaacatatggtatttggttttctgttcctgtgtcggtttgctaaggataatacattcatgtccctgcaatggacataatcttgtgcttttttaat

SEQ ID NO: 320656 - DNA, 122 bp, Homo sapiens
agagtcacatgggccctccagagggcactgcagtgggttggcaccggcatggtcagtgcccgcatggtcagtgcatttgggaaagcaagtgggcagagtgggcagtgaccggtggtcagtca

SEQ ID NO: 320657 - DNA, 122 bp, Homo sapiens
atattttgaatttttcatgagtccagtttgtcagttctttctattctatctgtgctttggcgtcatatccatgaaagcactgtcaaaccctatgtcatgaacattatacccaatgttttttt

SEQ ID NO: 320658 - DNA, 122 bp, Homo sapiens
cccattccagggctgtcatctaggacacttcttatcacctaaataaccggggaggcaaagcgctttcttaagagatggatccagaagaacaatgctggttttctgtacaaaaaggggctgtg

SEQ ID NO: 320659 - DNA, 122 bp, Homo sapiens
cagtcgaggctgactgctgggaccgggtgattgctcagtcctggactctgaggaccagctcggtttagtcaccacttcctggggaaggcagtggcaggggagggaggaggagtgactgagat

SEQ ID NO: 320660 - DNA, 122 bp, Homo sapiens
attgcaaaagacctcacccctctgccctcccccgcggttttccagtaactcccgcccctccgcgcttgccccgcagctgattcatagccccggcccgggccgcctctgcacgtccgccccgg

SEQ ID NO: 320661 - DNA, 122 bp, Homo sapiens
gcggcactacccggttcggccggtgcctggctggagggcgccggagagcctggagcagggcgccaggaggccggagcaggaggagaaggagtaggaggaagtggtcactagcgcggcggccg

SEQ ID NO: 320662 - DNA, 122 bp, Homo sapiens
acttgtccaggcccttggttctgagccagcccctccagccccaggacagatggctgtgggcgctatttttagagctctcctgagatggggagttcagggctctctgtcaccattttatgggt

SEQ ID NO: 320663 - DNA, 122 bp, Homo sapiens
aattttattgctcacaagttctaccttccacaaaacactagaacgcagcccagcaaagttcgttttccctttacaacaaagagcaccttttctctagtttccaataattgttcatcatttct

SEQ ID NO: 320664 - DNA, 122 bp, Homo sapiens
gccctccattaaggtctgcactgtttcattttatccacatgctggcctcatgagggaggtcgtgttatttctcctgtttattaggtgaggaaagtgacacttagatgttgaattaagtaact

SEQ ID NO: 320665 - DNA, 122 bp, Homo sapiens
cggtggtggccaggcagttggccgcgctgcttctcccgcagaggggacccccactgggggcgaaggcttggcctgccctcttcactgctgtatttccagacctgatgcctgcgtttgtgaga

SEQ ID NO: 320666 - DNA, 122 bp, Homo sapiens
atttccatagctgtcagagggagagcagcccaggtgacaggaaatgaagttgtctggctccgagtccttactaggaggacttctgggatccagaatctttgcatggggcagatgacatattc

SEQ ID NO: 320667 - DNA, 122 bp, Homo sapiens
cgactcgcccgcgatggaagaaacggtgagataacagtgcgggacctggcgacccgcacccgcggccgagcccgagcgcaccggagccggagagatcacagcccttgccgaggccgggattc

SEQ ID NO: 320668 - DNA, 122 bp, Homo sapiens
tgggccgctcggcgagcgccgctcaaaggctaacgtgcctgcttgtttctacccgacctccgaagcccagacgtgcttcagcaagccgcgtggctagcaaactttctctctgctgctgcggg

SEQ ID NO: 320669 - DNA, 122 bp, Homo sapiens
cacctgcggcctcgcacacttgctcctggagctctgacgcagctgcctccctcacatccacgcagtgattgccactcaaactttgagaatcacagtggagaacattctgtgaatattgtttt

SEQ ID NO: 320670 - DNA, 122 bp, Homo sapiens
gcgcatccaggtggggtgagctgggaatcacgtgctgaatgctaagggcctggatgatcacggcctcagagggagcaaatagtaaaggcagctgtgatctggggagggccagaaactggaga

SEQ ID NO: 320671 - DNA, 122 bp, Homo sapiens
agcaacgcgtggagaggaggctggcactgcaggcaggcgtggaggccgtcagcagtgccgcgctaacgagcccgcccggggctggagcccactcggaccgccgggccaggggccatgtgggg

SEQ ID NO: 320672 - DNA, 122 bp, Homo sapiens
aaggcttcagtggagaacctcagaaaccagataactcggctggccggttgcggtggctcacgcctataatcccagtactttgggaggctgaggcagttggatcacgaggtcaggagttcaag

SEQ ID NO: 320673 - DNA, 122 bp, Homo sapiens
ggctcaccgggaggggcccgggcgagagagcgcgtgggtgcgtgagtgcctgtgtgcgcccgccctttgcttgctcggggtgtccgcctttgtcccccgccgcgggcctccacggtgggatc

SEQ ID NO: 320674 - DNA, 122 bp, Homo sapiens
atttagaatattttacttattcagaagctaaaactccagatgagaatgcatactggccaacgacttgattacagctttggaagaccctaagcaaagaatctaactaagccatgtccaaactc

SEQ ID NO: 320675 - DNA, 122 bp, Homo sapiens
cctctttcctccctgttcccaggttctctggactgctgcacggaagtcccaagaccacttcgttggcagcttctgctggtaaagggggtcaggaggggacccccaaacacactgatcctggg

SEQ ID NO: 320676 - DNA, 122 bp, Homo sapiens
gtttctttgcacgtcggctcacagctctagaagtactcacggacaaatgtggaggcgccccgcagcaccccacaatccctttcacttttccacgtctgtcgagacaggacatgcatgactca

SEQ ID NO: 320677 - DNA, 122 bp, Homo sapiens
aagcggcagtcaggccctggggggctcaggaaatgctggggttccctccacagtttgtgtcgtctgagcacccacctttggaaatacagtgaggagtcagggaggagacttgtctgctcctt

SEQ ID NO: 320678 - DNA, 122 bp, Homo sapiens
atgcagggacgcctgtttctgtcctcacaccacagaaagaaacctgagggaaaactgagacgtgaggttcctgatttaagaagcctgggtttcttcatggtggggggccatttggaatgaca

SEQ ID NO: 320679 - DNA, 122 bp, Homo sapiens
tcaggtgctaggagcgcggtgacctaccaccctccgggcacgcgttctggccacgcctcgcggcccctttcattgaaagagcccgtagggatcacgtgaaagaacactgcagagtgcgtgac

SEQ ID NO: 320680 - DNA, 122 bp, Homo sapiens
attcagaaggctgccaaacctgtatgttgctggttttgtctcctctggagattggtgtgacgctcatgaaggggactcagccacctgtgcaaagcccagccctttattaagtcactgggcat

SEQ ID NO: 320681 - DNA, 122 bp, Homo sapiens
gtcttccctggaggctggaaccccccgggactcctggacaccccaaaccaagtccccagccgctgcctccacgacggccccgacccccttcagggaagtagtattttaaagaggatgcggtc

SEQ ID NO: 320682 - DNA, 122 bp, Homo sapiens
tggaaatgatttgatttgttgtctatggaattgcacaacctggagccttcctaacatcagcggcttcatactggcatttccattgtggtgcagcaacaatctgagtgagcctccgtctctag

SEQ ID NO: 320683 - DNA, 122 bp, Homo sapiens
gctgcctgacacatcggtagtgcaacaggcaagtcagagacggctgagtgcttacgctaccgtcacggagcacaagacccacggtgccttcacgcagaggctagaggaaagcccctgccagc

SEQ ID NO: 320684 - DNA, 122 bp, Homo sapiens
ggaatatgcaggctgaattgcagccccaggctgggtcctgactgtgtccctctccacagacggcgtacacagcgtgaccgcccagtgcgcgctgcgtgtgaccatcatcaccgatgagatgc

SEQ ID NO: 320685 - DNA, 122 bp, Homo sapiens
agggcgcagagcgctgggccggagcggcctccccctccccgagctcgggggtcctttagccgctggggaccggggctgcagcctctgcagctgggtttcccactctgacaggcgccatttta

SEQ ID NO: 320686 - DNA, 122 bp, Homo sapiens
tggtaggagtttgttacaaaagtgagtccatgggcctgtggaatgtgaggggagtgggtccgctccaccagatgccagcaccggggccagtgcagctcagagccctgtggcggactacaggg

SEQ ID NO: 320687 - DNA, 122 bp, Homo sapiens
cggtctaagacgcccttagctttcccttccccacgcctcccccatcaaccctccctaagccggcaggcagtctcagccgttccagaaattgacaaagaagttgcagagggagtgccacttct

SEQ ID NO: 320688 - DNA, 122 bp, Homo sapiens
agggctagagatcttcatacatatcaaactgtatgattgccagaagcgtaaagtcacagacgaaatacacacccacgttgggattagcagtgacctgtggggaagctggaggccaggagagg

SEQ ID NO: 320689 - DNA, 122 bp, Homo sapiens
gggatgtgaggagcccctctgcccagctgcccagtctgggaagtgaggagcgcctcttcccggccgccatcccatctaggaagtgaggagcatctcggcctggccgcccatcgtctgagatg

SEQ ID NO: 320690 - DNA, 122 bp, Homo sapiens
tttcgcctaaccccaggccatacgaattttcccctgtgtttttacctaagggtttgatagcgttaggttctccatttaggcctttaataaatgttgtgtaacattttgtgaccgccatggcc

SEQ ID NO: 320691 - DNA, 122 bp, Homo sapiens
ctcggtggaggaggacgaccgccaggagtggacgttcacgctctatgactttgacaactgcgggaaggtcaccagggaggtaggtgagcttgtgtttgcgtcaggtccacagtagtagacag

SEQ ID NO: 320692 - DNA, 122 bp, Homo sapiens
ccgcccgttttcccgctgctactcaagaaagtaactgtcccctgctgctctgtgtaaacgcggcaccttaaatgattattgcatggaccacggttactttgtgtgtctgtgcgcgctgcccc

SEQ ID NO: 320693 - DNA, 122 bp, Homo sapiens
tgcccgctgcaggtgctctgtcagcagtgacttctcactacctggcatcctctgaattcacgagcagtttgaagaatgagcaaatactgagcaaagctcataggattaaatacacacagacc

SEQ ID NO: 320694 - DNA, 122 bp, Homo sapiens
agttgagatagagttgcaccatgttggccatgctggtctggaactcttgagctcgtgatacgcccgccttggcctcccaaagtgctggaattacaggtgtgaatcaccgggcccggcctctg

SEQ ID NO: 320695 - DNA, 122 bp, Homo sapiens
cccagagtctccgctttagcctaggaaaagctatgccatccatgcaagcaatcttactcccgattaaagactttcaaagactgctcccattaaaacataggaacaacacattaacccgaaaa

SEQ ID NO: 320696 - DNA, 122 bp, Homo sapiens
ctgcccagctggccctccccactatccagcctgcacccctccagcatgctcaggacctgccgggagggagggacagcatgcacactcccaccctgccagagccttcctcctgtgctcactgt

SEQ ID NO: 320697 - DNA, 122 bp, Homo sapiens
gcccttcctggggttctggggcctgggccaggacagttaggctaaactgactctaggccacgcggaccccgtggggcggggcggaacctggcagggcgccagtgaccgctggggccagagcc

SEQ ID NO: 320698 - DNA, 122 bp, Homo sapiens
cggaggcagtaaacaggaaaccatcgatcccgtgcaggaaatgaccttgtttgaaggcaacgaaggtgtcgcggatttccctcgttttccttcagttcctttctaaactcatttccgtgttt

SEQ ID NO: 320699 - DNA, 122 bp, Homo sapiens
gtgtttgcaaaactaagctcctgggctttgcactggatctattaaagtggaatcctgggccgggcgtggtggctcctgcctgtaatcccagcactttgggaggctgaggtgggtggatcaca

SEQ ID NO: 320700 - DNA, 122 bp, Homo sapiens
cataaaagccacgtgatcaaattccaggtcattactcaaggaaagggacccctctgtggtcgacagcgacagtttcaaaccaattaaaataagcctggcgtttctgcgggctgccgcccgtg

SEQ ID NO: 320701 - DNA, 122 bp, Homo sapiens
cccagggcagggcagcttctttcaccacggtatgcccagcacctagcatagtggccggcacggagctgatactcagtaaaaagacgtgtgtgaatcaattaacaaacgaatgcctcctccgg

SEQ ID NO: 320702 - DNA, 122 bp, Homo sapiens
caaaaactaagtccaaagcaacagctgcgccaggacggagagcccacagtgaaattgctgcgtgcgcccagggcggcggcggcgccaggcaggcgcggatcccgctgcgagggacttgcctg

SEQ ID NO: 320703 - DNA, 122 bp, Homo sapiens
gctgcctaaatgggttcagaatgaaggccgctctctcgcccatgtggggctcattaaccacgaatccaattattaagacaagctcagctgagcaaatggtcaaacaaaaaaacatgtggaag

SEQ ID NO: 320704 - DNA, 122 bp, Homo sapiens
gcgggggccgtgtcaggggagcaggctctggaacactcccgccaaggccaagagggctcccgcctcccctccaagcggtggaaacccgccctccgccagactctggcggtgggagcggctcc

SEQ ID NO: 320705 - DNA, 122 bp, Homo sapiens
cacaggcatgagccatgatgcccagcttgcaagtggcattttaaaacacgcagatctggccgggcatggtggctcgtgcctgtaatcccaatactttgggaggccgaggtaggcagattgct

SEQ ID NO: 320706 - DNA, 122 bp, Homo sapiens
tgatagaagggtcgtagatcttgaaccaattgtcagcataccacccaatgaggaaccagacgtacttcttcccaaagagacgctccttgtacacctgaatacagaggagaatggctgagttt

SEQ ID NO: 320707 - DNA, 122 bp, Homo sapiens
ttaccggtgcagccagcacgtctggaaagagactcgtcagctggcacctggccctgtgggcgccgtcagctcccttagaggatgacgtggggtggaaagggcctttccacatgagtggtttc

SEQ ID NO: 320708 - DNA, 122 bp, Homo sapiens
ccgcccccggacgctgcccgggccccgccccgacgcacacgcccaggtgcggctgcacttcgcctttgttctcgccacctagcggtccggcgtgcccctgcaaggacccggcaactgctccc

SEQ ID NO: 320709 - DNA, 122 bp, Homo sapiens
acagtattttgttgtgtgactatccacgtacccacttttctctcagtgctagttttacctcgtttacctccaaccaaaccaaaccacccacacaggtgacacagttttgtgaaacctctaga

SEQ ID NO: 320710 - DNA, 122 bp, Homo sapiens
agcagccactgatgctgtgtccttgacacgcatctttctcaccttttgattcttttcagacgtgggtcagcagcgtcatctgccctttttagctctctctccaagtctatccccaattttct

SEQ ID NO: 320711 - DNA, 122 bp, Homo sapiens
ttcatatggctgcccagatagagaccatatttcccagacttccctgcagctaggtgtggccgtatgactaagttatgccaatagaatatgaatagaagtgacgtatgcaatttctacaacac

SEQ ID NO: 320712 - DNA, 122 bp, Homo sapiens
ataagagagaggacatgagagccttctgagggctggaaacattgtatatcttgatgcagacgatggttacacaggtgaatacatacataaaaattaatctagctatccacttaagctgtaca

SEQ ID NO: 320713 - DNA, 122 bp, Homo sapiens
gttttgtaactgataccatatgctttactcagtccccaaatgcaactagacaaaacccatcgtcaatctgttccagattgtcttgtgtattttatggctaaggactgaattgcaagctaaca

SEQ ID NO: 320714 - DNA, 122 bp, Homo sapiens
caacaagaagcgatctgagtggctggcgcccactggggctaaaggttaaaggctgccctgcgctacggggcgggatcagcggggccaacaggctgacgggcttccccgctgtccaatcagaa

SEQ ID NO: 320715 - DNA, 122 bp, Homo sapiens
ggagcgcagctgcaggcgttggggcggcaggagccgcggagccggcgctgagaggggctgcggccggagcgggcggctgagacaaaggcgacggtgagtgcaatgccagccccagtcgcgcg

SEQ ID NO: 320716 - DNA, 122 bp, Homo sapiens
gaggcttcggtaaagaatttgaaaatagacggaaagctcttccaggaagttagctcgtgacggtcggtgcctgcaaagaacaacacattcggttaccaggtggccacgcggggccaggcgcg

SEQ ID NO: 320717 - DNA, 122 bp, Homo sapiens
tgcaaaatgacagccattgaaaaaggcatgctagttcttttgcctttttctgtacttggtcgcctgtgtccctaaacagacctcttctcggcagggtttgctcagcaagtcacttgatgagt

SEQ ID NO: 320718 - DNA, 122 bp, Homo sapiens
cactcttggcaggtccctggagccaggcgttaatcattgacctgattagcaagaacgctccgggtgcgcaggcaacacacgccgagggttggtgggtctcccgggaactggaaaaggcacca

SEQ ID NO: 320719 - DNA, 122 bp, Homo sapiens
gagtgaatgtaatgctctgtaatttaacaggtcttagggtttcacaggggtcttagtcaacgtgggcagctataacagagtatcatagagtggtggcttacacaacaaacatttatttctca

SEQ ID NO: 320720 - DNA, 122 bp, Homo sapiens
cccggctggtctctaactcctgggctcaagaacatttgactgccttggtctcccccaaagcgctgggattacaggtgagccaccgcgcccggcctgatttgtagtaatttaaatccaagtaa

SEQ ID NO: 320721 - DNA, 122 bp, Homo sapiens
cagctcagtagttgcttgtggaacattttacaactacagaatgacccagaggcagagccacgtgccttgctgcagttgcaggtacatgcactcaacagcatgtccatgaaccctgttctctt

SEQ ID NO: 320722 - DNA, 122 bp, Homo sapiens
attagcatacagagacaagacatcatattgtgtttctttgggggtgattacctctgtaatcgttagactaacaagaaaattgtgtgtgatagaggcacaaaatagaaaatgattctttctgt

SEQ ID NO: 320723 - DNA, 122 bp, Homo sapiens
acctcatgatccgcccgcctcggcctcccaaagtgctgggattacaggcgtgagccaccgcgcccggccgtaaaacattatttttaaaagtttgattagttgggatcagaaataaaacatac

SEQ ID NO: 320724 - DNA, 122 bp, Homo sapiens
ttgggggacggagagcagaggtgttaaaaagcggcttcccaaaaatcctttctacacagtcgctctccggggagaaaagctcccaccgcctccaaatctttccgcggaagccacttttgtgt

SEQ ID NO: 320725 - DNA, 122 bp, Homo sapiens
tcccacgatggcgggacacagaccgcggcacagccccccgtgctcagtggcgagcagccacggccacctggtgtgcacgacgtgacacaccatctcaagcgcaggaggcacggggacagcca

SEQ ID NO: 320726 - DNA, 122 bp, Homo sapiens
gctccttttagtgcataaattagtgatggcatttcccggagagcggagcacaacacagggcgccgggctcgggctcggcggctcggcttccccagtgcctgccaccgacttccccaccccct

SEQ ID NO: 320727 - DNA, 122 bp, Homo sapiens
gcgcccgcagcggcgctctatttttagcaggcgctgtggcaatataaggaatgcgcggcgcgctaggcgctcggggcgcacgctggcggcgcggtcgctttaaggaggcgccggggcgggga

SEQ ID NO: 320728 - DNA, 122 bp, Homo sapiens
agggctcaaaccccccaccgcgcgcgcctttcccatgcacacctccacccgccccgggcccggccggtcctgaccccagagagcagctccagctcgcaggaagcccaacgggggtgtaggcc

SEQ ID NO: 320729 - DNA, 122 bp, Homo sapiens
cttcctcagcctgtggccaggcgggtgcaggctcaggcgggcaggcaggcaggcagtcggcgggcgggcggacgggcgggcgccggacgccactcgcccagggtggtgagggccatgcttct

SEQ ID NO: 320730 - DNA, 122 bp, Homo sapiens
ggccatccggcccgtgcactacggcaaggaaatcgtgcgcttcaccgtctactgtcgctacgacaactatgctgacagcctcaggttctaccagctgattctccggaggagccccagccaga

SEQ ID NO: 320731 - DNA, 122 bp, Homo sapiens
gttaaaattctttgcacgggagcctttcccagcccaaatataccacactgtggcgttcctcgtgccgaccgtgggtctctaacctagccaccttctcccgttgaaatatgcacatcgctatt

SEQ ID NO: 320732 - DNA, 122 bp, Homo sapiens
tcgtccctgctgactccgaatcgcagtcagagtcgttctgcttgtgccgtgttgaattcccggcatccggcatccagactcagcctcctccccaggccacggccgccgtggccagtcggtca

SEQ ID NO: 320733 - DNA, 122 bp, Homo sapiens
gacagtgatgtactgtgaaatatgaagaaatggggacagagttttggaagagcagaggcacgtcacgtgccttaagttttagcttttattaagaagtcaaacaaataccatttgtacctcat

SEQ ID NO: 320734 - DNA, 122 bp, Homo sapiens
acaggagcgctcagaggaagcagcgtggagaagcggaagccggagcaggcccccactgagcgtgattagtatcaggagtggggttccactggaacacttccgaagattgcagccctgctgcc

SEQ ID NO: 320735 - DNA, 122 bp, Homo sapiens
atatgaaattcacattttggtgttcataaatgcagtggcactggcccacagcggccacctcgacttatttctgtgtcgtcaatggcagcctcagcatcacagcagcagggctgagtagctga

SEQ ID NO: 320736 - DNA, 122 bp, Homo sapiens
aaccggccccctccccacccatgttctgcccctcagaccctacagcccctttggaggctgcgggacagggaggggaccacctcattcccacaaccgaatcccctaagcattcaggtgtaggt

SEQ ID NO: 320737 - DNA, 122 bp, Homo sapiens
aaatgattgttgcaaacactgttgatgtctcacccagaaggccttcaccaccaatgtgcccggccccagctgctgcttcgctggtggacaaggcttatatgcctgtgttctctggagaattg

SEQ ID NO: 320738 - DNA, 122 bp, Homo sapiens
tttccaccaatcagcgggaagcctcggccctgtaactgctaatgggagacagcagcgccacgccacaggcttttcccctggtttcgggaggggtggggagccaggtggggctcccgcccaga

SEQ ID NO: 320739 - DNA, 122 bp, Homo sapiens
ctggcccgtgagactcgtgatctccttggcttcaccggttcttgtccttcatctacaaatcgcagttaaaaatgcattacccccctgtgactgttaggcaggtaaataaaagtgatacacac

SEQ ID NO: 320740 - DNA, 122 bp, Homo sapiens
gtaaaactactagaagaaaacatagcaggaaaaccacacaacactggtctaggcaatgatcgtttgcattggacctcaaaagctcaggcaatgaaagcaaaaatagataaataggattacat

SEQ ID NO: 320741 - DNA, 122 bp, Homo sapiens
acaatttttcaaaatcattgccaacttcataggttaaaaaccagtattttaggccaggtacggtggctcatgcctgtaatcccagcactttgggaggccgaggcgggtggatcacttgaggt

SEQ ID NO: 320742 - DNA, 122 bp, Homo sapiens
cgcggctccagcgcgacgcctggcggcccacccgcggagcagagcgcggcgcgcagctggcgcggcccccgccacctgtgcaccgcgccgcccgctcccccgcacgcctccaccagctccgg

SEQ ID NO: 320743 - DNA, 122 bp, Homo sapiens
cgaggcgcggggtgcagagcgcaagggcggagtcccagacactgcatccaggtcccagcgcgcgaagcctctgttctggaaggaggactttgcgcagcccctccaacactggcgcctcccgg

SEQ ID NO: 320744 - DNA, 122 bp, Homo sapiens
tgcctctgcattcagagacctcatatgcatcaggaaggcaactggccagagcaagtccctcgttaaaggaagcactcatggtggaatgtggataataggccaccccgtgcacactaattact

SEQ ID NO: 320745 - DNA, 122 bp, Homo sapiens
acccaaaataaccgacacacagagtgcccgaaatcagacaggaagccaaataatccggggcgttgagtcgctttgccctgactgcgagagccgggtgtagggcggggagccaaggatctgac

SEQ ID NO: 320746 - DNA, 122 bp, Homo sapiens
ttgcagggaataggacaaatactagaatgcagattctctatcaaaggtagcaacatttgacgttttaactaaagatttatcctttaagctgttgtttaattttgagtgctaattcctcaatg

SEQ ID NO: 320747 - DNA, 122 bp, Homo sapiens
aaggcccaaggatgaatgtccctgacagggcaagccaggccccagggaccctgaaggaggcgggtattcattttgccttgaagttcgtccccttgtctcaatctcaaacacagaatatcagc

SEQ ID NO: 320748 - DNA, 122 bp, Homo sapiens
gactttgtgggcattttggttgtacactccgtttaactctaaggctgctgaaaatcagcacgtggtggatacagcatttgtaagacaggcccaaggagatatccggcatacattgcagaagt

SEQ ID NO: 320749 - DNA, 122 bp, Homo sapiens
aaatatggaggggctcactgtgtcacagacctgagccctgtctatatgcacctgcgtgtgcgtgtggatatctatccaaaaccagatattgatatagatacgagtatggataagacgtgagt

SEQ ID NO: 320750 - DNA, 122 bp, Homo sapiens
agtttatgagcttttctgggcatctttgtgctccctgagcttacagcatctgctaccaaacgaagtgcttagggaatacttggggaactgaaatcaacttgaattttggcatttttgacagg

SEQ ID NO: 320751 - DNA, 122 bp, Homo sapiens
gcaccgtatgtagcagtgtgcgagcggcgacgacagcgggagccgggcgtggcgcccccgcgtccagaccagaccctggagcagttccacgccaaacgatccgggcacctggggaagcgggt

SEQ ID NO: 320752 - DNA, 122 bp, Homo sapiens
ctgcgcctctccgtctcttacagaagctgcgccgcctcgcgccgcctttgcctttatagccgccgatatgctaatcacccgagccgggtagccaatggccgcctccccctcgcgtcgcccct

SEQ ID NO: 320753 - DNA, 122 bp, Homo sapiens
tccctttcttctcaccctcccttcctctcttactcgctccttctccctccctcccttctgcggctgccgctagtctctcggtctggctctctctccgacgggacttagcaacttcttatttc

SEQ ID NO: 320754 - DNA, 122 bp, Homo sapiens
cgttctgagcctcgcacctcattgagaggttattaatagggagtttgtctggtgtcagagcgcagacataaactgcattagcattaccccataatcttattttgtaaacgctcatgccgttc

SEQ ID NO: 320755 - DNA, 122 bp, Homo sapiens
tcattcgaacaacaagacaccttattggttttattacagatatcatcacctagccctcagcgactcaaggtgtcattattttgccttccttacacccactgtgttaatttctggaccccagg

SEQ ID NO: 320756 - DNA, 122 bp, Homo sapiens
ccgcgcggtcaaagctgtagagtgggcagctgaacaccacacagttggccgtgccccgggcgcagtcctagggataaggacagacaggggtctaagccactcagctcaaccctgctgagact

SEQ ID NO: 320757 - DNA, 122 bp, Homo sapiens
ttccagctgcatccaggtaatcccggccttcgagcgggagagatgataccccccgagggccgggcctggtccggctcaggatgcgtgccctgtgaaaatgctcagcagccctcgcctttagg

SEQ ID NO: 320758 - DNA, 122 bp, Homo sapiens
aaatccaggtataacttttgactcccccgaaacttagcctactgttgacaggaatccttacgatagcataaacagttgctgaacacctgttttgtgtgttacatgtatgatggactgtattc

SEQ ID NO: 320759 - DNA, 122 bp, Homo sapiens
ttgtacagagccctatattttgatgtttgatttatgtattcatacttacatgataaaacacgtacatctgagaaatcatttgggaagaagaaggaggtgaagaagcatttaaattattttat

SEQ ID NO: 320760 - DNA, 122 bp, Homo sapiens
caggttatggtgaactggaaacctagaaacgggcctctccaacttcgaagttcccagagtcgggggcgccgggcgcgggcgcggcgggcaggctggggtggggggcgggcagctatgtcgtc

SEQ ID NO: 320761 - DNA, 122 bp, Homo sapiens
tcctgaaagtaaagtttaagcaaagaagctatactatgtggttatttctcatttctcccacggcaccaaaataaacagaaatcaaactttgataatcctttgagtctgtagaagacacgtat

SEQ ID NO: 320762 - DNA, 122 bp, Homo sapiens
cttgcgggggcgaggcagcccccaacccagcaggaccaaacccagagattagccacttaacgccgcccccgggtccgtgtgcgaatcccttactaaaaatggcgggctggctccgggggctg

SEQ ID NO: 320763 - DNA, 122 bp, Homo sapiens
ggcctcccctttctctcgttcagtgctgcccctttgtcttgggtccagtctctgactcctcgtagctgctcgcttggaccaggctggccgtggtgacagcactgtgtcgtccccgctcctag

SEQ ID NO: 320764 - DNA, 122 bp, Homo sapiens
agatcatgttctttgcaggttcgtgaatggaactggaggccattatccttagcaaactaacgcaggaacagaaaaccagtaacacatgatttcacttgtaagtggaagctaaatgatgagaa

SEQ ID NO: 320765 - DNA, 122 bp, Homo sapiens
ttgcagggttttgttttgcttctgttggaaatcaggaggagagtgggcattttgttcacacgccattgaggcaaaatgtttgggatgtgggatttggctcatgtccatttttctggccgact

SEQ ID NO: 320766 - DNA, 122 bp, Homo sapiens
acccacaaattcatctcccagacacgtgtggatcagggcccagggggcttacagaagcagcgcggtgcccctgcgcaccatctgccccttccacgagtgggcgctgagggaggatccagtcg

SEQ ID NO: 320767 - DNA, 122 bp, Homo sapiens
tggtagcttgcaaaggtaattgtttgtttttagacattgccagcatgtggaatatcccagcgaaccaagaagcagagctgggatgtggtattaaaagtcatacaaaggtatgggcatactgg

SEQ ID NO: 320768 - DNA, 122 bp, Homo sapiens
agcctcctgctgtctctggagctggcgtccggcagtgggcagggcctcagcccggaccgtcgggcctcgctgctcacgtctcttatgctggttaagcgcgactaccgctatgatcgggttct

SEQ ID NO: 320769 - DNA, 122 bp, Homo sapiens
cctccgccgtcccttattccgaggaggggcgcccgtggggtaacacgttggcgcgagggtcgggggcgcatttatccttaagtgcgtttattaaatcgcgtctggagatggatggacgtgga

SEQ ID NO: 320770 - DNA, 122 bp, Homo sapiens
ccccacctgcactcacccccatgcccatggccagttcctctttttgcttcaggaaaacgtcgttttcccctggaaaccagcgtttgattcaccaactcgcacagtaggcagcctggagacgg

SEQ ID NO: 320771 - DNA, 122 bp, Homo sapiens
ttacaggcgtgagccaccgcgcctgggaagtgcgggaggcctttttaaaaaatgtaaactcgcgtgctcaagaagccctatcggagggaaacacccagaagaggccaccctccaaacacagg

SEQ ID NO: 320772 - DNA, 122 bp, Homo sapiens
cctggggccgcccgctcgggcccgtgttgtctcaggcagtagggacactggcgctgacggcgggggtaggaaaccacagagactggcaacttcccaggttcctagagaggaggggcatggaa

SEQ ID NO: 320773 - DNA, 122 bp, Homo sapiens
aggatcccgagcccagagtccaggctcaaagccatcggcagttacttggcaatttattcccggtttctcagaggtaacagccaacgcaggaacagtgtgttgctccctttaaaaaggcttag

SEQ ID NO: 320774 - DNA, 122 bp, Homo sapiens
cgaactcctgacctcaggtggtccagctgctttggcctcccaaagtgctgagattacaggcgcgagccacagcgcccgttggggttgactttaaaacacaaccccatccaatgaagatttca

SEQ ID NO: 320775 - DNA, 122 bp, Homo sapiens
ccttccggtagctcggtcactagggtcagttttatgactctcagtggaccctaaacagcacgtaatatatgtatttttcaccgccaaatatatcaaacacaataattcaccctccgttccct

SEQ ID NO: 320776 - DNA, 122 bp, Homo sapiens
tttcctggtctttctttcactttgttttatttctgtgtggacaaacaatggggaaaatgccgcgcgtctagccaggcagataagaaaacaactatacccgtcaggcccccaacccggcgccg

SEQ ID NO: 320777 - DNA, 122 bp, Homo sapiens
cgacaagctggcttcaccgcggaagaaccccatggatgaatacctgcagggcatgatgagcgaggccccagggcccatcaacttcaccacttccctcaccatgtttggggagaagctgaatg

SEQ ID NO: 320778 - DNA, 122 bp, Homo sapiens
ctccactcccccaaggatggcggaatcaggccgttgtcgggcagctctcgacccggaagtcgctcgcggcgcgaggcccccgttgccgagcgcgggcgcggggggcggagctcggcggagac

SEQ ID NO: 320779 - DNA, 122 bp, Homo sapiens
acacctggaactggatttggcggcgctgctgccgcgccgcctctgccgcggtcctagagccgcttggcttcacgctccgcaagcatggaacagccctcaccacacgcacccgcgcggggggt

SEQ ID NO: 320780 - DNA, 122 bp, Homo sapiens
cgaatgacttcctataataaataaactcagccgccaagaaggcatctccagccctgctggcgcgaggccccggctctgcggcttcggagggggcgggggtcaccgcggtacaaaccaagccc

SEQ ID NO: 320781 - DNA, 122 bp, Homo sapiens
gagggacctctctctccccgctggtattcgactccgggcgcccccgcagagcgtgggccgcgattgcggggcaggcagaccccatgatagctcctttcgggctctttggcactctccgggtg

SEQ ID NO: 320782 - DNA, 122 bp, Homo sapiens
ggtgacctcagtagtgaggagaagcaggatgaacaaataggagagtgggaagaatgatgacggagtgagagattatataagatttgatcatgctaagagtttacttcagagtgaagaaggtt

SEQ ID NO: 320783 - DNA, 122 bp, Homo sapiens
gttgccggacacagtcaggcagagccggttgctcctcccctggtttccgtggtgtttgaccgaaacctttgccaaggctgtcagtgtgctggatttcactgactgtgcaccacgtactcctc

SEQ ID NO: 320784 - DNA, 122 bp, Homo sapiens
cagatctagccgaggtaactcacaagtgcaccttgagatcctccatgtgtctgtcaacagcgataggcaggatctgcgcccagctcatgctgcattctaagaactctcatttcatttgcata

SEQ ID NO: 320785 - DNA, 122 bp, Homo sapiens
aacgatggctcatgtctctcaacatttgcccaagggaatggtgcctaccttgcaactcagcgtgatgtcacctttattagccattctggtgtctatacaaaatatttgctccccatttcttc

SEQ ID NO: 320786 - DNA, 122 bp, Homo sapiens
ccagcctcaactcagccctctcctagccggcggggggtgacagtctctgtgatatctttccgtcccgccggcaggcggcgccctccggcccttgtttcgttgggcccggacgggacgtgcgc

SEQ ID NO: 320787 - DNA, 122 bp, Homo sapiens
gtaataactgatggtctcttcttgtttttaaggtagctattgtcaggtttgcttgtgacacgttacaaaggtcggcaatggggcctgcattcctatataaatatttttatcagcactatctc

SEQ ID NO: 320788 - DNA, 122 bp, Homo sapiens
gcagggcagtgtggtgtccagccggatccagcatctctccaccatcgactacgtggaggacggtgagcagcccttctgtgcatgtgcacacacaaacacgcatgcgcgtgcacacaccgggg

SEQ ID NO: 320789 - DNA, 122 bp, Homo sapiens
acctcagatgatctgcccgctgtggccacccaaagtgctgggattacaggcgtgagccaccgcacctggtctgaacattgaatttcaaagtaagatgaaatgcttatgaatttcagcgaaca

SEQ ID NO: 320790 - DNA, 122 bp, Homo sapiens
cctgagagtttaggtccaataagccatgatcccaccactgcactccagcctgggagacagcgagatcatgtctcttaaaaataaaaaataagtcgggggcagtggctcacgcctgtaatccc

SEQ ID NO: 320791 - DNA, 122 bp, Homo sapiens
caggctgcccgactgcagaccacgtgctcttccctggccacccacctcctaccatccccacgcttggggcttccctgctcagtgttactgtcattctgggaggccttggggccctcagcccc

SEQ ID NO: 320792 - DNA, 122 bp, Homo sapiens
gcgttccttccccggcgctgcccgcgtgtttttctgctggctgttccactccatctcctgcgcgaggggatgctctggatcagccgctacccagcagcttaggaaagaggctctcggctgcc

SEQ ID NO: 320793 - DNA, 122 bp, Homo sapiens
tatttctctgggtttctgaatgcaaagacgagaaagtctcaacagtctgctaaactaacacggccttcgaatcccaatctgaacacagtagctgaaacaagctgtccacaaagaggaaagcc

SEQ ID NO: 320794 - DNA, 122 bp, Homo sapiens
gggctgcgaaccccaactggcgggcgacggggactccgagcagcagcttgtggaggccttcgaggaaatgacccgcaatctcttctcgctgcccatcgacgtgcccttcagcgggctgtacc

SEQ ID NO: 320795 - DNA, 122 bp, Homo sapiens
caaaacgatgagagacagagaagtatttgaatttgcactaatggccaatataactggccacgaacgtgatctctttatataggatagatatggaattatcttcattccccatgcagagaaga

SEQ ID NO: 320796 - DNA, 122 bp, Homo sapiens
ctatatatgatgctacattgccttaaagccctctctagggctttaaaaagttttcggaaccgtatctttaacagagcggacaaatccagtaagatgacagttcgtataccatcatccatacc

SEQ ID NO: 320797 - DNA, 122 bp, Homo sapiens
gtcctctgggggcggggcgcgagtggcctctgcaggccagtcccttggtgaggtcacacacggaggcggggctcaggattggggggcggaatcatgcgcagggggcggggcccgagagagag

SEQ ID NO: 320798 - DNA, 122 bp, Homo sapiens
tgcctccccactcctcacccccactctgccacttccccttccccccacccccaccccgcacgcagcccccaggtaggaccccgggtcctctccgaggtccttaggtcgggacggtctcctcg

SEQ ID NO: 320799 - DNA, 122 bp, Homo sapiens
gtcaggccacccccaggtcaaacagaagcgggtgtctgctcgcaggctggatggaggggccgccagaagggcctgaagatgggatgggcccaagggcccccactctctccctggggcctctc

SEQ ID NO: 320800 - DNA, 122 bp, Homo sapiens
aacaccaggacagaaatgatagcctatgaggacagcactgaccctcatagaccaaaacttcgctgtggggatgatgtgtacgttggcctgtcctgaagcaggaggtggtcttaatgggctga

SEQ ID NO: 320801 - DNA, 122 bp, Homo sapiens
gtagaggcgccggccggtcccaccgccatgtgactttccgggccgtacacgccgcggaaccggcagataggctgacacagcacctgggccgagcaggcctgcagcttccctctgcgcgctca

SEQ ID NO: 320802 - DNA, 122 bp, Homo sapiens
gtagctgcgggccctgaggccttcgtgtatgtagcacagggagccagcagagggagctgtcgtcccagaactttcttagagctgctaagaaattctgattttgaaaaagatcttcctaggct

SEQ ID NO: 320803 - DNA, 122 bp, Homo sapiens
ttggccaaagagcgcagcagttttatgttattgagcagcacaggatgaatcgaacacccacgatggctagacagaggcgcctggctgtgactcccagaggttcaggcaagccatctgacctc

SEQ ID NO: 320804 - DNA, 122 bp, Homo sapiens
acccgctcggcaactccaaccatgagggtcactacctgattctcataggcctcctctcggcggcggatggggacatcgctggcacacacatacacgtagacctggttgtcacaggcaatgcc

SEQ ID NO: 320805 - DNA, 122 bp, Homo sapiens
ggtgcctgaccggggaccagcgaagcacgagtctcgacgcaggacaggggcggctgcgggcgcgcgccctcccctccccgtgagcagcctacaccaagaagtttggatgctgtgcgactccg

SEQ ID NO: 320806 - DNA, 122 bp, Homo sapiens
ggtcctcagtgagaaagtagccctgtctctcctccaacctctggacatgcaggttgcttgcgtgctatttatgttttgattgacaagtgtatgctctgtctaggtaagtagagaagcacctc

SEQ ID NO: 320807 - DNA, 122 bp, Homo sapiens
agcatatcagtcactgggcccaacatatccatttttaaaccctttcccccaaatacactgcgtcctggttcctgtttagctgttctgaaatacggtgtgtaagtaagtcagaacccagctac

SEQ ID NO: 320808 - DNA, 122 bp, Homo sapiens
tagatctcaaattaggagaatttgaaagttacagcttagagttggaggaaatagttttcacggggatagatttcatggcttgttactcaccttgccccataactagttacacttgaatccca

SEQ ID NO: 320809 - DNA, 122 bp, Homo sapiens
cacccagaggcgggcagaggggctgtcttttccttttctcgttgctgcccagggaggagacggggtgacctttcccacaggggcagcctgtggcgatgtggcagctgggcctcaccccggca

SEQ ID NO: 320810 - DNA, 122 bp, Homo sapiens
agatcagatacggggcatggaagagagagaatagtgaaagaaagctccaatattttggcccgagcaactggaaggaccaaattgcctcacaggtgggcagaagcccaatgttggacacatcg

SEQ ID NO: 320811 - DNA, 122 bp, Homo sapiens
agctccaaccctgcttgcgccccaccatcagtcagcggatccggctagccccgcccctcccgttctagccccacccaccagcgttggcacgagcccgcccctcgcgcgccacctccgccttc

SEQ ID NO: 320812 - DNA, 122 bp, Homo sapiens
gaaagcttgctccttgggttgaaggaacatccattcatggcctcaggatttagagactgccgagtgccttgacccagcatttctgacactaggctcagggtacttggggaagaggatccaat

SEQ ID NO: 320813 - DNA, 122 bp, Homo sapiens
ctgtagctgcagaaagagcgcctactgtttctaacaccagcagcagaaagcgcttcctcccgccctgggtggctacaggagcagggcctgccaggggttcaagcaccactttctacttccag

SEQ ID NO: 320814 - DNA, 122 bp, Homo sapiens
gtttggcaaatattccctgtgggattttctgcagctcttgtctccacaagtgtttgttcacggtgatgacatttaaaacaggtgcttcatgtcttagaattccaagcttggtgatgctccat

SEQ ID NO: 320815 - DNA, 122 bp, Homo sapiens
gacagcggaaagccagagctccctggaggatctggctgagaggcagaaaatggccctcagcgctctcggaacggtccttccagaagaactgatgaaatagctactacgccaggcacgtggca

SEQ ID NO: 320816 - DNA, 122 bp, Homo sapiens
aaattaaaatgctctattagaaaatattcactttgccagacgttcctcgccgggagtcgtcggggtttcctgcttcaacagtgcttggacggaacccggcgttcgtcccccatcccggccgg

SEQ ID NO: 320817 - DNA, 122 bp, Homo sapiens
ttgctcttctggagtctgtgtgaatgaaagcacacagtgcacgctccctggccagctgctcggcgtcattattctttttttttttttgagatggaatctcgttctgtcacccaggctggagt

SEQ ID NO: 320818 - DNA, 122 bp, Homo sapiens
gacgggcagaatgcctggcgctaagacgtggacggcagaaccgacagcagccctgcagcacgtggcctggtgcagaacctcggatggagcagggacctcgcttaggccccacccacctaaat

SEQ ID NO: 320819 - DNA, 122 bp, Homo sapiens
aacaccggcatttactcaccgatgctctcgtcttgtctgactttatgcaaacactgccaccgccagcgtactccggacctctgtgtgcccagacacggggcagacgccctgccaggcccaat

SEQ ID NO: 320820 - DNA, 122 bp, Homo sapiens
cctgcggcgcgggtaagaggcggcgggagcgcgcggcccgggagtgtggctgcagtgcgccgggacaccagggctccgcgctccgcactcaagaggctcccgcgtcccaacccctcgcgccc

SEQ ID NO: 320821 - DNA, 122 bp, Homo sapiens
tcacggtgggcctctccgcgtggctgtcggccctgccgcccttggaatccatggcacagccgggtccctctgcagttcctggggaagctggcattttgctcctcactcagggcggctttctt

SEQ ID NO: 320822 - DNA, 122 bp, Homo sapiens
cagaggcaaactcgagggctcaggatggtccatctgtcctgtctccccacagcaagcccacggtcttccactaccagcctgggcctccccagatgtcctgcggactcttgcccagatctcgg

SEQ ID NO: 320823 - DNA, 122 bp, Homo sapiens
tgcccaggctggagtgcagtggcatcattacagctcgtcacaccgaggaacccatgtgggcgttttccagttaccacgcgcgccctccagcggtgtttgcgggaatgacggctggtcgggac

SEQ ID NO: 320824 - DNA, 122 bp, Homo sapiens
atgaaatgggaaagtgatctcaggagagatgtgactagataatctatggtagaaattacacgatgaccttgggaaactaaactaattgggcatggtcaaaatttaaaatctgatctctattg

SEQ ID NO: 320825 - DNA, 122 bp, Homo sapiens
gctccagacccccggggcggctgccgggagagatgctggaagaaacttcttaaatgaccgcgtctggctggccgtggagcctttctgggttggggagaggaaaggaaagtggaaaaaacctg

SEQ ID NO: 320826 - DNA, 122 bp, Homo sapiens
ggagcgggacaaagggccgggtatgcgcggggtagggtaactgcgggctgccggaggcaccgcaggacttcgccagggcagtcctcggggttccaggacacgggctgggggcctgaaggagc

SEQ ID NO: 320827 - DNA, 122 bp, Homo sapiens
tgcactcgctgcccacaaagcgccagctgaggggccgctgcgggtggagtgcggcggagtcggcctcgcgaccccagcttgatccgccgcctgctgcaccgcgcctccgccgcgttcctgcg

SEQ ID NO: 320828 - DNA, 122 bp, Homo sapiens
ggggcagggctcgggacctgtagcccgccatgcctgagtctccccccgccccttccccaccgccatgggctcctgcacggcctgagcctcccagacgagcgccatcccctgctccacagctc

SEQ ID NO: 320829 - DNA, 122 bp, Homo sapiens
gctttttgtttccacctttggcaactctgggacaacaggaaaagtcctatcatgcgtgagcgccacacacacacgcgcgcgcgcgcgcacacacacacacgcacgcacatacacaagcacac

SEQ ID NO: 320830 - DNA, 122 bp, Homo sapiens
cactacaccgtcccctaagtgacgccaaaatgcactttctaacgtctccggagggaagtgcgcttgcgcaaatgctaggttacacttgagtaactccgggaatgactgggtgggtggggcgg

SEQ ID NO: 320831 - DNA, 122 bp, Homo sapiens
gttggcccagcaggaaggggcacagaagacaggagctctgagagccggccaaggtccagacgcagagaaagcagatggtgtggaatgagcgggcagattagccagcctgtgggctcgacccc

SEQ ID NO: 320832 - DNA, 122 bp, Homo sapiens
aggctttggatgtgcaggcaaccaatgtatgtattgtccataacactctacctgacaaaacgcccacctgatggaactgacaaatgagttaatgtatctacaacgttcaacagcgtcaggca

SEQ ID NO: 320833 - DNA, 122 bp, Homo sapiens
gggttccatttcccggagccacaagccacagtgagagccggcttgagtttgcatcaacaccggaggtcaaaccaggctaggagagggcatttggaatttcatttcctccggctctctggctt

SEQ ID NO: 320834 - DNA, 122 bp, Homo sapiens
ttttccccttttggagatgtggcagtctatgaaaacctgctaatgtaggcagcgaggcctcggattcctatgtaatgaactcttcagatagcaggagactcgggaagaggacacggaactgc

SEQ ID NO: 320835 - DNA, 122 bp, Homo sapiens
ccttcactctcttgcctttcctttctgtagccccatcaattgaataaacatgcaggtttgcgtctcatcaacttcaggccttggatttgcattattttagctttatgtcaatatttatattt

SEQ ID NO: 320836 - DNA, 122 bp, Homo sapiens
gcccgcggagccacgtcaggcccccagctcccccggatcccaccacgcaccaggcccctccgcccggcaagtggcccaagcaggcatccgcaacggaaggacaattttaaaaacaaaccctc

SEQ ID NO: 320837 - DNA, 122 bp, Homo sapiens
tggggaagggaaaatgaccctggggtttgggctgtcgaggcggccatcacttctggtgggcggcctggagcccagactctggcatcaggcagatctggctgctgaccagctgagtgaggttg

SEQ ID NO: 320838 - DNA, 122 bp, Homo sapiens
acaagtgctctgtgtgtagggtgggcggaagtcagggcgtttgatctgaattctaaagggcgttgttcagagccccacaaaggtctcattgtgcagacactgggtataaagcagcatatgac

SEQ ID NO: 320839 - DNA, 122 bp, Homo sapiens
tgaatttcctcatctgagcaaattttgcattttagcagttttccttggacagatttgttccggtcccttaaaatatttacaggttgcctgataatttagcatttcttgctcactcaggcatc

SEQ ID NO: 320840 - DNA, 122 bp, Homo sapiens
atttcttacaagaactggtgacacaaaatggaagccctccatgtcagctccgtgggttagcgaggcgagggagggtttgtatcgtgccttccaggtgtgtggcataccatgtgcacctggtg

SEQ ID NO: 320841 - DNA, 122 bp, Homo sapiens
agaccaacctggccaaaatggtgaaacctcgtttctacaacaatacaaacattagccaggcgcagtggttcacgcctgtaatcccagcgccttgggaggccgaggcggtcggatcacctgag

SEQ ID NO: 320842 - DNA, 122 bp, Homo sapiens
tgtcaggcccacctggctgagtgcaggaagcaagcgcttttcaggagctcactgcaacaccgggcaaacacttcttccgccagggatgcggttaggacaatgccacgtggcgtcacagtatg

SEQ ID NO: 320843 - DNA, 122 bp, Homo sapiens
caatctaaagtctatggtttaatctcttacttaaatacattcatttgcatttgagtaactcgacagtgatgcagggcaggcgacccccggaaactggggtttagcccacgagggttattggc

SEQ ID NO: 320844 - DNA, 122 bp, Homo sapiens
cgttaaaaaataaagttcatcacagtctgctcaatggaaaatggttttaccacatatatacgctaaactaacaacaaagaattacatagtagcaactattaagacaaatagaaggaaaggag

SEQ ID NO: 320845 - DNA, 122 bp, Homo sapiens
ggaagtgcgagtctcacttccttccggatctggggcatcatggggaatgtagtatttccccgttaagaaaaaagtagtaaatcctaggccgggtgcggtggctcacgcctgtaatcccagcc

SEQ ID NO: 320846 - DNA, 122 bp, Homo sapiens
cttcacattgttatctacagatgattgcagaaaggctagtaccagccccaccttccagtacgaggacatggttgcaagataccttttttttcagggtcatatacatgtgaaaagcacagact

SEQ ID NO: 320847 - DNA, 122 bp, Homo sapiens
tgactcaggccctgttctagggggtgcctgtctaggggagacaggatcctggcccagcctcgacatcctcgtgtctggagggccaaaagagaggactcagaccctgcccttgggggtcccca

SEQ ID NO: 320848 - DNA, 122 bp, Homo sapiens
gtgctgctgcattttcatattacgattattgaccgctgagggtgactgtgctgtgaggcccgccggaggcaccagaaggcacaagcctcccactgcccctttccccgccaagtcccgcaggt

SEQ ID NO: 320849 - DNA, 122 bp, Homo sapiens
aagctatctttaactttcttatttgggatatgaaggcagcttttcttttttaggtttgttcgacatgggtgaatcaatgaattgcacttcaacagcaaaattggattgtattgattggttgg

SEQ ID NO: 320850 - DNA, 122 bp, Homo sapiens
gcgcgagcggccggaggtgctcagcctggcccgggagctgaggacgtgcagcctgcggggcgccccggcgcccccgccgcccgcgcagccccgccgctggaaggccggccccagggagcggg

SEQ ID NO: 320851 - DNA, 122 bp, Homo sapiens
cttgttttacttgagggaagatgatatttgaacattctatagcatccgtcaacaggaatgcgcacatggtttcaaataagggttttcagccttctgaaaccaattacttctgcctaagtgga

SEQ ID NO: 320852 - DNA, 122 bp, Homo sapiens
aaggctggtgagtaaagagttttccaaatcttggtcatgcggagggtgtagttatgcggccggagctgtcactgagaggcaggaggggcttggggggaaaggacgaaggctcaaccaggccc

SEQ ID NO: 320853 - DNA, 122 bp, Homo sapiens
gccaggatgagggtgcggggggcctagaacccgaggctggtaggagagcaaactctcaaacgcgctgaaaccggcccatctgggagaaatattagggcgcatgtctctcccggagggcttcc

SEQ ID NO: 320854 - DNA, 122 bp, Homo sapiens
aaggatgacgtgatgctcttcggaccccgccggccgcagcttcccgggaggtcgccgcagcgcagccggtgactgcttggtcgcccgcaactgccactcccccgggattgagactcctttag

SEQ ID NO: 320855 - DNA, 122 bp, Homo sapiens
cactgggctacttcctggagctggtgccagaggtggctcagggctaggaggtctgctgtccgcactgcccttggctgccgggccccaggcttcagccgaggcttcagtgttcttgggggtgg

SEQ ID NO: 320856 - DNA, 122 bp, Homo sapiens
tctttgttcagcctctgaaatgtccccagctattagaagctttagttgggcatgcagtaacggagccaacatcaaaggggccaagactcctaatcacataatcactgctgtcttgaagtttt

SEQ ID NO: 320857 - DNA, 122 bp, Homo sapiens
gacacccaggctgaaaacccagcagaacataaccgtgcaggtctccgacgtcaatgacaacgcccccgccttcacccaaacctcctacaccctgttcgtccgcgagaacaacagccccgccc

SEQ ID NO: 320858 - DNA, 122 bp, Homo sapiens
agcgagcgggtttggtacccagtcctcctgcggcagcggcccgagcaggcaccgccttcccgaggcagagaaagcctggggtgtagctcgctcagagccaggaaaaacctgggcaggcgctg

SEQ ID NO: 320859 - DNA, 122 bp, Homo sapiens
cggtactgccacctgccggccgtgtgctggctctgcccgctccctgctcttcctccagctcgagtcctgtcctcccagagctctgcccgctgcccaaacccttctgagcccctgcctccagg

SEQ ID NO: 320860 - DNA, 122 bp, Homo sapiens
atccgactcagtgctcgccccgcggccctcgatccctcgttggaggggaaggcccccagccgcatcttcgttttagaaagggaggagtgggaaaagccagttcaagagggggcgtctgaggg

SEQ ID NO: 320861 - DNA, 122 bp, Homo sapiens
gataactggaaggaattatttgccccaaaacaatttctaggtccacactgttatgcgagccgcagcgagatacacacatggaagctctatgtgatttttggctcttaagaagttaacatgct

SEQ ID NO: 320862 - DNA, 122 bp, Homo sapiens
gccgggcgccgcccgtccccacctccatcagaactcgggtcatctgcggagccttggctgcggcccggtacctgggtgtgactccgccactaacattttcccagcaggaagcagcaagctca

SEQ ID NO: 320863 - DNA, 122 bp, Homo sapiens
ctgcacatgcgcaaaggcctgtcacggcggctgagccgggccaaacgtgacggaggaagccgggagtgaagaaaagccgaagggttcaacaggggcggggtttaaatacgcagttgggaagc

SEQ ID NO: 320864 - DNA, 122 bp, Homo sapiens
ctgctgacacttggcttgctggggacattggttggaccagctaacatttgctgtccatcccgctttaaggcaatcaaaaagccaccccatctgttaaccttggcagtatttagcttgtagat

SEQ ID NO: 320865 - DNA, 122 bp, Homo sapiens
gggaaacttggctcgggagtcgggccctggactctcattagcatttaaaggcgcccggtgcgctttctatggctccaatccgccgggacgcgagcgcgcgggtcgcgttgcagaaccaagga

SEQ ID NO: 320866 - DNA, 122 bp, Homo sapiens
gatggtcacagttacaggaagtaccaatataactatattgtaccaatatatcgtaatgtgcgccaacagtggtggtcctttttggtcctttttttcttttctgtgttctactttaacatttc

SEQ ID NO: 320867 - DNA, 122 bp, Homo sapiens
tctggagcccagcggcgggtgtgagagtccgtaaggagcagcttccaggatcctgagatccggagcagccggggtcggagcgggtaggtaaactaactcagggaattggggaccgaagcctg

SEQ ID NO: 320868 - DNA, 122 bp, Homo sapiens
ccgcacgcacgcctgcccaacggacgctgcatccctgggcgcacgcccctccctccccagcgctgggatggaaggtcacgcttcacaatcgatttcacagccacttgtccttttttatcaac

SEQ ID NO: 320869 - DNA, 122 bp, Homo sapiens
cgtgagcatccgtaaacctccctgctgactgtgaccctgccacacctgctcctcgtactgcgccgctacacctgacctcaggaggacccacagccgacttcaggaggacccgggtgccggga

SEQ ID NO: 320870 - DNA, 122 bp, Homo sapiens
gtgacggtggttgcactagccgtggacataaaagtcgctgaactgcccccttcaaagggacgaggtacgtggaatgtgcgtcgcatttcaatagagctgttagaaatggcgggccgggtggg

SEQ ID NO: 320871 - DNA, 122 bp, Homo sapiens
cggggccgcgggtcggcggattggccgcgctgcattttgggacctgtagtttcctgcgctcgtggcgctggcgccgcggcgttggctgagcccttgaccggggctggagggaagggccgaca

SEQ ID NO: 320872 - DNA, 122 bp, Homo sapiens
aagtaataaaatgcacacaaaacaatggatagaatatgaaaatgtcttggaaatacgacccgtcaggactaggtaggtctcgcccaactgcgacagagcggtcgcccaggacgtggacctgc

SEQ ID NO: 320873 - DNA, 122 bp, Homo sapiens
gccccccagagaaaggtctgtgatggggtgattctgcttggaaaggttgccaggaaaccgcgagcataacgcagaaagataaaacgaaagccctaaacgccgccgtgggaatttaagtccaa

SEQ ID NO: 320874 - DNA, 122 bp, Homo sapiens
ggagccctctccgccttttgcctttcatctctcttaaagagtaacatgagcaaccggtggcgatcagcccaggtggggttgtgggtctggataacagtttggagcaaatcaattagtgcttg

SEQ ID NO: 320875 - DNA, 122 bp, Homo sapiens
tgctgcctcttccagagaggcttcagaatgaacacacaaggaagaaacctgaacttgattcgctgtctggagccatgtcactccacatacagcaggactcagagctgctttaggcaacctac

SEQ ID NO: 320876 - DNA, 122 bp, Homo sapiens
gggcagcaagaagacagcaggcttccgggtcccactggctgggaagacacagaggtgctacggctggtgcggccacccggcgagacggctcccagggcttcactgaaggtgagctcatctgt

SEQ ID NO: 320877 - DNA, 122 bp, Homo sapiens
attccacaccctcgcaccgcaggggcgaggaagtgggcggagtccggttttggcgccagccgctgaggctgccaagcagaaaagccaccgctgaggagactccggtcactgtcctcgccccg

SEQ ID NO: 320878 - DNA, 122 bp, Homo sapiens
caacgtgttgggggttcggggtgtgtggcggctgaacagctgcctgaagttctctgatggcgctggagggagctccagagaagaggtcatggggagaaggcacaccttaaacgccccggggt

SEQ ID NO: 320879 - DNA, 122 bp, Homo sapiens
aactgggggcccacttgtgcctagagggcgaggtctcggtagagccaggctgtatcagtccgtgacactccagccagaggcgatgccgacggctgccggagaaagccgggcttagagcgcca

SEQ ID NO: 320880 - DNA, 122 bp, Homo sapiens
ataaagacatgcatgtgacagggcctctgcaatgtccaggaacatgtccgggcccgtactcgccactctggtgcagccaggcatggtctggccactactgcacaccggcactgtgttttcag

SEQ ID NO: 320881 - DNA, 122 bp, Homo sapiens
caggggcggcgcgtacctctggcagcatagcccctcccgcacgagcgggccccaaaagggcggtccccgggagcccaccaggctgcactcaggggatggtgcgcctgacccgcctgctgcgc

SEQ ID NO: 320882 - DNA, 122 bp, Homo sapiens
gcggaggaagcagagacaatgtgccaacacggggtgcgctcttcacctttacgctccactcggagcaagcaaggaaatcctccagctctagcaggggttgagggttagcgccacctggcttt

SEQ ID NO: 320883 - DNA, 122 bp, Homo sapiens
ccactgtgggtgttggtagacctgtgttgttgcctaggagagcgagccctgcaaaggagccggcacagccctagttggagaagcagttaaccacggactggtcacactggggctgcctcagg

SEQ ID NO: 320884 - DNA, 122 bp, Homo sapiens
tgccccaggattgtgctggaagtgctggttgtgctccgaagcatcagcgaacagtgccgccgtgtgtccagccaggtcaccgttgcctcagagctgagacacaggcagtgggtggaaaggac

SEQ ID NO: 320885 - DNA, 122 bp, Homo sapiens
caggtctctcgtgccaaggcagggggttgctggagaccccggacactgtgtagcctcattcgtcctcctccttcacacatcgcacccggctcccttactagcaatcagtggctctgacaagc

SEQ ID NO: 320886 - DNA, 122 bp, Homo sapiens
gacagaggctgggggaggatctggtgatggagacacgatggcacagccccggtgaagccacgtgatgtcttcgtgtgaacatggtggcgggggagcgccgggcacacaacatggtgggtgtt

SEQ ID NO: 320887 - DNA, 122 bp, Homo sapiens
tcaggaacccagccttttgcagcctctcatgggtggaagatgcaccggcacagtcagactcgaccacccttgaatctggatcaggtgcaggcagtgcatgccccacccggggatgccccctc

SEQ ID NO: 320888 - DNA, 122 bp, Homo sapiens
atatatatatataatcactctttgatatatataatcactctttggttccccacagctgggcgcaaggtgcgccgtggatgcagccctgagccacgcgatagccccctcgagaccacctgggg

SEQ ID NO: 320889 - DNA, 122 bp, Homo sapiens
ggccctcctttcctgcagaagcacctgcacaccagggcaggccctgcccactgtgggttccgccctccacctacagctcagtgttcctccccttccagtcctgagcaggcagctcctacctg

SEQ ID NO: 320890 - DNA, 122 bp, Homo sapiens
cacactgcacacatgaagcgggtatggccagcggctcacactgcacgcgtgaagtgggtacgaccagtggctcacactgtacgcatgaagcgggtatggccagcggctcacactgtacgcat

SEQ ID NO: 320891 - DNA, 122 bp, Homo sapiens
actaactatactaatcatgctttcacctctgtggacacatgatctcagccattatctaaccgcttccaccagtccgcctcaagtttaaggaatattgtaaattgaatccatggtaaggattc

SEQ ID NO: 320892 - DNA, 122 bp, Homo sapiens
caacaatcattttaatatatagtcaatggctctttgtggaagggacaaaaagaaactacgcgcagttgttgaatagactttgcgctaggcaaagacaggttaatcgagggccgcatcgcgaa

SEQ ID NO: 320893 - DNA, 122 bp, Homo sapiens
ccgtgacggcattcaacagcaccttgactgcattcaacaacactgtgactgtcacagcaccgtgacggcattcaacgacaccgtgactgcattcaacaacactgtgactgtcacagcaccat

SEQ ID NO: 320894 - DNA, 122 bp, Homo sapiens
ctccctgggagtgcctggtgcgaatacatagctcccactgagaagcttggccccggtcagcggctccaggagcccggaacctcctccctggcggaatcccgggcaccattcagccttttcga

SEQ ID NO: 320895 - DNA, 122 bp, Homo sapiens
ttcagctcaggttttctgactaaggagataaaaacatctcctggactatttatttttttccgtgacctaacccaaggactttgcactgggttggaccaatgcaggcagctcttgaggccttc

SEQ ID NO: 320896 - DNA, 122 bp, Homo sapiens
cgcttaataagtgccagttttcttctgccacttcccagctcacccctactcctgagaggccggcagcacctctctgcacgcccctctgcacacgggcggtgctgatggcctgtctcctcccc

SEQ ID NO: 320897 - DNA, 122 bp, Homo sapiens
tgaatatatgaatgttatagctgaaagtccgtgtacatcatgcctcatccaaggcattaacgataaatttcttccctaccagtagctattgtctcttgataaaaataggtaatagtaaatct

SEQ ID NO: 320898 - DNA, 122 bp, Homo sapiens
gctcaaactgccgctgcctcctctccggagcggtccggcctgccggccgcggttccctctcgatgcttcagggaaccaggacagaaaggtccttccgctagctgtcaggtgcgtaacaatcg

SEQ ID NO: 320899 - DNA, 122 bp, Homo sapiens
agaaaccgagatggtggctgcagaaaccggagcccccgcgccggggcgaccgcgaggggccgaggcctttgagagcgctgccgccccttgccaaggtcaatcaaaccctcccacgctccgga

SEQ ID NO: 320900 - DNA, 122 bp, Homo sapiens
tccagaggcgcaggctgcttccagggcccttggagcagcatgggtctctagcaggcctcccgaggaagagagtagaagcatggcccaggttcccaggctgagggtgagatcagggcttacct

SEQ ID NO: 320901 - DNA, 122 bp, Homo sapiens
tttttaattaacaaagcatagaaacagattcaggacattcctccgaagacgttccagactcgagtcctaggacatggttggggcgggggtcatttgatcgagtggcctgtgtccttatctgg

SEQ ID NO: 320902 - DNA, 122 bp, Homo sapiens
attttgaaaagctgaattcagctctcgtttgagaaactgagtgaaagagcccagaacggccgtggctgagggtgactcgtgggagactcctacacaagccatggcagtggcatgggctggtg

SEQ ID NO: 320903 - DNA, 122 bp, Homo sapiens
tcatgtaaggtcttttaaaaagcatttgatgtatctatataaataagttgatgttctgttcgaggtagttatctttgatatgtgcctattttatgaagagtatttctttctgaattgaggga

SEQ ID NO: 320904 - DNA, 122 bp, Homo sapiens
tttaatgcgacctcatctttgtcagtgcacaaaatggcgccctacagcctactggtgactcggctgcaggtgagcgagctcagggacctctgggttcacgggggcggggtgcctcctactgt

SEQ ID NO: 320905 - DNA, 122 bp, Homo sapiens
taaggaaattactagcttgtgttgctatttacatatgaattactgattattttgaaaagacggtgttatgcttgggtgttagtgaggctgatatgtcatgtcaatcgataaaccctactttc

SEQ ID NO: 320906 - DNA, 122 bp, Homo sapiens
catggagcccaccaagtctgcgaggggtgaggagctgagtccctgcagaaaccaaggccacgtcggactctaccagtggtcagcaaggcccggcccttctcctcgggtcacagggctggaaa

SEQ ID NO: 320907 - DNA, 122 bp, Homo sapiens
cattgacacatcatcatccaaagtacatagtttacaccagggttcactcttggtgttgaacgttctatgggatttttttttctttatttttcccagcccagaacccctctatgggttttgac

SEQ ID NO: 320908 - DNA, 122 bp, Homo sapiens
gaccgaaggcactatcatctgggcgcaggttaggctggccgggggactctgggggcggctcggggacactgcggagccccagttccggcatggagtggcggtggggagcccctctcagaaag

SEQ ID NO: 320909 - DNA, 122 bp, Homo sapiens
tagttggtgggaatggtgccacttatcctttcctgccacatcgccttttatgcaacttgacgagtgggaagatactggcattccaagctctggcaggcctatggctttatctgcttccctca

SEQ ID NO: 320910 - DNA, 122 bp, Homo sapiens
ctccaaagtatatgtcctaggtcaagagatgagacatactgaaggaactctcatgagaggcgtactcagggctgtcagaatttagacacgtgagagcagctccagctacatgaccaggaggg

SEQ ID NO: 320911 - DNA, 122 bp, Homo sapiens
aagaagtgggaagatccagtgtcccctcatgctcttaggtacagtaagagggacgctggccgacataaagaagtccagaggagggtggcctcagtggtggggcctgctcatcccccttacct

SEQ ID NO: 320912 - DNA, 122 bp, Homo sapiens
ctcggcagctgtggagagcttcgtgaccaagcaactggacctgctggagcttgagagagacgcggaggtggaggagcgcaggtacgggaggccgccggcgccgctccctcgcggtcggtccc

SEQ ID NO: 320913 - DNA, 122 bp, Homo sapiens
gcttgagtacttcacaggctctgtcacgaccctgggatcaccgctcggggacagctccagcgaggacagagctaagggtccagccctctggacaaagagcaaccatccccgacacctctcac

SEQ ID NO: 320914 - DNA, 122 bp, Homo sapiens
tgccaagctgtattaccaactgcttggtctgtgcctaccttactgttcatagttagatgacgtagagcaagttgggtagctggggcttcggaggctttgggaatccagcctttctgacccag

SEQ ID NO: 320915 - DNA, 122 bp, Homo sapiens
gccgcctgggccctgggggcttgcggggtggagggacgtgagagttctccagccctcctgcgggcactgcagctcggaggcgggagaggagcactagggcgggagaggagcacgccccactc

SEQ ID NO: 320916 - DNA, 122 bp, Homo sapiens
gtcggaccctgagcgcgaccggaaggagcaggcggtaggtcagcccttgggcgggcccggcgtctcagtggcgcatttactaatggctcctgggcctcctcgggccacacccgcccctcccg

SEQ ID NO: 320917 - DNA, 122 bp, Homo sapiens
ttttattcccatagtttccaagttgttttgaatgaaaaccagccttctagctaactcttacgggtgcagtctctatcaaataaaagtgctcatgaaacagttggttggaggtcaagtgaaaa

SEQ ID NO: 320918 - DNA, 122 bp, Homo sapiens
ccgaaagcagtaatttaaaggcacagtcggcagcagctggagtggggttcagagcctgcccgtgtgccagggaggagcttgggctgccatggctgtttggggagggccagaggtgttctgtc

SEQ ID NO: 320919 - DNA, 122 bp, Homo sapiens
tgggcaaggaccaatggtctctctctgggcggggctgctgttggacggcctgggccaatccgaggcgccggaggccaatcagttggcggagcggcgcgtgcgcgggcgaggaactgcccggg

SEQ ID NO: 320920 - DNA, 122 bp, Homo sapiens
cgcgaagaatgccgtgctcttcgaggccatcagcttaatcattcaccatgacaggtgtgtcggctgcctgtggagaggcttcgtctcgcgcacacacacacgttccttctcgttggcacgag

SEQ ID NO: 320921 - DNA, 122 bp, Homo sapiens
tgcttatttcccgctgtcaggatgaggaggcggaggtcggcggtcgggtccgtctctgcccgcggctgtggcggcgccggcggatccagccttagcggtttctctctgggcggcggcggcgg

SEQ ID NO: 320922 - DNA, 122 bp, Homo sapiens
aggcatgggtggggcatcctaaaaaatggtaaatgagccagtggctgggctgctaagccacgtcttgggaataactagcccatagaggcagctgcttgattagaaaactgaatgccagaaac

SEQ ID NO: 320923 - DNA, 122 bp, Homo sapiens
gggctcccaggctgcgcacccccaagcccgcctgcctctctccgcttgcgccgcggctcacgggggttggagacgcaccttctccacgtgccgttttcaaaaagctcaggcagggagtcgtg

SEQ ID NO: 320924 - DNA, 122 bp, Homo sapiens
ggatcatagtgaggagagactggtgtgtgtgtgggaaggggaggtgagattaactggactcgagactgctgagtctcttaaggattattgaagattttgggggggcaatgcccagatgttgc

SEQ ID NO: 320925 - DNA, 122 bp, Homo sapiens
gtggtgaataagccctggcttgggtaagaccaacttattcactatgatgccccaaggacacgggtcagagacttcctaacagaggtactagactggcctcctgttgacactgagaggttcag

SEQ ID NO: 320926 - DNA, 122 bp, Homo sapiens
gaggggcctggctctgtcacccccacggctttgcgggtcccaggaagcacagccatgaggcgtggttaggaagcgagtctgggaaccaagcagtcctgtcagaacccttttacctgagggga

SEQ ID NO: 320927 - DNA, 122 bp, Homo sapiens
accaggtaggctgtgtgtcatgtccttatggacctgccccggcacacccagtctcacctacgacacgcttgcccaaatcagagggctcccacttcatgagacgcctgatgattcccactccc

SEQ ID NO: 320928 - DNA, 122 bp, Homo sapiens
agaaggcattgtcgtaaaaacaaaaaaaaaaaaaaaacgaacaaacaaaacaccaaaacacggaaactaaaagcaaatacttaaaagacatgcaggaaaccagcccaaggaaaaatttatgt

SEQ ID NO: 320929 - DNA, 122 bp, Homo sapiens
cagcaataaatgaaagatggaaaccaactcatatgtccatcaacggataactggataaaacgtggtatatacacacaatggaatatttttcagccttataaagaaatgaaattctgacatgt

SEQ ID NO: 320930 - DNA, 122 bp, Homo sapiens
ataccaacctcgtgctagttctgatcgaagctctaggcagagagtgagaatcaggagaaacgagagagaggcctgaagctgcatggtgccactcagccagtggctcagcctggggttgccat

SEQ ID NO: 320931 - DNA, 122 bp, Homo sapiens
gacgcacattttaaatcctgttcttttcttatttaccgtccatttccgttgctgggcagtcgttgcttccctcacttgtcctggtgcttccactcattcaggtcttgagacctcctagacag

SEQ ID NO: 320932 - DNA, 122 bp, Homo sapiens
gccaggctccctggctggccggtttgggcgtctgggccgtgaaggtgggacctcctgttccgggccgcaagtttccctctccagccgcccgccgttcgtagcatgtcccccagaactcgggg

SEQ ID NO: 320933 - DNA, 122 bp, Homo sapiens
ccgccccgcgcagacgaggaacaaagttgccgagagcgactgggccggagggctgcagcccgggccgggtgctctggccgcggcggcgccggcgccggggcagctccgctccgggcgcgctg

SEQ ID NO: 320934 - DNA, 122 bp, Homo sapiens
ggcgcaggtgctaagcccctgcctgcccggggtggaggccccggctggccgctcggagtgcggggcccacggagcccacacccacccggaactcgtgctggcccaggagcgccacgcacagc

SEQ ID NO: 320935 - DNA, 122 bp, Homo sapiens
ctacaatcggaaaccagaagcggaagaccaaaggggtggagtctgaggccacctagagagcgtctgggaaatctgtgccggcgtaggatttttaaaggaaaggggtcaatattatagctact

SEQ ID NO: 320936 - DNA, 122 bp, Homo sapiens
cgcagcgtggagggcttcgaaaacgggggtgggggcgcccaagagctcagtgcccagccccgggatcgcctcctcccctcaggacccgcgagccctcggtgccgaggacgctcgagtggggc

SEQ ID NO: 320937 - DNA, 122 bp, Homo sapiens
tccgggggtggggaaaggactccaaccttcgcttcccgcgcggcagagtgcgggaagcgccgatgggtccttacctgcagggagctttctccggcttcttagaatacctgggagcaggaatt

SEQ ID NO: 320938 - DNA, 122 bp, Homo sapiens
gctataaagcctgtggctaagtggggaaagcacgaagcctggcctgctgggtccttttcccgtcatccccagccagatttagctgctgacagctgcttgggactctgccgccagggcctggc

SEQ ID NO: 320939 - DNA, 122 bp, Homo sapiens
gttcttcagctcagcgtctccctcccaagattatccacgtcctgtctttgctccgcggtgcggagctgactcgcaactggaatctccacgcttgacctcgctgttccacccgctccctgccc

SEQ ID NO: 320940 - DNA, 122 bp, Homo sapiens
cctggaataacccagcgcctgtaatctgagcaacagtttccaaagaccttctctgcagcccgagcctgacgggtatccagggtaaccgcgagggggcggagcttcgggttaggtcccggcga

SEQ ID NO: 320941 - DNA, 122 bp, Homo sapiens
tggaaaacaatttggtggttcctcacagaaacacacagagaaacaagagctgctggcttccgggttctcctgggctggcgcggtacgtcccggaatcgcaggcgcgcatcccttcccgcctg

SEQ ID NO: 320942 - DNA, 122 bp, Homo sapiens
tcttggcttttgcaaataattctgcagtgaacatgggagtgcacatacctctttgagatccggatttcaattcttttggttacatactcaggcatgggattgcaggaagactgtcatctctc

SEQ ID NO: 320943 - DNA, 122 bp, Homo sapiens
gcgcgcttgcttctgattggagagactttttgtttgtaatcagctgtgccacggcaaaaccgtgccggttcttaccgctctgggacgtttgccagataaataaataaaaatacacaaaaagt

SEQ ID NO: 320944 - DNA, 122 bp, Homo sapiens
cgcgtaacgcagtctcagccctctggaggccagtgggttctttgtgcacaagtctctccgcgcctggctgcccaagtcagttcccggagcgcgaccagggtgccacggcctccgtcccgagg

SEQ ID NO: 320945 - DNA, 122 bp, Homo sapiens
ccgctgcgcacggtctccctccagctccggtccccgcgggagggcgcgtgggatgatgcgcgggtccttgtgccttccccaagctccagcatccggagccgccctagccggcaccgcggcag

SEQ ID NO: 320946 - DNA, 122 bp, Homo sapiens
caatagggaccatctgggagagctgctgagagtaggtggggatgtagctcagtggtagagcgcatgctttgcatgtatgaggccccgggttcgatccccggcatctccagtgtagttttgca

SEQ ID NO: 320947 - DNA, 122 bp, Homo sapiens
cctcccaaccccccggttccgttccacgggaggccccggcctccctgccctctcctccaccgttctacccgcatcgcccggcttcccgcaagccgctggcaccgtcccctcaacaccctccg

SEQ ID NO: 320948 - DNA, 122 bp, Homo sapiens
acccagtgggcgtgctaatccccaaatgttcaacaaataggaagttactcacagtgtctccgaaagcagaccgaatccagggggcctgccctccccagtggttaattacaaacttaattaaa

SEQ ID NO: 320949 - DNA, 122 bp, Homo sapiens
gggagccgggatgcagttgctaggagccaccgcctcgtcgctaggggacgctgaagatgccgcggggggcgggggcaggatggaatccactaagaaggggcgagaccagtgaggattcaact

SEQ ID NO: 320950 - DNA, 122 bp, Homo sapiens
tcaccctgcaagatgacccctctgcccgcccgagctggcctgcggggcatctgcagcccacggggccagagacccggatgcaactatgggcccgccccgtttcctcaggcagctagatttct

SEQ ID NO: 320951 - DNA, 122 bp, Homo sapiens
gcggatggccggagaggaccggcggctcggaggaagcccccaccgtgggcagggagcggccggccagcccctggccccaggacctggctgccatactttcctgtatagttcacgtttcatgt

SEQ ID NO: 320952 - DNA, 122 bp, Homo sapiens
tgcacgtctgtctccagacccatctgtcctggcccagctccttccctatctgggtgtaatcgccaccgcgctcccctgggcatgtgggtgtaacaagtccaaaccttctgtgggagtcgggc

SEQ ID NO: 320953 - DNA, 122 bp, Homo sapiens
tcaggaagtccccagcctctctgatttgttcttgaggtgtgacgtacctgcagtccgacacgtgtgactgacagctggtggctccggcaggtggggtcttccagcagctgagacggctgcag

SEQ ID NO: 320954 - DNA, 122 bp, Homo sapiens
cggccacgcacagaacccagggccaggcaacgcggggcagaggtgttgggtgacctcgggcgggtcgtggccggccgggctgggcaggggattcctgggtgccggctctatgcgaatattct

SEQ ID NO: 320955 - DNA, 122 bp, Homo sapiens
tgaaacatctctgagaaaaaatggtaacatttttggcttttgccactagatgtgaccccacgacagggttaaaaataagaagtaaagtcttgtgaggtctcaagagcacaggatttctcagc

SEQ ID NO: 320956 - DNA, 122 bp, Homo sapiens
atccgggctccaggaccggggcacgcggttctccctgatcccggagctgggctcagggctcggactcagtcctgcagcgcctctaggctgcggatccgcgcttcaaccacctgctttgcgct

SEQ ID NO: 320957 - DNA, 122 bp, Homo sapiens
ttcaggtacatatgcatggcaaaagcatattatttggcaaaagctatattataataaagtcgagcactgctccagggagagcattccacatagtaaaccatgatgtgaaagttgcctgcctg

SEQ ID NO: 320958 - DNA, 122 bp, Homo sapiens
gaccgtctgctgggaatctggcttcgggaagtgggtgcagaggccaggctggccacggcacgctccccgcagacagctgggctcaggcctggcgcgttgggtgccggggctctgacgtggga

SEQ ID NO: 320959 - DNA, 122 bp, Homo sapiens
cccggaaaagtggcccctcacttgctgcagcgcccactcgggcccaggcactctcccgggcgccctgatccgacagccccaggcaagtgcagctgttcctggtctgcagatgaagaaatgga

SEQ ID NO: 320960 - DNA, 122 bp, Homo sapiens
catgctgggggcacgtgccgccgacaaggcgctgtgtatccgccgggctcttctcgacttcgtggacctggtatctgcagggagccacctcgttggtccccggtgagccctagagctgtgcc

SEQ ID NO: 320961 - DNA, 122 bp, Homo sapiens
cctcctctttctgccgactctcccgggcaaccgttctgattcctggcatggagttgggggcgagctcatcagtacccagagcgcctggtgtgcagccaaaggcccccattttattagtcggt

SEQ ID NO: 320962 - DNA, 122 bp, Homo sapiens
accagaagcttcctgagttttcaccagaagccagcatcatgcttatacagcctgcagaaacgtgagcccattaaactttttttctttataaattacccagcttcagatttttttatagcaat

SEQ ID NO: 320963 - DNA, 122 bp, Homo sapiens
cctcttactttagaaaagtgaatccatcattgttccagttaccttgggctgcactctaaccgccaccaagtgccacggcttcaacacggttcattaattgccagcgtgtgtgtggctggtct

SEQ ID NO: 320964 - DNA, 122 bp, Homo sapiens
aaaatggagaaaaagagaagctggaaggctggtcgtgttggaaaccccagaagaatgaaacgtgttgtcactgtatgattatctacttccagaattatggtggtcatgactggctgtgggca

SEQ ID NO: 320965 - DNA, 122 bp, Homo sapiens
tgtcagcggccatattaacaactggcaaactacggcttgaatccctgagaaacggaggcgcgtggtttctgcaccctggttggaaaggcccgaggatgagaaaggtgtccacgtcgcagaaa

SEQ ID NO: 320966 - DNA, 122 bp, Homo sapiens
caaccgaggggaggggcccggagctggctggagcagtggcacacaagctggggccacctgcggcaggtcctaaacaacatgagtgtctggatgagggtgtggacatcaccagtggccctttt

SEQ ID NO: 320967 - DNA, 122 bp, Homo sapiens
ttaaataagacagcttcctagacctacaagtgagggatgaaagggtaagcagcttggaggcgctgcacagggcgagggtcgttttaacccacaaagtatctgtgaattgctcagagctgccc

SEQ ID NO: 320968 - DNA, 122 bp, Homo sapiens
acacactcctgcctggaccggagcctgcaaagggaaccccggcacgctgcgggtctgagacgtggtatcggtgagggaggcggccctgaggcgcccttccctgctcagacacagacgctgga

SEQ ID NO: 320969 - DNA, 122 bp, Homo sapiens
cccaaggatcccttaaaggggcgatggtaaaagtgcctaatgagaccggcttgattactccgcccacccatcttggcttagaccggcgttctagttccaggcgtgcctcacttttcctcgtt

SEQ ID NO: 320970 - DNA, 122 bp, Homo sapiens
agggtcccaagcgggtggcctcccaacactgtggcgcccagatcccccaccccagagcagcgtgcccaggacaccctgtggacgctcaagagccccaggcggagaactcagataaatgcaca

SEQ ID NO: 320971 - DNA, 122 bp, Homo sapiens
cgagagcacacacagacacattcagcttccctttgatcttcaaaagagcaatttgtaaggcgagttctgagccttcttacatagggaacagctagaggtgataggaattgttaattgccaag

SEQ ID NO: 320972 - DNA, 122 bp, Homo sapiens
cgctccctctgctgctcctcccgcaacctccggacccgctccgccgctttgcgctcggagcggctcagacccccggctgccatcgctcccctggagacctgctcttccgcttccgcctcaca

SEQ ID NO: 320973 - DNA, 122 bp, Homo sapiens
gcctaccctggactcagagctgggcagacacgccccaagagtcccatctctggaaagccccgtgggtctctctgttaattaaatacatttgtttggtaaaagcaactaaaaatacttgcagc

SEQ ID NO: 320974 - DNA, 122 bp, Homo sapiens
tggaattagatggtgatgatagctgcacatttctgtgaatatactaaaacccccgacttacggtcttttaagtggtgaattttatggtaggcaaattttatctcaattaaaagacaaaaaaa

SEQ ID NO: 320975 - DNA, 122 bp, Homo sapiens
ctttgctttgacatactgtacaccgatatcccttaagagccaaaaaccatttacatgccacgtttgttttttcagctgtcagcagactaatgatatggactaagaagaatgcatgagggctc

SEQ ID NO: 320976 - DNA, 122 bp, Homo sapiens
tctcattcttctggttttggcaaagcctagccttgctataaagtcactccgtgactcacacgaatggctgtgtttgttaaggagtcacacaccactaggaacaaagagtgctgttagttgag

SEQ ID NO: 320977 - DNA, 122 bp, Homo sapiens
tgctactccgatgattggaaacacatgttcccgccgagaggcgcgtttattactcacagccgagggttcttggacgacatggacgtcaacagggagaggggtggggagggagagtggtcggc

SEQ ID NO: 320978 - DNA, 122 bp, Homo sapiens
ccagtaaatacccagccccactaggagcacgttgccaggacgccaggccctccctccctccggggcagctcctaccccagctggcatcgcacatcggacaccccgttcttgaatgtggtata

SEQ ID NO: 320979 - DNA, 122 bp, Homo sapiens
gagagttcttcaggatcacctgatccagatcatggtattttcctaaccaccaatgcttaccgccaaccacctgatggttttgtttgtgtttactgaccacatcctctgcaggaatataaggt

SEQ ID NO: 320980 - DNA, 122 bp, Homo sapiens
agaaccccgctgggtttgctacgaaggttgaggtggaagcgcccagcgcaccaggcgccacggcccggtgtgtgacctcactaacctccaccagcgcgcaccctgtcctgccccttcacggg

SEQ ID NO: 320981 - DNA, 122 bp, Homo sapiens
caccccacctcaggggggcatcggtcagagcagagctctggggggtggggggacgttgcccgggtcccccctgctgtccccagggccaccagcagctctgcgtcccgggtgctctccaggca

SEQ ID NO: 320982 - DNA, 122 bp, Homo sapiens
agagactgacctcaaggatccccaggagccactgtttcttctggaagccctctggaggagcgtttttccccacggcctttcctcgcctcacagttgttcacactctcctgctcctgggggaa

SEQ ID NO: 320983 - DNA, 122 bp, Homo sapiens
taaaaaataaataaatttccatttaaaattgctgcaaaaatacttagaaatcaatttaaccgagtaggtaaaaaacaagtacacgtaaaagtataaaacttcaacccgatcaacatggtgag

SEQ ID NO: 320984 - DNA, 122 bp, Homo sapiens
cacagccagcagggcctgtctgcaggacagcctgggagtacagaactgtcctgggtcccccgtttggttttcaggccctcttcctggagctggctgagcagggtttccaggcatccagcagg

SEQ ID NO: 320985 - DNA, 122 bp, Homo sapiens
agtaagaagccggggacgccgggcaccccaggctcccacgacctggagacggcgctgaggcggctgtccctgcgccgggagaactacctctcggagaggaggttctttgaggaggagcaaga

SEQ ID NO: 320986 - DNA, 122 bp, Homo sapiens
ctgcccaggtgtttgtaatttgcagccaatgtggagaaaaccactgaactgggctggccacggtggctcacgcctgtaatcccagcactttgggaggccgaggtgggaggatcactgaggtt

SEQ ID NO: 320987 - DNA, 122 bp, Homo sapiens
ggcatgggatcaggtgagataatgggcaatgaccccgccagtggtacgtgctcaggtcctcgtcgggaagtgagtgtttatagttcccggggacgagcgatatacaaggcacggttaagaaa

SEQ ID NO: 320988 - DNA, 122 bp, Homo sapiens
cacgaaactctaccactacgttctcgctgctccatcgcgccgccatctcccactctcggccgccaaggccccaggaccgcgccctcccatccaccagacccgggtcccctggccctctgagc

SEQ ID NO: 320989 - DNA, 122 bp, Homo sapiens
agcacctaagacagctccaaaacaaaccagaacagtcagctccgggggagcacgactgggcgaggtaagtgaaaactttacctttcctcttctttttccctcctgcctctggaacttttctc

SEQ ID NO: 320990 - DNA, 122 bp, Homo sapiens
ggatgcgagcactctcgtaggagcccttggcgtggatgcgctcccgctcgcgggcgtccacgaactccttggcaaagcggtagccatagtcgatgttgtcgccgcagccgccccagagccag

SEQ ID NO: 320991 - DNA, 122 bp, Homo sapiens
gccctttcttttaacgtaaggctgcgggaagagctgctgttgccaagctctatgtctcaccgggaggggatgagaatgcctttatttcttcagggttggaagatttgggctccatgcactat

SEQ ID NO: 320992 - DNA, 122 bp, Homo sapiens
ctcacggcctcccctcagcatccgggtttcggcctcggagcgccagggacgccacgaggacgcgccccacacttgcgcttctgggttccagcccccgcggcccccaacaaataaagaaggga

SEQ ID NO: 320993 - DNA, 122 bp, Homo sapiens
cctccggcagctctcggacgtggcccggcacgcttgcagcctcttccaggagctcgagagcgacatccagctcacccaccgccgcgtctgggcgctgcagggcaagctcggcggcgtgcagc

SEQ ID NO: 320994 - DNA, 122 bp, Homo sapiens
gcgccgtggagcagggagtggcgctggttggggtgcctcgggccgcgcaggagcccacggcgggggcgaggctcaggcatggcgggctgcaggtcccgagccgtaccccgcggggaggcagc

SEQ ID NO: 320995 - DNA, 122 bp, Homo sapiens
ctttagtcaaaagacactggagtcattcataaggagacaacacttgcctggtgtgaagaacgagtagctgcaagacaaaatcctagccctcccagaaattagagtaagccagacagaggagg

SEQ ID NO: 320996 - DNA, 122 bp, Homo sapiens
cgctgccgccgcctccccccgactgcggccccggcgcgcgcaggcggtggaaggaggcagcgaaagttgggcaggaaacttttggccccgcccctccgccccgcccactgcgtcccgccccg

SEQ ID NO: 320997 - DNA, 122 bp, Homo sapiens
ccccaggcgcagttgtccttcctggcacaggtgtcccccctcggaccaggtgtccctcgtcggagcaggtgtccttctgggcacaagcgtccttcctggcctttaggaagctttcaaggtgc

SEQ ID NO: 320998 - DNA, 122 bp, Homo sapiens
ctcaagtgatccgcccgccatggtctcccaaagtgccgggattacagacgtgagccaccgcgctcggctgtcactgcagactttgatgggggccacactcggggtataaattaggatcctca

SEQ ID NO: 320999 - DNA, 122 bp, Homo sapiens
ccctttcttcttacagcctctcgcatcccacaaaaaagtggcgggttctggaggtctggacgtgcaaaaagccttgaaaattccttgagggctttcaacgggggtttcatcgtcaggcccct

SEQ ID NO: 321000 - DNA, 122 bp, Homo sapiens
taacatcctcttacaccccagccacagcaagatccaggtgatgaaccactgcttctgtttcggggccacctgccctggccaggcactggggataccccacttactcatctcttggttactgg

SEQ ID NO: 321001 - DNA, 122 bp, Homo sapiens
ggttcggggcgccatgaccagcatctcggcgtctgaggagactctgagtccgggtgggtgcgtggggactttagaactgggaccgcggcgacgctgattggcttctctagatatccaatacc

SEQ ID NO: 321002 - DNA, 122 bp, Homo sapiens
cgaactcctggcctcatgtgatcagcccaccttggcctcccaaagtgctgggatttcaggcgtgagccaccacacccggccaaaactgtttattcttgagaagttccatcttcatttctgcc

SEQ ID NO: 321003 - DNA, 122 bp, Homo sapiens
ccaggtggccgacgtctgcgtcttctttaattatttagtcccacggtcacctcaagccagcgctcctcaccacggacatatgggtggggcttgctgtcgggtgggctgtgccgctgtccctc

SEQ ID NO: 321004 - DNA, 122 bp, Homo sapiens
cagagcggttcccccgcccccgacagcgctttctgttgctaggcgacctccgtgcaatcccgcctgattatccctcgcctggcctgtgctttacccgcattgctgtcctctgctcggcagcc

SEQ ID NO: 321005 - DNA, 122 bp, Homo sapiens
gggagccagaggggaagtgatggccccgccggcgccgggcccgctgggaactgtagttttcgtgaagaaacacgcgtcttgttttgggtgtcatggcttggcagatccgccaaaacaggcaa

SEQ ID NO: 321006 - DNA, 122 bp, Homo sapiens
cagacaccccgcgcaggcgcagacggcctctgcgcccgcatgcctgtgggcttcgccgaccggggcgcctgcggcggcgactgctctaccaaagcctcactcaaagcctgaagtcggggtta

SEQ ID NO: 321007 - DNA, 122 bp, Homo sapiens
gaccccgagatcgccgccctcattcggaaaggtaagcgccgggcgcaaggcgtggcgctgcggagagcccggcgcctttaggccccgcagcccctcgcgtctccttcccaggccacaggcta

SEQ ID NO: 321008 - DNA, 122 bp, Homo sapiens
gggactgggaagggtccagccccggtccggccacgcagagagaagcaaccccaagtgcgacgccgcacacactcaccgcagagggcagcccctaagagggtgggcgtgcaaccacaggcttc

SEQ ID NO: 321009 - DNA, 122 bp, Homo sapiens
caggcctgtgcacctccctccggctcgcctcgtctttgcagcccgagggcacatcacacacgcccgggactggaagcacttcagtcaggcgccaaatctgtgcttccaggcacagatcacag

SEQ ID NO: 321010 - DNA, 122 bp, Homo sapiens
ctgctcagtcctcaagcctcctttgtgttctgagacgattgtaggttctagttttctagacgattctaggtttctagttttctcttcctgcagtttcttgatccgggccctctctgactcta

SEQ ID NO: 321011 - DNA, 122 bp, Homo sapiens
tgcactggcttgagaacgaaggaagttagtcccttgcggtgatccgtcctttcatcctggcgtttgcctgcagcaagatggcggcggtgtcaatgtcagtggtactgaggcagacgttgtgg

SEQ ID NO: 321012 - DNA, 122 bp, Homo sapiens
cgcctttaggacgcctgaggtgagacgcgaggagttcggtccgagtgcggtgcggctgggcgctcttcttgcctggaagatcgcagtttctgggtcatcactttacgctactttcccctccc

SEQ ID NO: 321013 - DNA, 122 bp, Homo sapiens
cctgatgctaagcgttggcaaggatttgtggggccacttaaccatgctggtgggctggtacgtccattgtggggtgagggtgcctttccacgtcagtacatgaagcatccttattacagctg

SEQ ID NO: 321014 - DNA, 122 bp, Homo sapiens
acttctgtctatcacataagtggaaagaaaaagacatttaaggatgttggaaatcttcttcgaagccatggaattgacttggaccataatagatttttaattttacaggtaagtttattaaa

SEQ ID NO: 321015 - DNA, 122 bp, Homo sapiens
ggcccagcccggggaagcggggacagtgagccaggccctcaggcccagaggggatcatcccgggagctgcgggccgcagtacccggttcctgccagtgacagggcgtcgcaagcacagccat

SEQ ID NO: 321016 - DNA, 122 bp, Homo sapiens
cagtacatagctgtatatttctggtggcccaaaatttgaatccttttcctaagtttgtggcgtgtctttcttattggtaaaggttttatcaaacttccttgcagccagggaagaatgacttt

SEQ ID NO: 321017 - DNA, 122 bp, Homo sapiens
tcactctggccgggcccgtggattaccagagtcaggacacctacgagctgcacgtgcgggcgcaggaccgcgctgccgcctgcaaggtcatcctgcgcatccgcgacgtcaatgacaacgcg

SEQ ID NO: 321018 - DNA, 122 bp, Homo sapiens
gacgcagcgactcgaggttgccatggtaggcagcccagagagtgggggtcatgccatcctcgtcgggggcattcagctcctttcgggtggcctccttgaggagctccaggtagccatcccgg

SEQ ID NO: 321019 - DNA, 122 bp, Homo sapiens
gcatcacggagatgtcggtgatgatggcttgctggaagcagaatgaattccgcgacgatgcgtgcagaaaagagatccagggcttcctcgattgtgccgcgagggctcaggtgaccgatggc

SEQ ID NO: 321020 - DNA, 122 bp, Homo sapiens
cggtgtcacagtcacacatggcagggtggtcctacagcagccgctggcgggttgccatagcgaccacaggcactgtcttctcgctgagacggcacagggggcccaggtaaggtggaatccag

SEQ ID NO: 321021 - DNA, 122 bp, Homo sapiens
gccgacacatgtccccttacttgattttttaaaagtattatgctccatagtttcatttgtcgaattttgagctcgataatacaagatttattttgacagtagcattgggagaggacagaaag

SEQ ID NO: 321022 - DNA, 122 bp, Homo sapiens
tgggctgcggcttctatcccggccacccccacttccggctccggggactacagcccccggcgagcactccgaggctaggccgctcccgcaggacgcgtcctccaatcccaggccgcgctcgc

SEQ ID NO: 321023 - DNA, 122 bp, Homo sapiens
aggactcttcttaacaaagctatagaaattccgagctgaaaagacccataaagactctaccgcgaacattttttgctccagacattgtaaaggattcccagacatcgtaaacgctttgctcc

SEQ ID NO: 321024 - DNA, 122 bp, Homo sapiens
tagctattctggaatgtttaggcaaatactccactgagttgagtcatacttgagagctgacgtcagtgtacattttagtagagaacccagttaaggtttcatgctccaggaagcctgttctg

SEQ ID NO: 321025 - DNA, 122 bp, Homo sapiens
cgaattgtggtcccctcccacccacggcctccccatcacgcgcacgcagcccgcgaggggcgccctccgcgccactgccccagggacaccgttcatctgaggaactctcgcgccctgcgttt

SEQ ID NO: 321026 - DNA, 122 bp, Homo sapiens
cctgaaaaaaaaattcaggaggttagttattaagctaatcaaggagggatcagggaaaggcggagcccaatgcaaggaaatcaaataaacaatacaaaaagtaaagggagaaatattcaagg

SEQ ID NO: 321027 - DNA, 122 bp, Homo sapiens
acccctgggacaatggccagctcctggacatcaccctgcaaagacatgagagagatggagcggagagattcagagagaggcagagggtatcatccgggagaaagagtataggaggccaatcc

SEQ ID NO: 321028 - DNA, 122 bp, Homo sapiens
ataaaaacacaatgctttcctgtggatctccagcagactctccgaagagattggataaaccggcctctttaagccactcttcttccaattctccctctaagacagtagagaaaagtggtact

SEQ ID NO: 321029 - DNA, 122 bp, Homo sapiens
tttgcgtggggggcagctgccctactgtcgggcatggttatgcttttcttccagacaccccgaaaatcttggtgctcggtgggctcgccccagccgtgcttcctggggggcggcctctccgg

SEQ ID NO: 321030 - DNA, 122 bp, Homo sapiens
ccctaaaactaacacaaatactaaacaaaaactccaggatacagtcaggaagtttgtttccgtctcatcttagatagaaataggggctagaagagacagatgtttgtgggacagaagctgtg

SEQ ID NO: 321031 - DNA, 122 bp, Homo sapiens
ctcggcggaagagatgcgggaactacggggctctgattctgaggtcctggatttggaaggcgtctgcacacaaagaaataacaaagttaagttcccgcggctcgaccagcagagtacgaaac

SEQ ID NO: 321032 - DNA, 122 bp, Homo sapiens
ctcaggtgatcctcccacctcggcctcccgaagggctgggattacaggcgtgagctaccgcgcctggccctaaaatctgataaagcatgacggtagagttgaaatgactgaaaaggagctat

SEQ ID NO: 321033 - DNA, 122 bp, Homo sapiens
ctggcggaacagtctccatacgggaaataagaggccttgcctgtgaagtgcaccctaacacgtgggggacgataagagatggaaaattgtgtatcccaggaccgaagacgtatggtcactca

SEQ ID NO: 321034 - DNA, 122 bp, Homo sapiens
catttagataggtgccctttgggcccttgaaattcaacggctatgtgttcacgttcagcacgctcggctgagagctttcatttttagggcaaacgagccgagttaccggggaagcgagaggt

SEQ ID NO: 321035 - DNA, 122 bp, Homo sapiens
ggttggggagtggggttgggcagaggctttctggagaatggccaaaatgaaaattgtgtgcgagtggagctgatcatattaagatccagctgcacttaagtccccctctggaagttctttag

SEQ ID NO: 321036 - DNA, 122 bp, Homo sapiens
gaagagggagctagagagagccctgaaggtggacgtcgcagtcttcactcaatcaatctccgcagggaacgccctgcaggcccaggtatccttccggtcccttcctcctgcccctgtgctcc

SEQ ID NO: 321037 - DNA, 122 bp, Homo sapiens
cagcagcgcggagagcaggcctagcccgctgccgggaaggcgggtctgtccagtagagaccggaacgccgcgcaggctcagcaaagggctaaggctggagccggggaagctgcctctaggtt

SEQ ID NO: 321038 - DNA, 122 bp, Homo sapiens
gcactgccagattagaatgcctcaaaggcctaatgactcctaagtggctcaccgtcagctcggtacagctaagcaattcccatgctgctcaggagtcatgtattatgctggcaggctgcctc

SEQ ID NO: 321039 - DNA, 122 bp, Homo sapiens
caggtgcagtcagcaggaacggacgccctcccaggagcagcccaccagagccagcggagacgggtaagtgccactggctcagacacacaggatgcaggaaaatccacgggctcttcacaaca

SEQ ID NO: 321040 - DNA, 122 bp, Homo sapiens
ttgcgctttgaggataaaaagctgggccctgtgcagttttccaagacaacctctgggcgccgctgtcgaccaaaaggaagtgaaggcttctcaattctgcaggagcgtcaggcagggtgcct

SEQ ID NO: 321041 - DNA, 122 bp, Homo sapiens
agggcaggtggggccactctggcctgcctggtcctctgcgttgtagtgctacctcaatctcgggagaaacagccctatattctaacaagttgagcacagccttcttccccttcgtgtctaca

SEQ ID NO: 321042 - DNA, 122 bp, Homo sapiens
ttgcatggtggacaaatggaccccaacccagtctaggctcactcagcactaagtgaatgacgcctacccacattctcattgatctcccagtccgattcaaacctcagcaaaattacatgtca

SEQ ID NO: 321043 - DNA, 122 bp, Homo sapiens
ttccctagcccagaaagggtgggactggctttatttctgcctgccatcacctcaaaatgccgtgggacaaatcttacatattattattgttatttatttatgtattttattttttttgagac

SEQ ID NO: 321044 - DNA, 122 bp, Homo sapiens
gggccgtcggcttctcacttcctggacctccccggcgcccgggcctgaggactggctcggcggagggagaagaggaaacagacttgagcagctccccgttgtctcgcaactccactgccgag

SEQ ID NO: 321045 - DNA, 122 bp, Homo sapiens
ctgaggtttggtttagggtttgctttcccatgacagataaaatcactgaagtgatttcaccgctgcttctaattagaggggagctttaaaagaagccacgggatttggggctcccggagccg

SEQ ID NO: 321046 - DNA, 122 bp, Homo sapiens
gcccacaatgccaaacagtgaagggccctctggatagggcatgtgctctccagctcgctgcgggccgcaccgagacccccaccccttcccattatctgcctggcagttgcccggggacaaag

SEQ ID NO: 321047 - DNA, 122 bp, Homo sapiens
ggtcggctggccgcacccacgcggcgcagctcccaaagttgcagacagcccggcgaaccgcgcaatgcgcttcttctgcctgcagcagagaaaaggaaagaaaactccgcaggggctccgtt

SEQ ID NO: 321048 - DNA, 122 bp, Homo sapiens
cagaaaggcagggtgggatgtggggtgaaggccttgaatgcagtggtcaatcaacatgatcggattgatggctatgccattgccaggtccctaaaacagaatggacatgatcatttctgcac

SEQ ID NO: 321049 - DNA, 122 bp, Homo sapiens
cgagtcgggccgcaccacgcgctctttgcgcaccgtgggcttggcccgcagaacccgcggcgccagcaccagcgccagcagcagccccagggctaaccccaggcggccaccgcgcgccatcg

SEQ ID NO: 321050 - DNA, 122 bp, Homo sapiens
ataccctacccggcagggctgcgaaggaaggggaaatccaaccagagcgaaagtcgcacgcggacagctctgccagcccttggaggcatccggcggtcacccacgggacaaagcgcggctgc

SEQ ID NO: 321051 - DNA, 122 bp, Homo sapiens
tgtggatttttgttttttgtttttttttttgtttttttccagagaaccagaggacgaaaacgaagcttcgttcctgaggaagaaaaacatgaggttggaataagttaagcacttttacacag

SEQ ID NO: 321052 - DNA, 122 bp, Homo sapiens
gagaagtggaatcgacctcatcaagacaaacaaacaggggccttatacagattgggagggcgacagcaaaggcatggtgaaatttctttaaaaatcttagtagagaatgaagacaaatggtc

SEQ ID NO: 321053 - DNA, 122 bp, Homo sapiens
catggacgggcgagaggcgttctgcaagcgcgaaatcggtgagcccggccgccgcgccgccgccccgcgagcctttccgagtcccggagaatcctgcacgcgagatcccagggcgcccgacc

SEQ ID NO: 321054 - DNA, 122 bp, Homo sapiens
cagggaacagccagcccccactggagtggcactttatactgtcagcccatgggaacaccacggatactaagtcagaaactctaaaacttctggatccattcaagtgagaatcatgtcgcttg

SEQ ID NO: 321055 - DNA, 122 bp, Homo sapiens
acagccaccacctcagagtggagggtcagacacggaaatacacccgccattctgcaccgccgccacctcagagcggagggtcagacacggaaatacgcctgccactctgcacagccaccacc

SEQ ID NO: 321056 - DNA, 122 bp, Homo sapiens
actcaatcagtaggtattggctaattgagctgtcactaatagtgccagccttgtaacatccgcttcacacctctcatgactgagacctctgccatttctgttgctcaccacttaactgctag

SEQ ID NO: 321057 - DNA, 122 bp, Homo sapiens
gccaccttctcccaccaaaggtggatccagctaacaggagactggatcgcgaccatagcgcgtttgtgcccagttctggggaaagcctcatgttagcgagtggccctcggctcgtctcgcag

SEQ ID NO: 321058 - DNA, 122 bp, Homo sapiens
ggcacggggtcactcgcgccgctgacctgctgccgtcctgtttctgagtctctgcagtctcgggagctccaggatccaaattcgttctgtgccctgaccttctgcctctcattccttgcaga

SEQ ID NO: 321059 - DNA, 122 bp, Homo sapiens
aggtcgatgggcacagcaggcactccctgagggtccccgtcccagcgacctcgccgcccgcgcccccaggtcaggcctgagaaatgactgtggccgccagagagagggagcccctgggagcc

SEQ ID NO: 321060 - DNA, 122 bp, Homo sapiens
cgagctccccgcgccccgtacaccaccaggtctccctggttcctctcctgctccccgtcccgctacctcaggaaactttagcccagcctctccgatacaagccggcctccttgagggcttta

SEQ ID NO: 321061 - DNA, 122 bp, Homo sapiens
aggacgggcccggactgggtagtggggatgtaccagggccgggtgcggcgggagacggcccgggaggcggaaggtcgcggacctgcccgacagaagagtagatgaggggagaccgaggacgc

SEQ ID NO: 321062 - DNA, 122 bp, Homo sapiens
cccaggccgtggggacacgcagccccctgccctcgggtggtgctgggtctccatgcgccacgtcagaagcgcagcgtgcccgtcagtcccatggcgggttgtcattttctcggcacacgtgc

SEQ ID NO: 321063 - DNA, 122 bp, Homo sapiens
ttcaaatccaggtgctatggtgtcttgtaccgagcgagggctgccactcagctgcggcagcgtgttgccgagtgacagtgcagccctctcacggcgaacccagggggtaccaagcagtgtca

SEQ ID NO: 321064 - DNA, 122 bp, Homo sapiens
caacttggagttgtgacaagttaaggagaaaagctagtgataggagacaaagggctgcttcgctttactcaatgctcagtgagtcatgaggtggctgcccccaggcctccaagttgtcactt

SEQ ID NO: 321065 - DNA, 122 bp, Homo sapiens
ctccgacacggtggcagcctgcaaaacgtggagcgcggagtcactgccacacctggaatccgaagcgggctccgccggctcccggccgaagccgcccccgcctgccggggaggggagcgcgt

SEQ ID NO: 321066 - DNA, 122 bp, Homo sapiens
aactgggattacaggcacgcaccacaacatctggctaattttctgtatttttaatagagacgagggttccccatgttggtcaggctggtcttgaactcctgaactcaagtgatccacccgcc

SEQ ID NO: 321067 - DNA, 122 bp, Homo sapiens
acctgccccaggacccccgcaggttcccggccccacatcaagccaccaaatcggagtcctcgggggtctgtatatttagtgagcaccaggcagttgtttcgtgcattagaatccgggagccg

SEQ ID NO: 321068 - DNA, 122 bp, Homo sapiens
ctccctttagaaaacctttccttccagctcacagtatccaccatgtccaccttcgcctcccggcactgagccttagaggggcggtgctccataaacatttgctacatgaatgaacgaataaa

SEQ ID NO: 321069 - DNA, 122 bp, Homo sapiens
ccccccgcgcatctggggctgagcggggctagcagggtctctggccgcggctgtccagtccgcaggtctatctgttcacgcgtcgactcgcccgactgccccactctccccggcccccgccc

SEQ ID NO: 321070 - DNA, 122 bp, Homo sapiens
tctggtttttaactcaccacagggcatgactcccctgatgtatgcctgcgtccgtggggacgaggcgatggttcagatgctgctggatgccggagctgacctgaatgtggaggtgagggtgc

SEQ ID NO: 321071 - DNA, 122 bp, Homo sapiens
ataccggcagcggtggttgtgcggtgtcctagcaacggggcggcagcagggcacacacaccgcccaagcccggacggtggccgcgaagctagggccaccatggcggaccgcaggcggcggct

SEQ ID NO: 321072 - DNA, 122 bp, Homo sapiens
caccctagcacctagcacctgccaccacctctgaagttcctgcattgcctgtaccttctccgcacatgctggagactgtggggttaagagctgcacccttgctgcctgagagtcccttggat

SEQ ID NO: 321073 - DNA, 122 bp, Homo sapiens
ggctgctcaaacctctagaggggagcatgcagaccggcaggttgtggggctccaaccccacggcagtgtctaggggtggatgtttacagctcctgaagccccagtgggcgtgtgttacagag

SEQ ID NO: 321074 - DNA, 122 bp, Homo sapiens
ccgcccgccgcaccgccgcccacccccggccccgagccgctcacagccccgagccgggggcggctgcccagctcatcgcaccgccggcccgtggcagccagcagtggcttcagacctccgga

SEQ ID NO: 321075 - DNA, 122 bp, Homo sapiens
caaccagccattcatggatgtcaagcccagagaccggacccctgactgtgcagtgataagcgaccgggctcccaaatgtgcagtgatgagcgaccgagtccccgacagcatcgtcaagggca

SEQ ID NO: 321076 - DNA, 122 bp, Homo sapiens
acccaagcaggggtgtggcagagccagggcccgggcccgctggggtgttggaagggaagccgcgtgtgctgctgacagggcagcgaaccttccccagagcgcagagttcctcgcccttccag

SEQ ID NO: 321077 - DNA, 122 bp, Homo sapiens
tctggtttaagccactattactttcggtttctgttacaacagctgaacccatgctctaaacgatatacttgcccagacattgtgtttgggagagaggggcttggagatggtgtgaaaggcag

SEQ ID NO: 321078 - DNA, 122 bp, Homo sapiens
gagcccagggaaggcctccagagctgggtaagtggagggctctgtgtatgttgctgtacacgtgcactactctgggatggatgccagggagaggaccggtgggtgggtgtgagcgggtgttg

SEQ ID NO: 321079 - DNA, 122 bp, Homo sapiens
atgctacctggaggcagggactgtgtattataatggcgccgtcccctgtgcctagtacaccgtagtttgacacaaaataagcactttgtaaatttagtccgaaggaatggaaatctcatcct

SEQ ID NO: 321080 - DNA, 122 bp, Homo sapiens
caaagatgttcagatccttagaattccagtcccttcctcctcttttggagcacagaacttcgcatccttcagtcttgattcactttcaaaataataattcttcagttagtccattaaaagaa

SEQ ID NO: 321081 - DNA, 122 bp, Homo sapiens
aaaaaagaagaaaagaaaagtgctgggagataaagcagcaccacaaagccccatagaaggcggtatgcatgagagcattttacaagcacgcaagtcactctaagtggtgcgttaatcaggat

SEQ ID NO: 321082 - DNA, 122 bp, Homo sapiens
acctgggtgacgatggggtgacctgagggcacagaaggcgccacaattacctgagtcgggcgcctcggcgcagccgctgccatcggactacttggggaagcacggcccgggagcagtggtcg

SEQ ID NO: 321083 - DNA, 122 bp, Homo sapiens
aaggctttactgaggtagaagaagccggttgacgggcgacttccgaagactggtgtaaagcgaagaaggttctagagtcaaactctgactctcggggcctgactcgcaaaactcgggggctc

SEQ ID NO: 321084 - DNA, 122 bp, Homo sapiens
gcgctctgcgctcccagactctgcgctgcaaaggagtgtcgggattagggtcccatcacccgggttcttgggtttcgagagtccccaaaatttggtgcaaaatttgtgtgtgtgtaggtggg

SEQ ID NO: 321085 - DNA, 122 bp, Homo sapiens
agattacaggcgtgggccaccgcgccggcacgtgtttaatctttgcaacaaccttttgatcgacgaggaaatactaacaagggacagctctgtggtttctgctatcgaaagtttggtggttt

SEQ ID NO: 321086 - DNA, 122 bp, Homo sapiens
ctctggtggcactaggaccgcggcggcgcggccctcgcagccaccgcctcgggcgtgaggcggagcgtagctgttcctggatcctgggcctggctcctcgacccgcccctggaggcggaccc

SEQ ID NO: 321087 - DNA, 122 bp, Homo sapiens
taacttgccaccgtaacacagcagcctttaaaccgcgctcacgctgcctcgcggctgtggcggccccagggcagtgatgcgatgctgtccccgtaaagctgctgagcagcgcctggagctct

SEQ ID NO: 321088 - DNA, 122 bp, Homo sapiens
acgtcaccgatttatcaaaacacaccttccgccgtgtgctgcaacgtggccattacgcaacgtactcggagatccaagatgagatcctggatagtctgtaacaggtcattaggaatttcaag

SEQ ID NO: 321089 - DNA, 122 bp, Homo sapiens
gtctggtgggcaaattgggctggatactgactcgggtggatggtgggcgagggcaggacccgggggcccatgctcacggggacctggtggacgatgctggctgggtaggcagtgtgctgcac

SEQ ID NO: 321090 - DNA, 122 bp, Homo sapiens
cacggaacctgcctggtatcacggcgcatcacgctctgtcacggaacctgcctggtatcacggcgcagcacgctctgtcacggaacctgcctggtatcacggccaccatgtttgatcatctc

SEQ ID NO: 321091 - DNA, 122 bp, Homo sapiens
gatttgctcttgggtttattatctgcccctccacccctgagggtgtcagtgctgtgaggacgctgggaacctgtcttgctggctgataaacccctggttcctagaggggctgggtgcagagg

SEQ ID NO: 321092 - DNA, 122 bp, Homo sapiens
cttagaacagaggccactgctccaaagctctgatggcctagagtaaagcgttgtctgatgcgcgcccagggtgtcactttggtgaggcagcccacttttgtgggcgctcaagcacgagcgcc

SEQ ID NO: 321093 - DNA, 122 bp, Homo sapiens
tgtgtatatgtgtgtgtgttggatctttcctttaggaggtgtaaagttttgtttatgtggcgcttgcagactgagagggggatcctggccactgagagtctctacactgcctgggaatcact

SEQ ID NO: 321094 - DNA, 122 bp, Homo sapiens
aagagacaggtcgggcgctgtggtttacgccagtaatcccagcactttgggaggccgaggcgggcagatgacctaacgttgggagtttcagaccagcgtcaccaacatggaaaaaccccgtc

SEQ ID NO: 321095 - DNA, 122 bp, Homo sapiens
tcaggggaactaacgggtcacaatctccgtggcactggagaatagaaatatctctgttagcgcccctgataggaccctgtggaaatgaagcccgaagtggaagccagcaactgagcgcagtg

SEQ ID NO: 321096 - DNA, 122 bp, Homo sapiens
tgctaggaggccaggctttcccgtctactctgacgttttgaccttgggcaagtcatttttcgctgccctctgcccctgtgtcatcggtagcttctctgcccctcctctgagcatgggaagcc

SEQ ID NO: 321097 - DNA, 122 bp, Homo sapiens
gccgtaataaacaggccccgctgcctcctctcactccattcatcctcccctacaagtgctcggcccttctggccttgctgagcgttaaatccccgtccagctgtttgaccctattacaggaa

SEQ ID NO: 321098 - DNA, 122 bp, Homo sapiens
ctatgctatgtgcccagggctggaggagagctgtaaagggaaggcctccgggactacactcgtgaaaccatcccctgtgggggccctgtcctcacagcccaggccccttccccaagttagac

SEQ ID NO: 321099 - DNA, 122 bp, Homo sapiens
tccctcaggctcgacacgcccccttgcgtcaccgcgtccgtcggcgttctgcgtaatgtccgctgggatttgtagttctctgggaaatgctaggttggattccattcattcatacatggaat

SEQ ID NO: 321100 - DNA, 122 bp, Homo sapiens
atcagggcccaatggagactgagcggacttaaccctaactgtgcacaggaccgcgctctccgacccctttgtggcctctcccagaggtacgggctgcgccccaagccagcagtctctcgtag

SEQ ID NO: 321101 - DNA, 122 bp, Homo sapiens
ttggggttcagtgcctaaaatgcagcaggaggaagatcttgggagtcctgctttctgtcgcgccgggactctggcatcactggatggcaaaccggctccatgggcgaatagtcagcaaaatg

SEQ ID NO: 321102 - DNA, 122 bp, Homo sapiens
ctgagggacacatgcgtgttccgggggttatatgagtgtgacggctgtagcgttaggtgacgatgtcatctccgcgttccaagcgttatgtgcgcactgagggacacatccacgttcccggg

SEQ ID NO: 321103 - DNA, 122 bp, Homo sapiens
ccgggcgtgtgggctggtgtgtgccgtgcaccttactcagagcccactgggccctgtgggcgtcggctggcaggaggagggggtgcttcccggaggggtgctgtgagcctcagagctggcgt

SEQ ID NO: 321104 - DNA, 122 bp, Homo sapiens
ccctgtgggcagcagtgccaggtctggcactcagaggttaggccgggcgcagggagggtgcgggctccgcagcgagcgcgccgggcggcctctaggagccgggtcagcgagtctgggctctg

SEQ ID NO: 321105 - DNA, 122 bp, Homo sapiens
agctcctctcagtctatctccggctgccgcaacaccccttcctcctggccccctctccggcgctgaggggctgactgctaagccactgcaagcaactccctcaggaaaaaaaaaaaaaaagc

SEQ ID NO: 321106 - DNA, 122 bp, Homo sapiens
tggccttcccattggcagggtgcactgtccatcacagatctcagggctctcattggccatcgtatggcaggggtggagctcaccacgcttcgtccgcgtgctccccacgtgaaggcacccgc

SEQ ID NO: 321107 - DNA, 122 bp, Homo sapiens
aaaaattttaccctgcccctctttttcggtttgtttttattctttcatttttacaagggacgttatataaagaactgaactcaacattcaggttgttttttttttttgtttctaagtttttg

SEQ ID NO: 321108 - DNA, 122 bp, Homo sapiens
tcctcaaatctcagcccttggcgccgcgtggctctccgcccctctgggccgccagggtagcgccgcccgccgctcgcccccggctagcacagcaaatcgcagtcccctcgccccgggagaga

SEQ ID NO: 321109 - DNA, 122 bp, Homo sapiens
gaagaccttggagaggagctgggaatggacagcagagggtgcaacataaaagatcatgagcgttccatagaatgtggtcactacagctaggtgggaggagcatgtggagaaagcccttctcc

SEQ ID NO: 321110 - DNA, 122 bp, Homo sapiens
ggcccctgggagcccaagaaagaaagctcttcatcttgttccccaacccacagagcagtgcgccaagtagcgactctttaagccctgggccaccaaccagcccactccccgaaggcagacgg

SEQ ID NO: 321111 - DNA, 122 bp, Homo sapiens
gggtctggagagagcagggagggtgccttcctcgcacagccgggctccctgctcgcagtgcgcttgtgtgcacccctgtgttggttgtgtcttcctgtttatttctatgtgctgctgctctt

SEQ ID NO: 321112 - DNA, 122 bp, Homo sapiens
cagggatcagggcttcccaagcactgactattcttccttgcattttctgggtgccttgctcgatgcaaatgcatacaaacgtaggcttggataagcgccttggcaacgcccctacaaatatt

SEQ ID NO: 321113 - DNA, 122 bp, Homo sapiens
tcaatgtgttcattcacgaaagtgctgactttcccatacaaaatggtcagcctggccgggcgcagtggctgcactttgggaggccgaggcaggcagatcacaaggtcaggagttcaagacca

SEQ ID NO: 321114 - DNA, 122 bp, Homo sapiens
ggtctggaacctgagagggggacccggccctgcccttagggacgctcccgcccaggagtgcggtttgtgttgggacctggcttctttcgtttgcttgcagcagtagctccagggactgtctt

SEQ ID NO: 321115 - DNA, 122 bp, Homo sapiens
ggtttgggggctccctcttctagaggtgagcaatttagagctaaggggaaatttagaagccgcgtaacagacccgttaacattcacatcggaggcaactgaggcctgcagaagttaaggctg

SEQ ID NO: 321116 - DNA, 122 bp, Homo sapiens
tgggcgcggagctgcaggacctgccggttgtgttctccgagatcctgaaaccacgcgaaccgtgaagcgcccggcgaccgtcctcggtcccgttgggtcctggcgttggggtgtctgatgag

SEQ ID NO: 321117 - DNA, 122 bp, Homo sapiens
aacactgaactgagagagtaactgcaaagcagagcataatttaaagccaggttatgcctgcgaccacaggctagaaacaagatcctaaatgtaaaagaagaccaatcgttcacacatattct

SEQ ID NO: 321118 - DNA, 122 bp, Homo sapiens
tactaaggccgtcggtcattaaagcaattattgccagccaagaaagccttcaaggcccaccgcaatccagataggctagccaggaacctccatggagtgagctataacatgatggggtttta

SEQ ID NO: 321119 - DNA, 122 bp, Homo sapiens
gagtgggaccgtggccgtgagcgccgtagtcggggtgaatatcgggactatgaccggaatcggcgagagcgcttctcgccacctcgccacgaactcagcccgccacagaagcgcatgaggag

SEQ ID NO: 321120 - DNA, 122 bp, Homo sapiens
ctttatgcaggctgggggtggtccagggcggctccacgcctccacttcctgtggggccagcgcaggctgcggtccatccagggtggcagagaggaagccagcacgcccaccgggcagggtcg

SEQ ID NO: 321121 - DNA, 122 bp, Homo sapiens
cttgttgtgcaatgttttcaagttgcatgcttgtcaacatggggactgacctggcttccacgtcaccatcgctacagagcctggctgaacacgcgtcatctgccaaaagtttcaggccagaa

SEQ ID NO: 321122 - DNA, 122 bp, Homo sapiens
tcccaccagggctttccagagatgcagggcatgaaacactggaaaccgcagaaaacgccccgttagcacagaggtccccacattcaggggcccgtgacgaagcgcagggcccttcggggaag

SEQ ID NO: 321123 - DNA, 122 bp, Homo sapiens
agaaaatggaggcagatttagttttccaaacaaacgtgagccccgagcagcatcagttatcggaggactctctgatccccgggtttcttggcattgtactatgcagtgacttcttcctacca

SEQ ID NO: 321124 - DNA, 122 bp, Homo sapiens
cagacaggaagcctacaggcaagtcacttactcaacaagataacctccatttgcaatgagcgcttcctgcactgggatagtgtaggttctgctgcagtagaaaacacactcacatctcatag

SEQ ID NO: 321125 - DNA, 122 bp, Homo sapiens
gtgaatgagaactatcattcaatctcaccaggcagaaactattcctcaagggctgtatgacgtctgtaagaaggcagttcaaaacaccgcagggcagtgagaaaggaaaaaaaaaaaaaaaa

SEQ ID NO: 321126 - DNA, 122 bp, Homo sapiens
ccaccctccgcgccctgcttcctcacgtcccccagccagccccagcgtttccctcggcctcggctggccccctggccacccccagcctcgccacggctcgctccccccggggtcaggccgtt

SEQ ID NO: 321127 - DNA, 122 bp, Homo sapiens
cagctgggatgtctccgttgttttgatactgcttataatgccataacaaacgcccttgggcgtatgtgatttcctacattggaggcggctgcttcaggcgatacacctgtactttgctcata

SEQ ID NO: 321128 - DNA, 122 bp, Homo sapiens
gacaggtaataggactgtggtcctttctattatagaaaatcattggctcctcacgcaaatcgacccaccccttattggtgctgtctgtatcagaggagtgaatgctttgaccagtaaaacaa

SEQ ID NO: 321129 - DNA, 122 bp, Homo sapiens
ttgaagccttaaagtggtggacaggcgctctgctcgagtaattcaccaggtttactaaatcgttcctaagggaattataatttttagagactaatcttctccattgttagatgcacaattta

SEQ ID NO: 321130 - DNA, 122 bp, Homo sapiens
gagggagaaaagggtggggcagccagccagggctgttactcatacggaagggcctccacacgcaagcatgggagggggcaggaagctccccctacaggctgtcccttagacagcctttatgg

SEQ ID NO: 321131 - DNA, 122 bp, Homo sapiens
ttagccttccaggagcctgagaaccatggctgggcaacgttgttgctagctagtctcgcacgtggagactgagcacaggactgctctgcccatctgcttatccccatccaggaaacccatca

SEQ ID NO: 321132 - DNA, 122 bp, Homo sapiens
cttagaaccccaactgcctgcagtattgactgctggcggctcacagtgtgtccctccatacgggatcacctgtgacaagggcagctgcctctcccaagattccaccccctccctgatgacag

SEQ ID NO: 321133 - DNA, 122 bp, Homo sapiens
gctgggcgcaggccggggctctgccctgggaggccgtctgtttaggcccgcacgcagctccgcatctggtgctcattaccagatgacaaagagccggctctgggcccccttccccactccca

SEQ ID NO: 321134 - DNA, 122 bp, Homo sapiens
cccaccaccaacaggactctattataaacttttgttctaaacaaggagccaggctgggcgcggtggctcacgtctgtaatcccagcactttgggaggctgaggtgggcggatcacctgaggt

SEQ ID NO: 321135 - DNA, 122 bp, Homo sapiens
ttccaagagtccaagcttggcgagtgcaccgcagagagaaacatgctccccatagaaagacgagggcatccatcattgaggatcctgtcccccgagcacccctggtctgcaacagaaacctg

SEQ ID NO: 321136 - DNA, 122 bp, Homo sapiens
taccaggcccatacctgtgtttggattctgttcagacctctaaaccacaagatttggccacgccgcaactccctttcagcgtgatcaatctcttcaacatcctctgctaattcctcctcagg

SEQ ID NO: 321137 - DNA, 122 bp, Homo sapiens
ttatggtctgtagcaggcaaacaacttcgaacttctcaaggttgcttggctaaacacgaacgagtggatgaagagaacacctcagcaataaatataatgcctggaaaagaattttactaaga

SEQ ID NO: 321138 - DNA, 122 bp, Homo sapiens
tgttctgcggcgcgacgtggcccctccgcaccggcatcctgagcccatgggcgggccgggcgggcccccacccaccccggcccggcccggcccagcactaggcttcgggtggcccggccggg

SEQ ID NO: 321139 - DNA, 122 bp, Homo sapiens
gcagagaggaaggactgactgaggggctgtgtcctcttatgggaatttgggaacatccctcgtcttgtcctctcttctgcacagcacaggttccagcactggttttagaagaaaaaaatacc

SEQ ID NO: 321140 - DNA, 122 bp, Homo sapiens
aggcaacaaattgaaagaaagattgagggcactgagtcattgtagtttctaacgatacaacgaatacattattgggttcgtgtatcatactgggaccttgttacttacaaaatataaaataa

SEQ ID NO: 321141 - DNA, 122 bp, Homo sapiens
tgagaacggagcccgcagagtctcggggtggggagattgggcagagccctggccaaccgacgggctcagacctgtgctgctggctgggccagcagctcttgttgcctgtgtttatttccagc

SEQ ID NO: 321142 - DNA, 122 bp, Homo sapiens
cggagcacgtcctgctgtcctcgccggcggacgcggctggccactgcggcaccctcctcgcgatactcgggcgctagaaacccgccttcagagcctgctgtagcggaccgaacctgttgcgg

SEQ ID NO: 321143 - DNA, 122 bp, Homo sapiens
agctcacagcccactcttccgtggcaaggcacctcctgaggtgagtagctcggcaccacccgccgccccatccttctgccctggctaatcctctgcgtcacctgtttctacgcagcaagcta

SEQ ID NO: 321144 - DNA, 122 bp, Homo sapiens
ctccttggccaaattcaattaagcaaatatttattgagtggtcactcccccagagcttgacgctggggtgcaccgggtgggagtggactgggcctgccctcccaggactgattgaccaccgc

SEQ ID NO: 321145 - DNA, 122 bp, Homo sapiens
cctgcccgtggaggcttcggtggaaggaatgccctgcacgtcagactcagtgcagcgacgcggggcaggcgaggcgctcagcttctgcccgtggaggcttcggtggaaggaatgccctgcac

SEQ ID NO: 321146 - DNA, 122 bp, Homo sapiens
agggtgcggggacaggcggcccgcgggggcgggggggtcatcgagggggtcaccttggctcgcccaggccgagggggctcctccggtgcttccgaagcgcgtgggctactcgtgtcgcatgt

SEQ ID NO: 321147 - DNA, 122 bp, Homo sapiens
cctggggctcctcctcgcacagcttgagaccctgccggggggcacctctggggcagatcgcgggccccaaacccagttgtcgggagcgccaggctgaacagtcactccgacgtggggtggat

SEQ ID NO: 321148 - DNA, 122 bp, Homo sapiens
ggaaacccggggatcccatgcaatcccttaaaaaaaaaccctgagactcatgggctatagcgtctctctttgggggtagctactctgccggttccccagccccccaggtgtgttccagcaag

SEQ ID NO: 321149 - DNA, 122 bp, Homo sapiens
gaatcaggactacacccttagatctcagcacttggcaaacttcctctcatgagagcgtcacggctgcctctgtgagctgaggtatcaggcccctcttccctatgaatgttgaagattccaca

SEQ ID NO: 321150 - DNA, 122 bp, Homo sapiens
ctgtttctccagcttggctcctagggatgtgatcttgtcacccacgctgcctcctggaagcggaaagccagctgtttccccgctgagcctccctccgtcctcatgctgctgggggaccgggg

SEQ ID NO: 321151 - DNA, 122 bp, Homo sapiens
ccaacccactgcccctctttggcagcccttgaaactcagttcaaagctaggcctggctcccggccatggcccctgctgccttcacctgctgagcgctctaggaagcctcccaaatcccaagt

SEQ ID NO: 321152 - DNA, 122 bp, Homo sapiens
ggggcggctcggtcgggcagggcgcgggcgttggcgtggggggtgttgtcggggactccccgcgctcgcgtcctgggcctcccggcggctgcaggtcgcggccaaggcccagcgaggcgagc

SEQ ID NO: 321153 - DNA, 122 bp, Homo sapiens
gagggtcccgaactcggcttgcccacacaaaacatggtagcaggagagcagcatttccgccgggcatgtccatatccaatggggcccatgggagaggcgtagtcttctgggtcttgcccaga

SEQ ID NO: 321154 - DNA, 122 bp, Homo sapiens
gggcgacagacggcacctggaaaatcaggtcactcccacccgaatactgcgcttttccaacgggcttaaaaaacggcgcaccaggagattatatcccacgcatggctcggagggtcctacgc

SEQ ID NO: 321155 - DNA, 122 bp, Homo sapiens
aaatggtggcttcctttgttttctggagcaggcacacacacttggcaacttcagagtccacgaagatccaaggaaataagtccacgcagacagagcgggtcggcgctctggactcctcaaat

SEQ ID NO: 321156 - DNA, 122 bp, Homo sapiens
agcttgtcgtagggagacagcttgttggtcttgcggcaggtggaggccaccccgtacttgcgctccgacgccaggatggcgcgcttgttcttcaggatcgtgctcagcgtggacggcgggat

SEQ ID NO: 321157 - DNA, 122 bp, Homo sapiens
cggtgcggcgaaggtttagttcaatcacccggttctagaagccgcgtcgctgagccgcagcgcgtcgcgcccgggcagcgggtgaacgcaaaccccgccctccaggaggctccgcccctgcg

SEQ ID NO: 321158 - DNA, 122 bp, Homo sapiens
aatggcgcccatcaggccgccgcgcccggctgaggcgagcgcgggaggcgcggcgcgcgacgcccccgaggcccacggcccccgaaacggcccccgacacccggtcgccagcgctgcgcccc

SEQ ID NO: 321159 - DNA, 122 bp, Homo sapiens
ggttttcgattctcccagccaggagcagaaaggaggcagagactgccctgagccgccaggcgggttctgccatctcgcagaaagtggccggacaggttgggtctgaagccacatagagttgg

SEQ ID NO: 321160 - DNA, 122 bp, Homo sapiens
atacacacacggagcattgattcacaaactcaggccactcttctctacaggctttgtgggcgtgactgcggctgtcctgatgatctttgccttctgacagcaacactgccagctgagcactg

SEQ ID NO: 321161 - DNA, 122 bp, Homo sapiens
ccggagtaagtagggctccgggcggggcgaaaggaaaagttgggtccctagagtgaagaccgagttctttctgtccgtctacactgagcgtactcggggaatgagttagagccagtctcttc

SEQ ID NO: 321162 - DNA, 122 bp, Homo sapiens
aaccttgaagaacctggccacagttaatgaccttggcatatatcagagattactaaccaacgaaaactcaatctgtgactgtgcccttattacttcctcactttactgaaccagccaaccac

SEQ ID NO: 321163 - DNA, 122 bp, Homo sapiens
gctcagggtgccgtccagcttcgcggcggcggcggccaggtccttctggcgctgcgcctccgcctgctcctggagctccacctgcagggaaggtgaactgggccccgacacacactgaggcc

SEQ ID NO: 321164 - DNA, 122 bp, Homo sapiens
aatcacgacagtggcagaggccaacctgacccgctccacctgcctccaccccaacccgcccggctgcttcctgagcgtgggccaaactaactttgacaggaacttagtttacagtttaagtt

SEQ ID NO: 321165 - DNA, 122 bp, Homo sapiens
catttgaggagcatgagccaataaatggcattaaagcttttacagctggaatatgggctccgccagcagattagggctctccgacaggcctgtttaccatattttggttcatttctaacagt

SEQ ID NO: 321166 - DNA, 122 bp, Homo sapiens
cctttttggagacagtcatgtcaagctcttcccagtcacccacctcttcccagactcactcgcccagcagttgctgctgctaccgcagccacccatgctgtgcatgctggagctgagggctg

SEQ ID NO: 321167 - DNA, 122 bp, Homo sapiens
tggccaagcccagggctggaagagcggctgcccccagacacgtgaggggcgccctgttgtcgccggctcaaccacaggcgcgtccgctgcgagccagcggtgaggggtggcggccaagaggc

SEQ ID NO: 321168 - DNA, 122 bp, Homo sapiens
tttgcatgacagcctagcttgttgctgtgtgaccttggattagtcagctttctgtacctccgttttcctccctatcagattgggatggaaatgagaactcgtgtagtaacagcccctcaata

SEQ ID NO: 321169 - DNA, 122 bp, Homo sapiens
tgggaaacccaagaatgactggactacgagcagccccgaaaataaactcttggtgtatttcggagccgtcgtggcggcacggccgtcccttcacaaccggggatggattacccagaagtcag

SEQ ID NO: 321170 - DNA, 122 bp, Homo sapiens
atgcccgactgccccaactgcaactacaggagaaggtaaggctgggttgtggtgtcagcacgactggcccattggaccttcactgggctgagtggaggcctagaaccgacccttagagagca

SEQ ID NO: 321171 - DNA, 122 bp, Homo sapiens
caaagccatcctgggccgcatgcgggcctcgggttggacaagcttggtctaatgggaatacgaagacagccctggctcccactgtgagaaccccttcagtccaagcatactggtcctttcca

SEQ ID NO: 321172 - DNA, 122 bp, Homo sapiens
catttaacatacctcagaggtctctgggtacctagtctctcagaggcctttggaggcccacgaaggcttatcttaactaaaattggcagggctggctgataaagttaacggaactccccatt

SEQ ID NO: 321173 - DNA, 122 bp, Homo sapiens
cttccccctcaggcctcagtttccacttttgtaaaacaatggccctggctctgcttcctccgcccacaaaccatcactgtgaccctgatgggtctacttccccctcaggcctcagtttccac

SEQ ID NO: 321174 - DNA, 122 bp, Homo sapiens
cttaagtcaggcccttgactctggctgccactggcagagctatgcactccttggggaacacgtgggtggcagcagcgtcacctgacccaggtcagtgggtgtgtcctggagtgggcctcctg

SEQ ID NO: 321175 - DNA, 122 bp, Homo sapiens
tgccggccagcgggagttctgggtgggcgtggccttggcgggcccggcactcggagcagccggcagggcctgccggcccccggcaatgaggggcttagcacctgggcaagcggctgcggagg

SEQ ID NO: 321176 - DNA, 122 bp, Homo sapiens
ttttccaagaagtacatacattggccgggcacctgttttcaatattcaaacacaacttcccggggcgaggtgggcggggtattgggggggtggggaagagaacgtgaacttcactgggtgag

SEQ ID NO: 321177 - DNA, 122 bp, Homo sapiens
cctttgcaactcaaccccgtgagtacccagccaggtccggccacgcacgaaagcgcaccgcgcctccctgcagcgtctgcagatttgttcaggggccaagagacccgcagccccgacggagg

SEQ ID NO: 321178 - DNA, 122 bp, Homo sapiens
gatgcaatttggagtcggggtcatggcttgaaaacatctgccatgaccttctccagagaccgagtcctcagggttcatctctcagaggaaagaagttagcaacctgctgagctgagtgggct

SEQ ID NO: 321179 - DNA, 122 bp, Homo sapiens
tgcctcccggaagtgatttcctctgggttacggcgcaggcgcaagataagctaggagccgcgcgagtcgtagtgtcgctgtttgcgggtctccgcgcgggaccggggcgcagcggggtcgct

SEQ ID NO: 321180 - DNA, 122 bp, Homo sapiens
ccctctcccggccagactctgagcaggagctccgcccccagcgcgccgccccagccccggcgccttaaaagccgggcgcaccgccccgccgcgccctgcctgccgcacctctcctttcttct

SEQ ID NO: 321181 - DNA, 122 bp, Homo sapiens
gcgttaaaagaggattaaacgacttaaacaagaaggcatataacttaaactagtgggtcccgtgccaaagacattctagtaataacatggttagcaaaaacagtatgaagaaaggtctagta

SEQ ID NO: 321182 - DNA, 122 bp, Homo sapiens
aacttaggatggatgctgagggacctgcaaagggtggaggctggaatgcctggatggcctcgtctcatcctgggattcattatcccaaggaagtcacttcagtttctaagacttaagatcct

SEQ ID NO: 321183 - DNA, 122 bp, Homo sapiens
tccggaccggccaggggtccttggggggaagtccggagcaaactccccaaactaggctggcgtgggggagccgcgccgaacacgccagggcgcggtcgaaagggttaattcggagggcctct

SEQ ID NO: 321184 - DNA, 122 bp, Homo sapiens
cttttttcttttgccgaaagaccctttctgctggggagcctcttgtgtccagcctaggcccgcgtgcagcgccgacggatgaccgtcttcttggcaagtgcgaggatcctcctcccctcggc

SEQ ID NO: 321185 - DNA, 122 bp, Homo sapiens
taaaattggtatacaacctcccactgctatatttgactggctaaaaaaacccaaaaacagcgtaactcctcattgtggtgagaggagggagttgacaaggagaggaggatagttcaggtgag

SEQ ID NO: 321186 - DNA, 122 bp, Homo sapiens
tggcggcggagggcggggccggcgcgttgaggcaggagtgagcgcagcttcggcggtcaacgcgctttattccgaggggcttcagatacagatgaccccagccctgcatccgcccggaaggc

SEQ ID NO: 321187 - DNA, 122 bp, Homo sapiens
ctttaaagtgatgattcgggttcaatacaaagaactggccgtgccacaagttcagtggcccgagctgcattacattcggggtgcactttcagattcaagaattttgatggcttgtaaggagg

SEQ ID NO: 321188 - DNA, 122 bp, Homo sapiens
agagcctaggaagcagatcttgggggaggcgggccgggctgtggagacccgacactcccgcgctggccgcgaccctctcgctgtggagcctgtggccggcccgggcgacagcagccggcgct

SEQ ID NO: 321189 - DNA, 122 bp, Homo sapiens
catcactgctaatgctcagggataaaccttaagagataaccatgactcctttctttctttcgcactccatacttcaagtatgtcagcaaatcctctcagctctatcttcaaaatatattcaa

SEQ ID NO: 321190 - DNA, 122 bp, Homo sapiens
acgcagcgggacgcgggctccggactccctgggggcagccttgctgtgggtgagcaagcgcggaggccgagcttcttgcaaacggactccaaggggcaacgaccttcgcgcgtcaccaaagt

SEQ ID NO: 321191 - DNA, 122 bp, Homo sapiens
cctatactcacccacctgcgctggcacacacacacaccggcgctggaatgcacgcatgcacggcccaaaggaggccccacgggagcagttctcctggttacctggtttgtacttgaccggtc

SEQ ID NO: 321192 - DNA, 122 bp, Homo sapiens
ggggcggacgtggggaggggttggccggggccagaagcagggtgcagggcaggcgcggggcggtcacgggggcggggccggtcgcggggcgcggggcgggcccgagctaccggtagtctgcc

SEQ ID NO: 321193 - DNA, 122 bp, Homo sapiens
aatacccggaaggattacatgatagctcaaggacagacaaggtgtccagaaggaactggccggaggaggtgacactgagacagcctggagataagggggtagaaaagggagaagggaggagg

SEQ ID NO: 321194 - DNA, 122 bp, Homo sapiens
gactgtctttcctatagactgtaagctccatgagggcaggcacatgttgttctcattgaccgtgctggccccagtgcctagatgcatggctggcacattgttggcactcaacaatggttgaa

SEQ ID NO: 321195 - DNA, 122 bp, Homo sapiens
gcgggaaagccaaacgccgcctccctgcaaaccgcgcgccaaccagagcaatgggcttaccgcaggaactcactggggaactgctcgcgttggaaaatgcactccagctcctgcagctgcaa

SEQ ID NO: 321196 - DNA, 122 bp, Homo sapiens
gtacagaaacacaaagacagtcaaggaacagagtgactcggaggtgaccggggccctgagcggagccatggccagggctgacgtttcaccttcatcatcagggacagcttcagctccgggtg

SEQ ID NO: 321197 - DNA, 122 bp, Homo sapiens
aaaagaaatgaagaatgtggactctgttcaccaggaattcctggcttatctgcggagatacgcatattccagcagttctcgactgagagtgattttttttcccgccaggggacatttggtga

SEQ ID NO: 321198 - DNA, 122 bp, Homo sapiens
ttccttcttccctaagggttttcagctccagtaacagaggtgcctgaaatgggagatctgcggggaccaggccgggactccctggctccgaggccgggacgtggcgcgccctccgctcctcg

SEQ ID NO: 321199 - DNA, 122 bp, Homo sapiens
ggtcagcactgagttacatgctttaaagcctgtcacccttttgtacttgttagaattaaacgtgggcattttgcaatacataagcgcttcttgaatggcataaactctcaaaggatgttcga

SEQ ID NO: 321200 - DNA, 122 bp, Homo sapiens
caggctcacgcgctcctggaaatccgagggcagctggaacgggtgcgaggagggggacggcgggtacagggtcactgttagcatggcagcccagccctggccctgaagctgaggactgatgt

SEQ ID NO: 321201 - DNA, 122 bp, Homo sapiens
ggtaagcagctgcctagaggacgacctttctgataaaagagtaaagcatgcaggcatgaacgaatcaatgaacatttgaatgaaatagccctgggatcacaaagttccaagaatatttttca

SEQ ID NO: 321202 - DNA, 122 bp, Homo sapiens
gatcctgggacttagctctgggcagcagggaaaggggaggggtggagatgtaggggacaccgtcagaagccagggagaggaagatgaattccaggtcctgctgcttgagtcggggtggactc

SEQ ID NO: 321203 - DNA, 122 bp, Homo sapiens
attagctaaacatcttctcggtcccagaaggcttcccctgtgaagtctgcagcgttcaaacgacaaccagcaaatccccagagacaggtccctgggaattagctgcgccgggcgggatgaaa

SEQ ID NO: 321204 - DNA, 122 bp, Homo sapiens
tcttgagactgtagagggtgttatgacagaggcatccaatttctgcttctaaatgtactacgataaaataagcacgtccttaatgccttggcattagatgaatcaatctatttttctaaaag

SEQ ID NO: 321205 - DNA, 122 bp, Homo sapiens
agctggctgtggacaagatggtcacgtgcattgcggtggggctgcccctgctgctcatctcgctggccttcgcgcaggagatctcgattggtaagcctcgcccaggacggaggggagtggcc

SEQ ID NO: 321206 - DNA, 122 bp, Homo sapiens
gcaagggccggggtcgaattgaggttacagcccattatggcaaaattattgcatttccctcgcagttccattaggatgtaccaattgttaggccgtcagctgccgatcgcgcgcccggcgag

SEQ ID NO: 321207 - DNA, 122 bp, Homo sapiens
gaagtcttcccttcccgcccctgtcctcccctcccctatagttcaccctgtcctcctagccgcctaacaagggtgaggtgattctgtgataaaactcctctttgggttctagtccttgtatt

SEQ ID NO: 321208 - DNA, 122 bp, Homo sapiens
atgtcagcatcccagatgtgcagggagttggtcccacaagttgctgacggtgtgatggtgcgttctcttgacctccatttctaatctgtaaactggagaattatagtagcacttagtcattc

SEQ ID NO: 321209 - DNA, 122 bp, Homo sapiens
accgcgggcttggggacagggtctcccacctccagtggatacacagctgcgacctggacccggaccggagcctcttcgcgcggggatgaacataccctacgatggcgccagttacctcgtcc

SEQ ID NO: 321210 - DNA, 122 bp, Homo sapiens
agcgctggagaagcgagggcgagaggcgagcgctggagccggtgcggctgacaggtgaggcgcccggcttagaccatggctgcttcccacaatgccctggcactgaaagtgtgcagactcct

SEQ ID NO: 321211 - DNA, 122 bp, Homo sapiens
cttggctgccccctagcgagggccgcagcgcagcctgagacacccgccggggccgctccacggccgtcggatttagactggaagctcggtccaggtccccagcttgatgcgcccgcggtgta

SEQ ID NO: 321212 - DNA, 122 bp, Homo sapiens
gaagctcacatctgctcgatttaaagttgctgtttcagactaacttctctgccgctaccccgcccagccgttcatcccccccacccacccccatcctggcccaaattgtttcctaaagtagg

SEQ ID NO: 321213 - DNA, 122 bp, Homo sapiens
ccacattcagcagctgttacctttgctcatcaatggccgttcaaacggctgcctattgatcgtgggcctagaaaggcacagctgagctcgttcaaagacgtttgtcacggagccacaggttt

SEQ ID NO: 321214 - DNA, 122 bp, Homo sapiens
ggcagagcagatcacggaatacagatagcactgagagggctttaggcgtgtgccagatcccgctggctgccacccagtaagctggtgcatgtggaggcttagaatagattcattggcagctg

SEQ ID NO: 321215 - DNA, 122 bp, Homo sapiens
aagcgttaggttgtctcaaagcaactgtatgatagtccttaatcagctgcaacttcttgtcggaggtgtaggtattctgctcgatgctccagatgacgccccaggcggacctgcggccccga

SEQ ID NO: 321216 - DNA, 122 bp, Homo sapiens
acttccatcacagacttggaagaggggtccaggatgggtcactatcatgggggagagcaccgggcttagagtgataataccttctggcctaccagctctccagatttccaggaagagctgtc

SEQ ID NO: 321217 - DNA, 122 bp, Homo sapiens
aagcggggagggggcaggcaggggccgggcccctcctggcgagcgactcatgctgtgactcgcgactgagggcggaccccggctggggaaagaaggggcttcctccaaggttttcttttcta

SEQ ID NO: 321218 - DNA, 122 bp, Homo sapiens
cacacacatggcttttctctcacacacactattacacatgatcacacatggggcttttctcgttattacacatgatcggactcatggcttctctcacacacacatgctattacacatgattg

SEQ ID NO: 321219 - DNA, 122 bp, Homo sapiens
cagtcattattataattgtttcacatatattaactcatttaatgctcataagcatatggccggcttctttgtgcgcatagacatactctttgaaggcatccacatagaatttgatgaaatta

SEQ ID NO: 321220 - DNA, 122 bp, Homo sapiens
gagacctgaacctattttggtcaactgttatgccacaaaaaaacgggagatgccgccgggcgcggtggctcacgcctgtaatcccagcacctttgggaggctgaggcggtggatcatgaggt

SEQ ID NO: 321221 - DNA, 122 bp, Homo sapiens
gccacgatttgatctcaggccagtgtgttaaactccaatttgcgtgctcctgtccctccccgcgcgtcggcggagctcggggccggactggacctgccgagggaggggcggacagtcctgac

SEQ ID NO: 321222 - DNA, 122 bp, Homo sapiens
tacaaggacaaggaggtcaggtttgggcctacatcccggggacaggggcggccatggcggcggcagccagggaggaggaggaggaggcggctcgggagtcagccgcctgcccggctgcgggg

SEQ ID NO: 321223 - DNA, 122 bp, Homo sapiens
gggtgcgggtgatccctccggaagtcgctctgctcctctggccgggtctcctcctcttcccggccacttatacccttgagcaccaagagttcgcccatttaggccgcctccgggaacggaag

SEQ ID NO: 321224 - DNA, 122 bp, Homo sapiens
ccgagctgcaggagtgaggccagggcggtgaggatcatgaagagcagcagccctcccctgcgcccgaggaatcggaccaccacgcacatggccaggcaggacaccagcgcgatgctggccgt

SEQ ID NO: 321225 - DNA, 122 bp, Homo sapiens
acacaaggaggaacttgggtgaaggctgagtgtgaggcacctgaagtttccctgcggagtcgataaattagcagaaccacatccccatctgttaggccttggtgaggaggccctgggcaaag

SEQ ID NO: 321226 - DNA, 122 bp, Homo sapiens
tgactggtgggaggggacagccatgaggtctaggaacttggatcggggaggctacagactcggcgaatcctgcgaaggggaagggcgggggcgaggcttctattgctttttgctcacagttt

SEQ ID NO: 321227 - DNA, 122 bp, Homo sapiens
aagaggcggttgggaggcggagcccggcgcgttaacccttctgctgctgcgtgctcgccgcggagtttcccttgccggcgactctctggctctggccaagcgcttagacacacaggctgcaa

SEQ ID NO: 321228 - DNA, 122 bp, Homo sapiens
tccacctcttgtcagcctgctctctctggtcaggattggactccctcggggtttcctcagcgacgccgcgtggtctgggggctcggagaccctcctcctccccaacccgcccgcccccggcc

SEQ ID NO: 321229 - DNA, 122 bp, Homo sapiens
accgcccccttctcggactggatctctgttcttggtcgagcctggacccactcaggtagtcggacgccggccagggagtctccacctcctcaccagcggcagccattcggagcgctcgggcg

SEQ ID NO: 321230 - DNA, 122 bp, Homo sapiens
gggttcaggcgactcacatgcctcagtctcccaagtgctgggattacaggcatgagccaccgcacccgaccacaacccagctttataagggttgtaattgaggtctgtgcagagttcagcga

SEQ ID NO: 321231 - DNA, 122 bp, Homo sapiens
cagcgcagcattctctttttagcagctgtttggaaaaaacttgcagtgctgatgacaactcgggtgtgtcgatgcatctctgcgtttgtagagcttgttagcgtatttggaggttttgtgcg

SEQ ID NO: 321232 - DNA, 122 bp, Homo sapiens
tcccctgctgtcggcagggtctcggctccgctccttctaagcgcgtgtacccgcgacgtgcgtctgcgagtagaaagcccgtgtactgctccacacacagcggccccacctcagtccggtct

SEQ ID NO: 321233 - DNA, 122 bp, Homo sapiens
ttcaaccagaagatccgcagaatcaaggcccggcaagccaaagggcgctgcatcgccccgcgcccggagagtcgggacccatctggcccattgtgctgtgccctgctgtgcgttatcacatc

SEQ ID NO: 321234 - DNA, 122 bp, Homo sapiens
ataattttcaaagtgagttcatcgggggatttaatagccaggcaatgtccattaaaacagcgacaaacatggggagaaaaggaatagttccaactggaaactcatgctggcttgacagttgt

SEQ ID NO: 321235 - DNA, 122 bp, Homo sapiens
ttttcacattggtatccttccaacctcagggaggaaacactgccaggctttctgggtgaccgcgctgcctcctgcaggtcaggatggggacggcgaggccatgccaggctccatgggcacca

SEQ ID NO: 321236 - DNA, 122 bp, Homo sapiens
ccgggcaggagaggtgaggcccgctgcgcgccgggctggcggaggagctgtgctttatcccgcagcgagaaggagctcgtgaaggctctgaggctgggagtggctggatgaaagtcgtgctt

SEQ ID NO: 321237 - DNA, 122 bp, Homo sapiens
tcactcttgcaccttccgacttcctttccctccggctcccggcgggcggcaccctctagccggctctcaactttgaggagtttcaagcagccgcggcggcagcagcagccctggacgcagca

SEQ ID NO: 321238 - DNA, 122 bp, Homo sapiens
gcaacgtggtgggatgagcagcagttggaagaggcttcaggagcaggagccaatctcgcccggtgcccatcaggagatgtcgctgtggtgtccccagctacttcatgctcagtccctgctct

SEQ ID NO: 321239 - DNA, 122 bp, Homo sapiens
tcgaagtgcccagggccacccgcatcatgctacagcagcccctcaaaggtcagggtggcccggggccctcctgaactccaggtctggccagggtttgaccaccctgcacccagctctcgact

SEQ ID NO: 321240 - DNA, 122 bp, Homo sapiens
tagaattgactggtttggactaaatgttgcaagcggggaaccttgagctacctacgccagcgttctggattattttccaaatttggttcctgataatctgagaaagctatgcgctcagtaag

SEQ ID NO: 321241 - DNA, 122 bp, Homo sapiens
acatatgtcgggggcaagtgccagcgatatatacacgatagcgattcggggatgacacatcggctgcaaggactgctatattctcaacattcctcaaaagggtgtaagtgtcttaaacagag

SEQ ID NO: 321242 - DNA, 122 bp, Homo sapiens
tggttcacatgcctctgacagtgtgagcaatgaagatagctcaagcttgcacctggcgcccgtaagagccttgtgaaaggttagggccatctccactaagagtccttcccttggtcaccaat

SEQ ID NO: 321243 - DNA, 122 bp, Homo sapiens
tttcggggaaggacagaaccaagaggctttagtagaacccggaaacctggcattcctttacgatccggcattgagctttgccctggacttcctaggagttacaagatctgaagctgctgttt

SEQ ID NO: 321244 - DNA, 122 bp, Homo sapiens
cgtatacctcgttggcggccagcgtcactcgcctcaggcggaacagctgagaccgtgtcgcgcaaaaggagataacaggccgatactaactagactaactcgacttccggacagcgtcggaa

SEQ ID NO: 321245 - DNA, 122 bp, Homo sapiens
cgtggctttgtgcacgtcggcttccgggaagagctttacgatacattgaccgacattttacgacaggcgggattgttttgtggctgtcagctttccccgtggtctgagtttgtggctgcatt

SEQ ID NO: 321246 - DNA, 122 bp, Homo sapiens
acagggctgcgcaggtttcccccgtctgcgaatggaccactggaggggttcaaaggttcgcgtcccagtacgggaatgagcctctttgatctcttccggggctttttcggctttcctggacc

SEQ ID NO: 321247 - DNA, 122 bp, Homo sapiens
ggggtgggcgggggcggagagaatgaaagcaaaagagcatgctggctgccccctggaaaacggaaatgttcagtgtacacagagagtggcttgcatatttcactctgacatcttactactat

SEQ ID NO: 321248 - DNA, 122 bp, Homo sapiens
tatgtgggtggcttctagtttgcaacttcaagggacaagtattaatagttcagtgtatggcgttggtttgtgttgagcgtttgcacggtttggataatcttaaattttgacggacactgtgg

SEQ ID NO: 321249 - DNA, 122 bp, Homo sapiens
gcaaccccatagaggaagggctgtggcccagggtgggtgagcaaccaaggcgggtgggggcgctggggagtcggtgggcctgggcggggtcactgggcactgtgacctctgtcccatctggg

SEQ ID NO: 321250 - DNA, 122 bp, Homo sapiens
agggggccgagtgcggctgtgccggtggctggagtgccgaggggtgcggggtgccgggggcggccgcgtctacgctgtccggagggtgaacggccgcgggcttgtcggggctgggggtggcg

SEQ ID NO: 321251 - DNA, 122 bp, Homo sapiens
ccttgcagagacggaggaggctgccagatgtgggggcggtgggggttcctggagtcccaccgcctgccctaaatttccactccgcccttgtcgcccagtgtgaccttgggcatgtactgcag

SEQ ID NO: 321252 - DNA, 122 bp, Homo sapiens
aacgcgggccggcggctggcctgctgcgtggtgggcgtgtgcgggcccgggctctgggagcgccaggcgcgggagcactcagagcgcaagaagcggcggcgcgagagcgagtgcaaggccgc

SEQ ID NO: 321253 - DNA, 122 bp, Homo sapiens
ccagcgaggccattcaggcgtcttttcacaacccctaagcggttcagtccccgggcctagcgacactccagagcgctcctaattagtctaattagaaaggtggattgatagatggaaagaag

SEQ ID NO: 321254 - DNA, 122 bp, Homo sapiens
tggggggattatttgagagtgaggtcaagctcaagagccccaggaccctctcagatcccccgtgcccgtgggaactgcgcgtccgccaccgatcctgcccgcgccgggttgagttcagtttg

SEQ ID NO: 321255 - DNA, 122 bp, Homo sapiens
aaaaattgaattcctgatgccggaatgcagtggcacagaatcagaactccacatgcccaccggaagttatgtaagcatttaatatgcgataagatgacctttcaaattagtgtgtaaatcat

SEQ ID NO: 321256 - DNA, 122 bp, Homo sapiens
ggccaatccgggacgggaatcttaaacttttaactcttggtgcaaagactgatccactggcggctttacgggagcgggaaaaaagtatgtgaagcttgccacggtctcgagaccgaggtcac

SEQ ID NO: 321257 - DNA, 122 bp, Homo sapiens
tctcattggcttagagtgcttagagtcccaattcttcagcttcccattgggcctttcaagcgagcaggggcgtgactccgggggctccgccccgagccttggcccagtcttggggtccaagg

SEQ ID NO: 321258 - DNA, 122 bp, Homo sapiens
gaaatcgggccgggcattaggctccatcgctcatcaatagacaaggcctttaggaaactgcgacaacggcttttgctctgggcctttactgccgaatccaggtctccgggcttaacaacaac

SEQ ID NO: 321259 - DNA, 122 bp, Homo sapiens
caagggtcggctgttgctctccctcgcccgggcgcctgcagcagtctgggtgggcgggggcgccatgacaaagtgaaggtcaagttagcatcgtaccttataaggaaggcgccggtcctcca

SEQ ID NO: 321260 - DNA, 122 bp, Homo sapiens
caagatggccgcttgtctggggacaggagcggaggccaatacgcgcagagcatgcgcctacgccgggccaattgaaagccatagtgacagtaaccctgattcaggggcgggaaacactgacc

SEQ ID NO: 321261 - DNA, 122 bp, Homo sapiens
gggctcgggacctgcagcccgccatgcctgagcctcctacccactccaagggctcctgtgcggccggagcctccccgtactagcccaccaggaggaacgaacaactccagagatgctgcctt

SEQ ID NO: 321262 - DNA, 122 bp, Homo sapiens
tgggtcagacggatggagaggagatgaggcgatcaatcttagccccctgacagctccctccgattgcatcaaagaatttggctctttgggaaagcagagcgaacagccaaaatttcacatcc

SEQ ID NO: 321263 - DNA, 122 bp, Homo sapiens
gcctgagctccgctgtgtgattcattcattccgtggacagccagctgggctgatggcaggcgtgggagcttccctaatgcctctgtggccttggaagaacagagccaagtgcctcagctaga

SEQ ID NO: 321264 - DNA, 122 bp, Homo sapiens
gggccactgcccccacagtttctctctgcttctggtcagctgggttgtcctgcatggtgacgggtgtcatcccgaacaaatcagatggcatcagaggcactccatcaagtgggagatgggga

SEQ ID NO: 321265 - DNA, 122 bp, Homo sapiens
gtttccgttttggaagacgaaacgagttctgcagatggagggtggggacggctgcccggccgtgagaatgtagcgaatgctccaaactgggcgcttaggcagcatcaccatggcggattctg

SEQ ID NO: 321266 - DNA, 122 bp, Homo sapiens
taatttggaaaaacgcatgatttcctcattgctgggcctctcccctgtttcccggatctgcggaagtggtcacaagggtcatccccgggacacgcgcccacccggctccctcccacgaccaa

SEQ ID NO: 321267 - DNA, 122 bp, Homo sapiens
acaccctccacagctgctggcccgggtgctaagcccctcattgcctggggccggcagggccggcccgctgctccgagtgcagagcccgccaagcccacgcccacccggaactccagctggcc

SEQ ID NO: 321268 - DNA, 122 bp, Homo sapiens
tttccctctcagcagggccgcggactagccgccgccgttggccgagcgtccggagggagccggggcctccccagcagcccgagccgctccacagggagagaaggagacaaaacagaggctcg

SEQ ID NO: 321269 - DNA, 122 bp, Homo sapiens
cgcccgacccgtgggaagggacaagctgcgagataaggactcatcgagggaaggggagggcgcccctccctcaggagccgggagacctgcctaacctaggtcggaagcccacaaccctgagt

SEQ ID NO: 321270 - DNA, 122 bp, Homo sapiens
gtcagggacttatcaatgagcaagacatagcccctgccatcactaactcacattctgcatcgtcctgtgccatccccaccaccccaccttggtcaggcccagtgtccaggtgtcttcaactg

SEQ ID NO: 321271 - DNA, 122 bp, Homo sapiens
agggacgctctaatgcattcttcttggccctactatgggacaactttttagcacaaaggccgtaggacaatggttgctcctatttggttggacactactgagacgtccaacactcacaccca

SEQ ID NO: 321272 - DNA, 122 bp, Homo sapiens
ctgggcacacagaggcttctggccaggtgtctgccagagaaaacgtccttgcaagttccccgcatgctgcagcgtacacaggtgcgctgctgtgatcctctttctacattgagaaagatgag

SEQ ID NO: 321273 - DNA, 122 bp, Homo sapiens
tcaccatgagtcacttatatcccttaaccacagcgactcctccaaaggccttcatttgctcggctgccagtgatgaccaccagtgggttcacctcgcagacctaggtgggtcaggttaattt

SEQ ID NO: 321274 - DNA, 122 bp, Homo sapiens
tgccgcgcttcgatgcttcttcacacacacaatatggacacgggtttgaggctccagccccggatgacaacactccggaaatatgcgagcggcggcggaagcggaagtgcctcagcggtagg

SEQ ID NO: 321275 - DNA, 122 bp, Homo sapiens
ctctgcatgcaacactagcaaagctgtttctgctccctttcggtgtccgagtcaaggggacgaagaggcctgcccaagaagaagagggatgatttttctctttctgtggttgggggcagaaa

SEQ ID NO: 321276 - DNA, 122 bp, Homo sapiens
acaacgatgaccgccagacaggcgcagagctcaggccgccgcccccggaggtgagcgccccgtccctgctccgcccagcgcaggggtgggcctggctctgccctggttctctctccgcttgg

SEQ ID NO: 321277 - DNA, 122 bp, Homo sapiens
aactgcaggctctgtctgggcaccacgacagggactgctggggagggaggaactgcgattcgtgtttgacaggggcaacagccacctgcaccagggtggaataggaggacgggaaccttagg

SEQ ID NO: 321278 - DNA, 122 bp, Homo sapiens
agccaggaggagggggcgtggtaattcgaggggtttgttcgaagggccacgccctttcctcggcctttggatttttccaggccgcgcccacggcgggggggtgggggggggcgctagttcta

SEQ ID NO: 321279 - DNA, 122 bp, Homo sapiens
cccgcccccacactgggagaaataacgcccgtaacagtgccccaagccccactccatccccgggcagtgcagccctggatagcaccccaacccgctcctggctgcaggcagtgatgcccgga

SEQ ID NO: 321280 - DNA, 122 bp, Homo sapiens
gagttctggcaggaccgatgagaatagaggcccataaactgaagaacaggagtaacccaacgctccatgcctaaggtgtaaggaaaaagacaggaaacccagaagagctgggctctactgac

SEQ ID NO: 321281 - DNA, 122 bp, Homo sapiens
ccccttactggtccccaggttccttcccgctcacgccggagtcacttccgaagagagaaccgccatgaagagagaagggggtgccgcccacctctgctccgacagcctcccggagtcccagc

SEQ ID NO: 321282 - DNA, 122 bp, Homo sapiens
ctggggctgaggaagcagacgcacaacaatgccgtggttaagatgctgccctccttcgtccggagaactcccgacgggaccggtgagggcctgctgggggctgacatgcctgtcctgctcct

SEQ ID NO: 321283 - DNA, 122 bp, Homo sapiens
ctaatctctctgaacctcggtcttcttttctgtaaaatgaagtagatagcggcggggcgccgtggctgacacctgtaatcccagcactttgggaggccaaggtgggtggatcacctgaggtc

SEQ ID NO: 321284 - DNA, 122 bp, Homo sapiens
cacatgaagaacatttggggcccagggataagcggcaatgtcagcgccctcaggtttctgcgttttctctgcctgcaggtcgcccggctcatggagatgggattttccagaggtgatgcttt

SEQ ID NO: 321285 - DNA, 122 bp, Homo sapiens
agcatttctctatggacgactcagtgtgtagactcacattcagaagcaacctctttgacccgaatagtgaaaccagaaagctgtccagtcatggcagctgctctgtcggtccataaactgac

SEQ ID NO: 321286 - DNA, 122 bp, Homo sapiens
ccatgagccttctcaggcccctgccgcccgcctcgcctgaggctgcgcttctgaaaagcacgcggccctggcctgcgcaccacccagtctgaaggcgacgcccctgcacgaaggagtcaggc

SEQ ID NO: 321287 - DNA, 122 bp, Homo sapiens
ggtggccattggagatgatatgaaacaaggacttgcctggtgtggggtggccctggacaccggctttctctctggccagccctctgttgtcttgcattccctctgtcctcattttcccaaag

SEQ ID NO: 321288 - DNA, 122 bp, Homo sapiens
gcccagggccgagaggaagcgctggggttggggccgcctgccaggcgcccggcggggcagcgcgggcctggccaagaagtgccccttctcgctggagctggcggagggcggcccggcgggcg

SEQ ID NO: 321289 - DNA, 122 bp, Homo sapiens
tgttctcaaagaaaacatcaaagatatcagattaaattttgattcattaaattccaccctcgtttcaaagaaaaaaactaaaactaaatttggaaatcacacattctaagtgacaaagaggt

SEQ ID NO: 321290 - DNA, 122 bp, Homo sapiens
aagccaccattgagcactgatacggtgcggtggccaaacacacggaacatccaccagacccggggagcatagaagctgcccaggtgttcaccatcatacaccaccacgtgcgtgtggttgct

SEQ ID NO: 321291 - DNA, 122 bp, Homo sapiens
ggggcttgggtgggcttcctcccctccgctgggccccagcggccgaggcacaccctttcccgctggtgagaaaactttccttgctgcggccctcctgccgccttggtgccctgcaactgaga

SEQ ID NO: 321292 - DNA, 122 bp, Homo sapiens
aacacggtgaaaccccatgtctatgaaaaatacaaaaaattagccaggcttggtggcgggcgcctgtagtcccagctactcaggaggctgaggcaggagaatagcatgaagccgggaggcgg

SEQ ID NO: 321293 - DNA, 122 bp, Homo sapiens
gtctccgggcatttgtctacatggccgccctccccggggcccctcctgggctttcacctgcgtctccgggcatttgtctacgcagccgccctccccggggcccctcctgggctttcacctgc

SEQ ID NO: 321294 - DNA, 122 bp, Homo sapiens
accgtggtgtagtcgccgcatcgttctttgcatttcgagctctgtgccatgttctgtgttcggcatttaccgtggatgaatatcccctaggtgtttatcctgctctgtggccctgttctgtg

SEQ ID NO: 321295 - DNA, 122 bp, Homo sapiens
acgcgcgctctccttctcggcggccccgtgcgtctgcgcgcgcgcgcgctcgtccggccgcgaccagcgcgtgggagccgctcttatagtgaccaccagcaaggacagcgcaggtgatgcac

SEQ ID NO: 321296 - DNA, 122 bp, Homo sapiens
gcagcctcccacagtgggtggggctttgccagcagtgcccacgggggtcatggggccaggcgcgctccggcgcctgcagaactgatcggggatagtctcaggaggcgctagtcacgtgcccc

SEQ ID NO: 321297 - DNA, 122 bp, Homo sapiens
tctcctccaacaggaagtggtagacgaagcagtcgttggtgcccacgtagaggtccctgccgcagcactccacgcactctatgttgacgcgctccttgtcgcccatcagcagctcccgctcc

SEQ ID NO: 321298 - DNA, 122 bp, Homo sapiens
gaagatgctgaaaatacttgtaatacatggaattaatcttccttttgtgatgaacacacacgttaagtggcaggaatattttgctgaaatggagcttgctggtttcctctctagctcttccc

SEQ ID NO: 321299 - DNA, 122 bp, Homo sapiens
agttcctcaacactgcagtgacaaatctcagctgagaagctgtattccagcacagcttcacgtagtcctcttgaaatacacatgtccattgcatggtttacacacaagtctatttgcttgtc

SEQ ID NO: 321300 - DNA, 122 bp, Homo sapiens
gcagctcggtcaaacagctggagctgggagccggtcagttgccaggccctgccgctgctacgtcacggagggcggggcggtgggcgattggcggtgcactgcagctcgggctgctctgcagc

SEQ ID NO: 321301 - DNA, 122 bp, Homo sapiens
tggcattttccgtttaatgtgatcccccaggctccatcccttaagtggggtttccaaactcggatgcatcctcagcagaggttttccatgttgacagatctctcgcctcccacaaaatgggg

SEQ ID NO: 321302 - DNA, 122 bp, Homo sapiens
aaaacacacacaatgaatgaaattttgtgagaagtcccagagggcatttccacagcaccccggtcctgtgggtaagaagctgctgcagttctgagcgtcctaaaggcccctccagcctgagg

SEQ ID NO: 321303 - DNA, 122 bp, Homo sapiens
aataccaccccaacccagaatccattttggaaagcccctacctccagtcctcatctgaggcgctctggctctaagcctgtcctccctcccattccaggtatgtgaagacaactgggaatgcc

SEQ ID NO: 321304 - DNA, 122 bp, Homo sapiens
cctcgaaaaaggagtcagagagatatcatttgagaaagtgacaggcagatcatgtagcctcggcgccgaggaaatagggtttaaatctgtcagaatcctgaattcagaacagcgctggtacc

SEQ ID NO: 321305 - DNA, 122 bp, Homo sapiens
atgcttcccatcactactctcttgaatttcattgttctctctcaggtgatcttttttactcgctattgtggttcctctccatagatgagacaagtaccagatacatctagtcaactatcttc

SEQ ID NO: 321306 - DNA, 122 bp, Homo sapiens
gggtctgtcgcacctcctgggtctgccagctcctgccggggggtaccctctttgaaggttcgggggcggattctgtcccccgggcccggccccccggcccgaagcagccaatccgtgcgcgg

SEQ ID NO: 321307 - DNA, 122 bp, Homo sapiens
agcctttgctgactacaagcccggtgatatcatcatggtgagctgactgcgggtgtggaccggcggtggggcggcgagggggaggctctgtcctcgcggggcaaacgcagtctccgcggtcc

SEQ ID NO: 321308 - DNA, 122 bp, Homo sapiens
ggcggggtcgctgtgggggcggggccttgtgagccagtgcttggacttccacgtcataaacggaagggcggtgcgtggagggaactcaaggcctgattggttcctcctaagcaggatgcgat

SEQ ID NO: 321309 - DNA, 122 bp, Homo sapiens
ccatgtccaggggcccgtggggtgccgaggcccggcggcgaggcggtggtggagggggctcgggtccaggcctgaaggtggcctcagtgctccagacagcgcagccattctccttgggcggg

SEQ ID NO: 321310 - DNA, 122 bp, Homo sapiens
gcacacccaaatattctaagtgcttatttagggagtatctttatttggaataaagaatttcgagttataaaactgatggcttatagaatgcagcttactaaattggtcttcgttcttacaaa

SEQ ID NO: 321311 - DNA, 122 bp, Homo sapiens
gcaggctgcgtcagttatttggggtctgcgggccgtgtcggttatttggggtctacgggccgcgtccgttatttggggtctgcgggccatgtcggttatttggggtctacgggccacgtcag

SEQ ID NO: 321312 - DNA, 122 bp, Homo sapiens
ttgggatcatgagtggaccgggaggagtgggcgtggtcggagtctgagtccaaggtttctcgtgcggcaactgccagagctgcttggagagctaagctggaagggtgcttatccctgcgtag

SEQ ID NO: 321313 - DNA, 122 bp, Homo sapiens
cccagccatgttggtcaaaaccagctctaacacataagcaccatttactggcttgtaggtcgaaccgtacagcccaataaaaaaacctgtagacagaaatgcctagggctgtatgagagaag

SEQ ID NO: 321314 - DNA, 122 bp, Homo sapiens
gcccccgtggtgctcagcagtgccttccctcccctccccagcccccgggaactcctcctgcgccagggacacagggatcaaggagagaacagagtgcaaccccatccctgcctgatcagtgg

SEQ ID NO: 321315 - DNA, 122 bp, Homo sapiens
ctcacgctgcccctccgggctgagaggagtgtagacctcacctgctgagcacaactctggcgggcctgtgctctggaggtggtctcagcacctacctagaccctcttgatacctgctttttt

SEQ ID NO: 321316 - DNA, 122 bp, Homo sapiens
ggccccttatgtctggctcatttcactcggcgtaacgtcctcaactcatccgtgttgcggcgcgtgtcagaattgccttcccaaggctgaacgttccgctgggtgtgtgtggaacatgtgtg

SEQ ID NO: 321317 - DNA, 122 bp, Homo sapiens
agctcagctatctgggaaatatggcagggagaggaaagatcaaacatacacacacacactcgtgtacacacaagtcaccttgtatatatatcctgagctgtctcatttggtggttgatatgc

SEQ ID NO: 321318 - DNA, 122 bp, Homo sapiens
gtggatggaaactgtgctggttggtccgagacagacatgagtataaaccttgtctcttcccgctggccttctcaattagccaaattcaaagtgagctcctcttcttccaaactgcttgtctg

SEQ ID NO: 321319 - DNA, 122 bp, Homo sapiens
atatgtgcaatagatagggtagagcaatttcagttgaaccagacatggagtcactagactcgaaggattccagagctctaggaaagcctttgaaagccactggcctatgagaaagtattaat

SEQ ID NO: 321320 - DNA, 122 bp, Homo sapiens
gcaagcaagcaaggaaaaataagcaagccgtacggagccaaaagaccagaaacaggcagacggggcagacgtacctgcaagcatccaggtaccctgaggctagagttgcctctgctttctct

SEQ ID NO: 321321 - DNA, 122 bp, Homo sapiens
gccctccctttctgaatgcatctctttcttgtgatggttttccaagtggagctttcacagcgcatgctactaacctctgctcttctccagaatgacaaaagcctctggcgtgtgacctatgc

SEQ ID NO: 321322 - DNA, 122 bp, Homo sapiens
ccacctgccggaggcgtctcagggttcttgggctacaacccaccatctttctcctccaaacgttcaccgtggctgttctctctggaatcagctggtcccatgttcacccagttaccttgttc

SEQ ID NO: 321323 - DNA, 122 bp, Homo sapiens
cccctgctgtgaagttgcagaaaactcggaaggcatcccgagcacagccctggttggggtcgacccagtactctcctgttgggtgagggagaggggaggtcagggccacctaggtccaggct

SEQ ID NO: 321324 - DNA, 122 bp, Homo sapiens
accaaggctgaccttaagggggatcgcacccacagtgcacggctggggccggcatatccccggcctgcctgcctctagttcacgtgtggccgaagcccctggagacgccctcagccgtgcag

SEQ ID NO: 321325 - DNA, 122 bp, Homo sapiens
caggaacctagtggttatcaaactggtttgtctgcaggaaccttggaaagtccctaaaaccgtaacataaagacattccactataatcctatgtgatctacaccagaggtatgaaaactaca

SEQ ID NO: 321326 - DNA, 122 bp, Homo sapiens
tactcaggaggaggctgaggtgggagggttacaccactgcactcagcctgggtgagagagcgactgctgaaccttgggcaactcttgctgattcttgatgctcccttcaaaacctgtctcaa

SEQ ID NO: 321327 - DNA, 122 bp, Homo sapiens
cccgcgggtcagcccccgacgtttccctgttcttcaggcgtctgcaaccctcctgggttgcggcgtctgctcgcccttctgcgtccgcagctcggtccccacgttcccgctcgctgggcccc

SEQ ID NO: 321328 - DNA, 122 bp, Homo sapiens
tcgccccatgtctgatgcgggaggacacactgagatgcaatctatcgagcaggagacgcacggcggttcagccactgcagcacacacacccctgaaggcaccgtgtggccggacttaagact

SEQ ID NO: 321329 - DNA, 122 bp, Homo sapiens
cagcgcgggcgagtggaactcgtggaagcggtagtgctcctccaggggtagcagcttctgcgcgtacagctgccgcagcccctcagccaccgtctggaagagctccggctccttcttgcggc

SEQ ID NO: 321330 - DNA, 122 bp, Homo sapiens
gaaccccggcgccgggcgctcgggaggtattgtccgtccctccgggctttgtagaatcgtcgccggcttacctggccgtgggcgcgtcctggccgctgcagcccggagcagggtgccagccg

SEQ ID NO: 321331 - DNA, 122 bp, Homo sapiens
aaagatgtcttgagagaacttagggtctgagggagctgtgagaagcagagctcctcagaccgagctcaccacccccaccctaggatgtctatccaggaaaggggctgaccagtgtgacaaag

SEQ ID NO: 321332 - DNA, 122 bp, Homo sapiens
cactaattactggaaggcccgggccgggaccccaacctgggaggagcagaacttgggccccgttgtgtgtccatttgggctttgctggggtccctggtctttttacccaggaggcccagaag

SEQ ID NO: 321333 - DNA, 122 bp, Homo sapiens
gttctcgttcttccgcgtctcaccacctctccatgctgtcttttccagtgtgtttattgccggctttcctgagtacacgcagccaatgatagaccacctggttaccatgaagatcagccact

SEQ ID NO: 321334 - DNA, 122 bp, Homo sapiens
tgcgcgaagagccccgcctggcaaggcactgggaggtgggcttgcggatcctacgactagcgtttttctcgattggttgaaggagtaaaggcacgtggtatgggggcgctctcttattggtc

SEQ ID NO: 321335 - DNA, 122 bp, Homo sapiens
aacggggtccttagcggcctgcatgcccgcgcctctccagactgagaccaaagacttccgcgccaccgtcggcagctcgcgaacttagacttcagaccgtctgccgcactgcaataaagaga

SEQ ID NO: 321336 - DNA, 122 bp, Homo sapiens
gccttgccaacctaggaccacggtggttcacacaagccacacaactggctactgggcacgcgttgctgtggggtggctcagctggagttgggctttgcttgcagcacagcactgggctccag

SEQ ID NO: 321337 - DNA, 122 bp, Homo sapiens
gcaataaataatcaaatatgaaataggtttaagaactcaaagaatctttggatctcaaaccgctaggtaaaggccgagggttaagtgctagttaaaatgattcaaattcaagtgggcctctc

SEQ ID NO: 321338 - DNA, 122 bp, Homo sapiens
cctagaaagggagaagggcttcatgatgctgaaatgggaggctgtgacctccaagaaggccggttccatctggtggtttctttagtcctcaccctgcatgctgaggagatgagttcctgtgt

SEQ ID NO: 321339 - DNA, 122 bp, Homo sapiens
gggttgatgggaggatttagtaagttaatcaatgcaaaacactcagaagactatctgacacgtagtaggtttcaataaaggttacgacctattgttattaatattatttgtattagttccta

SEQ ID NO: 321340 - DNA, 122 bp, Homo sapiens
tgtcctgcctgtgtatgacacgggtaaatcatgtgtggtccacaagggaacactgaggcccggccagcagagccaggacagctccagatgtcagcggcctctgcccctctcggtgtggactg

SEQ ID NO: 321341 - DNA, 122 bp, Homo sapiens
tgctagtcctctgcgaggagacgcgttctcgggagcgcagctgctccgcgccgcccttagcgccatcgccctggctcacggctccctgcgcggcagaaaccccagtccccttccatccactt

SEQ ID NO: 321342 - DNA, 122 bp, Homo sapiens
ctgctgggtctcggctgggttcttcctgattctgaggttcccgtgtactcgctgagagcccgggacctccagtgctgctacttgccactggcttcagctgccaggcctggcccagcccctgc

SEQ ID NO: 321343 - DNA, 122 bp, Homo sapiens
agtatgctaagtgaggtagaacctaataactgttactctaggcagaattcttagataaaacgaccagaaaagcttaggatttcaagggaaaacttcccgaccaggaggcagaggtttctcag

SEQ ID NO: 321344 - DNA, 122 bp, Homo sapiens
gggagggtgcttaggaataggaggggaaggtgcccagagaaagggcccatcagaaacctgcggcctgagccccgccagtggccagcagggcctccttccaggatgctgggtaggaaaggccg

SEQ ID NO: 321345 - DNA, 122 bp, Homo sapiens
gaagatgccaaacccaccaagactgcgctgccccacctctccgaggctgtcctgggagtgcgggtgacccgcgagctccagaatctttccttaaggtggagccacagcgccacctcgcgatc

SEQ ID NO: 321346 - DNA, 122 bp, Homo sapiens
ccctgcccggggagctaacccagccgcctccggggcgccctccttcttcctggattcccacggctggaccagagcccctctggcagccgggttaaaggctccttcagcaaggtcaaggcgcg

SEQ ID NO: 321347 - DNA, 122 bp, Homo sapiens
aagagtgagtgagttagagtgcgcgaaggagtagccaaagggagcgtcgcggagctgccgcggctgctgcgcacttctccgactccccgttttggagctgtagttcacccccttttatagga

SEQ ID NO: 321348 - DNA, 122 bp, Homo sapiens
tttcgccagtgagagctctaacttgggtctctgatttaaaggatcctggccactgtgttccggttggggtgggggggtggggagggtgacagtgacttacacatcccctgtcctggcaaccc

SEQ ID NO: 321349 - DNA, 122 bp, Homo sapiens
ttcttaaacatgattcaccctttagctggaaagacaaataaaataatcaggatctagtgtcgctccccttaatgtaccttatcccaccattctacagaaaattttatcaaagacagatggat

SEQ ID NO: 321350 - DNA, 122 bp, Homo sapiens
ccagtttccatatgtgatagttaatttggagatggcttccacagtgaaccagggaacagccgaattctcaacaccatttctcatggtcgggacctagacagttagagactgtgagagccgag

SEQ ID NO: 321351 - DNA, 122 bp, Homo sapiens
gcagccagccgctctcgcatgtgcttgcgcaccagcaacacctccggggccgagcccaggcgcagtgcctgctctgcaaagctgcagctactgccgatgtgttcctgaccctggcgcagtgt

SEQ ID NO: 321352 - DNA, 122 bp, Homo sapiens
aagcacaacgatgatgaacagtatgcttgggagtcttctgctggaggttccttcactgtgcgtgctgaccatggtaagttagcttttctgttacaaggtagttgggttaggattttctgggc

SEQ ID NO: 321353 - DNA, 122 bp, Homo sapiens
tgtgcctctgctggccgcgcccttgcagtgaggcccctccctgccctgagatcccggagccgaccccagaacaggcagtgcagccctgccgtgccctcaccgggtccctgccccctgcagag

SEQ ID NO: 321354 - DNA, 122 bp, Homo sapiens
tccctgcggcgtcccacgcccccaaaaccccccacccccccacccgtgccaggaatctatcgcagttctcaagtcctgtgacttaataccgcagctggcacctcagaattccttattcttac

SEQ ID NO: 321355 - DNA, 122 bp, Homo sapiens
tgcggagaggcggcccggcccatcccaggggaaggtgtccgttaactttggggaacgctacggactcagattatatacttttaaaaggagttacaatgcttcctcgtgtctggcaaacggcc

SEQ ID NO: 321356 - DNA, 122 bp, Homo sapiens
gctgctgcagccactgtgagaggccacagaggggaaggggaccctgacgccgggcgctgccgcctgggggagcatggcacgattgctcttagtgttgaactttctgttttgtctcttgcccg

SEQ ID NO: 321357 - DNA, 122 bp, Homo sapiens
atgggataacgcggccatggtgcgccgagatcgcctccgcaggtgagtgtgcggtgggaacgagggggtgtggctggcggccctgggactagggcgcaggcgagcggaggactgtgtgcccg

SEQ ID NO: 321358 - DNA, 122 bp, Homo sapiens
ggcagagctgggcccagggtggtgctgcgctccatggagccagcgggagccggggacaagcgagagccatcccctaggagcccaccgcccccggaagccgccgcaatgaggccaggcggagc

SEQ ID NO: 321359 - DNA, 122 bp, Homo sapiens
ccccctcccccttcctcccagcctggccaaacgggcctgcctggtgaattaaaacgcagccgcagccatctggccctcccaagctggccgggtttctccccgcccctcctccctggtccaca

SEQ ID NO: 321360 - DNA, 122 bp, Homo sapiens
aaagaagaaaaaagagaaagagaggggggctgggggaatgctgaacaggctggccaggaacgacgccagagttgaactccagacgaggtaccactggtggcctggatgaggaaggggcaggg

SEQ ID NO: 321361 - DNA, 122 bp, Homo sapiens
gagggtgtatatgtggcggggactgagttggaaggtggctcccgggcaaagcaaggggggcgggggattgaaaggtgctggctgagtgtcacccagacacaaatttcccatgcctcagtttc

SEQ ID NO: 321362 - DNA, 122 bp, Homo sapiens
acggccaggttgaagacgccgcccacgggcccaagctgcgccgcctcggcaatgaggccccgggccccctccagtgagctgatgttgctggtggacacctgcacctgtacgccctggcgcct

SEQ ID NO: 321363 - DNA, 122 bp, Homo sapiens
cgttgcttgtgtggaaacccaggtccacgtggaggaatcagacggctcagagggcggctgcggaactgagaaggcatctgctcactgcactagtgtccgcagcagggccggaaagagatgat

SEQ ID NO: 321364 - DNA, 122 bp, Homo sapiens
cctataaaattcaggcttcacctgggctggctgggctgaggtcccgttgggtctctctttcgtggacgttttttccaatgcgatgaaacctagttctcgctagatggcgctcaatagcaaaa

SEQ ID NO: 321365 - DNA, 122 bp, Homo sapiens
ccttttccctatgtttgggcctcttctgacttagcaaatgacttccaccactgcctctcacgctcacgggttaagccccctctctacaggagtcgccgccctttctcccgtctgcttctgct

SEQ ID NO: 321366 - DNA, 122 bp, Homo sapiens
gaggagttccagggtggtcccttcgggcgtcatgcctggtttcattgtcctgaccgggtgcgaggagggacacctggccaggagatataacctgccggccagtgtggcatttctttcaaatg

SEQ ID NO: 321367 - DNA, 122 bp, Homo sapiens
tgtccccaacagatggcacggggagcgcccacacccgccaccgcggggtctgcggaagctcgtgtcagctggaggttagggaagacgcacaggggctcattctccacccaggttcaaactcc

SEQ ID NO: 321368 - DNA, 122 bp, Homo sapiens
tgcctgttcccacagcgcccccactgccaccccacacccaacgtgggtgcagcccagccccgccctgtccactcccagcctcactgagcaggggttgaaggaactgaagccagatcaggagg

SEQ ID NO: 321369 - DNA, 122 bp, Homo sapiens
caccaatacttacccgctgcatctgagctaagtaactgagctggcccaaaaagaaaccagcgtggagaacatgatggcacttgtgggtcttcttgtgtaattaactaaaggacaggaatggg

SEQ ID NO: 321370 - DNA, 122 bp, Homo sapiens
caaaatgagacagttgggaaagagaaaaatctttgtctctctctttaaaaaaaaacaatacggataaacgattatgaaacaaattttaagttttgggtcctgggaaacaattataagagact

SEQ ID NO: 321371 - DNA, 122 bp, Homo sapiens
gtgggcagggacctggcgccttctgagtcgagtagggctttaggtggcccagtgcgtggacgcttacttcagccccgtgggactttcctgacctcgcggacacaggggcggggccgccgagg

SEQ ID NO: 321372 - DNA, 122 bp, Homo sapiens
tctcacattttcatggtgcctttaggacccaagttggtccgcagcacatcctgcagccctcgggcggcgcatatattgacagccaaagctgcccgggcccgcgccacctcagccttggagtt

SEQ ID NO: 321373 - DNA, 122 bp, Homo sapiens
agaagtagacccgctcccggccactgtagctatgggcagggagggccaaggctgcatccacgttgtccgggatgccatcgaagccgtcagagatatttcgggggtaatcagggtccaggaca

SEQ ID NO: 321374 - DNA, 122 bp, Homo sapiens
acctagctgcagtgtgattggccttcggccccggtcccaggagcggggagatgcctgactcgggtcgtggctgacgacccgacggttcgcctgcggccgcctccaacaacggtggaaaccgc

SEQ ID NO: 321375 - DNA, 122 bp, Homo sapiens
ttacatggattcaatgcttaggaaggcatagacggtgtcttacgcacagttagccctcaacgttagatgttagaaatgaagtcactcaagaataaattaacagtggctctcaactgggggca

SEQ ID NO: 321376 - DNA, 122 bp, Homo sapiens
ctggaaccaccaaggagtgtggaatgtccttgagtgtattatttatgcaagtcacagtcacgttgccatcatggcagctatgtgaaacactaataaatgtgtttttactttttattcccgtt

SEQ ID NO: 321377 - DNA, 122 bp, Homo sapiens
gaagctgcagaccttcgcggcgagtgttacagctcttaaggcggcgcgtctggagttgttcgttcctcctggtgggctcgtggtctcgctggcttcaggagtgaagctggagaccttcgtgg

SEQ ID NO: 321378 - DNA, 122 bp, Homo sapiens
gatgtgtgtggggccggatcggggaggatggctgcacggttgcaggggtgtgtgcggggccggatcggggaggatggctgcaccattgcaggggtgtgtgtggggccggatcggggaggatg

SEQ ID NO: 321379 - DNA, 122 bp, Homo sapiens
tgggctcaatactgaatacagcgcaggccagtgggaatgtatagcgaaggagcagtatggcggtccgtgggtggaaaattactaaaaggaaacatcaggggtaagggggattctggctaaac

SEQ ID NO: 321380 - DNA, 122 bp, Homo sapiens
tcaccatttttgcaatctgagcagacaggccctgggccaagcggtgtgtccacaacgtcacgtggctctctgtttctgaagatgcggggggatcctgacacggagatctcaggatggggaaa

SEQ ID NO: 321381 - DNA, 122 bp, Homo sapiens
ctttcttaacctgaaaactatttgggctgtaccaagctctgctcacagggggaggtgcctcgcagcaacttcaggaggctttgccccgcccagcagtcagaaactgatcctgagtcatgagg

SEQ ID NO: 321382 - DNA, 122 bp, Homo sapiens
acctgatctgtgtgagtaactaagagaacaactcaggtggggaactccctcagcgcacagcgaacaaaatgcatgggaggaacgcagaagcaacaacctcaccaggaaggcgttttaggagt

SEQ ID NO: 321383 - DNA, 122 bp, Homo sapiens
tggatattaagtgtcttcttgaggcgattttgagactttctttttctgcatgctcatgcacgcatacacacacacatgcacaaacacacagttagatgcatggttgcatgcataataaaact

SEQ ID NO: 321384 - DNA, 122 bp, Homo sapiens
ctgaaggatagaagcaaagtagcagcatgcctgtctccctggacacaggtggttggcttgcgttctgagaacccagtcaggcctggttccgcctggtctgggcctctccaaaagagaagaga

SEQ ID NO: 321385 - DNA, 122 bp, Homo sapiens
tgggaattctgcttctccctccactacctgggtaaccctgggcaagtcacttagcctctccgagcataaactggtttgcttgtaatatgcaaataataaggggtgggggaaatttttttttt

SEQ ID NO: 321386 - DNA, 122 bp, Homo sapiens
cctctgcacccacggcgaaagcactctttctaaaccacgccccggatgtcccgcctccagcggctcggaggtcttcacttattggcctccccaaaccaacatggcggccccctacaaacttc

SEQ ID NO: 321387 - DNA, 122 bp, Homo sapiens
gtgagtggttttgggggttttgttttgtttttgcaaccgttctttccaaacactccccgccgccccccaccaccgcagaaaaaagagcttttagcataaggcggatgctatctatccgcggt

SEQ ID NO: 321388 - DNA, 122 bp, Homo sapiens
tctgtttctctttgtagtcggtggtggggagcggcagctggcagagagtcaacgcccagacggctgtgagatccccgagatatgccgtgtttgacctcatggaagggaagtcttatgtgttc

SEQ ID NO: 321389 - DNA, 122 bp, Homo sapiens
ccaacttggagtttcctggccaggaggaagagcccccatccttgctggaggagggaggcgcgggatttccgggcattcttctgcacaatggcccagccatttctcgaaaggtccactggtgt

SEQ ID NO: 321390 - DNA, 122 bp, Homo sapiens
ccattggggtctaggtcggggtccatcggtgtctgggtcagcgtccatggaggtctgggtcggggtccatcggtgtctgggtcagcgtctgtcggggtctgggtcggggtccatcggtgtct

SEQ ID NO: 321391 - DNA, 122 bp, Homo sapiens
cgcacacctccctcactgacgcattttgccgcacaagctgtaacatggcggcagcgactgcggcctgaactctagggagccgggttgatttttaaagcttcaaaatcctaagactcagcact

SEQ ID NO: 321392 - DNA, 122 bp, Homo sapiens
aaatgcttgtggacagaatacccttgaatgccctgatgccaagcgctggaaatccagagacgataaaacacagtcctggctgtcaggagacaaagtgacgcgcctcatcacatgcaggatgg

SEQ ID NO: 321393 - DNA, 122 bp, Homo sapiens
cgctccgtctcacgggtcacttggacagtgggcgcacccgagggttgaggcgtcatcctacggcggggtcagagggaagggtaagtttgagtccgtcactgggcgcagtccgcgattccgag

SEQ ID NO: 321394 - DNA, 122 bp, Homo sapiens
accgtcacacccacagacacggagcttcctccgtgatgtctgcaatgcactaggcccagtcggggagcagtggctgcgccaccacctgaaaacgaaagcatttctgagtctctttcagtcca

SEQ ID NO: 321395 - DNA, 122 bp, Homo sapiens
ccggaaggagggacaggaggcggcagaaccggagacccaggagagaccgggcagacacagcgagagggagaaggacgctcagaggacaaggctgagagccacggagacagagggggaaaccc

SEQ ID NO: 321396 - DNA, 122 bp, Homo sapiens
ggaaggaaaatggttcctgatggaaacaccgaaatccagagctcagagaacacggactggcggggcaggcggcagagccttgcggcgctggacacattgaacactcagcgcccagcacaggg

SEQ ID NO: 321397 - DNA, 122 bp, Homo sapiens
gcctctgtgggcggggcccgggcaccagggggctgcatgctcggggctccagagtggagccgggacgcccgccctgaaccctggcccctccgcccatccctgtcttggctctctttgtcccc

SEQ ID NO: 321398 - DNA, 122 bp, Homo sapiens
agttaatataggcatttcggaaaggcggagcgagagcctccagggcgggcggcgccaagacgcggattccggaacaccgcgaacaccctggaccgggtcccggagccgcgtccccgccgccc

SEQ ID NO: 321399 - DNA, 122 bp, Homo sapiens
gagcggccggcagcggcgaggccgccggcggactccagcgcctaggaagccctgcgcaggcgcaagcgtttcccaggcaaccacgccgcggcccgaggctgcagactctggcaggggataca

SEQ ID NO: 321400 - DNA, 122 bp, Homo sapiens
cgcaggcacatgatggatctgtgcaatagtcatacgtaagccgccgtgatgtccacaccacggagaccccgtctgctatgcatcacccatagcacgggcagccgaaccccagggctgccctg

SEQ ID NO: 321401 - DNA, 122 bp, Homo sapiens
cggtccgagggtcgcagaggagcaggggcgttggcagcgggcttgcttgggcacagtctgcgggccggagcagaacttccgcccctggtcagatccctcggcctcagatccaaagccctccc

SEQ ID NO: 321402 - DNA, 122 bp, Homo sapiens
tgttcctttcccatttgcattgtttcctagagtttccatgagcaggaactcagttttccacggagctgactcatccaaccctctgctgtcaggtttaaaacaaatataattagaaaacctac

SEQ ID NO: 321403 - DNA, 122 bp, Homo sapiens
tttgctgacagtaaacattccaagtactctaacaattctcattccactccttttggcaagcgagaggctgcatggttgggtgatggataaatgctgaactgattgcagaacaaaggtcaaca

SEQ ID NO: 321404 - DNA, 122 bp, Homo sapiens
aaaggaagcaacagctgagagacttctcagagagttgttctcagcccagtggagcatgttcgggcagagggaacagcgtgtgcaaaagcccagaggctgggaaagaagcagaaggaggactg

SEQ ID NO: 321405 - DNA, 122 bp, Homo sapiens
caatgaactcataatttggccggatgatttgtaggcagggacgttttagtgtcggttttacgagattccttgatatattacagaattagagtccagatttacaccaaaaaggaccccctttt

SEQ ID NO: 321406 - DNA, 122 bp, Homo sapiens
tcaacgccttaactccttcgtttccctttgccccgtggtgtttctcttgactcctctaaccgcaaggggtgaggaagagatggctggtctcaaactccagttcaggcccatgaggccgctgc

SEQ ID NO: 321407 - DNA, 122 bp, Homo sapiens
agcccctaacactaatgtcgggatcaaagggcagcggcggcggcagcacagctcacagctcgctctcttgctctctctctctctctttctcgctctctctcctctcgcgctctctctctcgc

SEQ ID NO: 321408 - DNA, 122 bp, Homo sapiens
atttccctgtgccgtgatttttctctcctggtgagaaaagcccgtgttcattacagaaagcgctgcctgggggaatgctgcctgccacacaggggctggggctctagttggttcctccagca

SEQ ID NO: 321409 - DNA, 122 bp, Homo sapiens
cccggaggaagcagccgctcccagctgcgccgggtacaacccaggactgcttctttttcgcgcccaaaaagcccagggcgcctgcgtcacaagcactgaaggggcgtggccacgccgcgcat

SEQ ID NO: 321410 - DNA, 122 bp, Homo sapiens
cgcctcttggagactggagtccagaccttggagctgccggggcgccagggggaccggcagcgcacaagctcctcgggttctgacaaggaccggcaatgccgcttggtcggtggggccgtgga

SEQ ID NO: 321411 - DNA, 122 bp, Homo sapiens
tatattgcctgcctctctaagtggaccgtaggctcaatgtgggcggggtctttgcctacacggttcaccattgcacccgtcatgcgtggagtgtggtatgtgctcaataaatcttgttgaat

SEQ ID NO: 321412 - DNA, 122 bp, Homo sapiens
ctctaagactaggaataggaatatctgaaaacagcatttctaagggtggtaaccacaggtcgattttaatacgagtcctttttcttgtagaggtaagtaaaatcttcctgacaaggtagtcc

SEQ ID NO: 321413 - DNA, 122 bp, Homo sapiens
ggcatggtgcctgacacctgatttctcccagctcctattggcttctctgtagccttagagcgcagagcaacaggtagagaaggaagagtttttctctacaaactctggggtatctctctgac

SEQ ID NO: 321414 - DNA, 122 bp, Homo sapiens
actgttctcataagattaactttcagttcagatggttagcctgtggttgcccttggtcagcgcttactcagaaggccacagcccatctggtgcccacaacttctgaaagcactggggctcac

SEQ ID NO: 321415 - DNA, 122 bp, Homo sapiens
agcttcttgggtccctccatttttgcggagtctctgctggctgagttccggaggaggcctcggggaaggcgtcctctgttgacccttttctcgggagaagtcgggcggactagggactgtct

SEQ ID NO: 321416 - DNA, 122 bp, Homo sapiens
agcagatcctggagctgtgtgtctgctgagatgctgctgagatgcgtcattgcaggcttccgacaaagctcactctagtcgtagtctttgttcagctttttcacgctgagtcgagtgagtct

SEQ ID NO: 321417 - DNA, 122 bp, Homo sapiens
gactgcgccatccgggaccgtcttgcctggccgcaggtgccctggatgaggccgcctgcgcgcccccgaacgattttataatcgatggataaagtgggaaaaatgtggaataacttcaaata

SEQ ID NO: 321418 - DNA, 122 bp, Homo sapiens
ggaggcaccgatccccgcagccggcctcctcccgcgcgggctccactcccatttcggcctcgcccccacaccccatagtctttcatccgtgagtcctgcaggcaggacgggttggaggtctg

SEQ ID NO: 321419 - DNA, 122 bp, Homo sapiens
cctcctggagctgcctgccctgccgagcctgcccaggagctctcagtttcgattctggcccgggcactgacgctgatcgcggaaattacctcaccgccccccgccccgccccgccctgcccc

SEQ ID NO: 321420 - DNA, 122 bp, Homo sapiens
cgtgatccgcccgcctcggcctcccaaagtgctgggattactggcacgagccaccgcgcccggccctcggtaacattttgacttgatctgtcaaggcgctttcgtcagtgcttctgggccgc

SEQ ID NO: 321421 - DNA, 122 bp, Homo sapiens
cagctgactcatctctgtactgaggtgtgtagggacttgggaaatgtgtcttgatttgcacggaactgtgctctgtgctgtcagccttcaccgtggtaactgaaactcagttctctgatgta

SEQ ID NO: 321422 - DNA, 122 bp, Homo sapiens
ctgtcctcctgcccttggcagacatcaggatctcagaagatcccagagcccgccaggaagcgctgtcttcaagcatcttttcccaacacaggcacctccgtcctggctctcccaatctcagc

SEQ ID NO: 321423 - DNA, 122 bp, Homo sapiens
gccatcagttctttggcggggttaaagatgccgccggttggctggtcacagatgtagcagcgcggggtggcccggaagtgctccagcgcgcagctctcgcagaaataatgcctgcacttggt

SEQ ID NO: 321424 - DNA, 122 bp, Homo sapiens
gttggtagtctcgatccaaagatgctggaagtagaatatgagcacatgccttctattttgcgactggcaagttctattttgttttgaacctgggactttgattctgattttcttcttctaga

SEQ ID NO: 321425 - DNA, 122 bp, Homo sapiens
tagttgtacttggtgggaggagacaggaagaacacacctacttcatcttcccagaagtcccgtcttagttttcaaatgtctgccaagtagcataaacagcaagtggaaagcagaaagtctga

SEQ ID NO: 321426 - DNA, 122 bp, Homo sapiens
agcactgctgggaaaagatggtggcctggagaacagtcccgttatctatttaccccttttcgtcagaaaccgtagacgtcaccttacgcgggataggaacccgggtgagctacgtccccagg

SEQ ID NO: 321427 - DNA, 122 bp, Homo sapiens
cggcctcggggatgaggggcttcgcgactaccccggcggcccccggcccccgctcccgcccgagcccccaccttctggaccccggccccgggctgggctgcactgtccaacggccgcccagc

SEQ ID NO: 321428 - DNA, 122 bp, Homo sapiens
agtcgcgagtacggctgcagccaatgagagaccggggcgcctcggtggggtgagacagggcgctcactggcggaaccccgggggacgcggtgatgggaggagtgtgggaggggcagtggaac

SEQ ID NO: 321429 - DNA, 122 bp, Homo sapiens
tgtagagtccacgtaaaatccaggagtaaagctggctctcgttactttaattatgcgccacgcgtgtcatgaagattccgaaaggatcacgctgttgtactttgggaatgagagtttccact

SEQ ID NO: 321430 - DNA, 122 bp, Homo sapiens
accattactgtcacagacttggggacacccaggctgaaaaccgagtacaacataaccctgcgggtctccgacgtcaatgacaacgcccccgccttcacccaaacctcctacaccctgttcgt

SEQ ID NO: 321431 - DNA, 122 bp, Homo sapiens
gaccaggggcgctgactcagacagccagttcctgttcatttcccctcactgcaggacagccgctgagcgggaggtcagccctctgaggggctctgactcgggcctttggctgagaaccttac

SEQ ID NO: 321432 - DNA, 122 bp, Homo sapiens
cctttttctcaactggcctaagtttctttttctttctaatgcttgtataagaacaaccttcgttcccaaacacacagacgtgtgtgtgtggacacacacacacacacaaacaattcttcaga

SEQ ID NO: 321433 - DNA, 122 bp, Homo sapiens
ggcgcgtgcagcgcgcagagtcccgggagcccacgcctccgcctccgcccccgccccctccgcctcccagtccacctcgcccgcccgccctctcgcccggcggagagcacagcccactccct

SEQ ID NO: 321434 - DNA, 122 bp, Homo sapiens
agcctgctttccctccgcgccctcccctctcctttctccctctcagaaccttcctgccgtcgcgtttgcacctcgctgctccagcctctggggcgcattccaaccttccagcctgcgacctg

SEQ ID NO: 321435 - DNA, 122 bp, Homo sapiens
gaatgaggagagccaggtagctcaggggctgaggcctcactgagcagggtcccgcgtgaccggtccccaccgctgacggttcctggggtaacactcaggacagggagaggcaatggaaagag

SEQ ID NO: 321436 - DNA, 122 bp, Homo sapiens
ggcacctttcttaccaacttggcaaaagacctagggttaggggtaggggaactgagagcccggggaactagaattgtttcagaccagaacatgcaaattttactgctcagttcgcttactgg

SEQ ID NO: 321437 - DNA, 122 bp, Homo sapiens
tcctccactccctctaatgaaattaagtccctgctgctggacagcgtcctgctaacagctcgcagattgccccacctctcagggcctgtctgggcatcttagcagcatctgcttccagcctg

SEQ ID NO: 321438 - DNA, 122 bp, Homo sapiens
gttaattaccagataatatttttttaaagagtaagcttatatttcagactctgaataccacgtatgtaagtgctttagatatctctccaatagagaaataatggcatggaaatatggtaaat

SEQ ID NO: 321439 - DNA, 122 bp, Homo sapiens
caggcaggatggggtggaagaggcccgagggcccttgtcatttttcttgggggatgggcacgctccgggtggtagcggtcgcgctgcgcgggtaatcgcgccaccaacgcgtctaggagtcg

SEQ ID NO: 321440 - DNA, 122 bp, Homo sapiens
tttaccttcgacatgttaataaataactttgcagataatagtaaatgtctgtacagtattcgtctgctaaggctgtcgtaacaccataccacagactgagtggctgcaacaacagaaatgta

SEQ ID NO: 321441 - DNA, 122 bp, Homo sapiens
gctcgtctgaagtgcagatcgccgcagaggccccagtgcccggatgtccatcaggattagcgcgagccaatacgggccgagcccggggctgcgccgaggacgcccggggctcgagagcaggt

SEQ ID NO: 321442 - DNA, 122 bp, Homo sapiens
ctaacaccctgtggaagacaaactctgtaagtgtggacggtggaagccggcagcgatcttcgtcagatccgccagctgtccatccaccgctgccccctcttcgcgtgacatctaccagtacg

SEQ ID NO: 321443 - DNA, 122 bp, Homo sapiens
cgaaacaccggcgcctctcgcggtgctaaaaggatgggcgcgcaccctccttccggcatccgtagaacccccgcctttgacctagcttcaggagattactttccgggtcagcgtgcgtttag

SEQ ID NO: 321444 - DNA, 122 bp, Homo sapiens
ggctggcaggtcactcgcggttaggagctggagaccagccctgccaacacagcgaaaccccgtctccaccaaaaaaataggaaaaccaatcaggcatggcggcgcgtgcctgcaatcgcagg

SEQ ID NO: 321445 - DNA, 122 bp, Homo sapiens
gttttttattttgagagagtctcactctgttgcccaggttggagtgcagcggggaaatctcggctcactgcaacctccgcctcccgggctccagcgattctcctgcctcagcctcctgagta

SEQ ID NO: 321446 - DNA, 122 bp, Homo sapiens
gcaccccctcctcccccaccccgtctgtaaccatgaccaaagagttgactatttcagttgcgtttcccgagtagccccagcaacaggagaagcatctagaaatatgattaagtatggggtgt

SEQ ID NO: 321447 - DNA, 122 bp, Homo sapiens
ccagactcaaaggccaactttattactgagaagaggtccatttcttatggcaaataacttcgtaaatctttttaaggttatatgattaatctgctaagaaattgttatttttcacccaaaat

SEQ ID NO: 321448 - DNA, 122 bp, Homo sapiens
ccggagacgactccagggctgggtgaggcgctgacccccaggagctggggtgccgaggggcgcgggccacagcggtgcgagccagtcgggcgcccgcgcggtggggcgcgcggcgcggggat

SEQ ID NO: 321449 - DNA, 122 bp, Homo sapiens
tagggatgaggaaatggggtacctttggcctctgaatccagggatggggtcccagcctctcgctgctctccagagtccacagacacactccggtccctcttcaccttgcccttgagcgagct

SEQ ID NO: 321450 - DNA, 122 bp, Homo sapiens
ccaagtggcaaacacgcaatcctagagagcatgggctaccgcaccaccctgtgtgaaggccggcgtgagcctcaggccaggggccaagaaggatgttagagttagcggctccgcgtgctttc

SEQ ID NO: 321451 - DNA, 122 bp, Homo sapiens
cgtgaccagccggctgggctcggtattccccttcctgctagtcctggtggatctgcagtacgaaggtgagtcctgccctgccccggccaggaagtgggctcccggaccaggccccccgcgct

SEQ ID NO: 321452 - DNA, 122 bp, Homo sapiens
gtgtcagcttggctgcagtgacatctcacgctgcagctgccctactcccagatcccactccgtgtgtgccccccaccccagggcctttatccactaactgaaacaaggccgtgtacagaggc

SEQ ID NO: 321453 - DNA, 122 bp, Homo sapiens
ctgcaccggctagccggctggcagagggcgcgccaacagccgccagccgaagtgcccccgcgtaggtgggaggagtgactgcctctcaccatcccccggggatgcacctgtggagagacggc

SEQ ID NO: 321454 - DNA, 122 bp, Homo sapiens
actgggcaagccttgggcttccggagccaaaaggccccggaagtggtcggccgcttgcgacgctccggaagtgacgtgctttcccgagccggtgagtgcgggagcggggagcggggagcgtg

SEQ ID NO: 321455 - DNA, 122 bp, Homo sapiens
gctattggcggaagcaaacgaaacagaggcatggggaccagaaggacgggcgctgtccttcgtgctgaaagatctatgccctacctcaaaactcagtaatctggatggagtggaattccagg

SEQ ID NO: 321456 - DNA, 122 bp, Homo sapiens
aaagatacttgagcctttgcagttcccacgtgccggaaaaactggtacatgcttgagaagcgtggatgtacagaagagaaagcctctcgggtggggtcaccgcaaagaggaaagggcgcacg

SEQ ID NO: 321457 - DNA, 122 bp, Homo sapiens
tcccttcacagcacacagcgccccagtccccactgagctgtcaccagtctcctgaaaacccggcacggatcccgcacgggagcattctcacccaagcccagagactcccctcccacccttta

SEQ ID NO: 321458 - DNA, 122 bp, Homo sapiens
tttgtcaagcagatgtttcaaaaacagtataacaactcatctgcataactatggcagaaacggtaacctgttacctaacaaagactccatttacaggagtcttcttttcattctttcaccta

SEQ ID NO: 321459 - DNA, 122 bp, Homo sapiens
acatcaaaaaatagattttcatgtaaacttatgccaagtgaaaaataaatggcatgtatccgcctcttctgttgcctcatatcaaagtcagggtcaaaccagggaactttccctttctaacc

SEQ ID NO: 321460 - DNA, 122 bp, Homo sapiens
ggctgagaggtacaaaagaaataaggaacagattacgagaaagcggggagggtttcctggcgaaatacggaggctgagcagatggaggaacaatgccgcctccagaagaaaacccttgcctg

SEQ ID NO: 321461 - DNA, 122 bp, Homo sapiens
caagcctaggaacgtgccccctgtacttgggctaaaccgatccatgagaaatggctgttgcgtcccatgacccagctcccctccacactcagtctttcccgtgctccaacccgacacttcat

SEQ ID NO: 321462 - DNA, 122 bp, Homo sapiens
gaggcggaggctgccaatgctgggatggagtcctcgagagcaagagaccagcggcctcgacgagcttacaatccgattaggccctcccaccgatgtgctgtagctgcccgccgccctggacc

SEQ ID NO: 321463 - DNA, 122 bp, Homo sapiens
gggctctgtccggactctgaagcactgcataaaggggtctgtctgagcccaatttacttccggtggggaagggaaagggaagacaccaccggaagcaaggaaggtgctgtgtaatcattaag

SEQ ID NO: 321464 - DNA, 122 bp, Homo sapiens
gcctgcgcccgctgaccaccatgaggccatccatcttgcccaccacgaagacgaggcctccgggacccacgaaccccagcaagcctgtccttatgaatgggtattcactgatcggagccccg

SEQ ID NO: 321465 - DNA, 122 bp, Homo sapiens
gaaatcccccaactgaggcagaaaaaggccaagttatttgtgtgatgcacgtgaaccgcccgagctggtcactaatgaagtggattcgccctattcctggcgactctacaaggttggagacc

SEQ ID NO: 321466 - DNA, 122 bp, Homo sapiens
taagtactttgcataatgcaaagcttgtgcctctagctaatttgcaggcagatgacacagcgtgagaagcctctgatttagtagaataagaactatttgtaaccaaacagcctccctctgtt

SEQ ID NO: 321467 - DNA, 122 bp, Homo sapiens
tattcaaacatcttcatggtaggaaaggtcttgagggaagagacaaaaccgtctgggttacggaagccagcaacaacattcgggacccctgggaggaatgactgagcccaccatttcaggag

SEQ ID NO: 321468 - DNA, 122 bp, Homo sapiens
tgtgagtggcgaccttgagaaatgtggccagtggagcattttgactgagttgggtcccctcgtgcaatactgtgagacagaactcccagcgaggcccacggcctctgaccatgggggttgga

SEQ ID NO: 321469 - DNA, 122 bp, Homo sapiens
gtgtatttggcattgatgatttttcttgaatggtgttgtttaatgttatttaatttagcacgtgaatgtcttatttttctaattagatcatacgcaccttaagagtagggactatgtgttgt

SEQ ID NO: 321470 - DNA, 122 bp, Homo sapiens
gaataatctattcaaaaccttaatgtctttttcttgatccttcttttgagtcctaagtaccgccattacagcttcaaattggcacgtcatataggcgaatttcaaagggagatgcaatccac

SEQ ID NO: 321471 - DNA, 122 bp, Homo sapiens
tgaaccaggcactcatccctgaggggttcagaccctgattatcatgcttttaccaggctacggtggctgtacttattcatttacagttacaactaggcacaggaataccaagaaatgccccc

SEQ ID NO: 321472 - DNA, 122 bp, Homo sapiens
ggagtccgtgttggggaacttggcggcagagtgactgggacctaggacctgcggtggggccgccgccgcctccgcggggccgagcgcctggacctcgccctgaggtaaacgcgggtcgaccc

SEQ ID NO: 321473 - DNA, 122 bp, Homo sapiens
tttggcggtctgtgagggcctgggcaatgccggcatctccttcggaaccgcaggggttttcgtcccctccccatccggagcagcctctttgctaggctagatccagacgaccgctccccaag

SEQ ID NO: 321474 - DNA, 122 bp, Homo sapiens
gggggaggtggggggtgggactggaacttggcctattggcagtgggggagggggcgggggcgatgcttatctgtgcggggcaggaagcacccgcgccagccagtgacaccccagcaaagggt

SEQ ID NO: 321475 - DNA, 122 bp, Homo sapiens
ataatgaagccagctgacccagccaggccgctccctcacgacaaacagcagctaggaaagcgtgcatgtcttccctgcctcactggagtgctgtgctgggcagttttcttgtgctttctgca

SEQ ID NO: 321476 - DNA, 122 bp, Homo sapiens
gcccctaccccaccctcgtcttgggagcctgcaggctccgtggtgccacgggagccccaccgcacctcacgtatccgcgcgagtctctagcacagccccgctcttgggcgttagaaccccgc

SEQ ID NO: 321477 - DNA, 122 bp, Homo sapiens
gctccccaggtgattccaatgtgcatccaaggttgcgaaacattgacataagtaacttgtcggtggctaatgacttagaaagacacaggtagcaccctccaatctagagtggtgccagattt

SEQ ID NO: 321478 - DNA, 122 bp, Homo sapiens
gccgcgggctgcggccagcgctggccagtcagatgtgaaatagtgtctctttactaactacggtattgatccccgcctccctcgcgcacggcgcaattttcctttccctggtgctaacctca

SEQ ID NO: 321479 - DNA, 122 bp, Homo sapiens
ctcatgtccgccccctccccgcagagaattaccttttccagggacggcaggaatgctacgcgtttaatgggacacagcgcttcctggagagatacatctacaaccgggaggagttcgcgcgc

SEQ ID NO: 321480 - DNA, 122 bp, Homo sapiens
acctcaggcgatccacccgcctcggcctcccaaagtgctgggattacaggtgtgagccaccgcgtccggcctagcctggactttcttagcatttttcatttacgctgatcacagagctgacc

SEQ ID NO: 321481 - DNA, 122 bp, Homo sapiens
tttcttgagaaaataagattggagtccgtcgtaggaaactggaaccgaattcagagaaagcgattcaccgaaaaggaaatgaccaattgcctgagtttccgaaatggcagaggactggccct

SEQ ID NO: 321482 - DNA, 122 bp, Homo sapiens
tcggttctgctcattcagcatgaggatggtctgctgctgccggcccagggacgaagtggacgtgcgggcaggaccgggtggggggcggaggaggacttggacagggcctggctggcacaggc

SEQ ID NO: 321483 - DNA, 122 bp, Homo sapiens
gcccccctttcccgggttcactttggaaattggcttgccctctcggcagccagcagttcccggcagagtccggccgtaacggtcagattcaagaagtgaggcagcgccaggctgggtggctg

SEQ ID NO: 321484 - DNA, 122 bp, Homo sapiens
gccaccattttcacaaagcctagactggcaagcagcacccattagaagttcatgttgaatcgaatgattgaatgagccttcaactcatctcctattttcagaacaaaatgtaaaaaaaaaaa

SEQ ID NO: 321485 - DNA, 122 bp, Homo sapiens
aggccacaggcttgttgtcgagccctgacttcacctatagcaaagaggctacataggtgtcgttttgggaatatttgaaggaggaagattctagcattgcagacgtctaagtatgaggtcag

SEQ ID NO: 321486 - DNA, 122 bp, Homo sapiens
aattatcccagcaccatttgttgaatagggtgtcctttctccactttacgtttttgtttgcgttgttgaagatcagtttgctctaggtatatggctttatttctgggttctctattctgttc

SEQ ID NO: 321487 - DNA, 122 bp, Homo sapiens
gaaactccctctcgcgggatgatgcctttggaagttcagggtttttctctccaccggactcgtctgccctcggggccaaatccgcgaagcgaggaggagctcccaccacacagcctgctgtc

SEQ ID NO: 321488 - DNA, 122 bp, Homo sapiens
gggaacggggtacagcaggttgctcaggtacacgaaggccctggggagaagcagaggcggcggtcatgggccacccctccacgcatgttctgaacggcagcggtggcagcatggcctggctc

SEQ ID NO: 321489 - DNA, 122 bp, Homo sapiens
tggatccaaatagcttgggtaccatcctttttcttttgttgagatggagtctcgctctgtcgcccaggctggagtgcagtggcagatctcaactcattgcaacttatgcctcccaagtttaa

SEQ ID NO: 321490 - DNA, 122 bp, Homo sapiens
tcctataaaggttaccataatgcagattcattatcagtcccactgggtagcacatagctccgtaagaaattgcttttgttagcatgctcgtagaaagagattagctatttcaccagatctct

SEQ ID NO: 321491 - DNA, 122 bp, Homo sapiens
ctgggctcaacctctcccagacttcctggactccagtggagccttgggccgggggcggggcgtccctggcccctccccgtcgtcccgcctgcccggaaaggagtgagcggcgcctagtcccg

SEQ ID NO: 321492 - DNA, 122 bp, Homo sapiens
tccctgcagttctaggccaggtccccaccgccagggggcactcagcaaagcctgagaggacgcaaacgcccagactctggtgctggagtcaccactacacggctgtcaaagcgcttttacac

SEQ ID NO: 321493 - DNA, 122 bp, Homo sapiens
tagctgcaatgcaggagctctcgttgaatgcaaaataaacacattttactcctacacaggcgcctaacaccgtcgtcctctgtatcccactttcggttaaggggcagaaataccgccctatc

SEQ ID NO: 321494 - DNA, 122 bp, Homo sapiens
tgctaaatttagatgggtctcataatgcttcctaaccacaacaatgtgttttcataacatcgaaattggaaaaacaagcaatttctcctaaccagcctcaatcaccattgaattgaacagaa

SEQ ID NO: 321495 - DNA, 122 bp, Homo sapiens
cccacagtactgggattataagtgacaaatactcttaatgtaaaagctttcgacagggcacggactctcctgttagaaacaaacatcactactccctattaacctatgccctccatttttac

SEQ ID NO: 321496 - DNA, 122 bp, Homo sapiens
tcccattggctgcagcgggaaatggtgaaccaatgctcatagaccttaacgccctcctctcgggatcacttccgcctctggggtcaggctccgcccagcttgcccggcatcactcgcggcat

SEQ ID NO: 321497 - DNA, 122 bp, Homo sapiens
ccaggggaccagttccttggtgttgctttggcattgatgcctgaagtgggaggagaaagccgagcccacaaacacacagagcagagtggggctctgagtatataactgttaggtgcctccct

SEQ ID NO: 321498 - DNA, 122 bp, Homo sapiens
agaagccacccagcgaaaattgcggaggttttccgagctaagaggtaccagagaaggcaccggagttctcctgggcaatgcagagggagggtgcttttacgtgccaggaggtttgctggact

SEQ ID NO: 321499 - DNA, 122 bp, Homo sapiens
gcccttgctcctgctcttccaggagcctgaatgcccctctgacttcggtttcccacctgacgactgagctttcctactctgacatgccaagctccccctggctggagagagttctcaccctc

SEQ ID NO: 321500 - DNA, 122 bp, Homo sapiens
caccggccggggctgggtggaggtggccgcggggaccccgggggcgcggagcgagggaaacggactcggcggcgccggcatgaggagctgagcgtctcgggcgaggcgggctgacggcagca

SEQ ID NO: 321501 - DNA, 122 bp, Homo sapiens
gcttacttacccccacagccttctttacatacctgtccactgacagacacttgatgaaatcgggatggtcctaattctgccacagagggcctttttggatctcagttactcatttataaatt

SEQ ID NO: 321502 - DNA, 122 bp, Homo sapiens
caccctcaggaagtcagctcagccacactgggccttttccctccactccgctgcctcggccgggcaggagagtggctcagcagctctggaacctgcagcccccctgccccgccacagtccgc

SEQ ID NO: 321503 - DNA, 122 bp, Homo sapiens
aggcaaggaggcggacaaaatggccagtaacttatgcagtaaatgcagttagaaaacacgcgtgttgaacagttacagaagtacaaagcaaatgctgggaagagagacctcaagccagtttg

SEQ ID NO: 321504 - DNA, 122 bp, Homo sapiens
aagattaaatgaggactagaaacgataccatatagacaaagcttttggtgtcatagcccacgcatagcaggactcaaaagtaagcagctattttcatgcactgtcagtatacctctggtggg

SEQ ID NO: 321505 - DNA, 122 bp, Homo sapiens
agatgggaaaactgaggcctgcaaaggacgttggcaacaatccgatgagggagctggctccgagcctggcggcctgtgctgggactctgcactcagacacacactgtggtaccagctgagga

SEQ ID NO: 321506 - DNA, 122 bp, Homo sapiens
cctcctaacacagctggttcaaaggagggaaaaatcctttcctgcttaacattctgcaaacggcatgggcatatctccgaagtcaatcatcatgaatgaagccatttaagagtggggcccgc

SEQ ID NO: 321507 - DNA, 122 bp, Homo sapiens
cgcgtgtgcctgcgactcgggtggcgactgcgagtgtttctgcacggctgtggctgcctacgcccaggcctgccacgacgcgggcctgtgtgtgtcctggcggactccggacacctgccgtg

SEQ ID NO: 321508 - DNA, 122 bp, Homo sapiens
cgcctgtagctttgcgtggtctggcaccccggaggtggaggctgcctggaaggatacgggcgtggcaggactctcacgcacggtgaccacgctggccttcacgaggctgtggttggcggagg

SEQ ID NO: 321509 - DNA, 122 bp, Homo sapiens
gcgagccgggcgaggggaactccaggctgcccctgagcgccggggccacggggctaggctcgtggagaggacgcccctgccccagacccggccccggcccagcgaggaccaggcgcccccgc

SEQ ID NO: 321510 - DNA, 122 bp, Homo sapiens
cagtcaagagaacctggaacccaagaggcttgtcccaggcaaggaggcttggattcctcccgggacctgctcctgcgatccagaaccagagcatgcaattgctggtgagggaaaggcaggat

SEQ ID NO: 321511 - DNA, 122 bp, Homo sapiens
gagccaattcagattccaacccctgagcagacaccaactggaactggaagcgtcactctccgggcctcagtttcctcctttatccaagggggataggccctgggatcctaggacatatgagg

SEQ ID NO: 321512 - DNA, 122 bp, Homo sapiens
ccatccccgcagcccacgctccctcctcacctacctgctcctctcagctcctgaagtggccgcaactcagactcaggttcgggcaccctctcggctgcctaggctcctgctctggagcggta

SEQ ID NO: 321513 - DNA, 122 bp, Homo sapiens
ggccagagggaacgggaggcccaggggtgtgcaagagaatgggcgcccgagcctgcagagcgcctggcagtttagagcggtcccgccatcttcggggtcttccctgccacagaggcttctga

SEQ ID NO: 321514 - DNA, 122 bp, Homo sapiens
ggcccgcccctaggcgctgattggttgctactgatccaatagggtccagcccttgaaggccgaggaggcgaggcgaggctggcaaccgcgacctcctgagcagctggggcgcttgggggatg

SEQ ID NO: 321515 - DNA, 122 bp, Homo sapiens
cagacggggcggctgggcagaggcactcctcacttgccattcggggcgaccgggcagagacgctcttcagttcctaaatggggtggcggtcaggcagaggcgctcctcacttcccattcagg

SEQ ID NO: 321516 - DNA, 122 bp, Homo sapiens
cacctcccagatggggtggcggccgggcagaggcactccccacctcccagatggggtggccgggcagaggcgctcctcacctcccagatggggcggccgggcagagatgcccctcacctcgc

SEQ ID NO: 321517 - DNA, 122 bp, Homo sapiens
tgactcatcaattgcaggttaacagggaaacagcttcctgttctctaggtaaaattcttgcgggacctgtccctctgtaaccttagcacctacctgcattctatctactgctttttctgtta

SEQ ID NO: 321518 - DNA, 122 bp, Homo sapiens
cttggttcaagtgattctcgtgcctcatcctcctgagtagctgggattacaggtgtgtgccgtcaagcctgggtaatttttgtatttttttaaggagagacgaggtttccccatgttggcca

SEQ ID NO: 321519 - DNA, 122 bp, Homo sapiens
aataaaagccaataaggaaccggaaaatgcccctaatcccagcaatagccgcctggtctccgggcggggcagggttccagctccgggccggtcctggctgtgctttggggcagctccgtttc

SEQ ID NO: 321520 - DNA, 122 bp, Homo sapiens
gcacttgaatgaaggaggataatagagaagagggcatgtgcccttgaggtaggacactgtcgggtgaggtgagcatgaggttgtctgcaactgtgcagtgcagctgaactaaactcggaggt

SEQ ID NO: 321521 - DNA, 122 bp, Homo sapiens
gcctgtgatgtgtgtttcccgtcacacggcctgtgatatgtgtttcctatcatgtgtgcacgtgcattgtcatgtagtgtctgtcacaggtgttacccgtcacgtgtgtttgcatgttgcat

SEQ ID NO: 321522 - DNA, 122 bp, Homo sapiens
tgtctctagtgtttttccaaatgacatccagggctctggccgtggagtccctgatgtgatcgctaaaggacctccggagaggggctcgcagggggcgcgccatcacgtgggccttggggtcc

SEQ ID NO: 321523 - DNA, 122 bp, Homo sapiens
agaatcctgctctatggcctgaccccaggctacagggagggtcagggtggaaagtgcccacggtcctttggggtacaagggaatggcgagggtcggggatggctaggcgatgcccacacacc

SEQ ID NO: 321524 - DNA, 122 bp, Homo sapiens
tcctgttgtaatgcttttagacactttatatatcaaggggccaaagtcacatgtttttaccgattagattcctgatcattcaggggttaccaagattctgctacccactgtagttaatacac

SEQ ID NO: 321525 - DNA, 122 bp, Homo sapiens
acccgaacttcgctcctgtgcccaaacttggaactctggaaatgtggcttcgctcactggcgccttgagcttgggcgactgccgggcccgcgaaacccgacccctgcagagctgactccggg

SEQ ID NO: 321526 - DNA, 122 bp, Homo sapiens
agccctggagaggaaggagttcctgcgcacgctgcagcatgatgggcctggaggacgtcacgcgatgggaagtaagccagacacagaaagacaaatacggaaggattccacttctggaggct

SEQ ID NO: 321527 - DNA, 122 bp, Homo sapiens
ggaggggaccaacggggagttcaaaatgacggaccccgatgaggtggccaggcgctggggcgagcggaaaagcaagcccaacatgaattacgacaagctgagccgggccctccgttattact

SEQ ID NO: 321528 - DNA, 122 bp, Homo sapiens
ccttctccgcgcgacgaagccgggcttaccaatgggagcccggagtggggcgagcaggggcgggacggggcgggactgcggggaggtggccggcgggccgcgccgcgagccagtatctcaga

SEQ ID NO: 321529 - DNA, 122 bp, Homo sapiens
cggggaccagaggccagagggccgggctgggaagaggagctctccggctggcagcttctccggaaatgaaatcctctgcaccctggaaggcagactcgcacccctggtgcccctacctacct

SEQ ID NO: 321530 - DNA, 122 bp, Homo sapiens
ctaggaagtgttcctgtaaaacttgatttttaacaatgttaataaaatcccatttcacatcgatacaagtgtttagaacacattatgcctcaataccttgcaaggtgggaaaaagttgaaat

SEQ ID NO: 321531 - DNA, 122 bp, Homo sapiens
attggcaaagcagtcaggtacataaagatataagaaaaagcattagaggccggagccttgcggccaggcaggcagtagatggaaggaaagactcagcagcaaggaagcttgcaaacacagag

SEQ ID NO: 321532 - DNA, 122 bp, Homo sapiens
ctggccttgcccgcattctccctctctcccaggtgtgagcagcctatcagtcaccatgtccgcagcctggatcccggctctcggcctcggtgggtgcgcgcccctcacgaccccggcccctt

SEQ ID NO: 321533 - DNA, 122 bp, Homo sapiens
tacacccctgcttcgaaatatgatttctcaggaccgtggccagtcgcttttcttggatctcggttttctcatctctacatcaggaggctaaaataaaccttaaaatagaaaattctaaggtt

SEQ ID NO: 321534 - DNA, 122 bp, Homo sapiens
gaagcgcagttctccaaagggtagggactctgggcggggctagcagtcctattccgcaaccgcctcagtctcggccccctcaggccaggcgtgagcgccgcccgcctctccccctgacggcc

SEQ ID NO: 321535 - DNA, 122 bp, Homo sapiens
tcttctaggtttcctctgatcttttcttcccttttaattctacatacatttcttatttgacgtggttttacttattttttttttttttttttgagacacggtcctgctctgttgtccaggct

SEQ ID NO: 321536 - DNA, 122 bp, Homo sapiens
acttcttcatccagaatacgggcaccaaagatgatcactccatgggtgtccaatactggacgagcacttcgggggagaggccgggtgactcgcttcttgcagtcaacaatgagggtgacaga

SEQ ID NO: 321537 - DNA, 122 bp, Homo sapiens
attaaaaagatgtggccttaggttctagtggctctggtgtgggcctgtgcccagcctttacgagccagaggttcccccctccagccgagggctgggctgacatagtctgtgcccaggctgtc

SEQ ID NO: 321538 - DNA, 122 bp, Homo sapiens
ttgcgtgtcagcctgagagcccttgctttgagaagcttggcagaagctgcaaagggtgggcgggcagctaagagaaatcgacccaaggatgtaaatcgaggccattccattataactggatg

SEQ ID NO: 321539 - DNA, 122 bp, Homo sapiens
ttttggtgacaagcctgaagagcccaggagactttagggtttgcatcctggagttgtatccggtgcctggcacacagaaggggcctgggctcttgtgaggggctggggccagagctaagagg

SEQ ID NO: 321540 - DNA, 122 bp, Homo sapiens
tctgtttatgaggcgggtggccacagagataggctgatggtgagggggtttcacacactgcggtaactaaggcctgagccccacccactctccacccctgcgcttagtcccacttgacagat

SEQ ID NO: 321541 - DNA, 122 bp, Homo sapiens
gcacggccttccggatgctggaattcctcccttccatcatctttaacttgtctatagtttcgtcaataccaaggggaaccattttggacttaggaagccactgcctttttaaaaggaaaaac

SEQ ID NO: 321542 - DNA, 122 bp, Homo sapiens
aaaatatccctagctgggcccagcctgaaggaaatgtttaaataccaatatctctttggccgtcttagaggcctcccaagaacaaaaataaaggaaactaagggcatgttttattgactatt

SEQ ID NO: 321543 - DNA, 122 bp, Homo sapiens
ctttccagagggagggtgtgccgctgccaggggagcgcaatgaagtgagcgctgaggggccgagggtctgtggggaacgaatgggtgcactttcccaggaatggcccttcacggactgctgg

SEQ ID NO: 321544 - DNA, 122 bp, Homo sapiens
gacaaacaaaaggaaaggcggaaacgcagaaacgcagaggtagccagtggatgaggcatgcgcagagcccacgctcaaagcctggcgctgttggcgcccaacctggaaactacctttcccgt

SEQ ID NO: 321545 - DNA, 122 bp, Homo sapiens
gggctcccctggcttcctgggtactcccagtcaaggtcaaggccgtcaaagctgtatttgcgcagaaacctgatggccgagttgacaaaggtctgacggttgttggccgtggctaccatatc

SEQ ID NO: 321546 - DNA, 122 bp, Homo sapiens
ttcatggatcttaaacatgacttgaaaacaaccatcttcaagtcttcatccatgcagacacgatgaaaactagcctcacaaatactatccttatactctttagctaggtggttggtacatgt

SEQ ID NO: 321547 - DNA, 122 bp, Homo sapiens
gcagatggagctggggcacggggtgaccggagccaagccctcgagcccttcacaggggcccggcccggcacccccatcatgcctgtcagtactgtgtccaggttgtagtaggggctgtccac

SEQ ID NO: 321548 - DNA, 122 bp, Homo sapiens
atctctgactcttttccgagtctttttctagagatgtccatcacagtgtttgcccgttcacgccgctagtcttttgcaagggaaaccgccccattggagcagctatgggtgagctgtccctt

SEQ ID NO: 321549 - DNA, 122 bp, Homo sapiens
ttcacgctaaagccccagagcccgacgcggcagccgcggtagcggagaagactggagctccgaggagctgcatctgcggcaacctgtgtgctgacgctacgtgcctcctggctccgacgtag

SEQ ID NO: 321550 - DNA, 122 bp, Homo sapiens
tgaaattgccaccatcaccccagtcttcagcaatcaacaccctgatcagtcagcagccatcgacttcgaggggagactccccaccagcaaaaagagtacaactctctgaaggctgagatgat

SEQ ID NO: 321551 - DNA, 122 bp, Homo sapiens
tttgggagagaggtggcccaagagaagtgaacttgcacagaagaggttgagccaccgcagcgcaggcggctcagggttattgcgaccctagccccctcacttctccctccgaggctaagtgt

SEQ ID NO: 321552 - DNA, 122 bp, Homo sapiens
tacagagcagacttaggtaggctgaatgtaattacacagattggaagtcagccaggacgccgaggttaacaatcccttcactcacaaaaagcaccacgggaactttaatgaccacaagtggt

SEQ ID NO: 321553 - DNA, 122 bp, Homo sapiens
gtcggagcagaggtggcagaaggtgggcttggtgagcgtcaccttccggaagctgtgtcccggcgcggcagcggggcccggggctctgacgcccgcccgctcgggtcccggccccggccccg

SEQ ID NO: 321554 - DNA, 122 bp, Homo sapiens
ggttaaaacagctgagagcgcgcctgctctttcccgccctgggttctacatctctctagccgcccaccagactgcatctccaatctgggagctatcctcaccttgggagggtggggcaacaa

SEQ ID NO: 321555 - DNA, 122 bp, Homo sapiens
tcagggtccctcaccttccccccttttcccagagccatcttcccagcccaacgtccccatcgtgggcatcgttgctggcctggttctacttgtagctgtggtcactggagctgtggtcgctg

SEQ ID NO: 321556 - DNA, 122 bp, Homo sapiens
ttcaattcccagaggcaggggcggtagttacgcagtggaggctacggcggttgcgtcttacgtcatcgaactgcggccatttcgaacccgcaatggaagaaaggggaggggtttatgcgggg

SEQ ID NO: 321557 - DNA, 122 bp, Homo sapiens
tgcctccccggtgcccggcagcacttaattctcttatttcttaaatcttagattattttccgcatagtagctttactttgagataattttagacataagaagtgttgcaaatagcacaaaga

SEQ ID NO: 321558 - DNA, 122 bp, Homo sapiens
aaggctttttttctggcattttacaggtatttaatttgcctcccgccccgccgccccccacggctatagctggtttgataatcctggagctctcaaatatccaaagagttggaagtgtactc

SEQ ID NO: 321559 - DNA, 122 bp, Homo sapiens
ttgtggccatgatgacgggggagtccttcaagctgatccagtaggtgcagctgccgcagccgggggaggcctgcccgggaaggctgctgcccctgccccctggcccccactcccccggctcc

SEQ ID NO: 321560 - DNA, 122 bp, Homo sapiens
gggtgacggacggcacctggaaaatcgggtcactcccacccgaatactgcgcttttccgacgggcttaaaataaggcgcaccactagattatatcccgcacctggcttggagggtcctacac

SEQ ID NO: 321561 - DNA, 122 bp, Homo sapiens
gtagcttcaaaagtgttagtgggcatgcgcgcggttcaacagcgcctacggaaatcctaacgggaatgtaacccaaaccggaagtggcctagagcgaccatttagcttctgttgttaagtgg

SEQ ID NO: 321562 - DNA, 122 bp, Homo sapiens
tcgcttggctctctgtcccgcccactacccggaagtgtggcccgggtccagaaccaagagcgcatgctcaccttgtagctcagccaatcaaagagaagcgaggcggccattcgggcggaaat

SEQ ID NO: 321563 - DNA, 122 bp, Homo sapiens
caactccatcattggcgacgggccgatcgtgcgcaaggagattgagtaccgcatggcgcgcgggccctgggctgaggtgcacgccgtcagcctgcagacctacaagctgtggcacctcgacc

SEQ ID NO: 321564 - DNA, 122 bp, Homo sapiens
caccacaggcccctgttcagaatgcagatcacatgcgcccctgctttgctgtctttaccacggtaaagtaaccgtaattacaattgcaattctaataatttcagaagtatttgcaaatatca

SEQ ID NO: 321565 - DNA, 122 bp, Homo sapiens
gaagtgcctttccagtggacctgggctgttgttgcggttgttttccttctctccgtgcaacgctggcaagtctcaaagtcgccacaggtgcaggttgggatgggaggcaccaagggttggta

SEQ ID NO: 321566 - DNA, 122 bp, Homo sapiens
ttctcattttctgataaaaaattcaggttaaaaacacccagctccaggttttagtcaacccgtgtatatataaatgagctgtggtactcctcatttctaagtataaagtcgttctctctttt

SEQ ID NO: 321567 - DNA, 122 bp, Homo sapiens
agagttgctgtattctgggaatgggcagggtcactcgtccgaacagagtcctatcctacgcggcggaagagtgtgccctttgacttgcatcgtctacctacctctgccatcctctaccagcc

SEQ ID NO: 321568 - DNA, 122 bp, Homo sapiens
agattcagcgccagtcttcagcagagccagatctagaatccaagatcttttggcttccctcgtcagcacattgcctttgtgctctctctatttcctggttagtgataagtaagcctttttga

SEQ ID NO: 321569 - DNA, 122 bp, Homo sapiens
cgacgcagaccctgcctgccttcaggttgcttgaagatgaacagagagatcggacctctgcgtaagtaacctcgctacgaaatattatgtgggaaggtcacggataaataatgctcgggagt

SEQ ID NO: 321570 - DNA, 122 bp, Homo sapiens
atactaataatactccatatggttgttgcaaggatgaaatgagatgtctgtaggaagtgccgaggaatgcctagcacaaccaagagcttgttgaacttgtcacgctttactgtcgataatgt

SEQ ID NO: 321571 - DNA, 122 bp, Homo sapiens
aggtgtgaacggccacggggcggctggtctggttctcgtccattaagaccttgagttcttcgttagcttcagtgagactgacatattttgccatgttaacagatttgggaaataaatgctat

SEQ ID NO: 321572 - DNA, 122 bp, Homo sapiens
agtagcccggctctctgaacctccaggctactgcagctctgagtggggagagggacgggccgtggcatgcacatcaggttgctggcctgcctccagataccatgccacagagctggctaccc

SEQ ID NO: 321573 - DNA, 122 bp, Homo sapiens
atagagagagctgtgtattaaagctttttacaaggaagaaatgaaatgtgcacattgccacgggcttggtccaggaactgtaataagagctaatctgattttgatggtggcattcaggtaaa

SEQ ID NO: 321574 - DNA, 122 bp, Homo sapiens
aggagaggccgggcagccggctagtagaagggtagtggcgcgtcttggagtcacgctggccgagtggaaagaatagcgggcgaggcgcaggagaggggagcccaggtttggatttgtcaaac

SEQ ID NO: 321575 - DNA, 122 bp, Homo sapiens
tgacggtcctaacccacaagcccagccctgcaggaaagggaatcaacctcatcctcctaccgcacaccgttgccccatcctgccagggtggcggcggcagaaactccatcttccctccccag

SEQ ID NO: 321576 - DNA, 122 bp, Homo sapiens
ctagtcttttaaaggactgaaaagccgcgaggggcgggggctggaattcgccccctgaagcgcagagatgtcagctcctgaaaagtcattcggtcgttcagtgtttgtttccctctgtcgta

SEQ ID NO: 321577 - DNA, 122 bp, Homo sapiens
catctcaccctttgcagggactgtgcaggcagcctacccacggtcacaggagcgagggcgcgtcgtggggtccacgtcaagggtctgctgacaccacgggaacacccccaactcctcacccc

SEQ ID NO: 321578 - DNA, 122 bp, Homo sapiens
tccttttgtacgcagaaataaggagcgacattgtgttttcttccccagctgagatgtgcccgcggaggggccgcggttcttcctgtgcctggggtggtggtcccctgggtgagggagagggg

SEQ ID NO: 321579 - DNA, 122 bp, Homo sapiens
ggcggcactgcgggagggggaggagctcatgggcttcttgctgggggcctcagtgctgtccgctaaagcacctactgtgtgcccagccgagctgcccctgagcacagcccttgtctggctgt

SEQ ID NO: 321580 - DNA, 122 bp, Homo sapiens
gctttctactgtatggttaattaaataatcactcaaaagcttccaacgtgacgcttctgtcgtaatccaatcaggttacataggtcctaaacaagaaagatattttccacatctggaagtca

SEQ ID NO: 321581 - DNA, 122 bp, Homo sapiens
cgcactgaactgttctcctcctaggcagccttgatccagcgcagactgttgttgacaacccggcggtagcatttgtagaagccctgaaacggaggttcatagggggccaaagagtgttattc

SEQ ID NO: 321582 - DNA, 122 bp, Homo sapiens
ccacgaacgagtagatcacgttgttgtcctcgaaatcccagcgggaggccagtcccacgtcgaaatccatgtcctgttccacctcactcagctggatctcatgggtggtgatgtagtgagcc

SEQ ID NO: 321583 - DNA, 122 bp, Homo sapiens
ctcgcagaccacccgtctgggagatccagatatcggatgaatgcctgtccgggggcccagcggagccagacggcagccgcctcctcctttctggatctgactgttccgggacccgtctcccc

SEQ ID NO: 321584 - DNA, 122 bp, Homo sapiens
cccggggaacccgctcccagacagactcggagagatggcaggcggaagacaccggcgcgtcgtgggcaccctccacctgctgctgctggtggccgccctgccctgggcatccaggggggtca

SEQ ID NO: 321585 - DNA, 122 bp, Homo sapiens
gaagaggttaagcgacttattcaaggccacatagcttacaaattggggagctgggattcacgtacaagccactgattccgagggcagtgctgttcaccagggtccacacggccgcctttacc

SEQ ID NO: 321586 - DNA, 122 bp, Homo sapiens
agctctaaatagaacagacactcagccagtgccggttaactaacaaattcctctgcagaacggcagctcaagaagcagatgcatttcaccctcgtgcttatgttggcactgataacaatgtc

SEQ ID NO: 321587 - DNA, 122 bp, Homo sapiens
gcgaggccaggaggagcctcccccgggagtacctggacttggggatcggtcagatccagccgctcctgggaagggccctcggagcggacgtgcaggctgccaccttgctatcggtgctcgct

SEQ ID NO: 321588 - DNA, 122 bp, Homo sapiens
tgctccatgacagctaaaagttggattgagtttcaggagctactatatataaagctgggtcgacttatgtcactgcactaattaaatgccatctgggtggttcctctgggtttttgagtcca

SEQ ID NO: 321589 - DNA, 122 bp, Homo sapiens
cttcgtgtccaaccctcttgcccttcgcctgtgtgcctggagccagtcccaccacgctcgcgtttcctcctgtagtgctcacaggtcccagcaccgatggcattccctttgccctgagtctg

SEQ ID NO: 321590 - DNA, 122 bp, Homo sapiens
atgcaccaccacgcccagataattttttttttctcagccatacgtgctttattgacaacgcgcacctcaggccttgaccgctcactgccgcagcaggtacagccgctccttccgctgctgct

SEQ ID NO: 321591 - DNA, 122 bp, Homo sapiens
atggtattaagtagatcaataatatgcgcccatcgccactatccaccttcaaaatattttcgtgaccccaaacagaaactctggaaccattaacaataacttcccatccccctgttccctca

SEQ ID NO: 321592 - DNA, 122 bp, Homo sapiens
tacattgtccacaccttcatgctgggagtggattagtcattttgcaaggaacattttttacgatactgagtcctgcccatgctccatccagatctgaactcctgagatggtgatcatgtata

SEQ ID NO: 321593 - DNA, 122 bp, Homo sapiens
tccctcttaaggcagaagagggagatgggcggtgggggagcagtgacagctcactgcctgcgcatcgccttacccacaagagacacctgcaaatatgtgttggttcttaaaatattaaagaa

SEQ ID NO: 321594 - DNA, 122 bp, Homo sapiens
gggctcgggccccgcccaccggcgggtgcagctgagggcgcggccgaaggtgcccgacgccgcccacgagctcgactccacgctcggctactaggaccttctgcacttgcaccgagcaagca

SEQ ID NO: 321595 - DNA, 122 bp, Homo sapiens
gctggccgcaccgcgctgcagctcctatgcagccttctctcttcctccgcctctggctgccgcaggttctttagggccagatgcagatgagctggttgtactctggttgaaccagttcccaa

SEQ ID NO: 321596 - DNA, 122 bp, Homo sapiens
ggtaaattgatccctagagaagaggctagtctgagatatatagcgagtgaggaaaagaatcggaatcatgatcctggtgccttagataaccagccccagttcttcccgtgttgctcggaacc

SEQ ID NO: 321597 - DNA, 122 bp, Homo sapiens
tcgtgctggggtggtgggggtgggaagtggtgcgagaccctggcgggagtgtgggtgaaccgaggcactgcttgggtggaaatccgtggatgcctttattgctgtcgtttggcgcccccatc

SEQ ID NO: 321598 - DNA, 122 bp, Homo sapiens
gtgcacaacttcatcatcctgaacgtggacctgacccagaacgtgcagtacaaccagaaccggtgagctcctgcacctggggcagaggcggcggcagccctgggggcgcagagtcctgagtg

SEQ ID NO: 321599 - DNA, 122 bp, Homo sapiens
cggtgccggcggaggtgggggcgtggcgcgggatgggcggcgcgggccctgccgtggtaccgcctggcagcgtccaccccgccgctggggcgccctggaggctcctggccctccgtggggcc

SEQ ID NO: 321600 - DNA, 122 bp, Homo sapiens
tctttagaagcagtgattttatctgatagaatctagctttcttgattaaaaaaaaatgatcgattggttagtgtcaagtggaccaatgtggtactatgattattttaccctttgaatagcct

SEQ ID NO: 321601 - DNA, 122 bp, Homo sapiens
aagcactgtgtcgttccagaggtcatgagtgtgtgtcactcactgatgaggaggttgtgacggcagccacctcgcttgcctggtggtcatgcaggtcttgcctagtagtcatgcaggggtct

SEQ ID NO: 321602 - DNA, 122 bp, Homo sapiens
actgttccccgctgcccacaggcatgcattctccataacccctgatgtgggaggcagtttcgcagaggatacccctcaattctgacagactcccaacgctgccttttccagccacatcacct

SEQ ID NO: 321603 - DNA, 122 bp, Homo sapiens
ggcactctcctgaccccagacaggctgcttggctgacttcactcctgtctcccaggctcccgccacttccccgagtcccgaaacagcagccacatcaagaggcccatgaacgccttcatggt

SEQ ID NO: 321604 - DNA, 122 bp, Homo sapiens
gcacgtggcagggcaggcttttttggcaggacctgtggtctcaacctgcagtgatgctaacgatattagcaaattagcaccacaaagcttgccagctaattcaccagagcctgctcactctc

SEQ ID NO: 321605 - DNA, 122 bp, Homo sapiens
ggggacgcctgccaggtcattgacctcttggcaggtggggtaggctttcagggaggggtccgatgccccctaggggaagggggaggcctgtggtgggggctcccagggcgctgcagcagaga

SEQ ID NO: 321606 - DNA, 122 bp, Homo sapiens
cgcgccagacggtccccaccctgcgcctgtgcatggggccacctcggcccttggacttcacgacccgctggcctggcccctccatgggcaccgtgactgctgcacagctgcctgcacccaca

SEQ ID NO: 321607 - DNA, 122 bp, Homo sapiens
actcaactaacaggagtaaaaggcagcacttaaacacatttaatgtaaacagcataacaccgcaaaacctgatttccaactccagggatcaggcagtgagtaacaaaaacaaaggccctgat

SEQ ID NO: 321608 - DNA, 122 bp, Homo sapiens
tacacgaagactcagcgggaacacaagccatcttctgtacatgaagatgcactactgacccgccgtccgcaaatgtgtttgtacagttactttctcagtatgggtgatggctctccaacgaa

SEQ ID NO: 321609 - DNA, 122 bp, Homo sapiens
agctgaaagtgcaggaaatttaaaggcttggaccctgcgagacagacaaaccggtgccaacgtgcgcggacgccgccgccgccgccgccgctggagtccgccgggcagagccggccgcggag

SEQ ID NO: 321610 - DNA, 122 bp, Homo sapiens
actgtatagcctctaccaaaattacataccacttagcacgaatgcaagagatcccttcctcgtactataaacaaaaattaactcaaaatagatcatgaacctaaatgtaagagacaaaacta

SEQ ID NO: 321611 - DNA, 122 bp, Homo sapiens
actttagagctggccttggctgggagaggaaaatccatctgaactcacccggaatggttccgaggaccagcgcgctgaccctgactctgttagtgcctgagccctcctccgccgttccgccg

SEQ ID NO: 321612 - DNA, 122 bp, Homo sapiens
taggtgacccgtgtggcctttttgttgaggcctttaggatacaaggcccccacctaaagacgcgaccctcccgtaggaggggggcagggcccgggggcgggagcacagcggggccccagcct

SEQ ID NO: 321613 - DNA, 122 bp, Homo sapiens
caattttctatttctgacttgttaggctagtcagagcgagacgtctttacaggtttgggccggcagctggaaaaggcacacggccccgggctcctcctccacccagccccacccctcctccg

SEQ ID NO: 321614 - DNA, 122 bp, Homo sapiens
tgtgagagccgggggagagccgggtggactaggcttctcctgggcgggctatggggagagcgcccaggagggcgggacgaggcggggcctggacagggtggggtttttcggaggagttgctc

SEQ ID NO: 321615 - DNA, 122 bp, Homo sapiens
gggcccgggctgcaatcgagaggcgttgagccgtaaatcagcaccacttcccgcccagggcgttctgggtccccgcccaccggcaagtcacatgagccaccaaaatggtggtgttcgggtat

SEQ ID NO: 321616 - DNA, 122 bp, Homo sapiens
tcataaaatatgacgctgaatccaaaggccttggctcgaactgcaaccgcctaccccctgcgatcaaagccgatgaggcccagcatttccccacggatgctggccgatcccgaggccaactc

SEQ ID NO: 321617 - DNA, 122 bp, Homo sapiens
caggtttcatagggaaggggatgctgactggggtcatcgcgggagctgtgttcacctccccggcagtgggcagcatcctggcagccatcagggccgtggcccaggccggcacaggtaagcct

SEQ ID NO: 321618 - DNA, 122 bp, Homo sapiens
cgcgataccggaaggactgggtaggccggctggtgcggtggaagcgaagcccaaaatggccgcagggcccgcgcgccggcaggacacccccctagacgccggaagagacgcaggactgttgg

SEQ ID NO: 321619 - DNA, 122 bp, Homo sapiens
cacaatcggcaacagaatgacgccacacaagatcattaaacatttcagcaggaataaaaacgaaaccaagagaatgcacctgccaatctatatcaggcaactatggggtttgtgagccgtcc

SEQ ID NO: 321620 - DNA, 122 bp, Homo sapiens
gaccgatgtagggcgggccctattccggggaggtgttgggcaccaacatttttaaagccccgtgggtggttccctgggatcgcccagaccgaaaggccccgaacgtccagatcgcagggaat

SEQ ID NO: 321621 - DNA, 122 bp, Homo sapiens
gaggggcgcgcctggaggcgcagagaggcgtctacgcaggtccggaagtcggcagcctgccgggaagggggcggccccgcctccggctctccggccggcaggttggctgtcctggcctgacc

SEQ ID NO: 321622 - DNA, 122 bp, Homo sapiens
ttcaggcgagcgggaacgcgtctgcataaatctagtccaatccagggccccgtagcaaggcgccaaagctgggggaagcgcatttctgttctctcgcgagcacgacgcggtgcctcccagtc

SEQ ID NO: 321623 - DNA, 122 bp, Homo sapiens
agattcaacaaattccagtgacaacatctacacaatgacctggcggcaggtccaacttcccgatgggtcccggctcggacggtccgatgggcggcatgggtggcatggagccacaccacatg

SEQ ID NO: 321624 - DNA, 122 bp, Homo sapiens
tacaaatggtactctgctgatgtggcaggactaccagttatgtacctgctatgtagtccccgtttcttcactaacagagccccagtttgattcggggcagcaatgtgtttagctaaaagact

SEQ ID NO: 321625 - DNA, 122 bp, Homo sapiens
tggtggaggtggcgctcccagcctctcccagcgagaccctctcctccccagcttccctctcgccccacaactcccacgcttgtctgacaggcctacctgggactcctggagctgtcagccgc

SEQ ID NO: 321626 - DNA, 122 bp, Homo sapiens
aaacactatttttaaattatttctatgttgtcatgcaaaaattctgcatcaaatgccttccgtttcttgtttaaaaggtgattttttaatagtctattgtctatagatgctgacattagccc

SEQ ID NO: 321627 - DNA, 122 bp, Homo sapiens
ctaggacctgccagaccctatgagggggcggcccgagggagggcggggccgcatgaggggcggggctacagctgcgctcgcaacccacaggttcatgaggtcacctccccgcgcctggaccc

SEQ ID NO: 321628 - DNA, 122 bp, Homo sapiens
ccagagaggacgccttaggggcccgcgagcaggctcgggaataaaacagggctggcagggcgaggtggagagactcgagaaggaccggccagatgtcgaagttcctagagaggagggcgccc

SEQ ID NO: 321629 - DNA, 122 bp, Homo sapiens
agcagcacagaaaacggcagtttgctccaagttcccagcacaccaaagggggcagtagtgcgtctgtaaagcgcgttgtcaacttggtgataatttctgtttgcattcacactcgccggctg

SEQ ID NO: 321630 - DNA, 122 bp, Homo sapiens
agaccaccaaaatggaggcgaaattggcctcggggcgcctcctggagaagcggtaggagtcggtggtggtgaaatggccccgcatgaagcccactcagccttggccgggctcccctgggcgc

SEQ ID NO: 321631 - DNA, 122 bp, Homo sapiens
gaagcccatgggtggaaaacaggctatgccttttgaaaactggagcccctttcccctaatcgatttttccttctttctttgctattttgtctgtttaattagcattaatccagtattctgat

SEQ ID NO: 321632 - DNA, 122 bp, Homo sapiens
cagccttcggacgcctctcggggtttactcgcttaggatccctagagggacggtgacaggcgggattctgcaccttttgggggtcccttgactgcgagaagctggtgacagctcagggccct

SEQ ID NO: 321633 - DNA, 122 bp, Homo sapiens
caccttcccctctgcttggccggcgccattcttccaaaccactctccgccaaagattccacggacagtcacctacaagacaacccagccgtcctttcagcagcggatcccgccccgcagcca

SEQ ID NO: 321634 - DNA, 122 bp, Homo sapiens
cctagggatgcaacacatttttatgaacaaacagcagtgttcacatggctgtgatgaggacgtactggggtttcccctggacatggcattcatctgatgccagtggtgggcaggaccgtgct

SEQ ID NO: 321635 - DNA, 122 bp, Homo sapiens
acaagctttggtatgtggaaaatgacttgataaaagcattcatcgaaaagcagatgaattcgcttgtagagtaaagaatgaattgaggaaggaagaggttgaagacagggaatctggattaa

SEQ ID NO: 321636 - DNA, 122 bp, Homo sapiens
attcccaggaacctcgggcatcttggaatgtggggtgtcttcaagttcagacgagcctgccgggttgtgtatgtgtgagtgtatgtgtgtctcagcgagagggagccaggcactcacaccca

SEQ ID NO: 321637 - DNA, 122 bp, Homo sapiens
caacctgcgcaccctgccttgcccattccttcctgcagaaactacagtagaggctttgcccgcattccccgttcttcctctgcctcttgatcgacgctggtgcttccccacgtggctgtgca

SEQ ID NO: 321638 - DNA, 122 bp, Homo sapiens
tgatagggggttgggggcggtagactcagagagtcacgtggccccagcccctcccccgaccgatcccgaaaaaccagccctgccagtcaacctgccctcacctaggatctggacctaggagt

SEQ ID NO: 321639 - DNA, 122 bp, Homo sapiens
tctctgggatcacggctctctttggtatctctgctataatctctcatctcccttgagtcccgcatgtctctggagtctcttagttcccttcggtccctagtatctctggcatctctccgatc

SEQ ID NO: 321640 - DNA, 122 bp, Homo sapiens
ttcaggtgagatatcatcatctctactttatagatgaagactctaagagattaaatcacacgcctaatggaaggactaatccacacagacccagaggcctcatgtgggtctccagactcaca

SEQ ID NO: 321641 - DNA, 122 bp, Homo sapiens
gtccgcttccgaaccaatcgctggtgctcactcgcagccccagtcccaagcgtactccagcgcccaagggtcgccctgactgaaagaagagaatcaggcctgtagtcatagggtgtagggat

SEQ ID NO: 321642 - DNA, 122 bp, Homo sapiens
aagtcagtaaaacgcgtgaattgcgtggagcaggcactcccagaacaagtttggaggatccgtgatggctgagctcttccgagtccctggagatgtccctccctcgcgattggtgcctgccc

SEQ ID NO: 321643 - DNA, 122 bp, Homo sapiens
ctctgtctcctcccttccctgctcatctcctcttaggcccaccttctccatcttatgctccgatccaggggttttacgttccagtcctggctttgcctctaacccactgtgcagggggacgc

SEQ ID NO: 321644 - DNA, 122 bp, Homo sapiens
tccaacggtactgatgtgacaggaggttgtcacagcagagcggaagatctggcagaaagacgctgggaaagaagacactaggggaaaacatcagaaagttcggatgatgaaaactcacctca

SEQ ID NO: 321645 - DNA, 122 bp, Homo sapiens
acgcatcggtcccaggcttgtgaccacctctttctctgttacttggggagccaggcccaccgctcaggatcacagtgaggagaaaaaagacacaaacgccaggacagggcggctggggaagg

SEQ ID NO: 321646 - DNA, 122 bp, Homo sapiens
ctgattctcaggcctcagcctccggaagtgctggaatcacaggcaggagccacggtaacccgggccccacaggggtttggggtccaagcctcaaggcagatcatatcttctgttaggaaagt

SEQ ID NO: 321647 - DNA, 122 bp, Homo sapiens
cggcagtcttccgagcaagatggcgccgcgggcatttcttccactgcccgtctgagggaacgctaagtagtgtgtccggcgccgtgttccaggtaactgggccaccgtggccggggaacgca

SEQ ID NO: 321648 - DNA, 122 bp, Homo sapiens
atgcaagttgctctctgggcctctgcctgaggccccctctctcacagtggtctcacagtgcgagtaactcacatccttctgaaaatgctgttgataattgctgctttgtagggcagtgagct

SEQ ID NO: 321649 - DNA, 122 bp, Homo sapiens
ctgtttatgtggtgaatcacatttattgatttgtatatgttaaaccaaacttgcatcccacgaatgaagcctacttgatgatgatgaattaactttttaatgtgctgctgggttttgtttgc

SEQ ID NO: 321650 - DNA, 122 bp, Homo sapiens
cccacgccttcaccctggagccatgatgctaacagtgcatggcagccatcagcagcagggcggccaggagggaaccttcagaaaacactgagcccctgtgcgcctgagccacggccttccac

SEQ ID NO: 321651 - DNA, 122 bp, Homo sapiens
agcgttgtcggcttccttcctctttatcagatctgtcagggctgctgcgcgctgcgaaggcgcctccggcctccttccctccttcctgtgtcgaacggacgctccccggcgccgctgcgaac

SEQ ID NO: 321652 - DNA, 122 bp, Homo sapiens
gacaggggatctgaggagagagagcaagcaagggagaagagtgatgaggaaaaaaggagccgagtggtcatggaggtccatgttgtggagttcagattatacattaagtgcaatgagaaacc

SEQ ID NO: 321653 - DNA, 122 bp, Homo sapiens
gggtggggcgcctccctgagaagtcacctggggctcccggcagggccggggcgccggctccgctcactcacccgcaggtggctccagcttccgggctccgactccctaggggcgctcccgga

SEQ ID NO: 321654 - DNA, 122 bp, Homo sapiens
cttactgggtctcctcgaacaagttgcatcaccaatggccgtgcctcagtttccctcctccgtagattaggaataacaatagcagtgagaacagaatccagcacacagtaaatgctgcttac

SEQ ID NO: 321655 - DNA, 122 bp, Homo sapiens
ctgttcccgtccataaacgaatgcctggtcactctggaatggactgagagacctgtcgtccggcttgcttagggagctggaggtatcgagtaaagaaacactggtgatggacatttttaatg

SEQ ID NO: 321656 - DNA, 122 bp, Homo sapiens
gtccccgccccgcgctgcctacgacttagggcccccggcccatcccctgccgctgcagggcgctcacctctgggacgcctccccgcgccgcctgcgccacggttggctcctcccggacgcaa

SEQ ID NO: 321657 - DNA, 122 bp, Homo sapiens
cccttcccccgctcccgccctcccgcctcacgacccgaccaccgcccagctgagcccccgcggctccactgcgcagaaggtgcactggaggccctgcccgttgcccgccccgcggggtgccg

SEQ ID NO: 321658 - DNA, 122 bp, Homo sapiens
ggccagggggtctcgccgccgtcccccccccgcgggggcgtgctgcagcctgcgaggggacgacggtgtccctgtgttgtgcctccccgtccccagcccgctgatccagttccacctgctgc

SEQ ID NO: 321659 - DNA, 122 bp, Homo sapiens
cacagctcctgagcatgaattaaaccatttctcagatatctgccaagctgcatgaggtcccggtatatccatgctaattctcggattaacctttaattcacccaactaagaaatttctccaa

SEQ ID NO: 321660 - DNA, 122 bp, Homo sapiens
ctcaggttatctgcctgcctcggcctcccaaagtgctgggattacaggcttgagccactgcgcccagcccacctaggccctttatgtagctcaaatggagccagagactgggggcttgagga

SEQ ID NO: 321661 - DNA, 122 bp, Homo sapiens
gggtaccgttttctgatgagcccacacagaaagaatgcatttcctctcactggaggctcacgacctgccttgtgtctgatgacccacacagaaagaatgcatttccacccactgtggaggct

SEQ ID NO: 321662 - DNA, 122 bp, Homo sapiens
atctggtaatgcctggcactctatgatttgttgcagtagtagtgtttatctaaggaactacgtatgtaggcacaggaaaatgaatactgagttctgggaacaaaggctggggagggatttcc

SEQ ID NO: 321663 - DNA, 122 bp, Homo sapiens
ctttgtccacaactcccaggggtcagagcttccttctttcgcgccaggccaaagttgctacgtgggatccgatgttgtcgccagactttcagccaaaatcagccttcaaattaacctggacc

SEQ ID NO: 321664 - DNA, 122 bp, Homo sapiens
aacgggaggctggggtggagccctggctcgggttatggccggggaggagaccacgctgggcgagtgggaggcagccccagccaggggctggaagaccaagtaccggaccttcaagggccttc

SEQ ID NO: 321665 - DNA, 122 bp, Homo sapiens
tgaatgtcgtcttgattgagctctgtggcagaggaaaccaaccgtaaaccgaaccaagagcgaagcgcaggggctcttccgtccaataagcggacccgaacggggggaggggcggggcttct

SEQ ID NO: 321666 - DNA, 122 bp, Homo sapiens
gggccaagcgaaaccaataaaataggtctgttggccgagtttcctcaacttaacggggatcggttaaattgaacacaaatcgttggatccgtcgcgtttcgcgtaaccaggctgacgctgaa

SEQ ID NO: 321667 - DNA, 122 bp, Homo sapiens
ccgagtgtttcttacggcaggcagctcgatggggaaacgtgattgggtgagtgtttcttacggcagctggaggaaggtagaaggtggcggggaaacgttattggacgaatgtttcctacggc

SEQ ID NO: 321668 - DNA, 122 bp, Homo sapiens
gcaccctgcaggatgcggcgcgtggccaggcgctcccgccccgcccccaaggggctgccccgccccgccccgccccgccgcctcctaccggggaccggagcttccccagttggggtcctagg

SEQ ID NO: 321669 - DNA, 122 bp, Homo sapiens
tgacctcgtgatccccctgcctcggcctcccaaagtgctgggattacaggcgtgagccaccgtgcccggcctacacatagattttcaatccatattagaaaggctaacaagggccatattat

SEQ ID NO: 321670 - DNA, 122 bp, Homo sapiens
gtatgtcactctcactataactttagatctgtaaagcgcaaacaaaactagcaataacaacgataagatctaaactatgcaatctgcttttataagaaaagtaaggtagtcttataatgttt

SEQ ID NO: 321671 - DNA, 122 bp, Homo sapiens
gaagatttaaactgggtccctaaatgccaaggactccatttaaatactctacctgctctgcgctaaagtttgccttgctcagttagactattagcaatggtcttaacatgagtctttaattt

SEQ ID NO: 321672 - DNA, 122 bp, Homo sapiens
ctgccctgtcaggaggaggagggagatgctgtctctctactccctcccatatgccagagccgctcatctcctgcattcaggtacctggctcagttgctcacacccaaaatatatccagacaa

SEQ ID NO: 321673 - DNA, 122 bp, Homo sapiens
ggctaacaatgctcctccgaaaatatatcgtatttttggatccctagagataggtgatcacggcagccgcggagtgcatttgggtctcctttcaagaaagaacttgctgctcagcgttgaag

SEQ ID NO: 321674 - DNA, 122 bp, Homo sapiens
atctggctggctcccaggtgcgcctggcagagccattctggacgcttaggtgaaatgtgccgccaggcactgggagcaggaggcgggcccagtggaagtcataaattactatctcatcatat

SEQ ID NO: 321675 - DNA, 122 bp, Homo sapiens
tggagtgacccactcgtggggagtggcagagagaaggcccaactagcgaggagcctgaggcggggcctgggtcctgggagccaatccttggtggcaaatttctcttgagggcaggactgagg

SEQ ID NO: 321676 - DNA, 122 bp, Homo sapiens
ctaatgtaaatttccagttaataaagatcttgatttaactggcattattgaggtgttcttcgagaggcttttggaactcaactagcaggtgcagagagtactacaaagacccgggtttccgt

SEQ ID NO: 321677 - DNA, 122 bp, Homo sapiens
ccctcaccacatgctccagcccttgccaggaaactgttcattttctctgactaacagaaacgaaagctaaaaacactggtgggaggagtctccacattgtttcctactccattttctctggg

SEQ ID NO: 321678 - DNA, 122 bp, Homo sapiens
ccagcggcatcaggtcctcgggcgggaagccccggaagctgtacttctcgtactgcgccccggcgctgcccagcagcaaccacagcagcccccacgccacccgagccatgcccgccgcgccg

SEQ ID NO: 321679 - DNA, 122 bp, Homo sapiens
cgataagtgacacaatcattccaggtcgagcccccgcttttgctgccctcagaccgatgccggggaaagttaacaattcatggggctgcctaagggtttccctgtgaggtgtcgaatggaga

SEQ ID NO: 321680 - DNA, 122 bp, Homo sapiens
aaggtaaaggttaccctaggatgtgtgctggaaggtgaaggctagacaaagagagctgagcgtataataaagtgagatgagtggaggatctgaaaccattaaaaatatttttttcttttctt

SEQ ID NO: 321681 - DNA, 122 bp, Homo sapiens
cggcccgtcttggtaggggtgggctccgcactggaggcggagctgctgctgggtggggcgcgcctccggcgcggacggaggcggcgggacgcccgctcccacgaccggcccacaatgaggcg

SEQ ID NO: 321682 - DNA, 122 bp, Homo sapiens
ggggtgaggcgcgggccgggccttggggagggaggctatggccttgagtgcgcggggagccgactctcggacatgagaggagtcagataggatccgtgagtgcctccctagtgaggaagaca

SEQ ID NO: 321683 - DNA, 122 bp, Homo sapiens
gtccctgggtcgcctgggcgctgctggcctgtagaggcgccgcttcgatgcccgggattccgcaagggtcaaccctgcgcgctcctgcctcctggtgttctggaggcagcagacacatcaag

SEQ ID NO: 321684 - DNA, 122 bp, Homo sapiens
tcttcagaaacttccctttccgggtgtttgctaaaggtgatagtttccaggtcacctgaccggtctcctttgctgtcggcgccaagtcctgcaagtttgcttgagagacgagaaaccagcaa

SEQ ID NO: 321685 - DNA, 122 bp, Homo sapiens
acacgggtgaacacggagctcgggggacacgaccatccagcgtcatgaaagccaggcgtgcgagccaactacttgtacctgcaggacaggaacagtgaggatagagcgatgggcacagacct

SEQ ID NO: 321686 - DNA, 122 bp, Homo sapiens
agagccccaggccccgggggcttctctgggtgcctctttgctgccatgtctgcacgcgggcggagagcagaccaggctaccgaccctctcgctttgctgtcttcacgtggaaaagccagtgt

SEQ ID NO: 321687 - DNA, 122 bp, Homo sapiens
ttaggacagcagcatctgtggagggttggtttaggtagagaaagcagaaataggttgtgtcgtctgctcacctggctttcccatagcccagtgggaatcaactggacatctcaagaatcctg

SEQ ID NO: 321688 - DNA, 122 bp, Homo sapiens
agaagcaggagctaacggggttcccggcagagcaggggacacacaccaaggccctggggccgccagtgcaggcggattccaggaaccgagggaggatgatgtcactgaggtccttcccgctg

SEQ ID NO: 321689 - DNA, 122 bp, Homo sapiens
ggagaagtcgtcgccggcctggcggagggtcaggtggaccacaggtggcaccgggctgagcgcaggccccgcggcggcgccgggggcagccggggtctgcagcggcgaggtcctggcgaccg

SEQ ID NO: 321690 - DNA, 122 bp, Homo sapiens
actcctgccatcccacaggtaatccaattagcaggctgtgtgggtcttatccctgatctgcgcacactcatctgatctgtgtttatcattcttctagggggtggtgttgggcgctctcattt

SEQ ID NO: 321691 - DNA, 122 bp, Homo sapiens
ctctagagcctatcacaggtgttttttttagggggagtctatttaggagtatcttgtccccgaatgaggaagcgggacctgcccaccaccactaccttcaatcgaatgtgtagacctccaag

SEQ ID NO: 321692 - DNA, 122 bp, Homo sapiens
agagcctctagctcttccccaaggtcccgtttctgcttctcagctttattcctggaagcacgctcagactccaggtcttcctggagttcagagatctgagattccagctcccggatcttctt

SEQ ID NO: 321693 - DNA, 122 bp, Homo sapiens
aagggggagagtgtctgtctggctccagccgctgcacgctcttcctgctcaggggactcacggtgaccccggagccactccccagcccagcctccaggtaagaggtcactgagatgggtggc

SEQ ID NO: 321694 - DNA, 122 bp, Homo sapiens
gtgaagcgccgggcagggtgcacaactgtcctcggagaaagttcaagaggaacttccccgcgaacaggtcctgccggcggccgggaatacgcacactttttatgttatgacttggactttcc

SEQ ID NO: 321695 - DNA, 122 bp, Homo sapiens
ggacaagattgccatggagaagcaccgcggtgtgctggagtgtcaggtgtcccgggccagcgcccaggtgcggtggttcaagggcagtcaggagctgcagcccgggcccaagtacgagctgg

SEQ ID NO: 321696 - DNA, 122 bp, Homo sapiens
gaaccccgaaccgcgtctgagcctcaggctgtccggagctgagtcggtgtgtcctgggctcggggagggaaagccgagcgcgtaacccgggacccgggttgcatcaactggcagccgcggcc

SEQ ID NO: 321697 - DNA, 122 bp, Homo sapiens
gtaaccgcggcagcggcactagctacccagccagccttaaagggccctgcgtaagtgttccggccccctggagttcccgcagagactccgcgtcatcgggcgctggggctccgctaggtctc

SEQ ID NO: 321698 - DNA, 122 bp, Homo sapiens
ggatcctcactgcctgggtgccgttgaactcaaacacctggtcgctgtcgtggccattgtcggtgggcaggcccatggtccagttgagggatccactcggggatggcagcagctcggcagtg

SEQ ID NO: 321699 - DNA, 122 bp, Homo sapiens
cctggagcacctagcaccagcacccctagtgcagggtacttcatacctcgcatcatctaacgcaggtgtcgcttcattttacagataagcggactaacgtccacaagtcatggactcctgtt

SEQ ID NO: 321700 - DNA, 122 bp, Homo sapiens
ccgcagccccgcccgccgccctgcagcagggggtcgctgccacggcccagcccctcccgccgaccgcgtccctcttgctggcctcagccagccgccgcctcctccgagccccgcacccacct

SEQ ID NO: 321701 - DNA, 122 bp, Homo sapiens
cgacgggaaacagagtcaggacacagaccagggagggccggggcagagccagggcacctgcgggcgaggacggctgggtgctgggtccccggcgtcagggcgcaatgccgcctgctgggcgt

SEQ ID NO: 321702 - DNA, 122 bp, Homo sapiens
gtgacgagatgagttaagccagcggggtaagagagaagggactgcgcctaaacgggagtacgcaaggccacctagaggatgcacagacctgcatgcatacgttcctgacccttccagcagca

SEQ ID NO: 321703 - DNA, 122 bp, Homo sapiens
tggggcgcgacccgggttctcttgccactcacaaaaccagctacgaccggcccccaaccgcgagagctttctgggctgcgatctctgcccctgaccctcgctggtgcttcacttcttttaac

SEQ ID NO: 321704 - DNA, 122 bp, Homo sapiens
gctctggggcagccggctgcctggggcgcacggggctggagtggccctctccctccccttcgctaggctcccccggcttaatctgttggccgcgactcctcagccagccccgaggaaagtgc

SEQ ID NO: 321705 - DNA, 122 bp, Homo sapiens
aagtgcctcaagtaagcacctctcacaacagttgactggtactgctgctcctgagcacctcgtgtcatagattttatactcttacagacttggaatgcagtagaggtatgtggatttttagg

SEQ ID NO: 321706 - DNA, 122 bp, Homo sapiens
acctggacattcacaacggaaacgtctacaacagaaggcgcccaggacccacctttctggcgcataaatgaagatttttggctcaaaaacctaagcatcctccagcttttgctaccatctgt

SEQ ID NO: 321707 - DNA, 122 bp, Homo sapiens
aaggtcttggggctggagaatgatggattattgcaatagtcagagatctggagtaatatacgtgctataaaacaaaaaaggttttgatgaaaacgtatttttaaatagtcatttatttggta

SEQ ID NO: 321708 - DNA, 122 bp, Homo sapiens
ggcatttggttcagggtcctactgccggagtcgtctgaggcctccatccgtctgtcgtcacgaaaaaggttttggggggactaataagcacttcctgaatgcacatttgctccacgcccctg

SEQ ID NO: 321709 - DNA, 122 bp, Homo sapiens
gacagcgacggccccgcgctccttctctacctccctccctagcagccgggacaggggtcgcggcccctttaaatggcagcgccgctcgcagcgcccagcgctctgcaccaggcgggcgggcg

SEQ ID NO: 321710 - DNA, 122 bp, Homo sapiens
gggactggtgtcccaacatctgggcaactaccgccaaggctggcttctagggaacgagtgcggaaatgcgtgcgggtgtgggagcgcaccactcagtagggtaggacctctcccagcgctag

SEQ ID NO: 321711 - DNA, 122 bp, Homo sapiens
caagggtgcccaagctggggtacacactgtgttccctctgctcagcggtcgcgggtccttcgggagttgtgagccccgcgccactctggtgggataggtcttccgagtaccacaggaagtct

SEQ ID NO: 321712 - DNA, 122 bp, Homo sapiens
gacggtatttctaaagccaaacttagttacctagaattagcgccatgttggaaacactgtcgcagcagcccgggctgcacagtgtgtagcccagcctccaggtccacggagtggtgtggacc

SEQ ID NO: 321713 - DNA, 122 bp, Homo sapiens
ttgtgcaaattattatagcattactagttttgttctctgcactattgatttctgagaaaacggtgttacggggaaaaaacaaacttccatcatgagtgcagatttttcagttttaccttata

SEQ ID NO: 321714 - DNA, 122 bp, Homo sapiens
cgtttcgaggtggttggggatgtggtgctgggttatttcccactggggacacaccagggccgccggtgcgcaggcgcggcttccgggcgtggccgcgaccggtcgttaggacccagcgagtc

SEQ ID NO: 321715 - DNA, 122 bp, Homo sapiens
tgcacagggagtttaacatgagtttcagtggagaaccaaaaaaggacgtttcattttctccgtatgcttgcagcatggctgtatttacagagacctgtgaatactgagaagatgtgaaagat

SEQ ID NO: 321716 - DNA, 122 bp, Homo sapiens
aactgcaaacccgggaggcaggccaaggctccgcagggacagggcatggagcccagtctccgggcggaaggtgggggacctctggtggagggtgagggaagcttgtgtggcctgagaccagg

SEQ ID NO: 321717 - DNA, 122 bp, Homo sapiens
tgaacacctgggctcaagtgatacacctgcctcggcctcccaaagtgctgggattacagtcgtgagcatacccaatgagaatgcatgtcattaattctgtggttagctaataagaagaaaat

SEQ ID NO: 321718 - DNA, 122 bp, Homo sapiens
aggagcgggggagaagagacggcctcgctgctcactgggtaagcggagcccagccccgctcgggagcgggcaggagagacagggtagtgacccccactcacaccagaaaacccctccccccg

SEQ ID NO: 321719 - DNA, 122 bp, Homo sapiens
gtcccattggtggatctacataagagactcacgaagacgttcacactgcagtgttaactgcgttagccatcccaggggtgcttgcagtttaagtcttccaactcaaggaatagttttctcat

SEQ ID NO: 321720 - DNA, 122 bp, Homo sapiens
tctgggggaatgaatccctgggggcttggtgggacaggaaggcgggaagaagctgctcttcgagtgaccctggggctgtctgttagcaggtccctcagccgttggaacgtccttgggcttct

SEQ ID NO: 321721 - DNA, 122 bp, Homo sapiens
gaagatacgcaggacgtcctctaaagcaacttccgtgggtgccaggttgtgggctgggggcggtgctgaccttgagagagcggaggaggcgcaggcgcagcacaggtacgtgggcgggcgga

SEQ ID NO: 321722 - DNA, 122 bp, Homo sapiens
gtgcgtgctgtctgtcctatggagcctctgcagactcgttctcgtgacccagtggcataccgtttggtgtctgatgtgtgcccagatcgttctgccacttgcactgtgcttgctcctaagca

SEQ ID NO: 321723 - DNA, 122 bp, Homo sapiens
ctctcagcatacctcccatttcgcccaagttatacagtaaacttgctgtttgaaagaaagcgctggacttgtttaatttatattaaagaatgggtgaccatttattgcttttatatggtatc

SEQ ID NO: 321724 - DNA, 122 bp, Homo sapiens
agggagttcaccaccaaccactgagccgttctgtgcgccagaccccggctgagcactcggcgcaagtaatcgattttcactcatggggttcctgtggagcgggatggcagcgaggctgcggg

SEQ ID NO: 321725 - DNA, 122 bp, Homo sapiens
gcagaagggagcaagccttgatgccttcactcacttctttaattaactgtgagatgctgacgagtctgggctgtctcgaggctttctaagtttgtctgcatcagaactgtgaatttttcttg

SEQ ID NO: 321726 - DNA, 122 bp, Homo sapiens
tgagtctcagtggaaccttgtgatgatcccatggagcgaggcttacgagcagcgagtgagcgactggagcccagcctgcacctggaggggcggttctggcccagtgctcccggaaagggtgg

SEQ ID NO: 321727 - DNA, 122 bp, Homo sapiens
cacctccgcccgttgtagggcagctggggcaggctgggcctggaccgggtccccctgggccgtccggaacgttctgtctgtccccgcgcgcctgttggagggcttcggcgcagagttgcccc

SEQ ID NO: 321728 - DNA, 122 bp, Homo sapiens
acccatgagccaattgcagaggcaacagaagaccagtgcaccaaccaggctgggtccctccgccagagggtgtcaccatctaagctgaaagtgtttggggagatcagacattgctgtctggt

SEQ ID NO: 321729 - DNA, 122 bp, Homo sapiens
agcggtgagggtgaggggtgggagctaggagcccgggccagagcgaggagcccaggctgtcgggtcagtggccgcagaaggggcgagcagacgtcccccaggcgggctcacggagcccgggc

SEQ ID NO: 321730 - DNA, 122 bp, Homo sapiens
atgttttaaacgtggatatgcctaactttgtgagttaaatcactcaaattttccaccaagcgcgacggacggggaattgccagcgacggaaagcagctgaggctccatttggctccgctgct

SEQ ID NO: 321731 - DNA, 122 bp, Homo sapiens
cattttagtctttgcaatgctccatattaaccctctcactccgcgcagtgctccgggactcgctgggaagctctgtgatgggttcagataaagtactagaaaccaaacaattagggatctaa

SEQ ID NO: 321732 - DNA, 122 bp, Homo sapiens
attttttatttccgcatggaaagttattgatctctatggctgtaaaatatttctttatagcgttattaaagtgtgtcttaataaaattaaatttgggatacaaagtatttattttacaatgg

SEQ ID NO: 321733 - DNA, 122 bp, Homo sapiens
attccctgtttaagggctcatcccagaggttaagtatcttgccttgtcctgggtttaaaacgcaaccaggaagctacctaggtctgtgtgattctcagaccaccctgacttctttacagttt

SEQ ID NO: 321734 - DNA, 122 bp, Homo sapiens
aagacctcccggaaaaggccagtataagacccctggagctgctctgaggcggagctgaagcgttcctggcgactctgcagctgtgtgcagttttcactttaccttaaaagcctctcctccgc

SEQ ID NO: 321735 - DNA, 122 bp, Homo sapiens
gctgcgctgcgttcggcccgagctgtttgtaaattacattagctgctcctttattgcacccgaacctcgggcgactgaaaagccaccgcccccaccccaaactgcgagccgcgctcctggcg

SEQ ID NO: 321736 - DNA, 122 bp, Homo sapiens
cgtgcccgtgagcaagtgtaacagctacacaggctagagcttaacgagcagttattagcacgaagccaggaggcttgaaggaagttagtttttaaaagaaactattatttttaacacttatg

SEQ ID NO: 321737 - DNA, 122 bp, Homo sapiens
ctggaggtggagagtggcagcaggagtctattgggagatcgcttcgctcggtctgctcaccgaccctagtctgattttccaccccaaagagttgtgagaatgtggggtggtcacagatgatt

SEQ ID NO: 321738 - DNA, 122 bp, Homo sapiens
gataaaaggtggaattgccaaggtcaatccagacgagaaccttctcatagaggtaaccaccgtgtgggtttggatgctgggaagcagggggactatgacgctacaaggtctcagtcttaatt

SEQ ID NO: 321739 - DNA, 122 bp, Homo sapiens
caaactgctgtttactggcctggtcaccccctaagaaggcaagctccttaagtgcatcttcgttcagtcaacaagattctttcaacaaatacttgtgccagacactgtgcttgcttggctcc

SEQ ID NO: 321740 - DNA, 122 bp, Homo sapiens
cgactaatttctttttccggagaatctggactgaggctagcaagcgaggaggggcaaactcgtgggggtttggtagtgattgcagttcagttttggtcttggtttgctccaacccgccaacc

SEQ ID NO: 321741 - DNA, 122 bp, Homo sapiens
caagcagagattctaagcccccatgtcgcagtgtggtgccggggcctcccctgaagccagcgcccagaagaacagacatctctgagctacccaggataccaaagatcaggagagatgacggt

SEQ ID NO: 321742 - DNA, 122 bp, Homo sapiens
gtttccctgcaaataaggaaaccctgaggcagagaggatatttgctggagaccacacagccggccagtgctgcagccaggacaggagccaggtggttttcagccacaacccgggctcggccc

SEQ ID NO: 321743 - DNA, 122 bp, Homo sapiens
tcttttccacctctaagtccagccaagccagcctggttctaagcaagtcatagaaaatcgcgagcataaaggaagaggtttcaggttcttgcagctggctttggggctcaatttctgccacc

SEQ ID NO: 321744 - DNA, 122 bp, Homo sapiens
aatttaaatatctttagaatagacaccaaggaggaataatttattatgaattggtagtgtcgtatgttgttactcctgtgccatgccagtaatgaaaacttaatattcatctcttggttgct

SEQ ID NO: 321745 - DNA, 122 bp, Homo sapiens
ggcaccaaagaagtcctttctatggctggcaggacttgacctggaaaataaggaaatctgcgtttctccaggggcgtgagtctcaggcagtgtctgtgtgggcatcatcgactgctatgctc

SEQ ID NO: 321746 - DNA, 122 bp, Homo sapiens
ttggcagagaacaaacagcagttcgtaaacctcaaagagatgttttctaactcaactggccggcttcctggccaaccgacagaagaaatacagtaagatctataggctcaccgtcatgaaag

SEQ ID NO: 321747 - DNA, 122 bp, Homo sapiens
tcccgcaaattctggaaggttcttagtctcgactagggcagtagccccaggactcctagtcgccggcttcaggtcactgccggctgaacggagctgccgtcgccatgtttggctgcttggtg

SEQ ID NO: 321748 - DNA, 122 bp, Homo sapiens
ctgcagagcggtgctcccagggctggggtctgcggcgaccccgctgggaggaagggagagcgagaactgagacgcttgccccaagttgcctggagccaaaggcccccgagagcgtggccgtg

SEQ ID NO: 321749 - DNA, 122 bp, Homo sapiens
gcgcagccctgtggctttgggggccggcacttgcagcctttgggggcttatctcagagtgcgccgtggttttattctaggattcatcctggcttctttgcgggaagtttaatttttcgtttt

SEQ ID NO: 321750 - DNA, 122 bp, Homo sapiens
tgaaattaaacatttctattagtggcttcccgttaatctcatccttcttagatcaaacctcgttatatctcctgcctatctcttttgcattccaaagttcagttttattaaatcccagggtc

SEQ ID NO: 321751 - DNA, 122 bp, Homo sapiens
accccacgaaggcaagggcctggtctccaatgctcactgtagcattggagggggtgtcgccggtacccaccctgatgcctatcaatgggatgggacacctgtgccccagcagctgtggtatt

SEQ ID NO: 321752 - DNA, 122 bp, Homo sapiens
gcttgagttgaatgacttttccaccctctttccttggcaggaacaagtgaccctgtcttccgtggcctcgtggggctggctctgctcctcctcccttgactgagagacgtcatggagattgg

SEQ ID NO: 321753 - DNA, 122 bp, Homo sapiens
cagggcctcagcgtcatcggggacgggcgccgaggggagcgcgcaccagcgacccgggcgcggactggggcctgcagggcgtgactggctgccccccaggactccatctccttcataaacac

SEQ ID NO: 321754 - DNA, 122 bp, Homo sapiens
atggtattaatcttgtgtagtcttcaactggttagtgtgaaatagttctgccacctctgacgcaccactgccaatgctgtacgtactgcatttgccccttgagccaggtggatgtttaccgt

SEQ ID NO: 321755 - DNA, 122 bp, Homo sapiens
cctggggctcgggctggcgctgggcgcggggggcggtggcggcagcggtagtggcagcggcggtggctccagccccgcgttcccgggcaccttctgcctgcctagccccgcgccctccctgc

SEQ ID NO: 321756 - DNA, 122 bp, Homo sapiens
gcgggagacgcggtgcggctgggccagtcaccgccccgcaggcggtgcgccgggagggcgcggacggagctccgcctacggcccgcccactcctgccctcgctccgcccatggaagtctccc

SEQ ID NO: 321757 - DNA, 122 bp, Homo sapiens
tccaaggctccaggttgtccctggtctgaagacaaagctgaggggccccaggatgggaaacgggaaggaggcagcacaggcacagcctcgggaatgtaagctggccaagcacaaagcaaagg

SEQ ID NO: 321758 - DNA, 122 bp, Homo sapiens
ttggtggtggcagagccacagcccagccaggcctccctgctgggacacgctcgtttatgccgaggccgtcagcacagagcctccacagtgaggcacggctctgcctgctgcctccacgcagc

SEQ ID NO: 321759 - DNA, 122 bp, Homo sapiens
ccaaagcttcaactgagcatcttaatgaaataattgtttacctgattagtattcagcatccgcagaaggaggctaaaacccacccctttcaacctttcctctctcagtctcactctctcttt

SEQ ID NO: 321760 - DNA, 122 bp, Homo sapiens
tcccccacccccaaaagcacgcaaacaggaaagacttcagccaatggcaggccgcctatgcggggcggggccctggcgctagccaatggtaggcagtgtagggtgaggggcggggcggtgcc

SEQ ID NO: 321761 - DNA, 122 bp, Homo sapiens
ccaagcaagagtctaaaatcaggcagctaaggtgaggccgtggagacgaaggcggcatcacgcctgatgggccatttctcctcatgtcggttcttgagcaggcagcttcactcgaccagcct

SEQ ID NO: 321762 - DNA, 122 bp, Homo sapiens
gatatctattttgtcactttatttcacatctttctaagtataaaacaacaccagtgcttccgttattccccacataattagataatgcataggatagtaaggagaaaaaaacattatctggt

SEQ ID NO: 321763 - DNA, 122 bp, Homo sapiens
ggaacgcgcgctcaccgtgcgcgctcgcggccgggtggtagtggcggaggagaaaggggtcggcgcacgcgcggttgagtcctcgagtagttcgggtctcgcgggcctcttgttttggtctc

SEQ ID NO: 321764 - DNA, 122 bp, Homo sapiens
agcggaaagggatgccacacataagcttaggcagatccaaaactaaaaccgcggggaactcgacctggccggaatgagagtaagcgtgaggctggcggtgctggcagcagggtgggcacgta

SEQ ID NO: 321765 - DNA, 122 bp, Homo sapiens
ctcagagaggaaggggtgcccggctggtgaaagcacagccacggaggaaaagctgaggagcggccacgtgccttgctcttcaagcgggcagtagaaacaccacgtgaagaaacacttgccat

SEQ ID NO: 321766 - DNA, 122 bp, Homo sapiens
tgcttcctccgtctccttctcctcctcatcctcccagccgacaccgcttccaaagtcccccgagaagcccacgatgtcatctgtgaggggatcaagccaacagggggtgagggagcttctgg

SEQ ID NO: 321767 - DNA, 122 bp, Homo sapiens
tggggctcgaaagaatctgatgaaggaatgctcgagcgtgtgaaacggagggctgatggacgaaggactcccgaggacgaaaaagtttttaagctctgcaggtaagcagggcacttggagaa

SEQ ID NO: 321768 - DNA, 122 bp, Homo sapiens
gttccgccctgctctctgacacaattaagggataaaatctctgaaggagtgacgggaagacgatccctcgaatactgatgagtggttccctttgacaccggcagcagccttgggcccgtgac

SEQ ID NO: 321769 - DNA, 122 bp, Homo sapiens
actctctggataaataacatttctcctcagcagtagtcttctaagatatttgctcatcgacgtgaaagatttttataaaacaatcctaacacatttcgctgacaaaatttttcatcatgatg

SEQ ID NO: 321770 - DNA, 122 bp, Homo sapiens
cagtggcatgcactgtccagagaagagcaagcgaaatactacgagctggcccggaaggagcgacagcttcatatgcaactgtaccccggctggtccgcgcgggataactatgtaggtggatc

SEQ ID NO: 321771 - DNA, 122 bp, Homo sapiens
tgagtcagcgccggagggtgaagcaggtggcagtagccagggtctagtgattgggaagcccgctgtgtttggggagtaattcccccggttccattgccggctggtgctgcggccttgagctc

SEQ ID NO: 321772 - DNA, 122 bp, Homo sapiens
acgtggttgtcgcctataacaatccggccctgctcccatccactggctaaagcctgagagcgacagttgaatacaccaatgggaccctggaagagtctaagcgacagccaaaatcaccattc

SEQ ID NO: 321773 - DNA, 122 bp, Homo sapiens
tgactgacgtttcattccacagaggattgaaaccgaggcggggtgacgtattcccgcacccgtcttctgacaaaggacgtgggcatgcgagctctcggaggctcggtggcttacctttaaac

SEQ ID NO: 321774 - DNA, 122 bp, Homo sapiens
caggactccatgggcgcgcacaggacgtgctctcgtccctgccagggaagtggctcctggcggtctgggctcctgttgctaggaaaccgctcccttcgattgtgtatgtcgagcatgcctgt

SEQ ID NO: 321775 - DNA, 122 bp, Homo sapiens
agcagacaagaaggaactgttattacacagcctttgaccctctagggactccagcaacctcgtactgaaaggagactccttgtctccttctctggggacccttttgttcagaaataaaactt

SEQ ID NO: 321776 - DNA, 122 bp, Homo sapiens
cagagcccaggcgggtgccagccacgctgggagggcagaggacagacagccccggggctgcgacttggttctgtgtctactgttagaagttgagtgggaagctgcaggcccgccaggaccac

SEQ ID NO: 321777 - DNA, 122 bp, Homo sapiens
gaagagagaaggctctaggtgagtggtttcaaagtgtatatcccacagaagggtacggctcgtgttgcccaagattttgtgactctgagagtgcctcactgcactgcactctccatcgcagg

SEQ ID NO: 321778 - DNA, 122 bp, Homo sapiens
ctcttttgcttgctgggagatgtagtccctgggttggccactttagttcatcgttgctaccgccggcgtccagaagactacagttcccagcaggcccagggaaagacaggataccctgggtc

SEQ ID NO: 321779 - DNA, 122 bp, Homo sapiens
gaaccccattgatgccacggagagaactgatcctgggacctagagcctggagtccccctgcgattaactgtggatgcaggaggaaggcatctaggtgagctcccttctccctattctttttc

SEQ ID NO: 321780 - DNA, 122 bp, Homo sapiens
acttcccagcccgctctccgggtccctctgcgcggcggcactgcgcagctcttctgctgccggggctccaacacctctggagctccaggccctgactttcccgcagtctgtccacccgagct

SEQ ID NO: 321781 - DNA, 122 bp, Homo sapiens
tacaaaattactccctcccatttgctcccagaattagacaaagcctgtcacatcaaccaacgccttatgtgagtaatttggggaaaaaaataaggaaaggggttccttgtctggatcactaa

SEQ ID NO: 321782 - DNA, 122 bp, Homo sapiens
gagtggaagcggctttccctaaggcatgacccccagggtgccatgtcagtttaccattgccgtggcaacaccctggcatactgccctgttccgtggcaaagaccccaggacccagaagttac

SEQ ID NO: 321783 - DNA, 122 bp, Homo sapiens
cccatgttccagtccctccacccacccaccgggctcagctccagggcacagtcacttgtccgttgcaggttgggcactagaaaaggcccccactggctgcctgggagccccacaccaccggg

SEQ ID NO: 321784 - DNA, 122 bp, Homo sapiens
tctccgcccccttccccttgacgtcaggctgggggggtcgagcggaggccgggggcgggccgcgaaggctcgctcaggagggggctgcgacccgcagcgacctgtggacccgcccgctctcc

SEQ ID NO: 321785 - DNA, 122 bp, Homo sapiens
ttaccacccacacttttagaaacttcatgttcagttttcatactcctaactggggctcaacgacaacagaatagaaaatgtaggagaagctagaaatgtaacttcagcaggggatattagaa

SEQ ID NO: 321786 - DNA, 122 bp, Homo sapiens
tgattgaaatatcagttaaaggttgccagcatggttgcagataaactgatgtttgaaattcgctgaaatacttaatgtggaataggataatatacttccaatgccctcaaggctgtgacctt

SEQ ID NO: 321787 - DNA, 122 bp, Homo sapiens
cttccctgatacccaccgggcacgcgagttcacgccagcgacagtggaaagccctcccctcgcagcgcgctccgccactagccgcaccccgccgagctctgacctccgaagagggtccctgt

SEQ ID NO: 321788 - DNA, 122 bp, Homo sapiens
gacgttgggtggcgttccctgcagagagtaggatggtttttgggggaggacgttgggtgacgttgcgctgagtgttttgggtttgcagttggtactgatcatcgcgtcctgtcctcattttg

SEQ ID NO: 321789 - DNA, 122 bp, Homo sapiens
tctcagacagcaagtgagagagccggataagtaccattgctgcttgattgctgtccaagtcgtgactgccaccaagtagctccaggagctcctctggccttgtggccttcttgatgaggtgg

SEQ ID NO: 321790 - DNA, 122 bp, Homo sapiens
tgaaaggaccctgcgttgatcactaccatatatcatcagcaactggggcaaactatgatgcgtgtgtggagaggggatagggagagtgggagagatctcatcatcctaaagccttatttggt

SEQ ID NO: 321791 - DNA, 122 bp, Homo sapiens
tgcggagaaactgacgtaatgaaagaaaaagactttgagacagggccaggaaaacgctgccgcctacaagcaacacacctaaacggagtgacccagaagggtttagtggcacgtccaggttc

SEQ ID NO: 321792 - DNA, 122 bp, Homo sapiens
gccctgacgtcagcgaggctccggccccgccgcggcaagataggcgagcgcggccgggcgcgggtgcggcactaatcactcccagatgtccctaatagcggagataaagacggacagagcgg

SEQ ID NO: 321793 - DNA, 122 bp, Homo sapiens
taaccccatgtctgcccacgctctctcctgcatggacacaggcctccactggatctcggacgctaaccccacgtctgcccacgcctcaggcacctcttgaactccggggcttcctctgctca

SEQ ID NO: 321794 - DNA, 122 bp, Homo sapiens
tcctgctctttctctccaatggtgtctctgtctctttgagcagtgatggtcgccccattgcgtatagaggaaatggaggaaaacttggaagtaccgccttccatacaaagtcaaggatcgag

SEQ ID NO: 321795 - DNA, 122 bp, Homo sapiens
gccctcggacccctgaccgcatgggaatctgggaaacgtagtttttagctttccagccttcgcactaccggagagttcactagaaggcagacgtaataaaggttgagtgtcaatctactgtg

SEQ ID NO: 321796 - DNA, 122 bp, Homo sapiens
ggggagcaggtttccagcacatgacctttgggcgacagattcagaccatactgtattatccgccctccatatctgctgagtattgattctaggactccctgtggataccaaaatttgcagat

SEQ ID NO: 321797 - DNA, 122 bp, Homo sapiens
agctgggccccgcagagactctcagggccccaggcagatgctcgtgacagtacagggcttcgtgggaactgcaagagctcacggcgtcttaggcctcggctgggcaaggcccccttcctacc

SEQ ID NO: 321798 - DNA, 122 bp, Homo sapiens
ccacttggcgagtgagacgctgatgggaggatggacgtactggtgtctgagtgctccgcgcggctgctgcagcaggtttggacgcaggagaccggcgggaaggcctgaaagagatggagcag

SEQ ID NO: 321799 - DNA, 122 bp, Homo sapiens
aggccccgccggctgggtcccaccgcccccacgcacctgcgttttggtgactcgatgccgcgccagcttcaccaccgcgaagttgcctttgcccagggtccgctcgatgtcgtaaaaaccca

SEQ ID NO: 321800 - DNA, 122 bp, Homo sapiens
gggttttccaaagtcctgcccgccccagagtattcaagtacacatccaggtagaagtaggcgccctccgtcccacaatccttcaggtcctgctgaagcagaaaggagtgaagaccagcattc

SEQ ID NO: 321801 - DNA, 122 bp, Homo sapiens
acaactcttagaaactctccccacccaacatacctggagtgcaggcgaggtccaggcaaacgggaaagcgacttcttgtacgaatagccatctcaagatgaagccaggctgtggaaaactta

SEQ ID NO: 321802 - DNA, 122 bp, Homo sapiens
ttgttatttttctattctggggctcaacttcctttttgacctcagtctgaacaggggaggcgaataactttgaagtgcttcatgcttcagtttgacgagaaatgactgactaaaatattgtg

SEQ ID NO: 321803 - DNA, 122 bp, Homo sapiens
cctggctcctgacgcccgtgctgccggtgaaacgctgttgacatgtcctgaattattaagcgtggggagggctccggagcacatgctgagcggagcggctggggctgcgcggcgtggcggag

SEQ ID NO: 321804 - DNA, 122 bp, Homo sapiens
caatttcccccttttgctgaatgacagcctggactccatattccctatttaggactccagcgctcctaaaggcagactctcagggcttggaaggtagaagcatgctacaagaaggcaatgtc

SEQ ID NO: 321805 - DNA, 122 bp, Homo sapiens
tggccgtacctatggttcccatggtgtcactgcttcgttgtcctggtccttcttcacatccgtgtccctgctttcctgtctccatgtctccatctctccatgccccacctttgcccctcact

SEQ ID NO: 321806 - DNA, 122 bp, Homo sapiens
attatgccgaggttcagcgcaaaactgactcatgcagtaccgggatcgctgccagagcgacggagcgcgcgagcagcgcggcatcaacaggcagaaggtgccacggggcggacgggacccac

SEQ ID NO: 321807 - DNA, 122 bp, Homo sapiens
tgcgagccccccttaaaaatagcatctgaagtttcattgtagctgagtcactgcttggtgcgatctagggctaggctgcaactggacctgtcagaatgaggccacagtgattcatgatgaag

SEQ ID NO: 321808 - DNA, 122 bp, Homo sapiens
ccagggactcagacttcctccttccagaaataaccatcataaaaaagccgacccagtaaacgcctggcagcctgcggcatagaagaaaatggaaatctccttggctggcatttcagcttgcc

SEQ ID NO: 321809 - DNA, 122 bp, Homo sapiens
caaaaccaggaagtgagcactgaggcagtcctaagccacaccctgttcaaacttcaccaacggacctgagtctccgatcacaggcctgtccctccccgtccaggaacattgagctgtctcct

SEQ ID NO: 321810 - DNA, 122 bp, Homo sapiens
agttcctgcctctggctttgggcaaggtctgcctccagagtccccagctgcaagggccggcgcacccacgcgcactggttgccaaatctcccgctttcaggccaggtgcggagcgcgcctcg

SEQ ID NO: 321811 - DNA, 122 bp, Homo sapiens
acgcgggagagcggcaggatgtgcttcccgaaggcccgaagcctgcaggctgcactaggacggcccctcctgccggacccctcgccccagccctgcagctccagccctgcagggcctctctc

SEQ ID NO: 321812 - DNA, 122 bp, Homo sapiens
gacaagtcaggattgtgcctccagtcagaaggaccatgaagagagagaagagggcagagccgtgcatggggctgctccccaggacctgagcaggaacctggagttttcaggtgagaggctca

SEQ ID NO: 321813 - DNA, 122 bp, Homo sapiens
ggcatcagaggggagagctgggtggccctgcgggctcccgaggacctggctctgcagccacgtgaggcttgggggtggcacagtcaccgcagttgcccaaatccatggcttaaaatgatggt

SEQ ID NO: 321814 - DNA, 122 bp, Homo sapiens
gaggtaggaggtagcgggtagtttgacctaattactttgtttccaccggacgcctgtaatcgtagcactttgggaggccgaggcgggcagatcacctaaggtcaggagttcgccaccagcct

SEQ ID NO: 321815 - DNA, 122 bp, Homo sapiens
tcaggacccctgcatcctgcctgagtgtgcagcagctccccccgacaggagcgtcagggccggtctcctccgagtctcctggcagaggcgttgctgtcgcagctggcactgtgcatggctgg

SEQ ID NO: 321816 - DNA, 122 bp, Homo sapiens
aaggagatttgggactgagcagagtgtgctaaggagacctgagatgatgcctgtgggcgccgagtggccgagtgactctcgtctcctgactctgctccctgcgacccgagccacctgcagct

SEQ ID NO: 321817 - DNA, 122 bp, Homo sapiens
tctttttgtctttgaaataattcttagcctcagaagtcagcattttcaagacctggcatccgcagcgtttctgacgcggggacttctctcttcggctctgaggtctccgcgcgcagaaccca

SEQ ID NO: 321818 - DNA, 122 bp, Homo sapiens
agcatccatttccaagtaatttgaagcgagataattctagttagtgaagaatttcaataacggctttcctagaaactcaagactgattcaaacagcaaatactgagatgcggttccatccca

SEQ ID NO: 321819 - DNA, 122 bp, Homo sapiens
ttcctataccacagactgcagtgataaccaaggactaacttttgaacacatgtacatagtcgcaggcctcatagtctggcagtttaggcgagttcagagagggcaccactgaataagcgtgg

SEQ ID NO: 321820 - DNA, 122 bp, Homo sapiens
aaatcaatcgggcgagggggctgcgctctcgctgtcatccgtccgcaccgcactccatatcgaggatggattgttttatgctgatgcaatgtgctatcacgtcagggctccggcggccacgt

SEQ ID NO: 321821 - DNA, 122 bp, Homo sapiens
taagcgaggaagggtctacaggcagtgagtgaaggccaggagcagggcccaggccaggcacgaccaccgaggggatgaacttcacagtgggtttcaagccgctgctaggggatgcacacagc

SEQ ID NO: 321822 - DNA, 122 bp, Homo sapiens
gcgccccgccgtgcctaggtggagaggcggcagggcttcccggagagccgtcctcccatccgcgacccgccgtcctcccatccacatgccgccatcctcccatccacgcaccacgtcctccc

SEQ ID NO: 321823 - DNA, 122 bp, Homo sapiens
ggcactgccgcccggaacgccaggcaggggttagtcccgctcgcaggtaacgcccgctgccggtgcctcctccatgttggacagcgccaggcaacctttgcagaagacacctcccggacgcc

SEQ ID NO: 321824 - DNA, 122 bp, Homo sapiens
ccccgtgggcttcctcctcctcatcagcaccgtggccgggggaaagtacggcgtggcccacgtggtgtcggagaattggagcaaggactactgtatcctgttcagctccgactacatcaccc

SEQ ID NO: 321825 - DNA, 122 bp, Homo sapiens
caccgcacctaggtgtgtagccgcagccccggcggccgccatgctagcttccggctgctccggccaccgtgggggcagagcttcgtgagcctcacccaatcggaatctctgcaacgaggggg

SEQ ID NO: 321826 - DNA, 122 bp, Homo sapiens
gagggagcggggcgcccagcccgcccggagccgcatacggagcccaccccacagccctcccggcggctcccactcacccaagggcgtgactctgatctcaggcatcgtctccgccgcgctcc

SEQ ID NO: 321827 - DNA, 122 bp, Homo sapiens
aaaatatcccagtcccaagctacaaaaatggtcacaggtggtttgatctagcacctcggccgttagagtttgtgctgaagacaaatttgtctgggttcattgtgcaccagaattagcatgtg

SEQ ID NO: 321828 - DNA, 122 bp, Homo sapiens
gggaataaatcagaggctgacgatggtcactggagaagaacagcaacaaggcatcagtgacgattgccacctgtcagtcgcctcctcagaaccacatcctgagctgagctgtgactaacttg

SEQ ID NO: 321829 - DNA, 122 bp, Homo sapiens
caccttgcactcagtcccgagctgccaaagcctccgccgccaccacctccgctctacttccggccctggctccgcccccacacgcctacccgccatcgcaatgcattatgggccgccgtttc

SEQ ID NO: 321830 - DNA, 122 bp, Homo sapiens
attcactttttttgtggatcactgtgcatcttacttcattgagaaaataagaccattggtcgcgtgtctcttaacttctgcgccccctacccaccacactacctgtagacatatccacatca

SEQ ID NO: 321831 - DNA, 122 bp, Homo sapiens
aagcaacgttcatcaatcatttataataagcaccgaagaactgcgctcgcctgcctgagacgcagccccctggtgaagagcggtccccgaccagggctgtgttgccggaccggcacccactc

SEQ ID NO: 321832 - DNA, 122 bp, Homo sapiens
tcccctccattctcctgggcgtcgcgcttccctctttgtttcccgcccttgcggttctgtcggaacctaacgagcttccttccaccgcaaaagagctggagaacaatgctaggcaacgtgct

SEQ ID NO: 321833 - DNA, 122 bp, Homo sapiens
tctggagaaccccccaccgcagatgtcttggacctcatccccagttcacttttggccatgcgtttatcagtcgaacacttcctaggaatctctctgtaggctgggagtcagagccccacttc

SEQ ID NO: 321834 - DNA, 122 bp, Homo sapiens
actgccggtcaccgggtcctcctcgcagtagttgggcgacttctcgatgtacaccaggtccgtgtccatgggcttgcggtacgacagtggcttcttgatcttcaggaaggtgggccgcttgt

SEQ ID NO: 321835 - DNA, 122 bp, Homo sapiens
tggtcatggctgttccccgggaggctcagttaggcagcagccttgctgggcaacaggccccgcccttggttaatccgggaaggtcgcgggctgcaatctggcctgacgaggcaggccctgaa

SEQ ID NO: 321836 - DNA, 122 bp, Homo sapiens
cttcgagacaaggcggcaaaaccggtgctgggcttgcggggcagggaatcaaggttcctccggttgctgtaccgtcccgcccggcccctctcccgggcaccggagagatgacggctctctcg

SEQ ID NO: 321837 - DNA, 122 bp, Homo sapiens
ggctcttcgcgagccctctcctgtctgcacagccaatggcgagccagggagccagcagagcgactcgccaaacagccaactggggaggcccacagggaggtcagccaccgggataggcccgc

SEQ ID NO: 321838 - DNA, 122 bp, Homo sapiens
ggggtgtgagggggagggcctgctggctcaccgtgaggcagccgcgggagggagcgctgacgtcacagaagcgaaggcttgatgctgtctcagcagcctcagctgtgggggggaagcgcgtg

SEQ ID NO: 321839 - DNA, 122 bp, Homo sapiens
accgtgggaagagggagagggagaccgtggggagagggagagggaaagcgagagcgagaacgagagcgagagcgacagcgactatggtcattttctaacagtcctttcatggagtctcccaa

SEQ ID NO: 321840 - DNA, 122 bp, Homo sapiens
gtgactatggaggtcgcgtcccatgtggctgtggaggtcgctgtgtggctatggaggtcgcgtcccgtgtggctgtagaggtcgctgtgtgactatggaggtctcgtctgtgtggctgtgga

SEQ ID NO: 321841 - DNA, 122 bp, Homo sapiens
tcctcatattgtacaggagacaatgaaggcataagggattaagaaatttgccctctgtcacggctgagaatgagcagatccaggattgactgtggaggcattggacttcaccactatactat

SEQ ID NO: 321842 - DNA, 122 bp, Homo sapiens
caaaaccacagtcatggggccacgtggtgttggctttcagaccgatgagcagaacgagagcgtccagaaacaggcgcccgcacgcggaccactgacttgatgaaggctcaaagaccatttaa

SEQ ID NO: 321843 - DNA, 122 bp, Homo sapiens
ctcggccccgcacacgtgtccactgtgaggcgtcggtcacggccccctcggccccgcacacgtatccactgtgaggcgtcggtcactgtcccctcggccccgcacacgtatccactgtgacg

SEQ ID NO: 321844 - DNA, 122 bp, Homo sapiens
gctttcaatagactccagagttctaaaatagtgacattagacagattctgccagtgcaatcgctgtctaggaggggagacagattcctggtgcttcctgttttgccagcttcccggaatctt

SEQ ID NO: 321845 - DNA, 122 bp, Homo sapiens
tcaggaactgctgcttgctggggcgtcgaaagccaagcgcgctcaggtcttcaaagccaccgtttgtgcttgggctgcggattctggctagtgagatgctgagctgtgaacaaagtcagagt

SEQ ID NO: 321846 - DNA, 122 bp, Homo sapiens
ggaacattccaggaaacattccaggatgctcccccagggtccagcttggctttaggggctcgcccatttttgcctagaatgctctctcaccagatttttgcatggcacaccctctcttcttc

SEQ ID NO: 321847 - DNA, 122 bp, Homo sapiens
cctggggggtggggcccggggacctggggggtggggcccggggacatggggggtggggcccgaggcccaggcagaggccaaacattgcccagggcccggctttagtctgcaacaaccctcat

SEQ ID NO: 321848 - DNA, 122 bp, Homo sapiens
gacgagcagcttaattctagtgatgttccgccccacctggaggacggagccattctcctccgtgtacgcaaagtcaaacgggtacacggtctccggccccacgtgcttcttcccgatgatgc

SEQ ID NO: 321849 - DNA, 122 bp, Homo sapiens
caccaacactcaccgggtgacccctttgctttggaaacttactcagggtgaaaggaattccgattttaaacagcatctctttgtgtggcctgtttgaggcaccacacagagcttgctggagc

SEQ ID NO: 321850 - DNA, 122 bp, Homo sapiens
cccgcctcccgccctccgccccgagccccaccccccgaaggccgcgccccaccgcacctccgcgcacggccaatggcgtgagcccctgacagagtcccgccccctccaaacgcacagccaat

SEQ ID NO: 321851 - DNA, 122 bp, Homo sapiens
gcagcacagccctccctcccgccccaagcacacaccgagcggccacggcacagccctccccgccccaagcacacaccgagtggccgcagcacagccctcccgccacaagggtacaccaagcg

SEQ ID NO: 321852 - DNA, 122 bp, Homo sapiens
gatccactccacagaagttctgatttcttctctgtgcaatggttctgccggcctttctgccgcccagaggtcctggtgagtgggcatcagagactccttagggctctgtggaggctcaggga

SEQ ID NO: 321853 - DNA, 122 bp, Homo sapiens
ctcggcaaggctggacactggcttgctctgtttgctcacacaggtcgatcctgttcttctcgcactaacaggaagatcctgccgtgcgcagggcgggcatcgggacggccccccggctccca

SEQ ID NO: 321854 - DNA, 122 bp, Homo sapiens
tgccgtggtctgaggctgtagctctgagtgtgcacgtgtgtgtactcacgcaggtgcaggcgccacgggggatcagcacccggcactgggcggctcccctcggagccaacaggaaacagcgt

SEQ ID NO: 321855 - DNA, 122 bp, Homo sapiens
aaggccagcgagccgggactcttctcggtgggtctgcacacgggcgaggtgcgcacggcgcgagccctgctggacagagacgcgctcaagcagagcctcgtggtggccatccaggaccacgg

SEQ ID NO: 321856 - DNA, 122 bp, Homo sapiens
gtcgcacagccccattctcccacaccagaagagcaatgctccttatggatgattaatagccgggcttctcctgaccatgcggcgcgtccctgccggcaccacttagttgttttaatttgacc

SEQ ID NO: 321857 - DNA, 122 bp, Homo sapiens
aagctgatttgcattcatgggaggacctccaagcacagtcagcaacagagaaaatgatcccgataattccagttgcccacatccagaggttctgaacctgaatgtgtgtctttactgaggga

SEQ ID NO: 321858 - DNA, 122 bp, Homo sapiens
agcgcccctcgcagtaccatttggcctttgcccagcgtgcaggggagttagccgtcaccacggccaagtgcacatgagaactgcattgcccagaaacctgtgcgccgcccggcggcggcact

SEQ ID NO: 321859 - DNA, 122 bp, Homo sapiens
gcggctccgcccccgacttccccacggaccgtcacttccggtctcccccaaacctgccaccgacggccacttccgtttccccgatagtatttggggatctcgaagcgatacttccggctccc

SEQ ID NO: 321860 - DNA, 122 bp, Homo sapiens
aactctcactgtaacattcagatttgctggcacccagccttttccagcacatatacattccgctccctcagtgactctatttatgggagtctatgtgatttactcaagactaataaagaccg

SEQ ID NO: 321861 - DNA, 122 bp, Homo sapiens
tgactttgtgatctgcctgcctcggcctcccaaagtgctgggattacagtcgtgagccaccgcacccagccgcacctactcttttgtaaagcacctgtgacaatgaaggacagatttatcac

SEQ ID NO: 321862 - DNA, 122 bp, Homo sapiens
tccggagtgctgcaagcgcagaaaatatacgtcatgtgcggaggcggagcttccgccctgcgcgtcgtattagacggaaaccgagcgggcccatttttcatgggtttgcggacccaccagcg

SEQ ID NO: 321863 - DNA, 122 bp, Homo sapiens
ttagagcctaggaagcagatcttgggggaggcgggccgggctgtggagacccgacactcccgcgctggccgcgaccctctcgctgtggagcctgtggccggcccgggcgacagcagccggcg

SEQ ID NO: 321864 - DNA, 122 bp, Homo sapiens
ccaaggggctgggggtaaaacattctgccccatgatccaatcacttccaccggtccccaccgccaacactggggattacagtttgacatgaaatctaggcggggacacagatccaaaccata

SEQ ID NO: 321865 - DNA, 122 bp, Homo sapiens
ctaccgggctgtgcgtttgataggcagctggaagacccaggtgggcggttcaatcggtcacgtggacacgcagctcagccaattagaatctcgcggcagttgattcctagaggtggaatcca

SEQ ID NO: 321866 - DNA, 122 bp, Homo sapiens
ggaagcggctagtgtgagaggctggtggggagcagagcttggctggcagggtgggccctccgcaggccgcgtgacctgggcagcgtcggggcctccccgggcctcgggagcctgggcagaga

SEQ ID NO: 321867 - DNA, 122 bp, Homo sapiens
ctcggttactctgccgtccacactatttcctcagtaagatgtgcgctgttccgtaatacacgacatgtatgggttaactttctgtttacccttcactacactgtaagctcaatgcctgacac

SEQ ID NO: 321868 - DNA, 122 bp, Homo sapiens
atgcccattgagtatcaagctaacgatcctctttgatctgaaacgaaagtcttaaagtctcggttcgttctagaagcctggctcctgccctgtggggaaggagggagggggagaggaggagg

SEQ ID NO: 321869 - DNA, 122 bp, Homo sapiens
gcagaaaccccgcctccgggggcggggctttgggggaggggtggggcatagcagcctggccgagttcccccttaaggcgtcctggagttcagttttagattgtgcatgtcagttgagggttg

SEQ ID NO: 321870 - DNA, 122 bp, Homo sapiens
tgtctgcctggccctaaactctgtgtgcatggtactgctcttgcagaggaaactgcttcacgcccagcctaatccatagttaaagatgaccattttgtgatctggacctcttattcctagac

SEQ ID NO: 321871 - DNA, 122 bp, Homo sapiens
caacacagcttgcctgggaacgccactccctgagacatccactgtgagccctgacagccacgagaaaaacatagctcattttctcagagttaggagcctctgggtggcttcatcagactggc

SEQ ID NO: 321872 - DNA, 122 bp, Homo sapiens
cacgccgaaattgaatgcatcgtttcttaataaatccaggcctggactcagagcccccgccgccctccccttcgggtccccgccgcctcctcactcccccaccccaccgcccgtcgcattag

SEQ ID NO: 321873 - DNA, 122 bp, Homo sapiens
gacacctggtttccttttcaagcaacaaaatcctaaaatctccatcatctgctgctttcacgttcctcaccactgaggtcaaggacccgaggctggcaggaaattgaactaatgacacttca

SEQ ID NO: 321874 - DNA, 122 bp, Homo sapiens
ggaggaaggcaggctccggggaagctggtggcagcgggtcctgggtctggcggaccctgacgcgaaggagggtctaggaagctctccggggagccggttctcccgccggtggcttcttctgt

SEQ ID NO: 321875 - DNA, 122 bp, Homo sapiens
ggtactcgtccaggctcatgggcagcagaatgtggtattccttgatgagcatcctgaaggcgctcggcgggccgcgcgcggcctccgctcctcctggcgcagggcacggcgcgacagtcagt

SEQ ID NO: 321876 - DNA, 122 bp, Homo sapiens
accttctctcttcctccactccttcagtggagaaacttgctttatatttaagagaaattccgagttcccccaccaccatcaaatctattaggttggggcaaaagtaattgcggatttgccat

SEQ ID NO: 321877 - DNA, 122 bp, Homo sapiens
ggagactgaaggctgcagcaaccgcagccgcctgctctcctgccgttgaggcgaggcctacgctgcagtaggcaggtccattgggtgaactggctgctcatcattctctgtgctgcttctac

SEQ ID NO: 321878 - DNA, 122 bp, Homo sapiens
ctaagtcagggtgtctgaggacagatctttttttattaaccattttgcatgctcttgtcccgcaaggacctgtgcctccttgcacattcattttgcagaaagatgccactaggaaaatttga

SEQ ID NO: 321879 - DNA, 122 bp, Homo sapiens
ggctctccctggcctccgaggggcctgttcgtgggaccctaggatcggtgcccgccctggcgctgcggttcacctgagcccaacactgctgaatagcaggactgactctgggcgccagcccc

SEQ ID NO: 321880 - DNA, 122 bp, Homo sapiens
agcacattttaaaaatagtttaggtacagaaggatgaccctcatgctacagaagggaaggcgggaggagagctttaaacacagaaaaagaatttggatttctggggcaaacactagacagga

SEQ ID NO: 321881 - DNA, 122 bp, Homo sapiens
ccccaccataagtcaggcctgctcccctcccatccaccgccactccccgcagccacagcccgcagagactgctgaggagcttcacagctgcattcccagtcctgccaagagcctgccacact

SEQ ID NO: 321882 - DNA, 122 bp, Homo sapiens
acccacttggggccagtctgcaagtacctcccatgtaggctcagcctggcacttgaaccccgtgccctccgccccccgcccctcccagtggcgtctccgcttctcacttcagaggcagagct

SEQ ID NO: 321883 - DNA, 122 bp, Homo sapiens
gcaaatattcgggcgagtaaaattcagacgcggcttagcgttcaccacgaaaacgggtgtcgggcgacccccttggagggaaaggggacactagggggagaaaagaggccaggattcccgcg

SEQ ID NO: 321884 - DNA, 122 bp, Homo sapiens
ttccagctctcgcttcagctactttcttagctgcccatccagccaaatcccacttctggccgtgagcacattcagcaggacccgtcttcctggatcgaggaggacttcttcctcccccaccc

SEQ ID NO: 321885 - DNA, 122 bp, Homo sapiens
tcatggtgactgttaccgttcttaaaggcggcatgtctggagtttgttctttttgatgttcggatgtgttcggaatttcttccctctggtggggttcgtggtctcactggctcaggagtgaa

SEQ ID NO: 321886 - DNA, 122 bp, Homo sapiens
cccccatcacgcagccaccgccctcactctcgaccccactcattggtcgagtcgggcaaacgccctcccagcctttagccaatcggatgcctaaagacgagactatacctggaggaaggagg

SEQ ID NO: 321887 - DNA, 122 bp, Homo sapiens
agccctcctccccaggcagaacagcccccattcatcattttcccacaccacaagcaagaacgatttgtgtgcacagttcccagttggcgaaattcataaatgtcacaccttggcacgtttct

SEQ ID NO: 321888 - DNA, 122 bp, Homo sapiens
agtctgtgctgcgggtggggtcgggttgagcagcccggcgccccccaccgcgccccccaccgcaccgccctcgatctaaccccgcccccgggcgctcattggcctgcagcaccccctcccca

SEQ ID NO: 321889 - DNA, 122 bp, Homo sapiens
tcttgcaactgcaggagagctggccaagggcgccaggctggaaggcctgaggccgggtttcgagaaagaacaaaaaggtcggacacaccaaaccccggctaaggccaaaactgtgccccgaa

SEQ ID NO: 321890 - DNA, 122 bp, Homo sapiens
cacacgtgttctgctttgattgcatccagaggtatatactagaaaaccatgattttagagcgatgtgccccttgtgtcgagacgtggtgaaggtacctgctttggaagaatggcaagtgagc

SEQ ID NO: 321891 - DNA, 122 bp, Homo sapiens
atcgaagccctgcacggccacgagctgcggccggggcgcgcgctcgtggtggagatgtcgcgcccaaggcctcttaatacttggaagattttcgtgggcaatgtgtcggctgcatgcacgag

SEQ ID NO: 321892 - DNA, 122 bp, Homo sapiens
gaagtggttttgcccctataaaacatggcgaaaagctttcttgtctccaaggaaacgccacgtaatgagtcaaagctgtggcgcacgcgcagaagtacaagctaccggaagtgatggcgccc

SEQ ID NO: 321893 - DNA, 122 bp, Homo sapiens
ctggcggaggctgctcagcccgagtggcactgcacaggctcctgaaggcagatgaggccccggagagaaaacacaggaagacagcccccacagccccgcccctccgcgaaggagagccgtca

SEQ ID NO: 321894 - DNA, 122 bp, Homo sapiens
agcaccgagaggccccaaaataagtatctctgaatccccttcattccacctgtatagtctcggggaaggaagggcctttgtctgaagagggtgaccccagttgtgcagagagagagtcttgg

SEQ ID NO: 321895 - DNA, 122 bp, Homo sapiens
agaggaggaggaggagtcactaacaaactcagcatcagtgtccagaacaaccgaagtgttcggcatattaatggtgggtgtgtaggacggaaggttggatgtatgcagaactggcgactcag

SEQ ID NO: 321896 - DNA, 122 bp, Homo sapiens
agtcccaaaggaatattggaaagaaatggccgtgaaccggtttgttcttgcccccgcccccgggaacacgccctctccgtcgttcctgttgactgtcagatcccgggaaccaagcggcggag

SEQ ID NO: 321897 - DNA, 122 bp, Homo sapiens
atctttctgaaaagaacatagaagaaataatgacataagctgtcctctctctctccgcctcggctacgtaacagggaagggccccatgtctggtggacacatgacacacatgaccttatcaa

SEQ ID NO: 321898 - DNA, 122 bp, Homo sapiens
ggctgtggttgctgtgacagtttcgttttctgaatctttgtaatgctcttccaccctgctcgtgctgcccagaggctgatctgcaaacctgggcagtattccacactgaagctcagtttgca

SEQ ID NO: 321899 - DNA, 122 bp, Homo sapiens
gaggataccttccaaaggctctgctttccctgacaacttgtgccagcaagtggaagccaccgtttatagaggccccattcttgctgtatgttcgcataaatagaatccatctctttttctct

SEQ ID NO: 321900 - DNA, 122 bp, Homo sapiens
ctataaagacaacctcaggtgtgcgtatatttagggcaacttggatgtatgctcagggttcgcaaaaagtaaacaaaaatacaagggaaaaaattattgacaatgaactgctttggtagtga

SEQ ID NO: 321901 - DNA, 122 bp, Homo sapiens
agaggcaggggggtgcggcgagctctgggcttgcaggcaggcggtgactcatgcagagtccggccaccggtgcgggaaaagggctttgacgttctcagcaaaaccccaaggcgagctccgag

SEQ ID NO: 321902 - DNA, 122 bp, Homo sapiens
gacgacgccctccaccagccgccgctgtcgtccaccatggtggtgctccgaggaccccgccgctgccgccactgcccacgccgatgccactacccgctccgggcccctggcaaacccactgc

SEQ ID NO: 321903 - DNA, 122 bp, Homo sapiens
ctttacagtgtgctgttggggatggtcagcaaaaactgcaggacaaggtcaaggttagctcgacacagcctcctaactccgagcggacggagccactgaaggttaccaggtgccaaagaagc

SEQ ID NO: 321904 - DNA, 122 bp, Homo sapiens
gtggggcacgacgagaaagtccgcagccccaaacagtgagtttctgagggcgagtcgggccggggccggcctaggtgggagggagccgagcaccccgaggagccgccaccgctgtcgcccgg

SEQ ID NO: 321905 - DNA, 122 bp, Homo sapiens
caggaggaggagttgccaagacgggctggctcggacttggccaaccgctatgtccagagccggcctgctgaggggtaggtggtgtgggcagccagcccacgagaggtaccctaaaccactgg

SEQ ID NO: 321906 - DNA, 122 bp, Homo sapiens
ggtccctgggatcgtccgtgtctccaggagaaccggaccgctctcccctccctccccgagcgagaaaggaggaccacagagatgcggcgccctccgccgtcctagagcaaccggagcggccc

SEQ ID NO: 321907 - DNA, 122 bp, Homo sapiens
ggcctttaatctttgttacttgttcttactgccagagagtgggaccgtggccgtgagcgccgtagtcggggtgaatatcgggactatgaccggaatcggcgagagcgcttctcgccacctcg

SEQ ID NO: 321908 - DNA, 122 bp, Homo sapiens
cctgccgcgctctgggctccgcttccacagctgccggctgcctgctggtcacgtgcgaggcgccagccaaagagaaccgagctccaggcctgtgtggcgagttttcaacccggcggaggagc

SEQ ID NO: 321909 - DNA, 122 bp, Homo sapiens
gaaatataaatactaatatatgtggtttgttttaaaatctaatgtatttagggtcagtttcgttgccttggttaaatgaatgaacaaagagtgaccaaaatgcgtttatttctccgctattt

SEQ ID NO: 321910 - DNA, 122 bp, Homo sapiens
agaaccacttctcctagcacggctcggaattctggctgccggacacacgtgacaaaccagcgagtcacattattccagatccggcgggcaggtgggtctaggacctggaacaggaaataaat

SEQ ID NO: 321911 - DNA, 122 bp, Homo sapiens
ggagtggcagcgctgcgcctcggcgtcggcccctacgcgccaccactggctcatgatgggcgcaaacgacaccgcggccgacacgacccacaccaggaccacagctgtccgggcgcagcgct

SEQ ID NO: 321912 - DNA, 122 bp, Homo sapiens
tggggaagcaagtgaggctgaggctgggcccacgcggcacctccagaggctctgcacacccgtggtggtaacttgtgttatcacccaggacaagcgcactcctcggatcagcagtggaagaa

SEQ ID NO: 321913 - DNA, 122 bp, Homo sapiens
cgtgagatgtaaagaaacagtacagccccttccactgcccattttaccagctcacattcccgaccccatcagcttggaagggtgctagaggcccatcaaggaagtgggtctggtgggaaacg

SEQ ID NO: 321914 - DNA, 122 bp, Homo sapiens
ttgcactgcttttcattcataagctgacttagtttagcgcagacataggatggagggacgcgctgtcagcggacagatcatgggtgcactggctacgcccgggatggttgcagctgcgcggc

SEQ ID NO: 321915 - DNA, 122 bp, Homo sapiens
aaagtcttactagcttttatttttaattaaccaaattcaatggaacttaaattaagaaaacgtttctgtaacagttctgtttgattttgtgaagagatcttacagttggagatttttttcta

SEQ ID NO: 321916 - DNA, 122 bp, Homo sapiens
tcccaccccgggacgcttcctgctcggggtcagccgccgccgcagcctgtttacgcgcagcgccccgccaggcagtttcgtgccacccgccattgtggcgcgagccagtcccggccccgggt

SEQ ID NO: 321917 - DNA, 122 bp, Homo sapiens
ccacacccgaaacacctttccacgataaacttttattctctatcttattattaatggtggcggaaataaaactaaaaccaaaacgaaaacgagtactagtactaacacactaatcaatttga

SEQ ID NO: 321918 - DNA, 122 bp, Homo sapiens
cggcgccagcccgatgcccggcagagggcgctgcagtgcggctgcggggccaccggcccgcgctgctctggctgccaaaggccggcgctgcctttggctcagagggaaagatcggggcccag

SEQ ID NO: 321919 - DNA, 122 bp, Homo sapiens
atttcaaaccgccctctagaaagcctcctagtgcgatgttgctgtgggaaaaccccttcccgccctggctcgggctcctggcctcggtgattgcttgctgttcctccttcccaatccttcat

SEQ ID NO: 321920 - DNA, 122 bp, Homo sapiens
caccccccccttttttttttttttattaaatcagtatagctgtgccagaatctcaggatccggtgtaggggtttcataaaactccataggatatcctgacacatatccctcccccggttgag

SEQ ID NO: 321921 - DNA, 122 bp, Homo sapiens
tttctctctgcacagacagcaatgttcttactcctctcctgctgtaaagccactcatcttcgatttccctgaggacttctgctcctacagactctcgacggagtaaagcttccgatagaggg

SEQ ID NO: 321922 - DNA, 122 bp, Homo sapiens
caagtcacatagaaacatatcaaaatgacagcactttatttcttttttgagatggagtctcgctctgttgcccaggctggagtgcagtggcatgatctcagctcactgcaacttccgcctcc

SEQ ID NO: 321923 - DNA, 122 bp, Homo sapiens
atgaaaagggactgaatttaaatatttgtaagaactttgtgatgatgagtaattgtcagacgtgggatagataactgagaggctcagaatctttaccaaggatattttttaggataaggtag

SEQ ID NO: 321924 - DNA, 122 bp, Homo sapiens
cgatgttcagaaggaaaacttacctgcccattagtctttctcctctctccatttcaagcccggcaaaagcaaggattacgttttgctcacctccatttgccccaaccccagtgcccactgtg

SEQ ID NO: 321925 - DNA, 122 bp, Homo sapiens
gtcgtggccgctgacgccccgcccccggcgctcaggtgcgcggcgtcgcgtccggcccgccgctgcagcctgccctgcgccagccgtcctctgccccgctcccgccgcagaccacagcgcgc

SEQ ID NO: 321926 - DNA, 122 bp, Homo sapiens
gtaataccattaatactgcagctaatgcttattaagcactttacgtatttctgaggttaacgcaaaggccttcggtagttcattgtgaaatagggtctcagatgtttattagtgatacatat

SEQ ID NO: 321927 - DNA, 122 bp, Homo sapiens
agttaaagtcaaagcaggagagtaattatgaatagcgcagcgggattctcacacctagaccgtcgcgagcgggttctcaagttaggggagagtttcgagaagcagccgcgctgcgccttcca

SEQ ID NO: 321928 - DNA, 122 bp, Homo sapiens
tgactctctaggtgaaaacagttcttggatactccttgaagacaggttatcttctgttctcgttttgtgttcgcatagtaactgacaggcagttgacactcaaatggttgacgaacaagtga

SEQ ID NO: 321929 - DNA, 122 bp, Homo sapiens
gaaagctcaccacactggaacgtccaggtgcacatgtgccactggacaccgggatgttgccggatgctcttttggacgctggaatgctggtgcattgttgccggatgctggaatggtgcacg

SEQ ID NO: 321930 - DNA, 122 bp, Homo sapiens
gttatccagcggccagctaatgctatcaaagagatgattgagaactggtacggagggagtcgagccgggctcacttaagggctacgacttaacgggccgcgtcactcaatggcgcggacacg

SEQ ID NO: 321931 - DNA, 122 bp, Homo sapiens
ttcaacgccttcatgaaccccaagatggccaacgtgcaccagaccatgcccatgaggctccggaagctgcccgactctttcaagccgcccgagcccaagtccaactcccaacgggtcagtac

SEQ ID NO: 321932 - DNA, 122 bp, Homo sapiens
aaggccaagacccgctcgggtggtggccgagcgccctccagccccgggtccacctgcggccgctccctgcacctcacgcccagcggggctccggggacctgcctcagggaccggcgaggaag

SEQ ID NO: 321933 - DNA, 122 bp, Homo sapiens
cactttagtggttaatctccttgcacatcggtggaactttaggcacaagaaggtaagcaacgaagatagtgatatacgaagggaaaactaaacccaggtagcgttgccagcttaaaagtcct

SEQ ID NO: 321934 - DNA, 122 bp, Homo sapiens
tcagatcatctttgtgacccttaagggcacccagggccaccccagagattctgatttaatcggccaagctaagcatgggattgaatcaggtttcagtatattttagaaacctccaacagtgt

SEQ ID NO: 321935 - DNA, 122 bp, Homo sapiens
atcccatgcagaccaggcaaagcccaggcaggatgctctgcagaaagttccctggtgatccggacccggagccagactgagccgcagccccagaagacaggtatctcctcccctggggccac

SEQ ID NO: 321936 - DNA, 122 bp, Homo sapiens
ggttccgtcccccaacaagccccggcccccaagtcccgcgcgggccggccaggggcggggcgtcgggccagctgagctatcccgtcagaccgcgccagtttgaatgaaagctctacaagatg

SEQ ID NO: 321937 - DNA, 122 bp, Homo sapiens
actgagcatcagcaaggcgtgattctgaaagggagggggcgtcggccccctaccccggagcgtccgaggcgctggtcttcatacctgtgtcggctctttcgaaggagagaggaggagtcggg

SEQ ID NO: 321938 - DNA, 122 bp, Homo sapiens
gccttgaccccacactgcctcgtcccctctgtcctcgccccgaccctgacgcatcagagccgggacactggtgactttcctggggaaatctctagatgtgacctctatggccggggacaggg

SEQ ID NO: 321939 - DNA, 122 bp, Homo sapiens
aggaaaccttcggcttctgagccagcagtaggggggctcggcctgggagtcgggcggccccggtcaggccctgcccagagagctcctggttcctgaactgagctgcctctaccgtggtgggc

SEQ ID NO: 321940 - DNA, 122 bp, Homo sapiens
caccaaaacaccaatccagtgagacaagccatgttggagcttccagcccagcccagccaccgtctttaatcagctgcatgaataacagccatcactatatgtaacaagaccaccaatcaacc

SEQ ID NO: 321941 - DNA, 122 bp, Homo sapiens
acacttggcatttcccaacagagccggggcccgtcggaaacgtgggttgggttcagaggtcggtttccatggcatcctgccacattccagctgctggtctcgcacatagccgtctaacttcc

SEQ ID NO: 321942 - DNA, 122 bp, Homo sapiens
gcccctcccaccccacctcctgtgatttgagccaactgctcctcttctgtatgggggacacggggcggggcactgccagtgccccaggggtggtctcccgcctgcttggggaagggtgcgcg

SEQ ID NO: 321943 - DNA, 122 bp, Homo sapiens
ttcatgggctgtatacttcaaaggatctgattcctggtgctactaagcacattgcttttccgaaggcacagtcttgtgggggagggaacaggatggtctccatgaggtgtttgtgaaagccc

SEQ ID NO: 321944 - DNA, 122 bp, Homo sapiens
tcagaggccatgctgagttttcatcaaacacctgctgagcagctggcacgtgccaggacacggtctaggctgaaggctgccatcgtagtgcagaatagaatcccgtggaggttggaaatgtt

SEQ ID NO: 321945 - DNA, 122 bp, Homo sapiens
cagaccagcctgggaagccccatgcttcccggccggagggcgagagccaagtgagcagctcgaggctgccgggggctgacgtcaggggggcgggggagggggcccggagcgcccgggcccgc

SEQ ID NO: 321946 - DNA, 122 bp, Homo sapiens
gcgacggacgcagtgtgaagggaatgcaatttgacgggcccttcctccaccctcggtaggcggggctcaggctgaggggacaagcacagggaggcagcttcaagctgagcatctgccagtgg

SEQ ID NO: 321947 - DNA, 122 bp, Homo sapiens
ggcgcacgtccgccagcctctgtgagctcagctaagtatgatgcctaggctagagagctacgtccggtctcctaggcaaccatatcaacttccggcttgaggcacgatagcggttggcgaga

SEQ ID NO: 321948 - DNA, 122 bp, Homo sapiens
gcccaagcaaggaaagaaataatgaagagacacatgtgttagctgcagccttttgaaacacgcaagaaggaaatcaatagtgtggacagggctggaacctttaccacgcttgttggagtaga

SEQ ID NO: 321949 - DNA, 122 bp, Homo sapiens
tgggtgtgggccggggcgcctgcggtgtggcgaagagcagcaggtcagggtcgcaggggccggcggcgggcgccgcggggccggtgggagccggcggggcgctggcgtcctgcgcggcggag

SEQ ID NO: 321950 - DNA, 122 bp, Homo sapiens
cagtcactcctccgcccagtggagcgatccaggcagaaatcggggccctgagtctgaatccgggttctgcaaccagggcagatgcgggcttgcctctgctccctgtccctggtctgagagcc

SEQ ID NO: 321951 - DNA, 122 bp, Homo sapiens
acggaaagacccggcccagggcactgggaaaagcagcgcgctcccaggagttgctaggcacgcggagccggcctccaaagtgtcccctcggcgctggagctgcgctttcttcctgcacaata

SEQ ID NO: 321952 - DNA, 122 bp, Homo sapiens
agacgcggggcacggagatgtccccacagagacgcggggcacggagacgtcccacagagacgcagagcacccagggcagctacaggatgtcctcaggctgcacgctggcctccatggcacag

SEQ ID NO: 321953 - DNA, 122 bp, Homo sapiens
cttattcatttttcgagacagggtcttgctgtgtcacccaggcttagtgcagtggcgtggcgtgttcatggcttactgcaacctcaaactcctggactccgaacagctgggaccaaaagcat

SEQ ID NO: 321954 - DNA, 122 bp, Homo sapiens
cagggatcaggctccacactgagtggagcatggcgaagggcgacactagggcccacttcccggaccacatgactcggaagagggtgtgcagttcacggcagagggaaatgtgctttgaactc

SEQ ID NO: 321955 - DNA, 122 bp, Homo sapiens
gagaggcgggggcgggcgtgagcctgtagatccgcccctgactggtgattggtcggtgggcgggcaggggcgggcctgagggacagggcctccccctacctctgctccgtaccctccgcccc

SEQ ID NO: 321956 - DNA, 122 bp, Homo sapiens
ctccagctctacctctcactccgagcctcgcgccttggctctaagacgcccaggaaccggcgcatggagacgaccagtaagcacttccgggatggatctttcgtggtgtggaggccagtctc

SEQ ID NO: 321957 - DNA, 122 bp, Homo sapiens
agcgggagccgggagcctgggaagggcctcgctgcttctctggagctgccgccatctcaacgaggcgtttttttttttttttttttttacaacccatttcacagtttccagaaaaggaggat

SEQ ID NO: 321958 - DNA, 122 bp, Homo sapiens
agctgccgaaagccacatactgttttcatcacctcagccaacgtctggagagcctatattcgtatagccagtgtgagaaaggtggaaactgaaaacacaagtagggaaagcaacgcttggaa

SEQ ID NO: 321959 - DNA, 122 bp, Homo sapiens
aaatttaattttaaccagatgatgccatctgcatggagtcactctgttgtcgtgtccacacgtccaggatatgtttaatgaatggtgtttgtttactttatttggtcttagccaaatgagta

SEQ ID NO: 321960 - DNA, 122 bp, Homo sapiens
tttacccgagcccagccccgcgggcccttgggtggggatgggtatagttgcagaaacaagcggaagccggtctctcttaccaccctccgtggtgagcaaggagggctcccctccctgtccat

SEQ ID NO: 321961 - DNA, 122 bp, Homo sapiens
aaaaggatggttggagggagtccgaaacctttgggtcccaagacatgacctaaggagtcccgctgtcgccactcttcccggtttggtagagggggcccgtgagtggcatttagctctcgcaa

SEQ ID NO: 321962 - DNA, 122 bp, Homo sapiens
ttttgtggcatttccatgccaatgtttatttcccccaatttgtgtgtatgtaatattgtacggatttactcttgatttttctcatgttctttctccctttgttttaaagtgaacatttacct

SEQ ID NO: 321963 - DNA, 122 bp, Homo sapiens
agccaataggagagcgtgaccccatacgcaagcccgccttccagcgtcagcatggccaatcggaacgtcagaattgggcgccgacctaatgacatgcggggttaaaaactcaccggccggaa

SEQ ID NO: 321964 - DNA, 122 bp, Homo sapiens
aaaaaaaaaaaaaaagaattagaaggggaagaaaagagaagcaccttaattcttcgccggcggaggagatcttgttacacagcagcatcgccccacagggcagaggcctctgcagccatcaa

SEQ ID NO: 321965 - DNA, 122 bp, Homo sapiens
tcgatgtaagagtggcgcacttgcgagttggagcgcccgtcgagggacacgaaccaggcgcgcgggtgcggcttcacgcccagttccagcagcttcttctcggtcagggcctgcagctcccc

SEQ ID NO: 321966 - DNA, 122 bp, Homo sapiens
tttcatcttgcaagaaagaatcatgcggatgtgcgcggagccgagggaccatggtggccgcggtgtggtcactgatgaggttcctcatcacgggcggtgtggctggaggcgcgtcgacctga

SEQ ID NO: 321967 - DNA, 122 bp, Homo sapiens
cagtggcagcctgccgagcagcccagccaacagtgccctgtctttgctcttttgttgtttcgtaccatgtggtgccagcaatattctggcagctgacaccgtcagcaggtgtccctaaaata

SEQ ID NO: 321968 - DNA, 122 bp, Homo sapiens
ggcagctcccgacaacatatggggttatcatttctttgcggagcattctgccactgaccacgtggtaacgccaactacgccagagaaacgctcgccctacccaagttgtgcccagccttgcc

SEQ ID NO: 321969 - DNA, 122 bp, Homo sapiens
aatcaaatcgtcatgaaaacacacatctgggtgacatttggaaccactggtgccttcagccgatctacaagctaggtcaccctctcaccctctccttgtacacgaaagggcagtcttctttc

SEQ ID NO: 321970 - DNA, 122 bp, Homo sapiens
ggctgctcaccaaagacccagaatggctgaacgccaagatgaagttcttcctccccaacacggacctggattccaggaacgagaccttggaccctgaacagagagtcatcctgcaactcaac

SEQ ID NO: 321971 - DNA, 122 bp, Homo sapiens
ctaaatccagtgccatttttaaatgactgattatgattctagctgaactttattcacagccgaaattgacagctgttcgttccttccatgccccatctaccaaacacacccgaacttttcaa

SEQ ID NO: 321972 - DNA, 122 bp, Homo sapiens
ctgtcctgggggaccgtgtcctccctgcccccacccctggccactcctgtcctgggagaccgtgtcatccctgcccccgcccccggccactcctgtcctgggggaccgtgtcttccctgccc

SEQ ID NO: 321973 - DNA, 122 bp, Homo sapiens
gaaacggacccccgcaggttgccgacgctggctcaggtggagtgcttttattctcttatccggccccacccacatcctactgattggtccattttacagagagctgattggcccgttttaca

SEQ ID NO: 321974 - DNA, 122 bp, Homo sapiens
tcgttaattcaccatgtgtatgtaaaataatatacccaaaacagatctcttcaggtgtttcgcaggggttttgataaggacttgactttttattagcccttaagtcagtagtaatctggacg

SEQ ID NO: 321975 - DNA, 122 bp, Homo sapiens
ccctgtccaccggagccgaggtccccaagtttttcggggtgagggctgctgcctctgctccgccgggtcccctccttcgctcttcttttcctcggcgctgcgctgcgcggctcttgctccgc

SEQ ID NO: 321976 - DNA, 122 bp, Homo sapiens
tgaggaacctgctccgccgctacaaccagagcgaggctggtgagtgaacccggccgggggcgcaggtcacgaccaccccccatccgccacggaccgcccgggtccctcagagtctccggatc

SEQ ID NO: 321977 - DNA, 122 bp, Homo sapiens
tgtgctttgcaggggatctcggtgggtaccgcggcccctcgcagggtggcgagtggggtccgtgcctcgagaagggggcccttacccacaccgtgcggcttgaattctgtcggagttgaatc

SEQ ID NO: 321978 - DNA, 122 bp, Homo sapiens
taaagaaacaagggtctaggtcatcccaatagaaatgtcagcagaaggaaaaggaaacaccgaaggggtgaagaaataaagcagtatgtatcaacttcggccatactaccagctaagggaag

SEQ ID NO: 321979 - DNA, 122 bp, Homo sapiens
ccatcggcggggaggtgccccagcgctacgtgtggcgtttctgcatcggcctgcactcggcgcctcgcttcttggtggccttcgcctactggaaccactacctcagctgcacctccccgtgt

SEQ ID NO: 321980 - DNA, 122 bp, Homo sapiens
aacaatatggatgtttcagtgatgaaactttctcttttaaaatcacttaagggtgctttacgtcccacccaaggcaagaggaacgccagcgaggaagacaaagaggcccggggtggggcgca

SEQ ID NO: 321981 - DNA, 122 bp, Homo sapiens
ctgatgcaatcagccttccggaaacgggtcccgctgccgcgctcacccaggaaacacttccgcgccctcctctggccgctgagctcccggggacgggttcccaaactcccccggcccgactt

SEQ ID NO: 321982 - DNA, 122 bp, Homo sapiens
acctcaggtgatccacctgccttagcctcccaaagtgctgggattagaggcgtgagccaccgcacccgtcccagaacaaaggctttgagagtctgggactgtccacctggcagctgggcctg

SEQ ID NO: 321983 - DNA, 122 bp, Homo sapiens
cggcccgtgcgggactcgcagccggaggccctgccggctgcaagaggcggaggccagaggcgtcaccagcgccggggcagctgttcctggtccccgccacctcgctgaagtggggttttctg

SEQ ID NO: 321984 - DNA, 122 bp, Homo sapiens
gagaagagctgccttattctctgatcccagttaactgcctagagacagaggaaagggctgcggacacccaaatgcatatacaaggtgtctttgatacagcctccatttccctgctaaatcta

SEQ ID NO: 321985 - DNA, 122 bp, Homo sapiens
agcgcgggcgccgcagaggagttgggagccggcgcaaaagtttcctcccaactctggccccgtgcgccgccgccgccgccgcccactccagcccccggcttggggccggccctgccaacgcc

SEQ ID NO: 321986 - DNA, 122 bp, Homo sapiens
gtgccccattttcagcccccagacctggctatggtgagaatggacatgagagttaagtttcgagtgaaggtatcggctgagccatcttgtagaatccagtcagtgaggcggcccgtaaagaa

SEQ ID NO: 321987 - DNA, 122 bp, Homo sapiens
gcaggttggccagcaagaccagggggtgggcaggctcccaggggcaggagctgtcaggcacgcggctcaggtccaagtccgagtgcagctcgtccaggccatcgaaggtgaagagggccacg

SEQ ID NO: 321988 - DNA, 122 bp, Homo sapiens
gctctagggacttcatccacatttactcatttaatccacatggagactcagaaaagtgtgcgtcaaaggctctgtccctgtcttacagttgggaaacatctcaggactttgatgggaaaatg

SEQ ID NO: 321989 - DNA, 122 bp, Homo sapiens
acttgacgcgcgcagcgccaccgaagctcccgccgcgctttgcgcggttgggtagaagtgcgcagcttttacaagggagaaggtttcgttaaaaaagaaaaaaaaatcagcaagagaaacat

SEQ ID NO: 321990 - DNA, 122 bp, Homo sapiens
gatgagtgcagcctggtaggtttaagagcacagactgccaacccagactgggtgccaaatcgcagcactagcacttgttacattgtgacctcagggcaagttattaatatctctgcgcctaa

SEQ ID NO: 321991 - DNA, 122 bp, Homo sapiens
aggtgggttgatgcaatctgtccttacccctcttgttgactttggatctatctatggtagcggtttaaaatttgtttcttgcaatggagttctttctttgaaatagtatgtagaagctcagt

SEQ ID NO: 321992 - DNA, 122 bp, Homo sapiens
agatgccatctgtgagccacgcgtaagctgctaagtgccaaaatgaacatccttattaaacgatggagttctcataccatttgtagtttggtcagatttgaaagatgagttgattgttttta

SEQ ID NO: 321993 - DNA, 122 bp, Homo sapiens
ggccttctctacatgtggctctcacctaactggagtgacaatttatcatggaacaattctcgtcagttatatgagaccaagttccagctatgcttcagaccatgacatcatagtgtcaatat

SEQ ID NO: 321994 - DNA, 122 bp, Homo sapiens
cgtggaggcggagtttacgatgtatccaagtctgacggccccagaaacgggtgtgcagggcgcccattgggtccgcggtatgactgcagaaagagcctgggagatcgaggggcgcagagtgg

SEQ ID NO: 321995 - DNA, 122 bp, Homo sapiens
cgattacgtgtcccatgaaatcatgcaccatcagcggcggagaagagcagtgcccgtgtccgaggttgagtctcttcaccttcggctgaaaggctccaggcacgacttccacatggatctga

SEQ ID NO: 321996 - DNA, 122 bp, Homo sapiens
agctgccactactgccaccgggaaaacatttttcttaaaaaatgtgttcttatggccgggcgtggcggctcatgcctgttatctcagcactttgggaggccaaggcgggcggatcacgaggt

SEQ ID NO: 321997 - DNA, 122 bp, Homo sapiens
aacaaccagacgacactgaagcggctggtgcgggatacagtatctcatttgcatagagcgcgctggttggctactgtcatcatagtaccactccgccgggaagcggccgggccccattggct

SEQ ID NO: 321998 - DNA, 122 bp, Homo sapiens
ggaagctgggctgtgcgtgtatgcgtctaccatgtgggggtgcctgtgagtgtgctggggcgtctgcagtgaaggcctcctgagaccactccacggaaacaccgggaatccctgcagctgag

SEQ ID NO: 321999 - DNA, 122 bp, Homo sapiens
cgggggcctcccaggctagggtttcgcggccgcttcgggggatagagttgtcccctgtctcgagttccgtaccatccccctcctcgggccgccgcagcccgggccgccccgttaatgattga

SEQ ID NO: 322000 - DNA, 122 bp, Homo sapiens
taactttaacttttaaaaacatggcattaaaatattgcgcacctcgacggctgcgttttccggtctctccggcgttttgcgcgggaggagagtgaggcgctttctcgcccacatcccccgcg

SEQ ID NO: 322001 - DNA, 122 bp, Homo sapiens
ccagagacgcagggacctgcgcgtcgcatccagcgccccctccctctcccgtcccggcgccggcggtgtgcggcaggcaggagcccccacaatcatctgacgagcccacagtgcgcccggcg

SEQ ID NO: 322002 - DNA, 122 bp, Homo sapiens
cactgatgaagaggctgcacccgccagactctccatgcagacgagacggcctaagtcatccgctaagatccagctgagaccactgacgaaggggctgcacccgccagactctccatgcagat

SEQ ID NO: 322003 - DNA, 122 bp, Homo sapiens
ggcagcctgaatcattctgaaatagttctatgacaatttctgtggagcccagatcttccacgctttggttagggcccaggactttcctctggaggtagctagaataagtgtaacccttccgc

SEQ ID NO: 322004 - DNA, 122 bp, Homo sapiens
ttcactctctcccaattactatcgcttgaaaaataccggatatttcattattatcctgtccggagtcggcaaactacggtctactatctgtcttcgtatacgtcaaaagctaagaatggttt

SEQ ID NO: 322005 - DNA, 122 bp, Homo sapiens
gtcctgttttttaacacttgcatttgcctctctctccactgtctcaattcatatttgaaacgaatgggaaaaattttgcagaagtaaaaaaaataaataaataaggcttcctcttaactgca

SEQ ID NO: 322006 - DNA, 122 bp, Homo sapiens
aactaaagcctggcagaatcaggacgagagaggatggcgcgccctccgcctgctgaggaccgggaggtggaacaggcatcgtcccacccttcgtagctactgataagtgggagatgcaggag

SEQ ID NO: 322007 - DNA, 122 bp, Homo sapiens
aaacactgagcacctccatgtgtgcatctgctgggcgtcggggaggaagggcagccttagcgactcggggccatggcgcagaatagatattgtgggaaatacagaccaagaatggtcttgga

SEQ ID NO: 322008 - DNA, 122 bp, Homo sapiens
cgggcgtctgaccaaacacaccaagtttgtgcgggacatgatcccggaggcatgtggcttcgccccgtacaagcagcacgccaaggagttactgaaaggtctccaaagacaaacgggtcctc

SEQ ID NO: 322009 - DNA, 122 bp, Homo sapiens
tatggctggattgggagaccacttcctcctctgtaaagatgacagacgagggagatctcacgttctgggggtgccctatagccctcttttggccagaagcggtggatcacgcctgtaatccc

SEQ ID NO: 322010 - DNA, 122 bp, Homo sapiens
gtgggcaaaatcatgccactactgtggcactcgtgtgcctgactccaggcagggccttcccgtcctgccgccctgcactctgtgcatggccattctgtgaggctgctgctcctcaagcagcc

SEQ ID NO: 322011 - DNA, 122 bp, Homo sapiens
ggggggctgggttctgtgttggcggttgccgtggctttgctccgagttctggagccaaaccgcccactccctgagacggctaggtcacagaagcagtgggtcagaagccagaggggacgtgg

SEQ ID NO: 322012 - DNA, 122 bp, Homo sapiens
tgacttcgtgatccgcccgcctcggcctcccaaagtgctgggattacaggcatgagccaccgcgccaggccagagttgtgaactttaaatgtgacaaggtcggtcctagtacatagtagtgg

SEQ ID NO: 322013 - DNA, 122 bp, Homo sapiens
gtcaaaactgtctgttcaaaagaaagaataaaggtcaacaggactgcgaggcagggagaacgttttgctggggcaagcgggaaagttgacatcactgttgtgttggggtagtattttacagg

SEQ ID NO: 322014 - DNA, 122 bp, Homo sapiens
aaaccctcctagtgaaagctgtgttcttctgtgacctggatttaaatgtatcttggcactcgagcttaatgatgactgttttttttgattgcttgaagcaatgtgaaaaacacatttcaccg

SEQ ID NO: 322015 - DNA, 122 bp, Homo sapiens
ctagaaaaccccagagagggttcctcccctggctcatggggaggcaggctcggccgggcccgcggagctgcagcagtccttagcgccctcctcgccctccccactgacatcatgctccagtt

SEQ ID NO: 322016 - DNA, 122 bp, Homo sapiens
cgggagtgtccggttcccgtggcggccggacagcaaggacatttccaagtaagtgcgtggcggacacggggtgcatagagccactttactgtttgaagaactggcggacacggggcgcgtgg

SEQ ID NO: 322017 - DNA, 122 bp, Homo sapiens
gtatttattgtaagcttataatatgccacacacagcatatgctaagctctttaatgctaccgtatttaatcctaacaaggttatgaggttaggacctttgtccttgatttacaaagttttaa

SEQ ID NO: 322018 - DNA, 122 bp, Homo sapiens
gctattttaggcttacattatacatttcctgccccaaacctggaccatctactttcctttcgtatctttcacataggaaaataatctaatgcttccccccttcaacatggtggatctcagaa

SEQ ID NO: 322019 - DNA, 122 bp, Homo sapiens
ctgtcagcgccaagtttcaccaaatccaggcctgcgggctcctcccccaggacccccactcgcagtccctcaagcctgtgctcccggaaaggcactgggcgaccgcacccgtggctttctct

SEQ ID NO: 322020 - DNA, 122 bp, Homo sapiens
gtgcacttgtgtttttgttcttgctgtccccgtgtgaacccagagctgcagcctttgtcacgaggaagatgctctatgccatgtttcatatctgcccagcagggcagctcactcacagcgcg

SEQ ID NO: 322021 - DNA, 122 bp, Homo sapiens
agaggaagctcggccactcattactgtgtgctggcgctggatggcagccagatgcgatgacgacaaggcagctagagtactcaggctcaggacagccggctcaggctcaggctgcctcccca

SEQ ID NO: 322022 - DNA, 122 bp, Homo sapiens
ccaccgacggtccttggaggccagacatgtcccagcacgcaggcaggcctgtccaggcagcgcccggggaagctgcagaggcaggaggaggagtgagcgggagccggggtgggcccttctct

SEQ ID NO: 322023 - DNA, 122 bp, Homo sapiens
gttagctttgtgaagtgttggggctgcggcatctgctggtggtgtgtggtattacagccccgtgctggcggaccccattgggttggggagcgttgcgagattgtggccccagagccaagtgg

SEQ ID NO: 322024 - DNA, 122 bp, Homo sapiens
cgaagaggacagcggcggggaggccagcgaggaggaggcgggcgcggcgctgctaggcggcggtcaggtctcgggggacacctcgccggacagccctgacctcactttctccaagaagttcc

SEQ ID NO: 322025 - DNA, 122 bp, Homo sapiens
tcactggggttcctagcggactcgcctgcaagtgtgctcaggactgcagggaggactcttcggtcactgcggctctctccccatggtggactcttctgaggcgcttgactgcgctgatttgg

SEQ ID NO: 322026 - DNA, 122 bp, Homo sapiens
gcaagcggcctcaggttccacagttgttccaaggccggttccgggccgccgatgctcgcgcgtctttgttctcgcgagaatgaatgcgtcacttccggtaaccgctgcgagaaggcccttcc

SEQ ID NO: 322027 - DNA, 122 bp, Homo sapiens
tggcgtgcggacaaaaaccccagcatatcgtgtcctcacaccggctggagcactggacgtcgccatgacagagctcaggggcgggactggaacagcagagtctcccattggtcagtcggtga

SEQ ID NO: 322028 - DNA, 122 bp, Homo sapiens
ttgggcgctgcggggaatctcgacgctcctcactattggcccaagcctcagagacatgaacgtcgattggccgaacggcagggcccgagcgggcaatgattggttgcgtccggccgtccgtg

SEQ ID NO: 322029 - DNA, 122 bp, Homo sapiens
cggaggcaggaccgagagcccagagagttggtggcgctgccgtccctgcactgggtgggccgtgctgggagaaggtcccggggatcactcctcctaggccgccggggcagtctctccagcca

SEQ ID NO: 322030 - DNA, 122 bp, Homo sapiens
tcctggagagtcaatctgagactttctggggtagggagattggtaggatgaagagaggagcgtaggccagtgagtgcaaacacagcttagtttcccatttccagattttgctgtgcagtttg

SEQ ID NO: 322031 - DNA, 122 bp, Homo sapiens
ggactgtgccccaagggaagggtgtgggggaagcgcccagcgaggggatgccatttcctgcgcgtccccttagaatgtggctgaatccgcctccccacccgacgtctttatttaacacaatc

SEQ ID NO: 322032 - DNA, 122 bp, Homo sapiens
cgaacagggtgagacccactcccccagccccagagcgtttctattcctgagggatccacccgtgacccaaacctttgagaatttataatgaaaagccagtctcctgccctgcccccaacccc

SEQ ID NO: 322033 - DNA, 122 bp, Homo sapiens
aactcctgacctcaggtgatccgcccgcctcagcctcccaaagtgctgggattacaggcgcgagccaccatgcgcggtccctaaaatgtctttatatgtagatcatctagtccaatttggtc

SEQ ID NO: 322034 - DNA, 122 bp, Homo sapiens
agtttagcaatgaatagcattggatagattaaatacaaccagattcaacaacttcaattccgtgtctcccttcattcctttctaaattcccaagttcctctcactaatggactgcttatgat

SEQ ID NO: 322035 - DNA, 122 bp, Homo sapiens
ggtttcaccatgttggccaggcttttctcgagctcctaacctcaggtgatccacttgcctcgacctcccaaagtgctggtattacaggcgtaagccacagtgcccagccccaactcatttta

SEQ ID NO: 322036 - DNA, 122 bp, Homo sapiens
cacacacatttcataggtaaagcacaacagaaaggacttttaacctgggcaggtgtggcgcggcacggaggtcagtgtgggagcggccccgcttaccttgtattctgtaagagagagagagc

SEQ ID NO: 322037 - DNA, 122 bp, Homo sapiens
tactaagcatatgttgggttagcattttaaagtagaagactgatgtaacacctgcggaatcgagtcaagtaaagttatatagtctttgaaatgtatcttttagatgaaaaggtgaataaaaa

SEQ ID NO: 322038 - DNA, 122 bp, Homo sapiens
gggtttgcacacgtccatctacagtttcgacgagaccaaagacttggatctggaagacatcgtgcgcaatatccaggccagtgagagaggtgagcaggggcgcgtcccgggccccgggccct

SEQ ID NO: 322039 - DNA, 122 bp, Homo sapiens
cggcagcggcttctgggcttcccacgcggggtgtgacaccaacgggggacataatacaaacgaacgagggtaaagtccgtgtgcacacctgtgcatggccacatgcggatgtgcgtccaggc

SEQ ID NO: 322040 - DNA, 122 bp, Homo sapiens
cgaagggcggaccgggccagggcgagcgggtcacgtgcggccgggagaggcgccgcgggccgggagtgtgcaggaatgtagcaacttgcagcgaaaagtttccctgcgctgccggccgggcc

SEQ ID NO: 322041 - DNA, 122 bp, Homo sapiens
ccagggccaaatgtccacacggccccaggggagcaggcagggcctgggaggctcagaccccggttcgggccagaacatggaccccagggccagcaccacccggagccccgaggggctgccca

SEQ ID NO: 322042 - DNA, 122 bp, Homo sapiens
ccaggtgagagtcagggtagtgttcagactagcccacgctccggttctgagccgcgacggcggtctccgcacgcaacgaaatcaggcaggaccgaaccttgcgtcctccagtgcagcgagtt

SEQ ID NO: 322043 - DNA, 122 bp, Homo sapiens
ggccaacacagcgaaaccccgtctccaccaaaaaatccgaaaaccagtcaggcgtggtggcgcgcgcctgcaatggcaggcactgggcaggctgaggcaggagaatcaggcagggaggttgc

SEQ ID NO: 322044 - DNA, 122 bp, Homo sapiens
attttatatggcaaaaaaaaaaaaaaaaaaaaaaaaaaagagaaacgaaaccctgggagacgaatcatactgcaaatcatatccctgggtagcagggcagaaatacaggtaaacaaaataga

SEQ ID NO: 322045 - DNA, 122 bp, Homo sapiens
cagaaacacagctgctaaataggaactcgcagcttgagtgttatggcgctccagccccagcggcgttgcttatcgtggtggccacaccccgcacgtctgtgttgcccgtgtgagcctgtgct

SEQ ID NO: 322046 - DNA, 122 bp, Homo sapiens
gtggccgccgccaccgtaaggctaggccgcgagcttagtcctgggagccgcctccgtcgccgccgtcagagccgccctatcaggtgtgtttgcagccgaactggcagtgcccgcgggcggct

SEQ ID NO: 322047 - DNA, 122 bp, Homo sapiens
gggagccgtcgtgcccacctggctggcacacttgtttgcacccatctggaggctgatggtcgagcggtccatggggggcaatacgtggttcttggggtcatagagatgcctcctcgtgctgt

SEQ ID NO: 322048 - DNA, 122 bp, Homo sapiens
cttttttcaccaaaggaagcactgtcctttggtgacggtgggaccctgtgcttccaggagcggggctaagaggtgagagcaccctccacaccccaggatcctggcaggtggagatggaagca

SEQ ID NO: 322049 - DNA, 122 bp, Homo sapiens
cgcgctcggggagctgacaccttgtgtttctgcagggcgcctgcgatctggctgagatcccggcccagggccgcattccccacccgctgtccgcactccttcagccaggcttcctcctcctc

SEQ ID NO: 322050 - DNA, 122 bp, Homo sapiens
agcaatttagagattatacctaacacaaacacacagatatttgcatagtatgtgagcacacgtttaaaaaaatgtaattttcaccctagaaataagacagtagtgattcagcgtgagttgat

SEQ ID NO: 322051 - DNA, 122 bp, Homo sapiens
ttgtggcggtagaaggcgaatcggcccatgatgtagcggtagatgccactgagggtggcccgctgccccggtgagctctggatggccatagcaataagggcgatgtagctgtagggaggctt

SEQ ID NO: 322052 - DNA, 122 bp, Homo sapiens
gcccaggcctaaaccaggaaagcctgggaaactgggacccacaggtgggcatgaaagggccgcagcaggggctcccagcagtgtgtaagaccgggagctggtctggcaccactgccctggtc

SEQ ID NO: 322053 - DNA, 122 bp, Homo sapiens
gattcacttgcccaagtgttctgtcctgtcctctgaatccgcctccaagtcgcaagacgccgtgagctccaagtccacgcagagtccgccaaaggctcggccgctgatccgctccgcgaaga

SEQ ID NO: 322054 - DNA, 122 bp, Homo sapiens
tgacctcgtgatccgcccacctcagcctcccaaagtgttgggattacaggcgtgagccaccgcacccggtagtgtggtacactcttaaaatcatagttcctgctgtctgggagtttacatat

SEQ ID NO: 322055 - DNA, 122 bp, Homo sapiens
gaggggactttggtggggccttgggctcttggtcacatcctgccctgattcagaagatggcggggcaggaggtgtctgtgtctcagcagatgctggatttcacgtccacggccgcctggaaa

SEQ ID NO: 322056 - DNA, 122 bp, Homo sapiens
tcctacgaggtgtagcctgggaaagttgggggtgactgacggaaaggaggggtgaagctccgccctttccgctgctaggctgcgcccgagggtatttaaacccaccctggctggcctgtact

SEQ ID NO: 322057 - DNA, 122 bp, Homo sapiens
tgggggcgggtaggggcgggcaggggcggggcaggagccggggctgcgagctggccgcggcgcaaggaatgcggcctttggctggtcccgggccggcattccggccggcgcaggaatgtgag

SEQ ID NO: 322058 - DNA, 122 bp, Homo sapiens
gatttgaagtcctgggggtgcgtgtgcaacctctgtacaaactctaggccatttcacatccgggacttgaacatcctcggattttgttatcagagcggcgtcctggaaccaatttccctgag

SEQ ID NO: 322059 - DNA, 122 bp, Homo sapiens
ccgcctcccaggttcaagcgattcttgagcctcagcctcccaagtagctgggactacaggcgcgcaccaggatgcccagctaagatttttgtatttttagtaaaggcaggatttcaccatgt

SEQ ID NO: 322060 - DNA, 122 bp, Homo sapiens
ccaaagcccttaattgcacgcatctaagatggccgcccccgcccggtagcggggcggaaacgagcccctctagcttgctagccgagcccacactctttggcgaaggccgccgaacttccggc

SEQ ID NO: 322061 - DNA, 122 bp, Homo sapiens
cggccggaatcagtttttttcttttaggagccccgaacccaaagctctttgaaaagctgccgaagctccaaggttcctccgcttcctgcccgcaggcggaaccttagagcttcagccatgga

SEQ ID NO: 322062 - DNA, 122 bp, Homo sapiens
gcgccggaccttggcttgggcgcaggaatccgaggcagcctttctccttcgtgggcccagcggagagtccggaccgagataccatgccaggactctccggggtcctgtgagctgccgtcggg

SEQ ID NO: 322063 - DNA, 122 bp, Homo sapiens
gctgatgtgaagatgttctgaggcccccaagtagaatctgtggatcctctaaaggatttacgattctgtatcaatgatctgagagattccaaagaactgcaataataaagcaccctcagcaa

SEQ ID NO: 322064 - DNA, 122 bp, Homo sapiens
gaacggcctttctcggaccgtccactacattctcccctactctacgcttcaatcttctcccgtgaaaccttcacttgcttttctacaacgttgacctaaggcggaaagccgcgtgccagagt

SEQ ID NO: 322065 - DNA, 122 bp, Homo sapiens
ccctggcgggcgccttggccacaacaccaagcttctgaacactgctgtttgctagtcaatcggttagatgcagactggtttaattttgttgataaatcggttcgttgggggtggggacgggg

SEQ ID NO: 322066 - DNA, 122 bp, Homo sapiens
aatgccaggcctgagctgcaacgaactacagtgaaaaataaacacacgtctaagggagtccgctgctatgcacaggcacatccaccaagcagtgaaactcagctgcagaagagacaagcaac

SEQ ID NO: 322067 - DNA, 122 bp, Homo sapiens
gtcacccggacaggccgtgggggcgggcaggggggcggggccgggcctgaccacagcggccgagttcagtcctgctctccgcacgccaccttaggcccgcagccgtgccgggtgctcttcag

SEQ ID NO: 322068 - DNA, 122 bp, Homo sapiens
ctgtagtaaaagttatgagaatgcggtctccctgaaaacaccttgctgtcctgtactcaccgaatttcagagcagaggactctgactgacaggtgttccccgactcccagtggcgaaaggtc

SEQ ID NO: 322069 - DNA, 122 bp, Homo sapiens
ggggctgccgcgtccctcgaatcccccagccccctcccgcccccgcacgcggaccgccctcgcctccccaaccttgcctcccgccgctggtgccctgccgcgcctcggctcctgtcccctgg

SEQ ID NO: 322070 - DNA, 122 bp, Homo sapiens
acggctgcctccggtgggtaggtccgggacccagctggtttccgtcctgtggctcaggtgcgaggagagcctccctgggccacctggggaagtctgactgacgtgccagatcctcacagaac

SEQ ID NO: 322071 - DNA, 122 bp, Homo sapiens
tcgggacggagggcaggccgagggacctgtgctgggccaccggagggaggcactgagactcgggcccagggcctccgccgcactcacttgccctcctggcagtcatagagcacgatggagtc

SEQ ID NO: 322072 - DNA, 122 bp, Homo sapiens
gggccggctagccgccgttcgcccctgctttgcatattcatgaagtctagcgaggccggtcgcccaggctagccgtggacgggtcatgaattattcatgaggaaacctctggtcccgcccag

SEQ ID NO: 322073 - DNA, 122 bp, Homo sapiens
catgtgagagtctctggagagtggacacgcagctggggagagagcacgctccaacgctgccgtcggtttggtttaacagccacaagccgtcgtttattccgctacttccaattcctctacag

SEQ ID NO: 322074 - DNA, 122 bp, Homo sapiens
cggcgggcccgagtcccagtccaggagcccggctctagcggatggcgagggggtggcgagcgcgcttgggtgcccgccccgcagaggagcgtctggtccacagccggatctcctcggtcccc

SEQ ID NO: 322075 - DNA, 122 bp, Homo sapiens
ggcagcagggaggcaagcccctctcggctctaggtggccgcaggtgggcctctgactggccgtggggtgcaggcggcccgctggggcgggaaggcagaaactaggcgtggaacttgggggag

SEQ ID NO: 322076 - DNA, 122 bp, Homo sapiens
gaggacattagctggaaaaggcaagctgagtagaatatagccagagataccaagaaaaaacgtgagtggacaagtggggatagtagtctttctctgcatatcaccatcattgtcctggtctt

SEQ ID NO: 322077 - DNA, 122 bp, Homo sapiens
cttcgtgatcaatagctatcggccaggtaggggccacctggctgttacaagaggctgggccgttgcagatgcctcacgcaatgtcctattcccagtgcacgtctcagcctaggtgcgttgct

SEQ ID NO: 322078 - DNA, 122 bp, Homo sapiens
cctccagcacccccttcaagcacctcgctgcttcctgaagacttgccccggctgcgcccccgtgctgagggcctgcgggcctaaccttgccaccttggcacagctgccactccagagagatg

SEQ ID NO: 322079 - DNA, 122 bp, Homo sapiens
aaaatctaggaaaataatgttcattaggtcattgtttataaaattgaaaatgaggaaccacgtcagtgtccagccatagggggttgactgagcatggtaactgcccaagatgagcgaggtgt

SEQ ID NO: 322080 - DNA, 122 bp, Homo sapiens
ctcacactgctgagcctcactcccagcaccagacaaaagcactggaagcagctcgcagcacggctgtgacacaccaatcaccagtgccagactgtcctcccagctggccaagccctggccac

SEQ ID NO: 322081 - DNA, 122 bp, Homo sapiens
cgcggtgcttgaagggagtgttccgtcgtttccgttgccggctgtttgcagtggggaaaccgaggcagctcctgctccccctagttcttccgctcctgtgaggtggctgctgtttcttttcc

SEQ ID NO: 322082 - DNA, 122 bp, Homo sapiens
cggccagctgttgggacaaggaggctcttgttcctgccttctcccgtctggtgtgagagccgtgtctctcacaccagccagagcaagcccagacttgtcacataatcggtgcatctgggaag

SEQ ID NO: 322083 - DNA, 122 bp, Homo sapiens
ccaacctcaacaggccagaatgagataatactggattgaaacgtaccagcaggccaggcgcggtggctcacgcctgtaatcccagcactttgggaagctgaggcgagagggtcacaaggtca

SEQ ID NO: 322084 - DNA, 122 bp, Homo sapiens
ggtagagaaatcctgctttaccacgttaagtgtcgaaatcaagcatgactagattgacgtcgccaaatcaccgtctggaggccactccacgccaggagcagcagggcttttcacacctgata

SEQ ID NO: 322085 - DNA, 122 bp, Homo sapiens
aaaggcttagaccacacaagtccaaggctcaccaggccgcagaaagcctgccttgggaaccgggggtcattatccgccctattcagcggggcccggggaccctgggggccgagcgaggccag

SEQ ID NO: 322086 - DNA, 122 bp, Homo sapiens
gtctctccttcccttctaactggcagcagcccccttcacctcaggagcgggctttagatccgctctgccaggcagcttgctaacttctgtgtagctctctgaagcaggtagagaaatgtttt

SEQ ID NO: 322087 - DNA, 122 bp, Homo sapiens
tgtcctgtagaaggtctggcccctcctctggcctgagcattcctgctgtgcccatgggcacggtggcccctgcagaggcacgccctgtactctgcccatgggcgcggtggcccccgcagagg

SEQ ID NO: 322088 - DNA, 122 bp, Homo sapiens
aaaacttgaggctgtccttgcaaacggtcctcatggtgctgggggtggtgccaggcccggcgtttgcctggaacacagagcatgcgagaaggagcagaggacgtgggtgccagggaaggacc

SEQ ID NO: 322089 - DNA, 122 bp, Homo sapiens
cacacagtagatgctcaatgatttgctgaaggaataaatgactaggtgctcttatgaccacgctgtatgaaggtgagtaaggcttgattcctgcccacttggagctctgtgttccagaacca

SEQ ID NO: 322090 - DNA, 122 bp, Homo sapiens
cctgaacaggggcagaggcccatgctgaggaaggagggccggtggcgaggcccagccctgcgcagggccaggctccacacttcccctgccagcgaatccctccagagctcacccaagtccag

SEQ ID NO: 322091 - DNA, 122 bp, Homo sapiens
atgcctgggcgacagagtgagaccctgtcttaaaaataaataagtaaataaataatctatcgaggaagatccatctctcacagcattaactgctccagtcacttggtgctatccaaggacaa

SEQ ID NO: 322092 - DNA, 122 bp, Homo sapiens
agcaacttcgcggacttccggttcaagccggaagttgtggttaccaaggcgacgcaacgccgcccggccaggtgagcaaaactgatcttacctttggatgccggggctcccctcgagtccca

SEQ ID NO: 322093 - DNA, 122 bp, Homo sapiens
gacacagtgggattgcttggcctcaaactctttttacatttgtttccaacttcacaaggccgtgggctctatttcttctggctgcttatctaaagaactcacagcaattccatttcgggcct

SEQ ID NO: 322094 - DNA, 122 bp, Homo sapiens
gcactgagaaaatctaagaagtttttagtaaactgtagctggtatcagggatcagatcagcggacacgcccattccagcagtcaggggcctgctcggaccgtcgtgcacctccgagcgtttc

SEQ ID NO: 322095 - DNA, 122 bp, Homo sapiens
gccctctctgtagttattcttagagatgctggttatattggccgagggaagcttgctgatcggaaaacacagggctgagaaacctctggaaactcgttgcagctcggatctgaaggttgagt

SEQ ID NO: 322096 - DNA, 122 bp, Homo sapiens
gaatttggttcttcttgaggtccctgaaaatagaagcgagtcatgaaaggggggtgacaacgatatcagttcatacacatgggcttgaatacttcccatttacaaggcctcggaagacagca

SEQ ID NO: 322097 - DNA, 122 bp, Homo sapiens
gattgtctacattaatttatatttgggattcttgctaaatcaatattatagttatcagatcgtgttgcagattatgaaaccagaaaacaaatctatctagaccctgtgtgtagtggtataac

SEQ ID NO: 322098 - DNA, 122 bp, Homo sapiens
gaaaagagaaagtacaaggtgtgcttggggaacagcaaggaaaccagacagatgtgggggcgggtttgtaggggaactgctggatgtacctcattaatttgttcatttgttcagcacccaca

SEQ ID NO: 322099 - DNA, 122 bp, Homo sapiens
ccggggtcacgaactctgacctttcactgacaaaaacaataacaaacccccccttctccgcgaccccggcggcgcccccgggcccgtccccgccaccccgctcccacctcggcgtctcgtct

SEQ ID NO: 322100 - DNA, 122 bp, Homo sapiens
gcccttaaaagggacaggaattgctcactctgggagctcagttgttggaaacctgagtctcgcggaagcggaagctcccggccaaataaagcccttcctttaactcagtgtctaaggggttt

SEQ ID NO: 322101 - DNA, 122 bp, Homo sapiens
tattgctaagataaatctggtgtatgtcgtctgtgtgaagaccataaaaccacacttcaccgcacctgacatctgtgagagtcaaagactcaaagtgaatatgtttctgcttctaggaatga

SEQ ID NO: 322102 - DNA, 122 bp, Homo sapiens
ccccccttacttcttggcgtcatcaggcatctcggcgtgggcatcgtcatgtttggcccccgcggcagcctctgccgcagcctcctcctcctcctcgtcttccccctcctcctcgtcatcct

SEQ ID NO: 322103 - DNA, 122 bp, Homo sapiens
tgcgagccgtgtggacacccaggaaggcggcagggctggggtgcgggccagaggagaccccgcaggtgctcggtctccctcacctccacagcgggaggatcgggggcctggtgccgctctcc

SEQ ID NO: 322104 - DNA, 122 bp, Homo sapiens
caaaggagcggtagcgctccatttccgagttgtaatccacaaggctgttcagagccccctcgggcaagtggctttccttgggcaagcccggggcctccgggctcggcccgggctccacgcag

SEQ ID NO: 322105 - DNA, 122 bp, Homo sapiens
cggcgcgcccggggcccgggagcgcggggaggggtgaaagggcggggccggcttgcgtggcgcctgcgttctgcgtgtccgcagagcccggagagtccctgataatctaagactcatagcca

SEQ ID NO: 322106 - DNA, 122 bp, Homo sapiens
ttgggaggagggtcctggagggcgtgagcaggaggtagccccgccctgccccagtgctcacgtcattaaagaaggagcgtgtgctgatggcaacgccgaggctctgactccctgtgccctgc

SEQ ID NO: 322107 - DNA, 122 bp, Homo sapiens
ctgacgatgctgcttttaaaaagaaaaccccgttccctctctgatgactctcgtggcacccgggtggcagcaggggcttctccaccggagaaacagccacatcgactaaaagggaatgtgtg

SEQ ID NO: 322108 - DNA, 122 bp, Homo sapiens
ccactaagcaaacaacccatgtgctcttgctccactgtccaaacagggtttattgacaggcgtttcacggcaacgcatagcaaccccggcggctagggggcgggcctgtgggcgcggccggg

SEQ ID NO: 322109 - DNA, 122 bp, Homo sapiens
aagcaagcaaacacttaggaaactaagcacatggatgcagaccttcctttgagaacagtgcgtgaggaatcattaaaatcacaatctgaaaaaggctttgtactaggttaggagaggttagg

SEQ ID NO: 322110 - DNA, 122 bp, Homo sapiens
aaggagccaggcactgaaggacaaagcgttgttgactttcctcatctgtgtttcccagtgcggtccaattcacggttgtttccaagcgcctcctgggggagaaaacacatgagggtgcggtc

SEQ ID NO: 322111 - DNA, 122 bp, Homo sapiens
ctctcataaaaagggaggcagaactgcatcaggctctaaaacaacactcagctcacccctcgcgcaacaacccgggtccctagggatgcttgggttgccacccgccgctcgaagctggaggg

SEQ ID NO: 322112 - DNA, 122 bp, Homo sapiens
cggcctcctcatacttgtgcttgtcttcccacacggtctccagggtgcaggaggccttcccgctcctcatcttccggacacagcgataaaaagcaagcagagggcagagttgcaacacagcg

SEQ ID NO: 322113 - DNA, 122 bp, Homo sapiens
tgtaatttggctataaagtaaaattctgcctggtgaattccaatttcctattgacttttgcgtctcattagagactgtccctgtggctatggctgctccagtgatctttctttcctggaagt

SEQ ID NO: 322114 - DNA, 122 bp, Homo sapiens
gccctgcgggaaaggaagcggaagtgacgtagggctagcggtctgcggccctcggaaccccgagtcttttccacccgtcttcacctctagcggcagcggaggcgtggcccaggggcgcgatg

SEQ ID NO: 322115 - DNA, 122 bp, Homo sapiens
actctaatccttgagttcctaatttagaactcaggtctccctcccctgtagcttctcggccgctttcaaggttcgagttccctctcttggacttcccctgtcatttgtttccaagccccgcc

SEQ ID NO: 322116 - DNA, 122 bp, Homo sapiens
aggtacacttctcacatgatatgtgcaacaaaacctcagaaattaccactaaaaaacgtacgcatctaatcaaacaccacctgttcccaaataactattgaagtaattaaaaatatcagaat

SEQ ID NO: 322117 - DNA, 122 bp, Homo sapiens
atgtgaataagataaaaatttaaaagccagatcacagtattttcttcccatgaagctctccggttgtggaggagttttacccttaaatctaccctaatccttataatacgacttagttgtgc

SEQ ID NO: 322118 - DNA, 122 bp, Homo sapiens
agtcgcaggcaggtgctccgcaggttgaggttttaggatctggagcctctcacagtagcccgatggctctccataacccgatccagatttcccggggtagccctctacaggggggagacgcg

SEQ ID NO: 322119 - DNA, 122 bp, Homo sapiens
cagcctgggagatggagcaagactctgtttaacaaaacaaaacaaaaaacaggcccggtgcggtggctcacacctgtaatcccaacactttgggaggctgaggtgggtggatcacgaggtca

SEQ ID NO: 322120 - DNA, 122 bp, Homo sapiens
agggaacacagcactggaactgtggagtctggagactcaggagaataaaccggtgcttggcgtctccagagtggaggctcagtagaacacggaattggggccagtgtggggtctctactcac

SEQ ID NO: 322121 - DNA, 122 bp, Homo sapiens
cgagccggccatagccaccgaagccccaggagaagactcgcttctgggagtccaggaccacgtgtggttagcaccacaggccacgtctcacacaaccacgtttggtacaggcagaatctgtc

SEQ ID NO: 322122 - DNA, 122 bp, Homo sapiens
tgaccacagcctgtgaagtgcattgcagagctctgagaacctttcagggtggccacagcacgtgacgggctctgcagagctctgggaaccctgcggggtgaccacagcacgtgacgggctct

SEQ ID NO: 322123 - DNA, 122 bp, Homo sapiens
actccatccccttgctattgagaattactttcttgttctgaaatcagacattatcatgtacgttctccataggaaatattctgagatccatgcagaggttggcctgggtgaatgtgcctgta

SEQ ID NO: 322124 - DNA, 122 bp, Homo sapiens
acagcttgagttctctccattcagcgtcacgaaagcccattcgaaatggatatcagctgacgttggcctgcacgcgtttgccttcctcccctcactccgcttgtgcgcctctctttcggctg

SEQ ID NO: 322125 - DNA, 122 bp, Homo sapiens
cccaggcgcgtaggggtgacgccatccgggtctccgttcagcccaggcgcgtaagggtgacgccatccgggtctgcgttcagcgcaggcgcgtaagggtgacgccatccgggtctgcgttca

SEQ ID NO: 322126 - DNA, 122 bp, Homo sapiens
gaaataaaggggagtcatgcttaaaatgctacagcggtgtgaaacagcagagcaaagaagcgcccccagcttctgagagccctggcccgagtcccctcccccgttagaaacagggctttggg

SEQ ID NO: 322127 - DNA, 122 bp, Homo sapiens
gggcttcacgaaagccggtcagcaatcagttgggaacacaggaacagtggtgtgtgtgtgcgcatgcactcacatggtctttgttatagctgcctctgtaaatggagggaaaaaaaacaaaa

SEQ ID NO: 322128 - DNA, 122 bp, Homo sapiens
tgccatctaagccctcctctggggaagggaagctcctctggggaagggaaactggacccccgggaaaatttattctcccagggacgaacatccagacatttccctgtaggagcctcagtgtg

SEQ ID NO: 322129 - DNA, 122 bp, Homo sapiens
ttactatttaaatgcggatatactgtgaagaatgcaatagcatatgagattcataaaatacgacaggaaacgaatttccacagctaggcttatgatttagccagatagaacaggaaactaca

SEQ ID NO: 322130 - DNA, 122 bp, Homo sapiens
gccacaccagggccacctccaggaccacggccacggccacacccagcaagacccgcacctcgaccctgctgcccagcagccccacatcggccccaataaccacggtggtgaccatgggctgt

SEQ ID NO: 322131 - DNA, 122 bp, Homo sapiens
caaaatgcaagattgttgtaaaatggaattgtaggtacagttttccaaccttggagatggcgttgatttacttgtttttacaatgaggtttctccattgggcacttaggccatcagcttact

SEQ ID NO: 322132 - DNA, 122 bp, Homo sapiens
cccccatttcgaagattgatggaaagtttgaccaaccgcatctcagacttctgctgtctccgcctctctcgttggggattgacgatttttctagccaataggagacgtcgggtcggcgggtg

SEQ ID NO: 322133 - DNA, 122 bp, Homo sapiens
aggtttccacggggtggaagccactaaccagccagagtagggacatgtcaggtccacaaacgctccctggccctcgagtgcctgaaatcattcctgctcttgcccatcccactccaggctcc

SEQ ID NO: 322134 - DNA, 122 bp, Homo sapiens
caccttcccgtctggtttaacacagtgctgagtgcaccccgaggcactatagagccgcttcgaatgccgagccacagggcctgggtgcacttcctggctccaacatttactggccacgtgac

SEQ ID NO: 322135 - DNA, 122 bp, Homo sapiens
ctcattggttctcctctcacttctgctgtacacagacaaactttacagtaaggcattgaacgtgtccaagataaacagatttgtctaaacttgcaccaaaaagtaaaacagaatattgatct

SEQ ID NO: 322136 - DNA, 122 bp, Homo sapiens
caagtaactctctcttgttctctgatctccatggggtcacatttggtggccagcctgaaacgactgggaacctgaaatgttaagcagcagactctgtgttctaagtgtgccaagctcttagg

SEQ ID NO: 322137 - DNA, 122 bp, Homo sapiens
acccctcctcctcctcgtgcgctcctccttcctacagaaaaatgtgtttctaggcaacggcgggcggcggcgtcacttcctgccatttaaactcaggtccccacccctcgcagccccttctc

SEQ ID NO: 322138 - DNA, 122 bp, Homo sapiens
atcccaggagctcgcctggactggcctctctgcttaccttgctgcctgtccaggttgtggcgatggctttaaccagtgcagggactcatggtactagtggtggcgcctaagcagtctctcat

SEQ ID NO: 322139 - DNA, 122 bp, Homo sapiens
gctggtagctaggcatgcgggcggagagagcaggggagccgcccgctggtccagggcctccgaaccaggtctccacactgtggcttcattgttttgtttaggattctgaattcccagagcat

SEQ ID NO: 322140 - DNA, 122 bp, Homo sapiens
cacgaaacctcctgcgaaacatctggatggggactggtgtcccaacatctgggcaactaccgccaaggctggcttctagggaacgagtgcggaaatgcgtgcgggtgtgggagcgcaccact

SEQ ID NO: 322141 - DNA, 122 bp, Homo sapiens
cctactcgcgccgggccggggctgcgcccggggccgcgcgggggaggggcgcgcgcagtgcgcaggatccccaagcaccgccccccgcccgcgcacctgttcgtcccccggccgcgccacgc

SEQ ID NO: 322142 - DNA, 122 bp, Homo sapiens
gccgtccatgcacagagcgccttcccccacagccgagcagccgccgggcggaggggacagcgcccgccggaccctgcagcccagactcaagttagtgggcaaagggaggcagcggggagtgg

SEQ ID NO: 322143 - DNA, 122 bp, Homo sapiens
ctcattttgtcaagagagtctcatttagggagctcttttagtgtagtgggtcaagtgggtcggagcatgggctctggggacagaatgcctgagtttgcatcccaccaggcttgactttgaat

SEQ ID NO: 322144 - DNA, 122 bp, Homo sapiens
cccaaagtaaacacggaaaaattcattcaagaatttccttaaggcctaccgtgaagacgtcggaggcaagttaagacgttggggagcaggtaagagagaccagagttcagaaacagaccgat

SEQ ID NO: 322145 - DNA, 122 bp, Homo sapiens
agtctcccgtacccttgcgtcgcccaaatcttccctgttttacaccttttcttttctccacgctacgcttatatacctggcacctgagcactaccggtcaccagggacaggagagccataac

SEQ ID NO: 322146 - DNA, 122 bp, Homo sapiens
gctcccgcacctcgctgcacatcgcacctgagccccgccgcgaccgcatcgcgctcgctgcgacccattcagaccccccagaaacgccaagccgctcccgctctagccgagggctagaacaa

SEQ ID NO: 322147 - DNA, 122 bp, Homo sapiens
gggcagagaaaactcaaatattcccagttgttctggaaggcacttgccagcatactctgccgcctgttgctgctgaccattagcttctgactagtctgcatcagagagctaatgtggccaac

SEQ ID NO: 322148 - DNA, 122 bp, Homo sapiens
gggtaagatttgacaaggccagtaatgccgtgatctatcacagatggatccatccagacccgggggaaagactgatgtttaaaaagaaaaaaaaagaatgtagatgcctagttctaccaaga

SEQ ID NO: 322149 - DNA, 122 bp, Homo sapiens
cgcccgggaccctgtccacgcggcctccgcgctgcgccgcacctccccccgcaacccacccggcgtcagcttctccagaacctagatttaaatcgggaaactggctggacaccaggatgcaa

SEQ ID NO: 322150 - DNA, 122 bp, Homo sapiens
cggccgcggaaaggaacgggaactgggccgacgcgcgccgccgactcacaatcagggccgcgcgccggctgacgtcaccctgtgtcgaccagccccctgagcccggaaagaggcggtcgctc

SEQ ID NO: 322151 - DNA, 122 bp, Homo sapiens
gggggtgggagcggggacaggcaatgtaataaggtcactcaagtccaggcagggacaccccgacactctcgccctagatggcctcctacactggaaggaagatgccagtctcgcctcggata

SEQ ID NO: 322152 - DNA, 122 bp, Homo sapiens
caatgtaaaattattaccagctgcttaaaaaaggtcatttgtccacaccataagcagaaacggaggagacaagactataaactagaaccaaggctgacagcaacaggaagaaacagtccaga

SEQ ID NO: 322153 - DNA, 122 bp, Homo sapiens
tggcagctgtcacgccgctcgcggcctcgcccaatcgcgggccgccagaccagcgcgcggcgccccccgccccgcaccgaggtgggagccccgcccctagccccgccctctgcagactcttg

SEQ ID NO: 322154 - DNA, 122 bp, Homo sapiens
ttcagccagggtggggggcccggcttcgaagcccccagacttacctcccctcttctatcccgggccaggaaggcaataggagggctccctagtcaggcacatcccccgacctgtggcatcac

SEQ ID NO: 322155 - DNA, 122 bp, Homo sapiens
gcacagagaaaccagacctcacggccctactccccgcccctcaccgccctggagctgcctcgaagctgcacacggcagacaagcgggtgtccatgcacaacctggggcaggttctcacagga

SEQ ID NO: 322156 - DNA, 122 bp, Homo sapiens
taacggccggtggggactgcgatgcttggctgtggccggccgagatcctggaagatcggacgtgagctgtgcctctggggagatagggggaggggagctttcggagcaccaactgtgcgcca

SEQ ID NO: 322157 - DNA, 122 bp, Homo sapiens
ccgcggggccagcgggagaagaaagccagtgcgtctctgggcgcaggggccagtggggctcggaggcacaggcaccccgcgacactccaggttccccgacccacgtccctggcagccccgat

SEQ ID NO: 322158 - DNA, 122 bp, Homo sapiens
ggtgtctcctggctcagaccctgatgtggccctgttaccctggtgcccgacggaaataggcggccggcagcctgccagagtggggcagtccagccaagagcaagggtagggtggggtgagga

SEQ ID NO: 322159 - DNA, 122 bp, Homo sapiens
ttgctgacctgatcactacctgctatggagggcggaaccggaaagtggctgaggcctttgcgcgtacaggaaaggtgggccccgggagaagggagaacagaggggcggctctgtaggcatcc

SEQ ID NO: 322160 - DNA, 122 bp, Homo sapiens
gaattaagagtgtagggaagacaatctgatttccctttttaaaagatcagtggctgggcacggtggctcacgcctgtaatcccagcactttaggagtccaaggtgggcagatcacctgaggt

SEQ ID NO: 322161 - DNA, 122 bp, Homo sapiens
gtgtcctcttgggctgttttctcagggactagcaaactttgctcgggccctgtccacccacgttcccacaaatatcaatgccagaattgggccacacaagcctcccgtgctggtgcctgcgg

SEQ ID NO: 322162 - DNA, 122 bp, Homo sapiens
acccttataacagatcaatgtagatgctatttctagtttcccatttacagatcactgaggcgacttggcacagaaacagatctggctctgtcccacactcagctatttgtgccttacagccc

SEQ ID NO: 322163 - DNA, 122 bp, Homo sapiens
tgtgcactatagcctcaaaatccaggtctcaaaccacctgtggtatccagccaaagtcatcgaaaaagaagtcttgctgcattgcccaggctggagtgcagtggttattcacaggtgtgatt

SEQ ID NO: 322164 - DNA, 122 bp, Homo sapiens
taagtatttgggggagtttatcatggaagtagctgggcatgttcatattccttggtgtatcgattgccacgttgatctgtaagaatcgatttgctgagatctgtcagatccaagagttggtt

SEQ ID NO: 322165 - DNA, 122 bp, Homo sapiens
gatggcaggtggggcggtctgggtaccgggctgtaggtttctctgtgatgagctgcttaccggatcttcatccccagaatgtcagagttgaaagagacttggagaggccactttccacaaac

SEQ ID NO: 322166 - DNA, 122 bp, Homo sapiens
agtaacccagaaaaataaagatgcaggttctaaaaatccctgaatttagaaagattcatacgatgtgttttgaggcttatcatacttaatgccttgatagtagaccagtgcttttcaaactt

SEQ ID NO: 322167 - DNA, 122 bp, Homo sapiens
gcgttcgcgggtagctacgatgaggcggcgacagaccaggcacagggccccatcgccctccggaggctccaccaccaaataacgctgggtccactcgggccggaaaactagagcctcgtcga

SEQ ID NO: 322168 - DNA, 122 bp, Homo sapiens
gcgtcgctttcacactcggcggctgcggattgacgcctccgcctgttccccggaggagagcgagtgcaagagaaaaaacacttttattgaaacgatccaaccagcggcggcggagaaaagcg

SEQ ID NO: 322169 - DNA, 122 bp, Homo sapiens
gacatttcctaatctcaggccggggttaaagttctggtcctggtgagatgctggaagctgcggccgcagccgcaacccgtcccggaggtgtcctgtctcctgtcgccgccgccgccgccacc

SEQ ID NO: 322170 - DNA, 122 bp, Homo sapiens
agtacccctgccccgactccatactgcgctaaccaagtgggattctcctccttgcctgtgcgctgagccaccgcttaccccgcgtcccctcggacatgcagctctgcccatcagggccacag

SEQ ID NO: 322171 - DNA, 122 bp, Homo sapiens
tacacctcccgggacttccggccggaaaccaaggccccacgtgtccgggcctggtcctttcggggacctttggggaccgtccaggaataagcccaaagcgcacaacccgtctttcagaaaag

SEQ ID NO: 322172 - DNA, 122 bp, Homo sapiens
gttcttctccccagttaacccgcgaagtgagcgggaccctcctgcttgcaggatacggagcgccgcctccctcggttgtttacttctgtcaaaatggtcttcccgcgcgggactccaccaca

SEQ ID NO: 322173 - DNA, 122 bp, Homo sapiens
gctgctggaacccaggcaggtgggcccaatatagctcatcagaggcccttaaggggccagcgcccaatgcctcccccttcaccccagggtgccagtggccaggtgactgcaggggacgctcc

SEQ ID NO: 322174 - DNA, 122 bp, Homo sapiens
tgtgctcttccgctcctagctcatcttggtggccagcgacctgggccagccagtgccatacgagactatgcagccgctgcaggtggccctggaggacatcgatgacaacgaaccccttttcg

SEQ ID NO: 322175 - DNA, 122 bp, Homo sapiens
acccgctacttggactacattgcccagggagcttcccggcctatataagccacccggagccgctttaaagtgcagtaaccatgtggatgtgctgctgaagcgtttcctcaagctcgctgggg

SEQ ID NO: 322176 - DNA, 122 bp, Homo sapiens
tttaagattcccagggtccggcaaggccgcaggtgggtggaggaatgaatgagcaggctccgggagtgcgctgcagacccggagtgtaagtctccgcccttggttttaatccgtgtcagaaa

SEQ ID NO: 322177 - DNA, 122 bp, Homo sapiens
ctctgagctgagagactaggtgaatcagggcagctggagctcagctgggggcatcccaggcgggttggggagaggaaccccagacagagggcagagcaggtgtgaggacagagagaatgagc

SEQ ID NO: 322178 - DNA, 122 bp, Homo sapiens
gcgccgcgctcctgctcctatgcgccgcgccccgctccctgcgcccgggtgagtgcccgccggccgagccgcgcacccccaaccaaacctggctcctcgcgctttccaccgcggcctgaccc

SEQ ID NO: 322179 - DNA, 122 bp, Homo sapiens
cgcccctatccggcgcgggccgctgcggaaacgcagctctccacccccagctggctctcccggaccccctgggccccaccctcagcgctccccaccgctcggcgcccctgcgtctgcgctcc

SEQ ID NO: 322180 - DNA, 122 bp, Homo sapiens
ggaaccgagactgggcatagtcctagggaaggaaacccaccccacacagtggtgagaagacgtgggaccagcattctacatccacctcaggctgcccacagccacccgggactccccaggcc

SEQ ID NO: 322181 - DNA, 122 bp, Homo sapiens
ctgagcctccgccgaggccaccagcacgcgcccgcgcagccgcggagcctcccgcacccccgcctccctgcctcggtctgcgcatcctcgctccagcaccgcagcctcccccttcttcttgg

SEQ ID NO: 322182 - DNA, 122 bp, Homo sapiens
gctgcccgaggcccgacccgactcgagcgcggactccgggcaggcgcccgcggcccaggccgccgagacccacagcccgactcggcctccctcgactccccggcctgacctacccggtctcc

SEQ ID NO: 322183 - DNA, 122 bp, Homo sapiens
caccctcttgggctaccccaccagtgacaacacaggcaggggtggcctggcttcctttctcgtgttgttatcgggtagctgcctgctcagaacccacaaagcctgcccctcatcccaggcag

SEQ ID NO: 322184 - DNA, 122 bp, Homo sapiens
ggaggcccggccgggtccgctaggacagcggggccgctgggaagttgtgagagcggcgctcgggggcgcgcttgcgtgcacgagggcccgggccgcgagcagccgcggccgtcccggtcgcc

SEQ ID NO: 322185 - DNA, 122 bp, Homo sapiens
gtcctgaccaggaccgttgtgggatgttctcgttctcattcactccctgtgaacctcctgcggggagggtcccgtctgagagacagagcttcacaagtccctttctgctttatttcctgtct

SEQ ID NO: 322186 - DNA, 122 bp, Homo sapiens
caagggacagctggggataggtggccacacctcggatggtgcctgtgtgtgaccatcacacgcgctctgagccccgtggggtgcagcgtgcaggcaggtcacagggtgcctggctgattccc

SEQ ID NO: 322187 - DNA, 122 bp, Homo sapiens
caagctgctacgggaatgccggcaccgtggctgaaaaacagcacacgtggttagcgctgccggctggccttacccaggggaaaacgttcatgtacttctttctgggtcgtcctctccttcct

SEQ ID NO: 322188 - DNA, 122 bp, Homo sapiens
cgccggtaggcggcggagacgctgcgcgtgcgcgcagggcagacggtagagcggagacgacgctcccagactcctccggtctccccgggcagcatgaagaccgccgagaacatcagaggaac

SEQ ID NO: 322189 - DNA, 122 bp, Homo sapiens
cgcccccgcccccacgcctcctcaggtgctcagcctgaggccttcgtccaggagcgctgccgctgacccaggctcaggagctgggggcccctgcacagacgcccaggtctcgggacaggcgg

SEQ ID NO: 322190 - DNA, 122 bp, Homo sapiens
ccatggatagtgcccgtggcgtggtgtccatgtatgatcagcaaggccatggatagtgcacgtggtgcggtgaccgtgtgtgatcggtaaggccatgatagagcatgcagtgcggtgaccgt

SEQ ID NO: 322191 - DNA, 122 bp, Homo sapiens
gcgagaggacatcaagggggcacgtcgagggaagggcacaccgacagacggccatggatccgcaggacaaggcagagattggccggggcggtcagaggagagccgggctgccactgagcagc

SEQ ID NO: 322192 - DNA, 122 bp, Homo sapiens
gcacacgtgcacacatacaaaatgcaacacgtgtgcacacaccagccactctgcaacaaacgtgcacacatccacacaatctgcaacacgtgcacacacccgcaccgtctgtccctcagtga

SEQ ID NO: 322193 - DNA, 122 bp, Homo sapiens
aatgcctcaagtaagcatgcgcacttcagtaaacacgctgcgcatgaggcccctcccgagcgctggcaggccactgcgcatgcggcccctcccgagtgctggcaggccactgcgcatgcgga

SEQ ID NO: 322194 - DNA, 122 bp, Homo sapiens
aactctactcggtgccaggaaggcgtgtggacccaaagtctcaggccgcggtgctaggtccggaggagcagagtcgcgcgtggctgggggcaggtcgtaaacaaaccgacgggaggaggggg

SEQ ID NO: 322195 - DNA, 122 bp, Homo sapiens
cggttggagggagaaggctcaatccgaatggctggggcctcactgcggatcgccttcagccgccatcttgtttcttccgttaccggagcgcggtcacgtgagctgagcagcctacgagcctg

SEQ ID NO: 322196 - DNA, 122 bp, Homo sapiens
atgcgcgtccaggaggttctggcaggacgcactgcccctctgccccggccaaggaggatgcggatactgcccgcaaggcttcggcctttatggacccaagtcagccaactgggccgagtcct

SEQ ID NO: 322197 - DNA, 122 bp, Homo sapiens
ggggctgcggtagccacaaccctccggtagcggtagcgtaaccccgttcggtgatccagccgcacagcgcaacgggtacaaagaaccccactggctaaggccgacctaccagggcttggggg

SEQ ID NO: 322198 - DNA, 122 bp, Homo sapiens
cacggcggcttgctgcacccatcagcactctttcttagtagttgacagtacagatggtcacgatgctgggctgacctctgctggccaccaggttgcaaacgcgaatgctagtgtgtttcttc

SEQ ID NO: 322199 - DNA, 122 bp, Homo sapiens
atacgaggttccacagctggagggtgaacgccccctacacctcctgggcttaatcgtaaccggagcggggtaccctcaatttccccagcccacaggccccgcccccccccccgccctttgac

SEQ ID NO: 322200 - DNA, 122 bp, Homo sapiens
tctcggtccctaaggccatctgtctctggttcaaggaagtgcaggctgagttctaggtctcgttccagattatattctccagctcataacagagaaagaaaccacccaagagtataaccgaa

SEQ ID NO: 322201 - DNA, 122 bp, Homo sapiens
aggcccatgggcaaaacgtttcaaccgggcaaaactgaagcaatcaccagattatggagccgtatttctgtttctttaaagacaaacatttttgtgtgtgtggctccacccagcctgagctt

SEQ ID NO: 322202 - DNA, 122 bp, Homo sapiens
aaagcggcgtggagtcagcacgggagcccgtctttgagctttaaggtcttacccgctcaccgggaaggaggaggtggccatgtttaggagcagtagaaccctctgtcatccccggggagagg

SEQ ID NO: 322203 - DNA, 122 bp, Homo sapiens
ccagtcgggccatgggaagaatgccgtgtcctctgaactggggccaagagtgacaggtggcggcagtcccagctgcatggcccctggtgtaagagatcctctcctccgtccccgcctccact

SEQ ID NO: 322204 - DNA, 122 bp, Homo sapiens
ggaggcggtcggcggaggtgtctaccccgccggtgatggcgttgaacgccactggcttcccggccttccgtccgctgcctccgtccgattctgcgtctgcttgctgaggaggcggattaggg

SEQ ID NO: 322205 - DNA, 122 bp, Homo sapiens
aacatcagaatacatgttcttttaaagtataccccaaaacatttaccatgtgttctggggcgcatgttaggctggatcacaaatcaagtctcaagaatttcaaaagattgaaatcatataga

SEQ ID NO: 322206 - DNA, 122 bp, Homo sapiens
tagaagaggacgcttaaaaaaaaaaaaaacgggtaggctcgagccgctgcatcagcttcgcgctgggtctctcggtcccgcagccatgaggaggacgctgcccagactcactacccgccctc

SEQ ID NO: 322207 - DNA, 122 bp, Homo sapiens
ttaccagaagcgtccccgggggagggaccgcccctcagaccccggctcagcccccagggccgtcctcccagggcttcccacggtgcagtcagcagcaccggcctggcctggccccacctgtg

SEQ ID NO: 322208 - DNA, 122 bp, Homo sapiens
cagtgggggggggacaggggattccctgtgccctggttgtggcacagctcagtcagggctcggtccgtgctgggagggagctggatcgagcggcccggtgcgctgtgggttggccgcaccca

SEQ ID NO: 322209 - DNA, 122 bp, Homo sapiens
agcgactacaactcccagagggtatggcggccgcagcagtgggcagttgagtttccggggcgacccaggtcctccggcggaagcgggagcctctgtcggccgcggaagcctggagtgggcgg

SEQ ID NO: 322210 - DNA, 122 bp, Homo sapiens
cgacttcctcacctaaattccctccaggcccagtccttagaagctgtaaataaaatgtgccggaaagaaatcaggaccatcgtgggggattcctgagccttccttctgtttacttccttttt

SEQ ID NO: 322211 - DNA, 122 bp, Homo sapiens
gggagttaggagcctggggctccacctctgaccttgaaacaggctcttcccctctctgagcgctagtttattcatgtgcaaaatggaaagtggcatattattccagagatggaaaattggtt

SEQ ID NO: 322212 - DNA, 122 bp, Homo sapiens
ggacggaaaatctagccccgggcacttgccttggagtctgagtgatgcgcgtcgttggagcgcgaagccggtctccctagcctccgcccgacacagcgtctccaggggttttcctccttttc

SEQ ID NO: 322213 - DNA, 122 bp, Homo sapiens
cctgatagctgccggattttaccccaatcgtgtttctgcttccaggagctgtccgcgcgtcgcctctgttttatcactaaggttttaattgtgaataaacaaggaactggattcgaatgatt

SEQ ID NO: 322214 - DNA, 122 bp, Homo sapiens
tccaccactagatgacaaacttgcaacagcgtgcttccaacaggacgcccacgtttgacacgttcctgagacgctggagaaaaccgattgccagcccgggctgaaaggaaacttgagaaatc

SEQ ID NO: 322215 - DNA, 122 bp, Homo sapiens
tgtctgtgggacagagactagagaagtcacacgctctatttcccagcctcccttccaggtcgagtcatgtgactaagacccggccaatgagacggaagcttaagcgacctggcaccacccct

SEQ ID NO: 322216 - DNA, 122 bp, Homo sapiens
ctttttatgggtgaataatattccactgtatgggtagaccacggtgttgatccgttcctccgtcagtggatgctggggtggtttccacccttgggctaccgtcagtgacgctactgtggaca

SEQ ID NO: 322217 - DNA, 122 bp, Homo sapiens
gaaaagacgggccggtagggaggccgctggaaccgtacaaaggagaggagcagatggaaccgagagatactcaggaggcaatttggcagggccaataccaccacccagtggggggatggggg

SEQ ID NO: 322218 - DNA, 122 bp, Homo sapiens
tatatctataataattgtactcaggaaactcaaggtatgaggagagagattcccttccttcggggcttgtaggagacttcccacggaatcttctttgggaatgtctcccttttaagccctga

SEQ ID NO: 322219 - DNA, 122 bp, Homo sapiens
ggggcggggctgagcgtgtttacatccgccgggtgcgcggcttcgccgcccgaggtcgttcggctcgggtaccatcctccgcgccatggacaccagcgacctgttcgccagctgcaggaagg

SEQ ID NO: 322220 - DNA, 122 bp, Homo sapiens
ctgctctctatacatcctgttggttctgcttctctggagaaccctaatacagtcaggcaccgagacactgtcccacggcggaaggcacgcttcccctacccaccctaccctggagttctcac

SEQ ID NO: 322221 - DNA, 122 bp, Homo sapiens
attggttcccccttcgggaggcaggttcgttctgagcaacctctggtctgcactccaggacggatctctgacattagctggagcagacgtgtcccaagcacaaactcgctaactagagcctg

SEQ ID NO: 322222 - DNA, 122 bp, Homo sapiens
aaacacgtttaggatgagctagtaagagtggaaagtgcaggaggctcaatgaccacttgacggtacctcagcatactatccttaatgctgaaattcacattttagcttgtgattgtgcaatt

SEQ ID NO: 322223 - DNA, 122 bp, Homo sapiens
aatgatgtttattgtataaaagtaattatttggactttaaaaccactcaagaataaagttcgcatccagaaaaatcagtagcaacattacatctgttagttttgatggcaacttggggacag

SEQ ID NO: 322224 - DNA, 122 bp, Homo sapiens
aaatcctacccattttccagtatctggttaaaaaaccgtatccacagtggcatccctcgccgctctagctaaaactgaactttgcgttgaactcattagcatttattatttttgctgaggca

SEQ ID NO: 322225 - DNA, 122 bp, Homo sapiens
gtcactccaatgcactgtaaggctgcagagccacctcctcagacaaaattaagggttatccgctccacacacacacaactaaaaagggaaaaagccagtcgccaaggcactcttccctcatc

SEQ ID NO: 322226 - DNA, 122 bp, Homo sapiens
ggacgtcctcccgagggaggcgggaactcggttcgcgggcgcggagcggtcccggaccctcgaagccagttccttgcgtcagtgccgcggctctttaacccgaagggagattttttttttaa

SEQ ID NO: 322227 - DNA, 122 bp, Homo sapiens
gtccgcgggcgcgtcaggtagggacgatgggccgcgggcgcgtcaggtggggtctgggggcggccggcgggtgtggagggttcattcagggagctgcgggcgagtcgggtgggcacgggggc

SEQ ID NO: 322228 - DNA, 122 bp, Homo sapiens
caacacaaagagggttgtgaaaaagacgggtccattacagttaaacctgaggcatttccacgtgctgccccctctgctggcactggatactgcttttgcaggtggaagtaccagactcctgg

SEQ ID NO: 322229 - DNA, 122 bp, Homo sapiens
cctctcagccaaccattaccgtgttgagtgctaggtttcctcggacagcaggtggggtaacgctatacagcacagcggccccagccacagctcccaggagctgggctgccatatagcagaag

SEQ ID NO: 322230 - DNA, 122 bp, Homo sapiens
cttcccccaagacccgctgctgctcctcctcaggcaggctctggacaggaaagaggagcacggggctgcatgcctggcacccagactgcatggtgccctatctccaggggctcaccagggct

SEQ ID NO: 322231 - DNA, 122 bp, Homo sapiens
gcagaaggtggagaggttgcagtgagattgttaaggacatggcaggacactgtaaagtggcggtcggggttgagtttgcatacacatctggacaggttttgcatggggacaaaacaatggca

SEQ ID NO: 322232 - DNA, 122 bp, Homo sapiens
ttggggaactgacttcagctctggcctgccgaggcccccagcctactgggaagggggaatcgccagctacctactgcctgtccacccacctgagggtcccctgtctgttcataaaccccagg

SEQ ID NO: 322233 - DNA, 122 bp, Homo sapiens
attgcgtctggccctttatagatgttttctctagctgagacagccaattcgaataccctgcgctctccctagcttccttgtgcctctaggaactgcttctcccctgtttcgtgaccttcatc

SEQ ID NO: 322234 - DNA, 122 bp, Homo sapiens
tattattattatttttaaatcccccgcggaggagctctgggcaaatgaataccgaggcgccgctctagctggttaggcttgggatgcgataactcagtgccctcttgcagacttgcatagaa

SEQ ID NO: 322235 - DNA, 122 bp, Homo sapiens
cctcagttggaattggccttggcataagcatttcaaaattttatgctgaaattaattgtgcgtatataatatcatgcagagagtaattttcttggaaagtagcctttcttttgatgggttac

SEQ ID NO: 322236 - DNA, 122 bp, Homo sapiens
atggaaaagcttcctatgaccgtaagcatcctttagggcaaaaaccactcagagacgccacgtctctcccttgctgagagtctccagcacagctgacggcagaatgaaggtctgacccccgc

SEQ ID NO: 322237 - DNA, 122 bp, Homo sapiens
acacactatctgcggcggtgtgctgacaagccaattgaggggactccatcttacaaaacgcgcttcatgtcgccgccattccactgcctaacccggggagggcaggcacggcggggagcagt

SEQ ID NO: 322238 - DNA, 122 bp, Homo sapiens
cgcttctctggagagaagcccgaggaacgcagagctgctttgaattagcccagaaccgggcgggacgacctcagaaggcaaaacaggaggcgccccgtgcacatatggacccaggcaccgac

SEQ ID NO: 322239 - DNA, 122 bp, Homo sapiens
ttgtaatcatcacgctaagcccgaagagcacaaagcataaagagggttcgactcctcccacgtctgcgtttctgcgttctcgtttgcatcccagccccactttctgatggtggggatgtggg

SEQ ID NO: 322240 - DNA, 122 bp, Homo sapiens
caagcctgtcttagagcaaacttttcaccatgaggcccgggaagtaaaccctgcattcaacggaagcaagaagcctcagaaacaaatgggtgcctctaaataaagcattcctttacatttat

SEQ ID NO: 322241 - DNA, 122 bp, Homo sapiens
gaccgtaggcttaagagaaaaatcacacattcaggatacctaaatccaggggcagtctaacggatcggctatcctatttttttttcctttttgagacagggtcttgctctatcgtccaagct

SEQ ID NO: 322242 - DNA, 122 bp, Homo sapiens
caaaattctattatggcacatggtttcacagtttcaaatgaaatcacagctgtctcattacgcagcacagtccttggttttgcagaaagtatatttttcctttgttcaccaacccctcaagt

SEQ ID NO: 322243 - DNA, 122 bp, Homo sapiens
taagtatattagcaccttccatttgcaactgggagggtttcctcaggaattttattctgtcgggtattagatacaataataataggtggcaggccatactggagaatggagggcaccagtaa

SEQ ID NO: 322244 - DNA, 122 bp, Homo sapiens
ggaccgctccccaaaccctggtttctctctatcccaagctgcacattccacagtggaaagcgggagcggcgacccgaaggcagcgaagttctctcgggctcagctcccgaggccgggagcgc

SEQ ID NO: 322245 - DNA, 122 bp, Homo sapiens
tgaaaggggatccccaggactccggtccagatctggggtttctccctccttgctgttgatcgggagcgctgccgcaggtgtcccattttcattaaaatgcacatcagagcgcctactggagc

SEQ ID NO: 322246 - DNA, 122 bp, Homo sapiens
acggtctttcaagagcatcttagtaaatgctgcaggttgcacagagcatgcccatgtgcccgcccaaactacgggccacctccaccagagtcaaccgcccagcagaatgtgggcacccctcc

SEQ ID NO: 322247 - DNA, 122 bp, Homo sapiens
taccaataggcaccaagagctcgcgttctttcctccagtaaccagagccccgcccgctagcggtccgtcaacgaccgcaaagccccgcctcctacggcggcccgccaatcggctgcgcggcc

SEQ ID NO: 322248 - DNA, 122 bp, Homo sapiens
gataaatgaagacactcattacaagacttaggaagttgcagctggtttagctttcctgcgcgcccaggagacggagaaggaaaactacgactcccagagtgcttagagagaacacgcgcgtc

SEQ ID NO: 322249 - DNA, 122 bp, Homo sapiens
gaaaacaaactaattaaatgaccagaaaactgtacctggagagaatgaggtagatgttgccggatccgggaccgcggtctttgcttgcttcatgaaaaatcggctagtctccaaactcgcga

SEQ ID NO: 322250 - DNA, 122 bp, Homo sapiens
ggcgagaccctgaaactgaacctggaagcgctgtcttgagcctgagctggggcggccgcccgccgtaaatacccgaagagcggggcctcagtgtagcccgcagggccagcggcgccgccacc

SEQ ID NO: 322251 - DNA, 122 bp, Homo sapiens
gcggcggcgggaggaaagaccgggcttcgctccagtaccgcgggctcaaagcgccgccggcgcccctggccgccagcgaggtgactaacagcaactctgcagagcgaaggaagccccactcg

SEQ ID NO: 322252 - DNA, 122 bp, Homo sapiens
gaggcgcttcctctcagtcagcactgtccacgcttctcccctccagggcgtcccagcactcgcagcttccctggggcttcagagccccagtatgtctccaccctgacatactccagaacttc

SEQ ID NO: 322253 - DNA, 122 bp, Homo sapiens
gtcgctggaggaatgcttggagaagcacctgccgctccccgacttgcaggaagtgaagcgcgttctctatggcaaggaactcaggtccgcagccaagaggctaagctaatggggtcttgggg

SEQ ID NO: 322254 - DNA, 122 bp, Homo sapiens
ccgcgcagagccccacaccaccgtgaggatgggcttggagttcctcttggacccggggcgcggtcgctaagccagaagcggagtcgcgggcgcggggcggggcctggacccgggcctggacc

SEQ ID NO: 322255 - DNA, 122 bp, Homo sapiens
attgttgttagcgttttggtcacactgacattgttaaatcatagaaattgctgcctgtagcggcaagtgacatgacatcattcataaagaaatgggtataaacaggattgtcgcacagggag

SEQ ID NO: 322256 - DNA, 122 bp, Homo sapiens
gtcaatcacttaatctgctcccctgcactttccaactcccttgctgttcttgcttctgggcggtactgatgggtcacttacgggtccacacacggaggacccagcccatgatccccatctgc

SEQ ID NO: 322257 - DNA, 122 bp, Homo sapiens
ctgcttggcgataggcgattgtctcactgctcggcaataggcgatggtctcactgctcggcgattgtctcaccgcttggcaataggtgaaagtcccttcgtggtcgccaaaatgtgtccaga

SEQ ID NO: 322258 - DNA, 122 bp, Homo sapiens
agtctagatgagacggatgaatcctgaatcagggcagtggaagaggagatggagaacaggcgatggaattggaattttattcaggtcaggatttgttaaccatttgttccgttggttaacag

SEQ ID NO: 322259 - DNA, 122 bp, Homo sapiens
tagagctttgcatctcttggatatctttcccgggcgcagaagctgcggggcttagggagtcgccattgcgctggaaagtcctcccgcccacggagaccccagcaaactccgagtgtcacaca

SEQ ID NO: 322260 - DNA, 122 bp, Homo sapiens
gctggagcgagccctctgaggtcgtgggtgagtcccactccctgaggtctggaaagtggtcggtggaggtattcttagtgtgctgtgtgggtgctgggtttggccctgtagtccttggagtg

SEQ ID NO: 322261 - DNA, 122 bp, Homo sapiens
ccgcttgccgccgggctagcactgacgtgtctctcggcggagctgctgtgcagtggaacgcgctgggccgcgggcagcgtcgcctcacgcggagcagagctgagctgaagcgggacccggag

SEQ ID NO: 322262 - DNA, 122 bp, Homo sapiens
gccatgcaaagtgggtatcattatctaaattttatagatgttccaccccagaggtgcaaccgtggacgtgttatttacacaggacaagcatgtaaaatacacacacaaccattactcttaat

SEQ ID NO: 322263 - DNA, 122 bp, Homo sapiens
agcccacagtccttgaggcatgcaagtggccaagttgcggctcacacaggatggaagttacgccagccccacgggccggcagatagcagcccagcctgggtcccccacccttcggttactga

SEQ ID NO: 322264 - DNA, 122 bp, Homo sapiens
cccagaaccctgaatattttcgaccgggatttgaaaaggaaacagaagaactgggcagcccggcagcccgagccgaccaaatttgactacctgaaggaggaggtgagcccgcggggcggcgg

SEQ ID NO: 322265 - DNA, 122 bp, Homo sapiens
tgtgtgtgtgtatgtatgtgtgtgtgtttggcaggaaggctttccagagcctgaagaatgcgtaaacattatccaggtgcagggatatatgggatggggttggagaattgagaggatgtggc

SEQ ID NO: 322266 - DNA, 122 bp, Homo sapiens
aaaccctgacactgtgcagcactctttctggtcagaggtggggagggggctagcacttctcgttacgagaatagcagcgttcactctgcttgaaaagcagccacgctgggcaagtttcagag

SEQ ID NO: 322267 - DNA, 122 bp, Homo sapiens
acacgatggctgcctccgggctcagccaggggaagaggcgctgcagctgcccgcactggccgattaagtagcagttgaccacaatcgctaggacacccatggcctccatcaccttctgcagg

SEQ ID NO: 322268 - DNA, 122 bp, Homo sapiens
ctcagggtgggctgaggtgcggctccctggagaccccgcccgctagccgggagccagcggcgcagtgcgagttcagcccgctttcttcgcgctccgcgtcaaatctctccagctctgttctc

SEQ ID NO: 322269 - DNA, 122 bp, Homo sapiens
ggcccagcgatgtcgcacagggacctttaccaacatggtgtgtcccacagggacctttaccgacacggtgccctgaagcctggggttggtgtcaacacctctacattgtgccttacctctgc

SEQ ID NO: 322270 - DNA, 122 bp, Homo sapiens
ggacctcgcgcctccccgccgggctccgaccgcctgggttcggtgcgggacggcccaggccgccaggacccccaagcgcagctcagtctgcggggcacgacccagaggccagcagcagagga

SEQ ID NO: 322271 - DNA, 122 bp, Homo sapiens
aagcggctcctgcctcttcgtctactgtgagggacctcaggatgcagctcccatctggctcgagtgacaaggacagaggggaacagggcttctctgagcacctcagacagctcaggggacct

SEQ ID NO: 322272 - DNA, 122 bp, Homo sapiens
gttctcagccctagctggcaaggcggatagagaagaccggaagaggctgaaaagaggaagcggtgatttgctgcccgtatgcccgccagtaagaagtgccacacacctccgcttcggctcag

SEQ ID NO: 322273 - DNA, 122 bp, Homo sapiens
ccacgccctcgggcggccggttcttccttctctgattggccagggcccctgctcatcagtcgtgatgcacaaggtctcttaccgaggccccgccttcttccgagaggcccgaaaacaatttt

SEQ ID NO: 322274 - DNA, 122 bp, Homo sapiens
ttattccagccacatttctatgttaatgacaatgtgatggaggacttctaatatcatacacgccccactagagtttgggcaacactgcatttccatggttacgctgccacagacattaggcc

SEQ ID NO: 322275 - DNA, 122 bp, Homo sapiens
catgagcttgcaacctcccattttatgattgctttcgtcttcttccgcttcagccaatagcggagctgttccctgctccccgcccactgcgccccaccttcctgaaggtcgaggcacgcttt

SEQ ID NO: 322276 - DNA, 122 bp, Homo sapiens
aatcctcggcccctgcctacaagaagcatgggtctagtttagtagcactgccaactggaccgaccatttacacttctgtgtgaaatggggcagaggggggagaaaagagtgcctgagctcac

SEQ ID NO: 322277 - DNA, 122 bp, Homo sapiens
ggcatcgcggtgcccctcgggcccctacctggactaggcccacagccgggctctagggggcgcgcgatccacctccagaaggccggctgcgaaaatctacccagctactggcgacgtcaccg

SEQ ID NO: 322278 - DNA, 122 bp, Homo sapiens
cagaaactgctggatgcatccaaacgagccaaaaattttgtgagctccaagggttatccccgttactgcactgtcacgactctctcagatggctctgtggtcctaaacggaggccgttcccg

SEQ ID NO: 322279 - DNA, 122 bp, Homo sapiens
ttggctaagttcacagtaccttccacatcaggttgtggcaatgattacctgaggttaatacgataaaagcacatggtaagcactcctaaatgatagccaatataaagactcagttctcccaa

SEQ ID NO: 322280 - DNA, 122 bp, Homo sapiens
tggacctggggacacagcttagcaagtggcaaccggaacagtgccttggagtagcgagcacgctggacgcacagcacaccacgtgcagcgcgacgttgggtctgattcagggaattagggca

SEQ ID NO: 322281 - DNA, 122 bp, Homo sapiens
ggccgcgccgccgccctgcccggggcggagtaaacaagagacgcgcaagatttgacctggcgcgacccggctttctggccggggttccccctgagcaggtgactccgtgggaggggtggaaa

SEQ ID NO: 322282 - DNA, 122 bp, Homo sapiens
ccacccgcggagctgcggaagccagggccgggcaaaggacactctacgaggcacagcctccggcagggccacacttacaatgtagacaggaaaatagaggatttaaattcaaaaagtaatac

SEQ ID NO: 322283 - DNA, 122 bp, Homo sapiens
ctgtcccccgtcagagctgctggcaggcgctgctttccccttggtgcatttagtgggtgtcgggattcgggttggcagggaggaagatgtttgagacctggtttacctcagaccagggatac

SEQ ID NO: 322284 - DNA, 122 bp, Homo sapiens
gagtttgctcattcattcatctatttatttcttcaacaaatatttgttattcttaggccccgaggatgctgtggggacaagacaggtaaaggctctgtcctcttggcatttatgttctggag

SEQ ID NO: 322285 - DNA, 122 bp, Homo sapiens
acagggttgaggatagggttacagattaacagcatctcaaggctttcgggggacctgccccgataatcatgtaggttcttttctatttttcctaagcgtcggccggcttgagaaataaaggg

SEQ ID NO: 322286 - DNA, 122 bp, Homo sapiens
ccccagcctgcaaaagccgggtcctttacgccccctggctccgtatttgatttcggcgcgcgccatacctgagggcagctgtgattggttggaggtgagcgaagttcctatatgattggctg

SEQ ID NO: 322287 - DNA, 122 bp, Homo sapiens
gctgagtagcgggactgaaagctgtaacgcaaacagggctgtaatgcaccgcctgctcgtcggcttgcggccgacgagaaggagaaaagaactgcggctcttcggggaccccagacctaggg

SEQ ID NO: 322288 - DNA, 122 bp, Homo sapiens
tttgatattcctggatcatgtttaaaaacatactttgcataacatcaattgagtgtgaaacgtgaattaagagcttagaaagatctagctgagtacatttggggggaaaacatgcaattatt

SEQ ID NO: 322289 - DNA, 122 bp, Homo sapiens
ggagtctgacggtgagcccgaggactcaagcaccagctgagctccaccagccgcctgccccgcctgccccgcctgcctgtcccgccacactggctttaggacctgttgacacggaggggggt

SEQ ID NO: 322290 - DNA, 122 bp, Homo sapiens
ggcgggcgggtgatgtcacactcctctgtgacacgcgaggctcctcagttacttagccaacggcagaggcgggaagtgagaggagtctggggctggggctgccttccaggcccacggggcgg

SEQ ID NO: 322291 - DNA, 122 bp, Homo sapiens
gcctggggcgaggtgccaaaggttctctataaagtgcccggctcccggcccacggccactcgccctccagcttctgccctgcctgctgtgtgcggagccgtccagcgaccaccatggtgagg

SEQ ID NO: 322292 - DNA, 122 bp, Homo sapiens
gcgagcggggcctgcagttgcaacccgggccgcccgcagaggcaggcggggcccaggtggcgtggaccgcccgtcaccagctctgcctcgccagtctgagtccgacttattaactagcttcc

SEQ ID NO: 322293 - DNA, 122 bp, Homo sapiens
gcctgcccacgtgcagtcagcggcatccgcaaccctgccaggggccccgtgacacgcccccgctgcacagagcatgtgaccccagaggccaccctggccacttccagaaagctgtgggccct

SEQ ID NO: 322294 - DNA, 122 bp, Homo sapiens
agtcacaattatctctcacttgggtaacttcagtagtttcctaaccattctccctgcttccgatattatctcctctccactatcaaatctgtttcactactgaaaatgtcatggcctgagat

SEQ ID NO: 322295 - DNA, 122 bp, Homo sapiens
aaattaattttaatagcaggaattttcctggatctaatcatcaacaaactttccctctgccgggacacaatctatttccagatagctgagttcttccagtctccacggcaggtctagcctcc

SEQ ID NO: 322296 - DNA, 122 bp, Homo sapiens
ccactcgctgcgcgttcgagtggggcctccgctaaacatgcagattaaacaaggggcttccgataaggataattacaggaggctgcgcattgactttccgttactaaaggaagacccaaatc

SEQ ID NO: 322297 - DNA, 122 bp, Homo sapiens
cggttctcactcggggtctcccctggggttgcatccagatggaggcaggggtgacctcatcggaagacccagctggcgggacgtccaagatggcacagtcatatggcagctgttgacactgg

SEQ ID NO: 322298 - DNA, 122 bp, Homo sapiens
ggtgggaaagggaggagggactgcaaagacatccatatcctctgggctgggacagtgccccgggctaagtgaatgcttccagccacagagcctctttcccctaacccccgctgttttcaccc

SEQ ID NO: 322299 - DNA, 122 bp, Homo sapiens
cccttaccagagtcaaggctgtctgggcctggctccttgtgacatccatcgccatctctccgaggggctaagaggtagatgctttgggaggcagagatgctcctgcctgctgaggcctagca

SEQ ID NO: 322300 - DNA, 122 bp, Homo sapiens
aaatgtccacaccccttccccaccacccacaccctcgcccacgaggcctgagcctctggccgcaccaagccatccacgggcctgtagtaggcagccatggtgaagatgatcatgtacaggca

SEQ ID NO: 322301 - DNA, 122 bp, Homo sapiens
gaaaagacattttgctcccaagtatttcttcataaagctgaggccctgcatcttggaagacggttcccctgccacctactactaggtctctcctcctccccttagcctccccttctccccca

SEQ ID NO: 322302 - DNA, 122 bp, Homo sapiens
aaattactaaaggcatgggcccaaaccttaaagatctcacaaatcctcaaaggtgagagacgcataaacaaatcattcctatgcggtgagtgagttcagttcatttgtactggctggcaaag

SEQ ID NO: 322303 - DNA, 122 bp, Homo sapiens
ctcgtggtgcgccgtttttcaagcctgtcggaaaagcgcagtatgcgggtgggagtgacccgattttccaggtgccgtccgtcacccctttctttgactcagaaagggaactccctgacccc

SEQ ID NO: 322304 - DNA, 122 bp, Homo sapiens
cgaatgaactcacagccagttccagacgaaacgttccgtcattatttccagaatctcagccgctaggtttcgtcagctccttttagaaaaccctccacacgcttgtctcctgtagcattgct

SEQ ID NO: 322305 - DNA, 122 bp, Homo sapiens
catgcatttagtgggtgacagggtattcctcatccatcccttgctatgaacttgtagtatcgggttgtttgtcttctgatccccagcactgaggagatggggatgtgatgggaggagaggcc

SEQ ID NO: 322306 - DNA, 122 bp, Homo sapiens
cacccagactcgtgacccatgacccaaccgcttcttctgtcccactcctcccccaagaggcggactcagctgttgaggagtgtagtccacacccctgtgattgcatctccaaccaatcagca

SEQ ID NO: 322307 - DNA, 122 bp, Homo sapiens
cgggtccccagatagtgtccatccccgggtcggctacgcggaggtgacgtggtcccagatcgcggggcagtgggggaggcaggcttgtgcctcagttgtacactcccgtggggagaggtagg

SEQ ID NO: 322308 - DNA, 122 bp, Homo sapiens
cagcagtggctgcttggataatctagccgtccatccatctcagccttccaagtgctgaaacgtccttttcttgtgtgctcatgcccattagccaagctcgaagggacgcatggaggaagctc

SEQ ID NO: 322309 - DNA, 122 bp, Homo sapiens
aggtgtgtcaccttccccggcagaacataaatagcagggtgcttcacacccacttccagacgttgcttttggggaggcaggaagaaactgccagccagcacctcctgccagcttctgccagg

SEQ ID NO: 322310 - DNA, 122 bp, Homo sapiens
gaggggaaagggtgggaagggtggaaggagcagctgttccaaggcagcctgaggtggggccgggcataaccttgggtccattaccagcgttgcttgaatttcctcatccgtagtaactgagg

SEQ ID NO: 322311 - DNA, 122 bp, Homo sapiens
cacatctcccagggaagcaggaacgcagggccgggaaggagccgcagcagcttcagagtccgggggggtttccatagattaagaggaacgggctctccacagggctttatttcatcagtaaa

SEQ ID NO: 322312 - DNA, 122 bp, Homo sapiens
taagcccggcggactaagcccggcagtgtcggagtcaggtggagcatgctttaggaggggcgggctccaggcggggcctgggggggagagggcggtgattggtgggcgtggtctgggtaggg

SEQ ID NO: 322313 - DNA, 122 bp, Homo sapiens
acccccagcccgccccctcgggctcccggccggggccccatcatgttctccaggaagaaacgagagctcatgaaaaccccttccatctcgaaaaagaaccgcgcgggaagccccagcccgca

SEQ ID NO: 322314 - DNA, 122 bp, Homo sapiens
atagtgtaacccttagtgctttctctcaatccattgcctgttgtcagaaacttcattaatcgtggatggtgaggcccatgcactagaattatacagccagacagctgcttcccttgggctga

SEQ ID NO: 322315 - DNA, 122 bp, Homo sapiens
aatcaaatggcgccatctctagaggggtaatcacagtcgtttcgggcatttgtgaaatagcgtgtagaaactgcttccgtacaaactcgaagtgatcagcctatggagtggctgactgcaaa

SEQ ID NO: 322316 - DNA, 122 bp, Homo sapiens
tggccctatataagctccgagagaaccagctgcccaggatccaggcgggggacgccgtggcgcgctactttgggataaagcatgggcaggtagtgaagatcatccggcccagcgagatggca

SEQ ID NO: 322317 - DNA, 122 bp, Homo sapiens
atcctggtgtctacattttcccctttccctgcttgctctacacaggagtacttttctcaccgggtacttgtttggtgacctggagtgtgaggcagtgaatttcatgctgctttcagggccca

SEQ ID NO: 322318 - DNA, 122 bp, Homo sapiens
aggtacagaaatgaaaattacagttctcttctagttaagcttattgtgtttatctattcacgttagagagtatgttaattcaacccaaataatattttgttgaaattagcaaaaacatttta

SEQ ID NO: 322319 - DNA, 122 bp, Homo sapiens
tgctgtgaccctgggcaggtcccctcctgggaatccatttcctaatctgtgaaataagcacgactgttgctggtgtcacgagaacatggtcagtgccataaagcatgtggcgggtggacttc

SEQ ID NO: 322320 - DNA, 122 bp, Homo sapiens
taaaacatatttcgatgtggtgtgccaggtagaattttaatatattggtgtcattttatacgcacgaaggttgtgtggacctaagtgttaggtgctatgaactacaggtgctcaactgcaat

SEQ ID NO: 322321 - DNA, 122 bp, Homo sapiens
tgcagttcattttccagactcctaaatcctagtatacaggttagtgacctttttctgaaacgggcaagatagcaggcatttgaggctttgtgggcaaaagattatcccaactacttgtagca

SEQ ID NO: 322322 - DNA, 122 bp, Homo sapiens
ggtccacagcactcagcctctcccgggacctcgagactcatttccccatcacttctcgtccgtgtggttcccgcgtccatttccagagcgttaacatttgcaattgaaaaggcgctgggaga

SEQ ID NO: 322323 - DNA, 122 bp, Homo sapiens
ctcccaccattctgcctgccatatgcctgtccccttttcctccaaaccctattagggtaccggaagcagaacccctgggctgaggccctggccctgcccccggcccctgcccctgcccgccc

SEQ ID NO: 322324 - DNA, 122 bp, Homo sapiens
tttgagaagagcagcatttgaggcagcagcgttcgcctgctgaacggtgacagattggcgcggaggagaggggaggtgttaaaacaatggagccgggcgcgcgagcgctgctgcatgctaat

SEQ ID NO: 322325 - DNA, 122 bp, Homo sapiens
gcctcttgttatttgcccactccccttcatacttcatgccattggagcgctcgctaacgccgaagccgttgcgcttgtcgttcttccactcgcccatgtaggtttccgtggtggtggcgtcc

SEQ ID NO: 322326 - DNA, 122 bp, Homo sapiens
ggcctgacctctccacggggtcgacaggaacgtctctggatgccaagagtctcaaagggccgaccaggatgaagaaacccccggcgaagtccgtgggaagcaccacggcagcctagcctcag

SEQ ID NO: 322327 - DNA, 122 bp, Homo sapiens
tgtggggcacggggaggtgtgcagaccaggtgtgtggggtgcgggagcgaggcaggtgcgcgcggcaggtgcgcgggggcgagtcaggagcgcggggcacgtgtgtggggtgtggggcaggt

SEQ ID NO: 322328 - DNA, 122 bp, Homo sapiens
cgcacgccatcaaatccccgcgggaatagaattccgcaggtccagaaagccgggaaatcgcgagcggaggcggagttacctcggtgagcgtgaaggcggagcccgctccgaggggcgggctc

SEQ ID NO: 322329 - DNA, 122 bp, Homo sapiens
ccctggggtgattctggggcacagccagggtgcaaagcacagctccacagcccacaggcccgcagttctgctctctcacagtgacttgttctccctgcaggccatccagatcctcatcggcc

SEQ ID NO: 322330 - DNA, 122 bp, Homo sapiens
gaaaaagcatctctttcattcactccgcttggctggaccacagctggaagcaaactgccccgaaactgtcactggagctcccaagcacatgagacaggggtgactttaagagatctttgggc

SEQ ID NO: 322331 - DNA, 122 bp, Homo sapiens
tagaaataaattaataacaccccaactccacgtgctgcagtttatgttacgtctcagctgcggccagcccggcgcggggctgggtgcggaggggcgccccaggtccttccagcgccgcgcta

SEQ ID NO: 322332 - DNA, 122 bp, Homo sapiens
ctctgttccagagcccccagggcgcccaggcaaggccgccacctctcccacctgggaggacgcctcgagcaccgactccacagccacggccaccgctcctcggctcccgtgacaccggcgcg

SEQ ID NO: 322333 - DNA, 122 bp, Homo sapiens
agcaggaacagccggtccatggctgggctcccaggtcccacctgcctgtggcagagctgacgagggctgggaacagagggcttcaccagacctgtcccacccacggccctcagctaagcaac

SEQ ID NO: 322334 - DNA, 122 bp, Homo sapiens
acttgttcagtgtaacttaaggcattagtgtagatgtagaatgttcaagtcggcctcaggcgaacctacttgcttcctcacactgagcctcgggtggcttcattctttctttctggaccaca

SEQ ID NO: 322335 - DNA, 122 bp, Homo sapiens
gccagccctacccagaaatgcagggccacgactccaggcccctcaggctaggggccaccgcggcagctgtgggcagaaggggctcacacatgagagaaggcatggctcttgcagagaggcct

SEQ ID NO: 322336 - DNA, 122 bp, Homo sapiens
ggaaaagacggtgacaacattgacgaaagtccggcgacggaggccgcgaagagccagtttcgaccgtcgccgggcgcaagcgccctcgcgaggccgagctgcgccggaagtggcggcgactg

SEQ ID NO: 322337 - DNA, 122 bp, Homo sapiens
cgcactggcatgatccctcctgatcgtgcctttcgttgacagatcctggaagacggtggccgctagtctgagatgctgctgagcagagaagctgcagacagagcctgtcctccctggccccc

SEQ ID NO: 322338 - DNA, 122 bp, Homo sapiens
aggatccagcaaaccgtttcccaaagcctggaagcaaaagaatagctgagccagagcgaacgtgagtgtgaaacctctttaagacaccgttgggctgcttggttctgacattctggactgca

SEQ ID NO: 322339 - DNA, 122 bp, Homo sapiens
gcatctaagccaatcagaaggagccaggtacggcgaccccaggagagagcgtgtgacgcacgcgccggaaaaagaggttacggggcgccggtgggacaaacgcagccagacgccggacttgt

SEQ ID NO: 322340 - DNA, 122 bp, Homo sapiens
gcattccaggagacagagaatgtgaccaggatgcagcagtgtcatctgaacccctggcttcgttcagtgctacttcacttgccagccctccactcttcttgccttttagtgattaggtattt

SEQ ID NO: 322341 - DNA, 122 bp, Homo sapiens
atactgattagcagtcgctcctcagtcccacctccccacagctgctgaaagccaccaatccgctatgcatctcttcagattggcctgttctggaaatttcgtataaaaggacagtacactat

SEQ ID NO: 322342 - DNA, 122 bp, Homo sapiens
tgctgagccctggggagaggtggcgcgtgctgagaaggcgaccacagcagggaagggcgccgcccggggaagcccaggggagagcaggctccacgcttgggttggtcgagtccttactgtct

SEQ ID NO: 322343 - DNA, 122 bp, Homo sapiens
ggaggactccaggcctggggcattaaccgtcctggggacccctttggcctgaggagcctgcgacctgggcccagctcggggccggctccggaccgcagctcctgggcgctgaggcgggaggg

SEQ ID NO: 322344 - DNA, 122 bp, Homo sapiens
agcaaaatattggcgctgaagtacagtaggctatagcaggggttctgaaactgtaaaatgcgtgtaatgacctggtcgtcgtggtaaatgcacattctgattcagtaagtctgggctagggt

SEQ ID NO: 322345 - DNA, 122 bp, Homo sapiens
gctggcgcggatgccgccgggtgcccgccgctcgcccacgcgcggcgcgagggttcccggcgggtgacaaagaggaacacaccctctgcccaagttagatttgtgtctctctttactgtctg

SEQ ID NO: 322346 - DNA, 122 bp, Homo sapiens
cacaactatgtcctgagaggctagcacaggaaaaatgctgttctgggaggcctgaggcagcgtagcacgtggtgaagactcccaggcctggcttgatcttggctcggatccttcctggttga

SEQ ID NO: 322347 - DNA, 122 bp, Homo sapiens
cccccagcccagctaatgggaaccagatggcaggatgtttagtcagcgcctggggagcggcgcaaacaggggaaatgggtagggggccaggattccagaatccatccccaggcagggggagg

SEQ ID NO: 322348 - DNA, 122 bp, Homo sapiens
cccatgtcaacaggggtttagacacctgctcagctccttgccaccccctcaggcctgccccgcattccggcacatctcggcttccaaggggctttccccacttggctggagtctgggcctcc

SEQ ID NO: 322349 - DNA, 122 bp, Homo sapiens
gagggagcaaagctgtgcatggtagcttgaatcagaaaaatgactaataagctggaatgacgtactgaaactattaagatttaatggctcagatttaattttaagatttgaaatttaatgga

SEQ ID NO: 322350 - DNA, 122 bp, Homo sapiens
agcttggcagatgagcgaacttagccagcacacccccggccgtgaagcagggaggtgaagcggggagagcaacgagccccacccgggtcttgccagctggacgttcttgtggggcagcgttg

SEQ ID NO: 322351 - DNA, 122 bp, Homo sapiens
gaggggaaggcgggggaggcgccgagggtggaggccaagcgcggcgcagccagagaggggcggctgaaggttgcatctgctggaaggaggcttttcggctgcttggtaacgggctgccagaa

SEQ ID NO: 322352 - DNA, 122 bp, Homo sapiens
ccgtctgtacaacaacaacaacaacaacaacaacaacaaaattactcaggcttagtggcgcgcgcctgtagactcaaatgtagtctcagatgcccgggaggctgaggctggaggatcacttg

SEQ ID NO: 322353 - DNA, 122 bp, Homo sapiens
ttagcgtctgcagccttgaatcgggaggcaggttgggcgcaggcttctcgtgcgcaccagcgagcacccgggccaagcgtggaggctctgcgggctgggggtccggcccacaccatcagcct

SEQ ID NO: 322354 - DNA, 122 bp, Homo sapiens
ttttcctttcactttcggtttaaaacatgctatatgtactgtatgtcctgtagcccagtgcggctccacagcatggaatctgatgtatgatatgatagaatgtggcactaaatgcagtttca

SEQ ID NO: 322355 - DNA, 122 bp, Homo sapiens
tagtccactcgcttatctcagtctcctgtcctctgcagagtccggtcttttccttttcaccggagccgggggctggagatgaggctcgaggcgggggctccccgacttccaaaacgcagacg

SEQ ID NO: 322356 - DNA, 122 bp, Homo sapiens
agccacgcactcacctcggcggctccaccaccggctctgtgccgccgccgccgccgccgccgccgaccacggtgacagctccctgagcgcccgcacttccggggtcaaactgcgattccgca

SEQ ID NO: 322357 - DNA, 122 bp, Homo sapiens
tctttgaccatcccaacagccaggcacttctgaaatcggcagtactgacagcgattccggcgacgcttgtccactgggcagtttttatttgctaaacacacgtattttgcatttttttgcac

SEQ ID NO: 322358 - DNA, 122 bp, Homo sapiens
gccaaggcggcgcccctgctgcggccagggggctatgaaaggggcttggagcccctggcccgccgagcctcggacacgctctcggccgaggtgcggactcgggtggggtatgtgcgccagga

SEQ ID NO: 322359 - DNA, 122 bp, Homo sapiens
tgctgagaccctattcccaaacaaggttcccttcctaggtattgggtgttaggacttcaacgtatcctttcggaggacacagcttaacccctaacaggaaacaactaatataaaccctctct

SEQ ID NO: 322360 - DNA, 122 bp, Homo sapiens
ttgagctggggccggggctggggccaagcaggtcaggtcagaagtgggaagggtccctcccgctttctcaggcccccacacctgctgcaggtgcttcaagccttcatcatcctccagatctc

SEQ ID NO: 322361 - DNA, 122 bp, Homo sapiens
cagtgaaagggtgttagaaaggtcttactacaggatttgggtttgtgttcagtgattttgcgaggaggattcaagaagtggagctttgtcccagattacatattgtcaataagatgtggtta

SEQ ID NO: 322362 - DNA, 122 bp, Homo sapiens
atctgtggtggcaatggggacaggtgggagcctctagtttactttttccctgtaagaagtcgtctccctgtatttgatgtaattctggtggaggagacagtgtgtagcagaggcagagcgcc

SEQ ID NO: 322363 - DNA, 122 bp, Homo sapiens
tcgggtctcggggtctggcagcagcatggcggactacctgatcaccagcagcaccggctacgtgcccagggatgggctcactgtgccccagctcttcgtcggcgctgacggcctcacccaca

SEQ ID NO: 322364 - DNA, 122 bp, Homo sapiens
aaaacatgcaaacaaaattcaccattcccagacttacagatcctgttgttgcctgtgttccgtgactcagtccaccaactgtctacttacttatgagcaaacacatgacatgcaaagtcact

SEQ ID NO: 322365 - DNA, 122 bp, Homo sapiens
agcccaccctcccttgcccgcaccgcgggacctcacagccggtggggcgggggagtcccacgagggctgctagggaggggttgctgattgccccaccgcccctgattcccccagccaagcct

SEQ ID NO: 322366 - DNA, 122 bp, Homo sapiens
gagctcctgctagaaaatcttccctcgtggaaagacaggcaagaacgaggagctaaggagcgagaaatagagtccctggcattttgctgatggcaacttaagaaaatgggaatgagtcagtc

SEQ ID NO: 322367 - DNA, 122 bp, Homo sapiens
cactgtaggggctcttaagtgagtcctcaacttccatggcttcagttgaatggacttctccgtggaggcagggctaggaggatgtttatccaggggtcctacagcgaccacctagaaggatg

SEQ ID NO: 322368 - DNA, 122 bp, Homo sapiens
cgcaggagccgagtcaggctctctccactgcctgcccgccaccgtgcaagctctggccggcgctgcccacagtccccatggtgggcagcccccgcggcggggacccctgatcggcagcggca

SEQ ID NO: 322369 - DNA, 122 bp, Homo sapiens
gggcagcctctccagccaactgggagctcaggggtaccggctcttcacttgccactctgacggtctggcacacctctgtggtgatcctcagtgttttcttcccagctggctgctttggggct

SEQ ID NO: 322370 - DNA, 122 bp, Homo sapiens
gacggtctgggccacttacaggttccaaggagagtgctgcaaggagttgcagccatggcccgactagctggccctgccggcatctattcagcacacattaaatgataaaggctttgagtcaa

SEQ ID NO: 322371 - DNA, 122 bp, Homo sapiens
tgtgctccctcaggcttctcactttgggcaaaggacacagggcatgagggcctctccctgcggtctggaccaagctgacctgggtctttaccagtcaggaaaataaaataacttttatctga

SEQ ID NO: 322372 - DNA, 122 bp, Homo sapiens
aaaggaggccagccatgcggcgtgggagaaggaagcgcaacctcatgatgcttttggatgcgggtaaaataaaccccaactcaggttgacttaaactgtagggaaactggtgatctattgcc

SEQ ID NO: 322373 - DNA, 122 bp, Homo sapiens
tgaccttgtggtctgcccgcctcagcctcccaaagtgctgggattacaggcgtgagccaccgcgtcaggccacatctgtggaatttcaaggagacactgagttcacctaggccaacattgag

SEQ ID NO: 322374 - DNA, 122 bp, Homo sapiens
caaactgtctgaggggtttatataaggttttcagattctgatacaggcttgcatctgcatcgtttttagtctgacaaagagaaacactgctttaggaagtgggtcatgtgggtgtataagtg

SEQ ID NO: 322375 - DNA, 122 bp, Homo sapiens
tgctttggatgaattggccttactgtggatgccaatatgtcgggcagtcagcgcagccttcggtgctcttcggctgtgacaccaccgtcaaagttctgctaggccgtctctgacacgtgggc

SEQ ID NO: 322376 - DNA, 122 bp, Homo sapiens
gtggaaagaaaagaatggctcgagagggttgcccggaccctgcgcttcccgtccaccgcgcgcttccccaggcagcccctggggtcagggggcattctgctcttgcgctagacccacgtgct

SEQ ID NO: 322377 - DNA, 122 bp, Homo sapiens
tattctacttccttgggtgtattatggtttggtttctcatctactgactaagttttaggacggagtgtttcttccgtgttttgtaatttttgactgtgagttcgtctttagtagaattccag

SEQ ID NO: 322378 - DNA, 122 bp, Homo sapiens
ctgtgtgttggtagggaagcataatcaaagttcaagtcattttgagatctacccttcccacgaggtccttttgcatctcttttgtgtgtgtacgcagcctcagggtggccatgagtatgtgg

SEQ ID NO: 322379 - DNA, 122 bp, Homo sapiens
agtgatgttagactttcccaaagagcacatcttgtttgtctccggggagatggacttgaccgagagataacctagccttaccctcactctgttgtgggccctgtaaaaccctacagctggat

SEQ ID NO: 322380 - DNA, 122 bp, Homo sapiens
aattccagttggtggttgttttcatctgcttcaagcctagcccttgggtacagatgcagccgtgtttctgggtaatgtttcattcttggtaggaagggctgtttccttctcatgaagtgatt

SEQ ID NO: 322381 - DNA, 122 bp, Homo sapiens
agatgacaagtttgaaagcctttcaagagctctgttcacaagttatcagaggaatgaaggcgacatttcagagtcctttaattatgtcagatgatgtgataaggaaaataatatcctaactg

SEQ ID NO: 322382 - DNA, 122 bp, Homo sapiens
ctcaaggccttcaaggatcccggctacttccgtaagcacctggctgcccaccagggcggccggcccttccgctgctcctcctgcggcgagggcttcgccaacacctacggcctcaagaaaca

SEQ ID NO: 322383 - DNA, 122 bp, Homo sapiens
gtgagggctgtacgatctccaaggaatttgggagcaggggtcccgcttttctccgccgggcgcccccagccagctggttgccgagcccacgccccatctgcacaccaggacccggatgtgca

SEQ ID NO: 322384 - DNA, 122 bp, Homo sapiens
cccagccctgccctgccctgccctgcccccgagaggacaaaaaacctggcagagatgttccgatgaggatgctccttggacccagccccggggcagccctggctggacactggattacccct

SEQ ID NO: 322385 - DNA, 122 bp, Homo sapiens
aaacaaaagaactcagccaagtgtaaaagccctttctgatcccaggtcttagtgagccaccggcggggctgggattcgaacccagtggaatcagaaccgtgcaggtcccataacccacctag

SEQ ID NO: 322386 - DNA, 122 bp, Homo sapiens
ggcctcctgggtttacggtgtcactgcggccagggctgggggaacaggacgtctagaagacggtgtgaggtgatggacgaagctggaaactaggatgcctgggttcccgggaagggctgagt

SEQ ID NO: 322387 - DNA, 122 bp, Homo sapiens
tctggtgtctgtgaaaggaaccggggggacatcgatccgtttcaaacacacgcctgtgtccgtgaggagtccgagaggcagagctggagcgtcgcccggaagctgccctctgtggccatgag

SEQ ID NO: 322388 - DNA, 122 bp, Homo sapiens
gtatcttcctcgcggtggacatcttgtcggctcttaggtggaaccatcggagcagaagctcggggttgctgggcggttccgaggtgacggaagcgggagggtgcgggagaagtcgctgttcg

SEQ ID NO: 322389 - DNA, 122 bp, Homo sapiens
gcaggccgccccgccccccacggccccaggctcttggacggcgaagaggtctgggcgtagcggtgacgaatcctaagacgggatctccactactgcggccacacacttttctcccaaatgct

SEQ ID NO: 322390 - DNA, 122 bp, Homo sapiens
attccccgattccacttgagaagccccgggcgtcgaggcacggcaggaaatttaccacgacgcctcccactggctcaagggtctcccaggtgctgtcgattttgcaaagggtccgtctctac

SEQ ID NO: 322391 - DNA, 122 bp, Homo sapiens
ccttggtcccgacggccctgggaaatgtagtccagagcctggaacactgcagaaatgccccggggggatggtgcgatggttttcagtaggagctcgctgcgtgggcctctgacctatgtggc

SEQ ID NO: 322392 - DNA, 122 bp, Homo sapiens
aaaggagacggggcgctgcgccaagttatcaaggccgcgatcaaagtcggaccaaggcagcgagtcgacagcaggtttccagaagtgccctaacaggactgactagcagccaggaggcgcag

SEQ ID NO: 322393 - DNA, 122 bp, Homo sapiens
ctgccaggaaaggagagtttgaaactggatttgaaaaaggtggacagacaagagaacatgcgatgttggcaaaaacggcaggggtaaaacatttaatagtgcttattaataagatggatgat

SEQ ID NO: 322394 - DNA, 122 bp, Homo sapiens
gcgggctcggtgctgatggacggtgctggtggccagtggagaggcgctggccgcacttcccgtcggggagagagtgtaatatggcgaagacctacgattacctgttcaagctgctgctgatc

SEQ ID NO: 322395 - DNA, 122 bp, Homo sapiens
tgaaggtgaacttggaggcactcatcacttctatgatgttgaaggcggcccagctgatgtcgtatcccaacatctgtaactgttaagggacgcacaggaaattgcactcacaagccaaagca

SEQ ID NO: 322396 - DNA, 122 bp, Homo sapiens
catcccgcgcccgatcggccgccgcgtcagcaccacggacagctcctggagcagccccagcggggccctggcagcagggctcacacaccccagtcgccccacaagcatctggggacacaagg

SEQ ID NO: 322397 - DNA, 122 bp, Homo sapiens
catctcgaccctgctctggtcgcccagcgccgctccgagaagccggcagcagagtacccgcggtcgcgccctcgctgcttaacaaaggccgccccgctcggcccgccccctcatgaatagtt

SEQ ID NO: 322398 - DNA, 122 bp, Homo sapiens
ggaggagctggaggatctggtgcacttctccgtgtctgagttgcctagtcgcggctacggcgtcatggaggagatccggcggcagggcaagctgtgcgacgtgaccctcaaggtaccgcgga

SEQ ID NO: 322399 - DNA, 122 bp, Homo sapiens
ttctgagctttaatcctctgtgccagataatttcagactcaaaccttttctagtcctctgcgattcttctcagccatcaggcactgcctacaatacgtaagaggcagcaaaagatacttgga

SEQ ID NO: 322400 - DNA, 122 bp, Homo sapiens
tatatctgctctcaccactcatccaacatggtattgaaagttctagccactttgtggtagcgggcgcctgtagtcccagctacttgggaggctgaggcaggagaatggcgtgaacctgggag

SEQ ID NO: 322401 - DNA, 122 bp, Homo sapiens
ttgtagcctggctcttctgagagctttacaaagtttttctcattttctgattaccactggcgtattgagctgccagtagaaatgtattttctccctggtgcatttctccctcctccccacac

SEQ ID NO: 322402 - DNA, 122 bp, Homo sapiens
gcgtttcccagactttaatgtgcacgggcttcacctgggaattttgtttaaatggaaattcggattcagtaggtgtgggatggggcctgagattctgcatttctgacgagctcccaggtccg

SEQ ID NO: 322403 - DNA, 122 bp, Homo sapiens
aggtcacctacacgccgcccgaggtcagagtgcagggaggattttctgccctgggggtctcggtgtccccagtgggaaggggggctggacactgagcccagtgtttcattttttaaatggaa

SEQ ID NO: 322404 - DNA, 122 bp, Homo sapiens
agagagctggaggggggtcatttgaagaccagcgcaggcgggggcgggagcgagcgctgacgtcagtcaggctaagctgggccaggggctctgaggtcacggcccagccgggcagctccacc

SEQ ID NO: 322405 - DNA, 122 bp, Homo sapiens
tgggttttcaggttgcccagccagggggccggcgggacctaccgcggactcgcgcatttacgttcgcaagaagtgaatcaccaaacgtgcccacggctaaaactctcgtgcggtgcgctcgg

SEQ ID NO: 322406 - DNA, 122 bp, Homo sapiens
tcactttcccgggagggatgtaaagctttgggctttggggaagggtgcctttgtctctcacggaaaaaccccataagcaaaacggtcgggccatggagactcaggaggccgttgactcaggc

SEQ ID NO: 322407 - DNA, 122 bp, Homo sapiens
cctgcgaggtctgcagccctgtccgctaagggtgactcagagactgccagtggcaggcaacggccggcgatagcaacaggcagccatgacaacagcaggccacgatgacatcacacagccat

SEQ ID NO: 322408 - DNA, 122 bp, Homo sapiens
gatgcccagactcagaggcctgcctccagccctgcctgcctggacagcaggcctgagagccggacatgcttccgtgtggccgtcacatccccagagttgcacccgcgcaggccgtgtgtgca

SEQ ID NO: 322409 - DNA, 122 bp, Homo sapiens
ggcagaagagccgtcctgctgtacccgcgcgcccagggcgctccgcggggaccgcgcactcgggaagctgtgctgtgctcaacacccccctgtgcctcccagatcaccagggatcgtctctt

SEQ ID NO: 322410 - DNA, 122 bp, Homo sapiens
ttccaaagactctccttatacctgagggtgaagctctgggttttttaagtgttcaaatgccgtgtttagagacgggacaaagttttcattccaaagcagtagcaatggagaatgatgcctga

SEQ ID NO: 322411 - DNA, 122 bp, Homo sapiens
atttctcacagttcagaaggctggaaagttcaaggtcatggtgctggtaggtttggtgtccggtaaaggttgtctccattcatagatgatgccctggacactgcatcctctgtaggagagaa

SEQ ID NO: 322412 - DNA, 122 bp, Homo sapiens
ccaagcatgagtcagcttctcccaagaatcagttgcctgggcttcgagacagttttctgccgtattttgggtaattgtagttgccaggagtctgacttctgagggtgtcaggtgccatttgc

SEQ ID NO: 322413 - DNA, 122 bp, Homo sapiens
accagcctcacaggcgtcgctgggagcttcgggctctctggagtcctgaggagtcctgggcggtgctaagagggcggcaggcttgagcccaaatcaaacacctttgatcgatcacgggccac

SEQ ID NO: 322414 - DNA, 122 bp, Homo sapiens
gcagatggtgccacacgctccgggcctacaaacttcagcggctgccgggcccgggcccctcgtcttttgttgggtttcctcttggtgccaggtctcagcccctgcaaaagaaagctggcttt

SEQ ID NO: 322415 - DNA, 122 bp, Homo sapiens
ttctctcttcctgttcccttccgtttgtttctctgttgatccctttctgttcttgagtctcggtctttctctctctctctctctctctctgcctcttcctctttgttcttctctatctccct

SEQ ID NO: 322416 - DNA, 122 bp, Homo sapiens
ggagtgtattctttgggaccctagacttctgtgttcaaacctcctgccttccacttgctacgtttgtgatcttggacaagttacttccttataggattattgtaaagattaagttaattgac

SEQ ID NO: 322417 - DNA, 122 bp, Homo sapiens
atgggtgttggctaattctgatcccaggcaggcaggcaggcaggcaggcaggcaggcaggcgaggtgaggcagagaatgaatgtgctgactcatgcacttctcagtttctcttagggcggag

SEQ ID NO: 322418 - DNA, 122 bp, Homo sapiens
ttcccgtggggcccagccacggaacattccaggcctggagcggccatctcatttgcatgccgcaaggttgtggctcaggcggcttctcctgggggcctggtggtcccaggcagggggccggg

SEQ ID NO: 322419 - DNA, 122 bp, Homo sapiens
cagaactgttcacccaagatcttttccctaaaaatggaatgagttttcagaatcacacatcgtcttaccactggcaagggaatttgagaacatctagtccaattccttcattgtagagaaat

SEQ ID NO: 322420 - DNA, 122 bp, Homo sapiens
cactgctcagatcagaagctgggagtgttatgagcagtctcatctgtagttccttcagagcggaacatggctgctgaaagctgcttcaccgaagaacatggtcattcctggatagcccatat

SEQ ID NO: 322421 - DNA, 122 bp, Homo sapiens
aggggcataattacagctcactgctgggctcaagcaatcctcccagggactacaggcatgcgccaccgggcctggctagtttttgtatttgttgtagagatggggtttcgccatgttgccca

SEQ ID NO: 322422 - DNA, 122 bp, Homo sapiens
tgcactctccaaaaagcagatctgctggtcagtccacacatcacctgtgggagacaaaatcgagaatactaacatccttgccctgagggttagtagtcccaaggtaggacacactgacagac

SEQ ID NO: 322423 - DNA, 122 bp, Homo sapiens
gctgcagctgggctagaaggggtggccaggggagccgatttcatccttttccttcctccacgccaaccaggagcctccatctgcctgggaccctttgggggcacccatgggcccacagccgc

SEQ ID NO: 322424 - DNA, 122 bp, Homo sapiens
ggctgagaggcaggaagagcagagagggagcccgcccttgagggcggaaggcaaggccgacgcggaggttaagctcattctgtaccattggacgcattcgttcagctctcaaaaggtacaac

SEQ ID NO: 322425 - DNA, 122 bp, Homo sapiens
gtgctgagagagatatttagaaaacagctcgagggggggcacaaagcggcccctctctcccgagttatgacgggcagagcgcaagcgtgtcaccgggagggccctggagaaggccaccattt

SEQ ID NO: 322426 - DNA, 122 bp, Homo sapiens
gtcaggcataggggaggagggcccagggtcctagcttcccacggtgaactgggcttcccacgactgcctgcttttctttctagagtcttttcgaggtggtgacgtccgaggcttcctacctg

SEQ ID NO: 322427 - DNA, 122 bp, Homo sapiens
atccttggctattaaaaatgggtgattggttcaggcggtttaagggtggaggaacaaatgcgtgatgggttctctctttaagggtggatggaaatacctattaaaaattctcccaagccttc

SEQ ID NO: 322428 - DNA, 122 bp, Homo sapiens
ttacattattactctatctaagcctactgatattagttaaacattgttattttctggcaacgatgtctttgatgtgtgacacattcttgctggaatccagcctgtggctgattgtattttct

SEQ ID NO: 322429 - DNA, 122 bp, Homo sapiens
aaactcttctatgctctattctaaggtagggtctattctccgttgtttctcccacgtgtccgctctcccattgcattgtccaccaacctctctttttgaccatgttcagaaagaaagcattc

SEQ ID NO: 322430 - DNA, 122 bp, Homo sapiens
gatgtccattcatttgactcctaagaaacccagttctcttaagcacaattcaatggcttgcgtctctaaagttcactgatcacccatcgctcttgctctttatttgtaaagaacaaagggac

SEQ ID NO: 322431 - DNA, 122 bp, Homo sapiens
cctccatggtagcgccggctctccctggggcggagcgacacgccggtagagcaccgcggccgcgcactggcctccggggaggccccacccccgtttatggcctagggcctttccctacgcaa

SEQ ID NO: 322432 - DNA, 122 bp, Homo sapiens
cccccgccttccggctccggcggcgacgctcgtccctctccgctcgtccctcgccgctgccgggccaccagtgccagcctgcctcaggagactccatttgcgcttagtgtggtctgggcgcc

SEQ ID NO: 322433 - DNA, 122 bp, Homo sapiens
tggtatttttggggtggtaggcaagaatgggtggggtaagtggaaagtcaaatcttgactcgcatctaaatgatttgtaaacagaaaaggctgggaaaaatcacagatgcagtccaaaactc

SEQ ID NO: 322434 - DNA, 122 bp, Homo sapiens
cgcgctggcgctgaacgctgagcgcaggcggggaggctcggcactctccgacctcagtagcgcccccaaaaccgaagtccagccggccagagaggacacttacgtgcacacggtcttgatgt

SEQ ID NO: 322435 - DNA, 122 bp, Homo sapiens
tttgcaccagggccgtgctgtttctatcccttccactttaccatcattttcgaagttcagcgtcagcctccagccttgtttcttctttccacagttgttttgtcttttcctgaagctttgcg

SEQ ID NO: 322436 - DNA, 122 bp, Homo sapiens
cgagatctggctgggcctcaacgacatggcggccgagggcacctgggtggacatgaccggcgcccgcatcgcctacaagaactgggagactgagatcaccgcgcaacccgatggcggcaaga

SEQ ID NO: 322437 - DNA, 122 bp, Homo sapiens
gcagggaagacccgagaaggagggctgcgaggcaggggattgggggcgggggcctgggggcgggggcctgggccaagagctaggtctgcaccctctgagtcccgctaggggaaagtggggaa

SEQ ID NO: 322438 - DNA, 122 bp, Homo sapiens
gcccagggcggcgggacccccaggggttcgggctcagccaggtgcactgtgctcagtccgcgcgtccactctcggtgacccgcgccgcgcgtgtcctggggctcgaagatgcgacccggact

SEQ ID NO: 322439 - DNA, 122 bp, Homo sapiens
ggccccaacttttcagccaagttcaagaaagtcaggggtctgcagcagcccagggcaggacggtgtctaggctgcgcttcctgttcttaattccaagtgttgtttggtgactttgaatcgcc

SEQ ID NO: 322440 - DNA, 122 bp, Homo sapiens
aaatatgaattatgcaaatacatttctgcccattgagatgatattactcaacagggccctcgtaagtgcccagttctgttggatgtttagacagaaaacaagcaaactgtagataccggcaa

SEQ ID NO: 322441 - DNA, 122 bp, Homo sapiens
ctcagaccgcatctgcccactgcctagcggggcacttctctaccaatccgaagggctgctcgcccggcctcacgggaaaggtagtttccaggtagggcgccaacagcatcaagctgtgcgcg

SEQ ID NO: 322442 - DNA, 122 bp, Homo sapiens
tgcagaacaatcctaggcctcaggaccaaggcctggggccccagaggagggagtgagccacgggccaggaagaaccaaaagccaggttcctggacccccaagcggggcccaagtcagtgacc

SEQ ID NO: 322443 - DNA, 122 bp, Homo sapiens
catgggaagaagaaaggttgaaagtccatgcagacttttcactgccttgcccagtagtgacgtgtcatttctgcagacgtttcatctgtcagagcttgtcaatgaccctggctgaccccaag

SEQ ID NO: 322444 - DNA, 122 bp, Homo sapiens
gttgcaagcaacagaaaagttgaccagtgatggcttaaagtaagggagttactcgtcttccgcaaccagaagtccagaaggaggcaggccagggctagcataggggctcaaggattcccttg

SEQ ID NO: 322445 - DNA, 122 bp, Homo sapiens
gaaagatgcgctctcgagctatgtgtagctcatctaagcacaccattgttcaaaagatcgcgtcttgggcattaactggatcaaagcgcctccactcagccttccatgaagtggaacggact

SEQ ID NO: 322446 - DNA, 122 bp, Homo sapiens
gctgggattagaagaccacaagtttgctaaccccagaggctgtgctccctttaggatgctcgccactcagaaggccttctgttattgccttcaaccccatctttcaaaggtctgctggctcc

SEQ ID NO: 322447 - DNA, 122 bp, Homo sapiens
cgaaccctcgggggcagccagtctgagggacgtagcgcgcgtgcgcggggccagaggggacgcccccacgcgagcgcgcggtgagcagggcgcgtgaccgggcgggcgcgcagccgggaaag

SEQ ID NO: 322448 - DNA, 122 bp, Homo sapiens
ttgggccagattgtagattccaggcccaaggacatttgtaatttgttagggtgggactaacgaattatttgccatgtctggatttgtccttgggatcgctatgcttaggctcaaaatcaaaa

SEQ ID NO: 322449 - DNA, 122 bp, Homo sapiens
cctcacttgggaagcgcaaggggtcagggagttccctttccgagtcaaagaaaggggtgacggatgcacctggaaaatcgggtgaaccatgagattatatcccacacctggctcggagggtc

SEQ ID NO: 322450 - DNA, 122 bp, Homo sapiens
gaggaagagaagccgtggtgctgtggggaggacacccggctggcatagggcaggcttaggcggagaggggagggcaagctgacagaccccgccccgggggccggacgagggaggagccgggg

SEQ ID NO: 322451 - DNA, 122 bp, Homo sapiens
gccaggagatggccccaacaagcaccccgcttttgcagcagaggagctgagttggcagaccgggcccccctgaaccgcaccccatcccaccagccccggccttgctttgtctggcctcacgt

SEQ ID NO: 322452 - DNA, 122 bp, Homo sapiens
agtcaggtgagggcagccagtaagacctcttccctagacaagggtgtcccagagctcctccgctggagtcacccgggcctgaggctgcaggagaggcccaggacaggtctggctccgcccct

SEQ ID NO: 322453 - DNA, 122 bp, Homo sapiens
gggggctacggcccggttccaggcccaggcgctggctcggcgtgaccgcgcagaagggggcggctgccgcaagacagaacagactagaacctccccggccgctggctcctcccacccaacgg

SEQ ID NO: 322454 - DNA, 122 bp, Homo sapiens
cccgcagccgcggggctgacaaaccagcggcgggaggctgcgaagcggctgtgcctgtggcggctgctccttaccgcagcgccctccgttttccgcggacacggctgggcgtgcgcgcgcgc

SEQ ID NO: 322455 - DNA, 122 bp, Homo sapiens
ccctacgcgcggaggcggggctgcggggcgcggcggcaggaactttcccggggacccctgcgggaaggcctggccagtaagcgcgcctctttggcccgaatcaacatggaaacctaaggaaa

SEQ ID NO: 322456 - DNA, 122 bp, Homo sapiens
acattcgttcaagttgctgctacatgggtattctgagctggctaccaggaaggactcctgcgtttccgagagccaggtcagcgtctctaggagccgtggtgcaggtgcatggtgcccagcac

SEQ ID NO: 322457 - DNA, 122 bp, Homo sapiens
cggcctcacgctttttaacaccaacttcaaacgacttgggctggtgtcccagccaggccgcgcacccgcacagcacagcacagcggcccccgtccccctcgccccgccgcaccctgccgcgc

SEQ ID NO: 322458 - DNA, 122 bp, Homo sapiens
ggccggaactcctgggtccctagagacgtgtggccccgcccccgcagcgtcgctccgacacgacggccgccgcgtctccatggaaacggcccaggcatccacccagccgagagcacgatggc

SEQ ID NO: 322459 - DNA, 122 bp, Homo sapiens
catcctggggccaaggagccgcggaggccgcgctcaccagagccagcgtgcccgggatctcggccaccgaccgacgccagaactacaattcccaacatcctcgcaggcttcggctcccattg

SEQ ID NO: 322460 - DNA, 122 bp, Homo sapiens
gcagtatgtgttgaggtgcgctacgccagttgaggtgaagctgttacacagtatgaaagccgggctttgtagctgcagctgcgcattgcacccccagctacgcagtctcctttccttctcag

SEQ ID NO: 322461 - DNA, 122 bp, Homo sapiens
ctcgatcttctgacctggtgatccatccgcctctgcctcccaaagtgctgggattacaggcgtgaaccaccgcacctggccccaaatgtcttttataagcaagtggtgcattcctggatgtt

SEQ ID NO: 322462 - DNA, 122 bp, Homo sapiens
gcgttgtccggaatcctgcccagccggagtcgtgcagaggcttatggggactcgtagtcccgctcgccggcgttgtccgcaattcctgcaatcggaagactacacttcccggcaggccatgc

SEQ ID NO: 322463 - DNA, 122 bp, Homo sapiens
actccagcttgggcgacagagcgagactctgtctccaaaaaaaaaaaaaaaaaaaaaatgcgtatcgttccacctatttgacagatgaggccactaagccccaccagaaagcatgcttggcc

SEQ ID NO: 322464 - DNA, 122 bp, Homo sapiens
ctaatcgcttggcttcttttaactccttttatttttgacaatgtgagaaccaggcctggccggctggagtcggagagagggacagactgctctctggaaggctggccagacacgggaagata

SEQ ID NO: 322465 - DNA, 122 bp, Homo sapiens
agatgggaggatagtttgagcccagaagtttgggggtgtaatacgttgtgattgcacctgcgaatagccactgctttgcagcccagggaacatagcaagaatctgtctcttcaacataatag

SEQ ID NO: 322466 - DNA, 122 bp, Homo sapiens
tccttcgcttgtcttattccttatgtgtaaaacaaaatctataccaggaattcaatgagacgttgtatgcaaagagcttaccataccacctagcacaaagtaagaccttgataaatggcagc

SEQ ID NO: 322467 - DNA, 122 bp, Homo sapiens
agaaaactttaagctggactaaaatatgtaaggaggcagctttaggctaaagttaatttacgacatttatgattaaaagtcaaaaagatacactgagaagtttcacttatccctctccctct

SEQ ID NO: 322468 - DNA, 122 bp, Homo sapiens
atcacctgcaggtggggctggggcaggaggaagcgtcgggtgtgagggtgtgccgtgcagcgtggccgctggttccaggcccacatgcgtccaacgcgtcatcgtgtccacctgcggtctgc

SEQ ID NO: 322469 - DNA, 122 bp, Homo sapiens
atagtagggtaaggaaaacgatatgttgacatgctaagtgagcttcattttgacttctttcgtgtaacatgtttgagtctttgtgctgagaaaattgtattacattctgggagtcagtgggt

SEQ ID NO: 322470 - DNA, 122 bp, Homo sapiens
ggcaaggccttccgccggccctcggacctcttccggcaccagcgcatccacaccggtgagcggccctaccagtgcccccagtgtggccggaccttcaaccgcaaccaccacctggccgtgca

SEQ ID NO: 322471 - DNA, 122 bp, Homo sapiens
gctccacagaaggaagtggctgcggcggtgctggacctgcggagaggagaacaggaaggacggccaagagctcctggtgcagctggctccccagggctctgccggctcaagagagaaggatc

SEQ ID NO: 322472 - DNA, 122 bp, Homo sapiens
tctgccgttgaaaggagagcctctaactaggagcacgcacgggaccctggcgggcccctccgcctggctcagatgcctggcatctcaggccttggcacagctagcaggcccctggcaggccg

SEQ ID NO: 322473 - DNA, 122 bp, Homo sapiens
gcccgccccgcgccgccgccccgcccccccggagcccgctcgcgcgccccgccccccgcccgctcccgcagacccagcaccgcccatccccgcgagcctggccccgggccgcggcccaagcc

SEQ ID NO: 322474 - DNA, 122 bp, Homo sapiens
gagacctcttggctcccaagagcctcttgatcggggcaggaatgagggtgccccagggtgcgagagtcgtggatccctgaaaagaggaggctgctccccctctttcttccccccacctccag

SEQ ID NO: 322475 - DNA, 122 bp, Homo sapiens
acatgtgaatgcattacaattacaccctataggtcaaaaggtctttttaggacaggaaggcgccttgagtgtacagtttctgtaaactggccagaccagtccacggtcggcggtcttatcag

SEQ ID NO: 322476 - DNA, 122 bp, Homo sapiens
cgattgcaatttcagtcttagccgggcttagggacgccatccttttcacagtgacttcaccgcactctgtccctgcctgcactccaagcctaagccggggaagagttccccgggcctctggc

SEQ ID NO: 322477 - DNA, 122 bp, Homo sapiens
ctgtttgcagcatctttcccatgaattatttaaatttggctttattttccctttctgtcacgaatcattatgctctatgtgaagtcagatttaagaaaggaaaagagaaacttttagcccct

SEQ ID NO: 322478 - DNA, 122 bp, Homo sapiens
atttcatagcaatgggatcacacactatgtggtctttcgtgtccggcgtctctcacggagcgtgacgtcctcacggtgcctccgcgccgtggtcgggtcacagctgggtccgtttcacggct

SEQ ID NO: 322479 - DNA, 122 bp, Homo sapiens
atgcacatgctgctggaggaggccttcagcctggcatccgcgggccacgcaggccagagccggcaccaagaggcctacggctcagcccagcacctgccctattcggaggtggtgaccagcgc

SEQ ID NO: 322480 - DNA, 122 bp, Homo sapiens
acactttactcatgcaagtcaggtgacaggagctgcaatgtccactatgagctgcccactcggggacacatctgactttatacatgacttgtggtgatgggtaaagcctggtgcttaggaga

SEQ ID NO: 322481 - DNA, 122 bp, Homo sapiens
cgctgccctgggggccgaggcggggcttgggctgagctagtagctctttggaggacccggcgccacccctttgattgttctgtcccaggaagtcttacttgatttcacaactaattttaccc

SEQ ID NO: 322482 - DNA, 122 bp, Homo sapiens
accccgcgggcctggacctccttggcggacaatgcgaggggctcccggctctgtcagctgcgggaaatctccggaaagctgctctgggggaccaagaaatgttccctcctcaaacttggcag

SEQ ID NO: 322483 - DNA, 122 bp, Homo sapiens
cctccagctccagaagaatgggctggctcagaaaaatctcccgggatttcaggcacagaccgcggatctcgttctctgtcagctgtacattcttgccaggccgcgagccctgcactggggcg

SEQ ID NO: 322484 - DNA, 122 bp, Homo sapiens
gccgagggaaatcatcaccctacagttgggccagtgcggcaatcagagtgagcgaaactccggcccctcagctagccaggttccttagggtcaatgggatctcgctgtgggatcctggactc

SEQ ID NO: 322485 - DNA, 122 bp, Homo sapiens
ccgattgccgggctcggggtgggcgcggacgcaggcactgggctcgtgcggggccccgggcgtcgcgatgaacatcgtggtggagttcttcgtggtcactttcaaagtgctctgggcgttcg

SEQ ID NO: 322486 - DNA, 122 bp, Homo sapiens
tactccttatactctaggttgggagaaggtgacagggctgggcaacctgaggtccctccccgcagtgactcagggcccagccaccaatagggtaatcagctgttattgtgagtctgagagtc

SEQ ID NO: 322487 - DNA, 122 bp, Homo sapiens
tctgtaaaatgtgctcacagacagcacctacaacataggtagggtgtgttgcaaagattgcgagttaagcttttgtttgttttgtcgagatggagtctcactccgtcgcccaggctggcgtg

SEQ ID NO: 322488 - DNA, 122 bp, Homo sapiens
atcaagtgatcaacagggatatttatcatcgctatataggactacttcgccctgcacaggcggggtgggggtggggctgggggagcgagaggagggtggagacacgcgcgcactcacacaca

SEQ ID NO: 322489 - DNA, 122 bp, Homo sapiens
aaatagtctcagcttggcactggtgagtctggagggctacgttctctacctactgacccccggataaacgtgtggcagtgaaaacaacaaccaccttttgagaggcctgcaagtgaagcatt

SEQ ID NO: 322490 - DNA, 122 bp, Homo sapiens
agcgggctgttcaggagttggttcgcgcagttacaccgaaagcgccgtgggcctcaaagccgcagcccggaggtcgctggcttgctctgtgtcagacacggttctaggcagtggggatgcat

SEQ ID NO: 322491 - DNA, 122 bp, Homo sapiens
gagcccgagccagccgggctcctgcagtgctgggcgcaggccctggagcatgaggggccccggacaccacctgcggagggagtggcctgtgggcctcccctggatcccacaggccgcacgac

SEQ ID NO: 322492 - DNA, 122 bp, Homo sapiens
actattgtctgcatgtgaaaccgacagtgattgtccctgaggcataagcttgtactgaaacgagattcttaggctttttgagtttctttctcggatttgagatgatggaaaggtgcctagct

SEQ ID NO: 322493 - DNA, 122 bp, Homo sapiens
tttctccttttcacatcccttcccctatatccacaaagcagtttaaattttcaggctgggcgcagcagctcacacctgtaatcccagcactttgggaggccgaggcaggaagatcacccgag

SEQ ID NO: 322494 - DNA, 122 bp, Homo sapiens
aacgggaagcacttaaccaatgaggggcgaaggcagcaacgaggaattggaggggcggaacgacagcttgacgggcacaaaagccagccagtgagagccggaagcatcctccctgcggccaa

SEQ ID NO: 322495 - DNA, 122 bp, Homo sapiens
ttgcacacgcagcggccatccacgcagcgcccgcgcccgcgacagtcgccaggacaggcgcgcgtgccgcagtcccggcctgtgtaccccggccaacacatgcagcggccactctcacagcg

SEQ ID NO: 322496 - DNA, 122 bp, Homo sapiens
acatgcacactcactccacccaagcctctgaagacagaattcttgaccctattgcacttacgatctaatagaagagacacagatataatatattatggtttgatatgttcactgctagaagt

SEQ ID NO: 322497 - DNA, 122 bp, Homo sapiens
gcagctggagaatcaaatgaggtgactgacatgaactacgccgctttgacaaaagtcctccgaagtagtgtgttcagaactcatctccaaagccatctggaatatttgctcccaacatgttg

SEQ ID NO: 322498 - DNA, 122 bp, Homo sapiens
tcccctgagcgccccggagctggcgccctacaggaagttaaaggtcaatgggcttaggggcgcaggcttgggggacggggagaccgggggaactggggagggccgaggcgggagaagaagga

SEQ ID NO: 322499 - DNA, 122 bp, Homo sapiens
ggaggcggcccccgctccaggcaccagcccagcagctcccccgaactccccaggagctcgcgggcgagcaacgccacagcccagagcgagctccgcggaacccccagccccggggaaggaag

SEQ ID NO: 322500 - DNA, 122 bp, Homo sapiens
gctccctgggcgccatcttacattcaaccctcacagccaataggagccgattgctcctctcgcgataatcggggcgtcggatcccgcgagatctgggactgcctaccggccaaaattaaagt

SEQ ID NO: 322501 - DNA, 122 bp, Homo sapiens
cctctggaaacgctcggctgtctcgggggcaccctctagtccaccagtcccgcgggattacgttcggctacttccggaaacactcgggtgcccccttacctcaggctccgcctcggcctcgg

SEQ ID NO: 322502 - DNA, 122 bp, Homo sapiens
gccagctgtgccagccccgggctgacccccaccgagagccggggctctgccttcgccggccgcggaaccgggctccactcagccctcagcccgcctccagggccccagagccaccaactggg

SEQ ID NO: 322503 - DNA, 122 bp, Homo sapiens
cctgcctgattctcctgcctcagcctgccaagtgcctgggattgcaggcgtgcgccgccacgcctgactggttttcatattttttggtgcagacggggtttcgccgtgctggccgggctggt

SEQ ID NO: 322504 - DNA, 122 bp, Homo sapiens
tttgctcctttaccatggaggcttggcgacagagagcccaggagccagaagccctgagcccgcccccgcaggaagctccctgcgcggcgttcccaggccggcatcgcccgccctccctcccc

SEQ ID NO: 322505 - DNA, 122 bp, Homo sapiens
ggtgaacatcaggtaagagatgtaacctttacccttagtagccctgtcaggctgagtatgcgtatgtgatatgctctggtgtgtccaggcagaaggggaaataagggatggtgctcctcggt

SEQ ID NO: 322506 - DNA, 122 bp, Homo sapiens
aaagccctccctcatgcccgcccctggggccgacccaggtgtcactcaagatggcgcctgcgcaatcaacctcgggcgccaccctgtggctagcacagacagtaccgtagaggcggtgaggg

SEQ ID NO: 322507 - DNA, 122 bp, Homo sapiens
gcgctccaggccggagtcagagactccaggatcggttctttcatcttcgccgcccctgcgcgtccagctcttctaagacgagatgccgtcgggcttccaacagataggctccgaagtaggat

SEQ ID NO: 322508 - DNA, 122 bp, Homo sapiens
tccgcctccatgttgaatagttgacattccgcagaccgcggcggcgcttaagccgcaagccgtactagcacggagggcctccattggacagctgtcactcaacatctcgcactcattggctc

SEQ ID NO: 322509 - DNA, 122 bp, Homo sapiens
cagcccggcacacatgtgtctccactgctctgcctgaagcctagttccctttagggaccccgagcccagcctccccggggtgacccagctgccagggctgtggaggcccggggggaggctgt

SEQ ID NO: 322510 - DNA, 122 bp, Homo sapiens
cctgagaacggtgttcctcagccctgtgacgcatcagcccaggtaggcagggctgagggccgacggcctccctaacgcgtctggtccacagttcagtgggagaagccctgctgggaacagct

SEQ ID NO: 322511 - DNA, 122 bp, Homo sapiens
ggcagcgggacaggggtggtgaggcagtccctcccaggagtggccagagaaggccagaggcgagactggtggaaaaggacggggaagacagggaacttccttactctcggatcttcagttcc

SEQ ID NO: 322512 - DNA, 122 bp, Homo sapiens
ctgggagtcctcccggacacgccatggggcaagtcagacctggagtgttcccagggaacacggccagccttgcctcatggaaccctgagtgttggatgagtgtccctgaatcagattttgcg

SEQ ID NO: 322513 - DNA, 122 bp, Homo sapiens
ccctagtattttattatacaaatgcggcctccacctggtggcggccatgatacctgtacacgtgctttaacctggaggctgccttgacacctgtaaacgtagaagggaaagagggtgagaat

SEQ ID NO: 322514 - DNA, 122 bp, Homo sapiens
gaccccgttgctagagcggcagattgcggctcaagcgtctgagaaaatctaggctggggtcgagagtccgcaacagtggcacctggagccagacccaccgctttctggtgtcgcgcctttca

SEQ ID NO: 322515 - DNA, 122 bp, Homo sapiens
tggccctcattcgcctttgccgcctgacataacttgttttttgtctccttgtgcagtccccgaagtcacaccagcgaatgtcagtggtggcggaggcagcaaatctgaactggttataacct

SEQ ID NO: 322516 - DNA, 122 bp, Homo sapiens
tgttttgttttaattttcccctaagaggctttctcccttatgcgtggctgcatcacagaacgctacctgtcttcagagaccagctgtagtgccagctccaaggaatctttccaccctcactc

SEQ ID NO: 322517 - DNA, 122 bp, Homo sapiens
cccctccggccctcacttggagctggacaccgagtaggggccgactgcgaggggcgacgccgccggttgtagtttgcggaggacgagggcttttctctgtgtgccgtagggaagggaaggga

SEQ ID NO: 322518 - DNA, 122 bp, Homo sapiens
ggccgccgggcactccaggctgcgtggggcctgcctcagtgggcaactggggagctagcccggggcggccgcgccggccggggcgcctcaccgtgtgttcgtgctcgtccgcccgggtccgg

SEQ ID NO: 322519 - DNA, 122 bp, Homo sapiens
cactgctggcccttctacggccactactgtgcctttgagtccggtggacgatgcctgcaacgtgaacatcttcgacgccatcgcggagattgggaaccagctgtatttgttcaaggatgggt

SEQ ID NO: 322520 - DNA, 122 bp, Homo sapiens
aataaaatcatcagtgctttaagaaggagagatagattaaggcctcccgtcttcatcattcgcttcagtgtgctggtattgcaaacagcaccatgtgcaatgcccattcccacttgaggtgg

SEQ ID NO: 322521 - DNA, 122 bp, Homo sapiens
tttcagcagaaaatggaagtgaacattcaatgctctgaaatatgtccaatggtacaaacacgcactttggctgagagccaacacatgctgggaccacacagtcatcaggagcagcagagaaa

SEQ ID NO: 322522 - DNA, 122 bp, Homo sapiens
gggcagtgggcggaacaaacgcgccgactacagaggctggacgtaagcttagcggtggcgcgcgtgcgcagcgccggcccgaggtaacggcgggaaggctcaggggcgtgcttgcggcaacc

SEQ ID NO: 322523 - DNA, 122 bp, Homo sapiens
gctaagtccttgacggcccaagagctcaagacctctacagcctcttgtaccctgggaagacgcccaaatagtctcaggcccgttccacagaaggttggaagagccccccaaagaccgcggtg

SEQ ID NO: 322524 - DNA, 122 bp, Homo sapiens
tgaagaatgctgaatctcagaagcccggttcccaataatgtttctccacttccccagaggcgggaaacacgagccagacccgtgcctggagccagcccctggccgccgggtagccatgcgga

SEQ ID NO: 322525 - DNA, 122 bp, Homo sapiens
caggcgtgtgccttttctatccctgccccaagatgctgacccgctggtcacaggggcccccggtgcacccatggacttgcagtgccacgacgccaaccgggactacgtcatcgtgacctgga

SEQ ID NO: 322526 - DNA, 122 bp, Homo sapiens
ccaagtgagtaaaactgtagggtcttacaaagtattttattttacggtgaccaaccatcccggtttgcttggaactgaggagtttcctgggacatggggctttcagtgctgaaaccaggata

SEQ ID NO: 322527 - DNA, 122 bp, Homo sapiens
cagacatgtagacgggaggatggatgggtggctctgcctccacatctcggaaataaaagacgtgtcattgaagccccttttgggtttgcctttggaaggctccagtcctagttaaggacaaa

SEQ ID NO: 322528 - DNA, 122 bp, Homo sapiens
ttttttaaggaatccacttgtcttagctttgttttgctgcagtcaaaagtcccagcattccgaaagttcactgactgtttacttccccaaagagtttaccaaaaacacctgaaattccccca

SEQ ID NO: 322529 - DNA, 122 bp, Homo sapiens
taaacacccaaccaccatgtgacccagtaattccaccacacagggaggcaaaaacaagcacgcacagccatgctcggagcagccccatccgtgatggccgagaggcggtggaaacagcccca

SEQ ID NO: 322530 - DNA, 122 bp, Homo sapiens
tagcaggagggtttgcttgtcaacagatttcagtattgtcagcaacatccaataaactaacggtaatagcagcaataagtattaacagaatggccacacatggcatgttatctcactgaatc

SEQ ID NO: 322531 - DNA, 122 bp, Homo sapiens
cgggcactctgctgtctccacaaacggtttttggaggcacacacacggatactttaaacacgtcggtgatgaatcggtacccagctgccagtggcggagcttcctgggcggggccgcgggcg

SEQ ID NO: 322532 - DNA, 122 bp, Homo sapiens
attgagttgtggagccattgaaatgtaaactaagcggtgcaattaaacgaactgggatcccgagtggcctgggttggatgcagcccgaattgcttgcctgtgttattttgctgcacagtgag

SEQ ID NO: 322533 - DNA, 122 bp, Homo sapiens
gggtagacccccagattcctgccagagcaaaggagcaactgctactccaggctttgcccgcgctctggaaaaccagagttcacgctgccaaactgccagccttcggacgcctctcggggttt

SEQ ID NO: 322534 - DNA, 122 bp, Homo sapiens
aggggttgtgaggacaacgcaggctctggggctctgggaaggaccttcctggcctcttcccgcttctgctggcagccggcaatcctcccgagcctcagcctgcagccgcgtcactccaatct

SEQ ID NO: 322535 - DNA, 122 bp, Homo sapiens
actgctgtgattgcacctaaagatacacattctcttaaaaaaaaaaacaggttaaaaatacggaagtttattgtaggacactcagtgtgaataaatggaatggaaaggcctacacatcgaga

SEQ ID NO: 322536 - DNA, 122 bp, Homo sapiens
gtccaaccagatctaggaggaactcccttcaggacaggactatagctggttcctccccagcgattaagggagaaagacacaatgagtattcagtaagtgataaggaaactcttgtagaagca

SEQ ID NO: 322537 - DNA, 122 bp, Homo sapiens
gcagctcctggacagtggataaagaggaccggggagtcactggtgcccaaggctctctgccgaaactgcctggacgatgatccgccggcctggccaatattagcagtcaccaccaaagcagg

SEQ ID NO: 322538 - DNA, 122 bp, Homo sapiens
gagcgccggcgacggtaaacacggagcgggagggtggcaggggggccgccacggggccaccgagccctgacacccctgtcctcgcaggccctggcgcggaggaggactttctgcggcagctc

SEQ ID NO: 322539 - DNA, 122 bp, Homo sapiens
gcgagcggctgggacgggatgggattcttctcacggcgcacgttctgtgggcggagtgggcggagctgccggggtcagttggtccaagtgtcccggcctgaggtgtcggccggatccctcct

SEQ ID NO: 322540 - DNA, 122 bp, Homo sapiens
cggtatgtgtgagggctgacggaagaaaaagggaagagctctttctgcttatgactgggacgctgttattcatcaagctctggtgtttcaagtgagttttgtggatgaggaggccaagtcat

SEQ ID NO: 322541 - DNA, 122 bp, Homo sapiens
tggaacttgagacgcaggtggactcggggggcctgctcgttggggaaggggcgtggtgtccgtggccagcccctgagttaggccctgaccgccgccgtcctccgtcctcccttcctccctat

SEQ ID NO: 322542 - DNA, 122 bp, Homo sapiens
tgccccctccccagagatggctcccctcagcggcgcggctccggataactggaggaagcgcgggttccgaggcttcaagggcctcattgttctgcctggaggggcacattgaaaatgctcca

SEQ ID NO: 322543 - DNA, 122 bp, Homo sapiens
agtcaggctctgtcgcccaggctagagtgcagtggcatgatctcagctcactgcaacctccgccacaagagtttgagcaattgtcctgcctcaacctcccaagtagctgggattacaggcat

SEQ ID NO: 322544 - DNA, 122 bp, Homo sapiens
catgacactcactatttctttgaataaatcatcttaacctaacactgtaaatctcaaggccgcctgcttacttacctatctctgagtgcactaggtctattactgtatatgtatgtattcag

SEQ ID NO: 322545 - DNA, 122 bp, Homo sapiens
tgaagaatgtgaactctgagcagcgcttaacaaataaaacacccagccaggtgaaggcagcgctccaagccatggggggtgctggggtcgcaaggtgtttcttcttttgttttgttttcccc

SEQ ID NO: 322546 - DNA, 122 bp, Homo sapiens
agaatgaccctccttgctttttagggctcctctgcagattaaattcattagcacctcgaacgttggaaagacacaatattttcttgccctcccctcctcttatcagcttgaatcgatgcgtc

SEQ ID NO: 322547 - DNA, 122 bp, Homo sapiens
aaagcctgccagtcacgccagccatgttaggtcacacggctccactacggtcttttttgacgaggcccagatcctccgcatccccctaaacttcagagcctgctttcaagcccatttgagag

SEQ ID NO: 322548 - DNA, 122 bp, Homo sapiens
cgctccccagttgcaccagggcagcctggctgtgcagtgacagcagccctgagcataagccgtgggactggcactgtccaggcagggcagggggcagaagtaggcagggaagaggcctccca

SEQ ID NO: 322549 - DNA, 122 bp, Homo sapiens
gggagcatcaaaacatcactacttcttatgtaacttcttccagccagtgcttttattgttcgttttagtttactggggacacacaggagtctttctgtaatgacttatgtggtaaaatgttt

SEQ ID NO: 322550 - DNA, 122 bp, Homo sapiens
gagccacacggagacgtcacgcggcacacgtggagtcccacacccacgtcgcacagagtccgggctctacacatctgcaggtggcttgcacatcaggaaaaccagtgaagcccccgcggaag

SEQ ID NO: 322551 - DNA, 122 bp, Homo sapiens
agaactctcggtgagtgaaggaactggccctgcaggtcgtcacagaagagccatgggatccgagccccgcgcagccacatgactcacagccagcttccacctgctcagggcctcggctttct

SEQ ID NO: 322552 - DNA, 122 bp, Homo sapiens
acggcttttctcttttacagacaagaagtgtccagattacacctgccccagtgagtacctcggcggccgggacacgtggggaggagggcaccgtggttggggcgagggctctgagaggacgg

SEQ ID NO: 322553 - DNA, 122 bp, Homo sapiens
cccccacttctggagcccagacctgatcttccccagaagggccactccaggggccagaggcgggcacgccacctagggcgccacgtttcccaagtcacatcccggcccgaccagtcagaggt

SEQ ID NO: 322554 - DNA, 122 bp, Homo sapiens
ctctctaagccccctttcctccctgggtgtggcaggagtgggggaaacatcacctgcccccgggtcagtgagacagtggaggcgaaaaccctctcggcaataacgtgttcctcttaataaaa

SEQ ID NO: 322555 - DNA, 122 bp, Homo sapiens
acaccccatcacccatcctctcaccccacagaatgtggagttagacagcctgagtttgagcgcacagcctgccacctcctagctctgcaaaccggagcaagtcaccctctgaggcccagttg

SEQ ID NO: 322556 - DNA, 122 bp, Homo sapiens
cgcccccgggcggccttctggccagtgggaggtgctggcgggggcccgcggggctctccccgccccctggctgcagcgggagccaatgggcagcgcgcgcgggggacgtgtgcgggcgtctc

SEQ ID NO: 322557 - DNA, 122 bp, Homo sapiens
gccatgaccttattagacttaaggggtctatgggaatgggagtgcgcccctcctcttcctcgtgaccccctcccccagcccctgcagcccggctccgcggcgcgcgccctcccctggccacg

SEQ ID NO: 322558 - DNA, 122 bp, Homo sapiens
ccacctccggcagccagccaatcagaagtgccgggggccagggtgctgctggggcactgacgcggtttcgattctagcgaaaaatgatttggctcggactgtcccgtgacaggcggtgcgag

SEQ ID NO: 322559 - DNA, 122 bp, Homo sapiens
ccaggccactcagcccttccccggccctcccctctggaccccattgccggcgtctcattccggccccgtgtgctttttggtccgtagacgatcctcctccaagacaaacagcggaaaatcta

SEQ ID NO: 322560 - DNA, 122 bp, Homo sapiens
ccactcagccccatcccggttgctgcatattgcccagctcccaggacctcacactctgtgcgtgggacaaaaaaagagtggaacctggggttggagggatgtacactaagcgaccctcagct

SEQ ID NO: 322561 - DNA, 122 bp, Homo sapiens
cctccgttccacaccgcggctccctcggctcggagccacagggaactatgaaaatcggcacgcgaggcctaagtgtccccagaaccagaggaaccacagttgcgtcatagcagaaggacctc

SEQ ID NO: 322562 - DNA, 122 bp, Homo sapiens
tgccactgaatcaccaaggattcagagacaagctcgttattgccctcaccattcatagaccgttcactgcttatccgcgactcctctcttctcatgttgcctttataaaagtgcttagcaga

SEQ ID NO: 322563 - DNA, 122 bp, Homo sapiens
aggtgctcaataaatgtttgaacaatgggataaagggagcttgaaggaaatggttaatggcgatgaagttagttaatccttagtagtcaggatagaatttgtgttgagtagtgagaagcagt

SEQ ID NO: 322564 - DNA, 122 bp, Homo sapiens
ggggaaggaagaatataggtttggtttcagtttcatttctcagatctgaaattacagcaccgccttttctatctgaaatgctttttaataagctatggctatataccaccttctggtctgct

SEQ ID NO: 322565 - DNA, 122 bp, Homo sapiens
gacccaaataagtgtcactgactgaaagcagggcctgcggggtgggggccatttgtcacccgaatagctggcatctggggcctgcatcccacaagtgcttctgtcctcgtacggaggatagg

SEQ ID NO: 322566 - DNA, 122 bp, Homo sapiens
atagtcccgctggctagctgccttgtttcctaattaaagtgcccttatgaaaatgccctccggtccaggcccagtgctgctgggtgaggcaggcacctcccaaaaaatctcagcagctttcc

SEQ ID NO: 322567 - DNA, 122 bp, Homo sapiens
cggccacccaaagtgctgggattacaggcatgagccacttttcccagctggatcttttatcggtttgaaaaggatatctaataaatggggaaggactatttgctctgagttagggaaagggg

SEQ ID NO: 322568 - DNA, 122 bp, Homo sapiens
agaagaaggcgggtcttcggcagggcgggtagaggggacgggcatcaaagagcactcgggcgctcatgattggacaaggagcccgaagggcgggaagcagttctggagggggcgggaccaga

SEQ ID NO: 322569 - DNA, 122 bp, Homo sapiens
agtcccaaagggacacaaagaggtggctaagtgcctaggaattcacacaaaggaaaacaccgtgctaagagcaactaattaagaacttaaaaagagtgacaatgactcctgtgaatgttgtt

SEQ ID NO: 322570 - DNA, 122 bp, Homo sapiens
ggcagtagcatctccgcataggaggcgcagggcctgcctgagacaggcctgttctctggtcgtgctgtgagtggctcagggctcttggcagaaggggaagccgaaggcggaagctgagccct

SEQ ID NO: 322571 - DNA, 122 bp, Homo sapiens
gaggtgctctggaaggaggggcagctccaccctgggagggactgtggcccaggtactgcccgggtgctactttatgggcagcagctcagttgagttagagtctggaagacctcagaagacct

SEQ ID NO: 322572 - DNA, 122 bp, Homo sapiens
ccagtggagtagctactagccacatgtggccagaagtacttgaaatgtgactagtgtgaccgaggaactgaattttaaattttatttaattttaactcaggtcaatgtaaatagccacatgt

SEQ ID NO: 322573 - DNA, 122 bp, Homo sapiens
tgttctggcagtgtcacatatctgagtatggtgagtgtgtgtacagctgggataagaatgcgtatccaggtgtggggcatggaagtgtctacaggtgctgggatgtacccttgtcaatttca

SEQ ID NO: 322574 - DNA, 122 bp, Homo sapiens
cattggggatcctctcggggaactgctctaatgccttcctggaggtctggctcttgaagccggcagttatcagcgtgagattgggctggagaaaaaactctttcccattcatctggggatag

SEQ ID NO: 322575 - DNA, 122 bp, Homo sapiens
acttggcgcagatggggctcgactcttgccccccgtggcttctagcccgcccttccctctcgaggcctagaccctttatttgggcggcctcttgtggagtctgtgggtgcccccgcagacct

SEQ ID NO: 322576 - DNA, 122 bp, Homo sapiens
aaacaaacccaatgctttttaataaatgagcagaataggaagttaaataagggattctggcgctggggttcagggtcatggaagaagctacgttagaagaccactctggtttcatgtatctt

SEQ ID NO: 322577 - DNA, 122 bp, Homo sapiens
ggctcgattgcctggcgcgctcctggaccgaaagctgtggctggttgaggcgttgcctggcgacgtgttactcagtggcgcagtgcttccgtagaggccagctggttgctacgcagcaacag

SEQ ID NO: 322578 - DNA, 122 bp, Homo sapiens
atctggagaagaaacgaacctggaagttctggaatggacaagccgggacctgacccttcgcgtctccttcttgacctgtttatctaggactccaacttgaagttacagatttttttaaaaaa

SEQ ID NO: 322579 - DNA, 122 bp, Homo sapiens
acggtcgccgttattgcgtccagagtacagtcggggaaaccgaggcccggtaggtcatgacgcaagcctccagcctcaggaaggcgctcggggtggaggctggaggggccccattcacgtcc

SEQ ID NO: 322580 - DNA, 122 bp, Homo sapiens
cccacccctcaaagccctcccagccttcgcccggcatccgcgccacccccgggcccacagcgcccctgtgggtgtggccctccgacctgcctccgcgcctcacgcagcccctcaagccggtg

SEQ ID NO: 322581 - DNA, 122 bp, Homo sapiens
tccacttttattacctttttcattctgaattttatgttcccagtactttaatagtcgtagcgtagccagactttttttgacacacatttttgttttccttcaagaggccagaatacccttgc

SEQ ID NO: 322582 - DNA, 122 bp, Homo sapiens
gcacgcacctcctcgcggtgcgccatgcccgggcgtgcgaccagcgtctcgccggggcagcggcccagctgccggtagtagtcccccgtgctgggctgcttgctgaaagcgcggggcttgcg

SEQ ID NO: 322583 - DNA, 122 bp, Homo sapiens
tcttgctcctctttctggcacagcccagactcccttcggggtcatttccgaagtggaacccgtgctcggtcactccgcctttctgtttccttcccctcagcagtgaaagaaccttgctttga

SEQ ID NO: 322584 - DNA, 122 bp, Homo sapiens
caccttggcctcctaaagtgctaggattagtggtgtgagctgttgtgccccacctatactcgtctgtttctgctcagattttattgaggagcgtttacagggtagcctgttgtctaccctgc

SEQ ID NO: 322585 - DNA, 122 bp, Homo sapiens
cgggcctcctcccgggcctcaatggtgagcgctgtccttactttgtcactgctgccgtcgcggagagcacagagagcagacttgagcctctggatctctccatcacgtaccttcaccgtcct

SEQ ID NO: 322586 - DNA, 122 bp, Homo sapiens
aacggtctgtgtgagagtgtcaccgaattcaacgggaagccagcaggtctccctctccagcgcggcccagcaggcctctcccgacccttcagcgccagctctccggttttctccaggttagg

SEQ ID NO: 322587 - DNA, 122 bp, Homo sapiens
tgcgctcttcgatggacactaaatgcgggacatctgttttacactcaccctccctccccgcgtggcaggagacctacactctcccgctatgcgcgctccgcggcagctgccgctgcaccatt

SEQ ID NO: 322588 - DNA, 122 bp, Homo sapiens
agtgtcgggtttctagagaagccaatcaatgtagccgcggtcccggttctaaagttcccacgcacccaccgggactccgattcttcccagtcgccgaggatggtgtcatggcgccccgaacc

SEQ ID NO: 322589 - DNA, 122 bp, Homo sapiens
agtcctttaaaaccctactaagctctcgggaaggcaccatcatgtgccaagtcctgcagccgtcagcaatgaacacactgagcgtgaaacacaaacaataaattaaaaaagaacatacatat

SEQ ID NO: 322590 - DNA, 122 bp, Homo sapiens
ggctgccgagtttttggagcgccgggagcgaggtaatggctgggcgccgctgcgtgagcccgagcgctactaatctttttcggcagtgcggtgcggccggtaagggagggcacgcgtgtgag

SEQ ID NO: 322591 - DNA, 122 bp, Homo sapiens
attctgggctgggccgccgggagggggcgcgcgagacccgcagacagcggaactggagcccgaactctggttcgcactgtacaggcctgcaatgagtctcactcgcctttagtggcggttac

SEQ ID NO: 322592 - DNA, 122 bp, Homo sapiens
aatcgctgacgagcttcgtgctgctgctttcctgcttgcacatgttatctttgcttctgccggtcctcagtctggcgtgctttctttttctcttcgccgtctcctgctcctctccttattca

SEQ ID NO: 322593 - DNA, 122 bp, Homo sapiens
atcacgtagaggctgtgctggtccaaagaaggctcaaaagagggcagtttgcgcacacaacgtgtcggggcagggcttccagatgatcattcggcttttttgtgtcttccaagatgatgatc

SEQ ID NO: 322594 - DNA, 122 bp, Homo sapiens
tcgggccggaactcctgtggctccagcgttcgcgccggccactggccagcgcttgggcctcgccctgcagctccggggccatagggcacagctttagctttgacctccccgttcccgaaagg

SEQ ID NO: 322595 - DNA, 122 bp, Homo sapiens
agaatcatcttgttaaaaagcaagggaacaacaaatacaaaatttgtgatagtgtttcctcggatgagaggtagtatagagagggactagaaaaagagtagtattaaatctaagttgttgtc

SEQ ID NO: 322596 - DNA, 122 bp, Homo sapiens
ggggcatccgtgtggctgagaatggctcacagcacggccaggtggctgtggtggttgcctcggatgtggacaccagtgcccagctggagatacagcttgtgaacattctctgcaccaaggcc

SEQ ID NO: 322597 - DNA, 122 bp, Homo sapiens
gtttgttcagatttttcttggcttctctgtataactttctactcctctagtggaccggcccgggctcatatggagtgagggtcttcagggcggaagggaaagtgacctttctagattttttg

SEQ ID NO: 322598 - DNA, 122 bp, Homo sapiens
tcttacatgatagcaatactttatttcacctgagaaaattaacaattatcccgtggtccccgggcacggtggctcatgcctgtaatcttagcactttgggaggctgaggtgggtggatcacg

SEQ ID NO: 322599 - DNA, 122 bp, Homo sapiens
gcctgcaggactcgctcctgccagccaaggactcaagaaggagggagtccccagtcccggcggggcgcctgggattcggttcaatatttagcacagtcagtaccgaagcaggggcagccagg

SEQ ID NO: 322600 - DNA, 122 bp, Homo sapiens
ttgatttcctttttctcccatgcctcccatgcctcattctgggttgaaggaagccagaatcgctttgggtaatagtagaacattatagtgactttaatttaggattttttatttactctttt

SEQ ID NO: 322601 - DNA, 122 bp, Homo sapiens
cccgggctggcggccactgcgtcctgggtgcactcggtggcaaagcgctgctaccgggcacgggtctctgcagctcaaaacctgcccggctggagcgcaccaatagttgccccaccacttta

SEQ ID NO: 322602 - DNA, 122 bp, Homo sapiens
tgtatgggcaggcctgagctcctaaaaactgagagcatggcggctgactcctcagtctgacgatgttcctgcatcggctgcagtcggcgcagccctccaaagccctgcaccattcaggattt

SEQ ID NO: 322603 - DNA, 122 bp, Homo sapiens
tagatttgtgacatcagaggaggggatgtgaaggagaaagaaaagagccccctcccaccacgtgactttgttggtcgacagcaatatatgtcgtctctaaggagaatgcatgtctttgcata

SEQ ID NO: 322604 - DNA, 122 bp, Homo sapiens
tccaaggatctcagcttaaaaaaagttaaaataaaataaaaactaggtgtttttcagaggcggtttgaaacgcctctctgaggttgtcagagattgtttttgttttctccctttgcccttct

SEQ ID NO: 322605 - DNA, 122 bp, Homo sapiens
ccgcaatgacccacccctggcccgcgtctgtggaactgacccctggtgtacaggagagttcgctgctgaaagtggtcccaaaggggtactagtttttaagctcccaactccccctcccccag

SEQ ID NO: 322606 - DNA, 122 bp, Homo sapiens
ttgtcacccaggctggagtgcagtggtgtgatcactgctcactgcagccttgacctcttgcgctaaagcccgcaagaggctgggcttctcagtcccgcaaatgtctgggactacaggcgctc

SEQ ID NO: 322607 - DNA, 122 bp, Homo sapiens
aaagtgctgggattacaggcgtgagccaccgcgccggccgctaggtgctgttcttatctgcgttttgcatgtgaggctcagaggggaaaactgacttgcccagagtcatggccaggaagtgc

SEQ ID NO: 322608 - DNA, 122 bp, Homo sapiens
gagggcggggctctcacgggaaaggggtcaacccgggactgaggcggcgtgggaagcgggcgaccttatctctgctcagctggaaaaaggcccagggtaacaccggaagtgggcttatttgc

SEQ ID NO: 322609 - DNA, 122 bp, Homo sapiens
tagctgggattacaggcacctgccaccatggccacctaatttttgcatttttagtacagacggggtttcaccacgttggccaggctggtctcaaactcctgaccttaggtgatccagctgcc

SEQ ID NO: 322610 - DNA, 122 bp, Homo sapiens
acagccatgatcattcatttacttatggcaactactttcacaatattaacagcagaattgcgtagctgtgatagagacactacggcccacaaagtctaaagcatttactgtccagacattta

SEQ ID NO: 322611 - DNA, 122 bp, Homo sapiens
tgtgtttctagtgtggtttcagacttagagaagcagagatccacgaggtattgagagcaacgcggaaaatagtagtgaaccctgtaaaaatcaaagaaaaaaaatcacaaagcaccctttcc

SEQ ID NO: 322612 - DNA, 122 bp, Homo sapiens
ccagaaggcccttcccaggtggcctcctgccttgcacacgtgcttgtgacttctctagcacggtgacactcctctagtgtgtgagcacgtggctcaccggctcacacggacgctcttcctcc

SEQ ID NO: 322613 - DNA, 122 bp, Homo sapiens
aattctgtcagagctaccttcaaaatgtagatgaccgctttccaccacttccattgctaccgctctggtccaatcatctctcacctggtttattcaggtggtctcccaactggccttcctgc

SEQ ID NO: 322614 - DNA, 122 bp, Homo sapiens
gccagaaaacagagagacgggggctgtgaagcacaggatccacagcgggcgggtggtaggcgggcagcaggtgggcggtaggcgggcagtgggcaggcagcgggctgagaagcagagcagag

SEQ ID NO: 322615 - DNA, 122 bp, Homo sapiens
tttaatgacattctggaagcatttgacaatgccatcagatgagaaagatatgaggtataacgtttggaaaaggaaagtaaaattacccttctgcaaatcatgttatgaagaactacctgaga

SEQ ID NO: 322616 - DNA, 122 bp, Homo sapiens
tgggtctgtgccggctggtgggtgtcccacaggggtcttgatctgggactggccagactgcgaagccccttccagagcacaagccggaggggtctcctctgatccctccttcaccctctcct

SEQ ID NO: 322617 - DNA, 122 bp, Homo sapiens
ctcatctctgatacaccacaacctggagaggaatcatggttccagttctagtttctgcaccgtattaccccaaaggccatttgaccatcttcccccaacctttaactcctctgtatagcctt

SEQ ID NO: 322618 - DNA, 122 bp, Homo sapiens
ctctgcctgctggatggctcttgccgccctcttgcctcaggacttgctgctgcaggagcccgttttcctgcccagcctcactcatcctctcctcaccatccccttatgtttaactgctgttg

SEQ ID NO: 322619 - DNA, 122 bp, Homo sapiens
ctctatctttaaagcgtagactttggtctgtagcagttgagagcggcatttgtccagccacggcatcgacagggagcaaagtctctccttaaaggtgttaacctctcgagaagttgctgaaa

SEQ ID NO: 322620 - DNA, 122 bp, Homo sapiens
tccagttcctggcgcacaccgcgtccgcattctccaccgtgaagcactggcccgaggacgcgccctgggggtaacaagtctccaggcgccacacgggcttggcagagtttcctagaaaaaga

SEQ ID NO: 322621 - DNA, 122 bp, Homo sapiens
caacagaaatacaaataaatggattaaaaactggctatctaaccgtatacagagagaaatcgtaattggtagtccgtctagttggggagaggtttccagtagggtcccacaaggatcgatat

SEQ ID NO: 322622 - DNA, 122 bp, Homo sapiens
ctgggactgagcgcaatcccgagatggagctggagaaggtgcgcatggagttcgagctcacgcggctcaagtacctgcatgagaagaaccagcggcagcggcagcacgaggtggtgatggag

SEQ ID NO: 322623 - DNA, 122 bp, Homo sapiens
caggcccgcggctccctccttcctcctcctgcggcagtctcgcggctttcaaaccttagtcgaacccacagaaggcccagtcccaggccaaacctactcaacaggcaccttctcacggccta

SEQ ID NO: 322624 - DNA, 122 bp, Homo sapiens
tgtccccaccagcgtctctgtggccgtgaagtgtatgcatgcgtgcccatgttgatgcggcgccgtgcgggaggcgggcatcccctgctgtacatgggagggaggctgtctgtgcagagcat

SEQ ID NO: 322625 - DNA, 122 bp, Homo sapiens
caggggatggaaggggggattccagatcctcgcattttcacagacggcctaatccctctgcgcaatggacccgggaaagctgcctcccgttaagggcgcccaggcactgtcaaagcgccctc

SEQ ID NO: 322626 - DNA, 122 bp, Homo sapiens
ctctttctcacctcctggtcccgaccctaggccagtgccaccgccgggagccccgggtctcggcttcagccccaggctgaacatgcagggaggggagaggcacttaggcctcgcctccccgt

SEQ ID NO: 322627 - DNA, 122 bp, Homo sapiens
cggagctctccgagaggccccaaagagactgctttcgtgccggccaggcagggggtttgtcgcctggaggcccaagaggaacggcctccccccaacttagcgggttatgctggaccgggcgg

SEQ ID NO: 322628 - DNA, 122 bp, Homo sapiens
acggagagattttaaggctgcctaagactaaagccaaatacgaagtccacatctgcggtccgcaccttatctctccgcgcggcaggcgcgacgagggcgagaaactccctctccagtggtcg

SEQ ID NO: 322629 - DNA, 122 bp, Homo sapiens
agacaattacaatacaatctgataagtgctataacacttatcaggttgtattataatggccgatgtaaaatttcttcccagggggtgctgctccaggctgctgctggctgtaacatcaagag

SEQ ID NO: 322630 - DNA, 122 bp, Homo sapiens
aaatatgccttattctttgggggggagggttaagggggtggtgttgaacattcacgtcaccgtggcaactggcctgccaaaagacacccagatcgggagagccggttccagagaaagagagc

SEQ ID NO: 322631 - DNA, 122 bp, Homo sapiens
gggggcgcaggcgcccaggcgggggcttctagtgggggaggtggccgagggagggagcgacggctgtcaatcacaggccacgccctcctcagcccaaccccccactgctgtcccgcccacgg

SEQ ID NO: 322632 - DNA, 122 bp, Homo sapiens
atccattaccaccccaggccttttcccaagaagttgaagggagggtggggacggtaccaccgcaagagtgaagtagctctggagatgtgcgttagctccagcctaagccaaaggatttgcct

SEQ ID NO: 322633 - DNA, 122 bp, Homo sapiens
cggttgggggagccgggcatgtgaggccctgggcaaggggatggggctgtgggggcggggcggcatgggcttcagaagtatctgcacaattagaaaagtcctcagaagctttttcttggagg

SEQ ID NO: 322634 - DNA, 122 bp, Homo sapiens
tacgtggagtcaccatgctgagtcgcccttctcagcgctccatcaacgcacacctgctatcgtggaacagcctagaaaccaagggactccaccaccaagtcacttcccctgctcgtgcagag

SEQ ID NO: 322635 - DNA, 122 bp, Homo sapiens
gccgctcaggcaagtgagcaggcgtgctgccacattctgctgcccacaagcagggaagcacggctggaatccccactaagatcaaattacaaaataatcaagctttgtggccaggcaggcac

SEQ ID NO: 322636 - DNA, 122 bp, Homo sapiens
tcatgtgggaaaataatttcaagttgaaggataattactgcagagactgccagtcacccccggccgccgccggccgcgcagcgtcggaaacccttcgcggcagccaggagggtcgcagccct

SEQ ID NO: 322637 - DNA, 122 bp, Homo sapiens
tctggttttaaaaacctttcaatggagtgcacgtctgtgaacaataaaggaacgaggacacggggctgggaaaacagcatacctcatctggaatggaaatctatcgtctctcgcccttgcac

SEQ ID NO: 322638 - DNA, 122 bp, Homo sapiens
agacggtggagttgcagatcagcttgaagaactatgatccccagaaggacaagcgcttctcgggcaccgtcaggttggcaccgttctgatcccacccagccctcagtgcccccgtgcttgcc

SEQ ID NO: 322639 - DNA, 122 bp, Homo sapiens
gtgagtgtttggggccagctacccgaaacccggcaggggctgggtggaaacggccagaaccggctgtgacgggaccccaggccccctgcaggcgacttcagggtttgggacccgagttctgg

SEQ ID NO: 322640 - DNA, 122 bp, Homo sapiens
tgagcttcagagacagggccggggggactggagctacctccagttgggacagcgcccaagcgagagggccggggcctggactcccaaaccactcatcctccaagcccctccgatgggacccc

SEQ ID NO: 322641 - DNA, 122 bp, Homo sapiens
gcagggccagcggggccgggcagactttctccttcaccctccggtctgaagcctgctgggcgccatgacacccattttaaaaataggaaacaggtcttacgtttcaggacaaccaggtctta

SEQ ID NO: 322642 - DNA, 122 bp, Homo sapiens
catttttttaaaagcgtaatgttcatattactcccaccattttctttggagaagttttaccgaagtcattcactcattgaacaaatgcctgcgaggatgacaagtcagaatagtcaccatca

SEQ ID NO: 322643 - DNA, 122 bp, Homo sapiens
tcgaccagagcccctgcgggggaagaagcaccgtggctcgggaaaacatggagaaacatgcgcctaagcatgtacacacgtgcacgccatatcccacaatatagacgagtttataccgtgat

SEQ ID NO: 322644 - DNA, 122 bp, Homo sapiens
atcagacaggctggggagcacatccctagaatgaaacaactctaaggtatgtcaggtgagcgaagaggacacccgacagagctgaagtgccccagattagacggctgcccccgccggcatgg

SEQ ID NO: 322645 - DNA, 122 bp, Homo sapiens
tcactgcatgccagacacagtactaaccacctaaatgaattatctaatttaactgctgtacgtctctaggagaaagggctcttattatgcccatctcactgtgagggaactgtggctctgag

SEQ ID NO: 322646 - DNA, 122 bp, Homo sapiens
gaaggcagcccatgtgtgggacagcagcaggagaccagggtccagggacccacctcccaccgcgggaacctcgagcctcccctggcacccctagcttggtccgcctggcctccggagcccgg

SEQ ID NO: 322647 - DNA, 122 bp, Homo sapiens
gggaggagcgcggcgagcaggggcggggccagtgactcccgcagccaatcggggtggcggcgcgtccttggagggtccgcagctcgcccggcgcgcacggggcggggctccgcttgaccgtg

SEQ ID NO: 322648 - DNA, 122 bp, Homo sapiens
aacacagaggagtgattaaaatctccgcttgtcactcatctcttatgccaaattcagtagcgaaaggtggcagcatatacttaaactggcaatgagcccaaacttcagagtctgagatcttg

SEQ ID NO: 322649 - DNA, 122 bp, Homo sapiens
cagtagctctgctaacttacggcagagagagcacctccagtgatgccagttcttttggcccgtgtgaaatcaattgctttgttttcattgatttctttaatcttttctgctcttcatagggt

SEQ ID NO: 322650 - DNA, 122 bp, Homo sapiens
ccccatggcagaaggcatcactcacttaggtagaatgagcaagagactgtacttgcctcacgtgtgcctgggctcacggtgcctgcgctcacgggtgcctgccctcacggtgcctgcgttca

SEQ ID NO: 322651 - DNA, 122 bp, Homo sapiens
cggacgggtgcaagggctgctcacggcccctcttccaagcatctgggctcttggagcgggcgaggtagatggatgagcaaccccaaggcccaccaagctctgccgcctgcagagccagagcg

SEQ ID NO: 322652 - DNA, 122 bp, Homo sapiens
gaggaaacgccacctcttgcccgcggcgctggagcctccacggttgtccggctcccacagcggaaggcctgccacgcacccatcctccgaagaccagcgaacccacctttacgctcagcttc

SEQ ID NO: 322653 - DNA, 122 bp, Homo sapiens
cagataatacgagacagattataatggccttttacgaaatcgatgtagggggcctggtgccgtggctcatgcctctagttgcagcactgtgggaggcggaggcgggcacatcacagggtcag

SEQ ID NO: 322654 - DNA, 122 bp, Homo sapiens
ggggccaaagcctgggtgcgggccttgcggatgctgcggaggacaagcggctgctgacaccgtgcggactccgccccagcagacccgtgccccagggacagtccctcccgcgcgcgcccagc

SEQ ID NO: 322655 - DNA, 122 bp, Homo sapiens
catcacaaaggaaccgccagggagaagcagccggctctcaaagctcccacgcagctctcccgccactggccactcgctggcgacccgatggaaggttttcaggctcctcacaaaggagagag

SEQ ID NO: 322656 - DNA, 122 bp, Homo sapiens
cgcgctcgggccgccagagggcagcagagggcccggccggcggctcggggaggctgtggccgccgcgggcagagctagaacagaggctaggagcaggcgggtggggagcggcagggatggag

SEQ ID NO: 322657 - DNA, 122 bp, Homo sapiens
gaaaattcttccaagaaatagccggatgtcctcatagtatctcccagagatggtgtgtcacgatcattccttgcaaaacacgttgagttgcatggtgacaacgtgccaagcaaacgaagatt

SEQ ID NO: 322658 - DNA, 122 bp, Homo sapiens
cggccccgggagggggcggggcgcgtttaagagctgcgggccgggtgcggacggcggaggcggcgggactggtccctggtaagggcgcggcgcccgcgggccccgggcggggtggggcgcgg

SEQ ID NO: 322659 - DNA, 122 bp, Homo sapiens
cggcctgactggggcaggccgggtgcgaacggttccgggcctcaggcacagtgtgggggccgcctgcctcctccgcggcccggcgggcgggggcagcaccagctcctagggcctccgggcca

SEQ ID NO: 322660 - DNA, 122 bp, Homo sapiens
accgctgctttccccacaatgggcaagagatgcgcggcagacacacagcgcagcagacggcgttaccactgcagggagtgaccagctaggaggaccgggtatgcgggctgcaggatctggag

SEQ ID NO: 322661 - DNA, 122 bp, Homo sapiens
agtggccgaagctgaattccagcagtccgggggaagcaacacacctgggtgtacccagtgcgagcctgaccagccctgtggcctttggccatgtcctgtctacacaagtgggtggcgatgga

SEQ ID NO: 322662 - DNA, 122 bp, Homo sapiens
actctgcggaaagagccctttgggaatgaagcggcaacggtggcgcacctgcgatcctatcgtgggatgacaaagctctaagaggggtctcagggtagggaggaaacagctggagacaaaga

SEQ ID NO: 322663 - DNA, 122 bp, Homo sapiens
ctgccatcttcatcttgagctgtgagataaccaaagacggcggaagagcaggaagcagcccgggcccccatggcttcatggagcccccacactgtccttggaccttcatcactgttagatga

SEQ ID NO: 322664 - DNA, 122 bp, Homo sapiens
aaaaaaaaaagaggaggaggaggtttccctgatgctgggaggagggaaaggaggaccgatcgttctcagctgctgatcatctttagctaagtgctacacggggacccagcctggggagatca

SEQ ID NO: 322665 - DNA, 122 bp, Homo sapiens
gcccggcgggggcgggggcgggggcgtggagggggcgcgcgcaccgagagcggatgggggcgttgggagcggctggagttgggggtcggcgcacggccacagggaccccacttcttaagctg

SEQ ID NO: 322666 - DNA, 122 bp, Homo sapiens
gggtctctgggcagcgatcagcaggcgacagctgaatgaacgagcggctgaaggggctggcgagaagcagggccctaagaagccgggctctcctttcctggcccactccggcagccccgtct

SEQ ID NO: 322667 - DNA, 122 bp, Homo sapiens
tgcaaatcacacatcacctcccactgctgccctttgttatgaatcaggaccaaactcctccgcttgaccttccacggccttactgcccaattctacaggtatgctctccccagcccctctgg

SEQ ID NO: 322668 - DNA, 122 bp, Homo sapiens
aggagcacctgtattaaagactttgtttggaatctggagtggaagctctgactcctactgcgcccttctttaggggtctctccctcggggtccacttggctcgaggcggcagcgagcccagc

SEQ ID NO: 322669 - DNA, 122 bp, Homo sapiens
ctccgggttcccccacccgaggggccctctgctccggcatcaccacagtgagtctgaggacgctgtgctgcccaggcacgatcaccgagccctgcacctctgcggcgccctggaggcctggc

SEQ ID NO: 322670 - DNA, 122 bp, Homo sapiens
ggaggctggtctagcttcccacgaaaatcgccctgctttgcctctcccttgcattctccacgcatcaaagggacacgtgtaaggcgaaacgggaacacctaaaaagcaactctccctccacc

SEQ ID NO: 322671 - DNA, 122 bp, Homo sapiens
aggaagagacagagacagttaggatggtccaggcagggccaggacagaggcgcccatccccgcaactgcgacaaggtccttcctgcagggtcgccctggtgtggaggcccaaccccacagtc

SEQ ID NO: 322672 - DNA, 122 bp, Homo sapiens
ctggaagggcgttcaggggtctcgggtggctagcccggctggcggggagatgtcagctagcggccggaggagcgggctcgggagggggcggcggctcgcgcgctggaggaggtggaaggagg

SEQ ID NO: 322673 - DNA, 122 bp, Homo sapiens
accactcccatatctgactcttaaaacgacaacaaaatctagttaagagaaccggaactgcggtttctgccgatgtcccatcctgggcagcacacaaccgaggcatccggatctgagccatc

SEQ ID NO: 322674 - DNA, 122 bp, Homo sapiens
tttcattctccacagaatcagcaatgtgatccctgacacacacacatggccctggggaggcgctgctgaactcccaatggctcctgctgtcacaggatggcacccacctgacctggcctctg

SEQ ID NO: 322675 - DNA, 122 bp, Homo sapiens
gtcgcccaagagatgacagaaggctctagataaacgcacactccgttgccattcacaaggcgttttgtttttacttctcaaaagcggcagagattttttttttgagacggagttttttgctt

SEQ ID NO: 322676 - DNA, 122 bp, Homo sapiens
tgggcctccggcctccccaccccctccacacagccccaggaccaaggcggcagctggcttcggtttctgccatgtttttccaattatgtggaatgagctaaaaacagcaggagtgaggcctt

SEQ ID NO: 322677 - DNA, 122 bp, Homo sapiens
ccaaggacgcccggtttctactggcctaagtcacctgggacacgagcttcctgcctctttcggactcagcttacccggcccccccaccctccccaggaggagcatggacgctctgggtagaa

SEQ ID NO: 322678 - DNA, 122 bp, Homo sapiens
aagaacaccctgtccgtcgccgcccactcctgcagcagaggaagtatctagaactgaggacgcacactaagttctgtaatcgcatgatacctggcaggtacaatgaagccaggaaggcactt

SEQ ID NO: 322679 - DNA, 122 bp, Homo sapiens
ggggccccggcccaggggccgccccgcggtgaccgccccccggcccggtggagatgccgtcgaccgccccttccagtgtgcctgttgtggcaagcgcttccggcacaagcccaacttgatcg

SEQ ID NO: 322680 - DNA, 122 bp, Homo sapiens
ctaccttcagaggtacctgcagggttcttgatccagaagctgctgatgtctccgtggatccggactgtgatcttctggagcagcccatccacgctgaacacaagtggctgcccaggcaccac

SEQ ID NO: 322681 - DNA, 122 bp, Homo sapiens
aataactttatcacaaggaaaactaggtggtgaacccaggaggaggaaatccccacaagtcgacagaacaccaacggctcgtcggctcgtcggctcttcccggctgaacccaagggtgcttg

SEQ ID NO: 322682 - DNA, 122 bp, Homo sapiens
tcagagaaaggagcgctcgggtggtggggaacaggcatcagggtttgcgttccagggtcacgtgctaccacatcttgctcacaaccgctgcaccgacgcggccactcgtccccggggtcgcc

SEQ ID NO: 322683 - DNA, 122 bp, Homo sapiens
gtggtgctaaagtggggctggggcccaggcctaggaggagagggtggtccacagataccccgggatgttagcagcccccaatctgccttctggcacctcctcccgggtgctgtagtgagtca

SEQ ID NO: 322684 - DNA, 122 bp, Homo sapiens
ggaattctccagaaattacaaaatgccagacgtctcattcctggttacagcccattccagcgtttatccctgattcaacctggggtcactctcggctcagactctcacctcccgcagcctct

SEQ ID NO: 322685 - DNA, 122 bp, Homo sapiens
cggcaaggttggatcctcctgagagccatgaggagaagatctgttccaggcctttatccccggcttgtgggtgtctttgtatccttgtttttgtgtttacatggcattctccctgtgtcttt

SEQ ID NO: 322686 - DNA, 122 bp, Homo sapiens
tgtcccgtggcctcctgagtgtgggatctgtcactgagacatcggggcaccagggctcggcgtattgtcaccgccaccccacactcgccgcactcgatgcttctcagcctgaattgcaacgc

SEQ ID NO: 322687 - DNA, 122 bp, Homo sapiens
cagccctagtcccctcggctctcctcccgcctcccagtgcctggtccagtgtcccagtggcggaagcgaacagggaccaatccgcaaaggagaaattgagttggcagtgacattgccggaaa

SEQ ID NO: 322688 - DNA, 122 bp, Homo sapiens
cagcctcttccagggagttacctctaccagacctccctaaacctcaggccacagagtttccgtgactgggtgaaacctctctggaggagctggctacaagcttgggaccagaaaagctgggc

SEQ ID NO: 322689 - DNA, 122 bp, Homo sapiens
tgtttctatgcttgtcctgcctgtggttctaccaagtgtggagctgaatgccgctgtgaccgcaagtggctgtatgagcaaattgaaattgaaggaggagaaataattcataataaacatgc

SEQ ID NO: 322690 - DNA, 122 bp, Homo sapiens
caactcatcactcaaggtttcatctgtctctgtcatacgttagaagttaatgttagataacgttagataatgttagaagggattttttagctgagctgcattcagtgagattttggtttgag

SEQ ID NO: 322691 - DNA, 122 bp, Homo sapiens
gagaagagtacttactgggctagggatagagtcaggatccagcttcttctggggctgtggcggaccagccatctgtgcaggacctccagggaagcctcctgggtaagacagttgtgcgcctg

SEQ ID NO: 322692 - DNA, 122 bp, Homo sapiens
ccggcgggcaagacaccctcagagcacagggtgctgccaagagcccagcggagtgcagctcgagcgccgaggtcgccaacgttccacacactgttgacgcaggacacaagttcgtcacagtg

SEQ ID NO: 322693 - DNA, 122 bp, Homo sapiens
ccgcccaccgacccatgcagccgcaataggcacatgagcccgggcaaatgtggggccgagcggtttgggggatgcaccggagcaacggcagaccccgttcgaggttgcagcaaaccagaaac

SEQ ID NO: 322694 - DNA, 122 bp, Homo sapiens
caaacaagtcctcattgtgccccttgagctgttctgaccaccgtgacctctgaatggggtcgtaggtcagagttcagagttcactcaccactgcccttggagcagctctgactctgtacccc

SEQ ID NO: 322695 - DNA, 122 bp, Homo sapiens
aagttgctgtgctggtcatggattaagattgctgtgcgtgtggcagccggctcgggcatgcgagtcttccatccacttgcagccctgcgtctgtgtcttgtccgggaggtgggggcagttgg

SEQ ID NO: 322696 - DNA, 122 bp, Homo sapiens
ccagttctcactcccattgggtgtcgggtttccagagaagccaatcagtgtcgtcgcggtcgctgttctaaagcccgcacgcacccaccgggactcagattctccccagacgccgaggatgg

SEQ ID NO: 322697 - DNA, 122 bp, Homo sapiens
accgttagaaactcagtttcccggaggttgtaaggccctttgaggtgaaatggctctgggcgtgaaaggagcaggcgttggcaatggaaggaccaccgcgacctcaggctgaccgtagggag

SEQ ID NO: 322698 - DNA, 122 bp, Homo sapiens
aagcgacatgctcctcacttctccacagatgacctttcatttgcttttgcaggatgaggccgtcagtgccttgccacgagtctgaggtgggaagaaagggtcgcagctcctggcacatggca

SEQ ID NO: 322699 - DNA, 122 bp, Homo sapiens
atgaattattattatattacctagaccaacctgtgtcttccagctttgttttcaagagatcgcctacttgaacccttgactgctgataaacttagaaacctgttgactcactcttcccagac

SEQ ID NO: 322700 - DNA, 122 bp, Homo sapiens
aaaaacgacccaccagcgatccttcttgaggtcgacaccgagcaggggtggagtcggatacgccccgcggacaccatgcacccaatcagcgacgagctgtcgcggatcgcgggacacgcccc

SEQ ID NO: 322701 - DNA, 122 bp, Homo sapiens
cttgtccttgccttagaggcactcccagtacctcatcacgatgctctgttctcctggcaacgctccttactggcttgcaggtgcccgtgagcagggcttggctggccatcctgccaagcttg

SEQ ID NO: 322702 - DNA, 122 bp, Homo sapiens
gcggaaaccggacaggcctgacggcatctggggtcgggcagccccgcgaggaggcagtggcggctgcagctacgcgcacacaaaagcccagggccggggcctgaaccggggaaggcagaccc

SEQ ID NO: 322703 - DNA, 122 bp, Homo sapiens
attctgcaccgggagaaacttttcagcccgcagagcaaccgcagggcagtggacgggggccgcgcgaggacaaacagcggcggcgggtgcaaagccccttctccaagccgcggggttggccg

SEQ ID NO: 322704 - DNA, 122 bp, Homo sapiens
gccgccgtcgcggtgatactatttagggccacacgtcccagtgttcagctttcgtatttacgtactactgtttggcaagcggggactcctgaagctctctgaccctggaaaatgcgtggctt

SEQ ID NO: 322705 - DNA, 122 bp, Homo sapiens
cttgggtggtcgatgggactgggcgccgtggagcgggggcggcgctcgtcggggaggttccggctgcacaggagcccacggaggagggggaggctcaggcatggcgggctgcaggtcccagc

SEQ ID NO: 322706 - DNA, 122 bp, Homo sapiens
ctcaggctcactcccccaccctcttcctgctgagctccctccctgaaggactccctcccacgctggcttcagttcactgtgactatgtcctgactccagctggttccttagatggccacaca

SEQ ID NO: 322707 - DNA, 122 bp, Homo sapiens
tctaggcatccccttctgctagactctctacgtttaggccccaagtttctgggagtgaaacgatgagggacgccaaataggcggaagaagcccatttgacccaggcttatggcagcgaaggg

SEQ ID NO: 322708 - DNA, 122 bp, Homo sapiens
ctcagttctgaggtccggaatccggtagcctgggtcaccagccagggccctgccgcccgccgtccttctctgacagtagctttagttctggaatggaaggttattgtgtgtgaggtgggtgg

SEQ ID NO: 322709 - DNA, 122 bp, Homo sapiens
tgagtagcttcatgaggagcggatatcaggcagagaaagcccgggcaagagagtgacacacggggcttctgcccagaacacgtgcgcccacaatcccgggagctgtacaaatcccaagcggg

SEQ ID NO: 322710 - DNA, 122 bp, Homo sapiens
ttctctcagccttccttcttccgggccgctttcaagcctgggcttctggaaatacgcaggcgcgagatgaattgtttgattggctattcattgtgatgcacccacgagctgaagctccgtct

SEQ ID NO: 322711 - DNA, 122 bp, Homo sapiens
aaagtgaaatgggaactctctgtggttatctgggcaggaagcagccttcttcttgtcttacggcataatgtgaaccagatggcttaggaataaactgacatgccagcagccatggaaatagg

SEQ ID NO: 322712 - DNA, 122 bp, Homo sapiens
agccttttccctgcagacggaaactgacgcgctccccctggaggcagcgcaggatgctcccgggggtccaggcgtcccagcctgaggtccccatcctcgtgtgcagcctgggcgcctggtac

SEQ ID NO: 322713 - DNA, 122 bp, Homo sapiens
gtgaagggaatctgagacactgtcctctgacaggtgtttctgctactatgtgtttgctaacgtattggtggtagtcacgcggaaaagtgtgccatgctccagtaagtttgtgaaagtctgtg

SEQ ID NO: 322714 - DNA, 122 bp, Homo sapiens
tggaggaggagatgggagtagcaggtacttgtctcaggatggggataccatggctggcagcgcggaccagagcccagcctgccccccagctccttgggccccgtttccttcgcatcccgcac

SEQ ID NO: 322715 - DNA, 122 bp, Homo sapiens
gcagttgggggcgtgggtgttccttcctctatctgcctccctcacagagttgtgatcaagcgagttgtagagaaacgccactctctgagacgaattcaggctagtgctcaaaattctctcca

SEQ ID NO: 322716 - DNA, 122 bp, Homo sapiens
ttaacctctggtcctaagcaaacctctcaaaagtcttccccaggcagcgcccaggagaaccgaaccccacaaagtgcttttttgctggcatcacccggatgcttccctttggcgatttgccc

SEQ ID NO: 322717 - DNA, 122 bp, Homo sapiens
taaccacaccccactgcaacagaccagtagcaagatggtgagggaattaaattctttgcacggatgcgctggttttcggaaacaatgccgccaccatccccgtttccaaatctgcccagaac

SEQ ID NO: 322718 - DNA, 122 bp, Homo sapiens
cacgtcggtgactcgttaccgcaggggcggtgcgttcttctacacatgcgcagggttgggcgggtcttcttccttctcgcctaacgccgccaacatggtgagtcttactgttgcgggctccg

SEQ ID NO: 322719 - DNA, 122 bp, Homo sapiens
taaagcaaatagtgtttcatggggttaataattaataaactgaactgtcatcagaaaacccgcggatccagttcattataatgtcatgatgacaacattttgtgagagaagtctgtataaaa

SEQ ID NO: 322720 - DNA, 122 bp, Homo sapiens
tgaaagagtaatttcttctctgctctattgcatctgtcaattactgcacccccctacctccgtgccagtggtggttgttactatgttggtgaaattctctgcagactgaccttcaaggagct

SEQ ID NO: 322721 - DNA, 122 bp, Homo sapiens
tcacccagggttagggtatccccgctgagcacagcgtctggctgtggcacacccaccagccggaaccacaagctgaacctggaggtggtactactgagagactgggaggcagtccaggcagg

SEQ ID NO: 322722 - DNA, 122 bp, Homo sapiens
ggtcagctgcctgtgcctgctgctcaacctctgtgagatggcccacctgggcttgggcagcgcgcaggacgcggtgcgcggccgccgcggccccccggcctccgcccccgcccccgcgccgc

SEQ ID NO: 322723 - DNA, 122 bp, Homo sapiens
gaattttgcagtaatggaaaatgaacagaggagaatggctcagcagccttggaagccctccgggttccccccaggaggaagtgcttctctaaacagacacctgggggacacagcaagcacag

SEQ ID NO: 322724 - DNA, 122 bp, Homo sapiens
ccgttttggagccaagcaggaggtgggccaccgctccgtcctcaggcccatccatcactgcgcggccacaatctcaggggccaccagcctctctgaccatgctgtttccattagagcatgat

SEQ ID NO: 322725 - DNA, 122 bp, Homo sapiens
tgggttgtaatcacctcataatgcagcaggtgtttggaagattcagccccaaacttctagcggggagtggctatattcatgtcttgctcaaagatacttagttaagggatccaactgtgttt

SEQ ID NO: 322726 - DNA, 122 bp, Homo sapiens
ttgtgcgtcagagtcggggctgacaccagtcctggccagggcacttaccaggacggtctccggaggccgggattcgcggagggtccaccagcagtaagaaacgccaggaggaagaaacctca

SEQ ID NO: 322727 - DNA, 122 bp, Homo sapiens
aaaaccgtggcagtaagagatgcctttctctggcacatcccacctgctgggcataagcggcgccaccctctggagttacagcctcaaggcagtccggtaactaatcaggctttgggatggag

SEQ ID NO: 322728 - DNA, 122 bp, Homo sapiens
atcattatgcacttaagagtcccaaggaagtcaaatgttcccaaatgtagccctttacatcggcaccagggaagcctgccatatatacaatccccttcctagggtgaacaagctccaccagt

SEQ ID NO: 322729 - DNA, 122 bp, Homo sapiens
cacaggacaaatgagttatggcctggtttacctgtacagtgtccctcagtagaactataacgaagttggcccaccatttttctttaccacattttatcacattttgataaaactcatcagac

SEQ ID NO: 322730 - DNA, 122 bp, Homo sapiens
acccttgctcggcgccaagccaccgctttgacctaagagccaccaggttggggggcagggcgtggagaggactcccggccagaggcgggaaaggcagccgggaggagaggaaagaggaggag

SEQ ID NO: 322731 - DNA, 122 bp, Homo sapiens
accacctcctccagcatcccaatataagcaaccacttttcctgccacacacggggtttctcgtcgttcgaatcccccctccctttgtctctgtaccggggagctgttttcttccttgcttct

SEQ ID NO: 322732 - DNA, 122 bp, Homo sapiens
cccagccacctgcgccagacaaccttccccagagaaaggtgcccgagtcggcgatcaaaacgctctcggctcacacggcctttgaagccgcacatgggcagcccctgcgtatggaaaacacc

SEQ ID NO: 322733 - DNA, 122 bp, Homo sapiens
gaaatggaacggagtagccgatatggaatgaactttgacccctgacttttgacctttccccgtagtgctaccccctccagatcccctggacctaccccttcgggccgtggagctcggatgca

SEQ ID NO: 322734 - DNA, 122 bp, Homo sapiens
ttttaatatttattttcactcactacaactctttcgtggagggagcggaatttaaacttccgggtcagcctcagtgcagcttgggaaacgtagttcctagtccccacgtctcgctccttgga

SEQ ID NO: 322735 - DNA, 122 bp, Homo sapiens
ggaatcttccacgggcacaaagcccagggaacacaaaccacgtctgcccagaaaatgccccgtgtccttgggaggagaggtccactgccgccagctctgaacccagacacgctgagggaaat

SEQ ID NO: 322736 - DNA, 122 bp, Homo sapiens
catgtaactaaccacttaagaaacccttcttttagtccttcagctagcagcttcccagtgcgaagacagaggtctctatcgtccctggtcctaacacagagattagaaccctgtccttcact

SEQ ID NO: 322737 - DNA, 122 bp, Homo sapiens
actagcaaaggaagtccggtttttcagaaggcaggaggagggtgctgactcgagcgtccacgggaatggctggttgagatatcttgctcttccaatacttactctgcggcttcctggctgtg

SEQ ID NO: 322738 - DNA, 122 bp, Homo sapiens
caaggtgctgggattacaggtggagccaccgcgcccggcatcgataatctgaatctctaacgagctcccgggcgacgttgatgcagctggtaccgggaccactcttcgaaaatcatcggttt

SEQ ID NO: 322739 - DNA, 122 bp, Homo sapiens
ttctccccctaggggcgccgggatggtcgcaggaaggaaatgcttctggacatgcgcagccgaccatgaccccagccacggcaggaggcctcgaggatcagtctgggccacggtacgctctg

SEQ ID NO: 322740 - DNA, 122 bp, Homo sapiens
attcctcaacaaattgaaatctcaaaaaacacacactgacccaggaccacaaagccctcccggtttaatgcttgcgtccaatcagaacttgcgagcagcttgggggtgctccccaccaccac

SEQ ID NO: 322741 - DNA, 122 bp, Homo sapiens
ctctgttcccggcgcgcactgaggggctttcttcgcggccgtgggaaagtggtgggcgagcgcgcgccccggtcgccgtgtggaccgtaattagccggattagggcgggagctgcgcgggcc

SEQ ID NO: 322742 - DNA, 122 bp, Homo sapiens
ggtgtagagcggcttgctgaaaaccggtggctcatctacgtccagcacgctgatcttcaccgtagctgtgtctttgaaagggcccgccgagtgaaaccggtggtcaaggtgaaggttggaag

SEQ ID NO: 322743 - DNA, 122 bp, Homo sapiens
tttgaggtaattatagagtcacaggaagttgtaaaaatagagtcacccagcttcccccagcggtgacaccttacgtaactggcgtacagtatcaaaaccaggaagtcggcttgcacctgggt

SEQ ID NO: 322744 - DNA, 122 bp, Homo sapiens
tcctatgaaggagcgttccctcgtcagctgttggcgacgtggatgtgtggttgtgtaggacggaccgtccggagacacgctggattctctgcctttattcgctagcttccaaaacaataagc

SEQ ID NO: 322745 - DNA, 122 bp, Homo sapiens
agcgtgtgggtctggcgtctgccccggaatcaggaccccgattcgatgtgaagcagatgacgctgttcaggccagggcctcaccccctgtggcccacagctgggctcagaggtcgttcagcc

SEQ ID NO: 322746 - DNA, 122 bp, Homo sapiens
gaggcatggaggaaacgctccagcagcccaacctcgccagggcaccgcgcaggagaggcgcggcctcaggcaggcctgggtccagcccgggctcacccctcatcggctgtgagatcctgccc

SEQ ID NO: 322747 - DNA, 122 bp, Homo sapiens
agcacttccgccttccgtcgcgagggcccgcccctctccagccacgcccccaccgcaggccgcaggtggattggccacgccctcggaaggctccacccacactgcacacactatcgcgctgc

SEQ ID NO: 322748 - DNA, 122 bp, Homo sapiens
cttcaccccgccccattagctcttgcctgtcttgtttgctaacctttaactgcagtagatcgcgttgacagctctatcgaaaaatgcaaaggcgagtacacaatcctagcaggaacaatgaa

SEQ ID NO: 322749 - DNA, 122 bp, Homo sapiens
cagaactctccttcgttaggtccacagtttcatgaggtacatttcgtatattctgcattacgacaggcaacatcttgccaatttttccccaatatataacaccatgctccccttttccagcc

SEQ ID NO: 322750 - DNA, 122 bp, Homo sapiens
ccagcctgtcccgcggagccggccccaccactcacgtcttcccaccggaggccagcacctcgaggagcagagaggagctgtccccgagtgccctgagttcctgacccacaggacacaggaac

SEQ ID NO: 322751 - DNA, 122 bp, Homo sapiens
acattgtgagcgtgagtgtgagcatgtgtaaggatgcacgtgtgtgagcgtgcatgtgtgcgcggatgtgtgcgtgtgcctgtatgcacacatgtgagtacagagagaccaagagacagtga

SEQ ID NO: 322752 - DNA, 122 bp, Homo sapiens
tgacattttactgccataaagcagaggattcccaattgccatgtatctatcaaaggccatcgcagcaagaataaaaatttccacatggacaagagcaatgaagaagaaacactgtactaaac

SEQ ID NO: 322753 - DNA, 122 bp, Homo sapiens
cggagtcacggtctgaaccctgggcgggcttggtccccggaaacatcgagttccttgaaacgagttctcaggagttggtggagacgctggccctttgctacatggttgtagaacacatgaat

SEQ ID NO: 322754 - DNA, 122 bp, Homo sapiens
ccggtcctgggaaccgctctttaccccactctgcgtgtctgccggaacctggctgggaagcgctacttgctgccctgccagcccgggtgagggcggagccaggcctccagccgcgaggactg

SEQ ID NO: 322755 - DNA, 122 bp, Homo sapiens
cttccactgtgagagttacccgaagctcggcgtccctgatggtctagggggcttcccaggcgatcgggcagtgtcagtcttcagccgctaagccgagaagatctgggaaggagtcagtcaga

SEQ ID NO: 322756 - DNA, 122 bp, Homo sapiens
cctcgggtgattcgccgcctcggcctcccaaagtgctaggattacaggcgtgagtcaccgcgcccggcctggagtgtgtattatcccaattttatggggagtaattgtgctcactcggctca

SEQ ID NO: 322757 - DNA, 122 bp, Homo sapiens
gccccacagatagaaaaatcacaaagcgtgataacacaaagtgcaggaaagaagaaacggcggtgaaatgagatcatctcacacgcggcccagtttagcttagagtcttgttcctagctctt

SEQ ID NO: 322758 - DNA, 122 bp, Homo sapiens
actcggccgactgcttggccgtcttggctgcttcctccacgccctccttgattttccggccgagatcacttttactgacttcgtgaaggctctactgagacagacacagagagggggcgttg

SEQ ID NO: 322759 - DNA, 122 bp, Homo sapiens
ggccagaggaggacaagaggcttttacaccgaacggaggtgatgtggacgacaacggagacgcagccgcacttcaccaagcggccggtccgaggggacatggcggcaacctctgcagcgtca

SEQ ID NO: 322760 - DNA, 122 bp, Homo sapiens
acaggtcccgccgggccgccttgggcgttgctggctgaggcccagggcagcaggtgccaacggtcaggaaaggcagggagccgaaggctgccggtgggcgcttcgcgttttgttccaaggcg

SEQ ID NO: 322761 - DNA, 122 bp, Homo sapiens
tatgttccgatacaatcaaaactcctggacgaacctcttgaataaagtcctgtgaatgagcggaatcataggtcctgggcgcccgagtatgcggcgggtggactccggattcagaggcggtg

SEQ ID NO: 322762 - DNA, 122 bp, Homo sapiens
cgttacgtcacatcgcgaacagagaaaggccgcttgcgcaggcgcagttctgacgactgccgttcagcacctgcgtaagcacctctcggccagggtgaggccaatggagtaggcggggcatt

SEQ ID NO: 322763 - DNA, 122 bp, Homo sapiens
tctgggctcctaggcttgcggaacagatcaggagtcgccggcattggggtaccaggaggacgcgagctgactacctgactccgggcggcgcaggacgcccgccgcgcgaggggcgggggcta

SEQ ID NO: 322764 - DNA, 122 bp, Homo sapiens
tctctaaaaataaacagtttcactgccgggctacacagaacttcctgcccgcctaggatgcgtccgggcccaggggcgcagtagggatagagggccgggtggaggcccaggaagtcctgggg

SEQ ID NO: 322765 - DNA, 122 bp, Homo sapiens
ctgcctgtggctttgtgggcgggcggcggcgactgggctggccctgggctggggccggtgcgtcttagctaagtgcccagcgctccggtgggggcggtaggggcggagccgcgctctccagg

SEQ ID NO: 322766 - DNA, 122 bp, Homo sapiens
tgtctttccctcaatgctgccaccatgcctgagtgcctgcagcccaggaggcccgcacaccggtacactcgtggacacctacacactccataggagatcctggctttccagggtgggcaagg

SEQ ID NO: 322767 - DNA, 122 bp, Homo sapiens
agacccctgccaggagatgctctctgcataggattggctaagagctctgtgggcggggctcgggaaaaatggggagccgttgccccgcccactcgatacaagttggttggatccccagggcg

SEQ ID NO: 322768 - DNA, 122 bp, Homo sapiens
tagtaaatacttatgcaggaggggctggccagatgatgagtgagctcatatccttttgatcgcttgtggaattgctttgtactaaactgtgctttgccagtatactattcctgcttttatgc

SEQ ID NO: 322769 - DNA, 122 bp, Homo sapiens
cttgatgcagcggacgtagaagggctcctgcagggacagaggggacttggagagggtctgcgccagcagcactgtgcaccctgccccacaccaggggcttcctaacccctcaaggtcccagg

SEQ ID NO: 322770 - DNA, 122 bp, Homo sapiens
ctggacaatggagctgcagccacaatggcatgactttgccatctgtggcaggctgaaggacgccctccacccctaaagacatccatgtcccaatccctagaacccgtgactgtgactatgtg

SEQ ID NO: 322771 - DNA, 122 bp, Homo sapiens
agccacaattctcctcacaccgacggacacaatggctttatgagggaaatcaaagcttagcgcggagggtggaggttgggcaagggggcggcggcttccttctgcccccagccccaggccta

SEQ ID NO: 322772 - DNA, 122 bp, Homo sapiens
tacgctgggattcgaaccctggggtctgggctatatcccagggctcttttcaccagctgccgcctagtttattctgaggccactaaatcaacgactttcatccgtctgctataactgtaata

SEQ ID NO: 322773 - DNA, 122 bp, Homo sapiens
gctccttggagaggcggggccttgggcagcagaatcccaagctcctcccggtgggaaatccggcagctcccgtctgagggtagggccagcagaccacctggcccagtaaactccaccggctt

SEQ ID NO: 322774 - DNA, 122 bp, Homo sapiens
ctcacagaagaggctgaggcgtcctggccgaataatgctttattctggaaaagatctgtacgaatctgcaaagcagtgaaaatgtgtggacggcttctgtttcttcagccgcaagggaggcc

SEQ ID NO: 322775 - DNA, 122 bp, Homo sapiens
ggccccggactggggtcacctgcgtgggtctctgcagttcaggcctcttctccaggacagcgaggagttctgggtggggtcctcagagctgacgggcggtgaggtgaagaagggagagcgtt

SEQ ID NO: 322776 - DNA, 122 bp, Homo sapiens
ctaatactattatggtagaaaggatcaatgttaaagcaaaactataaaaataaataaatacgatcacttgaccatggcgccttttcaatgaaataaggggcaaggggcttgggcaaacgagg

SEQ ID NO: 322777 - DNA, 122 bp, Homo sapiens
ccattgcgccctctagtggctgctgaggaaccgctgtccagcccgaagctcacagagccccgttcaggctgccgcaacctacctaggcggccagaatggagacttacaggtgggcgggcatc

SEQ ID NO: 322778 - DNA, 122 bp, Homo sapiens
cacagtgcccctcacagagcacaggcagcctcagcctctaacaaatggcacggggacagccggatgcatgtggaaaacaaacaggtcagatcacacctcacaccacacacaagaaccaaggc

SEQ ID NO: 322779 - DNA, 122 bp, Homo sapiens
gaacacccttggaagcagtcattattactaacgtatccgccacctctgaaggaggagcttcgactttgctatgtaagaaatctgactggatttctggtgttggcaaggaaacgctttccaat

SEQ ID NO: 322780 - DNA, 122 bp, Homo sapiens
aaagtgctgggattacaggcgtgagccaccgcgcctggccgcccctctggctttttaaggcggggcaaaaacttggaacagctaccacaaagcgaacgcctatctgtttggaatttcgcaaa

SEQ ID NO: 322781 - DNA, 122 bp, Homo sapiens
cgtgatccgcccgcctcggcctcccaaagcgctggcattacaggcgtgagccatcacacccggcctgaatttttttaaagcaacacatctagagaggcaggagaaaacacaatggaacatat

SEQ ID NO: 322782 - DNA, 122 bp, Homo sapiens
gtgtcccaccgagcactgagcctcccatgcagatgtgtcccgcttgtgcacagggcctctcgtgtgggtgtgtcccgcctgtgcacggaacctctgatgtggatgtttcccgcccccgccct

SEQ ID NO: 322783 - DNA, 122 bp, Homo sapiens
ttgtaccgaaacttatggatagtggaccaagaccagagagaaggaagagggagggaggatcgcctgggtctctagctagttatgggttcttcaccaagtgcagtgtattctgcctgaggaga

SEQ ID NO: 322784 - DNA, 122 bp, Homo sapiens
tccccgtatgagacgaagagttcacacctccaaagacggtgagtccttggcccccggctgcgtggaagttgttgtagttggggatggaggtcacaccgaagctggggtagtgctgaggggtg

SEQ ID NO: 322785 - DNA, 122 bp, Homo sapiens
gtaatgacttcctttcttaggactgccccccaacctccttattcttggagcctgggcacacgcacagctgggtggcccttcagctgatactgccttaactgctttaactctgcctgctgtgc

SEQ ID NO: 322786 - DNA, 122 bp, Homo sapiens
gaggtgttggactggaaacattttctcatcaaatatgagctcccctgtgtgtaagagcctcgctcacagtagaagctccatggctagtagggaaagaatgcaccctaggagatgggctggtg

SEQ ID NO: 322787 - DNA, 122 bp, Homo sapiens
ccctatattagcaacacagcagtcagaggagtccttttagaactcaatcagatcatgtcacgtcactcctctacttaaaatccttcaatgggtcccattacacaaagagtacaaaccagagc

SEQ ID NO: 322788 - DNA, 122 bp, Homo sapiens
actcccacatgtctgggcacctgccctgggctgaggccaggctgctccaggggcctcctgcgccctcacctgccacagagcaacccaggttaaatacagcccatgcacaaagccacaggcca

SEQ ID NO: 322789 - DNA, 122 bp, Homo sapiens
gggccttggcacaagctattccctctgcctggagcactttcctccactgacctttcctggcgctccaggtcaactccaggagccttcccagtgcagtctaggtgccttctccttccgcagcg

SEQ ID NO: 322790 - DNA, 122 bp, Homo sapiens
caggggcgctccccggccaaggaacactttctgttttaacatcgcgcacgagctggaaggcgtctgtggagggacacttgctattataacattgcgcacgagctggaagacatccgtggagg

SEQ ID NO: 322791 - DNA, 122 bp, Homo sapiens
ccctgggtgccagtctctccttctgtagctccgcaaagctctgggcttgtgtgagagtgtcggtgtgtgtgcatgtgtgggggtgagtctgcatgtgcacctgtcatgtgtagaagcttgta

SEQ ID NO: 322792 - DNA, 122 bp, Homo sapiens
attaaaaaacaaggagatcctgggatctccgtgggggctgggtggatcctggattctcctcggaggctgggtcggttctgggatctccgtgggggctgagtcggttctgggatctcctcggg

SEQ ID NO: 322793 - DNA, 122 bp, Homo sapiens
aaaggccccagtccaagcaggaagctcaccccttgtgtcctctccagatgctgagcttgccgagtgcaggtgtggtgtctggttccctcgtagcctgtgcctgacctgcactgagacgctac

SEQ ID NO: 322794 - DNA, 122 bp, Homo sapiens
ggaacggaggggcggccgggacgccgctcctacggatgggcgtgggaggcgctcgccatgcgctggcagccgggatattagcgcatttacagcggaatctctgtttatataaacagctcttc

SEQ ID NO: 322795 - DNA, 122 bp, Homo sapiens
ggaggcgacgcccctccaggtttggattcgtccatacggtttccacggcagcacacagaacgccggaagaagctcaggaagccgactggctgtgcagtttccgttcctgttggctggggccc

SEQ ID NO: 322796 - DNA, 122 bp, Homo sapiens
catctcagacgatgggcggccgggcagagacgctcctcacttcgtagatgggatggtggccgggaagaggcgctcctcacttcctagatgggatggcggccgggcagagacgctcctcactt

SEQ ID NO: 322797 - DNA, 122 bp, Homo sapiens
tctcgagtcctgacctcgtgatccacctgccttggcctcccaaattgctgggattacaggcgtgtgccactgcgctcagcactgtgggaggccgagatgggcaaatcatgaggtcaggggat

SEQ ID NO: 322798 - DNA, 122 bp, Homo sapiens
gtgaggacacaggccgtcctccggcggggagcacggtggggtcagggtgctgtgtggtcccgcaaagaggcagctgagcttgggcctcaggtcgttccacaccttgctcatctgaaagggaa

SEQ ID NO: 322799 - DNA, 122 bp, Homo sapiens
gcctcctgcactcaagccatcctcccacttcagcctctggagtagctgggaccacaggtgcgcaccaccacacccagctaattttgtgtgtattttttgtagggttttgccatgttggccag

SEQ ID NO: 322800 - DNA, 122 bp, Homo sapiens
ccctgtgctcgctatgacttctttgtgtgagactgtcagagtgtgttcctggccctgacacgtgctcggcggctggtttttctccttcagatcagcggccttggacagctttcgcttctttg

SEQ ID NO: 322801 - DNA, 122 bp, Homo sapiens
gtgagcccccagggcgcaccgcacttctaagtaaggtcggccgctgcgccttcaggctggcgagttcccccaaggtgacccgcatgcccagatcaccctctgctccaggtgaagcccaggcc

SEQ ID NO: 322802 - DNA, 122 bp, Homo sapiens
tctgaggtttgtgttattaaccccctattatctttggtctacccagggcagccaaagaggcgcagagaagaatgacaaggtgcccagcaagcggcaggatcaaagcctgggtctctaattcc

SEQ ID NO: 322803 - DNA, 122 bp, Homo sapiens
tgtgtgtgcgcgcgtgtgtgcgtgtgtgtgtgtgtttgcgtgtgtgtctgttggcgggggcgggggtgatggagagagctatgaagggcttagaaagcttcattaccaatttaaaatgtttt

SEQ ID NO: 322804 - DNA, 122 bp, Homo sapiens
gtgacaatgtacattctttttttccccccagctctgtcaaatcttactgaggagcttttacggcctagcctgtggtctgtcctggagggtatttgtgtgtacaacaatgtatattcttaaac

SEQ ID NO: 322805 - DNA, 122 bp, Homo sapiens
cccggggattctattttacggccgggtccggggccgggagcctgtactctaccgggattccgatggggaggggtggcttgccccaatagttctcaaatttagctttgggtcaacaatctggt

SEQ ID NO: 322806 - DNA, 122 bp, Homo sapiens
tacctgcagtgctttcctcaccaaaaatgttagctctaaccaaggagaacacagatctcacgtcttggcaggtctatctttcaaattacatataacccttttagaaaatacaaaacagtgaa

SEQ ID NO: 322807 - DNA, 122 bp, Homo sapiens
ggctgccctgcccacccctagtggtcggtaacgactggaagcagagcagccaggcaaggtcgggaggctcaggcgtccgacagtcagctctggatccggtccacccactgctgggctgaggg

SEQ ID NO: 322808 - DNA, 122 bp, Homo sapiens
gcacggctggtgttgattcttaataagtgacttcctaaagctgaggcatggggcttacagcgtcaatgacttgtttgaaaaatattttgtaggtgcctcataccactctgtttcctgtggta

SEQ ID NO: 322809 - DNA, 122 bp, Homo sapiens
tactttagacagcacactggggcctgcctgtgctgagagcataggcaacaatggtattagcggctcaggctagctttagagtgaccccagaaatgactagatggacagctcccccagcccca

SEQ ID NO: 322810 - DNA, 122 bp, Homo sapiens
tcattttaagggttagtgaaatgaagttcagaaaaattaagtatcttttcttaagttacacgaccagaagtggggcctgagattcaaacattggctgtctagcctcccactagtattcttat

SEQ ID NO: 322811 - DNA, 122 bp, Homo sapiens
ctgcccatccgactgctcccagagaaggacgatgccggcctccctcccccgaaggccactcggggctgccggctacacaactgctttgattattctcgttgccctctcacctctggcttccc

SEQ ID NO: 322812 - DNA, 122 bp, Homo sapiens
cgcagggagccctggagtggtggagctgcagctggtccgaggcgggagttcggggagaggcggggtttttcgtacctagccaccctgtatgtgtgtccgcactcacaccctccatacgcgtg

SEQ ID NO: 322813 - DNA, 122 bp, Homo sapiens
aatgggggcgggccccgggcggggtgggggcccctgggctcccagggtgggagctggctccgaggctggctggctccgcaggtccgctgacgtcgccgcccagatggcctccaggctgaccc

SEQ ID NO: 322814 - DNA, 122 bp, Homo sapiens
tctcctccatctaggccccagcttataaatctatgaaggtgtccaggtcctgccagactccgctgcatcttttgctttcactccagcagggtagcagcatgctgcctgtgccaaggcaatca

SEQ ID NO: 322815 - DNA, 122 bp, Homo sapiens
aaaggcacttgttcaagagtagggctgtccacagttagaccctgctaaggaatgactgttcgttatctcacctcctaattacagggaaagagtgtggtctggccccactcagatcatatatt

SEQ ID NO: 322816 - DNA, 122 bp, Homo sapiens
ggggtgggtctgtctggggcgagcgggggactcggggggagcgggagcgcgagcgcggagcggtgcccaggcaggtggcctggggcttacctgtctgcccctccacaccgcagcaggagtgc

SEQ ID NO: 322817 - DNA, 122 bp, Homo sapiens
ccacctgcacccggagagctgtgtcaccatgtgggtcccggttgtcttcctcaccctgtccgtgacgtggattggtgagaggggccatggttggggggatgcaggagagggagccagccctg

SEQ ID NO: 322818 - DNA, 122 bp, Homo sapiens
tccgctggccgaggggctgcgagggccgggcggcgaagatgcgtggggcgcggaaggggccgagcccctctttggactgcaagtcccgtctccctggcaacggcctcggccttgggggcggg

SEQ ID NO: 322819 - DNA, 122 bp, Homo sapiens
gaaaatgacacagtgtttctgggatgaccagacagacactgtatccagagatgctgtctgcgcagcggggatagtaaaccccttagtacaacattaattggcatggtggtttatgagttaat

SEQ ID NO: 322820 - DNA, 122 bp, Homo sapiens
cggccgagtccgaggtgtggcggggggaatcgaagttgtcagaccgcctccaagtgacagcgggaccctgtgctcgcggcccggcctggtcttgccctgctcgctccgccgcctctcttctg

SEQ ID NO: 322821 - DNA, 122 bp, Homo sapiens
ttcagtattctgttcaagaaaaggtaaactctatgaaggccaagactacagtgcctgtcccgtggtaggtgctcagtaaatatctagtgaattaaagaatatcctcacacgaacaaaatgtg

SEQ ID NO: 322822 - DNA, 122 bp, Homo sapiens
ggggcgcgagggtgcacgcgcggggtgggggcgcgggagccgccccctgcccgccccgcgcgcatgctcccgccgcacctgcctcgctcagtgttccacaccccggggagccgggtggcgct

SEQ ID NO: 322823 - DNA, 122 bp, Homo sapiens
tgggaaagatgggctttggaaagcccacatggaaaaccttcagggaggggaaagtgcctacggtgtgcccttcctgattaaatgtcatcgccatagctggacacaatggtgcatgcctgtag

SEQ ID NO: 322824 - DNA, 122 bp, Homo sapiens
ccgccctccagccattgggcgcgggacccagacgtccccggcgcccagcccccctctccacgcctctccagcgcgctccgctctcgggaccgcacttaccgggaactcgccgcccgcgggcc

SEQ ID NO: 322825 - DNA, 122 bp, Homo sapiens
cactgcagccgcaccagctcccgaatgttgcctgtcagaccggcagtgtgtgcccggttccgattccaagagcatcttctccagaactctggcggccgggccagggaggagcgtggactgtc

SEQ ID NO: 322826 - DNA, 122 bp, Homo sapiens
attcattcgggtgcgggaatcacatttgggaccaggaagccctgattttataggaaacctcgaggcaggctcggattaaagatcaatggcgacataaaatgtgggctgtcatattttcgctc

SEQ ID NO: 322827 - DNA, 122 bp, Homo sapiens
agctcttttacaagtgggcaaaatggctgtcctcctagttttaccattggttggcttttgcgtccttcaagggcggttacttaccacggattggttctttttctcttgaggttggaggaaga

SEQ ID NO: 322828 - DNA, 122 bp, Homo sapiens
atatttaaattaaatttagaagtgaacataagctcctggatgaagtaaataatatgatttcgttataagcacagggaatgtgggatgtttcaatgcagatttatggtgttttaaagaaactt

SEQ ID NO: 322829 - DNA, 122 bp, Homo sapiens
gaggttgcggaagtgttctgttttttgagttacccagaaataagctagcaaaaagaatagcggaggtcagaattcactctgatatcagtatggggtggatgagagcaattaggaaacttttg

SEQ ID NO: 322830 - DNA, 122 bp, Homo sapiens
cctgaccatgtactctctgtaaggtttggcatggacagcaatgtgctgttggcaatatggcgcactttaaggtatttaagcatggactcaggagtttgtagattatccaggcttgttacctc

SEQ ID NO: 322831 - DNA, 122 bp, Homo sapiens
tctgctgacgtgtactgcacatctcagggctcgaccacttactggatgagaacagagtgccggacctcgcacagatgtaccagctgttcagccgggtgaggggcgggcagcaggcgctgctg

SEQ ID NO: 322832 - DNA, 122 bp, Homo sapiens
tctccttccatcattgctccgaaacatatgcatcaccgctgcaggaccctgggggccggacggtgggatacggccaatctccggggagatgctgtggctcttaccgagcgggagaagggtac

SEQ ID NO: 322833 - DNA, 122 bp, Homo sapiens
tgcagctcacactggtaattaatgcgatacatcactaactttacccagcgcaggccggcccggctcaggtcgctcggccagcgcctggcgccctcgagcgggaccctgactcctgaccctgc

SEQ ID NO: 322834 - DNA, 122 bp, Homo sapiens
agtgtgagaactgggcgtcggtgctgggaccctctagacactgtgagtgtgagaactgggcgtcggtgctgggcccctgtggacactgcgagtgtgagaactgggcgtgggtgctgggaccc

SEQ ID NO: 322835 - DNA, 122 bp, Homo sapiens
gctcgcgtcccctcccccagtgattgccctccctgcgggtagcgtggagcccccactcctcggtgcaacccaaccccggagccacaaaggcgcgccccctagggcggaaaagtacactttcc

SEQ ID NO: 322836 - DNA, 122 bp, Homo sapiens
ttagtttcaggggttttgtttgtttttgcctacaaagagaagttccttagatagcatctacggggaattggttacctataccacagcctctttggggagtgttttttggtgacaaatctttt

SEQ ID NO: 322837 - DNA, 122 bp, Homo sapiens
tgctggcgccccgcgtccgcagggttcgggaacgtccttggaggctaagactccccaagtcgcactccggcctctcccagtttcctctcaaatgccgtctgccctgcccttgaggtccgttt

SEQ ID NO: 322838 - DNA, 122 bp, Homo sapiens
cagggcgcaggtgggagcagtatgtgtgggaagcagacagagaccggccccagggtcctgcgggacaaagaacttgaaagacagagcagggaccccaggcagagcccaagccctgactggag

SEQ ID NO: 322839 - DNA, 122 bp, Homo sapiens
ccaatcattcattcaacaagtgtttaacgagaacctactatgtgccagcactggactaggcgtgctggagcacactgttatgtgtattcagcacctagaacagtgcctggaacacagtaggt

SEQ ID NO: 322840 - DNA, 122 bp, Homo sapiens
cgtggcccaggagcctgggccaccctgcggcctggggctggggctgggccttgggctgtgcggcaagcagggcccagccaccccggcccctgagcccagccgggccccagcatccctactcc

SEQ ID NO: 322841 - DNA, 122 bp, Homo sapiens
tcgggcccggctgtgtcggggtacagatcatcctggaagaggtccgactgggcagggggccggggaggtcaggatcagttaggaggccccatcagggtcccctcatccctcccctggcctcc

SEQ ID NO: 322842 - DNA, 122 bp, Homo sapiens
gagggctcgatttggagtcaagaaagctctgcagggacaggtagagctgaccggtctctgcgagggaagcccatggagcatgtctcctcgccctgtgattcgaactcctcatctcttccccg

SEQ ID NO: 322843 - DNA, 122 bp, Homo sapiens
cttacttaattactttaatgactctggacaggctttaaaacgcactcggcgctgggacggcgggcttgctgggatttgtaaacaggcgatcatgtgagactcagcggtgggactaaaagagg

SEQ ID NO: 322844 - DNA, 122 bp, Homo sapiens
gactcactctgcctaacacggggctctgtctggtgcacggctgtgtctgggaggccacggcgccgagagcaggagcccggctgagaccctcgggtttggctctgagttttctcatgtttctt

SEQ ID NO: 322845 - DNA, 122 bp, Homo sapiens
aagggtaggagtaaagaattttgatcacatatggagggtgggggattcttgctaaactgccgtggcagtgttacttcctaacactgcatttacaaggaagtgcacacaaggacctgggagaa

SEQ ID NO: 322846 - DNA, 122 bp, Homo sapiens
tgaacagaatatcttgaaaaatgggaagaggatactaaaataacacatagcttgcacctgcgtgaagccctaccacctcagtgataaaagaaccacaaagataaaaggttagagtagcacct

SEQ ID NO: 322847 - DNA, 122 bp, Homo sapiens
tctttataatgaaagcttaggatggttctgaaatgttatgctaattagtaattgatggtacgagcattttgaaagcatagaatgctatatcaatgctaactattacagacacaggtttagtt

SEQ ID NO: 322848 - DNA, 122 bp, Homo sapiens
tctcggaggccccggggtccacttccagggcttttccgacctatcgggtggggggtggggcggggggcaggaacgcaccggaaccgatggcgagtcgagagctttgattctgcgtccggacc

SEQ ID NO: 322849 - DNA, 122 bp, Homo sapiens
gctcctcggcagtttgagtgcctcagtttaccctgagtccctctaggtttgcgttatcgacgtggtggtagtagcggagtctcatcgggagcttggggaaactgaagcaggaagcgagccca

SEQ ID NO: 322850 - DNA, 122 bp, Homo sapiens
gaattaaggctatgttattactgactgttaccatctgcagagacatagtttctgatggtacgtagatttttgtctgaaagaattataaaataaaatgacttagagatcgcttcatataatca

SEQ ID NO: 322851 - DNA, 122 bp, Homo sapiens
ggtacaagtggcaaagcgccgatgaagcagcgcctgggcagggccgctgtatatatagagcgcaggcgcgctctgattggtgctctggtcgcccgcctggctggcaggctctgagccgctgc

SEQ ID NO: 322852 - DNA, 122 bp, Homo sapiens
ttgaggtagagctcatcattaactatgacgtcctcacccagcactgtcacgttctccatgcgtacctccaggagaggataggccttgtcagggaggcaggcacactccccgcccctctcccc

SEQ ID NO: 322853 - DNA, 122 bp, Homo sapiens
gaatatgtatgtgagatgagacaaacaaacttgttgtcaagtggagtgaccgggctatgtcgtcagcatcacattgtgtccctggaaagtagggtggatgccaagaaataatttctccaaat

SEQ ID NO: 322854 - DNA, 122 bp, Homo sapiens
actctatacgccccaagttttataaagtagagtcaagagtgatctgagctgggaaactcacgcaattttagttctgcatgaaagcacaggctctccccactggggaactcttttgagtagga

SEQ ID NO: 322855 - DNA, 122 bp, Homo sapiens
ggcggcggcggcagcggcggcggcggcggcggcgcgggggttgagtcgtggtggtgcggacgcgctcgtgctcgggaactatcggattaaacttgaatcgagtgaaattacacaaaggagcg

SEQ ID NO: 322856 - DNA, 122 bp, Homo sapiens
aaggcggggatgggggatgggacgcaccccagaggatgctcctccaaagcttatcctgggcgggctcagtggctcacgcctgtaattccagcactttgggaggctaaggcaggtggatagct

SEQ ID NO: 322857 - DNA, 122 bp, Homo sapiens
gagctatccactttatttgggattcattaggatttccacagacacagctattagaaacaacgtgctcttcttcaatttgtacatataaaaccctttgcttcatgaaatgtcctttaaaacac

SEQ ID NO: 322858 - DNA, 122 bp, Homo sapiens
tctctaacccggtcgtatcgcgagggatccggatattgaaagcccctttgccggaagactcgggcgctgggagaagcccgcatgggacaggctgccccagtgcccgccggctccctagaatc

SEQ ID NO: 322859 - DNA, 122 bp, Homo sapiens
ctgagtatccatgacctcagtggtgcgaaacccggccaacttaaacatggcggctaaacccgaacagcaaaacgttgctgacgccaatgaagtcatgctcgaaatggagcgaggcggcggag

SEQ ID NO: 322860 - DNA, 122 bp, Homo sapiens
gtaccaattaaaataatagacattgtcacatggtgcaattattttccagaaaacagctgacgtgtacacactaagcttggcaaaattcctggctaatttcgcaagaatgtttattccaaact

SEQ ID NO: 322861 - DNA, 122 bp, Homo sapiens
ggctgtgtagacctctcctgagtggggaggccgcgtagacctctcttgagtgagggagtccgcgtagatctctcctgagtggggaggccacgtagacctctcctgagtggggaggccgcgta

SEQ ID NO: 322862 - DNA, 122 bp, Homo sapiens
ggctggaaggggagggggctgtggggccagggacgtcagatgccaacagcaccaggggaccgttaaagttgctgcgccgccaggtgggccagggtgtctgcagaggtccccggcctcctggg

SEQ ID NO: 322863 - DNA, 122 bp, Homo sapiens
ttttgtttgttaacattgttgtcaagggagatttcctgccgctggttgacaaatgatcttcgcctttgtagcggacgcccctcgacccacccacccgatcccggccgcaccctgctctgcac

SEQ ID NO: 322864 - DNA, 122 bp, Homo sapiens
ccgggtgtctttccatccgcaggtatccgtcggcggggtgcccggcccgacgtgactacccgacaaagaatgcaaagagccaccccgtgaatcattctccgcgcctgggtcacaagcctgtg

SEQ ID NO: 322865 - DNA, 122 bp, Homo sapiens
tgttggtcttgacctcagcagctcgacacggtttgagagctgaagagggtgctgttctgccggcctcctcagctgagctctgggttgaggaagacgtccatacctttcatttattcaagtgg

SEQ ID NO: 322866 - DNA, 122 bp, Homo sapiens
cgggctccaggtagatgcggaagccgtgcgtgttctgcgcgtgctgcagcaggaaccacgcgctgttgaagggctgcttgcatgttgtgcaaatgtagctggaaggctcatctttacctggg

SEQ ID NO: 322867 - DNA, 122 bp, Homo sapiens
ctccttaacagcattattccaagtcatttggtgacttaaccaactgtattaggctgttctcgcactgctataaagaaatacctgagactgggtaattattataaagaaaggagatttaattg

SEQ ID NO: 322868 - DNA, 122 bp, Homo sapiens
gacactccgatgttaaaaaaaaaaaatcactgtgcctgccctctttttaccttccctaggcgcggccaccttatcagacagtctttgggtggaggcttctcttgggaacttcacagggtatt

SEQ ID NO: 322869 - DNA, 122 bp, Homo sapiens
ggtgtttgggagctctttgtatcaatgttccgacaagggtcccaataaccttaacctactcgaaaccagtttgggatggatatgatggggcttctgtgctattgctgggattgggagaaata

SEQ ID NO: 322870 - DNA, 122 bp, Homo sapiens
gtctggagaagtctgtagagaagcactgcgcctttgcagtgtcttctgaagaagaagaggcgggatctcatttgcttttgaggagtcgggtgttcctggtcacggtcgcatgttgtcacgaa

SEQ ID NO: 322871 - DNA, 122 bp, Homo sapiens
cccctcccccacagctagagccgccccagggccatttctgcttcattacaattgggcacacgtggagaaaggatactactggggagatcaattatattgcctgatctgcaacctgatgtgtg

SEQ ID NO: 322872 - DNA, 122 bp, Homo sapiens
acgctgcacctaatcttcgcggatagcctgcaagaggtattgccagacctcagcgaccgccgggagccctctgacccccaggcaaaactgcagttttacctggttgtggccttggccttgat

SEQ ID NO: 322873 - DNA, 122 bp, Homo sapiens
gctgttttatttatttaaatgagtttatttacgtaaacgcgggcctgtcacggtggttcacgccgtaatccccgcactttgggaggccgaagtgggaggatcgcttgaggccaggcgttcga

SEQ ID NO: 322874 - DNA, 122 bp, Homo sapiens
cagaccagatggcacaagatgcctgctacatcttcagtgcgaatgccaaatcaaccttcccggaaagataaaggccaccgcatcgaatccgatctttctaatgatgcattaagcctctcgca

SEQ ID NO: 322875 - DNA, 122 bp, Homo sapiens
ggggtcggagaaggggagagccttggagaaggggcttccagaggaaacagggtgttagagcgggagaggtaaccagaaaggaatatgggcccaccccagtcctctctgctcccctctggtcc

SEQ ID NO: 322876 - DNA, 122 bp, Homo sapiens
gggcccgcattcacaggcacaaaacctcgctggtggcactgggcacgcagcccttcctgtcgccagacgagacttcctcgacattgctcccatactaagaagcaccgcgtttcattcaacaa

SEQ ID NO: 322877 - DNA, 122 bp, Homo sapiens
tcctctgtaaaatgagaataacacccatcttgtgggctcctgaagggattaaataacacacgggaggcacgtcccgcaccgcctggcacacaatcggcctcgacatgcggcacagcacccgt

SEQ ID NO: 322878 - DNA, 122 bp, Homo sapiens
atatggaggaaggaactcttgccatccagtgagattcatcagggaaggcttgaggggatgcgcattgagcgtagctatgaaagagacaggggcatgggttggcgaagatgccgagaggactc

SEQ ID NO: 322879 - DNA, 122 bp, Homo sapiens
tctgcctacggggcggccccgctgcaggagcagtcagggagctgtgagctgtggcacggccgcctgaataaagctctttccttctacctgcggcttgcccttgaattccctccagggtaaag

SEQ ID NO: 322880 - DNA, 122 bp, Homo sapiens
caggaacccacatccgaacaatgagcgaggtaggagctggggagagtggcgcggggtcaccgccagatgcggggtgtggcaacctccaggcggccaaagtctctgacttccaggttcttctg

SEQ ID NO: 322881 - DNA, 122 bp, Homo sapiens
cctccccaactgcccaactcccccacccccacaatcccctcccgccacaactgagggaggcggtgctgaaaaacagctgactccagcaatgctgctcacgtgaccactgcagctgcagctcc

SEQ ID NO: 322882 - DNA, 122 bp, Homo sapiens
caagatgtctcacaccctagaagcctagggctgggggagacagccctgtctgggagggggcgttgggtggcctctggtatttatttggcatttataaatatataaactccttttttactcta

SEQ ID NO: 322883 - DNA, 122 bp, Homo sapiens
cagtgagtcataacgctgtttgtcctgggaggagggagggtgatggggtgtgagtcacaacggagagaaggactcactagtatggggcttgggaaaggcccgtaatagtgacgtcttccagt

SEQ ID NO: 322884 - DNA, 122 bp, Homo sapiens
tatgtcgtacagtcgcaaacattattccgttcttactgtaaacggccccggccacctttacgagaaaccaggaaacttctgagagttactagcagcgtttacgcgggcaaactgagttcttt

SEQ ID NO: 322885 - DNA, 122 bp, Homo sapiens
actcgccgtcttcgccccgccttcggaccggaaggagttgttggcgcttccggtggcctgcgaccccgtaattgcctcggtgatgtcgtgggttcaagcagcctccttgatccagggccctg

SEQ ID NO: 322886 - DNA, 122 bp, Homo sapiens
ccagggcactcctgaggttgaaagggggctctatttgcaatataatggcaaggatggaagcgcaccctaaccatggtctgtgcagcatagtcatgtatcatggaatgctgaggactgggagc

SEQ ID NO: 322887 - DNA, 122 bp, Homo sapiens
accgcccgctcccagcctctgcctcccccaccctcccggctccctcccggcctaggcggccgcccgacacctcacttaccctcggagcctggcgggtgctttggccacgggccgcctccgcc

SEQ ID NO: 322888 - DNA, 122 bp, Homo sapiens
acagcaaaaagggtggggttagctaggttgaataattttgaataatttgcataattttggcgggctttggggcatgggcgctgtccttaattgtctgatgtctggccctgtggtgattagag

SEQ ID NO: 322889 - DNA, 122 bp, Homo sapiens
gaacattggtctgaagctattgtgtagtgattaagagagtaagctttgcagtcataatgacgtgggtacaaattccagctctgtctctcaatagcatgagaccttagagaaattaacttcta

SEQ ID NO: 322890 - DNA, 122 bp, Homo sapiens
tccaactttaaaggtggcttcaacttctatgcggggctgaagggccaggtgctggtgctgcggacaacttcaactgtctacaattatgattacatttgggactttatcttctaccccaacgg

SEQ ID NO: 322891 - DNA, 122 bp, Homo sapiens
gatctcggaagcacagctcaggatcagcactcgttcgcgcttgggtgactttatccaacccggcacgcacgagaggtggcgcggctccttctcgccgacgccgcggaaaaccacggctcacc

SEQ ID NO: 322892 - DNA, 122 bp, Homo sapiens
gcagggcaaacacagatggagaagctgagggcaaggaagggaatgacgtgggaccccacccgttgtcgggggcaggctctgctctccaggaacaggtaacacagtcacttagagaacagtca

SEQ ID NO: 322893 - DNA, 122 bp, Homo sapiens
cactgcagtgggactaggctcaactctgagtgtaagaagaaaaacgggaatgtacagccacggagagggtgagaacggacggaaaactatgaagaggctacatcaggccaggggggttcttg

SEQ ID NO: 322894 - DNA, 122 bp, Homo sapiens
actaggaagtgaaatcagtgcctaaccgcagctgaaagtgctctgttaggctccagtcaccgcgccgggcatgctcagtagctggggccggctcggctgcgggagtaggaagcagctttgcg

SEQ ID NO: 322895 - DNA, 122 bp, Homo sapiens
acccaggacctcctacctgaaggacccttggctgggagggcagcttgcggcaggagggcccggatgcgactgtctttaatagtgcctgcttagatctaacccctcatatgttcgtcctgacc

SEQ ID NO: 322896 - DNA, 122 bp, Homo sapiens
tgcatcctcgccaggaactgattgtccttgcggatttctcgaacggcccctttaaattcacgcttgtgtttgtggatcagcctcttcctttcctgttcctccttactactgccttgttttct

SEQ ID NO: 322897 - DNA, 122 bp, Homo sapiens
ccgggtcccagggcagtatccccacagagggctgcgtctccgggctggggcaggcggcagcgaaagggagacgcggctccggggccaccccagtcccggcaggagttctgcccggaggtctg

SEQ ID NO: 322898 - DNA, 122 bp, Homo sapiens
caggccgctaccgcggctacttactttcatttaacacctccaccaggtctgcgcagttctcgcacatcgttcggccgccgccccccccctcccccgcttcggatcacactgactgatcccga

SEQ ID NO: 322899 - DNA, 122 bp, Homo sapiens
cgggcggcaggaggcggggggggagggcgcggcctccaggtccgcccagtgcacctgccgcgcagacctcgctacaggaggctccgagaccggattctgtcgcccgctcctgccgtgaccgc

SEQ ID NO: 322900 - DNA, 122 bp, Homo sapiens
ctgagggtccaaattagagcataagggctgatggacctagcgggtgtcagtgaatgagttcgtgagtgtggccttgattaggaagggcaaaagacacccgggcagtcctggccctggctggg

SEQ ID NO: 322901 - DNA, 122 bp, Homo sapiens
cacaagcaagcttgagtattggcgggatgtcacaaaagaaatgattaattgtgttagttccgcaaaagggcaaaaggaaaatttggcatgtttccccaattactacaggaattgtgatggtc

SEQ ID NO: 322902 - DNA, 122 bp, Homo sapiens
ttaaaatagatatactttctgttggctgctgcccctgacctctgaagctcatatgttcaccgcgagaggaaaaggggagtttgttgcggtctattctcagaagaaacacattccttccaaat

SEQ ID NO: 322903 - DNA, 122 bp, Homo sapiens
ccctagtggctctcctggcttggaagggtatggacaggagtggggcgtgggggcggggtgcgcaactgtggctccctgggcttccctgcgtcaagggatgggctccccccttaggaagccga

SEQ ID NO: 322904 - DNA, 122 bp, Homo sapiens
agaggagccacctccttgactagagctcaaggcatatcaagatactgggtatttacgttacgtttccagggaagccctctcccaactccttcttcagtttccaggattcctaccctatttcc

SEQ ID NO: 322905 - DNA, 122 bp, Homo sapiens
tctgttgcttcacaccatcctctaacgacaatgcgaagggagccggggccgcagctagagcgtgggcacccctaaagggcagggcaacgccggcctcaaaaaagcgaatcccagctagggct

SEQ ID NO: 322906 - DNA, 122 bp, Homo sapiens
ctgtcctgggagtctcttaaaggcaaggcccagtggctggctcagaggggtcccaggaaacgtggccaaatggctccactcacctgcatatccatacatgtcctcatgcatcagagtgccag

SEQ ID NO: 322907 - DNA, 122 bp, Homo sapiens
gcctgggcgacagagtaagtctctgtctcaaaaaaaaaaaaaaaaaaaaaaaagcagattcggttactttaggaggctcatcccctcaacatatggaaggtgagctgaagggacaggggaca

SEQ ID NO: 322908 - DNA, 122 bp, Homo sapiens
cccctaccccagaggaagggaatttggccttttgtaccctgtaacagtcatcagctgtggcggtggggtgaaggtggtgtctgaactctcagaaccggttcccaccagccaggacagtgttt

SEQ ID NO: 322909 - DNA, 122 bp, Homo sapiens
caggaaggagacccgtcctctcgcaagatcttcaccccacgtaggagacaggtcctctcgcgagatcatcaccccatgcaggagacccgtcgtctcgcgaaatcttcacccctagcatgaga

SEQ ID NO: 322910 - DNA, 122 bp, Homo sapiens
accatgaagataactcaggccgtcggagaaagtggcctgcccaacgcaggtgctagagcgcgaaccaagagaagtcgatcctcctggtctccccggctgcctggtgagtggcagaccacagg

SEQ ID NO: 322911 - DNA, 122 bp, Homo sapiens
ctgtctcctttgcctgggggacttagggccctggggctcggggagacccggcatccaaggcgcgccatgggggagcttcacctggatggagactggctctccccgcgtcccagtgccctgcc

SEQ ID NO: 322912 - DNA, 122 bp, Homo sapiens
cacggtgtcccttggctcaggccagcacctccgtgatgcttccatgacatggggagaaaccgccaaccatgggccatgtacaccagatgggtccaggcccagatggcagttgagcccgaggc

SEQ ID NO: 322913 - DNA, 122 bp, Homo sapiens
cacagaacgcttcttggacttagttgtaataatctctctcacaactccaatgcctttgctcgccttgcgtcagccagcaatactctttccccattccctctccctctccctctcccccttcc

SEQ ID NO: 322914 - DNA, 122 bp, Homo sapiens
ctcgaagccccgcctccagagctccgaccaattacgggagttctctattgcctcacggggcggagcctgaggaaagagaccaatgacttttgtggagtttgctacagccctccccttccctc

SEQ ID NO: 322915 - DNA, 122 bp, Homo sapiens
agccctttcggcggctctcgttgggggtagagttaaccaaagaaggcgcttctgaagggccgagcggagcagccctggggcctcagagccgcgccttcacgcccgcgaaacgcgcgccccgg

SEQ ID NO: 322916 - DNA, 122 bp, Homo sapiens
ccgtcaactgccagtttcaccaccgctctagaggtcacttccgggagggcgtcatctcaccgcgtcggcgtcgcggaacgatgacgtacagggctcggtcgcgctttgtgacgttggcgtta

SEQ ID NO: 322917 - DNA, 122 bp, Homo sapiens
gctcggggcttcggaatgcatggcagggaagccgctccctttgtctgcggaggaggaggacgcagattcctaaggagaaactgtccccaggcttcctcttgaaaccatagcctgtaaggaac

SEQ ID NO: 322918 - DNA, 122 bp, Homo sapiens
gtggttttgcttttgtggtgttactgccttgctgctagagcagcaggactgtctgcgtagcgcctccagcctgggacctcactcagttcccagggtattcaaagacggcagcggctcccatt

SEQ ID NO: 322919 - DNA, 122 bp, Homo sapiens
tgcactccagcctgggcaacaagaacgaaactccatctccaatatatgtatatatatacacgtgtcactgattcatttagttatgggaagggcaataggaatgccaaaagatttttttaaat

SEQ ID NO: 322920 - DNA, 122 bp, Homo sapiens
aggggctggggggccaatggcaaggagtgtgctcctgcctgctccatggagcaggaggcccgggtctgcacccacagtttgggtagctgcagctgctcctgggaagctcccacccactaact

SEQ ID NO: 322921 - DNA, 122 bp, Homo sapiens
ctcgccatagcgcctgggcagctgcacggctggccaggtccctgggtgcctccaagggagcgctctgtccccgcccgacccggagaaggctccgcccctggctgggcctgcaaccccagcct

SEQ ID NO: 322922 - DNA, 122 bp, Homo sapiens
agcagagccaaattttgtacaaaggagctggtgctagcaagctcaggaagaagccacagccggaagttcaccttgccaggacctggctcagctgcaggttcccaccgggccaccaggtggcg

SEQ ID NO: 322923 - DNA, 122 bp, Homo sapiens
tgagcactgagtgaacgagactccgtctgcaatcccggcacctcgggaggccgaggctggcggatcacttgcagttaggggctggagaccggcctgggcaacacagcgaaaccctgtctgca

SEQ ID NO: 322924 - DNA, 122 bp, Homo sapiens
atggggtctgtatttgggggttattatgggagtatctgttaataatggggcctcaatgatcgagggctggctaacaggggtctctactctggatgtgttactgggaatctctatctcagggt

SEQ ID NO: 322925 - DNA, 122 bp, Homo sapiens
gagtttgtgatcatggtacagaaatggaggctattgctcaatttgctcactctgccccatcggtcaaaattgctattcaaaatgtgccttactccctattttgtatttagagtcttggattc

SEQ ID NO: 322926 - DNA, 122 bp, Homo sapiens
ccttgatggcttaaaagtggcagtttcccctgctgtgtctctgtcctgccgcatgtaagacgtgccttgctttccgtttgccttccgccaggattctaagtttcctgagcctccccagccat

SEQ ID NO: 322927 - DNA, 122 bp, Homo sapiens
gcccgggacctcaccgaggaggccatcggtggtgccgtgcagggtaggcgggcagggtgccggtctgggtccctttgattggccacggtccacatggaagggagattccagcgggaaattgc

SEQ ID NO: 322928 - DNA, 122 bp, Homo sapiens
gaaggtgaggagtgggctctgccccgagctgtgtgccccgggcagagtgagggctcacttcgctgagcctcagcctccttctgcttgggaggagggcattataagaacccctcctgtccggg

SEQ ID NO: 322929 - DNA, 122 bp, Homo sapiens
gggtccccacactgccgcgggcagtgcggaagcctaggaggcagccgggcgcccaggccgcgctgcgcggagcagccggagcagccacctccccagttaaggccaggcccacccggcctggg

SEQ ID NO: 322930 - DNA, 122 bp, Homo sapiens
ggggtttcaccatgttgatcaggctggtcttgaactcctgaccttgcgatccgcctgcctcggcctctcaagatatgtcttttacagcaagccagtacctaagagcactgggcattggtttg

SEQ ID NO: 322931 - DNA, 122 bp, Homo sapiens
aagacgcaagtggaaaactatgcgctgtccgatcgcaaccctccaatctgtccctgtggccgccggcagctccgccttgggccacagacctgctgactcagggcttccctggcagccgaggg

SEQ ID NO: 322932 - DNA, 122 bp, Homo sapiens
gttcctctaaaggttaaacatagaaggtagcatatggcccagtcactccacttctaggtacgtaccaaagaaaactgaaaacatacgaaaacacaaaaatatgtatataaatgttcagagta

SEQ ID NO: 322933 - DNA, 122 bp, Homo sapiens
cctgacggcctctgactgaggccgtatccattggctaccaaagggaaggccgaggaacctcgtattgtaaccttaacagctactcagaggtatactgaccactggttttacttttggattgc

SEQ ID NO: 322934 - DNA, 122 bp, Homo sapiens
tgtgcattcaataccttaatggaactcgaggtggagcttatgaaatttgtgtccaaagtgcggaatcttaaacgtgccatggcaacaggtagtggcagtaacctcaggcttcgaaagtcaga

SEQ ID NO: 322935 - DNA, 122 bp, Homo sapiens
tcaatcgagctcagggcagtcctcagatgggcttgcagacttgcaaactactacctcaaccgtgggggcccttgttgaagaagatgaggtaattagccaattcagactgtttgagcacgtat

SEQ ID NO: 322936 - DNA, 122 bp, Homo sapiens
ctgtgctgacaaatcctctacttgaaaatcccccagctaaggagtatctgcccaaggtcgcggccacccagatgttcggtccccactccttcctccgctgaaaagtcgcaccgatgactaac

SEQ ID NO: 322937 - DNA, 122 bp, Homo sapiens
acagaactgagcaggggcaggtctccaaggcaagcccagctggtgtgacttagacaatgacgaggcttcaactcactgtcttttttttttttttttggagggtattttttatttgtgggttc

SEQ ID NO: 322938 - DNA, 122 bp, Homo sapiens
gagcgcacggggcagacgctcggttccccgccgtgcctcctcgctggccgcgctccctcccggtgccggcttctctgagtcaccaacctgaggctgccccggccgcctgcgcacccggcagc

SEQ ID NO: 322939 - DNA, 122 bp, Homo sapiens
ggaggaagtcttcccctctctgaacctcagtttcttcctgcctaaaatgggcatcccagacgcccccaactcgcaggcaggaagatcggtcccaagtgccccgcaaagccgcgggccaggtg

SEQ ID NO: 322940 - DNA, 122 bp, Homo sapiens
accccgcctggcacccctggctgtgactgtggccgccacggccacccggaatgtgaagggcgctccgggctctgagcccgcagcttttacgacttctccctgcctcgttccttatattcaca

SEQ ID NO: 322941 - DNA, 122 bp, Homo sapiens
ctggatgtgctgggtgcgatgcgagtgtgagtgtgttttcgcactccagtggtggggcatcgacaagctcgacccatggctagcctcccctcggaactttcgaactgggggagtctccactc

SEQ ID NO: 322942 - DNA, 122 bp, Homo sapiens
tcacaggaaagatagagacacctagacagtgagggacagcccaggtggcattcggcaagtcgcccagttctttaaaggcaacgtgaagctattataataaaaacttatctccctacagggct

SEQ ID NO: 322943 - DNA, 122 bp, Homo sapiens
cattgagctgttgctggcagaggaggggcggctcctgggcactgcttgccaatggcctctcggcagctctgtgacagctgagctttgttcccagcctaatctgacctggttctccaaagcat

SEQ ID NO: 322944 - DNA, 122 bp, Homo sapiens
gaacaagaacccagcaccaaccagaattaggccacgttttcaccattacttaagctcaatcgcctcttagatgaaatgaggagataaactaaacattaaaatgatgaaggaaaaaaaattat

SEQ ID NO: 322945 - DNA, 122 bp, Homo sapiens
ctgcgggccagctggagttccgggtgggcgtgggcttggcggccccgtactgggagcagccggcaggccctgccggccccggcaatgagcggcttagcacctgggccagcggctgcagaggg

SEQ ID NO: 322946 - DNA, 122 bp, Homo sapiens
ctgggcccggcgatactcatagacgctgccgtgctcgggaaaggccagtgcttgcgggggcgaccccggcggtggggcggggtcctccgggtccccatagccaccgccgccgggcgtgtgga

SEQ ID NO: 322947 - DNA, 122 bp, Homo sapiens
ccctgttcacttctcaatcttcacctccatttctatcttaacctcaattaatcttattctcggtttctagcactaacttggtcagatctctgttctagaagaagctgttcggaggagagggc

SEQ ID NO: 322948 - DNA, 122 bp, Homo sapiens
ggtggggaggaaaacgcgtctgtcagggtattaaaccacagcctaatttcccaagcgtcacgcagcgatgcggaccccacctcaccccctcctacagggccactgccgctcgcgggtctcag

SEQ ID NO: 322949 - DNA, 122 bp, Homo sapiens
tatgagctctgcggttgagtgggtagtgaatgtcgaccagagactccaccaatcagcgagcgctctcggaaggcccagttgagtgagacggcagggagggcggggactgaggcagtggagag

SEQ ID NO: 322950 - DNA, 122 bp, Homo sapiens
tcctgatattttcactggctggaaaataaatcaggttttacctccgaatgaaactatgatcgccttttcccaagcacctagagcctgtttcatgggtgtgtctgttatgcttgggtacatat

SEQ ID NO: 322951 - DNA, 122 bp, Homo sapiens
tccccagtacccttggaataaaatcccgcctcctctctgcagctcgccgtttcacattagcgcccactaccctgtcccctcccccccaccatgtcaatgatccagaaaaaccagctgctcct

SEQ ID NO: 322952 - DNA, 122 bp, Homo sapiens
gaaaagagtgaagtaagatatttttaacagattgagaatattctgtaatttttttttcttcgaggtggacacaactggagggaagatactatatatgttatcagatttggacctctttccag

SEQ ID NO: 322953 - DNA, 122 bp, Homo sapiens
gggagtaggaagctcttcctgctttgtaggacaactgaactcattagggtctggaacagccgctcatcctctagatcacgtgatcaagcgtacttcaagtctccctgcggtctgactcctct

SEQ ID NO: 322954 - DNA, 122 bp, Homo sapiens
agggggatgagttgagaggaaggcgatataaacatgtagaggatggagtggggaatcaggcgagactgatgggtcagatgaggaattttagacatgctaggagtggggaagataaagggtga

SEQ ID NO: 322955 - DNA, 122 bp, Homo sapiens
cctggcccttcataagtctctgcctcacctctccaatctctttcataacagcaggaaacacgtgaaccacactgatgtgtgctgaagcccagaagtgcagatccccactgcagaactactgg

SEQ ID NO: 322956 - DNA, 122 bp, Homo sapiens
aaccgaatgaatcgcaaccgagtagggaactttatgcatgattcataagtaggcgcggcccgcttgcatccgggtttctgggggtggggcccaaggttttgttccggccccaggctcagcgt

SEQ ID NO: 322957 - DNA, 122 bp, Homo sapiens
ggcaggcactgcgcgctcgacggccacaggctggccagctccctgctctccacctccatccgaatcagccaataggaattcccggcttgggcctccgcccgacccggaccacgcgggagccg

SEQ ID NO: 322958 - DNA, 122 bp, Homo sapiens
ttgggataggagccaatgggagggtccggcaagaaggcagccccgaaatcattagtttggcgggagggaggggtgagaggggagaggggagagggggcgtggctggggtcccaaagtggctt

SEQ ID NO: 322959 - DNA, 122 bp, Homo sapiens
acctttgtggttagtgttacagctcttaaaggcagtgcatctggagttgttcgttcctgccggtgggttcgtggtcttcctggcttcaggagtgaaactgcagaccttcgtggttagtgtta

SEQ ID NO: 322960 - DNA, 122 bp, Homo sapiens
caacaccattttttttaatacacagatccattcaaatatgtggcataaactggtgagatgcgtgtctgtagaggtacagtcttgctataaaagagaataagcctaactggtctgattcaata

SEQ ID NO: 322961 - DNA, 122 bp, Homo sapiens
agtgattggatcaaggaggtggtcccccatgctgtcctcaccatagtgagtgagctctcacgagatctgatggttttataactgacagttcctccttcacactcttgccctctcttgcctgt

SEQ ID NO: 322962 - DNA, 122 bp, Homo sapiens
ccccgtttcccaggactaggggcactccgcactggaccctagtcctggcgcgggatggggcggcccccaggcggggatagcgggggaccgacatccgagaccagccaaggcccccctctgtt

SEQ ID NO: 322963 - DNA, 122 bp, Homo sapiens
gagtgcacctgctgcctgttctgtccctcccgggagcccccgccgctgtcgccgtcgagtcgccatggaagtgcagaaagaggcacagcgcatcatgaccctgtcggtgtggaagatgtatc

SEQ ID NO: 322964 - DNA, 122 bp, Homo sapiens
gggaggcctagcaaccgcgtcctcctctttgcgctgcctcttggatgctagtcgcgtacgcggcctcagtctgcgaactacaattcccagaaatctccgagctgcttatcgtcacagtacct

SEQ ID NO: 322965 - DNA, 122 bp, Homo sapiens
aattcagccccacccttttcctccttgatccgggccttcctactccccaggcctccccttcgcagccatcgctactcccgacccccgggtgtggggacgtgacttcttctgtcttaggacat

SEQ ID NO: 322966 - DNA, 122 bp, Homo sapiens
cgaactcctggccttaagtgatccatccacctcagcctctaaaagtgctgggattccaggcgagagccaccacaccaggccagttgtcattattccttctgtgcgtgaatccaaactgggga

SEQ ID NO: 322967 - DNA, 122 bp, Homo sapiens
gtcttcgaatctaacctgagatctgcccacctgaggagggtgtctgaaaaagagcgtctccgcccggcaaatcgcccccaggctgcgtccctccgcccttccccctctcccttgccgttctg

SEQ ID NO: 322968 - DNA, 122 bp, Homo sapiens
gcattaaaatctggtgcttcctgtgacacattaccagaagcaaggtggctcccagggctacgcaaaaaagaatgggtccagtgaggtccgtttcattcataatgctgccatctactggcttc

SEQ ID NO: 322969 - DNA, 122 bp, Homo sapiens
tccatggcactcgcaggccagcgaaagttccgagtgggcacaggctcagcaggtcccgcacgcagagcggcagaccggcgggcagtaagggccttagcacccggcccagcagctgtgaaggg

SEQ ID NO: 322970 - DNA, 122 bp, Homo sapiens
cctgcggtaactcacggccacgttccaggttccagaacccattcctattcagctttgtcacgtggctggtgaggggagacccgggggcagctggagaaggaagaccccacctgccctctgca

SEQ ID NO: 322971 - DNA, 122 bp, Homo sapiens
taaccatgttggtgtacagttacatcagacagtcttcagatgtgttttcctaaaactgaacgcaacacaacataaatatgacttctaccccagccaacaaaacatggattttgatactgaat

SEQ ID NO: 322972 - DNA, 122 bp, Homo sapiens
gatcctctcctcaaggaagaacttgccccctcccccaaagccaagagtgcccctgcagagcgaggcagagagcaactaaaagaaatttctcctgattggagggtgggtgggatgaggctggg

SEQ ID NO: 322973 - DNA, 122 bp, Homo sapiens
aagtctcgtcccggaggtggaaatcttaatccccaaatctccactccatccccggggatccgccccactgtaagtgcagaaggcgggaaagtgagccgaagagcgccgcacacggccaaccg

SEQ ID NO: 322974 - DNA, 122 bp, Homo sapiens
tcgcgcgcaggccactaacctgtcagcaagaatgtgccagtggtcgcggggctcatcctgcgtgtcccccgaccctgtcccgtccaagcacaggggtctcccagctcccaccaccggggcaa

SEQ ID NO: 322975 - DNA, 122 bp, Homo sapiens
ctttgtttccaattcccatcacgtgtgctaattagttagcgctgctggctggctgggaggcgtgtggctggcctaaaagcagaaagatcacttcctgtagggagccgggccggctgaatact

SEQ ID NO: 322976 - DNA, 122 bp, Homo sapiens
tgactaaacctggagactcgggtggccgaggggcttcataccagctgaagagcgacaagccgctggcagccgcggatctcaccgccgctcagggtgagtcccgcgggaggggctggactcgg

SEQ ID NO: 322977 - DNA, 122 bp, Homo sapiens
tagctcaaagaggacattcatgtgcactctggcttccagttggccatttgagtaagtgatcgcaattaactgacgagcggcagggaaacacttcctggaattctcatctacagacaagaaca

SEQ ID NO: 322978 - DNA, 122 bp, Homo sapiens
agcaaggggaaggatcgggagtacacagacatcatccggtgagggcgggcgggggcgtcacgggaggagagactcagatccggcctgcaccccggcccctggtcccacggccgcccagcccc

SEQ ID NO: 322979 - DNA, 122 bp, Homo sapiens
tcacagaccattgcagtcaggaaatcatggttctgagtgaaaaaggaaaacataatgacacggacaggaaatcaggggataaaaaaagctctatggccaaccatggtggctcaggccagtaa

SEQ ID NO: 322980 - DNA, 122 bp, Homo sapiens
ccccccaaaaaagatccaacttagatattagtcctgccattggcagtgagacatcctgcccgaatggctgtcaaagatgtgtgtaaaatgtgtgtgtgttccccaaaacaaaccacatactt

SEQ ID NO: 322981 - DNA, 122 bp, Homo sapiens
gcattgccagagcagggcgccccctgcagggacgcacccggggcgggggccaggctggggcgagccccccttggttctggagaggaaatgacatacagtttgtgaaagcataaatattcgtg

SEQ ID NO: 322982 - DNA, 122 bp, Homo sapiens
cccgcggctgagggtgggcctcggaagccccgcgcgtaccagactcctcgtccttcttgtcgaattttttaatcatcttggacgacttcccagcgcccagacccaccgcaaccgtcccaggc

SEQ ID NO: 322983 - DNA, 122 bp, Homo sapiens
cggcgaacgtgttaacgattattaagaatgtattttagccacatttcccagccccttccccggcctagcataccccattttgtggatgggaagtctgcctctcagcaaggtggcctcttgga

SEQ ID NO: 322984 - DNA, 122 bp, Homo sapiens
ccctgagagctggggtggttcagagcccgtccccactccgggagcaacgtcagggcggggcggggctggacggacaatgtgacctttgcaatgtccccgaacaagaactgcagatggtaatc

SEQ ID NO: 322985 - DNA, 122 bp, Homo sapiens
acggtggcgacggtgtgtgtgtgtatatatagacatctgcactgccccctctctggaacccgcccgtgccctgtcccgcctacacacggccctcgcctaggcggcaggcatgtcagccttgc

SEQ ID NO: 322986 - DNA, 122 bp, Homo sapiens
ggattaagcataatcttaccgtgtctgggggacaaaggcacgtagggtggcaacctctgccggcttggattatgccccttctcatattccaccttagaatctcagaatgttggggtaaacgc

SEQ ID NO: 322987 - DNA, 122 bp, Homo sapiens
cctttgagtacggtttgcgtccacaaagcgtagggtgagaaccttgggagcgactgggcccgtctttgctccctcggtggggttttgtctcctggcttcccccaagtgcgaggcagttggtc

SEQ ID NO: 322988 - DNA, 122 bp, Homo sapiens
gccacaaaacgggcaaagatgcccatgccacccacctgcagagcaccgaggcgtctgtgccggccaagtcagggcccagtggtccagacaatgtacaaagcctgcccctgtggcccttgcca

SEQ ID NO: 322989 - DNA, 122 bp, Homo sapiens
gccatgtgagccagcgtagggacgaaaactcatagacacatcggctgttcacacgttccccgcaatctgagaacgaacaggaatggagagaggactcaactgggacccacgtggaaaagacc

SEQ ID NO: 322990 - DNA, 122 bp, Homo sapiens
ccactgtttctctggcgtctgaatgctgactcattccccgggcaaccccagtttcaattccgatagctctctgacattttgtcactctgcatagttgagatgggacacctctcaggttagcc

SEQ ID NO: 322991 - DNA, 122 bp, Homo sapiens
gaaaccgatccgcggctcccattcataaacgcagggcctcacgtgtgctgatcaaggtggcgggggagtcgtttccgcagcgtagacacttctcccagaagcagggctgatactccacttag

SEQ ID NO: 322992 - DNA, 122 bp, Homo sapiens
tgcagagcgaggaagaggccgcagtgaggctgagcgtgtgcctggtcagtgccccttggccgtcctttctgatgttggcctttgctcttgtgtaggagtcatctcagacggctcagtaccta

SEQ ID NO: 322993 - DNA, 122 bp, Homo sapiens
tgctctgggagagacaaagaggtggcgggctttgaggaggaaccaggaagggcagccaatcggaaaagggtggaagaccttccagagtccctggaagaccgtcactgcaagctgctaatagc

SEQ ID NO: 322994 - DNA, 122 bp, Homo sapiens
acacacttcgggtttcacgactccgggtttctccaggggatgggccggccggtagaggcgcgtgagggagacgaagggacttccgtttccttcacctaggctggggccaagccgcagagcgg

SEQ ID NO: 322995 - DNA, 122 bp, Homo sapiens
gtgcaaattcaccattttatataaaagacctcagcatatgtggatttggtatccactggacgtgcagaaccaatcccccatggttactgagggacgactgtacatctctgagggtgcgggag

SEQ ID NO: 322996 - DNA, 122 bp, Homo sapiens
tgggtctcatttccgaggccgaaaatgctggctccaaagtggtgccctgggagatgagggcgactcgcagattccaccctattctctgaatgggcttcgagtctccatggtaacggcccctc

SEQ ID NO: 322997 - DNA, 122 bp, Homo sapiens
gacttggcacggaagaacttcccgctgcgcctgcgcctgtgcgtatgaggtcgacccggacgagattcttcgtcgccttggcccaaatcccgaatgctctgaggtgccctgacataactctc

SEQ ID NO: 322998 - DNA, 122 bp, Homo sapiens
tgtgaacgcaagcccgctctccccaccgcggctctgcacaaacggtgctaccacgaggaccgcctgcttcatgcacacggcccccctgcagccactgagcgtgcaaaggctggtccaccctt

SEQ ID NO: 322999 - DNA, 122 bp, Homo sapiens
tctgacctcgggagcgcctggctgtaatcttttaccatggccttgccctcctctcaggggcgggaccccaaaacctaccaatcagaaagtggcacgccggcattggccccgccccgtccctc

SEQ ID NO: 323000 - DNA, 122 bp, Homo sapiens
aggggcatagagaggagacggagccggttagaaggggcgcgctcggagctcggctggcctcgcctggagggcggggcccgagggcggtgcgcgggcggggccggggccgctcctccctggcc

SEQ ID NO: 323001 - DNA, 122 bp, Homo sapiens
cagggcctaatgacatgcacacagtggtgcttgaccagaactggttcatgtcatcttgaacgcatggtgttcctgttgcttgagtggggggtggtgcagtgaaggataaggttgaagtgtag

SEQ ID NO: 323002 - DNA, 122 bp, Homo sapiens
cgttacgtgcacacgtggaaatgccttctttccgagtgctcattggctctgaccggctgtcgtttaacgcagagctttctgggtaatgtagttccccactttccatggcgctaaaaagagcg

SEQ ID NO: 323003 - DNA, 122 bp, Homo sapiens
aggtctctgatccggagcaagctgttccctgagctggaggagcgcagcttggagacagcccgggccgagcccccggaccccttgccggacaagatgcgccagtcggtggtgagggggcgggg

SEQ ID NO: 323004 - DNA, 122 bp, Homo sapiens
atgcactaatcccaggggctcaacagaaggggaggcaagtggtgagggcagaagggccagcggacaccaggcccagacacgggctagtgggggctgcctgcggctcccccaggtcaaggaca

SEQ ID NO: 323005 - DNA, 122 bp, Homo sapiens
aaccaaggaccttgtctgttgttcattgccatgttgctgtgtctacaatagtgcccagcacgtagtaggcattcagtaaatgtctagaatgaatgtattatggaaggaactgtgtcttattc

SEQ ID NO: 323006 - DNA, 122 bp, Homo sapiens
gacgccgggtgagtgagagagttggttggtgttgggccggaggaaagcgggaagactcatcggagcgtgtggatttgagccgccgcattttttaaccctagatctcggtaagagaccagcga

SEQ ID NO: 323007 - DNA, 122 bp, Homo sapiens
ccgaaccgagtctggaccatttagaagacgccggcaggtaactggcctccccaaacgccccgaaaattaaaagccttaggaggcttgttctgtgtttgtggttttgtaaaggcaatgcccgc

SEQ ID NO: 323008 - DNA, 122 bp, Homo sapiens
tgacagtgtcagaagcatgatgcctgacgattgcgcatgagggtcggccccttgcggcagcggtggggtgcactgcctccatagtacaccgctgcccgctgcttggattctggtgggcccac

SEQ ID NO: 323009 - DNA, 122 bp, Homo sapiens
cgtgggcgaggggtggggcccatatttgggggcggtttagaggtgggacccggcctagcccgcgtttcaggtgcccagacgggttggaaaggcggggatgggggatgggacgcaccccagag

SEQ ID NO: 323010 - DNA, 122 bp, Homo sapiens
cccacccaccccccgctttgtgtagctccagctaggatgatcgaggttgtttgcaacgaccgtctggggaagaaggtccgcgttaaatgcaagtatccactggcagccgagaggcagtggta

SEQ ID NO: 323011 - DNA, 122 bp, Homo sapiens
ccttgataaacacgtccctgtcctgccccagatggccagcggggtcagaggctggcctggcgttgaccgcccggccgtgcctgccctgagggacggccccttacccagtggccactgaggct

SEQ ID NO: 323012 - DNA, 122 bp, Homo sapiens
agcaggccctgcgggggccagcaaacccgctcacacagcccacggggcacagccgggccacgatggccaggccctggtctaggttgtggccctggaggcactgccgaaatttccctcaggcc

SEQ ID NO: 323013 - DNA, 122 bp, Homo sapiens
gcgaccaactgccccggccctgcgtcctcggccgccctaggccgccccccgaggaccccgcgccgcccccgcgctccttacctgcgcccccagccccgcgcccagcgccccgcgtccccgcg

SEQ ID NO: 323014 - DNA, 122 bp, Homo sapiens
ccaagagggccttcggtgaggcgggtgggctggcgggagctcttcccgaagtgcgttctacggatgcctggggtggaggagggtcggggatgggacgggctggaaggttctaggtgcacccg

SEQ ID NO: 323015 - DNA, 122 bp, Homo sapiens
gccgaccgctcaggacgagagcctgggggccattcccgactcctcgtccctctcccaccccgtccctctgtaacttctcccaggtcagccgccactgtgtcctgctcacagcaatgactgcg

SEQ ID NO: 323016 - DNA, 122 bp, Homo sapiens
attcattcttgccagacattaatcttccttcgtgtaggcgtttgacaagtatttatggagcgcctaatgtgtgccctacttatgtgggaagtgttgatgaagtaaatcatttagaaataatc

SEQ ID NO: 323017 - DNA, 122 bp, Homo sapiens
gccgcccccgcccggaggctggagtgctgctcgtcgggtcgtgcgttcgctcggcagcggcgtgcaccagcaccacccctgcgtgcaagtttgaaatgtgagctgcctccgattcatactcg

SEQ ID NO: 323018 - DNA, 122 bp, Homo sapiens
ggaaggccacgcagacgtaccctcagggtccaggagccgcgtcactcccaggtcccgctccgccacagagaaggcctggtccaggttctccaggttggtctgccggtacaccttgttcatgt

SEQ ID NO: 323019 - DNA, 122 bp, Homo sapiens
aaccggcctcatgactcagctggtcaggagatagggggccagatgctgaccccaaatccccggcagcacccctagcaaataggtctgtatcaaagattctgtacagctggttttgggggtga

SEQ ID NO: 323020 - DNA, 122 bp, Homo sapiens
tgcccccagcacttgttgctttctaacatttcataagacgtgcctgtttaccctgtggatcgtctgtttcccacactagaatgtaagctctacatggcaagcatttgtttccaatgatgtat

SEQ ID NO: 323021 - DNA, 122 bp, Homo sapiens
aggagcaggtggtggacggtgactcacaccgtgccgcgaagcgggggcgcctccgggccccgtagaaactctgcttgggctcagcccgtatggatcagctccgagaactccattctgccagt

SEQ ID NO: 323022 - DNA, 122 bp, Homo sapiens
acagagacgccatcagagccggcaacgcgcacctcccgggccctccacgcggaagggggtcgggggatggcagccccagcccaccccaggggctcctgaggaccaagcagaatttcgttaga

SEQ ID NO: 323023 - DNA, 122 bp, Homo sapiens
aggtgagaatgctctacctgggagtctgatagagtcaaaactaaacagaaacctctgcatcgtgcagaggagcaggaccatacagaagaaaataatctggaacagattcattaagaagaaat

SEQ ID NO: 323024 - DNA, 122 bp, Homo sapiens
gcaaaggcttttgttattgttattattaaaataggaaagcctttacctttttggaagaaccgatttagattttgcagagtaattcagtctttaaaaggtagtggtagttaaaataggtaatc

SEQ ID NO: 323025 - DNA, 122 bp, Homo sapiens
tcctgagactttcccaaaccccggctcccatgcagagcagagactgcccctcacagcccccgccttaacactcaacgtaacggcaccaattctgcaaggtatgcaaacaatcgaagagtacc

SEQ ID NO: 323026 - DNA, 122 bp, Homo sapiens
ggcagctctcgggaccgccctgagccagggcccaagcacgggcagtgcaaggacaggaaacggtcaaagctctgctgttaccacaggctgggaacaggactctctgtcccagcactgtcttg

SEQ ID NO: 323027 - DNA, 122 bp, Homo sapiens
gtaatatggctttgtacctgcaggccagtatcttcaagcaacaaacccatggtcctgggccgggaagctgtggctgcagtatagccagagacagagcccatgatttaaaaagtgacatctgc

SEQ ID NO: 323028 - DNA, 122 bp, Homo sapiens
cctcctcctccccaggccccgccccttcccccctgagtctttcggcctgggtggaggacgcggctgcttcaagtccttggctctgatccaggccacagattccaggttagtgagcaagttta

SEQ ID NO: 323029 - DNA, 122 bp, Homo sapiens
aacaccagagtctgtgactccagacaggacccactgtgtcctcttgaactttgcacagcgcgtgacgggggcagacggtgcaccgtggcccggcctttcgcgggggtcctcggggaagagag

SEQ ID NO: 323030 - DNA, 122 bp, Homo sapiens
cgcggggaagggctccggatccgaccctggtaggtggggagcagcggaccagcccaaacgcggagccaatcccgccaaagcccttaattgcacgcatctaagatggccgcccccgcccggta

SEQ ID NO: 323031 - DNA, 122 bp, Homo sapiens
aggagcggggaaaataagagggaagagcttcctggctggtaggaagggagatcctgacgccggcacgactttaagcaagtgcatggagacaggaatgaagccagaacgcaggtggggtgagc

SEQ ID NO: 323032 - DNA, 122 bp, Homo sapiens
tggaaacacatccctagaatgccaaaacatttattccaaagtctggtttcctggtgcaatcggaggcatggcaatgcctctgttcagagactgggggctagggccagtaaggcatttgatcc

SEQ ID NO: 323033 - DNA, 122 bp, Homo sapiens
ccccctcccattgcaccagtcatttagagatgaaggcatgcatgcttcctcaaatcattgcgacctgctgtcataatgtcagtttcagtggtatgtggtattagaatgatggaagagtttta

SEQ ID NO: 323034 - DNA, 122 bp, Homo sapiens
ggcacttcatcaagttcagcattgaacatgcttaaagggccgtctttctatgactcagcccggaggttctggagttgttgcccccatcacagtgggctttgggcccccgggcctgccccttg

SEQ ID NO: 323035 - DNA, 122 bp, Homo sapiens
gtaaatgtgaatttcaggcaaacaatcaataattttttagttatacctatgttccaaacacggtatgaaaccagattatactgaaatattatttactgtttatctgaaattcacatttaggt

SEQ ID NO: 323036 - DNA, 122 bp, Homo sapiens
aagtccacatttgctcctgcaaagcaaagagtatgtgaaattacagggcatattctcactcgaaaagtgtgccttacttctgaaccctgattttctgatttcttgacttgagcaaagatgtg

SEQ ID NO: 323037 - DNA, 122 bp, Homo sapiens
ctatggttgatttggtgttttctgctagtgactgcagaaatttatatagcttctcagcctcgaatgtggaaataggtgactcatttgagtgttttctttctttttagagtctacagaacttt

SEQ ID NO: 323038 - DNA, 122 bp, Homo sapiens
gcactcgaattttttagcttacatgatcataattatgatcatgatagttttttgtttttgcgtttgtgtttgtggttacaagattttagtagttgaattttaatggagtattttcaacataa

SEQ ID NO: 323039 - DNA, 122 bp, Homo sapiens
atgcgtgcgcacaggaccggccggcccctacgtgcgcgtgcgccgacggagccgggcgcgcggccgcagagagggggatcccagcccggcttggtgcagctcagcttcccttgggttcctgc

SEQ ID NO: 323040 - DNA, 122 bp, Homo sapiens
gcttgtgtcagcagtgcgacactggcccacgtgtcgtccttgttctctcctcattgctgccgtcactgtgtgctgcgcatgccctgcagttaccccagagctttatgtcacaacattgaggc

SEQ ID NO: 323041 - DNA, 122 bp, Homo sapiens
aagtgctgggattacaggcatgagtcaccacgcccggccctagattgtttaagtctttaacgaaatcccatttcttctcattccttagtcctttcccagccgtagcaaaaacaaacaaaaaa

SEQ ID NO: 323042 - DNA, 122 bp, Homo sapiens
agtactgaatcagattagcaccagctgcctccttgttttggctcatgtatatctattggtcgcatttaaaagcattattcgacagagctgtttgacagaggcaccttgtgtagctcagctgc

SEQ ID NO: 323043 - DNA, 122 bp, Homo sapiens
ctgcctcctgtttcggttcagggtctccagccgcccgggggagggaataggcggctttcccgcggggaatcccgctgccttgcctcccacagttccgttcccagacccacgccccactgccc

SEQ ID NO: 323044 - DNA, 122 bp, Homo sapiens
ttcccgccctgggccgggcccccggccccaccgccccctccccggccccgccccggcccccggaagcctcaccccgcccccggccccgcccccccgaagtttcttgggcccccggcagccgg

SEQ ID NO: 323045 - DNA, 122 bp, Homo sapiens
cacttgagactcgcgacaaagcaccacgttttccaagtggggcattctggcaggcaccaccgcagaggccagtgcagccagcccacaggacccttgcacaagacggagcctctcccgagtct

SEQ ID NO: 323046 - DNA, 122 bp, Homo sapiens
cagcagccaggcgtcaccatgcaccgtggcccggttcaaactgtgtttaaatgaggcccacgccaagcggtgcccgtctggctgtttctgtgcctccgtccagttttcttggcatcactgtc

SEQ ID NO: 323047 - DNA, 122 bp, Homo sapiens
accatacacaacattccacacatttctaattcccagctgtcaagttgccagtgaagaacccgtatttgaatggtgggtggggggtgacagtcatagtaattttagggtagaacattgggttg

SEQ ID NO: 323048 - DNA, 122 bp, Homo sapiens
ccacgccgcgctggaggtcagcgggcacgggtccctgtctgagtgggctttatgtttgtgcggccgtcattgcatacctgaggctgggtgatgtcagaaaattgtaggtgccccggctctgc

SEQ ID NO: 323049 - DNA, 122 bp, Homo sapiens
cacaccacccggagcaccacgccacccggagcaccaggccacccggagaaccacaccacccggagcaccaggccacctggagcaccaggccacttgagcactcagccatgtgcttgggaatc

SEQ ID NO: 323050 - DNA, 122 bp, Homo sapiens
gcggggccttggctagtcagtctcccggacgcagccacggccgcccccgcgaggctgcggcgtctctccagcgagcccgcctcgggcccgagcctggggtcttgtccctgaggagcgccgtg

SEQ ID NO: 323051 - DNA, 122 bp, Homo sapiens
tcgatcacctgcgcgggtcggggatggggctatgcaaagggtgactcaccagaccgaagtcgttctcagccttggaccaggaggctgccagagacagcagcaggaagatcgcggcaaacacc

SEQ ID NO: 323052 - DNA, 122 bp, Homo sapiens
taagggtctccccgtcccaggctgggagcgtggggacttccgtctctggactgtgcaaaccgtctggggctgcctcccagactggcatgctctccccgccccctgaaacctagggaaggttt

SEQ ID NO: 323053 - DNA, 122 bp, Homo sapiens
cttcaggacccgggccggcagcaccggctgcgagggttgccgaaggcgcacggatctgggcgctgaaaaagccaggatttggcaatggctttgctgtgtggccttgggcaagtcactctgcg

SEQ ID NO: 323054 - DNA, 122 bp, Homo sapiens
acggagcctggtcacctgggtgcttgttagatatggaaatcatcagatcccaccccagaccgagtcagaaacgttgagggcaggagttcaagaccagcctggccaacatggcggaaactccg

SEQ ID NO: 323055 - DNA, 122 bp, Homo sapiens
gctccgggccccttgcaaatggcggacaagatggcggcgggtcagctgacgacgagcgcccggtcccagccgagccggccccggaagccccgcctcccagaaagccccgccccgccacctcc

SEQ ID NO: 323056 - DNA, 122 bp, Homo sapiens
ctcagccgtctggcctcccgcggaaaggcgggcgcgaggcatcctgggagtcgcagtcggcggtcgactcacccgccctcacagaggaggtggggacgccatgaagaactacagctcccagg

SEQ ID NO: 323057 - DNA, 122 bp, Homo sapiens
gatgtggaaacgggccacaggcggcggcggcggggcccggcggatcctcatgggacccagcgaagagccctcgtcccagggtggcccatgccgctgaccccggctccgagcccgaaggcttc

SEQ ID NO: 323058 - DNA, 122 bp, Homo sapiens
agagtcaagttcactccactaaatatcatacctgccaggagggggcagatgtgaacagggcgtaagaaaatccctactcagagacagagaatgtggaaaaaacaagcagctagagggaggtg

SEQ ID NO: 323059 - DNA, 122 bp, Homo sapiens
gcccaggccagaggcaaggaccttaagccagggcagtagcaacaagcatgggaaggggcccggcagcaggccctggaggctggaaagggcttgtcaaatgtttggatgtggtggaagggaag

SEQ ID NO: 323060 - DNA, 122 bp, Homo sapiens
gagatgcagagagcctttggaagaggtcttcggagatgccagaggagccctctaggggtccgatgcctgggaggaccagaagccaacagcaaaactggaaaagcccggcaggcccaggagag

SEQ ID NO: 323061 - DNA, 122 bp, Homo sapiens
ccgcactcccgcgttccacggggcagcatccggcggcagcggagcctgtggctccccctgcgggctgctcagcggcgtgcacagtcctgccggctggcttgggtgggtggtgggctgcgggt

SEQ ID NO: 323062 - DNA, 122 bp, Homo sapiens
gctcatcggtgtcacggcgaggtccggagcggagccgcggtctcgggtcccagctctgggcgccggcctgctccccgccgccccgctgccacatctggctgagatcctcccggcgcgtgcag

SEQ ID NO: 323063 - DNA, 122 bp, Homo sapiens
cagccttctttgtctatactttgtctctgtgtgtttttcatagtctctcgtcccacctgacgagaaacacccataggtgtggagggggcaggcaccccttcagttgggcaaatggtctaata

SEQ ID NO: 323064 - DNA, 122 bp, Homo sapiens
cctccacagcgcatatggtgtgcagctgctggaacgggaacctcagcacaccagggtagccgcggatgaaaggcgaagaggcagcagaagggggagaggaacccggcccccagccctctgct

SEQ ID NO: 323065 - DNA, 122 bp, Homo sapiens
gtcggggctgagttctcggaggcagttgtcagcagccgccagttcactgagcaggggcagcgcgccggggcgaaagagctcggcgggaaaggagtctaggcaattgccggtgaggttgaggc

SEQ ID NO: 323066 - DNA, 122 bp, Homo sapiens
agctgtgagccgccacgttaaagatggttaagagaaggaaggaaaggaagaggagagatacggccgccagactgggctaagtcagggagagacccactcacgcagaggcacctggcaaccta

SEQ ID NO: 323067 - DNA, 122 bp, Homo sapiens
tgtcgatctctctctcgggggtcggggggtgctctctcccagggcgggaggtctgtcttccgccgcgtgccccgccccgctcactgtctctctctctctctctctttctctgcaggttctcc

SEQ ID NO: 323068 - DNA, 122 bp, Homo sapiens
ctcccactttattttcagccgggtcttccacctctccctcactacttatgaaatcctccacggaatagttctgtgacagcaaacggtgaagccaagtcacctcactggtcacgaaacccttt

SEQ ID NO: 323069 - DNA, 122 bp, Homo sapiens
gggagaaggagcaggagaacttgagttaagaattgccccccggattggaaccagaggtagcgggaagccagcaagggcgaggctctttctaggaactctaggtccaccgcttgcctttgggg

SEQ ID NO: 323070 - DNA, 122 bp, Homo sapiens
tctcgagcttccgctgcccgctgaggatcttgtggccgacggtgccctgcacgcagtagccgggcatgatgacctgggggcaggcacagagctcacagccagggaactccagccttggcacc

SEQ ID NO: 323071 - DNA, 122 bp, Homo sapiens
ttcccacgcgccccgctgcgatggcacccgcgccgggccccctagctcacacagtcggagcgtgctcagcgcgtggccacctcctgccaggtcccagccgggttccaccccctccttttccc

SEQ ID NO: 323072 - DNA, 122 bp, Homo sapiens
aacgggaactagatgaacccgcagggggaaatcacttgcttactgactcaggagcatccccgagagtgcgttttggggtcccttctgcacgctccctttcccaccgggcaaggcccatagcg

SEQ ID NO: 323073 - DNA, 122 bp, Homo sapiens
ggccgggacccgtaggcccccgacacccccggcccgcgttcggctctcctgactcaaaaacgctaaggcagctgcagtaccggcggccatgctgtaagagccttcttcaaactccgcccccg

SEQ ID NO: 323074 - DNA, 122 bp, Homo sapiens
tctacaaagcttttgtgtatggtttgtacagctttggggacaagtgaagggctgaaacttcgttgtgcagttttgtgggatatgtagaggctgaaatacagcctgcaatccactggccaggc

SEQ ID NO: 323075 - DNA, 122 bp, Homo sapiens
cacgttcaccactggagcccactgacaaatcaccaagattccaagcctcaaaaaggcaggcgccacccgcacgacggacgtcggcaccacacgagctgcccttggcaaaacgcgttgtcggc

SEQ ID NO: 323076 - DNA, 122 bp, Homo sapiens
gcagccccttctgtgtcatccaggtcctcagagcgaaagtctaaaatccagaacattggccgggtaccatagctcacacctgaatcccagcactttaggaggccaaggcaagaggattgctt

SEQ ID NO: 323077 - DNA, 122 bp, Homo sapiens
tgtcacctctcaggttcagaaaggccacaggttctgggaaaatgtccaagtcctcccttccgctgggaaaaaaccaggaaatttctaccaacccatccgaaatctcccgggcattggtgccc

SEQ ID NO: 323078 - DNA, 122 bp, Homo sapiens
cagccccgacaatgtggtccggaaacaggcagaggtaaccgagttcgccgccccagtcttcgcgccctggccggcgcgccgaccctttaccgacgccagccgcaccgggcctcggccggtcc

SEQ ID NO: 323079 - DNA, 122 bp, Homo sapiens
cggggcgccagggccactctggcctctgccctggggggccctggcttgggccgtgggcttcgtgagctccatgggctcggggaaccccgcgcccggtgagtggggcggccagaggggcgggc

SEQ ID NO: 323080 - DNA, 122 bp, Homo sapiens
cctcggcctcgacccccaccccccggcccacccccggtaacccccgaccggcctggactccggggtcaaccccgacccccgcctcctggctccctaggatcaccccgaccccgatcctggag

SEQ ID NO: 323081 - DNA, 122 bp, Homo sapiens
tttcagggcagcacttctttcatttgtttgcctgaaatatcctgtttttctcccccttctcggggcgctaaagagctcagagaaatctgcattttaattgacattccagggaaagagagagg

SEQ ID NO: 323082 - DNA, 122 bp, Homo sapiens
agctgtgaccgctgcacaggccagagaccctggagtcctcctcaccccggggttgggggccggacctgctgagccgggccgccccctctccacacccactcccagcacctggcccgacctat

SEQ ID NO: 323083 - DNA, 122 bp, Homo sapiens
taccctgcttctgctcctccagggagttgataatgcttgtgggcagcaacggcaggtccacgctgaccttcatcgttttgcccctttgccttccagaaggatttgcccctgccccggaaaag

SEQ ID NO: 323084 - DNA, 122 bp, Homo sapiens
atcccgcttcacatacgatctgcaattgtaccagcagccaaatggtcaagcgtacgctaacgtatactacacacacgaccgactcccaccaggagccttccttgagttgagccacgttagct

SEQ ID NO: 323085 - DNA, 122 bp, Homo sapiens
aagataatctttgtttgcacggagttcagacggtgggggaagacactataaacataattacgtaaaatatagatggcccttcatgatgaccagtgccatggagcaaaagaaagctggaaagg

SEQ ID NO: 323086 - DNA, 122 bp, Homo sapiens
cctgcgagcggaacccaccaagaaacacgccagccagggcaggggcgtgtaggagggattcggtaacccgagagacgagtgggaaagtaggaaaggtgggagtaaagcaacgcaaacataaa

SEQ ID NO: 323087 - DNA, 122 bp, Homo sapiens
tatttccttacttgactttctacacctgtgctatccactctggtagccactaggcacatgcggctactgaatatttgaagtgtagctagaccaaattgagaggcactggaggtgtaatacac

SEQ ID NO: 323088 - DNA, 122 bp, Homo sapiens
aagtgaggagcgcctctgaccggcccccaccccgtctaggaagtgaggagcacatctgcccggcccccaccccgtctgcgaagtgaggagggcctctgcccggccaccacaccgtctggaat

SEQ ID NO: 323089 - DNA, 122 bp, Homo sapiens
tgacaatatgaaacagcttgaacaggcaggccggtgggcagaagccataaatagccacctcgggggggcccccctggtcgctgggagcgccacgctgctctgttaataaacatgcgctcgct

SEQ ID NO: 323090 - DNA, 122 bp, Homo sapiens
gtttctgagtgacctcagcaaagcagctcagcctttgagctcagctttctcataggaaaacggggttgaaaaatcttccccacatttattatgcaaaagcaaccgacggaggagcgcctgct

SEQ ID NO: 323091 - DNA, 122 bp, Homo sapiens
acgagcttctcacggagcctctcttgagcctcttggcagtttccccctctgtgcccctcacgtttccaccagaaacgtgaaggcagaggccacagattctccctgagccacctcacttggaa

SEQ ID NO: 323092 - DNA, 122 bp, Homo sapiens
tcctctccgcgacggccgggcggagggagctgttgaagggcacgcaggcggctgcgggggcggagggagctgaggccccgtgaggacacgcgcggtggtggcggtggcggcgggcgcgcggc

SEQ ID NO: 323093 - DNA, 122 bp, Homo sapiens
gagatcctggagctggccggcaacgcggctcgcgacaacaagaagactcgcatcatcccgcgccacttgcagctggccatccgcaacgacgaggagctcaacaaactgctaggccgggtgac

SEQ ID NO: 323094 - DNA, 122 bp, Homo sapiens
aggcgcaggaacccttcgggggaatccctttagcagggagcgtatattgaagagtgcgtgcggaggtgagagcaataaactgataacggaaacagatggcatacttcgttttcagttatcaa

SEQ ID NO: 323095 - DNA, 122 bp, Homo sapiens
aaggcaaacaagggcgggataccggccccgacaagatagcctagaaagttttaacgagggcgttataccaagccaagagaggctcctcgcggcacccctggcacccccggcacccagtgagg

SEQ ID NO: 323096 - DNA, 122 bp, Homo sapiens
cagagttagccgagttagagctctccaccataaaacgccaggacagggcaaagagggggccgaccatctcaaacaccatgggattctaagtgggggctgaccatctcaaataccctgggagt

SEQ ID NO: 323097 - DNA, 122 bp, Homo sapiens
cctggcacaccccgggccaactctcggggtcctccctccggcgtcgccgtgagaggaacgcgagccagaacccccaacccccactttgggcagaagaagccagccggctccgcctctcccct

SEQ ID NO: 323098 - DNA, 122 bp, Homo sapiens
aaccatgaatgtggtcaggacagaaactagccatggaagagggaaaagtttccaaggtcacgtcagtgaaacctccagtaaagacaagaagatctccacagtactgcagggcagcccaggga

SEQ ID NO: 323099 - DNA, 122 bp, Homo sapiens
ctgctgtctcatagacatcagcttgcagggaagctgggggctctccgaattgccctgctccggggcccctcctgctgcgtgactcacaggcacattgcagagagaagctgccgctcccagta

SEQ ID NO: 323100 - DNA, 122 bp, Homo sapiens
actgaaagtcttcgggtatgaccaatggctaaatgcaattatttactcttgcaatgtgttcgaggtcacccagctaggtcaaggagtatttatggacagcctacttttgcccccggacctta

SEQ ID NO: 323101 - DNA, 122 bp, Homo sapiens
gactgctggggtcgagggcagaacagggggaaactgtgttctggcggaggcacagcaccccgggagcacccagagcctgtgagtagagccataggtaagccaagcttcactcggctccagcc

SEQ ID NO: 323102 - DNA, 122 bp, Homo sapiens
ggggcatgttctgagacttcagggaacccggcccgagctccgggaatggcgtgggtatggcgaccccgcgcagccccccggccgcagtgcaggcagcccagcagaagttccacctcgtgcca

SEQ ID NO: 323103 - DNA, 122 bp, Homo sapiens
gttctgatgaaaatactttgttagcatgtgtgcttccgatacaaaagtccataactttggcggtcggtgcatttgactttgtagggctgaaagtgtaggtgtgtaaaggacacagcaccaag

SEQ ID NO: 323104 - DNA, 122 bp, Homo sapiens
tccgccctctcctcagccatcttggttgtgggcagaggcagcttccggtgcacatgcccccgccccttagccctctcgtgccgcaccgtagggggcggtgtcggagttctgtctgggcctat

SEQ ID NO: 323105 - DNA, 122 bp, Homo sapiens
gcctacttcccggtccagcgtaacaacaaagtcacaactacagtttaggaggcaccagtgcgctgcgggagcacgtccattctccacggatcctctctaccaggctgtgcttgctctcatgc

SEQ ID NO: 323106 - DNA, 122 bp, Homo sapiens
gaccgcctcattagccggtcggtccttacgggcatgagcggcatcacgtgccagcacctccgcggctcatttgggaccctggctcttacctaaacgtgtgagctgcagagccaccttctcca

SEQ ID NO: 323107 - DNA, 122 bp, Homo sapiens
ccgtgctgagatggcaaatccgggcccaggtcacccagccacgccctctgagcccctgggcggtgcagacaccggcctgcttctggcctggacgccctcaaggggctgcctccctcggcctc

SEQ ID NO: 323108 - DNA, 122 bp, Homo sapiens
gcgcgggcgcggggtgggctgggggcgcggatcagtgggacggagttcggggttcggctccgagcgggcgggctggaagtgggggatccctcagccgcctccacgggccggccccgcgctca

SEQ ID NO: 323109 - DNA, 122 bp, Homo sapiens
gagtcatttcctctccctcatctcatttgccttgtttataaaatggtatccagccaggcacggtagctcacttctataatctcagaaggcgggaggatcagttgagctcaggagttcaagac

SEQ ID NO: 323110 - DNA, 122 bp, Homo sapiens
gaactaattgtctgaccaaggtaacgtgggcagcaacctgggccgcctataaagcggcagcgccgtggggtttgaagcgctggcggcggcggcaggtggcgcgggaggtcgcggcgcgccat

SEQ ID NO: 323111 - DNA, 122 bp, Homo sapiens
agacaagtgtaacggagcaagtaacggtgcctgctaacaagctccaccctcccacctcaccgtgtggtctgtctccccgccgcacagccacgcagtacacaccccaggagagcagcgcatgt

SEQ ID NO: 323112 - DNA, 122 bp, Homo sapiens
tgcctcacacaagaggaagagctttctgtcctgttctttccacccttcccactagtgagacgagagggagggccttggtttctgaaaaatgtcgcttaccctaaatgtcgcttagaggcaga

SEQ ID NO: 323113 - DNA, 122 bp, Homo sapiens
tacccatcagggacttactactctgtacttcccttttatcacatttcaggccagatgtggcggctcatgcctgttatcccagcagtttgggaggccgaggcaggcagattgcttgtctctat

SEQ ID NO: 323114 - DNA, 122 bp, Homo sapiens
cgcactggaactgtgcttttctcagtcacaattttgtacccatttgagttttgcacaatgcgtctagcacaagcttcaatatacttcagatctgctgcccggcctttccccattccataggt

SEQ ID NO: 323115 - DNA, 122 bp, Homo sapiens
tggaagaaaccaagttctgagaaagcgatgccggccaggaggggagaggggagtgggaagcgagtgtgccccgaaacccgtgataagtaacctgggcttcgaggctctagggatgcaagaac

SEQ ID NO: 323116 - DNA, 122 bp, Homo sapiens
actaccctcttcacctacatcctctgaacacctagtgtgtgcctggcccagtgctgcgcacggaaggaccctctggggacacccagacatagtccttgctctccccccaggttttggtgtcc

SEQ ID NO: 323117 - DNA, 122 bp, Homo sapiens
gcaaagcacacttttatagctttagcacaattagtcctcttggcgcaattgaatcccaggcggaaagaattaagggattgttcaagatcttttgacagattttctgctagccgaaggctcat

SEQ ID NO: 323118 - DNA, 122 bp, Homo sapiens
ccaatcagcgacgctgggctgggaactgtccaatcaggcacgcagcttgagcggagaggacggcttccgggatgtggcgggatttgtccgcttctttgtctttggctgccgctggaactccg

SEQ ID NO: 323119 - DNA, 122 bp, Homo sapiens
tttctcctgcagttggattgttaccaatgagacctgggaggaagccaggaggcaaaggcccggaactcagtgctgaagttgcatggctgtcaatggccactagaggatgccagagcccgaga

SEQ ID NO: 323120 - DNA, 122 bp, Homo sapiens
cccggctcctgtccgcaggccccgcccctgcagcggctccgccctgcgtcccgccttcctcgcactcccctaccagctcccagctggggctggcagcgccgccagggcacgcttccggtcat

SEQ ID NO: 323121 - DNA, 122 bp, Homo sapiens
ctcggtgtgcttgcgtggagagtggagaggtgcgtcgtttgtgccccgctttgccatgaccggggtggtcctggcacgccgggtatctagacagcttttcatcagtcgctcatcagcatgct

SEQ ID NO: 323122 - DNA, 122 bp, Homo sapiens
gtgcgggggttgagaaggttgctgttaaggttccctagggctacctgcagctttaatatgcgtagttagaatgtcaggcaggttgtggagagtggggggctggagacccccgacttctctga

SEQ ID NO: 323123 - DNA, 122 bp, Homo sapiens
cccgaccgcacgaggcatgggggccagggctggcctcaagagagcacaatctcggaggcccgaggtggcaggcctcgccgtagccaggcgtcccgcgctgggcccaggtcgcgactgactgc

SEQ ID NO: 323124 - DNA, 122 bp, Homo sapiens
aaatctgactcctaatcaggaaacaattatctacatttgctactagccccaaagctgattcgaaactcctgaggcaaaagttaatggaaaaatcacagtacagatacacattctaatgagac

SEQ ID NO: 323125 - DNA, 122 bp, Homo sapiens
tccaaagcagcgggagagagagagggaaaccccagtgtaccacctgtgctacaggcctcgcgagcagccagccacctccaggagagatttattcaagaggtttagactgatggaaactgtag

SEQ ID NO: 323126 - DNA, 122 bp, Homo sapiens
cttctttctagagtgagcgccaaaaagggcctgacagacagaagcctttggccccagcaccggcccagcccgtctctagacgattcttgctcctttcaccctcacagcctccagtggtcgct

SEQ ID NO: 323127 - DNA, 122 bp, Homo sapiens
cagcagcgggacaagctgaggcagtaccagaagaggatcgcccagcagctggagcgcgagcgcgccctggcccggcagctgctgcgggacggcaggaaggagtgagtggggcccgggcagcg

SEQ ID NO: 323128 - DNA, 122 bp, Homo sapiens
ctggccgcgaacgcgctctgggcgggggcggggccagggccgaaccgagggtgtggcgttcgcgacggtcgccaggggcgcctcccggcgcggcggggcgggtgcagtcacgacgccgcgac

SEQ ID NO: 323129 - DNA, 122 bp, Homo sapiens
ctgacttccaatgccaaatccatgccgaaattcagtgctataataatgtacatggccgggcgcggtggttcacgcctgtaatcccagaactttgggaggctgaggcgggaggatcacctgag

SEQ ID NO: 323130 - DNA, 122 bp, Homo sapiens
cccagaggcccagcggccttcccagagccacagcctgggccggacagagcagagctggtgcgggacctctcaccgcccaccctttaagcaaacgcttggaaaaatactttaaacattccaga

SEQ ID NO: 323131 - DNA, 122 bp, Homo sapiens
ttgaacccgggaggcagaggttgcagtgagccgagatcgtgccactgcactccagcctggcgacagagtgagactccgtctcagaacaaacaaacaaaaggatagaaaggcgagcacaaata

SEQ ID NO: 323132 - DNA, 122 bp, Homo sapiens
cgaggaggccctggagaggctccggctgtggtcggaacggtctcttcctcccagtatcgccgcggtttctacaggcacatcaggaactccgcactcacgccccgccccccgaccccacagct

SEQ ID NO: 323133 - DNA, 122 bp, Homo sapiens
agccgcggggacgagcgcaggccgcgggccgccactgccctagccgcgccgacggggaggcggcctcttatatggaatttggaccccggcgctcccctccaaggctggagtcccggccgcgg

SEQ ID NO: 323134 - DNA, 122 bp, Homo sapiens
gcgaagccaccaagtaagtggtcgctgcatccccacgcgggtcggggttcttcagacaggcggtccctcttccgggacccccgcttgggctgggtctccttcctctcctgagaaaccttcgg

SEQ ID NO: 323135 - DNA, 122 bp, Homo sapiens
gaccacgcccgttctcctcacgcccacgcccagctcatcttccattcaggtcttctactgcgagtggacttttggaagcctctttgatggttgcagcattagtagtatttctctgcacacat

SEQ ID NO: 323136 - DNA, 122 bp, Homo sapiens
ggcccagcaatcaaggagggcttcgtggaagaggtggaacttggagtggcctggaagaatcgcatagaatcagcaaaaccatggaaacgacaatgagcagggaacacacacaggtcccactg

SEQ ID NO: 323137 - DNA, 122 bp, Homo sapiens
taacccgccctgccccgggaggaggcgatctggagaacttggggagttgacggtgcaagccgcgtgtgtgcagagaagaggcagggccgggctcgacagaggagctccgcctggcgctctct

SEQ ID NO: 323138 - DNA, 122 bp, Homo sapiens
ttgaacttgggtcctgccgctgcccgtagccggcgtccccaacatggcggctccccaagacgtccacgtccggatctgtaaccaagagattgtcaaatttgacctggaggtgaaggcgctta

SEQ ID NO: 323139 - DNA, 122 bp, Homo sapiens
atactgcctgtatttcaacattggctcgctttgtgtctctgtgtcacattttggtactctcgcaatatttcaaaatttttcattgttattatgtctgctgttgtgatctgtgatcagtaatc

SEQ ID NO: 323140 - DNA, 122 bp, Homo sapiens
ccccgagtctccttggagtcagttccgtgaaacacaagtgcttgccagctctctaatctgcggcgtcctttgaaattccatccagcgtgtgctgaagctgagccaattaacgtggagagaat

SEQ ID NO: 323141 - DNA, 122 bp, Homo sapiens
tgggcacccacctgggccttctgcagggcgctgaggcgcagctcgtgcacgaaggggttccgccccgggggcgccagcagccgagcgtcgctggcccctgcgctggaggcaggggcggcccg

SEQ ID NO: 323142 - DNA, 122 bp, Homo sapiens
tacactgatgtatacaagatgcccagtttttcatttttaccaatcacctatgtttccaaacgtgtttatctttgtcaaccagatatgcaaaattaaggtgtctccttacaaactttctgata

SEQ ID NO: 323143 - DNA, 122 bp, Homo sapiens
cccatgagagcactctgtcacagccccgactggaaaccacggtgtccattaacaactggacggacgcaggagtcgttgtctgggcagacagcggagggttctgcagcaatgaaatggagttg

SEQ ID NO: 323144 - DNA, 122 bp, Homo sapiens
ccaggtgtacagccttgtgcctgacaggaccgtggccgaccggcagctggtgaggggcgtcggtgcgaccgccggaagcccctttcctaactcctggaattccctgtcactcagtcactccg

SEQ ID NO: 323145 - DNA, 122 bp, Homo sapiens
ctgaccctccaaaatatataaattcttcctgcctgagacccagtcattgtgaagtatttgcgtaataaagcacagctaatttacttctataaatgagcttggaggccgcaaggggcctaaat

SEQ ID NO: 323146 - DNA, 122 bp, Homo sapiens
aaaaaaaacgaatttatgatctcatcagcagcacataaatgcctgtttccctcacaccctcgcaaacattggttactgtaaaactgcaaaatttgccaatctgatagctgaaaagtggtgtc

SEQ ID NO: 323147 - DNA, 122 bp, Homo sapiens
tctgtggttaaaacatttttttttattcgttcagagttagcccttagggttttgcaagtacgtgtcattgtgtctcacatcccctgctgtgaaaatcaacttgcatttgaatgtgcatcttg

SEQ ID NO: 323148 - DNA, 122 bp, Homo sapiens
agagggagagtccaccctgtgtcagcttcagagacttccctagagccaccgcctgggatgcgggatggagtgctcaggccagggaggagtgaggtcaccacctgctggttaaacacagcaga

SEQ ID NO: 323149 - DNA, 122 bp, Homo sapiens
ggcgggaatccgagaaggccgagttcgctgtaatcccagggacagaagagggctcagagccgaggctggcgggccggaccccatctccccaacccgaacacaaagatgacccggtgggttag

SEQ ID NO: 323150 - DNA, 122 bp, Homo sapiens
cggcctggcggtttctcagctgtgcgcatgcaggatgagggcttggtcagcaggtggagccgtggacgcctttattgaacacaaactcttccttcctgacatcagatcagctgtaaaccttt

SEQ ID NO: 323151 - DNA, 122 bp, Homo sapiens
ccgccgcgcgtgcgcggccgcggtccccagccgaccagaggaacggccgtagaacgtgcccgaagtcgtcacccagcgcaaagcctctagcgtctcgccgctccgccctcctggccggagta

SEQ ID NO: 323152 - DNA, 122 bp, Homo sapiens
gtacttacctaatacacctcacatgacgtggttacgtaatgtgtgggggttgtacacctgcgctccaaatgtgctaagtcatgctgtgctggaagtcccagcctactcttgactaaagcaca

SEQ ID NO: 323153 - DNA, 122 bp, Homo sapiens
cgcgcgccgtgggccagcatctcctggatggtgatccagttgtccaggatcttcttgttccgcttcttcatggttttgcggtggctcagggcaatgatgttgagctcgggcttgctgtcgcc

SEQ ID NO: 323154 - DNA, 122 bp, Homo sapiens
ccagcttgggcaggtcagccgggttcttggcctccacggccactctgacaacagggctgacgctgaacttcatcacccgcatgttgtgcgcgtgctcgaaggtggtgatggtgcccgtcttc

SEQ ID NO: 323155 - DNA, 122 bp, Homo sapiens
ttaacatgaacttttttgctttttcttaactactcaactctcccatccctgaggaataggcgtctctcttctctcctattctgcgaatccatcctcctgggctctagccattcatgcctgcc

SEQ ID NO: 323156 - DNA, 122 bp, Homo sapiens
tgccgacagcacgcccacctggcatccctgcactacacctttgcgcgcaccgggcccagccggcccagtccctcaagcatcagtagacggaaaatgctcctgaacgcccccgcgactgcatg

SEQ ID NO: 323157 - DNA, 122 bp, Homo sapiens
ggaaggaaggaaagaagaaagaaaattaatgaatgcaaaacatattcatgttatgtgatacggtggatgcagaagtggattgtgtctgggccctgtcctccaagtgggaacacagccagttg

SEQ ID NO: 323158 - DNA, 122 bp, Homo sapiens
aaatttgttaagcatctgttagagctgtcacttagtatgagcaagttaatttaatctttacgcaaccttagattataggtgtaatgaatattattttgcagattaggtaatcatgtcccaga

SEQ ID NO: 323159 - DNA, 122 bp, Homo sapiens
ttgggagggaaatggagcatgctaagctaatgacagttttcccttctcttatttttcccacgtcacagcaacgtgctcgcatcagctcctcggtgtgtcgcgatgttggcaatgttgcacta

SEQ ID NO: 323160 - DNA, 122 bp, Homo sapiens
gtgggaatggtcaggctggggtacagcctgctctcggtgtgggcctatgatctaggctctcgcctcttccaggagaagatacaaatccacaagaaacaaagaggacacggctggttttcatt

SEQ ID NO: 323161 - DNA, 122 bp, Homo sapiens
gactgcagaactcggtttcccgactggctttcgaggcgcgtgcgcagatggctgccccggcgagtggtaaacagagacgtcaggagggggctgctgcttggagcaaaacaaaagggaaaccc

SEQ ID NO: 323162 - DNA, 122 bp, Homo sapiens
gacccaggacctgcacacaagagtggtactgaggattgtcagtgcccactcctatgccatcgtgtgggtgaatggggtcgacgcgctagagcatgagggatctacctcccctttgacaccga

SEQ ID NO: 323163 - DNA, 122 bp, Homo sapiens
accaccgcgcccggccgtgtgtatgctttttcttactttgaaagattactccaaattggccggttgtggcaagctgcttagtgtcttatatggccagtgataatgtctgtgagagcgcagac

SEQ ID NO: 323164 - DNA, 122 bp, Homo sapiens
ccgggcggggttaaagggttgggccgtgggacggcgcggtcagatcccaggtagtggcgccggtggatccggatcgagggcaggaggctgagacccgcgggtgagtgcgcgcgtggtgaggg

SEQ ID NO: 323165 - DNA, 122 bp, Homo sapiens
ccactagcgtcccctggcggcgagccgagcgggggcggggcagcaaggactgctcaggggcggggcgcgtgcggacgcagtgacatcaccacgctgccctcgctggcttccctgcaagctga

SEQ ID NO: 323166 - DNA, 122 bp, Homo sapiens
cgcccccggcctggccattggccgcagagctcgggggcgtggtcgagctggggctgggggcgcccgcggtgcccgcccgcgagtctcgctgcctccctcccggggctgcgggcccggcggcc

SEQ ID NO: 323167 - DNA, 122 bp, Homo sapiens
cgtgtgtgctctgagggacacatgcgtgttccagggattatatgagtgtgacgggtgtagcgttaggtgacaatgtcatctccgagttccaagcgttatgtgcgcactgagggacacatcca

SEQ ID NO: 323168 - DNA, 122 bp, Homo sapiens
aagaagaagaaagaaagaaagaaagaaagaaaaacaaggctggaaggctgagcagggtaacggtgcctgtgaggatacctggtgcaagggtgggcagtcagccttcacctcccactcccctc

SEQ ID NO: 323169 - DNA, 122 bp, Homo sapiens
caatgggccgtcccctctccccttggttctgcactgttgccaataaaaagctcttaaaaacgcattcgccaggctacagtgtttatttcctcctaacacccattgcctggcttccttttagt

SEQ ID NO: 323170 - DNA, 122 bp, Homo sapiens
cgccagcggagagcctttggatttaccgtggcattacttttaattaactctgcggcgcggcgcggggagcgcagggtgggccctaatcccgggcccgcctgacgtcacctgggaacgcgcgg

SEQ ID NO: 323171 - DNA, 122 bp, Homo sapiens
cgtcctcacacactgaaggcaggctgcgtgcacggtctcctcctccgttgcgcacagcaacgtggctgcctgggcgcagcgtctgcaacttgtcagtcagtccctgtgtgtgcctggggacg

SEQ ID NO: 323172 - DNA, 122 bp, Homo sapiens
tctgttggccactgactcactagtacttggaagcaacccacagctatgttgtcacatccacgtattcccctcaacacgcagcaaattggggtgagaccaaggaaaggcccatgcacaaagga

SEQ ID NO: 323173 - DNA, 122 bp, Homo sapiens
gttggaatcctttcagccctgccgaggttatggtgcctgtttccagcagctctgagcccacgcggaacatgagtcgctgataaacaaggcttgcagttgcgaggggcctcggggtgggtttc

SEQ ID NO: 323174 - DNA, 122 bp, Homo sapiens
ctgtccactttcccgggtccagcacagtgagcatggtgaccgggggttctgggaaccctgcgtgcccccctttcccctgcagcacaccctctttctccctgctgatgtggaaagtttcctct

SEQ ID NO: 323175 - DNA, 122 bp, Homo sapiens
cgcaccgctcaagaccggaagcggaaatggaatcgagatagcctcgcgcgtttagctggccgccgccacctccacgccctaggccgggccgacttacggagtcgccggaagcggaagtcgct

SEQ ID NO: 323176 - DNA, 122 bp, Homo sapiens
gaccacaggatcagaaacgatccattccaatgcagacagtcctcagagcagactgagtaacgctgccctgcaatccaggtagcgagtgtttccgctgagctcagatggggtaggagggctct

SEQ ID NO: 323177 - DNA, 122 bp, Homo sapiens
attccacaggggaggaaactgaggctcaaagaaacaaatcgtaagtccgaagccgtacaacggagcccgaactgagtccagacacccggacgccacccgtccctaccgcaaccggcccagtc

SEQ ID NO: 323178 - DNA, 122 bp, Homo sapiens
ggcaggccctctccgccccccggcatcggtgcagagccctgggtcgccctcctccaaggtcgttgtggtgtgaacagccaggcgccttcatgcagggcctgactgcagccgccagagcctgg

SEQ ID NO: 323179 - DNA, 122 bp, Homo sapiens
taatccaaaggttcccaaatgttactgtacttagaactacctggggaatttataaaaccccgatgtctatgctgcactgcataacaactaaatcagaatatttggaggtgaaaaacaggcat

SEQ ID NO: 323180 - DNA, 122 bp, Homo sapiens
ccaggcaccggtcgctcaactgtgtccacaggtcagtggcgcgggttgggtgggagtgggcgtgtggactcacgtggaggtgatggtgcggaagcgctcctgccccgctgtgtcccagatct

SEQ ID NO: 323181 - DNA, 122 bp, Homo sapiens
ggggtgaccttggccctttcttcttctggaagacccccccgcttccctcggctgccggaccgggactctgggcctctgctgggaactcacagtcgacaccaggatgcccagagccaggaccc

SEQ ID NO: 323182 - DNA, 122 bp, Homo sapiens
gaacagatggcaagaaaatcggatttaaagaaaggaaggatgtgcttgcatctgggagctcggtaaatctcttggcttctggtgtgcgtacaagggtgacgtctagctaccccagcagtcgc

SEQ ID NO: 323183 - DNA, 122 bp, Homo sapiens
aataagaaacagaaaacatgtcagaattcatagatctgcaggagttttttttcccctgcacggtggaaatgcagtcttcgtttattagtatactaaagagaaccattttatagatagatgat

SEQ ID NO: 323184 - DNA, 122 bp, Homo sapiens
ggcgctgcgggacggagcccggagccggaggcggcggcggcggagacgtcggccggagctcgagtccagtccagcccccggctccgccacctgcaggtagcggcttcccgcgcgggtgcggg

SEQ ID NO: 323185 - DNA, 122 bp, Homo sapiens
cagggcgcatttgtggagcttcatgccggagtgggagaggacatgggccttcagcttgtccggccggttgaacaacttaccgcagcttgtgtgcgtcgataaagggcatttatatttcttga

SEQ ID NO: 323186 - DNA, 122 bp, Homo sapiens
gcctgcggaagcggaacctgtgccatccgggaaagcttactgagcggatcccgcctcttgcgaggcgctgcacaggctgtgtagacctggggagctgaactcttccctcagtgggtggctct

SEQ ID NO: 323187 - DNA, 122 bp, Homo sapiens
tacagtgttcagtacagtaacatgccagacaggtttgtagtctaggagcaatcagctacacggtgtagcctaggtctgtagtaggctatgctacctaggtttatgtaagtgccctctatgac

SEQ ID NO: 323188 - DNA, 122 bp, Homo sapiens
ttaaagggaaggtaagagattaagggactttccacctctttttccctgagaaatcagcggcgaggccaactgcagagccgtgagcgggacagaggctttgtgcaaggagtccaggagaaaag

SEQ ID NO: 323189 - DNA, 122 bp, Homo sapiens
gagggtttgcggccacccaccctttctcttcccctcccgtcctcttccctcctcctctgccggggccacactcacattgcgcctggacagcctttggagtgagggcttctccagagatattt

SEQ ID NO: 323190 - DNA, 122 bp, Homo sapiens
caatctccctgaaagctttatcttgcaggtgttcactctgcactccagcttctctcaatgcgccctgttgcatcctgccacgtggcctttgcacatgctgctcccactggtatgctcttcag

SEQ ID NO: 323191 - DNA, 122 bp, Homo sapiens
gggcctggcgctgcccagtggggcctgtggctggaaccccgggctaggcctttggggaagcgggaccctcactctcagccccagccaagaagggcaaggtcggttccccaccccagcacagt

SEQ ID NO: 323192 - DNA, 122 bp, Homo sapiens
gagcctgaggagtttcagttgccctggcggctgtaacctatatgccccagtgggggatcacgcacttgaactcctggccttcttggttcacctccccataccgccaaccattgcagggggcc

SEQ ID NO: 323193 - DNA, 122 bp, Homo sapiens
agacataaatcagaaaagcactgggctgtattggaggtattgttatccccaatttacagacgaggagactaagactgtcatcagccagcacacagaggatggccccttaccacagcagggag

SEQ ID NO: 323194 - DNA, 122 bp, Homo sapiens
ccttgagaaaattcagtcccgccagcagagaaagtcagggaaaagcgcagcccccgggcccggccactgccattccaagatgatctcccactccaaagagaaaaaggtctaaaaggagtaaa

SEQ ID NO: 323195 - DNA, 122 bp, Homo sapiens
attaaaccaagcatggggccctgtgcatctgcacaggtcacactcccatgaagccagccccgcactagtatcaagagtgatgtttgagtctgggtggggtggcttatgcctgtaatctcagc

SEQ ID NO: 323196 - DNA, 122 bp, Homo sapiens
aatagtaacatgggctgactgtgcagaagtttccccgggttccctgaagctgtcacttcccgtgaggccaccccagctctccacgtccacgcactcactcttcctggtcgtttctttctagc

SEQ ID NO: 323197 - DNA, 122 bp, Homo sapiens
ttttctcatctgtaaaatggggataacacttcacagggccgatgggaagatgaaatgaggcgggtcatgtagagcaatcagctgggagcctggcacacagtgtgcgaatgttagagactgcg

SEQ ID NO: 323198 - DNA, 122 bp, Homo sapiens
gaaacatggaaaggagaatcttccagaaggggcagctgaagagagtacagtcctgtgcaacgggcagaagggggatagtagcagtttgggtaacatagctgccatttattaattgttggtta

SEQ ID NO: 323199 - DNA, 122 bp, Homo sapiens
aagactagcattagataggaatagggccaattcatcctttgcaaccagaggaaagaaatacgggcactgaagcagatttagtggtggaaaatcaactgtctctaatttgatcagatctattt

SEQ ID NO: 323200 - DNA, 122 bp, Homo sapiens
gccgcggggaccttctgagttggcccggtggcagggagactcgtgcaggggcgtccgatgcgcggggcccggggcctcgggagagctcagctgctgcgggccccagacgaggcgacagggat

SEQ ID NO: 323201 - DNA, 122 bp, Homo sapiens
ccgggccttggggtgttaatggcttcccattgttatgaatccctgggtgcttccccatcccggcatatcctctgaaaatgccccttccttcaattctttccagtcacctctgtgaggttcct

SEQ ID NO: 323202 - DNA, 122 bp, Homo sapiens
gaaagctatgctctgaaagcaagcagctgaatgagcagtggcttctaccagaatttataacgatgatctgatcctgattggtcagaactgttgtaggaaaaacctggttggttgttaatact

SEQ ID NO: 323203 - DNA, 122 bp, Homo sapiens
caccctgagccagacccatatgggccgtagctggaagactgcccagaaccagacccatgtcggccacggctagggctaggagactggccagatccagacccatgttggccgtggcccaaaga

SEQ ID NO: 323204 - DNA, 122 bp, Homo sapiens
gcagtcagcgccctaggactccagctggaaagcgtggcggcctgggagatgtagtctttccgtttgcactccccaagactcctccctgcagtctccccaccaccccgcctgggaggctgctc

SEQ ID NO: 323205 - DNA, 122 bp, Homo sapiens
tgagagccgcaggagcagcaggctgtggcccaggcctcctgggtgacaggccctgtctggcggggaagagggaccaagagacaacacggaagaggctggacctcgaacaggggcggctgcct

SEQ ID NO: 323206 - DNA, 122 bp, Homo sapiens
tgattaggtaatttgtaaaatgctaaccagcgatctcagctcaccataacttccgcctctcgggctcaagagattctcccacctcaacctcccgagtagccgggactacaggcgttcaccac

SEQ ID NO: 323207 - DNA, 122 bp, Homo sapiens
tacggttgccatagtaattcgggagcgctagattcaaaagattgagctattatacgttcccggaccaagtttggccacctgtcatcctcactgctgttgccatagagacagtccatgcgatc

SEQ ID NO: 323208 - DNA, 122 bp, Homo sapiens
gcctagaatctgcaggggacggagatggagctagacttggtgctgttggaggaagtagcgcggtcggggaaatattttttgagtccaggaccaaagtctttcgctgttctcttcaccagctg

SEQ ID NO: 323209 - DNA, 122 bp, Homo sapiens
ctgcccaggcctttggcacagaggctgagtggacagtcaggagagaggcgagaggcaaggcgaagcctgtgtccctgtttcagttgcactggggttggagcccagggtaggggtttccagct

SEQ ID NO: 323210 - DNA, 122 bp, Homo sapiens
taatacgcagtgcactgccttttctgtctgtcggtgagttgcagtggcttgtgaaccagccgtgcatctcttccaacagaaaggctaaaaatgaaagggtaactagctttgatgttaaatgc

SEQ ID NO: 323211 - DNA, 122 bp, Homo sapiens
ctacagctcaattgtttcttctggaaagataaacaaaagctgcatgaataataattgcagcgcttcacatttacagggttcttaaaagacagtagccaaaagcttggccagtttgtgagaag

SEQ ID NO: 323212 - DNA, 122 bp, Homo sapiens
tagagcgtctgcatgaattaggaaaggctgccaggtttccatctgtcagcaaggcaagcccggccacaaacacaactgtcgtgacaaccacaccgagttagtctttcaaataaaacttgtta

SEQ ID NO: 323213 - DNA, 122 bp, Homo sapiens
aggtcacacagctaccagaggacagagctagaacatgaccgcagcagacgcctgatcctgcgccccaggcgacccgttcacggggcgggcgctcgcccttggcctcgctcctgagccacagt

SEQ ID NO: 323214 - DNA, 122 bp, Homo sapiens
tacctaggacaaatcctctacagctgagagctgggctgtgggaaggggccctggacagaccgctgggcgctgctgcaggaatccccaaacccaggcactggctgcagggaaaaatcaagcgg

SEQ ID NO: 323215 - DNA, 122 bp, Homo sapiens
tagacatgtgatttttatctaaactaaaagatttttggagcagaggggaagggaaactatcgatgtggactgggaaaaattgaagggatttagtagtcttctgaacagataatgaacagtac

SEQ ID NO: 323216 - DNA, 122 bp, Homo sapiens
cgaggtggggttggttacctgtcccgaggggaccctgtccgggtccttgctcggagagtacggcctgatggctctgtgcagtacctggttgagtggggaggagggggcatcttctgaacagc

SEQ ID NO: 323217 - DNA, 122 bp, Homo sapiens
tattatatttaatctttgcaaaaagcactactgaatacacaaacctcgagagcaggtctgcgtccgtttctctcttactatgcaaactaagtctagtacagtgcctggcacatggcacgccc

SEQ ID NO: 323218 - DNA, 122 bp, Homo sapiens
gccgttccccccggggaccgggaggtggacaacgatgaggagaaggagagtcctttcgatcgcatgtcccagatctatcagacatccccagatggtgaccctgttgcagagtctgtctgaga

SEQ ID NO: 323219 - DNA, 122 bp, Homo sapiens
caaaacactgaacagggtctcgaggatacgtctgcacacccatgctcagggcggccccgtcgggcgggcaccttcaacagcaggtttgcttgcggctcactccagctctaagcacagtgcca

SEQ ID NO: 323220 - DNA, 122 bp, Homo sapiens
ttgtctagaacacgtctgggcgctgagggcaacaggtaaggcgtgggtcaaatcacgctgcggatgcaggtgacgacaggctccgggagagacggagtgggcgcagcaggatggcgagtgag

SEQ ID NO: 323221 - DNA, 122 bp, Homo sapiens
tcctccctccatggcttcctgctttctcttccacgctgtattgattttcttttcccccaacgttggcttctgtgctaatgccttattctagtgagggaggctaacagcgggatttcggggac

SEQ ID NO: 323222 - DNA, 122 bp, Homo sapiens
ggtgatccacctgcctctgcttcccaaagtgctgggattacaggcatgagccactgcgcccggcctagtaaagtatttctcaattgtcccctcagagtaagtgaaagtgaaattgcttggtt

SEQ ID NO: 323223 - DNA, 122 bp, Homo sapiens
agctccttgaggggaggagctggactgtgctttgctcatttttagattcctactacccagcgcagtgcttgtcacagagcagatggttaataaatatttttggattataataatttatgatg

SEQ ID NO: 323224 - DNA, 122 bp, Homo sapiens
ggggcttgtccagggtcacagggagtgatgctgggatggaggccagaacccttacctgcacgacgcccacatggccttaccctccttgcttctctggagcacctgttgtgtgtcagacacca

SEQ ID NO: 323225 - DNA, 122 bp, Homo sapiens
agtagttttttgttacagggatgaaatatatagtggtgaattctgagatgttactgcattcgtcacccgagtagtgtacactgtacccaatctgcagagtctcactctgttgcccaggctgg

SEQ ID NO: 323226 - DNA, 122 bp, Homo sapiens
aaccggctgctcagccagctgccgtcaggaacctggattgcaggccccgcgcacacaggccgggaggtgggcttccccaactgctcgctgttggtgcagaagctgaacctcacagacactgg

SEQ ID NO: 323227 - DNA, 122 bp, Homo sapiens
acctcaggtgatccacctgccttagcctcccaaagtgctgggattacaggcatgagccaccgtgcccagcggccaaaccctaggtttttagttgccagggaattctcagacacaggtggaag

SEQ ID NO: 323228 - DNA, 122 bp, Homo sapiens
tcaaagaactgctcactcgcctttctattgtacttttcggttattggtctctcttagtgccgatctgttactagggaaacgagatcctcacagtctcataggcaggagtcaaagccaatcaa

SEQ ID NO: 323229 - DNA, 122 bp, Homo sapiens
actgcctgctgggataccggaggactcaaatgccacctctctccgccctagaggatgagccgcggctcgggggtgggaggcgagaggaagaagaggtggggctgggggcggggccggagcct

SEQ ID NO: 323230 - DNA, 122 bp, Homo sapiens
cctctactccccgtctcagttcacctgcagacctgcactgtctataatttttcagagtcacgtaggagaatttgtgaagttgcagcataatctagaagaacagcaggggctgcaaaactgtg

SEQ ID NO: 323231 - DNA, 122 bp, Homo sapiens
ccagatcccaacatcctcctccagccaaccacagagaacataccagagacggtcgtgagccgtgagtttccccgctgggtccacagcgccgagcccacctacttcctgcgccacagccgcac

SEQ ID NO: 323232 - DNA, 122 bp, Homo sapiens
atctgtgtcataatacttcaacatggacctaattcaacatggacctcttgcacaaatgcacgcataccacctgctatctctggacgtagagccccgcagagaacatgggaaggtatatttag

SEQ ID NO: 323233 - DNA, 122 bp, Homo sapiens
tggcttcacactaaattatgaagttcccaatgtaaaacctgatttgatttcatcactaagcgaattacaacagcataagcatgttcttactacataatacttgcaacatacattcaatttcc

SEQ ID NO: 323234 - DNA, 122 bp, Homo sapiens
ccaactggtgctgactggtacttcctgagatggcgaaggtttttctgtactctgagatgccgtgtatctctatgtaaggggaggagactctggaccacaggaatgaagagaacatcttaggt

SEQ ID NO: 323235 - DNA, 122 bp, Homo sapiens
aggctgaggacagggccggagatgagcggctataaagtgaagtggagccctgaccacaaacgcgaggcccgtgggagtcagcacgtgctgccgttttagccgggtagccctttgattgtaaa

SEQ ID NO: 323236 - DNA, 122 bp, Homo sapiens
cacatcccgcccatttttctacccaacgtccccagcccgtcaccaccgccaccacgggagcgagggaggtgggtctgcagggcctgagactgttctacagccactgttcacagggctgaaga

SEQ ID NO: 323237 - DNA, 122 bp, Homo sapiens
cactaccagcaccaccacttctatacctccagtacgccccctccctcacctgctccgcaccgctcggctccactctcgccgctacacaatagggggcggacccgcctccccgcctcggatgc

SEQ ID NO: 323238 - DNA, 122 bp, Homo sapiens
tccctttagcagctacaaagtagctactacagtagcctactcagtaggccctgcggggtgcgttggctcacacctgtaatcccagcactctggaaggccaaggtggatcacctgaggtcagg

SEQ ID NO: 323239 - DNA, 122 bp, Homo sapiens
tattcaactgggaggctggtcttgcacagttccgtccaccagcctcgggcgtggttagggcgtgctggggaatctgcttcctgaggtgggggcacacgtggggacaacaacccccagtcctg

SEQ ID NO: 323240 - DNA, 122 bp, Homo sapiens
caggcctagcccgccccgcccctgccaattgccagtcacaactctcctctcatccgactccggaaaggagcggttgctgtgaggatccttcagtgatcaatgcgaccatagtttgcgctcca

SEQ ID NO: 323241 - DNA, 122 bp, Homo sapiens
cgcgagggggcaccccgggactccccccaccccaccctttcccgccgggcgtctgtgagccgccccgtgcccacccacgcagggatgagaccaggccctgggttctgggctccaccagtttc

SEQ ID NO: 323242 - DNA, 122 bp, Homo sapiens
acccgagaggcggaggttgcagtgagcccagatcgcaccattgcactctagcctgggcaacgagagcgaaactccgtctcaaaaaaaagcaagtccgagggctcttattcttatttaagaaa

SEQ ID NO: 323243 - DNA, 122 bp, Homo sapiens
gaagcaacaaagggattatgacattagagaaagggaaaaaaaatcaggagatggtgaaggcggagggagggtgaattgtgattagaggacttattagaagtatttagttccttttcttccag

SEQ ID NO: 323244 - DNA, 122 bp, Homo sapiens
aacacaatggcaattacttgtgcaaggtagaacttttcagaaccccagcgtcggcagtgccgggcggggctggcagtcggaaaagcaagttctgcggcggaccacgggtttaggctcaccgc

SEQ ID NO: 323245 - DNA, 122 bp, Homo sapiens
gcgagagatgggcggggcctgatgcgtgagtggcaggagcagcgcgcggccggggcggggcgtgcgtgcgcagtgggctccgccccccgggcctctccgcggatccgggcgggccccaggct

SEQ ID NO: 323246 - DNA, 122 bp, Homo sapiens
ggaagtttacaaacatagctttcagtaagactgcataactttgtcatgcatttgaaataacgctacccagtgaaaatgtgctgggtgcggtggctcatgcttgtaatcccagcactttggga

SEQ ID NO: 323247 - DNA, 122 bp, Homo sapiens
gagtggtgactggtgggaataaaggattctggatgggaagccccggaggaagccactgaccgcagtgcatgctgggggttgtagttctcgtgtactccacgggtaaacaagtcagagaagca

SEQ ID NO: 323248 - DNA, 122 bp, Homo sapiens
aggaggtggagaaacgggcagggagactaaatacctcagaccaaggcagcctccgtctgccgaggcctctcctcatggcgaatttcctcctcccgcttccttcactcattcaccgagccacc

SEQ ID NO: 323249 - DNA, 122 bp, Homo sapiens
cggcgggggcacccccgggcgggggcggggcaagagccgggccggggctacaaggggagtcggcaccgccccctccccacccactcccgctgccccgtccggcccgcgccgcttcctcgcag

SEQ ID NO: 323250 - DNA, 122 bp, Homo sapiens
gcagccggccttcctattttcagtaatctgattaggggtcgatgttggtgggctcggggacggcttctccgtgaggtcgttatttagcgcgcaccgggtcgcctgagcccggggtcgcggcc

SEQ ID NO: 323251 - DNA, 122 bp, Homo sapiens
cacgtgtacactcacacatgcaccatcatgcacagacgtgcactcacagtcatgcacacacgcttgcacacacgtacactcgcacacacatatgcattttcacacactcacatgtgcactca

SEQ ID NO: 323252 - DNA, 122 bp, Homo sapiens
tgattacgctggactgtgtccttgagttcatggagacggactgaagtcacagacaggccgcgcactgagtcatacactacaacagaggaacacacaggaagtgcccccgcagcgaagagaag

SEQ ID NO: 323253 - DNA, 122 bp, Homo sapiens
ctgaggcaagggtagagtggaggaagatttagggaaagcaagtagtccgttttattgttacggaccagagaggttgggggtgcagatgaaaccaacatctggtaaggagtgtggctgatcag

SEQ ID NO: 323254 - DNA, 122 bp, Homo sapiens
aaacagcccctaggagcttaaatgctgggctctaggtgccttcgcccgtgaccctggacccgcctgctcccaggtctgtgctgctggtctgggtcactgtgataatcgagcgcgtcgcccgc

SEQ ID NO: 323255 - DNA, 122 bp, Homo sapiens
tcaggtcggagagcatgttgaaggagtcggagagcagcgcgatggagttgcccaggtagccggagaccagctccgccacgaagaaggcgacggtgagcaccagcatgaagagcagccggcac

SEQ ID NO: 323256 - DNA, 122 bp, Homo sapiens
tggaaaggcaggacaactggaagtgaggcctcccaagtcattatggagtcaaacattttccgattggccattggttgaaagagttaaattattgtctgaagacctagaattcatagaaagcg

SEQ ID NO: 323257 - DNA, 122 bp, Homo sapiens
gcgcattcacgtggtcagttaccgatgtgcttctctctctcctggcccgcagggacagagcgcgccagggacgtgccagccccggccccggctctgccacatttactatgtgacctcctgtc

SEQ ID NO: 323258 - DNA, 122 bp, Homo sapiens
ttttgtttgaaatttaagcaaggccccgcccccgctccccatgagcgcagctccaagctccgggctcctagaaggcagcgccactggtcgtctccctttagctgccatcggccgccatcatg

SEQ ID NO: 323259 - DNA, 122 bp, Homo sapiens
gggagggagcaggcagctcgaggttcggtggacactggggtgccctgcccagggacatcgcgggctggacactctgacgcagaggctttggaaaggggtcttgtttgcctgtctgtctgtcc

SEQ ID NO: 323260 - DNA, 122 bp, Homo sapiens
gccacagatttaagtttattccccgcaactgtcggggcggtcccggagctggtgaggacgcgctacggtgggtgcagaaaggagatccctggactctgtagaacctgggcccgcggtgtgga

SEQ ID NO: 323261 - DNA, 122 bp, Homo sapiens
ttccctaaattcactgtgtctttctggagtgtaggccaagttgaatgcaaacagggctgccgtaatttcccagctgcagttcccaaaactagactgtggctgctttgcaagaatgacaacaa

SEQ ID NO: 323262 - DNA, 122 bp, Homo sapiens
catctgctccccatcatgcactttcagtcgtgcttgctccattgccagtcccctttcattcgctcttccctgcgtccttcagcttatcatcctcatcctttctctctctctctctctcacac

SEQ ID NO: 323263 - DNA, 122 bp, Homo sapiens
tagaactaccacacaaccgagcaattccactcccaggtatatatctaagagaactgaacacgaatgttcgaatagaaactacacacaaatgttcacagcagcattattcacaatagccaaaa

SEQ ID NO: 323264 - DNA, 122 bp, Homo sapiens
tccctatgtccctcaggacctcttcgattcacctcctccgccggcctcctctccggtgcccgggacactgtcgagcctcaccagctagcaacgacccatgtagaggcctgggaggcttctcc

SEQ ID NO: 323265 - DNA, 122 bp, Homo sapiens
cccactgggccccgcccagtgcaagccttgttcgccgcaggccccgcccacaggagccctcgcccacgagacgcccccattcgctgggcctccactcaatgcaaaccccgcccactggcccc

SEQ ID NO: 323266 - DNA, 122 bp, Homo sapiens
gggcagaggggggagaaaagagtgcctgagctcacagcgttggcggggcgcagtgaggtccgccaggactaggtggaaggagagaaggaacgtccctctctgcaactcatctaagggcctgc

SEQ ID NO: 323267 - DNA, 122 bp, Homo sapiens
ttctctctgagcggtggagaactgcacatgtatggatgttgctgcttcctgaaggtgtggcgggcccagagccccagggcctgtgtcccttttgatctgagctccatgaacatggcaccaga

SEQ ID NO: 323268 - DNA, 122 bp, Homo sapiens
ccacaccttgctacgacaaacaaaaaatgataaccattacaatatatggagtccttactacgtgagcagcactgtataaggtgttttccatgtatcatcgtgatcttcacaacagctgctca

SEQ ID NO: 323269 - DNA, 122 bp, Homo sapiens
gcagagctcagcggggcacagctcctgtcctcgaggcacttgtcaggccactctgcacagcgctgggggagcccaggagctccccacgggcttcacggcgccccattctccctgggagtcaa

SEQ ID NO: 323270 - DNA, 122 bp, Homo sapiens
aatgcgcattgaaaataaacataaaatgttacccacatttcttgtgttgttgttttgtgacgactttatttcttggtttctgttattttacctggggtgggaggtggggggtaattcccgta

SEQ ID NO: 323271 - DNA, 122 bp, Homo sapiens
ctggcctcaagctatcagctgggctctgcctcccaaagcactgggattacacgtatgagccgccatgccagcttcctacctcttcatctcttagcccacaaactctccacactcccttcaaa

SEQ ID NO: 323272 - DNA, 122 bp, Homo sapiens
tcttagaaaatagggactcctttttgcggaataatccatagggggcgaggccaactctcgcgagtcgaggtatcttctccccaaccactgctcttattttaattattgcagacggaagttga

SEQ ID NO: 323273 - DNA, 122 bp, Homo sapiens
gaccccctagatggtccaggcgcgaggatgctgacccagagtccttcggagggtcacaggcgcctgggctttcccggtgccgggtgcgtgtgtactttaaaggctcgcgttctaatctccag

SEQ ID NO: 323274 - DNA, 122 bp, Homo sapiens
gctgctctcctctccatgttcctccttcttccaggtttgaatctcccgccgttgggccaccgcccctcaccgtcggcaccgccagacaggacacttcccgtccacaccgctgagaatcctgg

SEQ ID NO: 323275 - DNA, 122 bp, Homo sapiens
ccggccctgtgcatcacttactaaagctgcatttacagtcccgagagcgaagggacagatcgcaaatcagatcatttattgctgctgctagctcagcgaggagaacattcccaaggtgagag

SEQ ID NO: 323276 - DNA, 122 bp, Homo sapiens
cggacaggggagcctgggctgctttctggaactctttccttgctttggtcactggggccccggaagcgtgggctagggtgccagcgacagcgccttccgcggagcggcgcgctggcccctcc

SEQ ID NO: 323277 - DNA, 122 bp, Homo sapiens
gccttccagttttaaaattaggacagttccagtcaaacagagatgaattgataaccttaacgccaggccaaattatcttgcacctcacctctgatttcatgatggattagtgataggggcca

SEQ ID NO: 323278 - DNA, 122 bp, Homo sapiens
gaggaaggctgagaagggaggtagaaggtgggacaaagatcccatagttatgagacagcacgatttccatccacagggaaaatgaacacagtggccgacccctactaactgcctcagaggcg

SEQ ID NO: 323279 - DNA, 122 bp, Homo sapiens
cagtgatcccacgctggaaacacgttgtatacaaccagccagcccacctacaccctgagccgccccgaagcccaccctgccgcaaagccgggtgtcctgagtccagaacccccaagcccccg

SEQ ID NO: 323280 - DNA, 122 bp, Homo sapiens
gctttgttgaaagtagctttggaaacgcccaccacgtggggccactcactgtaatataaacggtcatgcatcactgagcaacagggatacgttctgagaaatgcgtcgttaggcgatttcat

SEQ ID NO: 323281 - DNA, 122 bp, Homo sapiens
ctcacagctccatcttattcatcccctcttctacttaacacatactatgaattttgcttacgtcttataatctacggacttgcttgctctccacatctcatacttattatgaatgtatccat

SEQ ID NO: 323282 - DNA, 122 bp, Homo sapiens
cagattccagggcgtcggggctgcaaccccacaaagggcgaagtacctggaaaagtacctcgacctgcagtgttttccacacacatacacacggacttgggttcctttcatttcatactaca

SEQ ID NO: 323283 - DNA, 122 bp, Homo sapiens
tcagcctctccgagggacacgcgcgccctgaacactcccctcttgggattcaggccaattcgttcagctcccatgacttcatccgagcaagtttgtcacctcacgcagctaattaaactgtt

SEQ ID NO: 323284 - DNA, 122 bp, Homo sapiens
gatgtgaggcaacatctgtttcttgtgctaacaggtaggtctctgcatgcagctctaacacgaaaattggaaatgagccactgggaggtgagaacccgcagagaggagtgcagcaggcactg

SEQ ID NO: 323285 - DNA, 122 bp, Homo sapiens
aaatccggggtggccatcaggagaacaggtaccgaccctggccaggggctctactgttcccgcaattctgctagagttgcctcgcctcccagctctgtccggggaaaccctccctgtgctat

SEQ ID NO: 323286 - DNA, 122 bp, Homo sapiens
ttcctatacccaatggcccgtgaacagtattattaataattttggtccttgggccgggcgcggtggctcatgcctgtaatcccagcaatttgggaggccgagtcgggcggatcacccgaggt

SEQ ID NO: 323287 - DNA, 122 bp, Homo sapiens
ccgcagtcgagaggcaatgggtggcgagcccacaggggacgtcgtcaaggagatatgggacgaccctaagggagcaagttggttgtaaggcggtgggactgggtgagggagactctcctctt

SEQ ID NO: 323288 - DNA, 122 bp, Homo sapiens
ggagctggtggctgtcacagggcccgaggagcgtggggtgctgggggaaccagagactggcgcgtggctgggaacccctgaagtgaagctgggcagaggggtgggcccctgcgaagacaaga

SEQ ID NO: 323289 - DNA, 122 bp, Homo sapiens
aaaggagttcaaggttaaagaatgaggagactgagcaccaacccttccctgggtccctgccgttggcacaactcacagcactgctaacaaaggctcaggaacaacatcctcatcacacccat

SEQ ID NO: 323290 - DNA, 122 bp, Homo sapiens
tgggatcattaacattcaaatatcctggaagattggcttatctgtattttaaaaggaagccggacctatagtttacgtcagttctttgaccattcgttggagctccggttttcagcctcttt

SEQ ID NO: 323291 - DNA, 122 bp, Homo sapiens
acttcctgggcgctgctccggtggaaagccacagactccactccgagggcaacctgagaacgcagagaaggaaataaaacacgacggagctcacgaaggggaatgaacaatgatacatccta

SEQ ID NO: 323292 - DNA, 122 bp, Homo sapiens
ttcagagatatctaatttgcatggttttttttccccctttttcttttgaatgctggagaccggaggaacatggactaccaatcccagaatgcgttttatgggacccgctcaccgcgcaggcg

SEQ ID NO: 323293 - DNA, 122 bp, Homo sapiens
ccaagaaagcctcatataaaggagcaaatctcaaaataggaaaaaaagtttcagccaaagcgcatttaacatttgccttaaaggtggtgacagtgacaaaaacagggccaaggaaaagaaaa

SEQ ID NO: 323294 - DNA, 122 bp, Homo sapiens
aaatggcagtatgatcctctagaaatgcagcaattggaatgaaaaaggagcatgggctggcgtaacccgggagagaaaatgacttgtaatggcatagcaacctacttctcttcctgcaaatg

SEQ ID NO: 323295 - DNA, 122 bp, Homo sapiens
ggccgcctgcccccccacccccccaaacctccacccccccgtctcgacccccctttctctcggccgccttagcctgctccccgcaaagcccgggcgctcctcccaccgcgccccgcagcccg

SEQ ID NO: 323296 - DNA, 122 bp, Homo sapiens
ccatctctgttccatagtctttggtgctatttacatataggccttaatccattagaatctcgtctgagagtcttgacaccattttttgtttgttttgagacagtctagctctgttgcccagg

SEQ ID NO: 323297 - DNA, 122 bp, Homo sapiens
ggttgttatctgcatggggtcactaggttccagtggagaggtgggggctaagctctcacccgctctgcagccacctggcacccggtttcagtttcctgaaagggagccttctacttgctgac

SEQ ID NO: 323298 - DNA, 122 bp, Homo sapiens
cgcttgcccgccacctggtggttggaaaaggaacagcacaatctgtattgaaatgtgctgcgttaaaagggtatgtttctaaggtgtcgctgaatgtaaggttactacctttcctgattatg

SEQ ID NO: 323299 - DNA, 122 bp, Homo sapiens
agcaggaaatgcctgtggctcagcctaactcaaggtgagacgaagctggagctgggagctcgaaagtgtcccccagctccctcctcactttgcctgtaactccacctctgcagaaggtaaag

SEQ ID NO: 323300 - DNA, 122 bp, Homo sapiens
aagccccacttccacaaggactggcagcagcgtgtggccacgtggttcaaccagaagatccgcagaatcaaggcccggcaagccaaagggcgctgcatcgccccgcgcccggagagtcggga

SEQ ID NO: 323301 - DNA, 122 bp, Homo sapiens
ggtcctgggccccaccctgcccaccagttcacagctaagaggcctgtcaccagcttgcatcgctcccttcccaggactcggaggaggagtcggaaaaggcccatactttaagcccaggcttc

SEQ ID NO: 323302 - DNA, 122 bp, Homo sapiens
gtccccgcaggggagcgcatcagaacgcacagccctgctgcccctccgcggcctcctctccgcacacctcgagcccgaccttcccacctgccgccatggtgcccagccaggccccttacctc

SEQ ID NO: 323303 - DNA, 122 bp, Homo sapiens
gatccattttaaaccaaaaagtaagtacataaataaaagacacattgaggccaatatctacgttagaactcaggtatctacttaaggaaattgctatataaaaacagtccatttttagataa

SEQ ID NO: 323304 - DNA, 122 bp, Homo sapiens
gtcctctggtcacctacccaacctagggtgtatgcactcacagacaagggtatttaatcacgagtagaaagtaaattatttacacaaaagggaagggagtacgtgataagagacatgcaggg

SEQ ID NO: 323305 - DNA, 122 bp, Homo sapiens
cctgttgactgtgactttgggccagtcctccctccccagctggctcctaagttttctcatcggtgtctgcaagtctgtttcctcggcagtgagatgtcgataatcagaatgaagtaagatga

SEQ ID NO: 323306 - DNA, 122 bp, Homo sapiens
gtgacatcacaggttagaggccctgctgagctgctagcacagtgcagtggagaaatgttgcgctccgtcaggaagctgggctcttgccatgccagtagcttgcttacgaccttgggcaagtc

SEQ ID NO: 323307 - DNA, 122 bp, Homo sapiens
cttgcatggtggcctctgcatcagaaatacagggtcctttcctttgtatccagtctatgtcggtggatatgttagcatgcctgatacaatgatggattcaggcagccaaggtaacaatctgg

SEQ ID NO: 323308 - DNA, 122 bp, Homo sapiens
tggctattgcaaccaaagggaggcccgggtgccagtgggcggccgccgcggtgtggagggcgccagggcggtacggcgcagcgggccgcactcttgggacgccccgcctgctctgcggagcc

SEQ ID NO: 323309 - DNA, 122 bp, Homo sapiens
agagactagactttcacacaaaataatagctagagaacagtgaaagttggtatacggttacgtgacaaaatatgcagtgtattttctgaggtggaagaaatagtctacattctaattaggtt

SEQ ID NO: 323310 - DNA, 122 bp, Homo sapiens
ggccgcctaggggtggggccggcggccctcgggatgggtcctgccagggcgcagagatggcggtggaaaggcggggcgaaggcggggcgtgaggcgtggaggtgtggcctgactggggcggg

SEQ ID NO: 323311 - DNA, 122 bp, Homo sapiens
tccacacttctgtgcttaaaaataaagtcacccatttctcaggaaatgattcctgcaaagcgcacacagctttgagcctctgagctccttaactccacaaacattggctgggtgcctactgt

SEQ ID NO: 323312 - DNA, 122 bp, Homo sapiens
ggactttcagtgtcccctctcaaaaactagtctccgacaagggcctgaaacccattcacacgacctacctcttaagtaattgataatggctttaaattactgttttgtggcaaaggcacaat

SEQ ID NO: 323313 - DNA, 122 bp, Homo sapiens
actaagtactagagagaccggtatgcgggagacagaacgatgtttatttaaggtacgcaccggctcagtggatttacatctaaaaagctgagcatttcaacaaagacagagtggggttttta

SEQ ID NO: 323314 - DNA, 122 bp, Homo sapiens
aggccgctcctggccggcaccgccctccgcctcccgcggtccctccctcccgcacgccggcgctcccaggccgcgcttcctgcgtccccaacccggtccctgagagggcagtgcgccctctc

SEQ ID NO: 323315 - DNA, 122 bp, Homo sapiens
ctgctccaggctgggcagctcccggaaggtgctcaccgagaacacatattcggggctcagcgagatcttcaccagctcctcctggtctgcgttcctggcgatcgtgaaaggggccacgccaa

SEQ ID NO: 323316 - DNA, 122 bp, Homo sapiens
cggccggagaagtgattggacggcgccaggccttgcagctaaactattagttccgatgcacgcttttcaacaccctctggacttcccggcgatctgatttatcagtatgaatgtccatcaaa

SEQ ID NO: 323317 - DNA, 122 bp, Homo sapiens
tccccacagctcccgagacccagcccactatccgacggctcacctgcccaggccacagaccgcaccatgatgcagctcagcggcaggctgcagcccatacaaaccagctttccaggtcctgc

SEQ ID NO: 323318 - DNA, 122 bp, Homo sapiens
atccctgagcctcaccctagacttgcgaggtcacgattctgaaagatagggcctaagaagcgcacagcaaactccccaggtgattcagatacctgtttgtttgtaaacctctaaattggcgc

SEQ ID NO: 323319 - DNA, 122 bp, Homo sapiens
ctctcccctagagatgggcgggaacccactggagaacagtggctttgaacctggagccttcgatggcctgaagctcaactacctgcgcatctcagaggccaagctgactggcatccccaaag

SEQ ID NO: 323320 - DNA, 122 bp, Homo sapiens
tacaacggataatgttgtagatatttacaacatttactcaatggtaggtatttttatcctcgttttactagttggagaattatatcatgcaggtttatacaattaacaagtgggggagccag

SEQ ID NO: 323321 - DNA, 122 bp, Homo sapiens
gtgagccactgcgcccggccccacctctttcttaatgaagctttcctaggcaggctttttcgtgtgagcatctctggatctatttgctacccaccccattcttcattgcctgggagtctcct

SEQ ID NO: 323322 - DNA, 122 bp, Homo sapiens
atacagtgctccagggtttaacagggaaaagggactcagattattgaggttcagcaatgacggcgattaggatgccctgtagtttgcccaagtcctccagaaaaggaaatcacttttagtct

SEQ ID NO: 323323 - DNA, 122 bp, Homo sapiens
tccggggtttttaccctcggcagtttgatgtcctttgtgtcaaggtctggctgcggaggccgggaaaatgtggcccccgtcagtaagggttgggcagggagcttggcgtggcctggcggatt

SEQ ID NO: 323324 - DNA, 122 bp, Homo sapiens
ctgcccggcccgcggccggcgtcccctctgcacggctattaattttgcatcctcggataacgtgcagcctcgagtaaggagaagacgtttttggtgtctgatctgtaaaaagttctcgagac

SEQ ID NO: 323325 - DNA, 122 bp, Homo sapiens
ggacttcgtcccactctcacaaaagcaaaagttaagcaatatcttctatgttctccccaacgtgcttcccttggtttccactttttccacaaatccagtggactttaggtaaacctcatcat

SEQ ID NO: 323326 - DNA, 122 bp, Homo sapiens
ggaggtgggcggccagaggcgtggagatgcgcgcaggccgggctccaggccaccggcgcccgcccacccggagcttaagatctagagagagcacggggtcccgcctttgccacctctcatct

SEQ ID NO: 323327 - DNA, 122 bp, Homo sapiens
gcaccagacctggattttagggagttaggggtgctgggttctgtaggaaaccaggtgacgcgcactccatctgaaggaggacaaggttcactagtcagcgctccactgtcgccatttgggaa

SEQ ID NO: 323328 - DNA, 122 bp, Homo sapiens
tcgtccgtccccctgtcggtttttctttttgctttccggggcacataatcttcagccgggcgcttttcggcggcccgcggctggctctctggcttggcctgggaggctggcttgccctcact

SEQ ID NO: 323329 - DNA, 122 bp, Homo sapiens
tgagatctatctattccaagccttaagctttgcccagggctctccctccagatgccagggcggggcagtcccactggaaaagtgcctgatggcagatgcttctccatcctctctggtacaag

SEQ ID NO: 323330 - DNA, 122 bp, Homo sapiens
ctggcacccgaagccgttcgcctgctgcgggcgcgtcctcgggcctagggaggggcgggtcgccctcctgtcctgcccatgttaaccagagtagacccctggcctgggcagtaagccagggg

SEQ ID NO: 323331 - DNA, 122 bp, Homo sapiens
tttgatcaatggaaaccctgagtggtttatctttccctggctgaagtttttggggggaagcgcttggttatctacaacgcatcagtgataagataaaaagataaaaaacataatccccaccc

SEQ ID NO: 323332 - DNA, 122 bp, Homo sapiens
tcttacaggcaggtcagtgttgatgcttagtaaatgtgagcaaccacaccattgtggaatcgttttacctctgcctgcccgcctgcctgcctgcctgccttccttccttccttccttccttc

SEQ ID NO: 323333 - DNA, 122 bp, Homo sapiens
ccggtcctgggcctgctcacaggtggttttggatgcccacggccctgctgtgttccacaccgtgctgtgccgtacccagcggcatgccaatgccgtagcccttggtgtcgaggagtcccccg

SEQ ID NO: 323334 - DNA, 122 bp, Homo sapiens
acttatttcaacttgaagttttttattatttctctatgtctgatgcacctacttgacccccgactccctagagggcaaaaactatgtcttgtttgctcagaacattgccaggcagggaggag

SEQ ID NO: 323335 - DNA, 122 bp, Homo sapiens
acaggactgtcaaggcaaggacactccttaggggaccctgtcccataaagtcaaattatgcgggatgagtcagtgacgcaggagctaaaaacagtgtccctttaaaaatgtgcatgcctttg

SEQ ID NO: 323336 - DNA, 122 bp, Homo sapiens
atgaaagccggttggccctggggaccggtagggagaagccgtggcagagcacagtctctgcggagaggagggagacccaagctctcctggctgtggggaaggagaagccctgggagacacgg

SEQ ID NO: 323337 - DNA, 122 bp, Homo sapiens
ggccctccggaagacagtcccaccgtggcccccaaaagcaccaccttcctgaagaatatccggcagtttattatgcctgtggtgagtgcccgctcctcccgtgtcatcaagacaccccggcg

SEQ ID NO: 323338 - DNA, 122 bp, Homo sapiens
ccgcccgtcgcctccctcccgccagctcccgctccctccctgccggctcccggcccggcgcggtataattacagcccattgatccgacccgggccgggaaagcggctccctcggggaggcca

SEQ ID NO: 323339 - DNA, 122 bp, Homo sapiens
tgtgtggcctggaggaagtcactgcccattctgagcctcggattccttgttggtaaacagcgtcttaggacgcggctctgtgatgctgtggcctgtgcgtcgcatcggcatgtctcagccgg

SEQ ID NO: 323340 - DNA, 122 bp, Homo sapiens
tgctccactttggtttctttggtctcataatctcattgtgccaattatgtacatcatcctcgaggtcagaagtgtttaagggggagggaagttctaacttaaagaggacagataagaactct

SEQ ID NO: 323341 - DNA, 122 bp, Homo sapiens
acctgggggctggctgaggtggctgtgcatcgggcagagcggcaccagagggctgagggtcgaaggggacagcaggggaaaggagtgcttaggagatgaggcgactgtgaagctggtgcagc

SEQ ID NO: 323342 - DNA, 122 bp, Homo sapiens
ggtgcgggatagaatctcttggtgtgccgttttttaagccagtcggaaaagcgcagtattcgggtgggagtgacccgattttccaggtgtgtctgtcacccctttctttgactcagaaacgg

SEQ ID NO: 323343 - DNA, 122 bp, Homo sapiens
gtatctcttaaatctgttccttagcttcatctttccctagataataaatatcatattaagcgctgtttctattgcacgactattcttcatatttaccactggagggcgcacagaactcgtag

SEQ ID NO: 323344 - DNA, 122 bp, Homo sapiens
ccgagttttaattcgctttggaacttgatagagtgattaagtggtgtgtggagggtgaggcgctgagctgataaggagtcatgagaaggtgacacagtttgccatttgaaggcttagggcat

SEQ ID NO: 323345 - DNA, 122 bp, Homo sapiens
cacccgtttttcctctgcacttcccaggtgttgtggccatggaagtaaggccagtggctacgagggacagtcttcatcttgggagatccctagagagggcagggagccccttgacatgtgga

SEQ ID NO: 323346 - DNA, 122 bp, Homo sapiens
cgtaggtagtgtaaatgttgactttttatttcaaatcagtggaatccttcataaagaattcgtgctacacaggtaattaggcttgatggacagaaatggtgaagtgtttgggttttcttagt

SEQ ID NO: 323347 - DNA, 122 bp, Homo sapiens
ggctctcagaggaggacgcggttccgggctgcggcgggcgtggtccggggctgttctgggcgtggtctttggctgtgatgggcgtggccttgggctatggagggcgtggtcccagggctgcg

SEQ ID NO: 323348 - DNA, 122 bp, Homo sapiens
gggggacagtcctgggctcgcggctggccaaggtgatggcgtgggggacagtcctgggcccggggctgggcaaggtgatggcgtgggggacggtcctgggcccggggctgggcaaggtgatg

SEQ ID NO: 323349 - DNA, 122 bp, Homo sapiens
ctctgtcctcaaacctcgcacacgctcagcaggaggtgcacacacgtcagctgtgagcaccgtgtaccctgcagggacggagacacagcctccctacaactcacccagccccagaggcacgt

SEQ ID NO: 323350 - DNA, 122 bp, Homo sapiens
cccgggcgcccgccggctcgcatgccgaggggctccggggcgtagctgcgcgcccggcgccgcctccgggctccttcggccccgccatgggctgctgcagctccgcctcctccgccgcgcag

SEQ ID NO: 323351 - DNA, 122 bp, Homo sapiens
gcggaccatgagacactgtgagcccgggaaagcccttggcactttgcctcctaccccccacgcctacgccaaatgaaaaaccagtcgcagcccaagcacccgaggccgtggggagcccctcg

SEQ ID NO: 323352 - DNA, 122 bp, Homo sapiens
ctcgcggacacgtgaacagaggctgtccctgggaagataagtgcgctttcccgtaaaatccgggaaatttgccttgaggaaagtttccgttcttgttacttgtcgggtttctcccacttcca

SEQ ID NO: 323353 - DNA, 122 bp, Homo sapiens
cgccccaaacctcgccgcccgcccgggcgagatcgggagcgagcagccaccgggctgcgccgcctcccctagcttggagcgggttcttactcaccgtggggttttacctccagcccagggcc

SEQ ID NO: 323354 - DNA, 122 bp, Homo sapiens
agctgtttttcgttttcttataccccttagaactgaaaaagactctgagtttgtccaattcgactccctcatttcacaaggaaggcatctgaagctcagagagacaaagtgaccgccctaaa

SEQ ID NO: 323355 - DNA, 122 bp, Homo sapiens
gggactgctggacccaggcgatgtgtgcctgtccaaggcctggtattatcagccagccggcgccacgaagtgaaaaagtgaagctgggcgggggcagggagtaggaggccgcagaaccaggc

SEQ ID NO: 323356 - DNA, 122 bp, Homo sapiens
agacgctattggtaagactcgcgggaaaagaaagggtgagcgcggctggaagcgcgcatgcgctgtggctaatgccgtaggctccttcagggctgagccatcccgcgtgtcttgcgctcggt

SEQ ID NO: 323357 - DNA, 122 bp, Homo sapiens
gaggcagatggtggtattaatcctcatatcgcggggggtgtacaacctcctgttatggttcgtaacatttagggtggtaagggtgatattactcgccatatcgtggggttctacacctttct

SEQ ID NO: 323358 - DNA, 122 bp, Homo sapiens
atataatcaaatgataacaaaaataatgtggcacagctgcaaacccctcatatatactaacgcttttcatccacccaaccacaagaaataaatgctgttagtttccccatttcatagatgag

SEQ ID NO: 323359 - DNA, 122 bp, Homo sapiens
gggcgggaagtgggagtcaaagtcacagaggacagcaggctgcgcggacgcagtgatgtgcgcagagggcctcccgccccgccgttcccctccgggaggcgccctccccgcgttgcgggggc

SEQ ID NO: 323360 - DNA, 122 bp, Homo sapiens
tgtggatgtgtttgaagagactgggagggggattgctggcatggtgggggagggtcaactcggtagctttgtcgaaggaagtggtatctgaacagttagtttcttggtaaactgcttgttta

SEQ ID NO: 323361 - DNA, 122 bp, Homo sapiens
tgccaggatccccagaactgctgtcccctcaagaacacacgtcccctacgtgggaggccgcgaccagcgactccgcccacttctcccagccggctgttacgtaactgcaacgacagccagtc

SEQ ID NO: 323362 - DNA, 122 bp, Homo sapiens
gtgggccgcatcgcgcaggacctggggctggagctggcggagctggtgcagcgcctgttccgggtggcgtccaaaacacatggggaccttctggaggtaaatctgcagaatggcattttgtt

SEQ ID NO: 323363 - DNA, 122 bp, Homo sapiens
ggaatgtcattttccatgatctgaccattttatacgtcttcctccatgaataggaattttcgaaaatcattggctacttccaactgcacaactgtgtgaaggccttgctgccagcactgagc

SEQ ID NO: 323364 - DNA, 122 bp, Homo sapiens
ctctgtccaatgcatagcaagggctcagccgaaacaaccgtatctaggaaactttctgtccgggagtatagagcctatccgtcctccagagaccctagaactatcactatgtctaaaaaggg

SEQ ID NO: 323365 - DNA, 122 bp, Homo sapiens
tcacctggtcttcatgcagcgtctggatcagaggctccccacgtatcgtctgcccgccagcgggagctccgcacggtgccctgtctgtctctcagcgttgcaacctaggcagggcatgcagc

SEQ ID NO: 323366 - DNA, 122 bp, Homo sapiens
ggccccacagctctgcgtccgggtaagcccccaccccgcctggggtccccctcgcgctcgcggggctccctgcccccgctccggggcctcagccatatctgggcaaaatattcagctgtcgc

SEQ ID NO: 323367 - DNA, 122 bp, Homo sapiens
tgtgtaagtatttccagcagactagtgtgaggcatgctaggaagcgagctgatgtggagccgagctaatcctgtctgatgtggccacctacaggcatcaacaggcctcagcagagagaagct

SEQ ID NO: 323368 - DNA, 122 bp, Homo sapiens
cgcaaatctcagggcggctctggccagtttggagcctggggtgacccttggagctgacctcgctggtccctgtcggagccctgcgcgctgcggagcttggcggttcgcagctctcggggtag

SEQ ID NO: 323369 - DNA, 122 bp, Homo sapiens
ctgcaagccgagcgtggggaccgagggtcggcgtcacagtgagagagccatgatggaggacggggtcaccctgcttgcccaacgcggggagctccgtcatacagaaccccagtgagttctgg

SEQ ID NO: 323370 - DNA, 122 bp, Homo sapiens
agggagaaagggagtagatgaggccaaaatgagacaagatcatgagggtctcttgggcttcgactctgagggaaatggggagctatggtgggttgtaagcaagagtcacagcctccctttat

SEQ ID NO: 323371 - DNA, 122 bp, Homo sapiens
caagaaagtcctggtccctagggcggggactgaggctgcagcagccccagcggtccgaggcgcactagggacagaggtgggaaggggggcacgaaggagcgcgggcgccgggagtcgcgtgg

SEQ ID NO: 323372 - DNA, 122 bp, Homo sapiens
ttctccgggcctgcggggcatggcaggaggcaaagccaaaggcgaagtggccacaaattccggtgggggcgctggctcctgccccaccccagcatctataccctgagtctgataggacgaga

SEQ ID NO: 323373 - DNA, 122 bp, Homo sapiens
ctcagaggagtagggcggagattatgcgaggcgcgccagtggggctctcaggacagcaggcggtgtgcggggaggctgagcctgttgcccctggagagcagaagatccatgttctggagatc

SEQ ID NO: 323374 - DNA, 122 bp, Homo sapiens
aataaaaagagtcggaagcatcagcgcctagggcccaatcgccactctggaacaggtgtgcgcggcgggtccgcgggctggcgggagctcacacgaactcacgcgcgagctcgcaggccgcg

SEQ ID NO: 323375 - DNA, 122 bp, Homo sapiens
ctcaggtgatccgcccgcctcggcctcccaaagtgctgggaaaacaggcgtgagccaccgcgcccggccctgcctgtattttcactgtagatcagtggttctcaactttagctgcacattag

SEQ ID NO: 323376 - DNA, 122 bp, Homo sapiens
ctccccgcacgcccacccccgagggcttcctctcgctcccacccaagctgcccccagtcccgaggcccttagttcggtgccgaccgtacaggctgtcctacctggggccccaggaggttggt

SEQ ID NO: 323377 - DNA, 122 bp, Homo sapiens
taaatgacagccgtgtttccatactgtttcatcaagacgctgggcagtggcaggagctgccggggaggtggtaaactccatgtctctctctgccttgggctgcggacccacgagattgccct

SEQ ID NO: 323378 - DNA, 122 bp, Homo sapiens
gcatcatttcctgccaggatggaagtggtgaggtcatttgtccagtgacagagaatgtttcgaggaaggagagatcaggagatccagttgtaacttacacatacttttcaagcaatccctgt

SEQ ID NO: 323379 - DNA, 122 bp, Homo sapiens
agaaacccggccgcacagcaggatgtgggcagtggtgagccagcattagagcctgagctccgccctcccatcagctcagccgcagccttaggttctcctgggagcgcgaactgtgcatgtga

SEQ ID NO: 323380 - DNA, 122 bp, Homo sapiens
tttaacgagtggctccacaattccttaggaagagctgctctcttctgtctccctggtggtcgtaatttcgcccacacctgccccgtctttgctctgcagctccacactccctcagccccgcc

SEQ ID NO: 323381 - DNA, 122 bp, Homo sapiens
gtttccgccatcgccgccgccgccgccgccgccgccgggccgcgccgggctccgctcctccgaaccgtctggcggacttggcaccggcccccgctcctcagtgcccccgcagtgcgtggcag

SEQ ID NO: 323382 - DNA, 122 bp, Homo sapiens
gccccctcctccacctcccctccccgcgcgcggctccgggctccccgctccgtgcccggccgatcatctttctagcaccctccagccttggcctccattcgggggttctgagggctgcgatc

SEQ ID NO: 323383 - DNA, 122 bp, Homo sapiens
gcggcagcgcgcttcgcaagacaccgaggacgaggaatctggtgcttcgggctccgacagcggcggctccccgttgcggggaggcgggagctgcagcggtagcgccggaggcggcggcagcg

SEQ ID NO: 323384 - DNA, 122 bp, Homo sapiens
agggtccaccccgtgctcagcttcaaagtgttccctagggcctccgcctgggatgcgggacggagagctcaggccagggaggagtgaggtcaccacctgctgcctaaacacagcagggatgc

SEQ ID NO: 323385 - DNA, 122 bp, Homo sapiens
ttgctgagctgcagagacagggtccatccaactcgacagcatccagcagccactccaggccgccagcagacagatgttgggagcagcactgatagtttgggttttcgtttgtttttttaaga

SEQ ID NO: 323386 - DNA, 122 bp, Homo sapiens
tggtctccagatggagctcagaactactcttagggtataagagtcttgggaatgaccgggcgcagtggttcacgcctgtaatccccacactttgggaggccgagatgggtggattacctgag

SEQ ID NO: 323387 - DNA, 122 bp, Homo sapiens
acggagttctccagttaaaccagattttcagggaagtttgtatctgcttttgtttttatccggttaacagtataagtgaaaatacatatgtagtgcaaaggtttatgagaaataaaccaccg

SEQ ID NO: 323388 - DNA, 122 bp, Homo sapiens
atgaatctctatcttataccagaaattatttaaaaatccagatggatcaacagccgggcacggtggctcacgcctgtaatcccagcactttgggaggtcgaggcaggcagatcacgaggtca

SEQ ID NO: 323389 - DNA, 122 bp, Homo sapiens
cggcaacctgtaacctattaatacgggatgggggagaacgccgacattcctgcagactgtcgaattctgggtctgactctgtaataccgctagtttgcaagagtccagaaccacaggttgaa

SEQ ID NO: 323390 - DNA, 122 bp, Homo sapiens
cgggggggggtcaccgttggaccctcggaggacaatgggcgcccattgttacctccccagcgccaccccccagtaggcgacttctctcggagaagatgccgctttcgactccctaagcacaa

SEQ ID NO: 323391 - DNA, 122 bp, Homo sapiens
tttccactcgacctcaattagcacagtcatgctgggtgccaaagctatttactttgcttgcgggagtccaggagctggctcctaatggctccatttgaaatggttttttaggcaaaggagac

SEQ ID NO: 323392 - DNA, 122 bp, Homo sapiens
ggggagaagtcactttcccagcccgggtggccttcagtcgggcacctctcctaggtgcggcgctgacctcggcgcccctcagctgccggcagcacaggacatggcctggctccgggatcagc

SEQ ID NO: 323393 - DNA, 122 bp, Homo sapiens
agacacccacgtgacagacagacggacagaagcccgtggagacagacacgcgcagacggacgacctcatgcagtgacaggcacagacaaacgcagggacgactttcacagacggacggacac

SEQ ID NO: 323394 - DNA, 122 bp, Homo sapiens
actaaagagcagcagaggatggtttcattcattccatgttcgtggagtgtttacacgtgtcgggcattccactggtgctggagattcaaaaatcagaaggtgcgggcccccatcctgaagga

SEQ ID NO: 323395 - DNA, 122 bp, Homo sapiens
agctagacctagagctctggtcctggcttggcgaagaatgggagaggtcaaaggtgggagcgaggccgctgactggtgagtagagccccaccagagcagatgagctggaagtgcagcagagt

SEQ ID NO: 323396 - DNA, 122 bp, Homo sapiens
tctgcctgtggctgtgtcttactgaccatggctctgtgtctagtgggtccaagcctctcccgggtggccagtctttctgtaggttgcggcacaacgccaggcaaaagaagaggaaggaattt

SEQ ID NO: 323397 - DNA, 122 bp, Homo sapiens
gacgtaaaaaaaaaaatcatggtaaaatacatataacataaacctgagcattttaaagcacgaagttccaagattaaacacaacaaccatcccctctatccacttccaggacttttcatctt

SEQ ID NO: 323398 - DNA, 122 bp, Homo sapiens
cactgtgctgtgaacctgcggcttatttacagacgtgtccaaatccgttctctggtcctgcgtgcagtggccacgcccttcatagtctgaacgtgggtgactgtgtatacctgatatgcccc

SEQ ID NO: 323399 - DNA, 122 bp, Homo sapiens
cattattttccgtacctagccactcaccttaatcagtgtgttcccagcttctttgctcaccgtcatttcttgaactccactcttccaaattgtttccttctttctgaaatacattcttatcc

SEQ ID NO: 323400 - DNA, 122 bp, Homo sapiens
aaggtatcctcctgcctcggcctcccaaagtgttggattacaggcgtgagtcacagagcccggcctccacattttctcgacagggtccgtaagacctggttcccagaaaggtggccgtagaa

SEQ ID NO: 323401 - DNA, 122 bp, Homo sapiens
atttggaaaggagcaaggagcttggaaactcggagcaagcggaatcatctcctaccgccccgcttctgctcggctcagggcgcacgatgaaaaggctgaatttgtcacatttccccacactc

SEQ ID NO: 323402 - DNA, 122 bp, Homo sapiens
acagaggggctgcacagggaaccgctggctgaacccctgccatccggctagatcccagctcgcagaaaatattttttgtgttagaaactttgctttttggctcgatttcatgcctttgagct

SEQ ID NO: 323403 - DNA, 122 bp, Homo sapiens
tcggcgtctgaggagactctgagtccgggtgggtgcgtggggactttagaactgggaccgcggcgacgctgattggcttctctagatatccaatacccaatgggagtgggaagtggggacgc

SEQ ID NO: 323404 - DNA, 122 bp, Homo sapiens
tgcagacaagcccatgagagaggttagcagacaagtggagaggcagggatgtctcagagacgcccatccccagaaggatgataggaaaaggccactgatagaacagtgtctgcaaggggtgt

SEQ ID NO: 323405 - DNA, 122 bp, Homo sapiens
cctttacctgtagagtctcctagaggaaagtctgagggggtccgtctccccagactcgggcgtttccggatgcctgacgcctccccgcagatctcaggttctcaggaacccggggtgatatc

SEQ ID NO: 323406 - DNA, 122 bp, Homo sapiens
caatctaggtgatgtgaccatggacagctcagttggccattctaaggctcaggctctcagcggcgtaaaggggttactactgacagcctccctcaaagtgaccttggaggtttagaatgaca

SEQ ID NO: 323407 - DNA, 122 bp, Homo sapiens
cgggaggaagacgcgccacagggactgggacagcggccaccgcggtgacacctacagccacgcaagcacctgcgtaaacacgtgctacagtcacatgttacgtatttcacacatttacacac

SEQ ID NO: 323408 - DNA, 122 bp, Homo sapiens
tctgttgcagccacaccagccttgccctgtaggagataatacaaagactttcagggtggacggccacccggaggggtgggggcattggggatgcatcctagcgctgacttcagccaagtgac

SEQ ID NO: 323409 - DNA, 122 bp, Homo sapiens
tttgcgctcggagctttgacttgagaatccatatccttcgttcagcacaaagtttctgagcgcctaccacgtggagagagctaagtgctaggtgctgtgaagaaacacagcgtttaagacag

SEQ ID NO: 323410 - DNA, 122 bp, Homo sapiens
gggtcctctccctgggaggtggggtcttccactggttttccccgccagggctccagggggcgccatgcgattcagcgctgggctccgctgggggccgggccttggaggaggcgaaccgtgca

SEQ ID NO: 323411 - DNA, 122 bp, Homo sapiens
attaaaatgggagatgtggggccgaggtgggcgaattgggatccctccaggtcaggggttcgagaccatcctgggcaacaaagcgagaccctcccccatgccacgtttctacaaaaaataaa

SEQ ID NO: 323412 - DNA, 122 bp, Homo sapiens
cagggaggtgcagtgctgctaccaatggttggctggaatctaagccagtaggtcttaccacgtgaggcattgttgaagtgggtcctacagaccatcactatcagccccctggattctgcctc

SEQ ID NO: 323413 - DNA, 122 bp, Homo sapiens
acccactcccctctgtgggcagtgaggccccagataccacatccaaccagcctcctaacacgggcagtaacgccctggatagggcctccaacccaccccaccacgccacgccacaggcagta

SEQ ID NO: 323414 - DNA, 122 bp, Homo sapiens
gaaaggcttcttggtgcaaatctcactcttaagttcccagtgaagtcctctttgtgtcttcgtaggtatggtacatggctgtaattgaatacattaatcctgtggcattttcacccattagc

SEQ ID NO: 323415 - DNA, 122 bp, Homo sapiens
gcacaacacattcagcagccagacccagaaactcaaaggcagcgttgggaagccactgcacgtttgtaaggagtcaggttgtccacacaatggcgctattttgggattccggcttctctgcc

SEQ ID NO: 323416 - DNA, 122 bp, Homo sapiens
cttcataagaattcaatggacttgccggggatcttagatacttacaaggtgcaatggagccgaattgttgtgttgtggctgcccctttaaggtggccaagaaccaccttaggatcctcaata

SEQ ID NO: 323417 - DNA, 122 bp, Homo sapiens
cctttcattcttccacttaggggtctccaggaatgaaaactggccccagccaggccagagcgcgcgaatgaaaggcggcactgggaccaagagagaagcttcgtcccgcctgggctgcggaa

SEQ ID NO: 323418 - DNA, 122 bp, Homo sapiens
atcaacttataccttagttataaggtggtggtggcagggctgataacaggatgaccaacccgaaacatgaacgtacccatttttacagttgtgcctggggttcctactcatactttatcagt

SEQ ID NO: 323419 - DNA, 122 bp, Homo sapiens
cccgtactgaggaggctgaggagtgcactgggtgttcttttctcctctaacccagaactgcgagacagaggctgagtccctgtaaagaacagctccagaaaagccaggagagcgcaggaggg

SEQ ID NO: 323420 - DNA, 122 bp, Homo sapiens
tcaaattcgcctctcctcgccctcctgtccttcgggaaatgctcagcctacgcacaccctcgcccccgagcacccggttctgaagaatgggcaggcgcctgaatggccctgggaagggacac

SEQ ID NO: 323421 - DNA, 122 bp, Homo sapiens
tgaagaagagaggcagtgcagtcagtggagacagcatgtgcaagaacgaggaggtgagttcgggaacttaaacttggttcagttttagaggagaacaaagctcagccagggagaggccagaa

SEQ ID NO: 323422 - DNA, 122 bp, Homo sapiens
atcggcccgcctcggcttcccaaagtgctaggattacaggcatgaaccacggtgcctggccgaccctgtcttaagaaagaaagaaaggagagagagagaagaaagaaaagaaaaacagttca

SEQ ID NO: 323423 - DNA, 122 bp, Homo sapiens
gtctctctgtgcactgcaacctgccctgcaaatattgggtacgataaaccaatgtatcaccgctcctaaatttggttctctctttcaacagtgagtacagatttctagcagtattttaccca

SEQ ID NO: 323424 - DNA, 122 bp, Homo sapiens
ctagaaagagggcatccgggttgtgcaaatttcagacacacggatatcccgtggcgcctgcgtccggagcccggccctgctgctggactgtccccggccacgcccgccgcccctcccgcatc

SEQ ID NO: 323425 - DNA, 122 bp, Homo sapiens
gggaggagggacagagggcctccgaaggaggggaggtgtgcaccctgatgagggggcagacggaggggaaggcaaacatttattaaccaccagggtttacgataggttgtttcacatatatt

SEQ ID NO: 323426 - DNA, 122 bp, Homo sapiens
agaagcgcagccaggcctgacccggagagggcaccgccagctggaggcttgctgctgggccgagacactcccgaacagatgagcctctctatgtccggacgccttcctgccagccttgctca

SEQ ID NO: 323427 - DNA, 122 bp, Homo sapiens
tctcaccggcgaggggtggccagaagtgggggaggcgaggagccggggcggccgccgcagcggcagggctgcacgctcatacttcccagcttcccagcgagagaagaaagaaaggggcacgt

SEQ ID NO: 323428 - DNA, 122 bp, Homo sapiens
aaaagggttcaggagcttggaggagtcccttagaacccacccttctcacccttaccacagcggtggctgccacatccacctccatcaggctggcagggggccatgggcctctgccagggctg

SEQ ID NO: 323429 - DNA, 122 bp, Homo sapiens
ggggcacggacatcaacccagccccgacccagtccacctcctccgggggacggcagggcccgacccagtccacctcctccgggggacggcaggcatcctcagcgggtcagaggattgatccc

SEQ ID NO: 323430 - DNA, 122 bp, Homo sapiens
aagtgtgtggcccatgaattgaacaatttaaccttgaagtctatatccgtgatattatgtcgatttttaactgaggggaaattaactagtccagcctaaaatgcttcttttaatctgcattc

SEQ ID NO: 323431 - DNA, 122 bp, Homo sapiens
cgcctgagcggggcccggcggccgcgccctacgccccgagccagtcccgttccctccctccggaagaccccggtggttcccggctccgacccagcacactcacctgccagccgctgccgtcc

SEQ ID NO: 323432 - DNA, 122 bp, Homo sapiens
agctctgggccggccgggaggacaggaggcacaggccaaggcccaggacggtcgtgaacgcggaaagaggccgccgcgacctcctccccggccgccgccactcacctgatcctcccgaaggt

SEQ ID NO: 323433 - DNA, 122 bp, Homo sapiens
ttgctcttagcattttttttcttttcatgtaaccctttgttctttcaggaatttactttgcggtaagaaatgggctggcttccagttttatgtttcccaaatggtgattcagctgttccatt

SEQ ID NO: 323434 - DNA, 122 bp, Homo sapiens
ttgataacagcggggagcctgccgccgccttggcactccttaaagcacctgttggtgtggcgaccctgctttctaaagcaagctgcaggggagaccgtaccgcgagccactcagaaggaggc

SEQ ID NO: 323435 - DNA, 122 bp, Homo sapiens
tgcagcatctgactccagccagagcagcttctctgcttttaatggcttgtgagatttgatcgggcccacacagatagtccaaaataatcttgcaattttaaggtccttaatcttcatcacat

SEQ ID NO: 323436 - DNA, 122 bp, Homo sapiens
ctgttgaactccggccgcatcgcggtgtccggagccgcctggcctggagtatgcgctgagcgtcacctaggcaaccacccctgcacctgtggatcaggtgggggaaagggaccgaccgcgtt

SEQ ID NO: 323437 - DNA, 122 bp, Homo sapiens
caaaacccaagagagctctgggtccaaagagctcagatatttcacaccctggacacaaaccggtgaacaacagctcataaataaccgtgtcattcatttcctgattttaaaaattgtactaa

SEQ ID NO: 323438 - DNA, 122 bp, Homo sapiens
tgaggcctcaggaagctttcagttgtggtggaaggtcacagggagccagtgtgtacacagcgagagtgggagcaaaagaagtggggagttccacactcttttaaacaaccagatatcacatg

SEQ ID NO: 323439 - DNA, 122 bp, Homo sapiens
cccatttgatgtggacctcacgttctggcggatactcccagactcctcagcagacatgctcgttaacaattgaggaggtaacgaaacctcggctgaggaacttggctcaccgagagcagaga

SEQ ID NO: 323440 - DNA, 122 bp, Homo sapiens
acgtgagagactcactcaacaaatgaatgaacacctactatgcatgagtaaaaccagatgcgaatcacttcctctagatgaaatgggctttacatacaaattataacagttccaggaaaatc

SEQ ID NO: 323441 - DNA, 122 bp, Homo sapiens
aagtcctcttgacttctctaaccagaattagcttccccttctccctgctctcgtagcccacgcacaccctccgcctctggacttcatttaggaaatggtagttttttgtttacttgtctatt

SEQ ID NO: 323442 - DNA, 122 bp, Homo sapiens
gctgggagacgccgagtgccgagggagcgcgggcctggccggggtctcggctacttctctcggtggggaagcagggacagtcaccccagcagcccagaatcgttgtgaagatcgacgtggcc

SEQ ID NO: 323443 - DNA, 122 bp, Homo sapiens
gagccaccgcgcctggccccccacccagctttctttatctcacctttgatcatcagccagcgaaatggtggcaaggggacaagggttccctggttcagtatagggagcacggcagtggagag

SEQ ID NO: 323444 - DNA, 122 bp, Homo sapiens
agactgtatgccctgctatcagatgccagatctatgtgtctgtctgtgtgtccatcccgccgaccccccagactaacctccaggcatggactgaatctggttctcctcttgtacacccctca

SEQ ID NO: 323445 - DNA, 122 bp, Homo sapiens
ctgaagctcaggcccttcctggccccttgatctcctgcactgagctgtggtgagcacatccgggtcccgctggatgtatgtgtgggcagggggggtgccctgggttgggtcaatgatgagaa

SEQ ID NO: 323446 - DNA, 122 bp, Homo sapiens
cctcgggacgcggtggaggccgcggtatctgcgcggggccagaagggtcgcgggtctcaccgcccgggctgtcagagacgctgtggaggggccgcggcagccgcacgcagaggactctcggc

SEQ ID NO: 323447 - DNA, 122 bp, Homo sapiens
aaagggaaaggatgttacagaaactccagatactactccccttcagtggtctgagttgcgcggcgctttcccgcctgtccggtagggggcgccgcgcagaaagccgcagtccctctgcggaa

SEQ ID NO: 323448 - DNA, 122 bp, Homo sapiens
tcaaatctcagcccttggcgccgcgtggctctccgcccctctgggccgccagggtagcgccgcccgccgctcgcccccggctagcacagcaaatcgcagtcccctcgccccgggagagactc

SEQ ID NO: 323449 - DNA, 122 bp, Homo sapiens
gcttccccctgacacgtgactcaggcaggcaatggcacccaggagcgtcgagcgctcagacgcggaactacgacagtaagaggaagcggcggccatccgtgcgtcacgtggtggaggcaggg

SEQ ID NO: 323450 - DNA, 122 bp, Homo sapiens
ggccattaaggaactggtccgattaagtgacagaacgcggccttcaccaagattcagtgacgcccagccccatcccctgacagccatttctcacgggctcctggtctcagagcgagacgtgc

SEQ ID NO: 323451 - DNA, 122 bp, Homo sapiens
ggcgggagcctttccaacccccgcgggctgcgatgcagcagaaaactcggccgcctgcaccggggattctccagaaacacaggcgtgcctgggtgtgcgctcaacttcccgggcgagggacg

SEQ ID NO: 323452 - DNA, 122 bp, Homo sapiens
acacacacatgtgtaatgtgtaattctgctctatacattttccagctctcctatggctggcgcccataattttaagtgcctctgactttaagagctgcctagtggaagtttttttttttttt

SEQ ID NO: 323453 - DNA, 122 bp, Homo sapiens
tctcttcccagctactggaggtttgctggtgatctttggtgttccctggcttgcaagctgcgtaactccagtctctgcctttgtagtgccgtggtattttctctgtgtgtcttcacatgtcc

SEQ ID NO: 323454 - DNA, 122 bp, Homo sapiens
gtgtgtgttgttcccctccctatgttcatgtgttctcatcgttcagttcctacttataagcgagaatatgtggagtttggtttcctgttcctgcattagtttactgaggatactggcttcca

SEQ ID NO: 323455 - DNA, 122 bp, Homo sapiens
aagcggggcctagggatggcggccgtgatcacgcaggcagcagagagcagctctgggaagcggggagggacgaggacggggaggcgacatcagcaaggccgtgtgtgagccaggcagggtgt

SEQ ID NO: 323456 - DNA, 122 bp, Homo sapiens
tacttctgagcgatttgctcatcaaccgctattctgcacacacacgtggggagcctgccacgtgcccactctgctttgcctggtggggtcgggggagaatagaacagagggagtttcactga

SEQ ID NO: 323457 - DNA, 122 bp, Homo sapiens
ataaatccaggaaaggcagtaggacatgccaagtgagaggtgggtgagagctgagaggtgcgttgttttaaataggtcaggaaaggccttacagataaggtaactttgttaaaagatataaa

SEQ ID NO: 323458 - DNA, 122 bp, Homo sapiens
agaaaaggcaagtcttatttctttgtgtatttctgggaatgtcttgggctggcgccgaaccgcttcggtattttgtggcggaggaaaccgagagaggcacctttcttaccaacttggcaaaa

SEQ ID NO: 323459 - DNA, 122 bp, Homo sapiens
gcgtgagccaccacgcccggcctctgccaccttttctatggcaaggccaggatatgtctccgagggctctccattaggcagcccctggcacacaacacgaagctcaccttccttccagccct

SEQ ID NO: 323460 - DNA, 122 bp, Homo sapiens
ctcaggcagtgggtgtgagcgcaggaagcgcagatacaggggccaaattcgagagtgctgcgtgatgggcagtgcccggagggcacggtcgaaggtgcggcgggtgtgtgtgacgcgcccct

SEQ ID NO: 323461 - DNA, 122 bp, Homo sapiens
cggtgtgcgtaagctggtggcgcagcaggtgcgagctgcggctgaagctgcggccgcactcgctgcacacgaatggtcgctcacccgtgtggatcttctggtgcctcagcaggttgctgcgt

SEQ ID NO: 323462 - DNA, 122 bp, Homo sapiens
caagcaatggtgttgaccgcatctgagccacaggtgtcctccttttaggcaactgcagtccgaggctgtctctctccgtcctggttcaagacaacttaccccagcagcgtgcgaggagccga

SEQ ID NO: 323463 - DNA, 122 bp, Homo sapiens
aaaacacgttatgtgatgggtcagggggtgaccgcccttctggcagcagcccatttcctacgatgaggggctctctgcaccggatcctggttcccggcgcatggcgggacatgcccctcctg

SEQ ID NO: 323464 - DNA, 122 bp, Homo sapiens
cttgaaaaccattaaatgagacctttccactgcaaatttaattatcattaaaatcctgttcgtgtttttaaaaactttttgggaatccctactaatcatgctattattggtgaattgatttg

SEQ ID NO: 323465 - DNA, 122 bp, Homo sapiens
cctggccgctcgccctcaggaagaacttaattatggatggcgttgggtctccgcttagaacgggcgggaggcttagcacccccgtgtggggcaggccgggcagcctctgaggtcgttgaggc

SEQ ID NO: 323466 - DNA, 122 bp, Homo sapiens
tggtggcttccaacattgtttggctcgtgaccacatcattccagtctctacctttgtcttcgtgtcacattctcctctgtgtgtatcaaatctccctatctctccctctctctctttttttt

SEQ ID NO: 323467 - DNA, 122 bp, Homo sapiens
ctcccagaggtggtggttgtgttacgaaggctgaccctgccaatggccgacaaaatggtgcgcacccccaagtgctcgagatgcaggaaccatggcttcctggtgcccgtcaagggacacgc

SEQ ID NO: 323468 - DNA, 122 bp, Homo sapiens
tgacgctgtccatggcacccagtagtagcactgtacacataaaggacatccaggacgggacgctagggaatcacaggagccaagaggcaacagcctaacattacaatacctgatactattat

SEQ ID NO: 323469 - DNA, 122 bp, Homo sapiens
ctgcctttctagggcattgtgtgggcaatgtatctgaaccactgtgcactcacccactgacgggggaccccaagtgaggcctaggaatctgcattacaagcaccccatgaattcccatgcat

SEQ ID NO: 323470 - DNA, 122 bp, Homo sapiens
aggctatgggaatcatgaactccttcgtcaacgacatctttgagcgtatcgccggagaagcgtcacgcctggcgcattacaacaagcgctcgaccatcacttcgagggagatccagacggcc

SEQ ID NO: 323471 - DNA, 122 bp, Homo sapiens
tttggtgactagggggaagccaggtaagtgtctacacttggttctcccgtagcttggggacgcgagggagggagtccagccgctcctgtcaggctgcccgcccctttctccctcccccggag

SEQ ID NO: 323472 - DNA, 122 bp, Homo sapiens
ttctctgtatttccagcttgtacagctgtaaatagagactgacagtttattttcacgtcccggctcgaggggggcggcggggacggggggaacccatttgaaataaatacttgtgagtctct

SEQ ID NO: 323473 - DNA, 122 bp, Homo sapiens
ttcccccgcgtaaggtctgaagccgcggccagagtggctttggggtgaccgcgcgtggaccgtcgccggcgggaggaagcgcggtcccgcgaggggccgaacggggcccctgcggcttgagc

SEQ ID NO: 323474 - DNA, 122 bp, Homo sapiens
cttcctcactaggagtcaggccaaagtcatctcctttggtctccaatggaggccagaactcggttcacctgcaacgggaggacctggcccagaagaggtggccttcatcttcatggtgcctt

SEQ ID NO: 323475 - DNA, 122 bp, Homo sapiens
tcgggaattggctgccctggtcctagggggcggccccagggtcgggatgaagtctggggtcgcgggcgcgggctgcgtggggtttcagttactcgtggagtttcagttactcgtggacaaag

SEQ ID NO: 323476 - DNA, 122 bp, Homo sapiens
gttgcacttggtgaaggctgacagaatgaattaggaaattaaatactaggggaagcagttcggaggagaccaaaagacaagaatatgcctaggacagtgttgagagaagacgggagcaggac

SEQ ID NO: 323477 - DNA, 122 bp, Homo sapiens
tttttttaaggaagcttcctacctttctttttctttttttaaatttccaattcttgggagcgaattcttagtagggcttttaaatagacttccatagtctttgcatagcattaagtcactca

SEQ ID NO: 323478 - DNA, 122 bp, Homo sapiens
ccccactcagctctagctaaagttgggctcccaggaccctcaccaggctaagagtgaatgcgcttgggtttcttagctcccctgccccccccaccattccccatagtgggttccttttgtct

SEQ ID NO: 323479 - DNA, 122 bp, Homo sapiens
gttttgcagaatgacttgatctctggcctcaggttcctcatgtataagtgaagggttggacgcatcagtggtgactgagctttctagggtctctattctgggtcagccacatttagaggtgg

SEQ ID NO: 323480 - DNA, 122 bp, Homo sapiens
agtagagagagagtttcaccatgttggtcaggctggtcttgaactcctgacctcatgatccgcccgcctcagcctcccagaatgctggactcctgcggctgagactattgtttttgttaaat

SEQ ID NO: 323481 - DNA, 122 bp, Homo sapiens
ttcgggccggcagcagcggctgcagtcgtatggcagtgagccgctgtctacccagcgagacggagagctcaggacgcaaccctatgagttggaagccgcaggaggcggaaccgggttgcggg

SEQ ID NO: 323482 - DNA, 122 bp, Homo sapiens
agtggaggtgaaggtactgctagctccaagaggctgaggaaggagtaagcaaccaatcagcgcataagggaattctcactgtcaaggaattgaggtgaaaatctagagccactgaggtggga

SEQ ID NO: 323483 - DNA, 122 bp, Homo sapiens
gtaggtgattgggcttatgaattgatcaggagcatggaggaataggtacatctggattagcgagtgtgtgaattcttgagctgatgggcctaagctctaaaggatagattagttgtcagcat

SEQ ID NO: 323484 - DNA, 122 bp, Homo sapiens
ggtggttttattgagttggcgacctttattcttcctgaagtctggtctgttcctaaaggtcggagacttgcgagtggacttctttttgtctgatcgtcctgattgcttggactagaaaaaga

SEQ ID NO: 323485 - DNA, 122 bp, Homo sapiens
tgtttgggttcgcgctctgggagaattttggctttgctcgccttcctctttcagaagactcgaaatcggccagcaggtctgcgagatttgaaacgcgactgttactccttgttttccggttc

SEQ ID NO: 323486 - DNA, 122 bp, Homo sapiens
ctctcctgcccccggtcgcaaagggcgaccggggactcttctcctgccctcgtttctgggcgccccaaacctctggccacagctggggttcccaggggcccccctcccgcctcgacgccttg

SEQ ID NO: 323487 - DNA, 122 bp, Homo sapiens
agtgggttggatgcttgcctctttcctaacagttatttccccgggtccagcttaaagactcgatggaaggaggtagaacctctgctgttactgcttgaacttaacctgggaaaggagaggaa

SEQ ID NO: 323488 - DNA, 122 bp, Homo sapiens
ttaccttactgggtaagggcaaaaacccctattgtgaaagacttgtggctgcgtagccaacggccattctttttgaaacagtcatttctgtttttgaaactattttttttaaagattttttt

SEQ ID NO: 323489 - DNA, 122 bp, Homo sapiens
ttcctttggaggctgttaagcaagcacattaagaagcactgtgacgaaccgaggttcctacgatggacgtgggcacatgcaactccctgccgttcgcttatcgttcaggctgactttttttt

SEQ ID NO: 323490 - DNA, 122 bp, Homo sapiens
gtcaggttttcagttcgtcttcctggtgtttccgcgcctcattctagggggaggtttagtcgttcctttctctgctgtcccccagtagcttccggccattccttgtgaaggaatcttcctaa

SEQ ID NO: 323491 - DNA, 122 bp, Homo sapiens
cttggagcccactgtggggcattaccttcacgaggggggccatcagcccagcagggagatcgaagtagggcacattggggaccaggctggggtcatcgtggttgatgtggggtgggccctgt

SEQ ID NO: 323492 - DNA, 122 bp, Homo sapiens
tcctctaccctcgggcgcaccctccttcctcgtccgcggcgccgcagcttctcaacctgccgctgcatctcaactccctgcaagcagcagagctgtagaataccagaaatggtcttccttcc

SEQ ID NO: 323493 - DNA, 122 bp, Homo sapiens
cccagagcctggtacccaaaggcaggctgccatctggtccccgccccaaccgcctctctgcgtctagtcgcattccacgaaaagatggtctgtagaaagtttccccaaaggagaaacaactt

SEQ ID NO: 323494 - DNA, 122 bp, Homo sapiens
ttccttcccggctttctgtaagactccggggagcccgtgagcgttcctgacggcggcgggcgcgggtttccgacgtccggtccgggatttggagcagagctggagaaagcaaacagacacta

SEQ ID NO: 323495 - DNA, 122 bp, Homo sapiens
cccccaatggaaggcactggatacagtgtgggaggggacaccaacgccctgaggtgcctgcggcacacctggggcaagggagggaaggagcatacagacacacgggcacacacttgcacaca

SEQ ID NO: 323496 - DNA, 122 bp, Homo sapiens
cttctctctgccccacagctgcagctcacagaagagtcgccccacctagcaagcaggcctcggagacagggactgggggagaggctgtggcaacatgaaaccctttaatccgctggcctctc

SEQ ID NO: 323497 - DNA, 122 bp, Homo sapiens
ttgggagttacggcggggctgaagccgcggggctgggtgaggcaggacagagcctgggggcggtgagagggcggggctaaagtgaaatgggcggggccggaggtgagttggtggtttagggg

SEQ ID NO: 323498 - DNA, 122 bp, Homo sapiens
agggtagggcgtctagagcagccggttacgcgagggtagggcgtggagagcagccggttacgcgagggtagggcgtggagagcagccggttacgcgagggtagggcgtggagagcagccggt

SEQ ID NO: 323499 - DNA, 122 bp, Homo sapiens
cctgtggaacgcccagcccgcctgcgccccctttatacgcgcgggccccacccccgtgcgcgcgggcccggccgcgattagcataatgtagtattttcagtttcaacaacaccacggcgatt

SEQ ID NO: 323500 - DNA, 122 bp, Homo sapiens
aaccccccgggcctccgctctttaggggagggggagcctcgcccttgcccccctccgggacgagcgggcagatctaaaagcttccctaccgccgcccaggcggtcgatagcagactcccagg

SEQ ID NO: 323501 - DNA, 122 bp, Homo sapiens
cacagctgctgtctttggggctgccatgacaccagtaggtcggctcagcagctctgggaccgtttcccaggccacggcggtgttgggggcagggagcgcagccagtcaggagcacaaggcgc

SEQ ID NO: 323502 - DNA, 122 bp, Homo sapiens
ataattagccgcgaattctctctacgaggggaggaagaaatagaaaataaaatgcttctacgttcaaacagcaagacagcctggaacgtctcaatgtctcagtgacagactgagatctcttt

SEQ ID NO: 323503 - DNA, 122 bp, Homo sapiens
gccgcccttgccgtgcgcctggttctgcgggtgctgctgcgggtgctgctgcgggtgcggcgcgggcggcggcggcggctgctgcggcgccggcggcggcttcttcgccacgtcatccgcgc

SEQ ID NO: 323504 - DNA, 122 bp, Homo sapiens
aggcccgcgggcaggcggggacctgccgggctgggttgggccaggccgggcctggcaggacgcagccccaaagcggcggggtggggcggggccgggccaggcggccgtgggggccccggggg

SEQ ID NO: 323505 - DNA, 122 bp, Homo sapiens
gctcaccgtccgtggttgcagattcgccacaaaccgcccgacgaccccagatcccgagtacggtgacttcagtctccagaaactccactctaagatgggagagctagagaagccctgtgggg

SEQ ID NO: 323506 - DNA, 122 bp, Homo sapiens
gggggaggagggaccggcggcgcccacgtggcctccgcgggccccgccagagcctgcgcccgggccctgaccgcacctctcgccccgcaggaccatggccaacctggagcgcaccttcatcg

SEQ ID NO: 323507 - DNA, 122 bp, Homo sapiens
ctaacgctactttggaactcctaacagtgttcccttgttgtaaaactaggagcagtaaaccgatatttttctctggtgttttctcctttattataattaatttcagaattactgctaaacaa

SEQ ID NO: 323508 - DNA, 122 bp, Homo sapiens
cacacctgttcagaggattcttactaaaaaaatgtgaatatcaagactctgtctcttgcccgtcatgaagcagatgatttttaactgcatacaaatgagcacaaataacttgacatcttgaa

SEQ ID NO: 323509 - DNA, 122 bp, Homo sapiens
tctaataattgcagcacatgtccataaatctctattacaaccacctgagataggccatctcgggcatgtggaaaaagcccaggtatagacactttggatcctggatttcccttgtactggct

SEQ ID NO: 323510 - DNA, 122 bp, Homo sapiens
ccagggcgtcgctaacgaggaccctgtccagggcgtcgctaacgaggttgaagtccagggcgtcgcacacgaggacgccgtccagggcatcgctaacgaggacgccgcccacggcatcgcga

SEQ ID NO: 323511 - DNA, 122 bp, Homo sapiens
ggtcctcccaggtttgagggcggtcaggcggggtcaaggccaggcagcggggcgcgtctgcgttgcgcccgactctccgcggttacctgtgcctagaggtgatttgaagggcaggggccgag

SEQ ID NO: 323512 - DNA, 122 bp, Homo sapiens
cgacactgccttagtttaaatattgtttatcctataggaagaaatcagcagcagacagaccgctggatggctgacccttatttagaagatactgtcagtgggaagaacattgccaccagata

SEQ ID NO: 323513 - DNA, 122 bp, Homo sapiens
aacacacacacacacacaaacacacacacacacacacacacacaggcaggacaagaggcacgattccatggagtatgaccagggtggcagcatccacagtgacatctggcaaatggccctgt

SEQ ID NO: 323514 - DNA, 122 bp, Homo sapiens
gagaagtcgagaacagcagctgctggcacaggtgctaagcctcttactgctcggggcttgcggattagggggccgctccgagtgcggagcccgccgagcccacgcccacccggaactcgcgc

SEQ ID NO: 323515 - DNA, 122 bp, Homo sapiens
acatggccgccgcgcagggaggcggggctgctccaagtccgggcaggagcggggcggggacgccgtcggcggagccagcgcgcaggcgcgggccgcgtgggccccggatggaggagctgagg

SEQ ID NO: 323516 - DNA, 122 bp, Homo sapiens
ccggagtagtactgcgagcagcggcgcgacagtgcggggtcccctttctcccagaagagacgtcacccacacaaacctgaccttcacgtggggcgcgggaccttgcggggtcccagccgcag

SEQ ID NO: 323517 - DNA, 122 bp, Homo sapiens
ttattgcctctgtgtccttcccccattggccggggtctgacctcacaatctaggctgacccgattggctactttccaaataaggaaggggttcgggtcgcagattggaacaggcggtttggg

SEQ ID NO: 323518 - DNA, 122 bp, Homo sapiens
gcaatgcaatgggatctgctacatgtgtgggttttgcttgcacggtttcagggattcacgcgtcccctcataagtaattgaatgacaagttgagagttcacttaggcgtactgaaatgcatt

SEQ ID NO: 323519 - DNA, 122 bp, Homo sapiens
cccgtccagtcgcagcgactccatcttctcatagcagctctgcatcttcagggggtggtacgccagccgggacagcttctccatgtactgcaggggccggggccgcgggggctgagcagggc

SEQ ID NO: 323520 - DNA, 122 bp, Homo sapiens
ctagccaacatgtagagctggttttgtggactgtgcctgtgtgcttgtgagaaagcagagcgacagagggaggcagagttagagctagttgcagaaggaaagtgcaatttctgaagtttgtt

SEQ ID NO: 323521 - DNA, 122 bp, Homo sapiens
agcgaggaccatggtttccctgctgagtgcctgggagggcggggccactccctaagcaggcgtccaggaggaacagctggcctggtgggggtcgtgttcatgcagcagcacccccacctgcc

SEQ ID NO: 323522 - DNA, 122 bp, Homo sapiens
ggggccataagaaagaattacaggcagtggtgcgcaggtaatgttcacgagacgccacagcggggtagcatcagaggcgggaggaggagggttggagagcagggccgtgttgcaaggctctc

SEQ ID NO: 323523 - DNA, 122 bp, Homo sapiens
tccagagctgtcgtgggcgcgctgagttgggccatctttggaaagaaaccctggggctgtcgcggggggagggcgatgtctcaccgactaccagggtaatggccgcgctcaattttgccttt

SEQ ID NO: 323524 - DNA, 122 bp, Homo sapiens
gaggggggcagaggtggaggacgttgaatagcagaaagcgatcccaagctctggctgcagcgagagacaaaagccccgccaaatgccggatgccacgccctcctctccaactgtgccactga

SEQ ID NO: 323525 - DNA, 122 bp, Homo sapiens
aaaggcctccgtactcagttccagggaaagggagatgagtgatggtggggccgagactcgcgggtactgcctacttccgaagagttagacgcttccacctgggtggaggggccctgggaact

SEQ ID NO: 323526 - DNA, 122 bp, Homo sapiens
gagatcagggtagacctgggagccagctgtgcaggcagcagcactctgatacagggaagccggagccgcggacctgtcccacgttgagatcagggtagacctgggagccagctgggcgggac

SEQ ID NO: 323527 - DNA, 122 bp, Homo sapiens
aatgctggctgccatccagcaagactgacacctgacacccaggcttaagatcaagagatgcggaactttccaccaaccctcaatgagatgttacagctaggtcatgagcagagagggcggcc

SEQ ID NO: 323528 - DNA, 122 bp, Homo sapiens
tggaatcaaagacattttggaggtctctggtccatctgaaagggggatactgggttcacccgatcccacgctttgccttctagagcttgctgccctggacaccccccaccccattcccccac

SEQ ID NO: 323529 - DNA, 122 bp, Homo sapiens
gaaatgagtgaatgctaaacaaatgggagaagcaagggctatttattctgagcttgctgtcgtaagagagtcaagccatcactttcattttggcagagactcaaaggcaggcagagggcttt

SEQ ID NO: 323530 - DNA, 122 bp, Homo sapiens
ggccttatcagataaggctcgagacagccctaggagataagagccaggcagggggggccccggcccctccctgagcacctactttgacccacagccgggctgggtcctgcattcattcacca

SEQ ID NO: 323531 - DNA, 122 bp, Homo sapiens
agaaaatgcccaggaaggggtcgatgctggcctgggctgcaccttggtgccttgccaccccgggagacgcgaaggggctgctgtgcgaattcgatgggagctggtgagaccgagaactgaga

SEQ ID NO: 323532 - DNA, 122 bp, Homo sapiens
cccggccgccgcctccctctcccgggatcaactgagccctggagaactggggggcccgcgcgcaaacccagtgaccttcaaggcccggagccgcctcctcgccccgcaggacgccgcgcccg

SEQ ID NO: 323533 - DNA, 122 bp, Homo sapiens
cagcgaaccacacggggtggatccaacagccgcaggggcatcgtggtcctgcggagacgccgcccgcccggaggcggcgctgtgacccaggttggagagtcaggagcccagcgccgcgctgc

SEQ ID NO: 323534 - DNA, 122 bp, Homo sapiens
ggcaggctggtcccaagtggaggggagagcaagagaagttcacagcattcaggcagcatccgggatgccccaacattaaagaggaaactagaccctgccttgaacctgccttcccctccggt

SEQ ID NO: 323535 - DNA, 122 bp, Homo sapiens
tttccacttcagttacccagggaagagtcctccaataaaaagctcatccttgcaggctttcgaacaaccctgttgaaggagaagttaccttctgtagtgtgctgggaattcccactgatttt

SEQ ID NO: 323536 - DNA, 122 bp, Homo sapiens
cattgtttgcagagcagagctgctgccaccccagacaaaactgcgttagagacacgacttcgggcatacaaataagagtgctgaatcattctagagcccttcaatacggtgttttcctcaag

SEQ ID NO: 323537 - DNA, 122 bp, Homo sapiens
cctcattccctagagaaagttgggacagccaggcttcatgtcctattatttactgagcaccgactctggcaggggtgggggtggaaaagtttctgtgaaactgacagacactggacttgatt

SEQ ID NO: 323538 - DNA, 122 bp, Homo sapiens
ggaggtcaggcaagtttcgaagacagaaggagaccgggggagagaaccagagagacgccgcgtgccccctgggcaagtccggggtgcagcccccatgccccgccccctgtgtccccaaagcc

SEQ ID NO: 323539 - DNA, 122 bp, Homo sapiens
ggtaagatcattgctgtcaatcggttcacacctgtacactgctgccttcaaagacacagacgacgctgtgcggttctagaaaaacaactgagtaagggatggccaaattttattttctggta

SEQ ID NO: 323540 - DNA, 122 bp, Homo sapiens
gctggctgtgggttccctctgagatcagtgcggagctgtcaaagcgagcaggggtggcgccgggagtgggaacgccacacagtgccaaatccccggctccagctcccgactcccggctcccg

SEQ ID NO: 323541 - DNA, 122 bp, Homo sapiens
tcccctttctggagaacccttggaaagaccagcactagggacactaccatcaggcagccccgtgtccttccccttatctgctactctatttctagggactgcctcaggccaaggagtcaaca

SEQ ID NO: 323542 - DNA, 122 bp, Homo sapiens
aaactccagcctgtgcggaaaccacgaacgaaataaaatgctgcggctcggctttgccagcgggccgggcctaagcctaagcgggcagccctgcggatcgcggacggcgccaggcgtcccgc

SEQ ID NO: 323543 - DNA, 122 bp, Homo sapiens
tctggccgttctgttggagcgcctctgactgacttcccccatgtgtccgtgtggccacaccgtgctactttcagaggcagtgggcttttcgctaagggataaaaagaagtaaaaccttgcct

SEQ ID NO: 323544 - DNA, 122 bp, Homo sapiens
tagggctttggttctttgtcgccgtccccgttggagttttttctttgcctttcagaagcccgtgcactctctttagagtgcagggctgacgggcggtccagccctggccaagtcatggagcg

SEQ ID NO: 323545 - DNA, 122 bp, Homo sapiens
tgtcttccacgttaaatccgatttgctccagcagtgacaccttgaacccattttggggaccgggcgggggtgggggtgagggggtgggcgggagtgagcaaagttgggagggggaggaagcg

SEQ ID NO: 323546 - DNA, 122 bp, Homo sapiens
cccctcgcgggcttcaatgacacccagcacggaaacgcgggggccagaactacagaagcccgtcccgcccggaactcaaggtcgcgagtgctgtgtggccggtccggacccggagcgcgagg

SEQ ID NO: 323547 - DNA, 122 bp, Homo sapiens
gggtgtcctgctactcctgctggggctcctccaggtaaggggaccgagatcggtctcagacgacagcctgccaggcaacccccagccgcaccagggccccaggctgtgccagtctccggctg

SEQ ID NO: 323548 - DNA, 122 bp, Homo sapiens
tctcattagacattatcacttgcaaatcaatgtggtaatcacggtaaactcatgtttactcgtctcagtgatgggctcccacttccctccctatgcaaactgccctcccacgctctctcctg

SEQ ID NO: 323549 - DNA, 122 bp, Homo sapiens
actggtttcctttaccttagtgaagccggcggcctgcaccgacccggctcgcgcccatcccggggtcacccacatttgggtgaacttgaacgagtgcccgaccaggtaacgttgccggacct

SEQ ID NO: 323550 - DNA, 122 bp, Homo sapiens
gttatgggtgctggagaaaacctccaggacaaccacctccaagatccagcccatctgccccgggtgcttgggatgtgacacatttttaatgtaagactccactggccactaaagcttaaccc

SEQ ID NO: 323551 - DNA, 122 bp, Homo sapiens
acagcccaagtagaggaagggcaagatctccactgggaaggaaggctggctgttggacagcggactaccatccgagtctgttgcactattggggtctcggtcaaggtcagactcgatgtccg

SEQ ID NO: 323552 - DNA, 122 bp, Homo sapiens
tagcttaactactctgaaagactgcaataagatcatatgagttacagtatatgaaagcatcgcagacatggtacacatcatgcagatgggatgctttctatttttcttcttttttttttttt

SEQ ID NO: 323553 - DNA, 122 bp, Homo sapiens
gggccaaggagccgcggaggccgcgctcaccagagccagcgtgcccgggatctcggccaccgaccgacgccagaactacaattcccaacatcctcgcaggcttcggctcccattggccgcca

SEQ ID NO: 323554 - DNA, 122 bp, Homo sapiens
aagatgcagaggggccctggggatggcaggacactggaaggcaggccctggctgctctcccgcacggaaccgccggccgcccttcccgaaaaccagtcctccgcgctcccctccgcgcccgc

SEQ ID NO: 323555 - DNA, 122 bp, Homo sapiens
ggaagtgcgcggggagggggctcccgggtagacaggtctggaaggcggctccccgagagccggagcgcgaggaacagcttttgagataaaaaagctgttacactttctagagctgctatcag

SEQ ID NO: 323556 - DNA, 122 bp, Homo sapiens
aatatctacaacatcgctgccgacagaattcggcacgaagaggctcagttccgcttttaccgccacgtggctgagctgctgataaaccatgcacaagcacccataccggcctggttccgctg

SEQ ID NO: 323557 - DNA, 122 bp, Homo sapiens
tcccagcctaatgatggaggctgggcaaccagcacagtgttcagggtgctggggttcatacgtattgaaatcccagagtagtggcggacttccccatgggaatgtctgatgagtactttgaa

SEQ ID NO: 323558 - DNA, 122 bp, Homo sapiens
aggaaccaacatgcctgcaaccttcggccatctggcaggtggctacgacgcccagtactacgggtacctgtggagcgaggtgtattccatggacatgttccacacgcgcttcaagcaggagg

SEQ ID NO: 323559 - DNA, 122 bp, Homo sapiens
tctggccagtgttgaagaatacaaagctaacctttgcaattccttgcggttctaccgttccgtaggtgccttctagaccaagggccgcaagtggtcaattcactaaatccaaccacagtcac

SEQ ID NO: 323560 - DNA, 122 bp, Homo sapiens
cagccgcgaaagaccaaggggtggcaccacagggagaagtctgcactgcgcttgtcaggacggccagtggggggctgctgagcgcagggagtcagtcctcgcaatgaagatatagtctcggg

SEQ ID NO: 323561 - DNA, 122 bp, Homo sapiens
tcagagcttctgttaaatatttttaaagttggcgaaagataatttttagagtgtaaactgcgtcctcccagcttagccgacctgaggggaggaagcacaacaaaaagtcccgtggcataact

SEQ ID NO: 323562 - DNA, 122 bp, Homo sapiens
ttgcgattggccctaagcgcgggtggctggggttgcgagaggcatcaggatccctggcggcgcctgagccagcggctgctaggaggctgtgtccgcaagccagcggggcgaggcgcctgggc

SEQ ID NO: 323563 - DNA, 122 bp, Homo sapiens
ctcccggctctgtccccccagtccctcccactgatctctgcctcccggtggctgctgaagcgcggagagctgttcttagtggaagaaaccggactttttcgaaaaattgccagccggccaac

SEQ ID NO: 323564 - DNA, 122 bp, Homo sapiens
gagggccaggcactggagtacgtgtgtccttctggcttctacccgtaccctgtgcagacacgtacctgcagatctacggggtcctggagcaccctgaagactcaagaccaaaagactgtcag

SEQ ID NO: 323565 - DNA, 122 bp, Homo sapiens
ttcagatatttgaggactctcagttgtgcattaatctcctctgagaggattcctgcccatcgttttgctgttgtgattgtggttgccatcatctctatagcttcccatctgtttcctttccc

SEQ ID NO: 323566 - DNA, 122 bp, Homo sapiens
cggcccccgcaaggtggggcggcgagcaggagccggggccaggccaggggctcgagctcccgttcgaggggcggggaaggcgggtgacgtgagccgggccgggcgggcggagttgggaccgg

SEQ ID NO: 323567 - DNA, 122 bp, Homo sapiens
tgtgtgcgaccccagcaaccggcccggggtctcgccggcgccgtcaggtcatcgtccacccggcttgttctcagcttaccgagaacgccccagcccctgcgctcctcctgtcttacttgtgt

SEQ ID NO: 323568 - DNA, 122 bp, Homo sapiens
ctgtcgcatttgcatactcctgcaccgagttccatgtttcagggccgggtgtgcctcagtcgtgttctgtcatccgtcgtgtctaagtgtgtttccttcacaagatctctacaccccagcag

SEQ ID NO: 323569 - DNA, 122 bp, Homo sapiens
caaaggacagaaaacaggaattccatcatctgggatttccttctcagaaaacacaaaggccgtcactcgcgacgccctctcgcggaggcctgagacccacgcaaacaataccaccagcagga

SEQ ID NO: 323570 - DNA, 122 bp, Homo sapiens
agcaaccattagttctccgcgtttactgctttccccttcctataatcccctcttcctactcgcagtagagacagagacaaataaattaaacttttgtgctacacagaaatttcttaattctc

SEQ ID NO: 323571 - DNA, 122 bp, Homo sapiens
gagtctgttgttaggggctttgggtcacaccctctgtggaattccttggcctgtgcagctcgggcctgccccccgaccttgctagggaggggtggagggtgaagctcccgggagctcattgg

SEQ ID NO: 323572 - DNA, 122 bp, Homo sapiens
gcagaatggcattttgtttgtgaattctcggattgaccgcgaggagctgtgcgggcggagcgtggagtgcagcatccacctggaggtgatcgtggacaggccgctgcaggttttccatgtgg

SEQ ID NO: 323573 - DNA, 122 bp, Homo sapiens
tcccggctctcatgcggaaaccttgcaccttacgtgggcggagtcggctggagcaggctacgatgggggagacctctgggggttccataacagcgcgttcgtgtcttcagcgtggcgctgct

SEQ ID NO: 323574 - DNA, 122 bp, Homo sapiens
caggtcccaagctctgccccgcggggaggcggttgaggcccagtgagaattcaagcacgacgtgggcgggtgggccagcagtgcaaggggacccagcacaccctccgaagctgctggcctgg

SEQ ID NO: 323575 - DNA, 122 bp, Homo sapiens
tccaggggccgccagccaccatgggctctgtcctgaggtgccaagcaggacatccctgcccgacatccttgtcctcccgcaccgcacacgcgttagtggctgtggcgtcgccaccccagcac

SEQ ID NO: 323576 - DNA, 122 bp, Homo sapiens
atttggggattgaagcccggctgatggtaggcagaacttggagacaatgtgagaaggactcgctgagctcaagggaagggtggaggaacagcacaggccttagtgggatactcagaacgtca

SEQ ID NO: 323577 - DNA, 122 bp, Homo sapiens
tgtcctccggcgtggggggccctgaagaaaagggggtaggggtgaggatggggatggccccgcccaccagggcttatgggtgaggggcacacacaggacaccacacacaaggattgggctcc

SEQ ID NO: 323578 - DNA, 122 bp, Homo sapiens
atcatgtgtgtgcagacaagggatgcagtcagagccaacagacagagacatcctatgaatcgtcacctcagatcatatgctatcaactcaggcacagatgccaagaggaggccccacaagaa

SEQ ID NO: 323579 - DNA, 122 bp, Homo sapiens
aagcgcagattgtgggcggctgtgtcagctgacccaaggggccttcgaggtgccttaggccgcttgccttgctctcagaatcgctgccgccatggctagtcagtctcaggggattcagcagc

SEQ ID NO: 323580 - DNA, 122 bp, Homo sapiens
cctctgcacatgtctgcctttctcaaacatgcccatgtttcatctgtacctcccaggtggcgttggcatggaaggaaggactgtgtctgtgagggatgatcatcctctcatgtgatccttgg

SEQ ID NO: 323581 - DNA, 122 bp, Homo sapiens
ccggagggtctgtgcgagtcagtgatactccctctctttctccctggcagactcgctctccgtctccagcaatgacgccagtccacccgcatccgtggcttccctccagccccacatgatcg

SEQ ID NO: 323582 - DNA, 122 bp, Homo sapiens
gtcccgaaaacctgagcaccctctggctaaggcgttgctgtagagacggtgcgccagccccgcccccgaggcgggattggaggaaaactggacagctgacaagggtgacgtttcgaaagcgc

SEQ ID NO: 323583 - DNA, 122 bp, Homo sapiens
ggaaactgaggcttagagaaccaggtctcaagcctgttcaagattctaccacccccttcccggccagtggcctcctcagccctacccctgcttttgggtccctgcattcctcctctcccagg

SEQ ID NO: 323584 - DNA, 122 bp, Homo sapiens
gtggggaagtgagccctccttccacctgggcccctgagcttctttgtcgggaaccgacagcgtatcgggcctgggcccactgcaggaaggtcactaaggctggctcatggtagcttggggtg

SEQ ID NO: 323585 - DNA, 122 bp, Homo sapiens
tacgcttgagctgcatgttcagggtcagaatgtggtcagtgggcttttcacagcttccaccgcagtgggctgcggggttgaccccgagtggccttggcccgtacctcctgcaggggctgctg

SEQ ID NO: 323586 - DNA, 122 bp, Homo sapiens
gttgtgatttatgaaaaagtcgaacactacccgctctcacattaacccgaccaagtcttccggagtttccctggcacccgcgcaggccctaacactagctgtctctgcttctgtatgtctct

SEQ ID NO: 323587 - DNA, 122 bp, Homo sapiens
agctgcctaaagaaactggtagctggagcaaactgcagagatcaagatgaccctagtcaacggaaccagcagcccaggtcagccacattcaggagcaccaccgaggcacggcagggagagca

SEQ ID NO: 323588 - DNA, 122 bp, Homo sapiens
gtgttcccacgggtgccatgaagtgtgtgaggagcccctcatctggagggatgagtgctgcgttgactactgctatcaggattgtgttgtgtggaatattcatctacataaattttatatgc

SEQ ID NO: 323589 - DNA, 122 bp, Homo sapiens
cgaagtgtactcttggggcaaaggggcgcgaggtcgattgggaaggagggatgaggatgccggactccctcggccagtgcagttggatgagacacacccttacacggtgacttccgtgtcct

SEQ ID NO: 323590 - DNA, 122 bp, Homo sapiens
ccatcccctgaacacaaacttgactttatcttctaactaagatctttccactcaagggggcgtaggaaaacaattcctggatgcctttctaactaaaaccagcaggactaagtgctcaagat

SEQ ID NO: 323591 - DNA, 122 bp, Homo sapiens
ctgcacccaggccaaagccctcctttggcgctgaggctcaggaaagagcacgtcagtacccgctgttaactcggaactgaggctgcagccaggcctctgtcccccgcaccaagaacaaggta

SEQ ID NO: 323592 - DNA, 122 bp, Homo sapiens
tgggcgaaagaccggaagttggtttatcacgtgaccatttttagcccctgtaaaccaggtcgccgccatttttgtgcgtgtgttccgtaatacggaagccgcgaggagcctttaggcccttt

SEQ ID NO: 323593 - DNA, 122 bp, Homo sapiens
atgtccctctgggtccctggcttgcttgccaccccaggtggctggacatggcacgaagtacgctgatcctacttgagaaagcggaatagccagtggtcacaggagcagagacttggtgccac

SEQ ID NO: 323594 - DNA, 122 bp, Homo sapiens
cagaagaaagcaggggtcagaggctgggtgtctagtggctgggttgcggatcctggagcccggaccaggcaggtagagcaggaatctgcttgctgagcacggttgatttattcatagtacac

SEQ ID NO: 323595 - DNA, 122 bp, Homo sapiens
gagccaccatgcccagccctggagtacttttcaatggattgtcccagtagtgttccctgacgtggcactgtctccctcccgacaggaaaccatgatggaccacgccttgcgtaccatctcct

SEQ ID NO: 323596 - DNA, 122 bp, Homo sapiens
atactcctcggagccctgggagagctgccggagctgggcgtcgagctgggtgaaccgccgcgtgatgcgctcaatgcgggcgtgcaggtcgcggtactcgctgtactcggcattgaagtcgt

SEQ ID NO: 323597 - DNA, 122 bp, Homo sapiens
agttctggcctgagcttataaatctcgggctttgcccccaaaccccaggccttttgcggacggaacaggtgagcactgcgcactgctcgcgccccggttcttgcgtcccctgctctccctgc

SEQ ID NO: 323598 - DNA, 122 bp, Homo sapiens
cacagttataaaggacacagctcaagaatagccaaatggaagagatacataggatctctacgtatggagggtggaggtgtggatgccatgccttctaccaccttcccagcacctacacctgt

SEQ ID NO: 323599 - DNA, 122 bp, Homo sapiens
aagccgtcttcgcgcggagaggttgcaggggcccctcggggatgagcgagcggcgcgggacgcagtggaacgggagggggcgtgccgagcagcccagagtgtgccgggagcgcgggggaggg

SEQ ID NO: 323600 - DNA, 122 bp, Homo sapiens
aagtgccaagtcctgggctggcggccctcatgccttgaatctccgccacccccataaggacgtggagaggtaggcagtcccaggctggtgatcctaactggtgttttgctgctattcaccgc

SEQ ID NO: 323601 - DNA, 122 bp, Homo sapiens
cccggtactcaccgcgctgcagccccgaccgtgagggcgctttctggtgaatctgaatctcgtttgtctgtgacatggggaaagctgtccaagcccaattccattttcacaagaggctttct

SEQ ID NO: 323602 - DNA, 122 bp, Homo sapiens
gaaagaccggctagcagaacttctggacttgtccaagcaatatgaccagcagttcccagacggggacgatgagtttgactcgccccacgaggacatcgtgttcgagacggaccacatcctgg

SEQ ID NO: 323603 - DNA, 122 bp, Homo sapiens
gcttggtgtgtctcatgcaaacagcccatttgcccttcaacccgcctccctgccaacaaccggcagcccctcctgccacctgctcagtggcttgcctgtaagcacagcatcactgtccggca

SEQ ID NO: 323604 - DNA, 122 bp, Homo sapiens
ggtcttcttgtaccttctgcacgatggcgctcacggccttgtgcacctgctcgggctcgccgctgaccgtcaccacgcgctcctgcaggttgatgccctccggcttctgggacagctgcacc

SEQ ID NO: 323605 - DNA, 122 bp, Homo sapiens
tcatttttatggttgtttacaaaagcatcagtcagcatcagatgggaaatttagaaaactcgtctttcacccaggtcagtggagaaggtccgctcctacatcttggccacaaactcagatat

SEQ ID NO: 323606 - DNA, 122 bp, Homo sapiens
tgctgggccggccctccagtcgctgccagctctccttctgagcttgcatcagcagagaggcgcagcatgctggggcctggctgggccggctccacgctccatgtgccctggcccccatacac

SEQ ID NO: 323607 - DNA, 122 bp, Homo sapiens
gtgcctcatctgcatcttccagtcttttggtggagactggcaaacggtggccttcagagccgctcggggcagtctgcagcctgtcacagcctcctcgcccccacccccagccccttacagtg

SEQ ID NO: 323608 - DNA, 122 bp, Homo sapiens
ctccgctgcagccgcgcgccccggcgccgcgcccggccgggagccgcctgttgatcgccgcgctcgccccggccacggcgccgcccctgttctcccggccccgctccaccggggctgacgga

SEQ ID NO: 323609 - DNA, 122 bp, Homo sapiens
tgcacgtctctgcattcctggcctggccagcaggtggcagcagcacctcagccttcaatccgcctttcagagacgggggtactgggctgaagaccccggacaccagtcccttccagtgactc

SEQ ID NO: 323610 - DNA, 122 bp, Homo sapiens
ccagaagcaaaccaatgtatactatagcaagtggtaccagtgctgcgggtaccagtgctgcgggtaccagtgctgcgggggaaactggagcagagaggacagaacagaattctgggaggtgg

SEQ ID NO: 323611 - DNA, 122 bp, Homo sapiens
ccagaaagttcaccaggccccggcgcgagggcgctccgacacggacaaggtctatgatagcgataaaaagctggttactcgctcccagaaaatgccacttgctggagtctgtgaatgggttt

SEQ ID NO: 323612 - DNA, 122 bp, Homo sapiens
tggggaaactgaggcagcccagagcagcccccaccctaggtcctgcccgggacacgcccacgcgggacctgtgtcaccaggttaaaaatggaaacagctaggaccttttttttttcttcctt

SEQ ID NO: 323613 - DNA, 122 bp, Homo sapiens
aatggattaaactatgagaccatttatttcttccctgccctgcagcgttcagtgggcttacgcacctccggctgccaccatgggctgccctgcagggaaggcctgtgtgaggcagacctttc

SEQ ID NO: 323614 - DNA, 122 bp, Homo sapiens
ggaaaacaaaaaacgaacgacaatcagatgctccgtgtctcccaaactgcacacgctttacggagaaggagagttgcaccggggcttgtcaatggcagagccttcctgaaagtcaggttctc

SEQ ID NO: 323615 - DNA, 122 bp, Homo sapiens
atttcctggggagaacagctgttctgtgcgcagaggccctcagctgtgggttctcattcgcgtgttcctaggtcacagtgacgtggacaaattgcccattccagaatacaatgggattgaga

SEQ ID NO: 323616 - DNA, 122 bp, Homo sapiens
cagtgtcacgggcatggtgctggtcggtgtggattctgcagaaaggcccatttactctatcgatgtggtgtgttacgtcaatttactcttggatgttaaaacaatcttgcattcctgggata

SEQ ID NO: 323617 - DNA, 122 bp, Homo sapiens
cgcccgtggactcctagaggtcactgtcgcactctgctactcaagtgggtttccccagcccgtccagagaggtactggtgtgcgggagaggccagcaagacaaccagggacagctactccgc

SEQ ID NO: 323618 - DNA, 122 bp, Homo sapiens
accagtcactttaatactacctttggttctttctgcagcatcatgtatggcattgtgatccgaactatttggattaaaagcaaaacctacgaaacagtgatttccaactgctcaggtaagtc

SEQ ID NO: 323619 - DNA, 122 bp, Homo sapiens
ctgccaaatgccagaaaaagtctgtaattccacaatatccagttaatccttaaggccttccgtcctgtgaaaatgctaacatttctgggagaagtcacacaagttctgcctgtcatttatat

SEQ ID NO: 323620 - DNA, 122 bp, Homo sapiens
ccatgtcagaagcccatgggacatttcttgggagccgattttatgctgaagagtaagtcccgggcccctcactatccatgtggtcccagcctcccttatttaaccactgaaagcaaggcctt

SEQ ID NO: 323621 - DNA, 122 bp, Homo sapiens
tgctctttctgcttgtcagaagctgacaaagccctgactcagtgactgggggcagcccaacggaaggatgccttgaagatggcaggcagggcagaacacaggctcccacgcctcttgcctga

SEQ ID NO: 323622 - DNA, 122 bp, Homo sapiens
ataaaaaaaccagcaaatctcatcttgtgtgcataaatactccagcccatgagcacacaccgtggtgtgtgaccgagagaggtatagagatgtctgcaagacgcgaggaagagaataattca

SEQ ID NO: 323623 - DNA, 122 bp, Homo sapiens
attctgaggctgaatgtcagatactgaagtaatgggagttaaaacagtgagtcaaaacagcgagttaaccacaaatcaaagtagttcttcaagaaggagcagtacagagcttccgacacact

SEQ ID NO: 323624 - DNA, 122 bp, Homo sapiens
ggaccccacacgcactgggttccaggacaggctctcgctcgggctgggccgactctggcccgcctaggccccgggcacgctgcagtgaaggcggtaccctcaccacagtcacagaacgtgtc

SEQ ID NO: 323625 - DNA, 122 bp, Homo sapiens
aaaaaggtgacactgccccctcccagtggctccatgctcctcagctatggctgtccgggccgcctcactcaaagccttgccctccgctgctgccaggctccttgcatgcaaggcagccccca

SEQ ID NO: 323626 - DNA, 122 bp, Homo sapiens
cagccgggggtctgtccgcccagcccggggagtccaggggctgctccgaacccggcgccacgcctgctccctcagtgccgcatccaacagctctgtctgcctgggctggggccctgcgccct

SEQ ID NO: 323627 - DNA, 122 bp, Homo sapiens
gtccgaacagattggcggagattcccggggctccgggctctgattgacatttctacggggcgcaagcccctcctctctgcgccgcgctccctcctctcggccgccggagctgcctctgcccg

SEQ ID NO: 323628 - DNA, 122 bp, Homo sapiens
ccctgcgccgctccagagcgcaacaaccattttcccagccaggagcacaccgtgtccacgcgccacagcgatctcactgattggtcgggctcctggtaaacaaggaccgggcagccaatggg

SEQ ID NO: 323629 - DNA, 122 bp, Homo sapiens
aggaaaggctgggagtgtcatgttcgcgtgcctaggtatataaagaattctaatacatgacgtgatagcaaagaaaaaaaatcaatttacaatgtttcataggaactagggttagacgtaag

SEQ ID NO: 323630 - DNA, 122 bp, Homo sapiens
cacgatccgccggccttggcctcccaaagtgctgggattacagttgtgagccactgtgcccggccataatctgtatttaaacataaggaaacatcaggccaggcgtggtggctcatgcctgt

SEQ ID NO: 323631 - DNA, 122 bp, Homo sapiens
ctcggacggcgccaggtacttctggaagacgaagcgccgctccagctccagcacctgttgcgcggtgaacgcagtgcgtgacttgcgccgtttgcggccgaagggaccagggcccagcgcgt

SEQ ID NO: 323632 - DNA, 122 bp, Homo sapiens
gtgactgcaagtgggtgccgagacagctcacagaggagggaagtgcatctcaggtcagctcgcaccagagggcaggcaccagagctggactgggtctggctcaagaaccccacctttgcttc

SEQ ID NO: 323633 - DNA, 122 bp, Homo sapiens
ctgccgggtgtttgctgcacagcaggctccgaaaataagcagggtccgaggggaaggcgacgtagtttccctggagcggggcagtttcatagtttagagggggtttgcacggcgagcgcacg

SEQ ID NO: 323634 - DNA, 122 bp, Homo sapiens
caggcctccttttccaccgcacaagatcagacctgcttttctctaaatcagaattaggcacgccactccagatgaaagagccctgtcgttgaaatgcctttctttggcccacactaagtata

SEQ ID NO: 323635 - DNA, 122 bp, Homo sapiens
gctacttgattaacctttttgtgccacacttttatcaactataagaattaactgcggcatcggaagcactcagtatatgttaattattatcatcaaatagttactaattccagtttaactag

SEQ ID NO: 323636 - DNA, 122 bp, Homo sapiens
ctggcagtccgggctgggcagcacctcagccacgccaaggactctccctccaccaggctccgggtgctccactcagcccttgtggtcacacggggggttctgcatgccaggggtcccttcca

SEQ ID NO: 323637 - DNA, 122 bp, Homo sapiens
gggctagggctgggctttgcctggctcggtcaccacccaggacagggcttggtgcagagccggtgctgccggtgtctgttgaacgtcacgtgtataagtgggggaaggatggagtgcaggga

SEQ ID NO: 323638 - DNA, 122 bp, Homo sapiens
ctggtgcctggacccgagtgtgtggtggatggcctggcccccggggagacctaccgcttccgtgtggcagctgtgggccctgtgggtgctggggaaccggttcacctgccccagacagtgcg

SEQ ID NO: 323639 - DNA, 122 bp, Homo sapiens
ggcgagcttccacgcaacctctcggcgggccccggctataggcggagaggcggcggaaggcgggacctaaagggggccccgccccacgggctctgatttccgcccaatggagggcggtctga

SEQ ID NO: 323640 - DNA, 122 bp, Homo sapiens
ttttgtattttttgtagagatggggtttcaccatgttgcccaggctggtcttgaactcctcggctcaagctatctgcccacctcagcttccgaaagtgcagtgattacaagtgtgagctgcc

SEQ ID NO: 323641 - DNA, 122 bp, Homo sapiens
agggcccagccctcattctgcaaggattttaaatcaatgttatccagctttccacctcggcgccttcacagatagctccttgctggaaactttacaccaagaagtataaactctgacctcta

SEQ ID NO: 323642 - DNA, 122 bp, Homo sapiens
tttgtatgaggctagtcagttataattttgctatttcctaagtagttcctcattttccatcggtttctaatgtctacgtctacatctgggtctattattgggctctagtcttttccattaat

SEQ ID NO: 323643 - DNA, 122 bp, Homo sapiens
cccttagggtttcccagggtctgaattttgttgacgacattcccatgttgctatgtaatacggtcctccatgccctgtgtttttctgtaaactgatagatgtggaggtgcaatgacatttgt

SEQ ID NO: 323644 - DNA, 122 bp, Homo sapiens
cgccgccacggtcccctctcgccgccagggtcccctctcgccgccacggtccccgctcgccgccagggtcccctctcgctgccagggtcctctgcagaggaggccgccatacctgctcttgc

SEQ ID NO: 323645 - DNA, 122 bp, Homo sapiens
gttgactctgctaccgctgatgtttgccttgtcaatatcagaataggggcatcagtgtcccgtgaaatacattttgttgtgctatgagcctctgtaatcaaatgcttgtactcagaagagag

SEQ ID NO: 323646 - DNA, 122 bp, Homo sapiens
tgtgtgcgtgcgtgtgtgcagggtatatgtgcggggggcgggggacagccagcggtggggcggggatgtggtctgctggaaaatgtttaaaaaaacaaatccgctccaaacccccagccccg

SEQ ID NO: 323647 - DNA, 122 bp, Homo sapiens
gcccagggtgacaaggcaacagtccctgccccagcgagctgagtttgctccttccccagccgcccccctgacagccgcaccccacccaggctccgcacagagaagagcctgctgtggactca

SEQ ID NO: 323648 - DNA, 122 bp, Homo sapiens
tttagagaaagcaggggtaatgccgggtggttattttccccaaatgttagagaaagccagcgcttctggctctggaagtgaggctgttgggaagtgggagggggagcacagctctggaagct

SEQ ID NO: 323649 - DNA, 122 bp, Homo sapiens
tcccctgtcaggcacattcctgtatttcaatgggcacctaacacttcaccatatctcccacgtggggaaccaacacttaaaaggtgatttgtgtaaacagaaacctccttttcatgctcatt

SEQ ID NO: 323650 - DNA, 122 bp, Homo sapiens
aaggaattcaccatcatcattctttccaaagtacttccagatcttctcggctcgcttttccggcgtgttttcatcgtctggaaggagcttcacgtcctcgggagtgatcattttgaaaatag

SEQ ID NO: 323651 - DNA, 122 bp, Homo sapiens
aggcctggccatcatacacaggtcggcctcggccggtgagccactgccgcaggatgggcacgctgccccggcgcttgttcagcaaggccccttcctgggtggcctgggtctgcggggtgggc

SEQ ID NO: 323652 - DNA, 122 bp, Homo sapiens
ggggcctggtggggtgaggagcacggggttcctccttcatcctcgcggggactttgccaccggctcagtgtggaggcctcaccgtcccgcccggatccgtggggctccgacagtgtggcccc

SEQ ID NO: 323653 - DNA, 122 bp, Homo sapiens
ggcgacgtggcccgagaaccccatccagttttaaagcagagcccggcccaggagacagtgcgggagaccccctccccatgctgggacggggcccaccaggcactgaggacgggccagccctg

SEQ ID NO: 323654 - DNA, 122 bp, Homo sapiens
gagtgtggggtgggactgcaagcacacgcaaggattggggcgttgggccacgaagagcagcggcgagaagacgcagcccagataggctcgggtgggcggcggtcgcacaggcagagcttccg

SEQ ID NO: 323655 - DNA, 122 bp, Homo sapiens
atgcagatcaatcggcctctggttggctggagtagcgctggcaggggcggggccggggcgcggccacagagcgcgcggggcgggggccgaggggagtcgcccagtcccgccgcttccccacc

SEQ ID NO: 323656 - DNA, 122 bp, Homo sapiens
ggagcctgagctaaaccctaggatctgggacccagcggggagtgaaaagagcctgggggacggaggcggggcagagggcagcccaaatttaacactgctgtgtaaatacagatgcaccaaag

SEQ ID NO: 323657 - DNA, 122 bp, Homo sapiens
tcgccacgcttagctgggtgggctccttccaacccaggctggggctgagcaggaggaagccgcggcctcgcccccagagggcagcactgagctgttctggcccgactgctgccagactctac

SEQ ID NO: 323658 - DNA, 122 bp, Homo sapiens
gagtcacatggatacaaagcttttgattaatgtccaagtcactgctgtggctgccgaagccgcttcccctccagccccggccgtgtgaggccagagcagcggggccgggcgcgcagggcctg

SEQ ID NO: 323659 - DNA, 122 bp, Homo sapiens
gagcatgcagagaacatcaacttccatgccaggaagctcatcttctcttcccagctctgccgcattctagctctggcaccttgggcaagagctagtcacttttactctctgagcctcaattt

SEQ ID NO: 323660 - DNA, 122 bp, Homo sapiens
gaagtggaggagatcagtctgctgcagccgcaggtgggtgagatccgtgggctcctttggcggccccgcagaccctcatcgcgcgggtcccagcatgcacagcgcgctcccacgtggccggc

SEQ ID NO: 323661 - DNA, 122 bp, Homo sapiens
attctttatatccatcttttactgctcctatcagatttccctcaacttgtgtcagcagttcggctagtccagagtactttcccagtgtgacaaattatactttcatgcctgaagcttccaaa

SEQ ID NO: 323662 - DNA, 122 bp, Homo sapiens
caccccgtgtgcgtgggtcaccccgtgtgcatggacaggagggggctcaccgcgtgtgcacgagcacagagtcctggtagagccggtcatacatgcagatcttcaggtccacgctgggcttc

SEQ ID NO: 323663 - DNA, 122 bp, Homo sapiens
aaagcggttcccaggcgcgcccttggcccgcgggaaaccactgcccggtcttggtccaggcggcccgtcctacggtccagggttcctatttccgagcctcagggacctcctttccccacgga

SEQ ID NO: 323664 - DNA, 122 bp, Homo sapiens
tttccacgttcaaaacactttcacattctattgtgaaggcgggcttcaccatgcctcttccgcaaaggctgaagaggtcacttccttggcagctcatgatgcccatgcggtggtgtgccttg

SEQ ID NO: 323665 - DNA, 122 bp, Homo sapiens
acaaccatcctgctcccttaatgttatcccatgtctcctcggggacgtcccctgtaggctcgccacccattgcctctcaatcgcgaccgcggcaggaagaagtagcccctctactaccactg

SEQ ID NO: 323666 - DNA, 122 bp, Homo sapiens
ttgctagactgactgtctattagaaaatgctcagcaaaagcataagtaagactgtaactacgggatgaaagttcttctaaaagtccacagagaatggcggaaagagtaagggtctaccatca

SEQ ID NO: 323667 - DNA, 122 bp, Homo sapiens
acacaaaaacagcaacagataaatggggcaaacagaacaacaaacacaagagttgagcagcggggtgggggtggggggttgccatctacgccgttttagtgtgagggacactgggaacgatg

SEQ ID NO: 323668 - DNA, 122 bp, Homo sapiens
acaatatctctcatgaaatcagagtcttcagcttcgctttcatttgtgttttctcctgtacgtaaatatcagtaaaggaactttcaaaaaccctctccagctgggtgtgatagtgtgtgcct

SEQ ID NO: 323669 - DNA, 122 bp, Homo sapiens
ggcctgggcaggactggaggccaaaggactggacttttaggctattgcagcccaggtaaacgaggctctcattggcagggcctggctccccaccaggccggcaggcagataggcgggcgaaa

SEQ ID NO: 323670 - DNA, 122 bp, Homo sapiens
caggtgttacctgttactcgcctcggacccgccgggtctctggaaggctgagtggccccccggccttgatattgggaggagtcaccttcatgtttcgtggcagatgaaagcttaaggcctcc

SEQ ID NO: 323671 - DNA, 122 bp, Homo sapiens
gcgctggctgactggggtcggcgtttagttcagcgcagcgactcggggacctggagctgacgcctagtacgtatgaggaagaacggggtgggtggctgcctgagtctggaggcgacgcctcg

SEQ ID NO: 323672 - DNA, 122 bp, Homo sapiens
ggggtcccagggaggctgggggtccacagctgggcagacatgaccactgtaccctcctcgcggttccggcgtcgggcacgctcccgccggtgactgaccatggactccgtgcctgtctcgtt

SEQ ID NO: 323673 - DNA, 122 bp, Homo sapiens
ggctgacacgtggcagcccaggccccatagcccggcctggctccaatgtcctgccccttccgaggctactccccaaaatagtcccgggttgcttgggaagccagtgtttgcagcctttctga

SEQ ID NO: 323674 - DNA, 122 bp, Homo sapiens
gaaactcctgagctcaaacagtcgtcctgcctaagcttccccagtagctgggattacaagcgtgcatccctgtgccccagtgattaagttttattatgtagaaaataaagagcaaacagtac

SEQ ID NO: 323675 - DNA, 122 bp, Homo sapiens
catcgcagagcaaagacaagccatccctgctgttatctaaattcctgcccacggcatcttcgaacatagtcaaatgattgctgctttaggccactaagtctgagctggtttattgcattcgg

SEQ ID NO: 323676 - DNA, 122 bp, Homo sapiens
cgccacgatagagacaaatacattgaccgaggaccggctcggaggaggcacccggggaagcggggacacttggagggtggaggactcctgggtctccaagcccgggcgcgcctagggatgga

SEQ ID NO: 323677 - DNA, 122 bp, Homo sapiens
gcgcggaagcgccgccaaatgcggggactggctccgagcagctgagagtacagccccaaccgcatgagcacgacctgggccctgccgccctccctgtattgcgaccaccccatccccgcacc

SEQ ID NO: 323678 - DNA, 122 bp, Homo sapiens
tattcaattcaagatctaaacaagtccatacattgcacttagttgtttcttcctccaccccgccccacctaataccatcacaaattgtcatatttcttaagtcccttttactcaattttacc

SEQ ID NO: 323679 - DNA, 122 bp, Homo sapiens
ttgtcatcatctccaatctacagaagcggaagccggagctaaatagcctgctagaggtcacggtgctgctgcccaacggcgggagcccggatttctgacatgtcttgcaagaaagagtccct

SEQ ID NO: 323680 - DNA, 122 bp, Homo sapiens
tgtataaggaagatcccctgcaggtgaagcagttggggctcttattgtggtgacctgctacgaggcactgccatgactgcagaggggcccaggaggtagcaagtctccatagatgtggtgaa

SEQ ID NO: 323681 - DNA, 122 bp, Homo sapiens
ggcaggactccaccatgaggcacatccacttgttcacctgcctccctcttaccgaatattcgttcccaatgcaaataacgactgtcccatcgcagggtgcagaggagataggctgttcactc

SEQ ID NO: 323682 - DNA, 122 bp, Homo sapiens
ctgtcctaggctgtagcctttggccacacacagaggaagcttcctggtggatttcagcaccggcagcctctcccctctcagtctctcccatcacccggtcccttcccttggagatggtcctg

SEQ ID NO: 323683 - DNA, 122 bp, Homo sapiens
gggagagagggaaagagaattaatgtgtctagaagactcactctgtgccaggcattctgccggacctttacataacttacttcatcaaacactgatgataagcttacaaagagcttaaggca

SEQ ID NO: 323684 - DNA, 122 bp, Homo sapiens
gaggatcccagaggtgagaaacagaacggccagggctgaatctgcctccagcgggggccccgggcgtgatcagagcaggcaggacctttcttccctctctgcagctccggcactggcttcct

SEQ ID NO: 323685 - DNA, 122 bp, Homo sapiens
gagaattagaagagaaccctttgggtttcccatcctcagaaacttgtctagaagaattatcggatactggtttggccttcacatcttcacaagctggcttgggagaatttgcagacaaaggt

SEQ ID NO: 323686 - DNA, 122 bp, Homo sapiens
aggaccaacggtttcctaggagtatgtggttttgctgtgtggcctgtgtcctgactcgcacgtctgctgatggcctggctgttcctaccgtggctctgtcctcgccagctttccctgcagcg

SEQ ID NO: 323687 - DNA, 122 bp, Homo sapiens
cgacggagggagatggcccgggagcgccggcgccagtaactgggagctgatgagagtcgccgagggcgcgccgggcccaggtgccggggctgcccgccgcccgccgccgccgccgcctgcgc

SEQ ID NO: 323688 - DNA, 122 bp, Homo sapiens
ttcctgaaaaccaaaatgctctcgagatcctaagattcctaaggaatgaatctcttgtggcggaatgtcaggtaccacagatccaccgaggaagtgaatctagtcaagagcggaagcctgct

SEQ ID NO: 323689 - DNA, 122 bp, Homo sapiens
aacttcaccatccgggaagatgccaaccccagctcccgccagcgacgactcaagcgcttccgggccaacccggaagccaactggagcccgcagcctcatgcctggccagggagcaaggctgc

SEQ ID NO: 323690 - DNA, 122 bp, Homo sapiens
ctcttgacctcatgatctgcccacctcccaaagtgctgggattacaggcgtgagcccccacgcctggcagagtatatagttctttaataaccgggtggcttggccatcactgtgcagcctgg

SEQ ID NO: 323691 - DNA, 122 bp, Homo sapiens
aaggggccagagaaaactacacctcagtatattgtctcttttccagcaaatgtggctgcccgcttccagggcagttcagcaaccttggctgataaaataggaacctgagcctcatctacagt

SEQ ID NO: 323692 - DNA, 122 bp, Homo sapiens
gcgttacttgcaggatgcaggagtgatgcgatcagagccagccggaaccgagttccgttacgcactacaggactgacctgggcctgacaacccactgccggagttcggatcgcatcactgcc

SEQ ID NO: 323693 - DNA, 122 bp, Homo sapiens
gctcagcaaggggtgctcaggttcaggatgttgtttgttgattcaggctcaaccaggctccgcaagaaaaccttatcaggagattttattttcatgaacaggtgccagtcttcccgccagcc

SEQ ID NO: 323694 - DNA, 122 bp, Homo sapiens
cccgggaagggaaggtgtcggggccggtgggggacgtgtgagggagtgagccttggtccgcgcacgcccgggaagccagaggccagaacgcgctagcccacctccagcccgagcaccggcgg

SEQ ID NO: 323695 - DNA, 122 bp, Homo sapiens
tccctctaccctccacataaaacaaaacaaaacaaacaagtcaaatgggaaattgtctttcgtctcccacaccaatattccagattttaaaccagagtatattttagacgaaaggatgtgtt

SEQ ID NO: 323696 - DNA, 122 bp, Homo sapiens
acattcttgacaagaaatcaacctgaataggccccacaagtcaccttgctcaactgctatcgcaaatgggaaactcgaagcccccagaagcagtgatggggaggggtcctgctctctcccaa

SEQ ID NO: 323697 - DNA, 122 bp, Homo sapiens
cggctgaggcctgttgagaattaaagcgcggcgcgggcgggctggcagtgctgggggacccggcgcaccctccacagctgctggccccggtgctaagccccgctgagcctgcgcccacccgg

SEQ ID NO: 323698 - DNA, 122 bp, Homo sapiens
gaatcccagcaggctgtggaagcgagtgcttctctttctgttcttttcttctacagaagccgagtcttatgatttaggcattgctatgtgtcattacccactgtaatagcataacgcactga

SEQ ID NO: 323699 - DNA, 122 bp, Homo sapiens
gggctgggggcgtggcctaaggctgggggccgacggcggcggcagcagggagctgggaagcggagaagccgggagcgcggggctcagtcggggggcggcggcggcggcggctccggggatgg

SEQ ID NO: 323700 - DNA, 122 bp, Homo sapiens
agtcgcggacgaggaggcctcccaggagtggcatgccgaggcaccgggcggcggagatcgcgacagcctgtagttaccagcgtttccagaagagcccctgccccgttcctgctgcggcctgg

SEQ ID NO: 323701 - DNA, 122 bp, Homo sapiens
ttccattttgcagctctaggggttgaatgaaccattaggttccctcggacaaatgacctccgctaatttcctatttcgttgttttctcacccctacaccccaccgttccgtgggtccctcct

SEQ ID NO: 323702 - DNA, 122 bp, Homo sapiens
gcttacagtgaggggtaatggaaaggattcttgaatcaaatctcctccctgctccttcctcgctgtaaaaccttgggccatttctgtgacctctgagcctccgctttcctatctgtgaaatg

SEQ ID NO: 323703 - DNA, 122 bp, Homo sapiens
gaggtgcaggtcagagagagccccagagctacccacacactgctcaacattaggcagtatcgctgacctaggggtcaacagggaagattactaatggagactgcagggacaaggagagaaag

SEQ ID NO: 323704 - DNA, 122 bp, Homo sapiens
gggccgggcccgtgctgacctgcagcagcacatggcagatctccacggagcccttctgggcggctgcatgcaggggcgtgcgcttgctctgctggtcgctctggaagttggggtccaggttg

SEQ ID NO: 323705 - DNA, 122 bp, Homo sapiens
catcccatgcccccatctggccctctctggcaggaagaaatcgccgctttgtgtcccagtcgtgattggaatggctggccatgcacatgctcagtggaactgagcaattgtagaacgctcag

SEQ ID NO: 323706 - DNA, 122 bp, Homo sapiens
tctcttcagggggaaacagttgggggccactggagggagactaattctgccccaggcagacgtcccacccactactcaggagtgcactctttgggagcttcccacatccagatgtaccacat

SEQ ID NO: 323707 - DNA, 122 bp, Homo sapiens
tctgggctgagcttcggactcgcagccagcctcccacaggccaccgcgcgcgctcacttgcgcatgcgcctcggagctggcttcaaccagcgaaggctgaacccgcttccagggtcctcgcc

SEQ ID NO: 323708 - DNA, 122 bp, Homo sapiens
ggttttctcgatttctgtttctcacgtttatccttgagtccacgatggctgctggggctgcggccttcgcggccaggaggagggtaagggggaatcagtgccgccctgcgtggccagctccc

SEQ ID NO: 323709 - DNA, 122 bp, Homo sapiens
gctccctggtgtgtgggtaaagttatcccagatgctggggcctttgccatcggcatcccacgcgccttcaatctgataagcggaagaggacacgccccacagaaagtcatcccgaaacgtcc

SEQ ID NO: 323710 - DNA, 122 bp, Homo sapiens
gtctatttaccaggccgcctcggatgtacattcgtaaacaggcaggcagagcctccaagtcgacttaacgagctgtgcacttgagcccctccgccaggccccccaccaacctctgcgctgcc

SEQ ID NO: 323711 - DNA, 122 bp, Homo sapiens
gggcaccggtggcggctgcgggcagtttgaattagactctgggctccagcccgccgaagccgcgccagaactgtactctccgagaggtcgttttcccgtccccgagagcaaggtgagcgtcc

SEQ ID NO: 323712 - DNA, 122 bp, Homo sapiens
gtggccaccattctttcactgcatcgccctgccctgcatcggaatatagcaccttgaacacgggatcaggtttactgaattctgtgacccacgctgggagctcaataaatgtttgctaaacg

SEQ ID NO: 323713 - DNA, 122 bp, Homo sapiens
caagtgggtggcctacttggtaagggcatctctgcagtacgagcaatgaagtgtattgctcgagagggagttgaggggctctggaattggcaagactagagtcagtactcccacatcaggga

SEQ ID NO: 323714 - DNA, 122 bp, Homo sapiens
ggtcttgttatgttgcccaggctggtctcaaactcctggcctcaagcgatcctcccttctcggtctcccaaatcgctggaattacaggagagagccaccgcgcccggccagcaagtcagcgc

SEQ ID NO: 323715 - DNA, 122 bp, Homo sapiens
ctcacctcaacaacaaagcgcggtttcctccctcgccatccttcctcgtggtcgcgcacccggttggatttcacagtcatggaagttctgctttaaaatccgtttctgaagaagtgttaatg

SEQ ID NO: 323716 - DNA, 122 bp, Homo sapiens
actataaatcatcataaacaatttccccacttgtattatcaaaattaaacaaagttgcttcggctaaactttctcttgagctgtcacctgggtgtaaacagatatagtaaattcccgatgtt

SEQ ID NO: 323717 - DNA, 122 bp, Homo sapiens
gttgatccacctgcctcggtctcccaaagtgctgggattacaggcatgagccactgcacccgaccggctataattttttttaatggaaaacagcagatattggtgagtatgcagagaaattg

SEQ ID NO: 323718 - DNA, 122 bp, Homo sapiens
atccatgcaaaggggcatgccagtgctcaggccccaccttgctgggactcagggttgcatcgtgtaaaataaggatatagtctattgtgtctaggttagattgtgttttccattatcaactc

SEQ ID NO: 323719 - DNA, 122 bp, Homo sapiens
ggcttcttcggagccctgagtgggcccccgaggctgtgtgtccacttggcccaggcagggcgctctggacacctggtgattccaggtagagagtggagcccaggcgcctgctggctgtgcgt

SEQ ID NO: 323720 - DNA, 122 bp, Homo sapiens
cccgcaaagtgtccccgaattgcactctctggtcccggagctgcatctgagacagccgggcgccacggcagccctgagttggatgtgaccaagcccagcctggggccaagtcgtcgtcgact

SEQ ID NO: 323721 - DNA, 122 bp, Homo sapiens
taagtttccttttaaagaaaaaataaagcatattcgaaatattgccgcttggggatagagcgtcttagaatatgcaaactctttaaatcttgtttgggtttgtgcctgtgtaccccagtgca

SEQ ID NO: 323722 - DNA, 122 bp, Homo sapiens
acagccagctcgccgcagccgtggagaacctcaagaacatcttctcaggtaccagccagacgccgaggcacttgcccccactcacgctgtctttgcatgactcactgagtgctctgtgtgca

SEQ ID NO: 323723 - DNA, 122 bp, Homo sapiens
ggacacaccatcagtctccagagtccaggctctgaaacacaccacggccaaacctgtcctcgcctgtcattcctcccttgtcaggaggatatagaacccagtgattaagggtgtgggcgggc

SEQ ID NO: 323724 - DNA, 122 bp, Homo sapiens
gtctgatcttttcatctggaaggcacacatacatgtttgttgacaaatgaatgagaaacgcggctattggattaacatggtatttatatgctttactgaaactgccctaatggaatcaaata

SEQ ID NO: 323725 - DNA, 122 bp, Homo sapiens
agacttgacagctattattaatcttgttttgtgtatttgggcagattaaagtattaagtgcgcacagcatgggctataatcacctgctgttttcttgaagtagtgtccaaatgataaggctg

SEQ ID NO: 323726 - DNA, 122 bp, Homo sapiens
caaagcgggggcgagcgccgcccggggcgtgggtgacggggctggcatcaaggtagagggcggccgggcagggaggaggggcagccccgccagcgccgagcccagccctgaagtcgtttcgg

SEQ ID NO: 323727 - DNA, 122 bp, Homo sapiens
cccacccccagccttggccccgaggcgctttgtgtttgttactgtttggtgtgttgcacccgcgaggggatcagagagacaagaattacatcttcaaaatgagtcataactcctgaccgtat

SEQ ID NO: 323728 - DNA, 122 bp, Homo sapiens
caatctggaagaatgactgtatcagtcaatggggattttaacagactgccttggtactgccgagtcctctcaaaacaaacaccctcttgcaaccagctttggagaaagcccagctcctgtgt

SEQ ID NO: 323729 - DNA, 122 bp, Homo sapiens
ctactcttcacagtttaagaaaggactttgcctcctgaaggagctgaagagtagatggggcgaagaatgttgttcatctggagatttcagaaaagatgctaaaaagcagaggggattggagg

SEQ ID NO: 323730 - DNA, 122 bp, Homo sapiens
agggatcccctagaagctgtggctgacagccacatgcaaatacacaggagaagccaacaccggctgggccaagagcaactcgtgggaacgaagcagccagcacggggctccacgtgcgctga

SEQ ID NO: 323731 - DNA, 122 bp, Homo sapiens
tcacccagtcagcaggtaccatctttggcctctgcagcatcaaagagaccaataaaactccgctcagcagtctgacagggagcgcacatcggtgcaggaccctcgaccccagctcagcctca

SEQ ID NO: 323732 - DNA, 122 bp, Homo sapiens
gaggacggaaatcgaggcacacgattaagcgtttccctgggtcacacagctaatgaatggcgagctggaagtcagtcccaggtcatcagactccgaagtccatggttttggtgatgaaggtg

SEQ ID NO: 323733 - DNA, 122 bp, Homo sapiens
cgcaggggaagggagactgagccctgggccaggcttggcagagagggaagcgggaggacacgaccccagggcattgtgggaacactggccaggctggactttgccttcctcctcgtccttta

SEQ ID NO: 323734 - DNA, 122 bp, Homo sapiens
ttagtttcccgggcagtctccgggttggatttgcaccctggggtctacacgggttaaaaacgcggaaaaaaggcgacgaagaaatacaaactgccagggtgtcgaaatgaaaggagcgactg

SEQ ID NO: 323735 - DNA, 122 bp, Homo sapiens
ccaatcagcgacgctgggttgggaaccgtccaatcaggcctgcagctggagcggacaggacggcttcggggatgtggcggggcctttgtctctcgctgcagctggagctgcaggtctcgcct

SEQ ID NO: 323736 - DNA, 122 bp, Homo sapiens
gggtcgccggccgagctccggaataaatggacaacttcaggaaacttcctcccgtggccacgttgcccgccccctccccgccccctggttgggttctcccggccgacgcagtcaccgccgtt

SEQ ID NO: 323737 - DNA, 122 bp, Homo sapiens
ggggcgccgacggggccggttccggttgggggggtccctgggcccggcggggttgcgggacgcgccgtcggggagctgcggcccgggagcccgtccggaggcggcgcggggtccgggcgggg

SEQ ID NO: 323738 - DNA, 122 bp, Homo sapiens
taacaattatttgaatccagcaccagaaactccccgagggccttacagcacctttaactacggctcctttcccgccctaaactcccgaggtcccgcccccgaccgtgggctaaggtccggcc

SEQ ID NO: 323739 - DNA, 122 bp, Homo sapiens
catgaggaagtagcgcttgatggacctgcgccagggagcaggcgtgagcaggtgcccacccgcaggtgcccgccacagccagggagcaggcgtgagcacgtgcccacccgcaggtgcccgcc

SEQ ID NO: 323740 - DNA, 122 bp, Homo sapiens
gaccgccacagcctcctccgcgccccacaccaggtgctcgcgctgtgtctccatcctccccgcaggaggacctttaaatagcaacgtcagcgcgcttctctccgcacacacgtcacccgcag

SEQ ID NO: 323741 - DNA, 122 bp, Homo sapiens
tggagggagacaggcacagagaactgagcagagcctttgaccactgtcaaagtccagcggcgaatgacagacctgcctctcgtagagctgtgggcgggaggcagcagggacatggggcagcg

SEQ ID NO: 323742 - DNA, 122 bp, Homo sapiens
gtcctagccaagcaacatctcattttcccagctgcttgtaaagagcttctactatacgcacggctgttaaaagcatagagtcttgggcctggttcgagtcccagctccaccactttctagtc

SEQ ID NO: 323743 - DNA, 122 bp, Homo sapiens
tgggattacaggctcccgccaccaagcccggctaagttttttttgtatttttagtagagacggggtttcactatgttgggcaagctgatctcgaactcctgtcctcgtgatccgccctcctc

SEQ ID NO: 323744 - DNA, 122 bp, Homo sapiens
ttgtttaagggactagctggccctggaaatgggctgaacctccccacaggaagccaggcccgtgtaggaaggcagcattctacaatgacctaggttccagcccagctgcatccctaacttac

SEQ ID NO: 323745 - DNA, 122 bp, Homo sapiens
cctgagccacagtccacgtgataagctctgtccaggtagaaatgatctcacctctcctgtcgcccagggtcggaaacctgaggcccgtgcgggctggggcaacttagcaggggtcccaagcc

SEQ ID NO: 323746 - DNA, 122 bp, Homo sapiens
taaaaacgctgctgccattgtctacctattcaggcctctagcattttacgtgggttccaccgattagtgtttgaataggggaacgattagaaagacagctgccattgtatgcccattcggga

SEQ ID NO: 323747 - DNA, 122 bp, Homo sapiens
gcccccgcaaaggctgttctcagagtcggaaatggacgcacggcagctggggcgaatggccgcggactacacttcccgaagtgccgcgcgaggtattctcggcggtgattggggcaaacggc

SEQ ID NO: 323748 - DNA, 122 bp, Homo sapiens
agagcattccagtttactgcacacagcccacctccaagtctgaagtttaaagcttcacctcgcagtggctgaagaagggggtgatgtcatagatgggcaggacttagccaagatcttgttca

SEQ ID NO: 323749 - DNA, 122 bp, Homo sapiens
ttttgtagagatgtggtctcactatgtcacccaggctggtctggaacttctggacagaagcgatcctcccacctaggcctcccaacttgctgggactacaggtgtgggcagcacacctggcc

SEQ ID NO: 323750 - DNA, 122 bp, Homo sapiens
accgtggaggtagtggggtcttcaggtcagaatggagatgaaaagcagaatattgtagcccgcaagattgtgaagatgactaagcagcctgcaaaaaagaagcctcctccttcccgggaaaa

SEQ ID NO: 323751 - DNA, 122 bp, Homo sapiens
ggcctggcggtaaccttgggggcctcactgcagccgccgctgctgttggagtgggctttgcgagtctgaacgttggcggggctaggctcgttaactgccgagagcctccgggtttgcggtgg

SEQ ID NO: 323752 - DNA, 122 bp, Homo sapiens
gacggggcggcggggcagaggtgctcccctcacctcagacgatgggtggccgggccaagacgctcctcacttcctagacgggatggcagccgggaaaaggcgctcctcacttcccagactgg

SEQ ID NO: 323753 - DNA, 122 bp, Homo sapiens
tcctctgggccgagactgatcaggaggctagtgagccggtttctggtgctccgctgacctcgttatcaccttgtggttggctgagccctctcccagtgtgtcagtggcaccccctgcagcct

SEQ ID NO: 323754 - DNA, 122 bp, Homo sapiens
atcaagtaggatttatgttttttatgaatcaggatcctcgcctgcgccatccgcagcgctcgtggcgggcccggtgagtcgcagctcggagcgccatctaccggctgttttctgcacggccg

SEQ ID NO: 323755 - DNA, 122 bp, Homo sapiens
caggtgggcagggtgggtcaggaaggcttacctctctgttattcctctccaaaaatgctacggctgttgggctgaccatatggtccttcatttcctggaggtaaggacagcattagggagga

SEQ ID NO: 323756 - DNA, 122 bp, Homo sapiens
gatcccctccttcagcctcccaaagtgctgggattactgatgtggtttatttttggtttacgtcacccacagtgtacagcaagctgattcccatttcgcagatggggaagctgagtcatggg

SEQ ID NO: 323757 - DNA, 122 bp, Homo sapiens
atccaaatgctgttccccggcatggtagggatgagaccagctaataccctgggtacttagcggtctgtttcaaaaattgctccaaaagggtgagtgatgggctcagggacagtcaagtgagc

SEQ ID NO: 323758 - DNA, 122 bp, Homo sapiens
tgaagggagcagaaagtggttcctgcataagaacacttaggaggacaagcagctggagaccgtgggccccaagggtaggagggtttaaacttggtaatctctgggtgggggtgggcagcatt

SEQ ID NO: 323759 - DNA, 122 bp, Homo sapiens
acctgagccggcgacaagggcgctgcagtctttttgaccttcatagagattctaagatcccgaactctcagttccaactattatgctccactatagtccggccgtccactttcctaaaagcg

SEQ ID NO: 323760 - DNA, 122 bp, Homo sapiens
tcctctgctgtcaaaaacagccacattcaccagaaagggaagtaggttttacagataaaccgggttgcttttcactgaaacagcagtgattgtggaacagaaactctcccctccctgccttt

SEQ ID NO: 323761 - DNA, 122 bp, Homo sapiens
actgtgctacaaatggagccacagagaagaaatgagcagcaggctcaggagcagggtgttcgctgcctttggggccgcagtccatgcctcaggcatcatatggcactgcgggcttcttggtt

SEQ ID NO: 323762 - DNA, 122 bp, Homo sapiens
cagagccaaaccctggaactgaggacccaagagccctcttggtgttctaccaactgtggccgagctggtacctaagctccaagacaaagtctcctttactcttccctctccttttctcaagc

SEQ ID NO: 323763 - DNA, 122 bp, Homo sapiens
gtgtgcgtctccccgaccgtgggcttcccatccgtcaggaagacgatgagggacacgctccggtctccaatgccactgtgggccacgtacttgttgaggagcctgatggccctctgcagggc

SEQ ID NO: 323764 - DNA, 122 bp, Homo sapiens
gcccgccgtcagcctaggttgaggcgccctgcgtgtgtctataactttgtgctgctgccgcggccgccctgctcgtggaagggaggaggaggaatgtggaaggtggcggcgcgcgagctgac

SEQ ID NO: 323765 - DNA, 122 bp, Homo sapiens
atttaacacctgaatgttattaacagtgctaacagctaacatttgaatttgcatgcagttcgatgctctgtgctgagtgctttaaaagcagttgctcaaaacaatcctgtgaggaaaggact

SEQ ID NO: 323766 - DNA, 122 bp, Homo sapiens
ggcgggccccgcgctgcggaaagttcaccgcggcgggcggggggaggccccggccccgctcgccggcgtccccctgcagattccaccattaattagtcctaaggactgtctactggcaactt

SEQ ID NO: 323767 - DNA, 122 bp, Homo sapiens
gtcaggcttcccagacagtcgtaaacgccatgtgtttacgcgactggagcaagcggacgccggccccgctccgtcattgcaggccacgcctccactgaaccagggccacgcccccgagatga

SEQ ID NO: 323768 - DNA, 122 bp, Homo sapiens
ctcccacctccttctggacacagtggaatggggctgaggaggggcttgggctctgcccaccgcccaggcctcctattgtggagaggacagctgcaaagtccccccagcccctgtacccacac

SEQ ID NO: 323769 - DNA, 122 bp, Homo sapiens
acatgggccggattctccctcggagcctcagaaggaatcctccctgctgactgcaaggaccggggcgggccggcaatttccgacagcaggggaaggatgacatctttaaaatcacacacaag

SEQ ID NO: 323770 - DNA, 122 bp, Homo sapiens
acccaggaacctggacttcctagtccctcttcatctcaaaggtgtctggacccacacaagcggttgtcatgacaacagttaggccttctgaagtgcaggccaagtagaaatgaggaagaaag

SEQ ID NO: 323771 - DNA, 122 bp, Homo sapiens
ggccgggcagaggtaaaggcaggggtggcctctaccctctgcccacctgtgaggagaagccggatgtagtgtgggaagacacgtctggtgccttccatctggggcactcccgagacacagca

SEQ ID NO: 323772 - DNA, 122 bp, Homo sapiens
gcagtagacctgaagagtctagctttaagtctgatgttggagttctaccactgtctctctcggatcatcagttactttctcttaactccctagtccctgaagagacaatattctttctggct

SEQ ID NO: 323773 - DNA, 122 bp, Homo sapiens
atggtttggggatgaaattgctccccctgagatcatcaggcatcagagtctcacgaggagcgcgtaacccggagccctcacacgcgcagttcacgacaggactcacactcccgtgagaatgt

SEQ ID NO: 323774 - DNA, 122 bp, Homo sapiens
cgggcttagaggcttgagagcctctggaagagaaagggtcccaggaaggaaacctgcccccggcctaagtgtcggcgcccagatcaccacgaaccccgcacctaggcgccgcccaccaagtt

SEQ ID NO: 323775 - DNA, 122 bp, Homo sapiens
ccacaggggaacctgccctgcctcagtaaaaatacagtgttgttgctgtaggaagactcccggattctaccccaggatacttcatgagaacgaaccccttcagagaggccctacaaaacaga

SEQ ID NO: 323776 - DNA, 122 bp, Homo sapiens
gggctcgggaagtgcctgcagagtcccagagacggctctggcggtcgtcagcctggaggccggcaagcgtggggagcgacgtgctcagcctccacgggaaaggtgggcggcggcagccattt

SEQ ID NO: 323777 - DNA, 122 bp, Homo sapiens
ccgtccacatttccctccctggctgtccttcgagcccctaccagtccttcctctccctgccgcccaagcccaggcaagactcgaaccgcccgtcccacacaatctctaccatccccccaccc

SEQ ID NO: 323778 - DNA, 122 bp, Homo sapiens
gggccactcccgcagctcccgcaagcacaggtgggcaggcatgcagggtgacatgcgtggcggagggagggttgggggctgttaagaggtgggcacgtgcaggggtggtagggtagagtggc

SEQ ID NO: 323779 - DNA, 122 bp, Homo sapiens
tgggcccccattaccaaagctgagctgcagataagggcagcttgttgggaacatctcctgcgtggccacctactggagacagctgcaggaagggacctgtctctagtgttctgtggacccct

SEQ ID NO: 323780 - DNA, 122 bp, Homo sapiens
tggacacccttctctctgtgctttcctgggttagagtaaatggatgcaaacacacatttccgtgctctgcagcaacttgagactcctgtgagcaaaacgcactgacgggcaatgtgcgtggg

SEQ ID NO: 323781 - DNA, 122 bp, Homo sapiens
ctaccctgctgcacaggtaagggttaacccggccaaagggctggggagaggatgaggtttcggggggcagagggcatcctttcgacctgagactcaacagcacctttgtgaaaagggcaaaa

SEQ ID NO: 323782 - DNA, 122 bp, Homo sapiens
ttctgtgggagggcctttcgccctggacaggacgtcaatgggcattgggactctcatcatcgggctgactcctcctccttcaagaccttctttgtggtctgtttacccagaggacggtcccc

SEQ ID NO: 323783 - DNA, 122 bp, Homo sapiens
ggggcagggcgaggctggatcttcggaacgagtccgtgaaggatcgggcgcgggcgcgggcgcggggccggaggtggggacgaggggagttgggaaggggctgggggtgtgggggttggggg

SEQ ID NO: 323784 - DNA, 122 bp, Homo sapiens
ccataaattagccaaataagaaaagaggccccgccgctcgtccgggaaggcttgggcagccggtggcaggagcccaggatctaaggagtagctattgtttcccctgaagcccgcgtggcccc

SEQ ID NO: 323785 - DNA, 122 bp, Homo sapiens
gatgtcgttgaggaaaatgaaagcggtcgtggccaggactggcgcagctgccgtttcaggcgaggggcgcagaatgcagcggccgccagcctggagcgcgggccctggggccgcaacccgcg

SEQ ID NO: 323786 - DNA, 122 bp, Homo sapiens
tccactgaggccaggagtcctgcatgatccatgaccatcattatccctcatatctactaacgtacccacaggcccactgggccccgggaatagcatccctccagctttgcatggcagcatcc

SEQ ID NO: 323787 - DNA, 122 bp, Homo sapiens
ggaaaaatgtatacaacattgtaaatgttttggtcagaattgttgaaaattctgggtgaacgtccagagaaaactggtttcctgctaacccatgaaacgtgattcctttctcagagtatgtg

SEQ ID NO: 323788 - DNA, 122 bp, Homo sapiens
accttgttccctccctgggtcttctagtttcagacaagtgctgtgaaatgagtggacagtcgactagactcttctgtagattggcggctggggcagaaagagccctgggaaacttttccaag

SEQ ID NO: 323789 - DNA, 122 bp, Homo sapiens
ccttctcaagaggcgggtcttccgagagtcagccaataggagctgacgggcagggcaggtcgcgttaggacagcgtcgctcccgcagggcaaggttttaggtacaaactcgtgagctggact

SEQ ID NO: 323790 - DNA, 122 bp, Homo sapiens
acaaaaaacagttccctggcaagggggacggtgagtaagcttactctggctttcttgccccgtactagatggccaagaggacagctgctgatgccaaggcaccaaggaggacaaggcaagag

SEQ ID NO: 323791 - DNA, 122 bp, Homo sapiens
cgagagccgagcggtaggaagagccgagagctagcggccggggcctcggcgggccaggggcgcggagaggccgccggagaaaggactaagacaccggtggaccgagcagttactcccggcat

SEQ ID NO: 323792 - DNA, 122 bp, Homo sapiens
cattgctgagcctctgctccccaggggagttgtgtctgtaatcgccctactattcagtggcgagaaataaagtttgcttagaaaagaaacatggtctccttcttggaattaattctgcatct

SEQ ID NO: 323793 - DNA, 122 bp, Homo sapiens
cgatgggaggcggcgcgctggggcgcgggggctgggcgccggccacccggtgccgtccggcggcatcctggtgctgggccaggatcaggactctctgggcggtggcttctcggtgcgtcacg

SEQ ID NO: 323794 - DNA, 122 bp, Homo sapiens
gcatttggggtcaggctttcctcttggaggcaagtagggtgatgaaaaagaatccttaggcgtggttgtggccgtcttggtcacctgtgtgccacttgccaatgcaaggacttgtcatagtt

SEQ ID NO: 323795 - DNA, 122 bp, Homo sapiens
tgtggctgaaggaaaggaactggacctgacctgtaacatcacaacagaccgagccgatgacgtccggcccgaggtgacgtggtccttcagcaggatgcctgacagcaccctacctggctccc

SEQ ID NO: 323796 - DNA, 122 bp, Homo sapiens
cactattctctccccacccgcccaggcctctgtgtactgtgtggccgccgttctgtggaccgcagccaagttcagcgtcccccgcaaccacaagctggccctgccacgcaggctcaagaccc

SEQ ID NO: 323797 - DNA, 122 bp, Homo sapiens
gactcctctattaagcttttaagctcttaaaaggcaggggacaagttatctatcattttgcgtctacaaacaagtgaacaaggactcaagtaggtgcctgataatttggcaacagtgactcg

SEQ ID NO: 323798 - DNA, 122 bp, Homo sapiens
acggggacttctcctgccagtgtctcccagcaggaccctcttcttgttttgaaaggtggtcggctgcttttagtaggcaccgtctgtctgagtgaccgccgtcttcccggccgcctgaaaaa

SEQ ID NO: 323799 - DNA, 122 bp, Homo sapiens
ctcaagtgatctgcccgcctcagcctcccaaagtgctggaattacaggcatgagccactgcgcctggcctgtgcctcagtttctacctctaaaatggtgatgatcatagtaatagccatctc

SEQ ID NO: 323800 - DNA, 122 bp, Homo sapiens
gctatcaatatctcagcctgaaattgcataggtattctggtgaatagcaagagaaaataacgtgagtataactggaccttttagaaaagtgaagtctattaggtcaccttagttggcctagg

SEQ ID NO: 323801 - DNA, 122 bp, Homo sapiens
gctctaacatgtaaagggggaatggatgctttcttgaccctgaagtaaacgcagctctggcgtctagaaggttccagcacacaagaaaacagcaaccgagaggagcaacatcctccagtgga

SEQ ID NO: 323802 - DNA, 122 bp, Homo sapiens
gagcctggatgcatgcgttgcttaacaacaggaatacttgttgaaaaatgtgtcattaggcgatttcatcctgtaaacaccacagagtgtacttacccaaacctagatgggataacctacta

SEQ ID NO: 323803 - DNA, 122 bp, Homo sapiens
atcacaacttcaatccactttctcctggactccagaatcctacatatacgattgcctattcggtatttccacttggatgtcacctaggcatagcaaacctaccatgtccaacactaagctcc

SEQ ID NO: 323804 - DNA, 122 bp, Homo sapiens
tggaagtttattctaattgttattattgaataaagcacttaacacgaagctggcccccagcgggcccttaatagtttccgcggtggctgtcgtagctggactacagaccccgcctcctgagc

SEQ ID NO: 323805 - DNA, 122 bp, Homo sapiens
cagaagctgggtagctgactgcccggccccgctccgctgtgacagtcaccacatattctacgcctggcatcaggtcagtcagcagcgtcccgtctgcttcagggggcacttccagcctcacc

SEQ ID NO: 323806 - DNA, 122 bp, Homo sapiens
ttctggggtaacccaaactaagacatgctcattttgtttcttctaactcacagccatgcccgtgatcagccagatgagagggctctctcctgaaagaggaggccagtgagacagcaaacagg

SEQ ID NO: 323807 - DNA, 122 bp, Homo sapiens
ccttctattgcctcagttcccctacccagcatctttgcagaaatctggactcaggctggacgcggtggctcacgcctgtaatcccagcactttgggaggccaaagcaggtggatcacttgag

SEQ ID NO: 323808 - DNA, 122 bp, Homo sapiens
ttctcccctcccccaatactggtttttttttaaacgtctttacctcgacccctatctttgcggattgaggctgcgggccccagcccggttgctgggtcacttacctctacaaaccaataaca

SEQ ID NO: 323809 - DNA, 122 bp, Homo sapiens
cgtctccgcaggcctgaagttcattggaagagcaggacgtcacggggacgcctcgtccttcgcggtcaacgccctgaacttggcgccaggatctttaaaacccggaagttcctgtggttcat

SEQ ID NO: 323810 - DNA, 122 bp, Homo sapiens
cagaggtgtcctccaagagtctaatcaagagatagatcttaagtgtgaagctagtggtgtcgtcggtaatttctgctctgtggtctctttgccagttagaattggggagatgtttggaggca

SEQ ID NO: 323811 - DNA, 122 bp, Homo sapiens
cccgggccaccgtctggggtcggttccctccagatttcacagccgcggcagcagcaggagcgcgcacacgcccgcgcccactgcactgcggcggtgctccgcagctcagcctcggggccatc

SEQ ID NO: 323812 - DNA, 122 bp, Homo sapiens
ctgtgcccctaccgtgtctgctgctgggcagcaggaacagcaggggagagccacccagggcggggcgggacggcactgcatgaactcccccagggaatcttcttcaggtgccaggtccctcg

SEQ ID NO: 323813 - DNA, 122 bp, Homo sapiens
ttcctcgttctgagtcacccttgctcagaacgcttgactttgggacttcctgtccgcactcgcggcccctaacctgccccgggagcccgggagtgcggcttgggaaggagggaaaggagtgt

SEQ ID NO: 323814 - DNA, 122 bp, Homo sapiens
ccgttcccacactccgcggccaatggccgggcgggccgcacaaaggcgccggcccattagcgcacgctaaattgcctgtgaattggcgcgggcacaatgggcgctccccaaggagcaggtgg

SEQ ID NO: 323815 - DNA, 122 bp, Homo sapiens
gcccccatcacaggctgaggacaacagatgcagctgccccctgagaaacaacagcctccacgtgtgcacctcgggaagaagtgagtcacagtcttctcagtcacacccagcacctgcttaat

SEQ ID NO: 323816 - DNA, 122 bp, Homo sapiens
taacccggacctaaccgggacctaacctggacgtaaccaggacgtaacctggatgtaacccggacataaccaggacctaacctggacataacctggaaataaccgggacctaacccggacac

SEQ ID NO: 323817 - DNA, 122 bp, Homo sapiens
ttaaaaaaaaaagaatactaaatcccatgtgcagggtggtggccacctttgtggatgaaacgggcagaatacacattgaaaatgagttacagctgggcgcggtggctcacagctgtaatccc

SEQ ID NO: 323818 - DNA, 122 bp, Homo sapiens
ctctatatttcagctgctgttgccagcactctcaattactttctctgaaacccctagccccgtctgtgctcgcttctgcatccacttttaacttcctggtttttgccttaaagtgacaaaca

SEQ ID NO: 323819 - DNA, 122 bp, Homo sapiens
cactgaaattttgttataacaaagttactccatcctttggattactttttgtttacatgccgaaatttgttgggtgacttagtattcttattttccacgaactatcacctaacacctcgagt

SEQ ID NO: 323820 - DNA, 122 bp, Homo sapiens
cagccctgcccactcaatttacttcattggctcctccctttcaggctccgtccctatccccgcctcacccttaatggcgcccgcccagactcctggaagtgagcggcctagcgagcgagctc

SEQ ID NO: 323821 - DNA, 122 bp, Homo sapiens
acaggattcaccatgggcctggggacatttgggttacatatataacagatgtattcagtccgagtatatctattttcattaccactccaagttaagaaaataacagtggaagagaggctatg

SEQ ID NO: 323822 - DNA, 122 bp, Homo sapiens
gcgactcagaatcacaccagagaaacaagtaaatgtgtgctggttattgtttcttgtccacgcagtcacccttttatactcaactccatgttactgggggggcttctgctagattccaccaa

SEQ ID NO: 323823 - DNA, 122 bp, Homo sapiens
gacacaggttggtgaagtgtcggcagatgtcaatggtctggttcagggtagcagtgcctacgggtggggccggcagaggcatctgagcagtggctggccccgccccagtctggagcctgggc

SEQ ID NO: 323824 - DNA, 122 bp, Homo sapiens
agttaggctgcctgatgagcatttaatgtttgtgaatttatctgagacagttgattagagcgatgttaaatttttataatgaaatatgcatatgggtgaaaaattgctcatactgagagaac

SEQ ID NO: 323825 - DNA, 122 bp, Homo sapiens
agaaaatcggaagaaacacatgtgataaccatgaggatggatgtaattctctgggcatcacgtttgacactgagcttccagggagtcaagtcaacaaaacccaaaactacaaagccatgttc

SEQ ID NO: 323826 - DNA, 122 bp, Homo sapiens
ctgaagtgggtgtgtactgtgtcttggtacaaacaccagctccggtggagacgtaatgtgcggcaatgtggttaagaacaagacttattatacagtttaattttgtaaggaagagggtagac

SEQ ID NO: 323827 - DNA, 122 bp, Homo sapiens
ttggtggagtacacacatgttccactgcattctggaacgcttgagctctcgagcccagaccgcagagtgctgtgggcagatcagtctctgatctgtctcatctctggaaaccctgattctcg

SEQ ID NO: 323828 - DNA, 122 bp, Homo sapiens
gtagaacctgaagtataaggtctttactcagttcttttgcctcaaggtgcagaccatgcccggcccagtagttcctccttgtgtgaatgagtagggtggatgttcccagagaaccctgattg

SEQ ID NO: 323829 - DNA, 122 bp, Homo sapiens
atacttgcgacgatgatgcctgtaaagcttaagcgcaggacctggcatagatctgtaaggcggaaacctgggatacagaactaaggtctatggatctcctgtgctacccaacttctgggcac

SEQ ID NO: 323830 - DNA, 122 bp, Homo sapiens
cctaagggcagagatgtgctcacatttctttgcatccctagttcccagcacagtgcaaggcgctgcaaacatttgctgaacccagggtctcgtgtcttgactgtccagcagaggccgctctg

SEQ ID NO: 323831 - DNA, 122 bp, Homo sapiens
gcgtggcagggctgtgtgcctggcttccctttcccctaaccccatcaggcccgggctggccgcccacttctgttcaccacagagcagggtttccctggggaccagtggactggcccagcccc

SEQ ID NO: 323832 - DNA, 122 bp, Homo sapiens
tccagcccagtcgtgcccatcgagcagggtccggctgcagcaacgagcccagcgccgcaacgcccagggtgtggggcggagtaagatgtgaaacctcttcagctcacggcaccgggctgcaa

SEQ ID NO: 323833 - DNA, 122 bp, Homo sapiens
tagaagcccagagagaggcagatgaggaggcctgcaggtgcaaattgagcaggtggttcacggctgcctccacctcagtggaataattctgacgaatctgggagctcatgggctggtaagaa

SEQ ID NO: 323834 - DNA, 122 bp, Homo sapiens
tctctacggcgggatcctcgctggtaggaggcaggtcccaggcctggcaagggttgaccccggagggctgggccggggcggcaccccaggagcacctgcccacgaggcggctgcgcggacag

SEQ ID NO: 323835 - DNA, 122 bp, Homo sapiens
cagcttctttgtgaggccaggccttctgactgtcagcaccaccggcacagggcagagatgcgggtggcccaaggaccacgatcaaggggtccgggggaccgaggtcccagatcagtgagggg

SEQ ID NO: 323836 - DNA, 122 bp, Homo sapiens
ggtgctgagacccgcctgggccagcacagagcgcagagcagtacgggtacggagaaacgccggactcagtgaaaccagccttgcctccagcggattccccggcttcgccggacgccacaggc

SEQ ID NO: 323837 - DNA, 122 bp, Homo sapiens
taggccaactgtgtttgctaattggtgcttatgaaagttaggatctgtctttgtctgcttcgtgttgctaaaaaggaacacttgcgcttggataatttatgaagaaaagggttcatttttct

SEQ ID NO: 323838 - DNA, 122 bp, Homo sapiens
agacccactggacgctcacggcagatgcagcttcacaggaccaccaggtgcgtacgagggcgccgactgcccactcccgccaacttcacaggcccatcaggcatgtatgaaggcctggagga

SEQ ID NO: 323839 - DNA, 122 bp, Homo sapiens
cgtcgtgccgcgcgtgtgcatggaacaccatatagcctcaccattaataggcaagatgagcgagacccattatcagatgagaaaagcacggcacggaatactgtgtccaatgtgctcaccgt

SEQ ID NO: 323840 - DNA, 122 bp, Homo sapiens
ggcgggagcccggcgagggcgccggtgctttgttctgtctgaggccaggaagtttgaccgcgctgccatgccgaaccgtaaggccagccggaatgcttactatttcttcgtgcaggagaaga

SEQ ID NO: 323841 - DNA, 122 bp, Homo sapiens
cgcgccttgcgggaaaggcgggagtaaggtcgctgcgtgtcctctctggtcacacctcggcgcgccctggtcgcgcccctatggttcccccgccgaggcctcgaggcgtctgagtggggagc

SEQ ID NO: 323842 - DNA, 122 bp, Homo sapiens
ctctaagcactgtccacatgcgcccagaaccttgagcagtggagctcagagcagggttgacgtgagtaagcagacatgagtcaggctgagactccacctaatgactaaggatcaacgtccca

SEQ ID NO: 323843 - DNA, 122 bp, Homo sapiens
cggctgcacctggcggggatgccctcaccccactccttatcactgggaccacctgaccgccgggtctgtccagtcctgtctgtggccaacctggaccttcacggaataggaagcgctgactt

SEQ ID NO: 323844 - DNA, 122 bp, Homo sapiens
agatgctggcttccaaccaggagagggcacctccccgtcatcgggagcccagcccagatacgccacacctgggcgagctggggggtctgtccctggggcaactccaacctcccagcttctcc

SEQ ID NO: 323845 - DNA, 122 bp, Homo sapiens
gatagtgatgaaaagcagtcaatgcttttcattccctcttgcttctgtgttttagggttccgaggtcctggcatgatagggagagttcaaagcaagtatttataggttattagaattgattt

SEQ ID NO: 323846 - DNA, 122 bp, Homo sapiens
ctggggaggggggcgattaaaaggtcccaacctcctccccaggagaccaaagaggttggacggggccccgggtactaggctgggtgggggttgggcgcctgggccggtcgcagttgtctggg

SEQ ID NO: 323847 - DNA, 122 bp, Homo sapiens
cgcccacggacggacggctggtacttacatgtgcacatgtgcagctactttacttaccgtcgaaggcagcggaggaagtgtaattgactagcgtggatgcagcttttctaagcaaacgctcg

SEQ ID NO: 323848 - DNA, 122 bp, Homo sapiens
gaggagaagcagctgaggtttacatgtggagactgtgtgtgatgaaagggcaggacacagcggcccctggatcctaattcagaccagcctgcctctggcaataggaaagtcatttgttcctg

SEQ ID NO: 323849 - DNA, 122 bp, Homo sapiens
agtactactagtactactagttctgctattgctactggaactaccactactagaacttcccgacctactccttccttgtttttctttttctttatgctctttttttggttctaaaactgatg

SEQ ID NO: 323850 - DNA, 122 bp, Homo sapiens
acacggtcactcagccgtctttattttcagtgagtcataggtaaaatattcttcaccaggcgaggattgagtcgcagtcgcgtcaggaactcgcctccaggtactgagcgagcgagccccga

SEQ ID NO: 323851 - DNA, 122 bp, Homo sapiens
ctcgggctgggctcgggctccgggggcggcgtcccccgcgccgggccccgggacgggcggcgacgctccaaccatggcccgtgcccaggcgctcgtgctggcactcaccttccagctctgcg

SEQ ID NO: 323852 - DNA, 122 bp, Homo sapiens
ggttctgcgtgtaggagaatctgcttgggaaaccacagccctgcctgccgtggagatggacgcagcgtcccgctcacccggcgcacactgcagggctccatgcgggagtgaggcggcagcgc

SEQ ID NO: 323853 - DNA, 122 bp, Homo sapiens
tgaaatatctccacatctgtattaactcattcaatcctggagtttggtgctgttgttatccgttatgtccattttgcagatgaggaaactgagatcaagagaagatactgtatccaaggtgg

SEQ ID NO: 323854 - DNA, 122 bp, Homo sapiens
ttcctcgaccccatgcctagccgaaccgccaaggtcctggtctttcccgcccagaccgagcggcctcggcccaggccttcaccgccctaagtggctccaacccacggcttcctccccgatca

SEQ ID NO: 323855 - DNA, 122 bp, Homo sapiens
ctttgggctatgactgtttcaaataagtaacgtatgtatgtaatgtctgtaactaatatgcgtatggaggtgatgcaaatgtgaatgcaaatattacataagtcacgtacacacgtatgcaa

SEQ ID NO: 323856 - DNA, 122 bp, Homo sapiens
tgtaatgagggcaaaacacattggcgctctctggcacccaggtggttgcggacgccttggcgaaggctgtggctgagaacttcttcgtggagaccctgcagccccagctcctgcacgtgtaa

SEQ ID NO: 323857 - DNA, 122 bp, Homo sapiens
ctcattccttgatgcaccagtttctctctcgctccatggagatctatgccggccattcaccggcattcacacccacattcacaccgaggaatggggtggggtcagattgtccctccgtgtct

SEQ ID NO: 323858 - DNA, 122 bp, Homo sapiens
cattcaaggaaggtttaggaagctgataatggctgagaggagtcttaaaataaaattacccgctaagcccagttaagaaaggcttaactgagtagtctttccaggctaaggaagcaatagtt

SEQ ID NO: 323859 - DNA, 122 bp, Homo sapiens
cctttataagtgtctgctgtagggccgcgtgtgagagacaaaatgcctgcagaaacagggcggcgagcggaagagattggccctatttctgaagtcaacgtagttctgtcatcagaggatgc

SEQ ID NO: 323860 - DNA, 122 bp, Homo sapiens
gccccggatgaaagagccctgcggcaggacgcgcgcccacgccgggccccgggccccgggcgcacccggacgccagcagcctcagcattgccgcgcgcggccaagacctcaccgaccaaacc

SEQ ID NO: 323861 - DNA, 122 bp, Homo sapiens
cgagccgcctactacagttcccaggaggccccggggcggggtgtgtgtgagccgagcttgcgcaccgctagctcccaggacgtcggcgcagggggcgtgacccccccaaaggggtcctgggc

SEQ ID NO: 323862 - DNA, 122 bp, Homo sapiens
catttcacataacacttcaagaggatggtctgactgaaagtagctaaaactgcacagtcacgctttctgactcatctcctttgcagttacttctgttttcagtctttctcactcatgggcct

SEQ ID NO: 323863 - DNA, 122 bp, Homo sapiens
taagcccatgtgaagtatttggtgtttagttctgacctaatgcttatgtttcttgtttcccgtaggcagtgatttggggagacagttctaaggacttgtcagggatatgtgatgtgctcagt

SEQ ID NO: 323864 - DNA, 122 bp, Homo sapiens
tcaatgacgtgatagggcagatttattgggcttacagaaaaaaagagagaggagagagagcgagagagcgaacagtaaactctgctgtgcagtcaacctggaccttggttttaagttgcaca

SEQ ID NO: 323865 - DNA, 122 bp, Homo sapiens
cagctctctggccggggtcggcgacgtcagcttcgactccgacagccagtttcccctggacgaactcaagatcgaccccctgaccctcgacggactgcacatgctcaacgaccccgacatgg

SEQ ID NO: 323866 - DNA, 122 bp, Homo sapiens
cagggctagggccgcggtcggggccgtcggggagagcggagggcgcgtgggaatggggctcgctgcgccacggaaatcccgcgccgcccttcgagtcctcccagctgctccgcagagccggg

SEQ ID NO: 323867 - DNA, 122 bp, Homo sapiens
gatggagaacaaaagcacagaggtacccaccaccgtgaataagagataattcactaagttcgtcaagaatctggatataaataactctcaagtaaaataatcctttacctgctcttattatg

SEQ ID NO: 323868 - DNA, 122 bp, Homo sapiens
ccctcgggaactcgggagcgcgcggcgagctgaacaatggcctggggacacctggcaggtcgcaggccccaaatcttccccgccgcccctaggccaccgccctgcacccggaacctaccggc

SEQ ID NO: 323869 - DNA, 122 bp, Homo sapiens
ggctcccgggaccagggacttttgtctggagcggctgcgtgtttgtgtgtgggcggggtccggagccaccaggcagtcagccttcccaagcttgctcagtcccagccgcccctcgcgggggt

SEQ ID NO: 323870 - DNA, 122 bp, Homo sapiens
cccggccgaataaaccccttccttctttaagtcggtgtttgaggagttttgactgcagctcgtcctgctacaaagccaccaggctatctctaggatcccttatggggcccctcagggtcctc

SEQ ID NO: 323871 - DNA, 122 bp, Homo sapiens
ctcggcctctaggcagcggctcgcaactccggctccgcccaggctggattgcggccgacccgtgcccggtgcagcctcaggccgccgccttcggaccttcccgcccccacctcccaccgccc

SEQ ID NO: 323872 - DNA, 122 bp, Homo sapiens
ttcctggctcccatcagtgagggatcatgtgcccatcaaggaagactccctgtggctgcccggggcaagggtcttctcttatccccagcgccactcaacccctcttggctccatcctgcatc

SEQ ID NO: 323873 - DNA, 122 bp, Homo sapiens
agagtcccctagagctgaagccccggaggctgacctgtgggtctggctgctatgggaacccggttggtccaaagaagcctttcttccgggcacctggaattccagtttagtgtggggcatcg

SEQ ID NO: 323874 - DNA, 122 bp, Homo sapiens
ggtcggctctcaagggcatctccgttctaataactcagccctgggggatgatgtgggacgcgtgagccccatttaagacagtgtctccttctctcctaggagcccacagaaaacccactctc

SEQ ID NO: 323875 - DNA, 122 bp, Homo sapiens
gacatatgtctgtttctttctagttgaccacgttgttcctgagcctgggacaagcctgctcgctgcctttgaccagtggagggaatgggccgacagcaagtcctgctgtgactactctctgc

SEQ ID NO: 323876 - DNA, 122 bp, Homo sapiens
catattgcacttcactcttggatagaatttggactctggaaacagcctgggttctaacgccggttcctccacttcctcgctgtggcccttggcaagttacttaacctctctgtgcctcaatt

SEQ ID NO: 323877 - DNA, 122 bp, Homo sapiens
ataacaactagaatagaacagtgataaaacatgtagaaaatttcacagtgaataaactaacgcatacatagataggcaaccgttttctgagagtcagttgtgaacccagaaaaggcataaaa

SEQ ID NO: 323878 - DNA, 122 bp, Homo sapiens
taattttatctttgaacttgtgttttataagtgaagtctcatgggacaaaggagaatgagcgtgagcagaggagatacaatatgtgtgcatgcgcagtaacaccattccttgcctcccattc

SEQ ID NO: 323879 - DNA, 122 bp, Homo sapiens
tcaggacgcagctgccggtccagctgctcccgcgggcccacagcgcgctgtggaaaggagcggacaggccagaggctctctcgggcctacaagtctctaggctaggcagtgtttccgagtcc

SEQ ID NO: 323880 - DNA, 122 bp, Homo sapiens
cccacccgcctgccgtcacagaccccgcctcccgtgcctgagccccatttctctgggggccgggctgcctcgcgtggcccccgcctgactaaagccatgcagcttctcggccggctccatcc

SEQ ID NO: 323881 - DNA, 122 bp, Homo sapiens
cttgcactggcaggaaatagggtggtgggtgcatttcagttaatgggcctagttggaacacgtttggccgtggagacagctacactcatattaccaagccttggcttcctatctgttttctt

SEQ ID NO: 323882 - DNA, 122 bp, Homo sapiens
aaggggctgccgtgtcctggtctggaggcggcccaggctgccttggtgattctggcttcgcggcctcatggcttgcggccggtttgcgcaacggcctgcgaaccaccaggcgcgtccccgcc

SEQ ID NO: 323883 - DNA, 122 bp, Homo sapiens
gggaagatgggaagcggctataaatagagatgaagcttcactcccttgctcactgctcaccgctcacctcctgctgtgtggcccagttcatatcaggccggtttcctatcaggtaatggtct

SEQ ID NO: 323884 - DNA, 122 bp, Homo sapiens
atttttggcgtgagatgtcactgtctgccgcttctgtgttgggtgccctcgtccaggcctcgggttcaccccatccagaaagtaaacccgtccttccgctgggagagacggggcgaggggac

SEQ ID NO: 323885 - DNA, 122 bp, Homo sapiens
aaaaggaaaatgcttccgttccaggaggcggtactgcggtgggagcagcagccaagtccgcgggaaaccgagctgctcgggcctgccctgcaccccccgcgcccccggccaggctaggcgtc

SEQ ID NO: 323886 - DNA, 122 bp, Homo sapiens
cctcgttctcgtggcttctgatgggggtgacccagtgctatctggcacctcccgcatctgcgtgaaggtcctggatgcgaacgacaatgcgcctgtttttacacagcccgagtaccgcataa

SEQ ID NO: 323887 - DNA, 122 bp, Homo sapiens
attaggtgtctgagcccacttgctgctctctcccaccgaactgcaagcatccgtgatctccgaagttgctggagtgaataactaagctggaccagctgactccgggctccaatcagctagag

SEQ ID NO: 323888 - DNA, 122 bp, Homo sapiens
cccacgaccccgcctgccagccccccacgcgccctgtagccggaggcgtgaaccgtgaaccggaacctcaggtgcctcccacgtgttctgcgaatttacgttcgcctctagcacgggaaatt

SEQ ID NO: 323889 - DNA, 122 bp, Homo sapiens
gcagggctcagctgcccatctgtgaaatgtgggtacagcatccacactcaggtctccaaacggtgatgctggagggagcaaaggacatgacatgaagtttctccagagccctctggtaccag

SEQ ID NO: 323890 - DNA, 122 bp, Homo sapiens
aggccgcgtgccgcaggccagctctcaccgctgggctcttgaagcaggaggcgcgagccgcgccaaagtctgcaacggcctcaagtctcgacgccagcctaggcaaaaggcaatgtatctaa

SEQ ID NO: 323891 - DNA, 122 bp, Homo sapiens
gccccgcctcccagcccgccccttcgcagcaccctgcgaagatgccaggcgctggattcccgggaggacacgcaccggtctcagaaaaggccaggctaggagcagtttcttttctatttaga

SEQ ID NO: 323892 - DNA, 122 bp, Homo sapiens
tccggtggatacaggaagtgctcagcaacgattacgccccgagggccaatcacagggctgcggccgagagagaagccttattagagctttctcaacctgcagccctcatctccgccggcgag

SEQ ID NO: 323893 - DNA, 122 bp, Homo sapiens
agtgcctgcagtcggacgtgtggcgggggtgcccagagccgccccgtgcagtgcacacggcgggtgcactatgactcggagccagtcccggccagcctgtgccctcagcctgctccctccag

SEQ ID NO: 323894 - DNA, 122 bp, Homo sapiens
ttaagtcatatgatgagcttagattggagccctggtctctcagatttgattagcaggtcccgatggcttgctactactttgctcagctctgtgattttagcaagaaaaaaagcaaaaatgaa

SEQ ID NO: 323895 - DNA, 122 bp, Homo sapiens
ttttttttttgagatggcgtctcacttggtcgttcaggctggcgtgcagtggtgcgatctcggctcactgcaacctccacctcccaggttcaggcgattctgcctcagcctcccaagtagct

SEQ ID NO: 323896 - DNA, 122 bp, Homo sapiens
atttccaaggtatcttgcaactatttaagtgtaacagatttggaagttgaccctccaatccgccacaccgcaagacttcctcctcctcctgagtttctcagttctgccaatgcctctctccc

SEQ ID NO: 323897 - DNA, 122 bp, Homo sapiens
gctcaagcattccgcctggcttggccttccaaaggctgggattacaggtgtgagccaccacgtccagccttgggaatttcttaatgtgttcttttttaaatcaggttggtcctttttctgat

SEQ ID NO: 323898 - DNA, 122 bp, Homo sapiens
agtccccaccttagcctgtctcgtgttttcagaactcagacatatgcgctgagtacgcaccgagtgccacaacaaagtccggctagcggcccttagaatagcaacctagggggcctgggccc

SEQ ID NO: 323899 - DNA, 122 bp, Homo sapiens
aggtgatgaaattcttcattttggaatcatccaggaaaagctgcagatagagggccaggccgtgataagtcccagcgtgcaggtgggggcggggaagctcaggaggtcctgaagctcgggag

SEQ ID NO: 323900 - DNA, 122 bp, Homo sapiens
gtcacgtgaccgcccaccgtcggcccggcgctcccctccgcccgaagctagcaagcggcgcggccaatgagaaaggcgcatgcctggcccccgccggcctgcagtctagccgtagtgcgcct

SEQ ID NO: 323901 - DNA, 122 bp, Homo sapiens
gggccgagacctgccccctccccttttctctcccaggcccatctcgctccttcctccccgcgagaccctgcctcggccctcggttggggaccgtctgctcctcagtccctgcgcccctctct

SEQ ID NO: 323902 - DNA, 122 bp, Homo sapiens
gaattcaggtgcatgtttcttctcccatgaaatcctgcccatcgcggagggtgcatgccccggggctggtgtcctcactccacatctcctgttcaccgggacccctgggagcagagcttgca

SEQ ID NO: 323903 - DNA, 122 bp, Homo sapiens
gctggacagcgaaggaatacacagcctgccagtttggggatcccagtcgaccagggtcgtcgatggctcttcctccggcccctcctccgagtctgtgtgctcctgcgccagggggtctaagt

SEQ ID NO: 323904 - DNA, 122 bp, Homo sapiens
acaagacataagactttaagtcaagaataaaggtaatgtgagtcttttttcttgcattggcgctacccacagggtgcatcatgacatattgctaagttctgcattcaggttatgtggctctc

SEQ ID NO: 323905 - DNA, 122 bp, Homo sapiens
gtccctaaaaaaggctccaagaaggccattaacaaggctcagaagaaggatggaaagaagcgcaaacgcagccgcaaggagagctactctgtgtatgtgtacaaggtgctgaagcaggtcca

SEQ ID NO: 323906 - DNA, 122 bp, Homo sapiens
aatattcaggggggaagagtatgatattgctcccaatatcccagggggtgtatagtatcccgacctgtgataggctccgccacgatgcggggagtactatcacccccctctctttccctgga

SEQ ID NO: 323907 - DNA, 122 bp, Homo sapiens
tgacctcatgatgtgcccacctcggcctcccaaagtgctgggattacaggcgtgagccaccgtgcccggccggaagattttgtttacccttctgggtcttgatatcctactctgtaaagtga

SEQ ID NO: 323908 - DNA, 122 bp, Homo sapiens
cgcccgggccgcggcgggctgtggtcacaggtgggcggctgcggcgagggagcggccgagcggagcccgggtcccggagactcctgccgtcacgcccggggctccgcgtagcagagatcggg

SEQ ID NO: 323909 - DNA, 122 bp, Homo sapiens
cccaggcctcccaactccaccccaggtgcaggcccaactgcacgtcctgccacggccggccgacgacagacaaagggagactctcggcctcaggcccccaggctcggccctccccggctcct

SEQ ID NO: 323910 - DNA, 122 bp, Homo sapiens
caggactgacgatgtggacccaccccactttgtgctgccagctttggcagtgcaggacagcggtgagaagtgtgggccctggaagtctggaaacctgtctctaccagcacttactaattgtg

SEQ ID NO: 323911 - DNA, 122 bp, Homo sapiens
ggaggggagacgcatgcaaatttagattctgctacaggatgtggacagtgggaggggagacgcctgcaaatttaggttctgctacaagatgtggacagtgggaggggagacgcgtgcaaatt

SEQ ID NO: 323912 - DNA, 122 bp, Homo sapiens
ctgagaggataccgctaaaaatcgccttcaaaattgcttaaaaggcaaactttaacaatgcgatctaagagtcgtagtgactggccaaaaaaaaccgcaattttggggtctaattcgattgt

SEQ ID NO: 323913 - DNA, 122 bp, Homo sapiens
tggtggtggaggaacgatgtgtttactgtgtgaactctgacaagtggctggaccgaaatccgccgggaagcctgagtctcctctagcttatttggtgtcttcagagctgtccaggaatttgg

SEQ ID NO: 323914 - DNA, 122 bp, Homo sapiens
tcagactaacagtaggtttccaatatgtggctagagacgtactactccttagctataactcgttaactcttatggggcctcagcgttgagatgctcattctaggtacccccgagggggacaa

SEQ ID NO: 323915 - DNA, 122 bp, Homo sapiens
aacccaggtctctgaacccacagcccgtgtttgggtcacagtgtgctgctgagatgggagcgggtggaggcgtgtggctggggtttcccaggcgtgtggatgggcgcggggctggcctgcca

SEQ ID NO: 323916 - DNA, 122 bp, Homo sapiens
agcttgctgggaggcgtgtagggagaggtgccagcaagcaggaaccggggctgcgtgcagcgcttgcgggccagctggagttttgggtgggtgtgggcttggtgggcgctccactgggagcg

SEQ ID NO: 323917 - DNA, 122 bp, Homo sapiens
agttcaaggttacagaaagcattccacagacaggggcaccccatgacagaacccgaaccacgtgggaagaagtgttttcagctgtgcatagcaatcacagctagactatccacattctgatt

SEQ ID NO: 323918 - DNA, 122 bp, Homo sapiens
cgcgagaggccctgctctgccagcttcggccaatcagaggccagggagcggtgggcgtgacgtggggcggtgcgcggggctgggcggcggctgaggcgcgtgctctcgcgtggtcgctgggt

SEQ ID NO: 323919 - DNA, 122 bp, Homo sapiens
gaggatcacttgaggctagaaatccaagaccagccggggcaactttgcaagacctcgtctcgtctctacaaaacatacaaaaattaggcgtggtggtgtgcacctatggttatagctactca

SEQ ID NO: 323920 - DNA, 122 bp, Homo sapiens
tatcattgttgaaagactaatgtgatttctcctttgggcagttgtctgctcactaaagtccggcgatattaacggtggtgttgtaaccttacatagtctcggggtgcatacaggcagagttg

SEQ ID NO: 323921 - DNA, 122 bp, Homo sapiens
cgtcctccgtgtgcgtcctgctcggcgcgcctcggaagcagcgggacctgcggggacgcccgcgaactcagggaaaagtcccaaggcggcgttcccagggtaccccctcttccaccccaggg

SEQ ID NO: 323922 - DNA, 122 bp, Homo sapiens
acaccgcggagccctgcaggcggtgagtgatttcttcctggtttttaatgtcactgttggcgcggatgaggtgtgaatctgggtcttgcgtctgtaacgtgcgccggaggaaagggccttct

SEQ ID NO: 323923 - DNA, 122 bp, Homo sapiens
aaggtgtggctgcctgcggggctgcagggaagatggggccgtgctcactggtcagggctgcggggtggcctgcctgagccgcagtctccatattgattagtcggcctgtatgtttatccatc

SEQ ID NO: 323924 - DNA, 122 bp, Homo sapiens
aacttgagcgtcagaattgcacgtccgcgtgtttgtgcggggctggaacttggcagctcccgctgaaattaaagcgcgagtcttgcgccccctcatggccccaggcggcaccccagcatctc

SEQ ID NO: 323925 - DNA, 122 bp, Homo sapiens
cgtgagatgctttagtacaaatgtggtttgttgcccctagatggggtggcctaggtgactcggggttacatagaaaacaggaaagtagtggggaacaaggttagtctatgtgaagccagacg

SEQ ID NO: 323926 - DNA, 122 bp, Homo sapiens
gtctgaagaggctcagacatgtgctgggtcattgctacttctgtatacacatgcacctgccggacactgcccatggtgctccctaggaagaactgcaggtggaaaaggctgccacatttctt

SEQ ID NO: 323927 - DNA, 122 bp, Homo sapiens
tttgactccaggggccctggccttagcagtgcatacactgcttctgactgcagctagagacgaatgagaaacgggagggtgcgtccctgggtatccccctcacccctccccagcctgcctaa

SEQ ID NO: 323928 - DNA, 122 bp, Homo sapiens
gtgagcccccgcaactcagacgcgctcggcctcgcgctccggggctgggaccaccgagggcgagctgcagccttcgccacccggtccgccgccggactccgcctcccacaaacagcccggca

SEQ ID NO: 323929 - DNA, 122 bp, Homo sapiens
cgctggggtgggggtgtctgtgggggacagggtttcctggggtctcctgggtcttcctcgcgcacccccaggaggtgttgcagggggaggggagcgcgggtgggtgggaccgggccgggtgg

SEQ ID NO: 323930 - DNA, 122 bp, Homo sapiens
gtgaagacaaataacaggcagaaagagatgggcaggaaggcagaattcaaaccatgatgacgttcaagtcacaaaattatctgcaagtcagcaggagaacactgaaggacttctggaaagga

SEQ ID NO: 323931 - DNA, 122 bp, Homo sapiens
gtgagatgcacctcactatgaaataggcatggaaacggaaacgactagctctcttagccccgttttcttttctacattcatacgttgctttgaattggcaagcagtttttatttggaccctc

SEQ ID NO: 323932 - DNA, 122 bp, Homo sapiens
gagcccatcccagatgtgattcctgtcaaagccatgtttcccacctctccctgcagaaaacgctagggcttacgacagcctgaggctctggggttatgttaaatcacattttttcctaggaa

SEQ ID NO: 323933 - DNA, 122 bp, Homo sapiens
cctcagcgggatcctggttggagagcgcctcagcgggatcctagatacagagcggctcagcgggattctcgatacagagcccctcagcgaatcccagatacacagcgcctgagtggtattct

SEQ ID NO: 323934 - DNA, 122 bp, Homo sapiens
tataggtaacctgtgctgcgcggggtggcactagttttcacccagcgggcgaggaggcagcgaagtcgcgggcccagcgtagcgcgcgcctccgaagggcttggtgcgggcgcgggcgcggg

SEQ ID NO: 323935 - DNA, 122 bp, Homo sapiens
accacgcagagccgtcggacaaacacaaaccacgcagacccgtcggacaaacacaaaccacgcagagccgtcggacaaacacaaaccaggcagagccgtcggacaaacacaaaccacgcaga

SEQ ID NO: 323936 - DNA, 122 bp, Homo sapiens
tctttaagtaaacaaaatgaagtggccacaagtaagcggttccatgagtttatggcttgacgtgcaacaaggatgagagaggtgttatggaaaatcaagatactttgaaagaaataggcaaa

SEQ ID NO: 323937 - DNA, 122 bp, Homo sapiens
ctcggctcccgggaggattccgttccgggggcgggggagcgtccctcggcctcggctccccgccccgaccccgcccattggcccgccgcctgccgtatatgcagaaaggtcccgccccgccc

SEQ ID NO: 323938 - DNA, 122 bp, Homo sapiens
tatttccccacagtcccctagtccccagggctgcactttcacccacaaatatccctcccgcgctcctccggcagccgtgaagtttcgtttcccccggccgggtcctccttccctcccttccg

SEQ ID NO: 323939 - DNA, 122 bp, Homo sapiens
catgatggaatagcagggctgggacttcagcagcagacacctagttctccgggtctgaggcgggacgtctgagatgaggccagctgccagccgggctgggttccagcaagggctgtcttcca

SEQ ID NO: 323940 - DNA, 122 bp, Homo sapiens
ggagttaggtgggcagggttaaaagaacaaatgggaactaacaggaattaaaacggtggccgaatggcagcagaagaactaaaatggcggcagagaaaaaaggaagtaagatggcggcagtg

SEQ ID NO: 323941 - DNA, 122 bp, Homo sapiens
tcgagccccgcccctgccaggccttgcccatgccccattttacagaagaggaaacggaggcgcagagagaagaaataacttgctgagggtccgaaccaggctcagaacccaggtttcctggc

SEQ ID NO: 323942 - DNA, 122 bp, Homo sapiens
attctaagagcagactgcaggagtgcttaatccctgctttgccacgtactggctgtgtgacgtccggccacttgcttaaattctctgcctcagtgtgtatctgtagaatggagataatagca

SEQ ID NO: 323943 - DNA, 122 bp, Homo sapiens
tcaggacagcggcaagtacgaggtgtacgtggagaacagcctgggcatggaccagagcttcgctcgcgtcgacgtggcctgaacggcacccccggaccttccgccctggcgccgagcccggg

SEQ ID NO: 323944 - DNA, 122 bp, Homo sapiens
catgcgtggcgacaacaacaacaaaaaccacaacccacattacttgagggctcgggcgtgcgcaaagctccgggttcagtttcccgcgctggaactttttcaatagtaaacgagcaaagctc

SEQ ID NO: 323945 - DNA, 122 bp, Homo sapiens
ggaaacttgaagtgggatcagggagggctgtgagatcgcaggcgccgccccgcagcgaggcgcctgttgagagctcccgcaggccttcgcaagccggagccctcagcggacgatgttcaggg

SEQ ID NO: 323946 - DNA, 122 bp, Homo sapiens
tgcttctgtaccacaggaaataaaactagtgtagtaaaaagagctttggaatctggaatccgccattgctgtgtgatttggacaacgtatgcaactctctgacctcattttcctcttacata

SEQ ID NO: 323947 - DNA, 122 bp, Homo sapiens
ccttaaaggggtccccgtgtctctccagtctagagcctaagttcaaacgaggcgtataggcgaggacagcaggaaggctccaagtcaaacaaacggatggtacgaatttcgcctggtctagc

SEQ ID NO: 323948 - DNA, 122 bp, Homo sapiens
tacagcagcttagcttagccccaagtgggcattctcagagttacaagagcagcaagagggcgagccccagtggccagatgcaatggtgcttttgaagtctgcataggtcatgtttgttattc

SEQ ID NO: 323949 - DNA, 122 bp, Homo sapiens
gccctcctcgtgagtctccacatcttcatctgtgcatcataagcagaggtccccggacgtcgctagatgccatggaggccagcacaggtaaagctggggtttaccagcaataacaagacaga

SEQ ID NO: 323950 - DNA, 122 bp, Homo sapiens
ccgcctcccggcttcctggccagggggaccccaaactgtggcgtggggggtggtccggggcgcccccagcgcgcgcccaaacttggcgggcggcgcacgtggcgagccgaggcgagggttcc

SEQ ID NO: 323951 - DNA, 122 bp, Homo sapiens
cggccaattctcggcttcagggacgggactaaagtctcgaggcgggtcttggacagtcagcggcccaatagtgtgctctacgtggggcggggctcaggtgcggacgccgccggttgtcctct

SEQ ID NO: 323952 - DNA, 122 bp, Homo sapiens
tgtaagtagggattagatccagtgccggagcaaagaaatattcctttctctccccactggcgccccggacacctaccgtcattacttccattatctcttcgtccatgaggccacctggccac

SEQ ID NO: 323953 - DNA, 122 bp, Homo sapiens
tgtaaacggtgttccttaaaggaaggtaatgttttttgccctgttccgtcaagtcttaaacgcttgacattttaaaatagttttaaaccctttccggaattagaagtggtatttcggaccgt

SEQ ID NO: 323954 - DNA, 122 bp, Homo sapiens
gaggtggaagacaagggatcgggcctgcgccacgatcgtcacgtcccatcgaagctggagcggatccgggcacccggagcccccattccaacccctcccggccccaggcaactacatctccc

SEQ ID NO: 323955 - DNA, 122 bp, Homo sapiens
ccaccacctggtggttttcaacagttgcactgctacacagcagtgcctccaacacttcaccggtgaactgccaaatgccaatccctgtgtgacatgtcttttcgctaaaactgatctctcaa

SEQ ID NO: 323956 - DNA, 122 bp, Homo sapiens
acaatgaaggcagagacctgggccctcaggagtgagatgaaggttgccagttcctggtaccgaaagaggccagggcagagctggtaaactcacagagtacacaaatgggtgagaggggcacc

SEQ ID NO: 323957 - DNA, 122 bp, Homo sapiens
tacgaggcaaattctttatcacaaccaaagccgaagatggttctgacatccaagcaagtccgaaatccctgcgcagaggcacagttcagctctcggaaccacatgctgtgcttagacatccg

SEQ ID NO: 323958 - DNA, 122 bp, Homo sapiens
ggtggggtgcaggtagcttcacctgggagtcgccgataggaaggagggaggggacccagacgtgcctctgccctgcctgtggtctgccgctggtatcctctgcccagggacccctggcggga

SEQ ID NO: 323959 - DNA, 122 bp, Homo sapiens
acaagtgtaatcaaaggaattatgcaaatttaatttgatgcttcttgaattatgcaaattcgcggtgcacataatgttctctgacatgtgcccgttggagagagagagagagagcgagggag

SEQ ID NO: 323960 - DNA, 122 bp, Homo sapiens
gagccgctggattacagagcagcaaaccaggcatggcaggcggtgctcgcggaggtaccacggggcggaccagggtgtgcagcgttacgtgacttgggaagatgtggggggcccgatgtatc

SEQ ID NO: 323961 - DNA, 122 bp, Homo sapiens
ctcgacctgtctgttcccacctggctccgcagctccctatggctgagcgctcaccgcggccgggtcatttacataagaaagagcctcaggccaagccgggaagctctcattccccgcctcgg

SEQ ID NO: 323962 - DNA, 122 bp, Homo sapiens
gagaagcccccaggcaggggtccccggctgccccccgcccccaggctgccccccgccccccgggcagccatggccaccgctgctgcttccaccaggcccgaggtggcccccacgctggcccg

SEQ ID NO: 323963 - DNA, 122 bp, Homo sapiens
gagaggaatagagtgggggtgggagaagtggggagcagagagagacagagaatgaactagcggaaagcaagcaagtcagcttttagaagtagacctgaagccctagcaacactgaaaagaga

SEQ ID NO: 323964 - DNA, 122 bp, Homo sapiens
tcttggcaccgcctgcggagctggtccctcaacgccgatccttggagcgcctcgtccagccgacttgccacctggcaaccccgctcccccgtcaagaggcggagcacacgggacgtggggaa

SEQ ID NO: 323965 - DNA, 122 bp, Homo sapiens
ttgtcaagagaagcaacaaactcccccattgcttcaaagttccactgttttcaatgaagacgcaggcaggaacttgcccttggagataggccatgctacaattggaataaaagttattataa

SEQ ID NO: 323966 - DNA, 122 bp, Homo sapiens
catacctgagggcggagggctggggtgtgggagtgctcatagcagacaggcctggctgggcgttctgatgaaggggatggcgagggcgggggtggagggctcctcacctctgcaggaatttg

SEQ ID NO: 323967 - DNA, 122 bp, Homo sapiens
ctcttcaacgggttcacattctcccacctgctctcaggaacagccatgggaatactggctcggcaaggcaactcaggaaatctaacagccctgctaagcgaagaatttagtatttcatcata

SEQ ID NO: 323968 - DNA, 122 bp, Homo sapiens
agcctcgtcctcgccggaccctgccttcaaacccaaacacacgtcactcctgcaagcgatcgagaccttccactgtccctcactctaaggtgccctacacgcggtgacttcacccaggccct

SEQ ID NO: 323969 - DNA, 122 bp, Homo sapiens
gctcctcctcctccttgttcctgatctttacttctcagcctcttccaggaggggaaggtgcgggtgcccattgttgtcatggaatgggaactcacccatcacaatgggcaaaggagtcttct

SEQ ID NO: 323970 - DNA, 122 bp, Homo sapiens
ccagcctcagcagcttccgatggccctgcaagttgatgttcctgagctcctatacaattccgggtatatttctgtgtttttaaggactttaaaataaacatatacgccacctactgtatgat

SEQ ID NO: 323971 - DNA, 122 bp, Homo sapiens
cgccccgaagccggccgcggggtgcaggaggttcccggaggtcccccgcccacccccggacgtgcacaccgtggctccctggttgtgcctgtcggccatcctctgccgtcagcggcctctgc

SEQ ID NO: 323972 - DNA, 122 bp, Homo sapiens
tctttggctttactgtcaagccctgaaataatgctgagtgctgtaatgctgagtcccttccgtccagctcgcagacttctagtacccactccctccagctcttggagggctgagatttgttt

SEQ ID NO: 323973 - DNA, 122 bp, Homo sapiens
attagcatcttgggggaatcaaaccaagaatccaccaatccttaaggggcaagttcctatcgatctgctctacggagcattaagacctcaatgaccccagaccttgctgccatcctcctctc

SEQ ID NO: 323974 - DNA, 122 bp, Homo sapiens
tatgtttacatatgaccaaaagactgtgaatttcatgagtccctgtagccctaccaactacgccttatttcccatttgaacatggaaaataaaatgtcaaggaatatgaactcaactagaaa

SEQ ID NO: 323975 - DNA, 122 bp, Homo sapiens
cgactgcggggggagccctgggcgttgggggcgttggccaagacgggcgagtgggcttctcgggttctactctgtgaaggccaaggcaagggcgtcgtcgcgcgctgcctggcggagcccag

SEQ ID NO: 323976 - DNA, 122 bp, Homo sapiens
acacttgcggtgcgaccctttggcaaaattcagtccctttctatgcctcagtttccccatcggaaaaatgggagtttgaacagcgaccgaagcgcagggatcgccagtgtgggagagcgcca

SEQ ID NO: 323977 - DNA, 122 bp, Homo sapiens
acgctgcctgtcagcacctgcctgggctgtgtcacctagagtgtggctccgtgtgtgcggcgcagacaccgtgggggtgtttggagcttcctgcgtggctcccagatgtctttactacacag

SEQ ID NO: 323978 - DNA, 122 bp, Homo sapiens
gcctgaggtacaggagctgcggggctcctcaaacagcagaaagcctggtctcatggctaccgccccccatgagcaggatcagtgccgacgaggctgcagcgagtgtcgggctggccaccgcg

SEQ ID NO: 323979 - DNA, 122 bp, Homo sapiens
cccaggctcgggcaggcaagtgctgaagggtggctccgccttccgcagaaagtcagaggccgaggagatggaagaacaggtgttcaagggggacccggacacccctcactccatctccttct

SEQ ID NO: 323980 - DNA, 122 bp, Homo sapiens
ccgccccgggatgcgtccgagctaggagccaggtgggggatccgtgagggggccgtgttgcgggagaagacttcgggattagagacagagctcaggattagggagaggacctgagaccaggg

SEQ ID NO: 323981 - DNA, 122 bp, Homo sapiens
tcatctgataacattgatgaaaaatatcattcacttcttcttggtgcagaaggcatagaccggattatgcaatcactgagaagtagcttctggatgtgttttctggtggcgtcttaacaatt

SEQ ID NO: 323982 - DNA, 122 bp, Homo sapiens
cacctccagggagatccagacggccgtgcgcctgctgctgcccggggagctggccaagcacgccgtgtccgagggcacaaaggccgtcaccaagtacaccagctccaagtgagctctcgcag

SEQ ID NO: 323983 - DNA, 122 bp, Homo sapiens
gggactccggaaatacgtaaaaacagagcgccgggtccacgccttccccaaggaatggggcgtgtctcggcacccctcggtgacgcctccactgacatcatctgcggattcccgccccgagg

SEQ ID NO: 323984 - DNA, 122 bp, Homo sapiens
aattcatatccttttctaaagttgactttaaaaatgtataagtaatttgtcagtacaacacggtaagtgctagattagcacttgtgctccttcagggtaggtgttatattttctgcattttt

SEQ ID NO: 323985 - DNA, 122 bp, Homo sapiens
gtgagtgacacacggggatgaggcggcagggagggtggcgagcggcgcggagggcacatccgtccctcccatgggtacacgctgcacagtctccacgggggaagcgggttgctgtcacatta

SEQ ID NO: 323986 - DNA, 122 bp, Homo sapiens
ctgcagtaggcacagaaggtccagttccattttgacccgccccgccgcgcggcggactcccgcgatgctcctctggtcacggacttctccagagccgcttccctccggtctccaccgctgct

SEQ ID NO: 323987 - DNA, 122 bp, Homo sapiens
cttcactctcttttctttctggaatttccacaatgggtattagtctgcttgatggtgtcccgcaggtctcttaggctctgtttatttttcttccatctttttcctttctgttcctcaaattt

SEQ ID NO: 323988 - DNA, 122 bp, Homo sapiens
ttatgtctggtgaggtcccactttctggttcatagatgttcacttcttgccgtgtcctcacgtggtggaaggggtaagagggctctctctccagcctcttttataaaggtaatcatctcatt

SEQ ID NO: 323989 - DNA, 122 bp, Homo sapiens
gctcggaactgccgacccgagtgcttcccgcagagggctggtggtgggagcggagtgggtcgggcggggccgagccgggccgtgggccgtgtgggggccgggcggcggccgggccggcggac

SEQ ID NO: 323990 - DNA, 122 bp, Homo sapiens
agctgggcgggcggcgagcgttgctgcagcaggccctgcggtgtggcgaggagctggttgcggccggcggtgccgtcggcccgggagcagacaccgtgcacctggtaggcctggcggagcgc

SEQ ID NO: 323991 - DNA, 122 bp, Homo sapiens
cgcgctcagagctccaacagggctgggccgcggccaaggagccaggagggtgcacgagaacgtcccatccagggacccacggatacttcgttcctgccagggtctcctttgggccgacagag

SEQ ID NO: 323992 - DNA, 122 bp, Homo sapiens
ccaccacacacagcctacttatttatttttaaagacagcatcaccctatgttgcccaggccggccttaagctcctgggctacctccccagtaactgggactacatgcatgtgccaccattcc

SEQ ID NO: 323993 - DNA, 122 bp, Homo sapiens
agacttgatcagcaaatatttatgtagattccatctcaaacacaaaagacggagcaggggcgccatgtctgagcaatgacacagttcattgataaccagccacatgagatatcataaatgac

SEQ ID NO: 323994 - DNA, 122 bp, Homo sapiens
tctgggaaagttccccagctgcacttctgggaaatgcagaggctgcctgccgctttctttcgcagttttgcggcccaaggcttgggcgaatcagttcacatcaacacccctactagcctctc

SEQ ID NO: 323995 - DNA, 122 bp, Homo sapiens
gctgtcctccacagtggccgctctcttttgcatttccagcagctgtgcaccgggttccgacgtctaccctcctcgtcaacacttgtcagtttctgtccttttggtcctggccagcctaacgg

SEQ ID NO: 323996 - DNA, 122 bp, Homo sapiens
agggaagagaaatacgtcagttactctaacaagaagaattgacttccttctctgcagagccggctctggtctcttctcttgaagcagatgcgaaggtaggatgagaaggcatggctggccgt

SEQ ID NO: 323997 - DNA, 122 bp, Homo sapiens
tccacgttcccggggttggatgtggaaggcagctaccccgacgggtgtgctctctgcatacgacgggtgctaacactagcatcacagatgcagtgttattagcactacagaggttattgtca

SEQ ID NO: 323998 - DNA, 122 bp, Homo sapiens
ggagtctccgcggcccggagaaggcacagaggcgcccctgagaggcgcagctggaacaggcgatgcacgggttcggatctggccggccaaccgagcccagcggtcgcgaaaaccagagtcgc

SEQ ID NO: 323999 - DNA, 122 bp, Homo sapiens
aggacaggacccccaaccagtagagaaatgaggttcccgaacagccatgaccacagctggcgcagaatgggcaggactcagagacttgtaactcagaaggtcaaggacaatggctgacttga

SEQ ID NO: 324000 - DNA, 122 bp, Homo sapiens
gcaaatccatcacgtagcaaagcaggacttccgcatgctttccgacccacgccgacatctcgggtgtgccaaacaatctacctctgcgcaagaactctccagaggattgggtgggcaagcct

SEQ ID NO: 324001 - DNA, 122 bp, Homo sapiens
aaagttacttctgtacattgtattctctctacatgagtcgaggcctttaaaggcatccaacgtagaaggtactgaccccaatcatgcatggtagccaaagtgagaggattcagagctcagga

SEQ ID NO: 324002 - DNA, 122 bp, Homo sapiens
ggagagtaggggtggggtgctgaggggcagagggaagtgccgcaaaccccctggtgggcgcggtgccagccccccaggccgattcccatccagttgaccgagcttgtgctggtcaccgcggt

SEQ ID NO: 324003 - DNA, 122 bp, Homo sapiens
gcaggcgccaggagccgcaaagctgggcagggctggcgccgcttcctcccgggcacccgccgctctgtcgctccgggcgcccaggctcaccgggcatttctaaattgtaaaaagtttttatc

SEQ ID NO: 324004 - DNA, 122 bp, Homo sapiens
ctggtccctgccctaggacgggcaggccctggccacgcctaggctgcacccgatggggagcgagaaaggggaagtagtgctcagtgccctgccgtccagcccagcccctttccagcaggaag

SEQ ID NO: 324005 - DNA, 122 bp, Homo sapiens
gcggtccagtatgtctcccgaggaggggcggaagcccgggagccgccctctgaggctgggcggggtgaaagaaagcttgccccagaggacttaaacaggcaagaaggacttggttaaagact

SEQ ID NO: 324006 - DNA, 122 bp, Homo sapiens
aatttttttagcatttggaatcattctaatggacttaacaagagtgtactttatataacccgaggggaaaagcaaactcaaaattttgaatataaaatgcagctatcagaatgcttaggcaa

SEQ ID NO: 324007 - DNA, 122 bp, Homo sapiens
acagtgataaaaatgaagaaaacctgcattgctctcaacaagagcattttgttttaagtgcgctcaaaacaactgaaataaatagactgccatcagcaaatcaaggctcaccatttaaatct

SEQ ID NO: 324008 - DNA, 122 bp, Homo sapiens
tggttaactgtgtgtgtggaggcagtggtggtggtgggggcggaggtagtttagaattcccgtatgcctctgtgttcacttagtcattcagaaagtatttatcgagtgaccgtatgccagga

SEQ ID NO: 324009 - DNA, 122 bp, Homo sapiens
aagtagtgtatcagctcattgaatgtattaatgtgtgacttagttctcccttttttgtcacgatgtttaaaattttttttgttgttctccaaaagctatctttttccagatatgctatggta

SEQ ID NO: 324010 - DNA, 122 bp, Homo sapiens
gaggcatgacctctgattgccactgtcacctgggccctgctctctgaagtctctgccaagcggggaggtggccgggggagggccctgctctgtgcagcctcccctcccccggcccgcagagt

SEQ ID NO: 324011 - DNA, 122 bp, Homo sapiens
tttgagaatttctttctttttaaaattttatttttctatttcttggagtccagacacagccgaaaagctgacgcttgggagattctcttttcaccaatataactgacatcacagagttcgtg

SEQ ID NO: 324012 - DNA, 122 bp, Homo sapiens
tgggagtgtaagtctagacccagggttctaggcaccaactggaacagagcaaaggggtctcgctgcccaatgtctgttcccacccaggcccccactgcacactctctctctgtggcgccctg

SEQ ID NO: 324013 - DNA, 122 bp, Homo sapiens
gcagccccacacggaggcgctgggagactttcctcccagcagtgtcctgtcactgcattccggcccctgcgtttgtaggcagtgatgtcacagagtgccttcatgctcctcgggtctccggt

SEQ ID NO: 324014 - DNA, 122 bp, Homo sapiens
cacacaggttggtgtcttcaaagagttgcaccaggtaggcctcgctggcctcctgcagggcgccaatggccgcgctctggaagcgcaggtccgggctgatggcctgggcgatctcacgcacc

SEQ ID NO: 324015 - DNA, 122 bp, Homo sapiens
ggcagcccgcggcccaggtctgcaagtgggagctgggctggggtccccatgctccacacacgcgtctcctctcccccagccctgccgcttccagggccctcggtgacgcccgctccccgggc

SEQ ID NO: 324016 - DNA, 122 bp, Homo sapiens
cggggttgttcctgcctgttcggggttgtttctgcctgttcggtgttgttcctctctgttcggggttgttcctctctgttcggggttgttcctctctgttgcgggttgttcctctctggggt

SEQ ID NO: 324017 - DNA, 122 bp, Homo sapiens
atggttacatgatttccttctgtgcgatcatcagagtcactcgcagacctggatggtgtacggcctacaatgcacctaaaccacctagaggagcctcttgctcgtgggctacaaacctgccc

SEQ ID NO: 324018 - DNA, 122 bp, Homo sapiens
ggtccgggcggtaggggccaacctggccccaaagctcgctggttaggcctctgagcgggccggtgtcatctcatgagccatctctccttgtccataaagtagggatagccctggctgacagg

SEQ ID NO: 324019 - DNA, 122 bp, Homo sapiens
tggggccttggcgacaaccgcggggcccagcggttcctgtgggtgctgacaggagcctggcggtgagtgatggaggaggcggttgtaaaataggttaccgtcgggcgcccggggttcactct

SEQ ID NO: 324020 - DNA, 122 bp, Homo sapiens
gcgtgagagacacacgcaggcagggctgcagttccgggcaggccttgggggctcaagatgcggctccccagggcgagtgctggggtcccggggcaggcgggcggctggagcgctctcgtggg

SEQ ID NO: 324021 - DNA, 122 bp, Homo sapiens
tctggtcccctgaaggcaaaacccacaatccacagaaacagtgccgaagtgcatcacaagcgcttaaaaccaacaaaaacacatgaagaacatttaccttgcaggaaaaaagctgtccttgg

SEQ ID NO: 324022 - DNA, 122 bp, Homo sapiens
aaaaaaagaaaaacaagcaagtttctgagctcaccctatacccgctgaacagaatgactgcggtggcgccccagaacctctcacaggcctctcagctgctgctaatgcccgccgaagccccg

SEQ ID NO: 324023 - DNA, 122 bp, Homo sapiens
aggtcccacctcctgcgccgccctcccgtgccgccctggcagggccgagcgcagagcgtgcgcgctcgggttgcaaagtttcagctccggttgctgcaaaccgaataaaagagagggcgggg

SEQ ID NO: 324024 - DNA, 122 bp, Homo sapiens
gggctggcggtgcagccagcgggagcccgaacctccggcacagcagggacaggcgcctggcgtagaggaaatccctcctggactggccgagctcctgccacgcctcgtccatgttcacgttc

SEQ ID NO: 324025 - DNA, 122 bp, Homo sapiens
tggtgtgacagagcggagaaaagctctctaatctcccagtgcctgcctctgccgctcagtcgctcccctccctcccgcctttcctgcctcctcgcgcgctccctctcctttgcctttctctg

SEQ ID NO: 324026 - DNA, 122 bp, Homo sapiens
tagaccaggactcccagtcttagtgcaaaatatatgcaggaaagagctgcgccgattggccggcacgccactgggaccgccccctactcccttccaggtcctcccgcttccctgcttccccg

SEQ ID NO: 324027 - DNA, 122 bp, Homo sapiens
cgagcttagaaaaaagaagcaattggtagaaggctttaattaaggcaaagagctgtaaggcgaagttaagaaaatgtaggcacttaaaaaatgcaggtaactttcataagggcttttgggga

SEQ ID NO: 324028 - DNA, 122 bp, Homo sapiens
atctgagaatgtgttgaataaggcaagagttacaggtttttcctgaacccttttctggcgcgcttccttcctgaattggaaactggcccttcctggggaacatttgcatttaactttgtata

SEQ ID NO: 324029 - DNA, 122 bp, Homo sapiens
ctggcttgtcttgtcagtcactggggcggaggcagcggctgtagcggggctgtagccgggcgttgagcacagcgcgggccaggccgaacggaagggacctgccacagcccctcaactccacg

SEQ ID NO: 324030 - DNA, 122 bp, Homo sapiens
ggagctggcaaataaacaaatccacaaacaaattatccgtgtgctccggagaggcggcggcgtgggcggcggcggagagaaggcgccgggcaaggcgagactaggcccccgcggagcggggg

SEQ ID NO: 324031 - DNA, 122 bp, Homo sapiens
taaggtgctttttctcaggccaaagagccataatagtttaaatttcccggtcctcaagagcggaccgggtgggcaggagaggaccctggggtggtgatgtgtaaactgtattatgcacttta

SEQ ID NO: 324032 - DNA, 122 bp, Homo sapiens
gagctcgggggaggccggattccctaggtctgagccgaccctcccggccgcccggccgggcggcagcgaccgcatccattcctttgtaagttgcaccggcctcaggaagtcgatctgggccc

SEQ ID NO: 324033 - DNA, 122 bp, Homo sapiens
agattgctaatggggtatgtagtaagttgaggtaatgcaacatcatctttgaattctgtccgttcatttctgtgactctttggagttgatgatttggagagaaagttgagagtataaacatg

SEQ ID NO: 324034 - DNA, 122 bp, Homo sapiens
gatcagctcgtgtgagcaccgagtgtggcacacgactggcctcaggaccccttaagtacccggcgcaacaatgggcgcccccctcccttgccacctccgcccccgcggcagcccgggtgaat

SEQ ID NO: 324035 - DNA, 122 bp, Homo sapiens
agccactgcacccagcccagacatccacttcctttttttttttttaaaattttttatttccgtaagtttttggggaacagttggtatttggttacataagtaagttctttagtggtgccaga

SEQ ID NO: 324036 - DNA, 122 bp, Homo sapiens
agcggcacagaaagtacttactgtgcagggaacgcggaaccaagatggcggcagaaagaccgagcgagagcgtgacccacgcctgttgcagaaggaagcctggagcggagggggtgggacta

SEQ ID NO: 324037 - DNA, 122 bp, Homo sapiens
tggagtcagacgttttctccctaggcgcgatcacgtgagccagggacagggggcggagcacgctgcgcggtcacgtgacggccggcgtgggcggggctgcggactggcgcagcctggaggga

SEQ ID NO: 324038 - DNA, 122 bp, Homo sapiens
ggaaacatttatcttggtgggggcgcccacccctgcgcccgcccctccgcccgctggccacgccatccatcacccgagcccagactcctgtggctcattcgtcaccggccctgacaaatgcc

SEQ ID NO: 324039 - DNA, 122 bp, Homo sapiens
tcgtcttgccctgtggacgtgccctaaccacagcctccggcctctcctagcttctctggacggccgccctggggaccgggtgaatctctcctgcggaggagtctctcatcccatccgctggg

SEQ ID NO: 324040 - DNA, 122 bp, Homo sapiens
gtggacaggaaacagtgacgatcatctgcacgtgccatgagtggcttgtaagggaaagttcgttagattcttcagggcagcgttccgtgccagggtcttagaggcagcaacacgagaggccc

SEQ ID NO: 324041 - DNA, 122 bp, Homo sapiens
ccgggacgcctgggtccctgatggggtgagcgtcaagcctggacactgggtgctgggtcccggaatctgggctggtggtggggtcaggaggacactggctctgccttccctgtttatgcggc

SEQ ID NO: 324042 - DNA, 122 bp, Homo sapiens
gcgtggaacctgacggggtccctcacggaggtgttctagggtctccgcgtggtcatgccccgtgttcttgcactcattttctccaacaccttctctcggccctgctacttgccccggtgatt

SEQ ID NO: 324043 - DNA, 122 bp, Homo sapiens
agttgctggcctgacatcagctgctcttaaataaggatccccgccccctcctgtgttccccggtggagctagttgaagaggagtcctcctgttcgtgctaatttagagcagaagcagccatc

SEQ ID NO: 324044 - DNA, 122 bp, Homo sapiens
ccccccaccccccgccctctcccagggcccagagccccggaggctgccagccccccttgtcgctaggtccccgctgggctctcccgccaacctaagacccgccccagacaaggaggagggcg

SEQ ID NO: 324045 - DNA, 122 bp, Homo sapiens
ctgccatgatcccagtccggggtttctctaccaaatccacgtggaggcgcaggccagaggcgcaagttaatgacgcagccatgcgcgttggtggcagttcccgccccttaaagacccaagag

SEQ ID NO: 324046 - DNA, 122 bp, Homo sapiens
ggatgcagaatccgcccctgcgagcatcctcttcctcctaggctctgaaggcccggggagcgtgagcgatgcccagctgcacccgggcagggctcgcctttgtttgccagtaaggaggagag

SEQ ID NO: 324047 - DNA, 122 bp, Homo sapiens
cctgccgttggggcgacgtcactgtcactacactgggagtcagcggaatgagggcactctcgcctctcttcctccttcctccaattccagaaatgaggcccgggagcccaggctgatccaat

SEQ ID NO: 324048 - DNA, 122 bp, Homo sapiens
cgtcggaggtggccacacctggcctgggggcgctgggggtccctgcgtccaggtgagctgcgcctcggccaggggtaagggtggcagtgccggagagttagtgtcctgcgagcgccccggac

SEQ ID NO: 324049 - DNA, 122 bp, Homo sapiens
gctgggcctgggtttgagatgtgcccccggggcagatgggctccctgggggaagggttgccgagggtcccaggcctgccacagccgggccgccccagccaggctaccccagcagacgccccc

SEQ ID NO: 324050 - DNA, 122 bp, Homo sapiens
agggaaatgagcagtaggcaacctaaaaggaaatctgtgctcagaagggagctgtgagctcgacgtgtagatctgagggtcatcagcacatagagtttagaagacaaggagtaggcaaccaa

SEQ ID NO: 324051 - DNA, 122 bp, Homo sapiens
cgtcggtcatcatgctccgcgccctcaggcagtcagcgaaacgccggaaacgcctgcagacgcctgcagacgctccttgtgtttcattggctacccgtgcagccctgggccactcacggtgg

SEQ ID NO: 324052 - DNA, 122 bp, Homo sapiens
ggatagtgccaagggtgttggggataggtcaagcaggctgtgatggagtgggggccagggcgtctcgtgtctcggctgatgccctgagtggttttgaagggaatgagaattcagatttaaat

SEQ ID NO: 324053 - DNA, 122 bp, Homo sapiens
gcagggaggactgaggtgtgccgatgaatactaagaggaaagggaggaagcctcagcccccggccagcagagcgcaggcctgggcatccatgaatccgcggcacccaagttttatactctta

SEQ ID NO: 324054 - DNA, 122 bp, Homo sapiens
ccctagcgccgcgatgcggagcacctactgcaggagatcgggggcctgggacgcgctggccgaggtgtgatcggaccccaggctagccacaaagggcacttggccccagggctaggagagcg

SEQ ID NO: 324055 - DNA, 122 bp, Homo sapiens
cccccaagaagggagacagttctgctgaagaacagaaattggccacccagctgacaggaccggtcatgcccatcaagaatgtaaggagaaagcccgagtcatcactgagaagtagaggaatt

SEQ ID NO: 324056 - DNA, 122 bp, Homo sapiens
gttacatccggtctgcttttgaatgtatttgaattcttttggaaaccatttcccgcccctcggagactctgagggaggggcgggagacccaggaccctggccgggttgggtttggcgttggc

SEQ ID NO: 324057 - DNA, 122 bp, Homo sapiens
ggctgaggattggctgactctgatttagcatcctaaaacttccggttccagagcttggctcgccaaagaccctccctcgagggagagaaaccacagcccccagaattcagcgggcctctccg

SEQ ID NO: 324058 - DNA, 122 bp, Homo sapiens
cggctggccaggcaggtaagcaaccagcggtgcgtgggctcagaccttgcgtcccctgggcgccgcgccaccccgctccgtccagggcggcgagggctcaggtctgcggccccggcgtctcg

SEQ ID NO: 324059 - DNA, 122 bp, Homo sapiens
ggctggacatggagcctgtggctgctcggtgtgggtggtgacactcttggtgacgtccctcggtcgtcaggactcatttccccggtgttggatgcagctcgaggacagcagaggggcccagc

SEQ ID NO: 324060 - DNA, 122 bp, Homo sapiens
cacccttaggaaaattagtgactggaccaaaggggttttgatcaaacaaaagtgtacttacgttagatttgcaaggctgaaattgcctagtgatcatttccattgcagatatcatagacaat

SEQ ID NO: 324061 - DNA, 122 bp, Homo sapiens
agcaaagctccgaggaagttggtccttttgttccactatttatagattgcgtcaacattgcgaaaaggagaaggcggagcggtggcccctccccctcccctccccccgccggctcctgggag

SEQ ID NO: 324062 - DNA, 122 bp, Homo sapiens
aggggctcctcccgcgcctcctcctcgcccccctcctcctcctcgccctccgcgtagggccgcttctcgtctgcgcacttgttccgcggcggccacgtcatcttgttctccttcttgaggcg

SEQ ID NO: 324063 - DNA, 122 bp, Homo sapiens
tgggggggggggggtggggccgagagagtggggattacttcagaaagttctcaagacgtccgccagcaggaaggaaaaacaaacgaacaaacccagaggccaaattcccaattccccctcgc

SEQ ID NO: 324064 - DNA, 122 bp, Homo sapiens
tgtgtctggcgtgctgtttgaagaaggttacagcgtgtttagagatttgcaaagctctgccgagcagtaaagattagaaaggcctgcctgagatttgtcaaatgacttccggtagcagagcc

SEQ ID NO: 324065 - DNA, 122 bp, Homo sapiens
acctcccgtggcagggcagtccacctcggccacaaacccagccgccacgtacgtgtggtccgtgtccagtctccaccctgtcccatgcgttggtgtgtccataggctggtgtgtccacggct

SEQ ID NO: 324066 - DNA, 122 bp, Homo sapiens
ggtgtctggccccggcccagccctccctggtgatgaccctggggaccctggtggctgccccgccctccaggtgctgacctgtttcctccaggccctggggcagccccaggcgcaccggggct

SEQ ID NO: 324067 - DNA, 122 bp, Homo sapiens
cttacctcggtcaggaagcccccttcacctacacgcagcggagaagcgcccaagcaacaacgtctgcacccaaacccagtcctcagaaccgcagacgtggccctgcgtggcttccggctcgt

SEQ ID NO: 324068 - DNA, 122 bp, Homo sapiens
cttgggcagacgcctgtggcctgtcggatgcggcccacatcgagagcctgcaggagaagtcgcagtgcgcactggaggagtacgtgaggagccagtaccccaaccagcccagccgttttggc

SEQ ID NO: 324069 - DNA, 122 bp, Homo sapiens
gagcccggagcaggacacagcgactctttcaactgcgtcccgacaaacggtcagccccttcgctcctgcagtttatccaagctcaggaggagctttctaaagagaacacagggagacagctg

SEQ ID NO: 324070 - DNA, 122 bp, Homo sapiens
cagctctccagcctctgatgccataggagattaaaatcctattatctatcaggtttggttcgttcacttactaggtatttattgactttctatgatgtgcaggcacttggcaaggtgccggg

SEQ ID NO: 324071 - DNA, 122 bp, Homo sapiens
ccgagctaagttacgtctcctctgcccaaatcctgtcaatgcagcaccgtgtccaccatgcgccaagggagcctgctgggctgagatgcacctgtttaggcagcatcggggagcgatgttcc

SEQ ID NO: 324072 - DNA, 122 bp, Homo sapiens
gagcatattacagctcaatatcatgcacatacctacgctactcaaagaaagcactggcagcgtcacatgtaagaaaccaaaaaaaaaaaaagataatcaattctgcatggcatttaacattt

SEQ ID NO: 324073 - DNA, 122 bp, Homo sapiens
aaggactgtgccatgagaggttctcattcggtaaacagtggccctcccagaagtggccgccgacctgccagtcaatgaagttatcctccgggagctgggaagaaggggcgcctcgcggggct

SEQ ID NO: 324074 - DNA, 122 bp, Homo sapiens
cactgaacacccttgggccggggtcgtttggagccgggctgggtgcccaaggacccaggtcgtcaacacccgagtgcccggtggtcaacggctcggagtggggcctcgcggcgccactaagt

SEQ ID NO: 324075 - DNA, 122 bp, Homo sapiens
tcggggaaacccctcatgggcgtatttggagcctccgggcccggggtgatatttagggggcgtctgcttttgagacccttaaggggtgccgtttggggacttcggggtgggatttgggagtc

SEQ ID NO: 324076 - DNA, 122 bp, Homo sapiens
ctccgcccccatccctccctctccgctcccctcacgtgacccacactgacactccgcctgcgcgagatggccgcttacctgcacgcatgcgcagcgagctaccaatcccacccaagaaccga

SEQ ID NO: 324077 - DNA, 122 bp, Homo sapiens
cttggggcatggaatgagcacggtagaaaatgcagcgagggaaatgtcagttggaatcctcggaagaaatcaggcagaaagttgaccttttggcacttgcagtgcaatggaaggtagcgccg

SEQ ID NO: 324078 - DNA, 122 bp, Homo sapiens
cccagccgctgacccccaaaagttggtctgcagttatattaatttgaggttgggcctgggcgctgcaagtaggctgaatggaagcttcacctgcccaccaagttttacattgtaagaactga

SEQ ID NO: 324079 - DNA, 122 bp, Homo sapiens
gccacttctgcttttccactctttaatgaagctctcctggctgccttgtcccgcccttttcggggcccacctcccagagggttgggcaagctgcctcatcctctgcccacaagcaagagcgg

SEQ ID NO: 324080 - DNA, 122 bp, Homo sapiens
cacacacacacacgtcggtccacacgggatgctccctctcactttagtgaggaacattcccgactcccagcgatcccgacctccgcctcccatgcgactgctcgggcagactgtctcacccg

SEQ ID NO: 324081 - DNA, 122 bp, Homo sapiens
cagccaatcagctgcgcagagctgcatagctggaccgctttccattctgagtagcaacaacgtactaatttgatgcacacatggatgcctcgcgcactctgcaaattcatcacccgcatctt

SEQ ID NO: 324082 - DNA, 122 bp, Homo sapiens
atgcactccgcgctcaggctggaagcctgggtgtctgggtgcctttccattgcctctctacgccccacccctggcctttgcttgggcttctagacacctttcactgcactcactgtcttctc

SEQ ID NO: 324083 - DNA, 122 bp, Homo sapiens
gccaaagcccctggtcttcccactgcaccacgaccacctacggcattgccacggggaagccggggagacgtggcacctcgccccacaaccttcccaagtacccgtgcagctatcattaccac

SEQ ID NO: 324084 - DNA, 122 bp, Homo sapiens
ggacgcctccaacctggacgcttccgaagccccgcttccaggatcgccctgtcctggccccgccccaggacccgccaacctgaactctccccaggacctgccccaacgacgcttatcctggc

SEQ ID NO: 324085 - DNA, 122 bp, Homo sapiens
ccgccaacctaatgactggcacgatgcatgtcttttgcgaagcccttcccaccttcccagcgctgctctgtgccccgcacagcccggagcgcgcagtcctggggatactaagaagccgacta

SEQ ID NO: 324086 - DNA, 122 bp, Homo sapiens
ggtctctggacctgcagcccgccatgcctgagcctcccaccccctccgtgggctcctgtgcgtcccgagcctccccgatgagcgccgccccctgctccaaggtgccccagtcccatcttttt

SEQ ID NO: 324087 - DNA, 122 bp, Homo sapiens
tgcggccctgccaggtccccacacacaggcccattcgcacacaaaaatcatctttttgcacgccggcgggagcagcggaagtcattaacatccgcggttgtgctgcaattaaagttaggcct

SEQ ID NO: 324088 - DNA, 122 bp, Homo sapiens
tggacggttatgtggccgcgtggggttggctctgcccagggccgcggtcactgcacagaacgccctgcacgtaaggggctccgcctgggtaagaccccgcccagctgggcaggaggagggcg

SEQ ID NO: 324089 - DNA, 122 bp, Homo sapiens
ttgaggtatgcatggtcagaagttagaaactaaccgaatcttgtcattgccaggaagtttcggggttctgtgactggtggccactgatgttcctgtgttcctccattccagctcctaccttg

SEQ ID NO: 324090 - DNA, 122 bp, Homo sapiens
tggtgttgagagagacttgctcatgttcttttccttccctcttttcctctgcagcttccccgccactgccacccgctccgaggcatgccctccaccacggcccggccgcaaggcacctccac

SEQ ID NO: 324091 - DNA, 122 bp, Homo sapiens
cactttcacagagcctgagattccagcccctatgtcagagctcacagagactttggtctgcgccctggggttgtctgtgggcctcatgggcattgtggtgggcactgtcttcatcatccaag

SEQ ID NO: 324092 - DNA, 122 bp, Homo sapiens
ccaggcattggaagagctgattggttcccggacgaaccaatcaaccagcgaggccgtgcacggataggggagggccaaaactaccgaggggatggggttaaaggaaaaggcgcaggtgtgcc

SEQ ID NO: 324093 - DNA, 122 bp, Homo sapiens
ctgataaaatagctagtcagcccgcgcgtggcagagatgaaactcgggcggtctggcccccgtgctttgggtctcagcagctccacgctccacatagatgttttgtaggatccttaaaacag

SEQ ID NO: 324094 - DNA, 122 bp, Homo sapiens
cccctcccctcctggcaagagtcggcggcggtggcggcggccgctgcagagattggaatccgcctgccgggcttggcgaaggagaagggaggaggcaggagcgaggagggaggagggccaag

SEQ ID NO: 324095 - DNA, 122 bp, Homo sapiens
tcatttaaaaaaaaaatctcttttccctaggtcgggaagatgaccttcaccatataatttcggactaaaatctgcagattgtaaccatagttaggaggcagttcttcattaaaataccctgc

SEQ ID NO: 324096 - DNA, 122 bp, Homo sapiens
ctggaaagtccgctcgcctctcgccggcaagggatgacgccctgggccttttgtaccactcgccacggaaaatggtcacacgcttttgtcctcaagccgaacactatcagaaacacggggtc

SEQ ID NO: 324097 - DNA, 122 bp, Homo sapiens
tggtttgtcctcttttccaagagaattggcagctgggcagtgctatctgcaaaaactgtacggagataaatgttaacccaggggctcccagaaatcacaggatatgaatggggctctaaatg

SEQ ID NO: 324098 - DNA, 122 bp, Homo sapiens
aaacacacccacagtatcaaacccgggtgaggacgtggagcaagtgcgagtctcacactccgctgccggggacataaatggtgcaaacactttgttgttgtttgagacaggatctcactgtt

SEQ ID NO: 324099 - DNA, 122 bp, Homo sapiens
gacacgtgtgtattttttttaacaaattaattgaacaacccaggtcatattgcggatagccgggagctggtttttaatgttctttttttttttctataaagtagatattcattcaatagaac

SEQ ID NO: 324100 - DNA, 122 bp, Homo sapiens
tgtccgatttctgtcaagtttcgttgagttcctgtccaagaagccctgtccagagagaaacgtctgagctcaagggcagcccctgatgcctgggaaggctttctggagctcttgccatctct

SEQ ID NO: 324101 - DNA, 122 bp, Homo sapiens
taatgggagttgtggtcccaccgcggtgcccgacggcccggcccgcgcgcatgcgcaccccgcccctctgcccaccccgccccgcccgcgcggcacagtaacagagaaacccggaggtggga

SEQ ID NO: 324102 - DNA, 122 bp, Homo sapiens
caacacgttcccagtcagactttgttaattctgccagtgccttagggtggaacagctgctcggccagcaagaagcctccatgcagaatagtcatttcttcacagatgttcaagggtcctgca

SEQ ID NO: 324103 - DNA, 122 bp, Homo sapiens
ctccacggtaaactccttcctatttaggatgcagctggggctggagccaggtctggctatcgtggtcgccgctcccctcacaccccccatgaacgcttcgaggggctcacggtgcttaaggc

SEQ ID NO: 324104 - DNA, 122 bp, Homo sapiens
cgttcccacgcgcaccccggttgcgcccccctctggtgtccgctccactggggactccttcgccccctcggagtcgctgctgcagatcgcatcgccccctagttaaaatcgccccagaattt

SEQ ID NO: 324105 - DNA, 122 bp, Homo sapiens
cacgttcctccgggctgcatcctgaagaattaaccgtaggagaaacaataaaggtcctcccggacagccatgagcagccctggtgctcctcggaagcccccgaggcgagaagagaaggccac

SEQ ID NO: 324106 - DNA, 122 bp, Homo sapiens
agaaccaaccaatcagggggagggaggggccgggctcgctcagtccgattgggcggcgtccgcacagtcacacagcgctcaggccacacccactccgccgccgctggccccaccgggcttgg

SEQ ID NO: 324107 - DNA, 122 bp, Homo sapiens
gcactttagatgaagtagcctttatcgtccatttaatagaggttgcctcctattaccaagcgtggcagagaaaagagtttccacaattaggtcttgactttctgtccctctttttgaagagt

SEQ ID NO: 324108 - DNA, 122 bp, Homo sapiens
aaatagtttcgttccgagatgcctggggagtttctctggcaacgaggcatttccaacaaacgggtcattctgtcaccaggggatggtctcagtccacggcacagagcgacgtgcccctggca

SEQ ID NO: 324109 - DNA, 122 bp, Homo sapiens
attgatttaggccagtgggagaagtgttggagtatctgctctggagaaaatgctcttttccggctagttttgttaattatgtttctgaaaaggggggctagattggatggtctttaccaggt

SEQ ID NO: 324110 - DNA, 122 bp, Homo sapiens
cgcagcctgggaggcagggaacggtcagctccactactcggtctccgaggaggccaaacacggcaccttcgtgggccgcatcgcgcaggacctgggactggagctggcggagctggtgccgc

SEQ ID NO: 324111 - DNA, 122 bp, Homo sapiens
atacacctgccaagttgaaatttaatttaagccaatcttgtctagatgaacttaagagaacgtctcctaaatattttattgcagtagtgtagcatgattgatagtatgctattctcttgaat

SEQ ID NO: 324112 - DNA, 122 bp, Homo sapiens
taatctttttatgatgtttgttctgctgaatccaccggacgcctcagacacgggccctgacggcatcgccggcctgggggaggcgtggagagaggggaggaaggcgggagggctgtggggct

SEQ ID NO: 324113 - DNA, 122 bp, Homo sapiens
ccggcagccggcgaccggccctcaccgtccgccgggttgcgctctgcttttgcggtgaggcgttgaccacgcccatatgaattggagctctccgccagtaggagtttccggaaggagtttga

SEQ ID NO: 324114 - DNA, 122 bp, Homo sapiens
gaaaaaaatgtgtctgtctcatccacaatatgtgattgttgagtccctgagcctgggccccgtcctgggttctgtgtggggacagagtcctgttctgacactgggctggccctgggagagag

SEQ ID NO: 324115 - DNA, 122 bp, Homo sapiens
ttagcctagtttccccgcaggagctaccgcccattcaccgtctatgcaagcaccagctggcggcagcatcttttaggtacaagctgcagggaggcaaaagctggctggggggccgggagccc

SEQ ID NO: 324116 - DNA, 122 bp, Homo sapiens
gtgagccaggcctcaggattgctcctggagaccccagtccagcctggtaagtgtttctggcgtggggagagaacaggggcagttgggctgcctgaagcagggaacaagaccagagaaaactc

SEQ ID NO: 324117 - DNA, 122 bp, Homo sapiens
tattctttctaacttagcagtctctatagttctctcctgttctattggcccaataactaacggagaaaaccctaactgtaccttctaacattgagctgatgaaataagcatctgttgaaaca

SEQ ID NO: 324118 - DNA, 122 bp, Homo sapiens
cattactctccatctcccaggttccattctggtcccttgtcatggtggtggccactggttcggtgagggtttgtggtggatggcaaggagcaggctgcagggagaatacactggaatgagct

SEQ ID NO: 324119 - DNA, 122 bp, Homo sapiens
gcacaacgtctctaacgccgtcggagggcggcccccacctcccgacagcctggggtacaccgtgcaccctccagacagtcaggggcacacggggcccctcccagcgagggaggggacgggga

SEQ ID NO: 324120 - DNA, 122 bp, Homo sapiens
agaagagagcgtcctgggaagccagctgagagcacctctttctctttgggtcctgcagcccgtgggtggcagggcggtaaccccatctgcccagaaccaggctgcgctctcgggagggaaac

SEQ ID NO: 324121 - DNA, 122 bp, Homo sapiens
acagaatccaactggccatgggcgcacctgcagggctgctccgttcctctgaggagggcacgttcctgtcctgggtgacctgtgcggccaggcagaaaactgctaggacacacatcagatcc

SEQ ID NO: 324122 - DNA, 122 bp, Homo sapiens
tccctctcctgcttctctttctctactatctctttccactttctgcattcccctgtacctcgtctacccctggatttctccgtccagaatcactttctggtcccccaaatccctccaatctc

SEQ ID NO: 324123 - DNA, 122 bp, Homo sapiens
cgggagcccactcactgcatgcaaggcctggggcatgcagggtccacgtcagggccagctcgctgggggaacgcatgctgtcagcacgcagctaggacagagaccaccggatgttcccacct

SEQ ID NO: 324124 - DNA, 122 bp, Homo sapiens
ggctccaagccgctttttacggcgtttttcagctcgccattcacttcgctgtgaagatggcgtcgggcagcggggtaggtgttgtgtctgaggaggaggttttgcggggtggggaatggttt

SEQ ID NO: 324125 - DNA, 122 bp, Homo sapiens
ttcgggctctctggaaggccggggagaggccagtgtgggaggacctggtggggaggaggccgtgttacaaaccctgcgcggagctgcaccgctgctgccagacactgcgacgccgcgacctt

SEQ ID NO: 324126 - DNA, 122 bp, Homo sapiens
atgctgtggaagctgaggggcatgaggtaaaaagactcaggtttgacaaaaaggcgaagtcggagaaatagccagtcaagcgacttgcagcgaaatttcttcagttgtggtagaagaaacag

SEQ ID NO: 324127 - DNA, 122 bp, Homo sapiens
ttgaggccacagcctcttctccatcaccaccccagtatttcatgatttcacactggggtccggaggcagcctcctaactggcacctgcactttcagccttgtcccttcaaagcctgctacaa

SEQ ID NO: 324128 - DNA, 122 bp, Homo sapiens
aggtagtcattaatggtcaaggctgtgttaaaactcggtaaacctgtctaggaacggggccgtgaagttgtgcacggctccagacacagaaaacagaagccagaggaggctctcctagcggg

SEQ ID NO: 324129 - DNA, 122 bp, Homo sapiens
gcgtcgggtcgcctgggggagtggcgcccaggaaggcagcaagccgggtggccgcagtggcgtccctcactgaagcggcgtaccgcaggccccggccaacggccctcccctcagccgaacaa

SEQ ID NO: 324130 - DNA, 122 bp, Homo sapiens
tattcaacacttccaactatatgctaatgtaagtgttttgagcacaattaaggtgggctacgcttagctacgtttggtaggttaggtgtgttcaatgcatttcgacaaggtattttcagctt

SEQ ID NO: 324131 - DNA, 122 bp, Homo sapiens
caaacccacacacctcacaccagcactcacaccacccagtccagcacccaccatggctgacgcctgctgcaccaggacgtatgtgattgctgcatccaccatgtctgtctgctccagtgacg

SEQ ID NO: 324132 - DNA, 122 bp, Homo sapiens
aatgctgtaggtgattgcaaaaaccctctgcaaggatgttttcagtcaacacaagtgggtcgcttaatttttcgagtgaatgcccttaatggggggactttagctgcagtctcactagccag

SEQ ID NO: 324133 - DNA, 122 bp, Homo sapiens
tgtgtgggaaaggaaacgtggccgtacgctgccacggagctctaaggtgttcgtgtgggacggaagcactggtggaaaggccagaacccgtgggacacaccctcgagagccgccggcagcac

SEQ ID NO: 324134 - DNA, 122 bp, Homo sapiens
gaaggttcttaaatgtctaattagactggggcagtggagtccatcagagaggtcaggacccgaggccttcatgaatcaacatggaggtcccctcccattgactccttcctgtgttctgctca

SEQ ID NO: 324135 - DNA, 122 bp, Homo sapiens
ctcccgggaggttgagttgaagctacgttttgcttgggcttagcgggaacagtcacttcccgatacagttatgctatcgctagtcattctggtgtagaaatggcttccggaaacacccacct

SEQ ID NO: 324136 - DNA, 122 bp, Homo sapiens
aagaagaggccaccaggacacagacacacgtgcagggacaggtgggcgttcctgggacgccggctcggcactcacccaatgaggtcacggtgtcaagggagggcccgagttccagcaggttg

SEQ ID NO: 324137 - DNA, 122 bp, Homo sapiens
agtgaaccagactccgtctgcaatcccggcacctcaggaggccgaggctggcagatcactcgcagttcggagctggaggccagcccagccaacacagcgaaaccccgtctccaaagaccttg

SEQ ID NO: 324138 - DNA, 122 bp, Homo sapiens
gtgacctcagcgctgcgccccgaggcaggcaggctgggatggtgaattcgacaggcatagcgtgccccatgctgctcagtggtgactgggggcggctgcaagtgcccagagaggctgacaga

SEQ ID NO: 324139 - DNA, 122 bp, Homo sapiens
cggggcgtagcctccaaaaggcgagatgttccggtcggggaggccctgagcagaggaacccgggtggagagggcggggcctgaggagggcggagagctggggcgggtctcaggtgagtaact

SEQ ID NO: 324140 - DNA, 122 bp, Homo sapiens
ataaaccaccatacctggcccagtgacagccttatataaaaaataaatgttgtgtcttctcgtattttccctttttcttcctaaacccctgcctggttgaatgtgtgtggtgcctgagtcca

SEQ ID NO: 324141 - DNA, 122 bp, Homo sapiens
agtgccgggaatcatttcacgggagtccgctgggcggccagcagtgctaccgcctcatctcggtggagcaggagtgctgcctggaccccacgtcccagaccaactgcttccatgagcccaaa

SEQ ID NO: 324142 - DNA, 122 bp, Homo sapiens
gcatggcacagccaatgggaagggccggggcaccaaagccaatgggaagggccgggagcgcgcggcgcgggagatttaaaggctgctggagtgaggggtcgcccgtgcaccctgtcccagcc

SEQ ID NO: 324143 - DNA, 122 bp, Homo sapiens
gcccttggagatagatgaccaatagtgtagaaaacataagccttcataacaggaaggcagcgactgctctctgggtgtttacgggatctctctgtgttagattagaagataatatttctcca

SEQ ID NO: 324144 - DNA, 122 bp, Homo sapiens
gtcctttggcaattacaaagtaaatggccctaggggctaggcgtggggggatcgccctaccgtaggggagtgggggggcctcattcccacccttcctcggctctgcaggggtggctgcagca

SEQ ID NO: 324145 - DNA, 122 bp, Homo sapiens
ccgtgtccttcgcgtcccggcggcgcggcgggaggggccggcgtgacgcagcggttgctacgggccgcccttataaataaccgggctcaggagaaactttagcgagtcagagccgcgcacgg

SEQ ID NO: 324146 - DNA, 122 bp, Homo sapiens
acctcaggtgatctgcccacctcagcctcccaaagtgctggaattataagcataagccaccgcgcccagtccaatcattgatctggatactcatgcccattttagtttgtggtaggttatgg

SEQ ID NO: 324147 - DNA, 122 bp, Homo sapiens
cgggcccggagccgaggccaatggcagcccgctgccgccgctcgcgcagaccccgcctcccgaccacgggccaatcccagcccagcagcacccccggaccgcacgccgaccccgcctcccgg

SEQ ID NO: 324148 - DNA, 122 bp, Homo sapiens
tgtgctgggaaggagtcaggcacatccaagtagcccaccctttgtgaggccttctgccagcgcaggggcctttgggtcctgaaacaatgttctttccctctgattgtttccttcccccatcc

SEQ ID NO: 324149 - DNA, 122 bp, Homo sapiens
tgggtgcgcccggcctgcgcgccgttttgttccgctccgcggaaggcgtgtcccgggccacgccaaccagtgggctttgcacactgcaccactccagggctgatgtcatggcgcgaagcccg

SEQ ID NO: 324150 - DNA, 122 bp, Homo sapiens
cagctttctgcaggcgtttcttcacgagcagccagccaaaatcttagattcaacagcccacgctgaattcagtccttctgcttaactcccagctgtctcttttccttgttctcctgcttttg

SEQ ID NO: 324151 - DNA, 122 bp, Homo sapiens
aagaggcgtctgcgtgaagatcaatcatttcccggaggacacggactacgaccacgacagcgcggagtatctactccgtacgtgggggtccgggacagacgtggggagtgggtcaaatcgcg

SEQ ID NO: 324152 - DNA, 122 bp, Homo sapiens
caggacaccctggcagatccttcaccaaaagctagtgactttgcgaaagccatgcagccccgctctggccgggcccccggccatcccgtgctcccaaacagagtctccaaacacggtggact

SEQ ID NO: 324153 - DNA, 122 bp, Homo sapiens
gcgtgccctgagcctgcggccttggcagtgggcccggaagggtgggtgctgccccaaggtcgcatccaggccctcggaccctgccggggccagtagtgggcaagacgagactccaagagcgg

SEQ ID NO: 324154 - DNA, 122 bp, Homo sapiens
gccttcctggatgagaacttcaaggcctgcttccgcaagttctgctgtgcatctgccctgcgccgggacgtgcaggtgtctgaccgcgtgcgcagcattgccaaggacgtggccctggcctg

SEQ ID NO: 324155 - DNA, 122 bp, Homo sapiens
gacttcgatgagctcacacacggcgtttggaggcactaattaactccgtcaccctcatagcgccatctccgggaggccaaaagcgagtagcatcttttcacatccttttttaatttttggca

SEQ ID NO: 324156 - DNA, 122 bp, Homo sapiens
aagaggatgtgtgtgttgggggagggggcggtgcagccgcctttcctgggaggagaagcgcgggttcctggctctccacgcgcactgctttaatcagacccgtgcagcctcgagctggagtg

SEQ ID NO: 324157 - DNA, 122 bp, Homo sapiens
tgcgtcacaggaactccgggaaggcggggccgggatcccctcccgccgagtggcccggaacgcaacccccgagacccccagggccccgagggtcatgcaagtgaccagatcgagtctagaac

SEQ ID NO: 324158 - DNA, 122 bp, Homo sapiens
agcccagtcctaggagccctcagggcctcaccgatgccctccatgaaggctgggtagagtcggtccgtgaggagcggctcgggcagttcccggaagtacagcttgagcgtcccggcgatggc

SEQ ID NO: 324159 - DNA, 122 bp, Homo sapiens
cacgatgactaaacacgtcagtataaaatgagatcatgaagcatgctgtgcccagctctgcggttagttcacagtattttacaaagcgtcgtttccaaacgctcaggaaacaccagctacct

SEQ ID NO: 324160 - DNA, 122 bp, Homo sapiens
tggccctctccgcctctatctcctcttccagctcctcaattcgagcctgtggagggcagccgttcaccccgtgggcagtgggttcaccgcggggactctgattgccaagaacaggctggttt

SEQ ID NO: 324161 - DNA, 122 bp, Homo sapiens
aagcgcccattgagggcttgcagctgccagtgccgcttgcccaaatccgacataaagcctcgacttcagctccagtgaagaagacactactgtgttcttcctgagccccagtcatggctata

SEQ ID NO: 324162 - DNA, 122 bp, Homo sapiens
agccaatttttcctctcacaaaagtgttaaagagagccagacaaaacgacgaagctttcgcgatgagccgcattaaaatcgcggtttcccgtactcggagcagaggcctggcagggccgccc

SEQ ID NO: 324163 - DNA, 122 bp, Homo sapiens
cagccttctcgactcttcccgctttttccctttctcccttcctttcactccagcatccagcggcctaggcccagccttctcgttagggctcagactcgggctaggtatgggggagggaaggg

SEQ ID NO: 324164 - DNA, 122 bp, Homo sapiens
gacacctcgggcttgtagagcacttcacgcagtgcaaagcgccccccgtctatatcatatcgcctctcggtcctcctaaaagtcgtatgaggtaggcggcgttcccattcttttattttagt

SEQ ID NO: 324165 - DNA, 122 bp, Homo sapiens
agggtcccttcccagggaccctgggcgccgaagttaggggccacctgagagttgttggcccggtgggaagtgtcccttcctgagggcgctctcggcttctcagggcaagctgccttccacgc

SEQ ID NO: 324166 - DNA, 122 bp, Homo sapiens
acagcctagaagaagaaaaggctttgggcctggtgtggtggcataggcctgtaatcgtagcgctttgagaggctgaggcaggaagatagcttgagctcagaagttcgagacaaacctgggca

SEQ ID NO: 324167 - DNA, 122 bp, Homo sapiens
tgctgaatgaaaatcatgcatcaggcacctccccacaaagcctgccccagtcacctctgccggaagtggccactcctatagagaccccaagaatagggctttgttacacccctgggctgggt

SEQ ID NO: 324168 - DNA, 122 bp, Homo sapiens
gttttgtaatcacaagttgaggatgtggtcaagaatttaagatcataggctgggggttggcgtctgacaaactcacaaatgggctctggtctaggcagcccagagctctctctgccctaggc

SEQ ID NO: 324169 - DNA, 122 bp, Homo sapiens
gtaaacgaatcttcctttccagggaatcacgggttttgggaaaaggttgaggcgagcgggcgtctatgctggacaatgaagaacgaggggcaccgggagatgtgttgcctcctccttcctgt

SEQ ID NO: 324170 - DNA, 122 bp, Homo sapiens
taatgtctccctctgctcatgtaccttttttgcatgggtccaagacctatggaagtgggacgagttgaaaagaaacttggacttccttgtagaaagggccctttactaaccagtagtgagtg

SEQ ID NO: 324171 - DNA, 122 bp, Homo sapiens
ccatgtcttatgacccaggtgcactattcagtgacaagaaaacaaagcctgtgggagccccgcgtctgggttcagtccatgtggcctggggctgagggaggggaaggcatctgtgtgttgtc

SEQ ID NO: 324172 - DNA, 122 bp, Homo sapiens
cctggaacacagtgccctctgaggtgacgcccaggcaccccacggagaggccgggaagcccgttccccaggactccagcccctccaacgcctgagtctccaggaacccgggctcactcagaa

SEQ ID NO: 324173 - DNA, 122 bp, Homo sapiens
ttacctcgccgtcggctctgccaatcggtgagtccagaacaaagtcaggaggagcgatcacgtctaccagggcaactgcatcgtctttcagctgttggaaaacaaagcccagacacttggca

SEQ ID NO: 324174 - DNA, 122 bp, Homo sapiens
gggagaggaaaggaaagggtccctggctcggcaagagggcggagggtcgctgccctgcggcgtggagaagcggggctcggcgccgggcacaccgtccttcccgggggtggcagcggccggcc

SEQ ID NO: 324175 - DNA, 122 bp, Homo sapiens
ctggaggctgcactgtgacccaccacagccccatccgggaagttgtgaaacctgtccctacgggattgggtggctctggctccacacgtcagctcagggcctgctggaccctgacctgagac

SEQ ID NO: 324176 - DNA, 122 bp, Homo sapiens
aagaacaagacctgcaaggcgttgctcatgggggacaaggacttcagccccaagctcgggcggcccctgcccagccccagctatgtgcacccggcccttgtgggcaaggacaagaaggggcg

SEQ ID NO: 324177 - DNA, 122 bp, Homo sapiens
gttcaagatgccaagaacctgcacaccttcaacagttaacagcccacaggcagtagtttgcgactctagtagagaatgcatagggatttccattgaaaatcattttttaagccagttacggt

SEQ ID NO: 324178 - DNA, 122 bp, Homo sapiens
tcctttccgtctggcggcagccatcaggtaggctgcgttgaggatctttgctcttccatccgcctttgatcgtcttcctcttcagccatccaggtccggggaccctgcgtcctcggagatag

SEQ ID NO: 324179 - DNA, 122 bp, Homo sapiens
ggaccctacatcaggtaacttaatttcatttggtgtcatacatgttggttaaggtccatgcgccttttgctgtgtttacactcagaataattttaggggtttctccttaatgcttgcagtgg

SEQ ID NO: 324180 - DNA, 122 bp, Homo sapiens
aagtagaagaaagggaggggaaactggggagtggagaggctcccaaaagagactgagacacgaataatagcgactcctgaatagtcaacaatttgaatgggtggaggggcaggaaaagggtc

SEQ ID NO: 324181 - DNA, 122 bp, Homo sapiens
agttgactcttatactagtgcgttgggttttttttaattaactgcaaagcaggcgggccacgagggcaccgcttgggtcgtgccaccagatgagccaaatgagcaagatctccccgaagcca

SEQ ID NO: 324182 - DNA, 122 bp, Homo sapiens
ttccgggacagcgattggtgtagagcgcggtcactcaggcccagaaagtgcttcctgtgccgggggaggtgggtacagggaagtctcgcctgttggaactggctgtggggctgcggcggtgg

SEQ ID NO: 324183 - DNA, 122 bp, Homo sapiens
tttgatttaaatattgctactctttagggtcattgctctacctacaactcctccgtgccccgcttagatttatgttaatatgttgacaatattctccaaaacaagtaatccagagataactg

SEQ ID NO: 324184 - DNA, 122 bp, Homo sapiens
gcccagcgttccctcccgagcaggagccgtcgtctgtgttgcttccctgcaagtaccattcgccactgatgaccattcttctgttcctctgggagagtaagagggagaggatgtagtctgag

SEQ ID NO: 324185 - DNA, 122 bp, Homo sapiens
gggaagccctgctgggccagggcttagaggggctcacaagaaatcaaagcaagcattctccgcctctctcctacagccctgcatgcatcttctctgatcccttgcctgagtggggggtggca

SEQ ID NO: 324186 - DNA, 122 bp, Homo sapiens
gttagaggaactgcttttgtttgggagggggcaggtctagttactgtgcctactacaaaccgctatttcccagtggctgctgtggctatcctgtttagaatagaacctttctgtgcagtggt

SEQ ID NO: 324187 - DNA, 122 bp, Homo sapiens
agagaccagcagtgaccctaagccctgggggcggtcacttttatcaggctctgcgacccccgtgctcccccgtgctcggcctcgtcggtggcacttggcatgactgggagatcaagctcagg

SEQ ID NO: 324188 - DNA, 122 bp, Homo sapiens
cgtggattggatggaagcaggcactgaactttgtcggcaactccgcagggtgtgtgtgtgcgtgtgtgcgtgtgtgtgcgtgcgcgtgcatgcgcgtgctttcttgtgcctggtgtgggcag

SEQ ID NO: 324189 - DNA, 122 bp, Homo sapiens
cgcgcctctcccagtgctctggctggagacagtagcaggggctgtcttcctctgcgtcctcgtaagcacccagtttggggtggaagaggcaaaaagaaaacccaggaacgccccaccctatc

SEQ ID NO: 324190 - DNA, 122 bp, Homo sapiens
gctgctcgcccggccctctgcccggagctggatgggactgcagaactggaactaagcacccgcgccgggctggccgcagtcgcgcccccaggccctgagtaggttggagctgatcccaggtc

SEQ ID NO: 324191 - DNA, 122 bp, Homo sapiens
cgaaggggtgctccaccagtacgtacacgtccccctccacatccgccgccattgcggccgcggcattttcctgcaggcaacaaggaagagggccgcggaagtcaagaccactgagcccggaa

SEQ ID NO: 324192 - DNA, 122 bp, Homo sapiens
ttctcctttcccattctccgcacctgcacatgtgcatccctaaaggttccagtttggtttcgctctcgtcgcatggagccgttcccttttttgctgttgctgtatagcactcaactgaatga

SEQ ID NO: 324193 - DNA, 122 bp, Homo sapiens
agcctgagctaagacagtaagtaacctaaaacacttccctaaacacctctataaacttaacgcaagtgccggtcatgtttatgacactttgattgtgtatggttgtagcaatgtgaaaaatg

SEQ ID NO: 324194 - DNA, 122 bp, Homo sapiens
caactgcagctgtggggacacggtccaggcacagctgcacaacctggagccctgtatgtacgtggctgtcgtggcccatggcccaagcatcctctacccttccaccgtgtgggacttcatca

SEQ ID NO: 324195 - DNA, 122 bp, Homo sapiens
attcctgtacaagactcttgcttagagggagacagtgcctagaatttcccaggccagacacgccacccagacttgccaacagccagcctccctgccgtcccctgggacatgtgtggctgtgt

SEQ ID NO: 324196 - DNA, 122 bp, Homo sapiens
taaaaaaacctgcagtccctacaaactgctggaaaccaacagtcaggcccagcgcagtgccgggtctcccaacacaacatctgtgtgatacggcccaccatccaaggagccggcaaacacca

SEQ ID NO: 324197 - DNA, 122 bp, Homo sapiens
cttgggttttacccttcaaaggcggagcgggactgggccggccgcagctctccggctgcccggttcgtccccaggatgtgcagatagaggaggttttgctctgacactctggttctctgccc

SEQ ID NO: 324198 - DNA, 122 bp, Homo sapiens
taagcatgtcaaatggagattttatttcatcctgccttcagctgtcaacaaaagacttagcggctctccccagggagcaaggagacgaaacagtaggagaccttcagaggtcaaccttgaaa

SEQ ID NO: 324199 - DNA, 122 bp, Homo sapiens
aacagtggtgaacacatcacattttacagtgggaaaggccctgtggtcagtggacagtgtcgcatcacatgccacaatggtggaattatgaggactgacttccacagcaggagagttaaggg

SEQ ID NO: 324200 - DNA, 122 bp, Homo sapiens
aagacttccaccgccgaaagaatacaggccgggcctggtgactgcggagtgagggaaccgcgccaggcccacgaggccgctcgcgaccgctcccgccttcaggaccctggagagcggccgcc

SEQ ID NO: 324201 - DNA, 122 bp, Homo sapiens
gtccaacctccctatcattgattcctgcatctctaattagaatttaataccacaccattacgcaccgagcccctgatcctcccttctaaccagctccctgccctttaattcaatcacactac

SEQ ID NO: 324202 - DNA, 122 bp, Homo sapiens
gggcggggcttcaggggcctgacccgcccccgccccgcccctgtctcccacctcagccggcgagctccatgaggtgactacgtccggggttactccaggccgttcacctccgaccccgctcc

SEQ ID NO: 324203 - DNA, 122 bp, Homo sapiens
ccccgtagcaggcttgcccccaccccggaagcccctctgagcccaggcctggctgggccgcgtggccggtgtttcttgtggctcacgtgccccacagacagtgggcactccctggagcacag

SEQ ID NO: 324204 - DNA, 122 bp, Homo sapiens
ggggagcaggcgggctcccacccggtgctccgtgagatcgaggggagcgggttctgggtgcggatgcacgcgctgggcgggacgctggcagtggtacccgagacggggcggaaggagactgg

SEQ ID NO: 324205 - DNA, 122 bp, Homo sapiens
atggagtttggggttcggcctccttcggctggactcgggcatttccgttcatggagatgacgcttcggcggccttgcaggtcacttccggcgactttcgcggggccgggcaggaagcggagt

SEQ ID NO: 324206 - DNA, 122 bp, Homo sapiens
gggcaattctaacctgaattgaacaaagaaataccaatcacagaaaataaaaaatgaaaacgttaaaagaagaaaaaaaccccaaaaggtattaatagccagatgcaaagccaaaggtaaga

SEQ ID NO: 324207 - DNA, 122 bp, Homo sapiens
ggttggcaagaaaacttgggggcagggagctggttgaggacagagtgaaaacgcataagccgaccctgtcaagggaaggtgtatcccccgatcctgactcctccacccaggcgtgatgaggg

SEQ ID NO: 324208 - DNA, 122 bp, Homo sapiens
gagcaggccttcacgccccctggggggcacggccccgtcacaccacgggccaggccaccccggaactctttgcttgctccctgggggagtgaggccaagagggacagaccccagacccaaga

SEQ ID NO: 324209 - DNA, 122 bp, Homo sapiens
tctgaccaataggagcgcgaccctaatagttgctcttgtgacttttcccccttttggacacgcgttagccacttctctcttccaccggtcggtgcgctcctccgttactcacgcgtaaaaac

SEQ ID NO: 324210 - DNA, 122 bp, Homo sapiens
ttcaacaatcaaagcagaatttacattgattcctttttatctagcttctcccaaacagttcggaaaaaccctgatagagactggagaatttctgggactttagttccaattaaagatttgac

SEQ ID NO: 324211 - DNA, 122 bp, Homo sapiens
agtctcggtccctctgggaaggctccgggctcccgccactcgccggcgggctggcggagacggtaggggctgcatttcccagtctccaacccaactctggccgcagctcccacagaaggcga

SEQ ID NO: 324212 - DNA, 122 bp, Homo sapiens
actgacaggctccaggccacacaggctctggatttgacgactgccacacttcagcactggcgcaggagctgcttatggaaaagctgcatagatggcccaataaccacccaagacagaaagcc

SEQ ID NO: 324213 - DNA, 122 bp, Homo sapiens
ccaacttgggcgtctctgggcatgcacatgtgatccaggacatctaactgggggactcagcgtgggacctggaatgggaggggacatgcccaggtctctctgaccaaatatttctgaagatc

SEQ ID NO: 324214 - DNA, 122 bp, Homo sapiens
cgcggccgtcggccctgagctcatttcctggggcgcgcgcgccgggctatttcagcctggcgctgtgcaaacaggacaatttactgcggccaaaagggacccaaattacaatcgtatcacag

SEQ ID NO: 324215 - DNA, 122 bp, Homo sapiens
atgaggaccagattatacaggaccttctgggccatggcaaggactttgacttactctgagcgagccatgggaaagtttttagcagagaagctcctatgcttctttcagaggccagaggccca

SEQ ID NO: 324216 - DNA, 122 bp, Homo sapiens
gcttttgatatgtatatattaataatacctctaaagtgtttgaaatattttgttctcttacgtaaatgaatggtgttagcaaaactagggaacatattttttatcttagagattagattacc

SEQ ID NO: 324217 - DNA, 122 bp, Homo sapiens
ccccccgccaccgtgggttccagacttgggataagtaaacagcgggtggagcgaggcctacggacccaggccaggtgggagtctgcactcttcaaggggcctgggctgctgctcacgggtat

SEQ ID NO: 324218 - DNA, 122 bp, Homo sapiens
gtgctgggcagtgtgtccagcctgccgaggtcacgctctggtgcgcggtgccctcagtggcgccttgggtctcggcgcctgggcctcactcctgcgcgatgctcctcagcacgtacttgacc

SEQ ID NO: 324219 - DNA, 122 bp, Homo sapiens
tccctccgccccctcggccccgccctcccctcgccagtctccccctcccctctccgctctcgctctccgtgatttattacttgccctgctgcttctgacaaactatttgtaggaaaatgaga

SEQ ID NO: 324220 - DNA, 122 bp, Homo sapiens
gatgttttttgaatgctgaaatcttttactcataacacagttttcccagtaacttgcttccggttgatttaaaatttgtaatacacctttgtaatagcaggtaccttcatgaaactcagtat

SEQ ID NO: 324221 - DNA, 122 bp, Homo sapiens
ttgggaaaggatttttcccccggctcccagtgaattagaacggggcagtcgtctggactccgagtcctggtggaggagtgaagccttgggtgagaggcctgtggcatcgggagaagactccc

SEQ ID NO: 324222 - DNA, 122 bp, Homo sapiens
aaatggtacttataatgatgaatctagaattggcctcctctaatgtaatagaattgctaacggggatgtattaatatttacagatatttttaaaactatacagtcatgaaattggaagaaac

SEQ ID NO: 324223 - DNA, 122 bp, Homo sapiens
tcactcaggtattggctgaattcagctccttgcggtagtaggactgacgtgcagttcactcgctggctgtgggctgaggcgcctttcctcctgctggctgcctgtgttcctcctcatgtctt

SEQ ID NO: 324224 - DNA, 122 bp, Homo sapiens
aggaaacaccccccgccccagttccttgatcctggagaaggggcacttctgctgctctttcgccttgtccccagacacacaggactggcctctgggtggagcctgcttatcagtggggggca

SEQ ID NO: 324225 - DNA, 122 bp, Homo sapiens
ttctccaccccagcatcattaacatgtggggccagatcattctctgcggtgggggcgtcccgtgtacagcagggcagtaagcagcatccctggcttccacccactccctgcctgcagcagcc

SEQ ID NO: 324226 - DNA, 122 bp, Homo sapiens
gcagtggctgctgctataaacctggctctcctgcctggccccagaggaggcacggaagggcggccccacctcctggccactcccacagcctgactcacaccctgtgcccggggattcctggc

SEQ ID NO: 324227 - DNA, 122 bp, Homo sapiens
attatgagtcttgtgcaatagttatttccatcctaatgtgagaaccatccatttttgcagcgtcgggtcattggagaccaccgtattatgagtatttcacacattagaaattggcaaacagc

SEQ ID NO: 324228 - DNA, 122 bp, Homo sapiens
ccgcggctcccccgcgctgagcagcgaggcgctggtgcgcgtgctggtgctggacgccaacgacaactcgcccttcgtgctgtacccgctgcagaacagctccgcgccctgcaccgagccgt

SEQ ID NO: 324229 - DNA, 122 bp, Homo sapiens
ggggatcctgagcactggagctcttccctttcagaaatggatgctctacttttctgtctacggtgtgttgaaagaaggtgagtgtctgtagagtcccctccccaaatcccccactgctcctt

SEQ ID NO: 324230 - DNA, 122 bp, Homo sapiens
cagtctcacgatattgaccttatcattgacactgatgaggctgcggcagaggacaagcggcgacggcgacgacgtagggaaaaacggaagagggctttattgaacctaccggggacacagac

SEQ ID NO: 324231 - DNA, 122 bp, Homo sapiens
ccgacatttcccgcctggatctgcaccgcgggtgtcggggccgcctccccgccgggttctcgctgcacccaaggcccaggcgctggttgggtgattgcagattttcacaggcaatttgatgt

SEQ ID NO: 324232 - DNA, 122 bp, Homo sapiens
ggatccgctgccactgcagcctacacccttcccggccctcggtgcttgtcttttctttggcgttcctgcgccccctgacccgcggtcctgcagtcctgctcccgtgacgtgccctccctcct

SEQ ID NO: 324233 - DNA, 122 bp, Homo sapiens
agggcggctgctgcgttagaaatccgggtgcagcagatggcgccctttcctcagctatctcgccccagagctgggaggtggtgccacaggctgccgattcttcgcggttcttcaggcaaagg

SEQ ID NO: 324234 - DNA, 122 bp, Homo sapiens
aaccccggaccctcaccaacctctcctcttacttgatgggatttcagaaatctccttgtgcgcagacatcacccgcaccggcaaagtgaagccaaccagagctgtgaaagatcaggtaccac

SEQ ID NO: 324235 - DNA, 122 bp, Homo sapiens
gcctccagtgccgcctgctggaagaacattttatttcatgcaactttacgaggttgaatgcggtgaacccgggaaacttggaaattcccataaaaaggcaaaggctgtaagccacccaattc

SEQ ID NO: 324236 - DNA, 122 bp, Homo sapiens
aacttcatgagcccgttatttcctccaacaaaataaacttcaactctgttcagtttttcccgctgcaaaattcagaaacctaagagtcatccatgactctcccccccatatctcacatacct

SEQ ID NO: 324237 - DNA, 122 bp, Homo sapiens
gccaagcctggtgatgtcttcagtacttgacacttcagatctcagaaaatacctgctcatcgattattggattgaataggttaaggaggagaaccgtctcatgggcagacctggcctgcagc

SEQ ID NO: 324238 - DNA, 122 bp, Homo sapiens
gcgctccatctgcggtttcctggcagcccaagcagggcctgccacaaccagtacatgagccggctgctgggttgagtgaatgagtggttgaatgagtgaattctgcctgtcagtcctgagct

SEQ ID NO: 324239 - DNA, 122 bp, Homo sapiens
gatgctcttttcattccatcctgctacctactcacatcaagtgcttttccccttgaccaacggtatgccaatctgctgataattacttcggtattcactgaatttctaaatctcaaggctca

SEQ ID NO: 324240 - DNA, 122 bp, Homo sapiens
acaacaaaccaaacaaaaaagcaaaacaaaacaaaaacccttcctcctaccagcagagagcgctagcgccatgcgcggcataagcgccaaaatgctcgggtcttctgtgggttctaaccgcc

SEQ ID NO: 324241 - DNA, 122 bp, Homo sapiens
aaaaaagaaaaaaggttactaattggattttcttctgttccacattctgtgttctagaaccgagtagctaccttataaagaccatctgtacatccactgtgaaatggagtttcaaaatcaca

SEQ ID NO: 324242 - DNA, 122 bp, Homo sapiens
cagctgaaagtcggccaaagctctcggaggggctggtctaggaaacatgattggcagctacgagagagctaggggctggacgtcgaggagagggagaaggctctcgggcggagagaggtcct

SEQ ID NO: 324243 - DNA, 122 bp, Homo sapiens
tggccaaggcccctgcgctacaatcaccctgattcgaggtgtcctggaggttaccagttccgcgtgcgaagttctgccattcccgcggggctggagccccgaggctgaacttcccacgggcg

SEQ ID NO: 324244 - DNA, 122 bp, Homo sapiens
agatccttcccttttgctcctcctgatagcgccaatcttcgccaccactgccacactgcgcgcccgctatccactcacggcacaccgagaaggcctggcggagacagcgcagggggaggagg

SEQ ID NO: 324245 - DNA, 122 bp, Homo sapiens
agctctgcatggtgaaagtaagaaccagcaattgccacaaacagaaatacagtgttggtccggcagcctccgggggttctgcacaagtggattaccagtgaatacaaggctatctatctttc

SEQ ID NO: 324246 - DNA, 122 bp, Homo sapiens
tgggacagagttcagccctgcccctgtgtgccccagagacctgcgtggcccggaggaccacgggtgtcacaggacctccccagccatctctgggggaatgtcaggggctgcactgccacttg

SEQ ID NO: 324247 - DNA, 122 bp, Homo sapiens
gaagggacatggtgagtgacaagtgactacaaggcaagtgcgtgagccttctgtcatgcccggacagggccaccagagggctccttggtctagcggtgatgccagcatctgggaagacaccc

SEQ ID NO: 324248 - DNA, 122 bp, Homo sapiens
cacggtgaccctgaaggccatgtgcgcgccgaggctggcggggccgcggtcggggccgggcgcaccaggggcctccttaggcctcttgtccgagtgtgcctcagccacctcgcaatgcatgg

SEQ ID NO: 324249 - DNA, 122 bp, Homo sapiens
tcgcttcaccccagtttcctggctgcagagctagggcccagaaaggccccatcacagtggcgagcagcccccggagaaggctagttttggggttgctttctcttcctccttctctcacccca

SEQ ID NO: 324250 - DNA, 122 bp, Homo sapiens
tctccacgcggctaaatctcccatacccgccacgcctgtgggcctgtgcctgtccctccacgcatccgcacctaccacgcggctaacacacacctcccacaggtggcaagtgcctgaacgtc

SEQ ID NO: 324251 - DNA, 122 bp, Homo sapiens
tcatctccgcattgtatatggcagcctcgcaggggcaggggccggcgaggtttatctctgcgcaatattctctcaccctcacaaactggcgctcccatttaatttattaatacagtcatcgg

SEQ ID NO: 324252 - DNA, 122 bp, Homo sapiens
actctaatggattcctgtggcttctgggtctctatgatgaagtcctccctggcataggctcgtatatgggagcttgtaggatgtctgcaagtatcagctcacagtgcggccgctgatggctt

SEQ ID NO: 324253 - DNA, 122 bp, Homo sapiens
gtcgctcgcccacgctgcgccccgcccatccgcacctgggctgggtcgagggcctgcagccgaggtgtgacctgcaaggtcgaagggttctttctcgctacttggccctaaggcctcgggtc

SEQ ID NO: 324254 - DNA, 122 bp, Homo sapiens
acagcaccaggcctccaccaccagggctcactggcatagaacagcctggcaaatggaagacgctattcaggaaaggacaatgagaacaacgctcattctacaggaggactgacctttgcaac

SEQ ID NO: 324255 - DNA, 122 bp, Homo sapiens
ccagcaacgactgtgcgtgtgcctaaagcaaggcagggcaggcagcactcagggaggtcccggggctgccctttccagggcctaggcccaggagctctgggcaggctgggcccggcgtcccc

SEQ ID NO: 324256 - DNA, 122 bp, Homo sapiens
aagtctaagacgataaacgtgttggcaattctggcagaacagggcatccaccgtgcccctcggaaggtggcagctgttctttattgccttctgagaatccaaaacgactgttgccagattgc

SEQ ID NO: 324257 - DNA, 122 bp, Homo sapiens
agccttctcatctgtcaaatcacactccctgcagacatcatgctgccccgatgggggtggcgatgcgggggtgacagggataatttcaaagcatggctaccgctgaggctggcagtgtgaat

SEQ ID NO: 324258 - DNA, 122 bp, Homo sapiens
taccagacttccatgggaaacacagcaactcctttattactccctcccagctcgtgagatcgtggtggggcaggcttggggttaaacctcaaaaagggcttcacttgtgattctctctgagc

SEQ ID NO: 324259 - DNA, 122 bp, Homo sapiens
ttccagccccgataactcatccggagtcacgcggttccgggactttgcagaggaaaggggcgcgggatgtgctttgggaatagaattccacctttgcactcggctctgcacctgtcctgccc

SEQ ID NO: 324260 - DNA, 122 bp, Homo sapiens
ggagattcctcactggatttggtttctccagcagaactgtctcatcctccacattcatgccgctctagcggttccgagtgaaagaggcaagaggtttaaaggacagaaggaaaactccctcc

SEQ ID NO: 324261 - DNA, 122 bp, Homo sapiens
ggtggcctccgggcagaagcgggagatgggtgcctcgctctacgtcggctgggccgcctccggcctgctgctccttggcggggggctgctttgctgcaactgtccaccccgcacagacaagc

SEQ ID NO: 324262 - DNA, 122 bp, Homo sapiens
cagtcgggtccttccctcgggctccgggagccggaggatccggaatgagttggtcaaagccgagggaagggacccaggcggatccgcttccccctccccaggaacggcgggaggaggagggg

SEQ ID NO: 324263 - DNA, 122 bp, Homo sapiens
tgggctgcgcaggtgccgacgtctccatggcaaccgggcgtgggttgctagggctgagcccggccggcgcgccggcgctgcaattggacctagggagccgggtgcaagagtggcctgttcag

SEQ ID NO: 324264 - DNA, 122 bp, Homo sapiens
gaacttttcgtcgcatgccaggcctgatggcatctttgaacacgacgggaatggtcctgccgtccagagtggggacgttcactgtgtgccacacagagcctccgggaggctgatcctggaag

SEQ ID NO: 324265 - DNA, 122 bp, Homo sapiens
gccacgagggggcgcaggaaccgcttgggagggtccctgggtgtgagccggcctcggaggcggttacagcccaggtttcacttcacagcattcctttgcccagcctagggcaaacttggctc

SEQ ID NO: 324266 - DNA, 122 bp, Homo sapiens
tctttggaaatcaaggttaaagctccccgctgctgccccgaggcccgggcttccgcagggcggctcacccgcctgcagcaagagagggagggaggaagttgttgaagtttctcataaaactc

SEQ ID NO: 324267 - DNA, 122 bp, Homo sapiens
tcagggctggtaagaggcttttcagcgagaaaccccagctccttcagccatcccaggacacggccccatccacatggtcccatgtggggctcactcacccttgcacatctgtgttccaccca

SEQ ID NO: 324268 - DNA, 122 bp, Homo sapiens
ctctgcaaggatcgcagagcccaggtcccggagttcggggctgagtccgcgggcacctcccgggacctgcctcccaaacctcatcaaaggaacccgtcagagcttatttgttggtagaaagc

SEQ ID NO: 324269 - DNA, 122 bp, Homo sapiens
tcttcagctgtcccccagggcttgagaaaccatgttggtcagcaggtgttaatttagcttcgtagttctcttttccaactttgaagaggctattcagttttcagatctatcagcgcttgtct

SEQ ID NO: 324270 - DNA, 122 bp, Homo sapiens
acctctctgggggctggagcagttcttgcttttggctgcagcctccagactgtccagcttcgactcctttgagattacattggtcacctctttcctgacatctgaattggtggcttttgttt

SEQ ID NO: 324271 - DNA, 122 bp, Homo sapiens
gaaatatcttcgtttcaaaactagacagaatcattcccacaaactgcgttgtgatgtgtgcgttcacctcacggaccttaacctttcttttcatagagcagtttggaaacactctgtttgta

SEQ ID NO: 324272 - DNA, 122 bp, Homo sapiens
agccaggaccgctgcccaccttgtccacgtgattcaccacctccagcacccgatgacgcacggctgcttcgctccccagcatctggaactggggacacgagaccctcaggctggagcccaca

SEQ ID NO: 324273 - DNA, 122 bp, Homo sapiens
cctgcgcgcggcggggtttggaaatacagcgcgtttgcactttgtgatacattctggccccgcctctccctccaaacgcgcgaccgtccgtgcctctccaaacgcgcggccctctgccccca

SEQ ID NO: 324274 - DNA, 122 bp, Homo sapiens
ccctccctccatgagtaagtcaccaaactgggacagaaggacagacagttggccggactccggccccatgactggctcataaaagccaccagcaattacagtgatgctgaggttgtgccggc

SEQ ID NO: 324275 - DNA, 122 bp, Homo sapiens
gagggcaggtggtgctcagagtggggtacacagggaagggcaccccaaagctgggctctgcgcccttgagcccctctagatgggtatgcaaggtcaagatcatcctgcagggactagaaagc

SEQ ID NO: 324276 - DNA, 122 bp, Homo sapiens
gggctataggtaccactgggagcctgcaataaaatcttagaaaaagcattcccccaggggcgactccctcgtaaccccagccccatcaccttcaacaggccagaatacagactgcagtctga

SEQ ID NO: 324277 - DNA, 122 bp, Homo sapiens
tcttcctttcctctcctctcccacttatgaagggagtccagtcagaaacatgtttgtctacgaggtagtatatctggtatttctgaggaattcggttattatataggattatagaatattca

SEQ ID NO: 324278 - DNA, 122 bp, Homo sapiens
gcgcgagcctgcaggcaggccgggaaggcggagccaggccggcctagagtcacttctccccgcccctgactgggccgggagcccggggctggtctctaagagtgggtaccgagaacagcctg

SEQ ID NO: 324279 - DNA, 122 bp, Homo sapiens
accgcggcgacctattatgataacctcgagaaccaatgaaaaacggggattcgctcagcccgcctcccgagcttcaaccccgaagagatcgcgcacagttttataaaaggtacaaattagaa

SEQ ID NO: 324280 - DNA, 122 bp, Homo sapiens
gatttgggccttgtctagctgttggctttggcctgaaccggaaccagtctcagatgaccacgggtttaaccttcttatcccagagacacccaattctagagctttatggagccgtacttccc

SEQ ID NO: 324281 - DNA, 122 bp, Homo sapiens
gcagctgccccacaggtggcccggcctcttcctggccccctcacgtacatgtgcagagaccgttccttgtcttcggaaggtgaacttggaacaattcccacgggacactgcgaatgacggcg

SEQ ID NO: 324282 - DNA, 122 bp, Homo sapiens
gaaacgcgtgctcgctgctccctgtgtccggcgcgagtggagctgttgtaaaatggcggccgaagctcacgccgctggcagcaaacccgatccagttccactcgcctccgagcgcgctcccg

SEQ ID NO: 324283 - DNA, 122 bp, Homo sapiens
ttgcgtcacgtccggcctgcgagttaccgcccactcgctgcggcgcttctggctccagaccgccctccggatcggaccctgcgaatggttttggctatatcttcatgtaggacctactccct

SEQ ID NO: 324284 - DNA, 122 bp, Homo sapiens
gacatatttgggggactattattttcagcctgcgatgcttggagaggcccacgtccccttcggtctcctcctcagagatgctgtcttaccttttgcctggggaacacaaaatgtctcccttg

SEQ ID NO: 324285 - DNA, 122 bp, Homo sapiens
ctaacctaaagaagaaacccaacgtttacttgactaacttgataatcaagcctcccccgccgggacacttaatcttttaggtaccttcagcctactagaccctggtccgaggcacgggttca

SEQ ID NO: 324286 - DNA, 122 bp, Homo sapiens
tgggaagtccctctgcctaaagtacgtgcccagggagaaacagaagtattaaaagttattcgaacaggaaagagaaagaagaaggcatggaagagaatggttactaaagtgtgctttgttgg

SEQ ID NO: 324287 - DNA, 122 bp, Homo sapiens
gcccccgggggcgcggagccgcagctcggcgcggtgggtggtggagcggctgtcactacgcggcagccgcagcatcagcaccagagcggcatctgcatcccaatcgctgcccatccggtccc

SEQ ID NO: 324288 - DNA, 122 bp, Homo sapiens
ttcattttccagaatcaagttcttttatttctcaaagacatttttgactttgagaaggtgcgctattcaagtacagagactttagctgaagacctcatgcagttactcattcgccgcactga

SEQ ID NO: 324289 - DNA, 122 bp, Homo sapiens
ctcgaggcggtcttggccaggggtttttctttgtcagcccagtcccaggccagttcctcacgtggcgctttacctggcaaggacccgggggtcgaacttggctcggaagcgagccacctgta

SEQ ID NO: 324290 - DNA, 122 bp, Homo sapiens
cgcttacccgcggtactcgatgtacttgtagatgcagccagcgatgagcatggcggacagcgcgtagtaccaggagcagatgaacatcagcgccaggcacaggctcatacccagaaaggaca

SEQ ID NO: 324291 - DNA, 122 bp, Homo sapiens
atctgggagccagggacttggggcctgggtggggcagtgtagtgacagaccacggggaggcgcccgtggcgcaagaagggaagtctcagcatccctcttctctcccgcccccagtgaaatac

SEQ ID NO: 324292 - DNA, 122 bp, Homo sapiens
gggcggggaaggaagatggcggcgcccagcgtcccgtgaggagagaggacacagggatcccggggagcggccccagactcgtaaattatggccgcatctccgcacactctctcctcacgcct

SEQ ID NO: 324293 - DNA, 122 bp, Homo sapiens
agggggcgaggcggggctgagaggggcgaacgcagagccagaccccccgccgccgcaggccgcccacctccaggcagggcttcgtgccagacccggctgtagttatcagctgggtggagggc

SEQ ID NO: 324294 - DNA, 122 bp, Homo sapiens
gtcctccgcgggttgcaacccgcctcctaggttctagcccctctctttgcgttccagtcccgtctcctctagagtctgcaggaaccgtccctgatctacacgctgtgcaggttcgtggcttg

SEQ ID NO: 324295 - DNA, 122 bp, Homo sapiens
tttccatggtaaagtgagttctccttctattcatgagattgctgatcgtttaaaagagcacggcactgctatcctctctcggtctggcttccttcctgtctcaccatggaatgcctgctccc

SEQ ID NO: 324296 - DNA, 122 bp, Homo sapiens
acagagaggagttaaatagcccatgctgggtttgtagcaccatggctcatgcagggccagcgttaagcccttcctttctggcattcacagtgggtgttctctgcttcttcctgcatctccaa

SEQ ID NO: 324297 - DNA, 122 bp, Homo sapiens
gcctctcaacttcatgccccactgcaccggcctcaccttctccaggtagttaaactccatcgcaatctcccggaagaagaagtagacatggctgccccactccaccgcatggacaaagtaag

SEQ ID NO: 324298 - DNA, 122 bp, Homo sapiens
accaattggaagcggcgccgcctgggcgcttggggcacgacgctgtgggtggggtcaggacgtgagggcagcgcgctggcgtcagaggcgcggctatataactaaacacaggcaccgcccct

SEQ ID NO: 324299 - DNA, 122 bp, Homo sapiens
gagaggccagaacctctctctcgccgtactccccggcagggcacggctcaggggagacggcgctctggcacatgaagcccacacccacacgccgcagtgtcccttgctgcctcgatctccaa

SEQ ID NO: 324300 - DNA, 122 bp, Homo sapiens
atgagcatatgtccatgaattccactattaccctaactaacctgttcaggaattctgcctcgtaaatgcaaagtactaattactgtttttaaaactcctggtctgattacctagaccaatta

SEQ ID NO: 324301 - DNA, 122 bp, Homo sapiens
gcagctcccacgtcgggtcagggccacgcgttgtggcccacttctatgccaagcgtctgacgctcgaggagctgttggctgtggaggccggcgcaacacgcgccaaggaccacgggctggag

SEQ ID NO: 324302 - DNA, 122 bp, Homo sapiens
aaatagaataattcttattgcgaggttatttattaccagccagaccctcatctcgctctacggggctctgataatcacctatttcagaagccattagccttctgtgtgttgtaaagcactct

SEQ ID NO: 324303 - DNA, 122 bp, Homo sapiens
gagagtccaagacacttccgggctctgtaccgtaaagggcggggcgtagcctccaaaaggcgagatgttccggtcggggaggccctgagcagaggaacccgggtggagagggcggggcctga

SEQ ID NO: 324304 - DNA, 122 bp, Homo sapiens
atctgaaatgcttgcgttgtatttaccagttcagcatcccaaatccaaagatccaaaattcgaaatgctccaatgagcatttcctttgagcattgttgtcactcaaaatatttctcattttt

SEQ ID NO: 324305 - DNA, 122 bp, Homo sapiens
ggattcagggcggcccacctccaccacccctgctgtccccaggctgccccacccagtggccggggacagcaacatgctgcaggccaggcaagcagctcacagctcagtggcccccgacaagc

SEQ ID NO: 324306 - DNA, 122 bp, Homo sapiens
tgcaaaatgtcaccacttcttaaactgttctgtaaattcatttcattggtcaacttttaacgtgcatatgacctttaacagttctgaaaaatagccttggccagtaacacgtacttctagtt

SEQ ID NO: 324307 - DNA, 122 bp, Homo sapiens
aacatgtggttgcaggcgctcacacagattcatctgttcaggtgcaaacaggtgtgtgcacgtatgtatgtttatctgctcctgcagacactgggctgataaccaactggtacacactgacc

SEQ ID NO: 324308 - DNA, 122 bp, Homo sapiens
tacattcctttgctgcttgtgagaagcttacattttggcattttcttccaaaaattaccacgttgaccaaagtaaacattacaagaatatgaacttgttattgggggaaaggggaagtgaag

SEQ ID NO: 324309 - DNA, 122 bp, Homo sapiens
cagttccagcaaaggatctcattcagctcacccccaagaagacttttaatacttcaatgacgatgatactaataataatatgcaaagtttgttccaacgcatttagaggtgatcgcgacaag

SEQ ID NO: 324310 - DNA, 122 bp, Homo sapiens
actcctgaaatatctgcctgtgcttttgcctgagctggggcctcccactggcccctgcagcggagtccatgccctggcagccattggtcaagactgcagacaacctgtgtttgggggaaatg

SEQ ID NO: 324311 - DNA, 122 bp, Homo sapiens
gacttgccatgaggtgttgaagccttgtttcactgagttggagagactggacctaaatggcgcagcatgactttgctccagcctggcttaatttccctactccaccatcatcaacaaaggta

SEQ ID NO: 324312 - DNA, 122 bp, Homo sapiens
cttaagaaaggagggtgcttcatgcgctgagctcatggcacaggtcccgcaagtgacctgcgagccccaccgctaggggccgcttaggtgcagcccccaggtgggcggggactgcgtttcgg

SEQ ID NO: 324313 - DNA, 122 bp, Homo sapiens
tttatgatacagtttaagtgaagggctaaatgcgcgtacctctcttggaatcaaatttcacgactgcgtgcactgaatatccttgaataatttttaaaactttgtaatctgctttcagttca

SEQ ID NO: 324314 - DNA, 122 bp, Homo sapiens
aacattcgcatctgagatgaggtggctttttaacccctgagggaccacatttaaggatttcgaagagatggaggctgaactttctcgatgactcttcgtcacccggagtggtgcaggtagcc

SEQ ID NO: 324315 - DNA, 122 bp, Homo sapiens
tttgttctaatagggtccgggtccccaggggacccttcggggacttcaggacatctgcagcgaagaaatattagcaaacttggctggagcctgcagccagccccgcgcccccgcccctgccc

SEQ ID NO: 324316 - DNA, 122 bp, Homo sapiens
gaagggtttgcggcggcgccgctgccggctaacgcggaggggcgcctggaggcggcgtggcgtccgctctggctccgactccggctctcgctctcgcttctagcccgcgtgcctgcgcagtc

SEQ ID NO: 324317 - DNA, 122 bp, Homo sapiens
ccccacccaccggaactcgaacccgggctagaccgggcagttgggctggtcccttcctctcgctgcacctttactaggggtcaccattaagggaaatggtcctagtgcagtgctgagtggct

SEQ ID NO: 324318 - DNA, 122 bp, Homo sapiens
ggtccggcggccccccgcccacctacgtgtcatccgattcgatggcctccccgcgcgcggcgccaccctggatggactccatggccgtggagtagagcgccttctggcccacaggccgcttc

SEQ ID NO: 324319 - DNA, 122 bp, Homo sapiens
gaagtgctggcaactagcagaacagttaggaccattcagaatcaactgaagtgaaagtgacggggagctgaggggaacacagatagtttgacttcagtcagacagaataaacatgatgaacc

SEQ ID NO: 324320 - DNA, 122 bp, Homo sapiens
actcacccacactgctgagggagctgctgctttctgagtctgagggcatggtggacaggacgctgtaggtagaacctggggaaagaggggagaccatgttactaaccccaaggggtcactcg

SEQ ID NO: 324321 - DNA, 122 bp, Homo sapiens
gctgctggcaagggcgctagttgggggtggacgttgggcccaggggtatctgacctgcgccgctgcagccttctcgctccttctcccagcttgaacggctcatcggctgtggtcgtggtggg

SEQ ID NO: 324322 - DNA, 122 bp, Homo sapiens
ctcccatccgggccccgcctccaagctgggacgccccttcgtgcgggcgccgccccttcacgctcaagtagctggtcaaagccctgcccctggcccagttttcgcacctcagcgagtcccgc

SEQ ID NO: 324323 - DNA, 122 bp, Homo sapiens
tgccatgcccaggagccagatccacagtgaaggaccgaccttggcagtccgtgtctcagacggttcctgagttcctaggaacagcacaatttctagatacaatcatgtgacctaaacatatt

SEQ ID NO: 324324 - DNA, 122 bp, Homo sapiens
aggtggggtaggaggagggagctgcggaggcagcagccagaggaggcagaggaaccggagcgacagccttggaggtggaccctcacccaaaagtgcaaactgattggtggattttgagggct

SEQ ID NO: 324325 - DNA, 122 bp, Homo sapiens
acctcgtgatccgctcacctcggcctcccaaagtgctgggattacaggcgtgagccaccgcgcccagcccacaatttggaattttaacttgtggttagattgttggggacagagacggggcc

SEQ ID NO: 324326 - DNA, 122 bp, Homo sapiens
ggggaggggagagagggcggagtctcgcgactaacggggcgggggcagggcgggtaagaacggaaatcatttggtaaagaaaaggaagggccaatttcctttgatcctggagacccgactaa

SEQ ID NO: 324327 - DNA, 122 bp, Homo sapiens
ggcaagacctgatccagagggtgtgcattaagccgttgccctcgttgcgtttaattctcccgtcactccccagtcactaagggaggcctcctactcgcgcctcagcttcaagggcggatgtg

SEQ ID NO: 324328 - DNA, 122 bp, Homo sapiens
atgccatcaactgtttgcttggcacagcacttctcagattttagtaggcagacaactcaccgggatcctgttaaaatgcagatttcaatttaggatgttggagaggccagagagtctacttt

SEQ ID NO: 324329 - DNA, 122 bp, Homo sapiens
tcttttccccattctccacaacagtcatgtgctttaaaagatatgcagtttcctaaggaacgccagtgtgcaaaagcacgggtctccaccacctcgccgcacaccgtgttcacaccatccat

SEQ ID NO: 324330 - DNA, 122 bp, Homo sapiens
tcgcgagcgggcagcccagcgcctccctcgggaggcgccaaggcgtgggggcgcccggggcgcaactggcactcctgtggcccgccaggtccgcgccagcctccgcgcctccgatctccgga

SEQ ID NO: 324331 - DNA, 122 bp, Homo sapiens
agagcacatctatccccttggaatgttacctaaatatacaggaatctgaatctgtagaaccgataaagtagggggaaaaatctgttttccctggatacatgcatagatgaatggataaatgc

SEQ ID NO: 324332 - DNA, 122 bp, Homo sapiens
aaaaataaaataaaatttaggaaagggaggcaacagccattgggagccaacacagagtcacgcagcgcccaaaatacaaacaccgcagcggccagaaatcccgccacctttctcgttctccc

SEQ ID NO: 324333 - DNA, 122 bp, Homo sapiens
gtgggtgactggcaggaaatggtcagcttggaggaacggtgccctcgaggtggtcagtaacgggagggctgaagagaacagcggccagttactaagagcacacggtgggccggccgccgcgc

SEQ ID NO: 324334 - DNA, 122 bp, Homo sapiens
caaactgcagggattacaggcagaagccaccatgcccggctaataacctgaatctcttgacggtgaagagaaataaggagaggggtaaaatggctaaaggatgtctgtttggaggcaaggaa

SEQ ID NO: 324335 - DNA, 122 bp, Homo sapiens
cctgttcagcagcagggatgagttacagctctgtaggcgggagccacctgtcagcccccccggggctggtgactccattcccagcaggccgaaactctggtccagaggagatagtccggcct

SEQ ID NO: 324336 - DNA, 122 bp, Homo sapiens
taccggcactggaactgggtctgtgaggcccgggaaaagcttagccccgccccctcgccacgagaggcgcctgcgcactgggatccagtaagatttttctcacgctgtctgtccagcttgag

SEQ ID NO: 324337 - DNA, 122 bp, Homo sapiens
gcagcgctgctggtgggaggggaaagtggggaccagagatgggggatgacataatcctcacgtgatcaggagctgacgtgaaccgaagtccttatattcccgggcttctttctcctctgggt

SEQ ID NO: 324338 - DNA, 122 bp, Homo sapiens
ccaggtgaaggaagttttaatccaggattcgagtgaacagtgcctcccaatgatatctcacgacagcttcccaaatcgtttaaacgtggatatcggcacgacggttttcctagactgtcgag

SEQ ID NO: 324339 - DNA, 122 bp, Homo sapiens
cgcgcggggagcaggccgggccctcccggtgtggttaaatgaatggtaacacgcatggctcgtccgcctctctgcttcctctagacatcctttggctgttttcatcgctcgtgtttatttcc

SEQ ID NO: 324340 - DNA, 122 bp, Homo sapiens
gcttgggaacgccaaggacatcccccacggaagcctgggcccacatccccatgcccttgccgcacgtcaccgccccgctggccccgaatacgcctccgccctgcacttcctctctgcagcgc

SEQ ID NO: 324341 - DNA, 122 bp, Homo sapiens
gagtggtggctcatacctgtaatcctggcactttgggaggctgtggggtgagaggatgatcgattgagcccaagattccaagaccagcctgggcaatgtggtaagcccccgtctcaacagaa

SEQ ID NO: 324342 - DNA, 122 bp, Homo sapiens
gggggaaagaagagtcacgtctcccacggttcgtagaggaaggcctgcctgagcctggagcgggggcgggagagccacagtttggcatccccagggcatcccccagcccgcagactaccagg

SEQ ID NO: 324343 - DNA, 122 bp, Homo sapiens
gaaagccagagtgggtcctaggggcagtgagttgccagcgctggagacaccgcgacacaccgtttacgtgctgcagccaggcgctcatcaggttctaagccattcagaccaataagaagcca

SEQ ID NO: 324344 - DNA, 122 bp, Homo sapiens
ggatgcagcaggttctgtgaggctgccaggaggggtagagttcccgggggcctcgggccccgctggagtgtggagcaggcccatgctcagctctccaggctgttcgtggctcccctgtcagc

SEQ ID NO: 324345 - DNA, 122 bp, Homo sapiens
tcccaacccaggaatgtctgatctcggagtgggcggcttcccagctgtggctttgcataccgctagcgtagccacccggaccctgatcccctgacccttgtccttgatcctccaggaaattc

SEQ ID NO: 324346 - DNA, 122 bp, Homo sapiens
tggatccaggaggcacacggttcccaccggcgtccgggctggcgttggggctgggtggggcgcagggcggaccccctgcctcaggcacaccgacagcacctcctgtcctcgacctccttggc

SEQ ID NO: 324347 - DNA, 122 bp, Homo sapiens
gagcaggtattggagggaggaacacgtaggaaggtgtggttggccaatctaatatccacccggactaaaacccctggcatctacagcctccgtctgagaatgagtctggccggcatgcccag

SEQ ID NO: 324348 - DNA, 122 bp, Homo sapiens
ccccttcttcatattttgcagcttcctctccagcttctggctcctggagttctggagcaccgctccccttccacccctgcgtccccagcctctctccagaccgacggcgtcaggggcccagt

SEQ ID NO: 324349 - DNA, 122 bp, Homo sapiens
agacactttcttacatattagttcaaagaatattcacaacaaccctgcacacttggtagtcgtagctccatctatagaggtgaagaaaccatgactcagagagattgggggactcactcttc

SEQ ID NO: 324350 - DNA, 122 bp, Homo sapiens
aggacagcagcgtgtacttggtagtcttgagccggttgtcggccaggtgctgggcacacccgcgccgccgtcgccgctcgcccttggccgcgccagccgcagggtcctcggcgcccgggggc

SEQ ID NO: 324351 - DNA, 122 bp, Homo sapiens
agcgtttgtaatgagagcggctgattagggctgttggaaataaaagagagttacaaggaacgtctgtcagagtccggtgataattcaggactaattgtggtgattagcgcaaactggatgac

SEQ ID NO: 324352 - DNA, 122 bp, Homo sapiens
cgttactgggctcagacttttaagttaatttactgcccccctaccttggccagtaaccagcgcctttagggctagcctcccccccagctcctgcctgaaaaatgacatttcgccggtgtctc

SEQ ID NO: 324353 - DNA, 122 bp, Homo sapiens
gctctcctccagccgccgcccgcgccgccgccgccgcccccgcctcctcgcggcgggtcacgcccccactgaaacccgagccgtttcctggacggcggcgccctctctgccaatcagcgccg

SEQ ID NO: 324354 - DNA, 122 bp, Homo sapiens
ctgaccttcaaatctccctcccccgattttttttttttttttttttttgagacagagtttcgcttttgttgcccagggcgggagtgcagtgacatgatctcggctcactgcaacctccacct

SEQ ID NO: 324355 - DNA, 122 bp, Homo sapiens
tggcaaaccatgtgtacacccgcggtagaagcaggtgcgtgttttacagtagcttagctgcggagtccacccagcccctggcatccgcagctcggctcgctcaggctctagaccgaagctgc

SEQ ID NO: 324356 - DNA, 122 bp, Homo sapiens
ctcgggctctggaaggggccgcgcggcctggaagacattacacggctgtcgggcggggggcggcgctcgcagttccggaggggggtcccggcggcggacgcgcggggtgaggggaccgcccg

SEQ ID NO: 324357 - DNA, 122 bp, Homo sapiens
cagctctgccttcccttcatcctcctctgggaagccttccccgcactgtgaagcgggcgccgcacctgcagtttgtactgctccatggcgtcctccagcgcagccagaaagtctcggttctc

SEQ ID NO: 324358 - DNA, 122 bp, Homo sapiens
ctagtttgggtttgtccaagccatggccacggattacgatcttcttgacaaagctcccatcggggcagtaccagagatcagaagcttgaagggcctctggcatctgactggttgatccatga

SEQ ID NO: 324359 - DNA, 122 bp, Homo sapiens
ctttcttttactggccttcttggtgttcctttccaagccggtccctgccttgggacttcccggtgcttccttggccctcatgctcatcaatgatattcacacaactggctcttcatgatcaa

SEQ ID NO: 324360 - DNA, 122 bp, Homo sapiens
gcccaggaaacaaggggtctgaggatgcattcgagatggcagattcccactgccgctgcccgctcagcccagctgttgggaacagcatggaggcagatgtggggctgagctggggaatcagg

SEQ ID NO: 324361 - DNA, 122 bp, Homo sapiens
aatctgccccagcatctttttggctacagctggtacaaaggtgaaagagtggatggcaaccgtcaaattataggatatgtaataggaactcaacaagctaccccagggcccgcatacagtgg

SEQ ID NO: 324362 - DNA, 122 bp, Homo sapiens
ctcggaacaggataatacaagaaggaaccactgcaagtgaaatccagccaccagtaatgccgagaggccaggcctgtgcctcccaaaacctgctcctccgcaggcttccccggcccatctcc

SEQ ID NO: 324363 - DNA, 122 bp, Homo sapiens
tttcttcctctcctccttccgccgccgggactacggctccgccccccccgccggttcccgcgcccgctcccagcagaacagcgaccgccgcgcgctcccccacttccgctcacaacatggcg

SEQ ID NO: 324364 - DNA, 122 bp, Homo sapiens
gcacatgaagatgtggcaccaggaccatttcggggttagcaagggagggcttcatacagtcgtgcaaatattataattggggggtaggttcatgataaaattagcctggagaaatcagacta

SEQ ID NO: 324365 - DNA, 122 bp, Homo sapiens
gctcacctctcacctcacccttggagtagctaatgacttacaggcatgcaccactatccccggctaatttttttttttttaaatttgaggatgggtgtggtggctcatgcctgtaatctcag

SEQ ID NO: 324366 - DNA, 122 bp, Homo sapiens
tggattgggtcttgtttaggtaaaagacttcagtggcagacaaaggaggagtaataagatcgctagggggcccgtgcccagcccacccacgcacaatctcagtcctcgcaatacccacaagg

SEQ ID NO: 324367 - DNA, 122 bp, Homo sapiens
cttgggcttcctggggaaggttgagttgttgagagagtggaccacagcgagagggacacgcggccggccttacacccggctgtcctcaatcactgcacatctggtactttctttccggacac

SEQ ID NO: 324368 - DNA, 122 bp, Homo sapiens
gagaacgaggacccacgacgcgtacgcgttacagtcctgtttccctagaaacggagctgccggcgcggaggtggctttgagattctgcgaaagacctgactgctcttcaacaattattgtgt

SEQ ID NO: 324369 - DNA, 122 bp, Homo sapiens
cactgaggtatgctaccaaaccttaaagccccaaaggtatctgtctgatactagtataaccgcgccagctttaggggctagtgtttgtgtgatgtatctttttctatactctaacgttttct

SEQ ID NO: 324370 - DNA, 122 bp, Homo sapiens
caaaaaaaaaaaaaaaaaaaaaaaaaaggactggtccagggagagtttgctttgtaaccccgacaatcctggagggaatttggtgtttggttaaggaaaagagagaagttaaaagtcatgag

SEQ ID NO: 324371 - DNA, 122 bp, Homo sapiens
gttattgatttattctgagagagttccccacacacatagtgattttttttttttttttaccgtggtaggtaataaaaaggattacaggcccccagaaggatgagatatcatcagtttgtaat

SEQ ID NO: 324372 - DNA, 122 bp, Homo sapiens
ggactttctttcttcttcctcttggacaaaagggaattgcattctcagtggccaaaggaacgatcctcgtgcctcagagcaggaggggtgcctagaccaggtcacactggaacatgggagag

SEQ ID NO: 324373 - DNA, 122 bp, Homo sapiens
gaaggctgaggcaggagaactgcttggacctgggaggcagaggttgcaatgagctgagatcgcaccacggcactccagcctgagagcctgggtgacagagtgagactccatctcaacataaa

SEQ ID NO: 324374 - DNA, 122 bp, Homo sapiens
tcttgtttaaaatgtagctacaatcactattgtcttcagatttacctgtcctgagaacaccgaagagcccctttacatgtgtttgtcaagagtataataattttatgaagtgacccatttaa

SEQ ID NO: 324375 - DNA, 122 bp, Homo sapiens
gcgctgatctcacctttctctcctgagatttgtgagaatcgctctaccccaggagaggggcggggcgggcggtggggataagggccgagggccgtgggggggccagcggccctgcgccctcc

SEQ ID NO: 324376 - DNA, 122 bp, Homo sapiens
tgagaagagtgggtgcctcctgggggacccgctgctcaatcacaaggtgagccctagaaccgggacccagttctgtgaccgcagcagcccggccggctggtccccaggaggtgggcagggat

SEQ ID NO: 324377 - DNA, 122 bp, Homo sapiens
acagaataatcttctgtatccttgtaaactggattttccagtaatttgtgttcaggaagacggtatgtttatttttgtaggtatttgacttagtcttctggtttggggatctctgagagtta

SEQ ID NO: 324378 - DNA, 122 bp, Homo sapiens
acagggctggggaagggctcggctggccggtcagggcctgagaagggcaacgctggaagacggactggggaatggaactgccgggtggacaccagcgtggggacttgtgggtgttcaccagg

SEQ ID NO: 324379 - DNA, 122 bp, Homo sapiens
ctgtgctgtcataagcagaagtaactgtctattttgaggactcatgtacggttgtttccacggttaccctgtcacactgccaagcagtcacaagacgcggatttccagtgcttcggagaaag

SEQ ID NO: 324380 - DNA, 122 bp, Homo sapiens
taattcactgttacacactgccatctagcaggaagcgagcaagagttattacagcaatttcgaaattggaagacctgaatgatcacctgaggctacccaatcgcctctggcttctccttact

SEQ ID NO: 324381 - DNA, 122 bp, Homo sapiens
gacgccggaaggccctcggcacccaccaagacctgcctcacgagcccctggtcccgccaccggggccccgaagcgaccacagccacaaactcaacgccagggccacatcgctcgtgattctc

SEQ ID NO: 324382 - DNA, 122 bp, Homo sapiens
gggccccctgccttgctcctggagatggggctctctgctctgcatggctccatccgtattcgtccctttctttcatcttcctgcccgtccttcccccgcccctcccccaggagcccaccaag

SEQ ID NO: 324383 - DNA, 122 bp, Homo sapiens
ttctcagtactcgggcgcaggggtggaggaaggagaagaaaggcggggtgggtctcgctgcggagagctgaattcctggcagtgatggtagagttggcttcacaagcctagaaaccaggaag

SEQ ID NO: 324384 - DNA, 122 bp, Homo sapiens
ggtgatccacccgccttggcctcccaaagtgctgagattacagatgtaagccaccgcacccggccctctttgtacgttttttaattgggttatttgattactattgattcattgattcataa

SEQ ID NO: 324385 - DNA, 122 bp, Homo sapiens
gctccctgggagggccatgtgatggggacacctcaccctggagggcatcccgggttaaagcgcatgtgtggctgggtcctgtggtgtaggggcacaggatatgatcagtggctggagtatca

SEQ ID NO: 324386 - DNA, 122 bp, Homo sapiens
agcctggcccggaagcttctctgctgacccggaagcagagctgtgcagctgaggcgccgccgtggagccgccttggagccaccgccccctcgccgcttcgccgctgcgttggggaacctgga

SEQ ID NO: 324387 - DNA, 122 bp, Homo sapiens
ggtgaacccacttgtgaatcagaagccagaatatagccaggagtccatgagtgctcagatcggctgatgcttgggtggtaggaaaactttttgaaatacaaatttagggtttccccctttcc

SEQ ID NO: 324388 - DNA, 122 bp, Homo sapiens
tatctggagtgtgtctcccagtgctttggagcgtagtataatcaataaacttttgatgggcgaatgcaagaaaaaatgtgatactgaatttccacatatgttttcagagaacccagccaact

SEQ ID NO: 324389 - DNA, 122 bp, Homo sapiens
acacgccactccgcagggctcaacccccgctgtgctctgcggtcgcagctgcagccgcttcggtgctccaagaccagagaggaagcaaagacagagctttcccagccaggcatcgctgcttt

SEQ ID NO: 324390 - DNA, 122 bp, Homo sapiens
aggcatgtcgttaagcactctccatgtaccttcctactcagccttaccctgaaccttgtacgtgaaagatatgctagggttatctctgtttttagatactgaaatcagctaagagagtttaa

SEQ ID NO: 324391 - DNA, 122 bp, Homo sapiens
ggctaggatgttagaaatgggggaagaagggtgtgccttctccttatcaaggagactacccgtaagtaccacacagtgtttctgtttacctctaagtctggccacaccagattccagggagt

SEQ ID NO: 324392 - DNA, 122 bp, Homo sapiens
ggccgcccggcccccaccccacgcggcgctggaggccgcggggatgggggcgggggcggtcggccctgcaagcaatttactgggctctgtgcagagagggaaattgaggcacgggaacggcc

SEQ ID NO: 324393 - DNA, 122 bp, Homo sapiens
ctgggggccgccgcctttggccctggctccgggcccgtgtggctggacgaggtggggtgccggggcagcgaggcgtccctgtggggctgccctgcggagcggtggggacgcggagaccgcgc

SEQ ID NO: 324394 - DNA, 122 bp, Homo sapiens
ccatctaggcccctccacggctcattagatgacacaaggtgcgataattaccgggaaaaacgctttcctgtcccacctcatttcctctcctcggccttcagcttcgctcaaggcaaaagaga

SEQ ID NO: 324395 - DNA, 122 bp, Homo sapiens
ggacgtgaggctcagcgccagcctgcccgacacagtggggcagctcaagaggcagctgcacgcccaggagggcatcgagccatcgtggcagcggtggttcttctccgggaagctgctcacag

SEQ ID NO: 324396 - DNA, 122 bp, Homo sapiens
agtcggtcagtgttcggttgaaggattctgtgtgctgtcggacccagagggtgacggcgccgctaggatgaagctcgtgaggtgagggagtgaccaagcagctctgggggctgtgaagggag

SEQ ID NO: 324397 - DNA, 122 bp, Homo sapiens
ccagagggcagcgccattcgctcacagacggccaggagaccctccctgtgcaggcaatgccgggtgaggcatcgctcctgaagaattaatcagaaactcagaaaaattccgccgagcagaag

SEQ ID NO: 324398 - DNA, 122 bp, Homo sapiens
ggcttccgctcgtggttcggcagaaggactgggcactttgctgtgttgagaggataaacccgctttctttctgaggcagcagaagccatctccacggaaacaaagctctcgcagagctcccg

SEQ ID NO: 324399 - DNA, 122 bp, Homo sapiens
gcgagccggccgaagtcgggcgagcgcgccgtgcggcggctgggagtgggctgcatgtgccgcgcggggagcccgcccgacttcggggaggcagcggggcgccgtggccccgcggctcagct

SEQ ID NO: 324400 - DNA, 122 bp, Homo sapiens
ttttttatttttttttgtgacacagcgtctcactctgtcacctgggctggagtgcagtggcgcagtctccactcactgcaacacactggctgggctcagatgatcctcccacctcagcctcc

SEQ ID NO: 324401 - DNA, 122 bp, Homo sapiens
acattgctgtgctggcccctcgaggccaggtgcaggagctcgtcaaacttctgcaggacacggcgagggggcgggtgaggcgccaggagctgctggaatccccacgaccccagaaaccaagc

SEQ ID NO: 324402 - DNA, 122 bp, Homo sapiens
ggggaatccaaggtctgggtttcagtctccatgaaacctttcccaaccaaccggctggagcgagtgattccttcctgcctgcctgcacctccctagtacttcgagcgattatttgctgactc

SEQ ID NO: 324403 - DNA, 122 bp, Homo sapiens
gggcacttagccgtgcaggaacaacggcgagcctctagccccattaggaacggcaatgggcgcctcctggatcagaagcgtaggagacacgctgctggatctggtggggtggaagtcagcag

SEQ ID NO: 324404 - DNA, 122 bp, Homo sapiens
ggccagggcgcacgcagggcagctcagcccgcgcctcgccttccctcccttcccctcccccgataccatcaactccaaaaaggcgcactcccagccgctaggctgtgtgcaggtgaaaccaa

SEQ ID NO: 324405 - DNA, 122 bp, Homo sapiens
tttctatgtagaagtttttgaatttgtgtgtgtgcttgtgcgtgtctacacctagtattacggctgggactctccagctgtttttgttgttgttatgtttttaagagggttgaattcttcca

SEQ ID NO: 324406 - DNA, 122 bp, Homo sapiens
cacagggagtagagatgtagggaggcactgggctggcatcagaagacctggttccggccgcgcctctgccgctatcagtgtgtgtgaccttggccgagtcatttcacctccatgagcctcag

SEQ ID NO: 324407 - DNA, 122 bp, Homo sapiens
tgtttacttatagatgaactgtttaaatacatacattacataacacaaacatgtaagtgacgcaactgaaacagagcttcttctgtgtccttcctccagctcaatcagcaagcattgtccag

SEQ ID NO: 324408 - DNA, 122 bp, Homo sapiens
caactttctaaaaatgttaatatgtgaaaagacgttacatctaaaattcaacaagtatggcgaactgtgtgtgcaagtaagtgcactagcttaaaaatatagaatcctaaccacgcataaaa

SEQ ID NO: 324409 - DNA, 122 bp, Homo sapiens
cctgcaactctgccttcttgagtccaagtgtcttcgaaagggcaaatgcttcgtaagtgccgacagggtgtgtttcagtgaatgtttgcagtgtgcaccggtctggctgaaggcctcttccc

SEQ ID NO: 324410 - DNA, 122 bp, Homo sapiens
cggggagatggcacagaaatgattacctttccaaaatgaggaaggggaaaggaagaaggccgtgattaccagtgggaggcttccaaggaacaggcatggttctacttctccacctgtgtaag

SEQ ID NO: 324411 - DNA, 122 bp, Homo sapiens
gtggaggcattaccgcctctccgtgccctcttctcttaacctgccctgggccaagggcctcggccccgcgaaactgcgagtcctccagaaagacacatcgctgttggggtgtccaacctttc

SEQ ID NO: 324412 - DNA, 122 bp, Homo sapiens
tgagttgccttcggccttcctggattcagcactcaacacccgctggacaccaggtttcaacgctctgtcctcaccaaccctccctggcaccacctctgctcggggtctttctttactagagt

SEQ ID NO: 324413 - DNA, 122 bp, Homo sapiens
tgatttctgctgccggagttgctcctccacccctaagttaaagctatgaacctgggtgcccgggcaacgccccacagtggatagcagccgggagcgctggttttgtgccttttgtgggggcc

SEQ ID NO: 324414 - DNA, 122 bp, Homo sapiens
tggaaagccaaaggcaagctccagctccagaccaggcattgggccagccgtgcctgttaccgtaagttctgttcatggcctcaaccaactgcccaaccatgcgggcaaatgaccaagacgcc

SEQ ID NO: 324415 - DNA, 122 bp, Homo sapiens
atactttaggtgagaaagagaagaccacaaatgaacagagatccttccatatttgcttcacggaagccctcccctgagctacctgagggtaggtataataccttatctctcactcacaacac

SEQ ID NO: 324416 - DNA, 122 bp, Homo sapiens
ggggcttcggggcattccattggcctgagtaaaacgccagttaaataactacgcaaaagacgtactcacgggtaccctccccagagctccacccgggcgacttccgcaatcggagtaaacag

SEQ ID NO: 324417 - DNA, 122 bp, Homo sapiens
taaattattcacaagtcatatgtgaatcaaccttttctgtattccttaaagttgtacaatcgactgatgaaaaaacaagcttcatattcaaagacactttcagaacacacctacaattaact

SEQ ID NO: 324418 - DNA, 122 bp, Homo sapiens
tctccgcggagacagccctcggttatggaggtaccgcctgcgggattggagtgccccttgcggctgtgggaggggcagtcgggggctggggggacgcaggtacgcctgtcgccaggacgcct

SEQ ID NO: 324419 - DNA, 122 bp, Homo sapiens
ggccattatgagtatccctacaggccgagtctcagggtgcccccagaagcccataccagccgctgtaaggcagagcatggacttcccctcggggactaaatcccattcttgggctccagagg

SEQ ID NO: 324420 - DNA, 122 bp, Homo sapiens
gtcagaaggactgcgggtccccagggctccgcggagccctgtctttcgggggtcccgggccggagggagccccctccagagcctgtgctctccgaggctccggcttgccccggaccccgctt

SEQ ID NO: 324421 - DNA, 122 bp, Homo sapiens
gcctatccttattttcatttttaacatgacacagccagctataaattctgtgggaaacaacgccctgtgggataagatcatcactttctatttttcctttaataaaagtcaccctaaatggg

SEQ ID NO: 324422 - DNA, 122 bp, Homo sapiens
tgtatatgctcatgctttgcccagggacaatgacaagtgttagaagtcccagaaaaagctcgaggccagtggttctgaaccctggctgcaaattaagaagtactgatatcctggctggtcat

SEQ ID NO: 324423 - DNA, 122 bp, Homo sapiens
ggatccccagggaacggtcagtcccaggttatccgctgagggggaggggctgagtctctccgccccagagggggcgggcacactttctgtagagcaacttcgcggacttccggttcaagccg

SEQ ID NO: 324424 - DNA, 122 bp, Homo sapiens
cttcccttcttttgtgtcactagaaaaaagagccgcaaacaaatgtcacgtcactcgctgcgcagtctggcgtaaggagctgtgctcatctcctgatatgagcggaacctggcagtcagccc

SEQ ID NO: 324425 - DNA, 122 bp, Homo sapiens
accccactggaaaacttgaacagcactctgcatcctgctgcctcaacactgcaacacagacgctgcagtgcatgataaaactgtccacatccgaattgtccggtaaacagcgtggagcctgt

SEQ ID NO: 324426 - DNA, 122 bp, Homo sapiens
atattcaggaggactccacaacactcccctcccccaagcttctttacctcccaatgagaacggcgccgagaacctccacccaaggtccttctacccagacaagcaggttatgggccctaatc

SEQ ID NO: 324427 - DNA, 122 bp, Homo sapiens
aagatgcatcctgagtcctgtgtgccaagccttggcggggcaaagttggggcccggaggacggtaagacacagcaactgcgagttcccagagacagatccgggttccagccccagctcacca

SEQ ID NO: 324428 - DNA, 122 bp, Homo sapiens
gacagtctctgctcctgcctgattctcacgaatgtaattataacctgacgagtgctactacggaaaattacacagaatgtgtgaatttatatcagggggtactagtggcggggaaaaggtgg

SEQ ID NO: 324429 - DNA, 122 bp, Homo sapiens
atgcacctacgtatttttccttgaaaggagctgcagagcctttggaacttcacttctcagcgaggaaaacccttcagattctcactgcttcttggagggcgggggtagggctggtgaaaata

SEQ ID NO: 324430 - DNA, 122 bp, Homo sapiens
tcatcagagtcttccagaaaccgcggtggggggatcgcccaggatcgcactcaggaatcccgccgagggagctctgtgaatgcaatttaggcgaccgcactttctaatgtttgaaatattgc

SEQ ID NO: 324431 - DNA, 122 bp, Homo sapiens
tttaggagcttatttagacatgtatctgatagctaaggatttttcaactttattctcttacgtatttttcaactgtaaattattgggcttttaaatcctgctagtattgctcgactcttact

SEQ ID NO: 324432 - DNA, 122 bp, Homo sapiens
gccccgcccccttcttgactccgccctctcagcgaggctcaggtgcacaagccggaagtgcgctctcccaggtgagtgactaaactttccgggtcacgtgacagggcggagccggtggggtc

SEQ ID NO: 324433 - DNA, 122 bp, Homo sapiens
gcgcgggtcaggtggcgaagggcggagtctgcgcggggttgggcggagcctgcgcggggccggtaggatcgcgtcgggagccggtaccgaggcccgagccgcgggagtcgagcgaaggcagc

SEQ ID NO: 324434 - DNA, 122 bp, Homo sapiens
accccctgcccccatgtctcgaggccttgttttccagcttagcatgacaggaaggctgcacgtaccctgccttcattcatttgtccaacgcagacatgttgatcctaaaggctgcccctgag

SEQ ID NO: 324435 - DNA, 122 bp, Homo sapiens
cccacagagggaacaacgacagtgaagatagaagcacgtggctgcagggagacccgtagacgctgtgttcaaaagcggagagcgtcaagggcagagagataaatggggcaagctctggttcc

SEQ ID NO: 324436 - DNA, 122 bp, Homo sapiens
acctagcaagagagggctggagtaagatttgcactgtggcccgccaggctctgaagcctgcgtactttgtgtgtgccacacatctccagcggtggtgggatgagaagagaagacctgggata

SEQ ID NO: 324437 - DNA, 122 bp, Homo sapiens
gatggggtctcactttgtcacccagtggcccgatcatagctcactgctgccttgaattcccgggcccaagccatcctcctgcctcagccttcctagtagctgagactacaggtgcgtgtcac

SEQ ID NO: 324438 - DNA, 122 bp, Homo sapiens
cctttcctgaccaccaaatatttcacttgggcattcattctggccccctgtggggctctgcgggggtcccgaggcacctaactctaatctcccaggggctgctaagttacatgacttcacaa

SEQ ID NO: 324439 - DNA, 122 bp, Homo sapiens
tggtcacagcacatctgagttctctgaatggagggcctagggtgggcctggtgcaggtaacgccctcttgaagtgtttgctgatgactcttagggactggcaggctgagttcttccccaggc

SEQ ID NO: 324440 - DNA, 122 bp, Homo sapiens
gtctgggttggggtgggagaaggcagtccaggaagaagatactcgtctttggccaaaagccgattgagcggaagtgagagagaccgggatttgatatcaactacccgcaagcccccccactc

SEQ ID NO: 324441 - DNA, 122 bp, Homo sapiens
ctgggctcaagtgatcctcccacctagacctcccaaagtgctgggatttcaggcatgagccgcagtggccggtcagaacctggggcccttttgaactttgattcctcagcaattttgtcagc

SEQ ID NO: 324442 - DNA, 122 bp, Homo sapiens
gtaggcacttggcagcactccgagggctgggcccggccggggctctgcgcaggctccgcacgcggctaggtcatcaggatgggcttctgccgaacttccaggatgtctagggccggcaggag

SEQ ID NO: 324443 - DNA, 122 bp, Homo sapiens
gaggatgtctgtgtgctgggcagtggggcctcagcacagcacgccaaggggcagctcccccgagtggctttggaggcctgctcccataggatggagctggcagcctcccacttagtcctgcc

SEQ ID NO: 324444 - DNA, 122 bp, Homo sapiens
ccatccttgctaggcccacccttccccaggagtgtgtgccttggacccaatctttatcttcggctggggcctcactgcagcacagtgtcccattgcctactggtgatctcatcccagtcccc

SEQ ID NO: 324445 - DNA, 122 bp, Homo sapiens
agggtttagaggaggcctggggctgaggtttcagggacctgggctcagggcttagatcaccggttcgagtacacccagggggaggactggggtcggggctggggcaggacccctgcgtccac

SEQ ID NO: 324446 - DNA, 122 bp, Homo sapiens
ctgggggtccctccctcccggggacagagtgggcgtcctgggtggacgagcacggggaagcgggtagggtcttgggtctgttctgtccttgtggttctggaaccggaggggaagggggaaag

SEQ ID NO: 324447 - DNA, 122 bp, Homo sapiens
atggccaagcttccctctacccaagaccgacgaagttggggaccagactcctagagggggcgcggggattctcagggtgtggggaacaggtcctccagagacaaatctgccttgcaggtggg

SEQ ID NO: 324448 - DNA, 122 bp, Homo sapiens
agaggaagagaagggccatactggccgcgggaggagacaactccaggcaagtgtggggagcgcgaagaagccgagcccctgcggagagctggtcgggtggctagggcgtggcgagcgcgacg

SEQ ID NO: 324449 - DNA, 122 bp, Homo sapiens
ccccataaggcccaagcaggcccagctccccgcttctgccgcggtctcctctgcttcccgcgttccccgtccctgccagagcccgcgacagagtccttgtgtctccgtccgagagtcccaga

SEQ ID NO: 324450 - DNA, 122 bp, Homo sapiens
cagggtaggtttgtgtcttaaactaggtgttctaatcaatgtacaagactttaccatacacgcaactatagtttttctaaaccttcatcattttgtgattctttgagaaagggcttttagga

SEQ ID NO: 324451 - DNA, 122 bp, Homo sapiens
ttctggaaccagatcttgatctggcgctcagtgaggttcagcagattggccatctccacccggcgcggccggcacaggtagcggttgaagtggaactctttctccagctccaccagctgcgc

SEQ ID NO: 324452 - DNA, 122 bp, Homo sapiens
caaaataaaaataaaaataaaaacggacgggcgaacgcgtcgggtgggcgtagggttccgcgaagcctccctgtccctcttgtctcgtcctagtcggtctagctgggccccatcccctttcc

SEQ ID NO: 324453 - DNA, 122 bp, Homo sapiens
ctgggcaacgagagcaagactctatctcaaaaaaaaaaataaaaataaaaaaagcgaaaacgtacataaaatatccctggaaggattcacaggaacagcatcccacagattgcctacagggt

SEQ ID NO: 324454 - DNA, 122 bp, Homo sapiens
ataattatcataggccaagttctataatctgaggtgattggattctttctttccccatagcgacttttgaatacaacttttctgactcagtgtaatgctttaccattcattatatcaaactg

SEQ ID NO: 324455 - DNA, 122 bp, Homo sapiens
gacagcgggtgagctgggcagaaacccatgccgggaagaggcggacccagtggaccgcagcgcccgcagtcgccgggccaggcgcagaggcgaacgggaggcggcgctgcaccgtgcccgcc

SEQ ID NO: 324456 - DNA, 122 bp, Homo sapiens
ggtgcgcctgcgcatcaggggcgcgcgcaaggggctgatttggtgatccctttaagaaaccgcaggcggaggaatttctctgagagaaaataatcctactcacggggccccttggaggccat

SEQ ID NO: 324457 - DNA, 122 bp, Homo sapiens
cttgtgccgcagggctttaaaggaaacgcccacgtttcttccgaccagggatttccgacccgagaaccttacctcaaaggccgggaggcctttgagcacctccagctagggctgctgataaa

SEQ ID NO: 324458 - DNA, 122 bp, Homo sapiens
gccagccgcgggtcacgctccgcgcccggccctgaggcctcgccatacaggaggcaggtgcgcgcctaccgggcccgcagcgccaccacctccggccgcagcccccctggcacccagccgcg

SEQ ID NO: 324459 - DNA, 122 bp, Homo sapiens
gagaggccaccgtgaggcctgagctgggcctggggagcttggcttcaggaagctgtgggccgaccaaggccaccaggagctgggcaggcagagtccaaagaggttgttgggaggcaggagtc

SEQ ID NO: 324460 - DNA, 122 bp, Homo sapiens
ccccccacgtcgggtgtgtctagagacagcagaagactttggaaaggagggaagacactgcgtgagatacgcacaaaggtggcgttctcacatagttcatacattctctccaatcatctcac

SEQ ID NO: 324461 - DNA, 122 bp, Homo sapiens
ttaagagctgtaacactcaccacaaaggtccgcagtttcactcctgagccagcgagaccgcgaaccccaccagaaggaagaaactccaaacacatccgaacatcagaacgaacaaactccgg

SEQ ID NO: 324462 - DNA, 122 bp, Homo sapiens
gcgctgccttccctgcagcatacccaaggcgggctgggtcatgctggccaggagccagcgcgtcagctaccccggccggagaccgtaggtcggagcgctgagtgtccagatcccttgcaggg

SEQ ID NO: 324463 - DNA, 122 bp, Homo sapiens
gacgggcccgcgtgtcgagcactcctcgccgtggagatcgggcgggagggcgaggctgtgcggcgagggcttctgcggatgtggagggtgtggcatttgccatcgtgaggtcttgcttgctg

SEQ ID NO: 324464 - DNA, 122 bp, Homo sapiens
cttctgttcccctctgtgacccctgtctgtgtcccttagacgacctcgtggagaagacgccgtgtgcatggaactcctcccgtgtctgcgaatgtcgacccggcatgttctgttccacgtct

SEQ ID NO: 324465 - DNA, 122 bp, Homo sapiens
acacacccacctctcccataaacacacacacacacatgcacacccacacccacgcgcgcccgcaccgccccacgcgcacacactcctgcccacgcccacgcagcgctccgggaagtccggtc

SEQ ID NO: 324466 - DNA, 122 bp, Homo sapiens
ggaatccctgccacttctgcttttccactctttaatgaagctctcctggctgccttgtcccgcccttttcggggcccacctcccagagggttgggcaagctgcctcatcctctgcccacaag

SEQ ID NO: 324467 - DNA, 122 bp, Homo sapiens
aaacattacccctgaaggaagccttccattcctgcttatatctttgtgtagccttgttctcgtagcctcctactcagaaatcaactgagatctatctgtaggaataatgctgttcaaaaaaa

SEQ ID NO: 324468 - DNA, 122 bp, Homo sapiens
gctcagcctgggactcccgaacgccctgcctcgaaaaccccctcaattcaggtcttcctccgtggacacccagagttcattgtgaggcccccagggcatctctttgctggcactgggacagg

SEQ ID NO: 324469 - DNA, 122 bp, Homo sapiens
ggcctcaatctgtctgccgaggctccctccgatgctaatgagaaggaagcatgtgggtcccggggagaccaagtctcagcatgcggcgctcaatgaagtcaagcaatcgtccaaagtgaaat

SEQ ID NO: 324470 - DNA, 122 bp, Homo sapiens
cgcccctccccccgtccccaccctcctcctggagaacaggtgagccccggtaccagctctcgatcccccacccccgccccgcgccccgcccgcgccctctgcggtaatgcgcctgggaagtt

SEQ ID NO: 324471 - DNA, 122 bp, Homo sapiens
tcctgaattcactccccctacctgaggctttgctggaggcatcttaacggcctcttggcccgacccaggctggtaagagccttggcaagcgcacgcctgcgtgcccattctccagagttcct

SEQ ID NO: 324472 - DNA, 122 bp, Homo sapiens
tgccacgttttgtgcactcgctctcagaaagcctaatttttctttacgattcttcgagggcgtatacacagccaagccgagccaagtgcctgtgtccgtgtgagccctgggccccaggagca

SEQ ID NO: 324473 - DNA, 122 bp, Homo sapiens
gaaaccttagaaacccctgacaaattatgcttaggactttgaagttcatagaaagttcagcggccaccattgcttttgactctcctaattgaagcaagtagtaaatctgtattctgcacaga

SEQ ID NO: 324474 - DNA, 122 bp, Homo sapiens
ctgggctctgtgctcccttccccaccccaggtgtcctattcatcaggatggtcacatgggcgctgctggggtgtcccatgaggaatgcaaagtgcctgagttttccgactcttcctttcaga

SEQ ID NO: 324475 - DNA, 122 bp, Homo sapiens
attaacacctgtctgaaaatcaaaaacatggcttcccagcagctctcctgtctccacagccgcgttttttaaccccgacctctcagcgtctgaatgaacagcgctcccacctccagtcctgg

SEQ ID NO: 324476 - DNA, 122 bp, Homo sapiens
acataattgggattaagtgaggtcccctgcttggcttggggacagatctggaggggcaggcgggcatggagcgtgtgccagaggtcccctgccaggaggaggcagctgggaggaagggaggc

SEQ ID NO: 324477 - DNA, 122 bp, Homo sapiens
aagcccttcatttcctcaagctctgcttctggcactctgggctccatttccacattaacacgctctctaaatcctccgcagagctcttcaattggagttatacaagctccaaggcaagtatt

SEQ ID NO: 324478 - DNA, 122 bp, Homo sapiens
ccttctgtagagatgaggtttcaccatgtggccaggttggtcctgagcttaagtggtcctcgcacctcagcctggcaaactgctgggattacaggtgtgggccatcacgcctggccttacag

SEQ ID NO: 324479 - DNA, 122 bp, Homo sapiens
aatttgaaagttaaatttttgtcaggttctttatgttgctgactgaaaacatctaatttgcgtattgaaatctaagtagcatgtcttcaggaaacagaagtacttagaatgctgaattagcc

SEQ ID NO: 324480 - DNA, 122 bp, Homo sapiens
gacctggcagcgtatgggggctgctgcctgggcccctcagtgtgtcacttgcgcgcctcccgctcagcgcccctcggccgtgcctgtccacacaggtgcggggccggggtggtgcgcccggg

SEQ ID NO: 324481 - DNA, 122 bp, Homo sapiens
ccattcatgcgcaggaacacttccacacatggcaggctgtgtgcacacagacgattccctcgcctttataggtgctattcctttgacttgaaaagcccatcaactctaatctgcacatacaa

SEQ ID NO: 324482 - DNA, 122 bp, Homo sapiens
gagttggtttcagggctgaggtgccagggtccgaacccgcgaccccaggaaaggccgtggcgcctgcaagcgcaggcggcgcccgcagcacctgccccagccgggcctcggcctgggggccc

SEQ ID NO: 324483 - DNA, 122 bp, Homo sapiens
cccctccaggagtggcatgcctctgcgacccacgggacctgcaaggagtggggcttgtcccgcctgggttccaagcctgcccccctccttcttttcagctgagttctgcctctcctccctga

SEQ ID NO: 324484 - DNA, 122 bp, Homo sapiens
gtgtcgacatccacccccggttactgcatactcagtcacacaagccatagcaggaaacagcgagcttgcagcctcaccgacgagtctcaactaaaagggactcccggagctaggggtgggga

SEQ ID NO: 324485 - DNA, 122 bp, Homo sapiens
ggctccaccgagttccgcttgcgtcaggcgccttcgcccctatagcggggcggccagccgcgcacgggcgagttcatctccaagtcactttttgtaaacgccccgcacagcctggaccggcc

SEQ ID NO: 324486 - DNA, 122 bp, Homo sapiens
atcatcgacatcgtggtgtccctggcctcagccgggggagccaagatcttgggggtcctccgagtcttgcggctcctgcgcaccctacgccccctgcggtgaggacccctcctgggcggatg

SEQ ID NO: 324487 - DNA, 122 bp, Homo sapiens
tcctgcctctgcctccccgaggcttctggccagaagcgaggctctgggaccccacgatggcggcgtttccctcactcaaggccccgctggcccctcgggtcaccgtccagccccctgcgcct

SEQ ID NO: 324488 - DNA, 122 bp, Homo sapiens
ttgtggtcaaattctatggtgaagtccatgacaagcaacatgccgtcagcgtaaatacagcgcgggtcctctagcacaacagaacccctgacatccactccattccactactttggggagtg

SEQ ID NO: 324489 - DNA, 122 bp, Homo sapiens
aagccatctcttgacgtcagatctacctggactaagatccgaatggtattcccggcggggcggagaagcggctaaaataagcagccagggattaggaaaaggaaggaactgtttgctgggat

SEQ ID NO: 324490 - DNA, 122 bp, Homo sapiens
tggcacacataaccataggatcccctctggtcatgggtcaccatgccttttcttaaactgcgcttctagtgacatggccttaaacgatggggtccccaaatgtacagtgctcctcgatggca

SEQ ID NO: 324491 - DNA, 122 bp, Homo sapiens
ctcctggagaggggtcatcttccatgggctgctttccacaggtggggctgcagcccggggcgctggagcagtggactcggggacagacccaggcttcggtcctcactgccacttcctgccag

SEQ ID NO: 324492 - DNA, 122 bp, Homo sapiens
gcccttgtggcactagctcccatgacaagggagctcaggtgaactccggcaccctgcccccgccacatctcagcacaggatagcacagaaacgtgatgatgttcagtgccagttgccagcac

SEQ ID NO: 324493 - DNA, 122 bp, Homo sapiens
gccatggaagcctgggagcgagagtgtgccatggttttatcatgtcttagaaagatccctcggccgggcacggtggctcacgcctgtaatcccagcactttgggaggccgaggcgggcggat

SEQ ID NO: 324494 - DNA, 122 bp, Homo sapiens
ttggtaataaggaggacactggccagcctccagttggtttctgaagctagcagtcttagtcgtcctcatcttctttactttctgaatttgacgatgctgataacccttccttcttgaaattc

SEQ ID NO: 324495 - DNA, 122 bp, Homo sapiens
tccccgttgctctttacaccccggaaacggcaagggaacgacgggctccggcggaggggccgctgtgggagccggttcaatccagcccggcatggttctccaggcctgcccgggcgcatgaa

SEQ ID NO: 324496 - DNA, 122 bp, Homo sapiens
acagtcgattgatggctctcctgaaagccagagtgggtcctaggggcagtgagttgccagcgctggagacaccgcgacacaccgtttacgtgctgcagccaggcgctcatcaggttctaagc

SEQ ID NO: 324497 - DNA, 122 bp, Homo sapiens
aagcgagtcccaacagagtcaggagacacacaggggccactcagtccacagcaggccggccggcctcactctggttaaggaaaggctgggagcccagccggcccgtcaggggctcagggagg

SEQ ID NO: 324498 - DNA, 122 bp, Homo sapiens
ggagggagaggaagggaaggagggagaggaagggaaggagggaaggaagggaggaagggacggagggagggaggaagaagccccatggctttcttgtaaatagcagctgccctgaagtctgt

SEQ ID NO: 324499 - DNA, 122 bp, Homo sapiens
cgagcggggcggctcgtggtgtttctaacccagttcgtggattcaaaggtggctccgcgccgagcgcggccggcgacttgtaggacctcagccctggccgcggccgccgcgcacgccctcgg

SEQ ID NO: 324500 - DNA, 122 bp, Homo sapiens
cttcctggaggaggtgccaatcctggctcccaagcagaggtaggtgggtgcatggggcagcgaggggccttggctgcctgcctgagagtttaacttgatcctaccgcaatagtccctgagcc

SEQ ID NO: 324501 - DNA, 122 bp, Homo sapiens
attttggtcttcgtggtaatggcggtgccgggcctcctggaccacatgagaaggctggtgcggttctagcgatgcagtggttctcacactcttagtcatccttccactgacacacagtggct

SEQ ID NO: 324502 - DNA, 122 bp, Homo sapiens
ttgagagctgtaacactcaccgtgaaagtctgcagcttcactcctgagccagcgagaccacgaacccaccagaaagaagaaactccgaacacatctgaacatcagaagaggcagactccaga

SEQ ID NO: 324503 - DNA, 122 bp, Homo sapiens
tacccaggttctgcctctgaaaggcacagcaccattctgaatcaaggaaacaagccaggacgtgcaaagatgagggcagaattccttccaccccactcacgacaacagcccaagtaaggaat

SEQ ID NO: 324504 - DNA, 122 bp, Homo sapiens
cattaagcaaacttaacaaacacgaggagcacaaacagaaacctctttctcagcttgcaacggacagatgtttaataagatgccatgggccgggtgcagtggctcatgcctgtaattccagc

SEQ ID NO: 324505 - DNA, 122 bp, Homo sapiens
cgctctggtgatgggcgctggtgctcacccaccacttcctgtgtatctatctccctggcccgcccggctcagtccccactgctcagcactaggccggcagaatctgagcgatgtcttccaca

SEQ ID NO: 324506 - DNA, 122 bp, Homo sapiens
tctggggtaaatacctgaggttcctcgtctagtgccaagaagattaaggacatggatacacgcaaggagcgagtttaggagaggagatttcataggcaaaaaagggagaaaaggtctctcat

SEQ ID NO: 324507 - DNA, 122 bp, Homo sapiens
actccgtctcaaaaaaaaaaaaaaaaaaaagaaacaaaacaaaagaatgaaagaaaagtccgaaacctcctgcgccactgtccactagctgcgcgcgttaggaaaccagaggtcagcgcccc

SEQ ID NO: 324508 - DNA, 122 bp, Homo sapiens
ggggcgggtaatgaacactttctgcagaaggtaggtcgtgggaagactgggaaaaggcagcgctgccgaagcttgcacctgagcagctaaggtctccgctcccgacctcagtttccccacct

SEQ ID NO: 324509 - DNA, 122 bp, Homo sapiens
gctgccctactagaagctcagagagcagcggagccgcacgtggtgatgaggggctaagttcgggggcggcggtgctgaacacaggaaagcggctgctctgcggctccaccatgaagcccagc

SEQ ID NO: 324510 - DNA, 122 bp, Homo sapiens
ctccgctctagcaacgcggccaccatctccatcggcggctcaggggaactgcagcgccagcgggtcatggaggccgtgcacttccgcgtgcgccacaccatcaccatccccaaccgcggcgg

SEQ ID NO: 324511 - DNA, 122 bp, Homo sapiens
aggactgggaggtgttgagagcagagttcagggctggtgcactctgcggtgctgagtgggcggcgcgcccgggcgctcaggccgggggacctgtagtcgccctaccgcggaggggaaaatac

SEQ ID NO: 324512 - DNA, 122 bp, Homo sapiens
aacttactttctttgcatagtctactcacaagggaggcctggccctgggacccgggtccgcgcccgtcccccttctccccgcccacctcgagcctgcaggagaggggaccccgagggcccag

SEQ ID NO: 324513 - DNA, 122 bp, Homo sapiens
acaggcacaagcttgagccccacttgatcccaggagctgcctgagtgcagaagcagagcccgtccgtgcaccttggagacatagtagacgcactgctggaaggcgtacagcaccacctcctc

SEQ ID NO: 324514 - DNA, 122 bp, Homo sapiens
ggaggagaagcgcaggagccggcggtagcccgtggtggggtcggtctgcgcggctgaggccgagaggcagttctcctccatggcacactgcagcatgaacatgggccggtcctccaggtagg

SEQ ID NO: 324515 - DNA, 122 bp, Homo sapiens
gtagaagtaaggcttgctgtaaatcttttaacaaagtatctctttggtgacaggaatggccgtttgttagatgttgaccctgcctggtgaggagcgctatttctcttgctcatttccagcag

SEQ ID NO: 324516 - DNA, 122 bp, Homo sapiens
gggaccactcagcgtttcccacggccctgcagtatcctgggctgaactcctgaacttcttcgggagaaagcacctgaccatcaggcagtctgtccttgattgagtaatgcacacaggtccac

SEQ ID NO: 324517 - DNA, 122 bp, Homo sapiens
gcctcctttgtagagcaggtaatggattccccatatgtttctgctttgcaggccgggccacgacggctcacacctcgctctcctcctgcctccgaggttaagacctcggtgtgttgccactt

SEQ ID NO: 324518 - DNA, 122 bp, Homo sapiens
cggctctctcggagcgcagggattggctgaacttcagccaaaggacggaaggaagctaggcgtccgcaactgggccccactgcgctgaaatggacgtcgcgccctctgttggccgggaggtt

SEQ ID NO: 324519 - DNA, 122 bp, Homo sapiens
ctttacttttcctctgatccccagtttccagccaggagttggtctctgctgggtcttccccgccccccacgccgggctgttttctttgaagccctggctgcccgggtcccacttcgcctctg

SEQ ID NO: 324520 - DNA, 122 bp, Homo sapiens
ctgatgatcccttgcagttccacttcaccaaggtcagagcccagcaggcagccaggcgggcgggcgtcccaggacgctggggtctcccgggttgggtggggggcggtggggggggcggtctc

SEQ ID NO: 324521 - DNA, 122 bp, Homo sapiens
cgcaccccggacactgggttctattagtacccaccgcccccaaaagccctgaggggtttccgtcgttcctggagccactccgggcgccctggactcttctccgactctgcgcacatcccgca

SEQ ID NO: 324522 - DNA, 122 bp, Homo sapiens
cagcctctgccccagccccggccacccagggatcgatcggtacagtcgaggaagaccacccggcattctctgcccactttgccttccaggaaatgggcttttcaggaagtgaattgatgagg

SEQ ID NO: 324523 - DNA, 122 bp, Homo sapiens
ggaatcagcgtgggggaaaggaagcgggcattccacagtgcaagactctgacacacagagcgtcttgcacccgccctgagctgagcagtcctgaccctaaagagctgccattcctctggggc

SEQ ID NO: 324524 - DNA, 122 bp, Homo sapiens
tctccctgtagacccaggcgaagatgttggggctcacgttgtggtcggcggtgcagtaggcgatgcgggccacctggaaggtatccatgtgcactgtggcctcccctttgtggtcgagatga

SEQ ID NO: 324525 - DNA, 122 bp, Homo sapiens
tccagagaaatcatggccgcatcagtgaaatccttagtgacagtgtggtgccagacattccgtccgctgtcacaacagctagcatgcaggtcctcaagcgacaggtccagtccttaatggtt

SEQ ID NO: 324526 - DNA, 122 bp, Homo sapiens
ggcgcccggccccttcccttcttgacacgtgcccgggcggtgctcgcttgtaccccgccgcgcgaccaccgccccttgctgcacgtctgtactctcaggccgttcgtcccgcactcccagct

SEQ ID NO: 324527 - DNA, 122 bp, Homo sapiens
cgcgccgcgcttccggacccgcgcgactgcgaagagccctgacccgggggcgcccacgcccgctcctgcgcagcttgggggcgctggcctcagagacaccctcacttgaccccgagctcacc

SEQ ID NO: 324528 - DNA, 122 bp, Homo sapiens
gaaatgagatggttggccagagggtccccaagaccccaaacctgtgaaacccagaccaggcgatgtggccacaggttcccaagcagcggaaactcttagatcggcctccgcgtctgagaaca

SEQ ID NO: 324529 - DNA, 122 bp, Homo sapiens
cacctgagtgtggaccctggagcacaatgccatgaaaggcagaggtgaccttgtacaagtcgagcccttactatgtgcaaatcccacccgcctgccaggcagctgttgtagtcctgttttcc

SEQ ID NO: 324530 - DNA, 122 bp, Homo sapiens
gctcctcagggggccagccctgtgagggaaacgtgtgctcacgaaagtcagcctggccttcgagcccaccaaggggctttgggatcacacagccaggggcaaatctcagctctgcagcctga

SEQ ID NO: 324531 - DNA, 122 bp, Homo sapiens
ccaggagccctgtgcccagcacagcaaggcctaggctgccactgctgtcccgggtgagggcgggaaacaggcaggagtaaatgctgcctcctactggagcttggtggacttggcaggcgagt

SEQ ID NO: 324532 - DNA, 122 bp, Homo sapiens
gggtttattgggaggactaaaccaaggtaacctaacctaaatcctagcatttatgtgtcccgtgatcaacatgccagtaataccaggactcttcctaattggtctgtatgcagggattgaac

SEQ ID NO: 324533 - DNA, 122 bp, Homo sapiens
atagtttcttgttgatgttgttattattattgattattattatttggtgaaagctaatgtcggaaagatgaaaaacatggttttagaacttaatcagttacaaataattttatttatatcaa

SEQ ID NO: 324534 - DNA, 122 bp, Homo sapiens
taacagtgactagtgccagaaactggctaaaggttttctatacattactactttaatgttcgcaaagagccctatgaagcaaattctgtgatcagccccattttacagatgaaaacctgaag

SEQ ID NO: 324535 - DNA, 122 bp, Homo sapiens
ctagctcctcagtccccaacaacaccagctgcctcttggagcttgtgttcgtgttgaaaacgggaaggggtgggggcaggacatgaaccatttcaccaatgaagccggttcccagccatcct

SEQ ID NO: 324536 - DNA, 122 bp, Homo sapiens
agtagtacgggtaatagtaggagggctgcagtggcagaagcgagggtggccgcagcacttcgccgggcaggtattgtctctggtcgtcgcgcaccagcacctttacggccaccttcttggcg

SEQ ID NO: 324537 - DNA, 122 bp, Homo sapiens
cagaggaacagaaaggttaggagggtgaccttaatgaactgtatccatgagcagctctctcgttttctggcttagggttcatttaggtctgtgatcaggagatcagaaggcaggaggaaagt

SEQ ID NO: 324538 - DNA, 122 bp, Homo sapiens
actgtaggagtcgggaggccgagacaggtcagggagggtgcctggctggctggggagggccgcgtggttgtgcatgaggctggtgctgcctgcgaggccgtcctcggggtggctgcctccaa

SEQ ID NO: 324539 - DNA, 122 bp, Homo sapiens
cctgccagatgtgcctgaagaaggcgtaggctgcaaggcagcagtcctcgtagccctcggcgcccggcgacagcaccagggccagcaggatgtgcacgcgggccagcgcctccagctgccgc

SEQ ID NO: 324540 - DNA, 122 bp, Homo sapiens
cagacctgggggctccaacacctttcgctaggtctggctctggcctctgagcgaaccttccgtacagtatggcggctcccgaagccccgcccctggacagagttttccgtacaacatggctg

SEQ ID NO: 324541 - DNA, 122 bp, Homo sapiens
caggcatactcttctttactcagaacctatgggagatacattgttgagtgctgcaccgggcgctgctcactgtggggcggccacctgcacgtgcaccctcgcggagacacccccactcactc

SEQ ID NO: 324542 - DNA, 122 bp, Homo sapiens
agagaaagtctgggtgggtgttaaattataattatgtctacaatggtatatgaaaaacctcgcaggtctctgctgatacagatatgggaagtccaccttctgaatcccatgctggagttgat

SEQ ID NO: 324543 - DNA, 122 bp, Homo sapiens
gaaataagtgacttaggccagagagtgccacggcttctgagttactctctaccctcaccccggccaccagcgctggagccacagccctgcatctgagctctgtggccgaatgcacagccacc

SEQ ID NO: 324544 - DNA, 122 bp, Homo sapiens
tgtccagatacccctccaaccctccagtcacccccactcccctggaagcattatccactgcgggcactttgtgtggccagaatggagaaccctgcagcttcttcatgtggcgtttcctctgc

SEQ ID NO: 324545 - DNA, 122 bp, Homo sapiens
gacacctgtggggttggttcccccggtgcgcaggggtgggtggtgggaaagcccgcggcccgcagtctcacgggcgcggggattaggggccgtccgggcccacgtggccgcacgccccgccc

SEQ ID NO: 324546 - DNA, 122 bp, Homo sapiens
gccctgtgcaacatctcggcgggggactccaactagcccaagcaacgcagatcctgagagcgctcaggggtaggcatttgccccagtgggacgccttgccagggcagtgtgtggcaggcccc

SEQ ID NO: 324547 - DNA, 122 bp, Homo sapiens
tggaggtcaactgcgaaatggaagcctgcacatcattggtaagtgggttgcaccctctgccggtttggctgccagtaggaaagtgattctcccaacctctggagagagagtttgctggccac

SEQ ID NO: 324548 - DNA, 122 bp, Homo sapiens
taatcttacatcttggatttgtaagtggcatttattgagttgaacatgagcttgagcacgcggtcacacattctttcagcaaacactggttaggcaccagctgctacgtgcaagcactgccc

SEQ ID NO: 324549 - DNA, 122 bp, Homo sapiens
cggcacacatactcaatctcatagtccactggcaggaagttgatagccttcacctggtcccgagtcaggccccggtacctgatgcccccttcccagggcgggtgtatgatctggcaacctaa

SEQ ID NO: 324550 - DNA, 122 bp, Homo sapiens
ggttgtccgtgttctgcaggggctgcgcccagaaggagccaatgtagacgcgcagtacctcgggcgtgttgatgaccttgcctagggaccacatgagggccccgtagacccgcatcagctgc

SEQ ID NO: 324551 - DNA, 122 bp, Homo sapiens
tgcctggctttctgcagcctccataacccatcctctgaaaacggcttctctttctggtgccgactctttgctttccaatgagccacactcctcatactcttcagcaaatatttactgatcaa

SEQ ID NO: 324552 - DNA, 122 bp, Homo sapiens
cgggtgggcgcgtctccccgcgagcatctcacctaagggggaatccctttcagcgcacggcgaagttccccctcggctgtcccacctggcagtccctctaggatttcggccagtccctaatt

SEQ ID NO: 324553 - DNA, 122 bp, Homo sapiens
tacaagtggaaagggagtatcatccctgaggagagcctggcagggccccacagtactgcccgggggtagtgaggccccgctggggagaatggcccaacccacagtgcctgtgcgcatcgcac

SEQ ID NO: 324554 - DNA, 122 bp, Homo sapiens
ctgcttctcctgttgtcttctcataacaaggactttttcagtcaaagtaaagaaactggccgggtgcagtggctcatgcctgtaatcccagcagtttgggaggctgaggcgggcggatcacg

SEQ ID NO: 324555 - DNA, 122 bp, Homo sapiens
actgacttttttttttacagaaataggaaaaccaatcctaaaattcatatggaatctaaacggacaccttaccctgggcctcttacttgttttgcagcaagtaggtgcaagtaggttaatgt

SEQ ID NO: 324556 - DNA, 122 bp, Homo sapiens
cccaacactcagatggtcctctgaacatgcatatggaaatgaggcctctcccccaggaatcggggatgccgattgagagtgcttcctctgtctggatggcctttgggagatgagctcgcacc

SEQ ID NO: 324557 - DNA, 122 bp, Homo sapiens
atacccttcctgagctaccaaaaaaagaaaaaagaaaaaagaaaacactctgaataatgccgtttatatgaggttcaaaaacaggcagaggctgggtgcagtggctcatgcctgtaatcccg

SEQ ID NO: 324558 - DNA, 122 bp, Homo sapiens
tccgccgccttgcaggaaaggattcagccccttcctcaacctcgagctgcctctggcgaccgggcaaggttacagcgaccaccctgtccatactgccggcccaaaccctggcaaaaggtgca

SEQ ID NO: 324559 - DNA, 122 bp, Homo sapiens
tcagctcccaaactaggcaagacagagggtgcaggtggtaacttgttagagccttggactcggagtccagacaggccactgtctgagtcttgtttttctaagctataaaatgaggatgacag

SEQ ID NO: 324560 - DNA, 122 bp, Homo sapiens
gttctgtcctgtcctctgaatccgcctccaagtcgcaagacgccgtgagctccaagtccacgcagagtccgccaaaggctccggccgctgatccgctccacgaagatctgagtacaggccag

SEQ ID NO: 324561 - DNA, 122 bp, Homo sapiens
tggtactactttgtggggaaactctttaactgctttctctattatttcttccatattaatcggactatttcatttctgtctttactgtgattaatatggataataggatattacaaattttc

SEQ ID NO: 324562 - DNA, 122 bp, Homo sapiens
ggaggcccgagctggagagtttcaggtgggacaccttgtggagcaggtggcccaggctgccgggcccatcgtcgggcgccttgcgcagcgcctcgccggacaccaagtagggagccgccgcc

SEQ ID NO: 324563 - DNA, 122 bp, Homo sapiens
ggcgcggcgtgggaggctgcgggctggatgcgcagggcccgggcagccgggctggggatgcgttttcggttttgccgggcgagggtttacgttctgggcagccttcgtgggtgggacgtggg

SEQ ID NO: 324564 - DNA, 122 bp, Homo sapiens
agacaccgcgtggccgggggcttgtgagggagcagcgcctgagcctgcccacctggaacgcgttgtaggcgaccccctggggagcgggtgctagggttcaactccactacgcagactgctag

SEQ ID NO: 324565 - DNA, 122 bp, Homo sapiens
aatctcccggcccactgtttggctatctgcaggggctggcctccaatgattggtcgctgccgcgagggccgccgggactcgcactcggcggttgttccagaagaaagagacagcgatggcgg

SEQ ID NO: 324566 - DNA, 122 bp, Homo sapiens
acaaaaccaaaaacccaacaattcctccccgtccagtgagtggagcgtgctttcctcgcacgccatcccagtcaagcgctgcttggagggacgcgtccacagatgatcggactcataggatc

SEQ ID NO: 324567 - DNA, 122 bp, Homo sapiens
cccccgagcgacggtgtgtgtggaagaaattcccggcttcccaagatgagtaagacgtcgcggtcatcttggtgtgtaatatgggcagagaaagaaatctgtcaggattttaactttcctta

SEQ ID NO: 324568 - DNA, 122 bp, Homo sapiens
gaaaagggaggcgcggagataagctgccggcggaagttccctctcctgcctgggccgacccggcgctttactgcttctcacgaaggtgcgccggctgctccagaaatcgcagactgcctcca

SEQ ID NO: 324569 - DNA, 122 bp, Homo sapiens
cgacaggctgagctgttgttggcaactgctatctgagaagacgtttcaggcaggctctgccggcggagacgcacgctctcccggagctgcacatagttggccttgctctgtgtgcattctcg

SEQ ID NO: 324570 - DNA, 122 bp, Homo sapiens
tgggtttcttgcaggtcggcctttcttctggtcagcctctccccgtgtctctgcctgggtcgtgtggccggttggcagtcggtttcccggcggttccggtttgggggtctgtgaaggcctgc

SEQ ID NO: 324571 - DNA, 122 bp, Homo sapiens
agtctgccttcagggatgtttggtgaggccttgaatgccagatgaggtgccagcctgttccggctatctgccctctgtactgactggcacctgacccagtgccccagtccagctgagcttat

SEQ ID NO: 324572 - DNA, 122 bp, Homo sapiens
gatctttaatgtagacatttttgtctacacattgctttattgttaaagcattagatgaaacgtggtgctcactgcaaatgtagtccctaacagagaactttcctactgcagtgatccctgta

SEQ ID NO: 324573 - DNA, 122 bp, Homo sapiens
ggcggcggcggccagcgcggccgtcacctacgagacgtgctggggctactacgacgtgagcggccagtacgacaaggagttcgagtgtaacaacagcgagagcggctacctgtactgctgcg

SEQ ID NO: 324574 - DNA, 122 bp, Homo sapiens
gccctctcgggctaccattggctaccagattcccgaggctccgcccagtcacgtgaagagcgccctggcaaccccacgtgctgcggattagtgcacttccggcgtggagcgcactttcagca

SEQ ID NO: 324575 - DNA, 122 bp, Homo sapiens
agaggaccttgaattacaaagccaggagtttgaacttaattctgtaggcagtagggagcccgctatgcttctggagcagaagaagcacgtcaggatctttgggaagattaattgaaagtgta

SEQ ID NO: 324576 - DNA, 122 bp, Homo sapiens
tgggtttcttggcggatttcttctctttcatccaagggaactcgggggccgggggggcagcggggagtggcggcggcggtggcggcggcagagcaggcccatcttcggctcgcttttggctc

SEQ ID NO: 324577 - DNA, 122 bp, Homo sapiens
ctactagaaatagagtttagaatacttgaaatcaagtctttccctgctagtaagatagtacgcactgccacttacttgctgtgaaacctcaggtagggttccagagttccttaagactcagt

SEQ ID NO: 324578 - DNA, 122 bp, Homo sapiens
tatttttcccctctttattggaatagacatttaaacaaatgacaaggacatatgtgtgaacggtgcatctgtaatgggtcagggtgttttagcagccactgcacaatcagggctaaatattc

SEQ ID NO: 324579 - DNA, 122 bp, Homo sapiens
cccgagatgacagaagatcagattatatcccatagtccagtatattctaatgcaggctagcgcagggttgtagggtgattacaacctgctcaagtgccagaatcccaagtctacaggatgaa

SEQ ID NO: 324580 - DNA, 122 bp, Homo sapiens
ctgctagaaatgacggtgctgaggtccagttatccgtttcaggaatttctaccataattacggtagcgatgttcgggggatcccctaccttgagggttaggttggggtagagagaggctgtc

SEQ ID NO: 324581 - DNA, 122 bp, Homo sapiens
gggacccgggccaaggcacccaccttgttgagccgctggatctccttttcctggtactcacgctgtcgggtgagtgggctcagctgatcctgcaggtacttgaccttttggcgcagctcctt

SEQ ID NO: 324582 - DNA, 122 bp, Homo sapiens
ggatataagggacaattcttctctagagcctctgaggggcctgcagccctgctaacacctcggtttcagactctggcctccagaatgtgacagaataaatttttgctgttttaagccactcg

SEQ ID NO: 324583 - DNA, 122 bp, Homo sapiens
tcctgggccacaccctaggccaccctccacgccctactgggtgtaaacagtggaggagaccggcagagggagagaagcgaaacccttacactctggaaatgggaaaacccacccttatctgt

SEQ ID NO: 324584 - DNA, 122 bp, Homo sapiens
tgtcccaccagccccatcttgtgtctgcgacagtgtgaatgagtattaatgggctgagtccgcattgcactatacacggtgggactcctgtaccctctgcacatgtgtgtgtgtgcatgtgt

SEQ ID NO: 324585 - DNA, 122 bp, Homo sapiens
agcatccctcgccccgccggccaccgcctccccggcccggccgccgcccccgcccccggccgagggggaaaacacacaaagaaaacagaaataccttccacttaagcatggaggcacattag

SEQ ID NO: 324586 - DNA, 122 bp, Homo sapiens
caactgttggctgggcccaagcaaattagtaaaataaattaggtgctgtgtgaaagtatacgccacaatcacacctgcgggaaggaccaggaataaatttcacagttctacatatttcccag

SEQ ID NO: 324587 - DNA, 122 bp, Homo sapiens
ttcaaaaacaagacctttgtgagcaatgggaagggactgcctctttgactgcatttattacggaagctgaacggacagctcccagctgaaaaggcaacttcaccatcgacggttctcgccag

SEQ ID NO: 324588 - DNA, 122 bp, Homo sapiens
cacacaatctgttggtggctggccttctttcattctgctctctttagtagaggccaaaaacggagtcatgtccagctccaagggaaaggagataaaggtattaatctttcgcctctgtttgc

SEQ ID NO: 324589 - DNA, 122 bp, Homo sapiens
cttccctctctcctttaatctacccgtaactcttccaggtaaacagaggacatcctaccacggacaaaacaggcccagggggtggaggaacttgtccaagctcacagggcatttttttcatg

SEQ ID NO: 324590 - DNA, 122 bp, Homo sapiens
ctcacagctctggtggatacgagtctgaaatcacggcgttggcaggatgatgttctcgctcgtggctccggggaagaattcttcctggcctctttcagtggctggtggcttccagcagttct

SEQ ID NO: 324591 - DNA, 122 bp, Homo sapiens
gccaaggaggcgaagcttcgagacctggaggactcactggcccgtgagcgggacaccagccggcggctgctggcggaaaaggagcgggagatggccgagatgcgggcaaggatgcagcagca

SEQ ID NO: 324592 - DNA, 122 bp, Homo sapiens
agttctggttctatacttgttagctgtatgaccttggtcgggcaagctgcttaacctctccgactcagtttcttgacacttcaaacatgggggaactaatggtctccatccacaggcttgtg

SEQ ID NO: 324593 - DNA, 122 bp, Homo sapiens
ggtgggtccagggaagcttctggttcaacgatgagagtggttgattttcttaggtcacagcgtctgacctgtggagccgggtatgtatacaccctaaggcataattagctcaagtgttgtgg

SEQ ID NO: 324594 - DNA, 122 bp, Homo sapiens
tgaacttgggctgccttcccgtgctggtattgagaaagcgctgtagccaagactcaggttcgcgacgtttacgcccacgaagactcgggttcgccatgtttaccctcacgcatctacaacag

SEQ ID NO: 324595 - DNA, 122 bp, Homo sapiens
gtgacccaggaaaccccttagtcccaggaagatcagcacagcctaggccagaaacagtttcgggccttagggaatttccagctggttggggattcaacaaattcagaagagtgtgaggctcc

SEQ ID NO: 324596 - DNA, 122 bp, Homo sapiens
gttctaattttctccacttctttcacagaaaggattagattttctgggtgtcaccctccccggcagagttctgtagcctcgggcaccctaccagcttttgcgatcctccttcccaggagtag

SEQ ID NO: 324597 - DNA, 122 bp, Homo sapiens
tgggatggggatgcaggaacagagcttggaagaaagaagaaaaagaatggcacacacgttcgaaatggaattgcagggtctaaactcttatgagggtcacatttccccaaggtaatcttgat

SEQ ID NO: 324598 - DNA, 122 bp, Homo sapiens
actccagtgtgagcaggactgtggctgacttgtcaatcatcattagggtgatgtcccaaacgttcaagtctgaggcccagggaaattggcaacagctgcctggatgcctccatcctcccagc

SEQ ID NO: 324599 - DNA, 122 bp, Homo sapiens
ctcttcactccggccacagctgggtactggcctagggagagaccagccgagtagcacgcccgcaccctcgccttcctcctcagcctgtcccgtgggctcttgggtccaagtaagacttttac

SEQ ID NO: 324600 - DNA, 122 bp, Homo sapiens
atacacaccgagtatataagcgggtcctcttgacatatgctaatcaagtcctttcatgcgcgctggggaggttctgtttgaaatcttaaaccggtctcctctcaacacgtttttgctcttcg

SEQ ID NO: 324601 - DNA, 122 bp, Homo sapiens
cagcattatacttgcacagtggttttgtttttaggtgcatctacctcatcacatggctaccggccacacagcaactaacagcaccgaggaaacacaacagcctgtttaccttcagccccgcc

SEQ ID NO: 324602 - DNA, 122 bp, Homo sapiens
ggtaggtatatagtataaaggcatattgtttatgaaaagctgcaagggctatgggcatttcgactaaaggtgacataactgagcattcagtgtttcatgcatttcatctggagtgatgatta

SEQ ID NO: 324603 - DNA, 122 bp, Homo sapiens
ggccgcggcctccgcaggaagccggggggcggggaggtaggcgccgggccgggcagctgacggcccgcccgctgccgggcaccgactccccaccctccggagcccgaaactgcccgggcgtg

SEQ ID NO: 324604 - DNA, 122 bp, Homo sapiens
atggctcagtaagagttagtcactatgtttattacctagtctacacccagcagctcaccccggcacccccacacatctgtgtttactgggaagccaatctcttttaaggaaaattttcttga

SEQ ID NO: 324605 - DNA, 122 bp, Homo sapiens
gtaggaaggagatgcagacacaggtgcacacagaggggtgaggacttgaggatgcagagacggcatctgaagcccaggagagaggccttgggagagaccagccctgcccacaccttgatctt

SEQ ID NO: 324606 - DNA, 122 bp, Homo sapiens
aacccaaagttcgaaaccaacagaacgaaaagcaacgaagcacacttaaagtgaggaacccggcaagcggcgaaattcttgctgaagagaagaaaaagcgaaaggttttccgctgcaaccaa

SEQ ID NO: 324607 - DNA, 122 bp, Homo sapiens
tgacttggcaagtgggaaactacagttctctccctgcttcagctgtttgtttttttgagacggagtctcctctgtcgcccaggctggagtgcagtggctcgatcttggctcactgcaacctc

SEQ ID NO: 324608 - DNA, 122 bp, Homo sapiens
aagcacccgagcgaccggagaaagaaaaagtggtcaaggggacctccttccagctctacgcgcctctcattcagagaggtgaggtcaggaaaggggaaggacgaagccccagagcaacagaa

SEQ ID NO: 324609 - DNA, 122 bp, Homo sapiens
ccatgtccatcgaatcttccatcgggtggcggcacgcacttaggtaggagagaaggcggacggagataaaacaacgctgctgcagagaacagccgcgcaggacggaatcacaccaggcaaaa

SEQ ID NO: 324610 - DNA, 122 bp, Homo sapiens
gaggggtgacagactcattgcagatatcaggtgatcactgcagatatcatgtgatcgctgcggccttggagccagaggcgtccctgtttctgcttccccaagaggacattctcctcccatgg

SEQ ID NO: 324611 - DNA, 122 bp, Homo sapiens
ggttcagcaggtaagcagttcagggttcctggaaaggcgggtcccaatgcatttgctgaccgggcacctaacgggctgctctcaaaatcactgactgtcaccgaggccggccagagaccctt

SEQ ID NO: 324612 - DNA, 122 bp, Homo sapiens
ccctctacaatgctgagggctgtttattttgcaaatatagtgagttctgaggtggtggctcgcccctagaaggagctggaggcgcctagcctggaaaggttatggtaagtacttttgagcaa

SEQ ID NO: 324613 - DNA, 122 bp, Homo sapiens
ttgttttcattcctagggtttgcagttacagcgcaggtggatgagcgtcagcatctcagccggatatttataagcgacgttcttcccgatggcctggcgtatggggaaggtccgtgtggcac

SEQ ID NO: 324614 - DNA, 122 bp, Homo sapiens
tgacatccacatgctgctcggcctgaaaaggcagtggggagccggaggggaggcagagatcgcgagcgaggcaccagcctgcagccggcccccagcacatcctcagccgcacagacactcgg

SEQ ID NO: 324615 - DNA, 122 bp, Homo sapiens
ggcagccccggctctgccagctgctgcggtgggaggaagtcacaacaaaccctccgtgcccggtggaagggagtgtcctccagcaccgtccactcccccagagagctgtcagctcggcccat

SEQ ID NO: 324616 - DNA, 122 bp, Homo sapiens
aatgggtcctagagccgacatttgacatacacatcagcagtgccctcttcggaagggaaccgcacagtcacagccatgatgttggcatgtctttatggccttcctaagtcatgtgctgtctt

SEQ ID NO: 324617 - DNA, 122 bp, Homo sapiens
ggttcccagacagagacagtgaggagcggcctccccagctggaaagtgtcaggtttcaaccggttccaccactttccccaactcaggccccatcccttggcctggttacccgtttcccactg

SEQ ID NO: 324618 - DNA, 122 bp, Homo sapiens
gtagggctgtacttttgtaatgcttgatgagttctttacgtacctgcggtcgttttacaccgcgccaaactagggctgtcagattgagaagtctctgcagaaagcataataaataagttcga

SEQ ID NO: 324619 - DNA, 122 bp, Homo sapiens
caaataatggagtgagatccgaacataaaggcaggcagagatgttttggggctgaatcaccgaatactagagtaggtttggggctacgtaaagacttgcttgaaaacaactaccatttagtt

SEQ ID NO: 324620 - DNA, 122 bp, Homo sapiens
tgggcaacatggcaaaaccctgtctttgcaaaaaattagccaggcatgatggcacatgtccgtagtcccagctactcgggaggctgaggtgggaggatcacctgagcccaggaggttgaggc

SEQ ID NO: 324621 - DNA, 122 bp, Homo sapiens
tgaggtggttctatctacggaagaaattctaagctccaaagttaaaatgcggagcagtggcgcatatcagcagacggcggtcactactgtggctcatttaaatctgtgttcagctccgggcc

SEQ ID NO: 324622 - DNA, 122 bp, Homo sapiens
ctcccccgcctcccgcggcggctggcgtcgggaaagtacagtaaaaagtccgagtgcagccgccgggcgcaggatgggatccggctcctccagctaccggcccaaggccatctacctggaca

SEQ ID NO: 324623 - DNA, 122 bp, Homo sapiens
ctctcgcatatcactcacagacggggatctgacagcagccacaaacctacagtgagtgatcgctctccccccggcacgaatccgccatagagatcggcgaggaggaggaggaggaggaggaa

SEQ ID NO: 324624 - DNA, 122 bp, Homo sapiens
ccattcgtcaatagtaacacctacatgtaagccaatcaatcagcaggccattggttatcacgttggttgaatctctgccttctgctatatgcatgaagcactatccagaagacattggcaaa

SEQ ID NO: 324625 - DNA, 122 bp, Homo sapiens
aaggcacccagccccagtttccccacctgggaagggggctacttgtggctagaagcagcccggactcctgagcaagactagaccaagaggccggtatgtggacacccccgcgtgggcacccc

SEQ ID NO: 324626 - DNA, 122 bp, Homo sapiens
gaagatgccactgtttcctgccaattggatttcttttttacgtccttcaggagactagtgcgttttccatacatttcaattctgatgaagtttcttattatgtgttcaatatctggtttccc

SEQ ID NO: 324627 - DNA, 122 bp, Homo sapiens
ctctgccggacacacttatctttgaaattctgacttccaggtcgtctctacggacttcctcggtgatacccactcgtccatcttcgatgctaaggccggcattgcgctcaatgacaatttcg

SEQ ID NO: 324628 - DNA, 122 bp, Homo sapiens
cagcataaccactaatctgcacacttataagaaataataaagttccaaggtgttttgtaacgtagcaagagctagctgacacaattgcatatccaatatttgaattcaggtctgacttacta

SEQ ID NO: 324629 - DNA, 122 bp, Homo sapiens
cccaactcatagggtctaacagggagccagctgccaaaccagaaatgtggtttgcagaggcgcagcccaagctttatggagaagcatatggggtgggttttgaaactgagagataatagctt

SEQ ID NO: 324630 - DNA, 122 bp, Homo sapiens
aaattcaaatacaacagccggcgtctcctcccccttgattttctgtctgtgtcccgacagcggttccctcctggatacctgaaaatgtgaaggtccaagagaaagggcggcagtggagggca

SEQ ID NO: 324631 - DNA, 122 bp, Homo sapiens
gccactgtgcggagcggggttctggccaccacagggcttttgttctgttgctttggttggcgatcgggactcaccatgttagacctgaggttcgtggtgggatccaccggcgtggccctggg

SEQ ID NO: 324632 - DNA, 122 bp, Homo sapiens
taatgactttagatgaccggttacagccatcattccgttcatggcgcgggagatagactgcgttcgtttgtaactttgtccgcaagttcttcccccaaagggttaagaggctcttccctgga

SEQ ID NO: 324633 - DNA, 122 bp, Homo sapiens
tagacggggtggcgggcgggcagaggctgtaatcttagcactttgggaggccacagcaggcggctgggaggtggaggttgtagcgagccgagatcacgccactgcactccagcctgggcaac

SEQ ID NO: 324634 - DNA, 122 bp, Homo sapiens
gccggagacgcaaacacaggtctcccaggaagcaggcggcgtcacaggtcgctctgcaggcgcccgctgcagcgggcggagtctggctggagagaggaggcgggcgtccgggaacgcccgga

SEQ ID NO: 324635 - DNA, 122 bp, Homo sapiens
gcaactatgacagctgatgccagccctgaaatctctaagcaaataaggttcccaggaggacggcagcatttgcatgcgggtgtgtgaaagcccagccaagtgggctgcctctgtctgcagct

SEQ ID NO: 324636 - DNA, 122 bp, Homo sapiens
aaaaaattcattgaacgcctgagctaacaacactgaatcttaaatgtgctgagctaacagcgaaccccacatatcctcccagcaagtactctgggctgggagtgagaataagaaaggggcac

SEQ ID NO: 324637 - DNA, 122 bp, Homo sapiens
tcccaaccttttgccccactcccgcttttcctagagccttcagtgagcgctcttgcctctcgctgcggccagcggaaccccgacactcactagcctttaccagtacgaaaagacaacagagg

SEQ ID NO: 324638 - DNA, 122 bp, Homo sapiens
gatcccgggcctgacccggacctgccgtctggatctcattttaggcggcgctagagatcccgggccagggaaacttgagaaccgcagctccaaatcgccagtgctgacggcttccgctttgg

SEQ ID NO: 324639 - DNA, 122 bp, Homo sapiens
tcttgacttttgacttcctattaggaatctttggtcatagcagggatggagagcttacatcgaatggcctgaacaattaatgcggtgacaaaaaggttcagcggtatccctagcttcaagag

SEQ ID NO: 324640 - DNA, 122 bp, Homo sapiens
gctggagagcgatgcggccaagccagcggaggcccccgacgctcccgaggcggccagccccgcccattggcccagggagagcctggttctgtaccactggacccagtccttcagctcgcaga

SEQ ID NO: 324641 - DNA, 122 bp, Homo sapiens
agaagctcttaatggaaagaaacagacatataaagtgacaatatttataatacaggtggacgattctcagaatgtaggtatgtacaagtagcaactggaacagagagaaaggagtgtagagg

SEQ ID NO: 324642 - DNA, 122 bp, Homo sapiens
gctgccgcggccgggcaggggggccgggggggcggcgcgtgagcgggtggcgcggggcggcgcggggcgggcgggcgcccgcgatgtgccactcggcgcctcccccgccgggctcgggctac

SEQ ID NO: 324643 - DNA, 122 bp, Homo sapiens
gtctattcggtcaaaccacatgcagctgcctttcgcgctggccagaaacagccgtgtatccgcagtcttactgtgatccgctcactccgtccaccctctctcgtccacctggccattctgtg

SEQ ID NO: 324644 - DNA, 122 bp, Homo sapiens
ctgcctggagggcggaggtggttgggtctgcccgagggttcgaggacggcaggggcccagcgtggctaggagggggcagaaccccgggcgctcccctccccccctttcttaaagggcccgcg

SEQ ID NO: 324645 - DNA, 122 bp, Homo sapiens
caagtccgtctcgaataccgcctcctccgggaagcgcccgggtccctggggtcctcgcaacgccgccctcctacccgggggtcttggcagcgaacatgcgtgtcgaccccagcccccaccgc

SEQ ID NO: 324646 - DNA, 122 bp, Homo sapiens
ggcgggggtggggagtttcagccgaaagagcaaatccgggttggactgtgtgattgggcccggtggtgtgggcagggcaggttaggtgtgtccgctcctttcacactcaccggtggtcgggc

SEQ ID NO: 324647 - DNA, 122 bp, Homo sapiens
agctggaatttcaggaatgagcttgaaaccaggaccaggagtaaggtaacagcccttcctcgggtagaggtttgaatcaaacacttaataggatcttagactctggaccactgaatccctta

SEQ ID NO: 324648 - DNA, 122 bp, Homo sapiens
cgacacgcaggagaagcccacgacatgcaggagaggcccatgatatgcaggagaagcccacgacatgcaggagaagctgacgacatgcaggagaagcccacgacaggcaggagaggcccacg

SEQ ID NO: 324649 - DNA, 122 bp, Homo sapiens
tggtctcgaagcccctcgcccaccccgcactgtctcctccgccgccggctgcgcgcttggcggatcttctccatcagttctgcccactggagtgggaaggggctgagccgagccgcgcggga

SEQ ID NO: 324650 - DNA, 122 bp, Homo sapiens
tgactttgtgatccgcccacctccacctcccacagtgctgggattacaggcatgagtcagcgcgcctggccttgccaggtgctttttctaagtgctagaataacagaaaattcttgccctca

SEQ ID NO: 324651 - DNA, 122 bp, Homo sapiens
ccctactccaaggagattttacagggaacaccaactcagaggctgggaccaaacaaaagccgagtgtacaaaggggtaaaacagagcaggcgcagaatacacggggattagctcctacatta

SEQ ID NO: 324652 - DNA, 122 bp, Homo sapiens
aatggactgcatatacgatagtggccctgtaagattaccgtggagctgaaaaattcctatcgcctggtgatgtcttagcccttgtaacatcttaatgcaacacattagttgtgtgcttgtgg

SEQ ID NO: 324653 - DNA, 122 bp, Homo sapiens
tggggaatttcgtgtcacagctgagatcattgaagactggggaatgaacccctagtcaagcgtctctgccttcagatccgtctgtcatcctgatggagtcctcccaggccgccctctgctct

SEQ ID NO: 324654 - DNA, 122 bp, Homo sapiens
gcagaaagcagaagtgactgcagagatagcctgattggctacagctctggctcgctgagacgcagccacctgtcaccggaatacacacccgtggcagcttgtggtttgtttacatgctgagc

SEQ ID NO: 324655 - DNA, 122 bp, Homo sapiens
gcgcgcctgattgggcagttctcagtcaagcgctctgattggatatgggtccaggcttcacgccctcaggctttgaatgacagaaattgtgaccatacaatgcactgaatgaggcaagagtg

SEQ ID NO: 324656 - DNA, 122 bp, Homo sapiens
gcctgcattccccggaggctccatccacccatctgtagtgacttgtgatgtgctttataccggagttatttgcactgtgagcttcttgaggtcaagaacaagttccgatccagaggctagca

SEQ ID NO: 324657 - DNA, 122 bp, Homo sapiens
ctttcccggtctgctaagtagcgggtgtttttccttgacacttatgctaccgctagacctcggtccgcctggcaaccggcgtcttcccagacgctggcattactgctagaccaaggagccct

SEQ ID NO: 324658 - DNA, 122 bp, Homo sapiens
ccggcgttggcagcccggcgcttagaggaggtagacaggctagttccagccagtgctgagcggcgttttcccgggagcccagccctgttctccgagttatggtccctgggttgcccgagcga

SEQ ID NO: 324659 - DNA, 122 bp, Homo sapiens
cactagccgcagcagacggccacggggattcagggctgtgtccccagggctatgtccacacggtcctgcgagactcgtgcagcgagcccaaggaacatgaagaggagcccgaggtcgtgagg

SEQ ID NO: 324660 - DNA, 122 bp, Homo sapiens
acttgcgagaacatctagatattgcaaaatatccctagatttattaattagccaaactaacgtcaaaattgtaataccactattactaacaacaataacagttaccggtggagagtattcac

SEQ ID NO: 324661 - DNA, 122 bp, Homo sapiens
tgaagggattggtctgatcttttgggatccccatagcattcacaggggttcctaacatagcgttcatgtcgaagaagagtataatggtggagagacttgaagggctgtaggtttttggggat

SEQ ID NO: 324662 - DNA, 122 bp, Homo sapiens
agactattcctctgcaccctgcccctcccttggcggccatgcccctgtccctctgacacccgggcacccacctctatgatgttcagctgctccacactggaggccaccctgaactcaggggc

SEQ ID NO: 324663 - DNA, 122 bp, Homo sapiens
cccgaggctgttgctccgggcatcccccctttacagatagggaaaccaaggtgcaggggtcgtgtgaccggcccacagtcgtgcagctgaggagggaggagctgggtttgaacccaggcggt

SEQ ID NO: 324664 - DNA, 122 bp, Homo sapiens
acctggctttcccccgcaagcggatgaacaccaacccttcccgaggtccctaccacttcccggcccccagccgcatcttgtggcacaagtacgaggcttgctgccccaagagaccaagtgag

SEQ ID NO: 324665 - DNA, 122 bp, Homo sapiens
cgcgtaggcacccgagactctacttcactggctgacatcgctgatctaaaattgggcgcgcgcccactcactcccgagaccgcccagttcctacatcttgctgcaagaggccatttggtctg

SEQ ID NO: 324666 - DNA, 122 bp, Homo sapiens
atcaagcatatatgtagaaattctccaaattctatagctctgctatgctaaattttctatcgaagaaattctcgaaaagaaagggaaggggcgtctcaccaggatctactgagattgttcaa

SEQ ID NO: 324667 - DNA, 122 bp, Homo sapiens
gttacaaaaaacactcttgatgcaaaccgtgagtggctacaacacacggatgggggtgggcgcgattcccacaacagggagtggaatccgggaagatgatatataggggcaagacgccccct

SEQ ID NO: 324668 - DNA, 122 bp, Homo sapiens
ccggcgctgctctgtggggctctggccgcgcctggcctggccgggaccatggtgagctagcgccgcggccgttgccggcccggtgaccgttggggcgggcgcgcgatccctgcctccgctcg

SEQ ID NO: 324669 - DNA, 122 bp, Homo sapiens
gctggaggccaggagggggccctcgggacgggcctggtgagggtaacggggttggcgctgcggtggggtcacctcttgggtgaaatcaggcaaatccctttccctcccccaggccttcctga

SEQ ID NO: 324670 - DNA, 122 bp, Homo sapiens
tatacagaaaagctggagttccttggcaagttcaaacaccctgagaacagttttgcatcacgtaggattacaaaaattgttgaggtcatggtaacagctgccttgagcaagatttctaacac

SEQ ID NO: 324671 - DNA, 122 bp, Homo sapiens
tatgcacgcctcagtggatggacagggtttccaccttgccgctatggcgaaggatgctgccgctatggcgaaggatgctgccgctatggtgaaggatgctgccgctttggcgaaggatgctg

SEQ ID NO: 324672 - DNA, 122 bp, Homo sapiens
tcacgacttccagcttgcttctctttaaggcggaaccagaatttaaagactcgtgtgacgcgagcaacctgaggctcccctgggactgggcttccccggacttgcacagctgtcttgccgcc

SEQ ID NO: 324673 - DNA, 122 bp, Homo sapiens
tccttcagcaaaggtcagcagcttctcctccccttccccagccatcagcagaatggagcccggttcctttgtcacctgcagactctcactgttagccatgcattgggattctgttccaagaa

SEQ ID NO: 324674 - DNA, 122 bp, Homo sapiens
ccgacataccgctggaggacaggacgcccatcacgtagaggaggcttctgtgtgggaagacgcccgtcaggagctccgtctccagatgctgcgccaccacccgccacgagtgcctgcagatg

SEQ ID NO: 324675 - DNA, 122 bp, Homo sapiens
ctttgttaaggtatgacccaggggctgagggttgaaaaatacagggtgagtgtatgtatccggtacactcagattgatagagtgtacctatcctctgcatactcacatatttaccctaggtt

SEQ ID NO: 324676 - DNA, 122 bp, Homo sapiens
agaaatcagccagcactcctgcaggtgcactgcagtggacggctagaggagggaaagcagcgccgtacagacactcggaaaactgcagactggaaggggcgtgaaagcacaaggtcttgatc

SEQ ID NO: 324677 - DNA, 122 bp, Homo sapiens
accccaaatgattgacattggggggtcacacctgtgcccggaaatacaaggtcactgtttcgcaccttctaacagcaagagattccatagttagaaattaactgggaaagcagtgccaaggt

SEQ ID NO: 324678 - DNA, 122 bp, Homo sapiens
agtacttgggcgtccgggctccgagactctggcctgacctctccacggggtcgacaggaacgtctctggatgccaagagtctcaaagggccgaccaggatgaagaaacccccggcgaagtcc

SEQ ID NO: 324679 - DNA, 122 bp, Homo sapiens
agcttgccaatcatacgcatctctgccttcttccagcacttccaggttagtggagactcccgcccgccccgggttctttctggtgctgcggccgcggcgggagtgcacccgggcgcgagagt

SEQ ID NO: 324680 - DNA, 122 bp, Homo sapiens
agcattcacaagccactcatcagtttttctgcttcttggtagaagctctcctcaaaactacgcattgagtgcctactatgtgcctaacactgacggatacagacatgagttgctgccctcat

SEQ ID NO: 324681 - DNA, 122 bp, Homo sapiens
ggtcactgggcagcagcagcaccccccacttcccctgagaactgctggcttcgggccggccgaccccacttgcaggctggcctgctggcatttccagaatgcgccggcaggtggacggagtc

SEQ ID NO: 324682 - DNA, 122 bp, Homo sapiens
cttcatgaccggcatggccccggggcgtgggttcaaggcgcggcgctggggagctttcagcgcggccgggccggagggggcgcgctgtcggaggggccggggcgccccatgcgccctcctgc

SEQ ID NO: 324683 - DNA, 122 bp, Homo sapiens
tctccaatagagatttacgtggatcagcattgctgatcagagctcctcaccattgaatgccgttaaagacctgccccagaatctcctttgagacacttcctagcttctcagtatttgtcctc

SEQ ID NO: 324684 - DNA, 122 bp, Homo sapiens
ggaggctgaggcaggagaattgcttgaacctgggaggcagaggttgcagtgagcgaagatcgcaccactgcactccaacctgggcgacagcgagaatccatctcgaaacaaaaaaaaagaaa

SEQ ID NO: 324685 - DNA, 122 bp, Homo sapiens
ggggcgggcccagtttggcgctgacgacgaatcacctgcctcagacagcaggggcggaagcggaaaagagctgaaagtcttggtttggccttgggttccgctgtaggggaggtcccgtgcga

SEQ ID NO: 324686 - DNA, 122 bp, Homo sapiens
cagcagagtctattaagcaaaatcttcagatgtctgggtcgcggggcagccggggattttcgaaagcactgaagtgaatggtcatgtcaagaggctgccagcctctcacctgctgtcaggaa

SEQ ID NO: 324687 - DNA, 122 bp, Homo sapiens
cctagaaaagaaggtgttttaagaaacttctttgtatcttcttctgtggtctcttttcttcgtctttcggtaggagtttggaagtggaaaaattgaaaaggaagagggcacggaagtctttc

SEQ ID NO: 324688 - DNA, 122 bp, Homo sapiens
aaactgtctaaaacaaaacaaaacaaaacaaaacaaaacaaaaaaaaaaaaaacaaaaaacgctgtggtattgctaaaaacaataatttgcttcctgatgttgtggaaaatcataaagcaaa

SEQ ID NO: 324689 - DNA, 122 bp, Homo sapiens
ctaattgactaagcttcgcaggtaaaagaatgagtgacagtcactcattgtctttccagtcgggattgtcatcagtctccaggtcttcggaaagtcaagcgcctgcagcctcggatcttaac

SEQ ID NO: 324690 - DNA, 122 bp, Homo sapiens
ggttccgaaggcgtttcaccaaccagcggagggactgcccagcacccacccgccctcccccgcagcttttcagaggagaaaataggcacagagagcaatcaagctgcctttcttcccgatac

SEQ ID NO: 324691 - DNA, 122 bp, Homo sapiens
agccagcagacagcggcggacaagcgacctcgctctgtggccagtgagttgtttctgattcggatgatttttgtccctcggcgcgtgcccttgctccccgcccccggctgcgagacccccgg

SEQ ID NO: 324692 - DNA, 122 bp, Homo sapiens
gggatgaaatgtacgtacctcacatttagcacagcgcctggcattcagtaggcaggtggtcgtgttaattcccctttccttctttggtcagggtatgggtagtactgcttatgatggaattt

SEQ ID NO: 324693 - DNA, 122 bp, Homo sapiens
caaacaaggctggtagactttttatttgaaaggcaaggatggtgggatgatactagctaccgagagggaaatgacctggaaaactaagaactctagttgggtcatgtattaagatcatgtgt

SEQ ID NO: 324694 - DNA, 122 bp, Homo sapiens
ctaaaagtgctgccagcaggtggcccttagctgtcaaccatctgtggggattgcctctgccgaagacaactgcttacctcaggtcacacctcctcctggggagggccaacatccaaaatgac

SEQ ID NO: 324695 - DNA, 122 bp, Homo sapiens
gcgtcaacgcctttagcgcccggccggtccgcactgtatcctgggagccggcgcggccgacgaaggcacatgaggcttcctggaggcaggcagccgcacagccccacctgcagctccggagg

SEQ ID NO: 324696 - DNA, 122 bp, Homo sapiens
tcccggcacttctttttaagtaagcttttaaaatatcttcaaaaagattccactatgggccgggtgcagtggctcacacctgtaacctcagcactctgagaggccgagatggacagatcaga

SEQ ID NO: 324697 - DNA, 122 bp, Homo sapiens
ccgtcctttgggcacagctgcagacctgcccctctgtggggattgcctggcctggggtcacggggattttcctgtgggtctttctgctgatgtcacctcatttgctcctttgacgcttggca

SEQ ID NO: 324698 - DNA, 122 bp, Homo sapiens
aacacccatatagaagagtgcacaaactacgtatagctgagtgaattaacaacagctcaacgtgccttgtagcccactcagaagcctctctgtggccctttcccgttgcagcccctccttcc

SEQ ID NO: 324699 - DNA, 122 bp, Homo sapiens
ctcactatgttgcccatgcccagtctgctgggctcgagagatcctcccacctcagcccctcgagacagtgctggaattacaggagtgagccactgcacctggccaacatgatgttttgaaat

SEQ ID NO: 324700 - DNA, 122 bp, Homo sapiens
tcccctgtcccctccacccgaagcgatgggtggttccgtcaggcgcttcccgcaccttcccgctccctgcttgcaaagtggttgtgccccaaggtccgcctccaggccacgtgggtgctgcg

SEQ ID NO: 324701 - DNA, 122 bp, Homo sapiens
cgggcgggggtgcggagagagtgctgtgcggggcacggggtggcgcggggaggcgcgggccggggccaggccgggcggtcccggccctggcgaggtccctgccctgggccgagcggcgccaa

SEQ ID NO: 324702 - DNA, 122 bp, Homo sapiens
tggatgcaaagatgagaactgaaaacaaaagctgagattggcatgatgcctgcccaggggcgtgtacctctccgcagagagctgaagagatctgggatagaaactgctccatttttctgcac

SEQ ID NO: 324703 - DNA, 122 bp, Homo sapiens
ctgactacctggagctgtttgagtgacagcctccatcagggtcatcctacagcctccaagcgggctttcccctggacaaatgccactgcaacatttatgtgtgaagccaaaatcaccctgca

SEQ ID NO: 324704 - DNA, 122 bp, Homo sapiens
gggcagggggcttacatgaggttacacagcaggttagtgacagtctgctccctctctagccgctggtctttccattacacaggcctgtgtctcttgatgcctgtgacctttaatggcttctg

SEQ ID NO: 324705 - DNA, 122 bp, Homo sapiens
tgtggggcctggtgtggctgggccttcagccctccttctaggcagcacaccatgaatccccggtgccgtctcccggaggaacggcggtgcacggccccacactcaccaacgccggcctgagg

SEQ ID NO: 324706 - DNA, 122 bp, Homo sapiens
gatccccaattgcctgtgggctgggagacgccctgttctccaactgcagaacatatcaggcgtggttggcggccccaccccagagttgttaagtcttaggtgagacctaggaacctgcattc

SEQ ID NO: 324707 - DNA, 122 bp, Homo sapiens
gccccgcgggcggtctttcatccccagctaggccagctctagcatttcaaaggccgaatccggagagcgcttcgggggctctccccttcccccaaatatttggggagcgacgcctctccctc

SEQ ID NO: 324708 - DNA, 122 bp, Homo sapiens
ggcggggcgcagagctgctcacccggctgactcccccttctgccctgctggcctctgagccggttctctggggcctctgtgagcgccttgtgccccccacacccgccgtgagtaccgtgtct

SEQ ID NO: 324709 - DNA, 122 bp, Homo sapiens
tcggcccccagtggcgctgctggcctctgatctttgaacatttccatagtgcacccgacacgtcgggcccggtcatagcccggcgcagcccctcgctcactcaggaacatctgctacagcat

SEQ ID NO: 324710 - DNA, 122 bp, Homo sapiens
ctgcgtgtcttcttggtcccaagccacggcccagcccaggacttccccgcagttggtcggcgttcagccacgcagtccctgcagctgggtcactgttcatgaatgcaaggggcaggcgtgct

SEQ ID NO: 324711 - DNA, 122 bp, Homo sapiens
gacagaagcagtcatgctgaaatcgctgaattcctcagcggaacggcgccaactcagcagcgcggtttccacactttcccggagcgggactccgctccccgcgccggctcacggccttcccg

SEQ ID NO: 324712 - DNA, 122 bp, Homo sapiens
gcaggcgaggcgtgtggaggaagagccgcgaagagctgggcgctgtcttctccacgcctccgtttcttcatctgctcctggggccgcctgcccggtagcggagattgaatcgcatgttgacg

SEQ ID NO: 324713 - DNA, 122 bp, Homo sapiens
ccagacccggcagggcctggacctagtggggtccgggaagggctgagcgtgaaccattcccgcttctgcgctcgggcgcccagcacaccaacccgctcaaagtagaagggcctgctggggct

SEQ ID NO: 324714 - DNA, 122 bp, Homo sapiens
aatcataaaacggaagttcagaaaggttaagtaacttgctcaatgccaccagctaggcagcgaaacccgcagccagtccacatggcctggctttagctctgcagctcctgccccgtgtggct

SEQ ID NO: 324715 - DNA, 122 bp, Homo sapiens
gccctgcgccccggatctgcgctccaccagcccccgccctggccagcggcctctccccctcgcccccgtccctcagactctccaggccgccccagcctgacccagtcagccgcgggaaacgg

SEQ ID NO: 324716 - DNA, 122 bp, Homo sapiens
cagagcactctgttcaagattagacactttattagaacagaaatagaaaataacttgacacgaagacacagtagtataggaacaattgactaggcaggctgaaagaagacttaagcttggca

SEQ ID NO: 324717 - DNA, 122 bp, Homo sapiens
gtgccaccttggccgcccggaggaccgcccaccactgcgggccccctggagccaggccgccggggcacccccacgcggggccatgtgccgcctgcacttggctgcctccagtcttttcccca

SEQ ID NO: 324718 - DNA, 122 bp, Homo sapiens
ggctggaccggagcttttaaaaagacaggcagcaggatggagggaggcaggagcagaggccgatgatgcagcagtggacagctctgggctccaggtcctctggccagcacaacccctgcact

SEQ ID NO: 324719 - DNA, 122 bp, Homo sapiens
catctaccttcaaataaaatgtcagctcctaatcttgatctgactttctatggtctggcccgtatttccttccttgtgctgattatgtgatacttcccttgtcattcaagttttaactcaaa

SEQ ID NO: 324720 - DNA, 122 bp, Homo sapiens
ggactctacacggcccatgtgggctacagcatgtaccacctgacatagagggtcccaggtcgcccacctgtgggccagccgattcctccagccctggtgctgtacccccgacgtgctcccct

SEQ ID NO: 324721 - DNA, 122 bp, Homo sapiens
tactcacttgtttgccctccagcaggggcagccggggacacctccctagagtgactacagcgtttatccctgggatgactcagcccaagcctccctctgcccaaaaagggaatctgaggctg

SEQ ID NO: 324722 - DNA, 122 bp, Homo sapiens
ccgcccgcgcccccctcccggcctgccagcacggcgcggggcccgatggtggggaagggccgggagggggagggggccacatctaagccaattttgatttcgcctataatgagtgccgggcg

SEQ ID NO: 324723 - DNA, 122 bp, Homo sapiens
acatttggacttcacctctatgcgagctgcagtcttgggatgtcaatatcacatggcagacggtttttcctccggcagatggtatgtctctttgccactccccccagccatcaagagaaatt

SEQ ID NO: 324724 - DNA, 122 bp, Homo sapiens
ttttatcaaaatattgtgtaaagtgcaagctgctacagaaatactttgtggtgtcattaacgatacagactctacgcttatgtagtgggcaatctctccaactaaggagcttcaaacaaaga

SEQ ID NO: 324725 - DNA, 122 bp, Homo sapiens
ccttccccagcgccttccgtggccggctcggtggcctccagctccggctctctgcgccaccgcaggcccctcatcagccctgcccggctcaacctgaagggacagaagctgctgctgttccc

SEQ ID NO: 324726 - DNA, 122 bp, Homo sapiens
aagcaagggctaggggtgccaggcgggttcaacagccaactctggagtgaactcatagagcgagaactcactcattaccatgaagacacctcccagccatgcatgagggatcagcccccatg

SEQ ID NO: 324727 - DNA, 122 bp, Homo sapiens
ggtccgagcgcgttgcgggcgcccggcgtaaggggagtcgggtagcagcatcctcctgggcgccgctttcgcgcggcggcggcggctgcggcggggtctttctttgcttaaatacctcgttg

SEQ ID NO: 324728 - DNA, 122 bp, Homo sapiens
cgggccccgcggcagctgcgggcgacgcggtcgatggacatgggcacccagggatcggggcgcaagcggctccccaaccgggagcggctcacggcggaggacgacgcgctcaaccagatcgc

SEQ ID NO: 324729 - DNA, 122 bp, Homo sapiens
ggtcaggtccactgtcaatgcctcagtccagcggtcaggtccactgtccatgcctcagtccggcgatcaggtccaccgtcaacgccagcagtcatgtccaccatcaatgcctcagtccagcg

SEQ ID NO: 324730 - DNA, 122 bp, Homo sapiens
ggcagatcggggagcccagtcatccctaactcatgaagagagacctacagccctctctgccggtggcatgacatgcctctccaggctgccccgccaccagcaggcaccagggctggcactat

SEQ ID NO: 324731 - DNA, 122 bp, Homo sapiens
cagtggtcgtgctgctgagccggccgtctgtgtgaagtttacactggaccaggataaatgcgtatttcctgtgggagctcagcgtggccatggtattcggtggtcttatgattttataggcc

SEQ ID NO: 324732 - DNA, 122 bp, Homo sapiens
tggtgtgctgcagccggctcttcgaggtgacggatgtgaacaagctgcagaagcaggcagcgcatcagagggaggtgttcctcttcaatgacctgctggtggtgagtggcctccgctccggg

SEQ ID NO: 324733 - DNA, 122 bp, Homo sapiens
ggagaaggcgctgaagcagctggaagcagagagcactgagaaggaacaagcctttgccggcggagttggatgggcatttttgactgcgctgtgagaagtacatatgcagtccctgagggatg

SEQ ID NO: 324734 - DNA, 122 bp, Homo sapiens
gtggaacatccacccacaggtgagcagggagaggaatgagcctagatctaaacagagatccggcttccagattagaaagatgtgagtcaccagtgtgttgtatgcagatcgttgttaagagg

SEQ ID NO: 324735 - DNA, 122 bp, Homo sapiens
tccgtctggccgaggaagagcagcctcgaaggctcctccgggagtgtgtgcgcttgtgtccgtccgggacccccgcggcccgcccgcacgcacctcgcgccggcccggaccgccgactcgga

SEQ ID NO: 324736 - DNA, 122 bp, Homo sapiens
tcgttacaaatagtatactcctgagaaaaataaaataattagctaatatagacagattttcggaatgaggaagaacactgcatgatacaggctgtgtgatagtggtattattcaagttccct

SEQ ID NO: 324737 - DNA, 122 bp, Homo sapiens
gggggatgtctggatacctcctctgtggaaagaactggccacacatccgcagaggtgactcgggctgagaacccaggctcctcctccctttggtgacacgcccctcggtccctcactggcac

SEQ ID NO: 324738 - DNA, 122 bp, Homo sapiens
ctggatgtcgctaattcacaccatctcaccaaaaggttctttccctgccctttggtgaatcgaggcagaagtggctggtggataactgggacccaagagttatctcagcgtcgggcaggcat

SEQ ID NO: 324739 - DNA, 122 bp, Homo sapiens
tgagaggtgggaggtccttgtggatgacttcttcctggtgttggtgtctgtgggcgggagcgtgcaaggggtagcttaaaaagtgtgagggcagctgtgtacttcaggatgtgttgcttctg

SEQ ID NO: 324740 - DNA, 122 bp, Homo sapiens
ttcttcaccccctaacatcaggtcaaatccggcctagaattcctagtggaaagacagggacgactcttccgcaacacctctcagacccgtcagtgtgctgaggcgcagcttcccagagggag

SEQ ID NO: 324741 - DNA, 122 bp, Homo sapiens
ttccactaccacagggtgctgccaacagctgttctggaaataagtcagcatcgtggagtgcggctcaaggccacgagaataaactcagagacagcagttatcgaccctgggtttcatcaaga

SEQ ID NO: 324742 - DNA, 122 bp, Homo sapiens
ctctctcagaagcggatttctgcctgcttcactttaacgtctctcaagttggatacccagcgtggtcctcctactgaaacaagagtgccagctataccaacagaaaatctttttacatgcct

SEQ ID NO: 324743 - DNA, 122 bp, Homo sapiens
ggcgatccctttgaagtgtggctgccgatcgcggctatttgacgtgcggctcgaggaaggcgaaggtttttgtgttgctagccggggccagcggcggtggcggcggcggcggaggcgtcggt

SEQ ID NO: 324744 - DNA, 122 bp, Homo sapiens
ggggagcgaggccgggagggcggagggcgcgtgctggaggcgggggtgcccttcgcgccccggttctaggagcgactgctctccaggcctcgtccctgtggcaccgcaggcttttgcgctgg

SEQ ID NO: 324745 - DNA, 122 bp, Homo sapiens
ggccggaggcgccatttcgctgtcttctcaccagctcctcttcctgaaagacacgtcagccggaagcaagacacgggcacgctaggaaatgtagtttactttttccgagcggcggcgaagta

SEQ ID NO: 324746 - DNA, 122 bp, Homo sapiens
ttgcatttgtcatggttggtagacctggacatctttaaaatttggcaggtaataccaggccgacatggcagctaagtttgtggtacaggataagattggaatctaggtctcatttgtctttt

SEQ ID NO: 324747 - DNA, 122 bp, Homo sapiens
ccggggtctagggaagccctgtgactgtgactcagtcacagatggagaaggtcagaccgccggctgactgactagcctaggtcagttcggggaggttaagggccacgtctgaaagtccgcag

SEQ ID NO: 324748 - DNA, 122 bp, Homo sapiens
atttgaagaacttttcccccaaagcgagggatttgcatacatttggtcagagaagtctgtcgcctgggctggctaggtaaataattatttcattctgggcaccagaagtttttttttttttt

SEQ ID NO: 324749 - DNA, 122 bp, Homo sapiens
gggcgaagggtcagctgtcccctctgcaaggtggcagattcagaagagttggaattcctccggagtcggccctgccaacatgcgcacgtgtcctgcggggtcaatgatctgtgcagacgact

SEQ ID NO: 324750 - DNA, 122 bp, Homo sapiens
ggggcgagccgcactcgttaccacgtccgtcaccggcgcgggagccaatcgcctccctcgcgagcgggttcggtttactagaaccagacgcggctcaacaccccttaaaaaacaaaaccaaa

SEQ ID NO: 324751 - DNA, 122 bp, Homo sapiens
gccatttcctaggctggaaagggtagtttccttttcaaaccagagctacagtgatgagtacggtgataaaattctgttaagtttctttttacaaatcatacaccactgcagtgtttatataa

SEQ ID NO: 324752 - DNA, 122 bp, Homo sapiens
atactattacgtcaaagagaatatactgagctaacacttaagatcttcgaagtcctaaggcgcgctgctttgggaatcactcacctttcctttgtccttaattcctcagttaattaggacaa

SEQ ID NO: 324753 - DNA, 122 bp, Homo sapiens
ggccaagtcaaggcacaaccgtcgatgccaaaacccaggaaagtaagtgtagcctcgagacggctgagaccagcggcgttctccatctgctggcttcgtaagggccgcagctaataacctaa

SEQ ID NO: 324754 - DNA, 122 bp, Homo sapiens
agtagacgtcagtcagtactatgcacttgctgtgggcacactgcgcaaagctgcgggatccgtccatgtttccactgcccatcactccgacgttggggacttatgttaccgactgtgcactc

SEQ ID NO: 324755 - DNA, 122 bp, Homo sapiens
cgcacctggggcgctgatcgaggacatctgcggggactgggagaagaagaagccggtgcccgtcctcctggggagtttgctgaacagggtgatgttacccaaggccgccctgctggtcacca

SEQ ID NO: 324756 - DNA, 122 bp, Homo sapiens
tggccatcgtgggcacccacaagttctccagtgccattggcctggtgctgctgatggaggcggtggccgtgctcgtcgggcccccttcgggaggtgagcgctgcgcccccaggcagttcccc

SEQ ID NO: 324757 - DNA, 122 bp, Homo sapiens
tattgttctaggtgttagctttctgggtgtacggagcagctctaagccggcaacatggcccggttgcccttgcgatcaaagagaagagggctgggcgctccatgatttagcctgaggctctt

SEQ ID NO: 324758 - DNA, 122 bp, Homo sapiens
cccggtgactcagcttgagtaaaacgcgtgactgtgctcacagacgctatgaaaagtaaacgcagcaccagacattaaacacacatacattgctccccgacaaggctgagaaggctgataag

SEQ ID NO: 324759 - DNA, 122 bp, Homo sapiens
cctcctgttgtgtgttatgtctttcttgtcttcggaaggacagttctatgtccattctaacgtctcccttcccttttcttggcccttttccccccttttttcccccttcctctctgcagggc

SEQ ID NO: 324760 - DNA, 122 bp, Homo sapiens
aggactggggctggcgggaagcgtctctcaactccattccctcatcttcgcagcaggggccggcgtgccgcctcttcagtggttctgtcagtgacacagatgcattgtgtcaaagtgaaaat

SEQ ID NO: 324761 - DNA, 122 bp, Homo sapiens
tgcccctacacttccccagggaccagcgccgcccgaccgcaattctggggaagaccccggcggtcctggagaggagggacaggcccccactactcacctggccagccccgcggaagggctgg

SEQ ID NO: 324762 - DNA, 122 bp, Homo sapiens
atatggctgagagagaaagaaagtgcctccacctaagtgtgcaagaccccaacaggcagccgacctcccagctttaccgattgctccaggatcaggcccagtcctggctgcactgagctgtg

SEQ ID NO: 324763 - DNA, 122 bp, Homo sapiens
ttttgccctttgcctttcgaggcatgctttttccggactgtgttgcaattaaccatttctcgttggtccgtcctggtgttacaggcgcactggaatgaacgcagacccttctctcctcccgg

SEQ ID NO: 324764 - DNA, 122 bp, Homo sapiens
ggaggacgagcgggaccgggtgctggaggagctgcacaaggcggaggacagcctcctggccgccgaagaggccgccgccaaggtacccggggcgcgcggcacggcgtggcgcacgaatggct

SEQ ID NO: 324765 - DNA, 122 bp, Homo sapiens
cggcactgtttccccctttgtttacccgtttctaagggcaagtgcaccacgaaggctctccgagcctggaactcagcctggggctgttttggttacattgaagtttttgcttcagttctgcc

SEQ ID NO: 324766 - DNA, 122 bp, Homo sapiens
cgcggaaagtaaacccaaaagcggagtttgccgcctgccaactacataagaattaacactcgggtatttaggattctaaagatccctactaccccaaacattatagccacagagaaccagaa

SEQ ID NO: 324767 - DNA, 122 bp, Homo sapiens
gagatgcttgtctgtcagccaatggggaggatcggattctggcagggggctgtgcttttccgtcaggccgccaccccccaccccctcctccctgcacacaaaagcagcataaattaaccgtc

SEQ ID NO: 324768 - DNA, 122 bp, Homo sapiens
ggctccgctgagtttagctgagctgcgctgggcttcgccgggggctgcaccgaggcgtagcgggaagtgcatgtcgcgggaggagaagccgggatgtgggcggagccatggggagggcccag

SEQ ID NO: 324769 - DNA, 122 bp, Homo sapiens
gtggatagcacccttggagctgggcatctggatggtggttggggtgttagggggatgtggcgatccctgcgacagacagcagagtgaggtctgaatctgagaagctctgcctccagatcaga

SEQ ID NO: 324770 - DNA, 122 bp, Homo sapiens
gaaagcttttctggggcctggttcacagacacctgcctgagagaacggtccgcggggtctcgcccttgtctccttgggcctccctagaccttcgcggcccttccctgctctgcacaggtgca

SEQ ID NO: 324771 - DNA, 122 bp, Homo sapiens
aataggggtcccgggcgaggacacagtctgcacaggagcgatacttcatgcagtcggccacgggcagctgcaccagctgagagcgggagccggcaaagagcagcttctgcgagaaaagcggg

SEQ ID NO: 324772 - DNA, 122 bp, Homo sapiens
gaaggaacaaactcttaatcttagaactgctttaggcagtgggcgtgatggttaaaaactcggcctttggcgtcgacctcagacggagatctaccaattaggaaattagctgtgatttagaa

SEQ ID NO: 324773 - DNA, 122 bp, Homo sapiens
taagagagtacttataaaaagagcgtaacacacacacaaagaaatacacagtacttgaagcgggcagctccggctcaggcggcgcggggaagcccggagaccacgcggagccgcggccaagt

SEQ ID NO: 324774 - DNA, 122 bp, Homo sapiens
aacagaagccgagaatggaggccagagaaggagagacaccaaaggggcaggaagctggcccgttcttactagtaatggtacctgtgacatggacaacatttattgagcgcttgctgtgtacc

SEQ ID NO: 324775 - DNA, 122 bp, Homo sapiens
agaggcaaggtgaccaaggcaatctggagaagataagccacacacaccagacaagctccccggccctccccagcttcaacaaacacggaaagcaaggagccaagaaccaaaacagagaccca

SEQ ID NO: 324776 - DNA, 122 bp, Homo sapiens
ctgcggccggcggccccggagcgcgctgggcggcggcggcggcggccctcgggctggctgcgctagctgcggcgccgcgacccccgcccagcccctgcttcccgcgtctctccgcgcccgcc

SEQ ID NO: 324777 - DNA, 122 bp, Homo sapiens
gccctgtcctgccctactctgattggacgaccctactgcatcactgcgcatgtatctttgcgtttggctttaaatgcttccaagtttgattcaagtttacggttcaattaaaaaaatactgg

SEQ ID NO: 324778 - DNA, 122 bp, Homo sapiens
ccacaagaacatgtctgtacacctgttcccctgcttcagggacgtccagatcggtgacatcgtcacagtgggcgagtgccggccttgccggcctctgagcaagacagtgcacctcaacgtgc

SEQ ID NO: 324779 - DNA, 122 bp, Homo sapiens
ccaccgcacccggccaacatcttagaatcttgagctgaggaacctttaaaagtctgatgccggccgggcgcggtgctcatgcctgtaatcccagcactttgggaggccaaggtgggcggatc

SEQ ID NO: 324780 - DNA, 122 bp, Homo sapiens
ggctgggcgcgggcggcggcggcccggaggagaacgggcggagggcgcgggccgaccgggcgcaccgaccatggcctccaaatgccccaagtgcgacaagaccgtgtacttcggtgagtgcg

SEQ ID NO: 324781 - DNA, 122 bp, Homo sapiens
ccaagtttattttgctttttaagtagtgttgttcttaaagcactacaggttggtaaacaacgtataaggtgctttttctcaggccaaagagccataatagtttaaatttcccggtcctcaag

SEQ ID NO: 324782 - DNA, 122 bp, Homo sapiens
gtcggggcgggcgggcagccgccgctcggagcaaggtggggctgcggggagggagagccgcggggcagatccctggccaaggtcctctagaaagcccgctctgcgcccaaacgcgccgctcg

SEQ ID NO: 324783 - DNA, 122 bp, Homo sapiens
ttttgacactcttttctaccgggacctgtttcccagctttctcatggaaaatccctgagccggccacttcctgtttttgttttgcttttctaccccattggtgtaccctttgaccttttgtc

SEQ ID NO: 324784 - DNA, 122 bp, Homo sapiens
cgagctcaggcagggggtgcccgagccctccccggtcctcccctcctagttgtaagcgcacgtaaccattggcatttgagttccgcccaccccccaggtgaagccgagttggagaaggcaga

SEQ ID NO: 324785 - DNA, 122 bp, Homo sapiens
tgtgacaggggaaagtctcagatagtgaccagtggattcaggatttaaacccacaatgcccgattctggacactcgcgtttaatttctgcggcccttgcagctgccggcgcaggcgctgcac

SEQ ID NO: 324786 - DNA, 122 bp, Homo sapiens
tctgcaaagagattagacacacacatgcacatatacagctcctagaaggggactgtgcaccgttcatctttaacagatgaagtctatttattgcttttcccctcaggaaaggcactctgtct

SEQ ID NO: 324787 - DNA, 122 bp, Homo sapiens
gactttaaccttccatatcataggacaacaactaccaatttaggcttatccagttgttgccgaatgagtggcattcccagagcactttcagaaactgagtatgtagaaaataagaggaaaca

SEQ ID NO: 324788 - DNA, 122 bp, Homo sapiens
ggcctagagaccgctatccagaaaaccaagccttcatcccagaaaccagaaccctggcctcgtaagcaagcctttacttcagacaccgatcttcacctctcaaggttcagttatgcgatctt

SEQ ID NO: 324789 - DNA, 122 bp, Homo sapiens
gtcttttcctgggtcttggcgttctaaacgcagctgcgacaatatcttgccttcatagagcgtgcactttgtgcaaaaccttcatgaatccttgcatgtaacccccactgtggccctctagg

SEQ ID NO: 324790 - DNA, 122 bp, Homo sapiens
cgctcccccctcgcgctctcggacagtgggtccttccacttgtagaaaagcattgtgggacggaagcctgtcctttcttccttttggtgcgagcttgctgtggtttttgctctgggtcctct

SEQ ID NO: 324791 - DNA, 122 bp, Homo sapiens
tgggctatatgtatctttcgaactgtaggttagtgtgcccacaaaaatttctcttgcaaacgtacactgccattcctttctttttaataaatgtgtaggactgctaccaaaatatggcagtc

SEQ ID NO: 324792 - DNA, 122 bp, Homo sapiens
atctcaattttccaaatcctttaaagggaaaacattcctttcttgacagagttattgggacgactaaatcccaatgtttgtcggtatctggggtatctggccaatgtaagtgctcatttacc

SEQ ID NO: 324793 - DNA, 122 bp, Homo sapiens
gttgcacaattcgggtccctttcacccagaaatgaacaagggcgctcaggaacggaaaagcgcgcggcccggtctctgcgggccgcggccgcacccggcagacggcgcggaggcaaaggcgg

SEQ ID NO: 324794 - DNA, 122 bp, Homo sapiens
ctccacctcataaaggctgaaaatctgtctattcttctgagtcaccccatcacatcctcccgacctcctatctcaggccagcttgagcagaggtactttgatctctgaatgggtggagggat

SEQ ID NO: 324795 - DNA, 122 bp, Homo sapiens
ttcctgggatgccagtgtatgagaagacacttcatacaacactgggtatgattactcacacgtgctagtgtcccaaagcgcccactgggcttccttcgcaggggattcctccctggatcgtt

SEQ ID NO: 324796 - DNA, 122 bp, Homo sapiens
tgggggtggaatggggtgatgagctccacgggatgccgctgcgccctttccactgggtgccgaccgcagatccagggtagcttccctcccgcccgcccccatccctctgcccctgcctgtca

SEQ ID NO: 324797 - DNA, 122 bp, Homo sapiens
caaaacatgaataaaaatccttcaataggtcatttaattcaacggcaagaacttttgctccggtaagagttatccctgttggaaaaaattagaaaaaaagaggaatatgtggaagacaagat

SEQ ID NO: 324798 - DNA, 122 bp, Homo sapiens
cgcgcggcccctcggcagaggaccggggctcaggaggcggggacgcgcctgaaaacagggcgggagcctttccaacccccgcgggctgcgatgcagcagaaaactcggccgcctgcaccggg

SEQ ID NO: 324799 - DNA, 122 bp, Homo sapiens
gcccgccccgcctccctggggccgaggggctggcaggaagactcggggcccgcggaggtccggggcagggcggagtgcggggtgcacgcgctggagcgcggccgggcccgaggcgcagtgcg

SEQ ID NO: 324800 - DNA, 122 bp, Homo sapiens
gaagtgagtgtgcaagttgcattttccttctttccagacaccacctcaaacaccaacgcccggggagagcatggaagatgttcatctcaatgaacccaaacaggagagcagtgctgatctgc

SEQ ID NO: 324801 - DNA, 122 bp, Homo sapiens
acccgcctcagggagtgcccacctggagccgtgtgtctgattagggatacccgcgcactgcgggaacaggtcagggccgtggaatgctcgtaaaagggttgcgcaagcaggcctggccgagc

SEQ ID NO: 324802 - DNA, 122 bp, Homo sapiens
gcctccgtattcttaggaatgcttaccaggtccgtggccctgggctctcccctgccatcacgtcagggtgggcagtgctcggcctcggacttgtcttcctctcccactccccagtgagtcag

SEQ ID NO: 324803 - DNA, 122 bp, Homo sapiens
ttttattgtgaccaagtaaaggagaaataaaggtgaaagggaacaagagaaattgaaatgcgaggagaaaagcagagacacagcattgacagagagagcaagagagagagggaagggagaga

SEQ ID NO: 324804 - DNA, 122 bp, Homo sapiens
ccatgtgattctgcccccacaaaggcatcggtatttcctaaatggtacctgtatatgcagcgttgttttctataccatccttattcaaaacttgcatgtggcacaaaatgggttggtggcac

SEQ ID NO: 324805 - DNA, 122 bp, Homo sapiens
aaaattcagatcattttcttcaagcctggcaggaacccacaacagtttgtgtgtaacaggcgttacagtggggagaagccagggtccagaaggccagcccgccagctcctgcagatggcgcc

SEQ ID NO: 324806 - DNA, 122 bp, Homo sapiens
gtttatgtttctgggttaaaaaaacaaacaagcgcaaacagcttctaacctgcctggatccgggaagccgtgaggtgcactgtgtaccaggagcgtggctctggagtaataatctgaggcag

SEQ ID NO: 324807 - DNA, 122 bp, Homo sapiens
aagctccgcctcgcgccgactaccccgcggtctagctgcgctggaacttactgcagctgccgcgccggcctccgcctttattagtgctgaccacgcctcccggataacggtgacaaccccgc

SEQ ID NO: 324808 - DNA, 122 bp, Homo sapiens
tgtaaaatggagcaaataatttatagggcgttgggagagttaaagagactaattcatttacgtgttaaatacagggaatggcttttgcattgatataaccccagcctccagcatgcgccaga

SEQ ID NO: 324809 - DNA, 122 bp, Homo sapiens
aagtgagtgcggggtgagggcgcgcgggaagcaaagaccccaagatttgcaaagaccctccggtgtcttgggagggagcatttgggtgcccgcatttagctgggcagccgtctcgctctgag

SEQ ID NO: 324810 - DNA, 122 bp, Homo sapiens
agatcagcccggtgctcttcggccgccccgggaggaaaagggcggggagtgggggcaggtcggccgggcagtccagcttgcccggcccagggcctgaccaccccggctccccatctggctgg

SEQ ID NO: 324811 - DNA, 122 bp, Homo sapiens
ccccgaccgtcgtcgtctcgtagttccatctgttggagagccgagacctggtgcttcaggcgggcagaatgactaagggaggaaggtctctctccccgagctcgcactttctccccactgcc

SEQ ID NO: 324812 - DNA, 122 bp, Homo sapiens
gtcactagaggtaatcaagaagagatcaaattcatgcacatggccgggtgtggtggctcacgcctgtaatcccagcactttgggaggccaaggcgggcggatcacgaggtcaggagatagag

SEQ ID NO: 324813 - DNA, 122 bp, Homo sapiens
cctcggtccattcatttttgttcactgttgattcagccccattcattgatgggctggggccgtgcgctgagcgcccacagtcgatggggaaaggggctctgaccgacagtccccacgccggg

SEQ ID NO: 324814 - DNA, 122 bp, Homo sapiens
ggggccgaggcgcgctgggctgtttgggttggcaacctgagccctccccaccccgttccgcgtccgctgcttcccgccctggtccggcgcttccattcatgccttcccgggtccctccgcca

SEQ ID NO: 324815 - DNA, 122 bp, Homo sapiens
agtggcagagggccatggtttccatgttaaggaagcggacgtgcatcttggtctcaatgtcgatcccctgccagatctggaagggacggagcagcgttaagggcacgttcccgccgccacct

SEQ ID NO: 324816 - DNA, 122 bp, Homo sapiens
gaaccgccacggggtccacggccgagatgatgctgccgaagagcaggttgtccaggaggccgatgttgttgatctgctcaccgcccaccaggcacacggcgtacatgaggccgcccaggaag

SEQ ID NO: 324817 - DNA, 122 bp, Homo sapiens
gcagcctgcgctgcgggcgccccgactgatcctggcgcctcccacctcggggctccagcccgggcctcgccgtgcgccccagccaatctccggccgcctggccccagctccaaggcggggag

SEQ ID NO: 324818 - DNA, 122 bp, Homo sapiens
cccgctcccctcacctgcggtatcgcagagcatggtgggagccccgggaggcagtggccccgcccccttccctgcggccgcgcagagcatgccgggagccgccggccgccggtgtccggacc

SEQ ID NO: 324819 - DNA, 122 bp, Homo sapiens
gagagcctcaaggtgacacctcattttggccagtggatccgggttctgggtccgagttcccgggcaccaggagccaggcagcccgagctcccgggcccggcttcccatgagaggccccgtcg

SEQ ID NO: 324820 - DNA, 122 bp, Homo sapiens
ctgttttgttttgtaacctaaggaagcagagcctctgagaccacacacagcagcgtcgcccgtccccagaggcaccccggccaggacgggcaggagaggagacccccgttcctgcatgcgct

SEQ ID NO: 324821 - DNA, 122 bp, Homo sapiens
aagccagaaaattcacgtttgcttgggaatcccacaattcaatagcttttcaaaacagtgcgggaagaaaagtgggtttggcccaccagcagccggcgggcaccctcccagcctcttcacgg

SEQ ID NO: 324822 - DNA, 122 bp, Homo sapiens
gtgtgccagccgcgagcccagggcgcatctttctttttctttttgttaagacagagtttccgctcttttcgcccaggctggagtgcagtggtgcgatctcagctcatggcaacctccacctc

SEQ ID NO: 324823 - DNA, 122 bp, Homo sapiens
gcaaaagcgtccagtcctagtctttgcatagtcagccgggtcacattgaattccagcatccggctgcactcccggcggcttccccagctacctgaggacagtacagggggtgagatggggtg

SEQ ID NO: 324824 - DNA, 122 bp, Homo sapiens
tcgcggtgagtgttacagctcttaaggcagcacttctggagttgttcgttcctcctggtgcgctcgtggtctcgctggctttaggagaaaagctgtagatcttcgtggtgagtgttacagct

SEQ ID NO: 324825 - DNA, 122 bp, Homo sapiens
aagcacaagtccttttccaaatgtgcatcttacagcctcattttaggggacaggcttagacggccacattcatccctagcaacccctaccattagctacagagctaggagtaggtatttgat

SEQ ID NO: 324826 - DNA, 122 bp, Homo sapiens
ggcttgctgctcccgcccatctaattggctttggtctaggtacttctgattggcttcccccgggcggtgggaggcgcggttttggggattgttcatcatggattggtgaatttgggctcctt

SEQ ID NO: 324827 - DNA, 122 bp, Homo sapiens
aataccttcccaattctaggagaccacagagtttaatagcaggttatttattgaactaggcgttgagttttacatacatttttctttttttgagacagggtcacactgttgcccaggctaca

SEQ ID NO: 324828 - DNA, 122 bp, Homo sapiens
accgaggccatgatggacgcctgcgtgcaagactttgtccagcagcaccagcagatgatgcgctggctgaagggggagaggcctgggcccgaggacgagcaaccctcatcctgagtccatgg

SEQ ID NO: 324829 - DNA, 122 bp, Homo sapiens
atacagaaatcggtgctgctcccaacagcagatcaaggcagtcgtcaggaactcaggatccggggtgagtgtcctcatcttgccttggggatgggtggcccaggtctttggcagaagtcaca

SEQ ID NO: 324830 - DNA, 122 bp, Homo sapiens
tggcatgcaaggagagatgaagccatggatttcattaaggaccccaatctgaatgtggaccgcacacaagaatcagaaccaaaacctggacacagccaagactgcaggtttctcttcccttg

SEQ ID NO: 324831 - DNA, 122 bp, Homo sapiens
ccctcggggccatgccttggtggggcctgtgtcgggcgtggggcctgcaggtgggcgccccgaccacgacttggcttccttgtgccttaaaaaacctgccttcctgcagccacacacccacc

SEQ ID NO: 324832 - DNA, 122 bp, Homo sapiens
agccatcttgtgggaagagctgaagcaggcgctttcggctctgcgcggcccactgcaatccgtggaggaatgtgcccccgagccaccatcatgcctgggcacttacaggagggcttcagctg

SEQ ID NO: 324833 - DNA, 122 bp, Homo sapiens
gatgaaatctactgaatgcactgaaaggatgagtgaccagcttggggcggatgctggaaccgccgctggcctagacggccgcggtgtgatccggcttctggattccaggatttacatttatc

SEQ ID NO: 324834 - DNA, 122 bp, Homo sapiens
gaacctgccacacaccacatggctggaatgggtctgtcacaggcacatacccggctgctgcgctccatggttctgatgggcagaggcttcaaggtagaaaaaggtgatcaaaaaccccatga

SEQ ID NO: 324835 - DNA, 122 bp, Homo sapiens
ggactgtaccaggcagctgggccccgcaggacaggccgcagcgggtggccggttctgtcccgtcttggggttcttggtgtccacgtcttgtgggccgtgggcttctacctgcccttggcctg

SEQ ID NO: 324836 - DNA, 122 bp, Homo sapiens
tccagtgtgttcagaattagaatatcgattcagatttttacattacccatcttccatgcgcgtccatgtgaagagaccaccaaataggctttatgtgagcaataaagctttttaatcacctg

SEQ ID NO: 324837 - DNA, 122 bp, Homo sapiens
ggatactgctcatttgccctctgcacactttcccattcaagaccattagcgcactgacagcgtagggagctggctcatctgacgcttcagggggaaacagggtttgagggtgatggaagcat

SEQ ID NO: 324838 - DNA, 122 bp, Homo sapiens
caccgatatgaaaaaaggcagcatgttaatacgaagcaggaatcccgagacatctttgggcggtgttatgtcctgagtcagaatctcaggattgaagacgatatggatgggggagattggag

SEQ ID NO: 324839 - DNA, 122 bp, Homo sapiens
cgtgagccaccgcgcccggccttacttctcaatttcatcttttccctagagatgtttggccgggcgcggctgcacgcctgtaatcccagcactttgggaggctgaggcgggcggatcacgag

SEQ ID NO: 324840 - DNA, 122 bp, Homo sapiens
ctgcgccttcttcgccgtgggcccggctcggagcccccaccccaggcctcaccggcccagcgcgaggctgcctcaccggaaacacgaggccgaattccaagctattgtcctgcttcgccggg

SEQ ID NO: 324841 - DNA, 122 bp, Homo sapiens
agttcaatgggctggtgtctggggaacagtgtgctcctgcctagcgcagcacagatgcgccgacctctgggcaggtggtgagaggtgcgcgcttgggcggtgaaggggagagggaagagtga

SEQ ID NO: 324842 - DNA, 122 bp, Homo sapiens
cgccatcagcatcgcccaccagagggtccattagttacacttgatgaacctgcagtgacacgtcattatcgcccaaagtccatagttcacgtgagggtttactctcggtgctgtacattcta

SEQ ID NO: 324843 - DNA, 122 bp, Homo sapiens
ctttgctaatcccacaggtcaaatgtggccctttctctgtgtagtatgtatttattcttccgtggttatcagggagggaccgcaccttcttctagagctattggccattggtacatctcaga

SEQ ID NO: 324844 - DNA, 122 bp, Homo sapiens
ttgatttccactttgtgctgacatcatttccctatttgctcatccatatgagctaattcacgtgctagatagaggtggtgtataaccagtatgctctgttcctttcctgagataaaattgga

SEQ ID NO: 324845 - DNA, 122 bp, Homo sapiens
ttccccgcggccgggcgtctaggactcagcagccacgccatcattgccacacctccacctcgagcagccctgccctgtactctccaagccacccacagcagcaaagggctgaggagcgtccc

SEQ ID NO: 324846 - DNA, 122 bp, Homo sapiens
gggactgtgggctggccctgcagagctcagcccccggctgagtcacagcacagcgccaggcgtgggcctccctaacagaaagcaaactccaggcgagaaggtctgggggcgggtggggacca

SEQ ID NO: 324847 - DNA, 122 bp, Homo sapiens
tcagcgggaggtggggctgctgccgtcgccatcttgttgaggggcgcggccggcttggtgcggacatgtttatgaggggcaacctctagcttgagacctcagcctagatgggtggagggtgg

SEQ ID NO: 324848 - DNA, 122 bp, Homo sapiens
attcttgctgaagacagcccagggtgatgagtggggagtgaggaatgtgatcaaatatcacgggtggaggcttcccactaaactgacttagcaggattcttgctgcagctgggctatacaat

SEQ ID NO: 324849 - DNA, 122 bp, Homo sapiens
ctctcagacacgcacgcatgtgcgcgcgcacacacacacacacacacacacgtacaagaacgcatttaaccctcaccagcctatgggctgggtagagttttacccccacttaacagatgagg

SEQ ID NO: 324850 - DNA, 122 bp, Homo sapiens
gggcgcagtccagggtgatccgcacaccctcctgggtgcctgtggggtgggtggtcaggccgactaggcaggcccaagccgtccccggccccccccccccccccccagccaccccacactca

SEQ ID NO: 324851 - DNA, 122 bp, Homo sapiens
gcggaggatccctgctggcggtcgtggtgctgctcgcgctgccggtggcctggggtgaaacgctggggggcgtggggaggcgcccgggctgacgaggcacccagggccccgcagagaactcg

SEQ ID NO: 324852 - DNA, 122 bp, Homo sapiens
tgaaacaacttctgtgtggtccacaagagcctcatatctcaccaaggacctattcacacacgtgtgagcacgcgcgcgcgagcgcacacacacatacaggcacacgcgctgcctaggggaac

SEQ ID NO: 324853 - DNA, 122 bp, Homo sapiens
agactagtatttgatccttgccatataaaacattttaatatggtttacatgggaaaatatcgatggcttcctcacaaaatgtatgggtgacgtgaagttgaagagccaatggcttgggtgac

SEQ ID NO: 324854 - DNA, 122 bp, Homo sapiens
gaaatgtgatcacattcttcaacttgtcctgtgctgttgatcacacagcttcttgtcttgcgttacatgatgcaagctattgccagttccaagaatgcttaaccttaacaggtctttgaagc

SEQ ID NO: 324855 - DNA, 122 bp, Homo sapiens
cttctcggcactctccggctctgctcccggttggtgcagcgggtgcagaggctggctggccggagcgaggcgggcgacacgccgcgccgggcttcgcctgcctgtcctccacctccgcagca

SEQ ID NO: 324856 - DNA, 122 bp, Homo sapiens
gggagggtgggtccccccgcagccccactgggtggatagagctgaggctgcagcttcacacgccctcccggccactgtgtggattcttggggatctcagagctgtctccccccgacccaggc

SEQ ID NO: 324857 - DNA, 122 bp, Homo sapiens
tctgtctttagggtgacaaaggtgccccagggagagcaggcctgtatggcgagattggcgcgactggtgatttcggtgagtgttgcccgtccagtgaaaacagggagtccacaattcagagc

SEQ ID NO: 324858 - DNA, 122 bp, Homo sapiens
ttacctgtagtcctagctactagggggctgacctgggagtatcgcttgagcccagggtgtcgaggctacaggaaaccacaatcgcaccatggcactccagcctagacaacacagtgagaccc

SEQ ID NO: 324859 - DNA, 122 bp, Homo sapiens
tgcagcgagcccgggagttggtgccgcaagacctgtgggcagccaaggcgtggctgatcacggcccgcagcctctacccggcagactttaacatccaggtgaggtcccggctgtgcatgcgg

SEQ ID NO: 324860 - DNA, 122 bp, Homo sapiens
gctcttcgtggcatggacccacctccggccagaaaggagcgcagccagtagaagtctctgcgggttgtgggccctccggcccctgccgcctgcggcattgcgggagggggatcggccgccgc

SEQ ID NO: 324861 - DNA, 122 bp, Homo sapiens
gcaaaactccctgggcagggccaggggctggggcctcatatgcactgcctgtgcaccaggcgagtctgtgggcaaatgagctccagcttgccatggtgctgggggagggccacccttctgct

SEQ ID NO: 324862 - DNA, 122 bp, Homo sapiens
cagcctcccaagcactcccagccaacacacccagctaatttttgcatttttagtagagatcgggcttcaccatgttggccaggctggtctcaaactcctgacctcaagcaatccacccacac

SEQ ID NO: 324863 - DNA, 122 bp, Homo sapiens
tctgtgctggttccctcggtctccctcccagcttgtaaacgaggcatgcccagagccatccgtgatcctgtctccctatgtgcaccatgtctaaaatgagccccagggctttgaatcccgta

SEQ ID NO: 324864 - DNA, 122 bp, Homo sapiens
ggaggaaactaggggcaaatgtagcccgcattcctgcggagagccggggtcccgggagggcgcgccagcggcggttccggatcagcgcgtgtctgtctcattgttccctcaccgcggggggc

SEQ ID NO: 324865 - DNA, 122 bp, Homo sapiens
ggttaggctggaaaggggcacgtggcgagtgcgagggcaaagtgcgaggggcaaaggcctcggacggtggctgaagctggaaaaccgaaaccagggttccgggttgcgcttggtcttaggct

SEQ ID NO: 324866 - DNA, 122 bp, Homo sapiens
cggtgccagcggggagctcgagccatctctgtgggctgaaccgggacccccagatgcccacgttgaagtcctaacccccggacctcggcaagtgactgtgttcggagacggggccttcaaag

SEQ ID NO: 324867 - DNA, 122 bp, Homo sapiens
cagacaaagctgcaggtttagcatatgttatactatgtgctggtacctgtgtttgagctccggtggcttagagtggttggtgctcactgtggctgtgccggggccccactctccttagaaat

SEQ ID NO: 324868 - DNA, 122 bp, Homo sapiens
tgagaggcggccgtcggctcctgcctcaggaagggcatgttcggaggggcggcctcggcacgccacccgcctaagcgcccccttcccaccgcagccgccgccgccgcagcgcccgcaccgcg

SEQ ID NO: 324869 - DNA, 122 bp, Homo sapiens
ctgtagatggcctcttagagagaaaggagctgcctggcccggctactctggggctcaccccgccacccacatggccttgtcttggggggtctcctctggtgctcttgacagggcgtcagctg

SEQ ID NO: 324870 - DNA, 122 bp, Homo sapiens
gggtcctgaggtcgcctgacgttcagggcagccggaagacggggaggtctggacctgaaccgagacaaggaggtaccacactattcactgctgcgtcgcagagcgggctgggcggctgtctg

SEQ ID NO: 324871 - DNA, 122 bp, Homo sapiens
ccttttcataaactcaaacgctctcaaagcagcagcgcgttgagaagccccaagagtctgcgcggaaccagtgcgcaggcgctctgaggggcggaagcggagaggcggggctaggcccgaca

SEQ ID NO: 324872 - DNA, 122 bp, Homo sapiens
ccgggcccgccaagatgtcaccaatgggaaacgcgtgcctgcaggtgcggccccgtggcccgcgcgctgggcccaggcaggaagtgggggaaggagagagtcagggcggcgggaagacattt

SEQ ID NO: 324873 - DNA, 122 bp, Homo sapiens
acggatggtttgctgtgtgatggactgtttgcaagcactttacttcatcttcacagcaatcgtgaggaggtgttgtttccattttacaaatgaggcttagatagttaaccttttccaaggag

SEQ ID NO: 324874 - DNA, 122 bp, Homo sapiens
caacaacaggggtgaatggtgccaaccccactgaaaaggaaaggcagaagcaagcagaaccgaggtgtaccccatcccaccatgagcttttcatccggtcactcctgtctccaggaccgagt

SEQ ID NO: 324875 - DNA, 122 bp, Homo sapiens
tcaatgtatgtactaagcccgttttcccgtgttcctgtgccttctaggttaccgaggagacgagcctcgtcctgcagaccctcggatacacgtgcacctgtcgaggaataatcaacgtgaaa

SEQ ID NO: 324876 - DNA, 122 bp, Homo sapiens
cccacgcccctactgccagagtccggggcctggggttacagagcgcgggaggcgctggagcgctcccagagcacccggggccccgcggtctccacgctggcggcgccagagcggccctggtg

SEQ ID NO: 324877 - DNA, 122 bp, Homo sapiens
ctttaatatgcgaattgtcagttacttgtgagtgcagatacctgtcagatcccatcctctcgatactgtctgacggactcacagataatgagaactacatagcagatcatgtttccaattga

SEQ ID NO: 324878 - DNA, 122 bp, Homo sapiens
gggcggggaaacacagccatcatccgctcagcccctccctccccgggctccccgcggattcgctcagtcccggggcaaaactacccgaggcgccagcactccggctcgccagctcgctcttg

SEQ ID NO: 324879 - DNA, 122 bp, Homo sapiens
atgtggcatgtatcttacagaggaggcagcccgggctcagggagacgaggcagaggtgcacgcaggtctatgtgggctggaaagtgctggggcctcccgggcgctcctggtctccaggcaag

SEQ ID NO: 324880 - DNA, 122 bp, Homo sapiens
acagctttgtatgtcatcctctaaacaaggccaaacactgaatcactgttgaattcctcacgtgcagctacacccagttaatcttgaagaaggcagtaaactatgtaaatctacttaaactg

SEQ ID NO: 324881 - DNA, 122 bp, Homo sapiens
ctgtccccgccctgcctcttctcccgaattagttttgtccgcgctcggccgccgtgcagtcggtcgttccacttccgccttcgcccacgtggtccggctccggctcagtcagccgcgtcgcg

SEQ ID NO: 324882 - DNA, 122 bp, Homo sapiens
tgggtgcctgcttccgttggcactgaaagcaaatgcttgttgcgtcaggacctgcagccccgtgccccggcgctggccaggtgatgggtgcctgcttctgttggcactgaaagcaaacgctt

SEQ ID NO: 324883 - DNA, 122 bp, Homo sapiens
ggcactaggacacacagagctgctcggctgatgatgggcactaggacactcagaactgcccggctgatgatgaggggcactaggacactcagagctgctcggctgatgatgatgggcactag

SEQ ID NO: 324884 - DNA, 122 bp, Homo sapiens
tccgatcagtgagacccgcctggtagaggtgctggagggtgtgtgcagcaagtcagacttcgagtgccaccgcctgctggagctgagtgaggagctggtggagagctggtggtttcacaagt

SEQ ID NO: 324885 - DNA, 122 bp, Homo sapiens
cctcctcctctccacccggaccctcgctcacactgggagattcagtatgcatgactgagccggcaagcacgcaaggacagcgctcttttaacttttctcaacaatggcttcagtccttccac

SEQ ID NO: 324886 - DNA, 122 bp, Homo sapiens
aggcgtgcgggccgcgccgattggtggcgccagccgggcggggagggggggtcacggcggcggcgtggggttcgctgtgtgacacaattacaacaactttgtgctggtgccggggaagtttg

SEQ ID NO: 324887 - DNA, 122 bp, Homo sapiens
aaaaaagataatttaaacacatttttgcagtgttcacatattaaaaaatcattttttcaacgtcaaaatgaggtcatccgcaaaggcacctaaacttttaaaaaaataacaaataaaaaaac

SEQ ID NO: 324888 - DNA, 122 bp, Homo sapiens
tcctacttccatcttcactctctcccccttgttaaagtagatccatatactctcatagcacgggttagtaggcaggggttttcaagtcaataaactggtatttgaaaccctgggcgccacca

SEQ ID NO: 324889 - DNA, 122 bp, Homo sapiens
gcagctctcctaggtcacagcctgctgggctgggtcgcgtagcccagggtggaggcagaacgatgctgctgtggtagccctttgcctttcatgcccatgcttgattcttgcacctcagcagc

SEQ ID NO: 324890 - DNA, 122 bp, Homo sapiens
cgcgccgcgctgcctccttggaagtgtagtcctcaagttgcagcggccaagagtgagacccgccttgaggactactatgtatcccacagacctcgcggggccgcgtgacgccatcaggatgc

SEQ ID NO: 324891 - DNA, 122 bp, Homo sapiens
ggagtagagtgaaggaggctacacaagtaaaccaagaataccacggcttccctaaatcttcgcatgcaccctgtgaagactttacccaacattcacatgcatcaaattagtaacaacatttt

SEQ ID NO: 324892 - DNA, 122 bp, Homo sapiens
ttgccttcgcggtggtggcgccgcgctgggaatccgctgcggagtgagttcgcctcgccccgttcgcttcggtccctgatcccagtcggggtggggctaagctgaccaccctgctgtggctc

SEQ ID NO: 324893 - DNA, 122 bp, Homo sapiens
gtctttgtattggtatactgaaggatggggcatgagctgaactttcagatgtggtcttctcgattggctacttctcaaagggtgctacacctcattctgcagccaggcacaaggcttcaggg

SEQ ID NO: 324894 - DNA, 122 bp, Homo sapiens
ggggtctcattgtgttgtttaggctggtctcaaactctgagactcaagtgagcctcccaccgtggcttcccaaagttctaggattacaggcatgaggcactgtaccgtgcctgttaggaaag

SEQ ID NO: 324895 - DNA, 122 bp, Homo sapiens
cagggggaatcacacatccctctgcgctggtgcacccggattccaagaaaaagctgctgacgtccagaccacacagcctgctctcgggcaaatgccaggtgggccccgcccaccccagccct

SEQ ID NO: 324896 - DNA, 122 bp, Homo sapiens
agaagctggagaggtggcacaacagagagggccaccatgggggaccggaggccacaggaccggccaaggtcccaaggcatggactccaagccctggtactgtgacaaaccgccttccaagta

SEQ ID NO: 324897 - DNA, 122 bp, Homo sapiens
ttttttttttttatggctgacaggtctatgcattgcgttatgcttcacaaccagagctttcgagcctctatggctggcgacaagtcaggagatcttcaggcaaagaggggtgtgtgcagtca

SEQ ID NO: 324898 - DNA, 122 bp, Homo sapiens
attcggcaaaactcacagggcgctagtggatgctttaagacattcacctggctgaaaatacggtggtgggctgaagacctcccctaggtgggttctgtgggcgccccgtgaacgacgagcct

SEQ ID NO: 324899 - DNA, 122 bp, Homo sapiens
gatccaaggaaggtcaagcctaagtgcttagagaagaagaaaacaaggagaagcaaggcacgtctccctgaggagccctggaaagactcaggtatcagaagcagtgacgtgcagagggaagt

SEQ ID NO: 324900 - DNA, 122 bp, Homo sapiens
cgcgggctccacctccccggagcgcagtccacaccgtcccttttcagcaaaacaacacaacgcaccgccccccgcacccgcacccggctggataccgggctacgcccagccgcccacccgcc

SEQ ID NO: 324901 - DNA, 122 bp, Homo sapiens
taggatagcgtgcctcaccaagaccgtttcgccagccaccccatcaagctgactgtcattcgcttgttctttccaggacacacttacagaagagacgaggcctggttattcttccaacacac

SEQ ID NO: 324902 - DNA, 122 bp, Homo sapiens
ttagacccatttggtgctgctccatttccttctaaacagtagatacttctgatggattctcggcattaactcctgtttcaaaaaagtgtgaacagttttatgaatttgaaagaaaatttggt

SEQ ID NO: 324903 - DNA, 122 bp, Homo sapiens
cacacccacgaggcaaaagccaggctcactcccaccccaagacacacccagccgggacggcgacccccagcccgccgccgggtccttctcgcgcctcccaggccagcgcaggggtcccgctt

SEQ ID NO: 324904 - DNA, 122 bp, Homo sapiens
tcttgagccccagggtcacctatcttgagactggagttcagcagctgagaaggggcagagcgctcacagaggagcctggggcttgggtgctctgctgtcattaggacagcccctgggactgc

SEQ ID NO: 324905 - DNA, 122 bp, Homo sapiens
acatggtgccgtctgagggattcctccatccagtcaggagacaaccccagacaaaaccaacggagaggcactctggagaagacacaccctggagaagacacaccctggagaagacgcacccc

SEQ ID NO: 324906 - DNA, 122 bp, Homo sapiens
ccggcgctggttagctcctgagtgtgaaaccgcgtgttagtgtaacccacgccagaggcgcgggcggcggcggcggcggtaggagcggcggctgcaggagcagcagcagcagaagcagcggc

SEQ ID NO: 324907 - DNA, 122 bp, Homo sapiens
gcctttacggatgtcatcattgtacttgctccgcaccaggcaccaggcgtactcaaactgcgtgctcttggacaccgagcctgctgccttctcagactgaaatttcttttcaaacttctgcc

SEQ ID NO: 324908 - DNA, 122 bp, Homo sapiens
acagcccattgagggcaggggttagggctaatttcctaagcctcccagctcccggcctcccgggcccagaactgcgcccactttcgttggccccgccccctcctcacccggacagccttttg

SEQ ID NO: 324909 - DNA, 122 bp, Homo sapiens
agtagagacggggtttcaccatgttagccaggatggactctacctcctgacctcgtgatacgcctgccttggcctcccaaaatgctgggattacaggagtgagccaccgcaccaggcttttt

SEQ ID NO: 324910 - DNA, 122 bp, Homo sapiens
aaagatccatctatactcagtgtgcatcgtcaagctactggctccagtcatgcacagctacgaatgcatgcaagaaaaatgcaagaaaaagtacccaacctgttctgaccaccattaatact

SEQ ID NO: 324911 - DNA, 122 bp, Homo sapiens
cgcctttcacgacccatgaacccttcctcccctagggagcttggcatttatgcagcctgccggcaggctacacccccccgaacgcggagttttgtgagcaatcaacgcacttcacgtgtctc

SEQ ID NO: 324912 - DNA, 122 bp, Homo sapiens
ccacagcgagcgtcagatgcggctttttctcctgtgaatcagggagcgtagctctgcctgcgggacccagggttgacacgtcctgcccgttaagtgaggaactgccctcaccggctcctgaa

SEQ ID NO: 324913 - DNA, 122 bp, Homo sapiens
cccggcccagcagcggcaggatgagccccttaagctggctcaggctctggttgatgcgcgcgcgccggcgcttctccagcagcggcttcaggctctgcggacgggcggcgcggtggttagac

SEQ ID NO: 324914 - DNA, 122 bp, Homo sapiens
tctggacataaagttcatgtttatgccactgtgtcagcatttccaaaaactgattttaggcgaaacgtaagtaagctttttaaaaactttaatacttatgcgtttattttaatatacattga

SEQ ID NO: 324915 - DNA, 122 bp, Homo sapiens
cttgtaaccacagataagttatttaaccaccagaatttagcctggtgttaaggacagacacgcaggggtatgttttcaatttcatttctcaggcaagcaaatagctacaaaaaccttgctgg

SEQ ID NO: 324916 - DNA, 122 bp, Homo sapiens
tgctcgcaatgcaggtgtaaggtccccctcacacctgcgcgcttccgcggtctccctccccgcatccccattaagggactggggtcccgttacaggtgcgcccacagcgcggccccgccccc

SEQ ID NO: 324917 - DNA, 122 bp, Homo sapiens
agactacagtaagggcgagcagagctgaatgctttatgtcggaatcgaccaatgggatggcggcacccggttgccagggctacggccaagcggaggtagggcctcggcactatgggcggggc

SEQ ID NO: 324918 - DNA, 122 bp, Homo sapiens
cactgatgatgctggcttttactgtggccaaggctgaggcctgaggctgggccaagggcccgggcagaggtggtggcggtgggcccgggccctcctcccagggcagcagcttccggggcaga

SEQ ID NO: 324919 - DNA, 122 bp, Homo sapiens
gacacgggcgatttctgcgggccagggcggcggaggtgggacttccgcttcgtcgcgtgacgtcatctccgtgagcaggattggccctggaacagtgtggggcctggaccgctgggtaggcg

SEQ ID NO: 324920 - DNA, 122 bp, Homo sapiens
aagagccgccgtttgaatctgcgcacgcggccctgaacctcattggctgtgggggccgcacgcgaagaagcgagggcggggaggggagagcgcgcgcggctgagggcggggctggggagctg

SEQ ID NO: 324921 - DNA, 122 bp, Homo sapiens
ggagacaactgaactttggggccatttgccattctgagttcttaaaactctgcctaggagcggtggcaccacaagaatgaaaactccttgtggaacttttcccatgttttcggctgtctcct

SEQ ID NO: 324922 - DNA, 122 bp, Homo sapiens
aaagattcctgctcacttgtcctacaaattttttgtttatctgatacagcagggagcaaacgtcagctccaggaagctgtgacttcccctgacaatcagttgctcaatgctctgtgttaact

SEQ ID NO: 324923 - DNA, 122 bp, Homo sapiens
gctgctgggtaacatcctttgtttttgcccagggaagctttagctgtgattcccttcagccggctcctgaatgtcaaaggtactcctaaaagatggcgttaaaaccgaaaaaccatcgttgg

SEQ ID NO: 324924 - DNA, 122 bp, Homo sapiens
gggctctgggtcggtggtcaccgggcgtggggcttctggctgctaaatcaggagagtgagcgggccgggcggcggcgaatgagttgacgggtggagctggaagaggctttggcgatccagcg

SEQ ID NO: 324925 - DNA, 122 bp, Homo sapiens
cggctgcgctattcagtgggaaggttcgcggggttgggagacccggaggccgaggaagggcgagcagagcactgccaggatatcctgcccagatttcccagtttctgcctcgccgcggcaca

SEQ ID NO: 324926 - DNA, 122 bp, Homo sapiens
cagggtggccaggggttctaggcggcatcgcccggtggcagggtgttcccagggtgaagccgcagggttcccgggtgggggcggggaaggctaaatgcggccggccggtgagtggcgggagc

SEQ ID NO: 324927 - DNA, 122 bp, Homo sapiens
gccgcaggtaacgtactcttcttttgatcctcttagtctacacgtgaggtctgactcgaccggtccaggagggaaactgtgttccagctgagctctacccagcgcctgctgccttgccttgc

SEQ ID NO: 324928 - DNA, 122 bp, Homo sapiens
ccaggcctgaaagtcagaagtcctaagtcagtttcattgcaccaaaatcaaggggtgtgccgggccctgctctgtccggaggctcttaggcagacactgtttccctgccgcttctgtcttct

SEQ ID NO: 324929 - DNA, 122 bp, Homo sapiens
ctattcacgtccttcatatccagaaccaggactctcattctgcaatgctcagctctgtcccggcaatcagagttctcctcacacaccgttccaaactctgaagccaaaatacatctggtgac

SEQ ID NO: 324930 - DNA, 122 bp, Homo sapiens
gccctcttgtctcaagttctatctttgatccaggacgagggaagcctgtctgccagtctgcgaggctgatgctttttccccctcctcttccacctctgttttttcccaacttgctttaggat

SEQ ID NO: 324931 - DNA, 122 bp, Homo sapiens
agttttcagctgcaattacatttgccactaatttgtaccttggaacgtgtttactgaagccgctatggagcactcggttccgggagccctttcactcatcaactgcttctaggtcgcacctt

SEQ ID NO: 324932 - DNA, 122 bp, Homo sapiens
ttctgccaaagctctttaaatgaggtcatgcactcgagcgcacagactattgctgataaccggcagcgcaggaagaattgttaggaaacaatagagcatgcatggtgtggctgtttcatgag

SEQ ID NO: 324933 - DNA, 122 bp, Homo sapiens
acagaagagtgtcagggacagatggagggaaaacagactggaggcaagataaagccaagccggccaggtaggagagaggaagcttttaaaagtgcagcacagaaatctgagctcaaataagg

SEQ ID NO: 324934 - DNA, 122 bp, Homo sapiens
ccgcggcgcgctcccttcccgcctgggtcctgcagtcagatgtggcaagcatgatgtgggcgcaggtgaagtcccgaaggtctagtctacggggacccaggtggctccccctacttccaggt

SEQ ID NO: 324935 - DNA, 122 bp, Homo sapiens
gcccaggcaggagagaaaggtgtagcatccctgaagtcatcagtcgtgtctactcttcaccgcctgctctcacctcacgttccccacgaagactccgggagcaggcggccggaaggagccct

SEQ ID NO: 324936 - DNA, 122 bp, Homo sapiens
ctcagctctgattcagctgcactcggaaggcctgctatggaatgccagtgaaacccaacccgtctctcccaccagagcctccctcactccttctgctaccagagatagatagcatgtttttt

SEQ ID NO: 324937 - DNA, 122 bp, Homo sapiens
cctctgaggagacgcggaaaagagcgaggcatataggaaggtggggcgttttatccgcctcggttttgacccatctgccatgtagtctccccaggcaccgagggaaaggacgacggaagccc

SEQ ID NO: 324938 - DNA, 122 bp, Homo sapiens
ccgctgcaatggctgcttccggggactgctcccaggacaagtatcagccagcatccagcccgggactggaaaccaccttgggtgcttccaccgagggagcccaaccccaacccggaacggct

SEQ ID NO: 324939 - DNA, 122 bp, Homo sapiens
ctttgggagaagcacttaatatttagaaggcaatattttctcctagatgatcttagctatcgctggcttctaaatgaatttcctgtatttatcacaatggataaacggcgatttgtgtctca

SEQ ID NO: 324940 - DNA, 122 bp, Homo sapiens
gaccttctcagatggcgctccaggaggaagttggcgtatttgagcatgcgcgagggagtccgcgcttttcgctgacttttggcaaaggaaggactgaaattagccccgccccgctgcggctg

SEQ ID NO: 324941 - DNA, 122 bp, Homo sapiens
caggatgccagtgggaaatcgggagtccttctgatagaatttttccagcagatgttatcacgtactgcagggaaattggatctgcgtgctggccttactgttgagaaatttttccttatgtc

SEQ ID NO: 324942 - DNA, 122 bp, Homo sapiens
gtgaatttgcaccgcgtcagtttagcaaagccgctattgcacttcctagaatttcttctgcggcacagttccagggagcctggcccacaggggagctgcgtgagatccggaaggccgcagag

SEQ ID NO: 324943 - DNA, 122 bp, Homo sapiens
ggcattctgcaccctgaggagcacgcactcacactcacagcagagctgctacagccacgccggcgtatgcagggaggtgcgacccctcgactacactcccaggaccaaggggccctggggaa

SEQ ID NO: 324944 - DNA, 122 bp, Homo sapiens
gcctgtgacagagaacttgacacacggagggcacgcaaatatcattgcagaaaacttgtccgagttgtggaaataaagagtactttgcttttgactgactttctcatctgtttttgcagttt

SEQ ID NO: 324945 - DNA, 122 bp, Homo sapiens
tgcctgagtgcagcaggtcccagggcccccatgcctaatgctggccgccacctcgtggggcgtggcctgagcacctggcgtgtcatgctgggccccaaaagcgacgccaggggcgtgtttct

SEQ ID NO: 324946 - DNA, 122 bp, Homo sapiens
tgttatgatttaatcagtgaagaggagagaaaggacatttcaggtagcagaaacagctaacgcaatagtatgcagttatgaaagaggatagcaattcaaggcgaggtaaaaagtttgttgta

SEQ ID NO: 324947 - DNA, 122 bp, Homo sapiens
gcccaggcccaggccgatgcccagggggatcatggcgcttacggtgaccgccagcttggccgcgtcccgcaggggcatggcactccgggccatgctgatgcccagggccacggccaccagtg

SEQ ID NO: 324948 - DNA, 122 bp, Homo sapiens
ggttctgatcacatatgtcccatccctccatcaggaactggccctgctggatgggtccaacgtggtctttaaacttctgggtccggtgctagtcaaacaggagctgggggaggctcgggcca

SEQ ID NO: 324949 - DNA, 122 bp, Homo sapiens
gatcggaccctgcgaatggttttggctatatcttcatgtaggacctactccctatcccgtcggccgcggtgaatcccacctgcggtgctttaacttgtgtaacagagatgctgcctctggga

SEQ ID NO: 324950 - DNA, 122 bp, Homo sapiens
cccccagctcactgctaggcgaggctgctcctgcgcctccgggcttcccaaaaatccagacgcaaactgcgcggcctctgcgttcgcttcccggttcaagttacccagtaaagaggaacctc

SEQ ID NO: 324951 - DNA, 122 bp, Homo sapiens
tcaaaagccatcttgtgctcagagaaaagaggcctaccggctttcccttccggggtccggcgcccctcacccccagccgcggccatcccagccgggatgcccactggaccgggatgcccgct

SEQ ID NO: 324952 - DNA, 122 bp, Homo sapiens
ctgggtgcagcactttgcatcagctctgattttgaaatcagacacagaaggctttgaagccggccagtaaggggttgtcaggcagttgactaatgctcttgatttgaatcggaggctgctgt

SEQ ID NO: 324953 - DNA, 122 bp, Homo sapiens
catgatatggaggctgcagctgcattgagaggggcagaagccccgggcctgggggggccacgcaagggccaagagccagagcatgcctaatgccaccctcatggctcctggctcctctctgg

SEQ ID NO: 324954 - DNA, 122 bp, Homo sapiens
caatatgtctgatggacagtgtgatcagttaagcatgaacccaacaagaataaatccaagcgccaggcactgtggctcatgcctgtaatctcagcacttggaggtgctgaggtgggcagatc

SEQ ID NO: 324955 - DNA, 122 bp, Homo sapiens
cggggcgtggaccgtaacggcgcctccaaagggacaaaattgatcacggtgcaacgtccgcgttctttactggaaaacatcactgcgcttccgtcgcacagagcctgacgaaggcttgggct

SEQ ID NO: 324956 - DNA, 122 bp, Homo sapiens
gagagctcacactccgtccagtccggcagctgcaggtccgccgggggaaggcacacagtgcggaccacgctgctctcctgggcacagcgggacgaatccgatttcagctgcagcagcgctgg

SEQ ID NO: 324957 - DNA, 122 bp, Homo sapiens
ggctcaggtgcgtgtcacggacggcacgttcctcggcaccccaaacccctcgcactgccacgctgtccgtctgcagctcccgtgctcaccctggtgatggtggtcttgagcagagtccacag

SEQ ID NO: 324958 - DNA, 122 bp, Homo sapiens
cacgcctctgcgcaggcgccttggcgggctgtggctgcggagttggcgggtcggcgcctgcgcactggagtcccccgcgattttttcctccggggtgggcgaggaggctgtgcggccttccc

SEQ ID NO: 324959 - DNA, 122 bp, Homo sapiens
caaagcctggcttttgcctcatagtgaattcccacaggagatagcatctctactatctctcggaagacagccattagcatgccaaccacaacactggcctttctttggaaacttccacactc

SEQ ID NO: 324960 - DNA, 122 bp, Homo sapiens
ctagatctttcctcgagaagatgacgccaatcaaagcaggtgcctgtctccgagcgtgtgcgtggaaagcaggtggagggtagccgggatcttgcttataacaaacccatcacacacggggg

SEQ ID NO: 324961 - DNA, 122 bp, Homo sapiens
ggatcagcgagaggggctcctggagctgtgagctctgctacttcaagtaccaggtcctggcgatcagcaccaagaacccactgcaggtgaggtgcaaggagaggactcggagattgggcgag

SEQ ID NO: 324962 - DNA, 122 bp, Homo sapiens
tgagtccttgggtgactgctctctctccttccaagatgaaaacacttcgagagagacaagcggcctcctcaccacgcctccacttccccatttcctggcctgtgcagattgcttaaaaaggg

SEQ ID NO: 324963 - DNA, 122 bp, Homo sapiens
agagggctgggggtaggtccagagggctgggggtagctccggaggagcgatcttcctccgcgggaaaggacttggctcaggcttgcctatgtccgtggtgctgaagtgcctcgcgcgccctc

SEQ ID NO: 324964 - DNA, 122 bp, Homo sapiens
ggtgaccccagtgagggtgcagccccatgaagaggtagaggctgtcactgtggctcactacggtgttcctggaccagttcaggcacttggtgaatgtttagtgaacaaatgagctgaaggaa

SEQ ID NO: 324965 - DNA, 122 bp, Homo sapiens
acggacggctggtacttacatgtgcacatgtgcagctactttacttaccgtcgaaggcagcggaggaagtgtaattgactagcgtggatgcagcttttctaagcaaacgctcgatttaacct

SEQ ID NO: 324966 - DNA, 122 bp, Homo sapiens
tctcttttttcaacgtattagagactcttgctgtgaaaggaacctgggaagcctctgccacgtgcacagctgtgtaaggagaaggatctctctatgttttcagggctgacctgcagcagaga

SEQ ID NO: 324967 - DNA, 122 bp, Homo sapiens
tcagtccctcccggagccgcaagaacacgacgtggttaggaagccaggtctgccacagctcgccgtcgcccaccggtccctcggcggccgccatcttggcccaactgctcccctcactccag

SEQ ID NO: 324968 - DNA, 122 bp, Homo sapiens
ccaggaggattgaaggagaccggtggggacggggcggggcgcagccttgcgaagccctaacgcagcgctggggaggggggcggccgaaaggggggcggtggtcgggccgcgcaagcggagat

SEQ ID NO: 324969 - DNA, 122 bp, Homo sapiens
gcaacctccctcggtcgctgggactaggcgggcgtgggaagagaaagagggagcgcgccccgagaagcactggacagtcagaagcggccagcactggagtgagcacaggcttttttcgctgt

SEQ ID NO: 324970 - DNA, 122 bp, Homo sapiens
gctgattggccaaggcggtccggggagggacggggctccccggccgggtcggggccagagcgaggattccgtgcccgcctcgcaccctggccagcctgctgagtccggtggttttgccaggt

SEQ ID NO: 324971 - DNA, 122 bp, Homo sapiens
ggggcgggggacgggacttaaataaaggcagacgctgtttttctacccatgtggcccacacgcgtctccgtttcagtggcggggctggcaaacgtcattccctagccccgcggccctttaaa

SEQ ID NO: 324972 - DNA, 122 bp, Homo sapiens
caggcccccttcattctgcagaacggtgccctgcctccctggtttcatggattcatcacccgcaagtaaggctgcttctacccacaggtccctcatagcccacagccccttggggctgagaa

SEQ ID NO: 324973 - DNA, 122 bp, Homo sapiens
ccacgtttccagcccaaggccagcaggaccgggtggcaaagggaagtcaaactgtgggtgcgtccggacggcggcgggcggccggaccctcacctggtagcgagtcgccaactccattcttc

SEQ ID NO: 324974 - DNA, 122 bp, Homo sapiens
ccagctgttgaaaaataacatgaacaaaaatggtggcacggagcccagtttccaagccagcggtctctctagtacaggctccgaagtacatcaggaggatatatgcagcaactcttcaagag

SEQ ID NO: 324975 - DNA, 122 bp, Homo sapiens
tcttaccccagattacaacatgaacaaaggaacggcctctcctttcactacctattctagcgctggggtttcaattcctgtcaacaatccctgataaattaatggtaccctttatatcaact

SEQ ID NO: 324976 - DNA, 122 bp, Homo sapiens
caatatcgaaacccacgaattccctagcgccagccctttgacttcctgcccaaaaatccgcgaggttttcgaggaatcacgcgaggactctcctcctggatcccaagcccaggttttttttt

SEQ ID NO: 324977 - DNA, 122 bp, Homo sapiens
aatcaaactgcttttagggcagccaatattttattattggaattcagacactgttcttaccgtgtttgtttttaatcaaatattacctaaaaatgtacaaattagtgaaatggttaaacttc

SEQ ID NO: 324978 - DNA, 122 bp, Homo sapiens
tgggcgtgtgaagcgctttgaagtaggacacagcaaatgccacaaatacattccctagcacgataatcagcatgcctgctgcacaggccaggtagatgaccaactggatgcccagagtatgt

SEQ ID NO: 324979 - DNA, 122 bp, Homo sapiens
gcgataacagaacaagggttttctcagaaacacttctgctagcaaacccagctgggggaacgccgcggtagagctccggatcaacgaatcaaaattatataacgcaggaaaaaagaaaagga

SEQ ID NO: 324980 - DNA, 122 bp, Homo sapiens
gctggaaagccgttaggtgacggggaatgcgttgaagaggtgcatctccccccccgaccccgggttaattctacctcggccagatgcctagagaaggtcaccgcagagtccacaatgacaca

SEQ ID NO: 324981 - DNA, 122 bp, Homo sapiens
gagcccaaagtgcttgggtcagggctcggtggagcgccgaggtgagtctgaactcccagccggcacgcgccgcccgccggaccaaacacgggagggggcggggccctagagtcgcggcgtgg

SEQ ID NO: 324982 - DNA, 122 bp, Homo sapiens
ttcctcagcccttgggtggtcgatgggagtggacaccgcggagcagggggtggtgctcatcggggaggctcggtcctcacaggagcccatggagtgggtgggaggctcaggcatagcgggct

SEQ ID NO: 324983 - DNA, 122 bp, Homo sapiens
agctgcatcccaggacttctgacaggtggtgttttcattttcattatctccaagtgttttcgaacttcatagtttacttcttctttggaaattttatttaattatttttttagatagagtct

SEQ ID NO: 324984 - DNA, 122 bp, Homo sapiens
tgatgaataagacagtgatcagcctggccaacagagtgaaaccctgtctgggattacacacgcctgggattacaggcgcctgccaccacaccgagctaatttttgtatttttagtagagatg

SEQ ID NO: 324985 - DNA, 122 bp, Homo sapiens
tcacctattgggccagccaggacctgaggcggagtgcagaagcgagggcctggagacagccgagagccgccttcaaggagggctgggggcggggctagaggaggggctgggggcgggtttcc

SEQ ID NO: 324986 - DNA, 122 bp, Homo sapiens
gttaccccatttcagtcatttcctgctgcaactaagtcagcaacacagtttctctgatgtcggcctcggctgtgcttcttctttgggggtgaagagagtggggaggcagtctccacccctgg

SEQ ID NO: 324987 - DNA, 122 bp, Homo sapiens
ttcaggacgtctcatagaggtgtgggtgagatcccaggtctgggccgcaatttctagccacgctgcccaaccttcaggcaagcagtcaggttccacagctaccccaccacactctcagagtc

SEQ ID NO: 324988 - DNA, 122 bp, Homo sapiens
aactaaagccattagacaaagagaaagctgaaggagaccctgccagtaaaactcacagggcggagaacacacgcaagtccacgagggctacaaccatacaaagctgctggggtaaatgaaaa

SEQ ID NO: 324989 - DNA, 122 bp, Homo sapiens
cggaaacctggagggtacttggagtttgggttcgcatcccctctccagctgcttagtggtcgcgtgactttggacgagtaatttaacttccctgagcattgctttccccacctgtaagatga

SEQ ID NO: 324990 - DNA, 122 bp, Homo sapiens
tacacctttaatgtagttagaatgcttttcactgaaagtaatagaatcctcaactcaaaacgccctgttaaacaataagggggtgggggagggattattatcaggtatctcaaaaagtacaa

SEQ ID NO: 324991 - DNA, 122 bp, Homo sapiens
cctgttttctttggcccagaatgaggatggtcagatctccatggcagtgaggaaggccggcgagcctccagtttctcagcagttctttggatctgaccagcaggctgagaaagcccagctta

SEQ ID NO: 324992 - DNA, 122 bp, Homo sapiens
aaaggatgagaagatcaggggcgaggcaggtggcactcacttggaggcaccagagagaagcggcagctgctgcctcctaagggcagggctgacccagaacgccctcctctacccacagcctc

SEQ ID NO: 324993 - DNA, 122 bp, Homo sapiens
ggatggaagggaggggtccggcacgctgctggcattttgctgtgtcctgcagcccctttccgggacacctgggttcacacagctttttagcttacataactggtgcagattttctgtgtgga

SEQ ID NO: 324994 - DNA, 122 bp, Homo sapiens
gagacaccgaagatggtttagggctccggcaggggaaccctagagctccctgtcccatcccgaactctcacaccccagaaaaactttaccgaagctaaaaaagttggcgacattttcctttt

SEQ ID NO: 324995 - DNA, 122 bp, Homo sapiens
tgacagccaccctcaggggccaaggcccacggggagagtgagaccctcctgagggctcaccgtccacagggtgacactctgtagtgcagcaccgtcgacccagacccctattatatacagca

SEQ ID NO: 324996 - DNA, 122 bp, Homo sapiens
acatatagcactgccttcaacctagaaagtctttcatgtttattggcatatattctctttcgcatacctagaaagaccaccatgctgaactatgttcccatagattagctctgcatgttctg

SEQ ID NO: 324997 - DNA, 122 bp, Homo sapiens
acagaggtctcagcatagtcactcttcacatagtgccttacccatgggtatcgtcatatccgggtcccagttcagtttgtctgcacagcagccaccctgcctggcaacagagaccccaagac

SEQ ID NO: 324998 - DNA, 122 bp, Homo sapiens
gataggtgatgttccaagagcgtgagagcaggtacgcgatgtcttccacagcttcctgctcgattagaccgtcccccgcggtgaccagtgagttgacaatcagctcagctgccttggagtcg

SEQ ID NO: 324999 - DNA, 122 bp, Homo sapiens
ctcaggtcatgtcatttcttcacttgcaatggttgggttttggtctaccattttgctatacgttttcaatttgtctcatatctttttgtttctgttcctcctttactactttcttatgtgtc

SEQ ID NO: 325000 - DNA, 122 bp, Homo sapiens
aaaacaaacctggagccacaccgcgcacatgcgcagaaagcccaaagcggctcccgcgaccggggccaaaaagtgcacactacatttcccacaagtcctcgcgccgctcccttagaaagtac

SEQ ID NO: 325001 - DNA, 122 bp, Homo sapiens
gccatccccgtcctcagccggtggcccggtccccttagggactgccttatgagttgcactcgctgatggaaatctcgggatgcagtcagaaggcccccggggctgtcgtccggaagcctctg

SEQ ID NO: 325002 - DNA, 122 bp, Homo sapiens
caatgaaccaatgatgtacccctaggcaatttacctaacctcggcttgccagtttcctcccgcgtgaaacaggacaataaacgattatgcctcttagggttgtgctgaggaatacatgtgta

SEQ ID NO: 325003 - DNA, 122 bp, Homo sapiens
gagtctcagttttctcatctaggaagtacactacttcatttgttcattaattcattcagtcgtttcattgtctaccacgtgctaggctatacagaggtgcaggcacaaggattaaccaggaa

SEQ ID NO: 325004 - DNA, 122 bp, Homo sapiens
cgcgggaacttgggaacgggagcctggtagggaggacaaatctctcgaaatctcagttggcgctggagctggaggggcagttgaagctcctgaagggcggggcacggagcttgaaggggcgg

SEQ ID NO: 325005 - DNA, 122 bp, Homo sapiens
cattccagcttcttgcactaggcatttcaagaaagaaaagcattcctggaaatccccaatcggtcacaggcatgtttctccaaccaataggaatagagaatgaggcagcatcacttgtctcc

SEQ ID NO: 325006 - DNA, 122 bp, Homo sapiens
tacacctgcctcagtctcccaaagtgctgagattacaggccatgagccacagtgcctagccgacctggcccatttcaagatttgcccataaacttttgtctagctctagctccttgtcagaa

SEQ ID NO: 325007 - DNA, 122 bp, Homo sapiens
gcggcgggttgaggcaatgcaggtggtaggaggaggggcaggcgtcgcagcagagcagctcgcccccgtccttgcacacgcggcagaactccatgtggtcgtcctcctcctcctcgcagccg

SEQ ID NO: 325008 - DNA, 122 bp, Homo sapiens
acaaatcaagcccggatttatgcaagtccatcatactttctgctcttagagtacacactccgttttcagggcctcaggtctccgggaaaagtatgtagctcaggtgtccttctctcaacagt

SEQ ID NO: 325009 - DNA, 122 bp, Homo sapiens
tgcagaaatggcatcatgaatatgggggatcgctctcccaagaggttttctgagggatttcgtgggcagccggcttcccacctgcacacattaacggcggcgtctcttcctcactgcagcct

SEQ ID NO: 325010 - DNA, 122 bp, Homo sapiens
caagtaaacagggcaggttagaggcggggccaaggaggcgtcgcgacctggttggccggccggggcctgggggatgtcacggattggtcgcggccgcgagcgcagtggtgtggagcgcgccg

SEQ ID NO: 325011 - DNA, 122 bp, Homo sapiens
aagtttccttagttaaaatcatttaatttacatgtgcttctaattgaatgtaaaatatggcgtattggataggtcttttacaaaatgtcattgtaatgatatttgttattataagcatggtt

SEQ ID NO: 325012 - DNA, 122 bp, Homo sapiens
gacggaaacagatccctctatttgtaggtttgtcggtatcctctttctaatgctggccttcgattaccagtcagtggcttgcagtctattccgttaataactattgaaagctcagaattgat

SEQ ID NO: 325013 - DNA, 122 bp, Homo sapiens
gaagcggaagtgccggtggagcgcgagtaggaagtggtgagttcggagtagagatggccgcgcttgcaccgctgcccccgctccccgcacagttcaagagcatacagcatcatctgaggacg

SEQ ID NO: 325014 - DNA, 122 bp, Homo sapiens
cccattttgacactgaagaggttttttgaaatgtggaaggcatgttacgttgttgatgagcgtgcgtaagcaggaaaacctcagcagcccctgggaggcgccctcagcccaagggacagccc

SEQ ID NO: 325015 - DNA, 122 bp, Homo sapiens
tgtctgtgtcaccggggctggtgggccgcactggggtccccgcagcatacgccttcctcacgttgtcactctggactgcttggccagcaaactggactagaaataggagcctattgtgtgta

SEQ ID NO: 325016 - DNA, 122 bp, Homo sapiens
ggggtccggagtcgatggggctgacattctaatcctcgggggtttcccactattacaaagcgaggctggtgtggatcccgctttgtgctctgtggaccgtccgcgggagattcctaagaaac

SEQ ID NO: 325017 - DNA, 122 bp, Homo sapiens
aacgatgcgccccggggccgcggcctcattggatgagaggtcccacctcacggcccgaggcggggcttctttgcgcttaaaagccgagccgggccaatgttcaaatgcgcagctcttagtcg

SEQ ID NO: 325018 - DNA, 122 bp, Homo sapiens
ccgccgcagaaaggagtccgccgccttcgcggcccagggctcggccccggctctggcccgcgcccccgccccccggcgctaaaaaaggagtgcctccgacccctcgtccccagcgctccgca

SEQ ID NO: 325019 - DNA, 122 bp, Homo sapiens
ctatgttgctttgggtccctgtaattcaaccaggtaaagttgtcctacaggcagatgctacgcaaagtcactgtaggaccttgaacacattaaaaaaaaaatctttggccgggcacggcggc

SEQ ID NO: 325020 - DNA, 122 bp, Homo sapiens
gcaagacttgccgatttttgaatgaaggcctaaatgacatgtgctttggtttcaggcactcgcgggtgagataagtccatttctgtgcagcggcagtcaccaggtgcagcgggactgccagc

SEQ ID NO: 325021 - DNA, 122 bp, Homo sapiens
tcttccccctcactttttatcgggtttcggagcctcgaaactcgagtccctgccgaaatgcgctcactccgagaccacgagccccctccttccccggcgtgctcaccccctggctccgggcc

SEQ ID NO: 325022 - DNA, 122 bp, Homo sapiens
aggggagaatagaaaccccgtgccatggaatgtcaaatgtggttgagaatgccacagccacgcttgtgggagagatgactcggtgaacgacagctctctgagcgtatttgaagggccacccg

SEQ ID NO: 325023 - DNA, 122 bp, Homo sapiens
gggttgccggcgtagctgtggttaccgtgacttgggtgtggctcttgggcggaaagcccccgggcccaaggctgggacggagaggggcagcaggggcagtgaaagagctgctggggattggg

SEQ ID NO: 325024 - DNA, 122 bp, Homo sapiens
caaccttaagtttggaaactatcgtttgccaagcgaagggttcccattattcctggctggcggtccatctccttgcccgtctctcggggagtgattcggtccgggacaccaggactctgctt

SEQ ID NO: 325025 - DNA, 122 bp, Homo sapiens
ttcaggagaaacagttgcattaatgccgtttttccctaaatgtgcgcttcgggaaaataacgagcccctcaagatgccccacaaacgacggtcccctggtccgaggagccgggcagcgccgc

SEQ ID NO: 325026 - DNA, 122 bp, Homo sapiens
ctcagctggtaagggacacagttgaggttcaaatcagaaagtctatttccagagcccacacgccggactccccagggccatttgttccttttacttattaacacatcaatatgcttttttct

SEQ ID NO: 325027 - DNA, 122 bp, Homo sapiens
ggtccttggtgttctctccattcagctagtagattacaagagagagaacacctgggaaatcgtgaaggtatttttgtgggccagttctagccgaggtgtgcatcacttctttgtatgctatt

SEQ ID NO: 325028 - DNA, 122 bp, Homo sapiens
cccaggactccccgccgttacctcccgctagctcagggcgaggtcctggctcctccctggcgtttgggccgtcactttcccaggtccgagagtgtcgacgctccttttgtcgaccgaggatg

SEQ ID NO: 325029 - DNA, 122 bp, Homo sapiens
gggtgctgcgggggagcaggaacagaggcggggagaggtaggggctggaggaaacggacacgctgtctctggtcccaggcagaagactgacagccagaggacaggggggacagggagacaga

SEQ ID NO: 325030 - DNA, 122 bp, Homo sapiens
cccagcccagccaagctcaggtccctgcatacagcaggcgcctaattgatgcttatagcacgaatgactgaatgaataccccgttcccacaggctgtcctgggatggtcctaatttcacaga

SEQ ID NO: 325031 - DNA, 122 bp, Homo sapiens
atcaactttttcagcagtcctccgattcccgactagaaggcaaaagcctggcccaggccacgggaggcacttcactaaagaagaaaaacctgagctccagcaagctcagtaacttcatcagt

SEQ ID NO: 325032 - DNA, 122 bp, Homo sapiens
aaatggggataataatactacctaccttatgggattgcggtaagactgataatgctggtacgagtgacagcttccctcatggaaggcccaccacgtaaagcagtttacagccatctcattcc

SEQ ID NO: 325033 - DNA, 122 bp, Homo sapiens
tgaaataaggaagggtctttgaaagatgatcccgtcttccaaaaaaggttgtcagattcccgaactgggatagttggccaagagtcttcaagaagtggaaatcttaagataaacagaaggga

SEQ ID NO: 325034 - DNA, 122 bp, Homo sapiens
cccattggctgaggcaacgttctaaattccacgagggcacgcccacctccgcgcgcggtacgcgctgttgtagtttccacttcaccgaaaaaaatctgcctggcgactgagcatgcccagtt

SEQ ID NO: 325035 - DNA, 122 bp, Homo sapiens
tgtctgcaacgagtccggggtgctgggctcagccagaacctccagtggacagtgggaccccgcgtgctgggggcccgcctgcaagaggtgcccggcccacaggtcgtcctcgctcagggaag

SEQ ID NO: 325036 - DNA, 122 bp, Homo sapiens
aggctttccacacagccctttcagcagcctctcaaattattacgctgctttaggatttgacggtgaccatggacaacgcaacgtcaggtgggcttttacagactatagactggcgatcttaa

SEQ ID NO: 325037 - DNA, 122 bp, Homo sapiens
cctggcaagtaacaaggttattgctatttggccttacacccacgggttgtcccccagtaccgtgagggtaaggggactctgtaaggtccctgggaggggaaaggaatgtcaattagtggtcc

SEQ ID NO: 325038 - DNA, 122 bp, Homo sapiens
gcgcggcgcagggagccggggcgcagctctgccggggctgcgggcgggaccggtgcgcggcgcctctaggtctgccctcaaggagtcaccctctctggactgaactctgaactccagctttt

SEQ ID NO: 325039 - DNA, 122 bp, Homo sapiens
gaattctttttgtgaacaggaaatctagaaggtacaacttaaaaactggactgtttttcacgtttgttgcctacatttaacttggcaatggccactttgaaagttagggacctcttcttaag

SEQ ID NO: 325040 - DNA, 122 bp, Homo sapiens
cgtcacgaccgtttccttaacccaataacaccttgttattcagcccgggccacagagtagcgcgtacccggtgcttactgtttaaggaggacgattggcgtctggggagctgctttcccatt

SEQ ID NO: 325041 - DNA, 122 bp, Homo sapiens
ttgcctccctcactgtgtcaatgacaagtgagaatagaaacatcaagccacatcaccatgcggacatcaggaatgagaaggccattgtctttgaccttctctgcatagcacactttgctaac

SEQ ID NO: 325042 - DNA, 122 bp, Homo sapiens
caagaagcctgcttgcttctcatgtgaaatgaatgagcacctggggaaccccagttgtcccggttgcccccgctcctggggtctgcaggcccaccttaggatggaagtggagcgcagcaacc

SEQ ID NO: 325043 - DNA, 122 bp, Homo sapiens
cccatctctccctgctcttcacagagaattccgtctaccaggaacggcaggaatgctatgcgttcaatgggactcagcgcgttgtggacgggctcatctacaaccgggaggaatacgtgcat

SEQ ID NO: 325044 - DNA, 122 bp, Homo sapiens
gtaactcctctaactccacctccatatataagaggccaaggaagtggccaaggaattagccgtaggggttcctggtttccctatcagggccctctctcagcttcaacaccttgttacctggc

SEQ ID NO: 325045 - DNA, 122 bp, Homo sapiens
ggccccgcgctcggcccgggagccgatccgctgtgagggctcctccatctcctcccaccccgtgacctgctcgacgcgcaacagcccgagttgtctttaacttgctgcggcagcctctttgt

SEQ ID NO: 325046 - DNA, 122 bp, Homo sapiens
acgtcccaccgactccggggacagaaaggccgtttatgtaaaacgacgtttttcctatttcgcctcccaccctcatgcaaattttgattttcaactcttccaacccttccgcaccctgaaac

SEQ ID NO: 325047 - DNA, 122 bp, Homo sapiens
tatttaatctgccatctcaggacctccgctggggagctggggcaggtgggtgggtggtcccgctgggcttccgtggtgcatgccagggacctcagaatggagcgccccactgagccagcggc

SEQ ID NO: 325048 - DNA, 122 bp, Homo sapiens
atcatggctctgatcatctcgaatgtgagggtggccgggatccaggcccaagggtccccacgcctgttgtgggtagggggtgattgagtgggcggaggtggagcctatgcttctgctgggag

SEQ ID NO: 325049 - DNA, 122 bp, Homo sapiens
tgagcgcaaatggaagcacaaggccgggctggccgtgggctcagtaaccagtcggctgcccggcttgcgccagcactaaatgctcgatcagaaagagaaaaagaggcgcaataattccaaat

SEQ ID NO: 325050 - DNA, 122 bp, Homo sapiens
gcgcagagagggggaggggccgagcccggcgcggcggcgctcccctcccccgcgggcccgcgctccccgcggccgcattgtactgatcttccgccccccgccccgccccgcccggctcctcc

SEQ ID NO: 325051 - DNA, 122 bp, Homo sapiens
ggggtcgcgtcagtgcggagacagcggtgtcctgcgcgtcttcgggtcagtacggggggccgcgtcgtagggactcactggcggtgcgcgacctgggctggctccgggggtggcgggcgcag

SEQ ID NO: 325052 - DNA, 122 bp, Homo sapiens
aatacgacgacgaggagtttgagtatcggttagtgctggcgcgggagcaatagcgagggtcgtgagctttggccgctgagggcacaaggaattagtaacaggaactgaggcgatagaattgg

SEQ ID NO: 325053 - DNA, 122 bp, Homo sapiens
aatgtgctatcaaacactataaaataaaaacaccttcagagtattcacaatttacatatgcgctgtaagttttacttgcacctaaatgccaggtattgtagtaggagtacaaactggaacgc

SEQ ID NO: 325054 - DNA, 122 bp, Homo sapiens
ccgcctctgtgccaggctcttggtgaatccaatgaggcatgtttgctttacacatgaaaccgaaggcctggccaggtgaagggctgttgcccagccagccctgaacccaatctggccccaga

SEQ ID NO: 325055 - DNA, 122 bp, Homo sapiens
atgagaggagagaggcttgttgatcgcagccaatggctgcggcaggagaggaattagcagcggaaactccaggttcggttcaagaaagatgacacagagcctgtcgggcccgcgcactcttg

SEQ ID NO: 325056 - DNA, 122 bp, Homo sapiens
ttccagaggcgagcagccatgggactgtcatctgcaaagcatcccatcccaacaaggccacggacaacacagaccccactggagtgccagggaagatggagaaagaacccccgcctcagtaa

SEQ ID NO: 325057 - DNA, 122 bp, Homo sapiens
ggggcccctcctgggctttcacctgcgtctccgggcatttgtctacgcagccgccctccccggggcccctcctgggctttcacctgcgtctctgggcgtttgtctactcggccaccctcccc

SEQ ID NO: 325058 - DNA, 122 bp, Homo sapiens
gaaatcccgcaagtgagcgagacacatgggggaagtggtccgacctatgcccttactctccgcatctggtccagcgcagtgagcatctgttccagctgctgcatcttctgcctggtcactga

SEQ ID NO: 325059 - DNA, 122 bp, Homo sapiens
ctgaccacagtggccgagaagtcgcgcgtgctgcagctggaggaggagctcaccctgcgccgaggtgaaatcgaggagctccagcagtgcctgttgcactcgggtcccccacctccggacca

SEQ ID NO: 325060 - DNA, 122 bp, Homo sapiens
cccgcaaatgacagactcgcctcaccaacacctaagcatgttcccaaaagctctgctccacggcctggccattgaacgccagacagacagccagaggaaaaacaacccagtttggaaggcaa

SEQ ID NO: 325061 - DNA, 122 bp, Homo sapiens
gagacggtttcgtcatgtcagccaggctggtctcgaactcctggcctcaggtgatctgtccgcctcagcctcccagagtggtgggatttcagacatgagccaccgcgcctggccaacgcccg

SEQ ID NO: 325062 - DNA, 122 bp, Homo sapiens
ctctgtcccttattggctgggtcagggggcgtggcgcggcttgaccaatcgcgggcggcgcgcttaggcacgtgtgtggacaggcctgagaatcagagaaaccttctctggggctgcaagga

SEQ ID NO: 325063 - DNA, 122 bp, Homo sapiens
ctgtgagattagaacaaaatttaaataagcatcacctgaaaggtcttggcgttgtggaggcgtctttaagtgtgaggaggcagcaccacctgcacgctgtttgtgatgaccgtcgtcgtaaa

SEQ ID NO: 325064 - DNA, 122 bp, Homo sapiens
ggagccaccgcggccgaacgtagctgccctggttttagaaagagctgcgggctgcgggcccggctgtccccgagacctctgcctcccgcacggcccagccagatctctcgggggttgttggg

SEQ ID NO: 325065 - DNA, 122 bp, Homo sapiens
cgccgtccgagccggcagcctgctacttacctcctgacaactgcatggagtaaaccacaccgccttgttaaatgccgtcgccgccgccgccgtcttcgtcaccgtcacagtcgccgccgcca

SEQ ID NO: 325066 - DNA, 122 bp, Homo sapiens
ggatgtgccaggaccccacgaacagacgcagagccagccccatggccaggccccaccgggcgcccatgccctgatcccgtcgtttgttggcctcctgctttggtttgagcccttcatccctt

SEQ ID NO: 325067 - DNA, 122 bp, Homo sapiens
tttcaagtcttaacttcaattctgggccttcttgctgctttgaggtgcccccagtgggcgcgacacgcatgtgggtgtgaaccagggatgccaggatccccgaggtcccatgctgggtctgt

SEQ ID NO: 325068 - DNA, 122 bp, Homo sapiens
tagcaaagaaccgtgagcctcccgtttttacgccctaggggctcacgctcttggaaacgacgaaagcgttgcctgtttgtcaagaaaactaaggaaaaacagagaagaaagctaagacgctc

SEQ ID NO: 325069 - DNA, 122 bp, Homo sapiens
gaaaactgtgcaagaactaagagaaggtcaaaggaaaagaagcgatggacattgtaggttcgaagcacaccaggcaccttccaggagaggagaaagttcaggaatgtggccctccctgcact

SEQ ID NO: 325070 - DNA, 122 bp, Homo sapiens
tgcaggccagctggagttccgggtgggcgtggccttgttgggccctgcactccgagcagccggccggccctgccggccccgggcaatgaggggcttagcacccgggccagcggctgcggagg

SEQ ID NO: 325071 - DNA, 122 bp, Homo sapiens
tcttcccgccaaagagggaggccagcaagcacagcacctgcagggacgcggtttcaacatcgttagcgacaccacccagtaaaagcagacgaaacgtgcatccgcacacgtatcctaacagc

SEQ ID NO: 325072 - DNA, 122 bp, Homo sapiens
actgagcaatacccagagaggatggaaatggcgaagaggcctggcgcctgcccgctcccgcgcatgctccctgacttcaccaaggtcacgctgcagcccgcaggaatgaaaatccacttctc

SEQ ID NO: 325073 - DNA, 122 bp, Homo sapiens
ttgtctcctagaccctaaccttccagcatttctaccaggctcctagaatgacctttaattcggatcatttggaggggtttgttccaaacaggttccttgaatctttcccaatctgtaaacac

SEQ ID NO: 325074 - DNA, 122 bp, Homo sapiens
ccttttgttgtggtcactgccccgttgatccacacacgtcacgaatcagtgacagagactcgctgtggaaaccggagtgcgctggcctgcctgctaccctccggtgtttgtgactttttacc

SEQ ID NO: 325075 - DNA, 122 bp, Homo sapiens
ctgaatgcttgtcgcctgctgatgctttgtcttttgggttacagttagagtcacctcctccgagaagccctccctgactagccaggtaaatgcctcagagcaccctccagccatggatacaa

SEQ ID NO: 325076 - DNA, 122 bp, Homo sapiens
ccttgtcagtgctggccctggctccccttccctaccacgtgctcccagggctgctacaagcgagctgccctcacagctgcgggaacgtggcctcggctcccacgctgtgccccatcccctgc

SEQ ID NO: 325077 - DNA, 122 bp, Homo sapiens
tgaggggcttagcacccgggccagcagctgcggagggtgcaccaggtcccccagcagagccggcccgctggcactgcgctcaaattctcgcagggtctcagctgcctccctgtggggcaggg

SEQ ID NO: 325078 - DNA, 122 bp, Homo sapiens
acggcactacaaacatgaccaaagccgcacggggcccaggatgcccggggctactggcttcgggtgccagcgtcacttgtactcggtcaacacacgtgcacagagcacctactgtgagccag

SEQ ID NO: 325079 - DNA, 122 bp, Homo sapiens
caggtaggtgaaggtgcagacgatgagggacagagtccgcacgttctgcctcttcatggccgccagcaaggagccggcgcggggggcatgtcccgcaggctcacagccgcgcgcgtcccact

SEQ ID NO: 325080 - DNA, 122 bp, Homo sapiens
ttgctctagcatctagattctcgtgggtcaacaaagtcactggaaacccaacgaacttcccgacatttttcgaaaaccgtatgcgtgtgcttctgtgcgtttttcctctgatcgaggtaggg

SEQ ID NO: 325081 - DNA, 122 bp, Homo sapiens
tgagaaaacacggcttctcagtgtggtgaccaagttcttctgtggcaacagacaggctgccggttcacacttgtagtaacccagctctggttcggctcggcatcccctctccagaagcagtt

SEQ ID NO: 325082 - DNA, 122 bp, Homo sapiens
ggagatttgaagcataagagaattttcctgctggtcttaaagacacaaagtccacaagatcgacagctgcagggaaacaaattctgccaatgaccccatgagcttggaagagggtcctaagc

SEQ ID NO: 325083 - DNA, 122 bp, Homo sapiens
aggaaggggcagcgtgcgcgaaggctttcaggggcggggcccagcaaatcgaggcctcggcggagtcctgcccacagggacatcagtgccgcccccgcgctgactccttcccggcgaggact

SEQ ID NO: 325084 - DNA, 122 bp, Homo sapiens
cgagcacattaggtgtgctttgagcagtgaaagggacagtgagaggagcagtgagagggacgaaaccatccagaggacatgcagtgagggtgctccagctgacccaagtgtgggtgccctag

SEQ ID NO: 325085 - DNA, 122 bp, Homo sapiens
gggcctgtgggaggagctgctggatgacgaacaaccagccattacggtcatggactggtgcgtgcccctcccctgccagcctgaccccgtgatcgcgcagggctgcccagagcatgagcctt

SEQ ID NO: 325086 - DNA, 122 bp, Homo sapiens
gattgaattcctagtatgaattgtgtgagagctttaataaaaatatctttgcagttcttacgggttttgataagctgacattgcacgtgctcaagaaaatgaaggtgataatttacagcaca

SEQ ID NO: 325087 - DNA, 122 bp, Homo sapiens
aacctggctgcccctgccttcccagcttctctgcttaaggtgtggcagccgggccagaaacggttcagaggtgatgctggagagacggggaaggttcggagcccggaaggatctgagagcac

SEQ ID NO: 325088 - DNA, 122 bp, Homo sapiens
ggaaacggaatttggggcttactttagaacagggactggatcttaccatctacatggaaacgggaagcaagaaggacatcctctgttagagacctcatcatatcaaacacagcatccccaag

SEQ ID NO: 325089 - DNA, 122 bp, Homo sapiens
cctctttgaactctgccagagactattctgcatttgaggcctggcgatgctgggcaggggcgggtatgggtgaagcacagggtgggccgcggctggcgggtttggtgcagaaacgggctgtg

SEQ ID NO: 325090 - DNA, 122 bp, Homo sapiens
aattaatggagaataatagagactgaaagcattgggtgtgagggatgatggtggaaaagacggttgctatacaggtggatctcattaaaaagatgacttggagcaaatatttaaaggaagta

SEQ ID NO: 325091 - DNA, 122 bp, Homo sapiens
cagctgattcttatctcattaatgcccgtaagcccgtggggcagattccacaggaggctacggaggcaggaagccctcccggcagcaggggcggccagtgctgcagaactcggaggcgaggg

SEQ ID NO: 325092 - DNA, 122 bp, Homo sapiens
tggtccccgccgccggcgcgctgctgtgggtcctgctgctgaatctgggtccccgggcggcgggggcccaaggcctgacccagactccgaccgaaatgcagcgggtcagtttacgctttggg

SEQ ID NO: 325093 - DNA, 122 bp, Homo sapiens
accacagctgagaaatgccttctataaatatgaactttctgtaatatcaagacagataaacggcagggagatggttttgatacattggttggcaaatgttatttctagaattggctttttat

SEQ ID NO: 325094 - DNA, 122 bp, Homo sapiens
gctgtgacttggagaatcaaagaaacttaagtccctgagaggtacaatgcagtacccacccgaagtgctgtcatccctacagtcttggatactgactccagtggcctctggctgtcgcctcc

SEQ ID NO: 325095 - DNA, 122 bp, Homo sapiens
atggcaaggattacatcgccctgaacgaggacctgcactcctggaccgccgcgaacacagcggctcagatctcccagcacaagtgggaagcggacaaatactcagagcaggtcagggcctac

SEQ ID NO: 325096 - DNA, 122 bp, Homo sapiens
ccagacctcctgaatccagagactcttgttttaataagctcaccagatgataccaatgtccgctgacgtttgagaaccactgcttttccggggcggtggtggtgggtggcggggggtgttgg

SEQ ID NO: 325097 - DNA, 122 bp, Homo sapiens
gcattcctcagcccttgggtggtcgttgggactgggcgccgtggagcagggggtggcgctcgtcggggaggctcgggccgcacaggagcccacggagggggtgggaggctcaggcatggcgg

SEQ ID NO: 325098 - DNA, 122 bp, Homo sapiens
agaggcacgaggtgacatccgaggcagggagcacatccagggccacgaaggatggcattgcggagagaccgggcgccgtgtgctctccaccctcagagccacccccagaccctgctcgccct

SEQ ID NO: 325099 - DNA, 122 bp, Homo sapiens
ggcatgaaagccagggccgaacccgagaaagcagaagtgcacgagttcgaagtggccactcggccagcactccacagagctgacccatccaaagaggggaaagacctgcctgggagagaccc

SEQ ID NO: 325100 - DNA, 122 bp, Homo sapiens
tcacactaactaccagagttagtgcagactccacagatcaagggctgagtcccacaagaccgcccctatttcagacaccagcttcaaatggagggccctagctactcacactcctgcctggc

SEQ ID NO: 325101 - DNA, 122 bp, Homo sapiens
attctgggaactgtagtttcggcgacgctccaggccacgtggaggaagcgcccggtctggcgcatgcgctctccagcgcgctctccaggagctttggctcggtgggtactgtcgcggaggct

SEQ ID NO: 325102 - DNA, 122 bp, Homo sapiens
ttagcgccacctactgaccacttgctcaacagcggccacgttcagcaaccacggtgatctcgacagacacgaaaatgttctgtgctctcaacgagaagttctgcatgtattcttcccttctc

SEQ ID NO: 325103 - DNA, 122 bp, Homo sapiens
gactctttctgcagaaccagcccggtggtgggcccgcggccgccaaggcgtccttctcctcgaggctgggcagccttgtccgcggcatcacagccctcacctccaagcacgtaggtgcccgc

SEQ ID NO: 325104 - DNA, 122 bp, Homo sapiens
ctcaggccatcttctcaccctgcacccagacttgtgactcctctggataaaggacaaagtcgatttgctttccttgcttttaaaccatagctgctaaattgagggaagtcaaatgatctggt

SEQ ID NO: 325105 - DNA, 122 bp, Homo sapiens
cctgtgctcctccagtcacccctggtgacttcctgttttgatttcactttctgggtgggccgtaccctttgagatgacagacaggagtcccagcagctgctggttcaaggatgctgcatctt

SEQ ID NO: 325106 - DNA, 122 bp, Homo sapiens
gggaggagaggaggtgaggccagcagcttgtgaacacacgggcgggctcactgttggcagcggggaggaggctcctgggctgggctgagcccagccaccctcaccccaggggcccaccaccc

SEQ ID NO: 325107 - DNA, 122 bp, Homo sapiens
ggtggagccagaggcacccggtacagatacgtgtcccaagcacagcccaggggaaagccacgccaggacacggccaagagtccccaccgcaccaagttcaccctgtccctcgacgtccccac

SEQ ID NO: 325108 - DNA, 122 bp, Homo sapiens
ggaggcgcgtactctggagactcggtcccactctcacccttgctgtggctcgatgaccttcgctggacggtcacccggggccagcccatgctggccaggggcagtgctgggggaggctggag

SEQ ID NO: 325109 - DNA, 122 bp, Homo sapiens
tcccaggccggcaggggcggatcctaggtgcgtctgcttggctctgggccttgttggagccggggcggagcagcccctcctccgagtcccagcgagtgaccacgccatgggcacagctgctg

SEQ ID NO: 325110 - DNA, 122 bp, Homo sapiens
gatgaatgattaacaaagaccacaaattcagagggagcatgcaggactgaacagaaatggcgaaaggcggtaggagagaggctgctgcagtgccccatggtgaaggcagtgggagagtgatc

SEQ ID NO: 325111 - DNA, 122 bp, Homo sapiens
aacaagcaaggtaacttctcttaaaaaagatacttgtgttatgaattctttaatagttttcgaagctttctggcttctgatattctgcaaaaggcaaaacatttccagcctaagatatgact

SEQ ID NO: 325112 - DNA, 122 bp, Homo sapiens
ggctctgggcccagacagtctgcacctggtggtgtggctgtggactctgacagagcgctccgagtcttttcctgggtctagcacgttgctggctgggtgaacaccacacagggggctgctta

SEQ ID NO: 325113 - DNA, 122 bp, Homo sapiens
agaagtgcagcggacactctgccggatccggagaggtggaaattagcggcgggtctgcaacggaggcaatcagcagtggtggactgtgagtgaaagctcagctcaagccggaacaaacacag

SEQ ID NO: 325114 - DNA, 122 bp, Homo sapiens
ctgtccatgcatctcgtaaatacagtaagcatggcaagccctttcgctggttaaccccggcgtccgtgtgctcactgccgccctgcacgcacgaggtcgcggatggttcaaagcacccgcgg

SEQ ID NO: 325115 - DNA, 122 bp, Homo sapiens
cagccacctgctagaacaccgcacttccgcctccctcgccaccaccccggaagcgctcgccgccgaccaggaagaagaacccgcctcgcagcgtcctcttctggcaccccagggtggccttg

SEQ ID NO: 325116 - DNA, 122 bp, Homo sapiens
ggggggtggcaggagacggggacgggaccctccagggacacaggaaacacacaccaagcacggagaggccaggcgggccggtgtggacagggggccggtgtggacacggggccagtgtagat

SEQ ID NO: 325117 - DNA, 122 bp, Homo sapiens
cccagatattgcaccaaagcactctatttctgggttgagtctatgaaaaatttgtaaccacgattgtacatcttgatttcattatgaactgggatgatgataatcatgatgatgataatgat

SEQ ID NO: 325118 - DNA, 122 bp, Homo sapiens
caaagtttgaatggctgacatctgtctaaaatgccattgttttaaaaagtgaattgtgcacgagttgtgcaaagcttggaaacctattgtcatacatttagaccctcatttagaaataggaa

SEQ ID NO: 325119 - DNA, 122 bp, Homo sapiens
ccagctttgttggatgtaattgactgaacatgaactgctcatatttaaaccatgcctggccgaaattgcatgttttgacatacaggtatatcattaaaacatgaccataatcaagacaatta

SEQ ID NO: 325120 - DNA, 122 bp, Homo sapiens
ttgtcaataaagactcgcaggcagtggctagagcacattttgatttttgtttttcctctgcgggctctctgcttcctccgcgccccgcgtccccggcgggcgggagcgccacggtgcgttta

SEQ ID NO: 325121 - DNA, 122 bp, Homo sapiens
gtttgggtgacggaaggggcgtgtcgcagcgcccaaagatgacgtgttctgccagcgccacgtcatgaggaagtgccggcccactgaagccgtggggacgcgcccagcggagctaatcaggt

SEQ ID NO: 325122 - DNA, 122 bp, Homo sapiens
agctgcctttcccttcttggcccacatctaccaactggaaaagaaaacagaaaatgaaaccgctggaaaggcatctttcctggagagtctgctaatctttgtggagaaccacacaggaagca

SEQ ID NO: 325123 - DNA, 122 bp, Homo sapiens
tccaccttcacagtcccactatgtattgctcttcctccagtcccttgataccttcctcttcgcccaacctaccagcccctcctggcttcacctacttccctcccagctacatctactgcttg

SEQ ID NO: 325124 - DNA, 122 bp, Homo sapiens
gaaagagtaacttcccagcagaggacctgacgacctgagccaggcaatcgaggtcagcaccgatggcgaccaggcgtgtagactcgtgccctgggtaaggcgtgaccgggatggcactttac

SEQ ID NO: 325125 - DNA, 122 bp, Homo sapiens
aaacgaaagttccacaagggcgaaacaagaaaacaaatttaacaccccccaaagaaagtacgaagagtaacctcaaaagaaccgcaggggaaaacaattcaaaatttacaagtatctaccct

SEQ ID NO: 325126 - DNA, 122 bp, Homo sapiens
agccgaccagtgagcaggaagatgctcagttctgctttgaactgcggccaagaggccaagcggtaatttcatctctcctccagttcttgccgcaggaaaactgacaataaggaaaaaacaga

SEQ ID NO: 325127 - DNA, 122 bp, Homo sapiens
tggctggaaccagggcagctgcccaatacccacccccattgctggggccgtctcctgggacgccaccttctgcctgttacagctctacctgcaaaccacactggggtcagggtccggccaca

SEQ ID NO: 325128 - DNA, 122 bp, Homo sapiens
atttactagaaaaatattactagtcactgtcattttatagataacccagaaagatgtgatcggatatacgaataaagtttgttttaattacctccaaggtattcctggtatctattgaaact

SEQ ID NO: 325129 - DNA, 122 bp, Homo sapiens
tgcgtgttgtaattcaggcgccgaccgcggacgctccagaggtggggtttggttcgaccccgccccttcatgctcgcttcttaaagggcccgggttcgatgattgaatttaccttggttccc

SEQ ID NO: 325130 - DNA, 122 bp, Homo sapiens
gctctgcattgtaggatgtcgagcagcatcccaatttctactttgtggatgccagtagcacgctgctgcaccccagctgtgacagctgaaaatatctccaaatgttgccaaatggctcctcg

SEQ ID NO: 325131 - DNA, 122 bp, Homo sapiens
accccccactccccaccggacaccgggggcgagggccgccacgtgtcaggctgaggatggcgggacagagcccccagtctccctgtgagcagtgtgtggggccaaacaacctgggctgttgt

SEQ ID NO: 325132 - DNA, 122 bp, Homo sapiens
ctctccaggagagatccctcttggagcacagagttaaacttgctctgcaggaaatgtctgcggggggtggccgtgaaaggttgtgtttacatttccaaagggctaagaaacagggaaaaggt

SEQ ID NO: 325133 - DNA, 122 bp, Homo sapiens
ctgttgtgctccacccagctccccttggctccctctcctggttgctgtgtgcccaagccccggggctgtggcttgaatgtgtgacccttccaaacctcttgttgaaatttgatcccaatgtt

SEQ ID NO: 325134 - DNA, 122 bp, Homo sapiens
agccaccgcacccggcctggggctcatgaacttaaagatcatggcccagtgccaggcacacgggaattcagaatagtaagggacaactattgttaagttctctatgtctgttgcataagtag

SEQ ID NO: 325135 - DNA, 122 bp, Homo sapiens
attgaagtcccgggctctggttcggcggttctggcctggtagctgagcatgctccagccccgtgaaggcggccagccagggccagagtagagaggctggagcagagccggcaccaaggtccc

SEQ ID NO: 325136 - DNA, 122 bp, Homo sapiens
atgaaacgcaggtgaggagataatgactatcaaccagtaaagaaactcctggaattgttccgatgaaagctagtatttcaaaacagagaggcagagatggagaaagacagggaagtttttct

SEQ ID NO: 325137 - DNA, 122 bp, Homo sapiens
ggagatgaagaccatcctggccaacacagtgtctctactaaaaataccaaaaattagccccgtgtggtggcggcgcctgtaatcctgctactcgagaggctgaggcaggagaatcacttgaa

SEQ ID NO: 325138 - DNA, 122 bp, Homo sapiens
gtagcatgtttttagtcacactaaacctggttttaattcaatctgtttttaccccctccccgcacatttataaagtttttgatgtgaaggccgaacacggtggtttatgcctataatcccag

SEQ ID NO: 325139 - DNA, 122 bp, Homo sapiens
tggagcgcagctgctgctgctttgcccgcttgagcttggcagggtttcggatcacttggacgatctccaccttccgctcgttctccaggcggcatttcaggttctccgcccgacgctgtttc

SEQ ID NO: 325140 - DNA, 122 bp, Homo sapiens
gcttgtcactctgttgtcttacatttctttggctcaccctctttgggttcgcacggtgggcggggccagtggtagggggtggtgagaaggtgcgggccccttcttccaattggctggcggtt

SEQ ID NO: 325141 - DNA, 122 bp, Homo sapiens
atgagagaggccgtcctgattgggctgagaaaggggcggagagaaacaaaacagatcgcacgccctcacctaaaacaccgctaggcaggacctggtggggaggagcattgcttggaagagac

SEQ ID NO: 325142 - DNA, 122 bp, Homo sapiens
tcgcaaaccatgacaataggcagtcacccgaggtcaaataaaaacggagtgggtcccccgcgcgccgccgccccccgcgtccctggcggcctcccccgaggcccccggcggcctcacgagcc

SEQ ID NO: 325143 - DNA, 122 bp, Homo sapiens
ggcgcacgtccggcgggctcctggagcctggaggaggccgaggggaccatgtccgggaggcgcttccacctctccaccaccgaccgcgtcatcaaaggtgcctggcgggccgggccttcctc

SEQ ID NO: 325144 - DNA, 122 bp, Homo sapiens
aagctactgctcagacatccctggaatcagacctactcctagacttccaattatattatacgtcattgtttataataatactaagtaaagatttttgttaagtgagtataaaagtgtcttga

SEQ ID NO: 325145 - DNA, 122 bp, Homo sapiens
cccagttctcgtggtccacgctgcccttgtagcccaccaccttcacccactccgggttctcgttcaccacatcacccgtagtggtcgtccactccttgcccaggccgcccacgtacagacgc

SEQ ID NO: 325146 - DNA, 122 bp, Homo sapiens
gaagatatccagtgcactggtgggaaaaaatgtttatgggatttcaaggttgggagaggccggtgttccctctgtgatgagctgtgccctgacagtaagtcggatgagcctgtctgtgccag

SEQ ID NO: 325147 - DNA, 122 bp, Homo sapiens
ggcattggaacaggttaggaagatgatcaggagtctgtgtgcgtcccaggtggaggccagcgtgggcaaaggctggcaggggtgagaaggctgcacatttggctggagtataggtccaggag

SEQ ID NO: 325148 - DNA, 122 bp, Homo sapiens
tcaagatttaaaactatagtctgaaaaaaatcactgagaacactctttccagatctttcccgctcacaatggttacaaacactttaagtgttaaaacaaacgtggatatacaggcttttctg

SEQ ID NO: 325149 - DNA, 122 bp, Homo sapiens
cttccgcgtcccaaatttgggaatggcccggtcaggctcaggcccaggcggtggaggccccggcgtggcagcgccgggcttgtccatgttcccaggagtccaagttcagaagccccctctcc

SEQ ID NO: 325150 - DNA, 122 bp, Homo sapiens
ggaggagcctagctcctggttccagatacttcagacagacccaaggccaccttgtccctccgcacagactcgcgagctccaaggaggagaaagtccccaggctctggagcgcttccagcctg

SEQ ID NO: 325151 - DNA, 122 bp, Homo sapiens
ccacctgtacttgacatcccacttccttccttgccaagcactgtagctttatgtagtagtcgcttagaaaatccttgctgaaaaaatgagttaatcaatggaagcatttcagtaggttttgt

SEQ ID NO: 325152 - DNA, 122 bp, Homo sapiens
ctttttaaactcttgggccccagacttttgagccccctgagcatcgttcttaaagtggctcgttttgtctgggagggtgacctcttgtgtagtgttttttgaagggttctcctgcttcgact

SEQ ID NO: 325153 - DNA, 122 bp, Homo sapiens
gagagcagactgtaaccgacagaccatcagccacagtgcgcggcagtgtgcggcagagcgcgcagtcctaggcagggccctgggtggctcctgcggtttcgggtttcaactccaaagtggac

SEQ ID NO: 325154 - DNA, 122 bp, Homo sapiens
tcaagcaagggcttgatagaagtattcatcccacccccgccccgattaaatcaaaccacacgcacacaaatagaggctctggcacatcctgacagaatatagcctctgggatgtcaggaacc

SEQ ID NO: 325155 - DNA, 122 bp, Homo sapiens
aacaggtggagacatgatgagtcaacgccgctgaggcttcacgcagcagccaccgtggcccggcttgggtaaatatttttattacaaacacagtgatgcgtaatgggccaaacgatcagtcc

SEQ ID NO: 325156 - DNA, 122 bp, Homo sapiens
ctaccatggcggcggcatttgaagcctcgggagccttagcagcagtggcgactgctatgccggctgagcatgtggccgtgcaggtcccggccccagagccaacacccgggcctgtgaggatc

SEQ ID NO: 325157 - DNA, 122 bp, Homo sapiens
gagaaggtacaaaaagagatcaaaaagtcctgtaacctgaaacttccctcgcatcctaaccgggacctggtggagaggtctgggcgggggcggagacacccggaggccgaccttccgccgag

SEQ ID NO: 325158 - DNA, 122 bp, Homo sapiens
tgcccccaccttgggattccctgtgaggcctggctaacctgtgtgctgcccccacagacccgccccggggaggaatccactcagaggcagcgccctgggagccagcatggccacacaggatg

SEQ ID NO: 325159 - DNA, 122 bp, Homo sapiens
ccaggcgcgggggatgtgggactacccggactgaggactgcgcaccggaagtagtggcggcgctgcgtaacgtcgagaggaagtgcctgatgccgcggcctgtgattgggagttgctggagt

SEQ ID NO: 325160 - DNA, 122 bp, Homo sapiens
ctgggagctggtggcgatggcacagccgggagcagtggtaggtagtccctcaggtgcccacgactcagctggcagcgaggaagcctcggagagggacctggagatggaggcctgcctcagag

SEQ ID NO: 325161 - DNA, 122 bp, Homo sapiens
ttttctcttcttgcctgttcaggtaagtgatgttaaccaacaccacgtcggaacaacactcgttccccgattgcaatcatacgttggatacagatgcaagagctccatgaaaatcggagcga

SEQ ID NO: 325162 - DNA, 122 bp, Homo sapiens
tgctcctggtggctccacgtctgaggacagggaagggcttttctctcatggtcgcccgggcgatgggttcacaggaggcccctccatgctcgtgaccaggttgcgttcggtcgtgttttccg

SEQ ID NO: 325163 - DNA, 122 bp, Homo sapiens
tgcgtgcgcgcgcgggcgtgcgagcgtgtgggtttctcgggagaggtggcactgcagtcccgtcgcctgcaccgccgcgtggccccagcttcccgaaggtctccgcctcccgggcccacccg

SEQ ID NO: 325164 - DNA, 122 bp, Homo sapiens
cggaaggagctggagcacctgcagatgtacaagctggactgcgagcggccaggcaggggccgcagtgcctcctctggcctaggcgagttcaatgccagggcccgcgaggtggagctcgagca

SEQ ID NO: 325165 - DNA, 122 bp, Homo sapiens
ggattacaggcatgagccaccgcacctggcctcacccagatatttttcaaataccattttcgattcccactctctttcttgaagtaagcaaggcagacacatttgccaaggataactgagaa

SEQ ID NO: 325166 - DNA, 122 bp, Homo sapiens
agtctcatcctcatgagcagtcctccctgaatcctctctcagggtttactgtctattctgcgcctaattttaaaaatattctttctcttttgcaataatatgctctatgctgtatctctttt

SEQ ID NO: 325167 - DNA, 122 bp, Homo sapiens
tttgattacagtctgtgagcctcaaaaggccttgagcaggaagaggtgtgttctgacatgcggttcacatggctccctccggccacagtgggctgtatgcagggcgagagaggaggaagcgg

SEQ ID NO: 325168 - DNA, 122 bp, Homo sapiens
caaagtgtacaattttcatcccacaattgaaatttttaaatcatttcatgttagtcttaccgaataaggtaccaagatcacaaatagtgttgatcagatcttacaagtttatgtggcacaca

SEQ ID NO: 325169 - DNA, 122 bp, Homo sapiens
agggggaggggacggtgtggatggccccgaggtccaaaaagaaagcgcccaacggctggacgcacaccccgccaggcctcctggaaacggtgccggtgctgcagagcccgcgaggtgtctgg

SEQ ID NO: 325170 - DNA, 122 bp, Homo sapiens
tcccgtcggtgccggggctggcaccgggccctgcccgcccctcggcagggccccaacgtgcgccccagctcccgcccgctgggctctccgcagtcggttttgagttccgcacccccagcctc

SEQ ID NO: 325171 - DNA, 122 bp, Homo sapiens
caggccgcaagtgtccggaaacagaagaatgggagtgtcagtgggggagtgtgaccgtgacggcagaggcaaggtcagaggactgaaaagaaattgaaaaggattcttcattatgcttcatc

SEQ ID NO: 325172 - DNA, 122 bp, Homo sapiens
gggcgcggcgtgcgcgcggcggcgggtggcgggcggcgcgggcgcccttgcggggattcccggtctctcagcgcgccctagtggacgccctgcctttcgctggctccccgtgctcgttacaa

SEQ ID NO: 325173 - DNA, 122 bp, Homo sapiens
gagtagaaagggatgaaaggaggaggggcggtcggcccaggaagcagggcgggcagacggcgacccaggggacctgtccgagaggtgacatagaggacagcaatgccgcccgcatgtcccca

SEQ ID NO: 325174 - DNA, 122 bp, Homo sapiens
gcagggcggcttgggagcctttgaggccctgaactatttaaggatccaggtgttgcaaggcggtaagttttgcagccagtgtccatgaggtcggggctgggactagattagggtagatctaa

SEQ ID NO: 325175 - DNA, 122 bp, Homo sapiens
ccgagagagccgagtggcctcgcccccaggattcggggccggctgcttctggagctgacccgagttccatccagacagcgctgaacactcttattaaaaggctatttaagttttattttatt

SEQ ID NO: 325176 - DNA, 122 bp, Homo sapiens
tgcctggagagctttctgtgatttatggcctgagtgccaaggctggatttactgcctgcacgggttgtgcaaggaggcccctcccccggggcagggtgtggaggggagggagccctgagccc

SEQ ID NO: 325177 - DNA, 122 bp, Homo sapiens
ctgattcctagttgtggtgggaaatctcagtccgatttggaaggcaaagggcctcagccccgccctactgactgtgaattctacaacatatggagcgcctaccttgtgcaaggcattgtggg

SEQ ID NO: 325178 - DNA, 122 bp, Homo sapiens
ccgcaaaggtctgcagcttcactcctgaggccagccagaccatgaacccaccggaaggaacgaacaactccagacacgctgcctttaagagctgtaacattcactacgaaggtctgcggctt

SEQ ID NO: 325179 - DNA, 122 bp, Homo sapiens
ggtcccaatactttacttgtagattttccagtttctaccattccctgtaaggcactgagacgcaagatttcaaggcccactcggggtaccctggcatggacatcgagtcgttctagcgctga

SEQ ID NO: 325180 - DNA, 122 bp, Homo sapiens
tcctgggctcaggtgattctcccatctcaaccttccgaatacctgcatataggcatgcatcgccatgcctggctaatttttaaattttttgtagagatagagtttcaccatgttgtccaggc

SEQ ID NO: 325181 - DNA, 122 bp, Homo sapiens
ggcagcgccctctgtgttccctgccttcctacgggccgacgcctggcatagttgaggtttcgctccaactctgtcctgcccctgatgtcacaggcacaacttcctgaatctggctcgccgtt

SEQ ID NO: 325182 - DNA, 122 bp, Homo sapiens
catccactcattcaataaaaatgtccttgctcaccaagctgtgccacttagtacttggggcgtggccacctctaatgcctctgttcaagcttctttgctgccatgcctccctctgagccctg

SEQ ID NO: 325183 - DNA, 122 bp, Homo sapiens
ggtggcgaagatggatggggcccggggctttcggcggggcccgaggggccggcgaggctgcggccctggagccccctgcctggcagccatttgggccccagggaaatatcggcgctttggct

SEQ ID NO: 325184 - DNA, 122 bp, Homo sapiens
gctcaaaatacattattgcctcaacatcttccttgatagcatgaaacaaaagtgaaacaacgggattcggtactttgagtcgagccagtggtgctatgtgcacggtagtagcctgaaaaaaa

SEQ ID NO: 325185 - DNA, 122 bp, Homo sapiens
taccactcccagcagtaagaaagcatttggtgtttacaataaaatgatttagtgccttagcgaagggaatttagctttcaggaaatggtttaggactcgcagtggattttgctgaataagca

SEQ ID NO: 325186 - DNA, 122 bp, Homo sapiens
tcgtcactgagaacagttgtaagaatgactgcaggagagatgatcaggaaaccaggtgggcgaagcccacattctgcctaagaataaattatctgagctgtctctggtgagaatagactctc

SEQ ID NO: 325187 - DNA, 122 bp, Homo sapiens
ttgtgtcctagcacagtgcctcgcgcacatggtcaccaaaatactttctgaatgaattaacgaaactatcaactatcagaagtgaggtgtgttgctgagcacatctgcaaatggttcctgtc

SEQ ID NO: 325188 - DNA, 122 bp, Homo sapiens
acctcccgggttaaagcaatcctcttacctcagcctcctgagtagccgggaccacaggcccgtgccaccatgcctggctaattttagtgttagtttgtagacacaaattctcactatgttgc

SEQ ID NO: 325189 - DNA, 122 bp, Homo sapiens
ggaggcggcgccgggcggcccagctagggcgctgcagggtcgcgaggaagtttgttggcccggaaccaagcacgccgtcgggcacgctagctccccgagagcaggcgggcgcgtaagcgaac

SEQ ID NO: 325190 - DNA, 122 bp, Homo sapiens
gtcctaccacagagtgatcagcggctcacacaagctaatgacacatttaggaattaagagcgtcaatgcatactagctgtctgataaaattccatctcttcccttatttctctcttttttca

SEQ ID NO: 325191 - DNA, 122 bp, Homo sapiens
agcggcccgacctcgcctctgaagaactacaatccccagcaagctttgcgcctgggttagcgatctagcttgctttgttgcccgcctagtttaagattgggagtcgcatttccaatgcgcag

SEQ ID NO: 325192 - DNA, 122 bp, Homo sapiens
cagatggccttccctctttgtggccatttcctaagctgtgaaatggagccacagaggccacgaggaggaggcgcatgggcttggtacagagggcagtcaatacatgctcaccaccgttaaga

SEQ ID NO: 325193 - DNA, 122 bp, Homo sapiens
ctgggagctggaggggaagcagtctgggccttggaatggtgggaatcaaactgggcagttcgtggccatcaaggggcagaagtctggtgctgggaagttggtagggagagggagaaggggca

SEQ ID NO: 325194 - DNA, 122 bp, Homo sapiens
ctccattttttcgttaatgaaatggaacatcagagaaatacaatgttcacagtcacactccggttggtgatggacatgaatatctacaccaaggactaaaatgaaatcatgcctggaagcca

SEQ ID NO: 325195 - DNA, 122 bp, Homo sapiens
agaggaatagcctctaacttgaagttaaccctgttctttgaccctctattcatgataagtcggtccgtcggaaagcatactcagaggagcgtcctttggggccagagtaacttacggcctgg

SEQ ID NO: 325196 - DNA, 122 bp, Homo sapiens
gaaggtagagcggtccagggactcacaggtctcactaaagaaaagtctagcgtaggttcacggcacggagagattttaaggctgcctaagactaaagccaaatacgaagtccacatctgcgg

SEQ ID NO: 325197 - DNA, 122 bp, Homo sapiens
caggagccaggcaatactgcttgggaatgtgaagccccatgggcaccagctagggggtcccggctgcgcggccagccttggaagagaggacttcttggacacctaacccggagggagcagag

SEQ ID NO: 325198 - DNA, 122 bp, Homo sapiens
ccgccgcggggacgagctcgggtaggcggcagggcagatgcccgagggcctgcgctggaacgccccacgccgcaccggccgctcccctgtgctccgcggcctgggcctgcgccgctcagctc

SEQ ID NO: 325199 - DNA, 122 bp, Homo sapiens
ccaacgagctggacacggagaccctgcggaggctgaagcgggagtgtgggggcctgcagacgctgctccggaacagccaccaggtgttccaaggtacggagtccgcctctcccccgccgttc

SEQ ID NO: 325200 - DNA, 122 bp, Homo sapiens
taaaaaatacattcatttatatccatatatttttagctatatctatctgtgtatattaaacgagttcacatcactaccttcagttgcaagtcagtggcacagggttcattctagccttctcc

SEQ ID NO: 325201 - DNA, 122 bp, Homo sapiens
acaatttggggtctcacctgggattacattcccttccggggacagtctctggttctctctcgtgaggaggtgcaccccaccctattgtggcggcctcaggggtgagaaatcatgacccaccc

SEQ ID NO: 325202 - DNA, 122 bp, Homo sapiens
accacaccctgcaggctggcttcagctctcgctctcagggcctgagtggggacaagacctcggtgagcgatgggcccagcccgagggggacgatctgagctctgcagtctggagagtgggag

SEQ ID NO: 325203 - DNA, 122 bp, Homo sapiens
cgtggggttggcggtggtggaaggactaggagttggcgcgtgcgtactggcggcctctcccgcaccgaccggcctgggccccgcccccgggcgtgaggcgcccaatgcgcgtgcgcggcggc

SEQ ID NO: 325204 - DNA, 122 bp, Homo sapiens
ctcatcgacgggatcatctttgctgccaattacctggggtccacccagctgctatcagaacggaacccttccaaaaacatcagaatgatgcaagcgcaggaggccgtcagccgggtcaaggt

SEQ ID NO: 325205 - DNA, 122 bp, Homo sapiens
gcagtgacaggtctgggaacagacaagggagagcttgtccgggaggctggaccctcacaccgatgctgcctgtgcctggcagctctgtcccgggcctcagaacagacactgaccaacacgct

SEQ ID NO: 325206 - DNA, 122 bp, Homo sapiens
cactttgtgctggttcccgccaaggggtcggcctccgggtccctgccgccaagtgcgtggcgtggtctcggcctccaggtcagacattgctgatacgggcctcccccgggaaggcagcggga

SEQ ID NO: 325207 - DNA, 122 bp, Homo sapiens
gagaatgaaagttttcgggcagggtccaccacggctccttgctgagagcactcgttcccacggccatgctgtgctcccacctgattcagaataggggaaagtctaacaaactggttggcaaa

SEQ ID NO: 325208 - DNA, 122 bp, Homo sapiens
tggatttatgatcgtgggactcttggatcatgtgggggaatgattccctttcccatgattcgctggtccacatttggcttctgaaatgcacattccctgtatgcctatgggtgtgagttttg

SEQ ID NO: 325209 - DNA, 122 bp, Homo sapiens
cagttcggctcccggctgcagactccagctcattgtgttctgactgcgatgtggcgcttgcgatctctcgccgccggcagaggctcctcgaagagcgacacggggctgaccaggcacggtgg

SEQ ID NO: 325210 - DNA, 122 bp, Homo sapiens
gcagtcgtgacgtggcgttcagagagcggaagttgtcagatttcaccgggccgtaaagcgcgctggctgtgtcatcttccggttagcgacaacggctctgaccgtctggcaggccgcgtggc

SEQ ID NO: 325211 - DNA, 122 bp, Homo sapiens
ttgtaccctgagcccaatgcctccaggagaaccagggcaaaaaccctgcccccgcaggtccgagacgcttgtctctaacccgcctcccgtcttagggcaggtcaacaacacactgaccaacc

SEQ ID NO: 325212 - DNA, 122 bp, Homo sapiens
cccctacagtgtccccaagagagtggcccctggagaatgcactctgagacagtgactgtccgtgcggagtcccaaagcaggggccctcaaagctctccggagtggtcacaagccccgctccc

SEQ ID NO: 325213 - DNA, 122 bp, Homo sapiens
acgtaaagacgcgccctacgcaatacgtggagtttctcactttgtggagccgcctggaggcgccaagatgaagcccatcggggaagtggggcggggccaacccggcaggccccgccccttcg

SEQ ID NO: 325214 - DNA, 122 bp, Homo sapiens
ccatgggcttctcccagacagacaggtgcatcgttgggttgaagaagaaaactcggtcatcgcccgtccagaccacacacctgtttgagtggaaaaactcatctcagtcgctctcggagaca

SEQ ID NO: 325215 - DNA, 122 bp, Homo sapiens
cagtggccgcagtggccgcaaggacccggacctcagggaggcctccgcacgaagtcggaccgtcctgcgcgccgcctaagtccaggcttgcccgtctgctgccaggcaacaacgcccctagt

SEQ ID NO: 325216 - DNA, 122 bp, Homo sapiens
ggcgggagaatcacctgagcccgggaggtcgggggctgcatggaaccgtgatcgcaccaccgcactccagcctgggcaacagagcgagaccctgtctccaaaaataagaataaagaaaaaaa

SEQ ID NO: 325217 - DNA, 122 bp, Homo sapiens
ggtttgcctgaagacagctgaagataaacaggcagcctgaagaactagaagtcagagagccggagcccacgcttccaggctgtgtgaatttcagcaagtcacggacgccctctgggcctcag

SEQ ID NO: 325218 - DNA, 122 bp, Homo sapiens
tttttagttgcttctttctccttcacttttagctttagcagcatctcgaaacactcaaagcggagaaagactggggggttggggggagctggagagggagtgggggaaaagttaagagtcgc

SEQ ID NO: 325219 - DNA, 122 bp, Homo sapiens
tcagctcaaaacaaaagacagaccaagggctcggatttgccccataatcagaatgccagccgcactgtgccgctgttgacactggcctgggaggtgcccgctcgaatggtccctccagctca

SEQ ID NO: 325220 - DNA, 122 bp, Homo sapiens
aaagaatgacctgggtagacaggtgggagtcgctttcccaacaggctcccacttcagccccgtctgttcagatcgcccaacttacccccaaaaagccagggcactcctggacccctgcccac

SEQ ID NO: 325221 - DNA, 122 bp, Homo sapiens
gaaggtcaggaaggaaggagaaaaggctgacagtgatagtaaggtagagtgtgccaggaccgactccttcaatgagctacaagtcagttaaaagttgtgcatggttagcaaccaaaatgccc

SEQ ID NO: 325222 - DNA, 122 bp, Homo sapiens
cggccggaagacacctaccctggccggaagacacctacctctgaagatggagaaggaggccgtccgggtactacgtagcagtcaggtcagtctgggacatttcctgtttacagaggactata

SEQ ID NO: 325223 - DNA, 122 bp, Homo sapiens
gtgacggtgcgcggaggcggtggtggagttgcttcccctgctaggcgggctcgaaccgggcgggagtcactgtccaccttgcttcgccagggtgttatcgccagccagtccccttccgcatg

SEQ ID NO: 325224 - DNA, 122 bp, Homo sapiens
ctgggggctctgcacatctcggtcacacggggtccaggccattgaggctctgcctggccacgcgtgcctatagtcatggcagccagggaagacgcagaggcaggtcgagagctggctctcca

SEQ ID NO: 325225 - DNA, 122 bp, Homo sapiens
tcctacagctgctctcaggttcctgacagtttatgtcattcagtaaacgctgtacacaggcgtaaaatccaaacagacgacagacacccagatctgagtgccgctcagatcgcaggcactgc

SEQ ID NO: 325226 - DNA, 122 bp, Homo sapiens
ggtgcaaggatgcacggtgcctgtggtaccctggctctaagagggatgcattagactaaacgggatcgcaacttgcggtggttcgcccgcctgcagctcttatacagcagcccgtgccgtgc

SEQ ID NO: 325227 - DNA, 122 bp, Homo sapiens
cacttgtctcctttccctactaaagactgtcgactgcccttatcgctgcaggagaaagcccgaacctggcgcccggaagtgatgtcatcggaactgtgcaaggtcccgtccagagctggctg

SEQ ID NO: 325228 - DNA, 122 bp, Homo sapiens
gggcctgcctgcccccttctccctcatagcttacattcctccagaagcttctcccctaggcgggcaggcggtcagcacctccccatgcacagccctccccgcccgctctgctccccagctct

SEQ ID NO: 325229 - DNA, 122 bp, Homo sapiens
agccgggaactcgcagcctgagcagacgcagcgtagccgatcttgggtccgcgctcctcccgccttgcccagccctgcccgcggttggctaggccccagggaacgctgcagccgcggggtgg

SEQ ID NO: 325230 - DNA, 122 bp, Homo sapiens
ctggagagttctcggcgggcatgtggggatccagattccccgactccgtgtccgcgtggccgtggtgtggacacctgtctgtagaatgcctccacttggtattttaacgacttgactcttca

SEQ ID NO: 325231 - DNA, 122 bp, Homo sapiens
cgaccccacctgcgctcccggctccgccgcctccgtctgcgccgtccctcgtcctcccggcgccgtcggtttcgccgcccatggctcctgctccgacttcggctcccgctctgactctgccg

SEQ ID NO: 325232 - DNA, 122 bp, Homo sapiens
tatgccgcactgaaggcgggacgctgtaagcgaggagcagctgggcctgggcggactcctcggccaatcagcctcggtcagcagcaccctcaggcgcagggcactgtttgggcattgcctag

SEQ ID NO: 325233 - DNA, 122 bp, Homo sapiens
aaaaaaattccacgtttccacagtgcagacccttcagcctcttccttatgcaaacacacacgcaggcacacatctgcatggacacctggcacatgcttctcgctgctgcccgcttagatcag

SEQ ID NO: 325234 - DNA, 122 bp, Homo sapiens
tatggggctgaaaaggccgaaagggctaaagttaggggccctatgcctaccgatgagatgcgcgcgtgtgcggggtggttattaatgacagagcaggacacatggccagacagtggaactca

SEQ ID NO: 325235 - DNA, 122 bp, Homo sapiens
ccttccaccctgaggaggcaggtgggcagcctgtaaggcgccattccccagcacccgcagcgggcactgtggctgcacgccgccctcggaaagcaaggctgcaccagctgctccacaaagcc

SEQ ID NO: 325236 - DNA, 122 bp, Homo sapiens
ccaaccatatacctatgattccccatgtaaaaaaccctaggaaaggcacacctactcaagcggcagaagcggatcaggggatcccagggctgggtttataggtagagacagacccatgtggg

SEQ ID NO: 325237 - DNA, 122 bp, Homo sapiens
gcggcggcagcacctcctcgacggctcctccatctttgcggcggctcctccggctccgctcgccgccgccaccaacaacaacattcggagacgtcactcccgtcacgtgacccgacccggag

SEQ ID NO: 325238 - DNA, 122 bp, Homo sapiens
tgccgcttctggggcggggatggcaggagccctgcctgtttgcctgcagggatttgccagcgagtgtcctgtgccgggaaagtggagctgtgggtccatgattctgctgctcttccttgagc

SEQ ID NO: 325239 - DNA, 122 bp, Homo sapiens
ggtgtggagggagaggcgcgggcaggaaccggggctgtgtgcagtgcttgcgagccagcgcgagttccgggtgggcatgggcttggtgggccccgcactcagagtggccggccggccccagg

SEQ ID NO: 325240 - DNA, 122 bp, Homo sapiens
gcaacctccctgcctgattctcctgcctcagcctgccgagtgcctgcgattgcaggcgcgcgccaccacgactgactggttttcatatttttttggtggagacggggtttcgctgtgttggc

SEQ ID NO: 325241 - DNA, 122 bp, Homo sapiens
ccgagctctcgcgttaactaggcaacatcgttgccacggtaactgggaggcgcgggagggcgacagctccctggactcccggtaacccttacgtgcccggggctggtccgtggggcggggtg

SEQ ID NO: 325242 - DNA, 122 bp, Homo sapiens
gccggcaggcggtgaccggctgggcgccgcagtgcatgccgtgacgcgtagtcccgcctgcgcctcctgcccggcagcggtgaagagaagaactaccactcccgaagtggagcgcaggccgc

SEQ ID NO: 325243 - DNA, 122 bp, Homo sapiens
agcccaagacaggagaagtgcttgagtccaggagttcaagagtaccctgggcaacacagacgaccctatctctacaaaaatttcattgactgattgattgattaattgactgattgagaaag

SEQ ID NO: 325244 - DNA, 122 bp, Homo sapiens
cgccaagacttaagcacgtgggttgcacgcatcggccagtgtctgtgccacgtacactgacgccccctgagatgtgcacaccgcacgcgcacgtcgcacgcgcggcagcggcttggctggct

SEQ ID NO: 325245 - DNA, 122 bp, Homo sapiens
gcccggatgaaggtcccaccacgagccatcctccgcgcctgggtgagtcggcctgaaccacgattcataatggtgtgacatgtccggctgcaggagcttggaaaaggggcccggggccaagg

SEQ ID NO: 325246 - DNA, 122 bp, Homo sapiens
gcttgtcctgcagccatcagaggggattaaaattaacagcagctcggacgtgaggggagacgggcctcagacgctgcccccgcccatggttaccctctcacagcgggaggctcacaatcaaa

SEQ ID NO: 325247 - DNA, 122 bp, Homo sapiens
gttgggtaagaaagggggaaagtgggacatggaggtggggtgagccaccttccctggcggcgaccagcattccttggtggcaggacaccttggccctggagtctcgaagaggcctcccttgg

SEQ ID NO: 325248 - DNA, 122 bp, Homo sapiens
gcctccccagcacgtggcaaacgtcccacggaggggactggtgggcatctggggctcccccggatccagctgattgcaggagcctctcggccattcacacttggccacctcctctcccccag

SEQ ID NO: 325249 - DNA, 122 bp, Homo sapiens
tctgccatcagctccggcaagaagaagcggaaacgctgcggcatgtgcgcgccctgccggcggcgcatcaactgcgagcagtgcagcagttgtaggaatcgaaagactggccatcagatttg

SEQ ID NO: 325250 - DNA, 122 bp, Homo sapiens
ggccacacccacgccgcacctcatccgtgcacgcgtcggagcacggccagccttccgccacgagccagctgggaagggccgcggccgcctaaagccccagtcaacccagcctgtgtctgagc

SEQ ID NO: 325251 - DNA, 122 bp, Homo sapiens
acggagctgcatgtcagcggccttgcggcccttcctcgcctggacttttggccacgttaccgttatggctgtaaattaacctagcttgggggcccgccttgcctttgaagattgttttcgag

SEQ ID NO: 325252 - DNA, 122 bp, Homo sapiens
gggcaggtgtctgggatgggcaggagtctgaggctatggagtgggacacaagacctccaccgcagcccagtggggcgtctgcggtttctcatctgcaaaatgggaacaccaaaaccagcctc

SEQ ID NO: 325253 - DNA, 122 bp, Homo sapiens
gttggaaggttacagtgaccctataaaacacaagccatcccagatgctaggttccaggcccgatctactacttacctaagtcagcctgtcataatctgaaatcatgatcctcactcccaaac

SEQ ID NO: 325254 - DNA, 122 bp, Homo sapiens
gttggaaggggccatgaaaagcttagtttgtatttcaacacagccgaggcatctgcacctcgtcctctctagcgctcggcggggctggggcgtctcgggcagtggcgcacccagctggacgg

SEQ ID NO: 325255 - DNA, 122 bp, Homo sapiens
ctccatcagcacttgcttcttcaccttgtacttcattgttatgcttcttttcttaaacctcgtttaagaaatcaaactctgctagcttcaaacttttctacagtttccttacctctccaccc

SEQ ID NO: 325256 - DNA, 122 bp, Homo sapiens
ctgtagtcccagctacttggagggctgaggtgggaggattgcttgagcccaggagtttgacgctgcagtgagcgagattgtgccactcgtaacagagcgagaccctgtctcaccaaaaaaaa

SEQ ID NO: 325257 - DNA, 122 bp, Homo sapiens
tcctcacacccttcctccagtcccctctgcaacggccgacttggtgagagaggtaaccaccgggccctctgggttccctatccgcttcctaggggggccgactcgacacctaggtgcaaggt

SEQ ID NO: 325258 - DNA, 122 bp, Homo sapiens
gaggcttgttttattccttagcatattttcaggtcccaccttcacaggtttgaaaccatgcgctctgaggtggagttggagtctgcagtttacaagcatttaggatgattctggcaaaggga

SEQ ID NO: 325259 - DNA, 122 bp, Homo sapiens
agatgggcatgaggggctgcagaaagtcagccaactcatttggctcttaaacctaagtcacgttctacaatataggttttatcaaaaacaaaggcaactcctttgaaagttaaacacagagt

SEQ ID NO: 325260 - DNA, 122 bp, Homo sapiens
ctttccccagaccccgccgacagcctcccccagcgggctccaggcgtgcgtccctccccacgtcctggtgaggccagccatgtttctaggagtctcaggccgactcagtgtgtagtgagaga

SEQ ID NO: 325261 - DNA, 122 bp, Homo sapiens
gttgttccgatctgtccggaccacgtctttgtccacagtgaactgcacattacgccagaacgctctgtgctcctcgggagtcatggagagcctgtgtggagccgagcacccagccggggtca

SEQ ID NO: 325262 - DNA, 122 bp, Homo sapiens
ctgctttttaaactcgataactctttattttagtaaaatgcccaggagtcctggaagctacgcggacttgcagaggttttattttttggccttagaatctgcagaaattaggaggcaccgag

SEQ ID NO: 325263 - DNA, 122 bp, Homo sapiens
agtgcggggcccgccaagccgacgcccacccggaactccagctggcccgcaagcgccgcgcgcacccgtggttcccgctggcgcctctcgctccacacctccctgcaagctgagggagctgg

SEQ ID NO: 325264 - DNA, 122 bp, Homo sapiens
tgaaagtaattcagattactgtgttacagtattgtaccacagttaatttcctgggtttgacggtacacatggttacacagaatgttatcactggggaagctgggtgaaaggtactttgcaac

SEQ ID NO: 325265 - DNA, 122 bp, Homo sapiens
gttgtcctgagtatcagcccgggcctagacttcccgggttatatggtgatacagtttaaacgcatgtccttgccaagcctcgtgttgaactgtcatcccccgtgttggaggtggggcctggg

SEQ ID NO: 325266 - DNA, 122 bp, Homo sapiens
cgaccaaaccaacagtcgccgccacaccggcaggcagcgcactacattattcaggagacgcgcctggccacgccccatgagggccccacaaggcccacagtcaacgccccaagttgttgcat

SEQ ID NO: 325267 - DNA, 122 bp, Homo sapiens
gagcttctccactattggcgctttcacagcatgttaacagtttttgtcatctgcaaatagcggtacctgacccccaattttaagacaaatgcctgggagaaaatctgaaataagaaagtggc

SEQ ID NO: 325268 - DNA, 122 bp, Homo sapiens
actcctgaagcactgggattacaggtgtgagccatcatgcgtgttctcttcttgaattatcgaaatgtaactgaaccttctctttgtgttgcaggattaaaattattgtgagatgcaggtca

SEQ ID NO: 325269 - DNA, 122 bp, Homo sapiens
atcatcatggatcaaaacaggtaaacttacttcagatgttcaccaaatgtagtagttattcgatagatggcagttttcagtgatgctctgaatgcaaatcttaatgttttatatgaagtgtc

SEQ ID NO: 325270 - DNA, 122 bp, Homo sapiens
tggtcaggcgggcagtgcctctcacctcccagttcgtctgtcttctgtcaagtggggctgcggcagggctgagaagactgtgttcaaagcatccggaaggccttgggttgtcaagggcccca

SEQ ID NO: 325271 - DNA, 122 bp, Homo sapiens
tgcccggttaccccacgacagcatggcccataaacaatgctcagagagggaccaattgagcggccacacgtgttaaggtatttcacacggacccctttgcctgagcaatgtcgttcctaaaa

SEQ ID NO: 325272 - DNA, 122 bp, Homo sapiens
tgaagcattgcaacttcatagcctgctaaggagcaacagctgtacctaatttcaacttgacgtgcttcagatctcatattcatataggtatttaatgatccaaacataatggtcctatatag

SEQ ID NO: 325273 - DNA, 122 bp, Homo sapiens
agcagcgtctctggctgcgagcgagcagctcctgaaaaagccagcaacagcgaaaatagccgaaagcagccgactagccggagattacacaaggggcgcggcgattggccaggcgggcgggc

SEQ ID NO: 325274 - DNA, 122 bp, Homo sapiens
gcggagacgccggagccgctgtcattgcctgggcgaggcggggggttgcggccgggccagcgggcgggcgggctgaggcgggggacgggggtcactcactcgccggcctccgggagccggag

SEQ ID NO: 325275 - DNA, 122 bp, Homo sapiens
ggtcctgaccgggcgggggaagtacagcgaccccatggagatcccggccaacgaggcacacgtctccgccaacctgaagaccctgaaccagtacagcatcccagaaatcaaccaccgcttga

SEQ ID NO: 325276 - DNA, 122 bp, Homo sapiens
caatatcatagcattttagaaaccaacttataaaaatctaaaaagtaaataaaagtggtgcgggtgatacctgggcggaatgtcttggcactcaggtgtaaaggattctggaaatagggatg

SEQ ID NO: 325277 - DNA, 122 bp, Homo sapiens
aacagaggtactctagggtaccgtacttgtgctctgaatagctgctagacatgcagtgcacggtgcgatgtgtggtatctcaacaatgcttttcagaacaagactgtaaccttaaggtcatg

SEQ ID NO: 325278 - DNA, 122 bp, Homo sapiens
tggcccgtggagtacttcatgctgtagaagtcaatcttggttctgcactaagcctgactacgggagagaggcttttgcaaagatcattatgaaggacctcaggatgaactgagtgagttcca

SEQ ID NO: 325279 - DNA, 122 bp, Homo sapiens
ccactagatggcactagatgttcggattaaagtgccttcctgagctccacgggcccagggcgagggcaggcagggtctgaagacagcttctctcggccaccgtcattctctctcccacttcg

SEQ ID NO: 325280 - DNA, 122 bp, Homo sapiens
agttacttctcatgatgcctagaatgaaatctgcaattttttattaaggactgcagggcccgacataatctggcttttgtcgctctggccctacctcctgctctgcctccttctttctagcc

SEQ ID NO: 325281 - DNA, 122 bp, Homo sapiens
aggatccagcacttcagtaaggtctgggatttagcaacctgctgagtgaccaggactgtacgtgtgtccaccaagggaacgtgaggaggccacacgtacagctcaccaaacacatcagccgt

SEQ ID NO: 325282 - DNA, 122 bp, Homo sapiens
ccgctcgcccgctccccggcgttcaaccgcgccggcttcgtgctcccccgcgccgtcccccggccatcttgggcttggcattcaaggcccttcgggaccgctgctgccactgacccagtgcc

SEQ ID NO: 325283 - DNA, 122 bp, Homo sapiens
tcacattgcacatgtaagacaacctgttgaattgtgtactgattccaaactgtcatggatcggaatggagaactaggaatggaaaatggaatcagggactgcgtctttaaggacaaaatcag

SEQ ID NO: 325284 - DNA, 122 bp, Homo sapiens
gaagcctcaaattcagaaaacccagccagaccttggaagttaagaaggtggaaggcagatcgcggaaccagtgttctgatagttgtggttctctgagggaagccaattctggggaccggtag

SEQ ID NO: 325285 - DNA, 122 bp, Homo sapiens
ctgagaaggcgctgatttttattctcatgttgctgccgcaaatgcagaccagtgtgcctgcggggtgctgacctctgagaagcgtgcaccggatctacaggacctcccgtggcaggtaacag

SEQ ID NO: 325286 - DNA, 122 bp, Homo sapiens
ggcacttttggctaatagaaatttaaagaaggacgggtcccttggtgaagtggtggaacacgtttggctttccacttggagggagaagtggagattagcggcagcctcatggccacaggaac

SEQ ID NO: 325287 - DNA, 122 bp, Homo sapiens
ctgggacaagaaaacttgacccactcacggccgggaaagagtccaggctttctgagcagccgcccctgggaggggtcagtgacccccggtgacgaacgcctgactccccccttcccccacgc

SEQ ID NO: 325288 - DNA, 122 bp, Homo sapiens
cgcgcggcggggaccgggggtgagggagagtgagctgcccgtccggggagataagcaaggcgccaagcccggactcccagaggacacttcgtactctgcaattccaactccctcagtgtcgc

SEQ ID NO: 325289 - DNA, 122 bp, Homo sapiens
ctgagctttctggaaggtgtcgccatcgcttctaacagtgagcggtgactccagaaaccacgggcatgggcctcagcaggggcctggaggcaccgatggtggagaggccggaaaggggtggc

SEQ ID NO: 325290 - DNA, 122 bp, Homo sapiens
tttctagaattttccacttaatagattcggaccacggttgagtgcgggtcgctgaaacagcggaaagtgaaagcagggataagggggactgctgcagatgcacttcctctgggtgtcaagca

SEQ ID NO: 325291 - DNA, 122 bp, Homo sapiens
ttgccctgggaggatttggagtgttgcgtggtcattgaataaatagctcattcgcttgtccggatatgaccccactcagagctggctcccccactaagcagtgacactaagaagcacacagt

SEQ ID NO: 325292 - DNA, 122 bp, Homo sapiens
actgacagcaagcatagggtcacgggaggagatgggaagagaggatggctccagaaaggacgcttccaaatgcatgtgattctcacttccaagtgggagcagaacagcaggtacacgtggac

SEQ ID NO: 325293 - DNA, 122 bp, Homo sapiens
ttgggtgaaggctccgatgtcttatcgggacaaatgagcatgacagtcccctctagccaacgccggttgctccaaggggtgcaggtgacatctcagaagagtctttgtctctgctgcctgga

SEQ ID NO: 325294 - DNA, 122 bp, Homo sapiens
acagctgagagaagcctcagggaaaatcataactagaagtcatgaggcatttggcaatgacggatcctgcaaaagaaaaaaggacactaggcaaaaactaaggcattttaataaactatgga

SEQ ID NO: 325295 - DNA, 122 bp, Homo sapiens
agttacaatcttttattcaaaatttggaaagcatcaacttctctggtgtcctcagtcgtacgcctgtgtgctttttgccttaataattaaataacttttcatcgcctgaaagctccaagctg

SEQ ID NO: 325296 - DNA, 122 bp, Homo sapiens
tagacagctggtggtggacaacaacgtgagcacgtccagtgctgctgagctgccctctaccgtaaccgtgtgctacaagagctctaccttaattaattaattattattattattatttctga

SEQ ID NO: 325297 - DNA, 122 bp, Homo sapiens
ggttttccctcccggaccgtgaaggcgggagggcgtggccagcacgccttttccgctagtcgccccgctctatcccatagtctcgctgccctgagcctcccgtgccggccggccggccgggg

SEQ ID NO: 325298 - DNA, 122 bp, Homo sapiens
cctcaccgagggctgcaggtgatgtagtttctcgacagcggccagcgatgccacgaagatcgcgggctgacagtgcacggtgcggtccagggtctcctgcggcccgtgcaggctcagttcca

SEQ ID NO: 325299 - DNA, 122 bp, Homo sapiens
gctttcctatacatcgttacattttgtcatcctatgatgaactctcgttgctcgagggggcgaaaacagagtgaacgtggaaatgatctttggcatgtggtattttctgaaaaactgaattt

SEQ ID NO: 325300 - DNA, 122 bp, Homo sapiens
accagggtcatgccaggtgttggacatggtgaactgggaagtgctcccatctggccacagcgcagaagtatcaccgtgctgggggatggggaacagggctgtgaatgggcctatttgcataa

SEQ ID NO: 325301 - DNA, 122 bp, Homo sapiens
gaacgcgctgggagaagcggactcagcagctccggccacaaaggcgcttttcagccgccccggctcagggagaggaaagggcagaaagccgcgcccccaatccctgctccgtccgggtaggt

SEQ ID NO: 325302 - DNA, 122 bp, Homo sapiens
ggggagaaacctcggcccacagccgggatgcgcccccgccggggtcaccgcggcggcgaacgtcccggacttcgcatcccggtgaccccttgggatgaaccgaagccggacccgcaccttgg

SEQ ID NO: 325303 - DNA, 122 bp, Homo sapiens
ccgctgctacaggtcacttccacatgtcatgtgtgtacaactgaccattagcacaagtgacgaggcagccaaatgattccatttcttatttatcccactggctatgccaacagttgcttcat

SEQ ID NO: 325304 - DNA, 122 bp, Homo sapiens
aagcaaccatacaagaaatttagagaagcagagtgccgagggagtgggggcggtgggaggcggtaagtgctaagcatcggtcccctcagcagtttgaatgattttatgaagcaggtaagatt

SEQ ID NO: 325305 - DNA, 122 bp, Homo sapiens
ctgttgatgaaggttggggagagccctggtgttcgcggagtcccgcgctctctgtattgccgtaatgctctgtctttctcctttcatgggagtgtgccgtggcatttagtcgtgagagtggg

SEQ ID NO: 325306 - DNA, 122 bp, Homo sapiens
tcgtaaatctgctctttgaaacctgggacagggagcaagacaggtgagggatgtttagggcggcacacccagaaatggaaggtgcacgcccagtgttcccactgggttagaggcagagtggt

SEQ ID NO: 325307 - DNA, 122 bp, Homo sapiens
gagctcgaaaggctttcgctagaatccgggagcaccaagccttcactgtgctccaggctgcgttttcccctcgccccgggctggctcaggagaggacgtggttcttgtaattttttttttaa

SEQ ID NO: 325308 - DNA, 122 bp, Homo sapiens
taaacttcacccttcagtttctcctaaggtcaccttcttacacaaacaaggtatgtttatcgtaactaagacactaacattaatacattattattaaactaaattttagaccttattcagat

SEQ ID NO: 325309 - DNA, 122 bp, Homo sapiens
tcttaaggcacacatgcttgatacacgtgtggccccaagcctgtgaacgggctgtgcacccgaggcctgctttgcccaaatcacatttcttcttccctcctacaccccttcctggggtatgc

SEQ ID NO: 325310 - DNA, 122 bp, Homo sapiens
cgcgggaacgtctgggaaggaaatctgaggccctgctctgacggtcataacaaaggccttcgagccaaccggcgtgttcaaattcaccacggcccttcccgcgctcccctccccggaaactt

SEQ ID NO: 325311 - DNA, 122 bp, Homo sapiens
gtaattcatgagtccccacaatgccactactgagaggcattcagaagggggggcaagacacggggtgttcctgctccgtggcctccatcccagccgatcccgctttgcagttgtgcacaatc

SEQ ID NO: 325312 - DNA, 122 bp, Homo sapiens
tatttgcagagggttttgccaccccttcccccagtccaatatgtagctatatcttttctgcgtgagtcagtattaatgctcctccagtctacagactaggcatcccaaagccttgtagtgga

SEQ ID NO: 325313 - DNA, 122 bp, Homo sapiens
aaatggagagtgagagatatttctaagtcaggatgccctagtggcagacccccaagtcctcgaacttcagggcagaactgcctgggtgggaactctcccatgtctccttgatttcactgcca

SEQ ID NO: 325314 - DNA, 122 bp, Homo sapiens
ctcgcagcatgcatatggcccagagctggaccaaagcccgggccatgggggtgtgcactgcgcttccggtcgccgccaccccttagctcccagctctctctgcggctcttcaggcgcgtccc

SEQ ID NO: 325315 - DNA, 122 bp, Homo sapiens
cagcgcacaatggccgccctcaaaggcgcgccgcccgcattgttcgggccggcgcccgcgcgtcctacctccgcgcgcgaattaacccccgtcaccccgccattgtcaccgcgcacttcggg

SEQ ID NO: 325316 - DNA, 122 bp, Homo sapiens
cctccaggtagggccgccgccaggtgaagccgcgccgcttcgcctcttcccggtctgtggcgacacctgctggccgtccgtggaaggacacaccctccgctcccaccacctgcttccattca

SEQ ID NO: 325317 - DNA, 122 bp, Homo sapiens
ggtgaccggagttgcaggttgccaatcttgctgaggggggctccaccggacgccggcctacgggtcgtaggcgtgtgtggggtgaagggggaagaggacgggagaggattggctgggaggaa

SEQ ID NO: 325318 - DNA, 122 bp, Homo sapiens
ctgtttgtgactgccggggagtgtgcggctgtgtgtgacaggtgcatttgtgtgtgacgccgcgtgggcggtggttaccctattggatttgtgtggtggtgggtgacaccgttccagtgtgg

SEQ ID NO: 325319 - DNA, 122 bp, Homo sapiens
ccacgagcacagcccacgcacaccctcccgtcccttccctttccccggataacgggcacccgcacactgcttcacgggtgggttttcctgtctggcgctgtaccttaggggtctgcatcagt

SEQ ID NO: 325320 - DNA, 122 bp, Homo sapiens
tcaacggcgatgggttctcagccttcgtctgacccaggacaggtgcatcgggcccaccaccgtgtgccacaaagatgcccaggaagccccgtggcccacgggaaagcgttttctatgaccgt

SEQ ID NO: 325321 - DNA, 122 bp, Homo sapiens
ctgggccacggtggcgcgcacagtgggggaggcgcctgcagcccccggccggtccctctgcgaccacacggagcccaagcactcgtagagcctcaccttggagaagagctcctgggccaggg

SEQ ID NO: 325322 - DNA, 122 bp, Homo sapiens
gtctggaatattctttagttcagattggaggctagcaatgactgccaggcttggccttgccgccactgggcgctatttatcactctccctatcttcctggagcttagccgagtcttcctgga

SEQ ID NO: 325323 - DNA, 122 bp, Homo sapiens
caggtgcatcccagcactgcggccgggggcaggaggccacccgcggggcattcggacccccgtgccccaaacacatcccgccgagcctcctgggaccaggcccctgagagccacggggctgt

SEQ ID NO: 325324 - DNA, 122 bp, Homo sapiens
gtcagctcagcgggctcccaagtgtgattacactaccacttcatagaattcaattaaacccgggacggggcatcggcgaatcactggaggagtatgaagttgagatgttttctgctttctcg

SEQ ID NO: 325325 - DNA, 122 bp, Homo sapiens
gcaatgagtagtaggagaggactggcttgtgctgggggtcctcagggccgtagtagcagtcggaggggctgctggtgttggagtcccccactggtgacatgttcatgtagtcacctgtgcaa

SEQ ID NO: 325326 - DNA, 122 bp, Homo sapiens
atcaagacagtttggggctgggcgccctggctcacgcctataatctttgggaccccagggcgggaggatcgtttgaggccatgagttttagaccactctgggtgacagggtgagatcctgtc

SEQ ID NO: 325327 - DNA, 122 bp, Homo sapiens
gaggaggagaggaggaaagattattaacaaactaatcttgcccattccgcgggcagtagtcgggggctggcctgctccgcgtcgcgccgggcgcgccccgccctaccgcgccccgcgcggcc

SEQ ID NO: 325328 - DNA, 122 bp, Homo sapiens
tggccccacagacccacctccccaactcagcactgtctgtctgtgcagcaggtgcaaggacgtgttgaactagctctctgcagcctccttggaggatgtgatcctatgggaggggtaggagt

SEQ ID NO: 325329 - DNA, 122 bp, Homo sapiens
gttgtattctcctcttttcccaattccaagtgtttgcatggggcttttgcatttagaatgcgattaaatgtttttgttaacttcgaagtcaaaggagaaacagagagagaagggatgggtct

SEQ ID NO: 325330 - DNA, 122 bp, Homo sapiens
acgggccgcttaccatcccctctgccctgcagagccagccgccaaggttgacctcagcttcggagccacctctggatgaactgcccccagcccccgccccattaaagacccggaagcctgac

SEQ ID NO: 325331 - DNA, 122 bp, Homo sapiens
aactccagccttgcccagggacttgctcgctccgctgggcgccgcaaaggcacacagatgcgagggaatcctgcggcctggatcctttggggatttgtaattcctcgctgctggttttctct

SEQ ID NO: 325332 - DNA, 122 bp, Homo sapiens
gctggatcagccttggtagtcgatgaagggctgaggtgctggacaggtcctgcagcctaccgaagccccaggtgccaccacacaggggtacttccacttagctcagagaccgtcctggggat

SEQ ID NO: 325333 - DNA, 122 bp, Homo sapiens
ctgccaagaggctcccgctggcctctggatgaccactaccactttccaggatttactgcccgccggcactcgccggctcgcggacagccgctcaccccgctgccgtacctgccccgacgttc

SEQ ID NO: 325334 - DNA, 122 bp, Homo sapiens
cctctgtcttctgccacgtgcacaagctggagaggtgcgcccgcgacaacctgggcttttcgcccccctcgagcccgggggtcgtgcgtggcgggcaggctcccaggcttggggcccggtgg

SEQ ID NO: 325335 - DNA, 122 bp, Homo sapiens
tctttttttttttttttaaatctcttgatcattattttgctatgagcccatttattctggcgtctttttcccttctccatttttcattgcctgcctatgcccaaaatgtgacataatctaaa

SEQ ID NO: 325336 - DNA, 122 bp, Homo sapiens
caccaccacccgccttgccccgcccttgccccgcccctagcttggccgcaccgcccgccccgccccgcccctcgccaggaagcaccgcccgccctgcccctcgcagggctgcaccgcccgcc

SEQ ID NO: 325337 - DNA, 122 bp, Homo sapiens
gttgaattctcacaacgctgtgagttaggcccacatatccccattctacagatgcggaaacggaggctccgagtggagatgggacttgttcaaggccattcagctggtataccgcagaactt

SEQ ID NO: 325338 - DNA, 122 bp, Homo sapiens
aaccatagaggatgatagggtcgctaagaattgggatttgattcgaggcacggtggaagccgcggaagggaacatgatttgatctgatttacctttaaaaattaacgacctcgccagatgcc

SEQ ID NO: 325339 - DNA, 122 bp, Homo sapiens
agggcacctggcagagggacaaggatgaggaggtggcctgggggtacaaatatcatagaacgttgggaatctgtgagaagtctgtagtaatgaaacctcagttactggggtagactctttcc

SEQ ID NO: 325340 - DNA, 122 bp, Homo sapiens
agacctgggcacgagcctgctgtggccacaggaaagaatgggccaggagcagcctttcagcgggtacccacgcgcgctgccgactcaccacgaacatgaacacggtgtagaagaggagggcc

SEQ ID NO: 325341 - DNA, 122 bp, Homo sapiens
cagaaaagagaaaacaagggagcaggaaaactacgctagcactagactgccggtcgcaagcgccgggtacacacgcagttaaacctcaatggaacgcccccgggacttctccggggcgtaaa

SEQ ID NO: 325342 - DNA, 122 bp, Homo sapiens
aaagatgattgaggtttggggtggggatcatagtgaacgttgcccgaatcaaagtgaagacggtagaggcaacaaaggcaggttgacataaagtcaagttgcaaggtaagcacagcgccagg

SEQ ID NO: 325343 - DNA, 122 bp, Homo sapiens
tttggtgagtcttgctttccacgtggacatgacttgcagtgaatcattgcaaagttcaaacggggcaaggaaattttccaggggtccacatcacctccactttgcttataggaactctttcc

SEQ ID NO: 325344 - DNA, 122 bp, Homo sapiens
cgacacttaactcgaggacagtgcgagccctttggctgggaggcccaggctgggagcagacgccgacccctccgttctctcaggtggaaaagaacgaaagccttctttctgctgaaataaga

SEQ ID NO: 325345 - DNA, 122 bp, Homo sapiens
gggcgcgtgaggccaccacccagagcctcttcctagaggagccggaagcatcgggagccgcggtacccgcccatcttccggccaggatgtgtggtcctggtgagcgattgtcctgtggcgtc

SEQ ID NO: 325346 - DNA, 122 bp, Homo sapiens
aaaaactaaatgggaaattattgtttatgtgattgaacatggagatctttcatgattcagcgatggctggattcagaggaccaaagattggtacaagcagtgacttttctccatctcttggt

SEQ ID NO: 325347 - DNA, 122 bp, Homo sapiens
gctggcctgtttttgccgcctgaggctcgcggggcccgtgggacctgcgaggccctgggccgtgtcctaccgcctggccccacacagggcaactcccttggcctgtcaacccaggcctagta

SEQ ID NO: 325348 - DNA, 122 bp, Homo sapiens
gggctcctacagggacaagcacaatccactctgccctccttgggatgcgggaacttcgtccgcctcagcctctccctgcctgtctcaggacttaagtcgcatggaccccaccacacactcca

SEQ ID NO: 325349 - DNA, 122 bp, Homo sapiens
tgaactcctgacctcaagtgatcgacccgccttggcctcccaaagtgctgggattacaggcgtgtgccaccgtgcctggcctgcttcaattcttttagaaaacatgcttttaaaaatacctc

SEQ ID NO: 325350 - DNA, 122 bp, Homo sapiens
gcagtgcagccccttagattacagagcacagcagcatggccagggctcttgtagagatgccggcacagagcagcacagtggagaggctccccctgccttcggggattggggaaggcttcgag

SEQ ID NO: 325351 - DNA, 122 bp, Homo sapiens
catcgctgcgtctgagactgggacccggaagtaaacaggccggacgtgacgcaagccgctcggcctagggatggtggctggccgggttgtcatggaaaccgctcaggagcagggagctggga

SEQ ID NO: 325352 - DNA, 122 bp, Homo sapiens
gtcttttctccccctccctgcacgacgcctcttggcagacatccgggagaacccgaaaggcgctcgttgcctggttggatgcagggtacaaactacgttacccagaaatctgtgcccagctc

SEQ ID NO: 325353 - DNA, 122 bp, Homo sapiens
gggggtccccagccccttgtcctcaaggggccctggggcctcggggctcagggtgagctccgtccgctcgtagcctggtggttcgaagccctggaggtggacaggcaggtagttttccccat

SEQ ID NO: 325354 - DNA, 122 bp, Homo sapiens
tgaagatgaaatgtggaggtggcaagacctgcggagtccccgaacccttggccctctctccgcacgcctgcgtttctgctcctgtgtgcttgtctgtctgtgacacaggccgcggccgcatg

SEQ ID NO: 325355 - DNA, 122 bp, Homo sapiens
tgatttctgtggtttatgtgcgtgtagtgtcaagctcactgaggagcgctgaggagacagcgctataaaaatgtgtataggaacacatacgttctcagatttctcactttagcattggtctt

SEQ ID NO: 325356 - DNA, 122 bp, Homo sapiens
ttctgagcctgcgcggtgggagttgctcaagcaggtggtagcgacttggcttccgggcagcgggtaaaggtgagtctggggcatgggttcagtgggcaagtctagggcagcagagttgacta

SEQ ID NO: 325357 - DNA, 122 bp, Homo sapiens
cccatcaattcatttaaaatttagcaaacatttcttgattgccagctgtttaccaagcagcgtactagacactgggggtacaagttgagtacgaatactccgtacccttaaagactcaatta

SEQ ID NO: 325358 - DNA, 122 bp, Homo sapiens
ctctgtgcaaaccggaaataggcgtctgtgggctgcaacctcctgggcatggcccagggacgcgtgctgggctaatgtcagccccagtcactccccggccaggcatccctctgtggacagta

SEQ ID NO: 325359 - DNA, 122 bp, Homo sapiens
aaaattgtcaagcccccgaactgaaggttacgagcggcccgtcagcagcccacatgtaaccgaactgtcgtgtttcatggctttttgccactccagctgtcaatcaaagcccggaatgtcaa

SEQ ID NO: 325360 - DNA, 122 bp, Homo sapiens
aaaaggagctcaggaactgaggttgtggagcccccgttcttgggtccccaggcaccttggcggtattgaggcaggtccgaccctccctgggggtcgctccacttctcagtcgggtttctgaa

SEQ ID NO: 325361 - DNA, 122 bp, Homo sapiens
ggactagggtgctcctgttggatggtgaggtcactccatatgccaatacaaacaacaatgcggtggattgcaaccaagtgcagctcccccagtcggacagctctctacagagcctagagaca

SEQ ID NO: 325362 - DNA, 122 bp, Homo sapiens
gtgatccgcctgcctcggcctcccaaagtgctgggattacaggcatgagtcaccacggaacgtaatttttaacaatagccttcggtaatccaatttagttgttcccagtgaatttctcctac

SEQ ID NO: 325363 - DNA, 122 bp, Homo sapiens
tggggcacccagagtgctgcctccttttatccctgttgagcccaggacaccggaaaagggcgtctctccactatctcctttcccctgctgatgggccaggggccatgggcaatttgtagaac

SEQ ID NO: 325364 - DNA, 122 bp, Homo sapiens
ccgcgcgtctgtcccctgcccgtccccgcagagctcggggggtccccgcggctcagccctcgaccccggacagctcccaggagtcccggccgcagctcacctgggacgatccggcccgcaag

SEQ ID NO: 325365 - DNA, 122 bp, Homo sapiens
cgagcctcaagtaacgcttcccttagagacctagattctcacaaggaagcaggtgatagacggtgcatcccaaccaatcaccagccagcggagcgcaataagaaggcagttaaccaatcgga

SEQ ID NO: 325366 - DNA, 122 bp, Homo sapiens
aatgaagaacaagaggtcacgttacaaaattttaacgagccgctgcccgcttctagggggcgcagcgcactatacaaaattctccaattccacatggctcccggaatccttatttcgcgcta

SEQ ID NO: 325367 - DNA, 122 bp, Homo sapiens
agggaaggcagggcggggggaagagaggggaagaccggggagagggcgcctcccacaacccgagccccgggagccgccccggatcccagccccgccctggaccgcccacagcgcggtggggc

SEQ ID NO: 325368 - DNA, 122 bp, Homo sapiens
gtttatctgaactcctacgaactgtacaagtaggaaaaacgtgtacacagcaagcacattcgctcaaaccaaggggaccaacatccttcccgtcgcctccaacactcccagcagaagcaacc

SEQ ID NO: 325369 - DNA, 122 bp, Homo sapiens
tggggaggactgtggggctgtggattcgtggcgttttctgttctcgatgcaactggtgctcgtgggggcaccgggtcctcttcacctcaactgcaaacactccagagacgttctgaaatgaa

SEQ ID NO: 325370 - DNA, 122 bp, Homo sapiens
agaggccccgggcaagtcaggggccaccctcggccatcagcaggcacagtcccgggccgacgccccagcccgactgtagcctcaggaccggccagaggagcgtccaggtgtcggtcacctcg

SEQ ID NO: 325371 - DNA, 122 bp, Homo sapiens
cctgccctgcagcccccggcccgggacgctggtcctgcccggggccgcgcgtgggacccgcgatggtcgcccctgctgtgacatgacccgacataaccgtgtattttacatgaattaatcac

SEQ ID NO: 325372 - DNA, 122 bp, Homo sapiens
cagaacctcagaagtctttgcatttcccagccccatatccaggctccactcaacgtacctcgtcctgcaggatgagatctatgcccccatcagaccacttccatgatatttccagtttctac

SEQ ID NO: 325373 - DNA, 122 bp, Homo sapiens
ggaggggcactttcaccagccggcttcagagacttgggacacagggctgggggagacacacggcccgccgggaaggcatggggcgcgggggttactcacggtggggtccatcttgctgatgg

SEQ ID NO: 325374 - DNA, 122 bp, Homo sapiens
ttgctgcttactctccattagagtacaaacattgtgatgttatatgctagtttgtagattcgagatgcgaattatttctgtgcaaagattatggttttattgtctccagcttaccttgctta

SEQ ID NO: 325375 - DNA, 122 bp, Homo sapiens
aacggtgcaatcggaggggcagataaacagcgcgatcggaggggttgataaaggtgtgatcggaggggctgataaacgttgcacaatgttgcctgtttttctacattgtcgctgtttctcag

SEQ ID NO: 325376 - DNA, 122 bp, Homo sapiens
tcatctctgggtcggaaccattgtctctgtatttttatctgtgccgtgagaatacttagccgatcagcctctttgctaaggcttcagaaagatgtgtggatgaggactttggagagacactg

SEQ ID NO: 325377 - DNA, 122 bp, Homo sapiens
cacttgcccccctggctcttgggatccccatgtcaggggggcggggcgcccccggcgctgcgtggaataaagagccagccagccgcacttgcccccctggctctgtggacccccatggcagg

SEQ ID NO: 325378 - DNA, 122 bp, Homo sapiens
agtcgccttgcagtggtgattcccaggtggaaccctcaggcagctgtgcgctgcagcctccggggccatgggtgtgtggctctgggagctgccgttccctccacaccccttagggaagtcct

SEQ ID NO: 325379 - DNA, 122 bp, Homo sapiens
tagagggcaagggcgggggatgctaatcatcaacagagctgtcccgccagaaatgcacagcgtcccactgaaaacacagctctgaggaacatctagccgtggctgcttcttggaggaacgtc

SEQ ID NO: 325380 - DNA, 122 bp, Homo sapiens
tgttgcccaggctggagcgcagtaactattcacaggcgcaatcatggcaaaccatagccccgacctcttgggctcacgtgatgctcccaccccagcctcctgagtagctggattaggggcac

SEQ ID NO: 325381 - DNA, 122 bp, Homo sapiens
gacacccgtacccccacctttagggagccacacagctctggcctggctccagaaggtgcacgtgggggcggctccccgggggaactgcgcggaggcttgtgctcctcttggggggctgtgct

SEQ ID NO: 325382 - DNA, 122 bp, Homo sapiens
ccgctttcatatttatttattctaagagtgaagcagctgcgataattatgctgtcagcctcgggaagctaatgaggagtcaccagagtggaaggttttgcatttgtgagattgctgaaggag

SEQ ID NO: 325383 - DNA, 122 bp, Homo sapiens
agcgaggcggggatagtcaaggaagtgaccgtgtcctggagacgcggcaaccgtggtgaccgcagtcaacacagtaagccccagcattcgcattgtaattgagctcattcaagctgagcgct

SEQ ID NO: 325384 - DNA, 122 bp, Homo sapiens
acgctcctgactgtgtgaaaccctttgtcgcggcaccggctccgcgagggacccagggcccggggcttggcaagggcccgagacatttcttggaatggtttcgtgttcatcactgacactcg

SEQ ID NO: 325385 - DNA, 122 bp, Homo sapiens
agaatgcacaaccccgtccagagcgcaccacctcgatcctcggggggaaacggatcaccccggctgtcctccgagctcgggatcagccaaagtcccactatatttagcttcggctaataaaa

SEQ ID NO: 325386 - DNA, 122 bp, Homo sapiens
agcttgatttcagctcacattcaaatggaatgtttgcttctgcaaataacacaagcttaacgcaaagagactaaaatcacagtgtatttttctttctaatttggttatttcctttactaaca

SEQ ID NO: 325387 - DNA, 122 bp, Homo sapiens
ctccttgagatgggtgcctgggatcccccttactgcctcaagctcccatggacctgtgggcggggagttaaatccctgttccatctcgcctgttcccagagtttgaggactttcaccctgtc

SEQ ID NO: 325388 - DNA, 122 bp, Homo sapiens
aactgaggaggtgaaggaatttattgagaagatcataagtaattctagggggattaaaaccgaggcaatctgattccagagccctagagagctttcccaccaagtgtgtaggactttgtcct

SEQ ID NO: 325389 - DNA, 122 bp, Homo sapiens
ccggtcggctctggtcaggcctaggagatgcaggtaggacctctttcatgtgaggccctgcgagccagtctttggagtctgcacctgatcctgggcgtggcttattttcggcagcaggtgga

SEQ ID NO: 325390 - DNA, 122 bp, Homo sapiens
gcatcatcccatcgggtttcctcttccagagactcattttcagcccttaggggaagacagcggggaggagcccgttttcggtcccagtgcagagacccggccggtcccgcggggcgcagagg

SEQ ID NO: 325391 - DNA, 122 bp, Homo sapiens
ctccttgactcgcatcaccgtcctggaggctgtggtgtgcttcttctctgtctggtccatcgttggcctctcaggattccacacctacttgatcagctccaaccagacaacaaatgaggacg

SEQ ID NO: 325392 - DNA, 122 bp, Homo sapiens
cctccagcgcggctcttcccaacctcctgatcctgtcccctgcctgggtccccagccgcccgcccgtccctatattatagcaacgccagaaatgtggtggtggtggtcgccacgttagggtc

SEQ ID NO: 325393 - DNA, 122 bp, Homo sapiens
catggggtgtgaccagcctgtgactctctcgtcccatcccctccacaggcatctcgtccccggtgaagaagacagagatggacaagtcaccattcaacagcccgtccccccaggactctccc

SEQ ID NO: 325394 - DNA, 122 bp, Homo sapiens
tgccgcggtcggtgggtgcaggccacgtggtggcgaaggtgcgcgcggtggacgccgattcgggctacaatgcgtggctttcgtatgaattgcagctggcggcggtcggcgcgcgcatcccg

SEQ ID NO: 325395 - DNA, 122 bp, Homo sapiens
acgacaccaacagcgagtacgagtcggggtcggagtcggagccggacctcagcgaggacgcggactcgccctggctgctcagcaacctggtgagccgcatgatctccgagggctcctcgccc

SEQ ID NO: 325396 - DNA, 122 bp, Homo sapiens
ctgttggcagagctgctgcctgtgctctcgggctcctgctttgcatgcccacccaactgacgtatccagagctaactagatcaggaactttatctacggtaactgtgtgtttgttatgggct

SEQ ID NO: 325397 - DNA, 122 bp, Homo sapiens
cctgggcattaatctattcatgatggatccgccttcgtgacccaaacacctgttaggccccgcctccagcactgggatcaaatttcaacacgaggtttgggagggcaaatagccaaaccata

SEQ ID NO: 325398 - DNA, 122 bp, Homo sapiens
ccccaagatgtgtgtcaacaagcactgcatgtttattttggccaacaggctaaagaaccacggagaaagcaaaagggccgctggaaataacactgatacactcaactgtagtgcaattcgct

SEQ ID NO: 325399 - DNA, 122 bp, Homo sapiens
gcctgtggcacgacacgaagccccagtgccatttggcatggcctagctgcctgcctccgacgctgtcccgccctccggaaccttcctgttacagggtttccaggaaaaaaaaagttgtattt

SEQ ID NO: 325400 - DNA, 122 bp, Homo sapiens
ccgaaagcggctgcctttccgccaggctttagcatttcggagattaaaaacaaacagcggcgacacttaatgttcacgcggtggaaacagcagcagcggaaggtacgcgagaggcgggggct

SEQ ID NO: 325401 - DNA, 122 bp, Homo sapiens
tcttttgcctcatggtgtgaatttatactgttcctgttttataaataccagaaggagcttcgtaggtaacttttaccatgtgttgaaggtagcattggttttgaaaacctgatttcctcagt

SEQ ID NO: 325402 - DNA, 122 bp, Homo sapiens
gaggaggctggctctggtcttcgatgcacaggagtggccgttatggaacgcaggtaaggacgcttctcaatgtgggataattctttttctgggccagctggttaatccggggctgggagaaa

SEQ ID NO: 325403 - DNA, 122 bp, Homo sapiens
cagtcaaattggatttagggcctatcctaatggcctcgtttcaatttaatcatttttaaacgctgtgtcttcagatagtcacattctgaggtactcaggcttccacagatgaattttggagg

SEQ ID NO: 325404 - DNA, 122 bp, Homo sapiens
acaatcctgggaggtgagtcctaacattacccccattttacagatgaggaaactgaggcacgagaagctaaacagcctgtccaaagtcatactgctagaaagtctcagaatcaggcttcaaa

SEQ ID NO: 325405 - DNA, 122 bp, Homo sapiens
ggcttgacctttgaaaaatcccaaaaacttcgctgccccgggaactcggcaagcaagtcacggtggacgcctcagatcgcagagaaattcagagacgccaacttaaggtatcaatcaggtcc

SEQ ID NO: 325406 - DNA, 122 bp, Homo sapiens
gcggcccctcctcggccggcgaagcccccgcggcgccgccagcagcgccggcgccggggccgccccggtactggaagctggagtacatgcagatctcccgctcattccgcgggaaggaccag

SEQ ID NO: 325407 - DNA, 122 bp, Homo sapiens
cccagaaccagtgtggttaagcagcttggccagggtctcagggccagtaaggagcagggccgggactggaacatggagggtctgaccagaggcccaggtgcctctcccctgccaggctgcct

SEQ ID NO: 325408 - DNA, 122 bp, Homo sapiens
tgaggaggggatgggggtgtgagagcaagtcttagccatgcctcatccccagttgcggcccgctccaagacatatgcctctcctcctggcgcagtcgtgtctggcctggtctcggttcccct

SEQ ID NO: 325409 - DNA, 122 bp, Homo sapiens
ggagctactcgtgtttgatggcttcccgagttgccaatgtcctggtctattctgagtgaccgccttatttacaatatagggctccccagcccgtgtctgcccaaaggggtgccctctcccaa

SEQ ID NO: 325410 - DNA, 122 bp, Homo sapiens
cacctctttccttcctagacttcaagaactagtgcgcagggggaacagccagtacccaggcgccaagtacatcatccgagacaatggtgatcgcattgacttgcgtttccaccccaagccca

SEQ ID NO: 325411 - DNA, 122 bp, Homo sapiens
gacaaggaagccatggctaaattgctaaactctcagtcatctttttatgcctcttcccaccgttaggcagcccacgaagagacagagccattttcttcttccctgaagctcttttatgccct

SEQ ID NO: 325412 - DNA, 122 bp, Homo sapiens
ttatcctgtgcttaggagctagacggatcggcctgaattccactctgtcctgtgacttcccgcttagagccctccatggttcccagccacccaggagaaatgccagcttcccacccgggtgt

SEQ ID NO: 325413 - DNA, 122 bp, Homo sapiens
ttttaagactctggccccggcgttgcagaggaggcggcacctgagcctccagccccgccccgtctgcccgcgcagggccttctggggcttgtagtcctaaaacgactaggtctccccgcaat

SEQ ID NO: 325414 - DNA, 122 bp, Homo sapiens
gcgttcatctgcgctacggaaggacacgtctgaattcctccacggagcacactctgcactcggtttatgtatcagaaaaaggaaatgccctcgtgccctgactcctggccttcttggagccc

SEQ ID NO: 325415 - DNA, 122 bp, Homo sapiens
ggcggtagcgggagccggagatggagtcgagactgagtccatggttcggggtcatcgccccgtatctccagcgccgggagcctcgggactgcggccgtgtctgtggcagctggagacagagc

SEQ ID NO: 325416 - DNA, 122 bp, Homo sapiens
tacaactgcctattaggtacagtaacatgctgtacaggtttgtagcttaggagtaacaggcgatacatagcccagataagtagtaggctataacatccaagtttgtgtaagtgtattattct

SEQ ID NO: 325417 - DNA, 122 bp, Homo sapiens
tagtccccgtaccgccgggaacctcgctcgccttcccctcgagccccccgctgggtcgcgcggcgccagccgctcaacggtgcttcagagcagcctcctccacaacattcccctcggcccgg

SEQ ID NO: 325418 - DNA, 122 bp, Homo sapiens
acaccactacggggtaactgacattgtggacttcctgagtagaaagcagttaagcacctgcggtacatcaaagattagtcttaagaccatatgagtaaacaagctacctagataacttcccc

SEQ ID NO: 325419 - DNA, 122 bp, Homo sapiens
acatttttgtacattgctgtatctgaaaaaaaccctacaagattcatgaaactggacgaccgtctttataatactcctagtgataaaacaagtaaggatggctggtttgcagtcatctgagc

SEQ ID NO: 325420 - DNA, 122 bp, Homo sapiens
cggcgtgccggcagccacacggggagcaaggcgcaggcagggtttggcccagcgccgtcccgctcagaccctggaagccttgtgcctgtgactctgctttcccaagtgacacagagtgccat

SEQ ID NO: 325421 - DNA, 122 bp, Homo sapiens
ccagtgagcgttacagttctgaaagatggtgcgtccacattttgatccttcagatgtgtccggagtttcttccttctggtgggttcgtggtcttgcggactgcaagagtaaagccgcagacc

SEQ ID NO: 325422 - DNA, 122 bp, Homo sapiens
cgggagacacccgaagtcatccaccgccagcgccttcccggcggcctcctcgggcgacagcgctccgggagccccactcgcacaagtgttgcttccaattaattgcctgggcgggggaagga

SEQ ID NO: 325423 - DNA, 122 bp, Homo sapiens
gggggctccggctccggagggcgccctcccgcagtcgcacccgctttccctcacacacaccggccgcccggcccacaagccaagaagctgcctgcttggcccacaagccaagaagtcggcga

SEQ ID NO: 325424 - DNA, 122 bp, Homo sapiens
cgctcgcgctccccgtgttgctctcaaggacgaggtgaaatccctttgctggtcatgaggcggcttcagagacaaacaacacaatgcgagtgcaaataacaaaaggcaaaaagacagtagga

SEQ ID NO: 325425 - DNA, 122 bp, Homo sapiens
tggagcatctgccggcaccgcccaggacccgcccaggacccgccccgccccctgcggccccgccccccgcatgctgaatgccatataggcgagtgacgtcaggccgtttgttgtcattggcg

SEQ ID NO: 325426 - DNA, 122 bp, Homo sapiens
agttgctggccttccacttgtcttcaggagctgaaacacatggcatttgaaaaaaactggcgaacagaggaaactcttgcagcctcgcagccgccctggtccagtgccaacggcaggagcac

SEQ ID NO: 325427 - DNA, 122 bp, Homo sapiens
gtcccttagggtccatttccaatcatttgcttgaaacggtatatccctagttgaacagaacgctgggactgccactcccacaaatcaccaacaggttaaggaggatggtgggagtatcccac

SEQ ID NO: 325428 - DNA, 122 bp, Homo sapiens
tcaccttggctttacagcaggaagtgccagggtggacctgacaaggtggctcagtggagtcgggtcgatttgcagggtccgaagtcaagcaaagcccaaacggccccagccgaatgtttccc

SEQ ID NO: 325429 - DNA, 122 bp, Homo sapiens
cggagcaccccacgctgttcccacagatgatccaaaaggcacaggaaaatctctgttgtccgcagagacgtcagccgccacgctaagggcgtcttgtggggtttctgcggtgagggcattgc

SEQ ID NO: 325430 - DNA, 122 bp, Homo sapiens
aagctaattttccacatttaaatggcataatataatttagggccaatgtaggcctaaaaacgttaggcttgacatttttccaagcagccttggtttgttttactggacaatgattacttgga

SEQ ID NO: 325431 - DNA, 122 bp, Homo sapiens
aggctgggcctcctggagcagaggacacagagcagtgaagtcgagacctggaaactccggcggcagcgagagacaaaggcccagccacatcccggaagccgccctgtccgctccagctttgt

SEQ ID NO: 325432 - DNA, 122 bp, Homo sapiens
agtccggccagcggacaagagggcagctggtagcagggtgggatgcccgtggcatagggccgagcccccgctaggcacgcgggagcagcaaggcttccggaagcgcagggagcgctggactg

SEQ ID NO: 325433 - DNA, 122 bp, Homo sapiens
aatgccactcatttgcataagaaacactgccacggagaccacacaaggggctttcccccccgggactggggatgcatgtcatgaccccaaccagcaggagagtaatccaccacacggaacgc

SEQ ID NO: 325434 - DNA, 122 bp, Homo sapiens
gactggttaggctgggaacccgcgaagtctgttggaaagtgcctgtcacttgccaatggacggcgccagctgccccttgttatccggcgatcagggactggggacggggcccgagcgcccct

SEQ ID NO: 325435 - DNA, 122 bp, Homo sapiens
cacgcataggtatgaacagcccctcatcatcccaggtagaggatgaacaactcatcatcccgggtagaggcaggtaagtgtgtccagcgtccctcagggaatgctcttctgatgccaaaccc

SEQ ID NO: 325436 - DNA, 122 bp, Homo sapiens
ccagttccttgtcctacatttcactgatcacatgaccttgtagaagttgctcaaattctgcgtgctgcctttgaagtaaacagaggagccaaacaagttgaacatacagttgtttgagggaa

SEQ ID NO: 325437 - DNA, 122 bp, Homo sapiens
tggttctgcgccaccttgtgaacttgctctcacagcgcctagttttttctctctgtgtgtcggcatttatgcaagtattatgtatctttggtttgtgctttgcctcggagtgctctcgagag

SEQ ID NO: 325438 - DNA, 122 bp, Homo sapiens
ccaaccgacacctaaaatgccagggacacgtagcactggagcttgctgatggaggcccaccggaaccggaatccgggtttctgccaacagcccgcccactcctccgtcctattggttcctta

SEQ ID NO: 325439 - DNA, 122 bp, Homo sapiens
gaggagcgcgcagactcgcgcacctggccggggggcgggatttctaggggctgcggagctcgcgtggcaaagtgaaattactaccgggagtgcgtgcgagcgagcaagcgagcgatcggcgg

SEQ ID NO: 325440 - DNA, 122 bp, Homo sapiens
aaggcatcagatgcttctccaacagcctgaggctcaggctcctgggcagacagttcccttcgtgtaccaggaggacgaaatgtttaaacggataaacattacaagcgccagctcctcaagcc

SEQ ID NO: 325441 - DNA, 122 bp, Homo sapiens
aggaacccggaggagcgggaggagggcgcgcgcggcgagacacccccaccccggcccccgcgcgcccccgccccggtccccgcccgggtccccgccttgtcctgggctctggcgcctgcgcc

SEQ ID NO: 325442 - DNA, 122 bp, Homo sapiens
gcgcccagtacacagggcttgagctcattacacgccccagttctgttcctggggtggtggcgtgaaccccactgcctttgcctttaattgcactgaaaatatccagcaccgctgatatcaag

SEQ ID NO: 325443 - DNA, 122 bp, Homo sapiens
agttaaatttaacatctttttatgtgtaacacttgactttggaagcaaaaatgaactttgcggagagagagggctctaagagatactgcattcaaacgaaacatgtggccattctctgtgcg

SEQ ID NO: 325444 - DNA, 122 bp, Homo sapiens
tccaaactaataagtgccactatcaggcagttggaagctctgggaggctgcaggctttgccgctcggccttaattgatattgaacgagctgctggtagacgggaacagggccgctgctggat

SEQ ID NO: 325445 - DNA, 122 bp, Homo sapiens
ctcggggacagcttcgccatttttaagtgttttcacgaggggttgacactgtgctgtcagcgacatcgcgagcccagaagtgaataactgacacaacaatgattaaagtttgtgagcagctt

SEQ ID NO: 325446 - DNA, 122 bp, Homo sapiens
tgtccttcctattgtttagctcggctccggagttcacgggagcctcgtgaaatgtggagacgtcctgcaaagtttcttgaacacttcatgtgcgtggtaggaagtcgaggaaaaaggtttac

SEQ ID NO: 325447 - DNA, 122 bp, Homo sapiens
ttgatgggagccagggcctacttggcttgctgcccccaaggggaacgtggccctagataccgggggaggccccgccgcagcctcaagtgactgactcaggcccccaggtttagcacagctgc

SEQ ID NO: 325448 - DNA, 122 bp, Homo sapiens
ggcctgggtcccgacctctggtctaggtggtacactgtaacctctcctctccctaggctccgtcatcatccggtgtccctggggacagggggtgggagttgggtctctttctctgtctgtgt

SEQ ID NO: 325449 - DNA, 122 bp, Homo sapiens
caaatgcagcaatcaagataaagaatatttcatgcaatattggccaggcgcggtggctcacgcctataatcccagcactttgggagcccaaggtgggtggatcacttgaggtgggaagttga

SEQ ID NO: 325450 - DNA, 122 bp, Homo sapiens
accctccatctgaatgggaaacagctccttgcacttccggtggcactccccgaatgtgcccgggttgggcaggcagccgcaggccccatcctcggcggcccctgaggcgctggcagttgcag

SEQ ID NO: 325451 - DNA, 122 bp, Homo sapiens
acactatttcacatattcacaggtatatagagagccaggaggaaggagtgaactctggctcgttctcttgtataaaaaagcaccagtgtcctggactggacacccactgctataaaagatgc

SEQ ID NO: 325452 - DNA, 122 bp, Homo sapiens
agcctcccgccaagcaccgtcccccatccagccccctgtgggaggagccgtgggaggggtcgcctcttgcccggcgcgtgcggcagtagcgtctctgcgttcggccccgccctacccagggc

SEQ ID NO: 325453 - DNA, 122 bp, Homo sapiens
cttgcttgctcttccaagagcaaaaataaccattctaaatagtggtcgttagatggccaacgtaaagtgcctagtgcagtcaccaccatctaaaacaccagtccaaactcctgacagtctct

SEQ ID NO: 325454 - DNA, 122 bp, Homo sapiens
accgactcaaggtgtgtgtgtgtgcgcgggctggcgctgtgggccgactttctagcaggccgtgggagcagcctcagatctggcggagtaagcaggccaccaaaatacccagcgtacgtctg

SEQ ID NO: 325455 - DNA, 122 bp, Homo sapiens
ccgaaagcgcgggcgcttcccacaatgccccgcttcttccctgcgccgcggccgcgcgtgcggctgcctaagcgttcccggccctgtctggtgcattccccctgctgctgcccggtcggccg

SEQ ID NO: 325456 - DNA, 122 bp, Homo sapiens
accaaacaaaccaaggcaggcagaggaaaggagtttgcaaagctaacggcaaaacgaatccgtccagaaagacaaatgtcaaaagagtcagcggttcaggaggtgggtcttgaacctcccat

SEQ ID NO: 325457 - DNA, 122 bp, Homo sapiens
gggtggggcctccgcccaagccacctcgaagtgtggcctgggacatgtggccatcctctccgggccatggcccctagtctgtggtgagaccaacaggctgggctaggctcccctgtcccccg

SEQ ID NO: 325458 - DNA, 122 bp, Homo sapiens
atgaccctcatagcacgcaaaacaggatggggaatttcccctcttctttctgtgacaatgcgcatcattcctgcattagtttttaacaccagactacctacattcatcatttccctcatttt

SEQ ID NO: 325459 - DNA, 122 bp, Homo sapiens
ttcagaatatttagcagtattttcctggttctttcaagtctcttggctgctggagtacatcgctagtccttgatccttttattgcttagttccattcacaattacaagtcagcaaatgtttc

SEQ ID NO: 325460 - DNA, 122 bp, Homo sapiens
tttcccccgcgcggcactttctcccagccccggccccgacggagggggcccgccccggcgcgcgacgccctgagttgatgactgcaactgtaactgggacgggccccccgtgcccccatagt

SEQ ID NO: 325461 - DNA, 122 bp, Homo sapiens
ggcacaaatttcttacagagcaaaacacagccaagagcaagaatctaggggaaaagggctcgcatactaagaccaaacactggaggccagtattcccaagcttccagaatccagcatgcaag

SEQ ID NO: 325462 - DNA, 122 bp, Homo sapiens
ggtctttgcagattaaggagccagctgagatcatcctgcattcagggtgggccatcagtccggtggccggtgtcctagtcagaggcgtgaagaggagggcggaggccggaactatccatcgg

SEQ ID NO: 325463 - DNA, 122 bp, Homo sapiens
cattaagtgtctgttgaatgaacggtggatgacagcccttgccatagttacctggccaggcgtgacatccaggaaggctgtgggaagggcttgtttccccggggcaggcccccctcccatgt

SEQ ID NO: 325464 - DNA, 122 bp, Homo sapiens
ggaggacggcgctgggctcccagcaggcgccccattttcttggcttgtcgcaagagcagccggaggcggcggcggcagggagggagcgggtggggagtgggagaggccgcccgcctccccgt

SEQ ID NO: 325465 - DNA, 122 bp, Homo sapiens
gcgggaggtgacaggaccccgtagagggggaggtgaagaaacccacagagcccagggtgacgggacccacaaaggaaggtaaaaggtcccacagaggaaggtggagttccaccactcaccac

SEQ ID NO: 325466 - DNA, 122 bp, Homo sapiens
tccaatctgacgctctaaggttctacgaatagggttaaagagaatagggaccagagagtgcgtccccatcctagcaactgttgctagacgagggccatctcccggtaggagcggaaacacct

SEQ ID NO: 325467 - DNA, 122 bp, Homo sapiens
gacttattgattctgtaagtacagcaggcctcttcaaagaatgagctcttctttcacactcgtaccacatcaacttaaagtcatgaaacagatgtgactgattatggctttatggtcttaaa

SEQ ID NO: 325468 - DNA, 122 bp, Homo sapiens
gtgattttccccaaacatacccattggattacatatttgacctgcctttacctcttgagtcgtggtgttttagaaagaaactgttcacttcataggtcaaaactatgtcaaagagagacatg

SEQ ID NO: 325469 - DNA, 122 bp, Homo sapiens
gacgggctcgcatcttcagccctggtggcagggagcggcgtttcttccgcacaggccttgcgcctgctaggaagtggcacatcttcctgctcagggcaccaaggtggttcagaaacgttaag

SEQ ID NO: 325470 - DNA, 122 bp, Homo sapiens
caggcttccttcctcctacccccttcccccaatcttattcatctcacctctccagtaggtcgtggactcatgcattttataattaaagaaggccaaggctcaggggttaagtgacttactgg

SEQ ID NO: 325471 - DNA, 122 bp, Homo sapiens
cctaagaaataccattcttacttttttttttttttttgagagagagagagagagagcgaacgggttcgaaccactgacctccaaacttggaagcaagcacaccacccgactgcgacacacga

SEQ ID NO: 325472 - DNA, 122 bp, Homo sapiens
agaacatctgtgtttttgcttggagggactcactcctttcctacttttagtccgtgcttacggggtggtgtttactttgcttcaggattcaggattgtgttcccctagttacatggttggtt

SEQ ID NO: 325473 - DNA, 122 bp, Homo sapiens
tgcacaggccccaagtccctgaaacttttccttttttatttattctctaaccaaaaatgacgtctatattacagagcttataagctgtggctcctctagccaatacagcttggtagaagcat

SEQ ID NO: 325474 - DNA, 122 bp, Homo sapiens
aggagtttgagaccagcctgaccaacatggagaaaccccatctctacaaaattagctgggcgtggtggtgcattcctgtaatcgctgaggcaggagaattgcttgaaccagggaggcgaggt

SEQ ID NO: 325475 - DNA, 122 bp, Homo sapiens
atccctgcagccgtgagccctgggaattctcaataggaacctccagcttgaaatatcccccgctctatacgacaccaggagcaaaggtctagaacagcccctcaaggggcggtgggcgtttc

SEQ ID NO: 325476 - DNA, 122 bp, Homo sapiens
gtggtttgttattcgaaatggcagcagtctaaaaagatgctttcctgtgctgtcttctcacgagttcaaggctttctgtgttccttcattcatatgtgatgatgactgcctctcctgccatg

SEQ ID NO: 325477 - DNA, 122 bp, Homo sapiens
cccggcgctgtcacttataggcaccagcgagcagccggtgcggcgggctagagagaccgtcggcacccgcccagcgcagcggcccctgtcgccgagggaaagaagtatcgcgtaggaagagg

SEQ ID NO: 325478 - DNA, 122 bp, Homo sapiens
aacgggaaaataccaatttagctctgtttgctgcagcttcgcagctttaccaggagagggcgccgacggacctgacttttgccttgcctcgcagtagagcccaactagagggtaaacagcag

SEQ ID NO: 325479 - DNA, 122 bp, Homo sapiens
tgttcaaaatcgtcctcaggcagggcccatccttccaccaaagtattgtggaaggctctacgagtaactgttcaaactcaagtgatccaattttgctactatggtttataagcagacagaat

SEQ ID NO: 325480 - DNA, 122 bp, Homo sapiens
tttggccggggggtgatctttgttaggagcctgtttctcatcttggggtctccacttgatcggaaccccctccccggcccggaacggcggggaccccgtcctccgcagacaataccaactct

SEQ ID NO: 325481 - DNA, 122 bp, Homo sapiens
gctccgggaaccaaggcgtccgcgcgcgcacgcagactcgcccgcgcgccgcgtgccccgcgctgcccaggtcggtacccgcgcttcggacaccctgctcccagggcgctcctcgcttccag

SEQ ID NO: 325482 - DNA, 122 bp, Homo sapiens
ggtccctggggaaagggggggggggaaggggaccagtgaaaagggggactgtcagtcacccgagtctacatggagttgcagaggacagcctgtgtctgccttagtttctccatcctgcagga

SEQ ID NO: 325483 - DNA, 122 bp, Homo sapiens
atgtcacctatgcccagaaactgggccatgccctttgtgaggacctgcccacaacgtcgtcgttcccgcagggtcccctgggaaccgggctgcccgagacccggccctgccggggttccctg

SEQ ID NO: 325484 - DNA, 122 bp, Homo sapiens
tgttcccagtacagctttgagccacaaaaattaattacatcacctaggaaattagccctgcgttttgcatccaaaggtcaatgttcagactgagaaatggtttagtgcttccaaacacaggg

SEQ ID NO: 325485 - DNA, 122 bp, Homo sapiens
aaggggtgacagatggcacctggaaaatcgggtcactcccacccgaatactgcgcttttccgaggggcttaaaaaacggcgcaacagaagattatatccctcacctggctcagagggtccta

SEQ ID NO: 325486 - DNA, 122 bp, Homo sapiens
acatctgtcctagtgcttttgagtgttaatctaaactcatacatcaacaaacattctagccggacaagtaggtggctactcagtccattaagaaacttaattactagtttctagtagcctta

SEQ ID NO: 325487 - DNA, 122 bp, Homo sapiens
tgcatctttcttttcgagtccattttaacctggttaaggaagattccaacaaaaaatccacggtgccacagcaagaagatgtcaggctgtgtccctctacagggaagcgctttctgttgtct

SEQ ID NO: 325488 - DNA, 122 bp, Homo sapiens
agggagcggtggcctaagccccgaagcagcaggtgccggtcagatggagaggagggaggccgtctgtccagcctggctgctctgacaagggccctggcagcgagagaggccacccgccatcc

SEQ ID NO: 325489 - DNA, 122 bp, Homo sapiens
cagcagcgggtgggggtgccatgcacacccttacctggcctctcatagcatggacctcttcgggcccggtttttcaggtgtgcatgtgtctggcaggcacggcggtgtgaatccagtggcct

SEQ ID NO: 325490 - DNA, 122 bp, Homo sapiens
aaagttttaacgtcacataatgtaagtattgtgtatcatcgtttttaagctctacaaatacgtgtgattcacaaaggtgagcgtaatcatttcttctggaatttcttagtcgttgcaataat

SEQ ID NO: 325491 - DNA, 122 bp, Homo sapiens
ggtcgccgtcggcctgcgctgctcggagcttccggagcacccaggctgagccgcgcccgccgcaaccacctagaagaagcccagcctggccctggcacacggtgaaccttaatcggtgtgtc

SEQ ID NO: 325492 - DNA, 122 bp, Homo sapiens
cttttgctgggggtgcatgtatggtctgtaaatcagcaagaagccaggcacagtggttcacgcttgtagtcccagcacattgggaggccgagtcaggaggatcgcttgagttcaagagttga

SEQ ID NO: 325493 - DNA, 122 bp, Homo sapiens
gaactcttttaaagtgacaactgatttttcccccaccctcagaacgaagatgtaaacctccgtattcctaaaggacaacgggtcttgctacctatagagcgagtgaggtgccctccgcgtgg

SEQ ID NO: 325494 - DNA, 122 bp, Homo sapiens
agggagagaaacagcagcagagtcatcaatgcgtgtaaactgcctgcacctggagctgcccggagaggacgctgcaaagctttagagcaaggcctccagcctaatccggatgggtgggtgga

SEQ ID NO: 325495 - DNA, 122 bp, Homo sapiens
tttaggttacaggcacaaggcttacaacattatgtatccatccacatatgatttattccacggaatacttgggagcattaggaaaatgagttagaggagccaaaacaaaaggaatggtaagc

SEQ ID NO: 325496 - DNA, 122 bp, Homo sapiens
cgggtccgctcagccttcgactaatttccggtggtcggagctgcaaaattaaaggccgcgcgggggcagcgccggcggctgctaggctgactccgccctgccggggcaagccagggagagcg

SEQ ID NO: 325497 - DNA, 122 bp, Homo sapiens
ggagggaccaccgttgccgcgtcttcggcttccacgatctgcgttcgggctacgcggccacggcggcagccactgcgactcccactgtgcctggctctgtccatattagttcccaggcggcc

SEQ ID NO: 325498 - DNA, 122 bp, Homo sapiens
gaacttcctctcttccaccccaccgccatgaccccagggaacaaggcgagtagaccacagcgatcgccaccctcgtgaaagggattggtcactcaggacatccaggtcttctctgcaccatg

SEQ ID NO: 325499 - DNA, 122 bp, Homo sapiens
cttacacaagcgagacttgagcttggttgaatgctgcctggaaagcacccacagagaaggcgttttgggtcacagggagaggcattatctcagctcctcaaatataactgaagaaggcttta

SEQ ID NO: 325500 - DNA, 122 bp, Homo sapiens
tttaaggctgaggggcccggggcaggcggggcctcgggcctcagtcaaagccgtgccagtcgctgtgctctgagtcgtattccagctcggcgcccacacacttgacaccatccagcagcatg

SEQ ID NO: 325501 - DNA, 122 bp, Homo sapiens
aatggcggaccctttggctcaagcagttgaaccggggaattctgggaagtggagtccagacgctctgtggagacgcgagcacttccggtgtgtgagcctgcggttgctacataaccgcgtag

SEQ ID NO: 325502 - DNA, 122 bp, Homo sapiens
cacccagagcaagaggactgggtgctgggctgcagaggccggtcagtggagcccctagcacgtgtgaactcaggcttttcattgggcccggctccacttctaggccatgttttgactcattt

SEQ ID NO: 325503 - DNA, 122 bp, Homo sapiens
tcccagtgcttgtgttttcttatttgtgaaaacagacacccttacagagctatgagggggcgtaaattatctaatactataaagcacttataacagtgcctggtacatagtaatagcttgat

SEQ ID NO: 325504 - DNA, 122 bp, Homo sapiens
tacccgcaaattctcaattgctagataaacaacaataacaacactttattgggcgctcatcgtgtcaaaccctgtgttgagggctccattcctcaaggtccattttaccggcgaggaagccc

SEQ ID NO: 325505 - DNA, 122 bp, Homo sapiens
cctttagacatcaacatccaggaacctcgctgggaccaaagtactttcctgggcagagcccggcactttttcactgttactgatcctcgaaatctgctgctgtccggggcacagctggaagc

SEQ ID NO: 325506 - DNA, 122 bp, Homo sapiens
tctcagccagcaggtggcgctcaaagctaacaaagtaagcaatgtacttcatttttaccacggcttgattagcaagggttgttaaattcctactgtatttatacataattataatgtatata

SEQ ID NO: 325507 - DNA, 122 bp, Homo sapiens
gagtcccctgcggacacaagtcccaggaaatggccaacacgggaggggccaagggctctccgtggccgccggcccaggtcccagccgcgcgccgcagcctccacggccactcctgcccgtca

SEQ ID NO: 325508 - DNA, 122 bp, Homo sapiens
agcatcaaacgcttcctacccagcctccgagtctttgcactctgttccctctgcctacgtcgcgttccgcctaagttttgcgtacttcttgttattcaggtctcagctcagatgtcacctcc

SEQ ID NO: 325509 - DNA, 122 bp, Homo sapiens
gccgagccaccgtagggactgtcggccaacccgcgcgcgcacatcttccacccgtggactcgtcagggcgtgaggacccacctcacgtgaccattagcagcctcccgattggttttgctcct

SEQ ID NO: 325510 - DNA, 122 bp, Homo sapiens
gccaaggtggggggtggggaggataaaattgtgttctgcgggttctggaaactcaccgcccgcgggagggtttgttgtccatttaactcgtcttagtaaactgtgcaggtagcgtggtcagg

SEQ ID NO: 325511 - DNA, 122 bp, Homo sapiens
aagggcagactaacacagccttagagcctggataaaatcctggtgtcctgaaagtttgaccgtgggaaatctggaggataaggtctatctctggtctgtctatctaacttctgcaccttgca

SEQ ID NO: 325512 - DNA, 122 bp, Homo sapiens
cccgcggctggcacacgcgggctcccccgcgcaccctctccggggccgaccagctcgggccgctggcacagtcacgcgcgtccacacatcacccccgcacccacacgccgggcagggtcctc

SEQ ID NO: 325513 - DNA, 122 bp, Homo sapiens
gattcactaacacatgaggtaatcacactgctttgaggtctgtaaggatcaagttggaaccgtcatccccttccctggcagtccctaaaatccttcgagatgacgtcacccaacgagttcaa

SEQ ID NO: 325514 - DNA, 122 bp, Homo sapiens
ccactttacgtgtatgaccacaaacttaaatgggccctcagcactatcaaaagactcattcgtaatctcaaatcaacccactctccaaaataactaattcactgcttcttctataatacctc

SEQ ID NO: 325515 - DNA, 122 bp, Homo sapiens
ttctgcagctccgatgacctgacgtcacagcggcggccgcactgcaaatgaagtggaggccgtttcccaggagggccagtccactgccgctcctgacacatcgaatccgctgttcacacatt

SEQ ID NO: 325516 - DNA, 122 bp, Homo sapiens
actgtcctgcggtcaccccccaccaacccagatatccctcttagcaaagctagtgcatttcgtacgtccacagacttccccagatctggaggtagaggtttgccttgtcaggccgatgtgac

SEQ ID NO: 325517 - DNA, 122 bp, Homo sapiens
gcctaactgcccgcttgtgctcggccacggaagacgtcaatctgcggatggaagcagagccgcggtcccagtctgtgacaccaccacccctggatgacctgggggtcttggactccacaaag

SEQ ID NO: 325518 - DNA, 122 bp, Homo sapiens
gaaaagaaccacgtggctacttgtttgtgtgattgtcaagatctggatgaagggtgtgatcggtaagaacagagcatttcttgacgctggccccatcacccttctgagaactgccatgtgta

SEQ ID NO: 325519 - DNA, 122 bp, Homo sapiens
cctcggaccctaagcacacctgctcctagagagttattaatagagcccccaaatggcttacgctttcaaatgattttcctgcaaatctgatttcttgcatggcacatggcaattaggaggtg

SEQ ID NO: 325520 - DNA, 122 bp, Homo sapiens
ggataccagcgttcacatttttccttttaagaaagggtcttggcctgaatgttccccatccggacacaggctgcatgtctctgtgagtgtcaaagctgccatgaccatctcggtaacctact

SEQ ID NO: 325521 - DNA, 122 bp, Homo sapiens
gcgcttctctttctgcgcggttccccgcagcacatggcgtgtccacccgggacccacctgcggccacctgaagactgggaggactggctccgcccccgcgcttcgtccccgcccactcatgg

SEQ ID NO: 325522 - DNA, 122 bp, Homo sapiens
cgattccaagccacacgtgatgccgtgtgcaacgagccagcatccaagatctggaaacctcggcatcagttcctagggcgctcccgagccagctatggttcccttggcgctgcgtcagggca

SEQ ID NO: 325523 - DNA, 122 bp, Homo sapiens
tctaaagtctcttctgctctaaaattctaagactctttttttctttttttgacggagtctcgctatgttgcccaggctggagtgcagtgacgcgatctcagctcactgcaagctccgcctcc

SEQ ID NO: 325524 - DNA, 122 bp, Homo sapiens
agtacgcctcggagaagcatttccaggacaaggtcttctatgcgcccgtacccaccgtcacggcctacagcgagaccatcgtggcagcacccaactgcacgtggcgcaactaccgcagccag

SEQ ID NO: 325525 - DNA, 122 bp, Homo sapiens
aggactggacttaccttcccaccctaagcaactaaaaaactgaacaaaaccagccaggcgcggtggctcacgcctgtaatcccaacactctgagaggctgaggtgggcagatcacctgaggt

SEQ ID NO: 325526 - DNA, 122 bp, Homo sapiens
tccctaggtcgccgctgtcgccaccgccgccaccggccgcgaactccccctttcccgtcacgtcacacaatatcggatcgtccattcgctgccgccgcccgccactcaagaaatcccgtgga

SEQ ID NO: 325527 - DNA, 122 bp, Homo sapiens
ttttgataaagcttttggaggctctgctcttccggctcctgcctgcagaggacagaaccccgacccagggcaacatccggccgcccaccctgctgatagctaggggaggggttgggggagcc

SEQ ID NO: 325528 - DNA, 122 bp, Homo sapiens
gccttgggaaaagtgcagatggcccaagctgtagggagctgccctgggggctacccatgtcgagtcccactagcctgggatccccgtgaatgcagtagtggtggcaggggtctcggaatcac

SEQ ID NO: 325529 - DNA, 122 bp, Homo sapiens
cctgacggcgactatccagggtcggaggcgttcccagcgtttgcgcagatgcaagatggccgcgccctcgtcgccttggctccatgggggccgccatctttgagtatctgacgtacacaagg

SEQ ID NO: 325530 - DNA, 122 bp, Homo sapiens
acaccgcagaaccagccacagcgacagcccaaacaactgcaggggaacttgccaataactcgcggcaaatgctggaggaagtaccgcctccaagctacagcggcgccgccgaagccaagagc

SEQ ID NO: 325531 - DNA, 122 bp, Homo sapiens
ctaaagcaattgcagaacacctgctttttctttgtttcctctagaaaggaccaaccacaccgagctcagttatggcacacacagtgggacctagacaaagggagagggtgaccgacatccca

SEQ ID NO: 325532 - DNA, 122 bp, Homo sapiens
aatgcgtctggaccactggggaaaatatttttcttttcaaaaagcagccccttcagtctgcgttcccagttcattttgcaggcgcattcgcccttcctagtttgcagcaattaaagataacg

SEQ ID NO: 325533 - DNA, 122 bp, Homo sapiens
ttctctcgccccaggtaggtgccaaccgcttttgtctcctccaacccagggacttccctgcgtgctgttatgggccggggctcccggctcagttcctgtaaatatcccccttgtaacttggg

SEQ ID NO: 325534 - DNA, 122 bp, Homo sapiens
ctacaagtcacgtccacgtttctattctgctcggtgcgctaacctaaagaagaaacccaacgtttacttgactaacttgataatcaagcctcccccgccgggacacttaatcttttaggtac

SEQ ID NO: 325535 - DNA, 122 bp, Homo sapiens
caaattaaacattttgcattgaccaataggagacagtgcattgccagttccggattctcacgcctcgcggcccttgctgtaaaagggaaaagtccgcgaggcgtttggaatgtaggggtgtc

SEQ ID NO: 325536 - DNA, 122 bp, Homo sapiens
actggaaaccagccattcttccattcattgggagacatttacaggccccctgccaggggtcggtcctgggacactggggatgccgcgttgagtaagacaatccctaccttcacagggcctcg

SEQ ID NO: 325537 - DNA, 122 bp, Homo sapiens
gtacgtccgaagaatggaatatcattcacccatgaaaaagaacgaagtccagcaccaaaacgtgctacaacatggatgaacttcgatgactttgtgccacatgaaagaagaagccagccaca

SEQ ID NO: 325538 - DNA, 122 bp, Homo sapiens
tctctttctcactctcttttctcagtattttggtggatgagcttctcatttgctgttactcgttgctttaagcatttacgccttttcctggtaatctccggcaggacccataacctctgtag

SEQ ID NO: 325539 - DNA, 122 bp, Homo sapiens
tccccaggaaaaagggtggcggcggcagcggcgggggccgacctggtctctctggggcggcgttaagagggccaccgagtttctccagtttcttttctcgctacctccttcccgcccccgcc

SEQ ID NO: 325540 - DNA, 122 bp, Homo sapiens
gtgccaccagcgcttccccttcgaggcgctgtctcaggggcagcagctgtgcaaggtgcgcgggctggggcggcggccgggaactggggacgcaggaggcgcggcccggagctccagattct

SEQ ID NO: 325541 - DNA, 122 bp, Homo sapiens
tcccagcctgcccagatttcaggaaggaaagaagatcttttgcttcttcggtcgctgggtcggctctccagtgtctgatgtttactgaaatcttgatcgtggttagcctcccccaggacttc

SEQ ID NO: 325542 - DNA, 122 bp, Homo sapiens
tacctctgtgtagactgtggccgcggctttggcacagaactcacgttggtggctcaccggcgggcccacactgccaacccattgcatcgctgtcgttgcggcaagacgttcagcaacatgac

SEQ ID NO: 325543 - DNA, 122 bp, Homo sapiens
accttttcttttgttcagagaaatctgcaggtaaagacaggaacctcagctctgaggccccgagtagggtagaggagggggaccggatatgcagctctgaaagatacatccaggatcagaag

SEQ ID NO: 325544 - DNA, 122 bp, Homo sapiens
aactatggggctgtgatcacaagcaaatgtgtgggcggatccgttgcttgggttcttccccgccccctctttttttcggaccatgacgtcaaggtgggctggtggcggcaggtgcggggttg

SEQ ID NO: 325545 - DNA, 122 bp, Homo sapiens
ccatgctgcctccctccctaatacgcccaggcaatcctgagaaattccaacttcaccgagcgcccccaacccgtcctgctaggtgatttctagtcgcctgcatgcgcaacaccggcgcccct

SEQ ID NO: 325546 - DNA, 122 bp, Homo sapiens
gcgggtcagccacggctgtgtcagcaaaatcctgggcaggtgagggcttcgcagctgtcccgggagacgccttgcctacttccccggccagccctgggtctccagctggaggacgtggctaa

SEQ ID NO: 325547 - DNA, 122 bp, Homo sapiens
gcagcattggctcccaggcccacaggaagcctccctggttcacaggacacaggtccatgacgtggatcctaagccgagtcagaagtggaatccaagccaggatggaggtggaaaccctgagg

SEQ ID NO: 325548 - DNA, 122 bp, Homo sapiens
ctggtggctggggatgatgaggaggctggttggactgagctggcggagcaggaagtggcacgcctgctgaggactgagttgataggagaccagctagcccagctcaacaccgttttccaagc

SEQ ID NO: 325549 - DNA, 122 bp, Homo sapiens
gcggacttgtccggatccgaatagaagcgctgttggatgcggatggggcgccggggttgccgccacaggtgcttcggggctctggtcatgctgtggcggccgcgagagcgactcaacctgct

SEQ ID NO: 325550 - DNA, 122 bp, Homo sapiens
attcccttaaagtggtcaagtctgggttaagggcttttagggcacattaactcactatgtcgtcttgagcaactctgcaaggggtgggagcagagggggccccctttggcccagctctctac

SEQ ID NO: 325551 - DNA, 122 bp, Homo sapiens
accgtaagtggtggtgccgcagcgacgtctgggaaatgaagtccggagggacaaacgctgcggttcagccagggaaacccgtcggctctccggcgcgcaggcgcagttgcgcccggcagcga

SEQ ID NO: 325552 - DNA, 122 bp, Homo sapiens
atctttattatttttgaattaggagattcattttgaggcccgagctacatacacatcagacgttgagctaagagctgtttccatgatatctcattctgtcctcaaactgccctgtgaagata

SEQ ID NO: 325553 - DNA, 122 bp, Homo sapiens
agaagccttcgtgttggtacttggggttgaagaaggcccccttggcgtgcgcgttgacgtcggcgccggcggcgatgagcagggctgcgatgtccccctgccgccgctcgatggcgatgttc

SEQ ID NO: 325554 - DNA, 122 bp, Homo sapiens
acattggttcaggctgaatgatcaattaattcctgcctctcttctctccctctcaccttgcgtccatcagggcatgtggtcatcagcatgcagctacgtaaactaaaggcgcaaatgctccg

SEQ ID NO: 325555 - DNA, 122 bp, Homo sapiens
atttcaagaccagcctgggcaacatagagaaacactgtctcggccgggtgcagtggctcacgcctgtaatcccagcactttgggaggctgaggcggatggatcacgaggtcaggagtttgag

SEQ ID NO: 325556 - DNA, 122 bp, Homo sapiens
atctgaacagaagaaaagataccaaggagatctatactcacttcacctgtgccacagacacgaagaatgtgcagtttgtttttgatgctgttacagatgtcatcattaaaaacaacttaaag

SEQ ID NO: 325557 - DNA, 122 bp, Homo sapiens
ttaaaaccttgaggtgattcatcttccaggctctccttccatcaagtctctcatccctagcgctctgggtccttaatggcagcagccgccgctaccaagatccttctgtgcctcccgcttct

SEQ ID NO: 325558 - DNA, 122 bp, Homo sapiens
cctcatctgaccccccagctctggtcagttccgagtcaggcaaggggtgggcaggcgcctcgagcagagactcctccaggaacccaagcgaatgaggaacgccaggatagtgtcagcacaga

SEQ ID NO: 325559 - DNA, 122 bp, Homo sapiens
caggcaagaatagtgcctcggccacctcctctctctcgtccctcattctagccccaggcacgctccagtcagaagccaaacaggcagaaggcactcaagggatgaactgagatcagctgggg

SEQ ID NO: 325560 - DNA, 122 bp, Homo sapiens
gagacttttcatgagccgcacattttgttgccggcagcgggtaagagagagacagaatctcggttctgggtgcgagacgttccacctcttaagaagacaacactgggacttaaaaaatggac

SEQ ID NO: 325561 - DNA, 122 bp, Homo sapiens
ggtcacctttcacaccgccccccccccggggttggaaaagccaccgatcgttccagctgccgagcagctcttaaagctttggattcggctgtcgtggagataacgggcaccagaaaaacttg

SEQ ID NO: 325562 - DNA, 122 bp, Homo sapiens
caagaaacctcatgtctgagagcaagacaggcagggactgccccctgagagccctgagatcgacatttctgaagccctgccacctgccatccctcgtagggattcaagtccaaatagccaga

SEQ ID NO: 325563 - DNA, 122 bp, Homo sapiens
tgtcaagggcccttttctccgctgagctgaggctcgggacgatgctggacgggttcggagcgtgctgcatcctgcgagcccggagacctcggggctggttagaggatggctcagttcccagg

SEQ ID NO: 325564 - DNA, 122 bp, Homo sapiens
ttgaatgactactgtcaattgctacagaaatagaggtagaagccagtaaagctgcctgagcgagctgaagatgattccttagaagagctgacatggaactgaatcccaaagatgagctgtgg

SEQ ID NO: 325565 - DNA, 122 bp, Homo sapiens
agaatgagtaattggcccaagaccacccagctaaggagtggcggaggtggggcccaaacgcgcgatccagccctcgcgcaggcgccctggaactccccgcgcgtgttgtgacccagaattcc

SEQ ID NO: 325566 - DNA, 122 bp, Homo sapiens
gacacagcgcggttttttccacgcagcacccttctcggagacccattgcgatggccgctccgtgttcctcggtgggccagagctgaaccttgaggggctaggttcagctttctcgcgccctc

SEQ ID NO: 325567 - DNA, 122 bp, Homo sapiens
agacacacaaattttcagatgagagtccccttgtctgtcatgcattaactctaccctttccggctaagtcctttgactgtcacatcacgacccaactcccacttcccctaattcttggaaaa

SEQ ID NO: 325568 - DNA, 122 bp, Homo sapiens
tcccttggaaagatgagtcacaggaggaggctctctgcaccctctcatgtactgtggcttcgctcttaccaaccagatgccttcatgggggctgtttgctcatgttcttctccccaggatct

SEQ ID NO: 325569 - DNA, 122 bp, Homo sapiens
aagatcatgcctgaaggtgagtaacaggcgggctgggcatggccgaggcccagccgagcgcgggcttcttcctggcaccccagggccgggccgggtggagaggggcgaggccgaggctggtg

SEQ ID NO: 325570 - DNA, 122 bp, Homo sapiens
agggaatgcgcacagagcaagagcgcacggcccggctcgagaggaggggcggcctgggggcgccactagtagttcccgaaccctgtcacaaaatctgcagcctcccggccccaattgcgctt

SEQ ID NO: 325571 - DNA, 122 bp, Homo sapiens
acagcaaccagcccccagctgacctgcccaccatgggcaggcacatctgcaagacccaaccgcaagacctgaagaaatggagcccactccaaaatgctgacccacagaatcatgagctaaac

SEQ ID NO: 325572 - DNA, 122 bp, Homo sapiens
gacgaggagggaagggacggcgaaaaccacgctgggagcgggaggcagagctgcaaagggcggaggagaaagacgggctgggggaaggagaggcagggaagcggcgggagaagtggagagcg

SEQ ID NO: 325573 - DNA, 122 bp, Homo sapiens
tccctctgctgtttactgagatgcctccactccattcctttaaacacaagggcaggaaagcggagctaccattgccttctttcctggcgccagtgaggacaaaagactcaggcctggtcacc

SEQ ID NO: 325574 - DNA, 122 bp, Homo sapiens
gcttcctgagactgggccagagccgggcgctgggtccccgactgagaccagcagcggggacgtccaagccacagcgcgcccaccgcgtccccgcccccaggccccgccccgcgctcgcccgg

SEQ ID NO: 325575 - DNA, 122 bp, Homo sapiens
tgtatcctccaccatgtgctggctgagtcaagaatggaggtaataaaagagacgtaaacacgggaaaccacacgtctaaagcgtcccatctgtaaactcttgcttactctccagactcacag

SEQ ID NO: 325576 - DNA, 122 bp, Homo sapiens
ggataaaaatcataggataaaactcacaaatcccctgtcagactggaagtttttagcatgcgtgtttttgtaagtgataaatcaaatagacaaaaatgaaaaaaaaagagaacattagaaca

SEQ ID NO: 325577 - DNA, 122 bp, Homo sapiens
ctaaaccataaccttttttagcagagcagtgtagaatttttatacgataccataaatggtcggcctgagtaacattttaactgtaagtcaatacctttgaagagacatgtctgacaactcag

SEQ ID NO: 325578 - DNA, 122 bp, Homo sapiens
tctctctgagcctcaatttgtttctctgttaaatggggactatcaccccgtttcccaagccgcaagaagacaacgcctgcaaagtacccggtctcgggtttgacacatacttggcgcccaca

SEQ ID NO: 325579 - DNA, 122 bp, Homo sapiens
tgaggcggggcggcgggcgggaggtgcgcgaggtgagggaggtgtggggggcgtgggccgcgggatgctgccgcccgctccgcctcgagctccagctccggtttttccctccaccatcctct

SEQ ID NO: 325580 - DNA, 122 bp, Homo sapiens
acaggcgaggaggccgagctgtataaattgtagtctagacaccaatctaaatatctcaaacgcaaggcagacatagcccagcctgaggttggaggcccggcatgctgtggaatcgagtagag

SEQ ID NO: 325581 - DNA, 122 bp, Homo sapiens
atccgcccgcctcggcctcccaaagtgctgagattacgggtgtgagccaccgcgcccagccgatcctccagaatgttttgcaacaggttgagaagccctggggtagaagtgaaacaagactc

SEQ ID NO: 325582 - DNA, 122 bp, Homo sapiens
tggggaaggcagtgatgccaggcggggtcaatctaggcacagctgtaatcactatgtggacgcgaagcgcgggcccagagccctgcacaaacttttccttgttccgggatggggtagaggac

SEQ ID NO: 325583 - DNA, 122 bp, Homo sapiens
tcctgtgccagccgcggcggtccctattggatctggtgccggcccgtcagccccggctctcgctcctggccctgggccatccctgccggcccctgcggtcccggtggacccgatcctgtgcc

SEQ ID NO: 325584 - DNA, 122 bp, Homo sapiens
gcaggccaggggctggtcagagtagtgggaacaggagggaaggcggaggcagcccgcgggcgggcagtgtgcctgccatcatctgccatcttctagacaggaaaatgggaaatggtcttggc

SEQ ID NO: 325585 - DNA, 122 bp, Homo sapiens
tgacgcgggtgatgcgaactggagtctgagcctgcccgagcggagctgggagggggctggcgggcgggcgcgcgcacacccgctgatctatcactctcgttcttgtagctcccagccgagga

SEQ ID NO: 325586 - DNA, 122 bp, Homo sapiens
tgtctgcctctcacctgagcatgaagtcaggcttgcacagtagccagcattagcactgctcggggatccagtgtcccaggacttgtaggagaccagggacccactactccagtgccagcggc

SEQ ID NO: 325587 - DNA, 122 bp, Homo sapiens
atcagggtgactgttggcagcagctgcgtctgcccacagggctctatgagggctgggacccggcagggagggcaggccaggggcccctgtggcaggactgttccccagagcttcctggcact

SEQ ID NO: 325588 - DNA, 122 bp, Homo sapiens
aggaggcggggtccttcaggacgggcgagatgtccctggacccaaggacaggcctggtgacgccggggccgaaggagggcagggccccgggggcgaaagacgagggttcccgccccgcccgc

SEQ ID NO: 325589 - DNA, 122 bp, Homo sapiens
aaggctttacaaaggacaagaccaggaggaaaaaaacaaacaaacaaaaacaaaaaaacgcgacctggacaaggcacgtggtttagtgagccccttggggccccagggatgtaagtattctg

SEQ ID NO: 325590 - DNA, 122 bp, Homo sapiens
gcccctcccctccaggcgaacgcccccaggggtctttggtcacctctgtcacctaaaaggcgctcctcccgcagacaagagcgccaaagccacggggaagcgtcaggattggcctgaaccat

SEQ ID NO: 325591 - DNA, 122 bp, Homo sapiens
gtacccagagtgcacccttcgccctcgttggagttctctcctctctgccaagctttgctccgtgccagaggtgtgctccattgtacctccgctctgtccctgcagtcaggcaaccaattgga

SEQ ID NO: 325592 - DNA, 122 bp, Homo sapiens
cagctcctgcaggatgagcgagtcgggtcggcccgggagtgttccgaacggagctggctccgccacgcccactcctacccctcgcggcaacaaaggaccgtcccaacgctagcacacccgcg

SEQ ID NO: 325593 - DNA, 122 bp, Homo sapiens
cccacaacgtccctctgcagtcactgacagataccccaggttccttcctgtcttcctccccgccaccccagtgtgttacagctgatttgtacagccctggacaagcccatggttaaatagct

SEQ ID NO: 325594 - DNA, 122 bp, Homo sapiens
ggcagagagggagagagggagagaaatgtcagatgttatggagcaattggacaggagtgacgcatacaaagaaaaccagcaaattcatagaactgtttctgtgaagcacaagtaggcaaggg

SEQ ID NO: 325595 - DNA, 122 bp, Homo sapiens
ccctttatttaaaggaccctccgcagcacgctctgtcacggaacctgcctggtatcacggcgcatcacgctctgtcacggaacctgcctggtatcacggcgcagcacgctctgtcacggaac

SEQ ID NO: 325596 - DNA, 122 bp, Homo sapiens
aatcggcattttaggggattgggagccgtcagagcctgggagttggggggagggggggggcgtgtgcgacaactgtcgcctacactaaaacaccaccattttggttcccaaccgtctcccac

SEQ ID NO: 325597 - DNA, 122 bp, Homo sapiens
atcctgctggacaggatctgagactgagagagtgtgcccggggagctcttgctgtagatccgcctgccttcattagtactttggctgcgttctgaaaaagtcatgagaaatggatgtttgca

SEQ ID NO: 325598 - DNA, 122 bp, Homo sapiens
gcactccaggacaggcacagtcagggcgtcgcgtgggcctactgtggcaaaggagacgtccgcgcgaatccggtcctggggaaagggcagttccaacaacctttcatccagaagcctgcaca

SEQ ID NO: 325599 - DNA, 122 bp, Homo sapiens
gggcctctgccaggtattttcagtgttacaaaggtgcaaggataggcccctgcaatggggcgacccagccttgctcaaaagggcccagctactctgctctgccttattttctgcattccctg

SEQ ID NO: 325600 - DNA, 122 bp, Homo sapiens
ccgcggccccggggcacacggagcccttggcagtgcgtctttatgggccccctttaaggccggcggaggcatctcgggccgggcgcggcgctccgtccgtcggccgtagcgactgaactgcg

SEQ ID NO: 325601 - DNA, 122 bp, Homo sapiens
gtaaataatgtgatctattttggattcaataagactttagtaattggatctaaagagtgacggaagaagctattaaaggtggatgtgcacagaatcttgagtcagtttgctttggcttgaat

SEQ ID NO: 325602 - DNA, 122 bp, Homo sapiens
cactaacggagtagtgaacatttaaaacactgagacagtaggaagtctttccgctttatacgtctcctcctttccccttgtacagaaaagcagaaatcttaaaaacctccgattaccacgat

SEQ ID NO: 325603 - DNA, 122 bp, Homo sapiens
ctgctgaacagcattggctgcggctttcttgactcatccagacctcacgaccgccagatccgagttggcgtaatcctccacagtcactcggctggagcagaggagcgacttgagtcgctttc

SEQ ID NO: 325604 - DNA, 122 bp, Homo sapiens
ggctccagcgttcagcctgcgtttctggacacccgggatgcgcagggggttggacaggaccgccccaaacctgcgtcgtggggcttcgccctcctgagatcacccaggcagcctgtgcgcgg

SEQ ID NO: 325605 - DNA, 122 bp, Homo sapiens
tgtgcgttctccaagagggaagctcagtatgagcactcccttcgtccccttaaggaggaccgcacagtgtgtgtgtatgtgtgtgtgtgtgagtgcgcgcgcgcgctcatgtgtgcatgtgc

SEQ ID NO: 325606 - DNA, 122 bp, Homo sapiens
ctgcacctccaggaccaggcgggcctcaggctgcagccccagggccaagcagcagcgggccggaagcagcagccacagcgcctgctctgagctggcccgcctctccagccgcacctcgaaca

SEQ ID NO: 325607 - DNA, 122 bp, Homo sapiens
tccagacacgctggagacccagaatctggtctgtgcttcattcaccttagcttccagagacggtgactctgcagaggtaatgagtatcagggaaactcatgaccaggcatagcctattcaga

SEQ ID NO: 325608 - DNA, 122 bp, Homo sapiens
cgcgggagggctgtgtgatggcctcggagcgcccggagccggaggtgaggggcgggcgggcgcagcactgggccccgagatccgagggggagggtccggcgggcaggcgtggcgttggcctc

SEQ ID NO: 325609 - DNA, 122 bp, Homo sapiens
gagaggctccccggcctgggcaggggctcccctaccccgactgtgagtttgattttgagtcggaggagagcattgtggattgtcttgtaaccggcatcaggtgccttcccaacttgcagaca

SEQ ID NO: 325610 - DNA, 122 bp, Homo sapiens
cagcctggagcgaagtggtgcaatcataactcactgtatccttaaactcccgggcttaagcgatcctcctgcctcagccttctgagtaactaggacttcaggtacctgtcaccatgcctggc

SEQ ID NO: 325611 - DNA, 122 bp, Homo sapiens
attaaacttactctgacctgctgttggagggcaaaaggcttgaccaaaaacttctgtgcacgggaagcttgttcagcatcttgattttcaaatttattcaattcaaattactgtcaagacaa

SEQ ID NO: 325612 - DNA, 122 bp, Homo sapiens
atggctgagcaaactagtatgtcctcaagggaaaatagggaaattaaagttcctttataccgggcaaagtttgacatcaccatttgtggcagtgtaagctcctgtttacccacgttgattaa

SEQ ID NO: 325613 - DNA, 122 bp, Homo sapiens
cgcgccgcgcctcccgcagctccccacgcgcgcgggcgccccccagcaccagtctcggcccgccccctccgcccgaccattggctgctgctcccgtcactttcaggccacagccaagtccct

SEQ ID NO: 325614 - DNA, 122 bp, Homo sapiens
accagatcgagtctagaacagacctcttgctggacagtgcgggactcgatttggcggggccggagatttggggaagtttgtccagcaaggggcgggtgacgtaagcaggggggcgggtcccg

SEQ ID NO: 325615 - DNA, 122 bp, Homo sapiens
cctctaactaggaaagcccataaaatagaaactcaggcctcgttgtgtgtgactcactctcggagcacgcccgtgcctctcctgtgcgcaggcattcacttcacaataaaagcttcttgcct

SEQ ID NO: 325616 - DNA, 122 bp, Homo sapiens
gtgcagcccttggggcctacaatttacacaggaatctcacattaaacccctctccatgggcgggccttgggctttgtcctctgcccttacgcctcatgagacagtgaagagctaagctggaa

SEQ ID NO: 325617 - DNA, 122 bp, Homo sapiens
cggggctgcaaagctgcaactaatggtgttggcctccctgcccacctgtggaagcaactgcgctgattgatgcgccacagacttttttcccctcgacctcgccggcgtcccctcccacagat

SEQ ID NO: 325618 - DNA, 122 bp, Homo sapiens
cggtgcagtgactcgggccgtgaacctgtgccggttacaactgcacaatctggggagacgcggagctgcgggcgcggagctgcccagagagggcgccggggccggggccgcagcggccgagc

SEQ ID NO: 325619 - DNA, 122 bp, Homo sapiens
cccagagaggcaggcgggcgggccggggggggcggggcctcgggactccgcccacgcctccgtctcctccgcgctccgccacagccggccgacaccacaccagccggggagccgccgccgcc

SEQ ID NO: 325620 - DNA, 122 bp, Homo sapiens
agacagtttgatgtctctgcaaacattatctgcgtttagggaccaacttgcccttctcagcgttcacctgggatgtctttattcttccatttaacctttacaggggaccccgatggtgacgt

SEQ ID NO: 325621 - DNA, 122 bp, Homo sapiens
gagtccactctccccttcctccttttaataatagaacccccggagttattgctggtcaggcggccacctgggaagactacattttccagatcccctacgacaaggtctggtcatgagactaa

SEQ ID NO: 325622 - DNA, 122 bp, Homo sapiens
tgacggacacagtagctaaggagactgcctgattgacacgcatgattaccaaccgacttccggaaactccagtcagggcctgcccggcgcgtggcccacggcccaattaaagaagtggaagc

SEQ ID NO: 325623 - DNA, 122 bp, Homo sapiens
cccctctgagtgtgcccctgcccctttctttttcatgcactgcatgaaaaagactctgtccgagggcgccccggcccacccgaccaccccagcctgggagccgcgcgccctggaggggttct

SEQ ID NO: 325624 - DNA, 122 bp, Homo sapiens
gaggtgactcagccaagagatatgttgcaattcaccattaacccttgccctaccagagagcggaagccaaagagagttcccaatcgcttccctcagagtcctctgctggagatggaaaaact

SEQ ID NO: 325625 - DNA, 122 bp, Homo sapiens
cctcacgggcttctattccatagacctcatcatcaaaaccgcaaatatatcatacaccaacgcctgagccctatctattactctcatcgccacttccctaacaagcgccaatagcactcgaa

SEQ ID NO: 325626 - DNA, 122 bp, Homo sapiens
gacaagtaaagtcatttggcgtgggcttcaagcgtataagggaccacaaattttagctaccgtttagtggtaaatttaaggaggagagcaggatgagatttggtcacctaaattgactctaa

SEQ ID NO: 325627 - DNA, 122 bp, Homo sapiens
ggcagtcgctttcccggctctggggaaaacgatccaaccacgcccactctcctgcccgcccgcgcctcctttccgggaaaatgggctctgagaaccagagcgccctttctcccacgcgccca

SEQ ID NO: 325628 - DNA, 122 bp, Homo sapiens
tcgcagtcccgattatcctcccctccagcctctccctttctcgttgaagggttaatacagcgtcctctcccctcgccacccgacagaggcgcctacactggcggtaggtagcccctgggaga

SEQ ID NO: 325629 - DNA, 122 bp, Homo sapiens
tgcgcgtcctccgtccccaatctaaaaagcaattgaaaaggtctatgcaataaaggcagtcgcttcattcctctcagaccttctgcccttcctccatccgacagcccgcgggaggactcaga

SEQ ID NO: 325630 - DNA, 122 bp, Homo sapiens
ggaggggctgcgggggaggacttaggggaccaggacctcagtgaggccccagaaagcacccgggaggggcctccgatcctgcctgggagggaggggttagaggaggattcctggaagaagga

SEQ ID NO: 325631 - DNA, 122 bp, Homo sapiens
cgtacctggtggccctcacgccgtggtgcccggagttccaaacgtgcctgcagccgtgcccgctccaagcgtgcctagtgtgtctaccacttctgttactatgccaaatgtacccgcgcctc

SEQ ID NO: 325632 - DNA, 122 bp, Homo sapiens
cttcgcgtgttcaggcatcctttttctccagtaaaattttgtgcaactcgtctgcatcctcgctggtgtttacccgaatcaacatggtgactggcatggtggcattcttctcgtcaattggt

SEQ ID NO: 325633 - DNA, 122 bp, Homo sapiens
tgaactcctaactcttgagaagagttttatttttctctacaatgatttatcttaagacaacggttttaaagaggggcagaaaaatacccatgattaagggagaaagatgtaatattttgagt

SEQ ID NO: 325634 - DNA, 122 bp, Homo sapiens
ctcaggaattaaacaaacttccatgtcttttcatatatttgattctcatatgaacctttgcgagaagaaggatggatgggtattatcttggagccaaggctggggatttaatgagcattctg

SEQ ID NO: 325635 - DNA, 122 bp, Homo sapiens
gtgtagtatcattctcagcctctcgacttggaggttgaccatgtggcttgctttaactaacggtatgtagtcatccatgaccgtgtgcttttctgaatctaagtcttaagagtctcatgtaa

SEQ ID NO: 325636 - DNA, 122 bp, Homo sapiens
cgccccgtctagattcaacacctcatttagaaattcaatttctcgttgctagttggatagcgtttgccaagtaatttgaaaaaataaaaataaaccaagtggtctgggatttaaacaagata

SEQ ID NO: 325637 - DNA, 122 bp, Homo sapiens
gggtgaagcgaagcggccacttacccctgtagagcgcggctctggtttcagcgcccggtgcgcactcagcagggcacctgtggtccggctagtttgataaacacaggtgcccgccatgagga

SEQ ID NO: 325638 - DNA, 122 bp, Homo sapiens
gactgggagcggtcagtgtcttccttcttcttcttcttgctgctgcccgccttgctgtctcgcttgctgcctcgctttctgctcctctcactcttgctgcggctgcgactgcgactgcggct

SEQ ID NO: 325639 - DNA, 122 bp, Homo sapiens
tcgatctcctgacctcgccttggcctcccaaggtgctgggattacaggcatgagccactgcgaccgccaggaaatattttttaagaggatgatgactttttccaccagtgcttagaaactgg

SEQ ID NO: 325640 - DNA, 122 bp, Homo sapiens
ggcttagggcttccgtgtgggccacagatggtgggaataggctgggggctatagctggctcggctaggctggaggctagggtacaggatgaatttgtcttgcctggactggaggccacagat

SEQ ID NO: 325641 - DNA, 122 bp, Homo sapiens
cgtgtgtgtagtgttcacatgtcctctgtgcgtgagtccccgtgtgtgatgttgtgttctcggtgtgagttcatgggtgtgacggggtgtgtgctgtgtgagaacgtgtgtgtagtgtccac

SEQ ID NO: 325642 - DNA, 122 bp, Homo sapiens
ttcgtttaagtggattaaaaacataaaacgttattggccctaaggggacgagaacagtctcgtttggaggtgaccagacacagggcattagtctttaagagtccatcagtcagccgagaagc

SEQ ID NO: 325643 - DNA, 122 bp, Homo sapiens
cgtggccgatgggctggtcacccctgcccctttcctgatgtgacagttgtgcctgggccccgggaaatttgccaggaggcctggcattggcctgctctactggagcggccctgctgagctgt

SEQ ID NO: 325644 - DNA, 122 bp, Homo sapiens
ttttagctgagtgataaggagatctgtgagcctgctgttttgatgtttcaagcaggaaggcgtggcataaagagctgcttaggcgcaacgctgctgaaatggttttggctagaagctcacag

SEQ ID NO: 325645 - DNA, 122 bp, Homo sapiens
tcatggtggaacccatggtctctgtctggggacatcacctttcctagtcattcaggctgccggggagcccctttctcctgttgccgtccttggcatgcgggctctgacctctcttttcctgg

SEQ ID NO: 325646 - DNA, 122 bp, Homo sapiens
agggactaacagggttaaacagctgccctcggccctaagtgaaaatactttataaactggcgtggcagctcatgcctataatcccagcactttgagaggcccacgagttcaaaaccagcctg

SEQ ID NO: 325647 - DNA, 122 bp, Homo sapiens
atgagcaaacagaaaaatgtgtaagaaggcttgtgactgaaacagaccaagggtgagtgccgggactgtccatcagaaactttcaatgatcagtaacaggatattcacacagtcattttact

SEQ ID NO: 325648 - DNA, 122 bp, Homo sapiens
ggcttcccatgcgatgaggatcgtggagccccctggggcggaggcggcgcgggctaggggcgagggctgtgagtgtgagcggtggtggggactcctccgagtggggttagtgggatggtggg

SEQ ID NO: 325649 - DNA, 122 bp, Homo sapiens
aatgccgagcgaaaagcgagcaggcgagcgacagaagcgtttctttaaggagcccctccccggctcctccactccctccctcccgcccgcccgcccgccctcactcagcgctttttcctcct

SEQ ID NO: 325650 - DNA, 122 bp, Homo sapiens
agagacttggccactatcgtgggttaaaatatcacccttgtcagattcctgtgccaggctcgtccccagatgaacctgctcagatgtgtatgtgtccaggtctaacctgagttggccattcc

SEQ ID NO: 325651 - DNA, 122 bp, Homo sapiens
gagcctcccgggccacgcggccctcaacttctccagcccctccacccactcttcctggaccgcctcctgcaggcgaggctcacatccagcactgtcccttacagtcaccatgcccctggcga

SEQ ID NO: 325652 - DNA, 122 bp, Homo sapiens
cgtccgcggaggaggagagcagcggcggaggctccgtgacgctggaccccctggagcacgcgtggatgctctctgcctccgatggcaagtgggacagcctggagggcttgctcacctgcgag

SEQ ID NO: 325653 - DNA, 122 bp, Homo sapiens
tgggcaagatgtgggcctccggaaggtagacgtccagggtcgaggagaggtgggatcggccggaacacaaaaaggagaagcccggatgtttggacaaaagcaacttccggaagctggggacg

SEQ ID NO: 325654 - DNA, 122 bp, Homo sapiens
ggcctacagttgccagtagggctaatacaccgcgtcctccgcaaatacagctactccgagcgggttggaccagcatgctagtgttacctggcggcagtgctaggaggttaagagtaggcaga

SEQ ID NO: 325655 - DNA, 122 bp, Homo sapiens
gggcggatgggtaattttcaggctgtgaaccttggtgggggtcgagcttccccttcattgcggcgggctgcgggccaggcttcactgagcgtccgcagagcccgggcccgagccgcgtgtgg

SEQ ID NO: 325656 - DNA, 122 bp, Homo sapiens
tggaatactgtccattttcataaggttaaatcatacaacacaggtaaaagcgcttcagcacgcaacgaaatttttctaacgtaacgaaaaactcctcgttgctccttgccttgcccttaacc

SEQ ID NO: 325657 - DNA, 122 bp, Homo sapiens
gcattccaaagtgaggcagacactaaaacactggctcttccacgctgcaagaaatacgcacgcgcatgtcagccgcttgggagccctgccttcgcccccgcggtgcacacacgcgtctcccc

SEQ ID NO: 325658 - DNA, 122 bp, Homo sapiens
tgcccagaggaacaataataactagcatttatgaagcgctccgcttccacgtgctcatttcgttcccataacccggcgaaatggatcgtttgtatcttacagatattaaaaatgaaactcag

SEQ ID NO: 325659 - DNA, 122 bp, Homo sapiens
tcgttctggctccgtataaagtctcctcgggctctgggtctgaggcagccactcgagctgcggtgctcactgtgccaacgctctctgcacctaactccccatctcatcgtggaggccaaggt

SEQ ID NO: 325660 - DNA, 122 bp, Homo sapiens
aaaagggcctggcactccccatccactggaaccccaccgcctgcctttactgctccttcacgtgtgccctggagcccattctcattctggaccccacagaaaggggcaaggggatgagaggg

SEQ ID NO: 325661 - DNA, 122 bp, Homo sapiens
cagggccatcaccaccctggggtgggtccacctggatcatgctgtgtccccagcacctgccggagggccctgcacacagtatgcactcaatgaaccggcctcagcccaggcctctggccgca

SEQ ID NO: 325662 - DNA, 122 bp, Homo sapiens
aaggtccctatgaggtagtgacgtttgagtcaagacctaactgacaaaaagccatccaagcgaatatctgggcaaaaattgttccaggcagagacagtagttcctcttacaagaaaacattc

SEQ ID NO: 325663 - DNA, 122 bp, Homo sapiens
cccaggtctcttcacagaccgcggtatttaaagagaacaagacaagaagctgctcaccagcgctccagcacattcttttggtcaaagcgagtcactttgctggcccacattgaagggcgagg

SEQ ID NO: 325664 - DNA, 122 bp, Homo sapiens
agaggtggcctgaggagcggaggggggatgtgtggattccggtgaaagggacctgacaatcgcccccaacccgtgagaaaaggaggagcccagttcttgcttgagaatgataaacttggaaa

SEQ ID NO: 325665 - DNA, 122 bp, Homo sapiens
gcgacctgcgcgcttcccgatgggagcaaactggggacgggtcgggaatccagggccaagcgcccgaaagaaggcgtttccgggctggggcgagccaggtgggtgcgggacgtccccgggga

SEQ ID NO: 325666 - DNA, 122 bp, Homo sapiens
accctcccggccccacccacgagcccccagcctcaccctggctcttggtgatggaggacacggccaccccggcgatgccctctcgccgaagggccttgctgatctcagaggcctgcgcgttg

SEQ ID NO: 325667 - DNA, 122 bp, Homo sapiens
gcaccgtcaatgagcagtcgtattttgaaaggaatctccttttctgagcactgggcctaacggtgggcttacactattccatcaaccgtgctgtgcacagatgtgctgccacctgggccttg

SEQ ID NO: 325668 - DNA, 122 bp, Homo sapiens
accgtctactgtcgctacgacaactatgctgacagcctcaggttctaccagctgattctccggaggagccccagccagaagaaagcggacttctgcatcttccctattttttccaacctgga

SEQ ID NO: 325669 - DNA, 122 bp, Homo sapiens
gaatggggtggaatgcaataatggaggatgccctgaaaaatggtccgatttgatggtatgcgagatatgtgcattttgcatgattattttcagcagaacacttgctactttagacatttatt

SEQ ID NO: 325670 - DNA, 122 bp, Homo sapiens
cttgtacagacacctggaatatagtaccttggggtggagtagagaggcatgtttcacctgcggcttcccagagaaaagccctagactgaaaccatcttctctgaatctctcctgcactccaa

SEQ ID NO: 325671 - DNA, 122 bp, Homo sapiens
cgaagccttctgggtgtctagctgggcagcacttaaggtggctggagctcccaggctggtcgcctccagaattccaaacaactaattttctctatctgccatgatgtaaaaaatgctgtgaa

SEQ ID NO: 325672 - DNA, 122 bp, Homo sapiens
ctggttctctctaaactgtggggctccaactgaattcctgtctgctccccaggggtgccccgcagcagttagagcagcttgttgagaaggagccgcaggggtagggcagaggtggaccggaa

SEQ ID NO: 325673 - DNA, 122 bp, Homo sapiens
cggtctctctgtcacccccaggtggtcaaggtggtgggcagcaacatctcccacaagctgcgcctgtcccgggtgaagcccacggacgaaggcacctacgagtgccgcgtcatcgacttcag

SEQ ID NO: 325674 - DNA, 122 bp, Homo sapiens
gctcagtagtggcagggagtttgcagcacagaccttgacttcaggtgtcctgaattggcacgctctgctgatctgttcctgttctacacgcactcctgccagcccagtgtagcctcaggcct

SEQ ID NO: 325675 - DNA, 122 bp, Homo sapiens
cggcctggtgagcaggtgggggaaccgagtagccagggtggggaggcctggcagaacttccgacctctgaagggtgaagggcgcccactgctctctccaaccccagaacacacggcgctgtg

SEQ ID NO: 325676 - DNA, 122 bp, Homo sapiens
gatgatccgtccgcccccccaacccaaagtgctgggattacaggcgtaagccaccgcgcccggccgccagagacatctttaaggaacttggcggtctggagccagcccgtacattaatattc

SEQ ID NO: 325677 - DNA, 122 bp, Homo sapiens
acagggtcccggtatggcgatggctttgacggacccggcgcaggtgagtggacaaggtttcggccttgctgcttttctgctagttcggggaagcctcctgggcaggccggaagccaagacag

SEQ ID NO: 325678 - DNA, 122 bp, Homo sapiens
ggcgctgcccccttcggtgcctccagacgcggttccgcccccggtcccggctccgcttcccgccgccgccgctgccccctgtgtcgccgccaccatggctccctcctgctcgcccgccgagc

SEQ ID NO: 325679 - DNA, 122 bp, Homo sapiens
acacacgaacacacagacacacgaacacacagatacacaaacacagcgggtgcttgcttccgctccccaaataaagaatggtaatcaagtttctcaccatcctcatagtttttgagatagta

SEQ ID NO: 325680 - DNA, 122 bp, Homo sapiens
tcaatcttcctctcatccagtatcaccttcttcccaccccttaagtccgccccttttccccgcccttcctcgccattgtgggcagagacatgaccgtccacgtgatgccgtgctcccgccct

SEQ ID NO: 325681 - DNA, 122 bp, Homo sapiens
ctcgccgcagcatccctcaggatggagtttcggctttccttccctcggggactttttatacgcagcccgtgcgtaatcattggtgcacgtccaggctgctgcttctagcccctgccccgcag

SEQ ID NO: 325682 - DNA, 122 bp, Homo sapiens
aaaaacctcgttagatcgtttccttcaaatgagttatagaaaaaacctgtcagtttccagcgctttcaggattttggaactgcagatacaaatttaaacttggattcaggtctttcagactc

SEQ ID NO: 325683 - DNA, 122 bp, Homo sapiens
gtggcaggctgagaccctgtgttacaacaaacaaaaaaatagtgctgacaactcgaaagccgtatggaaaaaagtgaaactcaatcagtgcctcaaccctatttgcaataaattccaaatag

SEQ ID NO: 325684 - DNA, 122 bp, Homo sapiens
cgtgcctcagcgccaggcgcacgaagcctttgcgcttctggagcgtaaggcagtgctccccggggactgaatacagggcctcgtgcgcaccccccaccatgatgaccacggcctgcccgagc

SEQ ID NO: 325685 - DNA, 122 bp, Homo sapiens
tagttgaagggaatataagggacatcactacattgcattattttgaaaaaaaggtagcaacgctggacatatggtgtggttcaagcccgtgctgagtaacttttggacagggacactaaaaa

SEQ ID NO: 325686 - DNA, 122 bp, Homo sapiens
ggcccctggctgccagcctcgcccagcctccacctgcattttgtgggtggcatttccccccgggggtgacacccgctccctatgctctgcaaaatcctgagctggaatgcaaaacatatgcg

SEQ ID NO: 325687 - DNA, 122 bp, Homo sapiens
cagtcaccgcggatcgtgtgaaagcaaagggccggctggggaacggagtccacgcggccacgcgagtccggcagccctgtggaccggccaaggctcccggggtggggctggcgagtccgggc

SEQ ID NO: 325688 - DNA, 122 bp, Homo sapiens
tagtttacttaggcctcagaactggcctttaatcatccacatgtaggactgttctggcagcgggggttgggggggaaccgtgttaattactcacacgatgtgctgactcaaagcctttgtca

SEQ ID NO: 325689 - DNA, 122 bp, Homo sapiens
ggcctgaggcaggagaatcacttcaacccgggaggtggaggttgcggtgagctgagatggcgcaattgcactccagcctaagcaacaagagcgaaactctgtctcagaagaaaaaaaaaaag

SEQ ID NO: 325690 - DNA, 122 bp, Homo sapiens
ctcggcctcccacagtgctgagattacaggtatgagccaccacgccctgctaggagttcacgctttagttgggggaaaatatacaataagcaagccaatttttaaaaagagaactgcaatta

SEQ ID NO: 325691 - DNA, 122 bp, Homo sapiens
agggttcagctctgcagacaattgctttcttgttccttagcctcatgggctggtgaacagcgaaggtgaaggggtaatgaattcctctaggtgctgataagagctacattccaagaggatta

SEQ ID NO: 325692 - DNA, 122 bp, Homo sapiens
ttttgcggctttgaaacctgacccctggttgtcacaagtggacaaacacagaagataccccgcaaaactgacaactttttggtggtggcttttccgggttcggcttgaaccttcacttggct

SEQ ID NO: 325693 - DNA, 122 bp, Homo sapiens
tgcagggcaggcaggcaaaggcggccctgtgcccggcagtgagatcgcccagagctggggcgaagaaagagggggcgtggggaagcagtgcggagcctccgggactagatactcaggaatgg

SEQ ID NO: 325694 - DNA, 122 bp, Homo sapiens
ggacccgtaggggttggcttctgattatcctcttcaacagtcataggccttcccagtttgcgcgtcattaaatggcctacttacggggcgaggttccagcctgtccctgagtctgataatgc

SEQ ID NO: 325695 - DNA, 122 bp, Homo sapiens
aaagaccctgctcctggaacagccttctgcaatcaacacaacctcttggaggttttactgcgtctggcactcgcaggttcccctgctctcactctctctctctctgtttccttgctgtgaaa

SEQ ID NO: 325696 - DNA, 122 bp, Homo sapiens
cggccccgcgccgcggctgccctgacccggccgcgacctccctctgcgcaccacgccgcccgggcttctggggtgttccccaaccacggcccagccctgccacaccccccgcccccggcctc

SEQ ID NO: 325697 - DNA, 122 bp, Homo sapiens
agggcccagaaaggtggggcaggaacgatcccagccttcagctaattctgtcacctctaacgtctggggcaagaacgtttcaggaaaccaagggggaccgaggctcagcgccgaagagaaag

SEQ ID NO: 325698 - DNA, 122 bp, Homo sapiens
aggtgggaggataaactatggtgaggtcagccccctaaagagtgagcttattggccgaggcggccaacacgcctgtaatcccagaactttgggaggccgaggtgggcggatcacgatgtcag

SEQ ID NO: 325699 - DNA, 122 bp, Homo sapiens
tcagagctgtccggactgacgtctgtacctaccccccatgtgggtctcctgctctcccttcgtggggacactaggcaggcactgggccttgccccaagccccgcctgccacctcacccactg

SEQ ID NO: 325700 - DNA, 122 bp, Homo sapiens
agtgattgcctagagttttttttttttatttgagaaggattctgagacttcattctttagcgttccatgattgaatagcaaggcattccttaggctttgggggagaaagtgggagcacaaat

SEQ ID NO: 325701 - DNA, 122 bp, Homo sapiens
tatagctttggacctgacacagctaagtaattttgccttctaggatccaatttaacactccgggctaaatatttcaaacagatttttttttttttttttttttttttgctgtccacattgca

SEQ ID NO: 325702 - DNA, 122 bp, Homo sapiens
tggcgagacggtcaggattaacacctgtttcttcaagactctcctgagatgtcgtcagggcgcatatgttgttttctttgctcacctcccagacttgcatgacttgctttggtccagtggtc

SEQ ID NO: 325703 - DNA, 122 bp, Homo sapiens
caccttgtttttgccccgtcgtcggatgtcccggactagcgctagctggctctctgtcagcgggtaccttgccaatagctcattaaagtcatctaccggcaagttgacaatcttgtccgtag

SEQ ID NO: 325704 - DNA, 122 bp, Homo sapiens
agtaaattgtccattaggacacttagtttgtttccatgtcttggctattgggagtaatgccgccatgaacgtgggaatccagatgtctctctcagatgctgattttattacctttgaatata

SEQ ID NO: 325705 - DNA, 122 bp, Homo sapiens
tgactacagtcctcctgcagagggcgctgtggagtcccagacacgagtgttaggtggaatcgggctgattgcccatcacgtcttgcctttccctggcagtaggcttgttatgaaatcattga

SEQ ID NO: 325706 - DNA, 122 bp, Homo sapiens
acagttaaaaaaaaatatgagggaggttgtttttgagtagacagttgctggaggaaggcacgtgagttgcagcctgaccagtgcgaccagtcctccttcaacagccccgcttgccttgaaaa

SEQ ID NO: 325707 - DNA, 122 bp, Homo sapiens
tcctcagttcccagacggggtcgcggccgggcagaggcgctcttcacaactcagatggggcggtggggcagaggcgctccccacatcccagatgatgggtggctgggcagagacgctcctca

SEQ ID NO: 325708 - DNA, 122 bp, Homo sapiens
ccccgcacggcgacccgccgcgggtagccctggcgtttggccacgccgtcggctgaggaccgctagagctggggggagatcaaagcattcctatggggcccaaagagcctgggattgcagtg

SEQ ID NO: 325709 - DNA, 122 bp, Homo sapiens
ctctagcaccgcctgctgggccgaccacgaggcgcctgggctccgtgtagcggaaaatgccgtgtgtttctagggaggtgaaaaaggagccctccaccgaaaggcagaatcagccatttaaa

SEQ ID NO: 325710 - DNA, 122 bp, Homo sapiens
ttttttttttttttgagatggagttttgatcttgtcacccagggtggagtgcagcgatctcggctcactgcaagctccgcctcctgggttcaagcgattctcctgcctcagcctcctgagta

SEQ ID NO: 325711 - DNA, 122 bp, Homo sapiens
cttctgactggcttccactcagcagcctgtttctgatgtccctttcctccagcctaacaccggcaggcatttacctggtgcgccaaggtcttcttgagcaaagaaaccttgactctccaccc

SEQ ID NO: 325712 - DNA, 122 bp, Homo sapiens
ctcgtggtggaggcgggcacgtgccgggcacagcggctgcggagacagcgggtccggcctcgggacccctcccgtagggtagggaggcagccaatgagcagaaataaatgcagaatcacaaa

SEQ ID NO: 325713 - DNA, 122 bp, Homo sapiens
cacggcatctatgagtggaggctcggattcccaggcaattttccctgctccaggggaatccgaaagtcccaggatgagctgaggatcaacactcacaacggctgacacttaatgacgctatt

SEQ ID NO: 325714 - DNA, 122 bp, Homo sapiens
gaaatgaaaacgcaaacgcacaccaggctggctgaggggctcaagggagtagctgagaaacgggcgggtccctcccgagcttagacagggtacttgtaaaggccacccaagccagacaggaa

SEQ ID NO: 325715 - DNA, 122 bp, Homo sapiens
tggcttctgtctccagacggccctttttattggcttcagtggaactggaaggcgggacggcgagtgcgggagaaggtctccattggccgaccgctctagctgtagcggagacccccaagtag

SEQ ID NO: 325716 - DNA, 122 bp, Homo sapiens
agccctggacctgagccaaggagagttaaccttctataaaaaggtggctcatgggccgggcgcggtggctcatgcctgtaatcccagcactttgggaggcctaggcgggtggatcatgaggt

SEQ ID NO: 325717 - DNA, 122 bp, Homo sapiens
cacccgggtcggggccctcgagttcgatctgtcccgcagccggcggtcttgcgtctttcccgcccccagcactgcccccgagcacgtgcacgtgcccaccgccagccacaggtacgcacgcg

SEQ ID NO: 325718 - DNA, 122 bp, Homo sapiens
tcggcagaatcacaaaagctgtgcagcgcggtcgccaagcctgggctgctgggcagacggcggcacaaagagccgggggctgggccgcgccagcgctggaatgaaaaggcctgtcttgaagt

SEQ ID NO: 325719 - DNA, 122 bp, Homo sapiens
cacttgaaccagagaggcggaggctgcagtgagctgctatcacaccattgcaatccagcccgggtgacagagtgtgactctgcctcaaaaaaaaataaaaataaaaaacatgctattattct

SEQ ID NO: 325720 - DNA, 122 bp, Homo sapiens
tggtaatttttctgtttcatgagaaatctaaaatctcagaatcacatcccgctgacccgacgttatttgtacaacccatacaaatgccccttcctctacgagattcctcccgcaattcacaa

SEQ ID NO: 325721 - DNA, 122 bp, Homo sapiens
aaaagtggcactcgatggaccacaaaaagagcatttacttacagtgtgagagctgaaacacgaagtcagagcattactttgttcagccttagctgggaatgtgctatcaggtgactcaagct

SEQ ID NO: 325722 - DNA, 122 bp, Homo sapiens
aatgtttcccttatgattcatgctttcccatataaaactgcctgatttaaccaaagtatacgttttctatctttgcctgaacttatgccaattttaaaatacagctgcataagcatgatgat

SEQ ID NO: 325723 - DNA, 122 bp, Homo sapiens
tttgtcccttgtaactgccatttgcctatatgtctgcctacctgaatttctccatagcagcgctactggcattttggaagagacagttctttattattgggggaccatcctgtgtgtttatc

SEQ ID NO: 325724 - DNA, 122 bp, Homo sapiens
ccgccgcttgggcgcacagccgcagcagctgctcaaatggagtggaaaacggccattgggcgacaatgagttatagattatctgctccacgttttgtacttagctgcctgtaatcttctttt

SEQ ID NO: 325725 - DNA, 122 bp, Homo sapiens
tgccgggcattttaaaggcctggctaagctagcagacaggacatcattcgaaaccagacacgaccagaaagacgagtccggaaaggcctgccagcctggagctgggtctgccctgggggcaa

SEQ ID NO: 325726 - DNA, 122 bp, Homo sapiens
tgtggtagaataggcaaaagatgatttttttttaaaaggtgctagtctgtatgggagagtcgtgttaagaacagaaaagatgctgtctaacagactgataggcagagaggacctgccttggc

SEQ ID NO: 325727 - DNA, 122 bp, Homo sapiens
acttctgcttctcctcctgcatgcgccgcttgcgcaggcagtagtacacggctcccagcacgataaccatgccaaagaggcagcccaggatggtcatgatgtagtgggtggtggtggaggtg

SEQ ID NO: 325728 - DNA, 122 bp, Homo sapiens
cgcgcatccgtgaagctgtgtgtttctgtgttactacaggggccggctgtggaaatcccacgctccagaccgcgtgccgggcaggcccagcccggaggcccgtccaggagcgcggctgcggg

SEQ ID NO: 325729 - DNA, 122 bp, Homo sapiens
cggctgcaggctgaggcggggactccacaggcctgtggcctccaggctgagcagcacgggcgcagccctgcactcctgtcccaagtgaactctgaaagcttgtccgcgatggctgtgccggt

SEQ ID NO: 325730 - DNA, 122 bp, Homo sapiens
ctgtcccttgtttttgatgtgcgtgctgtctgtcctatggagcctctgcagactcgttctcgtgacccagtggcataccgtttggtgtctgatgtgtgcccagatcgttctgccacttgcac

SEQ ID NO: 325731 - DNA, 122 bp, Homo sapiens
tgcagggcggcggcacaggggtgtggggcgccgtgttgggagtactgagcggccccggcgcgctgctgttgcggcgcagctgtcgactcggtcgcgcggagggaattgagcgacggttttgg

SEQ ID NO: 325732 - DNA, 122 bp, Homo sapiens
caagtcttccagcgagtggagtcactcttaactacatttcccaggattccaagggagccgcgcgctctgcgctcatcttcctaccagaaatcggcaagtcactgaccctcgtcccgcccccg

SEQ ID NO: 325733 - DNA, 122 bp, Homo sapiens
catctccctaggtccagctgttatttctcgccctttagaacatgcgggcggaatgtggggcggccctgtggtctgatgtctcccggagccttctgggagtctcaggactcattaaaaggctc

SEQ ID NO: 325734 - DNA, 122 bp, Homo sapiens
gtgggcctccgcttggccccgggacgcagctgcgggaaaaacagtgtcaagctcaggaggcgccgcagcctgacggagctcccgggcaccatgaggagggacgcaggtctgggtacagaggc

SEQ ID NO: 325735 - DNA, 122 bp, Homo sapiens
cgcggggcatgctgggagcagtagcatcttagctgcttccggccgctggtcgcagggctgcgggactacaatcttcgcatgaaatggaagagagggtggtgcggatagcttgaggaaggtac

SEQ ID NO: 325736 - DNA, 122 bp, Homo sapiens
gagcggcaagcaagctagacaagcctgattccatgtcacccgctgccaccctgccaggagcgcgaagatgatggccatgaactccaagcagcctttcggcatgcacccggtgctgcaagaac

SEQ ID NO: 325737 - DNA, 122 bp, Homo sapiens
gctgtggattgtgccctgtgccccaacaagggcggtgccttcaagcagacagatgacgggcgctgggcccatgtggtgtgtgccttgtggatccctgaggtctgcttcgccaacacggtctt

SEQ ID NO: 325738 - DNA, 122 bp, Homo sapiens
ggtaagttattctctggccggggcggggggtttggaggcggggaccgtccagcgtcagcgcggggcctgggggcggtggcttgagggctcgaagccgggcggctgggcgcccagagccccgt

SEQ ID NO: 325739 - DNA, 122 bp, Homo sapiens
gcaaacacattctagccgccaggagttattaccaagaattccacacttggcaaagaacagcgggcacagacgacgatcaagcaggcgaccggcacgaatcccctagggtacccatccttggc

SEQ ID NO: 325740 - DNA, 122 bp, Homo sapiens
cactccatgaaacatctaacatccaatctatattcagtcctcccctccacgtcgttttcccgacctaggatccagttcaattatattggttgttaaatgtctttgttttgctcctagaagac

SEQ ID NO: 325741 - DNA, 122 bp, Homo sapiens
tggcggagcgcaaggtgcggccaagcagggagtcagagcccctagccccgagagggctcccgtgccctccccagctcactccccgctccgtgcctagctctgcgctcccgcggcgcccccag

SEQ ID NO: 325742 - DNA, 122 bp, Homo sapiens
ctagaatgggggatggtccttgacaggggagccaaaagatgagagacaatgagggagctacgtagagaagtcactaaaaccctccgacaaagtccgaggcaggattccaagtcccttgtccc

SEQ ID NO: 325743 - DNA, 122 bp, Homo sapiens
ttcagaccttggttatgctttttctgaacctctgggtcctgtagtctacttaatcctccacgttgctgctggaattggttccatttctgaactatcaatctgatcatgctgcttgttttctt

SEQ ID NO: 325744 - DNA, 122 bp, Homo sapiens
tgtggcgggaacattctggaagtgacggcaatctctgcggcagtcttctgtcggaagtgacgttgctatcccagaatcctcagagaaggagtagcgcgttcgtgcgtcctagttccagtaca

SEQ ID NO: 325745 - DNA, 122 bp, Homo sapiens
ttcaacgacgttggccaggactggcggctgcggcattttgtagaccagatgtggtacgaacgggaggtgaccttcctggagcaatggacccaggacctgcacacaagagtggtactgaggat

SEQ ID NO: 325746 - DNA, 122 bp, Homo sapiens
aggctctgctcccagggtttcaggtgaacaggagacgtggagcgaggacaccagccctggcgtgtccacgctcaatgatggacaggatttcatgggagaagaaatgcacctgaattcagcag

SEQ ID NO: 325747 - DNA, 122 bp, Homo sapiens
ccaatagtaacatggaaacttaacagggtcttaacctgtgaagactctaggagcagaacccggagtaagggggagcaggggccggagtaaggggagcagggccccgtctaagatggggcagg

SEQ ID NO: 325748 - DNA, 122 bp, Homo sapiens
agtttgaatggcatgcaaactggatacacgattccaaaatagttttttttattccttctccgcttgtcaggggactgtcaccatccaacgcttagtgaatagtttgagaagacaaagaattt

SEQ ID NO: 325749 - DNA, 122 bp, Homo sapiens
cagtgaaacctagagcgctgcctccatgccttttgctgccaaagcccctgattgcaggaccgtgtgctcacagagtgctgggcaggctggggaggtgaggtccgggtgcttcataccgacag

SEQ ID NO: 325750 - DNA, 122 bp, Homo sapiens
gaatattggggggctcggctgcagacttggccaaatggacgggactattaaggtaagcggcggggcaacggacgcgggcggcggggaccggccggggaggcgaagcggcgggcgggtaggtg

SEQ ID NO: 325751 - DNA, 122 bp, Homo sapiens
atcccccagcccctccccagagcagccagaaagaccctatcaaactaagtcacggccaggcgcggtggctcacacctgtaatcccagcactttgggaggcctaggcgggcggaccacctgag

SEQ ID NO: 325752 - DNA, 122 bp, Homo sapiens
agacattagtggttgattactaactcatttcattaaactaaattatgaattggcttttctcgtcagtgtcaccactctgatggcgttcttttccattttccatcttcaccctggccgaatgt

SEQ ID NO: 325753 - DNA, 122 bp, Homo sapiens
atgtattctatttttttctgaatgatagcatgaaaagtgtcaaagtggtttgtccgctagcgtctgtctgcagaactttcaggatgactattaattcctctcagatgtcatttttgagtggt

SEQ ID NO: 325754 - DNA, 122 bp, Homo sapiens
ccattcttttccttcctaacgactagcccaagtttatccagcctttatgatgtgcccagtcgtgttccaatattttacttccatgatctgacttaatcttcaaaacaaccttttaaagattc

SEQ ID NO: 325755 - DNA, 122 bp, Homo sapiens
cttctgcgtccagctgctgtcaccagcctcttgtttgtgaggtgcatcctggaggaagcccgtagctacagcttgtagctttcggttgtggtgtagttttctatctgatgactacaccgtaa

SEQ ID NO: 325756 - DNA, 122 bp, Homo sapiens
cttttccctccaggcatcttggactcaaatatttgctgtttcttcttccctgtcagtacacgccacgcctcatcgtcctgccttggtttgattcagctccttcttctaggctgggctgaagg

SEQ ID NO: 325757 - DNA, 122 bp, Homo sapiens
ctaaatagcagccatgaggcgcctgggggcagtgtcctcgcgggccagcgacgggcaggacgccccgttcgcctagcgcgtgctcaggtaggagactctgcccggggctgcagctgagggtt

SEQ ID NO: 325758 - DNA, 122 bp, Homo sapiens
ctttacggcggccgcaaaatgaggtgtggcgagtcaggcgcgggcccgggtaagtaacgccggcatgtggagtcacagtccccggccgcgcgcaggagctaggtcttcagggaagtgatgtt

SEQ ID NO: 325759 - DNA, 122 bp, Homo sapiens
gccctggggggtggggagtcgcgagcggggaatcacggtcgcgcaggcgcagaagtagtacggtgggccgaaggcgcgcggctgcgcatgcgcactgggcccggggccgggtgggagagttc

SEQ ID NO: 325760 - DNA, 122 bp, Homo sapiens
cgccgtgtcattttagtggggaaacccttcttttattctttggtctcccccttttttcttcgagatcactgtctgtccctccctcgtttaatcaccgccatataaaggaattcccactcccc

SEQ ID NO: 325761 - DNA, 122 bp, Homo sapiens
gccggcccgccgaagcggaatcccaaggcctggatgagaagcgcaggctgccgagaactgcgatcttcataagaggctctggcgaaatccctcagtctgagagggacaaaaatgtgcctctt

SEQ ID NO: 325762 - DNA, 122 bp, Homo sapiens
acatgagtatatcccccaaggaagcctacctgtctatccccaggtacacacacaaacacacgcacacctatgatccacaggggtgactgcaggacattaacttccaaccccttcccaacagg

SEQ ID NO: 325763 - DNA, 122 bp, Homo sapiens
ctgaccaccgcgggcgctgtcaccaagtgctatcgagacatgggcgcccggcaccgcgcccgggcccactccatccagatcaggaaggtggaggacatcgcagccagcaagtgccgccggcc

SEQ ID NO: 325764 - DNA, 122 bp, Homo sapiens
gggatttagtcctggggttctccgcagggcaggggagacttccgaggcgtcccttgaggccgcggggcgtccgcgcttactgttccggggctcgcggggctggaggccttcccgacccgacc

SEQ ID NO: 325765 - DNA, 122 bp, Homo sapiens
ggctggcggcccagcaaagtccttatcaaattcttggaggtgatcctgaagcgctcagaccgcgcgcggggcgagcgagcggggcgcggcgaggggcaagggcggggagggccccggcgctc

SEQ ID NO: 325766 - DNA, 122 bp, Homo sapiens
gggttcccacagagcccatctgcagtggaaacgcacccgcagctgtcttttgggaatgtgcgaggatgacgctgcatttttgaaagaacctccttctatatcagatacgccatgatttgggc

SEQ ID NO: 325767 - DNA, 122 bp, Homo sapiens
cgtcaacttagcgagcgcaacaggctgccgctgaggagctggagctggtggggactgggccgcaatggacaagctgaagaaggtgctgagcgggcaggacacggaggaccggagcggcctgt

SEQ ID NO: 325768 - DNA, 122 bp, Homo sapiens
ccttccaaaccttactctagaaagctgggaggccagggacaggggggtccaggcagagcccggggtcactgggtcttgaacaccggcttgccccgcagccgcagcactctgtacgtgttgag

SEQ ID NO: 325769 - DNA, 122 bp, Homo sapiens
agagataagattttaaaaacacacacacacacaatctcttgactttaataaacattttgccgtttccatcctagtccttgttaatgcccatcacattcaattcagggtaaaagataaggttt

SEQ ID NO: 325770 - DNA, 122 bp, Homo sapiens
cccctgggcattagcagctgtacttgctgcctggatgagacctggcacagctggtgcacccgcagcagggaagatagagggctgtggggaataacagtggtgttaacattgccatttactag

SEQ ID NO: 325771 - DNA, 122 bp, Homo sapiens
aaagcagcaaatatttattacattcaaaaatgaaaaagcagctgtcatctcgctggtgtccgcagcgagggacaataatatctcaggatgtagacgatatgaatgattgttcacttagttga

SEQ ID NO: 325772 - DNA, 122 bp, Homo sapiens
tgcagaatggagtttccatggatttctaccagaccactgaaggagttcctggaagccctgcggtagctagcactgaagactatttttctattggtataacccgcccacctgaaggggaaagg

SEQ ID NO: 325773 - DNA, 122 bp, Homo sapiens
cccggcagaaggccgagtaggagggaccacgcgccgggggccgcgatctctggcagggggcggtgtgccagcggagcaccatgcacataggcgcccagcgccccaactacccctcccgagga

SEQ ID NO: 325774 - DNA, 122 bp, Homo sapiens
tccagtcgaggtggggcgctgtggaagagcggcagcttccggtcggcttttctcttccttcggctgccggcgccagcacgtcctgttttcgttggccgcgctgggatggccgccacagctgt

SEQ ID NO: 325775 - DNA, 122 bp, Homo sapiens
aagctgcgggctgtgatgtggtgcagcgcttcgccggtgttggtgttgccctgtggtaggcgatgcatcgggcggccgccttgacctcctcccgcgagccgaaaacgcccagttcgaaggcc

SEQ ID NO: 325776 - DNA, 122 bp, Homo sapiens
aaaacaaacaaattcggcaaccagatatctcaggaagaacctgtgtttggccctgagcaccgcaaaagggtagaaattctgagatattgtagctatagagagagagacggcatttaaaggaa

SEQ ID NO: 325777 - DNA, 122 bp, Homo sapiens
gtttaacacaggacaccagcttctccaccgggaggaagccttgcgttctgagctcagcgacgctgaacttgttcctgtaggcaacttgtctgaatcccaatttttgccctagagccacagcg

SEQ ID NO: 325778 - DNA, 122 bp, Homo sapiens
gatgaaaatatggaagcattattaattatcgttaagtttcttctctccataggaaattgacgggaaggctctgctcctactcacgagtgacgtgttgctgaagcacttgggggtgaagctgg

SEQ ID NO: 325779 - DNA, 122 bp, Homo sapiens
cagtcacttccctgggggatggggagtgtaccctctagggtctcattccctcagagcccccgatcctatttattccatcagtccatcagggctgcctggtgacccactggagccccatcttg

SEQ ID NO: 325780 - DNA, 122 bp, Homo sapiens
gaaggagtaaagaatgattccgagggagctctgagcgtcctctgggtgctggcagtctggcgggggtcacaggagaaattgcggcgatgtgtgcggtgggagagactgacagcggcctctgc

SEQ ID NO: 325781 - DNA, 122 bp, Homo sapiens
ccaatgcccgggggtgggaggcgctaccggtactcactgagctgatctccagcgccagggcgcactgcagcgccttcaccttcggcatccgtgcggggaggggcggcggggagtgaccccgg

SEQ ID NO: 325782 - DNA, 122 bp, Homo sapiens
cttctgctcttaggctctgctagattgcaaatgacctgctttctttccgatcccgggctgcgttccgacccctgtccgatagtaaatcccaagtaacgtacctgctgtgggcagatctgggc

SEQ ID NO: 325783 - DNA, 122 bp, Homo sapiens
gggggccgggggcggggagggggggggaccgggggcggggcggggcgaggaaaaggacttcgaccagattcttaaagagacaggcgcctgcccaaccccgccgcccaagtttgggaacaaaa

SEQ ID NO: 325784 - DNA, 122 bp, Homo sapiens
aattatcttagatttcctctctgggtatctttttctggccaaatcttcatactaaagagacgttaagccacactgcattttctctaacttgcctgcaaagatttactaaaataaaacagatt

SEQ ID NO: 325785 - DNA, 122 bp, Homo sapiens
cgggccaagcaagcaggtgagctggggcccgctgtggggtcaggaccaggcccaagatctcggtcaccgatcctgacctctgtcaccctcaggaaagtcagtaggagtggtgaccaccacac

SEQ ID NO: 325786 - DNA, 122 bp, Homo sapiens
gaagaggggggtgggccccaggtgggcttgggatgctgagccaggtgcttatcctccctccggggctgctgggagacataagcggcggccaccgatgcaggaaattctggcaggaggtccag

SEQ ID NO: 325787 - DNA, 122 bp, Homo sapiens
tgtgatccgcccgctttggcctcccaaagtgctgggattacaggagtgagccactgcacccgtgccaaaatgtactttatttaggtgactctttcgtgggaacctcaaacaagcaatcattg

SEQ ID NO: 325788 - DNA, 122 bp, Homo sapiens
ggttccctttaactttcttctttcccggggtgaaaactttgctcggagctggcggcagctcgcggacgttattggccggcgccccgcccggcggccccgccccccgcccccgcgctcccctc

SEQ ID NO: 325789 - DNA, 122 bp, Homo sapiens
tagacagcccccgacagtcaggcaggctgatctctgacgcctcctctgcctcttatgagccgtataactccgggaaagctgcttatcttgtcttctgagcctgttttctcacattaaaaaca

SEQ ID NO: 325790 - DNA, 122 bp, Homo sapiens
gagttccggccaatgacgttcgccctcttaggtttttttttttagcccgccctccaaaagcgtgacagccgttgggtcataagtctacagggcagaatgttcacgtggcctatttcacgacc

SEQ ID NO: 325791 - DNA, 122 bp, Homo sapiens
aatgaagccgaatgtccaggcaaggtggctcacacttgtaatcccaacactttgggaggccgaagcaggcagatcgcttgaaaccaggagttcgagaccagcagggccaagatggcaaaacc

SEQ ID NO: 325792 - DNA, 122 bp, Homo sapiens
accccagccctggcttggggctcaggcaacacctcatttctgcccagctcaggccaggcccgtccttcccataggaccctccccaagtcagtgtgagcacagcagggactcctgggggggct

SEQ ID NO: 325793 - DNA, 122 bp, Homo sapiens
gtggagcctaaataaatcactgaccaaattttccaattcatgctctgctgctaaaggggacgttctacaaaatcatgttttaatttctacatctgaaaaaggagtataggtaaagttcttca

SEQ ID NO: 325794 - DNA, 122 bp, Homo sapiens
acagtataaaatcaagattctaattgaaggtaactgggcagaaggatgggccgagattaacggtgtgaatgtgactgacgattcctgtgctgaggcctctgctggacttaagaaagtcagct

SEQ ID NO: 325795 - DNA, 122 bp, Homo sapiens
aacccggagaagagagcagagagacccaccaggactaggaggcagcggggagcgtgcctgcgtcgctcggagcggtgacagcaaggagcgcagcgcggaggccgggcggcaaggggagtttc

SEQ ID NO: 325796 - DNA, 122 bp, Homo sapiens
gctaaaataaacagaagatatagccctgcttaaataagcttaaaatctagatgtgttggccgggtgcagtggctcatgcctgtaatcccagcactttgggaggccgaggcaggtggatcacc

SEQ ID NO: 325797 - DNA, 122 bp, Homo sapiens
aatagacaataataactaggaataggactgagaaatgtattctacctatccttgggactacgtagaaatttggaattctttctgagctaataagacctggtggagggaggaatttacttccg

SEQ ID NO: 325798 - DNA, 122 bp, Homo sapiens
gcagctacagcaaacatgtcagagtacagaacattccattaagagccttatctcatgcctcgcttcctatgatgttttgtatgaataatacaatgtctagaggtgaaattagttggagtgct

SEQ ID NO: 325799 - DNA, 122 bp, Homo sapiens
ggacattaagttgatttcacttgtccgcccttgcccaaatttccatttagattctttgtgcgcctacccctcggttttctggatttcttgctgttgtctcgaggggaagtttagaaatacga

SEQ ID NO: 325800 - DNA, 122 bp, Homo sapiens
aggcctgaccagccgtggtaccaggacaggacgtgtccagggaacgctgacacctgtcctcgcgccttctcagtggccagcgtgatgaaaccagcacgtctccgtggatgtgattgggaacc

SEQ ID NO: 325801 - DNA, 122 bp, Homo sapiens
gcatgggagtaggggagttgaacttgcttctttgggagagttgaatctggtggctgagcacggagcttctcaaaagaaaggatttatagacaaactgcagtaggaaagtatgttcagtcaac

SEQ ID NO: 325802 - DNA, 122 bp, Homo sapiens
tttgctgccctgccttgcactctgtctcgcggcggccagatgtgccggctttggtgctggcggctcttaatgaggtccagatgtgcagcttggcccgggccagcagcggctgctaccaaagg

SEQ ID NO: 325803 - DNA, 122 bp, Homo sapiens
tcattttactgtggcccagaaatttgtggaatcttgtacaaggtcaaatagctaagtaaccgagactagctatcaagtttttatcaaatacctaattaatcccagactcctgacttcagcat

SEQ ID NO: 325804 - DNA, 122 bp, Homo sapiens
tcccgagcgttagtgtcttccacttgttacgtctgcagtctcctgactccgcccaagttgcgtcatcaccttcgccttcattcttttagtgatgtcactgtctcttgttccccagctgtgtc

SEQ ID NO: 325805 - DNA, 122 bp, Homo sapiens
cttggacccccagctcagagcgccctgctgaaccagaggggaccagcctggggtccacctcggcccaggggccctgcagagagcagatcagggccctgaaggacgctttcctttggtctggg

SEQ ID NO: 325806 - DNA, 122 bp, Homo sapiens
gatgaacgtcaagctagccctggacatcgagatcgccacctacgggaagctgctggagggcgaagagagccagctagagtctgggatgcagaacatgagtattcatatgaagaccaccagcg

SEQ ID NO: 325807 - DNA, 122 bp, Homo sapiens
cccccgcgaggaatgcgggatcctggggttccccgcacgtggctggtgcccaggcagttccgcggttgcttagagacgggactgtggctgccctcatccccattgcgtcttttttttttttt

SEQ ID NO: 325808 - DNA, 122 bp, Homo sapiens
tcgtgtaggatactgacgtgcctcccttaacgctgcaataaagaaagctgtgcttggaaacgtcaccgctaatgaaggcatcttccaagatcctggactccagagagtctggaaaaggtcac

SEQ ID NO: 325809 - DNA, 122 bp, Homo sapiens
gaagccaaatgatccctcccggccctagtggagcagcacctgcacctcaaatgtcaaaatcgcaaatcagttcacagcggagatcacaggggtttattctaaggacccgactgtcctccgac

SEQ ID NO: 325810 - DNA, 122 bp, Homo sapiens
gctgagtgctcatatactctcaatcctcccagaactccatgatatgtatagtagtcactccgttttatagatgaggaaactgaggcttacagtgaggtcaaccactttaataagtggggtcc

SEQ ID NO: 325811 - DNA, 122 bp, Homo sapiens
acaaggtcactgtgagatgactaactttcagttggcttctgcgtccaccacaccacagtgcgtgctgcttaagtgcttccgggatggcccgtccccctgctggctgtggctgggcgggcacc

SEQ ID NO: 325812 - DNA, 122 bp, Homo sapiens
aattttccacctagtagccagagcgctcttctccaaacacaaatcatatcaagtccctcccgtcctcaaaaccttcccctggcttcctaacattctcagtagaatatccaagctacctctgt

SEQ ID NO: 325813 - DNA, 122 bp, Homo sapiens
cgggaagtgtgagccgattggccggacttctcactccacggcccagccgtttacggatcgcggaggccatccatcaaaagaattacaccaatcagcggcgaaaatgcccccttctcgcgaga

SEQ ID NO: 325814 - DNA, 122 bp, Homo sapiens
tggcacctacatccacggatggatggatggataaacagacatggcacctacattcacggacggatggatggataaacagatgtggcacctatatccacagacggataaacagacgtggcacc

SEQ ID NO: 325815 - DNA, 122 bp, Homo sapiens
tgatcagatgttctatttcctacagagagatggcggccaggctgtgaggctgcctcaaggcgcagactttggggcttggcccagctagggatgtgacaatcacagccatctttctctctgcc

SEQ ID NO: 325816 - DNA, 122 bp, Homo sapiens
acattcaggtcactgccctcaaagagcaatcaagaggactttcaaaaaatcacaaatccacgcaagccatttaacaaggtttagcagggaccagtgtaaaggatgctacttgttaccaagac

SEQ ID NO: 325817 - DNA, 122 bp, Homo sapiens
ccggccctggaaggttttgtctagtgggttccggatggactggtgttcccagcacccccccggcacgtgtccacgcgtgtggccccggtacggtgtatgccttgccagtaggtgactcaacg

SEQ ID NO: 325818 - DNA, 122 bp, Homo sapiens
agcattgcttgagcccaggagttcaagaccagcctgggcaacagagggaaaccctgtcctcgccaccccaaaaaatgtgtctagtgaggagggttgggacccgtggatccagattaggacag

SEQ ID NO: 325819 - DNA, 122 bp, Homo sapiens
gcagcggcctcggagctcggctcgggcaggagcgcgcggccgtgcgcaccgcgcagcgaccgctgccgtcatggggctgcagcccctggagttcagcgactgctacctcgacagcccgtggt

SEQ ID NO: 325820 - DNA, 122 bp, Homo sapiens
cgaagggattgagctcacagaagaagaaatgaaggagttgatgcctcatttgacatttaacggtgaggtgtatgttttataattatgttaccttcttagaagtgtatttttgggctgggcat

SEQ ID NO: 325821 - DNA, 122 bp, Homo sapiens
tggtcccccaagaagtggttgattttgcggttccactggcgcacgatgctggagacagagcgggcccctgattcagcctcagatgaggtagtgctggccgacacctcagccccagagtccag

SEQ ID NO: 325822 - DNA, 122 bp, Homo sapiens
attcttttcccatggactccagagactgtggcaaaagcctgccactggatctgcctggagcgagcagtgattgtgggagtcagaggcttctggtcttttttcagctccagttggaagagtgc

SEQ ID NO: 325823 - DNA, 122 bp, Homo sapiens
ttcacatctgaatctgatttcagattcctccggaatatagcggaagcgcggggttgagggcgcagaccggggcagaggagaggcgcgcaggtctgctgggacgcagcgcggggcgagcagtg

SEQ ID NO: 325824 - DNA, 122 bp, Homo sapiens
gtaaattctccagaatcttcaggtgggtcaaggttagaggtgccgccatggattggtagacggcaccatgccagtcacgggctgtggccgcccggatgtgaacaggagaagagtcctctgga

SEQ ID NO: 325825 - DNA, 122 bp, Homo sapiens
ttcctagatttattccagttaagcatttataggcatttatctgtgtgtctgatgccctgacgtttttgctgtaggtaagaagtgatggagtgagctgagctgccaggcttcctggagtgatt

SEQ ID NO: 325826 - DNA, 122 bp, Homo sapiens
aggaagaacaggtggcgccggtgaggcgaaggcgagggcacgagggggtggcctgcggcccgcgctgctccggggaggggcttccacctggacagtgacggaagccagggcgactcaacagg

SEQ ID NO: 325827 - DNA, 122 bp, Homo sapiens
gtcccaccccaggtctgcgggggctgatgatcgcagtgatgctggcggcgctcatgtcgtcgctgacctccatcttcaacagcagcagcaccctcttcactatggacatctggaggcggctg

SEQ ID NO: 325828 - DNA, 122 bp, Homo sapiens
cgacatcaaaatgcaccaagccgcaggcatcatataacccgacatcaaaatgcaccaagccgcaggcatcatataacccgacgtcaaaatgcaataagccgcaggcaccatataacccgatg

SEQ ID NO: 325829 - DNA, 122 bp, Homo sapiens
atccagagctgattgggctgcccagaacaaagctaggggctagaccgccccctgcagaaccgccctgtctccagagggtcaaagttctggaaagggctgaaaggtctgaatcatacctttag

SEQ ID NO: 325830 - DNA, 122 bp, Homo sapiens
gagcccgagcaggtgagggggagctcctggacttccaggctggggagcggggctgggccgcgccaggccgcgcggggccgggctggcctggttcccggcctgggaggggcttaacggtcctc

SEQ ID NO: 325831 - DNA, 122 bp, Homo sapiens
tgcgggctcggcggggaggaccccgggagcgcgtccctgggccccacgtcggcctctgcgcgggcaagcccctgggctctttggctctagacgctttccaggcctggggaaaccgcatgcgt

SEQ ID NO: 325832 - DNA, 122 bp, Homo sapiens
ccactgctgtctgccctgcctcccatcccccttggataatctctgctgtcagtctgtgaacgctgctccttcatgtctcaagcacacaccaaagaacatctccatgtttttgcctcactttt

SEQ ID NO: 325833 - DNA, 122 bp, Homo sapiens
caataggaaaaaaatgaagaactgtgtacaatggtgactaaagagcctcagcatgacttccgcccctcagcgccatctataacctgttttaccatgtcggatcccgtctggagaagcccacc

SEQ ID NO: 325834 - DNA, 122 bp, Homo sapiens
cgggacctcgaaatgcctctgctcgctttcctctgcattcatgcggcttgtacgaggatgcgctgtttcctggtggtttgttatacggcagtagataactgatacatctctcttcactactt

SEQ ID NO: 325835 - DNA, 122 bp, Homo sapiens
ttactcagtgcaatgtatagcctgagtctatccatgatggctatatccaatttgacatcacgttatggatcagtacacaatgaaaaaccaaagaaccacagtatatcttattcttaactttt

SEQ ID NO: 325836 - DNA, 122 bp, Homo sapiens
cgcagtgacccccactcccccatgcccaccccagggagacaaagcgaccacagctgggtgcggagctgcctccggcgtccaggataaccaaacatacgaaccggaccccagcccgcgccggc

SEQ ID NO: 325837 - DNA, 122 bp, Homo sapiens
cactggcctcgttctatgccccatctgtggccagacctgcttccctgatagcagcgggaacgaaccatatgtacagtctgtttgacctgcgttttctcctttaataacatatgttatcgtat

SEQ ID NO: 325838 - DNA, 122 bp, Homo sapiens
aggtccgagctttcagcaaagtgccagctttgccaggagcagggacaaaacttccagggccgagactctcattcaggggtgggagaggagctggggactgtctaaaacataacagttaatat

SEQ ID NO: 325839 - DNA, 122 bp, Homo sapiens
gcgccactgcactccagcctgggagaccctgtctcaaaataattataattattaacagaacgaatgagttggactcgcagagcctaagtgacctgcaagaacttcacaaaataagcgggtaa

SEQ ID NO: 325840 - DNA, 122 bp, Homo sapiens
gggctgggctggggcagggtctgcaggtgcggcgggcggatcagcggcacccgctgcagacgcggtcggcgaaacgtcgtcccggccccagctcgagcagcggctccgggtggacctcgcag

SEQ ID NO: 325841 - DNA, 122 bp, Homo sapiens
gactctgtctcaaaaaaaaaaaaaaaagaatttgtcaccgtgtcttcagccccttttaagcgagagaacattctaaccagctggttaagtatctttccacttgacagatatagttctggcag

SEQ ID NO: 325842 - DNA, 122 bp, Homo sapiens
acacggcgcaagctgaccgtgcctgctgagaggttcgtgcctgaggtggacaccttcacacgtaccacaaatagcaccctgagtccactcaaaagctgccagctggagctggcctagccttg

SEQ ID NO: 325843 - DNA, 122 bp, Homo sapiens
gattgatttacacagcgctcagggaattggtttgaccagttgtgtcatttacatagcccacgaaaagactgactctcccaccctagtcttttattattcaaatacggtctccaactggtggt

SEQ ID NO: 325844 - DNA, 122 bp, Homo sapiens
tgctgtttgcttggacaccataccactgaacaaactccacagagtctcgccatctgccagcgggggcgccgtccaaactcacggcaaataaaaggcatcaggtgctcaccatccacaacagg

SEQ ID NO: 325845 - DNA, 122 bp, Homo sapiens
ccacacacacacactcacaagacgcacaaattcctaaaccagcaatgctgcttggcaagacgacacacacacacacactctaacactcacaagacgcacacgctacgcactgcaacacaaag

SEQ ID NO: 325846 - DNA, 122 bp, Homo sapiens
ggggtttgacgaaggttgttgagatctggtggtccccggggtgaagcaaggagcctataacgcatacggagggctacgtggggacagcctgcgtgaactcatcagtggacgcatcgaagggg

SEQ ID NO: 325847 - DNA, 122 bp, Homo sapiens
ttggggtgccgcccatgtgggagacacgcaccctgggtgctagccagcgactccaggacacgccgggccgggcgcaggagctgccggaaaagcaatggcgtccgcgggatgaccccttcctc

SEQ ID NO: 325848 - DNA, 122 bp, Homo sapiens
ccctcaggtaatacaaatatttggggaccataacattaggggaatgcacatatttgctttcgatcatttaagtcagtagagaaaatgaacctcctgggttctaaattaaccccacccagctg

SEQ ID NO: 325849 - DNA, 122 bp, Homo sapiens
ccatctcgattcttcctccctgcagctactaaaacacgcagcgctggcagctgaggggcgcgggccttagcattaccgcagaaactgtgaagggcaaacctggtaattagccggggagagtg

SEQ ID NO: 325850 - DNA, 122 bp, Homo sapiens
tttgtctctccttcctgcgcctctttggtgctgggaggcgggccgcagggtagctgttggcgccgccgcgtttctgggcctggccaactcacgtgaccgacgcgggctctgaagcggtgggc

SEQ ID NO: 325851 - DNA, 122 bp, Homo sapiens
catcacagcttctgaactgagccggagagagagaatggaattgctgacccctggaactggcgggtattctggtcattgaggagacaccatagtggaaactggggcttatgctgctgcctcca

SEQ ID NO: 325852 - DNA, 122 bp, Homo sapiens
ccaaggtaatgcgaaattccatgcatggccaaagggccaccttttgtcaatttcataatccgaatcttagaataaaagaaatcacaagagcataatcaatacatcagtaatatatgcctact

SEQ ID NO: 325853 - DNA, 122 bp, Homo sapiens
ttctgggcatgcctcacagagctaattctttagataacagcgtcaaaggattcaagctcacgagaagggaaatgttgtgtcagtttctgctggttagtctcagtaataatgatagcacatgg

SEQ ID NO: 325854 - DNA, 122 bp, Homo sapiens
gggccaagagcctgcagtgtcatgtcagtcaggcacatgcagtggcttagcatcagaatgcgtggttcagaccgtggccacagtagggaaaatggactcttcatagttgccaagcaatgcta

SEQ ID NO: 325855 - DNA, 122 bp, Homo sapiens
accgtagtcgcggaggcctctgcagaggcgcaggctggaagcggtggcctttgaggggggcggcaggagagagtaccgacctccctcgaactcctggcagaggtgggggtcgcagcaaaagc

SEQ ID NO: 325856 - DNA, 122 bp, Homo sapiens
cgccgggccgccctgttaggctaaatgtgcagcctgtggcggcacaggccgccggcgggccgaagccgatttacactgttacattttaatttgttcgatgtttgggtccttaagatgatggt

SEQ ID NO: 325857 - DNA, 122 bp, Homo sapiens
gttaccactatcagaattcctcccaaaaccctcccaagtctttgatctgcactcccttcacgggcaagttttcatagctgcctttgtttttgcctgctgtaatggtattgaagctttaagtc

SEQ ID NO: 325858 - DNA, 122 bp, Homo sapiens
cagagcctggcgcgggcactgcccggacccacttggcctctcttgagtcgccgcgatctccgtctcctcccgggcgtctctgctgccccctagagagggggccactcgcagtggagaactgg

SEQ ID NO: 325859 - DNA, 122 bp, Homo sapiens
gaggcgtggcttcaggaccggaagaagctcctgttgccaagggaacggtgcctgccaaggcgcctgctcagcgactgatgcacagactgctgcagaggctgccggttttcccaacttctaga

SEQ ID NO: 325860 - DNA, 122 bp, Homo sapiens
ttcctggagttcctctatttttgtttgaaggccattggaaactttctctgaattgcctagcgaaatccagcctcttcacttttagcaagcaatactatagcacacagagttttgtttagtta

SEQ ID NO: 325861 - DNA, 122 bp, Homo sapiens
atacaccctgcacaggcaattctgttctcccaggtatccgcctggccctatccttcgtaacgctggtgccaccatcaccctatgactgagcaccccctggcaggttcacgttcatttgcgtc

SEQ ID NO: 325862 - DNA, 122 bp, Homo sapiens
tctcccaggagggcaccgcccccaaccagcggggtgcacaggggaatgatgttgcaagttcgagcccagaggtgtctcgctgtcccccgcccacccccgggtcattcctcgccgcccgtttt

SEQ ID NO: 325863 - DNA, 122 bp, Homo sapiens
aatgggctaattggctctaatgtcatcagaattgtgaccgcaagatgctcacatatgggacgagggcctgcagagacgcagaaaggagggtggcggtgagtggtggggcggaactggaggtg

SEQ ID NO: 325864 - DNA, 122 bp, Homo sapiens
acttcacacccggaatcgggccaagctactcagccagcggccgcgcagagccgaggccctcgtctggggacaaattcagtgcttgagtttggatcaggggtgtgaatgaggaaggagggaca

SEQ ID NO: 325865 - DNA, 122 bp, Homo sapiens
agaagaagaccccggcttgagagtgaggtgtgctgggcggagtgggggaggacctcgaggcgccccggcaaccaaccgtgttctaaccaactggcaagtgggaaaagttgacatgactagag

SEQ ID NO: 325866 - DNA, 122 bp, Homo sapiens
ggtttggtgaggccacacagggagtgagtggggaggatctaggtgccagcagtctgaatccgggatcaggcgctgaccaccatgcaatacagccccgagcgcaggaagagaggaggaggaaa

SEQ ID NO: 325867 - DNA, 122 bp, Homo sapiens
aaggctcagtagatgttagccatcatcatcactattaccattataatgatatccttcagtcgtggacaccccgcctcaaagacagacaatgacaaacatctggagcacgttcagaggacagc

SEQ ID NO: 325868 - DNA, 122 bp, Homo sapiens
gtatacttgcttctgtgtcattctagccaaccctgttgcatgataatgacaacccaagctcggagcaatagagacacagagtttattcaccaattcagtacacaccaagtaaaatggggtcc

SEQ ID NO: 325869 - DNA, 122 bp, Homo sapiens
acaataaaaggaagtaaaatttatggagaaattatacagtggatttgtcacttaaaatatcgtaactgtctggaggacaataccccatgctgaggattaatggtcccgccggacctttgatt

SEQ ID NO: 325870 - DNA, 122 bp, Homo sapiens
ccgtgtggctcgctttctgcagtgccgcttcctctttgcggggccctggttactcttcagcgaaatctccttcatctctggtaagccctggagtagcccagtctccagtccctgaaattgac

SEQ ID NO: 325871 - DNA, 122 bp, Homo sapiens
tcccagagcagatggtttcagattcccagtacccccacgagcacagaaacatccttacctcgcagtagacgcagcaaagaaagaacgtctgtcgtcattacgtacttgtatcgcgtaagggg

SEQ ID NO: 325872 - DNA, 122 bp, Homo sapiens
cacaggcatgggtgggtgagtggccctgaaggcccctgaagcagtgatttgtttgctgcacgtctgtgcgaaagccacacggagccatcagtgtgggcgcctgtcgcagggcgggcacagcc

SEQ ID NO: 325873 - DNA, 122 bp, Homo sapiens
ttggcccctgcctctcttgggaccacagaggaggtggcagggccaggcgtgccagctcctcgatcccctcccccagccctggagccttgtgacaagctaccctctccacgcccacccccagg

SEQ ID NO: 325874 - DNA, 122 bp, Homo sapiens
gagtacagttttacttgtatcgccttccaaaagtgttctacatgctgacctttcacacgacgtgaaggctggggctacctcctgtggtgggatgtgcccagctctttgccaagcagcagcac

SEQ ID NO: 325875 - DNA, 122 bp, Homo sapiens
acactggattggattggtccctttcagttgtttggagtctttaaaatatttgaacctctacggtgttcagggctcagagacagagcagtgaagaaaatatgtgttgtttctgcttatgaaaa

SEQ ID NO: 325876 - DNA, 122 bp, Homo sapiens
ggcaccctctgtgagggaacaggccttggggaacccttctctcattcaagagcaaacctccggaaggccagtctgaaaatctatgtgttttcctcttaaaaagcacatttccaaatgggtac

SEQ ID NO: 325877 - DNA, 122 bp, Homo sapiens
gctattgatggtttctagaaaaaacaactgggattataaaataaaggaaagcttcagtaccgcctttaatgcttaccaagcagggctgcattacagactttgctgagtcaagaaaccaaaac

SEQ ID NO: 325878 - DNA, 122 bp, Homo sapiens
cagaggatccccgctctccagcgccctagactgaggcaggagaagacctcagacccgctccgccctgaactagagcacagtgggacccgcgacctgccttggcctcaggcactggaggacac

SEQ ID NO: 325879 - DNA, 122 bp, Homo sapiens
cgtgcggtcactgaggccccgccgaccacagacggtggagctgcggggaagcactaggggcggagacccaggtcacggagagcaggccagggccaggggcctgagaccgacggaggggacag

SEQ ID NO: 325880 - DNA, 122 bp, Homo sapiens
tgccccggggcgctggcgaaagtccttccgtaggactcagacccacatccactgtgcaaccgtgtgaggcacaccctcctcgccggagggttttgaggaaatgacaattcgggtgtttagag

SEQ ID NO: 325881 - DNA, 122 bp, Homo sapiens
ggacgggcctggacggcgcagtcacctacagggcgagtccacccaccctctggtgcgtcccgtcccctccgactgcccagcgagcgcagcctcgcttcctccggactgagcctggggacccc

SEQ ID NO: 325882 - DNA, 122 bp, Homo sapiens
catgacttcagtcatgagcaatacatatctgcacccgcatttgcaatgtgccccacccagcggctctagggctcgcagagcgctcttcccttttagacgtgtgaaaatgcctgagtcccagc

SEQ ID NO: 325883 - DNA, 122 bp, Homo sapiens
agtagctgaggttgagggaaagggtgttggctgagatagggcatcaggagcaaagcagggcggacagcagctggtgtcagtgtgttcaagggacattaatggagcagtgtggctggagtaaa

SEQ ID NO: 325884 - DNA, 122 bp, Homo sapiens
gttctccagggaacgcagtatgatttgaatacagatctctgcctccagagatgagtgactcgacaccgctgcggagaaggctccgaggagggttggtggggactcgaacctcggagtctctc

SEQ ID NO: 325885 - DNA, 122 bp, Homo sapiens
tgtgtgtgtgtaggggggtgatacaagttttccacccgctttaggctgaggccctgtaagcgggactgtgttctagtacccggaaaaagcgcgcggcctgtgacacatcaggtgccaggccg

SEQ ID NO: 325886 - DNA, 122 bp, Homo sapiens
accagtagatttgtattccattattccaacccctttagtcattttgtttttacactaggtcggcatttctagggctgggacgctctgaatatgcagaaggtggcaggaagtgcagaaggtag

SEQ ID NO: 325887 - DNA, 122 bp, Homo sapiens
atgacaactactacttacagatctccaactggggggactagtggagaggaaactggatggcgagctcggatctgacgcacctcccaggccggagcgtccaaatctccctgcgcgtcctcgga

SEQ ID NO: 325888 - DNA, 122 bp, Homo sapiens
tattaagcacctactgtgtaccaggcactggtacataagaaggcattggagcaggggacacgaacgaggcacagaaagggccttctcattcattcattcattaccggcaatttatttgtgcg

SEQ ID NO: 325889 - DNA, 122 bp, Homo sapiens
ccgcggcccggcaggctcgcgtcagctccccggccggggccgccagcgcccgcggctcggcgcgctccgcaagctttagctctcgctcccccgtccgaccactcgggcgccctgcagtctcg

SEQ ID NO: 325890 - DNA, 122 bp, Homo sapiens
tactttccctgaacaatctccttttctccacacagaacccaacctccaactgagtgaacacggggaatgctcagatagaggtaactctagacgtccctttcctcctttggaattgttctatt

SEQ ID NO: 325891 - DNA, 122 bp, Homo sapiens
gtccgcacaggaatggggttaggctgtcagaagcgcagccccctgcgggctaagtcggctcgggcctcctgtatctggctctgcagctcgcgtgcggcgtcctcgcagtcatgaaaagtggc

SEQ ID NO: 325892 - DNA, 122 bp, Homo sapiens
tcccccttcggcccctctggggatgccagggctgggctggctgcaggggcgctccccagtcggccctgctccatcccgctctgcttctgggcttgctcctcctcactgggagtctctctggt

SEQ ID NO: 325893 - DNA, 122 bp, Homo sapiens
tcctcacttcccagacgtgatggcggccgggaagatgcgctcctcacttccaagactgggcggccgggcagaggggctcctcacatcccagacgatgggcggccaggcagagacgctcctca

SEQ ID NO: 325894 - DNA, 122 bp, Homo sapiens
ctgctctttgttattctgcgggagtgggctcgcccgggggcccctgtgtgtgtgcgtgcgcgcgcggaggggcgcagcgattatctccgggagccccgcgtccgggaccgcccgggacactt

SEQ ID NO: 325895 - DNA, 122 bp, Homo sapiens
gggcgccgcttcctgagctccgaggccccgagggcgggacgtttcgtcctccctgccgcgcgtgccctgcctaccacgagcggcccgggagtacctgtacctttcagctgcgccggccgcga

SEQ ID NO: 325896 - DNA, 122 bp, Homo sapiens
ccatgaagactttctcctcttcctctctctgcaaatcaatgatattagtgtcagtcctcccgaggagccccagggctccgggcaggaggcctcaccccagaagaaataataaggggaaccaa

SEQ ID NO: 325897 - DNA, 122 bp, Homo sapiens
cctccccgctcgcgggtaccgaggtctgaggcgctcttctctctctctccaaacttggaacgagacttttcaacccgcgcctcccagcccgcccaggcagctgagcgcaggcgcatccgccc

SEQ ID NO: 325898 - DNA, 122 bp, Homo sapiens
cccatcagcgcttgcactgtgccccggggaccctggtatccctggctcgagcccagcgtgcgcctcggcctgctaggggtaccccaagacagacagaaggcccatgagggaaaggtgagaca

SEQ ID NO: 325899 - DNA, 122 bp, Homo sapiens
gggcgaattacttaactcccagcctgtttccacgtctgtatgtggggtaacatagtgtgacgacggcacacttctccgcaccgctggcccttaacaagcgtctactgttgctgtgagagtcg

SEQ ID NO: 325900 - DNA, 122 bp, Homo sapiens
gggcctctatctctcatctgtacgacaaggaggcgacttcacggcctcctcttgccccctcggttccaacaatttcattattggagtcgtcttcggagagaaggatgcatggcgtgtttccg

SEQ ID NO: 325901 - DNA, 122 bp, Homo sapiens
ggcaattctgggctcagcggaaaccgcatggggcagagggcaggagagcctcgcccagggcgcgtctaaagctctatgtgtgtgcgtcccaccgctgcttctcactgatgccatctcaaagg

SEQ ID NO: 325902 - DNA, 122 bp, Homo sapiens
agaaaccagccatagtccccacactccgccgccgcagctgagatttagcggaggaaggggcgagggaaggtagggagcaaacctatgaagaaacatcgcgttgtcattggaacttccaagcc

SEQ ID NO: 325903 - DNA, 122 bp, Homo sapiens
acctcctcactggaccagacggtgaaggtacgccgcccccaccccaccacggtccatgagcggagcccagcagccgcaggtcctcagccaggaatgcaggaatcgcctcctcccgctccctg

SEQ ID NO: 325904 - DNA, 122 bp, Homo sapiens
aatgggaaagctctctctcataaatgatctggcgtttatctcagagaagaagtttccagtcgtatcacacacttgagagggctctgagccagtcgctctgtgttgataactttcatactctg

SEQ ID NO: 325905 - DNA, 122 bp, Homo sapiens
cccaccctatctaccagagattctggcatctacacaccttggaaagtgggtccctcctcccgcagggctctgtctgccccactgtccactttggatttctgcgctggggaacatcagcagca

SEQ ID NO: 325906 - DNA, 122 bp, Homo sapiens
tccctccgcccgcccgccctccctccctccctcgcgctctctcgcgctcgctcgctcgctcgctccagtatgtaaatgtgtaatagaagccaaatatggagcagttggctgccgccgccgca

SEQ ID NO: 325907 - DNA, 122 bp, Homo sapiens
ttttctttttttttttcgaggcgaagtctctctcttgtcccctaggctggagtgcaatggcgcgatctcggctcactgcaacctccgcctcgcagattcaagcgattcttctgcctcagcct

SEQ ID NO: 325908 - DNA, 122 bp, Homo sapiens
gttaatgagacattagctcatttcacatcctaaatccaaaccctcttcccttggctaacacggggctgggttgggatgttcacattgaccataatcattgggaaaagaaacttagggacttc

SEQ ID NO: 325909 - DNA, 122 bp, Homo sapiens
tagaagcaactcctgctagggagaagctctgttctatttccatttcctccctctgtgctgcggtccgtctctgctgtttgcctacctctttattcgtagctcactgaggccaatgtgaacct

SEQ ID NO: 325910 - DNA, 122 bp, Homo sapiens
tccaaacataagcctttgtgctttgcttttcccagcatccttgtgcttgcgtgacttttccgttgtcagaggcatctactttgcctggaggagaaggaggattgttaaagcaggaatttaaa

SEQ ID NO: 325911 - DNA, 122 bp, Homo sapiens
cggggtcttcgcgactgtccgccaggactcgcctgtgctccctgctcgcctcccagtccacgaatatctcagggatgagccatctggtcgtgactcttatgcatgaaaatctgagcaccctg

SEQ ID NO: 325912 - DNA, 122 bp, Homo sapiens
aagccggtgccgggcgcccaggggttgccgcgctgggcgggagggcagcgcctgagagggcggtggggtggcggggttcctgcgcgcggcccgccatggaggtggaggaggcgttccaggcg

SEQ ID NO: 325913 - DNA, 122 bp, Homo sapiens
ggatggctgagccacactcacccccggctttcagagcggggtcagcagatgggcatcaggcgaaaatgttctgttcctggtacttgcgccggcgggcacagcgggggcagcccttcttcacc

SEQ ID NO: 325914 - DNA, 122 bp, Homo sapiens
cccacaagcctgacttgagccagctcatccacttaggaaatgcaacccctggccagagcacgtccacaatgaggactgcccccagcgacgccccaccctggacccctgtttagtggtagcca

SEQ ID NO: 325915 - DNA, 122 bp, Homo sapiens
cgtgcgagcagggcgagaaagctgtctccgctgccggtcagctgggtggcttgcgaaggacgcttcgcccctagcgaaaaataccctgctggcaaggcagttatgaaagttaagacatattt

SEQ ID NO: 325916 - DNA, 122 bp, Homo sapiens
aaggcctactgtctatcatttggtggtgttttatggtcttaaaccctctggaccaagttccgcacagctgcacgaatttcatatgtgatagaacattttttccattcagtgtgaaatgttcc

SEQ ID NO: 325917 - DNA, 122 bp, Homo sapiens
ctcgcacgcgctctccctgaagtttcaccagctcctccagcgccgcacgctctgccatcccggctgtccacttgagccgcctgctgtctcgacctgcggtggttgccccagcctcagcaagg

SEQ ID NO: 325918 - DNA, 122 bp, Homo sapiens
acttgtcatttacattaggtatttctcctaatgctatccctcccccagatccccaccccacgacaggccatgttgtgtgatgttccccgccctgtgtccaaatgttctcattgttcaattcc

SEQ ID NO: 325919 - DNA, 122 bp, Homo sapiens
aagtcaaagagatgagatctgggacagttaaaagttgaagtgttcggtgaatctccccggcgtagaccttgctcgtgtagattcactagtctaaaggatgtaaagatttttttttttttttt

SEQ ID NO: 325920 - DNA, 122 bp, Homo sapiens
gcgaagcgcacgtggcagttggcgggaaatccctggggggtggagcctcggctcgaggtccggccgccccgtaccacgtcatcgagcagctccccctccccttgctacaagtcgcacgcgcg

SEQ ID NO: 325921 - DNA, 122 bp, Homo sapiens
agaggtggagaaagaaaaccctgtagcaggtgtggttgttgccgtctttgcagtgccaaacgtgaacccgcctgtaggggccccagtgcctccaaaattaaacccgctcatggctccggact

SEQ ID NO: 325922 - DNA, 122 bp, Homo sapiens
ggcattccgctgggatacttctacggggaagcttcctgcccggggcatcgagggcgttcgcgtccgtctgttatggcggtgctgctgtagataaccggatccgcgaatgctaacgctcacca

SEQ ID NO: 325923 - DNA, 122 bp, Homo sapiens
actgaggggcgggagagggatgtggcgacggaaaagctcagagccgccttcagcagcgggcggactgtgaccctcccagggcagggccggctgtttcccccggaaacgcagagaccccgcag

SEQ ID NO: 325924 - DNA, 122 bp, Homo sapiens
ttccgttgcttaggagcactgggaagtgtagttcgttgccctctccaggcgcttaccaagcgctcggaaacgccccagggcgcttgcgcgtgggaggcgcgcgccctccccatagactcccc

SEQ ID NO: 325925 - DNA, 122 bp, Homo sapiens
gctgaggccagtgagagcccgagcccaccaggaggaatgaacaactccggatgggagaaacgaacaactccagatccgccgacttaagagctgcaacactcaccgccaagctatgcagcttg

SEQ ID NO: 325926 - DNA, 122 bp, Homo sapiens
tactgagtagttagtaggaccctggctataacatgcgttgggcacagttcgtgaactctccgcatttactccccagggcagtacgtgcctgtccagcgggagccctggagacaaaatgcctg

SEQ ID NO: 325927 - DNA, 122 bp, Homo sapiens
aactaaataagtaaataactggagtgaaggccaactgctgcttaacagcttccccagttacgtacacactttcaaacaagcatgaaatgtaggtctctggacatcgcttaaaagaaccacaa

SEQ ID NO: 325928 - DNA, 122 bp, Homo sapiens
aggggagaagccgttccagtgtgagtttgagggctgcgaccggcgcttcgccaacagcagcgacaggaagaagcacatgcacgtccacacctccgataagccctatctctgcaagatgtgcg

SEQ ID NO: 325929 - DNA, 122 bp, Homo sapiens
cgcaccagtcccctagagaggcgtacccgggtcccgcccgccagagcctgagctttgtaccgcccaccaaggccacgccccctaccagctgtggggcgccgcagaggtcctttcttcggctc

SEQ ID NO: 325930 - DNA, 122 bp, Homo sapiens
cccattattaagtgatttatgttgacaccacatgcttcacaagggacacagcaatctttgcgagttggatctggagctccttctttgcctgtgaaacggaggttatggaaagggcactgctg

SEQ ID NO: 325931 - DNA, 122 bp, Homo sapiens
ggagaaataggagcgcacacatgggtcacccaacgaagcaaggcgtccctgtgaactgtgcggctggctcttgggggcaacaccagggctgacctgaggaaagggcaaccagtactcccagc

SEQ ID NO: 325932 - DNA, 122 bp, Homo sapiens
ggatgcttaataatgaagacattcttgaatggtggaaaggttccaaatagacttgtcttgcgctagtgtctttcatagtgtctgtgatttgttttactgaatataatctattttaggtaaac

SEQ ID NO: 325933 - DNA, 122 bp, Homo sapiens
cagaggagtgagggtgtctgtgccgttgcgtggaggggagtgggtgagcctctgaaagcgcgggtgtgagttccagaaatgaggagagactggcaccaagaaaaaaagtgccttgcccatct

SEQ ID NO: 325934 - DNA, 122 bp, Homo sapiens
tccaagggcgtaagctagaggggcccgggcgggcgctttcccgtggaccctcccacctcgcgggtagaggaagtccttcagttcaggcacaaccctgagcgtcccccgcagtctccaactcc

SEQ ID NO: 325935 - DNA, 122 bp, Homo sapiens
ctactaaaattgtgagtcagaagccaaactaattttggctactaaattagttacttccctcgggcctaccaatcttcatatgtataccatggcttattttgacttagctggttaatttatcc

SEQ ID NO: 325936 - DNA, 122 bp, Homo sapiens
aaatcagatatgttaagtgccggtatcttcttccaaagtagggtcaaattcgtgtttgcccgcaaatgtcaccgtcctagtaagtctgcaaattctcactagcgctggagtacaaagaggcc

SEQ ID NO: 325937 - DNA, 122 bp, Homo sapiens
ctcatggcgacatgttactaattgtcctctgagaaatagcccgggtgccaccagagccttcggtccctaaggaacaagtatccaacgctgctccaccctcgtggtgggacgcctgaacacca

SEQ ID NO: 325938 - DNA, 122 bp, Homo sapiens
caaacgggcaatattatcataaataatatttgtagacacaatgggtcattatattattatcgctgttattattctgatttccaggagtcttgcacaattttgctacagtgaccattataatt

SEQ ID NO: 325939 - DNA, 122 bp, Homo sapiens
ctcagggccacccgccgcactaagtttgagggttccctctgcctccaggcctctgtcgcccgagctcaggctctcctaggtgcttcagggccgggctgcactcgagccccgaggaggccctg

SEQ ID NO: 325940 - DNA, 122 bp, Homo sapiens
actccctgcatcacgtagaggctgtgctggtccaaagaaggctcaaaagagggcagtttgcgcacacaacgtgtcggggcagggcttccagatgatcattcggcttttttgtgtcttccaag

SEQ ID NO: 325941 - DNA, 122 bp, Homo sapiens
gccctggcctccttgagggaccacaaggctggagccgttggccacacggaggtagggttccgaggcctgcacctccagcagcgcagtggcctggtgttgcccgtcggacacctgcagctgga

SEQ ID NO: 325942 - DNA, 122 bp, Homo sapiens
cctgtgcatctgggataagcatccgtttgttttcagctgcgctttctgtgacttgctctgcgtgagtcctcggtccacgtgggccgttgcgctggttcccagcctgcccgacacactcactg

SEQ ID NO: 325943 - DNA, 122 bp, Homo sapiens
tccacaagccccactcgtccactagccccacaggcataatctggagagaccagggagcttcggtgtgggcgatgacgagaagatgacgttgctgtaatcggcaccgacagtgggcgcgtatg

SEQ ID NO: 325944 - DNA, 122 bp, Homo sapiens
cgctaagttcaatgtcgacctcttgtgtcacacatgctaatgacaaaataaaacaaaaaccggttttagaaaaacaggaattgtaatcctagtattttcagaggctgaggcgggaggatcac

SEQ ID NO: 325945 - DNA, 122 bp, Homo sapiens
gtcctggccaatgtcgttgaagctgaagggaaccagcacgtccagggtggggcctgactgcggagagaggggccaggctcagctcctaggtccccaaaaagatctggggccagtgtgctgca

SEQ ID NO: 325946 - DNA, 122 bp, Homo sapiens
ccttctggttttggtgaaccctgcttttataagaggactccctggcatcttccagtttcccgctacttgttttatgtattattttatgtctgtgtttgtcctggagtgctgtaactcctttc

SEQ ID NO: 325947 - DNA, 122 bp, Homo sapiens
agagctcctgacgtgcaataggggctctgaaaacaggagacccttgccctggaatggagacgcaccccagatgtaggatgcagtgtgactcttttgacattttaggagaaagaatcctccaa

SEQ ID NO: 325948 - DNA, 122 bp, Homo sapiens
agaacgagattgcagggacgctgcggtgggagaagtcgaattcccaccctgttcgtcctccgcaaagagtgactgaggctcaaaaagccacagccttgcccaaaacggatgcagcgggcgca

SEQ ID NO: 325949 - DNA, 122 bp, Homo sapiens
ccgggccctgccacggagccagagccggatgccccgaacacgcaggagtcacagggcgaccggagcgtgacttcggattccacgttgctttgccctctgcaaggggcctgctggccactatc

SEQ ID NO: 325950 - DNA, 122 bp, Homo sapiens
aaagttgctttgctttttgcaccagaccaactcaccaagttattttctatggattatacccgtgcacataatgtagtttcctgattataaattaaatatccctaatgtccacgttgaaacac

SEQ ID NO: 325951 - DNA, 122 bp, Homo sapiens
ccccacccacccccagtggtctgactggttcccgacaaaaacaccctaagaatgagctcacgcagaggctgccgcctccacacgccccgcctcactctgccggcagaggagggtgcctctgg

SEQ ID NO: 325952 - DNA, 122 bp, Homo sapiens
cgagcggctgttgccgtgcggaacccaaggcctgtgatccccacagggtgtttctggcaccggaacgcaggggccacatccaggggggcagtgcttgtgacgccggtgccttcgtttctgat

SEQ ID NO: 325953 - DNA, 122 bp, Homo sapiens
caggcagtgctgctgttcccttcacagtcctcggaggcagtgaagcctgtgcttgagacgcgcagggcggagtgcttgttttggagagcattcagcggatagcatttggtttcctccattta

SEQ ID NO: 325954 - DNA, 122 bp, Homo sapiens
tagactcacaggtggcgttcccctgcatgtctcccttccacctttgttgtggtttgtaaacggaaacaaaaacaccagccagcatccgtgtggtgctcattggtggtggctgccaggggcca

SEQ ID NO: 325955 - DNA, 122 bp, Homo sapiens
tggccatgtgtaggtgttcctaccatggccccagctgagatcccagatgacagcatcaaccgcctgacttgtgagtgagccagccttttgatgattacagctcccagcctttgggccaccct

SEQ ID NO: 325956 - DNA, 122 bp, Homo sapiens
gaaggggagaaattcactcctgcacgagttcccagctactctctggtgaaagcgggagggcgaagcgaaattgtgttctagctctgagctccgcagccctccaatggctgacttccttcagc

SEQ ID NO: 325957 - DNA, 122 bp, Homo sapiens
aagctcttctagcctccgggttgacagcaccctgggcagggactcaagctgagcccttcacgctctgagactttggtctgctcactgtacctctctgagacagtcacctccctcatgtgaaa

SEQ ID NO: 325958 - DNA, 122 bp, Homo sapiens
ccaagcaggcagtaggtggaagaaaaggctcagcagcagaaaagctcccggtaaccaagccgacaaggcctgcccaggctggcaacatccccctggcaaaggagggagggaccggcgcagac

SEQ ID NO: 325959 - DNA, 122 bp, Homo sapiens
cgactccagccaggcggggctccaagccgagactcctgcacgcccggcccgaagctagcccgacaccctcagctgagtcctccgccgtcccagcattccctgcgtccctaccatcgagagca

SEQ ID NO: 325960 - DNA, 122 bp, Homo sapiens
cgtggggtgcgggcgcggagcagaagttggccacaggctggagggggtggtgggtgccggcgctgctggatttcagctgtgccttcacccaagcgcaggtccccctgctccctctcggcgcc

SEQ ID NO: 325961 - DNA, 122 bp, Homo sapiens
caccacccgcgcccgccgcttggtactcacccgcctgccggtgcgctgccccgccgtcgccgccgggactcggtctctaagggctcctggagacggctccgacctctcctcctcctcctcct

SEQ ID NO: 325962 - DNA, 122 bp, Homo sapiens
ggacccggtgcacactctgcagctgctggcccaggtgctaagccccttactgcccgggaccggcggcaccagctggctgctccaagtgcggagtccgctgagcccacacccacctggaactc

SEQ ID NO: 325963 - DNA, 122 bp, Homo sapiens
tcaccctgcggagtatcaacgagcacatgcacacgacgccgtggaatactcgccctgcagcgtatcaatcagcacatgcacacgaccccctggagtactcgccctgcagcgtatcaatgagc

SEQ ID NO: 325964 - DNA, 122 bp, Homo sapiens
ccggctgttccgcgtccccttgccggctcacaatgtgctgaccctcccggccccgccgcgcgcctcacaggtctctcgacctccgcgctccctcaggaagtgacagactccaggccccttcc

SEQ ID NO: 325965 - DNA, 122 bp, Homo sapiens
aatcacaaaaaaatctcataatgttttaagaaagtttacgaatttgcattgggcctcattcgaagctgtcctgggctgcatgcagcccataggccgcaggttggacaagcctgacctagagg

SEQ ID NO: 325966 - DNA, 122 bp, Homo sapiens
ccggtgcggaaggtggcgggggaggggacggtcggccgaaggctccccggggcgggccggcgggagtcgtagtcagtggtgatttcttctggagtcgtttcctcagctccttccagcccctt

SEQ ID NO: 325967 - DNA, 122 bp, Homo sapiens
atcccgcaattgggaacatacccagtgaatgtaagtttttctaccatgaacacacatgcacgcgtatgtttattacagcacgattcacaatagcaaaaacaagaaataatcctgtatgtctt

SEQ ID NO: 325968 - DNA, 122 bp, Homo sapiens
actaatggggacagatcagatttagaatagagtggaaataccacactgtgcactgagtgtcgattatgtgccaggccaggggatatgaagaaggataagacaagatcaccgctgtgaaggaa

SEQ ID NO: 325969 - DNA, 122 bp, Homo sapiens
ttacagaacgaattcagtggttgtttgcagctctggaatcccaggctgcagagttgagatcgaagaggtgcgtctggccatcttagcgttcattcaaccaaatctcctcactccatcaaaac

SEQ ID NO: 325970 - DNA, 122 bp, Homo sapiens
ctgctcctgctgcttcttccggataaacgccatggagggtaggcgcgggcgggcgcagagcgcacaggcaggccccgccgccgcctgccgaggaggtccggaggagccggggagggcgggat

SEQ ID NO: 325971 - DNA, 122 bp, Homo sapiens
tgctcgatcacgtgatgttcagggcttcagtgatgatgatcatgtgtcgatgctagatcacgtgatgttcagggcttcagtgatgatcatgtgtcgatgctagatcacgtgatgttcagggc

SEQ ID NO: 325972 - DNA, 122 bp, Homo sapiens
tggtgcagctgctgctggaggtgcagctggtggagctggtggagctggtgcagctggtgccgggcggccggctcgcgcgcctccgcgtccccgccgccgccaagttggagcgggccgaagtc

SEQ ID NO: 325973 - DNA, 122 bp, Homo sapiens
cccgactcacagtccacggagttcgagagccttcccccttccccccgccccgggtgggtgcggccagtgggggatttcaccgccgaaaggtccagaaaacccaagcccagaatccgggcaag

SEQ ID NO: 325974 - DNA, 122 bp, Homo sapiens
gctgggccattccctgcaagtgcgtgttggtcccttagggcttgcccaggggcgcccccgcgctctggcatctctgtaccaggaggatgagcctggcgaggtctgagagctccgggaacgcg

SEQ ID NO: 325975 - DNA, 122 bp, Homo sapiens
gtaaaacgtgtccagtcactaagagacagtccccctactgtgtgtcctttgttttctgtacgtaaaacctaacctcgaccccatgttatagtgtctcctcccttcacctgcctctgagattt

SEQ ID NO: 325976 - DNA, 122 bp, Homo sapiens
cgccgtcgctgctgcttgagatcctgttgctagtttgattaactcagggttgggctgctgcgtgcgactcttccagctcccggcgcgtccccagaggtccctaccgggtggcacgatctatt

SEQ ID NO: 325977 - DNA, 122 bp, Homo sapiens
gcgggccatcccctatgccactcaataagcaaagttaaaaccgagaaactcagcccacaccgcaggctgcaggctgcaaggcctcgcctcagtggctactgattcagcgtgcacagaaggtc

SEQ ID NO: 325978 - DNA, 122 bp, Homo sapiens
tgctcgggtccccggccggagccctaaacctgggagagggcaatccccgcgccggcctcccggctcctgtgcgggagtttaccgcgcgccttctggcgagacgcgtggctttatttctgttc

SEQ ID NO: 325979 - DNA, 122 bp, Homo sapiens
ccccctgggggcgggactggggaggcagccaatgaagtcagcgctgggcgggcactggagcgagcctggctgcgcggagagctcatcccgggaccacagggcccggggcggggctcggggcg

SEQ ID NO: 325980 - DNA, 122 bp, Homo sapiens
gcaggaagacctggctgctggtggcagggcgggactctggccgtgacctatacgtgggtgcgcctgtttttttggttcagccctgggttgcagccttggagatgatgtcgaccttgggagag

SEQ ID NO: 325981 - DNA, 122 bp, Homo sapiens
gaggtctgcctttaataatcaagcaggatccccactgcggggtgcctatcagagtgatggcgctagtcagccttccggcttgtccccggcttaaatgatagaaaaccacgtgttagccttct

SEQ ID NO: 325982 - DNA, 122 bp, Homo sapiens
tacgtcacttccgctcgcgtccctctcggcctcagagcgacttcctgtgaacgcgcggcgcgcgccgtcaccctcctggctccgcccccgctccagccgcctaggcgtcgccctgcgtggag

SEQ ID NO: 325983 - DNA, 122 bp, Homo sapiens
ctgccccttgccttccaggcctccatcccagagatgctgcatccttcccctaagcacagtcgagtaggtgctcctgtcccatgctgagggctttctggagaatgactcctgcctttttcttc

SEQ ID NO: 325984 - DNA, 122 bp, Homo sapiens
acaccacctacgccatccatggcccgggaccaacacgagcacggagcagcccagagcgggcggaggctcagagtgagcgctggccaacatcccagagacccacgggccaggcccattctccc

SEQ ID NO: 325985 - DNA, 122 bp, Homo sapiens
acccagcaagccgcctgtccgggaggcacgcggtggcggcccaagtgaggcctactaggccgcagaacgcgctccgctccagggcaggagtcctaggttgccctgtgtaatccccgggcgcc

SEQ ID NO: 325986 - DNA, 122 bp, Homo sapiens
tttgtggccgtttctggtgtcttcctggtgtgtttggatttgtgcttcgccacgtccgcacgtcacttctgagcccagtgcggtggcccctgagctcctgccggtcacgggctgtgtgttgt

SEQ ID NO: 325987 - DNA, 122 bp, Homo sapiens
tttctgtgtcgcagaagcatggtcagcattgatgctatttagcattttatcagctgagcacgagaggagacaggagctctttgagcgccgggcgaaggccctgtggctgatgctgacccccg

SEQ ID NO: 325988 - DNA, 122 bp, Homo sapiens
acacacacctgctggagatggtcgcacagcgtcttcatgtcccttcctcatggcacggcacggcacggcatgcccctgctctgtggccacactgccccatgctcacacacatgcaccacagc

SEQ ID NO: 325989 - DNA, 122 bp, Homo sapiens
aacctaaatgtccatcgtcagaggaagcgatgaacaaactgcggtgcattcacacaacagcggtgctacacagcagcgaagaggagcagccgactgacacgcacaacaactcggatctcagg

SEQ ID NO: 325990 - DNA, 122 bp, Homo sapiens
tctttgataataaaatcagctttcctttatgttacagcagaatatgacactctgtttagacggacaaggcttaattgagcaatgtgttactaggcatgagaaacgggggagatactgatggc

SEQ ID NO: 325991 - DNA, 122 bp, Homo sapiens
taggccctgcttccttgcccctttgctgcagaagggcagctgaaggctcaccctagaaaccgggcctggtgggtcttacccggctcactccctcccttgtccttacacatacaggaagacaa

SEQ ID NO: 325992 - DNA, 122 bp, Homo sapiens
ggtaaaagacataaaaataattgtgttggatctgaggtgatatgttctgaatgtaagcaccgtcaacatcagacacctactcatggacatgtggttgccggattttcttaagatgtttccag

SEQ ID NO: 325993 - DNA, 122 bp, Homo sapiens
tttcctcttccaagagttacacctcttacttccttcttttgcacatcttattgcattaaccgggatttctattaaatactgaaggtgaccaaatacaaatatgaaatagtaaaagtgatagt

SEQ ID NO: 325994 - DNA, 122 bp, Homo sapiens
caacatctgcggtcaggctgtttctcaagatttctgttctcctgccaactaaagaggccccgactactccttggcgcgcacactgaggccgcgctgcaggtcagcaccgaaagagccccgca

SEQ ID NO: 325995 - DNA, 122 bp, Homo sapiens
cgtgatggtgatggatgcaaaccctctgcgggggcccccacagggtctctcctctttgggcggcagctctgcctcaggtcctcgctcatctgacggtgccgggattcctaatctgcccggaa

SEQ ID NO: 325996 - DNA, 122 bp, Homo sapiens
acgttttcacttcaagctctacaggtaagtagggcgctcggaaaattccagggtaacctccggaaactatgggtcaggctgagagtaagtttgctaattactgaagccttgtccggcagtta

SEQ ID NO: 325997 - DNA, 122 bp, Homo sapiens
tccctgttacacgctaaaagtactcaacatgcaacggatacgtcatcagtaaccaccccacgggtttactgtgatgctgcacaattattaagccttggctgctacagagttgtaacctgtct

SEQ ID NO: 325998 - DNA, 122 bp, Homo sapiens
attccctgggtcctgcgcagtctctggcctgttagcaggcactgccaccccagcagcctgcgtcctcaaagccagtgacccgtgagagagccaggaagagctcaagtggattaggtgccact

SEQ ID NO: 325999 - DNA, 122 bp, Homo sapiens
tgcacactgaggctctgctctgaggttagctgtccagagtacttaagataatttaattgccgaagggagtgtcatgtatgaatatttgagtctgtggagtcttaaaaatatccagcgacacc

SEQ ID NO: 326000 - DNA, 122 bp, Homo sapiens
cccgaaaacacgtggggctagcccagtcccagaggaactctaacgtttcaaacctggaggcgggaggcgggaggccggtgagaaggggctacgccgccgggcccccctcccgcagcagccac

SEQ ID NO: 326001 - DNA, 122 bp, Homo sapiens
ggctccccggagactcttgggggtctgggccccaagggtgattcaggtgctgcccttccccgacctgggctcgcctcccccacctcctcctctgcttcactgtcccgggcccagcagttgcc

SEQ ID NO: 326002 - DNA, 122 bp, Homo sapiens
gtcgataatcttcgccaattacattgctcgcgacacccggcgcctgggggccaccattgacgtggaacactcccacgtccgattcctagggaacctggtgctgaacctgtgggactgtggcg

SEQ ID NO: 326003 - DNA, 122 bp, Homo sapiens
ctggcagcgcaggcacaatgagccatgtgacccaaggctctggggacaggacaagacccacgtgactgatggggaaggaaaccactgtcacagccaggaggctgttcagttcctctcagcct

SEQ ID NO: 326004 - DNA, 122 bp, Homo sapiens
gcctggagcccctgcgggacccccaggggacccccgccccaggtctgtcgccctcggtgtcggagtctctgtctgtgtccccgtctgtcccgtctccctgctgtgcgtgtgtgtagccgcgt

SEQ ID NO: 326005 - DNA, 122 bp, Homo sapiens
tcttgggctgccccgcccccatacgtactcatgccgtcagcacaatgcagacaatcgggacggtccacgccaggtggactgctgtgccccagaggttgattaggttaatttcagcctcgaca

SEQ ID NO: 326006 - DNA, 122 bp, Homo sapiens
ggagctagaaccttccccgcatttctttcagcagcctgagtcagaggcgggctggcctggcgtagccgcccagcctcgcggctcatgccccgatctgcccgaaccttctcccggggtcagcg

SEQ ID NO: 326007 - DNA, 122 bp, Homo sapiens
gagcagccggaaaagcctccgcctgctcataccaggataggcaagaagctggtttctcctcgcagccggctccctgaggcccaggaaccaccgcggcggccggcaccacctggacccagctc

SEQ ID NO: 326008 - DNA, 122 bp, Homo sapiens
atttcctgagcgtcggagtttaaggcgtaagaagatggacaggcagagagatatggaggtcgccactgccacgggtcagcacaccacctgtcccagcagctactgataagcactatgctctc

SEQ ID NO: 326009 - DNA, 122 bp, Homo sapiens
ctgggccgtccgtggccctcacttctggttggccagctggttctccagatcctccaggcgcgccgtcagctgggccagtgagcggttaaggaggccgttggggttcgccgaggtcccttcac

SEQ ID NO: 326010 - DNA, 122 bp, Homo sapiens
tctctcacgacacatttgcccaggccaaccccaggatgccaaaggccagagtcaggcctgcggcttcgagcttcccaaccccctcacggagagccccgccccaaacactgcggtcccaggtc

SEQ ID NO: 326011 - DNA, 122 bp, Homo sapiens
gcccaggagccctgccaggcttccttctgggtgcagccacctgtgggtggggcgcggcctcgtctgagaccaaggcagggcccatgccttactcagctgtccttgctaagagtcccctagca

SEQ ID NO: 326012 - DNA, 122 bp, Homo sapiens
tgtttcctttaacctgctttctccctgttctgcctcccatctcaggcttttaaattcatccgagatgtgaaaaaaagcacaatctgtgctaagaaactaggctttggtttgtgaatttgggg

SEQ ID NO: 326013 - DNA, 122 bp, Homo sapiens
aatgggtcctcccaaggctcgggtgcctgatctgcaattctgcgctccgccgcagggcgacgctcggagaccagccacactgtcccaagtcccggcgaagacccgcccgcggctccgtaggt

SEQ ID NO: 326014 - DNA, 122 bp, Homo sapiens
gtctgcctccggcctgccttcctctgggccttcgaagccccctctcaaaaggccaggacgcgctgggcccaagaaagacacccgtcttcacaggccaaccagaactctggccacctgcggga

SEQ ID NO: 326015 - DNA, 122 bp, Homo sapiens
agatactgttgcctcaatatcaaggaactggaagcatgtaaaaaaattacaaagccacctcgtccaaagccagcaacacttgcactgactcttcaagactatgttacaataatagaaaattt

SEQ ID NO: 326016 - DNA, 122 bp, Homo sapiens
tcgggagatgtattcttggtaacaggctcacaccatgtagagcgcttccgtttagaatcacgttcttaaagaaggaaacgcattcggatagggatgaggagatgcagacctttaaaatcgga

SEQ ID NO: 326017 - DNA, 122 bp, Homo sapiens
aagagcgggaatcggaagtctcccggtgtgacgtctctgggaagtacagttccgtgatgccggtggcgccagactgagccaaggagcaggtgttctcgggcccagaggcgctaagtagctaa

SEQ ID NO: 326018 - DNA, 122 bp, Homo sapiens
actgtgtgaactgcgagacccagaatcctaactgggccagtttgaacttgggagtgctcacgtgcatcaagtgcttaggaatccattggaatcttggcacccacctttcccgagtctgatct

SEQ ID NO: 326019 - DNA, 122 bp, Homo sapiens
taccgcccaggaggaggcgagcgaggcctccgggacaataggtcaaccctgcgggggtcgcggggggaggcggggtcacttggaaaaacgcctccctggggccggatggccgtggagtcatg

SEQ ID NO: 326020 - DNA, 122 bp, Homo sapiens
gcaggaaggtcccagatgctctagagctggtggaaagctctcctgcgcaccctgtcccctcggagccaaatgactgctggggttcaaacaccagggctccatcgctcactgcaggtgtcatc

SEQ ID NO: 326021 - DNA, 122 bp, Homo sapiens
cctgctgcccccagacggtcagaaatccaacccgagtcatatcattatcctcgtctttgtcggcactggagacgtggggaggtttcgttcctcagaactgctgcacgatatgtcttccaaaa

SEQ ID NO: 326022 - DNA, 122 bp, Homo sapiens
aattttgcacctcccttttcaaacatgtctttggctaaatcaatgttggctctaaccgctcgtcctagagcgagtcccgccatcttgtggttgaagatgttgactgccacagagaatagcgg

SEQ ID NO: 326023 - DNA, 122 bp, Homo sapiens
gacggctgcggcggtgggtgtggccaccgcgcttgccaatcaggaagtgagggccggctccggacgcgccccgctgttacgtcactccgacggccccggatgccccgcccagtggccttgcc

SEQ ID NO: 326024 - DNA, 122 bp, Homo sapiens
gtcccagttactcaggaggctgaggcgggaagatcgcttcagcccgggaggtcgaggctgcggtgagccgtgatcacaccattgcattacaacccgggcggtagagcgagaccctgtccgta

SEQ ID NO: 326025 - DNA, 122 bp, Homo sapiens
gctgcaagggtttccagcaggaaatccacaactcgtttcctgccagtctgctcaaaacagcgtctgtcccttctcctctcaaacaaattgtctcctcgatcctgggaagctgactccctggt

SEQ ID NO: 326026 - DNA, 122 bp, Homo sapiens
agcaaacgagtggggaagcacatccttttcactggactgaagcagccaatttcccttccgcgacaaacttggccacttacaaagaagagagaaaacggagcaagctgcagcaaaaataaacg

SEQ ID NO: 326027 - DNA, 122 bp, Homo sapiens
ggccgcctgagtccccgtgccaccttccaggaaacaaagaaccggagtctgagccgagtccgagtcctcgggctgaaggcacactgtgaaaacttcaacctgctgctcccggtgcgtctggg

SEQ ID NO: 326028 - DNA, 122 bp, Homo sapiens
ttcagggaggagcatgtgtggtgtgaatttggtgtcaaacctggttttaagtcctgacttcgcctcttgcttcctgggtgactccagttacttggcctctctgagctggtttccttatctgt

SEQ ID NO: 326029 - DNA, 122 bp, Homo sapiens
actccaggctgttggttacctggccgggagctggcggagaccaggatttctcctcgccgccgttgctgttgttaggggaaacagaccatctgcatctagacctgcctctctctccgctcccc

SEQ ID NO: 326030 - DNA, 122 bp, Homo sapiens
aacaacatgggggttatgggtgctgacttcccatgcagtaaaaaatctgggtataactttcgattccacaaaaactttgctaatagccttaactgttaactggaagccttaccaataacaca

SEQ ID NO: 326031 - DNA, 122 bp, Homo sapiens
agagatgcagaggtggagcgggatgaggagcggaagcagcgcactctggccgtggctgcccgcaagaagctggagggagagctggaggagctgaaggctcagatggcctctgccggccaggg

SEQ ID NO: 326032 - DNA, 122 bp, Homo sapiens
tgggcagaaaccaattaagttgagcactcactgaactgctttctcagccaggatggggaacgactgactacaaattaagctgtacacatgttagactgaaagagtttacaggtaaatgtggc

SEQ ID NO: 326033 - DNA, 122 bp, Homo sapiens
actgtagtgcagcccaccacccagtctttcaggtgagagaagtgatttctgggggtgctgcgggggaggatgggtagaagaggatctaaaaacaaggaaaactccccctacagcccatcact

SEQ ID NO: 326034 - DNA, 122 bp, Homo sapiens
ttgttttggtaaacaccttcacggccgcctggctctccttcccccgctcccattcggaatcgctctggccttataaatccgtgcgtcgtcatcataagggcagtgatcctggcagcgctgat

SEQ ID NO: 326035 - DNA, 122 bp, Homo sapiens
tttcattgacacacacagtcacagactcctggacacaattacaaagggggcaaaacttgacgtcacctcttttgtgcttcctgaattatctctcccctcttcaccaggcacagagcccatct

SEQ ID NO: 326036 - DNA, 122 bp, Homo sapiens
ctcacaggccaggccccgtgcgtggaccaccagcactgtatcgttgctgtaggcagggcccgggccacatcataaagccaaaccacactggggtctcccctagcctgcagcaggagaaccac

SEQ ID NO: 326037 - DNA, 122 bp, Homo sapiens
catggaagctgacgtggatgaagtccctgtactgcagccctgtggtgtgcaggatggagccgaagtgacagttgagctgatcgcctccgaccaagtcatagtctgtggttctgcttctgcag

SEQ ID NO: 326038 - DNA, 122 bp, Homo sapiens
gttccgccctgctgggcccagggccaggctcggagcaggcttctcaaactgcagggtccacgccacccatcgggggtctggcggtctagggtggggcccgagactccaaactaggctgccgt

SEQ ID NO: 326039 - DNA, 122 bp, Homo sapiens
tgaggatgcacacacctggccaggttgtgacagcacccaagctcagccacaactttgctccgaactggagcaggcacttccaggcctgcatgggcaggggactttccaggcccccgagagca

SEQ ID NO: 326040 - DNA, 122 bp, Homo sapiens
gaaaacactacgtgaccctggagtgggtgtgattgggaggtgcttggattcctgccctgccggttttgattggagtacacggtgaaaggctagtcacactgggcctccactttgccctcttt

SEQ ID NO: 326041 - DNA, 122 bp, Homo sapiens
gcctgcgaccctcacagatccttcctggcccccactagccacaggtttgcactcccagtacggggcttgccaggcttagcctgctgcctcacggctttctgctctcgtggccgccaacagag

SEQ ID NO: 326042 - DNA, 122 bp, Homo sapiens
ttgtttacttaagagaacctgttgctaaaatagtaatgaggaagagtgtaatataagtctcgtcatacaccccttgctctgcaagtaaccagagtgctatgtctgcatgctgttcagtctcc

SEQ ID NO: 326043 - DNA, 122 bp, Homo sapiens
agcccacttcgggatccaagtggctcaagttgtcttcttggtatcaggtttattaggagacgccccgtccaccgacatatttatggaggttgcacatatcctcatcacagcagcgaccgagg

SEQ ID NO: 326044 - DNA, 122 bp, Homo sapiens
ctgggaaattgggatctacaagccaaaaaccacagtgacctcagataagcaaatgacgaacgtcccatggaccttggctgggggcaggaatgtataccaaagaaaggtaggctcagtttgga

SEQ ID NO: 326045 - DNA, 122 bp, Homo sapiens
ggaacccgagcgggggagggggaggcggcggcctgttggccccgggacctccacgtcgcgcgcaggccactaacctgtcagcaagaatgtgccagtggtcgcggggctcatcctgcgtgtcc

SEQ ID NO: 326046 - DNA, 122 bp, Homo sapiens
tacctggacgctcggccaggacctcagtgagtccagaacatactgagggaaagggccgctcggaaagatctaggaatgaacacccatcctcacaccccaggagtgccttggtttcagttgag

SEQ ID NO: 326047 - DNA, 122 bp, Homo sapiens
ctgcagtctctccacgcccttttcatttccactcaaggagacctacctgggaagagtgagcgctgcaagacccagcctgaccgcgctaagattactatgcagcgcccgagcccgctgtctgc

SEQ ID NO: 326048 - DNA, 122 bp, Homo sapiens
cgcggacacctcagggccctgctgcgagcacactcaggagaagcagagcacaagggcacccgcagctgccccctttgttcctttctcgggtgggggacagagactggggggccctcctgggc

SEQ ID NO: 326049 - DNA, 122 bp, Homo sapiens
agccaggaggccgaggctgagcaagagcattgggcggaccatggctgggacgcctggggccggggctgggggcagcagcggcggcggggcgcgggcagcggcgagtcctaggcgctcgggtc

SEQ ID NO: 326050 - DNA, 122 bp, Homo sapiens
cctgcccggctgggcttggcgtcccctggccactccaggccaagccctgggttagctccccgaggcccgctaggacctcgttgtagcccccatgccgtctgacttctccctctctttaaatc

SEQ ID NO: 326051 - DNA, 122 bp, Homo sapiens
ctcggcagctcccgcggcctgcgctggacaagcgagagctggacggaaacggtgggaggccgtaggcggcggctgggggcgcgggacccgcgcgcgggcgcggaggcgggcggggaggcccc

SEQ ID NO: 326052 - DNA, 122 bp, Homo sapiens
aataacagttctgttgaactcatgataggtgcagaaatttcagtaaaaataatgtgacatcggcagagctgtcatagatctgggatatggctggaaggacatagagtaaatgatcggtctgg

SEQ ID NO: 326053 - DNA, 122 bp, Homo sapiens
cagctcagcagtgcctagtaccgtaaagagtatggtctgaaaagcgcagggaagttccgccgcgaccttttgcgacgcgcctcgctcgcgggacacgttaacagagcagccagaggcagctt

SEQ ID NO: 326054 - DNA, 122 bp, Homo sapiens
ccgagaggcaaatctcaaaataccttgacatgaaacattttgtttttctgatcaatttaacgcgcacgtttccccacatcgatgcgctctcccaaacaccctgcattagatcctaataatga

SEQ ID NO: 326055 - DNA, 122 bp, Homo sapiens
ctaggtttatgagcttgggatattggcagagctaagtagcaaggtggataattagggtagcgaagagcaaagagaaggggccaatggtcagtgctggtgggccctataaaaatcctatttgt

SEQ ID NO: 326056 - DNA, 122 bp, Homo sapiens
acaacctgggtcacctcaaagggtgtcttctccaaatattggtgcagaggttagctgggccggcaagagaagggagatgacccactattttgatttcaggcagcagacaccggcagcctttc

SEQ ID NO: 326057 - DNA, 122 bp, Homo sapiens
cgccttggaggctgacctcttactttcggtcggtcttcttccctgggcttggtttgggggcgggggagtgtcctaagggccaattcagcgtgatgtctctttcaccaccattgaaaacgaaa

SEQ ID NO: 326058 - DNA, 122 bp, Homo sapiens
acggctttcggccaaataggcacttcagccctctgagcctctcttcatgagggtagaggtcgggcgaggagctctcctcccgggtaacaggcttttttttttttttttttttttttttctga

SEQ ID NO: 326059 - DNA, 122 bp, Homo sapiens
gatggtgtctctccaacgaccaacacacagggatggtgccaacctgtcactcaatgacaacgcagggctggtgactaactggtttaattcgagaccgtgggtcggaccacttgtctgtgctt

SEQ ID NO: 326060 - DNA, 122 bp, Homo sapiens
tagaaatcttctcctgtcctgaccagggagaggcggggtggagcacaggtgaggagaccccgcctgagggccatttcctctaacaggtgattcccaaacctggctgatcaccagagctgcct

SEQ ID NO: 326061 - DNA, 122 bp, Homo sapiens
aacagtaagtggctcccgtgttattaggcctgggattgggggaagcggctgtccagcatgcgcctagctctccatctctgtccctgcagctctaacaaggaaaacttcatctacctggcaga

SEQ ID NO: 326062 - DNA, 122 bp, Homo sapiens
acataacccacctccgcccttctccctccctcaggccccagcgggacgagagactccgcgcgccccctgctcacgcaccttgttggttggaactgcgcgaagcctcttaaaaagagtctgga

SEQ ID NO: 326063 - DNA, 122 bp, Homo sapiens
accaggtactccccatcgctctgcttcactgccgtctgcacggccacactgtactccgtgcgggggctcaggaaccagtggcctctcaccgtcatgggcagcggcactgccttggccacgag

SEQ ID NO: 326064 - DNA, 122 bp, Homo sapiens
cctaccaccctaaggatatgcgcgggggtgtggccggggcggggccggggcagggcagggcggtgcccccgcgcccagggaacccgaatactacacatccgtctgctccgcgattggccgct

SEQ ID NO: 326065 - DNA, 122 bp, Homo sapiens
gcggcgtggttggtgcgtcccatgtgacgtcagaagcagcccgcccctgcctggatggtgcgccctgagtgacgtcaggagcagaggccggagctgtccatcagcaccaaaggccgcgggcg

SEQ ID NO: 326066 - DNA, 122 bp, Homo sapiens
gtattggctccttcatctttcattatatgatgccagtttcaagcagaagaggggcaaagccggtagtaggtgtgctagttgaaggtacaaaatgacatgtgactgtagcattaattctagag

SEQ ID NO: 326067 - DNA, 122 bp, Homo sapiens
ttctctttctactctactcccacagtgctaaggctgaagaagcaggaggagatgggaaggcgaaagaagtcgcccgcacagccctctgggaaatagagtcctggcgctgccgcggaggatcc

SEQ ID NO: 326068 - DNA, 122 bp, Homo sapiens
ggttccggattggtgttccgcggtgcgggtgtgttggtgctctcgaggcacctgcggttccggattggtgttccgcggcgcgggtgtgttggtgctctccaggcacctgcggttccggattg

SEQ ID NO: 326069 - DNA, 122 bp, Homo sapiens
ctccccagccttgggacgccctgcccccacactcaccatttccccacttcaggggtgtagcggagtctcagctacgaatcatccaatacccgcaggtcacagagcgacggaggctgaggctg

SEQ ID NO: 326070 - DNA, 122 bp, Homo sapiens
aggactgcgggccctcagtgcccgtgcgttccagcctccggggagactccaggtggccctcggactctccggcgccctgcctcgctcacctgcgcgaggagaccccagctgctggtggtggg

SEQ ID NO: 326071 - DNA, 122 bp, Homo sapiens
tggcaagcctttagcccgattggaagtggcagtaggtgcctctctggatcaggagcacagcggacaccctgccggatccggaggaatggaagtcagcggtgggtctgcgacggcggcaaaca

SEQ ID NO: 326072 - DNA, 122 bp, Homo sapiens
tccacgtctcagtggggagacggtgcacaattctctattatccacgtctcagtggggagacggtgcacaattctctatcatccgcgtctcagtggacagacggtgcacaattctctatcatt

SEQ ID NO: 326073 - DNA, 122 bp, Homo sapiens
gggagtggcaagggtgatttttccttcatgaagagagcccagcagtagaggtgagggggccgctataactgctagggaaagagatggtgatgcttgggctgtaaagaggaacagaatttgag

SEQ ID NO: 326074 - DNA, 122 bp, Homo sapiens
tacagaagaaaccgggtagtagagattagataacttgcccaagaccacagtagctccaaacgtacacctgccttacaacaaacttgtgttctttccaccataacacaagaaaacaaaagtta

SEQ ID NO: 326075 - DNA, 122 bp, Homo sapiens
acagataatacaggacaagatatcaagaataatgtaaaaatcaccagaagtcccaacccccgatgtcatagtttaatttttttcccttctacactattttctaagacacattccttgtttta

SEQ ID NO: 326076 - DNA, 122 bp, Homo sapiens
ttcatcttgccactcgggtcggcctcccatttccatttccagagagctcgctgtcggctgcggggggctttccatggccctggtcagccctccccactggtggaaaccagtttccatagcaa

SEQ ID NO: 326077 - DNA, 122 bp, Homo sapiens
gaacttagtcttctggaaatgcggagaccgcttcgggtggttttgtttttgcatcctcttcggctaggtttggctttgggattctctggctacctggatacgcctttcctttgtgggcaagt

SEQ ID NO: 326078 - DNA, 122 bp, Homo sapiens
aggacaaaatcaactagagacgcgaacgtgaggaccaagtcttgtcttgcatagttaagccggacatttttctgtcagagaaaaggcatcattgtccgctccattaagaacagtgacgcacc

SEQ ID NO: 326079 - DNA, 122 bp, Homo sapiens
agcgaggagccgccacccccggccccacccgcgagagacggggtccacgcgccttccctgcgcccaaaccgccccgaggcccccagtcccaggagggagcgctgagatcactcggatctccg

SEQ ID NO: 326080 - DNA, 122 bp, Homo sapiens
gctggccgtggtcagtttggggagccgggcatcgctgtccgcccaggtgaggccccgctgcgcaccccttcttgggcacatcaggagctgagactgcagaggggccgctgggggccgcgtgg

SEQ ID NO: 326081 - DNA, 122 bp, Homo sapiens
cgaccatttaaagcgatagcagtccctgccctctccccagtgctgggctgttggagagagcgagcagcaagccggtgagcgcgagcgcggcgcgccggccggctaacccgagagcgcgaggc

SEQ ID NO: 326082 - DNA, 122 bp, Homo sapiens
gagccccagcaaggggaagtggttaacccagggtcatgaggggaggtggggacaggggtgcgggaggacccaggtctcctcactgtctgcctcaccactctgacttcctggaggtgactcag

SEQ ID NO: 326083 - DNA, 122 bp, Homo sapiens
agaggctgggcggcgcgcctcgcggggtagcaggggcggcgcgcctcgcttgcgtgacaccgggccgtccgggggcttacctggtcgccgagcaggcgggcgggtaaagctaggccgcgaga

SEQ ID NO: 326084 - DNA, 122 bp, Homo sapiens
gagtgcttactgagcgccacctccttgtcttccggagtcgtgtattgagtgcttactgagcgctccctcctcgtcctcctgagtcgtgtattgagtgcttactgagcgctccctcctcgtcc

SEQ ID NO: 326085 - DNA, 122 bp, Homo sapiens
tattgaatgaataaataacaaacagagctggtttccagattcctcatttaaggctcattccggaccagggtgttagtgtcactaaccaaccacatacataacatggtctatctaatctgggg

SEQ ID NO: 326086 - DNA, 122 bp, Homo sapiens
tccgcgcagcaccgccgcgggccgaccagctgcgcgcgcaggagcaacgctgagcgaggacgcgctggtgcgcacacgagccccgccttccgcagcccgccagccaaccaacggcctcccac

SEQ ID NO: 326087 - DNA, 122 bp, Homo sapiens
tccacggatccctctaacagtccagtcacagtgcgggcgatggagcgacagaagctatggcggaggcacctggtccctctcggggccggaaaaccgagatcccgacctccctttggtgcaag

SEQ ID NO: 326088 - DNA, 122 bp, Homo sapiens
gccgcgtccgggagcgcaggaggctagtgtgggatggggggtgcgccctgagtaaagccccgtccgggagcaggaagctggggagggggctctctgggtgaagcctcccgcaacacccacct

SEQ ID NO: 326089 - DNA, 122 bp, Homo sapiens
aattcaggagtcatgaatctagtactaattttttcctttcaagctcttggaataccctttcgtgccaaattgtgagtcctgtcttatatccaggtagaagaacttgtataacatttgtgttg

SEQ ID NO: 326090 - DNA, 122 bp, Homo sapiens
ctatcacatagtggtatgaccacagataagttacataacaactttcaatttccatttcatcgtttgaaaaatgaagataacagaagtgatggtatctatctcaaaggatttcacataaagat

SEQ ID NO: 326091 - DNA, 122 bp, Homo sapiens
ggcctgccctgtgccatcctctgacatgttatcatcggcgttcactctgtgggctcctctcggggtgatgcctgccggtctcagctttggggtgaagtgacatttggccttgactagaagag

SEQ ID NO: 326092 - DNA, 122 bp, Homo sapiens
gtctcctttgctgcgggaacacagcagccgtgctgggcaacaccacgtacctgggaccttcggtggcctctagcaccagagtgcagcctctggacaaaagccagtgagaaaatgaagccgtc

SEQ ID NO: 326093 - DNA, 122 bp, Homo sapiens
attcgcactttttcacaagggctcagccacatacccttctctctgctccaattccatctccgcgacctccggaagccccgggcctcagagcttccgacctcttcaatctgtaggttaagccg

SEQ ID NO: 326094 - DNA, 122 bp, Homo sapiens
tacggagagccggcaaaccactttgggagtgagctgatagcaatatatttaaaatatgagcgtttatcagaagcagcagatggaggcagcagagtggagcttccagaactgagggcagggag

SEQ ID NO: 326095 - DNA, 122 bp, Homo sapiens
caggaacagggggttgccccttcaacaggtaacccatataaaaagtgactaacgaaagcacgtctttcttctcactccacagctttgaaaccagtgtgcattgtacacgtggagccatctca

SEQ ID NO: 326096 - DNA, 122 bp, Homo sapiens
cgctcgcaccctgccgcggcggccgggctgctgtttccaccaccactcctggcccggggtcgcagattcaaattttactgcactgcccctgtcgcagaagttcctggggaggcagggcggca

SEQ ID NO: 326097 - DNA, 122 bp, Homo sapiens
cacattgaatcggacccttttcctccagtgggaccagaaagcagggacaaaatgggacgtcgcgtctccatcctgaagacccagggagatttggtctctgcacgcccgtcccgtggaggaag

SEQ ID NO: 326098 - DNA, 122 bp, Homo sapiens
tgaagcagaagggggagccaatggtaaatagtgtacttaggacacatctcagagagaaggcgacatttgaatttggcaaggtttcagactctaaactcaacattctcagtaaccttagaaaa

SEQ ID NO: 326099 - DNA, 122 bp, Homo sapiens
tcttctgcacagggagttgtgaggttgctacacccccgggtctggattccgcacccgcagcggcccccgcacggtgaccacataccagggactcgaccgagcatctccagccacaggattcc

SEQ ID NO: 326100 - DNA, 122 bp, Homo sapiens
cctgtagcgggggcgtgtggccactcagaggccagattcgggcagagggtgcagccagggcgggcagcaatggcctcttgagacggccctggccggggctgctgacgcattggctccgatga

SEQ ID NO: 326101 - DNA, 122 bp, Homo sapiens
aaaagttcatgcacaatcacaccacaggcattccagagcacctcagacgggaggggcctgcgggagggtaaagtcagagggcctgggcgggcggcagatgcagtgatgaggagagagcatcc

SEQ ID NO: 326102 - DNA, 122 bp, Homo sapiens
agccccagggtccacacacagctgccagtgaaggtctctgcattctgcccaggtaagacacgcacacggtacttccgatcgtgggagatcagagctctctgcacctggataacagtggaaac

SEQ ID NO: 326103 - DNA, 122 bp, Homo sapiens
cactaactacaaagaaatgaaatggaggctgtttctgccagcagaagattcccctcctaccgccctgcccaagaacctcacctgcatcagctatttctcccataccactgtctgcatgtttc

SEQ ID NO: 326104 - DNA, 122 bp, Homo sapiens
gttccacaatggcgagtctgaggagagccacgagcagttcctgaaggcgctgcagaacgccgtcaccaccttcgtgaaccgcatgaagagtaaccacatgcggggccgcagcatcaccaatg

SEQ ID NO: 326105 - DNA, 122 bp, Homo sapiens
cctcagacactgcaagctcctaaccagcggctcgccctcgcactgagtgggagagtgtctcgtttgtggttaacacagcgctctgcgacccctcccagacgtacggttttcactgaggagac

SEQ ID NO: 326106 - DNA, 122 bp, Homo sapiens
tgtgcagggaacgcggaagcaagatggcggcagaaagagcgcgagcgagagcgtgacccacgcttgttgcagcgggaagcaaaaagagagcatttaaaaagacatttgtcagcagtgctaca

SEQ ID NO: 326107 - DNA, 122 bp, Homo sapiens
tgcgctcctaaagagcgggaaggaaaccatcagttttgtcatctgaaaggggaaaagagacgggcaaacctggccttctgctcacttcacaggaatgccggaagagccagcagaacgggaag

SEQ ID NO: 326108 - DNA, 122 bp, Homo sapiens
gagcccagttccccctcccagccctttgtctctcctgtgtccaggctccaacagccctggcggggcagtcagccctcccaggggatgggcagcccatgccaagccttgcaggctggcccttg

SEQ ID NO: 326109 - DNA, 122 bp, Homo sapiens
gcgggaggccctggagaatgccaacaccaacaccgaggtgctcaagaacatgggctatgccgccaaggccatgaaggcggcccatgacaacatgtacgtgtccacccgcccctgcgccacag

SEQ ID NO: 326110 - DNA, 122 bp, Homo sapiens
ggtcacaagtcccctctcctccgcatggacaccaggaatgcggggtctggcggtgctgggcgcagggcgagaagatttgatgtgcagggtaagtaaaggacaagttatttaaaacctcaaca

SEQ ID NO: 326111 - DNA, 122 bp, Homo sapiens
gcgctgaggaacgactccctttatgccagctcgctgtccgccttcccgcagcgtacgctgcggagcctcaaagaccctgcggccctccacaaccgtcttaaataacaaacccctgtcctcgc

SEQ ID NO: 326112 - DNA, 122 bp, Homo sapiens
tgtgttaaggcaggtgtttgacagctgccctatggtctcctccacagagcccacttcacccggaacaagcaaactgttaaggctataggcagctttgccagggttgctgtgagaatctagtg

SEQ ID NO: 326113 - DNA, 122 bp, Homo sapiens
ttgattgaaaaaagaggaatcgagatctaagaaaaaataatgacacaccagaatgggaaacggctgcagactgtcatagaaatgtcaccaattagctgtaataacaattagaatgtgttggg

SEQ ID NO: 326114 - DNA, 122 bp, Homo sapiens
cgaccacatgtacatccctcttcctgacaagatgaggaatagtagagtttcgcaaaaaggcgctgagctcaggggtgtcctctggggaggcagcaggctgcaaaaagaaagtgggagatacc

SEQ ID NO: 326115 - DNA, 122 bp, Homo sapiens
ccaccacaatttcaagcaaatccccaaggcaacacctgagagcagaagtaggcaccagtgcgaaatagcttgattgaatactggcaagtagtagtgccatcagataccaactggaccatctg

SEQ ID NO: 326116 - DNA, 122 bp, Homo sapiens
agcccccaccatcctcccacagtgggctctggctctaggtgggtccagggctgggcatcgcgggtctgcagcacatcctcctcagtattccagtgcagctgtctgaagttttttctgctgcg

SEQ ID NO: 326117 - DNA, 122 bp, Homo sapiens
tggctggagactgcacgaaattgccagtctgtctgagcctgtttgaattcataaagtccccgagaaagaagaaataggtgaggattagcaaccctgtaagagcatttacaaagaagggagtg

SEQ ID NO: 326118 - DNA, 122 bp, Homo sapiens
tgtactcggggccctgtcgtgggtctttgtactcggggcgctgtcgtgggtccgtgtactcggggccctgtcgtggggcctgtgccgtgtagaatctgtagctgcacacttcgcccagtctc

SEQ ID NO: 326119 - DNA, 122 bp, Homo sapiens
ggcattgagtccaggcagaatggctaccttgagttcaacataagcattaagatggccattcgaaaacattaagcacagaagaatcccattcaggtaatcttctgttggctggctgtagaact

SEQ ID NO: 326120 - DNA, 122 bp, Homo sapiens
gcgagcgagcgccgagccccaaccgccgccaccacccgcccgcccgcccgccccgggggccgccgggaactgccgctggccccccaccgccccaaggatctcccggtccccgcccggcgtgc

SEQ ID NO: 326121 - DNA, 122 bp, Homo sapiens
gcgtgcgccactgcgcccggctcatttttttgtacttttagcagagaccgggtttcgccacgttggcctggctggccccaaactcctgactcaagtgatccgcccgcctcgggctcctaaag

SEQ ID NO: 326122 - DNA, 122 bp, Homo sapiens
tcctcagcttccagccaaaatggcggagaacagcgagagtctgggcaccgtccccgagcacgagcggatcttgcaggagatcgagagcaccgacaccgcctgtgtggggcccaccctccggt

SEQ ID NO: 326123 - DNA, 122 bp, Homo sapiens
tgtctctatcatgccatgtcccgccacttgggtccgtgtctctatcatgctccgccccgccgtgtgggtctgtgtctctatcacgctttactccaccacacgggtccgtgtctctgtcacgt

SEQ ID NO: 326124 - DNA, 122 bp, Homo sapiens
ggcctgctagccgaagtctccgccaggatgggccgccagagcccaatcacacatgagaaacgcgacagatgctgggacgctgcaataggccaaactaacttacctcctgtgccagcagcgcc

SEQ ID NO: 326125 - DNA, 122 bp, Homo sapiens
gacccgaactggcagccaatgactagccgggtggtccagcagcgcgaggattccgggacccgcgagcggagcggcgcgtgggtcggttgcggtcggccccggcaggtatgcgcaggcgcctt

SEQ ID NO: 326126 - DNA, 122 bp, Homo sapiens
tctcgggcgtccgggccggttccctttaactttcttctttcccggggtgaaaactttgctcggagctggcggcagctcgcggacgttattggccggcgccccgcccggcggccccgcccccc

SEQ ID NO: 326127 - DNA, 122 bp, Homo sapiens
tgttttaaaccaattatgccacattatacacaccgtggcagcaccaaaattgctattaaacgcctccgggcgtaaaggtggcaatctgctgaggggtgtggggtgggaagaaggagactatc

SEQ ID NO: 326128 - DNA, 122 bp, Homo sapiens
atgagccaccgcgccgggccatcttcagctttactttgttcttctgagaacttataaacccggtagctttttgtaaactggtttcttctatcttcccattagttttccttttaatttacagg

SEQ ID NO: 326129 - DNA, 122 bp, Homo sapiens
ccaggccggcaggcaggagggctgaaggtcactgcggggaggccgggggatggcggcctgcgctcaccattcgagccgcgttcggaggccaaaacgagggcacggccgcgccacccaagccg

SEQ ID NO: 326130 - DNA, 122 bp, Homo sapiens
gcagcggcgcgtgcccgcagacaaaggccggcgccgagcccgcagcagcgccagcgccggcgccggcggaatggactacaactcccaggagtctccccgcgagcccgcccgccgggccgtgg

SEQ ID NO: 326131 - DNA, 122 bp, Homo sapiens
acagaggaaagtttttcaatcatctcccacatcactcacttggatctggttcacaggcgccgtcgctaaattctccaaagatgatgatgtattgctctccatcctaaaaggaatttaagaga

SEQ ID NO: 326132 - DNA, 122 bp, Homo sapiens
gatgcccagagctgtcaccacccggggtctcagtttctagcaggctgtgcagggtaccgccggcggcgccacgcaggtagattacgcaagcgagcacctcgcacgcgcgccctgagtggccc

SEQ ID NO: 326133 - DNA, 122 bp, Homo sapiens
atgtcctttgaatttctgaaaatttgaaccataaagagtgctcacaccaatctgcaactccgaattcataccaccattatgttcccaaagaccagagacataaagaggtcccaggttggcta

SEQ ID NO: 326134 - DNA, 122 bp, Homo sapiens
gagcctggtgggtgccagacctgtgctaggcccagaaacgcaaaggtgacagaggtgaggcgggcccatccacatcctggagaaattcagtctcatgactccctgtggctttggcccaggct

SEQ ID NO: 326135 - DNA, 122 bp, Homo sapiens
ttgctgccgcaaatgcagaccagtgtgcctgcggggtgctgacctctgagaagcgtgcaccggatctacaggacctcccgtggcaggtaacagagcgctctccgcgtgcttcaatttattgt

SEQ ID NO: 326136 - DNA, 122 bp, Homo sapiens
gctgtggggaaagtccgggtggcaggaggtggcggggctcctggaggaggtgctgggatgcgctgctgtggctgcagagaaaggtcccgaggacgcaacccgtcccttcccccgaactgcga

SEQ ID NO: 326137 - DNA, 122 bp, Homo sapiens
gcgcctggaggctgggagctgtgcggccgctcccggcagatcgactgaggtcccagtggccgcagggcccacgtgcatgctgaagcactagcaaagcagttgcaccatttttctgttggaaa

SEQ ID NO: 326138 - DNA, 122 bp, Homo sapiens
ccctcacacaagaggccgctttccccgcagcgcaatggcggccagactgcgtccgctccgcgttcccagcgccgggaagtgcgcaacccgagttcagcagttgatccagtcggcgccgaggt

SEQ ID NO: 326139 - DNA, 122 bp, Homo sapiens
gcagattcttaagaagaacagacgggaatcctttagcgtcacagggtaggtgtgagtctgcgctccaggctccagagatgcttctgcaagcatgctgcccaaatccacgtcttttctgctac

SEQ ID NO: 326140 - DNA, 122 bp, Homo sapiens
ttatgcccctggaggctaagacctcctcctccagtggattctgagaagtgtgtgtgtggccgggcctgagagtaaagagggaagagaaagaaggccctggaggtggccccaccaggtagggg

SEQ ID NO: 326141 - DNA, 122 bp, Homo sapiens
acttgagctgtccttgttccgcccccagggctcacctgcttgaggaaacaggaactgcctcggggcagccagccccgccccattgacgtgcagaccttgaatcgaaacccaggctcctgcag

SEQ ID NO: 326142 - DNA, 122 bp, Homo sapiens
gtcgaggcggggttaagggtcataaggcggaggcgcgcccaagatggcggcctccatgtgcgacgtgttctccttctgcgtgggcgtggcgggccgcgcgcgggtctccgtggaagtccgtt

SEQ ID NO: 326143 - DNA, 122 bp, Homo sapiens
caaatcatccgccttattttcagcctccaaacggctacaaatcatcctgtttaaacaaagcggtctgtctaaaaggaggggcataacagggccggggcaggggcaagacctgggagtaggca

SEQ ID NO: 326144 - DNA, 122 bp, Homo sapiens
agacagccatttctgaatgcagcagaaagctgaatgcaacacttctgaatgcaacagaagcgctttatgcatactttccatttgttacgcagaatagtagaaagacataactctggggagaa

SEQ ID NO: 326145 - DNA, 122 bp, Homo sapiens
ctaagcacccatttgtgcacttttgaaacaacttctcaatgctttcaggatgtgagtagacgctgacagttgtccaaataacctatgcaatacccactccgcttgtctttcttcattcatcc

SEQ ID NO: 326146 - DNA, 122 bp, Homo sapiens
atcggaaggctcggaggacaacaggggccccgagagggaatttctgcgttgtgggcggggcgcagacggagggcaccgtactctgggcactagcttcactgcctactaccccgaggtgcctt

SEQ ID NO: 326147 - DNA, 122 bp, Homo sapiens
aacccacctaggttcctcaaactcgcaagccactcgaccccacagccaccttgcctttcccgacccactgctcgctacgctctcgccagctttggaggtccgaggagactcggccctggact

SEQ ID NO: 326148 - DNA, 122 bp, Homo sapiens
ctcaccccacccaccatcctcacctgtcaatggcaatggccagcaaggcattggtggagacgtagagggagacggtgcgcaggtagttgacggaggcacagagcacgtggccatgctcccag

SEQ ID NO: 326149 - DNA, 122 bp, Homo sapiens
aagcccttctgatccgtgggttgggtgtgtgtggtatcgagcgagggctgggaagggagccggctcctctcctggaaccactctgaaaggtgaacaatgcgagttggccggtgagttcagaa

SEQ ID NO: 326150 - DNA, 122 bp, Homo sapiens
aggctggacatttgctactggtccctgaagttttgcggctgcacccacagacagcaatagcgccacgttccctggaaggcgcacgggacggaagcggaagcagtaacgctggctccggctgc

SEQ ID NO: 326151 - DNA, 122 bp, Homo sapiens
aggcctcagtttccccctttgtaaaatgggactgcagggagagctggaggacaaaatgaccgcctctgatccagcccagctactttcttagtatgcggcatctgaaaccatgatctccaggt

SEQ ID NO: 326152 - DNA, 122 bp, Homo sapiens
gtaaattgccttccccgggagtagcgtgccgcccggcaggggcctgggtgtgccaaggcccggctctggggatttcaggacccaggccagcgctccccagcagcagggcaggaggcagcctg

SEQ ID NO: 326153 - DNA, 122 bp, Homo sapiens
ccaaccattcctcacacactcaccatttccacctccacctccacctttgacacagagctgcgtgaagcggagctcgctgtcatggtcccgcagcatgaagtgaaaatcctcccatgtcagct

SEQ ID NO: 326154 - DNA, 122 bp, Homo sapiens
agttgtgagctccagatccaagagtgcccagtgcacggtgctgggcacgctgtcccttggcgaggctgccacaggttcctgagtgtgcggtcaggggcgttggtgcattgatacgttaggcg

SEQ ID NO: 326155 - DNA, 122 bp, Homo sapiens
gaggttgagttgaaaagaggcttcagagccaaggcccggggtcacatggtgtgtggagaacgtgcccaggtggcgaataaaccaccgctgcagggaagatgctggggatgggacgttgtggc

SEQ ID NO: 326156 - DNA, 122 bp, Homo sapiens
tgagaattaccaaaatgtaacacagagacaccaagtgagcacatgctgttggaaaaatggcgctgatacaattgctggactcagggctgccacaaaccctccatttgttttcagaatgccct

SEQ ID NO: 326157 - DNA, 122 bp, Homo sapiens
cgtgggagctgctggctggggccatgctcgcaacctcttctctgccacgtctatctccagcgatgctctcagctccagggctgagcccagtggctacggcaggtggcatgaggtctggcagc

SEQ ID NO: 326158 - DNA, 122 bp, Homo sapiens
gtgccaagctcactggagaaggcctgaggcagcagcaggaggacagtggctcggacctggcgagagaatcccatgcccaggctaaggaaggcagccaaagtgagggtgcccaccaggcaacc

SEQ ID NO: 326159 - DNA, 122 bp, Homo sapiens
gccccaggccacccatcctgactgggtttggcctgcctccagcacccccttcaagcacctcgctgcttcctgaagacttgccccggctgcgcccccgtgctgagggcctgcgggcctaacct

SEQ ID NO: 326160 - DNA, 122 bp, Homo sapiens
aaaggctctgcttctccccattcccactttgggaagcattaccgtatttaggaatgctaacgtggcctacagtgggatgccattagaaatcatgtatgagaatgttcccttggaaatgattc

SEQ ID NO: 326161 - DNA, 122 bp, Homo sapiens
ctgggtgtgcccttgttctgtgccagcctccccccacagacccgagggaggtctgggatacggaggcagccgggctgccccaggctcagcgtcctttggtgactgcctgggggcggcccagc

SEQ ID NO: 326162 - DNA, 122 bp, Homo sapiens
atccaaatcttcctgagacagagggagatccctcatttgttgcagtgtattttccttggtcgcatctgacacaggggttctgtgggttgaacagaaagggactttgctggaggggaggcact

SEQ ID NO: 326163 - DNA, 122 bp, Homo sapiens
gtccatcctccctctcctgctcctttttatctcagcttttattttccctaggagacttctcgctctctgaaatggtctggttcaggctgtattgtttgacttagccctcaccccctgaatgt

SEQ ID NO: 326164 - DNA, 122 bp, Homo sapiens
tgtgttaatgaggttaaggtcagggttcgatccccgaactgacccattagctgagcagagcggacagagtgaagaattgtgtcttcctgccacatgctccaccatcaaatcctgccctcttg

SEQ ID NO: 326165 - DNA, 122 bp, Homo sapiens
ttaagcagtacagtatgctgccaggtggcgttggccgatcagttcaaaatcaaactccggcgtggcccttatttaaaacgaggattccgggcccggcgctgtggctcacgcctgtaatccca

SEQ ID NO: 326166 - DNA, 122 bp, Homo sapiens
ctccgtaacaccctctccaaactaagggtctctcagcagatggccgggtttagagctgtacgaagacacacagctaatgaaaaattgtggaattctcagagcccgtgaagcctagcccacgg

SEQ ID NO: 326167 - DNA, 122 bp, Homo sapiens
tggtgactcgatgccgcgccagcttcaccaccgcgaagttgcctttgcccagggtccgctcgatgtcgtaaaaacccacccggaggggcttctgctggccctgaccctggcccgcggggtcc

SEQ ID NO: 326168 - DNA, 122 bp, Homo sapiens
atatgtcttcactctccctgaccatccctcttgctgctggcctgcgtggcgtgctcgtgccgataggggcagctgtgtgagtagcaggaccatcctggagacagccatgcaaagggaaacca

SEQ ID NO: 326169 - DNA, 122 bp, Homo sapiens
catagcatagcaataattaaaccataactgaagatgagatggctttggaacaagcataatcggaggaaaagagggtgtttaataaatacctcaaggaactcaaaaatttaaatgctacatag

SEQ ID NO: 326170 - DNA, 122 bp, Homo sapiens
agcagggcttggccaagcctggcgccagggacttcccccctacccccaccactggcccctcgccaggtgagaggcaccaacagggtcccagacagatgccccagacaggatgcccagcgcaa

SEQ ID NO: 326171 - DNA, 122 bp, Homo sapiens
gcaaagtatcatgaaagggatttgaatttcctcgtcatcagaaggctattactgccataacgacttttaatcccagcctacctctcatctacatgaccacaaacccctacactaaggcctat

SEQ ID NO: 326172 - DNA, 122 bp, Homo sapiens
atccataggaagtggacctggccgtggctcagcagcggggccagggcgccttcctcctcccgctgtaccagcaaaggcatgaagtgctcaatcttgctcatggccacatcgcccttgtagtt

SEQ ID NO: 326173 - DNA, 122 bp, Homo sapiens
ttctgggctccgggaaacactgccggtatttttattgcttttactgtggttgctggttgtcgttgttgtgactgcgtctccattctctcaggggatgacttgtttgctatttcaccatgaac

SEQ ID NO: 326174 - DNA, 122 bp, Homo sapiens
gggggggggggggggcggggcggattcagggcgtgcctgtctctgattggctgtgccgcccgtcgctccgccccgtgttctataagatgcgcggacggcgggcgcgcctctggggtgggggc

SEQ ID NO: 326175 - DNA, 122 bp, Homo sapiens
tgtcatatgggtttaatggaatgaaatagcaattagagctactgtgatcaatactggggacgtggtagactcacgagttcttaaagtggcaggggcgaatccaatcttgttatccattgatg

SEQ ID NO: 326176 - DNA, 122 bp, Homo sapiens
gtgtttgcccccttttttcttcgctgcttgtagctaagtgttcctggaaccaatttgatacgggagaactaaggctgaaacctcggaggaacaaccacttttgaagtgacttcgcggcgtgc

SEQ ID NO: 326177 - DNA, 122 bp, Homo sapiens
atccaatgttccaacggacttattcaaaataatttcaatttacaaaatcaattcagtctccggtttatggtgacagcagtttctttctctgagaaacactaaaaagttgccagcagttccat

SEQ ID NO: 326178 - DNA, 122 bp, Homo sapiens
gagataaatgtttttaccattgtgtgtcatgactttctacttttttcctctgcaagtatacgtaaatacatactgggatcatgttgcacaaggtgttttgtaaatcccttgtttcatttagt

SEQ ID NO: 326179 - DNA, 122 bp, Homo sapiens
tgaccgtgccctgcagcctggagctttctgctaacactgccactctcgggtgaggatgtgcgtgaaacccaaaggatccttcggcatccatgcgtgcatgcagtcttggccctttgcctggg

SEQ ID NO: 326180 - DNA, 122 bp, Homo sapiens
tgcctccacttttgtatcacaacccaggaggcagcatagtgaactgcatcagtaggtgctcgagctgggacccctggttttatatgtgccattttttttcccatcaactttactctatgcct

SEQ ID NO: 326181 - DNA, 122 bp, Homo sapiens
agcgatacagccgcagcctcaccatcgctgagttcaaggtgtggccatgggggcggggtccggaggggcggggcgaagaaattggggggttcccggaagggggaggctgggaggggccgggg

SEQ ID NO: 326182 - DNA, 122 bp, Homo sapiens
ggttaagtaacgaaccgggccacaccgtaagtggtacagctgctgacgttacatgtgcctcggtgaggtgaagtgactaccgggctagccttggggacctgtcgcgacttgtcgggtgtctc

SEQ ID NO: 326183 - DNA, 122 bp, Homo sapiens
acaggcacccgccaccacacccagccaattttttttatattttcagtagagatgctgtttcgccatgttggccaggctggtctcgaactcctgacctcaggtgatcagcctgcctaggcctc

SEQ ID NO: 326184 - DNA, 122 bp, Homo sapiens
tataattttacacacacacctctcaagacggagatgcatggcctctaagagtgcccgtgtcggttcttcctggaagttgactttccttagacccgccaggtcaagttagccgcgtgacggac

SEQ ID NO: 326185 - DNA, 122 bp, Homo sapiens
tgccgccgccgctgctggcgaggactagggagccgcgggtgtgggaggccgagccgcagccgagcagcatgctggccgccacccccactcggcgcccccccacccgagcccgggctgctggg

SEQ ID NO: 326186 - DNA, 122 bp, Homo sapiens
ctttaaacacagcccgaatgccggcggtaacacagcaccgcggaggtgggctaagaagcacgtggttatcgaacgttgtcattcatcacagcttcatttgcgtggaagcagagatgactatg

SEQ ID NO: 326187 - DNA, 122 bp, Homo sapiens
agaactagggaagcaagaaaaccacagggcatggggccagggtggcagcccccagggagccggcaggatggcagagggcaaggcgggcagcacagccggcctcttcaccaagcaggtgcaga

SEQ ID NO: 326188 - DNA, 122 bp, Homo sapiens
cggggcctgggccgcatgcgccgtgggctcctgtatggtaggtccagttgtctgcctgcccgagggactgggaagctgggaaggagtctgggaggggagtagaaggtgctggggatgaccgc

SEQ ID NO: 326189 - DNA, 122 bp, Homo sapiens
agtctgggggagggtccccaccttcctgtacctcctccccacagcttgcttttgttgtaccgtctttcaataaaaagaagctgtttggtctaaaagtgcgtgtgtgtgtgtgtgtgtgtgtg

SEQ ID NO: 326190 - DNA, 122 bp, Homo sapiens
cgtgatctgcccggctcagcctcccaacatgctgggattacaggcatgagccattgcgcccggcctcatgctggacttcttacctacagaactgtaagacaatgtatttctgttgttttgag

SEQ ID NO: 326191 - DNA, 122 bp, Homo sapiens
cctaagtctttacacaatgaatatagtaatggggccactagtcgagggtggtaggagcggcggagactcggtaatatactggccacgcctactctgccctgccagtctcttctcacgtgtgc

SEQ ID NO: 326192 - DNA, 122 bp, Homo sapiens
tgcaccactgcactccagcctgggtgacagattgagaccccatctccattttaaaaaaatcgtcatctcagcctcgccattctgctttctagtatgtatgcgacacagaaaagtaactgctc

SEQ ID NO: 326193 - DNA, 122 bp, Homo sapiens
atctcaagtttctaccatcctgccaaagggtgcccctcaaaacaggtgcacacacacagccgctggattctccagggtcctctgaagtccagctctccagtgacttgttgctcttctttttc

SEQ ID NO: 326194 - DNA, 122 bp, Homo sapiens
gtccagaagaaggaaatagtggcaaagaaatttctggtgttcttgagaaaacaattgaggcgattgactgtatgatcatatagcaagaagaaagtaaaaccagagggacagatggactgaag

SEQ ID NO: 326195 - DNA, 122 bp, Homo sapiens
gaaaatatccacaatgcatgtcgatctgacaagaacctgacgcagaccacgtgagggcttcgtaaccaacacgaaaaagacggccggaggtgctccgagtggccaagggcacaaagaggtgc

SEQ ID NO: 326196 - DNA, 122 bp, Homo sapiens
ccctggagccagtgagatattttgtcaggaagaaaggttgtgggagaaaaagacagaattcgaggtcagaaaactccattagagactagcaagattatctggaaccagcctccctggggatg

SEQ ID NO: 326197 - DNA, 122 bp, Homo sapiens
ccattcattcacctattgtccatagccactttgccctgacacagcagaggtgagccattacgacaaaggccacatggcctctaaacctaagatatttactgtctggtccttgacagaaaaag

SEQ ID NO: 326198 - DNA, 122 bp, Homo sapiens
gagtgaaaatttagaattggaagacatttctgttagcgtatcatcccgggtgctcctggacgcaggactctccacacgtctggttggcggtcagctcatttatgattgagcctgaccttatg

SEQ ID NO: 326199 - DNA, 122 bp, Homo sapiens
acttcctggttggtttgcccttaactgacatggcggctagttgccttcggcgcaccactgcggctgctcagtaagccaagctagggcactctggtgtacagccagtccccgccgcggaggtg

SEQ ID NO: 326200 - DNA, 122 bp, Homo sapiens
gcggtttaggtcctgagatgtgcgtccgcgccccagcacacctgggtgaggtccggggtgcgggtttagttcctgagaggaatggccaggttgtgtgtgtgtgttccgtttggtcacttgtc

SEQ ID NO: 326201 - DNA, 122 bp, Homo sapiens
gaaccactggcttgaaattctcacagccagcacagcagtctggagtcaacgtgggatgaccgagcttggtgggcatccgccattactgagtcttcaggaggctgttgtaccttgacagtgct

SEQ ID NO: 326202 - DNA, 122 bp, Homo sapiens
agccaggtggctgccggacccgggaatagagccgggtgttttatagcggggtttgcgtcacgcggctgggcgggcgtctgcgcccccggctcggaaaggcttccctgaggcggggcggggcg

SEQ ID NO: 326203 - DNA, 122 bp, Homo sapiens
gcgtgggcagcctccacgacgctcggcacgggagaaatccgcgtcggcgacgtataggagcgtttgcttctagagaaacaaaagcaaggggatgggtgatcggttcccagcaccgcacttgc

SEQ ID NO: 326204 - DNA, 122 bp, Homo sapiens
ggtctcccacaaatgggtctggctcctctagtaactttgagggccctgtgaggggcagagcgagacaccgtggaaagtgggagggggcttgttggaggctcttgcccacatccccctcctgc

SEQ ID NO: 326205 - DNA, 122 bp, Homo sapiens
ccaactccctctgctcctcctgcccccacccgaaggcgccgaggagaaaagaaacctgggcggggggcccgccggcggaaatgaatgctgataccctagtagtccccagctcccaaacactg

SEQ ID NO: 326206 - DNA, 122 bp, Homo sapiens
actgcatcagataccacacaaaaaagggctcctcttttcttctctgtgcattttactatgcgaccgatatcgacacatcagtaaaaagagataagagtcctgaatctccttacccatctgca

SEQ ID NO: 326207 - DNA, 122 bp, Homo sapiens
gtcccgtcgcctcccggagccgcccgccgcgtcccccagcccgcgccgccctgcgcggcccgccggcctcctcacctatcagatttcctgtgcgcatcgccgcgcgctcctcccacctccta

SEQ ID NO: 326208 - DNA, 122 bp, Homo sapiens
ttttacaagtggcgctcggccttccccgctgcctgcgcgcctggggcgcacacacctgggcggggacagggcagctgctgagagccactcagcagctggcagctcattagcagacgcagcct

SEQ ID NO: 326209 - DNA, 122 bp, Homo sapiens
ggctgcgcctgcgcactgtgccgccgatgccggcccgggaagggcagctgcccgcagctgcgcgccgcctgccagttctcgcgagaactccggcccgccctgttgctgtccggaatttggcg

SEQ ID NO: 326210 - DNA, 122 bp, Homo sapiens
cactccgggtgtttctcaaacaagataccgactcggttccaaatgccacggtgtgtggtccggctccatcctcccgcagctctgctggctgggcggtcacagcacagcacaggtgtggagcc

SEQ ID NO: 326211 - DNA, 122 bp, Homo sapiens
atggtgatcggcagcttcactcctatgagctttgtatcaaaatactcaagtatttcagggcgtggtggttttctggtttcatggctatcagtttttttggatttggctaaatgtcatttgtg

SEQ ID NO: 326212 - DNA, 122 bp, Homo sapiens
ccgcctgtcccctctccggagctcttatactctgagccctgctcggtttaggcctgtctgcggaatccgcaccaaccagcaccatgcccatgatactggggtactgggacatccgcggggtg

SEQ ID NO: 326213 - DNA, 122 bp, Homo sapiens
gggactctgaaggactatttgatttgaaatatgaccttcagaatatgtacactccagagacggtttcctgagtctgctagtgctgaggaggaagagcagtcagaaccaaatggggattgact

SEQ ID NO: 326214 - DNA, 122 bp, Homo sapiens
ggtggtgagcaaagcagatggccctgccctcactcagcaaccagtgtaggggagctgccacggttaccagcaaaagctgaaatccagcgccatttgcatttcatatggaattttaggaagtt

SEQ ID NO: 326215 - DNA, 122 bp, Homo sapiens
ggacttaacctcaggcaaaatctgtagtggtcacagccttggagaggtttcctttacaggcgacaaggctatcctgcagtgtagtgttgtagtcttttcaaagtgattccacattcacttat

SEQ ID NO: 326216 - DNA, 122 bp, Homo sapiens
ccctccttggtttattatcgtggcacttaattcctttgtctttgatgttatctgaacaatcgtggtgtagctccttagtaatatgagaacacagcctccctctccaatctgggattcggatt

SEQ ID NO: 326217 - DNA, 122 bp, Homo sapiens
aagacccttcccgctttcacactgcaggcagctaagtcgccgagaaaggcagcaacttgacgcccgaccccgccacccaaacccgctcgctctgcgaccccagagcagccggcgccaacccg

SEQ ID NO: 326218 - DNA, 122 bp, Homo sapiens
aggaccctgtggttgggctgaccccgcttcagggtgccgtacacgaagactagggccatccgggcagagctgcagggagaggggaagtcacaggtcagcccgcagtgggagctctgtgtctg

SEQ ID NO: 326219 - DNA, 122 bp, Homo sapiens
taaagagcccgctgttaagtttcaaagacccttgcagagcatgaggagtgtctgggagcacgattcctcaaggaggaatattccatcaaacgccgcgtgataaatggggacccgcgtggttg

SEQ ID NO: 326220 - DNA, 122 bp, Homo sapiens
agaggcttggctggaagaagggagagggtccctggcctcaagttaaggggggcacgggagcgccgttgacagtcatcttgcgccccctgctggtggaggatggtgtctgcaggcagttcaag

SEQ ID NO: 326221 - DNA, 122 bp, Homo sapiens
gcgagggaggagctgcgccgccggctccgcccaaccaggtggtgctgagcttccgctgagcgctcttttgttttgtggtttgacacttttcttgacagcatgttgcagtttcttttcggttt

SEQ ID NO: 326222 - DNA, 122 bp, Homo sapiens
tggccccaccgccgtgaagtggggtcccttcgcttccacataggtggagactgagacagccgagcctattttgatctcgtttgggtttctgtaaggagcagtcagcagagtgagcagcgccc

SEQ ID NO: 326223 - DNA, 122 bp, Homo sapiens
ttccctcatctgcacaaatggatctgatgtgaacacttgtggggcgggtcagcgattctccgtgtaccccccttatctgcctcctgcatctatcattgggtatatattgtctttgcaaactg

SEQ ID NO: 326224 - DNA, 122 bp, Homo sapiens
cttcaaaaactaggctgaaagatgtcctccgcggaccaggtacatctttagtataacaatcgtggctggcaacagcttaacacgctcagggacatcttcatgtttctcataatgcaacgttt

SEQ ID NO: 326225 - DNA, 122 bp, Homo sapiens
gctgggcaggtgcacaggaaggcacaggtgtgcccacagaggcaggggcacccccactcgcgggaaaagcaaatacaggaacacagaacggccccggccccgactgcagctttggctggagc

SEQ ID NO: 326226 - DNA, 122 bp, Homo sapiens
atgcatagggtagacattcagcatatgtcaagtctctaacgtcaagcctctactagaaatcggtcaccgcatgtttaatggcaataatagacataatcccacacagtcattttgcaggtgga

SEQ ID NO: 326227 - DNA, 122 bp, Homo sapiens
gcggcgacgacggcggaagagaacgctgacgtcaacactcagctttttataggcggacgccggttgggcgggtcatgtgactgcgctgcgaaggcggggcgaagggacgccgcgcaagcgca

SEQ ID NO: 326228 - DNA, 122 bp, Homo sapiens
agccactggggtcatttctaggccgcattcacttcaaatgtagaagggcggtgagcacagcgacccccagccatctccagagaccctgccccatcactctgaggaagacacttgagcctctc

SEQ ID NO: 326229 - DNA, 122 bp, Homo sapiens
aggcactgctccgcctccaatccagttgctcttctttcttttcctcactctctttttcctcgcgtcctttgccccggaagtgctcttacaacattggctgccggcgtgactttgaccgcttc

SEQ ID NO: 326230 - DNA, 122 bp, Homo sapiens
cgtcctaggtgggggaagccacctaacccaggtcaggaactgagcccagctggcccagggcgggtgcccatcagcagctggactcctggcctgagcagaggcctcagcaggccgggcgggag

SEQ ID NO: 326231 - DNA, 122 bp, Homo sapiens
gcaccaggccacccggccgcgccggcacccgccgcgtcctgcttgacagaggctgatggacgtgtatttctccacggtgtgggccgcggtggtaggatccaactcccttgggtgttttcaag

SEQ ID NO: 326232 - DNA, 122 bp, Homo sapiens
tgtgcggtgcccagctcacagtgacagctataaaaagccaataagatatggtggagtttccggtgttgggatcactgtgaatttgaatccctgctctgtcatttcatggctctgtaccttca

SEQ ID NO: 326233 - DNA, 122 bp, Homo sapiens
tttaggatgcagttgtttcaggctaaaaataaatcatgcaatgaataaaaaagttagatacgacactgtagagggattcgctgatacagtctgtccgactggtgaagagggaagaggcagaa

SEQ ID NO: 326234 - DNA, 122 bp, Homo sapiens
tcatttcatcttttccagagtttgtgtgtccaatgcatctgagtttgagaataaaccgcacgtattattacaggaagctgtcagtgctgattagaggaaactaacaaagagaaggaggaact

SEQ ID NO: 326235 - DNA, 122 bp, Homo sapiens
gtccaccctcaccctgcagctgcccttctgtgggcatcgccaagtggatcatttcatctgcgaggtccctgtgctcatcaagctggcttgtgtgggcaccacgtttaacgaggctgagcttt

SEQ ID NO: 326236 - DNA, 122 bp, Homo sapiens
tacgccccatcagtatctcaccgcgcctgcgctagatgccctaggtggggccagccttgacgcgctgcgcctgcgcaatgtctctttgcggggcgcaccggcaggctcccagccccgcttcg

SEQ ID NO: 326237 - DNA, 122 bp, Homo sapiens
ttcatacaaggttgactcatgcttacagcactttgcctggtagtaggcagtgttttttgtcggggaaaggtacattttgcattttttacagaggatgcaatagtcatgttttctctcatctc

SEQ ID NO: 326238 - DNA, 122 bp, Homo sapiens
acctcatgatctgcccacctcagcctcccaaagtgctgggattacagacgtgagccaccgcgcccggccttaggccattgaaatattagcgaggtccccagaacaatataaataaccctctc

SEQ ID NO: 326239 - DNA, 122 bp, Homo sapiens
ggagatggcaacagggcaagcgtccagcaatgggtaagcggtggggtcggtgcacgcaggcgtccagcaatgggtaagcggtggggtcggtccacccagggagcgctggtccccctggaagg

SEQ ID NO: 326240 - DNA, 122 bp, Homo sapiens
ggaacggctgacccataagaggacgtcctcaaggtccccaagggctagaggctgagatgccgccttcgcctgggcgggcctcgcagcctggaggcaggcggtggtgcagctcgggcaggccc

SEQ ID NO: 326241 - DNA, 122 bp, Homo sapiens
gtgaaagagtcttatctggaatccaggtatctagacccactcagtccatgagttctcccacgggtttacacgaacgcgccacattaatgaaggcaagggactgacaaactacgaaggcgtgt

SEQ ID NO: 326242 - DNA, 122 bp, Homo sapiens
aacacctggcacatatcaactgcttagtaaatggaaaacaaatagactttggggaaaaaacgtgttttcaggaggagcaatctgagtttgatggatccaaatcatcatggtccttttcccaa

SEQ ID NO: 326243 - DNA, 122 bp, Homo sapiens
tcgcccccaccccgggacccctcccaacccccgccgcccccgcagccgctcgaggctgcgcgcccccgcctccccggatccgtcactcgcggagctgccacaatattgtgaaggctccgcgc

SEQ ID NO: 326244 - DNA, 122 bp, Homo sapiens
tgcatttgtatatggatgtaacagagagaggaagtcggcgccacagagcaatcacaggcgcggtcccaaaacgcctgctttgccaacagttcctcctggagcctcggatccagcagtgttgg

SEQ ID NO: 326245 - DNA, 122 bp, Homo sapiens
attctttgcttcagtggcactcttccttctctgactatggctcttcccttaaccttcccacgtggtggtatgtggaaggcaaggttgcagtttcagcattaaaagggatcacattctaggaa

SEQ ID NO: 326246 - DNA, 122 bp, Homo sapiens
ccgtggcgcgcgggtggccgaaaggcgaaagtgagatttcaagggccgggtctggggccccgcgggcgcgcagtgctgcggcgtgtggggagtacggggaggctggagaggagccggccccg

SEQ ID NO: 326247 - DNA, 122 bp, Homo sapiens
cccgggaccgcgggggagggcgagggaggcgcgcagccgcacgcacgcagtaggcagccccgccccgcccctcgaggcccaaggtcccgcccctcgaggctccgtgccccgccccccgggtg

SEQ ID NO: 326248 - DNA, 122 bp, Homo sapiens
tacccagcaacaccatcttcccaacagcagcgcacggacttcacagcagtgggagactaacgcactgaccataaatggggtgaagacaacgggcgacacattaggaaaataagaacaaagcc

SEQ ID NO: 326249 - DNA, 122 bp, Homo sapiens
gctgtcctggagtcaggtgctagcttcagtccaatcagaggccaccaacctgtggcagttcgtcctatggcctttccctgagcagatgactggttaagggaatttccctgcgggggggctta

SEQ ID NO: 326250 - DNA, 122 bp, Homo sapiens
ttggacttgagactgctgaagctacttaaccaccgaaaacggtgtcaaaatcagtgactccgcggaggcctattctcaggctctttaaaccgtcgtcttgggatgggcccagtgacaagcaa

SEQ ID NO: 326251 - DNA, 122 bp, Homo sapiens
aaggcacaggcagctcatgggggcatatgggaagcatgactatgggtgatgtcagacagacgtggcaaattgtctcccctcctcccacagtcccctgcagagcctcaggcccatccacagtc

SEQ ID NO: 326252 - DNA, 122 bp, Homo sapiens
cgccccgccgccctagcgcgcccgtcccgttgcggcaggtcccgcccccggcccgtctcgcgcttccattggcccgccgcggcccccgccgctgtttgtctcggcttccccgccacccattg

SEQ ID NO: 326253 - DNA, 122 bp, Homo sapiens
ggatgaaattaacttatctgagccttacattgtctcactaggcacagtgcccacttgttccgtggcacagccccagagctcctgttgaaggaacagactccaggactgactttccacttgat

SEQ ID NO: 326254 - DNA, 122 bp, Homo sapiens
cccagtccaatggccagaactcatactcccactcagggtgttccattgcagaccctgtctcgctgaattgtgatcattagatttagtatttggaagtaaatgtaacatgttattagttttcc

SEQ ID NO: 326255 - DNA, 122 bp, Homo sapiens
ttttaaggttctacagaaaaacagaagagataggagatagggagaaagagaaagttgttgcgggggagggagagagatttattataaggaattggttgaaacagttatggaggctaagtcca

SEQ ID NO: 326256 - DNA, 122 bp, Homo sapiens
cacacacacacacacggacacacacacacagacacacacacacacggacacacacacacacggacagagtcagcacaacgcctctgagccacacagccaggccagcacacgcgggggccagg

SEQ ID NO: 326257 - DNA, 122 bp, Homo sapiens
cacgtgaatctgagcttaggaacctctgaactggggcttgcagcagaagcacgtaaagcacgcaaagaaacgaaaccacacaggtcacactagtaatgtggcaacaggctaacttaaattat

SEQ ID NO: 326258 - DNA, 122 bp, Homo sapiens
ctttcctttgttaccaatctcttgttaccaacatcttgaaggtggagggccacctcccaccgtccagtgctaattagatcctgatttgtattacccagtagtagttccagttgggttgtctt

SEQ ID NO: 326259 - DNA, 122 bp, Homo sapiens
cgtgtctgagtgtgcgatgttttgattttgccctctggattaaaaagaataaatggcgagcgattaaggcatatctacgggcgcccatactttggtggccactgaaagtcagcggcgcggac

SEQ ID NO: 326260 - DNA, 122 bp, Homo sapiens
cctctgggcaccatctactccgcggccggagcccctccggcgtgcggccctggctttttccgcccccaccacagcatccccgacgctgctgccgcctcccgccgctccaacatggctcccgg

SEQ ID NO: 326261 - DNA, 122 bp, Homo sapiens
cccgggatgcgagcctgtctgggacatggcactggtactgcagctgggagggactgaggccgtctagggcaccaagtcctccacaccctagctttggaaagctcctctctgtagcctggggg

SEQ ID NO: 326262 - DNA, 122 bp, Homo sapiens
gaaatccgtgggcttcgaccctccgccgcacgttgtcccttcacactggtcctatagagccgatcctaattcccatggcctgacagtacaaccgcatggagatgcacgtctctaagacgcct

SEQ ID NO: 326263 - DNA, 122 bp, Homo sapiens
gccacccgcctgcgctccgccgacgcccttggaacaatcggctggagccctgaaacccgacgtggaccttctgctccgagaaatgcagctgctcaaaggccttctgagccgggtggtcctgg

SEQ ID NO: 326264 - DNA, 122 bp, Homo sapiens
tattcacacagcacgtgtgatcactcaaaggaactgaatgcctggagggtgaacgccagacgcctcctcctgccgactgggaagcaagggagcgtctgcctccagatgtttctctggcacat

SEQ ID NO: 326265 - DNA, 122 bp, Homo sapiens
atacaacgttgcagtattggaaaaccactccaattgcgatgacaatgatgggcgatgtggcgtggcacgtctgaggatcctgcctgccctgcagggctgttggcccccagaagggagcagtt

SEQ ID NO: 326266 - DNA, 122 bp, Homo sapiens
aggatttttatgggcaagcaatggctagactcatgtccttagaaactctgcatagtcagccgtagtctaggcaaacctcagtcatggttttacattacagcagattagctgagagggagatc

SEQ ID NO: 326267 - DNA, 122 bp, Homo sapiens
agaggggctgcttggtgatatatatatatatgtttgtttgtttttgctgttttgctgtagcgcagaatctaggcctgctctggccagatcagtttcgaagaccgtcgctccgaaggaggcac

SEQ ID NO: 326268 - DNA, 122 bp, Homo sapiens
tatcctcctgcctctcacttcctctatgtcacatactctccttgttggttaagttcagctcgttagtatagggtcagtggaaacagatttgtctctattcctacaaaacagtgagatatggg

SEQ ID NO: 326269 - DNA, 122 bp, Homo sapiens
tccttctgatgttcaggtatgtttggagtttcttccttctgctgagttcgtggtctcactcgctcaggaatgcagctgcagaccttcacggtgagtgttacagctctcaaggcagagcgcct

SEQ ID NO: 326270 - DNA, 122 bp, Homo sapiens
taaccccccaactgaggtacttctatacagagaaacccatgccactcccagccctgctgccgccttgaggccaagactgaggctgcggggtggcccctccttgagtgctttctcttccaggc

SEQ ID NO: 326271 - DNA, 122 bp, Homo sapiens
ctttgtgtgtggtctctctctccagcagagggtgatcctgcacttcttacatgacaaccacgggctccgagaggaagtagaagctgccaaactttctgaaggccacttcctcaatattccgt

SEQ ID NO: 326272 - DNA, 122 bp, Homo sapiens
ttcaaaacccccgggcggagaaagggcgtggcgagtggtgcctgggagccggcgttgaaccggcgggatgactagcaaccgagcctttttcgaggttcttagagatgattttaacagcactg

SEQ ID NO: 326273 - DNA, 122 bp, Homo sapiens
accgactctcctacagctcggagctgtgtatcttattgccagtaccacaacagtcctgcccgaatatatcatcagcggcctactttctcccttccctccaagcctgttcctttcccaacaat

SEQ ID NO: 326274 - DNA, 122 bp, Homo sapiens
ggcctgcagcgcggcattgtgctccgccttggtgaacatcatcagcaggtggtagtccaccggcccggcaccgccgccctccaagctcttggccttcgcgccgggggctggcgccacggagc

SEQ ID NO: 326275 - DNA, 122 bp, Homo sapiens
gatctgcctaccttggcctccctggcctcttttgttttttgagacaggatctcattccatcggacaggctagagtgcagtggtgtgattgaggcttactgcaacctcgacctcctgaactca

SEQ ID NO: 326276 - DNA, 122 bp, Homo sapiens
attctcagccagcaccaaatattcaaatccaacttccacaccccgacaacagaggggttccgggtgtaggtgtagtgctggtgcacccatgagggtgtttttcaggaattctggaggtggtg

SEQ ID NO: 326277 - DNA, 122 bp, Homo sapiens
gcgcctcgcgtgcgggcctttctaatcttcgcttgtcccttcacttccacagctggaggtcgaattcaccacgtcacgtagagaaaaggggcggtgtctcgggtctccccgtgtggcatcaa

SEQ ID NO: 326278 - DNA, 122 bp, Homo sapiens
ggaaaaccaccagcaactgagtctggagagtgacttcagagttcatcagccagttcagttcgcttctccaaggccctggggcctcagccagaatggagctttggctgtgggaaagccagctt

SEQ ID NO: 326279 - DNA, 122 bp, Homo sapiens
attcatcttgaaagtcaagctttttgctctctgctattgcacatgctaggcgctgggaggcgatgagcgactgagcacaaagcctgttgttgacctaatggcagagccagatcgggttaaat

SEQ ID NO: 326280 - DNA, 122 bp, Homo sapiens
gaacctcaaggggctggtaggggaatccagaggggtttgtagtgtctcaacacagccaatcgaggggcaagaactctttacatcaacaataagaccttgctctcctgggaactcttgggctc

SEQ ID NO: 326281 - DNA, 122 bp, Homo sapiens
ccgattgtttggtttcgtcctgataatcactgtgctgtgttttccctacacgctctgtgacggggccgtccgcctccttcctgggctcctttaagagggtggtaacggtacatcaccgcggg

SEQ ID NO: 326282 - DNA, 122 bp, Homo sapiens
gcgaaggctgagcaagggctgtctgtggttaagctcatcacaggatgaggccatgccccacgcaactcagtcagagctgggcttgcgatgatgcacccagagtagttgttttgggtgggggc

SEQ ID NO: 326283 - DNA, 122 bp, Homo sapiens
atgccttgcattactgcttgcaaacagccatgaccgttgggctttaaagccctgcctccacgctgtctcagctttagacagctgacttcagagccactcatctgctgctcagcagctgggta

SEQ ID NO: 326284 - DNA, 122 bp, Homo sapiens
tggagcaggtcacctggagggggctctgaccctgcgtgagcactagcccctcgtggggagcggacgggcgagggcctgcggacccgctggcacaggcagacctgggcagctcccggtgagag

SEQ ID NO: 326285 - DNA, 122 bp, Homo sapiens
ggggtgtgcgggactcgagggtctcatccagggactcggtgccatctggaaaggactcagcggccagagtccagcgggctcactggcatcacacaggtaacagcttcagtggacatgtagaa

SEQ ID NO: 326286 - DNA, 122 bp, Homo sapiens
tgatgcagtctggggccaaatcagtccagaaggtagcagcccctgtaatagaaaaacaatcgtcttccctaggccgctggcgtcagcaggcctgggcaggagtgaataccgagaacccaact

SEQ ID NO: 326287 - DNA, 122 bp, Homo sapiens
ccatagaaggagcgctccacctactcttgtaaatagcatcatgaaaatagaaccagagcccgggcgcggtggctcatgcctgtaatcccagcactttgagaggctgagggaggtgaatctcc

SEQ ID NO: 326288 - DNA, 122 bp, Homo sapiens
taacaatgcctcatgtgtccaatttctctaccagaatgagctctccttaaggtgaaggaccgtcctacccaattttatatcctaaaatattcttagtgtataggcatacaattaaggtctga

SEQ ID NO: 326289 - DNA, 122 bp, Homo sapiens
cttcctggttcttcttttcctcttccatatgaattttagtgagaattggtgtatcaagtacgacagcacttttgattgtgaattttattgaatttcattgaaattatagatacatttgggga

SEQ ID NO: 326290 - DNA, 122 bp, Homo sapiens
gggtcccgggggtcccgcgccctccccccgcctccaagccgccgccgcccgcgcctcacccgtcacctgcacgcgacgcaggctccgcaggtgtctcacggtcatctccaggatgtccgcct

SEQ ID NO: 326291 - DNA, 122 bp, Homo sapiens
aatgacctctttatgctgtctgcttagcagacagttccaggaaaagcccctccctctttccggctacatgattgcaatagaatggatctgtcaagtttctacagtcctttccagagaaattg

SEQ ID NO: 326292 - DNA, 122 bp, Homo sapiens
agccactggcttggacatgagccatcaaacagcatggaataaaaatagaactgcttcagccggagaggagacaggctgagctccttgctgggaggcctttaaaacaagaacaggtttcattg

SEQ ID NO: 326293 - DNA, 122 bp, Homo sapiens
tccttcagtgaccgttttaaaccagtccaggagcttctccaaacaggtgtcatctgccaccggctgcctgggatctaccagaacagcacagagagccgggagcagctgggcgcattctgggt

SEQ ID NO: 326294 - DNA, 122 bp, Homo sapiens
gtcactcggtcccagacaccagagcaagctcaagacccagcagtgggacagccagacagacggcacgatggcactgagctcccagatctgggccgcttgcctcctgctcctcctcctcctcg

SEQ ID NO: 326295 - DNA, 122 bp, Homo sapiens
gctgccgctgtgctgactgcagatgcttcctcctctgccatggaagctgcactactacttcgtggtgtggggactggagagtcaccatattctccaggagtcaatgagggactgtctagcaa

SEQ ID NO: 326296 - DNA, 122 bp, Homo sapiens
aggtactttatacatttatttaatcctactaatgtgcagccattgcccaagcagtgactgcgttgcatacatttggcactgagtaggacaagacctctcagctatacattgaggggttttag

SEQ ID NO: 326297 - DNA, 122 bp, Homo sapiens
accgtgtttacaatccacaggaattgccctctacatgggttgtgacatctatacccaaatcgacaactcacacttcagacatataggccttggtttaatgaatctgtcactttaaaacatgg

SEQ ID NO: 326298 - DNA, 122 bp, Homo sapiens
gactttgttctcttcggctaccccaagcccgaaaacctcctccgagactgaaagctttcgcgttgctttttctcgcgtgcctggaacctgacgcacgcgcactccagtttttttatgaccta

SEQ ID NO: 326299 - DNA, 122 bp, Homo sapiens
gcataattcttgcagtgccatctgcaagtgtcacccagaggacagcgtggcagagagtggcgctgcagaaggtgaagatggctcctcagcaagcctgtgtctatgccccttgctaggtgtta

SEQ ID NO: 326300 - DNA, 122 bp, Homo sapiens
ccacttaggggcgctgtgcgtgcgccctgggcgcctggtcggccccaccgatgtgaagcgcgcgggtggcaatcaagtcaccgtctccgtttactccccgcagtgtggtcgcgcaacttgga

SEQ ID NO: 326301 - DNA, 122 bp, Homo sapiens
ccgttgggcagtgcctgggccttctccagcagggcatgggtttccagccaggactcgatacggttcaccagccgccagccaccagtgctaaagtgttgcctgatctcctgctcaaagacctc

SEQ ID NO: 326302 - DNA, 122 bp, Homo sapiens
ctgtggccgacatggcgggcagtggcacaccgtggccacttcccccagttggatggcccgcgtggatttcagggtctgtttcatccaaccaagagtttctgagcgtcctgtcggtactggct

SEQ ID NO: 326303 - DNA, 122 bp, Homo sapiens
cacgtgtaaacatcctttagaggggagaagcggctcacttgcttatctcgagggttcatccgagccccgcctctggattcttttaggtttagggacgctcataaaggctcccaggcacttgg

SEQ ID NO: 326304 - DNA, 122 bp, Homo sapiens
ccagttatagccacgttggcacctcttgaacctctgtggccgttagcacggttttctgcccgcgtgcccgagaaaccaacggattagaaggacttttaaagatgtgtgaggaaagagctcac

SEQ ID NO: 326305 - DNA, 122 bp, Homo sapiens
tcattgtgaaaaatcctactgcaatgggcaagattaatttgtaacactttctctgaagtgcgaattaaatctgatgtttcatgatgatctgtagtccatgtggatgcctgtgtacattatag

SEQ ID NO: 326306 - DNA, 122 bp, Homo sapiens
ttccaatagtgaccgattcacgtgttttccaagtgtaagacacactccatcgcattcagccggttctccgcctggtgtcttgactcctgaaggaagactccgccccttcgttgtttctgcag

SEQ ID NO: 326307 - DNA, 122 bp, Homo sapiens
gtcaaaaactctacaaagaaaacctcacaggaaaccagggccaacacatgagggatgtcacggaagaactggtggatcacactggatctgcaaacgtgctcccgaaacatgttgccagtgtg

SEQ ID NO: 326308 - DNA, 122 bp, Homo sapiens
tatctctatttctcttatgttgaattctatagctatgcttttcaaactgtagtgttgatacggatcacttggggatcttgttaaaatgcagattccgattcagcaagtgtgtgatagggcct

SEQ ID NO: 326309 - DNA, 122 bp, Homo sapiens
ggccgggacgcggtgttcccagacccaggccagcaaacgctgggtgccgacagactgttccgtgctctgcaagaacctgggatggggttggtgctcaggctcaaaactgtgggctttggaga

SEQ ID NO: 326310 - DNA, 122 bp, Homo sapiens
aacacagcttagatgggtgatgtgagggagaagtcactgtggtttgaaagtacataacagcgctctgacttagccagggcaatcaaggaaggcttccctggggaggtgactagtgtgctgag

SEQ ID NO: 326311 - DNA, 122 bp, Homo sapiens
gagggaggcagagggaccgccaggaagggacccgggggagaggcggggctggacgggacacgttagggtctgcgatttcgtgtgatgcccacagcccagcgcccagagccatctgtagtgtc

SEQ ID NO: 326312 - DNA, 122 bp, Homo sapiens
ggaagaaatatcatcctcttcacctttggattttagggacagtatcacgggggaggtctccgccccctgcgatattgggagtcatatcatccgctcccacccaggatattaggaacaagatg

SEQ ID NO: 326313 - DNA, 122 bp, Homo sapiens
tactaaaaatacaaaaaaaaaaaaaaagacgttttggtcaacgacgggcggcacatgccacgatggtcccatacgatgacagcagctccaccaggaagcctgggtgtgccctgggctctaag

SEQ ID NO: 326314 - DNA, 122 bp, Homo sapiens
gggggctgcgctgggactgggtgccttgagacaggccagtggttccgcgacccccgctttcgaagttttccagcaagattatcctgaggaaaaacaaggtgagttggtctttgatttactct

SEQ ID NO: 326315 - DNA, 122 bp, Homo sapiens
aaccacaccacagtcatggccccagcccagggtccaaggactgtgggcagtggccgccctcgctgagctgggggtggaggagcacgggctgccagtgtccaggtgatgaggccaccaggtct

SEQ ID NO: 326316 - DNA, 122 bp, Homo sapiens
tccgatggactggagggatgtgagggcgggctgggggcgcctagtaggggctgccggggccgcgttttcggatcgagactaaggtggaggtggggctctgacttttggagggcctggacgac

SEQ ID NO: 326317 - DNA, 122 bp, Homo sapiens
atgcaactcaatgtttagctgagtccaaacatactgctgccaacattttaaagtcaacaacgatatctaaaataaacataggctgactaacacacactggtactttaatgaaaatatattgt

SEQ ID NO: 326318 - DNA, 122 bp, Homo sapiens
tgagactcggcgacgcgggggctgtacctgtggctgcggggccgacggccggctgcagggcggctggctctcccgcctcgagactaggcgcactcccatccccgccgcatgttctccacgcg

SEQ ID NO: 326319 - DNA, 122 bp, Homo sapiens
cgcgcgttggcccagaggtttacccaggcagcggccctggtgccgagggggcaggtgcagcgctgtagtgatgcccagtggcctcgtcctcagccacctgccccccaacacctgctagatgc

SEQ ID NO: 326320 - DNA, 122 bp, Homo sapiens
ctcacccacccctcgcgctcaggcaatccccacccccacccgaggaggtggagcccctcccggggattccaccccaagtcccccacaggagtcatctccaccagccaggcggcttctccgcc

SEQ ID NO: 326321 - DNA, 122 bp, Homo sapiens
tgcgcccgcactcctcagcccttgggaggtcgatgggactgggtcctgtggagcagggggcggtgctcgtcagggaggctcgggccgcacaggagccctcgggtggggagctcaggcatggc

SEQ ID NO: 326322 - DNA, 122 bp, Homo sapiens
agtgccaccttgtggtgaagagaaggacaagaggaggacggctcgacgcccatgtgtggtcggtcagcatggaacccccagcgatgccctcttagctaaaccctaaaccacagccaaagagt

SEQ ID NO: 326323 - DNA, 122 bp, Homo sapiens
tgggtgtgggaagtggctgcccgtcccggcccttactttgcctgagcttcccgcctgccccgtcaacagcctccctggggctctgccctctgctgggcagtggggcacccgctattgttcct

SEQ ID NO: 326324 - DNA, 122 bp, Homo sapiens
ttgtgggatcttgaatcaatcacttactccctggggacctgtgtattctcatccttaagacgagatgacctaagagtgacactcttgaagtctggtcagtctgaaatgaaattcccataaga

SEQ ID NO: 326325 - DNA, 122 bp, Homo sapiens
ggccatgctggggaactgagggcaccgctgccgcctgcctgcagagccgccctctggtcccgctggccgccggttgtagtttgctctgctgccaccaggccaccacttataaggcagtggct

SEQ ID NO: 326326 - DNA, 122 bp, Homo sapiens
gtctggggagcggggagagggcagtctgggctcgcggttccggctgggggctgggcaccccggggcgaccacggcaggcccagatggggactccggttccaactctcctggcccagaggctc

SEQ ID NO: 326327 - DNA, 122 bp, Homo sapiens
ctgtgcacggagctggtcctgagtgactgcatgctcagcgaggaaggtgggcaggcgcggcggggtggatccctctgctccttagctgcccacaccattgcctcggcagcccgaggtcgctt

SEQ ID NO: 326328 - DNA, 122 bp, Homo sapiens
atgccggcgggctctgcccccgtggctgtcctgcggtgaggctggccgtttaaggcagtccgaggggaagggtctggaggccttgcctttcctcaaggccggcgcaccccagataggggttt

SEQ ID NO: 326329 - DNA, 122 bp, Homo sapiens
cccacctggctttgccatcggcttcttgttttccgaggattctgctggtaaccttgttgccgagctcctcagcgcccccaccacctggtccagccctaattttaccagctctttactgacac

SEQ ID NO: 326330 - DNA, 122 bp, Homo sapiens
tgtgggcgccacggggagcctgccaggaacatcagttcacgggggtctctttcgagtgcccgtcggcggctgagcgtggcaagctaaatccacctggacgcgaacacagtgcgcggcctcct

SEQ ID NO: 326331 - DNA, 122 bp, Homo sapiens
tggggggcgggccgggggcggggcgctgggccccggcaggctcgccctttatgtaaatagcgcggctccgccccaggctcgccgcgccggaggtgagcaggaaggagacggccgcccagcag

SEQ ID NO: 326332 - DNA, 122 bp, Homo sapiens
tcgtatagtggttagtactctgcgttgtggccgcagcaacctcggttcgaatccgagtcacggcattgtggaaacaatggtacggcaagggcctctttttagacttagaaagccacacattc

SEQ ID NO: 326333 - DNA, 122 bp, Homo sapiens
gcccactggggaggtggcgctgggcgcgcgggatgcgcggggagccttctctgcaggagccgcacagtgcactgctgcgcgctgggcagtgcggggaagcgccgcgggaaggagcggctccg

SEQ ID NO: 326334 - DNA, 122 bp, Homo sapiens
ctcatcagtgctcgtgcggtccctcagggacacactcctacgtgtcatcacggagggttccgtctcatgatggcaccagcccagcctccagcccctctgacagcaggggaggctgagcccgc

SEQ ID NO: 326335 - DNA, 122 bp, Homo sapiens
ggaagcgcgtgctgctggcgctgagcggccaagcccgcggcgacccgcgcgccatctccgcgcaagaggcgcacgcgcctggccgcctgccctcactggccgacttcagccccgccgagatc

SEQ ID NO: 326336 - DNA, 122 bp, Homo sapiens
aacactcaccaagcaaagaactaactgaaagaatatgacagtggctgcttttccctcctacgctactatttctcaaaaagtattttgggccagtttgggaattcttaactatgtcctcgctg

SEQ ID NO: 326337 - DNA, 122 bp, Homo sapiens
cctcagtcccgaaacacccttattctccgcacttgtcaccccaccctctgctgcccccaccgcagcgcgcaaacgcacacgagtttaaagtttaggctgtgatgctatcctcgcccgcagat

SEQ ID NO: 326338 - DNA, 122 bp, Homo sapiens
aaggaatgagttgcaatttttaagcaacatgtaaagtgcacacctggtctgagtacctcccggcggccaggacccgccgttttcggtatagggaacaccagataacaatatataacgctacc

SEQ ID NO: 326339 - DNA, 122 bp, Homo sapiens
ttttttgggtctttttttgagacagggttgcactctctcactcaggctggaggacagtggcgccctcatagctcacagcaaccttcaccttccggcctcaagcaatcctcctcccttagcct

SEQ ID NO: 326340 - DNA, 122 bp, Homo sapiens
agcaatcccctcaggtgtgactgtgtgatccactggattaactccaacaaaaccaacatccgcttcatggagcccctgtccatgttctgtgccatgccgcccgaatataaagggcaccaggt

SEQ ID NO: 326341 - DNA, 122 bp, Homo sapiens
tgcactcactgagcgagggcgacgatgcgcggccaccaggcccactggcctgcaagcggccgcccagccccacactacagcatgctgccagtgaggacaacctgtccagcagcacgggcgag

SEQ ID NO: 326342 - DNA, 122 bp, Homo sapiens
ctccccgcgatttccggtagcgttccgcttcctccggaagtcggaaggagtcgctctgtccgtcccgctcgttggtggcgctgttacatagcccgtagtcagaggcctttcagcccaggggc

SEQ ID NO: 326343 - DNA, 122 bp, Homo sapiens
ggaggtggtgctcgcaaacctggcagctgactgggtggggcgtgccttccctggcagtcgcggaggggaaggctgagggacccggtccccgccccgcgtgctcaggctgaacagcttttctt

SEQ ID NO: 326344 - DNA, 122 bp, Homo sapiens
ctgagttaaagcgcgcgggtgccagccgggaggtgcggctggattcgtttcgctgaggtgcgtccccaacccaagggcacgactgcagtggccagtttccgagccccgcccggaggggggca

SEQ ID NO: 326345 - DNA, 122 bp, Homo sapiens
ccccgaccggacccgggcgaggccaccgcgaccaccgcttctcgcccgccctcctgggaacgcgctgccctcctgctccgcaccttcaggccgagcaaacctgcacagctgcgccctcgcct

SEQ ID NO: 326346 - DNA, 122 bp, Homo sapiens
cagcgcgcactcagatttttagaagaagaaatctggagaggacgtgagagggagaaacagcgcgcactcagatttttagaggaagaaatctggagaggacgtgagagagagaaacagcgcgc

SEQ ID NO: 326347 - DNA, 122 bp, Homo sapiens
gggtctgggaagagggcaacagtcattctcttggcggcacgatgtgtgcgctagtgtgtgcgcgcgcgtgccgtgtgcatgtgggtgcgcgtgaggggagggggaagcggaaattcgcagtc

SEQ ID NO: 326348 - DNA, 122 bp, Homo sapiens
ctgcccgtcaggctctcaactagtcgctcttcacatctgattcatgtcttaaagcagcctcgcaggtaggtctgcatcattttcccatcctacatcggaggcgctgaagcccaggcgggttt

SEQ ID NO: 326349 - DNA, 122 bp, Homo sapiens
ccccccacccaggggtgtttagcacaccgccggacgtgtccctgggcaagtggggtgacccgatgccccggctttgggctgcttccttcggagagctgcgtgggcactggaagcgatgttag

SEQ ID NO: 326350 - DNA, 122 bp, Homo sapiens
atctcaaagtcatcctcatcctgggccacgtcgtcataggcgggcggggggggcagcgggcgtgcgtcccagtccaccacaggcgtggggtgcaggggccggggcagtgcccgcgtggggct

SEQ ID NO: 326351 - DNA, 122 bp, Homo sapiens
gagaggagacggtagtggttattagccgaggcgcggactgctgacgtcacgccggctgggcgcgtccgggacttactcctttccgcagggcagcacccagggacctgagtgttgcaaggtgc

SEQ ID NO: 326352 - DNA, 122 bp, Homo sapiens
aggcatttacaggcaaactcctgggattcattttcttccacaggcccaaagtgggagttccgatatggtatgagaccactgtgagatggattagaaagatctggaagctagatgggaactag

SEQ ID NO: 326353 - DNA, 122 bp, Homo sapiens
aaatttcctggaaatttacatctccccagggacacttaaaccagtggttctgaatgaggacgtgactttgagctccaggagtcaaagtgtctagagatacttttggttgtcataaccgggcc

SEQ ID NO: 326354 - DNA, 122 bp, Homo sapiens
aggcattaaaaaatgggtgtcaagtacattgggaacgctaacagacccaccagagatgtccgctgaggaaccaacgaaagagggtgcagttccgcagagcactctccaggtggcgatgtttc

SEQ ID NO: 326355 - DNA, 122 bp, Homo sapiens
tgggctcgcactcggggcgcctctgccaggatcccggcgcagagcgcggccaccagaagccgcagcgtcatcctaggcagtaaaagccgtcagctaggacccccgcctctgtcccttgctcc

SEQ ID NO: 326356 - DNA, 122 bp, Homo sapiens
cgtctttttgcccccgccaccgcggctttctcccactgcggttttttgcccccgccgccgcgtctttttgcctccgccgcgcagatttttgcccccgacgctgcgcctttttcccgccctgg

SEQ ID NO: 326357 - DNA, 122 bp, Homo sapiens
acggccggggattgggcggtgagtaggtgtgcccgccctggctctgctggcactgacagccgacgccgtcgcccacgcccccctgcgcccacttccccgcctccgctctcccgcgggggcgg

SEQ ID NO: 326358 - DNA, 122 bp, Homo sapiens
gggcccagatccaggtcaaaaggcctctcagttcccagcccttccaagccctaggctgctcgcctggcctcctctctgttccgcctctagggctgaccctctctccatgggatagaactgca

SEQ ID NO: 326359 - DNA, 122 bp, Homo sapiens
gcccagacagttaacacattctggaaagaatatagtttttcaccaaatcaccttcttccccgtctaataaaatgaacagttgcttctagtggaatacaatctttatatacctattggactag

SEQ ID NO: 326360 - DNA, 122 bp, Homo sapiens
gcagacctcagagtggacgtccggtctcctgtgtgggataatacacgccctcctttcaatcgctgcggacctcagagtggatgtccggtctcctgtatgggatgagatacactccttccctt

SEQ ID NO: 326361 - DNA, 122 bp, Homo sapiens
tcgacggaggctgcgaagggaaaccccagccggaagtagactcccaggatgcagcggaggcgcgaaggcatgcgccggtggacgctctgattggttcctcctgctgtttttaaagggagggg

SEQ ID NO: 326362 - DNA, 122 bp, Homo sapiens
catcaattcaccgtggcaaggggtacagattattgttgtactttgactcattccaataagcgagtagccgaagctgacccctgacccctgtggttgggggtcatcctcacttccccacctct

SEQ ID NO: 326363 - DNA, 122 bp, Homo sapiens
tgagcttgcagtgagctgtgatcacaccactgcactctagcctgggcaacagagtgaaaccgggtctcaaaaagaaagaaagagagagagaaaaaaaaagagaaagagagagagagagagca

SEQ ID NO: 326364 - DNA, 122 bp, Homo sapiens
gtggtgtcatcgatcgctctgacagatttttcttttgctctagtcttgctgccaggtctgcggaaaagagaatcctgtgttctcaggctcggcttgcgtctcgttctgcctgggccgagcta

SEQ ID NO: 326365 - DNA, 122 bp, Homo sapiens
tacgagggcctgcgggcctttgctgtgtgccaccctccctgtaagtctatttaaaaacatcgacgatacattgaaatgtgtgaacgttttgaaaagctacagcttccagcagccaaaagcaa

SEQ ID NO: 326366 - DNA, 122 bp, Homo sapiens
ttactccctgatcaaggcagacagccatgactcatgaagctccagaccagcagtccccaccggtcagtccctggctgctacacagggtggatggagcgcctgtgtgcactcacaggtgcatg

SEQ ID NO: 326367 - DNA, 122 bp, Homo sapiens
tggactagagtaggggtgcgtttttggcagtaaaaggaagttatgtgagactgatggaatcgctgtggagcctgatgaagtctgcttgttagaaaggttaatcgggcagtactgaggctggc

SEQ ID NO: 326368 - DNA, 122 bp, Homo sapiens
cctgcagctacggcccggggcgctgtattcagggctcatgcgggtaaggggctctggggacgtcctggctaggggtgggaggattcctgggagagaaacccgagtgccagggtgaggggctt

SEQ ID NO: 326369 - DNA, 122 bp, Homo sapiens
tcttgggaaaggggtgaattcactgggtcatggaagggacagtcaggtgaccagcggggtcgccagatgaagcttcccagccgggaaacaagacggggtttcttggcaggccctggtcctgg

SEQ ID NO: 326370 - DNA, 122 bp, Homo sapiens
gcaaaagaacaaagcttccacagtctggaaggggatgaccgggttgccactgcttgctcgcgcagcctgcttttattctcttatctggccccaccccatcctgctgattggtagagccaagt

SEQ ID NO: 326371 - DNA, 122 bp, Homo sapiens
gagccgccagggctcgcctgagcctcggtcccttggcgcgcggcgtgccctttcccgccccgagtccttgaactaacccaagtgttggggacatcgtgggaccgaggagaacaggaggggtg

SEQ ID NO: 326372 - DNA, 122 bp, Homo sapiens
tagaaaacttacacactaggcagaatgagggaaagaaacctatcatgcaatgggaaaaggcggtcaactctgctactaaaagggaggattgtccagtagaatttgctgatggatttggtgtt

SEQ ID NO: 326373 - DNA, 122 bp, Homo sapiens
cctttcatgctgtagtttagcaaacacaatccagagccaagtgtaaattgtgtcaaggggcgaagggacccagggaaccttctggagcgacgggcatgttagtctcctaattgtggtgatgg

SEQ ID NO: 326374 - DNA, 122 bp, Homo sapiens
ttaggtccccgatgaccccccgcgtacggggtagggttggaggaaagagctggggggacccgtgagaaccaggacaggaaaggcacgacttctttagaggaagagagctttgtctccttagt

SEQ ID NO: 326375 - DNA, 122 bp, Homo sapiens
ctgctccctagagtgggaggcccaggtctgcaactgtggttggaaggctgcatctgcacccgggagggcaaatcctacctgctcacggtccccaccaagagcacagggaggcttggatccac

SEQ ID NO: 326376 - DNA, 122 bp, Homo sapiens
tgagagcttgagtctccagcctcactccatgcagggcaagacatagatgggacagcagtacgccttctgcagagccaagaggtttggtcccaggactctgccccctgactcacctgtccctg

SEQ ID NO: 326377 - DNA, 122 bp, Homo sapiens
agagaccagcgtccttccaggctgttcagacctcagcgttgacactgaaactggcccctccgcggaggtaaggccgccctccgcgccgcctatgcctgccctgtctgtagcaaagactcctc

SEQ ID NO: 326378 - DNA, 122 bp, Homo sapiens
tgaagtccagctggagaccttcaaagggggctgctccataagctcgtatgccgggcggaacggctggacgttgcctcgcgtcatgctgttggcaggtaacacaccactgcctcaccgttttg

SEQ ID NO: 326379 - DNA, 122 bp, Homo sapiens
ctggggtccccagctgctagcttttctttcttaagtttcagtatgggctccagggatagacgatggagacttggactagtgtctcctccctagggcgtctggccctgactgggtagggggtt

SEQ ID NO: 326380 - DNA, 122 bp, Homo sapiens
agcatttccaggcacctgcggagcactaggcagtgtgcggaagctgcagggcaggcaggacgagggggcagtctggaggggggtggacacacagctgtccccagggagcccagcgcggtgcc

SEQ ID NO: 326381 - DNA, 122 bp, Homo sapiens
ggcgcccggcaggggcggcaggagctcaggagaggcccccggggatcgggctgggccccacgtgagagctaagcgactgccctcgcgcccgcagaacagcagggcctgcatcgactctaagg

SEQ ID NO: 326382 - DNA, 122 bp, Homo sapiens
aataaaaacaagataaaataagtacattaacctagctcgcaggcatgatggcaggatagccgagctcctgctgtggtccacttatactgtaacaagctcattaaatcacaactggcttctat

SEQ ID NO: 326383 - DNA, 122 bp, Homo sapiens
aggatagcatagcactggattcccattagaatccatagtgtcttcatagcactggattcccgttagaacatttcatgcagcctggtgcttcaattacctggcttccctttttgtagcattgg

SEQ ID NO: 326384 - DNA, 122 bp, Homo sapiens
ggaggaagctccggggtcccggggcgcaggctgggctcaccttccccatggctggctgggcgcacggcggtgctgagctggtggggcggcggcgctgagcgggtggggctgcggcgcggcgg

SEQ ID NO: 326385 - DNA, 122 bp, Homo sapiens
tgggtgcatctttccaccgctggttggtgtcccctatgtggaagcatccgcgttggttcacgccttctcctgctcctgccgacggacattttgttttcttccagttattggcaatgaggaat

SEQ ID NO: 326386 - DNA, 122 bp, Homo sapiens
gtggaggacgctctgggaccctctgggggtggggcgggcggggtgaacttgaccccaggccgcgtgccgggcgtgccatctgccgctccgctgcaaggtctcgcccgggaccggggctggcg

SEQ ID NO: 326387 - DNA, 122 bp, Homo sapiens
gccgcgcccagcgcccagatgagtgcgtagagcgcggtgaacagcaccttggcccagaggcgagtgtccacgcccagccgggcgtccaggctcagccccgggttggagctgggccgcggggg

SEQ ID NO: 326388 - DNA, 122 bp, Homo sapiens
caacgccgctcatcctggaagtctgttgccagccgctgtaagccccaggctcctaaccaccgagctgcgggcctggagaatggccactgcctctccaaggacagcagccctgtgggcttggt

SEQ ID NO: 326389 - DNA, 122 bp, Homo sapiens
atctattttcaagacattggaataaaggctctttaactatgttcagtggccaaagactcccgcaaaggtgaatggatccatgtataacctgccatacctccaggaaagaatgggaaagtctc

SEQ ID NO: 326390 - DNA, 122 bp, Homo sapiens
agatcactgagaaatctcattcccggggtagaaaccatctcctgcgagaaggagctggcacggagtgtctaaccgtgcaaacaaaaccggcttccaggttgacaagttgtaattgctcttcc

SEQ ID NO: 326391 - DNA, 122 bp, Homo sapiens
tgcctccaagccagcaggagagacctctcagaggcgggttccagggatgtgcacagaggccgcctccaacccacggaaaggccgtgcaggtgtctcacgcagggaacagttccaagtgggag

SEQ ID NO: 326392 - DNA, 122 bp, Homo sapiens
tcaggagttaacaactaaatagctttgctatgctgttgctatagcaacagggttcagtagcgctttgactgtttcctattgccagagcctcgcgactagtctctctgcctccaaccgagcct

SEQ ID NO: 326393 - DNA, 122 bp, Homo sapiens
tttaacaagccagtggacggacatgctttggtcatctttggggtgaaattggactcctgccggatccctatccaaagctccctgcagagggtggaggtgactgaatcccagctcctccccaa

SEQ ID NO: 326394 - DNA, 122 bp, Homo sapiens
aatttccacaaaacttataatgaaatctggatccatatttcttcttgatggcttctcccacgtcttgagtccatgattgaccttatattttatttcttctgcactcctgcctattcaagcaa

SEQ ID NO: 326395 - DNA, 122 bp, Homo sapiens
ctttacatgtaaactcaaaatggtgcactccctgaaagtattcctcttgttggatatttacgagatacctttgcaaatagaaaactgcagacatgacccctaagcttcatgtaaaatgactg

SEQ ID NO: 326396 - DNA, 122 bp, Homo sapiens
tcctggctctggcatccgagagagactggagcacccagtgttacacgtgagctggaatgacgcccgtgcctactgtgcttggcggggaaaacgactgcccacggaggaagagtgggagtttg

SEQ ID NO: 326397 - DNA, 122 bp, Homo sapiens
gcaaagtcaggattcgaacccaggacctccacgctccagagtccttgcctttggcaattgcgctctgctgtccggcaagtccattgcagctgcttggtccattttgcagaatcaaagcagcg

SEQ ID NO: 326398 - DNA, 122 bp, Homo sapiens
cagcgcggccccagctcccccaaccacagctgcccaagtttaggagcccgcactcgtgagcgatggctactccgcacagccccggggtcctctacggaaatccctggcacctatcagtaccc

SEQ ID NO: 326399 - DNA, 122 bp, Homo sapiens
agggtgtatgcaacctagtggagaaattatgatgccagttttgtccctggcctgtgacctcgagatacattacatgcctcctctatctctttctgtttgcaggtgatctaatatgtctctct

SEQ ID NO: 326400 - DNA, 122 bp, Homo sapiens
tgaaagggcgggaccatggaggctttttcttggccccttagttgtgggttttcctctgggcggcgaagccagtttccatcagaactgcccagaggcgggcgctgccttcctggggtgacgca

SEQ ID NO: 326401 - DNA, 122 bp, Homo sapiens
ccggcagccatctttccatccttatgccttgacctgcacctcagtcaaccaggctgtggccggcagcctcaggggcaccatggggaggcctcgcacaggctcagtttaaggtgcatcctggc

SEQ ID NO: 326402 - DNA, 122 bp, Homo sapiens
tgggcagcacccccagccagagggaggcggccagggcacaggcatgacccagcaggtgctcggccatgatgccgtcctcgggcagcagctgccagtgctgagcctcgcggaagtaggagccc

SEQ ID NO: 326403 - DNA, 122 bp, Homo sapiens
tccgagccaggtgtgggatataatctcgtggtgcgccgtttttcaagcctgtcggaaaagcgcagtatgcgggtgggagtgacccgattttccaggtgccgtccgtcacccctttctttgac

SEQ ID NO: 326404 - DNA, 122 bp, Homo sapiens
gggcagggcttgggacctgcagcccgccatggccgaaccccccccacccccgtgggctcccgcgcagcccgagtctccccaacagggtgctgccccctgctccatggcgcccggtcccatca

SEQ ID NO: 326405 - DNA, 122 bp, Homo sapiens
gggcgcgaggagcacgcggcctcggctcggctccccgacacccccaggccgccgcactcccgcggcccggggctcccccagtgtcctaggccgctctgtccccacccacgtgcgcgactccc

SEQ ID NO: 326406 - DNA, 122 bp, Homo sapiens
accctgcacccccaaagtcctgacaacgcacaccccacgaagccggcgcacgcgcccctacgacacccattcggtgctgctccgcacacccccgcacgccgcccgtgcacctcccgtgtctc

SEQ ID NO: 326407 - DNA, 122 bp, Homo sapiens
ttaggtgcaactgcaagctcagagcttctggcagcccagaagatccccaaggtgccaacacgaagctgcctgcgctctcgccgaaggccctgtggtcctagcgaactttcgccctttttaaa

SEQ ID NO: 326408 - DNA, 122 bp, Homo sapiens
aaaatggaggcgctgaaaatcagattttctttaaccgtttgattaaaaaagcagttcacacgaatgtgtgaagtatttggattgtggatattaggtacccacgttttattcccaggttgctt

SEQ ID NO: 326409 - DNA, 122 bp, Homo sapiens
gcatgtagcgtgtagacaagagacgagctgggaattaggaaaaaagacatgggctgtgaacgaaggagcccagccttataagacgcgagtctcttttccaggcaaacagaagaacgtgctgt

SEQ ID NO: 326410 - DNA, 122 bp, Homo sapiens
aagtgaaggttaatcttgggagataacagttcccctctccctccccctgcagatttccagcgtttccattaaggttaagtaagcctctacaaacctagcatttaaaaaaaaaaaaaaaaaaa

SEQ ID NO: 326411 - DNA, 122 bp, Homo sapiens
ttacaggcgtcagccaccgtgcctggccgatatttcttaaacaagttcctgtgaaacacacgaaaataaaatagagagtatctattacccaaaacagagttaaatttctgaaatacatttta

SEQ ID NO: 326412 - DNA, 122 bp, Homo sapiens
agcactcaggggcttccccgaggaacggctcctcctaagacgaggtgtgccgggacgggccgtgttgggccgcgtgactgtctgcataagcagaaaccaacttgggcccaaggaagccactc

SEQ ID NO: 326413 - DNA, 122 bp, Homo sapiens
ttcccagtgtacagactattagtatacgatgcatgcaaacagagaggtgctttattgaagcgggacaagacctctattcatagtaaagtcaaacaaaccacgcatgtgaaaacctccactta

SEQ ID NO: 326414 - DNA, 122 bp, Homo sapiens
ttctttcgcactgtcttctgggaattgtagtctctcctaggctaggcggcccgtccaaagcgcatgcgcccagacacctccgaaaaccaacgcggcagagcgcagaaagcggagaccgaggg

SEQ ID NO: 326415 - DNA, 122 bp, Homo sapiens
gcaccgggcgtgcagagccgcccctgggcaaattcccaagactgctcttcacgcagggagcgcgcggaggcccgcagggtgcccgcctggccgcagaggccgcgacgccccctccgccaccc

SEQ ID NO: 326416 - DNA, 122 bp, Homo sapiens
aacatttattaaaacaggtgcttatgttatccctttgaatttggaagcactaataatgggcgcatatcctttgcatttatgggaggagcctgctttgaaaccgcaattagtggtaccgttgc

SEQ ID NO: 326417 - DNA, 122 bp, Homo sapiens
aatcgacctcagttccgcaggatgaaggtgaccctgagccggcctcaggatgcagggaagcgcggacatacctcgaacccctttggaccgcgtgcgatgccgcttctcctcggtgtccacct

SEQ ID NO: 326418 - DNA, 122 bp, Homo sapiens
cagcgaggtggcgcgcacctgggtcactggcctgcgctacctcatggccggcatcagcgacgaggacagcctggctcgccgccagcgcaccagggaccaatatccttgggcacctatcgggc

SEQ ID NO: 326419 - DNA, 122 bp, Homo sapiens
gaaggctcctctcccagcccaggaacgtctgcaataaattgcttccatgtgcgggcttcccgcttcctctttctctctcagggttaatgtgggaaaagggaagtggcttttttttttttatt

SEQ ID NO: 326420 - DNA, 122 bp, Homo sapiens
tgcaatttgaaaactgcacatgtccaccctgaaagtctgatttgggtctgggttgaggcccggatgtgggtagtttttaaaggtccctagtggttcagaagcatagccagggtacagctggt

SEQ ID NO: 326421 - DNA, 122 bp, Homo sapiens
aaggacacggggtgataatggccagagggactgaggtggcgaccgctgctgctgcagcagcggaggctgacgctggttctctctgggctggtggctgggtttctgaggctctccccgagggc

SEQ ID NO: 326422 - DNA, 122 bp, Homo sapiens
gcgggctgggggaacttcggtgcatctgtgagcagcacaggagggtcccgtggatggaggcggcctctgtctcagccatatggatgccaatatcctcgctacttggcaagatgtcatcatta

SEQ ID NO: 326423 - DNA, 122 bp, Homo sapiens
tccccacagctcacaacagccctattttctctacgccctcccgcccccgcattgcccgggcggccccagagtgcggtccgccctgcccacacccacctccgccggtcctcgcggttggtcag

SEQ ID NO: 326424 - DNA, 122 bp, Homo sapiens
ccggaagctgtggatgaaaccggtgcccagctgcgcagagtaaagcgcctggcgccaggacgcaggagaggcgtgtaggagatgcgccagatgcggcggcgggcgaaccttcacgggacgtt

SEQ ID NO: 326425 - DNA, 122 bp, Homo sapiens
cttgtgaaattgggctactatttttgaaagtacttgttgtgccaagaagagaatctgtaacgaggcaattttgttggagaaattgtctgtactgtagctgacactactctgtagctttctgg

SEQ ID NO: 326426 - DNA, 122 bp, Homo sapiens
ctccttgtcgggctgtcagagcgggttaggctcggggaattggttctctggatcatctcccgggagccagcccctcctggcagctttgtttggcaaaagcgcagggattagcagggctgccc

SEQ ID NO: 326427 - DNA, 122 bp, Homo sapiens
acttggagaatcaacgatctgcgatgaagataatgaagataaagacaatgtcaatgtcagcgtccaaaatcataaggaccctttaagaagcttccagagcagaagtgactgtgcaagaaggg

SEQ ID NO: 326428 - DNA, 122 bp, Homo sapiens
agcgctgcctgcaacgccctacaccacagccagcccaggaccgactgatcgctcagctcccgccaactttaataagtatagccaccgcctgggtgtagactcctgcaaaataattcacttcc

SEQ ID NO: 326429 - DNA, 122 bp, Homo sapiens
tcacagcagctgggatggtggggatgggtggaggaaggcggctgcggtgaggggaggaggcggaggaagctgaagcctagagaggacctcacacttattcaaggtcctgctcactcaggcac

SEQ ID NO: 326430 - DNA, 122 bp, Homo sapiens
gtcagacatatgtggattaaaccttgtgatcaccaccgaccagcgcctagagaggatgtgcgacacccgcctcgctgcgtgggagcatgcagtgagatcatttgcacaaagtacttagcatc

SEQ ID NO: 326431 - DNA, 122 bp, Homo sapiens
ccgcagttcccgggcggtggagccacctcacaaagcggcgaccgttctcgcggggcggggcgtagccggtcccgccccacggggtgccctctcgttcgctcgctagctccccgcgcccagga

SEQ ID NO: 326432 - DNA, 122 bp, Homo sapiens
atcaatgcacttccgcataggcctagggccccacgctccgcgatcagcgccggaagcgcacggcatgctgggatttgtagtcctccacctgtggccggcaggcgtttagaacgcgaggtcta

SEQ ID NO: 326433 - DNA, 122 bp, Homo sapiens
agtgatggagtcagggtaaaacctacttcgagtctggtcttaaccacgatgatgctccttcgacgatttcttcgagtactgggccctgttcaacctcatcttggtatcactaaacgctcgtg

SEQ ID NO: 326434 - DNA, 122 bp, Homo sapiens
cctccacccctgtgcttcatcctgccctctctcatacctgccatctatcctcagcacacacggcgcctttgccacaagtaacacctttgcatccagcactctccgtgtctatatccgcctcc

SEQ ID NO: 326435 - DNA, 122 bp, Homo sapiens
ctgcctaagtcactgaggtctggtgtgtttttcccactcgtggcccttctcagtcaggatcggccacttttcaagtgtccagcgtgactggtggctaccatattgggtagtgtcggtataga

SEQ ID NO: 326436 - DNA, 122 bp, Homo sapiens
ggtgggacagtgggagagatgcatccacaggccaaggagtgccgaggtccccagcacccacggaagctgggaaagcggcctgggacagggtccccgcagaggaccagaaggattttggaatt

SEQ ID NO: 326437 - DNA, 122 bp, Homo sapiens
agggagaaaaggttgtgatcactgctcaaacaagttcttccttccctccaagaaatgaggcgtgggctgtggaacccattgcggctaatcgtaaacaggtgcatcttaaacataggatgcca

SEQ ID NO: 326438 - DNA, 122 bp, Homo sapiens
accgcagggctgggagaacagctgtgccccttcgaggctggattttagtggagggacacacgccaaagaccccctctctgctgagccccgtttgttgtctcggagcccacccgactctagcc

SEQ ID NO: 326439 - DNA, 122 bp, Homo sapiens
ctacaaaagagaatcaaaagttttgcaccaagttaactggttaaagtgccattaaggaaccgtttccattctagaatgaaatagaattttccctaggtcactcatctgtcctcttaaagcaa

SEQ ID NO: 326440 - DNA, 122 bp, Homo sapiens
gtactgctcttcctcctgtcgacacggcacacgcacacacacaactaacacacgcacacacgtgcacgctgtcagatgttgcagtgcgcactccatttccacattcgtgctttgtaaggtct

SEQ ID NO: 326441 - DNA, 122 bp, Homo sapiens
gtgcgcccaccccagtctgttcgctttcccattcggcgccccccattccccacccgtcaccgccatccaccggctggtctcagggattcagaaaaactacatgagatatttggttgggaaga

SEQ ID NO: 326442 - DNA, 122 bp, Homo sapiens
gccgccctgcaccctcacctaccccacccgggaggagggacagggaggacccttccagagcgtccctagaggggcctactccccgcgcgccgcctctaggcctcctccccttgcttcctctt

SEQ ID NO: 326443 - DNA, 122 bp, Homo sapiens
ccagaagacgccctgagcgggggcccaggctctcccggaagacggcctgagtcaggtccacgctctcccggaagacggcctgagaggggggcccaggctctcccggaagacggcctgagcca

SEQ ID NO: 326444 - DNA, 122 bp, Homo sapiens
cttagagtcccaattcttcagcttcccattgggcctttcaagcgagcaggggcgtgactccgggggctccgccccgagccttggcccagtcttggggtccaaggctgagggagcgggacgga

SEQ ID NO: 326445 - DNA, 122 bp, Homo sapiens
agtaaacatgctctcaaaccaagatagtaggtcaaaaacagggaatcccaacttaccaggcgtccaactgagaaaaacacagcagccataatctctccctctggtttcccctctctggaaag

SEQ ID NO: 326446 - DNA, 122 bp, Homo sapiens
aaggtggaacattttggcttctttagaagttctcgccagggggcctacatcaataattaccgaagtttattctataaaacattagtcctctagaaaaaggggaggggaggggagtcctctag

SEQ ID NO: 326447 - DNA, 122 bp, Homo sapiens
tatttttctggtaagtagagtgagccatgtcttgcccagggttacagagcttggaaaagacgcctcctaaaaatctgtaggaccacctttggttttcttccagatttttttttgtcatctct

SEQ ID NO: 326448 - DNA, 122 bp, Homo sapiens
cctctgaggccacgggccatgctttcccacgctccggacagccactggctcctcctcacacgcactcacacttcaacccttgggaggactggcctgcggacctaccagctgcgtctcagtgg

SEQ ID NO: 326449 - DNA, 122 bp, Homo sapiens
atagcccccagttagggacagaaaccagaggtattgaacaagaagccccaccgggagaggcgagacccgggccccagccctggacctggccgtgggtgctacagaaggtcgggggacatcgg

SEQ ID NO: 326450 - DNA, 122 bp, Homo sapiens
cggcaagccgcaaaaactcagggggacgttgaggcaggcagaggcgagatgcggcgagtacgaagggattgctgggagtctcccaagcaggccccagagctgtcccaggcaggccttaaagt

SEQ ID NO: 326451 - DNA, 122 bp, Homo sapiens
ccactcccgagtttccagccacgccccaatgtccggcggaagggagggagggtctccggccgccacggccggtggtagttgtacaaacagctgtgtgcttattcatcagcggtgctgtgcga

SEQ ID NO: 326452 - DNA, 122 bp, Homo sapiens
ccatcttttcacatgcaccccaaaaaataactaaggatagaattttgagaatgatgtagacgagtaagaaagaaacctgggggcagggctgttctgagtgagaccctcaaatcacggaagtg

SEQ ID NO: 326453 - DNA, 122 bp, Homo sapiens
cctgtagtctgtgctctgaaccacttcaccctgtttctttctccatcctcacagtagagacgtcatctaagaggagcttgcaagtccagagggcttcctgaaggaagtgagctgagaataat

SEQ ID NO: 326454 - DNA, 122 bp, Homo sapiens
ccatacacagactactcaccacttgtcagggagtcgaacacgtgtttctgtggaccaaaccgatgacgtttctccgcacctaccaaagggaatcgggttccctcatgcacttaggaaaaaag

SEQ ID NO: 326455 - DNA, 122 bp, Homo sapiens
atatcacccccctctccccacctggatattacaatccacggtggtcacacagcatgttgacgggattgtcagtaatatcttctcagcctctggaaatcaccaactatattatagacgggtgt

SEQ ID NO: 326456 - DNA, 122 bp, Homo sapiens
gtagcttatctgctggccaggaagccacggagggccttccctacccctctcaggctgctacggtgattgttcccccatgtctgcagccagccaaggtgccccaccccaaagcatcagaggag

SEQ ID NO: 326457 - DNA, 122 bp, Homo sapiens
ggattacaggtgtgagccactgcgcctggccaaatttgtataattaatacaagagagaaacgtacttaatgtggaaaagctttcagggaaaatgaatactcatttggtatatgataatttac

SEQ ID NO: 326458 - DNA, 122 bp, Homo sapiens
gaggtcgaccctgctgcagccgccggagaacggcgctgcgcgacttgttcttggaggcgacgtcccacctgttggacagactttggacccaaagagaatctgacccattctctctgaccctt

SEQ ID NO: 326459 - DNA, 122 bp, Homo sapiens
gtggtgcaacacatttttctttgcagcaaaatcgctttttctttttttcaaggaattttacgtttaaaaccacaaaacagaagggaggtttgtaagtggagcttttctggttgatgaagagg

SEQ ID NO: 326460 - DNA, 122 bp, Homo sapiens
cagcttggttcctctgccagtctcatcaatcactcatacatggggaagagttgggagcagcggggaggaggaaagaaatactttttccagtacaaatgcctgaagggtttcaaatttctatt

SEQ ID NO: 326461 - DNA, 122 bp, Homo sapiens
cgcctggggacgagactcatcctgtgattgaggaatgcatgcagcctctcttgacactgacgcccacgcccagaagcctcgttggaggataagggggcttaacagcttggaggtcatgcaga

SEQ ID NO: 326462 - DNA, 122 bp, Homo sapiens
tacacagcgtagggtacatacggtactcaacacatcttagtctgcttcctatctcatacccgtccttcctttaaaggagattcctttgacataatccaaaaggcatggttccataacgatca

SEQ ID NO: 326463 - DNA, 122 bp, Homo sapiens
gccgagagacaggcgcagagcgggggcgggccagttgccttgcaagcttcgcagacccagcggcccgcaggcccctaggtgtagaactgctaggggtatagcgattcagccactgcccttaa

SEQ ID NO: 326464 - DNA, 122 bp, Homo sapiens
gacctgggtcttcaacgagatgaattatcagctatttcatagctgcagtgttggatatgccgagacgataaaagcaacagcaatcagaatcaacagttgaaacgacatggcagacgctgtga

SEQ ID NO: 326465 - DNA, 122 bp, Homo sapiens
ttcgggtggcactggggagcccagggcctcccagcgaagtggccagattcaggaacccttcgcacagcgggcactaggaccctgcgcggcgccgcgtctcgcggggggcgggcgggcggagg

SEQ ID NO: 326466 - DNA, 122 bp, Homo sapiens
gggtggcggagggtgagtgcgcacctgggaggggacgatctgggggtcagtgcgcattggcggaaggggtagtccgggcgtctgtgcccacctgcggagggggtggcagggggtcagtgcgc

SEQ ID NO: 326467 - DNA, 122 bp, Homo sapiens
cttggcatacatcaggtcgaacttgtggtccaggcgggcccaggcctcggcgatggcggtcgtgttgctcagcatgcacacggcacgctgcaccttggccaggtcacccccaggcaccacag

SEQ ID NO: 326468 - DNA, 122 bp, Homo sapiens
acccgtgggattcccggaggttatttggggatgggagcaccccgggaaagatggacttcccgcgtttgggtgccttgggcccctcgtcgctggggtttgagtgttcctggcgaggcgctgct

SEQ ID NO: 326469 - DNA, 122 bp, Homo sapiens
tccccatcagttcttgggcttgggtgccaccttatataaacattgctgcttttagtgcatcgcagaagcaaaaggatgacacattaatagcagctggaggatctcattaaaattcggaggaa

SEQ ID NO: 326470 - DNA, 122 bp, Homo sapiens
gagaaactgtgttagagccaggagaccctgactgcatactgacttcaacagctgcgggaccggcagctcctgtaactcctgcgcctcagtccctgacctgcaagggacatactgcctgtccg

SEQ ID NO: 326471 - DNA, 122 bp, Homo sapiens
tatctcccactcgcctgcacaatccgtatccaagcggtgctcggttgaatggctccgtcgcggctgcccattgctcttttctgggtcccaagcacagaagataagactgtcgtactttcccc

SEQ ID NO: 326472 - DNA, 122 bp, Homo sapiens
ctcaaaggctgcgctcaaccctcatggtctgcaaggcagagtttttgtaggacaattaaccgcagggtgaacagcaaaagccgcccaacagcacgtccagcaacgtgtttaagccgcctccc

SEQ ID NO: 326473 - DNA, 122 bp, Homo sapiens
tcgttgaggccggtgacatgtctgtgagctgcggaggctgcggcccccaggtgagccgggcgccgacgtgctcgccgcggaggctgcgtttagatggggtggcggcgggtgtgcggccggca

SEQ ID NO: 326474 - DNA, 122 bp, Homo sapiens
aaatactagagtttaatatgaaaaccttcctgtcaacatttcagttttccctcattgcctcgtttccctaacaaagactccacattctccagtgtttagcagacaataaatcagtgctgtgg

SEQ ID NO: 326475 - DNA, 122 bp, Homo sapiens
aaacacgccccatgaaaagtgtttcaaagaaacacaaatctgtactgaaaaaagtctatacgcaataagtaagcccaaagaggcatgtttgcttggcgatgcccagcagataagccaggcaa

SEQ ID NO: 326476 - DNA, 122 bp, Homo sapiens
ggcccgagctcggcccgccccgggagccggccccttggagcctccggccctgcaatgggacgtgttctcctttaagagttaagaaacttgaaaccttgtttgcgcaacaatcagcgccgcgg

SEQ ID NO: 326477 - DNA, 122 bp, Homo sapiens
gctccccggcggaggcaagaggtggttgggggggaccatggctgacgttttcccgggcaacgactccacggcgtctcaggacgtggccaaccgcttcgcccgcaaaggggcgctgaggcaga

SEQ ID NO: 326478 - DNA, 122 bp, Homo sapiens
cttggacagcgacggcctgaagagggacaaggatgagatctatggacacccgctcttccccgtcttggccctggtctttgagaaatgtgaactggctacatgctctccccgtgatggggccg

SEQ ID NO: 326479 - DNA, 122 bp, Homo sapiens
ctcgcctcatcgcacagaattgtgcataacggagaaaactgttttgaaagtaaccaaaggcgtgcctgacaaatatgaggatgtagtataattattgaatcgtggactgccaagcggacacg

SEQ ID NO: 326480 - DNA, 122 bp, Homo sapiens
gaaccacgtgccggtaggaggtggccaggtagtcgaagtagttgatgttgagtttccgggcgatgtaacggcccaagtattccatttgctgtgggagcaggtggcgctcaactggggccggg

SEQ ID NO: 326481 - DNA, 122 bp, Homo sapiens
tgactgcccgtgttactaaaggtaaagccaggccgagtgactccctgagtctgcacatgacgagggccccagggtcccggcgcctcccgagagcaggtcattactgtgactcacattccaga

SEQ ID NO: 326482 - DNA, 122 bp, Homo sapiens
gggcttcgggttacttggggaagctcgtgacccttggaagcgaagctgctgggcaggctgcgggaaggctcgctggcgcggggcttaggatttgggatgcaggagcttcctctaggggtgcg

SEQ ID NO: 326483 - DNA, 122 bp, Homo sapiens
gaagttgagctccatttaagtctcttaccaggtgtcacccctccagtaagactaaagctgcgagtttgcaatatgaataatcactgtacatgattaggagaaggtaaaagtagaacagcttg

SEQ ID NO: 326484 - DNA, 122 bp, Homo sapiens
gaagaaggccccggggttggggtagtgttgcagcagaggccagtcttggggtgaggcctacgcacccggcaggttggacgtgaagcagaaggcgtcgtagcgttcctcggcgttatggcgat

SEQ ID NO: 326485 - DNA, 122 bp, Homo sapiens
ggtctctccccaactccagcttattctaagtcctttctcttttcctcctttcagatgcagcgctttattattatgtagatgaatttagcctctccaggcttctttcacccagtatcctgatc

SEQ ID NO: 326486 - DNA, 122 bp, Homo sapiens
agaagtaggattcccttaagagttgagagatttagcagctcaaaaatgtgacctgacatacgagttctttctatgcttttgttcttcctcctccaacactggtttcacactaaacttggctc

SEQ ID NO: 326487 - DNA, 122 bp, Homo sapiens
agaggtgggtgagggccagaccaggcagcatcttttaggcaccctcaagaagtttggcctcgatgccaagggtactggggagccactgcagggttttatgcagaggggagggatgaccagtg

SEQ ID NO: 326488 - DNA, 122 bp, Homo sapiens
tatatatttgaatagactcatatggtctgcagataacttcccttccacttctgagcttaacgaggacctttcaaacagtcaacccccgttgcaggcagtagattctgcttccccagagcagg

SEQ ID NO: 326489 - DNA, 122 bp, Homo sapiens
ccccgtgccagcacgcagagttcctggcctctcaccggggaaagctctgccccgttcctccggagcccagtgcgcccctggccaagttctcccagcgtccactctagggcctgctagcaccc

SEQ ID NO: 326490 - DNA, 122 bp, Homo sapiens
atgaggaattgggtgaaaagagggagcagtgttacatttttttaacttaaaaaacaagtacgtggtgatgtgttcaaaatatgaaaatctttgaaagtctgggctcacttaagtatgcactt

SEQ ID NO: 326491 - DNA, 122 bp, Homo sapiens
atgccagtttaaaaactggaaggaaaaggtaagagctctccattataaaatagttgcattcggttaatttttacacattagtgcattgcgtatatcaactggccctcaatgaagcatttaag

SEQ ID NO: 326492 - DNA, 122 bp, Homo sapiens
tgggagatgcttggaggatgcacagtaattgaaatgctattcctggcaaatgatcatttccgggggaaaatgtgaatatcatgatatcaagtcaaataaagctgttaggttgaggctttgtc

SEQ ID NO: 326493 - DNA, 122 bp, Homo sapiens
tgctgtgtgctgtgcgggctgctctgtgcttgggaaaatgaaggttggcatgatttcctgcggcaatgccctcccgttttatgccttaataagggctagaaagaaaacattttcctcgagct

SEQ ID NO: 326494 - DNA, 122 bp, Homo sapiens
actcactttttcctctgagcgcgggaggcgttactcactcttcctccttcccctcctcgccgactcccgggctctgggcccctgggggagggaagaggcctcctatctactcctctgcccca

SEQ ID NO: 326495 - DNA, 122 bp, Homo sapiens
tcccactccccccttttgggcgcggctcgggggtggaagccctgggcgacagcacagcttcgctgcggcggggaaggaggaccgtcgggcccagagttcccgccgccacatatggtctgtgg

SEQ ID NO: 326496 - DNA, 122 bp, Homo sapiens
atggtgccgtctctctctctgtcactagaacggacatgaggattgtgtcttgtcgatccacgtcctgagttcccagacgtcataggtgcttgctcaacgagtgtttgaatgaatggtcagca

SEQ ID NO: 326497 - DNA, 122 bp, Homo sapiens
agcttcaggtgaattatcttccaaaaagagatgcgttttaatcgcagaagtctgcagatgcgaaggaccttgaaaaggctatctaatgtggccctgcatttgagtgacgtggaaaaccgaga

SEQ ID NO: 326498 - DNA, 122 bp, Homo sapiens
gccttctgcaaacgggccatccagaccagggttgagtcagctgcgtcagtgggagccacacggggcttgtggccatggtcaaggcaaatatgtaggtttgtggtcaaggccttctagcaggc

SEQ ID NO: 326499 - DNA, 122 bp, Homo sapiens
ctactaaaaatacaaaaattagcccagcttggtggcagatgcctctaatcccagctattccggagaatcacttgaacccaggaggtggagactgcagtgagccaagattgcaccactgcact

SEQ ID NO: 326500 - DNA, 122 bp, Homo sapiens
gcggggtgagggcttcagagaatcttctcggagacatagttagagctgtaatgcgtcccccgagctataacgcgtcccccgagctataacgcgtcccccaaggtacccgctgcctctgttta

SEQ ID NO: 326501 - DNA, 122 bp, Homo sapiens
aacaaggacgcagaggtcatcagctctcccgctccagtgtggccctgcccacccccgcttcgttcccaggtgcccgggcagccttcggctctcacctgcaccaatcacctcttcaatcttga

SEQ ID NO: 326502 - DNA, 122 bp, Homo sapiens
ggaggtgctgcggtacctaccatggtattcttgtcccggaacgtagtaggtggggttgcccgcaatatgcagggaaatgagcacctcgccctgctccccatccccttccagctccccgtggt

SEQ ID NO: 326503 - DNA, 122 bp, Homo sapiens
gcgtatgacgcaagaacacacagaggttctgcgtgtcacccatgaaaatgtgacagcacccgggaagacgtgggcagcacagacaaacccagcccaaccgagacaccacccagcaggaggcc

SEQ ID NO: 326504 - DNA, 122 bp, Homo sapiens
atgtatacaacatcttcaggaaaacctacgtgaagttagaattttcaaggcagcatgtgccgatgataaaactacatagaacagcaggaagactattatcattaaagtgaggctaggggctc

SEQ ID NO: 326505 - DNA, 122 bp, Homo sapiens
cgaacttgagcagcgagagtgtgtccggggtccccccgcttcccggcccgggtcgggatgcgccttgctgggggctctagggagcccaggggctcctccacgccagactcggaggagaggga

SEQ ID NO: 326506 - DNA, 122 bp, Homo sapiens
ggacatctagcaagtgcctcccctcacaagctggagtgggccaggctgtgggacagaggccgggcacctgcgatggagcccccctggccactgcgcccacggctctctggagaaggctctga

SEQ ID NO: 326507 - DNA, 122 bp, Homo sapiens
cgttgccatcctgaccctgctggcaatggggtgacagcacttccccagggtgaataacctcggggctctgtccctccaggtcctgcccacatcataaaacagcaagtgcttcctcttcagga

SEQ ID NO: 326508 - DNA, 122 bp, Homo sapiens
ttttggctactttacaactgctgctacagcactatcagcaaaacactctatcactttgaacgaaggcatccaaatggcaaataaaagctttactcacttatctgattaaaatgtttaataaa

SEQ ID NO: 326509 - DNA, 122 bp, Homo sapiens
atggctttcttacagtgtgtgctttgacagagggcccttgccaacaacacgtagctgagacgcaaggggtggggcacagtaacctcctgagggggcccaacagggacccctggccaccaggg

SEQ ID NO: 326510 - DNA, 122 bp, Homo sapiens
gaagaatggtgttgttgactttgaacttgctgatgccctcgaaggaagcctccctgcagacgctgctgctgtctgtgttgacgccacgcaaagtgaggaggacagagggcttctgtgacgtc

SEQ ID NO: 326511 - DNA, 122 bp, Homo sapiens
gcccaggaacgcaggttcgctaggagacccagagcaactgcaggaccacagagcccgccccgcacctcgtcaccccatccacgggctcctgcccacagcagggccccacggagagaactgca

SEQ ID NO: 326512 - DNA, 122 bp, Homo sapiens
cggcctcgcaggctgggccgccccccccaacgccaagccgggtcggagatgctccagccccgtcgcccccagctctgcctggaaggacccaggagcccggcgctcactgctgtccctgcaga

SEQ ID NO: 326513 - DNA, 122 bp, Homo sapiens
caggtcccctttccccgttgctccttctctagggataggagaggtcgcttcccggccctccgcagggtcacagctcggttcctcccagcccgccctccggggagcttagcaacggttgctac

SEQ ID NO: 326514 - DNA, 122 bp, Homo sapiens
ctagcagccactggcacccaggctagcccagcctcagccgagctggcggaattggaaagccgacagccgccgctggagcgctggcgaccgcctgcaagcagactgcgcccctcctgccaggg

SEQ ID NO: 326515 - DNA, 122 bp, Homo sapiens
taatgcgccttcacagtcttccagaaaaacagatgcaacatctacgacattcttcctgctcgctgcaacagcaattaaagagaggattgggtgaggggggaggcctggggagaggatgcggg

SEQ ID NO: 326516 - DNA, 122 bp, Homo sapiens
ctataaatattatcttgatctcaaaataaaatgctaaagtcacatagatgcaaatgtcctcgataaaatacaataaatctaacactctataaaaagtattatacaccgtgaccaaatgggat

SEQ ID NO: 326517 - DNA, 122 bp, Homo sapiens
aaaaaacaaattctactctcaatttctgtgcttatctcatcaaagatggttacagctcaccgatgagcatgagttttgtctgctattcacccagtggtttataaaaccctgatgcaactggt

SEQ ID NO: 326518 - DNA, 122 bp, Homo sapiens
aggctcgcctgtgaaacggaggaggacttcagtgtagaaacgcacagccttggacaggctcgcctgtgaaacggtggaggacatcagtgtagaaacccatagccttagagcttttggaggaa

SEQ ID NO: 326519 - DNA, 122 bp, Homo sapiens
ttgcagaacaagcacaagattgaacaagcacaaggagcacccactcttggccctgcatcccgaaggaccctcagaggtttggacagggcagcaggctatctgggcagtgctggtcacatctt

SEQ ID NO: 326520 - DNA, 122 bp, Homo sapiens
agcccgggacaagtgagcggcctagagatcaaggccttggagtcccgtccgagagcaggacgttatcagaaacctccagccccaacccctgcctggagatgcccggggcgcgctgactctgt

SEQ ID NO: 326521 - DNA, 122 bp, Homo sapiens
gagacggcttgtggcttaacagggtcttcccacctcgttcacccgtgctgggtgctgagacgccgggggagggggaggcagctgtggttccagccgtcgtcatttgcaatgcagttggagag

SEQ ID NO: 326522 - DNA, 122 bp, Homo sapiens
gtgaccgtctcctttgctccgaggcgagggtgattcctccttcctggcactctgcatcagcgagctcccaggaaacccaaccaggtagcaagtgtgtgactccatgccacaggtcctgctga

SEQ ID NO: 326523 - DNA, 122 bp, Homo sapiens
ccccgcacgcctgcattgtgcctcctgcctccgggtgccgactgctcggaggcggcggcccgggctggggcagcgatccacaccctgcactcccttcagtgcctgcaggctccgaagccagc

SEQ ID NO: 326524 - DNA, 122 bp, Homo sapiens
gcgcggcatcgcggctgctccagctgctgctgcagcttctgcttctactgttgctgctggcggcgggcggggcgcgcgcgcggtggcgcggggagggcaccagcgcacacttgcgggacatc

SEQ ID NO: 326525 - DNA, 122 bp, Homo sapiens
tatcaagggcctgcgggagcgcagcagcctgacgctagaggacatctgcgggctggagcccggcctgccctacgagggcttggtccacacgctggccattgtctgcctgtcccaggccatca

SEQ ID NO: 326526 - DNA, 122 bp, Homo sapiens
ttttttttaacagaaaggggagcttcagatgctccgagattcttccccccggctcagatccgtgaagcgcgcatcctggtcatttttgccggccgcctagtactctctgactcggcggtggt

SEQ ID NO: 326527 - DNA, 122 bp, Homo sapiens
cctccacatctccaaggtggcaaaataggacagcccccacccccttgtaacttagcagctcggatatatctcaactacgtaacgcaagcctcccgctttcgggagtcccctcctccagccct

SEQ ID NO: 326528 - DNA, 122 bp, Homo sapiens
cacggcccagctccggctgctttatagcctagagggagggcagcactgccgtttaatcgacgttgcacttggagcagaaggattcctgagtcagccagaaataataaaattatggacttagt

SEQ ID NO: 326529 - DNA, 122 bp, Homo sapiens
gctgttcactttggtaacaggtagttaagtgtcacacaaggtgttgttgcaatggcatgacggtgacctgttgacgtaactaagccttacagcaaggcatgtgccgcacgtgctccgtggta

SEQ ID NO: 326530 - DNA, 122 bp, Homo sapiens
cttttgcttatgcaaagatgcagccaagtttctgttctggaatagacaatgaggaaggagcggctctgcatggcaatgtaaagtttgcctcactggtggcagagttccacccaggggatggt

SEQ ID NO: 326531 - DNA, 122 bp, Homo sapiens
gccaggacagaggtggaagtctcggtttccatgctccatgtgaggtgacgcatgccagcccgaaacctgggatgtcccacaccaccagtccttcctgccagcctcagggtcagcccagctgt

SEQ ID NO: 326532 - DNA, 122 bp, Homo sapiens
aggccccctgccaggacatcacctgcctggaggccacacttcagtagccgtcgtcctcatcgccatcacagccatagtctgcagaagagcacagtcatgaagcccagggtctctgtgggacc

SEQ ID NO: 326533 - DNA, 122 bp, Homo sapiens
caccaagtccgcttccaggctttcggtttctttgcctccatcttgggtgcgccttcccggcgtctaggggagcgaaggctgaggtggcagcggcaggagagtccggccgcgacaggacggta

SEQ ID NO: 326534 - DNA, 122 bp, Homo sapiens
cccaagaaagaatcaggcccagacacccaggggccatgccacaggcccccagcaactagacgtgaagggcaaagggtacgtgaagcacaaacttcacctccgtccccagtcaggggtcagac

SEQ ID NO: 326535 - DNA, 122 bp, Homo sapiens
cattggccgtggattttttcctctttccggatgtgtttttgcttttgagtgaagagttcccgtggttttgtaacctaataaatgcataaaatgcagcttgggttgtagactttggagaataa

SEQ ID NO: 326536 - DNA, 122 bp, Homo sapiens
ggtctgtgtccctgtccatggacacggaaaggtgcaggttggtgggaactggggctggcccgtggaggtcaggctcttcagccacagccaggtgctgtgccacgtcactggcagtgcggcgt

SEQ ID NO: 326537 - DNA, 122 bp, Homo sapiens
ttttcccgtcgcgcggcgcctctgggagttgcagtttgagagcagttccgggcagggaggcgcctttgctgccctcacagacttggcccctagcagtgcagaactacaagtcccagggatcc

SEQ ID NO: 326538 - DNA, 122 bp, Homo sapiens
gtccccgcacccttccagtggacgtccggtgaccgtctcacccaaactttacatcccgtccgtgctttgggggtctattattttggcaatcacttaacaatcacttgagttctttccacttt

SEQ ID NO: 326539 - DNA, 122 bp, Homo sapiens
cagggcggggcggggccgggggcggggccttctggcagtttctgggagctgcgaacgcgccgccccggggctcggcggccggaaacgctggcttcggagccttaggcgccgcggcctttcct

SEQ ID NO: 326540 - DNA, 122 bp, Homo sapiens
cttatggagtctggctcggcccgggagagtatctgtggagttgtgccaacggtttctggccgtgatgctttcccttttcgtctctgggttggagggggcgggcgaggtttcagcgaagggta

SEQ ID NO: 326541 - DNA, 122 bp, Homo sapiens
ctctagcaacaatcagtaacataactgccaatggtagaaagttatagctgctcacacatgcgtaaaacaaattttcctttcaggctggccttggtatgttacaggaataacccaatgggggt

SEQ ID NO: 326542 - DNA, 122 bp, Homo sapiens
ctgggtaggaaagtttctcccgagggcgagagttaaagcgcctccagaacaaagcggcggcggcggcggcacatggggcaggccgcgggccgggagggggcgcgcccacgaggtacctgcgc

SEQ ID NO: 326543 - DNA, 122 bp, Homo sapiens
acacgagcttaactacaacgccgctaacagccaatcctcgcgagaggagccgccggaagtcgtcgaaagtgcaacgcaaaagagccttttggatcatagaggcacagtcacttccggcagct

SEQ ID NO: 326544 - DNA, 122 bp, Homo sapiens
ccacccattcaaccttcatcactgcatttggaaagtaagatgatggacatgctgtggtcacgaaacatcctgtggcactggctgtttagagacaagggtctgggatgcaactggactttgtg

SEQ ID NO: 326545 - DNA, 122 bp, Homo sapiens
gcagcccccctggggcaggagtgcgaggggtcagctccaccggctccccgaggaagcctgcgcttgccggccacaagttcagcgagtccgctgggcacggacgtctgcaggagctccaccgc

SEQ ID NO: 326546 - DNA, 122 bp, Homo sapiens
aaggcctggagatggcggtggctgagaaaggctggccgggttcccaggctgctccagccacgcagaggcgtccctgtgtccttgccaatggtatctgagtagggactcccctccctcatccg

SEQ ID NO: 326547 - DNA, 122 bp, Homo sapiens
tgaactcctggcctcaagcaatcctcctgcctcagcctcccaaagcacggggattacaaacgtgagtgatcgcacccggcctgtgattccattgatatggactgaaatgtccagaacaggga

SEQ ID NO: 326548 - DNA, 122 bp, Homo sapiens
tcacttcgtggtagtgaagaatttaactacaacagtaacaacactaataattctaaaagccgtgggaggtcagagcgggcgctgcccggcgtcacccctgcagcgtccggatcgctccgcat

SEQ ID NO: 326549 - DNA, 122 bp, Homo sapiens
tcaggcccccccactccacagcctgaatgggaggatctgctggacgtggcggatgagctgcgagagagggcgccccactccagctccagacagaggggtgggaacgtgaccccgacccgggg

SEQ ID NO: 326550 - DNA, 122 bp, Homo sapiens
ggcagaaagcaggggcttttaaagggggcagttggtatgaactgcatgctggggagggagcgagtgggtgggggttcgcatgactcactttggtgctttatctgctgggttgtgccatcatg

SEQ ID NO: 326551 - DNA, 122 bp, Homo sapiens
gtcctggccgggccggacgctggcctggcgcgccttctggtccttcggaagggtcgcccacggggagcttggaaggaaccttagacgtaaaataacagtgataagttatttaactcctgggc

SEQ ID NO: 326552 - DNA, 122 bp, Homo sapiens
gaacccacaaccttacctccctccgcctggtctttaataaacagagtattttcacagcaccggcttctagtggcttccaggaaggacaaggtcctcggtcccgtagaccctgatccgagact

SEQ ID NO: 326553 - DNA, 122 bp, Homo sapiens
cacctcccctcatgtacaaaccgcgtctctgctctgccagtcttggcccccgtcaggcagcggttcactccctcaccagggaagtctagatagatagatatagatagatatcgatcgataga

SEQ ID NO: 326554 - DNA, 122 bp, Homo sapiens
ggtcagacacctgtaagtggtggactgtcctgctcagaggccctactgccttgtccactgcgtgaggcagcccctcagtttccatgacctcactccttcctcttatttcctgtctggccatt

SEQ ID NO: 326555 - DNA, 122 bp, Homo sapiens
tcaacagcaatagaatcaagattctctttgttggctgaccatactccacctggagagatgcgacctgccctgggtaaccactaatgttcaaacacaaaattataaccaaaaacttgatttta

SEQ ID NO: 326556 - DNA, 122 bp, Homo sapiens
atttattatatctaccttataagtttattgcaaggattgaataagcaaatgcaggaaacgcgcttagcacagtacttggcacatagtgattagcagcaattgttcttagtataaagagctcc

SEQ ID NO: 326557 - DNA, 122 bp, Homo sapiens
gccgtcctggaacgttggcggtccaggtgcagggccgagatgcaggccctgaggaaggggcgggagggtgcagctgggtagggactgaaaccagaccccggggacagggctctgtgcaacgg

SEQ ID NO: 326558 - DNA, 122 bp, Homo sapiens
cctagtttgcccaattcccactgcagtccattggtttatgcctctatgccttcagatttacggtctggtattgctggttatcttctcaagagaacatgacatctcaacaatagtacatatag

SEQ ID NO: 326559 - DNA, 122 bp, Homo sapiens
gactcgaccctgtgcttcggggcggggctccgcgaccgtcccccgccaatcccgccccagcgcctcaaggccccgccccgcgcaaggggacggaatgcaccccaacagcctccaagacgccc

SEQ ID NO: 326560 - DNA, 122 bp, Homo sapiens
aagctcatgtctgcaaactagtctgcttgcccactccttgttttatctggcactggtccccgaacaaaaatcaatctccaattccctttaatgtttagcactaaatccagaaagcaaaacaa

SEQ ID NO: 326561 - DNA, 122 bp, Homo sapiens
gggttagacaggtaccggtcagactacggtgacacaggcggcgtgcggttagacaggtaccggtcagattacggtggcacaggcggcgtggggttagacaggtaccggtcagattacggtgg

SEQ ID NO: 326562 - DNA, 122 bp, Homo sapiens
tggaggctgtggtctcgattttatctgctcctgggtggtgcgggtggtttgctctctaggcgtgagcaaaggccacaaggggcccgaaaaaatcacccaaggatgcaagcccgccattgcgc

SEQ ID NO: 326563 - DNA, 122 bp, Homo sapiens
aagtgagtgtccctcctcctaacgacccgggcagagaagagctcctttaagtcgaactagcgtggagtcagaacctgcttggctcccggtaactcctgtgggggtgtgatatatttcctgac

SEQ ID NO: 326564 - DNA, 122 bp, Homo sapiens
cgcacagttgcggaccagtggcctgctgctaccaaatctcgcgaaactcgttttccctcccgggaagttgccagaactaactctgggcagcatggcgtctttccggcttctccaaacccttg

SEQ ID NO: 326565 - DNA, 122 bp, Homo sapiens
taccccgatgccagccgagggcgcgtttcccaggcggcgggctggtgggagagtcaaacccgggtgtggggaagcagcttcgctgcctactctgcatcctctcccctaaaaagaatcaagta

SEQ ID NO: 326566 - DNA, 122 bp, Homo sapiens
cttggtcccaaacaacacacccatgtgtgctgaggacacgctccaggggattcttacgcccgcctgcatcagagaacccaggtcttgtgggcgaggcagcgtggagagggagcgcagctctg

SEQ ID NO: 326567 - DNA, 122 bp, Homo sapiens
agtcccgaggcgggcagggggtgcggcgccctgttggttggcgttacatcgcagagctcccggtcccctgccctcctcctacacggaggaagctggagccctaagagcagagtgacctgcgt

SEQ ID NO: 326568 - DNA, 122 bp, Homo sapiens
aaggcctgagggtgggcgctgtagaccccgctcccggtgacaagccccacactgacactacgccgaccaccgagaagtgaggactccacaggccgagagcccacgtgaagccggagcccgtc

SEQ ID NO: 326569 - DNA, 122 bp, Homo sapiens
catcatccttcagctgcagaggaacaggaagagtgttctctgtactcctcagggacaagtcgaatcacactgaccctacctgccctggcaggatttaagagcagctggtggtggacacccac

SEQ ID NO: 326570 - DNA, 122 bp, Homo sapiens
tcaccttccctccctgagccattcatcactgcgaagggaagcagctgcggcttaggagaccggatttgggggattagctcgggcggtggagcagacacaccaggagaaagaattaaaaacga

SEQ ID NO: 326571 - DNA, 122 bp, Homo sapiens
gaagaaaactaagggagcctttgacataggtcaggagagagattctattaacttcacacacggtagtacttaaagtagaaggttttggaatggattttagaggatgacagaacaactgttgc

SEQ ID NO: 326572 - DNA, 122 bp, Homo sapiens
ccccaggcgtctggcgctcacccaggagactgcccagcggtttctggagagagcgctaagcggagacgcccgctggcaagcagatcccgcctccttccctggccaaggagccgcccctccgg

SEQ ID NO: 326573 - DNA, 122 bp, Homo sapiens
actgcgtcatccctagcacaattttagactctcggtgtacttagtaacatgcaggaaagtcggagagggagagttctaattcaagccccgtgggtgacaccctactgaacgtttaacacagg

SEQ ID NO: 326574 - DNA, 122 bp, Homo sapiens
atcccccatggcactgccccgtggggggcctcagcactgagcgtcacagagcggggctgccgcccaggcttggcatggagtgtgggtcgcacagggcttgcggaggctttcggccaccatga

SEQ ID NO: 326575 - DNA, 122 bp, Homo sapiens
tgggagaagccctggccctaggaaaagagtttcattgtgaagatgttattagtctttgttcgcaaaaggtggtaaaaatcctcaaatggtacattcttagaatttagggacacactggaaaa

SEQ ID NO: 326576 - DNA, 122 bp, Homo sapiens
ttccagcagggggagctctgactctggaaaccggtcagtggccaccgaacgctgtttcaccgggtctagacctttggagatcagcgttctctggtcgccaaggttggtaacaaggtccgtgg

SEQ ID NO: 326577 - DNA, 122 bp, Homo sapiens
tctgagggaagccccatatccggagccagtacctgagctacagccgctacgtgcaggttgcgcactgatagaagtggccctgcagcctccaacttcccgcttcccctctgggccccagcagc

SEQ ID NO: 326578 - DNA, 122 bp, Homo sapiens
cttcctctctcctgctccccctgcaaacattttaggcatccctaaatgatcaccagccctcgcctgctctcttagcaggcctccaggtggggttagaattgtcaaatgctggcacaggacga

SEQ ID NO: 326579 - DNA, 122 bp, Homo sapiens
atgaactcactgcactgcgagagcttcaggacttccaggaagcgctggcaaccctgaggacgaagaagcggactgtgtgccttgtagcgctgggattcttgtccatgtgtctaaacaggttt

SEQ ID NO: 326580 - DNA, 122 bp, Homo sapiens
cagacgagtcagtgtctttgccgtttggaaccttgtcttcactatgggatggcacttgatcgaggcggccccgcagcctgttccgcggtgctggcgtctccctctccctggcgaggctgccc

SEQ ID NO: 326581 - DNA, 122 bp, Homo sapiens
ccttgggcccacaccatggccttcttctctggtaagaacagggcccggcattctgggctgcgacctgacaggcccctgctgggggcccttggcacagggcccacagatgagcttgcctgact

SEQ ID NO: 326582 - DNA, 122 bp, Homo sapiens
gaccctggtgaagagaggaagcgcggctggtgagccagggcggcggggccaggagggcagcgggaggcaccgggggcggggccttacccacggtggtgaagacgcggcagcccagactgagg

SEQ ID NO: 326583 - DNA, 122 bp, Homo sapiens
gccccacggacccgcagggagtccccgccgcaatttgcatggggctcatttgcatgaccccgccccgcgcgggagtcgggggcgccggcgactggaggagccactgtcaatccccaggggaa

SEQ ID NO: 326584 - DNA, 122 bp, Homo sapiens
cggatgttccgaagaatgcattagcctttgactttaaggaccgcgaggagagttttcttccgaatcaagtgaatgcgggtgcatcaccctgtcttcctcattccctgtgtcagggaatgcat

SEQ ID NO: 326585 - DNA, 122 bp, Homo sapiens
gattgtcagggtcaaactaccatgcagctgtgtaagctacacttttgtaaataaagaaaacgtggccaattcaaactaagaataagcaccctatgaatgctgttttaaaccttttcttgccc

SEQ ID NO: 326586 - DNA, 122 bp, Homo sapiens
gcccctgggcgggggcgcttctcagggcatcctgtgagggctttgaggcctccttggagtcgccagatgaactggtgccgcctgtgcgccttggccccatagcctcaacggcactctcactg

SEQ ID NO: 326587 - DNA, 122 bp, Homo sapiens
atgtcttctttgaatgaggtaactgcttttccattgcttgtgaaatattgtatggtgctgcgtatgtccggaaagtctcaaatgggagtctttgttcaaacattctatgtctgggtctggaa

SEQ ID NO: 326588 - DNA, 122 bp, Homo sapiens
cgtgatccacacgcctcagcctcccaaagtgctgggattacaggcgtgagccaccgtgcccggccattcctagcatttctggagactgaggtgggaagactgctggaggccaagacttcaag

SEQ ID NO: 326589 - DNA, 122 bp, Homo sapiens
catcatttatttataatgcattttctcagaatcatttttgagagtaggttgtatacattccgcttctttactcctagatacttcagggtgtatttcctaggagcaagcatatgctcttacac

SEQ ID NO: 326590 - DNA, 122 bp, Homo sapiens
tttttttccccttcactgaatctgagcttttgctcatatttcccttgatgaaataattgccggtttagtatacagttgggagtgcatcggtctttatttcctatccagcttttctatggcag

SEQ ID NO: 326591 - DNA, 122 bp, Homo sapiens
gtcccccagcataggtcagctggagaggacaaactaatctcctctgggtttctgcatgggcgattgttttactatggagttagtgttatcatctctgaatgtgtatttgtttgacattacag

SEQ ID NO: 326592 - DNA, 122 bp, Homo sapiens
ctgctgggtaaagagggtggtgtctctggggatttgggcgttccctagaggcacctgccccgcagggggccagacagagttccaggggcttctccacctgccccttcaatggctgttggggc

SEQ ID NO: 326593 - DNA, 122 bp, Homo sapiens
catgcacggtgacttgcttggtgaggtcccggttgtccttctccagctccttcagcttgccggctgcgtccctgcagcgggccagctccttgtccagcgcgcggctctccttctcaacggcg

SEQ ID NO: 326594 - DNA, 122 bp, Homo sapiens
cagctcgattaggacgaacgcagcacttagcagcgcaggaacattggcaagcctttagcccgatcaggagcggcaatgggcacctcgctggatcaggagcagagaggacaccctgccaaagg

SEQ ID NO: 326595 - DNA, 122 bp, Homo sapiens
tagcacctaggacagtgccttgcaaattgtaggctctccacagatttgttgaataaaatacgagagttgtcatgttctagacttaggatatgttggtttattagatgataaatatttcttca

SEQ ID NO: 326596 - DNA, 122 bp, Homo sapiens
tggggagccgggcgggcgggtgcggtggcggcgggcggcgcgggggcacttgttgttcttcgcgaagtcggagcccgagcgccaggcggcggcggcggccgaggggagcgcgacagtgagcg

SEQ ID NO: 326597 - DNA, 122 bp, Homo sapiens
gagggtgtacaccgcctctgtaatatccacgggggaaaaggatgatacaattcccactatcgaagggggtgtacccccctgttgtattgttcctgatatccagggcgtgaggaaatgatatc

SEQ ID NO: 326598 - DNA, 122 bp, Homo sapiens
gtataatccgtaggggaaggccagaagcaaatttacaactcttccactgcaaaagaggtgcgagttactctgatagcaaaggagctaagaagggccccgtgcccaattcacctatccccggc

SEQ ID NO: 326599 - DNA, 122 bp, Homo sapiens
gtaggggagagaagattctgagagccagaaggcaggaatggatttggttttgagcagggacgtggaaacgtggagaccaggtgaggtctcattattttggggcgaaaatgtgggttgctatt

SEQ ID NO: 326600 - DNA, 122 bp, Homo sapiens
gcaggcaggcggggacccggggaggcaggcggggacaggcaccagcccacttgacaactgcgcgcaccggcgcagccggcagctcgggggcgcgcacacccacaccgcgccacgtgcgcgcg

SEQ ID NO: 326601 - DNA, 122 bp, Homo sapiens
gctcttcactggcctgctccgcgctcttcaatgccagcgccaggcgctcaccctgcagagcgtcccgcctctcaaagaggggtgtgacccgcgagtttagataggaggttcctgccgtgggg

SEQ ID NO: 326602 - DNA, 122 bp, Homo sapiens
atctctaggagaaaggcttgcagacaaggaggccaagcgagagccacctgtcgacaccgccggtttctgagcaccgagagagggggccgttacccgtggagggcgcggggagcgggccaggg

SEQ ID NO: 326603 - DNA, 122 bp, Homo sapiens
atcttcgctgggtggggattcaaggacaggctgggctctaggaggtcaatggtccctccccgggcttccagcatgttgtagctcaacttctaccagacatctggaaataccaaatttctttc

SEQ ID NO: 326604 - DNA, 122 bp, Homo sapiens
ccttctgcgagccaggaggaggccccgactgagcctccaggtcctcctgtggaacctgaacgttcccccggtgagcaggagcagccagctcagccttctatttcttctgggaaggctgaatc

SEQ ID NO: 326605 - DNA, 122 bp, Homo sapiens
gccttatgtgtatatataagggacatcctcctacccccatgagtgcccccaagttcctcacgtgtccccctacatacttgttatggtagaccaccggtgtgaaggcctcgcgggtaaattca

SEQ ID NO: 326606 - DNA, 122 bp, Homo sapiens
gcaggccccagcacccatgggatctctctccggtcgcaggaagcaggctagctcctagcccgcctcggcttggcctttgtgggacctgggggcaaagaagaagagctgtctctgggaccatg

SEQ ID NO: 326607 - DNA, 122 bp, Homo sapiens
ctcttcccaccagccacgggggtccgcggcccccagaggtggaggagggaaggccgggaacggctgctcacaaccctccgctcccgcccacccatctggctcggggctcggtggggagaaac

SEQ ID NO: 326608 - DNA, 122 bp, Homo sapiens
aaacggggcaccaggctgggctttagaaatcgctggagaagcctgggtgcggccgcagcccgcgcggcctaggacggaagcgacgccccgccccgctccgcgccccgggcagccgtgtgcag

SEQ ID NO: 326609 - DNA, 122 bp, Homo sapiens
tgggccggagtccctggggtccgagaggccctcggaatccaccatggcatgggccggagtcgctggggtccgagaggccctcggaatccaccatggcatgggccggagtccctggggtccga

SEQ ID NO: 326610 - DNA, 122 bp, Homo sapiens
ttatctctgtgaatcaggagagaagagattgatgtaagtaaaaatcaaactttgtgttctcgcttgggaaacttgatcaagtttattcattgaattatttcaaaggaataaaaggctacata

SEQ ID NO: 326611 - DNA, 122 bp, Homo sapiens
gagggaggaggcgccgccggcccgggctggagccgagcgcagcagccaccgccgccgccgcgccagaagtttgggttgaaccggagctgccgggaggaaacttttttcttttttccccctcc

SEQ ID NO: 326612 - DNA, 122 bp, Homo sapiens
gcgggctgcgaggccggagccactggattccagacacagcgaaatcggcggcggagacaacgaaacttcaagaaacagatgtgcaggaactgccaccagagcaccaaagggattagggggtg

SEQ ID NO: 326613 - DNA, 122 bp, Homo sapiens
ggtaaaccaccaacacaaatttatacatttgaactaatcctatctgtaaacagaatccaacggatgaaattatccacagccaaaatgaaggttgaaatttatgcaaacatggcagtagtctg

SEQ ID NO: 326614 - DNA, 122 bp, Homo sapiens
tggggcgtgtaaatgatgtgagtgtgaggacacacaggtgtcgcgggaatggggtgcacgcgcaggaggatatgagtgtgtaaagttgtgggagacgcacgcagaagaaggtgtgcgtgaag

SEQ ID NO: 326615 - DNA, 122 bp, Homo sapiens
aactaatttgcttccgacagtgtaacgcttactcccactttaatgataaaggcatggtaccgttttacaaaacatctcactgaataagacaactaaatttttgtattttttaaaactattat

SEQ ID NO: 326616 - DNA, 122 bp, Homo sapiens
cccctccccgtcaccagcccccccgccgccccatgcccttgacactcgcatccggcctcgcgtgccccttgcatcctcttgacaccgtccctctcacaggggctgtatgagtatctgcggcc

SEQ ID NO: 326617 - DNA, 122 bp, Homo sapiens
atgcttcagaaatatttgagagactgaatgaagcctgtctctggtctctagggtatattacgttccctttctattctaatgatgagtaggaggaaagataccactctttcttgtaaaccaaa

SEQ ID NO: 326618 - DNA, 122 bp, Homo sapiens
aagtccagggagccggcgccgcgccgccgccgccgcccgctcctcctccgcggcctgggccgccgccgcctcggccctacctgtaattggtgagcacgctcttattcaccaccacgatcagg

SEQ ID NO: 326619 - DNA, 122 bp, Homo sapiens
atctcctggtgctggaatttgagcttatgtccctttaccccttgcccaacccctcctcaccgaagtgaagacctcagtggtctgctggatggtagcaatcttcttccagccccacttttcaa

SEQ ID NO: 326620 - DNA, 122 bp, Homo sapiens
aggttgcagtaagccgagatcacaccactgcactccagcctgggttacagagcgagactccgtctccaaaaaagaaaaaaagaaaaaagaaaaaaaggcgcaaaggctccgttcaggcccta

SEQ ID NO: 326621 - DNA, 122 bp, Homo sapiens
ggaaccgaggaggagggaatacacctgggggaaacccaagtccaggagcctcttagagggcggggcagtaaacacaagatggaccaataaaaatgttaaacacagaaatgattggtaattga

SEQ ID NO: 326622 - DNA, 122 bp, Homo sapiens
gtgggttttgactgaatcaccatcaggagatgcacgtgtcatgcaccagcctctgaggtgcgggggtgtccccgtgtctgtcctgtttgcatccttagctctccggaaggaagtggaggatc

SEQ ID NO: 326623 - DNA, 122 bp, Homo sapiens
gccctcgcccccctctcaccccgctgagactccagccgcccccatccctcccacccggcgcgcctgcagggactgcaccccacatctggaggcaacggggcacggccgcaggcgtggtctgg

SEQ ID NO: 326624 - DNA, 122 bp, Homo sapiens
ccacggacaatccagatcgagttcccacagcatagctcgtctctgctggaatctctgaaccgccacaggctagagggaaagttctgtgatgtgtccctcctggtgcagggccgggaacttag

SEQ ID NO: 326625 - DNA, 122 bp, Homo sapiens
acatggtaatgtagagcctcctagttgtcgtgacgttccagcaatcatgactttaattgacgaccaaattcacaggaagctactctgtgggcttggcactctgacatgcatagagacagaag

SEQ ID NO: 326626 - DNA, 122 bp, Homo sapiens
cttttggacttttagcctccatagctgtgagacaatcaatttctgttgttttaagtcactcgattcacagtgcttgggtagagcagccctcggaggttaacacacctggccacacctgggtg

SEQ ID NO: 326627 - DNA, 122 bp, Homo sapiens
ctgccaggctgtggggatcaggcgttgtgggggagggggacacttaacaggtatggagggcggagcagagccccgcagtcactggcctgacttccggaacgaaccgtcgccagcaagcacag

SEQ ID NO: 326628 - DNA, 122 bp, Homo sapiens
cccccaggaccctgagaagcagtgcttcattccaagcctgccagcccacgtgatggcctgcgcccgttcacctgctccgacatgtcccgggccaggaacttgaggtgggtgatggcgggaaa

SEQ ID NO: 326629 - DNA, 122 bp, Homo sapiens
ccaaagtcacattcaacaaccaactcctggttaactgaaatttcatcaggtagatatgtgcgaagacttatttgtaaagactcaatcaaaagctgttaagtttgaatgagtttattttctct

SEQ ID NO: 326630 - DNA, 122 bp, Homo sapiens
ctacctgctgggcctgctgcagcagctccatgcgctcccgcaggatctggctgtcgaactcgcggctctgcctgaggatctgcctgcgcaccttttccacagcagcctgcaggtcctcccgc

SEQ ID NO: 326631 - DNA, 122 bp, Homo sapiens
tcaggggacagagacagagtccatcccgcacagggcggaggggcgacctggatcacacaccgcgcgtgtgccgggctcacgctcaccacgcagggcctgtcaccgccaacaccgttattgtc

SEQ ID NO: 326632 - DNA, 122 bp, Homo sapiens
ggtgactagcacttttaaaaacaaagccaaactccgcttttaaaatagagaaggcacagacgcagaccctgcctctgacgacatccaaaagattcattatacacagcctattcaggcgaagc

SEQ ID NO: 326633 - DNA, 122 bp, Homo sapiens
cttggatcattcagggggctgaaacccgatgccttctgactttcgcgtccgtactcttggcgttgggaggagcctctcaggaaggtgttgcaacctttggttgtaccagaaggaaataagca

SEQ ID NO: 326634 - DNA, 122 bp, Homo sapiens
agacaaacctcttcctttcttggggatcagacctccttagcaaagttaacaaattaggcacgagattggaaattatggctcaggagctatgaagccagaagccacaagattcctaagctccc

SEQ ID NO: 326635 - DNA, 122 bp, Homo sapiens
gtcagcgagcttgaacacaggcgtcccgtgtggaaatgtccaaggagaccgccagaagtgcgcaagccggagtcggctagagtttccttctcaccgagagggggagcccggcgttcccggcc

SEQ ID NO: 326636 - DNA, 122 bp, Homo sapiens
ctaagtcagaaggccagatgggagagtcgggggggggcctcaaagtgggtttaagtagaccgcatggaaaactggaaagttctcaaattctacccaggaagcaggcggagccctcctaaatc

SEQ ID NO: 326637 - DNA, 122 bp, Homo sapiens
tctccggctttcggaggcgctaggctgcgtctgaaagcgggctggcgaccccagggaggccgcaccgcccttcactgttgatcttgaccgtgcggctgcgccccgataggcatggagcgcgc

SEQ ID NO: 326638 - DNA, 122 bp, Homo sapiens
taccaagtactttacacgtcttgtcccgtttatgtgtgccaaatacacaattaaccctatcgacaatacttcattgaacacagattctcttttacgcacccacacaccaacgttctcagctt

SEQ ID NO: 326639 - DNA, 122 bp, Homo sapiens
ctctctaacgggtaacaggctccaggtgggagggccaagagccccagatgccactcctcccgtggggtgtccaggcaaccacttcacccctcccctggcctgccccgactgagggctctcca

SEQ ID NO: 326640 - DNA, 122 bp, Homo sapiens
caagtcagtaggacaaagacaagcagcacgataggggcatgggcaaagggtgtgaccaggcgagagaggagaagcacacgtggctgacacagaaggcgtggagattctctttgtccacgagg

SEQ ID NO: 326641 - DNA, 122 bp, Homo sapiens
gagagagggtcgtggggaagcgggccgctcccgggactcgtcactgggttggagctggcccgcttgagtggctccagttccaggaaggccgggtggcgtggggctgtgtttttttttttttt

SEQ ID NO: 326642 - DNA, 122 bp, Homo sapiens
cattaatttttctatgatgtaagtgatttggctgtttttttctataatttgcaataactacgcagaaattctcattagggagcctgctccttgctgggaaacagtaaatagctggccattct

SEQ ID NO: 326643 - DNA, 122 bp, Homo sapiens
tgcgatactcccccattttggctgccagcgatgagagggcccgggggggcccgaggagcgcgggcaacagtggccatactcggaccctggacccccagaccccccgggtcacatgcagcatg

SEQ ID NO: 326644 - DNA, 122 bp, Homo sapiens
ggattacaggcgtcagccaccgcgcccggcggtgcaggaattttaaaactcaccaaaatacgccctccttcagaaaatccctgccacctcgataggacgtcctcttcttgagctcccctctc

SEQ ID NO: 326645 - DNA, 122 bp, Homo sapiens
accagagcagtcccttcctccaacgcagatccctgccctgctgctttcgctgggagcgcgcgctccgcgtttccaaggcagcagcccacgccgccccacgtgacggccccgcttccgggtct

SEQ ID NO: 326646 - DNA, 122 bp, Homo sapiens
gttgggattaataggcgcgagccaccgcgcctgaccacaactaaccaacatttaaaagcacgtccctgggtaggctcgaaccaccaactttccggttaacggccgaacgcgctaaccaattg

SEQ ID NO: 326647 - DNA, 122 bp, Homo sapiens
gaatcctagtaagtctgttctccactgaactgagctgagtgcagctgacagcaggcacggcggtgccccatttgccaccccagggaggccgagcagcggagagtgtgtggccacggcccctc

SEQ ID NO: 326648 - DNA, 122 bp, Homo sapiens
agaagtccgacacagtgttgggcatggggccctgggtggcaatgtagaccttctccttcccgtcatagccctggaaggtggaagcacaggggaaggggtggggagcagtgagagcagagctc

SEQ ID NO: 326649 - DNA, 122 bp, Homo sapiens
ggagcggggtggagcccttaagggggtcgaaatcccggggtgggggcggtgcggggagggcgagaagctggggatggggaatcctgggggagggggcagccaggccgagccgtacattggct

SEQ ID NO: 326650 - DNA, 122 bp, Homo sapiens
agaagggaactgagggaggcccctcccccggtgcagcgccctcccgccctcggcacccctcggcagccaggcgctggccacagaggccgcttccttggtcctcaggcagctcatgggatcca

SEQ ID NO: 326651 - DNA, 122 bp, Homo sapiens
ctggaaagacatctcacctgaaaatcaatagtcatctcttgagacagcagtgtctaaaatcgtgattttccattttttccaaatggtattccttgtatttggcatttgcaattttttacctt

SEQ ID NO: 326652 - DNA, 122 bp, Homo sapiens
gggtcggcggagacagaaaagcgccggacgccggggtgatcatggacgcttgacaacctgcgggcaggcgccgggaggccgagccagcgactaagaggaccgagaggtggcgtggacaggta

SEQ ID NO: 326653 - DNA, 122 bp, Homo sapiens
ggggcctaaggaggctcttgtcactgcatatgcccaggggccctctccaaacttagcaggcgagaagagccacaaggatttctaagatggcaggctggtcttgtgcctgggaagagacaaga

SEQ ID NO: 326654 - DNA, 122 bp, Homo sapiens
tgtcatcttgttacattgaaagatacttattttattgtctcccatggccaagacacttttcgaggattagacacttatttcaaatatcccgggatgccatcaaaatataacattcactaagg

SEQ ID NO: 326655 - DNA, 122 bp, Homo sapiens
gaataaaaccacggacctcgcggtgagtgttacagctcttaaagatggcgcgtccggagtcgtctgctcctcccggtgggcttgcggtcttgctgacttcaagaacgaagacgcagaccgcg

SEQ ID NO: 326656 - DNA, 122 bp, Homo sapiens
ccaggctggagtgcagcggcacaatctcagctcactacaagctgacctcctgggtttaagcgattctcctgcctcgggctcctgagtatctgggattacaggtgtgtgccaccacgcacagc

SEQ ID NO: 326657 - DNA, 122 bp, Homo sapiens
ggccctcaggagtggaaaacaggggacttcccatgacgaaactagcttctgttcctaatacggcccttcctctacccattgctacagatcatcagatcgtgggactatctcctatggctaca

SEQ ID NO: 326658 - DNA, 122 bp, Homo sapiens
agctgcctccatttaggctgttgctttgacagaactttcatacaaacttggaacatttaacgtatccaaattttttttttttactttgccctcaactgcattctaaccaaaagcagatttct

SEQ ID NO: 326659 - DNA, 122 bp, Homo sapiens
acggtgggctgaagggctcctcaagcgcggccagagtgggcgccaaggccgaggaggcgccgagaacgagcgagggcacacactgtcacctctcaccagcactttgggaggctgaggcagaa

SEQ ID NO: 326660 - DNA, 122 bp, Homo sapiens
tttagtttaaactgataattttgtaaaggttcattctattcattttcaccttagtcttttcgcttctaaaatcaatttggtaattccagtatagtccgtattagaaatcccactgctgttat

SEQ ID NO: 326661 - DNA, 122 bp, Homo sapiens
agagggagagagactcagacagagagcatctctgtgagatgtgcttagggccctgaagggcgtgtgagcaggtgcctggacacctgaggggctgtgctgaggtctgccctgactcctccctg

SEQ ID NO: 326662 - DNA, 122 bp, Homo sapiens
tgtgcttggaaaaaactggagccagatctcagtccccaacatggtagtctagtgggtcagcgggtattaggtggtgatggctgcccaacttctgggcatttgggtgccagccccgggacgcc

SEQ ID NO: 326663 - DNA, 122 bp, Homo sapiens
ggccagggcagagggtaggccagaggaggccaccagggagcagcagaggctggcgagaagcgctcaaaagccctttttttttttttttttttttttttggagacggggtcttgctgtgctgc

SEQ ID NO: 326664 - DNA, 122 bp, Homo sapiens
aaaatatgttccagcctcagtgcttgaccctccactaagatatttgaagatatggccgggcgtggtggctcacgcctgtaatcctagcactttgggaggcggaggccggtggatcataaggt

SEQ ID NO: 326665 - DNA, 122 bp, Homo sapiens
ggaggcagcactgctaactcctcaccgtccctggctggtctggttctagaacatcagctccgagaggagagcggccacactgcgtcctttccccagggtcgtgctctctcgttgactgagtg

SEQ ID NO: 326666 - DNA, 122 bp, Homo sapiens
ctttggccccagtaaattcttgcaacatatgaaatgcccagtggaaatgcaaaataatcacgtcatctttcacacatttatggtatgttggcaatgtttctaatagccactaagggacaaga

SEQ ID NO: 326667 - DNA, 122 bp, Homo sapiens
ggcgcaaggggggaattagaaactgctctagaaggattttaaacaactggctgttctctccgccgccacccctccccccgcgccgcccgcgctcagctcctcactggagagaaggcgccggg

SEQ ID NO: 326668 - DNA, 122 bp, Homo sapiens
ccccagccactctccagggaagggccatttgggaagtgcagcgtgtgctcaggaaatggccggattgggttactggcaagattaaaggagctaaatcgggcctgggcttgggagaggtgtcc

SEQ ID NO: 326669 - DNA, 122 bp, Homo sapiens
catgagttccaggtgggcgctggcttggcaggccctgcaatcagagtggccggccggtgccgtcagccccgggcagtgaggggcttagcacctgggtcagcagctgcggagggtgctccggg

SEQ ID NO: 326670 - DNA, 122 bp, Homo sapiens
gcaatgcagggaagatgtccaggacagtgagtgtgaacgaggggtcctggagaatgtgcacgccagccctgcaggagaatgtccacgccagccctgcagcctggtgggctctgccatcagca

SEQ ID NO: 326671 - DNA, 122 bp, Homo sapiens
gagggagggcacagggctccttatgcaaggggctgcggccagcgccaacctgcagagactcgcttaagccgggagaggctgcctgagccggcgcaagagagcccgggttctgccagccatag

SEQ ID NO: 326672 - DNA, 122 bp, Homo sapiens
gacctgcctggagaggcgggttgcgatggcagcgctgggctacagaccccgccttatttgcggggaggagaggacgggtggagtcacttgccgcattgccacagcccctcctcctagtttta

SEQ ID NO: 326673 - DNA, 122 bp, Homo sapiens
aacaaagaggcgggagcaccccgccaggggaccgggaagggtcgaggaaaactgctgccgcgccccactgggttttaacaacgcccgggatgggggaagggctcccacttgcgccccaagcg

SEQ ID NO: 326674 - DNA, 122 bp, Homo sapiens
gctccacacagaccctaccctttcccctagcccagttagaaaataagtctgggccggcggcggtggctcacacctgcataggcagtgctttggccaggaggatcccttgatcccttgtggcc

SEQ ID NO: 326675 - DNA, 122 bp, Homo sapiens
cctgcctccctacctgtcggcgagagaagagagcggtccctggctgcagcacccgggagccgcaacgctggcacagcaccgccttccggtttcggccctcggctgacactaactcgctcggc

SEQ ID NO: 326676 - DNA, 122 bp, Homo sapiens
atgatgacacattctgttgggaatgctgtgggaaaacaagaattcccatatgacgcacagcgcttttctaagggaaggtggcaatgcgtaacaaaattacttatgcctttaccttttgaggc

SEQ ID NO: 326677 - DNA, 122 bp, Homo sapiens
ccctcctggctccgcccccgctccagccgcctaggcgtcgccctgcgtggagccccagcccgctccagccctagcaaccgccaagctgcccgttcatagcaaccgcctagttaacctgaacg

SEQ ID NO: 326678 - DNA, 122 bp, Homo sapiens
cgtgagcaggcggcgtgcgggaagcgggggcggtgctgcagaccggcagcacagacactccgccggcttcgccctcctcagcgggagccgagcggagccgccatttctacccctttctctcc

SEQ ID NO: 326679 - DNA, 122 bp, Homo sapiens
aagcgggggacacccgcgccccccggagcctttgacagggaaagtttctctaagagcgcacgcacccgctggctgtcgtccccgctgcgccctcctcaccagctcgctccagggagcgcagg

SEQ ID NO: 326680 - DNA, 122 bp, Homo sapiens
caactcagaggcagagtcctatgcactgcactctccagacagatggaaggacactccccccggggcagaacagcactgtagactgaaggacagctttgaatctgtctgcccaaccggttcaa

SEQ ID NO: 326681 - DNA, 122 bp, Homo sapiens
tctaaccatctgaattccatgaagtagaaagaggctggtcctgagagtaatgagctccctcgtattggaggtgtccaagcacaggctgaggaactcccatttggctggatgggcaaacttgg

SEQ ID NO: 326682 - DNA, 122 bp, Homo sapiens
atgaagagactgtttggtgatatccctatccttaactagctgagtcctggatgcactaatcgtgagcatggatgtgattcaacatgaaacaatgtaagtgttccaaggaagagagctggaag

SEQ ID NO: 326683 - DNA, 122 bp, Homo sapiens
ccgcgctgtggtatatttcccagtatccaggtggggacaggatcatattacttccaatgtcgcagggtatgtacaccccctctgtgatctcgttgctaacatccaggtttggggaggacgac

SEQ ID NO: 326684 - DNA, 122 bp, Homo sapiens
ggagcccgcctccttgatgtggcgggggcggcagctgctctccacaaatcagggtgggcccgaaagcattatttcatcttaaatgatgaaatcgtcaaggatacagaaaaggacagcgaaaa

SEQ ID NO: 326685 - DNA, 122 bp, Homo sapiens
ccatgcccggccttatttccccatgattagctaagggtcagccatctttgtcctgagggccgcagaagcctgtggtgtttgtgtctgcttccgctgcatcacgccaggctctgtggctgtcc

SEQ ID NO: 326686 - DNA, 122 bp, Homo sapiens
cgcgagcgcctgaggtgatctcggcctacatcgcgtcagcggggccttgggcgtgagcaccgccccctgtccggacgcagggtactggggcacctcgaactgtggcacctcacccttctccg

SEQ ID NO: 326687 - DNA, 122 bp, Homo sapiens
gaagtggggcgggagcagggccgcggagcctgggctgcggctgtcatggacgcctgggtccgcttcagtgctcagagccaagcccgggagcggctgtgtaggtgcggcccgaataggaatgg

SEQ ID NO: 326688 - DNA, 122 bp, Homo sapiens
ggctattttgagagtccacaggcttcagccctcctcaaaatccatcatagggcttcttgtcggcttcactcctggcctgcagccattggcggggcggtttacttcctcgtgtggcttctgta

SEQ ID NO: 326689 - DNA, 122 bp, Homo sapiens
agtttcccaatgatggccaaatatctgcaccggccaggttcctgcgggcggtggctcagacgccggctcatcagtgtctgcgacggcccacagtgcacaccacactcccattccctgggccc

SEQ ID NO: 326690 - DNA, 122 bp, Homo sapiens
tcgcggcgaccaggaagtcccggaagaagagctgttactgcacagcggaacacacgtgaacgccggcagggtggagagaaggaggtgacagctgctcccgtcgccccgccctttctgaaagc

SEQ ID NO: 326691 - DNA, 122 bp, Homo sapiens
ttggttacactgggtgtgtcacagctgagtaactccctcctgcacttcagcttgactaagcgttgagttcacatgtatacctttgcaaagctgccattcacaacttgttttggaactttagg

SEQ ID NO: 326692 - DNA, 122 bp, Homo sapiens
agtgctgggattccaggcgagagccaccacaccaggccagttgtcattattccttctgtgcgtgaatccaaactggggagaaaggctctgtgtgtatgtgtgtgtgtgtgtgtgtgtgtgtt

SEQ ID NO: 326693 - DNA, 122 bp, Homo sapiens
aaaaaaataaaaattaaaaattagccaggcatggtattgcacacctgtagtcctagctaccggggacaggtttaggcaggaggatcacttgagccccggatttcaagttactgtgagctatg

SEQ ID NO: 326694 - DNA, 122 bp, Homo sapiens
agttaaactgaggaatcttggtaggtttgttttctttgctccgattggcgtggagcgcgccgaactggtgcacgaagggttaaaaaaagtgtctcaaaactagcctctccggaaggcgcccc

SEQ ID NO: 326695 - DNA, 122 bp, Homo sapiens
aacttgccctacgcggagagcgccccactccttgcctggggcggcctcgggtcctggaggcgagccgcctcccagactctcccccgagatctgggctcccggagatgtggctcctttctgag

SEQ ID NO: 326696 - DNA, 122 bp, Homo sapiens
tccttggaacttcccgagttaatgagtagaaacagaacatattgcaacgtataattgtcacgattatgcgggctgttcatttagcgttttcgtgtgcacatgcattcagctgccacatctgc

SEQ ID NO: 326697 - DNA, 122 bp, Homo sapiens
cgggggcgggacgggggtgccagggaccggcgccttaggctgcggggacagcagtggcgccggacgcggcggcagtgaggggccggtgaggcgctgggtggggcgggggttcccggatttcg

SEQ ID NO: 326698 - DNA, 122 bp, Homo sapiens
caaggcgccaacggggacacttccctgtacaggtctggggggccacgagggcgaggaggacgccctagtgcaggggtccaaggactcgcgtcccagagcttggtcccacacccggtcccaca

SEQ ID NO: 326699 - DNA, 122 bp, Homo sapiens
tatcctagaacttaaaaaaaaaaaaaagaaaatgaaaattaagggctgggagggaggactcgaaggaacacaaagtttgtggaatcgattagtatgtatcctcctatctcagtcttgactct

SEQ ID NO: 326700 - DNA, 122 bp, Homo sapiens
cctcctcccgcccccagcccgagcccgccttccaggccgccctcggatcggccgggcccgcgcaggcccccaccccttgagcaccatgttcccccgcccgctgaccccgctggcggccccaa

SEQ ID NO: 326701 - DNA, 122 bp, Homo sapiens
ttccaccccgtgggagggcttggggtcgccctctggggcctgaacggctcctgctgtcggcgccctggagggcccgcccacttcccgacaggccgcgcgcgtcacctcagccttcgctcagg

SEQ ID NO: 326702 - DNA, 122 bp, Homo sapiens
ttgctcaagcccaacagctaacttggagagaggctgggagacactgtgagggacagacaccgggaaaagctgcagacattgtcccagacttgggaccgagagcaagacaccatttttaatct

SEQ ID NO: 326703 - DNA, 122 bp, Homo sapiens
ggagcagaggcctgaggtcccggaaggtagcgcgtccggggaggcgggggacagcgtagacgcggagggcccgctgggggacaacatagaagcggagggcccggcgggcgacagcgtagagg

SEQ ID NO: 326704 - DNA, 122 bp, Homo sapiens
ccagggtcgcgtccaaggacctggcaccgtaacagtgccaggatcagcgccaggactgtgcgactcccttccccaagtcttggccctaccttgggccgagggtccaggaccccccgacgccc

SEQ ID NO: 326705 - DNA, 122 bp, Homo sapiens
ttccatcccataccagcccagaccactctgccctgagccacagtgacctcaacatccacccgatccacccgccacccaacagtccactgttagggagtgcccccactccatgcggcaggtga

SEQ ID NO: 326706 - DNA, 122 bp, Homo sapiens
tggggcgcgtggggcccgtggggtccctgctcggggagctgtgggccaggccgtcgcttgcgccgccgccactgcccaagccccgctggggatgcgtgtcccgggcgtcctctggaggcgca

SEQ ID NO: 326707 - DNA, 122 bp, Homo sapiens
caccgcgcgggcgctacgtcccgccccgcacagggctcgctcccaggcacaccctgagctcgcggccacgccctctacaccgcccgcccgcgctgtcatgccctgggccagcagtccccgca

SEQ ID NO: 326708 - DNA, 122 bp, Homo sapiens
cagggcctggaggggacccttgacactgtgcccctcaccgagaatctaaacccctgaccccgcagtgagtttctggcaagaacaggagtgtgatgggctttgccaagcaccagcttggttgt

SEQ ID NO: 326709 - DNA, 122 bp, Homo sapiens
aacccatgggagggacaactgtccagcaccagagcttcctgcccagttgttgcctggcaccgctgaagaaagctgcaaacgtactgaagaggtagcagagggtggcggccgcaggccaaagg

SEQ ID NO: 326710 - DNA, 122 bp, Homo sapiens
agccatggaccgcagcgtccgcccacgtctcaccggcgtgtcctgtttctggccccggaccgccaggagggagcttcttagcagcttcaggtccccctctgggttatcattgagcacgtagt

SEQ ID NO: 326711 - DNA, 122 bp, Homo sapiens
ccctatcccacttgtcctgactacagacactcaattgacaaaatccacgaacacttacaacgtgctgagctaagatggggttttgtagaagtcgtgagattgcagatgtctgtccagggcca

SEQ ID NO: 326712 - DNA, 122 bp, Homo sapiens
ctcaggtgatccgccgcctcagcctcccaaagtgcttaggattacaggcgggagccaccgcgcctggccaaggcggccttcttaagaagcgcgcgtaaaaccccaacttcctgctctggcgc

SEQ ID NO: 326713 - DNA, 122 bp, Homo sapiens
tcccaggtctacactgcgccgcaggcccaggatgtgcagtccctccaggccctggagacccgtttatatggctctgaatttctccgtgtgggtggcactaactgccaggaaccctcctggcc

SEQ ID NO: 326714 - DNA, 122 bp, Homo sapiens
aatatttttgatctggagttggttgaatccgtggatgcagaacccgtggataaggagggccgaggatacgtatacattatgtgaccaccacctaaattaatgctgagaatatactcagcatc

SEQ ID NO: 326715 - DNA, 122 bp, Homo sapiens
cccgggccgcccgcgggccaggtgatcaccccgagtgtggagcaggcccgggggagcttgcgtatgccttgatccaaccaggtcacccagggttttatttcaggtcatttggtcatcctcgg

SEQ ID NO: 326716 - DNA, 122 bp, Homo sapiens
aagtacagccaccctcaaggtcattgaaaaagtttgctttaaatgagcgtctgcggaactcgtcctgaggctctcactgttacagattagagatgggggcgctttctagtggaggattttgc

SEQ ID NO: 326717 - DNA, 122 bp, Homo sapiens
caccacgcctctgtctgcgctttctattttaaaagcaccaagtgaaaagcagatctaaaacgagaccctctaccttccggctggaggcatctgtcgacgctgttgtgaaaaagttatttgtc

SEQ ID NO: 326718 - DNA, 122 bp, Homo sapiens
ccggagacttccagcgcggaaccggcgtctcagccgggggcagaagtatataactgcacgcgctgcctcatgggtagacgccgactccaccccctgaacatccggggccttttaaccgccca

SEQ ID NO: 326719 - DNA, 122 bp, Homo sapiens
gttctgcaggaagccccagtgccaagtggctttcaaaactagcctcagctagcaacgtggcggctatttcagcgaccgacaaaagcagctcccccagcctcccttggtgtttgtggtccctt

SEQ ID NO: 326720 - DNA, 122 bp, Homo sapiens
ttctgggagagggaccagattggggggtaggtccacgggcttggtgatagaattatttctcgattgacttcttgagtgcaatttgaactgtaacatttgcttagtcacctttagtggagtaa

SEQ ID NO: 326721 - DNA, 122 bp, Homo sapiens
caccagaacctgcgcgaatctctccacggtcagccccacccagggctcaggctccgcccccgggcctccatagccccgcccaccgcccacccatccagcaccgcccttgttgtcatggtgat

SEQ ID NO: 326722 - DNA, 122 bp, Homo sapiens
ttgcatagaagctggggcagactgggcaaagagaaattgttaaacggcgaaatgtaaaggcgcacacacttttaaaaatctgcacccaggagactctttacacagcagggccaacagcactc

SEQ ID NO: 326723 - DNA, 122 bp, Homo sapiens
tggtgcaaataatcaaaccccaagatttcccttcagactcactggctctgcagccaaacacggtcccactataagctaacatcagcaacactgtcctacagacatttactatacaaaaatgc

SEQ ID NO: 326724 - DNA, 122 bp, Homo sapiens
gagttgataccctttccagggttaattgagacattgaccctttttatctgtggctgcttacgtagttatggcatagtaggattttgtaaactcagcactgacaggccatccaccttaacagc

SEQ ID NO: 326725 - DNA, 122 bp, Homo sapiens
atgacaatttttagcaaactaaatgatagcagcaaacttcagtttacccacgtttagccacgatacaatacacatatgcttttaaaatcctctctaacagctagtgagacttcagcctgaga

SEQ ID NO: 326726 - DNA, 122 bp, Homo sapiens
caggagccgaacttccatgggcggcgggcagcaaatcacaccggcttcaaccgcccggcccgcccactttttgcagcgtctgacttccccgctcgcccgcgccgcttcctcctcctccctgt

SEQ ID NO: 326727 - DNA, 122 bp, Homo sapiens
ttcccggaagactctggctttgcctccgatgctctgaatacagcccatggcatacaggagcgctctgatctccagggaaggccagcagtcacagaaaaaaccaggcattgaaaggacagagg

SEQ ID NO: 326728 - DNA, 122 bp, Homo sapiens
gggcccagggcctgatcgtcaccgactgatatcccgactggagtcccacaacttgttgggcggctcagcccgaaggcgggcgaagaaaggatgctgaagggcttcacccaaggtcagccgct

SEQ ID NO: 326729 - DNA, 122 bp, Homo sapiens
gaagacaaccagctgacttttccaacggaactccacagttggtaccacaaatttgcattccggtcgtttctacgaaagaccacctgacgtaattttaggctcatgcttttctgtggaaggac

SEQ ID NO: 326730 - DNA, 122 bp, Homo sapiens
agctatgcctctatcctcagtggaaacagcccgggcgttcctaggagtgaatcagcagtccgctttatcccttcgaattgagcaggaatttgttggttgtttggctccggagcaggtggcgg

SEQ ID NO: 326731 - DNA, 122 bp, Homo sapiens
gccagggacccctcggagaacagtgcatgggctgtgcgcaactttgctgagccattttcccgcgaggcccccagcggcgcgggggctgtggggaggtggtgtgggagtacggtcgctgctgc

SEQ ID NO: 326732 - DNA, 122 bp, Homo sapiens
caaagcaaatttatttctacacaagggtgcagcttgcgccagtcacaagagcacagcgagcggggtagggcaggggtttttctccttaacgcagtttctagcacttctgtgtcctttcctca

SEQ ID NO: 326733 - DNA, 122 bp, Homo sapiens
gaagtgccaaataaaccaacagtctgaagcgggggaagactctagccccagcaatacctgcgactactaatgaaaaagacttgacggactgaaactgcccgagatttctcacataatgtcat

SEQ ID NO: 326734 - DNA, 122 bp, Homo sapiens
ctagggtgctcatccccaaccactaaccaaatgtgtcctttgtcagcatgggggacaactcgatgagagggtaggaaccaagctgtggtcctcctaagacactcttacagtgtcccccactc

SEQ ID NO: 326735 - DNA, 122 bp, Homo sapiens
agggctcaatcccccagctctgccaaaattaactggagactcccagaagcagagatgcctcgctgccacgggggccacagagctgcctggctcacccacccaaagtgccggccctcggagtc

SEQ ID NO: 326736 - DNA, 122 bp, Homo sapiens
aggcatcggtaatgaggacgctgtatacgacatcgctaacgaggacaccctacaagccgtcgctaacaaggacactgtacacaacatcgctaatgagggcaccatacaagacatcaccaatg

SEQ ID NO: 326737 - DNA, 122 bp, Homo sapiens
gacagaggaatggagattaatgtagctagacacagcaggagccatgcggtgggactgctccgtgcaggtctcatggtgaggacagcgcagcctatgttttgacagacatggaataccaggtg

SEQ ID NO: 326738 - DNA, 122 bp, Homo sapiens
ctgccgcccacgcactcgcggcagagcccagggcggcctgcgcagcttgcatagggcccacgggacgccgcccacggggaaagccgtctgtaaccatccgagcctagatactccctgtttac

SEQ ID NO: 326739 - DNA, 122 bp, Homo sapiens
actgtcttgtgctcaagtcaacgctgcagaacacaggaaacgggggctggccgggaaatccgcgcatccggccccagggcgccccagcctccccggctcgttgcagttaccggttgctggct

SEQ ID NO: 326740 - DNA, 122 bp, Homo sapiens
cctctctccctcctcccctcgccctcggcctggttctgcagctggaccgacctcattcatcgcctgccccctacccaattctgagcacacggtactgtagcccccagttcctccctagcctt

SEQ ID NO: 326741 - DNA, 122 bp, Homo sapiens
cagtgtccgtggcttctggaatggctgagctcctgaaagcagcaccatctttgacatggtcgaatgtgaataatttggttatcagtttcttcatttgtcagacttacaccaagcaagatctc

SEQ ID NO: 326742 - DNA, 122 bp, Homo sapiens
aggagctgttattgctcccagtggacaagggcccacaagtgaacgacaagacaggtggtgcggaggatctggcgtgaggactgtgccacctcctcacagcttttctctctgggctctccctc

SEQ ID NO: 326743 - DNA, 122 bp, Homo sapiens
ccggggtccccccacaccaaaggagtggttccttagaatcctggagaattcttgagtagacgggaggaaaggagtgataaatcgtctaaaatggcgtggtttggagattggcagaacgtgac

SEQ ID NO: 326744 - DNA, 122 bp, Homo sapiens
ccacccccgccacacagtgccttctgtttcctctcattgggcagaatcgtgtcatgtggccgcccagttgcaagggagcccgggaagggtgcgtgggccctgtccagcagacctggctgctt

SEQ ID NO: 326745 - DNA, 122 bp, Homo sapiens
ctcctgttagctgagcgagcccccaggtgacctccaagccaactgccaccccagtgaggacgctgtcctcatggcccggtccacacgctccggtttcccagcgccgctcaccggtgccactc

SEQ ID NO: 326746 - DNA, 122 bp, Homo sapiens
gacaaacgcaggatgtaaagccctttctaaactctcatcttctgtgtaaatggtaggaagcggtgctcactgtctgtgggggttaaagaggcatgttagccacggtggggggactctcttgg

SEQ ID NO: 326747 - DNA, 122 bp, Homo sapiens
actcggccttcctagggcgccggcgtgttgagggcgccgcccccgtcgctgctgggagctcggcaggcccgtggccttctgcctggttctcccgcctctgcaagcctcgccttcaggactcc

SEQ ID NO: 326748 - DNA, 122 bp, Homo sapiens
agatgctcggaaaagaatcctgtgtcctttagatccaaaacagtaagtgtggatcagatacgggtttttttttgtgctggaaacagtaattggcacaagtctcatttgaaataattttctct

SEQ ID NO: 326749 - DNA, 122 bp, Homo sapiens
ccgagctctgcagggtgccctctcgccaggctggagaggaactcaacaccccgagctctgcggggtgccctctcgccaggctggagatgcatctcaggccgccaggaacccgcactctgcat

SEQ ID NO: 326750 - DNA, 122 bp, Homo sapiens
cgtcctattggtccagagcgcggcgtaggtgtggagaaaacattacgtcgacggggagttcgcctccagtagcgtttctactggtgccaccccgcctccgacccgccctgcggccctccctt

SEQ ID NO: 326751 - DNA, 122 bp, Homo sapiens
tacgtccctaagaatttgcacaaaacttttgcacatcacttcagagagtctacggcctgtcggggatgtgtccgtgggcctcggctgagggacctctggcctgtgacatctgagccccgtgc

SEQ ID NO: 326752 - DNA, 122 bp, Homo sapiens
aagaacccaccaattccggacacacagggaccagtggtcccaggggagccaaacacctgacgctgcgcccctgacaacaccgctaagaaggaataagggccgctgccaagcaggacgcctgg

SEQ ID NO: 326753 - DNA, 122 bp, Homo sapiens
gatttctgcttacactttgatttcagagctttattccccagtctgttcttactcctttgtcgcttatccagaatgatgctatgtgtagcatcttgctgtaaatcctgtacaatgattctgtg

SEQ ID NO: 326754 - DNA, 122 bp, Homo sapiens
agggcagaggagcctgcccaggggaccgcaaagggatagggtcagagagaaagaggcagacgcagcccagagggagaggacccaatggaaaggccagccaagctgcactgggcttggcagtg

SEQ ID NO: 326755 - DNA, 122 bp, Homo sapiens
caacttcttgaatttttgcttttaaaccagaatacctgccagtcatgcttgcagccccatcggtacagagaccaacacaatgtttccaattcagagatttactatcaatatatttatttatt

SEQ ID NO: 326756 - DNA, 122 bp, Homo sapiens
tctcccgctgccgccaagacgaagggcgggatttagggggcagctgctgatgtcggcgctcgccttcggctgcttcgcttactgtcgccgagtgggaggcgagcctcttcttcctggtttct

SEQ ID NO: 326757 - DNA, 122 bp, Homo sapiens
ctgagactagaggactcgttctttgaaaccctgtaggcagaactctgagttaacagtactcgcctgtgttaaacctggtggggcatctttcactgcttacgttcgaaagacagtgggagctg

SEQ ID NO: 326758 - DNA, 122 bp, Homo sapiens
gtgctcttcagtccttgggtggtcgatgggaccgggcgccgtggagcagggggcggcgcccgttggggaggcttggccgcgtgagagcccaccacagggggactcgggtatggcgggctgca

SEQ ID NO: 326759 - DNA, 122 bp, Homo sapiens
agtctggtgctataaaactccgtttccggaggaatcccacctgtatctgaatgcatggggcgctctccgagctacgttaagtataagagccccaagtaaagtaactgaccttttgcagaaac

SEQ ID NO: 326760 - DNA, 122 bp, Homo sapiens
tgctgcctgcagggacgtcctgaccgtaggtccgcaccccacccacaccaaatcgccttccgtacccacctggctcatgtgcctataagatgggagagggcctggcagagaatttcgctaga

SEQ ID NO: 326761 - DNA, 122 bp, Homo sapiens
gattctagataatcttacgtattctcacatccttggcactacaggaagctagcttcttcccgcaaggtttactccagctctaagttagagacaaaggcccacttttacctcgaggtaaagtt

SEQ ID NO: 326762 - DNA, 122 bp, Homo sapiens
ccccaccaccaggaggggcaaagcaattatctcttcatcacctctgcagcctgacctcagcgttcacggctttgcacgtctgtgatgagagttaaagttgaaatgcaacaaccctctcctcc

SEQ ID NO: 326763 - DNA, 122 bp, Homo sapiens
tcacacggtccctctgttccttccacagaggcctctttttcttctatatcccgcatctgccgcttgggacactcattctgtagcgcagcaccaagtcttccaaaaaggcggcgctggttttg

SEQ ID NO: 326764 - DNA, 122 bp, Homo sapiens
aggaagctccctcactgcgggcttacctcatgatccatcagaaggtagaatatgagcagccgatggggcctcagggaccccctaccgtggtggaacagacttcctatagtgcctataccccc

SEQ ID NO: 326765 - DNA, 122 bp, Homo sapiens
ggagggacgaccccccgcagcgggcgactgtaccgctgacgggctcggccagcacatctccgcatcgctgggcctcagtgtcctcacctggaaaatgggggtgatcacgccaacgtcacaga

SEQ ID NO: 326766 - DNA, 122 bp, Homo sapiens
cggcatggcggccaggcagatctgggcacggacgggtgccgcgctctgcaggcaaccttccgccgccccgccgccagcacctctctgggtaagagctgggttccgacagcagctcagcttaa

SEQ ID NO: 326767 - DNA, 122 bp, Homo sapiens
ttgatgcagtcaggagacgtgcattatcattatttcaattttcaaaggggtcaacaggatcggcacttgcacacacaagatttttttcccctacaacctctgaacacccccactccttattc

SEQ ID NO: 326768 - DNA, 122 bp, Homo sapiens
ggaggaattctcagctcacctgagaatctgcacacccagatgcaggtgagcaccgggtctcgtccccctcacgcccaccttctctgtgactcaccagtccatgatgttggtggacagtgcgg

SEQ ID NO: 326769 - DNA, 122 bp, Homo sapiens
attatagttcttttttccttaaaacgatcacactaaatgctaggaaggcagaagccctagcgtgccctgcaaatgtgggcgattaccgagcacatcggggggtatcctgcactctcaggcta

SEQ ID NO: 326770 - DNA, 122 bp, Homo sapiens
ggagcagagaattgggtgcctcctgcaagtgtccactgtggcttctagggaaaatctctccgaaagaggaaagatgtgctgtgctggcaggaaggcggagacattcatttccagtccctctg

SEQ ID NO: 326771 - DNA, 122 bp, Homo sapiens
tagcatgttgagggcaggggcagtggcacgtctgtgtccgtagagcaagggctccaggtccgggttgctggcagggtttggtgccgctcagtccaaccctcatccctggcaccaccagccct

SEQ ID NO: 326772 - DNA, 122 bp, Homo sapiens
cgtgatctgggaccggcggtttggggtgcgacctgtgcgcagaaaagaccctccccacgccgcccactgttcctcaccagtcagcaggccccagggctgggatggtgctgctcagcccagtc

SEQ ID NO: 326773 - DNA, 122 bp, Homo sapiens
cccaaattacaatggtcttcagtgacacttagcacttgtacacaatctctgaaaagtcaccgtttcaagctgtgtcatgtcagcgttttgtatgtaaaatcccatcctagaattgatcacac

SEQ ID NO: 326774 - DNA, 122 bp, Homo sapiens
tggctttaccagcagtagaaaatttatagaagagaaacagaaatgctttgctgttaatgacgcctaaataagaataggagtaaaggagagtattacctccaaatcaccggagctgctttccc

SEQ ID NO: 326775 - DNA, 122 bp, Homo sapiens
tagtgtcccctgggcttgagaagaggtggtgaaccgtctgcagggccagaccttggagcacgcctccactgccctcccggaactggatgtgctgagcaggagacagaagcattccccaagct

SEQ ID NO: 326776 - DNA, 122 bp, Homo sapiens
cggagcccgggccgttggccactacctgcgggggctgccccggcgggggcgcggcctcggcgctcccagcagcaccgcctggctcagccaggtccaggaaggcctggcgcagcagggccggg

SEQ ID NO: 326777 - DNA, 122 bp, Homo sapiens
gtgtgccaggcttgtccctgtgctcatcagctctgagtcagattcctacccctaccttagcggcaccacttcgagttaggccaaagcactgaacaggccctcttgcagttccctgttcccag

SEQ ID NO: 326778 - DNA, 122 bp, Homo sapiens
cccagcctgttctccgccaggaacgcaccacctgcgcttcgccggccaccggttttgcaacggagagcccgctggccacggcggcccgcactgcacacttcctagcaggcttcctgtgtagc

SEQ ID NO: 326779 - DNA, 122 bp, Homo sapiens
taataaatatcaggctccaaaatggtgcccaggtgggcaccattgcaatggctctttgttcggagttgggagcttttgaacggatagtggtgaatttggtttccattttgacctggaaagag

SEQ ID NO: 326780 - DNA, 122 bp, Homo sapiens
cacctgggtgtttccaaaacacaccgacactcagtctccccaccaggtttctgatttcaccgtgcagggtgggtttaggcaccccggctgattctcatttgcagcccagtttgaaaagagca

SEQ ID NO: 326781 - DNA, 122 bp, Homo sapiens
gcctctgggagggcaagaccgggaggggtcggcctgtgtcgggggctcctggaaaagcagcgccaccgccacccacctgacgacatggaaggcccaaagcaggcgatctgtgcgaggcccgc

SEQ ID NO: 326782 - DNA, 122 bp, Homo sapiens
gactataataagccctagggaccgaggagagctcagagcctgtttacccagaggcatgaacgctgtggctctgatgcagccccattctctaggacactagctatctgcctggctgcagtttc

SEQ ID NO: 326783 - DNA, 122 bp, Homo sapiens
tcctttctctgttttggaatcccatccaggattctacattacatttggccatcacgtctccgtggactcttcttggctgtgacagtttctcagacttcccttgttttgatccccttgacagt

SEQ ID NO: 326784 - DNA, 122 bp, Homo sapiens
gcggcttcaccggcgcgggcggcggcggccgcgctcctctcgctcctcagcagcggggaccgagagagggagctgtgtctgagaagacgccaaaatcccccttagcgctgcctgcgggaggg

SEQ ID NO: 326785 - DNA, 122 bp, Homo sapiens
ggggaggcgctccgtgggggctgctgcgtgcccatgtagccgaactgactcgaataaaagcgtgtccacgtctacatcacacatctgtgtaaatgcagaagcctgcggatgcgcggggctgg

SEQ ID NO: 326786 - DNA, 122 bp, Homo sapiens
actcaaccatagctctctgttaatgttatagttaaattaaatatctaagatggatgagagcgacaagagttggatgtagtggatgttcatttaaacacaatatatgtaagtaggtaagcctt

SEQ ID NO: 326787 - DNA, 122 bp, Homo sapiens
aggctaccgagccgggccgcagggcgaaagcggtgcggtccgaggcctcagaaagggacacgcagcagcggaagtggcgctgactcagcccggcctccctgcagtcccctggcagcggtagc

SEQ ID NO: 326788 - DNA, 122 bp, Homo sapiens
tccagccgctgctcaccaggcagagcgagcgggcttggctggggcttcctgccctgagcgcgacaccgactgccccggaccgcgcctccaagcaggctgaagggcttccgctcttggcttcc

SEQ ID NO: 326789 - DNA, 122 bp, Homo sapiens
cctgacttgtctactaacaatgcaattcatatcactgtgtatctttttatgctcgtcaaacggaatggaactctgtgccaagagcttcagagaagaacatgatctggttgagtgtgatgaat

SEQ ID NO: 326790 - DNA, 122 bp, Homo sapiens
cccttttctgggcttcagcgtccccatctgtaaaagaagcaaatgagctagatgatttcccgcaccatcctaacaccctgtaagttaaaaatgattctgttgatctaccacttgcattcttc

SEQ ID NO: 326791 - DNA, 122 bp, Homo sapiens
gcttccttaggtggagttttcagtgactgcagaactctgcacagctgcttttcattctcacgtccgcccccgcccaatctttgaaactaactttgattattccctcctgggtagctctgtcg

SEQ ID NO: 326792 - DNA, 122 bp, Homo sapiens
agaaggcagggatgggagaagcaggcagggtacagcccgggagagacggcagctttgcctcggtgcagttatttgatttgttagccttgtgccagcctcagtcttctccaagaagaggttta

SEQ ID NO: 326793 - DNA, 122 bp, Homo sapiens
aagattgtgaaacaatgtaagaagttgaaagagagagtttgaccctttaagacaggaaatcgttttggccaccgcctcttgttctaactgaagaaggaatcaacaaacactgctcagcagtg

SEQ ID NO: 326794 - DNA, 122 bp, Homo sapiens
tgactgcggaactgggcgaacccgggggttcgtttctgctgactccagtgtcccgagaggcgccgcttcttccgctttctcgtcaggctcctgcgccccaggcatgaaccaaggtttctgaa

SEQ ID NO: 326795 - DNA, 122 bp, Homo sapiens
gtaagcatcttccctttggaggacccaggacctggggccaaaggactgagctccaggttgcgggggtatgttgcagagaagagctatgcaaagctggtgttcatgtccacctcctcgggcag

SEQ ID NO: 326796 - DNA, 122 bp, Homo sapiens
tatgaaccgttcataacgggcgttaataaccataccctgttagactaagcatggtccacccgcgaatcctctacagagatggccaagcgctggggtcgtggctgcgtcctctaggccaggtg

SEQ ID NO: 326797 - DNA, 122 bp, Homo sapiens
cttaacatgacaacagacaaaacagcacagggctaaaacacatgtctaaaggattctatacgtaggctttgccgcttttgtaatctgggacttttagcaaattatttgcctctctgggtcaa

SEQ ID NO: 326798 - DNA, 122 bp, Homo sapiens
acctcaggcaatctgcctgccttggcatcccaaagtgctgggattacaggtgtgggccaccgtgcccggccctcattgccttcctgatggcctgttttccctgtgatgctcgtcactgtcta

SEQ ID NO: 326799 - DNA, 122 bp, Homo sapiens
tcgctcatcaatggggacgacatgtttgtgacgttcgccgccatgcaggcgcagcagggccgcagcagcctggtgtggctcttctcccagctctacctttactccttcatcagcctcttcat

SEQ ID NO: 326800 - DNA, 122 bp, Homo sapiens
gacgccgacgcccggcgctccgctccggggcgcgggccagatcctcttccctgacacccgcggtcttccctgagaagaggtctggccctttttgagtcagatgttggattttctgctttccc

SEQ ID NO: 326801 - DNA, 122 bp, Homo sapiens
ccccagccagctcgaggtgccgtgaacagagccagcgaggggtgccgtgaacagagccagcgaggggtgcctgtttcctcacggtttcccctttctccctggagaacagcgccagccgcctt

SEQ ID NO: 326802 - DNA, 122 bp, Homo sapiens
cacattgttttccggtaccttttgctatgttcaggatccttttacaaaagcagcaatagccgggtatgtgggtatcccaattttcccatgacacccctgctagccgttctagaaccctggac

SEQ ID NO: 326803 - DNA, 122 bp, Homo sapiens
aagggatgagcgccggaagggcgtcgggggccctgagccgcactaggacgcccctggagccggaaccccagcagaagccggaaccagaaccaaatcaccggtaccgggtcggccaggtggtc

SEQ ID NO: 326804 - DNA, 122 bp, Homo sapiens
tcctggcagaatgctgcaatggggaaccgcatcttccccaagtaaacccccagggctcttcggaccctgccttctcctccctcctggctcttcctctttctcaaaaaaacttattctccttc

SEQ ID NO: 326805 - DNA, 122 bp, Homo sapiens
taatggattcaggcctgcacggcagaggcgcacccggcggcctgcccgcgctctcaatagcggacaatggagtcccggggtgacctgaacaaagaatttggaagtagttaaactgcagaaca

SEQ ID NO: 326806 - DNA, 122 bp, Homo sapiens
gggcattgtccttgctgacagctcctgtgcgtgtctccttccttgtaagctcttcactaacgcgtaggtgcaggaacccccagagacccagaaagaccctcctgtagcagggacttttcccc

SEQ ID NO: 326807 - DNA, 122 bp, Homo sapiens
tagatatgagccactgtgcccggccctcatcagattcttcaagccaccatgacccaaaagcggtaagaattactcatcagcaagtggtaggaaagcaatctgattaaacaaatgcttccggc

SEQ ID NO: 326808 - DNA, 122 bp, Homo sapiens
cagggccttgcctagtgggccttccttcccaggtgggtcttcctgatggaccttccttcccgggtgggcgccctgagctgggaacgggctgggcggggaggacccgggtcagcggcgagagt

SEQ ID NO: 326809 - DNA, 122 bp, Homo sapiens
actaatggacagtgtcatcactcagcttactgggctgaggcgtctgtggagaggtggcaccggggctgcagagggcggctggggttccgtcgtgtcgggtgtcacttcaccttctgtttggc

SEQ ID NO: 326810 - DNA, 122 bp, Homo sapiens
aatttcccaagttttttgtacacctcaccggtgccagtgcatgtttataatccgtgtttgcgttctcaaaagctagagttaagattagcatttctgcagctgcggtatgaggaatttggcgc

SEQ ID NO: 326811 - DNA, 122 bp, Homo sapiens
gctttttgctcttgagcctgtcagttgttcctcttccaccgtctttttaatcgtatctgtcgccttccctcctcccacttcttcctactctttctctctccaccccttttcccctctgaatc

SEQ ID NO: 326812 - DNA, 122 bp, Homo sapiens
agtcccacctactcaagaggctgaagtgggaagacacttgagcccaggagatcagggctacggtgagctacagttgtaccactgtacgccagcctgggtgacagagactctgtctttaaaaa

SEQ ID NO: 326813 - DNA, 122 bp, Homo sapiens
ccttcactccgcggaacctggtcccaactccccgtattgtaagaaaagtgcacccgcgcgcgggcatgatgattctatctcacatcgcgccaacgacttattcaagccactggcactgtctc

SEQ ID NO: 326814 - DNA, 122 bp, Homo sapiens
cagccctgcctggacactggctgacagcactgtccctgctgacagccgaggaaactgggccggagtggctggaattgggtgggagctcccacggggtgactctgcacctcagtcctggggac

SEQ ID NO: 326815 - DNA, 122 bp, Homo sapiens
cccagattcaccctcaggccttttgccatctgaaaagggcctatcggatgcgcgacatcacgagtgacgcgtagtcattttcccacgtcccgtccctgccccctcctagtgggacgcagtgg

SEQ ID NO: 326816 - DNA, 122 bp, Homo sapiens
cccgggaagcccaggctgttgcctgtggagcggggactgacaggagccttggggcttagccgggccaggccaccagctggggaggggacagccaggactattccgagaggtgcctttgcctc

SEQ ID NO: 326817 - DNA, 122 bp, Homo sapiens
ggtggggccgtggggagaggtcggcagggggctttcccagggcagagagttagaatttcacgtcctacagaccgggggcacctcgccctggggctgcggggggcggcgaccgtcccattcaa

SEQ ID NO: 326818 - DNA, 122 bp, Homo sapiens
cttgaccttagttattggtctgttagacaggtggaaaagtgcaggtagatctgaggagagcgtgtgttgccttgcaaggcagataatacttcttgatcttcaagcaagggggtggggtgcta

SEQ ID NO: 326819 - DNA, 122 bp, Homo sapiens
aactgtgcgcgtgcgcggccccgcccctttctccactttatttgccctgccctacttgttcgccaaaaatttagaaatgtgattctggtaggctctgatttccagagcctaccagctccttc

SEQ ID NO: 326820 - DNA, 122 bp, Homo sapiens
catgcctcatactcatgccctccgttatccatggttcccgaatctgtggattcaaccaaccgtggatggaaaataggaaaaaaaaaattccacaaagtttcaaaaagcaaaacttcaatctg

SEQ ID NO: 326821 - DNA, 122 bp, Homo sapiens
cctcagtgcgcctagccaggcgttttgggtttgtttttaaagaaacgggtaaatcggcagcgagacagccccctgcaaataatgctggcattccctcacccatgccagccgcatcctccaga

SEQ ID NO: 326822 - DNA, 122 bp, Homo sapiens
ggaccccagagtgtggcacgtgttcctgtgttcatttgaatattctgtgatgacctgtcacggaggtcatgtgatgatgtatatcctgccctccatcccaactgccactgggtttcaactgc

SEQ ID NO: 326823 - DNA, 122 bp, Homo sapiens
gcgcgtggcctgggctccttccgaatggtggcgcctctgagcgccagttcgaggaggagtcggaggaggagcctgaatgtttggagatagacttcaagtcccggaccttatccgtgcgccgc

SEQ ID NO: 326824 - DNA, 122 bp, Homo sapiens
agtcgggattcgctgttccggggcgaacaaagaacggtcgggggtgaccccggatcatggcgcgcccgcagtatctgtggccactgtggaaacagccctggcgtgtccgggacgcgacgcgg

SEQ ID NO: 326825 - DNA, 122 bp, Homo sapiens
cccgggcactcttgccttctctgcttttaggcaaggcctggctgaccgactctggcgagtcgctgccctctcggagcgccgtagttctgagatgcagttcacaccgcggcccttcttggggc

SEQ ID NO: 326826 - DNA, 122 bp, Homo sapiens
cctagtgcacttcccgccacccgcctccaggcgcaggctggccttctgattggccgatagcgcaggctctccttgacaggattggttgaactcacccttggattctcgaggggaaaatgggg

SEQ ID NO: 326827 - DNA, 122 bp, Homo sapiens
cactgcacaggacacagacacacagagctccaggcagcagtgcaggaggtggggccggggcggtcagggtaggggaggacacctcagcaaggccacacgcaagctacctgggagcaatgaaa

SEQ ID NO: 326828 - DNA, 122 bp, Homo sapiens
cgaactcctgacatcaggcaatctgcccgcctcggtctcacaaactgttgggattacaggcgtgagccaccacacctggccagtgaggagtttttaatagggaatcaataagatgatggctg

SEQ ID NO: 326829 - DNA, 122 bp, Homo sapiens
ccccgcgcgagcgcttggaggtgagcagtcccgcgccgcggctcagccagctctcgcccgcgggactacagcccagcgacctcgccccgccctcccgcagccggccccgccctcccgcagcc

SEQ ID NO: 326830 - DNA, 122 bp, Homo sapiens
ggcaacatggtcatcactcgaatttttcttgtgggcattttctgttcttccaccagcctccggctgtgaatgtaagtggaagaaatcagtgagtgtttaaatctgatgttggcatttccact

SEQ ID NO: 326831 - DNA, 122 bp, Homo sapiens
tagggttaagttttcattaaaggctgtgcctgcattcaccactcctggttgccctggcaacggggctcccttgcatgctaatgacattataatgtgaaaaaacacatgcaaatgcagtaaat

SEQ ID NO: 326832 - DNA, 122 bp, Homo sapiens
acccagttgcaagtaacaaccaaaatttccgagcccgaaaccagatggagtcatgagctgcgaaataagcgatccaggctccacaaagttccgatgagcatgggaggtttcaagccccatgt

SEQ ID NO: 326833 - DNA, 122 bp, Homo sapiens
gggaaggcggcggcgctggaggaacaggtgccgggctgagcgctcactcgcagactagcgcgtgcgagggctcctcgctctgctttcgaaagtccctgggccgtgggagtttcccaggagcc

SEQ ID NO: 326834 - DNA, 122 bp, Homo sapiens
actcaagtggttctgattttaagtgactgtgtcatccctgtggccagtctctggcgggggcggtaggggacaaacactttcaactttgaaatatttcagttgaagaagttaattcactttgt

SEQ ID NO: 326835 - DNA, 122 bp, Homo sapiens
gcttccctccactcttagagctttcttggactttgtctcagtgccctgtgttctcatgggcggggtcatttccttctgcttacccgggtcctgggcgcggtgtgggtctgagggcaacgccc

SEQ ID NO: 326836 - DNA, 122 bp, Homo sapiens
gtgcgtgtctctgtgtgcacaggagcgacacatgagaagggagtgtggtctcagggtgggcgtggacccacagtgcccagaccctacttgtcctagaaggagtggcctgggaggccccgcct

SEQ ID NO: 326837 - DNA, 122 bp, Homo sapiens
ggcgcaacatgacagaaatgatgagaagcaagagttcatttttagacagagaggactgcacgctctctccctagagccagcccaggatggcagcaatcagagaagaacccgagggagcctga

SEQ ID NO: 326838 - DNA, 122 bp, Homo sapiens
ctctcccacagctgtggccccccagagggcccctatcctgcgtccagccttcgtcccccacgtgctacagagagcaggtgaggggccagggtcatcatccctgccacataactccccccagg

SEQ ID NO: 326839 - DNA, 122 bp, Homo sapiens
cccaaaaaacacgtcctatcaagccgcctccagactcccaagagacgctcgcgctcccctcgctggtcccgcaaaactacacggaaaacaagaatgaaggagttgatgtaacgtcgctgagg

SEQ ID NO: 326840 - DNA, 122 bp, Homo sapiens
aacacggccatggggtcccctggtggcgttttgaagggcgacccctcccctaccccagcgcggcctgtggctctttgtttacaatttcataaaggcgaaaaataaaatgtaggaatgagtgg

SEQ ID NO: 326841 - DNA, 122 bp, Homo sapiens
gcacattctaggattcagtgaacacttggtgaaggagtgagtgaatggaagtgcctgttgcgtgtaggacctagtagccagcctaaatgagaagatttagccttgaggttattttagtacaa

SEQ ID NO: 326842 - DNA, 122 bp, Homo sapiens
ctctgctgtcctccggctgtagggctacctgcctccctcccggggggtgcactgcgagtccgactctagtgggggcagcgcctagcggactcccaaacccgctcaggtcctgccggcctcac

SEQ ID NO: 326843 - DNA, 122 bp, Homo sapiens
tgctggtgtcaggtgaggggtccgcggggagggggcgcgcttgggaaccgggaggccccgcgagatgccgcccctgatcccatccctgggcgccctgcaagtgacttaagagccttcggggc

SEQ ID NO: 326844 - DNA, 122 bp, Homo sapiens
gtgaggacgggcccggcccgtggcgcctagctgtaaagggccctaatgctgcgcgtttgtcgcaaagggaggcctgttctgacaccaaggagtgtcagatacttgaggataagcttccgaag

SEQ ID NO: 326845 - DNA, 122 bp, Homo sapiens
aggaatgtcagtggcttggaagaaaatcttgagactaatagtggagcattcttttaaccccgaggcatcgaatgttagtggagaggggatagcacagtgagtcagacatttcagcaacactc

SEQ ID NO: 326846 - DNA, 122 bp, Homo sapiens
tcaccacgcacctgcaaggtcaggtttctctctggtggctgtggcggctgctaccctcctcgcccatttcaatcttactttcacactacatgactccactattacttcctgaacactagcta

SEQ ID NO: 326847 - DNA, 122 bp, Homo sapiens
tacaaacactttcctgaaattggtcttctgtgggcagtgatttaaacttttcaacttggacgcttttcctactgggggctgtaaagatgataactcagcccttactcttcagtgtttctcat

SEQ ID NO: 326848 - DNA, 122 bp, Homo sapiens
gttccagttcagtcccaagttaaacaggagggagtgagggagaggagagagggcgttccccggatcccaggagagctgggctatgactgcaataaggagttgttccttcacctgagatgtgc

SEQ ID NO: 326849 - DNA, 122 bp, Homo sapiens
tgtaaaatttgagcagctggcaggagagctaagtgtatgtcagacgttgggaaatgagaacggaagctcagagggataagtggagttgccactgtggtttacttagactagctcatatttaa

SEQ ID NO: 326850 - DNA, 122 bp, Homo sapiens
ggggctacagcatcattctgtcattctaaccacatttatcctgaacctccccccaccacccgctgcccatgtgctggccaccgtgctgggatcaacaaaactgaatgagacacaggacctga

SEQ ID NO: 326851 - DNA, 122 bp, Homo sapiens
cctcccctctcaccttcaccgaataggccaacgagatggtgacggccagagggagcccctcgggcacggcgaccaccagcaccgtcacgccaatgatgaagaacttgacaaagtactgcacg

SEQ ID NO: 326852 - DNA, 122 bp, Homo sapiens
agagttcctatgaggaaatgacctatgccccaagaccataaggacaggggatgcttggtgcgttccaggaaccacaaggaagtcagcatggctgaaaggaagtgaagaagaaggagaggact

SEQ ID NO: 326853 - DNA, 122 bp, Homo sapiens
taccggtgaaaatcgtctaaagctccctttctacttgaggaatttgggttctggttaggccgggtagagggaaagacctcctcaaggaggtctctaacttcttcttccggtccgttggctga

SEQ ID NO: 326854 - DNA, 122 bp, Homo sapiens
ccacaccgtccagggcgtggctaacgaagtcgctgcccagggcattgctaccgaggatgtcgccgacggcatcgctgaggacgccgtccagggcatcactaacgaggaggccgcccaggcca

SEQ ID NO: 326855 - DNA, 122 bp, Homo sapiens
actttcattagctggaggcagcgcagatgtggggaagcaggcgggcggcagctgagggcacggacgcttgggttcgctttccatcagccatgaacagcgggacagcccggcagccttgggct

SEQ ID NO: 326856 - DNA, 122 bp, Homo sapiens
cgggagggggcggctctgcagcaaactcggagttgcagccacttggctaaatcagttactcgcagtcatgtgaccccttctctctccatttaaaaaataatgacagttcaatcctgggcctc

SEQ ID NO: 326857 - DNA, 122 bp, Homo sapiens
tctccttggtggttcaaagccaagtggtaagaattggaggccaggcacagcggctcacgccggtaatcccagcactttgggaggccgaggcgggcggatcacgaggttaggagatcgagacc

SEQ ID NO: 326858 - DNA, 122 bp, Homo sapiens
tgaagtactattgttgacatttagagcattctgtgctgcaagtgtcttcaccccagaatgcgacgtgcaccagtgaacagaggtcaggcaaggcgaaaagttgtttgtcatctgccaagctg

SEQ ID NO: 326859 - DNA, 122 bp, Homo sapiens
cggagggagcgccgagtctcttacctgcacttggggcggctttgggtgactttccaagtccgggggaaaaatgtgtgtgtgtttgggatggagcgccgcgggcgcgcatgcgctgcccaaag

SEQ ID NO: 326860 - DNA, 122 bp, Homo sapiens
ctgggacgcgcggaccctcggaaacccaggccgagcatgcagtgagacgcgggcagaacccggagtggcgggcacacccaacctcgtgaacgcccacgcaccccatccccatcccccagtac

SEQ ID NO: 326861 - DNA, 122 bp, Homo sapiens
gaggagggggctggcacccgccagacctggtgcgcctggaagaggcggcagctgcagcagcgtagcacccgagaacgctgaagcgacgccatccctgcttgtgcagtcgccaggcagccaag

SEQ ID NO: 326862 - DNA, 122 bp, Homo sapiens
acaaagtaaacaacatgaatttaaccacaccaacgacgactgggcacgaaggcttgggagcgaggaggggtgcgcgcaagaacaacagttccattgggcctatttttagaggatgaaagtga

SEQ ID NO: 326863 - DNA, 122 bp, Homo sapiens
gcagccgcggccgccgccgccgccgccgccactgccgcagccgccatcttgacgccgctgcgcccggcctccacagcctcggaacgatgcggctgttggtacgacacagagggattctggga

SEQ ID NO: 326864 - DNA, 122 bp, Homo sapiens
gagcctggacctgaggcgaacccccacgcccaccccaatccaggacaccgcttggcagggcgcttggcctttgttagcgtatatgaccccgtgagtggggaaccccagggctggggatccag

SEQ ID NO: 326865 - DNA, 122 bp, Homo sapiens
ctttgccattggctgacaacggagtacataaggacgtcatttcctgccgcctgtcttttccgtgctacctgcagaggggtccatacggcgttgttctgggtgagttccgtgtagcgtccctg

SEQ ID NO: 326866 - DNA, 122 bp, Homo sapiens
gcggtggcggcgcgggctgctgggcgagggctgctgggctagggagccgcggagagctcgcgcggaaggagggcggagcctctattgtgccggggcggcggagatgcagccagtgaccgcgc

SEQ ID NO: 326867 - DNA, 122 bp, Homo sapiens
aagagatgcaatgtggtagaaagagcatgccctagggaatcttgtgttagaaacatgcatcggtacaacagttcagagaggttagtgtgcctctctgaactgtttctttgtctgcaaaatgg

SEQ ID NO: 326868 - DNA, 122 bp, Homo sapiens
ggtcttcgttctccaccagccaccagcctgtgcgcaagaagcgggcagggactcaaatctcgaggctccctcgggtccaggagcagaggagcaaatccctgggttcttggggggccctacct

SEQ ID NO: 326869 - DNA, 122 bp, Homo sapiens
cactggcaggaggtctgcccatggtgggcatggccttggcctgagagcctggtccagcaccgaggactggagggaggatggaggggtctgggcaccaagacggggcctcctcagggtgctgt

SEQ ID NO: 326870 - DNA, 122 bp, Homo sapiens
tggaggccacgtgactattcatcgcctgcaacaaaatcttaactagaaccgggagcccggcgcgtagctcacgtccgaagcccaacaacttgggaggccgcggcgggaagatcgctggaggc

SEQ ID NO: 326871 - DNA, 122 bp, Homo sapiens
gccagatcatcacggaccaccgctggagcaacgcgggtgaggccggcctgcctccgccggcgaacctggcccctgtctgttcccgatcccagggctgaaaatttcccaggcctcacttcgcg

SEQ ID NO: 326872 - DNA, 122 bp, Homo sapiens
cctgctcagtggggtccctgacagcttcattcagacatggaagactggtgctcaggagcccgcgggtggctgtggtcctggacagcgcagctctagattgaaaggctgtgtcaggggtgggt

SEQ ID NO: 326873 - DNA, 122 bp, Homo sapiens
aacaaaacaaacaaacaaagagaaaaaccagtgtgatgggtctgaaaaggaatgagggaccgcctttgctcaagtggtcagggaagggctttctaagaaggtgacacgtaatcttacactag

SEQ ID NO: 326874 - DNA, 122 bp, Homo sapiens
gccactgttgccattagattttctgcttctgacctttttaagccttttaaccatccggagcgttgctgtcagcactcgattttgacatgacgcctgcccgctgcttcgtctttttctatttg

SEQ ID NO: 326875 - DNA, 122 bp, Homo sapiens
ctttctctttatttacatgtctccctttctataggcctctttttccccccctttttgagacggagtctctgtcgccaggctggagtgcagtggcgcaatctcagctcactgcaacctccgac

SEQ ID NO: 326876 - DNA, 122 bp, Homo sapiens
ggtgtgctccaagcagctgagacctagaagaggagcctgtgacttacctccgcccacaagcgagccacagagggctggctgctccccggggcttttataggccattggtaacccccgcggct

SEQ ID NO: 326877 - DNA, 122 bp, Homo sapiens
cagcgctctccgctctctctagctcctcgcgcagtcttaacagcaaaactctactgagctcggacgaaactggcgggctcctgggccaatcaccgtgcagctccccgccagacgctggacca

SEQ ID NO: 326878 - DNA, 122 bp, Homo sapiens
gagaatagaagcaaggagatagctaggaaacctagacgtaaggcaggtgagagatgatggcggctccatcagagaagtgcctgtggacttagtgaagggtggttgaattctacacacatttt

SEQ ID NO: 326879 - DNA, 122 bp, Homo sapiens
agaggggaggttaggagggggtgagctctccttctccctgcaataaatcggcttagcggacgagagccgaacagcccagaaaggattaaagaaaagtctgtataatacgcggagagcgcggc

SEQ ID NO: 326880 - DNA, 122 bp, Homo sapiens
aatggatagggaggccaactgatatggcatgggaaaggttaaagatgactagtgacccttcggcaaatctgcttgcagcagaacagaataagtaccatgctcatttgaattataggtcataa

SEQ ID NO: 326881 - DNA, 122 bp, Homo sapiens
cgtgattcacccaccttggcctcccagagtgttgagattacaggcatgagccaccacgctcggcccctatgtgaagctctgtcaccttgtccatgtggacatcccagggagccccgtgggat

SEQ ID NO: 326882 - DNA, 122 bp, Homo sapiens
ggtcaagcagccttgaagaagccccgggggcaagggaacccgtcaccagaggctgagatgcgcctctggagaggatcaagaggccggcctgaggatgtattacaaacgggctcccgggaaat

SEQ ID NO: 326883 - DNA, 122 bp, Homo sapiens
gcctgcacctgttcagctgaggcccaaggaaagacaccaagcccgacagtaaatgaagcacggccccaccccatctagcggggccccttcccacactgcagcagggccgggttaactgacag

SEQ ID NO: 326884 - DNA, 122 bp, Homo sapiens
cccgggcccgagcgaagctccggatcccaggcacgcccccccgggccgcagctctctccgcggccgccgcgcggaaggacactgtttacacgacactccctccagcctcctcgcgccacttc

SEQ ID NO: 326885 - DNA, 122 bp, Homo sapiens
ggggtcgccccaagtcataccggccgcactgaagtcggtctcctccgcttgtggctaacccggctaaacagcaaaagagcctgccttgccatctaaaacacaacaaaggacctcaggagacc

SEQ ID NO: 326886 - DNA, 122 bp, Homo sapiens
gagcggccagactctgctgttctcaagcctgggaggcacagagaagcaagacttccgcatcgggggaggatagggcttgagggccgccagcccagactcgcttcacaaatgtgagaactatg

SEQ ID NO: 326887 - DNA, 122 bp, Homo sapiens
agccacagtgtgcctgccaagaggagtgactctgcatgctgtggggcaaagggctgaatccgacccccaacctttccctgttgggcacataaagctccctccccagacacagctttcttggt

SEQ ID NO: 326888 - DNA, 122 bp, Homo sapiens
ctagctgtgagaaaatcccctagcgtctttgaaactcttcgggagcgcccccctcccacacgcctccttcaggctccacccagtgccgggcatttgattctgctgcttcgtgcacaccagac

SEQ ID NO: 326889 - DNA, 122 bp, Homo sapiens
gagcaagggagctagtgccagagagagctgcggaggctccggcaggagtggggacgtccccgtggttgcgcctcctgcgctcgccccggatccaccgagctagcagcgggcggcgctcagcc

SEQ ID NO: 326890 - DNA, 122 bp, Homo sapiens
ttctctctcgcgggcgcccgagcatcgtgctgggacatccggcagccccaggctgcgcgacgtggagccaagaggacagccacctgggtcggggctgaaggaaatcctaagtgacaaaatat

SEQ ID NO: 326891 - DNA, 122 bp, Homo sapiens
ttcctccagcccttggtgaggctcttggttacagaacctcagctcagctcactgcatatccgctgcttttttgcactaagtctttattcacaatgtggttgggacacctgtgagaagctact

SEQ ID NO: 326892 - DNA, 122 bp, Homo sapiens
ccttgcctaagaaaggcatacacaaaatggaatcgcagctcgctattctgcttcgcggtgcggcctcaggcaaaaacacaatcacaaggtaaaatacagcgcaaggaatccatccgccgaat

SEQ ID NO: 326893 - DNA, 122 bp, Homo sapiens
tcttcatctagcctacgcataaaaacacacaggtttaactcttttttgggtcttcatttccgtatgaaggcttctgtgtcacataaaacttatattaaataaatttgtatgcttttctcttg

SEQ ID NO: 326894 - DNA, 122 bp, Homo sapiens
accacgcggggtccggcctgggatccaggctaagggccggcggaagaggccccaatggggcggtgaccccagcctcgcccgacagagcccggggcgcaggcgggcgccagggcgctaatccc

SEQ ID NO: 326895 - DNA, 122 bp, Homo sapiens
cccccaaaaaacagcattatggattacataaatacaaagatccacaatttcctgggtctccgtatttctatttctccctcctgtgtccctcttccctagcacagagcacacattttctccac

SEQ ID NO: 326896 - DNA, 122 bp, Homo sapiens
ttagaatataacttaatgttaaaggataggaaggaagatattggctatttttgaggagaccgttatccagtaatcatagcttccttatgtgccagcagagtgcctagaatccagctggctta

SEQ ID NO: 326897 - DNA, 122 bp, Homo sapiens
ttccactctaacctagagattcctccgtattagttcaaagagatctttctcattccttttcgttagactttttcctttaattgatacatgatattttacatattttatttatgaggtacatg

SEQ ID NO: 326898 - DNA, 122 bp, Homo sapiens
gcggggccaaaggtttcctcaaagaccctgggggccgggcggggctgtgccaggcacccgcgtcgcgctccagctccagccctttaatgctctttgccattcaagccactcactttcatttt

SEQ ID NO: 326899 - DNA, 122 bp, Homo sapiens
ttctttcccagctcggggccttttgccataagcgaaacagagaagaaagtcagcgtgtcccgaggattaaggagaggtcggaagatccgaagaacctgctgctgacagatttgcttattaaa

SEQ ID NO: 326900 - DNA, 122 bp, Homo sapiens
gtggagagctcactctgcagaataaaatcaagaacaccacggttgtagctgctgtggactcggcggtctgagcagcctccccgagagccgtagttgctagtagaagtaagattgagctctgg

SEQ ID NO: 326901 - DNA, 122 bp, Homo sapiens
acacttttgctgtctccaccttgctagtgtggtgggccacggtgacccactctggttggtcggtcagcacacagtgcggcgaccgcagctccgtggtagacggtgcactgggacccagcaag

SEQ ID NO: 326902 - DNA, 122 bp, Homo sapiens
gcctgccccgcgcgaatccccagtcgctgggacttacttggccaccaggtttacagacttcgcagccgctgagagctagagaagagcccggagagcgccatggtccggggacgccggggccg

SEQ ID NO: 326903 - DNA, 122 bp, Homo sapiens
catacagtatttagaattgtttatttccttacattttgcacttccttaagaacctgaacccgaaagttgtaatcaatagattggtttacagcctgttagtcctttaaaagtattaactttca

SEQ ID NO: 326904 - DNA, 122 bp, Homo sapiens
agcgggaacagtggatggcatgggtgtgtgagtgaatggggaagtaaacgaacgaacgaacgaatgaatgaatgaagtggttttgagtctgagctaccagaagcccgagagcctggctgcgg

SEQ ID NO: 326905 - DNA, 122 bp, Homo sapiens
acgcatgacaatgagacagggtccttgcctctggagggaggggaagacagatacctgcaccggcaacatgaactggaggaaaatctgatgagtgtttcatcaaagggttaggagacattaac

SEQ ID NO: 326906 - DNA, 122 bp, Homo sapiens
tgtccgctgatctcctgggaagaaagcttccgaaaaggacaccgtttcaggggcgagtgacgccggggtgcccaggccgcgccccagttccgggtttgcacccggtcttcttgccctgcccc

SEQ ID NO: 326907 - DNA, 122 bp, Homo sapiens
cacacagcctctgcagagatgagctccaggccaggtgggggctgggcccagctacaggtgcggctggtgtgatgaacacagtgtcatgcctgctcagctcctggaccaacaaccccctcctg

SEQ ID NO: 326908 - DNA, 122 bp, Homo sapiens
gtcacggcaccatttctctacccacttttgggcacattccgaaggggggcttgtgctcatcgttcccattccctctgctcccattgttctgttttgtgataaatgctttgcttgaagtatac

SEQ ID NO: 326909 - DNA, 122 bp, Homo sapiens
agccgcttttggactgagagaggagcgtcacgcggggctccgggctcctcggcttcttcgcggttcccccgactgcccctccgacccgcgtcgcacacacagcccaaatgtccttcgcagcg

SEQ ID NO: 326910 - DNA, 122 bp, Homo sapiens
gagaaataaatttctattgatgataagccactcagttcatagtattttgttatagtggcccgaatggaccaagacttcaagtaaaatagtgcgggatggctgtcatgctaagcacctgtcgc

SEQ ID NO: 326911 - DNA, 122 bp, Homo sapiens
ccccaactcctgaacgagagttacagtttcaagatttcttttaccagggctccccaccgccgcccccaccaccatccgccaccttggtcagcagggaccataaaataagcagttgcagatcg

SEQ ID NO: 326912 - DNA, 122 bp, Homo sapiens
cagtggcttaaacaaattagctgttatgtgcagaaaacatacaccagacattacagcatccggggttggcatgtggtgccttcatcatgccatctggggctgcaggggctctgtcgttccac

SEQ ID NO: 326913 - DNA, 122 bp, Homo sapiens
gaccagcctggccaacatggcgaaaccccgtctgtactgaaattacataaatcagctgggcgtggtggtgcgcgcctgtaatcccacctactcaggaggatgaggcaggagaatcgcttgaa

SEQ ID NO: 326914 - DNA, 122 bp, Homo sapiens
gacgctggtgagtcactgcggaggagccgaacactgaccgcgccgtccccgccaggctcccgcgcggccggcaccgcggccctgagcgcaggcggccccgggtctcaggcctcaggcggacc

SEQ ID NO: 326915 - DNA, 122 bp, Homo sapiens
ccccacagaggtgtcctgttgagattcctcccatcagacgccgctcccagagctgtggcccgcagccctcctggggcgcctcctgccctgagctgaggccacacgtagagccacgtccactc

SEQ ID NO: 326916 - DNA, 122 bp, Homo sapiens
ccgccaccgctgccgccgccgagctccgccgccgccgagcaccatgggagacgctgggagcgagcgcagcaaagcgcccagcctgccgcctcgctgtccctgcggcttctgggggtaagtgc

SEQ ID NO: 326917 - DNA, 122 bp, Homo sapiens
tcactggccggattcatgcctcccttgtcctgatactgaagatcatcaaaagaagactcccgttcagcaagtggagactggcattcagattcgctggcccgcatgcttagagtgcagaggta

SEQ ID NO: 326918 - DNA, 122 bp, Homo sapiens
ttgctgcgacccgtctgacccagtccgttatgcttggggaggctcctgatgactaagccccgtctcctcaccgggctgcctgccttgcacgcgggggccgtgtgtccaggctgggcacagcc

SEQ ID NO: 326919 - DNA, 122 bp, Homo sapiens
actgccaccccagtgaggacgctgtcctcatggcccggtccacacgctccggtttcccagcgccgctcaccggtgccactcgctgcacacgcagcctacacttctaccttctacctgaaaga

SEQ ID NO: 326920 - DNA, 122 bp, Homo sapiens
ctgccgtctgccctgctacatgtgacggctgtgtttcacatgttcaccggtgtgtacgcccgggtgtgcttcgaactgagaagccaggagcccagggcttctctgctgcccacgaatcatgc

SEQ ID NO: 326921 - DNA, 122 bp, Homo sapiens
aggggtcagggagctccctttccgagtcaaagaaaggggggacggactcacctggaaaatcgggtcactcccaccagaattttgcgcttcttggaccggcttaaaaaacggcgcgccacaag

SEQ ID NO: 326922 - DNA, 122 bp, Homo sapiens
cctgccccgggaggacctgttcactatcaactccaagggccgcctggggaaccagatgggcgagtacgccacgctgtacgccctggccaagatgaacgggcggcccgccttcatcccggccc

SEQ ID NO: 326923 - DNA, 122 bp, Homo sapiens
agggcctgtgttgctcatttaaatgcaatttgacgtatgtttgggtcagtggcctcagtccggaggctcttacagtaacttggcactgtggaaatcccagaacttcggccagggtctggagg

SEQ ID NO: 326924 - DNA, 122 bp, Homo sapiens
ccctcgttccctttcggaaaaccgaactatttccaacttgtgaactgcagctgcacttcccggggcagaacccgggagggaacgaggctccggcggggccgccgcctccccactcctctcgg

SEQ ID NO: 326925 - DNA, 122 bp, Homo sapiens
gggaggggcggccggagcgcgtcggtgacacccgcgggggggcggggaaggcgcggcggccgcaccccaccctgggaagaaaccggccaggtgtggcctaggcgcccagtgccagcggggag

SEQ ID NO: 326926 - DNA, 122 bp, Homo sapiens
ctataggaaggagagcttaataatgatctcgatgccttccttagggccccactgtttcatcgttcctgtccgggatgaaaacggaagcttgtacccaggagtcacagctattgatatgatgt

SEQ ID NO: 326927 - DNA, 122 bp, Homo sapiens
atgatctctattttgacattaatgctgatcagttattgtgtctgcaccacaaaagggaggcggtataatgaggcatgttgagcctcctgtactgtcatggctgggagcccagtttttaaggt

SEQ ID NO: 326928 - DNA, 122 bp, Homo sapiens
accatgtggaccccaggacgccaccgcgtgatgcttctccacctgcgctctgtcgttcgccgcctgagttaccagccgagcgttgccgcctagcttgatgacagaggcttaaacaatatcag

SEQ ID NO: 326929 - DNA, 122 bp, Homo sapiens
taacagtacttcttgagaggggttaccatgtaaagctgagaataaactgggtttaggtaacgttgtgcctccttatcacctgagaggccattgttcctggttcattctgtaagtgtattagt

SEQ ID NO: 326930 - DNA, 122 bp, Homo sapiens
ccgtctcgctccagccggacaccaggtactccccatcgctctgcttcactgccgtctgcacggccacactgtactccgtgcgggggctcaggaaccagtggcctctcaccgtcatgggcagc

SEQ ID NO: 326931 - DNA, 122 bp, Homo sapiens
cgcacacacaccacacacagagtcatacacacaagccatagggcctcgcaggcagggagacggctccgggactggagagaggcagcgccgccgaaagcggccgcgaggaggggcgaggcggc

SEQ ID NO: 326932 - DNA, 122 bp, Homo sapiens
gaggaatccaggaggcctccctggttgtgctggctgtcaccttgagccctgggcaaatggcggtgctgctgccgcgatgctgacggagagaggggctgtgtgtggacggagtgtgtagcaag

SEQ ID NO: 326933 - DNA, 122 bp, Homo sapiens
tctctgggatcgtacgggtctcctccggagcaggctgtgcaggtcacttgccttatgtgacgcccagtttctctgtttacacactaagattttaaaagtggctttaggataaaatcacgcag

SEQ ID NO: 326934 - DNA, 122 bp, Homo sapiens
ctctcccgcccctcccttgtccccgccccttcccgccccaactcaggttctgccccaccccgccccaattcacgtcctgctccgccccgacgtaggccccgccctggcccccgggccccgcc

SEQ ID NO: 326935 - DNA, 122 bp, Homo sapiens
cggcccggcatgaagcggcgttgaggagctgctgccgccgcttgccgctgccgccgccgccgcctgaggaggagctgcagcaccctgggccacgccgatgactactgcaaactgtggcgccc

SEQ ID NO: 326936 - DNA, 122 bp, Homo sapiens
tgctggagtagaccagtaactgtactgtgaaaatgcttgacagcagcagctgactccacgcggacctggagccgcggctgcgggcaagggcacctgcacacaggggtgtgcagcacgggaga

SEQ ID NO: 326937 - DNA, 122 bp, Homo sapiens
tcctaggtatgtttctataaaacctgataaccgaaaattggccaacggaacaaatgtcctcggcttactgattgacactttattaaaggaaggctttcatttggtcagcactagaacagtat

SEQ ID NO: 326938 - DNA, 122 bp, Homo sapiens
agataagaaaaaagactggaacattggatattgcagtagaaaatatgtaatcagcagcatcgcaatgctaccaacggaaggttattgataggttggttctttggagaacaccaaaggcttct

SEQ ID NO: 326939 - DNA, 122 bp, Homo sapiens
ccccgtcccccacccccgccccgccatgggggctgtggcagcttcaccctccctgcacagcgaggttcctgaggcctgctttgttcacggagcttctgaacacggcactcaggcgtgatgct

SEQ ID NO: 326940 - DNA, 122 bp, Homo sapiens
tcaggtaaaaagcaacagcaagacaggagaaaaagcgttcagaagacacacatcaaatagcggatgaagacataattttagccaactctgaagctttcgacgcacaaacagattaggaagag

SEQ ID NO: 326941 - DNA, 122 bp, Homo sapiens
cgcgtcccaccgttctggggagcgcgggagccccggcgacggtgactcggacgctccaggcggctgctggtccagctcccccgcctccgaggcaggacttgtgggagcaaaagtccgaggcg

SEQ ID NO: 326942 - DNA, 122 bp, Homo sapiens
ggaggtggaggtggaggaggaagagagtacgagcctcctcggagaaggaggaggaaggcccgggaaatggaagagcaacctctcccggctgggcacccagcaccgagcaggtcggggcgccg

SEQ ID NO: 326943 - DNA, 122 bp, Homo sapiens
agcgccagtgcgcgccgccagacgtgggccaggcgggccgggcgctgccctggcagcctccgtccgctgtggactccgaagcccctctcgctgtgtctgagagaggccctgcctggagtttc

SEQ ID NO: 326944 - DNA, 122 bp, Homo sapiens
caggcctcttgcgctcacctcccgtcattcacagcaggggaacgagatgcatgctcacatcgagatgagctcggcatgggctgggccctgctgcctccgcctcctgacacacccgtccatcg

SEQ ID NO: 326945 - DNA, 122 bp, Homo sapiens
gctgcgccactttgcctccagacagctaatactcggggaaatgcttttgggagctgtgggcgcaaccccagtggcagttatgtgtcctgcacccctaggtaagtgaggaaacctggctcctc

SEQ ID NO: 326946 - DNA, 122 bp, Homo sapiens
tccggtggcgcgcgagcctgcggacggtgcgagacgcgagggaccgggccccgagaagagcggtaacccgactggtcggagcccgcctctcgccgccccgcgcctctccccgatcttctcgg

SEQ ID NO: 326947 - DNA, 122 bp, Homo sapiens
gccccgccaggaggaaagctaccgccagcactcccaggccgtgggaacaagcaaacgcaccggctggggcaggaaacacttgcttctggttgtgactgcaaacagcctaaaagaacggactc

SEQ ID NO: 326948 - DNA, 122 bp, Homo sapiens
cttccaaatatgaccaacctgcagttattttcagtttcggaacctgaaggctcactgtcccggggtttccttcagagctatttccacgttactgctaaccgcctgtcactgtccctcagacg

SEQ ID NO: 326949 - DNA, 122 bp, Homo sapiens
cttcccgatgtctgctagtcctctgcgaggagacgcgttctcgggagcgcagctgctccgcgccgcccttagcgccatcgccctggctcacggctccctgcgcggcagaaaccccagtcccc

SEQ ID NO: 326950 - DNA, 122 bp, Homo sapiens
gatttaactttagtcatacagctctgcccctctgtgtcatcccaagtaggttcagtcacacggtgtgaattattcaacattatgtttactatcaagaaggtatttgagagctaagtttgatg

SEQ ID NO: 326951 - DNA, 122 bp, Homo sapiens
cccagccccaagattctgtcctgctttctagtgcttgccacaggactcccaaagacgcgccgaagctctgcgtctgcctttcagaggatacgctttttctctttgcaattggttctgagaat

SEQ ID NO: 326952 - DNA, 122 bp, Homo sapiens
acaaaacattctcttgctgatgggcccaacaatgccctagggtgctaggtggtgttcacacggccagccagagtcaaaactcagacggggccagcgttctatgccctcactttctcccaaag

SEQ ID NO: 326953 - DNA, 122 bp, Homo sapiens
tgcgtggtgcctcctggagtgggctcggtccttggctccgcgtgggtcatggaaaggccccggtggtggaggaggcagatagcaagggcctgcgtgtgggatggaggcggcgtctggagaga

SEQ ID NO: 326954 - DNA, 122 bp, Homo sapiens
tctgctcccacccacagctccctgacattgtcacctacctcctgagctgtcaccacagggcgcacgggactccgctgccccaggttccgggacagtgactacatttcccaacagcccctgcg

SEQ ID NO: 326955 - DNA, 122 bp, Homo sapiens
ttcaaatgattgaccaggtgttcggcacggttatcgagcaatccattgtacacccactgacgcgagacgccactcccacctctcactaaatcctcgtctaggtgctgtctgttcccggctcc

SEQ ID NO: 326956 - DNA, 122 bp, Homo sapiens
ctggggcctccgaaatctagccgccactggcagtttctttctgctcctctccagctttctcgctcggtctcgcactctctctcctctccctccctctcatccctctctcttccctctgctcc

SEQ ID NO: 326957 - DNA, 122 bp, Homo sapiens
ccccgcccgcagttcccaccttgcacccggggaggatgctcagagctgtgcagagcccgccgactcagccacgccgccacagactcgcctccccggcagaggcgaaaacaaaagcattaatc

SEQ ID NO: 326958 - DNA, 122 bp, Homo sapiens
gcggcggggacaggtggaggtttcaacccctgtttggcaacctcgggcgcagccaggccccgcccagaaatttccgggacacgccccggaagtactgagagggacttccgccccgaggcgag

SEQ ID NO: 326959 - DNA, 122 bp, Homo sapiens
tttattgtgggaggatcggggtgtcagggctccaggagtcgggatggacttggaaggctgcggggagggtctttagaggaagaggaggcctgagagttgggggtggtcacaggtcaaggggt

SEQ ID NO: 326960 - DNA, 122 bp, Homo sapiens
ggcgcgaagacggggtctggggcagaaaagaagggaggctggagaaatctggacccgagacgtagtaagtacaacttggcaaatacatgttagaggagcagggaccacgctcatcaaaatcc

SEQ ID NO: 326961 - DNA, 122 bp, Homo sapiens
gcaaatactatcagcctgagacggaggtaaggtcaggtggccagtcctgtctgccctctccgatgagcacccaggttagggtagagctctggggacccacaatctctctcagacctttcagc

SEQ ID NO: 326962 - DNA, 122 bp, Homo sapiens
ctattcagatcttttctcatttttaaattggattattatattttttttcctatagttgttcgagctccttatatgtttcagttactgatcctttgtcagatgaatagtttgaaaatattttc

SEQ ID NO: 326963 - DNA, 122 bp, Homo sapiens
acagctgccctgagttggcaaaaagtgctttgcccaaggacagggtctaattgataatggcgtgtgggggagatgtggctcctgaggcctggagcatgcattcattcattcctttatattat

SEQ ID NO: 326964 - DNA, 122 bp, Homo sapiens
aaaccctgtctctactaaaaatacaaaaaaaaaaaaaagaaatacattgatctgtgtgatcgaatgtgaattaacaatgacgttgacttgatactacatttctgagtggttaccacatttta

SEQ ID NO: 326965 - DNA, 122 bp, Homo sapiens
gctcgagcctccagggatcgggccgccggggcagcgcagagaggcggggacaggcgacagcggcgcagagtggctcctcccggggccggcccaagcgggggtctcggtgcctgcgaagcggc

SEQ ID NO: 326966 - DNA, 122 bp, Homo sapiens
gccactgtggcctataaggtgcatcccaatcagggactcggaggctcctcctgcacctcccgccctgtcccatctcccagctgagtcgctggactcttcaaagctctattcatgtcagagat

SEQ ID NO: 326967 - DNA, 122 bp, Homo sapiens
aggtacaaacaccaccagcgccgttattccagactccagatccctgccttttccccccaccgagcaaagacaggccggtgtttgggggtggttgttgttcttttaaaagtatattaaaggat

SEQ ID NO: 326968 - DNA, 122 bp, Homo sapiens
tgccatacttttttatgactggcagagcagtagatttgtttacaccagcattgccacaaacgccctgcaaagttaggacagcatcagggtggctatgtcactaggtgataggaattacaatc

SEQ ID NO: 326969 - DNA, 122 bp, Homo sapiens
atcagcggccgcagagtgtgggaactgtcgccatggcagccaggaggcgggcgcgcgcggcgggaggaggggcagagcggagcggtgggccgggggctggaggacaggtttgtgcgctggac

SEQ ID NO: 326970 - DNA, 122 bp, Homo sapiens
gcggcacacacacctttcacaggcgtcccggtgcccgcctctccacggtgcagcaccacgcgttcgtccacctccagcacctcttcatacagcacctcaggcatgggcacggcctgggggcg

SEQ ID NO: 326971 - DNA, 122 bp, Homo sapiens
taaattccatttccatactctgtgacctctgtattaccctattagcagtgaacaaaatgccgatcatcaaacaaatactcctggatcacctaatgaggaggcctctgggattctataatctt

SEQ ID NO: 326972 - DNA, 122 bp, Homo sapiens
cacagtctcaggcatctgagtgggtgatgggattgcatccatccctatgagggtccagctcgctctgtagcccaagctggagtgcaatggcgcgatctccgctcactgcaagctccgcctcc

SEQ ID NO: 326973 - DNA, 122 bp, Homo sapiens
tgtgaacacctggtaaagctctgaaaatgaagtcgatatatgactggagaatgtcagtagcgccagtgccctgtccatacggtacaacagcatcaataaccggccaggagtagccccgtgcc

SEQ ID NO: 326974 - DNA, 122 bp, Homo sapiens
cgtcccgccccagctccgccttcgccggcgccgctctgcctgccagcggggcgcgccttgcggcccaggcccgcaaccttccctggtcgtgcgccctatgtaaggccagccgcggcaggacc

SEQ ID NO: 326975 - DNA, 122 bp, Homo sapiens
gccccaaagcagcagaaggaagccagcgggcaggggcattccaacaccgttcccgagacccgcagtcacaggaaaggagaacttcctgaggctcctccaagccttgcctcaacttaatggtg

SEQ ID NO: 326976 - DNA, 122 bp, Homo sapiens
attcctagaagtggaaaaataaatcacaatggccagtgcgggtccccagaggtttagccccggctaatggataacaggaagggactaaatcagcctcctctcaccagcggcaagtttacaag

SEQ ID NO: 326977 - DNA, 122 bp, Homo sapiens
gatttgccttacaagctaaatgttacatttccactcaacagaaaggtactgctgtgtggccgtaaaaagctggccaaaaccctgtaacctttgcagttagtcatgttatttttggttcatgc

SEQ ID NO: 326978 - DNA, 122 bp, Homo sapiens
gagctaagactccatcaaaaattgcgcttttctggtctctctagatccatggaaactcaccggggaagagtcattttctatcggctttggacttctgctatgaaatggcaattcctttgagc

SEQ ID NO: 326979 - DNA, 122 bp, Homo sapiens
tacagagcgctgccactcccgaaacgccctccgtgctccgcctgctcatccctccctccccgccacccctggaaaccatgaatctttttactgtccgcgtagtttcgctcttttcagaacat

SEQ ID NO: 326980 - DNA, 122 bp, Homo sapiens
ggcaaacctctcccagaggcatgactctaagatgctgaaaatatcactgccgtccaccatcggccagaatccactgaagtcacctgccttcagcccacccatcctgcaggttctaccttcct

SEQ ID NO: 326981 - DNA, 122 bp, Homo sapiens
ccagaagtgtctcaatttaacacatcattggttagtattattagaaatttcatcaggcaccggagcgcattatggcagggctctgaaggggaggctgagggtgcaggcctggggccaggggg

SEQ ID NO: 326982 - DNA, 122 bp, Homo sapiens
agctcgtggcgttcattggctgtgcagggccgagggaggcggtgcaaggccgccgcgtgacgtcaggacgccgcggtcaggacgtcgaagccaaagaagaccagagccagccgggtggcaca

SEQ ID NO: 326983 - DNA, 122 bp, Homo sapiens
actgggtgaatgtttccattccaaatgggagaaattatccaaagccaaggggccacaggccgtgtggtgatgggtttgtaggtgcagcaaaccaccagggcacaagtttacttatgtggcaa

SEQ ID NO: 326984 - DNA, 122 bp, Homo sapiens
ccgaatgtcccttccgggaagggccccggtcacagcctgtgtgcttctcagcaggaaaggcggcctggaagtcactctgcccagcagaagctctgcacttcctgaagggggctgtggacccc

SEQ ID NO: 326985 - DNA, 122 bp, Homo sapiens
gcaggtatcagaaagtaaacaactgaaatgtgtaggtaataagaaaggtggtaaactctacggtgaaaggactgggatagggtgccctttcacaaagagtggtcaaagagggcctcactgag

SEQ ID NO: 326986 - DNA, 122 bp, Homo sapiens
gtgcttggagctcttctccgcagcccctgaggacgcccgaggccggcgctgaccccagcgcgccctgcatagtggcccctcaccaaggcgagagccccgcccctactcatcaaccgggggga

SEQ ID NO: 326987 - DNA, 122 bp, Homo sapiens
cttggaaggctatgaaggaagtagggggctctcttgggaggtcatttcccttggtagggacggttgtgtgaatgaacttggcctttagggagaggagcccgactctcacctgaagccaccca

SEQ ID NO: 326988 - DNA, 122 bp, Homo sapiens
agcaccaaggaacccttttcctatcccttgtttccctgctatcctctatttttcaatcctcgagatgtttttaaagtccatttaagtccctttggtacagattttatctgttttccacccac

SEQ ID NO: 326989 - DNA, 122 bp, Homo sapiens
cttctgccgcaactcgcacctgatccagcacgagcgtacgcacacaggcgagaagcccttcgtgtgcgcgctctgcggtgctgccttcagccagggctcctcgctctttaagcaccagcgcg

SEQ ID NO: 326990 - DNA, 122 bp, Homo sapiens
ttgcacgtgggggtgtgaggcctcgccagcaccgccactcactggtcctgttctcgaaaccggttctttggaggctcagtttttggtaattaagactaaggagtgtttaaaaaacagaagta

SEQ ID NO: 326991 - DNA, 122 bp, Homo sapiens
cctaggactggtggacacggcagtagccttttcataatagctttttgccatgaaggaattcggggtttagagagcgatgggggctgcagagagccaggaagtctcgcggaggactcgggaat

SEQ ID NO: 326992 - DNA, 122 bp, Homo sapiens
gaatgatttcccaaggagagggcacttggagactgaattctctgtatggcaggcacagttcgctgaggcactcgctcaaccgggggaggtcagtcccgcagcagcaccagggcacagcgctg

SEQ ID NO: 326993 - DNA, 122 bp, Homo sapiens
aaaaataataggtcaagaccttctggcactactgaaacttctgagtgggcctcagatggtcgcttgagaatctattcagacaacccagcagttggcagatgtaacactcatcatgcctctgc

SEQ ID NO: 326994 - DNA, 122 bp, Homo sapiens
tccaggatttaatgattctttcaatcaactttaaagttcttcaggaagattctccaggtccgtcaacagttttccccttcatgactttgtgacaaagctttcttgttccactatccaggtgt

SEQ ID NO: 326995 - DNA, 122 bp, Homo sapiens
ttgttaagcacccctctgaccatcacactcacccggttgactaccaagtattgcctgaagcgaacggagcattcctgcaacggctccttttactgcccctccccctggcctaacctctgctt

SEQ ID NO: 326996 - DNA, 122 bp, Homo sapiens
ggaaagctgtgcgatggggtatctgagactattcccaggctaaatgactgagggcaaaaacggttgagggcaaaaatggttgaggaggggtgccactggatgtctggggtcaaaaataagta

SEQ ID NO: 326997 - DNA, 122 bp, Homo sapiens
tatttttcttgcctctgcagatgaaaagttcagatcttatacccaactacttactcaccccgaatatttaagtcagtcttcctgaaagtactcagggtagcaagtaacaaaatgcaaacgat

SEQ ID NO: 326998 - DNA, 122 bp, Homo sapiens
ctggatttctcccgcctcctaatttctctctcctctgctttcccggcctctcgccccacccggagtccttaaaacagcccagctccctgcagggaggtgggcaggaccccagaggggaaggg

SEQ ID NO: 326999 - DNA, 122 bp, Homo sapiens
ggcccctgagggcactgtggtcacactgggccctcctcaggaactctccctgcgcagaggcgtgtcttagcactgcccccctccctagccccttatttggtggcggaagtggcctccacccc

SEQ ID NO: 327000 - DNA, 122 bp, Homo sapiens
gagaagcgtccgcccggcggggctcaagaaagcttggggacagctccatgttccttggggcggaatggcccaagaattggcctgggtaaccccctgcccagttctctgtcctcacttcgagc

SEQ ID NO: 327001 - DNA, 122 bp, Homo sapiens
caaagagccccgccaagtacatggggacaatggggtttccggccgaggcgagggagcccgcgccccacagagcacattacctgtggggtcctcagccccgtccccttcaggctccacttctc

SEQ ID NO: 327002 - DNA, 122 bp, Homo sapiens
cgtaagaaaaggtgggagggagtgcggctcgtgaacgggggcggcgatgggaaggaggtgcggcccttcgtcctgtcctcccaaacgtcgagtgaaaaacgaagcgggttctgcggcctcgc

SEQ ID NO: 327003 - DNA, 122 bp, Homo sapiens
ggatagaggtaagaggaccacactattttcagtgtctggagacctctaaagactctaattcgaccttggccaaaacgatccttaacagcatttatatgcttgatctcctctccacgcagccc

SEQ ID NO: 327004 - DNA, 122 bp, Homo sapiens
gttggggtcctgctggctggtgatgggctagtgagaagttctgggaaaaatcaccagcgccgggatgtggggagggaggcaacaagactgaattggttgaccaggaaggccaacccatctcc

SEQ ID NO: 327005 - DNA, 122 bp, Homo sapiens
cggactccccgggacaaggaaaacacagccccatagggacgacagcttgagaaccctgaccgggtccggcccaggccaggcggcgctaactgcgcggtccggagccggtccctggtcctccg

SEQ ID NO: 327006 - DNA, 122 bp, Homo sapiens
tcacttcatagactgagagatggggaggaacttgcctgagggccagtaggaaatcagtggcggagccagtggttggacaaaattactgctgagttctgtttttgttctgtctatgactcttc

SEQ ID NO: 327007 - DNA, 122 bp, Homo sapiens
tccaggctccttcccgctcctggagctgccgctgggtctcagctctctgctctgaggctacgccgcagctacagctccctgacctgttcctgttcaggctcccaggaaacctcagagtggca

SEQ ID NO: 327008 - DNA, 122 bp, Homo sapiens
cggaagactttgtttggaaaaaccgagtctgggaagcactccagctgcgcccacctggcacggtgaggcctttgccaggacacggattcgcattgcgtttctccgggaccagccaattgctc

SEQ ID NO: 327009 - DNA, 122 bp, Homo sapiens
cctggagcagggcagcccccagaacggcgccccgcggcccatgcgcttcccgcgcaccgtcgccgtgtactcgcccctggccttgcgccgtctcaccgccttcctggaggggcccgggcccg

SEQ ID NO: 327010 - DNA, 122 bp, Homo sapiens
agattaggaagtgagagtgggaagccagcacccaaagcaaacacaaggcaaacgggcacacgtgaccccttgtgccagcagcagcagacctcaggagggaggaaggagccaggtctctgcac

SEQ ID NO: 327011 - DNA, 122 bp, Homo sapiens
gccatgcaaccagatgtgttgtgagtgggcagcgtgcccccacgctggagtaactccgcacgcttctgtctttcacggtgggcgctcggggggagcctgaggaaaacccccttaggtacctg

SEQ ID NO: 327012 - DNA, 122 bp, Homo sapiens
gtatacttttccgtgccttcctccacccaagtcggaggagcgctcactcgctcggccactcggcgaactcgatcagctgtatctgggaaatgaaaaaagaaaaagaaaaaaaaaaaaaaaga

SEQ ID NO: 327013 - DNA, 122 bp, Homo sapiens
tgaacagagccttggcgcgatgctccttgggaggtgtagtttccacgcgtccagctcgaacgctgatgccccagcgcggtggtaaaatgagcccacgtgatcggaaaagcagcggtttccct

SEQ ID NO: 327014 - DNA, 122 bp, Homo sapiens
agtatatttttcatcaatatgaccttcaggttaattaagaaaacaaatcctttttgctatcgggccatattacctgagttgatagatatttccaattttaagggcctccaaagaggatcatt

SEQ ID NO: 327015 - DNA, 122 bp, Homo sapiens
ggaatgggtgaactaatacaggataaaaacgcttgccctacttcacctgcccccagctcccggctataaacagtaaatagctgagctgctgcagcactcaggcaggttggccagcgctgggc

SEQ ID NO: 327016 - DNA, 122 bp, Homo sapiens
tggtcgcggcgcagggagagcatctgcaaacgttggtccctgtagtgctttgaatttccccgaagagctcttagacccgccccgggagagtggggttgcgggggtggtagcatggggagctc

SEQ ID NO: 327017 - DNA, 122 bp, Homo sapiens
aggaggagaggagtagttgttgttgatgggtaacagtcgccaggactacggtgactatggcgcttgattcacaaggcaacggttgctataactcacaaaagagagagagagagggagagaga

SEQ ID NO: 327018 - DNA, 122 bp, Homo sapiens
ggagctggagtccatgccgcacaaccagttacctacggtccaaaacatgccaaagttttccgggctttcgcgcccacccgcatcgccagttttccggcgccagaaagcccgggagccacgtg

SEQ ID NO: 327019 - DNA, 122 bp, Homo sapiens
catttatttatagagtaaaaggcttagaaaagatctaatggaattgtctttaaatcaagccgatggaacaaagatgtgggcaacatttatggcataaatccaaacctcagcttccccttttt

SEQ ID NO: 327020 - DNA, 122 bp, Homo sapiens
aggcccgtgcatgctctgttgtgctctctgctcgtggcagctgggacccgagcctgggcccgggtaatgtgttgtctctgctgtttcctcctcagaacacggctctagataaggaggggcag

SEQ ID NO: 327021 - DNA, 122 bp, Homo sapiens
tgggttttctataaggggtttcctgctggacaggggcgtgggattgaattaaaacagctgcgacaacacctgtgttccagatccttttggggcaagggagtggggaacaggcactggccatg

SEQ ID NO: 327022 - DNA, 122 bp, Homo sapiens
cgcagtgcggggctgcgagggggcgtggtgcagcagggggcgtggcggggcggggcgtggcggctgagcccgggagaatgtgagttgttccctctctaattacctgtctgtccctccgaggg

SEQ ID NO: 327023 - DNA, 122 bp, Homo sapiens
tggggtctgcaactatggccctctgcttgtctttattaaagacaagcagccacacccattcgattatgtattgcctgtggctgctttcccactaccaggccagagctcaaagagcagttaac

SEQ ID NO: 327024 - DNA, 122 bp, Homo sapiens
ctggttctttctgttttggatgattattaattattaattcagtttctttaataatacaggcgtaggtttaggtctttgttttggttgatatgcttgcaatgttgaaagccgatagtttaata

SEQ ID NO: 327025 - DNA, 122 bp, Homo sapiens
cccgctgcgcaccatcaagagagtccagttcggagtcctgagtccggatgaactggtaagcggctctgtcctccccttcccccctcctcccctggcgggcggggccggacgggggctgcgga

SEQ ID NO: 327026 - DNA, 122 bp, Homo sapiens
tcctcgtgtgcagtgagtcagcgtgtcctcctgcgcccccatgcatgatgtgaatcagtacgcacgagtacttccccacaggcggtgcggaatcgtgtgtccgcgtgtggacggcaggccgt

SEQ ID NO: 327027 - DNA, 122 bp, Homo sapiens
agttggggcctccgcgcgcagtgtgaaacccggacgtggcagggcgtgtccgcgcccgaccgaccctcagctgctggggcgaaaacacaagtggacctcagtctttagaactaggggagaaa

SEQ ID NO: 327028 - DNA, 122 bp, Homo sapiens
gtggcagaacttagctgtaaagccacggttcccctggcccagtggctcagcactcagctgcgggtggtcctgcctcactaaagaacaggcctcacgcttccttgtcctactgcacctcgtgt

SEQ ID NO: 327029 - DNA, 122 bp, Homo sapiens
gggaagaactcgcccccagcgtccccgaggcccgccctcctcggcggccgggacaggcggcggcgggctaggggctccccgtgcagcccctcaccataggcagcaccaggccctggttgtag

SEQ ID NO: 327030 - DNA, 122 bp, Homo sapiens
cagtctgcccagatagctgctgcctcaggctgatttagggaccttctatgggctcctccacggcctgtgcacgtgaggggagtcctcatattagatccgttttacagaggggcaaactgaga

SEQ ID NO: 327031 - DNA, 122 bp, Homo sapiens
gggcggggcggagcgcgctcgggggcggggctcggggcggggaaggaaacgtgatgattgcgcaagcgcagaaaatgggccctcttggccgtcgggacttgtactgttggtgactccgtctc

SEQ ID NO: 327032 - DNA, 122 bp, Homo sapiens
gcgcggcgatgatgatgactacggtgaggatggtacagagcaccatggccgcgatgcccacggccagggagatgaaggagaagttccgggcctcgcgtgaagcgatctcggccgacaccatg

SEQ ID NO: 327033 - DNA, 122 bp, Homo sapiens
ggggtcccgagtgggggcggggcggtggcgagccttcccaggggtgaggtagaacggcgccgcgtgtcacccgcatcgagtactcggcgcccggccgagcccagctcgcgagggcgccggga

SEQ ID NO: 327034 - DNA, 122 bp, Homo sapiens
agctatgccgggcttacctacgtggctgggggtctcacttatgattctgagctctgtctgcgtgttggtcgtttcatgcacacctcccccacgctagtggtcggcggtcctggagggcggca

SEQ ID NO: 327035 - DNA, 122 bp, Homo sapiens
ccattattgctgtgtcaattagatgcgtaggcctcggagtctgaaacggaatgacctgctcgggtgataaataatttccaacagcgactcgccttactgcaggccgcctgtgtggaggtcac

SEQ ID NO: 327036 - DNA, 122 bp, Homo sapiens
tgcaggcggggctgcttctgcccagctctacaggggtagactacaagtcccagtacgcctcgggtcagcatctcttcacgtcactccccctccctggggtgggcaggtccggagggcggggc

SEQ ID NO: 327037 - DNA, 122 bp, Homo sapiens
cccacccccgggttcaagtgattcttgtgtctcaaccgccggagtagctgggactacaggcgcatgccaccatgtctgactaaatttgtatttttactagagacggggtttcgctatgttgg

SEQ ID NO: 327038 - DNA, 122 bp, Homo sapiens
taagtagccaagggggcaaggaaaatgctgccagggcccgggaattcgagtcgggccttgcgagcccagctggcttggcccccgggggaatagaaggtctagcgttggggttaggggggagc

SEQ ID NO: 327039 - DNA, 122 bp, Homo sapiens
agagaaccttctaagtgccaggcctcgcatgacattggcgtgtgcttcccaggcatcccccgacttcagccaacaggccgctgcagggcagacctgaacagacgtgcacagcctcaccggac

SEQ ID NO: 327040 - DNA, 122 bp, Homo sapiens
cgtggtgccgagaccccatccagctgtccatgtgttcacagtttgtgccttcctagcccacggttgggttttaccagagtgtgttcgaccagcactcagtagagtacactggggctatttct

SEQ ID NO: 327041 - DNA, 122 bp, Homo sapiens
cgggcctggaacagggtccctgaaacacccagcaagaggctggggaatgtctggagagcccggcatggtccggagcgtccacgcagccagcagctcacatcctcttgctcctggcggccgat

SEQ ID NO: 327042 - DNA, 122 bp, Homo sapiens
ttcctcttatcccaaagaccacatctttgggtctcggttaccagtctctccttttaaaaccggcagcctggccgcttgcctgttttgatggggtgtagagaaaaagaacgaaagccccttcc

SEQ ID NO: 327043 - DNA, 122 bp, Homo sapiens
cacagactgcggagtgggtcaggggctgcgagggctgccccaagtcctaccgggtttgcacgggcgcgcccggctccgcccgcaagtgcgccttcctgacttactgctgggtgcgcggggct

SEQ ID NO: 327044 - DNA, 122 bp, Homo sapiens
tcaagacaaatgccaactcaaaaggaaaatggggaggggaaaaaaaaatagcgtacccagcgtggaattcaatgcagctatgtctttcacactggcttctgataaaaggaaatgaacaaaca

SEQ ID NO: 327045 - DNA, 122 bp, Homo sapiens
atattatgcagctgtttttttgttttgttttgttttttaactttgtgtgctgatagggaacgatgccaagaatattattaagtgaaaactcatgtgggagagcaatatgcataatatgatac

SEQ ID NO: 327046 - DNA, 122 bp, Homo sapiens
acccccgcctctggggtctcaggtatgattccatcacgtggacacccgtcaacaactcaccggactgtattttcattcccatgcgaccggattcttgcacacagcctctttctggaacagag

SEQ ID NO: 327047 - DNA, 122 bp, Homo sapiens
actctgagccctggtgcatgtccctcagttggtcccgttccatggtgagggcggccaggacgctgctgagggagctgtgcactacagggagtggggcagaccatcagagtcctcgctcgctc

SEQ ID NO: 327048 - DNA, 122 bp, Homo sapiens
ccaaaaggcacgtaagcatttggccctaagccagagctggagctcaggcccccagagttccgtccagggcactccaggactcttcttaacaaagctatagaaattccgagctgaaaagaccc

SEQ ID NO: 327049 - DNA, 122 bp, Homo sapiens
ggaatggggacagacatactggcagtgatggagaagttgggaagaggtgatttagaagaccgtgagccgcagcaaaggatctgcttattgcagttgcgtccggtgttgttcctgctccgctt

SEQ ID NO: 327050 - DNA, 122 bp, Homo sapiens
acttaatgaataaatgaatggatacactggcattgagtacctcagccacattctgataaccgctttttgctttatgttttattctatgtagttaaaggagaatttaagcaagttacaagcct

SEQ ID NO: 327051 - DNA, 122 bp, Homo sapiens
ctgattggcccaggatgtgtagggggcggggcccggcggaagcgtatataaggccgggctcggggacgcccccccctcactcgcgcgttaggaggctcgggtcgttgtggtgcgctgtcttc

SEQ ID NO: 327052 - DNA, 122 bp, Homo sapiens
ctgtgatgtttgtttaatgttcccattttggttccaacaatcaagcttgtccatctacagcgtctaaataaagttagacttggctagagcatattctaaagacctggttagctgcttttaac

SEQ ID NO: 327053 - DNA, 122 bp, Homo sapiens
ggcggccccgtgcgtctgcgcgcgcgcgcgctcgtccggccgcgaccagcgcgtgggagccgctcttatagtgaccaccagcaaggacagcgcaggtgatgcacctgtagctacccgggcat

SEQ ID NO: 327054 - DNA, 122 bp, Homo sapiens
ccgaggctgggctttggtctgtcttgttctctctgggaggggtctggtgcgggtggaatacgtggagggagcctccgtggggggagcaactgctcccggtgttgcaaggaggacagagccaa

SEQ ID NO: 327055 - DNA, 122 bp, Homo sapiens
gcacagagccctgagcagcctctggacattagtcccagccccagcacggcccgtcccccacgctgatgtcaccgcacccagaccttggaggccccctccggctccgcctcctgggagaaggc

SEQ ID NO: 327056 - DNA, 122 bp, Homo sapiens
tccccggccacgggggcgacgtgatcccagctggcgagtggcgatgtcgccaaggacattcgtaggacgggacagtgcccactcgatagaaattccccgtgcgccgggctctgcgcagaagc

SEQ ID NO: 327057 - DNA, 122 bp, Homo sapiens
ccacgcagggctttgtcttgggccacccggacacggacgcgtccagctggcgtccctgggcgcgcggccggctctctctgggaatcagtcccttctactgtcatcgagtttggagaagcccg

SEQ ID NO: 327058 - DNA, 122 bp, Homo sapiens
acgaggagcagacgatctgggatctcacaagagaccttccagcgtttaggtgctggctcgcgtgcttctgaagtgtcctgtgagcgcctctgcggccactctagatccacaccggccatctg

SEQ ID NO: 327059 - DNA, 122 bp, Homo sapiens
acctgggtgccgccatgcaggatgtggccctggacgcgctggctgtgcagctgctggagccggccgaactggggccgggcaataccgtgcaggtggtcgcgtacaagctgggggccgcgcta

SEQ ID NO: 327060 - DNA, 122 bp, Homo sapiens
aatgtaccaaacttccggcaaacagttgaaagttcaggatctctttcttcactgaagcgacgaccagtcttcactttgcgcttgtcctgggggaggcatgctgctggtagaggaactgtccg

SEQ ID NO: 327061 - DNA, 122 bp, Homo sapiens
taaccataaaacttggccagatgaatgaggattcctgtggcacagcggccgtcacgcttccgacagtagctgcaattgcagatcccacgacaggggggacacacccaatcctaacagagaga

SEQ ID NO: 327062 - DNA, 122 bp, Homo sapiens
cccagggggccagaacatcaagtcagctagtgtgccactttgtatgtgtacaagtgcatgcgcctgtgctgctctggtgttggggaggagagggcaatgagggatgcaggatggtcagtaat

SEQ ID NO: 327063 - DNA, 122 bp, Homo sapiens
cggggcgccgggtctagcgcagtgagcggcgaggcgcggcggaggtgcagccggcagccccgagcggtacacgttgcataaccggcctaaagccccgagcgactccaggaccgtcagcgggc

SEQ ID NO: 327064 - DNA, 122 bp, Homo sapiens
acttccggtcaccccttctcaaccccacggcttagaaccaaatccaggtttccgctgagccgacttctcgccctctgtagccccccacggcctggaaacatggaaggagaaagtccagcaca

SEQ ID NO: 327065 - DNA, 122 bp, Homo sapiens
gacgggatgaggcagcgccggaagtatgacgctcatttctttaagccactagaagctcaccgtgagtccattcacagggccagagttccaagtgtgcggcgtgggcggggcctgcagaaagg

SEQ ID NO: 327066 - DNA, 122 bp, Homo sapiens
tggctctcaggaccactgcctacccaggggccccaccctgtgcaatgactcacgctggcccgagggcctgctccagttgtcctgctaagagctggaagcagctggccctgtgcagctgcccg

SEQ ID NO: 327067 - DNA, 122 bp, Homo sapiens
ggtccacagccgccatgaggctgccaaacaggaggaagtccagcagcccaatctgcaggtcgcctggaagacaagccgggccgcggggcagctgcagggcctgccacccgaggaggagggcc

SEQ ID NO: 327068 - DNA, 122 bp, Homo sapiens
ggaagcggttccagtgcttgatcttgccgctgtactgcgagatggacgacagccattgctcgtcctccatgaaattgccgggggtctcgccctccttgagccccttggcgtcgccttcggcc

SEQ ID NO: 327069 - DNA, 122 bp, Homo sapiens
tatgacccatggtgtagtcctggcagttcaagcactccccagtcactgggtcgcagtcatcggcgtggccattgcactggcagggctggcaacttggaaagccccagtgcccaggtaagcac

SEQ ID NO: 327070 - DNA, 122 bp, Homo sapiens
ctatcgcccgccgcacccctccggccctttcagagttgaagattcggatttccggggcatcgggcacagtggacagaaaaagagaagagacaagaaaacaactaagtagcaagacgaggccg

SEQ ID NO: 327071 - DNA, 122 bp, Homo sapiens
gactcttgttaactccctaagttcatcccattataagttcacccctggacattgcacaaacgcttctcaaattcctcccagatcttacttgcctcatttgcatgtggtttatggtattggtg

SEQ ID NO: 327072 - DNA, 122 bp, Homo sapiens
ttcaagcgattctcctgcctcagcctcccgagtagctgggattacaggtgcacaccaccacgcccagctagtaagaagactaccttttgaaattggcatctcttgctctaagagggccaact

SEQ ID NO: 327073 - DNA, 122 bp, Homo sapiens
aggagcattcatagttaagagcatgggatctggagtcgaactcatgtcacttattaacctcgtgtgcctgaataagttacttaacttccttctgccttcgtttttctcatctataacactcc

SEQ ID NO: 327074 - DNA, 122 bp, Homo sapiens
gcacgctgggaaacggagtccactcactcagtctattagctgtgtatgcctcccagagctcggtgcgctctgggaaattgagtcggcccgcgtgaacctgcgggtctcgggccgtgaggcaa

SEQ ID NO: 327075 - DNA, 122 bp, Homo sapiens
agaaagtaaaaaggttaatggatgaggggagggctggaggcgcccggcgtggggcttttacggcgaccctcccccggccgcccccttatcgcagcccgaacttacccgcggcgcagcgagta

SEQ ID NO: 327076 - DNA, 122 bp, Homo sapiens
ttgcgcattaaattatcatcagaaataactctttcaggtaagtttaattattccccatgtcgcagacaaggtgactgaatggaaaaatattcagggacttatccaaggtcacccagataggg

SEQ ID NO: 327077 - DNA, 122 bp, Homo sapiens
cctctccttggaaaggaggctgggcaaccactaaatcattcttcagggcttcccctcttccgcctttcccttttggtttaactaaggcagaaagtaacccacgaacagctcgagcaagcaag

SEQ ID NO: 327078 - DNA, 122 bp, Homo sapiens
agaactcctgggctcaagtgatcctcctgcctcagcctcttgagtagctgggattacagacgtgcatcaccattcctggctagagtatagagcttataaagtctatagtaatgtgcagtaat

SEQ ID NO: 327079 - DNA, 122 bp, Homo sapiens
tcgctccacgcatggggagatcagggttccacattttcgggtaagcattagccgtcctggcgctgcacgagcgtattctacaattccgaaaactactaacttttccgtctgcaacctttaat

SEQ ID NO: 327080 - DNA, 122 bp, Homo sapiens
ccagcgcctgttctcaggtgttgcacagcagatgaagtccaggctgcgggaactccccgtcgggacatctcatgcaggtctggaataaggagactccccagaagaagccactgcctgagctg

SEQ ID NO: 327081 - DNA, 122 bp, Homo sapiens
ctgaggccttgaagcccttggtccagttgagaaggatgccctgtggggagagataggcctcgtggctgctaacatatactggaggcagggtgctagggcctgtcactacctcctgcacaggg

SEQ ID NO: 327082 - DNA, 122 bp, Homo sapiens
tcgcccctgagagcgaggagacgcccctgacggccgcgcagctcttcagcgaagccgtggcgcctgccatcgaaaaggacttcaaggacggtaccttcgaccctgacaacctggaaaagtac

SEQ ID NO: 327083 - DNA, 122 bp, Homo sapiens
ctgccccgcgcgcgcccccgcctcggtgcgcgctcctcgctttcgcggctgggcgcctcgcgcctgtcccgcccgactcgtgcctcttctgagccgcagccccagccccagccccaatctca

SEQ ID NO: 327084 - DNA, 122 bp, Homo sapiens
gctgggctccctcagtgcacctctgctagaatctccccacgcaccccatcaagtttgtatcgctggctctattctcctgaacagaaaattgagatggagagaggtgaagtaatactgctagt

SEQ ID NO: 327085 - DNA, 122 bp, Homo sapiens
gacagcaccgtctccctaaggccactgggacgggataattcacgcacaccctccgtacggcgcctgcacacggtaattgctcattaaacagctggtgttgtatttttttctgacaccaaata

SEQ ID NO: 327086 - DNA, 122 bp, Homo sapiens
tccatatgttattaaatacgctttttgttttgctaatctatcttttgtcagtttaattcgcggagcctgaaattgtagagaattgcagagaaaaagttcctccctgacagtttggcaaggaa

SEQ ID NO: 327087 - DNA, 122 bp, Homo sapiens
gggcggctgagtgggaggttgcggtggccgctcccgcagcaccctgggagttgaagtcctcggagggtaacctcccaggggcacgccgggagttgaagtcctctctcagagggcggagggga

SEQ ID NO: 327088 - DNA, 122 bp, Homo sapiens
ctatcaccttccatttaccaatgcagcaattaccaaacaacagtgttaaaggtccctttacgctaaaatattactgagaaaagaatttgtaagtgtatgatatctaagagaaaagtttttaa

SEQ ID NO: 327089 - DNA, 122 bp, Homo sapiens
cagcaagaaagggggcgccgggggtgccctggcggataacaggcggtcacgcctgatccccgcataacagatccactctccgtgtggctacgagcatgaattgccgaggttgttttcctctt

SEQ ID NO: 327090 - DNA, 122 bp, Homo sapiens
ccggccccgcccctctggtgccgcgattggatccggcgggggtagcgttgatttgataggcgcagagagggtggggctgcgcacgcgaggccgggggccttgccgctgcctcccgggctggg

SEQ ID NO: 327091 - DNA, 122 bp, Homo sapiens
tcctgccttctgctgtcttggatctcctatgcacgggaaacctgttgaaggtaggacagccgaaaggtcagtattcagagtgagccgtttgcgaaggtgtgtgtgctttgcacactcacggc

SEQ ID NO: 327092 - DNA, 122 bp, Homo sapiens
tgagctgctccgagaccttgctgctcttctctggtgctgggtgctgctgagagtcgggcacgtccttctttggaggtttcacaggccggctgctctcccgccgctggcccagcttggtggtc

SEQ ID NO: 327093 - DNA, 122 bp, Homo sapiens
cgggccaggggtgtgggaggtcacaggcccctcggaggaggcacaagccactggcggcagcgtcgggtgggaggagggcacggccgtgctgctgtcagcagcagcttgtgggggaggggagc

SEQ ID NO: 327094 - DNA, 122 bp, Homo sapiens
gtagcctgacctaaccagttcccacagggcatagattttatcaccttgattttttagtctcgttaaaaaaaaaagttttaattcataggggaaagaatggaaggttataacattataatttt

SEQ ID NO: 327095 - DNA, 122 bp, Homo sapiens
gcgtggggctagctgccagtgggatggccccagccggaggagctgggcagtgcagcgaggcgccagctgtgcctgactcctgaggccttctgctcaccggaaggggggcaggtctgcagccc

SEQ ID NO: 327096 - DNA, 122 bp, Homo sapiens
cctccaggactggggcactgtgtcctcacaccgaggctacagctggaccctgtcacttcccgcttttgcatttataacagtcccaactgcagcagtggacaccctgccatcagaatctgctg

SEQ ID NO: 327097 - DNA, 122 bp, Homo sapiens
aagctttgacagaggatggctggttagctggtgttaggtgggagggactcgccacggagacgcgctcaaggagggatgagttgcgccaccaccacctaggtccctctctcgctatccggcgg

SEQ ID NO: 327098 - DNA, 122 bp, Homo sapiens
gaaggagccccgcccgcgccggccctggagtcgccggtgtcgccgccctgcccgcgggcccgccctcctggcccagcccagggccctgcgagctattttgaaagtgaccctgggctggggcg

SEQ ID NO: 327099 - DNA, 122 bp, Homo sapiens
gacttctatttatggaccctgcgttgacagtatgactcatggggtcctggagccctgctgcgtagtgacttgctgcacacggtgtattattactttcccaggaccaccgtaacaaagtagca

SEQ ID NO: 327100 - DNA, 122 bp, Homo sapiens
ggccggccgctcagggagcaggtagaggctgacagacgcatacactgcgggagggatggccggtcagctccaggaaaacccaccccctaccccccagccaggcaccccctccatctgagtcc

SEQ ID NO: 327101 - DNA, 122 bp, Homo sapiens
tcggtgaggactgaattgtgccagcgtctctaggcttcctctaggctcttgtggaacctccggcaggctcccatcatcggctcccatcaccggcctcttccaaaaccatcccttacgctaac

SEQ ID NO: 327102 - DNA, 122 bp, Homo sapiens
tggcctgctttcacttcctgacaactgagcttgtgctggtaactctcacccttcaggcaccgacccttggcctatggcagacactcctggccccaacttcttgccttgactagtaaccccta

SEQ ID NO: 327103 - DNA, 122 bp, Homo sapiens
ggcgtcgtcacccgccgcgcaggcctaaatctcaggtcttcaccgtcatctcccagcgatcgcagggatctcaggcactgaccgcgcccgtccctgcgcacccgagccccaccccacgcccc

SEQ ID NO: 327104 - DNA, 122 bp, Homo sapiens
tgaaatttcaacaggatactactttcacattggccaagagcaaaatgttgataatgtttgcggaaggctggggaaacaggctctgccctatatctgagggaagtgtgcattgggccagcctc

SEQ ID NO: 327105 - DNA, 122 bp, Homo sapiens
gctaggcgggctcggatatttttaaggccacattggaaatcccgggcatgctcccgccggcggagaaggcccagacaaaatgtgcgccaatcaggatacagacttggaggacgtttaccctc

SEQ ID NO: 327106 - DNA, 122 bp, Homo sapiens
ccaaacacccgaggccccaaagatggtgcaaagtgaacttcagctacagcccagagcaggcggacgagctgaagctgcaagctggggagatcgtggaaatgataaaggaggtgaggggtgag

SEQ ID NO: 327107 - DNA, 122 bp, Homo sapiens
gggtggaggagcacgtccgggggaggcctccagcagccccgagtgatgaggtggggttggcgaggggatgagtgttctaaacagagggaacacctgtgcaaaggctgtaagatggggaagta

SEQ ID NO: 327108 - DNA, 122 bp, Homo sapiens
cctggccccagcctggccctctcctgtggacccccgggctgggctgtcactgaggtgctccggctgacccagatcccctgggtgttgctaaatcaacctcggcaactgtagagtttgctgaa

SEQ ID NO: 327109 - DNA, 122 bp, Homo sapiens
ctggtccactccgcagaggcccgagcgggctcgcgagggaacgggttctccgagtctggccgggtaagccctttccagcacgcctagtattaggattctgcacatagctcgggtggaaaacc

SEQ ID NO: 327110 - DNA, 122 bp, Homo sapiens
aggggctcagcagcaaaatatccttgaatcaatactgctgcttgacagcatctccagccccgcgcccgtgtgtgctaacttgctagggggcagggcgcactctgccgctttggcttagttct

SEQ ID NO: 327111 - DNA, 122 bp, Homo sapiens
tgcatgctccggtttgccgggagcagcggtgctgggcgctgaggacaggccagtctccaccgcagccgcccctggtcgcaaatgcggatgccttcctggagccgcgccagcgccagaaatag

SEQ ID NO: 327112 - DNA, 122 bp, Homo sapiens
gccaccgtcggatccgctgtgttgattaccctttcctatggagaactgcctccatcaccacgcggtctgtgtgcgttgacatcgggactgatacaagtttcttgactgaagttcaggcaaga

SEQ ID NO: 327113 - DNA, 122 bp, Homo sapiens
ggggcggggacaagaagtgtgcatgcggattggttcctcgcggctgggggcggggccgcgcgggccggcggaagcggcgggcttcgggaggggcactgcgacggcgttgactgagggggcgc

SEQ ID NO: 327114 - DNA, 122 bp, Homo sapiens
aacttcgggccaggctgagaaagagcccagcacagccccgcagcagatcccgggcactcacgctcatttctatggggacaggtgccaggtagaacacaggatgcccaattccatttgaattt

SEQ ID NO: 327115 - DNA, 122 bp, Homo sapiens
atgttttatggctttcaatacatattgctatatgatagataatgtctcttgataaaaatacgaggtgctatggtgcagtccctgggacctctcctgctgatctgagcatgtgggtcctagag

SEQ ID NO: 327116 - DNA, 122 bp, Homo sapiens
gtggatagcagataatgagcaattggaagatgatacctgaaataggcagattacaaatgacgtttgtcatatttagttggatattggttgacttgagcactgatttgcaacatgtgtttggg

SEQ ID NO: 327117 - DNA, 122 bp, Homo sapiens
acgcgggagctgggggagggcttggggccagggcggggcgcttagggggtctctgagagccgagcaacccttcagtccatgaatctggccctggggaaaaaagaactaggggtgacccaccg

SEQ ID NO: 327118 - DNA, 122 bp, Homo sapiens
tgtttctgtttcagaaagtgagatctaggctcagcacaggggagcagattccctaaagctcgactctcatcatggctccctggggtaatgaatggagattcctccagtatgccggcattagt

SEQ ID NO: 327119 - DNA, 122 bp, Homo sapiens
ccagagcggcgaccaatgggagcccggcgcgcagggacggaggcgggcccgggccgctaccgagaagcacagggacccgacttcagtcatcgaccaatcagagctcacagccccccacaccc

SEQ ID NO: 327120 - DNA, 122 bp, Homo sapiens
gttgtacagttattagtcaaatcagaagatgaatgcagagagacagcactatggaagactcgataatggcgaaactgactgaagtgtataagcaaagtctcagactatgagtcctacatgat

SEQ ID NO: 327121 - DNA, 122 bp, Homo sapiens
gagagcagcctcagtgaggagcttccaaagggatttggtgtcattaagggctccctccttcgggacactgcatggagactggaggaaggagtcgggagttgtatgggcccagaccctgccat

SEQ ID NO: 327122 - DNA, 122 bp, Homo sapiens
gaaggagaggaagaagaaggaaaggtgggagttcgctgtgtgctcagcagaaagcagggtcgtcctggggaacactttgcagtttcaaagtacttgaggagggtaggccacaaaatgggagt

SEQ ID NO: 327123 - DNA, 122 bp, Homo sapiens
gtatttcctactaaacttggcacaacctcactctgcaacagcttaattacttactgtttccggtcctcaccctcccccacctcaccgtacacctccgcattcaatctggactcctccacttc

SEQ ID NO: 327124 - DNA, 122 bp, Homo sapiens
gaggaggagacaggcggacaagctggggtcagtggtccactcccctgtgtctgtcttaaccgagatgcagctggatgcttgcacgtggcagctttttcaaccacctgttgatagacgttcgt

SEQ ID NO: 327125 - DNA, 122 bp, Homo sapiens
atggatggaatggcaagaaaaactgccacttctgtgaacctgaagtcaaactgcccttgtcgtcaagataaaaggtatacatggtgtgagcctgggcatctgaaaggtgttgcagctttttc

SEQ ID NO: 327126 - DNA, 122 bp, Homo sapiens
caggtaagaggcctttatttcataaagataagtgggaggagtttagatatgaaaacaaaacgtaaacaccgcactggagctattgtggaaacaaaacaagactgtccatggttccccagcca

SEQ ID NO: 327127 - DNA, 122 bp, Homo sapiens
taggctcagccgccctggtgttctgactcttgttccactcactgcatgaaatgaagctggcggaatattgctacaaaagaatgatcgtggcaggaggcggggtagagcaatgtcaggtcacg

SEQ ID NO: 327128 - DNA, 122 bp, Homo sapiens
gaaaccgaggcccggagacatcaagctctagggaaggttaaagccggccgccaaattcctcgtccctctctccaagaggcggcatctgttttcctgcccttgggtcggcctggccctgagag

SEQ ID NO: 327129 - DNA, 122 bp, Homo sapiens
tgtaatagtctacatctcacagaccatcagggatgagttagaacactgttgttgatggtccggtatgaagagagggtaaacaaaatagctgcatttgcttgtcagctgagctcatataaaga

SEQ ID NO: 327130 - DNA, 122 bp, Homo sapiens
acaccccctcattaaataccggcgcccgacagacagaaacttcctggggctcccttcctgcgcctcccacgcttgtaactcttccagatgatgcctatcctgggaaggcgttagaaatgaaa

SEQ ID NO: 327131 - DNA, 122 bp, Homo sapiens
atctctcagcgctcagagctcagcgccgcccgcccgcccgggagtcttcgttgacactggcgtcccaacccgatttgtctcccgctataaaataagccgcccttcgagaggagagctcctgg

SEQ ID NO: 327132 - DNA, 122 bp, Homo sapiens
cgcccgcgccctccgggttttcacagcagggaaattgaggccacgggcccaggtcaggaccgcgcagcaaggaaggggagtgatccaggttctggggttccggattctgatccggctctgtg

SEQ ID NO: 327133 - DNA, 122 bp, Homo sapiens
cgagaagcagctgcgtgaactcaggacgctcctgagcagccgacgttttgagaaagccctcgccatcctgaaggcccacagctggggttggcccacatgcaacggccacctctgctctgctt

SEQ ID NO: 327134 - DNA, 122 bp, Homo sapiens
ttagccccgctgtggcagcccgggagggtgagctgacgcagcaagtccgggaggggctgacgcgcccgcgtggactcgcacagcaagatcctggacgcccgggatgtggatcagcgcaagca

SEQ ID NO: 327135 - DNA, 122 bp, Homo sapiens
ttttttttggaatgcctcactgtcccacccataacagtactgtcgtgtgcattcatttatcgaatacattagctaggggtgcgggtccagaggggagtgtcagtggagaagggaaacacact

SEQ ID NO: 327136 - DNA, 122 bp, Homo sapiens
atgaactgtggatgtggtagccagggctgccacttgccatgtgtggctctgaggaggttgcgtgagtgaccagtgagggggcctcaggaaactagggcttagccatcaagctcgacttcttg

SEQ ID NO: 327137 - DNA, 122 bp, Homo sapiens
atgggagagggcccttccttgggtaatgtcaactgcctgcctttgggtggtgtcctggctcgggggctgcttggtggggaggggagacagagatctacctcacccccaaagacccaggacct

SEQ ID NO: 327138 - DNA, 122 bp, Homo sapiens
cccgcgccccctaccccagggcctctgcattcggccccacccctgagggccggccgggaacgcccctggaccggaataatttccagggggcaagagctttcgaaccaagtaaaatagaactt

SEQ ID NO: 327139 - DNA, 122 bp, Homo sapiens
ccggagagtcctgttccagacttctcagggtttttacagcacaaacaactgcatacggcccgaggggaggctgaaaaggacttgtgtgtggtggttttattgcctgtcatcactttgctggc

SEQ ID NO: 327140 - DNA, 122 bp, Homo sapiens
caagagcatgcggggtgttgtagttctaagaagcgaggcttgcccgattctgtgcctgtgcgcatgctgaaagcaggggcgggaccggggcggtcttccagcagggaaaatggcgctggcca

SEQ ID NO: 327141 - DNA, 122 bp, Homo sapiens
ggaagaaagtgtttatgaaaggagaaggctggggcccccgtctgagtgtgtgtcgctgagcgagtcctggcagagtcatcagatctcagcttttgagtggtaacaaagacttcagatttaaa

SEQ ID NO: 327142 - DNA, 122 bp, Homo sapiens
gttattggagccctgttacagagcagtggacctgagaggactgcacttttcatcagggtacgtaactattaattggacatgcttgagatagacagaagggaaaatattcttttgtaattcac

SEQ ID NO: 327143 - DNA, 122 bp, Homo sapiens
ggaagcagtgtgatggggtcagaagtgtaaacttgcgcaacatcctgctcccaagaaagacgtgcacttgctacttcatccttcgctccatcttggtcctcccaactggagagaggacagcc

SEQ ID NO: 327144 - DNA, 122 bp, Homo sapiens
gcgaagatccaggagactccttgcaacatgcaattccagaattacgagaatctgcttttccgcgctgtcttattcgtcctggctgggggaagattcagcattctgcacatgattcggaattc

SEQ ID NO: 327145 - DNA, 122 bp, Homo sapiens
ccggtccgctggtcctcagcgagtgcccgcaggagtcctcgggcgggagcagggaagtggcgccgccaccgccgcggcccggaccgccccgccctctggggccccgggaggctgaagcccag

SEQ ID NO: 327146 - DNA, 122 bp, Homo sapiens
gacagcttcccgtgaactgcaggggagtcccgggacgctgtcctccagcgaggtggggaccggctatgtccctcagttccccctcggtcctcgggccacagggacattagactagggggtca

SEQ ID NO: 327147 - DNA, 122 bp, Homo sapiens
ttcattgttttttatcttagtttgcagaaaggtgttgaaatgcttctctagcccaaacagcgacatgctaaagtccccttcttcagagtcaatagagtagttgttaaaggttttaaattgta

SEQ ID NO: 327148 - DNA, 122 bp, Homo sapiens
tctccctcctctcgccagccggccctaaaacatcaaggttagtcaggactctatatttaacgtccggaagattctgtgaactatatgccaaccttgccctagtaacggggctcccccctcct

SEQ ID NO: 327149 - DNA, 122 bp, Homo sapiens
cgtcctggctttataacaacccagtctcagggaacgaatctattcctttagaaacagtcccgtttcatgagagtgagagctcacttgatcccttgagaatggcaccaatccgttcatgtggg

SEQ ID NO: 327150 - DNA, 122 bp, Homo sapiens
ggcggcgcagtgccgctatggggacctggcgagcctgcatggcgcgggtgcagcgggacccggttctgggtcaccctcagccgccgcttcctcatcctggcacactctcttcacagccgaag

SEQ ID NO: 327151 - DNA, 122 bp, Homo sapiens
ttctctactcacctgtctccgaatccgtcgtggtgtttcaagcgagtcaagattccagatcgcgccccaggctggactcggaattactgccccgcgggtctgcattttcacagcggcaggtg

SEQ ID NO: 327152 - DNA, 122 bp, Homo sapiens
aatgcgcatgcagatgaggcgggcgggcgcatgctaatcgcatgcaaatgaggggcccgccgctgccgcggcagcgccgcagcttcccggatccgagcccagacggcggcggctccggcagc

SEQ ID NO: 327153 - DNA, 122 bp, Homo sapiens
tcgtgcgggggactgtgtagtgccctggcgtgtggggtgtgagtgtgagatctgggcggccgcggacaggggccgccccggagggggaggcgtcagccctgcgagactcgcgggcgtgtcgg

SEQ ID NO: 327154 - DNA, 122 bp, Homo sapiens
aggcgcagccagcggcacttcaaagcgggtgctcctcgcacttaggctgagtttagccggcgggagcctggagtccgctcggcacgagcgcggggacgcgggagccgcgcgggacccaagca

SEQ ID NO: 327155 - DNA, 122 bp, Homo sapiens
gggacacttgcgccctcttcgtgaggaaaagcatcttggagctgggttaggaacttggggcgcccaggcagcttcccctctccttgcctccctccacgtcgcgtttctgggaggacttgcga

SEQ ID NO: 327156 - DNA, 122 bp, Homo sapiens
gcattgccatattgatgctgacaccggcatgatttcacctccaacatgaccaccggattccgcccaaatggattgactaatctagaaagatcattgatttgtaaaattggaggtggaaaagc

SEQ ID NO: 327157 - DNA, 122 bp, Homo sapiens
tcctcctccccccatgtttgccttggcccggggtcccgggtgactcatctgttgctgagccgctgataggggaggccagacccggggaacccaaattataggcccaggagggatggatgcgc

SEQ ID NO: 327158 - DNA, 122 bp, Homo sapiens
taaaacaaaagaaaaaagatgtgcctagatcctatgggaagcttaggataagaagggtctcgtgggttccacctggaatatgaccagttgcctgagaccagctcgagtcctgcaggggcagg

SEQ ID NO: 327159 - DNA, 122 bp, Homo sapiens
tgataacagagtggcatgactatacttcataaaaatgtattgtgtttgggagatggacaccgtaaataccctgacttggtcactatgctttatatgcatgtaatggaatttctcatgttccc

SEQ ID NO: 327160 - DNA, 122 bp, Homo sapiens
atggggacccagggggaggcctggctcctgcacaaaagctccctggactgtgtgcaaggccgtggccctgctctgtgcagctgccttccgcccttgtccttctcagctggtggacagaaggt

SEQ ID NO: 327161 - DNA, 122 bp, Homo sapiens
gccatgtaagcagagcggacaactctgagggcgtggctgggcggggttcttggggcagcccggcgccactgccggcatctacgcaccctgaacgcgcccgatctggtctcatctcggaagct

SEQ ID NO: 327162 - DNA, 122 bp, Homo sapiens
ccgagagaggcggggctggggcccggacgcgcggcccagggggtggggacgaggcaggttcgaaggggcggggctgaccaggccggtcccccgggaacaggaaccctggtggacgggtccca

SEQ ID NO: 327163 - DNA, 122 bp, Homo sapiens
ccgacatgtcgtaggcttcggtgtcctgctcgccgccgccttcgtcgttgtatttgatgacgttgtcccgcatgtcttcatcctcgtccgagctcaggtggctcttgtggtggcgcctgagg

SEQ ID NO: 327164 - DNA, 122 bp, Homo sapiens
cttttgcgcgctgccttggtggccagctgcttccgcggtgccttgccgccggtagacttgcgagctgtctgcttcgtccgggccatagttgagaaagctatgctctgaaagcaagcagctga

SEQ ID NO: 327165 - DNA, 122 bp, Homo sapiens
ttttctccactgacttaacttttcttctcacatcactttcttcagtgctttcagactcatcgctgagtttgagttttcttcctggctttttgcactcatttttgcagattcgttttcacttc

SEQ ID NO: 327166 - DNA, 122 bp, Homo sapiens
agcggccaaagttaccagcatcagcacaacacgcgcaacgccaggcactccggtccacgccgcactgtacatggtgccgtctgagggattcctccatccagtcaggagacaaccccagacaa

SEQ ID NO: 327167 - DNA, 122 bp, Homo sapiens
cgcccccacttcgcgcagccgagtggctaaggaaatcttaagcagggaggggaagccagacggttaacacagacaaagtgctgccgtgacactcggccctccagtgttgcggagaggcaaga

SEQ ID NO: 327168 - DNA, 122 bp, Homo sapiens
ggcttgtgacccatggggctcttgcccatcacagtgccagcgccagggggtggccagtggcgaaccacgtgccggtaggaggtggccaggtagtcgaagtagttgatgttgagtttccgggc

SEQ ID NO: 327169 - DNA, 122 bp, Homo sapiens
taacttagtgtgcaggaaaggtgtgaagtggcctgaatctgaggagcctggcatgccttgcgagggaatttgaactttatcacacaggcaatggggaaaatcagaggaagatttaaccaggg

SEQ ID NO: 327170 - DNA, 122 bp, Homo sapiens
ccaggccgccgccggctcgggccactgcatgtggcaggtgctcatgccgcggggcactcccgagaagaccaccacgggcagcaccaccacggctgaggccacccacacagccgcgctgaccg

SEQ ID NO: 327171 - DNA, 122 bp, Homo sapiens
ctgaccaagggcgctgcactaggcaacaggattgggccaggaggatgcagaaacacatagcgctgggactcctgctgtgcacagacaatcaactgccaggcatattgcccagagatgcagtg

SEQ ID NO: 327172 - DNA, 122 bp, Homo sapiens
ggggttctaggcggcatcgcccggtggcagggtgttcccagggtgaagccgcagggttcccgggtgggggcggggaaggctaaatgcggccggccggtgagtggcgggagcagctgcagccc

SEQ ID NO: 327173 - DNA, 122 bp, Homo sapiens
aatgaatcccaaactttgggcttacctctttctgctggctggctcgccaaaatatgttaacggtagaggatgtccaggttcttggcatcttgaacaaacaattggacaaaatgcacaaacaa

SEQ ID NO: 327174 - DNA, 122 bp, Homo sapiens
gtaaataacagagactgttctacagcaccaggaggaattctgactgccaatgggtgaagacgaggcacccagggaaataaaggggcagggatggggcagccctccacgcagaggagacgcct

SEQ ID NO: 327175 - DNA, 122 bp, Homo sapiens
cacttcccagtttagtgtattttttctctctaggttcaaaatcaggttgacctctacttacgttttgttagattttatagttattatattatcaatataataccttcaaacacctagtattt

SEQ ID NO: 327176 - DNA, 122 bp, Homo sapiens
cgccagcgcccgacacatggtaggcgcttaatcaatgcctgttcggtgaataaataagaccggggactcctccacagacttctgtcattaagtcaaccagtcagcagagatttccttctccg

SEQ ID NO: 327177 - DNA, 122 bp, Homo sapiens
ccacccggcgcgggagcgtgtcattggccagggacatggcctcgtggagtggtggggtcccgagggctgcctcggccccctcgcctcccagcggcacagcccgcttgggccagcacctgcag

SEQ ID NO: 327178 - DNA, 122 bp, Homo sapiens
accgtgtccagctgcaactgcaagttccactggtgctgcgcagtccgctgcgagcagtgccgccggagggtcaccaagtacttctgtagccgcgcagagcggccgcgggggggcgctgcgca

SEQ ID NO: 327179 - DNA, 122 bp, Homo sapiens
cctccccttccaggtgaacctgaacaccatcaagcgctgcctcctcatcgactacaaccccgactcccaggagctggacttccgccactagtgagtgtcccagcaggatgggagacgagggg

SEQ ID NO: 327180 - DNA, 122 bp, Homo sapiens
ggggcgggggagaggagatcgggcagcgattctaacttttgcctttcggagatacagtggcggggcaggccaaacggcatctctgcagagagaagccgctaaataagcaccgtcctttaagt

SEQ ID NO: 327181 - DNA, 122 bp, Homo sapiens
tctcacttcctcttccttcctcctgctggccagagacacattttgcatctgcaaggcatccggagatcagccgcgaactctcctcccgagcggacgctgcggagttgcagccgccgcccccg

SEQ ID NO: 327182 - DNA, 122 bp, Homo sapiens
ctggcagatgtttgtactgggagattcagatccatccaggcccccactgttaatagcccacgggaaagtccctgcagtctctcagggaagtcattctgtgtagaatctgtaatttcacaggc

SEQ ID NO: 327183 - DNA, 122 bp, Homo sapiens
aattggctccaatcagggaaagccaggtctgggctttataaacagtgacagcagctccaccgttagaagagcaggtagaaaggtcacactggaaacaccatttccaagcacagagtaattac

SEQ ID NO: 327184 - DNA, 122 bp, Homo sapiens
gcctgtggggtggcggcatcagtaacgggcacaggaagctttctcaaggatgagtgaagtcgctgcaagagtgagaattcaacaagcaaaggactcctttgctgaaagcacattcatctatg

SEQ ID NO: 327185 - DNA, 122 bp, Homo sapiens
aataatcattccaagaacagagatgttcttaaggactgttgtcactgcatgtgggtaaaccgctgtgcataactggtttattgagatactcaacagtggcaggatttcagtagtggtgtaaa

SEQ ID NO: 327186 - DNA, 122 bp, Homo sapiens
acgcactggctcactcgtcctctgcgaacagggactgcctcccatcaagacctcagcactcgaacagccatttagcacccgttttcaccaagaagcagccgttttcgagtcccccgcccggg

SEQ ID NO: 327187 - DNA, 122 bp, Homo sapiens
cgtggggagtgagtggtacagcgtgggaggcctcagatcaggtgcctttccgagtcctcacggcagcctctgcagcaggcgtcccagccacacctgacaacctttcctggggctcactttgc

SEQ ID NO: 327188 - DNA, 122 bp, Homo sapiens
aggctgcgctggggtcagggtggaagcccgcggggccagcggcgttgagggaaggttctccggaagcagccgctgttctggcttggcgcaagtgcgtgtggacgacagcaggatttcctgcc

SEQ ID NO: 327189 - DNA, 122 bp, Homo sapiens
acgccggcgaccagtaccagggcactatctggttcaccgtgtacaagggcgccgaggtggcgcacttcatgaacgccctgcgctacgatgccatggtaagacccgagcccgcgcccgggata

SEQ ID NO: 327190 - DNA, 122 bp, Homo sapiens
cactcagctcgagaccgcggtccccggtgcctggcgcccagccgccgccccttccgcccccggccctgcgccctcgggctctgcggtccccgcagcccgctctctcaacctcggtgggcctg

SEQ ID NO: 327191 - DNA, 122 bp, Homo sapiens
ctattctgttactattaattgatttttcgcctggttattggtctcattttctttcctcctcgtacgcttgttttttttcttttttaagaattacaattttttattccttttatatccactgt

SEQ ID NO: 327192 - DNA, 122 bp, Homo sapiens
cttgatgaacttcctcttcttctcatgtctccggtaggccacgtgcatggccactaggagcgctggcgtggacacgaagatcagctgcagggcccatagccggatgtgggagatggggaagt

SEQ ID NO: 327193 - DNA, 122 bp, Homo sapiens
cagcttgaccccgagcaggagccaggccccagggaaagctccttgccgccaggcaggaagcgaaagggaagaccagagtcccccgagccaggtggaggggcttgtggaggatgcctggggag

SEQ ID NO: 327194 - DNA, 122 bp, Homo sapiens
gtgtgtcatgcagctggaaggctgcggacgggcggcagtggaggggcagccccctggcttcgggtatggatcactggatgctgctgctaaccaaatgtgaacctcggttttcatatttgtga

SEQ ID NO: 327195 - DNA, 122 bp, Homo sapiens
cgccccaggctgcatgccctagcccaggactgggctcacctgggagagggctctgaaggccgctgtcctgcccagcttctccccgcctttggataccgactcggccgactgcttggccgtct

SEQ ID NO: 327196 - DNA, 122 bp, Homo sapiens
cctaaggatgctctccagcgcatcagagcccttgtgcaggccactctgcctccctgatatcgctgctcccccagtggagctgccctgggcacagctgctggattttcagatgcccagtgctg

SEQ ID NO: 327197 - DNA, 122 bp, Homo sapiens
cccctttcccccagcctgtcagcctggccgctatggcaaacgctgtgtgccctgcaagtgcgctaaccactccttctgccacccctcgaacgggacctgctactgcctggctggctggacag

SEQ ID NO: 327198 - DNA, 122 bp, Homo sapiens
tttggacctacagcttgttatcctgcatgatgttaagctagtgccaacgtaagaatatcacgaataatggattcccatgagatttcatgaatgacccatttgtccctagagaaaacaaaaca

SEQ ID NO: 327199 - DNA, 122 bp, Homo sapiens
aaggcaggaggccgggccaggagaggccgactggaggtcaagttcggaatctgcagaggccgcggaaagtcaaaagtggggcctgggaaggccaccaggaggcatgaactgggctgggccaa

SEQ ID NO: 327200 - DNA, 122 bp, Homo sapiens
ctcccaggagggtggaggggggagggagggacaagacgccgcctgtagggcgacgcaggccgcagaccaggtctgtgctatatcccgacatggataggtgtggtggaggaggacatgaaaat

SEQ ID NO: 327201 - DNA, 122 bp, Homo sapiens
gtgaggccccgctctctggctgtagttgtgcaggtggactacaaagcccgagatgcatcgcggcccctcctccgaggcccctcagcttccgcagatcgcctcagagtggtcccagcgagaag

SEQ ID NO: 327202 - DNA, 122 bp, Homo sapiens
gccagcagcccatctgggatcagcacagaaccaagagaagcttcttaacatggggaagagcgtctggaaaattcacacttcccacaggaacctgtgcaagtctgggaacaggagaatccctc

SEQ ID NO: 327203 - DNA, 122 bp, Homo sapiens
cccgctccgtgcctcccctcccagcagctccccctccccgccccgcccggctccggctcccggcccctaccgcgaggcgcctctccagccggacctccgccgccccctcccgccgcctccct

SEQ ID NO: 327204 - DNA, 122 bp, Homo sapiens
aagccctctgagagcattcacaggggtaagacaggttttattcctccaaagcaatttggtcgaactctgcagctcacctatggggaaggctggcaaaattccaaaggtgattagtgtcgttt

SEQ ID NO: 327205 - DNA, 122 bp, Homo sapiens
gattcaaggaagcaccacgtgatccctaaggatcccaaagatgcgtcgggcatgcatgggcggtgtgagggtgcgtctccctgacaggtgtccccgctgggatttcgaggtacggcctgcct

SEQ ID NO: 327206 - DNA, 122 bp, Homo sapiens
cgccggaggaggatggcacctccgggagtgcagggggcgctgaggcaggagtggaggaaacgccacctcttgcccgcggcgctggagcctccacggttgtccggctcccacagcggaaggcc

SEQ ID NO: 327207 - DNA, 122 bp, Homo sapiens
gaaccctgggaagggctgacacgggctttcctggttgtcgagggggcggagagagcaggccgacaggacagtgaggctcgccctccaagctccctcataggcctctgaggagtgcagagttg

SEQ ID NO: 327208 - DNA, 122 bp, Homo sapiens
tttatttaagaactaggaaatccttgatagagatgctaagcttaatgatgaggatacagacgttaaagccagtagagttcggactacccactagctggaactctgcttcctgcctcagctgt

SEQ ID NO: 327209 - DNA, 122 bp, Homo sapiens
acatctattcagtccctcaataatcttgggtttgttgtttatacgagagtgccagctcaacgggagaagagctgaaacccattatttccctttgaacatgttcttcaccgggaatggcagga

SEQ ID NO: 327210 - DNA, 122 bp, Homo sapiens
ccgctcctccgcccgaccgcgcgctcgccccgccgctcctgctgcagccccagggcccctcgccgccgccaccatggacgccatcaagaagaagatgcagatgctgaagctcgacaaggaga

SEQ ID NO: 327211 - DNA, 122 bp, Homo sapiens
cctgagggccgctggccaattggcgcgctcgtctgaatggcgtttggcgcggagcagtgacggctgcgataatagcgaggcagcagtgcagctttcagagggtccgggctcagaggggttat

SEQ ID NO: 327212 - DNA, 122 bp, Homo sapiens
cttcctcccccttccctccctccttccttcctcccccttccctcccttgctttcttccttcgtgtttgtgcacaagctcagcaagcccgatttaaaacttttaacaagaaagaagaggcggg

SEQ ID NO: 327213 - DNA, 122 bp, Homo sapiens
attgacgcacgcagagccagatggggcagggctcctgagcagattgacgtgcaaatggggcggggcctagcgtgtgcatccagtaggggcgggagcggcgcgggggccgactccgcctctcg

SEQ ID NO: 327214 - DNA, 122 bp, Homo sapiens
ctggagctggggaactccagaattatagggaagcctcccaccacgctcatcccaaatttccggatgctataatgccaggcttggggaaagaggagaatttagttggttagctggtgcgtgct

SEQ ID NO: 327215 - DNA, 122 bp, Homo sapiens
gctcctgcccgacgttgtggttcttcagtgtctggaaggaggcaccctcagtcatgcacccgcattcccacacctgctgcttctcgggcctgcaatgttcgcccctgccccacttgccctca

SEQ ID NO: 327216 - DNA, 122 bp, Homo sapiens
tgacttttcatctaggggctttcatgtcttctaggggcttagagctcttcgttggttcttcgcatctgcgcactagtaagggaagaggggaagtgtggaggatctcaggggttattttatgg

SEQ ID NO: 327217 - DNA, 122 bp, Homo sapiens
gagttagatggtcatcgagacccaaaacattagagccggaaggtgttaggaagatataaacgtagagagcgagtaacaggaggcaattccacggccaaacaggtttatttacaggaaaagcc

SEQ ID NO: 327218 - DNA, 122 bp, Homo sapiens
tgtgttcccagaaatgagtggggaattccacccccaaaaagcagctgcagggccagtggccgggccaaacttctagttggagacgagactcagctttccgctggtacaatgcggagcggagc

SEQ ID NO: 327219 - DNA, 122 bp, Homo sapiens
gaaatgcacacaagattacacagcaagtattatcgagtgcgtattacatttgaagtgctgcgttgagggctttacatggattagttcattaaactcaatgaattaaatactgttatcattct

SEQ ID NO: 327220 - DNA, 122 bp, Homo sapiens
ctcagatgatctgcccacctcagcctcccaaagtgctgggattacaggcaggagccactgcgcccggccaatacattttttttaatagaggaggactataaaacctatgggaagctctgatg

SEQ ID NO: 327221 - DNA, 122 bp, Homo sapiens
tttcttctttttttaaaatcctttttcttgtaaagacagggctggtccatttagggagaccgcgcacggagggagctgccttgggtggtcgcccagcgaatctcctccggagcccgagccgc

SEQ ID NO: 327222 - DNA, 122 bp, Homo sapiens
tcaccgcgtgaggacacagtgggaagacggccatccataagccggaaaacgagcccttcccggacacccaatctgccttgatcttggacttcccatcctccaaaactgcgacaaataaattt

SEQ ID NO: 327223 - DNA, 122 bp, Homo sapiens
gaatacactcgtaatacccttaaagagcttgaagctaaagcctataaacagattgatgcacgtggtgggaaccctgagctagtagccttagtaaaacacttaagtaagatgttcaaagaaga

SEQ ID NO: 327224 - DNA, 122 bp, Homo sapiens
tcctgaaatgaaggaatgttctctcccattatttcttctaacagcttggttagcaagctccgccctcttctttatctgaccttctaacgacctcaccagatgtgtgaagcagcccggctcca

SEQ ID NO: 327225 - DNA, 122 bp, Homo sapiens
aaggcacggtgctttggcaatttggatgataaataatatttcttcgctttgtcccccccacgctgcttctccctccctagtccccctctttttgcagcccaaccccgacgtcgccccccgcc

SEQ ID NO: 327226 - DNA, 122 bp, Homo sapiens
ggaagcagcaataccaactatcacgtggcctgactcactgatacataacactcctaccctcgcaaaaaaggagtaataatgtcatcaggtggcaaataaaggctcatgcggtaactgaaggc

SEQ ID NO: 327227 - DNA, 122 bp, Homo sapiens
ggattggggggtccccctatcgcccagactcggtttgcgtccttccttcaaccttagctgcgggaccctgccacgcgcgctaacagcattatgtcctctgcaccgaaacttcccaccaagta

SEQ ID NO: 327228 - DNA, 122 bp, Homo sapiens
cagcgcgccggagcaacatgcgctaagtgtaggactccacaagatgagaggttactgcagcgcacacgataatgcctgccctggaggggacctgcgacctaaactcagttctttttacgctg

SEQ ID NO: 327229 - DNA, 122 bp, Homo sapiens
gggcggtgctgacttagggcaggcaagggtgtgtgtgtgtgtgtgcagagcttgccggaacgtgagctgttcatgcacgcgtgcattcaacatttgcagagtgcttactgtgtattggagat

SEQ ID NO: 327230 - DNA, 122 bp, Homo sapiens
agcctccgacccaggtggtctggagcctgccgggagagtggtggcatctgagaggctggtcgtggactgtggttgggggaggtgggagctgttttaaccgtgtgccccctctcctgtgccgg

SEQ ID NO: 327231 - DNA, 122 bp, Homo sapiens
aacaattaattataaaccatccattaattgtgtaaagggaagaggggattcactcacacccgtggaggaggcaggatcgcctttcctaaagtgatagcatcaatttctgctggcttcttaca

SEQ ID NO: 327232 - DNA, 122 bp, Homo sapiens
taacttcgacacggcagtctccctctgcccattagcatggtttggaggcttccagagagccgggggagccaggaaataaatcccttctgtgagggacgggaccggctcagccacggcagctg

SEQ ID NO: 327233 - DNA, 122 bp, Homo sapiens
ccatcactcttaagtaccgactccagtcctggctgcaaggcatgctgggaggtgcagtctcgccggccggcctacactccatcttgcgcagtcagagtccctgaatgccttaacccggaatt

SEQ ID NO: 327234 - DNA, 122 bp, Homo sapiens
tgggaacacctggagtctccgcgggcaggtgagcttcagaggttcggggagctttcggaacgagcattcctggccggtgcgtcaccctgcagtgctcttggccttttcttcctttcctggaa

SEQ ID NO: 327235 - DNA, 122 bp, Homo sapiens
gtttatggatttcacctgtgccctgggcctcgctggacttttctagatatctacaagtggcggcttgctctctttctcctcatcccagtactgtggagtgtggctacaaaaggtttgaaggc

SEQ ID NO: 327236 - DNA, 122 bp, Homo sapiens
cagcgactgccagcgaccgctgaccgccccgctatggcaagtgcgccaaaactaccaccccgactgcgacgccgccgtcaacagccacgtcaacctggagctccacgcctcctgtgtgtacc

SEQ ID NO: 327237 - DNA, 122 bp, Homo sapiens
ggccttcctgtcctacattgaggtgctgactgacggtagtctggtgggctgggagcaccgcggagcgctgacgctggaccctggggcgggcgaggccgtgctcagtgcccagctccgcagtg

SEQ ID NO: 327238 - DNA, 122 bp, Homo sapiens
tcttccagcaagtctgcttcttgcgggaatatttagcccttctctgaggcttcctgtccccggctcacattcctcaaaaaccctgtgtgctcctgctcagaactcagcaccttctgggaagc

SEQ ID NO: 327239 - DNA, 122 bp, Homo sapiens
aatcaagtttgaatttctctatggaagactgtggcacctggaaccacagagcacgttccccgtgacatgggatgtgacactgcttatcagaagccgcctgggtcttcgggacagagtctact

SEQ ID NO: 327240 - DNA, 122 bp, Homo sapiens
aacaacaacaacaacaaaaacctataaagtatctagtgtctaatctagagtgataggaaacgtatattatactgtctgtcccaatatgtaataggagctcttatccttgttttagagcagtt

SEQ ID NO: 327241 - DNA, 122 bp, Homo sapiens
tgggttgctactacctacaagatgcagtccagatgtcttgacccagtctctaaggaccctcgccatctggcctctttctaccatattcagaggaaaaacttctagcagccagggctctcttt

SEQ ID NO: 327242 - DNA, 122 bp, Homo sapiens
ggaggcagccaggacttccgcctgctgggccattgttgcaggaccacagcttcgaggttgcgcaacacctttagtaaacacttcctgaatcagagacaagaatgaaccagggagtttcattc

SEQ ID NO: 327243 - DNA, 122 bp, Homo sapiens
tcggcggcgtcctggccgggtcagctgtcacaatctcagtgtctgagttcaagccaccctcgtgccacgtgccaacggccaagagcacaggagtgccgcccccgacgtataagccaggcctg

SEQ ID NO: 327244 - DNA, 122 bp, Homo sapiens
tagggcagatcaatgagaagttacccttcggatacactgtcccatgacttctccgtccaccgacagtccttcttaggcccttggctttcccatgccacttatacaatctttcaaaacatttg

SEQ ID NO: 327245 - DNA, 122 bp, Homo sapiens
gcacctatggccccatggcgggcgcctttcggtgtgtgttgggtgcagggcagcgcctcccgggagcgccgggtcccccgcctggagcccgcgcctgttctccctcccttcctcctccttcc

SEQ ID NO: 327246 - DNA, 122 bp, Homo sapiens
gaaccaacttccttcccaaggcaaccagagatgtttaagtttccatctatgctgagaaatcgactttgacattaaacatcaattgatgtacaggaagagattggaagggaatataccaaaac

SEQ ID NO: 327247 - DNA, 122 bp, Homo sapiens
tggggcacagaagaggttgtgaggaggctctggtggggcccgtgcaggctccttttctaccgcagatgtgtcaatgtccagaaagaagtcatccaggccagagtcccccaagtaccgggagc

SEQ ID NO: 327248 - DNA, 122 bp, Homo sapiens
cacacacaatgggcctgcagctcacaggcacacacacagaagactggcagctcacgggcacgcacacagctgacttgaagctcatgggcacacacacagaagactggcagctcacgggcagg

SEQ ID NO: 327249 - DNA, 122 bp, Homo sapiens
tggccgagtgctcaagaaagggatttaggaccgaggaatagatggttacctgtgaggactcggcctgtcatctgtgtaagtcatgtgttgcagaagccctgagatgccagaacttgagattt

SEQ ID NO: 327250 - DNA, 122 bp, Homo sapiens
ccgcaccgctgccccgactgtgacaaggccttctcgtacccgtccaagctggccacgcaccgcttagcacacggaggcgcccgaccccacccatgcccagactgccccaaggccttctccta

SEQ ID NO: 327251 - DNA, 122 bp, Homo sapiens
ctgcagcccaggcccccagcccccagccctagcctcggcccggcctccggcattgctccgcggctggaagcgcaatgcccttctcactgtgctccactgcaagtatttttactttcatttta

SEQ ID NO: 327252 - DNA, 122 bp, Homo sapiens
cggcggggcaaacccgctcaaggatcggctcatcgccccctgttgggctggaggatcttgcgcaggcgcgagaaaaccccgagagagaccagtgcctctgcgcatgcgtcagtggcgagcgc

SEQ ID NO: 327253 - DNA, 122 bp, Homo sapiens
ggcagagggagcggtagccagccccgcaggggcgggcggggacggggtgggggtgcgctgcggcagccgcgggagtcagggagagaggaggggccgggtggcttaccctgcgagaccctggg

SEQ ID NO: 327254 - DNA, 122 bp, Homo sapiens
catcctggtcacgtgcccctcactgctcgtggtcatgcacgtggcctaccgcgaggaacgcgagcgcaagcaccacctgaaacacgggcccaatgccccgtccctgtacgacaacctgagca

SEQ ID NO: 327255 - DNA, 122 bp, Homo sapiens
gtgtcaggcagacccgggaccgtggcggtgaggaggtgcagtgtcaggcagacccgggaccgtggtgatgaggaaatgcagtgtcaggcagacccgggactgtggtgatgaggaaatgcagt

SEQ ID NO: 327256 - DNA, 122 bp, Homo sapiens
ctcttcctggtcgaggtggaatgcagctgactctcaggttccccagagcaggtgcgggcccgtggggcacccggggagacagggcaagggtgcttggcaacactcacacaaagcatgggtgc

SEQ ID NO: 327257 - DNA, 122 bp, Homo sapiens
caacatggtgaaaccccatctttacaaaaaatacaaaaaatagccgggcctaatgtggcacgtgcctgtggtcccagctattcaggaggctgaggtgggagggtcacttgatcccgggagtt

SEQ ID NO: 327258 - DNA, 122 bp, Homo sapiens
ctccagtgatgtagaagcatagtccctatcttcattgatctccctccatgttgtgataaacgcatacataaagtgttaaggcaatgtaaatgatgctcttaaagatgtgtataaagcctatg

SEQ ID NO: 327259 - DNA, 122 bp, Homo sapiens
tccagcctaggtgacagagagagactccatctcaggaaaaaaaaaaaaaaaaaaaagactcgagcataaagcagtatgtatagcaactaatatgtgcaaatcatttaaagagaaagaaataa

SEQ ID NO: 327260 - DNA, 122 bp, Homo sapiens
cggtgcgtgcccaccctgacggcacctgctggcggctcgcacctcagagcctgcgtgggccgcggctgcacccgagtcctctgcttcatcgaaagagactgacttggcaagcccaacttgac

SEQ ID NO: 327261 - DNA, 122 bp, Homo sapiens
aacttgagctccaactccttctcccctcccaggctgtctggactcctggactctgggcagcgcctaaagtagtccgtggaagctggcaatcactgtgatgtcactgatgaaacatctcaaag

SEQ ID NO: 327262 - DNA, 122 bp, Homo sapiens
ggaccccgggcatcctgtcccgttcctgcgcgacgcctgcggccccggcctcagcctcggcgccctctctgggcagctgcacgccgcagcctcgtgtctccccagattgcacgggagccccg

SEQ ID NO: 327263 - DNA, 122 bp, Homo sapiens
cataaagcctaaaatatttaccttctgacctattataaaaagagcctgctgacctctgctcgccttacatgacatcattctagataggactctgggtaattgagttatttgtattggattta

SEQ ID NO: 327264 - DNA, 122 bp, Homo sapiens
gggtctggcaaggtcggggccaggaggccgccccgatggtgcctgttgctttcagggcagcgggtggcatgagacgtgggaacatgggccacctcacacggatcgccaacgcggtggtgcag

SEQ ID NO: 327265 - DNA, 122 bp, Homo sapiens
gctggtggaacacagaggtctctggattctttctcccaggctcctccgcttttctactaccgcatgcctttcacagcacactacataaaatctctctcagtatccctagttaccaggattgc

SEQ ID NO: 327266 - DNA, 122 bp, Homo sapiens
gccactgcactctagcctgatgacagagcgagactccgtatcaaacaaaaaaaaaaaaaacgaatataaggctagacaaaatagcttctgcctggttttggtggcactcccccttattagag

SEQ ID NO: 327267 - DNA, 122 bp, Homo sapiens
ataagctattaaaagttcataataaagtttctggagttttcaggtactccgtttctctttcgtgctatttgccttggctattccactacaggcaaaggaaaggagatgaaatttaaagtatc

SEQ ID NO: 327268 - DNA, 122 bp, Homo sapiens
cttgtagtcacctcggaattgttaggcgacgaaaaaaactactcaccccaggtgtccctgcgtcagaggcgggtttctctcctgtctccctttgctcgcccctaaatccttcctcggactcc

SEQ ID NO: 327269 - DNA, 122 bp, Homo sapiens
ttcaagtgattctcctacctcagcctgccgagtagctgggattacaggcacccgccaccacgcccgggtaatttttttgtgtgattttagtagagatggggtttcagcatgttgcccagggt

SEQ ID NO: 327270 - DNA, 122 bp, Homo sapiens
tgagcaatgttagaacaattacaactcattccattcacaaatgctgactaaatgagcctccgttccatcagccatgaccacagctttgattggacaagactgatatcagtaactttctccag

SEQ ID NO: 327271 - DNA, 122 bp, Homo sapiens
gattcccctgggcagaagattaaaaacaaatgtttgatggcattcatggagcacatgcctcgtgttttattctcttttctccacactgccctggatcctccgctgctctggacatcttgagg

SEQ ID NO: 327272 - DNA, 122 bp, Homo sapiens
agggcaacgctccaaagaccacgctcaagctggggtggcagggctctgaacatggggccccgacccgggcctcggcctggggccacgtgacgcgcgtgtttacgttgagtgacgggcgctgt

SEQ ID NO: 327273 - DNA, 122 bp, Homo sapiens
gcaggaacctacccactttgtaggccacagagttcttggcgctggatgcctcattaaccccgcgttatgaggctccccctggagcctttagggaggggtgagcagccacctttgggggttgg

SEQ ID NO: 327274 - DNA, 122 bp, Homo sapiens
ggcggtgccggcgggaggccgagcggggctcgacagagcaggtaggaggcgcctggtcgccggggttgcccggggctgcggggagcgaggagcggtccggcccaggtgcggtggcttcctgt

SEQ ID NO: 327275 - DNA, 122 bp, Homo sapiens
ggccaccgcatgaggagatggagggcgggactgggccgcccagccccttgactccagcctcgaccgccaggccccaggccagagccacccaatgaacagtgcaatgtgaaggaaggcaggag

SEQ ID NO: 327276 - DNA, 122 bp, Homo sapiens
taactcttggctgtctttccagctgtcccctgggtcactctatatccatgtgtgggcacacgtgtctaagcttgtgtgcactgctgggttttcctagggtgtgtggccacttgtgtgtatgt

SEQ ID NO: 327277 - DNA, 122 bp, Homo sapiens
gcccgtgtcggcccgggggtagctgttccgccgggtctccccgggctccatgatggacaccgtgggcttccgggactccgagaaaatggacttgcgcagctcgcccttttcggcaaaggtaa

SEQ ID NO: 327278 - DNA, 122 bp, Homo sapiens
ctcaaggggcacgtgcatacccttaggtctcaagctttttgctaaatattttccactcagcgattattatctttcttccttctcacctgccttacaccagcttgccctgtcggccccaaatt

SEQ ID NO: 327279 - DNA, 122 bp, Homo sapiens
tggctggtccatgttcctccaggaagctattcatgaagcccatgtaggcctccttctcaccgaacctggatcagggccaggctgggtgggtcaggtcaggcacctgccacccccacactccc

SEQ ID NO: 327280 - DNA, 122 bp, Homo sapiens
aaaggcatctaaaacttcattcggtatcagagaattataggggtggggaggtgcagatcccggttctggtcttgactttgccatcaatcagcctagggaacctggacatgtcaccttgtacc

SEQ ID NO: 327281 - DNA, 122 bp, Homo sapiens
ccaagagactggaaattaactttatgaggatcataaggaagggaatgacctctagacagccgccttctaattgtgaaacgggggaagatcttggacctggtctctggagcgctccctatctt

SEQ ID NO: 327282 - DNA, 122 bp, Homo sapiens
ctgggccaggagagctccaggaagggcactgagcgctgctggcgcgaggcctcggacatccgcaggcaccagggaaagtctcctggggcgatctgtaaataaacctttttttcttttgtttt

SEQ ID NO: 327283 - DNA, 122 bp, Homo sapiens
actacagccttgccaggtagacatagctgctctcgcacagatgaggaaacagcataaagacgttagatgttaagtgacctgctgctcaaagccacgggcctggggttgggagcggactcagc

SEQ ID NO: 327284 - DNA, 122 bp, Homo sapiens
ggcattgtagctgggaaagattagggaggagattaacctcatccctccccacagacatgccgaggcaccagtgtacatgcactcggacgcatattcagggatgcacacaccctaattccttt

SEQ ID NO: 327285 - DNA, 122 bp, Homo sapiens
ctcttgatttggatgggaaactgtttatttagtggggataccttggagtgaactgattcccgtgagcaggttttcctgtgatccgcatcctacccatggtgatttctaagcaacaaaatcag

SEQ ID NO: 327286 - DNA, 122 bp, Homo sapiens
gccccgcacaggccacgccctccgcgcacagcccaagctcgcggccacacccccaccgcgcgggcgctacgtcccgccccgcacagggctcgctcccaggcacaccctgagctcgcggccac

SEQ ID NO: 327287 - DNA, 122 bp, Homo sapiens
ccgtcttgcaggggatgtggaatagctgcccccacccccgaccacctggcctcggcgggacgggcctctggggctccgctctccccagacgcacgcgcggatgctcacccacgccgtggagg

SEQ ID NO: 327288 - DNA, 122 bp, Homo sapiens
caaagtttcatgtggtagaaagccttcagaaatgaagactcaaagacccaaggaaaacagcgtatttttatggacaagtttgatgaagaataggcagtcatgtagaattatggttggacaat

SEQ ID NO: 327289 - DNA, 122 bp, Homo sapiens
agcaatgacttctaaataacatggttcaaaaatagctttttacagagtgctaacaatgctcgtctcactgaggtcatcacaccctggtgagttaaaagagctacttcattcctgctgagcta

SEQ ID NO: 327290 - DNA, 122 bp, Homo sapiens
ccagcgcccttccagccagtggtggggtatggatgggcctcgctggtcctgggcatggtccggtgcgtccataagggttccattgagctcatccataaaacaaagaagctattgcaggctgc

SEQ ID NO: 327291 - DNA, 122 bp, Homo sapiens
agtagttctgagaaggaggccttctggcttgggatggctggagggcagaatgactgtgggcgaccagcctggagaagaaggcctgactcaggagggcctgcatgcagagcagagttagtcct

SEQ ID NO: 327292 - DNA, 122 bp, Homo sapiens
ccagctctcaaagccttttctgtctcaccggatcaaccctgcaaggggacgagggtggggcgcaggcggccgagagccttgctgagaatcacacaggtggtcagtggaaaagcgtgtaccag

SEQ ID NO: 327293 - DNA, 122 bp, Homo sapiens
gaacaaccgctgccgccaccgccgcctccgccgccgagcaggctggatgggaggaggaggcggagacccggcttcctgaggggaagtcgccgccactaccggcttatgactggacagcacag

SEQ ID NO: 327294 - DNA, 122 bp, Homo sapiens
gagagcgtgcgtgttgatgtacacagatccgtgccgttatttgcaaactctgcagggtcccgcctgggtgtctggcaagccccaactgtcggctgttgatgtgacgtgtctgcaccactata

SEQ ID NO: 327295 - DNA, 122 bp, Homo sapiens
gaagcaagtcacagcagcagctaatggtcaactgtaaatgcagttctgctgtgcagttgtcgttcaaaatgtgacagtatttaaaagctgggctgtatatgagatgaaggagttcaaagacc

SEQ ID NO: 327296 - DNA, 122 bp, Homo sapiens
ggctgcatgtcccgagccctgccccgcggggaggcagcgaaggcccggggagaagtcgagcgtagcgccggtgggcctgcacagctgggggacccagtacaccctccgcagctgctggcccg

SEQ ID NO: 327297 - DNA, 122 bp, Homo sapiens
acaagcgccgcctcagaaggccttactacccgaggaaggccctcttgtgttaccagctgacgccgcagaatggctccacgcccacgagaggctactttgaaaacaaggtgccacacgggctc

SEQ ID NO: 327298 - DNA, 122 bp, Homo sapiens
gctaacctgctcttgtctggggccaccacctacaagctcactcccgcccagtggtttctgcgggaagggagtatgtttgtggccctgtcagcctccgtgttcagtctcctcgccatcgccat

SEQ ID NO: 327299 - DNA, 122 bp, Homo sapiens
agccccgccaccgactgccaagggcgtggtgaccattgagcagatcgtggacacgctgcccgaccgcggccgctcctgctggcatctgggtgcagtgtgggcgctgagccagttccaggaaa

SEQ ID NO: 327300 - DNA, 122 bp, Homo sapiens
gaaataaaattctgctgctgcggcccagggagtcggccttccacagtcccgtttaggagccggggctcttctccgttattaagacgtggtagtttgctctgcatgaattaccagctgtttgg

SEQ ID NO: 327301 - DNA, 122 bp, Homo sapiens
cctggctacttcatcctacatagcgtatcaacctttctaagtatgatggccttctttgcccgtgtacttctagcccatttctgctttctttcatgcatgaaacagattttctttttctttag

SEQ ID NO: 327302 - DNA, 122 bp, Homo sapiens
aagcgagaccctgtctcaaaacacaaaacattaaggagtactcactctgtcccagaagagcgtagtgttttatatgcattatctcatgtaatttttctaacccgatgagattggtggtagta

SEQ ID NO: 327303 - DNA, 122 bp, Homo sapiens
acagtgctcggtgagccgggtcaggatcagatgctggtggtctctgcccagtgcgggtctcgcttcctgacgcaggtgcgccttgggctcccacaggaagcggtcacatccagactcaccag

SEQ ID NO: 327304 - DNA, 122 bp, Homo sapiens
ggcatccagacgaggggtgcgtttagatctcgcgatcagcgatatgaaaagctggggacgcgaaggataaaattggaccattgcagctagtgatgagagaagcattggtcacctgatcctga

SEQ ID NO: 327305 - DNA, 122 bp, Homo sapiens
acctcaagtgatccacccgcctcagcctcccaaagtgctgggattaaaggtatcagccaccgcgcctggcctctcatagcaacttaaaacagcaactgtccctaaaagttcttagatgattt

SEQ ID NO: 327306 - DNA, 122 bp, Homo sapiens
gcgacatagggacggggccatgcggtgggcgggtggaacacggcgccggtagtgagtggccgagtccgcgctgagagcaaaggggaggagcgggccgggggtgagcagggaaggcgggttgg

SEQ ID NO: 327307 - DNA, 122 bp, Homo sapiens
tctgcctgaactcatgagtcagggtcagtcagcccagagctgcaatgtgtacgtgcttcccggccctgctcttctggcccgcccccaagccttcacgcatgcacccctgcaggcacttacca

SEQ ID NO: 327308 - DNA, 122 bp, Homo sapiens
tgcgtgcgtgcgtgcgtgcgtccgtcctcgtgctcgcgcatcgtaggagggcgggacttccggcgtcctcttgccgtggttgatttgattttctctggtgttttcactagttccggcctttg

SEQ ID NO: 327309 - DNA, 122 bp, Homo sapiens
gggaagttcctggaaatggaaagctggcttaacagaagccctcctaacaacagtaatgaccgctgatatcacccacccaactcgccatgtgtgcatccacaataaccccgcggagaaggcgc

SEQ ID NO: 327310 - DNA, 122 bp, Homo sapiens
ggacgccgccgccgccgccacagtttcctcaggtgctacaaagcagccagggtgtgcgtgcgctcccgcctcgtcgcttagcaacctgagaagctgtccggtcgtcccaacttatcaattcc

SEQ ID NO: 327311 - DNA, 122 bp, Homo sapiens
caatgaaggaagaagtgatacataatagacagtgattaacaaaaaagactgatgaagatccgggcaaatataacccaatatgaacagtagaaaaccatgataatgtctcctttggaggcata

SEQ ID NO: 327312 - DNA, 122 bp, Homo sapiens
cccgattcctgaaactgggcccaactgatacggccggttcctggaatcccagcaaagaggcggccggctggggtggggaccagccttcccagggcttgggctccgtcctgcatggcagcgtt

SEQ ID NO: 327313 - DNA, 122 bp, Homo sapiens
cgtgaggagctccctgccttctgtgtgcttcgacattcatttcattgatgcagtgaataccggctaaggaactacatgcctggccctgtgccaggaaagggagagggaaaaatcaagccgac

SEQ ID NO: 327314 - DNA, 122 bp, Homo sapiens
ggcgccttggggccgagagcgtgtgtgggctgaggtaaagtgcctggtggcccctctgcccgcccgggtagtgcctggtggcccgggcggggggcgggggcggacgcgcgagctcggctgca

SEQ ID NO: 327315 - DNA, 122 bp, Homo sapiens
tatttatttagactagaaaagcgagccggcttggagggagtccgcccggggatccgagcgcgcattcatcagtgtcgagagaaaaaaagctacataaatatatattatgtggataaatctat

SEQ ID NO: 327316 - DNA, 122 bp, Homo sapiens
aactcagcaggcccagctagcctgataccaagaaggacctccagcctcttgttgcctagccgacctccaaacaggtagctggccaacatggggccccctggtttgttttattttgtttgatt

SEQ ID NO: 327317 - DNA, 122 bp, Homo sapiens
cgccgcccggccgggcgagggctccaggccgggacgcggggacgtggggcggggccaagacgcgcgggagggcgccgcgctccgcccctccttccttcgccggccccgcctccctcccgctt

SEQ ID NO: 327318 - DNA, 122 bp, Homo sapiens
cgggagggcggacgggcgatgacaggcacccggacgcggtgaggtgagcaacaaggtgggcggcgcggacacctgtggaggcgacccccgggcgaagagtcagggaggcgggaggtggtctg

SEQ ID NO: 327319 - DNA, 122 bp, Homo sapiens
ggggagggccgggcgggccggcgggcgggagggggccgggcgggctgcgcaggggcggcgcggccgctcctcacctgattgtccatggctggcgccccgccccgcccccgggccccgcgtcg

SEQ ID NO: 327320 - DNA, 122 bp, Homo sapiens
cactggacgtggcggccattttgttttggacaccgagcaggagctggcggccgctgcagacgaaaggcaggaaagggcaggccgggtgagcagacggatcggccgactagacagccaaccag

SEQ ID NO: 327321 - DNA, 122 bp, Homo sapiens
gatggagcatatgggccccaaagtcacccggcattctgggaaagtgacactgtgttaccccgggcgtggggggaggggcccgtcactcgtgagcacagcttctccctttgttctttagaagg

SEQ ID NO: 327322 - DNA, 122 bp, Homo sapiens
tttatttcttgcagcttttccctaaacttctgggcttcgccctcctcgttggcaaagcttcgaactgtaggcatggccgacagagcctcaatggccacctggctggactttgccagagattc

SEQ ID NO: 327323 - DNA, 122 bp, Homo sapiens
gcagtgtggtcagcagcttcaacgcgcgtaccgccatcgctccctcagacctaacggaaccgccagccacccgccaccaaggccggagtcctacccccggcgaaggcccgcccccgggcgaa

SEQ ID NO: 327324 - DNA, 122 bp, Homo sapiens
atgggccgtggggcagaccaggggcccagagctcagggcagggggtaccgcttgtggggccgctcatttctgtttcgaggtacaccaagggttagaaaaaccacagtaagcaaagaacttgc

SEQ ID NO: 327325 - DNA, 122 bp, Homo sapiens
cagccagcggactccgctcaatgccgccatgtttcccgcaggaagtcgcgtgggaagtgacgcctgaagctggcgcggccccgtaccccgacttccggcctgtactgagttcctggtatttc

SEQ ID NO: 327326 - DNA, 122 bp, Homo sapiens
ggccgggctgccaggctgctgggacctgctgggtcaggctcagcttccagggctggcgtccggaatagcctgcccaggctggttaaaaggtccactggcccagcctcccagcctggaaaggc

SEQ ID NO: 327327 - DNA, 122 bp, Homo sapiens
ccacgatggcagaggtgccacctgtgtcaccagccggcggggctgggagttcatctagcccgggctatggacaaggccgtgtgcgtccagacggggccgccagagggcgcgcgtctgcggcc

SEQ ID NO: 327328 - DNA, 122 bp, Homo sapiens
atgaagagatagtgaataaatgaatcaagtagggacagagaggctttgccataaagaggacggacaaatagatgttgtcaggaagggacatgggttagggaaggttttgtgtgtgttttgct

SEQ ID NO: 327329 - DNA, 122 bp, Homo sapiens
ccgcagttccagagttgagtctggaggtggaagacaaccaaaccactccacctggagctgcgggccggcgtggctcagcggtccgctcccgggaaggaggccccgggcgcttcacaatagcc

SEQ ID NO: 327330 - DNA, 122 bp, Homo sapiens
agaaatgctccgggcaaaaggtgctgcccagatggtgccttcccggctgctccgacccagcgtcatgcagattttgcgctctgtgatgtaattttccattgggtccttggtgaaagccctcc

SEQ ID NO: 327331 - DNA, 122 bp, Homo sapiens
gccctgccagcagcagcaccaggcccagacgcagcgggggcaccagcgagaaggtggcggcgtagccgtccagatcgccgtccttgcgcaccacgcggtagccccgctgcgcgtggaactcc

SEQ ID NO: 327332 - DNA, 122 bp, Homo sapiens
ggcgtactgacttccaccccaaagtttttcccccactttgattccataggagggtcattgcgaggagcagtagagctgcactgccgaatgtcgtagccactagccacataggctgttgattg

SEQ ID NO: 327333 - DNA, 122 bp, Homo sapiens
gggacttgccggggcctccctgcccgtgaagaggctgtttttgctttgagtctgcgtgcacggtgggtctgctgcgcctgcataggtgggtttaattggctccagctgcactggcggcgcct

SEQ ID NO: 327334 - DNA, 122 bp, Homo sapiens
aggcaagcgagcgggcgcagctgggggatgcctggaccccggaggcagcagggctggaggcggtggcgggcttcagggcaacttcacccggccggctgcggcgtgggtaagaggcgcgtcct

SEQ ID NO: 327335 - DNA, 122 bp, Homo sapiens
tccgcagatccaccttggggtggatctcagacggggagactctgggcgacccgggccgtccgtgggggatggggaggggtcgtgacctgcgccccgggccggggtcactcaccgtcctcgct

SEQ ID NO: 327336 - DNA, 122 bp, Homo sapiens
acccaccatcaaacaccgcctcgtgccggccccgcgcaccctcccgccccgtcggccccacgcttcaggcgctacctggagggcatggctcctacccgtgggcactcgccttcacccttgga

SEQ ID NO: 327337 - DNA, 122 bp, Homo sapiens
gtggcaaaagtgactgtgaactgggtggtccaaccagagggctcctggaagtcaggggagcggtgctcctgttaaatcacacattgataaaaggaaggaaggaaaacagtgtgcttccaagc

SEQ ID NO: 327338 - DNA, 122 bp, Homo sapiens
ctcgtcatgttttgcaaaatttagtcatagtttgcagacagattactcccctcaacttcccgtgtgaacttatcttactcttacctaaacacttgaaactttttaaccatatacaacataaa

SEQ ID NO: 327339 - DNA, 122 bp, Homo sapiens
cgtgctggcctcgcagggtgcctgggtgactgctacaggcctggtcttgaggcactgagacgagccaccccatgtgtcccgcctgaccccacaggcttcccagggctctgcgcagatcgggg

SEQ ID NO: 327340 - DNA, 122 bp, Homo sapiens
ctgcaacctccctgcctgattctcctgcctcagcttgctgagtgcctgcgagtgcaggcgcgcaccgccacgcctgactggttttcgtatttttttggtggagacggggtttcgctgtgttg

SEQ ID NO: 327341 - DNA, 122 bp, Homo sapiens
cctgcgggtctggagtctcaccctgcgaaaccctcttgaaggcggatgcctgactttgttcgagcctctccctgcatgcctgtctctgagacaccccaacatccacagaggtcagagccatt

SEQ ID NO: 327342 - DNA, 122 bp, Homo sapiens
gggcgatgaggaataagcagagcacaataaatgccacagggctttgaaaaattggaaaagcgaaagtgccgtaggtcagcggttatcacttttctaagactgacacccagaggaaataaagt

SEQ ID NO: 327343 - DNA, 122 bp, Homo sapiens
caaccctcaaacattccggactcccctcataacaatagacacatgtgcccagcaataatccgccccttcctgtgtgcgcctgtggggtgcgtgcgcgcgcgtgtgtacctgtgtgggtgaag

SEQ ID NO: 327344 - DNA, 122 bp, Homo sapiens
ttgcctggactccctggatccaggacctcactccctcttaggccccaggacttaggggttcgcactccacggggtaagcaggcttcccagttcctcgccctcgtcctctccggacgcaggcg

SEQ ID NO: 327345 - DNA, 122 bp, Homo sapiens
tgcacctgcctgtggctttgtgggcgggcggcggcgactgggctggccctgggctggggccggtgcgtcttagctaagtgcccagcgctccggtgggggcggtaggggcggagccgcgctct

SEQ ID NO: 327346 - DNA, 122 bp, Homo sapiens
aagtcagatgccgacgaggctggaatagtgcaactctagctcttaacatgctttatataccgagattataaactacatgttctgattggatgagaggaaaacactaggcctactctgattgg

SEQ ID NO: 327347 - DNA, 122 bp, Homo sapiens
accttcttggggagctgctcatcaccaccttctgggatttctgtctgttgggggcactgccgtccctggcgctgcctcccagccatcatttcttatttgagaaaggcaatttaacgacggcc

SEQ ID NO: 327348 - DNA, 122 bp, Homo sapiens
ccaggtgttccggctcccagaccccaattgagctgggggcgcccacccgccgggggatcccgccctgcgtcccccattcatccgcgtctcagccgcgggagtttctcaacgggaagagggcg

SEQ ID NO: 327349 - DNA, 122 bp, Homo sapiens
cctcagccaccgcagcccaggcccacccagacctgacagcccctagtcaaccagggtcaccgaattgtctcagtttgcccaggattaaggtttctcctgggacatgggtctttcagggctat

SEQ ID NO: 327350 - DNA, 122 bp, Homo sapiens
ggtccaaagtgcaaagggaaagtcactgctagaggcgccagtaccagcatagcgcccccacgcgccgagtcggggaactgccgcgggggccggccccgcccaccagcgcctgcgcctgcgca

SEQ ID NO: 327351 - DNA, 122 bp, Homo sapiens
aaggatgttttttgctgcctgaacgtgagcaaatattggacctgagatcggggtgggctccggtccccacctgggtggaccggacagcctcttgggcttctggtaaaatgagttagctctta

SEQ ID NO: 327352 - DNA, 122 bp, Homo sapiens
ggtctggaatggccacccccggctcagccttacaaatttttggaactggagcctgagacgcggcttgccgctcccattgttgcaggccccaccaataactatggcgaagggaagcttcaggc

SEQ ID NO: 327353 - DNA, 122 bp, Homo sapiens
aatagggcttcctgcttcctgccttctgacagctcccatcccttttcagtcattcttggacgagggtggtgtccactggtgcccccaccccattgccttcagtagcaggtgtgccctgtgtg

SEQ ID NO: 327354 - DNA, 122 bp, Homo sapiens
tctggaagaagttccacgaggcgggcaccgagatgatcatcactaaggctggcaggtcagcgctgggagatttacttccggggatggcggtggggagcaaggggggccagggaggtccctta

SEQ ID NO: 327355 - DNA, 122 bp, Homo sapiens
gggggcaattcgaaggagacgcgcagcttacacccgcggcgggtggagggagcaatgtgacgaaaccattgagcttgaccgaccttccctcatggagttggcttttagcctcacggccggtt

SEQ ID NO: 327356 - DNA, 122 bp, Homo sapiens
gggacccagtgtggcctccgcaccccccagcttcctcacccggcccctggaggggctgcccgcttggccttttctgggaaactgtcctgagtccctagcaccagctggcaaccttggggcca

SEQ ID NO: 327357 - DNA, 122 bp, Homo sapiens
gagaccagcctggctaacatggtgaaaccctcatctccaataaaaataacaaaaattagccgggcatggtgggtgcctgtaatcccagctattcaggaggctgaggcagaagaatcacttga

SEQ ID NO: 327358 - DNA, 122 bp, Homo sapiens
gatttgacttttacttgttccaatttcgcttttttgttgttttgtttttttgtctttttacgaacaagaggtttagagaaccacatggaaaaaaggcagggccaggcccggacaccccgcct

SEQ ID NO: 327359 - DNA, 122 bp, Homo sapiens
ccagccacagtgcactggacgccatcggaaggctgcagctgctatttggtgctttaccaccgctgagaaggtggaatggtcacggcccggttctgtcactttcttcagccggacagtcgcct

SEQ ID NO: 327360 - DNA, 122 bp, Homo sapiens
tgtcattgccagcaagtgccttgcatgggtacctggctgcacttattaatccattacggtcgctctgtcactggtgccattatgtgctcacgcgcccactccctcaggtttagaaggcgtgt

SEQ ID NO: 327361 - DNA, 122 bp, Homo sapiens
gaccccagtctccggtgtccgaaggggttgtgcaccctagagttgccgctttttgagaaccggttttacctccgcccactccttcgtcctctagtttgggacttccaaacttctcccctctc

SEQ ID NO: 327362 - DNA, 122 bp, Homo sapiens
gacagagcctggcggggataccagcagcgtgtgtgtgtggacggcaacgttgtctgtgcgcgtgtgtgtgagtgagtgagggagagagagagagaataggtgtgtgtagaggctcccggtgc

SEQ ID NO: 327363 - DNA, 122 bp, Homo sapiens
aggctgggctgcaggagccaagctggttagcactgagaatccagtttggtgcctgtgacacggagggcccgggcggggaagggtggggggcttgcaggggtgcctgggtcgggggctgcagg

SEQ ID NO: 327364 - DNA, 122 bp, Homo sapiens
aggatggtaattctaggctgagtaatgaacaagtgcaaaagccttgaggcattaacagctcgcccagaccactttcagccatttttggtttctcttcctcatcttctttgttctttgatatt

SEQ ID NO: 327365 - DNA, 122 bp, Homo sapiens
gcactgaggaaggatgcatggcccgacgaccgggcgtctgtgccgctgtgtccggacctccgtctgctgtgagcaggggcctcacaggcgccccataccccatacccagtctgcagatctgg

SEQ ID NO: 327366 - DNA, 122 bp, Homo sapiens
ctgcgacgcttgggggactgcactgctgcctttgaccctttttagatgtcgtaaatttcacgtgcacccctccccgtattgctacttgtgggaacctcaaatggcaggctggaaaccctgga

SEQ ID NO: 327367 - DNA, 122 bp, Homo sapiens
ttatcggcttgaactctatttgacacccaattaattacagatgtaaaaatcatatttacccgaagtcccactttccctttccctccctgcttctgtcagcgacgtcgtttttaaagaccgag

SEQ ID NO: 327368 - DNA, 122 bp, Homo sapiens
tgtggaattagtgtgagacccagaagactgtggccaaagctattatggacccatggtctccgtggaatcatccctcatgacttctgctctctgatcacatccacactcatgtcatcctcgtt

SEQ ID NO: 327369 - DNA, 122 bp, Homo sapiens
catatcacctttaagaactgtaacactcaccgcgagggtccgcgacttcattcttgaagtcggtgagaccaagaaccccaattctggccatattttggtgaccatgaagggactatcgccta

SEQ ID NO: 327370 - DNA, 122 bp, Homo sapiens
cgcctccccggcccgggggcgtgggtgggggccgttaccttcccgtcatggtggcagcgacgccgagccctgggttgccggggttgccgcgggtctccctctgctgctgcagccgccagccg

SEQ ID NO: 327371 - DNA, 122 bp, Homo sapiens
gcacggcctcgcgtctacagaaagccgctgagaaggcaggtggggtccggcgctgcccaccgttctccagccgtgctggccaccactgggctcccagaccaaggcccatggactgtccccca

SEQ ID NO: 327372 - DNA, 122 bp, Homo sapiens
gggcaggcccgcccagagggaatcggctgctttaagggaagccccgccccctggtggtgacgctccaccaggcccgtccgcgattggctgcggccagagggcgggatggggttgctaggcga

SEQ ID NO: 327373 - DNA, 122 bp, Homo sapiens
ggcgcggggcaggccgggtaagaacggcacgcgggagggcccaaagcagcctgtacatggcgcatgcgcggctgcagcggtgggcggggccggcctcgactgaagccccgccctggggtcct

SEQ ID NO: 327374 - DNA, 122 bp, Homo sapiens
ggtgatctgcccacctcagcctcccaaagtgctgggattacaggcgtgagtcactgtgcccggcccaatttttaattttttgtagaaatggaagtctcactaggtagcccagggtcttcacc

SEQ ID NO: 327375 - DNA, 122 bp, Homo sapiens
aaggggtgcagagaattggagtgtagttatgatgttgaaaacctgagaaatccatggcagcgactaacatgtgacaagcactactgtgttaagcaggagcagggccactaaagagaagcagg

SEQ ID NO: 327376 - DNA, 122 bp, Homo sapiens
ctcagacggggcggttgccaggcggagggtctcctctcagacggggcggccgggcagagacgctcctcacctcccagacggggtcgcagccgggtagaggcgctcctcacatcccagccggg

SEQ ID NO: 327377 - DNA, 122 bp, Homo sapiens
gccaggagcccctacagccaggagccccttcagccagggagccccgaaagccaggagccccgacagccaggaaccataacagccatgaaccccgggagccaggaggcccgcagcggagtgcc

SEQ ID NO: 327378 - DNA, 122 bp, Homo sapiens
gtgaataacaaaacttgactagatggtggcctaaacaagttagggttttaagttttttctcgtgtggaacaagaaggctgactgtggtaggcagttcagagctttataatgcactcagtgtc

SEQ ID NO: 327379 - DNA, 122 bp, Homo sapiens
tgtgctcccagagagaagcgacacaaagaaaagggagggggggcagaaaggagggaatcccgctgacatcactgctcattagcatgtgtgacctcatcagggggtgggacaatttccccagg

SEQ ID NO: 327380 - DNA, 122 bp, Homo sapiens
agccctccccagagccacgattctccccttctaagaatccatcagtggggcggcagctcccgcgcccccaccccctgcccctgctggatcccgcggttgacgccctcctctcctcctccccg

SEQ ID NO: 327381 - DNA, 122 bp, Homo sapiens
ctcgcgcggcagattcgaagctagggcggggcccgcgggctgaggcagcggctgtggcggcgacgctgggcgtgaggtggcggcggccgcgccctggttgggtccccactgctctcgggggc

SEQ ID NO: 327382 - DNA, 122 bp, Homo sapiens
ctggagtgcagtggcgcaatcatagctcactgcagcctcgaactcctgggctcagcctcccgagtagctgggggtacaggcccatgtcataacacccagctaatttttttgtagagatgggg

SEQ ID NO: 327383 - DNA, 122 bp, Homo sapiens
ctgccctggggctgcatagacccggctggggctttagaacaggaaccgttcgaggggctgcggtgggtgaagcccactcatgtcctggctcctgttaccgggtagggatggcagcccatttt

SEQ ID NO: 327384 - DNA, 122 bp, Homo sapiens
gccccgaccctccgcggtgccatggctgctccccgcccggccccggctccccgggcccgacgcccgactccgctcccgctcggccccgctcccggccccggccagcacagcgctctccgcgc

SEQ ID NO: 327385 - DNA, 122 bp, Homo sapiens
cctcaggctggcggctccagctcacactgccttgcggggcttttgccctggggggagatgcgggtcagggcggccccatccgcagcccaggccccgcttctcccccacgctggcccggctta

SEQ ID NO: 327386 - DNA, 122 bp, Homo sapiens
gtcgagggaagggtaggagtatggagaagagacccgcggagaagaggggagaatctacaacggataatgttgtagatatttacaacatttactcaatggtaggtatttttatcctcgtttta

SEQ ID NO: 327387 - DNA, 122 bp, Homo sapiens
aaaaagtctggttgcttcgcttgcatactggagcacaacttccttatacaccgcatgcagcgtccctggcagggcaaggtacacagtactccaggtagtgattcgattccttcatttccctt

SEQ ID NO: 327388 - DNA, 122 bp, Homo sapiens
tcttgggacgataatgaagatggcttttgagcgtacaaaggataataaattattactttgcgctcaataaatgccagggctccaggcagctgcatcagcagcaaactgtgctcacagaaaag

SEQ ID NO: 327389 - DNA, 122 bp, Homo sapiens
tttaattgtaattaattttaagtggccacatgcagggagtgactgctgcattggacagcacggctctaaattgagccttttttccttatttggtgaggcatacttgccttaagattgggaag

SEQ ID NO: 327390 - DNA, 122 bp, Homo sapiens
aggagagtctgtgctgcagccctagccagagcctggaggcccgagaaccaggcacgccgacgacagcacacttccagcctgagagcaagagaaggtcagtgttccagctccagcaggcaggc

SEQ ID NO: 327391 - DNA, 122 bp, Homo sapiens
gccccgctcggccctccagtccccctccgcctcctccctcccgcacagcagccgccagcgcggcctcctgcaccatgtcggtggccggcctcaagaagcagttccataaagccactcaggta

SEQ ID NO: 327392 - DNA, 122 bp, Homo sapiens
gggcagcggaggccggagggcacaggggtcagaagcccctgctctgatgccaggatagtacgcgtctcgttggacacaagatgagagattggagcaaatgacaagaaaaagagaaggggaga

SEQ ID NO: 327393 - DNA, 122 bp, Homo sapiens
cgcacctgcgggaccccggtttcacggccctactggtcaccggattcctgctcctcgtgccgctgctcgtgcttgctctggccagctaccgccgcctctgcctgcgcctccgcctagccgat

SEQ ID NO: 327394 - DNA, 122 bp, Homo sapiens
ggggttgctgggggtagggtgtcccggggctgctgctgacagtggggagtccccaggtgacgcccacctgcgccggcccggggctcagggctgggcccaggacaggctgtgcaaagccagcg

SEQ ID NO: 327395 - DNA, 122 bp, Homo sapiens
gaggcctcataaatacaaggtcactggccagggatgcaaaggagcgcagcagcagggactcggggaggatgacctgtcctagagtggcccatgtcacgcagcctcctgtgtgggagggggcc

SEQ ID NO: 327396 - DNA, 122 bp, Homo sapiens
aatgtttaagaaaatttcaggattaatattgaaaatagaactgtggtgacattagctatacgcatctaaattgtgcagaatttgaatgtaggaaacaggattatgaaacatgacatctgtag

SEQ ID NO: 327397 - DNA, 122 bp, Homo sapiens
gggacagaagtggacaggaacgccacacgtgcagcccacaggaacagccaacgtgcagcgcgtagctcatgaggacagaggctctgatggggcatgcttagagagacctggcggtggaggag

SEQ ID NO: 327398 - DNA, 122 bp, Homo sapiens
aggtctgcagcttcattcctgagccagcgagaccacgaacccaccagaagggagaaactccgaacacatctgaacatcagaaggaacagagactccggacacgccgccttgaactgtaacac

SEQ ID NO: 327399 - DNA, 122 bp, Homo sapiens
ttatgacctaccttgtcatcccagcagtggaatcaaatttctttcagtgaaacatgtaaacgtaagacctgtgcatgtcttatgggagaaaatgtttccaggatgaactcactcagaggagg

SEQ ID NO: 327400 - DNA, 122 bp, Homo sapiens
tgagatagcacaggcaaaatatttggctgaataaatgatagccttcattagtatcattaccgtgaaccaaacgctggattccagcatgtgaaaacatttatgcaacattgaacttcatgaat

SEQ ID NO: 327401 - DNA, 122 bp, Homo sapiens
attttccaagcctacccttgccggccacgcccccaacctgggcctataaaaaccgccccccgcaggccctagcgggcagacacactgaagtcgctagacatttgaggaacacatccggggaa

SEQ ID NO: 327402 - DNA, 122 bp, Homo sapiens
gcgcccaggcattggtccagtggccgcctgtcgacgagggggcgggactccgaggggtagcgattcccgtaacgcggctcttcgcgtcccggattccggtggctgcgtccgcgtcgcctctc

SEQ ID NO: 327403 - DNA, 122 bp, Homo sapiens
cctccagatgtacggggaccctctatgcaccgaacccaatacgttcattccccgtatgatcgtcctggttggaaccctcggttctgcatcatctcggggaaccagctgctcatgctggatga

SEQ ID NO: 327404 - DNA, 122 bp, Homo sapiens
tttcagtcagccatttgtctgcacaacttccagttttccccataaggatcatccacaacccgatggtcaacaagtgtcatcactcaagccctctctgaaccccgactgggagcagacactgg

SEQ ID NO: 327405 - DNA, 122 bp, Homo sapiens
aagctagcgtgggcgctgctgagggccctctgcccttttgtgcagtggttgggcctctggcgctaggcttggaaatacaccaccactcaggcctctcttggaagaactgcatcgggctccgg

SEQ ID NO: 327406 - DNA, 122 bp, Homo sapiens
ctgcattctcattccagtggcctaggtgggcaagaatataactcactgtaataacaacagcgggacaggttgcttggctgtatcttgtgttcacaaatgccccatctctggtcaggagctct

SEQ ID NO: 327407 - DNA, 122 bp, Homo sapiens
catgtgagaatgtgcatgctgcggttgctgggtggagagttctgcagatgtctgtcttcccgggcacgtgaaaagaacctgcatcctgcgattgctgggtggcgtgttctgcagatgtctgt

SEQ ID NO: 327408 - DNA, 122 bp, Homo sapiens
tctggtagccctggctgtgggctctgttccttcctactgaactgaggacaaactagtagtcgccacgatgccttggtaaaaaaccatgatatgacttggaagggaccttcaagattcccaaa

SEQ ID NO: 327409 - DNA, 122 bp, Homo sapiens
agaagcccacggcggcgcacacccagagcgggctggtggcgagtacagcgcccgcagctgcgccccctagcgtcagctgcatgggcccccgcagcgctgccaggccccgcaggcgctgcccc

SEQ ID NO: 327410 - DNA, 122 bp, Homo sapiens
atcctcccgcctcggtcttccaaagtgctgagattgcaggcgtgagacaccgtgcccagccgtctttaatatttttcaccaggcggatagttcacatttttgtgtagtcttttttttttttt

SEQ ID NO: 327411 - DNA, 122 bp, Homo sapiens
atgcccagtgaaggacagagggaggaaaggcaggccccgcagcctagggcagggttggcgcggctgtcagggagttctccagccagacacctgtcagagggggccacgcccccaacaatagg

SEQ ID NO: 327412 - DNA, 122 bp, Homo sapiens
gcctgcagtccttcccccttcccttcctgctaagagatcaaagtgcagaggaaatccagacgggaaatgagagaaaggaaaaacagcagccgtggaagcactctcttttttatatcgctgga

SEQ ID NO: 327413 - DNA, 122 bp, Homo sapiens
tcgggctgtggctgggaatcgcgctacacttgacagccctttccatgggcctccccggcccgcctgccctcggccccgaagtcaggggagacaggggccatttcagctgctcgcgctcgctt

SEQ ID NO: 327414 - DNA, 122 bp, Homo sapiens
gccttcgccctgcctttttgttctgtctggacccacagtggattggatgatgcctgctcacgtgggtgaaagtggaacttttctgtctactgatttaaatgcttatctcttctgcaaacacc

SEQ ID NO: 327415 - DNA, 122 bp, Homo sapiens
ggcaactccagaacctagcacagtacctggcacataagcagtgccctttaaatattagctcggacttgtagtcactttatataacttgtggttttttgaatgaatcagtgaatgactgaatg

SEQ ID NO: 327416 - DNA, 122 bp, Homo sapiens
gccgtcaggcggggatacagcctggaaggtgcgtgtggggctgggtctcggagtgggagacgtggagtgcaggtactgtgcgatctgggggcgcggcgcctcggctaccctcctcgtgttgt

SEQ ID NO: 327417 - DNA, 122 bp, Homo sapiens
gccgggaagtgtccgtggacagagacttgactaatgtcttcatcaagtgcctgtgccttgcggggtgtggggattcttttggctccacctcggtcgacagggacttcacaaggctcatgaag

SEQ ID NO: 327418 - DNA, 122 bp, Homo sapiens
gccgccagaccagtggagccggggcgcagggcgggggcggaggcgccggggcgggggatgcggggccgcggcgcagccccccggccctgagagcgaggacagcgccgcccggcccgcagccg

SEQ ID NO: 327419 - DNA, 122 bp, Homo sapiens
agttcacccatcaccagagaaagggagaccctcccacaggccccactctggggctcccatcgtacactcacctgtcaccccaatgacagagatggggcccacgcgctggccaccgtggaagc

SEQ ID NO: 327420 - DNA, 122 bp, Homo sapiens
ggcgggcgagcgccgtgtattttcccctctctttgtgtgtgtccgtgcgctgcgctctcgcgtgacgtgacgggactccgtgtgtcatttccgcacaaggacacaggagcccccgctgcagt

SEQ ID NO: 327421 - DNA, 122 bp, Homo sapiens
tccaagatgggtggcactgaacgccgaggccacggcccgtcctgatgtggtcagagatgtcgtcatgtgccactaacaggcgtcgccaagaccagccaggtgcagaccttgggtgggtccta

SEQ ID NO: 327422 - DNA, 122 bp, Homo sapiens
accacacccagcgatgtctgttgcatttgtggaacccgcatgatggttttgatgtaaaagcgcattgatctgaacatctgtctggtcaacagtccttcactaggtccctgctcggtgtctga

SEQ ID NO: 327423 - DNA, 122 bp, Homo sapiens
cggagacactcacggatgaaaactgtcatatctgtaagatttgtcattaggcctactaagcgtcctaaagattagggagcgatacattttgacaaatcgccactataaatgaagtctgagag

SEQ ID NO: 327424 - DNA, 122 bp, Homo sapiens
caaagcagaacttattgcactaacccggctgctggagttgggggaaggaaaaattatcagcgtatacacagattccaagtatgcctactgtatgctacacacatggagctgtttggaaggaa

SEQ ID NO: 327425 - DNA, 122 bp, Homo sapiens
ggtagttgcaaagagacatttcaaaactgccctaggccattgcagcatccttagatgggacgcataatcattaccttaaagcatcaccactcattttgaccatatagattttattatgttag

SEQ ID NO: 327426 - DNA, 122 bp, Homo sapiens
ggggcgggggttgggataagtgcgcagggtgcccgccccctgccaccagcaccgccaccccggatctccagggtccagcctgggtccagccctcacccaccgatgttccacaggcgccttct

SEQ ID NO: 327427 - DNA, 122 bp, Homo sapiens
tgaagctggccagcgctctggactacgaggtaaagagcatcagccggagagggcacgggacgcggagggggtgctgggagggccctgggagcccgcgtcctggtggcggcaccccctgtgct

SEQ ID NO: 327428 - DNA, 122 bp, Homo sapiens
atgaattttgccttatgccttgactcctgccatttatcatgagattaatactgtgattcccgctgttttctttttccttgcattttcctaatatgcctttactgatccgtttgctgtgaacc

SEQ ID NO: 327429 - DNA, 122 bp, Homo sapiens
cagtctgtagtttggatttaggagttcaggattccaatcctaatttccaggttccagctgcgtggcccgagtagcccggccagccccaccccggggcgcaggaggcgcgcgaagggcgggag

SEQ ID NO: 327430 - DNA, 122 bp, Homo sapiens
caggtagggccatgctgactccttctcagctgcatcctcaggaaccaacacaaggtttcacgctgagcaggtgtcagaatgtacttgacaaatggatgagttgataatttccctagagctat

SEQ ID NO: 327431 - DNA, 122 bp, Homo sapiens
gcttaagtccaagttgtgcaaaactgcttgaacgtgcacactcacacatacacacacacacgcacacacatgtaaacaaagtgataattgaaaccttgtgtatttggaggaagcatttggtt

SEQ ID NO: 327432 - DNA, 122 bp, Homo sapiens
ctttgcactcggctctgcacctgtcctgccccccggagattccttgagtccacgtggatccgagaggagaagctgttgatcatttcctgtccgctgaggctgtgatccccgggcgaccggac

SEQ ID NO: 327433 - DNA, 122 bp, Homo sapiens
cgggatccgtcgaggggaggccgagcttgccaagctggcgcccagcggggtcatggtgcccggcgcccgcggcggcggcgcactggcgcgggctgccgggcggggcctcctggctttgctgc

SEQ ID NO: 327434 - DNA, 122 bp, Homo sapiens
tgagtcactcccctcaccctcactggccctccattaaggaaggaggcttcccaggcctggcgagccatgattccaagaggcagggcaaggagcatcaggaacattccatgagcaagggaagc

SEQ ID NO: 327435 - DNA, 122 bp, Homo sapiens
gccagcggggagcagtagagacttccggcgtcggctgctcgcagggctagagcgtcgaaccgggacaaccggaggcttcagctcacctcggattgtaaatgctaacacgggtcctccggccg

SEQ ID NO: 327436 - DNA, 122 bp, Homo sapiens
agagttggatgggctggactggagagagctcacacctctccccttcttactgcttccctccggctataacttgccagtcacagcagccagctgctgtagaagaggggaggaaacaagccagt

SEQ ID NO: 327437 - DNA, 122 bp, Homo sapiens
tgtgtgaaagcccggtcggtcctggtgtaactgacacgggctgtgggtttgtaagagagccgggtaggtgctggtgtaactgacgtgggctgtgcatttatgagaaagcctggtcggtcctg

SEQ ID NO: 327438 - DNA, 122 bp, Homo sapiens
acaaacagggcgggggcgcggaggtttggggtgggggccgcagggggctggaaggaagtgcgcagtgtggcgagagcgcgaacaaagccctctccggagccccgtcacccctcggtgacccc

SEQ ID NO: 327439 - DNA, 122 bp, Homo sapiens
ttgtcttgctaattgttggccaagttccctagccaggtctgagttctaacacacgactgccgcctctactgtgtgtgctgtttggttgataagcacctatcaaagatgctgtagacaggatt

SEQ ID NO: 327440 - DNA, 122 bp, Homo sapiens
ctgtgcctctgtctgtctctgtctcttttcctggtgcttgaagcttccattgttgcagtccggatgctgggactccagccccaagcttcctgtcctgggacccaaaccctccacttcctcaa

SEQ ID NO: 327441 - DNA, 122 bp, Homo sapiens
tatcagctaaattttttttttgtactttaagaaatagggatagtcatagtgtttactgtacgcagttgttctgaggagaaattaggaaaaggtatgcagttacacaatgccacgtacaactc

SEQ ID NO: 327442 - DNA, 122 bp, Homo sapiens
gagggaggtgggggggtcagccccccgcccggccagccgcccggtccgggaggtgaggggcgcctctcctcagccgcccctactgggacgtgaggagcccctctgcccggccaccaccccgt

SEQ ID NO: 327443 - DNA, 122 bp, Homo sapiens
ccccaccccagctttaggctacagatgaagatcagggaggctggaggctcaagctccagacgcctgagtggccagtgcatggcccttctcaatttctgggtgcacaaggagccaccatcagt

SEQ ID NO: 327444 - DNA, 122 bp, Homo sapiens
agaacaaaggccggcgcagagcgagaacctgattggtgcccggtcctcactcgtgtcctccgggccccagagataacttgcatcgcctactggcaaggagctctgtgctcactggagcccag

SEQ ID NO: 327445 - DNA, 122 bp, Homo sapiens
tccttctgcaacaggccctcttcccctcctcagtggagtttgcatttccctcttcccctgcgtggggcatgatatgcacaagcctggcatctgtatggctgggagggcactggatgtgtgtg

SEQ ID NO: 327446 - DNA, 122 bp, Homo sapiens
tcccacgacttttcgcgggaggcgagtgcccggggcagcagcacgagtgggatgtgaggtcgcccagagtcctgcgctagtcctgaatagccggcacgcgcagctactaggtttgcaatccc

SEQ ID NO: 327447 - DNA, 122 bp, Homo sapiens
gtgatgccgcgtgtctgtcgagcacctgctgtgctgggcaccatcgtagttctagggcctcgtcagtgaagcagaaaatccctgctctcgtggagctcacgtgctgggggagacaaacagga

SEQ ID NO: 327448 - DNA, 122 bp, Homo sapiens
ttatagctcttaaggcagagcgtctggagttgttcgttcctcccggtggactcgtggcctcgctgggctcaggagtgaagctgcagatcttcgcggtgagtgttacagctcataaaagcagc

SEQ ID NO: 327449 - DNA, 122 bp, Homo sapiens
agaaatgtactaacgcacctcaagactcctaaggtgtttccaagtcccccctccaactttcgtgtccaggtcacgctgccccgccctcggacaatgagagggtgtgtcaagatgctctttgc

SEQ ID NO: 327450 - DNA, 122 bp, Homo sapiens
ggccaagtctctccagaaactcatcccattcgttctcagatggaaggggacccacacccacgacaagcctccgggtttgcttaatgactcagacagcgagggtgctcggtaagccccaccag

SEQ ID NO: 327451 - DNA, 122 bp, Homo sapiens
ggctgccgggccagggagaggcaccccctccctctgccctttggcctgaaacaggccctgcgccccaagtcatgagggaagcttccagactgactcaggctcaggctggcccctgatcccca

SEQ ID NO: 327452 - DNA, 122 bp, Homo sapiens
aaccggggctgcgcatggtgcttgcgggccagcccgagttccgggtgggtgtgggctccgcgggccctgcactcagagcggccggctggccctgccggccccaggcaatgaggggcttagca

SEQ ID NO: 327453 - DNA, 122 bp, Homo sapiens
agcctgggcaacatggcaaaaccccatctctatgaaaaaatacaaaaattagctgggtgtcgtggcgcatgcccatattcccagctaattggggggctaagctgggaggattgcttaaacct

SEQ ID NO: 327454 - DNA, 122 bp, Homo sapiens
tcaccattgctttccttcagactgaccatttcctttccgttgcattatccaaatataccacgttgttgattcctcagctccttaagagtctgttcaaatatcacctattcagtaatgccttt

SEQ ID NO: 327455 - DNA, 122 bp, Homo sapiens
catctataaaaacctcgataatcgtgcctcgtttcctgctttcactgcgtgccatgccctcggtgattagcgtgtttttcagactaacagcaacagtatgttgaactgaatgccacctcctg

SEQ ID NO: 327456 - DNA, 122 bp, Homo sapiens
cacgagcctcccacgacctcagcatcaccactgcctccaaaatgcacggtgacagctgtgcgcggtggctcaggcctgtaatccaagcactttgggaggccgaggcgggaggactgcttgag

SEQ ID NO: 327457 - DNA, 122 bp, Homo sapiens
ggacaagccaacaagtgcctgttccggtttcacagctgctggcaggagacatgaagctcccgggtcagagacaaagaatgccaccactcccagctcagcaagcacaggagtgtcactgcccc

SEQ ID NO: 327458 - DNA, 122 bp, Homo sapiens
tgcgcggcgggttctcgctgtgggccccccgagtccctcaccagcccggccctggaaaatcgggggtccccagagcaccgccagagtgaaaactcacctgcggcggcccaagctcctcggga

SEQ ID NO: 327459 - DNA, 122 bp, Homo sapiens
tgctggattagtgaggacaaggggatatacaatgggatttcacacatcctccatcccacccgccagcccaaccctatactagacgggtttgctcacccaacttcccttccgagaccatagtc

SEQ ID NO: 327460 - DNA, 122 bp, Homo sapiens
aaggaaatggcgtagctgggcttcgccaggcgcggaatgcaggttatcttcctggagttccggcttggaatttattggaaatgcaaattctcaagccccaccccagacctcctgaatccaga

SEQ ID NO: 327461 - DNA, 122 bp, Homo sapiens
ttgggttctccgctgaccccagatgagatgcctggtacctcatggtcaagtcccctccaacggggactcctcagaggcttggtcccagttgctcaggctgccatctgcctcctcaggccaga

SEQ ID NO: 327462 - DNA, 122 bp, Homo sapiens
gtcttctgggctgatgtgataggcccggaattgggggcgtggcccaagcgttgacaggcgcggggctgggcttaggccgagccccaggatttcaaatgctgacaaacaccaaacacggttga

SEQ ID NO: 327463 - DNA, 122 bp, Homo sapiens
cagctgggttcagcacaaatgctgctattttccaccacaaaaccaagagggtcagtcaggcggaacaccgggtttcctcctgatcatcattctaagacacctcctgcttgtcttcctgtcca

SEQ ID NO: 327464 - DNA, 122 bp, Homo sapiens
cagcgtggaattggtggaccccattgaactcttaccaatgactcgatggttttattccgtcgactgattgttatataactcgagtccagggcgactgttacctcttggtatctgctctgagg

SEQ ID NO: 327465 - DNA, 122 bp, Homo sapiens
cctcgtgcccaacctgcgctcaggcgagtgccagctggcggcggtggacggtgggcaggccggcagcttcctctactgcaatgcccggagcccactgggcagccgtgtgcaggcgctcagca

SEQ ID NO: 327466 - DNA, 122 bp, Homo sapiens
ggggcgctccagagcagccccggtgcccacgtctcatcgcagccctctggcaggacagcgcgcgtctaaactaagccgaggcgcacttcgctaaggggacctctccgtttggacaatcccga

SEQ ID NO: 327467 - DNA, 122 bp, Homo sapiens
tgccaatgataatgctccagtgttcagtcaagacgtatacagggtgagcctttcagaaaacgtgtacccggggaccacggtgctacaggtgactgccacggaccaggatgagggtgtcaatg

SEQ ID NO: 327468 - DNA, 122 bp, Homo sapiens
ggcttcttgccagggcaggaattttgtctgcttcatgtgttttctaggttcacacttgaccgtggtttggcataggaagaatatttctagactgttttgtgctgcatatcacccaaaaaaaa

SEQ ID NO: 327469 - DNA, 122 bp, Homo sapiens
ccttcagtggcctgactttttctgcgtgggacccagaatgtcgcttgaggatgggacccccgcagacctccacgcgctgccacgcaaacggcctcggccgagagcattcgctttccagatga

SEQ ID NO: 327470 - DNA, 122 bp, Homo sapiens
caagcccagggacctccttagggggatgaaggctggaagagacctgggggctcagacttacggggaaggaacctaggctattccttgtgcatcccaggattttacccatgaacgtgaacatg

SEQ ID NO: 327471 - DNA, 122 bp, Homo sapiens
tacagaagtttgaggagggcggggccggctccgagcccccggagccctacgggactcccccgattctactgaggagtccccgccagctccgtgcactcctgcaacactccccaccccacccg

SEQ ID NO: 327472 - DNA, 122 bp, Homo sapiens
gcctacctggagggcacgtgcgtggagaggctcgcagacacctggagaacgggaaggagacgctgcagctcacgggtaccagggaacacaagacgcctccctgatcgcctgtagatctcctg

SEQ ID NO: 327473 - DNA, 122 bp, Homo sapiens
cctttagcatccccttcagcctttctcttggtcatggtggcggcgacgatggcattgagacgtaggcactgggcgcaggatgcagcggcgcgcgggctttgctcggttcggggatcgttctc

SEQ ID NO: 327474 - DNA, 122 bp, Homo sapiens
tggcggaggcgcgcgcgcagtcccaccgctctgagtcgctgagtgaagcggcgcctcgcgcgtcaggcaatctggccaattgcgcatcttttccgcctaccgcacggccccgcccctgccac

SEQ ID NO: 327475 - DNA, 122 bp, Homo sapiens
cccgaacgctcagtaaaccccagccgacccgcaccacagaacttcccgacccgggaactccgcttgtgtgtgaaccaagttaacactcaggttcctgccatattcccagcctccttctcttc

SEQ ID NO: 327476 - DNA, 122 bp, Homo sapiens
tggctgcccccagcagcgcttacctgtccatccaggcatgcaggagcactgtgggcggcccgaggcctggatgtggcagcggccccttttggaacagaaggagggaggacaagggtcttcaa

SEQ ID NO: 327477 - DNA, 122 bp, Homo sapiens
gacgttgccgtgtgagcccagcagtcgcgggcaacaggggatttttcaagggggaaatgacgattagaagagagaatcatctaaatatcaaagtgacacatggggagacttggaaaaaatat

SEQ ID NO: 327478 - DNA, 122 bp, Homo sapiens
tggtcccgacgcgcgcgtcgactcttccagccttgagaggctagcggcgcgcgctcccaacggcccagtgtgaggcgcgccggctggttcaactccggccgccgcgccgaaaccagcagcgg

SEQ ID NO: 327479 - DNA, 122 bp, Homo sapiens
gcaacgggcgttttcgtttgtgacgccagggagcgtgaggacgtggggcttccgtgaatgcgcagtgggtgcgtcggccacgaccttttggccaggttagggagggggcgacgctgagatgg

SEQ ID NO: 327480 - DNA, 122 bp, Homo sapiens
catccgggagagccccgcggagcctggcgacaggaactgctccagtcacggtcagcactgcggccatcagcaccagcactggcatgcagtccccggtcatgtctgtgtcacagagagaaagg

SEQ ID NO: 327481 - DNA, 122 bp, Homo sapiens
catgtctttggcttcccatctgctggggagtgtgcccagtggcactgcggaaacccaggccggacctcacaattgcaggatgagcctcctcccttctatccggcaggtggccttctccaggc

SEQ ID NO: 327482 - DNA, 122 bp, Homo sapiens
ttattcatccttcaaaatccatttaaggccaggcacggtggatcatgcctgtaatcccagcgctttggaaggccaagtcaggtggatgacttgagatcaggagttcaagaccagcctggcca

SEQ ID NO: 327483 - DNA, 122 bp, Homo sapiens
tgggcaccttgctgctgcacatataaggcgggaggctgttgccaactcttcagagccccacgaaggaccagaacaagacagagtgcctcctgccgatccaaacatgagccgcctgcccgtcc

SEQ ID NO: 327484 - DNA, 122 bp, Homo sapiens
agatctggccggccctggcgacggggctgcaaacgcttcgtagacctcagaacagcgcaacggcggaccggcggaccggcacgaaacatagcagccccaccacaaacatttcccttcttaat

SEQ ID NO: 327485 - DNA, 122 bp, Homo sapiens
cttttccagcagccaagtaggagcctcactgccttgacccccatttccggtacagctcctcgctctgaccttgtccttcacctaggtcgaggacgcgtgtgctcgcacacatcccctcatgc

SEQ ID NO: 327486 - DNA, 122 bp, Homo sapiens
agcctcaggggcacaggggtgctggggtctcagggagggcgacagactctttcagatgagcgaggctccaccaaagatcttgggggctatggaacttcagggatccctgaggcctcggaggc

SEQ ID NO: 327487 - DNA, 122 bp, Homo sapiens
atggcctttgtcaggaagggaaggggctcaacacagtgatggactgatccagatggctcccggggatgaatgtgggtgggtagcttctgtcagtatcaatgcttagagaaatatcctttcct

SEQ ID NO: 327488 - DNA, 122 bp, Homo sapiens
gacaactcatggcggtggcggcagcagctgcttgggcatggtgcagtggtgactgagctacgagcctggcggcgggtgttcgccgagctccggtccccgcgtgtctcccagaaggcggtgaa

SEQ ID NO: 327489 - DNA, 122 bp, Homo sapiens
ttatgctgggcctagctcgctcgcaattccttaaagacaaagggcagcagagagagcccgcgacggggcctggcctacccgggttccacgcacctcctgcacaaactcgggcaagattgctt

SEQ ID NO: 327490 - DNA, 122 bp, Homo sapiens
aggaggttagaaatctgtcctcagggacaagttctcaagctttagaatgtggactcatgacgtcattttggtccctggaggcattcttctctagctgtatgtgggaagctctgtgttccagg

SEQ ID NO: 327491 - DNA, 122 bp, Homo sapiens
cggcgttagcgccgtaccgagtggctgcagaactgtgggcagctacgacgctgccaggcccgtcctgattggttcagaggacgaagaggtgggcccagaggaaagcccggagctccgggaaa

SEQ ID NO: 327492 - DNA, 122 bp, Homo sapiens
ctccgttgcctcctttgcagcactgccatctaaaccatagaggggctgttctactcgtcgcggtaagggattggataaggaatgttgcagtgaggatcgtgcaactggtggaacacttctgc

SEQ ID NO: 327493 - DNA, 122 bp, Homo sapiens
gagcctgcagctggggtgaggcccggatggacaggaacggggacggcagcttccaggctccgtgtccccgagtagccgtgctgcgggaccgctcctgccgggcgctcaggggacagtgcagc

SEQ ID NO: 327494 - DNA, 122 bp, Homo sapiens
gcctctaggtgcttcacacagggacccctgcccattatctctatgttgctcaagcaatttcgagcggtcactacaagaaaaaaccattacatggatatttctgttttcacaagatatgctct

SEQ ID NO: 327495 - DNA, 122 bp, Homo sapiens
caaaagtatctatagtgacactgaaaccacagagaagaacacagactctggaaccaggtgcgcgggggttctgggaagataagtaggaactcaccagggcacagagatgggggtcacctagg

SEQ ID NO: 327496 - DNA, 122 bp, Homo sapiens
tgactgcttggcttccagctgcccacgcgcaggtgggcgcacagggagcccttcccaccccgcaaccgctggcaggcttaggggaatcagcctccatcacagctctctgttccttttgggtg

SEQ ID NO: 327497 - DNA, 122 bp, Homo sapiens
ggctgtctcggatctattacaacatattccacattcagctccagctggcggatgaccagacggagtcttgctctgttgcccaggctggagtgcagtggcctgatcttggctcactgcaacct

SEQ ID NO: 327498 - DNA, 122 bp, Homo sapiens
catgcggtctgtagctcgggtgttttctgagaacccggttgcggtctatccagcggcgatcgagaaacgagccctttgcacagggaaccgctggtccccgaacgccggcggtgaccgtcagc

SEQ ID NO: 327499 - DNA, 122 bp, Homo sapiens
catcagctctgcaacacctgagtcctggatggcgggagatgatggcttaagatatctgggcgcaaagcctgaggccctgcctgtaactccgactccctcaagggcagctgagagggaggact

SEQ ID NO: 327500 - DNA, 122 bp, Homo sapiens
tcctatgtgtggcctcatgaaagacccagccaggccattattgaagatgccagcagctgacgctgctgattcccgcagtgcgggttggggctgctgaaatgtgcggccccctctgtagggtc

SEQ ID NO: 327501 - DNA, 122 bp, Homo sapiens
gtgggtctggcctgttgggggctgaggagctcgagggtcagggcgcccagtgctggaccgcgcaccctcggcctgggctccttgccggtgcttgcgcgtgcaaggctagctctttccccgcc

SEQ ID NO: 327502 - DNA, 122 bp, Homo sapiens
gggcctggccctggtctttgtcctcacaaacctatttccccagataccttcgggacggcccggacacgccttacattaggctcatgatgtgaaactttgaattccttcacttcctttttcaa

SEQ ID NO: 327503 - DNA, 122 bp, Homo sapiens
ccatcccaatctctgagggtatctgctattagtctctcatccccaaaggtgtgggtgactcgcaaacatcattttcaagaaatcacaaaattttggtaaaaggcacctttaaaattatcaaa

SEQ ID NO: 327504 - DNA, 122 bp, Homo sapiens
tcataccgccagcgcgacagccacctggtgccaactcactgagccgcctgccgctggggccgccgcaccctgcaccttggaccggcatccgtagccatggacagaggtccctggtcttccct

SEQ ID NO: 327505 - DNA, 122 bp, Homo sapiens
cagggagaggtctggggccaggaccccagctccaccccgcccccttcacccctggcattccgggaccctcagtatcctcaactgcaaggtgggtggcagtggtcccaggcggagacaatgct

SEQ ID NO: 327506 - DNA, 122 bp, Homo sapiens
caagcgaccgtgagctgcgatgcacacagtagtgagtgggtggcacggggcccgcgggcacgaacagccgaagagcggagaagactgggagcataaccgctgggcagcgggcagcggacagc

SEQ ID NO: 327507 - DNA, 122 bp, Homo sapiens
ggtgcatacctgtggtcccagctacatgggaggctgaggtgggagaatcacttgaccccacgagtttgagatggcagtgagcagtgttcacaccactgcactccagcctgggtgacagagct

SEQ ID NO: 327508 - DNA, 122 bp, Homo sapiens
cctccgcgccgcggctgacctgtctcccggtggagcccgggggcctgcaggagcccaaagcgccggaccctcccactgccggcctggggcctggccgagggcacggcgaggaagtccctcaa

SEQ ID NO: 327509 - DNA, 122 bp, Homo sapiens
cttccccctaggttccagaacgggaagttgcttccagagttttttatgtcccctctacggcggcagatgccgcagagttcggctcccgcatggggtccagccaccgtcctcagaggggcttc

SEQ ID NO: 327510 - DNA, 122 bp, Homo sapiens
tttggtgcatgtgtgtgtgcgtgtgtgtgtgtgtgtgtgtgtgtgtagcactggccacgccggatactgaactatgcattgaggatgcaaacgtgatctcagaggagctggtgagatcactg

SEQ ID NO: 327511 - DNA, 122 bp, Homo sapiens
ctgtgtcccctggttgtggcatacacacgtgtgggtataaaatcgtaaatcctatgtagtcgcgtagtgcatgcgcagaaggcttagacacgaaatgtcatttcagcaatgtgcctagagaa

SEQ ID NO: 327512 - DNA, 122 bp, Homo sapiens
cctcccaccctgcacagccgcggctgcggtgccgcgggtccccttgcagccgcccgggagcgaccggccctgcgcaccccagccctgccccgcgcccgcccgcctgcctgcctgccttacca

SEQ ID NO: 327513 - DNA, 122 bp, Homo sapiens
gctctgctgcccgggatttccccagaacctgcgccgcgcgagaaggagcctgggagcatccgcccacactgcccggacagtcggctcgactcggtgccctcggccccagccgggctccgctc

SEQ ID NO: 327514 - DNA, 122 bp, Homo sapiens
agccgcgacccccatggcttctttggccggagcgggcagaggccgaagggatcggggtgacggtggagggggcgggcggagcagtggcggcccctcccccgcggagccgccggccgctcggg

SEQ ID NO: 327515 - DNA, 122 bp, Homo sapiens
aaatccgatatagggagaaagcacacacctttagagggcggctaaatcaaaagaatctcccgttgttttgagtcatcttttcctttttggctcactgcactcacttgggtaacagctgctct

SEQ ID NO: 327516 - DNA, 122 bp, Homo sapiens
agataaagacctccagcagatctgagcacacaattccttcagtaaacattgaacacctgccgtttggtcaagcatttctaggcactggagattcaaagtattcacatattccttttctttat

SEQ ID NO: 327517 - DNA, 122 bp, Homo sapiens
atgactccctcccctcccaacgtgtttttcaaatccaccaatgggcacacagcttaggctcgaaccagccaatcggaatgcggagtcaccgggaaatttaaatcgcgccggccggctgcacg

SEQ ID NO: 327518 - DNA, 122 bp, Homo sapiens
accccctccctcaccctgctcctcggtcctagcccgggctttttctaactggggtggccccgcccagaattcccgcccctgccctgccggccaatcagagcagggccctcccgagggccccc

SEQ ID NO: 327519 - DNA, 122 bp, Homo sapiens
gatccacactcaccctgtggttcctggaccagaagcctgttagaaatgcagaatccaggccgggtgcggtggctcatgcctgtaattccagcactttgggaggccgaggtaggcggatcacc

SEQ ID NO: 327520 - DNA, 122 bp, Homo sapiens
cgcatcccctccccctaaatgacacagaagattccagcgtaggggaagggccacgaaacccgcagggcacacgacgccgggggccggagggagcaccgcctacctccctgatcaagccccgc

SEQ ID NO: 327521 - DNA, 122 bp, Homo sapiens
acggacagtgagccctggcgctcgctgccctgcgccttaatttgctggcggcggcgatcccggaggcccgcagccagtcagcgccgtctcacgtcaccgcttcctgattccgccgccggggg

SEQ ID NO: 327522 - DNA, 122 bp, Homo sapiens
ccttgtgtgtgttgggggtggaggtgaagggtgcaggagaaggatgggtactggcaaagtcgctactcactgagcaaattttcaagcgggtgcctttcccaattttgttgagcctctgataa

SEQ ID NO: 327523 - DNA, 122 bp, Homo sapiens
gcttctttaactgaaaactcaaaacactgtctccaaaataatctctctcaaagactctttcgttcatttgaacctttagaaatccaccctccttgcatccattactacccagctttatcttc

SEQ ID NO: 327524 - DNA, 122 bp, Homo sapiens
ataatctgaagaggctgccagagcctgggcacctggtggagaggagaggggggcaaaacccgcgctgcttcctgggcttgtgtgctctgaatggcacaggaatggctgtcttgctcttatct

SEQ ID NO: 327525 - DNA, 122 bp, Homo sapiens
tgaagttggtcatttaggccgacagctaaagaactgttctgctcagctgtttcatccattcgacactagatcgtgcagtgggctggaagagaattagaaaacgagtaacaggaggcttcgag

SEQ ID NO: 327526 - DNA, 122 bp, Homo sapiens
cccgtgatctcgaggacaggtccgcctgcgtgcccgagggctgttctgtcatcggagggtcgttcccgtcaggagcagaacccggcagccgcaggggttgcctgggggcatgtatttctcgg

SEQ ID NO: 327527 - DNA, 122 bp, Homo sapiens
gctgctgttgcaccaaaaatattgggcacaggaactgaccaagcctcaccctcatcctaacgacactggatgttttcagttttccaagtggaaaattccaagccctcagaagtacatgggac

SEQ ID NO: 327528 - DNA, 122 bp, Homo sapiens
cccagaccgccagggcgcgcgtctcccatgccaccgacgtgctgggttgtgaccctggggcgcacccttgccccaccctgtgccgccgcgttgctcaagtgttcctgggagcctagaagtac

SEQ ID NO: 327529 - DNA, 122 bp, Homo sapiens
ggactgaggaacagggctgggccaggcggcttttgccgtcacatggctgatttgcatacacgggctcggccgcgcggactccgccgggctcgcgacttccagctcgcaggcggcggggatcg

SEQ ID NO: 327530 - DNA, 122 bp, Homo sapiens
gtgtccaaaactgcctcaggaggcaggaccttcgggctgtgcccggggaaaggcaaggtccggcccatccccaggcacctcacaggccccaggaaaggcccagccaccgaagccgcctgtgg

SEQ ID NO: 327531 - DNA, 122 bp, Homo sapiens
aagcacagaagaaacgcggggcaagcggccgctgccattggggacctggggcacaggggacgggagtcggggtcgaggcggatatgggcggaggaatcgcctggtgcctcacattcaggcta

SEQ ID NO: 327532 - DNA, 122 bp, Homo sapiens
ggtcagtccttcttgggcctggaggttagcagtcaagtttctctgctttcactgctcgctcgctctctcctgcaatgattgatgatcactccgtggatagagaggcacactgtcagaggtga

SEQ ID NO: 327533 - DNA, 122 bp, Homo sapiens
cccctgaggtggagccccgcctagtgtactgctacccagtccggctggctgtgtctgcaccgcccatgcccagcgtggagatgcacatggagaacaacgtggtctgcatccggtataaggga

SEQ ID NO: 327534 - DNA, 122 bp, Homo sapiens
cactccccaccccaccctcctttttttactcatcttggaaaaggttagtctttcagtacacgttgctggtaagtagtttccaagttacgtgttgtcactgggttgaagtatatttgtgtgtg

SEQ ID NO: 327535 - DNA, 122 bp, Homo sapiens
cccctccgccgaccccgccgccgttgccgtagccgaaggcaccgcgggcgccgccagccccggagcccccgcagcagcagcagacgagcccccagatgcctacggccaggcagcccagcgcg

SEQ ID NO: 327536 - DNA, 122 bp, Homo sapiens
ggtactggaggtggcggacaagaatcagacccgggggaagggtgcacctggccacttcaccgcggtcccgcagggctctgggaaggcaggcctgcatctcccagcagctctgggctggccag

SEQ ID NO: 327537 - DNA, 122 bp, Homo sapiens
ctaacatcacctgcttcatccttgtttaatgactttggtgccctcaacatctctcagagacgaaaggtaggtgaaattgaaacttgaattaaactaaatggaatttagaagtgatgttggca

SEQ ID NO: 327538 - DNA, 122 bp, Homo sapiens
aaactcagctttctgttgcccaaataaatctgaagtggttcctgatgattgatacctttccgaggtcagtgttcagatgggaggctccggtgactcggaacagaggcagaaaggatgcgagg

SEQ ID NO: 327539 - DNA, 122 bp, Homo sapiens
tggatgcggctctgagtctccgtgtgtctttctgcttgttgctgtgtgcgggtgttcggccgcgatcacctttgtgtgtcttctgtctgtttaaacctcaggatggctcgcttcggggaggc

SEQ ID NO: 327540 - DNA, 122 bp, Homo sapiens
tatgtttgcttcccaattaatgaataacaagcaaaatagatcttatattacataccaactcggctattcatttaagggggtgatagccccttttcccgcccctctgcacaaagcttgcaggg

SEQ ID NO: 327541 - DNA, 122 bp, Homo sapiens
caggacgctgacagccaggcttcgcagccaggagtggtggcctgtctggctccgcactcacgggttcggacagttacagaattaacactcaagccctggggcttcccgcagcccccgggggg

SEQ ID NO: 327542 - DNA, 122 bp, Homo sapiens
gcctttgacaaagtgtacaaagccagagcctcttccgcgctcccaccccggcccccaccccgcccctccactgcggtaaaaaccacctcccgggcgctcgccccgccgcccgaagttgcatc

SEQ ID NO: 327543 - DNA, 122 bp, Homo sapiens
ggcctagaaggagaacggagttccgaacgacgaccggtagaacagttagcggccatcgggcggttggtcttagtgctactagaccttgctgctggaagagagaaatagtagaatgacaggcc

SEQ ID NO: 327544 - DNA, 122 bp, Homo sapiens
tccacataattggatacttatcaccaagtacagattttttgagcaggccccccatcaactcgtaaggcacactcagaaaaaccctagcactgggcccagtttaggctgacacgggaggtttt

SEQ ID NO: 327545 - DNA, 122 bp, Homo sapiens
aaactcccccttatagagccatcagatcctgttagacttatcactatcacgagaacagcacgggtaagacctgtccccatgattcagttacctcccactgggtccctcccacaacgcatggg

SEQ ID NO: 327546 - DNA, 122 bp, Homo sapiens
tcactgagatgggtggcagcaggggccggggatccccctattacgacagcggtcatgggacgctgactcactgccggccagaccacctgacctccgcggcgggaggagagggccctgccagg

SEQ ID NO: 327547 - DNA, 122 bp, Homo sapiens
tcgccctgggcctggctctgctgcatttgggcctgcatcttctccagcatctcttgcatgcggcgcagctgtgcagggcgagattgcaggcggtgacctggcgaagccagagggggacctgg

SEQ ID NO: 327548 - DNA, 122 bp, Homo sapiens
ctcgcgatgagtgttacagctcttaagttggtgcgtctggagtttgttccttctgatgttcggatgtgtccggagtttcttccttctggtgggttcgtggtctcgctggctcaggagtgaag
